United States Patent Application Publication US 2015/0232836 A1 - sequence listing, part 31

SEQ ID NO: 1177651 - DNA, 15 bp, Homo sapiens
cttcttccttcacca

SEQ ID NO: 1177652 - DNA, 15 bp, Homo sapiens
ccttcttccttcacc

SEQ ID NO: 1177653 - DNA, 15 bp, Homo sapiens
gccttcttccttcac

SEQ ID NO: 1177654 - DNA, 15 bp, Homo sapiens
tgccttcttccttca

SEQ ID NO: 1177655 - DNA, 15 bp, Homo sapiens
ctgccttcttccttc

SEQ ID NO: 1177656 - DNA, 15 bp, Homo sapiens
tctgccttcttcctt

SEQ ID NO: 1177657 - DNA, 15 bp, Homo sapiens
atctgccttcttcct

SEQ ID NO: 1177658 - DNA, 15 bp, Homo sapiens
aatctgccttcttcc

SEQ ID NO: 1177659 - DNA, 15 bp, Homo sapiens
aaatctgccttcttc

SEQ ID NO: 1177660 - DNA, 15 bp, Homo sapiens
aaaatctgccttctt

SEQ ID NO: 1177661 - DNA, 15 bp, Homo sapiens
taaaatctgccttct

SEQ ID NO: 1177662 - DNA, 15 bp, Homo sapiens
ttaaaatctgccttc

SEQ ID NO: 1177663 - DNA, 15 bp, Homo sapiens
tttaaaatctgcctt

SEQ ID NO: 1177664 - DNA, 15 bp, Homo sapiens
ttttaaaatctgcct

SEQ ID NO: 1177665 - DNA, 15 bp, Homo sapiens
tttttaaaatctgcc

SEQ ID NO: 1177666 - DNA, 15 bp, Homo sapiens
gtttttaaaatctgc

SEQ ID NO: 1177667 - DNA, 15 bp, Homo sapiens
agtttttaaaatctg

SEQ ID NO: 1177668 - DNA, 15 bp, Homo sapiens
cagtttttaaaatct

SEQ ID NO: 1177669 - DNA, 15 bp, Homo sapiens
tcagtttttaaaatc

SEQ ID NO: 1177670 - DNA, 15 bp, Homo sapiens
ttcagtttttaaaat

SEQ ID NO: 1177671 - DNA, 15 bp, Homo sapiens
gttcagtttttaaaa

SEQ ID NO: 1177672 - DNA, 15 bp, Homo sapiens
tgttcagtttttaaa

SEQ ID NO: 1177673 - DNA, 15 bp, Homo sapiens
atgttcagtttttaa

SEQ ID NO: 1177674 - DNA, 15 bp, Homo sapiens
aatgttcagttttta

SEQ ID NO: 1177675 - DNA, 15 bp, Homo sapiens
gaatgttcagttttt

SEQ ID NO: 1177676 - DNA, 15 bp, Homo sapiens
tgaatgttcagtttt

SEQ ID NO: 1177677 - DNA, 15 bp, Homo sapiens
ttgaatgttcagttt

SEQ ID NO: 1177678 - DNA, 15 bp, Homo sapiens
tttgaatgttcagtt

SEQ ID NO: 1177679 - DNA, 15 bp, Homo sapiens
ttttgaatgttcagt

SEQ ID NO: 1177680 - DNA, 15 bp, Homo sapiens
tttttgaatgttcag

SEQ ID NO: 1177681 - DNA, 15 bp, Homo sapiens
atttttgaatgttca

SEQ ID NO: 1177682 - DNA, 15 bp, Homo sapiens
aatttttgaatgttc

SEQ ID NO: 1177683 - DNA, 15 bp, Homo sapiens
aaatttttgaatgtt

SEQ ID NO: 1177684 - DNA, 15 bp, Homo sapiens
taaatttttgaatgt

SEQ ID NO: 1177685 - DNA, 15 bp, Homo sapiens
ctaaatttttgaatg

SEQ ID NO: 1177686 - DNA, 15 bp, Homo sapiens
tctaaatttttgaat

SEQ ID NO: 1177687 - DNA, 15 bp, Homo sapiens
gtctaaatttttgaa

SEQ ID NO: 1177688 - DNA, 15 bp, Homo sapiens
tgtctaaatttttga

SEQ ID NO: 1177689 - DNA, 15 bp, Homo sapiens
atgtctaaatttttg

SEQ ID NO: 1177690 - DNA, 15 bp, Homo sapiens
gatgtctaaattttt

SEQ ID NO: 1177691 - DNA, 15 bp, Homo sapiens
tgatgtctaaatttt

SEQ ID NO: 1177692 - DNA, 15 bp, Homo sapiens
atgatgtctaaattt

SEQ ID NO: 1177693 - DNA, 15 bp, Homo sapiens
gatgatgtctaaatt

SEQ ID NO: 1177694 - DNA, 15 bp, Homo sapiens
tgatgatgtctaaat

SEQ ID NO: 1177695 - DNA, 15 bp, Homo sapiens
ttgatgatgtctaaa

SEQ ID NO: 1177696 - DNA, 15 bp, Homo sapiens
tttgatgatgtctaa

SEQ ID NO: 1177697 - DNA, 15 bp, Homo sapiens
ctttgatgatgtcta

SEQ ID NO: 1177698 - DNA, 15 bp, Homo sapiens
cctttgatgatgtct

SEQ ID NO: 1177699 - DNA, 15 bp, Homo sapiens
ccctttgatgatgtc

SEQ ID NO: 1177700 - DNA, 15 bp, Homo sapiens
tccctttgatgatgt

SEQ ID NO: 1177701 - DNA, 15 bp, Homo sapiens
atccctttgatgatg

SEQ ID NO: 1177702 - DNA, 15 bp, Homo sapiens
tatccctttgatgat

SEQ ID NO: 1177703 - DNA, 15 bp, Homo sapiens
atatccctttgatga

SEQ ID NO: 1177704 - DNA, 15 bp, Homo sapiens
aatatccctttgatg

SEQ ID NO: 1177705 - DNA, 15 bp, Homo sapiens
aaatatccctttgat

SEQ ID NO: 1177706 - DNA, 15 bp, Homo sapiens
gaaatatccctttga

SEQ ID NO: 1177707 - DNA, 15 bp, Homo sapiens
ggaaatatccctttg

SEQ ID NO: 1177708 - DNA, 15 bp, Homo sapiens
aggaaatatcccttt

SEQ ID NO: 1177709 - DNA, 15 bp, Homo sapiens
gaggaaatatccctt

SEQ ID NO: 1177710 - DNA, 15 bp, Homo sapiens
tgaggaaatatccct

SEQ ID NO: 1177711 - DNA, 15 bp, Homo sapiens
ttgaggaaatatccc

SEQ ID NO: 1177712 - DNA, 15 bp, Homo sapiens
cttgaggaaatatcc

SEQ ID NO: 1177713 - DNA, 15 bp, Homo sapiens
tcttgaggaaatatc

SEQ ID NO: 1177714 - DNA, 15 bp, Homo sapiens
ctcttgaggaaatat

SEQ ID NO: 1177715 - DNA, 15 bp, Homo sapiens
gctcttgaggaaata

SEQ ID NO: 1177716 - DNA, 15 bp, Homo sapiens
tgctcttgaggaaat

SEQ ID NO: 1177717 - DNA, 15 bp, Homo sapiens
ttgctcttgaggaaa

SEQ ID NO: 1177718 - DNA, 15 bp, Homo sapiens
cttgctcttgaggaa

SEQ ID NO: 1177719 - DNA, 15 bp, Homo sapiens
acttgctcttgagga

SEQ ID NO: 1177720 - DNA, 15 bp, Homo sapiens
cacttgctcttgagg

SEQ ID NO: 1177721 - DNA, 15 bp, Homo sapiens
ccacttgctcttgag

SEQ ID NO: 1177722 - DNA, 15 bp, Homo sapiens
tccacttgctcttga

SEQ ID NO: 1177723 - DNA, 15 bp, Homo sapiens
ctccacttgctcttg

SEQ ID NO: 1177724 - DNA, 15 bp, Homo sapiens
actccacttgctctt

SEQ ID NO: 1177725 - DNA, 15 bp, Homo sapiens
aactccacttgctct

SEQ ID NO: 1177726 - DNA, 15 bp, Homo sapiens
aaactccacttgctc

SEQ ID NO: 1177727 - DNA, 15 bp, Homo sapiens
aaaactccacttgct

SEQ ID NO: 1177728 - DNA, 15 bp, Homo sapiens
aaaaactccacttgc

SEQ ID NO: 1177729 - DNA, 15 bp, Homo sapiens
taaaaactccacttg

SEQ ID NO: 1177730 - DNA, 15 bp, Homo sapiens
ctaaaaactccactt

SEQ ID NO: 1177731 - DNA, 15 bp, Homo sapiens
gctaaaaactccact

SEQ ID NO: 1177732 - DNA, 15 bp, Homo sapiens
ggctaaaaactccac

SEQ ID NO: 1177733 - DNA, 15 bp, Homo sapiens
cggctaaaaactcca

SEQ ID NO: 1177734 - DNA, 15 bp, Homo sapiens
ccggctaaaaactcc

SEQ ID NO: 1177735 - DNA, 15 bp, Homo sapiens
accggctaaaaactc

SEQ ID NO: 1177736 - DNA, 15 bp, Homo sapiens
caccggctaaaaact

SEQ ID NO: 1177737 - DNA, 15 bp, Homo sapiens
tcaccggctaaaaac

SEQ ID NO: 1177738 - DNA, 15 bp, Homo sapiens
gtcaccggctaaaaa

SEQ ID NO: 1177739 - DNA, 15 bp, Homo sapiens
ggtcaccggctaaaa

SEQ ID NO: 1177740 - DNA, 15 bp, Homo sapiens
aggtcaccggctaaa

SEQ ID NO: 1177741 - DNA, 15 bp, Homo sapiens
aaggtcaccggctaa

SEQ ID NO: 1177742 - DNA, 15 bp, Homo sapiens
caaggtcaccggcta

SEQ ID NO: 1177743 - DNA, 15 bp, Homo sapiens
acaaggtcaccggct

SEQ ID NO: 1177744 - DNA, 15 bp, Homo sapiens
tacaaggtcaccggc

SEQ ID NO: 1177745 - DNA, 15 bp, Homo sapiens
ttacaaggtcaccgg

SEQ ID NO: 1177746 - DNA, 15 bp, Homo sapiens
tttacaaggtcaccg

SEQ ID NO: 1177747 - DNA, 15 bp, Homo sapiens
ctttacaaggtcacc

SEQ ID NO: 1177748 - DNA, 15 bp, Homo sapiens
gctttacaaggtcac

SEQ ID NO: 1177749 - DNA, 15 bp, Homo sapiens
tgctttacaaggtca

SEQ ID NO: 1177750 - DNA, 15 bp, Homo sapiens
ctgctttacaaggtc

SEQ ID NO: 1177751 - DNA, 15 bp, Homo sapiens
cctgctttacaaggt

SEQ ID NO: 1177752 - DNA, 15 bp, Homo sapiens
tcctgctttacaagg

SEQ ID NO: 1177753 - DNA, 15 bp, Homo sapiens
ttcctgctttacaag

SEQ ID NO: 1177754 - DNA, 15 bp, Homo sapiens
tttcctgctttacaa

SEQ ID NO: 1177755 - DNA, 15 bp, Homo sapiens
ctttcctgctttaca

SEQ ID NO: 1177756 - DNA, 15 bp, Homo sapiens
cctttcctgctttac

SEQ ID NO: 1177757 - DNA, 15 bp, Homo sapiens
gcctttcctgcttta

SEQ ID NO: 1177758 - DNA, 15 bp, Homo sapiens
ggcctttcctgcttt

SEQ ID NO: 1177759 - DNA, 15 bp, Homo sapiens
tggcctttcctgctt

SEQ ID NO: 1177760 - DNA, 15 bp, Homo sapiens
ctggcctttcctgct

SEQ ID NO: 1177761 - DNA, 15 bp, Homo sapiens
cctggcctttcctgc

SEQ ID NO: 1177762 - DNA, 15 bp, Homo sapiens
acctggcctttcctg

SEQ ID NO: 1177763 - DNA, 15 bp, Homo sapiens
aacctggcctttcct

SEQ ID NO: 1177764 - DNA, 15 bp, Homo sapiens
gaacctggcctttcc

SEQ ID NO: 1177765 - DNA, 15 bp, Homo sapiens
ggaacctggcctttc

SEQ ID NO: 1177766 - DNA, 15 bp, Homo sapiens
gggaacctggccttt

SEQ ID NO: 1177767 - DNA, 15 bp, Homo sapiens
tgggaacctggcctt

SEQ ID NO: 1177768 - DNA, 15 bp, Homo sapiens
ctgggaacctggcct

SEQ ID NO: 1177769 - DNA, 15 bp, Homo sapiens
gctgggaacctggcc

SEQ ID NO: 1177770 - DNA, 15 bp, Homo sapiens
ggctgggaacctggc

SEQ ID NO: 1177771 - DNA, 15 bp, Homo sapiens
tggctgggaacctgg

SEQ ID NO: 1177772 - DNA, 15 bp, Homo sapiens
ttggctgggaacctg

SEQ ID NO: 1177773 - DNA, 15 bp, Homo sapiens
attggctgggaacct

SEQ ID NO: 1177774 - DNA, 15 bp, Homo sapiens
cattggctgggaacc

SEQ ID NO: 1177775 - DNA, 15 bp, Homo sapiens
gcattggctgggaac

SEQ ID NO: 1177776 - DNA, 15 bp, Homo sapiens
tgcattggctgggaa

SEQ ID NO: 1177777 - DNA, 15 bp, Homo sapiens
ttgcattggctggga

SEQ ID NO: 1177778 - DNA, 15 bp, Homo sapiens
attgcattggctggg

SEQ ID NO: 1177779 - DNA, 15 bp, Homo sapiens
cattgcattggctgg

SEQ ID NO: 1177780 - DNA, 15 bp, Homo sapiens
ccattgcattggctg

SEQ ID NO: 1177781 - DNA, 15 bp, Homo sapiens
tccattgcattggct

SEQ ID NO: 1177782 - DNA, 15 bp, Homo sapiens
atccattgcattggc

SEQ ID NO: 1177783 - DNA, 15 bp, Homo sapiens
catccattgcattgg

SEQ ID NO: 1177784 - DNA, 15 bp, Homo sapiens
ccatccattgcattg

SEQ ID NO: 1177785 - DNA, 15 bp, Homo sapiens
cccatccattgcatt

SEQ ID NO: 1177786 - DNA, 15 bp, Homo sapiens
acccatccattgcat

SEQ ID NO: 1177787 - DNA, 15 bp, Homo sapiens
aacccatccattgca

SEQ ID NO: 1177788 - DNA, 15 bp, Homo sapiens
caacccatccattgc

SEQ ID NO: 1177789 - DNA, 15 bp, Homo sapiens
gcaacccatccattg

SEQ ID NO: 1177790 - DNA, 15 bp, Homo sapiens
tgcaacccatccatt

SEQ ID NO: 1177791 - DNA, 15 bp, Homo sapiens
gtgcaacccatccat

SEQ ID NO: 1177792 - DNA, 15 bp, Homo sapiens
tgtgcaacccatcca

SEQ ID NO: 1177793 - DNA, 15 bp, Homo sapiens
ttgtgcaacccatcc

SEQ ID NO: 1177794 - DNA, 15 bp, Homo sapiens
attgtgcaacccatc

SEQ ID NO: 1177795 - DNA, 15 bp, Homo sapiens
gattgtgcaacccat

SEQ ID NO: 1177796 - DNA, 15 bp, Homo sapiens
tgattgtgcaaccca

SEQ ID NO: 1177797 - DNA, 15 bp, Homo sapiens
gtgattgtgcaaccc

SEQ ID NO: 1177798 - DNA, 15 bp, Homo sapiens
ggtgattgtgcaacc

SEQ ID NO: 1177799 - DNA, 15 bp, Homo sapiens
gggtgattgtgcaac

SEQ ID NO: 1177800 - DNA, 15 bp, Homo sapiens
agggtgattgtgcaa

SEQ ID NO: 1177801 - DNA, 15 bp, Homo sapiens
tagggtgattgtgca

SEQ ID NO: 1177802 - DNA, 15 bp, Homo sapiens
ttagggtgattgtgc

SEQ ID NO: 1177803 - DNA, 15 bp, Homo sapiens
cttagggtgattgtg

SEQ ID NO: 1177804 - DNA, 15 bp, Homo sapiens
acttagggtgattgt

SEQ ID NO: 1177805 - DNA, 15 bp, Homo sapiens
cacttagggtgattg

SEQ ID NO: 1177806 - DNA, 15 bp, Homo sapiens
acacttagggtgatt

SEQ ID NO: 1177807 - DNA, 15 bp, Homo sapiens
aacacttagggtgat

SEQ ID NO: 1177808 - DNA, 15 bp, Homo sapiens
caacacttagggtga

SEQ ID NO: 1177809 - DNA, 15 bp, Homo sapiens
tcaacacttagggtg

SEQ ID NO: 1177810 - DNA, 15 bp, Homo sapiens
ctcaacacttagggt

SEQ ID NO: 1177811 - DNA, 15 bp, Homo sapiens
gctcaacacttaggg

SEQ ID NO: 1177812 - DNA, 15 bp, Homo sapiens
tgctcaacacttagg

SEQ ID NO: 1177813 - DNA, 15 bp, Homo sapiens
gtgctcaacacttag

SEQ ID NO: 1177814 - DNA, 15 bp, Homo sapiens
tgtgctcaacactta

SEQ ID NO: 1177815 - DNA, 15 bp, Homo sapiens
ctgtgctcaacactt

SEQ ID NO: 1177816 - DNA, 15 bp, Homo sapiens
actgtgctcaacact

SEQ ID NO: 1177817 - DNA, 15 bp, Homo sapiens
cactgtgctcaacac

SEQ ID NO: 1177818 - DNA, 15 bp, Homo sapiens
ccactgtgctcaaca

SEQ ID NO: 1177819 - DNA, 15 bp, Homo sapiens
tccactgtgctcaac

SEQ ID NO: 1177820 - DNA, 15 bp, Homo sapiens
ctccactgtgctcaa

SEQ ID NO: 1177821 - DNA, 15 bp, Homo sapiens
tctccactgtgctca

SEQ ID NO: 1177822 - DNA, 15 bp, Homo sapiens
gtctccactgtgctc

SEQ ID NO: 1177823 - DNA, 15 bp, Homo sapiens
ggtctccactgtgct

SEQ ID NO: 1177824 - DNA, 15 bp, Homo sapiens
tggtctccactgtgc

SEQ ID NO: 1177825 - DNA, 15 bp, Homo sapiens
atggtctccactgtg

SEQ ID NO: 1177826 - DNA, 15 bp, Homo sapiens
gatggtctccactgt

SEQ ID NO: 1177827 - DNA, 15 bp, Homo sapiens
tgatggtctccactg

SEQ ID NO: 1177828 - DNA, 15 bp, Homo sapiens
ttgatggtctccact

SEQ ID NO: 1177829 - DNA, 15 bp, Homo sapiens
gttgatggtctccac

SEQ ID NO: 1177830 - DNA, 15 bp, Homo sapiens
ggttgatggtctcca

SEQ ID NO: 1177831 - DNA, 15 bp, Homo sapiens
gggttgatggtctcc

SEQ ID NO: 1177832 - DNA, 15 bp, Homo sapiens
tgggttgatggtctc

SEQ ID NO: 1177833 - DNA, 15 bp, Homo sapiens
ttgggttgatggtct

SEQ ID NO: 1177834 - DNA, 15 bp, Homo sapiens
gttgggttgatggtc

SEQ ID NO: 1177835 - DNA, 15 bp, Homo sapiens
agttgggttgatggt

SEQ ID NO: 1177836 - DNA, 15 bp, Homo sapiens
gagttgggttgatgg

SEQ ID NO: 1177837 - DNA, 15 bp, Homo sapiens
agagttgggttgatg

SEQ ID NO: 1177838 - DNA, 15 bp, Homo sapiens
aagagttgggttgat

SEQ ID NO: 1177839 - DNA, 15 bp, Homo sapiens
gaagagttgggttga

SEQ ID NO: 1177840 - DNA, 15 bp, Homo sapiens
tgaagagttgggttg

SEQ ID NO: 1177841 - DNA, 15 bp, Homo sapiens
ctgaagagttgggtt

SEQ ID NO: 1177842 - DNA, 15 bp, Homo sapiens
tctgaagagttgggt

SEQ ID NO: 1177843 - DNA, 15 bp, Homo sapiens
gtctgaagagttggg

SEQ ID NO: 1177844 - DNA, 15 bp, Homo sapiens
tgtctgaagagttgg

SEQ ID NO: 1177845 - DNA, 15 bp, Homo sapiens
ttgtctgaagagttg

SEQ ID NO: 1177846 - DNA, 15 bp, Homo sapiens
tttgtctgaagagtt

SEQ ID NO: 1177847 - DNA, 15 bp, Homo sapiens
ttttgtctgaagagt

SEQ ID NO: 1177848 - DNA, 15 bp, Homo sapiens
gttttgtctgaagag

SEQ ID NO: 1177849 - DNA, 15 bp, Homo sapiens
tgttttgtctgaaga

SEQ ID NO: 1177850 - DNA, 15 bp, Homo sapiens
ttgttttgtctgaag

SEQ ID NO: 1177851 - DNA, 15 bp, Homo sapiens
cttgttttgtctgaa

SEQ ID NO: 1177852 - DNA, 15 bp, Homo sapiens
gcttgttttgtctga

SEQ ID NO: 1177853 - DNA, 15 bp, Homo sapiens
agcttgttttgtctg

SEQ ID NO: 1177854 - DNA, 15 bp, Homo sapiens
cagcttgttttgtct

SEQ ID NO: 1177855 - DNA, 15 bp, Homo sapiens
acagcttgttttgtc

SEQ ID NO: 1177856 - DNA, 15 bp, Homo sapiens
tacagcttgttttgt

SEQ ID NO: 1177857 - DNA, 15 bp, Homo sapiens
ctacagcttgttttg

SEQ ID NO: 1177858 - DNA, 15 bp, Homo sapiens
gctacagcttgtttt

SEQ ID NO: 1177859 - DNA, 15 bp, Homo sapiens
ggctacagcttgttt

SEQ ID NO: 1177860 - DNA, 15 bp, Homo sapiens
aggctacagcttgtt

SEQ ID NO: 1177861 - DNA, 15 bp, Homo sapiens
aaggctacagcttgt

SEQ ID NO: 1177862 - DNA, 15 bp, Homo sapiens
taaggctacagcttg

SEQ ID NO: 1177863 - DNA, 15 bp, Homo sapiens
gtaaggctacagctt

SEQ ID NO: 1177864 - DNA, 15 bp, Homo sapiens
tgtaaggctacagct

SEQ ID NO: 1177865 - DNA, 15 bp, Homo sapiens
ctgtaaggctacagc

SEQ ID NO: 1177866 - DNA, 15 bp, Homo sapiens
actgtaaggctacag

SEQ ID NO: 1177867 - DNA, 15 bp, Homo sapiens
aactgtaaggctaca

SEQ ID NO: 1177868 - DNA, 15 bp, Homo sapiens
aaactgtaaggctac

SEQ ID NO: 1177869 - DNA, 15 bp, Homo sapiens
caaactgtaaggcta

SEQ ID NO: 1177870 - DNA, 15 bp, Homo sapiens
acaaactgtaaggct

SEQ ID NO: 1177871 - DNA, 15 bp, Homo sapiens
aacaaactgtaaggc

SEQ ID NO: 1177872 - DNA, 15 bp, Homo sapiens
aaacaaactgtaagg

SEQ ID NO: 1177873 - DNA, 15 bp, Homo sapiens
aaaacaaactgtaag

SEQ ID NO: 1177874 - DNA, 15 bp, Homo sapiens
caaaacaaactgtaa

SEQ ID NO: 1177875 - DNA, 15 bp, Homo sapiens
gcaaaacaaactgta

SEQ ID NO: 1177876 - DNA, 15 bp, Homo sapiens
tgcaaaacaaactgt

SEQ ID NO: 1177877 - DNA, 15 bp, Homo sapiens
gtgcaaaacaaactg

SEQ ID NO: 1177878 - DNA, 15 bp, Homo sapiens
ggtgcaaaacaaact

SEQ ID NO: 1177879 - DNA, 15 bp, Homo sapiens
cggtgcaaaacaaac

SEQ ID NO: 1177880 - DNA, 15 bp, Homo sapiens
tcggtgcaaaacaaa

SEQ ID NO: 1177881 - DNA, 15 bp, Homo sapiens
ctcggtgcaaaacaa

SEQ ID NO: 1177882 - DNA, 15 bp, Homo sapiens
tctcggtgcaaaaca

SEQ ID NO: 1177883 - DNA, 15 bp, Homo sapiens
atctcggtgcaaaac

SEQ ID NO: 1177884 - DNA, 15 bp, Homo sapiens
gatctcggtgcaaaa

SEQ ID NO: 1177885 - DNA, 15 bp, Homo sapiens
ggatctcggtgcaaa

SEQ ID NO: 1177886 - DNA, 15 bp, Homo sapiens
tggatctcggtgcaa

SEQ ID NO: 1177887 - DNA, 15 bp, Homo sapiens
atggatctcggtgca

SEQ ID NO: 1177888 - DNA, 15 bp, Homo sapiens
tatggatctcggtgc

SEQ ID NO: 1177889 - DNA, 15 bp, Homo sapiens
ttatggatctcggtg

SEQ ID NO: 1177890 - DNA, 15 bp, Homo sapiens
gttatggatctcggt

SEQ ID NO: 1177891 - DNA, 15 bp, Homo sapiens
tgttatggatctcgg

SEQ ID NO: 1177892 - DNA, 15 bp, Homo sapiens
ctgttatggatctcg

SEQ ID NO: 1177893 - DNA, 15 bp, Homo sapiens
gctgttatggatctc

SEQ ID NO: 1177894 - DNA, 15 bp, Homo sapiens
agctgttatggatct

SEQ ID NO: 1177895 - DNA, 15 bp, Homo sapiens
cagctgttatggatc

SEQ ID NO: 1177896 - DNA, 15 bp, Homo sapiens
acagctgttatggat

SEQ ID NO: 1177897 - DNA, 15 bp, Homo sapiens
aacagctgttatgga

SEQ ID NO: 1177898 - DNA, 15 bp, Homo sapiens
taacagctgttatgg

SEQ ID NO: 1177899 - DNA, 15 bp, Homo sapiens
gtaacagctgttatg

SEQ ID NO: 1177900 - DNA, 15 bp, Homo sapiens
ggtaacagctgttat

SEQ ID NO: 1177901 - DNA, 15 bp, Homo sapiens
aggtaacagctgtta

SEQ ID NO: 1177902 - DNA, 15 bp, Homo sapiens
taggtaacagctgtt

SEQ ID NO: 1177903 - DNA, 15 bp, Homo sapiens
ataggtaacagctgt

SEQ ID NO: 1177904 - DNA, 15 bp, Homo sapiens
aataggtaacagctg

SEQ ID NO: 1177905 - DNA, 15 bp, Homo sapiens
aaataggtaacagct

SEQ ID NO: 1177906 - DNA, 15 bp, Homo sapiens
taaataggtaacagc

SEQ ID NO: 1177907 - DNA, 15 bp, Homo sapiens
gtaaataggtaacag

SEQ ID NO: 1177908 - DNA, 15 bp, Homo sapiens
agtaaataggtaaca

SEQ ID NO: 1177909 - DNA, 15 bp, Homo sapiens
cagtaaataggtaac

SEQ ID NO: 1177910 - DNA, 15 bp, Homo sapiens
ccagtaaataggtaa

SEQ ID NO: 1177911 - DNA, 15 bp, Homo sapiens
tccagtaaataggta

SEQ ID NO: 1177912 - DNA, 15 bp, Homo sapiens
ttccagtaaataggt

SEQ ID NO: 1177913 - DNA, 15 bp, Homo sapiens
cttccagtaaatagg

SEQ ID NO: 1177914 - DNA, 15 bp, Homo sapiens
tcttccagtaaatag

SEQ ID NO: 1177915 - DNA, 15 bp, Homo sapiens
atcttccagtaaata

SEQ ID NO: 1177916 - DNA, 15 bp, Homo sapiens
gatcttccagtaaat

SEQ ID NO: 1177917 - DNA, 15 bp, Homo sapiens
ggatcttccagtaaa

SEQ ID NO: 1177918 - DNA, 15 bp, Homo sapiens
aggatcttccagtaa

SEQ ID NO: 1177919 - DNA, 15 bp, Homo sapiens
aaggatcttccagta

SEQ ID NO: 1177920 - DNA, 15 bp, Homo sapiens
gaaggatcttccagt

SEQ ID NO: 1177921 - DNA, 15 bp, Homo sapiens
ggaaggatcttccag

SEQ ID NO: 1177922 - DNA, 15 bp, Homo sapiens
tggaaggatcttcca

SEQ ID NO: 1177923 - DNA, 15 bp, Homo sapiens
ctggaaggatcttcc

SEQ ID NO: 1177924 - DNA, 15 bp, Homo sapiens
actggaaggatcttc

SEQ ID NO: 1177925 - DNA, 15 bp, Homo sapiens
gactggaaggatctt

SEQ ID NO: 1177926 - DNA, 15 bp, Homo sapiens
ggactggaaggatct

SEQ ID NO: 1177927 - DNA, 15 bp, Homo sapiens
gggactggaaggatc

SEQ ID NO: 1177928 - DNA, 15 bp, Homo sapiens
tgggactggaaggat

SEQ ID NO: 1177929 - DNA, 15 bp, Homo sapiens
atgggactggaagga

SEQ ID NO: 1177930 - DNA, 15 bp, Homo sapiens
gatgggactggaagg

SEQ ID NO: 1177931 - DNA, 15 bp, Homo sapiens
tgatgggactggaag

SEQ ID NO: 1177932 - DNA, 15 bp, Homo sapiens
gtgatgggactggaa

SEQ ID NO: 1177933 - DNA, 15 bp, Homo sapiens
agtgatgggactgga

SEQ ID NO: 1177934 - DNA, 15 bp, Homo sapiens
tagtgatgggactgg

SEQ ID NO: 1177935 - DNA, 15 bp, Homo sapiens
atagtgatgggactg

SEQ ID NO: 1177936 - DNA, 15 bp, Homo sapiens
aatagtgatgggact

SEQ ID NO: 1177937 - DNA, 15 bp, Homo sapiens
aaatagtgatgggac

SEQ ID NO: 1177938 - DNA, 15 bp, Homo sapiens
taaatagtgatggga

SEQ ID NO: 1177939 - DNA, 15 bp, Homo sapiens
ctaaatagtgatggg

SEQ ID NO: 1177940 - DNA, 15 bp, Homo sapiens
tctaaatagtgatgg

SEQ ID NO: 1177941 - DNA, 15 bp, Homo sapiens
atctaaatagtgatg

SEQ ID NO: 1177942 - DNA, 15 bp, Homo sapiens
gatctaaatagtgat

SEQ ID NO: 1177943 - DNA, 15 bp, Homo sapiens
ggatctaaatagtga

SEQ ID NO: 1177944 - DNA, 15 bp, Homo sapiens
aggatctaaatagtg

SEQ ID NO: 1177945 - DNA, 15 bp, Homo sapiens
gaggatctaaatagt

SEQ ID NO: 1177946 - DNA, 15 bp, Homo sapiens
ggaggatctaaatag

SEQ ID NO: 1177947 - DNA, 15 bp, Homo sapiens
aggaggatctaaata

SEQ ID NO: 1177948 - DNA, 15 bp, Homo sapiens
gaggaggatctaaat

SEQ ID NO: 1177949 - DNA, 15 bp, Homo sapiens
tgaggaggatctaaa

SEQ ID NO: 1177950 - DNA, 15 bp, Homo sapiens
atgaggaggatctaa

SEQ ID NO: 1177951 - DNA, 15 bp, Homo sapiens
gatgaggaggatcta

SEQ ID NO: 1177952 - DNA, 15 bp, Homo sapiens
cgatgaggaggatct

SEQ ID NO: 1177953 - DNA, 15 bp, Homo sapiens
gcgatgaggaggatc

SEQ ID NO: 1177954 - DNA, 15 bp, Homo sapiens
ggcgatgaggaggat

SEQ ID NO: 1177955 - DNA, 15 bp, Homo sapiens
gggcgatgaggagga

SEQ ID NO: 1177956 - DNA, 15 bp, Homo sapiens
tgggcgatgaggagg

SEQ ID NO: 1177957 - DNA, 15 bp, Homo sapiens
gtgggcgatgaggag

SEQ ID NO: 1177958 - DNA, 15 bp, Homo sapiens
ggtgggcgatgagga

SEQ ID NO: 1177959 - DNA, 15 bp, Homo sapiens
tggtgggcgatgagg

SEQ ID NO: 1177960 - DNA, 15 bp, Homo sapiens
ttggtgggcgatgag

SEQ ID NO: 1177961 - DNA, 15 bp, Homo sapiens
tttggtgggcgatga

SEQ ID NO: 1177962 - DNA, 15 bp, Homo sapiens
ttttggtgggcgatg

SEQ ID NO: 1177963 - DNA, 15 bp, Homo sapiens
gttttggtgggcgat

SEQ ID NO: 1177964 - DNA, 15 bp, Homo sapiens
agttttggtgggcga

SEQ ID NO: 1177965 - DNA, 15 bp, Homo sapiens
tagttttggtgggcg

SEQ ID NO: 1177966 - DNA, 15 bp, Homo sapiens
atagttttggtgggc

SEQ ID NO: 1177967 - DNA, 15 bp, Homo sapiens
aatagttttggtggg

SEQ ID NO: 1177968 - DNA, 15 bp, Homo sapiens
caatagttttggtgg

SEQ ID NO: 1177969 - DNA, 15 bp, Homo sapiens
gcaatagttttggtg

SEQ ID NO: 1177970 - DNA, 15 bp, Homo sapiens
tgcaatagttttggt

SEQ ID NO: 1177971 - DNA, 15 bp, Homo sapiens
ttgcaatagttttgg

SEQ ID NO: 1177972 - DNA, 15 bp, Homo sapiens
gttgcaatagttttg

SEQ ID NO: 1177973 - DNA, 15 bp, Homo sapiens
tgttgcaatagtttt

SEQ ID NO: 1177974 - DNA, 15 bp, Homo sapiens
ctgttgcaatagttt

SEQ ID NO: 1177975 - DNA, 15 bp, Homo sapiens
gctgttgcaatagtt

SEQ ID NO: 1177976 - DNA, 15 bp, Homo sapiens
ggctgttgcaatagt

SEQ ID NO: 1177977 - DNA, 15 bp, Homo sapiens
aggctgttgcaatag

SEQ ID NO: 1177978 - DNA, 15 bp, Homo sapiens
gaggctgttgcaata

SEQ ID NO: 1177979 - DNA, 15 bp, Homo sapiens
ggaggctgttgcaat

SEQ ID NO: 1177980 - DNA, 15 bp, Homo sapiens
aggaggctgttgcaa

SEQ ID NO: 1177981 - DNA, 15 bp, Homo sapiens
gaggaggctgttgca

SEQ ID NO: 1177982 - DNA, 15 bp, Homo sapiens
ggaggaggctgttgc

SEQ ID NO: 1177983 - DNA, 15 bp, Homo sapiens
tggaggaggctgttg

SEQ ID NO: 1177984 - DNA, 15 bp, Homo sapiens
atggaggaggctgtt

SEQ ID NO: 1177985 - DNA, 15 bp, Homo sapiens
catggaggaggctgt

SEQ ID NO: 1177986 - DNA, 15 bp, Homo sapiens
tcatggaggaggctg

SEQ ID NO: 1177987 - DNA, 15 bp, Homo sapiens
atcatggaggaggct

SEQ ID NO: 1177988 - DNA, 15 bp, Homo sapiens
gatcatggaggaggc

SEQ ID NO: 1177989 - DNA, 15 bp, Homo sapiens
cgatcatggaggagg

SEQ ID NO: 1177990 - DNA, 15 bp, Homo sapiens
acgatcatggaggag

SEQ ID NO: 1177991 - DNA, 15 bp, Homo sapiens
cacgatcatggagga

SEQ ID NO: 1177992 - DNA, 15 bp, Homo sapiens
gcacgatcatggagg

SEQ ID NO: 1177993 - DNA, 15 bp, Homo sapiens
agcacgatcatggag

SEQ ID NO: 1177994 - DNA, 15 bp, Homo sapiens
tagcacgatcatgga

SEQ ID NO: 1177995 - DNA, 15 bp, Homo sapiens
atagcacgatcatgg

SEQ ID NO: 1177996 - DNA, 15 bp, Homo sapiens
catagcacgatcatg

SEQ ID NO: 1177997 - DNA, 15 bp, Homo sapiens
acatagcacgatcat

SEQ ID NO: 1177998 - DNA, 15 bp, Homo sapiens
cacatagcacgatca

SEQ ID NO: 1177999 - DNA, 15 bp, Homo sapiens
gcacatagcacgatc

SEQ ID NO: 1178000 - DNA, 15 bp, Homo sapiens
tgcacatagcacgat

SEQ ID NO: 1178001 - DNA, 15 bp, Homo sapiens
ttgcacatagcacga

SEQ ID NO: 1178002 - DNA, 15 bp, Homo sapiens
cttgcacatagcacg

SEQ ID NO: 1178003 - DNA, 15 bp, Homo sapiens
tcttgcacatagcac

SEQ ID NO: 1178004 - DNA, 15 bp, Homo sapiens
gtcttgcacatagca

SEQ ID NO: 1178005 - DNA, 15 bp, Homo sapiens
agtcttgcacatagc

SEQ ID NO: 1178006 - DNA, 15 bp, Homo sapiens
cagtcttgcacatag

SEQ ID NO: 1178007 - DNA, 15 bp, Homo sapiens
gcagtcttgcacata

SEQ ID NO: 1178008 - DNA, 15 bp, Homo sapiens
agcagtcttgcacat

SEQ ID NO: 1178009 - DNA, 15 bp, Homo sapiens
aagcagtcttgcaca

SEQ ID NO: 1178010 - DNA, 15 bp, Homo sapiens
caagcagtcttgcac

SEQ ID NO: 1178011 - DNA, 15 bp, Homo sapiens
tcaagcagtcttgca

SEQ ID NO: 1178012 - DNA, 15 bp, Homo sapiens
ctcaagcagtcttgc

SEQ ID NO: 1178013 - DNA, 15 bp, Homo sapiens
cctcaagcagtcttg

SEQ ID NO: 1178014 - DNA, 15 bp, Homo sapiens
gcctcaagcagtctt

SEQ ID NO: 1178015 - DNA, 15 bp, Homo sapiens
ggcctcaagcagtct

SEQ ID NO: 1178016 - DNA, 15 bp, Homo sapiens
tggcctcaagcagtc

SEQ ID NO: 1178017 - DNA, 15 bp, Homo sapiens
ctggcctcaagcagt

SEQ ID NO: 1178018 - DNA, 15 bp, Homo sapiens
gctggcctcaagcag

SEQ ID NO: 1178019 - DNA, 15 bp, Homo sapiens
ggctggcctcaagca

SEQ ID NO: 1178020 - DNA, 15 bp, Homo sapiens
cggctggcctcaagc

SEQ ID NO: 1178021 - DNA, 15 bp, Homo sapiens
acggctggcctcaag

SEQ ID NO: 1178022 - DNA, 15 bp, Homo sapiens
gacggctggcctcaa

SEQ ID NO: 1178023 - DNA, 15 bp, Homo sapiens
ggacggctggcctca

SEQ ID NO: 1178024 - DNA, 15 bp, Homo sapiens
gggacggctggcctc

SEQ ID NO: 1178025 - DNA, 15 bp, Homo sapiens
tgggacggctggcct

SEQ ID NO: 1178026 - DNA, 15 bp, Homo sapiens
gtgggacggctggcc

SEQ ID NO: 1178027 - DNA, 15 bp, Homo sapiens
ggtgggacggctggc

SEQ ID NO: 1178028 - DNA, 15 bp, Homo sapiens
gggtgggacggctgg

SEQ ID NO: 1178029 - DNA, 15 bp, Homo sapiens
tgggtgggacggctg

SEQ ID NO: 1178030 - DNA, 15 bp, Homo sapiens
atgggtgggacggct

SEQ ID NO: 1178031 - DNA, 15 bp, Homo sapiens
catgggtgggacggc

SEQ ID NO: 1178032 - DNA, 15 bp, Homo sapiens
tcatgggtgggacgg

SEQ ID NO: 1178033 - DNA, 15 bp, Homo sapiens
ctcatgggtgggacg

SEQ ID NO: 1178034 - DNA, 15 bp, Homo sapiens
tctcatgggtgggac

SEQ ID NO: 1178035 - DNA, 15 bp, Homo sapiens
atctcatgggtggga

SEQ ID NO: 1178036 - DNA, 15 bp, Homo sapiens
aatctcatgggtggg

SEQ ID NO: 1178037 - DNA, 15 bp, Homo sapiens
taatctcatgggtgg

SEQ ID NO: 1178038 - DNA, 15 bp, Homo sapiens
ttaatctcatgggtg

SEQ ID NO: 1178039 - DNA, 15 bp, Homo sapiens
attaatctcatgggt

SEQ ID NO: 1178040 - DNA, 15 bp, Homo sapiens
gattaatctcatggg

SEQ ID NO: 1178041 - DNA, 15 bp, Homo sapiens
agattaatctcatgg

SEQ ID NO: 1178042 - DNA, 15 bp, Homo sapiens
aagattaatctcatg

SEQ ID NO: 1178043 - DNA, 15 bp, Homo sapiens
aaagattaatctcat

SEQ ID NO: 1178044 - DNA, 15 bp, Homo sapiens
gaaagattaatctca

SEQ ID NO: 1178045 - DNA, 15 bp, Homo sapiens
ggaaagattaatctc

SEQ ID NO: 1178046 - DNA, 15 bp, Homo sapiens
tggaaagattaatct

SEQ ID NO: 1178047 - DNA, 15 bp, Homo sapiens
ttggaaagattaatc

SEQ ID NO: 1178048 - DNA, 15 bp, Homo sapiens
tttggaaagattaat

SEQ ID NO: 1178049 - DNA, 15 bp, Homo sapiens
ctttggaaagattaa

SEQ ID NO: 1178050 - DNA, 15 bp, Homo sapiens
gctttggaaagatta

SEQ ID NO: 1178051 - DNA, 15 bp, Homo sapiens
tgctttggaaagatt

SEQ ID NO: 1178052 - DNA, 15 bp, Homo sapiens
ttgctttggaaagat

SEQ ID NO: 1178053 - DNA, 15 bp, Homo sapiens
attgctttggaaaga

SEQ ID NO: 1178054 - DNA, 15 bp, Homo sapiens
aattgctttggaaag

SEQ ID NO: 1178055 - DNA, 15 bp, Homo sapiens
gaattgctttggaaa

SEQ ID NO: 1178056 - DNA, 15 bp, Homo sapiens
agaattgctttggaa

SEQ ID NO: 1178057 - DNA, 15 bp, Homo sapiens
aagaattgctttgga

SEQ ID NO: 1178058 - DNA, 15 bp, Homo sapiens
taagaattgctttgg

SEQ ID NO: 1178059 - DNA, 15 bp, Homo sapiens
ataagaattgctttg

SEQ ID NO: 1178060 - DNA, 15 bp, Homo sapiens
gataagaattgcttt

SEQ ID NO: 1178061 - DNA, 15 bp, Homo sapiens
tgataagaattgctt

SEQ ID NO: 1178062 - DNA, 15 bp, Homo sapiens
gtgataagaattgct

SEQ ID NO: 1178063 - DNA, 15 bp, Homo sapiens
agtgataagaattgc

SEQ ID NO: 1178064 - DNA, 15 bp, Homo sapiens
aagtgataagaattg

SEQ ID NO: 1178065 - DNA, 15 bp, Homo sapiens
aaagtgataagaatt

SEQ ID NO: 1178066 - DNA, 15 bp, Homo sapiens
taaagtgataagaat

SEQ ID NO: 1178067 - DNA, 15 bp, Homo sapiens
ataaagtgataagaa

SEQ ID NO: 1178068 - DNA, 15 bp, Homo sapiens
gataaagtgataaga

SEQ ID NO: 1178069 - DNA, 15 bp, Homo sapiens
ggataaagtgataag

SEQ ID NO: 1178070 - DNA, 15 bp, Homo sapiens
gggataaagtgataa

SEQ ID NO: 1178071 - DNA, 15 bp, Homo sapiens
agggataaagtgata

SEQ ID NO: 1178072 - DNA, 15 bp, Homo sapiens
aagggataaagtgat

SEQ ID NO: 1178073 - DNA, 15 bp, Homo sapiens
aaagggataaagtga

SEQ ID NO: 1178074 - DNA, 15 bp, Homo sapiens
aaaagggataaagtg

SEQ ID NO: 1178075 - DNA, 15 bp, Homo sapiens
gaaaagggataaagt

SEQ ID NO: 1178076 - DNA, 15 bp, Homo sapiens
agaaaagggataaag

SEQ ID NO: 1178077 - DNA, 15 bp, Homo sapiens
tagaaaagggataaa

SEQ ID NO: 1178078 - DNA, 15 bp, Homo sapiens
ttagaaaagggataa

SEQ ID NO: 1178079 - DNA, 15 bp, Homo sapiens
tttagaaaagggata

SEQ ID NO: 1178080 - DNA, 15 bp, Homo sapiens
gtttagaaaagggat

SEQ ID NO: 1178081 - DNA, 15 bp, Homo sapiens
tgtttagaaaaggga

SEQ ID NO: 1178082 - DNA, 15 bp, Homo sapiens
ttgtttagaaaaggg

SEQ ID NO: 1178083 - DNA, 15 bp, Homo sapiens
gttgtttagaaaagg

SEQ ID NO: 1178084 - DNA, 15 bp, Homo sapiens
tgttgtttagaaaag

SEQ ID NO: 1178085 - DNA, 15 bp, Homo sapiens
atgttgtttagaaaa

SEQ ID NO: 1178086 - DNA, 15 bp, Homo sapiens
gatgttgtttagaaa

SEQ ID NO: 1178087 - DNA, 15 bp, Homo sapiens
ggatgttgtttagaa

SEQ ID NO: 1178088 - DNA, 15 bp, Homo sapiens
tggatgttgtttaga

SEQ ID NO: 1178089 - DNA, 15 bp, Homo sapiens
ctggatgttgtttag

SEQ ID NO: 1178090 - DNA, 15 bp, Homo sapiens
cctggatgttgttta

SEQ ID NO: 1178091 - DNA, 15 bp, Homo sapiens
ccctggatgttgttt

SEQ ID NO: 1178092 - DNA, 15 bp, Homo sapiens
tccctggatgttgtt

SEQ ID NO: 1178093 - DNA, 15 bp, Homo sapiens
gtccctggatgttgt

SEQ ID NO: 1178094 - DNA, 15 bp, Homo sapiens
ggtccctggatgttg

SEQ ID NO: 1178095 - DNA, 15 bp, Homo sapiens
tggtccctggatgtt

SEQ ID NO: 1178096 - DNA, 15 bp, Homo sapiens
atggtccctggatgt

SEQ ID NO: 1178097 - DNA, 15 bp, Homo sapiens
aatggtccctggatg

SEQ ID NO: 1178098 - DNA, 15 bp, Homo sapiens
gaatggtccctggat

SEQ ID NO: 1178099 - DNA, 15 bp, Homo sapiens
tgaatggtccctgga

SEQ ID NO: 1178100 - DNA, 15 bp, Homo sapiens
atgaatggtccctgg

SEQ ID NO: 1178101 - DNA, 15 bp, Homo sapiens
catgaatggtccctg

SEQ ID NO: 1178102 - DNA, 15 bp, Homo sapiens
ccatgaatggtccct

SEQ ID NO: 1178103 - DNA, 15 bp, Homo sapiens
gccatgaatggtccc

SEQ ID NO: 1178104 - DNA, 15 bp, Homo sapiens
agccatgaatggtcc

SEQ ID NO: 1178105 - DNA, 15 bp, Homo sapiens
tagccatgaatggtc

SEQ ID NO: 1178106 - DNA, 15 bp, Homo sapiens
atagccatgaatggt

SEQ ID NO: 1178107 - DNA, 15 bp, Homo sapiens
catagccatgaatgg

SEQ ID NO: 1178108 - DNA, 15 bp, Homo sapiens
acatagccatgaatg

SEQ ID NO: 1178109 - DNA, 15 bp, Homo sapiens
tacatagccatgaat

SEQ ID NO: 1178110 - DNA, 15 bp, Homo sapiens
ttacatagccatgaa

SEQ ID NO: 1178111 - DNA, 15 bp, Homo sapiens
tttacatagccatga

SEQ ID NO: 1178112 - DNA, 15 bp, Homo sapiens
atttacatagccatg

SEQ ID NO: 1178113 - DNA, 15 bp, Homo sapiens
aatttacatagccat

SEQ ID NO: 1178114 - DNA, 15 bp, Homo sapiens
caatttacatagcca

SEQ ID NO: 1178115 - DNA, 15 bp, Homo sapiens
tcaatttacatagcc

SEQ ID NO: 1178116 - DNA, 15 bp, Homo sapiens
ctcaatttacatagc

SEQ ID NO: 1178117 - DNA, 15 bp, Homo sapiens
actcaatttacatag

SEQ ID NO: 1178118 - DNA, 15 bp, Homo sapiens
cactcaatttacata

SEQ ID NO: 1178119 - DNA, 15 bp, Homo sapiens
tcactcaatttacat

SEQ ID NO: 1178120 - DNA, 15 bp, Homo sapiens
ctcactcaatttaca

SEQ ID NO: 1178121 - DNA, 15 bp, Homo sapiens
actcactcaatttac

SEQ ID NO: 1178122 - DNA, 15 bp, Homo sapiens
gactcactcaattta

SEQ ID NO: 1178123 - DNA, 15 bp, Homo sapiens
ggactcactcaattt

SEQ ID NO: 1178124 - DNA, 15 bp, Homo sapiens
tggactcactcaatt

SEQ ID NO: 1178125 - DNA, 15 bp, Homo sapiens
ttggactcactcaat

SEQ ID NO: 1178126 - DNA, 15 bp, Homo sapiens
tttggactcactcaa

SEQ ID NO: 1178127 - DNA, 15 bp, Homo sapiens
gtttggactcactca

SEQ ID NO: 1178128 - DNA, 15 bp, Homo sapiens
agtttggactcactc

SEQ ID NO: 1178129 - DNA, 15 bp, Homo sapiens
gagtttggactcact

SEQ ID NO: 1178130 - DNA, 15 bp, Homo sapiens
ggagtttggactcac

SEQ ID NO: 1178131 - DNA, 15 bp, Homo sapiens
gggagtttggactca

SEQ ID NO: 1178132 - DNA, 15 bp, Homo sapiens
ggggagtttggactc

SEQ ID NO: 1178133 - DNA, 15 bp, Homo sapiens
tggggagtttggact

SEQ ID NO: 1178134 - DNA, 15 bp, Homo sapiens
ttggggagtttggac

SEQ ID NO: 1178135 - DNA, 15 bp, Homo sapiens
attggggagtttgga

SEQ ID NO: 1178136 - DNA, 15 bp, Homo sapiens
aattggggagtttgg

SEQ ID NO: 1178137 - DNA, 15 bp, Homo sapiens
aaattggggagtttg

SEQ ID NO: 1178138 - DNA, 15 bp, Homo sapiens
caaattggggagttt

SEQ ID NO: 1178139 - DNA, 15 bp, Homo sapiens
tcaaattggggagtt

SEQ ID NO: 1178140 - DNA, 15 bp, Homo sapiens
gtcaaattggggagt

SEQ ID NO: 1178141 - DNA, 15 bp, Homo sapiens
tgtcaaattggggag

SEQ ID NO: 1178142 - DNA, 15 bp, Homo sapiens
ctgtcaaattgggga

SEQ ID NO: 1178143 - DNA, 15 bp, Homo sapiens
actgtcaaattgggg

SEQ ID NO: 1178144 - DNA, 15 bp, Homo sapiens
tactgtcaaattggg

SEQ ID NO: 1178145 - DNA, 15 bp, Homo sapiens
ttactgtcaaattgg

SEQ ID NO: 1178146 - DNA, 15 bp, Homo sapiens
cttactgtcaaattg

SEQ ID NO: 1178147 - DNA, 15 bp, Homo sapiens
ccttactgtcaaatt

SEQ ID NO: 1178148 - DNA, 15 bp, Homo sapiens
gccttactgtcaaat

SEQ ID NO: 1178149 - DNA, 15 bp, Homo sapiens
tgccttactgtcaaa

SEQ ID NO: 1178150 - DNA, 15 bp, Homo sapiens
atgccttactgtcaa

SEQ ID NO: 1178151 - DNA, 15 bp, Homo sapiens
aatgccttactgtca

SEQ ID NO: 1178152 - DNA, 15 bp, Homo sapiens
aaatgccttactgtc

SEQ ID NO: 1178153 - DNA, 15 bp, Homo sapiens
aaaatgccttactgt

SEQ ID NO: 1178154 - DNA, 15 bp, Homo sapiens
taaaatgccttactg

SEQ ID NO: 1178155 - DNA, 15 bp, Homo sapiens
gtaaaatgccttact

SEQ ID NO: 1178156 - DNA, 15 bp, Homo sapiens
cgtaaaatgccttac

SEQ ID NO: 1178157 - DNA, 15 bp, Homo sapiens
acgtaaaatgcctta

SEQ ID NO: 1178158 - DNA, 15 bp, Homo sapiens
tacgtaaaatgcctt

SEQ ID NO: 1178159 - DNA, 15 bp, Homo sapiens
ttacgtaaaatgcct

SEQ ID NO: 1178160 - DNA, 15 bp, Homo sapiens
cttacgtaaaatgcc

SEQ ID NO: 1178161 - DNA, 15 bp, Homo sapiens
ccttacgtaaaatgc

SEQ ID NO: 1178162 - DNA, 15 bp, Homo sapiens
accttacgtaaaatg

SEQ ID NO: 1178163 - DNA, 15 bp, Homo sapiens
gaccttacgtaaaat

SEQ ID NO: 1178164 - DNA, 15 bp, Homo sapiens
agaccttacgtaaaa

SEQ ID NO: 1178165 - DNA, 15 bp, Homo sapiens
gagaccttacgtaaa

SEQ ID NO: 1178166 - DNA, 15 bp, Homo sapiens
agagaccttacgtaa

SEQ ID NO: 1178167 - DNA, 15 bp, Homo sapiens
tagagaccttacgta

SEQ ID NO: 1178168 - DNA, 15 bp, Homo sapiens
atagagaccttacgt

SEQ ID NO: 1178169 - DNA, 15 bp, Homo sapiens
gatagagaccttacg

SEQ ID NO: 1178170 - DNA, 15 bp, Homo sapiens
agatagagaccttac

SEQ ID NO: 1178171 - DNA, 15 bp, Homo sapiens
cagatagagacctta

SEQ ID NO: 1178172 - DNA, 15 bp, Homo sapiens
tcagatagagacctt

SEQ ID NO: 1178173 - DNA, 15 bp, Homo sapiens
gtcagatagagacct

SEQ ID NO: 1178174 - DNA, 15 bp, Homo sapiens
agtcagatagagacc

SEQ ID NO: 1178175 - DNA, 15 bp, Homo sapiens
aagtcagatagagac

SEQ ID NO: 1178176 - DNA, 15 bp, Homo sapiens
aaagtcagatagaga

SEQ ID NO: 1178177 - DNA, 15 bp, Homo sapiens
gaaagtcagatagag

SEQ ID NO: 1178178 - DNA, 15 bp, Homo sapiens
agaaagtcagataga

SEQ ID NO: 1178179 - DNA, 15 bp, Homo sapiens
aagaaagtcagatag

SEQ ID NO: 1178180 - DNA, 15 bp, Homo sapiens
taagaaagtcagata

SEQ ID NO: 1178181 - DNA, 15 bp, Homo sapiens
ttaagaaagtcagat

SEQ ID NO: 1178182 - DNA, 15 bp, Homo sapiens
attaagaaagtcaga

SEQ ID NO: 1178183 - DNA, 15 bp, Homo sapiens
cattaagaaagtcag

SEQ ID NO: 1178184 - DNA, 15 bp, Homo sapiens
acattaagaaagtca

SEQ ID NO: 1178185 - DNA, 15 bp, Homo sapiens
tacattaagaaagtc

SEQ ID NO: 1178186 - DNA, 15 bp, Homo sapiens
atacattaagaaagt

SEQ ID NO: 1178187 - DNA, 15 bp, Homo sapiens
gatacattaagaaag

SEQ ID NO: 1178188 - DNA, 15 bp, Homo sapiens
ggatacattaagaaa

SEQ ID NO: 1178189 - DNA, 15 bp, Homo sapiens
gggatacattaagaa

SEQ ID NO: 1178190 - DNA, 15 bp, Homo sapiens
agggatacattaaga

SEQ ID NO: 1178191 - DNA, 15 bp, Homo sapiens
tagggatacattaag

SEQ ID NO: 1178192 - DNA, 15 bp, Homo sapiens
gtagggatacattaa

SEQ ID NO: 1178193 - DNA, 15 bp, Homo sapiens
tgtagggatacatta

SEQ ID NO: 1178194 - DNA, 15 bp, Homo sapiens
ctgtagggatacatt

SEQ ID NO: 1178195 - DNA, 15 bp, Homo sapiens
gctgtagggatacat

SEQ ID NO: 1178196 - DNA, 15 bp, Homo sapiens
tgctgtagggataca

SEQ ID NO: 1178197 - DNA, 15 bp, Homo sapiens
ctgctgtagggatac

SEQ ID NO: 1178198 - DNA, 15 bp, Homo sapiens
tctgctgtagggata

SEQ ID NO: 1178199 - DNA, 15 bp, Homo sapiens
ctctgctgtagggat

SEQ ID NO: 1178200 - DNA, 15 bp, Homo sapiens
gctctgctgtaggga

SEQ ID NO: 1178201 - DNA, 15 bp, Homo sapiens
agctctgctgtaggg

SEQ ID NO: 1178202 - DNA, 15 bp, Homo sapiens
gagctctgctgtagg

SEQ ID NO: 1178203 - DNA, 15 bp, Homo sapiens
tgagctctgctgtag

SEQ ID NO: 1178204 - DNA, 15 bp, Homo sapiens
gtgagctctgctgta

SEQ ID NO: 1178205 - DNA, 15 bp, Homo sapiens
tgtgagctctgctgt

SEQ ID NO: 1178206 - DNA, 15 bp, Homo sapiens
ttgtgagctctgctg

SEQ ID NO: 1178207 - DNA, 15 bp, Homo sapiens
tttgtgagctctgct

SEQ ID NO: 1178208 - DNA, 15 bp, Homo sapiens
gtttgtgagctctgc

SEQ ID NO: 1178209 - DNA, 15 bp, Homo sapiens
agtttgtgagctctg

SEQ ID NO: 1178210 - DNA, 15 bp, Homo sapiens
cagtttgtgagctct

SEQ ID NO: 1178211 - DNA, 15 bp, Homo sapiens
ccagtttgtgagctc

SEQ ID NO: 1178212 - DNA, 15 bp, Homo sapiens
gccagtttgtgagct

SEQ ID NO: 1178213 - DNA, 15 bp, Homo sapiens
tgccagtttgtgagc

SEQ ID NO: 1178214 - DNA, 15 bp, Homo sapiens
ttgccagtttgtgag

SEQ ID NO: 1178215 - DNA, 15 bp, Homo sapiens
attgccagtttgtga

SEQ ID NO: 1178216 - DNA, 15 bp, Homo sapiens
gattgccagtttgtg

SEQ ID NO: 1178217 - DNA, 15 bp, Homo sapiens
agattgccagtttgt

SEQ ID NO: 1178218 - DNA, 15 bp, Homo sapiens
cagattgccagtttg

SEQ ID NO: 1178219 - DNA, 15 bp, Homo sapiens
acagattgccagttt

SEQ ID NO: 1178220 - DNA, 15 bp, Homo sapiens
tacagattgccagtt

SEQ ID NO: 1178221 - DNA, 15 bp, Homo sapiens
ttacagattgccagt

SEQ ID NO: 1178222 - DNA, 15 bp, Homo sapiens
cttacagattgccag

SEQ ID NO: 1178223 - DNA, 15 bp, Homo sapiens
acttacagattgcca

SEQ ID NO: 1178224 - DNA, 15 bp, Homo sapiens
aacttacagattgcc

SEQ ID NO: 1178225 - DNA, 15 bp, Homo sapiens
caacttacagattgc

SEQ ID NO: 1178226 - DNA, 15 bp, Homo sapiens
acaacttacagattg

SEQ ID NO: 1178227 - DNA, 15 bp, Homo sapiens
tacaacttacagatt

SEQ ID NO: 1178228 - DNA, 15 bp, Homo sapiens
atacaacttacagat

SEQ ID NO: 1178229 - DNA, 15 bp, Homo sapiens
gatacaacttacaga

SEQ ID NO: 1178230 - DNA, 15 bp, Homo sapiens
ggatacaacttacag

SEQ ID NO: 1178231 - DNA, 15 bp, Homo sapiens
tggatacaacttaca

SEQ ID NO: 1178232 - DNA, 15 bp, Homo sapiens
ctggatacaacttac

SEQ ID NO: 1178233 - DNA, 15 bp, Homo sapiens
actggatacaactta

SEQ ID NO: 1178234 - DNA, 15 bp, Homo sapiens
gactggatacaactt

SEQ ID NO: 1178235 - DNA, 15 bp, Homo sapiens
ggactggatacaact

SEQ ID NO: 1178236 - DNA, 15 bp, Homo sapiens
aggactggatacaac

SEQ ID NO: 1178237 - DNA, 15 bp, Homo sapiens
gaggactggatacaa

SEQ ID NO: 1178238 - DNA, 15 bp, Homo sapiens
tgaggactggataca

SEQ ID NO: 1178239 - DNA, 15 bp, Homo sapiens
atgaggactggatac

SEQ ID NO: 1178240 - DNA, 15 bp, Homo sapiens
tatgaggactggata

SEQ ID NO: 1178241 - DNA, 15 bp, Homo sapiens
ttatgaggactggat

SEQ ID NO: 1178242 - DNA, 15 bp, Homo sapiens
cttatgaggactgga

SEQ ID NO: 1178243 - DNA, 15 bp, Homo sapiens
acttatgaggactgg

SEQ ID NO: 1178244 - DNA, 15 bp, Homo sapiens
cacttatgaggactg

SEQ ID NO: 1178245 - DNA, 15 bp, Homo sapiens
acacttatgaggact

SEQ ID NO: 1178246 - DNA, 15 bp, Homo sapiens
aacacttatgaggac

SEQ ID NO: 1178247 - DNA, 15 bp, Homo sapiens
aaacacttatgagga

SEQ ID NO: 1178248 - DNA, 15 bp, Homo sapiens
aaaacacttatgagg

SEQ ID NO: 1178249 - DNA, 15 bp, Homo sapiens
aaaaacacttatgag

SEQ ID NO: 1178250 - DNA, 15 bp, Homo sapiens
caaaaacacttatga

SEQ ID NO: 1178251 - DNA, 15 bp, Homo sapiens
acaaaaacacttatg

SEQ ID NO: 1178252 - DNA, 15 bp, Homo sapiens
cacaaaaacacttat

SEQ ID NO: 1178253 - DNA, 15 bp, Homo sapiens
acacaaaaacactta

SEQ ID NO: 1178254 - DNA, 15 bp, Homo sapiens
tacacaaaaacactt

SEQ ID NO: 1178255 - DNA, 15 bp, Homo sapiens
ctacacaaaaacact

SEQ ID NO: 1178256 - DNA, 15 bp, Homo sapiens
actacacaaaaacac

SEQ ID NO: 1178257 - DNA, 15 bp, Homo sapiens
cactacacaaaaaca

SEQ ID NO: 1178258 - DNA, 15 bp, Homo sapiens
tcactacacaaaaac

SEQ ID NO: 1178259 - DNA, 15 bp, Homo sapiens
ttcactacacaaaaa

SEQ ID NO: 1178260 - DNA, 15 bp, Homo sapiens
attcactacacaaaa

SEQ ID NO: 1178261 - DNA, 15 bp, Homo sapiens
tattcactacacaaa

SEQ ID NO: 1178262 - DNA, 15 bp, Homo sapiens
gtattcactacacaa

SEQ ID NO: 1178263 - DNA, 15 bp, Homo sapiens
tgtattcactacaca

SEQ ID NO: 1178264 - DNA, 15 bp, Homo sapiens
ctgtattcactacac

SEQ ID NO: 1178265 - DNA, 15 bp, Homo sapiens
actgtattcactaca

SEQ ID NO: 1178266 - DNA, 15 bp, Homo sapiens
cactgtattcactac

SEQ ID NO: 1178267 - DNA, 15 bp, Homo sapiens
acactgtattcacta

SEQ ID NO: 1178268 - DNA, 15 bp, Homo sapiens
aacactgtattcact

SEQ ID NO: 1178269 - DNA, 15 bp, Homo sapiens
aaacactgtattcac

SEQ ID NO: 1178270 - DNA, 15 bp, Homo sapiens
aaaacactgtattca

SEQ ID NO: 1178271 - DNA, 15 bp, Homo sapiens
aaaaacactgtattc

SEQ ID NO: 1178272 - DNA, 15 bp, Homo sapiens
taaaaacactgtatt

SEQ ID NO: 1178273 - DNA, 15 bp, Homo sapiens
gtaaaaacactgtat

SEQ ID NO: 1178274 - DNA, 15 bp, Homo sapiens
agtaaaaacactgta

SEQ ID NO: 1178275 - DNA, 15 bp, Homo sapiens
tagtaaaaacactgt

SEQ ID NO: 1178276 - DNA, 15 bp, Homo sapiens
ttagtaaaaacactg

SEQ ID NO: 1178277 - DNA, 15 bp, Homo sapiens
tttagtaaaaacact

SEQ ID NO: 1178278 - DNA, 15 bp, Homo sapiens
ttttagtaaaaacac

SEQ ID NO: 1178279 - DNA, 15 bp, Homo sapiens
attttagtaaaaaca

SEQ ID NO: 1178280 - DNA, 15 bp, Homo sapiens
aattttagtaaaaac

SEQ ID NO: 1178281 - DNA, 15 bp, Homo sapiens
aaattttagtaaaaa

SEQ ID NO: 1178282 - DNA, 15 bp, Homo sapiens
caaattttagtaaaa

SEQ ID NO: 1178283 - DNA, 15 bp, Homo sapiens
tcaaattttagtaaa

SEQ ID NO: 1178284 - DNA, 15 bp, Homo sapiens
ttcaaattttagtaa

SEQ ID NO: 1178285 - DNA, 15 bp, Homo sapiens
attcaaattttagta

SEQ ID NO: 1178286 - DNA, 15 bp, Homo sapiens
aattcaaattttagt

SEQ ID NO: 1178287 - DNA, 15 bp, Homo sapiens
taattcaaattttag

SEQ ID NO: 1178288 - DNA, 15 bp, Homo sapiens
ataattcaaatttta

SEQ ID NO: 1178289 - DNA, 15 bp, Homo sapiens
gataattcaaatttt

SEQ ID NO: 1178290 - DNA, 15 bp, Homo sapiens
agataattcaaattt

SEQ ID NO: 1178291 - DNA, 15 bp, Homo sapiens
cagataattcaaatt

SEQ ID NO: 1178292 - DNA, 15 bp, Homo sapiens
acagataattcaaat

SEQ ID NO: 1178293 - DNA, 15 bp, Homo sapiens
gacagataattcaaa

SEQ ID NO: 1178294 - DNA, 15 bp, Homo sapiens
tgacagataattcaa

SEQ ID NO: 1178295 - DNA, 15 bp, Homo sapiens
ctgacagataattca

SEQ ID NO: 1178296 - DNA, 15 bp, Homo sapiens
actgacagataattc

SEQ ID NO: 1178297 - DNA, 15 bp, Homo sapiens
tactgacagataatt

SEQ ID NO: 1178298 - DNA, 15 bp, Homo sapiens
atactgacagataat

SEQ ID NO: 1178299 - DNA, 15 bp, Homo sapiens
aatactgacagataa

SEQ ID NO: 1178300 - DNA, 15 bp, Homo sapiens
aaatactgacagata

SEQ ID NO: 1178301 - DNA, 15 bp, Homo sapiens
taaatactgacagat

SEQ ID NO: 1178302 - DNA, 15 bp, Homo sapiens
gtaaatactgacaga

SEQ ID NO: 1178303 - DNA, 15 bp, Homo sapiens
agtaaatactgacag

SEQ ID NO: 1178304 - DNA, 15 bp, Homo sapiens
tagtaaatactgaca

SEQ ID NO: 1178305 - DNA, 15 bp, Homo sapiens
ttagtaaatactgac

SEQ ID NO: 1178306 - DNA, 15 bp, Homo sapiens
tttagtaaatactga

SEQ ID NO: 1178307 - DNA, 15 bp, Homo sapiens
atttagtaaatactg

SEQ ID NO: 1178308 - DNA, 15 bp, Homo sapiens
catttagtaaatact

SEQ ID NO: 1178309 - DNA, 15 bp, Homo sapiens
tcatttagtaaatac

SEQ ID NO: 1178310 - DNA, 15 bp, Homo sapiens
gtcatttagtaaata

SEQ ID NO: 1178311 - DNA, 15 bp, Homo sapiens
agtcatttagtaaat

SEQ ID NO: 1178312 - DNA, 15 bp, Homo sapiens
gagtcatttagtaaa

SEQ ID NO: 1178313 - DNA, 15 bp, Homo sapiens
agagtcatttagtaa

SEQ ID NO: 1178314 - DNA, 15 bp, Homo sapiens
gagagtcatttagta

SEQ ID NO: 1178315 - DNA, 15 bp, Homo sapiens
ggagagtcatttagt

SEQ ID NO: 1178316 - DNA, 15 bp, Homo sapiens
tggagagtcatttag

SEQ ID NO: 1178317 - DNA, 15 bp, Homo sapiens
gtggagagtcattta

SEQ ID NO: 1178318 - DNA, 15 bp, Homo sapiens
agtggagagtcattt

SEQ ID NO: 1178319 - DNA, 15 bp, Homo sapiens
aagtggagagtcatt

SEQ ID NO: 1178320 - DNA, 15 bp, Homo sapiens
gaagtggagagtcat

SEQ ID NO: 1178321 - DNA, 15 bp, Homo sapiens
tgaagtggagagtca

SEQ ID NO: 1178322 - DNA, 15 bp, Homo sapiens
atgaagtggagagtc

SEQ ID NO: 1178323 - DNA, 15 bp, Homo sapiens
tatgaagtggagagt

SEQ ID NO: 1178324 - DNA, 15 bp, Homo sapiens
atatgaagtggagag

SEQ ID NO: 1178325 - DNA, 15 bp, Homo sapiens
aatatgaagtggaga

SEQ ID NO: 1178326 - DNA, 15 bp, Homo sapiens
caatatgaagtggag

SEQ ID NO: 1178327 - DNA, 15 bp, Homo sapiens
ccaatatgaagtgga

SEQ ID NO: 1178328 - DNA, 15 bp, Homo sapiens
gccaatatgaagtgg

SEQ ID NO: 1178329 - DNA, 15 bp, Homo sapiens
tgccaatatgaagtg

SEQ ID NO: 1178330 - DNA, 15 bp, Homo sapiens
gtgccaatatgaagt

SEQ ID NO: 1178331 - DNA, 15 bp, Homo sapiens
tgtgccaatatgaag

SEQ ID NO: 1178332 - DNA, 15 bp, Homo sapiens
atgtgccaatatgaa

SEQ ID NO: 1178333 - DNA, 15 bp, Homo sapiens
catgtgccaatatga

SEQ ID NO: 1178334 - DNA, 15 bp, Homo sapiens
gcatgtgccaatatg

SEQ ID NO: 1178335 - DNA, 15 bp, Homo sapiens
agcatgtgccaatat

SEQ ID NO: 1178336 - DNA, 15 bp, Homo sapiens
aagcatgtgccaata

SEQ ID NO: 1178337 - DNA, 15 bp, Homo sapiens
aaagcatgtgccaat

SEQ ID NO: 1178338 - DNA, 15 bp, Homo sapiens
gaaagcatgtgccaa

SEQ ID NO: 1178339 - DNA, 15 bp, Homo sapiens
agaaagcatgtgcca

SEQ ID NO: 1178340 - DNA, 15 bp, Homo sapiens
cagaaagcatgtgcc

SEQ ID NO: 1178341 - DNA, 15 bp, Homo sapiens
gcagaaagcatgtgc

SEQ ID NO: 1178342 - DNA, 15 bp, Homo sapiens
agcagaaagcatgtg

SEQ ID NO: 1178343 - DNA, 15 bp, Homo sapiens
aagcagaaagcatgt

SEQ ID NO: 1178344 - DNA, 15 bp, Homo sapiens
aaagcagaaagcatg

SEQ ID NO: 1178345 - DNA, 15 bp, Homo sapiens
taaagcagaaagcat

SEQ ID NO: 1178346 - DNA, 15 bp, Homo sapiens
gtaaagcagaaagca

SEQ ID NO: 1178347 - DNA, 15 bp, Homo sapiens
ggtaaagcagaaagc

SEQ ID NO: 1178348 - DNA, 15 bp, Homo sapiens
tggtaaagcagaaag

SEQ ID NO: 1178349 - DNA, 15 bp, Homo sapiens
ttggtaaagcagaaa

SEQ ID NO: 1178350 - DNA, 15 bp, Homo sapiens
tttggtaaagcagaa

SEQ ID NO: 1178351 - DNA, 15 bp, Homo sapiens
ttttggtaaagcaga

SEQ ID NO: 1178352 - DNA, 15 bp, Homo sapiens
tttttggtaaagcag

SEQ ID NO: 1178353 - DNA, 15 bp, Homo sapiens
gtttttggtaaagca

SEQ ID NO: 1178354 - DNA, 15 bp, Homo sapiens
ggtttttggtaaagc

SEQ ID NO: 1178355 - DNA, 15 bp, Homo sapiens
gggtttttggtaaag

SEQ ID NO: 1178356 - DNA, 15 bp, Homo sapiens
ggggtttttggtaaa

SEQ ID NO: 1178357 - DNA, 15 bp, Homo sapiens
gggggtttttggtaa

SEQ ID NO: 1178358 - DNA, 15 bp, Homo sapiens
ggggggtttttggta

SEQ ID NO: 1178359 - DNA, 15 bp, Homo sapiens
tggggggtttttggt

SEQ ID NO: 1178360 - DNA, 15 bp, Homo sapiens
gtggggggtttttgg

SEQ ID NO: 1178361 - DNA, 15 bp, Homo sapiens
ggtggggggtttttg

SEQ ID NO: 1178362 - DNA, 15 bp, Homo sapiens
tggtggggggttttt

SEQ ID NO: 1178363 - DNA, 15 bp, Homo sapiens
gtggtggggggtttt

SEQ ID NO: 1178364 - DNA, 15 bp, Homo sapiens
agtggtggggggttt

SEQ ID NO: 1178365 - DNA, 15 bp, Homo sapiens
gagtggtggggggtt

SEQ ID NO: 1178366 - DNA, 15 bp, Homo sapiens
agagtggtggggggt

SEQ ID NO: 1178367 - DNA, 15 bp, Homo sapiens
gagagtggtgggggg

SEQ ID NO: 1178368 - DNA, 15 bp, Homo sapiens
agagagtggtggggg

SEQ ID NO: 1178369 - DNA, 15 bp, Homo sapiens
tagagagtggtgggg

SEQ ID NO: 1178370 - DNA, 15 bp, Homo sapiens
atagagagtggtggg

SEQ ID NO: 1178371 - DNA, 15 bp, Homo sapiens
aatagagagtggtgg

SEQ ID NO: 1178372 - DNA, 15 bp, Homo sapiens
caatagagagtggtg

SEQ ID NO: 1178373 - DNA, 15 bp, Homo sapiens
gcaatagagagtggt

SEQ ID NO: 1178374 - DNA, 15 bp, Homo sapiens
ggcaatagagagtgg

SEQ ID NO: 1178375 - DNA, 15 bp, Homo sapiens
aggcaatagagagtg

SEQ ID NO: 1178376 - DNA, 15 bp, Homo sapiens
aaggcaatagagagt

SEQ ID NO: 1178377 - DNA, 15 bp, Homo sapiens
caaggcaatagagag

SEQ ID NO: 1178378 - DNA, 15 bp, Homo sapiens
gcaaggcaatagaga

SEQ ID NO: 1178379 - DNA, 15 bp, Homo sapiens
agcaaggcaatagag

SEQ ID NO: 1178380 - DNA, 15 bp, Homo sapiens
gagcaaggcaataga

SEQ ID NO: 1178381 - DNA, 15 bp, Homo sapiens
agagcaaggcaatag

SEQ ID NO: 1178382 - DNA, 15 bp, Homo sapiens
cagagcaaggcaata

SEQ ID NO: 1178383 - DNA, 15 bp, Homo sapiens
ccagagcaaggcaat

SEQ ID NO: 1178384 - DNA, 15 bp, Homo sapiens
accagagcaaggcaa

SEQ ID NO: 1178385 - DNA, 15 bp, Homo sapiens
gaccagagcaaggca

SEQ ID NO: 1178386 - DNA, 15 bp, Homo sapiens
agaccagagcaaggc

SEQ ID NO: 1178387 - DNA, 15 bp, Homo sapiens
tagaccagagcaagg

SEQ ID NO: 1178388 - DNA, 15 bp, Homo sapiens
gtagaccagagcaag

SEQ ID NO: 1178389 - DNA, 15 bp, Homo sapiens
agtagaccagagcaa

SEQ ID NO: 1178390 - DNA, 15 bp, Homo sapiens
aagtagaccagagca

SEQ ID NO: 1178391 - DNA, 15 bp, Homo sapiens
gaagtagaccagagc

SEQ ID NO: 1178392 - DNA, 15 bp, Homo sapiens
tgaagtagaccagag

SEQ ID NO: 1178393 - DNA, 15 bp, Homo sapiens
gtgaagtagaccaga

SEQ ID NO: 1178394 - DNA, 15 bp, Homo sapiens
agtgaagtagaccag

SEQ ID NO: 1178395 - DNA, 15 bp, Homo sapiens
aagtgaagtagacca

SEQ ID NO: 1178396 - DNA, 15 bp, Homo sapiens
caagtgaagtagacc

SEQ ID NO: 1178397 - DNA, 15 bp, Homo sapiens
gcaagtgaagtagac

SEQ ID NO: 1178398 - DNA, 15 bp, Homo sapiens
ggcaagtgaagtaga

SEQ ID NO: 1178399 - DNA, 15 bp, Homo sapiens
aggcaagtgaagtag

SEQ ID NO: 1178400 - DNA, 15 bp, Homo sapiens
caggcaagtgaagta

SEQ ID NO: 1178401 - DNA, 15 bp, Homo sapiens
gcaggcaagtgaagt

SEQ ID NO: 1178402 - DNA, 15 bp, Homo sapiens
tgcaggcaagtgaag

SEQ ID NO: 1178403 - DNA, 15 bp, Homo sapiens
atgcaggcaagtgaa

SEQ ID NO: 1178404 - DNA, 15 bp, Homo sapiens
catgcaggcaagtga

SEQ ID NO: 1178405 - DNA, 15 bp, Homo sapiens
tcatgcaggcaagtg

SEQ ID NO: 1178406 - DNA, 15 bp, Homo sapiens
gtcatgcaggcaagt

SEQ ID NO: 1178407 - DNA, 15 bp, Homo sapiens
agtcatgcaggcaag

SEQ ID NO: 1178408 - DNA, 15 bp, Homo sapiens
aagtcatgcaggcaa

SEQ ID NO: 1178409 - DNA, 15 bp, Homo sapiens
caagtcatgcaggca

SEQ ID NO: 1178410 - DNA, 15 bp, Homo sapiens
gcaagtcatgcaggc

SEQ ID NO: 1178411 - DNA, 15 bp, Homo sapiens
agcaagtcatgcagg

SEQ ID NO: 1178412 - DNA, 15 bp, Homo sapiens
cagcaagtcatgcag

SEQ ID NO: 1178413 - DNA, 15 bp, Homo sapiens
acagcaagtcatgca

SEQ ID NO: 1178414 - DNA, 15 bp, Homo sapiens
tacagcaagtcatgc

SEQ ID NO: 1178415 - DNA, 15 bp, Homo sapiens
ctacagcaagtcatg

SEQ ID NO: 1178416 - DNA, 15 bp, Homo sapiens
actacagcaagtcat

SEQ ID NO: 1178417 - DNA, 15 bp, Homo sapiens
gactacagcaagtca

SEQ ID NO: 1178418 - DNA, 15 bp, Homo sapiens
tgactacagcaagtc

SEQ ID NO: 1178419 - DNA, 15 bp, Homo sapiens
atgactacagcaagt

SEQ ID NO: 1178420 - DNA, 15 bp, Homo sapiens
aatgactacagcaag

SEQ ID NO: 1178421 - DNA, 15 bp, Homo sapiens
caatgactacagcaa

SEQ ID NO: 1178422 - DNA, 15 bp, Homo sapiens
tcaatgactacagca

SEQ ID NO: 1178423 - DNA, 15 bp, Homo sapiens
ctcaatgactacagc

SEQ ID NO: 1178424 - DNA, 15 bp, Homo sapiens
tctcaatgactacag

SEQ ID NO: 1178425 - DNA, 15 bp, Homo sapiens
gtctcaatgactaca

SEQ ID NO: 1178426 - DNA, 15 bp, Homo sapiens
tgtctcaatgactac

SEQ ID NO: 1178427 - DNA, 15 bp, Homo sapiens
atgtctcaatgacta

SEQ ID NO: 1178428 - DNA, 15 bp, Homo sapiens
aatgtctcaatgact

SEQ ID NO: 1178429 - DNA, 15 bp, Homo sapiens
caatgtctcaatgac

SEQ ID NO: 1178430 - DNA, 15 bp, Homo sapiens
tcaatgtctcaatga

SEQ ID NO: 1178431 - DNA, 15 bp, Homo sapiens
gtcaatgtctcaatg

SEQ ID NO: 1178432 - DNA, 15 bp, Homo sapiens
agtcaatgtctcaat

SEQ ID NO: 1178433 - DNA, 15 bp, Homo sapiens
aagtcaatgtctcaa

SEQ ID NO: 1178434 - DNA, 15 bp, Homo sapiens
caagtcaatgtctca

SEQ ID NO: 1178435 - DNA, 15 bp, Homo sapiens
tcaagtcaatgtctc

SEQ ID NO: 1178436 - DNA, 15 bp, Homo sapiens
atcaagtcaatgtct

SEQ ID NO: 1178437 - DNA, 15 bp, Homo sapiens
aatcaagtcaatgtc

SEQ ID NO: 1178438 - DNA, 15 bp, Homo sapiens
caatcaagtcaatgt

SEQ ID NO: 1178439 - DNA, 15 bp, Homo sapiens
tcaatcaagtcaatg

SEQ ID NO: 1178440 - DNA, 15 bp, Homo sapiens
gtcaatcaagtcaat

SEQ ID NO: 1178441 - DNA, 15 bp, Homo sapiens
agtcaatcaagtcaa

SEQ ID NO: 1178442 - DNA, 15 bp, Homo sapiens
gagtcaatcaagtca

SEQ ID NO: 1178443 - DNA, 15 bp, Homo sapiens
tgagtcaatcaagtc

SEQ ID NO: 1178444 - DNA, 15 bp, Homo sapiens
gtgagtcaatcaagt

SEQ ID NO: 1178445 - DNA, 15 bp, Homo sapiens
ggtgagtcaatcaag

SEQ ID NO: 1178446 - DNA, 15 bp, Homo sapiens
tggtgagtcaatcaa

SEQ ID NO: 1178447 - DNA, 15 bp, Homo sapiens
ttggtgagtcaatca

SEQ ID NO: 1178448 - DNA, 15 bp, Homo sapiens
cttggtgagtcaatc

SEQ ID NO: 1178449 - DNA, 15 bp, Homo sapiens
acttggtgagtcaat

SEQ ID NO: 1178450 - DNA, 15 bp, Homo sapiens
aacttggtgagtcaa

SEQ ID NO: 1178451 - DNA, 15 bp, Homo sapiens
aaacttggtgagtca

SEQ ID NO: 1178452 - DNA, 15 bp, Homo sapiens
taaacttggtgagtc

SEQ ID NO: 1178453 - DNA, 15 bp, Homo sapiens
gtaaacttggtgagt

SEQ ID NO: 1178454 - DNA, 15 bp, Homo sapiens
tgtaaacttggtgag

SEQ ID NO: 1178455 - DNA, 15 bp, Homo sapiens
ttgtaaacttggtga

SEQ ID NO: 1178456 - DNA, 15 bp, Homo sapiens
tttgtaaacttggtg

SEQ ID NO: 1178457 - DNA, 15 bp, Homo sapiens
atttgtaaacttggt

SEQ ID NO: 1178458 - DNA, 15 bp, Homo sapiens
catttgtaaacttgg

SEQ ID NO: 1178459 - DNA, 15 bp, Homo sapiens
tcatttgtaaacttg

SEQ ID NO: 1178460 - DNA, 15 bp, Homo sapiens
gtcatttgtaaactt

SEQ ID NO: 1178461 - DNA, 15 bp, Homo sapiens
ggtcatttgtaaact

SEQ ID NO: 1178462 - DNA, 15 bp, Homo sapiens
gggtcatttgtaaac

SEQ ID NO: 1178463 - DNA, 15 bp, Homo sapiens
ggggtcatttgtaaa

SEQ ID NO: 1178464 - DNA, 15 bp, Homo sapiens
gggggtcatttgtaa

SEQ ID NO: 1178465 - DNA, 15 bp, Homo sapiens
agggggtcatttgta

SEQ ID NO: 1178466 - DNA, 15 bp, Homo sapiens
tagggggtcatttgt

SEQ ID NO: 1178467 - DNA, 15 bp, Homo sapiens
gtagggggtcatttg

SEQ ID NO: 1178468 - DNA, 15 bp, Homo sapiens
tgtagggggtcattt

SEQ ID NO: 1178469 - DNA, 15 bp, Homo sapiens
atgtagggggtcatt

SEQ ID NO: 1178470 - DNA, 15 bp, Homo sapiens
tatgtagggggtcat

SEQ ID NO: 1178471 - DNA, 15 bp, Homo sapiens
atatgtagggggtca

SEQ ID NO: 1178472 - DNA, 15 bp, Homo sapiens
aatatgtagggggtc

SEQ ID NO: 1178473 - DNA, 15 bp, Homo sapiens
gaatatgtagggggt

SEQ ID NO: 1178474 - DNA, 15 bp, Homo sapiens
ggaatatgtaggggg

SEQ ID NO: 1178475 - DNA, 15 bp, Homo sapiens
tggaatatgtagggg

SEQ ID NO: 1178476 - DNA, 15 bp, Homo sapiens
ttggaatatgtaggg

SEQ ID NO: 1178477 - DNA, 15 bp, Homo sapiens
gttggaatatgtagg

SEQ ID NO: 1178478 - DNA, 15 bp, Homo sapiens
tgttggaatatgtag

SEQ ID NO: 1178479 - DNA, 15 bp, Homo sapiens
atgttggaatatgta

SEQ ID NO: 1178480 - DNA, 15 bp, Homo sapiens
gatgttggaatatgt

SEQ ID NO: 1178481 - DNA, 15 bp, Homo sapiens
ggatgttggaatatg

SEQ ID NO: 1178482 - DNA, 15 bp, Homo sapiens
cggatgttggaatat

SEQ ID NO: 1178483 - DNA, 15 bp, Homo sapiens
tcggatgttggaata

SEQ ID NO: 1178484 - DNA, 15 bp, Homo sapiens
gtcggatgttggaat

SEQ ID NO: 1178485 - DNA, 15 bp, Homo sapiens
ggtcggatgttggaa

SEQ ID NO: 1178486 - DNA, 15 bp, Homo sapiens
aggtcggatgttgga

SEQ ID NO: 1178487 - DNA, 15 bp, Homo sapiens
taggtcggatgttgg

SEQ ID NO: 1178488 - DNA, 15 bp, Homo sapiens
ataggtcggatgttg

SEQ ID NO: 1178489 - DNA, 15 bp, Homo sapiens
cataggtcggatgtt

SEQ ID NO: 1178490 - DNA, 15 bp, Homo sapiens
acataggtcggatgt

SEQ ID NO: 1178491 - DNA, 15 bp, Homo sapiens
cacataggtcggatg

SEQ ID NO: 1178492 - DNA, 15 bp, Homo sapiens
tcacataggtcggat

SEQ ID NO: 1178493 - DNA, 15 bp, Homo sapiens
gtcacataggtcgga

SEQ ID NO: 1178494 - DNA, 15 bp, Homo sapiens
agtcacataggtcgg

SEQ ID NO: 1178495 - DNA, 15 bp, Homo sapiens
aagtcacataggtcg

SEQ ID NO: 1178496 - DNA, 15 bp, Homo sapiens
taagtcacataggtc

SEQ ID NO: 1178497 - DNA, 15 bp, Homo sapiens
ataagtcacataggt

SEQ ID NO: 1178498 - DNA, 15 bp, Homo sapiens
aataagtcacatagg

SEQ ID NO: 1178499 - DNA, 15 bp, Homo sapiens
taataagtcacatag

SEQ ID NO: 1178500 - DNA, 15 bp, Homo sapiens
gtaataagtcacata

SEQ ID NO: 1178501 - DNA, 15 bp, Homo sapiens
ggtaataagtcacat

SEQ ID NO: 1178502 - DNA, 15 bp, Homo sapiens
tggtaataagtcaca

SEQ ID NO: 1178503 - DNA, 15 bp, Homo sapiens
gtggtaataagtcac

SEQ ID NO: 1178504 - DNA, 15 bp, Homo sapiens
ggtggtaataagtca

SEQ ID NO: 1178505 - DNA, 15 bp, Homo sapiens
aggtggtaataagtc

SEQ ID NO: 1178506 - DNA, 15 bp, Homo sapiens
taggtggtaataagt

SEQ ID NO: 1178507 - DNA, 15 bp, Homo sapiens
ataggtggtaataag

SEQ ID NO: 1178508 - DNA, 15 bp, Homo sapiens
aataggtggtaataa

SEQ ID NO: 1178509 - DNA, 15 bp, Homo sapiens
aaataggtggtaata

SEQ ID NO: 1178510 - DNA, 15 bp, Homo sapiens
aaaataggtggtaat

SEQ ID NO: 1178511 - DNA, 15 bp, Homo sapiens
taaaataggtggtaa

SEQ ID NO: 1178512 - DNA, 15 bp, Homo sapiens
ataaaataggtggta

SEQ ID NO: 1178513 - DNA, 15 bp, Homo sapiens
aataaaataggtggt

SEQ ID NO: 1178514 - DNA, 15 bp, Homo sapiens
aaataaaataggtgg

SEQ ID NO: 1178515 - DNA, 15 bp, Homo sapiens
aaaataaaataggtg

SEQ ID NO: 1178516 - DNA, 15 bp, Homo sapiens
gaaaataaaataggt

SEQ ID NO: 1178517 - DNA, 15 bp, Homo sapiens
ggaaaataaaatagg

SEQ ID NO: 1178518 - DNA, 15 bp, Homo sapiens
aggaaaataaaatag

SEQ ID NO: 1178519 - DNA, 15 bp, Homo sapiens
caggaaaataaaata

SEQ ID NO: 1178520 - DNA, 15 bp, Homo sapiens
ccaggaaaataaaat

SEQ ID NO: 1178521 - DNA, 15 bp, Homo sapiens
tccaggaaaataaaa

SEQ ID NO: 1178522 - DNA, 15 bp, Homo sapiens
gtccaggaaaataaa

SEQ ID NO: 1178523 - DNA, 15 bp, Homo sapiens
agtccaggaaaataa

SEQ ID NO: 1178524 - DNA, 15 bp, Homo sapiens
aagtccaggaaaata

SEQ ID NO: 1178525 - DNA, 15 bp, Homo sapiens
aaagtccaggaaaat

SEQ ID NO: 1178526 - DNA, 15 bp, Homo sapiens
gaaagtccaggaaaa

SEQ ID NO: 1178527 - DNA, 15 bp, Homo sapiens
ggaaagtccaggaaa

SEQ ID NO: 1178528 - DNA, 15 bp, Homo sapiens
aggaaagtccaggaa

SEQ ID NO: 1178529 - DNA, 15 bp, Homo sapiens
gaggaaagtccagga

SEQ ID NO: 1178530 - DNA, 15 bp, Homo sapiens
agaggaaagtccagg

SEQ ID NO: 1178531 - DNA, 15 bp, Homo sapiens
gagaggaaagtccag

SEQ ID NO: 1178532 - DNA, 15 bp, Homo sapiens
agagaggaaagtcca

SEQ ID NO: 1178533 - DNA, 15 bp, Homo sapiens
aagagaggaaagtcc

SEQ ID NO: 1178534 - DNA, 15 bp, Homo sapiens
gaagagaggaaagtc

SEQ ID NO: 1178535 - DNA, 15 bp, Homo sapiens
agaagagaggaaagt

SEQ ID NO: 1178536 - DNA, 15 bp, Homo sapiens
aagaagagaggaaag

SEQ ID NO: 1178537 - DNA, 15 bp, Homo sapiens
gaagaagagaggaaa

SEQ ID NO: 1178538 - DNA, 15 bp, Homo sapiens
agaagaagagaggaa

SEQ ID NO: 1178539 - DNA, 15 bp, Homo sapiens
gagaagaagagagga

SEQ ID NO: 1178540 - DNA, 15 bp, Homo sapiens
agagaagaagagagg

SEQ ID NO: 1178541 - DNA, 15 bp, Homo sapiens
gagagaagaagagag

SEQ ID NO: 1178542 - DNA, 15 bp, Homo sapiens
tgagagaagaagaga

SEQ ID NO: 1178543 - DNA, 15 bp, Homo sapiens
ttgagagaagaagag

SEQ ID NO: 1178544 - DNA, 15 bp, Homo sapiens
tttgagagaagaaga

SEQ ID NO: 1178545 - DNA, 15 bp, Homo sapiens
atttgagagaagaag

SEQ ID NO: 1178546 - DNA, 15 bp, Homo sapiens
catttgagagaagaa

SEQ ID NO: 1178547 - DNA, 15 bp, Homo sapiens
acatttgagagaaga

SEQ ID NO: 1178548 - DNA, 15 bp, Homo sapiens
gacatttgagagaag

SEQ ID NO: 1178549 - DNA, 15 bp, Homo sapiens
tgacatttgagagaa

SEQ ID NO: 1178550 - DNA, 15 bp, Homo sapiens
gtgacatttgagaga

SEQ ID NO: 1178551 - DNA, 15 bp, Homo sapiens
ggtgacatttgagag

SEQ ID NO: 1178552 - DNA, 15 bp, Homo sapiens
aggtgacatttgaga

SEQ ID NO: 1178553 - DNA, 15 bp, Homo sapiens
gaggtgacatttgag

SEQ ID NO: 1178554 - DNA, 15 bp, Homo sapiens
gaggaggtgacattt

SEQ ID NO: 1178555 - DNA, 15 bp, Homo sapiens
agaggaggtgacatt

SEQ ID NO: 1178556 - DNA, 15 bp, Homo sapiens
cagaggaggtgacat

SEQ ID NO: 1178557 - DNA, 15 bp, Homo sapiens
acagaggaggtgaca

SEQ ID NO: 1178558 - DNA, 15 bp, Homo sapiens
tacagaggaggtgac

SEQ ID NO: 1178559 - DNA, 15 bp, Homo sapiens
ttacagaggaggtga

SEQ ID NO: 1178560 - DNA, 15 bp, Homo sapiens
tttacagaggaggtg

SEQ ID NO: 1178561 - DNA, 15 bp, Homo sapiens
ttttacagaggaggt

SEQ ID NO: 1178562 - DNA, 15 bp, Homo sapiens
attttacagaggagg

SEQ ID NO: 1178563 - DNA, 15 bp, Homo sapiens
gattttacagaggag

SEQ ID NO: 1178564 - DNA, 15 bp, Homo sapiens
agattttacagagga

SEQ ID NO: 1178565 - DNA, 15 bp, Homo sapiens
aagattttacagagg

SEQ ID NO: 1178566 - DNA, 15 bp, Homo sapiens
gaagattttacagag

SEQ ID NO: 1178567 - DNA, 15 bp, Homo sapiens
agaagattttacaga

SEQ ID NO: 1178568 - DNA, 15 bp, Homo sapiens
tagaagattttacag

SEQ ID NO: 1178569 - DNA, 15 bp, Homo sapiens
gtagaagattttaca

SEQ ID NO: 1178570 - DNA, 15 bp, Homo sapiens
ggtagaagattttac

SEQ ID NO: 1178571 - DNA, 15 bp, Homo sapiens
tggtagaagatttta

SEQ ID NO: 1178572 - DNA, 15 bp, Homo sapiens
ctggtagaagatttt

SEQ ID NO: 1178573 - DNA, 15 bp, Homo sapiens
tctggtagaagattt

SEQ ID NO: 1178574 - DNA, 15 bp, Homo sapiens
atctggtagaagatt

SEQ ID NO: 1178575 - DNA, 15 bp, Homo sapiens
catctggtagaagat

SEQ ID NO: 1178576 - DNA, 15 bp, Homo sapiens
acatctggtagaaga

SEQ ID NO: 1178577 - DNA, 15 bp, Homo sapiens
gacatctggtagaag

SEQ ID NO: 1178578 - DNA, 15 bp, Homo sapiens
tgacatctggtagaa

SEQ ID NO: 1178579 - DNA, 15 bp, Homo sapiens
ttgacatctggtaga

SEQ ID NO: 1178580 - DNA, 15 bp, Homo sapiens
gttgacatctggtag

SEQ ID NO: 1178581 - DNA, 15 bp, Homo sapiens
ggttgacatctggta

SEQ ID NO: 1178582 - DNA, 15 bp, Homo sapiens
gggttgacatctggt

SEQ ID NO: 1178583 - DNA, 15 bp, Homo sapiens
agggttgacatctgg

SEQ ID NO: 1178584 - DNA, 15 bp, Homo sapiens
gagggttgacatctg

SEQ ID NO: 1178585 - DNA, 15 bp, Homo sapiens
agagggttgacatct

SEQ ID NO: 1178586 - DNA, 15 bp, Homo sapiens
aagagggttgacatc

SEQ ID NO: 1178587 - DNA, 15 bp, Homo sapiens
aaagagggttgacat

SEQ ID NO: 1178588 - DNA, 15 bp, Homo sapiens
gaaagagggttgaca

SEQ ID NO: 1178589 - DNA, 15 bp, Homo sapiens
ggaaagagggttgac

SEQ ID NO: 1178590 - DNA, 15 bp, Homo sapiens
aggaaagagggttga

SEQ ID NO: 1178591 - DNA, 15 bp, Homo sapiens
gaggaaagagggttg

SEQ ID NO: 1178592 - DNA, 15 bp, Homo sapiens
agaggaaagagggtt

SEQ ID NO: 1178593 - DNA, 15 bp, Homo sapiens
cagaggaaagagggt

SEQ ID NO: 1178594 - DNA, 15 bp, Homo sapiens
tcagaggaaagaggg

SEQ ID NO: 1178595 - DNA, 15 bp, Homo sapiens
ctcagaggaaagagg

SEQ ID NO: 1178596 - DNA, 15 bp, Homo sapiens
tctcagaggaaagag

SEQ ID NO: 1178597 - DNA, 15 bp, Homo sapiens
ctctcagaggaaaga

SEQ ID NO: 1178598 - DNA, 15 bp, Homo sapiens
tctctcagaggaaag

SEQ ID NO: 1178599 - DNA, 15 bp, Homo sapiens
ctctctcagaggaaa

SEQ ID NO: 1178600 - DNA, 15 bp, Homo sapiens
tctctctcagaggaa

SEQ ID NO: 1178601 - DNA, 15 bp, Homo sapiens
ctctctctcagagga

SEQ ID NO: 1178602 - DNA, 15 bp, Homo sapiens
tctctctctcagagg

SEQ ID NO: 1178603 - DNA, 15 bp, Homo sapiens
ttctctctctcagag

SEQ ID NO: 1178604 - DNA, 15 bp, Homo sapiens
cttctctctctcaga

SEQ ID NO: 1178605 - DNA, 15 bp, Homo sapiens
gcttctctctctcag

SEQ ID NO: 1178606 - DNA, 15 bp, Homo sapiens
tgcttctctctctca

SEQ ID NO: 1178607 - DNA, 15 bp, Homo sapiens
ttgcttctctctctc

SEQ ID NO: 1178608 - DNA, 15 bp, Homo sapiens
attgcttctctctct

SEQ ID NO: 1178609 - DNA, 15 bp, Homo sapiens
tattgcttctctctc

SEQ ID NO: 1178610 - DNA, 15 bp, Homo sapiens
ttattgcttctctct

SEQ ID NO: 1178611 - DNA, 15 bp, Homo sapiens
attattgcttctctc

SEQ ID NO: 1178612 - DNA, 15 bp, Homo sapiens
tattattgcttctct

SEQ ID NO: 1178613 - DNA, 15 bp, Homo sapiens
atattattgcttctc

SEQ ID NO: 1178614 - DNA, 15 bp, Homo sapiens
aatattattgcttct

SEQ ID NO: 1178615 - DNA, 15 bp, Homo sapiens
taatattattgcttc

SEQ ID NO: 1178616 - DNA, 15 bp, Homo sapiens
gtaatattattgctt

SEQ ID NO: 1178617 - DNA, 15 bp, Homo sapiens
agtaatattattgct

SEQ ID NO: 1178618 - DNA, 15 bp, Homo sapiens
gagtaatattattgc

SEQ ID NO: 1178619 - DNA, 15 bp, Homo sapiens
agagtaatattattg

SEQ ID NO: 1178620 - DNA, 15 bp, Homo sapiens
aagagtaatattatt

SEQ ID NO: 1178621 - DNA, 15 bp, Homo sapiens
taagagtaatattat

SEQ ID NO: 1178622 - DNA, 15 bp, Homo sapiens
gtaagagtaatatta

SEQ ID NO: 1178623 - DNA, 15 bp, Homo sapiens
tgtaagagtaatatt

SEQ ID NO: 1178624 - DNA, 15 bp, Homo sapiens
ctgtaagagtaatat

SEQ ID NO: 1178625 - DNA, 15 bp, Homo sapiens
gctgtaagagtaata

SEQ ID NO: 1178626 - DNA, 15 bp, Homo sapiens
tgctgtaagagtaat

SEQ ID NO: 1178627 - DNA, 15 bp, Homo sapiens
gtgctgtaagagtaa

SEQ ID NO: 1178628 - DNA, 15 bp, Homo sapiens
agtgctgtaagagta

SEQ ID NO: 1178629 - DNA, 15 bp, Homo sapiens
aagtgctgtaagagt

SEQ ID NO: 1178630 - DNA, 15 bp, Homo sapiens
aaagtgctgtaagag

SEQ ID NO: 1178631 - DNA, 15 bp, Homo sapiens
caaagtgctgtaaga

SEQ ID NO: 1178632 - DNA, 15 bp, Homo sapiens
acaaagtgctgtaag

SEQ ID NO: 1178633 - DNA, 15 bp, Homo sapiens
aacaaagtgctgtaa

SEQ ID NO: 1178634 - DNA, 15 bp, Homo sapiens
aaacaaagtgctgta

SEQ ID NO: 1178635 - DNA, 15 bp, Homo sapiens
aaaacaaagtgctgt

SEQ ID NO: 1178636 - DNA, 15 bp, Homo sapiens
aaaaacaaagtgctg

SEQ ID NO: 1178637 - DNA, 15 bp, Homo sapiens
caaaaacaaagtgct

SEQ ID NO: 1178638 - DNA, 15 bp, Homo sapiens
ccaaaaacaaagtgc

SEQ ID NO: 1178639 - DNA, 15 bp, Homo sapiens
accaaaaacaaagtg

SEQ ID NO: 1178640 - DNA, 15 bp, Homo sapiens
aaccaaaaacaaagt

SEQ ID NO: 1178641 - DNA, 15 bp, Homo sapiens
aaaccaaaaacaaag

SEQ ID NO: 1178642 - DNA, 15 bp, Homo sapiens
aaaaccaaaaacaaa

SEQ ID NO: 1178643 - DNA, 15 bp, Homo sapiens
aaaaaccaaaaacaa

SEQ ID NO: 1178644 - DNA, 15 bp, Homo sapiens
aaaaaaccaaaaaca

SEQ ID NO: 1178645 - DNA, 15 bp, Homo sapiens
aaaaaaaccaaaaac

SEQ ID NO: 1178646 - DNA, 15 bp, Homo sapiens
aaaaaaaaccaaaaa

SEQ ID NO: 1178647 - DNA, 15 bp, Homo sapiens
gaccaaaaaaaaaaa

SEQ ID NO: 1178648 - DNA, 15 bp, Homo sapiens
tgaccaaaaaaaaaa

SEQ ID NO: 1178649 - DNA, 15 bp, Homo sapiens
ctgaccaaaaaaaaa

SEQ ID NO: 1178650 - DNA, 15 bp, Homo sapiens
actgaccaaaaaaaa

SEQ ID NO: 1178651 - DNA, 15 bp, Homo sapiens
cactgaccaaaaaaa

SEQ ID NO: 1178652 - DNA, 15 bp, Homo sapiens
acactgaccaaaaaa

SEQ ID NO: 1178653 - DNA, 15 bp, Homo sapiens
aacactgaccaaaaa

SEQ ID NO: 1178654 - DNA, 15 bp, Homo sapiens
gaacactgaccaaaa

SEQ ID NO: 1178655 - DNA, 15 bp, Homo sapiens
ggaacactgaccaaa

SEQ ID NO: 1178656 - DNA, 15 bp, Homo sapiens
aggaacactgaccaa

SEQ ID NO: 1178657 - DNA, 15 bp, Homo sapiens
taggaacactgacca

SEQ ID NO: 1178658 - DNA, 15 bp, Homo sapiens
gtaggaacactgacc

SEQ ID NO: 1178659 - DNA, 15 bp, Homo sapiens
ggtaggaacactgac

SEQ ID NO: 1178660 - DNA, 15 bp, Homo sapiens
tggtaggaacactga

SEQ ID NO: 1178661 - DNA, 15 bp, Homo sapiens
atggtaggaacactg

SEQ ID NO: 1178662 - DNA, 15 bp, Homo sapiens
gatggtaggaacact

SEQ ID NO: 1178663 - DNA, 15 bp, Homo sapiens
agatggtaggaacac

SEQ ID NO: 1178664 - DNA, 15 bp, Homo sapiens
cagatggtaggaaca

SEQ ID NO: 1178665 - DNA, 15 bp, Homo sapiens
gcagatggtaggaac

SEQ ID NO: 1178666 - DNA, 15 bp, Homo sapiens
agcagatggtaggaa

SEQ ID NO: 1178667 - DNA, 15 bp, Homo sapiens
aagcagatggtagga

SEQ ID NO: 1178668 - DNA, 15 bp, Homo sapiens
taagcagatggtagg

SEQ ID NO: 1178669 - DNA, 15 bp, Homo sapiens
ttaagcagatggtag

SEQ ID NO: 1178670 - DNA, 15 bp, Homo sapiens
gttaagcagatggta

SEQ ID NO: 1178671 - DNA, 15 bp, Homo sapiens
agttaagcagatggt

SEQ ID NO: 1178672 - DNA, 15 bp, Homo sapiens
tagttaagcagatgg

SEQ ID NO: 1178673 - DNA, 15 bp, Homo sapiens
atagttaagcagatg

SEQ ID NO: 1178674 - DNA, 15 bp, Homo sapiens
tatagttaagcagat

SEQ ID NO: 1178675 - DNA, 15 bp, Homo sapiens
ttatagttaagcaga

SEQ ID NO: 1178676 - DNA, 15 bp, Homo sapiens
cttatagttaagcag

SEQ ID NO: 1178677 - DNA, 15 bp, Homo sapiens
gcttatagttaagca

SEQ ID NO: 1178678 - DNA, 15 bp, Homo sapiens
agcttatagttaagc

SEQ ID NO: 1178679 - DNA, 15 bp, Homo sapiens
gagcttatagttaag

SEQ ID NO: 1178680 - DNA, 15 bp, Homo sapiens
agagcttatagttaa

SEQ ID NO: 1178681 - DNA, 15 bp, Homo sapiens
cagagcttatagtta

SEQ ID NO: 1178682 - DNA, 15 bp, Homo sapiens
gcagagcttatagtt

SEQ ID NO: 1178683 - DNA, 15 bp, Homo sapiens
tgcagagcttatagt

SEQ ID NO: 1178684 - DNA, 15 bp, Homo sapiens
ttgcagagcttatag

SEQ ID NO: 1178685 - DNA, 15 bp, Homo sapiens
tttgcagagcttata

SEQ ID NO: 1178686 - DNA, 15 bp, Homo sapiens
ctttgcagagcttat

SEQ ID NO: 1178687 - DNA, 15 bp, Homo sapiens
cctttgcagagctta

SEQ ID NO: 1178688 - DNA, 15 bp, Homo sapiens
acctttgcagagctt

SEQ ID NO: 1178689 - DNA, 15 bp, Homo sapiens
cacctttgcagagct

SEQ ID NO: 1178690 - DNA, 15 bp, Homo sapiens
tcacctttgcagagc

SEQ ID NO: 1178691 - DNA, 15 bp, Homo sapiens
ctcacctttgcagag

SEQ ID NO: 1178692 - DNA, 15 bp, Homo sapiens
cctcacctttgcaga

SEQ ID NO: 1178693 - DNA, 15 bp, Homo sapiens
ccctcacctttgcag

SEQ ID NO: 1178694 - DNA, 15 bp, Homo sapiens
gccctcacctttgca

SEQ ID NO: 1178695 - DNA, 15 bp, Homo sapiens
agccctcacctttgc

SEQ ID NO: 1178696 - DNA, 15 bp, Homo sapiens
tagccctcacctttg

SEQ ID NO: 1178697 - DNA, 15 bp, Homo sapiens
atagccctcaccttt

SEQ ID NO: 1178698 - DNA, 15 bp, Homo sapiens
catagccctcacctt

SEQ ID NO: 1178699 - DNA, 15 bp, Homo sapiens
acatagccctcacct

SEQ ID NO: 1178700 - DNA, 15 bp, Homo sapiens
aacatagccctcacc

SEQ ID NO: 1178701 - DNA, 15 bp, Homo sapiens
aaacatagccctcac

SEQ ID NO: 1178702 - DNA, 15 bp, Homo sapiens
aaaacatagccctca

SEQ ID NO: 1178703 - DNA, 15 bp, Homo sapiens
taaaacatagccctc

SEQ ID NO: 1178704 - DNA, 15 bp, Homo sapiens
ataaaacatagccct

SEQ ID NO: 1178705 - DNA, 15 bp, Homo sapiens
aataaaacatagccc

SEQ ID NO: 1178706 - DNA, 15 bp, Homo sapiens
taataaaacatagcc

SEQ ID NO: 1178707 - DNA, 15 bp, Homo sapiens
ttaataaaacatagc

SEQ ID NO: 1178708 - DNA, 15 bp, Homo sapiens
attaataaaacatag

SEQ ID NO: 1178709 - DNA, 15 bp, Homo sapiens
gattaataaaacata

SEQ ID NO: 1178710 - DNA, 15 bp, Homo sapiens
agattaataaaacat

SEQ ID NO: 1178711 - DNA, 15 bp, Homo sapiens
gagattaataaaaca

SEQ ID NO: 1178712 - DNA, 15 bp, Homo sapiens
agagattaataaaac

SEQ ID NO: 1178713 - DNA, 15 bp, Homo sapiens
cagagattaataaaa

SEQ ID NO: 1178714 - DNA, 15 bp, Homo sapiens
acagagattaataaa

SEQ ID NO: 1178715 - DNA, 15 bp, Homo sapiens
tacagagattaataa

SEQ ID NO: 1178716 - DNA, 15 bp, Homo sapiens
ttacagagattaata

SEQ ID NO: 1178717 - DNA, 15 bp, Homo sapiens
cttacagagattaat

SEQ ID NO: 1178718 - DNA, 15 bp, Homo sapiens
acttacagagattaa

SEQ ID NO: 1178719 - DNA, 15 bp, Homo sapiens
aacttacagagatta

SEQ ID NO: 1178720 - DNA, 15 bp, Homo sapiens
gaacttacagagatt

SEQ ID NO: 1178721 - DNA, 15 bp, Homo sapiens
ggaacttacagagat

SEQ ID NO: 1178722 - DNA, 15 bp, Homo sapiens
gggaacttacagaga

SEQ ID NO: 1178723 - DNA, 15 bp, Homo sapiens
tgggaacttacagag

SEQ ID NO: 1178724 - DNA, 15 bp, Homo sapiens
gtgggaacttacaga

SEQ ID NO: 1178725 - DNA, 15 bp, Homo sapiens
agtgggaacttacag

SEQ ID NO: 1178726 - DNA, 15 bp, Homo sapiens
aagtgggaacttaca

SEQ ID NO: 1178727 - DNA, 15 bp, Homo sapiens
taagtgggaacttac

SEQ ID NO: 1178728 - DNA, 15 bp, Homo sapiens
gtaagtgggaactta

SEQ ID NO: 1178729 - DNA, 15 bp, Homo sapiens
agtaagtgggaactt

SEQ ID NO: 1178730 - DNA, 15 bp, Homo sapiens
gagtaagtgggaact

SEQ ID NO: 1178731 - DNA, 15 bp, Homo sapiens
ggagtaagtgggaac

SEQ ID NO: 1178732 - DNA, 15 bp, Homo sapiens
gggagtaagtgggaa

SEQ ID NO: 1178733 - DNA, 15 bp, Homo sapiens
agggagtaagtggga

SEQ ID NO: 1178734 - DNA, 15 bp, Homo sapiens
gagggagtaagtggg

SEQ ID NO: 1178735 - DNA, 15 bp, Homo sapiens
tgagggagtaagtgg

SEQ ID NO: 1178736 - DNA, 15 bp, Homo sapiens
atgagggagtaagtg

SEQ ID NO: 1178737 - DNA, 15 bp, Homo sapiens
tatgagggagtaagt

SEQ ID NO: 1178738 - DNA, 15 bp, Homo sapiens
gtatgagggagtaag

SEQ ID NO: 1178739 - DNA, 15 bp, Homo sapiens
tgtatgagggagtaa

SEQ ID NO: 1178740 - DNA, 15 bp, Homo sapiens
gtgtatgagggagta

SEQ ID NO: 1178741 - DNA, 15 bp, Homo sapiens
agtgtatgagggagt

SEQ ID NO: 1178742 - DNA, 15 bp, Homo sapiens
cagtgtatgagggag

SEQ ID NO: 1178743 - DNA, 15 bp, Homo sapiens
gcagtgtatgaggga

SEQ ID NO: 1178744 - DNA, 15 bp, Homo sapiens
tgcagtgtatgaggg

SEQ ID NO: 1178745 - DNA, 15 bp, Homo sapiens
gtgcagtgtatgagg

SEQ ID NO: 1178746 - DNA, 15 bp, Homo sapiens
agtgcagtgtatgag

SEQ ID NO: 1178747 - DNA, 15 bp, Homo sapiens
tagtgcagtgtatga

SEQ ID NO: 1178748 - DNA, 15 bp, Homo sapiens
atagtgcagtgtatg

SEQ ID NO: 1178749 - DNA, 15 bp, Homo sapiens
gatagtgcagtgtat

SEQ ID NO: 1178750 - DNA, 15 bp, Homo sapiens
ggatagtgcagtgta

SEQ ID NO: 1178751 - DNA, 15 bp, Homo sapiens
tggatagtgcagtgt

SEQ ID NO: 1178752 - DNA, 15 bp, Homo sapiens
atggatagtgcagtg

SEQ ID NO: 1178753 - DNA, 15 bp, Homo sapiens
catggatagtgcagt

SEQ ID NO: 1178754 - DNA, 15 bp, Homo sapiens
acatggatagtgcag

SEQ ID NO: 1178755 - DNA, 15 bp, Homo sapiens
gacatggatagtgca

SEQ ID NO: 1178756 - DNA, 15 bp, Homo sapiens
agacatggatagtgc

SEQ ID NO: 1178757 - DNA, 15 bp, Homo sapiens
cagacatggatagtg

SEQ ID NO: 1178758 - DNA, 15 bp, Homo sapiens
gcagacatggatagt

SEQ ID NO: 1178759 - DNA, 15 bp, Homo sapiens
tgcagacatggatag

SEQ ID NO: 1178760 - DNA, 15 bp, Homo sapiens
atgcagacatggata

SEQ ID NO: 1178761 - DNA, 15 bp, Homo sapiens
catgcagacatggat

SEQ ID NO: 1178762 - DNA, 15 bp, Homo sapiens
ccatgcagacatgga

SEQ ID NO: 1178763 - DNA, 15 bp, Homo sapiens
tccatgcagacatgg

SEQ ID NO: 1178764 - DNA, 15 bp, Homo sapiens
ttccatgcagacatg

SEQ ID NO: 1178765 - DNA, 15 bp, Homo sapiens
attccatgcagacat

SEQ ID NO: 1178766 - DNA, 15 bp, Homo sapiens
aattccatgcagaca

SEQ ID NO: 1178767 - DNA, 15 bp, Homo sapiens
taattccatgcagac

SEQ ID NO: 1178768 - DNA, 15 bp, Homo sapiens
ttaattccatgcaga

SEQ ID NO: 1178769 - DNA, 15 bp, Homo sapiens
attaattccatgcag

SEQ ID NO: 1178770 - DNA, 15 bp, Homo sapiens
aattaattccatgca

SEQ ID NO: 1178771 - DNA, 15 bp, Homo sapiens
caattaattccatgc

SEQ ID NO: 1178772 - DNA, 15 bp, Homo sapiens
acaattaattccatg

SEQ ID NO: 1178773 - DNA, 15 bp, Homo sapiens
aacaattaattccat

SEQ ID NO: 1178774 - DNA, 15 bp, Homo sapiens
taacaattaattcca

SEQ ID NO: 1178775 - DNA, 15 bp, Homo sapiens
ataacaattaattcc

SEQ ID NO: 1178776 - DNA, 15 bp, Homo sapiens
aataacaattaattc

SEQ ID NO: 1178777 - DNA, 15 bp, Homo sapiens
gaataacaattaatt

SEQ ID NO: 1178778 - DNA, 15 bp, Homo sapiens
cgaataacaattaat

SEQ ID NO: 1178779 - DNA, 15 bp, Homo sapiens
acgaataacaattaa

SEQ ID NO: 1178780 - DNA, 15 bp, Homo sapiens
aacgaataacaatta

SEQ ID NO: 1178781 - DNA, 15 bp, Homo sapiens
aaacgaataacaatt

SEQ ID NO: 1178782 - DNA, 15 bp, Homo sapiens
aaaacgaataacaat

SEQ ID NO: 1178783 - DNA, 15 bp, Homo sapiens
aaaaacgaataacaa

SEQ ID NO: 1178784 - DNA, 15 bp, Homo sapiens
taaaaacgaataaca

SEQ ID NO: 1178785 - DNA, 15 bp, Homo sapiens
ataaaaacgaataac

SEQ ID NO: 1178786 - DNA, 15 bp, Homo sapiens
cataaaaacgaataa

SEQ ID NO: 1178787 - DNA, 15 bp, Homo sapiens
acataaaaacgaata

SEQ ID NO: 1178788 - DNA, 15 bp, Homo sapiens
cacataaaaacgaat

SEQ ID NO: 1178789 - DNA, 15 bp, Homo sapiens
ccacataaaaacgaa

SEQ ID NO: 1178790 - DNA, 15 bp, Homo sapiens
gccacataaaaacga

SEQ ID NO: 1178791 - DNA, 15 bp, Homo sapiens
ggccacataaaaacg

SEQ ID NO: 1178792 - DNA, 15 bp, Homo sapiens
aggccacataaaaac

SEQ ID NO: 1178793 - DNA, 15 bp, Homo sapiens
aaggccacataaaaa

SEQ ID NO: 1178794 - DNA, 15 bp, Homo sapiens
taaggccacataaaa

SEQ ID NO: 1178795 - DNA, 15 bp, Homo sapiens
gtaaggccacataaa

SEQ ID NO: 1178796 - DNA, 15 bp, Homo sapiens
tgtaaggccacataa

SEQ ID NO: 1178797 - DNA, 15 bp, Homo sapiens
ctgtaaggccacata

SEQ ID NO: 1178798 - DNA, 15 bp, Homo sapiens
cctgtaaggccacat

SEQ ID NO: 1178799 - DNA, 15 bp, Homo sapiens
gcctgtaaggccaca

SEQ ID NO: 1178800 - DNA, 15 bp, Homo sapiens
ggcctgtaaggccac

SEQ ID NO: 1178801 - DNA, 15 bp, Homo sapiens
aggcctgtaaggcca

SEQ ID NO: 1178802 - DNA, 15 bp, Homo sapiens
taggcctgtaaggcc

SEQ ID NO: 1178803 - DNA, 15 bp, Homo sapiens
ctaggcctgtaaggc

SEQ ID NO: 1178804 - DNA, 15 bp, Homo sapiens
tctaggcctgtaagg

SEQ ID NO: 1178805 - DNA, 15 bp, Homo sapiens
atctaggcctgtaag

SEQ ID NO: 1178806 - DNA, 15 bp, Homo sapiens
aatctaggcctgtaa

SEQ ID NO: 1178807 - DNA, 15 bp, Homo sapiens
taatctaggcctgta

SEQ ID NO: 1178808 - DNA, 15 bp, Homo sapiens
ctaatctaggcctgt

SEQ ID NO: 1178809 - DNA, 15 bp, Homo sapiens
actaatctaggcctg

SEQ ID NO: 1178810 - DNA, 15 bp, Homo sapiens
aactaatctaggcct

SEQ ID NO: 1178811 - DNA, 15 bp, Homo sapiens
taactaatctaggcc

SEQ ID NO: 1178812 - DNA, 15 bp, Homo sapiens
ataactaatctaggc

SEQ ID NO: 1178813 - DNA, 15 bp, Homo sapiens
cataactaatctagg

SEQ ID NO: 1178814 - DNA, 15 bp, Homo sapiens
acataactaatctag

SEQ ID NO: 1178815 - DNA, 15 bp, Homo sapiens
cacataactaatcta

SEQ ID NO: 1178816 - DNA, 15 bp, Homo sapiens
acacataactaatct

SEQ ID NO: 1178817 - DNA, 15 bp, Homo sapiens
cacacataactaatc

SEQ ID NO: 1178818 - DNA, 15 bp, Homo sapiens
gcacacataactaat

SEQ ID NO: 1178819 - DNA, 15 bp, Homo sapiens
ggcacacataactaa

SEQ ID NO: 1178820 - DNA, 15 bp, Homo sapiens
aggcacacataacta

SEQ ID NO: 1178821 - DNA, 15 bp, Homo sapiens
aaggcacacataact

SEQ ID NO: 1178822 - DNA, 15 bp, Homo sapiens
aaaggcacacataac

SEQ ID NO: 1178823 - DNA, 15 bp, Homo sapiens
taaaggcacacataa

SEQ ID NO: 1178824 - DNA, 15 bp, Homo sapiens
ctaaaggcacacata

SEQ ID NO: 1178825 - DNA, 15 bp, Homo sapiens
cctaaaggcacacat

SEQ ID NO: 1178826 - DNA, 15 bp, Homo sapiens
tcctaaaggcacaca

SEQ ID NO: 1178827 - DNA, 15 bp, Homo sapiens
ttcctaaaggcacac

SEQ ID NO: 1178828 - DNA, 15 bp, Homo sapiens
cttcctaaaggcaca

SEQ ID NO: 1178829 - DNA, 15 bp, Homo sapiens
ccttcctaaaggcac

SEQ ID NO: 1178830 - DNA, 15 bp, Homo sapiens
gccttcctaaaggca

SEQ ID NO: 1178831 - DNA, 15 bp, Homo sapiens
tgccttcctaaaggc

SEQ ID NO: 1178832 - DNA, 15 bp, Homo sapiens
ctgccttcctaaagg

SEQ ID NO: 1178833 - DNA, 15 bp, Homo sapiens
actgccttcctaaag

SEQ ID NO: 1178834 - DNA, 15 bp, Homo sapiens
tactgccttcctaaa

SEQ ID NO: 1178835 - DNA, 15 bp, Homo sapiens
ttactgccttcctaa

SEQ ID NO: 1178836 - DNA, 15 bp, Homo sapiens
gttactgccttccta

SEQ ID NO: 1178837 - DNA, 15 bp, Homo sapiens
agttactgccttcct

SEQ ID NO: 1178838 - DNA, 15 bp, Homo sapiens
gagttactgccttcc

SEQ ID NO: 1178839 - DNA, 15 bp, Homo sapiens
tgagttactgccttc

SEQ ID NO: 1178840 - DNA, 15 bp, Homo sapiens
atgagttactgcctt

SEQ ID NO: 1178841 - DNA, 15 bp, Homo sapiens
aatgagttactgcct

SEQ ID NO: 1178842 - DNA, 15 bp, Homo sapiens
aaatgagttactgcc

SEQ ID NO: 1178843 - DNA, 15 bp, Homo sapiens
caaatgagttactgc

SEQ ID NO: 1178844 - DNA, 15 bp, Homo sapiens
tcaaatgagttactg

SEQ ID NO: 1178845 - DNA, 15 bp, Homo sapiens
ttcaaatgagttact

SEQ ID NO: 1178846 - DNA, 15 bp, Homo sapiens
tttcaaatgagttac

SEQ ID NO: 1178847 - DNA, 15 bp, Homo sapiens
atttcaaatgagtta

SEQ ID NO: 1178848 - DNA, 15 bp, Homo sapiens
catttcaaatgagtt

SEQ ID NO: 1178849 - DNA, 15 bp, Homo sapiens
acatttcaaatgagt

SEQ ID NO: 1178850 - DNA, 15 bp, Homo sapiens
tacatttcaaatgag

SEQ ID NO: 1178851 - DNA, 15 bp, Homo sapiens
ctacatttcaaatga

SEQ ID NO: 1178852 - DNA, 15 bp, Homo sapiens
tctacatttcaaatg

SEQ ID NO: 1178853 - DNA, 15 bp, Homo sapiens
gtctacatttcaaat

SEQ ID NO: 1178854 - DNA, 15 bp, Homo sapiens
tgtctacatttcaaa

SEQ ID NO: 1178855 - DNA, 15 bp, Homo sapiens
atgtctacatttcaa

SEQ ID NO: 1178856 - DNA, 15 bp, Homo sapiens
catgtctacatttca

SEQ ID NO: 1178857 - DNA, 15 bp, Homo sapiens
ccatgtctacatttc

SEQ ID NO: 1178858 - DNA, 15 bp, Homo sapiens
gccatgtctacattt

SEQ ID NO: 1178859 - DNA, 15 bp, Homo sapiens
agccatgtctacatt

SEQ ID NO: 1178860 - DNA, 15 bp, Homo sapiens
cagccatgtctacat

SEQ ID NO: 1178861 - DNA, 15 bp, Homo sapiens
tcagccatgtctaca

SEQ ID NO: 1178862 - DNA, 15 bp, Homo sapiens
ctcagccatgtctac

SEQ ID NO: 1178863 - DNA, 15 bp, Homo sapiens
actcagccatgtcta

SEQ ID NO: 1178864 - DNA, 15 bp, Homo sapiens
gactcagccatgtct

SEQ ID NO: 1178865 - DNA, 15 bp, Homo sapiens
cgactcagccatgtc

SEQ ID NO: 1178866 - DNA, 15 bp, Homo sapiens
ccgactcagccatgt

SEQ ID NO: 1178867 - DNA, 15 bp, Homo sapiens
tccgactcagccatg

SEQ ID NO: 1178868 - DNA, 15 bp, Homo sapiens
ttccgactcagccat

SEQ ID NO: 1178869 - DNA, 15 bp, Homo sapiens
cttccgactcagcca

SEQ ID NO: 1178870 - DNA, 15 bp, Homo sapiens
ccttccgactcagcc

SEQ ID NO: 1178871 - DNA, 15 bp, Homo sapiens
gccttccgactcagc

SEQ ID NO: 1178872 - DNA, 15 bp, Homo sapiens
ggccttccgactcag

SEQ ID NO: 1178873 - DNA, 15 bp, Homo sapiens
aggccttccgactca

SEQ ID NO: 1178874 - DNA, 15 bp, Homo sapiens
gaggccttccgactc

SEQ ID NO: 1178875 - DNA, 15 bp, Homo sapiens
ggaggccttccgact

SEQ ID NO: 1178876 - DNA, 15 bp, Homo sapiens
tggaggccttccgac

SEQ ID NO: 1178877 - DNA, 15 bp, Homo sapiens
atggaggccttccga

SEQ ID NO: 1178878 - DNA, 15 bp, Homo sapiens
catggaggccttccg

SEQ ID NO: 1178879 - DNA, 15 bp, Homo sapiens
ccatggaggccttcc

SEQ ID NO: 1178880 - DNA, 15 bp, Homo sapiens
tccatggaggccttc

SEQ ID NO: 1178881 - DNA, 15 bp, Homo sapiens
gtccatggaggcctt

SEQ ID NO: 1178882 - DNA, 15 bp, Homo sapiens
agtccatggaggcct

SEQ ID NO: 1178883 - DNA, 15 bp, Homo sapiens
aagtccatggaggcc

SEQ ID NO: 1178884 - DNA, 15 bp, Homo sapiens
aaagtccatggaggc

SEQ ID NO: 1178885 - DNA, 15 bp, Homo sapiens
aaaagtccatggagg

SEQ ID NO: 1178886 - DNA, 15 bp, Homo sapiens
gaaaagtccatggag

SEQ ID NO: 1178887 - DNA, 15 bp, Homo sapiens
cgaaaagtccatgga

SEQ ID NO: 1178888 - DNA, 15 bp, Homo sapiens
ccgaaaagtccatgg

SEQ ID NO: 1178889 - DNA, 15 bp, Homo sapiens
accgaaaagtccatg

SEQ ID NO: 1178890 - DNA, 15 bp, Homo sapiens
taccgaaaagtccat

SEQ ID NO: 1178891 - DNA, 15 bp, Homo sapiens
ataccgaaaagtcca

SEQ ID NO: 1178892 - DNA, 15 bp, Homo sapiens
aataccgaaaagtcc

SEQ ID NO: 1178893 - DNA, 15 bp, Homo sapiens
aaataccgaaaagtc

SEQ ID NO: 1178894 - DNA, 15 bp, Homo sapiens
aaaataccgaaaagt

SEQ ID NO: 1178895 - DNA, 15 bp, Homo sapiens
gaaaataccgaaaag

SEQ ID NO: 1178896 - DNA, 15 bp, Homo sapiens
tgaaaataccgaaaa

SEQ ID NO: 1178897 - DNA, 15 bp, Homo sapiens
ttgaaaataccgaaa

SEQ ID NO: 1178898 - DNA, 15 bp, Homo sapiens
cttgaaaataccgaa

SEQ ID NO: 1178899 - DNA, 15 bp, Homo sapiens
acttgaaaataccga

SEQ ID NO: 1178900 - DNA, 15 bp, Homo sapiens
tacttgaaaataccg

SEQ ID NO: 1178901 - DNA, 15 bp, Homo sapiens
gtacttgaaaatacc

SEQ ID NO: 1178902 - DNA, 15 bp, Homo sapiens
tgtacttgaaaatac

SEQ ID NO: 1178903 - DNA, 15 bp, Homo sapiens
ctgtacttgaaaata

SEQ ID NO: 1178904 - DNA, 15 bp, Homo sapiens
tctgtacttgaaaat

SEQ ID NO: 1178905 - DNA, 15 bp, Homo sapiens
ctctgtacttgaaaa

SEQ ID NO: 1178906 - DNA, 15 bp, Homo sapiens
actctgtacttgaaa

SEQ ID NO: 1178907 - DNA, 15 bp, Homo sapiens
cactctgtacttgaa

SEQ ID NO: 1178908 - DNA, 15 bp, Homo sapiens
tcactctgtacttga

SEQ ID NO: 1178909 - DNA, 15 bp, Homo sapiens
ctcactctgtacttg

SEQ ID NO: 1178910 - DNA, 15 bp, Homo sapiens
tctcactctgtactt

SEQ ID NO: 1178911 - DNA, 15 bp, Homo sapiens
ttctcactctgtact

SEQ ID NO: 1178912 - DNA, 15 bp, Homo sapiens
cttctcactctgtac

SEQ ID NO: 1178913 - DNA, 15 bp, Homo sapiens
acttctcactctgta

SEQ ID NO: 1178914 - DNA, 15 bp, Homo sapiens
cacttctcactctgt

SEQ ID NO: 1178915 - DNA, 15 bp, Homo sapiens
gcacttctcactctg

SEQ ID NO: 1178916 - DNA, 15 bp, Homo sapiens
agcacttctcactct

SEQ ID NO: 1178917 - DNA, 15 bp, Homo sapiens
cagcacttctcactc

SEQ ID NO: 1178918 - DNA, 15 bp, Homo sapiens
acagcacttctcact

SEQ ID NO: 1178919 - DNA, 15 bp, Homo sapiens
tacagcacttctcac

SEQ ID NO: 1178920 - DNA, 15 bp, Homo sapiens
atacagcacttctca

SEQ ID NO: 1178921 - DNA, 15 bp, Homo sapiens
gatacagcacttctc

SEQ ID NO: 1178922 - DNA, 15 bp, Homo sapiens
agatacagcacttct

SEQ ID NO: 1178923 - DNA, 15 bp, Homo sapiens
tagatacagcacttc

SEQ ID NO: 1178924 - DNA, 15 bp, Homo sapiens
ttagatacagcactt

SEQ ID NO: 1178925 - DNA, 15 bp, Homo sapiens
tttagatacagcact

SEQ ID NO: 1178926 - DNA, 15 bp, Homo sapiens
ctttagatacagcac

SEQ ID NO: 1178927 - DNA, 15 bp, Homo sapiens
cctttagatacagca

SEQ ID NO: 1178928 - DNA, 15 bp, Homo sapiens
tcctttagatacagc

SEQ ID NO: 1178929 - DNA, 15 bp, Homo sapiens
ttcctttagatacag

SEQ ID NO: 1178930 - DNA, 15 bp, Homo sapiens
tttcctttagataca

SEQ ID NO: 1178931 - DNA, 15 bp, Homo sapiens
gtttcctttagatac

SEQ ID NO: 1178932 - DNA, 15 bp, Homo sapiens
agtttcctttagata

SEQ ID NO: 1178933 - DNA, 15 bp, Homo sapiens
tagtttcctttagat

SEQ ID NO: 1178934 - DNA, 15 bp, Homo sapiens
gtagtttcctttaga

SEQ ID NO: 1178935 - DNA, 15 bp, Homo sapiens
agtagtttcctttag

SEQ ID NO: 1178936 - DNA, 15 bp, Homo sapiens
tagtagtttccttta

SEQ ID NO: 1178937 - DNA, 15 bp, Homo sapiens
ttagtagtttccttt

SEQ ID NO: 1178938 - DNA, 15 bp, Homo sapiens
cttagtagtttcctt

SEQ ID NO: 1178939 - DNA, 15 bp, Homo sapiens
ccttagtagtttcct

SEQ ID NO: 1178940 - DNA, 15 bp, Homo sapiens
cccttagtagtttcc

SEQ ID NO: 1178941 - DNA, 15 bp, Homo sapiens
tcccttagtagtttc

SEQ ID NO: 1178942 - DNA, 15 bp, Homo sapiens
ttcccttagtagttt

SEQ ID NO: 1178943 - DNA, 15 bp, Homo sapiens
attcccttagtagtt

SEQ ID NO: 1178944 - DNA, 15 bp, Homo sapiens
aattcccttagtagt

SEQ ID NO: 1178945 - DNA, 15 bp, Homo sapiens
aaattcccttagtag

SEQ ID NO: 1178946 - DNA, 15 bp, Homo sapiens
taaattcccttagta

SEQ ID NO: 1178947 - DNA, 15 bp, Homo sapiens
ctaaattcccttagt

SEQ ID NO: 1178948 - DNA, 15 bp, Homo sapiens
cctaaattcccttag

SEQ ID NO: 1178949 - DNA, 15 bp, Homo sapiens
acctaaattccctta

SEQ ID NO: 1178950 - DNA, 15 bp, Homo sapiens
tacctaaattccctt

SEQ ID NO: 1178951 - DNA, 15 bp, Homo sapiens
ttacctaaattccct

SEQ ID NO: 1178952 - DNA, 15 bp, Homo sapiens
tttacctaaattccc

SEQ ID NO: 1178953 - DNA, 15 bp, Homo sapiens
gtttacctaaattcc

SEQ ID NO: 1178954 - DNA, 15 bp, Homo sapiens
tgtttacctaaattc

SEQ ID NO: 1178955 - DNA, 15 bp, Homo sapiens
ctgtttacctaaatt

SEQ ID NO: 1178956 - DNA, 15 bp, Homo sapiens
tctgtttacctaaat

SEQ ID NO: 1178957 - DNA, 15 bp, Homo sapiens
ttctgtttacctaaa

SEQ ID NO: 1178958 - DNA, 15 bp, Homo sapiens
gttctgtttacctaa

SEQ ID NO: 1178959 - DNA, 15 bp, Homo sapiens
tgttctgtttaccta

SEQ ID NO: 1178960 - DNA, 15 bp, Homo sapiens
atgttctgtttacct

SEQ ID NO: 1178961 - DNA, 15 bp, Homo sapiens
catgttctgtttacc

SEQ ID NO: 1178962 - DNA, 15 bp, Homo sapiens
tcatgttctgtttac

SEQ ID NO: 1178963 - DNA, 15 bp, Homo sapiens
atcatgttctgttta

SEQ ID NO: 1178964 - DNA, 15 bp, Homo sapiens
gatcatgttctgttt

SEQ ID NO: 1178965 - DNA, 15 bp, Homo sapiens
ggatcatgttctgtt

SEQ ID NO: 1178966 - DNA, 15 bp, Homo sapiens
aggatcatgttctgt

SEQ ID NO: 1178967 - DNA, 15 bp, Homo sapiens
aaggatcatgttctg

SEQ ID NO: 1178968 - DNA, 15 bp, Homo sapiens
aaaggatcatgttct

SEQ ID NO: 1178969 - DNA, 15 bp, Homo sapiens
aaaaggatcatgttc

SEQ ID NO: 1178970 - DNA, 15 bp, Homo sapiens
aaaaaggatcatgtt

SEQ ID NO: 1178971 - DNA, 15 bp, Homo sapiens
caaaaaggatcatgt

SEQ ID NO: 1178972 - DNA, 15 bp, Homo sapiens
acaaaaaggatcatg

SEQ ID NO: 1178973 - DNA, 15 bp, Homo sapiens
aacaaaaaggatcat

SEQ ID NO: 1178974 - DNA, 15 bp, Homo sapiens
caacaaaaaggatca

SEQ ID NO: 1178975 - DNA, 15 bp, Homo sapiens
ccaacaaaaaggatc

SEQ ID NO: 1178976 - DNA, 15 bp, Homo sapiens
tccaacaaaaaggat

SEQ ID NO: 1178977 - DNA, 15 bp, Homo sapiens
ttccaacaaaaagga

SEQ ID NO: 1178978 - DNA, 15 bp, Homo sapiens
cttccaacaaaaagg

SEQ ID NO: 1178979 - DNA, 15 bp, Homo sapiens
gcttccaacaaaaag

SEQ ID NO: 1178980 - DNA, 15 bp, Homo sapiens
agcttccaacaaaaa

SEQ ID NO: 1178981 - DNA, 15 bp, Homo sapiens
cagcttccaacaaaa

SEQ ID NO: 1178982 - DNA, 15 bp, Homo sapiens
ccagcttccaacaaa

SEQ ID NO: 1178983 - DNA, 15 bp, Homo sapiens
gccagcttccaacaa

SEQ ID NO: 1178984 - DNA, 15 bp, Homo sapiens
agccagcttccaaca

SEQ ID NO: 1178985 - DNA, 15 bp, Homo sapiens
cagccagcttccaac

SEQ ID NO: 1178986 - DNA, 15 bp, Homo sapiens
acagccagcttccaa

SEQ ID NO: 1178987 - DNA, 15 bp, Homo sapiens
cacagccagcttcca

SEQ ID NO: 1178988 - DNA, 15 bp, Homo sapiens
tcacagccagcttcc

SEQ ID NO: 1178989 - DNA, 15 bp, Homo sapiens
atcacagccagcttc

SEQ ID NO: 1178990 - DNA, 15 bp, Homo sapiens
gatcacagccagctt

SEQ ID NO: 1178991 - DNA, 15 bp, Homo sapiens
agatcacagccagct

SEQ ID NO: 1178992 - DNA, 15 bp, Homo sapiens
gagatcacagccagc

SEQ ID NO: 1178993 - DNA, 15 bp, Homo sapiens
ggagatcacagccag

SEQ ID NO: 1178994 - DNA, 15 bp, Homo sapiens
tggagatcacagcca

SEQ ID NO: 1178995 - DNA, 15 bp, Homo sapiens
ctggagatcacagcc

SEQ ID NO: 1178996 - DNA, 15 bp, Homo sapiens
tctggagatcacagc

SEQ ID NO: 1178997 - DNA, 15 bp, Homo sapiens
atctggagatcacag

SEQ ID NO: 1178998 - DNA, 15 bp, Homo sapiens
aatctggagatcaca

SEQ ID NO: 1178999 - DNA, 15 bp, Homo sapiens
taatctggagatcac

SEQ ID NO: 1179000 - DNA, 15 bp, Homo sapiens
ttaatctggagatca

SEQ ID NO: 1179001 - DNA, 15 bp, Homo sapiens
tttaatctggagatc

SEQ ID NO: 1179002 - DNA, 15 bp, Homo sapiens
ttttaatctggagat

SEQ ID NO: 1179003 - DNA, 15 bp, Homo sapiens
gttttaatctggaga

SEQ ID NO: 1179004 - DNA, 15 bp, Homo sapiens
tgttttaatctggag

SEQ ID NO: 1179005 - DNA, 15 bp, Homo sapiens
gtgttttaatctgga

SEQ ID NO: 1179006 - DNA, 15 bp, Homo sapiens
agtgttttaatctgg

SEQ ID NO: 1179007 - DNA, 15 bp, Homo sapiens
tagtgttttaatctg

SEQ ID NO: 1179008 - DNA, 15 bp, Homo sapiens
atagtgttttaatct

SEQ ID NO: 1179009 - DNA, 15 bp, Homo sapiens
aatagtgttttaatc

SEQ ID NO: 1179010 - DNA, 15 bp, Homo sapiens
caatagtgttttaat

SEQ ID NO: 1179011 - DNA, 15 bp, Homo sapiens
gcaatagtgttttaa

SEQ ID NO: 1179012 - DNA, 15 bp, Homo sapiens
tgcaatagtgtttta

SEQ ID NO: 1179013 - DNA, 15 bp, Homo sapiens
atgcaatagtgtttt

SEQ ID NO: 1179014 - DNA, 15 bp, Homo sapiens
catgcaatagtgttt

SEQ ID NO: 1179015 - DNA, 15 bp, Homo sapiens
gcatgcaatagtgtt

SEQ ID NO: 1179016 - DNA, 15 bp, Homo sapiens
ggcatgcaatagtgt

SEQ ID NO: 1179017 - DNA, 15 bp, Homo sapiens
aggcatgcaatagtg

SEQ ID NO: 1179018 - DNA, 15 bp, Homo sapiens
gaggcatgcaatagt

SEQ ID NO: 1179019 - DNA, 15 bp, Homo sapiens
tgaggcatgcaatag

SEQ ID NO: 1179020 - DNA, 15 bp, Homo sapiens
atgaggcatgcaata

SEQ ID NO: 1179021 - DNA, 15 bp, Homo sapiens
catgaggcatgcaat

SEQ ID NO: 1179022 - DNA, 15 bp, Homo sapiens
tcatgaggcatgcaa

SEQ ID NO: 1179023 - DNA, 15 bp, Homo sapiens
ctcatgaggcatgca

SEQ ID NO: 1179024 - DNA, 15 bp, Homo sapiens
cctcatgaggcatgc

SEQ ID NO: 1179025 - DNA, 15 bp, Homo sapiens
tcctcatgaggcatg

SEQ ID NO: 1179026 - DNA, 15 bp, Homo sapiens
ctcctcatgaggcat

SEQ ID NO: 1179027 - DNA, 15 bp, Homo sapiens
gctcctcatgaggca

SEQ ID NO: 1179028 - DNA, 15 bp, Homo sapiens
tgctcctcatgaggc

SEQ ID NO: 1179029 - DNA, 15 bp, Homo sapiens
atgctcctcatgagg

SEQ ID NO: 1179030 - DNA, 15 bp, Homo sapiens
gatgctcctcatgag

SEQ ID NO: 1179031 - DNA, 15 bp, Homo sapiens
tgatgctcctcatga

SEQ ID NO: 1179032 - DNA, 15 bp, Homo sapiens
ctgatgctcctcatg

SEQ ID NO: 1179033 - DNA, 15 bp, Homo sapiens
gctgatgctcctcat

SEQ ID NO: 1179034 - DNA, 15 bp, Homo sapiens
tgctgatgctcctca

SEQ ID NO: 1179035 - DNA, 15 bp, Homo sapiens
ttgctgatgctcctc

SEQ ID NO: 1179036 - DNA, 15 bp, Homo sapiens
tttgctgatgctcct

SEQ ID NO: 1179037 - DNA, 15 bp, Homo sapiens
atttgctgatgctcc

SEQ ID NO: 1179038 - DNA, 15 bp, Homo sapiens
gatttgctgatgctc

SEQ ID NO: 1179039 - DNA, 15 bp, Homo sapiens
ggatttgctgatgct

SEQ ID NO: 1179040 - DNA, 15 bp, Homo sapiens
aggatttgctgatgc

SEQ ID NO: 1179041 - DNA, 15 bp, Homo sapiens
aaggatttgctgatg

SEQ ID NO: 1179042 - DNA, 15 bp, Homo sapiens
aaaggatttgctgat

SEQ ID NO: 1179043 - DNA, 15 bp, Homo sapiens
taaaggatttgctga

SEQ ID NO: 1179044 - DNA, 15 bp, Homo sapiens
ctaaaggatttgctg

SEQ ID NO: 1179045 - DNA, 15 bp, Homo sapiens
actaaaggatttgct

SEQ ID NO: 1179046 - DNA, 15 bp, Homo sapiens
tactaaaggatttgc

SEQ ID NO: 1179047 - DNA, 15 bp, Homo sapiens
atactaaaggatttg

SEQ ID NO: 1179048 - DNA, 15 bp, Homo sapiens
catactaaaggattt

SEQ ID NO: 1179049 - DNA, 15 bp, Homo sapiens
gcatactaaaggatt

SEQ ID NO: 1179050 - DNA, 15 bp, Homo sapiens
tgcatactaaaggat

SEQ ID NO: 1179051 - DNA, 15 bp, Homo sapiens
gtgcatactaaagga

SEQ ID NO: 1179052 - DNA, 15 bp, Homo sapiens
tgtgcatactaaagg

SEQ ID NO: 1179053 - DNA, 15 bp, Homo sapiens
ttgtgcatactaaag

SEQ ID NO: 1179054 - DNA, 15 bp, Homo sapiens
gttgtgcatactaaa

SEQ ID NO: 1179055 - DNA, 15 bp, Homo sapiens
agttgtgcatactaa

SEQ ID NO: 1179056 - DNA, 15 bp, Homo sapiens
aagttgtgcatacta

SEQ ID NO: 1179057 - DNA, 15 bp, Homo sapiens
caagttgtgcatact

SEQ ID NO: 1179058 - DNA, 15 bp, Homo sapiens
acaagttgtgcatac

SEQ ID NO: 1179059 - DNA, 15 bp, Homo sapiens
cacaagttgtgcata

SEQ ID NO: 1179060 - DNA, 15 bp, Homo sapiens
acacaagttgtgcat

SEQ ID NO: 1179061 - DNA, 15 bp, Homo sapiens
aacacaagttgtgca

SEQ ID NO: 1179062 - DNA, 15 bp, Homo sapiens
taacacaagttgtgc

SEQ ID NO: 1179063 - DNA, 15 bp, Homo sapiens
ctaacacaagttgtg

SEQ ID NO: 1179064 - DNA, 15 bp, Homo sapiens
tctaacacaagttgt

SEQ ID NO: 1179065 - DNA, 15 bp, Homo sapiens
ttctaacacaagttg

SEQ ID NO: 1179066 - DNA, 15 bp, Homo sapiens
attctaacacaagtt

SEQ ID NO: 1179067 - DNA, 15 bp, Homo sapiens
aattctaacacaagt

SEQ ID NO: 1179068 - DNA, 15 bp, Homo sapiens
caattctaacacaag

SEQ ID NO: 1179069 - DNA, 15 bp, Homo sapiens
gcaattctaacacaa

SEQ ID NO: 1179070 - DNA, 15 bp, Homo sapiens
tgcaattctaacaca

SEQ ID NO: 1179071 - DNA, 15 bp, Homo sapiens
ctgcaattctaacac

SEQ ID NO: 1179072 - DNA, 15 bp, Homo sapiens
cctgcaattctaaca

SEQ ID NO: 1179073 - DNA, 15 bp, Homo sapiens
tcctgcaattctaac

SEQ ID NO: 1179074 - DNA, 15 bp, Homo sapiens
ctcctgcaattctaa

SEQ ID NO: 1179075 - DNA, 15 bp, Homo sapiens
actcctgcaattcta

SEQ ID NO: 1179076 - DNA, 15 bp, Homo sapiens
gactcctgcaattct

SEQ ID NO: 1179077 - DNA, 15 bp, Homo sapiens
tgactcctgcaattc

SEQ ID NO: 1179078 - DNA, 15 bp, Homo sapiens
ctgactcctgcaatt

SEQ ID NO: 1179079 - DNA, 15 bp, Homo sapiens
actgactcctgcaat

SEQ ID NO: 1179080 - DNA, 15 bp, Homo sapiens
gactgactcctgcaa

SEQ ID NO: 1179081 - DNA, 15 bp, Homo sapiens
agactgactcctgca

SEQ ID NO: 1179082 - DNA, 15 bp, Homo sapiens
tagactgactcctgc

SEQ ID NO: 1179083 - DNA, 15 bp, Homo sapiens
atagactgactcctg

SEQ ID NO: 1179084 - DNA, 15 bp, Homo sapiens
aatagactgactcct

SEQ ID NO: 1179085 - DNA, 15 bp, Homo sapiens
gaatagactgactcc

SEQ ID NO: 1179086 - DNA, 15 bp, Homo sapiens
ggaatagactgactc

SEQ ID NO: 1179087 - DNA, 15 bp, Homo sapiens
aggaatagactgact

SEQ ID NO: 1179088 - DNA, 15 bp, Homo sapiens
caggaatagactgac

SEQ ID NO: 1179089 - DNA, 15 bp, Homo sapiens
ccaggaatagactga

SEQ ID NO: 1179090 - DNA, 15 bp, Homo sapiens
cccaggaatagactg

SEQ ID NO: 1179091 - DNA, 15 bp, Homo sapiens
ccccaggaatagact

SEQ ID NO: 1179092 - DNA, 15 bp, Homo sapiens
cccccaggaatagac

SEQ ID NO: 1179093 - DNA, 15 bp, Homo sapiens
gcccccaggaataga

SEQ ID NO: 1179094 - DNA, 15 bp, Homo sapiens
agcccccaggaatag

SEQ ID NO: 1179095 - DNA, 15 bp, Homo sapiens
cagcccccaggaata

SEQ ID NO: 1179096 - DNA, 15 bp, Homo sapiens
ccagcccccaggaat

SEQ ID NO: 1179097 - DNA, 15 bp, Homo sapiens
cccagcccccaggaa

SEQ ID NO: 1179098 - DNA, 15 bp, Homo sapiens
gcccagcccccagga

SEQ ID NO: 1179099 - DNA, 15 bp, Homo sapiens
agcccagcccccagg

SEQ ID NO: 1179100 - DNA, 15 bp, Homo sapiens
cagcccagcccccag

SEQ ID NO: 1179101 - DNA, 15 bp, Homo sapiens
tcagcccagccccca

SEQ ID NO: 1179102 - DNA, 15 bp, Homo sapiens
ctcagcccagccccc

SEQ ID NO: 1179103 - DNA, 15 bp, Homo sapiens
tctcagcccagcccc

SEQ ID NO: 1179104 - DNA, 15 bp, Homo sapiens
atctcagcccagccc

SEQ ID NO: 1179105 - DNA, 15 bp, Homo sapiens
tatctcagcccagcc

SEQ ID NO: 1179106 - DNA, 15 bp, Homo sapiens
ttatctcagcccagc

SEQ ID NO: 1179107 - DNA, 15 bp, Homo sapiens
attatctcagcccag

SEQ ID NO: 1179108 - DNA, 15 bp, Homo sapiens
cattatctcagccca

SEQ ID NO: 1179109 - DNA, 15 bp, Homo sapiens
tcattatctcagccc

SEQ ID NO: 1179110 - DNA, 15 bp, Homo sapiens
ttcattatctcagcc

SEQ ID NO: 1179111 - DNA, 15 bp, Homo sapiens
attcattatctcagc

SEQ ID NO: 1179112 - DNA, 15 bp, Homo sapiens
aattcattatctcag

SEQ ID NO: 1179113 - DNA, 15 bp, Homo sapiens
caattcattatctca

SEQ ID NO: 1179114 - DNA, 15 bp, Homo sapiens
tcaattcattatctc

SEQ ID NO: 1179115 - DNA, 15 bp, Homo sapiens
ctcaattcattatct

SEQ ID NO: 1179116 - DNA, 15 bp, Homo sapiens
actcaattcattatc

SEQ ID NO: 1179117 - DNA, 15 bp, Homo sapiens
gactcaattcattat

SEQ ID NO: 1179118 - DNA, 15 bp, Homo sapiens
tgactcaattcatta

SEQ ID NO: 1179119 - DNA, 15 bp, Homo sapiens
ttgactcaattcatt

SEQ ID NO: 1179120 - DNA, 15 bp, Homo sapiens
attgactcaattcat

SEQ ID NO: 1179121 - DNA, 15 bp, Homo sapiens
cattgactcaattca

SEQ ID NO: 1179122 - DNA, 15 bp, Homo sapiens
gcattgactcaattc

SEQ ID NO: 1179123 - DNA, 15 bp, Homo sapiens
ggcattgactcaatt

SEQ ID NO: 1179124 - DNA, 15 bp, Homo sapiens
tggcattgactcaat

SEQ ID NO: 1179125 - DNA, 15 bp, Homo sapiens
ctggcattgactcaa

SEQ ID NO: 1179126 - DNA, 15 bp, Homo sapiens
cctggcattgactca

SEQ ID NO: 1179127 - DNA, 15 bp, Homo sapiens
acctggcattgactc

SEQ ID NO: 1179128 - DNA, 15 bp, Homo sapiens
tacctggcattgact

SEQ ID NO: 1179129 - DNA, 15 bp, Homo sapiens
ctacctggcattgac

SEQ ID NO: 1179130 - DNA, 15 bp, Homo sapiens
tctacctggcattga

SEQ ID NO: 1179131 - DNA, 15 bp, Homo sapiens
ctctacctggcattg

SEQ ID NO: 1179132 - DNA, 15 bp, Homo sapiens
gctctacctggcatt

SEQ ID NO: 1179133 - DNA, 15 bp, Homo sapiens
tgctctacctggcat

SEQ ID NO: 1179134 - DNA, 15 bp, Homo sapiens
gtgctctacctggca

SEQ ID NO: 1179135 - DNA, 15 bp, Homo sapiens
tgtgctctacctggc

SEQ ID NO: 1179136 - DNA, 15 bp, Homo sapiens
ttgtgctctacctgg

SEQ ID NO: 1179137 - DNA, 15 bp, Homo sapiens
tttgtgctctacctg

SEQ ID NO: 1179138 - DNA, 15 bp, Homo sapiens
atttgtgctctacct

SEQ ID NO: 1179139 - DNA, 15 bp, Homo sapiens
tatttgtgctctacc

SEQ ID NO: 1179140 - DNA, 15 bp, Homo sapiens
gtatttgtgctctac

SEQ ID NO: 1179141 - DNA, 15 bp, Homo sapiens
cgtatttgtgctcta

SEQ ID NO: 1179142 - DNA, 15 bp, Homo sapiens
gcgtatttgtgctct

SEQ ID NO: 1179143 - DNA, 15 bp, Homo sapiens
agcgtatttgtgctc

SEQ ID NO: 1179144 - DNA, 15 bp, Homo sapiens
tagcgtatttgtgct

SEQ ID NO: 1179145 - DNA, 15 bp, Homo sapiens
ctagcgtatttgtgc

SEQ ID NO: 1179146 - DNA, 15 bp, Homo sapiens
tctagcgtatttgtg

SEQ ID NO: 1179147 - DNA, 15 bp, Homo sapiens
ttctagcgtatttgt

SEQ ID NO: 1179148 - DNA, 15 bp, Homo sapiens
tttctagcgtatttg

SEQ ID NO: 1179149 - DNA, 15 bp, Homo sapiens
ttttctagcgtattt

SEQ ID NO: 1179150 - DNA, 15 bp, Homo sapiens
tttttctagcgtatt

SEQ ID NO: 1179151 - DNA, 15 bp, Homo sapiens
ttttttctagcgtat

SEQ ID NO: 1179152 - DNA, 15 bp, Homo sapiens
attttttctagcgta

SEQ ID NO: 1179153 - DNA, 15 bp, Homo sapiens
cattttttctagcgt

SEQ ID NO: 1179154 - DNA, 15 bp, Homo sapiens
tcattttttctagcg

SEQ ID NO: 1179155 - DNA, 15 bp, Homo sapiens
ttcattttttctagc

SEQ ID NO: 1179156 - DNA, 15 bp, Homo sapiens
tttcattttttctag

SEQ ID NO: 1179157 - DNA, 15 bp, Homo sapiens
gtttcattttttcta

SEQ ID NO: 1179158 - DNA, 15 bp, Homo sapiens
tgtttcattttttct

SEQ ID NO: 1179159 - DNA, 15 bp, Homo sapiens
ctgtttcattttttc

SEQ ID NO: 1179160 - DNA, 15 bp, Homo sapiens
tctgtttcatttttt

SEQ ID NO: 1179161 - DNA, 15 bp, Homo sapiens
ttctgtttcattttt

SEQ ID NO: 1179162 - DNA, 15 bp, Homo sapiens
tttctgtttcatttt

SEQ ID NO: 1179163 - DNA, 15 bp, Homo sapiens
ctttctgtttcattt

SEQ ID NO: 1179164 - DNA, 15 bp, Homo sapiens
tctttctgtttcatt

SEQ ID NO: 1179165 - DNA, 15 bp, Homo sapiens
ttctttctgtttcat

SEQ ID NO: 1179166 - DNA, 15 bp, Homo sapiens
gttctttctgtttca

SEQ ID NO: 1179167 - DNA, 15 bp, Homo sapiens
agttctttctgtttc

SEQ ID NO: 1179168 - DNA, 15 bp, Homo sapiens
gagttctttctgttt

SEQ ID NO: 1179169 - DNA, 15 bp, Homo sapiens
ggagttctttctgtt

SEQ ID NO: 1179170 - DNA, 15 bp, Homo sapiens
cggagttctttctgt

SEQ ID NO: 1179171 - DNA, 15 bp, Homo sapiens
acggagttctttctg

SEQ ID NO: 1179172 - DNA, 15 bp, Homo sapiens
tacggagttctttct

SEQ ID NO: 1179173 - DNA, 15 bp, Homo sapiens
atacggagttctttc

SEQ ID NO: 1179174 - DNA, 15 bp, Homo sapiens
catacggagttcttt

SEQ ID NO: 1179175 - DNA, 15 bp, Homo sapiens
gcatacggagttctt

SEQ ID NO: 1179176 - DNA, 15 bp, Homo sapiens
agcatacggagttct

SEQ ID NO: 1179177 - DNA, 15 bp, Homo sapiens
cagcatacggagttc

SEQ ID NO: 1179178 - DNA, 15 bp, Homo sapiens
gcagcatacggagtt

SEQ ID NO: 1179179 - DNA, 15 bp, Homo sapiens
tgcagcatacggagt

SEQ ID NO: 1179180 - DNA, 15 bp, Homo sapiens
atgcagcatacggag

SEQ ID NO: 1179181 - DNA, 15 bp, Homo sapiens
aatgcagcatacgga

SEQ ID NO: 1179182 - DNA, 15 bp, Homo sapiens
gaatgcagcatacgg

SEQ ID NO: 1179183 - DNA, 15 bp, Homo sapiens
tgaatgcagcatacg

SEQ ID NO: 1179184 - DNA, 15 bp, Homo sapiens
ttgaatgcagcatac

SEQ ID NO: 1179185 - DNA, 15 bp, Homo sapiens
tttgaatgcagcata

SEQ ID NO: 1179186 - DNA, 15 bp, Homo sapiens
ttttgaatgcagcat

SEQ ID NO: 1179187 - DNA, 15 bp, Homo sapiens
cttttgaatgcagca

SEQ ID NO: 1179188 - DNA, 15 bp, Homo sapiens
acttttgaatgcagc

SEQ ID NO: 1179189 - DNA, 15 bp, Homo sapiens
cacttttgaatgcag

SEQ ID NO: 1179190 - DNA, 15 bp, Homo sapiens
acacttttgaatgca

SEQ ID NO: 1179191 - DNA, 15 bp, Homo sapiens
gacacttttgaatgc

SEQ ID NO: 1179192 - DNA, 15 bp, Homo sapiens
tgacacttttgaatg

SEQ ID NO: 1179193 - DNA, 15 bp, Homo sapiens
ttgacacttttgaat

SEQ ID NO: 1179194 - DNA, 15 bp, Homo sapiens
attgacacttttgaa

SEQ ID NO: 1179195 - DNA, 15 bp, Homo sapiens
aattgacacttttga

SEQ ID NO: 1179196 - DNA, 15 bp, Homo sapiens
aaattgacacttttg

SEQ ID NO: 1179197 - DNA, 15 bp, Homo sapiens
gaaattgacactttt

SEQ ID NO: 1179198 - DNA, 15 bp, Homo sapiens
agaaattgacacttt

SEQ ID NO: 1179199 - DNA, 15 bp, Homo sapiens
tagaaattgacactt

SEQ ID NO: 1179200 - DNA, 15 bp, Homo sapiens
ttagaaattgacact

SEQ ID NO: 1179201 - DNA, 15 bp, Homo sapiens
tttagaaattgacac

SEQ ID NO: 1179202 - DNA, 15 bp, Homo sapiens
ctttagaaattgaca

SEQ ID NO: 1179203 - DNA, 15 bp, Homo sapiens
actttagaaattgac

SEQ ID NO: 1179204 - DNA, 15 bp, Homo sapiens
aactttagaaattga

SEQ ID NO: 1179205 - DNA, 15 bp, Homo sapiens
aaactttagaaattg

SEQ ID NO: 1179206 - DNA, 15 bp, Homo sapiens
gaaactttagaaatt

SEQ ID NO: 1179207 - DNA, 15 bp, Homo sapiens
agaaactttagaaat

SEQ ID NO: 1179208 - DNA, 15 bp, Homo sapiens
cagaaactttagaaa

SEQ ID NO: 1179209 - DNA, 15 bp, Homo sapiens
tcagaaactttagaa

SEQ ID NO: 1179210 - DNA, 15 bp, Homo sapiens
ttcagaaactttaga

SEQ ID NO: 1179211 - DNA, 15 bp, Homo sapiens
attcagaaactttag

SEQ ID NO: 1179212 - DNA, 15 bp, Homo sapiens
tattcagaaacttta

SEQ ID NO: 1179213 - DNA, 15 bp, Homo sapiens
ttattcagaaacttt

SEQ ID NO: 1179214 - DNA, 15 bp, Homo sapiens
gttattcagaaactt

SEQ ID NO: 1179215 - DNA, 15 bp, Homo sapiens
agttattcagaaact

SEQ ID NO: 1179216 - DNA, 15 bp, Homo sapiens
tagttattcagaaac

SEQ ID NO: 1179217 - DNA, 15 bp, Homo sapiens
ctagttattcagaaa

SEQ ID NO: 1179218 - DNA, 15 bp, Homo sapiens
tctagttattcagaa

SEQ ID NO: 1179219 - DNA, 15 bp, Homo sapiens
ttctagttattcaga

SEQ ID NO: 1179220 - DNA, 15 bp, Homo sapiens
tttctagttattcag

SEQ ID NO: 1179221 - DNA, 15 bp, Homo sapiens
ctttctagttattca

SEQ ID NO: 1179222 - DNA, 15 bp, Homo sapiens
cctttctagttattc

SEQ ID NO: 1179223 - DNA, 15 bp, Homo sapiens
ccctttctagttatt

SEQ ID NO: 1179224 - DNA, 15 bp, Homo sapiens
cccctttctagttat

SEQ ID NO: 1179225 - DNA, 15 bp, Homo sapiens
gcccctttctagtta

SEQ ID NO: 1179226 - DNA, 15 bp, Homo sapiens
agcccctttctagtt

SEQ ID NO: 1179227 - DNA, 15 bp, Homo sapiens
gagcccctttctagt

SEQ ID NO: 1179228 - DNA, 15 bp, Homo sapiens
cgagcccctttctag

SEQ ID NO: 1179229 - DNA, 15 bp, Homo sapiens
gcgagcccctttcta

SEQ ID NO: 1179230 - DNA, 15 bp, Homo sapiens
tgcgagcccctttct

SEQ ID NO: 1179231 - DNA, 15 bp, Homo sapiens
atgcgagcccctttc

SEQ ID NO: 1179232 - DNA, 15 bp, Homo sapiens
aatgcgagccccttt

SEQ ID NO: 1179233 - DNA, 15 bp, Homo sapiens
gaatgcgagcccctt

SEQ ID NO: 1179234 - DNA, 15 bp, Homo sapiens
ggaatgcgagcccct

SEQ ID NO: 1179235 - DNA, 15 bp, Homo sapiens
aggaatgcgagcccc

SEQ ID NO: 1179236 - DNA, 15 bp, Homo sapiens
caggaatgcgagccc

SEQ ID NO: 1179237 - DNA, 15 bp, Homo sapiens
acaggaatgcgagcc

SEQ ID NO: 1179238 - DNA, 15 bp, Homo sapiens
aacaggaatgcgagc

SEQ ID NO: 1179239 - DNA, 15 bp, Homo sapiens
aaacaggaatgcgag

SEQ ID NO: 1179240 - DNA, 15 bp, Homo sapiens
caaacaggaatgcga

SEQ ID NO: 1179241 - DNA, 15 bp, Homo sapiens
gcaaacaggaatgcg

SEQ ID NO: 1179242 - DNA, 15 bp, Homo sapiens
ggcaaacaggaatgc

SEQ ID NO: 1179243 - DNA, 15 bp, Homo sapiens
gggcaaacaggaatg

SEQ ID NO: 1179244 - DNA, 15 bp, Homo sapiens
agggcaaacaggaat

SEQ ID NO: 1179245 - DNA, 15 bp, Homo sapiens
cagggcaaacaggaa

SEQ ID NO: 1179246 - DNA, 15 bp, Homo sapiens
gcagggcaaacagga

SEQ ID NO: 1179247 - DNA, 15 bp, Homo sapiens
tgcagggcaaacagg

SEQ ID NO: 1179248 - DNA, 15 bp, Homo sapiens
ctgcagggcaaacag

SEQ ID NO: 1179249 - DNA, 15 bp, Homo sapiens
tctgcagggcaaaca

SEQ ID NO: 1179250 - DNA, 15 bp, Homo sapiens
ttctgcagggcaaac

SEQ ID NO: 1179251 - DNA, 15 bp, Homo sapiens
cttctgcagggcaaa

SEQ ID NO: 1179252 - DNA, 15 bp, Homo sapiens
ccttctgcagggcaa

SEQ ID NO: 1179253 - DNA, 15 bp, Homo sapiens
tccttctgcagggca

SEQ ID NO: 1179254 - DNA, 15 bp, Homo sapiens
atccttctgcagggc

SEQ ID NO: 1179255 - DNA, 15 bp, Homo sapiens
aatccttctgcaggg

SEQ ID NO: 1179256 - DNA, 15 bp, Homo sapiens
caatccttctgcagg

SEQ ID NO: 1179257 - DNA, 15 bp, Homo sapiens
acaatccttctgcag

SEQ ID NO: 1179258 - DNA, 15 bp, Homo sapiens
gacaatccttctgca

SEQ ID NO: 1179259 - DNA, 15 bp, Homo sapiens
tgacaatccttctgc

SEQ ID NO: 1179260 - DNA, 15 bp, Homo sapiens
ttgacaatccttctg

SEQ ID NO: 1179261 - DNA, 15 bp, Homo sapiens
gttgacaatccttct

SEQ ID NO: 1179262 - DNA, 15 bp, Homo sapiens
tgttgacaatccttc

SEQ ID NO: 1179263 - DNA, 15 bp, Homo sapiens
ttgttgacaatcctt

SEQ ID NO: 1179264 - DNA, 15 bp, Homo sapiens
cttgttgacaatcct

SEQ ID NO: 1179265 - DNA, 15 bp, Homo sapiens
acttgttgacaatcc

SEQ ID NO: 1179266 - DNA, 15 bp, Homo sapiens
aacttgttgacaatc

SEQ ID NO: 1179267 - DNA, 15 bp, Homo sapiens
taacttgttgacaat

SEQ ID NO: 1179268 - DNA, 15 bp, Homo sapiens
gtaacttgttgacaa

SEQ ID NO: 1179269 - DNA, 15 bp, Homo sapiens
tgtaacttgttgaca

SEQ ID NO: 1179270 - DNA, 15 bp, Homo sapiens
ttgtaacttgttgac

SEQ ID NO: 1179271 - DNA, 15 bp, Homo sapiens
cttgtaacttgttga

SEQ ID NO: 1179272 - DNA, 15 bp, Homo sapiens
tcttgtaacttgttg

SEQ ID NO: 1179273 - DNA, 15 bp, Homo sapiens
atcttgtaacttgtt

SEQ ID NO: 1179274 - DNA, 15 bp, Homo sapiens
aatcttgtaacttgt

SEQ ID NO: 1179275 - DNA, 15 bp, Homo sapiens
taatcttgtaacttg

SEQ ID NO: 1179276 - DNA, 15 bp, Homo sapiens
ataatcttgtaactt

SEQ ID NO: 1179277 - DNA, 15 bp, Homo sapiens
tataatcttgtaact

SEQ ID NO: 1179278 - DNA, 15 bp, Homo sapiens
ctataatcttgtaac

SEQ ID NO: 1179279 - DNA, 15 bp, Homo sapiens
tctataatcttgtaa

SEQ ID NO: 1179280 - DNA, 15 bp, Homo sapiens
ttctataatcttgta

SEQ ID NO: 1179281 - DNA, 15 bp, Homo sapiens
attctataatcttgt

SEQ ID NO: 1179282 - DNA, 15 bp, Homo sapiens
gattctataatcttg

SEQ ID NO: 1179283 - DNA, 15 bp, Homo sapiens
tgattctataatctt

SEQ ID NO: 1179284 - DNA, 15 bp, Homo sapiens
ttgattctataatct

SEQ ID NO: 1179285 - DNA, 15 bp, Homo sapiens
tttgattctataatc

SEQ ID NO: 1179286 - DNA, 15 bp, Homo sapiens
atttgattctataat

SEQ ID NO: 1179287 - DNA, 15 bp, Homo sapiens
gatttgattctataa

SEQ ID NO: 1179288 - DNA, 15 bp, Homo sapiens
agatttgattctata

SEQ ID NO: 1179289 - DNA, 15 bp, Homo sapiens
gagatttgattctat

SEQ ID NO: 1179290 - DNA, 15 bp, Homo sapiens
tgagatttgattcta

SEQ ID NO: 1179291 - DNA, 15 bp, Homo sapiens
ctgagatttgattct

SEQ ID NO: 1179292 - DNA, 15 bp, Homo sapiens
cctgagatttgattc

SEQ ID NO: 1179293 - DNA, 15 bp, Homo sapiens
gcctgagatttgatt

SEQ ID NO: 1179294 - DNA, 15 bp, Homo sapiens
tgcctgagatttgat

SEQ ID NO: 1179295 - DNA, 15 bp, Homo sapiens
gtgcctgagatttga

SEQ ID NO: 1179296 - DNA, 15 bp, Homo sapiens
ggtgcctgagatttg

SEQ ID NO: 1179297 - DNA, 15 bp, Homo sapiens
tggtgcctgagattt

SEQ ID NO: 1179298 - DNA, 15 bp, Homo sapiens
ctggtgcctgagatt

SEQ ID NO: 1179299 - DNA, 15 bp, Homo sapiens
tctggtgcctgagat

SEQ ID NO: 1179300 - DNA, 15 bp, Homo sapiens
ttctggtgcctgaga

SEQ ID NO: 1179301 - DNA, 15 bp, Homo sapiens
tttctggtgcctgag

SEQ ID NO: 1179302 - DNA, 15 bp, Homo sapiens
atttctggtgcctga

SEQ ID NO: 1179303 - DNA, 15 bp, Homo sapiens
catttctggtgcctg

SEQ ID NO: 1179304 - DNA, 15 bp, Homo sapiens
ccatttctggtgcct

SEQ ID NO: 1179305 - DNA, 15 bp, Homo sapiens
tccatttctggtgcc

SEQ ID NO: 1179306 - DNA, 15 bp, Homo sapiens
atccatttctggtgc

SEQ ID NO: 1179307 - DNA, 15 bp, Homo sapiens
gatccatttctggtg

SEQ ID NO: 1179308 - DNA, 15 bp, Homo sapiens
ggatccatttctggt

SEQ ID NO: 1179309 - DNA, 15 bp, Homo sapiens
tggatccatttctgg

SEQ ID NO: 1179310 - DNA, 15 bp, Homo sapiens
ttggatccatttctg

SEQ ID NO: 1179311 - DNA, 15 bp, Homo sapiens
gttggatccatttct

SEQ ID NO: 1179312 - DNA, 15 bp, Homo sapiens
agttggatccatttc

SEQ ID NO: 1179313 - DNA, 15 bp, Homo sapiens
aagttggatccattt

SEQ ID NO: 1179314 - DNA, 15 bp, Homo sapiens
taagttggatccatt

SEQ ID NO: 1179315 - DNA, 15 bp, Homo sapiens
ctaagttggatccat

SEQ ID NO: 1179316 - DNA, 15 bp, Homo sapiens
actaagttggatcca

SEQ ID NO: 1179317 - DNA, 15 bp, Homo sapiens
cactaagttggatcc

SEQ ID NO: 1179318 - DNA, 15 bp, Homo sapiens
tcactaagttggatc

SEQ ID NO: 1179319 - DNA, 15 bp, Homo sapiens
ttcactaagttggat

SEQ ID NO: 1179320 - DNA, 15 bp, Homo sapiens
attcactaagttgga

SEQ ID NO: 1179321 - DNA, 15 bp, Homo sapiens
aattcactaagttgg

SEQ ID NO: 1179322 - DNA, 15 bp, Homo sapiens
aaattcactaagttg

SEQ ID NO: 1179323 - DNA, 15 bp, Homo sapiens
aaaattcactaagtt

SEQ ID NO: 1179324 - DNA, 15 bp, Homo sapiens
caaaattcactaagt

SEQ ID NO: 1179325 - DNA, 15 bp, Homo sapiens
tcaaaattcactaag

SEQ ID NO: 1179326 - DNA, 15 bp, Homo sapiens
gtcaaaattcactaa

SEQ ID NO: 1179327 - DNA, 15 bp, Homo sapiens
agtcaaaattcacta

SEQ ID NO: 1179328 - DNA, 15 bp, Homo sapiens
cagtcaaaattcact

SEQ ID NO: 1179329 - DNA, 15 bp, Homo sapiens
ccagtcaaaattcac

SEQ ID NO: 1179330 - DNA, 15 bp, Homo sapiens
tccagtcaaaattca

SEQ ID NO: 1179331 - DNA, 15 bp, Homo sapiens
ttccagtcaaaattc

SEQ ID NO: 1179332 - DNA, 15 bp, Homo sapiens
attccagtcaaaatt

SEQ ID NO: 1179333 - DNA, 15 bp, Homo sapiens
cattccagtcaaaat

SEQ ID NO: 1179334 - DNA, 15 bp, Homo sapiens
tcattccagtcaaaa

SEQ ID NO: 1179335 - DNA, 15 bp, Homo sapiens
gtcattccagtcaaa

SEQ ID NO: 1179336 - DNA, 15 bp, Homo sapiens
ggtcattccagtcaa

SEQ ID NO: 1179337 - DNA, 15 bp, Homo sapiens
tggtcattccagtca

SEQ ID NO: 1179338 - DNA, 15 bp, Homo sapiens
ctggtcattccagtc

SEQ ID NO: 1179339 - DNA, 15 bp, Homo sapiens
actggtcattccagt

SEQ ID NO: 1179340 - DNA, 15 bp, Homo sapiens
aactggtcattccag

SEQ ID NO: 1179341 - DNA, 15 bp, Homo sapiens
caactggtcattcca

SEQ ID NO: 1179342 - DNA, 15 bp, Homo sapiens
gcaactggtcattcc

SEQ ID NO: 1179343 - DNA, 15 bp, Homo sapiens
tgcaactggtcattc

SEQ ID NO: 1179344 - DNA, 15 bp, Homo sapiens
ttgcaactggtcatt

SEQ ID NO: 1179345 - DNA, 15 bp, Homo sapiens
tttgcaactggtcat

SEQ ID NO: 1179346 - DNA, 15 bp, Homo sapiens
ttttgcaactggtca

SEQ ID NO: 1179347 - DNA, 15 bp, Homo sapiens
attttgcaactggtc

SEQ ID NO: 1179348 - DNA, 15 bp, Homo sapiens
tattttgcaactggt

SEQ ID NO: 1179349 - DNA, 15 bp, Homo sapiens
atattttgcaactgg

SEQ ID NO: 1179350 - DNA, 15 bp, Homo sapiens
aatattttgcaactg

SEQ ID NO: 1179351 - DNA, 15 bp, Homo sapiens
caatattttgcaact

SEQ ID NO: 1179352 - DNA, 15 bp, Homo sapiens
tcaatattttgcaac

SEQ ID NO: 1179353 - DNA, 15 bp, Homo sapiens
gtcaatattttgcaa

SEQ ID NO: 1179354 - DNA, 15 bp, Homo sapiens
ggtcaatattttgca

SEQ ID NO: 1179355 - DNA, 15 bp, Homo sapiens
tggtcaatattttgc

SEQ ID NO: 1179356 - DNA, 15 bp, Homo sapiens
ttggtcaatattttg

SEQ ID NO: 1179357 - DNA, 15 bp, Homo sapiens
cttggtcaatatttt

SEQ ID NO: 1179358 - DNA, 15 bp, Homo sapiens
tcttggtcaatattt

SEQ ID NO: 1179359 - DNA, 15 bp, Homo sapiens
ttcttggtcaatatt

SEQ ID NO: 1179360 - DNA, 15 bp, Homo sapiens
cttcttggtcaatat

SEQ ID NO: 1179361 - DNA, 15 bp, Homo sapiens
tcttcttggtcaata

SEQ ID NO: 1179362 - DNA, 15 bp, Homo sapiens
ttcttcttggtcaat

SEQ ID NO: 1179363 - DNA, 15 bp, Homo sapiens
cttcttcttggtcaa

SEQ ID NO: 1179364 - DNA, 15 bp, Homo sapiens
tcttcttcttggtca

SEQ ID NO: 1179365 - DNA, 15 bp, Homo sapiens
ttcttcttcttggtc

SEQ ID NO: 1179366 - DNA, 15 bp, Homo sapiens
tttcttcttcttggt

SEQ ID NO: 1179367 - DNA, 15 bp, Homo sapiens
ctttcttcttcttgg

SEQ ID NO: 1179368 - DNA, 15 bp, Homo sapiens
actttcttcttcttg

SEQ ID NO: 1179369 - DNA, 15 bp, Homo sapiens
gactttcttcttctt

SEQ ID NO: 1179370 - DNA, 15 bp, Homo sapiens
tgactttcttcttct

SEQ ID NO: 1179371 - DNA, 15 bp, Homo sapiens
atgactttcttcttc

SEQ ID NO: 1179372 - DNA, 15 bp, Homo sapiens
aatgactttcttctt

SEQ ID NO: 1179373 - DNA, 15 bp, Homo sapiens
taatgactttcttct

SEQ ID NO: 1179374 - DNA, 15 bp, Homo sapiens
ataatgactttcttc

SEQ ID NO: 1179375 - DNA, 15 bp, Homo sapiens
aataatgactttctt

SEQ ID NO: 1179376 - DNA, 15 bp, Homo sapiens
aaataatgactttct

SEQ ID NO: 1179377 - DNA, 15 bp, Homo sapiens
aaaataatgactttc

SEQ ID NO: 1179378 - DNA, 15 bp, Homo sapiens
aaaaataatgacttt

SEQ ID NO: 1179379 - DNA, 15 bp, Homo sapiens
gaaaaataatgactt

SEQ ID NO: 1179380 - DNA, 15 bp, Homo sapiens
tgaaaaataatgact

SEQ ID NO: 1179381 - DNA, 15 bp, Homo sapiens
ttgaaaaataatgac

SEQ ID NO: 1179382 - DNA, 15 bp, Homo sapiens
attgaaaaataatga

SEQ ID NO: 1179383 - DNA, 15 bp, Homo sapiens
cattgaaaaataatg

SEQ ID NO: 1179384 - DNA, 15 bp, Homo sapiens
acattgaaaaataat

SEQ ID NO: 1179385 - DNA, 15 bp, Homo sapiens
gacattgaaaaataa

SEQ ID NO: 1179386 - DNA, 15 bp, Homo sapiens
tgacattgaaaaata

SEQ ID NO: 1179387 - DNA, 15 bp, Homo sapiens
atgacattgaaaaat

SEQ ID NO: 1179388 - DNA, 15 bp, Homo sapiens
aatgacattgaaaaa

SEQ ID NO: 1179389 - DNA, 15 bp, Homo sapiens
taatgacattgaaaa

SEQ ID NO: 1179390 - DNA, 15 bp, Homo sapiens
ttaatgacattgaaa

SEQ ID NO: 1179391 - DNA, 15 bp, Homo sapiens
tttaatgacattgaa

SEQ ID NO: 1179392 - DNA, 15 bp, Homo sapiens
atttaatgacattga

SEQ ID NO: 1179393 - DNA, 15 bp, Homo sapiens
aatttaatgacattg

SEQ ID NO: 1179394 - DNA, 15 bp, Homo sapiens
tgaatttaatgacat

SEQ ID NO: 1179395 - DNA, 15 bp, Homo sapiens
ctgaatttaatgaca

SEQ ID NO: 1179396 - DNA, 15 bp, Homo sapiens
gctgaatttaatgac

SEQ ID NO: 1179397 - DNA, 15 bp, Homo sapiens
tgctgaatttaatga

SEQ ID NO: 1179398 - DNA, 15 bp, Homo sapiens
ttgctgaatttaatg

SEQ ID NO: 1179399 - DNA, 15 bp, Homo sapiens
attgctgaatttaat

SEQ ID NO: 1179400 - DNA, 15 bp, Homo sapiens
cattgctgaatttaa

SEQ ID NO: 1179401 - DNA, 15 bp, Homo sapiens
acattgctgaattta

SEQ ID NO: 1179402 - DNA, 15 bp, Homo sapiens
aacattgctgaattt

SEQ ID NO: 1179403 - DNA, 15 bp, Homo sapiens
aaacattgctgaatt

SEQ ID NO: 1179404 - DNA, 15 bp, Homo sapiens
aaaacattgctgaat

SEQ ID NO: 1179405 - DNA, 15 bp, Homo sapiens
taaaacattgctgaa

SEQ ID NO: 1179406 - DNA, 15 bp, Homo sapiens
ataaaacattgctga

SEQ ID NO: 1179407 - DNA, 15 bp, Homo sapiens
cataaaacattgctg

SEQ ID NO: 1179408 - DNA, 15 bp, Homo sapiens
ccataaaacattgct

SEQ ID NO: 1179409 - DNA, 15 bp, Homo sapiens
tccataaaacattgc

SEQ ID NO: 1179410 - DNA, 15 bp, Homo sapiens
atccataaaacattg

SEQ ID NO: 1179411 - DNA, 15 bp, Homo sapiens
tatccataaaacatt

SEQ ID NO: 1179412 - DNA, 15 bp, Homo sapiens
ttatccataaaacat

SEQ ID NO: 1179413 - DNA, 15 bp, Homo sapiens
gttatccataaaaca

SEQ ID NO: 1179414 - DNA, 15 bp, Homo sapiens
agttatccataaaac

SEQ ID NO: 1179415 - DNA, 15 bp, Homo sapiens
cagttatccataaaa

SEQ ID NO: 1179416 - DNA, 15 bp, Homo sapiens
acagttatccataaa

SEQ ID NO: 1179417 - DNA, 15 bp, Homo sapiens
cacagttatccataa

SEQ ID NO: 1179418 - DNA, 15 bp, Homo sapiens
acacagttatccata

SEQ ID NO: 1179419 - DNA, 15 bp, Homo sapiens
tacacagttatccat

SEQ ID NO: 1179420 - DNA, 15 bp, Homo sapiens
gtacacagttatcca

SEQ ID NO: 1179421 - DNA, 15 bp, Homo sapiens
ggtacacagttatcc

SEQ ID NO: 1179422 - DNA, 15 bp, Homo sapiens
aggtacacagttatc

SEQ ID NO: 1179423 - DNA, 15 bp, Homo sapiens
taggtacacagttat

SEQ ID NO: 1179424 - DNA, 15 bp, Homo sapiens
ctaggtacacagtta

SEQ ID NO: 1179425 - DNA, 15 bp, Homo sapiens
tctaggtacacagtt

SEQ ID NO: 1179426 - DNA, 15 bp, Homo sapiens
ttctaggtacacagt

SEQ ID NO: 1179427 - DNA, 15 bp, Homo sapiens
attctaggtacacag

SEQ ID NO: 1179428 - DNA, 15 bp, Homo sapiens
aattctaggtacaca

SEQ ID NO: 1179429 - DNA, 15 bp, Homo sapiens
caattctaggtacac

SEQ ID NO: 1179430 - DNA, 15 bp, Homo sapiens
acaattctaggtaca

SEQ ID NO: 1179431 - DNA, 15 bp, Homo sapiens
cacaattctaggtac

SEQ ID NO: 1179432 - DNA, 15 bp, Homo sapiens
gcacaattctaggta

SEQ ID NO: 1179433 - DNA, 15 bp, Homo sapiens
agcacaattctaggt

SEQ ID NO: 1179434 - DNA, 15 bp, Homo sapiens
tagcacaattctagg

SEQ ID NO: 1179435 - DNA, 15 bp, Homo sapiens
ctagcacaattctag

SEQ ID NO: 1179436 - DNA, 15 bp, Homo sapiens
tctagcacaattcta

SEQ ID NO: 1179437 - DNA, 15 bp, Homo sapiens
ttctagcacaattct

SEQ ID NO: 1179438 - DNA, 15 bp, Homo sapiens
tttctagcacaattc

SEQ ID NO: 1179439 - DNA, 15 bp, Homo sapiens
gtttctagcacaatt

SEQ ID NO: 1179440 - DNA, 15 bp, Homo sapiens
ggtttctagcacaat

SEQ ID NO: 1179441 - DNA, 15 bp, Homo sapiens
tggtttctagcacaa

SEQ ID NO: 1179442 - DNA, 15 bp, Homo sapiens
ttggtttctagcaca

SEQ ID NO: 1179443 - DNA, 15 bp, Homo sapiens
cttggtttctagcac

SEQ ID NO: 1179444 - DNA, 15 bp, Homo sapiens
ccttggtttctagca

SEQ ID NO: 1179445 - DNA, 15 bp, Homo sapiens
cccttggtttctagc

SEQ ID NO: 1179446 - DNA, 15 bp, Homo sapiens
ccccttggtttctag

SEQ ID NO: 1179447 - DNA, 15 bp, Homo sapiens
tccccttggtttcta

SEQ ID NO: 1179448 - DNA, 15 bp, Homo sapiens
ttccccttggtttct

SEQ ID NO: 1179449 - DNA, 15 bp, Homo sapiens
cttccccttggtttc

SEQ ID NO: 1179450 - DNA, 15 bp, Homo sapiens
gcttccccttggttt

SEQ ID NO: 1179451 - DNA, 15 bp, Homo sapiens
agcttccccttggtt

SEQ ID NO: 1179452 - DNA, 15 bp, Homo sapiens
cagcttccccttggt

SEQ ID NO: 1179453 - DNA, 15 bp, Homo sapiens
tcagcttccccttgg

SEQ ID NO: 1179454 - DNA, 15 bp, Homo sapiens
ttcagcttccccttg

SEQ ID NO: 1179455 - DNA, 15 bp, Homo sapiens
tttcagcttcccctt

SEQ ID NO: 1179456 - DNA, 15 bp, Homo sapiens
gtttcagcttcccct

SEQ ID NO: 1179457 - DNA, 15 bp, Homo sapiens
cgtttcagcttcccc

SEQ ID NO: 1179458 - DNA, 15 bp, Homo sapiens
tcgtttcagcttccc

SEQ ID NO: 1179459 - DNA, 15 bp, Homo sapiens
ttcgtttcagcttcc

SEQ ID NO: 1179460 - DNA, 15 bp, Homo sapiens
tttcgtttcagcttc

SEQ ID NO: 1179461 - DNA, 15 bp, Homo sapiens
ttttcgtttcagctt

SEQ ID NO: 1179462 - DNA, 15 bp, Homo sapiens
tttttcgtttcagct

SEQ ID NO: 1179463 - DNA, 15 bp, Homo sapiens
ctttttcgtttcagc

SEQ ID NO: 1179464 - DNA, 15 bp, Homo sapiens
gctttttcgtttcag

SEQ ID NO: 1179465 - DNA, 15 bp, Homo sapiens
ggctttttcgtttca

SEQ ID NO: 1179466 - DNA, 15 bp, Homo sapiens
tggctttttcgtttc

SEQ ID NO: 1179467 - DNA, 15 bp, Homo sapiens
ctggctttttcgttt

SEQ ID NO: 1179468 - DNA, 15 bp, Homo sapiens
tctggctttttcgtt

SEQ ID NO: 1179469 - DNA, 15 bp, Homo sapiens
ctctggctttttcgt

SEQ ID NO: 1179470 - DNA, 15 bp, Homo sapiens
gctctggctttttcg

SEQ ID NO: 1179471 - DNA, 15 bp, Homo sapiens
tgctctggctttttc

SEQ ID NO: 1179472 - DNA, 15 bp, Homo sapiens
ctgctctggcttttt

SEQ ID NO: 1179473 - DNA, 15 bp, Homo sapiens
tctgctctggctttt

SEQ ID NO: 1179474 - DNA, 15 bp, Homo sapiens
ttctgctctggcttt

SEQ ID NO: 1179475 - DNA, 15 bp, Homo sapiens
tttctgctctggctt

SEQ ID NO: 1179476 - DNA, 15 bp, Homo sapiens
ttttctgctctggct

SEQ ID NO: 1179477 - DNA, 15 bp, Homo sapiens
gttttctgctctggc

SEQ ID NO: 1179478 - DNA, 15 bp, Homo sapiens
agttttctgctctgg

SEQ ID NO: 1179479 - DNA, 15 bp, Homo sapiens
tagttttctgctctg

SEQ ID NO: 1179480 - DNA, 15 bp, Homo sapiens
ttagttttctgctct

SEQ ID NO: 1179481 - DNA, 15 bp, Homo sapiens
gttagttttctgctc

SEQ ID NO: 1179482 - DNA, 15 bp, Homo sapiens
cgttagttttctgct

SEQ ID NO: 1179483 - DNA, 15 bp, Homo sapiens
acgttagttttctgc

SEQ ID NO: 1179484 - DNA, 15 bp, Homo sapiens
aacgttagttttctg

SEQ ID NO: 1179485 - DNA, 15 bp, Homo sapiens
gaacgttagttttct

SEQ ID NO: 1179486 - DNA, 15 bp, Homo sapiens
tgaacgttagttttc

SEQ ID NO: 1179487 - DNA, 15 bp, Homo sapiens
atgaacgttagtttt

SEQ ID NO: 1179488 - DNA, 15 bp, Homo sapiens
catgaacgttagttt

SEQ ID NO: 1179489 - DNA, 15 bp, Homo sapiens
tcatgaacgttagtt

SEQ ID NO: 1179490 - DNA, 15 bp, Homo sapiens
ttcatgaacgttagt

SEQ ID NO: 1179491 - DNA, 15 bp, Homo sapiens
gttcatgaacgttag

SEQ ID NO: 1179492 - DNA, 15 bp, Homo sapiens
tgttcatgaacgtta

SEQ ID NO: 1179493 - DNA, 15 bp, Homo sapiens
gtgttcatgaacgtt

SEQ ID NO: 1179494 - DNA, 15 bp, Homo sapiens
ggtgttcatgaacgt

SEQ ID NO: 1179495 - DNA, 15 bp, Homo sapiens
gggtgttcatgaacg

SEQ ID NO: 1179496 - DNA, 15 bp, Homo sapiens
tgggtgttcatgaac

SEQ ID NO: 1179497 - DNA, 15 bp, Homo sapiens
atgggtgttcatgaa

SEQ ID NO: 1179498 - DNA, 15 bp, Homo sapiens
gatgggtgttcatga

SEQ ID NO: 1179499 - DNA, 15 bp, Homo sapiens
tgatgggtgttcatg

SEQ ID NO: 1179500 - DNA, 15 bp, Homo sapiens
atgatgggtgttcat

SEQ ID NO: 1179501 - DNA, 15 bp, Homo sapiens
catgatgggtgttca

SEQ ID NO: 1179502 - DNA, 15 bp, Homo sapiens
gcatgatgggtgttc

SEQ ID NO: 1179503 - DNA, 15 bp, Homo sapiens
agcatgatgggtgtt

SEQ ID NO: 1179504 - DNA, 15 bp, Homo sapiens
gagcatgatgggtgt

SEQ ID NO: 1179505 - DNA, 15 bp, Homo sapiens
ggagcatgatgggtg

SEQ ID NO: 1179506 - DNA, 15 bp, Homo sapiens
gggagcatgatgggt

SEQ ID NO: 1179507 - DNA, 15 bp, Homo sapiens
tgggagcatgatggg

SEQ ID NO: 1179508 - DNA, 15 bp, Homo sapiens
ttgggagcatgatgg

SEQ ID NO: 1179509 - DNA, 15 bp, Homo sapiens
tttgggagcatgatg

SEQ ID NO: 1179510 - DNA, 15 bp, Homo sapiens
ttttgggagcatgat

SEQ ID NO: 1179511 - DNA, 15 bp, Homo sapiens
tttttgggagcatga

SEQ ID NO: 1179512 - DNA, 15 bp, Homo sapiens
ctttttgggagcatg

SEQ ID NO: 1179513 - DNA, 15 bp, Homo sapiens
actttttgggagcat

SEQ ID NO: 1179514 - DNA, 15 bp, Homo sapiens
tactttttgggagca

SEQ ID NO: 1179515 - DNA, 15 bp, Homo sapiens
ttactttttgggagc

SEQ ID NO: 1179516 - DNA, 15 bp, Homo sapiens
gttactttttgggag

SEQ ID NO: 1179517 - DNA, 15 bp, Homo sapiens
tgttactttttggga

SEQ ID NO: 1179518 - DNA, 15 bp, Homo sapiens
atgttactttttggg

SEQ ID NO: 1179519 - DNA, 15 bp, Homo sapiens
tatgttactttttgg

SEQ ID NO: 1179520 - DNA, 15 bp, Homo sapiens
gtatgttactttttg

SEQ ID NO: 1179521 - DNA, 15 bp, Homo sapiens
tgtatgttacttttt

SEQ ID NO: 1179522 - DNA, 15 bp, Homo sapiens
ttgtatgttactttt

SEQ ID NO: 1179523 - DNA, 15 bp, Homo sapiens
tttgtatgttacttt

SEQ ID NO: 1179524 - DNA, 15 bp, Homo sapiens
atttgtatgttactt

SEQ ID NO: 1179525 - DNA, 15 bp, Homo sapiens
gatttgtatgttact

SEQ ID NO: 1179526 - DNA, 15 bp, Homo sapiens
agatttgtatgttac

SEQ ID NO: 1179527 - DNA, 15 bp, Homo sapiens
cagatttgtatgtta

SEQ ID NO: 1179528 - DNA, 15 bp, Homo sapiens
gcagatttgtatgtt

SEQ ID NO: 1179529 - DNA, 15 bp, Homo sapiens
ggcagatttgtatgt

SEQ ID NO: 1179530 - DNA, 15 bp, Homo sapiens
aggcagatttgtatg

SEQ ID NO: 1179531 - DNA, 15 bp, Homo sapiens
aaggcagatttgtat

SEQ ID NO: 1179532 - DNA, 15 bp, Homo sapiens
taaggcagatttgta

SEQ ID NO: 1179533 - DNA, 15 bp, Homo sapiens
ttaaggcagatttgt

SEQ ID NO: 1179534 - DNA, 15 bp, Homo sapiens
cttaaggcagatttg

SEQ ID NO: 1179535 - DNA, 15 bp, Homo sapiens
ccttaaggcagattt

SEQ ID NO: 1179536 - DNA, 15 bp, Homo sapiens
accttaaggcagatt

SEQ ID NO: 1179537 - DNA, 15 bp, Homo sapiens
aaccttaaggcagat

SEQ ID NO: 1179538 - DNA, 15 bp, Homo sapiens
taaccttaaggcaga

SEQ ID NO: 1179539 - DNA, 15 bp, Homo sapiens
gtaaccttaaggcag

SEQ ID NO: 1179540 - DNA, 15 bp, Homo sapiens
ggtaaccttaaggca

SEQ ID NO: 1179541 - DNA, 15 bp, Homo sapiens
aggtaaccttaaggc

SEQ ID NO: 1179542 - DNA, 15 bp, Homo sapiens
aaggtaaccttaagg

SEQ ID NO: 1179543 - DNA, 15 bp, Homo sapiens
gaaggtaaccttaag

SEQ ID NO: 1179544 - DNA, 15 bp, Homo sapiens
tgaaggtaaccttaa

SEQ ID NO: 1179545 - DNA, 15 bp, Homo sapiens
ttgaaggtaacctta

SEQ ID NO: 1179546 - DNA, 15 bp, Homo sapiens
attgaaggtaacctt

SEQ ID NO: 1179547 - DNA, 15 bp, Homo sapiens
gattgaaggtaacct

SEQ ID NO: 1179548 - DNA, 15 bp, Homo sapiens
agattgaaggtaacc

SEQ ID NO: 1179549 - DNA, 15 bp, Homo sapiens
cagattgaaggtaac

SEQ ID NO: 1179550 - DNA, 15 bp, Homo sapiens
ccagattgaaggtaa

SEQ ID NO: 1179551 - DNA, 15 bp, Homo sapiens
accagattgaaggta

SEQ ID NO: 1179552 - DNA, 15 bp, Homo sapiens
aaccagattgaaggt

SEQ ID NO: 1179553 - DNA, 15 bp, Homo sapiens
taaccagattgaagg

SEQ ID NO: 1179554 - DNA, 15 bp, Homo sapiens
ttaaccagattgaag

SEQ ID NO: 1179555 - DNA, 15 bp, Homo sapiens
cttaaccagattgaa

SEQ ID NO: 1179556 - DNA, 15 bp, Homo sapiens
tcttaaccagattga

SEQ ID NO: 1179557 - DNA, 15 bp, Homo sapiens
ttcttaaccagattg

SEQ ID NO: 1179558 - DNA, 15 bp, Homo sapiens
tttcttaaccagatt

SEQ ID NO: 1179559 - DNA, 15 bp, Homo sapiens
ttttcttaaccagat

SEQ ID NO: 1179560 - DNA, 15 bp, Homo sapiens
gttttcttaaccaga

SEQ ID NO: 1179561 - DNA, 15 bp, Homo sapiens
tgttttcttaaccag

SEQ ID NO: 1179562 - DNA, 15 bp, Homo sapiens
ttgttttcttaacca

SEQ ID NO: 1179563 - DNA, 15 bp, Homo sapiens
attgttttcttaacc

SEQ ID NO: 1179564 - DNA, 15 bp, Homo sapiens
aattgttttcttaac

SEQ ID NO: 1179565 - DNA, 15 bp, Homo sapiens
gaattgttttcttaa

SEQ ID NO: 1179566 - DNA, 15 bp, Homo sapiens
agaattgttttctta

SEQ ID NO: 1179567 - DNA, 15 bp, Homo sapiens
aagaattgttttctt

SEQ ID NO: 1179568 - DNA, 15 bp, Homo sapiens
taagaattgttttct

SEQ ID NO: 1179569 - DNA, 15 bp, Homo sapiens
gtaagaattgttttc

SEQ ID NO: 1179570 - DNA, 15 bp, Homo sapiens
ggtaagaattgtttt

SEQ ID NO: 1179571 - DNA, 15 bp, Homo sapiens
gggtaagaattgttt

SEQ ID NO: 1179572 - DNA, 15 bp, Homo sapiens
tgggtaagaattgtt

SEQ ID NO: 1179573 - DNA, 15 bp, Homo sapiens
atgggtaagaattgt

SEQ ID NO: 1179574 - DNA, 15 bp, Homo sapiens
tatgggtaagaattg

SEQ ID NO: 1179575 - DNA, 15 bp, Homo sapiens
atatgggtaagaatt

SEQ ID NO: 1179576 - DNA, 15 bp, Homo sapiens
catatgggtaagaat

SEQ ID NO: 1179577 - DNA, 15 bp, Homo sapiens
acatatgggtaagaa

SEQ ID NO: 1179578 - DNA, 15 bp, Homo sapiens
gacatatgggtaaga

SEQ ID NO: 1179579 - DNA, 15 bp, Homo sapiens
tgacatatgggtaag

SEQ ID NO: 1179580 - DNA, 15 bp, Homo sapiens
ctgacatatgggtaa

SEQ ID NO: 1179581 - DNA, 15 bp, Homo sapiens
tctgacatatgggta

SEQ ID NO: 1179582 - DNA, 15 bp, Homo sapiens
ttctgacatatgggt

SEQ ID NO: 1179583 - DNA, 15 bp, Homo sapiens
attctgacatatggg

SEQ ID NO: 1179584 - DNA, 15 bp, Homo sapiens
tattctgacatatgg

SEQ ID NO: 1179585 - DNA, 15 bp, Homo sapiens
ttattctgacatatg

SEQ ID NO: 1179586 - DNA, 15 bp, Homo sapiens
attattctgacatat

SEQ ID NO: 1179587 - DNA, 15 bp, Homo sapiens
gattattctgacata

SEQ ID NO: 1179588 - DNA, 15 bp, Homo sapiens
tgattattctgacat

SEQ ID NO: 1179589 - DNA, 15 bp, Homo sapiens
atgattattctgaca

SEQ ID NO: 1179590 - DNA, 15 bp, Homo sapiens
gatgattattctgac

SEQ ID NO: 1179591 - DNA, 15 bp, Homo sapiens
tgatgattattctga

SEQ ID NO: 1179592 - DNA, 15 bp, Homo sapiens
atgatgattattctg

SEQ ID NO: 1179593 - DNA, 15 bp, Homo sapiens
tatgatgattattct

SEQ ID NO: 1179594 - DNA, 15 bp, Homo sapiens
ttatgatgattattc

SEQ ID NO: 1179595 - DNA, 15 bp, Homo sapiens
tttatgatgattatt

SEQ ID NO: 1179596 - DNA, 15 bp, Homo sapiens
gtttatgatgattat

SEQ ID NO: 1179597 - DNA, 15 bp, Homo sapiens
ggtttatgatgatta

SEQ ID NO: 1179598 - DNA, 15 bp, Homo sapiens
aggtttatgatgatt

SEQ ID NO: 1179599 - DNA, 15 bp, Homo sapiens
taggtttatgatgat

SEQ ID NO: 1179600 - DNA, 15 bp, Homo sapiens
ataggtttatgatga

SEQ ID NO: 1179601 - DNA, 15 bp, Homo sapiens
tataggtttatgatg

SEQ ID NO: 1179602 - DNA, 15 bp, Homo sapiens
ctataggtttatgat

SEQ ID NO: 1179603 - DNA, 15 bp, Homo sapiens
tctataggtttatga

SEQ ID NO: 1179604 - DNA, 15 bp, Homo sapiens
ttctataggtttatg

SEQ ID NO: 1179605 - DNA, 15 bp, Homo sapiens
attctataggtttat

SEQ ID NO: 1179606 - DNA, 15 bp, Homo sapiens
aattctataggttta

SEQ ID NO: 1179607 - DNA, 15 bp, Homo sapiens
taattctataggttt

SEQ ID NO: 1179608 - DNA, 15 bp, Homo sapiens
ttaattctataggtt

SEQ ID NO: 1179609 - DNA, 15 bp, Homo sapiens
tttaattctataggt

SEQ ID NO: 1179610 - DNA, 15 bp, Homo sapiens
ctttaattctatagg

SEQ ID NO: 1179611 - DNA, 15 bp, Homo sapiens
actttaattctatag

SEQ ID NO: 1179612 - DNA, 15 bp, Homo sapiens
tactttaattctata

SEQ ID NO: 1179613 - DNA, 15 bp, Homo sapiens
ttactttaattctat

SEQ ID NO: 1179614 - DNA, 15 bp, Homo sapiens
cttactttaattcta

SEQ ID NO: 1179615 - DNA, 15 bp, Homo sapiens
acttactttaattct

SEQ ID NO: 1179616 - DNA, 15 bp, Homo sapiens
tacttactttaattc

SEQ ID NO: 1179617 - DNA, 15 bp, Homo sapiens
ttacttactttaatt

SEQ ID NO: 1179618 - DNA, 15 bp, Homo sapiens
attacttactttaat

SEQ ID NO: 1179619 - DNA, 15 bp, Homo sapiens
tattacttactttaa

SEQ ID NO: 1179620 - DNA, 15 bp, Homo sapiens
ttattacttacttta

SEQ ID NO: 1179621 - DNA, 15 bp, Homo sapiens
attattacttacttt

SEQ ID NO: 1179622 - DNA, 15 bp, Homo sapiens
cattattacttactt

SEQ ID NO: 1179623 - DNA, 15 bp, Homo sapiens
acattattacttact

SEQ ID NO: 1179624 - DNA, 15 bp, Homo sapiens
tacattattacttac

SEQ ID NO: 1179625 - DNA, 15 bp, Homo sapiens
atacattattactta

SEQ ID NO: 1179626 - DNA, 15 bp, Homo sapiens
tatacattattactt

SEQ ID NO: 1179627 - DNA, 15 bp, Homo sapiens
ttatacattattact

SEQ ID NO: 1179628 - DNA, 15 bp, Homo sapiens
tttatacattattac

SEQ ID NO: 1179629 - DNA, 15 bp, Homo sapiens
ttttatacattatta

SEQ ID NO: 1179630 - DNA, 15 bp, Homo sapiens
tttttatacattatt

SEQ ID NO: 1179631 - DNA, 15 bp, Homo sapiens
atttttatacattat

SEQ ID NO: 1179632 - DNA, 15 bp, Homo sapiens
tatttttatacatta

SEQ ID NO: 1179633 - DNA, 15 bp, Homo sapiens
ttatttttatacatt

SEQ ID NO: 1179634 - DNA, 15 bp, Homo sapiens
gttatttttatacat

SEQ ID NO: 1179635 - DNA, 15 bp, Homo sapiens
atgttatttttatac

SEQ ID NO: 1179636 - DNA, 15 bp, Homo sapiens
aatgttatttttata

SEQ ID NO: 1179637 - DNA, 15 bp, Homo sapiens
aaatgttatttttat

SEQ ID NO: 1179638 - DNA, 15 bp, Homo sapiens
aaaatgttattttta

SEQ ID NO: 1179639 - DNA, 15 bp, Homo sapiens
aaaaatgttattttt

SEQ ID NO: 1179640 - DNA, 15 bp, Homo sapiens
aaaaaatgttatttt

SEQ ID NO: 1179641 - DNA, 15 bp, Homo sapiens
aaaaaaatgttattt

SEQ ID NO: 1179642 - DNA, 15 bp, Homo sapiens
gaaaaaaatgttatt

SEQ ID NO: 1179643 - DNA, 15 bp, Homo sapiens
agaaaaaaatgttat

SEQ ID NO: 1179644 - DNA, 15 bp, Homo sapiens
gagaaaaaaatgtta

SEQ ID NO: 1179645 - DNA, 15 bp, Homo sapiens
agagaaaaaaatgtt

SEQ ID NO: 1179646 - DNA, 15 bp, Homo sapiens
aagagaaaaaaatgt

SEQ ID NO: 1179647 - DNA, 15 bp, Homo sapiens
taagagaaaaaaatg

SEQ ID NO: 1179648 - DNA, 15 bp, Homo sapiens
ataagagaaaaaaat

SEQ ID NO: 1179649 - DNA, 15 bp, Homo sapiens
aataagagaaaaaaa

SEQ ID NO: 1179650 - DNA, 15 bp, Homo sapiens
gaataagagaaaaaa

SEQ ID NO: 1179651 - DNA, 15 bp, Homo sapiens
agaataagagaaaaa

SEQ ID NO: 1179652 - DNA, 15 bp, Homo sapiens
aagaataagagaaaa

SEQ ID NO: 1179653 - DNA, 15 bp, Homo sapiens
gaagaataagagaaa

SEQ ID NO: 1179654 - DNA, 15 bp, Homo sapiens
ggaagaataagagaa

SEQ ID NO: 1179655 - DNA, 15 bp, Homo sapiens
aggaagaataagaga

SEQ ID NO: 1179656 - DNA, 15 bp, Homo sapiens
caggaagaataagag

SEQ ID NO: 1179657 - DNA, 15 bp, Homo sapiens
ccaggaagaataaga

SEQ ID NO: 1179658 - DNA, 15 bp, Homo sapiens
tccaggaagaataag

SEQ ID NO: 1179659 - DNA, 15 bp, Homo sapiens
atccaggaagaataa

SEQ ID NO: 1179660 - DNA, 15 bp, Homo sapiens
tatccaggaagaata

SEQ ID NO: 1179661 - DNA, 15 bp, Homo sapiens
atatccaggaagaat

SEQ ID NO: 1179662 - DNA, 15 bp, Homo sapiens
catatccaggaagaa

SEQ ID NO: 1179663 - DNA, 15 bp, Homo sapiens
ccatatccaggaaga

SEQ ID NO: 1179664 - DNA, 15 bp, Homo sapiens
gccatatccaggaag

SEQ ID NO: 1179665 - DNA, 15 bp, Homo sapiens
tgccatatccaggaa

SEQ ID NO: 1179666 - DNA, 15 bp, Homo sapiens
ctgccatatccagga

SEQ ID NO: 1179667 - DNA, 15 bp, Homo sapiens
tctgccatatccagg

SEQ ID NO: 1179668 - DNA, 15 bp, Homo sapiens
atctgccatatccag

SEQ ID NO: 1179669 - DNA, 15 bp, Homo sapiens
gatctgccatatcca

SEQ ID NO: 1179670 - DNA, 15 bp, Homo sapiens
agatctgccatatcc

SEQ ID NO: 1179671 - DNA, 15 bp, Homo sapiens
gagatctgccatatc

SEQ ID NO: 1179672 - DNA, 15 bp, Homo sapiens
tgagatctgccatat

SEQ ID NO: 1179673 - DNA, 15 bp, Homo sapiens
ttgagatctgccata

SEQ ID NO: 1179674 - DNA, 15 bp, Homo sapiens
tttgagatctgccat

SEQ ID NO: 1179675 - DNA, 15 bp, Homo sapiens
ttttgagatctgcca

SEQ ID NO: 1179676 - DNA, 15 bp, Homo sapiens
attttgagatctgcc

SEQ ID NO: 1179677 - DNA, 15 bp, Homo sapiens
tattttgagatctgc

SEQ ID NO: 1179678 - DNA, 15 bp, Homo sapiens
atattttgagatctg

SEQ ID NO: 1179679 - DNA, 15 bp, Homo sapiens
catattttgagatct

SEQ ID NO: 1179680 - DNA, 15 bp, Homo sapiens
acatattttgagatc

SEQ ID NO: 1179681 - DNA, 15 bp, Homo sapiens
aacatattttgagat

SEQ ID NO: 1179682 - DNA, 15 bp, Homo sapiens
aaacatattttgaga

SEQ ID NO: 1179683 - DNA, 15 bp, Homo sapiens
taaacatattttgag

SEQ ID NO: 1179684 - DNA, 15 bp, Homo sapiens
gtaaacatattttga

SEQ ID NO: 1179685 - DNA, 15 bp, Homo sapiens
agtaaacatattttg

SEQ ID NO: 1179686 - DNA, 15 bp, Homo sapiens
cagtaaacatatttt

SEQ ID NO: 1179687 - DNA, 15 bp, Homo sapiens
tcagtaaacatattt

SEQ ID NO: 1179688 - DNA, 15 bp, Homo sapiens
ttcagtaaacatatt

SEQ ID NO: 1179689 - DNA, 15 bp, Homo sapiens
attcagtaaacatat

SEQ ID NO: 1179690 - DNA, 15 bp, Homo sapiens
aattcagtaaacata

SEQ ID NO: 1179691 - DNA, 15 bp, Homo sapiens
aaattcagtaaacat

SEQ ID NO: 1179692 - DNA, 15 bp, Homo sapiens
gaaattcagtaaaca

SEQ ID NO: 1179693 - DNA, 15 bp, Homo sapiens
ggaaattcagtaaac

SEQ ID NO: 1179694 - DNA, 15 bp, Homo sapiens
tggaaattcagtaaa

SEQ ID NO: 1179695 - DNA, 15 bp, Homo sapiens
ttggaaattcagtaa

SEQ ID NO: 1179696 - DNA, 15 bp, Homo sapiens
tttggaaattcagta

SEQ ID NO: 1179697 - DNA, 15 bp, Homo sapiens
ttttggaaattcagt

SEQ ID NO: 1179698 - DNA, 15 bp, Homo sapiens
cttttggaaattcag

SEQ ID NO: 1179699 - DNA, 15 bp, Homo sapiens
tcttttggaaattca

SEQ ID NO: 1179700 - DNA, 15 bp, Homo sapiens
ttcttttggaaattc

SEQ ID NO: 1179701 - DNA, 15 bp, Homo sapiens
attcttttggaaatt

SEQ ID NO: 1179702 - DNA, 15 bp, Homo sapiens
tattcttttggaaat

SEQ ID NO: 1179703 - DNA, 15 bp, Homo sapiens
gtattcttttggaaa

SEQ ID NO: 1179704 - DNA, 15 bp, Homo sapiens
tgtattcttttggaa

SEQ ID NO: 1179705 - DNA, 15 bp, Homo sapiens
ttgtattcttttgga

SEQ ID NO: 1179706 - DNA, 15 bp, Homo sapiens
tttgtattcttttgg

SEQ ID NO: 1179707 - DNA, 15 bp, Homo sapiens
ttttgtattcttttg

SEQ ID NO: 1179708 - DNA, 15 bp, Homo sapiens
tttttgtattctttt

SEQ ID NO: 1179709 - DNA, 15 bp, Homo sapiens
ttttttgtattcttt

SEQ ID NO: 1179710 - DNA, 15 bp, Homo sapiens
attttttgtattctt

SEQ ID NO: 1179711 - DNA, 15 bp, Homo sapiens
aattttttgtattct

SEQ ID NO: 1179712 - DNA, 15 bp, Homo sapiens
aaattttttgtattc

SEQ ID NO: 1179713 - DNA, 15 bp, Homo sapiens
aaaattttttgtatt

SEQ ID NO: 1179714 - DNA, 15 bp, Homo sapiens
gaaaattttttgtat

SEQ ID NO: 1179715 - DNA, 15 bp, Homo sapiens
tgaaaattttttgta

SEQ ID NO: 1179716 - DNA, 15 bp, Homo sapiens
atgaaaattttttgt

SEQ ID NO: 1179717 - DNA, 15 bp, Homo sapiens
gatgaaaattttttg

SEQ ID NO: 1179718 - DNA, 15 bp, Homo sapiens
ggatgaaaatttttt

SEQ ID NO: 1179719 - DNA, 15 bp, Homo sapiens
aggatgaaaattttt

SEQ ID NO: 1179720 - DNA, 15 bp, Homo sapiens
aaggatgaaaatttt

SEQ ID NO: 1179721 - DNA, 15 bp, Homo sapiens
gaaggatgaaaattt

SEQ ID NO: 1179722 - DNA, 15 bp, Homo sapiens
agaaggatgaaaatt

SEQ ID NO: 1179723 - DNA, 15 bp, Homo sapiens
gagaaggatgaaaat

SEQ ID NO: 1179724 - DNA, 15 bp, Homo sapiens
agagaaggatgaaaa

SEQ ID NO: 1179725 - DNA, 15 bp, Homo sapiens
gagagaaggatgaaa

SEQ ID NO: 1179726 - DNA, 15 bp, Homo sapiens
agagagaaggatgaa

SEQ ID NO: 1179727 - DNA, 15 bp, Homo sapiens
tagagagaaggatga

SEQ ID NO: 1179728 - DNA, 15 bp, Homo sapiens
atagagagaaggatg

SEQ ID NO: 1179729 - DNA, 15 bp, Homo sapiens
tatagagagaaggat

SEQ ID NO: 1179730 - DNA, 15 bp, Homo sapiens
atatagagagaagga

SEQ ID NO: 1179731 - DNA, 15 bp, Homo sapiens
tatatagagagaagg

SEQ ID NO: 1179732 - DNA, 15 bp, Homo sapiens
atatatagagagaag

SEQ ID NO: 1179733 - DNA, 15 bp, Homo sapiens
tatatatagagagaa

SEQ ID NO: 1179734 - DNA, 15 bp, Homo sapiens
gtatatatagagaga

SEQ ID NO: 1179735 - DNA, 15 bp, Homo sapiens
tgtatatatagagag

SEQ ID NO: 1179736 - DNA, 15 bp, Homo sapiens
ctgtatatatagaga

SEQ ID NO: 1179737 - DNA, 15 bp, Homo sapiens
actgtatatatagag

SEQ ID NO: 1179738 - DNA, 15 bp, Homo sapiens
gactgtatatataga

SEQ ID NO: 1179739 - DNA, 15 bp, Homo sapiens
agactgtatatatag

SEQ ID NO: 1179740 - DNA, 15 bp, Homo sapiens
aagactgtatatata

SEQ ID NO: 1179741 - DNA, 15 bp, Homo sapiens
caagactgtatatat

SEQ ID NO: 1179742 - DNA, 15 bp, Homo sapiens
acaagactgtatata

SEQ ID NO: 1179743 - DNA, 15 bp, Homo sapiens
cacaagactgtatat

SEQ ID NO: 1179744 - DNA, 15 bp, Homo sapiens
tcacaagactgtata

SEQ ID NO: 1179745 - DNA, 15 bp, Homo sapiens
ttcacaagactgtat

SEQ ID NO: 1179746 - DNA, 15 bp, Homo sapiens
tttcacaagactgta

SEQ ID NO: 1179747 - DNA, 15 bp, Homo sapiens
atttcacaagactgt

SEQ ID NO: 1179748 - DNA, 15 bp, Homo sapiens
gatttcacaagactg

SEQ ID NO: 1179749 - DNA, 15 bp, Homo sapiens
cgatttcacaagact

SEQ ID NO: 1179750 - DNA, 15 bp, Homo sapiens
acgatttcacaagac

SEQ ID NO: 1179751 - DNA, 15 bp, Homo sapiens
gacgatttcacaaga

SEQ ID NO: 1179752 - DNA, 15 bp, Homo sapiens
ggacgatttcacaag

SEQ ID NO: 1179753 - DNA, 15 bp, Homo sapiens
tggacgatttcacaa

SEQ ID NO: 1179754 - DNA, 15 bp, Homo sapiens
gtggacgatttcaca

SEQ ID NO: 1179755 - DNA, 15 bp, Homo sapiens
agtggacgatttcac

SEQ ID NO: 1179756 - DNA, 15 bp, Homo sapiens
tagtggacgatttca

SEQ ID NO: 1179757 - DNA, 15 bp, Homo sapiens
ttagtggacgatttc

SEQ ID NO: 1179758 - DNA, 15 bp, Homo sapiens
tttagtggacgattt

SEQ ID NO: 1179759 - DNA, 15 bp, Homo sapiens
ctttagtggacgatt

SEQ ID NO: 1179760 - DNA, 15 bp, Homo sapiens
actttagtggacgat

SEQ ID NO: 1179761 - DNA, 15 bp, Homo sapiens
aactttagtggacga

SEQ ID NO: 1179762 - DNA, 15 bp, Homo sapiens
aaactttagtggacg

SEQ ID NO: 1179763 - DNA, 15 bp, Homo sapiens
taaactttagtggac

SEQ ID NO: 1179764 - DNA, 15 bp, Homo sapiens
ttaaactttagtgga

SEQ ID NO: 1179765 - DNA, 15 bp, Homo sapiens
tttaaactttagtgg

SEQ ID NO: 1179766 - DNA, 15 bp, Homo sapiens
ttttaaactttagtg

SEQ ID NO: 1179767 - DNA, 15 bp, Homo sapiens
cttttaaactttagt

SEQ ID NO: 1179768 - DNA, 15 bp, Homo sapiens
acttttaaactttag

SEQ ID NO: 1179769 - DNA, 15 bp, Homo sapiens
tacttttaaacttta

SEQ ID NO: 1179770 - DNA, 15 bp, Homo sapiens
ctacttttaaacttt

SEQ ID NO: 1179771 - DNA, 15 bp, Homo sapiens
cctacttttaaactt

SEQ ID NO: 1179772 - DNA, 15 bp, Homo sapiens
acctacttttaaact

SEQ ID NO: 1179773 - DNA, 15 bp, Homo sapiens
cacctacttttaaac

SEQ ID NO: 1179774 - DNA, 15 bp, Homo sapiens
ccacctacttttaaa

SEQ ID NO: 1179775 - DNA, 15 bp, Homo sapiens
tccacctacttttaa

SEQ ID NO: 1179776 - DNA, 15 bp, Homo sapiens
ttccacctactttta

SEQ ID NO: 1179777 - DNA, 15 bp, Homo sapiens
attccacctactttt

SEQ ID NO: 1179778 - DNA, 15 bp, Homo sapiens
aattccacctacttt

SEQ ID NO: 1179779 - DNA, 15 bp, Homo sapiens
aaattccacctactt

SEQ ID NO: 1179780 - DNA, 15 bp, Homo sapiens
taaattccacctact

SEQ ID NO: 1179781 - DNA, 15 bp, Homo sapiens
gtaaattccacctac

SEQ ID NO: 1179782 - DNA, 15 bp, Homo sapiens
tgtaaattccaccta

SEQ ID NO: 1179783 - DNA, 15 bp, Homo sapiens
gtgtaaattccacct

SEQ ID NO: 1179784 - DNA, 15 bp, Homo sapiens
ggtgtaaattccacc

SEQ ID NO: 1179785 - DNA, 15 bp, Homo sapiens
aggtgtaaattccac

SEQ ID NO: 1179786 - DNA, 15 bp, Homo sapiens
aaggtgtaaattcca

SEQ ID NO: 1179787 - DNA, 15 bp, Homo sapiens
gaaggtgtaaattcc

SEQ ID NO: 1179788 - DNA, 15 bp, Homo sapiens
tgaaggtgtaaattc

SEQ ID NO: 1179789 - DNA, 15 bp, Homo sapiens
atgaaggtgtaaatt

SEQ ID NO: 1179790 - DNA, 15 bp, Homo sapiens
catgaaggtgtaaat

SEQ ID NO: 1179791 - DNA, 15 bp, Homo sapiens
acatgaaggtgtaaa

SEQ ID NO: 1179792 - DNA, 15 bp, Homo sapiens
tacatgaaggtgtaa

SEQ ID NO: 1179793 - DNA, 15 bp, Homo sapiens
gtacatgaaggtgta

SEQ ID NO: 1179794 - DNA, 15 bp, Homo sapiens
agtacatgaaggtgt

SEQ ID NO: 1179795 - DNA, 15 bp, Homo sapiens
gagtacatgaaggtg

SEQ ID NO: 1179796 - DNA, 15 bp, Homo sapiens
agagtacatgaaggt

SEQ ID NO: 1179797 - DNA, 15 bp, Homo sapiens
gagagtacatgaagg

SEQ ID NO: 1179798 - DNA, 15 bp, Homo sapiens
agagagtacatgaag

SEQ ID NO: 1179799 - DNA, 15 bp, Homo sapiens
cagagagtacatgaa

SEQ ID NO: 1179800 - DNA, 15 bp, Homo sapiens
acagagagtacatga

SEQ ID NO: 1179801 - DNA, 15 bp, Homo sapiens
gacagagagtacatg

SEQ ID NO: 1179802 - DNA, 15 bp, Homo sapiens
agacagagagtacat

SEQ ID NO: 1179803 - DNA, 15 bp, Homo sapiens
cagacagagagtaca

SEQ ID NO: 1179804 - DNA, 15 bp, Homo sapiens
gcagacagagagtac

SEQ ID NO: 1179805 - DNA, 15 bp, Homo sapiens
ggcagacagagagta

SEQ ID NO: 1179806 - DNA, 15 bp, Homo sapiens
aggcagacagagagt

SEQ ID NO: 1179807 - DNA, 15 bp, Homo sapiens
caggcagacagagag

SEQ ID NO: 1179808 - DNA, 15 bp, Homo sapiens
ccaggcagacagaga

SEQ ID NO: 1179809 - DNA, 15 bp, Homo sapiens
cccaggcagacagag

SEQ ID NO: 1179810 - DNA, 15 bp, Homo sapiens
acccaggcagacaga

SEQ ID NO: 1179811 - DNA, 15 bp, Homo sapiens
gacccaggcagacag

SEQ ID NO: 1179812 - DNA, 15 bp, Homo sapiens
ggacccaggcagaca

SEQ ID NO: 1179813 - DNA, 15 bp, Homo sapiens
aggacccaggcagac

SEQ ID NO: 1179814 - DNA, 15 bp, Homo sapiens
aaggacccaggcaga

SEQ ID NO: 1179815 - DNA, 15 bp, Homo sapiens
caaggacccaggcag

SEQ ID NO: 1179816 - DNA, 15 bp, Homo sapiens
ccaaggacccaggca

SEQ ID NO: 1179817 - DNA, 15 bp, Homo sapiens
gccaaggacccaggc

SEQ ID NO: 1179818 - DNA, 15 bp, Homo sapiens
agccaaggacccagg

SEQ ID NO: 1179819 - DNA, 15 bp, Homo sapiens
tagccaaggacccag

SEQ ID NO: 1179820 - DNA, 15 bp, Homo sapiens
ctagccaaggaccca

SEQ ID NO: 1179821 - DNA, 15 bp, Homo sapiens
cctagccaaggaccc

SEQ ID NO: 1179822 - DNA, 15 bp, Homo sapiens
acctagccaaggacc

SEQ ID NO: 1179823 - DNA, 15 bp, Homo sapiens
tacctagccaaggac

SEQ ID NO: 1179824 - DNA, 15 bp, Homo sapiens
ctacctagccaagga

SEQ ID NO: 1179825 - DNA, 15 bp, Homo sapiens
tctacctagccaagg

SEQ ID NO: 1179826 - DNA, 15 bp, Homo sapiens
ctctacctagccaag

SEQ ID NO: 1179827 - DNA, 15 bp, Homo sapiens
cctctacctagccaa

SEQ ID NO: 1179828 - DNA, 15 bp, Homo sapiens
gcctctacctagcca

SEQ ID NO: 1179829 - DNA, 15 bp, Homo sapiens
tgcctctacctagcc

SEQ ID NO: 1179830 - DNA, 15 bp, Homo sapiens
atgcctctacctagc

SEQ ID NO: 1179831 - DNA, 15 bp, Homo sapiens
catgcctctacctag

SEQ ID NO: 1179832 - DNA, 15 bp, Homo sapiens
ccatgcctctaccta

SEQ ID NO: 1179833 - DNA, 15 bp, Homo sapiens
accatgcctctacct

SEQ ID NO: 1179834 - DNA, 15 bp, Homo sapiens
aaccatgcctctacc

SEQ ID NO: 1179835 - DNA, 15 bp, Homo sapiens
caaccatgcctctac

SEQ ID NO: 1179836 - DNA, 15 bp, Homo sapiens
acaaccatgcctcta

SEQ ID NO: 1179837 - DNA, 15 bp, Homo sapiens
cacaaccatgcctct

SEQ ID NO: 1179838 - DNA, 15 bp, Homo sapiens
acacaaccatgcctc

SEQ ID NO: 1179839 - DNA, 15 bp, Homo sapiens
aacacaaccatgcct

SEQ ID NO: 1179840 - DNA, 15 bp, Homo sapiens
gaacacaaccatgcc

SEQ ID NO: 1179841 - DNA, 15 bp, Homo sapiens
agaacacaaccatgc

SEQ ID NO: 1179842 - DNA, 15 bp, Homo sapiens
tagaacacaaccatg

SEQ ID NO: 1179843 - DNA, 15 bp, Homo sapiens
atagaacacaaccat

SEQ ID NO: 1179844 - DNA, 15 bp, Homo sapiens
tatagaacacaacca

SEQ ID NO: 1179845 - DNA, 15 bp, Homo sapiens
ctatagaacacaacc

SEQ ID NO: 1179846 - DNA, 15 bp, Homo sapiens
tctatagaacacaac

SEQ ID NO: 1179847 - DNA, 15 bp, Homo sapiens
gtctatagaacacaa

SEQ ID NO: 1179848 - DNA, 15 bp, Homo sapiens
agtctatagaacaca

SEQ ID NO: 1179849 - DNA, 15 bp, Homo sapiens
cagtctatagaacac

SEQ ID NO: 1179850 - DNA, 15 bp, Homo sapiens
tcagtctatagaaca

SEQ ID NO: 1179851 - DNA, 15 bp, Homo sapiens
ctcagtctatagaac

SEQ ID NO: 1179852 - DNA, 15 bp, Homo sapiens
tctcagtctatagaa

SEQ ID NO: 1179853 - DNA, 15 bp, Homo sapiens
ctctcagtctataga

SEQ ID NO: 1179854 - DNA, 15 bp, Homo sapiens
tctctcagtctatag

SEQ ID NO: 1179855 - DNA, 15 bp, Homo sapiens
ctctctcagtctata

SEQ ID NO: 1179856 - DNA, 15 bp, Homo sapiens
cctctctcagtctat

SEQ ID NO: 1179857 - DNA, 15 bp, Homo sapiens
gcctctctcagtcta

SEQ ID NO: 1179858 - DNA, 15 bp, Homo sapiens
ggcctctctcagtct

SEQ ID NO: 1179859 - DNA, 15 bp, Homo sapiens
tggcctctctcagtc

SEQ ID NO: 1179860 - DNA, 15 bp, Homo sapiens
ctggcctctctcagt

SEQ ID NO: 1179861 - DNA, 15 bp, Homo sapiens
tctggcctctctcag

SEQ ID NO: 1179862 - DNA, 15 bp, Homo sapiens
ttctggcctctctca

SEQ ID NO: 1179863 - DNA, 15 bp, Homo sapiens
tttctggcctctctc

SEQ ID NO: 1179864 - DNA, 15 bp, Homo sapiens
atttctggcctctct

SEQ ID NO: 1179865 - DNA, 15 bp, Homo sapiens
tatttctggcctctc

SEQ ID NO: 1179866 - DNA, 15 bp, Homo sapiens
gtatttctggcctct

SEQ ID NO: 1179867 - DNA, 15 bp, Homo sapiens
agtatttctggcctc

SEQ ID NO: 1179868 - DNA, 15 bp, Homo sapiens
cagtatttctggcct

SEQ ID NO: 1179869 - DNA, 15 bp, Homo sapiens
ccagtatttctggcc

SEQ ID NO: 1179870 - DNA, 15 bp, Homo sapiens
cccagtatttctggc

SEQ ID NO: 1179871 - DNA, 15 bp, Homo sapiens
gcccagtatttctgg

SEQ ID NO: 1179872 - DNA, 15 bp, Homo sapiens
tgcccagtatttctg

SEQ ID NO: 1179873 - DNA, 15 bp, Homo sapiens
ttgcccagtatttct

SEQ ID NO: 1179874 - DNA, 15 bp, Homo sapiens
tttgcccagtatttc

SEQ ID NO: 1179875 - DNA, 15 bp, Homo sapiens
gtttgcccagtattt

SEQ ID NO: 1179876 - DNA, 15 bp, Homo sapiens
tgtttgcccagtatt

SEQ ID NO: 1179877 - DNA, 15 bp, Homo sapiens
ttgtttgcccagtat

SEQ ID NO: 1179878 - DNA, 15 bp, Homo sapiens
cttgtttgcccagta

SEQ ID NO: 1179879 - DNA, 15 bp, Homo sapiens
gcttgtttgcccagt

SEQ ID NO: 1179880 - DNA, 15 bp, Homo sapiens
ggcttgtttgcccag

SEQ ID NO: 1179881 - DNA, 15 bp, Homo sapiens
cggcttgtttgccca

SEQ ID NO: 1179882 - DNA, 15 bp, Homo sapiens
gcggcttgtttgccc

SEQ ID NO: 1179883 - DNA, 15 bp, Homo sapiens
agcggcttgtttgcc

SEQ ID NO: 1179884 - DNA, 15 bp, Homo sapiens
aagcggcttgtttgc

SEQ ID NO: 1179885 - DNA, 15 bp, Homo sapiens
aaagcggcttgtttg

SEQ ID NO: 1179886 - DNA, 15 bp, Homo sapiens
caaagcggcttgttt

SEQ ID NO: 1179887 - DNA, 15 bp, Homo sapiens
tcaaagcggcttgtt

SEQ ID NO: 1179888 - DNA, 15 bp, Homo sapiens
gtcaaagcggcttgt

SEQ ID NO: 1179889 - DNA, 15 bp, Homo sapiens
agtcaaagcggcttg

SEQ ID NO: 1179890 - DNA, 15 bp, Homo sapiens
aagtcaaagcggctt

SEQ ID NO: 1179891 - DNA, 15 bp, Homo sapiens
aaagtcaaagcggct

SEQ ID NO: 1179892 - DNA, 15 bp, Homo sapiens
caaagtcaaagcggc

SEQ ID NO: 1179893 - DNA, 15 bp, Homo sapiens
tcaaagtcaaagcgg

SEQ ID NO: 1179894 - DNA, 15 bp, Homo sapiens
ctcaaagtcaaagcg

SEQ ID NO: 1179895 - DNA, 15 bp, Homo sapiens
actcaaagtcaaagc

SEQ ID NO: 1179896 - DNA, 15 bp, Homo sapiens
aactcaaagtcaaag

SEQ ID NO: 1179897 - DNA, 15 bp, Homo sapiens
caactcaaagtcaaa

SEQ ID NO: 1179898 - DNA, 15 bp, Homo sapiens
tcaactcaaagtcaa

SEQ ID NO: 1179899 - DNA, 15 bp, Homo sapiens
atcaactcaaagtca

SEQ ID NO: 1179900 - DNA, 15 bp, Homo sapiens
catcaactcaaagtc

SEQ ID NO: 1179901 - DNA, 15 bp, Homo sapiens
tcatcaactcaaagt

SEQ ID NO: 1179902 - DNA, 15 bp, Homo sapiens
ttcatcaactcaaag

SEQ ID NO: 1179903 - DNA, 15 bp, Homo sapiens
tttcatcaactcaaa

SEQ ID NO: 1179904 - DNA, 15 bp, Homo sapiens
ttttcatcaactcaa

SEQ ID NO: 1179905 - DNA, 15 bp, Homo sapiens
cttttcatcaactca

SEQ ID NO: 1179906 - DNA, 15 bp, Homo sapiens
gcttttcatcaactc

SEQ ID NO: 1179907 - DNA, 15 bp, Homo sapiens
agcttttcatcaact

SEQ ID NO: 1179908 - DNA, 15 bp, Homo sapiens
aagcttttcatcaac

SEQ ID NO: 1179909 - DNA, 15 bp, Homo sapiens
taagcttttcatcaa

SEQ ID NO: 1179910 - DNA, 15 bp, Homo sapiens
ctaagcttttcatca

SEQ ID NO: 1179911 - DNA, 15 bp, Homo sapiens
cctaagcttttcatc

SEQ ID NO: 1179912 - DNA, 15 bp, Homo sapiens
tcctaagcttttcat

SEQ ID NO: 1179913 - DNA, 15 bp, Homo sapiens
ttcctaagcttttca

SEQ ID NO: 1179914 - DNA, 15 bp, Homo sapiens
tttcctaagcttttc

SEQ ID NO: 1179915 - DNA, 15 bp, Homo sapiens
ttttcctaagctttt

SEQ ID NO: 1179916 - DNA, 15 bp, Homo sapiens
tttttcctaagcttt

SEQ ID NO: 1179917 - DNA, 15 bp, Homo sapiens
ttttttcctaagctt

SEQ ID NO: 1179918 - DNA, 15 bp, Homo sapiens
attttttcctaagct

SEQ ID NO: 1179919 - DNA, 15 bp, Homo sapiens
gattttttcctaagc

SEQ ID NO: 1179920 - DNA, 15 bp, Homo sapiens
ggattttttcctaag

SEQ ID NO: 1179921 - DNA, 15 bp, Homo sapiens
gggattttttcctaa

SEQ ID NO: 1179922 - DNA, 15 bp, Homo sapiens
agggattttttccta

SEQ ID NO: 1179923 - DNA, 15 bp, Homo sapiens
gagggattttttcct

SEQ ID NO: 1179924 - DNA, 15 bp, Homo sapiens
ggagggattttttcc

SEQ ID NO: 1179925 - DNA, 15 bp, Homo sapiens
aggagggattttttc

SEQ ID NO: 1179926 - DNA, 15 bp, Homo sapiens
aaggagggatttttt

SEQ ID NO: 1179927 - DNA, 15 bp, Homo sapiens
aaaggagggattttt

SEQ ID NO: 1179928 - DNA, 15 bp, Homo sapiens
aaaaggagggatttt

SEQ ID NO: 1179929 - DNA, 15 bp, Homo sapiens
caaaaggagggattt

SEQ ID NO: 1179930 - DNA, 15 bp, Homo sapiens
acaaaaggagggatt

SEQ ID NO: 1179931 - DNA, 15 bp, Homo sapiens
tacaaaaggagggat

SEQ ID NO: 1179932 - DNA, 15 bp, Homo sapiens
ctacaaaaggaggga

SEQ ID NO: 1179933 - DNA, 15 bp, Homo sapiens
tctacaaaaggaggg

SEQ ID NO: 1179934 - DNA, 15 bp, Homo sapiens
ctctacaaaaggagg

SEQ ID NO: 1179935 - DNA, 15 bp, Homo sapiens
gctctacaaaaggag

SEQ ID NO: 1179936 - DNA, 15 bp, Homo sapiens
agctctacaaaagga

SEQ ID NO: 1179937 - DNA, 15 bp, Homo sapiens
cagctctacaaaagg

SEQ ID NO: 1179938 - DNA, 15 bp, Homo sapiens
gcagctctacaaaag

SEQ ID NO: 1179939 - DNA, 15 bp, Homo sapiens
ggcagctctacaaaa

SEQ ID NO: 1179940 - DNA, 15 bp, Homo sapiens
tggcagctctacaaa

SEQ ID NO: 1179941 - DNA, 15 bp, Homo sapiens
ctggcagctctacaa

SEQ ID NO: 1179942 - DNA, 15 bp, Homo sapiens
cctggcagctctaca

SEQ ID NO: 1179943 - DNA, 15 bp, Homo sapiens
gcctggcagctctac

SEQ ID NO: 1179944 - DNA, 15 bp, Homo sapiens
ggcctggcagctcta

SEQ ID NO: 1179945 - DNA, 15 bp, Homo sapiens
tggcctggcagctct

SEQ ID NO: 1179946 - DNA, 15 bp, Homo sapiens
ctggcctggcagctc

SEQ ID NO: 1179947 - DNA, 15 bp, Homo sapiens
actggcctggcagct

SEQ ID NO: 1179948 - DNA, 15 bp, Homo sapiens
gactggcctggcagc

SEQ ID NO: 1179949 - DNA, 15 bp, Homo sapiens
agactggcctggcag

SEQ ID NO: 1179950 - DNA, 15 bp, Homo sapiens
aagactggcctggca

SEQ ID NO: 1179951 - DNA, 15 bp, Homo sapiens
aaagactggcctggc

SEQ ID NO: 1179952 - DNA, 15 bp, Homo sapiens
gaaagactggcctgg

SEQ ID NO: 1179953 - DNA, 15 bp, Homo sapiens
ggaaagactggcctg

SEQ ID NO: 1179954 - DNA, 15 bp, Homo sapiens
tggaaagactggcct

SEQ ID NO: 1179955 - DNA, 15 bp, Homo sapiens
ttggaaagactggcc

SEQ ID NO: 1179956 - DNA, 15 bp, Homo sapiens
gttggaaagactggc

SEQ ID NO: 1179957 - DNA, 15 bp, Homo sapiens
agttggaaagactgg

SEQ ID NO: 1179958 - DNA, 15 bp, Homo sapiens
gagttggaaagactg

SEQ ID NO: 1179959 - DNA, 15 bp, Homo sapiens
tgagttggaaagact

SEQ ID NO: 1179960 - DNA, 15 bp, Homo sapiens
ttgagttggaaagac

SEQ ID NO: 1179961 - DNA, 15 bp, Homo sapiens
cttgagttggaaaga

SEQ ID NO: 1179962 - DNA, 15 bp, Homo sapiens
acttgagttggaaag

SEQ ID NO: 1179963 - DNA, 15 bp, Homo sapiens
aacttgagttggaaa

SEQ ID NO: 1179964 - DNA, 15 bp, Homo sapiens
gaacttgagttggaa

SEQ ID NO: 1179965 - DNA, 15 bp, Homo sapiens
tgaacttgagttgga

SEQ ID NO: 1179966 - DNA, 15 bp, Homo sapiens
ttgaacttgagttgg

SEQ ID NO: 1179967 - DNA, 15 bp, Homo sapiens
attgaacttgagttg

SEQ ID NO: 1179968 - DNA, 15 bp, Homo sapiens
cattgaacttgagtt

SEQ ID NO: 1179969 - DNA, 15 bp, Homo sapiens
tcattgaacttgagt

SEQ ID NO: 1179970 - DNA, 15 bp, Homo sapiens
atcattgaacttgag

SEQ ID NO: 1179971 - DNA, 15 bp, Homo sapiens
catcattgaacttga

SEQ ID NO: 1179972 - DNA, 15 bp, Homo sapiens
gcatcattgaacttg

SEQ ID NO: 1179973 - DNA, 15 bp, Homo sapiens
cgcatcattgaactt

SEQ ID NO: 1179974 - DNA, 15 bp, Homo sapiens
acgcatcattgaact

SEQ ID NO: 1179975 - DNA, 15 bp, Homo sapiens
gacgcatcattgaac

SEQ ID NO: 1179976 - DNA, 15 bp, Homo sapiens
tgacgcatcattgaa

SEQ ID NO: 1179977 - DNA, 15 bp, Homo sapiens
ttgacgcatcattga

SEQ ID NO: 1179978 - DNA, 15 bp, Homo sapiens
tttgacgcatcattg

SEQ ID NO: 1179979 - DNA, 15 bp, Homo sapiens
ttttgacgcatcatt

SEQ ID NO: 1179980 - DNA, 15 bp, Homo sapiens
attttgacgcatcat

SEQ ID NO: 1179981 - DNA, 15 bp, Homo sapiens
aattttgacgcatca

SEQ ID NO: 1179982 - DNA, 15 bp, Homo sapiens
gaattttgacgcatc

SEQ ID NO: 1179983 - DNA, 15 bp, Homo sapiens
agaattttgacgcat

SEQ ID NO: 1179984 - DNA, 15 bp, Homo sapiens
tagaattttgacgca

SEQ ID NO: 1179985 - DNA, 15 bp, Homo sapiens
gtagaattttgacgc

SEQ ID NO: 1179986 - DNA, 15 bp, Homo sapiens
ggtagaattttgacg

SEQ ID NO: 1179987 - DNA, 15 bp, Homo sapiens
aggtagaattttgac

SEQ ID NO: 1179988 - DNA, 15 bp, Homo sapiens
caggtagaattttga

SEQ ID NO: 1179989 - DNA, 15 bp, Homo sapiens
ccaggtagaattttg

SEQ ID NO: 1179990 - DNA, 15 bp, Homo sapiens
tccaggtagaatttt

SEQ ID NO: 1179991 - DNA, 15 bp, Homo sapiens
ctccaggtagaattt

SEQ ID NO: 1179992 - DNA, 15 bp, Homo sapiens
actccaggtagaatt

SEQ ID NO: 1179993 - DNA, 15 bp, Homo sapiens
gactccaggtagaat

SEQ ID NO: 1179994 - DNA, 15 bp, Homo sapiens
tgactccaggtagaa

SEQ ID NO: 1179995 - DNA, 15 bp, Homo sapiens
atgactccaggtaga

SEQ ID NO: 1179996 - DNA, 15 bp, Homo sapiens
catgactccaggtag

SEQ ID NO: 1179997 - DNA, 15 bp, Homo sapiens
tcatgactccaggta

SEQ ID NO: 1179998 - DNA, 15 bp, Homo sapiens
ctcatgactccaggt

SEQ ID NO: 1179999 - DNA, 15 bp, Homo sapiens
cctcatgactccagg

SEQ ID NO: 1180000 - DNA, 15 bp, Homo sapiens
acctcatgactccag

SEQ ID NO: 1180001 - DNA, 15 bp, Homo sapiens
aacctcatgactcca

SEQ ID NO: 1180002 - DNA, 15 bp, Homo sapiens
gaacctcatgactcc

SEQ ID NO: 1180003 - DNA, 15 bp, Homo sapiens
ggaacctcatgactc

SEQ ID NO: 1180004 - DNA, 15 bp, Homo sapiens
gggaacctcatgact

SEQ ID NO: 1180005 - DNA, 15 bp, Homo sapiens
ggggaacctcatgac

SEQ ID NO: 1180006 - DNA, 15 bp, Homo sapiens
aggggaacctcatga

SEQ ID NO: 1180007 - DNA, 15 bp, Homo sapiens
gaggggaacctcatg

SEQ ID NO: 1180008 - DNA, 15 bp, Homo sapiens
ggaggggaacctcat

SEQ ID NO: 1180009 - DNA, 15 bp, Homo sapiens
gggaggggaacctca

SEQ ID NO: 1180010 - DNA, 15 bp, Homo sapiens
tgggaggggaacctc

SEQ ID NO: 1180011 - DNA, 15 bp, Homo sapiens
atgggaggggaacct

SEQ ID NO: 1180012 - DNA, 15 bp, Homo sapiens
gatgggaggggaacc

SEQ ID NO: 1180013 - DNA, 15 bp, Homo sapiens
agatgggaggggaac

SEQ ID NO: 1180014 - DNA, 15 bp, Homo sapiens
aagatgggaggggaa

SEQ ID NO: 1180015 - DNA, 15 bp, Homo sapiens
taagatgggagggga

SEQ ID NO: 1180016 - DNA, 15 bp, Homo sapiens
ataagatgggagggg

SEQ ID NO: 1180017 - DNA, 15 bp, Homo sapiens
gataagatgggaggg

SEQ ID NO: 1180018 - DNA, 15 bp, Homo sapiens
ggataagatgggagg

SEQ ID NO: 1180019 - DNA, 15 bp, Homo sapiens
aggataagatgggag

SEQ ID NO: 1180020 - DNA, 15 bp, Homo sapiens
gaggataagatggga

SEQ ID NO: 1180021 - DNA, 15 bp, Homo sapiens
agaggataagatggg

SEQ ID NO: 1180022 - DNA, 15 bp, Homo sapiens
cagaggataagatgg

SEQ ID NO: 1180023 - DNA, 15 bp, Homo sapiens
acagaggataagatg

SEQ ID NO: 1180024 - DNA, 15 bp, Homo sapiens
tacagaggataagat

SEQ ID NO: 1180025 - DNA, 15 bp, Homo sapiens
atacagaggataaga

SEQ ID NO: 1180026 - DNA, 15 bp, Homo sapiens
gatacagaggataag

SEQ ID NO: 1180027 - DNA, 15 bp, Homo sapiens
ggatacagaggataa

SEQ ID NO: 1180028 - DNA, 15 bp, Homo sapiens
gggatacagaggata

SEQ ID NO: 1180029 - DNA, 15 bp, Homo sapiens
ggggatacagaggat

SEQ ID NO: 1180030 - DNA, 15 bp, Homo sapiens
gggggatacagagga

SEQ ID NO: 1180031 - DNA, 15 bp, Homo sapiens
cgggggatacagagg

SEQ ID NO: 1180032 - DNA, 15 bp, Homo sapiens
ccgggggatacagag

SEQ ID NO: 1180033 - DNA, 15 bp, Homo sapiens
accgggggatacaga

SEQ ID NO: 1180034 - DNA, 15 bp, Homo sapiens
gaccgggggatacag

SEQ ID NO: 1180035 - DNA, 15 bp, Homo sapiens
ggaccgggggataca

SEQ ID NO: 1180036 - DNA, 15 bp, Homo sapiens
tggaccgggggatac

SEQ ID NO: 1180037 - DNA, 15 bp, Homo sapiens
ctggaccgggggata

SEQ ID NO: 1180038 - DNA, 15 bp, Homo sapiens
tctggaccgggggat

SEQ ID NO: 1180039 - DNA, 15 bp, Homo sapiens
atctggaccggggga

SEQ ID NO: 1180040 - DNA, 15 bp, Homo sapiens
tatctggaccggggg

SEQ ID NO: 1180041 - DNA, 15 bp, Homo sapiens
ctatctggaccgggg

SEQ ID NO: 1180042 - DNA, 15 bp, Homo sapiens
cctatctggaccggg

SEQ ID NO: 1180043 - DNA, 15 bp, Homo sapiens
tcctatctggaccgg

SEQ ID NO: 1180044 - DNA, 15 bp, Homo sapiens
atcctatctggaccg

SEQ ID NO: 1180045 - DNA, 15 bp, Homo sapiens
aatcctatctggacc

SEQ ID NO: 1180046 - DNA, 15 bp, Homo sapiens
aaatcctatctggac

SEQ ID NO: 1180047 - DNA, 15 bp, Homo sapiens
caaatcctatctgga

SEQ ID NO: 1180048 - DNA, 15 bp, Homo sapiens
tcaaatcctatctgg

SEQ ID NO: 1180049 - DNA, 15 bp, Homo sapiens
atcaaatcctatctg

SEQ ID NO: 1180050 - DNA, 15 bp, Homo sapiens
catcaaatcctatct

SEQ ID NO: 1180051 - DNA, 15 bp, Homo sapiens
gcatcaaatcctatc

SEQ ID NO: 1180052 - DNA, 15 bp, Homo sapiens
tgcatcaaatcctat

SEQ ID NO: 1180053 - DNA, 15 bp, Homo sapiens
ctgcatcaaatccta

SEQ ID NO: 1180054 - DNA, 15 bp, Homo sapiens
tctgcatcaaatcct

SEQ ID NO: 1180055 - DNA, 15 bp, Homo sapiens
atctgcatcaaatcc

SEQ ID NO: 1180056 - DNA, 15 bp, Homo sapiens
tatctgcatcaaatc

SEQ ID NO: 1180057 - DNA, 15 bp, Homo sapiens
ttatctgcatcaaat

SEQ ID NO: 1180058 - DNA, 15 bp, Homo sapiens
gttatctgcatcaaa

SEQ ID NO: 1180059 - DNA, 15 bp, Homo sapiens
tgttatctgcatcaa

SEQ ID NO: 1180060 - DNA, 15 bp, Homo sapiens
atgttatctgcatca

SEQ ID NO: 1180061 - DNA, 15 bp, Homo sapiens
catgttatctgcatc

SEQ ID NO: 1180062 - DNA, 15 bp, Homo sapiens
ccatgttatctgcat

SEQ ID NO: 1180063 - DNA, 15 bp, Homo sapiens
cccatgttatctgca

SEQ ID NO: 1180064 - DNA, 15 bp, Homo sapiens
gcccatgttatctgc

SEQ ID NO: 1180065 - DNA, 15 bp, Homo sapiens
tgcccatgttatctg

SEQ ID NO: 1180066 - DNA, 15 bp, Homo sapiens
gtgcccatgttatct

SEQ ID NO: 1180067 - DNA, 15 bp, Homo sapiens
agtgcccatgttatc

SEQ ID NO: 1180068 - DNA, 15 bp, Homo sapiens
cagtgcccatgttat

SEQ ID NO: 1180069 - DNA, 15 bp, Homo sapiens
acagtgcccatgtta

SEQ ID NO: 1180070 - DNA, 15 bp, Homo sapiens
aacagtgcccatgtt

SEQ ID NO: 1180071 - DNA, 15 bp, Homo sapiens
caacagtgcccatgt

SEQ ID NO: 1180072 - DNA, 15 bp, Homo sapiens
ccaacagtgcccatg

SEQ ID NO: 1180073 - DNA, 15 bp, Homo sapiens
accaacagtgcccat

SEQ ID NO: 1180074 - DNA, 15 bp, Homo sapiens
aaccaacagtgccca

SEQ ID NO: 1180075 - DNA, 15 bp, Homo sapiens
caaccaacagtgccc

SEQ ID NO: 1180076 - DNA, 15 bp, Homo sapiens
gcaaccaacagtgcc

SEQ ID NO: 1180077 - DNA, 15 bp, Homo sapiens
agcaaccaacagtgc

SEQ ID NO: 1180078 - DNA, 15 bp, Homo sapiens
aagcaaccaacagtg

SEQ ID NO: 1180079 - DNA, 15 bp, Homo sapiens
aaagcaaccaacagt

SEQ ID NO: 1180080 - DNA, 15 bp, Homo sapiens
aaaagcaaccaacag

SEQ ID NO: 1180081 - DNA, 15 bp, Homo sapiens
gaaaagcaaccaaca

SEQ ID NO: 1180082 - DNA, 15 bp, Homo sapiens
agaaaagcaaccaac

SEQ ID NO: 1180083 - DNA, 15 bp, Homo sapiens
aagaaaagcaaccaa

SEQ ID NO: 1180084 - DNA, 15 bp, Homo sapiens
aaagaaaagcaacca

SEQ ID NO: 1180085 - DNA, 15 bp, Homo sapiens
aaaagaaaagcaacc

SEQ ID NO: 1180086 - DNA, 15 bp, Homo sapiens
taaaagaaaagcaac

SEQ ID NO: 1180087 - DNA, 15 bp, Homo sapiens
ctaaaagaaaagcaa

SEQ ID NO: 1180088 - DNA, 15 bp, Homo sapiens
gctaaaagaaaagca

SEQ ID NO: 1180089 - DNA, 15 bp, Homo sapiens
tgctaaaagaaaagc

SEQ ID NO: 1180090 - DNA, 15 bp, Homo sapiens
atgctaaaagaaaag

SEQ ID NO: 1180091 - DNA, 15 bp, Homo sapiens
catgctaaaagaaaa

SEQ ID NO: 1180092 - DNA, 15 bp, Homo sapiens
tcatgctaaaagaaa

SEQ ID NO: 1180093 - DNA, 15 bp, Homo sapiens
ctcatgctaaaagaa

SEQ ID NO: 1180094 - DNA, 15 bp, Homo sapiens
cctcatgctaaaaga

SEQ ID NO: 1180095 - DNA, 15 bp, Homo sapiens
tcctcatgctaaaag

SEQ ID NO: 1180096 - DNA, 15 bp, Homo sapiens
atcctcatgctaaaa

SEQ ID NO: 1180097 - DNA, 15 bp, Homo sapiens
aatcctcatgctaaa

SEQ ID NO: 1180098 - DNA, 15 bp, Homo sapiens
gaatcctcatgctaa

SEQ ID NO: 1180099 - DNA, 15 bp, Homo sapiens
ggaatcctcatgcta

SEQ ID NO: 1180100 - DNA, 15 bp, Homo sapiens
aggaatcctcatgct

SEQ ID NO: 1180101 - DNA, 15 bp, Homo sapiens
gaggaatcctcatgc

SEQ ID NO: 1180102 - DNA, 15 bp, Homo sapiens
tgaggaatcctcatg

SEQ ID NO: 1180103 - DNA, 15 bp, Homo sapiens
ttgaggaatcctcat

SEQ ID NO: 1180104 - DNA, 15 bp, Homo sapiens
tttgaggaatcctca

SEQ ID NO: 1180105 - DNA, 15 bp, Homo sapiens
ttttgaggaatcctc

SEQ ID NO: 1180106 - DNA, 15 bp, Homo sapiens
gttttgaggaatcct

SEQ ID NO: 1180107 - DNA, 15 bp, Homo sapiens
tgttttgaggaatcc

SEQ ID NO: 1180108 - DNA, 15 bp, Homo sapiens
ctgttttgaggaatc

SEQ ID NO: 1180109 - DNA, 15 bp, Homo sapiens
tctgttttgaggaat

SEQ ID NO: 1180110 - DNA, 15 bp, Homo sapiens
ctctgttttgaggaa

SEQ ID NO: 1180111 - DNA, 15 bp, Homo sapiens
actctgttttgagga

SEQ ID NO: 1180112 - DNA, 15 bp, Homo sapiens
aactctgttttgagg

SEQ ID NO: 1180113 - DNA, 15 bp, Homo sapiens
aaactctgttttgag

SEQ ID NO: 1180114 - DNA, 15 bp, Homo sapiens
aaaactctgttttga

SEQ ID NO: 1180115 - DNA, 15 bp, Homo sapiens
caaaactctgttttg

SEQ ID NO: 1180116 - DNA, 15 bp, Homo sapiens
acaaaactctgtttt

SEQ ID NO: 1180117 - DNA, 15 bp, Homo sapiens
aacaaaactctgttt

SEQ ID NO: 1180118 - DNA, 15 bp, Homo sapiens
taacaaaactctgtt

SEQ ID NO: 1180119 - DNA, 15 bp, Homo sapiens
ttaacaaaactctgt

SEQ ID NO: 1180120 - DNA, 15 bp, Homo sapiens
attaacaaaactctg

SEQ ID NO: 1180121 - DNA, 15 bp, Homo sapiens
tattaacaaaactct

SEQ ID NO: 1180122 - DNA, 15 bp, Homo sapiens
ttattaacaaaactc

SEQ ID NO: 1180123 - DNA, 15 bp, Homo sapiens
tttattaacaaaact

SEQ ID NO: 1180124 - DNA, 15 bp, Homo sapiens
atttattaacaaaac

SEQ ID NO: 1180125 - DNA, 15 bp, Homo sapiens
aatttattaacaaaa

SEQ ID NO: 1180126 - DNA, 15 bp, Homo sapiens
taatttattaacaaa

SEQ ID NO: 1180127 - DNA, 15 bp, Homo sapiens
ttaatttattaacaa

SEQ ID NO: 1180128 - DNA, 15 bp, Homo sapiens
cttaatttattaaca

SEQ ID NO: 1180129 - DNA, 15 bp, Homo sapiens
gcttaatttattaac

SEQ ID NO: 1180130 - DNA, 15 bp, Homo sapiens
tgcttaatttattaa

SEQ ID NO: 1180131 - DNA, 15 bp, Homo sapiens
ctgcttaatttatta

SEQ ID NO: 1180132 - DNA, 15 bp, Homo sapiens
tctgcttaatttatt

SEQ ID NO: 1180133 - DNA, 15 bp, Homo sapiens
ttctgcttaatttat

SEQ ID NO: 1180134 - DNA, 15 bp, Homo sapiens
attctgcttaattta

SEQ ID NO: 1180135 - DNA, 15 bp, Homo sapiens
aattctgcttaattt

SEQ ID NO: 1180136 - DNA, 15 bp, Homo sapiens
aaattctgcttaatt

SEQ ID NO: 1180137 - DNA, 15 bp, Homo sapiens
caaattctgcttaat

SEQ ID NO: 1180138 - DNA, 15 bp, Homo sapiens
tcaaattctgcttaa

SEQ ID NO: 1180139 - DNA, 15 bp, Homo sapiens
ctcaaattctgctta

SEQ ID NO: 1180140 - DNA, 15 bp, Homo sapiens
actcaaattctgctt

SEQ ID NO: 1180141 - DNA, 15 bp, Homo sapiens
cactcaaattctgct

SEQ ID NO: 1180142 - DNA, 15 bp, Homo sapiens
tcactcaaattctgc

SEQ ID NO: 1180143 - DNA, 15 bp, Homo sapiens
ttcactcaaattctg

SEQ ID NO: 1180144 - DNA, 15 bp, Homo sapiens
attcactcaaattct

SEQ ID NO: 1180145 - DNA, 15 bp, Homo sapiens
aattcactcaaattc

SEQ ID NO: 1180146 - DNA, 15 bp, Homo sapiens
aaattcactcaaatt

SEQ ID NO: 1180147 - DNA, 15 bp, Homo sapiens
taaattcactcaaat

SEQ ID NO: 1180148 - DNA, 15 bp, Homo sapiens
ttaaattcactcaaa

SEQ ID NO: 1180149 - DNA, 15 bp, Homo sapiens
cttaaattcactcaa

SEQ ID NO: 1180150 - DNA, 15 bp, Homo sapiens
gcttaaattcactca

SEQ ID NO: 1180151 - DNA, 15 bp, Homo sapiens
tgcttaaattcactc

SEQ ID NO: 1180152 - DNA, 15 bp, Homo sapiens
ctgcttaaattcact

SEQ ID NO: 1180153 - DNA, 15 bp, Homo sapiens
tctgcttaaattcac

SEQ ID NO: 1180154 - DNA, 15 bp, Homo sapiens
ctctgcttaaattca

SEQ ID NO: 1180155 - DNA, 15 bp, Homo sapiens
actctgcttaaattc

SEQ ID NO: 1180156 - DNA, 15 bp, Homo sapiens
aactctgcttaaatt

SEQ ID NO: 1180157 - DNA, 15 bp, Homo sapiens
aaactctgcttaaat

SEQ ID NO: 1180158 - DNA, 15 bp, Homo sapiens
caaactctgcttaaa

SEQ ID NO: 1180159 - DNA, 15 bp, Homo sapiens
tcaaactctgcttaa

SEQ ID NO: 1180160 - DNA, 15 bp, Homo sapiens
ctcaaactctgctta

SEQ ID NO: 1180161 - DNA, 15 bp, Homo sapiens
tctcaaactctgctt

SEQ ID NO: 1180162 - DNA, 15 bp, Homo sapiens
ttctcaaactctgct

SEQ ID NO: 1180163 - DNA, 15 bp, Homo sapiens
attctcaaactctgc

SEQ ID NO: 1180164 - DNA, 15 bp, Homo sapiens
aattctcaaactctg

SEQ ID NO: 1180165 - DNA, 15 bp, Homo sapiens
aaattctcaaactct

SEQ ID NO: 1180166 - DNA, 15 bp, Homo sapiens
taaattctcaaactc

SEQ ID NO: 1180167 - DNA, 15 bp, Homo sapiens
ttaaattctcaaact

SEQ ID NO: 1180168 - DNA, 15 bp, Homo sapiens
cttaaattctcaaac

SEQ ID NO: 1180169 - DNA, 15 bp, Homo sapiens
acttaaattctcaaa

SEQ ID NO: 1180170 - DNA, 15 bp, Homo sapiens
cacttaaattctcaa

SEQ ID NO: 1180171 - DNA, 15 bp, Homo sapiens
tcacttaaattctca

SEQ ID NO: 1180172 - DNA, 15 bp, Homo sapiens
ttcacttaaattctc

SEQ ID NO: 1180173 - DNA, 15 bp, Homo sapiens
attcacttaaattct

SEQ ID NO: 1180174 - DNA, 15 bp, Homo sapiens
cattcacttaaattc

SEQ ID NO: 1180175 - DNA, 15 bp, Homo sapiens
acattcacttaaatt

SEQ ID NO: 1180176 - DNA, 15 bp, Homo sapiens
gacattcacttaaat

SEQ ID NO: 1180177 - DNA, 15 bp, Homo sapiens
agacattcacttaaa

SEQ ID NO: 1180178 - DNA, 15 bp, Homo sapiens
cagacattcacttaa

SEQ ID NO: 1180179 - DNA, 15 bp, Homo sapiens
ccagacattcactta

SEQ ID NO: 1180180 - DNA, 15 bp, Homo sapiens
cccagacattcactt

SEQ ID NO: 1180181 - DNA, 15 bp, Homo sapiens
acccagacattcact

SEQ ID NO: 1180182 - DNA, 15 bp, Homo sapiens
tacccagacattcac

SEQ ID NO: 1180183 - DNA, 15 bp, Homo sapiens
atacccagacattca

SEQ ID NO: 1180184 - DNA, 15 bp, Homo sapiens
tatacccagacattc

SEQ ID NO: 1180185 - DNA, 15 bp, Homo sapiens
atatacccagacatt

SEQ ID NO: 1180186 - DNA, 15 bp, Homo sapiens
aatatacccagacat

SEQ ID NO: 1180187 - DNA, 15 bp, Homo sapiens
aaatatacccagaca

SEQ ID NO: 1180188 - DNA, 15 bp, Homo sapiens
caaatatacccagac

SEQ ID NO: 1180189 - DNA, 15 bp, Homo sapiens
tcaaatatacccaga

SEQ ID NO: 1180190 - DNA, 15 bp, Homo sapiens
ttcaaatatacccag

SEQ ID NO: 1180191 - DNA, 15 bp, Homo sapiens
attcaaatataccca

SEQ ID NO: 1180192 - DNA, 15 bp, Homo sapiens
tattcaaatataccc

SEQ ID NO: 1180193 - DNA, 15 bp, Homo sapiens
ttattcaaatatacc

SEQ ID NO: 1180194 - DNA, 15 bp, Homo sapiens
attattcaaatatac

SEQ ID NO: 1180195 - DNA, 15 bp, Homo sapiens
tattattcaaatata

SEQ ID NO: 1180196 - DNA, 15 bp, Homo sapiens
atattattcaaatat

SEQ ID NO: 1180197 - DNA, 15 bp, Homo sapiens
aatattattcaaata

SEQ ID NO: 1180198 - DNA, 15 bp, Homo sapiens
aaatattattcaaat

SEQ ID NO: 1180199 - DNA, 15 bp, Homo sapiens
taaatattattcaaa

SEQ ID NO: 1180200 - DNA, 15 bp, Homo sapiens
ataaatattattcaa

SEQ ID NO: 1180201 - DNA, 15 bp, Homo sapiens
caaaataaatattat

SEQ ID NO: 1180202 - DNA, 15 bp, Homo sapiens
gcaaaataaatatta

SEQ ID NO: 1180203 - DNA, 15 bp, Homo sapiens
agcaaaataaatatt

SEQ ID NO: 1180204 - DNA, 15 bp, Homo sapiens
tagcaaaataaatat

SEQ ID NO: 1180205 - DNA, 15 bp, Homo sapiens
atagcaaaataaata

SEQ ID NO: 1180206 - DNA, 15 bp, Homo sapiens
gatagcaaaataaat

SEQ ID NO: 1180207 - DNA, 15 bp, Homo sapiens
tgatagcaaaataaa

SEQ ID NO: 1180208 - DNA, 15 bp, Homo sapiens
ctgatagcaaaataa

SEQ ID NO: 1180209 - DNA, 15 bp, Homo sapiens
gctgatagcaaaata

SEQ ID NO: 1180210 - DNA, 15 bp, Homo sapiens
tgctgatagcaaaat

SEQ ID NO: 1180211 - DNA, 15 bp, Homo sapiens
atgctgatagcaaaa

SEQ ID NO: 1180212 - DNA, 15 bp, Homo sapiens
catgctgatagcaaa

SEQ ID NO: 1180213 - DNA, 15 bp, Homo sapiens
tcatgctgatagcaa

SEQ ID NO: 1180214 - DNA, 15 bp, Homo sapiens
gtcatgctgatagca

SEQ ID NO: 1180215 - DNA, 15 bp, Homo sapiens
tgtcatgctgatagc

SEQ ID NO: 1180216 - DNA, 15 bp, Homo sapiens
ttgtcatgctgatag

SEQ ID NO: 1180217 - DNA, 15 bp, Homo sapiens
gttgtcatgctgata

SEQ ID NO: 1180218 - DNA, 15 bp, Homo sapiens
tgttgtcatgctgat

SEQ ID NO: 1180219 - DNA, 15 bp, Homo sapiens
atgttgtcatgctga

SEQ ID NO: 1180220 - DNA, 15 bp, Homo sapiens
aatgttgtcatgctg

SEQ ID NO: 1180221 - DNA, 15 bp, Homo sapiens
caatgttgtcatgct

SEQ ID NO: 1180222 - DNA, 15 bp, Homo sapiens
ccaatgttgtcatgc

SEQ ID NO: 1180223 - DNA, 15 bp, Homo sapiens
tccaatgttgtcatg

SEQ ID NO: 1180224 - DNA, 15 bp, Homo sapiens
atccaatgttgtcat

SEQ ID NO: 1180225 - DNA, 15 bp, Homo sapiens
tatccaatgttgtca

SEQ ID NO: 1180226 - DNA, 15 bp, Homo sapiens
atatccaatgttgtc

SEQ ID NO: 1180227 - DNA, 15 bp, Homo sapiens
gatatccaatgttgt

SEQ ID NO: 1180228 - DNA, 15 bp, Homo sapiens
tgatatccaatgttg

SEQ ID NO: 1180229 - DNA, 15 bp, Homo sapiens
ttgatatccaatgtt

SEQ ID NO: 1180230 - DNA, 15 bp, Homo sapiens
tttgatatccaatgt

SEQ ID NO: 1180231 - DNA, 15 bp, Homo sapiens
ttttgatatccaatg

SEQ ID NO: 1180232 - DNA, 15 bp, Homo sapiens
tttttgatatccaat

SEQ ID NO: 1180233 - DNA, 15 bp, Homo sapiens
ctttttgatatccaa

SEQ ID NO: 1180234 - DNA, 15 bp, Homo sapiens
tctttttgatatcca

SEQ ID NO: 1180235 - DNA, 15 bp, Homo sapiens
ctctttttgatatcc

SEQ ID NO: 1180236 - DNA, 15 bp, Homo sapiens
actctttttgatatc

SEQ ID NO: 1180237 - DNA, 15 bp, Homo sapiens
aactctttttgatat

SEQ ID NO: 1180238 - DNA, 15 bp, Homo sapiens
gaactctttttgata

SEQ ID NO: 1180239 - DNA, 15 bp, Homo sapiens
agaactctttttgat

SEQ ID NO: 1180240 - DNA, 15 bp, Homo sapiens
cagaactctttttga

SEQ ID NO: 1180241 - DNA, 15 bp, Homo sapiens
tcagaactctttttg

SEQ ID NO: 1180242 - DNA, 15 bp, Homo sapiens
ttcagaactcttttt

SEQ ID NO: 1180243 - DNA, 15 bp, Homo sapiens
attcagaactctttt

SEQ ID NO: 1180244 - DNA, 15 bp, Homo sapiens
tattcagaactcttt

SEQ ID NO: 1180245 - DNA, 15 bp, Homo sapiens
atattcagaactctt

SEQ ID NO: 1180246 - DNA, 15 bp, Homo sapiens
catattcagaactct

SEQ ID NO: 1180247 - DNA, 15 bp, Homo sapiens
tcatattcagaactc

SEQ ID NO: 1180248 - DNA, 15 bp, Homo sapiens
ctcatattcagaact

SEQ ID NO: 1180249 - DNA, 15 bp, Homo sapiens
cctcatattcagaac

SEQ ID NO: 1180250 - DNA, 15 bp, Homo sapiens
acctcatattcagaa

SEQ ID NO: 1180251 - DNA, 15 bp, Homo sapiens
cacctcatattcaga

SEQ ID NO: 1180252 - DNA, 15 bp, Homo sapiens
tcacctcatattcag

SEQ ID NO: 1180253 - DNA, 15 bp, Homo sapiens
ctcacctcatattca

SEQ ID NO: 1180254 - DNA, 15 bp, Homo sapiens
cctcacctcatattc

SEQ ID NO: 1180255 - DNA, 15 bp, Homo sapiens
tcctcacctcatatt

SEQ ID NO: 1180256 - DNA, 15 bp, Homo sapiens
ctcctcacctcatat

SEQ ID NO: 1180257 - DNA, 15 bp, Homo sapiens
tctcctcacctcata

SEQ ID NO: 1180258 - DNA, 15 bp, Homo sapiens
gtctcctcacctcat

SEQ ID NO: 1180259 - DNA, 15 bp, Homo sapiens
ggtctcctcacctca

SEQ ID NO: 1180260 - DNA, 15 bp, Homo sapiens
aggtctcctcacctc

SEQ ID NO: 1180261 - DNA, 15 bp, Homo sapiens
caggtctcctcacct

SEQ ID NO: 1180262 - DNA, 15 bp, Homo sapiens
ccaggtctcctcacc

SEQ ID NO: 1180263 - DNA, 15 bp, Homo sapiens
tccaggtctcctcac

SEQ ID NO: 1180264 - DNA, 15 bp, Homo sapiens
gtccaggtctcctca

SEQ ID NO: 1180265 - DNA, 15 bp, Homo sapiens
tgtccaggtctcctc

SEQ ID NO: 1180266 - DNA, 15 bp, Homo sapiens
gtgtccaggtctcct

SEQ ID NO: 1180267 - DNA, 15 bp, Homo sapiens
ggtgtccaggtctcc

SEQ ID NO: 1180268 - DNA, 15 bp, Homo sapiens
gggtgtccaggtctc

SEQ ID NO: 1180269 - DNA, 15 bp, Homo sapiens
agggtgtccaggtct

SEQ ID NO: 1180270 - DNA, 15 bp, Homo sapiens
cagggtgtccaggtc

SEQ ID NO: 1180271 - DNA, 15 bp, Homo sapiens
tcagggtgtccaggt

SEQ ID NO: 1180272 - DNA, 15 bp, Homo sapiens
ttcagggtgtccagg

SEQ ID NO: 1180273 - DNA, 15 bp, Homo sapiens
tttcagggtgtccag

SEQ ID NO: 1180274 - DNA, 15 bp, Homo sapiens
ttttcagggtgtcca

SEQ ID NO: 1180275 - DNA, 15 bp, Homo sapiens
cttttcagggtgtcc

SEQ ID NO: 1180276 - DNA, 15 bp, Homo sapiens
gcttttcagggtgtc

SEQ ID NO: 1180277 - DNA, 15 bp, Homo sapiens
ggcttttcagggtgt

SEQ ID NO: 1180278 - DNA, 15 bp, Homo sapiens
aggcttttcagggtg

SEQ ID NO: 1180279 - DNA, 15 bp, Homo sapiens
aaggcttttcagggt

SEQ ID NO: 1180280 - DNA, 15 bp, Homo sapiens
caaggcttttcaggg

SEQ ID NO: 1180281 - DNA, 15 bp, Homo sapiens
tcaaggcttttcagg

SEQ ID NO: 1180282 - DNA, 15 bp, Homo sapiens
ttcaaggcttttcag

SEQ ID NO: 1180283 - DNA, 15 bp, Homo sapiens
attcaaggcttttca

SEQ ID NO: 1180284 - DNA, 15 bp, Homo sapiens
aattcaaggcttttc

SEQ ID NO: 1180285 - DNA, 15 bp, Homo sapiens
gaattcaaggctttt

SEQ ID NO: 1180286 - DNA, 15 bp, Homo sapiens
cgaattcaaggcttt

SEQ ID NO: 1180287 - DNA, 15 bp, Homo sapiens
gcgaattcaaggctt

SEQ ID NO: 1180288 - DNA, 15 bp, Homo sapiens
agcgaattcaaggct

SEQ ID NO: 1180289 - DNA, 15 bp, Homo sapiens
cagcgaattcaaggc

SEQ ID NO: 1180290 - DNA, 15 bp, Homo sapiens
ccagcgaattcaagg

SEQ ID NO: 1180291 - DNA, 15 bp, Homo sapiens
accagcgaattcaag

SEQ ID NO: 1180292 - DNA, 15 bp, Homo sapiens
aaccagcgaattcaa

SEQ ID NO: 1180293 - DNA, 15 bp, Homo sapiens
caaccagcgaattca

SEQ ID NO: 1180294 - DNA, 15 bp, Homo sapiens
ccaaccagcgaattc

SEQ ID NO: 1180295 - DNA, 15 bp, Homo sapiens
gccaaccagcgaatt

SEQ ID NO: 1180296 - DNA, 15 bp, Homo sapiens
agccaaccagcgaat

SEQ ID NO: 1180297 - DNA, 15 bp, Homo sapiens
cagccaaccagcgaa

SEQ ID NO: 1180298 - DNA, 15 bp, Homo sapiens
ccagccaaccagcga

SEQ ID NO: 1180299 - DNA, 15 bp, Homo sapiens
cccagccaaccagcg

SEQ ID NO: 1180300 - DNA, 15 bp, Homo sapiens
acccagccaaccagc

SEQ ID NO: 1180301 - DNA, 15 bp, Homo sapiens
aacccagccaaccag

SEQ ID NO: 1180302 - DNA, 15 bp, Homo sapiens
gaacccagccaacca

SEQ ID NO: 1180303 - DNA, 15 bp, Homo sapiens
agaacccagccaacc

SEQ ID NO: 1180304 - DNA, 15 bp, Homo sapiens
cagaacccagccaac

SEQ ID NO: 1180305 - DNA, 15 bp, Homo sapiens
acagaacccagccaa

SEQ ID NO: 1180306 - DNA, 15 bp, Homo sapiens
gacagaacccagcca

SEQ ID NO: 1180307 - DNA, 15 bp, Homo sapiens
tgacagaacccagcc

SEQ ID NO: 1180308 - DNA, 15 bp, Homo sapiens
ctgacagaacccagc

SEQ ID NO: 1180309 - DNA, 15 bp, Homo sapiens
cctgacagaacccag

SEQ ID NO: 1180310 - DNA, 15 bp, Homo sapiens
gcctgacagaaccca

SEQ ID NO: 1180311 - DNA, 15 bp, Homo sapiens
tgcctgacagaaccc

SEQ ID NO: 1180312 - DNA, 15 bp, Homo sapiens
ttgcctgacagaacc

SEQ ID NO: 1180313 - DNA, 15 bp, Homo sapiens
attgcctgacagaac

SEQ ID NO: 1180314 - DNA, 15 bp, Homo sapiens
aattgcctgacagaa

SEQ ID NO: 1180315 - DNA, 15 bp, Homo sapiens
gaattgcctgacaga

SEQ ID NO: 1180316 - DNA, 15 bp, Homo sapiens
agaattgcctgacag

SEQ ID NO: 1180317 - DNA, 15 bp, Homo sapiens
gagaattgcctgaca

SEQ ID NO: 1180318 - DNA, 15 bp, Homo sapiens
agagaattgcctgac

SEQ ID NO: 1180319 - DNA, 15 bp, Homo sapiens
gagagaattgcctga

SEQ ID NO: 1180320 - DNA, 15 bp, Homo sapiens
ggagagaattgcctg

SEQ ID NO: 1180321 - DNA, 15 bp, Homo sapiens
gggagagaattgcct

SEQ ID NO: 1180322 - DNA, 15 bp, Homo sapiens
agggagagaattgcc

SEQ ID NO: 1180323 - DNA, 15 bp, Homo sapiens
aagggagagaattgc

SEQ ID NO: 1180324 - DNA, 15 bp, Homo sapiens
caagggagagaattg

SEQ ID NO: 1180325 - DNA, 15 bp, Homo sapiens
acaagggagagaatt

SEQ ID NO: 1180326 - DNA, 15 bp, Homo sapiens
gacaagggagagaat

SEQ ID NO: 1180327 - DNA, 15 bp, Homo sapiens
tgacaagggagagaa

SEQ ID NO: 1180328 - DNA, 15 bp, Homo sapiens
ttgacaagggagaga

SEQ ID NO: 1180329 - DNA, 15 bp, Homo sapiens
tttgacaagggagag

SEQ ID NO: 1180330 - DNA, 15 bp, Homo sapiens
atttgacaagggaga

SEQ ID NO: 1180331 - DNA, 15 bp, Homo sapiens
catttgacaagggag

SEQ ID NO: 1180332 - DNA, 15 bp, Homo sapiens
ccatttgacaaggga

SEQ ID NO: 1180333 - DNA, 15 bp, Homo sapiens
cccatttgacaaggg

SEQ ID NO: 1180334 - DNA, 15 bp, Homo sapiens
acccatttgacaagg

SEQ ID NO: 1180335 - DNA, 15 bp, Homo sapiens
tacccatttgacaag

SEQ ID NO: 1180336 - DNA, 15 bp, Homo sapiens
gtacccatttgacaa

SEQ ID NO: 1180337 - DNA, 15 bp, Homo sapiens
tgtacccatttgaca

SEQ ID NO: 1180338 - DNA, 15 bp, Homo sapiens
ctgtacccatttgac

SEQ ID NO: 1180339 - DNA, 15 bp, Homo sapiens
actgtacccatttga

SEQ ID NO: 1180340 - DNA, 15 bp, Homo sapiens
gactgtacccatttg

SEQ ID NO: 1180341 - DNA, 15 bp, Homo sapiens
tgactgtacccattt

SEQ ID NO: 1180342 - DNA, 15 bp, Homo sapiens
ctgactgtacccatt

SEQ ID NO: 1180343 - DNA, 15 bp, Homo sapiens
gctgactgtacccat

SEQ ID NO: 1180344 - DNA, 15 bp, Homo sapiens
ggctgactgtaccca

SEQ ID NO: 1180345 - DNA, 15 bp, Homo sapiens
gggctgactgtaccc

SEQ ID NO: 1180346 - DNA, 15 bp, Homo sapiens
agggctgactgtacc

SEQ ID NO: 1180347 - DNA, 15 bp, Homo sapiens
cagggctgactgtac

SEQ ID NO: 1180348 - DNA, 15 bp, Homo sapiens
gcagggctgactgta

SEQ ID NO: 1180349 - DNA, 15 bp, Homo sapiens
ggcagggctgactgt

SEQ ID NO: 1180350 - DNA, 15 bp, Homo sapiens
aggcagggctgactg

SEQ ID NO: 1180351 - DNA, 15 bp, Homo sapiens
caggcagggctgact

SEQ ID NO: 1180352 - DNA, 15 bp, Homo sapiens
gcaggcagggctgac

SEQ ID NO: 1180353 - DNA, 15 bp, Homo sapiens
ggcaggcagggctga

SEQ ID NO: 1180354 - DNA, 15 bp, Homo sapiens
aggcaggcagggctg

SEQ ID NO: 1180355 - DNA, 15 bp, Homo sapiens
taggcaggcagggct

SEQ ID NO: 1180356 - DNA, 15 bp, Homo sapiens
gtaggcaggcagggc

SEQ ID NO: 1180357 - DNA, 15 bp, Homo sapiens
ggtaggcaggcaggg

SEQ ID NO: 1180358 - DNA, 15 bp, Homo sapiens
gggtaggcaggcagg

SEQ ID NO: 1180359 - DNA, 15 bp, Homo sapiens
tgggtaggcaggcag

SEQ ID NO: 1180360 - DNA, 15 bp, Homo sapiens
ttgggtaggcaggca

SEQ ID NO: 1180361 - DNA, 15 bp, Homo sapiens
tttgggtaggcaggc

SEQ ID NO: 1180362 - DNA, 15 bp, Homo sapiens
ctttgggtaggcagg

SEQ ID NO: 1180363 - DNA, 15 bp, Homo sapiens
gctttgggtaggcag

SEQ ID NO: 1180364 - DNA, 15 bp, Homo sapiens
tgctttgggtaggca

SEQ ID NO: 1180365 - DNA, 15 bp, Homo sapiens
ctgctttgggtaggc

SEQ ID NO: 1180366 - DNA, 15 bp, Homo sapiens
actgctttgggtagg

SEQ ID NO: 1180367 - DNA, 15 bp, Homo sapiens
aactgctttgggtag

SEQ ID NO: 1180368 - DNA, 15 bp, Homo sapiens
aaactgctttgggta

SEQ ID NO: 1180369 - DNA, 15 bp, Homo sapiens
aaaactgctttgggt

SEQ ID NO: 1180370 - DNA, 15 bp, Homo sapiens
aaaaactgctttggg

SEQ ID NO: 1180371 - DNA, 15 bp, Homo sapiens
aaaaaactgctttgg

SEQ ID NO: 1180372 - DNA, 15 bp, Homo sapiens
aaaaaaactgctttg

SEQ ID NO: 1180373 - DNA, 15 bp, Homo sapiens
taaaaaaactgcttt

SEQ ID NO: 1180374 - DNA, 15 bp, Homo sapiens
ctaaaaaaactgctt

SEQ ID NO: 1180375 - DNA, 15 bp, Homo sapiens
actaaaaaaactgct

SEQ ID NO: 1180376 - DNA, 15 bp, Homo sapiens
tactaaaaaaactgc

SEQ ID NO: 1180377 - DNA, 15 bp, Homo sapiens
gtactaaaaaaactg

SEQ ID NO: 1180378 - DNA, 15 bp, Homo sapiens
ggtactaaaaaaact

SEQ ID NO: 1180379 - DNA, 15 bp, Homo sapiens
tggtactaaaaaaac

SEQ ID NO: 1180380 - DNA, 15 bp, Homo sapiens
ctggtactaaaaaaa

SEQ ID NO: 1180381 - DNA, 15 bp, Homo sapiens
cctggtactaaaaaa

SEQ ID NO: 1180382 - DNA, 15 bp, Homo sapiens
tcctggtactaaaaa

SEQ ID NO: 1180383 - DNA, 15 bp, Homo sapiens
ctcctggtactaaaa

SEQ ID NO: 1180384 - DNA, 15 bp, Homo sapiens
tctcctggtactaaa

SEQ ID NO: 1180385 - DNA, 15 bp, Homo sapiens
ctctcctggtactaa

SEQ ID NO: 1180386 - DNA, 15 bp, Homo sapiens
tctctcctggtacta

SEQ ID NO: 1180387 - DNA, 15 bp, Homo sapiens
atctctcctggtact

SEQ ID NO: 1180388 - DNA, 15 bp, Homo sapiens
tatctctcctggtac

SEQ ID NO: 1180389 - DNA, 15 bp, Homo sapiens
ttatctctcctggta

SEQ ID NO: 1180390 - DNA, 15 bp, Homo sapiens
attatctctcctggt

SEQ ID NO: 1180391 - DNA, 15 bp, Homo sapiens
tattatctctcctgg

SEQ ID NO: 1180392 - DNA, 15 bp, Homo sapiens
gtattatctctcctg

SEQ ID NO: 1180393 - DNA, 15 bp, Homo sapiens
ggtattatctctcct

SEQ ID NO: 1180394 - DNA, 15 bp, Homo sapiens
aggtattatctctcc

SEQ ID NO: 1180395 - DNA, 15 bp, Homo sapiens
caggtattatctctc

SEQ ID NO: 1180396 - DNA, 15 bp, Homo sapiens
acaggtattatctct

SEQ ID NO: 1180397 - DNA, 15 bp, Homo sapiens
cacaggtattatctc

SEQ ID NO: 1180398 - DNA, 15 bp, Homo sapiens
ccacaggtattatct

SEQ ID NO: 1180399 - DNA, 15 bp, Homo sapiens
tccacaggtattatc

SEQ ID NO: 1180400 - DNA, 15 bp, Homo sapiens
ttccacaggtattat

SEQ ID NO: 1180401 - DNA, 15 bp, Homo sapiens
attccacaggtatta

SEQ ID NO: 1180402 - DNA, 15 bp, Homo sapiens
aattccacaggtatt

SEQ ID NO: 1180403 - DNA, 15 bp, Homo sapiens
caattccacaggtat

SEQ ID NO: 1180404 - DNA, 15 bp, Homo sapiens
gcaattccacaggta

SEQ ID NO: 1180405 - DNA, 15 bp, Homo sapiens
ggcaattccacaggt

SEQ ID NO: 1180406 - DNA, 15 bp, Homo sapiens
tggcaattccacagg

SEQ ID NO: 1180407 - DNA, 15 bp, Homo sapiens
gtggcaattccacag

SEQ ID NO: 1180408 - DNA, 15 bp, Homo sapiens
tgtggcaattccaca

SEQ ID NO: 1180409 - DNA, 15 bp, Homo sapiens
ttgtggcaattccac

SEQ ID NO: 1180410 - DNA, 15 bp, Homo sapiens
tttgtggcaattcca

SEQ ID NO: 1180411 - DNA, 15 bp, Homo sapiens
ttttgtggcaattcc

SEQ ID NO: 1180412 - DNA, 15 bp, Homo sapiens
attttgtggcaattc

SEQ ID NO: 1180413 - DNA, 15 bp, Homo sapiens
aattttgtggcaatt

SEQ ID NO: 1180414 - DNA, 15 bp, Homo sapiens
gaattttgtggcaat

SEQ ID NO: 1180415 - DNA, 15 bp, Homo sapiens
agaattttgtggcaa

SEQ ID NO: 1180416 - DNA, 15 bp, Homo sapiens
aagaattttgtggca

SEQ ID NO: 1180417 - DNA, 15 bp, Homo sapiens
taagaattttgtggc

SEQ ID NO: 1180418 - DNA, 15 bp, Homo sapiens
ctaagaattttgtgg

SEQ ID NO: 1180419 - DNA, 15 bp, Homo sapiens
tctaagaattttgtg

SEQ ID NO: 1180420 - DNA, 15 bp, Homo sapiens
ttctaagaattttgt

SEQ ID NO: 1180421 - DNA, 15 bp, Homo sapiens
tttctaagaattttg

SEQ ID NO: 1180422 - DNA, 15 bp, Homo sapiens
ttttctaagaatttt

SEQ ID NO: 1180423 - DNA, 15 bp, Homo sapiens
attttctaagaattt

SEQ ID NO: 1180424 - DNA, 15 bp, Homo sapiens
gattttctaagaatt

SEQ ID NO: 1180425 - DNA, 15 bp, Homo sapiens
tgattttctaagaat

SEQ ID NO: 1180426 - DNA, 15 bp, Homo sapiens
ctgattttctaagaa

SEQ ID NO: 1180427 - DNA, 15 bp, Homo sapiens
cctgattttctaaga

SEQ ID NO: 1180428 - DNA, 15 bp, Homo sapiens
tcctgattttctaag

SEQ ID NO: 1180429 - DNA, 15 bp, Homo sapiens
gtcctgattttctaa

SEQ ID NO: 1180430 - DNA, 15 bp, Homo sapiens
ggtcctgattttcta

SEQ ID NO: 1180431 - DNA, 15 bp, Homo sapiens
gggtcctgattttct

SEQ ID NO: 1180432 - DNA, 15 bp, Homo sapiens
cgggtcctgattttc

SEQ ID NO: 1180433 - DNA, 15 bp, Homo sapiens
gcgggtcctgatttt

SEQ ID NO: 1180434 - DNA, 15 bp, Homo sapiens
agcgggtcctgattt

SEQ ID NO: 1180435 - DNA, 15 bp, Homo sapiens
tagcgggtcctgatt

SEQ ID NO: 1180436 - DNA, 15 bp, Homo sapiens
gtagcgggtcctgat

SEQ ID NO: 1180437 - DNA, 15 bp, Homo sapiens
ggtagcgggtcctga

SEQ ID NO: 1180438 - DNA, 15 bp, Homo sapiens
tggtagcgggtcctg

SEQ ID NO: 1180439 - DNA, 15 bp, Homo sapiens
ctggtagcgggtcct

SEQ ID NO: 1180440 - DNA, 15 bp, Homo sapiens
actggtagcgggtcc

SEQ ID NO: 1180441 - DNA, 15 bp, Homo sapiens
aactggtagcgggtc

SEQ ID NO: 1180442 - DNA, 15 bp, Homo sapiens
aaactggtagcgggt

SEQ ID NO: 1180443 - DNA, 15 bp, Homo sapiens
gaaactggtagcggg

SEQ ID NO: 1180444 - DNA, 15 bp, Homo sapiens
ggaaactggtagcgg

SEQ ID NO: 1180445 - DNA, 15 bp, Homo sapiens
tggaaactggtagcg

SEQ ID NO: 1180446 - DNA, 15 bp, Homo sapiens
ctggaaactggtagc

SEQ ID NO: 1180447 - DNA, 15 bp, Homo sapiens
tctggaaactggtag

SEQ ID NO: 1180448 - DNA, 15 bp, Homo sapiens
ctctggaaactggta

SEQ ID NO: 1180449 - DNA, 15 bp, Homo sapiens
cctctggaaactggt

SEQ ID NO: 1180450 - DNA, 15 bp, Homo sapiens
acctctggaaactgg

SEQ ID NO: 1180451 - DNA, 15 bp, Homo sapiens
tacctctggaaactg

SEQ ID NO: 1180452 - DNA, 15 bp, Homo sapiens
ttacctctggaaact

SEQ ID NO: 1180453 - DNA, 15 bp, Homo sapiens
attacctctggaaac

SEQ ID NO: 1180454 - DNA, 15 bp, Homo sapiens
aattacctctggaaa

SEQ ID NO: 1180455 - DNA, 15 bp, Homo sapiens
aaattacctctggaa

SEQ ID NO: 1180456 - DNA, 15 bp, Homo sapiens
caaattacctctgga

SEQ ID NO: 1180457 - DNA, 15 bp, Homo sapiens
tcaaattacctctgg

SEQ ID NO: 1180458 - DNA, 15 bp, Homo sapiens
ctcaaattacctctg

SEQ ID NO: 1180459 - DNA, 15 bp, Homo sapiens
actcaaattacctct

SEQ ID NO: 1180460 - DNA, 15 bp, Homo sapiens
cactcaaattacctc

SEQ ID NO: 1180461 - DNA, 15 bp, Homo sapiens
tcactcaaattacct

SEQ ID NO: 1180462 - DNA, 15 bp, Homo sapiens
ttcactcaaattacc

SEQ ID NO: 1180463 - DNA, 15 bp, Homo sapiens
cttcactcaaattac

SEQ ID NO: 1180464 - DNA, 15 bp, Homo sapiens
acttcactcaaatta

SEQ ID NO: 1180465 - DNA, 15 bp, Homo sapiens
cacttcactcaaatt

SEQ ID NO: 1180466 - DNA, 15 bp, Homo sapiens
acacttcactcaaat

SEQ ID NO: 1180467 - DNA, 15 bp, Homo sapiens
aacacttcactcaaa

SEQ ID NO: 1180468 - DNA, 15 bp, Homo sapiens
caacacttcactcaa

SEQ ID NO: 1180469 - DNA, 15 bp, Homo sapiens
acaacacttcactca

SEQ ID NO: 1180470 - DNA, 15 bp, Homo sapiens
aacaacacttcactc

SEQ ID NO: 1180471 - DNA, 15 bp, Homo sapiens
taacaacacttcact

SEQ ID NO: 1180472 - DNA, 15 bp, Homo sapiens
ctaacaacacttcac

SEQ ID NO: 1180473 - DNA, 15 bp, Homo sapiens
tctaacaacacttca

SEQ ID NO: 1180474 - DNA, 15 bp, Homo sapiens
ttctaacaacacttc

SEQ ID NO: 1180475 - DNA, 15 bp, Homo sapiens
attctaacaacactt

SEQ ID NO: 1180476 - DNA, 15 bp, Homo sapiens
aattctaacaacact

SEQ ID NO: 1180477 - DNA, 15 bp, Homo sapiens
caattctaacaacac

SEQ ID NO: 1180478 - DNA, 15 bp, Homo sapiens
tcaattctaacaaca

SEQ ID NO: 1180479 - DNA, 15 bp, Homo sapiens
ctcaattctaacaac

SEQ ID NO: 1180480 - DNA, 15 bp, Homo sapiens
cctcaattctaacaa

SEQ ID NO: 1180481 - DNA, 15 bp, Homo sapiens
ccctcaattctaaca

SEQ ID NO: 1180482 - DNA, 15 bp, Homo sapiens
tccctcaattctaac

SEQ ID NO: 1180483 - DNA, 15 bp, Homo sapiens
ctccctcaattctaa

SEQ ID NO: 1180484 - DNA, 15 bp, Homo sapiens
cctccctcaattcta

SEQ ID NO: 1180485 - DNA, 15 bp, Homo sapiens
ccctccctcaattct

SEQ ID NO: 1180486 - DNA, 15 bp, Homo sapiens
gccctccctcaattc

SEQ ID NO: 1180487 - DNA, 15 bp, Homo sapiens
agccctccctcaatt

SEQ ID NO: 1180488 - DNA, 15 bp, Homo sapiens
tagccctccctcaat

SEQ ID NO: 1180489 - DNA, 15 bp, Homo sapiens
ctagccctccctcaa

SEQ ID NO: 1180490 - DNA, 15 bp, Homo sapiens
cctagccctccctca

SEQ ID NO: 1180491 - DNA, 15 bp, Homo sapiens
gcctagccctccctc

SEQ ID NO: 1180492 - DNA, 15 bp, Homo sapiens
agcctagccctccct

SEQ ID NO: 1180493 - DNA, 15 bp, Homo sapiens
tagcctagccctccc

SEQ ID NO: 1180494 - DNA, 15 bp, Homo sapiens
ctagcctagccctcc

SEQ ID NO: 1180495 - DNA, 15 bp, Homo sapiens
tctagcctagccctc

SEQ ID NO: 1180496 - DNA, 15 bp, Homo sapiens
ctctagcctagccct

SEQ ID NO: 1180497 - DNA, 15 bp, Homo sapiens
actctagcctagccc

SEQ ID NO: 1180498 - DNA, 15 bp, Homo sapiens
tactctagcctagcc

SEQ ID NO: 1180499 - DNA, 15 bp, Homo sapiens
gtactctagcctagc

SEQ ID NO: 1180500 - DNA, 15 bp, Homo sapiens
tgtactctagcctag

SEQ ID NO: 1180501 - DNA, 15 bp, Homo sapiens
atgtactctagccta

SEQ ID NO: 1180502 - DNA, 15 bp, Homo sapiens
gatgtactctagcct

SEQ ID NO: 1180503 - DNA, 15 bp, Homo sapiens
ggatgtactctagcc

SEQ ID NO: 1180504 - DNA, 15 bp, Homo sapiens
aggatgtactctagc

SEQ ID NO: 1180505 - DNA, 15 bp, Homo sapiens
caggatgtactctag

SEQ ID NO: 1180506 - DNA, 15 bp, Homo sapiens
tcaggatgtactcta

SEQ ID NO: 1180507 - DNA, 15 bp, Homo sapiens
ttcaggatgtactct

SEQ ID NO: 1180508 - DNA, 15 bp, Homo sapiens
cttcaggatgtactc

SEQ ID NO: 1180509 - DNA, 15 bp, Homo sapiens
acttcaggatgtact

SEQ ID NO: 1180510 - DNA, 15 bp, Homo sapiens
aacttcaggatgtac

SEQ ID NO: 1180511 - DNA, 15 bp, Homo sapiens
caacttcaggatgta

SEQ ID NO: 1180512 - DNA, 15 bp, Homo sapiens
tcaacttcaggatgt

SEQ ID NO: 1180513 - DNA, 15 bp, Homo sapiens
ttcaacttcaggatg

SEQ ID NO: 1180514 - DNA, 15 bp, Homo sapiens
tttcaacttcaggat

SEQ ID NO: 1180515 - DNA, 15 bp, Homo sapiens
ctttcaacttcagga

SEQ ID NO: 1180516 - DNA, 15 bp, Homo sapiens
actttcaacttcagg

SEQ ID NO: 1180517 - DNA, 15 bp, Homo sapiens
cactttcaacttcag

SEQ ID NO: 1180518 - DNA, 15 bp, Homo sapiens
ccactttcaacttca

SEQ ID NO: 1180519 - DNA, 15 bp, Homo sapiens
cccactttcaacttc

SEQ ID NO: 1180520 - DNA, 15 bp, Homo sapiens
acccactttcaactt

SEQ ID NO: 1180521 - DNA, 15 bp, Homo sapiens
aacccactttcaact

SEQ ID NO: 1180522 - DNA, 15 bp, Homo sapiens
taacccactttcaac

SEQ ID NO: 1180523 - DNA, 15 bp, Homo sapiens
ctaacccactttcaa

SEQ ID NO: 1180524 - DNA, 15 bp, Homo sapiens
gctaacccactttca

SEQ ID NO: 1180525 - DNA, 15 bp, Homo sapiens
ggctaacccactttc

SEQ ID NO: 1180526 - DNA, 15 bp, Homo sapiens
tggctaacccacttt

SEQ ID NO: 1180527 - DNA, 15 bp, Homo sapiens
ttggctaacccactt

SEQ ID NO: 1180528 - DNA, 15 bp, Homo sapiens
cttggctaacccact

SEQ ID NO: 1180529 - DNA, 15 bp, Homo sapiens
tcttggctaacccac

SEQ ID NO: 1180530 - DNA, 15 bp, Homo sapiens
atcttggctaaccca

SEQ ID NO: 1180531 - DNA, 15 bp, Homo sapiens
catcttggctaaccc

SEQ ID NO: 1180532 - DNA, 15 bp, Homo sapiens
gcatcttggctaacc

SEQ ID NO: 1180533 - DNA, 15 bp, Homo sapiens
tgcatcttggctaac

SEQ ID NO: 1180534 - DNA, 15 bp, Homo sapiens
atgcatcttggctaa

SEQ ID NO: 1180535 - DNA, 15 bp, Homo sapiens
aatgcatcttggcta

SEQ ID NO: 1180536 - DNA, 15 bp, Homo sapiens
gaatgcatcttggct

SEQ ID NO: 1180537 - DNA, 15 bp, Homo sapiens
tgaatgcatcttggc

SEQ ID NO: 1180538 - DNA, 15 bp, Homo sapiens
atgaatgcatcttgg

SEQ ID NO: 1180539 - DNA, 15 bp, Homo sapiens
catgaatgcatcttg

SEQ ID NO: 1180540 - DNA, 15 bp, Homo sapiens
gcatgaatgcatctt

SEQ ID NO: 1180541 - DNA, 15 bp, Homo sapiens
ggcatgaatgcatct

SEQ ID NO: 1180542 - DNA, 15 bp, Homo sapiens
gggcatgaatgcatc

SEQ ID NO: 1180543 - DNA, 15 bp, Homo sapiens
ggggcatgaatgcat

SEQ ID NO: 1180544 - DNA, 15 bp, Homo sapiens
aggggcatgaatgca

SEQ ID NO: 1180545 - DNA, 15 bp, Homo sapiens
aaggggcatgaatgc

SEQ ID NO: 1180546 - DNA, 15 bp, Homo sapiens
gaaggggcatgaatg

SEQ ID NO: 1180547 - DNA, 15 bp, Homo sapiens
ggaaggggcatgaat

SEQ ID NO: 1180548 - DNA, 15 bp, Homo sapiens
aggaaggggcatgaa

SEQ ID NO: 1180549 - DNA, 15 bp, Homo sapiens
aaggaaggggcatga

SEQ ID NO: 1180550 - DNA, 15 bp, Homo sapiens
aaaggaaggggcatg

SEQ ID NO: 1180551 - DNA, 15 bp, Homo sapiens
caaaggaaggggcat

SEQ ID NO: 1180552 - DNA, 15 bp, Homo sapiens
ccaaaggaaggggca

SEQ ID NO: 1180553 - DNA, 15 bp, Homo sapiens
tccaaaggaaggggc

SEQ ID NO: 1180554 - DNA, 15 bp, Homo sapiens
ttccaaaggaagggg

SEQ ID NO: 1180555 - DNA, 15 bp, Homo sapiens
gttccaaaggaaggg

SEQ ID NO: 1180556 - DNA, 15 bp, Homo sapiens
cgttccaaaggaagg

SEQ ID NO: 1180557 - DNA, 15 bp, Homo sapiens
acgttccaaaggaag

SEQ ID NO: 1180558 - DNA, 15 bp, Homo sapiens
cacgttccaaaggaa

SEQ ID NO: 1180559 - DNA, 15 bp, Homo sapiens
ccacgttccaaagga

SEQ ID NO: 1180560 - DNA, 15 bp, Homo sapiens
cccacgttccaaagg

SEQ ID NO: 1180561 - DNA, 15 bp, Homo sapiens
ccccacgttccaaag

SEQ ID NO: 1180562 - DNA, 15 bp, Homo sapiens
tccccacgttccaaa

SEQ ID NO: 1180563 - DNA, 15 bp, Homo sapiens
gtccccacgttccaa

SEQ ID NO: 1180564 - DNA, 15 bp, Homo sapiens
agtccccacgttcca

SEQ ID NO: 1180565 - DNA, 15 bp, Homo sapiens
cagtccccacgttcc

SEQ ID NO: 1180566 - DNA, 15 bp, Homo sapiens
acagtccccacgttc

SEQ ID NO: 1180567 - DNA, 15 bp, Homo sapiens
gacagtccccacgtt

SEQ ID NO: 1180568 - DNA, 15 bp, Homo sapiens
tgacagtccccacgt

SEQ ID NO: 1180569 - DNA, 15 bp, Homo sapiens
atgacagtccccacg

SEQ ID NO: 1180570 - DNA, 15 bp, Homo sapiens
aatgacagtccccac

SEQ ID NO: 1180571 - DNA, 15 bp, Homo sapiens
gaatgacagtcccca

SEQ ID NO: 1180572 - DNA, 15 bp, Homo sapiens
ggaatgacagtcccc

SEQ ID NO: 1180573 - DNA, 15 bp, Homo sapiens
aggaatgacagtccc

SEQ ID NO: 1180574 - DNA, 15 bp, Homo sapiens
aaggaatgacagtcc

SEQ ID NO: 1180575 - DNA, 15 bp, Homo sapiens
aaaggaatgacagtc

SEQ ID NO: 1180576 - DNA, 15 bp, Homo sapiens
aaaaggaatgacagt

SEQ ID NO: 1180577 - DNA, 15 bp, Homo sapiens
aaaaaggaatgacag

SEQ ID NO: 1180578 - DNA, 15 bp, Homo sapiens
caaaaaggaatgaca

SEQ ID NO: 1180579 - DNA, 15 bp, Homo sapiens
ccaaaaaggaatgac

SEQ ID NO: 1180580 - DNA, 15 bp, Homo sapiens
cccaaaaaggaatga

SEQ ID NO: 1180581 - DNA, 15 bp, Homo sapiens
acccaaaaaggaatg

SEQ ID NO: 1180582 - DNA, 15 bp, Homo sapiens
gacccaaaaaggaat

SEQ ID NO: 1180583 - DNA, 15 bp, Homo sapiens
tgacccaaaaaggaa

SEQ ID NO: 1180584 - DNA, 15 bp, Homo sapiens
atgacccaaaaagga

SEQ ID NO: 1180585 - DNA, 15 bp, Homo sapiens
catgacccaaaaagg

SEQ ID NO: 1180586 - DNA, 15 bp, Homo sapiens
acatgacccaaaaag

SEQ ID NO: 1180587 - DNA, 15 bp, Homo sapiens
tacatgacccaaaaa

SEQ ID NO: 1180588 - DNA, 15 bp, Homo sapiens
atacatgacccaaaa

SEQ ID NO: 1180589 - DNA, 15 bp, Homo sapiens
catacatgacccaaa

SEQ ID NO: 1180590 - DNA, 15 bp, Homo sapiens
tcatacatgacccaa

SEQ ID NO: 1180591 - DNA, 15 bp, Homo sapiens
atcatacatgaccca

SEQ ID NO: 1180592 - DNA, 15 bp, Homo sapiens
aatcatacatgaccc

SEQ ID NO: 1180593 - DNA, 15 bp, Homo sapiens
aaatcatacatgacc

SEQ ID NO: 1180594 - DNA, 15 bp, Homo sapiens
gaaatcatacatgac

SEQ ID NO: 1180595 - DNA, 15 bp, Homo sapiens
agaaatcatacatga

SEQ ID NO: 1180596 - DNA, 15 bp, Homo sapiens
cagaaatcatacatg

SEQ ID NO: 1180597 - DNA, 15 bp, Homo sapiens
acagaaatcatacat

SEQ ID NO: 1180598 - DNA, 15 bp, Homo sapiens
cacagaaatcataca

SEQ ID NO: 1180599 - DNA, 15 bp, Homo sapiens
ccacagaaatcatac

SEQ ID NO: 1180600 - DNA, 15 bp, Homo sapiens
tccacagaaatcata

SEQ ID NO: 1180601 - DNA, 15 bp, Homo sapiens
gtccacagaaatcat

SEQ ID NO: 1180602 - DNA, 15 bp, Homo sapiens
agtccacagaaatca

SEQ ID NO: 1180603 - DNA, 15 bp, Homo sapiens
cagtccacagaaatc

SEQ ID NO: 1180604 - DNA, 15 bp, Homo sapiens
ccagtccacagaaat

SEQ ID NO: 1180605 - DNA, 15 bp, Homo sapiens
tccagtccacagaaa

SEQ ID NO: 1180606 - DNA, 15 bp, Homo sapiens
ttccagtccacagaa

SEQ ID NO: 1180607 - DNA, 15 bp, Homo sapiens
attccagtccacaga

SEQ ID NO: 1180608 - DNA, 15 bp, Homo sapiens
aattccagtccacag

SEQ ID NO: 1180609 - DNA, 15 bp, Homo sapiens
taattccagtccaca

SEQ ID NO: 1180610 - DNA, 15 bp, Homo sapiens
gtaattccagtccac

SEQ ID NO: 1180611 - DNA, 15 bp, Homo sapiens
tgtaattccagtcca

SEQ ID NO: 1180612 - DNA, 15 bp, Homo sapiens
ttgtaattccagtcc

SEQ ID NO: 1180613 - DNA, 15 bp, Homo sapiens
cttgtaattccagtc

SEQ ID NO: 1180614 - DNA, 15 bp, Homo sapiens
ccttgtaattccagt

SEQ ID NO: 1180615 - DNA, 15 bp, Homo sapiens
cccttgtaattccag

SEQ ID NO: 1180616 - DNA, 15 bp, Homo sapiens
gcccttgtaattcca

SEQ ID NO: 1180617 - DNA, 15 bp, Homo sapiens
tgcccttgtaattcc

SEQ ID NO: 1180618 - DNA, 15 bp, Homo sapiens
tttgcccttgtaatt

SEQ ID NO: 1180619 - DNA, 15 bp, Homo sapiens
atttgcccttgtaat

SEQ ID NO: 1180620 - DNA, 15 bp, Homo sapiens
catttgcccttgtaa

SEQ ID NO: 1180621 - DNA, 15 bp, Homo sapiens
acatttgcccttgta

SEQ ID NO: 1180622 - DNA, 15 bp, Homo sapiens
tacatttgcccttgt

SEQ ID NO: 1180623 - DNA, 15 bp, Homo sapiens
ctacatttgcccttg

SEQ ID NO: 1180624 - DNA, 15 bp, Homo sapiens
cctacatttgccctt

SEQ ID NO: 1180625 - DNA, 15 bp, Homo sapiens
tcctacatttgccct

SEQ ID NO: 1180626 - DNA, 15 bp, Homo sapiens
ttcctacatttgccc

SEQ ID NO: 1180627 - DNA, 15 bp, Homo sapiens
attcctacatttgcc

SEQ ID NO: 1180628 - DNA, 15 bp, Homo sapiens
aattcctacatttgc

SEQ ID NO: 1180629 - DNA, 15 bp, Homo sapiens
caattcctacatttg

SEQ ID NO: 1180630 - DNA, 15 bp, Homo sapiens
gcaattcctacattt

SEQ ID NO: 1180631 - DNA, 15 bp, Homo sapiens
agcaattcctacatt

SEQ ID NO: 1180632 - DNA, 15 bp, Homo sapiens
cagcaattcctacat

SEQ ID NO: 1180633 - DNA, 15 bp, Homo sapiens
acagcaattcctaca

SEQ ID NO: 1180634 - DNA, 15 bp, Homo sapiens
tacagcaattcctac

SEQ ID NO: 1180635 - DNA, 15 bp, Homo sapiens
ttacagcaattccta

SEQ ID NO: 1180636 - DNA, 15 bp, Homo sapiens
attacagcaattcct

SEQ ID NO: 1180637 - DNA, 15 bp, Homo sapiens
tattacagcaattcc

SEQ ID NO: 1180638 - DNA, 15 bp, Homo sapiens
atattacagcaattc

SEQ ID NO: 1180639 - DNA, 15 bp, Homo sapiens
aatattacagcaatt

SEQ ID NO: 1180640 - DNA, 15 bp, Homo sapiens
caatattacagcaat

SEQ ID NO: 1180641 - DNA, 15 bp, Homo sapiens
ccaatattacagcaa

SEQ ID NO: 1180642 - DNA, 15 bp, Homo sapiens
accaatattacagca

SEQ ID NO: 1180643 - DNA, 15 bp, Homo sapiens
gaccaatattacagc

SEQ ID NO: 1180644 - DNA, 15 bp, Homo sapiens
tgaccaatattacag

SEQ ID NO: 1180645 - DNA, 15 bp, Homo sapiens
ctgaccaatattaca

SEQ ID NO: 1180646 - DNA, 15 bp, Homo sapiens
actgaccaatattac

SEQ ID NO: 1180647 - DNA, 15 bp, Homo sapiens
tactgaccaatatta

SEQ ID NO: 1180648 - DNA, 15 bp, Homo sapiens
gtactgaccaatatt

SEQ ID NO: 1180649 - DNA, 15 bp, Homo sapiens
agtactgaccaatat

SEQ ID NO: 1180650 - DNA, 15 bp, Homo sapiens
aagtactgaccaata

SEQ ID NO: 1180651 - DNA, 15 bp, Homo sapiens
aaagtactgaccaat

SEQ ID NO: 1180652 - DNA, 15 bp, Homo sapiens
aaaagtactgaccaa

SEQ ID NO: 1180653 - DNA, 15 bp, Homo sapiens
gaaaagtactgacca

SEQ ID NO: 1180654 - DNA, 15 bp, Homo sapiens
tgaaaagtactgacc

SEQ ID NO: 1180655 - DNA, 15 bp, Homo sapiens
gtgaaaagtactgac

SEQ ID NO: 1180656 - DNA, 15 bp, Homo sapiens
tgtgaaaagtactga

SEQ ID NO: 1180657 - DNA, 15 bp, Homo sapiens
atgtgaaaagtactg

SEQ ID NO: 1180658 - DNA, 15 bp, Homo sapiens
aatgtgaaaagtact

SEQ ID NO: 1180659 - DNA, 15 bp, Homo sapiens
gaatgtgaaaagtac

SEQ ID NO: 1180660 - DNA, 15 bp, Homo sapiens
ggaatgtgaaaagta

SEQ ID NO: 1180661 - DNA, 15 bp, Homo sapiens
cggaatgtgaaaagt

SEQ ID NO: 1180662 - DNA, 15 bp, Homo sapiens
gcggaatgtgaaaag

SEQ ID NO: 1180663 - DNA, 15 bp, Homo sapiens
ggcggaatgtgaaaa

SEQ ID NO: 1180664 - DNA, 15 bp, Homo sapiens
tggcggaatgtgaaa

SEQ ID NO: 1180665 - DNA, 15 bp, Homo sapiens
atggcggaatgtgaa

SEQ ID NO: 1180666 - DNA, 15 bp, Homo sapiens
gatggcggaatgtga

SEQ ID NO: 1180667 - DNA, 15 bp, Homo sapiens
ggatggcggaatgtg

SEQ ID NO: 1180668 - DNA, 15 bp, Homo sapiens
gggatggcggaatgt

SEQ ID NO: 1180669 - DNA, 15 bp, Homo sapiens
tgggatggcggaatg

SEQ ID NO: 1180670 - DNA, 15 bp, Homo sapiens
atgggatggcggaat

SEQ ID NO: 1180671 - DNA, 15 bp, Homo sapiens
catgggatggcggaa

SEQ ID NO: 1180672 - DNA, 15 bp, Homo sapiens
tcatgggatggcgga

SEQ ID NO: 1180673 - DNA, 15 bp, Homo sapiens
ctcatgggatggcgg

SEQ ID NO: 1180674 - DNA, 15 bp, Homo sapiens
actcatgggatggcg

SEQ ID NO: 1180675 - DNA, 15 bp, Homo sapiens
tactcatgggatggc

SEQ ID NO: 1180676 - DNA, 15 bp, Homo sapiens
ctactcatgggatgg

SEQ ID NO: 1180677 - DNA, 15 bp, Homo sapiens
cctactcatgggatg

SEQ ID NO: 1180678 - DNA, 15 bp, Homo sapiens
ccctactcatgggat

SEQ ID NO: 1180679 - DNA, 15 bp, Homo sapiens
tccctactcatggga

SEQ ID NO: 1180680 - DNA, 15 bp, Homo sapiens
atccctactcatggg

SEQ ID NO: 1180681 - DNA, 15 bp, Homo sapiens
tatccctactcatgg

SEQ ID NO: 1180682 - DNA, 15 bp, Homo sapiens
ttatccctactcatg

SEQ ID NO: 1180683 - DNA, 15 bp, Homo sapiens
cttatccctactcat

SEQ ID NO: 1180684 - DNA, 15 bp, Homo sapiens
tcttatccctactca

SEQ ID NO: 1180685 - DNA, 15 bp, Homo sapiens
ctcttatccctactc

SEQ ID NO: 1180686 - DNA, 15 bp, Homo sapiens
cctcttatccctact

SEQ ID NO: 1180687 - DNA, 15 bp, Homo sapiens
acctcttatccctac

SEQ ID NO: 1180688 - DNA, 15 bp, Homo sapiens
aacctcttatcccta

SEQ ID NO: 1180689 - DNA, 15 bp, Homo sapiens
taacctcttatccct

SEQ ID NO: 1180690 - DNA, 15 bp, Homo sapiens
ttaacctcttatccc

SEQ ID NO: 1180691 - DNA, 15 bp, Homo sapiens
attaacctcttatcc

SEQ ID NO: 1180692 - DNA, 15 bp, Homo sapiens
aattaacctcttatc

SEQ ID NO: 1180693 - DNA, 15 bp, Homo sapiens
taattaacctcttat

SEQ ID NO: 1180694 - DNA, 15 bp, Homo sapiens
ttaattaacctctta

SEQ ID NO: 1180695 - DNA, 15 bp, Homo sapiens
tttaattaacctctt

SEQ ID NO: 1180696 - DNA, 15 bp, Homo sapiens
atttaattaacctct

SEQ ID NO: 1180697 - DNA, 15 bp, Homo sapiens
tatttaattaacctc

SEQ ID NO: 1180698 - DNA, 15 bp, Homo sapiens
gtatttaattaacct

SEQ ID NO: 1180699 - DNA, 15 bp, Homo sapiens
tgtatttaattaacc

SEQ ID NO: 1180700 - DNA, 15 bp, Homo sapiens
atgtatttaattaac

SEQ ID NO: 1180701 - DNA, 15 bp, Homo sapiens
gatgtatttaattaa

SEQ ID NO: 1180702 - DNA, 15 bp, Homo sapiens
agatgtatttaatta

SEQ ID NO: 1180703 - DNA, 15 bp, Homo sapiens
gagatgtatttaatt

SEQ ID NO: 1180704 - DNA, 15 bp, Homo sapiens
agagatgtatttaat

SEQ ID NO: 1180705 - DNA, 15 bp, Homo sapiens
gagagatgtatttaa

SEQ ID NO: 1180706 - DNA, 15 bp, Homo sapiens
cgagagatgtattta

SEQ ID NO: 1180707 - DNA, 15 bp, Homo sapiens
ccgagagatgtattt

SEQ ID NO: 1180708 - DNA, 15 bp, Homo sapiens
cccgagagatgtatt

SEQ ID NO: 1180709 - DNA, 15 bp, Homo sapiens
gcccgagagatgtat

SEQ ID NO: 1180710 - DNA, 15 bp, Homo sapiens
tgcccgagagatgta

SEQ ID NO: 1180711 - DNA, 15 bp, Homo sapiens
ctgcccgagagatgt

SEQ ID NO: 1180712 - DNA, 15 bp, Homo sapiens
gctgcccgagagatg

SEQ ID NO: 1180713 - DNA, 15 bp, Homo sapiens
tgctgcccgagagat

SEQ ID NO: 1180714 - DNA, 15 bp, Homo sapiens
ctgctgcccgagaga

SEQ ID NO: 1180715 - DNA, 15 bp, Homo sapiens
tctgctgcccgagag

SEQ ID NO: 1180716 - DNA, 15 bp, Homo sapiens
ttctgctgcccgaga

SEQ ID NO: 1180717 - DNA, 15 bp, Homo sapiens
tttctgctgcccgag

SEQ ID NO: 1180718 - DNA, 15 bp, Homo sapiens
atttctgctgcccga

SEQ ID NO: 1180719 - DNA, 15 bp, Homo sapiens
catttctgctgcccg

SEQ ID NO: 1180720 - DNA, 15 bp, Homo sapiens
tcatttctgctgccc

SEQ ID NO: 1180721 - DNA, 15 bp, Homo sapiens
atcatttctgctgcc

SEQ ID NO: 1180722 - DNA, 15 bp, Homo sapiens
gatcatttctgctgc

SEQ ID NO: 1180723 - DNA, 15 bp, Homo sapiens
tgatcatttctgctg

SEQ ID NO: 1180724 - DNA, 15 bp, Homo sapiens
ttgatcatttctgct

SEQ ID NO: 1180725 - DNA, 15 bp, Homo sapiens
cttgatcatttctgc

SEQ ID NO: 1180726 - DNA, 15 bp, Homo sapiens
ccttgatcatttctg

SEQ ID NO: 1180727 - DNA, 15 bp, Homo sapiens
gccttgatcatttct

SEQ ID NO: 1180728 - DNA, 15 bp, Homo sapiens
agccttgatcatttc

SEQ ID NO: 1180729 - DNA, 15 bp, Homo sapiens
cagccttgatcattt

SEQ ID NO: 1180730 - DNA, 15 bp, Homo sapiens
acagccttgatcatt

SEQ ID NO: 1180731 - DNA, 15 bp, Homo sapiens
gacagccttgatcat

SEQ ID NO: 1180732 - DNA, 15 bp, Homo sapiens
ggacagccttgatca

SEQ ID NO: 1180733 - DNA, 15 bp, Homo sapiens
gggacagccttgatc

SEQ ID NO: 1180734 - DNA, 15 bp, Homo sapiens
agggacagccttgat

SEQ ID NO: 1180735 - DNA, 15 bp, Homo sapiens
cagggacagccttga

SEQ ID NO: 1180736 - DNA, 15 bp, Homo sapiens
ccagggacagccttg

SEQ ID NO: 1180737 - DNA, 15 bp, Homo sapiens
tccagggacagcctt

SEQ ID NO: 1180738 - DNA, 15 bp, Homo sapiens
ttccagggacagcct

SEQ ID NO: 1180739 - DNA, 15 bp, Homo sapiens
gttccagggacagcc

SEQ ID NO: 1180740 - DNA, 15 bp, Homo sapiens
tgttccagggacagc

SEQ ID NO: 1180741 - DNA, 15 bp, Homo sapiens
gtgttccagggacag

SEQ ID NO: 1180742 - DNA, 15 bp, Homo sapiens
tgtgttccagggaca

SEQ ID NO: 1180743 - DNA, 15 bp, Homo sapiens
ctgtgttccagggac

SEQ ID NO: 1180744 - DNA, 15 bp, Homo sapiens
actgtgttccaggga

SEQ ID NO: 1180745 - DNA, 15 bp, Homo sapiens
aactgtgttccaggg

SEQ ID NO: 1180746 - DNA, 15 bp, Homo sapiens
caactgtgttccagg

SEQ ID NO: 1180747 - DNA, 15 bp, Homo sapiens
gcaactgtgttccag

SEQ ID NO: 1180748 - DNA, 15 bp, Homo sapiens
agcaactgtgttcca

SEQ ID NO: 1180749 - DNA, 15 bp, Homo sapiens
aagcaactgtgttcc

SEQ ID NO: 1180750 - DNA, 15 bp, Homo sapiens
gaagcaactgtgttc

SEQ ID NO: 1180751 - DNA, 15 bp, Homo sapiens
tgaagcaactgtgtt

SEQ ID NO: 1180752 - DNA, 15 bp, Homo sapiens
ttgaagcaactgtgt

SEQ ID NO: 1180753 - DNA, 15 bp, Homo sapiens
tttgaagcaactgtg

SEQ ID NO: 1180754 - DNA, 15 bp, Homo sapiens
ttttgaagcaactgt

SEQ ID NO: 1180755 - DNA, 15 bp, Homo sapiens
tttttgaagcaactg

SEQ ID NO: 1180756 - DNA, 15 bp, Homo sapiens
ctttttgaagcaact

SEQ ID NO: 1180757 - DNA, 15 bp, Homo sapiens
actttttgaagcaac

SEQ ID NO: 1180758 - DNA, 15 bp, Homo sapiens
tactttttgaagcaa

SEQ ID NO: 1180759 - DNA, 15 bp, Homo sapiens
ctactttttgaagca

SEQ ID NO: 1180760 - DNA, 15 bp, Homo sapiens
cctactttttgaagc

SEQ ID NO: 1180761 - DNA, 15 bp, Homo sapiens
gcctactttttgaag

SEQ ID NO: 1180762 - DNA, 15 bp, Homo sapiens
agcctactttttgaa

SEQ ID NO: 1180763 - DNA, 15 bp, Homo sapiens
aagcctactttttga

SEQ ID NO: 1180764 - DNA, 15 bp, Homo sapiens
aaagcctactttttg

SEQ ID NO: 1180765 - DNA, 15 bp, Homo sapiens
aaaagcctacttttt

SEQ ID NO: 1180766 - DNA, 15 bp, Homo sapiens
caaaagcctactttt

SEQ ID NO: 1180767 - DNA, 15 bp, Homo sapiens
acaaaagcctacttt

SEQ ID NO: 1180768 - DNA, 15 bp, Homo sapiens
aacaaaagcctactt

SEQ ID NO: 1180769 - DNA, 15 bp, Homo sapiens
aaacaaaagcctact

SEQ ID NO: 1180770 - DNA, 15 bp, Homo sapiens
gaaacaaaagcctac

SEQ ID NO: 1180771 - DNA, 15 bp, Homo sapiens
tgaaacaaaagccta

SEQ ID NO: 1180772 - DNA, 15 bp, Homo sapiens
ctgaaacaaaagcct

SEQ ID NO: 1180773 - DNA, 15 bp, Homo sapiens
cctgaaacaaaagcc

SEQ ID NO: 1180774 - DNA, 15 bp, Homo sapiens
ccctgaaacaaaagc

SEQ ID NO: 1180775 - DNA, 15 bp, Homo sapiens
tccctgaaacaaaag

SEQ ID NO: 1180776 - DNA, 15 bp, Homo sapiens
ttccctgaaacaaaa

SEQ ID NO: 1180777 - DNA, 15 bp, Homo sapiens
cttccctgaaacaaa

SEQ ID NO: 1180778 - DNA, 15 bp, Homo sapiens
tcttccctgaaacaa

SEQ ID NO: 1180779 - DNA, 15 bp, Homo sapiens
atcttccctgaaaca

SEQ ID NO: 1180780 - DNA, 15 bp, Homo sapiens
gatcttccctgaaac

SEQ ID NO: 1180781 - DNA, 15 bp, Homo sapiens
agatcttccctgaaa

SEQ ID NO: 1180782 - DNA, 15 bp, Homo sapiens
gagatcttccctgaa

SEQ ID NO: 1180783 - DNA, 15 bp, Homo sapiens
ggagatcttccctga

SEQ ID NO: 1180784 - DNA, 15 bp, Homo sapiens
gggagatcttccctg

SEQ ID NO: 1180785 - DNA, 15 bp, Homo sapiens
tgggagatcttccct

SEQ ID NO: 1180786 - DNA, 15 bp, Homo sapiens
gtgggagatcttccc

SEQ ID NO: 1180787 - DNA, 15 bp, Homo sapiens
tgtgggagatcttcc

SEQ ID NO: 1180788 - DNA, 15 bp, Homo sapiens
ctgtgggagatcttc

SEQ ID NO: 1180789 - DNA, 15 bp, Homo sapiens
tctgtgggagatctt

SEQ ID NO: 1180790 - DNA, 15 bp, Homo sapiens
ctctgtgggagatct

SEQ ID NO: 1180791 - DNA, 15 bp, Homo sapiens
tctctgtgggagatc

SEQ ID NO: 1180792 - DNA, 15 bp, Homo sapiens
ttctctgtgggagat

SEQ ID NO: 1180793 - DNA, 15 bp, Homo sapiens
cttctctgtgggaga

SEQ ID NO: 1180794 - DNA, 15 bp, Homo sapiens
gcttctctgtgggag

SEQ ID NO: 1180795 - DNA, 15 bp, Homo sapiens
tgcttctctgtggga

SEQ ID NO: 1180796 - DNA, 15 bp, Homo sapiens
atgcttctctgtggg

SEQ ID NO: 1180797 - DNA, 15 bp, Homo sapiens
catgcttctctgtgg

SEQ ID NO: 1180798 - DNA, 15 bp, Homo sapiens
ccatgcttctctgtg

SEQ ID NO: 1180799 - DNA, 15 bp, Homo sapiens
tccatgcttctctgt

SEQ ID NO: 1180800 - DNA, 15 bp, Homo sapiens
ttccatgcttctctg

SEQ ID NO: 1180801 - DNA, 15 bp, Homo sapiens
gttccatgcttctct

SEQ ID NO: 1180802 - DNA, 15 bp, Homo sapiens
cgttccatgcttctc

SEQ ID NO: 1180803 - DNA, 15 bp, Homo sapiens
gcgttccatgcttct

SEQ ID NO: 1180804 - DNA, 15 bp, Homo sapiens
ggcgttccatgcttc

SEQ ID NO: 1180805 - DNA, 15 bp, Homo sapiens
tggcgttccatgctt

SEQ ID NO: 1180806 - DNA, 15 bp, Homo sapiens
ttggcgttccatgct

SEQ ID NO: 1180807 - DNA, 15 bp, Homo sapiens
tttggcgttccatgc

SEQ ID NO: 1180808 - DNA, 15 bp, Homo sapiens
ctttggcgttccatg

SEQ ID NO: 1180809 - DNA, 15 bp, Homo sapiens
tctttggcgttccat

SEQ ID NO: 1180810 - DNA, 15 bp, Homo sapiens
ctctttggcgttcca

SEQ ID NO: 1180811 - DNA, 15 bp, Homo sapiens
tctctttggcgttcc

SEQ ID NO: 1180812 - DNA, 15 bp, Homo sapiens
ttctctttggcgttc

SEQ ID NO: 1180813 - DNA, 15 bp, Homo sapiens
gttctctttggcgtt

SEQ ID NO: 1180814 - DNA, 15 bp, Homo sapiens
agttctctttggcgt

SEQ ID NO: 1180815 - DNA, 15 bp, Homo sapiens
tagttctctttggcg

SEQ ID NO: 1180816 - DNA, 15 bp, Homo sapiens
atagttctctttggc

SEQ ID NO: 1180817 - DNA, 15 bp, Homo sapiens
tatagttctctttgg

SEQ ID NO: 1180818 - DNA, 15 bp, Homo sapiens
ttatagttctctttg

SEQ ID NO: 1180819 - DNA, 15 bp, Homo sapiens
tttatagttctcttt

SEQ ID NO: 1180820 - DNA, 15 bp, Homo sapiens
atttatagttctctt

SEQ ID NO: 1180821 - DNA, 15 bp, Homo sapiens
tatttatagttctct

SEQ ID NO: 1180822 - DNA, 15 bp, Homo sapiens
ctatttatagttctc

SEQ ID NO: 1180823 - DNA, 15 bp, Homo sapiens
cctatttatagttct

SEQ ID NO: 1180824 - DNA, 15 bp, Homo sapiens
tcctatttatagttc

SEQ ID NO: 1180825 - DNA, 15 bp, Homo sapiens
gtcctatttatagtt

SEQ ID NO: 1180826 - DNA, 15 bp, Homo sapiens
agtcctatttatagt

SEQ ID NO: 1180827 - DNA, 15 bp, Homo sapiens
tagtcctatttatag

SEQ ID NO: 1180828 - DNA, 15 bp, Homo sapiens
atagtcctatttata

SEQ ID NO: 1180829 - DNA, 15 bp, Homo sapiens
gatagtcctatttat

SEQ ID NO: 1180830 - DNA, 15 bp, Homo sapiens
tgatagtcctattta

SEQ ID NO: 1180831 - DNA, 15 bp, Homo sapiens
atgatagtcctattt

SEQ ID NO: 1180832 - DNA, 15 bp, Homo sapiens
aatgatagtcctatt

SEQ ID NO: 1180833 - DNA, 15 bp, Homo sapiens
aaatgatagtcctat

SEQ ID NO: 1180834 - DNA, 15 bp, Homo sapiens
taaatgatagtccta

SEQ ID NO: 1180835 - DNA, 15 bp, Homo sapiens
ataaatgatagtcct

SEQ ID NO: 1180836 - DNA, 15 bp, Homo sapiens
cataaatgatagtcc

SEQ ID NO: 1180837 - DNA, 15 bp, Homo sapiens
acataaatgatagtc

SEQ ID NO: 1180838 - DNA, 15 bp, Homo sapiens
gacataaatgatagt

SEQ ID NO: 1180839 - DNA, 15 bp, Homo sapiens
tgacataaatgatag

SEQ ID NO: 1180840 - DNA, 15 bp, Homo sapiens
ttgacataaatgata

SEQ ID NO: 1180841 - DNA, 15 bp, Homo sapiens
attgacataaatgat

SEQ ID NO: 1180842 - DNA, 15 bp, Homo sapiens
aattgacataaatga

SEQ ID NO: 1180843 - DNA, 15 bp, Homo sapiens
taattgacataaatg

SEQ ID NO: 1180844 - DNA, 15 bp, Homo sapiens
ataattgacataaat

SEQ ID NO: 1180845 - DNA, 15 bp, Homo sapiens
tataattgacataaa

SEQ ID NO: 1180846 - DNA, 15 bp, Homo sapiens
ttataattgacataa

SEQ ID NO: 1180847 - DNA, 15 bp, Homo sapiens
tttataattgacata

SEQ ID NO: 1180848 - DNA, 15 bp, Homo sapiens
atttataattgacat

SEQ ID NO: 1180849 - DNA, 15 bp, Homo sapiens
tatttataattgaca

SEQ ID NO: 1180850 - DNA, 15 bp, Homo sapiens
ctatttataattgac

SEQ ID NO: 1180851 - DNA, 15 bp, Homo sapiens
tctatttataattga

SEQ ID NO: 1180852 - DNA, 15 bp, Homo sapiens
atctatttataattg

SEQ ID NO: 1180853 - DNA, 15 bp, Homo sapiens
aatctatttataatt

SEQ ID NO: 1180854 - DNA, 15 bp, Homo sapiens
aaatctatttataat

SEQ ID NO: 1180855 - DNA, 15 bp, Homo sapiens
caaatctatttataa

SEQ ID NO: 1180856 - DNA, 15 bp, Homo sapiens
acaaatctatttata

SEQ ID NO: 1180857 - DNA, 15 bp, Homo sapiens
aacaaatctatttat

SEQ ID NO: 1180858 - DNA, 15 bp, Homo sapiens
gaacaaatctattta

SEQ ID NO: 1180859 - DNA, 15 bp, Homo sapiens
ggaacaaatctattt

SEQ ID NO: 1180860 - DNA, 15 bp, Homo sapiens
gggaacaaatctatt

SEQ ID NO: 1180861 - DNA, 15 bp, Homo sapiens
agggaacaaatctat

SEQ ID NO: 1180862 - DNA, 15 bp, Homo sapiens
aagggaacaaatcta

SEQ ID NO: 1180863 - DNA, 15 bp, Homo sapiens
aaagggaacaaatct

SEQ ID NO: 1180864 - DNA, 15 bp, Homo sapiens
aaaagggaacaaatc

SEQ ID NO: 1180865 - DNA, 15 bp, Homo sapiens
caaaagggaacaaat

SEQ ID NO: 1180866 - DNA, 15 bp, Homo sapiens
tcaaaagggaacaaa

SEQ ID NO: 1180867 - DNA, 15 bp, Homo sapiens
atcaaaagggaacaa

SEQ ID NO: 1180868 - DNA, 15 bp, Homo sapiens
aatcaaaagggaaca

SEQ ID NO: 1180869 - DNA, 15 bp, Homo sapiens
taatcaaaagggaac

SEQ ID NO: 1180870 - DNA, 15 bp, Homo sapiens
ctaatcaaaagggaa

SEQ ID NO: 1180871 - DNA, 15 bp, Homo sapiens
tctaatcaaaaggga

SEQ ID NO: 1180872 - DNA, 15 bp, Homo sapiens
ttctaatcaaaaggg

SEQ ID NO: 1180873 - DNA, 15 bp, Homo sapiens
cttctaatcaaaagg

SEQ ID NO: 1180874 - DNA, 15 bp, Homo sapiens
tcttctaatcaaaag

SEQ ID NO: 1180875 - DNA, 15 bp, Homo sapiens
atcttctaatcaaaa

SEQ ID NO: 1180876 - DNA, 15 bp, Homo sapiens
aatcttctaatcaaa

SEQ ID NO: 1180877 - DNA, 15 bp, Homo sapiens
taatcttctaatcaa

SEQ ID NO: 1180878 - DNA, 15 bp, Homo sapiens
ttaatcttctaatca

SEQ ID NO: 1180879 - DNA, 15 bp, Homo sapiens
attaatcttctaatc

SEQ ID NO: 1180880 - DNA, 15 bp, Homo sapiens
cattaatcttctaat

SEQ ID NO: 1180881 - DNA, 15 bp, Homo sapiens
gcattaatcttctaa

SEQ ID NO: 1180882 - DNA, 15 bp, Homo sapiens
agcattaatcttcta

SEQ ID NO: 1180883 - DNA, 15 bp, Homo sapiens
tagcattaatcttct

SEQ ID NO: 1180884 - DNA, 15 bp, Homo sapiens
ctagcattaatcttc

SEQ ID NO: 1180885 - DNA, 15 bp, Homo sapiens
gctagcattaatctt

SEQ ID NO: 1180886 - DNA, 15 bp, Homo sapiens
agctagcattaatct

SEQ ID NO: 1180887 - DNA, 15 bp, Homo sapiens
cagctagcattaatc

SEQ ID NO: 1180888 - DNA, 15 bp, Homo sapiens
tcagctagcattaat

SEQ ID NO: 1180889 - DNA, 15 bp, Homo sapiens
ttcagctagcattaa

SEQ ID NO: 1180890 - DNA, 15 bp, Homo sapiens
tttcagctagcatta

SEQ ID NO: 1180891 - DNA, 15 bp, Homo sapiens
gtttcagctagcatt

SEQ ID NO: 1180892 - DNA, 15 bp, Homo sapiens
agtttcagctagcat

SEQ ID NO: 1180893 - DNA, 15 bp, Homo sapiens
gagtttcagctagca

SEQ ID NO: 1180894 - DNA, 15 bp, Homo sapiens
agagtttcagctagc

SEQ ID NO: 1180895 - DNA, 15 bp, Homo sapiens
cagagtttcagctag

SEQ ID NO: 1180896 - DNA, 15 bp, Homo sapiens
acagagtttcagcta

SEQ ID NO: 1180897 - DNA, 15 bp, Homo sapiens
tacagagtttcagct

SEQ ID NO: 1180898 - DNA, 15 bp, Homo sapiens
ctacagagtttcagc

SEQ ID NO: 1180899 - DNA, 15 bp, Homo sapiens
actacagagtttcag

SEQ ID NO: 1180900 - DNA, 15 bp, Homo sapiens
aactacagagtttca

SEQ ID NO: 1180901 - DNA, 15 bp, Homo sapiens
caactacagagtttc

SEQ ID NO: 1180902 - DNA, 15 bp, Homo sapiens
tcaactacagagttt

SEQ ID NO: 1180903 - DNA, 15 bp, Homo sapiens
ctcaactacagagtt

SEQ ID NO: 1180904 - DNA, 15 bp, Homo sapiens
gctcaactacagagt

SEQ ID NO: 1180905 - DNA, 15 bp, Homo sapiens
tgctcaactacagag

SEQ ID NO: 1180906 - DNA, 15 bp, Homo sapiens
ctgctcaactacaga

SEQ ID NO: 1180907 - DNA, 15 bp, Homo sapiens
tctgctcaactacag

SEQ ID NO: 1180908 - DNA, 15 bp, Homo sapiens
ttctgctcaactaca

SEQ ID NO: 1180909 - DNA, 15 bp, Homo sapiens
tttctgctcaactac

SEQ ID NO: 1180910 - DNA, 15 bp, Homo sapiens
atttctgctcaacta

SEQ ID NO: 1180911 - DNA, 15 bp, Homo sapiens
catttctgctcaact

SEQ ID NO: 1180912 - DNA, 15 bp, Homo sapiens
tcatttctgctcaac

SEQ ID NO: 1180913 - DNA, 15 bp, Homo sapiens
ctcatttctgctcaa

SEQ ID NO: 1180914 - DNA, 15 bp, Homo sapiens
cctcatttctgctca

SEQ ID NO: 1180915 - DNA, 15 bp, Homo sapiens
ccctcatttctgctc

SEQ ID NO: 1180916 - DNA, 15 bp, Homo sapiens
tccctcatttctgct

SEQ ID NO: 1180917 - DNA, 15 bp, Homo sapiens
ttccctcatttctgc

SEQ ID NO: 1180918 - DNA, 15 bp, Homo sapiens
tttccctcatttctg

SEQ ID NO: 1180919 - DNA, 15 bp, Homo sapiens
ttttccctcatttct

SEQ ID NO: 1180920 - DNA, 15 bp, Homo sapiens
tttttccctcatttc

SEQ ID NO: 1180921 - DNA, 15 bp, Homo sapiens
gtttttccctcattt

SEQ ID NO: 1180922 - DNA, 15 bp, Homo sapiens
agtttttccctcatt

SEQ ID NO: 1180923 - DNA, 15 bp, Homo sapiens
aagtttttccctcat

SEQ ID NO: 1180924 - DNA, 15 bp, Homo sapiens
gaagtttttccctca

SEQ ID NO: 1180925 - DNA, 15 bp, Homo sapiens
agaagtttttccctc

SEQ ID NO: 1180926 - DNA, 15 bp, Homo sapiens
cagaagtttttccct

SEQ ID NO: 1180927 - DNA, 15 bp, Homo sapiens
tcagaagtttttccc

SEQ ID NO: 1180928 - DNA, 15 bp, Homo sapiens
gtcagaagtttttcc

SEQ ID NO: 1180929 - DNA, 15 bp, Homo sapiens
tgtcagaagtttttc

SEQ ID NO: 1180930 - DNA, 15 bp, Homo sapiens
ttgtcagaagttttt

SEQ ID NO: 1180931 - DNA, 15 bp, Homo sapiens
tttgtcagaagtttt

SEQ ID NO: 1180932 - DNA, 15 bp, Homo sapiens
ttttgtcagaagttt

SEQ ID NO: 1180933 - DNA, 15 bp, Homo sapiens
attttgtcagaagtt

SEQ ID NO: 1180934 - DNA, 15 bp, Homo sapiens
tattttgtcagaagt

SEQ ID NO: 1180935 - DNA, 15 bp, Homo sapiens
atattttgtcagaag

SEQ ID NO: 1180936 - DNA, 15 bp, Homo sapiens
aatattttgtcagaa

SEQ ID NO: 1180937 - DNA, 15 bp, Homo sapiens
taatattttgtcaga

SEQ ID NO: 1180938 - DNA, 15 bp, Homo sapiens
ataatattttgtcag

SEQ ID NO: 1180939 - DNA, 15 bp, Homo sapiens
aataatattttgtca

SEQ ID NO: 1180940 - DNA, 15 bp, Homo sapiens
taataatattttgtc

SEQ ID NO: 1180941 - DNA, 15 bp, Homo sapiens
gtaataatattttgt

SEQ ID NO: 1180942 - DNA, 15 bp, Homo sapiens
tgtaataatattttg

SEQ ID NO: 1180943 - DNA, 15 bp, Homo sapiens
atgtaataatatttt

SEQ ID NO: 1180944 - DNA, 15 bp, Homo sapiens
catgtaataatattt

SEQ ID NO: 1180945 - DNA, 15 bp, Homo sapiens
gcatgtaataatatt

SEQ ID NO: 1180946 - DNA, 15 bp, Homo sapiens
agcatgtaataatat

SEQ ID NO: 1180947 - DNA, 15 bp, Homo sapiens
tagcatgtaataata

SEQ ID NO: 1180948 - DNA, 15 bp, Homo sapiens
ttagcatgtaataat

SEQ ID NO: 1180949 - DNA, 15 bp, Homo sapiens
gttagcatgtaataa

SEQ ID NO: 1180950 - DNA, 15 bp, Homo sapiens
tgttagcatgtaata

SEQ ID NO: 1180951 - DNA, 15 bp, Homo sapiens
ctgttagcatgtaat

SEQ ID NO: 1180952 - DNA, 15 bp, Homo sapiens
actgttagcatgtaa

SEQ ID NO: 1180953 - DNA, 15 bp, Homo sapiens
aactgttagcatgta

SEQ ID NO: 1180954 - DNA, 15 bp, Homo sapiens
taactgttagcatgt

SEQ ID NO: 1180955 - DNA, 15 bp, Homo sapiens
ctaactgttagcatg

SEQ ID NO: 1180956 - DNA, 15 bp, Homo sapiens
tctaactgttagcat

SEQ ID NO: 1180957 - DNA, 15 bp, Homo sapiens
atctaactgttagca

SEQ ID NO: 1180958 - DNA, 15 bp, Homo sapiens
aatctaactgttagc

SEQ ID NO: 1180959 - DNA, 15 bp, Homo sapiens
aaatctaactgttag

SEQ ID NO: 1180960 - DNA, 15 bp, Homo sapiens
caaatctaactgtta

SEQ ID NO: 1180961 - DNA, 15 bp, Homo sapiens
tcaaatctaactgtt

SEQ ID NO: 1180962 - DNA, 15 bp, Homo sapiens
atcaaatctaactgt

SEQ ID NO: 1180963 - DNA, 15 bp, Homo sapiens
tatcaaatctaactg

SEQ ID NO: 1180964 - DNA, 15 bp, Homo sapiens
gtatcaaatctaact

SEQ ID NO: 1180965 - DNA, 15 bp, Homo sapiens
ggtatcaaatctaac

SEQ ID NO: 1180966 - DNA, 15 bp, Homo sapiens
aggtatcaaatctaa

SEQ ID NO: 1180967 - DNA, 15 bp, Homo sapiens
aaggtatcaaatcta

SEQ ID NO: 1180968 - DNA, 15 bp, Homo sapiens
aaaggtatcaaatct

SEQ ID NO: 1180969 - DNA, 15 bp, Homo sapiens
aaaaggtatcaaatc

SEQ ID NO: 1180970 - DNA, 15 bp, Homo sapiens
gaaaaggtatcaaat

SEQ ID NO: 1180971 - DNA, 15 bp, Homo sapiens
ggaaaaggtatcaaa

SEQ ID NO: 1180972 - DNA, 15 bp, Homo sapiens
aggaaaaggtatcaa

SEQ ID NO: 1180973 - DNA, 15 bp, Homo sapiens
gaggaaaaggtatca

SEQ ID NO: 1180974 - DNA, 15 bp, Homo sapiens
ggaggaaaaggtatc

SEQ ID NO: 1180975 - DNA, 15 bp, Homo sapiens
gggaggaaaaggtat

SEQ ID NO: 1180976 - DNA, 15 bp, Homo sapiens
agggaggaaaaggta

SEQ ID NO: 1180977 - DNA, 15 bp, Homo sapiens
cagggaggaaaaggt

SEQ ID NO: 1180978 - DNA, 15 bp, Homo sapiens
tcagggaggaaaagg

SEQ ID NO: 1180979 - DNA, 15 bp, Homo sapiens
ttcagggaggaaaag

SEQ ID NO: 1180980 - DNA, 15 bp, Homo sapiens
cttcagggaggaaaa

SEQ ID NO: 1180981 - DNA, 15 bp, Homo sapiens
acttcagggaggaaa

SEQ ID NO: 1180982 - DNA, 15 bp, Homo sapiens
tacttcagggaggaa

SEQ ID NO: 1180983 - DNA, 15 bp, Homo sapiens
atacttcagggagga

SEQ ID NO: 1180984 - DNA, 15 bp, Homo sapiens
aatacttcagggagg

SEQ ID NO: 1180985 - DNA, 15 bp, Homo sapiens
aaatacttcagggag

SEQ ID NO: 1180986 - DNA, 15 bp, Homo sapiens
aaaatacttcaggga

SEQ ID NO: 1180987 - DNA, 15 bp, Homo sapiens
gaaaatacttcaggg

SEQ ID NO: 1180988 - DNA, 15 bp, Homo sapiens
agaaaatacttcagg

SEQ ID NO: 1180989 - DNA, 15 bp, Homo sapiens
gagaaaatacttcag

SEQ ID NO: 1180990 - DNA, 15 bp, Homo sapiens
agagaaaatacttca

SEQ ID NO: 1180991 - DNA, 15 bp, Homo sapiens
cagagaaaatacttc

SEQ ID NO: 1180992 - DNA, 15 bp, Homo sapiens
tcagagaaaatactt

SEQ ID NO: 1180993 - DNA, 15 bp, Homo sapiens
atcagagaaaatact

SEQ ID NO: 1180994 - DNA, 15 bp, Homo sapiens
aatcagagaaaatac

SEQ ID NO: 1180995 - DNA, 15 bp, Homo sapiens
aaatcagagaaaata

SEQ ID NO: 1180996 - DNA, 15 bp, Homo sapiens
aaaatcagagaaaat

SEQ ID NO: 1180997 - DNA, 15 bp, Homo sapiens
gaaaatcagagaaaa

SEQ ID NO: 1180998 - DNA, 15 bp, Homo sapiens
ggaaaatcagagaaa

SEQ ID NO: 1180999 - DNA, 15 bp, Homo sapiens
gggaaaatcagagaa

SEQ ID NO: 1181000 - DNA, 15 bp, Homo sapiens
agggaaaatcagaga

SEQ ID NO: 1181001 - DNA, 15 bp, Homo sapiens
tagggaaaatcagag

SEQ ID NO: 1181002 - DNA, 15 bp, Homo sapiens
ttagggaaaatcaga

SEQ ID NO: 1181003 - DNA, 15 bp, Homo sapiens
tttagggaaaatcag

SEQ ID NO: 1181004 - DNA, 15 bp, Homo sapiens
atttagggaaaatca

SEQ ID NO: 1181005 - DNA, 15 bp, Homo sapiens
catttagggaaaatc

SEQ ID NO: 1181006 - DNA, 15 bp, Homo sapiens
tcatttagggaaaat

SEQ ID NO: 1181007 - DNA, 15 bp, Homo sapiens
ttcatttagggaaaa

SEQ ID NO: 1181008 - DNA, 15 bp, Homo sapiens
cttcatttagggaaa

SEQ ID NO: 1181009 - DNA, 15 bp, Homo sapiens
tcttcatttagggaa

SEQ ID NO: 1181010 - DNA, 15 bp, Homo sapiens
gtcttcatttaggga

SEQ ID NO: 1181011 - DNA, 15 bp, Homo sapiens
agtcttcatttaggg

SEQ ID NO: 1181012 - DNA, 15 bp, Homo sapiens
aagtcttcatttagg

SEQ ID NO: 1181013 - DNA, 15 bp, Homo sapiens
aaagtcttcatttag

SEQ ID NO: 1181014 - DNA, 15 bp, Homo sapiens
gaaagtcttcattta

SEQ ID NO: 1181015 - DNA, 15 bp, Homo sapiens
agaaagtcttcattt

SEQ ID NO: 1181016 - DNA, 15 bp, Homo sapiens
aagaaagtcttcatt

SEQ ID NO: 1181017 - DNA, 15 bp, Homo sapiens
gaagaaagtcttcat

SEQ ID NO: 1181018 - DNA, 15 bp, Homo sapiens
agaagaaagtcttca

SEQ ID NO: 1181019 - DNA, 15 bp, Homo sapiens
gagaagaaagtcttc

SEQ ID NO: 1181020 - DNA, 15 bp, Homo sapiens
cgagaagaaagtctt

SEQ ID NO: 1181021 - DNA, 15 bp, Homo sapiens
acgagaagaaagtct

SEQ ID NO: 1181022 - DNA, 15 bp, Homo sapiens
aacgagaagaaagtc

SEQ ID NO: 1181023 - DNA, 15 bp, Homo sapiens
aaacgagaagaaagt

SEQ ID NO: 1181024 - DNA, 15 bp, Homo sapiens
caaacgagaagaaag

SEQ ID NO: 1181025 - DNA, 15 bp, Homo sapiens
tcaaacgagaagaaa

SEQ ID NO: 1181026 - DNA, 15 bp, Homo sapiens
ttcaaacgagaagaa

SEQ ID NO: 1181027 - DNA, 15 bp, Homo sapiens
attcaaacgagaaga

SEQ ID NO: 1181028 - DNA, 15 bp, Homo sapiens
aattcaaacgagaag

SEQ ID NO: 1181029 - DNA, 15 bp, Homo sapiens
aaattcaaacgagaa

SEQ ID NO: 1181030 - DNA, 15 bp, Homo sapiens
taaattcaaacgaga

SEQ ID NO: 1181031 - DNA, 15 bp, Homo sapiens
ataaattcaaacgag

SEQ ID NO: 1181032 - DNA, 15 bp, Homo sapiens
cataaattcaaacga

SEQ ID NO: 1181033 - DNA, 15 bp, Homo sapiens
acataaattcaaacg

SEQ ID NO: 1181034 - DNA, 15 bp, Homo sapiens
gacataaattcaaac

SEQ ID NO: 1181035 - DNA, 15 bp, Homo sapiens
ggacataaattcaaa

SEQ ID NO: 1181036 - DNA, 15 bp, Homo sapiens
tggacataaattcaa

SEQ ID NO: 1181037 - DNA, 15 bp, Homo sapiens
ctggacataaattca

SEQ ID NO: 1181038 - DNA, 15 bp, Homo sapiens
actggacataaattc

SEQ ID NO: 1181039 - DNA, 15 bp, Homo sapiens
aactggacataaatt

SEQ ID NO: 1181040 - DNA, 15 bp, Homo sapiens
aaactggacataaat

SEQ ID NO: 1181041 - DNA, 15 bp, Homo sapiens
taaactggacataaa

SEQ ID NO: 1181042 - DNA, 15 bp, Homo sapiens
ctaaactggacataa

SEQ ID NO: 1181043 - DNA, 15 bp, Homo sapiens
actaaactggacata

SEQ ID NO: 1181044 - DNA, 15 bp, Homo sapiens
gactaaactggacat

SEQ ID NO: 1181045 - DNA, 15 bp, Homo sapiens
agactaaactggaca

SEQ ID NO: 1181046 - DNA, 15 bp, Homo sapiens
aagactaaactggac

SEQ ID NO: 1181047 - DNA, 15 bp, Homo sapiens
aaagactaaactgga

SEQ ID NO: 1181048 - DNA, 15 bp, Homo sapiens
caaagactaaactgg

SEQ ID NO: 1181049 - DNA, 15 bp, Homo sapiens
tcaaagactaaactg

SEQ ID NO: 1181050 - DNA, 15 bp, Homo sapiens
ttcaaagactaaact

SEQ ID NO: 1181051 - DNA, 15 bp, Homo sapiens
cttcaaagactaaac

SEQ ID NO: 1181052 - DNA, 15 bp, Homo sapiens
acttcaaagactaaa

SEQ ID NO: 1181053 - DNA, 15 bp, Homo sapiens
cacttcaaagactaa

SEQ ID NO: 1181054 - DNA, 15 bp, Homo sapiens
gcacttcaaagacta

SEQ ID NO: 1181055 - DNA, 15 bp, Homo sapiens
cgcacttcaaagact

SEQ ID NO: 1181056 - DNA, 15 bp, Homo sapiens
acgcacttcaaagac

SEQ ID NO: 1181057 - DNA, 15 bp, Homo sapiens
aacgcacttcaaaga

SEQ ID NO: 1181058 - DNA, 15 bp, Homo sapiens
aaacgcacttcaaag

SEQ ID NO: 1181059 - DNA, 15 bp, Homo sapiens
caaacgcacttcaaa

SEQ ID NO: 1181060 - DNA, 15 bp, Homo sapiens
acaaacgcacttcaa

SEQ ID NO: 1181061 - DNA, 15 bp, Homo sapiens
aacaaacgcacttca

SEQ ID NO: 1181062 - DNA, 15 bp, Homo sapiens
gaacaaacgcacttc

SEQ ID NO: 1181063 - DNA, 15 bp, Homo sapiens
tgaacaaacgcactt

SEQ ID NO: 1181064 - DNA, 15 bp, Homo sapiens
atgaacaaacgcact

SEQ ID NO: 1181065 - DNA, 15 bp, Homo sapiens
tatgaacaaacgcac

SEQ ID NO: 1181066 - DNA, 15 bp, Homo sapiens
gtatgaacaaacgca

SEQ ID NO: 1181067 - DNA, 15 bp, Homo sapiens
agtatgaacaaacgc

SEQ ID NO: 1181068 - DNA, 15 bp, Homo sapiens
aagtatgaacaaacg

SEQ ID NO: 1181069 - DNA, 15 bp, Homo sapiens
gaagtatgaacaaac

SEQ ID NO: 1181070 - DNA, 15 bp, Homo sapiens
agaagtatgaacaaa

SEQ ID NO: 1181071 - DNA, 15 bp, Homo sapiens
aagaagtatgaacaa

SEQ ID NO: 1181072 - DNA, 15 bp, Homo sapiens
taagaagtatgaaca

SEQ ID NO: 1181073 - DNA, 15 bp, Homo sapiens
ctaagaagtatgaac

SEQ ID NO: 1181074 - DNA, 15 bp, Homo sapiens
gctaagaagtatgaa

SEQ ID NO: 1181075 - DNA, 15 bp, Homo sapiens
agctaagaagtatga

SEQ ID NO: 1181076 - DNA, 15 bp, Homo sapiens
gagctaagaagtatg

SEQ ID NO: 1181077 - DNA, 15 bp, Homo sapiens
ggagctaagaagtat

SEQ ID NO: 1181078 - DNA, 15 bp, Homo sapiens
aggagctaagaagta

SEQ ID NO: 1181079 - DNA, 15 bp, Homo sapiens
gaggagctaagaagt

SEQ ID NO: 1181080 - DNA, 15 bp, Homo sapiens
tgaggagctaagaag

SEQ ID NO: 1181081 - DNA, 15 bp, Homo sapiens
ctgaggagctaagaa

SEQ ID NO: 1181082 - DNA, 15 bp, Homo sapiens
cctgaggagctaaga

SEQ ID NO: 1181083 - DNA, 15 bp, Homo sapiens
tcctgaggagctaag

SEQ ID NO: 1181084 - DNA, 15 bp, Homo sapiens
atcctgaggagctaa

SEQ ID NO: 1181085 - DNA, 15 bp, Homo sapiens
gatcctgaggagcta

SEQ ID NO: 1181086 - DNA, 15 bp, Homo sapiens
agatcctgaggagct

SEQ ID NO: 1181087 - DNA, 15 bp, Homo sapiens
gagatcctgaggagc

SEQ ID NO: 1181088 - DNA, 15 bp, Homo sapiens
agagatcctgaggag

SEQ ID NO: 1181089 - DNA, 15 bp, Homo sapiens
tagagatcctgagga

SEQ ID NO: 1181090 - DNA, 15 bp, Homo sapiens
ctagagatcctgagg

SEQ ID NO: 1181091 - DNA, 15 bp, Homo sapiens
tctagagatcctgag

SEQ ID NO: 1181092 - DNA, 15 bp, Homo sapiens
atctagagatcctga

SEQ ID NO: 1181093 - DNA, 15 bp, Homo sapiens
aatctagagatcctg

SEQ ID NO: 1181094 - DNA, 15 bp, Homo sapiens
taatctagagatcct

SEQ ID NO: 1181095 - DNA, 15 bp, Homo sapiens
ctaatctagagatcc

SEQ ID NO: 1181096 - DNA, 15 bp, Homo sapiens
tctaatctagagatc

SEQ ID NO: 1181097 - DNA, 15 bp, Homo sapiens
gtctaatctagagat

SEQ ID NO: 1181098 - DNA, 15 bp, Homo sapiens
tgtctaatctagaga

SEQ ID NO: 1181099 - DNA, 15 bp, Homo sapiens
ttgtctaatctagag

SEQ ID NO: 1181100 - DNA, 15 bp, Homo sapiens
attgtctaatctaga

SEQ ID NO: 1181101 - DNA, 15 bp, Homo sapiens
tattgtctaatctag

SEQ ID NO: 1181102 - DNA, 15 bp, Homo sapiens
gtattgtctaatcta

SEQ ID NO: 1181103 - DNA, 15 bp, Homo sapiens
tgtattgtctaatct

SEQ ID NO: 1181104 - DNA, 15 bp, Homo sapiens
gtgtattgtctaatc

SEQ ID NO: 1181105 - DNA, 15 bp, Homo sapiens
tgtgtattgtctaat

SEQ ID NO: 1181106 - DNA, 15 bp, Homo sapiens
gtgtgtattgtctaa

SEQ ID NO: 1181107 - DNA, 15 bp, Homo sapiens
tgtgtgtattgtcta

SEQ ID NO: 1181108 - DNA, 15 bp, Homo sapiens
gtgtgtgtattgtct

SEQ ID NO: 1181109 - DNA, 15 bp, Homo sapiens
tgtgtgtgtattgtc

SEQ ID NO: 1181110 - DNA, 15 bp, Homo sapiens
gtgtgtgtgtattgt

SEQ ID NO: 1181111 - DNA, 15 bp, Homo sapiens
tgtgtgtgtgtattg

SEQ ID NO: 1181112 - DNA, 15 bp, Homo sapiens
gtgtgtgtgtgtatt

SEQ ID NO: 1181113 - DNA, 15 bp, Homo sapiens
aaggtgtgtgtgtgt

SEQ ID NO: 1181114 - DNA, 15 bp, Homo sapiens
aaaggtgtgtgtgtg

SEQ ID NO: 1181115 - DNA, 15 bp, Homo sapiens
aaaaggtgtgtgtgt

SEQ ID NO: 1181116 - DNA, 15 bp, Homo sapiens
aaaaaggtgtgtgtg

SEQ ID NO: 1181117 - DNA, 15 bp, Homo sapiens
aaaaaaggtgtgtgt

SEQ ID NO: 1181118 - DNA, 15 bp, Homo sapiens
taaaaaaggtgtgtg

SEQ ID NO: 1181119 - DNA, 15 bp, Homo sapiens
ttaaaaaaggtgtgt

SEQ ID NO: 1181120 - DNA, 15 bp, Homo sapiens
tttaaaaaaggtgtg

SEQ ID NO: 1181121 - DNA, 15 bp, Homo sapiens
atttaaaaaaggtgt

SEQ ID NO: 1181122 - DNA, 15 bp, Homo sapiens
catttaaaaaaggtg

SEQ ID NO: 1181123 - DNA, 15 bp, Homo sapiens
ccatttaaaaaaggt

SEQ ID NO: 1181124 - DNA, 15 bp, Homo sapiens
tccatttaaaaaagg

SEQ ID NO: 1181125 - DNA, 15 bp, Homo sapiens
ttccatttaaaaaag

SEQ ID NO: 1181126 - DNA, 15 bp, Homo sapiens
tttccatttaaaaaa

SEQ ID NO: 1181127 - DNA, 15 bp, Homo sapiens
ttttccatttaaaaa

SEQ ID NO: 1181128 - DNA, 15 bp, Homo sapiens
tttttccatttaaaa

SEQ ID NO: 1181129 - DNA, 15 bp, Homo sapiens
ttttttccatttaaa

SEQ ID NO: 1181130 - DNA, 15 bp, Homo sapiens
attttttccatttaa

SEQ ID NO: 1181131 - DNA, 15 bp, Homo sapiens
aattttttccattta

SEQ ID NO: 1181132 - DNA, 15 bp, Homo sapiens
caattttttccattt

SEQ ID NO: 1181133 - DNA, 15 bp, Homo sapiens
tcaattttttccatt

SEQ ID NO: 1181134 - DNA, 15 bp, Homo sapiens
ttcaattttttccat

SEQ ID NO: 1181135 - DNA, 15 bp, Homo sapiens
attcaattttttcca

SEQ ID NO: 1181136 - DNA, 15 bp, Homo sapiens
tattcaattttttcc

SEQ ID NO: 1181137 - DNA, 15 bp, Homo sapiens
ttattcaattttttc

SEQ ID NO: 1181138 - DNA, 15 bp, Homo sapiens
cttattcaatttttt

SEQ ID NO: 1181139 - DNA, 15 bp, Homo sapiens
acttattcaattttt

SEQ ID NO: 1181140 - DNA, 15 bp, Homo sapiens
aacttattcaatttt

SEQ ID NO: 1181141 - DNA, 15 bp, Homo sapiens
caacttattcaattt

SEQ ID NO: 1181142 - DNA, 15 bp, Homo sapiens
tcaacttattcaatt

SEQ ID NO: 1181143 - DNA, 15 bp, Homo sapiens
ttcaacttattcaat

SEQ ID NO: 1181144 - DNA, 15 bp, Homo sapiens
attcaacttattcaa

SEQ ID NO: 1181145 - DNA, 15 bp, Homo sapiens
cattcaacttattca

SEQ ID NO: 1181146 - DNA, 15 bp, Homo sapiens
acattcaacttattc

SEQ ID NO: 1181147 - DNA, 15 bp, Homo sapiens
gacattcaacttatt

SEQ ID NO: 1181148 - DNA, 15 bp, Homo sapiens
ggacattcaacttat

SEQ ID NO: 1181149 - DNA, 15 bp, Homo sapiens
cggacattcaactta

SEQ ID NO: 1181150 - DNA, 15 bp, Homo sapiens
acggacattcaactt

SEQ ID NO: 1181151 - DNA, 15 bp, Homo sapiens
cacggacattcaact

SEQ ID NO: 1181152 - DNA, 15 bp, Homo sapiens
acacggacattcaac

SEQ ID NO: 1181153 - DNA, 15 bp, Homo sapiens
aacacggacattcaa

SEQ ID NO: 1181154 - DNA, 15 bp, Homo sapiens
taacacggacattca

SEQ ID NO: 1181155 - DNA, 15 bp, Homo sapiens
ctaacacggacattc

SEQ ID NO: 1181156 - DNA, 15 bp, Homo sapiens
cctaacacggacatt

SEQ ID NO: 1181157 - DNA, 15 bp, Homo sapiens
tcctaacacggacat

SEQ ID NO: 1181158 - DNA, 15 bp, Homo sapiens
ttcctaacacggaca

SEQ ID NO: 1181159 - DNA, 15 bp, Homo sapiens
attcctaacacggac

SEQ ID NO: 1181160 - DNA, 15 bp, Homo sapiens
aattcctaacacgga

SEQ ID NO: 1181161 - DNA, 15 bp, Homo sapiens
aaattcctaacacgg

SEQ ID NO: 1181162 - DNA, 15 bp, Homo sapiens
taaattcctaacacg

SEQ ID NO: 1181163 - DNA, 15 bp, Homo sapiens
ttaaattcctaacac

SEQ ID NO: 1181164 - DNA, 15 bp, Homo sapiens
tttaaattcctaaca

SEQ ID NO: 1181165 - DNA, 15 bp, Homo sapiens
ttttaaattcctaac

SEQ ID NO: 1181166 - DNA, 15 bp, Homo sapiens
cttttaaattcctaa

SEQ ID NO: 1181167 - DNA, 15 bp, Homo sapiens
ccttttaaattccta

SEQ ID NO: 1181168 - DNA, 15 bp, Homo sapiens
cccttttaaattcct

SEQ ID NO: 1181169 - DNA, 15 bp, Homo sapiens
ccccttttaaattcc

SEQ ID NO: 1181170 - DNA, 15 bp, Homo sapiens
cccccttttaaattc

SEQ ID NO: 1181171 - DNA, 15 bp, Homo sapiens
gcccccttttaaatt

SEQ ID NO: 1181172 - DNA, 15 bp, Homo sapiens
tgcccccttttaaat

SEQ ID NO: 1181173 - DNA, 15 bp, Homo sapiens
ttgcccccttttaaa

SEQ ID NO: 1181174 - DNA, 15 bp, Homo sapiens
tttgcccccttttaa

SEQ ID NO: 1181175 - DNA, 15 bp, Homo sapiens
ttttgccccctttta

SEQ ID NO: 1181176 - DNA, 15 bp, Homo sapiens
gttttgccccctttt

SEQ ID NO: 1181177 - DNA, 15 bp, Homo sapiens
agttttgcccccttt

SEQ ID NO: 1181178 - DNA, 15 bp, Homo sapiens
aagttttgccccctt

SEQ ID NO: 1181179 - DNA, 15 bp, Homo sapiens
aaagttttgccccct

SEQ ID NO: 1181180 - DNA, 15 bp, Homo sapiens
gaaagttttgccccc

SEQ ID NO: 1181181 - DNA, 15 bp, Homo sapiens
agaaagttttgcccc

SEQ ID NO: 1181182 - DNA, 15 bp, Homo sapiens
gagaaagttttgccc

SEQ ID NO: 1181183 - DNA, 15 bp, Homo sapiens
ggagaaagttttgcc

SEQ ID NO: 1181184 - DNA, 15 bp, Homo sapiens
aggagaaagttttgc

SEQ ID NO: 1181185 - DNA, 15 bp, Homo sapiens
gaggagaaagttttg

SEQ ID NO: 1181186 - DNA, 15 bp, Homo sapiens
tgaggagaaagtttt

SEQ ID NO: 1181187 - DNA, 15 bp, Homo sapiens
ctgaggagaaagttt

SEQ ID NO: 1181188 - DNA, 15 bp, Homo sapiens
tctgaggagaaagtt

SEQ ID NO: 1181189 - DNA, 15 bp, Homo sapiens
atctgaggagaaagt

SEQ ID NO: 1181190 - DNA, 15 bp, Homo sapiens
catctgaggagaaag

SEQ ID NO: 1181191 - DNA, 15 bp, Homo sapiens
gcatctgaggagaaa

SEQ ID NO: 1181192 - DNA, 15 bp, Homo sapiens
agcatctgaggagaa

SEQ ID NO: 1181193 - DNA, 15 bp, Homo sapiens
gagcatctgaggaga

SEQ ID NO: 1181194 - DNA, 15 bp, Homo sapiens
ggagcatctgaggag

SEQ ID NO: 1181195 - DNA, 15 bp, Homo sapiens
aggagcatctgagga

SEQ ID NO: 1181196 - DNA, 15 bp, Homo sapiens
taggagcatctgagg

SEQ ID NO: 1181197 - DNA, 15 bp, Homo sapiens
ttaggagcatctgag

SEQ ID NO: 1181198 - DNA, 15 bp, Homo sapiens
cttaggagcatctga

SEQ ID NO: 1181199 - DNA, 15 bp, Homo sapiens
tcttaggagcatctg

SEQ ID NO: 1181200 - DNA, 15 bp, Homo sapiens
atcttaggagcatct

SEQ ID NO: 1181201 - DNA, 15 bp, Homo sapiens
catcttaggagcatc

SEQ ID NO: 1181202 - DNA, 15 bp, Homo sapiens
ccatcttaggagcat

SEQ ID NO: 1181203 - DNA, 15 bp, Homo sapiens
gccatcttaggagca

SEQ ID NO: 1181204 - DNA, 15 bp, Homo sapiens
ggccatcttaggagc

SEQ ID NO: 1181205 - DNA, 15 bp, Homo sapiens
tggccatcttaggag

SEQ ID NO: 1181206 - DNA, 15 bp, Homo sapiens
gtggccatcttagga

SEQ ID NO: 1181207 - DNA, 15 bp, Homo sapiens
agtggccatcttagg

SEQ ID NO: 1181208 - DNA, 15 bp, Homo sapiens
tagtggccatcttag

SEQ ID NO: 1181209 - DNA, 15 bp, Homo sapiens
gtagtggccatctta

SEQ ID NO: 1181210 - DNA, 15 bp, Homo sapiens
cgtagtggccatctt

SEQ ID NO: 1181211 - DNA, 15 bp, Homo sapiens
gcgtagtggccatct

SEQ ID NO: 1181212 - DNA, 15 bp, Homo sapiens
ggcgtagtggccatc

SEQ ID NO: 1181213 - DNA, 15 bp, Homo sapiens
gggcgtagtggccat

SEQ ID NO: 1181214 - DNA, 15 bp, Homo sapiens
agggcgtagtggcca

SEQ ID NO: 1181215 - DNA, 15 bp, Homo sapiens
gagggcgtagtggcc

SEQ ID NO: 1181216 - DNA, 15 bp, Homo sapiens
ggagggcgtagtggc

SEQ ID NO: 1181217 - DNA, 15 bp, Homo sapiens
aggagggcgtagtgg

SEQ ID NO: 1181218 - DNA, 15 bp, Homo sapiens
gaggagggcgtagtg

SEQ ID NO: 1181219 - DNA, 15 bp, Homo sapiens
ggaggagggcgtagt

SEQ ID NO: 1181220 - DNA, 15 bp, Homo sapiens
tggaggagggcgtag

SEQ ID NO: 1181221 - DNA, 15 bp, Homo sapiens
ttggaggagggcgta

SEQ ID NO: 1181222 - DNA, 15 bp, Homo sapiens
tttggaggagggcgt

SEQ ID NO: 1181223 - DNA, 15 bp, Homo sapiens
ttttggaggagggcg

SEQ ID NO: 1181224 - DNA, 15 bp, Homo sapiens
attttggaggagggc

SEQ ID NO: 1181225 - DNA, 15 bp, Homo sapiens
aattttggaggaggg

SEQ ID NO: 1181226 - DNA, 15 bp, Homo sapiens
gaattttggaggagg

SEQ ID NO: 1181227 - DNA, 15 bp, Homo sapiens
agaattttggaggag

SEQ ID NO: 1181228 - DNA, 15 bp, Homo sapiens
cagaattttggagga

SEQ ID NO: 1181229 - DNA, 15 bp, Homo sapiens
gcagaattttggagg

SEQ ID NO: 1181230 - DNA, 15 bp, Homo sapiens
agcagaattttggag

SEQ ID NO: 1181231 - DNA, 15 bp, Homo sapiens
aagcagaattttgga

SEQ ID NO: 1181232 - DNA, 15 bp, Homo sapiens
aaagcagaattttgg

SEQ ID NO: 1181233 - DNA, 15 bp, Homo sapiens
gaaagcagaattttg

SEQ ID NO: 1181234 - DNA, 15 bp, Homo sapiens
agaaagcagaatttt

SEQ ID NO: 1181235 - DNA, 15 bp, Homo sapiens
cagaaagcagaattt

SEQ ID NO: 1181236 - DNA, 15 bp, Homo sapiens
acagaaagcagaatt

SEQ ID NO: 1181237 - DNA, 15 bp, Homo sapiens
cacagaaagcagaat

SEQ ID NO: 1181238 - DNA, 15 bp, Homo sapiens
tcacagaaagcagaa

SEQ ID NO: 1181239 - DNA, 15 bp, Homo sapiens
ctcacagaaagcaga

SEQ ID NO: 1181240 - DNA, 15 bp, Homo sapiens
cctcacagaaagcag

SEQ ID NO: 1181241 - DNA, 15 bp, Homo sapiens
ccctcacagaaagca

SEQ ID NO: 1181242 - DNA, 15 bp, Homo sapiens
tccctcacagaaagc

SEQ ID NO: 1181243 - DNA, 15 bp, Homo sapiens
ctccctcacagaaag

SEQ ID NO: 1181244 - DNA, 15 bp, Homo sapiens
tctccctcacagaaa

SEQ ID NO: 1181245 - DNA, 15 bp, Homo sapiens
atctccctcacagaa

SEQ ID NO: 1181246 - DNA, 15 bp, Homo sapiens
catctccctcacaga

SEQ ID NO: 1181247 - DNA, 15 bp, Homo sapiens
acatctccctcacag

SEQ ID NO: 1181248 - DNA, 15 bp, Homo sapiens
aacatctccctcaca

SEQ ID NO: 1181249 - DNA, 15 bp, Homo sapiens
aaacatctccctcac

SEQ ID NO: 1181250 - DNA, 15 bp, Homo sapiens
aaaacatctccctca

SEQ ID NO: 1181251 - DNA, 15 bp, Homo sapiens
taaaacatctccctc

SEQ ID NO: 1181252 - DNA, 15 bp, Homo sapiens
gtaaaacatctccct

SEQ ID NO: 1181253 - DNA, 15 bp, Homo sapiens
ggtaaaacatctccc

SEQ ID NO: 1181254 - DNA, 15 bp, Homo sapiens
tggtaaaacatctcc

SEQ ID NO: 1181255 - DNA, 15 bp, Homo sapiens
ttggtaaaacatctc

SEQ ID NO: 1181256 - DNA, 15 bp, Homo sapiens
tttggtaaaacatct

SEQ ID NO: 1181257 - DNA, 15 bp, Homo sapiens
atttggtaaaacatc

SEQ ID NO: 1181258 - DNA, 15 bp, Homo sapiens
aatttggtaaaacat

SEQ ID NO: 1181259 - DNA, 15 bp, Homo sapiens
taatttggtaaaaca

SEQ ID NO: 1181260 - DNA, 15 bp, Homo sapiens
gtaatttggtaaaac

SEQ ID NO: 1181261 - DNA, 15 bp, Homo sapiens
ggtaatttggtaaaa

SEQ ID NO: 1181262 - DNA, 15 bp, Homo sapiens
tggtaatttggtaaa

SEQ ID NO: 1181263 - DNA, 15 bp, Homo sapiens
atggtaatttggtaa

SEQ ID NO: 1181264 - DNA, 15 bp, Homo sapiens
catggtaatttggta

SEQ ID NO: 1181265 - DNA, 15 bp, Homo sapiens
acatggtaatttggt

SEQ ID NO: 1181266 - DNA, 15 bp, Homo sapiens
tacatggtaatttgg

SEQ ID NO: 1181267 - DNA, 15 bp, Homo sapiens
gtacatggtaatttg

SEQ ID NO: 1181268 - DNA, 15 bp, Homo sapiens
tgtacatggtaattt

SEQ ID NO: 1181269 - DNA, 15 bp, Homo sapiens
atgtacatggtaatt

SEQ ID NO: 1181270 - DNA, 15 bp, Homo sapiens
tatgtacatggtaat

SEQ ID NO: 1181271 - DNA, 15 bp, Homo sapiens
atatgtacatggtaa

SEQ ID NO: 1181272 - DNA, 15 bp, Homo sapiens
catatgtacatggta

SEQ ID NO: 1181273 - DNA, 15 bp, Homo sapiens
ccatatgtacatggt

SEQ ID NO: 1181274 - DNA, 15 bp, Homo sapiens
accatatgtacatgg

SEQ ID NO: 1181275 - DNA, 15 bp, Homo sapiens
aaccatatgtacatg

SEQ ID NO: 1181276 - DNA, 15 bp, Homo sapiens
gaaccatatgtacat

SEQ ID NO: 1181277 - DNA, 15 bp, Homo sapiens
ggaaccatatgtaca

SEQ ID NO: 1181278 - DNA, 15 bp, Homo sapiens
aggaaccatatgtac

SEQ ID NO: 1181279 - DNA, 15 bp, Homo sapiens
aaggaaccatatgta

SEQ ID NO: 1181280 - DNA, 15 bp, Homo sapiens
taaggaaccatatgt

SEQ ID NO: 1181281 - DNA, 15 bp, Homo sapiens
ctaaggaaccatatg

SEQ ID NO: 1181282 - DNA, 15 bp, Homo sapiens
gctaaggaaccatat

SEQ ID NO: 1181283 - DNA, 15 bp, Homo sapiens
tgctaaggaaccata

SEQ ID NO: 1181284 - DNA, 15 bp, Homo sapiens
ttgctaaggaaccat

SEQ ID NO: 1181285 - DNA, 15 bp, Homo sapiens
gttgctaaggaacca

SEQ ID NO: 1181286 - DNA, 15 bp, Homo sapiens
ggttgctaaggaacc

SEQ ID NO: 1181287 - DNA, 15 bp, Homo sapiens
gggttgctaaggaac

SEQ ID NO: 1181288 - DNA, 15 bp, Homo sapiens
tgggttgctaaggaa

SEQ ID NO: 1181289 - DNA, 15 bp, Homo sapiens
atgggttgctaagga

SEQ ID NO: 1181290 - DNA, 15 bp, Homo sapiens
tatgggttgctaagg

SEQ ID NO: 1181291 - DNA, 15 bp, Homo sapiens
atatgggttgctaag

SEQ ID NO: 1181292 - DNA, 15 bp, Homo sapiens
aatatgggttgctaa

SEQ ID NO: 1181293 - DNA, 15 bp, Homo sapiens
taatatgggttgcta

SEQ ID NO: 1181294 - DNA, 15 bp, Homo sapiens
ttaatatgggttgct

SEQ ID NO: 1181295 - DNA, 15 bp, Homo sapiens
gttaatatgggttgc

SEQ ID NO: 1181296 - DNA, 15 bp, Homo sapiens
tgttaatatgggttg

SEQ ID NO: 1181297 - DNA, 15 bp, Homo sapiens
gtgttaatatgggtt

SEQ ID NO: 1181298 - DNA, 15 bp, Homo sapiens
agtgttaatatgggt

SEQ ID NO: 1181299 - DNA, 15 bp, Homo sapiens
cagtgttaatatggg

SEQ ID NO: 1181300 - DNA, 15 bp, Homo sapiens
tcagtgttaatatgg

SEQ ID NO: 1181301 - DNA, 15 bp, Homo sapiens
ctcagtgttaatatg

SEQ ID NO: 1181302 - DNA, 15 bp, Homo sapiens
gctcagtgttaatat

SEQ ID NO: 1181303 - DNA, 15 bp, Homo sapiens
tgctcagtgttaata

SEQ ID NO: 1181304 - DNA, 15 bp, Homo sapiens
atgctcagtgttaat

SEQ ID NO: 1181305 - DNA, 15 bp, Homo sapiens
tatgctcagtgttaa

SEQ ID NO: 1181306 - DNA, 15 bp, Homo sapiens
ttatgctcagtgtta

SEQ ID NO: 1181307 - DNA, 15 bp, Homo sapiens
attatgctcagtgtt

SEQ ID NO: 1181308 - DNA, 15 bp, Homo sapiens
cattatgctcagtgt

SEQ ID NO: 1181309 - DNA, 15 bp, Homo sapiens
tcattatgctcagtg

SEQ ID NO: 1181310 - DNA, 15 bp, Homo sapiens
gtcattatgctcagt

SEQ ID NO: 1181311 - DNA, 15 bp, Homo sapiens
ggtcattatgctcag

SEQ ID NO: 1181312 - DNA, 15 bp, Homo sapiens
tggtcattatgctca

SEQ ID NO: 1181313 - DNA, 15 bp, Homo sapiens
ttggtcattatgctc

SEQ ID NO: 1181314 - DNA, 15 bp, Homo sapiens
tttggtcattatgct

SEQ ID NO: 1181315 - DNA, 15 bp, Homo sapiens
ctttggtcattatgc

SEQ ID NO: 1181316 - DNA, 15 bp, Homo sapiens
tctttggtcattatg

SEQ ID NO: 1181317 - DNA, 15 bp, Homo sapiens
ctctttggtcattat

SEQ ID NO: 1181318 - DNA, 15 bp, Homo sapiens
tctctttggtcatta

SEQ ID NO: 1181319 - DNA, 15 bp, Homo sapiens
atctctttggtcatt

SEQ ID NO: 1181320 - DNA, 15 bp, Homo sapiens
tatctctttggtcat

SEQ ID NO: 1181321 - DNA, 15 bp, Homo sapiens
ttatctctttggtca

SEQ ID NO: 1181322 - DNA, 15 bp, Homo sapiens
tttatctctttggtc

SEQ ID NO: 1181323 - DNA, 15 bp, Homo sapiens
ctttatctctttggt

SEQ ID NO: 1181324 - DNA, 15 bp, Homo sapiens
cctttatctctttgg

SEQ ID NO: 1181325 - DNA, 15 bp, Homo sapiens
tcctttatctctttg

SEQ ID NO: 1181326 - DNA, 15 bp, Homo sapiens
ttcctttatctcttt

SEQ ID NO: 1181327 - DNA, 15 bp, Homo sapiens
tttcctttatctctt

SEQ ID NO: 1181328 - DNA, 15 bp, Homo sapiens
ttttcctttatctct

SEQ ID NO: 1181329 - DNA, 15 bp, Homo sapiens
cttttcctttatctc

SEQ ID NO: 1181330 - DNA, 15 bp, Homo sapiens
tcttttcctttatct

SEQ ID NO: 1181331 - DNA, 15 bp, Homo sapiens
atcttttcctttatc

SEQ ID NO: 1181332 - DNA, 15 bp, Homo sapiens
gatcttttcctttat

SEQ ID NO: 1181333 - DNA, 15 bp, Homo sapiens
tgatcttttccttta

SEQ ID NO: 1181334 - DNA, 15 bp, Homo sapiens
ctgatcttttccttt

SEQ ID NO: 1181335 - DNA, 15 bp, Homo sapiens
actgatcttttcctt

SEQ ID NO: 1181336 - DNA, 15 bp, Homo sapiens
tactgatcttttcct

SEQ ID NO: 1181337 - DNA, 15 bp, Homo sapiens
ctactgatcttttcc

SEQ ID NO: 1181338 - DNA, 15 bp, Homo sapiens
tctactgatcttttc

SEQ ID NO: 1181339 - DNA, 15 bp, Homo sapiens
ctctactgatctttt

SEQ ID NO: 1181340 - DNA, 15 bp, Homo sapiens
cctctactgatcttt

SEQ ID NO: 1181341 - DNA, 15 bp, Homo sapiens
tcctctactgatctt

SEQ ID NO: 1181342 - DNA, 15 bp, Homo sapiens
ttcctctactgatct

SEQ ID NO: 1181343 - DNA, 15 bp, Homo sapiens
cttcctctactgatc

SEQ ID NO: 1181344 - DNA, 15 bp, Homo sapiens
ccttcctctactgat

SEQ ID NO: 1181345 - DNA, 15 bp, Homo sapiens
cccttcctctactga

SEQ ID NO: 1181346 - DNA, 15 bp, Homo sapiens
gcccttcctctactg

SEQ ID NO: 1181347 - DNA, 15 bp, Homo sapiens
ggcccttcctctact

SEQ ID NO: 1181348 - DNA, 15 bp, Homo sapiens
tggcccttcctctac

SEQ ID NO: 1181349 - DNA, 15 bp, Homo sapiens
atggcccttcctcta

SEQ ID NO: 1181350 - DNA, 15 bp, Homo sapiens
tatggcccttcctct

SEQ ID NO: 1181351 - DNA, 15 bp, Homo sapiens
ttatggcccttcctc

SEQ ID NO: 1181352 - DNA, 15 bp, Homo sapiens
cttatggcccttcct

SEQ ID NO: 1181353 - DNA, 15 bp, Homo sapiens
gcttatggcccttcc

SEQ ID NO: 1181354 - DNA, 15 bp, Homo sapiens
ggcttatggcccttc

SEQ ID NO: 1181355 - DNA, 15 bp, Homo sapiens
tggcttatggccctt

SEQ ID NO: 1181356 - DNA, 15 bp, Homo sapiens
atggcttatggccct

SEQ ID NO: 1181357 - DNA, 15 bp, Homo sapiens
gatggcttatggccc

SEQ ID NO: 1181358 - DNA, 15 bp, Homo sapiens
cgatggcttatggcc

SEQ ID NO: 1181359 - DNA, 15 bp, Homo sapiens
gcgatggcttatggc

SEQ ID NO: 1181360 - DNA, 15 bp, Homo sapiens
agcgatggcttatgg

SEQ ID NO: 1181361 - DNA, 15 bp, Homo sapiens
cagcgatggcttatg

SEQ ID NO: 1181362 - DNA, 15 bp, Homo sapiens
gcagcgatggcttat

SEQ ID NO: 1181363 - DNA, 15 bp, Homo sapiens
agcagcgatggctta

SEQ ID NO: 1181364 - DNA, 15 bp, Homo sapiens
cagcagcgatggctt

SEQ ID NO: 1181365 - DNA, 15 bp, Homo sapiens
tcagcagcgatggct

SEQ ID NO: 1181366 - DNA, 15 bp, Homo sapiens
ctcagcagcgatggc

SEQ ID NO: 1181367 - DNA, 15 bp, Homo sapiens
gctcagcagcgatgg

SEQ ID NO: 1181368 - DNA, 15 bp, Homo sapiens
tgctcagcagcgatg

SEQ ID NO: 1181369 - DNA, 15 bp, Homo sapiens
gtgctcagcagcgat

SEQ ID NO: 1181370 - DNA, 15 bp, Homo sapiens
ggtgctcagcagcga

SEQ ID NO: 1181371 - DNA, 15 bp, Homo sapiens
aggtgctcagcagcg

SEQ ID NO: 1181372 - DNA, 15 bp, Homo sapiens
caggtgctcagcagc

SEQ ID NO: 1181373 - DNA, 15 bp, Homo sapiens
gcaggtgctcagcag

SEQ ID NO: 1181374 - DNA, 15 bp, Homo sapiens
ggcaggtgctcagca

SEQ ID NO: 1181375 - DNA, 15 bp, Homo sapiens
aggcaggtgctcagc

SEQ ID NO: 1181376 - DNA, 15 bp, Homo sapiens
caggcaggtgctcag

SEQ ID NO: 1181377 - DNA, 15 bp, Homo sapiens
tcaggcaggtgctca

SEQ ID NO: 1181378 - DNA, 15 bp, Homo sapiens
atcaggcaggtgctc

SEQ ID NO: 1181379 - DNA, 15 bp, Homo sapiens
tatcaggcaggtgct

SEQ ID NO: 1181380 - DNA, 15 bp, Homo sapiens
atatcaggcaggtgc

SEQ ID NO: 1181381 - DNA, 15 bp, Homo sapiens
catatcaggcaggtg

SEQ ID NO: 1181382 - DNA, 15 bp, Homo sapiens
ccatatcaggcaggt

SEQ ID NO: 1181383 - DNA, 15 bp, Homo sapiens
tccatatcaggcagg

SEQ ID NO: 1181384 - DNA, 15 bp, Homo sapiens
ctccatatcaggcag

SEQ ID NO: 1181385 - DNA, 15 bp, Homo sapiens
gctccatatcaggca

SEQ ID NO: 1181386 - DNA, 15 bp, Homo sapiens
ggctccatatcaggc

SEQ ID NO: 1181387 - DNA, 15 bp, Homo sapiens
tggctccatatcagg

SEQ ID NO: 1181388 - DNA, 15 bp, Homo sapiens
atggctccatatcag

SEQ ID NO: 1181389 - DNA, 15 bp, Homo sapiens
tatggctccatatca

SEQ ID NO: 1181390 - DNA, 15 bp, Homo sapiens
atatggctccatatc

SEQ ID NO: 1181391 - DNA, 15 bp, Homo sapiens
aatatggctccatat

SEQ ID NO: 1181392 - DNA, 15 bp, Homo sapiens
aaatatggctccata

SEQ ID NO: 1181393 - DNA, 15 bp, Homo sapiens
aaaatatggctccat

SEQ ID NO: 1181394 - DNA, 15 bp, Homo sapiens
aaaaatatggctcca

SEQ ID NO: 1181395 - DNA, 15 bp, Homo sapiens
aaaaaatatggctcc

SEQ ID NO: 1181396 - DNA, 15 bp, Homo sapiens
gaaaaaatatggctc

SEQ ID NO: 1181397 - DNA, 15 bp, Homo sapiens
tgaaaaaatatggct

SEQ ID NO: 1181398 - DNA, 15 bp, Homo sapiens
atgaaaaaatatggc

SEQ ID NO: 1181399 - DNA, 15 bp, Homo sapiens
aatgaaaaaatatgg

SEQ ID NO: 1181400 - DNA, 15 bp, Homo sapiens
gaatgaaaaaatatg

SEQ ID NO: 1181401 - DNA, 15 bp, Homo sapiens
agaatgaaaaaatat

SEQ ID NO: 1181402 - DNA, 15 bp, Homo sapiens
gagaatgaaaaaata

SEQ ID NO: 1181403 - DNA, 15 bp, Homo sapiens
ggagaatgaaaaaat

SEQ ID NO: 1181404 - DNA, 15 bp, Homo sapiens
tggagaatgaaaaaa

SEQ ID NO: 1181405 - DNA, 15 bp, Homo sapiens
ctggagaatgaaaaa

SEQ ID NO: 1181406 - DNA, 15 bp, Homo sapiens
cctggagaatgaaaa

SEQ ID NO: 1181407 - DNA, 15 bp, Homo sapiens
tcctggagaatgaaa

SEQ ID NO: 1181408 - DNA, 15 bp, Homo sapiens
ttcctggagaatgaa

SEQ ID NO: 1181409 - DNA, 15 bp, Homo sapiens
cttcctggagaatga

SEQ ID NO: 1181410 - DNA, 15 bp, Homo sapiens
gcttcctggagaatg

SEQ ID NO: 1181411 - DNA, 15 bp, Homo sapiens
cgcttcctggagaat

SEQ ID NO: 1181412 - DNA, 15 bp, Homo sapiens
tcgcttcctggagaa

SEQ ID NO: 1181413 - DNA, 15 bp, Homo sapiens
atcgcttcctggaga

SEQ ID NO: 1181414 - DNA, 15 bp, Homo sapiens
tatcgcttcctggag

SEQ ID NO: 1181415 - DNA, 15 bp, Homo sapiens
atatcgcttcctgga

SEQ ID NO: 1181416 - DNA, 15 bp, Homo sapiens
gatatcgcttcctgg

SEQ ID NO: 1181417 - DNA, 15 bp, Homo sapiens
ggatatcgcttcctg

SEQ ID NO: 1181418 - DNA, 15 bp, Homo sapiens
tggatatcgcttcct

SEQ ID NO: 1181419 - DNA, 15 bp, Homo sapiens
ttggatatcgcttcc

SEQ ID NO: 1181420 - DNA, 15 bp, Homo sapiens
attggatatcgcttc

SEQ ID NO: 1181421 - DNA, 15 bp, Homo sapiens
cattggatatcgctt

SEQ ID NO: 1181422 - DNA, 15 bp, Homo sapiens
ccattggatatcgct

SEQ ID NO: 1181423 - DNA, 15 bp, Homo sapiens
cccattggatatcgc

SEQ ID NO: 1181424 - DNA, 15 bp, Homo sapiens
tcccattggatatcg

SEQ ID NO: 1181425 - DNA, 15 bp, Homo sapiens
atcccattggatatc

SEQ ID NO: 1181426 - DNA, 15 bp, Homo sapiens
gatcccattggatat

SEQ ID NO: 1181427 - DNA, 15 bp, Homo sapiens
ggatcccattggata

SEQ ID NO: 1181428 - DNA, 15 bp, Homo sapiens
gggatcccattggat

SEQ ID NO: 1181429 - DNA, 15 bp, Homo sapiens
tgggatcccattgga

SEQ ID NO: 1181430 - DNA, 15 bp, Homo sapiens
ttgggatcccattgg

SEQ ID NO: 1181431 - DNA, 15 bp, Homo sapiens
gttgggatcccattg

SEQ ID NO: 1181432 - DNA, 15 bp, Homo sapiens
agttgggatcccatt

SEQ ID NO: 1181433 - DNA, 15 bp, Homo sapiens
gagttgggatcccat

SEQ ID NO: 1181434 - DNA, 15 bp, Homo sapiens
agagttgggatccca

SEQ ID NO: 1181435 - DNA, 15 bp, Homo sapiens
aagagttgggatccc

SEQ ID NO: 1181436 - DNA, 15 bp, Homo sapiens
aaagagttgggatcc

SEQ ID NO: 1181437 - DNA, 15 bp, Homo sapiens
taaagagttgggatc

SEQ ID NO: 1181438 - DNA, 15 bp, Homo sapiens
gtaaagagttgggat

SEQ ID NO: 1181439 - DNA, 15 bp, Homo sapiens
tgtaaagagttggga

SEQ ID NO: 1181440 - DNA, 15 bp, Homo sapiens
atgtaaagagttggg

SEQ ID NO: 1181441 - DNA, 15 bp, Homo sapiens
tatgtaaagagttgg

SEQ ID NO: 1181442 - DNA, 15 bp, Homo sapiens
atatgtaaagagttg

SEQ ID NO: 1181443 - DNA, 15 bp, Homo sapiens
catatgtaaagagtt

SEQ ID NO: 1181444 - DNA, 15 bp, Homo sapiens
ccatatgtaaagagt

SEQ ID NO: 1181445 - DNA, 15 bp, Homo sapiens
accatatgtaaagag

SEQ ID NO: 1181446 - DNA, 15 bp, Homo sapiens
aaccatatgtaaaga

SEQ ID NO: 1181447 - DNA, 15 bp, Homo sapiens
taaccatatgtaaag

SEQ ID NO: 1181448 - DNA, 15 bp, Homo sapiens
ttaaccatatgtaaa

SEQ ID NO: 1181449 - DNA, 15 bp, Homo sapiens
gttaaccatatgtaa

SEQ ID NO: 1181450 - DNA, 15 bp, Homo sapiens
ggttaaccatatgta

SEQ ID NO: 1181451 - DNA, 15 bp, Homo sapiens
tggttaaccatatgt

SEQ ID NO: 1181452 - DNA, 15 bp, Homo sapiens
ttggttaaccatatg

SEQ ID NO: 1181453 - DNA, 15 bp, Homo sapiens
gttggttaaccatat

SEQ ID NO: 1181454 - DNA, 15 bp, Homo sapiens
agttggttaaccata

SEQ ID NO: 1181455 - DNA, 15 bp, Homo sapiens
aagttggttaaccat

SEQ ID NO: 1181456 - DNA, 15 bp, Homo sapiens
gaagttggttaacca

SEQ ID NO: 1181457 - DNA, 15 bp, Homo sapiens
agaagttggttaacc

SEQ ID NO: 1181458 - DNA, 15 bp, Homo sapiens
aagaagttggttaac

SEQ ID NO: 1181459 - DNA, 15 bp, Homo sapiens
caagaagttggttaa

SEQ ID NO: 1181460 - DNA, 15 bp, Homo sapiens
acaagaagttggtta

SEQ ID NO: 1181461 - DNA, 15 bp, Homo sapiens
gacaagaagttggtt

SEQ ID NO: 1181462 - DNA, 15 bp, Homo sapiens
ggacaagaagttggt

SEQ ID NO: 1181463 - DNA, 15 bp, Homo sapiens
aggacaagaagttgg

SEQ ID NO: 1181464 - DNA, 15 bp, Homo sapiens
aaggacaagaagttg

SEQ ID NO: 1181465 - DNA, 15 bp, Homo sapiens
caaggacaagaagtt

SEQ ID NO: 1181466 - DNA, 15 bp, Homo sapiens
tcaaggacaagaagt

SEQ ID NO: 1181467 - DNA, 15 bp, Homo sapiens
atcaaggacaagaag

SEQ ID NO: 1181468 - DNA, 15 bp, Homo sapiens
aatcaaggacaagaa

SEQ ID NO: 1181469 - DNA, 15 bp, Homo sapiens
caatcaaggacaaga

SEQ ID NO: 1181470 - DNA, 15 bp, Homo sapiens
acaatcaaggacaag

SEQ ID NO: 1181471 - DNA, 15 bp, Homo sapiens
cacaatcaaggacaa

SEQ ID NO: 1181472 - DNA, 15 bp, Homo sapiens
acacaatcaaggaca

SEQ ID NO: 1181473 - DNA, 15 bp, Homo sapiens
aacacaatcaaggac

SEQ ID NO: 1181474 - DNA, 15 bp, Homo sapiens
gaacacaatcaagga

SEQ ID NO: 1181475 - DNA, 15 bp, Homo sapiens
tgaacacaatcaagg

SEQ ID NO: 1181476 - DNA, 15 bp, Homo sapiens
atgaacacaatcaag

SEQ ID NO: 1181477 - DNA, 15 bp, Homo sapiens
catgaacacaatcaa

SEQ ID NO: 1181478 - DNA, 15 bp, Homo sapiens
tcatgaacacaatca

SEQ ID NO: 1181479 - DNA, 15 bp, Homo sapiens
gtcatgaacacaatc

SEQ ID NO: 1181480 - DNA, 15 bp, Homo sapiens
agtcatgaacacaat

SEQ ID NO: 1181481 - DNA, 15 bp, Homo sapiens
aagtcatgaacacaa

SEQ ID NO: 1181482 - DNA, 15 bp, Homo sapiens
caagtcatgaacaca

SEQ ID NO: 1181483 - DNA, 15 bp, Homo sapiens
acaagtcatgaacac

SEQ ID NO: 1181484 - DNA, 15 bp, Homo sapiens
gacaagtcatgaaca

SEQ ID NO: 1181485 - DNA, 15 bp, Homo sapiens
agacaagtcatgaac

SEQ ID NO: 1181486 - DNA, 15 bp, Homo sapiens
gagacaagtcatgaa

SEQ ID NO: 1181487 - DNA, 15 bp, Homo sapiens
agagacaagtcatga

SEQ ID NO: 1181488 - DNA, 15 bp, Homo sapiens
aagagacaagtcatg

SEQ ID NO: 1181489 - DNA, 15 bp, Homo sapiens
gaagagacaagtcat

SEQ ID NO: 1181490 - DNA, 15 bp, Homo sapiens
ggaagagacaagtca

SEQ ID NO: 1181491 - DNA, 15 bp, Homo sapiens
gggaagagacaagtc

SEQ ID NO: 1181492 - DNA, 15 bp, Homo sapiens
tgggaagagacaagt

SEQ ID NO: 1181493 - DNA, 15 bp, Homo sapiens
ctgggaagagacaag

SEQ ID NO: 1181494 - DNA, 15 bp, Homo sapiens
cctgggaagagacaa

SEQ ID NO: 1181495 - DNA, 15 bp, Homo sapiens
ccctgggaagagaca

SEQ ID NO: 1181496 - DNA, 15 bp, Homo sapiens
gccctgggaagagac

SEQ ID NO: 1181497 - DNA, 15 bp, Homo sapiens
ggccctgggaagaga

SEQ ID NO: 1181498 - DNA, 15 bp, Homo sapiens
tggccctgggaagag

SEQ ID NO: 1181499 - DNA, 15 bp, Homo sapiens
ctggccctgggaaga

SEQ ID NO: 1181500 - DNA, 15 bp, Homo sapiens
tctggccctgggaag

SEQ ID NO: 1181501 - DNA, 15 bp, Homo sapiens
ctctggccctgggaa

SEQ ID NO: 1181502 - DNA, 15 bp, Homo sapiens
tctctggccctggga

SEQ ID NO: 1181503 - DNA, 15 bp, Homo sapiens
ctctctggccctggg

SEQ ID NO: 1181504 - DNA, 15 bp, Homo sapiens
tctctctggccctgg

SEQ ID NO: 1181505 - DNA, 15 bp, Homo sapiens
ctctctctggccctg

SEQ ID NO: 1181506 - DNA, 15 bp, Homo sapiens
tctctctctggccct

SEQ ID NO: 1181507 - DNA, 15 bp, Homo sapiens
ttctctctctggccc

SEQ ID NO: 1181508 - DNA, 15 bp, Homo sapiens
tttctctctctggcc

SEQ ID NO: 1181509 - DNA, 15 bp, Homo sapiens
atttctctctctggc

SEQ ID NO: 1181510 - DNA, 15 bp, Homo sapiens
catttctctctctgg

SEQ ID NO: 1181511 - DNA, 15 bp, Homo sapiens
ccatttctctctctg

SEQ ID NO: 1181512 - DNA, 15 bp, Homo sapiens
gccatttctctctct

SEQ ID NO: 1181513 - DNA, 15 bp, Homo sapiens
tgccatttctctctc

SEQ ID NO: 1181514 - DNA, 15 bp, Homo sapiens
ttgccatttctctct

SEQ ID NO: 1181515 - DNA, 15 bp, Homo sapiens
gttgccatttctctc

SEQ ID NO: 1181516 - DNA, 15 bp, Homo sapiens
agttgccatttctct

SEQ ID NO: 1181517 - DNA, 15 bp, Homo sapiens
aagttgccatttctc

SEQ ID NO: 1181518 - DNA, 15 bp, Homo sapiens
gaagttgccatttct

SEQ ID NO: 1181519 - DNA, 15 bp, Homo sapiens
ggaagttgccatttc

SEQ ID NO: 1181520 - DNA, 15 bp, Homo sapiens
gggaagttgccattt

SEQ ID NO: 1181521 - DNA, 15 bp, Homo sapiens
tgggaagttgccatt

SEQ ID NO: 1181522 - DNA, 15 bp, Homo sapiens
atgggaagttgccat

SEQ ID NO: 1181523 - DNA, 15 bp, Homo sapiens
gatgggaagttgcca

SEQ ID NO: 1181524 - DNA, 15 bp, Homo sapiens
ggatgggaagttgcc

SEQ ID NO: 1181525 - DNA, 15 bp, Homo sapiens
tggatgggaagttgc

SEQ ID NO: 1181526 - DNA, 15 bp, Homo sapiens
ttggatgggaagttg

SEQ ID NO: 1181527 - DNA, 15 bp, Homo sapiens
cttggatgggaagtt

SEQ ID NO: 1181528 - DNA, 15 bp, Homo sapiens
gcttggatgggaagt

SEQ ID NO: 1181529 - DNA, 15 bp, Homo sapiens
agcttggatgggaag

SEQ ID NO: 1181530 - DNA, 15 bp, Homo sapiens
cagcttggatgggaa

SEQ ID NO: 1181531 - DNA, 15 bp, Homo sapiens
tcagcttggatggga

SEQ ID NO: 1181532 - DNA, 15 bp, Homo sapiens
gtcagcttggatggg

SEQ ID NO: 1181533 - DNA, 15 bp, Homo sapiens
agtcagcttggatgg

SEQ ID NO: 1181534 - DNA, 15 bp, Homo sapiens
cagtcagcttggatg

SEQ ID NO: 1181535 - DNA, 15 bp, Homo sapiens
gcagtcagcttggat

SEQ ID NO: 1181536 - DNA, 15 bp, Homo sapiens
ggcagtcagcttgga

SEQ ID NO: 1181537 - DNA, 15 bp, Homo sapiens
tggcagtcagcttgg

SEQ ID NO: 1181538 - DNA, 15 bp, Homo sapiens
ctggcagtcagcttg

SEQ ID NO: 1181539 - DNA, 15 bp, Homo sapiens
cctggcagtcagctt

SEQ ID NO: 1181540 - DNA, 15 bp, Homo sapiens
acctggcagtcagct

SEQ ID NO: 1181541 - DNA, 15 bp, Homo sapiens
aacctggcagtcagc

SEQ ID NO: 1181542 - DNA, 15 bp, Homo sapiens
gaacctggcagtcag

SEQ ID NO: 1181543 - DNA, 15 bp, Homo sapiens
tgaacctggcagtca

SEQ ID NO: 1181544 - DNA, 15 bp, Homo sapiens
ttgaacctggcagtc

SEQ ID NO: 1181545 - DNA, 15 bp, Homo sapiens
gttgaacctggcagt

SEQ ID NO: 1181546 - DNA, 15 bp, Homo sapiens
ggttgaacctggcag

SEQ ID NO: 1181547 - DNA, 15 bp, Homo sapiens
aggttgaacctggca

SEQ ID NO: 1181548 - DNA, 15 bp, Homo sapiens
caggttgaacctggc

SEQ ID NO: 1181549 - DNA, 15 bp, Homo sapiens
ccaggttgaacctgg

SEQ ID NO: 1181550 - DNA, 15 bp, Homo sapiens
cccaggttgaacctg

SEQ ID NO: 1181551 - DNA, 15 bp, Homo sapiens
tcccaggttgaacct

SEQ ID NO: 1181552 - DNA, 15 bp, Homo sapiens
ctcccaggttgaacc

SEQ ID NO: 1181553 - DNA, 15 bp, Homo sapiens
cctcccaggttgaac

SEQ ID NO: 1181554 - DNA, 15 bp, Homo sapiens
tcctcccaggttgaa

SEQ ID NO: 1181555 - DNA, 15 bp, Homo sapiens
ctcctcccaggttga

SEQ ID NO: 1181556 - DNA, 15 bp, Homo sapiens
tctcctcccaggttg

SEQ ID NO: 1181557 - DNA, 15 bp, Homo sapiens
ctctcctcccaggtt

SEQ ID NO: 1181558 - DNA, 15 bp, Homo sapiens
tctctcctcccaggt

SEQ ID NO: 1181559 - DNA, 15 bp, Homo sapiens
atctctcctcccagg

SEQ ID NO: 1181560 - DNA, 15 bp, Homo sapiens
aatctctcctcccag

SEQ ID NO: 1181561 - DNA, 15 bp, Homo sapiens
caatctctcctccca

SEQ ID NO: 1181562 - DNA, 15 bp, Homo sapiens
gcaatctctcctccc

SEQ ID NO: 1181563 - DNA, 15 bp, Homo sapiens
tgcaatctctcctcc

SEQ ID NO: 1181564 - DNA, 15 bp, Homo sapiens
ctgcaatctctcctc

SEQ ID NO: 1181565 - DNA, 15 bp, Homo sapiens
cctgcaatctctcct

SEQ ID NO: 1181566 - DNA, 15 bp, Homo sapiens
ccctgcaatctctcc

SEQ ID NO: 1181567 - DNA, 15 bp, Homo sapiens
accctgcaatctctc

SEQ ID NO: 1181568 - DNA, 15 bp, Homo sapiens
caccctgcaatctct

SEQ ID NO: 1181569 - DNA, 15 bp, Homo sapiens
gcaccctgcaatctc

SEQ ID NO: 1181570 - DNA, 15 bp, Homo sapiens
ggcaccctgcaatct

SEQ ID NO: 1181571 - DNA, 15 bp, Homo sapiens
aggcaccctgcaatc

SEQ ID NO: 1181572 - DNA, 15 bp, Homo sapiens
gaggcaccctgcaat

SEQ ID NO: 1181573 - DNA, 15 bp, Homo sapiens
tgaggcaccctgcaa

SEQ ID NO: 1181574 - DNA, 15 bp, Homo sapiens
ctgaggcaccctgca

SEQ ID NO: 1181575 - DNA, 15 bp, Homo sapiens
actgaggcaccctgc

SEQ ID NO: 1181576 - DNA, 15 bp, Homo sapiens
gactgaggcaccctg

SEQ ID NO: 1181577 - DNA, 15 bp, Homo sapiens
ggactgaggcaccct

SEQ ID NO: 1181578 - DNA, 15 bp, Homo sapiens
aggactgaggcaccc

SEQ ID NO: 1181579 - DNA, 15 bp, Homo sapiens
gaggactgaggcacc

SEQ ID NO: 1181580 - DNA, 15 bp, Homo sapiens
agaggactgaggcac

SEQ ID NO: 1181581 - DNA, 15 bp, Homo sapiens
tagaggactgaggca

SEQ ID NO: 1181582 - DNA, 15 bp, Homo sapiens
gtagaggactgaggc

SEQ ID NO: 1181583 - DNA, 15 bp, Homo sapiens
agtagaggactgagg

SEQ ID NO: 1181584 - DNA, 15 bp, Homo sapiens
cagtagaggactgag

SEQ ID NO: 1181585 - DNA, 15 bp, Homo sapiens
ccagtagaggactga

SEQ ID NO: 1181586 - DNA, 15 bp, Homo sapiens
tccagtagaggactg

SEQ ID NO: 1181587 - DNA, 15 bp, Homo sapiens
gtccagtagaggact

SEQ ID NO: 1181588 - DNA, 15 bp, Homo sapiens
tgtccagtagaggac

SEQ ID NO: 1181589 - DNA, 15 bp, Homo sapiens
atgtccagtagagga

SEQ ID NO: 1181590 - DNA, 15 bp, Homo sapiens
tatgtccagtagagg

SEQ ID NO: 1181591 - DNA, 15 bp, Homo sapiens
gtatgtccagtagag

SEQ ID NO: 1181592 - DNA, 15 bp, Homo sapiens
agtatgtccagtaga

SEQ ID NO: 1181593 - DNA, 15 bp, Homo sapiens
tagtatgtccagtag

SEQ ID NO: 1181594 - DNA, 15 bp, Homo sapiens
ctagtatgtccagta

SEQ ID NO: 1181595 - DNA, 15 bp, Homo sapiens
tctagtatgtccagt

SEQ ID NO: 1181596 - DNA, 15 bp, Homo sapiens
ttctagtatgtccag

SEQ ID NO: 1181597 - DNA, 15 bp, Homo sapiens
attctagtatgtcca

SEQ ID NO: 1181598 - DNA, 15 bp, Homo sapiens
cattctagtatgtcc

SEQ ID NO: 1181599 - DNA, 15 bp, Homo sapiens
gcattctagtatgtc

SEQ ID NO: 1181600 - DNA, 15 bp, Homo sapiens
agcattctagtatgt

SEQ ID NO: 1181601 - DNA, 15 bp, Homo sapiens
cagcattctagtatg

SEQ ID NO: 1181602 - DNA, 15 bp, Homo sapiens
ccagcattctagtat

SEQ ID NO: 1181603 - DNA, 15 bp, Homo sapiens
accagcattctagta

SEQ ID NO: 1181604 - DNA, 15 bp, Homo sapiens
gaccagcattctagt

SEQ ID NO: 1181605 - DNA, 15 bp, Homo sapiens
agaccagcattctag

SEQ ID NO: 1181606 - DNA, 15 bp, Homo sapiens
gagaccagcattcta

SEQ ID NO: 1181607 - DNA, 15 bp, Homo sapiens
agagaccagcattct

SEQ ID NO: 1181608 - DNA, 15 bp, Homo sapiens
aagagaccagcattc

SEQ ID NO: 1181609 - DNA, 15 bp, Homo sapiens
gaagagaccagcatt

SEQ ID NO: 1181610 - DNA, 15 bp, Homo sapiens
ggaagagaccagcat

SEQ ID NO: 1181611 - DNA, 15 bp, Homo sapiens
gggaagagaccagca

SEQ ID NO: 1181612 - DNA, 15 bp, Homo sapiens
agggaagagaccagc

SEQ ID NO: 1181613 - DNA, 15 bp, Homo sapiens
cagggaagagaccag

SEQ ID NO: 1181614 - DNA, 15 bp, Homo sapiens
gcagggaagagacca

SEQ ID NO: 1181615 - DNA, 15 bp, Homo sapiens
agcagggaagagacc

SEQ ID NO: 1181616 - DNA, 15 bp, Homo sapiens
tagcagggaagagac

SEQ ID NO: 1181617 - DNA, 15 bp, Homo sapiens
ctagcagggaagaga

SEQ ID NO: 1181618 - DNA, 15 bp, Homo sapiens
cctagcagggaagag

SEQ ID NO: 1181619 - DNA, 15 bp, Homo sapiens
tcctagcagggaaga

SEQ ID NO: 1181620 - DNA, 15 bp, Homo sapiens
atcctagcagggaag

SEQ ID NO: 1181621 - DNA, 15 bp, Homo sapiens
catcctagcagggaa

SEQ ID NO: 1181622 - DNA, 15 bp, Homo sapiens
tcatcctagcaggga

SEQ ID NO: 1181623 - DNA, 15 bp, Homo sapiens
gtcatcctagcaggg

SEQ ID NO: 1181624 - DNA, 15 bp, Homo sapiens
tgtcatcctagcagg

SEQ ID NO: 1181625 - DNA, 15 bp, Homo sapiens
ctgtcatcctagcag

SEQ ID NO: 1181626 - DNA, 15 bp, Homo sapiens
cctgtcatcctagca

SEQ ID NO: 1181627 - DNA, 15 bp, Homo sapiens
tcctgtcatcctagc

SEQ ID NO: 1181628 - DNA, 15 bp, Homo sapiens
atcctgtcatcctag

SEQ ID NO: 1181629 - DNA, 15 bp, Homo sapiens
catcctgtcatccta

SEQ ID NO: 1181630 - DNA, 15 bp, Homo sapiens
ccatcctgtcatcct

SEQ ID NO: 1181631 - DNA, 15 bp, Homo sapiens
cccatcctgtcatcc

SEQ ID NO: 1181632 - DNA, 15 bp, Homo sapiens
ccccatcctgtcatc

SEQ ID NO: 1181633 - DNA, 15 bp, Homo sapiens
tccccatcctgtcat

SEQ ID NO: 1181634 - DNA, 15 bp, Homo sapiens
ttccccatcctgtca

SEQ ID NO: 1181635 - DNA, 15 bp, Homo sapiens
attccccatcctgtc

SEQ ID NO: 1181636 - DNA, 15 bp, Homo sapiens
aattccccatcctgt

SEQ ID NO: 1181637 - DNA, 15 bp, Homo sapiens
aaattccccatcctg

SEQ ID NO: 1181638 - DNA, 15 bp, Homo sapiens
aaaattccccatcct

SEQ ID NO: 1181639 - DNA, 15 bp, Homo sapiens
caaaattccccatcc

SEQ ID NO: 1181640 - DNA, 15 bp, Homo sapiens
gcaaaattccccatc

SEQ ID NO: 1181641 - DNA, 15 bp, Homo sapiens
ggcaaaattccccat

SEQ ID NO: 1181642 - DNA, 15 bp, Homo sapiens
aggcaaaattcccca

SEQ ID NO: 1181643 - DNA, 15 bp, Homo sapiens
caggcaaaattcccc

SEQ ID NO: 1181644 - DNA, 15 bp, Homo sapiens
tcaggcaaaattccc

SEQ ID NO: 1181645 - DNA, 15 bp, Homo sapiens
ctcaggcaaaattcc

SEQ ID NO: 1181646 - DNA, 15 bp, Homo sapiens
actcaggcaaaattc

SEQ ID NO: 1181647 - DNA, 15 bp, Homo sapiens
gactcaggcaaaatt

SEQ ID NO: 1181648 - DNA, 15 bp, Homo sapiens
agactcaggcaaaat

SEQ ID NO: 1181649 - DNA, 15 bp, Homo sapiens
cagactcaggcaaaa

SEQ ID NO: 1181650 - DNA, 15 bp, Homo sapiens
gcagactcaggcaaa

SEQ ID NO: 1181651 - DNA, 15 bp, Homo sapiens
ggcagactcaggcaa

SEQ ID NO: 1181652 - DNA, 15 bp, Homo sapiens
gggcagactcaggca

SEQ ID NO: 1181653 - DNA, 15 bp, Homo sapiens
tgggcagactcaggc

SEQ ID NO: 1181654 - DNA, 15 bp, Homo sapiens
ttgggcagactcagg

SEQ ID NO: 1181655 - DNA, 15 bp, Homo sapiens
gttgggcagactcag

SEQ ID NO: 1181656 - DNA, 15 bp, Homo sapiens
agttgggcagactca

SEQ ID NO: 1181657 - DNA, 15 bp, Homo sapiens
aagttgggcagactc

SEQ ID NO: 1181658 - DNA, 15 bp, Homo sapiens
caagttgggcagact

SEQ ID NO: 1181659 - DNA, 15 bp, Homo sapiens
gcaagttgggcagac

SEQ ID NO: 1181660 - DNA, 15 bp, Homo sapiens
ggcaagttgggcaga

SEQ ID NO: 1181661 - DNA, 15 bp, Homo sapiens
aggcaagttgggcag

SEQ ID NO: 1181662 - DNA, 15 bp, Homo sapiens
gaggcaagttgggca

SEQ ID NO: 1181663 - DNA, 15 bp, Homo sapiens
tgaggcaagttgggc

SEQ ID NO: 1181664 - DNA, 15 bp, Homo sapiens
atgaggcaagttggg

SEQ ID NO: 1181665 - DNA, 15 bp, Homo sapiens
catgaggcaagttgg

SEQ ID NO: 1181666 - DNA, 15 bp, Homo sapiens
ccatgaggcaagttg

SEQ ID NO: 1181667 - DNA, 15 bp, Homo sapiens
tccatgaggcaagtt

SEQ ID NO: 1181668 - DNA, 15 bp, Homo sapiens
ctccatgaggcaagt

SEQ ID NO: 1181669 - DNA, 15 bp, Homo sapiens
cctccatgaggcaag

SEQ ID NO: 1181670 - DNA, 15 bp, Homo sapiens
gcctccatgaggcaa

SEQ ID NO: 1181671 - DNA, 15 bp, Homo sapiens
agcctccatgaggca

SEQ ID NO: 1181672 - DNA, 15 bp, Homo sapiens
aagcctccatgaggc

SEQ ID NO: 1181673 - DNA, 15 bp, Homo sapiens
aaagcctccatgagg

SEQ ID NO: 1181674 - DNA, 15 bp, Homo sapiens
aaaagcctccatgag

SEQ ID NO: 1181675 - DNA, 15 bp, Homo sapiens
caaaagcctccatga

SEQ ID NO: 1181676 - DNA, 15 bp, Homo sapiens
tcaaaagcctccatg

SEQ ID NO: 1181677 - DNA, 15 bp, Homo sapiens
atcaaaagcctccat

SEQ ID NO: 1181678 - DNA, 15 bp, Homo sapiens
aatcaaaagcctcca

SEQ ID NO: 1181679 - DNA, 15 bp, Homo sapiens
aaatcaaaagcctcc

SEQ ID NO: 1181680 - DNA, 15 bp, Homo sapiens
gaaatcaaaagcctc

SEQ ID NO: 1181681 - DNA, 15 bp, Homo sapiens
tgaaatcaaaagcct

SEQ ID NO: 1181682 - DNA, 15 bp, Homo sapiens
ctgaaatcaaaagcc

SEQ ID NO: 1181683 - DNA, 15 bp, Homo sapiens
gctgaaatcaaaagc

SEQ ID NO: 1181684 - DNA, 15 bp, Homo sapiens
agctgaaatcaaaag

SEQ ID NO: 1181685 - DNA, 15 bp, Homo sapiens
tagctgaaatcaaaa

SEQ ID NO: 1181686 - DNA, 15 bp, Homo sapiens
gtagctgaaatcaaa

SEQ ID NO: 1181687 - DNA, 15 bp, Homo sapiens
agtagctgaaatcaa

SEQ ID NO: 1181688 - DNA, 15 bp, Homo sapiens
cagtagctgaaatca

SEQ ID NO: 1181689 - DNA, 15 bp, Homo sapiens
gcagtagctgaaatc

SEQ ID NO: 1181690 - DNA, 15 bp, Homo sapiens
tgcagtagctgaaat

SEQ ID NO: 1181691 - DNA, 15 bp, Homo sapiens
ttgcagtagctgaaa

SEQ ID NO: 1181692 - DNA, 15 bp, Homo sapiens
tttgcagtagctgaa

SEQ ID NO: 1181693 - DNA, 15 bp, Homo sapiens
gtttgcagtagctga

SEQ ID NO: 1181694 - DNA, 15 bp, Homo sapiens
agtttgcagtagctg

SEQ ID NO: 1181695 - DNA, 15 bp, Homo sapiens
tagtttgcagtagct

SEQ ID NO: 1181696 - DNA, 15 bp, Homo sapiens
ttagtttgcagtagc

SEQ ID NO: 1181697 - DNA, 15 bp, Homo sapiens
cttagtttgcagtag

SEQ ID NO: 1181698 - DNA, 15 bp, Homo sapiens
gcttagtttgcagta

SEQ ID NO: 1181699 - DNA, 15 bp, Homo sapiens
tgcttagtttgcagt

SEQ ID NO: 1181700 - DNA, 15 bp, Homo sapiens
atgcttagtttgcag

SEQ ID NO: 1181701 - DNA, 15 bp, Homo sapiens
aatgcttagtttgca

SEQ ID NO: 1181702 - DNA, 15 bp, Homo sapiens
taatgcttagtttgc

SEQ ID NO: 1181703 - DNA, 15 bp, Homo sapiens
ttaatgcttagtttg

SEQ ID NO: 1181704 - DNA, 15 bp, Homo sapiens
cttaatgcttagttt

SEQ ID NO: 1181705 - DNA, 15 bp, Homo sapiens
ccttaatgcttagtt

SEQ ID NO: 1181706 - DNA, 15 bp, Homo sapiens
tccttaatgcttagt

SEQ ID NO: 1181707 - DNA, 15 bp, Homo sapiens
ttccttaatgcttag

SEQ ID NO: 1181708 - DNA, 15 bp, Homo sapiens
tttccttaatgctta

SEQ ID NO: 1181709 - DNA, 15 bp, Homo sapiens
ctttccttaatgctt

SEQ ID NO: 1181710 - DNA, 15 bp, Homo sapiens
cctttccttaatgct

SEQ ID NO: 1181711 - DNA, 15 bp, Homo sapiens
ccctttccttaatgc

SEQ ID NO: 1181712 - DNA, 15 bp, Homo sapiens
cccctttccttaatg

SEQ ID NO: 1181713 - DNA, 15 bp, Homo sapiens
acccctttccttaat

SEQ ID NO: 1181714 - DNA, 15 bp, Homo sapiens
cacccctttccttaa

SEQ ID NO: 1181715 - DNA, 15 bp, Homo sapiens
gcacccctttcctta

SEQ ID NO: 1181716 - DNA, 15 bp, Homo sapiens
tgcacccctttcctt

SEQ ID NO: 1181717 - DNA, 15 bp, Homo sapiens
ctgcacccctttcct

SEQ ID NO: 1181718 - DNA, 15 bp, Homo sapiens
cctgcacccctttcc

SEQ ID NO: 1181719 - DNA, 15 bp, Homo sapiens
acctgcacccctttc

SEQ ID NO: 1181720 - DNA, 15 bp, Homo sapiens
tacctgcaccccttt

SEQ ID NO: 1181721 - DNA, 15 bp, Homo sapiens
ctacctgcacccctt

SEQ ID NO: 1181722 - DNA, 15 bp, Homo sapiens
tctacctgcacccct

SEQ ID NO: 1181723 - DNA, 15 bp, Homo sapiens
ctctacctgcacccc

SEQ ID NO: 1181724 - DNA, 15 bp, Homo sapiens
tctctacctgcaccc

SEQ ID NO: 1181725 - DNA, 15 bp, Homo sapiens
gtctctacctgcacc

SEQ ID NO: 1181726 - DNA, 15 bp, Homo sapiens
agtctctacctgcac

SEQ ID NO: 1181727 - DNA, 15 bp, Homo sapiens
cagtctctacctgca

SEQ ID NO: 1181728 - DNA, 15 bp, Homo sapiens
ccagtctctacctgc

SEQ ID NO: 1181729 - DNA, 15 bp, Homo sapiens
tccagtctctacctg

SEQ ID NO: 1181730 - DNA, 15 bp, Homo sapiens
ttccagtctctacct

SEQ ID NO: 1181731 - DNA, 15 bp, Homo sapiens
cttccagtctctacc

SEQ ID NO: 1181732 - DNA, 15 bp, Homo sapiens
tcttccagtctctac

SEQ ID NO: 1181733 - DNA, 15 bp, Homo sapiens
ctcttccagtctcta

SEQ ID NO: 1181734 - DNA, 15 bp, Homo sapiens
tctcttccagtctct

SEQ ID NO: 1181735 - DNA, 15 bp, Homo sapiens
ctctcttccagtctc

SEQ ID NO: 1181736 - DNA, 15 bp, Homo sapiens
cctctcttccagtct

SEQ ID NO: 1181737 - DNA, 15 bp, Homo sapiens
ccctctcttccagtc

SEQ ID NO: 1181738 - DNA, 15 bp, Homo sapiens
accctctcttccagt

SEQ ID NO: 1181739 - DNA, 15 bp, Homo sapiens
taccctctcttccag

SEQ ID NO: 1181740 - DNA, 15 bp, Homo sapiens
ctaccctctcttcca

SEQ ID NO: 1181741 - DNA, 15 bp, Homo sapiens
tctaccctctcttcc

SEQ ID NO: 1181742 - DNA, 15 bp, Homo sapiens
atctaccctctcttc

SEQ ID NO: 1181743 - DNA, 15 bp, Homo sapiens
catctaccctctctt

SEQ ID NO: 1181744 - DNA, 15 bp, Homo sapiens
gcatctaccctctct

SEQ ID NO: 1181745 - DNA, 15 bp, Homo sapiens
tgcatctaccctctc

SEQ ID NO: 1181746 - DNA, 15 bp, Homo sapiens
ttgcatctaccctct

SEQ ID NO: 1181747 - DNA, 15 bp, Homo sapiens
attgcatctaccctc

SEQ ID NO: 1181748 - DNA, 15 bp, Homo sapiens
cattgcatctaccct

SEQ ID NO: 1181749 - DNA, 15 bp, Homo sapiens
tcattgcatctaccc

SEQ ID NO: 1181750 - DNA, 15 bp, Homo sapiens
ctcattgcatctacc

SEQ ID NO: 1181751 - DNA, 15 bp, Homo sapiens
actcattgcatctac

SEQ ID NO: 1181752 - DNA, 15 bp, Homo sapiens
cactcattgcatcta

SEQ ID NO: 1181753 - DNA, 15 bp, Homo sapiens
ccactcattgcatct

SEQ ID NO: 1181754 - DNA, 15 bp, Homo sapiens
tccactcattgcatc

SEQ ID NO: 1181755 - DNA, 15 bp, Homo sapiens
ctccactcattgcat

SEQ ID NO: 1181756 - DNA, 15 bp, Homo sapiens
tctccactcattgca

SEQ ID NO: 1181757 - DNA, 15 bp, Homo sapiens
gtctccactcattgc

SEQ ID NO: 1181758 - DNA, 15 bp, Homo sapiens
ggtctccactcattg

SEQ ID NO: 1181759 - DNA, 15 bp, Homo sapiens
aggtctccactcatt

SEQ ID NO: 1181760 - DNA, 15 bp, Homo sapiens
gaggtctccactcat

SEQ ID NO: 1181761 - DNA, 15 bp, Homo sapiens
agaggtctccactca

SEQ ID NO: 1181762 - DNA, 15 bp, Homo sapiens
cagaggtctccactc

SEQ ID NO: 1181763 - DNA, 15 bp, Homo sapiens
acagaggtctccact

SEQ ID NO: 1181764 - DNA, 15 bp, Homo sapiens
acacagaggtctcca

SEQ ID NO: 1181765 - DNA, 15 bp, Homo sapiens
cacacagaggtctcc

SEQ ID NO: 1181766 - DNA, 15 bp, Homo sapiens
ccacacagaggtctc

SEQ ID NO: 1181767 - DNA, 15 bp, Homo sapiens
tccacacagaggtct

SEQ ID NO: 1181768 - DNA, 15 bp, Homo sapiens
ttccacacagaggtc

SEQ ID NO: 1181769 - DNA, 15 bp, Homo sapiens
gttccacacagaggt

SEQ ID NO: 1181770 - DNA, 15 bp, Homo sapiens
agttccacacagagg

SEQ ID NO: 1181771 - DNA, 15 bp, Homo sapiens
gagttccacacagag

SEQ ID NO: 1181772 - DNA, 15 bp, Homo sapiens
ggagttccacacaga

SEQ ID NO: 1181773 - DNA, 15 bp, Homo sapiens
aggagttccacacag

SEQ ID NO: 1181774 - DNA, 15 bp, Homo sapiens
gaggagttccacaca

SEQ ID NO: 1181775 - DNA, 15 bp, Homo sapiens
ggaggagttccacac

SEQ ID NO: 1181776 - DNA, 15 bp, Homo sapiens
gggaggagttccaca

SEQ ID NO: 1181777 - DNA, 15 bp, Homo sapiens
ggggaggagttccac

SEQ ID NO: 1181778 - DNA, 15 bp, Homo sapiens
gggggaggagttcca

SEQ ID NO: 1181779 - DNA, 15 bp, Homo sapiens
tgggggaggagttcc

SEQ ID NO: 1181780 - DNA, 15 bp, Homo sapiens
gtgggggaggagttc

SEQ ID NO: 1181781 - DNA, 15 bp, Homo sapiens
agtgggggaggagtt

SEQ ID NO: 1181782 - DNA, 15 bp, Homo sapiens
aagtgggggaggagt

SEQ ID NO: 1181783 - DNA, 15 bp, Homo sapiens
caagtgggggaggag

SEQ ID NO: 1181784 - DNA, 15 bp, Homo sapiens
tcaagtgggggagga

SEQ ID NO: 1181785 - DNA, 15 bp, Homo sapiens
ttcaagtgggggagg

SEQ ID NO: 1181786 - DNA, 15 bp, Homo sapiens
tttcaagtgggggag

SEQ ID NO: 1181787 - DNA, 15 bp, Homo sapiens
atttcaagtggggga

SEQ ID NO: 1181788 - DNA, 15 bp, Homo sapiens
catttcaagtggggg

SEQ ID NO: 1181789 - DNA, 15 bp, Homo sapiens
gcatttcaagtgggg

SEQ ID NO: 1181790 - DNA, 15 bp, Homo sapiens
ggcatttcaagtggg

SEQ ID NO: 1181791 - DNA, 15 bp, Homo sapiens
gggcatttcaagtgg

SEQ ID NO: 1181792 - DNA, 15 bp, Homo sapiens
agggcatttcaagtg

SEQ ID NO: 1181793 - DNA, 15 bp, Homo sapiens
tagggcatttcaagt

SEQ ID NO: 1181794 - DNA, 15 bp, Homo sapiens
atagggcatttcaag

SEQ ID NO: 1181795 - DNA, 15 bp, Homo sapiens
aatagggcatttcaa

SEQ ID NO: 1181796 - DNA, 15 bp, Homo sapiens
gaatagggcatttca

SEQ ID NO: 1181797 - DNA, 15 bp, Homo sapiens
agaatagggcatttc

SEQ ID NO: 1181798 - DNA, 15 bp, Homo sapiens
cagaatagggcattt

SEQ ID NO: 1181799 - DNA, 15 bp, Homo sapiens
ccagaatagggcatt

SEQ ID NO: 1181800 - DNA, 15 bp, Homo sapiens
accagaatagggcat

SEQ ID NO: 1181801 - DNA, 15 bp, Homo sapiens
aaccagaatagggca

SEQ ID NO: 1181802 - DNA, 15 bp, Homo sapiens
aaaccagaatagggc

SEQ ID NO: 1181803 - DNA, 15 bp, Homo sapiens
gaaaccagaataggg

SEQ ID NO: 1181804 - DNA, 15 bp, Homo sapiens
cgaaaccagaatagg

SEQ ID NO: 1181805 - DNA, 15 bp, Homo sapiens
gcgaaaccagaatag

SEQ ID NO: 1181806 - DNA, 15 bp, Homo sapiens
agcgaaaccagaata

SEQ ID NO: 1181807 - DNA, 15 bp, Homo sapiens
cagcgaaaccagaat

SEQ ID NO: 1181808 - DNA, 15 bp, Homo sapiens
acagcgaaaccagaa

SEQ ID NO: 1181809 - DNA, 15 bp, Homo sapiens
cacagcgaaaccaga

SEQ ID NO: 1181810 - DNA, 15 bp, Homo sapiens
tcacagcgaaaccag

SEQ ID NO: 1181811 - DNA, 15 bp, Homo sapiens
ctcacagcgaaacca

SEQ ID NO: 1181812 - DNA, 15 bp, Homo sapiens
tctcacagcgaaacc

SEQ ID NO: 1181813 - DNA, 15 bp, Homo sapiens
atctcacagcgaaac

SEQ ID NO: 1181814 - DNA, 15 bp, Homo sapiens
tatctcacagcgaaa

SEQ ID NO: 1181815 - DNA, 15 bp, Homo sapiens
atatctcacagcgaa

SEQ ID NO: 1181816 - DNA, 15 bp, Homo sapiens
aatatctcacagcga

SEQ ID NO: 1181817 - DNA, 15 bp, Homo sapiens
aaatatctcacagcg

SEQ ID NO: 1181818 - DNA, 15 bp, Homo sapiens
gaaatatctcacagc

SEQ ID NO: 1181819 - DNA, 15 bp, Homo sapiens
tgaaatatctcacag

SEQ ID NO: 1181820 - DNA, 15 bp, Homo sapiens
ttgaaatatctcaca

SEQ ID NO: 1181821 - DNA, 15 bp, Homo sapiens
tttgaaatatctcac

SEQ ID NO: 1181822 - DNA, 15 bp, Homo sapiens
ttttgaaatatctca

SEQ ID NO: 1181823 - DNA, 15 bp, Homo sapiens
attttgaaatatctc

SEQ ID NO: 1181824 - DNA, 15 bp, Homo sapiens
cattttgaaatatct

SEQ ID NO: 1181825 - DNA, 15 bp, Homo sapiens
tcattttgaaatatc

SEQ ID NO: 1181826 - DNA, 15 bp, Homo sapiens
ttcattttgaaatat

SEQ ID NO: 1181827 - DNA, 15 bp, Homo sapiens
gttcattttgaaata

SEQ ID NO: 1181828 - DNA, 15 bp, Homo sapiens
agttcattttgaaat

SEQ ID NO: 1181829 - DNA, 15 bp, Homo sapiens
aagttcattttgaaa

SEQ ID NO: 1181830 - DNA, 15 bp, Homo sapiens
taagttcattttgaa

SEQ ID NO: 1181831 - DNA, 15 bp, Homo sapiens
ttaagttcattttga

SEQ ID NO: 1181832 - DNA, 15 bp, Homo sapiens
gttaagttcattttg

SEQ ID NO: 1181833 - DNA, 15 bp, Homo sapiens
agttaagttcatttt

SEQ ID NO: 1181834 - DNA, 15 bp, Homo sapiens
aagttaagttcattt

SEQ ID NO: 1181835 - DNA, 15 bp, Homo sapiens
caagttaagttcatt

SEQ ID NO: 1181836 - DNA, 15 bp, Homo sapiens
acaagttaagttcat

SEQ ID NO: 1181837 - DNA, 15 bp, Homo sapiens
gacaagttaagttca

SEQ ID NO: 1181838 - DNA, 15 bp, Homo sapiens
tgacaagttaagttc

SEQ ID NO: 1181839 - DNA, 15 bp, Homo sapiens
ttgacaagttaagtt

SEQ ID NO: 1181840 - DNA, 15 bp, Homo sapiens
gttgacaagttaagt

SEQ ID NO: 1181841 - DNA, 15 bp, Homo sapiens
agttgacaagttaag

SEQ ID NO: 1181842 - DNA, 15 bp, Homo sapiens
cagttgacaagttaa

SEQ ID NO: 1181843 - DNA, 15 bp, Homo sapiens
tcagttgacaagtta

SEQ ID NO: 1181844 - DNA, 15 bp, Homo sapiens
ttcagttgacaagtt

SEQ ID NO: 1181845 - DNA, 15 bp, Homo sapiens
tttcagttgacaagt

SEQ ID NO: 1181846 - DNA, 15 bp, Homo sapiens
ttttcagttgacaag

SEQ ID NO: 1181847 - DNA, 15 bp, Homo sapiens
attttcagttgacaa

SEQ ID NO: 1181848 - DNA, 15 bp, Homo sapiens
cattttcagttgaca

SEQ ID NO: 1181849 - DNA, 15 bp, Homo sapiens
acattttcagttgac

SEQ ID NO: 1181850 - DNA, 15 bp, Homo sapiens
tacattttcagttga

SEQ ID NO: 1181851 - DNA, 15 bp, Homo sapiens
gtacattttcagttg

SEQ ID NO: 1181852 - DNA, 15 bp, Homo sapiens
agtacattttcagtt

SEQ ID NO: 1181853 - DNA, 15 bp, Homo sapiens
cagtacattttcagt

SEQ ID NO: 1181854 - DNA, 15 bp, Homo sapiens
gcagtacattttcag

SEQ ID NO: 1181855 - DNA, 15 bp, Homo sapiens
ggcagtacattttca

SEQ ID NO: 1181856 - DNA, 15 bp, Homo sapiens
aggcagtacattttc

SEQ ID NO: 1181857 - DNA, 15 bp, Homo sapiens
caggcagtacatttt

SEQ ID NO: 1181858 - DNA, 15 bp, Homo sapiens
tcaggcagtacattt

SEQ ID NO: 1181859 - DNA, 15 bp, Homo sapiens
gtcaggcagtacatt

SEQ ID NO: 1181860 - DNA, 15 bp, Homo sapiens
ggtcaggcagtacat

SEQ ID NO: 1181861 - DNA, 15 bp, Homo sapiens
aggtcaggcagtaca

SEQ ID NO: 1181862 - DNA, 15 bp, Homo sapiens
caggtcaggcagtac

SEQ ID NO: 1181863 - DNA, 15 bp, Homo sapiens
tcaggtcaggcagta

SEQ ID NO: 1181864 - DNA, 15 bp, Homo sapiens
ctcaggtcaggcagt

SEQ ID NO: 1181865 - DNA, 15 bp, Homo sapiens
tctcaggtcaggcag

SEQ ID NO: 1181866 - DNA, 15 bp, Homo sapiens
atctcaggtcaggca

SEQ ID NO: 1181867 - DNA, 15 bp, Homo sapiens
aatctcaggtcaggc

SEQ ID NO: 1181868 - DNA, 15 bp, Homo sapiens
aaatctcaggtcagg

SEQ ID NO: 1181869 - DNA, 15 bp, Homo sapiens
gaaatctcaggtcag

SEQ ID NO: 1181870 - DNA, 15 bp, Homo sapiens
agaaatctcaggtca

SEQ ID NO: 1181871 - DNA, 15 bp, Homo sapiens
cagaaatctcaggtc

SEQ ID NO: 1181872 - DNA, 15 bp, Homo sapiens
ccagaaatctcaggt

SEQ ID NO: 1181873 - DNA, 15 bp, Homo sapiens
tccagaaatctcagg

SEQ ID NO: 1181874 - DNA, 15 bp, Homo sapiens
ttccagaaatctcag

SEQ ID NO: 1181875 - DNA, 15 bp, Homo sapiens
tttccagaaatctca

SEQ ID NO: 1181876 - DNA, 15 bp, Homo sapiens
ttttccagaaatctc

SEQ ID NO: 1181877 - DNA, 15 bp, Homo sapiens
tttttccagaaatct

SEQ ID NO: 1181878 - DNA, 15 bp, Homo sapiens
gtttttccagaaatc

SEQ ID NO: 1181879 - DNA, 15 bp, Homo sapiens
tgtttttccagaaat

SEQ ID NO: 1181880 - DNA, 15 bp, Homo sapiens
atgtttttccagaaa

SEQ ID NO: 1181881 - DNA, 15 bp, Homo sapiens
catgtttttccagaa

SEQ ID NO: 1181882 - DNA, 15 bp, Homo sapiens
tcatgtttttccaga

SEQ ID NO: 1181883 - DNA, 15 bp, Homo sapiens
ttcatgtttttccag

SEQ ID NO: 1181884 - DNA, 15 bp, Homo sapiens
attcatgtttttcca

SEQ ID NO: 1181885 - DNA, 15 bp, Homo sapiens
gattcatgtttttcc

SEQ ID NO: 1181886 - DNA, 15 bp, Homo sapiens
tgattcatgtttttc

SEQ ID NO: 1181887 - DNA, 15 bp, Homo sapiens
ctgattcatgttttt

SEQ ID NO: 1181888 - DNA, 15 bp, Homo sapiens
tctgattcatgtttt

SEQ ID NO: 1181889 - DNA, 15 bp, Homo sapiens
ctctgattcatgttt

SEQ ID NO: 1181890 - DNA, 15 bp, Homo sapiens
cctctgattcatgtt

SEQ ID NO: 1181891 - DNA, 15 bp, Homo sapiens
acctctgattcatgt

SEQ ID NO: 1181892 - DNA, 15 bp, Homo sapiens
aacctctgattcatg

SEQ ID NO: 1181893 - DNA, 15 bp, Homo sapiens
aaacctctgattcat

SEQ ID NO: 1181894 - DNA, 15 bp, Homo sapiens
caaacctctgattca

SEQ ID NO: 1181895 - DNA, 15 bp, Homo sapiens
ccaaacctctgattc

SEQ ID NO: 1181896 - DNA, 15 bp, Homo sapiens
tccaaacctctgatt

SEQ ID NO: 1181897 - DNA, 15 bp, Homo sapiens
ttccaaacctctgat

SEQ ID NO: 1181898 - DNA, 15 bp, Homo sapiens
tttccaaacctctga

SEQ ID NO: 1181899 - DNA, 15 bp, Homo sapiens
ctttccaaacctctg

SEQ ID NO: 1181900 - DNA, 15 bp, Homo sapiens
actttccaaacctct

SEQ ID NO: 1181901 - DNA, 15 bp, Homo sapiens
gactttccaaacctc

SEQ ID NO: 1181902 - DNA, 15 bp, Homo sapiens
agactttccaaacct

SEQ ID NO: 1181903 - DNA, 15 bp, Homo sapiens
cagactttccaaacc

SEQ ID NO: 1181904 - DNA, 15 bp, Homo sapiens
ccagactttccaaac

SEQ ID NO: 1181905 - DNA, 15 bp, Homo sapiens
cccagactttccaaa

SEQ ID NO: 1181906 - DNA, 15 bp, Homo sapiens
acccagactttccaa

SEQ ID NO: 1181907 - DNA, 15 bp, Homo sapiens
aacccagactttcca

SEQ ID NO: 1181908 - DNA, 15 bp, Homo sapiens
gaacccagactttcc

SEQ ID NO: 1181909 - DNA, 15 bp, Homo sapiens
agaacccagactttc

SEQ ID NO: 1181910 - DNA, 15 bp, Homo sapiens
tagaacccagacttt

SEQ ID NO: 1181911 - DNA, 15 bp, Homo sapiens
ttagaacccagactt

SEQ ID NO: 1181912 - DNA, 15 bp, Homo sapiens
gttagaacccagact

SEQ ID NO: 1181913 - DNA, 15 bp, Homo sapiens
agttagaacccagac

SEQ ID NO: 1181914 - DNA, 15 bp, Homo sapiens
gagttagaacccaga

SEQ ID NO: 1181915 - DNA, 15 bp, Homo sapiens
tgagttagaacccag

SEQ ID NO: 1181916 - DNA, 15 bp, Homo sapiens
atgagttagaaccca

SEQ ID NO: 1181917 - DNA, 15 bp, Homo sapiens
tatgagttagaaccc

SEQ ID NO: 1181918 - DNA, 15 bp, Homo sapiens
ttatgagttagaacc

SEQ ID NO: 1181919 - DNA, 15 bp, Homo sapiens
tttatgagttagaac

SEQ ID NO: 1181920 - DNA, 15 bp, Homo sapiens
ctttatgagttagaa

SEQ ID NO: 1181921 - DNA, 15 bp, Homo sapiens
tctttatgagttaga

SEQ ID NO: 1181922 - DNA, 15 bp, Homo sapiens
ttctttatgagttag

SEQ ID NO: 1181923 - DNA, 15 bp, Homo sapiens
tttctttatgagtta

SEQ ID NO: 1181924 - DNA, 15 bp, Homo sapiens
atttctttatgagtt

SEQ ID NO: 1181925 - DNA, 15 bp, Homo sapiens
tatttctttatgagt

SEQ ID NO: 1181926 - DNA, 15 bp, Homo sapiens
atatttctttatgag

SEQ ID NO: 1181927 - DNA, 15 bp, Homo sapiens
tatatttctttatga

SEQ ID NO: 1181928 - DNA, 15 bp, Homo sapiens
atatatttctttatg

SEQ ID NO: 1181929 - DNA, 15 bp, Homo sapiens
aatatatttctttat

SEQ ID NO: 1181930 - DNA, 15 bp, Homo sapiens
caatatatttcttta

SEQ ID NO: 1181931 - DNA, 15 bp, Homo sapiens
tcaatatatttcttt

SEQ ID NO: 1181932 - DNA, 15 bp, Homo sapiens
ttcaatatatttctt

SEQ ID NO: 1181933 - DNA, 15 bp, Homo sapiens
attcaatatatttct

SEQ ID NO: 1181934 - DNA, 15 bp, Homo sapiens
tattcaatatatttc

SEQ ID NO: 1181935 - DNA, 15 bp, Homo sapiens
atattcaatatattt

SEQ ID NO: 1181936 - DNA, 15 bp, Homo sapiens
aatattcaatatatt

SEQ ID NO: 1181937 - DNA, 15 bp, Homo sapiens
aaatattcaatatat

SEQ ID NO: 1181938 - DNA, 15 bp, Homo sapiens
taaatattcaatata

SEQ ID NO: 1181939 - DNA, 15 bp, Homo sapiens
ataaatattcaatat

SEQ ID NO: 1181940 - DNA, 15 bp, Homo sapiens
tataaatattcaata

SEQ ID NO: 1181941 - DNA, 15 bp, Homo sapiens
ttataaatattcaat

SEQ ID NO: 1181942 - DNA, 15 bp, Homo sapiens
tttataaatattcaa

SEQ ID NO: 1181943 - DNA, 15 bp, Homo sapiens
ctttataaatattca

SEQ ID NO: 1181944 - DNA, 15 bp, Homo sapiens
tctttataaatattc

SEQ ID NO: 1181945 - DNA, 15 bp, Homo sapiens
atctttataaatatt

SEQ ID NO: 1181946 - DNA, 15 bp, Homo sapiens
tatctttataaatat

SEQ ID NO: 1181947 - DNA, 15 bp, Homo sapiens
atatctttataaata

SEQ ID NO: 1181948 - DNA, 15 bp, Homo sapiens
tatatctttataaat

SEQ ID NO: 1181949 - DNA, 15 bp, Homo sapiens
ttatatctttataaa

SEQ ID NO: 1181950 - DNA, 15 bp, Homo sapiens
gttatatctttataa

SEQ ID NO: 1181951 - DNA, 15 bp, Homo sapiens
tgttatatctttata

SEQ ID NO: 1181952 - DNA, 15 bp, Homo sapiens
atgttatatctttat

SEQ ID NO: 1181953 - DNA, 15 bp, Homo sapiens
aatgttatatcttta

SEQ ID NO: 1181954 - DNA, 15 bp, Homo sapiens
gaatgttatatcttt

SEQ ID NO: 1181955 - DNA, 15 bp, Homo sapiens
agaatgttatatctt

SEQ ID NO: 1181956 - DNA, 15 bp, Homo sapiens
aagaatgttatatct

SEQ ID NO: 1181957 - DNA, 15 bp, Homo sapiens
taagaatgttatatc

SEQ ID NO: 1181958 - DNA, 15 bp, Homo sapiens
ctaagaatgttatat

SEQ ID NO: 1181959 - DNA, 15 bp, Homo sapiens
tctaagaatgttata

SEQ ID NO: 1181960 - DNA, 15 bp, Homo sapiens
ttctaagaatgttat

SEQ ID NO: 1181961 - DNA, 15 bp, Homo sapiens
gttctaagaatgtta

SEQ ID NO: 1181962 - DNA, 15 bp, Homo sapiens
agttctaagaatgtt

SEQ ID NO: 1181963 - DNA, 15 bp, Homo sapiens
cagttctaagaatgt

SEQ ID NO: 1181964 - DNA, 15 bp, Homo sapiens
acagttctaagaatg

SEQ ID NO: 1181965 - DNA, 15 bp, Homo sapiens
aacagttctaagaat

SEQ ID NO: 1181966 - DNA, 15 bp, Homo sapiens
aaacagttctaagaa

SEQ ID NO: 1181967 - DNA, 15 bp, Homo sapiens
gaaacagttctaaga

SEQ ID NO: 1181968 - DNA, 15 bp, Homo sapiens
agaaacagttctaag

SEQ ID NO: 1181969 - DNA, 15 bp, Homo sapiens
cagaaacagttctaa

SEQ ID NO: 1181970 - DNA, 15 bp, Homo sapiens
acagaaacagttcta

SEQ ID NO: 1181971 - DNA, 15 bp, Homo sapiens
cacagaaacagttct

SEQ ID NO: 1181972 - DNA, 15 bp, Homo sapiens
acacagaaacagttc

SEQ ID NO: 1181973 - DNA, 15 bp, Homo sapiens
cacacagaaacagtt

SEQ ID NO: 1181974 - DNA, 15 bp, Homo sapiens
acacacagaaacagt

SEQ ID NO: 1181975 - DNA, 15 bp, Homo sapiens
cacacacagaaacag

SEQ ID NO: 1181976 - DNA, 15 bp, Homo sapiens
tcacacacagaaaca

SEQ ID NO: 1181977 - DNA, 15 bp, Homo sapiens
gtcacacacagaaac

SEQ ID NO: 1181978 - DNA, 15 bp, Homo sapiens
ggtcacacacagaaa

SEQ ID NO: 1181979 - DNA, 15 bp, Homo sapiens
aggtcacacacagaa

SEQ ID NO: 1181980 - DNA, 15 bp, Homo sapiens
gaggtcacacacaga

SEQ ID NO: 1181981 - DNA, 15 bp, Homo sapiens
agaggtcacacacag

SEQ ID NO: 1181982 - DNA, 15 bp, Homo sapiens
gagaggtcacacaca

SEQ ID NO: 1181983 - DNA, 15 bp, Homo sapiens
agagaggtcacacac

SEQ ID NO: 1181984 - DNA, 15 bp, Homo sapiens
gagagaggtcacaca

SEQ ID NO: 1181985 - DNA, 15 bp, Homo sapiens
agagagaggtcacac

SEQ ID NO: 1181986 - DNA, 15 bp, Homo sapiens
aagagagaggtcaca

SEQ ID NO: 1181987 - DNA, 15 bp, Homo sapiens
gaagagagaggtcac

SEQ ID NO: 1181988 - DNA, 15 bp, Homo sapiens
ggaagagagaggtca

SEQ ID NO: 1181989 - DNA, 15 bp, Homo sapiens
tggaagagagaggtc

SEQ ID NO: 1181990 - DNA, 15 bp, Homo sapiens
ttggaagagagaggt

SEQ ID NO: 1181991 - DNA, 15 bp, Homo sapiens
cttggaagagagagg

SEQ ID NO: 1181992 - DNA, 15 bp, Homo sapiens
acttggaagagagag

SEQ ID NO: 1181993 - DNA, 15 bp, Homo sapiens
cacttggaagagaga

SEQ ID NO: 1181994 - DNA, 15 bp, Homo sapiens
ccacttggaagagag

SEQ ID NO: 1181995 - DNA, 15 bp, Homo sapiens
gccacttggaagaga

SEQ ID NO: 1181996 - DNA, 15 bp, Homo sapiens
tgccacttggaagag

SEQ ID NO: 1181997 - DNA, 15 bp, Homo sapiens
atgccacttggaaga

SEQ ID NO: 1181998 - DNA, 15 bp, Homo sapiens
aatgccacttggaag

SEQ ID NO: 1181999 - DNA, 15 bp, Homo sapiens
caatgccacttggaa

SEQ ID NO: 1182000 - DNA, 15 bp, Homo sapiens
gcaatgccacttgga

SEQ ID NO: 1182001 - DNA, 15 bp, Homo sapiens
agcaatgccacttgg

SEQ ID NO: 1182002 - DNA, 15 bp, Homo sapiens
gagcaatgccacttg

SEQ ID NO: 1182003 - DNA, 15 bp, Homo sapiens
tgagcaatgccactt

SEQ ID NO: 1182004 - DNA, 15 bp, Homo sapiens
ttgagcaatgccact

SEQ ID NO: 1182005 - DNA, 15 bp, Homo sapiens
gttgagcaatgccac

SEQ ID NO: 1182006 - DNA, 15 bp, Homo sapiens
tgttgagcaatgcca

SEQ ID NO: 1182007 - DNA, 15 bp, Homo sapiens
ctgttgagcaatgcc

SEQ ID NO: 1182008 - DNA, 15 bp, Homo sapiens
gctgttgagcaatgc

SEQ ID NO: 1182009 - DNA, 15 bp, Homo sapiens
ggctgttgagcaatg

SEQ ID NO: 1182010 - DNA, 15 bp, Homo sapiens
gggctgttgagcaat

SEQ ID NO: 1182011 - DNA, 15 bp, Homo sapiens
tgggctgttgagcaa

SEQ ID NO: 1182012 - DNA, 15 bp, Homo sapiens
ctgggctgttgagca

SEQ ID NO: 1182013 - DNA, 15 bp, Homo sapiens
gctgggctgttgagc

SEQ ID NO: 1182014 - DNA, 15 bp, Homo sapiens
agctgggctgttgag

SEQ ID NO: 1182015 - DNA, 15 bp, Homo sapiens
gagctgggctgttga

SEQ ID NO: 1182016 - DNA, 15 bp, Homo sapiens
agagctgggctgttg

SEQ ID NO: 1182017 - DNA, 15 bp, Homo sapiens
gagagctgggctgtt

SEQ ID NO: 1182018 - DNA, 15 bp, Homo sapiens
tgagagctgggctgt

SEQ ID NO: 1182019 - DNA, 15 bp, Homo sapiens
atgagagctgggctg

SEQ ID NO: 1182020 - DNA, 15 bp, Homo sapiens
gatgagagctgggct

SEQ ID NO: 1182021 - DNA, 15 bp, Homo sapiens
tgatgagagctgggc

SEQ ID NO: 1182022 - DNA, 15 bp, Homo sapiens
ctgatgagagctggg

SEQ ID NO: 1182023 - DNA, 15 bp, Homo sapiens
tctgatgagagctgg

SEQ ID NO: 1182024 - DNA, 15 bp, Homo sapiens
ttctgatgagagctg

SEQ ID NO: 1182025 - DNA, 15 bp, Homo sapiens
cttctgatgagagct

SEQ ID NO: 1182026 - DNA, 15 bp, Homo sapiens
ccttctgatgagagc

SEQ ID NO: 1182027 - DNA, 15 bp, Homo sapiens
gccttctgatgagag

SEQ ID NO: 1182028 - DNA, 15 bp, Homo sapiens
agccttctgatgaga

SEQ ID NO: 1182029 - DNA, 15 bp, Homo sapiens
cagccttctgatgag

SEQ ID NO: 1182030 - DNA, 15 bp, Homo sapiens
tcagccttctgatga

SEQ ID NO: 1182031 - DNA, 15 bp, Homo sapiens
gtcagccttctgatg

SEQ ID NO: 1182032 - DNA, 15 bp, Homo sapiens
tgtcagccttctgat

SEQ ID NO: 1182033 - DNA, 15 bp, Homo sapiens
atgtcagccttctga

SEQ ID NO: 1182034 - DNA, 15 bp, Homo sapiens
aatgtcagccttctg

SEQ ID NO: 1182035 - DNA, 15 bp, Homo sapiens
taatgtcagccttct

SEQ ID NO: 1182036 - DNA, 15 bp, Homo sapiens
ataatgtcagccttc

SEQ ID NO: 1182037 - DNA, 15 bp, Homo sapiens
cataatgtcagcctt

SEQ ID NO: 1182038 - DNA, 15 bp, Homo sapiens
gcataatgtcagcct

SEQ ID NO: 1182039 - DNA, 15 bp, Homo sapiens
agcataatgtcagcc

SEQ ID NO: 1182040 - DNA, 15 bp, Homo sapiens
cagcataatgtcagc

SEQ ID NO: 1182041 - DNA, 15 bp, Homo sapiens
acagcataatgtcag

SEQ ID NO: 1182042 - DNA, 15 bp, Homo sapiens
aacagcataatgtca

SEQ ID NO: 1182043 - DNA, 15 bp, Homo sapiens
caacagcataatgtc

SEQ ID NO: 1182044 - DNA, 15 bp, Homo sapiens
acaacagcataatgt

SEQ ID NO: 1182045 - DNA, 15 bp, Homo sapiens
cacaacagcataatg

SEQ ID NO: 1182046 - DNA, 15 bp, Homo sapiens
gcacaacagcataat

SEQ ID NO: 1182047 - DNA, 15 bp, Homo sapiens
tgcacaacagcataa

SEQ ID NO: 1182048 - DNA, 15 bp, Homo sapiens
ttgcacaacagcata

SEQ ID NO: 1182049 - DNA, 15 bp, Homo sapiens
gttgcacaacagcat

SEQ ID NO: 1182050 - DNA, 15 bp, Homo sapiens
agttgcacaacagca

SEQ ID NO: 1182051 - DNA, 15 bp, Homo sapiens
aagttgcacaacagc

SEQ ID NO: 1182052 - DNA, 15 bp, Homo sapiens
caagttgcacaacag

SEQ ID NO: 1182053 - DNA, 15 bp, Homo sapiens
gcaagttgcacaaca

SEQ ID NO: 1182054 - DNA, 15 bp, Homo sapiens
tgcaagttgcacaac

SEQ ID NO: 1182055 - DNA, 15 bp, Homo sapiens
ctgcaagttgcacaa

SEQ ID NO: 1182056 - DNA, 15 bp, Homo sapiens
gctgcaagttgcaca

SEQ ID NO: 1182057 - DNA, 15 bp, Homo sapiens
ggctgcaagttgcac

SEQ ID NO: 1182058 - DNA, 15 bp, Homo sapiens
tggctgcaagttgca

SEQ ID NO: 1182059 - DNA, 15 bp, Homo sapiens
atggctgcaagttgc

SEQ ID NO: 1182060 - DNA, 15 bp, Homo sapiens
tatggctgcaagttg

SEQ ID NO: 1182061 - DNA, 15 bp, Homo sapiens
ctatggctgcaagtt

SEQ ID NO: 1182062 - DNA, 15 bp, Homo sapiens
gctatggctgcaagt

SEQ ID NO: 1182063 - DNA, 15 bp, Homo sapiens
tgctatggctgcaag

SEQ ID NO: 1182064 - DNA, 15 bp, Homo sapiens
ttgctatggctgcaa

SEQ ID NO: 1182065 - DNA, 15 bp, Homo sapiens
attgctatggctgca

SEQ ID NO: 1182066 - DNA, 15 bp, Homo sapiens
cattgctatggctgc

SEQ ID NO: 1182067 - DNA, 15 bp, Homo sapiens
acattgctatggctg

SEQ ID NO: 1182068 - DNA, 15 bp, Homo sapiens
gacattgctatggct

SEQ ID NO: 1182069 - DNA, 15 bp, Homo sapiens
tgacattgctatggc

SEQ ID NO: 1182070 - DNA, 15 bp, Homo sapiens
gtgacattgctatgg

SEQ ID NO: 1182071 - DNA, 15 bp, Homo sapiens
agtgacattgctatg

SEQ ID NO: 1182072 - DNA, 15 bp, Homo sapiens
aagtgacattgctat

SEQ ID NO: 1182073 - DNA, 15 bp, Homo sapiens
aaagtgacattgcta

SEQ ID NO: 1182074 - DNA, 15 bp, Homo sapiens
caaagtgacattgct

SEQ ID NO: 1182075 - DNA, 15 bp, Homo sapiens
acaaagtgacattgc

SEQ ID NO: 1182076 - DNA, 15 bp, Homo sapiens
aacaaagtgacattg

SEQ ID NO: 1182077 - DNA, 15 bp, Homo sapiens
taacaaagtgacatt

SEQ ID NO: 1182078 - DNA, 15 bp, Homo sapiens
ttaacaaagtgacat

SEQ ID NO: 1182079 - DNA, 15 bp, Homo sapiens
gttaacaaagtgaca

SEQ ID NO: 1182080 - DNA, 15 bp, Homo sapiens
agttaacaaagtgac

SEQ ID NO: 1182081 - DNA, 15 bp, Homo sapiens
cagttaacaaagtga

SEQ ID NO: 1182082 - DNA, 15 bp, Homo sapiens
gcagttaacaaagtg

SEQ ID NO: 1182083 - DNA, 15 bp, Homo sapiens
tgcagttaacaaagt

SEQ ID NO: 1182084 - DNA, 15 bp, Homo sapiens
gtgcagttaacaaag

SEQ ID NO: 1182085 - DNA, 15 bp, Homo sapiens
agtgcagttaacaaa

SEQ ID NO: 1182086 - DNA, 15 bp, Homo sapiens
aagtgcagttaacaa

SEQ ID NO: 1182087 - DNA, 15 bp, Homo sapiens
caagtgcagttaaca

SEQ ID NO: 1182088 - DNA, 15 bp, Homo sapiens
gcaagtgcagttaac

SEQ ID NO: 1182089 - DNA, 15 bp, Homo sapiens
agcaagtgcagttaa

SEQ ID NO: 1182090 - DNA, 15 bp, Homo sapiens
cagcaagtgcagtta

SEQ ID NO: 1182091 - DNA, 15 bp, Homo sapiens
acagcaagtgcagtt

SEQ ID NO: 1182092 - DNA, 15 bp, Homo sapiens
cacagcaagtgcagt

SEQ ID NO: 1182093 - DNA, 15 bp, Homo sapiens
gcacagcaagtgcag

SEQ ID NO: 1182094 - DNA, 15 bp, Homo sapiens
tgcacagcaagtgca

SEQ ID NO: 1182095 - DNA, 15 bp, Homo sapiens
atgcacagcaagtgc

SEQ ID NO: 1182096 - DNA, 15 bp, Homo sapiens
aatgcacagcaagtg

SEQ ID NO: 1182097 - DNA, 15 bp, Homo sapiens
gaatgcacagcaagt

SEQ ID NO: 1182098 - DNA, 15 bp, Homo sapiens
tgaatgcacagcaag

SEQ ID NO: 1182099 - DNA, 15 bp, Homo sapiens
ttgaatgcacagcaa

SEQ ID NO: 1182100 - DNA, 15 bp, Homo sapiens
gttgaatgcacagca

SEQ ID NO: 1182101 - DNA, 15 bp, Homo sapiens
agttgaatgcacagc

SEQ ID NO: 1182102 - DNA, 15 bp, Homo sapiens
tagttgaatgcacag

SEQ ID NO: 1182103 - DNA, 15 bp, Homo sapiens
atagttgaatgcaca

SEQ ID NO: 1182104 - DNA, 15 bp, Homo sapiens
aatagttgaatgcac

SEQ ID NO: 1182105 - DNA, 15 bp, Homo sapiens
caatagttgaatgca

SEQ ID NO: 1182106 - DNA, 15 bp, Homo sapiens
tcaatagttgaatgc

SEQ ID NO: 1182107 - DNA, 15 bp, Homo sapiens
ctcaatagttgaatg

SEQ ID NO: 1182108 - DNA, 15 bp, Homo sapiens
tctcaatagttgaat

SEQ ID NO: 1182109 - DNA, 15 bp, Homo sapiens
ttctcaatagttgaa

SEQ ID NO: 1182110 - DNA, 15 bp, Homo sapiens
cttctcaatagttga

SEQ ID NO: 1182111 - DNA, 15 bp, Homo sapiens
gcttctcaatagttg

SEQ ID NO: 1182112 - DNA, 15 bp, Homo sapiens
ggcttctcaatagtt

SEQ ID NO: 1182113 - DNA, 15 bp, Homo sapiens
tggcttctcaatagt

SEQ ID NO: 1182114 - DNA, 15 bp, Homo sapiens
ttggcttctcaatag

SEQ ID NO: 1182115 - DNA, 15 bp, Homo sapiens
tttggcttctcaata

SEQ ID NO: 1182116 - DNA, 15 bp, Homo sapiens
gtttggcttctcaat

SEQ ID NO: 1182117 - DNA, 15 bp, Homo sapiens
tgtttggcttctcaa

SEQ ID NO: 1182118 - DNA, 15 bp, Homo sapiens
ctgtttggcttctca

SEQ ID NO: 1182119 - DNA, 15 bp, Homo sapiens
gctgtttggcttctc

SEQ ID NO: 1182120 - DNA, 15 bp, Homo sapiens
agctgtttggcttct

SEQ ID NO: 1182121 - DNA, 15 bp, Homo sapiens
aagctgtttggcttc

SEQ ID NO: 1182122 - DNA, 15 bp, Homo sapiens
aaagctgtttggctt

SEQ ID NO: 1182123 - DNA, 15 bp, Homo sapiens
taaagctgtttggct

SEQ ID NO: 1182124 - DNA, 15 bp, Homo sapiens
ttaaagctgtttggc

SEQ ID NO: 1182125 - DNA, 15 bp, Homo sapiens
cttaaagctgtttgg

SEQ ID NO: 1182126 - DNA, 15 bp, Homo sapiens
acttaaagctgtttg

SEQ ID NO: 1182127 - DNA, 15 bp, Homo sapiens
aaacttaaagctgtt

SEQ ID NO: 1182128 - DNA, 15 bp, Homo sapiens
caaacttaaagctgt

SEQ ID NO: 1182129 - DNA, 15 bp, Homo sapiens
tcaaacttaaagctg

SEQ ID NO: 1182130 - DNA, 15 bp, Homo sapiens
ctcaaacttaaagct

SEQ ID NO: 1182131 - DNA, 15 bp, Homo sapiens
actcaaacttaaagc

SEQ ID NO: 1182132 - DNA, 15 bp, Homo sapiens
gactcaaacttaaag

SEQ ID NO: 1182133 - DNA, 15 bp, Homo sapiens
tgactcaaacttaaa

SEQ ID NO: 1182134 - DNA, 15 bp, Homo sapiens
ctgactcaaacttaa

SEQ ID NO: 1182135 - DNA, 15 bp, Homo sapiens
tctgactcaaactta

SEQ ID NO: 1182136 - DNA, 15 bp, Homo sapiens
ttctgactcaaactt

SEQ ID NO: 1182137 - DNA, 15 bp, Homo sapiens
cttctgactcaaact

SEQ ID NO: 1182138 - DNA, 15 bp, Homo sapiens
acttctgactcaaac

SEQ ID NO: 1182139 - DNA, 15 bp, Homo sapiens
aacttctgactcaaa

SEQ ID NO: 1182140 - DNA, 15 bp, Homo sapiens
gaacttctgactcaa

SEQ ID NO: 1182141 - DNA, 15 bp, Homo sapiens
agaacttctgactca

SEQ ID NO: 1182142 - DNA, 15 bp, Homo sapiens
tagaacttctgactc

SEQ ID NO: 1182143 - DNA, 15 bp, Homo sapiens
ctagaacttctgact

SEQ ID NO: 1182144 - DNA, 15 bp, Homo sapiens
cctagaacttctgac

SEQ ID NO: 1182145 - DNA, 15 bp, Homo sapiens
gcctagaacttctga

SEQ ID NO: 1182146 - DNA, 15 bp, Homo sapiens
tgcctagaacttctg

SEQ ID NO: 1182147 - DNA, 15 bp, Homo sapiens
ctgcctagaacttct

SEQ ID NO: 1182148 - DNA, 15 bp, Homo sapiens
cctgcctagaacttc

SEQ ID NO: 1182149 - DNA, 15 bp, Homo sapiens
tcctgcctagaactt

SEQ ID NO: 1182150 - DNA, 15 bp, Homo sapiens
atcctgcctagaact

SEQ ID NO: 1182151 - DNA, 15 bp, Homo sapiens
gatcctgcctagaac

SEQ ID NO: 1182152 - DNA, 15 bp, Homo sapiens
tgatcctgcctagaa

SEQ ID NO: 1182153 - DNA, 15 bp, Homo sapiens
atgatcctgcctaga

SEQ ID NO: 1182154 - DNA, 15 bp, Homo sapiens
aatgatcctgcctag

SEQ ID NO: 1182155 - DNA, 15 bp, Homo sapiens
gaatgatcctgccta

SEQ ID NO: 1182156 - DNA, 15 bp, Homo sapiens
agaatgatcctgcct

SEQ ID NO: 1182157 - DNA, 15 bp, Homo sapiens
aagaatgatcctgcc

SEQ ID NO: 1182158 - DNA, 15 bp, Homo sapiens
caagaatgatcctgc

SEQ ID NO: 1182159 - DNA, 15 bp, Homo sapiens
acaagaatgatcctg

SEQ ID NO: 1182160 - DNA, 15 bp, Homo sapiens
cacaagaatgatcct

SEQ ID NO: 1182161 - DNA, 15 bp, Homo sapiens
tcacaagaatgatcc

SEQ ID NO: 1182162 - DNA, 15 bp, Homo sapiens
ttcacaagaatgatc

SEQ ID NO: 1182163 - DNA, 15 bp, Homo sapiens
tttcacaagaatgat

SEQ ID NO: 1182164 - DNA, 15 bp, Homo sapiens
gtttcacaagaatga

SEQ ID NO: 1182165 - DNA, 15 bp, Homo sapiens
ggtttcacaagaatg

SEQ ID NO: 1182166 - DNA, 15 bp, Homo sapiens
aggtttcacaagaat

SEQ ID NO: 1182167 - DNA, 15 bp, Homo sapiens
caggtttcacaagaa

SEQ ID NO: 1182168 - DNA, 15 bp, Homo sapiens
tcaggtttcacaaga

SEQ ID NO: 1182169 - DNA, 15 bp, Homo sapiens
ttcaggtttcacaag

SEQ ID NO: 1182170 - DNA, 15 bp, Homo sapiens
gttcaggtttcacaa

SEQ ID NO: 1182171 - DNA, 15 bp, Homo sapiens
ggttcaggtttcaca

SEQ ID NO: 1182172 - DNA, 15 bp, Homo sapiens
gggttcaggtttcac

SEQ ID NO: 1182173 - DNA, 15 bp, Homo sapiens
agggttcaggtttca

SEQ ID NO: 1182174 - DNA, 15 bp, Homo sapiens
aagggttcaggtttc

SEQ ID NO: 1182175 - DNA, 15 bp, Homo sapiens
taagggttcaggttt

SEQ ID NO: 1182176 - DNA, 15 bp, Homo sapiens
ctaagggttcaggtt

SEQ ID NO: 1182177 - DNA, 15 bp, Homo sapiens
actaagggttcaggt

SEQ ID NO: 1182178 - DNA, 15 bp, Homo sapiens
aactaagggttcagg

SEQ ID NO: 1182179 - DNA, 15 bp, Homo sapiens
gaactaagggttcag

SEQ ID NO: 1182180 - DNA, 15 bp, Homo sapiens
agaactaagggttca

SEQ ID NO: 1182181 - DNA, 15 bp, Homo sapiens
aagaactaagggttc

SEQ ID NO: 1182182 - DNA, 15 bp, Homo sapiens
gaagaactaagggtt

SEQ ID NO: 1182183 - DNA, 15 bp, Homo sapiens
agaagaactaagggt

SEQ ID NO: 1182184 - DNA, 15 bp, Homo sapiens
tagaagaactaaggg

SEQ ID NO: 1182185 - DNA, 15 bp, Homo sapiens
ttagaagaactaagg

SEQ ID NO: 1182186 - DNA, 15 bp, Homo sapiens
tttagaagaactaag

SEQ ID NO: 1182187 - DNA, 15 bp, Homo sapiens
ttttagaagaactaa

SEQ ID NO: 1182188 - DNA, 15 bp, Homo sapiens
tttttagaagaacta

SEQ ID NO: 1182189 - DNA, 15 bp, Homo sapiens
ctttttagaagaact

SEQ ID NO: 1182190 - DNA, 15 bp, Homo sapiens
actttttagaagaac

SEQ ID NO: 1182191 - DNA, 15 bp, Homo sapiens
gactttttagaagaa

SEQ ID NO: 1182192 - DNA, 15 bp, Homo sapiens
tgactttttagaaga

SEQ ID NO: 1182193 - DNA, 15 bp, Homo sapiens
ttgactttttagaag

SEQ ID NO: 1182194 - DNA, 15 bp, Homo sapiens
tttgactttttagaa

SEQ ID NO: 1182195 - DNA, 15 bp, Homo sapiens
ttttgactttttaga

SEQ ID NO: 1182196 - DNA, 15 bp, Homo sapiens
attttgactttttag

SEQ ID NO: 1182197 - DNA, 15 bp, Homo sapiens
tattttgacttttta

SEQ ID NO: 1182198 - DNA, 15 bp, Homo sapiens
gtattttgacttttt

SEQ ID NO: 1182199 - DNA, 15 bp, Homo sapiens
tgtattttgactttt

SEQ ID NO: 1182200 - DNA, 15 bp, Homo sapiens
atgtattttgacttt

SEQ ID NO: 1182201 - DNA, 15 bp, Homo sapiens
aatgtattttgactt

SEQ ID NO: 1182202 - DNA, 15 bp, Homo sapiens
aaatgtattttgact

SEQ ID NO: 1182203 - DNA, 15 bp, Homo sapiens
caaatgtattttgac

SEQ ID NO: 1182204 - DNA, 15 bp, Homo sapiens
ccaaatgtattttga

SEQ ID NO: 1182205 - DNA, 15 bp, Homo sapiens
tccaaatgtattttg

SEQ ID NO: 1182206 - DNA, 15 bp, Homo sapiens
atccaaatgtatttt

SEQ ID NO: 1182207 - DNA, 15 bp, Homo sapiens
gatccaaatgtattt

SEQ ID NO: 1182208 - DNA, 15 bp, Homo sapiens
agatccaaatgtatt

SEQ ID NO: 1182209 - DNA, 15 bp, Homo sapiens
aagatccaaatgtat

SEQ ID NO: 1182210 - DNA, 15 bp, Homo sapiens
caagatccaaatgta

SEQ ID NO: 1182211 - DNA, 15 bp, Homo sapiens
gcaagatccaaatgt

SEQ ID NO: 1182212 - DNA, 15 bp, Homo sapiens
tgcaagatccaaatg

SEQ ID NO: 1182213 - DNA, 15 bp, Homo sapiens
ttgcaagatccaaat

SEQ ID NO: 1182214 - DNA, 15 bp, Homo sapiens
tttgcaagatccaaa

SEQ ID NO: 1182215 - DNA, 15 bp, Homo sapiens
atttgcaagatccaa

SEQ ID NO: 1182216 - DNA, 15 bp, Homo sapiens
gatttgcaagatcca

SEQ ID NO: 1182217 - DNA, 15 bp, Homo sapiens
cgatttgcaagatcc

SEQ ID NO: 1182218 - DNA, 15 bp, Homo sapiens
tcgatttgcaagatc

SEQ ID NO: 1182219 - DNA, 15 bp, Homo sapiens
ctcgatttgcaagat

SEQ ID NO: 1182220 - DNA, 15 bp, Homo sapiens
tctcgatttgcaaga

SEQ ID NO: 1182221 - DNA, 15 bp, Homo sapiens
ttctcgatttgcaag

SEQ ID NO: 1182222 - DNA, 15 bp, Homo sapiens
attctcgatttgcaa

SEQ ID NO: 1182223 - DNA, 15 bp, Homo sapiens
cattctcgatttgca

SEQ ID NO: 1182224 - DNA, 15 bp, Homo sapiens
acattctcgatttgc

SEQ ID NO: 1182225 - DNA, 15 bp, Homo sapiens
gacattctcgatttg

SEQ ID NO: 1182226 - DNA, 15 bp, Homo sapiens
tgacattctcgattt

SEQ ID NO: 1182227 - DNA, 15 bp, Homo sapiens
ctgacattctcgatt

SEQ ID NO: 1182228 - DNA, 15 bp, Homo sapiens
tctgacattctcgat

SEQ ID NO: 1182229 - DNA, 15 bp, Homo sapiens
ctctgacattctcga

SEQ ID NO: 1182230 - DNA, 15 bp, Homo sapiens
gctctgacattctcg

SEQ ID NO: 1182231 - DNA, 15 bp, Homo sapiens
ggctctgacattctc

SEQ ID NO: 1182232 - DNA, 15 bp, Homo sapiens
tggctctgacattct

SEQ ID NO: 1182233 - DNA, 15 bp, Homo sapiens
ttggctctgacattc

SEQ ID NO: 1182234 - DNA, 15 bp, Homo sapiens
attggctctgacatt

SEQ ID NO: 1182235 - DNA, 15 bp, Homo sapiens
tattggctctgacat

SEQ ID NO: 1182236 - DNA, 15 bp, Homo sapiens
atattggctctgaca

SEQ ID NO: 1182237 - DNA, 15 bp, Homo sapiens
aatattggctctgac

SEQ ID NO: 1182238 - DNA, 15 bp, Homo sapiens
aaatattggctctga

SEQ ID NO: 1182239 - DNA, 15 bp, Homo sapiens
aaaatattggctctg

SEQ ID NO: 1182240 - DNA, 15 bp, Homo sapiens
gaaaatattggctct

SEQ ID NO: 1182241 - DNA, 15 bp, Homo sapiens
ggaaaatattggctc

SEQ ID NO: 1182242 - DNA, 15 bp, Homo sapiens
aggaaaatattggct

SEQ ID NO: 1182243 - DNA, 15 bp, Homo sapiens
gaggaaaatattggc

SEQ ID NO: 1182244 - DNA, 15 bp, Homo sapiens
agaggaaaatattgg

SEQ ID NO: 1182245 - DNA, 15 bp, Homo sapiens
aagaggaaaatattg

SEQ ID NO: 1182246 - DNA, 15 bp, Homo sapiens
aaagaggaaaatatt

SEQ ID NO: 1182247 - DNA, 15 bp, Homo sapiens
taaagaggaaaatat

SEQ ID NO: 1182248 - DNA, 15 bp, Homo sapiens
ttaaagaggaaaata

SEQ ID NO: 1182249 - DNA, 15 bp, Homo sapiens
attaaagaggaaaat

SEQ ID NO: 1182250 - DNA, 15 bp, Homo sapiens
gattaaagaggaaaa

SEQ ID NO: 1182251 - DNA, 15 bp, Homo sapiens
tgattaaagaggaaa

SEQ ID NO: 1182252 - DNA, 15 bp, Homo sapiens
ttgattaaagaggaa

SEQ ID NO: 1182253 - DNA, 15 bp, Homo sapiens
tttgattaaagagga

SEQ ID NO: 1182254 - DNA, 15 bp, Homo sapiens
ttttgattaaagagg

SEQ ID NO: 1182255 - DNA, 15 bp, Homo sapiens
gttttgattaaagag

SEQ ID NO: 1182256 - DNA, 15 bp, Homo sapiens
ggttttgattaaaga

SEQ ID NO: 1182257 - DNA, 15 bp, Homo sapiens
gggttttgattaaag

SEQ ID NO: 1182258 - DNA, 15 bp, Homo sapiens
tgggttttgattaaa

SEQ ID NO: 1182259 - DNA, 15 bp, Homo sapiens
ctgggttttgattaa

SEQ ID NO: 1182260 - DNA, 15 bp, Homo sapiens
cctgggttttgatta

SEQ ID NO: 1182261 - DNA, 15 bp, Homo sapiens
tcctgggttttgatt

SEQ ID NO: 1182262 - DNA, 15 bp, Homo sapiens
ttcctgggttttgat

SEQ ID NO: 1182263 - DNA, 15 bp, Homo sapiens
attcctgggttttga

SEQ ID NO: 1182264 - DNA, 15 bp, Homo sapiens
cattcctgggttttg

SEQ ID NO: 1182265 - DNA, 15 bp, Homo sapiens
ccattcctgggtttt

SEQ ID NO: 1182266 - DNA, 15 bp, Homo sapiens
gccattcctgggttt

SEQ ID NO: 1182267 - DNA, 15 bp, Homo sapiens
tgccattcctgggtt

SEQ ID NO: 1182268 - DNA, 15 bp, Homo sapiens
gtgccattcctgggt

SEQ ID NO: 1182269 - DNA, 15 bp, Homo sapiens
cgtgccattcctggg

SEQ ID NO: 1182270 - DNA, 15 bp, Homo sapiens
ccgtgccattcctgg

SEQ ID NO: 1182271 - DNA, 15 bp, Homo sapiens
accgtgccattcctg

SEQ ID NO: 1182272 - DNA, 15 bp, Homo sapiens
caccgtgccattcct

SEQ ID NO: 1182273 - DNA, 15 bp, Homo sapiens
ccaccgtgccattcc

SEQ ID NO: 1182274 - DNA, 15 bp, Homo sapiens
cccaccgtgccattc

SEQ ID NO: 1182275 - DNA, 15 bp, Homo sapiens
acccaccgtgccatt

SEQ ID NO: 1182276 - DNA, 15 bp, Homo sapiens
cacccaccgtgccat

SEQ ID NO: 1182277 - DNA, 15 bp, Homo sapiens
ccacccaccgtgcca

SEQ ID NO: 1182278 - DNA, 15 bp, Homo sapiens
gccacccaccgtgcc

SEQ ID NO: 1182279 - DNA, 15 bp, Homo sapiens
agccacccaccgtgc

SEQ ID NO: 1182280 - DNA, 15 bp, Homo sapiens
cagccacccaccgtg

SEQ ID NO: 1182281 - DNA, 15 bp, Homo sapiens
ccagccacccaccgt

SEQ ID NO: 1182282 - DNA, 15 bp, Homo sapiens
cccagccacccaccg

SEQ ID NO: 1182283 - DNA, 15 bp, Homo sapiens
ccccagccacccacc

SEQ ID NO: 1182284 - DNA, 15 bp, Homo sapiens
gccccagccacccac

SEQ ID NO: 1182285 - DNA, 15 bp, Homo sapiens
ggccccagccaccca

SEQ ID NO: 1182286 - DNA, 15 bp, Homo sapiens
tggccccagccaccc

SEQ ID NO: 1182287 - DNA, 15 bp, Homo sapiens
atggccccagccacc

SEQ ID NO: 1182288 - DNA, 15 bp, Homo sapiens
catggccccagccac

SEQ ID NO: 1182289 - DNA, 15 bp, Homo sapiens
acatggccccagcca

SEQ ID NO: 1182290 - DNA, 15 bp, Homo sapiens
gacatggccccagcc

SEQ ID NO: 1182291 - DNA, 15 bp, Homo sapiens
ggacatggccccagc

SEQ ID NO: 1182292 - DNA, 15 bp, Homo sapiens
aggacatggccccag

SEQ ID NO: 1182293 - DNA, 15 bp, Homo sapiens
gaggacatggcccca

SEQ ID NO: 1182294 - DNA, 15 bp, Homo sapiens
ggaggacatggcccc

SEQ ID NO: 1182295 - DNA, 15 bp, Homo sapiens
gggaggacatggccc

SEQ ID NO: 1182296 - DNA, 15 bp, Homo sapiens
agggaggacatggcc

SEQ ID NO: 1182297 - DNA, 15 bp, Homo sapiens
aagggaggacatggc

SEQ ID NO: 1182298 - DNA, 15 bp, Homo sapiens
gaagggaggacatgg

SEQ ID NO: 1182299 - DNA, 15 bp, Homo sapiens
agaagggaggacatg

SEQ ID NO: 1182300 - DNA, 15 bp, Homo sapiens
aagaagggaggacat

SEQ ID NO: 1182301 - DNA, 15 bp, Homo sapiens
gaagaagggaggaca

SEQ ID NO: 1182302 - DNA, 15 bp, Homo sapiens
ggaagaagggaggac

SEQ ID NO: 1182303 - DNA, 15 bp, Homo sapiens
gggaagaagggagga

SEQ ID NO: 1182304 - DNA, 15 bp, Homo sapiens
agggaagaagggagg

SEQ ID NO: 1182305 - DNA, 15 bp, Homo sapiens
aagggaagaagggag

SEQ ID NO: 1182306 - DNA, 15 bp, Homo sapiens
aaagggaagaaggga

SEQ ID NO: 1182307 - DNA, 15 bp, Homo sapiens
gaaagggaagaaggg

SEQ ID NO: 1182308 - DNA, 15 bp, Homo sapiens
ggaaagggaagaagg

SEQ ID NO: 1182309 - DNA, 15 bp, Homo sapiens
gggaaagggaagaag

SEQ ID NO: 1182310 - DNA, 15 bp, Homo sapiens
agggaaagggaagaa

SEQ ID NO: 1182311 - DNA, 15 bp, Homo sapiens
aagggaaagggaaga

SEQ ID NO: 1182312 - DNA, 15 bp, Homo sapiens
gaagggaaagggaag

SEQ ID NO: 1182313 - DNA, 15 bp, Homo sapiens
ggaagggaaagggaa

SEQ ID NO: 1182314 - DNA, 15 bp, Homo sapiens
gggaagggaaaggga

SEQ ID NO: 1182315 - DNA, 15 bp, Homo sapiens
ggggaagggaaaggg

SEQ ID NO: 1182316 - DNA, 15 bp, Homo sapiens
gggggaagggaaagg

SEQ ID NO: 1182317 - DNA, 15 bp, Homo sapiens
tgggggaagggaaag

SEQ ID NO: 1182318 - DNA, 15 bp, Homo sapiens
gtgggggaagggaaa

SEQ ID NO: 1182319 - DNA, 15 bp, Homo sapiens
tgtgggggaagggaa

SEQ ID NO: 1182320 - DNA, 15 bp, Homo sapiens
gtgtgggggaaggga

SEQ ID NO: 1182321 - DNA, 15 bp, Homo sapiens
agtgtgggggaaggg

SEQ ID NO: 1182322 - DNA, 15 bp, Homo sapiens
aagtgtgggggaagg

SEQ ID NO: 1182323 - DNA, 15 bp, Homo sapiens
gaagtgtgggggaag

SEQ ID NO: 1182324 - DNA, 15 bp, Homo sapiens
ggaagtgtgggggaa

SEQ ID NO: 1182325 - DNA, 15 bp, Homo sapiens
tggaagtgtggggga

SEQ ID NO: 1182326 - DNA, 15 bp, Homo sapiens
ctggaagtgtggggg

SEQ ID NO: 1182327 - DNA, 15 bp, Homo sapiens
gctggaagtgtgggg

SEQ ID NO: 1182328 - DNA, 15 bp, Homo sapiens
ggctggaagtgtggg

SEQ ID NO: 1182329 - DNA, 15 bp, Homo sapiens
tggctggaagtgtgg

SEQ ID NO: 1182330 - DNA, 15 bp, Homo sapiens
ttggctggaagtgtg

SEQ ID NO: 1182331 - DNA, 15 bp, Homo sapiens
cttggctggaagtgt

SEQ ID NO: 1182332 - DNA, 15 bp, Homo sapiens
tcttggctggaagtg

SEQ ID NO: 1182333 - DNA, 15 bp, Homo sapiens
atcttggctggaagt

SEQ ID NO: 1182334 - DNA, 15 bp, Homo sapiens
aatcttggctggaag

SEQ ID NO: 1182335 - DNA, 15 bp, Homo sapiens
gaatcttggctggaa

SEQ ID NO: 1182336 - DNA, 15 bp, Homo sapiens
agaatcttggctgga

SEQ ID NO: 1182337 - DNA, 15 bp, Homo sapiens
gagaatcttggctgg

SEQ ID NO: 1182338 - DNA, 15 bp, Homo sapiens
ggagaatcttggctg

SEQ ID NO: 1182339 - DNA, 15 bp, Homo sapiens
tggagaatcttggct

SEQ ID NO: 1182340 - DNA, 15 bp, Homo sapiens
ctggagaatcttggc

SEQ ID NO: 1182341 - DNA, 15 bp, Homo sapiens
cctggagaatcttgg

SEQ ID NO: 1182342 - DNA, 15 bp, Homo sapiens
gcctggagaatcttg

SEQ ID NO: 1182343 - DNA, 15 bp, Homo sapiens
agcctggagaatctt

SEQ ID NO: 1182344 - DNA, 15 bp, Homo sapiens
aagcctggagaatct

SEQ ID NO: 1182345 - DNA, 15 bp, Homo sapiens
caagcctggagaatc

SEQ ID NO: 1182346 - DNA, 15 bp, Homo sapiens
tcaagcctggagaat

SEQ ID NO: 1182347 - DNA, 15 bp, Homo sapiens
ctcaagcctggagaa

SEQ ID NO: 1182348 - DNA, 15 bp, Homo sapiens
tctcaagcctggaga

SEQ ID NO: 1182349 - DNA, 15 bp, Homo sapiens
ctctcaagcctggag

SEQ ID NO: 1182350 - DNA, 15 bp, Homo sapiens
tctctcaagcctgga

SEQ ID NO: 1182351 - DNA, 15 bp, Homo sapiens
ctctctcaagcctgg

SEQ ID NO: 1182352 - DNA, 15 bp, Homo sapiens
gctctctcaagcctg

SEQ ID NO: 1182353 - DNA, 15 bp, Homo sapiens
agctctctcaagcct

SEQ ID NO: 1182354 - DNA, 15 bp, Homo sapiens
cagctctctcaagcc

SEQ ID NO: 1182355 - DNA, 15 bp, Homo sapiens
tcagctctctcaagc

SEQ ID NO: 1182356 - DNA, 15 bp, Homo sapiens
atcagctctctcaag

SEQ ID NO: 1182357 - DNA, 15 bp, Homo sapiens
catcagctctctcaa

SEQ ID NO: 1182358 - DNA, 15 bp, Homo sapiens
cacatcagctctctc

SEQ ID NO: 1182359 - DNA, 15 bp, Homo sapiens
ccacatcagctctct

SEQ ID NO: 1182360 - DNA, 15 bp, Homo sapiens
tccacatcagctctc

SEQ ID NO: 1182361 - DNA, 15 bp, Homo sapiens
ttccacatcagctct

SEQ ID NO: 1182362 - DNA, 15 bp, Homo sapiens
tttccacatcagctc

SEQ ID NO: 1182363 - DNA, 15 bp, Homo sapiens
ttttccacatcagct

SEQ ID NO: 1182364 - DNA, 15 bp, Homo sapiens
cttttccacatcagc

SEQ ID NO: 1182365 - DNA, 15 bp, Homo sapiens
gcttttccacatcag

SEQ ID NO: 1182366 - DNA, 15 bp, Homo sapiens
tgcttttccacatca

SEQ ID NO: 1182367 - DNA, 15 bp, Homo sapiens
ctgcttttccacatc

SEQ ID NO: 1182368 - DNA, 15 bp, Homo sapiens
gctgcttttccacat

SEQ ID NO: 1182369 - DNA, 15 bp, Homo sapiens
agctgcttttccaca

SEQ ID NO: 1182370 - DNA, 15 bp, Homo sapiens
gagctgcttttccac

SEQ ID NO: 1182371 - DNA, 15 bp, Homo sapiens
agagctgcttttcca

SEQ ID NO: 1182372 - DNA, 15 bp, Homo sapiens
cagagctgcttttcc

SEQ ID NO: 1182373 - DNA, 15 bp, Homo sapiens
ccagagctgcttttc

SEQ ID NO: 1182374 - DNA, 15 bp, Homo sapiens
gccagagctgctttt

SEQ ID NO: 1182375 - DNA, 15 bp, Homo sapiens
ggccagagctgcttt

SEQ ID NO: 1182376 - DNA, 15 bp, Homo sapiens
gggccagagctgctt

SEQ ID NO: 1182377 - DNA, 15 bp, Homo sapiens
agggccagagctgct

SEQ ID NO: 1182378 - DNA, 15 bp, Homo sapiens
aagggccagagctgc

SEQ ID NO: 1182379 - DNA, 15 bp, Homo sapiens
caagggccagagctg

SEQ ID NO: 1182380 - DNA, 15 bp, Homo sapiens
acaagggccagagct

SEQ ID NO: 1182381 - DNA, 15 bp, Homo sapiens
cacaagggccagagc

SEQ ID NO: 1182382 - DNA, 15 bp, Homo sapiens
acacaagggccagag

SEQ ID NO: 1182383 - DNA, 15 bp, Homo sapiens
cacacaagggccaga

SEQ ID NO: 1182384 - DNA, 15 bp, Homo sapiens
acacacaagggccag

SEQ ID NO: 1182385 - DNA, 15 bp, Homo sapiens
aacacacaagggcca

SEQ ID NO: 1182386 - DNA, 15 bp, Homo sapiens
gaacacacaagggcc

SEQ ID NO: 1182387 - DNA, 15 bp, Homo sapiens
tgaacacacaagggc

SEQ ID NO: 1182388 - DNA, 15 bp, Homo sapiens
ctgaacacacaaggg

SEQ ID NO: 1182389 - DNA, 15 bp, Homo sapiens
gctgaacacacaagg

SEQ ID NO: 1182390 - DNA, 15 bp, Homo sapiens
ggctgaacacacaag

SEQ ID NO: 1182391 - DNA, 15 bp, Homo sapiens
gggctgaacacacaa

SEQ ID NO: 1182392 - DNA, 15 bp, Homo sapiens
agggctgaacacaca

SEQ ID NO: 1182393 - DNA, 15 bp, Homo sapiens
cagggctgaacacac

SEQ ID NO: 1182394 - DNA, 15 bp, Homo sapiens
tcagggctgaacaca

SEQ ID NO: 1182395 - DNA, 15 bp, Homo sapiens
ttcagggctgaacac

SEQ ID NO: 1182396 - DNA, 15 bp, Homo sapiens
gttcagggctgaaca

SEQ ID NO: 1182397 - DNA, 15 bp, Homo sapiens
ggttcagggctgaac

SEQ ID NO: 1182398 - DNA, 15 bp, Homo sapiens
aggttcagggctgaa

SEQ ID NO: 1182399 - DNA, 15 bp, Homo sapiens
gaggttcagggctga

SEQ ID NO: 1182400 - DNA, 15 bp, Homo sapiens
agaggttcagggctg

SEQ ID NO: 1182401 - DNA, 15 bp, Homo sapiens
gagaggttcagggct

SEQ ID NO: 1182402 - DNA, 15 bp, Homo sapiens
agagaggttcagggc

SEQ ID NO: 1182403 - DNA, 15 bp, Homo sapiens
cagagaggttcaggg

SEQ ID NO: 1182404 - DNA, 15 bp, Homo sapiens
gcagagaggttcagg

SEQ ID NO: 1182405 - DNA, 15 bp, Homo sapiens
ggcagagaggttcag

SEQ ID NO: 1182406 - DNA, 15 bp, Homo sapiens
tggcagagaggttca

SEQ ID NO: 1182407 - DNA, 15 bp, Homo sapiens
ttggcagagaggttc

SEQ ID NO: 1182408 - DNA, 15 bp, Homo sapiens
cttggcagagaggtt

SEQ ID NO: 1182409 - DNA, 15 bp, Homo sapiens
gcttggcagagaggt

SEQ ID NO: 1182410 - DNA, 15 bp, Homo sapiens
tgcttggcagagagg

SEQ ID NO: 1182411 - DNA, 15 bp, Homo sapiens
gtgcttggcagagag

SEQ ID NO: 1182412 - DNA, 15 bp, Homo sapiens
ggtgcttggcagaga

SEQ ID NO: 1182413 - DNA, 15 bp, Homo sapiens
tggtgcttggcagag

SEQ ID NO: 1182414 - DNA, 15 bp, Homo sapiens
gtggtgcttggcaga

SEQ ID NO: 1182415 - DNA, 15 bp, Homo sapiens
tgtggtgcttggcag

SEQ ID NO: 1182416 - DNA, 15 bp, Homo sapiens
atgtggtgcttggca

SEQ ID NO: 1182417 - DNA, 15 bp, Homo sapiens
aatgtggtgcttggc

SEQ ID NO: 1182418 - DNA, 15 bp, Homo sapiens
taatgtggtgcttgg

SEQ ID NO: 1182419 - DNA, 15 bp, Homo sapiens
ttaatgtggtgcttg

SEQ ID NO: 1182420 - DNA, 15 bp, Homo sapiens
attaatgtggtgctt

SEQ ID NO: 1182421 - DNA, 15 bp, Homo sapiens
cattaatgtggtgct

SEQ ID NO: 1182422 - DNA, 15 bp, Homo sapiens
ccattaatgtggtgc

SEQ ID NO: 1182423 - DNA, 15 bp, Homo sapiens
accattaatgtggtg

SEQ ID NO: 1182424 - DNA, 15 bp, Homo sapiens
caccattaatgtggt

SEQ ID NO: 1182425 - DNA, 15 bp, Homo sapiens
ccaccattaatgtgg

SEQ ID NO: 1182426 - DNA, 15 bp, Homo sapiens
tccaccattaatgtg

SEQ ID NO: 1182427 - DNA, 15 bp, Homo sapiens
gtccaccattaatgt

SEQ ID NO: 1182428 - DNA, 15 bp, Homo sapiens
tgtccaccattaatg

SEQ ID NO: 1182429 - DNA, 15 bp, Homo sapiens
gtgtccaccattaat

SEQ ID NO: 1182430 - DNA, 15 bp, Homo sapiens
agtgtccaccattaa

SEQ ID NO: 1182431 - DNA, 15 bp, Homo sapiens
tagtgtccaccatta

SEQ ID NO: 1182432 - DNA, 15 bp, Homo sapiens
ttagtgtccaccatt

SEQ ID NO: 1182433 - DNA, 15 bp, Homo sapiens
gttagtgtccaccat

SEQ ID NO: 1182434 - DNA, 15 bp, Homo sapiens
cgttagtgtccacca

SEQ ID NO: 1182435 - DNA, 15 bp, Homo sapiens
gcgttagtgtccacc

SEQ ID NO: 1182436 - DNA, 15 bp, Homo sapiens
tgcgttagtgtccac

SEQ ID NO: 1182437 - DNA, 15 bp, Homo sapiens
atgcgttagtgtcca

SEQ ID NO: 1182438 - DNA, 15 bp, Homo sapiens
aatgcgttagtgtcc

SEQ ID NO: 1182439 - DNA, 15 bp, Homo sapiens
caatgcgttagtgtc

SEQ ID NO: 1182440 - DNA, 15 bp, Homo sapiens
acaatgcgttagtgt

SEQ ID NO: 1182441 - DNA, 15 bp, Homo sapiens
cacaatgcgttagtg

SEQ ID NO: 1182442 - DNA, 15 bp, Homo sapiens
tcacaatgcgttagt

SEQ ID NO: 1182443 - DNA, 15 bp, Homo sapiens
atcacaatgcgttag

SEQ ID NO: 1182444 - DNA, 15 bp, Homo sapiens
tatcacaatgcgtta

SEQ ID NO: 1182445 - DNA, 15 bp, Homo sapiens
atatcacaatgcgtt

SEQ ID NO: 1182446 - DNA, 15 bp, Homo sapiens
tatatcacaatgcgt

SEQ ID NO: 1182447 - DNA, 15 bp, Homo sapiens
ctatatcacaatgcg

SEQ ID NO: 1182448 - DNA, 15 bp, Homo sapiens
tctatatcacaatgc

SEQ ID NO: 1182449 - DNA, 15 bp, Homo sapiens
ctctatatcacaatg

SEQ ID NO: 1182450 - DNA, 15 bp, Homo sapiens
cctctatatcacaat

SEQ ID NO: 1182451 - DNA, 15 bp, Homo sapiens
gcctctatatcacaa

SEQ ID NO: 1182452 - DNA, 15 bp, Homo sapiens
tgcctctatatcaca

SEQ ID NO: 1182453 - DNA, 15 bp, Homo sapiens
atgcctctatatcac

SEQ ID NO: 1182454 - DNA, 15 bp, Homo sapiens
catgcctctatatca

SEQ ID NO: 1182455 - DNA, 15 bp, Homo sapiens
tcatgcctctatatc

SEQ ID NO: 1182456 - DNA, 15 bp, Homo sapiens
ctcatgcctctatat

SEQ ID NO: 1182457 - DNA, 15 bp, Homo sapiens
gctcatgcctctata

SEQ ID NO: 1182458 - DNA, 15 bp, Homo sapiens
ggctcatgcctctat

SEQ ID NO: 1182459 - DNA, 15 bp, Homo sapiens
aggctcatgcctcta

SEQ ID NO: 1182460 - DNA, 15 bp, Homo sapiens
caggctcatgcctct

SEQ ID NO: 1182461 - DNA, 15 bp, Homo sapiens
tcaggctcatgcctc

SEQ ID NO: 1182462 - DNA, 15 bp, Homo sapiens
ttcaggctcatgcct

SEQ ID NO: 1182463 - DNA, 15 bp, Homo sapiens
tttcaggctcatgcc

SEQ ID NO: 1182464 - DNA, 15 bp, Homo sapiens
atttcaggctcatgc

SEQ ID NO: 1182465 - DNA, 15 bp, Homo sapiens
gatttcaggctcatg

SEQ ID NO: 1182466 - DNA, 15 bp, Homo sapiens
tgatttcaggctcat

SEQ ID NO: 1182467 - DNA, 15 bp, Homo sapiens
gtgatttcaggctca

SEQ ID NO: 1182468 - DNA, 15 bp, Homo sapiens
ggtgatttcaggctc

SEQ ID NO: 1182469 - DNA, 15 bp, Homo sapiens
tggtgatttcaggct

SEQ ID NO: 1182470 - DNA, 15 bp, Homo sapiens
ttggtgatttcaggc

SEQ ID NO: 1182471 - DNA, 15 bp, Homo sapiens
attggtgatttcagg

SEQ ID NO: 1182472 - DNA, 15 bp, Homo sapiens
aattggtgatttcag

SEQ ID NO: 1182473 - DNA, 15 bp, Homo sapiens
aaattggtgatttca

SEQ ID NO: 1182474 - DNA, 15 bp, Homo sapiens
caaattggtgatttc

SEQ ID NO: 1182475 - DNA, 15 bp, Homo sapiens
acaaattggtgattt

SEQ ID NO: 1182476 - DNA, 15 bp, Homo sapiens
gacaaattggtgatt

SEQ ID NO: 1182477 - DNA, 15 bp, Homo sapiens
ggacaaattggtgat

SEQ ID NO: 1182478 - DNA, 15 bp, Homo sapiens
gggacaaattggtga

SEQ ID NO: 1182479 - DNA, 15 bp, Homo sapiens
ggggacaaattggtg

SEQ ID NO: 1182480 - DNA, 15 bp, Homo sapiens
tggggacaaattggt

SEQ ID NO: 1182481 - DNA, 15 bp, Homo sapiens
ctggggacaaattgg

SEQ ID NO: 1182482 - DNA, 15 bp, Homo sapiens
tctggggacaaattg

SEQ ID NO: 1182483 - DNA, 15 bp, Homo sapiens
gtctggggacaaatt

SEQ ID NO: 1182484 - DNA, 15 bp, Homo sapiens
agtctggggacaaat

SEQ ID NO: 1182485 - DNA, 15 bp, Homo sapiens
cagtctggggacaaa

SEQ ID NO: 1182486 - DNA, 15 bp, Homo sapiens
tcagtctggggacaa

SEQ ID NO: 1182487 - DNA, 15 bp, Homo sapiens
atcagtctggggaca

SEQ ID NO: 1182488 - DNA, 15 bp, Homo sapiens
tatcagtctggggac

SEQ ID NO: 1182489 - DNA, 15 bp, Homo sapiens
ctatcagtctgggga

SEQ ID NO: 1182490 - DNA, 15 bp, Homo sapiens
cctatcagtctgggg

SEQ ID NO: 1182491 - DNA, 15 bp, Homo sapiens
acctatcagtctggg

SEQ ID NO: 1182492 - DNA, 15 bp, Homo sapiens
tacctatcagtctgg

SEQ ID NO: 1182493 - DNA, 15 bp, Homo sapiens
ttacctatcagtctg

SEQ ID NO: 1182494 - DNA, 15 bp, Homo sapiens
tttacctatcagtct

SEQ ID NO: 1182495 - DNA, 15 bp, Homo sapiens
gtttacctatcagtc

SEQ ID NO: 1182496 - DNA, 15 bp, Homo sapiens
tgtttacctatcagt

SEQ ID NO: 1182497 - DNA, 15 bp, Homo sapiens
ctgtttacctatcag

SEQ ID NO: 1182498 - DNA, 15 bp, Homo sapiens
gctgtttacctatca

SEQ ID NO: 1182499 - DNA, 15 bp, Homo sapiens
tgctgtttacctatc

SEQ ID NO: 1182500 - DNA, 15 bp, Homo sapiens
ttgctgtttacctat

SEQ ID NO: 1182501 - DNA, 15 bp, Homo sapiens
tttgctgtttaccta

SEQ ID NO: 1182502 - DNA, 15 bp, Homo sapiens
atttgctgtttacct

SEQ ID NO: 1182503 - DNA, 15 bp, Homo sapiens
tatttgctgtttacc

SEQ ID NO: 1182504 - DNA, 15 bp, Homo sapiens
ctatttgctgtttac

SEQ ID NO: 1182505 - DNA, 15 bp, Homo sapiens
cctatttgctgttta

SEQ ID NO: 1182506 - DNA, 15 bp, Homo sapiens
tcctatttgctgttt

SEQ ID NO: 1182507 - DNA, 15 bp, Homo sapiens
ttcctatttgctgtt

SEQ ID NO: 1182508 - DNA, 15 bp, Homo sapiens
tttcctatttgctgt

SEQ ID NO: 1182509 - DNA, 15 bp, Homo sapiens
ctttcctatttgctg

SEQ ID NO: 1182510 - DNA, 15 bp, Homo sapiens
gctttcctatttgct

SEQ ID NO: 1182511 - DNA, 15 bp, Homo sapiens
ggctttcctatttgc

SEQ ID NO: 1182512 - DNA, 15 bp, Homo sapiens
aggctttcctatttg

SEQ ID NO: 1182513 - DNA, 15 bp, Homo sapiens
aaggctttcctattt

SEQ ID NO: 1182514 - DNA, 15 bp, Homo sapiens
gaaggctttcctatt

SEQ ID NO: 1182515 - DNA, 15 bp, Homo sapiens
agaaggctttcctat

SEQ ID NO: 1182516 - DNA, 15 bp, Homo sapiens
aagaaggctttccta

SEQ ID NO: 1182517 - DNA, 15 bp, Homo sapiens
gaagaaggctttcct

SEQ ID NO: 1182518 - DNA, 15 bp, Homo sapiens
agaagaaggctttcc

SEQ ID NO: 1182519 - DNA, 15 bp, Homo sapiens
aagaagaaggctttc

SEQ ID NO: 1182520 - DNA, 15 bp, Homo sapiens
gaagaagaaggcttt

SEQ ID NO: 1182521 - DNA, 15 bp, Homo sapiens
ggaagaagaaggctt

SEQ ID NO: 1182522 - DNA, 15 bp, Homo sapiens
gggaagaagaaggct

SEQ ID NO: 1182523 - DNA, 15 bp, Homo sapiens
agggaagaagaaggc

SEQ ID NO: 1182524 - DNA, 15 bp, Homo sapiens
gagggaagaagaagg

SEQ ID NO: 1182525 - DNA, 15 bp, Homo sapiens
agagggaagaagaag

SEQ ID NO: 1182526 - DNA, 15 bp, Homo sapiens
gagagggaagaagaa

SEQ ID NO: 1182527 - DNA, 15 bp, Homo sapiens
tgagagggaagaaga

SEQ ID NO: 1182528 - DNA, 15 bp, Homo sapiens
atgagagggaagaag

SEQ ID NO: 1182529 - DNA, 15 bp, Homo sapiens
gatgagagggaagaa

SEQ ID NO: 1182530 - DNA, 15 bp, Homo sapiens
ggatgagagggaaga

SEQ ID NO: 1182531 - DNA, 15 bp, Homo sapiens
gggatgagagggaag

SEQ ID NO: 1182532 - DNA, 15 bp, Homo sapiens
agggatgagagggaa

SEQ ID NO: 1182533 - DNA, 15 bp, Homo sapiens
cagggatgagaggga

SEQ ID NO: 1182534 - DNA, 15 bp, Homo sapiens
gcagggatgagaggg

SEQ ID NO: 1182535 - DNA, 15 bp, Homo sapiens
tgcagggatgagagg

SEQ ID NO: 1182536 - DNA, 15 bp, Homo sapiens
atgcagggatgagag

SEQ ID NO: 1182537 - DNA, 15 bp, Homo sapiens
aatgcagggatgaga

SEQ ID NO: 1182538 - DNA, 15 bp, Homo sapiens
gaatgcagggatgag

SEQ ID NO: 1182539 - DNA, 15 bp, Homo sapiens
ggaatgcagggatga

SEQ ID NO: 1182540 - DNA, 15 bp, Homo sapiens
gggaatgcagggatg

SEQ ID NO: 1182541 - DNA, 15 bp, Homo sapiens
tgggaatgcagggat

SEQ ID NO: 1182542 - DNA, 15 bp, Homo sapiens
ttgggaatgcaggga

SEQ ID NO: 1182543 - DNA, 15 bp, Homo sapiens
tttgggaatgcaggg

SEQ ID NO: 1182544 - DNA, 15 bp, Homo sapiens
atttgggaatgcagg

SEQ ID NO: 1182545 - DNA, 15 bp, Homo sapiens
tatttgggaatgcag

SEQ ID NO: 1182546 - DNA, 15 bp, Homo sapiens
atatttgggaatgca

SEQ ID NO: 1182547 - DNA, 15 bp, Homo sapiens
aatatttgggaatgc

SEQ ID NO: 1182548 - DNA, 15 bp, Homo sapiens
caaatatttgggaat

SEQ ID NO: 1182549 - DNA, 15 bp, Homo sapiens
ccaaatatttgggaa

SEQ ID NO: 1182550 - DNA, 15 bp, Homo sapiens
cccaaatatttggga

SEQ ID NO: 1182551 - DNA, 15 bp, Homo sapiens
ccccaaatatttggg

SEQ ID NO: 1182552 - DNA, 15 bp, Homo sapiens
gccccaaatatttgg

SEQ ID NO: 1182553 - DNA, 15 bp, Homo sapiens
agccccaaatatttg

SEQ ID NO: 1182554 - DNA, 15 bp, Homo sapiens
gagccccaaatattt

SEQ ID NO: 1182555 - DNA, 15 bp, Homo sapiens
agagccccaaatatt

SEQ ID NO: 1182556 - DNA, 15 bp, Homo sapiens
tagagccccaaatat

SEQ ID NO: 1182557 - DNA, 15 bp, Homo sapiens
atagagccccaaata

SEQ ID NO: 1182558 - DNA, 15 bp, Homo sapiens
gatagagccccaaat

SEQ ID NO: 1182559 - DNA, 15 bp, Homo sapiens
ggatagagccccaaa

SEQ ID NO: 1182560 - DNA, 15 bp, Homo sapiens
tggatagagccccaa

SEQ ID NO: 1182561 - DNA, 15 bp, Homo sapiens
ttggatagagcccca

SEQ ID NO: 1182562 - DNA, 15 bp, Homo sapiens
gttggatagagcccc

SEQ ID NO: 1182563 - DNA, 15 bp, Homo sapiens
tgttggatagagccc

SEQ ID NO: 1182564 - DNA, 15 bp, Homo sapiens
ctgttggatagagcc

SEQ ID NO: 1182565 - DNA, 15 bp, Homo sapiens
gctgttggatagagc

SEQ ID NO: 1182566 - DNA, 15 bp, Homo sapiens
ggctgttggatagag

SEQ ID NO: 1182567 - DNA, 15 bp, Homo sapiens
aggctgttggataga

SEQ ID NO: 1182568 - DNA, 15 bp, Homo sapiens
caggctgttggatag

SEQ ID NO: 1182569 - DNA, 15 bp, Homo sapiens
ccaggctgttggata

SEQ ID NO: 1182570 - DNA, 15 bp, Homo sapiens
tccaggctgttggat

SEQ ID NO: 1182571 - DNA, 15 bp, Homo sapiens
atccaggctgttgga

SEQ ID NO: 1182572 - DNA, 15 bp, Homo sapiens
gatccaggctgttgg

SEQ ID NO: 1182573 - DNA, 15 bp, Homo sapiens
agatccaggctgttg

SEQ ID NO: 1182574 - DNA, 15 bp, Homo sapiens
cagatccaggctgtt

SEQ ID NO: 1182575 - DNA, 15 bp, Homo sapiens
gcagatccaggctgt

SEQ ID NO: 1182576 - DNA, 15 bp, Homo sapiens
tgcagatccaggctg

SEQ ID NO: 1182577 - DNA, 15 bp, Homo sapiens
ctgcagatccaggct

SEQ ID NO: 1182578 - DNA, 15 bp, Homo sapiens
gctgcagatccaggc

SEQ ID NO: 1182579 - DNA, 15 bp, Homo sapiens
tgctgcagatccagg

SEQ ID NO: 1182580 - DNA, 15 bp, Homo sapiens
ttgctgcagatccag

SEQ ID NO: 1182581 - DNA, 15 bp, Homo sapiens
tttgctgcagatcca

SEQ ID NO: 1182582 - DNA, 15 bp, Homo sapiens
gtttgctgcagatcc

SEQ ID NO: 1182583 - DNA, 15 bp, Homo sapiens
tgtttgctgcagatc

SEQ ID NO: 1182584 - DNA, 15 bp, Homo sapiens
atgtttgctgcagat

SEQ ID NO: 1182585 - DNA, 15 bp, Homo sapiens
aatgtttgctgcaga

SEQ ID NO: 1182586 - DNA, 15 bp, Homo sapiens
aaatgtttgctgcag

SEQ ID NO: 1182587 - DNA, 15 bp, Homo sapiens
caaatgtttgctgca

SEQ ID NO: 1182588 - DNA, 15 bp, Homo sapiens
gcaaatgtttgctgc

SEQ ID NO: 1182589 - DNA, 15 bp, Homo sapiens
ggcaaatgtttgctg

SEQ ID NO: 1182590 - DNA, 15 bp, Homo sapiens
aggcaaatgtttgct

SEQ ID NO: 1182591 - DNA, 15 bp, Homo sapiens
gaggcaaatgtttgc

SEQ ID NO: 1182592 - DNA, 15 bp, Homo sapiens
agaggcaaatgtttg

SEQ ID NO: 1182593 - DNA, 15 bp, Homo sapiens
cagaggcaaatgttt

SEQ ID NO: 1182594 - DNA, 15 bp, Homo sapiens
tcagaggcaaatgtt

SEQ ID NO: 1182595 - DNA, 15 bp, Homo sapiens
gtcagaggcaaatgt

SEQ ID NO: 1182596 - DNA, 15 bp, Homo sapiens
agtcagaggcaaatg

SEQ ID NO: 1182597 - DNA, 15 bp, Homo sapiens
gagtcagaggcaaat

SEQ ID NO: 1182598 - DNA, 15 bp, Homo sapiens
tgagtcagaggcaaa

SEQ ID NO: 1182599 - DNA, 15 bp, Homo sapiens
ttgagtcagaggcaa

SEQ ID NO: 1182600 - DNA, 15 bp, Homo sapiens
attgagtcagaggca

SEQ ID NO: 1182601 - DNA, 15 bp, Homo sapiens
aattgagtcagaggc

SEQ ID NO: 1182602 - DNA, 15 bp, Homo sapiens
caattgagtcagagg

SEQ ID NO: 1182603 - DNA, 15 bp, Homo sapiens
tcaattgagtcagag

SEQ ID NO: 1182604 - DNA, 15 bp, Homo sapiens
gtcaattgagtcaga

SEQ ID NO: 1182605 - DNA, 15 bp, Homo sapiens
ggtcaattgagtcag

SEQ ID NO: 1182606 - DNA, 15 bp, Homo sapiens
gggtcaattgagtca

SEQ ID NO: 1182607 - DNA, 15 bp, Homo sapiens
ggggtcaattgagtc

SEQ ID NO: 1182608 - DNA, 15 bp, Homo sapiens
aggggtcaattgagt

SEQ ID NO: 1182609 - DNA, 15 bp, Homo sapiens
aaggggtcaattgag

SEQ ID NO: 1182610 - DNA, 15 bp, Homo sapiens
gaaggggtcaattga

SEQ ID NO: 1182611 - DNA, 15 bp, Homo sapiens
tgaaggggtcaattg

SEQ ID NO: 1182612 - DNA, 15 bp, Homo sapiens
atgaaggggtcaatt

SEQ ID NO: 1182613 - DNA, 15 bp, Homo sapiens
catgaaggggtcaat

SEQ ID NO: 1182614 - DNA, 15 bp, Homo sapiens
ccatgaaggggtcaa

SEQ ID NO: 1182615 - DNA, 15 bp, Homo sapiens
gccatgaaggggtca

SEQ ID NO: 1182616 - DNA, 15 bp, Homo sapiens
cgccatgaaggggtc

SEQ ID NO: 1182617 - DNA, 15 bp, Homo sapiens
tcgccatgaaggggt

SEQ ID NO: 1182618 - DNA, 15 bp, Homo sapiens
ttcgccatgaagggg

SEQ ID NO: 1182619 - DNA, 15 bp, Homo sapiens
attcgccatgaaggg

SEQ ID NO: 1182620 - DNA, 15 bp, Homo sapiens
gattcgccatgaagg

SEQ ID NO: 1182621 - DNA, 15 bp, Homo sapiens
agattcgccatgaag

SEQ ID NO: 1182622 - DNA, 15 bp, Homo sapiens
aagattcgccatgaa

SEQ ID NO: 1182623 - DNA, 15 bp, Homo sapiens
taagattcgccatga

SEQ ID NO: 1182624 - DNA, 15 bp, Homo sapiens
gtaagattcgccatg

SEQ ID NO: 1182625 - DNA, 15 bp, Homo sapiens
tgtaagattcgccat

SEQ ID NO: 1182626 - DNA, 15 bp, Homo sapiens
atgtaagattcgcca

SEQ ID NO: 1182627 - DNA, 15 bp, Homo sapiens
gatgtaagattcgcc

SEQ ID NO: 1182628 - DNA, 15 bp, Homo sapiens
ggatgtaagattcgc

SEQ ID NO: 1182629 - DNA, 15 bp, Homo sapiens
tggatgtaagattcg

SEQ ID NO: 1182630 - DNA, 15 bp, Homo sapiens
gtggatgtaagattc

SEQ ID NO: 1182631 - DNA, 15 bp, Homo sapiens
tgtggatgtaagatt

SEQ ID NO: 1182632 - DNA, 15 bp, Homo sapiens
atgtggatgtaagat

SEQ ID NO: 1182633 - DNA, 15 bp, Homo sapiens
aatgtggatgtaaga

SEQ ID NO: 1182634 - DNA, 15 bp, Homo sapiens
caatgtggatgtaag

SEQ ID NO: 1182635 - DNA, 15 bp, Homo sapiens
ccaatgtggatgtaa

SEQ ID NO: 1182636 - DNA, 15 bp, Homo sapiens
tccaatgtggatgta

SEQ ID NO: 1182637 - DNA, 15 bp, Homo sapiens
atccaatgtggatgt

SEQ ID NO: 1182638 - DNA, 15 bp, Homo sapiens
tatccaatgtggatg

SEQ ID NO: 1182639 - DNA, 15 bp, Homo sapiens
ttatccaatgtggat

SEQ ID NO: 1182640 - DNA, 15 bp, Homo sapiens
gttatccaatgtgga

SEQ ID NO: 1182641 - DNA, 15 bp, Homo sapiens
agttatccaatgtgg

SEQ ID NO: 1182642 - DNA, 15 bp, Homo sapiens
gagttatccaatgtg

SEQ ID NO: 1182643 - DNA, 15 bp, Homo sapiens
agagttatccaatgt

SEQ ID NO: 1182644 - DNA, 15 bp, Homo sapiens
tagagttatccaatg

SEQ ID NO: 1182645 - DNA, 15 bp, Homo sapiens
gtagagttatccaat

SEQ ID NO: 1182646 - DNA, 15 bp, Homo sapiens
agtagagttatccaa

SEQ ID NO: 1182647 - DNA, 15 bp, Homo sapiens
cagtagagttatcca

SEQ ID NO: 1182648 - DNA, 15 bp, Homo sapiens
ccagtagagttatcc

SEQ ID NO: 1182649 - DNA, 15 bp, Homo sapiens
gccagtagagttatc

SEQ ID NO: 1182650 - DNA, 15 bp, Homo sapiens
agccagtagagttat

SEQ ID NO: 1182651 - DNA, 15 bp, Homo sapiens
gagccagtagagtta

SEQ ID NO: 1182652 - DNA, 15 bp, Homo sapiens
tgagccagtagagtt

SEQ ID NO: 1182653 - DNA, 15 bp, Homo sapiens
ttgagccagtagagt

SEQ ID NO: 1182654 - DNA, 15 bp, Homo sapiens
attgagccagtagag

SEQ ID NO: 1182655 - DNA, 15 bp, Homo sapiens
gattgagccagtaga

SEQ ID NO: 1182656 - DNA, 15 bp, Homo sapiens
agattgagccagtag

SEQ ID NO: 1182657 - DNA, 15 bp, Homo sapiens
tagattgagccagta

SEQ ID NO: 1182658 - DNA, 15 bp, Homo sapiens
atagattgagccagt

SEQ ID NO: 1182659 - DNA, 15 bp, Homo sapiens
catagattgagccag

SEQ ID NO: 1182660 - DNA, 15 bp, Homo sapiens
tcatagattgagcca

SEQ ID NO: 1182661 - DNA, 15 bp, Homo sapiens
ttcatagattgagcc

SEQ ID NO: 1182662 - DNA, 15 bp, Homo sapiens
gttcatagattgagc

SEQ ID NO: 1182663 - DNA, 15 bp, Homo sapiens
tgttcatagattgag

SEQ ID NO: 1182664 - DNA, 15 bp, Homo sapiens
ttgttcatagattga

SEQ ID NO: 1182665 - DNA, 15 bp, Homo sapiens
attgttcatagattg

SEQ ID NO: 1182666 - DNA, 15 bp, Homo sapiens
aattgttcatagatt

SEQ ID NO: 1182667 - DNA, 15 bp, Homo sapiens
aaattgttcatagat

SEQ ID NO: 1182668 - DNA, 15 bp, Homo sapiens
aaaattgttcataga

SEQ ID NO: 1182669 - DNA, 15 bp, Homo sapiens
gaaaattgttcatag

SEQ ID NO: 1182670 - DNA, 15 bp, Homo sapiens
tgaaaattgttcata

SEQ ID NO: 1182671 - DNA, 15 bp, Homo sapiens
ttgaaaattgttcat

SEQ ID NO: 1182672 - DNA, 15 bp, Homo sapiens
tttgaaaattgttca

SEQ ID NO: 1182673 - DNA, 15 bp, Homo sapiens
ttttgaaaattgttc

SEQ ID NO: 1182674 - DNA, 15 bp, Homo sapiens
attttgaaaattgtt

SEQ ID NO: 1182675 - DNA, 15 bp, Homo sapiens
aattttgaaaattgt

SEQ ID NO: 1182676 - DNA, 15 bp, Homo sapiens
caattttgaaaattg

SEQ ID NO: 1182677 - DNA, 15 bp, Homo sapiens
tcaattttgaaaatt

SEQ ID NO: 1182678 - DNA, 15 bp, Homo sapiens
ctcaattttgaaaat

SEQ ID NO: 1182679 - DNA, 15 bp, Homo sapiens
cctcaattttgaaaa

SEQ ID NO: 1182680 - DNA, 15 bp, Homo sapiens
tcctcaattttgaaa

SEQ ID NO: 1182681 - DNA, 15 bp, Homo sapiens
ttcctcaattttgaa

SEQ ID NO: 1182682 - DNA, 15 bp, Homo sapiens
tttcctcaattttga

SEQ ID NO: 1182683 - DNA, 15 bp, Homo sapiens
atttcctcaattttg

SEQ ID NO: 1182684 - DNA, 15 bp, Homo sapiens
tatttcctcaatttt

SEQ ID NO: 1182685 - DNA, 15 bp, Homo sapiens
ttatttcctcaattt

SEQ ID NO: 1182686 - DNA, 15 bp, Homo sapiens
cttatttcctcaatt

SEQ ID NO: 1182687 - DNA, 15 bp, Homo sapiens
ccttatttcctcaat

SEQ ID NO: 1182688 - DNA, 15 bp, Homo sapiens
gccttatttcctcaa

SEQ ID NO: 1182689 - DNA, 15 bp, Homo sapiens
ggccttatttcctca

SEQ ID NO: 1182690 - DNA, 15 bp, Homo sapiens
gggccttatttcctc

SEQ ID NO: 1182691 - DNA, 15 bp, Homo sapiens
agggccttatttcct

SEQ ID NO: 1182692 - DNA, 15 bp, Homo sapiens
aagggccttatttcc

SEQ ID NO: 1182693 - DNA, 15 bp, Homo sapiens
aaagggccttatttc

SEQ ID NO: 1182694 - DNA, 15 bp, Homo sapiens
aaaagggccttattt

SEQ ID NO: 1182695 - DNA, 15 bp, Homo sapiens
gaaaagggccttatt

SEQ ID NO: 1182696 - DNA, 15 bp, Homo sapiens
ggaaaagggccttat

SEQ ID NO: 1182697 - DNA, 15 bp, Homo sapiens
tggaaaagggcctta

SEQ ID NO: 1182698 - DNA, 15 bp, Homo sapiens
atggaaaagggcctt

SEQ ID NO: 1182699 - DNA, 15 bp, Homo sapiens
aatggaaaagggcct

SEQ ID NO: 1182700 - DNA, 15 bp, Homo sapiens
gaatggaaaagggcc

SEQ ID NO: 1182701 - DNA, 15 bp, Homo sapiens
agaatggaaaagggc

SEQ ID NO: 1182702 - DNA, 15 bp, Homo sapiens
aagaatggaaaaggg

SEQ ID NO: 1182703 - DNA, 15 bp, Homo sapiens
taagaatggaaaagg

SEQ ID NO: 1182704 - DNA, 15 bp, Homo sapiens
ttaagaatggaaaag

SEQ ID NO: 1182705 - DNA, 15 bp, Homo sapiens
tttaagaatggaaaa

SEQ ID NO: 1182706 - DNA, 15 bp, Homo sapiens
atttaagaatggaaa

SEQ ID NO: 1182707 - DNA, 15 bp, Homo sapiens
tatttaagaatggaa

SEQ ID NO: 1182708 - DNA, 15 bp, Homo sapiens
ctatttaagaatgga

SEQ ID NO: 1182709 - DNA, 15 bp, Homo sapiens
cctatttaagaatgg

SEQ ID NO: 1182710 - DNA, 15 bp, Homo sapiens
gcctatttaagaatg

SEQ ID NO: 1182711 - DNA, 15 bp, Homo sapiens
agcctatttaagaat

SEQ ID NO: 1182712 - DNA, 15 bp, Homo sapiens
cagcctatttaagaa

SEQ ID NO: 1182713 - DNA, 15 bp, Homo sapiens
ccagcctatttaaga

SEQ ID NO: 1182714 - DNA, 15 bp, Homo sapiens
gccagcctatttaag

SEQ ID NO: 1182715 - DNA, 15 bp, Homo sapiens
ggccagcctatttaa

SEQ ID NO: 1182716 - DNA, 15 bp, Homo sapiens
aggccagcctattta

SEQ ID NO: 1182717 - DNA, 15 bp, Homo sapiens
taggccagcctattt

SEQ ID NO: 1182718 - DNA, 15 bp, Homo sapiens
ttaggccagcctatt

SEQ ID NO: 1182719 - DNA, 15 bp, Homo sapiens
tttaggccagcctat

SEQ ID NO: 1182720 - DNA, 15 bp, Homo sapiens
atttaggccagccta

SEQ ID NO: 1182721 - DNA, 15 bp, Homo sapiens
tatttaggccagcct

SEQ ID NO: 1182722 - DNA, 15 bp, Homo sapiens
atatttaggccagcc

SEQ ID NO: 1182723 - DNA, 15 bp, Homo sapiens
aatatttaggccagc

SEQ ID NO: 1182724 - DNA, 15 bp, Homo sapiens
gaatatttaggccag

SEQ ID NO: 1182725 - DNA, 15 bp, Homo sapiens
agaatatttaggcca

SEQ ID NO: 1182726 - DNA, 15 bp, Homo sapiens
aagaatatttaggcc

SEQ ID NO: 1182727 - DNA, 15 bp, Homo sapiens
caagaatatttaggc

SEQ ID NO: 1182728 - DNA, 15 bp, Homo sapiens
ccaagaatatttagg

SEQ ID NO: 1182729 - DNA, 15 bp, Homo sapiens
cccaagaatatttag

SEQ ID NO: 1182730 - DNA, 15 bp, Homo sapiens
tcccaagaatattta

SEQ ID NO: 1182731 - DNA, 15 bp, Homo sapiens
ctcccaagaatattt

SEQ ID NO: 1182732 - DNA, 15 bp, Homo sapiens
gctcccaagaatatt

SEQ ID NO: 1182733 - DNA, 15 bp, Homo sapiens
agctcccaagaatat

SEQ ID NO: 1182734 - DNA, 15 bp, Homo sapiens
aagctcccaagaata

SEQ ID NO: 1182735 - DNA, 15 bp, Homo sapiens
gaagctcccaagaat

SEQ ID NO: 1182736 - DNA, 15 bp, Homo sapiens
tgaagctcccaagaa

SEQ ID NO: 1182737 - DNA, 15 bp, Homo sapiens
atgaagctcccaaga

SEQ ID NO: 1182738 - DNA, 15 bp, Homo sapiens
catgaagctcccaag

SEQ ID NO: 1182739 - DNA, 15 bp, Homo sapiens
ccatgaagctcccaa

SEQ ID NO: 1182740 - DNA, 15 bp, Homo sapiens
tccatgaagctccca

SEQ ID NO: 1182741 - DNA, 15 bp, Homo sapiens
ctccatgaagctccc

SEQ ID NO: 1182742 - DNA, 15 bp, Homo sapiens
tctccatgaagctcc

SEQ ID NO: 1182743 - DNA, 15 bp, Homo sapiens
ctctccatgaagctc

SEQ ID NO: 1182744 - DNA, 15 bp, Homo sapiens
actctccatgaagct

SEQ ID NO: 1182745 - DNA, 15 bp, Homo sapiens
cactctccatgaagc

SEQ ID NO: 1182746 - DNA, 15 bp, Homo sapiens
acactctccatgaag

SEQ ID NO: 1182747 - DNA, 15 bp, Homo sapiens
gacactctccatgaa

SEQ ID NO: 1182748 - DNA, 15 bp, Homo sapiens
tgacactctccatga

SEQ ID NO: 1182749 - DNA, 15 bp, Homo sapiens
atgacactctccatg

SEQ ID NO: 1182750 - DNA, 15 bp, Homo sapiens
catgacactctccat

SEQ ID NO: 1182751 - DNA, 15 bp, Homo sapiens
gcatgacactctcca

SEQ ID NO: 1182752 - DNA, 15 bp, Homo sapiens
ggcatgacactctcc

SEQ ID NO: 1182753 - DNA, 15 bp, Homo sapiens
gggcatgacactctc

SEQ ID NO: 1182754 - DNA, 15 bp, Homo sapiens
agggcatgacactct

SEQ ID NO: 1182755 - DNA, 15 bp, Homo sapiens
cagggcatgacactc

SEQ ID NO: 1182756 - DNA, 15 bp, Homo sapiens
ccagggcatgacact

SEQ ID NO: 1182757 - DNA, 15 bp, Homo sapiens
gccagggcatgacac

SEQ ID NO: 1182758 - DNA, 15 bp, Homo sapiens
agccagggcatgaca

SEQ ID NO: 1182759 - DNA, 15 bp, Homo sapiens
aagccagggcatgac

SEQ ID NO: 1182760 - DNA, 15 bp, Homo sapiens
taagccagggcatga

SEQ ID NO: 1182761 - DNA, 15 bp, Homo sapiens
ataagccagggcatg

SEQ ID NO: 1182762 - DNA, 15 bp, Homo sapiens
aataagccagggcat

SEQ ID NO: 1182763 - DNA, 15 bp, Homo sapiens
gaataagccagggca

SEQ ID NO: 1182764 - DNA, 15 bp, Homo sapiens
cgaataagccagggc

SEQ ID NO: 1182765 - DNA, 15 bp, Homo sapiens
gcgaataagccaggg

SEQ ID NO: 1182766 - DNA, 15 bp, Homo sapiens
tgcgaataagccagg

SEQ ID NO: 1182767 - DNA, 15 bp, Homo sapiens
ttgcgaataagccag

SEQ ID NO: 1182768 - DNA, 15 bp, Homo sapiens
tttgcgaataagcca

SEQ ID NO: 1182769 - DNA, 15 bp, Homo sapiens
ctttgcgaataagcc

SEQ ID NO: 1182770 - DNA, 15 bp, Homo sapiens
cctttgcgaataagc

SEQ ID NO: 1182771 - DNA, 15 bp, Homo sapiens
acctttgcgaataag

SEQ ID NO: 1182772 - DNA, 15 bp, Homo sapiens
cacctttgcgaataa

SEQ ID NO: 1182773 - DNA, 15 bp, Homo sapiens
ccacctttgcgaata

SEQ ID NO: 1182774 - DNA, 15 bp, Homo sapiens
gccacctttgcgaat

SEQ ID NO: 1182775 - DNA, 15 bp, Homo sapiens
tgccacctttgcgaa

SEQ ID NO: 1182776 - DNA, 15 bp, Homo sapiens
ttgccacctttgcga

SEQ ID NO: 1182777 - DNA, 15 bp, Homo sapiens
attgccacctttgcg

SEQ ID NO: 1182778 - DNA, 15 bp, Homo sapiens
cattgccacctttgc

SEQ ID NO: 1182779 - DNA, 15 bp, Homo sapiens
ccattgccacctttg

SEQ ID NO: 1182780 - DNA, 15 bp, Homo sapiens
gccattgccaccttt

SEQ ID NO: 1182781 - DNA, 15 bp, Homo sapiens
ggccattgccacctt

SEQ ID NO: 1182782 - DNA, 15 bp, Homo sapiens
aggccattgccacct

SEQ ID NO: 1182783 - DNA, 15 bp, Homo sapiens
aaggccattgccacc

SEQ ID NO: 1182784 - DNA, 15 bp, Homo sapiens
gaaggccattgccac

SEQ ID NO: 1182785 - DNA, 15 bp, Homo sapiens
tgaaggccattgcca

SEQ ID NO: 1182786 - DNA, 15 bp, Homo sapiens
ctgaaggccattgcc

SEQ ID NO: 1182787 - DNA, 15 bp, Homo sapiens
tctgaaggccattgc

SEQ ID NO: 1182788 - DNA, 15 bp, Homo sapiens
gtctgaaggccattg

SEQ ID NO: 1182789 - DNA, 15 bp, Homo sapiens
agtctgaaggccatt

SEQ ID NO: 1182790 - DNA, 15 bp, Homo sapiens
gagtctgaaggccat

SEQ ID NO: 1182791 - DNA, 15 bp, Homo sapiens
tgagtctgaaggcca

SEQ ID NO: 1182792 - DNA, 15 bp, Homo sapiens
ctgagtctgaaggcc

SEQ ID NO: 1182793 - DNA, 15 bp, Homo sapiens
gctgagtctgaaggc

SEQ ID NO: 1182794 - DNA, 15 bp, Homo sapiens
agctgagtctgaagg

SEQ ID NO: 1182795 - DNA, 15 bp, Homo sapiens
tagctgagtctgaag

SEQ ID NO: 1182796 - DNA, 15 bp, Homo sapiens
ttagctgagtctgaa

SEQ ID NO: 1182797 - DNA, 15 bp, Homo sapiens
cttagctgagtctga

SEQ ID NO: 1182798 - DNA, 15 bp, Homo sapiens
tcttagctgagtctg

SEQ ID NO: 1182799 - DNA, 15 bp, Homo sapiens
gtcttagctgagtct

SEQ ID NO: 1182800 - DNA, 15 bp, Homo sapiens
tgtcttagctgagtc

SEQ ID NO: 1182801 - DNA, 15 bp, Homo sapiens
ttgtcttagctgagt

SEQ ID NO: 1182802 - DNA, 15 bp, Homo sapiens
tttgtcttagctgag

SEQ ID NO: 1182803 - DNA, 15 bp, Homo sapiens
gtttgtcttagctga

SEQ ID NO: 1182804 - DNA, 15 bp, Homo sapiens
tgtttgtcttagctg

SEQ ID NO: 1182805 - DNA, 15 bp, Homo sapiens
atgtttgtcttagct

SEQ ID NO: 1182806 - DNA, 15 bp, Homo sapiens
aatgtttgtcttagc

SEQ ID NO: 1182807 - DNA, 15 bp, Homo sapiens
caatgtttgtcttag

SEQ ID NO: 1182808 - DNA, 15 bp, Homo sapiens
ccaatgtttgtctta

SEQ ID NO: 1182809 - DNA, 15 bp, Homo sapiens
gccaatgtttgtctt

SEQ ID NO: 1182810 - DNA, 15 bp, Homo sapiens
tgccaatgtttgtct

SEQ ID NO: 1182811 - DNA, 15 bp, Homo sapiens
gtgccaatgtttgtc

SEQ ID NO: 1182812 - DNA, 15 bp, Homo sapiens
tgtgccaatgtttgt

SEQ ID NO: 1182813 - DNA, 15 bp, Homo sapiens
atgtgccaatgtttg

SEQ ID NO: 1182814 - DNA, 15 bp, Homo sapiens
catgtgccaatgttt

SEQ ID NO: 1182815 - DNA, 15 bp, Homo sapiens
gcatgtgccaatgtt

SEQ ID NO: 1182816 - DNA, 15 bp, Homo sapiens
tgcatgtgccaatgt

SEQ ID NO: 1182817 - DNA, 15 bp, Homo sapiens
ctgcatgtgccaatg

SEQ ID NO: 1182818 - DNA, 15 bp, Homo sapiens
cctgcatgtgccaat

SEQ ID NO: 1182819 - DNA, 15 bp, Homo sapiens
acctgcatgtgccaa

SEQ ID NO: 1182820 - DNA, 15 bp, Homo sapiens
cacctgcatgtgcca

SEQ ID NO: 1182821 - DNA, 15 bp, Homo sapiens
ccacctgcatgtgcc

SEQ ID NO: 1182822 - DNA, 15 bp, Homo sapiens
gccacctgcatgtgc

SEQ ID NO: 1182823 - DNA, 15 bp, Homo sapiens
ggccacctgcatgtg

SEQ ID NO: 1182824 - DNA, 15 bp, Homo sapiens
tggccacctgcatgt

SEQ ID NO: 1182825 - DNA, 15 bp, Homo sapiens
atggccacctgcatg

SEQ ID NO: 1182826 - DNA, 15 bp, Homo sapiens
gatggccacctgcat

SEQ ID NO: 1182827 - DNA, 15 bp, Homo sapiens
tgatggccacctgca

SEQ ID NO: 1182828 - DNA, 15 bp, Homo sapiens
ctgatggccacctgc

SEQ ID NO: 1182829 - DNA, 15 bp, Homo sapiens
tctgatggccacctg

SEQ ID NO: 1182830 - DNA, 15 bp, Homo sapiens
atctgatggccacct

SEQ ID NO: 1182831 - DNA, 15 bp, Homo sapiens
catctgatggccacc

SEQ ID NO: 1182832 - DNA, 15 bp, Homo sapiens
acatctgatggccac

SEQ ID NO: 1182833 - DNA, 15 bp, Homo sapiens
aacatctgatggcca

SEQ ID NO: 1182834 - DNA, 15 bp, Homo sapiens
taacatctgatggcc

SEQ ID NO: 1182835 - DNA, 15 bp, Homo sapiens
ttaacatctgatggc

SEQ ID NO: 1182836 - DNA, 15 bp, Homo sapiens
attaacatctgatgg

SEQ ID NO: 1182837 - DNA, 15 bp, Homo sapiens
cattaacatctgatg

SEQ ID NO: 1182838 - DNA, 15 bp, Homo sapiens
acattaacatctgat

SEQ ID NO: 1182839 - DNA, 15 bp, Homo sapiens
aacattaacatctga

SEQ ID NO: 1182840 - DNA, 15 bp, Homo sapiens
aaacattaacatctg

SEQ ID NO: 1182841 - DNA, 15 bp, Homo sapiens
taaacattaacatct

SEQ ID NO: 1182842 - DNA, 15 bp, Homo sapiens
ataaacattaacatc

SEQ ID NO: 1182843 - DNA, 15 bp, Homo sapiens
gataaacattaacat

SEQ ID NO: 1182844 - DNA, 15 bp, Homo sapiens
agataaacattaaca

SEQ ID NO: 1182845 - DNA, 15 bp, Homo sapiens
aagataaacattaac

SEQ ID NO: 1182846 - DNA, 15 bp, Homo sapiens
caagataaacattaa

SEQ ID NO: 1182847 - DNA, 15 bp, Homo sapiens
acaagataaacatta

SEQ ID NO: 1182848 - DNA, 15 bp, Homo sapiens
aacaagataaacatt

SEQ ID NO: 1182849 - DNA, 15 bp, Homo sapiens
gaacaagataaacat

SEQ ID NO: 1182850 - DNA, 15 bp, Homo sapiens
ggaacaagataaaca

SEQ ID NO: 1182851 - DNA, 15 bp, Homo sapiens
aggaacaagataaac

SEQ ID NO: 1182852 - DNA, 15 bp, Homo sapiens
gaggaacaagataaa

SEQ ID NO: 1182853 - DNA, 15 bp, Homo sapiens
agaggaacaagataa

SEQ ID NO: 1182854 - DNA, 15 bp, Homo sapiens
cagaggaacaagata

SEQ ID NO: 1182855 - DNA, 15 bp, Homo sapiens
acagaggaacaagat

SEQ ID NO: 1182856 - DNA, 15 bp, Homo sapiens
tacagaggaacaaga

SEQ ID NO: 1182857 - DNA, 15 bp, Homo sapiens
atacagaggaacaag

SEQ ID NO: 1182858 - DNA, 15 bp, Homo sapiens
aatacagaggaacaa

SEQ ID NO: 1182859 - DNA, 15 bp, Homo sapiens
caatacagaggaaca

SEQ ID NO: 1182860 - DNA, 15 bp, Homo sapiens
gcaatacagaggaac

SEQ ID NO: 1182861 - DNA, 15 bp, Homo sapiens
agcaatacagaggaa

SEQ ID NO: 1182862 - DNA, 15 bp, Homo sapiens
cagcaatacagagga

SEQ ID NO: 1182863 - DNA, 15 bp, Homo sapiens
acagcaatacagagg

SEQ ID NO: 1182864 - DNA, 15 bp, Homo sapiens
taacagcaatacaga

SEQ ID NO: 1182865 - DNA, 15 bp, Homo sapiens
ataacagcaatacag

SEQ ID NO: 1182866 - DNA, 15 bp, Homo sapiens
gataacagcaataca

SEQ ID NO: 1182867 - DNA, 15 bp, Homo sapiens
agataacagcaatac

SEQ ID NO: 1182868 - DNA, 15 bp, Homo sapiens
aagataacagcaata

SEQ ID NO: 1182869 - DNA, 15 bp, Homo sapiens
aaagataacagcaat

SEQ ID NO: 1182870 - DNA, 15 bp, Homo sapiens
gaaagataacagcaa

SEQ ID NO: 1182871 - DNA, 15 bp, Homo sapiens
tgaaagataacagca

SEQ ID NO: 1182872 - DNA, 15 bp, Homo sapiens
ctgaaagataacagc

SEQ ID NO: 1182873 - DNA, 15 bp, Homo sapiens
cctgaaagataacag

SEQ ID NO: 1182874 - DNA, 15 bp, Homo sapiens
ccctgaaagataaca

SEQ ID NO: 1182875 - DNA, 15 bp, Homo sapiens
tccctgaaagataac

SEQ ID NO: 1182876 - DNA, 15 bp, Homo sapiens
ttccctgaaagataa

SEQ ID NO: 1182877 - DNA, 15 bp, Homo sapiens
tttccctgaaagata

SEQ ID NO: 1182878 - DNA, 15 bp, Homo sapiens
atttccctgaaagat

SEQ ID NO: 1182879 - DNA, 15 bp, Homo sapiens
gatttccctgaaaga

SEQ ID NO: 1182880 - DNA, 15 bp, Homo sapiens
agatttccctgaaag

SEQ ID NO: 1182881 - DNA, 15 bp, Homo sapiens
tagatttccctgaaa

SEQ ID NO: 1182882 - DNA, 15 bp, Homo sapiens
ctagatttccctgaa

SEQ ID NO: 1182883 - DNA, 15 bp, Homo sapiens
cctagatttccctga

SEQ ID NO: 1182884 - DNA, 15 bp, Homo sapiens
tcctagatttccctg

SEQ ID NO: 1182885 - DNA, 15 bp, Homo sapiens
ttcctagatttccct

SEQ ID NO: 1182886 - DNA, 15 bp, Homo sapiens
attcctagatttccc

SEQ ID NO: 1182887 - DNA, 15 bp, Homo sapiens
tattcctagatttcc

SEQ ID NO: 1182888 - DNA, 15 bp, Homo sapiens
ctattcctagatttc

SEQ ID NO: 1182889 - DNA, 15 bp, Homo sapiens
gctattcctagattt

SEQ ID NO: 1182890 - DNA, 15 bp, Homo sapiens
tgctattcctagatt

SEQ ID NO: 1182891 - DNA, 15 bp, Homo sapiens
ctgctattcctagat

SEQ ID NO: 1182892 - DNA, 15 bp, Homo sapiens
tctgctattcctaga

SEQ ID NO: 1182893 - DNA, 15 bp, Homo sapiens
ttctgctattcctag

SEQ ID NO: 1182894 - DNA, 15 bp, Homo sapiens
tttctgctattccta

SEQ ID NO: 1182895 - DNA, 15 bp, Homo sapiens
ctttctgctattcct

SEQ ID NO: 1182896 - DNA, 15 bp, Homo sapiens
tctttctgctattcc

SEQ ID NO: 1182897 - DNA, 15 bp, Homo sapiens
atctttctgctattc

SEQ ID NO: 1182898 - DNA, 15 bp, Homo sapiens
catctttctgctatt

SEQ ID NO: 1182899 - DNA, 15 bp, Homo sapiens
tcatctttctgctat

SEQ ID NO: 1182900 - DNA, 15 bp, Homo sapiens
ttcatctttctgcta

SEQ ID NO: 1182901 - DNA, 15 bp, Homo sapiens
attcatctttctgct

SEQ ID NO: 1182902 - DNA, 15 bp, Homo sapiens
gattcatctttctgc

SEQ ID NO: 1182903 - DNA, 15 bp, Homo sapiens
agattcatctttctg

SEQ ID NO: 1182904 - DNA, 15 bp, Homo sapiens
aagattcatctttct

SEQ ID NO: 1182905 - DNA, 15 bp, Homo sapiens
aaagattcatctttc

SEQ ID NO: 1182906 - DNA, 15 bp, Homo sapiens
gaaagattcatcttt

SEQ ID NO: 1182907 - DNA, 15 bp, Homo sapiens
ggaaagattcatctt

SEQ ID NO: 1182908 - DNA, 15 bp, Homo sapiens
aggaaagattcatct

SEQ ID NO: 1182909 - DNA, 15 bp, Homo sapiens
aaggaaagattcatc

SEQ ID NO: 1182910 - DNA, 15 bp, Homo sapiens
gaaggaaagattcat

SEQ ID NO: 1182911 - DNA, 15 bp, Homo sapiens
ggaaggaaagattca

SEQ ID NO: 1182912 - DNA, 15 bp, Homo sapiens
gggaaggaaagattc

SEQ ID NO: 1182913 - DNA, 15 bp, Homo sapiens
ggggaaggaaagatt

SEQ ID NO: 1182914 - DNA, 15 bp, Homo sapiens
tggggaaggaaagat

SEQ ID NO: 1182915 - DNA, 15 bp, Homo sapiens
atggggaaggaaaga

SEQ ID NO: 1182916 - DNA, 15 bp, Homo sapiens
catggggaaggaaag

SEQ ID NO: 1182917 - DNA, 15 bp, Homo sapiens
ccatggggaaggaaa

SEQ ID NO: 1182918 - DNA, 15 bp, Homo sapiens
cccatggggaaggaa

SEQ ID NO: 1182919 - DNA, 15 bp, Homo sapiens
ccccatggggaagga

SEQ ID NO: 1182920 - DNA, 15 bp, Homo sapiens
gccccatggggaagg

SEQ ID NO: 1182921 - DNA, 15 bp, Homo sapiens
tgccccatggggaag

SEQ ID NO: 1182922 - DNA, 15 bp, Homo sapiens
atgccccatggggaa

SEQ ID NO: 1182923 - DNA, 15 bp, Homo sapiens
catgccccatgggga

SEQ ID NO: 1182924 - DNA, 15 bp, Homo sapiens
acatgccccatgggg

SEQ ID NO: 1182925 - DNA, 15 bp, Homo sapiens
tacatgccccatggg

SEQ ID NO: 1182926 - DNA, 15 bp, Homo sapiens
gtacatgccccatgg

SEQ ID NO: 1182927 - DNA, 15 bp, Homo sapiens
agtacatgccccatg

SEQ ID NO: 1182928 - DNA, 15 bp, Homo sapiens
aagtacatgccccat

SEQ ID NO: 1182929 - DNA, 15 bp, Homo sapiens
gaagtacatgcccca

SEQ ID NO: 1182930 - DNA, 15 bp, Homo sapiens
ggaagtacatgcccc

SEQ ID NO: 1182931 - DNA, 15 bp, Homo sapiens
aggaagtacatgccc

SEQ ID NO: 1182932 - DNA, 15 bp, Homo sapiens
aaggaagtacatgcc

SEQ ID NO: 1182933 - DNA, 15 bp, Homo sapiens
gaaggaagtacatgc

SEQ ID NO: 1182934 - DNA, 15 bp, Homo sapiens
agaaggaagtacatg

SEQ ID NO: 1182935 - DNA, 15 bp, Homo sapiens
tagaaggaagtacat

SEQ ID NO: 1182936 - DNA, 15 bp, Homo sapiens
ctagaaggaagtaca

SEQ ID NO: 1182937 - DNA, 15 bp, Homo sapiens
cctagaaggaagtac

SEQ ID NO: 1182938 - DNA, 15 bp, Homo sapiens
ccctagaaggaagta

SEQ ID NO: 1182939 - DNA, 15 bp, Homo sapiens
tccctagaaggaagt

SEQ ID NO: 1182940 - DNA, 15 bp, Homo sapiens
ctccctagaaggaag

SEQ ID NO: 1182941 - DNA, 15 bp, Homo sapiens
actccctagaaggaa

SEQ ID NO: 1182942 - DNA, 15 bp, Homo sapiens
tactccctagaagga

SEQ ID NO: 1182943 - DNA, 15 bp, Homo sapiens
ctactccctagaagg

SEQ ID NO: 1182944 - DNA, 15 bp, Homo sapiens
cctactccctagaag

SEQ ID NO: 1182945 - DNA, 15 bp, Homo sapiens
tcctactccctagaa

SEQ ID NO: 1182946 - DNA, 15 bp, Homo sapiens
ttcctactccctaga

SEQ ID NO: 1182947 - DNA, 15 bp, Homo sapiens
cttcctactccctag

SEQ ID NO: 1182948 - DNA, 15 bp, Homo sapiens
tcttcctactcccta

SEQ ID NO: 1182949 - DNA, 15 bp, Homo sapiens
ctcttcctactccct

SEQ ID NO: 1182950 - DNA, 15 bp, Homo sapiens
tctcttcctactccc

SEQ ID NO: 1182951 - DNA, 15 bp, Homo sapiens
ttctcttcctactcc

SEQ ID NO: 1182952 - DNA, 15 bp, Homo sapiens
tttctcttcctactc

SEQ ID NO: 1182953 - DNA, 15 bp, Homo sapiens
ttttctcttcctact

SEQ ID NO: 1182954 - DNA, 15 bp, Homo sapiens
gttttctcttcctac

SEQ ID NO: 1182955 - DNA, 15 bp, Homo sapiens
ggttttctcttccta

SEQ ID NO: 1182956 - DNA, 15 bp, Homo sapiens
gggttttctcttcct

SEQ ID NO: 1182957 - DNA, 15 bp, Homo sapiens
agggttttctcttcc

SEQ ID NO: 1182958 - DNA, 15 bp, Homo sapiens
gagggttttctcttc

SEQ ID NO: 1182959 - DNA, 15 bp, Homo sapiens
agagggttttctctt

SEQ ID NO: 1182960 - DNA, 15 bp, Homo sapiens
gagagggttttctct

SEQ ID NO: 1182961 - DNA, 15 bp, Homo sapiens
tgagagggttttctc

SEQ ID NO: 1182962 - DNA, 15 bp, Homo sapiens
atgagagggttttct

SEQ ID NO: 1182963 - DNA, 15 bp, Homo sapiens
aatgagagggttttc

SEQ ID NO: 1182964 - DNA, 15 bp, Homo sapiens
gaatgagagggtttt

SEQ ID NO: 1182965 - DNA, 15 bp, Homo sapiens
ggaatgagagggttt

SEQ ID NO: 1182966 - DNA, 15 bp, Homo sapiens
gggaatgagagggtt

SEQ ID NO: 1182967 - DNA, 15 bp, Homo sapiens
agggaatgagagggt

SEQ ID NO: 1182968 - DNA, 15 bp, Homo sapiens
tagggaatgagaggg

SEQ ID NO: 1182969 - DNA, 15 bp, Homo sapiens
ctagggaatgagagg

SEQ ID NO: 1182970 - DNA, 15 bp, Homo sapiens
tctagggaatgagag

SEQ ID NO: 1182971 - DNA, 15 bp, Homo sapiens
gtctagggaatgaga

SEQ ID NO: 1182972 - DNA, 15 bp, Homo sapiens
ggtctagggaatgag

SEQ ID NO: 1182973 - DNA, 15 bp, Homo sapiens
aggtctagggaatga

SEQ ID NO: 1182974 - DNA, 15 bp, Homo sapiens
gaggtctagggaatg

SEQ ID NO: 1182975 - DNA, 15 bp, Homo sapiens
tgaggtctagggaat

SEQ ID NO: 1182976 - DNA, 15 bp, Homo sapiens
atgaggtctagggaa

SEQ ID NO: 1182977 - DNA, 15 bp, Homo sapiens
catgaggtctaggga

SEQ ID NO: 1182978 - DNA, 15 bp, Homo sapiens
tcatgaggtctaggg

SEQ ID NO: 1182979 - DNA, 15 bp, Homo sapiens
ctcatgaggtctagg

SEQ ID NO: 1182980 - DNA, 15 bp, Homo sapiens
actcatgaggtctag

SEQ ID NO: 1182981 - DNA, 15 bp, Homo sapiens
aactcatgaggtcta

SEQ ID NO: 1182982 - DNA, 15 bp, Homo sapiens
taactcatgaggtct

SEQ ID NO: 1182983 - DNA, 15 bp, Homo sapiens
gtaactcatgaggtc

SEQ ID NO: 1182984 - DNA, 15 bp, Homo sapiens
agtaactcatgaggt

SEQ ID NO: 1182985 - DNA, 15 bp, Homo sapiens
gagtaactcatgagg

SEQ ID NO: 1182986 - DNA, 15 bp, Homo sapiens
agagtaactcatgag

SEQ ID NO: 1182987 - DNA, 15 bp, Homo sapiens
cagagtaactcatga

SEQ ID NO: 1182988 - DNA, 15 bp, Homo sapiens
ccagagtaactcatg

SEQ ID NO: 1182989 - DNA, 15 bp, Homo sapiens
tccagagtaactcat

SEQ ID NO: 1182990 - DNA, 15 bp, Homo sapiens
ctccagagtaactca

SEQ ID NO: 1182991 - DNA, 15 bp, Homo sapiens
cctccagagtaactc

SEQ ID NO: 1182992 - DNA, 15 bp, Homo sapiens
ccctccagagtaact

SEQ ID NO: 1182993 - DNA, 15 bp, Homo sapiens
accctccagagtaac

SEQ ID NO: 1182994 - DNA, 15 bp, Homo sapiens
aaccctccagagtaa

SEQ ID NO: 1182995 - DNA, 15 bp, Homo sapiens
caaccctccagagta

SEQ ID NO: 1182996 - DNA, 15 bp, Homo sapiens
ccaaccctccagagt

SEQ ID NO: 1182997 - DNA, 15 bp, Homo sapiens
accaaccctccagag

SEQ ID NO: 1182998 - DNA, 15 bp, Homo sapiens
taccaaccctccaga

SEQ ID NO: 1182999 - DNA, 15 bp, Homo sapiens
ctaccaaccctccag

SEQ ID NO: 1183000 - DNA, 15 bp, Homo sapiens
actaccaaccctcca

SEQ ID NO: 1183001 - DNA, 15 bp, Homo sapiens
tactaccaaccctcc

SEQ ID NO: 1183002 - DNA, 15 bp, Homo sapiens
ctactaccaaccctc

SEQ ID NO: 1183003 - DNA, 15 bp, Homo sapiens
gctactaccaaccct

SEQ ID NO: 1183004 - DNA, 15 bp, Homo sapiens
ggctactaccaaccc

SEQ ID NO: 1183005 - DNA, 15 bp, Homo sapiens
tggctactaccaacc

SEQ ID NO: 1183006 - DNA, 15 bp, Homo sapiens
atggctactaccaac

SEQ ID NO: 1183007 - DNA, 15 bp, Homo sapiens
catggctactaccaa

SEQ ID NO: 1183008 - DNA, 15 bp, Homo sapiens
ccatggctactacca

SEQ ID NO: 1183009 - DNA, 15 bp, Homo sapiens
accatggctactacc

SEQ ID NO: 1183010 - DNA, 15 bp, Homo sapiens
aaccatggctactac

SEQ ID NO: 1183011 - DNA, 15 bp, Homo sapiens
taaccatggctacta

SEQ ID NO: 1183012 - DNA, 15 bp, Homo sapiens
ttaaccatggctact

SEQ ID NO: 1183013 - DNA, 15 bp, Homo sapiens
attaaccatggctac

SEQ ID NO: 1183014 - DNA, 15 bp, Homo sapiens
cattaaccatggcta

SEQ ID NO: 1183015 - DNA, 15 bp, Homo sapiens
ccattaaccatggct

SEQ ID NO: 1183016 - DNA, 15 bp, Homo sapiens
gccattaaccatggc

SEQ ID NO: 1183017 - DNA, 15 bp, Homo sapiens
tgccattaaccatgg

SEQ ID NO: 1183018 - DNA, 15 bp, Homo sapiens
ttgccattaaccatg

SEQ ID NO: 1183019 - DNA, 15 bp, Homo sapiens
cttgccattaaccat

SEQ ID NO: 1183020 - DNA, 15 bp, Homo sapiens
gcttgccattaacca

SEQ ID NO: 1183021 - DNA, 15 bp, Homo sapiens
agcttgccattaacc

SEQ ID NO: 1183022 - DNA, 15 bp, Homo sapiens
aagcttgccattaac

SEQ ID NO: 1183023 - DNA, 15 bp, Homo sapiens
gaagcttgccattaa

SEQ ID NO: 1183024 - DNA, 15 bp, Homo sapiens
tgaagcttgccatta

SEQ ID NO: 1183025 - DNA, 15 bp, Homo sapiens
ctgaagcttgccatt

SEQ ID NO: 1183026 - DNA, 15 bp, Homo sapiens
tctgaagcttgccat

SEQ ID NO: 1183027 - DNA, 15 bp, Homo sapiens
ttctgaagcttgcca

SEQ ID NO: 1183028 - DNA, 15 bp, Homo sapiens
cttctgaagcttgcc

SEQ ID NO: 1183029 - DNA, 15 bp, Homo sapiens
ccttctgaagcttgc

SEQ ID NO: 1183030 - DNA, 15 bp, Homo sapiens
cccttctgaagcttg

SEQ ID NO: 1183031 - DNA, 15 bp, Homo sapiens
tcccttctgaagctt

SEQ ID NO: 1183032 - DNA, 15 bp, Homo sapiens
ttcccttctgaagct

SEQ ID NO: 1183033 - DNA, 15 bp, Homo sapiens
cttcccttctgaagc

SEQ ID NO: 1183034 - DNA, 15 bp, Homo sapiens
tcttcccttctgaag

SEQ ID NO: 1183035 - DNA, 15 bp, Homo sapiens
ctcttcccttctgaa

SEQ ID NO: 1183036 - DNA, 15 bp, Homo sapiens
gctcttcccttctga

SEQ ID NO: 1183037 - DNA, 15 bp, Homo sapiens
agctcttcccttctg

SEQ ID NO: 1183038 - DNA, 15 bp, Homo sapiens
aagctcttcccttct

SEQ ID NO: 1183039 - DNA, 15 bp, Homo sapiens
gaagctcttcccttc

SEQ ID NO: 1183040 - DNA, 15 bp, Homo sapiens
ggaagctcttccctt

SEQ ID NO: 1183041 - DNA, 15 bp, Homo sapiens
tggaagctcttccct

SEQ ID NO: 1183042 - DNA, 15 bp, Homo sapiens
ttggaagctcttccc

SEQ ID NO: 1183043 - DNA, 15 bp, Homo sapiens
tttggaagctcttcc

SEQ ID NO: 1183044 - DNA, 15 bp, Homo sapiens
ttttggaagctcttc

SEQ ID NO: 1183045 - DNA, 15 bp, Homo sapiens
gttttggaagctctt

SEQ ID NO: 1183046 - DNA, 15 bp, Homo sapiens
ggttttggaagctct

SEQ ID NO: 1183047 - DNA, 15 bp, Homo sapiens
aggttttggaagctc

SEQ ID NO: 1183048 - DNA, 15 bp, Homo sapiens
aaggttttggaagct

SEQ ID NO: 1183049 - DNA, 15 bp, Homo sapiens
caaggttttggaagc

SEQ ID NO: 1183050 - DNA, 15 bp, Homo sapiens
gcaaggttttggaag

SEQ ID NO: 1183051 - DNA, 15 bp, Homo sapiens
ggcaaggttttggaa

SEQ ID NO: 1183052 - DNA, 15 bp, Homo sapiens
tggcaaggttttgga

SEQ ID NO: 1183053 - DNA, 15 bp, Homo sapiens
atggcaaggttttgg

SEQ ID NO: 1183054 - DNA, 15 bp, Homo sapiens
catggcaaggttttg

SEQ ID NO: 1183055 - DNA, 15 bp, Homo sapiens
atcatggcaaggttt

SEQ ID NO: 1183056 - DNA, 15 bp, Homo sapiens
catcatggcaaggtt

SEQ ID NO: 1183057 - DNA, 15 bp, Homo sapiens
gcatcatggcaaggt

SEQ ID NO: 1183058 - DNA, 15 bp, Homo sapiens
ggcatcatggcaagg

SEQ ID NO: 1183059 - DNA, 15 bp, Homo sapiens
aggcatcatggcaag

SEQ ID NO: 1183060 - DNA, 15 bp, Homo sapiens
caggcatcatggcaa

SEQ ID NO: 1183061 - DNA, 15 bp, Homo sapiens
acaggcatcatggca

SEQ ID NO: 1183062 - DNA, 15 bp, Homo sapiens
cacaggcatcatggc

SEQ ID NO: 1183063 - DNA, 15 bp, Homo sapiens
tcacaggcatcatgg

SEQ ID NO: 1183064 - DNA, 15 bp, Homo sapiens
ttcacaggcatcatg

SEQ ID NO: 1183065 - DNA, 15 bp, Homo sapiens
cttcacaggcatcat

SEQ ID NO: 1183066 - DNA, 15 bp, Homo sapiens
acttcacaggcatca

SEQ ID NO: 1183067 - DNA, 15 bp, Homo sapiens
cacttcacaggcatc

SEQ ID NO: 1183068 - DNA, 15 bp, Homo sapiens
gcacttcacaggcat

SEQ ID NO: 1183069 - DNA, 15 bp, Homo sapiens
agcacttcacaggca

SEQ ID NO: 1183070 - DNA, 15 bp, Homo sapiens
cagcacttcacaggc

SEQ ID NO: 1183071 - DNA, 15 bp, Homo sapiens
acagcacttcacagg

SEQ ID NO: 1183072 - DNA, 15 bp, Homo sapiens
cacagcacttcacag

SEQ ID NO: 1183073 - DNA, 15 bp, Homo sapiens
tcacagcacttcaca

SEQ ID NO: 1183074 - DNA, 15 bp, Homo sapiens
ctcacagcacttcac

SEQ ID NO: 1183075 - DNA, 15 bp, Homo sapiens
tctcacagcacttca

SEQ ID NO: 1183076 - DNA, 15 bp, Homo sapiens
ctctcacagcacttc

SEQ ID NO: 1183077 - DNA, 15 bp, Homo sapiens
actctcacagcactt

SEQ ID NO: 1183078 - DNA, 15 bp, Homo sapiens
tactctcacagcact

SEQ ID NO: 1183079 - DNA, 15 bp, Homo sapiens
gtactctcacagcac

SEQ ID NO: 1183080 - DNA, 15 bp, Homo sapiens
agtactctcacagca

SEQ ID NO: 1183081 - DNA, 15 bp, Homo sapiens
gagtactctcacagc

SEQ ID NO: 1183082 - DNA, 15 bp, Homo sapiens
tgagtactctcacag

SEQ ID NO: 1183083 - DNA, 15 bp, Homo sapiens
atgagtactctcaca

SEQ ID NO: 1183084 - DNA, 15 bp, Homo sapiens
catgagtactctcac

SEQ ID NO: 1183085 - DNA, 15 bp, Homo sapiens
acatgagtactctca

SEQ ID NO: 1183086 - DNA, 15 bp, Homo sapiens
aacatgagtactctc

SEQ ID NO: 1183087 - DNA, 15 bp, Homo sapiens
aaacatgagtactct

SEQ ID NO: 1183088 - DNA, 15 bp, Homo sapiens
gaaacatgagtactc

SEQ ID NO: 1183089 - DNA, 15 bp, Homo sapiens
agaaacatgagtact

SEQ ID NO: 1183090 - DNA, 15 bp, Homo sapiens
gagaaacatgagtac

SEQ ID NO: 1183091 - DNA, 15 bp, Homo sapiens
agagaaacatgagta

SEQ ID NO: 1183092 - DNA, 15 bp, Homo sapiens
cagagaaacatgagt

SEQ ID NO: 1183093 - DNA, 15 bp, Homo sapiens
ccagagaaacatgag

SEQ ID NO: 1183094 - DNA, 15 bp, Homo sapiens
tccagagaaacatga

SEQ ID NO: 1183095 - DNA, 15 bp, Homo sapiens
ttccagagaaacatg

SEQ ID NO: 1183096 - DNA, 15 bp, Homo sapiens
cttccagagaaacat

SEQ ID NO: 1183097 - DNA, 15 bp, Homo sapiens
acttccagagaaaca

SEQ ID NO: 1183098 - DNA, 15 bp, Homo sapiens
gacttccagagaaac

SEQ ID NO: 1183099 - DNA, 15 bp, Homo sapiens
tgacttccagagaaa

SEQ ID NO: 1183100 - DNA, 15 bp, Homo sapiens
gtgacttccagagaa

SEQ ID NO: 1183101 - DNA, 15 bp, Homo sapiens
tgtgacttccagaga

SEQ ID NO: 1183102 - DNA, 15 bp, Homo sapiens
atgtgacttccagag

SEQ ID NO: 1183103 - DNA, 15 bp, Homo sapiens
gatgtgacttccaga

SEQ ID NO: 1183104 - DNA, 15 bp, Homo sapiens
tgatgtgacttccag

SEQ ID NO: 1183105 - DNA, 15 bp, Homo sapiens
atgatgtgacttcca

SEQ ID NO: 1183106 - DNA, 15 bp, Homo sapiens
catgatgtgacttcc

SEQ ID NO: 1183107 - DNA, 15 bp, Homo sapiens
acatgatgtgacttc

SEQ ID NO: 1183108 - DNA, 15 bp, Homo sapiens
cacatgatgtgactt

SEQ ID NO: 1183109 - DNA, 15 bp, Homo sapiens
acacatgatgtgact

SEQ ID NO: 1183110 - DNA, 15 bp, Homo sapiens
aacacatgatgtgac

SEQ ID NO: 1183111 - DNA, 15 bp, Homo sapiens
aaacacatgatgtga

SEQ ID NO: 1183112 - DNA, 15 bp, Homo sapiens
taaacacatgatgtg

SEQ ID NO: 1183113 - DNA, 15 bp, Homo sapiens
ttaaacacatgatgt

SEQ ID NO: 1183114 - DNA, 15 bp, Homo sapiens
cttaaacacatgatg

SEQ ID NO: 1183115 - DNA, 15 bp, Homo sapiens
ccttaaacacatgat

SEQ ID NO: 1183116 - DNA, 15 bp, Homo sapiens
accttaaacacatga

SEQ ID NO: 1183117 - DNA, 15 bp, Homo sapiens
taccttaaacacatg

SEQ ID NO: 1183118 - DNA, 15 bp, Homo sapiens
ctaccttaaacacat

SEQ ID NO: 1183119 - DNA, 15 bp, Homo sapiens
cctaccttaaacaca

SEQ ID NO: 1183120 - DNA, 15 bp, Homo sapiens
gcctaccttaaacac

SEQ ID NO: 1183121 - DNA, 15 bp, Homo sapiens
ggcctaccttaaaca

SEQ ID NO: 1183122 - DNA, 15 bp, Homo sapiens
aggcctaccttaaac

SEQ ID NO: 1183123 - DNA, 15 bp, Homo sapiens
aaggcctaccttaaa

SEQ ID NO: 1183124 - DNA, 15 bp, Homo sapiens
caaggcctaccttaa

SEQ ID NO: 1183125 - DNA, 15 bp, Homo sapiens
acaaggcctacctta

SEQ ID NO: 1183126 - DNA, 15 bp, Homo sapiens
tacaaggcctacctt

SEQ ID NO: 1183127 - DNA, 15 bp, Homo sapiens
gtacaaggcctacct

SEQ ID NO: 1183128 - DNA, 15 bp, Homo sapiens
tgtacaaggcctacc

SEQ ID NO: 1183129 - DNA, 15 bp, Homo sapiens
ctgtacaaggcctac

SEQ ID NO: 1183130 - DNA, 15 bp, Homo sapiens
cctgtacaaggccta

SEQ ID NO: 1183131 - DNA, 15 bp, Homo sapiens
ccctgtacaaggcct

SEQ ID NO: 1183132 - DNA, 15 bp, Homo sapiens
tccctgtacaaggcc

SEQ ID NO: 1183133 - DNA, 15 bp, Homo sapiens
ctccctgtacaaggc

SEQ ID NO: 1183134 - DNA, 15 bp, Homo sapiens
cctccctgtacaagg

SEQ ID NO: 1183135 - DNA, 15 bp, Homo sapiens
tcctccctgtacaag

SEQ ID NO: 1183136 - DNA, 15 bp, Homo sapiens
atcctccctgtacaa

SEQ ID NO: 1183137 - DNA, 15 bp, Homo sapiens
aatcctccctgtaca

SEQ ID NO: 1183138 - DNA, 15 bp, Homo sapiens
aaatcctccctgtac

SEQ ID NO: 1183139 - DNA, 15 bp, Homo sapiens
aaaatcctccctgta

SEQ ID NO: 1183140 - DNA, 15 bp, Homo sapiens
caaaatcctccctgt

SEQ ID NO: 1183141 - DNA, 15 bp, Homo sapiens
tcaaaatcctccctg

SEQ ID NO: 1183142 - DNA, 15 bp, Homo sapiens
atcaaaatcctccct

SEQ ID NO: 1183143 - DNA, 15 bp, Homo sapiens
tatcaaaatcctccc

SEQ ID NO: 1183144 - DNA, 15 bp, Homo sapiens
ctatcaaaatcctcc

SEQ ID NO: 1183145 - DNA, 15 bp, Homo sapiens
tctatcaaaatcctc

SEQ ID NO: 1183146 - DNA, 15 bp, Homo sapiens
atctatcaaaatcct

SEQ ID NO: 1183147 - DNA, 15 bp, Homo sapiens
catctatcaaaatcc

SEQ ID NO: 1183148 - DNA, 15 bp, Homo sapiens
ccatctatcaaaatc

SEQ ID NO: 1183149 - DNA, 15 bp, Homo sapiens
tccatctatcaaaat

SEQ ID NO: 1183150 - DNA, 15 bp, Homo sapiens
ttccatctatcaaaa

SEQ ID NO: 1183151 - DNA, 15 bp, Homo sapiens
tttccatctatcaaa

SEQ ID NO: 1183152 - DNA, 15 bp, Homo sapiens
ttttccatctatcaa

SEQ ID NO: 1183153 - DNA, 15 bp, Homo sapiens
tttttccatctatca

SEQ ID NO: 1183154 - DNA, 15 bp, Homo sapiens
atttttccatctatc

SEQ ID NO: 1183155 - DNA, 15 bp, Homo sapiens
aatttttccatctat

SEQ ID NO: 1183156 - DNA, 15 bp, Homo sapiens
gaatttttccatcta

SEQ ID NO: 1183157 - DNA, 15 bp, Homo sapiens
agaatttttccatct

SEQ ID NO: 1183158 - DNA, 15 bp, Homo sapiens
cagaatttttccatc

SEQ ID NO: 1183159 - DNA, 15 bp, Homo sapiens
ccagaatttttccat

SEQ ID NO: 1183160 - DNA, 15 bp, Homo sapiens
tccagaatttttcca

SEQ ID NO: 1183161 - DNA, 15 bp, Homo sapiens
gtccagaatttttcc

SEQ ID NO: 1183162 - DNA, 15 bp, Homo sapiens
tgtccagaatttttc

SEQ ID NO: 1183163 - DNA, 15 bp, Homo sapiens
gtgtccagaattttt

SEQ ID NO: 1183164 - DNA, 15 bp, Homo sapiens
tgtgtccagaatttt

SEQ ID NO: 1183165 - DNA, 15 bp, Homo sapiens
ctgtgtccagaattt

SEQ ID NO: 1183166 - DNA, 15 bp, Homo sapiens
tctgtgtccagaatt

SEQ ID NO: 1183167 - DNA, 15 bp, Homo sapiens
ttctgtgtccagaat

SEQ ID NO: 1183168 - DNA, 15 bp, Homo sapiens
tttctgtgtccagaa

SEQ ID NO: 1183169 - DNA, 15 bp, Homo sapiens
gtttctgtgtccaga

SEQ ID NO: 1183170 - DNA, 15 bp, Homo sapiens
agtttctgtgtccag

SEQ ID NO: 1183171 - DNA, 15 bp, Homo sapiens
tagtttctgtgtcca

SEQ ID NO: 1183172 - DNA, 15 bp, Homo sapiens
ttagtttctgtgtcc

SEQ ID NO: 1183173 - DNA, 15 bp, Homo sapiens
gttagtttctgtgtc

SEQ ID NO: 1183174 - DNA, 15 bp, Homo sapiens
agttagtttctgtgt

SEQ ID NO: 1183175 - DNA, 15 bp, Homo sapiens
gagttagtttctgtg

SEQ ID NO: 1183176 - DNA, 15 bp, Homo sapiens
tgagttagtttctgt

SEQ ID NO: 1183177 - DNA, 15 bp, Homo sapiens
ttgagttagtttctg

SEQ ID NO: 1183178 - DNA, 15 bp, Homo sapiens
attgagttagtttct

SEQ ID NO: 1183179 - DNA, 15 bp, Homo sapiens
tattgagttagtttc

SEQ ID NO: 1183180 - DNA, 15 bp, Homo sapiens
ctattgagttagttt

SEQ ID NO: 1183181 - DNA, 15 bp, Homo sapiens
tctattgagttagtt

SEQ ID NO: 1183182 - DNA, 15 bp, Homo sapiens
ttctattgagttagt

SEQ ID NO: 1183183 - DNA, 15 bp, Homo sapiens
cttctattgagttag

SEQ ID NO: 1183184 - DNA, 15 bp, Homo sapiens
tcttctattgagtta

SEQ ID NO: 1183185 - DNA, 15 bp, Homo sapiens
ctcttctattgagtt

SEQ ID NO: 1183186 - DNA, 15 bp, Homo sapiens
gctcttctattgagt

SEQ ID NO: 1183187 - DNA, 15 bp, Homo sapiens
tgctcttctattgag

SEQ ID NO: 1183188 - DNA, 15 bp, Homo sapiens
gtgctcttctattga

SEQ ID NO: 1183189 - DNA, 15 bp, Homo sapiens
tgtgctcttctattg

SEQ ID NO: 1183190 - DNA, 15 bp, Homo sapiens
atgtgctcttctatt

SEQ ID NO: 1183191 - DNA, 15 bp, Homo sapiens
tatgtgctcttctat

SEQ ID NO: 1183192 - DNA, 15 bp, Homo sapiens
ctatgtgctcttcta

SEQ ID NO: 1183193 - DNA, 15 bp, Homo sapiens
tctatgtgctcttct

SEQ ID NO: 1183194 - DNA, 15 bp, Homo sapiens
gtctatgtgctcttc

SEQ ID NO: 1183195 - DNA, 15 bp, Homo sapiens
tgtctatgtgctctt

SEQ ID NO: 1183196 - DNA, 15 bp, Homo sapiens
ctgtctatgtgctct

SEQ ID NO: 1183197 - DNA, 15 bp, Homo sapiens
gctgtctatgtgctc

SEQ ID NO: 1183198 - DNA, 15 bp, Homo sapiens
tgctgtctatgtgct

SEQ ID NO: 1183199 - DNA, 15 bp, Homo sapiens
ttgctgtctatgtgc

SEQ ID NO: 1183200 - DNA, 15 bp, Homo sapiens
tttgctgtctatgtg

SEQ ID NO: 1183201 - DNA, 15 bp, Homo sapiens
ctttgctgtctatgt

SEQ ID NO: 1183202 - DNA, 15 bp, Homo sapiens
actttgctgtctatg

SEQ ID NO: 1183203 - DNA, 15 bp, Homo sapiens
tactttgctgtctat

SEQ ID NO: 1183204 - DNA, 15 bp, Homo sapiens
ttactttgctgtcta

SEQ ID NO: 1183205 - DNA, 15 bp, Homo sapiens
cttactttgctgtct

SEQ ID NO: 1183206 - DNA, 15 bp, Homo sapiens
ccttactttgctgtc

SEQ ID NO: 1183207 - DNA, 15 bp, Homo sapiens
tccttactttgctgt

SEQ ID NO: 1183208 - DNA, 15 bp, Homo sapiens
ctccttactttgctg

SEQ ID NO: 1183209 - DNA, 15 bp, Homo sapiens
actccttactttgct

SEQ ID NO: 1183210 - DNA, 15 bp, Homo sapiens
tactccttactttgc

SEQ ID NO: 1183211 - DNA, 15 bp, Homo sapiens
atactccttactttg

SEQ ID NO: 1183212 - DNA, 15 bp, Homo sapiens
catactccttacttt

SEQ ID NO: 1183213 - DNA, 15 bp, Homo sapiens
acatactccttactt

SEQ ID NO: 1183214 - DNA, 15 bp, Homo sapiens
aacatactccttact

SEQ ID NO: 1183215 - DNA, 15 bp, Homo sapiens
aaacatactccttac

SEQ ID NO: 1183216 - DNA, 15 bp, Homo sapiens
caaacatactcctta

SEQ ID NO: 1183217 - DNA, 15 bp, Homo sapiens
gcaaacatactcctt

SEQ ID NO: 1183218 - DNA, 15 bp, Homo sapiens
tgcaaacatactcct

SEQ ID NO: 1183219 - DNA, 15 bp, Homo sapiens
ctgcaaacatactcc

SEQ ID NO: 1183220 - DNA, 15 bp, Homo sapiens
cctgcaaacatactc

SEQ ID NO: 1183221 - DNA, 15 bp, Homo sapiens
acctgcaaacatact

SEQ ID NO: 1183222 - DNA, 15 bp, Homo sapiens
cacctgcaaacatac

SEQ ID NO: 1183223 - DNA, 15 bp, Homo sapiens
gcacctgcaaacata

SEQ ID NO: 1183224 - DNA, 15 bp, Homo sapiens
tgcacctgcaaacat

SEQ ID NO: 1183225 - DNA, 15 bp, Homo sapiens
atgcacctgcaaaca

SEQ ID NO: 1183226 - DNA, 15 bp, Homo sapiens
catgcacctgcaaac

SEQ ID NO: 1183227 - DNA, 15 bp, Homo sapiens
tcatgcacctgcaaa

SEQ ID NO: 1183228 - DNA, 15 bp, Homo sapiens
ctcatgcacctgcaa

SEQ ID NO: 1183229 - DNA, 15 bp, Homo sapiens
tctcatgcacctgca

SEQ ID NO: 1183230 - DNA, 15 bp, Homo sapiens
gtctcatgcacctgc

SEQ ID NO: 1183231 - DNA, 15 bp, Homo sapiens
tgtctcatgcacctg

SEQ ID NO: 1183232 - DNA, 15 bp, Homo sapiens
atgtctcatgcacct

SEQ ID NO: 1183233 - DNA, 15 bp, Homo sapiens
gatgtctcatgcacc

SEQ ID NO: 1183234 - DNA, 15 bp, Homo sapiens
ggatgtctcatgcac

SEQ ID NO: 1183235 - DNA, 15 bp, Homo sapiens
tggatgtctcatgca

SEQ ID NO: 1183236 - DNA, 15 bp, Homo sapiens
ctggatgtctcatgc

SEQ ID NO: 1183237 - DNA, 15 bp, Homo sapiens
gctggatgtctcatg

SEQ ID NO: 1183238 - DNA, 15 bp, Homo sapiens
ggctggatgtctcat

SEQ ID NO: 1183239 - DNA, 15 bp, Homo sapiens
tggctggatgtctca

SEQ ID NO: 1183240 - DNA, 15 bp, Homo sapiens
ctggctggatgtctc

SEQ ID NO: 1183241 - DNA, 15 bp, Homo sapiens
actggctggatgtct

SEQ ID NO: 1183242 - DNA, 15 bp, Homo sapiens
aactggctggatgtc

SEQ ID NO: 1183243 - DNA, 15 bp, Homo sapiens
caactggctggatgt

SEQ ID NO: 1183244 - DNA, 15 bp, Homo sapiens
acaactggctggatg

SEQ ID NO: 1183245 - DNA, 15 bp, Homo sapiens
aacaactggctggat

SEQ ID NO: 1183246 - DNA, 15 bp, Homo sapiens
aaacaactggctgga

SEQ ID NO: 1183247 - DNA, 15 bp, Homo sapiens
caaacaactggctgg

SEQ ID NO: 1183248 - DNA, 15 bp, Homo sapiens
ccaaacaactggctg

SEQ ID NO: 1183249 - DNA, 15 bp, Homo sapiens
cccaaacaactggct

SEQ ID NO: 1183250 - DNA, 15 bp, Homo sapiens
acccaaacaactggc

SEQ ID NO: 1183251 - DNA, 15 bp, Homo sapiens
cacccaaacaactgg

SEQ ID NO: 1183252 - DNA, 15 bp, Homo sapiens
acacccaaacaactg

SEQ ID NO: 1183253 - DNA, 15 bp, Homo sapiens
aacacccaaacaact

SEQ ID NO: 1183254 - DNA, 15 bp, Homo sapiens
taacacccaaacaac

SEQ ID NO: 1183255 - DNA, 15 bp, Homo sapiens
ctaacacccaaacaa

SEQ ID NO: 1183256 - DNA, 15 bp, Homo sapiens
cctaacacccaaaca

SEQ ID NO: 1183257 - DNA, 15 bp, Homo sapiens
gcctaacacccaaac

SEQ ID NO: 1183258 - DNA, 15 bp, Homo sapiens
agcctaacacccaaa

SEQ ID NO: 1183259 - DNA, 15 bp, Homo sapiens
tagcctaacacccaa

SEQ ID NO: 1183260 - DNA, 15 bp, Homo sapiens
ctagcctaacaccca

SEQ ID NO: 1183261 - DNA, 15 bp, Homo sapiens
actagcctaacaccc

SEQ ID NO: 1183262 - DNA, 15 bp, Homo sapiens
cactagcctaacacc

SEQ ID NO: 1183263 - DNA, 15 bp, Homo sapiens
gcactagcctaacac

SEQ ID NO: 1183264 - DNA, 15 bp, Homo sapiens
tgcactagcctaaca

SEQ ID NO: 1183265 - DNA, 15 bp, Homo sapiens
ctgcactagcctaac

SEQ ID NO: 1183266 - DNA, 15 bp, Homo sapiens
tctgcactagcctaa

SEQ ID NO: 1183267 - DNA, 15 bp, Homo sapiens
ctctgcactagccta

SEQ ID NO: 1183268 - DNA, 15 bp, Homo sapiens
gctctgcactagcct

SEQ ID NO: 1183269 - DNA, 15 bp, Homo sapiens
tgctctgcactagcc

SEQ ID NO: 1183270 - DNA, 15 bp, Homo sapiens
ctgctctgcactagc

SEQ ID NO: 1183271 - DNA, 15 bp, Homo sapiens
actgctctgcactag

SEQ ID NO: 1183272 - DNA, 15 bp, Homo sapiens
cactgctctgcacta

SEQ ID NO: 1183273 - DNA, 15 bp, Homo sapiens
gcactgctctgcact

SEQ ID NO: 1183274 - DNA, 15 bp, Homo sapiens
tgcactgctctgcac

SEQ ID NO: 1183275 - DNA, 15 bp, Homo sapiens
ttgcactgctctgca

SEQ ID NO: 1183276 - DNA, 15 bp, Homo sapiens
cttgcactgctctgc

SEQ ID NO: 1183277 - DNA, 15 bp, Homo sapiens
tcttgcactgctctg

SEQ ID NO: 1183278 - DNA, 15 bp, Homo sapiens
atcttgcactgctct

SEQ ID NO: 1183279 - DNA, 15 bp, Homo sapiens
tatcttgcactgctc

SEQ ID NO: 1183280 - DNA, 15 bp, Homo sapiens
ttatcttgcactgct

SEQ ID NO: 1183281 - DNA, 15 bp, Homo sapiens
cttatcttgcactgc

SEQ ID NO: 1183282 - DNA, 15 bp, Homo sapiens
gcttatcttgcactg

SEQ ID NO: 1183283 - DNA, 15 bp, Homo sapiens
ggcttatcttgcact

SEQ ID NO: 1183284 - DNA, 15 bp, Homo sapiens
gggcttatcttgcac

SEQ ID NO: 1183285 - DNA, 15 bp, Homo sapiens
tgggcttatcttgca

SEQ ID NO: 1183286 - DNA, 15 bp, Homo sapiens
ctgggcttatcttgc

SEQ ID NO: 1183287 - DNA, 15 bp, Homo sapiens
tctgggcttatcttg

SEQ ID NO: 1183288 - DNA, 15 bp, Homo sapiens
ttctgggcttatctt

SEQ ID NO: 1183289 - DNA, 15 bp, Homo sapiens
tttctgggcttatct

SEQ ID NO: 1183290 - DNA, 15 bp, Homo sapiens
ctttctgggcttatc

SEQ ID NO: 1183291 - DNA, 15 bp, Homo sapiens
tctttctgggcttat

SEQ ID NO: 1183292 - DNA, 15 bp, Homo sapiens
atctttctgggctta

SEQ ID NO: 1183293 - DNA, 15 bp, Homo sapiens
tatctttctgggctt

SEQ ID NO: 1183294 - DNA, 15 bp, Homo sapiens
ctatctttctgggct

SEQ ID NO: 1183295 - DNA, 15 bp, Homo sapiens
cctatctttctgggc

SEQ ID NO: 1183296 - DNA, 15 bp, Homo sapiens
acctatctttctggg

SEQ ID NO: 1183297 - DNA, 15 bp, Homo sapiens
aacctatctttctgg

SEQ ID NO: 1183298 - DNA, 15 bp, Homo sapiens
caacctatctttctg

SEQ ID NO: 1183299 - DNA, 15 bp, Homo sapiens
ccaacctatctttct

SEQ ID NO: 1183300 - DNA, 15 bp, Homo sapiens
gccaacctatctttc

SEQ ID NO: 1183301 - DNA, 15 bp, Homo sapiens
tgccaacctatcttt

SEQ ID NO: 1183302 - DNA, 15 bp, Homo sapiens
gtgccaacctatctt

SEQ ID NO: 1183303 - DNA, 15 bp, Homo sapiens
tgtgccaacctatct

SEQ ID NO: 1183304 - DNA, 15 bp, Homo sapiens
atgtgccaacctatc

SEQ ID NO: 1183305 - DNA, 15 bp, Homo sapiens
gatgtgccaacctat

SEQ ID NO: 1183306 - DNA, 15 bp, Homo sapiens
agatgtgccaaccta

SEQ ID NO: 1183307 - DNA, 15 bp, Homo sapiens
tagatgtgccaacct

SEQ ID NO: 1183308 - DNA, 15 bp, Homo sapiens
atagatgtgccaacc

SEQ ID NO: 1183309 - DNA, 15 bp, Homo sapiens
tatagatgtgccaac

SEQ ID NO: 1183310 - DNA, 15 bp, Homo sapiens
atatagatgtgccaa

SEQ ID NO: 1183311 - DNA, 15 bp, Homo sapiens
aatatagatgtgcca

SEQ ID NO: 1183312 - DNA, 15 bp, Homo sapiens
caatatagatgtgcc

SEQ ID NO: 1183313 - DNA, 15 bp, Homo sapiens
tcaatatagatgtgc

SEQ ID NO: 1183314 - DNA, 15 bp, Homo sapiens
ttcaatatagatgtg

SEQ ID NO: 1183315 - DNA, 15 bp, Homo sapiens
cttcaatatagatgt

SEQ ID NO: 1183316 - DNA, 15 bp, Homo sapiens
tcttcaatatagatg

SEQ ID NO: 1183317 - DNA, 15 bp, Homo sapiens
ttcttcaatatagat

SEQ ID NO: 1183318 - DNA, 15 bp, Homo sapiens
attcttcaatataga

SEQ ID NO: 1183319 - DNA, 15 bp, Homo sapiens
aattcttcaatatag

SEQ ID NO: 1183320 - DNA, 15 bp, Homo sapiens
taattcttcaatata

SEQ ID NO: 1183321 - DNA, 15 bp, Homo sapiens
ataattcttcaatat

SEQ ID NO: 1183322 - DNA, 15 bp, Homo sapiens
tataattcttcaata

SEQ ID NO: 1183323 - DNA, 15 bp, Homo sapiens
ttataattcttcaat

SEQ ID NO: 1183324 - DNA, 15 bp, Homo sapiens
attataattcttcaa

SEQ ID NO: 1183325 - DNA, 15 bp, Homo sapiens
tattataattcttca

SEQ ID NO: 1183326 - DNA, 15 bp, Homo sapiens
ctattataattcttc

SEQ ID NO: 1183327 - DNA, 15 bp, Homo sapiens
gctattataattctt

SEQ ID NO: 1183328 - DNA, 15 bp, Homo sapiens
agctattataattct

SEQ ID NO: 1183329 - DNA, 15 bp, Homo sapiens
tagctattataattc

SEQ ID NO: 1183330 - DNA, 15 bp, Homo sapiens
ctagctattataatt

SEQ ID NO: 1183331 - DNA, 15 bp, Homo sapiens
gctagctattataat

SEQ ID NO: 1183332 - DNA, 15 bp, Homo sapiens
tgctagctattataa

SEQ ID NO: 1183333 - DNA, 15 bp, Homo sapiens
gtgctagctattata

SEQ ID NO: 1183334 - DNA, 15 bp, Homo sapiens
agtgctagctattat

SEQ ID NO: 1183335 - DNA, 15 bp, Homo sapiens
aagtgctagctatta

SEQ ID NO: 1183336 - DNA, 15 bp, Homo sapiens
aaagtgctagctatt

SEQ ID NO: 1183337 - DNA, 15 bp, Homo sapiens
gaaagtgctagctat

SEQ ID NO: 1183338 - DNA, 15 bp, Homo sapiens
ggaaagtgctagcta

SEQ ID NO: 1183339 - DNA, 15 bp, Homo sapiens
tggaaagtgctagct

SEQ ID NO: 1183340 - DNA, 15 bp, Homo sapiens
ttggaaagtgctagc

SEQ ID NO: 1183341 - DNA, 15 bp, Homo sapiens
cttggaaagtgctag

SEQ ID NO: 1183342 - DNA, 15 bp, Homo sapiens
gcttggaaagtgcta

SEQ ID NO: 1183343 - DNA, 15 bp, Homo sapiens
agcttggaaagtgct

SEQ ID NO: 1183344 - DNA, 15 bp, Homo sapiens
gagcttggaaagtgc

SEQ ID NO: 1183345 - DNA, 15 bp, Homo sapiens
agagcttggaaagtg

SEQ ID NO: 1183346 - DNA, 15 bp, Homo sapiens
aagagcttggaaagt

SEQ ID NO: 1183347 - DNA, 15 bp, Homo sapiens
taagagcttggaaag

SEQ ID NO: 1183348 - DNA, 15 bp, Homo sapiens
ataagagcttggaaa

SEQ ID NO: 1183349 - DNA, 15 bp, Homo sapiens
tataagagcttggaa

SEQ ID NO: 1183350 - DNA, 15 bp, Homo sapiens
atataagagcttgga

SEQ ID NO: 1183351 - DNA, 15 bp, Homo sapiens
catataagagcttgg

SEQ ID NO: 1183352 - DNA, 15 bp, Homo sapiens
tgcatataagagctt

SEQ ID NO: 1183353 - DNA, 15 bp, Homo sapiens
atgcatataagagct

SEQ ID NO: 1183354 - DNA, 15 bp, Homo sapiens
catgcatataagagc

SEQ ID NO: 1183355 - DNA, 15 bp, Homo sapiens
tcatgcatataagag

SEQ ID NO: 1183356 - DNA, 15 bp, Homo sapiens
gtcatgcatataaga

SEQ ID NO: 1183357 - DNA, 15 bp, Homo sapiens
tgtcatgcatataag

SEQ ID NO: 1183358 - DNA, 15 bp, Homo sapiens
gtgtcatgcatataa

SEQ ID NO: 1183359 - DNA, 15 bp, Homo sapiens
agtgtcatgcatata

SEQ ID NO: 1183360 - DNA, 15 bp, Homo sapiens
cagtgtcatgcatat

SEQ ID NO: 1183361 - DNA, 15 bp, Homo sapiens
acagtgtcatgcata

SEQ ID NO: 1183362 - DNA, 15 bp, Homo sapiens
aacagtgtcatgcat

SEQ ID NO: 1183363 - DNA, 15 bp, Homo sapiens
aaacagtgtcatgca

SEQ ID NO: 1183364 - DNA, 15 bp, Homo sapiens
aaaacagtgtcatgc

SEQ ID NO: 1183365 - DNA, 15 bp, Homo sapiens
taaaacagtgtcatg

SEQ ID NO: 1183366 - DNA, 15 bp, Homo sapiens
ttaaaacagtgtcat

SEQ ID NO: 1183367 - DNA, 15 bp, Homo sapiens
cttaaaacagtgtca

SEQ ID NO: 1183368 - DNA, 15 bp, Homo sapiens
tgcttaaaacagtgt

SEQ ID NO: 1183369 - DNA, 15 bp, Homo sapiens
gtgcttaaaacagtg

SEQ ID NO: 1183370 - DNA, 15 bp, Homo sapiens
agtgcttaaaacagt

SEQ ID NO: 1183371 - DNA, 15 bp, Homo sapiens
aagtgcttaaaacag

SEQ ID NO: 1183372 - DNA, 15 bp, Homo sapiens
taagtgcttaaaaca

SEQ ID NO: 1183373 - DNA, 15 bp, Homo sapiens
gtaagtgcttaaaac

SEQ ID NO: 1183374 - DNA, 15 bp, Homo sapiens
tgtaagtgcttaaaa

SEQ ID NO: 1183375 - DNA, 15 bp, Homo sapiens
atgtaagtgcttaaa

SEQ ID NO: 1183376 - DNA, 15 bp, Homo sapiens
catgtaagtgcttaa

SEQ ID NO: 1183377 - DNA, 15 bp, Homo sapiens
acatgtaagtgctta

SEQ ID NO: 1183378 - DNA, 15 bp, Homo sapiens
tacatgtaagtgctt

SEQ ID NO: 1183379 - DNA, 15 bp, Homo sapiens
atacatgtaagtgct

SEQ ID NO: 1183380 - DNA, 15 bp, Homo sapiens
aatacatgtaagtgc

SEQ ID NO: 1183381 - DNA, 15 bp, Homo sapiens
taatacatgtaagtg

SEQ ID NO: 1183382 - DNA, 15 bp, Homo sapiens
ttaatacatgtaagt

SEQ ID NO: 1183383 - DNA, 15 bp, Homo sapiens
gttaatacatgtaag

SEQ ID NO: 1183384 - DNA, 15 bp, Homo sapiens
tgagttaatacatgt

SEQ ID NO: 1183385 - DNA, 15 bp, Homo sapiens
gtgagttaatacatg

SEQ ID NO: 1183386 - DNA, 15 bp, Homo sapiens
agtgagttaatacat

SEQ ID NO: 1183387 - DNA, 15 bp, Homo sapiens
cagtgagttaataca

SEQ ID NO: 1183388 - DNA, 15 bp, Homo sapiens
tcagtgagttaatac

SEQ ID NO: 1183389 - DNA, 15 bp, Homo sapiens
ttcagtgagttaata

SEQ ID NO: 1183390 - DNA, 15 bp, Homo sapiens
attcagtgagttaat

SEQ ID NO: 1183391 - DNA, 15 bp, Homo sapiens
gattcagtgagttaa

SEQ ID NO: 1183392 - DNA, 15 bp, Homo sapiens
tgattcagtgagtta

SEQ ID NO: 1183393 - DNA, 15 bp, Homo sapiens
gtgattcagtgagtt

SEQ ID NO: 1183394 - DNA, 15 bp, Homo sapiens
ggtgattcagtgagt

SEQ ID NO: 1183395 - DNA, 15 bp, Homo sapiens
tggtgattcagtgag

SEQ ID NO: 1183396 - DNA, 15 bp, Homo sapiens
ttggtgattcagtga

SEQ ID NO: 1183397 - DNA, 15 bp, Homo sapiens
tttggtgattcagtg

SEQ ID NO: 1183398 - DNA, 15 bp, Homo sapiens
gtttggtgattcagt

SEQ ID NO: 1183399 - DNA, 15 bp, Homo sapiens
tgtttggtgattcag

SEQ ID NO: 1183400 - DNA, 15 bp, Homo sapiens
ttgtttggtgattca

SEQ ID NO: 1183401 - DNA, 15 bp, Homo sapiens
gttgtttggtgattc

SEQ ID NO: 1183402 - DNA, 15 bp, Homo sapiens
agttgtttggtgatt

SEQ ID NO: 1183403 - DNA, 15 bp, Homo sapiens
gagttgtttggtgat

SEQ ID NO: 1183404 - DNA, 15 bp, Homo sapiens
agagttgtttggtga

SEQ ID NO: 1183405 - DNA, 15 bp, Homo sapiens
cagagttgtttggtg

SEQ ID NO: 1183406 - DNA, 15 bp, Homo sapiens
acagagttgtttggt

SEQ ID NO: 1183407 - DNA, 15 bp, Homo sapiens
cacagagttgtttgg

SEQ ID NO: 1183408 - DNA, 15 bp, Homo sapiens
tcacagagttgtttg

SEQ ID NO: 1183409 - DNA, 15 bp, Homo sapiens
ttcacagagttgttt

SEQ ID NO: 1183410 - DNA, 15 bp, Homo sapiens
tttcacagagttgtt

SEQ ID NO: 1183411 - DNA, 15 bp, Homo sapiens
atttcacagagttgt

SEQ ID NO: 1183412 - DNA, 15 bp, Homo sapiens
tatttcacagagttg

SEQ ID NO: 1183413 - DNA, 15 bp, Homo sapiens
ctatttcacagagtt

SEQ ID NO: 1183414 - DNA, 15 bp, Homo sapiens
cctatttcacagagt

SEQ ID NO: 1183415 - DNA, 15 bp, Homo sapiens
acctatttcacagag

SEQ ID NO: 1183416 - DNA, 15 bp, Homo sapiens
tacctatttcacaga

SEQ ID NO: 1183417 - DNA, 15 bp, Homo sapiens
gtacctatttcacag

SEQ ID NO: 1183418 - DNA, 15 bp, Homo sapiens
agtacctatttcaca

SEQ ID NO: 1183419 - DNA, 15 bp, Homo sapiens
tagtacctatttcac

SEQ ID NO: 1183420 - DNA, 15 bp, Homo sapiens
atagtacctatttca

SEQ ID NO: 1183421 - DNA, 15 bp, Homo sapiens
gatagtacctatttc

SEQ ID NO: 1183422 - DNA, 15 bp, Homo sapiens
tgatagtacctattt

SEQ ID NO: 1183423 - DNA, 15 bp, Homo sapiens
atgatagtacctatt

SEQ ID NO: 1183424 - DNA, 15 bp, Homo sapiens
aatgatagtacctat

SEQ ID NO: 1183425 - DNA, 15 bp, Homo sapiens
taatgatagtaccta

SEQ ID NO: 1183426 - DNA, 15 bp, Homo sapiens
ataatgatagtacct

SEQ ID NO: 1183427 - DNA, 15 bp, Homo sapiens
gataatgatagtacc

SEQ ID NO: 1183428 - DNA, 15 bp, Homo sapiens
agataatgatagtac

SEQ ID NO: 1183429 - DNA, 15 bp, Homo sapiens
aagataatgatagta

SEQ ID NO: 1183430 - DNA, 15 bp, Homo sapiens
gaagataatgatagt

SEQ ID NO: 1183431 - DNA, 15 bp, Homo sapiens
tgaagataatgatag

SEQ ID NO: 1183432 - DNA, 15 bp, Homo sapiens
gtgaagataatgata

SEQ ID NO: 1183433 - DNA, 15 bp, Homo sapiens
agtgaagataatgat

SEQ ID NO: 1183434 - DNA, 15 bp, Homo sapiens
aagtgaagataatga

SEQ ID NO: 1183435 - DNA, 15 bp, Homo sapiens
aaagtgaagataatg

SEQ ID NO: 1183436 - DNA, 15 bp, Homo sapiens
ttgtaaagtgaagat

SEQ ID NO: 1183437 - DNA, 15 bp, Homo sapiens
cttgtaaagtgaaga

SEQ ID NO: 1183438 - DNA, 15 bp, Homo sapiens
acttgtaaagtgaag

SEQ ID NO: 1183439 - DNA, 15 bp, Homo sapiens
cacttgtaaagtgaa

SEQ ID NO: 1183440 - DNA, 15 bp, Homo sapiens
tcacttgtaaagtga

SEQ ID NO: 1183441 - DNA, 15 bp, Homo sapiens
ctcacttgtaaagtg

SEQ ID NO: 1183442 - DNA, 15 bp, Homo sapiens
cctcacttgtaaagt

SEQ ID NO: 1183443 - DNA, 15 bp, Homo sapiens
tcctcacttgtaaag

SEQ ID NO: 1183444 - DNA, 15 bp, Homo sapiens
gtcctcacttgtaaa

SEQ ID NO: 1183445 - DNA, 15 bp, Homo sapiens
tgtcctcacttgtaa

SEQ ID NO: 1183446 - DNA, 15 bp, Homo sapiens
ctcagtgtcctcact

SEQ ID NO: 1183447 - DNA, 15 bp, Homo sapiens
tctcagtgtcctcac

SEQ ID NO: 1183448 - DNA, 15 bp, Homo sapiens
gtctcagtgtcctca

SEQ ID NO: 1183449 - DNA, 15 bp, Homo sapiens
tgtctcagtgtcctc

SEQ ID NO: 1183450 - DNA, 15 bp, Homo sapiens
gtgtctcagtgtcct

SEQ ID NO: 1183451 - DNA, 15 bp, Homo sapiens
tgtgtctcagtgtcc

SEQ ID NO: 1183452 - DNA, 15 bp, Homo sapiens
ctgtgtctcagtgtc

SEQ ID NO: 1183453 - DNA, 15 bp, Homo sapiens
tctgtgtctcagtgt

SEQ ID NO: 1183454 - DNA, 15 bp, Homo sapiens
ctctgtgtctcagtg

SEQ ID NO: 1183455 - DNA, 15 bp, Homo sapiens
ttctctgtgtctcag

SEQ ID NO: 1183456 - DNA, 15 bp, Homo sapiens
cttctctgtgtctca

SEQ ID NO: 1183457 - DNA, 15 bp, Homo sapiens
acttctctgtgtctc

SEQ ID NO: 1183458 - DNA, 15 bp, Homo sapiens
tacttctctgtgtct

SEQ ID NO: 1183459 - DNA, 15 bp, Homo sapiens
gtacttctctgtgtc

SEQ ID NO: 1183460 - DNA, 15 bp, Homo sapiens
tgtacttctctgtgt

SEQ ID NO: 1183461 - DNA, 15 bp, Homo sapiens
ctgtacttctctgtg

SEQ ID NO: 1183462 - DNA, 15 bp, Homo sapiens
tctgtacttctctgt

SEQ ID NO: 1183463 - DNA, 15 bp, Homo sapiens
ttctgtacttctctg

SEQ ID NO: 1183464 - DNA, 15 bp, Homo sapiens
attctgtacttctct

SEQ ID NO: 1183465 - DNA, 15 bp, Homo sapiens
cattctgtacttctc

SEQ ID NO: 1183466 - DNA, 15 bp, Homo sapiens
acattctgtacttct

SEQ ID NO: 1183467 - DNA, 15 bp, Homo sapiens
cacattctgtacttc

SEQ ID NO: 1183468 - DNA, 15 bp, Homo sapiens
tcacattctgtactt

SEQ ID NO: 1183469 - DNA, 15 bp, Homo sapiens
atcacattctgtact

SEQ ID NO: 1183470 - DNA, 15 bp, Homo sapiens
aatcacattctgtac

SEQ ID NO: 1183471 - DNA, 15 bp, Homo sapiens
taatcacattctgta

SEQ ID NO: 1183472 - DNA, 15 bp, Homo sapiens
ttaatcacattctgt

SEQ ID NO: 1183473 - DNA, 15 bp, Homo sapiens
tttaatcacattctg

SEQ ID NO: 1183474 - DNA, 15 bp, Homo sapiens
ctttaatcacattct

SEQ ID NO: 1183475 - DNA, 15 bp, Homo sapiens
cctttaatcacattc

SEQ ID NO: 1183476 - DNA, 15 bp, Homo sapiens
gcctttaatcacatt

SEQ ID NO: 1183477 - DNA, 15 bp, Homo sapiens
tgcctttaatcacat

SEQ ID NO: 1183478 - DNA, 15 bp, Homo sapiens
gtgcctttaatcaca

SEQ ID NO: 1183479 - DNA, 15 bp, Homo sapiens
tgtgcctttaatcac

SEQ ID NO: 1183480 - DNA, 15 bp, Homo sapiens
atgtgcctttaatca

SEQ ID NO: 1183481 - DNA, 15 bp, Homo sapiens
tatgtgcctttaatc

SEQ ID NO: 1183482 - DNA, 15 bp, Homo sapiens
ctatgtgcctttaat

SEQ ID NO: 1183483 - DNA, 15 bp, Homo sapiens
tctatgtgcctttaa

SEQ ID NO: 1183484 - DNA, 15 bp, Homo sapiens
atctatgtgccttta

SEQ ID NO: 1183485 - DNA, 15 bp, Homo sapiens
aatctatgtgccttt

SEQ ID NO: 1183486 - DNA, 15 bp, Homo sapiens
gaatctatgtgcctt

SEQ ID NO: 1183487 - DNA, 15 bp, Homo sapiens
agaatctatgtgcct

SEQ ID NO: 1183488 - DNA, 15 bp, Homo sapiens
tagaatctatgtgcc

SEQ ID NO: 1183489 - DNA, 15 bp, Homo sapiens
ttagaatctatgtgc

SEQ ID NO: 1183490 - DNA, 15 bp, Homo sapiens
cttagaatctatgtg

SEQ ID NO: 1183491 - DNA, 15 bp, Homo sapiens
acttagaatctatgt

SEQ ID NO: 1183492 - DNA, 15 bp, Homo sapiens
cacttagaatctatg

SEQ ID NO: 1183493 - DNA, 15 bp, Homo sapiens
gcacttagaatctat

SEQ ID NO: 1183494 - DNA, 15 bp, Homo sapiens
tgcacttagaatcta

SEQ ID NO: 1183495 - DNA, 15 bp, Homo sapiens
ttgcacttagaatct

SEQ ID NO: 1183496 - DNA, 15 bp, Homo sapiens
gttgcacttagaatc

SEQ ID NO: 1183497 - DNA, 15 bp, Homo sapiens
cgttgcacttagaat

SEQ ID NO: 1183498 - DNA, 15 bp, Homo sapiens
tcgttgcacttagaa

SEQ ID NO: 1183499 - DNA, 15 bp, Homo sapiens
ttcgttgcacttaga

SEQ ID NO: 1183500 - DNA, 15 bp, Homo sapiens
attcgttgcacttag

SEQ ID NO: 1183501 - DNA, 15 bp, Homo sapiens
gattcgttgcactta

SEQ ID NO: 1183502 - DNA, 15 bp, Homo sapiens
ggattcgttgcactt

SEQ ID NO: 1183503 - DNA, 15 bp, Homo sapiens
tggattcgttgcact

SEQ ID NO: 1183504 - DNA, 15 bp, Homo sapiens
ctggattcgttgcac

SEQ ID NO: 1183505 - DNA, 15 bp, Homo sapiens
cctggattcgttgca

SEQ ID NO: 1183506 - DNA, 15 bp, Homo sapiens
ccctggattcgttgc

SEQ ID NO: 1183507 - DNA, 15 bp, Homo sapiens
accctggattcgttg

SEQ ID NO: 1183508 - DNA, 15 bp, Homo sapiens
aaccctggattcgtt

SEQ ID NO: 1183509 - DNA, 15 bp, Homo sapiens
aaaccctggattcgt

SEQ ID NO: 1183510 - DNA, 15 bp, Homo sapiens
aaaaccctggattcg

SEQ ID NO: 1183511 - DNA, 15 bp, Homo sapiens
taaaaccctggattc

SEQ ID NO: 1183512 - DNA, 15 bp, Homo sapiens
ttaaaaccctggatt

SEQ ID NO: 1183513 - DNA, 15 bp, Homo sapiens
gttaaaaccctggat

SEQ ID NO: 1183514 - DNA, 15 bp, Homo sapiens
agttaaaaccctgga

SEQ ID NO: 1183515 - DNA, 15 bp, Homo sapiens
gagttaaaaccctgg

SEQ ID NO: 1183516 - DNA, 15 bp, Homo sapiens
tgagttaaaaccctg

SEQ ID NO: 1183517 - DNA, 15 bp, Homo sapiens
ctgagttaaaaccct

SEQ ID NO: 1183518 - DNA, 15 bp, Homo sapiens
cctgagttaaaaccc

SEQ ID NO: 1183519 - DNA, 15 bp, Homo sapiens
gcctgagttaaaacc

SEQ ID NO: 1183520 - DNA, 15 bp, Homo sapiens
tgcctgagttaaaac

SEQ ID NO: 1183521 - DNA, 15 bp, Homo sapiens
ctgcctgagttaaaa

SEQ ID NO: 1183522 - DNA, 15 bp, Homo sapiens
gctgcctgagttaaa

SEQ ID NO: 1183523 - DNA, 15 bp, Homo sapiens
ggctgcctgagttaa

SEQ ID NO: 1183524 - DNA, 15 bp, Homo sapiens
aggctgcctgagtta

SEQ ID NO: 1183525 - DNA, 15 bp, Homo sapiens
taggctgcctgagtt

SEQ ID NO: 1183526 - DNA, 15 bp, Homo sapiens
gtaggctgcctgagt

SEQ ID NO: 1183527 - DNA, 15 bp, Homo sapiens
agtaggctgcctgag

SEQ ID NO: 1183528 - DNA, 15 bp, Homo sapiens
gagtaggctgcctga

SEQ ID NO: 1183529 - DNA, 15 bp, Homo sapiens
tgagtaggctgcctg

SEQ ID NO: 1183530 - DNA, 15 bp, Homo sapiens
ttgagtaggctgcct

SEQ ID NO: 1183531 - DNA, 15 bp, Homo sapiens
cttgagtaggctgcc

SEQ ID NO: 1183532 - DNA, 15 bp, Homo sapiens
gcttgagtaggctgc

SEQ ID NO: 1183533 - DNA, 15 bp, Homo sapiens
tgcttgagtaggctg

SEQ ID NO: 1183534 - DNA, 15 bp, Homo sapiens
gtgcttgagtaggct

SEQ ID NO: 1183535 - DNA, 15 bp, Homo sapiens
cgtgcttgagtaggc

SEQ ID NO: 1183536 - DNA, 15 bp, Homo sapiens
gcgtgcttgagtagg

SEQ ID NO: 1183537 - DNA, 15 bp, Homo sapiens
tgcgtgcttgagtag

SEQ ID NO: 1183538 - DNA, 15 bp, Homo sapiens
atgcgtgcttgagta

SEQ ID NO: 1183539 - DNA, 15 bp, Homo sapiens
catgcgtgcttgagt

SEQ ID NO: 1183540 - DNA, 15 bp, Homo sapiens
ccatgcgtgcttgag

SEQ ID NO: 1183541 - DNA, 15 bp, Homo sapiens
accatgcgtgcttga

SEQ ID NO: 1183542 - DNA, 15 bp, Homo sapiens
taccatgcgtgcttg

SEQ ID NO: 1183543 - DNA, 15 bp, Homo sapiens
gtaccatgcgtgctt

SEQ ID NO: 1183544 - DNA, 15 bp, Homo sapiens
ggtaccatgcgtgct

SEQ ID NO: 1183545 - DNA, 15 bp, Homo sapiens
aggtaccatgcgtgc

SEQ ID NO: 1183546 - DNA, 15 bp, Homo sapiens
caggtaccatgcgtg

SEQ ID NO: 1183547 - DNA, 15 bp, Homo sapiens
tcaggtaccatgcgt

SEQ ID NO: 1183548 - DNA, 15 bp, Homo sapiens
gtcaggtaccatgcg

SEQ ID NO: 1183549 - DNA, 15 bp, Homo sapiens
tgtcaggtaccatgc

SEQ ID NO: 1183550 - DNA, 15 bp, Homo sapiens
ttgtcaggtaccatg

SEQ ID NO: 1183551 - DNA, 15 bp, Homo sapiens
gttgtcaggtaccat

SEQ ID NO: 1183552 - DNA, 15 bp, Homo sapiens
ggttgtcaggtacca

SEQ ID NO: 1183553 - DNA, 15 bp, Homo sapiens
aggttgtcaggtacc

SEQ ID NO: 1183554 - DNA, 15 bp, Homo sapiens
aaggttgtcaggtac

SEQ ID NO: 1183555 - DNA, 15 bp, Homo sapiens
caaggttgtcaggta

SEQ ID NO: 1183556 - DNA, 15 bp, Homo sapiens
tcaaggttgtcaggt

SEQ ID NO: 1183557 - DNA, 15 bp, Homo sapiens
gtcaaggttgtcagg

SEQ ID NO: 1183558 - DNA, 15 bp, Homo sapiens
tgtcaaggttgtcag

SEQ ID NO: 1183559 - DNA, 15 bp, Homo sapiens
ctgtcaaggttgtca

SEQ ID NO: 1183560 - DNA, 15 bp, Homo sapiens
gctgtcaaggttgtc

SEQ ID NO: 1183561 - DNA, 15 bp, Homo sapiens
tgctgtcaaggttgt

SEQ ID NO: 1183562 - DNA, 15 bp, Homo sapiens
atgctgtcaaggttg

SEQ ID NO: 1183563 - DNA, 15 bp, Homo sapiens
catgctgtcaaggtt

SEQ ID NO: 1183564 - DNA, 15 bp, Homo sapiens
gcatgctgtcaaggt

SEQ ID NO: 1183565 - DNA, 15 bp, Homo sapiens
agcatgctgtcaagg

SEQ ID NO: 1183566 - DNA, 15 bp, Homo sapiens
gagcatgctgtcaag

SEQ ID NO: 1183567 - DNA, 15 bp, Homo sapiens
agagcatgctgtcaa

SEQ ID NO: 1183568 - DNA, 15 bp, Homo sapiens
tagagcatgctgtca

SEQ ID NO: 1183569 - DNA, 15 bp, Homo sapiens
atagagcatgctgtc

SEQ ID NO: 1183570 - DNA, 15 bp, Homo sapiens
tatagagcatgctgt

SEQ ID NO: 1183571 - DNA, 15 bp, Homo sapiens
ctatagagcatgctg

SEQ ID NO: 1183572 - DNA, 15 bp, Homo sapiens
tctatagagcatgct

SEQ ID NO: 1183573 - DNA, 15 bp, Homo sapiens
ctctatagagcatgc

SEQ ID NO: 1183574 - DNA, 15 bp, Homo sapiens
gctctatagagcatg

SEQ ID NO: 1183575 - DNA, 15 bp, Homo sapiens
tgctctatagagcat

SEQ ID NO: 1183576 - DNA, 15 bp, Homo sapiens
atgctctatagagca

SEQ ID NO: 1183577 - DNA, 15 bp, Homo sapiens
tatgctctatagagc

SEQ ID NO: 1183578 - DNA, 15 bp, Homo sapiens
gtatgctctatagag

SEQ ID NO: 1183579 - DNA, 15 bp, Homo sapiens
tgtatgctctataga

SEQ ID NO: 1183580 - DNA, 15 bp, Homo sapiens
atgtatgctctatag

SEQ ID NO: 1183581 - DNA, 15 bp, Homo sapiens
aatgtatgctctata

SEQ ID NO: 1183582 - DNA, 15 bp, Homo sapiens
aaatgtatgctctat

SEQ ID NO: 1183583 - DNA, 15 bp, Homo sapiens
taaatgtatgctcta

SEQ ID NO: 1183584 - DNA, 15 bp, Homo sapiens
ataaatgtatgctct

SEQ ID NO: 1183585 - DNA, 15 bp, Homo sapiens
aataaatgtatgctc

SEQ ID NO: 1183586 - DNA, 15 bp, Homo sapiens
gaataaatgtatgct

SEQ ID NO: 1183587 - DNA, 15 bp, Homo sapiens
agaataaatgtatgc

SEQ ID NO: 1183588 - DNA, 15 bp, Homo sapiens
aagaataaatgtatg

SEQ ID NO: 1183589 - DNA, 15 bp, Homo sapiens
aaagaataaatgtat

SEQ ID NO: 1183590 - DNA, 15 bp, Homo sapiens
caaagaataaatgta

SEQ ID NO: 1183591 - DNA, 15 bp, Homo sapiens
gcaaagaataaatgt

SEQ ID NO: 1183592 - DNA, 15 bp, Homo sapiens
agcaaagaataaatg

SEQ ID NO: 1183593 - DNA, 15 bp, Homo sapiens
aagcaaagaataaat

SEQ ID NO: 1183594 - DNA, 15 bp, Homo sapiens
gaagcaaagaataaa

SEQ ID NO: 1183595 - DNA, 15 bp, Homo sapiens
agaagcaaagaataa

SEQ ID NO: 1183596 - DNA, 15 bp, Homo sapiens
aagaagcaaagaata

SEQ ID NO: 1183597 - DNA, 15 bp, Homo sapiens
gaagaagcaaagaat

SEQ ID NO: 1183598 - DNA, 15 bp, Homo sapiens
agaagaagcaaagaa

SEQ ID NO: 1183599 - DNA, 15 bp, Homo sapiens
aagaagaagcaaaga

SEQ ID NO: 1183600 - DNA, 15 bp, Homo sapiens
gaagaagaagcaaag

SEQ ID NO: 1183601 - DNA, 15 bp, Homo sapiens
ggaagaagaagcaaa

SEQ ID NO: 1183602 - DNA, 15 bp, Homo sapiens
tggaagaagaagcaa

SEQ ID NO: 1183603 - DNA, 15 bp, Homo sapiens
atggaagaagaagca

SEQ ID NO: 1183604 - DNA, 15 bp, Homo sapiens
gatggaagaagaagc

SEQ ID NO: 1183605 - DNA, 15 bp, Homo sapiens
ggatggaagaagaag

SEQ ID NO: 1183606 - DNA, 15 bp, Homo sapiens
gggatggaagaagaa

SEQ ID NO: 1183607 - DNA, 15 bp, Homo sapiens
ggggatggaagaaga

SEQ ID NO: 1183608 - DNA, 15 bp, Homo sapiens
tggggatggaagaag

SEQ ID NO: 1183609 - DNA, 15 bp, Homo sapiens
gtggggatggaagaa

SEQ ID NO: 1183610 - DNA, 15 bp, Homo sapiens
tgtggggatggaaga

SEQ ID NO: 1183611 - DNA, 15 bp, Homo sapiens
atgtggggatggaag

SEQ ID NO: 1183612 - DNA, 15 bp, Homo sapiens
gatgtggggatggaa

SEQ ID NO: 1183613 - DNA, 15 bp, Homo sapiens
ggatgtggggatgga

SEQ ID NO: 1183614 - DNA, 15 bp, Homo sapiens
gggatgtggggatgg

SEQ ID NO: 1183615 - DNA, 15 bp, Homo sapiens
agggatgtggggatg

SEQ ID NO: 1183616 - DNA, 15 bp, Homo sapiens
tagggatgtggggat

SEQ ID NO: 1183617 - DNA, 15 bp, Homo sapiens
ctagggatgtgggga

SEQ ID NO: 1183618 - DNA, 15 bp, Homo sapiens
gctagggatgtgggg

SEQ ID NO: 1183619 - DNA, 15 bp, Homo sapiens
ggctagggatgtggg

SEQ ID NO: 1183620 - DNA, 15 bp, Homo sapiens
tggctagggatgtgg

SEQ ID NO: 1183621 - DNA, 15 bp, Homo sapiens
atggctagggatgtg

SEQ ID NO: 1183622 - DNA, 15 bp, Homo sapiens
catggctagggatgt

SEQ ID NO: 1183623 - DNA, 15 bp, Homo sapiens
ccatggctagggatg

SEQ ID NO: 1183624 - DNA, 15 bp, Homo sapiens
tccatggctagggat

SEQ ID NO: 1183625 - DNA, 15 bp, Homo sapiens
ttccatggctaggga

SEQ ID NO: 1183626 - DNA, 15 bp, Homo sapiens
tttccatggctaggg

SEQ ID NO: 1183627 - DNA, 15 bp, Homo sapiens
atttccatggctagg

SEQ ID NO: 1183628 - DNA, 15 bp, Homo sapiens
catttccatggctag

SEQ ID NO: 1183629 - DNA, 15 bp, Homo sapiens
gcatttccatggcta

SEQ ID NO: 1183630 - DNA, 15 bp, Homo sapiens
agcatttccatggct

SEQ ID NO: 1183631 - DNA, 15 bp, Homo sapiens
cagcatttccatggc

SEQ ID NO: 1183632 - DNA, 15 bp, Homo sapiens
tcagcatttccatgg

SEQ ID NO: 1183633 - DNA, 15 bp, Homo sapiens
ctcagcatttccatg

SEQ ID NO: 1183634 - DNA, 15 bp, Homo sapiens
actcagcatttccat

SEQ ID NO: 1183635 - DNA, 15 bp, Homo sapiens
tactcagcatttcca

SEQ ID NO: 1183636 - DNA, 15 bp, Homo sapiens
ttactcagcatttcc

SEQ ID NO: 1183637 - DNA, 15 bp, Homo sapiens
gttactcagcatttc

SEQ ID NO: 1183638 - DNA, 15 bp, Homo sapiens
agttactcagcattt

SEQ ID NO: 1183639 - DNA, 15 bp, Homo sapiens
aagttactcagcatt

SEQ ID NO: 1183640 - DNA, 15 bp, Homo sapiens
aaagttactcagcat

SEQ ID NO: 1183641 - DNA, 15 bp, Homo sapiens
aaaagttactcagca

SEQ ID NO: 1183642 - DNA, 15 bp, Homo sapiens
taaaagttactcagc

SEQ ID NO: 1183643 - DNA, 15 bp, Homo sapiens
ttaaaagttactcag

SEQ ID NO: 1183644 - DNA, 15 bp, Homo sapiens
cttaaaagttactca

SEQ ID NO: 1183645 - DNA, 15 bp, Homo sapiens
ccttaaaagttactc

SEQ ID NO: 1183646 - DNA, 15 bp, Homo sapiens
gccttaaaagttact

SEQ ID NO: 1183647 - DNA, 15 bp, Homo sapiens
tggccttaaaagtta

SEQ ID NO: 1183648 - DNA, 15 bp, Homo sapiens
ttggccttaaaagtt

SEQ ID NO: 1183649 - DNA, 15 bp, Homo sapiens
tttggccttaaaagt

SEQ ID NO: 1183650 - DNA, 15 bp, Homo sapiens
gtttggccttaaaag

SEQ ID NO: 1183651 - DNA, 15 bp, Homo sapiens
agtttggccttaaaa

SEQ ID NO: 1183652 - DNA, 15 bp, Homo sapiens
gagtttggccttaaa

SEQ ID NO: 1183653 - DNA, 15 bp, Homo sapiens
tgagtttggccttaa

SEQ ID NO: 1183654 - DNA, 15 bp, Homo sapiens
atgagtttggcctta

SEQ ID NO: 1183655 - DNA, 15 bp, Homo sapiens
gatgagtttggcctt

SEQ ID NO: 1183656 - DNA, 15 bp, Homo sapiens
agatgagtttggcct

SEQ ID NO: 1183657 - DNA, 15 bp, Homo sapiens
gagatgagtttggcc

SEQ ID NO: 1183658 - DNA, 15 bp, Homo sapiens
agagatgagtttggc

SEQ ID NO: 1183659 - DNA, 15 bp, Homo sapiens
aagagatgagtttgg

SEQ ID NO: 1183660 - DNA, 15 bp, Homo sapiens
aaagagatgagtttg

SEQ ID NO: 1183661 - DNA, 15 bp, Homo sapiens
gaaagagatgagttt

SEQ ID NO: 1183662 - DNA, 15 bp, Homo sapiens
ggaaagagatgagtt

SEQ ID NO: 1183663 - DNA, 15 bp, Homo sapiens
aggaaagagatgagt

SEQ ID NO: 1183664 - DNA, 15 bp, Homo sapiens
taggaaagagatgag

SEQ ID NO: 1183665 - DNA, 15 bp, Homo sapiens
ctaggaaagagatga

SEQ ID NO: 1183666 - DNA, 15 bp, Homo sapiens
gctaggaaagagatg

SEQ ID NO: 1183667 - DNA, 15 bp, Homo sapiens
ttgctaggaaagaga

SEQ ID NO: 1183668 - DNA, 15 bp, Homo sapiens
attgctaggaaagag

SEQ ID NO: 1183669 - DNA, 15 bp, Homo sapiens
cattgctaggaaaga

SEQ ID NO: 1183670 - DNA, 15 bp, Homo sapiens
gcattgctaggaaag

SEQ ID NO: 1183671 - DNA, 15 bp, Homo sapiens
ggcattgctaggaaa

SEQ ID NO: 1183672 - DNA, 15 bp, Homo sapiens
aggcattgctaggaa

SEQ ID NO: 1183673 - DNA, 15 bp, Homo sapiens
gaggcattgctagga

SEQ ID NO: 1183674 - DNA, 15 bp, Homo sapiens
agaggcattgctagg

SEQ ID NO: 1183675 - DNA, 15 bp, Homo sapiens
aagaggcattgctag

SEQ ID NO: 1183676 - DNA, 15 bp, Homo sapiens
gaagaggcattgcta

SEQ ID NO: 1183677 - DNA, 15 bp, Homo sapiens
ggaagaggcattgct

SEQ ID NO: 1183678 - DNA, 15 bp, Homo sapiens
tggaagaggcattgc

SEQ ID NO: 1183679 - DNA, 15 bp, Homo sapiens
ttggaagaggcattg

SEQ ID NO: 1183680 - DNA, 15 bp, Homo sapiens
gttggaagaggcatt

SEQ ID NO: 1183681 - DNA, 15 bp, Homo sapiens
agttggaagaggcat

SEQ ID NO: 1183682 - DNA, 15 bp, Homo sapiens
aagttggaagaggca

SEQ ID NO: 1183683 - DNA, 15 bp, Homo sapiens
gaagttggaagaggc

SEQ ID NO: 1183684 - DNA, 15 bp, Homo sapiens
tgaagttggaagagg

SEQ ID NO: 1183685 - DNA, 15 bp, Homo sapiens
atgaagttggaagag

SEQ ID NO: 1183686 - DNA, 15 bp, Homo sapiens
gatgaagttggaaga

SEQ ID NO: 1183687 - DNA, 15 bp, Homo sapiens
tgatgaagttggaag

SEQ ID NO: 1183688 - DNA, 15 bp, Homo sapiens
atgatgaagttggaa

SEQ ID NO: 1183689 - DNA, 15 bp, Homo sapiens
tatgatgaagttgga

SEQ ID NO: 1183690 - DNA, 15 bp, Homo sapiens
ttatgatgaagttgg

SEQ ID NO: 1183691 - DNA, 15 bp, Homo sapiens
cttatgatgaagttg

SEQ ID NO: 1183692 - DNA, 15 bp, Homo sapiens
tcttatgatgaagtt

SEQ ID NO: 1183693 - DNA, 15 bp, Homo sapiens
ctcttatgatgaagt

SEQ ID NO: 1183694 - DNA, 15 bp, Homo sapiens
tctcttatgatgaag

SEQ ID NO: 1183695 - DNA, 15 bp, Homo sapiens
ttctcttatgatgaa

SEQ ID NO: 1183696 - DNA, 15 bp, Homo sapiens
tttctcttatgatga

SEQ ID NO: 1183697 - DNA, 15 bp, Homo sapiens
gtttctcttatgatg

SEQ ID NO: 1183698 - DNA, 15 bp, Homo sapiens
agtttctcttatgat

SEQ ID NO: 1183699 - DNA, 15 bp, Homo sapiens
aagtttctcttatga

SEQ ID NO: 1183700 - DNA, 15 bp, Homo sapiens
taagtttctcttatg

SEQ ID NO: 1183701 - DNA, 15 bp, Homo sapiens
ataagtttctcttat

SEQ ID NO: 1183702 - DNA, 15 bp, Homo sapiens
gataagtttctctta

SEQ ID NO: 1183703 - DNA, 15 bp, Homo sapiens
agataagtttctctt

SEQ ID NO: 1183704 - DNA, 15 bp, Homo sapiens
aagataagtttctct

SEQ ID NO: 1183705 - DNA, 15 bp, Homo sapiens
aaagataagtttctc

SEQ ID NO: 1183706 - DNA, 15 bp, Homo sapiens
gaaagataagtttct

SEQ ID NO: 1183707 - DNA, 15 bp, Homo sapiens
ggaaagataagtttc

SEQ ID NO: 1183708 - DNA, 15 bp, Homo sapiens
gggaaagataagttt

SEQ ID NO: 1183709 - DNA, 15 bp, Homo sapiens
agggaaagataagtt

SEQ ID NO: 1183710 - DNA, 15 bp, Homo sapiens
cagggaaagataagt

SEQ ID NO: 1183711 - DNA, 15 bp, Homo sapiens
acagggaaagataag

SEQ ID NO: 1183712 - DNA, 15 bp, Homo sapiens
aacagggaaagataa

SEQ ID NO: 1183713 - DNA, 15 bp, Homo sapiens
taacagggaaagata

SEQ ID NO: 1183714 - DNA, 15 bp, Homo sapiens
ctaacagggaaagat

SEQ ID NO: 1183715 - DNA, 15 bp, Homo sapiens
tctaacagggaaaga

SEQ ID NO: 1183716 - DNA, 15 bp, Homo sapiens
ctctaacagggaaag

SEQ ID NO: 1183717 - DNA, 15 bp, Homo sapiens
cctctaacagggaaa

SEQ ID NO: 1183718 - DNA, 15 bp, Homo sapiens
gcctctaacagggaa

SEQ ID NO: 1183719 - DNA, 15 bp, Homo sapiens
ggcctctaacaggga

SEQ ID NO: 1183720 - DNA, 15 bp, Homo sapiens
aggcctctaacaggg

SEQ ID NO: 1183721 - DNA, 15 bp, Homo sapiens
gaggcctctaacagg

SEQ ID NO: 1183722 - DNA, 15 bp, Homo sapiens
agaggcctctaacag

SEQ ID NO: 1183723 - DNA, 15 bp, Homo sapiens
gagaggcctctaaca

SEQ ID NO: 1183724 - DNA, 15 bp, Homo sapiens
agagaggcctctaac

SEQ ID NO: 1183725 - DNA, 15 bp, Homo sapiens
aagagaggcctctaa

SEQ ID NO: 1183726 - DNA, 15 bp, Homo sapiens
aaagagaggcctcta

SEQ ID NO: 1183727 - DNA, 15 bp, Homo sapiens
aaaagagaggcctct

SEQ ID NO: 1183728 - DNA, 15 bp, Homo sapiens
aaaaagagaggcctc

SEQ ID NO: 1183729 - DNA, 15 bp, Homo sapiens
aaaaaagagaggcct

SEQ ID NO: 1183730 - DNA, 15 bp, Homo sapiens
aaaaaaagagaggcc

SEQ ID NO: 1183731 - DNA, 15 bp, Homo sapiens
caaaaaaagagaggc

SEQ ID NO: 1183732 - DNA, 15 bp, Homo sapiens
acaaaaaaagagagg

SEQ ID NO: 1183733 - DNA, 15 bp, Homo sapiens
tacaaaaaaagagag

SEQ ID NO: 1183734 - DNA, 15 bp, Homo sapiens
gtacaaaaaaagaga

SEQ ID NO: 1183735 - DNA, 15 bp, Homo sapiens
tgtacaaaaaaagag

SEQ ID NO: 1183736 - DNA, 15 bp, Homo sapiens
atgtacaaaaaaaga

SEQ ID NO: 1183737 - DNA, 15 bp, Homo sapiens
tatgtacaaaaaaag

SEQ ID NO: 1183738 - DNA, 15 bp, Homo sapiens
gtatgtacaaaaaaa

SEQ ID NO: 1183739 - DNA, 15 bp, Homo sapiens
tgtatgtacaaaaaa

SEQ ID NO: 1183740 - DNA, 15 bp, Homo sapiens
ctgtatgtacaaaaa

SEQ ID NO: 1183741 - DNA, 15 bp, Homo sapiens
actgtatgtacaaaa

SEQ ID NO: 1183742 - DNA, 15 bp, Homo sapiens
tactgtatgtacaaa

SEQ ID NO: 1183743 - DNA, 15 bp, Homo sapiens
ttactgtatgtacaa

SEQ ID NO: 1183744 - DNA, 15 bp, Homo sapiens
attactgtatgtaca

SEQ ID NO: 1183745 - DNA, 15 bp, Homo sapiens
aattactgtatgtac

SEQ ID NO: 1183746 - DNA, 15 bp, Homo sapiens
aaattactgtatgta

SEQ ID NO: 1183747 - DNA, 15 bp, Homo sapiens
aaaattactgtatgt

SEQ ID NO: 1183748 - DNA, 15 bp, Homo sapiens
gaaaattactgtatg

SEQ ID NO: 1183749 - DNA, 15 bp, Homo sapiens
ggaaaattactgtat

SEQ ID NO: 1183750 - DNA, 15 bp, Homo sapiens
gggaaaattactgta

SEQ ID NO: 1183751 - DNA, 15 bp, Homo sapiens
tgggaaaattactgt

SEQ ID NO: 1183752 - DNA, 15 bp, Homo sapiens
ttgggaaaattactg

SEQ ID NO: 1183753 - DNA, 15 bp, Homo sapiens
gttgggaaaattact

SEQ ID NO: 1183754 - DNA, 15 bp, Homo sapiens
ggttgggaaaattac

SEQ ID NO: 1183755 - DNA, 15 bp, Homo sapiens
aggttgggaaaatta

SEQ ID NO: 1183756 - DNA, 15 bp, Homo sapiens
aaggttgggaaaatt

SEQ ID NO: 1183757 - DNA, 15 bp, Homo sapiens
taaggttgggaaaat

SEQ ID NO: 1183758 - DNA, 15 bp, Homo sapiens
gtaaggttgggaaaa

SEQ ID NO: 1183759 - DNA, 15 bp, Homo sapiens
agtaaggttgggaaa

SEQ ID NO: 1183760 - DNA, 15 bp, Homo sapiens
aagtaaggttgggaa

SEQ ID NO: 1183761 - DNA, 15 bp, Homo sapiens
taagtaaggttggga

SEQ ID NO: 1183762 - DNA, 15 bp, Homo sapiens
ataagtaaggttggg

SEQ ID NO: 1183763 - DNA, 15 bp, Homo sapiens
tataagtaaggttgg

SEQ ID NO: 1183764 - DNA, 15 bp, Homo sapiens
atataagtaaggttg

SEQ ID NO: 1183765 - DNA, 15 bp, Homo sapiens
aatataagtaaggtt

SEQ ID NO: 1183766 - DNA, 15 bp, Homo sapiens
taatataagtaaggt

SEQ ID NO: 1183767 - DNA, 15 bp, Homo sapiens
ctaatataagtaagg

SEQ ID NO: 1183768 - DNA, 15 bp, Homo sapiens
tctaatataagtaag

SEQ ID NO: 1183769 - DNA, 15 bp, Homo sapiens
ctctaatataagtaa

SEQ ID NO: 1183770 - DNA, 15 bp, Homo sapiens
actctaatataagta

SEQ ID NO: 1183771 - DNA, 15 bp, Homo sapiens
aactctaatataagt

SEQ ID NO: 1183772 - DNA, 15 bp, Homo sapiens
taactctaatataag

SEQ ID NO: 1183773 - DNA, 15 bp, Homo sapiens
ttaactctaatataa

SEQ ID NO: 1183774 - DNA, 15 bp, Homo sapiens
cttaactctaatata

SEQ ID NO: 1183775 - DNA, 15 bp, Homo sapiens
tcttaactctaatat

SEQ ID NO: 1183776 - DNA, 15 bp, Homo sapiens
ttcttaactctaata

SEQ ID NO: 1183777 - DNA, 15 bp, Homo sapiens
attcttaactctaat

SEQ ID NO: 1183778 - DNA, 15 bp, Homo sapiens
cattcttaactctaa

SEQ ID NO: 1183779 - DNA, 15 bp, Homo sapiens
acattcttaactcta

SEQ ID NO: 1183780 - DNA, 15 bp, Homo sapiens
cacattcttaactct

SEQ ID NO: 1183781 - DNA, 15 bp, Homo sapiens
acacattcttaactc

SEQ ID NO: 1183782 - DNA, 15 bp, Homo sapiens
aacacattcttaact

SEQ ID NO: 1183783 - DNA, 15 bp, Homo sapiens
gaacacattcttaac

SEQ ID NO: 1183784 - DNA, 15 bp, Homo sapiens
tgaacacattcttaa

SEQ ID NO: 1183785 - DNA, 15 bp, Homo sapiens
atgaacacattctta

SEQ ID NO: 1183786 - DNA, 15 bp, Homo sapiens
gatgaacacattctt

SEQ ID NO: 1183787 - DNA, 15 bp, Homo sapiens
agatgaacacattct

SEQ ID NO: 1183788 - DNA, 15 bp, Homo sapiens
cagatgaacacattc

SEQ ID NO: 1183789 - DNA, 15 bp, Homo sapiens
acagatgaacacatt

SEQ ID NO: 1183790 - DNA, 15 bp, Homo sapiens
cacagatgaacacat

SEQ ID NO: 1183791 - DNA, 15 bp, Homo sapiens
tcacagatgaacaca

SEQ ID NO: 1183792 - DNA, 15 bp, Homo sapiens
ttcacagatgaacac

SEQ ID NO: 1183793 - DNA, 15 bp, Homo sapiens
gttcacagatgaaca

SEQ ID NO: 1183794 - DNA, 15 bp, Homo sapiens
agttcacagatgaac

SEQ ID NO: 1183795 - DNA, 15 bp, Homo sapiens
aagttcacagatgaa

SEQ ID NO: 1183796 - DNA, 15 bp, Homo sapiens
gaagttcacagatga

SEQ ID NO: 1183797 - DNA, 15 bp, Homo sapiens
agaagttcacagatg

SEQ ID NO: 1183798 - DNA, 15 bp, Homo sapiens
aagaagttcacagat

SEQ ID NO: 1183799 - DNA, 15 bp, Homo sapiens
gaagaagttcacaga

SEQ ID NO: 1183800 - DNA, 15 bp, Homo sapiens
tgaagaagttcacag

SEQ ID NO: 1183801 - DNA, 15 bp, Homo sapiens
ctgaagaagttcaca

SEQ ID NO: 1183802 - DNA, 15 bp, Homo sapiens
tctgaagaagttcac

SEQ ID NO: 1183803 - DNA, 15 bp, Homo sapiens
gtctgaagaagttca

SEQ ID NO: 1183804 - DNA, 15 bp, Homo sapiens
tgtctgaagaagttc

SEQ ID NO: 1183805 - DNA, 15 bp, Homo sapiens
ttgtctgaagaagtt

SEQ ID NO: 1183806 - DNA, 15 bp, Homo sapiens
cttgtctgaagaagt

SEQ ID NO: 1183807 - DNA, 15 bp, Homo sapiens
tcttgtctgaagaag

SEQ ID NO: 1183808 - DNA, 15 bp, Homo sapiens
ttcttgtctgaagaa

SEQ ID NO: 1183809 - DNA, 15 bp, Homo sapiens
attcttgtctgaaga

SEQ ID NO: 1183810 - DNA, 15 bp, Homo sapiens
aattcttgtctgaag

SEQ ID NO: 1183811 - DNA, 15 bp, Homo sapiens
caattcttgtctgaa

SEQ ID NO: 1183812 - DNA, 15 bp, Homo sapiens
ccaattcttgtctga

SEQ ID NO: 1183813 - DNA, 15 bp, Homo sapiens
gccaattcttgtctg

SEQ ID NO: 1183814 - DNA, 15 bp, Homo sapiens
tgccaattcttgtct

SEQ ID NO: 1183815 - DNA, 15 bp, Homo sapiens
atgccaattcttgtc

SEQ ID NO: 1183816 - DNA, 15 bp, Homo sapiens
gatgccaattcttgt

SEQ ID NO: 1183817 - DNA, 15 bp, Homo sapiens
tgatgccaattcttg

SEQ ID NO: 1183818 - DNA, 15 bp, Homo sapiens
atgatgccaattctt

SEQ ID NO: 1183819 - DNA, 15 bp, Homo sapiens
tatgatgccaattct

SEQ ID NO: 1183820 - DNA, 15 bp, Homo sapiens
atatgatgccaattc

SEQ ID NO: 1183821 - DNA, 15 bp, Homo sapiens
aatatgatgccaatt

SEQ ID NO: 1183822 - DNA, 15 bp, Homo sapiens
gaatatgatgccaat

SEQ ID NO: 1183823 - DNA, 15 bp, Homo sapiens
ggaatatgatgccaa

SEQ ID NO: 1183824 - DNA, 15 bp, Homo sapiens
aggaatatgatgcca

SEQ ID NO: 1183825 - DNA, 15 bp, Homo sapiens
gaggaatatgatgcc

SEQ ID NO: 1183826 - DNA, 15 bp, Homo sapiens
agaggaatatgatgc

SEQ ID NO: 1183827 - DNA, 15 bp, Homo sapiens
cagaggaatatgatg

SEQ ID NO: 1183828 - DNA, 15 bp, Homo sapiens
acagaggaatatgat

SEQ ID NO: 1183829 - DNA, 15 bp, Homo sapiens
tacagaggaatatga

SEQ ID NO: 1183830 - DNA, 15 bp, Homo sapiens
atacagaggaatatg

SEQ ID NO: 1183831 - DNA, 15 bp, Homo sapiens
catacagaggaatat

SEQ ID NO: 1183832 - DNA, 15 bp, Homo sapiens
acatacagaggaata

SEQ ID NO: 1183833 - DNA, 15 bp, Homo sapiens
gacatacagaggaat

SEQ ID NO: 1183834 - DNA, 15 bp, Homo sapiens
ggacatacagaggaa

SEQ ID NO: 1183835 - DNA, 15 bp, Homo sapiens
aggacatacagagga

SEQ ID NO: 1183836 - DNA, 15 bp, Homo sapiens
gaggacatacagagg

SEQ ID NO: 1183837 - DNA, 15 bp, Homo sapiens
tgaggacatacagag

SEQ ID NO: 1183838 - DNA, 15 bp, Homo sapiens
ctgaggacatacaga

SEQ ID NO: 1183839 - DNA, 15 bp, Homo sapiens
tctgaggacatacag

SEQ ID NO: 1183840 - DNA, 15 bp, Homo sapiens
ttctgaggacataca

SEQ ID NO: 1183841 - DNA, 15 bp, Homo sapiens
attctgaggacatac

SEQ ID NO: 1183842 - DNA, 15 bp, Homo sapiens
gattctgaggacata

SEQ ID NO: 1183843 - DNA, 15 bp, Homo sapiens
agattctgaggacat

SEQ ID NO: 1183844 - DNA, 15 bp, Homo sapiens
cagattctgaggaca

SEQ ID NO: 1183845 - DNA, 15 bp, Homo sapiens
ccagattctgaggac

SEQ ID NO: 1183846 - DNA, 15 bp, Homo sapiens
cccagattctgagga

SEQ ID NO: 1183847 - DNA, 15 bp, Homo sapiens
tcccagattctgagg

SEQ ID NO: 1183848 - DNA, 15 bp, Homo sapiens
gtcccagattctgag

SEQ ID NO: 1183849 - DNA, 15 bp, Homo sapiens
tgtcccagattctga

SEQ ID NO: 1183850 - DNA, 15 bp, Homo sapiens
ctgtcccagattctg

SEQ ID NO: 1183851 - DNA, 15 bp, Homo sapiens
actgtcccagattct

SEQ ID NO: 1183852 - DNA, 15 bp, Homo sapiens
cactgtcccagattc

SEQ ID NO: 1183853 - DNA, 15 bp, Homo sapiens
tcactgtcccagatt

SEQ ID NO: 1183854 - DNA, 15 bp, Homo sapiens
atcactgtcccagat

SEQ ID NO: 1183855 - DNA, 15 bp, Homo sapiens
aatcactgtcccaga

SEQ ID NO: 1183856 - DNA, 15 bp, Homo sapiens
aaatcactgtcccag

SEQ ID NO: 1183857 - DNA, 15 bp, Homo sapiens
caaatcactgtccca

SEQ ID NO: 1183858 - DNA, 15 bp, Homo sapiens
gcaaatcactgtccc

SEQ ID NO: 1183859 - DNA, 15 bp, Homo sapiens
tgcaaatcactgtcc

SEQ ID NO: 1183860 - DNA, 15 bp, Homo sapiens
atgcaaatcactgtc

SEQ ID NO: 1183861 - DNA, 15 bp, Homo sapiens
catgcaaatcactgt

SEQ ID NO: 1183862 - DNA, 15 bp, Homo sapiens
acatgcaaatcactg

SEQ ID NO: 1183863 - DNA, 15 bp, Homo sapiens
tacatgcaaatcact

SEQ ID NO: 1183864 - DNA, 15 bp, Homo sapiens
ctacatgcaaatcac

SEQ ID NO: 1183865 - DNA, 15 bp, Homo sapiens
tctacatgcaaatca

SEQ ID NO: 1183866 - DNA, 15 bp, Homo sapiens
ttctacatgcaaatc

SEQ ID NO: 1183867 - DNA, 15 bp, Homo sapiens
tttctacatgcaaat

SEQ ID NO: 1183868 - DNA, 15 bp, Homo sapiens
ctttctacatgcaaa

SEQ ID NO: 1183869 - DNA, 15 bp, Homo sapiens
actttctacatgcaa

SEQ ID NO: 1183870 - DNA, 15 bp, Homo sapiens
cactttctacatgca

SEQ ID NO: 1183871 - DNA, 15 bp, Homo sapiens
gcactttctacatgc

SEQ ID NO: 1183872 - DNA, 15 bp, Homo sapiens
agcactttctacatg

SEQ ID NO: 1183873 - DNA, 15 bp, Homo sapiens
gagcactttctacat

SEQ ID NO: 1183874 - DNA, 15 bp, Homo sapiens
tgagcactttctaca

SEQ ID NO: 1183875 - DNA, 15 bp, Homo sapiens
ttgagcactttctac

SEQ ID NO: 1183876 - DNA, 15 bp, Homo sapiens
attgagcactttcta

SEQ ID NO: 1183877 - DNA, 15 bp, Homo sapiens
aattgagcactttct

SEQ ID NO: 1183878 - DNA, 15 bp, Homo sapiens
taattgagcactttc

SEQ ID NO: 1183879 - DNA, 15 bp, Homo sapiens
ttaattgagcacttt

SEQ ID NO: 1183880 - DNA, 15 bp, Homo sapiens
gttaattgagcactt

SEQ ID NO: 1183881 - DNA, 15 bp, Homo sapiens
tgttaattgagcact

SEQ ID NO: 1183882 - DNA, 15 bp, Homo sapiens
atgttaattgagcac

SEQ ID NO: 1183883 - DNA, 15 bp, Homo sapiens
aatgttaattgagca

SEQ ID NO: 1183884 - DNA, 15 bp, Homo sapiens
caatgttaattgagc

SEQ ID NO: 1183885 - DNA, 15 bp, Homo sapiens
gcaatgttaattgag

SEQ ID NO: 1183886 - DNA, 15 bp, Homo sapiens
ggcaatgttaattga

SEQ ID NO: 1183887 - DNA, 15 bp, Homo sapiens
aggcaatgttaattg

SEQ ID NO: 1183888 - DNA, 15 bp, Homo sapiens
caggcaatgttaatt

SEQ ID NO: 1183889 - DNA, 15 bp, Homo sapiens
tcaggcaatgttaat

SEQ ID NO: 1183890 - DNA, 15 bp, Homo sapiens
ctcaggcaatgttaa

SEQ ID NO: 1183891 - DNA, 15 bp, Homo sapiens
actcaggcaatgtta

SEQ ID NO: 1183892 - DNA, 15 bp, Homo sapiens
tactcaggcaatgtt

SEQ ID NO: 1183893 - DNA, 15 bp, Homo sapiens
atactcaggcaatgt

SEQ ID NO: 1183894 - DNA, 15 bp, Homo sapiens
tatactcaggcaatg

SEQ ID NO: 1183895 - DNA, 15 bp, Homo sapiens
ttatactcaggcaat

SEQ ID NO: 1183896 - DNA, 15 bp, Homo sapiens
attatactcaggcaa

SEQ ID NO: 1183897 - DNA, 15 bp, Homo sapiens
aattatactcaggca

SEQ ID NO: 1183898 - DNA, 15 bp, Homo sapiens
caattatactcaggc

SEQ ID NO: 1183899 - DNA, 15 bp, Homo sapiens
tcaattatactcagg

SEQ ID NO: 1183900 - DNA, 15 bp, Homo sapiens
ttcaattatactcag

SEQ ID NO: 1183901 - DNA, 15 bp, Homo sapiens
attcaattatactca

SEQ ID NO: 1183902 - DNA, 15 bp, Homo sapiens
tattcaattatactc

SEQ ID NO: 1183903 - DNA, 15 bp, Homo sapiens
gtattcaattatact

SEQ ID NO: 1183904 - DNA, 15 bp, Homo sapiens
ggtattcaattatac

SEQ ID NO: 1183905 - DNA, 15 bp, Homo sapiens
cggtattcaattata

SEQ ID NO: 1183906 - DNA, 15 bp, Homo sapiens
ccggtattcaattat

SEQ ID NO: 1183907 - DNA, 15 bp, Homo sapiens
tccggtattcaatta

SEQ ID NO: 1183908 - DNA, 15 bp, Homo sapiens
ctccggtattcaatt

SEQ ID NO: 1183909 - DNA, 15 bp, Homo sapiens
cctccggtattcaat

SEQ ID NO: 1183910 - DNA, 15 bp, Homo sapiens
gcctccggtattcaa

SEQ ID NO: 1183911 - DNA, 15 bp, Homo sapiens
ggcctccggtattca

SEQ ID NO: 1183912 - DNA, 15 bp, Homo sapiens
tggcctccggtattc

SEQ ID NO: 1183913 - DNA, 15 bp, Homo sapiens
gtggcctccggtatt

SEQ ID NO: 1183914 - DNA, 15 bp, Homo sapiens
agtggcctccggtat

SEQ ID NO: 1183915 - DNA, 15 bp, Homo sapiens
tagtggcctccggta

SEQ ID NO: 1183916 - DNA, 15 bp, Homo sapiens
ttagtggcctccggt

SEQ ID NO: 1183917 - DNA, 15 bp, Homo sapiens
gttagtggcctccgg

SEQ ID NO: 1183918 - DNA, 15 bp, Homo sapiens
agttagtggcctccg

SEQ ID NO: 1183919 - DNA, 15 bp, Homo sapiens
cagttagtggcctcc

SEQ ID NO: 1183920 - DNA, 15 bp, Homo sapiens
tcagttagtggcctc

SEQ ID NO: 1183921 - DNA, 15 bp, Homo sapiens
ctcagttagtggcct

SEQ ID NO: 1183922 - DNA, 15 bp, Homo sapiens
cctcagttagtggcc

SEQ ID NO: 1183923 - DNA, 15 bp, Homo sapiens
gcctcagttagtggc

SEQ ID NO: 1183924 - DNA, 15 bp, Homo sapiens
ggcctcagttagtgg

SEQ ID NO: 1183925 - DNA, 15 bp, Homo sapiens
aggcctcagttagtg

SEQ ID NO: 1183926 - DNA, 15 bp, Homo sapiens
caggcctcagttagt

SEQ ID NO: 1183927 - DNA, 15 bp, Homo sapiens
tcaggcctcagttag

SEQ ID NO: 1183928 - DNA, 15 bp, Homo sapiens
ttcaggcctcagtta

SEQ ID NO: 1183929 - DNA, 15 bp, Homo sapiens
cttcaggcctcagtt

SEQ ID NO: 1183930 - DNA, 15 bp, Homo sapiens
tcttcaggcctcagt

SEQ ID NO: 1183931 - DNA, 15 bp, Homo sapiens
ttcttcaggcctcag

SEQ ID NO: 1183932 - DNA, 15 bp, Homo sapiens
tttcttcaggcctca

SEQ ID NO: 1183933 - DNA, 15 bp, Homo sapiens
ttttcttcaggcctc

SEQ ID NO: 1183934 - DNA, 15 bp, Homo sapiens
cttttcttcaggcct

SEQ ID NO: 1183935 - DNA, 15 bp, Homo sapiens
acttttcttcaggcc

SEQ ID NO: 1183936 - DNA, 15 bp, Homo sapiens
aacttttcttcaggc

SEQ ID NO: 1183937 - DNA, 15 bp, Homo sapiens
aaacttttcttcagg

SEQ ID NO: 1183938 - DNA, 15 bp, Homo sapiens
gaaacttttcttcag

SEQ ID NO: 1183939 - DNA, 15 bp, Homo sapiens
ggaaacttttcttca

SEQ ID NO: 1183940 - DNA, 15 bp, Homo sapiens
aggaaacttttcttc

SEQ ID NO: 1183941 - DNA, 15 bp, Homo sapiens
taggaaacttttctt

SEQ ID NO: 1183942 - DNA, 15 bp, Homo sapiens
ttaggaaacttttct

SEQ ID NO: 1183943 - DNA, 15 bp, Homo sapiens
attaggaaacttttc

SEQ ID NO: 1183944 - DNA, 15 bp, Homo sapiens
gattaggaaactttt

SEQ ID NO: 1183945 - DNA, 15 bp, Homo sapiens
ggattaggaaacttt

SEQ ID NO: 1183946 - DNA, 15 bp, Homo sapiens
aggattaggaaactt

SEQ ID NO: 1183947 - DNA, 15 bp, Homo sapiens
taggattaggaaact

SEQ ID NO: 1183948 - DNA, 15 bp, Homo sapiens
gtaggattaggaaac

SEQ ID NO: 1183949 - DNA, 15 bp, Homo sapiens
ggtaggattaggaaa

SEQ ID NO: 1183950 - DNA, 15 bp, Homo sapiens
tggtaggattaggaa

SEQ ID NO: 1183951 - DNA, 15 bp, Homo sapiens
atggtaggattagga

SEQ ID NO: 1183952 - DNA, 15 bp, Homo sapiens
tatggtaggattagg

SEQ ID NO: 1183953 - DNA, 15 bp, Homo sapiens
gtatggtaggattag

SEQ ID NO: 1183954 - DNA, 15 bp, Homo sapiens
ggtatggtaggatta

SEQ ID NO: 1183955 - DNA, 15 bp, Homo sapiens
aggtatggtaggatt

SEQ ID NO: 1183956 - DNA, 15 bp, Homo sapiens
gaggtatggtaggat

SEQ ID NO: 1183957 - DNA, 15 bp, Homo sapiens
agaggtatggtagga

SEQ ID NO: 1183958 - DNA, 15 bp, Homo sapiens
aagaggtatggtagg

SEQ ID NO: 1183959 - DNA, 15 bp, Homo sapiens
aaagaggtatggtag

SEQ ID NO: 1183960 - DNA, 15 bp, Homo sapiens
taaagaggtatggta

SEQ ID NO: 1183961 - DNA, 15 bp, Homo sapiens
ttaaagaggtatggt

SEQ ID NO: 1183962 - DNA, 15 bp, Homo sapiens
cttaaagaggtatgg

SEQ ID NO: 1183963 - DNA, 15 bp, Homo sapiens
tcttaaagaggtatg

SEQ ID NO: 1183964 - DNA, 15 bp, Homo sapiens
atcttaaagaggtat

SEQ ID NO: 1183965 - DNA, 15 bp, Homo sapiens
gatcttaaagaggta

SEQ ID NO: 1183966 - DNA, 15 bp, Homo sapiens
tgatcttaaagaggt

SEQ ID NO: 1183967 - DNA, 15 bp, Homo sapiens
atgatcttaaagagg

SEQ ID NO: 1183968 - DNA, 15 bp, Homo sapiens
gatgatcttaaagag

SEQ ID NO: 1183969 - DNA, 15 bp, Homo sapiens
agatgatcttaaaga

SEQ ID NO: 1183970 - DNA, 15 bp, Homo sapiens
aagatgatcttaaag

SEQ ID NO: 1183971 - DNA, 15 bp, Homo sapiens
aaagatgatcttaaa

SEQ ID NO: 1183972 - DNA, 15 bp, Homo sapiens
gaaagatgatcttaa

SEQ ID NO: 1183973 - DNA, 15 bp, Homo sapiens
ggaaagatgatctta

SEQ ID NO: 1183974 - DNA, 15 bp, Homo sapiens
tggaaagatgatctt

SEQ ID NO: 1183975 - DNA, 15 bp, Homo sapiens
ttggaaagatgatct

SEQ ID NO: 1183976 - DNA, 15 bp, Homo sapiens
tttggaaagatgatc

SEQ ID NO: 1183977 - DNA, 15 bp, Homo sapiens
atttggaaagatgat

SEQ ID NO: 1183978 - DNA, 15 bp, Homo sapiens
aatttggaaagatga

SEQ ID NO: 1183979 - DNA, 15 bp, Homo sapiens
gaatttggaaagatg

SEQ ID NO: 1183980 - DNA, 15 bp, Homo sapiens
tgaatttggaaagat

SEQ ID NO: 1183981 - DNA, 15 bp, Homo sapiens
ttgaatttggaaaga

SEQ ID NO: 1183982 - DNA, 15 bp, Homo sapiens
tttgaatttggaaag

SEQ ID NO: 1183983 - DNA, 15 bp, Homo sapiens
ttttgaatttggaaa

SEQ ID NO: 1183984 - DNA, 15 bp, Homo sapiens
gttttgaatttggaa

SEQ ID NO: 1183985 - DNA, 15 bp, Homo sapiens
tgttttgaatttgga

SEQ ID NO: 1183986 - DNA, 15 bp, Homo sapiens
ttgttttgaatttgg

SEQ ID NO: 1183987 - DNA, 15 bp, Homo sapiens
tttgttttgaatttg

SEQ ID NO: 1183988 - DNA, 15 bp, Homo sapiens
ctttgttttgaattt

SEQ ID NO: 1183989 - DNA, 15 bp, Homo sapiens
gctttgttttgaatt

SEQ ID NO: 1183990 - DNA, 15 bp, Homo sapiens
tgctttgttttgaat

SEQ ID NO: 1183991 - DNA, 15 bp, Homo sapiens
tttgctttgttttga

SEQ ID NO: 1183992 - DNA, 15 bp, Homo sapiens
ttttgctttgttttg

SEQ ID NO: 1183993 - DNA, 15 bp, Homo sapiens
gttttgctttgtttt

SEQ ID NO: 1183994 - DNA, 15 bp, Homo sapiens
tgttttgctttgttt

SEQ ID NO: 1183995 - DNA, 15 bp, Homo sapiens
ttgttttgctttgtt

SEQ ID NO: 1183996 - DNA, 15 bp, Homo sapiens
tttgttttgctttgt

SEQ ID NO: 1183997 - DNA, 15 bp, Homo sapiens
gtttgttttgctttg

SEQ ID NO: 1183998 - DNA, 15 bp, Homo sapiens
tgtttgttttgcttt

SEQ ID NO: 1183999 - DNA, 15 bp, Homo sapiens
ttgtttgttttgctt

SEQ ID NO: 1184000 - DNA, 15 bp, Homo sapiens
tttgtttgttttgct

SEQ ID NO: 1184001 - DNA, 15 bp, Homo sapiens
gtttgtttgttttgc

SEQ ID NO: 1184002 - DNA, 15 bp, Homo sapiens
atttgtttgtttgtt

SEQ ID NO: 1184003 - DNA, 15 bp, Homo sapiens
catttgtttgtttgt

SEQ ID NO: 1184004 - DNA, 15 bp, Homo sapiens
gcatttgtttgtttg

SEQ ID NO: 1184005 - DNA, 15 bp, Homo sapiens
ggcatttgtttgttt

SEQ ID NO: 1184006 - DNA, 15 bp, Homo sapiens
tggcatttgtttgtt

SEQ ID NO: 1184007 - DNA, 15 bp, Homo sapiens
ttggcatttgtttgt

SEQ ID NO: 1184008 - DNA, 15 bp, Homo sapiens
cttggcatttgtttg

SEQ ID NO: 1184009 - DNA, 15 bp, Homo sapiens
gcttggcatttgttt

SEQ ID NO: 1184010 - DNA, 15 bp, Homo sapiens
agcttggcatttgtt

SEQ ID NO: 1184011 - DNA, 15 bp, Homo sapiens
gagcttggcatttgt

SEQ ID NO: 1184012 - DNA, 15 bp, Homo sapiens
agagcttggcatttg

SEQ ID NO: 1184013 - DNA, 15 bp, Homo sapiens
tagagcttggcattt

SEQ ID NO: 1184014 - DNA, 15 bp, Homo sapiens
atagagcttggcatt

SEQ ID NO: 1184015 - DNA, 15 bp, Homo sapiens
tatagagcttggcat

SEQ ID NO: 1184016 - DNA, 15 bp, Homo sapiens
ctatagagcttggca

SEQ ID NO: 1184017 - DNA, 15 bp, Homo sapiens
cctatagagcttggc

SEQ ID NO: 1184018 - DNA, 15 bp, Homo sapiens
ccctatagagcttgg

SEQ ID NO: 1184019 - DNA, 15 bp, Homo sapiens
tccctatagagcttg

SEQ ID NO: 1184020 - DNA, 15 bp, Homo sapiens
ttccctatagagctt

SEQ ID NO: 1184021 - DNA, 15 bp, Homo sapiens
gttccctatagagct

SEQ ID NO: 1184022 - DNA, 15 bp, Homo sapiens
agttccctatagagc

SEQ ID NO: 1184023 - DNA, 15 bp, Homo sapiens
gagttccctatagag

SEQ ID NO: 1184024 - DNA, 15 bp, Homo sapiens
agagttccctataga

SEQ ID NO: 1184025 - DNA, 15 bp, Homo sapiens
gagagttccctatag

SEQ ID NO: 1184026 - DNA, 15 bp, Homo sapiens
ggagagttccctata

SEQ ID NO: 1184027 - DNA, 15 bp, Homo sapiens
gggagagttccctat

SEQ ID NO: 1184028 - DNA, 15 bp, Homo sapiens
gtgggagagttccct

SEQ ID NO: 1184029 - DNA, 15 bp, Homo sapiens
agtgggagagttccc

SEQ ID NO: 1184030 - DNA, 15 bp, Homo sapiens
gagtgggagagttcc

SEQ ID NO: 1184031 - DNA, 15 bp, Homo sapiens
ggagtgggagagttc

SEQ ID NO: 1184032 - DNA, 15 bp, Homo sapiens
aggagtgggagagtt

SEQ ID NO: 1184033 - DNA, 15 bp, Homo sapiens
caggagtgggagagt

SEQ ID NO: 1184034 - DNA, 15 bp, Homo sapiens
tcaggagtgggagag

SEQ ID NO: 1184035 - DNA, 15 bp, Homo sapiens
ttcaggagtgggaga

SEQ ID NO: 1184036 - DNA, 15 bp, Homo sapiens
tttcaggagtgggag

SEQ ID NO: 1184037 - DNA, 15 bp, Homo sapiens
ttttcaggagtggga

SEQ ID NO: 1184038 - DNA, 15 bp, Homo sapiens
gttttcaggagtggg

SEQ ID NO: 1184039 - DNA, 15 bp, Homo sapiens
ggttttcaggagtgg

SEQ ID NO: 1184040 - DNA, 15 bp, Homo sapiens
aggttttcaggagtg

SEQ ID NO: 1184041 - DNA, 15 bp, Homo sapiens
taggttttcaggagt

SEQ ID NO: 1184042 - DNA, 15 bp, Homo sapiens
gtaggttttcaggag

SEQ ID NO: 1184043 - DNA, 15 bp, Homo sapiens
tgtaggttttcagga

SEQ ID NO: 1184044 - DNA, 15 bp, Homo sapiens
atgtaggttttcagg

SEQ ID NO: 1184045 - DNA, 15 bp, Homo sapiens
gatgtaggttttcag

SEQ ID NO: 1184046 - DNA, 15 bp, Homo sapiens
ggatgtaggttttca

SEQ ID NO: 1184047 - DNA, 15 bp, Homo sapiens
aggatgtaggttttc

SEQ ID NO: 1184048 - DNA, 15 bp, Homo sapiens
taggatgtaggtttt

SEQ ID NO: 1184049 - DNA, 15 bp, Homo sapiens
ataggatgtaggttt

SEQ ID NO: 1184050 - DNA, 15 bp, Homo sapiens
tataggatgtaggtt

SEQ ID NO: 1184051 - DNA, 15 bp, Homo sapiens
ttataggatgtaggt

SEQ ID NO: 1184052 - DNA, 15 bp, Homo sapiens
tttataggatgtagg

SEQ ID NO: 1184053 - DNA, 15 bp, Homo sapiens
ttttataggatgtag

SEQ ID NO: 1184054 - DNA, 15 bp, Homo sapiens
tttttataggatgta

SEQ ID NO: 1184055 - DNA, 15 bp, Homo sapiens
ttttttataggatgt

SEQ ID NO: 1184056 - DNA, 15 bp, Homo sapiens
gttttttataggatg

SEQ ID NO: 1184057 - DNA, 15 bp, Homo sapiens
tgttttttataggat

SEQ ID NO: 1184058 - DNA, 15 bp, Homo sapiens
gtgttttttatagga

SEQ ID NO: 1184059 - DNA, 15 bp, Homo sapiens
agtgttttttatagg

SEQ ID NO: 1184060 - DNA, 15 bp, Homo sapiens
aagtgttttttatag

SEQ ID NO: 1184061 - DNA, 15 bp, Homo sapiens
aaagtgttttttata

SEQ ID NO: 1184062 - DNA, 15 bp, Homo sapiens
caaagtgttttttat

SEQ ID NO: 1184063 - DNA, 15 bp, Homo sapiens
ccaaagtgtttttta

SEQ ID NO: 1184064 - DNA, 15 bp, Homo sapiens
tccaaagtgtttttt

SEQ ID NO: 1184065 - DNA, 15 bp, Homo sapiens
ttccaaagtgttttt

SEQ ID NO: 1184066 - DNA, 15 bp, Homo sapiens
tttccaaagtgtttt

SEQ ID NO: 1184067 - DNA, 15 bp, Homo sapiens
ttttccaaagtgttt

SEQ ID NO: 1184068 - DNA, 15 bp, Homo sapiens
cttttccaaagtgtt

SEQ ID NO: 1184069 - DNA, 15 bp, Homo sapiens
gcttttccaaagtgt

SEQ ID NO: 1184070 - DNA, 15 bp, Homo sapiens
tgcttttccaaagtg

SEQ ID NO: 1184071 - DNA, 15 bp, Homo sapiens
gtgcttttccaaagt

SEQ ID NO: 1184072 - DNA, 15 bp, Homo sapiens
tgtgcttttccaaag

SEQ ID NO: 1184073 - DNA, 15 bp, Homo sapiens
ttgtgcttttccaaa

SEQ ID NO: 1184074 - DNA, 15 bp, Homo sapiens
attgtgcttttccaa

SEQ ID NO: 1184075 - DNA, 15 bp, Homo sapiens
cattgtgcttttcca

SEQ ID NO: 1184076 - DNA, 15 bp, Homo sapiens
acattgtgcttttcc

SEQ ID NO: 1184077 - DNA, 15 bp, Homo sapiens
tacattgtgcttttc

SEQ ID NO: 1184078 - DNA, 15 bp, Homo sapiens
ctacattgtgctttt

SEQ ID NO: 1184079 - DNA, 15 bp, Homo sapiens
tctacattgtgcttt

SEQ ID NO: 1184080 - DNA, 15 bp, Homo sapiens
gtctacattgtgctt

SEQ ID NO: 1184081 - DNA, 15 bp, Homo sapiens
ggtctacattgtgct

SEQ ID NO: 1184082 - DNA, 15 bp, Homo sapiens
gggtctacattgtgc

SEQ ID NO: 1184083 - DNA, 15 bp, Homo sapiens
agggtctacattgtg

SEQ ID NO: 1184084 - DNA, 15 bp, Homo sapiens
gagggtctacattgt

SEQ ID NO: 1184085 - DNA, 15 bp, Homo sapiens
ggagggtctacattg

SEQ ID NO: 1184086 - DNA, 15 bp, Homo sapiens
aggagggtctacatt

SEQ ID NO: 1184087 - DNA, 15 bp, Homo sapiens
taggagggtctacat

SEQ ID NO: 1184088 - DNA, 15 bp, Homo sapiens
ctaggagggtctaca

SEQ ID NO: 1184089 - DNA, 15 bp, Homo sapiens
cctaggagggtctac

SEQ ID NO: 1184090 - DNA, 15 bp, Homo sapiens
gcctaggagggtcta

SEQ ID NO: 1184091 - DNA, 15 bp, Homo sapiens
ggcctaggagggtct

SEQ ID NO: 1184092 - DNA, 15 bp, Homo sapiens
tggcctaggagggtc

SEQ ID NO: 1184093 - DNA, 15 bp, Homo sapiens
gtggcctaggagggt

SEQ ID NO: 1184094 - DNA, 15 bp, Homo sapiens
tgtggcctaggaggg

SEQ ID NO: 1184095 - DNA, 15 bp, Homo sapiens
gtgtggcctaggagg

SEQ ID NO: 1184096 - DNA, 15 bp, Homo sapiens
tgtgtggcctaggag

SEQ ID NO: 1184097 - DNA, 15 bp, Homo sapiens
gtgtgtggcctagga

SEQ ID NO: 1184098 - DNA, 15 bp, Homo sapiens
ggtgtgtggcctagg

SEQ ID NO: 1184099 - DNA, 15 bp, Homo sapiens
aggtgtgtggcctag

SEQ ID NO: 1184100 - DNA, 15 bp, Homo sapiens
taggtgtgtggccta

SEQ ID NO: 1184101 - DNA, 15 bp, Homo sapiens
ttaggtgtgtggcct

SEQ ID NO: 1184102 - DNA, 15 bp, Homo sapiens
gttaggtgtgtggcc

SEQ ID NO: 1184103 - DNA, 15 bp, Homo sapiens
tgttaggtgtgtggc

SEQ ID NO: 1184104 - DNA, 15 bp, Homo sapiens
gtgttaggtgtgtgg

SEQ ID NO: 1184105 - DNA, 15 bp, Homo sapiens
tgtgttaggtgtgtg

SEQ ID NO: 1184106 - DNA, 15 bp, Homo sapiens
atgtgttaggtgtgt

SEQ ID NO: 1184107 - DNA, 15 bp, Homo sapiens
aatgtgttaggtgtg

SEQ ID NO: 1184108 - DNA, 15 bp, Homo sapiens
taatgtgttaggtgt

SEQ ID NO: 1184109 - DNA, 15 bp, Homo sapiens
ataatgtgttaggtg

SEQ ID NO: 1184110 - DNA, 15 bp, Homo sapiens
aataatgtgttaggt

SEQ ID NO: 1184111 - DNA, 15 bp, Homo sapiens
gaataatgtgttagg

SEQ ID NO: 1184112 - DNA, 15 bp, Homo sapiens
ggaataatgtgttag

SEQ ID NO: 1184113 - DNA, 15 bp, Homo sapiens
tggaataatgtgtta

SEQ ID NO: 1184114 - DNA, 15 bp, Homo sapiens
ctggaataatgtgtt

SEQ ID NO: 1184115 - DNA, 15 bp, Homo sapiens
gctggaataatgtgt

SEQ ID NO: 1184116 - DNA, 15 bp, Homo sapiens
agctggaataatgtg

SEQ ID NO: 1184117 - DNA, 15 bp, Homo sapiens
aagctggaataatgt

SEQ ID NO: 1184118 - DNA, 15 bp, Homo sapiens
aaagctggaataatg

SEQ ID NO: 1184119 - DNA, 15 bp, Homo sapiens
taaagctggaataat

SEQ ID NO: 1184120 - DNA, 15 bp, Homo sapiens
ctaaagctggaataa

SEQ ID NO: 1184121 - DNA, 15 bp, Homo sapiens
gctaaagctggaata

SEQ ID NO: 1184122 - DNA, 15 bp, Homo sapiens
ggctaaagctggaat

SEQ ID NO: 1184123 - DNA, 15 bp, Homo sapiens
aggctaaagctggaa

SEQ ID NO: 1184124 - DNA, 15 bp, Homo sapiens
aaggctaaagctgga

SEQ ID NO: 1184125 - DNA, 15 bp, Homo sapiens
caaggctaaagctgg

SEQ ID NO: 1184126 - DNA, 15 bp, Homo sapiens
gcaaggctaaagctg

SEQ ID NO: 1184127 - DNA, 15 bp, Homo sapiens
agcaaggctaaagct

SEQ ID NO: 1184128 - DNA, 15 bp, Homo sapiens
aagcaaggctaaagc

SEQ ID NO: 1184129 - DNA, 15 bp, Homo sapiens
caagcaaggctaaag

SEQ ID NO: 1184130 - DNA, 15 bp, Homo sapiens
tcaagcaaggctaaa

SEQ ID NO: 1184131 - DNA, 15 bp, Homo sapiens
gtcaagcaaggctaa

SEQ ID NO: 1184132 - DNA, 15 bp, Homo sapiens
agtcaagcaaggcta

SEQ ID NO: 1184133 - DNA, 15 bp, Homo sapiens
cagtcaagcaaggct

SEQ ID NO: 1184134 - DNA, 15 bp, Homo sapiens
acagtcaagcaaggc

SEQ ID NO: 1184135 - DNA, 15 bp, Homo sapiens
tacagtcaagcaagg

SEQ ID NO: 1184136 - DNA, 15 bp, Homo sapiens
ttacagtcaagcaag

SEQ ID NO: 1184137 - DNA, 15 bp, Homo sapiens
tttacagtcaagcaa

SEQ ID NO: 1184138 - DNA, 15 bp, Homo sapiens
ttttacagtcaagca

SEQ ID NO: 1184139 - DNA, 15 bp, Homo sapiens
cttttacagtcaagc

SEQ ID NO: 1184140 - DNA, 15 bp, Homo sapiens
tcttttacagtcaag

SEQ ID NO: 1184141 - DNA, 15 bp, Homo sapiens
ttcttttacagtcaa

SEQ ID NO: 1184142 - DNA, 15 bp, Homo sapiens
attcttttacagtca

SEQ ID NO: 1184143 - DNA, 15 bp, Homo sapiens
cattcttttacagtc

SEQ ID NO: 1184144 - DNA, 15 bp, Homo sapiens
gcattcttttacagt

SEQ ID NO: 1184145 - DNA, 15 bp, Homo sapiens
agcattcttttacag

SEQ ID NO: 1184146 - DNA, 15 bp, Homo sapiens
tagcattcttttaca

SEQ ID NO: 1184147 - DNA, 15 bp, Homo sapiens
ttagcattcttttac

SEQ ID NO: 1184148 - DNA, 15 bp, Homo sapiens
attagcattctttta

SEQ ID NO: 1184149 - DNA, 15 bp, Homo sapiens
cattagcattctttt

SEQ ID NO: 1184150 - DNA, 15 bp, Homo sapiens
ccattagcattcttt

SEQ ID NO: 1184151 - DNA, 15 bp, Homo sapiens
gccattagcattctt

SEQ ID NO: 1184152 - DNA, 15 bp, Homo sapiens
tgccattagcattct

SEQ ID NO: 1184153 - DNA, 15 bp, Homo sapiens
ctgccattagcattc

SEQ ID NO: 1184154 - DNA, 15 bp, Homo sapiens
gctgccattagcatt

SEQ ID NO: 1184155 - DNA, 15 bp, Homo sapiens
tgctgccattagcat

SEQ ID NO: 1184156 - DNA, 15 bp, Homo sapiens
ctgctgccattagca

SEQ ID NO: 1184157 - DNA, 15 bp, Homo sapiens
actgctgccattagc

SEQ ID NO: 1184158 - DNA, 15 bp, Homo sapiens
cactgctgccattag

SEQ ID NO: 1184159 - DNA, 15 bp, Homo sapiens
gcactgctgccatta

SEQ ID NO: 1184160 - DNA, 15 bp, Homo sapiens
agcactgctgccatt

SEQ ID NO: 1184161 - DNA, 15 bp, Homo sapiens
aagcactgctgccat

SEQ ID NO: 1184162 - DNA, 15 bp, Homo sapiens
gaagcactgctgcca

SEQ ID NO: 1184163 - DNA, 15 bp, Homo sapiens
agaagcactgctgcc

SEQ ID NO: 1184164 - DNA, 15 bp, Homo sapiens
tagaagcactgctgc

SEQ ID NO: 1184165 - DNA, 15 bp, Homo sapiens
ttagaagcactgctg

SEQ ID NO: 1184166 - DNA, 15 bp, Homo sapiens
tttagaagcactgct

SEQ ID NO: 1184167 - DNA, 15 bp, Homo sapiens
ctttagaagcactgc

SEQ ID NO: 1184168 - DNA, 15 bp, Homo sapiens
cctttagaagcactg

SEQ ID NO: 1184169 - DNA, 15 bp, Homo sapiens
gcctttagaagcact

SEQ ID NO: 1184170 - DNA, 15 bp, Homo sapiens
tgcctttagaagcac

SEQ ID NO: 1184171 - DNA, 15 bp, Homo sapiens
ttgcctttagaagca

SEQ ID NO: 1184172 - DNA, 15 bp, Homo sapiens
tttgcctttagaagc

SEQ ID NO: 1184173 - DNA, 15 bp, Homo sapiens
ttttgcctttagaag

SEQ ID NO: 1184174 - DNA, 15 bp, Homo sapiens
cttttgcctttagaa

SEQ ID NO: 1184175 - DNA, 15 bp, Homo sapiens
gcttttgcctttaga

SEQ ID NO: 1184176 - DNA, 15 bp, Homo sapiens
tgcttttgcctttag

SEQ ID NO: 1184177 - DNA, 15 bp, Homo sapiens
gtgcttttgccttta

SEQ ID NO: 1184178 - DNA, 15 bp, Homo sapiens
tgtgcttttgccttt

SEQ ID NO: 1184179 - DNA, 15 bp, Homo sapiens
ctgtgcttttgcctt

SEQ ID NO: 1184180 - DNA, 15 bp, Homo sapiens
gctgtgcttttgcct

SEQ ID NO: 1184181 - DNA, 15 bp, Homo sapiens
ggctgtgcttttgcc

SEQ ID NO: 1184182 - DNA, 15 bp, Homo sapiens
tggctgtgcttttgc

SEQ ID NO: 1184183 - DNA, 15 bp, Homo sapiens
gtggctgtgcttttg

SEQ ID NO: 1184184 - DNA, 15 bp, Homo sapiens
tgtggctgtgctttt

SEQ ID NO: 1184185 - DNA, 15 bp, Homo sapiens
gtgtggctgtgcttt

SEQ ID NO: 1184186 - DNA, 15 bp, Homo sapiens
tgtgtggctgtgctt

SEQ ID NO: 1184187 - DNA, 15 bp, Homo sapiens
atgtgtggctgtgct

SEQ ID NO: 1184188 - DNA, 15 bp, Homo sapiens
catgtgtggctgtgc

SEQ ID NO: 1184189 - DNA, 15 bp, Homo sapiens
tcatgtgtggctgtg

SEQ ID NO: 1184190 - DNA, 15 bp, Homo sapiens
ttcatgtgtggctgt

SEQ ID NO: 1184191 - DNA, 15 bp, Homo sapiens
attcatgtgtggctg

SEQ ID NO: 1184192 - DNA, 15 bp, Homo sapiens
cattcatgtgtggct

SEQ ID NO: 1184193 - DNA, 15 bp, Homo sapiens
tcattcatgtgtggc

SEQ ID NO: 1184194 - DNA, 15 bp, Homo sapiens
atcattcatgtgtgg

SEQ ID NO: 1184195 - DNA, 15 bp, Homo sapiens
catcattcatgtgtg

SEQ ID NO: 1184196 - DNA, 15 bp, Homo sapiens
acatcattcatgtgt

SEQ ID NO: 1184197 - DNA, 15 bp, Homo sapiens
tacatcattcatgtg

SEQ ID NO: 1184198 - DNA, 15 bp, Homo sapiens
atacatcattcatgt

SEQ ID NO: 1184199 - DNA, 15 bp, Homo sapiens
gatacatcattcatg

SEQ ID NO: 1184200 - DNA, 15 bp, Homo sapiens
agatacatcattcat

SEQ ID NO: 1184201 - DNA, 15 bp, Homo sapiens
gagatacatcattca

SEQ ID NO: 1184202 - DNA, 15 bp, Homo sapiens
tgagatacatcattc

SEQ ID NO: 1184203 - DNA, 15 bp, Homo sapiens
gtgagatacatcatt

SEQ ID NO: 1184204 - DNA, 15 bp, Homo sapiens
agtgagatacatcat

SEQ ID NO: 1184205 - DNA, 15 bp, Homo sapiens
tagtgagatacatca

SEQ ID NO: 1184206 - DNA, 15 bp, Homo sapiens
ttagtgagatacatc

SEQ ID NO: 1184207 - DNA, 15 bp, Homo sapiens
cttagtgagatacat

SEQ ID NO: 1184208 - DNA, 15 bp, Homo sapiens
tcttagtgagataca

SEQ ID NO: 1184209 - DNA, 15 bp, Homo sapiens
ttcttagtgagatac

SEQ ID NO: 1184210 - DNA, 15 bp, Homo sapiens
gttcttagtgagata

SEQ ID NO: 1184211 - DNA, 15 bp, Homo sapiens
agttcttagtgagat

SEQ ID NO: 1184212 - DNA, 15 bp, Homo sapiens
cagttcttagtgaga

SEQ ID NO: 1184213 - DNA, 15 bp, Homo sapiens
acagttcttagtgag

SEQ ID NO: 1184214 - DNA, 15 bp, Homo sapiens
cacagttcttagtga

SEQ ID NO: 1184215 - DNA, 15 bp, Homo sapiens
ccacagttcttagtg

SEQ ID NO: 1184216 - DNA, 15 bp, Homo sapiens
cccacagttcttagt

SEQ ID NO: 1184217 - DNA, 15 bp, Homo sapiens
ccccacagttcttag

SEQ ID NO: 1184218 - DNA, 15 bp, Homo sapiens
accccacagttctta

SEQ ID NO: 1184219 - DNA, 15 bp, Homo sapiens
aaccccacagttctt

SEQ ID NO: 1184220 - DNA, 15 bp, Homo sapiens
gaaccccacagttct

SEQ ID NO: 1184221 - DNA, 15 bp, Homo sapiens
ggaaccccacagttc

SEQ ID NO: 1184222 - DNA, 15 bp, Homo sapiens
tggaaccccacagtt

SEQ ID NO: 1184223 - DNA, 15 bp, Homo sapiens
ctggaaccccacagt

SEQ ID NO: 1184224 - DNA, 15 bp, Homo sapiens
cctggaaccccacag

SEQ ID NO: 1184225 - DNA, 15 bp, Homo sapiens
tcctggaaccccaca

SEQ ID NO: 1184226 - DNA, 15 bp, Homo sapiens
atcctggaaccccac

SEQ ID NO: 1184227 - DNA, 15 bp, Homo sapiens
aatcctggaacccca

SEQ ID NO: 1184228 - DNA, 15 bp, Homo sapiens
aaatcctggaacccc

SEQ ID NO: 1184229 - DNA, 15 bp, Homo sapiens
gaaatcctggaaccc

SEQ ID NO: 1184230 - DNA, 15 bp, Homo sapiens
agaaatcctggaacc

SEQ ID NO: 1184231 - DNA, 15 bp, Homo sapiens
cagaaatcctggaac

SEQ ID NO: 1184232 - DNA, 15 bp, Homo sapiens
tcagaaatcctggaa

SEQ ID NO: 1184233 - DNA, 15 bp, Homo sapiens
ctcagaaatcctgga

SEQ ID NO: 1184234 - DNA, 15 bp, Homo sapiens
tctcagaaatcctgg

SEQ ID NO: 1184235 - DNA, 15 bp, Homo sapiens
ttctcagaaatcctg

SEQ ID NO: 1184236 - DNA, 15 bp, Homo sapiens
cttctcagaaatcct

SEQ ID NO: 1184237 - DNA, 15 bp, Homo sapiens
tcttctcagaaatcc

SEQ ID NO: 1184238 - DNA, 15 bp, Homo sapiens
gtcttctcagaaatc

SEQ ID NO: 1184239 - DNA, 15 bp, Homo sapiens
agtcttctcagaaat

SEQ ID NO: 1184240 - DNA, 15 bp, Homo sapiens
gagtcttctcagaaa

SEQ ID NO: 1184241 - DNA, 15 bp, Homo sapiens
ggagtcttctcagaa

SEQ ID NO: 1184242 - DNA, 15 bp, Homo sapiens
aggagtcttctcaga

SEQ ID NO: 1184243 - DNA, 15 bp, Homo sapiens
aaggagtcttctcag

SEQ ID NO: 1184244 - DNA, 15 bp, Homo sapiens
aaaggagtcttctca

SEQ ID NO: 1184245 - DNA, 15 bp, Homo sapiens
gaaaggagtcttctc

SEQ ID NO: 1184246 - DNA, 15 bp, Homo sapiens
tgaaaggagtcttct

SEQ ID NO: 1184247 - DNA, 15 bp, Homo sapiens
atgaaaggagtcttc

SEQ ID NO: 1184248 - DNA, 15 bp, Homo sapiens
aatgaaaggagtctt

SEQ ID NO: 1184249 - DNA, 15 bp, Homo sapiens
gaatgaaaggagtct

SEQ ID NO: 1184250 - DNA, 15 bp, Homo sapiens
agaatgaaaggagtc

SEQ ID NO: 1184251 - DNA, 15 bp, Homo sapiens
cagaatgaaaggagt

SEQ ID NO: 1184252 - DNA, 15 bp, Homo sapiens
tcagaatgaaaggag

SEQ ID NO: 1184253 - DNA, 15 bp, Homo sapiens
atcagaatgaaagga

SEQ ID NO: 1184254 - DNA, 15 bp, Homo sapiens
tatcagaatgaaagg

SEQ ID NO: 1184255 - DNA, 15 bp, Homo sapiens
ttatcagaatgaaag

SEQ ID NO: 1184256 - DNA, 15 bp, Homo sapiens
tttatcagaatgaaa

SEQ ID NO: 1184257 - DNA, 15 bp, Homo sapiens
ctttatcagaatgaa

SEQ ID NO: 1184258 - DNA, 15 bp, Homo sapiens
actttatcagaatga

SEQ ID NO: 1184259 - DNA, 15 bp, Homo sapiens
aactttatcagaatg

SEQ ID NO: 1184260 - DNA, 15 bp, Homo sapiens
gaactttatcagaat

SEQ ID NO: 1184261 - DNA, 15 bp, Homo sapiens
agaactttatcagaa

SEQ ID NO: 1184262 - DNA, 15 bp, Homo sapiens
gagaactttatcaga

SEQ ID NO: 1184263 - DNA, 15 bp, Homo sapiens
tgagaactttatcag

SEQ ID NO: 1184264 - DNA, 15 bp, Homo sapiens
ctgagaactttatca

SEQ ID NO: 1184265 - DNA, 15 bp, Homo sapiens
gctgagaactttatc

SEQ ID NO: 1184266 - DNA, 15 bp, Homo sapiens
agctgagaactttat

SEQ ID NO: 1184267 - DNA, 15 bp, Homo sapiens
aagctgagaacttta

SEQ ID NO: 1184268 - DNA, 15 bp, Homo sapiens
gaagctgagaacttt

SEQ ID NO: 1184269 - DNA, 15 bp, Homo sapiens
agaagctgagaactt

SEQ ID NO: 1184270 - DNA, 15 bp, Homo sapiens
gagaagctgagaact

SEQ ID NO: 1184271 - DNA, 15 bp, Homo sapiens
cgagaagctgagaac

SEQ ID NO: 1184272 - DNA, 15 bp, Homo sapiens
tcgagaagctgagaa

SEQ ID NO: 1184273 - DNA, 15 bp, Homo sapiens
gtcgagaagctgaga

SEQ ID NO: 1184274 - DNA, 15 bp, Homo sapiens
ggtcgagaagctgag

SEQ ID NO: 1184275 - DNA, 15 bp, Homo sapiens
gggtcgagaagctga

SEQ ID NO: 1184276 - DNA, 15 bp, Homo sapiens
ggggtcgagaagctg

SEQ ID NO: 1184277 - DNA, 15 bp, Homo sapiens
gggggtcgagaagct

SEQ ID NO: 1184278 - DNA, 15 bp, Homo sapiens
tgggggtcgagaagc

SEQ ID NO: 1184279 - DNA, 15 bp, Homo sapiens
ttgggggtcgagaag

SEQ ID NO: 1184280 - DNA, 15 bp, Homo sapiens
tttgggggtcgagaa

SEQ ID NO: 1184281 - DNA, 15 bp, Homo sapiens
atttgggggtcgaga

SEQ ID NO: 1184282 - DNA, 15 bp, Homo sapiens
gatttgggggtcgag

SEQ ID NO: 1184283 - DNA, 15 bp, Homo sapiens
ggatttgggggtcga

SEQ ID NO: 1184284 - DNA, 15 bp, Homo sapiens
aggatttgggggtcg

SEQ ID NO: 1184285 - DNA, 15 bp, Homo sapiens
taggatttgggggtc

SEQ ID NO: 1184286 - DNA, 15 bp, Homo sapiens
ttaggatttgggggt

SEQ ID NO: 1184287 - DNA, 15 bp, Homo sapiens
gttaggatttggggg

SEQ ID NO: 1184288 - DNA, 15 bp, Homo sapiens
agttaggatttgggg

SEQ ID NO: 1184289 - DNA, 15 bp, Homo sapiens
gagttaggatttggg

SEQ ID NO: 1184290 - DNA, 15 bp, Homo sapiens
ggagttaggatttgg

SEQ ID NO: 1184291 - DNA, 15 bp, Homo sapiens
gggagttaggatttg

SEQ ID NO: 1184292 - DNA, 15 bp, Homo sapiens
agggagttaggattt

SEQ ID NO: 1184293 - DNA, 15 bp, Homo sapiens
cagggagttaggatt

SEQ ID NO: 1184294 - DNA, 15 bp, Homo sapiens
tcagggagttaggat

SEQ ID NO: 1184295 - DNA, 15 bp, Homo sapiens
ctcagggagttagga

SEQ ID NO: 1184296 - DNA, 15 bp, Homo sapiens
cctcagggagttagg

SEQ ID NO: 1184297 - DNA, 15 bp, Homo sapiens
tcctcagggagttag

SEQ ID NO: 1184298 - DNA, 15 bp, Homo sapiens
ttcctcagggagtta

SEQ ID NO: 1184299 - DNA, 15 bp, Homo sapiens
cttcctcagggagtt

SEQ ID NO: 1184300 - DNA, 15 bp, Homo sapiens
tcttcctcagggagt

SEQ ID NO: 1184301 - DNA, 15 bp, Homo sapiens
atcttcctcagggag

SEQ ID NO: 1184302 - DNA, 15 bp, Homo sapiens
aatcttcctcaggga

SEQ ID NO: 1184303 - DNA, 15 bp, Homo sapiens
gaatcttcctcaggg

SEQ ID NO: 1184304 - DNA, 15 bp, Homo sapiens
tgaatcttcctcagg

SEQ ID NO: 1184305 - DNA, 15 bp, Homo sapiens
ttgaatcttcctcag

SEQ ID NO: 1184306 - DNA, 15 bp, Homo sapiens
tttgaatcttcctca

SEQ ID NO: 1184307 - DNA, 15 bp, Homo sapiens
ttttgaatcttcctc

SEQ ID NO: 1184308 - DNA, 15 bp, Homo sapiens
tttttgaatcttcct

SEQ ID NO: 1184309 - DNA, 15 bp, Homo sapiens
gtttttgaatcttcc

SEQ ID NO: 1184310 - DNA, 15 bp, Homo sapiens
tgtttttgaatcttc

SEQ ID NO: 1184311 - DNA, 15 bp, Homo sapiens
gtgtttttgaatctt

SEQ ID NO: 1184312 - DNA, 15 bp, Homo sapiens
ttttgattatttgta

SEQ ID NO: 1184313 - DNA, 15 bp, Homo sapiens
tttttgattatttgt

SEQ ID NO: 1184314 - DNA, 15 bp, Homo sapiens
atttttgattatttg

SEQ ID NO: 1184315 - DNA, 15 bp, Homo sapiens
aatttttgattattt

SEQ ID NO: 1184316 - DNA, 15 bp, Homo sapiens
taatttttgattatt

SEQ ID NO: 1184317 - DNA, 15 bp, Homo sapiens
ttaatttttgattat

SEQ ID NO: 1184318 - DNA, 15 bp, Homo sapiens
gttaatttttgatta

SEQ ID NO: 1184319 - DNA, 15 bp, Homo sapiens
ggttaatttttgatt

SEQ ID NO: 1184320 - DNA, 15 bp, Homo sapiens
tggttaatttttgat

SEQ ID NO: 1184321 - DNA, 15 bp, Homo sapiens
ctggttaatttttga

SEQ ID NO: 1184322 - DNA, 15 bp, Homo sapiens
tctggttaatttttg

SEQ ID NO: 1184323 - DNA, 15 bp, Homo sapiens
gtctggttaattttt

SEQ ID NO: 1184324 - DNA, 15 bp, Homo sapiens
tgtctggttaatttt

SEQ ID NO: 1184325 - DNA, 15 bp, Homo sapiens
atgtctggttaattt

SEQ ID NO: 1184326 - DNA, 15 bp, Homo sapiens
catgtctggttaatt

SEQ ID NO: 1184327 - DNA, 15 bp, Homo sapiens
ccatgtctggttaat

SEQ ID NO: 1184328 - DNA, 15 bp, Homo sapiens
accatgtctggttaa

SEQ ID NO: 1184329 - DNA, 15 bp, Homo sapiens
taccatgtctggtta

SEQ ID NO: 1184330 - DNA, 15 bp, Homo sapiens
ttaccatgtctggtt

SEQ ID NO: 1184331 - DNA, 15 bp, Homo sapiens
attaccatgtctggt

SEQ ID NO: 1184332 - DNA, 15 bp, Homo sapiens
cattaccatgtctgg

SEQ ID NO: 1184333 - DNA, 15 bp, Homo sapiens
gcattaccatgtctg

SEQ ID NO: 1184334 - DNA, 15 bp, Homo sapiens
tgcattaccatgtct

SEQ ID NO: 1184335 - DNA, 15 bp, Homo sapiens
atgcattaccatgtc

SEQ ID NO: 1184336 - DNA, 15 bp, Homo sapiens
catgcattaccatgt

SEQ ID NO: 1184337 - DNA, 15 bp, Homo sapiens
gcatgcattaccatg

SEQ ID NO: 1184338 - DNA, 15 bp, Homo sapiens
aggcatgcattacca

SEQ ID NO: 1184339 - DNA, 15 bp, Homo sapiens
caggcatgcattacc

SEQ ID NO: 1184340 - DNA, 15 bp, Homo sapiens
gcaggcatgcattac

SEQ ID NO: 1184341 - DNA, 15 bp, Homo sapiens
tgcaggcatgcatta

SEQ ID NO: 1184342 - DNA, 15 bp, Homo sapiens
ctgcaggcatgcatt

SEQ ID NO: 1184343 - DNA, 15 bp, Homo sapiens
actgcaggcatgcat

SEQ ID NO: 1184344 - DNA, 15 bp, Homo sapiens
gactgcaggcatgca

SEQ ID NO: 1184345 - DNA, 15 bp, Homo sapiens
ggactgcaggcatgc

SEQ ID NO: 1184346 - DNA, 15 bp, Homo sapiens
gggactgcaggcatg

SEQ ID NO: 1184347 - DNA, 15 bp, Homo sapiens
tgggactgcaggcat

SEQ ID NO: 1184348 - DNA, 15 bp, Homo sapiens
ctgggactgcaggca

SEQ ID NO: 1184349 - DNA, 15 bp, Homo sapiens
acctcagccttctga

SEQ ID NO: 1184350 - DNA, 15 bp, Homo sapiens
cacctcagccttctg

SEQ ID NO: 1184351 - DNA, 15 bp, Homo sapiens
ccacctcagccttct

SEQ ID NO: 1184352 - DNA, 15 bp, Homo sapiens
caggctcaagagatc

SEQ ID NO: 1184353 - DNA, 15 bp, Homo sapiens
tcaggctcaagagat

SEQ ID NO: 1184354 - DNA, 15 bp, Homo sapiens
ctcaggctcaagaga

SEQ ID NO: 1184355 - DNA, 15 bp, Homo sapiens
tctcaggctcaagag

SEQ ID NO: 1184356 - DNA, 15 bp, Homo sapiens
ctctcaggctcaaga

SEQ ID NO: 1184357 - DNA, 15 bp, Homo sapiens
cctctcaggctcaag

SEQ ID NO: 1184358 - DNA, 15 bp, Homo sapiens
acctctcaggctcaa

SEQ ID NO: 1184359 - DNA, 15 bp, Homo sapiens
aacctctcaggctca

SEQ ID NO: 1184360 - DNA, 15 bp, Homo sapiens
caacctctcaggctc

SEQ ID NO: 1184361 - DNA, 15 bp, Homo sapiens
tcaacctctcaggct

SEQ ID NO: 1184362 - DNA, 15 bp, Homo sapiens
gtcaacctctcaggc

SEQ ID NO: 1184363 - DNA, 15 bp, Homo sapiens
cgtcaacctctcagg

SEQ ID NO: 1184364 - DNA, 15 bp, Homo sapiens
gcgtcaacctctcag

SEQ ID NO: 1184365 - DNA, 15 bp, Homo sapiens
agcgtcaacctctca

SEQ ID NO: 1184366 - DNA, 15 bp, Homo sapiens
cagcgtcaacctctc

SEQ ID NO: 1184367 - DNA, 15 bp, Homo sapiens
acagcgtcaacctct

SEQ ID NO: 1184368 - DNA, 15 bp, Homo sapiens
tacagcgtcaacctc

SEQ ID NO: 1184369 - DNA, 15 bp, Homo sapiens
ctacagcgtcaacct

SEQ ID NO: 1184370 - DNA, 15 bp, Homo sapiens
actacagcgtcaacc

SEQ ID NO: 1184371 - DNA, 15 bp, Homo sapiens
cactacagcgtcaac

SEQ ID NO: 1184372 - DNA, 15 bp, Homo sapiens
tcactacagcgtcaa

SEQ ID NO: 1184373 - DNA, 15 bp, Homo sapiens
ctcactacagcgtca

SEQ ID NO: 1184374 - DNA, 15 bp, Homo sapiens
gctcactacagcgtc

SEQ ID NO: 1184375 - DNA, 15 bp, Homo sapiens
ggctcactacagcgt

SEQ ID NO: 1184376 - DNA, 15 bp, Homo sapiens
tggctcactacagcg

SEQ ID NO: 1184377 - DNA, 15 bp, Homo sapiens
gtggctcactacagc

SEQ ID NO: 1184378 - DNA, 15 bp, Homo sapiens
tgtggctcactacag

SEQ ID NO: 1184379 - DNA, 15 bp, Homo sapiens
ttgtggctcactaca

SEQ ID NO: 1184380 - DNA, 15 bp, Homo sapiens
attgtggctcactac

SEQ ID NO: 1184381 - DNA, 15 bp, Homo sapiens
aattgtggctcacta

SEQ ID NO: 1184382 - DNA, 15 bp, Homo sapiens
caattgtggctcact

SEQ ID NO: 1184383 - DNA, 15 bp, Homo sapiens
gcaattgtggctcac

SEQ ID NO: 1184384 - DNA, 15 bp, Homo sapiens
tgcaattgtggctca

SEQ ID NO: 1184385 - DNA, 15 bp, Homo sapiens
gtgcaattgtggctc

SEQ ID NO: 1184386 - DNA, 15 bp, Homo sapiens
ggtgcaattgtggct

SEQ ID NO: 1184387 - DNA, 15 bp, Homo sapiens
tggtgcaattgtggc

SEQ ID NO: 1184388 - DNA, 15 bp, Homo sapiens
gtggtgcaattgtgg

SEQ ID NO: 1184389 - DNA, 15 bp, Homo sapiens
agtggtgcaattgtg

SEQ ID NO: 1184390 - DNA, 15 bp, Homo sapiens
cagtggtgcaattgt

SEQ ID NO: 1184391 - DNA, 15 bp, Homo sapiens
gcagtggtgcaattg

SEQ ID NO: 1184392 - DNA, 15 bp, Homo sapiens
tgcagtggtgcaatt

SEQ ID NO: 1184393 - DNA, 15 bp, Homo sapiens
actgttgcccaggct

SEQ ID NO: 1184394 - DNA, 15 bp, Homo sapiens
cactgttgcccaggc

SEQ ID NO: 1184395 - DNA, 15 bp, Homo sapiens
gcactgttgcccagg

SEQ ID NO: 1184396 - DNA, 15 bp, Homo sapiens
tgcactgttgcccag

SEQ ID NO: 1184397 - DNA, 15 bp, Homo sapiens
ttgcactgttgccca

SEQ ID NO: 1184398 - DNA, 15 bp, Homo sapiens
tttgcactgttgccc

SEQ ID NO: 1184399 - DNA, 15 bp, Homo sapiens
ttttgcactgttgcc

SEQ ID NO: 1184400 - DNA, 15 bp, Homo sapiens
gttttgcactgttgc

SEQ ID NO: 1184401 - DNA, 15 bp, Homo sapiens
ggttttgcactgttg

SEQ ID NO: 1184402 - DNA, 15 bp, Homo sapiens
gggttttgcactgtt

SEQ ID NO: 1184403 - DNA, 15 bp, Homo sapiens
agggttttgcactgt

SEQ ID NO: 1184404 - DNA, 15 bp, Homo sapiens
cagggttttgcactg

SEQ ID NO: 1184405 - DNA, 15 bp, Homo sapiens
acagggttttgcact

SEQ ID NO: 1184406 - DNA, 15 bp, Homo sapiens
gacagggttttgcac

SEQ ID NO: 1184407 - DNA, 15 bp, Homo sapiens
agacagggttttgca

SEQ ID NO: 1184408 - DNA, 15 bp, Homo sapiens
tgagacagggttttg

SEQ ID NO: 1184409 - DNA, 15 bp, Homo sapiens
ttgagacagggtttt

SEQ ID NO: 1184410 - DNA, 15 bp, Homo sapiens
tttgagacagggttt

SEQ ID NO: 1184411 - DNA, 15 bp, Homo sapiens
ttttgagacagggtt

SEQ ID NO: 1184412 - DNA, 15 bp, Homo sapiens
tcttctttttttttt

SEQ ID NO: 1184413 - DNA, 15 bp, Homo sapiens
cttcttctttttttt

SEQ ID NO: 1184414 - DNA, 15 bp, Homo sapiens
ccttcttcttcttct

SEQ ID NO: 1184415 - DNA, 15 bp, Homo sapiens
ctccttcttcttctt

SEQ ID NO: 1184416 - DNA, 15 bp, Homo sapiens
tctccttcttcttct

SEQ ID NO: 1184417 - DNA, 15 bp, Homo sapiens
ttctccttcttcttc

SEQ ID NO: 1184418 - DNA, 15 bp, Homo sapiens
cttctccttcttctt

SEQ ID NO: 1184419 - DNA, 15 bp, Homo sapiens
tcttctccttcttct

SEQ ID NO: 1184420 - DNA, 15 bp, Homo sapiens
ttcttctccttcttc

SEQ ID NO: 1184421 - DNA, 15 bp, Homo sapiens
cttcttctccttctt

SEQ ID NO: 1184422 - DNA, 15 bp, Homo sapiens
gcttcttctccttct

SEQ ID NO: 1184423 - DNA, 15 bp, Homo sapiens
tgcttcttctccttc

SEQ ID NO: 1184424 - DNA, 15 bp, Homo sapiens
ctgcttcttctcctt

SEQ ID NO: 1184425 - DNA, 15 bp, Homo sapiens
actgcttcttctcct

SEQ ID NO: 1184426 - DNA, 15 bp, Homo sapiens
cactgcttcttctcc

SEQ ID NO: 1184427 - DNA, 15 bp, Homo sapiens
acactgcttcttctc

SEQ ID NO: 1184428 - DNA, 15 bp, Homo sapiens
tacactgcttcttct

SEQ ID NO: 1184429 - DNA, 15 bp, Homo sapiens
ttacactgcttcttc

SEQ ID NO: 1184430 - DNA, 15 bp, Homo sapiens
attacactgcttctt

SEQ ID NO: 1184431 - DNA, 15 bp, Homo sapiens
tattacactgcttct

SEQ ID NO: 1184432 - DNA, 15 bp, Homo sapiens
ctattacactgcttc

SEQ ID NO: 1184433 - DNA, 15 bp, Homo sapiens
tctattacactgctt

SEQ ID NO: 1184434 - DNA, 15 bp, Homo sapiens
ttctattacactgct

SEQ ID NO: 1184435 - DNA, 15 bp, Homo sapiens
attctattacactgc

SEQ ID NO: 1184436 - DNA, 15 bp, Homo sapiens
cattctattacactg

SEQ ID NO: 1184437 - DNA, 15 bp, Homo sapiens
tcattctattacact

SEQ ID NO: 1184438 - DNA, 15 bp, Homo sapiens
gtcattctattacac

SEQ ID NO: 1184439 - DNA, 15 bp, Homo sapiens
agtcattctattaca

SEQ ID NO: 1184440 - DNA, 15 bp, Homo sapiens
aagtcattctattac

SEQ ID NO: 1184441 - DNA, 15 bp, Homo sapiens
taagtcattctatta

SEQ ID NO: 1184442 - DNA, 15 bp, Homo sapiens
ctaagtcattctatt

SEQ ID NO: 1184443 - DNA, 15 bp, Homo sapiens
actaagtcattctat

SEQ ID NO: 1184444 - DNA, 15 bp, Homo sapiens
cactaagtcattcta

SEQ ID NO: 1184445 - DNA, 15 bp, Homo sapiens
gcactaagtcattct

SEQ ID NO: 1184446 - DNA, 15 bp, Homo sapiens
agcactaagtcattc

SEQ ID NO: 1184447 - DNA, 15 bp, Homo sapiens
gagcactaagtcatt

SEQ ID NO: 1184448 - DNA, 15 bp, Homo sapiens
tgagcactaagtcat

SEQ ID NO: 1184449 - DNA, 15 bp, Homo sapiens
ctgagcactaagtca

SEQ ID NO: 1184450 - DNA, 15 bp, Homo sapiens
tctgagcactaagtc

SEQ ID NO: 1184451 - DNA, 15 bp, Homo sapiens
ttctgagcactaagt

SEQ ID NO: 1184452 - DNA, 15 bp, Homo sapiens
tttctgagcactaag

SEQ ID NO: 1184453 - DNA, 15 bp, Homo sapiens
ctttctgagcactaa

SEQ ID NO: 1184454 - DNA, 15 bp, Homo sapiens
actttctgagcacta

SEQ ID NO: 1184455 - DNA, 15 bp, Homo sapiens
gactttctgagcact

SEQ ID NO: 1184456 - DNA, 15 bp, Homo sapiens
agactttctgagcac

SEQ ID NO: 1184457 - DNA, 15 bp, Homo sapiens
aagactttctgagca

SEQ ID NO: 1184458 - DNA, 15 bp, Homo sapiens
caagactttctgagc

SEQ ID NO: 1184459 - DNA, 15 bp, Homo sapiens
tcaagactttctgag

SEQ ID NO: 1184460 - DNA, 15 bp, Homo sapiens
ctcaagactttctga

SEQ ID NO: 1184461 - DNA, 15 bp, Homo sapiens
actcaagactttctg

SEQ ID NO: 1184462 - DNA, 15 bp, Homo sapiens
aactcaagactttct

SEQ ID NO: 1184463 - DNA, 15 bp, Homo sapiens
aaactcaagactttc

SEQ ID NO: 1184464 - DNA, 15 bp, Homo sapiens
caaactcaagacttt

SEQ ID NO: 1184465 - DNA, 15 bp, Homo sapiens
ccaaactcaagactt

SEQ ID NO: 1184466 - DNA, 15 bp, Homo sapiens
tccaaactcaagact

SEQ ID NO: 1184467 - DNA, 15 bp, Homo sapiens
atccaaactcaagac

SEQ ID NO: 1184468 - DNA, 15 bp, Homo sapiens
gatccaaactcaaga

SEQ ID NO: 1184469 - DNA, 15 bp, Homo sapiens
ggatccaaactcaag

SEQ ID NO: 1184470 - DNA, 15 bp, Homo sapiens
aggatccaaactcaa

SEQ ID NO: 1184471 - DNA, 15 bp, Homo sapiens
caggatccaaactca

SEQ ID NO: 1184472 - DNA, 15 bp, Homo sapiens
ccaggatccaaactc

SEQ ID NO: 1184473 - DNA, 15 bp, Homo sapiens
accaggatccaaact

SEQ ID NO: 1184474 - DNA, 15 bp, Homo sapiens
aaccaggatccaaac

SEQ ID NO: 1184475 - DNA, 15 bp, Homo sapiens
aaaccaggatccaaa

SEQ ID NO: 1184476 - DNA, 15 bp, Homo sapiens
caaaccaggatccaa

SEQ ID NO: 1184477 - DNA, 15 bp, Homo sapiens
ccaaaccaggatcca

SEQ ID NO: 1184478 - DNA, 15 bp, Homo sapiens
cccaaaccaggatcc

SEQ ID NO: 1184479 - DNA, 15 bp, Homo sapiens
gcccaaaccaggatc

SEQ ID NO: 1184480 - DNA, 15 bp, Homo sapiens
tgcccaaaccaggat

SEQ ID NO: 1184481 - DNA, 15 bp, Homo sapiens
atgcccaaaccagga

SEQ ID NO: 1184482 - DNA, 15 bp, Homo sapiens
aatgcccaaaccagg

SEQ ID NO: 1184483 - DNA, 15 bp, Homo sapiens
aaatgcccaaaccag

SEQ ID NO: 1184484 - DNA, 15 bp, Homo sapiens
taaatgcccaaacca

SEQ ID NO: 1184485 - DNA, 15 bp, Homo sapiens
ttaaatgcccaaacc

SEQ ID NO: 1184486 - DNA, 15 bp, Homo sapiens
attaaatgcccaaac

SEQ ID NO: 1184487 - DNA, 15 bp, Homo sapiens
tattaaatgcccaaa

SEQ ID NO: 1184488 - DNA, 15 bp, Homo sapiens
ttattaaatgcccaa

SEQ ID NO: 1184489 - DNA, 15 bp, Homo sapiens
cttattaaatgccca

SEQ ID NO: 1184490 - DNA, 15 bp, Homo sapiens
acttattaaatgccc

SEQ ID NO: 1184491 - DNA, 15 bp, Homo sapiens
cacttattaaatgcc

SEQ ID NO: 1184492 - DNA, 15 bp, Homo sapiens
tcacttattaaatgc

SEQ ID NO: 1184493 - DNA, 15 bp, Homo sapiens
ctcacttattaaatg

SEQ ID NO: 1184494 - DNA, 15 bp, Homo sapiens
actcacttattaaat

SEQ ID NO: 1184495 - DNA, 15 bp, Homo sapiens
cactcacttattaaa

SEQ ID NO: 1184496 - DNA, 15 bp, Homo sapiens
ccactcacttattaa

SEQ ID NO: 1184497 - DNA, 15 bp, Homo sapiens
gccactcacttatta

SEQ ID NO: 1184498 - DNA, 15 bp, Homo sapiens
ggccactcacttatt

SEQ ID NO: 1184499 - DNA, 15 bp, Homo sapiens
aggccactcacttat

SEQ ID NO: 1184500 - DNA, 15 bp, Homo sapiens
caggccactcactta

SEQ ID NO: 1184501 - DNA, 15 bp, Homo sapiens
tcaggccactcactt

SEQ ID NO: 1184502 - DNA, 15 bp, Homo sapiens
ctcaggccactcact

SEQ ID NO: 1184503 - DNA, 15 bp, Homo sapiens
tctcaggccactcac

SEQ ID NO: 1184504 - DNA, 15 bp, Homo sapiens
gtctcaggccactca

SEQ ID NO: 1184505 - DNA, 15 bp, Homo sapiens
tgtctcaggccactc

SEQ ID NO: 1184506 - DNA, 15 bp, Homo sapiens
ttgtctcaggccact

SEQ ID NO: 1184507 - DNA, 15 bp, Homo sapiens
tttgtctcaggccac

SEQ ID NO: 1184508 - DNA, 15 bp, Homo sapiens
atttgtctcaggcca

SEQ ID NO: 1184509 - DNA, 15 bp, Homo sapiens
tatttgtctcaggcc

SEQ ID NO: 1184510 - DNA, 15 bp, Homo sapiens
ttatttgtctcaggc

SEQ ID NO: 1184511 - DNA, 15 bp, Homo sapiens
tttatttgtctcagg

SEQ ID NO: 1184512 - DNA, 15 bp, Homo sapiens
atttatttgtctcag

SEQ ID NO: 1184513 - DNA, 15 bp, Homo sapiens
tatttatttgtctca

SEQ ID NO: 1184514 - DNA, 15 bp, Homo sapiens
ttatttatttgtctc

SEQ ID NO: 1184515 - DNA, 15 bp, Homo sapiens
tttatttatttgtct

SEQ ID NO: 1184516 - DNA, 15 bp, Homo sapiens
gtttatttatttgtc

SEQ ID NO: 1184517 - DNA, 15 bp, Homo sapiens
agtttatttatttgt

SEQ ID NO: 1184518 - DNA, 15 bp, Homo sapiens
aagtttatttatttg

SEQ ID NO: 1184519 - DNA, 15 bp, Homo sapiens
aaagtttatttattt

SEQ ID NO: 1184520 - DNA, 15 bp, Homo sapiens
aaaagtttatttatt

SEQ ID NO: 1184521 - DNA, 15 bp, Homo sapiens
gaaaagtttatttat

SEQ ID NO: 1184522 - DNA, 15 bp, Homo sapiens
agaaaagtttattta

SEQ ID NO: 1184523 - DNA, 15 bp, Homo sapiens
tagaaaagtttattt

SEQ ID NO: 1184524 - DNA, 15 bp, Homo sapiens
atagaaaagtttatt

SEQ ID NO: 1184525 - DNA, 15 bp, Homo sapiens
catagaaaagtttat

SEQ ID NO: 1184526 - DNA, 15 bp, Homo sapiens
ccatagaaaagttta

SEQ ID NO: 1184527 - DNA, 15 bp, Homo sapiens
gccatagaaaagttt

SEQ ID NO: 1184528 - DNA, 15 bp, Homo sapiens
agccatagaaaagtt

SEQ ID NO: 1184529 - DNA, 15 bp, Homo sapiens
gagccatagaaaagt

SEQ ID NO: 1184530 - DNA, 15 bp, Homo sapiens
tgagccatagaaaag

SEQ ID NO: 1184531 - DNA, 15 bp, Homo sapiens
ttgagccatagaaaa

SEQ ID NO: 1184532 - DNA, 15 bp, Homo sapiens
attgagccatagaaa

SEQ ID NO: 1184533 - DNA, 15 bp, Homo sapiens
tattgagccatagaa

SEQ ID NO: 1184534 - DNA, 15 bp, Homo sapiens
atattgagccataga

SEQ ID NO: 1184535 - DNA, 15 bp, Homo sapiens
aatattgagccatag

SEQ ID NO: 1184536 - DNA, 15 bp, Homo sapiens
aaatattgagccata

SEQ ID NO: 1184537 - DNA, 15 bp, Homo sapiens
aaaatattgagccat

SEQ ID NO: 1184538 - DNA, 15 bp, Homo sapiens
gaaaatattgagcca

SEQ ID NO: 1184539 - DNA, 15 bp, Homo sapiens
tgaaaatattgagcc

SEQ ID NO: 1184540 - DNA, 15 bp, Homo sapiens
ttgaaaatattgagc

SEQ ID NO: 1184541 - DNA, 15 bp, Homo sapiens
gttgaaaatattgag

SEQ ID NO: 1184542 - DNA, 15 bp, Homo sapiens
agttgaaaatattga

SEQ ID NO: 1184543 - DNA, 15 bp, Homo sapiens
cagttgaaaatattg

SEQ ID NO: 1184544 - DNA, 15 bp, Homo sapiens
acagttgaaaatatt

SEQ ID NO: 1184545 - DNA, 15 bp, Homo sapiens
tacagttgaaaatat

SEQ ID NO: 1184546 - DNA, 15 bp, Homo sapiens
ttacagttgaaaata

SEQ ID NO: 1184547 - DNA, 15 bp, Homo sapiens
tttacagttgaaaat

SEQ ID NO: 1184548 - DNA, 15 bp, Homo sapiens
ctttacagttgaaaa

SEQ ID NO: 1184549 - DNA, 15 bp, Homo sapiens
actttacagttgaaa

SEQ ID NO: 1184550 - DNA, 15 bp, Homo sapiens
cactttacagttgaa

SEQ ID NO: 1184551 - DNA, 15 bp, Homo sapiens
tcactttacagttga

SEQ ID NO: 1184552 - DNA, 15 bp, Homo sapiens
ttcactttacagttg

SEQ ID NO: 1184553 - DNA, 15 bp, Homo sapiens
cttcactttacagtt

SEQ ID NO: 1184554 - DNA, 15 bp, Homo sapiens
tcttcactttacagt

SEQ ID NO: 1184555 - DNA, 15 bp, Homo sapiens
atcttcactttacag

SEQ ID NO: 1184556 - DNA, 15 bp, Homo sapiens
catcttcactttaca

SEQ ID NO: 1184557 - DNA, 15 bp, Homo sapiens
tcatcttcactttac

SEQ ID NO: 1184558 - DNA, 15 bp, Homo sapiens
atcatcttcacttta

SEQ ID NO: 1184559 - DNA, 15 bp, Homo sapiens
tatcatcttcacttt

SEQ ID NO: 1184560 - DNA, 15 bp, Homo sapiens
ttatcatcttcactt

SEQ ID NO: 1184561 - DNA, 15 bp, Homo sapiens
gttatcatcttcact

SEQ ID NO: 1184562 - DNA, 15 bp, Homo sapiens
tgttatcatcttcac

SEQ ID NO: 1184563 - DNA, 15 bp, Homo sapiens
ctgttatcatcttca

SEQ ID NO: 1184564 - DNA, 15 bp, Homo sapiens
actgttatcatcttc

SEQ ID NO: 1184565 - DNA, 15 bp, Homo sapiens
cactgttatcatctt

SEQ ID NO: 1184566 - DNA, 15 bp, Homo sapiens
acactgttatcatct

SEQ ID NO: 1184567 - DNA, 15 bp, Homo sapiens
gacactgttatcatc

SEQ ID NO: 1184568 - DNA, 15 bp, Homo sapiens
ggacactgttatcat

SEQ ID NO: 1184569 - DNA, 15 bp, Homo sapiens
tggacactgttatca

SEQ ID NO: 1184570 - DNA, 15 bp, Homo sapiens
atggacactgttatc

SEQ ID NO: 1184571 - DNA, 15 bp, Homo sapiens
gatggacactgttat

SEQ ID NO: 1184572 - DNA, 15 bp, Homo sapiens
agatggacactgtta

SEQ ID NO: 1184573 - DNA, 15 bp, Homo sapiens
gagatggacactgtt

SEQ ID NO: 1184574 - DNA, 15 bp, Homo sapiens
tgagatggacactgt

SEQ ID NO: 1184575 - DNA, 15 bp, Homo sapiens
atgagatggacactg

SEQ ID NO: 1184576 - DNA, 15 bp, Homo sapiens
tatgagatggacact

SEQ ID NO: 1184577 - DNA, 15 bp, Homo sapiens
ctatgagatggacac

SEQ ID NO: 1184578 - DNA, 15 bp, Homo sapiens
cctatgagatggaca

SEQ ID NO: 1184579 - DNA, 15 bp, Homo sapiens
tcctatgagatggac

SEQ ID NO: 1184580 - DNA, 15 bp, Homo sapiens
atcctatgagatgga

SEQ ID NO: 1184581 - DNA, 15 bp, Homo sapiens
aatcctatgagatgg

SEQ ID NO: 1184582 - DNA, 15 bp, Homo sapiens
caatcctatgagatg

SEQ ID NO: 1184583 - DNA, 15 bp, Homo sapiens
acaatcctatgagat

SEQ ID NO: 1184584 - DNA, 15 bp, Homo sapiens
aacaatcctatgaga

SEQ ID NO: 1184585 - DNA, 15 bp, Homo sapiens
caacaatcctatgag

SEQ ID NO: 1184586 - DNA, 15 bp, Homo sapiens
acaacaatcctatga

SEQ ID NO: 1184587 - DNA, 15 bp, Homo sapiens
tacaacaatcctatg

SEQ ID NO: 1184588 - DNA, 15 bp, Homo sapiens
ttacaacaatcctat

SEQ ID NO: 1184589 - DNA, 15 bp, Homo sapiens
tttacaacaatccta

SEQ ID NO: 1184590 - DNA, 15 bp, Homo sapiens
ttttacaacaatcct

SEQ ID NO: 1184591 - DNA, 15 bp, Homo sapiens
cttttacaacaatcc

SEQ ID NO: 1184592 - DNA, 15 bp, Homo sapiens
ccttttacaacaatc

SEQ ID NO: 1184593 - DNA, 15 bp, Homo sapiens
accttttacaacaat

SEQ ID NO: 1184594 - DNA, 15 bp, Homo sapiens
taccttttacaacaa

SEQ ID NO: 1184595 - DNA, 15 bp, Homo sapiens
ttaccttttacaaca

SEQ ID NO: 1184596 - DNA, 15 bp, Homo sapiens
tttaccttttacaac

SEQ ID NO: 1184597 - DNA, 15 bp, Homo sapiens
atttaccttttacaa

SEQ ID NO: 1184598 - DNA, 15 bp, Homo sapiens
catttaccttttaca

SEQ ID NO: 1184599 - DNA, 15 bp, Homo sapiens
tcatttaccttttac

SEQ ID NO: 1184600 - DNA, 15 bp, Homo sapiens
atcatttacctttta

SEQ ID NO: 1184601 - DNA, 15 bp, Homo sapiens
tatcatttacctttt

SEQ ID NO: 1184602 - DNA, 15 bp, Homo sapiens
gtatcatttaccttt

SEQ ID NO: 1184603 - DNA, 15 bp, Homo sapiens
tgtatcatttacctt

SEQ ID NO: 1184604 - DNA, 15 bp, Homo sapiens
ctgtatcatttacct

SEQ ID NO: 1184605 - DNA, 15 bp, Homo sapiens
gctgtatcatttacc

SEQ ID NO: 1184606 - DNA, 15 bp, Homo sapiens
tgctgtatcatttac

SEQ ID NO: 1184607 - DNA, 15 bp, Homo sapiens
atgctgtatcattta

SEQ ID NO: 1184608 - DNA, 15 bp, Homo sapiens
tatgctgtatcattt

SEQ ID NO: 1184609 - DNA, 15 bp, Homo sapiens
atatgctgtatcatt

SEQ ID NO: 1184610 - DNA, 15 bp, Homo sapiens
catatgctgtatcat

SEQ ID NO: 1184611 - DNA, 15 bp, Homo sapiens
acatatgctgtatca

SEQ ID NO: 1184612 - DNA, 15 bp, Homo sapiens
tacatatgctgtatc

SEQ ID NO: 1184613 - DNA, 15 bp, Homo sapiens
atacatatgctgtat

SEQ ID NO: 1184614 - DNA, 15 bp, Homo sapiens
tatacatatgctgta

SEQ ID NO: 1184615 - DNA, 15 bp, Homo sapiens
ttatacatatgctgt

SEQ ID NO: 1184616 - DNA, 15 bp, Homo sapiens
tttatacatatgctg

SEQ ID NO: 1184617 - DNA, 15 bp, Homo sapiens
gtttatacatatgct

SEQ ID NO: 1184618 - DNA, 15 bp, Homo sapiens
ggtttatacatatgc

SEQ ID NO: 1184619 - DNA, 15 bp, Homo sapiens
tggtttatacatatg

SEQ ID NO: 1184620 - DNA, 15 bp, Homo sapiens
ctggtttatacatat

SEQ ID NO: 1184621 - DNA, 15 bp, Homo sapiens
tctggtttatacata

SEQ ID NO: 1184622 - DNA, 15 bp, Homo sapiens
atctggtttatacat

SEQ ID NO: 1184623 - DNA, 15 bp, Homo sapiens
catctggtttataca

SEQ ID NO: 1184624 - DNA, 15 bp, Homo sapiens
gcatctggtttatac

SEQ ID NO: 1184625 - DNA, 15 bp, Homo sapiens
tgcatctggtttata

SEQ ID NO: 1184626 - DNA, 15 bp, Homo sapiens
gtgcatctggtttat

SEQ ID NO: 1184627 - DNA, 15 bp, Homo sapiens
agtgcatctggttta

SEQ ID NO: 1184628 - DNA, 15 bp, Homo sapiens
gagtgcatctggttt

SEQ ID NO: 1184629 - DNA, 15 bp, Homo sapiens
tgagtgcatctggtt

SEQ ID NO: 1184630 - DNA, 15 bp, Homo sapiens
ctgagtgcatctggt

SEQ ID NO: 1184631 - DNA, 15 bp, Homo sapiens
cctgagtgcatctgg

SEQ ID NO: 1184632 - DNA, 15 bp, Homo sapiens
acctgagtgcatctg

SEQ ID NO: 1184633 - DNA, 15 bp, Homo sapiens
aacctgagtgcatct

SEQ ID NO: 1184634 - DNA, 15 bp, Homo sapiens
aaacctgagtgcatc

SEQ ID NO: 1184635 - DNA, 15 bp, Homo sapiens
aaaacctgagtgcat

SEQ ID NO: 1184636 - DNA, 15 bp, Homo sapiens
gaaaacctgagtgca

SEQ ID NO: 1184637 - DNA, 15 bp, Homo sapiens
ggaaaacctgagtgc

SEQ ID NO: 1184638 - DNA, 15 bp, Homo sapiens
tggaaaacctgagtg

SEQ ID NO: 1184639 - DNA, 15 bp, Homo sapiens
ctggaaaacctgagt

SEQ ID NO: 1184640 - DNA, 15 bp, Homo sapiens
actggaaaacctgag

SEQ ID NO: 1184641 - DNA, 15 bp, Homo sapiens
gactggaaaacctga

SEQ ID NO: 1184642 - DNA, 15 bp, Homo sapiens
gagactggaaaacct

SEQ ID NO: 1184643 - DNA, 15 bp, Homo sapiens
ggagactggaaaacc

SEQ ID NO: 1184644 - DNA, 15 bp, Homo sapiens
aggagactggaaaac

SEQ ID NO: 1184645 - DNA, 15 bp, Homo sapiens
aaggagactggaaaa

SEQ ID NO: 1184646 - DNA, 15 bp, Homo sapiens
caaggagactggaaa

SEQ ID NO: 1184647 - DNA, 15 bp, Homo sapiens
ccaaggagactggaa

SEQ ID NO: 1184648 - DNA, 15 bp, Homo sapiens
cccaaggagactgga

SEQ ID NO: 1184649 - DNA, 15 bp, Homo sapiens
acccaaggagactgg

SEQ ID NO: 1184650 - DNA, 15 bp, Homo sapiens
gacccaaggagactg

SEQ ID NO: 1184651 - DNA, 15 bp, Homo sapiens
tgacccaaggagact

SEQ ID NO: 1184652 - DNA, 15 bp, Homo sapiens
gtgacccaaggagac

SEQ ID NO: 1184653 - DNA, 15 bp, Homo sapiens
cgtgacccaaggaga

SEQ ID NO: 1184654 - DNA, 15 bp, Homo sapiens
gcgtgacccaaggag

SEQ ID NO: 1184655 - DNA, 15 bp, Homo sapiens
agcgtgacccaagga

SEQ ID NO: 1184656 - DNA, 15 bp, Homo sapiens
aagcgtgacccaagg

SEQ ID NO: 1184657 - DNA, 15 bp, Homo sapiens
aaagcgtgacccaag

SEQ ID NO: 1184658 - DNA, 15 bp, Homo sapiens
aaaagcgtgacccaa

SEQ ID NO: 1184659 - DNA, 15 bp, Homo sapiens
gaaaagcgtgaccca

SEQ ID NO: 1184660 - DNA, 15 bp, Homo sapiens
agaaaagcgtgaccc

SEQ ID NO: 1184661 - DNA, 15 bp, Homo sapiens
gagaaaagcgtgacc

SEQ ID NO: 1184662 - DNA, 15 bp, Homo sapiens
ggagaaaagcgtgac

SEQ ID NO: 1184663 - DNA, 15 bp, Homo sapiens
tggagaaaagcgtga

SEQ ID NO: 1184664 - DNA, 15 bp, Homo sapiens
ttggagaaaagcgtg

SEQ ID NO: 1184665 - DNA, 15 bp, Homo sapiens
attggagaaaagcgt

SEQ ID NO: 1184666 - DNA, 15 bp, Homo sapiens
tattggagaaaagcg

SEQ ID NO: 1184667 - DNA, 15 bp, Homo sapiens
atattggagaaaagc

SEQ ID NO: 1184668 - DNA, 15 bp, Homo sapiens
gatattggagaaaag

SEQ ID NO: 1184669 - DNA, 15 bp, Homo sapiens
agatattggagaaaa

SEQ ID NO: 1184670 - DNA, 15 bp, Homo sapiens
tagatattggagaaa

SEQ ID NO: 1184671 - DNA, 15 bp, Homo sapiens
gtagatattggagaa

SEQ ID NO: 1184672 - DNA, 15 bp, Homo sapiens
tgtagatattggaga

SEQ ID NO: 1184673 - DNA, 15 bp, Homo sapiens
atgtagatattggag

SEQ ID NO: 1184674 - DNA, 15 bp, Homo sapiens
tatgtagatattgga

SEQ ID NO: 1184675 - DNA, 15 bp, Homo sapiens
ttatgtagatattgg

SEQ ID NO: 1184676 - DNA, 15 bp, Homo sapiens
tttatgtagatattg

SEQ ID NO: 1184677 - DNA, 15 bp, Homo sapiens
ttttatgtagatatt

SEQ ID NO: 1184678 - DNA, 15 bp, Homo sapiens
attttatgtagatat

SEQ ID NO: 1184679 - DNA, 15 bp, Homo sapiens
tattttatgtagata

SEQ ID NO: 1184680 - DNA, 15 bp, Homo sapiens
ttattttatgtagat

SEQ ID NO: 1184681 - DNA, 15 bp, Homo sapiens
gttattttatgtaga

SEQ ID NO: 1184682 - DNA, 15 bp, Homo sapiens
ggttattttatgtag

SEQ ID NO: 1184683 - DNA, 15 bp, Homo sapiens
aggttattttatgta

SEQ ID NO: 1184684 - DNA, 15 bp, Homo sapiens
caggttattttatgt

SEQ ID NO: 1184685 - DNA, 15 bp, Homo sapiens
gcaggttattttatg

SEQ ID NO: 1184686 - DNA, 15 bp, Homo sapiens
tgcaggttattttat

SEQ ID NO: 1184687 - DNA, 15 bp, Homo sapiens
ttgcaggttatttta

SEQ ID NO: 1184688 - DNA, 15 bp, Homo sapiens
gttgcaggttatttt

SEQ ID NO: 1184689 - DNA, 15 bp, Homo sapiens
ggttgcaggttattt

SEQ ID NO: 1184690 - DNA, 15 bp, Homo sapiens
gggttgcaggttatt

SEQ ID NO: 1184691 - DNA, 15 bp, Homo sapiens
ggggttgcaggttat

SEQ ID NO: 1184692 - DNA, 15 bp, Homo sapiens
aggggttgcaggtta

SEQ ID NO: 1184693 - DNA, 15 bp, Homo sapiens
aaggggttgcaggtt

SEQ ID NO: 1184694 - DNA, 15 bp, Homo sapiens
aaaggggttgcaggt

SEQ ID NO: 1184695 - DNA, 15 bp, Homo sapiens
aaaaggggttgcagg

SEQ ID NO: 1184696 - DNA, 15 bp, Homo sapiens
gaaaaggggttgcag

SEQ ID NO: 1184697 - DNA, 15 bp, Homo sapiens
tgaaaaggggttgca

SEQ ID NO: 1184698 - DNA, 15 bp, Homo sapiens
gtgaaaaggggttgc

SEQ ID NO: 1184699 - DNA, 15 bp, Homo sapiens
tgtgaaaaggggttg

SEQ ID NO: 1184700 - DNA, 15 bp, Homo sapiens
atgtgaaaaggggtt

SEQ ID NO: 1184701 - DNA, 15 bp, Homo sapiens
aatgtgaaaaggggt

SEQ ID NO: 1184702 - DNA, 15 bp, Homo sapiens
gaatgtgaaaagggg

SEQ ID NO: 1184703 - DNA, 15 bp, Homo sapiens
ggaatgtgaaaaggg

SEQ ID NO: 1184704 - DNA, 15 bp, Homo sapiens
tggaatgtgaaaagg

SEQ ID NO: 1184705 - DNA, 15 bp, Homo sapiens
atggaatgtgaaaag

SEQ ID NO: 1184706 - DNA, 15 bp, Homo sapiens
catggaatgtgaaaa

SEQ ID NO: 1184707 - DNA, 15 bp, Homo sapiens
ccatggaatgtgaaa

SEQ ID NO: 1184708 - DNA, 15 bp, Homo sapiens
cccatggaatgtgaa

SEQ ID NO: 1184709 - DNA, 15 bp, Homo sapiens
tcccatggaatgtga

SEQ ID NO: 1184710 - DNA, 15 bp, Homo sapiens
ttcccatggaatgtg

SEQ ID NO: 1184711 - DNA, 15 bp, Homo sapiens
cttcccatggaatgt

SEQ ID NO: 1184712 - DNA, 15 bp, Homo sapiens
gcttcccatggaatg

SEQ ID NO: 1184713 - DNA, 15 bp, Homo sapiens
ggcttcccatggaat

SEQ ID NO: 1184714 - DNA, 15 bp, Homo sapiens
gggcttcccatggaa

SEQ ID NO: 1184715 - DNA, 15 bp, Homo sapiens
tgggcttcccatgga

SEQ ID NO: 1184716 - DNA, 15 bp, Homo sapiens
atgggcttcccatgg

SEQ ID NO: 1184717 - DNA, 15 bp, Homo sapiens
gatgggcttcccatg

SEQ ID NO: 1184718 - DNA, 15 bp, Homo sapiens
ggatgggcttcccat

SEQ ID NO: 1184719 - DNA, 15 bp, Homo sapiens
aggatgggcttccca

SEQ ID NO: 1184720 - DNA, 15 bp, Homo sapiens
gaggatgggcttccc

SEQ ID NO: 1184721 - DNA, 15 bp, Homo sapiens
agaggatgggcttcc

SEQ ID NO: 1184722 - DNA, 15 bp, Homo sapiens
cagaggatgggcttc

SEQ ID NO: 1184723 - DNA, 15 bp, Homo sapiens
gcagaggatgggctt

SEQ ID NO: 1184724 - DNA, 15 bp, Homo sapiens
ggcagaggatgggct

SEQ ID NO: 1184725 - DNA, 15 bp, Homo sapiens
gggcagaggatgggc

SEQ ID NO: 1184726 - DNA, 15 bp, Homo sapiens
tgggcagaggatggg

SEQ ID NO: 1184727 - DNA, 15 bp, Homo sapiens
gtgggcagaggatgg

SEQ ID NO: 1184728 - DNA, 15 bp, Homo sapiens
cgtgggcagaggatg

SEQ ID NO: 1184729 - DNA, 15 bp, Homo sapiens
tcgtgggcagaggat

SEQ ID NO: 1184730 - DNA, 15 bp, Homo sapiens
ctcgtgggcagagga

SEQ ID NO: 1184731 - DNA, 15 bp, Homo sapiens
gctcgtgggcagagg

SEQ ID NO: 1184732 - DNA, 15 bp, Homo sapiens
agctcgtgggcagag

SEQ ID NO: 1184733 - DNA, 15 bp, Homo sapiens
gagctcgtgggcaga

SEQ ID NO: 1184734 - DNA, 15 bp, Homo sapiens
agagctcgtgggcag

SEQ ID NO: 1184735 - DNA, 15 bp, Homo sapiens
cagagctcgtgggca

SEQ ID NO: 1184736 - DNA, 15 bp, Homo sapiens
tcagagctcgtgggc

SEQ ID NO: 1184737 - DNA, 15 bp, Homo sapiens
ttcagagctcgtggg

SEQ ID NO: 1184738 - DNA, 15 bp, Homo sapiens
cttcagagctcgtgg

SEQ ID NO: 1184739 - DNA, 15 bp, Homo sapiens
tcttcagagctcgtg

SEQ ID NO: 1184740 - DNA, 15 bp, Homo sapiens
atcttcagagctcgt

SEQ ID NO: 1184741 - DNA, 15 bp, Homo sapiens
aatcttcagagctcg

SEQ ID NO: 1184742 - DNA, 15 bp, Homo sapiens
aaatcttcagagctc

SEQ ID NO: 1184743 - DNA, 15 bp, Homo sapiens
caaatcttcagagct

SEQ ID NO: 1184744 - DNA, 15 bp, Homo sapiens
ccaaatcttcagagc

SEQ ID NO: 1184745 - DNA, 15 bp, Homo sapiens
cccaaatcttcagag

SEQ ID NO: 1184746 - DNA, 15 bp, Homo sapiens
ccccaaatcttcaga

SEQ ID NO: 1184747 - DNA, 15 bp, Homo sapiens
accccaaatcttcag

SEQ ID NO: 1184748 - DNA, 15 bp, Homo sapiens
taccccaaatcttca

SEQ ID NO: 1184749 - DNA, 15 bp, Homo sapiens
ataccccaaatcttc

SEQ ID NO: 1184750 - DNA, 15 bp, Homo sapiens
gataccccaaatctt

SEQ ID NO: 1184751 - DNA, 15 bp, Homo sapiens
tgataccccaaatct

SEQ ID NO: 1184752 - DNA, 15 bp, Homo sapiens
atgataccccaaatc

SEQ ID NO: 1184753 - DNA, 15 bp, Homo sapiens
catgataccccaaat

SEQ ID NO: 1184754 - DNA, 15 bp, Homo sapiens
gcatgataccccaaa

SEQ ID NO: 1184755 - DNA, 15 bp, Homo sapiens
agcatgataccccaa

SEQ ID NO: 1184756 - DNA, 15 bp, Homo sapiens
aagcatgatacccca

SEQ ID NO: 1184757 - DNA, 15 bp, Homo sapiens
gaagcatgatacccc

SEQ ID NO: 1184758 - DNA, 15 bp, Homo sapiens
agaagcatgataccc

SEQ ID NO: 1184759 - DNA, 15 bp, Homo sapiens
gagaagcatgatacc

SEQ ID NO: 1184760 - DNA, 15 bp, Homo sapiens
agagaagcatgatac

SEQ ID NO: 1184761 - DNA, 15 bp, Homo sapiens
gagagaagcatgata

SEQ ID NO: 1184762 - DNA, 15 bp, Homo sapiens
tgagagaagcatgat

SEQ ID NO: 1184763 - DNA, 15 bp, Homo sapiens
ttgagagaagcatga

SEQ ID NO: 1184764 - DNA, 15 bp, Homo sapiens
cttgagagaagcatg

SEQ ID NO: 1184765 - DNA, 15 bp, Homo sapiens
acttgagagaagcat

SEQ ID NO: 1184766 - DNA, 15 bp, Homo sapiens
aacttgagagaagca

SEQ ID NO: 1184767 - DNA, 15 bp, Homo sapiens
taacttgagagaagc

SEQ ID NO: 1184768 - DNA, 15 bp, Homo sapiens
ataacttgagagaag

SEQ ID NO: 1184769 - DNA, 15 bp, Homo sapiens
aataacttgagagaa

SEQ ID NO: 1184770 - DNA, 15 bp, Homo sapiens
aaataacttgagaga

SEQ ID NO: 1184771 - DNA, 15 bp, Homo sapiens
gaaataacttgagag

SEQ ID NO: 1184772 - DNA, 15 bp, Homo sapiens
tgaaataacttgaga

SEQ ID NO: 1184773 - DNA, 15 bp, Homo sapiens
gtgaaataacttgag

SEQ ID NO: 1184774 - DNA, 15 bp, Homo sapiens
agtgaaataacttga

SEQ ID NO: 1184775 - DNA, 15 bp, Homo sapiens
gagtgaaataacttg

SEQ ID NO: 1184776 - DNA, 15 bp, Homo sapiens
agagtgaaataactt

SEQ ID NO: 1184777 - DNA, 15 bp, Homo sapiens
tagagtgaaataact

SEQ ID NO: 1184778 - DNA, 15 bp, Homo sapiens
atagagtgaaataac

SEQ ID NO: 1184779 - DNA, 15 bp, Homo sapiens
tatagagtgaaataa

SEQ ID NO: 1184780 - DNA, 15 bp, Homo sapiens
ctatagagtgaaata

SEQ ID NO: 1184781 - DNA, 15 bp, Homo sapiens
gctatagagtgaaat

SEQ ID NO: 1184782 - DNA, 15 bp, Homo sapiens
ggctatagagtgaaa

SEQ ID NO: 1184783 - DNA, 15 bp, Homo sapiens
aggctatagagtgaa

SEQ ID NO: 1184784 - DNA, 15 bp, Homo sapiens
caggctatagagtga

SEQ ID NO: 1184785 - DNA, 15 bp, Homo sapiens
gcaggctatagagtg

SEQ ID NO: 1184786 - DNA, 15 bp, Homo sapiens
agcaggctatagagt

SEQ ID NO: 1184787 - DNA, 15 bp, Homo sapiens
aagcaggctatagag

SEQ ID NO: 1184788 - DNA, 15 bp, Homo sapiens
gaagcaggctataga

SEQ ID NO: 1184789 - DNA, 15 bp, Homo sapiens
ggaagcaggctatag

SEQ ID NO: 1184790 - DNA, 15 bp, Homo sapiens
gggaagcaggctata

SEQ ID NO: 1184791 - DNA, 15 bp, Homo sapiens
tgggaagcaggctat

SEQ ID NO: 1184792 - DNA, 15 bp, Homo sapiens
ttgggaagcaggcta

SEQ ID NO: 1184793 - DNA, 15 bp, Homo sapiens
tttgggaagcaggct

SEQ ID NO: 1184794 - DNA, 15 bp, Homo sapiens
atttgggaagcaggc

SEQ ID NO: 1184795 - DNA, 15 bp, Homo sapiens
tatttgggaagcagg

SEQ ID NO: 1184796 - DNA, 15 bp, Homo sapiens
atatttgggaagcag

SEQ ID NO: 1184797 - DNA, 15 bp, Homo sapiens
catatttgggaagca

SEQ ID NO: 1184798 - DNA, 15 bp, Homo sapiens
ccatatttgggaagc

SEQ ID NO: 1184799 - DNA, 15 bp, Homo sapiens
gccatatttgggaag

SEQ ID NO: 1184800 - DNA, 15 bp, Homo sapiens
ggccatatttgggaa

SEQ ID NO: 1184801 - DNA, 15 bp, Homo sapiens
gggccatatttggga

SEQ ID NO: 1184802 - DNA, 15 bp, Homo sapiens
tgggccatatttggg

SEQ ID NO: 1184803 - DNA, 15 bp, Homo sapiens
gtgggccatatttgg

SEQ ID NO: 1184804 - DNA, 15 bp, Homo sapiens
agtgggccatatttg

SEQ ID NO: 1184805 - DNA, 15 bp, Homo sapiens
gagtgggccatattt

SEQ ID NO: 1184806 - DNA, 15 bp, Homo sapiens
ggagtgggccatatt

SEQ ID NO: 1184807 - DNA, 15 bp, Homo sapiens
gggagtgggccatat

SEQ ID NO: 1184808 - DNA, 15 bp, Homo sapiens
tgggagtgggccata

SEQ ID NO: 1184809 - DNA, 15 bp, Homo sapiens
gtgggagtgggccat

SEQ ID NO: 1184810 - DNA, 15 bp, Homo sapiens
agtgggagtgggcca

SEQ ID NO: 1184811 - DNA, 15 bp, Homo sapiens
aagtgggagtgggcc

SEQ ID NO: 1184812 - DNA, 15 bp, Homo sapiens
caagtgggagtgggc

SEQ ID NO: 1184813 - DNA, 15 bp, Homo sapiens
acaagtgggagtggg

SEQ ID NO: 1184814 - DNA, 15 bp, Homo sapiens
gacaagtgggagtgg

SEQ ID NO: 1184815 - DNA, 15 bp, Homo sapiens
tgacaagtgggagtg

SEQ ID NO: 1184816 - DNA, 15 bp, Homo sapiens
atgacaagtgggagt

SEQ ID NO: 1184817 - DNA, 15 bp, Homo sapiens
aatgacaagtgggag

SEQ ID NO: 1184818 - DNA, 15 bp, Homo sapiens
gaatgacaagtggga

SEQ ID NO: 1184819 - DNA, 15 bp, Homo sapiens
ggaatgacaagtggg

SEQ ID NO: 1184820 - DNA, 15 bp, Homo sapiens
aggaatgacaagtgg

SEQ ID NO: 1184821 - DNA, 15 bp, Homo sapiens
caggaatgacaagtg

SEQ ID NO: 1184822 - DNA, 15 bp, Homo sapiens
tcaggaatgacaagt

SEQ ID NO: 1184823 - DNA, 15 bp, Homo sapiens
ttcaggaatgacaag

SEQ ID NO: 1184824 - DNA, 15 bp, Homo sapiens
tttcaggaatgacaa

SEQ ID NO: 1184825 - DNA, 15 bp, Homo sapiens
gtttcaggaatgaca

SEQ ID NO: 1184826 - DNA, 15 bp, Homo sapiens
ggtttcaggaatgac

SEQ ID NO: 1184827 - DNA, 15 bp, Homo sapiens
tggtttcaggaatga

SEQ ID NO: 1184828 - DNA, 15 bp, Homo sapiens
atggtttcaggaatg

SEQ ID NO: 1184829 - DNA, 15 bp, Homo sapiens
aatggtttcaggaat

SEQ ID NO: 1184830 - DNA, 15 bp, Homo sapiens
taatggtttcaggaa

SEQ ID NO: 1184831 - DNA, 15 bp, Homo sapiens
ataatggtttcagga

SEQ ID NO: 1184832 - DNA, 15 bp, Homo sapiens
aataatggtttcagg

SEQ ID NO: 1184833 - DNA, 15 bp, Homo sapiens
gaataatggtttcag

SEQ ID NO: 1184834 - DNA, 15 bp, Homo sapiens
agaataatggtttca

SEQ ID NO: 1184835 - DNA, 15 bp, Homo sapiens
tagaataatggtttc

SEQ ID NO: 1184836 - DNA, 15 bp, Homo sapiens
atagaataatggttt

SEQ ID NO: 1184837 - DNA, 15 bp, Homo sapiens
catagaataatggtt

SEQ ID NO: 1184838 - DNA, 15 bp, Homo sapiens
acatagaataatggt

SEQ ID NO: 1184839 - DNA, 15 bp, Homo sapiens
aacatagaataatgg

SEQ ID NO: 1184840 - DNA, 15 bp, Homo sapiens
gaacatagaataatg

SEQ ID NO: 1184841 - DNA, 15 bp, Homo sapiens
ggaacatagaataat

SEQ ID NO: 1184842 - DNA, 15 bp, Homo sapiens
gggaacatagaataa

SEQ ID NO: 1184843 - DNA, 15 bp, Homo sapiens
agggaacatagaata

SEQ ID NO: 1184844 - DNA, 15 bp, Homo sapiens
cagggaacatagaat

SEQ ID NO: 1184845 - DNA, 15 bp, Homo sapiens
gcagggaacatagaa

SEQ ID NO: 1184846 - DNA, 15 bp, Homo sapiens
ggcagggaacataga

SEQ ID NO: 1184847 - DNA, 15 bp, Homo sapiens
gggcagggaacatag

SEQ ID NO: 1184848 - DNA, 15 bp, Homo sapiens
ggggcagggaacata

SEQ ID NO: 1184849 - DNA, 15 bp, Homo sapiens
gggggcagggaacat

SEQ ID NO: 1184850 - DNA, 15 bp, Homo sapiens
agggggcagggaaca

SEQ ID NO: 1184851 - DNA, 15 bp, Homo sapiens
aagggggcagggaac

SEQ ID NO: 1184852 - DNA, 15 bp, Homo sapiens
aaagggggcagggaa

SEQ ID NO: 1184853 - DNA, 15 bp, Homo sapiens
caaagggggcaggga

SEQ ID NO: 1184854 - DNA, 15 bp, Homo sapiens
gcaaagggggcaggg

SEQ ID NO: 1184855 - DNA, 15 bp, Homo sapiens
agcaaagggggcagg

SEQ ID NO: 1184856 - DNA, 15 bp, Homo sapiens
aagcaaagggggcag

SEQ ID NO: 1184857 - DNA, 15 bp, Homo sapiens
gaagcaaagggggca

SEQ ID NO: 1184858 - DNA, 15 bp, Homo sapiens
tgaagcaaagggggc

SEQ ID NO: 1184859 - DNA, 15 bp, Homo sapiens
ctgaagcaaaggggg

SEQ ID NO: 1184860 - DNA, 15 bp, Homo sapiens
gctgaagcaaagggg

SEQ ID NO: 1184861 - DNA, 15 bp, Homo sapiens
agctgaagcaaaggg

SEQ ID NO: 1184862 - DNA, 15 bp, Homo sapiens
gagctgaagcaaagg

SEQ ID NO: 1184863 - DNA, 15 bp, Homo sapiens
tgagctgaagcaaag

SEQ ID NO: 1184864 - DNA, 15 bp, Homo sapiens
atgagctgaagcaaa

SEQ ID NO: 1184865 - DNA, 15 bp, Homo sapiens
gatgagctgaagcaa

SEQ ID NO: 1184866 - DNA, 15 bp, Homo sapiens
agatgagctgaagca

SEQ ID NO: 1184867 - DNA, 15 bp, Homo sapiens
tagatgagctgaagc

SEQ ID NO: 1184868 - DNA, 15 bp, Homo sapiens
ttagatgagctgaag

SEQ ID NO: 1184869 - DNA, 15 bp, Homo sapiens
tttagatgagctgaa

SEQ ID NO: 1184870 - DNA, 15 bp, Homo sapiens
ctttagatgagctga

SEQ ID NO: 1184871 - DNA, 15 bp, Homo sapiens
cctttagatgagctg

SEQ ID NO: 1184872 - DNA, 15 bp, Homo sapiens
ccctttagatgagct

SEQ ID NO: 1184873 - DNA, 15 bp, Homo sapiens
gccctttagatgagc

SEQ ID NO: 1184874 - DNA, 15 bp, Homo sapiens
tgccctttagatgag

SEQ ID NO: 1184875 - DNA, 15 bp, Homo sapiens
ctgccctttagatga

SEQ ID NO: 1184876 - DNA, 15 bp, Homo sapiens
cctgccctttagatg

SEQ ID NO: 1184877 - DNA, 15 bp, Homo sapiens
tcctgccctttagat

SEQ ID NO: 1184878 - DNA, 15 bp, Homo sapiens
ttcctgccctttaga

SEQ ID NO: 1184879 - DNA, 15 bp, Homo sapiens
ttttcctgcccttta

SEQ ID NO: 1184880 - DNA, 15 bp, Homo sapiens
gttttcctgcccttt

SEQ ID NO: 1184881 - DNA, 15 bp, Homo sapiens
cgttttcctgccctt

SEQ ID NO: 1184882 - DNA, 15 bp, Homo sapiens
gcgttttcctgccct

SEQ ID NO: 1184883 - DNA, 15 bp, Homo sapiens
agcgttttcctgccc

SEQ ID NO: 1184884 - DNA, 15 bp, Homo sapiens
cagcgttttcctgcc

SEQ ID NO: 1184885 - DNA, 15 bp, Homo sapiens
ccagcgttttcctgc

SEQ ID NO: 1184886 - DNA, 15 bp, Homo sapiens
tccagcgttttcctg

SEQ ID NO: 1184887 - DNA, 15 bp, Homo sapiens
ttccagcgttttcct

SEQ ID NO: 1184888 - DNA, 15 bp, Homo sapiens
cttccagcgttttcc

SEQ ID NO: 1184889 - DNA, 15 bp, Homo sapiens
gcttccagcgttttc

SEQ ID NO: 1184890 - DNA, 15 bp, Homo sapiens
tgcttccagcgtttt

SEQ ID NO: 1184891 - DNA, 15 bp, Homo sapiens
ctgcttccagcgttt

SEQ ID NO: 1184892 - DNA, 15 bp, Homo sapiens
cctgcttccagcgtt

SEQ ID NO: 1184893 - DNA, 15 bp, Homo sapiens
tcctgcttccagcgt

SEQ ID NO: 1184894 - DNA, 15 bp, Homo sapiens
ctcctgcttccagcg

SEQ ID NO: 1184895 - DNA, 15 bp, Homo sapiens
tctcctgcttccagc

SEQ ID NO: 1184896 - DNA, 15 bp, Homo sapiens
ctctcctgcttccag

SEQ ID NO: 1184897 - DNA, 15 bp, Homo sapiens
actctcctgcttcca

SEQ ID NO: 1184898 - DNA, 15 bp, Homo sapiens
gactctcctgcttcc

SEQ ID NO: 1184899 - DNA, 15 bp, Homo sapiens
tgactctcctgcttc

SEQ ID NO: 1184900 - DNA, 15 bp, Homo sapiens
atgactctcctgctt

SEQ ID NO: 1184901 - DNA, 15 bp, Homo sapiens
catgactctcctgct

SEQ ID NO: 1184902 - DNA, 15 bp, Homo sapiens
tcatgactctcctgc

SEQ ID NO: 1184903 - DNA, 15 bp, Homo sapiens
ctcatgactctcctg

SEQ ID NO: 1184904 - DNA, 15 bp, Homo sapiens
actcatgactctcct

SEQ ID NO: 1184905 - DNA, 15 bp, Homo sapiens
cactcatgactctcc

SEQ ID NO: 1184906 - DNA, 15 bp, Homo sapiens
gcactcatgactctc

SEQ ID NO: 1184907 - DNA, 15 bp, Homo sapiens
ggcactcatgactct

SEQ ID NO: 1184908 - DNA, 15 bp, Homo sapiens
aggcactcatgactc

SEQ ID NO: 1184909 - DNA, 15 bp, Homo sapiens
caggcactcatgact

SEQ ID NO: 1184910 - DNA, 15 bp, Homo sapiens
tcaggcactcatgac

SEQ ID NO: 1184911 - DNA, 15 bp, Homo sapiens
ttcaggcactcatga

SEQ ID NO: 1184912 - DNA, 15 bp, Homo sapiens
tttcaggcactcatg

SEQ ID NO: 1184913 - DNA, 15 bp, Homo sapiens
atttcaggcactcat

SEQ ID NO: 1184914 - DNA, 15 bp, Homo sapiens
aatttcaggcactca

SEQ ID NO: 1184915 - DNA, 15 bp, Homo sapiens
aaatttcaggcactc

SEQ ID NO: 1184916 - DNA, 15 bp, Homo sapiens
aaaatttcaggcact

SEQ ID NO: 1184917 - DNA, 15 bp, Homo sapiens
caaaatttcaggcac

SEQ ID NO: 1184918 - DNA, 15 bp, Homo sapiens
gcaaaatttcaggca

SEQ ID NO: 1184919 - DNA, 15 bp, Homo sapiens
tgcaaaatttcaggc

SEQ ID NO: 1184920 - DNA, 15 bp, Homo sapiens
ctgcaaaatttcagg

SEQ ID NO: 1184921 - DNA, 15 bp, Homo sapiens
cctgcaaaatttcag

SEQ ID NO: 1184922 - DNA, 15 bp, Homo sapiens
tcctgcaaaatttca

SEQ ID NO: 1184923 - DNA, 15 bp, Homo sapiens
ctcctgcaaaatttc

SEQ ID NO: 1184924 - DNA, 15 bp, Homo sapiens
gctcctgcaaaattt

SEQ ID NO: 1184925 - DNA, 15 bp, Homo sapiens
tgctcctgcaaaatt

SEQ ID NO: 1184926 - DNA, 15 bp, Homo sapiens
ctgctcctgcaaaat

SEQ ID NO: 1184927 - DNA, 15 bp, Homo sapiens
gctgctcctgcaaaa

SEQ ID NO: 1184928 - DNA, 15 bp, Homo sapiens
tgctgctcctgcaaa

SEQ ID NO: 1184929 - DNA, 15 bp, Homo sapiens
gtaaatatcaactaa

SEQ ID NO: 1184930 - DNA, 15 bp, Homo sapiens
ggtaaatatcaacta

SEQ ID NO: 1184931 - DNA, 15 bp, Homo sapiens
tggtaaatatcaact

SEQ ID NO: 1184932 - DNA, 15 bp, Homo sapiens
atggtaaatatcaac

SEQ ID NO: 1184933 - DNA, 15 bp, Homo sapiens
tgtatatggtaaata

SEQ ID NO: 1184934 - DNA, 15 bp, Homo sapiens
ttgtatatggtaaat

SEQ ID NO: 1184935 - DNA, 15 bp, Homo sapiens
attgtatatggtaaa

SEQ ID NO: 1184936 - DNA, 15 bp, Homo sapiens
gattgtatatggtaa

SEQ ID NO: 1184937 - DNA, 15 bp, Homo sapiens
agattgtatatggta

SEQ ID NO: 1184938 - DNA, 15 bp, Homo sapiens
cagattgtatatggt

SEQ ID NO: 1184939 - DNA, 15 bp, Homo sapiens
acagattgtatatgg

SEQ ID NO: 1184940 - DNA, 15 bp, Homo sapiens
gacagattgtatatg

SEQ ID NO: 1184941 - DNA, 15 bp, Homo sapiens
tgacagattgtatat

SEQ ID NO: 1184942 - DNA, 15 bp, Homo sapiens
gtgacagattgtata

SEQ ID NO: 1184943 - DNA, 15 bp, Homo sapiens
agtgacagattgtat

SEQ ID NO: 1184944 - DNA, 15 bp, Homo sapiens
aagtgacagattgta

SEQ ID NO: 1184945 - DNA, 15 bp, Homo sapiens
caagtgacagattgt

SEQ ID NO: 1184946 - DNA, 15 bp, Homo sapiens
acaagtgacagattg

SEQ ID NO: 1184947 - DNA, 15 bp, Homo sapiens
tacaagtgacagatt

SEQ ID NO: 1184948 - DNA, 15 bp, Homo sapiens
atacaagtgacagat

SEQ ID NO: 1184949 - DNA, 15 bp, Homo sapiens
catacaagtgacaga

SEQ ID NO: 1184950 - DNA, 15 bp, Homo sapiens
tcatacaagtgacag

SEQ ID NO: 1184951 - DNA, 15 bp, Homo sapiens
ctcatacaagtgaca

SEQ ID NO: 1184952 - DNA, 15 bp, Homo sapiens
tctcatacaagtgac

SEQ ID NO: 1184953 - DNA, 15 bp, Homo sapiens
atctcatacaagtga

SEQ ID NO: 1184954 - DNA, 15 bp, Homo sapiens
catctcatacaagtg

SEQ ID NO: 1184955 - DNA, 15 bp, Homo sapiens
ccatctcatacaagt

SEQ ID NO: 1184956 - DNA, 15 bp, Homo sapiens
gccatctcatacaag

SEQ ID NO: 1184957 - DNA, 15 bp, Homo sapiens
tgccatctcatacaa

SEQ ID NO: 1184958 - DNA, 15 bp, Homo sapiens
ctgccatctcataca

SEQ ID NO: 1184959 - DNA, 15 bp, Homo sapiens
cctgccatctcatac

SEQ ID NO: 1184960 - DNA, 15 bp, Homo sapiens
ccctgccatctcata

SEQ ID NO: 1184961 - DNA, 15 bp, Homo sapiens
cccctgccatctcat

SEQ ID NO: 1184962 - DNA, 15 bp, Homo sapiens
ccccctgccatctca

SEQ ID NO: 1184963 - DNA, 15 bp, Homo sapiens
accccctgccatctc

SEQ ID NO: 1184964 - DNA, 15 bp, Homo sapiens
aaccccctgccatct

SEQ ID NO: 1184965 - DNA, 15 bp, Homo sapiens
gaaccccctgccatc

SEQ ID NO: 1184966 - DNA, 15 bp, Homo sapiens
agaaccccctgccat

SEQ ID NO: 1184967 - DNA, 15 bp, Homo sapiens
cagaaccccctgcca

SEQ ID NO: 1184968 - DNA, 15 bp, Homo sapiens
acagaaccccctgcc

SEQ ID NO: 1184969 - DNA, 15 bp, Homo sapiens
cacagaaccccctgc

SEQ ID NO: 1184970 - DNA, 15 bp, Homo sapiens
gcacagaaccccctg

SEQ ID NO: 1184971 - DNA, 15 bp, Homo sapiens
agcacagaaccccct

SEQ ID NO: 1184972 - DNA, 15 bp, Homo sapiens
tagcacagaaccccc

SEQ ID NO: 1184973 - DNA, 15 bp, Homo sapiens
atagcacagaacccc

SEQ ID NO: 1184974 - DNA, 15 bp, Homo sapiens
aatagcacagaaccc

SEQ ID NO: 1184975 - DNA, 15 bp, Homo sapiens
caaatagcacagaac

SEQ ID NO: 1184976 - DNA, 15 bp, Homo sapiens
acaaatagcacagaa

SEQ ID NO: 1184977 - DNA, 15 bp, Homo sapiens
gacaaatagcacaga

SEQ ID NO: 1184978 - DNA, 15 bp, Homo sapiens
ggacaaatagcacag

SEQ ID NO: 1184979 - DNA, 15 bp, Homo sapiens
aggacaaatagcaca

SEQ ID NO: 1184980 - DNA, 15 bp, Homo sapiens
aaggacaaatagcac

SEQ ID NO: 1184981 - DNA, 15 bp, Homo sapiens
caaggacaaatagca

SEQ ID NO: 1184982 - DNA, 15 bp, Homo sapiens
acaaggacaaatagc

SEQ ID NO: 1184983 - DNA, 15 bp, Homo sapiens
tacaaggacaaatag

SEQ ID NO: 1184984 - DNA, 15 bp, Homo sapiens
ctacaaggacaaata

SEQ ID NO: 1184985 - DNA, 15 bp, Homo sapiens
tctacaaggacaaat

SEQ ID NO: 1184986 - DNA, 15 bp, Homo sapiens
ctctacaaggacaaa

SEQ ID NO: 1184987 - DNA, 15 bp, Homo sapiens
tctctacaaggacaa

SEQ ID NO: 1184988 - DNA, 15 bp, Homo sapiens
ttctctacaaggaca

SEQ ID NO: 1184989 - DNA, 15 bp, Homo sapiens
attctctacaaggac

SEQ ID NO: 1184990 - DNA, 15 bp, Homo sapiens
tattctctacaagga

SEQ ID NO: 1184991 - DNA, 15 bp, Homo sapiens
gtattctctacaagg

SEQ ID NO: 1184992 - DNA, 15 bp, Homo sapiens
ggtattctctacaag

SEQ ID NO: 1184993 - DNA, 15 bp, Homo sapiens
tggtattctctacaa

SEQ ID NO: 1184994 - DNA, 15 bp, Homo sapiens
gtggtattctctaca

SEQ ID NO: 1184995 - DNA, 15 bp, Homo sapiens
tgtggtattctctac

SEQ ID NO: 1184996 - DNA, 15 bp, Homo sapiens
ctgtggtattctcta

SEQ ID NO: 1184997 - DNA, 15 bp, Homo sapiens
cctgtggtattctct

SEQ ID NO: 1184998 - DNA, 15 bp, Homo sapiens
tcctgtggtattctc

SEQ ID NO: 1184999 - DNA, 15 bp, Homo sapiens
ttcctgtggtattct

SEQ ID NO: 1185000 - DNA, 15 bp, Homo sapiens
cttcctgtggtattc

SEQ ID NO: 1185001 - DNA, 15 bp, Homo sapiens
tcttcctgtggtatt

SEQ ID NO: 1185002 - DNA, 15 bp, Homo sapiens
ttcttcctgtggtat

SEQ ID NO: 1185003 - DNA, 15 bp, Homo sapiens
tttcttcctgtggta

SEQ ID NO: 1185004 - DNA, 15 bp, Homo sapiens
ctttcttcctgtggt

SEQ ID NO: 1185005 - DNA, 15 bp, Homo sapiens
actttcttcctgtgg

SEQ ID NO: 1185006 - DNA, 15 bp, Homo sapiens
tactttcttcctgtg

SEQ ID NO: 1185007 - DNA, 15 bp, Homo sapiens
ttactttcttcctgt

SEQ ID NO: 1185008 - DNA, 15 bp, Homo sapiens
cttactttcttcctg

SEQ ID NO: 1185009 - DNA, 15 bp, Homo sapiens
gcttactttcttcct

SEQ ID NO: 1185010 - DNA, 15 bp, Homo sapiens
tgcttactttcttcc

SEQ ID NO: 1185011 - DNA, 15 bp, Homo sapiens
ctgcttactttcttc

SEQ ID NO: 1185012 - DNA, 15 bp, Homo sapiens
gctgcttactttctt

SEQ ID NO: 1185013 - DNA, 15 bp, Homo sapiens
ggctgcttactttct

SEQ ID NO: 1185014 - DNA, 15 bp, Homo sapiens
tggctgcttactttc

SEQ ID NO: 1185015 - DNA, 15 bp, Homo sapiens
atggctgcttacttt

SEQ ID NO: 1185016 - DNA, 15 bp, Homo sapiens
catggctgcttactt

SEQ ID NO: 1185017 - DNA, 15 bp, Homo sapiens
gcatggctgcttact

SEQ ID NO: 1185018 - DNA, 15 bp, Homo sapiens
tgcatggctgcttac

SEQ ID NO: 1185019 - DNA, 15 bp, Homo sapiens
ttgcatggctgctta

SEQ ID NO: 1185020 - DNA, 15 bp, Homo sapiens
attgcatggctgctt

SEQ ID NO: 1185021 - DNA, 15 bp, Homo sapiens
tattgcatggctgct

SEQ ID NO: 1185022 - DNA, 15 bp, Homo sapiens
atattgcatggctgc

SEQ ID NO: 1185023 - DNA, 15 bp, Homo sapiens
aatattgcatggctg

SEQ ID NO: 1185024 - DNA, 15 bp, Homo sapiens
aaatattgcatggct

SEQ ID NO: 1185025 - DNA, 15 bp, Homo sapiens
caaatattgcatggc

SEQ ID NO: 1185026 - DNA, 15 bp, Homo sapiens
gcaaatattgcatgg

SEQ ID NO: 1185027 - DNA, 15 bp, Homo sapiens
agcaaatattgcatg

SEQ ID NO: 1185028 - DNA, 15 bp, Homo sapiens
cagcaaatattgcat

SEQ ID NO: 1185029 - DNA, 15 bp, Homo sapiens
acagcaaatattgca

SEQ ID NO: 1185030 - DNA, 15 bp, Homo sapiens
aacagcaaatattgc

SEQ ID NO: 1185031 - DNA, 15 bp, Homo sapiens
caacagcaaatattg

SEQ ID NO: 1185032 - DNA, 15 bp, Homo sapiens
tcaacagcaaatatt

SEQ ID NO: 1185033 - DNA, 15 bp, Homo sapiens
gtcaacagcaaatat

SEQ ID NO: 1185034 - DNA, 15 bp, Homo sapiens
ggtcaacagcaaata

SEQ ID NO: 1185035 - DNA, 15 bp, Homo sapiens
aggtcaacagcaaat

SEQ ID NO: 1185036 - DNA, 15 bp, Homo sapiens
caggtcaacagcaaa

SEQ ID NO: 1185037 - DNA, 15 bp, Homo sapiens
tcaggtcaacagcaa

SEQ ID NO: 1185038 - DNA, 15 bp, Homo sapiens
ttcaggtcaacagca

SEQ ID NO: 1185039 - DNA, 15 bp, Homo sapiens
gttcaggtcaacagc

SEQ ID NO: 1185040 - DNA, 15 bp, Homo sapiens
agttcaggtcaacag

SEQ ID NO: 1185041 - DNA, 15 bp, Homo sapiens
gagttcaggtcaaca

SEQ ID NO: 1185042 - DNA, 15 bp, Homo sapiens
ggagttcaggtcaac

SEQ ID NO: 1185043 - DNA, 15 bp, Homo sapiens
tggagttcaggtcaa

SEQ ID NO: 1185044 - DNA, 15 bp, Homo sapiens
atggagttcaggtca

SEQ ID NO: 1185045 - DNA, 15 bp, Homo sapiens
aatggagttcaggtc

SEQ ID NO: 1185046 - DNA, 15 bp, Homo sapiens
gaatggagttcaggt

SEQ ID NO: 1185047 - DNA, 15 bp, Homo sapiens
ggaatggagttcagg

SEQ ID NO: 1185048 - DNA, 15 bp, Homo sapiens
tggaatggagttcag

SEQ ID NO: 1185049 - DNA, 15 bp, Homo sapiens
atggaatggagttca

SEQ ID NO: 1185050 - DNA, 15 bp, Homo sapiens
gatggaatggagttc

SEQ ID NO: 1185051 - DNA, 15 bp, Homo sapiens
tgatggaatggagtt

SEQ ID NO: 1185052 - DNA, 15 bp, Homo sapiens
atgatggaatggagt

SEQ ID NO: 1185053 - DNA, 15 bp, Homo sapiens
aatgatggaatggag

SEQ ID NO: 1185054 - DNA, 15 bp, Homo sapiens
gaatgatggaatgga

SEQ ID NO: 1185055 - DNA, 15 bp, Homo sapiens
ggaatgatggaatgg

SEQ ID NO: 1185056 - DNA, 15 bp, Homo sapiens
aggaatgatggaatg

SEQ ID NO: 1185057 - DNA, 15 bp, Homo sapiens
caggaatgatggaat

SEQ ID NO: 1185058 - DNA, 15 bp, Homo sapiens
gcaggaatgatggaa

SEQ ID NO: 1185059 - DNA, 15 bp, Homo sapiens
tgcaggaatgatgga

SEQ ID NO: 1185060 - DNA, 15 bp, Homo sapiens
ctgcaggaatgatgg

SEQ ID NO: 1185061 - DNA, 15 bp, Homo sapiens
cctgcaggaatgatg

SEQ ID NO: 1185062 - DNA, 15 bp, Homo sapiens
tcctgcaggaatgat

SEQ ID NO: 1185063 - DNA, 15 bp, Homo sapiens
ttcctgcaggaatga

SEQ ID NO: 1185064 - DNA, 15 bp, Homo sapiens
tttcctgcaggaatg

SEQ ID NO: 1185065 - DNA, 15 bp, Homo sapiens
atttcctgcaggaat

SEQ ID NO: 1185066 - DNA, 15 bp, Homo sapiens
aatttcctgcaggaa

SEQ ID NO: 1185067 - DNA, 15 bp, Homo sapiens
gaatttcctgcagga

SEQ ID NO: 1185068 - DNA, 15 bp, Homo sapiens
cgaatttcctgcagg

SEQ ID NO: 1185069 - DNA, 15 bp, Homo sapiens
gcgaatttcctgcag

SEQ ID NO: 1185070 - DNA, 15 bp, Homo sapiens
tgcgaatttcctgca

SEQ ID NO: 1185071 - DNA, 15 bp, Homo sapiens
atgcgaatttcctgc

SEQ ID NO: 1185072 - DNA, 15 bp, Homo sapiens
gatgcgaatttcctg

SEQ ID NO: 1185073 - DNA, 15 bp, Homo sapiens
ggatgcgaatttcct

SEQ ID NO: 1185074 - DNA, 15 bp, Homo sapiens
tggatgcgaatttcc

SEQ ID NO: 1185075 - DNA, 15 bp, Homo sapiens
atggatgcgaatttc

SEQ ID NO: 1185076 - DNA, 15 bp, Homo sapiens
aatggatgcgaattt

SEQ ID NO: 1185077 - DNA, 15 bp, Homo sapiens
taatggatgcgaatt

SEQ ID NO: 1185078 - DNA, 15 bp, Homo sapiens
ttaatggatgcgaat

SEQ ID NO: 1185079 - DNA, 15 bp, Homo sapiens
tttaatggatgcgaa

SEQ ID NO: 1185080 - DNA, 15 bp, Homo sapiens
atttaatggatgcga

SEQ ID NO: 1185081 - DNA, 15 bp, Homo sapiens
catttaatggatgcg

SEQ ID NO: 1185082 - DNA, 15 bp, Homo sapiens
tcatttaatggatgc

SEQ ID NO: 1185083 - DNA, 15 bp, Homo sapiens
ctcatttaatggatg

SEQ ID NO: 1185084 - DNA, 15 bp, Homo sapiens
gctcatttaatggat

SEQ ID NO: 1185085 - DNA, 15 bp, Homo sapiens
tgctcatttaatgga

SEQ ID NO: 1185086 - DNA, 15 bp, Homo sapiens
atgctcatttaatgg

SEQ ID NO: 1185087 - DNA, 15 bp, Homo sapiens
aatgctcatttaatg

SEQ ID NO: 1185088 - DNA, 15 bp, Homo sapiens
aaatgctcatttaat

SEQ ID NO: 1185089 - DNA, 15 bp, Homo sapiens
gaaatgctcatttaa

SEQ ID NO: 1185090 - DNA, 15 bp, Homo sapiens
ggaaatgctcattta

SEQ ID NO: 1185091 - DNA, 15 bp, Homo sapiens
aggaaatgctcattt

SEQ ID NO: 1185092 - DNA, 15 bp, Homo sapiens
caggaaatgctcatt

SEQ ID NO: 1185093 - DNA, 15 bp, Homo sapiens
ccaggaaatgctcat

SEQ ID NO: 1185094 - DNA, 15 bp, Homo sapiens
accaggaaatgctca

SEQ ID NO: 1185095 - DNA, 15 bp, Homo sapiens
aaccaggaaatgctc

SEQ ID NO: 1185096 - DNA, 15 bp, Homo sapiens
aaaccaggaaatgct

SEQ ID NO: 1185097 - DNA, 15 bp, Homo sapiens
caaaccaggaaatgc

SEQ ID NO: 1185098 - DNA, 15 bp, Homo sapiens
gcaaaccaggaaatg

SEQ ID NO: 1185099 - DNA, 15 bp, Homo sapiens
ggcaaaccaggaaat

SEQ ID NO: 1185100 - DNA, 15 bp, Homo sapiens
tggcaaaccaggaaa

SEQ ID NO: 1185101 - DNA, 15 bp, Homo sapiens
gtggcaaaccaggaa

SEQ ID NO: 1185102 - DNA, 15 bp, Homo sapiens
agtggcaaaccagga

SEQ ID NO: 1185103 - DNA, 15 bp, Homo sapiens
aagtggcaaaccagg

SEQ ID NO: 1185104 - DNA, 15 bp, Homo sapiens
aaagtggcaaaccag

SEQ ID NO: 1185105 - DNA, 15 bp, Homo sapiens
caaagtggcaaacca

SEQ ID NO: 1185106 - DNA, 15 bp, Homo sapiens
gcaaagtggcaaacc

SEQ ID NO: 1185107 - DNA, 15 bp, Homo sapiens
agcaaagtggcaaac

SEQ ID NO: 1185108 - DNA, 15 bp, Homo sapiens
gagcaaagtggcaaa

SEQ ID NO: 1185109 - DNA, 15 bp, Homo sapiens
tgagcaaagtggcaa

SEQ ID NO: 1185110 - DNA, 15 bp, Homo sapiens
ttgagcaaagtggca

SEQ ID NO: 1185111 - DNA, 15 bp, Homo sapiens
tttgagcaaagtggc

SEQ ID NO: 1185112 - DNA, 15 bp, Homo sapiens
gtttgagcaaagtgg

SEQ ID NO: 1185113 - DNA, 15 bp, Homo sapiens
tgtttgagcaaagtg

SEQ ID NO: 1185114 - DNA, 15 bp, Homo sapiens
gtgtttgagcaaagt

SEQ ID NO: 1185115 - DNA, 15 bp, Homo sapiens
agtgtttgagcaaag

SEQ ID NO: 1185116 - DNA, 15 bp, Homo sapiens
aagtgtttgagcaaa

SEQ ID NO: 1185117 - DNA, 15 bp, Homo sapiens
aaagtgtttgagcaa

SEQ ID NO: 1185118 - DNA, 15 bp, Homo sapiens
caaagtgtttgagca

SEQ ID NO: 1185119 - DNA, 15 bp, Homo sapiens
gcaaagtgtttgagc

SEQ ID NO: 1185120 - DNA, 15 bp, Homo sapiens
agcaaagtgtttgag

SEQ ID NO: 1185121 - DNA, 15 bp, Homo sapiens
aagcaaagtgtttga

SEQ ID NO: 1185122 - DNA, 15 bp, Homo sapiens
caagcaaagtgtttg

SEQ ID NO: 1185123 - DNA, 15 bp, Homo sapiens
ccaagcaaagtgttt

SEQ ID NO: 1185124 - DNA, 15 bp, Homo sapiens
tccaagcaaagtgtt

SEQ ID NO: 1185125 - DNA, 15 bp, Homo sapiens
atccaagcaaagtgt

SEQ ID NO: 1185126 - DNA, 15 bp, Homo sapiens
gatccaagcaaagtg

SEQ ID NO: 1185127 - DNA, 15 bp, Homo sapiens
agatccaagcaaagt

SEQ ID NO: 1185128 - DNA, 15 bp, Homo sapiens
cagatccaagcaaag

SEQ ID NO: 1185129 - DNA, 15 bp, Homo sapiens
ccagatccaagcaaa

SEQ ID NO: 1185130 - DNA, 15 bp, Homo sapiens
tccagatccaagcaa

SEQ ID NO: 1185131 - DNA, 15 bp, Homo sapiens
ctccagatccaagca

SEQ ID NO: 1185132 - DNA, 15 bp, Homo sapiens
tctccagatccaagc

SEQ ID NO: 1185133 - DNA, 15 bp, Homo sapiens
ctctccagatccaag

SEQ ID NO: 1185134 - DNA, 15 bp, Homo sapiens
cctctccagatccaa

SEQ ID NO: 1185135 - DNA, 15 bp, Homo sapiens
tcctctccagatcca

SEQ ID NO: 1185136 - DNA, 15 bp, Homo sapiens
atcctctccagatcc

SEQ ID NO: 1185137 - DNA, 15 bp, Homo sapiens
tatcctctccagatc

SEQ ID NO: 1185138 - DNA, 15 bp, Homo sapiens
atatcctctccagat

SEQ ID NO: 1185139 - DNA, 15 bp, Homo sapiens
tatatcctctccaga

SEQ ID NO: 1185140 - DNA, 15 bp, Homo sapiens
ctatatcctctccag

SEQ ID NO: 1185141 - DNA, 15 bp, Homo sapiens
tctatatcctctcca

SEQ ID NO: 1185142 - DNA, 15 bp, Homo sapiens
ttctatatcctctcc

SEQ ID NO: 1185143 - DNA, 15 bp, Homo sapiens
cttctatatcctctc

SEQ ID NO: 1185144 - DNA, 15 bp, Homo sapiens
acttctatatcctct

SEQ ID NO: 1185145 - DNA, 15 bp, Homo sapiens
cacttctatatcctc

SEQ ID NO: 1185146 - DNA, 15 bp, Homo sapiens
tcacttctatatcct

SEQ ID NO: 1185147 - DNA, 15 bp, Homo sapiens
ttcacttctatatcc

SEQ ID NO: 1185148 - DNA, 15 bp, Homo sapiens
cttcacttctatatc

SEQ ID NO: 1185149 - DNA, 15 bp, Homo sapiens
ccttcacttctatat

SEQ ID NO: 1185150 - DNA, 15 bp, Homo sapiens
tccttcacttctata

SEQ ID NO: 1185151 - DNA, 15 bp, Homo sapiens
ttccttcacttctat

SEQ ID NO: 1185152 - DNA, 15 bp, Homo sapiens
tttccttcacttcta

SEQ ID NO: 1185153 - DNA, 15 bp, Homo sapiens
atttccttcacttct

SEQ ID NO: 1185154 - DNA, 15 bp, Homo sapiens
tatttccttcacttc

SEQ ID NO: 1185155 - DNA, 15 bp, Homo sapiens
atatttccttcactt

SEQ ID NO: 1185156 - DNA, 15 bp, Homo sapiens
catatttccttcact

SEQ ID NO: 1185157 - DNA, 15 bp, Homo sapiens
gcatatttccttcac

SEQ ID NO: 1185158 - DNA, 15 bp, Homo sapiens
agcatatttccttca

SEQ ID NO: 1185159 - DNA, 15 bp, Homo sapiens
tagcatatttccttc

SEQ ID NO: 1185160 - DNA, 15 bp, Homo sapiens
gtagcatatttcctt

SEQ ID NO: 1185161 - DNA, 15 bp, Homo sapiens
ggtagcatatttcct

SEQ ID NO: 1185162 - DNA, 15 bp, Homo sapiens
aggtagcatatttcc

SEQ ID NO: 1185163 - DNA, 15 bp, Homo sapiens
caggtagcatatttc

SEQ ID NO: 1185164 - DNA, 15 bp, Homo sapiens
gcaggtagcatattt

SEQ ID NO: 1185165 - DNA, 15 bp, Homo sapiens
agcaggtagcatatt

SEQ ID NO: 1185166 - DNA, 15 bp, Homo sapiens
gagcaggtagcatat

SEQ ID NO: 1185167 - DNA, 15 bp, Homo sapiens
agagcaggtagcata

SEQ ID NO: 1185168 - DNA, 15 bp, Homo sapiens
gagagcaggtagcat

SEQ ID NO: 1185169 - DNA, 15 bp, Homo sapiens
tgagagcaggtagca

SEQ ID NO: 1185170 - DNA, 15 bp, Homo sapiens
ttgagagcaggtagc

SEQ ID NO: 1185171 - DNA, 15 bp, Homo sapiens
cttgagagcaggtag

SEQ ID NO: 1185172 - DNA, 15 bp, Homo sapiens
ccttgagagcaggta

SEQ ID NO: 1185173 - DNA, 15 bp, Homo sapiens
tccttgagagcaggt

SEQ ID NO: 1185174 - DNA, 15 bp, Homo sapiens
ttccttgagagcagg

SEQ ID NO: 1185175 - DNA, 15 bp, Homo sapiens
gttccttgagagcag

SEQ ID NO: 1185176 - DNA, 15 bp, Homo sapiens
agttccttgagagca

SEQ ID NO: 1185177 - DNA, 15 bp, Homo sapiens
aagttccttgagagc

SEQ ID NO: 1185178 - DNA, 15 bp, Homo sapiens
taagttccttgagag

SEQ ID NO: 1185179 - DNA, 15 bp, Homo sapiens
ataagttccttgaga

SEQ ID NO: 1185180 - DNA, 15 bp, Homo sapiens
cataagttccttgag

SEQ ID NO: 1185181 - DNA, 15 bp, Homo sapiens
acataagttccttga

SEQ ID NO: 1185182 - DNA, 15 bp, Homo sapiens
aacataagttccttg

SEQ ID NO: 1185183 - DNA, 15 bp, Homo sapiens
aaacataagttcctt

SEQ ID NO: 1185184 - DNA, 15 bp, Homo sapiens
aaaacataagttcct

SEQ ID NO: 1185185 - DNA, 15 bp, Homo sapiens
taaaacataagttcc

SEQ ID NO: 1185186 - DNA, 15 bp, Homo sapiens
ctaaaacataagttc

SEQ ID NO: 1185187 - DNA, 15 bp, Homo sapiens
actaaaacataagtt

SEQ ID NO: 1185188 - DNA, 15 bp, Homo sapiens
cactaaaacataagt

SEQ ID NO: 1185189 - DNA, 15 bp, Homo sapiens
ccactaaaacataag

SEQ ID NO: 1185190 - DNA, 15 bp, Homo sapiens
tccactaaaacataa

SEQ ID NO: 1185191 - DNA, 15 bp, Homo sapiens
ctccactaaaacata

SEQ ID NO: 1185192 - DNA, 15 bp, Homo sapiens
tctccactaaaacat

SEQ ID NO: 1185193 - DNA, 15 bp, Homo sapiens
ctctccactaaaaca

SEQ ID NO: 1185194 - DNA, 15 bp, Homo sapiens
tctctccactaaaac

SEQ ID NO: 1185195 - DNA, 15 bp, Homo sapiens
gtctctccactaaaa

SEQ ID NO: 1185196 - DNA, 15 bp, Homo sapiens
tgtctctccactaaa

SEQ ID NO: 1185197 - DNA, 15 bp, Homo sapiens
ttgtctctccactaa

SEQ ID NO: 1185198 - DNA, 15 bp, Homo sapiens
tttgtctctccacta

SEQ ID NO: 1185199 - DNA, 15 bp, Homo sapiens
gtttgtctctccact

SEQ ID NO: 1185200 - DNA, 15 bp, Homo sapiens
tgtttgtctctccac

SEQ ID NO: 1185201 - DNA, 15 bp, Homo sapiens
atgtttgtctctcca

SEQ ID NO: 1185202 - DNA, 15 bp, Homo sapiens
catgtttgtctctcc

SEQ ID NO: 1185203 - DNA, 15 bp, Homo sapiens
gcatgtttgtctctc

SEQ ID NO: 1185204 - DNA, 15 bp, Homo sapiens
tgcatgtttgtctct

SEQ ID NO: 1185205 - DNA, 15 bp, Homo sapiens
ctgcatgtttgtctc

SEQ ID NO: 1185206 - DNA, 15 bp, Homo sapiens
tctgcatgtttgtct

SEQ ID NO: 1185207 - DNA, 15 bp, Homo sapiens
ttctgcatgtttgtc

SEQ ID NO: 1185208 - DNA, 15 bp, Homo sapiens
attctgcatgtttgt

SEQ ID NO: 1185209 - DNA, 15 bp, Homo sapiens
aattctgcatgtttg

SEQ ID NO: 1185210 - DNA, 15 bp, Homo sapiens
aaattctgcatgttt

SEQ ID NO: 1185211 - DNA, 15 bp, Homo sapiens
taaattctgcatgtt

SEQ ID NO: 1185212 - DNA, 15 bp, Homo sapiens
gtaaattctgcatgt

SEQ ID NO: 1185213 - DNA, 15 bp, Homo sapiens
agtaaattctgcatg

SEQ ID NO: 1185214 - DNA, 15 bp, Homo sapiens
gagtaaattctgcat

SEQ ID NO: 1185215 - DNA, 15 bp, Homo sapiens
agagtaaattctgca

SEQ ID NO: 1185216 - DNA, 15 bp, Homo sapiens
tagagtaaattctgc

SEQ ID NO: 1185217 - DNA, 15 bp, Homo sapiens
gtagagtaaattctg

SEQ ID NO: 1185218 - DNA, 15 bp, Homo sapiens
tgtagagtaaattct

SEQ ID NO: 1185219 - DNA, 15 bp, Homo sapiens
ctgtagagtaaattc

SEQ ID NO: 1185220 - DNA, 15 bp, Homo sapiens
tctgtagagtaaatt

SEQ ID NO: 1185221 - DNA, 15 bp, Homo sapiens
ttctgtagagtaaat

SEQ ID NO: 1185222 - DNA, 15 bp, Homo sapiens
gttctgtagagtaaa

SEQ ID NO: 1185223 - DNA, 15 bp, Homo sapiens
tgttctgtagagtaa

SEQ ID NO: 1185224 - DNA, 15 bp, Homo sapiens
atgttctgtagagta

SEQ ID NO: 1185225 - DNA, 15 bp, Homo sapiens
gatgttctgtagagt

SEQ ID NO: 1185226 - DNA, 15 bp, Homo sapiens
tgatgttctgtagag

SEQ ID NO: 1185227 - DNA, 15 bp, Homo sapiens
ttgatgttctgtaga

SEQ ID NO: 1185228 - DNA, 15 bp, Homo sapiens
attgatgttctgtag

SEQ ID NO: 1185229 - DNA, 15 bp, Homo sapiens
cattgatgttctgta

SEQ ID NO: 1185230 - DNA, 15 bp, Homo sapiens
gcattgatgttctgt

SEQ ID NO: 1185231 - DNA, 15 bp, Homo sapiens
agcattgatgttctg

SEQ ID NO: 1185232 - DNA, 15 bp, Homo sapiens
aagcattgatgttct

SEQ ID NO: 1185233 - DNA, 15 bp, Homo sapiens
caagcattgatgttc

SEQ ID NO: 1185234 - DNA, 15 bp, Homo sapiens
tcaagcattgatgtt

SEQ ID NO: 1185235 - DNA, 15 bp, Homo sapiens
ctcaagcattgatgt

SEQ ID NO: 1185236 - DNA, 15 bp, Homo sapiens
gctcaagcattgatg

SEQ ID NO: 1185237 - DNA, 15 bp, Homo sapiens
tgctcaagcattgat

SEQ ID NO: 1185238 - DNA, 15 bp, Homo sapiens
ttgctcaagcattga

SEQ ID NO: 1185239 - DNA, 15 bp, Homo sapiens
tttgctcaagcattg

SEQ ID NO: 1185240 - DNA, 15 bp, Homo sapiens
atttgctcaagcatt

SEQ ID NO: 1185241 - DNA, 15 bp, Homo sapiens
catttgctcaagcat

SEQ ID NO: 1185242 - DNA, 15 bp, Homo sapiens
acatttgctcaagca

SEQ ID NO: 1185243 - DNA, 15 bp, Homo sapiens
tacatttgctcaagc

SEQ ID NO: 1185244 - DNA, 15 bp, Homo sapiens
ctacatttgctcaag

SEQ ID NO: 1185245 - DNA, 15 bp, Homo sapiens
tctacatttgctcaa

SEQ ID NO: 1185246 - DNA, 15 bp, Homo sapiens
gtctacatttgctca

SEQ ID NO: 1185247 - DNA, 15 bp, Homo sapiens
ggtctacatttgctc

SEQ ID NO: 1185248 - DNA, 15 bp, Homo sapiens
gggtctacatttgct

SEQ ID NO: 1185249 - DNA, 15 bp, Homo sapiens
tgggtctacatttgc

SEQ ID NO: 1185250 - DNA, 15 bp, Homo sapiens
ctgggtctacatttg

SEQ ID NO: 1185251 - DNA, 15 bp, Homo sapiens
tctgggtctacattt

SEQ ID NO: 1185252 - DNA, 15 bp, Homo sapiens
ctctgggtctacatt

SEQ ID NO: 1185253 - DNA, 15 bp, Homo sapiens
tctctgggtctacat

SEQ ID NO: 1185254 - DNA, 15 bp, Homo sapiens
ctctctgggtctaca

SEQ ID NO: 1185255 - DNA, 15 bp, Homo sapiens
cctctctgggtctac

SEQ ID NO: 1185256 - DNA, 15 bp, Homo sapiens
ccctctctgggtcta

SEQ ID NO: 1185257 - DNA, 15 bp, Homo sapiens
gccctctctgggtct

SEQ ID NO: 1185258 - DNA, 15 bp, Homo sapiens
agccctctctgggtc

SEQ ID NO: 1185259 - DNA, 15 bp, Homo sapiens
gagccctctctgggt

SEQ ID NO: 1185260 - DNA, 15 bp, Homo sapiens
agagccctctctggg

SEQ ID NO: 1185261 - DNA, 15 bp, Homo sapiens
aagagccctctctgg

SEQ ID NO: 1185262 - DNA, 15 bp, Homo sapiens
taagagccctctctg

SEQ ID NO: 1185263 - DNA, 15 bp, Homo sapiens
gtaagagccctctct

SEQ ID NO: 1185264 - DNA, 15 bp, Homo sapiens
tgtaagagccctctc

SEQ ID NO: 1185265 - DNA, 15 bp, Homo sapiens
ctgtaagagccctct

SEQ ID NO: 1185266 - DNA, 15 bp, Homo sapiens
gctgtaagagccctc

SEQ ID NO: 1185267 - DNA, 15 bp, Homo sapiens
tgctgtaagagccct

SEQ ID NO: 1185268 - DNA, 15 bp, Homo sapiens
gtgctgtaagagccc

SEQ ID NO: 1185269 - DNA, 15 bp, Homo sapiens
tgtgctgtaagagcc

SEQ ID NO: 1185270 - DNA, 15 bp, Homo sapiens
gtgtgctgtaagagc

SEQ ID NO: 1185271 - DNA, 15 bp, Homo sapiens
tgtgtgctgtaagag

SEQ ID NO: 1185272 - DNA, 15 bp, Homo sapiens
ttgtgtgctgtaaga

SEQ ID NO: 1185273 - DNA, 15 bp, Homo sapiens
cttgtgtgctgtaag

SEQ ID NO: 1185274 - DNA, 15 bp, Homo sapiens
gcttgtgtgctgtaa

SEQ ID NO: 1185275 - DNA, 15 bp, Homo sapiens
ggcttgtgtgctgta

SEQ ID NO: 1185276 - DNA, 15 bp, Homo sapiens
tggcttgtgtgctgt

SEQ ID NO: 1185277 - DNA, 15 bp, Homo sapiens
ctggcttgtgtgctg

SEQ ID NO: 1185278 - DNA, 15 bp, Homo sapiens
tctggcttgtgtgct

SEQ ID NO: 1185279 - DNA, 15 bp, Homo sapiens
ttctggcttgtgtgc

SEQ ID NO: 1185280 - DNA, 15 bp, Homo sapiens
gttctggcttgtgtg

SEQ ID NO: 1185281 - DNA, 15 bp, Homo sapiens
tgttctggcttgtgt

SEQ ID NO: 1185282 - DNA, 15 bp, Homo sapiens
ctgttctggcttgtg

SEQ ID NO: 1185283 - DNA, 15 bp, Homo sapiens
tctgttctggcttgt

SEQ ID NO: 1185284 - DNA, 15 bp, Homo sapiens
gtctgttctggcttg

SEQ ID NO: 1185285 - DNA, 15 bp, Homo sapiens
agtctgttctggctt

SEQ ID NO: 1185286 - DNA, 15 bp, Homo sapiens
cagtctgttctggct

SEQ ID NO: 1185287 - DNA, 15 bp, Homo sapiens
tcagtctgttctggc

SEQ ID NO: 1185288 - DNA, 15 bp, Homo sapiens
atcagtctgttctgg

SEQ ID NO: 1185289 - DNA, 15 bp, Homo sapiens
catcagtctgttctg

SEQ ID NO: 1185290 - DNA, 15 bp, Homo sapiens
ccatcagtctgttct

SEQ ID NO: 1185291 - DNA, 15 bp, Homo sapiens
caccatcagtctgtt

SEQ ID NO: 1185292 - DNA, 15 bp, Homo sapiens
gcaccatcagtctgt

SEQ ID NO: 1185293 - DNA, 15 bp, Homo sapiens
agcaccatcagtctg

SEQ ID NO: 1185294 - DNA, 15 bp, Homo sapiens
tagcaccatcagtct

SEQ ID NO: 1185295 - DNA, 15 bp, Homo sapiens
ttagcaccatcagtc

SEQ ID NO: 1185296 - DNA, 15 bp, Homo sapiens
gttagcaccatcagt

SEQ ID NO: 1185297 - DNA, 15 bp, Homo sapiens
tgttagcaccatcag

SEQ ID NO: 1185298 - DNA, 15 bp, Homo sapiens
ttgttagcaccatca

SEQ ID NO: 1185299 - DNA, 15 bp, Homo sapiens
attgttagcaccatc

SEQ ID NO: 1185300 - DNA, 15 bp, Homo sapiens
aattgttagcaccat

SEQ ID NO: 1185301 - DNA, 15 bp, Homo sapiens
taattgttagcacca

SEQ ID NO: 1185302 - DNA, 15 bp, Homo sapiens
ctaattgttagcacc

SEQ ID NO: 1185303 - DNA, 15 bp, Homo sapiens
cctaattgttagcac

SEQ ID NO: 1185304 - DNA, 15 bp, Homo sapiens
acctaattgttagca

SEQ ID NO: 1185305 - DNA, 15 bp, Homo sapiens
aacctaattgttagc

SEQ ID NO: 1185306 - DNA, 15 bp, Homo sapiens
gaacctaattgttag

SEQ ID NO: 1185307 - DNA, 15 bp, Homo sapiens
tgaacctaattgtta

SEQ ID NO: 1185308 - DNA, 15 bp, Homo sapiens
ttgaacctaattgtt

SEQ ID NO: 1185309 - DNA, 15 bp, Homo sapiens
cttgaacctaattgt

SEQ ID NO: 1185310 - DNA, 15 bp, Homo sapiens
ccttgaacctaattg

SEQ ID NO: 1185311 - DNA, 15 bp, Homo sapiens
accttgaacctaatt

SEQ ID NO: 1185312 - DNA, 15 bp, Homo sapiens
aaccttgaacctaat

SEQ ID NO: 1185313 - DNA, 15 bp, Homo sapiens
aaaccttgaacctaa

SEQ ID NO: 1185314 - DNA, 15 bp, Homo sapiens
aaaaccttgaaccta

SEQ ID NO: 1185315 - DNA, 15 bp, Homo sapiens
aaaaaccttgaacct

SEQ ID NO: 1185316 - DNA, 15 bp, Homo sapiens
gaaaaaccttgaacc

SEQ ID NO: 1185317 - DNA, 15 bp, Homo sapiens
agaaaaaccttgaac

SEQ ID NO: 1185318 - DNA, 15 bp, Homo sapiens
tagaaaaaccttgaa

SEQ ID NO: 1185319 - DNA, 15 bp, Homo sapiens
ttagaaaaaccttga

SEQ ID NO: 1185320 - DNA, 15 bp, Homo sapiens
tttagaaaaaccttg

SEQ ID NO: 1185321 - DNA, 15 bp, Homo sapiens
gtttagaaaaacctt

SEQ ID NO: 1185322 - DNA, 15 bp, Homo sapiens
tgtttagaaaaacct

SEQ ID NO: 1185323 - DNA, 15 bp, Homo sapiens
ctgtttagaaaaacc

SEQ ID NO: 1185324 - DNA, 15 bp, Homo sapiens
actgtttagaaaaac

SEQ ID NO: 1185325 - DNA, 15 bp, Homo sapiens
tactgtttagaaaaa

SEQ ID NO: 1185326 - DNA, 15 bp, Homo sapiens
ctactgtttagaaaa

SEQ ID NO: 1185327 - DNA, 15 bp, Homo sapiens
tctactgtttagaaa

SEQ ID NO: 1185328 - DNA, 15 bp, Homo sapiens
gtctactgtttagaa

SEQ ID NO: 1185329 - DNA, 15 bp, Homo sapiens
agtctactgtttaga

SEQ ID NO: 1185330 - DNA, 15 bp, Homo sapiens
gagtctactgtttag

SEQ ID NO: 1185331 - DNA, 15 bp, Homo sapiens
agagtctactgttta

SEQ ID NO: 1185332 - DNA, 15 bp, Homo sapiens
gagagtctactgttt

SEQ ID NO: 1185333 - DNA, 15 bp, Homo sapiens
ggagagtctactgtt

SEQ ID NO: 1185334 - DNA, 15 bp, Homo sapiens
aggagagtctactgt

SEQ ID NO: 1185335 - DNA, 15 bp, Homo sapiens
caggagagtctactg

SEQ ID NO: 1185336 - DNA, 15 bp, Homo sapiens
gcaggagagtctact

SEQ ID NO: 1185337 - DNA, 15 bp, Homo sapiens
tgcaggagagtctac

SEQ ID NO: 1185338 - DNA, 15 bp, Homo sapiens
atgcaggagagtcta

SEQ ID NO: 1185339 - DNA, 15 bp, Homo sapiens
tatgcaggagagtct

SEQ ID NO: 1185340 - DNA, 15 bp, Homo sapiens
gtatgcaggagagtc

SEQ ID NO: 1185341 - DNA, 15 bp, Homo sapiens
tgtatgcaggagagt

SEQ ID NO: 1185342 - DNA, 15 bp, Homo sapiens
ttgtatgcaggagag

SEQ ID NO: 1185343 - DNA, 15 bp, Homo sapiens
gttgtatgcaggaga

SEQ ID NO: 1185344 - DNA, 15 bp, Homo sapiens
agttgtatgcaggag

SEQ ID NO: 1185345 - DNA, 15 bp, Homo sapiens
tagttgtatgcagga

SEQ ID NO: 1185346 - DNA, 15 bp, Homo sapiens
atagttgtatgcagg

SEQ ID NO: 1185347 - DNA, 15 bp, Homo sapiens
tatagttgtatgcag

SEQ ID NO: 1185348 - DNA, 15 bp, Homo sapiens
gtatagttgtatgca

SEQ ID NO: 1185349 - DNA, 15 bp, Homo sapiens
ggtatagttgtatgc

SEQ ID NO: 1185350 - DNA, 15 bp, Homo sapiens
cggtatagttgtatg

SEQ ID NO: 1185351 - DNA, 15 bp, Homo sapiens
gcggtatagttgtat

SEQ ID NO: 1185352 - DNA, 15 bp, Homo sapiens
tgcggtatagttgta

SEQ ID NO: 1185353 - DNA, 15 bp, Homo sapiens
atgcggtatagttgt

SEQ ID NO: 1185354 - DNA, 15 bp, Homo sapiens
catgcggtatagttg

SEQ ID NO: 1185355 - DNA, 15 bp, Homo sapiens
gcatgcggtatagtt

SEQ ID NO: 1185356 - DNA, 15 bp, Homo sapiens
ggcatgcggtatagt

SEQ ID NO: 1185357 - DNA, 15 bp, Homo sapiens
tggcatgcggtatag

SEQ ID NO: 1185358 - DNA, 15 bp, Homo sapiens
ctggcatgcggtata

SEQ ID NO: 1185359 - DNA, 15 bp, Homo sapiens
cctggcatgcggtat

SEQ ID NO: 1185360 - DNA, 15 bp, Homo sapiens
acctggcatgcggta

SEQ ID NO: 1185361 - DNA, 15 bp, Homo sapiens
tacctggcatgcggt

SEQ ID NO: 1185362 - DNA, 15 bp, Homo sapiens
ttacctggcatgcgg

SEQ ID NO: 1185363 - DNA, 15 bp, Homo sapiens
tttacctggcatgcg

SEQ ID NO: 1185364 - DNA, 15 bp, Homo sapiens
atttacctggcatgc

SEQ ID NO: 1185365 - DNA, 15 bp, Homo sapiens
catttacctggcatg

SEQ ID NO: 1185366 - DNA, 15 bp, Homo sapiens
tcatttacctggcat

SEQ ID NO: 1185367 - DNA, 15 bp, Homo sapiens
gtcatttacctggca

SEQ ID NO: 1185368 - DNA, 15 bp, Homo sapiens
agtcatttacctggc

SEQ ID NO: 1185369 - DNA, 15 bp, Homo sapiens
cagtcatttacctgg

SEQ ID NO: 1185370 - DNA, 15 bp, Homo sapiens
tcagtcatttacctg

SEQ ID NO: 1185371 - DNA, 15 bp, Homo sapiens
ctcagtcatttacct

SEQ ID NO: 1185372 - DNA, 15 bp, Homo sapiens
cctcagtcatttacc

SEQ ID NO: 1185373 - DNA, 15 bp, Homo sapiens
ccctcagtcatttac

SEQ ID NO: 1185374 - DNA, 15 bp, Homo sapiens
accctcagtcattta

SEQ ID NO: 1185375 - DNA, 15 bp, Homo sapiens
aaccctcagtcattt

SEQ ID NO: 1185376 - DNA, 15 bp, Homo sapiens
taaccctcagtcatt

SEQ ID NO: 1185377 - DNA, 15 bp, Homo sapiens
ataaccctcagtcat

SEQ ID NO: 1185378 - DNA, 15 bp, Homo sapiens
aataaccctcagtca

SEQ ID NO: 1185379 - DNA, 15 bp, Homo sapiens
taataaccctcagtc

SEQ ID NO: 1185380 - DNA, 15 bp, Homo sapiens
gtaataaccctcagt

SEQ ID NO: 1185381 - DNA, 15 bp, Homo sapiens
tgtaataaccctcag

SEQ ID NO: 1185382 - DNA, 15 bp, Homo sapiens
atgtaataaccctca

SEQ ID NO: 1185383 - DNA, 15 bp, Homo sapiens
gatgtaataaccctc

SEQ ID NO: 1185384 - DNA, 15 bp, Homo sapiens
ggatgtaataaccct

SEQ ID NO: 1185385 - DNA, 15 bp, Homo sapiens
tggatgtaataaccc

SEQ ID NO: 1185386 - DNA, 15 bp, Homo sapiens
ttggatgtaataacc

SEQ ID NO: 1185387 - DNA, 15 bp, Homo sapiens
attggatgtaataac

SEQ ID NO: 1185388 - DNA, 15 bp, Homo sapiens
aattggatgtaataa

SEQ ID NO: 1185389 - DNA, 15 bp, Homo sapiens
taattggatgtaata

SEQ ID NO: 1185390 - DNA, 15 bp, Homo sapiens
ataattggatgtaat

SEQ ID NO: 1185391 - DNA, 15 bp, Homo sapiens
tataattggatgtaa

SEQ ID NO: 1185392 - DNA, 15 bp, Homo sapiens
ttataattggatgta

SEQ ID NO: 1185393 - DNA, 15 bp, Homo sapiens
gttataattggatgt

SEQ ID NO: 1185394 - DNA, 15 bp, Homo sapiens
tgttataattggatg

SEQ ID NO: 1185395 - DNA, 15 bp, Homo sapiens
gtgttataattggat

SEQ ID NO: 1185396 - DNA, 15 bp, Homo sapiens
ggtgttataattgga

SEQ ID NO: 1185397 - DNA, 15 bp, Homo sapiens
tggtgttataattgg

SEQ ID NO: 1185398 - DNA, 15 bp, Homo sapiens
gtggtgttataattg

SEQ ID NO: 1185399 - DNA, 15 bp, Homo sapiens
agtggtgttataatt

SEQ ID NO: 1185400 - DNA, 15 bp, Homo sapiens
cagtggtgttataat

SEQ ID NO: 1185401 - DNA, 15 bp, Homo sapiens
acagtggtgttataa

SEQ ID NO: 1185402 - DNA, 15 bp, Homo sapiens
cacagtggtgttata

SEQ ID NO: 1185403 - DNA, 15 bp, Homo sapiens
tcacagtggtgttat

SEQ ID NO: 1185404 - DNA, 15 bp, Homo sapiens
atcacagtggtgtta

SEQ ID NO: 1185405 - DNA, 15 bp, Homo sapiens
catcacagtggtgtt

SEQ ID NO: 1185406 - DNA, 15 bp, Homo sapiens
acatcacagtggtgt

SEQ ID NO: 1185407 - DNA, 15 bp, Homo sapiens
tacatcacagtggtg

SEQ ID NO: 1185408 - DNA, 15 bp, Homo sapiens
ctacatcacagtggt

SEQ ID NO: 1185409 - DNA, 15 bp, Homo sapiens
cctacatcacagtgg

SEQ ID NO: 1185410 - DNA, 15 bp, Homo sapiens
acctacatcacagtg

SEQ ID NO: 1185411 - DNA, 15 bp, Homo sapiens
cacctacatcacagt

SEQ ID NO: 1185412 - DNA, 15 bp, Homo sapiens
gcacctacatcacag

SEQ ID NO: 1185413 - DNA, 15 bp, Homo sapiens
agcacctacatcaca

SEQ ID NO: 1185414 - DNA, 15 bp, Homo sapiens
gagcacctacatcac

SEQ ID NO: 1185415 - DNA, 15 bp, Homo sapiens
agagcacctacatca

SEQ ID NO: 1185416 - DNA, 15 bp, Homo sapiens
aagagcacctacatc

SEQ ID NO: 1185417 - DNA, 15 bp, Homo sapiens
taagagcacctacat

SEQ ID NO: 1185418 - DNA, 15 bp, Homo sapiens
gtaagagcacctaca

SEQ ID NO: 1185419 - DNA, 15 bp, Homo sapiens
ggtaagagcacctac

SEQ ID NO: 1185420 - DNA, 15 bp, Homo sapiens
gggtaagagcaccta

SEQ ID NO: 1185421 - DNA, 15 bp, Homo sapiens
ggggtaagagcacct

SEQ ID NO: 1185422 - DNA, 15 bp, Homo sapiens
tggggtaagagcacc

SEQ ID NO: 1185423 - DNA, 15 bp, Homo sapiens
gtggggtaagagcac

SEQ ID NO: 1185424 - DNA, 15 bp, Homo sapiens
tgtggggtaagagca

SEQ ID NO: 1185425 - DNA, 15 bp, Homo sapiens
gtgtggggtaagagc

SEQ ID NO: 1185426 - DNA, 15 bp, Homo sapiens
agtgtggggtaagag

SEQ ID NO: 1185427 - DNA, 15 bp, Homo sapiens
aagtgtggggtaaga

SEQ ID NO: 1185428 - DNA, 15 bp, Homo sapiens
aaagtgtggggtaag

SEQ ID NO: 1185429 - DNA, 15 bp, Homo sapiens
gaaagtgtggggtaa

SEQ ID NO: 1185430 - DNA, 15 bp, Homo sapiens
tgaaagtgtggggta

SEQ ID NO: 1185431 - DNA, 15 bp, Homo sapiens
atgaaagtgtggggt

SEQ ID NO: 1185432 - DNA, 15 bp, Homo sapiens
aatgaaagtgtgggg

SEQ ID NO: 1185433 - DNA, 15 bp, Homo sapiens
aaatgaaagtgtggg

SEQ ID NO: 1185434 - DNA, 15 bp, Homo sapiens
aaaatgaaagtgtgg

SEQ ID NO: 1185435 - DNA, 15 bp, Homo sapiens
taaaatgaaagtgtg

SEQ ID NO: 1185436 - DNA, 15 bp, Homo sapiens
gtaaaatgaaagtgt

SEQ ID NO: 1185437 - DNA, 15 bp, Homo sapiens
tgtaaaatgaaagtg

SEQ ID NO: 1185438 - DNA, 15 bp, Homo sapiens
ctgtaaaatgaaagt

SEQ ID NO: 1185439 - DNA, 15 bp, Homo sapiens
tctgtaaaatgaaag

SEQ ID NO: 1185440 - DNA, 15 bp, Homo sapiens
ttctgtaaaatgaaa

SEQ ID NO: 1185441 - DNA, 15 bp, Homo sapiens
cttctgtaaaatgaa

SEQ ID NO: 1185442 - DNA, 15 bp, Homo sapiens
tcttctgtaaaatga

SEQ ID NO: 1185443 - DNA, 15 bp, Homo sapiens
ctcttctgtaaaatg

SEQ ID NO: 1185444 - DNA, 15 bp, Homo sapiens
cctcttctgtaaaat

SEQ ID NO: 1185445 - DNA, 15 bp, Homo sapiens
tcctcttctgtaaaa

SEQ ID NO: 1185446 - DNA, 15 bp, Homo sapiens
ttcctcttctgtaaa

SEQ ID NO: 1185447 - DNA, 15 bp, Homo sapiens
tttcctcttctgtaa

SEQ ID NO: 1185448 - DNA, 15 bp, Homo sapiens
atttcctcttctgta

SEQ ID NO: 1185449 - DNA, 15 bp, Homo sapiens
aatttcctcttctgt

SEQ ID NO: 1185450 - DNA, 15 bp, Homo sapiens
caatttcctcttctg

SEQ ID NO: 1185451 - DNA, 15 bp, Homo sapiens
tcaatttcctcttct

SEQ ID NO: 1185452 - DNA, 15 bp, Homo sapiens
ctcaatttcctcttc

SEQ ID NO: 1185453 - DNA, 15 bp, Homo sapiens
cctcaatttcctctt

SEQ ID NO: 1185454 - DNA, 15 bp, Homo sapiens
tcctcaatttcctct

SEQ ID NO: 1185455 - DNA, 15 bp, Homo sapiens
gtcctcaatttcctc

SEQ ID NO: 1185456 - DNA, 15 bp, Homo sapiens
tgtcctcaatttcct

SEQ ID NO: 1185457 - DNA, 15 bp, Homo sapiens
ctgtcctcaatttcc

SEQ ID NO: 1185458 - DNA, 15 bp, Homo sapiens
gctgtcctcaatttc

SEQ ID NO: 1185459 - DNA, 15 bp, Homo sapiens
tgctgtcctcaattt

SEQ ID NO: 1185460 - DNA, 15 bp, Homo sapiens
gtgctgtcctcaatt

SEQ ID NO: 1185461 - DNA, 15 bp, Homo sapiens
tgtgctgtcctcaat

SEQ ID NO: 1185462 - DNA, 15 bp, Homo sapiens
ttgtgctgtcctcaa

SEQ ID NO: 1185463 - DNA, 15 bp, Homo sapiens
attgtgctgtcctca

SEQ ID NO: 1185464 - DNA, 15 bp, Homo sapiens
cattgtgctgtcctc

SEQ ID NO: 1185465 - DNA, 15 bp, Homo sapiens
acattgtgctgtcct

SEQ ID NO: 1185466 - DNA, 15 bp, Homo sapiens
tacattgtgctgtcc

SEQ ID NO: 1185467 - DNA, 15 bp, Homo sapiens
ctacattgtgctgtc

SEQ ID NO: 1185468 - DNA, 15 bp, Homo sapiens
actacattgtgctgt

SEQ ID NO: 1185469 - DNA, 15 bp, Homo sapiens
cactacattgtgctg

SEQ ID NO: 1185470 - DNA, 15 bp, Homo sapiens
tcactacattgtgct

SEQ ID NO: 1185471 - DNA, 15 bp, Homo sapiens
atcactacattgtgc

SEQ ID NO: 1185472 - DNA, 15 bp, Homo sapiens
aatcactacattgtg

SEQ ID NO: 1185473 - DNA, 15 bp, Homo sapiens
taatcactacattgt

SEQ ID NO: 1185474 - DNA, 15 bp, Homo sapiens
ataatcactacattg

SEQ ID NO: 1185475 - DNA, 15 bp, Homo sapiens
gataatcactacatt

SEQ ID NO: 1185476 - DNA, 15 bp, Homo sapiens
tgataatcactacat

SEQ ID NO: 1185477 - DNA, 15 bp, Homo sapiens
ttgataatcactaca

SEQ ID NO: 1185478 - DNA, 15 bp, Homo sapiens
tttgataatcactac

SEQ ID NO: 1185479 - DNA, 15 bp, Homo sapiens
ctttgataatcacta

SEQ ID NO: 1185480 - DNA, 15 bp, Homo sapiens
cctttgataatcact

SEQ ID NO: 1185481 - DNA, 15 bp, Homo sapiens
acctttgataatcac

SEQ ID NO: 1185482 - DNA, 15 bp, Homo sapiens
gacctttgataatca

SEQ ID NO: 1185483 - DNA, 15 bp, Homo sapiens
tgacctttgataatc

SEQ ID NO: 1185484 - DNA, 15 bp, Homo sapiens
gtgacctttgataat

SEQ ID NO: 1185485 - DNA, 15 bp, Homo sapiens
tgtgacctttgataa

SEQ ID NO: 1185486 - DNA, 15 bp, Homo sapiens
gtgtgacctttgata

SEQ ID NO: 1185487 - DNA, 15 bp, Homo sapiens
cgtgtgacctttgat

SEQ ID NO: 1185488 - DNA, 15 bp, Homo sapiens
tcgtgtgacctttga

SEQ ID NO: 1185489 - DNA, 15 bp, Homo sapiens
gtcgtgtgacctttg

SEQ ID NO: 1185490 - DNA, 15 bp, Homo sapiens
agtcgtgtgaccttt

SEQ ID NO: 1185491 - DNA, 15 bp, Homo sapiens
tagtcgtgtgacctt

SEQ ID NO: 1185492 - DNA, 15 bp, Homo sapiens
gtagtcgtgtgacct

SEQ ID NO: 1185493 - DNA, 15 bp, Homo sapiens
agtagtcgtgtgacc

SEQ ID NO: 1185494 - DNA, 15 bp, Homo sapiens
cagtagtcgtgtgac

SEQ ID NO: 1185495 - DNA, 15 bp, Homo sapiens
acagtagtcgtgtga

SEQ ID NO: 1185496 - DNA, 15 bp, Homo sapiens
cacagtagtcgtgtg

SEQ ID NO: 1185497 - DNA, 15 bp, Homo sapiens
acacagtagtcgtgt

SEQ ID NO: 1185498 - DNA, 15 bp, Homo sapiens
cacacagtagtcgtg

SEQ ID NO: 1185499 - DNA, 15 bp, Homo sapiens
ccacacagtagtcgt

SEQ ID NO: 1185500 - DNA, 15 bp, Homo sapiens
cccacacagtagtcg

SEQ ID NO: 1185501 - DNA, 15 bp, Homo sapiens
tcccacacagtagtc

SEQ ID NO: 1185502 - DNA, 15 bp, Homo sapiens
ctcccacacagtagt

SEQ ID NO: 1185503 - DNA, 15 bp, Homo sapiens
tctcccacacagtag

SEQ ID NO: 1185504 - DNA, 15 bp, Homo sapiens
ctctcccacacagta

SEQ ID NO: 1185505 - DNA, 15 bp, Homo sapiens
gctctcccacacagt

SEQ ID NO: 1185506 - DNA, 15 bp, Homo sapiens
agctctcccacacag

SEQ ID NO: 1185507 - DNA, 15 bp, Homo sapiens
tagctctcccacaca

SEQ ID NO: 1185508 - DNA, 15 bp, Homo sapiens
ctagctctcccacac

SEQ ID NO: 1185509 - DNA, 15 bp, Homo sapiens
cctagctctcccaca

SEQ ID NO: 1185510 - DNA, 15 bp, Homo sapiens
tcctagctctcccac

SEQ ID NO: 1185511 - DNA, 15 bp, Homo sapiens
atcctagctctccca

SEQ ID NO: 1185512 - DNA, 15 bp, Homo sapiens
aatcctagctctccc

SEQ ID NO: 1185513 - DNA, 15 bp, Homo sapiens
aaatcctagctctcc

SEQ ID NO: 1185514 - DNA, 15 bp, Homo sapiens
taaatcctagctctc

SEQ ID NO: 1185515 - DNA, 15 bp, Homo sapiens
ttaaatcctagctct

SEQ ID NO: 1185516 - DNA, 15 bp, Homo sapiens
tttaaatcctagctc

SEQ ID NO: 1185517 - DNA, 15 bp, Homo sapiens
gtttaaatcctagct

SEQ ID NO: 1185518 - DNA, 15 bp, Homo sapiens
ggtttaaatcctagc

SEQ ID NO: 1185519 - DNA, 15 bp, Homo sapiens
tggtttaaatcctag

SEQ ID NO: 1185520 - DNA, 15 bp, Homo sapiens
ctggtttaaatccta

SEQ ID NO: 1185521 - DNA, 15 bp, Homo sapiens
tctggtttaaatcct

SEQ ID NO: 1185522 - DNA, 15 bp, Homo sapiens
atctggtttaaatcc

SEQ ID NO: 1185523 - DNA, 15 bp, Homo sapiens
catctggtttaaatc

SEQ ID NO: 1185524 - DNA, 15 bp, Homo sapiens
gcatctggtttaaat

SEQ ID NO: 1185525 - DNA, 15 bp, Homo sapiens
tgcatctggtttaaa

SEQ ID NO: 1185526 - DNA, 15 bp, Homo sapiens
atgcatctggtttaa

SEQ ID NO: 1185527 - DNA, 15 bp, Homo sapiens
tatgcatctggttta

SEQ ID NO: 1185528 - DNA, 15 bp, Homo sapiens
ttatgcatctggttt

SEQ ID NO: 1185529 - DNA, 15 bp, Homo sapiens
cttatgcatctggtt

SEQ ID NO: 1185530 - DNA, 15 bp, Homo sapiens
tcttatgcatctggt

SEQ ID NO: 1185531 - DNA, 15 bp, Homo sapiens
atcttatgcatctgg

SEQ ID NO: 1185532 - DNA, 15 bp, Homo sapiens
catcttatgcatctg

SEQ ID NO: 1185533 - DNA, 15 bp, Homo sapiens
tcatcttatgcatct

SEQ ID NO: 1185534 - DNA, 15 bp, Homo sapiens
ctcatcttatgcatc

SEQ ID NO: 1185535 - DNA, 15 bp, Homo sapiens
cctcatcttatgcat

SEQ ID NO: 1185536 - DNA, 15 bp, Homo sapiens
acctcatcttatgca

SEQ ID NO: 1185537 - DNA, 15 bp, Homo sapiens
gacctcatcttatgc

SEQ ID NO: 1185538 - DNA, 15 bp, Homo sapiens
ggacctcatcttatg

SEQ ID NO: 1185539 - DNA, 15 bp, Homo sapiens
aggacctcatcttat

SEQ ID NO: 1185540 - DNA, 15 bp, Homo sapiens
gaggacctcatctta

SEQ ID NO: 1185541 - DNA, 15 bp, Homo sapiens
ggaggacctcatctt

SEQ ID NO: 1185542 - DNA, 15 bp, Homo sapiens
tggaggacctcatct

SEQ ID NO: 1185543 - DNA, 15 bp, Homo sapiens
ttggaggacctcatc

SEQ ID NO: 1185544 - DNA, 15 bp, Homo sapiens
cttggaggacctcat

SEQ ID NO: 1185545 - DNA, 15 bp, Homo sapiens
tcttggaggacctca

SEQ ID NO: 1185546 - DNA, 15 bp, Homo sapiens
ttcttggaggacctc

SEQ ID NO: 1185547 - DNA, 15 bp, Homo sapiens
tttcttggaggacct

SEQ ID NO: 1185548 - DNA, 15 bp, Homo sapiens
gtttcttggaggacc

SEQ ID NO: 1185549 - DNA, 15 bp, Homo sapiens
tgtttcttggaggac

SEQ ID NO: 1185550 - DNA, 15 bp, Homo sapiens
ctgtttcttggagga

SEQ ID NO: 1185551 - DNA, 15 bp, Homo sapiens
tctgtttcttggagg

SEQ ID NO: 1185552 - DNA, 15 bp, Homo sapiens
ttctgtttcttggag

SEQ ID NO: 1185553 - DNA, 15 bp, Homo sapiens
cttctgtttcttgga

SEQ ID NO: 1185554 - DNA, 15 bp, Homo sapiens
tcttctgtttcttgg

SEQ ID NO: 1185555 - DNA, 15 bp, Homo sapiens
atcttctgtttcttg

SEQ ID NO: 1185556 - DNA, 15 bp, Homo sapiens
catcttctgtttctt

SEQ ID NO: 1185557 - DNA, 15 bp, Homo sapiens
tcatcttctgtttct

SEQ ID NO: 1185558 - DNA, 15 bp, Homo sapiens
ctcatcttctgtttc

SEQ ID NO: 1185559 - DNA, 15 bp, Homo sapiens
tctcatcttctgttt

SEQ ID NO: 1185560 - DNA, 15 bp, Homo sapiens
ttctcatcttctgtt

SEQ ID NO: 1185561 - DNA, 15 bp, Homo sapiens
cttctcatcttctgt

SEQ ID NO: 1185562 - DNA, 15 bp, Homo sapiens
ccttctcatcttctg

SEQ ID NO: 1185563 - DNA, 15 bp, Homo sapiens
accttctcatcttct

SEQ ID NO: 1185564 - DNA, 15 bp, Homo sapiens
caccttctcatcttc

SEQ ID NO: 1185565 - DNA, 15 bp, Homo sapiens
acaccttctcatctt

SEQ ID NO: 1185566 - DNA, 15 bp, Homo sapiens
aacaccttctcatct

SEQ ID NO: 1185567 - DNA, 15 bp, Homo sapiens
taacaccttctcatc

SEQ ID NO: 1185568 - DNA, 15 bp, Homo sapiens
ttaacaccttctcat

SEQ ID NO: 1185569 - DNA, 15 bp, Homo sapiens
tttaacaccttctca

SEQ ID NO: 1185570 - DNA, 15 bp, Homo sapiens
atttaacaccttctc

SEQ ID NO: 1185571 - DNA, 15 bp, Homo sapiens
catttaacaccttct

SEQ ID NO: 1185572 - DNA, 15 bp, Homo sapiens
tcatttaacaccttc

SEQ ID NO: 1185573 - DNA, 15 bp, Homo sapiens
ctcatttaacacctt

SEQ ID NO: 1185574 - DNA, 15 bp, Homo sapiens
gctcatttaacacct

SEQ ID NO: 1185575 - DNA, 15 bp, Homo sapiens
tgctcatttaacacc

SEQ ID NO: 1185576 - DNA, 15 bp, Homo sapiens
ctgctcatttaacac

SEQ ID NO: 1185577 - DNA, 15 bp, Homo sapiens
cctgctcatttaaca

SEQ ID NO: 1185578 - DNA, 15 bp, Homo sapiens
ccctgctcatttaac

SEQ ID NO: 1185579 - DNA, 15 bp, Homo sapiens
cccctgctcatttaa

SEQ ID NO: 1185580 - DNA, 15 bp, Homo sapiens
acccctgctcattta

SEQ ID NO: 1185581 - DNA, 15 bp, Homo sapiens
aacccctgctcattt

SEQ ID NO: 1185582 - DNA, 15 bp, Homo sapiens
aaacccctgctcatt

SEQ ID NO: 1185583 - DNA, 15 bp, Homo sapiens
aaaacccctgctcat

SEQ ID NO: 1185584 - DNA, 15 bp, Homo sapiens
taaaacccctgctca

SEQ ID NO: 1185585 - DNA, 15 bp, Homo sapiens
ataaaacccctgctc

SEQ ID NO: 1185586 - DNA, 15 bp, Homo sapiens
aataaaacccctgct

SEQ ID NO: 1185587 - DNA, 15 bp, Homo sapiens
taataaaacccctgc

SEQ ID NO: 1185588 - DNA, 15 bp, Homo sapiens
ctaataaaacccctg

SEQ ID NO: 1185589 - DNA, 15 bp, Homo sapiens
cctaataaaacccct

SEQ ID NO: 1185590 - DNA, 15 bp, Homo sapiens
ccctaataaaacccc

SEQ ID NO: 1185591 - DNA, 15 bp, Homo sapiens
cccctaataaaaccc

SEQ ID NO: 1185592 - DNA, 15 bp, Homo sapiens
ccccctaataaaacc

SEQ ID NO: 1185593 - DNA, 15 bp, Homo sapiens
tccccctaataaaac

SEQ ID NO: 1185594 - DNA, 15 bp, Homo sapiens
ttccccctaataaaa

SEQ ID NO: 1185595 - DNA, 15 bp, Homo sapiens
attccccctaataaa

SEQ ID NO: 1185596 - DNA, 15 bp, Homo sapiens
aattccccctaataa

SEQ ID NO: 1185597 - DNA, 15 bp, Homo sapiens
taattccccctaata

SEQ ID NO: 1185598 - DNA, 15 bp, Homo sapiens
ttaattccccctaat

SEQ ID NO: 1185599 - DNA, 15 bp, Homo sapiens
attaattccccctaa

SEQ ID NO: 1185600 - DNA, 15 bp, Homo sapiens
cattaattcccccta

SEQ ID NO: 1185601 - DNA, 15 bp, Homo sapiens
acattaattccccct

SEQ ID NO: 1185602 - DNA, 15 bp, Homo sapiens
cacattaattccccc

SEQ ID NO: 1185603 - DNA, 15 bp, Homo sapiens
acacattaattcccc

SEQ ID NO: 1185604 - DNA, 15 bp, Homo sapiens
cacacattaattccc

SEQ ID NO: 1185605 - DNA, 15 bp, Homo sapiens
tcacacattaattcc

SEQ ID NO: 1185606 - DNA, 15 bp, Homo sapiens
ttcacacattaattc

SEQ ID NO: 1185607 - DNA, 15 bp, Homo sapiens
gttcacacattaatt

SEQ ID NO: 1185608 - DNA, 15 bp, Homo sapiens
tgttcacacattaat

SEQ ID NO: 1185609 - DNA, 15 bp, Homo sapiens
ctgttcacacattaa

SEQ ID NO: 1185610 - DNA, 15 bp, Homo sapiens
tctgttcacacatta

SEQ ID NO: 1185611 - DNA, 15 bp, Homo sapiens
ttctgttcacacatt

SEQ ID NO: 1185612 - DNA, 15 bp, Homo sapiens
tttctgttcacacat

SEQ ID NO: 1185613 - DNA, 15 bp, Homo sapiens
atttctgttcacaca

SEQ ID NO: 1185614 - DNA, 15 bp, Homo sapiens
tatttctgttcacac

SEQ ID NO: 1185615 - DNA, 15 bp, Homo sapiens
ctatttctgttcaca

SEQ ID NO: 1185616 - DNA, 15 bp, Homo sapiens
cctatttctgttcac

SEQ ID NO: 1185617 - DNA, 15 bp, Homo sapiens
ccctatttctgttca

SEQ ID NO: 1185618 - DNA, 15 bp, Homo sapiens
cccctatttctgttc

SEQ ID NO: 1185619 - DNA, 15 bp, Homo sapiens
tcccctatttctgtt

SEQ ID NO: 1185620 - DNA, 15 bp, Homo sapiens
ctcccctatttctgt

SEQ ID NO: 1185621 - DNA, 15 bp, Homo sapiens
cctcccctatttctg

SEQ ID NO: 1185622 - DNA, 15 bp, Homo sapiens
tcctcccctatttct

SEQ ID NO: 1185623 - DNA, 15 bp, Homo sapiens
atcctcccctatttc

SEQ ID NO: 1185624 - DNA, 15 bp, Homo sapiens
tatcctcccctattt

SEQ ID NO: 1185625 - DNA, 15 bp, Homo sapiens
ctatcctcccctatt

SEQ ID NO: 1185626 - DNA, 15 bp, Homo sapiens
cctatcctcccctat

SEQ ID NO: 1185627 - DNA, 15 bp, Homo sapiens
gcctatcctccccta

SEQ ID NO: 1185628 - DNA, 15 bp, Homo sapiens
tgcctatcctcccct

SEQ ID NO: 1185629 - DNA, 15 bp, Homo sapiens
ttgcctatcctcccc

SEQ ID NO: 1185630 - DNA, 15 bp, Homo sapiens
tttgcctatcctccc

SEQ ID NO: 1185631 - DNA, 15 bp, Homo sapiens
ctttgcctatcctcc

SEQ ID NO: 1185632 - DNA, 15 bp, Homo sapiens
gctttgcctatcctc

SEQ ID NO: 1185633 - DNA, 15 bp, Homo sapiens
ggctttgcctatcct

SEQ ID NO: 1185634 - DNA, 15 bp, Homo sapiens
tggctttgcctatcc

SEQ ID NO: 1185635 - DNA, 15 bp, Homo sapiens
atggctttgcctatc

SEQ ID NO: 1185636 - DNA, 15 bp, Homo sapiens
gatggctttgcctat

SEQ ID NO: 1185637 - DNA, 15 bp, Homo sapiens
tgatggctttgccta

SEQ ID NO: 1185638 - DNA, 15 bp, Homo sapiens
ctgatggctttgcct

SEQ ID NO: 1185639 - DNA, 15 bp, Homo sapiens
tctgatggctttgcc

SEQ ID NO: 1185640 - DNA, 15 bp, Homo sapiens
atctgatggctttgc

SEQ ID NO: 1185641 - DNA, 15 bp, Homo sapiens
aatctgatggctttg

SEQ ID NO: 1185642 - DNA, 15 bp, Homo sapiens
caatctgatggcttt

SEQ ID NO: 1185643 - DNA, 15 bp, Homo sapiens
gcaatctgatggctt

SEQ ID NO: 1185644 - DNA, 15 bp, Homo sapiens
tgcaatctgatggct

SEQ ID NO: 1185645 - DNA, 15 bp, Homo sapiens
ttgcaatctgatggc

SEQ ID NO: 1185646 - DNA, 15 bp, Homo sapiens
cttgcaatctgatgg

SEQ ID NO: 1185647 - DNA, 15 bp, Homo sapiens
ccttgcaatctgatg

SEQ ID NO: 1185648 - DNA, 15 bp, Homo sapiens
gccttgcaatctgat

SEQ ID NO: 1185649 - DNA, 15 bp, Homo sapiens
tgccttgcaatctga

SEQ ID NO: 1185650 - DNA, 15 bp, Homo sapiens
ttgccttgcaatctg

SEQ ID NO: 1185651 - DNA, 15 bp, Homo sapiens
cttgccttgcaatct

SEQ ID NO: 1185652 - DNA, 15 bp, Homo sapiens
gcttgccttgcaatc

SEQ ID NO: 1185653 - DNA, 15 bp, Homo sapiens
ggcttgccttgcaat

SEQ ID NO: 1185654 - DNA, 15 bp, Homo sapiens
aggcttgccttgcaa

SEQ ID NO: 1185655 - DNA, 15 bp, Homo sapiens
taggcttgccttgca

SEQ ID NO: 1185656 - DNA, 15 bp, Homo sapiens
ttaggcttgccttgc

SEQ ID NO: 1185657 - DNA, 15 bp, Homo sapiens
gttaggcttgccttg

SEQ ID NO: 1185658 - DNA, 15 bp, Homo sapiens
ggttaggcttgcctt

SEQ ID NO: 1185659 - DNA, 15 bp, Homo sapiens
gggttaggcttgcct

SEQ ID NO: 1185660 - DNA, 15 bp, Homo sapiens
ggggttaggcttgcc

SEQ ID NO: 1185661 - DNA, 15 bp, Homo sapiens
tggggttaggcttgc

SEQ ID NO: 1185662 - DNA, 15 bp, Homo sapiens
ttggggttaggcttg

SEQ ID NO: 1185663 - DNA, 15 bp, Homo sapiens
cttggggttaggctt

SEQ ID NO: 1185664 - DNA, 15 bp, Homo sapiens
ccttggggttaggct

SEQ ID NO: 1185665 - DNA, 15 bp, Homo sapiens
cccttggggttaggc

SEQ ID NO: 1185666 - DNA, 15 bp, Homo sapiens
tcccttggggttagg

SEQ ID NO: 1185667 - DNA, 15 bp, Homo sapiens
ttcccttggggttag

SEQ ID NO: 1185668 - DNA, 15 bp, Homo sapiens
cttcccttggggtta

SEQ ID NO: 1185669 - DNA, 15 bp, Homo sapiens
ccttcccttggggtt

SEQ ID NO: 1185670 - DNA, 15 bp, Homo sapiens
tccttcccttggggt

SEQ ID NO: 1185671 - DNA, 15 bp, Homo sapiens
ctccttcccttgggg

SEQ ID NO: 1185672 - DNA, 15 bp, Homo sapiens
tctccttcccttggg

SEQ ID NO: 1185673 - DNA, 15 bp, Homo sapiens
ctctccttcccttgg

SEQ ID NO: 1185674 - DNA, 15 bp, Homo sapiens
tctctccttcccttg

SEQ ID NO: 1185675 - DNA, 15 bp, Homo sapiens
ctctctccttccctt

SEQ ID NO: 1185676 - DNA, 15 bp, Homo sapiens
tctctctccttccct

SEQ ID NO: 1185677 - DNA, 15 bp, Homo sapiens
ctctctctccttccc

SEQ ID NO: 1185678 - DNA, 15 bp, Homo sapiens
tctctctctccttcc

SEQ ID NO: 1185679 - DNA, 15 bp, Homo sapiens
ctctctctctccttc

SEQ ID NO: 1185680 - DNA, 15 bp, Homo sapiens
tctctctctctcctt

SEQ ID NO: 1185681 - DNA, 15 bp, Homo sapiens
actctctctctctcc

SEQ ID NO: 1185682 - DNA, 15 bp, Homo sapiens
tactctctctctctc

SEQ ID NO: 1185683 - DNA, 15 bp, Homo sapiens
ctactctctctctct

SEQ ID NO: 1185684 - DNA, 15 bp, Homo sapiens
tctactctctctctc

SEQ ID NO: 1185685 - DNA, 15 bp, Homo sapiens
atctactctctctct

SEQ ID NO: 1185686 - DNA, 15 bp, Homo sapiens
aatctactctctctc

SEQ ID NO: 1185687 - DNA, 15 bp, Homo sapiens
caatctactctctct

SEQ ID NO: 1185688 - DNA, 15 bp, Homo sapiens
ccaatctactctctc

SEQ ID NO: 1185689 - DNA, 15 bp, Homo sapiens
accaatctactctct

SEQ ID NO: 1185690 - DNA, 15 bp, Homo sapiens
aaccaatctactctc

SEQ ID NO: 1185691 - DNA, 15 bp, Homo sapiens
caaccaatctactct

SEQ ID NO: 1185692 - DNA, 15 bp, Homo sapiens
ccaaccaatctactc

SEQ ID NO: 1185693 - DNA, 15 bp, Homo sapiens
tccaaccaatctact

SEQ ID NO: 1185694 - DNA, 15 bp, Homo sapiens
ttccaaccaatctac

SEQ ID NO: 1185695 - DNA, 15 bp, Homo sapiens
tttccaaccaatcta

SEQ ID NO: 1185696 - DNA, 15 bp, Homo sapiens
gtttccaaccaatct

SEQ ID NO: 1185697 - DNA, 15 bp, Homo sapiens
tgtttccaaccaatc

SEQ ID NO: 1185698 - DNA, 15 bp, Homo sapiens
atgtttccaaccaat

SEQ ID NO: 1185699 - DNA, 15 bp, Homo sapiens
aatgtttccaaccaa

SEQ ID NO: 1185700 - DNA, 15 bp, Homo sapiens
aaatgtttccaacca

SEQ ID NO: 1185701 - DNA, 15 bp, Homo sapiens
aaaatgtttccaacc

SEQ ID NO: 1185702 - DNA, 15 bp, Homo sapiens
aaaaatgtttccaac

SEQ ID NO: 1185703 - DNA, 15 bp, Homo sapiens
caaaaatgtttccaa

SEQ ID NO: 1185704 - DNA, 15 bp, Homo sapiens
ccaaaaatgtttcca

SEQ ID NO: 1185705 - DNA, 15 bp, Homo sapiens
accaaaaatgtttcc

SEQ ID NO: 1185706 - DNA, 15 bp, Homo sapiens
caccaaaaatgtttc

SEQ ID NO: 1185707 - DNA, 15 bp, Homo sapiens
ccaccaaaaatgttt

SEQ ID NO: 1185708 - DNA, 15 bp, Homo sapiens
cccaccaaaaatgtt

SEQ ID NO: 1185709 - DNA, 15 bp, Homo sapiens
acccaccaaaaatgt

SEQ ID NO: 1185710 - DNA, 15 bp, Homo sapiens
gacccaccaaaaatg

SEQ ID NO: 1185711 - DNA, 15 bp, Homo sapiens
agacccaccaaaaat

SEQ ID NO: 1185712 - DNA, 15 bp, Homo sapiens
tagacccaccaaaaa

SEQ ID NO: 1185713 - DNA, 15 bp, Homo sapiens
atagacccaccaaaa

SEQ ID NO: 1185714 - DNA, 15 bp, Homo sapiens
catagacccaccaaa

SEQ ID NO: 1185715 - DNA, 15 bp, Homo sapiens
ccatagacccaccaa

SEQ ID NO: 1185716 - DNA, 15 bp, Homo sapiens
accatagacccacca

SEQ ID NO: 1185717 - DNA, 15 bp, Homo sapiens
gaccatagacccacc

SEQ ID NO: 1185718 - DNA, 15 bp, Homo sapiens
agaccatagacccac

SEQ ID NO: 1185719 - DNA, 15 bp, Homo sapiens
tagaccatagaccca

SEQ ID NO: 1185720 - DNA, 15 bp, Homo sapiens
ttagaccatagaccc

SEQ ID NO: 1185721 - DNA, 15 bp, Homo sapiens
cttagaccatagacc

SEQ ID NO: 1185722 - DNA, 15 bp, Homo sapiens
ccttagaccatagac

SEQ ID NO: 1185723 - DNA, 15 bp, Homo sapiens
tccttagaccataga

SEQ ID NO: 1185724 - DNA, 15 bp, Homo sapiens
ttccttagaccatag

SEQ ID NO: 1185725 - DNA, 15 bp, Homo sapiens
tttccttagaccata

SEQ ID NO: 1185726 - DNA, 15 bp, Homo sapiens
ctttccttagaccat

SEQ ID NO: 1185727 - DNA, 15 bp, Homo sapiens
actttccttagacca

SEQ ID NO: 1185728 - DNA, 15 bp, Homo sapiens
aactttccttagacc

SEQ ID NO: 1185729 - DNA, 15 bp, Homo sapiens
gaactttccttagac

SEQ ID NO: 1185730 - DNA, 15 bp, Homo sapiens
tgaactttccttaga

SEQ ID NO: 1185731 - DNA, 15 bp, Homo sapiens
ctgaactttccttag

SEQ ID NO: 1185732 - DNA, 15 bp, Homo sapiens
gctgaactttcctta

SEQ ID NO: 1185733 - DNA, 15 bp, Homo sapiens
tgctgaactttcctt

SEQ ID NO: 1185734 - DNA, 15 bp, Homo sapiens
ttgctgaactttcct

SEQ ID NO: 1185735 - DNA, 15 bp, Homo sapiens
tttgctgaactttcc

SEQ ID NO: 1185736 - DNA, 15 bp, Homo sapiens
ctttgctgaactttc

SEQ ID NO: 1185737 - DNA, 15 bp, Homo sapiens
actttgctgaacttt

SEQ ID NO: 1185738 - DNA, 15 bp, Homo sapiens
gactttgctgaactt

SEQ ID NO: 1185739 - DNA, 15 bp, Homo sapiens
tgactttgctgaact

SEQ ID NO: 1185740 - DNA, 15 bp, Homo sapiens
atgactttgctgaac

SEQ ID NO: 1185741 - DNA, 15 bp, Homo sapiens
gatgactttgctgaa

SEQ ID NO: 1185742 - DNA, 15 bp, Homo sapiens
tgatgactttgctga

SEQ ID NO: 1185743 - DNA, 15 bp, Homo sapiens
atgatgactttgctg

SEQ ID NO: 1185744 - DNA, 15 bp, Homo sapiens
catgatgactttgct

SEQ ID NO: 1185745 - DNA, 15 bp, Homo sapiens
ccatgatgactttgc

SEQ ID NO: 1185746 - DNA, 15 bp, Homo sapiens
tccatgatgactttg

SEQ ID NO: 1185747 - DNA, 15 bp, Homo sapiens
ctccatgatgacttt

SEQ ID NO: 1185748 - DNA, 15 bp, Homo sapiens
actccatgatgactt

SEQ ID NO: 1185749 - DNA, 15 bp, Homo sapiens
aactccatgatgact

SEQ ID NO: 1185750 - DNA, 15 bp, Homo sapiens
aaactccatgatgac

SEQ ID NO: 1185751 - DNA, 15 bp, Homo sapiens
aaaactccatgatga

SEQ ID NO: 1185752 - DNA, 15 bp, Homo sapiens
aaaaactccatgatg

SEQ ID NO: 1185753 - DNA, 15 bp, Homo sapiens
caaaaactccatgat

SEQ ID NO: 1185754 - DNA, 15 bp, Homo sapiens
tcaaaaactccatga

SEQ ID NO: 1185755 - DNA, 15 bp, Homo sapiens
ctcaaaaactccatg

SEQ ID NO: 1185756 - DNA, 15 bp, Homo sapiens
gctcaaaaactccat

SEQ ID NO: 1185757 - DNA, 15 bp, Homo sapiens
ggctcaaaaactcca

SEQ ID NO: 1185758 - DNA, 15 bp, Homo sapiens
tggctcaaaaactcc

SEQ ID NO: 1185759 - DNA, 15 bp, Homo sapiens
ttggctcaaaaactc

SEQ ID NO: 1185760 - DNA, 15 bp, Homo sapiens
tttggctcaaaaact

SEQ ID NO: 1185761 - DNA, 15 bp, Homo sapiens
ctttggctcaaaaac

SEQ ID NO: 1185762 - DNA, 15 bp, Homo sapiens
actttggctcaaaaa

SEQ ID NO: 1185763 - DNA, 15 bp, Homo sapiens
aactttggctcaaaa

SEQ ID NO: 1185764 - DNA, 15 bp, Homo sapiens
caactttggctcaaa

SEQ ID NO: 1185765 - DNA, 15 bp, Homo sapiens
ccaactttggctcaa

SEQ ID NO: 1185766 - DNA, 15 bp, Homo sapiens
cccaactttggctca

SEQ ID NO: 1185767 - DNA, 15 bp, Homo sapiens
gcccaactttggctc

SEQ ID NO: 1185768 - DNA, 15 bp, Homo sapiens
tgcccaactttggct

SEQ ID NO: 1185769 - DNA, 15 bp, Homo sapiens
ttgcccaactttggc

SEQ ID NO: 1185770 - DNA, 15 bp, Homo sapiens
attgcccaactttgg

SEQ ID NO: 1185771 - DNA, 15 bp, Homo sapiens
tattgcccaactttg

SEQ ID NO: 1185772 - DNA, 15 bp, Homo sapiens
gtattgcccaacttt

SEQ ID NO: 1185773 - DNA, 15 bp, Homo sapiens
tgtattgcccaactt

SEQ ID NO: 1185774 - DNA, 15 bp, Homo sapiens
ctgtattgcccaact

SEQ ID NO: 1185775 - DNA, 15 bp, Homo sapiens
actgtattgcccaac

SEQ ID NO: 1185776 - DNA, 15 bp, Homo sapiens
aactgtattgcccaa

SEQ ID NO: 1185777 - DNA, 15 bp, Homo sapiens
caactgtattgccca

SEQ ID NO: 1185778 - DNA, 15 bp, Homo sapiens
gcaactgtattgccc

SEQ ID NO: 1185779 - DNA, 15 bp, Homo sapiens
ggcaactgtattgcc

SEQ ID NO: 1185780 - DNA, 15 bp, Homo sapiens
gggcaactgtattgc

SEQ ID NO: 1185781 - DNA, 15 bp, Homo sapiens
tgggcaactgtattg

SEQ ID NO: 1185782 - DNA, 15 bp, Homo sapiens
ttgggcaactgtatt

SEQ ID NO: 1185783 - DNA, 15 bp, Homo sapiens
gttgggcaactgtat

SEQ ID NO: 1185784 - DNA, 15 bp, Homo sapiens
tgttgggcaactgta

SEQ ID NO: 1185785 - DNA, 15 bp, Homo sapiens
ttgttgggcaactgt

SEQ ID NO: 1185786 - DNA, 15 bp, Homo sapiens
tttgttgggcaactg

SEQ ID NO: 1185787 - DNA, 15 bp, Homo sapiens
atttgttgggcaact

SEQ ID NO: 1185788 - DNA, 15 bp, Homo sapiens
aatttgttgggcaac

SEQ ID NO: 1185789 - DNA, 15 bp, Homo sapiens
aaatttgttgggcaa

SEQ ID NO: 1185790 - DNA, 15 bp, Homo sapiens
gaaatttgttgggca

SEQ ID NO: 1185791 - DNA, 15 bp, Homo sapiens
agaaatttgttgggc

SEQ ID NO: 1185792 - DNA, 15 bp, Homo sapiens
cagaaatttgttggg

SEQ ID NO: 1185793 - DNA, 15 bp, Homo sapiens
acagaaatttgttgg

SEQ ID NO: 1185794 - DNA, 15 bp, Homo sapiens
cacagaaatttgttg

SEQ ID NO: 1185795 - DNA, 15 bp, Homo sapiens
acacagaaatttgtt

SEQ ID NO: 1185796 - DNA, 15 bp, Homo sapiens
aacacagaaatttgt

SEQ ID NO: 1185797 - DNA, 15 bp, Homo sapiens
aaacacagaaatttg

SEQ ID NO: 1185798 - DNA, 15 bp, Homo sapiens
gaaacacagaaattt

SEQ ID NO: 1185799 - DNA, 15 bp, Homo sapiens
agaaacacagaaatt

SEQ ID NO: 1185800 - DNA, 15 bp, Homo sapiens
gagaaacacagaaat

SEQ ID NO: 1185801 - DNA, 15 bp, Homo sapiens
tgagaaacacagaaa

SEQ ID NO: 1185802 - DNA, 15 bp, Homo sapiens
ctgagaaacacagaa

SEQ ID NO: 1185803 - DNA, 15 bp, Homo sapiens
tctgagaaacacaga

SEQ ID NO: 1185804 - DNA, 15 bp, Homo sapiens
ttctgagaaacacag

SEQ ID NO: 1185805 - DNA, 15 bp, Homo sapiens
tttctgagaaacaca

SEQ ID NO: 1185806 - DNA, 15 bp, Homo sapiens
atttctgagaaacac

SEQ ID NO: 1185807 - DNA, 15 bp, Homo sapiens
tatttctgagaaaca

SEQ ID NO: 1185808 - DNA, 15 bp, Homo sapiens
ctatttctgagaaac

SEQ ID NO: 1185809 - DNA, 15 bp, Homo sapiens
cctatttctgagaaa

SEQ ID NO: 1185810 - DNA, 15 bp, Homo sapiens
acctatttctgagaa

SEQ ID NO: 1185811 - DNA, 15 bp, Homo sapiens
gacctatttctgaga

SEQ ID NO: 1185812 - DNA, 15 bp, Homo sapiens
agacctatttctgag

SEQ ID NO: 1185813 - DNA, 15 bp, Homo sapiens
cagacctatttctga

SEQ ID NO: 1185814 - DNA, 15 bp, Homo sapiens
gcagacctatttctg

SEQ ID NO: 1185815 - DNA, 15 bp, Homo sapiens
ggcagacctatttct

SEQ ID NO: 1185816 - DNA, 15 bp, Homo sapiens
aggcagacctatttc

SEQ ID NO: 1185817 - DNA, 15 bp, Homo sapiens
gaggcagacctattt

SEQ ID NO: 1185818 - DNA, 15 bp, Homo sapiens
tgaggcagacctatt

SEQ ID NO: 1185819 - DNA, 15 bp, Homo sapiens
ttgaggcagacctat

SEQ ID NO: 1185820 - DNA, 15 bp, Homo sapiens
attgaggcagaccta

SEQ ID NO: 1185821 - DNA, 15 bp, Homo sapiens
cattgaggcagacct

SEQ ID NO: 1185822 - DNA, 15 bp, Homo sapiens
acattgaggcagacc

SEQ ID NO: 1185823 - DNA, 15 bp, Homo sapiens
gacattgaggcagac

SEQ ID NO: 1185824 - DNA, 15 bp, Homo sapiens
ggacattgaggcaga

SEQ ID NO: 1185825 - DNA, 15 bp, Homo sapiens
gggacattgaggcag

SEQ ID NO: 1185826 - DNA, 15 bp, Homo sapiens
ggggacattgaggca

SEQ ID NO: 1185827 - DNA, 15 bp, Homo sapiens
tggggacattgaggc

SEQ ID NO: 1185828 - DNA, 15 bp, Homo sapiens
gtggggacattgagg

SEQ ID NO: 1185829 - DNA, 15 bp, Homo sapiens
ggtggggacattgag

SEQ ID NO: 1185830 - DNA, 15 bp, Homo sapiens
tggtggggacattga

SEQ ID NO: 1185831 - DNA, 15 bp, Homo sapiens
atggtggggacattg

SEQ ID NO: 1185832 - DNA, 15 bp, Homo sapiens
tatggtggggacatt

SEQ ID NO: 1185833 - DNA, 15 bp, Homo sapiens
gtatggtggggacat

SEQ ID NO: 1185834 - DNA, 15 bp, Homo sapiens
agtatggtggggaca

SEQ ID NO: 1185835 - DNA, 15 bp, Homo sapiens
aagtatggtggggac

SEQ ID NO: 1185836 - DNA, 15 bp, Homo sapiens
caagtatggtgggga

SEQ ID NO: 1185837 - DNA, 15 bp, Homo sapiens
ccaagtatggtgggg

SEQ ID NO: 1185838 - DNA, 15 bp, Homo sapiens
accaagtatggtggg

SEQ ID NO: 1185839 - DNA, 15 bp, Homo sapiens
gaccaagtatggtgg

SEQ ID NO: 1185840 - DNA, 15 bp, Homo sapiens
tgaccaagtatggtg

SEQ ID NO: 1185841 - DNA, 15 bp, Homo sapiens
gtgaccaagtatggt

SEQ ID NO: 1185842 - DNA, 15 bp, Homo sapiens
agtgaccaagtatgg

SEQ ID NO: 1185843 - DNA, 15 bp, Homo sapiens
cagtgaccaagtatg

SEQ ID NO: 1185844 - DNA, 15 bp, Homo sapiens
ccagtgaccaagtat

SEQ ID NO: 1185845 - DNA, 15 bp, Homo sapiens
gccagtgaccaagta

SEQ ID NO: 1185846 - DNA, 15 bp, Homo sapiens
agccagtgaccaagt

SEQ ID NO: 1185847 - DNA, 15 bp, Homo sapiens
gagccagtgaccaag

SEQ ID NO: 1185848 - DNA, 15 bp, Homo sapiens
agagccagtgaccaa

SEQ ID NO: 1185849 - DNA, 15 bp, Homo sapiens
aagagccagtgacca

SEQ ID NO: 1185850 - DNA, 15 bp, Homo sapiens
caagagccagtgacc

SEQ ID NO: 1185851 - DNA, 15 bp, Homo sapiens
ccaagagccagtgac

SEQ ID NO: 1185852 - DNA, 15 bp, Homo sapiens
cccaagagccagtga

SEQ ID NO: 1185853 - DNA, 15 bp, Homo sapiens
tcccaagagccagtg

SEQ ID NO: 1185854 - DNA, 15 bp, Homo sapiens
ctcccaagagccagt

SEQ ID NO: 1185855 - DNA, 15 bp, Homo sapiens
cctcccaagagccag

SEQ ID NO: 1185856 - DNA, 15 bp, Homo sapiens
ccctcccaagagcca

SEQ ID NO: 1185857 - DNA, 15 bp, Homo sapiens
cccctcccaagagcc

SEQ ID NO: 1185858 - DNA, 15 bp, Homo sapiens
gcccctcccaagagc

SEQ ID NO: 1185859 - DNA, 15 bp, Homo sapiens
ggcccctcccaagag

SEQ ID NO: 1185860 - DNA, 15 bp, Homo sapiens
aggcccctcccaaga

SEQ ID NO: 1185861 - DNA, 15 bp, Homo sapiens
caggcccctcccaag

SEQ ID NO: 1185862 - DNA, 15 bp, Homo sapiens
gcaggcccctcccaa

SEQ ID NO: 1185863 - DNA, 15 bp, Homo sapiens
ggcaggcccctccca

SEQ ID NO: 1185864 - DNA, 15 bp, Homo sapiens
gggcaggcccctccc

SEQ ID NO: 1185865 - DNA, 15 bp, Homo sapiens
agggcaggcccctcc

SEQ ID NO: 1185866 - DNA, 15 bp, Homo sapiens
cagggcaggcccctc

SEQ ID NO: 1185867 - DNA, 15 bp, Homo sapiens
acagggcaggcccct

SEQ ID NO: 1185868 - DNA, 15 bp, Homo sapiens
aacagggcaggcccc

SEQ ID NO: 1185869 - DNA, 15 bp, Homo sapiens
gaacagggcaggccc

SEQ ID NO: 1185870 - DNA, 15 bp, Homo sapiens
ggaacagggcaggcc

SEQ ID NO: 1185871 - DNA, 15 bp, Homo sapiens
tggaacagggcaggc

SEQ ID NO: 1185872 - DNA, 15 bp, Homo sapiens
ttggaacagggcagg

SEQ ID NO: 1185873 - DNA, 15 bp, Homo sapiens
attggaacagggcag

SEQ ID NO: 1185874 - DNA, 15 bp, Homo sapiens
gattggaacagggca

SEQ ID NO: 1185875 - DNA, 15 bp, Homo sapiens
ggattggaacagggc

SEQ ID NO: 1185876 - DNA, 15 bp, Homo sapiens
tggattggaacaggg

SEQ ID NO: 1185877 - DNA, 15 bp, Homo sapiens
gtggattggaacagg

SEQ ID NO: 1185878 - DNA, 15 bp, Homo sapiens
agtggattggaacag

SEQ ID NO: 1185879 - DNA, 15 bp, Homo sapiens
tagtggattggaaca

SEQ ID NO: 1185880 - DNA, 15 bp, Homo sapiens
ctagtggattggaac

SEQ ID NO: 1185881 - DNA, 15 bp, Homo sapiens
tctagtggattggaa

SEQ ID NO: 1185882 - DNA, 15 bp, Homo sapiens
ctctagtggattgga

SEQ ID NO: 1185883 - DNA, 15 bp, Homo sapiens
gctctagtggattgg

SEQ ID NO: 1185884 - DNA, 15 bp, Homo sapiens
ggctctagtggattg

SEQ ID NO: 1185885 - DNA, 15 bp, Homo sapiens
tggctctagtggatt

SEQ ID NO: 1185886 - DNA, 15 bp, Homo sapiens
ttggctctagtggat

SEQ ID NO: 1185887 - DNA, 15 bp, Homo sapiens
tttggctctagtgga

SEQ ID NO: 1185888 - DNA, 15 bp, Homo sapiens
ctttggctctagtgg

SEQ ID NO: 1185889 - DNA, 15 bp, Homo sapiens
tctttggctctagtg

SEQ ID NO: 1185890 - DNA, 15 bp, Homo sapiens
ttctttggctctagt

SEQ ID NO: 1185891 - DNA, 15 bp, Homo sapiens
cttctttggctctag

SEQ ID NO: 1185892 - DNA, 15 bp, Homo sapiens
tcttctttggctcta

SEQ ID NO: 1185893 - DNA, 15 bp, Homo sapiens
ctcttctttggctct

SEQ ID NO: 1185894 - DNA, 15 bp, Homo sapiens
gctcttctttggctc

SEQ ID NO: 1185895 - DNA, 15 bp, Homo sapiens
ggctcttctttggct

SEQ ID NO: 1185896 - DNA, 15 bp, Homo sapiens
cggctcttctttggc

SEQ ID NO: 1185897 - DNA, 15 bp, Homo sapiens
acggctcttctttgg

SEQ ID NO: 1185898 - DNA, 15 bp, Homo sapiens
aacggctcttctttg

SEQ ID NO: 1185899 - DNA, 15 bp, Homo sapiens
caacggctcttcttt

SEQ ID NO: 1185900 - DNA, 15 bp, Homo sapiens
acaacggctcttctt

SEQ ID NO: 1185901 - DNA, 15 bp, Homo sapiens
tacaacggctcttct

SEQ ID NO: 1185902 - DNA, 15 bp, Homo sapiens
gtacaacggctcttc

SEQ ID NO: 1185903 - DNA, 15 bp, Homo sapiens
agtacaacggctctt

SEQ ID NO: 1185904 - DNA, 15 bp, Homo sapiens
cagtacaacggctct

SEQ ID NO: 1185905 - DNA, 15 bp, Homo sapiens
ccagtacaacggctc

SEQ ID NO: 1185906 - DNA, 15 bp, Homo sapiens
gccagtacaacggct

SEQ ID NO: 1185907 - DNA, 15 bp, Homo sapiens
tgccagtacaacggc

SEQ ID NO: 1185908 - DNA, 15 bp, Homo sapiens
ctgccagtacaacgg

SEQ ID NO: 1185909 - DNA, 15 bp, Homo sapiens
cctgccagtacaacg

SEQ ID NO: 1185910 - DNA, 15 bp, Homo sapiens
ccctgccagtacaac

SEQ ID NO: 1185911 - DNA, 15 bp, Homo sapiens
cccctgccagtacaa

SEQ ID NO: 1185912 - DNA, 15 bp, Homo sapiens
ccccctgccagtaca

SEQ ID NO: 1185913 - DNA, 15 bp, Homo sapiens
accccctgccagtac

SEQ ID NO: 1185914 - DNA, 15 bp, Homo sapiens
caccccctgccagta

SEQ ID NO: 1185915 - DNA, 15 bp, Homo sapiens
ccaccccctgccagt

SEQ ID NO: 1185916 - DNA, 15 bp, Homo sapiens
cccaccccctgccag

SEQ ID NO: 1185917 - DNA, 15 bp, Homo sapiens
cccccaccccctgcc

SEQ ID NO: 1185918 - DNA, 15 bp, Homo sapiens
attcccccaccccct

SEQ ID NO: 1185919 - DNA, 15 bp, Homo sapiens
aattcccccaccccc

SEQ ID NO: 1185920 - DNA, 15 bp, Homo sapiens
gaattcccccacccc

SEQ ID NO: 1185921 - DNA, 15 bp, Homo sapiens
ggaattcccccaccc

SEQ ID NO: 1185922 - DNA, 15 bp, Homo sapiens
aggaattcccccacc

SEQ ID NO: 1185923 - DNA, 15 bp, Homo sapiens
taggaattcccccac

SEQ ID NO: 1185924 - DNA, 15 bp, Homo sapiens
gtaggaattccccca

SEQ ID NO: 1185925 - DNA, 15 bp, Homo sapiens
tgtaggaattccccc

SEQ ID NO: 1185926 - DNA, 15 bp, Homo sapiens
ttgtaggaattcccc

SEQ ID NO: 1185927 - DNA, 15 bp, Homo sapiens
gttgtaggaattccc

SEQ ID NO: 1185928 - DNA, 15 bp, Homo sapiens
ggttgtaggaattcc

SEQ ID NO: 1185929 - DNA, 15 bp, Homo sapiens
tggttgtaggaattc

SEQ ID NO: 1185930 - DNA, 15 bp, Homo sapiens
gtggttgtaggaatt

SEQ ID NO: 1185931 - DNA, 15 bp, Homo sapiens
tgtggttgtaggaat

SEQ ID NO: 1185932 - DNA, 15 bp, Homo sapiens
atgtggttgtaggaa

SEQ ID NO: 1185933 - DNA, 15 bp, Homo sapiens
tatgtggttgtagga

SEQ ID NO: 1185934 - DNA, 15 bp, Homo sapiens
ttatgtggttgtagg

SEQ ID NO: 1185935 - DNA, 15 bp, Homo sapiens
tttatgtggttgtag

SEQ ID NO: 1185936 - DNA, 15 bp, Homo sapiens
ttttatgtggttgta

SEQ ID NO: 1185937 - DNA, 15 bp, Homo sapiens
tttttatgtggttgt

SEQ ID NO: 1185938 - DNA, 15 bp, Homo sapiens
ctttttatgtggttg

SEQ ID NO: 1185939 - DNA, 15 bp, Homo sapiens
actttttatgtggtt

SEQ ID NO: 1185940 - DNA, 15 bp, Homo sapiens
cactttttatgtggt

SEQ ID NO: 1185941 - DNA, 15 bp, Homo sapiens
ccactttttatgtgg

SEQ ID NO: 1185942 - DNA, 15 bp, Homo sapiens
cccactttttatgtg

SEQ ID NO: 1185943 - DNA, 15 bp, Homo sapiens
ccccactttttatgt

SEQ ID NO: 1185944 - DNA, 15 bp, Homo sapiens
accccactttttatg

SEQ ID NO: 1185945 - DNA, 15 bp, Homo sapiens
caccccactttttat

SEQ ID NO: 1185946 - DNA, 15 bp, Homo sapiens
tcaccccacttttta

SEQ ID NO: 1185947 - DNA, 15 bp, Homo sapiens
ctcaccccacttttt

SEQ ID NO: 1185948 - DNA, 15 bp, Homo sapiens
cctcaccccactttt

SEQ ID NO: 1185949 - DNA, 15 bp, Homo sapiens
acctcaccccacttt

SEQ ID NO: 1185950 - DNA, 15 bp, Homo sapiens
aacctcaccccactt

SEQ ID NO: 1185951 - DNA, 15 bp, Homo sapiens
aaacctcaccccact

SEQ ID NO: 1185952 - DNA, 15 bp, Homo sapiens
gaaacctcaccccac

SEQ ID NO: 1185953 - DNA, 15 bp, Homo sapiens
ggaaacctcacccca

SEQ ID NO: 1185954 - DNA, 15 bp, Homo sapiens
tggaaacctcacccc

SEQ ID NO: 1185955 - DNA, 15 bp, Homo sapiens
ctggaaacctcaccc

SEQ ID NO: 1185956 - DNA, 15 bp, Homo sapiens
tctggaaacctcacc

SEQ ID NO: 1185957 - DNA, 15 bp, Homo sapiens
ttctggaaacctcac

SEQ ID NO: 1185958 - DNA, 15 bp, Homo sapiens
tttctggaaacctca

SEQ ID NO: 1185959 - DNA, 15 bp, Homo sapiens
ttttctggaaacctc

SEQ ID NO: 1185960 - DNA, 15 bp, Homo sapiens
tttttctggaaacct

SEQ ID NO: 1185961 - DNA, 15 bp, Homo sapiens
ttttttctggaaacc

SEQ ID NO: 1185962 - DNA, 15 bp, Homo sapiens
tttttttctggaaac

SEQ ID NO: 1185963 - DNA, 15 bp, Homo sapiens
gtttttttctggaaa

SEQ ID NO: 1185964 - DNA, 15 bp, Homo sapiens
cgtttttttctggaa

SEQ ID NO: 1185965 - DNA, 15 bp, Homo sapiens
acgtttttttctgga

SEQ ID NO: 1185966 - DNA, 15 bp, Homo sapiens
cacgtttttttctgg

SEQ ID NO: 1185967 - DNA, 15 bp, Homo sapiens
tcacgtttttttctg

SEQ ID NO: 1185968 - DNA, 15 bp, Homo sapiens
atcacgtttttttct

SEQ ID NO: 1185969 - DNA, 15 bp, Homo sapiens
catcacgtttttttc

SEQ ID NO: 1185970 - DNA, 15 bp, Homo sapiens
gcatcacgttttttt

SEQ ID NO: 1185971 - DNA, 15 bp, Homo sapiens
agcatcacgtttttt

SEQ ID NO: 1185972 - DNA, 15 bp, Homo sapiens
cagcatcacgttttt

SEQ ID NO: 1185973 - DNA, 15 bp, Homo sapiens
ccagcatcacgtttt

SEQ ID NO: 1185974 - DNA, 15 bp, Homo sapiens
cccagcatcacgttt

SEQ ID NO: 1185975 - DNA, 15 bp, Homo sapiens
gcccagcatcacgtt

SEQ ID NO: 1185976 - DNA, 15 bp, Homo sapiens
agcccagcatcacgt

SEQ ID NO: 1185977 - DNA, 15 bp, Homo sapiens
tagcccagcatcacg

SEQ ID NO: 1185978 - DNA, 15 bp, Homo sapiens
ttagcccagcatcac

SEQ ID NO: 1185979 - DNA, 15 bp, Homo sapiens
gttagcccagcatca

SEQ ID NO: 1185980 - DNA, 15 bp, Homo sapiens
ggttagcccagcatc

SEQ ID NO: 1185981 - DNA, 15 bp, Homo sapiens
tggttagcccagcat

SEQ ID NO: 1185982 - DNA, 15 bp, Homo sapiens
ttggttagcccagca

SEQ ID NO: 1185983 - DNA, 15 bp, Homo sapiens
tttggttagcccagc

SEQ ID NO: 1185984 - DNA, 15 bp, Homo sapiens
ttttggttagcccag

SEQ ID NO: 1185985 - DNA, 15 bp, Homo sapiens
gttttggttagccca

SEQ ID NO: 1185986 - DNA, 15 bp, Homo sapiens
agttttggttagccc

SEQ ID NO: 1185987 - DNA, 15 bp, Homo sapiens
cagttttggttagcc

SEQ ID NO: 1185988 - DNA, 15 bp, Homo sapiens
acagttttggttagc

SEQ ID NO: 1185989 - DNA, 15 bp, Homo sapiens
cacagttttggttag

SEQ ID NO: 1185990 - DNA, 15 bp, Homo sapiens
acacagttttggtta

SEQ ID NO: 1185991 - DNA, 15 bp, Homo sapiens
gacacagttttggtt

SEQ ID NO: 1185992 - DNA, 15 bp, Homo sapiens
ggacacagttttggt

SEQ ID NO: 1185993 - DNA, 15 bp, Homo sapiens
tggacacagttttgg

SEQ ID NO: 1185994 - DNA, 15 bp, Homo sapiens
ctggacacagttttg

SEQ ID NO: 1185995 - DNA, 15 bp, Homo sapiens
actggacacagtttt

SEQ ID NO: 1185996 - DNA, 15 bp, Homo sapiens
tactggacacagttt

SEQ ID NO: 1185997 - DNA, 15 bp, Homo sapiens
ttactggacacagtt

SEQ ID NO: 1185998 - DNA, 15 bp, Homo sapiens
cttactggacacagt

SEQ ID NO: 1185999 - DNA, 15 bp, Homo sapiens
acttactggacacag

SEQ ID NO: 1186000 - DNA, 15 bp, Homo sapiens
tacttactggacaca

SEQ ID NO: 1186001 - DNA, 15 bp, Homo sapiens
gtacttactggacac

SEQ ID NO: 1186002 - DNA, 15 bp, Homo sapiens
tgtacttactggaca

SEQ ID NO: 1186003 - DNA, 15 bp, Homo sapiens
atgtacttactggac

SEQ ID NO: 1186004 - DNA, 15 bp, Homo sapiens
tatgtacttactgga

SEQ ID NO: 1186005 - DNA, 15 bp, Homo sapiens
atatgtacttactgg

SEQ ID NO: 1186006 - DNA, 15 bp, Homo sapiens
gatatgtacttactg

SEQ ID NO: 1186007 - DNA, 15 bp, Homo sapiens
ggatatgtacttact

SEQ ID NO: 1186008 - DNA, 15 bp, Homo sapiens
gggatatgtacttac

SEQ ID NO: 1186009 - DNA, 15 bp, Homo sapiens
agggatatgtactta

SEQ ID NO: 1186010 - DNA, 15 bp, Homo sapiens
gagggatatgtactt

SEQ ID NO: 1186011 - DNA, 15 bp, Homo sapiens
tgagggatatgtact

SEQ ID NO: 1186012 - DNA, 15 bp, Homo sapiens
gtgagggatatgtac

SEQ ID NO: 1186013 - DNA, 15 bp, Homo sapiens
agtgagggatatgta

SEQ ID NO: 1186014 - DNA, 15 bp, Homo sapiens
gagtgagggatatgt

SEQ ID NO: 1186015 - DNA, 15 bp, Homo sapiens
agagtgagggatatg

SEQ ID NO: 1186016 - DNA, 15 bp, Homo sapiens
cagagtgagggatat

SEQ ID NO: 1186017 - DNA, 15 bp, Homo sapiens
acagagtgagggata

SEQ ID NO: 1186018 - DNA, 15 bp, Homo sapiens
aacagagtgagggat

SEQ ID NO: 1186019 - DNA, 15 bp, Homo sapiens
taacagagtgaggga

SEQ ID NO: 1186020 - DNA, 15 bp, Homo sapiens
ttaacagagtgaggg

SEQ ID NO: 1186021 - DNA, 15 bp, Homo sapiens
tttaacagagtgagg

SEQ ID NO: 1186022 - DNA, 15 bp, Homo sapiens
ctttaacagagtgag

SEQ ID NO: 1186023 - DNA, 15 bp, Homo sapiens
tctttaacagagtga

SEQ ID NO: 1186024 - DNA, 15 bp, Homo sapiens
ttctttaacagagtg

SEQ ID NO: 1186025 - DNA, 15 bp, Homo sapiens
cttctttaacagagt

SEQ ID NO: 1186026 - DNA, 15 bp, Homo sapiens
gcttctttaacagag

SEQ ID NO: 1186027 - DNA, 15 bp, Homo sapiens
tgcttctttaacaga

SEQ ID NO: 1186028 - DNA, 15 bp, Homo sapiens
ctgcttctttaacag

SEQ ID NO: 1186029 - DNA, 15 bp, Homo sapiens
gctgcttctttaaca

SEQ ID NO: 1186030 - DNA, 15 bp, Homo sapiens
ggctgcttctttaac

SEQ ID NO: 1186031 - DNA, 15 bp, Homo sapiens
tggctgcttctttaa

SEQ ID NO: 1186032 - DNA, 15 bp, Homo sapiens
gtggctgcttcttta

SEQ ID NO: 1186033 - DNA, 15 bp, Homo sapiens
tgtggctgcttcttt

SEQ ID NO: 1186034 - DNA, 15 bp, Homo sapiens
atgtggctgcttctt

SEQ ID NO: 1186035 - DNA, 15 bp, Homo sapiens
tatgtggctgcttct

SEQ ID NO: 1186036 - DNA, 15 bp, Homo sapiens
ttatgtggctgcttc

SEQ ID NO: 1186037 - DNA, 15 bp, Homo sapiens
tttatgtggctgctt

SEQ ID NO: 1186038 - DNA, 15 bp, Homo sapiens
gtttatgtggctgct

SEQ ID NO: 1186039 - DNA, 15 bp, Homo sapiens
tgtttatgtggctgc

SEQ ID NO: 1186040 - DNA, 15 bp, Homo sapiens
ttgtttatgtggctg

SEQ ID NO: 1186041 - DNA, 15 bp, Homo sapiens
cttgtttatgtggct

SEQ ID NO: 1186042 - DNA, 15 bp, Homo sapiens
ccttgtttatgtggc

SEQ ID NO: 1186043 - DNA, 15 bp, Homo sapiens
tccttgtttatgtgg

SEQ ID NO: 1186044 - DNA, 15 bp, Homo sapiens
ctccttgtttatgtg

SEQ ID NO: 1186045 - DNA, 15 bp, Homo sapiens
actccttgtttatgt

SEQ ID NO: 1186046 - DNA, 15 bp, Homo sapiens
tactccttgtttatg

SEQ ID NO: 1186047 - DNA, 15 bp, Homo sapiens
gtactccttgtttat

SEQ ID NO: 1186048 - DNA, 15 bp, Homo sapiens
tgtactccttgttta

SEQ ID NO: 1186049 - DNA, 15 bp, Homo sapiens
gtgtactccttgttt

SEQ ID NO: 1186050 - DNA, 15 bp, Homo sapiens
cgtgtactccttgtt

SEQ ID NO: 1186051 - DNA, 15 bp, Homo sapiens
acgtgtactccttgt

SEQ ID NO: 1186052 - DNA, 15 bp, Homo sapiens
aacgtgtactccttg

SEQ ID NO: 1186053 - DNA, 15 bp, Homo sapiens
aaacgtgtactcctt

SEQ ID NO: 1186054 - DNA, 15 bp, Homo sapiens
gaaacgtgtactcct

SEQ ID NO: 1186055 - DNA, 15 bp, Homo sapiens
agaaacgtgtactcc

SEQ ID NO: 1186056 - DNA, 15 bp, Homo sapiens
gagaaacgtgtactc

SEQ ID NO: 1186057 - DNA, 15 bp, Homo sapiens
tgagaaacgtgtact

SEQ ID NO: 1186058 - DNA, 15 bp, Homo sapiens
ttgagaaacgtgtac

SEQ ID NO: 1186059 - DNA, 15 bp, Homo sapiens
tttgagaaacgtgta

SEQ ID NO: 1186060 - DNA, 15 bp, Homo sapiens
ttttgagaaacgtgt

SEQ ID NO: 1186061 - DNA, 15 bp, Homo sapiens
attttgagaaacgtg

SEQ ID NO: 1186062 - DNA, 15 bp, Homo sapiens
cattttgagaaacgt

SEQ ID NO: 1186063 - DNA, 15 bp, Homo sapiens
acattttgagaaacg

SEQ ID NO: 1186064 - DNA, 15 bp, Homo sapiens
cacattttgagaaac

SEQ ID NO: 1186065 - DNA, 15 bp, Homo sapiens
gcacattttgagaaa

SEQ ID NO: 1186066 - DNA, 15 bp, Homo sapiens
tgcacattttgagaa

SEQ ID NO: 1186067 - DNA, 15 bp, Homo sapiens
gtgcacattttgaga

SEQ ID NO: 1186068 - DNA, 15 bp, Homo sapiens
ggtgcacattttgag

SEQ ID NO: 1186069 - DNA, 15 bp, Homo sapiens
aggtgcacattttga

SEQ ID NO: 1186070 - DNA, 15 bp, Homo sapiens
aaggtgcacattttg

SEQ ID NO: 1186071 - DNA, 15 bp, Homo sapiens
caaggtgcacatttt

SEQ ID NO: 1186072 - DNA, 15 bp, Homo sapiens
acaaggtgcacattt

SEQ ID NO: 1186073 - DNA, 15 bp, Homo sapiens
aacaaggtgcacatt

SEQ ID NO: 1186074 - DNA, 15 bp, Homo sapiens
gaacaaggtgcacat

SEQ ID NO: 1186075 - DNA, 15 bp, Homo sapiens
agaacaaggtgcaca

SEQ ID NO: 1186076 - DNA, 15 bp, Homo sapiens
aagaacaaggtgcac

SEQ ID NO: 1186077 - DNA, 15 bp, Homo sapiens
aaagaacaaggtgca

SEQ ID NO: 1186078 - DNA, 15 bp, Homo sapiens
caaagaacaaggtgc

SEQ ID NO: 1186079 - DNA, 15 bp, Homo sapiens
ccaaagaacaaggtg

SEQ ID NO: 1186080 - DNA, 15 bp, Homo sapiens
accaaagaacaaggt

SEQ ID NO: 1186081 - DNA, 15 bp, Homo sapiens
aaccaaagaacaagg

SEQ ID NO: 1186082 - DNA, 15 bp, Homo sapiens
aaaccaaagaacaag

SEQ ID NO: 1186083 - DNA, 15 bp, Homo sapiens
aaaaccaaagaacaa

SEQ ID NO: 1186084 - DNA, 15 bp, Homo sapiens
caaaaccaaagaaca

SEQ ID NO: 1186085 - DNA, 15 bp, Homo sapiens
tcaaaaccaaagaac

SEQ ID NO: 1186086 - DNA, 15 bp, Homo sapiens
ttcaaaaccaaagaa

SEQ ID NO: 1186087 - DNA, 15 bp, Homo sapiens
cttcaaaaccaaaga

SEQ ID NO: 1186088 - DNA, 15 bp, Homo sapiens
acttcaaaaccaaag

SEQ ID NO: 1186089 - DNA, 15 bp, Homo sapiens
gacttcaaaaccaaa

SEQ ID NO: 1186090 - DNA, 15 bp, Homo sapiens
tgacttcaaaaccaa

SEQ ID NO: 1186091 - DNA, 15 bp, Homo sapiens
gtgacttcaaaacca

SEQ ID NO: 1186092 - DNA, 15 bp, Homo sapiens
tgtgacttcaaaacc

SEQ ID NO: 1186093 - DNA, 15 bp, Homo sapiens
atgtgacttcaaaac

SEQ ID NO: 1186094 - DNA, 15 bp, Homo sapiens
gatgtgacttcaaaa

SEQ ID NO: 1186095 - DNA, 15 bp, Homo sapiens
ggatgtgacttcaaa

SEQ ID NO: 1186096 - DNA, 15 bp, Homo sapiens
gggatgtgacttcaa

SEQ ID NO: 1186097 - DNA, 15 bp, Homo sapiens
tgggatgtgacttca

SEQ ID NO: 1186098 - DNA, 15 bp, Homo sapiens
ttgggatgtgacttc

SEQ ID NO: 1186099 - DNA, 15 bp, Homo sapiens
tttgggatgtgactt

SEQ ID NO: 1186100 - DNA, 15 bp, Homo sapiens
ctttgggatgtgact

SEQ ID NO: 1186101 - DNA, 15 bp, Homo sapiens
actttgggatgtgac

SEQ ID NO: 1186102 - DNA, 15 bp, Homo sapiens
cactttgggatgtga

SEQ ID NO: 1186103 - DNA, 15 bp, Homo sapiens
gcactttgggatgtg

SEQ ID NO: 1186104 - DNA, 15 bp, Homo sapiens
agcactttgggatgt

SEQ ID NO: 1186105 - DNA, 15 bp, Homo sapiens
cagcactttgggatg

SEQ ID NO: 1186106 - DNA, 15 bp, Homo sapiens
tcagcactttgggat

SEQ ID NO: 1186107 - DNA, 15 bp, Homo sapiens
actcagcactttggg

SEQ ID NO: 1186108 - DNA, 15 bp, Homo sapiens
tactcagcactttgg

SEQ ID NO: 1186109 - DNA, 15 bp, Homo sapiens
ctactcagcactttg

SEQ ID NO: 1186110 - DNA, 15 bp, Homo sapiens
tctactcagcacttt

SEQ ID NO: 1186111 - DNA, 15 bp, Homo sapiens
atctactcagcactt

SEQ ID NO: 1186112 - DNA, 15 bp, Homo sapiens
gatctactcagcact

SEQ ID NO: 1186113 - DNA, 15 bp, Homo sapiens
cgatctactcagcac

SEQ ID NO: 1186114 - DNA, 15 bp, Homo sapiens
gcgatctactcagca

SEQ ID NO: 1186115 - DNA, 15 bp, Homo sapiens
tgcgatctactcagc

SEQ ID NO: 1186116 - DNA, 15 bp, Homo sapiens
atgcgatctactcag

SEQ ID NO: 1186117 - DNA, 15 bp, Homo sapiens
catgcgatctactca

SEQ ID NO: 1186118 - DNA, 15 bp, Homo sapiens
tcatgcgatctactc

SEQ ID NO: 1186119 - DNA, 15 bp, Homo sapiens
gtcatgcgatctact

SEQ ID NO: 1186120 - DNA, 15 bp, Homo sapiens
ggtcatgcgatctac

SEQ ID NO: 1186121 - DNA, 15 bp, Homo sapiens
gggtcatgcgatcta

SEQ ID NO: 1186122 - DNA, 15 bp, Homo sapiens
agggtcatgcgatct

SEQ ID NO: 1186123 - DNA, 15 bp, Homo sapiens
gagggtcatgcgatc

SEQ ID NO: 1186124 - DNA, 15 bp, Homo sapiens
cgagggtcatgcgat

SEQ ID NO: 1186125 - DNA, 15 bp, Homo sapiens
gcgagggtcatgcga

SEQ ID NO: 1186126 - DNA, 15 bp, Homo sapiens
agcgagggtcatgcg

SEQ ID NO: 1186127 - DNA, 15 bp, Homo sapiens
aagcgagggtcatgc

SEQ ID NO: 1186128 - DNA, 15 bp, Homo sapiens
aaagcgagggtcatg

SEQ ID NO: 1186129 - DNA, 15 bp, Homo sapiens
caaagcgagggtcat

SEQ ID NO: 1186130 - DNA, 15 bp, Homo sapiens
gcaaagcgagggtca

SEQ ID NO: 1186131 - DNA, 15 bp, Homo sapiens
ggcaaagcgagggtc

SEQ ID NO: 1186132 - DNA, 15 bp, Homo sapiens
aggcaaagcgagggt

SEQ ID NO: 1186133 - DNA, 15 bp, Homo sapiens
caggcaaagcgaggg

SEQ ID NO: 1186134 - DNA, 15 bp, Homo sapiens
ccaggcaaagcgagg

SEQ ID NO: 1186135 - DNA, 15 bp, Homo sapiens
gccaggcaaagcgag

SEQ ID NO: 1186136 - DNA, 15 bp, Homo sapiens
agccaggcaaagcga

SEQ ID NO: 1186137 - DNA, 15 bp, Homo sapiens
cagccaggcaaagcg

SEQ ID NO: 1186138 - DNA, 15 bp, Homo sapiens
gcagccaggcaaagc

SEQ ID NO: 1186139 - DNA, 15 bp, Homo sapiens
ggcagccaggcaaag

SEQ ID NO: 1186140 - DNA, 15 bp, Homo sapiens
tggcagccaggcaaa

SEQ ID NO: 1186141 - DNA, 15 bp, Homo sapiens
ctggcagccaggcaa

SEQ ID NO: 1186142 - DNA, 15 bp, Homo sapiens
tctggcagccaggca

SEQ ID NO: 1186143 - DNA, 15 bp, Homo sapiens
ctctggcagccaggc

SEQ ID NO: 1186144 - DNA, 15 bp, Homo sapiens
tctctggcagccagg

SEQ ID NO: 1186145 - DNA, 15 bp, Homo sapiens
ctctctggcagccag

SEQ ID NO: 1186146 - DNA, 15 bp, Homo sapiens
cctctctggcagcca

SEQ ID NO: 1186147 - DNA, 15 bp, Homo sapiens
tcctctctggcagcc

SEQ ID NO: 1186148 - DNA, 15 bp, Homo sapiens
ttcctctctggcagc

SEQ ID NO: 1186149 - DNA, 15 bp, Homo sapiens
tttcctctctggcag

SEQ ID NO: 1186150 - DNA, 15 bp, Homo sapiens
ctttcctctctggca

SEQ ID NO: 1186151 - DNA, 15 bp, Homo sapiens
cctttcctctctggc

SEQ ID NO: 1186152 - DNA, 15 bp, Homo sapiens
gcctttcctctctgg

SEQ ID NO: 1186153 - DNA, 15 bp, Homo sapiens
agcctttcctctctg

SEQ ID NO: 1186154 - DNA, 15 bp, Homo sapiens
cagcctttcctctct

SEQ ID NO: 1186155 - DNA, 15 bp, Homo sapiens
tcagcctttcctctc

SEQ ID NO: 1186156 - DNA, 15 bp, Homo sapiens
atcagcctttcctct

SEQ ID NO: 1186157 - DNA, 15 bp, Homo sapiens
gatcagcctttcctc

SEQ ID NO: 1186158 - DNA, 15 bp, Homo sapiens
ggatcagcctttcct

SEQ ID NO: 1186159 - DNA, 15 bp, Homo sapiens
tggatcagcctttcc

SEQ ID NO: 1186160 - DNA, 15 bp, Homo sapiens
ttggatcagcctttc

SEQ ID NO: 1186161 - DNA, 15 bp, Homo sapiens
gttggatcagccttt

SEQ ID NO: 1186162 - DNA, 15 bp, Homo sapiens
agttggatcagcctt

SEQ ID NO: 1186163 - DNA, 15 bp, Homo sapiens
gagttggatcagcct

SEQ ID NO: 1186164 - DNA, 15 bp, Homo sapiens
agagttggatcagcc

SEQ ID NO: 1186165 - DNA, 15 bp, Homo sapiens
gagagttggatcagc

SEQ ID NO: 1186166 - DNA, 15 bp, Homo sapiens
ggagagttggatcag

SEQ ID NO: 1186167 - DNA, 15 bp, Homo sapiens
aggagagttggatca

SEQ ID NO: 1186168 - DNA, 15 bp, Homo sapiens
caggagagttggatc

SEQ ID NO: 1186169 - DNA, 15 bp, Homo sapiens
ccaggagagttggat

SEQ ID NO: 1186170 - DNA, 15 bp, Homo sapiens
tccaggagagttgga

SEQ ID NO: 1186171 - DNA, 15 bp, Homo sapiens
ttccaggagagttgg

SEQ ID NO: 1186172 - DNA, 15 bp, Homo sapiens
attccaggagagttg

SEQ ID NO: 1186173 - DNA, 15 bp, Homo sapiens
aattccaggagagtt

SEQ ID NO: 1186174 - DNA, 15 bp, Homo sapiens
aaattccaggagagt

SEQ ID NO: 1186175 - DNA, 15 bp, Homo sapiens
caaattccaggagag

SEQ ID NO: 1186176 - DNA, 15 bp, Homo sapiens
tcaaattccaggaga

SEQ ID NO: 1186177 - DNA, 15 bp, Homo sapiens
ttcaaattccaggag

SEQ ID NO: 1186178 - DNA, 15 bp, Homo sapiens
gttcaaattccagga

SEQ ID NO: 1186179 - DNA, 15 bp, Homo sapiens
agttcaaattccagg

SEQ ID NO: 1186180 - DNA, 15 bp, Homo sapiens
aagttcaaattccag

SEQ ID NO: 1186181 - DNA, 15 bp, Homo sapiens
caagttcaaattcca

SEQ ID NO: 1186182 - DNA, 15 bp, Homo sapiens
acaagttcaaattcc

SEQ ID NO: 1186183 - DNA, 15 bp, Homo sapiens
cacaagttcaaattc

SEQ ID NO: 1186184 - DNA, 15 bp, Homo sapiens
tcacaagttcaaatt

SEQ ID NO: 1186185 - DNA, 15 bp, Homo sapiens
atcacaagttcaaat

SEQ ID NO: 1186186 - DNA, 15 bp, Homo sapiens
aatcacaagttcaaa

SEQ ID NO: 1186187 - DNA, 15 bp, Homo sapiens
gaatcacaagttcaa

SEQ ID NO: 1186188 - DNA, 15 bp, Homo sapiens
ggaatcacaagttca

SEQ ID NO: 1186189 - DNA, 15 bp, Homo sapiens
gggaatcacaagttc

SEQ ID NO: 1186190 - DNA, 15 bp, Homo sapiens
agggaatcacaagtt

SEQ ID NO: 1186191 - DNA, 15 bp, Homo sapiens
cagggaatcacaagt

SEQ ID NO: 1186192 - DNA, 15 bp, Homo sapiens
tcagggaatcacaag

SEQ ID NO: 1186193 - DNA, 15 bp, Homo sapiens
ttcagggaatcacaa

SEQ ID NO: 1186194 - DNA, 15 bp, Homo sapiens
cttcagggaatcaca

SEQ ID NO: 1186195 - DNA, 15 bp, Homo sapiens
acttcagggaatcac

SEQ ID NO: 1186196 - DNA, 15 bp, Homo sapiens
tacttcagggaatca

SEQ ID NO: 1186197 - DNA, 15 bp, Homo sapiens
ttacttcagggaatc

SEQ ID NO: 1186198 - DNA, 15 bp, Homo sapiens
tttacttcagggaat

SEQ ID NO: 1186199 - DNA, 15 bp, Homo sapiens
ctttacttcagggaa

SEQ ID NO: 1186200 - DNA, 15 bp, Homo sapiens
tctttacttcaggga

SEQ ID NO: 1186201 - DNA, 15 bp, Homo sapiens
ctctttacttcaggg

SEQ ID NO: 1186202 - DNA, 15 bp, Homo sapiens
tctctttacttcagg

SEQ ID NO: 1186203 - DNA, 15 bp, Homo sapiens
atctctttacttcag

SEQ ID NO: 1186204 - DNA, 15 bp, Homo sapiens
tatctctttacttca

SEQ ID NO: 1186205 - DNA, 15 bp, Homo sapiens
atatctctttacttc

SEQ ID NO: 1186206 - DNA, 15 bp, Homo sapiens
gatatctctttactt

SEQ ID NO: 1186207 - DNA, 15 bp, Homo sapiens
tgatatctctttact

SEQ ID NO: 1186208 - DNA, 15 bp, Homo sapiens
ttgatatctctttac

SEQ ID NO: 1186209 - DNA, 15 bp, Homo sapiens
tttgatatctcttta

SEQ ID NO: 1186210 - DNA, 15 bp, Homo sapiens
ctttgatatctcttt

SEQ ID NO: 1186211 - DNA, 15 bp, Homo sapiens
actttgatatctctt

SEQ ID NO: 1186212 - DNA, 15 bp, Homo sapiens
aactttgatatctct

SEQ ID NO: 1186213 - DNA, 15 bp, Homo sapiens
caactttgatatctc

SEQ ID NO: 1186214 - DNA, 15 bp, Homo sapiens
tcaactttgatatct

SEQ ID NO: 1186215 - DNA, 15 bp, Homo sapiens
atcaactttgatatc

SEQ ID NO: 1186216 - DNA, 15 bp, Homo sapiens
tatcaactttgatat

SEQ ID NO: 1186217 - DNA, 15 bp, Homo sapiens
gtatcaactttgata

SEQ ID NO: 1186218 - DNA, 15 bp, Homo sapiens
agtatcaactttgat

SEQ ID NO: 1186219 - DNA, 15 bp, Homo sapiens
cagtatcaactttga

SEQ ID NO: 1186220 - DNA, 15 bp, Homo sapiens
tcagtatcaactttg

SEQ ID NO: 1186221 - DNA, 15 bp, Homo sapiens
ctcagtatcaacttt

SEQ ID NO: 1186222 - DNA, 15 bp, Homo sapiens
tctcagtatcaactt

SEQ ID NO: 1186223 - DNA, 15 bp, Homo sapiens
gtctcagtatcaact

SEQ ID NO: 1186224 - DNA, 15 bp, Homo sapiens
tgtctcagtatcaac

SEQ ID NO: 1186225 - DNA, 15 bp, Homo sapiens
atgtctcagtatcaa

SEQ ID NO: 1186226 - DNA, 15 bp, Homo sapiens
gatgtctcagtatca

SEQ ID NO: 1186227 - DNA, 15 bp, Homo sapiens
agatgtctcagtatc

SEQ ID NO: 1186228 - DNA, 15 bp, Homo sapiens
tagatgtctcagtat

SEQ ID NO: 1186229 - DNA, 15 bp, Homo sapiens
ttagatgtctcagta

SEQ ID NO: 1186230 - DNA, 15 bp, Homo sapiens
tttagatgtctcagt

SEQ ID NO: 1186231 - DNA, 15 bp, Homo sapiens
atttagatgtctcag

SEQ ID NO: 1186232 - DNA, 15 bp, Homo sapiens
gatttagatgtctca

SEQ ID NO: 1186233 - DNA, 15 bp, Homo sapiens
tgatttagatgtctc

SEQ ID NO: 1186234 - DNA, 15 bp, Homo sapiens
atgatttagatgtct

SEQ ID NO: 1186235 - DNA, 15 bp, Homo sapiens
gatgatttagatgtc

SEQ ID NO: 1186236 - DNA, 15 bp, Homo sapiens
ggatgatttagatgt

SEQ ID NO: 1186237 - DNA, 15 bp, Homo sapiens
aggatgatttagatg

SEQ ID NO: 1186238 - DNA, 15 bp, Homo sapiens
gaggatgatttagat

SEQ ID NO: 1186239 - DNA, 15 bp, Homo sapiens
ggaggatgatttaga

SEQ ID NO: 1186240 - DNA, 15 bp, Homo sapiens
tggaggatgatttag

SEQ ID NO: 1186241 - DNA, 15 bp, Homo sapiens
gtggaggatgattta

SEQ ID NO: 1186242 - DNA, 15 bp, Homo sapiens
ggtggaggatgattt

SEQ ID NO: 1186243 - DNA, 15 bp, Homo sapiens
tggtggaggatgatt

SEQ ID NO: 1186244 - DNA, 15 bp, Homo sapiens
atggtggaggatgat

SEQ ID NO: 1186245 - DNA, 15 bp, Homo sapiens
aatggtggaggatga

SEQ ID NO: 1186246 - DNA, 15 bp, Homo sapiens
aaatggtggaggatg

SEQ ID NO: 1186247 - DNA, 15 bp, Homo sapiens
gaaatggtggaggat

SEQ ID NO: 1186248 - DNA, 15 bp, Homo sapiens
tgaaatggtggagga

SEQ ID NO: 1186249 - DNA, 15 bp, Homo sapiens
gtgaaatggtggagg

SEQ ID NO: 1186250 - DNA, 15 bp, Homo sapiens
tgtgaaatggtggag

SEQ ID NO: 1186251 - DNA, 15 bp, Homo sapiens
atgtgaaatggtgga

SEQ ID NO: 1186252 - DNA, 15 bp, Homo sapiens
catgtgaaatggtgg

SEQ ID NO: 1186253 - DNA, 15 bp, Homo sapiens
acatgtgaaatggtg

SEQ ID NO: 1186254 - DNA, 15 bp, Homo sapiens
gacatgtgaaatggt

SEQ ID NO: 1186255 - DNA, 15 bp, Homo sapiens
ggacatgtgaaatgg

SEQ ID NO: 1186256 - DNA, 15 bp, Homo sapiens
gggacatgtgaaatg

SEQ ID NO: 1186257 - DNA, 15 bp, Homo sapiens
ggggacatgtgaaat

SEQ ID NO: 1186258 - DNA, 15 bp, Homo sapiens
tggggacatgtgaaa

SEQ ID NO: 1186259 - DNA, 15 bp, Homo sapiens
ctggggacatgtgaa

SEQ ID NO: 1186260 - DNA, 15 bp, Homo sapiens
cctggggacatgtga

SEQ ID NO: 1186261 - DNA, 15 bp, Homo sapiens
gcctggggacatgtg

SEQ ID NO: 1186262 - DNA, 15 bp, Homo sapiens
ggcctggggacatgt

SEQ ID NO: 1186263 - DNA, 15 bp, Homo sapiens
tggcctggggacatg

SEQ ID NO: 1186264 - DNA, 15 bp, Homo sapiens
ttggcctggggacat

SEQ ID NO: 1186265 - DNA, 15 bp, Homo sapiens
cttggcctggggaca

SEQ ID NO: 1186266 - DNA, 15 bp, Homo sapiens
gcttggcctggggac

SEQ ID NO: 1186267 - DNA, 15 bp, Homo sapiens
ggcttggcctgggga

SEQ ID NO: 1186268 - DNA, 15 bp, Homo sapiens
tggcttggcctgggg

SEQ ID NO: 1186269 - DNA, 15 bp, Homo sapiens
ctggcttggcctggg

SEQ ID NO: 1186270 - DNA, 15 bp, Homo sapiens
gctggcttggcctgg

SEQ ID NO: 1186271 - DNA, 15 bp, Homo sapiens
tgctggcttggcctg

SEQ ID NO: 1186272 - DNA, 15 bp, Homo sapiens
ttgctggcttggcct

SEQ ID NO: 1186273 - DNA, 15 bp, Homo sapiens
tttgctggcttggcc

SEQ ID NO: 1186274 - DNA, 15 bp, Homo sapiens
ttttgctggcttggc

SEQ ID NO: 1186275 - DNA, 15 bp, Homo sapiens
attttgctggcttgg

SEQ ID NO: 1186276 - DNA, 15 bp, Homo sapiens
aattttgctggcttg

SEQ ID NO: 1186277 - DNA, 15 bp, Homo sapiens
caattttgctggctt

SEQ ID NO: 1186278 - DNA, 15 bp, Homo sapiens
gcaattttgctggct

SEQ ID NO: 1186279 - DNA, 15 bp, Homo sapiens
agcaattttgctggc

SEQ ID NO: 1186280 - DNA, 15 bp, Homo sapiens
tagcaattttgctgg

SEQ ID NO: 1186281 - DNA, 15 bp, Homo sapiens
atagcaattttgctg

SEQ ID NO: 1186282 - DNA, 15 bp, Homo sapiens
tatagcaattttgct

SEQ ID NO: 1186283 - DNA, 15 bp, Homo sapiens
ctatagcaattttgc

SEQ ID NO: 1186284 - DNA, 15 bp, Homo sapiens
gctatagcaattttg

SEQ ID NO: 1186285 - DNA, 15 bp, Homo sapiens
tgctatagcaatttt

SEQ ID NO: 1186286 - DNA, 15 bp, Homo sapiens
gtgctatagcaattt

SEQ ID NO: 1186287 - DNA, 15 bp, Homo sapiens
tgtgctatagcaatt

SEQ ID NO: 1186288 - DNA, 15 bp, Homo sapiens
atgtgctatagcaat

SEQ ID NO: 1186289 - DNA, 15 bp, Homo sapiens
gatgtgctatagcaa

SEQ ID NO: 1186290 - DNA, 15 bp, Homo sapiens
ggatgtgctatagca

SEQ ID NO: 1186291 - DNA, 15 bp, Homo sapiens
gggatgtgctatagc

SEQ ID NO: 1186292 - DNA, 15 bp, Homo sapiens
agggatgtgctatag

SEQ ID NO: 1186293 - DNA, 15 bp, Homo sapiens
aagggatgtgctata

SEQ ID NO: 1186294 - DNA, 15 bp, Homo sapiens
aaagggatgtgctat

SEQ ID NO: 1186295 - DNA, 15 bp, Homo sapiens
gaaagggatgtgcta

SEQ ID NO: 1186296 - DNA, 15 bp, Homo sapiens
tgaaagggatgtgct

SEQ ID NO: 1186297 - DNA, 15 bp, Homo sapiens
ttgaaagggatgtgc

SEQ ID NO: 1186298 - DNA, 15 bp, Homo sapiens
gttgaaagggatgtg

SEQ ID NO: 1186299 - DNA, 15 bp, Homo sapiens
tgttgaaagggatgt

SEQ ID NO: 1186300 - DNA, 15 bp, Homo sapiens
ctgttgaaagggatg

SEQ ID NO: 1186301 - DNA, 15 bp, Homo sapiens
cctgttgaaagggat

SEQ ID NO: 1186302 - DNA, 15 bp, Homo sapiens
acctgttgaaaggga

SEQ ID NO: 1186303 - DNA, 15 bp, Homo sapiens
tacctgttgaaaggg

SEQ ID NO: 1186304 - DNA, 15 bp, Homo sapiens
ttacctgttgaaagg

SEQ ID NO: 1186305 - DNA, 15 bp, Homo sapiens
tttacctgttgaaag

SEQ ID NO: 1186306 - DNA, 15 bp, Homo sapiens
ctttacctgttgaaa

SEQ ID NO: 1186307 - DNA, 15 bp, Homo sapiens
cctttacctgttgaa

SEQ ID NO: 1186308 - DNA, 15 bp, Homo sapiens
ccctttacctgttga

SEQ ID NO: 1186309 - DNA, 15 bp, Homo sapiens
gccctttacctgttg

SEQ ID NO: 1186310 - DNA, 15 bp, Homo sapiens
agccctttacctgtt

SEQ ID NO: 1186311 - DNA, 15 bp, Homo sapiens
cagccctttacctgt

SEQ ID NO: 1186312 - DNA, 15 bp, Homo sapiens
tcagccctttacctg

SEQ ID NO: 1186313 - DNA, 15 bp, Homo sapiens
atcagccctttacct

SEQ ID NO: 1186314 - DNA, 15 bp, Homo sapiens
tatcagccctttacc

SEQ ID NO: 1186315 - DNA, 15 bp, Homo sapiens
atatcagccctttac

SEQ ID NO: 1186316 - DNA, 15 bp, Homo sapiens
gatatcagcccttta

SEQ ID NO: 1186317 - DNA, 15 bp, Homo sapiens
agatatcagcccttt

SEQ ID NO: 1186318 - DNA, 15 bp, Homo sapiens
cagatatcagccctt

SEQ ID NO: 1186319 - DNA, 15 bp, Homo sapiens
tcagatatcagccct

SEQ ID NO: 1186320 - DNA, 15 bp, Homo sapiens
ctcagatatcagccc

SEQ ID NO: 1186321 - DNA, 15 bp, Homo sapiens
gctcagatatcagcc

SEQ ID NO: 1186322 - DNA, 15 bp, Homo sapiens
ggctcagatatcagc

SEQ ID NO: 1186323 - DNA, 15 bp, Homo sapiens
gggctcagatatcag

SEQ ID NO: 1186324 - DNA, 15 bp, Homo sapiens
agggctcagatatca

SEQ ID NO: 1186325 - DNA, 15 bp, Homo sapiens
gagggctcagatatc

SEQ ID NO: 1186326 - DNA, 15 bp, Homo sapiens
agagggctcagatat

SEQ ID NO: 1186327 - DNA, 15 bp, Homo sapiens
aagagggctcagata

SEQ ID NO: 1186328 - DNA, 15 bp, Homo sapiens
aaagagggctcagat

SEQ ID NO: 1186329 - DNA, 15 bp, Homo sapiens
gaaagagggctcaga

SEQ ID NO: 1186330 - DNA, 15 bp, Homo sapiens
ggaaagagggctcag

SEQ ID NO: 1186331 - DNA, 15 bp, Homo sapiens
tggaaagagggctca

SEQ ID NO: 1186332 - DNA, 15 bp, Homo sapiens
ttggaaagagggctc

SEQ ID NO: 1186333 - DNA, 15 bp, Homo sapiens
attggaaagagggct

SEQ ID NO: 1186334 - DNA, 15 bp, Homo sapiens
gattggaaagagggc

SEQ ID NO: 1186335 - DNA, 15 bp, Homo sapiens
tgattggaaagaggg

SEQ ID NO: 1186336 - DNA, 15 bp, Homo sapiens
atgattggaaagagg

SEQ ID NO: 1186337 - DNA, 15 bp, Homo sapiens
gatgattggaaagag

SEQ ID NO: 1186338 - DNA, 15 bp, Homo sapiens
ggatgattggaaaga

SEQ ID NO: 1186339 - DNA, 15 bp, Homo sapiens
tggatgattggaaag

SEQ ID NO: 1186340 - DNA, 15 bp, Homo sapiens
gtggatgattggaaa

SEQ ID NO: 1186341 - DNA, 15 bp, Homo sapiens
agtggatgattggaa

SEQ ID NO: 1186342 - DNA, 15 bp, Homo sapiens
cagtggatgattgga

SEQ ID NO: 1186343 - DNA, 15 bp, Homo sapiens
gcagtggatgattgg

SEQ ID NO: 1186344 - DNA, 15 bp, Homo sapiens
agcagtggatgattg

SEQ ID NO: 1186345 - DNA, 15 bp, Homo sapiens
gagcagtggatgatt

SEQ ID NO: 1186346 - DNA, 15 bp, Homo sapiens
agagcagtggatgat

SEQ ID NO: 1186347 - DNA, 15 bp, Homo sapiens
aagagcagtggatga

SEQ ID NO: 1186348 - DNA, 15 bp, Homo sapiens
aaagagcagtggatg

SEQ ID NO: 1186349 - DNA, 15 bp, Homo sapiens
aaaagagcagtggat

SEQ ID NO: 1186350 - DNA, 15 bp, Homo sapiens
gaaaagagcagtgga

SEQ ID NO: 1186351 - DNA, 15 bp, Homo sapiens
agaaaagagcagtgg

SEQ ID NO: 1186352 - DNA, 15 bp, Homo sapiens
aagaaaagagcagtg

SEQ ID NO: 1186353 - DNA, 15 bp, Homo sapiens
gaagaaaagagcagt

SEQ ID NO: 1186354 - DNA, 15 bp, Homo sapiens
agaagaaaagagcag

SEQ ID NO: 1186355 - DNA, 15 bp, Homo sapiens
gagaagaaaagagca

SEQ ID NO: 1186356 - DNA, 15 bp, Homo sapiens
tgagaagaaaagagc

SEQ ID NO: 1186357 - DNA, 15 bp, Homo sapiens
atgagaagaaaagag

SEQ ID NO: 1186358 - DNA, 15 bp, Homo sapiens
aatgagaagaaaaga

SEQ ID NO: 1186359 - DNA, 15 bp, Homo sapiens
aaatgagaagaaaag

SEQ ID NO: 1186360 - DNA, 15 bp, Homo sapiens
aaaatgagaagaaaa

SEQ ID NO: 1186361 - DNA, 15 bp, Homo sapiens
caaaatgagaagaaa

SEQ ID NO: 1186362 - DNA, 15 bp, Homo sapiens
gcaaaatgagaagaa

SEQ ID NO: 1186363 - DNA, 15 bp, Homo sapiens
ggcaaaatgagaaga

SEQ ID NO: 1186364 - DNA, 15 bp, Homo sapiens
gggcaaaatgagaag

SEQ ID NO: 1186365 - DNA, 15 bp, Homo sapiens
agggcaaaatgagaa

SEQ ID NO: 1186366 - DNA, 15 bp, Homo sapiens
aagggcaaaatgaga

SEQ ID NO: 1186367 - DNA, 15 bp, Homo sapiens
aaagggcaaaatgag

SEQ ID NO: 1186368 - DNA, 15 bp, Homo sapiens
aaaagggcaaaatga

SEQ ID NO: 1186369 - DNA, 15 bp, Homo sapiens
aaaaagggcaaaatg

SEQ ID NO: 1186370 - DNA, 15 bp, Homo sapiens
caaaaagggcaaaat

SEQ ID NO: 1186371 - DNA, 15 bp, Homo sapiens
ccaaaaagggcaaaa

SEQ ID NO: 1186372 - DNA, 15 bp, Homo sapiens
cccaaaaagggcaaa

SEQ ID NO: 1186373 - DNA, 15 bp, Homo sapiens
tcccaaaaagggcaa

SEQ ID NO: 1186374 - DNA, 15 bp, Homo sapiens
ctcccaaaaagggca

SEQ ID NO: 1186375 - DNA, 15 bp, Homo sapiens
gctcccaaaaagggc

SEQ ID NO: 1186376 - DNA, 15 bp, Homo sapiens
tgctcccaaaaaggg

SEQ ID NO: 1186377 - DNA, 15 bp, Homo sapiens
ctgctcccaaaaagg

SEQ ID NO: 1186378 - DNA, 15 bp, Homo sapiens
cctgctcccaaaaag

SEQ ID NO: 1186379 - DNA, 15 bp, Homo sapiens
acctgctcccaaaaa

SEQ ID NO: 1186380 - DNA, 15 bp, Homo sapiens
gacctgctcccaaaa

SEQ ID NO: 1186381 - DNA, 15 bp, Homo sapiens
tgacctgctcccaaa

SEQ ID NO: 1186382 - DNA, 15 bp, Homo sapiens
ttgacctgctcccaa

SEQ ID NO: 1186383 - DNA, 15 bp, Homo sapiens
attgacctgctccca

SEQ ID NO: 1186384 - DNA, 15 bp, Homo sapiens
cattgacctgctccc

SEQ ID NO: 1186385 - DNA, 15 bp, Homo sapiens
gcattgacctgctcc

SEQ ID NO: 1186386 - DNA, 15 bp, Homo sapiens
agcattgacctgctc

SEQ ID NO: 1186387 - DNA, 15 bp, Homo sapiens
cagcattgacctgct

SEQ ID NO: 1186388 - DNA, 15 bp, Homo sapiens
tcagcattgacctgc

SEQ ID NO: 1186389 - DNA, 15 bp, Homo sapiens
ctcagcattgacctg

SEQ ID NO: 1186390 - DNA, 15 bp, Homo sapiens
actcagcattgacct

SEQ ID NO: 1186391 - DNA, 15 bp, Homo sapiens
aactcagcattgacc

SEQ ID NO: 1186392 - DNA, 15 bp, Homo sapiens
taactcagcattgac

SEQ ID NO: 1186393 - DNA, 15 bp, Homo sapiens
ctaactcagcattga

SEQ ID NO: 1186394 - DNA, 15 bp, Homo sapiens
actaactcagcattg

SEQ ID NO: 1186395 - DNA, 15 bp, Homo sapiens
tactaactcagcatt

SEQ ID NO: 1186396 - DNA, 15 bp, Homo sapiens
gtactaactcagcat

SEQ ID NO: 1186397 - DNA, 15 bp, Homo sapiens
agtactaactcagca

SEQ ID NO: 1186398 - DNA, 15 bp, Homo sapiens
aagtactaactcagc

SEQ ID NO: 1186399 - DNA, 15 bp, Homo sapiens
aaagtactaactcag

SEQ ID NO: 1186400 - DNA, 15 bp, Homo sapiens
taaagtactaactca

SEQ ID NO: 1186401 - DNA, 15 bp, Homo sapiens
ataaagtactaactc

SEQ ID NO: 1186402 - DNA, 15 bp, Homo sapiens
cataaagtactaact

SEQ ID NO: 1186403 - DNA, 15 bp, Homo sapiens
gcataaagtactaac

SEQ ID NO: 1186404 - DNA, 15 bp, Homo sapiens
agcataaagtactaa

SEQ ID NO: 1186405 - DNA, 15 bp, Homo sapiens
cagcataaagtacta

SEQ ID NO: 1186406 - DNA, 15 bp, Homo sapiens
acagcataaagtact

SEQ ID NO: 1186407 - DNA, 15 bp, Homo sapiens
tacagcataaagtac

SEQ ID NO: 1186408 - DNA, 15 bp, Homo sapiens
gtacagcataaagta

SEQ ID NO: 1186409 - DNA, 15 bp, Homo sapiens
tgtacagcataaagt

SEQ ID NO: 1186410 - DNA, 15 bp, Homo sapiens
ttgtacagcataaag

SEQ ID NO: 1186411 - DNA, 15 bp, Homo sapiens
attgtacagcataaa

SEQ ID NO: 1186412 - DNA, 15 bp, Homo sapiens
tattgtacagcataa

SEQ ID NO: 1186413 - DNA, 15 bp, Homo sapiens
ttattgtacagcata

SEQ ID NO: 1186414 - DNA, 15 bp, Homo sapiens
cttattgtacagcat

SEQ ID NO: 1186415 - DNA, 15 bp, Homo sapiens
gcttattgtacagca

SEQ ID NO: 1186416 - DNA, 15 bp, Homo sapiens
agcttattgtacagc

SEQ ID NO: 1186417 - DNA, 15 bp, Homo sapiens
cagcttattgtacag

SEQ ID NO: 1186418 - DNA, 15 bp, Homo sapiens
gcagcttattgtaca

SEQ ID NO: 1186419 - DNA, 15 bp, Homo sapiens
agcagcttattgtac

SEQ ID NO: 1186420 - DNA, 15 bp, Homo sapiens
cagcagcttattgta

SEQ ID NO: 1186421 - DNA, 15 bp, Homo sapiens
tcagcagcttattgt

SEQ ID NO: 1186422 - DNA, 15 bp, Homo sapiens
atcagcagcttattg

SEQ ID NO: 1186423 - DNA, 15 bp, Homo sapiens
tatcagcagcttatt

SEQ ID NO: 1186424 - DNA, 15 bp, Homo sapiens
atatcagcagcttat

SEQ ID NO: 1186425 - DNA, 15 bp, Homo sapiens
aatatcagcagctta

SEQ ID NO: 1186426 - DNA, 15 bp, Homo sapiens
gaatatcagcagctt

SEQ ID NO: 1186427 - DNA, 15 bp, Homo sapiens
ggaatatcagcagct

SEQ ID NO: 1186428 - DNA, 15 bp, Homo sapiens
tggaatatcagcagc

SEQ ID NO: 1186429 - DNA, 15 bp, Homo sapiens
atggaatatcagcag

SEQ ID NO: 1186430 - DNA, 15 bp, Homo sapiens
catggaatatcagca

SEQ ID NO: 1186431 - DNA, 15 bp, Homo sapiens
gcatggaatatcagc

SEQ ID NO: 1186432 - DNA, 15 bp, Homo sapiens
agcatggaatatcag

SEQ ID NO: 1186433 - DNA, 15 bp, Homo sapiens
cagcatggaatatca

SEQ ID NO: 1186434 - DNA, 15 bp, Homo sapiens
ccagcatggaatatc

SEQ ID NO: 1186435 - DNA, 15 bp, Homo sapiens
tccagcatggaatat

SEQ ID NO: 1186436 - DNA, 15 bp, Homo sapiens
gtccagcatggaata

SEQ ID NO: 1186437 - DNA, 15 bp, Homo sapiens
tgtccagcatggaat

SEQ ID NO: 1186438 - DNA, 15 bp, Homo sapiens
ctgtccagcatggaa

SEQ ID NO: 1186439 - DNA, 15 bp, Homo sapiens
tctgtccagcatgga

SEQ ID NO: 1186440 - DNA, 15 bp, Homo sapiens
ttctgtccagcatgg

SEQ ID NO: 1186441 - DNA, 15 bp, Homo sapiens
attctgtccagcatg

SEQ ID NO: 1186442 - DNA, 15 bp, Homo sapiens
aattctgtccagcat

SEQ ID NO: 1186443 - DNA, 15 bp, Homo sapiens
aaattctgtccagca

SEQ ID NO: 1186444 - DNA, 15 bp, Homo sapiens
aaaattctgtccagc

SEQ ID NO: 1186445 - DNA, 15 bp, Homo sapiens
gaaaattctgtccag

SEQ ID NO: 1186446 - DNA, 15 bp, Homo sapiens
ggaaaattctgtcca

SEQ ID NO: 1186447 - DNA, 15 bp, Homo sapiens
gggaaaattctgtcc

SEQ ID NO: 1186448 - DNA, 15 bp, Homo sapiens
tgggaaaattctgtc

SEQ ID NO: 1186449 - DNA, 15 bp, Homo sapiens
ctgggaaaattctgt

SEQ ID NO: 1186450 - DNA, 15 bp, Homo sapiens
actgggaaaattctg

SEQ ID NO: 1186451 - DNA, 15 bp, Homo sapiens
tactgggaaaattct

SEQ ID NO: 1186452 - DNA, 15 bp, Homo sapiens
atactgggaaaattc

SEQ ID NO: 1186453 - DNA, 15 bp, Homo sapiens
aatactgggaaaatt

SEQ ID NO: 1186454 - DNA, 15 bp, Homo sapiens
aaatactgggaaaat

SEQ ID NO: 1186455 - DNA, 15 bp, Homo sapiens
aaaatactgggaaaa

SEQ ID NO: 1186456 - DNA, 15 bp, Homo sapiens
aaaaatactgggaaa

SEQ ID NO: 1186457 - DNA, 15 bp, Homo sapiens
aaaaaatactgggaa

SEQ ID NO: 1186458 - DNA, 15 bp, Homo sapiens
taaaaaatactggga

SEQ ID NO: 1186459 - DNA, 15 bp, Homo sapiens
ataaaaaatactggg

SEQ ID NO: 1186460 - DNA, 15 bp, Homo sapiens
tataaaaaatactgg

SEQ ID NO: 1186461 - DNA, 15 bp, Homo sapiens
ctataaaaaatactg

SEQ ID NO: 1186462 - DNA, 15 bp, Homo sapiens
tctataaaaaatact

SEQ ID NO: 1186463 - DNA, 15 bp, Homo sapiens
ctctataaaaaatac

SEQ ID NO: 1186464 - DNA, 15 bp, Homo sapiens
actctataaaaaata

SEQ ID NO: 1186465 - DNA, 15 bp, Homo sapiens
cactctataaaaaat

SEQ ID NO: 1186466 - DNA, 15 bp, Homo sapiens
gcactctataaaaaa

SEQ ID NO: 1186467 - DNA, 15 bp, Homo sapiens
ggcactctataaaaa

SEQ ID NO: 1186468 - DNA, 15 bp, Homo sapiens
tggcactctataaaa

SEQ ID NO: 1186469 - DNA, 15 bp, Homo sapiens
ctggcactctataaa

SEQ ID NO: 1186470 - DNA, 15 bp, Homo sapiens
cctggcactctataa

SEQ ID NO: 1186471 - DNA, 15 bp, Homo sapiens
gcctggcactctata

SEQ ID NO: 1186472 - DNA, 15 bp, Homo sapiens
agcctggcactctat

SEQ ID NO: 1186473 - DNA, 15 bp, Homo sapiens
aagcctggcactcta

SEQ ID NO: 1186474 - DNA, 15 bp, Homo sapiens
aaagcctggcactct

SEQ ID NO: 1186475 - DNA, 15 bp, Homo sapiens
aaaagcctggcactc

SEQ ID NO: 1186476 - DNA, 15 bp, Homo sapiens
gaaaagcctggcact

SEQ ID NO: 1186477 - DNA, 15 bp, Homo sapiens
ggaaaagcctggcac

SEQ ID NO: 1186478 - DNA, 15 bp, Homo sapiens
aggaaaagcctggca

SEQ ID NO: 1186479 - DNA, 15 bp, Homo sapiens
taggaaaagcctggc

SEQ ID NO: 1186480 - DNA, 15 bp, Homo sapiens
ctaggaaaagcctgg

SEQ ID NO: 1186481 - DNA, 15 bp, Homo sapiens
tctaggaaaagcctg

SEQ ID NO: 1186482 - DNA, 15 bp, Homo sapiens
gtctaggaaaagcct

SEQ ID NO: 1186483 - DNA, 15 bp, Homo sapiens
agtctaggaaaagcc

SEQ ID NO: 1186484 - DNA, 15 bp, Homo sapiens
aagtctaggaaaagc

SEQ ID NO: 1186485 - DNA, 15 bp, Homo sapiens
gaagtctaggaaaag

SEQ ID NO: 1186486 - DNA, 15 bp, Homo sapiens
tgaagtctaggaaaa

SEQ ID NO: 1186487 - DNA, 15 bp, Homo sapiens
atgaagtctaggaaa

SEQ ID NO: 1186488 - DNA, 15 bp, Homo sapiens
catgaagtctaggaa

SEQ ID NO: 1186489 - DNA, 15 bp, Homo sapiens
acatgaagtctagga

SEQ ID NO: 1186490 - DNA, 15 bp, Homo sapiens
gacatgaagtctagg

SEQ ID NO: 1186491 - DNA, 15 bp, Homo sapiens
tgacatgaagtctag

SEQ ID NO: 1186492 - DNA, 15 bp, Homo sapiens
atgacatgaagtcta

SEQ ID NO: 1186493 - DNA, 15 bp, Homo sapiens
tatgacatgaagtct

SEQ ID NO: 1186494 - DNA, 15 bp, Homo sapiens
gtatgacatgaagtc

SEQ ID NO: 1186495 - DNA, 15 bp, Homo sapiens
tgtatgacatgaagt

SEQ ID NO: 1186496 - DNA, 15 bp, Homo sapiens
ttgtatgacatgaag

SEQ ID NO: 1186497 - DNA, 15 bp, Homo sapiens
attgtatgacatgaa

SEQ ID NO: 1186498 - DNA, 15 bp, Homo sapiens
tattgtatgacatga

SEQ ID NO: 1186499 - DNA, 15 bp, Homo sapiens
gtattgtatgacatg

SEQ ID NO: 1186500 - DNA, 15 bp, Homo sapiens
agtattgtatgacat

SEQ ID NO: 1186501 - DNA, 15 bp, Homo sapiens
aagtattgtatgaca

SEQ ID NO: 1186502 - DNA, 15 bp, Homo sapiens
taagtattgtatgac

SEQ ID NO: 1186503 - DNA, 15 bp, Homo sapiens
ttaagtattgtatga

SEQ ID NO: 1186504 - DNA, 15 bp, Homo sapiens
gttaagtattgtatg

SEQ ID NO: 1186505 - DNA, 15 bp, Homo sapiens
agttaagtattgtat

SEQ ID NO: 1186506 - DNA, 15 bp, Homo sapiens
aagttaagtattgta

SEQ ID NO: 1186507 - DNA, 15 bp, Homo sapiens
caagttaagtattgt

SEQ ID NO: 1186508 - DNA, 15 bp, Homo sapiens
acaagttaagtattg

SEQ ID NO: 1186509 - DNA, 15 bp, Homo sapiens
aacaagttaagtatt

SEQ ID NO: 1186510 - DNA, 15 bp, Homo sapiens
aaacaagttaagtat

SEQ ID NO: 1186511 - DNA, 15 bp, Homo sapiens
caaacaagttaagta

SEQ ID NO: 1186512 - DNA, 15 bp, Homo sapiens
ccaaacaagttaagt

SEQ ID NO: 1186513 - DNA, 15 bp, Homo sapiens
tccaaacaagttaag

SEQ ID NO: 1186514 - DNA, 15 bp, Homo sapiens
ctccaaacaagttaa

SEQ ID NO: 1186515 - DNA, 15 bp, Homo sapiens
actccaaacaagtta

SEQ ID NO: 1186516 - DNA, 15 bp, Homo sapiens
cactccaaacaagtt

SEQ ID NO: 1186517 - DNA, 15 bp, Homo sapiens
ccactccaaacaagt

SEQ ID NO: 1186518 - DNA, 15 bp, Homo sapiens
cccactccaaacaag

SEQ ID NO: 1186519 - DNA, 15 bp, Homo sapiens
acccactccaaacaa

SEQ ID NO: 1186520 - DNA, 15 bp, Homo sapiens
cacccactccaaaca

SEQ ID NO: 1186521 - DNA, 15 bp, Homo sapiens
ccacccactccaaac

SEQ ID NO: 1186522 - DNA, 15 bp, Homo sapiens
tccacccactccaaa

SEQ ID NO: 1186523 - DNA, 15 bp, Homo sapiens
ctccacccactccaa

SEQ ID NO: 1186524 - DNA, 15 bp, Homo sapiens
tctccacccactcca

SEQ ID NO: 1186525 - DNA, 15 bp, Homo sapiens
atctccacccactcc

SEQ ID NO: 1186526 - DNA, 15 bp, Homo sapiens
catctccacccactc

SEQ ID NO: 1186527 - DNA, 15 bp, Homo sapiens
ccatctccacccact

SEQ ID NO: 1186528 - DNA, 15 bp, Homo sapiens
tccatctccacccac

SEQ ID NO: 1186529 - DNA, 15 bp, Homo sapiens
ttccatctccaccca

SEQ ID NO: 1186530 - DNA, 15 bp, Homo sapiens
tttccatctccaccc

SEQ ID NO: 1186531 - DNA, 15 bp, Homo sapiens
gtttccatctccacc

SEQ ID NO: 1186532 - DNA, 15 bp, Homo sapiens
tgtttccatctccac

SEQ ID NO: 1186533 - DNA, 15 bp, Homo sapiens
atgtttccatctcca

SEQ ID NO: 1186534 - DNA, 15 bp, Homo sapiens
tatgtttccatctcc

SEQ ID NO: 1186535 - DNA, 15 bp, Homo sapiens
ctatgtttccatctc

SEQ ID NO: 1186536 - DNA, 15 bp, Homo sapiens
actatgtttccatct

SEQ ID NO: 1186537 - DNA, 15 bp, Homo sapiens
gactatgtttccatc

SEQ ID NO: 1186538 - DNA, 15 bp, Homo sapiens
agactatgtttccat

SEQ ID NO: 1186539 - DNA, 15 bp, Homo sapiens
tagactatgtttcca

SEQ ID NO: 1186540 - DNA, 15 bp, Homo sapiens
atagactatgtttcc

SEQ ID NO: 1186541 - DNA, 15 bp, Homo sapiens
aatagactatgtttc

SEQ ID NO: 1186542 - DNA, 15 bp, Homo sapiens
caatagactatgttt

SEQ ID NO: 1186543 - DNA, 15 bp, Homo sapiens
tcaatagactatgtt

SEQ ID NO: 1186544 - DNA, 15 bp, Homo sapiens
ttcaatagactatgt

SEQ ID NO: 1186545 - DNA, 15 bp, Homo sapiens
tttcaatagactatg

SEQ ID NO: 1186546 - DNA, 15 bp, Homo sapiens
ttttcaatagactat

SEQ ID NO: 1186547 - DNA, 15 bp, Homo sapiens
gttttcaatagacta

SEQ ID NO: 1186548 - DNA, 15 bp, Homo sapiens
tgttttcaatagact

SEQ ID NO: 1186549 - DNA, 15 bp, Homo sapiens
atgttttcaatagac

SEQ ID NO: 1186550 - DNA, 15 bp, Homo sapiens
gatgttttcaataga

SEQ ID NO: 1186551 - DNA, 15 bp, Homo sapiens
tgatgttttcaatag

SEQ ID NO: 1186552 - DNA, 15 bp, Homo sapiens
gtgatgttttcaata

SEQ ID NO: 1186553 - DNA, 15 bp, Homo sapiens
agtgatgttttcaat

SEQ ID NO: 1186554 - DNA, 15 bp, Homo sapiens
cagtgatgttttcaa

SEQ ID NO: 1186555 - DNA, 15 bp, Homo sapiens
gcagtgatgttttca

SEQ ID NO: 1186556 - DNA, 15 bp, Homo sapiens
agcagtgatgttttc

SEQ ID NO: 1186557 - DNA, 15 bp, Homo sapiens
aagcagtgatgtttt

SEQ ID NO: 1186558 - DNA, 15 bp, Homo sapiens
gaagcagtgatgttt

SEQ ID NO: 1186559 - DNA, 15 bp, Homo sapiens
ggaagcagtgatgtt

SEQ ID NO: 1186560 - DNA, 15 bp, Homo sapiens
aggaagcagtgatgt

SEQ ID NO: 1186561 - DNA, 15 bp, Homo sapiens
gaggaagcagtgatg

SEQ ID NO: 1186562 - DNA, 15 bp, Homo sapiens
ggaggaagcagtgat

SEQ ID NO: 1186563 - DNA, 15 bp, Homo sapiens
gggaggaagcagtga

SEQ ID NO: 1186564 - DNA, 15 bp, Homo sapiens
agggaggaagcagtg

SEQ ID NO: 1186565 - DNA, 15 bp, Homo sapiens
cagggaggaagcagt

SEQ ID NO: 1186566 - DNA, 15 bp, Homo sapiens
tcagggaggaagcag

SEQ ID NO: 1186567 - DNA, 15 bp, Homo sapiens
ttcagggaggaagca

SEQ ID NO: 1186568 - DNA, 15 bp, Homo sapiens
cttcagggaggaagc

SEQ ID NO: 1186569 - DNA, 15 bp, Homo sapiens
acttcagggaggaag

SEQ ID NO: 1186570 - DNA, 15 bp, Homo sapiens
aacttcagggaggaa

SEQ ID NO: 1186571 - DNA, 15 bp, Homo sapiens
aaacttcagggagga

SEQ ID NO: 1186572 - DNA, 15 bp, Homo sapiens
taaacttcagggagg

SEQ ID NO: 1186573 - DNA, 15 bp, Homo sapiens
ttaaacttcagggag

SEQ ID NO: 1186574 - DNA, 15 bp, Homo sapiens
tttaaacttcaggga

SEQ ID NO: 1186575 - DNA, 15 bp, Homo sapiens
ctttaaacttcaggg

SEQ ID NO: 1186576 - DNA, 15 bp, Homo sapiens
tctttaaacttcagg

SEQ ID NO: 1186577 - DNA, 15 bp, Homo sapiens
ctctttaaacttcag

SEQ ID NO: 1186578 - DNA, 15 bp, Homo sapiens
gctctttaaacttca

SEQ ID NO: 1186579 - DNA, 15 bp, Homo sapiens
ggctctttaaacttc

SEQ ID NO: 1186580 - DNA, 15 bp, Homo sapiens
aggctctttaaactt

SEQ ID NO: 1186581 - DNA, 15 bp, Homo sapiens
taggctctttaaact

SEQ ID NO: 1186582 - DNA, 15 bp, Homo sapiens
ataggctctttaaac

SEQ ID NO: 1186583 - DNA, 15 bp, Homo sapiens
aataggctctttaaa

SEQ ID NO: 1186584 - DNA, 15 bp, Homo sapiens
aaataggctctttaa

SEQ ID NO: 1186585 - DNA, 15 bp, Homo sapiens
aaaataggctcttta

SEQ ID NO: 1186586 - DNA, 15 bp, Homo sapiens
aaaaataggctcttt

SEQ ID NO: 1186587 - DNA, 15 bp, Homo sapiens
taaaaataggctctt

SEQ ID NO: 1186588 - DNA, 15 bp, Homo sapiens
ataaaaataggctct

SEQ ID NO: 1186589 - DNA, 15 bp, Homo sapiens
gataaaaataggctc

SEQ ID NO: 1186590 - DNA, 15 bp, Homo sapiens
ggataaaaataggct

SEQ ID NO: 1186591 - DNA, 15 bp, Homo sapiens
aggataaaaataggc

SEQ ID NO: 1186592 - DNA, 15 bp, Homo sapiens
aaggataaaaatagg

SEQ ID NO: 1186593 - DNA, 15 bp, Homo sapiens
aaaggataaaaatag

SEQ ID NO: 1186594 - DNA, 15 bp, Homo sapiens
aaaaggataaaaata

SEQ ID NO: 1186595 - DNA, 15 bp, Homo sapiens
taaaaggataaaaat

SEQ ID NO: 1186596 - DNA, 15 bp, Homo sapiens
ctaaaaggataaaaa

SEQ ID NO: 1186597 - DNA, 15 bp, Homo sapiens
tctaaaaggataaaa

SEQ ID NO: 1186598 - DNA, 15 bp, Homo sapiens
atctaaaaggataaa

SEQ ID NO: 1186599 - DNA, 15 bp, Homo sapiens
aatctaaaaggataa

SEQ ID NO: 1186600 - DNA, 15 bp, Homo sapiens
gaatctaaaaggata

SEQ ID NO: 1186601 - DNA, 15 bp, Homo sapiens
agaatctaaaaggat

SEQ ID NO: 1186602 - DNA, 15 bp, Homo sapiens
tagaatctaaaagga

SEQ ID NO: 1186603 - DNA, 15 bp, Homo sapiens
atagaatctaaaagg

SEQ ID NO: 1186604 - DNA, 15 bp, Homo sapiens
gatagaatctaaaag

SEQ ID NO: 1186605 - DNA, 15 bp, Homo sapiens
agatagaatctaaaa

SEQ ID NO: 1186606 - DNA, 15 bp, Homo sapiens
gagatagaatctaaa

SEQ ID NO: 1186607 - DNA, 15 bp, Homo sapiens
agagatagaatctaa

SEQ ID NO: 1186608 - DNA, 15 bp, Homo sapiens
gagagatagaatcta

SEQ ID NO: 1186609 - DNA, 15 bp, Homo sapiens
tgagagatagaatct

SEQ ID NO: 1186610 - DNA, 15 bp, Homo sapiens
ctgagagatagaatc

SEQ ID NO: 1186611 - DNA, 15 bp, Homo sapiens
cctgagagatagaat

SEQ ID NO: 1186612 - DNA, 15 bp, Homo sapiens
gcctgagagatagaa

SEQ ID NO: 1186613 - DNA, 15 bp, Homo sapiens
tgcctgagagataga

SEQ ID NO: 1186614 - DNA, 15 bp, Homo sapiens
ttgcctgagagatag

SEQ ID NO: 1186615 - DNA, 15 bp, Homo sapiens
tttgcctgagagata

SEQ ID NO: 1186616 - DNA, 15 bp, Homo sapiens
ttttgcctgagagat

SEQ ID NO: 1186617 - DNA, 15 bp, Homo sapiens
attttgcctgagaga

SEQ ID NO: 1186618 - DNA, 15 bp, Homo sapiens
gattttgcctgagag

SEQ ID NO: 1186619 - DNA, 15 bp, Homo sapiens
agattttgcctgaga

SEQ ID NO: 1186620 - DNA, 15 bp, Homo sapiens
gagattttgcctgag

SEQ ID NO: 1186621 - DNA, 15 bp, Homo sapiens
tgagattttgcctga

SEQ ID NO: 1186622 - DNA, 15 bp, Homo sapiens
atgagattttgcctg

SEQ ID NO: 1186623 - DNA, 15 bp, Homo sapiens
tatgagattttgcct

SEQ ID NO: 1186624 - DNA, 15 bp, Homo sapiens
ttatgagattttgcc

SEQ ID NO: 1186625 - DNA, 15 bp, Homo sapiens
tttatgagattttgc

SEQ ID NO: 1186626 - DNA, 15 bp, Homo sapiens
ctttatgagattttg

SEQ ID NO: 1186627 - DNA, 15 bp, Homo sapiens
tctttatgagatttt

SEQ ID NO: 1186628 - DNA, 15 bp, Homo sapiens
atctttatgagattt

SEQ ID NO: 1186629 - DNA, 15 bp, Homo sapiens
tatctttatgagatt

SEQ ID NO: 1186630 - DNA, 15 bp, Homo sapiens
ttatctttatgagat

SEQ ID NO: 1186631 - DNA, 15 bp, Homo sapiens
cttatctttatgaga

SEQ ID NO: 1186632 - DNA, 15 bp, Homo sapiens
acttatctttatgag

SEQ ID NO: 1186633 - DNA, 15 bp, Homo sapiens
cacttatctttatga

SEQ ID NO: 1186634 - DNA, 15 bp, Homo sapiens
ccacttatctttatg

SEQ ID NO: 1186635 - DNA, 15 bp, Homo sapiens
cccacttatctttat

SEQ ID NO: 1186636 - DNA, 15 bp, Homo sapiens
ccccacttatcttta

SEQ ID NO: 1186637 - DNA, 15 bp, Homo sapiens
tccccacttatcttt

SEQ ID NO: 1186638 - DNA, 15 bp, Homo sapiens
ctccccacttatctt

SEQ ID NO: 1186639 - DNA, 15 bp, Homo sapiens
cctccccacttatct

SEQ ID NO: 1186640 - DNA, 15 bp, Homo sapiens
tcctccccacttatc

SEQ ID NO: 1186641 - DNA, 15 bp, Homo sapiens
ttcctccccacttat

SEQ ID NO: 1186642 - DNA, 15 bp, Homo sapiens
tttcctccccactta

SEQ ID NO: 1186643 - DNA, 15 bp, Homo sapiens
ttttcctccccactt

SEQ ID NO: 1186644 - DNA, 15 bp, Homo sapiens
tttttcctccccact

SEQ ID NO: 1186645 - DNA, 15 bp, Homo sapiens
ttttttcctccccac

SEQ ID NO: 1186646 - DNA, 15 bp, Homo sapiens
tttttttcctcccca

SEQ ID NO: 1186647 - DNA, 15 bp, Homo sapiens
ctttttttcctcccc

SEQ ID NO: 1186648 - DNA, 15 bp, Homo sapiens
cctttttttcctccc

SEQ ID NO: 1186649 - DNA, 15 bp, Homo sapiens
ccctttttttcctcc

SEQ ID NO: 1186650 - DNA, 15 bp, Homo sapiens
cccctttttttcctc

SEQ ID NO: 1186651 - DNA, 15 bp, Homo sapiens
ccccctttttttcct

SEQ ID NO: 1186652 - DNA, 15 bp, Homo sapiens
accccctttttttcc

SEQ ID NO: 1186653 - DNA, 15 bp, Homo sapiens
aaccccctttttttc

SEQ ID NO: 1186654 - DNA, 15 bp, Homo sapiens
taacccccttttttt

SEQ ID NO: 1186655 - DNA, 15 bp, Homo sapiens
ataaccccctttttt

SEQ ID NO: 1186656 - DNA, 15 bp, Homo sapiens
tataacccccttttt

SEQ ID NO: 1186657 - DNA, 15 bp, Homo sapiens
ttataaccccctttt

SEQ ID NO: 1186658 - DNA, 15 bp, Homo sapiens
attataacccccttt

SEQ ID NO: 1186659 - DNA, 15 bp, Homo sapiens
tattataaccccctt

SEQ ID NO: 1186660 - DNA, 15 bp, Homo sapiens
gtattataaccccct

SEQ ID NO: 1186661 - DNA, 15 bp, Homo sapiens
ggtattataaccccc

SEQ ID NO: 1186662 - DNA, 15 bp, Homo sapiens
aggtattataacccc

SEQ ID NO: 1186663 - DNA, 15 bp, Homo sapiens
taggtattataaccc

SEQ ID NO: 1186664 - DNA, 15 bp, Homo sapiens
ctaggtattataacc

SEQ ID NO: 1186665 - DNA, 15 bp, Homo sapiens
cctaggtattataac

SEQ ID NO: 1186666 - DNA, 15 bp, Homo sapiens
ccctaggtattataa

SEQ ID NO: 1186667 - DNA, 15 bp, Homo sapiens
tccctaggtattata

SEQ ID NO: 1186668 - DNA, 15 bp, Homo sapiens
ctccctaggtattat

SEQ ID NO: 1186669 - DNA, 15 bp, Homo sapiens
actccctaggtatta

SEQ ID NO: 1186670 - DNA, 15 bp, Homo sapiens
aactccctaggtatt

SEQ ID NO: 1186671 - DNA, 15 bp, Homo sapiens
aaactccctaggtat

SEQ ID NO: 1186672 - DNA, 15 bp, Homo sapiens
caaactccctaggta

SEQ ID NO: 1186673 - DNA, 15 bp, Homo sapiens
gcaaactccctaggt

SEQ ID NO: 1186674 - DNA, 15 bp, Homo sapiens
agcaaactccctagg

SEQ ID NO: 1186675 - DNA, 15 bp, Homo sapiens
aagcaaactccctag

SEQ ID NO: 1186676 - DNA, 15 bp, Homo sapiens
aaagcaaactcccta

SEQ ID NO: 1186677 - DNA, 15 bp, Homo sapiens
aaaagcaaactccct

SEQ ID NO: 1186678 - DNA, 15 bp, Homo sapiens
caaaagcaaactccc

SEQ ID NO: 1186679 - DNA, 15 bp, Homo sapiens
gcaaaagcaaactcc

SEQ ID NO: 1186680 - DNA, 15 bp, Homo sapiens
agcaaaagcaaactc

SEQ ID NO: 1186681 - DNA, 15 bp, Homo sapiens
tagcaaaagcaaact

SEQ ID NO: 1186682 - DNA, 15 bp, Homo sapiens
ttagcaaaagcaaac

SEQ ID NO: 1186683 - DNA, 15 bp, Homo sapiens
attagcaaaagcaaa

SEQ ID NO: 1186684 - DNA, 15 bp, Homo sapiens
aattagcaaaagcaa

SEQ ID NO: 1186685 - DNA, 15 bp, Homo sapiens
caattagcaaaagca

SEQ ID NO: 1186686 - DNA, 15 bp, Homo sapiens
tcaattagcaaaagc

SEQ ID NO: 1186687 - DNA, 15 bp, Homo sapiens
ttcaattagcaaaag

SEQ ID NO: 1186688 - DNA, 15 bp, Homo sapiens
attcaattagcaaaa

SEQ ID NO: 1186689 - DNA, 15 bp, Homo sapiens
tattcaattagcaaa

SEQ ID NO: 1186690 - DNA, 15 bp, Homo sapiens
gtattcaattagcaa

SEQ ID NO: 1186691 - DNA, 15 bp, Homo sapiens
agtattcaattagca

SEQ ID NO: 1186692 - DNA, 15 bp, Homo sapiens
cagtattcaattagc

SEQ ID NO: 1186693 - DNA, 15 bp, Homo sapiens
acagtattcaattag

SEQ ID NO: 1186694 - DNA, 15 bp, Homo sapiens
cacagtattcaatta

SEQ ID NO: 1186695 - DNA, 15 bp, Homo sapiens
gcacagtattcaatt

SEQ ID NO: 1186696 - DNA, 15 bp, Homo sapiens
agcacagtattcaat

SEQ ID NO: 1186697 - DNA, 15 bp, Homo sapiens
gagcacagtattcaa

SEQ ID NO: 1186698 - DNA, 15 bp, Homo sapiens
ggagcacagtattca

SEQ ID NO: 1186699 - DNA, 15 bp, Homo sapiens
aggagcacagtattc

SEQ ID NO: 1186700 - DNA, 15 bp, Homo sapiens
taggagcacagtatt

SEQ ID NO: 1186701 - DNA, 15 bp, Homo sapiens
ctaggagcacagtat

SEQ ID NO: 1186702 - DNA, 15 bp, Homo sapiens
tctaggagcacagta

SEQ ID NO: 1186703 - DNA, 15 bp, Homo sapiens
gtctaggagcacagt

SEQ ID NO: 1186704 - DNA, 15 bp, Homo sapiens
agtctaggagcacag

SEQ ID NO: 1186705 - DNA, 15 bp, Homo sapiens
aagtctaggagcaca

SEQ ID NO: 1186706 - DNA, 15 bp, Homo sapiens
gaagtctaggagcac

SEQ ID NO: 1186707 - DNA, 15 bp, Homo sapiens
agaagtctaggagca

SEQ ID NO: 1186708 - DNA, 15 bp, Homo sapiens
tagaagtctaggagc

SEQ ID NO: 1186709 - DNA, 15 bp, Homo sapiens
atagaagtctaggag

SEQ ID NO: 1186710 - DNA, 15 bp, Homo sapiens
tatagaagtctagga

SEQ ID NO: 1186711 - DNA, 15 bp, Homo sapiens
ttatagaagtctagg

SEQ ID NO: 1186712 - DNA, 15 bp, Homo sapiens
tttatagaagtctag

SEQ ID NO: 1186713 - DNA, 15 bp, Homo sapiens
atttatagaagtcta

SEQ ID NO: 1186714 - DNA, 15 bp, Homo sapiens
tatttatagaagtct

SEQ ID NO: 1186715 - DNA, 15 bp, Homo sapiens
gtatttatagaagtc

SEQ ID NO: 1186716 - DNA, 15 bp, Homo sapiens
ggtatttatagaagt

SEQ ID NO: 1186717 - DNA, 15 bp, Homo sapiens
tggtatttatagaag

SEQ ID NO: 1186718 - DNA, 15 bp, Homo sapiens
atggtatttatagaa

SEQ ID NO: 1186719 - DNA, 15 bp, Homo sapiens
aatggtatttataga

SEQ ID NO: 1186720 - DNA, 15 bp, Homo sapiens
taatggtatttatag

SEQ ID NO: 1186721 - DNA, 15 bp, Homo sapiens
gtaatggtatttata

SEQ ID NO: 1186722 - DNA, 15 bp, Homo sapiens
tgtaatggtatttat

SEQ ID NO: 1186723 - DNA, 15 bp, Homo sapiens
ttgtaatggtattta

SEQ ID NO: 1186724 - DNA, 15 bp, Homo sapiens
tttgtaatggtattt

SEQ ID NO: 1186725 - DNA, 15 bp, Homo sapiens
atttgtaatggtatt

SEQ ID NO: 1186726 - DNA, 15 bp, Homo sapiens
catttgtaatggtat

SEQ ID NO: 1186727 - DNA, 15 bp, Homo sapiens
ccatttgtaatggta

SEQ ID NO: 1186728 - DNA, 15 bp, Homo sapiens
cccatttgtaatggt

SEQ ID NO: 1186729 - DNA, 15 bp, Homo sapiens
acccatttgtaatgg

SEQ ID NO: 1186730 - DNA, 15 bp, Homo sapiens
gacccatttgtaatg

SEQ ID NO: 1186731 - DNA, 15 bp, Homo sapiens
ggacccatttgtaat

SEQ ID NO: 1186732 - DNA, 15 bp, Homo sapiens
gggacccatttgtaa

SEQ ID NO: 1186733 - DNA, 15 bp, Homo sapiens
tgggacccatttgta

SEQ ID NO: 1186734 - DNA, 15 bp, Homo sapiens
ctgggacccatttgt

SEQ ID NO: 1186735 - DNA, 15 bp, Homo sapiens
gctgggacccatttg

SEQ ID NO: 1186736 - DNA, 15 bp, Homo sapiens
agctgggacccattt

SEQ ID NO: 1186737 - DNA, 15 bp, Homo sapiens
aagctgggacccatt

SEQ ID NO: 1186738 - DNA, 15 bp, Homo sapiens
caagctgggacccat

SEQ ID NO: 1186739 - DNA, 15 bp, Homo sapiens
acaagctgggaccca

SEQ ID NO: 1186740 - DNA, 15 bp, Homo sapiens
cacaagctgggaccc

SEQ ID NO: 1186741 - DNA, 15 bp, Homo sapiens
ccacaagctgggacc

SEQ ID NO: 1186742 - DNA, 15 bp, Homo sapiens
accacaagctgggac

SEQ ID NO: 1186743 - DNA, 15 bp, Homo sapiens
taccacaagctggga

SEQ ID NO: 1186744 - DNA, 15 bp, Homo sapiens
ttaccacaagctggg

SEQ ID NO: 1186745 - DNA, 15 bp, Homo sapiens
attaccacaagctgg

SEQ ID NO: 1186746 - DNA, 15 bp, Homo sapiens
tattaccacaagctg

SEQ ID NO: 1186747 - DNA, 15 bp, Homo sapiens
gtattaccacaagct

SEQ ID NO: 1186748 - DNA, 15 bp, Homo sapiens
agtattaccacaagc

SEQ ID NO: 1186749 - DNA, 15 bp, Homo sapiens
gagtattaccacaag

SEQ ID NO: 1186750 - DNA, 15 bp, Homo sapiens
tgagtattaccacaa

SEQ ID NO: 1186751 - DNA, 15 bp, Homo sapiens
gtgagtattaccaca

SEQ ID NO: 1186752 - DNA, 15 bp, Homo sapiens
ggtgagtattaccac

SEQ ID NO: 1186753 - DNA, 15 bp, Homo sapiens
gggtgagtattacca

SEQ ID NO: 1186754 - DNA, 15 bp, Homo sapiens
agggtgagtattacc

SEQ ID NO: 1186755 - DNA, 15 bp, Homo sapiens
gagggtgagtattac

SEQ ID NO: 1186756 - DNA, 15 bp, Homo sapiens
ggagggtgagtatta

SEQ ID NO: 1186757 - DNA, 15 bp, Homo sapiens
aggagggtgagtatt

SEQ ID NO: 1186758 - DNA, 15 bp, Homo sapiens
gaggagggtgagtat

SEQ ID NO: 1186759 - DNA, 15 bp, Homo sapiens
tgaggagggtgagta

SEQ ID NO: 1186760 - DNA, 15 bp, Homo sapiens
atgaggagggtgagt

SEQ ID NO: 1186761 - DNA, 15 bp, Homo sapiens
aatgaggagggtgag

SEQ ID NO: 1186762 - DNA, 15 bp, Homo sapiens
caatgaggagggtga

SEQ ID NO: 1186763 - DNA, 15 bp, Homo sapiens
tcaatgaggagggtg

SEQ ID NO: 1186764 - DNA, 15 bp, Homo sapiens
ctcaatgaggagggt

SEQ ID NO: 1186765 - DNA, 15 bp, Homo sapiens
actcaatgaggaggg

SEQ ID NO: 1186766 - DNA, 15 bp, Homo sapiens
gactcaatgaggagg

SEQ ID NO: 1186767 - DNA, 15 bp, Homo sapiens
agactcaatgaggag

SEQ ID NO: 1186768 - DNA, 15 bp, Homo sapiens
aagactcaatgagga

SEQ ID NO: 1186769 - DNA, 15 bp, Homo sapiens
gaagactcaatgagg

SEQ ID NO: 1186770 - DNA, 15 bp, Homo sapiens
agaagactcaatgag

SEQ ID NO: 1186771 - DNA, 15 bp, Homo sapiens
cagaagactcaatga

SEQ ID NO: 1186772 - DNA, 15 bp, Homo sapiens
acagaagactcaatg

SEQ ID NO: 1186773 - DNA, 15 bp, Homo sapiens
gacagaagactcaat

SEQ ID NO: 1186774 - DNA, 15 bp, Homo sapiens
ggacagaagactcaa

SEQ ID NO: 1186775 - DNA, 15 bp, Homo sapiens
gggacagaagactca

SEQ ID NO: 1186776 - DNA, 15 bp, Homo sapiens
tgggacagaagactc

SEQ ID NO: 1186777 - DNA, 15 bp, Homo sapiens
atgggacagaagact

SEQ ID NO: 1186778 - DNA, 15 bp, Homo sapiens
catgggacagaagac

SEQ ID NO: 1186779 - DNA, 15 bp, Homo sapiens
ccatgggacagaaga

SEQ ID NO: 1186780 - DNA, 15 bp, Homo sapiens
gccatgggacagaag

SEQ ID NO: 1186781 - DNA, 15 bp, Homo sapiens
tgccatgggacagaa

SEQ ID NO: 1186782 - DNA, 15 bp, Homo sapiens
gtgccatgggacaga

SEQ ID NO: 1186783 - DNA, 15 bp, Homo sapiens
tgtgccatgggacag

SEQ ID NO: 1186784 - DNA, 15 bp, Homo sapiens
ctgtgccatgggaca

SEQ ID NO: 1186785 - DNA, 15 bp, Homo sapiens
gctgtgccatgggac

SEQ ID NO: 1186786 - DNA, 15 bp, Homo sapiens
ggctgtgccatggga

SEQ ID NO: 1186787 - DNA, 15 bp, Homo sapiens
aggctgtgccatggg

SEQ ID NO: 1186788 - DNA, 15 bp, Homo sapiens
aaggctgtgccatgg

SEQ ID NO: 1186789 - DNA, 15 bp, Homo sapiens
aaaggctgtgccatg

SEQ ID NO: 1186790 - DNA, 15 bp, Homo sapiens
gaaaggctgtgccat

SEQ ID NO: 1186791 - DNA, 15 bp, Homo sapiens
ggaaaggctgtgcca

SEQ ID NO: 1186792 - DNA, 15 bp, Homo sapiens
gggaaaggctgtgcc

SEQ ID NO: 1186793 - DNA, 15 bp, Homo sapiens
agggaaaggctgtgc

SEQ ID NO: 1186794 - DNA, 15 bp, Homo sapiens
gagggaaaggctgtg

SEQ ID NO: 1186795 - DNA, 15 bp, Homo sapiens
ggagggaaaggctgt

SEQ ID NO: 1186796 - DNA, 15 bp, Homo sapiens
tggagggaaaggctg

SEQ ID NO: 1186797 - DNA, 15 bp, Homo sapiens
ttggagggaaaggct

SEQ ID NO: 1186798 - DNA, 15 bp, Homo sapiens
tttggagggaaaggc

SEQ ID NO: 1186799 - DNA, 15 bp, Homo sapiens
gtttggagggaaagg

SEQ ID NO: 1186800 - DNA, 15 bp, Homo sapiens
agtttggagggaaag

SEQ ID NO: 1186801 - DNA, 15 bp, Homo sapiens
tagtttggagggaaa

SEQ ID NO: 1186802 - DNA, 15 bp, Homo sapiens
ctagtttggagggaa

SEQ ID NO: 1186803 - DNA, 15 bp, Homo sapiens
gctagtttggaggga

SEQ ID NO: 1186804 - DNA, 15 bp, Homo sapiens
tgctagtttggaggg

SEQ ID NO: 1186805 - DNA, 15 bp, Homo sapiens
atgctagtttggagg

SEQ ID NO: 1186806 - DNA, 15 bp, Homo sapiens
gatgctagtttggag

SEQ ID NO: 1186807 - DNA, 15 bp, Homo sapiens
agatgctagtttgga

SEQ ID NO: 1186808 - DNA, 15 bp, Homo sapiens
tagatgctagtttgg

SEQ ID NO: 1186809 - DNA, 15 bp, Homo sapiens
gtagatgctagtttg

SEQ ID NO: 1186810 - DNA, 15 bp, Homo sapiens
ggtagatgctagttt

SEQ ID NO: 1186811 - DNA, 15 bp, Homo sapiens
gggtagatgctagtt

SEQ ID NO: 1186812 - DNA, 15 bp, Homo sapiens
ggggtagatgctagt

SEQ ID NO: 1186813 - DNA, 15 bp, Homo sapiens
gggggtagatgctag

SEQ ID NO: 1186814 - DNA, 15 bp, Homo sapiens
tgggggtagatgcta

SEQ ID NO: 1186815 - DNA, 15 bp, Homo sapiens
atgggggtagatgct

SEQ ID NO: 1186816 - DNA, 15 bp, Homo sapiens
gatgggggtagatgc

SEQ ID NO: 1186817 - DNA, 15 bp, Homo sapiens
agatgggggtagatg

SEQ ID NO: 1186818 - DNA, 15 bp, Homo sapiens
cagatgggggtagat

SEQ ID NO: 1186819 - DNA, 15 bp, Homo sapiens
ccagatgggggtaga

SEQ ID NO: 1186820 - DNA, 15 bp, Homo sapiens
tccagatgggggtag

SEQ ID NO: 1186821 - DNA, 15 bp, Homo sapiens
ttccagatgggggta

SEQ ID NO: 1186822 - DNA, 15 bp, Homo sapiens
cttccagatgggggt

SEQ ID NO: 1186823 - DNA, 15 bp, Homo sapiens
gcttccagatggggg

SEQ ID NO: 1186824 - DNA, 15 bp, Homo sapiens
tgcttccagatgggg

SEQ ID NO: 1186825 - DNA, 15 bp, Homo sapiens
atgcttccagatggg

SEQ ID NO: 1186826 - DNA, 15 bp, Homo sapiens
catgcttccagatgg

SEQ ID NO: 1186827 - DNA, 15 bp, Homo sapiens
ccatgcttccagatg

SEQ ID NO: 1186828 - DNA, 15 bp, Homo sapiens
cccatgcttccagat

SEQ ID NO: 1186829 - DNA, 15 bp, Homo sapiens
gcccatgcttccaga

SEQ ID NO: 1186830 - DNA, 15 bp, Homo sapiens
tgcccatgcttccag

SEQ ID NO: 1186831 - DNA, 15 bp, Homo sapiens
ctgcccatgcttcca

SEQ ID NO: 1186832 - DNA, 15 bp, Homo sapiens
gctgcccatgcttcc

SEQ ID NO: 1186833 - DNA, 15 bp, Homo sapiens
agctgcccatgcttc

SEQ ID NO: 1186834 - DNA, 15 bp, Homo sapiens
gagctgcccatgctt

SEQ ID NO: 1186835 - DNA, 15 bp, Homo sapiens
tgagctgcccatgct

SEQ ID NO: 1186836 - DNA, 15 bp, Homo sapiens
atgagctgcccatgc

SEQ ID NO: 1186837 - DNA, 15 bp, Homo sapiens
catgagctgcccatg

SEQ ID NO: 1186838 - DNA, 15 bp, Homo sapiens
tcatgagctgcccat

SEQ ID NO: 1186839 - DNA, 15 bp, Homo sapiens
atcatgagctgccca

SEQ ID NO: 1186840 - DNA, 15 bp, Homo sapiens
tatcatgagctgccc

SEQ ID NO: 1186841 - DNA, 15 bp, Homo sapiens
atatcatgagctgcc

SEQ ID NO: 1186842 - DNA, 15 bp, Homo sapiens
aatatcatgagctgc

SEQ ID NO: 1186843 - DNA, 15 bp, Homo sapiens
taatatcatgagctg

SEQ ID NO: 1186844 - DNA, 15 bp, Homo sapiens
ataatatcatgagct

SEQ ID NO: 1186845 - DNA, 15 bp, Homo sapiens
gataatatcatgagc

SEQ ID NO: 1186846 - DNA, 15 bp, Homo sapiens
tgataatatcatgag

SEQ ID NO: 1186847 - DNA, 15 bp, Homo sapiens
ttgataatatcatga

SEQ ID NO: 1186848 - DNA, 15 bp, Homo sapiens
gttgataatatcatg

SEQ ID NO: 1186849 - DNA, 15 bp, Homo sapiens
agttgataatatcat

SEQ ID NO: 1186850 - DNA, 15 bp, Homo sapiens
tagttgataatatca

SEQ ID NO: 1186851 - DNA, 15 bp, Homo sapiens
atagttgataatatc

SEQ ID NO: 1186852 - DNA, 15 bp, Homo sapiens
aatagttgataatat

SEQ ID NO: 1186853 - DNA, 15 bp, Homo sapiens
caatagttgataata

SEQ ID NO: 1186854 - DNA, 15 bp, Homo sapiens
gcaatagttgataat

SEQ ID NO: 1186855 - DNA, 15 bp, Homo sapiens
agcaatagttgataa

SEQ ID NO: 1186856 - DNA, 15 bp, Homo sapiens
tagcaatagttgata

SEQ ID NO: 1186857 - DNA, 15 bp, Homo sapiens
atagcaatagttgat

SEQ ID NO: 1186858 - DNA, 15 bp, Homo sapiens
aatagcaatagttga

SEQ ID NO: 1186859 - DNA, 15 bp, Homo sapiens
caatagcaatagttg

SEQ ID NO: 1186860 - DNA, 15 bp, Homo sapiens
ccaatagcaatagtt

SEQ ID NO: 1186861 - DNA, 15 bp, Homo sapiens
tccaatagcaatagt

SEQ ID NO: 1186862 - DNA, 15 bp, Homo sapiens
ttccaatagcaatag

SEQ ID NO: 1186863 - DNA, 15 bp, Homo sapiens
tttccaatagcaata

SEQ ID NO: 1186864 - DNA, 15 bp, Homo sapiens
ctttccaatagcaat

SEQ ID NO: 1186865 - DNA, 15 bp, Homo sapiens
actttccaatagcaa

SEQ ID NO: 1186866 - DNA, 15 bp, Homo sapiens
cactttccaatagca

SEQ ID NO: 1186867 - DNA, 15 bp, Homo sapiens
tcactttccaatagc

SEQ ID NO: 1186868 - DNA, 15 bp, Homo sapiens
atcactttccaatag

SEQ ID NO: 1186869 - DNA, 15 bp, Homo sapiens
aatcactttccaata

SEQ ID NO: 1186870 - DNA, 15 bp, Homo sapiens
aaatcactttccaat

SEQ ID NO: 1186871 - DNA, 15 bp, Homo sapiens
caaatcactttccaa

SEQ ID NO: 1186872 - DNA, 15 bp, Homo sapiens
ccaaatcactttcca

SEQ ID NO: 1186873 - DNA, 15 bp, Homo sapiens
tccaaatcactttcc

SEQ ID NO: 1186874 - DNA, 15 bp, Homo sapiens
gtccaaatcactttc

SEQ ID NO: 1186875 - DNA, 15 bp, Homo sapiens
agtccaaatcacttt

SEQ ID NO: 1186876 - DNA, 15 bp, Homo sapiens
aagtccaaatcactt

SEQ ID NO: 1186877 - DNA, 15 bp, Homo sapiens
caagtccaaatcact

SEQ ID NO: 1186878 - DNA, 15 bp, Homo sapiens
tcaagtccaaatcac

SEQ ID NO: 1186879 - DNA, 15 bp, Homo sapiens
ttcaagtccaaatca

SEQ ID NO: 1186880 - DNA, 15 bp, Homo sapiens
tttcaagtccaaatc

SEQ ID NO: 1186881 - DNA, 15 bp, Homo sapiens
ctttcaagtccaaat

SEQ ID NO: 1186882 - DNA, 15 bp, Homo sapiens
gctttcaagtccaaa

SEQ ID NO: 1186883 - DNA, 15 bp, Homo sapiens
tgctttcaagtccaa

SEQ ID NO: 1186884 - DNA, 15 bp, Homo sapiens
gtgctttcaagtcca

SEQ ID NO: 1186885 - DNA, 15 bp, Homo sapiens
agtgctttcaagtcc

SEQ ID NO: 1186886 - DNA, 15 bp, Homo sapiens
tagtgctttcaagtc

SEQ ID NO: 1186887 - DNA, 15 bp, Homo sapiens
ctagtgctttcaagt

SEQ ID NO: 1186888 - DNA, 15 bp, Homo sapiens
tctagtgctttcaag

SEQ ID NO: 1186889 - DNA, 15 bp, Homo sapiens
atctagtgctttcaa

SEQ ID NO: 1186890 - DNA, 15 bp, Homo sapiens
tatctagtgctttca

SEQ ID NO: 1186891 - DNA, 15 bp, Homo sapiens
atatctagtgctttc

SEQ ID NO: 1186892 - DNA, 15 bp, Homo sapiens
aatatctagtgcttt

SEQ ID NO: 1186893 - DNA, 15 bp, Homo sapiens
aaatatctagtgctt

SEQ ID NO: 1186894 - DNA, 15 bp, Homo sapiens
aaaatatctagtgct

SEQ ID NO: 1186895 - DNA, 15 bp, Homo sapiens
aaaaatatctagtgc

SEQ ID NO: 1186896 - DNA, 15 bp, Homo sapiens
aaaaaatatctagtg

SEQ ID NO: 1186897 - DNA, 15 bp, Homo sapiens
taaaaaatatctagt

SEQ ID NO: 1186898 - DNA, 15 bp, Homo sapiens
gtaaaaaatatctag

SEQ ID NO: 1186899 - DNA, 15 bp, Homo sapiens
ggtaaaaaatatcta

SEQ ID NO: 1186900 - DNA, 15 bp, Homo sapiens
aggtaaaaaatatct

SEQ ID NO: 1186901 - DNA, 15 bp, Homo sapiens
gaggtaaaaaatatc

SEQ ID NO: 1186902 - DNA, 15 bp, Homo sapiens
agaggtaaaaaatat

SEQ ID NO: 1186903 - DNA, 15 bp, Homo sapiens
aagaggtaaaaaata

SEQ ID NO: 1186904 - DNA, 15 bp, Homo sapiens
caagaggtaaaaaat

SEQ ID NO: 1186905 - DNA, 15 bp, Homo sapiens
ccaagaggtaaaaaa

SEQ ID NO: 1186906 - DNA, 15 bp, Homo sapiens
cccaagaggtaaaaa

SEQ ID NO: 1186907 - DNA, 15 bp, Homo sapiens
ccccaagaggtaaaa

SEQ ID NO: 1186908 - DNA, 15 bp, Homo sapiens
tccccaagaggtaaa

SEQ ID NO: 1186909 - DNA, 15 bp, Homo sapiens
ctccccaagaggtaa

SEQ ID NO: 1186910 - DNA, 15 bp, Homo sapiens
cctccccaagaggta

SEQ ID NO: 1186911 - DNA, 15 bp, Homo sapiens
gcctccccaagaggt

SEQ ID NO: 1186912 - DNA, 15 bp, Homo sapiens
tgcctccccaagagg

SEQ ID NO: 1186913 - DNA, 15 bp, Homo sapiens
ctgcctccccaagag

SEQ ID NO: 1186914 - DNA, 15 bp, Homo sapiens
actgcctccccaaga

SEQ ID NO: 1186915 - DNA, 15 bp, Homo sapiens
aactgcctccccaag

SEQ ID NO: 1186916 - DNA, 15 bp, Homo sapiens
aaactgcctccccaa

SEQ ID NO: 1186917 - DNA, 15 bp, Homo sapiens
taaactgcctcccca

SEQ ID NO: 1186918 - DNA, 15 bp, Homo sapiens
ctaaactgcctcccc

SEQ ID NO: 1186919 - DNA, 15 bp, Homo sapiens
gctaaactgcctccc

SEQ ID NO: 1186920 - DNA, 15 bp, Homo sapiens
tgctaaactgcctcc

SEQ ID NO: 1186921 - DNA, 15 bp, Homo sapiens
ctgctaaactgcctc

SEQ ID NO: 1186922 - DNA, 15 bp, Homo sapiens
tctgctaaactgcct

SEQ ID NO: 1186923 - DNA, 15 bp, Homo sapiens
ctctgctaaactgcc

SEQ ID NO: 1186924 - DNA, 15 bp, Homo sapiens
actctgctaaactgc

SEQ ID NO: 1186925 - DNA, 15 bp, Homo sapiens
cactctgctaaactg

SEQ ID NO: 1186926 - DNA, 15 bp, Homo sapiens
ccactctgctaaact

SEQ ID NO: 1186927 - DNA, 15 bp, Homo sapiens
accactctgctaaac

SEQ ID NO: 1186928 - DNA, 15 bp, Homo sapiens
aaccactctgctaaa

SEQ ID NO: 1186929 - DNA, 15 bp, Homo sapiens
taaccactctgctaa

SEQ ID NO: 1186930 - DNA, 15 bp, Homo sapiens
ttaaccactctgcta

SEQ ID NO: 1186931 - DNA, 15 bp, Homo sapiens
gttaaccactctgct

SEQ ID NO: 1186932 - DNA, 15 bp, Homo sapiens
agttaaccactctgc

SEQ ID NO: 1186933 - DNA, 15 bp, Homo sapiens
cagttaaccactctg

SEQ ID NO: 1186934 - DNA, 15 bp, Homo sapiens
ccagttaaccactct

SEQ ID NO: 1186935 - DNA, 15 bp, Homo sapiens
accagttaaccactc

SEQ ID NO: 1186936 - DNA, 15 bp, Homo sapiens
caccagttaaccact

SEQ ID NO: 1186937 - DNA, 15 bp, Homo sapiens
tcaccagttaaccac

SEQ ID NO: 1186938 - DNA, 15 bp, Homo sapiens
ctcaccagttaacca

SEQ ID NO: 1186939 - DNA, 15 bp, Homo sapiens
gctcaccagttaacc

SEQ ID NO: 1186940 - DNA, 15 bp, Homo sapiens
agctcaccagttaac

SEQ ID NO: 1186941 - DNA, 15 bp, Homo sapiens
gagctcaccagttaa

SEQ ID NO: 1186942 - DNA, 15 bp, Homo sapiens
ggagctcaccagtta

SEQ ID NO: 1186943 - DNA, 15 bp, Homo sapiens
tggagctcaccagtt

SEQ ID NO: 1186944 - DNA, 15 bp, Homo sapiens
ctggagctcaccagt

SEQ ID NO: 1186945 - DNA, 15 bp, Homo sapiens
tctggagctcaccag

SEQ ID NO: 1186946 - DNA, 15 bp, Homo sapiens
ttctggagctcacca

SEQ ID NO: 1186947 - DNA, 15 bp, Homo sapiens
attctggagctcacc

SEQ ID NO: 1186948 - DNA, 15 bp, Homo sapiens
gattctggagctcac

SEQ ID NO: 1186949 - DNA, 15 bp, Homo sapiens
tgattctggagctca

SEQ ID NO: 1186950 - DNA, 15 bp, Homo sapiens
ctgattctggagctc

SEQ ID NO: 1186951 - DNA, 15 bp, Homo sapiens
tctgattctggagct

SEQ ID NO: 1186952 - DNA, 15 bp, Homo sapiens
ttctgattctggagc

SEQ ID NO: 1186953 - DNA, 15 bp, Homo sapiens
cttctgattctggag

SEQ ID NO: 1186954 - DNA, 15 bp, Homo sapiens
ccttctgattctgga

SEQ ID NO: 1186955 - DNA, 15 bp, Homo sapiens
tccttctgattctgg

SEQ ID NO: 1186956 - DNA, 15 bp, Homo sapiens
ttccttctgattctg

SEQ ID NO: 1186957 - DNA, 15 bp, Homo sapiens
attccttctgattct

SEQ ID NO: 1186958 - DNA, 15 bp, Homo sapiens
tattccttctgattc

SEQ ID NO: 1186959 - DNA, 15 bp, Homo sapiens
ctattccttctgatt

SEQ ID NO: 1186960 - DNA, 15 bp, Homo sapiens
cctattccttctgat

SEQ ID NO: 1186961 - DNA, 15 bp, Homo sapiens
acctattccttctga

SEQ ID NO: 1186962 - DNA, 15 bp, Homo sapiens
gacctattccttctg

SEQ ID NO: 1186963 - DNA, 15 bp, Homo sapiens
ggacctattccttct

SEQ ID NO: 1186964 - DNA, 15 bp, Homo sapiens
tggacctattccttc

SEQ ID NO: 1186965 - DNA, 15 bp, Homo sapiens
ttggacctattcctt

SEQ ID NO: 1186966 - DNA, 15 bp, Homo sapiens
tttggacctattcct

SEQ ID NO: 1186967 - DNA, 15 bp, Homo sapiens
atttggacctattcc

SEQ ID NO: 1186968 - DNA, 15 bp, Homo sapiens
aatttggacctattc

SEQ ID NO: 1186969 - DNA, 15 bp, Homo sapiens
gaatttggacctatt

SEQ ID NO: 1186970 - DNA, 15 bp, Homo sapiens
ggaatttggacctat

SEQ ID NO: 1186971 - DNA, 15 bp, Homo sapiens
tggaatttggaccta

SEQ ID NO: 1186972 - DNA, 15 bp, Homo sapiens
ttggaatttggacct

SEQ ID NO: 1186973 - DNA, 15 bp, Homo sapiens
gttggaatttggacc

SEQ ID NO: 1186974 - DNA, 15 bp, Homo sapiens
ggttggaatttggac

SEQ ID NO: 1186975 - DNA, 15 bp, Homo sapiens
gtggttggaatttgg

SEQ ID NO: 1186976 - DNA, 15 bp, Homo sapiens
agtggttggaatttg

SEQ ID NO: 1186977 - DNA, 15 bp, Homo sapiens
tagtggttggaattt

SEQ ID NO: 1186978 - DNA, 15 bp, Homo sapiens
atagtggttggaatt

SEQ ID NO: 1186979 - DNA, 15 bp, Homo sapiens
aatagtggttggaat

SEQ ID NO: 1186980 - DNA, 15 bp, Homo sapiens
taatagtggttggaa

SEQ ID NO: 1186981 - DNA, 15 bp, Homo sapiens
gtaatagtggttgga

SEQ ID NO: 1186982 - DNA, 15 bp, Homo sapiens
tgtaatagtggttgg

SEQ ID NO: 1186983 - DNA, 15 bp, Homo sapiens
atgtaatagtggttg

SEQ ID NO: 1186984 - DNA, 15 bp, Homo sapiens
gatgtaatagtggtt

SEQ ID NO: 1186985 - DNA, 15 bp, Homo sapiens
agatgtaatagtggt

SEQ ID NO: 1186986 - DNA, 15 bp, Homo sapiens
gagatgtaatagtgg

SEQ ID NO: 1186987 - DNA, 15 bp, Homo sapiens
ggagatgtaatagtg

SEQ ID NO: 1186988 - DNA, 15 bp, Homo sapiens
tggagatgtaatagt

SEQ ID NO: 1186989 - DNA, 15 bp, Homo sapiens
atggagatgtaatag

SEQ ID NO: 1186990 - DNA, 15 bp, Homo sapiens
gatggagatgtaata

SEQ ID NO: 1186991 - DNA, 15 bp, Homo sapiens
tgatggagatgtaat

SEQ ID NO: 1186992 - DNA, 15 bp, Homo sapiens
atgatggagatgtaa

SEQ ID NO: 1186993 - DNA, 15 bp, Homo sapiens
tatgatggagatgta

SEQ ID NO: 1186994 - DNA, 15 bp, Homo sapiens
ttatgatggagatgt

SEQ ID NO: 1186995 - DNA, 15 bp, Homo sapiens
cttatgatggagatg

SEQ ID NO: 1186996 - DNA, 15 bp, Homo sapiens
tcttatgatggagat

SEQ ID NO: 1186997 - DNA, 15 bp, Homo sapiens
ttcttatgatggaga

SEQ ID NO: 1186998 - DNA, 15 bp, Homo sapiens
tttcttatgatggag

SEQ ID NO: 1186999 - DNA, 15 bp, Homo sapiens
atttcttatgatgga

SEQ ID NO: 1187000 - DNA, 15 bp, Homo sapiens
aatttcttatgatgg

SEQ ID NO: 1187001 - DNA, 15 bp, Homo sapiens
taatttcttatgatg

SEQ ID NO: 1187002 - DNA, 15 bp, Homo sapiens
ctaatttcttatgat

SEQ ID NO: 1187003 - DNA, 15 bp, Homo sapiens
cctaatttcttatga

SEQ ID NO: 1187004 - DNA, 15 bp, Homo sapiens
gcctaatttcttatg

SEQ ID NO: 1187005 - DNA, 15 bp, Homo sapiens
tgcctaatttcttat

SEQ ID NO: 1187006 - DNA, 15 bp, Homo sapiens
ttgcctaatttctta

SEQ ID NO: 1187007 - DNA, 15 bp, Homo sapiens
cttgcctaatttctt

SEQ ID NO: 1187008 - DNA, 15 bp, Homo sapiens
acttgcctaatttct

SEQ ID NO: 1187009 - DNA, 15 bp, Homo sapiens
aacttgcctaatttc

SEQ ID NO: 1187010 - DNA, 15 bp, Homo sapiens
caacttgcctaattt

SEQ ID NO: 1187011 - DNA, 15 bp, Homo sapiens
acaacttgcctaatt

SEQ ID NO: 1187012 - DNA, 15 bp, Homo sapiens
aacaacttgcctaat

SEQ ID NO: 1187013 - DNA, 15 bp, Homo sapiens
aaacaacttgcctaa

SEQ ID NO: 1187014 - DNA, 15 bp, Homo sapiens
taaacaacttgccta

SEQ ID NO: 1187015 - DNA, 15 bp, Homo sapiens
ataaacaacttgcct

SEQ ID NO: 1187016 - DNA, 15 bp, Homo sapiens
gataaacaacttgcc

SEQ ID NO: 1187017 - DNA, 15 bp, Homo sapiens
ggataaacaacttgc

SEQ ID NO: 1187018 - DNA, 15 bp, Homo sapiens
aggataaacaacttg

SEQ ID NO: 1187019 - DNA, 15 bp, Homo sapiens
taggataaacaactt

SEQ ID NO: 1187020 - DNA, 15 bp, Homo sapiens
ttaggataaacaact

SEQ ID NO: 1187021 - DNA, 15 bp, Homo sapiens
cttaggataaacaac

SEQ ID NO: 1187022 - DNA, 15 bp, Homo sapiens
acttaggataaacaa

SEQ ID NO: 1187023 - DNA, 15 bp, Homo sapiens
aacttaggataaaca

SEQ ID NO: 1187024 - DNA, 15 bp, Homo sapiens
aaacttaggataaac

SEQ ID NO: 1187025 - DNA, 15 bp, Homo sapiens
gaaacttaggataaa

SEQ ID NO: 1187026 - DNA, 15 bp, Homo sapiens
tgaaacttaggataa

SEQ ID NO: 1187027 - DNA, 15 bp, Homo sapiens
ctgaaacttaggata

SEQ ID NO: 1187028 - DNA, 15 bp, Homo sapiens
tctgaaacttaggat

SEQ ID NO: 1187029 - DNA, 15 bp, Homo sapiens
atctgaaacttagga

SEQ ID NO: 1187030 - DNA, 15 bp, Homo sapiens
aatctgaaacttagg

SEQ ID NO: 1187031 - DNA, 15 bp, Homo sapiens
gaatctgaaacttag

SEQ ID NO: 1187032 - DNA, 15 bp, Homo sapiens
ggaatctgaaactta

SEQ ID NO: 1187033 - DNA, 15 bp, Homo sapiens
aggaatctgaaactt

SEQ ID NO: 1187034 - DNA, 15 bp, Homo sapiens
aaggaatctgaaact

SEQ ID NO: 1187035 - DNA, 15 bp, Homo sapiens
taaggaatctgaaac

SEQ ID NO: 1187036 - DNA, 15 bp, Homo sapiens
ttaaggaatctgaaa

SEQ ID NO: 1187037 - DNA, 15 bp, Homo sapiens
tttaaggaatctgaa

SEQ ID NO: 1187038 - DNA, 15 bp, Homo sapiens
ctttaaggaatctga

SEQ ID NO: 1187039 - DNA, 15 bp, Homo sapiens
tctttaaggaatctg

SEQ ID NO: 1187040 - DNA, 15 bp, Homo sapiens
atctttaaggaatct

SEQ ID NO: 1187041 - DNA, 15 bp, Homo sapiens
tatctttaaggaatc

SEQ ID NO: 1187042 - DNA, 15 bp, Homo sapiens
ttatctttaaggaat

SEQ ID NO: 1187043 - DNA, 15 bp, Homo sapiens
tttatctttaaggaa

SEQ ID NO: 1187044 - DNA, 15 bp, Homo sapiens
ttttatctttaagga

SEQ ID NO: 1187045 - DNA, 15 bp, Homo sapiens
gttttatctttaagg

SEQ ID NO: 1187046 - DNA, 15 bp, Homo sapiens
tgttttatctttaag

SEQ ID NO: 1187047 - DNA, 15 bp, Homo sapiens
ctgttttatctttaa

SEQ ID NO: 1187048 - DNA, 15 bp, Homo sapiens
actgttttatcttta

SEQ ID NO: 1187049 - DNA, 15 bp, Homo sapiens
gactgttttatcttt

SEQ ID NO: 1187050 - DNA, 15 bp, Homo sapiens
tgactgttttatctt

SEQ ID NO: 1187051 - DNA, 15 bp, Homo sapiens
ttgactgttttatct

SEQ ID NO: 1187052 - DNA, 15 bp, Homo sapiens
cttgactgttttatc

SEQ ID NO: 1187053 - DNA, 15 bp, Homo sapiens
tcttgactgttttat

SEQ ID NO: 1187054 - DNA, 15 bp, Homo sapiens
gtcttgactgtttta

SEQ ID NO: 1187055 - DNA, 15 bp, Homo sapiens
tgtcttgactgtttt

SEQ ID NO: 1187056 - DNA, 15 bp, Homo sapiens
ctgtcttgactgttt

SEQ ID NO: 1187057 - DNA, 15 bp, Homo sapiens
actgtcttgactgtt

SEQ ID NO: 1187058 - DNA, 15 bp, Homo sapiens
tactgtcttgactgt

SEQ ID NO: 1187059 - DNA, 15 bp, Homo sapiens
ctactgtcttgactg

SEQ ID NO: 1187060 - DNA, 15 bp, Homo sapiens
actactgtcttgact

SEQ ID NO: 1187061 - DNA, 15 bp, Homo sapiens
tactactgtcttgac

SEQ ID NO: 1187062 - DNA, 15 bp, Homo sapiens
gtactactgtcttga

SEQ ID NO: 1187063 - DNA, 15 bp, Homo sapiens
agtactactgtcttg

SEQ ID NO: 1187064 - DNA, 15 bp, Homo sapiens
aagtactactgtctt

SEQ ID NO: 1187065 - DNA, 15 bp, Homo sapiens
taagtactactgtct

SEQ ID NO: 1187066 - DNA, 15 bp, Homo sapiens
ataagtactactgtc

SEQ ID NO: 1187067 - DNA, 15 bp, Homo sapiens
gataagtactactgt

SEQ ID NO: 1187068 - DNA, 15 bp, Homo sapiens
ggataagtactactg

SEQ ID NO: 1187069 - DNA, 15 bp, Homo sapiens
gggataagtactact

SEQ ID NO: 1187070 - DNA, 15 bp, Homo sapiens
agggataagtactac

SEQ ID NO: 1187071 - DNA, 15 bp, Homo sapiens
cagggataagtacta

SEQ ID NO: 1187072 - DNA, 15 bp, Homo sapiens
tcagggataagtact

SEQ ID NO: 1187073 - DNA, 15 bp, Homo sapiens
ctcagggataagtac

SEQ ID NO: 1187074 - DNA, 15 bp, Homo sapiens
tctcagggataagta

SEQ ID NO: 1187075 - DNA, 15 bp, Homo sapiens
ctctcagggataagt

SEQ ID NO: 1187076 - DNA, 15 bp, Homo sapiens
tctctcagggataag

SEQ ID NO: 1187077 - DNA, 15 bp, Homo sapiens
ttctctcagggataa

SEQ ID NO: 1187078 - DNA, 15 bp, Homo sapiens
cttctctcagggata

SEQ ID NO: 1187079 - DNA, 15 bp, Homo sapiens
acttctctcagggat

SEQ ID NO: 1187080 - DNA, 15 bp, Homo sapiens
tacttctctcaggga

SEQ ID NO: 1187081 - DNA, 15 bp, Homo sapiens
atacttctctcaggg

SEQ ID NO: 1187082 - DNA, 15 bp, Homo sapiens
tatacttctctcagg

SEQ ID NO: 1187083 - DNA, 15 bp, Homo sapiens
ctatacttctctcag

SEQ ID NO: 1187084 - DNA, 15 bp, Homo sapiens
cctatacttctctca

SEQ ID NO: 1187085 - DNA, 15 bp, Homo sapiens
tcctatacttctctc

SEQ ID NO: 1187086 - DNA, 15 bp, Homo sapiens
ttcctatacttctct

SEQ ID NO: 1187087 - DNA, 15 bp, Homo sapiens
tttcctatacttctc

SEQ ID NO: 1187088 - DNA, 15 bp, Homo sapiens
gtttcctatacttct

SEQ ID NO: 1187089 - DNA, 15 bp, Homo sapiens
tgtttcctatacttc

SEQ ID NO: 1187090 - DNA, 15 bp, Homo sapiens
ttgtttcctatactt

SEQ ID NO: 1187091 - DNA, 15 bp, Homo sapiens
cttgtttcctatact

SEQ ID NO: 1187092 - DNA, 15 bp, Homo sapiens
tcttgtttcctatac

SEQ ID NO: 1187093 - DNA, 15 bp, Homo sapiens
ttcttgtttcctata

SEQ ID NO: 1187094 - DNA, 15 bp, Homo sapiens
tttcttgtttcctat

SEQ ID NO: 1187095 - DNA, 15 bp, Homo sapiens
ttttcttgtttccta

SEQ ID NO: 1187096 - DNA, 15 bp, Homo sapiens
attttcttgtttcct

SEQ ID NO: 1187097 - DNA, 15 bp, Homo sapiens
tattttcttgtttcc

SEQ ID NO: 1187098 - DNA, 15 bp, Homo sapiens
atattttcttgtttc

SEQ ID NO: 1187099 - DNA, 15 bp, Homo sapiens
tatattttcttgttt

SEQ ID NO: 1187100 - DNA, 15 bp, Homo sapiens
atatattttcttgtt

SEQ ID NO: 1187101 - DNA, 15 bp, Homo sapiens
catatattttcttgt

SEQ ID NO: 1187102 - DNA, 15 bp, Homo sapiens
gcatatattttcttg

SEQ ID NO: 1187103 - DNA, 15 bp, Homo sapiens
tgcatatattttctt

SEQ ID NO: 1187104 - DNA, 15 bp, Homo sapiens
ttgcatatattttct

SEQ ID NO: 1187105 - DNA, 15 bp, Homo sapiens
attgcatatattttc

SEQ ID NO: 1187106 - DNA, 15 bp, Homo sapiens
aattgcatatatttt

SEQ ID NO: 1187107 - DNA, 15 bp, Homo sapiens
aaattgcatatattt

SEQ ID NO: 1187108 - DNA, 15 bp, Homo sapiens
taaattgcatatatt

SEQ ID NO: 1187109 - DNA, 15 bp, Homo sapiens
gtaaattgcatatat

SEQ ID NO: 1187110 - DNA, 15 bp, Homo sapiens
tgtaaattgcatata

SEQ ID NO: 1187111 - DNA, 15 bp, Homo sapiens
atgtaaattgcatat

SEQ ID NO: 1187112 - DNA, 15 bp, Homo sapiens
tatgtaaattgcata

SEQ ID NO: 1187113 - DNA, 15 bp, Homo sapiens
gtatgtaaattgcat

SEQ ID NO: 1187114 - DNA, 15 bp, Homo sapiens
tgtatgtaaattgca

SEQ ID NO: 1187115 - DNA, 15 bp, Homo sapiens
atgtatgtaaattgc

SEQ ID NO: 1187116 - DNA, 15 bp, Homo sapiens
tatgtatgtaaattg

SEQ ID NO: 1187117 - DNA, 15 bp, Homo sapiens
gtatgtatgtaaatt

SEQ ID NO: 1187118 - DNA, 15 bp, Homo sapiens
agtatgtatgtaaat

SEQ ID NO: 1187119 - DNA, 15 bp, Homo sapiens
tagtatgtatgtaaa

SEQ ID NO: 1187120 - DNA, 15 bp, Homo sapiens
gtagtatgtatgtaa

SEQ ID NO: 1187121 - DNA, 15 bp, Homo sapiens
tgtagtatgtatgta

SEQ ID NO: 1187122 - DNA, 15 bp, Homo sapiens
ttgtagtatgtatgt

SEQ ID NO: 1187123 - DNA, 15 bp, Homo sapiens
attgtagtatgtatg

SEQ ID NO: 1187124 - DNA, 15 bp, Homo sapiens
gattgtagtatgtat

SEQ ID NO: 1187125 - DNA, 15 bp, Homo sapiens
ggattgtagtatgta

SEQ ID NO: 1187126 - DNA, 15 bp, Homo sapiens
gggattgtagtatgt

SEQ ID NO: 1187127 - DNA, 15 bp, Homo sapiens
ggggattgtagtatg

SEQ ID NO: 1187128 - DNA, 15 bp, Homo sapiens
tggggattgtagtat

SEQ ID NO: 1187129 - DNA, 15 bp, Homo sapiens
ctggggattgtagta

SEQ ID NO: 1187130 - DNA, 15 bp, Homo sapiens
gctggggattgtagt

SEQ ID NO: 1187131 - DNA, 15 bp, Homo sapiens
tgctggggattgtag

SEQ ID NO: 1187132 - DNA, 15 bp, Homo sapiens
gtgctggggattgta

SEQ ID NO: 1187133 - DNA, 15 bp, Homo sapiens
tgtgctggggattgt

SEQ ID NO: 1187134 - DNA, 15 bp, Homo sapiens
atgtgctggggattg

SEQ ID NO: 1187135 - DNA, 15 bp, Homo sapiens
catgtgctggggatt

SEQ ID NO: 1187136 - DNA, 15 bp, Homo sapiens
tcatgtgctggggat

SEQ ID NO: 1187137 - DNA, 15 bp, Homo sapiens
gtcatgtgctgggga

SEQ ID NO: 1187138 - DNA, 15 bp, Homo sapiens
tgtcatgtgctgggg

SEQ ID NO: 1187139 - DNA, 15 bp, Homo sapiens
ttgtcatgtgctggg

SEQ ID NO: 1187140 - DNA, 15 bp, Homo sapiens
tttgtcatgtgctgg

SEQ ID NO: 1187141 - DNA, 15 bp, Homo sapiens
atttgtcatgtgctg

SEQ ID NO: 1187142 - DNA, 15 bp, Homo sapiens
catttgtcatgtgct

SEQ ID NO: 1187143 - DNA, 15 bp, Homo sapiens
acatttgtcatgtgc

SEQ ID NO: 1187144 - DNA, 15 bp, Homo sapiens
aacatttgtcatgtg

SEQ ID NO: 1187145 - DNA, 15 bp, Homo sapiens
gaacatttgtcatgt

SEQ ID NO: 1187146 - DNA, 15 bp, Homo sapiens
tgaacatttgtcatg

SEQ ID NO: 1187147 - DNA, 15 bp, Homo sapiens
ttgaacatttgtcat

SEQ ID NO: 1187148 - DNA, 15 bp, Homo sapiens
cttgaacatttgtca

SEQ ID NO: 1187149 - DNA, 15 bp, Homo sapiens
acttgaacatttgtc

SEQ ID NO: 1187150 - DNA, 15 bp, Homo sapiens
tacttgaacatttgt

SEQ ID NO: 1187151 - DNA, 15 bp, Homo sapiens
ttacttgaacatttg

SEQ ID NO: 1187152 - DNA, 15 bp, Homo sapiens
attacttgaacattt

SEQ ID NO: 1187153 - DNA, 15 bp, Homo sapiens
cattacttgaacatt

SEQ ID NO: 1187154 - DNA, 15 bp, Homo sapiens
ccattacttgaacat

SEQ ID NO: 1187155 - DNA, 15 bp, Homo sapiens
cccattacttgaaca

SEQ ID NO: 1187156 - DNA, 15 bp, Homo sapiens
tcccattacttgaac

SEQ ID NO: 1187157 - DNA, 15 bp, Homo sapiens
ttcccattacttgaa

SEQ ID NO: 1187158 - DNA, 15 bp, Homo sapiens
gttcccattacttga

SEQ ID NO: 1187159 - DNA, 15 bp, Homo sapiens
agttcccattacttg

SEQ ID NO: 1187160 - DNA, 15 bp, Homo sapiens
cagttcccattactt

SEQ ID NO: 1187161 - DNA, 15 bp, Homo sapiens
acagttcccattact

SEQ ID NO: 1187162 - DNA, 15 bp, Homo sapiens
aacagttcccattac

SEQ ID NO: 1187163 - DNA, 15 bp, Homo sapiens
taacagttcccatta

SEQ ID NO: 1187164 - DNA, 15 bp, Homo sapiens
ataacagttcccatt

SEQ ID NO: 1187165 - DNA, 15 bp, Homo sapiens
aataacagttcccat

SEQ ID NO: 1187166 - DNA, 15 bp, Homo sapiens
taataacagttccca

SEQ ID NO: 1187167 - DNA, 15 bp, Homo sapiens
ataataacagttccc

SEQ ID NO: 1187168 - DNA, 15 bp, Homo sapiens
aataataacagttcc

SEQ ID NO: 1187169 - DNA, 15 bp, Homo sapiens
aaataataacagttc

SEQ ID NO: 1187170 - DNA, 15 bp, Homo sapiens
aaaataataacagtt

SEQ ID NO: 1187171 - DNA, 15 bp, Homo sapiens
taaaataataacagt

SEQ ID NO: 1187172 - DNA, 15 bp, Homo sapiens
ctaaaataataacag

SEQ ID NO: 1187173 - DNA, 15 bp, Homo sapiens
gctaaaataataaca

SEQ ID NO: 1187174 - DNA, 15 bp, Homo sapiens
ggctaaaataataac

SEQ ID NO: 1187175 - DNA, 15 bp, Homo sapiens
gggctaaaataataa

SEQ ID NO: 1187176 - DNA, 15 bp, Homo sapiens
agggctaaaataata

SEQ ID NO: 1187177 - DNA, 15 bp, Homo sapiens
aagggctaaaataat

SEQ ID NO: 1187178 - DNA, 15 bp, Homo sapiens
aaagggctaaaataa

SEQ ID NO: 1187179 - DNA, 15 bp, Homo sapiens
caaagggctaaaata

SEQ ID NO: 1187180 - DNA, 15 bp, Homo sapiens
acaaagggctaaaat

SEQ ID NO: 1187181 - DNA, 15 bp, Homo sapiens
gacaaagggctaaaa

SEQ ID NO: 1187182 - DNA, 15 bp, Homo sapiens
agacaaagggctaaa

SEQ ID NO: 1187183 - DNA, 15 bp, Homo sapiens
tagacaaagggctaa

SEQ ID NO: 1187184 - DNA, 15 bp, Homo sapiens
atagacaaagggcta

SEQ ID NO: 1187185 - DNA, 15 bp, Homo sapiens
gatagacaaagggct

SEQ ID NO: 1187186 - DNA, 15 bp, Homo sapiens
tgatagacaaagggc

SEQ ID NO: 1187187 - DNA, 15 bp, Homo sapiens
ctgatagacaaaggg

SEQ ID NO: 1187188 - DNA, 15 bp, Homo sapiens
actgatagacaaagg

SEQ ID NO: 1187189 - DNA, 15 bp, Homo sapiens
aactgatagacaaag

SEQ ID NO: 1187190 - DNA, 15 bp, Homo sapiens
aaactgatagacaaa

SEQ ID NO: 1187191 - DNA, 15 bp, Homo sapiens
caaactgatagacaa

SEQ ID NO: 1187192 - DNA, 15 bp, Homo sapiens
acaaactgatagaca

SEQ ID NO: 1187193 - DNA, 15 bp, Homo sapiens
aacaaactgatagac

SEQ ID NO: 1187194 - DNA, 15 bp, Homo sapiens
gaacaaactgataga

SEQ ID NO: 1187195 - DNA, 15 bp, Homo sapiens
ggaacaaactgatag

SEQ ID NO: 1187196 - DNA, 15 bp, Homo sapiens
aggaacaaactgata

SEQ ID NO: 1187197 - DNA, 15 bp, Homo sapiens
gaggaacaaactgat

SEQ ID NO: 1187198 - DNA, 15 bp, Homo sapiens
agaggaacaaactga

SEQ ID NO: 1187199 - DNA, 15 bp, Homo sapiens
cagaggaacaaactg

SEQ ID NO: 1187200 - DNA, 15 bp, Homo sapiens
acagaggaacaaact

SEQ ID NO: 1187201 - DNA, 15 bp, Homo sapiens
cacagaggaacaaac

SEQ ID NO: 1187202 - DNA, 15 bp, Homo sapiens
tcacagaggaacaaa

SEQ ID NO: 1187203 - DNA, 15 bp, Homo sapiens
gtcacagaggaacaa

SEQ ID NO: 1187204 - DNA, 15 bp, Homo sapiens
ggtcacagaggaaca

SEQ ID NO: 1187205 - DNA, 15 bp, Homo sapiens
aggtcacagaggaac

SEQ ID NO: 1187206 - DNA, 15 bp, Homo sapiens
gaggtcacagaggaa

SEQ ID NO: 1187207 - DNA, 15 bp, Homo sapiens
tgaggtcacagagga

SEQ ID NO: 1187208 - DNA, 15 bp, Homo sapiens
ttgaggtcacagagg

SEQ ID NO: 1187209 - DNA, 15 bp, Homo sapiens
cttgaggtcacagag

SEQ ID NO: 1187210 - DNA, 15 bp, Homo sapiens
gcttgaggtcacaga

SEQ ID NO: 1187211 - DNA, 15 bp, Homo sapiens
tgcttgaggtcacag

SEQ ID NO: 1187212 - DNA, 15 bp, Homo sapiens
gtgcttgaggtcaca

SEQ ID NO: 1187213 - DNA, 15 bp, Homo sapiens
tgtgcttgaggtcac

SEQ ID NO: 1187214 - DNA, 15 bp, Homo sapiens
atgtgcttgaggtca

SEQ ID NO: 1187215 - DNA, 15 bp, Homo sapiens
aatgtgcttgaggtc

SEQ ID NO: 1187216 - DNA, 15 bp, Homo sapiens
taatgtgcttgaggt

SEQ ID NO: 1187217 - DNA, 15 bp, Homo sapiens
gtaatgtgcttgagg

SEQ ID NO: 1187218 - DNA, 15 bp, Homo sapiens
agtaatgtgcttgag

SEQ ID NO: 1187219 - DNA, 15 bp, Homo sapiens
tagtaatgtgcttga

SEQ ID NO: 1187220 - DNA, 15 bp, Homo sapiens
ttagtaatgtgcttg

SEQ ID NO: 1187221 - DNA, 15 bp, Homo sapiens
tttagtaatgtgctt

SEQ ID NO: 1187222 - DNA, 15 bp, Homo sapiens
atttagtaatgtgct

SEQ ID NO: 1187223 - DNA, 15 bp, Homo sapiens
catttagtaatgtgc

SEQ ID NO: 1187224 - DNA, 15 bp, Homo sapiens
acatttagtaatgtg

SEQ ID NO: 1187225 - DNA, 15 bp, Homo sapiens
aacatttagtaatgt

SEQ ID NO: 1187226 - DNA, 15 bp, Homo sapiens
taacatttagtaatg

SEQ ID NO: 1187227 - DNA, 15 bp, Homo sapiens
ctaacatttagtaat

SEQ ID NO: 1187228 - DNA, 15 bp, Homo sapiens
gctaacatttagtaa

SEQ ID NO: 1187229 - DNA, 15 bp, Homo sapiens
cgctaacatttagta

SEQ ID NO: 1187230 - DNA, 15 bp, Homo sapiens
tcgctaacatttagt

SEQ ID NO: 1187231 - DNA, 15 bp, Homo sapiens
ctcgctaacatttag

SEQ ID NO: 1187232 - DNA, 15 bp, Homo sapiens
gctcgctaacattta

SEQ ID NO: 1187233 - DNA, 15 bp, Homo sapiens
agctcgctaacattt

SEQ ID NO: 1187234 - DNA, 15 bp, Homo sapiens
aagctcgctaacatt

SEQ ID NO: 1187235 - DNA, 15 bp, Homo sapiens
gaagctcgctaacat

SEQ ID NO: 1187236 - DNA, 15 bp, Homo sapiens
tgaagctcgctaaca

SEQ ID NO: 1187237 - DNA, 15 bp, Homo sapiens
ctgaagctcgctaac

SEQ ID NO: 1187238 - DNA, 15 bp, Homo sapiens
gctgaagctcgctaa

SEQ ID NO: 1187239 - DNA, 15 bp, Homo sapiens
agctgaagctcgcta

SEQ ID NO: 1187240 - DNA, 15 bp, Homo sapiens
aagctgaagctcgct

SEQ ID NO: 1187241 - DNA, 15 bp, Homo sapiens
caagctgaagctcgc

SEQ ID NO: 1187242 - DNA, 15 bp, Homo sapiens
acaagctgaagctcg

SEQ ID NO: 1187243 - DNA, 15 bp, Homo sapiens
tacaagctgaagctc

SEQ ID NO: 1187244 - DNA, 15 bp, Homo sapiens
gtacaagctgaagct

SEQ ID NO: 1187245 - DNA, 15 bp, Homo sapiens
cgtacaagctgaagc

SEQ ID NO: 1187246 - DNA, 15 bp, Homo sapiens
acgtacaagctgaag

SEQ ID NO: 1187247 - DNA, 15 bp, Homo sapiens
cacgtacaagctgaa

SEQ ID NO: 1187248 - DNA, 15 bp, Homo sapiens
ccacgtacaagctga

SEQ ID NO: 1187249 - DNA, 15 bp, Homo sapiens
cccacgtacaagctg

SEQ ID NO: 1187250 - DNA, 15 bp, Homo sapiens
tcccacgtacaagct

SEQ ID NO: 1187251 - DNA, 15 bp, Homo sapiens
gtcccacgtacaagc

SEQ ID NO: 1187252 - DNA, 15 bp, Homo sapiens
agtcccacgtacaag

SEQ ID NO: 1187253 - DNA, 15 bp, Homo sapiens
cagtcccacgtacaa

SEQ ID NO: 1187254 - DNA, 15 bp, Homo sapiens
tcagtcccacgtaca

SEQ ID NO: 1187255 - DNA, 15 bp, Homo sapiens
gtcagtcccacgtac

SEQ ID NO: 1187256 - DNA, 15 bp, Homo sapiens
tgtcagtcccacgta

SEQ ID NO: 1187257 - DNA, 15 bp, Homo sapiens
ctgtcagtcccacgt

SEQ ID NO: 1187258 - DNA, 15 bp, Homo sapiens
cctgtcagtcccacg

SEQ ID NO: 1187259 - DNA, 15 bp, Homo sapiens
tcctgtcagtcccac

SEQ ID NO: 1187260 - DNA, 15 bp, Homo sapiens
ttcctgtcagtccca

SEQ ID NO: 1187261 - DNA, 15 bp, Homo sapiens
attcctgtcagtccc

SEQ ID NO: 1187262 - DNA, 15 bp, Homo sapiens
tattcctgtcagtcc

SEQ ID NO: 1187263 - DNA, 15 bp, Homo sapiens
ttattcctgtcagtc

SEQ ID NO: 1187264 - DNA, 15 bp, Homo sapiens
gttattcctgtcagt

SEQ ID NO: 1187265 - DNA, 15 bp, Homo sapiens
tgttattcctgtcag

SEQ ID NO: 1187266 - DNA, 15 bp, Homo sapiens
gtgttattcctgtca

SEQ ID NO: 1187267 - DNA, 15 bp, Homo sapiens
ggtgttattcctgtc

SEQ ID NO: 1187268 - DNA, 15 bp, Homo sapiens
cggtgttattcctgt

SEQ ID NO: 1187269 - DNA, 15 bp, Homo sapiens
gcggtgttattcctg

SEQ ID NO: 1187270 - DNA, 15 bp, Homo sapiens
tgcggtgttattcct

SEQ ID NO: 1187271 - DNA, 15 bp, Homo sapiens
atgcggtgttattcc

SEQ ID NO: 1187272 - DNA, 15 bp, Homo sapiens
gatgcggtgttattc

SEQ ID NO: 1187273 - DNA, 15 bp, Homo sapiens
tgatgcggtgttatt

SEQ ID NO: 1187274 - DNA, 15 bp, Homo sapiens
gtgatgcggtgttat

SEQ ID NO: 1187275 - DNA, 15 bp, Homo sapiens
ggtgatgcggtgtta

SEQ ID NO: 1187276 - DNA, 15 bp, Homo sapiens
aggtgatgcggtgtt

SEQ ID NO: 1187277 - DNA, 15 bp, Homo sapiens
gaggtgatgcggtgt

SEQ ID NO: 1187278 - DNA, 15 bp, Homo sapiens
tgaggtgatgcggtg

SEQ ID NO: 1187279 - DNA, 15 bp, Homo sapiens
atgaggtgatgcggt

SEQ ID NO: 1187280 - DNA, 15 bp, Homo sapiens
catgaggtgatgcgg

SEQ ID NO: 1187281 - DNA, 15 bp, Homo sapiens
acatgaggtgatgcg

SEQ ID NO: 1187282 - DNA, 15 bp, Homo sapiens
cacatgaggtgatgc

SEQ ID NO: 1187283 - DNA, 15 bp, Homo sapiens
ccacatgaggtgatg

SEQ ID NO: 1187284 - DNA, 15 bp, Homo sapiens
accacatgaggtgat

SEQ ID NO: 1187285 - DNA, 15 bp, Homo sapiens
caccacatgaggtga

SEQ ID NO: 1187286 - DNA, 15 bp, Homo sapiens
tcaccacatgaggtg

SEQ ID NO: 1187287 - DNA, 15 bp, Homo sapiens
atcaccacatgaggt

SEQ ID NO: 1187288 - DNA, 15 bp, Homo sapiens
aatcaccacatgagg

SEQ ID NO: 1187289 - DNA, 15 bp, Homo sapiens
caatcaccacatgag

SEQ ID NO: 1187290 - DNA, 15 bp, Homo sapiens
acaatcaccacatga

SEQ ID NO: 1187291 - DNA, 15 bp, Homo sapiens
tacaatcaccacatg

SEQ ID NO: 1187292 - DNA, 15 bp, Homo sapiens
ttacaatcaccacat

SEQ ID NO: 1187293 - DNA, 15 bp, Homo sapiens
cttacaatcaccaca

SEQ ID NO: 1187294 - DNA, 15 bp, Homo sapiens
ccttacaatcaccac

SEQ ID NO: 1187295 - DNA, 15 bp, Homo sapiens
tccttacaatcacca

SEQ ID NO: 1187296 - DNA, 15 bp, Homo sapiens
atccttacaatcacc

SEQ ID NO: 1187297 - DNA, 15 bp, Homo sapiens
aatccttacaatcac

SEQ ID NO: 1187298 - DNA, 15 bp, Homo sapiens
gaatccttacaatca

SEQ ID NO: 1187299 - DNA, 15 bp, Homo sapiens
tgaatccttacaatc

SEQ ID NO: 1187300 - DNA, 15 bp, Homo sapiens
ctgaatccttacaat

SEQ ID NO: 1187301 - DNA, 15 bp, Homo sapiens
actgaatccttacaa

SEQ ID NO: 1187302 - DNA, 15 bp, Homo sapiens
cactgaatccttaca

SEQ ID NO: 1187303 - DNA, 15 bp, Homo sapiens
tcactgaatccttac

SEQ ID NO: 1187304 - DNA, 15 bp, Homo sapiens
atcactgaatcctta

SEQ ID NO: 1187305 - DNA, 15 bp, Homo sapiens
tatcactgaatcctt

SEQ ID NO: 1187306 - DNA, 15 bp, Homo sapiens
atatcactgaatcct

SEQ ID NO: 1187307 - DNA, 15 bp, Homo sapiens
aatatcactgaatcc

SEQ ID NO: 1187308 - DNA, 15 bp, Homo sapiens
taatatcactgaatc

SEQ ID NO: 1187309 - DNA, 15 bp, Homo sapiens
ataatatcactgaat

SEQ ID NO: 1187310 - DNA, 15 bp, Homo sapiens
aataatatcactgaa

SEQ ID NO: 1187311 - DNA, 15 bp, Homo sapiens
aaataatatcactga

SEQ ID NO: 1187312 - DNA, 15 bp, Homo sapiens
aaaataatatcactg

SEQ ID NO: 1187313 - DNA, 15 bp, Homo sapiens
caaaataatatcact

SEQ ID NO: 1187314 - DNA, 15 bp, Homo sapiens
acaaaataatatcac

SEQ ID NO: 1187315 - DNA, 15 bp, Homo sapiens
tacaaaataatatca

SEQ ID NO: 1187316 - DNA, 15 bp, Homo sapiens
ttacaaaataatatc

SEQ ID NO: 1187317 - DNA, 15 bp, Homo sapiens
tttacaaaataatat

SEQ ID NO: 1187318 - DNA, 15 bp, Homo sapiens
gtttacaaaataata

SEQ ID NO: 1187319 - DNA, 15 bp, Homo sapiens
agtttacaaaataat

SEQ ID NO: 1187320 - DNA, 15 bp, Homo sapiens
cagtttacaaaataa

SEQ ID NO: 1187321 - DNA, 15 bp, Homo sapiens
acagtttacaaaata

SEQ ID NO: 1187322 - DNA, 15 bp, Homo sapiens
tacagtttacaaaat

SEQ ID NO: 1187323 - DNA, 15 bp, Homo sapiens
ttacagtttacaaaa

SEQ ID NO: 1187324 - DNA, 15 bp, Homo sapiens
tttacagtttacaaa

SEQ ID NO: 1187325 - DNA, 15 bp, Homo sapiens
ctttacagtttacaa

SEQ ID NO: 1187326 - DNA, 15 bp, Homo sapiens
gctttacagtttaca

SEQ ID NO: 1187327 - DNA, 15 bp, Homo sapiens
ggctttacagtttac

SEQ ID NO: 1187328 - DNA, 15 bp, Homo sapiens
aggctttacagttta

SEQ ID NO: 1187329 - DNA, 15 bp, Homo sapiens
aaggctttacagttt

SEQ ID NO: 1187330 - DNA, 15 bp, Homo sapiens
aaaggctttacagtt

SEQ ID NO: 1187331 - DNA, 15 bp, Homo sapiens
caaaggctttacagt

SEQ ID NO: 1187332 - DNA, 15 bp, Homo sapiens
gcaaaggctttacag

SEQ ID NO: 1187333 - DNA, 15 bp, Homo sapiens
tgcaaaggctttaca

SEQ ID NO: 1187334 - DNA, 15 bp, Homo sapiens
ttgcaaaggctttac

SEQ ID NO: 1187335 - DNA, 15 bp, Homo sapiens
tttgcaaaggcttta

SEQ ID NO: 1187336 - DNA, 15 bp, Homo sapiens
atttgcaaaggcttt

SEQ ID NO: 1187337 - DNA, 15 bp, Homo sapiens
catttgcaaaggctt

SEQ ID NO: 1187338 - DNA, 15 bp, Homo sapiens
acatttgcaaaggct

SEQ ID NO: 1187339 - DNA, 15 bp, Homo sapiens
aacatttgcaaaggc

SEQ ID NO: 1187340 - DNA, 15 bp, Homo sapiens
taacatttgcaaagg

SEQ ID NO: 1187341 - DNA, 15 bp, Homo sapiens
ttaacatttgcaaag

SEQ ID NO: 1187342 - DNA, 15 bp, Homo sapiens
cttaacatttgcaaa

SEQ ID NO: 1187343 - DNA, 15 bp, Homo sapiens
gcttaacatttgcaa

SEQ ID NO: 1187344 - DNA, 15 bp, Homo sapiens
tgcttaacatttgca

SEQ ID NO: 1187345 - DNA, 15 bp, Homo sapiens
ttgcttaacatttgc

SEQ ID NO: 1187346 - DNA, 15 bp, Homo sapiens
cttgcttaacatttg

SEQ ID NO: 1187347 - DNA, 15 bp, Homo sapiens
tcttgcttaacattt

SEQ ID NO: 1187348 - DNA, 15 bp, Homo sapiens
atcttgcttaacatt

SEQ ID NO: 1187349 - DNA, 15 bp, Homo sapiens
aatcttgcttaacat

SEQ ID NO: 1187350 - DNA, 15 bp, Homo sapiens
taatcttgcttaaca

SEQ ID NO: 1187351 - DNA, 15 bp, Homo sapiens
ataatcttgcttaac

SEQ ID NO: 1187352 - DNA, 15 bp, Homo sapiens
aataatcttgcttaa

SEQ ID NO: 1187353 - DNA, 15 bp, Homo sapiens
taataatcttgctta

SEQ ID NO: 1187354 - DNA, 15 bp, Homo sapiens
ataataatcttgctt

SEQ ID NO: 1187355 - DNA, 15 bp, Homo sapiens
aataataatcttgct

SEQ ID NO: 1187356 - DNA, 15 bp, Homo sapiens
taataataatcttgc

SEQ ID NO: 1187357 - DNA, 15 bp, Homo sapiens
ataataataatcttg

SEQ ID NO: 1187358 - DNA, 15 bp, Homo sapiens
aataataataatctt

SEQ ID NO: 1187359 - DNA, 15 bp, Homo sapiens
caataataataatct

SEQ ID NO: 1187360 - DNA, 15 bp, Homo sapiens
gcaataataataatc

SEQ ID NO: 1187361 - DNA, 15 bp, Homo sapiens
ggcaataataataat

SEQ ID NO: 1187362 - DNA, 15 bp, Homo sapiens
cggcaataataataa

SEQ ID NO: 1187363 - DNA, 15 bp, Homo sapiens
acggcaataataata

SEQ ID NO: 1187364 - DNA, 15 bp, Homo sapiens
aacggcaataataat

SEQ ID NO: 1187365 - DNA, 15 bp, Homo sapiens
caacggcaataataa

SEQ ID NO: 1187366 - DNA, 15 bp, Homo sapiens
acaacggcaataata

SEQ ID NO: 1187367 - DNA, 15 bp, Homo sapiens
aacaacggcaataat

SEQ ID NO: 1187368 - DNA, 15 bp, Homo sapiens
taacaacggcaataa

SEQ ID NO: 1187369 - DNA, 15 bp, Homo sapiens
ataacaacggcaata

SEQ ID NO: 1187370 - DNA, 15 bp, Homo sapiens
aataacaacggcaat

SEQ ID NO: 1187371 - DNA, 15 bp, Homo sapiens
taataacaacggcaa

SEQ ID NO: 1187372 - DNA, 15 bp, Homo sapiens
ctaataacaacggca

SEQ ID NO: 1187373 - DNA, 15 bp, Homo sapiens
actaataacaacggc

SEQ ID NO: 1187374 - DNA, 15 bp, Homo sapiens
gactaataacaacgg

SEQ ID NO: 1187375 - DNA, 15 bp, Homo sapiens
ggactaataacaacg

SEQ ID NO: 1187376 - DNA, 15 bp, Homo sapiens
aggactaataacaac

SEQ ID NO: 1187377 - DNA, 15 bp, Homo sapiens
gaggactaataacaa

SEQ ID NO: 1187378 - DNA, 15 bp, Homo sapiens
tgaggactaataaca

SEQ ID NO: 1187379 - DNA, 15 bp, Homo sapiens
ctgaggactaataac

SEQ ID NO: 1187380 - DNA, 15 bp, Homo sapiens
actgaggactaataa

SEQ ID NO: 1187381 - DNA, 15 bp, Homo sapiens
cactgaggactaata

SEQ ID NO: 1187382 - DNA, 15 bp, Homo sapiens
tcactgaggactaat

SEQ ID NO: 1187383 - DNA, 15 bp, Homo sapiens
atcactgaggactaa

SEQ ID NO: 1187384 - DNA, 15 bp, Homo sapiens
gatcactgaggacta

SEQ ID NO: 1187385 - DNA, 15 bp, Homo sapiens
agatcactgaggact

SEQ ID NO: 1187386 - DNA, 15 bp, Homo sapiens
aagatcactgaggac

SEQ ID NO: 1187387 - DNA, 15 bp, Homo sapiens
aaagatcactgagga

SEQ ID NO: 1187388 - DNA, 15 bp, Homo sapiens
aaaagatcactgagg

SEQ ID NO: 1187389 - DNA, 15 bp, Homo sapiens
aaaaagatcactgag

SEQ ID NO: 1187390 - DNA, 15 bp, Homo sapiens
aaaaaagatcactga

SEQ ID NO: 1187391 - DNA, 15 bp, Homo sapiens
aaaaaaagatcactg

SEQ ID NO: 1187392 - DNA, 15 bp, Homo sapiens
aaaaaaaagatcact

SEQ ID NO: 1187393 - DNA, 15 bp, Homo sapiens
aaaaaaaaagatcac

SEQ ID NO: 1187394 - DNA, 15 bp, Homo sapiens
aaaaaaaaaagatca

SEQ ID NO: 1187395 - DNA, 15 bp, Homo sapiens
aaaaaaaaaaagatc

SEQ ID NO: 1187396 - DNA, 15 bp, Homo sapiens
tccaaaaaaaaaaaa

SEQ ID NO: 1187397 - DNA, 15 bp, Homo sapiens
ctccaaaaaaaaaaa

SEQ ID NO: 1187398 - DNA, 15 bp, Homo sapiens
tctccaaaaaaaaaa

SEQ ID NO: 1187399 - DNA, 15 bp, Homo sapiens
gtctccaaaaaaaaa

SEQ ID NO: 1187400 - DNA, 15 bp, Homo sapiens
tgtctccaaaaaaaa

SEQ ID NO: 1187401 - DNA, 15 bp, Homo sapiens
ctgtctccaaaaaaa

SEQ ID NO: 1187402 - DNA, 15 bp, Homo sapiens
aactctgtctccaaa

SEQ ID NO: 1187403 - DNA, 15 bp, Homo sapiens
aaactctgtctccaa

SEQ ID NO: 1187404 - DNA, 15 bp, Homo sapiens
taaaactctgtctcc

SEQ ID NO: 1187405 - DNA, 15 bp, Homo sapiens
agtaaaactctgtct

SEQ ID NO: 1187406 - DNA, 15 bp, Homo sapiens
gagtaaaactctgtc

SEQ ID NO: 1187407 - DNA, 15 bp, Homo sapiens
agagtaaaactctgt

SEQ ID NO: 1187408 - DNA, 15 bp, Homo sapiens
cagagtaaaactctg

SEQ ID NO: 1187409 - DNA, 15 bp, Homo sapiens
acagagtaaaactct

SEQ ID NO: 1187410 - DNA, 15 bp, Homo sapiens
gacagagtaaaactc

SEQ ID NO: 1187411 - DNA, 15 bp, Homo sapiens
cgacagagtaaaact

SEQ ID NO: 1187412 - DNA, 15 bp, Homo sapiens
gcgacagagtaaaac

SEQ ID NO: 1187413 - DNA, 15 bp, Homo sapiens
ggcgacagagtaaaa

SEQ ID NO: 1187414 - DNA, 15 bp, Homo sapiens
tggcgacagagtaaa

SEQ ID NO: 1187415 - DNA, 15 bp, Homo sapiens
ttggcgacagagtaa

SEQ ID NO: 1187416 - DNA, 15 bp, Homo sapiens
cttggcgacagagta

SEQ ID NO: 1187417 - DNA, 15 bp, Homo sapiens
ccttggcgacagagt

SEQ ID NO: 1187418 - DNA, 15 bp, Homo sapiens
gccttggcgacagag

SEQ ID NO: 1187419 - DNA, 15 bp, Homo sapiens
agccttggcgacaga

SEQ ID NO: 1187420 - DNA, 15 bp, Homo sapiens
cagccttggcgacag

SEQ ID NO: 1187421 - DNA, 15 bp, Homo sapiens
ccagccttggcgaca

SEQ ID NO: 1187422 - DNA, 15 bp, Homo sapiens
tccagccttggcgac

SEQ ID NO: 1187423 - DNA, 15 bp, Homo sapiens
ttccagccttggcga

SEQ ID NO: 1187424 - DNA, 15 bp, Homo sapiens
attccagccttggcg

SEQ ID NO: 1187425 - DNA, 15 bp, Homo sapiens
cattccagccttggc

SEQ ID NO: 1187426 - DNA, 15 bp, Homo sapiens
tgtgccactgcattc

SEQ ID NO: 1187427 - DNA, 15 bp, Homo sapiens
ttgtgccactgcatt

SEQ ID NO: 1187428 - DNA, 15 bp, Homo sapiens
attgtgccactgcat

SEQ ID NO: 1187429 - DNA, 15 bp, Homo sapiens
tgagattgtgccact

SEQ ID NO: 1187430 - DNA, 15 bp, Homo sapiens
ctgagattgtgccac

SEQ ID NO: 1187431 - DNA, 15 bp, Homo sapiens
gctgagattgtgcca

SEQ ID NO: 1187432 - DNA, 15 bp, Homo sapiens
agctgagattgtgcc

SEQ ID NO: 1187433 - DNA, 15 bp, Homo sapiens
gagctgagattgtgc

SEQ ID NO: 1187434 - DNA, 15 bp, Homo sapiens
aaattgcttgaaccc

SEQ ID NO: 1187435 - DNA, 15 bp, Homo sapiens
ttcagctactcagga

SEQ ID NO: 1187436 - DNA, 15 bp, Homo sapiens
tttcagctactcagg

SEQ ID NO: 1187437 - DNA, 15 bp, Homo sapiens
gtttcagctactcag

SEQ ID NO: 1187438 - DNA, 15 bp, Homo sapiens
agtttcagctactca

SEQ ID NO: 1187439 - DNA, 15 bp, Homo sapiens
tagtttcagctactc

SEQ ID NO: 1187440 - DNA, 15 bp, Homo sapiens
gtagtttcagctact

SEQ ID NO: 1187441 - DNA, 15 bp, Homo sapiens
tgtagtttcagctac

SEQ ID NO: 1187442 - DNA, 15 bp, Homo sapiens
ctgtagtttcagcta

SEQ ID NO: 1187443 - DNA, 15 bp, Homo sapiens
cctgtagtttcagct

SEQ ID NO: 1187444 - DNA, 15 bp, Homo sapiens
gcctgtagtttcagc

SEQ ID NO: 1187445 - DNA, 15 bp, Homo sapiens
tgcctgtagtttcag

SEQ ID NO: 1187446 - DNA, 15 bp, Homo sapiens
gtgcctgtagtttca

SEQ ID NO: 1187447 - DNA, 15 bp, Homo sapiens
tgtgcctgtagtttc

SEQ ID NO: 1187448 - DNA, 15 bp, Homo sapiens
gtgtgcctgtagttt

SEQ ID NO: 1187449 - DNA, 15 bp, Homo sapiens
cgtgtgcctgtagtt

SEQ ID NO: 1187450 - DNA, 15 bp, Homo sapiens
gcgtgtgcctgtagt

SEQ ID NO: 1187451 - DNA, 15 bp, Homo sapiens
ggcgtgtgcctgtag

SEQ ID NO: 1187452 - DNA, 15 bp, Homo sapiens
gtggtggcgtgtgcc

SEQ ID NO: 1187453 - DNA, 15 bp, Homo sapiens
tgtggtggcgtgtgc

SEQ ID NO: 1187454 - DNA, 15 bp, Homo sapiens
gtgtggtggcgtgtg

SEQ ID NO: 1187455 - DNA, 15 bp, Homo sapiens
ggtgtggtggcgtgt

SEQ ID NO: 1187456 - DNA, 15 bp, Homo sapiens
tggtgtggtggcgtg

SEQ ID NO: 1187457 - DNA, 15 bp, Homo sapiens
ctggtgtggtggcgt

SEQ ID NO: 1187458 - DNA, 15 bp, Homo sapiens
cctggtgtggtggcg

SEQ ID NO: 1187459 - DNA, 15 bp, Homo sapiens
agcctggtgtggtgg

SEQ ID NO: 1187460 - DNA, 15 bp, Homo sapiens
tagcctggtgtggtg

SEQ ID NO: 1187461 - DNA, 15 bp, Homo sapiens
ttagcctggtgtggt

SEQ ID NO: 1187462 - DNA, 15 bp, Homo sapiens
attagcctggtgtgg

SEQ ID NO: 1187463 - DNA, 15 bp, Homo sapiens
aattagcctggtgtg

SEQ ID NO: 1187464 - DNA, 15 bp, Homo sapiens
aaattagcctggtgt

SEQ ID NO: 1187465 - DNA, 15 bp, Homo sapiens
aaaattagcctggtg

SEQ ID NO: 1187466 - DNA, 15 bp, Homo sapiens
aaaaattagcctggt

SEQ ID NO: 1187467 - DNA, 15 bp, Homo sapiens
aaaaaattagcctgg

SEQ ID NO: 1187468 - DNA, 15 bp, Homo sapiens
caaaaaattagcctg

SEQ ID NO: 1187469 - DNA, 15 bp, Homo sapiens
acaaaaaattagcct

SEQ ID NO: 1187470 - DNA, 15 bp, Homo sapiens
ggagaccagcctggc

SEQ ID NO: 1187471 - DNA, 15 bp, Homo sapiens
tggagaccagcctgg

SEQ ID NO: 1187472 - DNA, 15 bp, Homo sapiens
ctggagaccagcctg

SEQ ID NO: 1187473 - DNA, 15 bp, Homo sapiens
gctggagaccagcct

SEQ ID NO: 1187474 - DNA, 15 bp, Homo sapiens
agctggagaccagcc

SEQ ID NO: 1187475 - DNA, 15 bp, Homo sapiens
gagctggagaccagc

SEQ ID NO: 1187476 - DNA, 15 bp, Homo sapiens
ggagctggagaccag

SEQ ID NO: 1187477 - DNA, 15 bp, Homo sapiens
aggagctggagacca

SEQ ID NO: 1187478 - DNA, 15 bp, Homo sapiens
tcaggagctggagac

SEQ ID NO: 1187479 - DNA, 15 bp, Homo sapiens
gtcaggagctggaga

SEQ ID NO: 1187480 - DNA, 15 bp, Homo sapiens
ggtcaggagctggag

SEQ ID NO: 1187481 - DNA, 15 bp, Homo sapiens
aggtcaggagctgga

SEQ ID NO: 1187482 - DNA, 15 bp, Homo sapiens
gaggtcaggagctgg

SEQ ID NO: 1187483 - DNA, 15 bp, Homo sapiens
tgaggtcaggagctg

SEQ ID NO: 1187484 - DNA, 15 bp, Homo sapiens
ttgaggtcaggagct

SEQ ID NO: 1187485 - DNA, 15 bp, Homo sapiens
cttgaggtcaggagc

SEQ ID NO: 1187486 - DNA, 15 bp, Homo sapiens
gtgccaggtgtggtg

SEQ ID NO: 1187487 - DNA, 15 bp, Homo sapiens
tgtgccaggtgtggt

SEQ ID NO: 1187488 - DNA, 15 bp, Homo sapiens
ctgtgccaggtgtgg

SEQ ID NO: 1187489 - DNA, 15 bp, Homo sapiens
actgtgccaggtgtg

SEQ ID NO: 1187490 - DNA, 15 bp, Homo sapiens
tactgtgccaggtgt

SEQ ID NO: 1187491 - DNA, 15 bp, Homo sapiens
ttactgtgccaggtg

SEQ ID NO: 1187492 - DNA, 15 bp, Homo sapiens
attactgtgccaggt

SEQ ID NO: 1187493 - DNA, 15 bp, Homo sapiens
gattactgtgccagg

SEQ ID NO: 1187494 - DNA, 15 bp, Homo sapiens
agattactgtgccag

SEQ ID NO: 1187495 - DNA, 15 bp, Homo sapiens
aagattactgtgcca

SEQ ID NO: 1187496 - DNA, 15 bp, Homo sapiens
taagattactgtgcc

SEQ ID NO: 1187497 - DNA, 15 bp, Homo sapiens
ttaagattactgtgc

SEQ ID NO: 1187498 - DNA, 15 bp, Homo sapiens
attaagattactgtg

SEQ ID NO: 1187499 - DNA, 15 bp, Homo sapiens
aattaagattactgt

SEQ ID NO: 1187500 - DNA, 15 bp, Homo sapiens
caattaagattactg

SEQ ID NO: 1187501 - DNA, 15 bp, Homo sapiens
tcaattaagattact

SEQ ID NO: 1187502 - DNA, 15 bp, Homo sapiens
ttcaattaagattac

SEQ ID NO: 1187503 - DNA, 15 bp, Homo sapiens
tttcaattaagatta

SEQ ID NO: 1187504 - DNA, 15 bp, Homo sapiens
ttttcaattaagatt

SEQ ID NO: 1187505 - DNA, 15 bp, Homo sapiens
cttttcaattaagat

SEQ ID NO: 1187506 - DNA, 15 bp, Homo sapiens
acttttcaattaaga

SEQ ID NO: 1187507 - DNA, 15 bp, Homo sapiens
gacttttcaattaag

SEQ ID NO: 1187508 - DNA, 15 bp, Homo sapiens
agacttttcaattaa

SEQ ID NO: 1187509 - DNA, 15 bp, Homo sapiens
cagacttttcaatta

SEQ ID NO: 1187510 - DNA, 15 bp, Homo sapiens
acagacttttcaatt

SEQ ID NO: 1187511 - DNA, 15 bp, Homo sapiens
cacagacttttcaat

SEQ ID NO: 1187512 - DNA, 15 bp, Homo sapiens
ccacagacttttcaa

SEQ ID NO: 1187513 - DNA, 15 bp, Homo sapiens
tccacagacttttca

SEQ ID NO: 1187514 - DNA, 15 bp, Homo sapiens
atccacagacttttc

SEQ ID NO: 1187515 - DNA, 15 bp, Homo sapiens
tatccacagactttt

SEQ ID NO: 1187516 - DNA, 15 bp, Homo sapiens
ctatccacagacttt

SEQ ID NO: 1187517 - DNA, 15 bp, Homo sapiens
gctatccacagactt

SEQ ID NO: 1187518 - DNA, 15 bp, Homo sapiens
agctatccacagact

SEQ ID NO: 1187519 - DNA, 15 bp, Homo sapiens
aagctatccacagac

SEQ ID NO: 1187520 - DNA, 15 bp, Homo sapiens
aaagctatccacaga

SEQ ID NO: 1187521 - DNA, 15 bp, Homo sapiens
gaaagctatccacag

SEQ ID NO: 1187522 - DNA, 15 bp, Homo sapiens
ggaaagctatccaca

SEQ ID NO: 1187523 - DNA, 15 bp, Homo sapiens
tggaaagctatccac

SEQ ID NO: 1187524 - DNA, 15 bp, Homo sapiens
ttggaaagctatcca

SEQ ID NO: 1187525 - DNA, 15 bp, Homo sapiens
tttggaaagctatcc

SEQ ID NO: 1187526 - DNA, 15 bp, Homo sapiens
ctttggaaagctatc

SEQ ID NO: 1187527 - DNA, 15 bp, Homo sapiens
cctttggaaagctat

SEQ ID NO: 1187528 - DNA, 15 bp, Homo sapiens
tcctttggaaagcta

SEQ ID NO: 1187529 - DNA, 15 bp, Homo sapiens
ttcctttggaaagct

SEQ ID NO: 1187530 - DNA, 15 bp, Homo sapiens
tttcctttggaaagc

SEQ ID NO: 1187531 - DNA, 15 bp, Homo sapiens
ctttcctttggaaag

SEQ ID NO: 1187532 - DNA, 15 bp, Homo sapiens
gctttcctttggaaa

SEQ ID NO: 1187533 - DNA, 15 bp, Homo sapiens
agctttcctttggaa

SEQ ID NO: 1187534 - DNA, 15 bp, Homo sapiens
aagctttcctttgga

SEQ ID NO: 1187535 - DNA, 15 bp, Homo sapiens
caagctttcctttgg

SEQ ID NO: 1187536 - DNA, 15 bp, Homo sapiens
ccaagctttcctttg

SEQ ID NO: 1187537 - DNA, 15 bp, Homo sapiens
tccaagctttccttt

SEQ ID NO: 1187538 - DNA, 15 bp, Homo sapiens
ctccaagctttcctt

SEQ ID NO: 1187539 - DNA, 15 bp, Homo sapiens
agctccaagctttcc

SEQ ID NO: 1187540 - DNA, 15 bp, Homo sapiens
aagctccaagctttc

SEQ ID NO: 1187541 - DNA, 15 bp, Homo sapiens
caagctccaagcttt

SEQ ID NO: 1187542 - DNA, 15 bp, Homo sapiens
ccaagctccaagctt

SEQ ID NO: 1187543 - DNA, 15 bp, Homo sapiens
tccaagctccaagct

SEQ ID NO: 1187544 - DNA, 15 bp, Homo sapiens
atccaagctccaagc

SEQ ID NO: 1187545 - DNA, 15 bp, Homo sapiens
tatccaagctccaag

SEQ ID NO: 1187546 - DNA, 15 bp, Homo sapiens
ttatccaagctccaa

SEQ ID NO: 1187547 - DNA, 15 bp, Homo sapiens
cttatccaagctcca

SEQ ID NO: 1187548 - DNA, 15 bp, Homo sapiens
tcttatccaagctcc

SEQ ID NO: 1187549 - DNA, 15 bp, Homo sapiens
ttcttatccaagctc

SEQ ID NO: 1187550 - DNA, 15 bp, Homo sapiens
gttcttatccaagct

SEQ ID NO: 1187551 - DNA, 15 bp, Homo sapiens
ggttcttatccaagc

SEQ ID NO: 1187552 - DNA, 15 bp, Homo sapiens
tggttcttatccaag

SEQ ID NO: 1187553 - DNA, 15 bp, Homo sapiens
ttggttcttatccaa

SEQ ID NO: 1187554 - DNA, 15 bp, Homo sapiens
cttggttcttatcca

SEQ ID NO: 1187555 - DNA, 15 bp, Homo sapiens
tcttggttcttatcc

SEQ ID NO: 1187556 - DNA, 15 bp, Homo sapiens
ctcttggttcttatc

SEQ ID NO: 1187557 - DNA, 15 bp, Homo sapiens
tctcttggttcttat

SEQ ID NO: 1187558 - DNA, 15 bp, Homo sapiens
atctcttggttctta

SEQ ID NO: 1187559 - DNA, 15 bp, Homo sapiens
tatctcttggttctt

SEQ ID NO: 1187560 - DNA, 15 bp, Homo sapiens
ttatctcttggttct

SEQ ID NO: 1187561 - DNA, 15 bp, Homo sapiens
attatctcttggttc

SEQ ID NO: 1187562 - DNA, 15 bp, Homo sapiens
cattatctcttggtt

SEQ ID NO: 1187563 - DNA, 15 bp, Homo sapiens
ccattatctcttggt

SEQ ID NO: 1187564 - DNA, 15 bp, Homo sapiens
cccattatctcttgg

SEQ ID NO: 1187565 - DNA, 15 bp, Homo sapiens
tcccattatctcttg

SEQ ID NO: 1187566 - DNA, 15 bp, Homo sapiens
ctcccattatctctt

SEQ ID NO: 1187567 - DNA, 15 bp, Homo sapiens
tctcccattatctct

SEQ ID NO: 1187568 - DNA, 15 bp, Homo sapiens
ttctcccattatctc

SEQ ID NO: 1187569 - DNA, 15 bp, Homo sapiens
cttctcccattatct

SEQ ID NO: 1187570 - DNA, 15 bp, Homo sapiens
ccttctcccattatc

SEQ ID NO: 1187571 - DNA, 15 bp, Homo sapiens
accttctcccattat

SEQ ID NO: 1187572 - DNA, 15 bp, Homo sapiens
caccttctcccatta

SEQ ID NO: 1187573 - DNA, 15 bp, Homo sapiens
tcaccttctcccatt

SEQ ID NO: 1187574 - DNA, 15 bp, Homo sapiens
ttcaccttctcccat

SEQ ID NO: 1187575 - DNA, 15 bp, Homo sapiens
attcaccttctccca

SEQ ID NO: 1187576 - DNA, 15 bp, Homo sapiens
cattcaccttctccc

SEQ ID NO: 1187577 - DNA, 15 bp, Homo sapiens
ccattcaccttctcc

SEQ ID NO: 1187578 - DNA, 15 bp, Homo sapiens
gccattcaccttctc

SEQ ID NO: 1187579 - DNA, 15 bp, Homo sapiens
ggccattcaccttct

SEQ ID NO: 1187580 - DNA, 15 bp, Homo sapiens
aggccattcaccttc

SEQ ID NO: 1187581 - DNA, 15 bp, Homo sapiens
gaggccattcacctt

SEQ ID NO: 1187582 - DNA, 15 bp, Homo sapiens
agaggccattcacct

SEQ ID NO: 1187583 - DNA, 15 bp, Homo sapiens
aagaggccattcacc

SEQ ID NO: 1187584 - DNA, 15 bp, Homo sapiens
gaagaggccattcac

SEQ ID NO: 1187585 - DNA, 15 bp, Homo sapiens
tgaagaggccattca

SEQ ID NO: 1187586 - DNA, 15 bp, Homo sapiens
ctgaagaggccattc

SEQ ID NO: 1187587 - DNA, 15 bp, Homo sapiens
cctgaagaggccatt

SEQ ID NO: 1187588 - DNA, 15 bp, Homo sapiens
ccctgaagaggccat

SEQ ID NO: 1187589 - DNA, 15 bp, Homo sapiens
gccctgaagaggcca

SEQ ID NO: 1187590 - DNA, 15 bp, Homo sapiens
ggccctgaagaggcc

SEQ ID NO: 1187591 - DNA, 15 bp, Homo sapiens
aggccctgaagaggc

SEQ ID NO: 1187592 - DNA, 15 bp, Homo sapiens
aaggccctgaagagg

SEQ ID NO: 1187593 - DNA, 15 bp, Homo sapiens
aaaggccctgaagag

SEQ ID NO: 1187594 - DNA, 15 bp, Homo sapiens
aaaaggccctgaaga

SEQ ID NO: 1187595 - DNA, 15 bp, Homo sapiens
gaaaaggccctgaag

SEQ ID NO: 1187596 - DNA, 15 bp, Homo sapiens
agaaaaggccctgaa

SEQ ID NO: 1187597 - DNA, 15 bp, Homo sapiens
tagaaaaggccctga

SEQ ID NO: 1187598 - DNA, 15 bp, Homo sapiens
ctagaaaaggccctg

SEQ ID NO: 1187599 - DNA, 15 bp, Homo sapiens
gctagaaaaggccct

SEQ ID NO: 1187600 - DNA, 15 bp, Homo sapiens
tgctagaaaaggccc

SEQ ID NO: 1187601 - DNA, 15 bp, Homo sapiens
gtgctagaaaaggcc

SEQ ID NO: 1187602 - DNA, 15 bp, Homo sapiens
ggtgctagaaaaggc

SEQ ID NO: 1187603 - DNA, 15 bp, Homo sapiens
gggtgctagaaaagg

SEQ ID NO: 1187604 - DNA, 15 bp, Homo sapiens
agggtgctagaaaag

SEQ ID NO: 1187605 - DNA, 15 bp, Homo sapiens
tagggtgctagaaaa

SEQ ID NO: 1187606 - DNA, 15 bp, Homo sapiens
ttagggtgctagaaa

SEQ ID NO: 1187607 - DNA, 15 bp, Homo sapiens
tttagggtgctagaa

SEQ ID NO: 1187608 - DNA, 15 bp, Homo sapiens
atttagggtgctaga

SEQ ID NO: 1187609 - DNA, 15 bp, Homo sapiens
tatttagggtgctag

SEQ ID NO: 1187610 - DNA, 15 bp, Homo sapiens
atatttagggtgcta

SEQ ID NO: 1187611 - DNA, 15 bp, Homo sapiens
catatttagggtgct

SEQ ID NO: 1187612 - DNA, 15 bp, Homo sapiens
gcatatttagggtgc

SEQ ID NO: 1187613 - DNA, 15 bp, Homo sapiens
cgcatatttagggtg

SEQ ID NO: 1187614 - DNA, 15 bp, Homo sapiens
acgcatatttagggt

SEQ ID NO: 1187615 - DNA, 15 bp, Homo sapiens
cacgcatatttaggg

SEQ ID NO: 1187616 - DNA, 15 bp, Homo sapiens
acacgcatatttagg

SEQ ID NO: 1187617 - DNA, 15 bp, Homo sapiens
gacacgcatatttag

SEQ ID NO: 1187618 - DNA, 15 bp, Homo sapiens
agacacgcatattta

SEQ ID NO: 1187619 - DNA, 15 bp, Homo sapiens
cagacacgcatattt

SEQ ID NO: 1187620 - DNA, 15 bp, Homo sapiens
acagacacgcatatt

SEQ ID NO: 1187621 - DNA, 15 bp, Homo sapiens
gacagacacgcatat

SEQ ID NO: 1187622 - DNA, 15 bp, Homo sapiens
ggacagacacgcata

SEQ ID NO: 1187623 - DNA, 15 bp, Homo sapiens
tggacagacacgcat

SEQ ID NO: 1187624 - DNA, 15 bp, Homo sapiens
atggacagacacgca

SEQ ID NO: 1187625 - DNA, 15 bp, Homo sapiens
tatggacagacacgc

SEQ ID NO: 1187626 - DNA, 15 bp, Homo sapiens
ttatggacagacacg

SEQ ID NO: 1187627 - DNA, 15 bp, Homo sapiens
attatggacagacac

SEQ ID NO: 1187628 - DNA, 15 bp, Homo sapiens
cattatggacagaca

SEQ ID NO: 1187629 - DNA, 15 bp, Homo sapiens
ccattatggacagac

SEQ ID NO: 1187630 - DNA, 15 bp, Homo sapiens
cccattatggacaga

SEQ ID NO: 1187631 - DNA, 15 bp, Homo sapiens
acccattatggacag

SEQ ID NO: 1187632 - DNA, 15 bp, Homo sapiens
tacccattatggaca

SEQ ID NO: 1187633 - DNA, 15 bp, Homo sapiens
ttacccattatggac

SEQ ID NO: 1187634 - DNA, 15 bp, Homo sapiens
attacccattatgga

SEQ ID NO: 1187635 - DNA, 15 bp, Homo sapiens
gattacccattatgg

SEQ ID NO: 1187636 - DNA, 15 bp, Homo sapiens
tgattacccattatg

SEQ ID NO: 1187637 - DNA, 15 bp, Homo sapiens
atgattacccattat

SEQ ID NO: 1187638 - DNA, 15 bp, Homo sapiens
tatgattacccatta

SEQ ID NO: 1187639 - DNA, 15 bp, Homo sapiens
atatgattacccatt

SEQ ID NO: 1187640 - DNA, 15 bp, Homo sapiens
tatatgattacccat

SEQ ID NO: 1187641 - DNA, 15 bp, Homo sapiens
atatatgattaccca

SEQ ID NO: 1187642 - DNA, 15 bp, Homo sapiens
tatatatgattaccc

SEQ ID NO: 1187643 - DNA, 15 bp, Homo sapiens
atatatatgattacc

SEQ ID NO: 1187644 - DNA, 15 bp, Homo sapiens
gatatatatgattac

SEQ ID NO: 1187645 - DNA, 15 bp, Homo sapiens
tgatatatatgatta

SEQ ID NO: 1187646 - DNA, 15 bp, Homo sapiens
gtgatatatatgatt

SEQ ID NO: 1187647 - DNA, 15 bp, Homo sapiens
tgtgatatatatgat

SEQ ID NO: 1187648 - DNA, 15 bp, Homo sapiens
ttgtgatatatatga

SEQ ID NO: 1187649 - DNA, 15 bp, Homo sapiens
tttgtgatatatatg

SEQ ID NO: 1187650 - DNA, 15 bp, Homo sapiens
atttgtgatatatat

SEQ ID NO: 1187651 - DNA, 15 bp, Homo sapiens
gatttgtgatatata

SEQ ID NO: 1187652 - DNA, 15 bp, Homo sapiens
tgatttgtgatatat

SEQ ID NO: 1187653 - DNA, 15 bp, Homo sapiens
ttgatttgtgatata

SEQ ID NO: 1187654 - DNA, 15 bp, Homo sapiens
tttgatttgtgatat

SEQ ID NO: 1187655 - DNA, 15 bp, Homo sapiens
gtttgatttgtgata

SEQ ID NO: 1187656 - DNA, 15 bp, Homo sapiens
ggtttgatttgtgat

SEQ ID NO: 1187657 - DNA, 15 bp, Homo sapiens
gggtttgatttgtga

SEQ ID NO: 1187658 - DNA, 15 bp, Homo sapiens
agggtttgatttgtg

SEQ ID NO: 1187659 - DNA, 15 bp, Homo sapiens
gagggtttgatttgt

SEQ ID NO: 1187660 - DNA, 15 bp, Homo sapiens
ggagggtttgatttg

SEQ ID NO: 1187661 - DNA, 15 bp, Homo sapiens
tggagggtttgattt

SEQ ID NO: 1187662 - DNA, 15 bp, Homo sapiens
gtggagggtttgatt

SEQ ID NO: 1187663 - DNA, 15 bp, Homo sapiens
tgtggagggtttgat

SEQ ID NO: 1187664 - DNA, 15 bp, Homo sapiens
ttgtggagggtttga

SEQ ID NO: 1187665 - DNA, 15 bp, Homo sapiens
tttgtggagggtttg

SEQ ID NO: 1187666 - DNA, 15 bp, Homo sapiens
gtttgtggagggttt

SEQ ID NO: 1187667 - DNA, 15 bp, Homo sapiens
agtttgtggagggtt

SEQ ID NO: 1187668 - DNA, 15 bp, Homo sapiens
aagtttgtggagggt

SEQ ID NO: 1187669 - DNA, 15 bp, Homo sapiens
taagtttgtggaggg

SEQ ID NO: 1187670 - DNA, 15 bp, Homo sapiens
ataagtttgtggagg

SEQ ID NO: 1187671 - DNA, 15 bp, Homo sapiens
aataagtttgtggag

SEQ ID NO: 1187672 - DNA, 15 bp, Homo sapiens
aaataagtttgtgga

SEQ ID NO: 1187673 - DNA, 15 bp, Homo sapiens
gaaataagtttgtgg

SEQ ID NO: 1187674 - DNA, 15 bp, Homo sapiens
ggaaataagtttgtg

SEQ ID NO: 1187675 - DNA, 15 bp, Homo sapiens
aggaaataagtttgt

SEQ ID NO: 1187676 - DNA, 15 bp, Homo sapiens
taggaaataagtttg

SEQ ID NO: 1187677 - DNA, 15 bp, Homo sapiens
ttaggaaataagttt

SEQ ID NO: 1187678 - DNA, 15 bp, Homo sapiens
attaggaaataagtt

SEQ ID NO: 1187679 - DNA, 15 bp, Homo sapiens
cattaggaaataagt

SEQ ID NO: 1187680 - DNA, 15 bp, Homo sapiens
acattaggaaataag

SEQ ID NO: 1187681 - DNA, 15 bp, Homo sapiens
cacattaggaaataa

SEQ ID NO: 1187682 - DNA, 15 bp, Homo sapiens
acacattaggaaata

SEQ ID NO: 1187683 - DNA, 15 bp, Homo sapiens
aacacattaggaaat

SEQ ID NO: 1187684 - DNA, 15 bp, Homo sapiens
aaacacattaggaaa

SEQ ID NO: 1187685 - DNA, 15 bp, Homo sapiens
caaacacattaggaa

SEQ ID NO: 1187686 - DNA, 15 bp, Homo sapiens
acaaacacattagga

SEQ ID NO: 1187687 - DNA, 15 bp, Homo sapiens
aacaaacacattagg

SEQ ID NO: 1187688 - DNA, 15 bp, Homo sapiens
taacaaacacattag

SEQ ID NO: 1187689 - DNA, 15 bp, Homo sapiens
ttaacaaacacatta

SEQ ID NO: 1187690 - DNA, 15 bp, Homo sapiens
gttaacaaacacatt

SEQ ID NO: 1187691 - DNA, 15 bp, Homo sapiens
ggttaacaaacacat

SEQ ID NO: 1187692 - DNA, 15 bp, Homo sapiens
aggttaacaaacaca

SEQ ID NO: 1187693 - DNA, 15 bp, Homo sapiens
aaggttaacaaacac

SEQ ID NO: 1187694 - DNA, 15 bp, Homo sapiens
aaaggttaacaaaca

SEQ ID NO: 1187695 - DNA, 15 bp, Homo sapiens
gaaaggttaacaaac

SEQ ID NO: 1187696 - DNA, 15 bp, Homo sapiens
ggaaaggttaacaaa

SEQ ID NO: 1187697 - DNA, 15 bp, Homo sapiens
aggaaaggttaacaa

SEQ ID NO: 1187698 - DNA, 15 bp, Homo sapiens
aaggaaaggttaaca

SEQ ID NO: 1187699 - DNA, 15 bp, Homo sapiens
gaaggaaaggttaac

SEQ ID NO: 1187700 - DNA, 15 bp, Homo sapiens
agaaggaaaggttaa

SEQ ID NO: 1187701 - DNA, 15 bp, Homo sapiens
tagaaggaaaggtta

SEQ ID NO: 1187702 - DNA, 15 bp, Homo sapiens
ttagaaggaaaggtt

SEQ ID NO: 1187703 - DNA, 15 bp, Homo sapiens
tttagaaggaaaggt

SEQ ID NO: 1187704 - DNA, 15 bp, Homo sapiens
ctttagaaggaaagg

SEQ ID NO: 1187705 - DNA, 15 bp, Homo sapiens
cctttagaaggaaag

SEQ ID NO: 1187706 - DNA, 15 bp, Homo sapiens
ccctttagaaggaaa

SEQ ID NO: 1187707 - DNA, 15 bp, Homo sapiens
accctttagaaggaa

SEQ ID NO: 1187708 - DNA, 15 bp, Homo sapiens
taccctttagaagga

SEQ ID NO: 1187709 - DNA, 15 bp, Homo sapiens
ttaccctttagaagg

SEQ ID NO: 1187710 - DNA, 15 bp, Homo sapiens
tttaccctttagaag

SEQ ID NO: 1187711 - DNA, 15 bp, Homo sapiens
gtttaccctttagaa

SEQ ID NO: 1187712 - DNA, 15 bp, Homo sapiens
agtttaccctttaga

SEQ ID NO: 1187713 - DNA, 15 bp, Homo sapiens
aagtttaccctttag

SEQ ID NO: 1187714 - DNA, 15 bp, Homo sapiens
gaagtttacccttta

SEQ ID NO: 1187715 - DNA, 15 bp, Homo sapiens
agaagtttacccttt

SEQ ID NO: 1187716 - DNA, 15 bp, Homo sapiens
aagaagtttaccctt

SEQ ID NO: 1187717 - DNA, 15 bp, Homo sapiens
aaagaagtttaccct

SEQ ID NO: 1187718 - DNA, 15 bp, Homo sapiens
taaagaagtttaccc

SEQ ID NO: 1187719 - DNA, 15 bp, Homo sapiens
ttaaagaagtttacc

SEQ ID NO: 1187720 - DNA, 15 bp, Homo sapiens
gttaaagaagtttac

SEQ ID NO: 1187721 - DNA, 15 bp, Homo sapiens
ggttaaagaagttta

SEQ ID NO: 1187722 - DNA, 15 bp, Homo sapiens
tggttaaagaagttt

SEQ ID NO: 1187723 - DNA, 15 bp, Homo sapiens
ttggttaaagaagtt

SEQ ID NO: 1187724 - DNA, 15 bp, Homo sapiens
gttggttaaagaagt

SEQ ID NO: 1187725 - DNA, 15 bp, Homo sapiens
ggttggttaaagaag

SEQ ID NO: 1187726 - DNA, 15 bp, Homo sapiens
gggttggttaaagaa

SEQ ID NO: 1187727 - DNA, 15 bp, Homo sapiens
ggggttggttaaaga

SEQ ID NO: 1187728 - DNA, 15 bp, Homo sapiens
tggggttggttaaag

SEQ ID NO: 1187729 - DNA, 15 bp, Homo sapiens
ctggggttggttaaa

SEQ ID NO: 1187730 - DNA, 15 bp, Homo sapiens
actggggttggttaa

SEQ ID NO: 1187731 - DNA, 15 bp, Homo sapiens
cactggggttggtta

SEQ ID NO: 1187732 - DNA, 15 bp, Homo sapiens
tcactggggttggtt

SEQ ID NO: 1187733 - DNA, 15 bp, Homo sapiens
ctcactggggttggt

SEQ ID NO: 1187734 - DNA, 15 bp, Homo sapiens
gctcactggggttgg

SEQ ID NO: 1187735 - DNA, 15 bp, Homo sapiens
agctcactggggttg

SEQ ID NO: 1187736 - DNA, 15 bp, Homo sapiens
cagctcactggggtt

SEQ ID NO: 1187737 - DNA, 15 bp, Homo sapiens
ccagctcactggggt

SEQ ID NO: 1187738 - DNA, 15 bp, Homo sapiens
tccagctcactgggg

SEQ ID NO: 1187739 - DNA, 15 bp, Homo sapiens
ctccagctcactggg

SEQ ID NO: 1187740 - DNA, 15 bp, Homo sapiens
cctccagctcactgg

SEQ ID NO: 1187741 - DNA, 15 bp, Homo sapiens
tcctccagctcactg

SEQ ID NO: 1187742 - DNA, 15 bp, Homo sapiens
atcctccagctcact

SEQ ID NO: 1187743 - DNA, 15 bp, Homo sapiens
gatcctccagctcac

SEQ ID NO: 1187744 - DNA, 15 bp, Homo sapiens
tgatcctccagctca

SEQ ID NO: 1187745 - DNA, 15 bp, Homo sapiens
ttgatcctccagctc

SEQ ID NO: 1187746 - DNA, 15 bp, Homo sapiens
attgatcctccagct

SEQ ID NO: 1187747 - DNA, 15 bp, Homo sapiens
cattgatcctccagc

SEQ ID NO: 1187748 - DNA, 15 bp, Homo sapiens
acattgatcctccag

SEQ ID NO: 1187749 - DNA, 15 bp, Homo sapiens
aacattgatcctcca

SEQ ID NO: 1187750 - DNA, 15 bp, Homo sapiens
aaacattgatcctcc

SEQ ID NO: 1187751 - DNA, 15 bp, Homo sapiens
aaaacattgatcctc

SEQ ID NO: 1187752 - DNA, 15 bp, Homo sapiens
gaaaacattgatcct

SEQ ID NO: 1187753 - DNA, 15 bp, Homo sapiens
agaaaacattgatcc

SEQ ID NO: 1187754 - DNA, 15 bp, Homo sapiens
aagaaaacattgatc

SEQ ID NO: 1187755 - DNA, 15 bp, Homo sapiens
taagaaaacattgat

SEQ ID NO: 1187756 - DNA, 15 bp, Homo sapiens
ttaagaaaacattga

SEQ ID NO: 1187757 - DNA, 15 bp, Homo sapiens
attaagaaaacattg

SEQ ID NO: 1187758 - DNA, 15 bp, Homo sapiens
tattaagaaaacatt

SEQ ID NO: 1187759 - DNA, 15 bp, Homo sapiens
ctattaagaaaacat

SEQ ID NO: 1187760 - DNA, 15 bp, Homo sapiens
actattaagaaaaca

SEQ ID NO: 1187761 - DNA, 15 bp, Homo sapiens
gactattaagaaaac

SEQ ID NO: 1187762 - DNA, 15 bp, Homo sapiens
agactattaagaaaa

SEQ ID NO: 1187763 - DNA, 15 bp, Homo sapiens
aagactattaagaaa

SEQ ID NO: 1187764 - DNA, 15 bp, Homo sapiens
taagactattaagaa

SEQ ID NO: 1187765 - DNA, 15 bp, Homo sapiens
gtaagactattaaga

SEQ ID NO: 1187766 - DNA, 15 bp, Homo sapiens
ggtaagactattaag

SEQ ID NO: 1187767 - DNA, 15 bp, Homo sapiens
aggtaagactattaa

SEQ ID NO: 1187768 - DNA, 15 bp, Homo sapiens
aaggtaagactatta

SEQ ID NO: 1187769 - DNA, 15 bp, Homo sapiens
gaaggtaagactatt

SEQ ID NO: 1187770 - DNA, 15 bp, Homo sapiens
cgaaggtaagactat

SEQ ID NO: 1187771 - DNA, 15 bp, Homo sapiens
acgaaggtaagacta

SEQ ID NO: 1187772 - DNA, 15 bp, Homo sapiens
aacgaaggtaagact

SEQ ID NO: 1187773 - DNA, 15 bp, Homo sapiens
caacgaaggtaagac

SEQ ID NO: 1187774 - DNA, 15 bp, Homo sapiens
ccaacgaaggtaaga

SEQ ID NO: 1187775 - DNA, 15 bp, Homo sapiens
accaacgaaggtaag

SEQ ID NO: 1187776 - DNA, 15 bp, Homo sapiens
caccaacgaaggtaa

SEQ ID NO: 1187777 - DNA, 15 bp, Homo sapiens
acaccaacgaaggta

SEQ ID NO: 1187778 - DNA, 15 bp, Homo sapiens
gacaccaacgaaggt

SEQ ID NO: 1187779 - DNA, 15 bp, Homo sapiens
tgacaccaacgaagg

SEQ ID NO: 1187780 - DNA, 15 bp, Homo sapiens
ttgacaccaacgaag

SEQ ID NO: 1187781 - DNA, 15 bp, Homo sapiens
attgacaccaacgaa

SEQ ID NO: 1187782 - DNA, 15 bp, Homo sapiens
tattgacaccaacga

SEQ ID NO: 1187783 - DNA, 15 bp, Homo sapiens
ctattgacaccaacg

SEQ ID NO: 1187784 - DNA, 15 bp, Homo sapiens
cctattgacaccaac

SEQ ID NO: 1187785 - DNA, 15 bp, Homo sapiens
tcctattgacaccaa

SEQ ID NO: 1187786 - DNA, 15 bp, Homo sapiens
ttcctattgacacca

SEQ ID NO: 1187787 - DNA, 15 bp, Homo sapiens
tttcctattgacacc

SEQ ID NO: 1187788 - DNA, 15 bp, Homo sapiens
gtttcctattgacac

SEQ ID NO: 1187789 - DNA, 15 bp, Homo sapiens
tgtttcctattgaca

SEQ ID NO: 1187790 - DNA, 15 bp, Homo sapiens
ctgtttcctattgac

SEQ ID NO: 1187791 - DNA, 15 bp, Homo sapiens
actgtttcctattga

SEQ ID NO: 1187792 - DNA, 15 bp, Homo sapiens
tactgtttcctattg

SEQ ID NO: 1187793 - DNA, 15 bp, Homo sapiens
atactgtttcctatt

SEQ ID NO: 1187794 - DNA, 15 bp, Homo sapiens
aatactgtttcctat

SEQ ID NO: 1187795 - DNA, 15 bp, Homo sapiens
aaatactgtttccta

SEQ ID NO: 1187796 - DNA, 15 bp, Homo sapiens
taaatactgtttcct

SEQ ID NO: 1187797 - DNA, 15 bp, Homo sapiens
gtaaatactgtttcc

SEQ ID NO: 1187798 - DNA, 15 bp, Homo sapiens
agtaaatactgtttc

SEQ ID NO: 1187799 - DNA, 15 bp, Homo sapiens
gagtaaatactgttt

SEQ ID NO: 1187800 - DNA, 15 bp, Homo sapiens
tgagtaaatactgtt

SEQ ID NO: 1187801 - DNA, 15 bp, Homo sapiens
gtgagtaaatactgt

SEQ ID NO: 1187802 - DNA, 15 bp, Homo sapiens
agtgagtaaatactg

SEQ ID NO: 1187803 - DNA, 15 bp, Homo sapiens
tagtgagtaaatact

SEQ ID NO: 1187804 - DNA, 15 bp, Homo sapiens
gtagtgagtaaatac

SEQ ID NO: 1187805 - DNA, 15 bp, Homo sapiens
agtagtgagtaaata

SEQ ID NO: 1187806 - DNA, 15 bp, Homo sapiens
cagtagtgagtaaat

SEQ ID NO: 1187807 - DNA, 15 bp, Homo sapiens
acagtagtgagtaaa

SEQ ID NO: 1187808 - DNA, 15 bp, Homo sapiens
aacagtagtgagtaa

SEQ ID NO: 1187809 - DNA, 15 bp, Homo sapiens
aaacagtagtgagta

SEQ ID NO: 1187810 - DNA, 15 bp, Homo sapiens
aaaacagtagtgagt

SEQ ID NO: 1187811 - DNA, 15 bp, Homo sapiens
gaaaacagtagtgag

SEQ ID NO: 1187812 - DNA, 15 bp, Homo sapiens
ggaaaacagtagtga

SEQ ID NO: 1187813 - DNA, 15 bp, Homo sapiens
aggaaaacagtagtg

SEQ ID NO: 1187814 - DNA, 15 bp, Homo sapiens
aaggaaaacagtagt

SEQ ID NO: 1187815 - DNA, 15 bp, Homo sapiens
aaaggaaaacagtag

SEQ ID NO: 1187816 - DNA, 15 bp, Homo sapiens
aaaaggaaaacagta

SEQ ID NO: 1187817 - DNA, 15 bp, Homo sapiens
taaaaggaaaacagt

SEQ ID NO: 1187818 - DNA, 15 bp, Homo sapiens
ttaaaaggaaaacag

SEQ ID NO: 1187819 - DNA, 15 bp, Homo sapiens
tttaaaaggaaaaca

SEQ ID NO: 1187820 - DNA, 15 bp, Homo sapiens
ttttaaaaggaaaac

SEQ ID NO: 1187821 - DNA, 15 bp, Homo sapiens
tttttaaaaggaaaa

SEQ ID NO: 1187822 - DNA, 15 bp, Homo sapiens
atttttaaaaggaaa

SEQ ID NO: 1187823 - DNA, 15 bp, Homo sapiens
gatttttaaaaggaa

SEQ ID NO: 1187824 - DNA, 15 bp, Homo sapiens
agatttttaaaagga

SEQ ID NO: 1187825 - DNA, 15 bp, Homo sapiens
gacagatttttaaaa

SEQ ID NO: 1187826 - DNA, 15 bp, Homo sapiens
agacagatttttaaa

SEQ ID NO: 1187827 - DNA, 15 bp, Homo sapiens
tagacagatttttaa

SEQ ID NO: 1187828 - DNA, 15 bp, Homo sapiens
ctagacagattttta

SEQ ID NO: 1187829 - DNA, 15 bp, Homo sapiens
actagacagattttt

SEQ ID NO: 1187830 - DNA, 15 bp, Homo sapiens
aactagacagatttt

SEQ ID NO: 1187831 - DNA, 15 bp, Homo sapiens
caactagacagattt

SEQ ID NO: 1187832 - DNA, 15 bp, Homo sapiens
gcaactagacagatt

SEQ ID NO: 1187833 - DNA, 15 bp, Homo sapiens
tgcaactagacagat

SEQ ID NO: 1187834 - DNA, 15 bp, Homo sapiens
atgcaactagacaga

SEQ ID NO: 1187835 - DNA, 15 bp, Homo sapiens
tatgcaactagacag

SEQ ID NO: 1187836 - DNA, 15 bp, Homo sapiens
gtatgcaactagaca

SEQ ID NO: 1187837 - DNA, 15 bp, Homo sapiens
agtatgcaactagac

SEQ ID NO: 1187838 - DNA, 15 bp, Homo sapiens
tagtatgcaactaga

SEQ ID NO: 1187839 - DNA, 15 bp, Homo sapiens
ctagtatgcaactag

SEQ ID NO: 1187840 - DNA, 15 bp, Homo sapiens
tctagtatgcaacta

SEQ ID NO: 1187841 - DNA, 15 bp, Homo sapiens
ttctagtatgcaact

SEQ ID NO: 1187842 - DNA, 15 bp, Homo sapiens
tttctagtatgcaac

SEQ ID NO: 1187843 - DNA, 15 bp, Homo sapiens
gtttctagtatgcaa

SEQ ID NO: 1187844 - DNA, 15 bp, Homo sapiens
tgtttctagtatgca

SEQ ID NO: 1187845 - DNA, 15 bp, Homo sapiens
ctgtttctagtatgc

SEQ ID NO: 1187846 - DNA, 15 bp, Homo sapiens
actgtttctagtatg

SEQ ID NO: 1187847 - DNA, 15 bp, Homo sapiens
aactgtttctagtat

SEQ ID NO: 1187848 - DNA, 15 bp, Homo sapiens
aaactgtttctagta

SEQ ID NO: 1187849 - DNA, 15 bp, Homo sapiens
gaaactgtttctagt

SEQ ID NO: 1187850 - DNA, 15 bp, Homo sapiens
tgaaactgtttctag

SEQ ID NO: 1187851 - DNA, 15 bp, Homo sapiens
ctgaaactgtttcta

SEQ ID NO: 1187852 - DNA, 15 bp, Homo sapiens
gctgaaactgtttct

SEQ ID NO: 1187853 - DNA, 15 bp, Homo sapiens
agctgaaactgtttc

SEQ ID NO: 1187854 - DNA, 15 bp, Homo sapiens
cagctgaaactgttt

SEQ ID NO: 1187855 - DNA, 15 bp, Homo sapiens
ccagctgaaactgtt

SEQ ID NO: 1187856 - DNA, 15 bp, Homo sapiens
accagctgaaactgt

SEQ ID NO: 1187857 - DNA, 15 bp, Homo sapiens
aaccagctgaaactg

SEQ ID NO: 1187858 - DNA, 15 bp, Homo sapiens
aaaccagctgaaact

SEQ ID NO: 1187859 - DNA, 15 bp, Homo sapiens
caaaccagctgaaac

SEQ ID NO: 1187860 - DNA, 15 bp, Homo sapiens
acaaaccagctgaaa

SEQ ID NO: 1187861 - DNA, 15 bp, Homo sapiens
aacaaaccagctgaa

SEQ ID NO: 1187862 - DNA, 15 bp, Homo sapiens
aaacaaaccagctga

SEQ ID NO: 1187863 - DNA, 15 bp, Homo sapiens
caaacaaaccagctg

SEQ ID NO: 1187864 - DNA, 15 bp, Homo sapiens
acaaacaaaccagct

SEQ ID NO: 1187865 - DNA, 15 bp, Homo sapiens
tacaaacaaaccagc

SEQ ID NO: 1187866 - DNA, 15 bp, Homo sapiens
atacaaacaaaccag

SEQ ID NO: 1187867 - DNA, 15 bp, Homo sapiens
aatacaaacaaacca

SEQ ID NO: 1187868 - DNA, 15 bp, Homo sapiens
caatacaaacaaacc

SEQ ID NO: 1187869 - DNA, 15 bp, Homo sapiens
ccaatacaaacaaac

SEQ ID NO: 1187870 - DNA, 15 bp, Homo sapiens
tccaatacaaacaaa

SEQ ID NO: 1187871 - DNA, 15 bp, Homo sapiens
gtccaatacaaacaa

SEQ ID NO: 1187872 - DNA, 15 bp, Homo sapiens
tgtccaatacaaaca

SEQ ID NO: 1187873 - DNA, 15 bp, Homo sapiens
ttgtccaatacaaac

SEQ ID NO: 1187874 - DNA, 15 bp, Homo sapiens
cttgtccaatacaaa

SEQ ID NO: 1187875 - DNA, 15 bp, Homo sapiens
gcttgtccaatacaa

SEQ ID NO: 1187876 - DNA, 15 bp, Homo sapiens
agcttgtccaataca

SEQ ID NO: 1187877 - DNA, 15 bp, Homo sapiens
cagcttgtccaatac

SEQ ID NO: 1187878 - DNA, 15 bp, Homo sapiens
gcagcttgtccaata

SEQ ID NO: 1187879 - DNA, 15 bp, Homo sapiens
agcagcttgtccaat

SEQ ID NO: 1187880 - DNA, 15 bp, Homo sapiens
cagcagcttgtccaa

SEQ ID NO: 1187881 - DNA, 15 bp, Homo sapiens
tcagcagcttgtcca

SEQ ID NO: 1187882 - DNA, 15 bp, Homo sapiens
ttcagcagcttgtcc

SEQ ID NO: 1187883 - DNA, 15 bp, Homo sapiens
cttcagcagcttgtc

SEQ ID NO: 1187884 - DNA, 15 bp, Homo sapiens
acttcagcagcttgt

SEQ ID NO: 1187885 - DNA, 15 bp, Homo sapiens
cacttcagcagcttg

SEQ ID NO: 1187886 - DNA, 15 bp, Homo sapiens
tcacttcagcagctt

SEQ ID NO: 1187887 - DNA, 15 bp, Homo sapiens
ttcacttcagcagct

SEQ ID NO: 1187888 - DNA, 15 bp, Homo sapiens
tttcacttcagcagc

SEQ ID NO: 1187889 - DNA, 15 bp, Homo sapiens
ttttcacttcagcag

SEQ ID NO: 1187890 - DNA, 15 bp, Homo sapiens
cttttcacttcagca

SEQ ID NO: 1187891 - DNA, 15 bp, Homo sapiens
acttttcacttcagc

SEQ ID NO: 1187892 - DNA, 15 bp, Homo sapiens
aacttttcacttcag

SEQ ID NO: 1187893 - DNA, 15 bp, Homo sapiens
aaacttttcacttca

SEQ ID NO: 1187894 - DNA, 15 bp, Homo sapiens
aaaacttttcacttc

SEQ ID NO: 1187895 - DNA, 15 bp, Homo sapiens
aaaaacttttcactt

SEQ ID NO: 1187896 - DNA, 15 bp, Homo sapiens
caaaaacttttcact

SEQ ID NO: 1187897 - DNA, 15 bp, Homo sapiens
gcaaaaacttttcac

SEQ ID NO: 1187898 - DNA, 15 bp, Homo sapiens
agcaaaaacttttca

SEQ ID NO: 1187899 - DNA, 15 bp, Homo sapiens
aagcaaaaacttttc

SEQ ID NO: 1187900 - DNA, 15 bp, Homo sapiens
caagcaaaaactttt

SEQ ID NO: 1187901 - DNA, 15 bp, Homo sapiens
tcaagcaaaaacttt

SEQ ID NO: 1187902 - DNA, 15 bp, Homo sapiens
gtcaagcaaaaactt

SEQ ID NO: 1187903 - DNA, 15 bp, Homo sapiens
agtcaagcaaaaact

SEQ ID NO: 1187904 - DNA, 15 bp, Homo sapiens
cagtcaagcaaaaac

SEQ ID NO: 1187905 - DNA, 15 bp, Homo sapiens
tcagtcaagcaaaaa

SEQ ID NO: 1187906 - DNA, 15 bp, Homo sapiens
ttcagtcaagcaaaa

SEQ ID NO: 1187907 - DNA, 15 bp, Homo sapiens
attcagtcaagcaaa

SEQ ID NO: 1187908 - DNA, 15 bp, Homo sapiens
cattcagtcaagcaa

SEQ ID NO: 1187909 - DNA, 15 bp, Homo sapiens
acattcagtcaagca

SEQ ID NO: 1187910 - DNA, 15 bp, Homo sapiens
cacattcagtcaagc

SEQ ID NO: 1187911 - DNA, 15 bp, Homo sapiens
tcacattcagtcaag

SEQ ID NO: 1187912 - DNA, 15 bp, Homo sapiens
ctcacattcagtcaa

SEQ ID NO: 1187913 - DNA, 15 bp, Homo sapiens
tctcacattcagtca

SEQ ID NO: 1187914 - DNA, 15 bp, Homo sapiens
gtctcacattcagtc

SEQ ID NO: 1187915 - DNA, 15 bp, Homo sapiens
tgtctcacattcagt

SEQ ID NO: 1187916 - DNA, 15 bp, Homo sapiens
ctgtctcacattcag

SEQ ID NO: 1187917 - DNA, 15 bp, Homo sapiens
actgtctcacattca

SEQ ID NO: 1187918 - DNA, 15 bp, Homo sapiens
aactgtctcacattc

SEQ ID NO: 1187919 - DNA, 15 bp, Homo sapiens
aaactgtctcacatt

SEQ ID NO: 1187920 - DNA, 15 bp, Homo sapiens
gaaactgtctcacat

SEQ ID NO: 1187921 - DNA, 15 bp, Homo sapiens
tgaaactgtctcaca

SEQ ID NO: 1187922 - DNA, 15 bp, Homo sapiens
atgaaactgtctcac

SEQ ID NO: 1187923 - DNA, 15 bp, Homo sapiens
tatgaaactgtctca

SEQ ID NO: 1187924 - DNA, 15 bp, Homo sapiens
ttatgaaactgtctc

SEQ ID NO: 1187925 - DNA, 15 bp, Homo sapiens
gttatgaaactgtct

SEQ ID NO: 1187926 - DNA, 15 bp, Homo sapiens
agttatgaaactgtc

SEQ ID NO: 1187927 - DNA, 15 bp, Homo sapiens
gagttatgaaactgt

SEQ ID NO: 1187928 - DNA, 15 bp, Homo sapiens
agagttatgaaactg

SEQ ID NO: 1187929 - DNA, 15 bp, Homo sapiens
aagagttatgaaact

SEQ ID NO: 1187930 - DNA, 15 bp, Homo sapiens
gaagagttatgaaac

SEQ ID NO: 1187931 - DNA, 15 bp, Homo sapiens
tgaagagttatgaaa

SEQ ID NO: 1187932 - DNA, 15 bp, Homo sapiens
ttgaagagttatgaa

SEQ ID NO: 1187933 - DNA, 15 bp, Homo sapiens
cttgaagagttatga

SEQ ID NO: 1187934 - DNA, 15 bp, Homo sapiens
tcttgaagagttatg

SEQ ID NO: 1187935 - DNA, 15 bp, Homo sapiens
ttcttgaagagttat

SEQ ID NO: 1187936 - DNA, 15 bp, Homo sapiens
cttcttgaagagtta

SEQ ID NO: 1187937 - DNA, 15 bp, Homo sapiens
acttcttgaagagtt

SEQ ID NO: 1187938 - DNA, 15 bp, Homo sapiens
cacttcttgaagagt

SEQ ID NO: 1187939 - DNA, 15 bp, Homo sapiens
gcacttcttgaagag

SEQ ID NO: 1187940 - DNA, 15 bp, Homo sapiens
tgcacttcttgaaga

SEQ ID NO: 1187941 - DNA, 15 bp, Homo sapiens
gtgcacttcttgaag

SEQ ID NO: 1187942 - DNA, 15 bp, Homo sapiens
ggtgcacttcttgaa

SEQ ID NO: 1187943 - DNA, 15 bp, Homo sapiens
tggtgcacttcttga

SEQ ID NO: 1187944 - DNA, 15 bp, Homo sapiens
ttggtgcacttcttg

SEQ ID NO: 1187945 - DNA, 15 bp, Homo sapiens
tttggtgcacttctt

SEQ ID NO: 1187946 - DNA, 15 bp, Homo sapiens
ctttggtgcacttct

SEQ ID NO: 1187947 - DNA, 15 bp, Homo sapiens
cctttggtgcacttc

SEQ ID NO: 1187948 - DNA, 15 bp, Homo sapiens
acctttggtgcactt

SEQ ID NO: 1187949 - DNA, 15 bp, Homo sapiens
cacctttggtgcact

SEQ ID NO: 1187950 - DNA, 15 bp, Homo sapiens
ccacctttggtgcac

SEQ ID NO: 1187951 - DNA, 15 bp, Homo sapiens
cccacctttggtgca

SEQ ID NO: 1187952 - DNA, 15 bp, Homo sapiens
acccacctttggtgc

SEQ ID NO: 1187953 - DNA, 15 bp, Homo sapiens
cacccacctttggtg

SEQ ID NO: 1187954 - DNA, 15 bp, Homo sapiens
gcacccacctttggt

SEQ ID NO: 1187955 - DNA, 15 bp, Homo sapiens
ggcacccacctttgg

SEQ ID NO: 1187956 - DNA, 15 bp, Homo sapiens
tggcacccacctttg

SEQ ID NO: 1187957 - DNA, 15 bp, Homo sapiens
ctggcacccaccttt

SEQ ID NO: 1187958 - DNA, 15 bp, Homo sapiens
gctggcacccacctt

SEQ ID NO: 1187959 - DNA, 15 bp, Homo sapiens
agctggcacccacct

SEQ ID NO: 1187960 - DNA, 15 bp, Homo sapiens
gagctggcacccacc

SEQ ID NO: 1187961 - DNA, 15 bp, Homo sapiens
agagctggcacccac

SEQ ID NO: 1187962 - DNA, 15 bp, Homo sapiens
cagagctggcaccca

SEQ ID NO: 1187963 - DNA, 15 bp, Homo sapiens
tcagagctggcaccc

SEQ ID NO: 1187964 - DNA, 15 bp, Homo sapiens
atcagagctggcacc

SEQ ID NO: 1187965 - DNA, 15 bp, Homo sapiens
catcagagctggcac

SEQ ID NO: 1187966 - DNA, 15 bp, Homo sapiens
tcatcagagctggca

SEQ ID NO: 1187967 - DNA, 15 bp, Homo sapiens
gtcatcagagctggc

SEQ ID NO: 1187968 - DNA, 15 bp, Homo sapiens
cgtcatcagagctgg

SEQ ID NO: 1187969 - DNA, 15 bp, Homo sapiens
ccgtcatcagagctg

SEQ ID NO: 1187970 - DNA, 15 bp, Homo sapiens
gccgtcatcagagct

SEQ ID NO: 1187971 - DNA, 15 bp, Homo sapiens
agccgtcatcagagc

SEQ ID NO: 1187972 - DNA, 15 bp, Homo sapiens
cagccgtcatcagag

SEQ ID NO: 1187973 - DNA, 15 bp, Homo sapiens
gcagccgtcatcaga

SEQ ID NO: 1187974 - DNA, 15 bp, Homo sapiens
agcagccgtcatcag

SEQ ID NO: 1187975 - DNA, 15 bp, Homo sapiens
aagcagccgtcatca

SEQ ID NO: 1187976 - DNA, 15 bp, Homo sapiens
gaagcagccgtcatc

SEQ ID NO: 1187977 - DNA, 15 bp, Homo sapiens
agaagcagccgtcat

SEQ ID NO: 1187978 - DNA, 15 bp, Homo sapiens
tagaagcagccgtca

SEQ ID NO: 1187979 - DNA, 15 bp, Homo sapiens
ttagaagcagccgtc

SEQ ID NO: 1187980 - DNA, 15 bp, Homo sapiens
gttagaagcagccgt

SEQ ID NO: 1187981 - DNA, 15 bp, Homo sapiens
tgttagaagcagccg

SEQ ID NO: 1187982 - DNA, 15 bp, Homo sapiens
atgttagaagcagcc

SEQ ID NO: 1187983 - DNA, 15 bp, Homo sapiens
catgttagaagcagc

SEQ ID NO: 1187984 - DNA, 15 bp, Homo sapiens
gcatgttagaagcag

SEQ ID NO: 1187985 - DNA, 15 bp, Homo sapiens
ggcatgttagaagca

SEQ ID NO: 1187986 - DNA, 15 bp, Homo sapiens
aggcatgttagaagc

SEQ ID NO: 1187987 - DNA, 15 bp, Homo sapiens
gaggcatgttagaag

SEQ ID NO: 1187988 - DNA, 15 bp, Homo sapiens
ggaggcatgttagaa

SEQ ID NO: 1187989 - DNA, 15 bp, Homo sapiens
tggaggcatgttaga

SEQ ID NO: 1187990 - DNA, 15 bp, Homo sapiens
gtggaggcatgttag

SEQ ID NO: 1187991 - DNA, 15 bp, Homo sapiens
agtggaggcatgtta

SEQ ID NO: 1187992 - DNA, 15 bp, Homo sapiens
aagtggaggcatgtt

SEQ ID NO: 1187993 - DNA, 15 bp, Homo sapiens
caagtggaggcatgt

SEQ ID NO: 1187994 - DNA, 15 bp, Homo sapiens
gcaagtggaggcatg

SEQ ID NO: 1187995 - DNA, 15 bp, Homo sapiens
ggcaagtggaggcat

SEQ ID NO: 1187996 - DNA, 15 bp, Homo sapiens
cggcaagtggaggca

SEQ ID NO: 1187997 - DNA, 15 bp, Homo sapiens
gcggcaagtggaggc

SEQ ID NO: 1187998 - DNA, 15 bp, Homo sapiens
ggcggcaagtggagg

SEQ ID NO: 1187999 - DNA, 15 bp, Homo sapiens
gggcggcaagtggag

SEQ ID NO: 1188000 - DNA, 15 bp, Homo sapiens
tgggcggcaagtgga

SEQ ID NO: 1188001 - DNA, 15 bp, Homo sapiens
atgggcggcaagtgg

SEQ ID NO: 1188002 - DNA, 15 bp, Homo sapiens
aatgggcggcaagtg

SEQ ID NO: 1188003 - DNA, 15 bp, Homo sapiens
caatgggcggcaagt

SEQ ID NO: 1188004 - DNA, 15 bp, Homo sapiens
acaatgggcggcaag

SEQ ID NO: 1188005 - DNA, 15 bp, Homo sapiens
gacaatgggcggcaa

SEQ ID NO: 1188006 - DNA, 15 bp, Homo sapiens
tgacaatgggcggca

SEQ ID NO: 1188007 - DNA, 15 bp, Homo sapiens
ttgacaatgggcggc

SEQ ID NO: 1188008 - DNA, 15 bp, Homo sapiens
cttgacaatgggcgg

SEQ ID NO: 1188009 - DNA, 15 bp, Homo sapiens
ccttgacaatgggcg

SEQ ID NO: 1188010 - DNA, 15 bp, Homo sapiens
cccttgacaatgggc

SEQ ID NO: 1188011 - DNA, 15 bp, Homo sapiens
acccttgacaatggg

SEQ ID NO: 1188012 - DNA, 15 bp, Homo sapiens
cacccttgacaatgg

SEQ ID NO: 1188013 - DNA, 15 bp, Homo sapiens
ccacccttgacaatg

SEQ ID NO: 1188014 - DNA, 15 bp, Homo sapiens
gccacccttgacaat

SEQ ID NO: 1188015 - DNA, 15 bp, Homo sapiens
agccacccttgacaa

SEQ ID NO: 1188016 - DNA, 15 bp, Homo sapiens
cagccacccttgaca

SEQ ID NO: 1188017 - DNA, 15 bp, Homo sapiens
ccagccacccttgac

SEQ ID NO: 1188018 - DNA, 15 bp, Homo sapiens
gccagccacccttga

SEQ ID NO: 1188019 - DNA, 15 bp, Homo sapiens
cgccagccacccttg

SEQ ID NO: 1188020 - DNA, 15 bp, Homo sapiens
acgccagccaccctt

SEQ ID NO: 1188021 - DNA, 15 bp, Homo sapiens
tacgccagccaccct

SEQ ID NO: 1188022 - DNA, 15 bp, Homo sapiens
ttacgccagccaccc

SEQ ID NO: 1188023 - DNA, 15 bp, Homo sapiens
attacgccagccacc

SEQ ID NO: 1188024 - DNA, 15 bp, Homo sapiens
aattacgccagccac

SEQ ID NO: 1188025 - DNA, 15 bp, Homo sapiens
taattacgccagcca

SEQ ID NO: 1188026 - DNA, 15 bp, Homo sapiens
ttaattacgccagcc

SEQ ID NO: 1188027 - DNA, 15 bp, Homo sapiens
cttaattacgccagc

SEQ ID NO: 1188028 - DNA, 15 bp, Homo sapiens
acttaattacgccag

SEQ ID NO: 1188029 - DNA, 15 bp, Homo sapiens
aacttaattacgcca

SEQ ID NO: 1188030 - DNA, 15 bp, Homo sapiens
taacttaattacgcc

SEQ ID NO: 1188031 - DNA, 15 bp, Homo sapiens
ttaacttaattacgc

SEQ ID NO: 1188032 - DNA, 15 bp, Homo sapiens
cttaacttaattacg

SEQ ID NO: 1188033 - DNA, 15 bp, Homo sapiens
tcttaacttaattac

SEQ ID NO: 1188034 - DNA, 15 bp, Homo sapiens
gtcttaacttaatta

SEQ ID NO: 1188035 - DNA, 15 bp, Homo sapiens
tgtcttaacttaatt

SEQ ID NO: 1188036 - DNA, 15 bp, Homo sapiens
ttgtcttaacttaat

SEQ ID NO: 1188037 - DNA, 15 bp, Homo sapiens
attgtcttaacttaa

SEQ ID NO: 1188038 - DNA, 15 bp, Homo sapiens
cattgtcttaactta

SEQ ID NO: 1188039 - DNA, 15 bp, Homo sapiens
tcattgtcttaactt

SEQ ID NO: 1188040 - DNA, 15 bp, Homo sapiens
ctcattgtcttaact

SEQ ID NO: 1188041 - DNA, 15 bp, Homo sapiens
gctcattgtcttaac

SEQ ID NO: 1188042 - DNA, 15 bp, Homo sapiens
tgctcattgtcttaa

SEQ ID NO: 1188043 - DNA, 15 bp, Homo sapiens
ttgctcattgtctta

SEQ ID NO: 1188044 - DNA, 15 bp, Homo sapiens
tttgctcattgtctt

SEQ ID NO: 1188045 - DNA, 15 bp, Homo sapiens
ctttgctcattgtct

SEQ ID NO: 1188046 - DNA, 15 bp, Homo sapiens
gctttgctcattgtc

SEQ ID NO: 1188047 - DNA, 15 bp, Homo sapiens
tgctttgctcattgt

SEQ ID NO: 1188048 - DNA, 15 bp, Homo sapiens
ttgctttgctcattg

SEQ ID NO: 1188049 - DNA, 15 bp, Homo sapiens
gttgctttgctcatt

SEQ ID NO: 1188050 - DNA, 15 bp, Homo sapiens
tgttgctttgctcat

SEQ ID NO: 1188051 - DNA, 15 bp, Homo sapiens
ctgttgctttgctca

SEQ ID NO: 1188052 - DNA, 15 bp, Homo sapiens
tctgttgctttgctc

SEQ ID NO: 1188053 - DNA, 15 bp, Homo sapiens
atctgttgctttgct

SEQ ID NO: 1188054 - DNA, 15 bp, Homo sapiens
catctgttgctttgc

SEQ ID NO: 1188055 - DNA, 15 bp, Homo sapiens
gcatctgttgctttg

SEQ ID NO: 1188056 - DNA, 15 bp, Homo sapiens
tgcatctgttgcttt

SEQ ID NO: 1188057 - DNA, 15 bp, Homo sapiens
ttgcatctgttgctt

SEQ ID NO: 1188058 - DNA, 15 bp, Homo sapiens
gttgcatctgttgct

SEQ ID NO: 1188059 - DNA, 15 bp, Homo sapiens
agttgcatctgttgc

SEQ ID NO: 1188060 - DNA, 15 bp, Homo sapiens
cagttgcatctgttg

SEQ ID NO: 1188061 - DNA, 15 bp, Homo sapiens
tcagttgcatctgtt

SEQ ID NO: 1188062 - DNA, 15 bp, Homo sapiens
ctcagttgcatctgt

SEQ ID NO: 1188063 - DNA, 15 bp, Homo sapiens
tctcagttgcatctg

SEQ ID NO: 1188064 - DNA, 15 bp, Homo sapiens
gtctcagttgcatct

SEQ ID NO: 1188065 - DNA, 15 bp, Homo sapiens
ggtctcagttgcatc

SEQ ID NO: 1188066 - DNA, 15 bp, Homo sapiens
aggtctcagttgcat

SEQ ID NO: 1188067 - DNA, 15 bp, Homo sapiens
taggtctcagttgca

SEQ ID NO: 1188068 - DNA, 15 bp, Homo sapiens
ctaggtctcagttgc

SEQ ID NO: 1188069 - DNA, 15 bp, Homo sapiens
actaggtctcagttg

SEQ ID NO: 1188070 - DNA, 15 bp, Homo sapiens
gactaggtctcagtt

SEQ ID NO: 1188071 - DNA, 15 bp, Homo sapiens
ggactaggtctcagt

SEQ ID NO: 1188072 - DNA, 15 bp, Homo sapiens
gggactaggtctcag

SEQ ID NO: 1188073 - DNA, 15 bp, Homo sapiens
agggactaggtctca

SEQ ID NO: 1188074 - DNA, 15 bp, Homo sapiens
cagggactaggtctc

SEQ ID NO: 1188075 - DNA, 15 bp, Homo sapiens
tcagggactaggtct

SEQ ID NO: 1188076 - DNA, 15 bp, Homo sapiens
ctcagggactaggtc

SEQ ID NO: 1188077 - DNA, 15 bp, Homo sapiens
actcagggactaggt

SEQ ID NO: 1188078 - DNA, 15 bp, Homo sapiens
cactcagggactagg

SEQ ID NO: 1188079 - DNA, 15 bp, Homo sapiens
gcactcagggactag

SEQ ID NO: 1188080 - DNA, 15 bp, Homo sapiens
agcactcagggacta

SEQ ID NO: 1188081 - DNA, 15 bp, Homo sapiens
aagcactcagggact

SEQ ID NO: 1188082 - DNA, 15 bp, Homo sapiens
aaagcactcagggac

SEQ ID NO: 1188083 - DNA, 15 bp, Homo sapiens
aaaagcactcaggga

SEQ ID NO: 1188084 - DNA, 15 bp, Homo sapiens
caaaagcactcaggg

SEQ ID NO: 1188085 - DNA, 15 bp, Homo sapiens
acaaaagcactcagg

SEQ ID NO: 1188086 - DNA, 15 bp, Homo sapiens
aacaaaagcactcag

SEQ ID NO: 1188087 - DNA, 15 bp, Homo sapiens
aaacaaaagcactca

SEQ ID NO: 1188088 - DNA, 15 bp, Homo sapiens
aaaacaaaagcactc

SEQ ID NO: 1188089 - DNA, 15 bp, Homo sapiens
caaaacaaaagcact

SEQ ID NO: 1188090 - DNA, 15 bp, Homo sapiens
acaaaacaaaagcac

SEQ ID NO: 1188091 - DNA, 15 bp, Homo sapiens
gacaaaacaaaagca

SEQ ID NO: 1188092 - DNA, 15 bp, Homo sapiens
tgacaaaacaaaagc

SEQ ID NO: 1188093 - DNA, 15 bp, Homo sapiens
gtgacaaaacaaaag

SEQ ID NO: 1188094 - DNA, 15 bp, Homo sapiens
agtgacaaaacaaaa

SEQ ID NO: 1188095 - DNA, 15 bp, Homo sapiens
cagtgacaaaacaaa

SEQ ID NO: 1188096 - DNA, 15 bp, Homo sapiens
acagtgacaaaacaa

SEQ ID NO: 1188097 - DNA, 15 bp, Homo sapiens
gacagtgacaaaaca

SEQ ID NO: 1188098 - DNA, 15 bp, Homo sapiens
tgacagtgacaaaac

SEQ ID NO: 1188099 - DNA, 15 bp, Homo sapiens
atgacagtgacaaaa

SEQ ID NO: 1188100 - DNA, 15 bp, Homo sapiens
aatgacagtgacaaa

SEQ ID NO: 1188101 - DNA, 15 bp, Homo sapiens
caatgacagtgacaa

SEQ ID NO: 1188102 - DNA, 15 bp, Homo sapiens
acaatgacagtgaca

SEQ ID NO: 1188103 - DNA, 15 bp, Homo sapiens
gacaatgacagtgac

SEQ ID NO: 1188104 - DNA, 15 bp, Homo sapiens
agacaatgacagtga

SEQ ID NO: 1188105 - DNA, 15 bp, Homo sapiens
cagacaatgacagtg

SEQ ID NO: 1188106 - DNA, 15 bp, Homo sapiens
gcagacaatgacagt

SEQ ID NO: 1188107 - DNA, 15 bp, Homo sapiens
tgcagacaatgacag

SEQ ID NO: 1188108 - DNA, 15 bp, Homo sapiens
ttgcagacaatgaca

SEQ ID NO: 1188109 - DNA, 15 bp, Homo sapiens
gttgcagacaatgac

SEQ ID NO: 1188110 - DNA, 15 bp, Homo sapiens
tgttgcagacaatga

SEQ ID NO: 1188111 - DNA, 15 bp, Homo sapiens
ttgttgcagacaatg

SEQ ID NO: 1188112 - DNA, 15 bp, Homo sapiens
tttgttgcagacaat

SEQ ID NO: 1188113 - DNA, 15 bp, Homo sapiens
ctttgttgcagacaa

SEQ ID NO: 1188114 - DNA, 15 bp, Homo sapiens
tctttgttgcagaca

SEQ ID NO: 1188115 - DNA, 15 bp, Homo sapiens
ttctttgttgcagac

SEQ ID NO: 1188116 - DNA, 15 bp, Homo sapiens
cttctttgttgcaga

SEQ ID NO: 1188117 - DNA, 15 bp, Homo sapiens
acttctttgttgcag

SEQ ID NO: 1188118 - DNA, 15 bp, Homo sapiens
gacttctttgttgca

SEQ ID NO: 1188119 - DNA, 15 bp, Homo sapiens
tgacttctttgttgc

SEQ ID NO: 1188120 - DNA, 15 bp, Homo sapiens
gtgacttctttgttg

SEQ ID NO: 1188121 - DNA, 15 bp, Homo sapiens
tgtgacttctttgtt

SEQ ID NO: 1188122 - DNA, 15 bp, Homo sapiens
atgtgacttctttgt

SEQ ID NO: 1188123 - DNA, 15 bp, Homo sapiens
catgtgacttctttg

SEQ ID NO: 1188124 - DNA, 15 bp, Homo sapiens
acatgtgacttcttt

SEQ ID NO: 1188125 - DNA, 15 bp, Homo sapiens
cacatgtgacttctt

SEQ ID NO: 1188126 - DNA, 15 bp, Homo sapiens
tcacatgtgacttct

SEQ ID NO: 1188127 - DNA, 15 bp, Homo sapiens
gtcacatgtgacttc

SEQ ID NO: 1188128 - DNA, 15 bp, Homo sapiens
tgtcacatgtgactt

SEQ ID NO: 1188129 - DNA, 15 bp, Homo sapiens
ctgtcacatgtgact

SEQ ID NO: 1188130 - DNA, 15 bp, Homo sapiens
gctgtcacatgtgac

SEQ ID NO: 1188131 - DNA, 15 bp, Homo sapiens
ggctgtcacatgtga

SEQ ID NO: 1188132 - DNA, 15 bp, Homo sapiens
aggctgtcacatgtg

SEQ ID NO: 1188133 - DNA, 15 bp, Homo sapiens
caggctgtcacatgt

SEQ ID NO: 1188134 - DNA, 15 bp, Homo sapiens
ccaggctgtcacatg

SEQ ID NO: 1188135 - DNA, 15 bp, Homo sapiens
cccaggctgtcacat

SEQ ID NO: 1188136 - DNA, 15 bp, Homo sapiens
tcccaggctgtcaca

SEQ ID NO: 1188137 - DNA, 15 bp, Homo sapiens
ttcccaggctgtcac

SEQ ID NO: 1188138 - DNA, 15 bp, Homo sapiens
cttcccaggctgtca

SEQ ID NO: 1188139 - DNA, 15 bp, Homo sapiens
tcttcccaggctgtc

SEQ ID NO: 1188140 - DNA, 15 bp, Homo sapiens
ctcttcccaggctgt

SEQ ID NO: 1188141 - DNA, 15 bp, Homo sapiens
tctcttcccaggctg

SEQ ID NO: 1188142 - DNA, 15 bp, Homo sapiens
ctctcttcccaggct

SEQ ID NO: 1188143 - DNA, 15 bp, Homo sapiens
gctctcttcccaggc

SEQ ID NO: 1188144 - DNA, 15 bp, Homo sapiens
ggctctcttcccagg

SEQ ID NO: 1188145 - DNA, 15 bp, Homo sapiens
tggctctcttcccag

SEQ ID NO: 1188146 - DNA, 15 bp, Homo sapiens
ttggctctcttccca

SEQ ID NO: 1188147 - DNA, 15 bp, Homo sapiens
tttggctctcttccc

SEQ ID NO: 1188148 - DNA, 15 bp, Homo sapiens
atttggctctcttcc

SEQ ID NO: 1188149 - DNA, 15 bp, Homo sapiens
catttggctctcttc

SEQ ID NO: 1188150 - DNA, 15 bp, Homo sapiens
gcatttggctctctt

SEQ ID NO: 1188151 - DNA, 15 bp, Homo sapiens
tgcatttggctctct

SEQ ID NO: 1188152 - DNA, 15 bp, Homo sapiens
ttgcatttggctctc

SEQ ID NO: 1188153 - DNA, 15 bp, Homo sapiens
tttgcatttggctct

SEQ ID NO: 1188154 - DNA, 15 bp, Homo sapiens
gtttgcatttggctc

SEQ ID NO: 1188155 - DNA, 15 bp, Homo sapiens
ggtttgcatttggct

SEQ ID NO: 1188156 - DNA, 15 bp, Homo sapiens
tggtttgcatttggc

SEQ ID NO: 1188157 - DNA, 15 bp, Homo sapiens
ctggtttgcatttgg

SEQ ID NO: 1188158 - DNA, 15 bp, Homo sapiens
tctggtttgcatttg

SEQ ID NO: 1188159 - DNA, 15 bp, Homo sapiens
gtctggtttgcattt

SEQ ID NO: 1188160 - DNA, 15 bp, Homo sapiens
cgtctggtttgcatt

SEQ ID NO: 1188161 - DNA, 15 bp, Homo sapiens
tcgtctggtttgcat

SEQ ID NO: 1188162 - DNA, 15 bp, Homo sapiens
atcgtctggtttgca

SEQ ID NO: 1188163 - DNA, 15 bp, Homo sapiens
tatcgtctggtttgc

SEQ ID NO: 1188164 - DNA, 15 bp, Homo sapiens
atatcgtctggtttg

SEQ ID NO: 1188165 - DNA, 15 bp, Homo sapiens
gatatcgtctggttt

SEQ ID NO: 1188166 - DNA, 15 bp, Homo sapiens
ggatatcgtctggtt

SEQ ID NO: 1188167 - DNA, 15 bp, Homo sapiens
gggatatcgtctggt

SEQ ID NO: 1188168 - DNA, 15 bp, Homo sapiens
tgggatatcgtctgg

SEQ ID NO: 1188169 - DNA, 15 bp, Homo sapiens
ctgggatatcgtctg

SEQ ID NO: 1188170 - DNA, 15 bp, Homo sapiens
gctgggatatcgtct

SEQ ID NO: 1188171 - DNA, 15 bp, Homo sapiens
agctgggatatcgtc

SEQ ID NO: 1188172 - DNA, 15 bp, Homo sapiens
cagctgggatatcgt

SEQ ID NO: 1188173 - DNA, 15 bp, Homo sapiens
ccagctgggatatcg

SEQ ID NO: 1188174 - DNA, 15 bp, Homo sapiens
accagctgggatatc

SEQ ID NO: 1188175 - DNA, 15 bp, Homo sapiens
aaccagctgggatat

SEQ ID NO: 1188176 - DNA, 15 bp, Homo sapiens
aaaccagctgggata

SEQ ID NO: 1188177 - DNA, 15 bp, Homo sapiens
caaaccagctgggat

SEQ ID NO: 1188178 - DNA, 15 bp, Homo sapiens
tcaaaccagctggga

SEQ ID NO: 1188179 - DNA, 15 bp, Homo sapiens
ttcaaaccagctggg

SEQ ID NO: 1188180 - DNA, 15 bp, Homo sapiens
attcaaaccagctgg

SEQ ID NO: 1188181 - DNA, 15 bp, Homo sapiens
cattcaaaccagctg

SEQ ID NO: 1188182 - DNA, 15 bp, Homo sapiens
ccattcaaaccagct

SEQ ID NO: 1188183 - DNA, 15 bp, Homo sapiens
gccattcaaaccagc

SEQ ID NO: 1188184 - DNA, 15 bp, Homo sapiens
ggccattcaaaccag

SEQ ID NO: 1188185 - DNA, 15 bp, Homo sapiens
aggccattcaaacca

SEQ ID NO: 1188186 - DNA, 15 bp, Homo sapiens
gaggccattcaaacc

SEQ ID NO: 1188187 - DNA, 15 bp, Homo sapiens
ggaggccattcaaac

SEQ ID NO: 1188188 - DNA, 15 bp, Homo sapiens
tggaggccattcaaa

SEQ ID NO: 1188189 - DNA, 15 bp, Homo sapiens
gtggaggccattcaa

SEQ ID NO: 1188190 - DNA, 15 bp, Homo sapiens
ggtggaggccattca

SEQ ID NO: 1188191 - DNA, 15 bp, Homo sapiens
cggtggaggccattc

SEQ ID NO: 1188192 - DNA, 15 bp, Homo sapiens
acggtggaggccatt

SEQ ID NO: 1188193 - DNA, 15 bp, Homo sapiens
cacggtggaggccat

SEQ ID NO: 1188194 - DNA, 15 bp, Homo sapiens
gcacggtggaggcca

SEQ ID NO: 1188195 - DNA, 15 bp, Homo sapiens
tgcacggtggaggcc

SEQ ID NO: 1188196 - DNA, 15 bp, Homo sapiens
gtgcacggtggaggc

SEQ ID NO: 1188197 - DNA, 15 bp, Homo sapiens
cgtgcacggtggagg

SEQ ID NO: 1188198 - DNA, 15 bp, Homo sapiens
acgtgcacggtggag

SEQ ID NO: 1188199 - DNA, 15 bp, Homo sapiens
cacgtgcacggtgga

SEQ ID NO: 1188200 - DNA, 15 bp, Homo sapiens
acacgtgcacggtgg

SEQ ID NO: 1188201 - DNA, 15 bp, Homo sapiens
cacacgtgcacggtg

SEQ ID NO: 1188202 - DNA, 15 bp, Homo sapiens
acacacgtgcacggt

SEQ ID NO: 1188203 - DNA, 15 bp, Homo sapiens
cacacacgtgcacgg

SEQ ID NO: 1188204 - DNA, 15 bp, Homo sapiens
gcacacacgtgcacg

SEQ ID NO: 1188205 - DNA, 15 bp, Homo sapiens
tgcacacacgtgcac

SEQ ID NO: 1188206 - DNA, 15 bp, Homo sapiens
atgcacacacgtgca

SEQ ID NO: 1188207 - DNA, 15 bp, Homo sapiens
catgcacacacgtgc

SEQ ID NO: 1188208 - DNA, 15 bp, Homo sapiens
ccatgcacacacgtg

SEQ ID NO: 1188209 - DNA, 15 bp, Homo sapiens
cccatgcacacacgt

SEQ ID NO: 1188210 - DNA, 15 bp, Homo sapiens
tcccatgcacacacg

SEQ ID NO: 1188211 - DNA, 15 bp, Homo sapiens
ttcccatgcacacac

SEQ ID NO: 1188212 - DNA, 15 bp, Homo sapiens
attcccatgcacaca

SEQ ID NO: 1188213 - DNA, 15 bp, Homo sapiens
gattcccatgcacac

SEQ ID NO: 1188214 - DNA, 15 bp, Homo sapiens
tgattcccatgcaca

SEQ ID NO: 1188215 - DNA, 15 bp, Homo sapiens
atgattcccatgcac

SEQ ID NO: 1188216 - DNA, 15 bp, Homo sapiens
catgattcccatgca

SEQ ID NO: 1188217 - DNA, 15 bp, Homo sapiens
gcatgattcccatgc

SEQ ID NO: 1188218 - DNA, 15 bp, Homo sapiens
agcatgattcccatg

SEQ ID NO: 1188219 - DNA, 15 bp, Homo sapiens
tagcatgattcccat

SEQ ID NO: 1188220 - DNA, 15 bp, Homo sapiens
gtagcatgattccca

SEQ ID NO: 1188221 - DNA, 15 bp, Homo sapiens
agtagcatgattccc

SEQ ID NO: 1188222 - DNA, 15 bp, Homo sapiens
aagtagcatgattcc

SEQ ID NO: 1188223 - DNA, 15 bp, Homo sapiens
caagtagcatgattc

SEQ ID NO: 1188224 - DNA, 15 bp, Homo sapiens
ccaagtagcatgatt

SEQ ID NO: 1188225 - DNA, 15 bp, Homo sapiens
accaagtagcatgat

SEQ ID NO: 1188226 - DNA, 15 bp, Homo sapiens
taccaagtagcatga

SEQ ID NO: 1188227 - DNA, 15 bp, Homo sapiens
gtaccaagtagcatg

SEQ ID NO: 1188228 - DNA, 15 bp, Homo sapiens
tgtaccaagtagcat

SEQ ID NO: 1188229 - DNA, 15 bp, Homo sapiens
ctgtaccaagtagca

SEQ ID NO: 1188230 - DNA, 15 bp, Homo sapiens
gctgtaccaagtagc

SEQ ID NO: 1188231 - DNA, 15 bp, Homo sapiens
tgctgtaccaagtag

SEQ ID NO: 1188232 - DNA, 15 bp, Homo sapiens
atgctgtaccaagta

SEQ ID NO: 1188233 - DNA, 15 bp, Homo sapiens
gatgctgtaccaagt

SEQ ID NO: 1188234 - DNA, 15 bp, Homo sapiens
agatgctgtaccaag

SEQ ID NO: 1188235 - DNA, 15 bp, Homo sapiens
cagatgctgtaccaa

SEQ ID NO: 1188236 - DNA, 15 bp, Homo sapiens
gcagatgctgtacca

SEQ ID NO: 1188237 - DNA, 15 bp, Homo sapiens
agcagatgctgtacc

SEQ ID NO: 1188238 - DNA, 15 bp, Homo sapiens
aagcagatgctgtac

SEQ ID NO: 1188239 - DNA, 15 bp, Homo sapiens
gaagcagatgctgta

SEQ ID NO: 1188240 - DNA, 15 bp, Homo sapiens
tgaagcagatgctgt

SEQ ID NO: 1188241 - DNA, 15 bp, Homo sapiens
gtgaagcagatgctg

SEQ ID NO: 1188242 - DNA, 15 bp, Homo sapiens
agtgaagcagatgct

SEQ ID NO: 1188243 - DNA, 15 bp, Homo sapiens
gagtgaagcagatgc

SEQ ID NO: 1188244 - DNA, 15 bp, Homo sapiens
tgagtgaagcagatg

SEQ ID NO: 1188245 - DNA, 15 bp, Homo sapiens
ttgagtgaagcagat

SEQ ID NO: 1188246 - DNA, 15 bp, Homo sapiens
cttgagtgaagcaga

SEQ ID NO: 1188247 - DNA, 15 bp, Homo sapiens
acttgagtgaagcag

SEQ ID NO: 1188248 - DNA, 15 bp, Homo sapiens
cacttgagtgaagca

SEQ ID NO: 1188249 - DNA, 15 bp, Homo sapiens
tcacttgagtgaagc

SEQ ID NO: 1188250 - DNA, 15 bp, Homo sapiens
ctcacttgagtgaag

SEQ ID NO: 1188251 - DNA, 15 bp, Homo sapiens
actcacttgagtgaa

SEQ ID NO: 1188252 - DNA, 15 bp, Homo sapiens
aactcacttgagtga

SEQ ID NO: 1188253 - DNA, 15 bp, Homo sapiens
aaactcacttgagtg

SEQ ID NO: 1188254 - DNA, 15 bp, Homo sapiens
gaaactcacttgagt

SEQ ID NO: 1188255 - DNA, 15 bp, Homo sapiens
tgaaactcacttgag

SEQ ID NO: 1188256 - DNA, 15 bp, Homo sapiens
ctgaaactcacttga

SEQ ID NO: 1188257 - DNA, 15 bp, Homo sapiens
gctgaaactcacttg

SEQ ID NO: 1188258 - DNA, 15 bp, Homo sapiens
ggctgaaactcactt

SEQ ID NO: 1188259 - DNA, 15 bp, Homo sapiens
gggctgaaactcact

SEQ ID NO: 1188260 - DNA, 15 bp, Homo sapiens
tgggctgaaactcac

SEQ ID NO: 1188261 - DNA, 15 bp, Homo sapiens
atgggctgaaactca

SEQ ID NO: 1188262 - DNA, 15 bp, Homo sapiens
catgggctgaaactc

SEQ ID NO: 1188263 - DNA, 15 bp, Homo sapiens
ccatgggctgaaact

SEQ ID NO: 1188264 - DNA, 15 bp, Homo sapiens
gccatgggctgaaac

SEQ ID NO: 1188265 - DNA, 15 bp, Homo sapiens
agccatgggctgaaa

SEQ ID NO: 1188266 - DNA, 15 bp, Homo sapiens
aagccatgggctgaa

SEQ ID NO: 1188267 - DNA, 15 bp, Homo sapiens
aaagccatgggctga

SEQ ID NO: 1188268 - DNA, 15 bp, Homo sapiens
caaagccatgggctg

SEQ ID NO: 1188269 - DNA, 15 bp, Homo sapiens
gcaaagccatgggct

SEQ ID NO: 1188270 - DNA, 15 bp, Homo sapiens
agcaaagccatgggc

SEQ ID NO: 1188271 - DNA, 15 bp, Homo sapiens
cagcaaagccatggg

SEQ ID NO: 1188272 - DNA, 15 bp, Homo sapiens
acagcaaagccatgg

SEQ ID NO: 1188273 - DNA, 15 bp, Homo sapiens
cacagcaaagccatg

SEQ ID NO: 1188274 - DNA, 15 bp, Homo sapiens
tcacagcaaagccat

SEQ ID NO: 1188275 - DNA, 15 bp, Homo sapiens
atcacagcaaagcca

SEQ ID NO: 1188276 - DNA, 15 bp, Homo sapiens
catcacagcaaagcc

SEQ ID NO: 1188277 - DNA, 15 bp, Homo sapiens
gcatcacagcaaagc

SEQ ID NO: 1188278 - DNA, 15 bp, Homo sapiens
agcatcacagcaaag

SEQ ID NO: 1188279 - DNA, 15 bp, Homo sapiens
cagcatcacagcaaa

SEQ ID NO: 1188280 - DNA, 15 bp, Homo sapiens
tcagcatcacagcaa

SEQ ID NO: 1188281 - DNA, 15 bp, Homo sapiens
ctcagcatcacagca

SEQ ID NO: 1188282 - DNA, 15 bp, Homo sapiens
tctcagcatcacagc

SEQ ID NO: 1188283 - DNA, 15 bp, Homo sapiens
gtctcagcatcacag

SEQ ID NO: 1188284 - DNA, 15 bp, Homo sapiens
tgtctcagcatcaca

SEQ ID NO: 1188285 - DNA, 15 bp, Homo sapiens
ctgtctcagcatcac

SEQ ID NO: 1188286 - DNA, 15 bp, Homo sapiens
tctgtctcagcatca

SEQ ID NO: 1188287 - DNA, 15 bp, Homo sapiens
gtctgtctcagcatc

SEQ ID NO: 1188288 - DNA, 15 bp, Homo sapiens
ggtctgtctcagcat

SEQ ID NO: 1188289 - DNA, 15 bp, Homo sapiens
gggtctgtctcagca

SEQ ID NO: 1188290 - DNA, 15 bp, Homo sapiens
tgggtctgtctcagc

SEQ ID NO: 1188291 - DNA, 15 bp, Homo sapiens
ctgggtctgtctcag

SEQ ID NO: 1188292 - DNA, 15 bp, Homo sapiens
tctgggtctgtctca

SEQ ID NO: 1188293 - DNA, 15 bp, Homo sapiens
ttctgggtctgtctc

SEQ ID NO: 1188294 - DNA, 15 bp, Homo sapiens
cttctgggtctgtct

SEQ ID NO: 1188295 - DNA, 15 bp, Homo sapiens
tcttctgggtctgtc

SEQ ID NO: 1188296 - DNA, 15 bp, Homo sapiens
ttcttctgggtctgt

SEQ ID NO: 1188297 - DNA, 15 bp, Homo sapiens
tttcttctgggtctg

SEQ ID NO: 1188298 - DNA, 15 bp, Homo sapiens
gtttcttctgggtct

SEQ ID NO: 1188299 - DNA, 15 bp, Homo sapiens
tgtttcttctgggtc

SEQ ID NO: 1188300 - DNA, 15 bp, Homo sapiens
ctgtttcttctgggt

SEQ ID NO: 1188301 - DNA, 15 bp, Homo sapiens
tctgtttcttctggg

SEQ ID NO: 1188302 - DNA, 15 bp, Homo sapiens
gtctgtttcttctgg

SEQ ID NO: 1188303 - DNA, 15 bp, Homo sapiens
ggtctgtttcttctg

SEQ ID NO: 1188304 - DNA, 15 bp, Homo sapiens
tggtctgtttcttct

SEQ ID NO: 1188305 - DNA, 15 bp, Homo sapiens
ctggtctgtttcttc

SEQ ID NO: 1188306 - DNA, 15 bp, Homo sapiens
cctggtctgtttctt

SEQ ID NO: 1188307 - DNA, 15 bp, Homo sapiens
ccctggtctgtttct

SEQ ID NO: 1188308 - DNA, 15 bp, Homo sapiens
tccctggtctgtttc

SEQ ID NO: 1188309 - DNA, 15 bp, Homo sapiens
ttccctggtctgttt

SEQ ID NO: 1188310 - DNA, 15 bp, Homo sapiens
attccctggtctgtt

SEQ ID NO: 1188311 - DNA, 15 bp, Homo sapiens
gattccctggtctgt

SEQ ID NO: 1188312 - DNA, 15 bp, Homo sapiens
ggattccctggtctg

SEQ ID NO: 1188313 - DNA, 15 bp, Homo sapiens
gggattccctggtct

SEQ ID NO: 1188314 - DNA, 15 bp, Homo sapiens
agggattccctggtc

SEQ ID NO: 1188315 - DNA, 15 bp, Homo sapiens
gagggattccctggt

SEQ ID NO: 1188316 - DNA, 15 bp, Homo sapiens
ggagggattccctgg

SEQ ID NO: 1188317 - DNA, 15 bp, Homo sapiens
cggagggattccctg

SEQ ID NO: 1188318 - DNA, 15 bp, Homo sapiens
gcggagggattccct

SEQ ID NO: 1188319 - DNA, 15 bp, Homo sapiens
agcggagggattccc

SEQ ID NO: 1188320 - DNA, 15 bp, Homo sapiens
gagcggagggattcc

SEQ ID NO: 1188321 - DNA, 15 bp, Homo sapiens
tgagcggagggattc

SEQ ID NO: 1188322 - DNA, 15 bp, Homo sapiens
ctgagcggagggatt

SEQ ID NO: 1188323 - DNA, 15 bp, Homo sapiens
tctgagcggagggat

SEQ ID NO: 1188324 - DNA, 15 bp, Homo sapiens
gtctgagcggaggga

SEQ ID NO: 1188325 - DNA, 15 bp, Homo sapiens
agtctgagcggaggg

SEQ ID NO: 1188326 - DNA, 15 bp, Homo sapiens
aagtctgagcggagg

SEQ ID NO: 1188327 - DNA, 15 bp, Homo sapiens
aaagtctgagcggag

SEQ ID NO: 1188328 - DNA, 15 bp, Homo sapiens
taaagtctgagcgga

SEQ ID NO: 1188329 - DNA, 15 bp, Homo sapiens
gtaaagtctgagcgg

SEQ ID NO: 1188330 - DNA, 15 bp, Homo sapiens
tgtaaagtctgagcg

SEQ ID NO: 1188331 - DNA, 15 bp, Homo sapiens
gtgtaaagtctgagc

SEQ ID NO: 1188332 - DNA, 15 bp, Homo sapiens
agtgtaaagtctgag

SEQ ID NO: 1188333 - DNA, 15 bp, Homo sapiens
aagtgtaaagtctga

SEQ ID NO: 1188334 - DNA, 15 bp, Homo sapiens
aaagtgtaaagtctg

SEQ ID NO: 1188335 - DNA, 15 bp, Homo sapiens
taaagtgtaaagtct

SEQ ID NO: 1188336 - DNA, 15 bp, Homo sapiens
ataaagtgtaaagtc

SEQ ID NO: 1188337 - DNA, 15 bp, Homo sapiens
tataaagtgtaaagt

SEQ ID NO: 1188338 - DNA, 15 bp, Homo sapiens
gtataaagtgtaaag

SEQ ID NO: 1188339 - DNA, 15 bp, Homo sapiens
ggtataaagtgtaaa

SEQ ID NO: 1188340 - DNA, 15 bp, Homo sapiens
aggtataaagtgtaa

SEQ ID NO: 1188341 - DNA, 15 bp, Homo sapiens
aaggtataaagtgta

SEQ ID NO: 1188342 - DNA, 15 bp, Homo sapiens
caaggtataaagtgt

SEQ ID NO: 1188343 - DNA, 15 bp, Homo sapiens
acaaggtataaagtg

SEQ ID NO: 1188344 - DNA, 15 bp, Homo sapiens
cacaaggtataaagt

SEQ ID NO: 1188345 - DNA, 15 bp, Homo sapiens
gcacaaggtataaag

SEQ ID NO: 1188346 - DNA, 15 bp, Homo sapiens
agcacaaggtataaa

SEQ ID NO: 1188347 - DNA, 15 bp, Homo sapiens
aagcacaaggtataa

SEQ ID NO: 1188348 - DNA, 15 bp, Homo sapiens
aaagcacaaggtata

SEQ ID NO: 1188349 - DNA, 15 bp, Homo sapiens
caaagcacaaggtat

SEQ ID NO: 1188350 - DNA, 15 bp, Homo sapiens
tcaaagcacaaggta

SEQ ID NO: 1188351 - DNA, 15 bp, Homo sapiens
ctcaaagcacaaggt

SEQ ID NO: 1188352 - DNA, 15 bp, Homo sapiens
tctcaaagcacaagg

SEQ ID NO: 1188353 - DNA, 15 bp, Homo sapiens
ctctcaaagcacaag

SEQ ID NO: 1188354 - DNA, 15 bp, Homo sapiens
tctctcaaagcacaa

SEQ ID NO: 1188355 - DNA, 15 bp, Homo sapiens
ttctctcaaagcaca

SEQ ID NO: 1188356 - DNA, 15 bp, Homo sapiens
tttctctcaaagcac

SEQ ID NO: 1188357 - DNA, 15 bp, Homo sapiens
ttttctctcaaagca

SEQ ID NO: 1188358 - DNA, 15 bp, Homo sapiens
cttttctctcaaagc

SEQ ID NO: 1188359 - DNA, 15 bp, Homo sapiens
tcttttctctcaaag

SEQ ID NO: 1188360 - DNA, 15 bp, Homo sapiens
ttcttttctctcaaa

SEQ ID NO: 1188361 - DNA, 15 bp, Homo sapiens
tttcttttctctcaa

SEQ ID NO: 1188362 - DNA, 15 bp, Homo sapiens
ttttcttttctctca

SEQ ID NO: 1188363 - DNA, 15 bp, Homo sapiens
tttttcttttctctc

SEQ ID NO: 1188364 - DNA, 15 bp, Homo sapiens
ctttttcttttctct

SEQ ID NO: 1188365 - DNA, 15 bp, Homo sapiens
tctttttcttttctc

SEQ ID NO: 1188366 - DNA, 15 bp, Homo sapiens
ttctttttcttttct

SEQ ID NO: 1188367 - DNA, 15 bp, Homo sapiens
attctttttcttttc

SEQ ID NO: 1188368 - DNA, 15 bp, Homo sapiens
gattctttttctttt

SEQ ID NO: 1188369 - DNA, 15 bp, Homo sapiens
agattctttttcttt

SEQ ID NO: 1188370 - DNA, 15 bp, Homo sapiens
gagattctttttctt

SEQ ID NO: 1188371 - DNA, 15 bp, Homo sapiens
agagattctttttct

SEQ ID NO: 1188372 - DNA, 15 bp, Homo sapiens
gagagattctttttc

SEQ ID NO: 1188373 - DNA, 15 bp, Homo sapiens
agagagattcttttt

SEQ ID NO: 1188374 - DNA, 15 bp, Homo sapiens
tagagagattctttt

SEQ ID NO: 1188375 - DNA, 15 bp, Homo sapiens
atagagagattcttt

SEQ ID NO: 1188376 - DNA, 15 bp, Homo sapiens
aatagagagattctt

SEQ ID NO: 1188377 - DNA, 15 bp, Homo sapiens
caatagagagattct

SEQ ID NO: 1188378 - DNA, 15 bp, Homo sapiens
ccaatagagagattc

SEQ ID NO: 1188379 - DNA, 15 bp, Homo sapiens
tccaatagagagatt

SEQ ID NO: 1188380 - DNA, 15 bp, Homo sapiens
ctccaatagagagat

SEQ ID NO: 1188381 - DNA, 15 bp, Homo sapiens
tctccaatagagaga

SEQ ID NO: 1188382 - DNA, 15 bp, Homo sapiens
gtctccaatagagag

SEQ ID NO: 1188383 - DNA, 15 bp, Homo sapiens
tgtctccaatagaga

SEQ ID NO: 1188384 - DNA, 15 bp, Homo sapiens
ttgtctccaatagag

SEQ ID NO: 1188385 - DNA, 15 bp, Homo sapiens
tttgtctccaataga

SEQ ID NO: 1188386 - DNA, 15 bp, Homo sapiens
ttttgtctccaatag

SEQ ID NO: 1188387 - DNA, 15 bp, Homo sapiens
tttttgtctccaata

SEQ ID NO: 1188388 - DNA, 15 bp, Homo sapiens
ttttttgtctccaat

SEQ ID NO: 1188389 - DNA, 15 bp, Homo sapiens
attttttgtctccaa

SEQ ID NO: 1188390 - DNA, 15 bp, Homo sapiens
tattttttgtctcca

SEQ ID NO: 1188391 - DNA, 15 bp, Homo sapiens
ctattttttgtctcc

SEQ ID NO: 1188392 - DNA, 15 bp, Homo sapiens
cctattttttgtctc

SEQ ID NO: 1188393 - DNA, 15 bp, Homo sapiens
tcctattttttgtct

SEQ ID NO: 1188394 - DNA, 15 bp, Homo sapiens
atcctattttttgtc

SEQ ID NO: 1188395 - DNA, 15 bp, Homo sapiens
catcctattttttgt

SEQ ID NO: 1188396 - DNA, 15 bp, Homo sapiens
acatcctattttttg

SEQ ID NO: 1188397 - DNA, 15 bp, Homo sapiens
tacatcctatttttt

SEQ ID NO: 1188398 - DNA, 15 bp, Homo sapiens
atacatcctattttt

SEQ ID NO: 1188399 - DNA, 15 bp, Homo sapiens
catacatcctatttt

SEQ ID NO: 1188400 - DNA, 15 bp, Homo sapiens
acatacatcctattt

SEQ ID NO: 1188401 - DNA, 15 bp, Homo sapiens
cacatacatcctatt

SEQ ID NO: 1188402 - DNA, 15 bp, Homo sapiens
ccacatacatcctat

SEQ ID NO: 1188403 - DNA, 15 bp, Homo sapiens
accacatacatccta

SEQ ID NO: 1188404 - DNA, 15 bp, Homo sapiens
aaccacatacatcct

SEQ ID NO: 1188405 - DNA, 15 bp, Homo sapiens
caaccacatacatcc

SEQ ID NO: 1188406 - DNA, 15 bp, Homo sapiens
ccaaccacatacatc

SEQ ID NO: 1188407 - DNA, 15 bp, Homo sapiens
accaaccacatacat

SEQ ID NO: 1188408 - DNA, 15 bp, Homo sapiens
gaccaaccacataca

SEQ ID NO: 1188409 - DNA, 15 bp, Homo sapiens
tgaccaaccacatac

SEQ ID NO: 1188410 - DNA, 15 bp, Homo sapiens
ttgaccaaccacata

SEQ ID NO: 1188411 - DNA, 15 bp, Homo sapiens
attgaccaaccacat

SEQ ID NO: 1188412 - DNA, 15 bp, Homo sapiens
gattgaccaaccaca

SEQ ID NO: 1188413 - DNA, 15 bp, Homo sapiens
agattgaccaaccac

SEQ ID NO: 1188414 - DNA, 15 bp, Homo sapiens
tagattgaccaacca

SEQ ID NO: 1188415 - DNA, 15 bp, Homo sapiens
ttagattgaccaacc

SEQ ID NO: 1188416 - DNA, 15 bp, Homo sapiens
gttagattgaccaac

SEQ ID NO: 1188417 - DNA, 15 bp, Homo sapiens
ggttagattgaccaa

SEQ ID NO: 1188418 - DNA, 15 bp, Homo sapiens
aggttagattgacca

SEQ ID NO: 1188419 - DNA, 15 bp, Homo sapiens
gaggttagattgacc

SEQ ID NO: 1188420 - DNA, 15 bp, Homo sapiens
tgaggttagattgac

SEQ ID NO: 1188421 - DNA, 15 bp, Homo sapiens
ttgaggttagattga

SEQ ID NO: 1188422 - DNA, 15 bp, Homo sapiens
attgaggttagattg

SEQ ID NO: 1188423 - DNA, 15 bp, Homo sapiens
aattgaggttagatt

SEQ ID NO: 1188424 - DNA, 15 bp, Homo sapiens
gaattgaggttagat

SEQ ID NO: 1188425 - DNA, 15 bp, Homo sapiens
agaattgaggttaga

SEQ ID NO: 1188426 - DNA, 15 bp, Homo sapiens
aagaattgaggttag

SEQ ID NO: 1188427 - DNA, 15 bp, Homo sapiens
aaagaattgaggtta

SEQ ID NO: 1188428 - DNA, 15 bp, Homo sapiens
aaaagaattgaggtt

SEQ ID NO: 1188429 - DNA, 15 bp, Homo sapiens
aaaaagaattgaggt

SEQ ID NO: 1188430 - DNA, 15 bp, Homo sapiens
caaaaagaattgagg

SEQ ID NO: 1188431 - DNA, 15 bp, Homo sapiens
gcaaaaagaattgag

SEQ ID NO: 1188432 - DNA, 15 bp, Homo sapiens
agcaaaaagaattga

SEQ ID NO: 1188433 - DNA, 15 bp, Homo sapiens
tagcaaaaagaattg

SEQ ID NO: 1188434 - DNA, 15 bp, Homo sapiens
atagcaaaaagaatt

SEQ ID NO: 1188435 - DNA, 15 bp, Homo sapiens
tatagcaaaaagaat

SEQ ID NO: 1188436 - DNA, 15 bp, Homo sapiens
ctatagcaaaaagaa

SEQ ID NO: 1188437 - DNA, 15 bp, Homo sapiens
gctatagcaaaaaga

SEQ ID NO: 1188438 - DNA, 15 bp, Homo sapiens
ggctatagcaaaaag

SEQ ID NO: 1188439 - DNA, 15 bp, Homo sapiens
gggctatagcaaaaa

SEQ ID NO: 1188440 - DNA, 15 bp, Homo sapiens
ggggctatagcaaaa

SEQ ID NO: 1188441 - DNA, 15 bp, Homo sapiens
gggggctatagcaaa

SEQ ID NO: 1188442 - DNA, 15 bp, Homo sapiens
ggggggctatagcaa

SEQ ID NO: 1188443 - DNA, 15 bp, Homo sapiens
cggggggctatagca

SEQ ID NO: 1188444 - DNA, 15 bp, Homo sapiens
gcggggggctatagc

SEQ ID NO: 1188445 - DNA, 15 bp, Homo sapiens
agcggggggctatag

SEQ ID NO: 1188446 - DNA, 15 bp, Homo sapiens
tagcggggggctata

SEQ ID NO: 1188447 - DNA, 15 bp, Homo sapiens
ttagcggggggctat

SEQ ID NO: 1188448 - DNA, 15 bp, Homo sapiens
attagcggggggcta

SEQ ID NO: 1188449 - DNA, 15 bp, Homo sapiens
aattagcggggggct

SEQ ID NO: 1188450 - DNA, 15 bp, Homo sapiens
aaattagcggggggc

SEQ ID NO: 1188451 - DNA, 15 bp, Homo sapiens
taaattagcgggggg

SEQ ID NO: 1188452 - DNA, 15 bp, Homo sapiens
ttaaattagcggggg

SEQ ID NO: 1188453 - DNA, 15 bp, Homo sapiens
tttaaattagcgggg

SEQ ID NO: 1188454 - DNA, 15 bp, Homo sapiens
ctttaaattagcggg

SEQ ID NO: 1188455 - DNA, 15 bp, Homo sapiens
tctttaaattagcgg

SEQ ID NO: 1188456 - DNA, 15 bp, Homo sapiens
ctctttaaattagcg

SEQ ID NO: 1188457 - DNA, 15 bp, Homo sapiens
actctttaaattagc

SEQ ID NO: 1188458 - DNA, 15 bp, Homo sapiens
cactctttaaattag

SEQ ID NO: 1188459 - DNA, 15 bp, Homo sapiens
tcactctttaaatta

SEQ ID NO: 1188460 - DNA, 15 bp, Homo sapiens
ttcactctttaaatt

SEQ ID NO: 1188461 - DNA, 15 bp, Homo sapiens
cttcactctttaaat

SEQ ID NO: 1188462 - DNA, 15 bp, Homo sapiens
gcttcactctttaaa

SEQ ID NO: 1188463 - DNA, 15 bp, Homo sapiens
tgcttcactctttaa

SEQ ID NO: 1188464 - DNA, 15 bp, Homo sapiens
atgcttcactcttta

SEQ ID NO: 1188465 - DNA, 15 bp, Homo sapiens
tatgcttcactcttt

SEQ ID NO: 1188466 - DNA, 15 bp, Homo sapiens
ctatgcttcactctt

SEQ ID NO: 1188467 - DNA, 15 bp, Homo sapiens
tctatgcttcactct

SEQ ID NO: 1188468 - DNA, 15 bp, Homo sapiens
atctatgcttcactc

SEQ ID NO: 1188469 - DNA, 15 bp, Homo sapiens
catctatgcttcact

SEQ ID NO: 1188470 - DNA, 15 bp, Homo sapiens
ccatctatgcttcac

SEQ ID NO: 1188471 - DNA, 15 bp, Homo sapiens
accatctatgcttca

SEQ ID NO: 1188472 - DNA, 15 bp, Homo sapiens
taccatctatgcttc

SEQ ID NO: 1188473 - DNA, 15 bp, Homo sapiens
ataccatctatgctt

SEQ ID NO: 1188474 - DNA, 15 bp, Homo sapiens
gataccatctatgct

SEQ ID NO: 1188475 - DNA, 15 bp, Homo sapiens
agataccatctatgc

SEQ ID NO: 1188476 - DNA, 15 bp, Homo sapiens
aagataccatctatg

SEQ ID NO: 1188477 - DNA, 15 bp, Homo sapiens
taagataccatctat

SEQ ID NO: 1188478 - DNA, 15 bp, Homo sapiens
ttaagataccatcta

SEQ ID NO: 1188479 - DNA, 15 bp, Homo sapiens
attaagataccatct

SEQ ID NO: 1188480 - DNA, 15 bp, Homo sapiens
cattaagataccatc

SEQ ID NO: 1188481 - DNA, 15 bp, Homo sapiens
acattaagataccat

SEQ ID NO: 1188482 - DNA, 15 bp, Homo sapiens
aacattaagatacca

SEQ ID NO: 1188483 - DNA, 15 bp, Homo sapiens
aaacattaagatacc

SEQ ID NO: 1188484 - DNA, 15 bp, Homo sapiens
aaaacattaagatac

SEQ ID NO: 1188485 - DNA, 15 bp, Homo sapiens
gaaaacattaagata

SEQ ID NO: 1188486 - DNA, 15 bp, Homo sapiens
agaaaacattaagat

SEQ ID NO: 1188487 - DNA, 15 bp, Homo sapiens
aagaaaacattaaga

SEQ ID NO: 1188488 - DNA, 15 bp, Homo sapiens
caagaaaacattaag

SEQ ID NO: 1188489 - DNA, 15 bp, Homo sapiens
acaagaaaacattaa

SEQ ID NO: 1188490 - DNA, 15 bp, Homo sapiens
tacaagaaaacatta

SEQ ID NO: 1188491 - DNA, 15 bp, Homo sapiens
ctacaagaaaacatt

SEQ ID NO: 1188492 - DNA, 15 bp, Homo sapiens
tctacaagaaaacat

SEQ ID NO: 1188493 - DNA, 15 bp, Homo sapiens
ttctacaagaaaaca

SEQ ID NO: 1188494 - DNA, 15 bp, Homo sapiens
tttctacaagaaaac

SEQ ID NO: 1188495 - DNA, 15 bp, Homo sapiens
atttctacaagaaaa

SEQ ID NO: 1188496 - DNA, 15 bp, Homo sapiens
aatttctacaagaaa

SEQ ID NO: 1188497 - DNA, 15 bp, Homo sapiens
aaatttctacaagaa

SEQ ID NO: 1188498 - DNA, 15 bp, Homo sapiens
caaatttctacaaga

SEQ ID NO: 1188499 - DNA, 15 bp, Homo sapiens
ccaaatttctacaag

SEQ ID NO: 1188500 - DNA, 15 bp, Homo sapiens
cccaaatttctacaa

SEQ ID NO: 1188501 - DNA, 15 bp, Homo sapiens
tcccaaatttctaca

SEQ ID NO: 1188502 - DNA, 15 bp, Homo sapiens
atcccaaatttctac

SEQ ID NO: 1188503 - DNA, 15 bp, Homo sapiens
aatcccaaatttcta

SEQ ID NO: 1188504 - DNA, 15 bp, Homo sapiens
taatcccaaatttct

SEQ ID NO: 1188505 - DNA, 15 bp, Homo sapiens
ttaatcccaaatttc

SEQ ID NO: 1188506 - DNA, 15 bp, Homo sapiens
attaatcccaaattt

SEQ ID NO: 1188507 - DNA, 15 bp, Homo sapiens
aattaatcccaaatt

SEQ ID NO: 1188508 - DNA, 15 bp, Homo sapiens
aaattaatcccaaat

SEQ ID NO: 1188509 - DNA, 15 bp, Homo sapiens
caaattaatcccaaa

SEQ ID NO: 1188510 - DNA, 15 bp, Homo sapiens
ccaaattaatcccaa

SEQ ID NO: 1188511 - DNA, 15 bp, Homo sapiens
gccaaattaatccca

SEQ ID NO: 1188512 - DNA, 15 bp, Homo sapiens
agccaaattaatccc

SEQ ID NO: 1188513 - DNA, 15 bp, Homo sapiens
aagccaaattaatcc

SEQ ID NO: 1188514 - DNA, 15 bp, Homo sapiens
caagccaaattaatc

SEQ ID NO: 1188515 - DNA, 15 bp, Homo sapiens
tcaagccaaattaat

SEQ ID NO: 1188516 - DNA, 15 bp, Homo sapiens
ctcaagccaaattaa

SEQ ID NO: 1188517 - DNA, 15 bp, Homo sapiens
tctcaagccaaatta

SEQ ID NO: 1188518 - DNA, 15 bp, Homo sapiens
ctctcaagccaaatt

SEQ ID NO: 1188519 - DNA, 15 bp, Homo sapiens
cctctcaagccaaat

SEQ ID NO: 1188520 - DNA, 15 bp, Homo sapiens
tcctctcaagccaaa

SEQ ID NO: 1188521 - DNA, 15 bp, Homo sapiens
ttcctctcaagccaa

SEQ ID NO: 1188522 - DNA, 15 bp, Homo sapiens
cttcctctcaagcca

SEQ ID NO: 1188523 - DNA, 15 bp, Homo sapiens
tcttcctctcaagcc

SEQ ID NO: 1188524 - DNA, 15 bp, Homo sapiens
ttcttcctctcaagc

SEQ ID NO: 1188525 - DNA, 15 bp, Homo sapiens
attcttcctctcaag

SEQ ID NO: 1188526 - DNA, 15 bp, Homo sapiens
cattcttcctctcaa

SEQ ID NO: 1188527 - DNA, 15 bp, Homo sapiens
ccattcttcctctca

SEQ ID NO: 1188528 - DNA, 15 bp, Homo sapiens
tccattcttcctctc

SEQ ID NO: 1188529 - DNA, 15 bp, Homo sapiens
ctccattcttcctct

SEQ ID NO: 1188530 - DNA, 15 bp, Homo sapiens
tctccattcttcctc

SEQ ID NO: 1188531 - DNA, 15 bp, Homo sapiens
atctccattcttcct

SEQ ID NO: 1188532 - DNA, 15 bp, Homo sapiens
aatctccattcttcc

SEQ ID NO: 1188533 - DNA, 15 bp, Homo sapiens
taatctccattcttc

SEQ ID NO: 1188534 - DNA, 15 bp, Homo sapiens
ttaatctccattctt

SEQ ID NO: 1188535 - DNA, 15 bp, Homo sapiens
tttaatctccattct

SEQ ID NO: 1188536 - DNA, 15 bp, Homo sapiens
gtttaatctccattc

SEQ ID NO: 1188537 - DNA, 15 bp, Homo sapiens
cgtttaatctccatt

SEQ ID NO: 1188538 - DNA, 15 bp, Homo sapiens
gcgtttaatctccat

SEQ ID NO: 1188539 - DNA, 15 bp, Homo sapiens
agcgtttaatctcca

SEQ ID NO: 1188540 - DNA, 15 bp, Homo sapiens
aagcgtttaatctcc

SEQ ID NO: 1188541 - DNA, 15 bp, Homo sapiens
aaagcgtttaatctc

SEQ ID NO: 1188542 - DNA, 15 bp, Homo sapiens
taaagcgtttaatct

SEQ ID NO: 1188543 - DNA, 15 bp, Homo sapiens
ataaagcgtttaatc

SEQ ID NO: 1188544 - DNA, 15 bp, Homo sapiens
cataaagcgtttaat

SEQ ID NO: 1188545 - DNA, 15 bp, Homo sapiens
tcataaagcgtttaa

SEQ ID NO: 1188546 - DNA, 15 bp, Homo sapiens
ctcataaagcgttta

SEQ ID NO: 1188547 - DNA, 15 bp, Homo sapiens
cctcataaagcgttt

SEQ ID NO: 1188548 - DNA, 15 bp, Homo sapiens
gcctcataaagcgtt

SEQ ID NO: 1188549 - DNA, 15 bp, Homo sapiens
agcctcataaagcgt

SEQ ID NO: 1188550 - DNA, 15 bp, Homo sapiens
aagcctcataaagcg

SEQ ID NO: 1188551 - DNA, 15 bp, Homo sapiens
aaagcctcataaagc

SEQ ID NO: 1188552 - DNA, 15 bp, Homo sapiens
gaaagcctcataaag

SEQ ID NO: 1188553 - DNA, 15 bp, Homo sapiens
agaaagcctcataaa

SEQ ID NO: 1188554 - DNA, 15 bp, Homo sapiens
aagaaagcctcataa

SEQ ID NO: 1188555 - DNA, 15 bp, Homo sapiens
aaagaaagcctcata

SEQ ID NO: 1188556 - DNA, 15 bp, Homo sapiens
aaaagaaagcctcat

SEQ ID NO: 1188557 - DNA, 15 bp, Homo sapiens
taaaagaaagcctca

SEQ ID NO: 1188558 - DNA, 15 bp, Homo sapiens
ttaaaagaaagcctc

SEQ ID NO: 1188559 - DNA, 15 bp, Homo sapiens
attaaaagaaagcct

SEQ ID NO: 1188560 - DNA, 15 bp, Homo sapiens
aattaaaagaaagcc

SEQ ID NO: 1188561 - DNA, 15 bp, Homo sapiens
aaattaaaagaaagc

SEQ ID NO: 1188562 - DNA, 15 bp, Homo sapiens
caaattaaaagaaag

SEQ ID NO: 1188563 - DNA, 15 bp, Homo sapiens
acaaattaaaagaaa

SEQ ID NO: 1188564 - DNA, 15 bp, Homo sapiens
aacaaattaaaagaa

SEQ ID NO: 1188565 - DNA, 15 bp, Homo sapiens
gaacaaattaaaaga

SEQ ID NO: 1188566 - DNA, 15 bp, Homo sapiens
ggaacaaattaaaag

SEQ ID NO: 1188567 - DNA, 15 bp, Homo sapiens
gggaacaaattaaaa

SEQ ID NO: 1188568 - DNA, 15 bp, Homo sapiens
tgggaacaaattaaa

SEQ ID NO: 1188569 - DNA, 15 bp, Homo sapiens
atgggaacaaattaa

SEQ ID NO: 1188570 - DNA, 15 bp, Homo sapiens
aatgggaacaaatta

SEQ ID NO: 1188571 - DNA, 15 bp, Homo sapiens
aaatgggaacaaatt

SEQ ID NO: 1188572 - DNA, 15 bp, Homo sapiens
gaaatgggaacaaat

SEQ ID NO: 1188573 - DNA, 15 bp, Homo sapiens
tgaaatgggaacaaa

SEQ ID NO: 1188574 - DNA, 15 bp, Homo sapiens
atgaaatgggaacaa

SEQ ID NO: 1188575 - DNA, 15 bp, Homo sapiens
aatgaaatgggaaca

SEQ ID NO: 1188576 - DNA, 15 bp, Homo sapiens
gaatgaaatgggaac

SEQ ID NO: 1188577 - DNA, 15 bp, Homo sapiens
ggaatgaaatgggaa

SEQ ID NO: 1188578 - DNA, 15 bp, Homo sapiens
aggaatgaaatggga

SEQ ID NO: 1188579 - DNA, 15 bp, Homo sapiens
caggaatgaaatggg

SEQ ID NO: 1188580 - DNA, 15 bp, Homo sapiens
tcaggaatgaaatgg

SEQ ID NO: 1188581 - DNA, 15 bp, Homo sapiens
ttcaggaatgaaatg

SEQ ID NO: 1188582 - DNA, 15 bp, Homo sapiens
attcaggaatgaaat

SEQ ID NO: 1188583 - DNA, 15 bp, Homo sapiens
tattcaggaatgaaa

SEQ ID NO: 1188584 - DNA, 15 bp, Homo sapiens
atattcaggaatgaa

SEQ ID NO: 1188585 - DNA, 15 bp, Homo sapiens
aatattcaggaatga

SEQ ID NO: 1188586 - DNA, 15 bp, Homo sapiens
aaatattcaggaatg

SEQ ID NO: 1188587 - DNA, 15 bp, Homo sapiens
aaaatattcaggaat

SEQ ID NO: 1188588 - DNA, 15 bp, Homo sapiens
gaaaatattcaggaa

SEQ ID NO: 1188589 - DNA, 15 bp, Homo sapiens
agaaaatattcagga

SEQ ID NO: 1188590 - DNA, 15 bp, Homo sapiens
aagaaaatattcagg

SEQ ID NO: 1188591 - DNA, 15 bp, Homo sapiens
taagaaaatattcag

SEQ ID NO: 1188592 - DNA, 15 bp, Homo sapiens
ctaagaaaatattca

SEQ ID NO: 1188593 - DNA, 15 bp, Homo sapiens
actaagaaaatattc

SEQ ID NO: 1188594 - DNA, 15 bp, Homo sapiens
aactaagaaaatatt

SEQ ID NO: 1188595 - DNA, 15 bp, Homo sapiens
aaactaagaaaatat

SEQ ID NO: 1188596 - DNA, 15 bp, Homo sapiens
caaactaagaaaata

SEQ ID NO: 1188597 - DNA, 15 bp, Homo sapiens
ccaaactaagaaaat

SEQ ID NO: 1188598 - DNA, 15 bp, Homo sapiens
cccaaactaagaaaa

SEQ ID NO: 1188599 - DNA, 15 bp, Homo sapiens
gcccaaactaagaaa

SEQ ID NO: 1188600 - DNA, 15 bp, Homo sapiens
tgcccaaactaagaa

SEQ ID NO: 1188601 - DNA, 15 bp, Homo sapiens
atgcccaaactaaga

SEQ ID NO: 1188602 - DNA, 15 bp, Homo sapiens
aatgcccaaactaag

SEQ ID NO: 1188603 - DNA, 15 bp, Homo sapiens
caatgcccaaactaa

SEQ ID NO: 1188604 - DNA, 15 bp, Homo sapiens
gcaatgcccaaacta

SEQ ID NO: 1188605 - DNA, 15 bp, Homo sapiens
tgcaatgcccaaact

SEQ ID NO: 1188606 - DNA, 15 bp, Homo sapiens
ctgcaatgcccaaac

SEQ ID NO: 1188607 - DNA, 15 bp, Homo sapiens
tctgcaatgcccaaa

SEQ ID NO: 1188608 - DNA, 15 bp, Homo sapiens
atctgcaatgcccaa

SEQ ID NO: 1188609 - DNA, 15 bp, Homo sapiens
catctgcaatgccca

SEQ ID NO: 1188610 - DNA, 15 bp, Homo sapiens
acatctgcaatgccc

SEQ ID NO: 1188611 - DNA, 15 bp, Homo sapiens
aacatctgcaatgcc

SEQ ID NO: 1188612 - DNA, 15 bp, Homo sapiens
aaacatctgcaatgc

SEQ ID NO: 1188613 - DNA, 15 bp, Homo sapiens
taaacatctgcaatg

SEQ ID NO: 1188614 - DNA, 15 bp, Homo sapiens
ttaaacatctgcaat

SEQ ID NO: 1188615 - DNA, 15 bp, Homo sapiens
tttaaacatctgcaa

SEQ ID NO: 1188616 - DNA, 15 bp, Homo sapiens
ctttaaacatctgca

SEQ ID NO: 1188617 - DNA, 15 bp, Homo sapiens
tctttaaacatctgc

SEQ ID NO: 1188618 - DNA, 15 bp, Homo sapiens
ttctttaaacatctg

SEQ ID NO: 1188619 - DNA, 15 bp, Homo sapiens
gttctttaaacatct

SEQ ID NO: 1188620 - DNA, 15 bp, Homo sapiens
agttctttaaacatc

SEQ ID NO: 1188621 - DNA, 15 bp, Homo sapiens
aagttctttaaacat

SEQ ID NO: 1188622 - DNA, 15 bp, Homo sapiens
gaagttctttaaaca

SEQ ID NO: 1188623 - DNA, 15 bp, Homo sapiens
agaagttctttaaac

SEQ ID NO: 1188624 - DNA, 15 bp, Homo sapiens
aagaagttctttaaa

SEQ ID NO: 1188625 - DNA, 15 bp, Homo sapiens
taagaagttctttaa

SEQ ID NO: 1188626 - DNA, 15 bp, Homo sapiens
ataagaagttcttta

SEQ ID NO: 1188627 - DNA, 15 bp, Homo sapiens
aataagaagttcttt

SEQ ID NO: 1188628 - DNA, 15 bp, Homo sapiens
aaataagaagttctt

SEQ ID NO: 1188629 - DNA, 15 bp, Homo sapiens
aaaataagaagttct

SEQ ID NO: 1188630 - DNA, 15 bp, Homo sapiens
caaaataagaagttc

SEQ ID NO: 1188631 - DNA, 15 bp, Homo sapiens
tcaaaataagaagtt

SEQ ID NO: 1188632 - DNA, 15 bp, Homo sapiens
ctcaaaataagaagt

SEQ ID NO: 1188633 - DNA, 15 bp, Homo sapiens
gctcaaaataagaag

SEQ ID NO: 1188634 - DNA, 15 bp, Homo sapiens
agctcaaaataagaa

SEQ ID NO: 1188635 - DNA, 15 bp, Homo sapiens
cagctcaaaataaga

SEQ ID NO: 1188636 - DNA, 15 bp, Homo sapiens
ccagctcaaaataag

SEQ ID NO: 1188637 - DNA, 15 bp, Homo sapiens
accagctcaaaataa

SEQ ID NO: 1188638 - DNA, 15 bp, Homo sapiens
taccagctcaaaata

SEQ ID NO: 1188639 - DNA, 15 bp, Homo sapiens
ataccagctcaaaat

SEQ ID NO: 1188640 - DNA, 15 bp, Homo sapiens
cataccagctcaaaa

SEQ ID NO: 1188641 - DNA, 15 bp, Homo sapiens
gcataccagctcaaa

SEQ ID NO: 1188642 - DNA, 15 bp, Homo sapiens
ggcataccagctcaa

SEQ ID NO: 1188643 - DNA, 15 bp, Homo sapiens
aggcataccagctca

SEQ ID NO: 1188644 - DNA, 15 bp, Homo sapiens
gaggcataccagctc

SEQ ID NO: 1188645 - DNA, 15 bp, Homo sapiens
agaggcataccagct

SEQ ID NO: 1188646 - DNA, 15 bp, Homo sapiens
aagaggcataccagc

SEQ ID NO: 1188647 - DNA, 15 bp, Homo sapiens
taagaggcataccag

SEQ ID NO: 1188648 - DNA, 15 bp, Homo sapiens
ttaagaggcatacca

SEQ ID NO: 1188649 - DNA, 15 bp, Homo sapiens
tttaagaggcatacc

SEQ ID NO: 1188650 - DNA, 15 bp, Homo sapiens
gtttaagaggcatac

SEQ ID NO: 1188651 - DNA, 15 bp, Homo sapiens
ctgtttaagaggcat

SEQ ID NO: 1188652 - DNA, 15 bp, Homo sapiens
tctgtttaagaggca

SEQ ID NO: 1188653 - DNA, 15 bp, Homo sapiens
ttctgtttaagaggc

SEQ ID NO: 1188654 - DNA, 15 bp, Homo sapiens
tttctgtttaagagg

SEQ ID NO: 1188655 - DNA, 15 bp, Homo sapiens
ttttctgtttaagag

SEQ ID NO: 1188656 - DNA, 15 bp, Homo sapiens
tttttctgtttaaga

SEQ ID NO: 1188657 - DNA, 15 bp, Homo sapiens
gtttttctgtttaag

SEQ ID NO: 1188658 - DNA, 15 bp, Homo sapiens
tgtttttctgtttaa

SEQ ID NO: 1188659 - DNA, 15 bp, Homo sapiens
ttgtttttctgttta

SEQ ID NO: 1188660 - DNA, 15 bp, Homo sapiens
tttgtttttctgttt

SEQ ID NO: 1188661 - DNA, 15 bp, Homo sapiens
ttttgtttttctgtt

SEQ ID NO: 1188662 - DNA, 15 bp, Homo sapiens
cttttgtttttctgt

SEQ ID NO: 1188663 - DNA, 15 bp, Homo sapiens
ccttttgtttttctg

SEQ ID NO: 1188664 - DNA, 15 bp, Homo sapiens
accttttgtttttct

SEQ ID NO: 1188665 - DNA, 15 bp, Homo sapiens
taccttttgtttttc

SEQ ID NO: 1188666 - DNA, 15 bp, Homo sapiens
ttaccttttgttttt

SEQ ID NO: 1188667 - DNA, 15 bp, Homo sapiens
tttaccttttgtttt

SEQ ID NO: 1188668 - DNA, 15 bp, Homo sapiens
ttttaccttttgttt

SEQ ID NO: 1188669 - DNA, 15 bp, Homo sapiens
attttaccttttgtt

SEQ ID NO: 1188670 - DNA, 15 bp, Homo sapiens
aattttaccttttgt

SEQ ID NO: 1188671 - DNA, 15 bp, Homo sapiens
gaattttaccttttg

SEQ ID NO: 1188672 - DNA, 15 bp, Homo sapiens
tgaattttacctttt

SEQ ID NO: 1188673 - DNA, 15 bp, Homo sapiens
ttgaattttaccttt

SEQ ID NO: 1188674 - DNA, 15 bp, Homo sapiens
tttgaattttacctt

SEQ ID NO: 1188675 - DNA, 15 bp, Homo sapiens
atttgaattttacct

SEQ ID NO: 1188676 - DNA, 15 bp, Homo sapiens
aatttgaattttacc

SEQ ID NO: 1188677 - DNA, 15 bp, Homo sapiens
taatttgaattttac

SEQ ID NO: 1188678 - DNA, 15 bp, Homo sapiens
ctaatttgaatttta

SEQ ID NO: 1188679 - DNA, 15 bp, Homo sapiens
actaatttgaatttt

SEQ ID NO: 1188680 - DNA, 15 bp, Homo sapiens
cactaatttgaattt

SEQ ID NO: 1188681 - DNA, 15 bp, Homo sapiens
acactaatttgaatt

SEQ ID NO: 1188682 - DNA, 15 bp, Homo sapiens
cacactaatttgaat

SEQ ID NO: 1188683 - DNA, 15 bp, Homo sapiens
acacactaatttgaa

SEQ ID NO: 1188684 - DNA, 15 bp, Homo sapiens
aacacactaatttga

SEQ ID NO: 1188685 - DNA, 15 bp, Homo sapiens
aaacacactaatttg

SEQ ID NO: 1188686 - DNA, 15 bp, Homo sapiens
gaaacacactaattt

SEQ ID NO: 1188687 - DNA, 15 bp, Homo sapiens
agaaacacactaatt

SEQ ID NO: 1188688 - DNA, 15 bp, Homo sapiens
gagaaacacactaat

SEQ ID NO: 1188689 - DNA, 15 bp, Homo sapiens
ggagaaacacactaa

SEQ ID NO: 1188690 - DNA, 15 bp, Homo sapiens
cggagaaacacacta

SEQ ID NO: 1188691 - DNA, 15 bp, Homo sapiens
gcggagaaacacact

SEQ ID NO: 1188692 - DNA, 15 bp, Homo sapiens
ggcggagaaacacac

SEQ ID NO: 1188693 - DNA, 15 bp, Homo sapiens
aggcggagaaacaca

SEQ ID NO: 1188694 - DNA, 15 bp, Homo sapiens
caggcggagaaacac

SEQ ID NO: 1188695 - DNA, 15 bp, Homo sapiens
acaggcggagaaaca

SEQ ID NO: 1188696 - DNA, 15 bp, Homo sapiens
aacaggcggagaaac

SEQ ID NO: 1188697 - DNA, 15 bp, Homo sapiens
taacaggcggagaaa

SEQ ID NO: 1188698 - DNA, 15 bp, Homo sapiens
ttaacaggcggagaa

SEQ ID NO: 1188699 - DNA, 15 bp, Homo sapiens
attaacaggcggaga

SEQ ID NO: 1188700 - DNA, 15 bp, Homo sapiens
aattaacaggcggag

SEQ ID NO: 1188701 - DNA, 15 bp, Homo sapiens
taattaacaggcgga

SEQ ID NO: 1188702 - DNA, 15 bp, Homo sapiens
ttaattaacaggcgg

SEQ ID NO: 1188703 - DNA, 15 bp, Homo sapiens
attaattaacaggcg

SEQ ID NO: 1188704 - DNA, 15 bp, Homo sapiens
aattaattaacaggc

SEQ ID NO: 1188705 - DNA, 15 bp, Homo sapiens
aaattaattaacagg

SEQ ID NO: 1188706 - DNA, 15 bp, Homo sapiens
caaattaattaacag

SEQ ID NO: 1188707 - DNA, 15 bp, Homo sapiens
ccaaattaattaaca

SEQ ID NO: 1188708 - DNA, 15 bp, Homo sapiens
accaaattaattaac

SEQ ID NO: 1188709 - DNA, 15 bp, Homo sapiens
aaccaaattaattaa

SEQ ID NO: 1188710 - DNA, 15 bp, Homo sapiens
taaccaaattaatta

SEQ ID NO: 1188711 - DNA, 15 bp, Homo sapiens
ctaaccaaattaatt

SEQ ID NO: 1188712 - DNA, 15 bp, Homo sapiens
actaaccaaattaat

SEQ ID NO: 1188713 - DNA, 15 bp, Homo sapiens
tactaaccaaattaa

SEQ ID NO: 1188714 - DNA, 15 bp, Homo sapiens
ctactaaccaaatta

SEQ ID NO: 1188715 - DNA, 15 bp, Homo sapiens
actactaaccaaatt

SEQ ID NO: 1188716 - DNA, 15 bp, Homo sapiens
aactactaaccaaat

SEQ ID NO: 1188717 - DNA, 15 bp, Homo sapiens
taactactaaccaaa

SEQ ID NO: 1188718 - DNA, 15 bp, Homo sapiens
ctaactactaaccaa

SEQ ID NO: 1188719 - DNA, 15 bp, Homo sapiens
cctaactactaacca

SEQ ID NO: 1188720 - DNA, 15 bp, Homo sapiens
gcctaactactaacc

SEQ ID NO: 1188721 - DNA, 15 bp, Homo sapiens
tgcctaactactaac

SEQ ID NO: 1188722 - DNA, 15 bp, Homo sapiens
ctgcctaactactaa

SEQ ID NO: 1188723 - DNA, 15 bp, Homo sapiens
tctgcctaactacta

SEQ ID NO: 1188724 - DNA, 15 bp, Homo sapiens
ctctgcctaactact

SEQ ID NO: 1188725 - DNA, 15 bp, Homo sapiens
tctctgcctaactac

SEQ ID NO: 1188726 - DNA, 15 bp, Homo sapiens
ctctctgcctaacta

SEQ ID NO: 1188727 - DNA, 15 bp, Homo sapiens
tctctctgcctaact

SEQ ID NO: 1188728 - DNA, 15 bp, Homo sapiens
atctctctgcctaac

SEQ ID NO: 1188729 - DNA, 15 bp, Homo sapiens
catctctctgcctaa

SEQ ID NO: 1188730 - DNA, 15 bp, Homo sapiens
ccatctctctgccta

SEQ ID NO: 1188731 - DNA, 15 bp, Homo sapiens
gccatctctctgcct

SEQ ID NO: 1188732 - DNA, 15 bp, Homo sapiens
tgccatctctctgcc

SEQ ID NO: 1188733 - DNA, 15 bp, Homo sapiens
atgccatctctctgc

SEQ ID NO: 1188734 - DNA, 15 bp, Homo sapiens
gatgccatctctctg

SEQ ID NO: 1188735 - DNA, 15 bp, Homo sapiens
ggatgccatctctct

SEQ ID NO: 1188736 - DNA, 15 bp, Homo sapiens
aggatgccatctctc

SEQ ID NO: 1188737 - DNA, 15 bp, Homo sapiens
aaggatgccatctct

SEQ ID NO: 1188738 - DNA, 15 bp, Homo sapiens
taaggatgccatctc

SEQ ID NO: 1188739 - DNA, 15 bp, Homo sapiens
ttaaggatgccatct

SEQ ID NO: 1188740 - DNA, 15 bp, Homo sapiens
attaaggatgccatc

SEQ ID NO: 1188741 - DNA, 15 bp, Homo sapiens
tattaaggatgccat

SEQ ID NO: 1188742 - DNA, 15 bp, Homo sapiens
ttattaaggatgcca

SEQ ID NO: 1188743 - DNA, 15 bp, Homo sapiens
attattaaggatgcc

SEQ ID NO: 1188744 - DNA, 15 bp, Homo sapiens
tattattaaggatgc

SEQ ID NO: 1188745 - DNA, 15 bp, Homo sapiens
atattattaaggatg

SEQ ID NO: 1188746 - DNA, 15 bp, Homo sapiens
gatattattaaggat

SEQ ID NO: 1188747 - DNA, 15 bp, Homo sapiens
agatattattaagga

SEQ ID NO: 1188748 - DNA, 15 bp, Homo sapiens
tagatattattaagg

SEQ ID NO: 1188749 - DNA, 15 bp, Homo sapiens
atagatattattaag

SEQ ID NO: 1188750 - DNA, 15 bp, Homo sapiens
aatagatattattaa

SEQ ID NO: 1188751 - DNA, 15 bp, Homo sapiens
aaatagatattatta

SEQ ID NO: 1188752 - DNA, 15 bp, Homo sapiens
aaaatagatattatt

SEQ ID NO: 1188753 - DNA, 15 bp, Homo sapiens
caaaatagatattat

SEQ ID NO: 1188754 - DNA, 15 bp, Homo sapiens
gcaaaatagatatta

SEQ ID NO: 1188755 - DNA, 15 bp, Homo sapiens
cgcaaaatagatatt

SEQ ID NO: 1188756 - DNA, 15 bp, Homo sapiens
ccgcaaaatagatat

SEQ ID NO: 1188757 - DNA, 15 bp, Homo sapiens
cccgcaaaatagata

SEQ ID NO: 1188758 - DNA, 15 bp, Homo sapiens
acccgcaaaatagat

SEQ ID NO: 1188759 - DNA, 15 bp, Homo sapiens
aacccgcaaaataga

SEQ ID NO: 1188760 - DNA, 15 bp, Homo sapiens
aaacccgcaaaatag

SEQ ID NO: 1188761 - DNA, 15 bp, Homo sapiens
caaacccgcaaaata

SEQ ID NO: 1188762 - DNA, 15 bp, Homo sapiens
tcaaacccgcaaaat

SEQ ID NO: 1188763 - DNA, 15 bp, Homo sapiens
atcaaacccgcaaaa

SEQ ID NO: 1188764 - DNA, 15 bp, Homo sapiens
gatcaaacccgcaaa

SEQ ID NO: 1188765 - DNA, 15 bp, Homo sapiens
tgatcaaacccgcaa

SEQ ID NO: 1188766 - DNA, 15 bp, Homo sapiens
ctgatcaaacccgca

SEQ ID NO: 1188767 - DNA, 15 bp, Homo sapiens
gctgatcaaacccgc

SEQ ID NO: 1188768 - DNA, 15 bp, Homo sapiens
agctgatcaaacccg

SEQ ID NO: 1188769 - DNA, 15 bp, Homo sapiens
tagctgatcaaaccc

SEQ ID NO: 1188770 - DNA, 15 bp, Homo sapiens
gtagctgatcaaacc

SEQ ID NO: 1188771 - DNA, 15 bp, Homo sapiens
tgtagctgatcaaac

SEQ ID NO: 1188772 - DNA, 15 bp, Homo sapiens
ctgtagctgatcaaa

SEQ ID NO: 1188773 - DNA, 15 bp, Homo sapiens
tctgtagctgatcaa

SEQ ID NO: 1188774 - DNA, 15 bp, Homo sapiens
gtctgtagctgatca

SEQ ID NO: 1188775 - DNA, 15 bp, Homo sapiens
ggtctgtagctgatc

SEQ ID NO: 1188776 - DNA, 15 bp, Homo sapiens
tggtctgtagctgat

SEQ ID NO: 1188777 - DNA, 15 bp, Homo sapiens
atggtctgtagctga

SEQ ID NO: 1188778 - DNA, 15 bp, Homo sapiens
gatggtctgtagctg

SEQ ID NO: 1188779 - DNA, 15 bp, Homo sapiens
tgatggtctgtagct

SEQ ID NO: 1188780 - DNA, 15 bp, Homo sapiens
ttgatggtctgtagc

SEQ ID NO: 1188781 - DNA, 15 bp, Homo sapiens
gttgatggtctgtag

SEQ ID NO: 1188782 - DNA, 15 bp, Homo sapiens
tgttgatggtctgta

SEQ ID NO: 1188783 - DNA, 15 bp, Homo sapiens
ctgttgatggtctgt

SEQ ID NO: 1188784 - DNA, 15 bp, Homo sapiens
actgttgatggtctg

SEQ ID NO: 1188785 - DNA, 15 bp, Homo sapiens
cactgttgatggtct

SEQ ID NO: 1188786 - DNA, 15 bp, Homo sapiens
acactgttgatggtc

SEQ ID NO: 1188787 - DNA, 15 bp, Homo sapiens
aacactgttgatggt

SEQ ID NO: 1188788 - DNA, 15 bp, Homo sapiens
caacactgttgatgg

SEQ ID NO: 1188789 - DNA, 15 bp, Homo sapiens
tcaacactgttgatg

SEQ ID NO: 1188790 - DNA, 15 bp, Homo sapiens
atcaacactgttgat

SEQ ID NO: 1188791 - DNA, 15 bp, Homo sapiens
aatcaacactgttga

SEQ ID NO: 1188792 - DNA, 15 bp, Homo sapiens
caatcaacactgttg

SEQ ID NO: 1188793 - DNA, 15 bp, Homo sapiens
tcaatcaacactgtt

SEQ ID NO: 1188794 - DNA, 15 bp, Homo sapiens
ctcaatcaacactgt

SEQ ID NO: 1188795 - DNA, 15 bp, Homo sapiens
tctcaatcaacactg

SEQ ID NO: 1188796 - DNA, 15 bp, Homo sapiens
ttctcaatcaacact

SEQ ID NO: 1188797 - DNA, 15 bp, Homo sapiens
attctcaatcaacac

SEQ ID NO: 1188798 - DNA, 15 bp, Homo sapiens
aattctcaatcaaca

SEQ ID NO: 1188799 - DNA, 15 bp, Homo sapiens
caattctcaatcaac

SEQ ID NO: 1188800 - DNA, 15 bp, Homo sapiens
tcaattctcaatcaa

SEQ ID NO: 1188801 - DNA, 15 bp, Homo sapiens
ttcaattctcaatca

SEQ ID NO: 1188802 - DNA, 15 bp, Homo sapiens
gttcaattctcaatc

SEQ ID NO: 1188803 - DNA, 15 bp, Homo sapiens
tgttcaattctcaat

SEQ ID NO: 1188804 - DNA, 15 bp, Homo sapiens
ttgttcaattctcaa

SEQ ID NO: 1188805 - DNA, 15 bp, Homo sapiens
tttgttcaattctca

SEQ ID NO: 1188806 - DNA, 15 bp, Homo sapiens
ttttgttcaattctc

SEQ ID NO: 1188807 - DNA, 15 bp, Homo sapiens
tttttgttcaattct

SEQ ID NO: 1188808 - DNA, 15 bp, Homo sapiens
gtttttgttcaattc

SEQ ID NO: 1188809 - DNA, 15 bp, Homo sapiens
tgtttttgttcaatt

SEQ ID NO: 1188810 - DNA, 15 bp, Homo sapiens
atgtttttgttcaat

SEQ ID NO: 1188811 - DNA, 15 bp, Homo sapiens
aatgtttttgttcaa

SEQ ID NO: 1188812 - DNA, 15 bp, Homo sapiens
aaatgtttttgttca

SEQ ID NO: 1188813 - DNA, 15 bp, Homo sapiens
gaaatgtttttgttc

SEQ ID NO: 1188814 - DNA, 15 bp, Homo sapiens
tgaaatgtttttgtt

SEQ ID NO: 1188815 - DNA, 15 bp, Homo sapiens
ttgaaatgtttttgt

SEQ ID NO: 1188816 - DNA, 15 bp, Homo sapiens
cttgaaatgtttttg

SEQ ID NO: 1188817 - DNA, 15 bp, Homo sapiens
ccttgaaatgttttt

SEQ ID NO: 1188818 - DNA, 15 bp, Homo sapiens
tccttgaaatgtttt

SEQ ID NO: 1188819 - DNA, 15 bp, Homo sapiens
ctccttgaaatgttt

SEQ ID NO: 1188820 - DNA, 15 bp, Homo sapiens
actccttgaaatgtt

SEQ ID NO: 1188821 - DNA, 15 bp, Homo sapiens
aactccttgaaatgt

SEQ ID NO: 1188822 - DNA, 15 bp, Homo sapiens
aaactccttgaaatg

SEQ ID NO: 1188823 - DNA, 15 bp, Homo sapiens
caaactccttgaaat

SEQ ID NO: 1188824 - DNA, 15 bp, Homo sapiens
ccaaactccttgaaa

SEQ ID NO: 1188825 - DNA, 15 bp, Homo sapiens
cccaaactccttgaa

SEQ ID NO: 1188826 - DNA, 15 bp, Homo sapiens
tcccaaactccttga

SEQ ID NO: 1188827 - DNA, 15 bp, Homo sapiens
ttcccaaactccttg

SEQ ID NO: 1188828 - DNA, 15 bp, Homo sapiens
gttcccaaactcctt

SEQ ID NO: 1188829 - DNA, 15 bp, Homo sapiens
tgttcccaaactcct

SEQ ID NO: 1188830 - DNA, 15 bp, Homo sapiens
atgttcccaaactcc

SEQ ID NO: 1188831 - DNA, 15 bp, Homo sapiens
aatgttcccaaactc

SEQ ID NO: 1188832 - DNA, 15 bp, Homo sapiens
taatgttcccaaact

SEQ ID NO: 1188833 - DNA, 15 bp, Homo sapiens
ctaatgttcccaaac

SEQ ID NO: 1188834 - DNA, 15 bp, Homo sapiens
cctaatgttcccaaa

SEQ ID NO: 1188835 - DNA, 15 bp, Homo sapiens
ccctaatgttcccaa

SEQ ID NO: 1188836 - DNA, 15 bp, Homo sapiens
tccctaatgttccca

SEQ ID NO: 1188837 - DNA, 15 bp, Homo sapiens
atccctaatgttccc

SEQ ID NO: 1188838 - DNA, 15 bp, Homo sapiens
catccctaatgttcc

SEQ ID NO: 1188839 - DNA, 15 bp, Homo sapiens
gcatccctaatgttc

SEQ ID NO: 1188840 - DNA, 15 bp, Homo sapiens
agcatccctaatgtt

SEQ ID NO: 1188841 - DNA, 15 bp, Homo sapiens
tagcatccctaatgt

SEQ ID NO: 1188842 - DNA, 15 bp, Homo sapiens
atagcatccctaatg

SEQ ID NO: 1188843 - DNA, 15 bp, Homo sapiens
aatagcatccctaat

SEQ ID NO: 1188844 - DNA, 15 bp, Homo sapiens
gaatagcatccctaa

SEQ ID NO: 1188845 - DNA, 15 bp, Homo sapiens
agaatagcatcccta

SEQ ID NO: 1188846 - DNA, 15 bp, Homo sapiens
cagaatagcatccct

SEQ ID NO: 1188847 - DNA, 15 bp, Homo sapiens
acagaatagcatccc

SEQ ID NO: 1188848 - DNA, 15 bp, Homo sapiens
cacagaatagcatcc

SEQ ID NO: 1188849 - DNA, 15 bp, Homo sapiens
ccacagaatagcatc

SEQ ID NO: 1188850 - DNA, 15 bp, Homo sapiens
gccacagaatagcat

SEQ ID NO: 1188851 - DNA, 15 bp, Homo sapiens
ggccacagaatagca

SEQ ID NO: 1188852 - DNA, 15 bp, Homo sapiens
gggccacagaatagc

SEQ ID NO: 1188853 - DNA, 15 bp, Homo sapiens
ggggccacagaatag

SEQ ID NO: 1188854 - DNA, 15 bp, Homo sapiens
tggggccacagaata

SEQ ID NO: 1188855 - DNA, 15 bp, Homo sapiens
atggggccacagaat

SEQ ID NO: 1188856 - DNA, 15 bp, Homo sapiens
catggggccacagaa

SEQ ID NO: 1188857 - DNA, 15 bp, Homo sapiens
acatggggccacaga

SEQ ID NO: 1188858 - DNA, 15 bp, Homo sapiens
cacatggggccacag

SEQ ID NO: 1188859 - DNA, 15 bp, Homo sapiens
acacatggggccaca

SEQ ID NO: 1188860 - DNA, 15 bp, Homo sapiens
gacacatggggccac

SEQ ID NO: 1188861 - DNA, 15 bp, Homo sapiens
ggacacatggggcca

SEQ ID NO: 1188862 - DNA, 15 bp, Homo sapiens
aggacacatggggcc

SEQ ID NO: 1188863 - DNA, 15 bp, Homo sapiens
aaggacacatggggc

SEQ ID NO: 1188864 - DNA, 15 bp, Homo sapiens
gaaggacacatgggg

SEQ ID NO: 1188865 - DNA, 15 bp, Homo sapiens
agaaggacacatggg

SEQ ID NO: 1188866 - DNA, 15 bp, Homo sapiens
gagaaggacacatgg

SEQ ID NO: 1188867 - DNA, 15 bp, Homo sapiens
agagaaggacacatg

SEQ ID NO: 1188868 - DNA, 15 bp, Homo sapiens
gagagaaggacacat

SEQ ID NO: 1188869 - DNA, 15 bp, Homo sapiens
tgagagaaggacaca

SEQ ID NO: 1188870 - DNA, 15 bp, Homo sapiens
atgagagaaggacac

SEQ ID NO: 1188871 - DNA, 15 bp, Homo sapiens
aatgagagaaggaca

SEQ ID NO: 1188872 - DNA, 15 bp, Homo sapiens
aaatgagagaaggac

SEQ ID NO: 1188873 - DNA, 15 bp, Homo sapiens
aaaatgagagaagga

SEQ ID NO: 1188874 - DNA, 15 bp, Homo sapiens
aaaaatgagagaagg

SEQ ID NO: 1188875 - DNA, 15 bp, Homo sapiens
gaaaaatgagagaag

SEQ ID NO: 1188876 - DNA, 15 bp, Homo sapiens
agaaaaatgagagaa

SEQ ID NO: 1188877 - DNA, 15 bp, Homo sapiens
tagaaaaatgagaga

SEQ ID NO: 1188878 - DNA, 15 bp, Homo sapiens
ctagaaaaatgagag

SEQ ID NO: 1188879 - DNA, 15 bp, Homo sapiens
tctagaaaaatgaga

SEQ ID NO: 1188880 - DNA, 15 bp, Homo sapiens
ctctagaaaaatgag

SEQ ID NO: 1188881 - DNA, 15 bp, Homo sapiens
tctctagaaaaatga

SEQ ID NO: 1188882 - DNA, 15 bp, Homo sapiens
ttctctagaaaaatg

SEQ ID NO: 1188883 - DNA, 15 bp, Homo sapiens
gttctctagaaaaat

SEQ ID NO: 1188884 - DNA, 15 bp, Homo sapiens
agttctctagaaaaa

SEQ ID NO: 1188885 - DNA, 15 bp, Homo sapiens
gagttctctagaaaa

SEQ ID NO: 1188886 - DNA, 15 bp, Homo sapiens
ggagttctctagaaa

SEQ ID NO: 1188887 - DNA, 15 bp, Homo sapiens
aggagttctctagaa

SEQ ID NO: 1188888 - DNA, 15 bp, Homo sapiens
taggagttctctaga

SEQ ID NO: 1188889 - DNA, 15 bp, Homo sapiens
ataggagttctctag

SEQ ID NO: 1188890 - DNA, 15 bp, Homo sapiens
tataggagttctcta

SEQ ID NO: 1188891 - DNA, 15 bp, Homo sapiens
ttataggagttctct

SEQ ID NO: 1188892 - DNA, 15 bp, Homo sapiens
cttataggagttctc

SEQ ID NO: 1188893 - DNA, 15 bp, Homo sapiens
tcttataggagttct

SEQ ID NO: 1188894 - DNA, 15 bp, Homo sapiens
ttcttataggagttc

SEQ ID NO: 1188895 - DNA, 15 bp, Homo sapiens
tttcttataggagtt

SEQ ID NO: 1188896 - DNA, 15 bp, Homo sapiens
ctttcttataggagt

SEQ ID NO: 1188897 - DNA, 15 bp, Homo sapiens
gctttcttataggag

SEQ ID NO: 1188898 - DNA, 15 bp, Homo sapiens
tgctttcttatagga

SEQ ID NO: 1188899 - DNA, 15 bp, Homo sapiens
ctgctttcttatagg

SEQ ID NO: 1188900 - DNA, 15 bp, Homo sapiens
tctgctttcttatag

SEQ ID NO: 1188901 - DNA, 15 bp, Homo sapiens
ttctgctttcttata

SEQ ID NO: 1188902 - DNA, 15 bp, Homo sapiens
gttctgctttcttat

SEQ ID NO: 1188903 - DNA, 15 bp, Homo sapiens
tgttctgctttctta

SEQ ID NO: 1188904 - DNA, 15 bp, Homo sapiens
gtgttctgctttctt

SEQ ID NO: 1188905 - DNA, 15 bp, Homo sapiens
cgtgttctgctttct

SEQ ID NO: 1188906 - DNA, 15 bp, Homo sapiens
ccgtgttctgctttc

SEQ ID NO: 1188907 - DNA, 15 bp, Homo sapiens
gccgtgttctgcttt

SEQ ID NO: 1188908 - DNA, 15 bp, Homo sapiens
ggccgtgttctgctt

SEQ ID NO: 1188909 - DNA, 15 bp, Homo sapiens
tggccgtgttctgct

SEQ ID NO: 1188910 - DNA, 15 bp, Homo sapiens
ctggccgtgttctgc

SEQ ID NO: 1188911 - DNA, 15 bp, Homo sapiens
cctggccgtgttctg

SEQ ID NO: 1188912 - DNA, 15 bp, Homo sapiens
gcctggccgtgttct

SEQ ID NO: 1188913 - DNA, 15 bp, Homo sapiens
tgcctggccgtgttc

SEQ ID NO: 1188914 - DNA, 15 bp, Homo sapiens
atgcctggccgtgtt

SEQ ID NO: 1188915 - DNA, 15 bp, Homo sapiens
catgcctggccgtgt

SEQ ID NO: 1188916 - DNA, 15 bp, Homo sapiens
tcatgcctggccgtg

SEQ ID NO: 1188917 - DNA, 15 bp, Homo sapiens
atcatgcctggccgt

SEQ ID NO: 1188918 - DNA, 15 bp, Homo sapiens
catcatgcctggccg

SEQ ID NO: 1188919 - DNA, 15 bp, Homo sapiens
ccatcatgcctggcc

SEQ ID NO: 1188920 - DNA, 15 bp, Homo sapiens
gccatcatgcctggc

SEQ ID NO: 1188921 - DNA, 15 bp, Homo sapiens
agccatcatgcctgg

SEQ ID NO: 1188922 - DNA, 15 bp, Homo sapiens
gagccatcatgcctg

SEQ ID NO: 1188923 - DNA, 15 bp, Homo sapiens
tgagccatcatgcct

SEQ ID NO: 1188924 - DNA, 15 bp, Homo sapiens
atgagccatcatgcc

SEQ ID NO: 1188925 - DNA, 15 bp, Homo sapiens
catgagccatcatgc

SEQ ID NO: 1188926 - DNA, 15 bp, Homo sapiens
gcatgagccatcatg

SEQ ID NO: 1188927 - DNA, 15 bp, Homo sapiens
ggcatgagccatcat

SEQ ID NO: 1188928 - DNA, 15 bp, Homo sapiens
tgaagtgctgggatt

SEQ ID NO: 1188929 - DNA, 15 bp, Homo sapiens
ctgaagtgctgggat

SEQ ID NO: 1188930 - DNA, 15 bp, Homo sapiens
cctgaagtgctggga

SEQ ID NO: 1188931 - DNA, 15 bp, Homo sapiens
tcctgaagtgctggg

SEQ ID NO: 1188932 - DNA, 15 bp, Homo sapiens
ctcctgaagtgctgg

SEQ ID NO: 1188933 - DNA, 15 bp, Homo sapiens
cctcctgaagtgctg

SEQ ID NO: 1188934 - DNA, 15 bp, Homo sapiens
gcctcctgaagtgct

SEQ ID NO: 1188935 - DNA, 15 bp, Homo sapiens
agcctcctgaagtgc

SEQ ID NO: 1188936 - DNA, 15 bp, Homo sapiens
cagcctcctgaagtg

SEQ ID NO: 1188937 - DNA, 15 bp, Homo sapiens
tcagcctcctgaagt

SEQ ID NO: 1188938 - DNA, 15 bp, Homo sapiens
ctcagcctcctgaag

SEQ ID NO: 1188939 - DNA, 15 bp, Homo sapiens
gatctgcctgcctca

SEQ ID NO: 1188940 - DNA, 15 bp, Homo sapiens
tagggtttcaccatg

SEQ ID NO: 1188941 - DNA, 15 bp, Homo sapiens
atagggtttcaccat

SEQ ID NO: 1188942 - DNA, 15 bp, Homo sapiens
gatagggtttcacca

SEQ ID NO: 1188943 - DNA, 15 bp, Homo sapiens
agatagggtttcacc

SEQ ID NO: 1188944 - DNA, 15 bp, Homo sapiens
gagatagggtttcac

SEQ ID NO: 1188945 - DNA, 15 bp, Homo sapiens
agagatagggtttca

SEQ ID NO: 1188946 - DNA, 15 bp, Homo sapiens
tagagatagggtttc

SEQ ID NO: 1188947 - DNA, 15 bp, Homo sapiens
atagagatagggttt

SEQ ID NO: 1188948 - DNA, 15 bp, Homo sapiens
aatagagatagggtt

SEQ ID NO: 1188949 - DNA, 15 bp, Homo sapiens
taatagagatagggt

SEQ ID NO: 1188950 - DNA, 15 bp, Homo sapiens
ttaatagagataggg

SEQ ID NO: 1188951 - DNA, 15 bp, Homo sapiens
tttaatagagatagg

SEQ ID NO: 1188952 - DNA, 15 bp, Homo sapiens
ttttaatagagatag

SEQ ID NO: 1188953 - DNA, 15 bp, Homo sapiens
tttttaatagagata

SEQ ID NO: 1188954 - DNA, 15 bp, Homo sapiens
atttttaatagagat

SEQ ID NO: 1188955 - DNA, 15 bp, Homo sapiens
tcatgcccagctaat

SEQ ID NO: 1188956 - DNA, 15 bp, Homo sapiens
atcatgcccagctaa

SEQ ID NO: 1188957 - DNA, 15 bp, Homo sapiens
catcatgcccagcta

SEQ ID NO: 1188958 - DNA, 15 bp, Homo sapiens
ccatcatgcccagct

SEQ ID NO: 1188959 - DNA, 15 bp, Homo sapiens
gccatcatgcccagc

SEQ ID NO: 1188960 - DNA, 15 bp, Homo sapiens
cgccatcatgcccag

SEQ ID NO: 1188961 - DNA, 15 bp, Homo sapiens
gcgccatcatgccca

SEQ ID NO: 1188962 - DNA, 15 bp, Homo sapiens
cgcgccatcatgccc

SEQ ID NO: 1188963 - DNA, 15 bp, Homo sapiens
acgcgccatcatgcc

SEQ ID NO: 1188964 - DNA, 15 bp, Homo sapiens
cacgcgccatcatgc

SEQ ID NO: 1188965 - DNA, 15 bp, Homo sapiens
gcacgcgccatcatg

SEQ ID NO: 1188966 - DNA, 15 bp, Homo sapiens
ggcacgcgccatcat

SEQ ID NO: 1188967 - DNA, 15 bp, Homo sapiens
aggcacgcgccatca

SEQ ID NO: 1188968 - DNA, 15 bp, Homo sapiens
caggcacgcgccatc

SEQ ID NO: 1188969 - DNA, 15 bp, Homo sapiens
acaggcacgcgccat

SEQ ID NO: 1188970 - DNA, 15 bp, Homo sapiens
tacaggcacgcgcca

SEQ ID NO: 1188971 - DNA, 15 bp, Homo sapiens
ttacaggcacgcgcc

SEQ ID NO: 1188972 - DNA, 15 bp, Homo sapiens
attacaggcacgcgc

SEQ ID NO: 1188973 - DNA, 15 bp, Homo sapiens
ctcccagttcaagtg

SEQ ID NO: 1188974 - DNA, 15 bp, Homo sapiens
cctcccagttcaagt

SEQ ID NO: 1188975 - DNA, 15 bp, Homo sapiens
gcctcccagttcaag

SEQ ID NO: 1188976 - DNA, 15 bp, Homo sapiens
tgcctcccagttcaa

SEQ ID NO: 1188977 - DNA, 15 bp, Homo sapiens
ttgcctcccagttca

SEQ ID NO: 1188978 - DNA, 15 bp, Homo sapiens
tttgcctcccagttc

SEQ ID NO: 1188979 - DNA, 15 bp, Homo sapiens
ctttgcctcccagtt

SEQ ID NO: 1188980 - DNA, 15 bp, Homo sapiens
cctttgcctcccagt

SEQ ID NO: 1188981 - DNA, 15 bp, Homo sapiens
acctttgcctcccag

SEQ ID NO: 1188982 - DNA, 15 bp, Homo sapiens
aacctttgcctccca

SEQ ID NO: 1188983 - DNA, 15 bp, Homo sapiens
caacctttgcctccc

SEQ ID NO: 1188984 - DNA, 15 bp, Homo sapiens
gcaacctttgcctcc

SEQ ID NO: 1188985 - DNA, 15 bp, Homo sapiens
tgcaacctttgcctc

SEQ ID NO: 1188986 - DNA, 15 bp, Homo sapiens
ctgcaacctttgcct

SEQ ID NO: 1188987 - DNA, 15 bp, Homo sapiens
actgcaacctttgcc

SEQ ID NO: 1188988 - DNA, 15 bp, Homo sapiens
gatctaggctcactg

SEQ ID NO: 1188989 - DNA, 15 bp, Homo sapiens
tgatctaggctcact

SEQ ID NO: 1188990 - DNA, 15 bp, Homo sapiens
gtgatctaggctcac

SEQ ID NO: 1188991 - DNA, 15 bp, Homo sapiens
tgtgatctaggctca

SEQ ID NO: 1188992 - DNA, 15 bp, Homo sapiens
gtgtgatctaggctc

SEQ ID NO: 1188993 - DNA, 15 bp, Homo sapiens
ggtgtgatctaggct

SEQ ID NO: 1188994 - DNA, 15 bp, Homo sapiens
tggtgtgatctaggc

SEQ ID NO: 1188995 - DNA, 15 bp, Homo sapiens
gtggtgtgatctagg

SEQ ID NO: 1188996 - DNA, 15 bp, Homo sapiens
agtggtgtgatctag

SEQ ID NO: 1188997 - DNA, 15 bp, Homo sapiens
cagtggtgtgatcta

SEQ ID NO: 1188998 - DNA, 15 bp, Homo sapiens
ttggagtctcactct

SEQ ID NO: 1188999 - DNA, 15 bp, Homo sapiens
gttggagtctcactc

SEQ ID NO: 1189000 - DNA, 15 bp, Homo sapiens
agttggagtctcact

SEQ ID NO: 1189001 - DNA, 15 bp, Homo sapiens
gagttggagtctcac

SEQ ID NO: 1189002 - DNA, 15 bp, Homo sapiens
tgagttggagtctca

SEQ ID NO: 1189003 - DNA, 15 bp, Homo sapiens
ttgagttggagtctc

SEQ ID NO: 1189004 - DNA, 15 bp, Homo sapiens
tttgagttggagtct

SEQ ID NO: 1189005 - DNA, 15 bp, Homo sapiens
ttttgagttggagtc

SEQ ID NO: 1189006 - DNA, 15 bp, Homo sapiens
tttttgagttggagt

SEQ ID NO: 1189007 - DNA, 15 bp, Homo sapiens
ttttttgagttggag

SEQ ID NO: 1189008 - DNA, 15 bp, Homo sapiens
tttttttgagttgga

SEQ ID NO: 1189009 - DNA, 15 bp, Homo sapiens
ttttttttgagttgg

SEQ ID NO: 1189010 - DNA, 15 bp, Homo sapiens
cttttttttgagttg

SEQ ID NO: 1189011 - DNA, 15 bp, Homo sapiens
tcttttttttgagtt

SEQ ID NO: 1189012 - DNA, 15 bp, Homo sapiens
ttcttttttttgagt

SEQ ID NO: 1189013 - DNA, 15 bp, Homo sapiens
ctttcttttttttga

SEQ ID NO: 1189014 - DNA, 15 bp, Homo sapiens
gctttctttctttct

SEQ ID NO: 1189015 - DNA, 15 bp, Homo sapiens
tgctttctttctttc

SEQ ID NO: 1189016 - DNA, 15 bp, Homo sapiens
ctgctttctttcttt

SEQ ID NO: 1189017 - DNA, 15 bp, Homo sapiens
tctgctttctttctt

SEQ ID NO: 1189018 - DNA, 15 bp, Homo sapiens
ttctgctttctttct

SEQ ID NO: 1189019 - DNA, 15 bp, Homo sapiens
gttctgctttctttc

SEQ ID NO: 1189020 - DNA, 15 bp, Homo sapiens
ggttctgctttcttt

SEQ ID NO: 1189021 - DNA, 15 bp, Homo sapiens
gggttctgctttctt

SEQ ID NO: 1189022 - DNA, 15 bp, Homo sapiens
tgggttctgctttct

SEQ ID NO: 1189023 - DNA, 15 bp, Homo sapiens
ttgggttctgctttc

SEQ ID NO: 1189024 - DNA, 15 bp, Homo sapiens
attgggttctgcttt

SEQ ID NO: 1189025 - DNA, 15 bp, Homo sapiens
cattgggttctgctt

SEQ ID NO: 1189026 - DNA, 15 bp, Homo sapiens
ccattgggttctgct

SEQ ID NO: 1189027 - DNA, 15 bp, Homo sapiens
tccattgggttctgc

SEQ ID NO: 1189028 - DNA, 15 bp, Homo sapiens
ttccattgggttctg

SEQ ID NO: 1189029 - DNA, 15 bp, Homo sapiens
cttccattgggttct

SEQ ID NO: 1189030 - DNA, 15 bp, Homo sapiens
tcttccattgggttc

SEQ ID NO: 1189031 - DNA, 15 bp, Homo sapiens
atcttccattgggtt

SEQ ID NO: 1189032 - DNA, 15 bp, Homo sapiens
aatcttccattgggt

SEQ ID NO: 1189033 - DNA, 15 bp, Homo sapiens
taatcttccattggg

SEQ ID NO: 1189034 - DNA, 15 bp, Homo sapiens
ttaatcttccattgg

SEQ ID NO: 1189035 - DNA, 15 bp, Homo sapiens
cttaatcttccattg

SEQ ID NO: 1189036 - DNA, 15 bp, Homo sapiens
tcttaatcttccatt

SEQ ID NO: 1189037 - DNA, 15 bp, Homo sapiens
ttcttaatcttccat

SEQ ID NO: 1189038 - DNA, 15 bp, Homo sapiens
gttcttaatcttcca

SEQ ID NO: 1189039 - DNA, 15 bp, Homo sapiens
tgttcttaatcttcc

SEQ ID NO: 1189040 - DNA, 15 bp, Homo sapiens
gtgttcttaatcttc

SEQ ID NO: 1189041 - DNA, 15 bp, Homo sapiens
tgtgttcttaatctt

SEQ ID NO: 1189042 - DNA, 15 bp, Homo sapiens
gtgtgttcttaatct

SEQ ID NO: 1189043 - DNA, 15 bp, Homo sapiens
tgtgtgttcttaatc

SEQ ID NO: 1189044 - DNA, 15 bp, Homo sapiens
atgtgtgttcttaat

SEQ ID NO: 1189045 - DNA, 15 bp, Homo sapiens
aatgtgtgttcttaa

SEQ ID NO: 1189046 - DNA, 15 bp, Homo sapiens
aaatgtgtgttctta

SEQ ID NO: 1189047 - DNA, 15 bp, Homo sapiens
taaatgtgtgttctt

SEQ ID NO: 1189048 - DNA, 15 bp, Homo sapiens
ctaaatgtgtgttct

SEQ ID NO: 1189049 - DNA, 15 bp, Homo sapiens
gctaaatgtgtgttc

SEQ ID NO: 1189050 - DNA, 15 bp, Homo sapiens
agctaaatgtgtgtt

SEQ ID NO: 1189051 - DNA, 15 bp, Homo sapiens
aagctaaatgtgtgt

SEQ ID NO: 1189052 - DNA, 15 bp, Homo sapiens
taagctaaatgtgtg

SEQ ID NO: 1189053 - DNA, 15 bp, Homo sapiens
gtaagctaaatgtgt

SEQ ID NO: 1189054 - DNA, 15 bp, Homo sapiens
cgtaagctaaatgtg

SEQ ID NO: 1189055 - DNA, 15 bp, Homo sapiens
gcgtaagctaaatgt

SEQ ID NO: 1189056 - DNA, 15 bp, Homo sapiens
ggcgtaagctaaatg

SEQ ID NO: 1189057 - DNA, 15 bp, Homo sapiens
aggcgtaagctaaat

SEQ ID NO: 1189058 - DNA, 15 bp, Homo sapiens
caggcgtaagctaaa

SEQ ID NO: 1189059 - DNA, 15 bp, Homo sapiens
acaggcgtaagctaa

SEQ ID NO: 1189060 - DNA, 15 bp, Homo sapiens
tattacaggcgtaag

SEQ ID NO: 1189061 - DNA, 15 bp, Homo sapiens
gtattacaggcgtaa

SEQ ID NO: 1189062 - DNA, 15 bp, Homo sapiens
ggtattacaggcgta

SEQ ID NO: 1189063 - DNA, 15 bp, Homo sapiens
tctgaccttgtgatc

SEQ ID NO: 1189064 - DNA, 15 bp, Homo sapiens
ttctgaccttgtgat

SEQ ID NO: 1189065 - DNA, 15 bp, Homo sapiens
cttctgaccttgtga

SEQ ID NO: 1189066 - DNA, 15 bp, Homo sapiens
acttctgaccttgtg

SEQ ID NO: 1189067 - DNA, 15 bp, Homo sapiens
aacttctgaccttgt

SEQ ID NO: 1189068 - DNA, 15 bp, Homo sapiens
gaacttctgaccttg

SEQ ID NO: 1189069 - DNA, 15 bp, Homo sapiens
cgaacttctgacctt

SEQ ID NO: 1189070 - DNA, 15 bp, Homo sapiens
ttggtctcgaacttc

SEQ ID NO: 1189071 - DNA, 15 bp, Homo sapiens
gttggtctcgaactt

SEQ ID NO: 1189072 - DNA, 15 bp, Homo sapiens
ggttggtctcgaact

SEQ ID NO: 1189073 - DNA, 15 bp, Homo sapiens
ccaggttggtctcga

SEQ ID NO: 1189074 - DNA, 15 bp, Homo sapiens
gccaggttggtctcg

SEQ ID NO: 1189075 - DNA, 15 bp, Homo sapiens
attggccaggttggt

SEQ ID NO: 1189076 - DNA, 15 bp, Homo sapiens
tattggccaggttgg

SEQ ID NO: 1189077 - DNA, 15 bp, Homo sapiens
atattggccaggttg

SEQ ID NO: 1189078 - DNA, 15 bp, Homo sapiens
catattggccaggtt

SEQ ID NO: 1189079 - DNA, 15 bp, Homo sapiens
ccatattggccaggt

SEQ ID NO: 1189080 - DNA, 15 bp, Homo sapiens
ctttttagtagagat

SEQ ID NO: 1189081 - DNA, 15 bp, Homo sapiens
actttttagtagaga

SEQ ID NO: 1189082 - DNA, 15 bp, Homo sapiens
tactttttagtagag

SEQ ID NO: 1189083 - DNA, 15 bp, Homo sapiens
gtactttttagtaga

SEQ ID NO: 1189084 - DNA, 15 bp, Homo sapiens
tgtactttttagtag

SEQ ID NO: 1189085 - DNA, 15 bp, Homo sapiens
ttgtactttttagta

SEQ ID NO: 1189086 - DNA, 15 bp, Homo sapiens
tttgtactttttagt

SEQ ID NO: 1189087 - DNA, 15 bp, Homo sapiens
ttttgtactttttag

SEQ ID NO: 1189088 - DNA, 15 bp, Homo sapiens
tttttgtacttttta

SEQ ID NO: 1189089 - DNA, 15 bp, Homo sapiens
atttttgtacttttt

SEQ ID NO: 1189090 - DNA, 15 bp, Homo sapiens
gcatggctaattttt

SEQ ID NO: 1189091 - DNA, 15 bp, Homo sapiens
tgcatggctaatttt

SEQ ID NO: 1189092 - DNA, 15 bp, Homo sapiens
atgcatggctaattt

SEQ ID NO: 1189093 - DNA, 15 bp, Homo sapiens
catgcatggctaatt

SEQ ID NO: 1189094 - DNA, 15 bp, Homo sapiens
ccatgcatggctaat

SEQ ID NO: 1189095 - DNA, 15 bp, Homo sapiens
accatgcatggctaa

SEQ ID NO: 1189096 - DNA, 15 bp, Homo sapiens
caccatgcatggcta

SEQ ID NO: 1189097 - DNA, 15 bp, Homo sapiens
ccaccatgcatggct

SEQ ID NO: 1189098 - DNA, 15 bp, Homo sapiens
tgccaccatgcatgg

SEQ ID NO: 1189099 - DNA, 15 bp, Homo sapiens
ctgccaccatgcatg

SEQ ID NO: 1189100 - DNA, 15 bp, Homo sapiens
cctgccaccatgcat

SEQ ID NO: 1189101 - DNA, 15 bp, Homo sapiens
gcctgccaccatgca

SEQ ID NO: 1189102 - DNA, 15 bp, Homo sapiens
acgcctgccaccatg

SEQ ID NO: 1189103 - DNA, 15 bp, Homo sapiens
gacgcctgccaccat

SEQ ID NO: 1189104 - DNA, 15 bp, Homo sapiens
agacgcctgccacca

SEQ ID NO: 1189105 - DNA, 15 bp, Homo sapiens
cagacgcctgccacc

SEQ ID NO: 1189106 - DNA, 15 bp, Homo sapiens
acagacgcctgccac

SEQ ID NO: 1189107 - DNA, 15 bp, Homo sapiens
tacagacgcctgcca

SEQ ID NO: 1189108 - DNA, 15 bp, Homo sapiens
ttacagacgcctgcc

SEQ ID NO: 1189109 - DNA, 15 bp, Homo sapiens
attacagacgcctgc

SEQ ID NO: 1189110 - DNA, 15 bp, Homo sapiens
gattacagacgcctg

SEQ ID NO: 1189111 - DNA, 15 bp, Homo sapiens
ggattacagacgcct

SEQ ID NO: 1189112 - DNA, 15 bp, Homo sapiens
gggattacagacgcc

SEQ ID NO: 1189113 - DNA, 15 bp, Homo sapiens
tgggattacagacgc

SEQ ID NO: 1189114 - DNA, 15 bp, Homo sapiens
agctgggattacaga

SEQ ID NO: 1189115 - DNA, 15 bp, Homo sapiens
tagtagctgggatta

SEQ ID NO: 1189116 - DNA, 15 bp, Homo sapiens
gtagtagctgggatt

SEQ ID NO: 1189117 - DNA, 15 bp, Homo sapiens
tgtagtagctgggat

SEQ ID NO: 1189118 - DNA, 15 bp, Homo sapiens
ctgtagtagctggga

SEQ ID NO: 1189119 - DNA, 15 bp, Homo sapiens
tctgtagtagctggg

SEQ ID NO: 1189120 - DNA, 15 bp, Homo sapiens
ctctgtagtagctgg

SEQ ID NO: 1189121 - DNA, 15 bp, Homo sapiens
cctctgtagtagctg

SEQ ID NO: 1189122 - DNA, 15 bp, Homo sapiens
gcctctgtagtagct

SEQ ID NO: 1189123 - DNA, 15 bp, Homo sapiens
agcctctgtagtagc

SEQ ID NO: 1189124 - DNA, 15 bp, Homo sapiens
cagcctctgtagtag

SEQ ID NO: 1189125 - DNA, 15 bp, Homo sapiens
tcagcctctgtagta

SEQ ID NO: 1189126 - DNA, 15 bp, Homo sapiens
ctcagcctctgtagt

SEQ ID NO: 1189127 - DNA, 15 bp, Homo sapiens
cctcagcctctgtag

SEQ ID NO: 1189128 - DNA, 15 bp, Homo sapiens
gcctcagcctctgta

SEQ ID NO: 1189129 - DNA, 15 bp, Homo sapiens
tgcctcagcctctgt

SEQ ID NO: 1189130 - DNA, 15 bp, Homo sapiens
ttctcagctcactgc

SEQ ID NO: 1189131 - DNA, 15 bp, Homo sapiens
gttctcagctcactg

SEQ ID NO: 1189132 - DNA, 15 bp, Homo sapiens
cgttctcagctcact

SEQ ID NO: 1189133 - DNA, 15 bp, Homo sapiens
gcgttctcagctcac

SEQ ID NO: 1189134 - DNA, 15 bp, Homo sapiens
cgcgttctcagctca

SEQ ID NO: 1189135 - DNA, 15 bp, Homo sapiens
gcgcgttctcagctc

SEQ ID NO: 1189136 - DNA, 15 bp, Homo sapiens
ggcgcgttctcagct

SEQ ID NO: 1189137 - DNA, 15 bp, Homo sapiens
tggcgcgttctcagc

SEQ ID NO: 1189138 - DNA, 15 bp, Homo sapiens
gtggcgcgttctcag

SEQ ID NO: 1189139 - DNA, 15 bp, Homo sapiens
agtggcgcgttctca

SEQ ID NO: 1189140 - DNA, 15 bp, Homo sapiens
cagtggcgcgttctc

SEQ ID NO: 1189141 - DNA, 15 bp, Homo sapiens
gcagtggcgcgttct

SEQ ID NO: 1189142 - DNA, 15 bp, Homo sapiens
tgcagtggcgcgttc

SEQ ID NO: 1189143 - DNA, 15 bp, Homo sapiens
gtgcagtggcgcgtt

SEQ ID NO: 1189144 - DNA, 15 bp, Homo sapiens
agtgcagtggcgcgt

SEQ ID NO: 1189145 - DNA, 15 bp, Homo sapiens
gttgttttttttttt

SEQ ID NO: 1189146 - DNA, 15 bp, Homo sapiens
tgttgtttttttttt

SEQ ID NO: 1189147 - DNA, 15 bp, Homo sapiens
ttgttgttttttttt

SEQ ID NO: 1189148 - DNA, 15 bp, Homo sapiens
tttgttgtttttttt

SEQ ID NO: 1189149 - DNA, 15 bp, Homo sapiens
ttttgttgttttttt

SEQ ID NO: 1189150 - DNA, 15 bp, Homo sapiens
gtttttttttgttgt

SEQ ID NO: 1189151 - DNA, 15 bp, Homo sapiens
tgtttttttttgttg

SEQ ID NO: 1189152 - DNA, 15 bp, Homo sapiens
ttgtttttttttgtt

SEQ ID NO: 1189153 - DNA, 15 bp, Homo sapiens
ttttgtttttttttg

SEQ ID NO: 1189154 - DNA, 15 bp, Homo sapiens
gttttgttttttttt

SEQ ID NO: 1189155 - DNA, 15 bp, Homo sapiens
gtgttttgttttttt

SEQ ID NO: 1189156 - DNA, 15 bp, Homo sapiens
tgtgttttgtttttt

SEQ ID NO: 1189157 - DNA, 15 bp, Homo sapiens
ttgtgttttgttttt

SEQ ID NO: 1189158 - DNA, 15 bp, Homo sapiens
cttgtgttttgtttt

SEQ ID NO: 1189159 - DNA, 15 bp, Homo sapiens
acttgtgttttgttt

SEQ ID NO: 1189160 - DNA, 15 bp, Homo sapiens
aacttgtgttttgtt

SEQ ID NO: 1189161 - DNA, 15 bp, Homo sapiens
aaacttgtgttttgt

SEQ ID NO: 1189162 - DNA, 15 bp, Homo sapiens
taaacttgtgttttg

SEQ ID NO: 1189163 - DNA, 15 bp, Homo sapiens
gtaaacttgtgtttt

SEQ ID NO: 1189164 - DNA, 15 bp, Homo sapiens
agtaaacttgtgttt

SEQ ID NO: 1189165 - DNA, 15 bp, Homo sapiens
cagtaaacttgtgtt

SEQ ID NO: 1189166 - DNA, 15 bp, Homo sapiens
ccagtaaacttgtgt

SEQ ID NO: 1189167 - DNA, 15 bp, Homo sapiens
cccagtaaacttgtg

SEQ ID NO: 1189168 - DNA, 15 bp, Homo sapiens
tcccagtaaacttgt

SEQ ID NO: 1189169 - DNA, 15 bp, Homo sapiens
ttcccagtaaacttg

SEQ ID NO: 1189170 - DNA, 15 bp, Homo sapiens
gttcccagtaaactt

SEQ ID NO: 1189171 - DNA, 15 bp, Homo sapiens
agttcccagtaaact

SEQ ID NO: 1189172 - DNA, 15 bp, Homo sapiens
aagttcccagtaaac

SEQ ID NO: 1189173 - DNA, 15 bp, Homo sapiens
taagttcccagtaaa

SEQ ID NO: 1189174 - DNA, 15 bp, Homo sapiens
ctaagttcccagtaa

SEQ ID NO: 1189175 - DNA, 15 bp, Homo sapiens
gctaagttcccagta

SEQ ID NO: 1189176 - DNA, 15 bp, Homo sapiens
tgctaagttcccagt

SEQ ID NO: 1189177 - DNA, 15 bp, Homo sapiens
ctgctaagttcccag

SEQ ID NO: 1189178 - DNA, 15 bp, Homo sapiens
actgctaagttccca

SEQ ID NO: 1189179 - DNA, 15 bp, Homo sapiens
tactgctaagttccc

SEQ ID NO: 1189180 - DNA, 15 bp, Homo sapiens
ctactgctaagttcc

SEQ ID NO: 1189181 - DNA, 15 bp, Homo sapiens
tctactgctaagttc

SEQ ID NO: 1189182 - DNA, 15 bp, Homo sapiens
atctactgctaagtt

SEQ ID NO: 1189183 - DNA, 15 bp, Homo sapiens
catctactgctaagt

SEQ ID NO: 1189184 - DNA, 15 bp, Homo sapiens
gcatctactgctaag

SEQ ID NO: 1189185 - DNA, 15 bp, Homo sapiens
agcatctactgctaa

SEQ ID NO: 1189186 - DNA, 15 bp, Homo sapiens
aagcatctactgcta

SEQ ID NO: 1189187 - DNA, 15 bp, Homo sapiens
aaagcatctactgct

SEQ ID NO: 1189188 - DNA, 15 bp, Homo sapiens
caaagcatctactgc

SEQ ID NO: 1189189 - DNA, 15 bp, Homo sapiens
gcaaagcatctactg

SEQ ID NO: 1189190 - DNA, 15 bp, Homo sapiens
tgcaaagcatctact

SEQ ID NO: 1189191 - DNA, 15 bp, Homo sapiens
gtgcaaagcatctac

SEQ ID NO: 1189192 - DNA, 15 bp, Homo sapiens
ggtgcaaagcatcta

SEQ ID NO: 1189193 - DNA, 15 bp, Homo sapiens
tggtgcaaagcatct

SEQ ID NO: 1189194 - DNA, 15 bp, Homo sapiens
gtggtgcaaagcatc

SEQ ID NO: 1189195 - DNA, 15 bp, Homo sapiens
tgtggtgcaaagcat

SEQ ID NO: 1189196 - DNA, 15 bp, Homo sapiens
ttgtggtgcaaagca

SEQ ID NO: 1189197 - DNA, 15 bp, Homo sapiens
gttgtggtgcaaagc

SEQ ID NO: 1189198 - DNA, 15 bp, Homo sapiens
tgttgtggtgcaaag

SEQ ID NO: 1189199 - DNA, 15 bp, Homo sapiens
ttgttgtggtgcaaa

SEQ ID NO: 1189200 - DNA, 15 bp, Homo sapiens
tttgttgtggtgcaa

SEQ ID NO: 1189201 - DNA, 15 bp, Homo sapiens
atttgttgtggtgca

SEQ ID NO: 1189202 - DNA, 15 bp, Homo sapiens
catttgttgtggtgc

SEQ ID NO: 1189203 - DNA, 15 bp, Homo sapiens
acatttgttgtggtg

SEQ ID NO: 1189204 - DNA, 15 bp, Homo sapiens
tacatttgttgtggt

SEQ ID NO: 1189205 - DNA, 15 bp, Homo sapiens
atacatttgttgtgg

SEQ ID NO: 1189206 - DNA, 15 bp, Homo sapiens
gatacatttgttgtg

SEQ ID NO: 1189207 - DNA, 15 bp, Homo sapiens
agatacatttgttgt

SEQ ID NO: 1189208 - DNA, 15 bp, Homo sapiens
aagatacatttgttg

SEQ ID NO: 1189209 - DNA, 15 bp, Homo sapiens
taagatacatttgtt

SEQ ID NO: 1189210 - DNA, 15 bp, Homo sapiens
ttaagatacatttgt

SEQ ID NO: 1189211 - DNA, 15 bp, Homo sapiens
cttaagatacatttg

SEQ ID NO: 1189212 - DNA, 15 bp, Homo sapiens
acttaagatacattt

SEQ ID NO: 1189213 - DNA, 15 bp, Homo sapiens
cacttaagatacatt

SEQ ID NO: 1189214 - DNA, 15 bp, Homo sapiens
ccacttaagatacat

SEQ ID NO: 1189215 - DNA, 15 bp, Homo sapiens
accacttaagataca

SEQ ID NO: 1189216 - DNA, 15 bp, Homo sapiens
gaccacttaagatac

SEQ ID NO: 1189217 - DNA, 15 bp, Homo sapiens
agaccacttaagata

SEQ ID NO: 1189218 - DNA, 15 bp, Homo sapiens
aagaccacttaagat

SEQ ID NO: 1189219 - DNA, 15 bp, Homo sapiens
aaagaccacttaaga

SEQ ID NO: 1189220 - DNA, 15 bp, Homo sapiens
aaaagaccacttaag

SEQ ID NO: 1189221 - DNA, 15 bp, Homo sapiens
caaaagaccacttaa

SEQ ID NO: 1189222 - DNA, 15 bp, Homo sapiens
acaaaagaccactta

SEQ ID NO: 1189223 - DNA, 15 bp, Homo sapiens
cacaaaagaccactt

SEQ ID NO: 1189224 - DNA, 15 bp, Homo sapiens
tcacaaaagaccact

SEQ ID NO: 1189225 - DNA, 15 bp, Homo sapiens
atcacaaaagaccac

SEQ ID NO: 1189226 - DNA, 15 bp, Homo sapiens
tatcacaaaagacca

SEQ ID NO: 1189227 - DNA, 15 bp, Homo sapiens
atatcacaaaagacc

SEQ ID NO: 1189228 - DNA, 15 bp, Homo sapiens
aatatcacaaaagac

SEQ ID NO: 1189229 - DNA, 15 bp, Homo sapiens
aaatatcacaaaaga

SEQ ID NO: 1189230 - DNA, 15 bp, Homo sapiens
caaatatcacaaaag

SEQ ID NO: 1189231 - DNA, 15 bp, Homo sapiens
tcaaatatcacaaaa

SEQ ID NO: 1189232 - DNA, 15 bp, Homo sapiens
ctcaaatatcacaaa

SEQ ID NO: 1189233 - DNA, 15 bp, Homo sapiens
cctcaaatatcacaa

SEQ ID NO: 1189234 - DNA, 15 bp, Homo sapiens
ccctcaaatatcaca

SEQ ID NO: 1189235 - DNA, 15 bp, Homo sapiens
tccctcaaatatcac

SEQ ID NO: 1189236 - DNA, 15 bp, Homo sapiens
ttccctcaaatatca

SEQ ID NO: 1189237 - DNA, 15 bp, Homo sapiens
tttccctcaaatatc

SEQ ID NO: 1189238 - DNA, 15 bp, Homo sapiens
ctttccctcaaatat

SEQ ID NO: 1189239 - DNA, 15 bp, Homo sapiens
actttccctcaaata

SEQ ID NO: 1189240 - DNA, 15 bp, Homo sapiens
cactttccctcaaat

SEQ ID NO: 1189241 - DNA, 15 bp, Homo sapiens
gcactttccctcaaa

SEQ ID NO: 1189242 - DNA, 15 bp, Homo sapiens
ggcactttccctcaa

SEQ ID NO: 1189243 - DNA, 15 bp, Homo sapiens
tggcactttccctca

SEQ ID NO: 1189244 - DNA, 15 bp, Homo sapiens
ctggcactttccctc

SEQ ID NO: 1189245 - DNA, 15 bp, Homo sapiens
tctggcactttccct

SEQ ID NO: 1189246 - DNA, 15 bp, Homo sapiens
ttctggcactttccc

SEQ ID NO: 1189247 - DNA, 15 bp, Homo sapiens
attctggcactttcc

SEQ ID NO: 1189248 - DNA, 15 bp, Homo sapiens
aattctggcactttc

SEQ ID NO: 1189249 - DNA, 15 bp, Homo sapiens
aaattctggcacttt

SEQ ID NO: 1189250 - DNA, 15 bp, Homo sapiens
taaattctggcactt

SEQ ID NO: 1189251 - DNA, 15 bp, Homo sapiens
ttaaattctggcact

SEQ ID NO: 1189252 - DNA, 15 bp, Homo sapiens
tttaaattctggcac

SEQ ID NO: 1189253 - DNA, 15 bp, Homo sapiens
ttttaaattctggca

SEQ ID NO: 1189254 - DNA, 15 bp, Homo sapiens
gttttaaattctggc

SEQ ID NO: 1189255 - DNA, 15 bp, Homo sapiens
tgttttaaattctgg

SEQ ID NO: 1189256 - DNA, 15 bp, Homo sapiens
ttgttttaaattctg

SEQ ID NO: 1189257 - DNA, 15 bp, Homo sapiens
tttgttttaaattct

SEQ ID NO: 1189258 - DNA, 15 bp, Homo sapiens
atttgttttaaattc

SEQ ID NO: 1189259 - DNA, 15 bp, Homo sapiens
catttgttttaaatt

SEQ ID NO: 1189260 - DNA, 15 bp, Homo sapiens
ccatttgttttaaat

SEQ ID NO: 1189261 - DNA, 15 bp, Homo sapiens
gccatttgttttaaa

SEQ ID NO: 1189262 - DNA, 15 bp, Homo sapiens
tgccatttgttttaa

SEQ ID NO: 1189263 - DNA, 15 bp, Homo sapiens
atgccatttgtttta

SEQ ID NO: 1189264 - DNA, 15 bp, Homo sapiens
aatgccatttgtttt

SEQ ID NO: 1189265 - DNA, 15 bp, Homo sapiens
aaatgccatttgttt

SEQ ID NO: 1189266 - DNA, 15 bp, Homo sapiens
gaaatgccatttgtt

SEQ ID NO: 1189267 - DNA, 15 bp, Homo sapiens
tgaaatgccatttgt

SEQ ID NO: 1189268 - DNA, 15 bp, Homo sapiens
ttgaaatgccatttg

SEQ ID NO: 1189269 - DNA, 15 bp, Homo sapiens
cttgaaatgccattt

SEQ ID NO: 1189270 - DNA, 15 bp, Homo sapiens
acttgaaatgccatt

SEQ ID NO: 1189271 - DNA, 15 bp, Homo sapiens
aacttgaaatgccat

SEQ ID NO: 1189272 - DNA, 15 bp, Homo sapiens
taacttgaaatgcca

SEQ ID NO: 1189273 - DNA, 15 bp, Homo sapiens
ataacttgaaatgcc

SEQ ID NO: 1189274 - DNA, 15 bp, Homo sapiens
aataacttgaaatgc

SEQ ID NO: 1189275 - DNA, 15 bp, Homo sapiens
gaataacttgaaatg

SEQ ID NO: 1189276 - DNA, 15 bp, Homo sapiens
agaataacttgaaat

SEQ ID NO: 1189277 - DNA, 15 bp, Homo sapiens
tagaataacttgaaa

SEQ ID NO: 1189278 - DNA, 15 bp, Homo sapiens
atagaataacttgaa

SEQ ID NO: 1189279 - DNA, 15 bp, Homo sapiens
tatagaataacttga

SEQ ID NO: 1189280 - DNA, 15 bp, Homo sapiens
gtatagaataacttg

SEQ ID NO: 1189281 - DNA, 15 bp, Homo sapiens
tgtatagaataactt

SEQ ID NO: 1189282 - DNA, 15 bp, Homo sapiens
ttgtatagaataact

SEQ ID NO: 1189283 - DNA, 15 bp, Homo sapiens
tttgtatagaataac

SEQ ID NO: 1189284 - DNA, 15 bp, Homo sapiens
atttgtatagaataa

SEQ ID NO: 1189285 - DNA, 15 bp, Homo sapiens
catttgtatagaata

SEQ ID NO: 1189286 - DNA, 15 bp, Homo sapiens
gcatttgtatagaat

SEQ ID NO: 1189287 - DNA, 15 bp, Homo sapiens
ggcatttgtatagaa

SEQ ID NO: 1189288 - DNA, 15 bp, Homo sapiens
gggcatttgtataga

SEQ ID NO: 1189289 - DNA, 15 bp, Homo sapiens
tgggcatttgtatag

SEQ ID NO: 1189290 - DNA, 15 bp, Homo sapiens
ctgggcatttgtata

SEQ ID NO: 1189291 - DNA, 15 bp, Homo sapiens
actgggcatttgtat

SEQ ID NO: 1189292 - DNA, 15 bp, Homo sapiens
aactgggcatttgta

SEQ ID NO: 1189293 - DNA, 15 bp, Homo sapiens
aaactgggcatttgt

SEQ ID NO: 1189294 - DNA, 15 bp, Homo sapiens
gaaactgggcatttg

SEQ ID NO: 1189295 - DNA, 15 bp, Homo sapiens
agaaactgggcattt

SEQ ID NO: 1189296 - DNA, 15 bp, Homo sapiens
aagaaactgggcatt

SEQ ID NO: 1189297 - DNA, 15 bp, Homo sapiens
aaagaaactgggcat

SEQ ID NO: 1189298 - DNA, 15 bp, Homo sapiens
gaaagaaactgggca

SEQ ID NO: 1189299 - DNA, 15 bp, Homo sapiens
agaaagaaactgggc

SEQ ID NO: 1189300 - DNA, 15 bp, Homo sapiens
tagaaagaaactggg

SEQ ID NO: 1189301 - DNA, 15 bp, Homo sapiens
gtagaaagaaactgg

SEQ ID NO: 1189302 - DNA, 15 bp, Homo sapiens
ggtagaaagaaactg

SEQ ID NO: 1189303 - DNA, 15 bp, Homo sapiens
tggtagaaagaaact

SEQ ID NO: 1189304 - DNA, 15 bp, Homo sapiens
atggtagaaagaaac

SEQ ID NO: 1189305 - DNA, 15 bp, Homo sapiens
gatggtagaaagaaa

SEQ ID NO: 1189306 - DNA, 15 bp, Homo sapiens
agatggtagaaagaa

SEQ ID NO: 1189307 - DNA, 15 bp, Homo sapiens
aagatggtagaaaga

SEQ ID NO: 1189308 - DNA, 15 bp, Homo sapiens
aaagatggtagaaag

SEQ ID NO: 1189309 - DNA, 15 bp, Homo sapiens
aaaagatggtagaaa

SEQ ID NO: 1189310 - DNA, 15 bp, Homo sapiens
aaaaagatggtagaa

SEQ ID NO: 1189311 - DNA, 15 bp, Homo sapiens
aaaaaagatggtaga

SEQ ID NO: 1189312 - DNA, 15 bp, Homo sapiens
aaaaaaagatggtag

SEQ ID NO: 1189313 - DNA, 15 bp, Homo sapiens
gaaaaaaagatggta

SEQ ID NO: 1189314 - DNA, 15 bp, Homo sapiens
ggaaaaaaagatggt

SEQ ID NO: 1189315 - DNA, 15 bp, Homo sapiens
aggaaaaaaagatgg

SEQ ID NO: 1189316 - DNA, 15 bp, Homo sapiens
aaggaaaaaaagatg

SEQ ID NO: 1189317 - DNA, 15 bp, Homo sapiens
aaaggaaaaaaagat

SEQ ID NO: 1189318 - DNA, 15 bp, Homo sapiens
aaaaggaaaaaaaga

SEQ ID NO: 1189319 - DNA, 15 bp, Homo sapiens
caaaaaggaaaaaaa

SEQ ID NO: 1189320 - DNA, 15 bp, Homo sapiens
gcaaaaaggaaaaaa

SEQ ID NO: 1189321 - DNA, 15 bp, Homo sapiens
tgcaaaaaggaaaaa

SEQ ID NO: 1189322 - DNA, 15 bp, Homo sapiens
ctgcaaaaaggaaaa

SEQ ID NO: 1189323 - DNA, 15 bp, Homo sapiens
actgcaaaaaggaaa

SEQ ID NO: 1189324 - DNA, 15 bp, Homo sapiens
cactgcaaaaaggaa

SEQ ID NO: 1189325 - DNA, 15 bp, Homo sapiens
ccactgcaaaaagga

SEQ ID NO: 1189326 - DNA, 15 bp, Homo sapiens
accactgcaaaaagg

SEQ ID NO: 1189327 - DNA, 15 bp, Homo sapiens
gaccactgcaaaaag

SEQ ID NO: 1189328 - DNA, 15 bp, Homo sapiens
tgaccactgcaaaaa

SEQ ID NO: 1189329 - DNA, 15 bp, Homo sapiens
gtgaccactgcaaaa

SEQ ID NO: 1189330 - DNA, 15 bp, Homo sapiens
agtgaccactgcaaa

SEQ ID NO: 1189331 - DNA, 15 bp, Homo sapiens
cagtgaccactgcaa

SEQ ID NO: 1189332 - DNA, 15 bp, Homo sapiens
tcagtgaccactgca

SEQ ID NO: 1189333 - DNA, 15 bp, Homo sapiens
ctcagtgaccactgc

SEQ ID NO: 1189334 - DNA, 15 bp, Homo sapiens
gctcagtgaccactg

SEQ ID NO: 1189335 - DNA, 15 bp, Homo sapiens
agctcagtgaccact

SEQ ID NO: 1189336 - DNA, 15 bp, Homo sapiens
tagctcagtgaccac

SEQ ID NO: 1189337 - DNA, 15 bp, Homo sapiens
atagctcagtgacca

SEQ ID NO: 1189338 - DNA, 15 bp, Homo sapiens
aatagctcagtgacc

SEQ ID NO: 1189339 - DNA, 15 bp, Homo sapiens
aaatagctcagtgac

SEQ ID NO: 1189340 - DNA, 15 bp, Homo sapiens
aaaatagctcagtga

SEQ ID NO: 1189341 - DNA, 15 bp, Homo sapiens
taaaatagctcagtg

SEQ ID NO: 1189342 - DNA, 15 bp, Homo sapiens
ctaaaatagctcagt

SEQ ID NO: 1189343 - DNA, 15 bp, Homo sapiens
actaaaatagctcag

SEQ ID NO: 1189344 - DNA, 15 bp, Homo sapiens
cactaaaatagctca

SEQ ID NO: 1189345 - DNA, 15 bp, Homo sapiens
tcactaaaatagctc

SEQ ID NO: 1189346 - DNA, 15 bp, Homo sapiens
ttcactaaaatagct

SEQ ID NO: 1189347 - DNA, 15 bp, Homo sapiens
attcactaaaatagc

SEQ ID NO: 1189348 - DNA, 15 bp, Homo sapiens
cattcactaaaatag

SEQ ID NO: 1189349 - DNA, 15 bp, Homo sapiens
acattcactaaaata

SEQ ID NO: 1189350 - DNA, 15 bp, Homo sapiens
aacattcactaaaat

SEQ ID NO: 1189351 - DNA, 15 bp, Homo sapiens
aaacattcactaaaa

SEQ ID NO: 1189352 - DNA, 15 bp, Homo sapiens
aaaacattcactaaa

SEQ ID NO: 1189353 - DNA, 15 bp, Homo sapiens
aaaaacattcactaa

SEQ ID NO: 1189354 - DNA, 15 bp, Homo sapiens
taaaaacattcacta

SEQ ID NO: 1189355 - DNA, 15 bp, Homo sapiens
gtaaaaacattcact

SEQ ID NO: 1189356 - DNA, 15 bp, Homo sapiens
tgtaaaaacattcac

SEQ ID NO: 1189357 - DNA, 15 bp, Homo sapiens
gtgtaaaaacattca

SEQ ID NO: 1189358 - DNA, 15 bp, Homo sapiens
tgtgtaaaaacattc

SEQ ID NO: 1189359 - DNA, 15 bp, Homo sapiens
ttgtgtaaaaacatt

SEQ ID NO: 1189360 - DNA, 15 bp, Homo sapiens
attgtgtaaaaacat

SEQ ID NO: 1189361 - DNA, 15 bp, Homo sapiens
cattgtgtaaaaaca

SEQ ID NO: 1189362 - DNA, 15 bp, Homo sapiens
tcattgtgtaaaaac

SEQ ID NO: 1189363 - DNA, 15 bp, Homo sapiens
atcattgtgtaaaaa

SEQ ID NO: 1189364 - DNA, 15 bp, Homo sapiens
catcattgtgtaaaa

SEQ ID NO: 1189365 - DNA, 15 bp, Homo sapiens
gcatcattgtgtaaa

SEQ ID NO: 1189366 - DNA, 15 bp, Homo sapiens
ggcatcattgtgtaa

SEQ ID NO: 1189367 - DNA, 15 bp, Homo sapiens
tggcatcattgtgta

SEQ ID NO: 1189368 - DNA, 15 bp, Homo sapiens
atggcatcattgtgt

SEQ ID NO: 1189369 - DNA, 15 bp, Homo sapiens
gatggcatcattgtg

SEQ ID NO: 1189370 - DNA, 15 bp, Homo sapiens
agatggcatcattgt

SEQ ID NO: 1189371 - DNA, 15 bp, Homo sapiens
aagatggcatcattg

SEQ ID NO: 1189372 - DNA, 15 bp, Homo sapiens
gaagatggcatcatt

SEQ ID NO: 1189373 - DNA, 15 bp, Homo sapiens
ggaagatggcatcat

SEQ ID NO: 1189374 - DNA, 15 bp, Homo sapiens
aggaagatggcatca

SEQ ID NO: 1189375 - DNA, 15 bp, Homo sapiens
aaggaagatggcatc

SEQ ID NO: 1189376 - DNA, 15 bp, Homo sapiens
gaaggaagatggcat

SEQ ID NO: 1189377 - DNA, 15 bp, Homo sapiens
agaaggaagatggca

SEQ ID NO: 1189378 - DNA, 15 bp, Homo sapiens
tagaaggaagatggc

SEQ ID NO: 1189379 - DNA, 15 bp, Homo sapiens
gtagaaggaagatgg

SEQ ID NO: 1189380 - DNA, 15 bp, Homo sapiens
agtagaaggaagatg

SEQ ID NO: 1189381 - DNA, 15 bp, Homo sapiens
gagtagaaggaagat

SEQ ID NO: 1189382 - DNA, 15 bp, Homo sapiens
tgagtagaaggaaga

SEQ ID NO: 1189383 - DNA, 15 bp, Homo sapiens
ctgagtagaaggaag

SEQ ID NO: 1189384 - DNA, 15 bp, Homo sapiens
actgagtagaaggaa

SEQ ID NO: 1189385 - DNA, 15 bp, Homo sapiens
gactgagtagaagga

SEQ ID NO: 1189386 - DNA, 15 bp, Homo sapiens
tgactgagtagaagg

SEQ ID NO: 1189387 - DNA, 15 bp, Homo sapiens
ctgactgagtagaag

SEQ ID NO: 1189388 - DNA, 15 bp, Homo sapiens
actgactgagtagaa

SEQ ID NO: 1189389 - DNA, 15 bp, Homo sapiens
tactgactgagtaga

SEQ ID NO: 1189390 - DNA, 15 bp, Homo sapiens
gtactgactgagtag

SEQ ID NO: 1189391 - DNA, 15 bp, Homo sapiens
tgtactgactgagta

SEQ ID NO: 1189392 - DNA, 15 bp, Homo sapiens
ttgtactgactgagt

SEQ ID NO: 1189393 - DNA, 15 bp, Homo sapiens
cttgtactgactgag

SEQ ID NO: 1189394 - DNA, 15 bp, Homo sapiens
tcttgtactgactga

SEQ ID NO: 1189395 - DNA, 15 bp, Homo sapiens
atcttgtactgactg

SEQ ID NO: 1189396 - DNA, 15 bp, Homo sapiens
catcttgtactgact

SEQ ID NO: 1189397 - DNA, 15 bp, Homo sapiens
acatcttgtactgac

SEQ ID NO: 1189398 - DNA, 15 bp, Homo sapiens
aacatcttgtactga

SEQ ID NO: 1189399 - DNA, 15 bp, Homo sapiens
caacatcttgtactg

SEQ ID NO: 1189400 - DNA, 15 bp, Homo sapiens
tcaacatcttgtact

SEQ ID NO: 1189401 - DNA, 15 bp, Homo sapiens
gtcaacatcttgtac

SEQ ID NO: 1189402 - DNA, 15 bp, Homo sapiens
ggtcaacatcttgta

SEQ ID NO: 1189403 - DNA, 15 bp, Homo sapiens
tggtcaacatcttgt

SEQ ID NO: 1189404 - DNA, 15 bp, Homo sapiens
atggtcaacatcttg

SEQ ID NO: 1189405 - DNA, 15 bp, Homo sapiens
gatggtcaacatctt

SEQ ID NO: 1189406 - DNA, 15 bp, Homo sapiens
cgatggtcaacatct

SEQ ID NO: 1189407 - DNA, 15 bp, Homo sapiens
tcgatggtcaacatc

SEQ ID NO: 1189408 - DNA, 15 bp, Homo sapiens
gtcgatggtcaacat

SEQ ID NO: 1189409 - DNA, 15 bp, Homo sapiens
agtcgatggtcaaca

SEQ ID NO: 1189410 - DNA, 15 bp, Homo sapiens
gagtcgatggtcaac

SEQ ID NO: 1189411 - DNA, 15 bp, Homo sapiens
tgagtcgatggtcaa

SEQ ID NO: 1189412 - DNA, 15 bp, Homo sapiens
atgagtcgatggtca

SEQ ID NO: 1189413 - DNA, 15 bp, Homo sapiens
tatgagtcgatggtc

SEQ ID NO: 1189414 - DNA, 15 bp, Homo sapiens
ttatgagtcgatggt

SEQ ID NO: 1189415 - DNA, 15 bp, Homo sapiens
tttatgagtcgatgg

SEQ ID NO: 1189416 - DNA, 15 bp, Homo sapiens
ttttatgagtcgatg

SEQ ID NO: 1189417 - DNA, 15 bp, Homo sapiens
gttttatgagtcgat

SEQ ID NO: 1189418 - DNA, 15 bp, Homo sapiens
tgttttatgagtcga

SEQ ID NO: 1189419 - DNA, 15 bp, Homo sapiens
gtgttttatgagtcg

SEQ ID NO: 1189420 - DNA, 15 bp, Homo sapiens
agtgttttatgagtc

SEQ ID NO: 1189421 - DNA, 15 bp, Homo sapiens
tagtgttttatgagt

SEQ ID NO: 1189422 - DNA, 15 bp, Homo sapiens
ctagtgttttatgag

SEQ ID NO: 1189423 - DNA, 15 bp, Homo sapiens
gctagtgttttatga

SEQ ID NO: 1189424 - DNA, 15 bp, Homo sapiens
agctagtgttttatg

SEQ ID NO: 1189425 - DNA, 15 bp, Homo sapiens
tagctagtgttttat

SEQ ID NO: 1189426 - DNA, 15 bp, Homo sapiens
gtagctagtgtttta

SEQ ID NO: 1189427 - DNA, 15 bp, Homo sapiens
ggtagctagtgtttt

SEQ ID NO: 1189428 - DNA, 15 bp, Homo sapiens
aggtagctagtgttt

SEQ ID NO: 1189429 - DNA, 15 bp, Homo sapiens
aaggtagctagtgtt

SEQ ID NO: 1189430 - DNA, 15 bp, Homo sapiens
aaaggtagctagtgt

SEQ ID NO: 1189431 - DNA, 15 bp, Homo sapiens
gaaaggtagctagtg

SEQ ID NO: 1189432 - DNA, 15 bp, Homo sapiens
tgaaaggtagctagt

SEQ ID NO: 1189433 - DNA, 15 bp, Homo sapiens
atgaaaggtagctag

SEQ ID NO: 1189434 - DNA, 15 bp, Homo sapiens
catgaaaggtagcta

SEQ ID NO: 1189435 - DNA, 15 bp, Homo sapiens
tcatgaaaggtagct

SEQ ID NO: 1189436 - DNA, 15 bp, Homo sapiens
ttcatgaaaggtagc

SEQ ID NO: 1189437 - DNA, 15 bp, Homo sapiens
cttcatgaaaggtag

SEQ ID NO: 1189438 - DNA, 15 bp, Homo sapiens
ccttcatgaaaggta

SEQ ID NO: 1189439 - DNA, 15 bp, Homo sapiens
tccttcatgaaaggt

SEQ ID NO: 1189440 - DNA, 15 bp, Homo sapiens
gtccttcatgaaagg

SEQ ID NO: 1189441 - DNA, 15 bp, Homo sapiens
agtccttcatgaaag

SEQ ID NO: 1189442 - DNA, 15 bp, Homo sapiens
aagtccttcatgaaa

SEQ ID NO: 1189443 - DNA, 15 bp, Homo sapiens
caagtccttcatgaa

SEQ ID NO: 1189444 - DNA, 15 bp, Homo sapiens
ccaagtccttcatga

SEQ ID NO: 1189445 - DNA, 15 bp, Homo sapiens
accaagtccttcatg

SEQ ID NO: 1189446 - DNA, 15 bp, Homo sapiens
caccaagtccttcat

SEQ ID NO: 1189447 - DNA, 15 bp, Homo sapiens
tcaccaagtccttca

SEQ ID NO: 1189448 - DNA, 15 bp, Homo sapiens
atcaccaagtccttc

SEQ ID NO: 1189449 - DNA, 15 bp, Homo sapiens
tatcaccaagtcctt

SEQ ID NO: 1189450 - DNA, 15 bp, Homo sapiens
ttatcaccaagtcct

SEQ ID NO: 1189451 - DNA, 15 bp, Homo sapiens
gttatcaccaagtcc

SEQ ID NO: 1189452 - DNA, 15 bp, Homo sapiens
agttatcaccaagtc

SEQ ID NO: 1189453 - DNA, 15 bp, Homo sapiens
gagttatcaccaagt

SEQ ID NO: 1189454 - DNA, 15 bp, Homo sapiens
agagttatcaccaag

SEQ ID NO: 1189455 - DNA, 15 bp, Homo sapiens
gagagttatcaccaa

SEQ ID NO: 1189456 - DNA, 15 bp, Homo sapiens
tgagagttatcacca

SEQ ID NO: 1189457 - DNA, 15 bp, Homo sapiens
atgagagttatcacc

SEQ ID NO: 1189458 - DNA, 15 bp, Homo sapiens
catgagagttatcac

SEQ ID NO: 1189459 - DNA, 15 bp, Homo sapiens
acatgagagttatca

SEQ ID NO: 1189460 - DNA, 15 bp, Homo sapiens
aacatgagagttatc

SEQ ID NO: 1189461 - DNA, 15 bp, Homo sapiens
gaacatgagagttat

SEQ ID NO: 1189462 - DNA, 15 bp, Homo sapiens
ggaacatgagagtta

SEQ ID NO: 1189463 - DNA, 15 bp, Homo sapiens
tggaacatgagagtt

SEQ ID NO: 1189464 - DNA, 15 bp, Homo sapiens
ttggaacatgagagt

SEQ ID NO: 1189465 - DNA, 15 bp, Homo sapiens
cttggaacatgagag

SEQ ID NO: 1189466 - DNA, 15 bp, Homo sapiens
acttggaacatgaga

SEQ ID NO: 1189467 - DNA, 15 bp, Homo sapiens
tacttggaacatgag

SEQ ID NO: 1189468 - DNA, 15 bp, Homo sapiens
ctacttggaacatga

SEQ ID NO: 1189469 - DNA, 15 bp, Homo sapiens
tctacttggaacatg

SEQ ID NO: 1189470 - DNA, 15 bp, Homo sapiens
ttctacttggaacat

SEQ ID NO: 1189471 - DNA, 15 bp, Homo sapiens
gttctacttggaaca

SEQ ID NO: 1189472 - DNA, 15 bp, Homo sapiens
ggttctacttggaac

SEQ ID NO: 1189473 - DNA, 15 bp, Homo sapiens
cggttctacttggaa

SEQ ID NO: 1189474 - DNA, 15 bp, Homo sapiens
ccggttctacttgga

SEQ ID NO: 1189475 - DNA, 15 bp, Homo sapiens
tccggttctacttgg

SEQ ID NO: 1189476 - DNA, 15 bp, Homo sapiens
ttccggttctacttg

SEQ ID NO: 1189477 - DNA, 15 bp, Homo sapiens
tttccggttctactt

SEQ ID NO: 1189478 - DNA, 15 bp, Homo sapiens
ttttccggttctact

SEQ ID NO: 1189479 - DNA, 15 bp, Homo sapiens
gttttccggttctac

SEQ ID NO: 1189480 - DNA, 15 bp, Homo sapiens
tgttttccggttcta

SEQ ID NO: 1189481 - DNA, 15 bp, Homo sapiens
atgttttccggttct

SEQ ID NO: 1189482 - DNA, 15 bp, Homo sapiens
catgttttccggttc

SEQ ID NO: 1189483 - DNA, 15 bp, Homo sapiens
acatgttttccggtt

SEQ ID NO: 1189484 - DNA, 15 bp, Homo sapiens
cacatgttttccggt

SEQ ID NO: 1189485 - DNA, 15 bp, Homo sapiens
acacatgttttccgg

SEQ ID NO: 1189486 - DNA, 15 bp, Homo sapiens
tacacatgttttccg

SEQ ID NO: 1189487 - DNA, 15 bp, Homo sapiens
ttacacatgttttcc

SEQ ID NO: 1189488 - DNA, 15 bp, Homo sapiens
cttacacatgttttc

SEQ ID NO: 1189489 - DNA, 15 bp, Homo sapiens
tcttacacatgtttt

SEQ ID NO: 1189490 - DNA, 15 bp, Homo sapiens
ttcttacacatgttt

SEQ ID NO: 1189491 - DNA, 15 bp, Homo sapiens
tttcttacacatgtt

SEQ ID NO: 1189492 - DNA, 15 bp, Homo sapiens
ttttcttacacatgt

SEQ ID NO: 1189493 - DNA, 15 bp, Homo sapiens
gttttcttacacatg

SEQ ID NO: 1189494 - DNA, 15 bp, Homo sapiens
ggttttcttacacat

SEQ ID NO: 1189495 - DNA, 15 bp, Homo sapiens
aggttttcttacaca

SEQ ID NO: 1189496 - DNA, 15 bp, Homo sapiens
caggttttcttacac

SEQ ID NO: 1189497 - DNA, 15 bp, Homo sapiens
gcaggttttcttaca

SEQ ID NO: 1189498 - DNA, 15 bp, Homo sapiens
ggcaggttttcttac

SEQ ID NO: 1189499 - DNA, 15 bp, Homo sapiens
cggcaggttttctta

SEQ ID NO: 1189500 - DNA, 15 bp, Homo sapiens
tcggcaggttttctt

SEQ ID NO: 1189501 - DNA, 15 bp, Homo sapiens
atcggcaggttttct

SEQ ID NO: 1189502 - DNA, 15 bp, Homo sapiens
gatcggcaggttttc

SEQ ID NO: 1189503 - DNA, 15 bp, Homo sapiens
ggatcggcaggtttt

SEQ ID NO: 1189504 - DNA, 15 bp, Homo sapiens
gggatcggcaggttt

SEQ ID NO: 1189505 - DNA, 15 bp, Homo sapiens
agggatcggcaggtt

SEQ ID NO: 1189506 - DNA, 15 bp, Homo sapiens
tagggatcggcaggt

SEQ ID NO: 1189507 - DNA, 15 bp, Homo sapiens
atagggatcggcagg

SEQ ID NO: 1189508 - DNA, 15 bp, Homo sapiens
catagggatcggcag

SEQ ID NO: 1189509 - DNA, 15 bp, Homo sapiens
ccatagggatcggca

SEQ ID NO: 1189510 - DNA, 15 bp, Homo sapiens
cccatagggatcggc

SEQ ID NO: 1189511 - DNA, 15 bp, Homo sapiens
gcccatagggatcgg

SEQ ID NO: 1189512 - DNA, 15 bp, Homo sapiens
ggcccatagggatcg

SEQ ID NO: 1189513 - DNA, 15 bp, Homo sapiens
aggcccatagggatc

SEQ ID NO: 1189514 - DNA, 15 bp, Homo sapiens
aaggcccatagggat

SEQ ID NO: 1189515 - DNA, 15 bp, Homo sapiens
caaggcccataggga

SEQ ID NO: 1189516 - DNA, 15 bp, Homo sapiens
ccaaggcccataggg

SEQ ID NO: 1189517 - DNA, 15 bp, Homo sapiens
gccaaggcccatagg

SEQ ID NO: 1189518 - DNA, 15 bp, Homo sapiens
ggccaaggcccatag

SEQ ID NO: 1189519 - DNA, 15 bp, Homo sapiens
tggccaaggcccata

SEQ ID NO: 1189520 - DNA, 15 bp, Homo sapiens
ttggccaaggcccat

SEQ ID NO: 1189521 - DNA, 15 bp, Homo sapiens
attggccaaggccca

SEQ ID NO: 1189522 - DNA, 15 bp, Homo sapiens
tattggccaaggccc

SEQ ID NO: 1189523 - DNA, 15 bp, Homo sapiens
ctattggccaaggcc

SEQ ID NO: 1189524 - DNA, 15 bp, Homo sapiens
cctattggccaaggc

SEQ ID NO: 1189525 - DNA, 15 bp, Homo sapiens
acctattggccaagg

SEQ ID NO: 1189526 - DNA, 15 bp, Homo sapiens
tacctattggccaag

SEQ ID NO: 1189527 - DNA, 15 bp, Homo sapiens
atacctattggccaa

SEQ ID NO: 1189528 - DNA, 15 bp, Homo sapiens
aatacctattggcca

SEQ ID NO: 1189529 - DNA, 15 bp, Homo sapiens
taatacctattggcc

SEQ ID NO: 1189530 - DNA, 15 bp, Homo sapiens
ataatacctattggc

SEQ ID NO: 1189531 - DNA, 15 bp, Homo sapiens
aataatacctattgg

SEQ ID NO: 1189532 - DNA, 15 bp, Homo sapiens
gaataatacctattg

SEQ ID NO: 1189533 - DNA, 15 bp, Homo sapiens
ggaataatacctatt

SEQ ID NO: 1189534 - DNA, 15 bp, Homo sapiens
gggaataatacctat

SEQ ID NO: 1189535 - DNA, 15 bp, Homo sapiens
tgggaataataccta

SEQ ID NO: 1189536 - DNA, 15 bp, Homo sapiens
ttgggaataatacct

SEQ ID NO: 1189537 - DNA, 15 bp, Homo sapiens
cttgggaataatacc

SEQ ID NO: 1189538 - DNA, 15 bp, Homo sapiens
ccttgggaataatac

SEQ ID NO: 1189539 - DNA, 15 bp, Homo sapiens
cccttgggaataata

SEQ ID NO: 1189540 - DNA, 15 bp, Homo sapiens
ccccttgggaataat

SEQ ID NO: 1189541 - DNA, 15 bp, Homo sapiens
accccttgggaataa

SEQ ID NO: 1189542 - DNA, 15 bp, Homo sapiens
caccccttgggaata

SEQ ID NO: 1189543 - DNA, 15 bp, Homo sapiens
ccaccccttgggaat

SEQ ID NO: 1189544 - DNA, 15 bp, Homo sapiens
gccaccccttgggaa

SEQ ID NO: 1189545 - DNA, 15 bp, Homo sapiens
tgccaccccttggga

SEQ ID NO: 1189546 - DNA, 15 bp, Homo sapiens
ctgccaccccttggg

SEQ ID NO: 1189547 - DNA, 15 bp, Homo sapiens
actgccaccccttgg

SEQ ID NO: 1189548 - DNA, 15 bp, Homo sapiens
aactgccaccccttg

SEQ ID NO: 1189549 - DNA, 15 bp, Homo sapiens
aaactgccacccctt

SEQ ID NO: 1189550 - DNA, 15 bp, Homo sapiens
taaactgccacccct

SEQ ID NO: 1189551 - DNA, 15 bp, Homo sapiens
ataaactgccacccc

SEQ ID NO: 1189552 - DNA, 15 bp, Homo sapiens
gataaactgccaccc

SEQ ID NO: 1189553 - DNA, 15 bp, Homo sapiens
agataaactgccacc

SEQ ID NO: 1189554 - DNA, 15 bp, Homo sapiens
aagataaactgccac

SEQ ID NO: 1189555 - DNA, 15 bp, Homo sapiens
aaagataaactgcca

SEQ ID NO: 1189556 - DNA, 15 bp, Homo sapiens
aaaagataaactgcc

SEQ ID NO: 1189557 - DNA, 15 bp, Homo sapiens
aaaaagataaactgc

SEQ ID NO: 1189558 - DNA, 15 bp, Homo sapiens
gaaaaagataaactg

SEQ ID NO: 1189559 - DNA, 15 bp, Homo sapiens
ggaaaaagataaact

SEQ ID NO: 1189560 - DNA, 15 bp, Homo sapiens
gggaaaaagataaac

SEQ ID NO: 1189561 - DNA, 15 bp, Homo sapiens
ggggaaaaagataaa

SEQ ID NO: 1189562 - DNA, 15 bp, Homo sapiens
tggggaaaaagataa

SEQ ID NO: 1189563 - DNA, 15 bp, Homo sapiens
ctggggaaaaagata

SEQ ID NO: 1189564 - DNA, 15 bp, Homo sapiens
gctggggaaaaagat

SEQ ID NO: 1189565 - DNA, 15 bp, Homo sapiens
ggctggggaaaaaga

SEQ ID NO: 1189566 - DNA, 15 bp, Homo sapiens
aggctggggaaaaag

SEQ ID NO: 1189567 - DNA, 15 bp, Homo sapiens
aaggctggggaaaaa

SEQ ID NO: 1189568 - DNA, 15 bp, Homo sapiens
gaaggctggggaaaa

SEQ ID NO: 1189569 - DNA, 15 bp, Homo sapiens
tgaaggctggggaaa

SEQ ID NO: 1189570 - DNA, 15 bp, Homo sapiens
atgaaggctggggaa

SEQ ID NO: 1189571 - DNA, 15 bp, Homo sapiens
tatgaaggctgggga

SEQ ID NO: 1189572 - DNA, 15 bp, Homo sapiens
atatgaaggctgggg

SEQ ID NO: 1189573 - DNA, 15 bp, Homo sapiens
aatatgaaggctggg

SEQ ID NO: 1189574 - DNA, 15 bp, Homo sapiens
taatatgaaggctgg

SEQ ID NO: 1189575 - DNA, 15 bp, Homo sapiens
ttaatatgaaggctg

SEQ ID NO: 1189576 - DNA, 15 bp, Homo sapiens
tttaatatgaaggct

SEQ ID NO: 1189577 - DNA, 15 bp, Homo sapiens
ttttaatatgaaggc

SEQ ID NO: 1189578 - DNA, 15 bp, Homo sapiens
gttttaatatgaagg

SEQ ID NO: 1189579 - DNA, 15 bp, Homo sapiens
ggttttaatatgaag

SEQ ID NO: 1189580 - DNA, 15 bp, Homo sapiens
aggttttaatatgaa

SEQ ID NO: 1189581 - DNA, 15 bp, Homo sapiens
gaggttttaatatga

SEQ ID NO: 1189582 - DNA, 15 bp, Homo sapiens
agaggttttaatatg

SEQ ID NO: 1189583 - DNA, 15 bp, Homo sapiens
gagaggttttaatat

SEQ ID NO: 1189584 - DNA, 15 bp, Homo sapiens
tgagaggttttaata

SEQ ID NO: 1189585 - DNA, 15 bp, Homo sapiens
gtgagaggttttaat

SEQ ID NO: 1189586 - DNA, 15 bp, Homo sapiens
ggtgagaggttttaa

SEQ ID NO: 1189587 - DNA, 15 bp, Homo sapiens
aggtgagaggtttta

SEQ ID NO: 1189588 - DNA, 15 bp, Homo sapiens
aaggtgagaggtttt

SEQ ID NO: 1189589 - DNA, 15 bp, Homo sapiens
gaaggtgagaggttt

SEQ ID NO: 1189590 - DNA, 15 bp, Homo sapiens
agaaggtgagaggtt

SEQ ID NO: 1189591 - DNA, 15 bp, Homo sapiens
gagaaggtgagaggt

SEQ ID NO: 1189592 - DNA, 15 bp, Homo sapiens
ggagaaggtgagagg

SEQ ID NO: 1189593 - DNA, 15 bp, Homo sapiens
tggagaaggtgagag

SEQ ID NO: 1189594 - DNA, 15 bp, Homo sapiens
ctggagaaggtgaga

SEQ ID NO: 1189595 - DNA, 15 bp, Homo sapiens
cctggagaaggtgag

SEQ ID NO: 1189596 - DNA, 15 bp, Homo sapiens
acctggagaaggtga

SEQ ID NO: 1189597 - DNA, 15 bp, Homo sapiens
gacctggagaaggtg

SEQ ID NO: 1189598 - DNA, 15 bp, Homo sapiens
agacctggagaaggt

SEQ ID NO: 1189599 - DNA, 15 bp, Homo sapiens
gagacctggagaagg

SEQ ID NO: 1189600 - DNA, 15 bp, Homo sapiens
tgagacctggagaag

SEQ ID NO: 1189601 - DNA, 15 bp, Homo sapiens
ctgagacctggagaa

SEQ ID NO: 1189602 - DNA, 15 bp, Homo sapiens
cctgagacctggaga

SEQ ID NO: 1189603 - DNA, 15 bp, Homo sapiens
acctgagacctggag

SEQ ID NO: 1189604 - DNA, 15 bp, Homo sapiens
gacctgagacctgga

SEQ ID NO: 1189605 - DNA, 15 bp, Homo sapiens
agacctgagacctgg

SEQ ID NO: 1189606 - DNA, 15 bp, Homo sapiens
cagacctgagacctg

SEQ ID NO: 1189607 - DNA, 15 bp, Homo sapiens
acagacctgagacct

SEQ ID NO: 1189608 - DNA, 15 bp, Homo sapiens
cacagacctgagacc

SEQ ID NO: 1189609 - DNA, 15 bp, Homo sapiens
acacagacctgagac

SEQ ID NO: 1189610 - DNA, 15 bp, Homo sapiens
tacacagacctgaga

SEQ ID NO: 1189611 - DNA, 15 bp, Homo sapiens
ttacacagacctgag

SEQ ID NO: 1189612 - DNA, 15 bp, Homo sapiens
attacacagacctga

SEQ ID NO: 1189613 - DNA, 15 bp, Homo sapiens
gattacacagacctg

SEQ ID NO: 1189614 - DNA, 15 bp, Homo sapiens
agattacacagacct

SEQ ID NO: 1189615 - DNA, 15 bp, Homo sapiens
gagattacacagacc

SEQ ID NO: 1189616 - DNA, 15 bp, Homo sapiens
tgagattacacagac

SEQ ID NO: 1189617 - DNA, 15 bp, Homo sapiens
ttgagattacacaga

SEQ ID NO: 1189618 - DNA, 15 bp, Homo sapiens
tttgagattacacag

SEQ ID NO: 1189619 - DNA, 15 bp, Homo sapiens
atttgagattacaca

SEQ ID NO: 1189620 - DNA, 15 bp, Homo sapiens
catttgagattacac

SEQ ID NO: 1189621 - DNA, 15 bp, Homo sapiens
acatttgagattaca

SEQ ID NO: 1189622 - DNA, 15 bp, Homo sapiens
cacatttgagattac

SEQ ID NO: 1189623 - DNA, 15 bp, Homo sapiens
gcacatttgagatta

SEQ ID NO: 1189624 - DNA, 15 bp, Homo sapiens
agcacatttgagatt

SEQ ID NO: 1189625 - DNA, 15 bp, Homo sapiens
aagcacatttgagat

SEQ ID NO: 1189626 - DNA, 15 bp, Homo sapiens
aaagcacatttgaga

SEQ ID NO: 1189627 - DNA, 15 bp, Homo sapiens
taaagcacatttgag

SEQ ID NO: 1189628 - DNA, 15 bp, Homo sapiens
ctaaagcacatttga

SEQ ID NO: 1189629 - DNA, 15 bp, Homo sapiens
gctaaagcacatttg

SEQ ID NO: 1189630 - DNA, 15 bp, Homo sapiens
agctaaagcacattt

SEQ ID NO: 1189631 - DNA, 15 bp, Homo sapiens
gagctaaagcacatt

SEQ ID NO: 1189632 - DNA, 15 bp, Homo sapiens
ggagctaaagcacat

SEQ ID NO: 1189633 - DNA, 15 bp, Homo sapiens
aggagctaaagcaca

SEQ ID NO: 1189634 - DNA, 15 bp, Homo sapiens
gaggagctaaagcac

SEQ ID NO: 1189635 - DNA, 15 bp, Homo sapiens
tgaggagctaaagca

SEQ ID NO: 1189636 - DNA, 15 bp, Homo sapiens
gtgaggagctaaagc

SEQ ID NO: 1189637 - DNA, 15 bp, Homo sapiens
tgtgaggagctaaag

SEQ ID NO: 1189638 - DNA, 15 bp, Homo sapiens
ttgtgaggagctaaa

SEQ ID NO: 1189639 - DNA, 15 bp, Homo sapiens
attgtgaggagctaa

SEQ ID NO: 1189640 - DNA, 15 bp, Homo sapiens
tattgtgaggagcta

SEQ ID NO: 1189641 - DNA, 15 bp, Homo sapiens
atattgtgaggagct

SEQ ID NO: 1189642 - DNA, 15 bp, Homo sapiens
aatattgtgaggagc

SEQ ID NO: 1189643 - DNA, 15 bp, Homo sapiens
caatattgtgaggag

SEQ ID NO: 1189644 - DNA, 15 bp, Homo sapiens
acaatattgtgagga

SEQ ID NO: 1189645 - DNA, 15 bp, Homo sapiens
tacaatattgtgagg

SEQ ID NO: 1189646 - DNA, 15 bp, Homo sapiens
ttacaatattgtgag

SEQ ID NO: 1189647 - DNA, 15 bp, Homo sapiens
gttacaatattgtga

SEQ ID NO: 1189648 - DNA, 15 bp, Homo sapiens
agttacaatattgtg

SEQ ID NO: 1189649 - DNA, 15 bp, Homo sapiens
cagttacaatattgt

SEQ ID NO: 1189650 - DNA, 15 bp, Homo sapiens
acagttacaatattg

SEQ ID NO: 1189651 - DNA, 15 bp, Homo sapiens
cacagttacaatatt

SEQ ID NO: 1189652 - DNA, 15 bp, Homo sapiens
acacagttacaatat

SEQ ID NO: 1189653 - DNA, 15 bp, Homo sapiens
cacacagttacaata

SEQ ID NO: 1189654 - DNA, 15 bp, Homo sapiens
ccacacagttacaat

SEQ ID NO: 1189655 - DNA, 15 bp, Homo sapiens
cccacacagttacaa

SEQ ID NO: 1189656 - DNA, 15 bp, Homo sapiens
acccacacagttaca

SEQ ID NO: 1189657 - DNA, 15 bp, Homo sapiens
cacccacacagttac

SEQ ID NO: 1189658 - DNA, 15 bp, Homo sapiens
acacccacacagtta

SEQ ID NO: 1189659 - DNA, 15 bp, Homo sapiens
aacacccacacagtt

SEQ ID NO: 1189660 - DNA, 15 bp, Homo sapiens
gaacacccacacagt

SEQ ID NO: 1189661 - DNA, 15 bp, Homo sapiens
tgaacacccacacag

SEQ ID NO: 1189662 - DNA, 15 bp, Homo sapiens
atgaacacccacaca

SEQ ID NO: 1189663 - DNA, 15 bp, Homo sapiens
aatgaacacccacac

SEQ ID NO: 1189664 - DNA, 15 bp, Homo sapiens
taatgaacacccaca

SEQ ID NO: 1189665 - DNA, 15 bp, Homo sapiens
gtaatgaacacccac

SEQ ID NO: 1189666 - DNA, 15 bp, Homo sapiens
ggtaatgaacaccca

SEQ ID NO: 1189667 - DNA, 15 bp, Homo sapiens
aggtaatgaacaccc

SEQ ID NO: 1189668 - DNA, 15 bp, Homo sapiens
aaggtaatgaacacc

SEQ ID NO: 1189669 - DNA, 15 bp, Homo sapiens
taaggtaatgaacac

SEQ ID NO: 1189670 - DNA, 15 bp, Homo sapiens
ctaaggtaatgaaca

SEQ ID NO: 1189671 - DNA, 15 bp, Homo sapiens
gctaaggtaatgaac

SEQ ID NO: 1189672 - DNA, 15 bp, Homo sapiens
ggctaaggtaatgaa

SEQ ID NO: 1189673 - DNA, 15 bp, Homo sapiens
tggctaaggtaatga

SEQ ID NO: 1189674 - DNA, 15 bp, Homo sapiens
ctggctaaggtaatg

SEQ ID NO: 1189675 - DNA, 15 bp, Homo sapiens
tctggctaaggtaat

SEQ ID NO: 1189676 - DNA, 15 bp, Homo sapiens
ttctggctaaggtaa

SEQ ID NO: 1189677 - DNA, 15 bp, Homo sapiens
cttctggctaaggta

SEQ ID NO: 1189678 - DNA, 15 bp, Homo sapiens
tcttctggctaaggt

SEQ ID NO: 1189679 - DNA, 15 bp, Homo sapiens
gtcttctggctaagg

SEQ ID NO: 1189680 - DNA, 15 bp, Homo sapiens
tgtcttctggctaag

SEQ ID NO: 1189681 - DNA, 15 bp, Homo sapiens
ctgtcttctggctaa

SEQ ID NO: 1189682 - DNA, 15 bp, Homo sapiens
actgtcttctggcta

SEQ ID NO: 1189683 - DNA, 15 bp, Homo sapiens
aactgtcttctggct

SEQ ID NO: 1189684 - DNA, 15 bp, Homo sapiens
aaactgtcttctggc

SEQ ID NO: 1189685 - DNA, 15 bp, Homo sapiens
taaactgtcttctgg

SEQ ID NO: 1189686 - DNA, 15 bp, Homo sapiens
gtaaactgtcttctg

SEQ ID NO: 1189687 - DNA, 15 bp, Homo sapiens
tgtaaactgtcttct

SEQ ID NO: 1189688 - DNA, 15 bp, Homo sapiens
ctgtaaactgtcttc

SEQ ID NO: 1189689 - DNA, 15 bp, Homo sapiens
tctgtaaactgtctt

SEQ ID NO: 1189690 - DNA, 15 bp, Homo sapiens
atctgtaaactgtct

SEQ ID NO: 1189691 - DNA, 15 bp, Homo sapiens
aatctgtaaactgtc

SEQ ID NO: 1189692 - DNA, 15 bp, Homo sapiens
gaatctgtaaactgt

SEQ ID NO: 1189693 - DNA, 15 bp, Homo sapiens
ggaatctgtaaactg

SEQ ID NO: 1189694 - DNA, 15 bp, Homo sapiens
tggaatctgtaaact

SEQ ID NO: 1189695 - DNA, 15 bp, Homo sapiens
ctggaatctgtaaac

SEQ ID NO: 1189696 - DNA, 15 bp, Homo sapiens
cctggaatctgtaaa

SEQ ID NO: 1189697 - DNA, 15 bp, Homo sapiens
acctggaatctgtaa

SEQ ID NO: 1189698 - DNA, 15 bp, Homo sapiens
gacctggaatctgta

SEQ ID NO: 1189699 - DNA, 15 bp, Homo sapiens
agacctggaatctgt

SEQ ID NO: 1189700 - DNA, 15 bp, Homo sapiens
gagacctggaatctg

SEQ ID NO: 1189701 - DNA, 15 bp, Homo sapiens
tgagacctggaatct

SEQ ID NO: 1189702 - DNA, 15 bp, Homo sapiens
atgagacctggaatc

SEQ ID NO: 1189703 - DNA, 15 bp, Homo sapiens
catgagacctggaat

SEQ ID NO: 1189704 - DNA, 15 bp, Homo sapiens
ccatgagacctggaa

SEQ ID NO: 1189705 - DNA, 15 bp, Homo sapiens
tccatgagacctgga

SEQ ID NO: 1189706 - DNA, 15 bp, Homo sapiens
ctccatgagacctgg

SEQ ID NO: 1189707 - DNA, 15 bp, Homo sapiens
tctccatgagacctg

SEQ ID NO: 1189708 - DNA, 15 bp, Homo sapiens
ctctccatgagacct

SEQ ID NO: 1189709 - DNA, 15 bp, Homo sapiens
tctctccatgagacc

SEQ ID NO: 1189710 - DNA, 15 bp, Homo sapiens
ttctctccatgagac

SEQ ID NO: 1189711 - DNA, 15 bp, Homo sapiens
gttctctccatgaga

SEQ ID NO: 1189712 - DNA, 15 bp, Homo sapiens
agttctctccatgag

SEQ ID NO: 1189713 - DNA, 15 bp, Homo sapiens
aagttctctccatga

SEQ ID NO: 1189714 - DNA, 15 bp, Homo sapiens
aaagttctctccatg

SEQ ID NO: 1189715 - DNA, 15 bp, Homo sapiens
aaaagttctctccat

SEQ ID NO: 1189716 - DNA, 15 bp, Homo sapiens
caaaagttctctcca

SEQ ID NO: 1189717 - DNA, 15 bp, Homo sapiens
acaaaagttctctcc

SEQ ID NO: 1189718 - DNA, 15 bp, Homo sapiens
aacaaaagttctctc

SEQ ID NO: 1189719 - DNA, 15 bp, Homo sapiens
aaacaaaagttctct

SEQ ID NO: 1189720 - DNA, 15 bp, Homo sapiens
aaaacaaaagttctc

SEQ ID NO: 1189721 - DNA, 15 bp, Homo sapiens
aaaaacaaaagttct

SEQ ID NO: 1189722 - DNA, 15 bp, Homo sapiens
caaaaacaaaagttc

SEQ ID NO: 1189723 - DNA, 15 bp, Homo sapiens
ccaaaaacaaaagtt

SEQ ID NO: 1189724 - DNA, 15 bp, Homo sapiens
accaaaaacaaaagt

SEQ ID NO: 1189725 - DNA, 15 bp, Homo sapiens
aaccaaaaacaaaag

SEQ ID NO: 1189726 - DNA, 15 bp, Homo sapiens
taaccaaaaacaaaa

SEQ ID NO: 1189727 - DNA, 15 bp, Homo sapiens
ataaccaaaaacaaa

SEQ ID NO: 1189728 - DNA, 15 bp, Homo sapiens
cataaccaaaaacaa

SEQ ID NO: 1189729 - DNA, 15 bp, Homo sapiens
tcataaccaaaaaca

SEQ ID NO: 1189730 - DNA, 15 bp, Homo sapiens
ttcataaccaaaaac

SEQ ID NO: 1189731 - DNA, 15 bp, Homo sapiens
gttcataaccaaaaa

SEQ ID NO: 1189732 - DNA, 15 bp, Homo sapiens
ggttcataaccaaaa

SEQ ID NO: 1189733 - DNA, 15 bp, Homo sapiens
aggttcataaccaaa

SEQ ID NO: 1189734 - DNA, 15 bp, Homo sapiens
gaggttcataaccaa

SEQ ID NO: 1189735 - DNA, 15 bp, Homo sapiens
tgaggttcataacca

SEQ ID NO: 1189736 - DNA, 15 bp, Homo sapiens
gtgaggttcataacc

SEQ ID NO: 1189737 - DNA, 15 bp, Homo sapiens
agtgaggttcataac

SEQ ID NO: 1189738 - DNA, 15 bp, Homo sapiens
cagtgaggttcataa

SEQ ID NO: 1189739 - DNA, 15 bp, Homo sapiens
acagtgaggttcata

SEQ ID NO: 1189740 - DNA, 15 bp, Homo sapiens
tacagtgaggttcat

SEQ ID NO: 1189741 - DNA, 15 bp, Homo sapiens
atacagtgaggttca

SEQ ID NO: 1189742 - DNA, 15 bp, Homo sapiens
tatacagtgaggttc

SEQ ID NO: 1189743 - DNA, 15 bp, Homo sapiens
gtatacagtgaggtt

SEQ ID NO: 1189744 - DNA, 15 bp, Homo sapiens
ggtatacagtgaggt

SEQ ID NO: 1189745 - DNA, 15 bp, Homo sapiens
tggtatacagtgagg

SEQ ID NO: 1189746 - DNA, 15 bp, Homo sapiens
ttggtatacagtgag

SEQ ID NO: 1189747 - DNA, 15 bp, Homo sapiens
attggtatacagtga

SEQ ID NO: 1189748 - DNA, 15 bp, Homo sapiens
tattggtatacagtg

SEQ ID NO: 1189749 - DNA, 15 bp, Homo sapiens
ttattggtatacagt

SEQ ID NO: 1189750 - DNA, 15 bp, Homo sapiens
attattggtatacag

SEQ ID NO: 1189751 - DNA, 15 bp, Homo sapiens
aattattggtataca

SEQ ID NO: 1189752 - DNA, 15 bp, Homo sapiens
taattattggtatac

SEQ ID NO: 1189753 - DNA, 15 bp, Homo sapiens
ataattattggtata

SEQ ID NO: 1189754 - DNA, 15 bp, Homo sapiens
gataattattggtat

SEQ ID NO: 1189755 - DNA, 15 bp, Homo sapiens
ggataattattggta

SEQ ID NO: 1189756 - DNA, 15 bp, Homo sapiens
tggataattattggt

SEQ ID NO: 1189757 - DNA, 15 bp, Homo sapiens
atggataattattgg

SEQ ID NO: 1189758 - DNA, 15 bp, Homo sapiens
aatggataattattg

SEQ ID NO: 1189759 - DNA, 15 bp, Homo sapiens
taatggataattatt

SEQ ID NO: 1189760 - DNA, 15 bp, Homo sapiens
gtaatggataattat

SEQ ID NO: 1189761 - DNA, 15 bp, Homo sapiens
tgtaatggataatta

SEQ ID NO: 1189762 - DNA, 15 bp, Homo sapiens
atgtaatggataatt

SEQ ID NO: 1189763 - DNA, 15 bp, Homo sapiens
gatgtaatggataat

SEQ ID NO: 1189764 - DNA, 15 bp, Homo sapiens
ggatgtaatggataa

SEQ ID NO: 1189765 - DNA, 15 bp, Homo sapiens
aggatgtaatggata

SEQ ID NO: 1189766 - DNA, 15 bp, Homo sapiens
aaggatgtaatggat

SEQ ID NO: 1189767 - DNA, 15 bp, Homo sapiens
gaaggatgtaatgga

SEQ ID NO: 1189768 - DNA, 15 bp, Homo sapiens
agaaggatgtaatgg

SEQ ID NO: 1189769 - DNA, 15 bp, Homo sapiens
cagaaggatgtaatg

SEQ ID NO: 1189770 - DNA, 15 bp, Homo sapiens
acagaaggatgtaat

SEQ ID NO: 1189771 - DNA, 15 bp, Homo sapiens
tacagaaggatgtaa

SEQ ID NO: 1189772 - DNA, 15 bp, Homo sapiens
ctacagaaggatgta

SEQ ID NO: 1189773 - DNA, 15 bp, Homo sapiens
tctacagaaggatgt

SEQ ID NO: 1189774 - DNA, 15 bp, Homo sapiens
ctctacagaaggatg

SEQ ID NO: 1189775 - DNA, 15 bp, Homo sapiens
cctctacagaaggat

SEQ ID NO: 1189776 - DNA, 15 bp, Homo sapiens
ccctctacagaagga

SEQ ID NO: 1189777 - DNA, 15 bp, Homo sapiens
gccctctacagaagg

SEQ ID NO: 1189778 - DNA, 15 bp, Homo sapiens
agccctctacagaag

SEQ ID NO: 1189779 - DNA, 15 bp, Homo sapiens
gagccctctacagaa

SEQ ID NO: 1189780 - DNA, 15 bp, Homo sapiens
agagccctctacaga

SEQ ID NO: 1189781 - DNA, 15 bp, Homo sapiens
gagagccctctacag

SEQ ID NO: 1189782 - DNA, 15 bp, Homo sapiens
agagagccctctaca

SEQ ID NO: 1189783 - DNA, 15 bp, Homo sapiens
cagagagccctctac

SEQ ID NO: 1189784 - DNA, 15 bp, Homo sapiens
ccagagagccctcta

SEQ ID NO: 1189785 - DNA, 15 bp, Homo sapiens
gccagagagccctct

SEQ ID NO: 1189786 - DNA, 15 bp, Homo sapiens
agccagagagccctc

SEQ ID NO: 1189787 - DNA, 15 bp, Homo sapiens
tagccagagagccct

SEQ ID NO: 1189788 - DNA, 15 bp, Homo sapiens
ctagccagagagccc

SEQ ID NO: 1189789 - DNA, 15 bp, Homo sapiens
tctagccagagagcc

SEQ ID NO: 1189790 - DNA, 15 bp, Homo sapiens
ctctagccagagagc

SEQ ID NO: 1189791 - DNA, 15 bp, Homo sapiens
tctctagccagagag

SEQ ID NO: 1189792 - DNA, 15 bp, Homo sapiens
atctctagccagaga

SEQ ID NO: 1189793 - DNA, 15 bp, Homo sapiens
tatctctagccagag

SEQ ID NO: 1189794 - DNA, 15 bp, Homo sapiens
ttatctctagccaga

SEQ ID NO: 1189795 - DNA, 15 bp, Homo sapiens
tttatctctagccag

SEQ ID NO: 1189796 - DNA, 15 bp, Homo sapiens
ttttatctctagcca

SEQ ID NO: 1189797 - DNA, 15 bp, Homo sapiens
gttttatctctagcc

SEQ ID NO: 1189798 - DNA, 15 bp, Homo sapiens
ggttttatctctagc

SEQ ID NO: 1189799 - DNA, 15 bp, Homo sapiens
tggttttatctctag

SEQ ID NO: 1189800 - DNA, 15 bp, Homo sapiens
ttggttttatctcta

SEQ ID NO: 1189801 - DNA, 15 bp, Homo sapiens
tttggttttatctct

SEQ ID NO: 1189802 - DNA, 15 bp, Homo sapiens
ttttggttttatctc

SEQ ID NO: 1189803 - DNA, 15 bp, Homo sapiens
tttttggttttatct

SEQ ID NO: 1189804 - DNA, 15 bp, Homo sapiens
ttttttggttttatc

SEQ ID NO: 1189805 - DNA, 15 bp, Homo sapiens
tttttttggttttat

SEQ ID NO: 1189806 - DNA, 15 bp, Homo sapiens
ctttttttggtttta

SEQ ID NO: 1189807 - DNA, 15 bp, Homo sapiens
tctttttttggtttt

SEQ ID NO: 1189808 - DNA, 15 bp, Homo sapiens
ttctttttttggttt

SEQ ID NO: 1189809 - DNA, 15 bp, Homo sapiens
cttctttttttggtt

SEQ ID NO: 1189810 - DNA, 15 bp, Homo sapiens
acttctttttttggt

SEQ ID NO: 1189811 - DNA, 15 bp, Homo sapiens
tacttctttttttgg

SEQ ID NO: 1189812 - DNA, 15 bp, Homo sapiens
gtacttctttttttg

SEQ ID NO: 1189813 - DNA, 15 bp, Homo sapiens
ggtacttcttttttt

SEQ ID NO: 1189814 - DNA, 15 bp, Homo sapiens
aggtacttctttttt

SEQ ID NO: 1189815 - DNA, 15 bp, Homo sapiens
gaggtacttcttttt

SEQ ID NO: 1189816 - DNA, 15 bp, Homo sapiens
tgaggtacttctttt

SEQ ID NO: 1189817 - DNA, 15 bp, Homo sapiens
ctgaggtacttcttt

SEQ ID NO: 1189818 - DNA, 15 bp, Homo sapiens
cctgaggtacttctt

SEQ ID NO: 1189819 - DNA, 15 bp, Homo sapiens
acctgaggtacttct

SEQ ID NO: 1189820 - DNA, 15 bp, Homo sapiens
aacctgaggtacttc

SEQ ID NO: 1189821 - DNA, 15 bp, Homo sapiens
aaacctgaggtactt

SEQ ID NO: 1189822 - DNA, 15 bp, Homo sapiens
taaacctgaggtact

SEQ ID NO: 1189823 - DNA, 15 bp, Homo sapiens
ataaacctgaggtac

SEQ ID NO: 1189824 - DNA, 15 bp, Homo sapiens
cataaacctgaggta

SEQ ID NO: 1189825 - DNA, 15 bp, Homo sapiens
gcataaacctgaggt

SEQ ID NO: 1189826 - DNA, 15 bp, Homo sapiens
tgcataaacctgagg

SEQ ID NO: 1189827 - DNA, 15 bp, Homo sapiens
atgcataaacctgag

SEQ ID NO: 1189828 - DNA, 15 bp, Homo sapiens
tatgcataaacctga

SEQ ID NO: 1189829 - DNA, 15 bp, Homo sapiens
atatgcataaacctg

SEQ ID NO: 1189830 - DNA, 15 bp, Homo sapiens
tatatgcataaacct

SEQ ID NO: 1189831 - DNA, 15 bp, Homo sapiens
ttatatgcataaacc

SEQ ID NO: 1189832 - DNA, 15 bp, Homo sapiens
tttatatgcataaac

SEQ ID NO: 1189833 - DNA, 15 bp, Homo sapiens
atttatatgcataaa

SEQ ID NO: 1189834 - DNA, 15 bp, Homo sapiens
catttatatgcataa

SEQ ID NO: 1189835 - DNA, 15 bp, Homo sapiens
gcatttatatgcata

SEQ ID NO: 1189836 - DNA, 15 bp, Homo sapiens
ggcatttatatgcat

SEQ ID NO: 1189837 - DNA, 15 bp, Homo sapiens
tggcatttatatgca

SEQ ID NO: 1189838 - DNA, 15 bp, Homo sapiens
ctggcatttatatgc

SEQ ID NO: 1189839 - DNA, 15 bp, Homo sapiens
actggcatttatatg

SEQ ID NO: 1189840 - DNA, 15 bp, Homo sapiens
aactggcatttatat

SEQ ID NO: 1189841 - DNA, 15 bp, Homo sapiens
gaactggcatttata

SEQ ID NO: 1189842 - DNA, 15 bp, Homo sapiens
ggaactggcatttat

SEQ ID NO: 1189843 - DNA, 15 bp, Homo sapiens
aggaactggcattta

SEQ ID NO: 1189844 - DNA, 15 bp, Homo sapiens
gaggaactggcattt

SEQ ID NO: 1189845 - DNA, 15 bp, Homo sapiens
ggaggaactggcatt

SEQ ID NO: 1189846 - DNA, 15 bp, Homo sapiens
aggaggaactggcat

SEQ ID NO: 1189847 - DNA, 15 bp, Homo sapiens
aaggaggaactggca

SEQ ID NO: 1189848 - DNA, 15 bp, Homo sapiens
caaggaggaactggc

SEQ ID NO: 1189849 - DNA, 15 bp, Homo sapiens
tcaaggaggaactgg

SEQ ID NO: 1189850 - DNA, 15 bp, Homo sapiens
atcaaggaggaactg

SEQ ID NO: 1189851 - DNA, 15 bp, Homo sapiens
aatcaaggaggaact

SEQ ID NO: 1189852 - DNA, 15 bp, Homo sapiens
aaatcaaggaggaac

SEQ ID NO: 1189853 - DNA, 15 bp, Homo sapiens
aaaatcaaggaggaa

SEQ ID NO: 1189854 - DNA, 15 bp, Homo sapiens
taaaatcaaggagga

SEQ ID NO: 1189855 - DNA, 15 bp, Homo sapiens
ataaaatcaaggagg

SEQ ID NO: 1189856 - DNA, 15 bp, Homo sapiens
aataaaatcaaggag

SEQ ID NO: 1189857 - DNA, 15 bp, Homo sapiens
aaataaaatcaagga

SEQ ID NO: 1189858 - DNA, 15 bp, Homo sapiens
gaaataaaatcaagg

SEQ ID NO: 1189859 - DNA, 15 bp, Homo sapiens
tgaaataaaatcaag

SEQ ID NO: 1189860 - DNA, 15 bp, Homo sapiens
ttgaaataaaatcaa

SEQ ID NO: 1189861 - DNA, 15 bp, Homo sapiens
tttgaaataaaatca

SEQ ID NO: 1189862 - DNA, 15 bp, Homo sapiens
ttttgaaataaaatc

SEQ ID NO: 1189863 - DNA, 15 bp, Homo sapiens
gttttgaaataaaat

SEQ ID NO: 1189864 - DNA, 15 bp, Homo sapiens
agttttgaaataaaa

SEQ ID NO: 1189865 - DNA, 15 bp, Homo sapiens
gagttttgaaataaa

SEQ ID NO: 1189866 - DNA, 15 bp, Homo sapiens
ggagttttgaaataa

SEQ ID NO: 1189867 - DNA, 15 bp, Homo sapiens
aggagttttgaaata

SEQ ID NO: 1189868 - DNA, 15 bp, Homo sapiens
caggagttttgaaat

SEQ ID NO: 1189869 - DNA, 15 bp, Homo sapiens
acaggagttttgaaa

SEQ ID NO: 1189870 - DNA, 15 bp, Homo sapiens
gacaggagttttgaa

SEQ ID NO: 1189871 - DNA, 15 bp, Homo sapiens
agacaggagttttga

SEQ ID NO: 1189872 - DNA, 15 bp, Homo sapiens
tagacaggagttttg

SEQ ID NO: 1189873 - DNA, 15 bp, Homo sapiens
gtagacaggagtttt

SEQ ID NO: 1189874 - DNA, 15 bp, Homo sapiens
tgtagacaggagttt

SEQ ID NO: 1189875 - DNA, 15 bp, Homo sapiens
atgtagacaggagtt

SEQ ID NO: 1189876 - DNA, 15 bp, Homo sapiens
tatgtagacaggagt

SEQ ID NO: 1189877 - DNA, 15 bp, Homo sapiens
gtatgtagacaggag

SEQ ID NO: 1189878 - DNA, 15 bp, Homo sapiens
agtatgtagacagga

SEQ ID NO: 1189879 - DNA, 15 bp, Homo sapiens
aagtatgtagacagg

SEQ ID NO: 1189880 - DNA, 15 bp, Homo sapiens
aaagtatgtagacag

SEQ ID NO: 1189881 - DNA, 15 bp, Homo sapiens
caaagtatgtagaca

SEQ ID NO: 1189882 - DNA, 15 bp, Homo sapiens
gcaaagtatgtagac

SEQ ID NO: 1189883 - DNA, 15 bp, Homo sapiens
tgcaaagtatgtaga

SEQ ID NO: 1189884 - DNA, 15 bp, Homo sapiens
ttgcaaagtatgtag

SEQ ID NO: 1189885 - DNA, 15 bp, Homo sapiens
attgcaaagtatgta

SEQ ID NO: 1189886 - DNA, 15 bp, Homo sapiens
aattgcaaagtatgt

SEQ ID NO: 1189887 - DNA, 15 bp, Homo sapiens
aaattgcaaagtatg

SEQ ID NO: 1189888 - DNA, 15 bp, Homo sapiens
taaattgcaaagtat

SEQ ID NO: 1189889 - DNA, 15 bp, Homo sapiens
ttaaattgcaaagta

SEQ ID NO: 1189890 - DNA, 15 bp, Homo sapiens
tttaaattgcaaagt

SEQ ID NO: 1189891 - DNA, 15 bp, Homo sapiens
atttaaattgcaaag

SEQ ID NO: 1189892 - DNA, 15 bp, Homo sapiens
tatttaaattgcaaa

SEQ ID NO: 1189893 - DNA, 15 bp, Homo sapiens
gtatttaaattgcaa

SEQ ID NO: 1189894 - DNA, 15 bp, Homo sapiens
tgtatttaaattgca

SEQ ID NO: 1189895 - DNA, 15 bp, Homo sapiens
atgtatttaaattgc

SEQ ID NO: 1189896 - DNA, 15 bp, Homo sapiens
aatgtatttaaattg

SEQ ID NO: 1189897 - DNA, 15 bp, Homo sapiens
gaatgtatttaaatt

SEQ ID NO: 1189898 - DNA, 15 bp, Homo sapiens
tgaatgtatttaaat

SEQ ID NO: 1189899 - DNA, 15 bp, Homo sapiens
ttgaatgtatttaaa

SEQ ID NO: 1189900 - DNA, 15 bp, Homo sapiens
cttgaatgtatttaa

SEQ ID NO: 1189901 - DNA, 15 bp, Homo sapiens
ccttgaatgtattta

SEQ ID NO: 1189902 - DNA, 15 bp, Homo sapiens
tccttgaatgtattt

SEQ ID NO: 1189903 - DNA, 15 bp, Homo sapiens
atccttgaatgtatt

SEQ ID NO: 1189904 - DNA, 15 bp, Homo sapiens
tatccttgaatgtat

SEQ ID NO: 1189905 - DNA, 15 bp, Homo sapiens
ttatccttgaatgta

SEQ ID NO: 1189906 - DNA, 15 bp, Homo sapiens
tttatccttgaatgt

SEQ ID NO: 1189907 - DNA, 15 bp, Homo sapiens
ctttatccttgaatg

SEQ ID NO: 1189908 - DNA, 15 bp, Homo sapiens
actttatccttgaat

SEQ ID NO: 1189909 - DNA, 15 bp, Homo sapiens
tactttatccttgaa

SEQ ID NO: 1189910 - DNA, 15 bp, Homo sapiens
ttactttatccttga

SEQ ID NO: 1189911 - DNA, 15 bp, Homo sapiens
attactttatccttg

SEQ ID NO: 1189912 - DNA, 15 bp, Homo sapiens
tattactttatcctt

SEQ ID NO: 1189913 - DNA, 15 bp, Homo sapiens
ttattactttatcct

SEQ ID NO: 1189914 - DNA, 15 bp, Homo sapiens
gttattactttatcc

SEQ ID NO: 1189915 - DNA, 15 bp, Homo sapiens
agttattactttatc

SEQ ID NO: 1189916 - DNA, 15 bp, Homo sapiens
cagttattactttat

SEQ ID NO: 1189917 - DNA, 15 bp, Homo sapiens
acagttattacttta

SEQ ID NO: 1189918 - DNA, 15 bp, Homo sapiens
tacagttattacttt

SEQ ID NO: 1189919 - DNA, 15 bp, Homo sapiens
ctacagttattactt

SEQ ID NO: 1189920 - DNA, 15 bp, Homo sapiens
cctacagttattact

SEQ ID NO: 1189921 - DNA, 15 bp, Homo sapiens
tcctacagttattac

SEQ ID NO: 1189922 - DNA, 15 bp, Homo sapiens
ttcctacagttatta

SEQ ID NO: 1189923 - DNA, 15 bp, Homo sapiens
tttcctacagttatt

SEQ ID NO: 1189924 - DNA, 15 bp, Homo sapiens
ttttcctacagttat

SEQ ID NO: 1189925 - DNA, 15 bp, Homo sapiens
cttttcctacagtta

SEQ ID NO: 1189926 - DNA, 15 bp, Homo sapiens
acttttcctacagtt

SEQ ID NO: 1189927 - DNA, 15 bp, Homo sapiens
tacttttcctacagt

SEQ ID NO: 1189928 - DNA, 15 bp, Homo sapiens
atacttttcctacag

SEQ ID NO: 1189929 - DNA, 15 bp, Homo sapiens
aatacttttcctaca

SEQ ID NO: 1189930 - DNA, 15 bp, Homo sapiens
taatacttttcctac

SEQ ID NO: 1189931 - DNA, 15 bp, Homo sapiens
ataatacttttccta

SEQ ID NO: 1189932 - DNA, 15 bp, Homo sapiens
tataatacttttcct

SEQ ID NO: 1189933 - DNA, 15 bp, Homo sapiens
ttataatacttttcc

SEQ ID NO: 1189934 - DNA, 15 bp, Homo sapiens
attataatacttttc

SEQ ID NO: 1189935 - DNA, 15 bp, Homo sapiens
tattataatactttt

SEQ ID NO: 1189936 - DNA, 15 bp, Homo sapiens
atattataatacttt

SEQ ID NO: 1189937 - DNA, 15 bp, Homo sapiens
tatattataatactt

SEQ ID NO: 1189938 - DNA, 15 bp, Homo sapiens
ttatattataatact

SEQ ID NO: 1189939 - DNA, 15 bp, Homo sapiens
attatattataatac

SEQ ID NO: 1189940 - DNA, 15 bp, Homo sapiens
cattatattataata

SEQ ID NO: 1189941 - DNA, 15 bp, Homo sapiens
tcattatattataat

SEQ ID NO: 1189942 - DNA, 15 bp, Homo sapiens
gtcattatattataa

SEQ ID NO: 1189943 - DNA, 15 bp, Homo sapiens
agtcattatattata

SEQ ID NO: 1189944 - DNA, 15 bp, Homo sapiens
aagtcattatattat

SEQ ID NO: 1189945 - DNA, 15 bp, Homo sapiens
taagtcattatatta

SEQ ID NO: 1189946 - DNA, 15 bp, Homo sapiens
ctaagtcattatatt

SEQ ID NO: 1189947 - DNA, 15 bp, Homo sapiens
actaagtcattatat

SEQ ID NO: 1189948 - DNA, 15 bp, Homo sapiens
aactaagtcattata

SEQ ID NO: 1189949 - DNA, 15 bp, Homo sapiens
gaactaagtcattat

SEQ ID NO: 1189950 - DNA, 15 bp, Homo sapiens
agaactaagtcatta

SEQ ID NO: 1189951 - DNA, 15 bp, Homo sapiens
cagaactaagtcatt

SEQ ID NO: 1189952 - DNA, 15 bp, Homo sapiens
gcagaactaagtcat

SEQ ID NO: 1189953 - DNA, 15 bp, Homo sapiens
tgcagaactaagtca

SEQ ID NO: 1189954 - DNA, 15 bp, Homo sapiens
gtgcagaactaagtc

SEQ ID NO: 1189955 - DNA, 15 bp, Homo sapiens
tgtgcagaactaagt

SEQ ID NO: 1189956 - DNA, 15 bp, Homo sapiens
atgtgcagaactaag

SEQ ID NO: 1189957 - DNA, 15 bp, Homo sapiens
gatgtgcagaactaa

SEQ ID NO: 1189958 - DNA, 15 bp, Homo sapiens
tgatgtgcagaacta

SEQ ID NO: 1189959 - DNA, 15 bp, Homo sapiens
gtgatgtgcagaact

SEQ ID NO: 1189960 - DNA, 15 bp, Homo sapiens
tgtgatgtgcagaac

SEQ ID NO: 1189961 - DNA, 15 bp, Homo sapiens
ttgtgatgtgcagaa

SEQ ID NO: 1189962 - DNA, 15 bp, Homo sapiens
cttgtgatgtgcaga

SEQ ID NO: 1189963 - DNA, 15 bp, Homo sapiens
ccttgtgatgtgcag

SEQ ID NO: 1189964 - DNA, 15 bp, Homo sapiens
cccttgtgatgtgca

SEQ ID NO: 1189965 - DNA, 15 bp, Homo sapiens
ccccttgtgatgtgc

SEQ ID NO: 1189966 - DNA, 15 bp, Homo sapiens
cccccttgtgatgtg

SEQ ID NO: 1189967 - DNA, 15 bp, Homo sapiens
acccccttgtgatgt

SEQ ID NO: 1189968 - DNA, 15 bp, Homo sapiens
gacccccttgtgatg

SEQ ID NO: 1189969 - DNA, 15 bp, Homo sapiens
ggacccccttgtgat

SEQ ID NO: 1189970 - DNA, 15 bp, Homo sapiens
gggacccccttgtga

SEQ ID NO: 1189971 - DNA, 15 bp, Homo sapiens
agggacccccttgtg

SEQ ID NO: 1189972 - DNA, 15 bp, Homo sapiens
gagggacccccttgt

SEQ ID NO: 1189973 - DNA, 15 bp, Homo sapiens
tgagggacccccttg

SEQ ID NO: 1189974 - DNA, 15 bp, Homo sapiens
atgagggaccccctt

SEQ ID NO: 1189975 - DNA, 15 bp, Homo sapiens
tatgagggaccccct

SEQ ID NO: 1189976 - DNA, 15 bp, Homo sapiens
gtatgagggaccccc

SEQ ID NO: 1189977 - DNA, 15 bp, Homo sapiens
agtatgagggacccc

SEQ ID NO: 1189978 - DNA, 15 bp, Homo sapiens
gagtatgagggaccc

SEQ ID NO: 1189979 - DNA, 15 bp, Homo sapiens
tgagtatgagggacc

SEQ ID NO: 1189980 - DNA, 15 bp, Homo sapiens
atgagtatgagggac

SEQ ID NO: 1189981 - DNA, 15 bp, Homo sapiens
aatgagtatgaggga

SEQ ID NO: 1189982 - DNA, 15 bp, Homo sapiens
gaatgagtatgaggg

SEQ ID NO: 1189983 - DNA, 15 bp, Homo sapiens
tgaatgagtatgagg

SEQ ID NO: 1189984 - DNA, 15 bp, Homo sapiens
atgaatgagtatgag

SEQ ID NO: 1189985 - DNA, 15 bp, Homo sapiens
aatgaatgagtatga

SEQ ID NO: 1189986 - DNA, 15 bp, Homo sapiens
gaatgaatgagtatg

SEQ ID NO: 1189987 - DNA, 15 bp, Homo sapiens
tgaatgaatgagtat

SEQ ID NO: 1189988 - DNA, 15 bp, Homo sapiens
atgaatgaatgagta

SEQ ID NO: 1189989 - DNA, 15 bp, Homo sapiens
aatgaatgaatgagt

SEQ ID NO: 1189990 - DNA, 15 bp, Homo sapiens
aaatgaatgaatgag

SEQ ID NO: 1189991 - DNA, 15 bp, Homo sapiens
gaaatgaatgaatga

SEQ ID NO: 1189992 - DNA, 15 bp, Homo sapiens
tgaaatgaatgaatg

SEQ ID NO: 1189993 - DNA, 15 bp, Homo sapiens
gtgaaatgaatgaat

SEQ ID NO: 1189994 - DNA, 15 bp, Homo sapiens
agtgaaatgaatgaa

SEQ ID NO: 1189995 - DNA, 15 bp, Homo sapiens
gagtgaaatgaatga

SEQ ID NO: 1189996 - DNA, 15 bp, Homo sapiens
tgagtgaaatgaatg

SEQ ID NO: 1189997 - DNA, 15 bp, Homo sapiens
atgagtgaaatgaat

SEQ ID NO: 1189998 - DNA, 15 bp, Homo sapiens
aatgagtgaaatgaa

SEQ ID NO: 1189999 - DNA, 15 bp, Homo sapiens
aaatgagtgaaatga

SEQ ID NO: 1190000 - DNA, 15 bp, Homo sapiens
aaaatgagtgaaatg

SEQ ID NO: 1190001 - DNA, 15 bp, Homo sapiens
taaaatgagtgaaat

SEQ ID NO: 1190002 - DNA, 15 bp, Homo sapiens
gtaaaatgagtgaaa

SEQ ID NO: 1190003 - DNA, 15 bp, Homo sapiens
tgtaaaatgagtgaa

SEQ ID NO: 1190004 - DNA, 15 bp, Homo sapiens
ctgtaaaatgagtga

SEQ ID NO: 1190005 - DNA, 15 bp, Homo sapiens
tctgtaaaatgagtg

SEQ ID NO: 1190006 - DNA, 15 bp, Homo sapiens
atctgtaaaatgagt

SEQ ID NO: 1190007 - DNA, 15 bp, Homo sapiens
tatctgtaaaatgag

SEQ ID NO: 1190008 - DNA, 15 bp, Homo sapiens
atatctgtaaaatga

SEQ ID NO: 1190009 - DNA, 15 bp, Homo sapiens
aatatctgtaaaatg

SEQ ID NO: 1190010 - DNA, 15 bp, Homo sapiens
aaatatctgtaaaat

SEQ ID NO: 1190011 - DNA, 15 bp, Homo sapiens
taaatatctgtaaaa

SEQ ID NO: 1190012 - DNA, 15 bp, Homo sapiens
ataaatatctgtaaa

SEQ ID NO: 1190013 - DNA, 15 bp, Homo sapiens
aataaatatctgtaa

SEQ ID NO: 1190014 - DNA, 15 bp, Homo sapiens
caataaatatctgta

SEQ ID NO: 1190015 - DNA, 15 bp, Homo sapiens
tcaataaatatctgt

SEQ ID NO: 1190016 - DNA, 15 bp, Homo sapiens
ctcaataaatatctg

SEQ ID NO: 1190017 - DNA, 15 bp, Homo sapiens
gctcaataaatatct

SEQ ID NO: 1190018 - DNA, 15 bp, Homo sapiens
tgctcaataaatatc

SEQ ID NO: 1190019 - DNA, 15 bp, Homo sapiens
ggtgctcaataaata

SEQ ID NO: 1190020 - DNA, 15 bp, Homo sapiens
caggtgctcaataaa

SEQ ID NO: 1190021 - DNA, 15 bp, Homo sapiens
gcaggtgctcaataa

SEQ ID NO: 1190022 - DNA, 15 bp, Homo sapiens
tgcaggtgctcaata

SEQ ID NO: 1190023 - DNA, 15 bp, Homo sapiens
ttgcaggtgctcaat

SEQ ID NO: 1190024 - DNA, 15 bp, Homo sapiens
attgcaggtgctcaa

SEQ ID NO: 1190025 - DNA, 15 bp, Homo sapiens
tattgcaggtgctca

SEQ ID NO: 1190026 - DNA, 15 bp, Homo sapiens
ttattgcaggtgctc

SEQ ID NO: 1190027 - DNA, 15 bp, Homo sapiens
gttattgcaggtgct

SEQ ID NO: 1190028 - DNA, 15 bp, Homo sapiens
ggttattgcaggtgc

SEQ ID NO: 1190029 - DNA, 15 bp, Homo sapiens
aggttattgcaggtg

SEQ ID NO: 1190030 - DNA, 15 bp, Homo sapiens
caggttattgcaggt

SEQ ID NO: 1190031 - DNA, 15 bp, Homo sapiens
gcaggttattgcagg

SEQ ID NO: 1190032 - DNA, 15 bp, Homo sapiens
tgcaggttattgcag

SEQ ID NO: 1190033 - DNA, 15 bp, Homo sapiens
gtgcaggttattgca

SEQ ID NO: 1190034 - DNA, 15 bp, Homo sapiens
tgtgcaggttattgc

SEQ ID NO: 1190035 - DNA, 15 bp, Homo sapiens
gtgtgcaggttattg

SEQ ID NO: 1190036 - DNA, 15 bp, Homo sapiens
agtgtgcaggttatt

SEQ ID NO: 1190037 - DNA, 15 bp, Homo sapiens
cagtgtgcaggttat

SEQ ID NO: 1190038 - DNA, 15 bp, Homo sapiens
gcagtgtgcaggtta

SEQ ID NO: 1190039 - DNA, 15 bp, Homo sapiens
agcagtgtgcaggtt

SEQ ID NO: 1190040 - DNA, 15 bp, Homo sapiens
gagcagtgtgcaggt

SEQ ID NO: 1190041 - DNA, 15 bp, Homo sapiens
agagcagtgtgcagg

SEQ ID NO: 1190042 - DNA, 15 bp, Homo sapiens
tagagcagtgtgcag

SEQ ID NO: 1190043 - DNA, 15 bp, Homo sapiens
ctagagcagtgtgca

SEQ ID NO: 1190044 - DNA, 15 bp, Homo sapiens
tctagagcagtgtgc

SEQ ID NO: 1190045 - DNA, 15 bp, Homo sapiens
gtctagagcagtgtg

SEQ ID NO: 1190046 - DNA, 15 bp, Homo sapiens
tgtctagagcagtgt

SEQ ID NO: 1190047 - DNA, 15 bp, Homo sapiens
gtgtctagagcagtg

SEQ ID NO: 1190048 - DNA, 15 bp, Homo sapiens
agtgtctagagcagt

SEQ ID NO: 1190049 - DNA, 15 bp, Homo sapiens
cagtgtctagagcag

SEQ ID NO: 1190050 - DNA, 15 bp, Homo sapiens
ccagtgtctagagca

SEQ ID NO: 1190051 - DNA, 15 bp, Homo sapiens
cccagtgtctagagc

SEQ ID NO: 1190052 - DNA, 15 bp, Homo sapiens
tcccagtgtctagag

SEQ ID NO: 1190053 - DNA, 15 bp, Homo sapiens
gtcccagtgtctaga

SEQ ID NO: 1190054 - DNA, 15 bp, Homo sapiens
agtcccagtgtctag

SEQ ID NO: 1190055 - DNA, 15 bp, Homo sapiens
tagtcccagtgtcta

SEQ ID NO: 1190056 - DNA, 15 bp, Homo sapiens
atagtcccagtgtct

SEQ ID NO: 1190057 - DNA, 15 bp, Homo sapiens
tatagtcccagtgtc

SEQ ID NO: 1190058 - DNA, 15 bp, Homo sapiens
ttatagtcccagtgt

SEQ ID NO: 1190059 - DNA, 15 bp, Homo sapiens
gttatagtcccagtg

SEQ ID NO: 1190060 - DNA, 15 bp, Homo sapiens
tgttatagtcccagt

SEQ ID NO: 1190061 - DNA, 15 bp, Homo sapiens
ctgttatagtcccag

SEQ ID NO: 1190062 - DNA, 15 bp, Homo sapiens
actgttatagtccca

SEQ ID NO: 1190063 - DNA, 15 bp, Homo sapiens
tactgttatagtccc

SEQ ID NO: 1190064 - DNA, 15 bp, Homo sapiens
ttactgttatagtcc

SEQ ID NO: 1190065 - DNA, 15 bp, Homo sapiens
tttactgttatagtc

SEQ ID NO: 1190066 - DNA, 15 bp, Homo sapiens
gtttactgttatagt

SEQ ID NO: 1190067 - DNA, 15 bp, Homo sapiens
tgtttactgttatag

SEQ ID NO: 1190068 - DNA, 15 bp, Homo sapiens
ctgtttactgttata

SEQ ID NO: 1190069 - DNA, 15 bp, Homo sapiens
tctgtttactgttat

SEQ ID NO: 1190070 - DNA, 15 bp, Homo sapiens
gtctgtttactgtta

SEQ ID NO: 1190071 - DNA, 15 bp, Homo sapiens
tgtctgtttactgtt

SEQ ID NO: 1190072 - DNA, 15 bp, Homo sapiens
ctgtctgtttactgt

SEQ ID NO: 1190073 - DNA, 15 bp, Homo sapiens
tctgtctgtttactg

SEQ ID NO: 1190074 - DNA, 15 bp, Homo sapiens
atctgtctgtttact

SEQ ID NO: 1190075 - DNA, 15 bp, Homo sapiens
tatctgtctgtttac

SEQ ID NO: 1190076 - DNA, 15 bp, Homo sapiens
gtatctgtctgttta

SEQ ID NO: 1190077 - DNA, 15 bp, Homo sapiens
tgtatctgtctgttt

SEQ ID NO: 1190078 - DNA, 15 bp, Homo sapiens
atgtatctgtctgtt

SEQ ID NO: 1190079 - DNA, 15 bp, Homo sapiens
gatgtatctgtctgt

SEQ ID NO: 1190080 - DNA, 15 bp, Homo sapiens
agatgtatctgtctg

SEQ ID NO: 1190081 - DNA, 15 bp, Homo sapiens
gagatgtatctgtct

SEQ ID NO: 1190082 - DNA, 15 bp, Homo sapiens
agagatgtatctgtc

SEQ ID NO: 1190083 - DNA, 15 bp, Homo sapiens
cagagatgtatctgt

SEQ ID NO: 1190084 - DNA, 15 bp, Homo sapiens
ccagagatgtatctg

SEQ ID NO: 1190085 - DNA, 15 bp, Homo sapiens
accagagatgtatct

SEQ ID NO: 1190086 - DNA, 15 bp, Homo sapiens
gaccagagatgtatc

SEQ ID NO: 1190087 - DNA, 15 bp, Homo sapiens
agaccagagatgtat

SEQ ID NO: 1190088 - DNA, 15 bp, Homo sapiens
gagaccagagatgta

SEQ ID NO: 1190089 - DNA, 15 bp, Homo sapiens
tgagaccagagatgt

SEQ ID NO: 1190090 - DNA, 15 bp, Homo sapiens
gtgagaccagagatg

SEQ ID NO: 1190091 - DNA, 15 bp, Homo sapiens
tgtgagaccagagat

SEQ ID NO: 1190092 - DNA, 15 bp, Homo sapiens
ctgtgagaccagaga

SEQ ID NO: 1190093 - DNA, 15 bp, Homo sapiens
cctgtgagaccagag

SEQ ID NO: 1190094 - DNA, 15 bp, Homo sapiens
ccctgtgagaccaga

SEQ ID NO: 1190095 - DNA, 15 bp, Homo sapiens
gccctgtgagaccag

SEQ ID NO: 1190096 - DNA, 15 bp, Homo sapiens
agccctgtgagacca

SEQ ID NO: 1190097 - DNA, 15 bp, Homo sapiens
aagccctgtgagacc

SEQ ID NO: 1190098 - DNA, 15 bp, Homo sapiens
gaagccctgtgagac

SEQ ID NO: 1190099 - DNA, 15 bp, Homo sapiens
agaagccctgtgaga

SEQ ID NO: 1190100 - DNA, 15 bp, Homo sapiens
tagaagccctgtgag

SEQ ID NO: 1190101 - DNA, 15 bp, Homo sapiens
atagaagccctgtga

SEQ ID NO: 1190102 - DNA, 15 bp, Homo sapiens
aatagaagccctgtg

SEQ ID NO: 1190103 - DNA, 15 bp, Homo sapiens
gaatagaagccctgt

SEQ ID NO: 1190104 - DNA, 15 bp, Homo sapiens
agaatagaagccctg

SEQ ID NO: 1190105 - DNA, 15 bp, Homo sapiens
tagaatagaagccct

SEQ ID NO: 1190106 - DNA, 15 bp, Homo sapiens
ttagaatagaagccc

SEQ ID NO: 1190107 - DNA, 15 bp, Homo sapiens
cttagaatagaagcc

SEQ ID NO: 1190108 - DNA, 15 bp, Homo sapiens
gcttagaatagaagc

SEQ ID NO: 1190109 - DNA, 15 bp, Homo sapiens
tgcttagaatagaag

SEQ ID NO: 1190110 - DNA, 15 bp, Homo sapiens
ttgcttagaatagaa

SEQ ID NO: 1190111 - DNA, 15 bp, Homo sapiens
tttgcttagaataga

SEQ ID NO: 1190112 - DNA, 15 bp, Homo sapiens
ttttgcttagaatag

SEQ ID NO: 1190113 - DNA, 15 bp, Homo sapiens
gttttgcttagaata

SEQ ID NO: 1190114 - DNA, 15 bp, Homo sapiens
agttttgcttagaat

SEQ ID NO: 1190115 - DNA, 15 bp, Homo sapiens
gagttttgcttagaa

SEQ ID NO: 1190116 - DNA, 15 bp, Homo sapiens
tgagttttgcttaga

SEQ ID NO: 1190117 - DNA, 15 bp, Homo sapiens
ttgagttttgcttag

SEQ ID NO: 1190118 - DNA, 15 bp, Homo sapiens
attgagttttgctta

SEQ ID NO: 1190119 - DNA, 15 bp, Homo sapiens
tattgagttttgctt

SEQ ID NO: 1190120 - DNA, 15 bp, Homo sapiens
atattgagttttgct

SEQ ID NO: 1190121 - DNA, 15 bp, Homo sapiens
gatattgagttttgc

SEQ ID NO: 1190122 - DNA, 15 bp, Homo sapiens
ggatattgagttttg

SEQ ID NO: 1190123 - DNA, 15 bp, Homo sapiens
tggatattgagtttt

SEQ ID NO: 1190124 - DNA, 15 bp, Homo sapiens
ctggatattgagttt

SEQ ID NO: 1190125 - DNA, 15 bp, Homo sapiens
cctggatattgagtt

SEQ ID NO: 1190126 - DNA, 15 bp, Homo sapiens
gcctggatattgagt

SEQ ID NO: 1190127 - DNA, 15 bp, Homo sapiens
ggcctggatattgag

SEQ ID NO: 1190128 - DNA, 15 bp, Homo sapiens
cggcctggatattga

SEQ ID NO: 1190129 - DNA, 15 bp, Homo sapiens
ccggcctggatattg

SEQ ID NO: 1190130 - DNA, 15 bp, Homo sapiens
cccggcctggatatt

SEQ ID NO: 1190131 - DNA, 15 bp, Homo sapiens
acccggcctggatat

SEQ ID NO: 1190132 - DNA, 15 bp, Homo sapiens
cacccggcctggata

SEQ ID NO: 1190133 - DNA, 15 bp, Homo sapiens
gcacccggcctggat

SEQ ID NO: 1190134 - DNA, 15 bp, Homo sapiens
tgcacccggcctgga

SEQ ID NO: 1190135 - DNA, 15 bp, Homo sapiens
ctgcacccggcctgg

SEQ ID NO: 1190136 - DNA, 15 bp, Homo sapiens
actgcacccggcctg

SEQ ID NO: 1190137 - DNA, 15 bp, Homo sapiens
cactgcacccggcct

SEQ ID NO: 1190138 - DNA, 15 bp, Homo sapiens
cattccaggcatgag

SEQ ID NO: 1190139 - DNA, 15 bp, Homo sapiens
gcattccaggcatga

SEQ ID NO: 1190140 - DNA, 15 bp, Homo sapiens
ggcattccaggcatg

SEQ ID NO: 1190141 - DNA, 15 bp, Homo sapiens
tggcattccaggcat

SEQ ID NO: 1190142 - DNA, 15 bp, Homo sapiens
ctggcattccaggca

SEQ ID NO: 1190143 - DNA, 15 bp, Homo sapiens
gctggcattccaggc

SEQ ID NO: 1190144 - DNA, 15 bp, Homo sapiens
tgctggcattccagg

SEQ ID NO: 1190145 - DNA, 15 bp, Homo sapiens
gtgctggcattccag

SEQ ID NO: 1190146 - DNA, 15 bp, Homo sapiens
agtgctggcattcca

SEQ ID NO: 1190147 - DNA, 15 bp, Homo sapiens
aagtgctggcattcc

SEQ ID NO: 1190148 - DNA, 15 bp, Homo sapiens
aaagtgctggcattc

SEQ ID NO: 1190149 - DNA, 15 bp, Homo sapiens
ggccttggtctccca

SEQ ID NO: 1190150 - DNA, 15 bp, Homo sapiens
tggccttggtctccc

SEQ ID NO: 1190151 - DNA, 15 bp, Homo sapiens
ctggccttggtctcc

SEQ ID NO: 1190152 - DNA, 15 bp, Homo sapiens
cctggccttggtctc

SEQ ID NO: 1190153 - DNA, 15 bp, Homo sapiens
gcctggccttggtct

SEQ ID NO: 1190154 - DNA, 15 bp, Homo sapiens
tgcctggccttggtc

SEQ ID NO: 1190155 - DNA, 15 bp, Homo sapiens
ctgcctggccttggt

SEQ ID NO: 1190156 - DNA, 15 bp, Homo sapiens
tctgcctggccttgg

SEQ ID NO: 1190157 - DNA, 15 bp, Homo sapiens
atctgcctggccttg

SEQ ID NO: 1190158 - DNA, 15 bp, Homo sapiens
gatctgcctggcctt

SEQ ID NO: 1190159 - DNA, 15 bp, Homo sapiens
tgatctgcctggcct

SEQ ID NO: 1190160 - DNA, 15 bp, Homo sapiens
gtgatctgcctggcc

SEQ ID NO: 1190161 - DNA, 15 bp, Homo sapiens
ggtgatctgcctggc

SEQ ID NO: 1190162 - DNA, 15 bp, Homo sapiens
aggtgatctgcctgg

SEQ ID NO: 1190163 - DNA, 15 bp, Homo sapiens
ggctcaggtgatctg

SEQ ID NO: 1190164 - DNA, 15 bp, Homo sapiens
gggctcaggtgatct

SEQ ID NO: 1190165 - DNA, 15 bp, Homo sapiens
tgggctcaggtgatc

SEQ ID NO: 1190166 - DNA, 15 bp, Homo sapiens
gtgggctcaggtgat

SEQ ID NO: 1190167 - DNA, 15 bp, Homo sapiens
agtgggctcaggtga

SEQ ID NO: 1190168 - DNA, 15 bp, Homo sapiens
tagtgggctcaggtg

SEQ ID NO: 1190169 - DNA, 15 bp, Homo sapiens
ctagtgggctcaggt

SEQ ID NO: 1190170 - DNA, 15 bp, Homo sapiens
actagtgggctcagg

SEQ ID NO: 1190171 - DNA, 15 bp, Homo sapiens
aactagtgggctcag

SEQ ID NO: 1190172 - DNA, 15 bp, Homo sapiens
caactagtgggctca

SEQ ID NO: 1190173 - DNA, 15 bp, Homo sapiens
tcaactagtgggctc

SEQ ID NO: 1190174 - DNA, 15 bp, Homo sapiens
ttcaactagtgggct

SEQ ID NO: 1190175 - DNA, 15 bp, Homo sapiens
cttcaactagtgggc

SEQ ID NO: 1190176 - DNA, 15 bp, Homo sapiens
tcttcaactagtggg

SEQ ID NO: 1190177 - DNA, 15 bp, Homo sapiens
gtcttcaactagtgg

SEQ ID NO: 1190178 - DNA, 15 bp, Homo sapiens
ggtcttcaactagtg

SEQ ID NO: 1190179 - DNA, 15 bp, Homo sapiens
tggtcttcaactagt

SEQ ID NO: 1190180 - DNA, 15 bp, Homo sapiens
ctggtcttcaactag

SEQ ID NO: 1190181 - DNA, 15 bp, Homo sapiens
gctggtcttcaacta

SEQ ID NO: 1190182 - DNA, 15 bp, Homo sapiens
gctatattgcccagg

SEQ ID NO: 1190183 - DNA, 15 bp, Homo sapiens
tgctatattgcccag

SEQ ID NO: 1190184 - DNA, 15 bp, Homo sapiens
ttgctatattgccca

SEQ ID NO: 1190185 - DNA, 15 bp, Homo sapiens
tttgctatattgccc

SEQ ID NO: 1190186 - DNA, 15 bp, Homo sapiens
ttttgctatattgcc

SEQ ID NO: 1190187 - DNA, 15 bp, Homo sapiens
gttttgctatattgc

SEQ ID NO: 1190188 - DNA, 15 bp, Homo sapiens
ggttttgctatattg

SEQ ID NO: 1190189 - DNA, 15 bp, Homo sapiens
gggttttgctatatt

SEQ ID NO: 1190190 - DNA, 15 bp, Homo sapiens
ggggttttgctatat

SEQ ID NO: 1190191 - DNA, 15 bp, Homo sapiens
cggggttttgctata

SEQ ID NO: 1190192 - DNA, 15 bp, Homo sapiens
tttttttgtagagac

SEQ ID NO: 1190193 - DNA, 15 bp, Homo sapiens
tttttttttgtagag

SEQ ID NO: 1190194 - DNA, 15 bp, Homo sapiens
acaattttttttttt

SEQ ID NO: 1190195 - DNA, 15 bp, Homo sapiens
gacaatttttttttt

SEQ ID NO: 1190196 - DNA, 15 bp, Homo sapiens
tgacaattttttttt

SEQ ID NO: 1190197 - DNA, 15 bp, Homo sapiens
ttgacaatttttttt

SEQ ID NO: 1190198 - DNA, 15 bp, Homo sapiens
cttgacaattttttt

SEQ ID NO: 1190199 - DNA, 15 bp, Homo sapiens
ccttgacaatttttt

SEQ ID NO: 1190200 - DNA, 15 bp, Homo sapiens
gccttgacaattttt

SEQ ID NO: 1190201 - DNA, 15 bp, Homo sapiens
tgccttgacaatttt

SEQ ID NO: 1190202 - DNA, 15 bp, Homo sapiens
atgccttgacaattt

SEQ ID NO: 1190203 - DNA, 15 bp, Homo sapiens
catgccttgacaatt

SEQ ID NO: 1190204 - DNA, 15 bp, Homo sapiens
ccatgccttgacaat

SEQ ID NO: 1190205 - DNA, 15 bp, Homo sapiens
accatgccttgacaa

SEQ ID NO: 1190206 - DNA, 15 bp, Homo sapiens
caccatgccttgaca

SEQ ID NO: 1190207 - DNA, 15 bp, Homo sapiens
ccaccatgccttgac

SEQ ID NO: 1190208 - DNA, 15 bp, Homo sapiens
gccaccatgccttga

SEQ ID NO: 1190209 - DNA, 15 bp, Homo sapiens
tgccaccatgccttg

SEQ ID NO: 1190210 - DNA, 15 bp, Homo sapiens
atgccaccatgcctt

SEQ ID NO: 1190211 - DNA, 15 bp, Homo sapiens
catgccaccatgcct

SEQ ID NO: 1190212 - DNA, 15 bp, Homo sapiens
cacaggcgcatgcca

SEQ ID NO: 1190213 - DNA, 15 bp, Homo sapiens
ccacaggcgcatgcc

SEQ ID NO: 1190214 - DNA, 15 bp, Homo sapiens
accacaggcgcatgc

SEQ ID NO: 1190215 - DNA, 15 bp, Homo sapiens
gaccacaggcgcatg

SEQ ID NO: 1190216 - DNA, 15 bp, Homo sapiens
ggaccacaggcgcat

SEQ ID NO: 1190217 - DNA, 15 bp, Homo sapiens
gggaccacaggcgca

SEQ ID NO: 1190218 - DNA, 15 bp, Homo sapiens
tgggaccacaggcgc

SEQ ID NO: 1190219 - DNA, 15 bp, Homo sapiens
ctgggaccacaggcg

SEQ ID NO: 1190220 - DNA, 15 bp, Homo sapiens
aagtagctgggacca

SEQ ID NO: 1190221 - DNA, 15 bp, Homo sapiens
taagtagctgggacc

SEQ ID NO: 1190222 - DNA, 15 bp, Homo sapiens
ctaagtagctgggac

SEQ ID NO: 1190223 - DNA, 15 bp, Homo sapiens
acaatcctcctgcct

SEQ ID NO: 1190224 - DNA, 15 bp, Homo sapiens
cacaatcctcctgcc

SEQ ID NO: 1190225 - DNA, 15 bp, Homo sapiens
acacaatcctcctgc

SEQ ID NO: 1190226 - DNA, 15 bp, Homo sapiens
tacacaatcctcctg

SEQ ID NO: 1190227 - DNA, 15 bp, Homo sapiens
ttacacaatcctcct

SEQ ID NO: 1190228 - DNA, 15 bp, Homo sapiens
cttacacaatcctcc

SEQ ID NO: 1190229 - DNA, 15 bp, Homo sapiens
gcttacacaatcctc

SEQ ID NO: 1190230 - DNA, 15 bp, Homo sapiens
ggcttacacaatcct

SEQ ID NO: 1190231 - DNA, 15 bp, Homo sapiens
aggcttacacaatcc

SEQ ID NO: 1190232 - DNA, 15 bp, Homo sapiens
caggcttacacaatc

SEQ ID NO: 1190233 - DNA, 15 bp, Homo sapiens
ccaggcttacacaat

SEQ ID NO: 1190234 - DNA, 15 bp, Homo sapiens
cccaggcttacacaa

SEQ ID NO: 1190235 - DNA, 15 bp, Homo sapiens
tcccaggcttacaca

SEQ ID NO: 1190236 - DNA, 15 bp, Homo sapiens
ctcccaggcttacac

SEQ ID NO: 1190237 - DNA, 15 bp, Homo sapiens
cctcccaggcttaca

SEQ ID NO: 1190238 - DNA, 15 bp, Homo sapiens
gcctcccaggcttac

SEQ ID NO: 1190239 - DNA, 15 bp, Homo sapiens
tgcctcccaggctta

SEQ ID NO: 1190240 - DNA, 15 bp, Homo sapiens
ctgcctcccaggctt

SEQ ID NO: 1190241 - DNA, 15 bp, Homo sapiens
tctgcctcccaggct

SEQ ID NO: 1190242 - DNA, 15 bp, Homo sapiens
ctctgcctcccaggc

SEQ ID NO: 1190243 - DNA, 15 bp, Homo sapiens
aggtcactgcaacct

SEQ ID NO: 1190244 - DNA, 15 bp, Homo sapiens
caggtcactgcaacc

SEQ ID NO: 1190245 - DNA, 15 bp, Homo sapiens
tcaggtcactgcaac

SEQ ID NO: 1190246 - DNA, 15 bp, Homo sapiens
ctcaggtcactgcaa

SEQ ID NO: 1190247 - DNA, 15 bp, Homo sapiens
tctcaggtcactgca

SEQ ID NO: 1190248 - DNA, 15 bp, Homo sapiens
atctcaggtcactgc

SEQ ID NO: 1190249 - DNA, 15 bp, Homo sapiens
catctcaggtcactg

SEQ ID NO: 1190250 - DNA, 15 bp, Homo sapiens
ccatctcaggtcact

SEQ ID NO: 1190251 - DNA, 15 bp, Homo sapiens
gccatctcaggtcac

SEQ ID NO: 1190252 - DNA, 15 bp, Homo sapiens
tgccatctcaggtca

SEQ ID NO: 1190253 - DNA, 15 bp, Homo sapiens
gtgccatctcaggtc

SEQ ID NO: 1190254 - DNA, 15 bp, Homo sapiens
ggtgccatctcaggt

SEQ ID NO: 1190255 - DNA, 15 bp, Homo sapiens
tggtgccatctcagg

SEQ ID NO: 1190256 - DNA, 15 bp, Homo sapiens
gtggtgccatctcag

SEQ ID NO: 1190257 - DNA, 15 bp, Homo sapiens
ggtggtgccatctca

SEQ ID NO: 1190258 - DNA, 15 bp, Homo sapiens
tggtggtgccatctc

SEQ ID NO: 1190259 - DNA, 15 bp, Homo sapiens
gtggtggtgccatct

SEQ ID NO: 1190260 - DNA, 15 bp, Homo sapiens
tgtggtggtgccatc

SEQ ID NO: 1190261 - DNA, 15 bp, Homo sapiens
gtgtggtggtgccat

SEQ ID NO: 1190262 - DNA, 15 bp, Homo sapiens
agtgtggtggtgcca

SEQ ID NO: 1190263 - DNA, 15 bp, Homo sapiens
gagtgtggtggtgcc

SEQ ID NO: 1190264 - DNA, 15 bp, Homo sapiens
ggagtgtggtggtgc

SEQ ID NO: 1190265 - DNA, 15 bp, Homo sapiens
tggagtgtggtggtg

SEQ ID NO: 1190266 - DNA, 15 bp, Homo sapiens
ctggagtgtggtggt

SEQ ID NO: 1190267 - DNA, 15 bp, Homo sapiens
ggctggagtgtggtg

SEQ ID NO: 1190268 - DNA, 15 bp, Homo sapiens
aggctggagtgtggt

SEQ ID NO: 1190269 - DNA, 15 bp, Homo sapiens
caggctggagtgtgg

SEQ ID NO: 1190270 - DNA, 15 bp, Homo sapiens
ccaggctggagtgtg

SEQ ID NO: 1190271 - DNA, 15 bp, Homo sapiens
ggacagggtctcact

SEQ ID NO: 1190272 - DNA, 15 bp, Homo sapiens
tggacagggtctcac

SEQ ID NO: 1190273 - DNA, 15 bp, Homo sapiens
ttggacagggtctca

SEQ ID NO: 1190274 - DNA, 15 bp, Homo sapiens
tttggacagggtctc

SEQ ID NO: 1190275 - DNA, 15 bp, Homo sapiens
ttttggacagggtct

SEQ ID NO: 1190276 - DNA, 15 bp, Homo sapiens
tttttggacagggtc

SEQ ID NO: 1190277 - DNA, 15 bp, Homo sapiens
ttttttggacagggt

SEQ ID NO: 1190278 - DNA, 15 bp, Homo sapiens
tttttttggacaggg

SEQ ID NO: 1190279 - DNA, 15 bp, Homo sapiens
ttttttttggacagg

SEQ ID NO: 1190280 - DNA, 15 bp, Homo sapiens
tttttttttggacag

SEQ ID NO: 1190281 - DNA, 15 bp, Homo sapiens
ttttttttttggaca

SEQ ID NO: 1190282 - DNA, 15 bp, Homo sapiens
tttttttttttggac

SEQ ID NO: 1190283 - DNA, 15 bp, Homo sapiens
gttttttttttttgg

SEQ ID NO: 1190284 - DNA, 15 bp, Homo sapiens
ggttttttttttttg

SEQ ID NO: 1190285 - DNA, 15 bp, Homo sapiens
gtgagggtttttttt

SEQ ID NO: 1190286 - DNA, 15 bp, Homo sapiens
agtgagggttttttt

SEQ ID NO: 1190287 - DNA, 15 bp, Homo sapiens
tagtgagggtttttt

SEQ ID NO: 1190288 - DNA, 15 bp, Homo sapiens
atagtgagggttttt

SEQ ID NO: 1190289 - DNA, 15 bp, Homo sapiens
gatagtgagggtttt

SEQ ID NO: 1190290 - DNA, 15 bp, Homo sapiens
ggatagtgagggttt

SEQ ID NO: 1190291 - DNA, 15 bp, Homo sapiens
aggatagtgagggtt

SEQ ID NO: 1190292 - DNA, 15 bp, Homo sapiens
aaggatagtgagggt

SEQ ID NO: 1190293 - DNA, 15 bp, Homo sapiens
taaggatagtgaggg

SEQ ID NO: 1190294 - DNA, 15 bp, Homo sapiens
ttaaggatagtgagg

SEQ ID NO: 1190295 - DNA, 15 bp, Homo sapiens
cttaaggatagtgag

SEQ ID NO: 1190296 - DNA, 15 bp, Homo sapiens
tcttaaggatagtga

SEQ ID NO: 1190297 - DNA, 15 bp, Homo sapiens
atcttaaggatagtg

SEQ ID NO: 1190298 - DNA, 15 bp, Homo sapiens
tatcttaaggatagt

SEQ ID NO: 1190299 - DNA, 15 bp, Homo sapiens
ttatcttaaggatag

SEQ ID NO: 1190300 - DNA, 15 bp, Homo sapiens
gttatcttaaggata

SEQ ID NO: 1190301 - DNA, 15 bp, Homo sapiens
tgttatcttaaggat

SEQ ID NO: 1190302 - DNA, 15 bp, Homo sapiens
atgttatcttaagga

SEQ ID NO: 1190303 - DNA, 15 bp, Homo sapiens
gatgttatcttaagg

SEQ ID NO: 1190304 - DNA, 15 bp, Homo sapiens
tgatgttatcttaag

SEQ ID NO: 1190305 - DNA, 15 bp, Homo sapiens
atgatgttatcttaa

SEQ ID NO: 1190306 - DNA, 15 bp, Homo sapiens
aatgatgttatctta

SEQ ID NO: 1190307 - DNA, 15 bp, Homo sapiens
caatgatgttatctt

SEQ ID NO: 1190308 - DNA, 15 bp, Homo sapiens
gcaatgatgttatct

SEQ ID NO: 1190309 - DNA, 15 bp, Homo sapiens
agcaatgatgttatc

SEQ ID NO: 1190310 - DNA, 15 bp, Homo sapiens
aagcaatgatgttat

SEQ ID NO: 1190311 - DNA, 15 bp, Homo sapiens
caagcaatgatgtta

SEQ ID NO: 1190312 - DNA, 15 bp, Homo sapiens
acaagcaatgatgtt

SEQ ID NO: 1190313 - DNA, 15 bp, Homo sapiens
aacaagcaatgatgt

SEQ ID NO: 1190314 - DNA, 15 bp, Homo sapiens
caacaagcaatgatg

SEQ ID NO: 1190315 - DNA, 15 bp, Homo sapiens
tcaacaagcaatgat

SEQ ID NO: 1190316 - DNA, 15 bp, Homo sapiens
atcaacaagcaatga

SEQ ID NO: 1190317 - DNA, 15 bp, Homo sapiens
catcaacaagcaatg

SEQ ID NO: 1190318 - DNA, 15 bp, Homo sapiens
tcatcaacaagcaat

SEQ ID NO: 1190319 - DNA, 15 bp, Homo sapiens
ctcatcaacaagcaa

SEQ ID NO: 1190320 - DNA, 15 bp, Homo sapiens
actcatcaacaagca

SEQ ID NO: 1190321 - DNA, 15 bp, Homo sapiens
cactcatcaacaagc

SEQ ID NO: 1190322 - DNA, 15 bp, Homo sapiens
tcactcatcaacaag

SEQ ID NO: 1190323 - DNA, 15 bp, Homo sapiens
ttcactcatcaacaa

SEQ ID NO: 1190324 - DNA, 15 bp, Homo sapiens
attcactcatcaaca

SEQ ID NO: 1190325 - DNA, 15 bp, Homo sapiens
cattcactcatcaac

SEQ ID NO: 1190326 - DNA, 15 bp, Homo sapiens
acattcactcatcaa

SEQ ID NO: 1190327 - DNA, 15 bp, Homo sapiens
aacattcactcatca

SEQ ID NO: 1190328 - DNA, 15 bp, Homo sapiens
taacattcactcatc

SEQ ID NO: 1190329 - DNA, 15 bp, Homo sapiens
ttaacattcactcat

SEQ ID NO: 1190330 - DNA, 15 bp, Homo sapiens
gttaacattcactca

SEQ ID NO: 1190331 - DNA, 15 bp, Homo sapiens
tgttaacattcactc

SEQ ID NO: 1190332 - DNA, 15 bp, Homo sapiens
gtgttaacattcact

SEQ ID NO: 1190333 - DNA, 15 bp, Homo sapiens
ggtgttaacattcac

SEQ ID NO: 1190334 - DNA, 15 bp, Homo sapiens
tggtgttaacattca

SEQ ID NO: 1190335 - DNA, 15 bp, Homo sapiens
ttggtgttaacattc

SEQ ID NO: 1190336 - DNA, 15 bp, Homo sapiens
tttggtgttaacatt

SEQ ID NO: 1190337 - DNA, 15 bp, Homo sapiens
atttggtgttaacat

SEQ ID NO: 1190338 - DNA, 15 bp, Homo sapiens
aatttggtgttaaca

SEQ ID NO: 1190339 - DNA, 15 bp, Homo sapiens
taatttggtgttaac

SEQ ID NO: 1190340 - DNA, 15 bp, Homo sapiens
ctaatttggtgttaa

SEQ ID NO: 1190341 - DNA, 15 bp, Homo sapiens
cctaatttggtgtta

SEQ ID NO: 1190342 - DNA, 15 bp, Homo sapiens
tcctaatttggtgtt

SEQ ID NO: 1190343 - DNA, 15 bp, Homo sapiens
ttcctaatttggtgt

SEQ ID NO: 1190344 - DNA, 15 bp, Homo sapiens
gttcctaatttggtg

SEQ ID NO: 1190345 - DNA, 15 bp, Homo sapiens
ggttcctaatttggt

SEQ ID NO: 1190346 - DNA, 15 bp, Homo sapiens
gggttcctaatttgg

SEQ ID NO: 1190347 - DNA, 15 bp, Homo sapiens
tgggttcctaatttg

SEQ ID NO: 1190348 - DNA, 15 bp, Homo sapiens
ctgggttcctaattt

SEQ ID NO: 1190349 - DNA, 15 bp, Homo sapiens
cctgggttcctaatt

SEQ ID NO: 1190350 - DNA, 15 bp, Homo sapiens
tcctgggttcctaat

SEQ ID NO: 1190351 - DNA, 15 bp, Homo sapiens
gtcctgggttcctaa

SEQ ID NO: 1190352 - DNA, 15 bp, Homo sapiens
agtcctgggttccta

SEQ ID NO: 1190353 - DNA, 15 bp, Homo sapiens
aagtcctgggttcct

SEQ ID NO: 1190354 - DNA, 15 bp, Homo sapiens
aaagtcctgggttcc

SEQ ID NO: 1190355 - DNA, 15 bp, Homo sapiens
aaaagtcctgggttc

SEQ ID NO: 1190356 - DNA, 15 bp, Homo sapiens
taaaagtcctgggtt

SEQ ID NO: 1190357 - DNA, 15 bp, Homo sapiens
ctaaaagtcctgggt

SEQ ID NO: 1190358 - DNA, 15 bp, Homo sapiens
actaaaagtcctggg

SEQ ID NO: 1190359 - DNA, 15 bp, Homo sapiens
gactaaaagtcctgg

SEQ ID NO: 1190360 - DNA, 15 bp, Homo sapiens
agactaaaagtcctg

SEQ ID NO: 1190361 - DNA, 15 bp, Homo sapiens
aagactaaaagtcct

SEQ ID NO: 1190362 - DNA, 15 bp, Homo sapiens
caagactaaaagtcc

SEQ ID NO: 1190363 - DNA, 15 bp, Homo sapiens
ccaagactaaaagtc

SEQ ID NO: 1190364 - DNA, 15 bp, Homo sapiens
gccaagactaaaagt

SEQ ID NO: 1190365 - DNA, 15 bp, Homo sapiens
tgccaagactaaaag

SEQ ID NO: 1190366 - DNA, 15 bp, Homo sapiens
atgccaagactaaaa

SEQ ID NO: 1190367 - DNA, 15 bp, Homo sapiens
catgccaagactaaa

SEQ ID NO: 1190368 - DNA, 15 bp, Homo sapiens
ccatgccaagactaa

SEQ ID NO: 1190369 - DNA, 15 bp, Homo sapiens
accatgccaagacta

SEQ ID NO: 1190370 - DNA, 15 bp, Homo sapiens
aaccatgccaagact

SEQ ID NO: 1190371 - DNA, 15 bp, Homo sapiens
taaccatgccaagac

SEQ ID NO: 1190372 - DNA, 15 bp, Homo sapiens
gtaaccatgccaaga

SEQ ID NO: 1190373 - DNA, 15 bp, Homo sapiens
agtaaccatgccaag

SEQ ID NO: 1190374 - DNA, 15 bp, Homo sapiens
aagtaaccatgccaa

SEQ ID NO: 1190375 - DNA, 15 bp, Homo sapiens
aaagtaaccatgcca

SEQ ID NO: 1190376 - DNA, 15 bp, Homo sapiens
gaaagtaaccatgcc

SEQ ID NO: 1190377 - DNA, 15 bp, Homo sapiens
ggaaagtaaccatgc

SEQ ID NO: 1190378 - DNA, 15 bp, Homo sapiens
tggaaagtaaccatg

SEQ ID NO: 1190379 - DNA, 15 bp, Homo sapiens
ttggaaagtaaccat

SEQ ID NO: 1190380 - DNA, 15 bp, Homo sapiens
attggaaagtaacca

SEQ ID NO: 1190381 - DNA, 15 bp, Homo sapiens
tattggaaagtaacc

SEQ ID NO: 1190382 - DNA, 15 bp, Homo sapiens
ttattggaaagtaac

SEQ ID NO: 1190383 - DNA, 15 bp, Homo sapiens
tttattggaaagtaa

SEQ ID NO: 1190384 - DNA, 15 bp, Homo sapiens
ctttattggaaagta

SEQ ID NO: 1190385 - DNA, 15 bp, Homo sapiens
tctttattggaaagt

SEQ ID NO: 1190386 - DNA, 15 bp, Homo sapiens
atctttattggaaag

SEQ ID NO: 1190387 - DNA, 15 bp, Homo sapiens
catctttattggaaa

SEQ ID NO: 1190388 - DNA, 15 bp, Homo sapiens
tcatctttattggaa

SEQ ID NO: 1190389 - DNA, 15 bp, Homo sapiens
gtcatctttattgga

SEQ ID NO: 1190390 - DNA, 15 bp, Homo sapiens
tgtcatctttattgg

SEQ ID NO: 1190391 - DNA, 15 bp, Homo sapiens
ttgtcatctttattg

SEQ ID NO: 1190392 - DNA, 15 bp, Homo sapiens
attgtcatctttatt

SEQ ID NO: 1190393 - DNA, 15 bp, Homo sapiens
tattgtcatctttat

SEQ ID NO: 1190394 - DNA, 15 bp, Homo sapiens
gtattgtcatcttta

SEQ ID NO: 1190395 - DNA, 15 bp, Homo sapiens
agtattgtcatcttt

SEQ ID NO: 1190396 - DNA, 15 bp, Homo sapiens
tagtattgtcatctt

SEQ ID NO: 1190397 - DNA, 15 bp, Homo sapiens
ttagtattgtcatct

SEQ ID NO: 1190398 - DNA, 15 bp, Homo sapiens
cttagtattgtcatc

SEQ ID NO: 1190399 - DNA, 15 bp, Homo sapiens
tcttagtattgtcat

SEQ ID NO: 1190400 - DNA, 15 bp, Homo sapiens
ttcttagtattgtca

SEQ ID NO: 1190401 - DNA, 15 bp, Homo sapiens
cttcttagtattgtc

SEQ ID NO: 1190402 - DNA, 15 bp, Homo sapiens
tcttcttagtattgt

SEQ ID NO: 1190403 - DNA, 15 bp, Homo sapiens
ctcttcttagtattg

SEQ ID NO: 1190404 - DNA, 15 bp, Homo sapiens
tctcttcttagtatt

SEQ ID NO: 1190405 - DNA, 15 bp, Homo sapiens
ttctcttcttagtat

SEQ ID NO: 1190406 - DNA, 15 bp, Homo sapiens
tttctcttcttagta

SEQ ID NO: 1190407 - DNA, 15 bp, Homo sapiens
ttttctcttcttagt

SEQ ID NO: 1190408 - DNA, 15 bp, Homo sapiens
tttttctcttcttag

SEQ ID NO: 1190409 - DNA, 15 bp, Homo sapiens
atttttctcttctta

SEQ ID NO: 1190410 - DNA, 15 bp, Homo sapiens
catttttctcttctt

SEQ ID NO: 1190411 - DNA, 15 bp, Homo sapiens
tcatttttctcttct

SEQ ID NO: 1190412 - DNA, 15 bp, Homo sapiens
atcatttttctcttc

SEQ ID NO: 1190413 - DNA, 15 bp, Homo sapiens
aatcatttttctctt

SEQ ID NO: 1190414 - DNA, 15 bp, Homo sapiens
aaatcatttttctct

SEQ ID NO: 1190415 - DNA, 15 bp, Homo sapiens
taaatcatttttctc

SEQ ID NO: 1190416 - DNA, 15 bp, Homo sapiens
ttaaatcatttttct

SEQ ID NO: 1190417 - DNA, 15 bp, Homo sapiens
attaaatcatttttc

SEQ ID NO: 1190418 - DNA, 15 bp, Homo sapiens
tattaaatcattttt

SEQ ID NO: 1190419 - DNA, 15 bp, Homo sapiens
ttattaaatcatttt

SEQ ID NO: 1190420 - DNA, 15 bp, Homo sapiens
attattaaatcattt

SEQ ID NO: 1190421 - DNA, 15 bp, Homo sapiens
cattattaaatcatt

SEQ ID NO: 1190422 - DNA, 15 bp, Homo sapiens
tcattattaaatcat

SEQ ID NO: 1190423 - DNA, 15 bp, Homo sapiens
atcattattaaatca

SEQ ID NO: 1190424 - DNA, 15 bp, Homo sapiens
tatcattattaaatc

SEQ ID NO: 1190425 - DNA, 15 bp, Homo sapiens
ttatcattattaaat

SEQ ID NO: 1190426 - DNA, 15 bp, Homo sapiens
attatcattattaaa

SEQ ID NO: 1190427 - DNA, 15 bp, Homo sapiens
tattatcattattaa

SEQ ID NO: 1190428 - DNA, 15 bp, Homo sapiens
ctattatcattatta

SEQ ID NO: 1190429 - DNA, 15 bp, Homo sapiens
actattatcattatt

SEQ ID NO: 1190430 - DNA, 15 bp, Homo sapiens
cactattatcattat

SEQ ID NO: 1190431 - DNA, 15 bp, Homo sapiens
ccactattatcatta

SEQ ID NO: 1190432 - DNA, 15 bp, Homo sapiens
gccactattatcatt

SEQ ID NO: 1190433 - DNA, 15 bp, Homo sapiens
agccactattatcat

SEQ ID NO: 1190434 - DNA, 15 bp, Homo sapiens
tagccactattatca

SEQ ID NO: 1190435 - DNA, 15 bp, Homo sapiens
ttagccactattatc

SEQ ID NO: 1190436 - DNA, 15 bp, Homo sapiens
attagccactattat

SEQ ID NO: 1190437 - DNA, 15 bp, Homo sapiens
tattagccactatta

SEQ ID NO: 1190438 - DNA, 15 bp, Homo sapiens
gtattagccactatt

SEQ ID NO: 1190439 - DNA, 15 bp, Homo sapiens
agtattagccactat

SEQ ID NO: 1190440 - DNA, 15 bp, Homo sapiens
aagtattagccacta

SEQ ID NO: 1190441 - DNA, 15 bp, Homo sapiens
taagtattagccact

SEQ ID NO: 1190442 - DNA, 15 bp, Homo sapiens
ataagtattagccac

SEQ ID NO: 1190443 - DNA, 15 bp, Homo sapiens
cataagtattagcca

SEQ ID NO: 1190444 - DNA, 15 bp, Homo sapiens
acataagtattagcc

SEQ ID NO: 1190445 - DNA, 15 bp, Homo sapiens
tacataagtattagc

SEQ ID NO: 1190446 - DNA, 15 bp, Homo sapiens
ctacataagtattag

SEQ ID NO: 1190447 - DNA, 15 bp, Homo sapiens
actacataagtatta

SEQ ID NO: 1190448 - DNA, 15 bp, Homo sapiens
cactacataagtatt

SEQ ID NO: 1190449 - DNA, 15 bp, Homo sapiens
gcactacataagtat

SEQ ID NO: 1190450 - DNA, 15 bp, Homo sapiens
agcactacataagta

SEQ ID NO: 1190451 - DNA, 15 bp, Homo sapiens
aagcactacataagt

SEQ ID NO: 1190452 - DNA, 15 bp, Homo sapiens
taagcactacataag

SEQ ID NO: 1190453 - DNA, 15 bp, Homo sapiens
gtaagcactacataa

SEQ ID NO: 1190454 - DNA, 15 bp, Homo sapiens
ggtaagcactacata

SEQ ID NO: 1190455 - DNA, 15 bp, Homo sapiens
tggtaagcactacat

SEQ ID NO: 1190456 - DNA, 15 bp, Homo sapiens
atggtaagcactaca

SEQ ID NO: 1190457 - DNA, 15 bp, Homo sapiens
catggtaagcactac

SEQ ID NO: 1190458 - DNA, 15 bp, Homo sapiens
acatggtaagcacta

SEQ ID NO: 1190459 - DNA, 15 bp, Homo sapiens
cacatggtaagcact

SEQ ID NO: 1190460 - DNA, 15 bp, Homo sapiens
gcacatggtaagcac

SEQ ID NO: 1190461 - DNA, 15 bp, Homo sapiens
ggcacatggtaagca

SEQ ID NO: 1190462 - DNA, 15 bp, Homo sapiens
tggcacatggtaagc

SEQ ID NO: 1190463 - DNA, 15 bp, Homo sapiens
ctggcacatggtaag

SEQ ID NO: 1190464 - DNA, 15 bp, Homo sapiens
cctggcacatggtaa

SEQ ID NO: 1190465 - DNA, 15 bp, Homo sapiens
acctggcacatggta

SEQ ID NO: 1190466 - DNA, 15 bp, Homo sapiens
gacctggcacatggt

SEQ ID NO: 1190467 - DNA, 15 bp, Homo sapiens
agacctggcacatgg

SEQ ID NO: 1190468 - DNA, 15 bp, Homo sapiens
tagacctggcacatg

SEQ ID NO: 1190469 - DNA, 15 bp, Homo sapiens
atagacctggcacat

SEQ ID NO: 1190470 - DNA, 15 bp, Homo sapiens
aatagacctggcaca

SEQ ID NO: 1190471 - DNA, 15 bp, Homo sapiens
caatagacctggcac

SEQ ID NO: 1190472 - DNA, 15 bp, Homo sapiens
acaatagacctggca

SEQ ID NO: 1190473 - DNA, 15 bp, Homo sapiens
tacaatagacctggc

SEQ ID NO: 1190474 - DNA, 15 bp, Homo sapiens
ttacaatagacctgg

SEQ ID NO: 1190475 - DNA, 15 bp, Homo sapiens
cttacaatagacctg

SEQ ID NO: 1190476 - DNA, 15 bp, Homo sapiens
acttacaatagacct

SEQ ID NO: 1190477 - DNA, 15 bp, Homo sapiens
tacttacaatagacc

SEQ ID NO: 1190478 - DNA, 15 bp, Homo sapiens
gtacttacaatagac

SEQ ID NO: 1190479 - DNA, 15 bp, Homo sapiens
agtacttacaataga

SEQ ID NO: 1190480 - DNA, 15 bp, Homo sapiens
aagtacttacaatag

SEQ ID NO: 1190481 - DNA, 15 bp, Homo sapiens
aaagtacttacaata

SEQ ID NO: 1190482 - DNA, 15 bp, Homo sapiens
aaaagtacttacaat

SEQ ID NO: 1190483 - DNA, 15 bp, Homo sapiens
taaaagtacttacaa

SEQ ID NO: 1190484 - DNA, 15 bp, Homo sapiens
ataaaagtacttaca

SEQ ID NO: 1190485 - DNA, 15 bp, Homo sapiens
tataaaagtacttac

SEQ ID NO: 1190486 - DNA, 15 bp, Homo sapiens
atataaaagtactta

SEQ ID NO: 1190487 - DNA, 15 bp, Homo sapiens
tatataaaagtactt

SEQ ID NO: 1190488 - DNA, 15 bp, Homo sapiens
atatataaaagtact

SEQ ID NO: 1190489 - DNA, 15 bp, Homo sapiens
tatatataaaagtac

SEQ ID NO: 1190490 - DNA, 15 bp, Homo sapiens
atatatataaaagta

SEQ ID NO: 1190491 - DNA, 15 bp, Homo sapiens
aatatatataaaagt

SEQ ID NO: 1190492 - DNA, 15 bp, Homo sapiens
taatatatataaaag

SEQ ID NO: 1190493 - DNA, 15 bp, Homo sapiens
ttaatatatataaaa

SEQ ID NO: 1190494 - DNA, 15 bp, Homo sapiens
attaatatatataaa

SEQ ID NO: 1190495 - DNA, 15 bp, Homo sapiens
aattaatatatataa

SEQ ID NO: 1190496 - DNA, 15 bp, Homo sapiens
taattaatatatata

SEQ ID NO: 1190497 - DNA, 15 bp, Homo sapiens
ataattaatatatat

SEQ ID NO: 1190498 - DNA, 15 bp, Homo sapiens
aataattaatatata

SEQ ID NO: 1190499 - DNA, 15 bp, Homo sapiens
aaataattaatatat

SEQ ID NO: 1190500 - DNA, 15 bp, Homo sapiens
taaataattaatata

SEQ ID NO: 1190501 - DNA, 15 bp, Homo sapiens
ttaaataattaatat

SEQ ID NO: 1190502 - DNA, 15 bp, Homo sapiens
attaaataattaata

SEQ ID NO: 1190503 - DNA, 15 bp, Homo sapiens
gattaaataattaat

SEQ ID NO: 1190504 - DNA, 15 bp, Homo sapiens
agattaaataattaa

SEQ ID NO: 1190505 - DNA, 15 bp, Homo sapiens
aagattaaataatta

SEQ ID NO: 1190506 - DNA, 15 bp, Homo sapiens
aaagattaaataatt

SEQ ID NO: 1190507 - DNA, 15 bp, Homo sapiens
caaagattaaataat

SEQ ID NO: 1190508 - DNA, 15 bp, Homo sapiens
tagacatactgggct

SEQ ID NO: 1190509 - DNA, 15 bp, Homo sapiens
atagacatactgggc

SEQ ID NO: 1190510 - DNA, 15 bp, Homo sapiens
catagacatactggg

SEQ ID NO: 1190511 - DNA, 15 bp, Homo sapiens
tcatagacatactgg

SEQ ID NO: 1190512 - DNA, 15 bp, Homo sapiens
atcatagacatactg

SEQ ID NO: 1190513 - DNA, 15 bp, Homo sapiens
aatcatagacatact

SEQ ID NO: 1190514 - DNA, 15 bp, Homo sapiens
aaatcatagacatac

SEQ ID NO: 1190515 - DNA, 15 bp, Homo sapiens
aaaatcatagacata

SEQ ID NO: 1190516 - DNA, 15 bp, Homo sapiens
taaaatcatagacat

SEQ ID NO: 1190517 - DNA, 15 bp, Homo sapiens
gtaaaatcatagaca

SEQ ID NO: 1190518 - DNA, 15 bp, Homo sapiens
tgtaaaatcatagac

SEQ ID NO: 1190519 - DNA, 15 bp, Homo sapiens
ctgtaaaatcataga

SEQ ID NO: 1190520 - DNA, 15 bp, Homo sapiens
tctgtaaaatcatag

SEQ ID NO: 1190521 - DNA, 15 bp, Homo sapiens
gtctgtaaaatcata

SEQ ID NO: 1190522 - DNA, 15 bp, Homo sapiens
agtctgtaaaatcat

SEQ ID NO: 1190523 - DNA, 15 bp, Homo sapiens
gagtctgtaaaatca

SEQ ID NO: 1190524 - DNA, 15 bp, Homo sapiens
tgagtctgtaaaatc

SEQ ID NO: 1190525 - DNA, 15 bp, Homo sapiens
ttgagtctgtaaaat

SEQ ID NO: 1190526 - DNA, 15 bp, Homo sapiens
tttgagtctgtaaaa

SEQ ID NO: 1190527 - DNA, 15 bp, Homo sapiens
ttttgagtctgtaaa

SEQ ID NO: 1190528 - DNA, 15 bp, Homo sapiens
attttgagtctgtaa

SEQ ID NO: 1190529 - DNA, 15 bp, Homo sapiens
aattttgagtctgta

SEQ ID NO: 1190530 - DNA, 15 bp, Homo sapiens
taattttgagtctgt

SEQ ID NO: 1190531 - DNA, 15 bp, Homo sapiens
ttaattttgagtctg

SEQ ID NO: 1190532 - DNA, 15 bp, Homo sapiens
attaattttgagtct

SEQ ID NO: 1190533 - DNA, 15 bp, Homo sapiens
aattaattttgagtc

SEQ ID NO: 1190534 - DNA, 15 bp, Homo sapiens
taattaattttgagt

SEQ ID NO: 1190535 - DNA, 15 bp, Homo sapiens
ataattaattttgag

SEQ ID NO: 1190536 - DNA, 15 bp, Homo sapiens
tataattaattttga

SEQ ID NO: 1190537 - DNA, 15 bp, Homo sapiens
ttataattaattttg

SEQ ID NO: 1190538 - DNA, 15 bp, Homo sapiens
cttataattaatttt

SEQ ID NO: 1190539 - DNA, 15 bp, Homo sapiens
tcttataattaattt

SEQ ID NO: 1190540 - DNA, 15 bp, Homo sapiens
atcttataattaatt

SEQ ID NO: 1190541 - DNA, 15 bp, Homo sapiens
aatcttataattaat

SEQ ID NO: 1190542 - DNA, 15 bp, Homo sapiens
aaatcttataattaa

SEQ ID NO: 1190543 - DNA, 15 bp, Homo sapiens
gaaatcttataatta

SEQ ID NO: 1190544 - DNA, 15 bp, Homo sapiens
ggaaatcttataatt

SEQ ID NO: 1190545 - DNA, 15 bp, Homo sapiens
aggaaatcttataat

SEQ ID NO: 1190546 - DNA, 15 bp, Homo sapiens
taggaaatcttataa

SEQ ID NO: 1190547 - DNA, 15 bp, Homo sapiens
ttaggaaatcttata

SEQ ID NO: 1190548 - DNA, 15 bp, Homo sapiens
attaggaaatcttat

SEQ ID NO: 1190549 - DNA, 15 bp, Homo sapiens
gattaggaaatctta

SEQ ID NO: 1190550 - DNA, 15 bp, Homo sapiens
agattaggaaatctt

SEQ ID NO: 1190551 - DNA, 15 bp, Homo sapiens
aagattaggaaatct

SEQ ID NO: 1190552 - DNA, 15 bp, Homo sapiens
gaagattaggaaatc

SEQ ID NO: 1190553 - DNA, 15 bp, Homo sapiens
cgaagattaggaaat

SEQ ID NO: 1190554 - DNA, 15 bp, Homo sapiens
tcgaagattaggaaa

SEQ ID NO: 1190555 - DNA, 15 bp, Homo sapiens
atcgaagattaggaa

SEQ ID NO: 1190556 - DNA, 15 bp, Homo sapiens
aatcgaagattagga

SEQ ID NO: 1190557 - DNA, 15 bp, Homo sapiens
aaatcgaagattagg

SEQ ID NO: 1190558 - DNA, 15 bp, Homo sapiens
gaaatcgaagattag

SEQ ID NO: 1190559 - DNA, 15 bp, Homo sapiens
agaaatcgaagatta

SEQ ID NO: 1190560 - DNA, 15 bp, Homo sapiens
cagaaatcgaagatt

SEQ ID NO: 1190561 - DNA, 15 bp, Homo sapiens
tcagaaatcgaagat

SEQ ID NO: 1190562 - DNA, 15 bp, Homo sapiens
ttcagaaatcgaaga

SEQ ID NO: 1190563 - DNA, 15 bp, Homo sapiens
tttcagaaatcgaag

SEQ ID NO: 1190564 - DNA, 15 bp, Homo sapiens
gtttcagaaatcgaa

SEQ ID NO: 1190565 - DNA, 15 bp, Homo sapiens
agtttcagaaatcga

SEQ ID NO: 1190566 - DNA, 15 bp, Homo sapiens
gagtttcagaaatcg

SEQ ID NO: 1190567 - DNA, 15 bp, Homo sapiens
agagtttcagaaatc

SEQ ID NO: 1190568 - DNA, 15 bp, Homo sapiens
cagagtttcagaaat

SEQ ID NO: 1190569 - DNA, 15 bp, Homo sapiens
gcagagtttcagaaa

SEQ ID NO: 1190570 - DNA, 15 bp, Homo sapiens
ggcagagtttcagaa

SEQ ID NO: 1190571 - DNA, 15 bp, Homo sapiens
aggcagagtttcaga

SEQ ID NO: 1190572 - DNA, 15 bp, Homo sapiens
aaggcagagtttcag

SEQ ID NO: 1190573 - DNA, 15 bp, Homo sapiens
caaggcagagtttca

SEQ ID NO: 1190574 - DNA, 15 bp, Homo sapiens
gcaaggcagagtttc

SEQ ID NO: 1190575 - DNA, 15 bp, Homo sapiens
agcaaggcagagttt

SEQ ID NO: 1190576 - DNA, 15 bp, Homo sapiens
gagcaaggcagagtt

SEQ ID NO: 1190577 - DNA, 15 bp, Homo sapiens
agagcaaggcagagt

SEQ ID NO: 1190578 - DNA, 15 bp, Homo sapiens
tagagcaaggcagag

SEQ ID NO: 1190579 - DNA, 15 bp, Homo sapiens
ctagagcaaggcaga

SEQ ID NO: 1190580 - DNA, 15 bp, Homo sapiens
tctagagcaaggcag

SEQ ID NO: 1190581 - DNA, 15 bp, Homo sapiens
ctctagagcaaggca

SEQ ID NO: 1190582 - DNA, 15 bp, Homo sapiens
cctctagagcaaggc

SEQ ID NO: 1190583 - DNA, 15 bp, Homo sapiens
tcctctagagcaagg

SEQ ID NO: 1190584 - DNA, 15 bp, Homo sapiens
ttcctctagagcaag

SEQ ID NO: 1190585 - DNA, 15 bp, Homo sapiens
tttcctctagagcaa

SEQ ID NO: 1190586 - DNA, 15 bp, Homo sapiens
ttttcctctagagca

SEQ ID NO: 1190587 - DNA, 15 bp, Homo sapiens
gttttcctctagagc

SEQ ID NO: 1190588 - DNA, 15 bp, Homo sapiens
tgttttcctctagag

SEQ ID NO: 1190589 - DNA, 15 bp, Homo sapiens
ttgttttcctctaga

SEQ ID NO: 1190590 - DNA, 15 bp, Homo sapiens
cttgttttcctctag

SEQ ID NO: 1190591 - DNA, 15 bp, Homo sapiens
tcttgttttcctcta

SEQ ID NO: 1190592 - DNA, 15 bp, Homo sapiens
ttcttgttttcctct

SEQ ID NO: 1190593 - DNA, 15 bp, Homo sapiens
tttcttgttttcctc

SEQ ID NO: 1190594 - DNA, 15 bp, Homo sapiens
ttttcttgttttcct

SEQ ID NO: 1190595 - DNA, 15 bp, Homo sapiens
tttttcttgttttcc

SEQ ID NO: 1190596 - DNA, 15 bp, Homo sapiens
gtttttcttgttttc

SEQ ID NO: 1190597 - DNA, 15 bp, Homo sapiens
tgtttttcttgtttt

SEQ ID NO: 1190598 - DNA, 15 bp, Homo sapiens
ttgtttttcttgttt

SEQ ID NO: 1190599 - DNA, 15 bp, Homo sapiens
attgtttttcttgtt

SEQ ID NO: 1190600 - DNA, 15 bp, Homo sapiens
cattgtttttcttgt

SEQ ID NO: 1190601 - DNA, 15 bp, Homo sapiens
tcattgtttttcttg

SEQ ID NO: 1190602 - DNA, 15 bp, Homo sapiens
ttcattgtttttctt

SEQ ID NO: 1190603 - DNA, 15 bp, Homo sapiens
tttcattgtttttct

SEQ ID NO: 1190604 - DNA, 15 bp, Homo sapiens
ttttcattgtttttc

SEQ ID NO: 1190605 - DNA, 15 bp, Homo sapiens
tttttcattgttttt

SEQ ID NO: 1190606 - DNA, 15 bp, Homo sapiens
atttttcattgtttt

SEQ ID NO: 1190607 - DNA, 15 bp, Homo sapiens
tatttttcattgttt

SEQ ID NO: 1190608 - DNA, 15 bp, Homo sapiens
ttatttttcattgtt

SEQ ID NO: 1190609 - DNA, 15 bp, Homo sapiens
tttatttttcattgt

SEQ ID NO: 1190610 - DNA, 15 bp, Homo sapiens
atttatttttcattg

SEQ ID NO: 1190611 - DNA, 15 bp, Homo sapiens
catttatttttcatt

SEQ ID NO: 1190612 - DNA, 15 bp, Homo sapiens
acatttatttttcat

SEQ ID NO: 1190613 - DNA, 15 bp, Homo sapiens
gacatttatttttca

SEQ ID NO: 1190614 - DNA, 15 bp, Homo sapiens
agacatttatttttc

SEQ ID NO: 1190615 - DNA, 15 bp, Homo sapiens
gagacatttattttt

SEQ ID NO: 1190616 - DNA, 15 bp, Homo sapiens
agagacatttatttt

SEQ ID NO: 1190617 - DNA, 15 bp, Homo sapiens
aagagacatttattt

SEQ ID NO: 1190618 - DNA, 15 bp, Homo sapiens
aaagagacatttatt

SEQ ID NO: 1190619 - DNA, 15 bp, Homo sapiens
aaaagagacatttat

SEQ ID NO: 1190620 - DNA, 15 bp, Homo sapiens
aaaaagagacattta

SEQ ID NO: 1190621 - DNA, 15 bp, Homo sapiens
aaaaaagagacattt

SEQ ID NO: 1190622 - DNA, 15 bp, Homo sapiens
taaaaaagagacatt

SEQ ID NO: 1190623 - DNA, 15 bp, Homo sapiens
gtaaaaaagagacat

SEQ ID NO: 1190624 - DNA, 15 bp, Homo sapiens
tgtaaaaaagagaca

SEQ ID NO: 1190625 - DNA, 15 bp, Homo sapiens
ttttgtaaaaaagag

SEQ ID NO: 1190626 - DNA, 15 bp, Homo sapiens
tttttgtaaaaaaga

SEQ ID NO: 1190627 - DNA, 15 bp, Homo sapiens
atttttgtaaaaaag

SEQ ID NO: 1190628 - DNA, 15 bp, Homo sapiens
aatttttgtaaaaaa

SEQ ID NO: 1190629 - DNA, 15 bp, Homo sapiens
taatttttgtaaaaa

SEQ ID NO: 1190630 - DNA, 15 bp, Homo sapiens
ttaatttttgtaaaa

SEQ ID NO: 1190631 - DNA, 15 bp, Homo sapiens
tttaatttttgtaaa

SEQ ID NO: 1190632 - DNA, 15 bp, Homo sapiens
ttttaatttttgtaa

SEQ ID NO: 1190633 - DNA, 15 bp, Homo sapiens
gttttaatttttgta

SEQ ID NO: 1190634 - DNA, 15 bp, Homo sapiens
tgttttaatttttgt

SEQ ID NO: 1190635 - DNA, 15 bp, Homo sapiens
ctgttttaatttttg

SEQ ID NO: 1190636 - DNA, 15 bp, Homo sapiens
tctgttttaattttt

SEQ ID NO: 1190637 - DNA, 15 bp, Homo sapiens
ttctgttttaatttt

SEQ ID NO: 1190638 - DNA, 15 bp, Homo sapiens
gttctgttttaattt

SEQ ID NO: 1190639 - DNA, 15 bp, Homo sapiens
tgttctgttttaatt

SEQ ID NO: 1190640 - DNA, 15 bp, Homo sapiens
ttgttctgttttaat

SEQ ID NO: 1190641 - DNA, 15 bp, Homo sapiens
tttgttctgttttaa

SEQ ID NO: 1190642 - DNA, 15 bp, Homo sapiens
gtttgttctgtttta

SEQ ID NO: 1190643 - DNA, 15 bp, Homo sapiens
agtttgttctgtttt

SEQ ID NO: 1190644 - DNA, 15 bp, Homo sapiens
cagtttgttctgttt

SEQ ID NO: 1190645 - DNA, 15 bp, Homo sapiens
gcagtttgttctgtt

SEQ ID NO: 1190646 - DNA, 15 bp, Homo sapiens
tgcagtttgttctgt

SEQ ID NO: 1190647 - DNA, 15 bp, Homo sapiens
ttgcagtttgttctg

SEQ ID NO: 1190648 - DNA, 15 bp, Homo sapiens
attgcagtttgttct

SEQ ID NO: 1190649 - DNA, 15 bp, Homo sapiens
tattgcagtttgttc

SEQ ID NO: 1190650 - DNA, 15 bp, Homo sapiens
ttattgcagtttgtt

SEQ ID NO: 1190651 - DNA, 15 bp, Homo sapiens
tttattgcagtttgt

SEQ ID NO: 1190652 - DNA, 15 bp, Homo sapiens
ttttattgcagtttg

SEQ ID NO: 1190653 - DNA, 15 bp, Homo sapiens
gttttattgcagttt

SEQ ID NO: 1190654 - DNA, 15 bp, Homo sapiens
tgttttattgcagtt

SEQ ID NO: 1190655 - DNA, 15 bp, Homo sapiens
ttgttttattgcagt

SEQ ID NO: 1190656 - DNA, 15 bp, Homo sapiens
gttgttttattgcag

SEQ ID NO: 1190657 - DNA, 15 bp, Homo sapiens
tgttgttttattgca

SEQ ID NO: 1190658 - DNA, 15 bp, Homo sapiens
ctgttgttttattgc

SEQ ID NO: 1190659 - DNA, 15 bp, Homo sapiens
tctgttgttttattg

SEQ ID NO: 1190660 - DNA, 15 bp, Homo sapiens
ctctgttgttttatt

SEQ ID NO: 1190661 - DNA, 15 bp, Homo sapiens
cctctgttgttttat

SEQ ID NO: 1190662 - DNA, 15 bp, Homo sapiens
tcctctgttgtttta

SEQ ID NO: 1190663 - DNA, 15 bp, Homo sapiens
atcctctgttgtttt

SEQ ID NO: 1190664 - DNA, 15 bp, Homo sapiens
catcctctgttgttt

SEQ ID NO: 1190665 - DNA, 15 bp, Homo sapiens
tcatcctctgttgtt

SEQ ID NO: 1190666 - DNA, 15 bp, Homo sapiens
ttcatcctctgttgt

SEQ ID NO: 1190667 - DNA, 15 bp, Homo sapiens
attcatcctctgttg

SEQ ID NO: 1190668 - DNA, 15 bp, Homo sapiens
gattcatcctctgtt

SEQ ID NO: 1190669 - DNA, 15 bp, Homo sapiens
ggattcatcctctgt

SEQ ID NO: 1190670 - DNA, 15 bp, Homo sapiens
tggattcatcctctg

SEQ ID NO: 1190671 - DNA, 15 bp, Homo sapiens
ctggattcatcctct

SEQ ID NO: 1190672 - DNA, 15 bp, Homo sapiens
tctggattcatcctc

SEQ ID NO: 1190673 - DNA, 15 bp, Homo sapiens
ttctggattcatcct

SEQ ID NO: 1190674 - DNA, 15 bp, Homo sapiens
attctggattcatcc

SEQ ID NO: 1190675 - DNA, 15 bp, Homo sapiens
cattctggattcatc

SEQ ID NO: 1190676 - DNA, 15 bp, Homo sapiens
acattctggattcat

SEQ ID NO: 1190677 - DNA, 15 bp, Homo sapiens
cacattctggattca

SEQ ID NO: 1190678 - DNA, 15 bp, Homo sapiens
tcacattctggattc

SEQ ID NO: 1190679 - DNA, 15 bp, Homo sapiens
atcacattctggatt

SEQ ID NO: 1190680 - DNA, 15 bp, Homo sapiens
aatcacattctggat

SEQ ID NO: 1190681 - DNA, 15 bp, Homo sapiens
caatcacattctgga

SEQ ID NO: 1190682 - DNA, 15 bp, Homo sapiens
tcaatcacattctgg

SEQ ID NO: 1190683 - DNA, 15 bp, Homo sapiens
atcaatcacattctg

SEQ ID NO: 1190684 - DNA, 15 bp, Homo sapiens
aatcaatcacattct

SEQ ID NO: 1190685 - DNA, 15 bp, Homo sapiens
aaatcaatcacattc

SEQ ID NO: 1190686 - DNA, 15 bp, Homo sapiens
aaaatcaatcacatt

SEQ ID NO: 1190687 - DNA, 15 bp, Homo sapiens
aaaaatcaatcacat

SEQ ID NO: 1190688 - DNA, 15 bp, Homo sapiens
aaaaaatcaatcaca

SEQ ID NO: 1190689 - DNA, 15 bp, Homo sapiens
aaaaaaatcaatcac

SEQ ID NO: 1190690 - DNA, 15 bp, Homo sapiens
aaaaaaaatcaatca

SEQ ID NO: 1190691 - DNA, 15 bp, Homo sapiens
gaaaaaaaatcaatc

SEQ ID NO: 1190692 - DNA, 15 bp, Homo sapiens
agaaaaaaaatcaat

SEQ ID NO: 1190693 - DNA, 15 bp, Homo sapiens
aagaaaaaaaatcaa

SEQ ID NO: 1190694 - DNA, 15 bp, Homo sapiens
taagaaaaaaaatca

SEQ ID NO: 1190695 - DNA, 15 bp, Homo sapiens
gtaagaaaaaaaatc

SEQ ID NO: 1190696 - DNA, 15 bp, Homo sapiens
agtaagaaaaaaaat

SEQ ID NO: 1190697 - DNA, 15 bp, Homo sapiens
tagtaagaaaaaaaa

SEQ ID NO: 1190698 - DNA, 15 bp, Homo sapiens
ctagtaagaaaaaaa

SEQ ID NO: 1190699 - DNA, 15 bp, Homo sapiens
cctagtaagaaaaaa

SEQ ID NO: 1190700 - DNA, 15 bp, Homo sapiens
tcctagtaagaaaaa

SEQ ID NO: 1190701 - DNA, 15 bp, Homo sapiens
ttcctagtaagaaaa

SEQ ID NO: 1190702 - DNA, 15 bp, Homo sapiens
tttcctagtaagaaa

SEQ ID NO: 1190703 - DNA, 15 bp, Homo sapiens
ctttcctagtaagaa

SEQ ID NO: 1190704 - DNA, 15 bp, Homo sapiens
cctttcctagtaaga

SEQ ID NO: 1190705 - DNA, 15 bp, Homo sapiens
tcctttcctagtaag

SEQ ID NO: 1190706 - DNA, 15 bp, Homo sapiens
atcctttcctagtaa

SEQ ID NO: 1190707 - DNA, 15 bp, Homo sapiens
gatcctttcctagta

SEQ ID NO: 1190708 - DNA, 15 bp, Homo sapiens
agatcctttcctagt

SEQ ID NO: 1190709 - DNA, 15 bp, Homo sapiens
tagatcctttcctag

SEQ ID NO: 1190710 - DNA, 15 bp, Homo sapiens
ctagatcctttccta

SEQ ID NO: 1190711 - DNA, 15 bp, Homo sapiens
tctagatcctttcct

SEQ ID NO: 1190712 - DNA, 15 bp, Homo sapiens
ctctagatcctttcc

SEQ ID NO: 1190713 - DNA, 15 bp, Homo sapiens
cctctagatcctttc

SEQ ID NO: 1190714 - DNA, 15 bp, Homo sapiens
gcctctagatccttt

SEQ ID NO: 1190715 - DNA, 15 bp, Homo sapiens
ggcctctagatcctt

SEQ ID NO: 1190716 - DNA, 15 bp, Homo sapiens
tggcctctagatcct

SEQ ID NO: 1190717 - DNA, 15 bp, Homo sapiens
ctggcctctagatcc

SEQ ID NO: 1190718 - DNA, 15 bp, Homo sapiens
tctggcctctagatc

SEQ ID NO: 1190719 - DNA, 15 bp, Homo sapiens
ttctggcctctagat

SEQ ID NO: 1190720 - DNA, 15 bp, Homo sapiens
cttctggcctctaga

SEQ ID NO: 1190721 - DNA, 15 bp, Homo sapiens
ccttctggcctctag

SEQ ID NO: 1190722 - DNA, 15 bp, Homo sapiens
gccttctggcctcta

SEQ ID NO: 1190723 - DNA, 15 bp, Homo sapiens
agccttctggcctct

SEQ ID NO: 1190724 - DNA, 15 bp, Homo sapiens
cagccttctggcctc

SEQ ID NO: 1190725 - DNA, 15 bp, Homo sapiens
ccagccttctggcct

SEQ ID NO: 1190726 - DNA, 15 bp, Homo sapiens
tccagccttctggcc

SEQ ID NO: 1190727 - DNA, 15 bp, Homo sapiens
atccagccttctggc

SEQ ID NO: 1190728 - DNA, 15 bp, Homo sapiens
aatccagccttctgg

SEQ ID NO: 1190729 - DNA, 15 bp, Homo sapiens
aaatccagccttctg

SEQ ID NO: 1190730 - DNA, 15 bp, Homo sapiens
aaaatccagccttct

SEQ ID NO: 1190731 - DNA, 15 bp, Homo sapiens
aaaaatccagccttc

SEQ ID NO: 1190732 - DNA, 15 bp, Homo sapiens
gaaaaatccagcctt

SEQ ID NO: 1190733 - DNA, 15 bp, Homo sapiens
tgaaaaatccagcct

SEQ ID NO: 1190734 - DNA, 15 bp, Homo sapiens
ctgaaaaatccagcc

SEQ ID NO: 1190735 - DNA, 15 bp, Homo sapiens
cctgaaaaatccagc

SEQ ID NO: 1190736 - DNA, 15 bp, Homo sapiens
tcctgaaaaatccag

SEQ ID NO: 1190737 - DNA, 15 bp, Homo sapiens
atcctgaaaaatcca

SEQ ID NO: 1190738 - DNA, 15 bp, Homo sapiens
gatcctgaaaaatcc

SEQ ID NO: 1190739 - DNA, 15 bp, Homo sapiens
agatcctgaaaaatc

SEQ ID NO: 1190740 - DNA, 15 bp, Homo sapiens
gagatcctgaaaaat

SEQ ID NO: 1190741 - DNA, 15 bp, Homo sapiens
ggagatcctgaaaaa

SEQ ID NO: 1190742 - DNA, 15 bp, Homo sapiens
aggagatcctgaaaa

SEQ ID NO: 1190743 - DNA, 15 bp, Homo sapiens
aaggagatcctgaaa

SEQ ID NO: 1190744 - DNA, 15 bp, Homo sapiens
aaaggagatcctgaa

SEQ ID NO: 1190745 - DNA, 15 bp, Homo sapiens
gaaaggagatcctga

SEQ ID NO: 1190746 - DNA, 15 bp, Homo sapiens
tgaaaggagatcctg

SEQ ID NO: 1190747 - DNA, 15 bp, Homo sapiens
ttgaaaggagatcct

SEQ ID NO: 1190748 - DNA, 15 bp, Homo sapiens
attgaaaggagatcc

SEQ ID NO: 1190749 - DNA, 15 bp, Homo sapiens
gattgaaaggagatc

SEQ ID NO: 1190750 - DNA, 15 bp, Homo sapiens
tgattgaaaggagat

SEQ ID NO: 1190751 - DNA, 15 bp, Homo sapiens
ttgattgaaaggaga

SEQ ID NO: 1190752 - DNA, 15 bp, Homo sapiens
attgattgaaaggag

SEQ ID NO: 1190753 - DNA, 15 bp, Homo sapiens
cattgattgaaagga

SEQ ID NO: 1190754 - DNA, 15 bp, Homo sapiens
tcattgattgaaagg

SEQ ID NO: 1190755 - DNA, 15 bp, Homo sapiens
ttcattgattgaaag

SEQ ID NO: 1190756 - DNA, 15 bp, Homo sapiens
attcattgattgaaa

SEQ ID NO: 1190757 - DNA, 15 bp, Homo sapiens
gattcattgattgaa

SEQ ID NO: 1190758 - DNA, 15 bp, Homo sapiens
agattcattgattga

SEQ ID NO: 1190759 - DNA, 15 bp, Homo sapiens
cagattcattgattg

SEQ ID NO: 1190760 - DNA, 15 bp, Homo sapiens
acagattcattgatt

SEQ ID NO: 1190761 - DNA, 15 bp, Homo sapiens
cacagattcattgat

SEQ ID NO: 1190762 - DNA, 15 bp, Homo sapiens
tcacagattcattga

SEQ ID NO: 1190763 - DNA, 15 bp, Homo sapiens
atcacagattcattg

SEQ ID NO: 1190764 - DNA, 15 bp, Homo sapiens
tatcacagattcatt

SEQ ID NO: 1190765 - DNA, 15 bp, Homo sapiens
ctatcacagattcat

SEQ ID NO: 1190766 - DNA, 15 bp, Homo sapiens
tctatcacagattca

SEQ ID NO: 1190767 - DNA, 15 bp, Homo sapiens
ttctatcacagattc

SEQ ID NO: 1190768 - DNA, 15 bp, Homo sapiens
cttctatcacagatt

SEQ ID NO: 1190769 - DNA, 15 bp, Homo sapiens
gcttctatcacagat

SEQ ID NO: 1190770 - DNA, 15 bp, Homo sapiens
tgcttctatcacaga

SEQ ID NO: 1190771 - DNA, 15 bp, Homo sapiens
ctgcttctatcacag

SEQ ID NO: 1190772 - DNA, 15 bp, Homo sapiens
tctgcttctatcaca

SEQ ID NO: 1190773 - DNA, 15 bp, Homo sapiens
atctgcttctatcac

SEQ ID NO: 1190774 - DNA, 15 bp, Homo sapiens
catctgcttctatca

SEQ ID NO: 1190775 - DNA, 15 bp, Homo sapiens
tcatctgcttctatc

SEQ ID NO: 1190776 - DNA, 15 bp, Homo sapiens
ttcatctgcttctat

SEQ ID NO: 1190777 - DNA, 15 bp, Homo sapiens
attcatctgcttcta

SEQ ID NO: 1190778 - DNA, 15 bp, Homo sapiens
gattcatctgcttct

SEQ ID NO: 1190779 - DNA, 15 bp, Homo sapiens
tgattcatctgcttc

SEQ ID NO: 1190780 - DNA, 15 bp, Homo sapiens
ttgattcatctgctt

SEQ ID NO: 1190781 - DNA, 15 bp, Homo sapiens
tttgattcatctgct

SEQ ID NO: 1190782 - DNA, 15 bp, Homo sapiens
atttgattcatctgc

SEQ ID NO: 1190783 - DNA, 15 bp, Homo sapiens
gatttgattcatctg

SEQ ID NO: 1190784 - DNA, 15 bp, Homo sapiens
agatttgattcatct

SEQ ID NO: 1190785 - DNA, 15 bp, Homo sapiens
gagatttgattcatc

SEQ ID NO: 1190786 - DNA, 15 bp, Homo sapiens
tgagatttgattcat

SEQ ID NO: 1190787 - DNA, 15 bp, Homo sapiens
atgagatttgattca

SEQ ID NO: 1190788 - DNA, 15 bp, Homo sapiens
gatgagatttgattc

SEQ ID NO: 1190789 - DNA, 15 bp, Homo sapiens
agatgagatttgatt

SEQ ID NO: 1190790 - DNA, 15 bp, Homo sapiens
aagatgagatttgat

SEQ ID NO: 1190791 - DNA, 15 bp, Homo sapiens
aaagatgagatttga

SEQ ID NO: 1190792 - DNA, 15 bp, Homo sapiens
caaagatgagatttg

SEQ ID NO: 1190793 - DNA, 15 bp, Homo sapiens
acaaagatgagattt

SEQ ID NO: 1190794 - DNA, 15 bp, Homo sapiens
cacaaagatgagatt

SEQ ID NO: 1190795 - DNA, 15 bp, Homo sapiens
acacaaagatgagat

SEQ ID NO: 1190796 - DNA, 15 bp, Homo sapiens
cacacaaagatgaga

SEQ ID NO: 1190797 - DNA, 15 bp, Homo sapiens
tcacacaaagatgag

SEQ ID NO: 1190798 - DNA, 15 bp, Homo sapiens
atcacacaaagatga

SEQ ID NO: 1190799 - DNA, 15 bp, Homo sapiens
aatcacacaaagatg

SEQ ID NO: 1190800 - DNA, 15 bp, Homo sapiens
taatcacacaaagat

SEQ ID NO: 1190801 - DNA, 15 bp, Homo sapiens
ataatcacacaaaga

SEQ ID NO: 1190802 - DNA, 15 bp, Homo sapiens
tataatcacacaaag

SEQ ID NO: 1190803 - DNA, 15 bp, Homo sapiens
ttataatcacacaaa

SEQ ID NO: 1190804 - DNA, 15 bp, Homo sapiens
tttataatcacacaa

SEQ ID NO: 1190805 - DNA, 15 bp, Homo sapiens
ctttataatcacaca

SEQ ID NO: 1190806 - DNA, 15 bp, Homo sapiens
gctttataatcacac

SEQ ID NO: 1190807 - DNA, 15 bp, Homo sapiens
agctttataatcaca

SEQ ID NO: 1190808 - DNA, 15 bp, Homo sapiens
cagctttataatcac

SEQ ID NO: 1190809 - DNA, 15 bp, Homo sapiens
acagctttataatca

SEQ ID NO: 1190810 - DNA, 15 bp, Homo sapiens
gacagctttataatc

SEQ ID NO: 1190811 - DNA, 15 bp, Homo sapiens
agacagctttataat

SEQ ID NO: 1190812 - DNA, 15 bp, Homo sapiens
cagacagctttataa

SEQ ID NO: 1190813 - DNA, 15 bp, Homo sapiens
acagacagctttata

SEQ ID NO: 1190814 - DNA, 15 bp, Homo sapiens
cacagacagctttat

SEQ ID NO: 1190815 - DNA, 15 bp, Homo sapiens
ccacagacagcttta

SEQ ID NO: 1190816 - DNA, 15 bp, Homo sapiens
accacagacagcttt

SEQ ID NO: 1190817 - DNA, 15 bp, Homo sapiens
taccacagacagctt

SEQ ID NO: 1190818 - DNA, 15 bp, Homo sapiens
ataccacagacagct

SEQ ID NO: 1190819 - DNA, 15 bp, Homo sapiens
aataccacagacagc

SEQ ID NO: 1190820 - DNA, 15 bp, Homo sapiens
gaataccacagacag

SEQ ID NO: 1190821 - DNA, 15 bp, Homo sapiens
tgaataccacagaca

SEQ ID NO: 1190822 - DNA, 15 bp, Homo sapiens
gtgaataccacagac

SEQ ID NO: 1190823 - DNA, 15 bp, Homo sapiens
cgtgaataccacaga

SEQ ID NO: 1190824 - DNA, 15 bp, Homo sapiens
gcgtgaataccacag

SEQ ID NO: 1190825 - DNA, 15 bp, Homo sapiens
ggcgtgaataccaca

SEQ ID NO: 1190826 - DNA, 15 bp, Homo sapiens
tggcgtgaataccac

SEQ ID NO: 1190827 - DNA, 15 bp, Homo sapiens
gtggcgtgaatacca

SEQ ID NO: 1190828 - DNA, 15 bp, Homo sapiens
ggtggcgtgaatacc

SEQ ID NO: 1190829 - DNA, 15 bp, Homo sapiens
tggtggcgtgaatac

SEQ ID NO: 1190830 - DNA, 15 bp, Homo sapiens
ctggtggcgtgaata

SEQ ID NO: 1190831 - DNA, 15 bp, Homo sapiens
cctggtggcgtgaat

SEQ ID NO: 1190832 - DNA, 15 bp, Homo sapiens
ccctggtggcgtgaa

SEQ ID NO: 1190833 - DNA, 15 bp, Homo sapiens
cccctggtggcgtga

SEQ ID NO: 1190834 - DNA, 15 bp, Homo sapiens
acccctggtggcgtg

SEQ ID NO: 1190835 - DNA, 15 bp, Homo sapiens
tacccctggtggcgt

SEQ ID NO: 1190836 - DNA, 15 bp, Homo sapiens
gtacccctggtggcg

SEQ ID NO: 1190837 - DNA, 15 bp, Homo sapiens
tgtacccctggtggc

SEQ ID NO: 1190838 - DNA, 15 bp, Homo sapiens
atgtacccctggtgg

SEQ ID NO: 1190839 - DNA, 15 bp, Homo sapiens
tatgtacccctggtg

SEQ ID NO: 1190840 - DNA, 15 bp, Homo sapiens
ctatgtacccctggt

SEQ ID NO: 1190841 - DNA, 15 bp, Homo sapiens
tctatgtacccctgg

SEQ ID NO: 1190842 - DNA, 15 bp, Homo sapiens
ttctatgtacccctg

SEQ ID NO: 1190843 - DNA, 15 bp, Homo sapiens
cttctatgtacccct

SEQ ID NO: 1190844 - DNA, 15 bp, Homo sapiens
tcttctatgtacccc

SEQ ID NO: 1190845 - DNA, 15 bp, Homo sapiens
atcttctatgtaccc

SEQ ID NO: 1190846 - DNA, 15 bp, Homo sapiens
catcttctatgtacc

SEQ ID NO: 1190847 - DNA, 15 bp, Homo sapiens
gcatcttctatgtac

SEQ ID NO: 1190848 - DNA, 15 bp, Homo sapiens
ggcatcttctatgta

SEQ ID NO: 1190849 - DNA, 15 bp, Homo sapiens
aggcatcttctatgt

SEQ ID NO: 1190850 - DNA, 15 bp, Homo sapiens
caggcatcttctatg

SEQ ID NO: 1190851 - DNA, 15 bp, Homo sapiens
tcaggcatcttctat

SEQ ID NO: 1190852 - DNA, 15 bp, Homo sapiens
ctcaggcatcttcta

SEQ ID NO: 1190853 - DNA, 15 bp, Homo sapiens
actcaggcatcttct

SEQ ID NO: 1190854 - DNA, 15 bp, Homo sapiens
cactcaggcatcttc

SEQ ID NO: 1190855 - DNA, 15 bp, Homo sapiens
tcactcaggcatctt

SEQ ID NO: 1190856 - DNA, 15 bp, Homo sapiens
ctcactcaggcatct

SEQ ID NO: 1190857 - DNA, 15 bp, Homo sapiens
cctcactcaggcatc

SEQ ID NO: 1190858 - DNA, 15 bp, Homo sapiens
acctcactcaggcat

SEQ ID NO: 1190859 - DNA, 15 bp, Homo sapiens
aacctcactcaggca

SEQ ID NO: 1190860 - DNA, 15 bp, Homo sapiens
aaacctcactcaggc

SEQ ID NO: 1190861 - DNA, 15 bp, Homo sapiens
caaacctcactcagg

SEQ ID NO: 1190862 - DNA, 15 bp, Homo sapiens
ccaaacctcactcag

SEQ ID NO: 1190863 - DNA, 15 bp, Homo sapiens
gccaaacctcactca

SEQ ID NO: 1190864 - DNA, 15 bp, Homo sapiens
tgccaaacctcactc

SEQ ID NO: 1190865 - DNA, 15 bp, Homo sapiens
ttgccaaacctcact

SEQ ID NO: 1190866 - DNA, 15 bp, Homo sapiens
tttgccaaacctcac

SEQ ID NO: 1190867 - DNA, 15 bp, Homo sapiens
ttttgccaaacctca

SEQ ID NO: 1190868 - DNA, 15 bp, Homo sapiens
cttttgccaaacctc

SEQ ID NO: 1190869 - DNA, 15 bp, Homo sapiens
acttttgccaaacct

SEQ ID NO: 1190870 - DNA, 15 bp, Homo sapiens
tacttttgccaaacc

SEQ ID NO: 1190871 - DNA, 15 bp, Homo sapiens
gtacttttgccaaac

SEQ ID NO: 1190872 - DNA, 15 bp, Homo sapiens
agtacttttgccaaa

SEQ ID NO: 1190873 - DNA, 15 bp, Homo sapiens
tagtacttttgccaa

SEQ ID NO: 1190874 - DNA, 15 bp, Homo sapiens
ttagtacttttgcca

SEQ ID NO: 1190875 - DNA, 15 bp, Homo sapiens
cttagtacttttgcc

SEQ ID NO: 1190876 - DNA, 15 bp, Homo sapiens
ccttagtacttttgc

SEQ ID NO: 1190877 - DNA, 15 bp, Homo sapiens
cccttagtacttttg

SEQ ID NO: 1190878 - DNA, 15 bp, Homo sapiens
gcccttagtactttt

SEQ ID NO: 1190879 - DNA, 15 bp, Homo sapiens
ggcccttagtacttt

SEQ ID NO: 1190880 - DNA, 15 bp, Homo sapiens
aggcccttagtactt

SEQ ID NO: 1190881 - DNA, 15 bp, Homo sapiens
caggcccttagtact

SEQ ID NO: 1190882 - DNA, 15 bp, Homo sapiens
acaggcccttagtac

SEQ ID NO: 1190883 - DNA, 15 bp, Homo sapiens
gacaggcccttagta

SEQ ID NO: 1190884 - DNA, 15 bp, Homo sapiens
ggacaggcccttagt

SEQ ID NO: 1190885 - DNA, 15 bp, Homo sapiens
tggacaggcccttag

SEQ ID NO: 1190886 - DNA, 15 bp, Homo sapiens
gtggacaggccctta

SEQ ID NO: 1190887 - DNA, 15 bp, Homo sapiens
ggtggacaggccctt

SEQ ID NO: 1190888 - DNA, 15 bp, Homo sapiens
aggtggacaggccct

SEQ ID NO: 1190889 - DNA, 15 bp, Homo sapiens
taggtggacaggccc

SEQ ID NO: 1190890 - DNA, 15 bp, Homo sapiens
ataggtggacaggcc

SEQ ID NO: 1190891 - DNA, 15 bp, Homo sapiens
tataggtggacaggc

SEQ ID NO: 1190892 - DNA, 15 bp, Homo sapiens
gtataggtggacagg

SEQ ID NO: 1190893 - DNA, 15 bp, Homo sapiens
tgtataggtggacag

SEQ ID NO: 1190894 - DNA, 15 bp, Homo sapiens
atgtataggtggaca

SEQ ID NO: 1190895 - DNA, 15 bp, Homo sapiens
catgtataggtggac

SEQ ID NO: 1190896 - DNA, 15 bp, Homo sapiens
gcatgtataggtgga

SEQ ID NO: 1190897 - DNA, 15 bp, Homo sapiens
ggcatgtataggtgg

SEQ ID NO: 1190898 - DNA, 15 bp, Homo sapiens
gggcatgtataggtg

SEQ ID NO: 1190899 - DNA, 15 bp, Homo sapiens
agggcatgtataggt

SEQ ID NO: 1190900 - DNA, 15 bp, Homo sapiens
aagggcatgtatagg

SEQ ID NO: 1190901 - DNA, 15 bp, Homo sapiens
gaagggcatgtatag

SEQ ID NO: 1190902 - DNA, 15 bp, Homo sapiens
agaagggcatgtata

SEQ ID NO: 1190903 - DNA, 15 bp, Homo sapiens
gagaagggcatgtat

SEQ ID NO: 1190904 - DNA, 15 bp, Homo sapiens
tgagaagggcatgta

SEQ ID NO: 1190905 - DNA, 15 bp, Homo sapiens
ctgagaagggcatgt

SEQ ID NO: 1190906 - DNA, 15 bp, Homo sapiens
cctgagaagggcatg

SEQ ID NO: 1190907 - DNA, 15 bp, Homo sapiens
tcctgagaagggcat

SEQ ID NO: 1190908 - DNA, 15 bp, Homo sapiens
ttcctgagaagggca

SEQ ID NO: 1190909 - DNA, 15 bp, Homo sapiens
tttcctgagaagggc

SEQ ID NO: 1190910 - DNA, 15 bp, Homo sapiens
ttttcctgagaaggg

SEQ ID NO: 1190911 - DNA, 15 bp, Homo sapiens
gttttcctgagaagg

SEQ ID NO: 1190912 - DNA, 15 bp, Homo sapiens
ggttttcctgagaag

SEQ ID NO: 1190913 - DNA, 15 bp, Homo sapiens
tggttttcctgagaa

SEQ ID NO: 1190914 - DNA, 15 bp, Homo sapiens
ttggttttcctgaga

SEQ ID NO: 1190915 - DNA, 15 bp, Homo sapiens
cttggttttcctgag

SEQ ID NO: 1190916 - DNA, 15 bp, Homo sapiens
ccttggttttcctga

SEQ ID NO: 1190917 - DNA, 15 bp, Homo sapiens
accttggttttcctg

SEQ ID NO: 1190918 - DNA, 15 bp, Homo sapiens
aaccttggttttcct

SEQ ID NO: 1190919 - DNA, 15 bp, Homo sapiens
gaaccttggttttcc

SEQ ID NO: 1190920 - DNA, 15 bp, Homo sapiens
tgaaccttggttttc

SEQ ID NO: 1190921 - DNA, 15 bp, Homo sapiens
ttgaaccttggtttt

SEQ ID NO: 1190922 - DNA, 15 bp, Homo sapiens
cttgaaccttggttt

SEQ ID NO: 1190923 - DNA, 15 bp, Homo sapiens
gcttgaaccttggtt

SEQ ID NO: 1190924 - DNA, 15 bp, Homo sapiens
agcttgaaccttggt

SEQ ID NO: 1190925 - DNA, 15 bp, Homo sapiens
gagcttgaaccttgg

SEQ ID NO: 1190926 - DNA, 15 bp, Homo sapiens
agagcttgaaccttg

SEQ ID NO: 1190927 - DNA, 15 bp, Homo sapiens
gagagcttgaacctt

SEQ ID NO: 1190928 - DNA, 15 bp, Homo sapiens
agagagcttgaacct

SEQ ID NO: 1190929 - DNA, 15 bp, Homo sapiens
tagagagcttgaacc

SEQ ID NO: 1190930 - DNA, 15 bp, Homo sapiens
atagagagcttgaac

SEQ ID NO: 1190931 - DNA, 15 bp, Homo sapiens
aatagagagcttgaa

SEQ ID NO: 1190932 - DNA, 15 bp, Homo sapiens
taatagagagcttga

SEQ ID NO: 1190933 - DNA, 15 bp, Homo sapiens
ctaatagagagcttg

SEQ ID NO: 1190934 - DNA, 15 bp, Homo sapiens
gctaatagagagctt

SEQ ID NO: 1190935 - DNA, 15 bp, Homo sapiens
agctaatagagagct

SEQ ID NO: 1190936 - DNA, 15 bp, Homo sapiens
gagctaatagagagc

SEQ ID NO: 1190937 - DNA, 15 bp, Homo sapiens
tgagctaatagagag

SEQ ID NO: 1190938 - DNA, 15 bp, Homo sapiens
ttgagctaatagaga

SEQ ID NO: 1190939 - DNA, 15 bp, Homo sapiens
gttgagctaatagag

SEQ ID NO: 1190940 - DNA, 15 bp, Homo sapiens
agttgagctaataga

SEQ ID NO: 1190941 - DNA, 15 bp, Homo sapiens
cagttgagctaatag

SEQ ID NO: 1190942 - DNA, 15 bp, Homo sapiens
ccagttgagctaata

SEQ ID NO: 1190943 - DNA, 15 bp, Homo sapiens
accagttgagctaat

SEQ ID NO: 1190944 - DNA, 15 bp, Homo sapiens
taccagttgagctaa

SEQ ID NO: 1190945 - DNA, 15 bp, Homo sapiens
ttaccagttgagcta

SEQ ID NO: 1190946 - DNA, 15 bp, Homo sapiens
cttaccagttgagct

SEQ ID NO: 1190947 - DNA, 15 bp, Homo sapiens
ccttaccagttgagc

SEQ ID NO: 1190948 - DNA, 15 bp, Homo sapiens
gccttaccagttgag

SEQ ID NO: 1190949 - DNA, 15 bp, Homo sapiens
cgccttaccagttga

SEQ ID NO: 1190950 - DNA, 15 bp, Homo sapiens
acgccttaccagttg

SEQ ID NO: 1190951 - DNA, 15 bp, Homo sapiens
tacgccttaccagtt

SEQ ID NO: 1190952 - DNA, 15 bp, Homo sapiens
ttacgccttaccagt

SEQ ID NO: 1190953 - DNA, 15 bp, Homo sapiens
cttacgccttaccag

SEQ ID NO: 1190954 - DNA, 15 bp, Homo sapiens
tcttacgccttacca

SEQ ID NO: 1190955 - DNA, 15 bp, Homo sapiens
gtcttacgccttacc

SEQ ID NO: 1190956 - DNA, 15 bp, Homo sapiens
tgtcttacgccttac

SEQ ID NO: 1190957 - DNA, 15 bp, Homo sapiens
atgtcttacgcctta

SEQ ID NO: 1190958 - DNA, 15 bp, Homo sapiens
catgtcttacgcctt

SEQ ID NO: 1190959 - DNA, 15 bp, Homo sapiens
ccatgtcttacgcct

SEQ ID NO: 1190960 - DNA, 15 bp, Homo sapiens
tccatgtcttacgcc

SEQ ID NO: 1190961 - DNA, 15 bp, Homo sapiens
ttccatgtcttacgc

SEQ ID NO: 1190962 - DNA, 15 bp, Homo sapiens
cttccatgtcttacg

SEQ ID NO: 1190963 - DNA, 15 bp, Homo sapiens
accttccatgtctta

SEQ ID NO: 1190964 - DNA, 15 bp, Homo sapiens
aaccttccatgtctt

SEQ ID NO: 1190965 - DNA, 15 bp, Homo sapiens
caaccttccatgtct

SEQ ID NO: 1190966 - DNA, 15 bp, Homo sapiens
tcaaccttccatgtc

SEQ ID NO: 1190967 - DNA, 15 bp, Homo sapiens
ctcaaccttccatgt

SEQ ID NO: 1190968 - DNA, 15 bp, Homo sapiens
cctcaaccttccatg

SEQ ID NO: 1190969 - DNA, 15 bp, Homo sapiens
gcctcaaccttccat

SEQ ID NO: 1190970 - DNA, 15 bp, Homo sapiens
ggcctcaaccttcca

SEQ ID NO: 1190971 - DNA, 15 bp, Homo sapiens
gggcctcaaccttcc

SEQ ID NO: 1190972 - DNA, 15 bp, Homo sapiens
tgggcctcaaccttc

SEQ ID NO: 1190973 - DNA, 15 bp, Homo sapiens
ttgggcctcaacctt

SEQ ID NO: 1190974 - DNA, 15 bp, Homo sapiens
attgggcctcaacct

SEQ ID NO: 1190975 - DNA, 15 bp, Homo sapiens
cattgggcctcaacc

SEQ ID NO: 1190976 - DNA, 15 bp, Homo sapiens
acattgggcctcaac

SEQ ID NO: 1190977 - DNA, 15 bp, Homo sapiens
aacattgggcctcaa

SEQ ID NO: 1190978 - DNA, 15 bp, Homo sapiens
taacattgggcctca

SEQ ID NO: 1190979 - DNA, 15 bp, Homo sapiens
ctaacattgggcctc

SEQ ID NO: 1190980 - DNA, 15 bp, Homo sapiens
tctaacattgggcct

SEQ ID NO: 1190981 - DNA, 15 bp, Homo sapiens
ttctaacattgggcc

SEQ ID NO: 1190982 - DNA, 15 bp, Homo sapiens
tttctaacattgggc

SEQ ID NO: 1190983 - DNA, 15 bp, Homo sapiens
atttctaacattggg

SEQ ID NO: 1190984 - DNA, 15 bp, Homo sapiens
tatttctaacattgg

SEQ ID NO: 1190985 - DNA, 15 bp, Homo sapiens
ctatttctaacattg

SEQ ID NO: 1190986 - DNA, 15 bp, Homo sapiens
tctatttctaacatt

SEQ ID NO: 1190987 - DNA, 15 bp, Homo sapiens
atctatttctaacat

SEQ ID NO: 1190988 - DNA, 15 bp, Homo sapiens
catctatttctaaca

SEQ ID NO: 1190989 - DNA, 15 bp, Homo sapiens
ccatctatttctaac

SEQ ID NO: 1190990 - DNA, 15 bp, Homo sapiens
tccatctatttctaa

SEQ ID NO: 1190991 - DNA, 15 bp, Homo sapiens
atccatctatttcta

SEQ ID NO: 1190992 - DNA, 15 bp, Homo sapiens
tatccatctatttct

SEQ ID NO: 1190993 - DNA, 15 bp, Homo sapiens
gtatccatctatttc

SEQ ID NO: 1190994 - DNA, 15 bp, Homo sapiens
tgtatccatctattt

SEQ ID NO: 1190995 - DNA, 15 bp, Homo sapiens
atgtatccatctatt

SEQ ID NO: 1190996 - DNA, 15 bp, Homo sapiens
tatgtatccatctat

SEQ ID NO: 1190997 - DNA, 15 bp, Homo sapiens
ttatgtatccatcta

SEQ ID NO: 1190998 - DNA, 15 bp, Homo sapiens
tttatgtatccatct

SEQ ID NO: 1190999 - DNA, 15 bp, Homo sapiens
ttttatgtatccatc

SEQ ID NO: 1191000 - DNA, 15 bp, Homo sapiens
gttttatgtatccat

SEQ ID NO: 1191001 - DNA, 15 bp, Homo sapiens
agttttatgtatcca

SEQ ID NO: 1191002 - DNA, 15 bp, Homo sapiens
aagttttatgtatcc

SEQ ID NO: 1191003 - DNA, 15 bp, Homo sapiens
gaagttttatgtatc

SEQ ID NO: 1191004 - DNA, 15 bp, Homo sapiens
tgaagttttatgtat

SEQ ID NO: 1191005 - DNA, 15 bp, Homo sapiens
atgaagttttatgta

SEQ ID NO: 1191006 - DNA, 15 bp, Homo sapiens
gatgaagttttatgt

SEQ ID NO: 1191007 - DNA, 15 bp, Homo sapiens
tgatgaagttttatg

SEQ ID NO: 1191008 - DNA, 15 bp, Homo sapiens
ttgatgaagttttat

SEQ ID NO: 1191009 - DNA, 15 bp, Homo sapiens
cttgatgaagtttta

SEQ ID NO: 1191010 - DNA, 15 bp, Homo sapiens
acttgatgaagtttt

SEQ ID NO: 1191011 - DNA, 15 bp, Homo sapiens
aacttgatgaagttt

SEQ ID NO: 1191012 - DNA, 15 bp, Homo sapiens
taacttgatgaagtt

SEQ ID NO: 1191013 - DNA, 15 bp, Homo sapiens
ttaacttgatgaagt

SEQ ID NO: 1191014 - DNA, 15 bp, Homo sapiens
attaacttgatgaag

SEQ ID NO: 1191015 - DNA, 15 bp, Homo sapiens
cattaacttgatgaa

SEQ ID NO: 1191016 - DNA, 15 bp, Homo sapiens
acattaacttgatga

SEQ ID NO: 1191017 - DNA, 15 bp, Homo sapiens
gacattaacttgatg

SEQ ID NO: 1191018 - DNA, 15 bp, Homo sapiens
tgacattaacttgat

SEQ ID NO: 1191019 - DNA, 15 bp, Homo sapiens
gtgacattaacttga

SEQ ID NO: 1191020 - DNA, 15 bp, Homo sapiens
agtgacattaacttg

SEQ ID NO: 1191021 - DNA, 15 bp, Homo sapiens
aagtgacattaactt

SEQ ID NO: 1191022 - DNA, 15 bp, Homo sapiens
aaagtgacattaact

SEQ ID NO: 1191023 - DNA, 15 bp, Homo sapiens
aaaagtgacattaac

SEQ ID NO: 1191024 - DNA, 15 bp, Homo sapiens
aaaaagtgacattaa

SEQ ID NO: 1191025 - DNA, 15 bp, Homo sapiens
gaaaaagtgacatta

SEQ ID NO: 1191026 - DNA, 15 bp, Homo sapiens
agaaaaagtgacatt

SEQ ID NO: 1191027 - DNA, 15 bp, Homo sapiens
gagaaaaagtgacat

SEQ ID NO: 1191028 - DNA, 15 bp, Homo sapiens
ggagaaaaagtgaca

SEQ ID NO: 1191029 - DNA, 15 bp, Homo sapiens
aggagaaaaagtgac

SEQ ID NO: 1191030 - DNA, 15 bp, Homo sapiens
aaggagaaaaagtga

SEQ ID NO: 1191031 - DNA, 15 bp, Homo sapiens
aaaggagaaaaagtg

SEQ ID NO: 1191032 - DNA, 15 bp, Homo sapiens
taaaggagaaaaagt

SEQ ID NO: 1191033 - DNA, 15 bp, Homo sapiens
ataaaggagaaaaag

SEQ ID NO: 1191034 - DNA, 15 bp, Homo sapiens
aataaaggagaaaaa

SEQ ID NO: 1191035 - DNA, 15 bp, Homo sapiens
aaataaaggagaaaa

SEQ ID NO: 1191036 - DNA, 15 bp, Homo sapiens
taaataaaggagaaa

SEQ ID NO: 1191037 - DNA, 15 bp, Homo sapiens
ataaataaaggagaa

SEQ ID NO: 1191038 - DNA, 15 bp, Homo sapiens
tataaataaaggaga

SEQ ID NO: 1191039 - DNA, 15 bp, Homo sapiens
ctataaataaaggag

SEQ ID NO: 1191040 - DNA, 15 bp, Homo sapiens
cctataaataaagga

SEQ ID NO: 1191041 - DNA, 15 bp, Homo sapiens
tcctataaataaagg

SEQ ID NO: 1191042 - DNA, 15 bp, Homo sapiens
ttcctataaataaag

SEQ ID NO: 1191043 - DNA, 15 bp, Homo sapiens
cttcctataaataaa

SEQ ID NO: 1191044 - DNA, 15 bp, Homo sapiens
acttcctataaataa

SEQ ID NO: 1191045 - DNA, 15 bp, Homo sapiens
tacttcctataaata

SEQ ID NO: 1191046 - DNA, 15 bp, Homo sapiens
gtacttcctataaat

SEQ ID NO: 1191047 - DNA, 15 bp, Homo sapiens
tgtacttcctataaa

SEQ ID NO: 1191048 - DNA, 15 bp, Homo sapiens
atgtacttcctataa

SEQ ID NO: 1191049 - DNA, 15 bp, Homo sapiens
aatgtacttcctata

SEQ ID NO: 1191050 - DNA, 15 bp, Homo sapiens
aaatgtacttcctat

SEQ ID NO: 1191051 - DNA, 15 bp, Homo sapiens
caaatgtacttccta

SEQ ID NO: 1191052 - DNA, 15 bp, Homo sapiens
tcaaatgtacttcct

SEQ ID NO: 1191053 - DNA, 15 bp, Homo sapiens
ttcaaatgtacttcc

SEQ ID NO: 1191054 - DNA, 15 bp, Homo sapiens
cttcaaatgtacttc

SEQ ID NO: 1191055 - DNA, 15 bp, Homo sapiens
tcttcaaatgtactt

SEQ ID NO: 1191056 - DNA, 15 bp, Homo sapiens
ttcttcaaatgtact

SEQ ID NO: 1191057 - DNA, 15 bp, Homo sapiens
gttcttcaaatgtac

SEQ ID NO: 1191058 - DNA, 15 bp, Homo sapiens
cgttcttcaaatgta

SEQ ID NO: 1191059 - DNA, 15 bp, Homo sapiens
gcgttcttcaaatgt

SEQ ID NO: 1191060 - DNA, 15 bp, Homo sapiens
tgcgttcttcaaatg

SEQ ID NO: 1191061 - DNA, 15 bp, Homo sapiens
ttgcgttcttcaaat

SEQ ID NO: 1191062 - DNA, 15 bp, Homo sapiens
cttgcgttcttcaaa

SEQ ID NO: 1191063 - DNA, 15 bp, Homo sapiens
acttgcgttcttcaa

SEQ ID NO: 1191064 - DNA, 15 bp, Homo sapiens
tacttgcgttcttca

SEQ ID NO: 1191065 - DNA, 15 bp, Homo sapiens
ctacttgcgttcttc

SEQ ID NO: 1191066 - DNA, 15 bp, Homo sapiens
tctacttgcgttctt

SEQ ID NO: 1191067 - DNA, 15 bp, Homo sapiens
ctctacttgcgttct

SEQ ID NO: 1191068 - DNA, 15 bp, Homo sapiens
cctctacttgcgttc

SEQ ID NO: 1191069 - DNA, 15 bp, Homo sapiens
ccctctacttgcgtt

SEQ ID NO: 1191070 - DNA, 15 bp, Homo sapiens
tccctctacttgcgt

SEQ ID NO: 1191071 - DNA, 15 bp, Homo sapiens
ctccctctacttgcg

SEQ ID NO: 1191072 - DNA, 15 bp, Homo sapiens
actccctctacttgc

SEQ ID NO: 1191073 - DNA, 15 bp, Homo sapiens
cactccctctacttg

SEQ ID NO: 1191074 - DNA, 15 bp, Homo sapiens
gcactccctctactt

SEQ ID NO: 1191075 - DNA, 15 bp, Homo sapiens
tgcactccctctact

SEQ ID NO: 1191076 - DNA, 15 bp, Homo sapiens
ctgcactccctctac

SEQ ID NO: 1191077 - DNA, 15 bp, Homo sapiens
cctgcactccctcta

SEQ ID NO: 1191078 - DNA, 15 bp, Homo sapiens
tcctgcactccctct

SEQ ID NO: 1191079 - DNA, 15 bp, Homo sapiens
ttcctgcactccctc

SEQ ID NO: 1191080 - DNA, 15 bp, Homo sapiens
tttcctgcactccct

SEQ ID NO: 1191081 - DNA, 15 bp, Homo sapiens
gtttcctgcactccc

SEQ ID NO: 1191082 - DNA, 15 bp, Homo sapiens
tgtttcctgcactcc

SEQ ID NO: 1191083 - DNA, 15 bp, Homo sapiens
ttgtttcctgcactc

SEQ ID NO: 1191084 - DNA, 15 bp, Homo sapiens
cttgtttcctgcact

SEQ ID NO: 1191085 - DNA, 15 bp, Homo sapiens
tcttgtttcctgcac

SEQ ID NO: 1191086 - DNA, 15 bp, Homo sapiens
ttcttgtttcctgca

SEQ ID NO: 1191087 - DNA, 15 bp, Homo sapiens
gttcttgtttcctgc

SEQ ID NO: 1191088 - DNA, 15 bp, Homo sapiens
agttcttgtttcctg

SEQ ID NO: 1191089 - DNA, 15 bp, Homo sapiens
tagttcttgtttcct

SEQ ID NO: 1191090 - DNA, 15 bp, Homo sapiens
gtagttcttgtttcc

SEQ ID NO: 1191091 - DNA, 15 bp, Homo sapiens
tgtagttcttgtttc

SEQ ID NO: 1191092 - DNA, 15 bp, Homo sapiens
ctgtagttcttgttt

SEQ ID NO: 1191093 - DNA, 15 bp, Homo sapiens
cctgtagttcttgtt

SEQ ID NO: 1191094 - DNA, 15 bp, Homo sapiens
tcctgtagttcttgt

SEQ ID NO: 1191095 - DNA, 15 bp, Homo sapiens
atcctgtagttcttg

SEQ ID NO: 1191096 - DNA, 15 bp, Homo sapiens
catcctgtagttctt

SEQ ID NO: 1191097 - DNA, 15 bp, Homo sapiens
acatcctgtagttct

SEQ ID NO: 1191098 - DNA, 15 bp, Homo sapiens
tacatcctgtagttc

SEQ ID NO: 1191099 - DNA, 15 bp, Homo sapiens
ctacatcctgtagtt

SEQ ID NO: 1191100 - DNA, 15 bp, Homo sapiens
cctacatcctgtagt

SEQ ID NO: 1191101 - DNA, 15 bp, Homo sapiens
tcctacatcctgtag

SEQ ID NO: 1191102 - DNA, 15 bp, Homo sapiens
ttcctacatcctgta

SEQ ID NO: 1191103 - DNA, 15 bp, Homo sapiens
cttcctacatcctgt

SEQ ID NO: 1191104 - DNA, 15 bp, Homo sapiens
tcttcctacatcctg

SEQ ID NO: 1191105 - DNA, 15 bp, Homo sapiens
gtcttcctacatcct

SEQ ID NO: 1191106 - DNA, 15 bp, Homo sapiens
ggtcttcctacatcc

SEQ ID NO: 1191107 - DNA, 15 bp, Homo sapiens
gggtcttcctacatc

SEQ ID NO: 1191108 - DNA, 15 bp, Homo sapiens
agggtcttcctacat

SEQ ID NO: 1191109 - DNA, 15 bp, Homo sapiens
gagggtcttcctaca

SEQ ID NO: 1191110 - DNA, 15 bp, Homo sapiens
ggagggtcttcctac

SEQ ID NO: 1191111 - DNA, 15 bp, Homo sapiens
aggagggtcttccta

SEQ ID NO: 1191112 - DNA, 15 bp, Homo sapiens
caggagggtcttcct

SEQ ID NO: 1191113 - DNA, 15 bp, Homo sapiens
tcaggagggtcttcc

SEQ ID NO: 1191114 - DNA, 15 bp, Homo sapiens
ctcaggagggtcttc

SEQ ID NO: 1191115 - DNA, 15 bp, Homo sapiens
cctcaggagggtctt

SEQ ID NO: 1191116 - DNA, 15 bp, Homo sapiens
tcctcaggagggtct

SEQ ID NO: 1191117 - DNA, 15 bp, Homo sapiens
ctcctcaggagggtc

SEQ ID NO: 1191118 - DNA, 15 bp, Homo sapiens
actcctcaggagggt

SEQ ID NO: 1191119 - DNA, 15 bp, Homo sapiens
cactcctcaggaggg

SEQ ID NO: 1191120 - DNA, 15 bp, Homo sapiens
tcactcctcaggagg

SEQ ID NO: 1191121 - DNA, 15 bp, Homo sapiens
ttcactcctcaggag

SEQ ID NO: 1191122 - DNA, 15 bp, Homo sapiens
cttcactcctcagga

SEQ ID NO: 1191123 - DNA, 15 bp, Homo sapiens
tcttcactcctcagg

SEQ ID NO: 1191124 - DNA, 15 bp, Homo sapiens
ctcttcactcctcag

SEQ ID NO: 1191125 - DNA, 15 bp, Homo sapiens
actcttcactcctca

SEQ ID NO: 1191126 - DNA, 15 bp, Homo sapiens
cactcttcactcctc

SEQ ID NO: 1191127 - DNA, 15 bp, Homo sapiens
tcactcttcactcct

SEQ ID NO: 1191128 - DNA, 15 bp, Homo sapiens
gtcactcttcactcc

SEQ ID NO: 1191129 - DNA, 15 bp, Homo sapiens
tgtcactcttcactc

SEQ ID NO: 1191130 - DNA, 15 bp, Homo sapiens
atgtcactcttcact

SEQ ID NO: 1191131 - DNA, 15 bp, Homo sapiens
catgtcactcttcac

SEQ ID NO: 1191132 - DNA, 15 bp, Homo sapiens
gcatgtcactcttca

SEQ ID NO: 1191133 - DNA, 15 bp, Homo sapiens
ggcatgtcactcttc

SEQ ID NO: 1191134 - DNA, 15 bp, Homo sapiens
tggcatgtcactctt

SEQ ID NO: 1191135 - DNA, 15 bp, Homo sapiens
gtggcatgtcactct

SEQ ID NO: 1191136 - DNA, 15 bp, Homo sapiens
ggtggcatgtcactc

SEQ ID NO: 1191137 - DNA, 15 bp, Homo sapiens
cggtggcatgtcact

SEQ ID NO: 1191138 - DNA, 15 bp, Homo sapiens
gcggtggcatgtcac

SEQ ID NO: 1191139 - DNA, 15 bp, Homo sapiens
tgcggtggcatgtca

SEQ ID NO: 1191140 - DNA, 15 bp, Homo sapiens
ctgcggtggcatgtc

SEQ ID NO: 1191141 - DNA, 15 bp, Homo sapiens
cctgcggtggcatgt

SEQ ID NO: 1191142 - DNA, 15 bp, Homo sapiens
tcctgcggtggcatg

SEQ ID NO: 1191143 - DNA, 15 bp, Homo sapiens
atcctgcggtggcat

SEQ ID NO: 1191144 - DNA, 15 bp, Homo sapiens
gatcctgcggtggca

SEQ ID NO: 1191145 - DNA, 15 bp, Homo sapiens
ggatcctgcggtggc

SEQ ID NO: 1191146 - DNA, 15 bp, Homo sapiens
aggatcctgcggtgg

SEQ ID NO: 1191147 - DNA, 15 bp, Homo sapiens
aaggatcctgcggtg

SEQ ID NO: 1191148 - DNA, 15 bp, Homo sapiens
aaaggatcctgcggt

SEQ ID NO: 1191149 - DNA, 15 bp, Homo sapiens
caaaggatcctgcgg

SEQ ID NO: 1191150 - DNA, 15 bp, Homo sapiens
gcaaaggatcctgcg

SEQ ID NO: 1191151 - DNA, 15 bp, Homo sapiens
agcaaaggatcctgc

SEQ ID NO: 1191152 - DNA, 15 bp, Homo sapiens
gagcaaaggatcctg

SEQ ID NO: 1191153 - DNA, 15 bp, Homo sapiens
agagcaaaggatcct

SEQ ID NO: 1191154 - DNA, 15 bp, Homo sapiens
cagagcaaaggatcc

SEQ ID NO: 1191155 - DNA, 15 bp, Homo sapiens
gcagagcaaaggatc

SEQ ID NO: 1191156 - DNA, 15 bp, Homo sapiens
tgcagagcaaaggat

SEQ ID NO: 1191157 - DNA, 15 bp, Homo sapiens
gtgcagagcaaagga

SEQ ID NO: 1191158 - DNA, 15 bp, Homo sapiens
cgtgcagagcaaagg

SEQ ID NO: 1191159 - DNA, 15 bp, Homo sapiens
tcgtgcagagcaaag

SEQ ID NO: 1191160 - DNA, 15 bp, Homo sapiens
ctcgtgcagagcaaa

SEQ ID NO: 1191161 - DNA, 15 bp, Homo sapiens
actcgtgcagagcaa

SEQ ID NO: 1191162 - DNA, 15 bp, Homo sapiens
aactcgtgcagagca

SEQ ID NO: 1191163 - DNA, 15 bp, Homo sapiens
taactcgtgcagagc

SEQ ID NO: 1191164 - DNA, 15 bp, Homo sapiens
gtaactcgtgcagag

SEQ ID NO: 1191165 - DNA, 15 bp, Homo sapiens
ggtaactcgtgcaga

SEQ ID NO: 1191166 - DNA, 15 bp, Homo sapiens
aggtaactcgtgcag

SEQ ID NO: 1191167 - DNA, 15 bp, Homo sapiens
caggtaactcgtgca

SEQ ID NO: 1191168 - DNA, 15 bp, Homo sapiens
acaggtaactcgtgc

SEQ ID NO: 1191169 - DNA, 15 bp, Homo sapiens
aacaggtaactcgtg

SEQ ID NO: 1191170 - DNA, 15 bp, Homo sapiens
taacaggtaactcgt

SEQ ID NO: 1191171 - DNA, 15 bp, Homo sapiens
ttaacaggtaactcg

SEQ ID NO: 1191172 - DNA, 15 bp, Homo sapiens
tttaacaggtaactc

SEQ ID NO: 1191173 - DNA, 15 bp, Homo sapiens
gtttaacaggtaact

SEQ ID NO: 1191174 - DNA, 15 bp, Homo sapiens
agtttaacaggtaac

SEQ ID NO: 1191175 - DNA, 15 bp, Homo sapiens
aagtttaacaggtaa

SEQ ID NO: 1191176 - DNA, 15 bp, Homo sapiens
aaagtttaacaggta

SEQ ID NO: 1191177 - DNA, 15 bp, Homo sapiens
caaagtttaacaggt

SEQ ID NO: 1191178 - DNA, 15 bp, Homo sapiens
ccaaagtttaacagg

SEQ ID NO: 1191179 - DNA, 15 bp, Homo sapiens
tccaaagtttaacag

SEQ ID NO: 1191180 - DNA, 15 bp, Homo sapiens
ttccaaagtttaaca

SEQ ID NO: 1191181 - DNA, 15 bp, Homo sapiens
gttccaaagtttaac

SEQ ID NO: 1191182 - DNA, 15 bp, Homo sapiens
tgttccaaagtttaa

SEQ ID NO: 1191183 - DNA, 15 bp, Homo sapiens
gtgttccaaagttta

SEQ ID NO: 1191184 - DNA, 15 bp, Homo sapiens
ggtgttccaaagttt

SEQ ID NO: 1191185 - DNA, 15 bp, Homo sapiens
aggtgttccaaagtt

SEQ ID NO: 1191186 - DNA, 15 bp, Homo sapiens
taggtgttccaaagt

SEQ ID NO: 1191187 - DNA, 15 bp, Homo sapiens
gtaggtgttccaaag

SEQ ID NO: 1191188 - DNA, 15 bp, Homo sapiens
ggtaggtgttccaaa

SEQ ID NO: 1191189 - DNA, 15 bp, Homo sapiens
tggtaggtgttccaa

SEQ ID NO: 1191190 - DNA, 15 bp, Homo sapiens
ttggtaggtgttcca

SEQ ID NO: 1191191 - DNA, 15 bp, Homo sapiens
tttggtaggtgttcc

SEQ ID NO: 1191192 - DNA, 15 bp, Homo sapiens
ttttggtaggtgttc

SEQ ID NO: 1191193 - DNA, 15 bp, Homo sapiens
tttttggtaggtgtt

SEQ ID NO: 1191194 - DNA, 15 bp, Homo sapiens
ttttttggtaggtgt

SEQ ID NO: 1191195 - DNA, 15 bp, Homo sapiens
attttttggtaggtg

SEQ ID NO: 1191196 - DNA, 15 bp, Homo sapiens
tattttttggtaggt

SEQ ID NO: 1191197 - DNA, 15 bp, Homo sapiens
ttattttttggtagg

SEQ ID NO: 1191198 - DNA, 15 bp, Homo sapiens
cttattttttggtag

SEQ ID NO: 1191199 - DNA, 15 bp, Homo sapiens
acttattttttggta

SEQ ID NO: 1191200 - DNA, 15 bp, Homo sapiens
aacttattttttggt

SEQ ID NO: 1191201 - DNA, 15 bp, Homo sapiens
aaacttattttttgg

SEQ ID NO: 1191202 - DNA, 15 bp, Homo sapiens
caaacttattttttg

SEQ ID NO: 1191203 - DNA, 15 bp, Homo sapiens
tcaaacttatttttt

SEQ ID NO: 1191204 - DNA, 15 bp, Homo sapiens
atcaaacttattttt

SEQ ID NO: 1191205 - DNA, 15 bp, Homo sapiens
tatcaaacttatttt

SEQ ID NO: 1191206 - DNA, 15 bp, Homo sapiens
ttatcaaacttattt

SEQ ID NO: 1191207 - DNA, 15 bp, Homo sapiens
gttatcaaacttatt

SEQ ID NO: 1191208 - DNA, 15 bp, Homo sapiens
tgttatcaaacttat

SEQ ID NO: 1191209 - DNA, 15 bp, Homo sapiens
atgttatcaaactta

SEQ ID NO: 1191210 - DNA, 15 bp, Homo sapiens
aatgttatcaaactt

SEQ ID NO: 1191211 - DNA, 15 bp, Homo sapiens
aaatgttatcaaact

SEQ ID NO: 1191212 - DNA, 15 bp, Homo sapiens
taaatgttatcaaac

SEQ ID NO: 1191213 - DNA, 15 bp, Homo sapiens
ttaaatgttatcaaa

SEQ ID NO: 1191214 - DNA, 15 bp, Homo sapiens
tttaaatgttatcaa

SEQ ID NO: 1191215 - DNA, 15 bp, Homo sapiens
ttttaaatgttatca

SEQ ID NO: 1191216 - DNA, 15 bp, Homo sapiens
cttttaaatgttatc

SEQ ID NO: 1191217 - DNA, 15 bp, Homo sapiens
tcttttaaatgttat

SEQ ID NO: 1191218 - DNA, 15 bp, Homo sapiens
atcttttaaatgtta

SEQ ID NO: 1191219 - DNA, 15 bp, Homo sapiens
catcttttaaatgtt

SEQ ID NO: 1191220 - DNA, 15 bp, Homo sapiens
ccatcttttaaatgt

SEQ ID NO: 1191221 - DNA, 15 bp, Homo sapiens
cccatcttttaaatg

SEQ ID NO: 1191222 - DNA, 15 bp, Homo sapiens
gcccatcttttaaat

SEQ ID NO: 1191223 - DNA, 15 bp, Homo sapiens
cgcccatcttttaaa

SEQ ID NO: 1191224 - DNA, 15 bp, Homo sapiens
acgcccatcttttaa

SEQ ID NO: 1191225 - DNA, 15 bp, Homo sapiens
aacgcccatctttta

SEQ ID NO: 1191226 - DNA, 15 bp, Homo sapiens
aaacgcccatctttt

SEQ ID NO: 1191227 - DNA, 15 bp, Homo sapiens
gaaacgcccatcttt

SEQ ID NO: 1191228 - DNA, 15 bp, Homo sapiens
ggaaacgcccatctt

SEQ ID NO: 1191229 - DNA, 15 bp, Homo sapiens
gggaaacgcccatct

SEQ ID NO: 1191230 - DNA, 15 bp, Homo sapiens
ggggaaacgcccatc

SEQ ID NO: 1191231 - DNA, 15 bp, Homo sapiens
gggggaaacgcccat

SEQ ID NO: 1191232 - DNA, 15 bp, Homo sapiens
tgggggaaacgccca

SEQ ID NO: 1191233 - DNA, 15 bp, Homo sapiens
ttgggggaaacgccc

SEQ ID NO: 1191234 - DNA, 15 bp, Homo sapiens
attgggggaaacgcc

SEQ ID NO: 1191235 - DNA, 15 bp, Homo sapiens
cattgggggaaacgc

SEQ ID NO: 1191236 - DNA, 15 bp, Homo sapiens
tcattgggggaaacg

SEQ ID NO: 1191237 - DNA, 15 bp, Homo sapiens
ttcattgggggaaac

SEQ ID NO: 1191238 - DNA, 15 bp, Homo sapiens
tttcattgggggaaa

SEQ ID NO: 1191239 - DNA, 15 bp, Homo sapiens
atttcattgggggaa

SEQ ID NO: 1191240 - DNA, 15 bp, Homo sapiens
tatttcattggggga

SEQ ID NO: 1191241 - DNA, 15 bp, Homo sapiens
gtatttcattggggg

SEQ ID NO: 1191242 - DNA, 15 bp, Homo sapiens
tgtatttcattgggg

SEQ ID NO: 1191243 - DNA, 15 bp, Homo sapiens
gtgtatttcattggg

SEQ ID NO: 1191244 - DNA, 15 bp, Homo sapiens
tgtgtatttcattgg

SEQ ID NO: 1191245 - DNA, 15 bp, Homo sapiens
ttgtgtatttcattg

SEQ ID NO: 1191246 - DNA, 15 bp, Homo sapiens
cttgtgtatttcatt

SEQ ID NO: 1191247 - DNA, 15 bp, Homo sapiens
acttgtgtatttcat

SEQ ID NO: 1191248 - DNA, 15 bp, Homo sapiens
tacttgtgtatttca

SEQ ID NO: 1191249 - DNA, 15 bp, Homo sapiens
ttacttgtgtatttc

SEQ ID NO: 1191250 - DNA, 15 bp, Homo sapiens
tttacttgtgtattt

SEQ ID NO: 1191251 - DNA, 15 bp, Homo sapiens
gtttacttgtgtatt

SEQ ID NO: 1191252 - DNA, 15 bp, Homo sapiens
tgtttacttgtgtat

SEQ ID NO: 1191253 - DNA, 15 bp, Homo sapiens
atgtttacttgtgta

SEQ ID NO: 1191254 - DNA, 15 bp, Homo sapiens
aatgtttacttgtgt

SEQ ID NO: 1191255 - DNA, 15 bp, Homo sapiens
gaatgtttacttgtg

SEQ ID NO: 1191256 - DNA, 15 bp, Homo sapiens
ggaatgtttacttgt

SEQ ID NO: 1191257 - DNA, 15 bp, Homo sapiens
tggaatgtttacttg

SEQ ID NO: 1191258 - DNA, 15 bp, Homo sapiens
ttggaatgtttactt

SEQ ID NO: 1191259 - DNA, 15 bp, Homo sapiens
gttggaatgtttact

SEQ ID NO: 1191260 - DNA, 15 bp, Homo sapiens
tgttggaatgtttac

SEQ ID NO: 1191261 - DNA, 15 bp, Homo sapiens
atgttggaatgttta

SEQ ID NO: 1191262 - DNA, 15 bp, Homo sapiens
aatgttggaatgttt

SEQ ID NO: 1191263 - DNA, 15 bp, Homo sapiens
caatgttggaatgtt

SEQ ID NO: 1191264 - DNA, 15 bp, Homo sapiens
acaatgttggaatgt

SEQ ID NO: 1191265 - DNA, 15 bp, Homo sapiens
gacaatgttggaatg

SEQ ID NO: 1191266 - DNA, 15 bp, Homo sapiens
agacaatgttggaat

SEQ ID NO: 1191267 - DNA, 15 bp, Homo sapiens
aagacaatgttggaa

SEQ ID NO: 1191268 - DNA, 15 bp, Homo sapiens
aaagacaatgttgga

SEQ ID NO: 1191269 - DNA, 15 bp, Homo sapiens
taaagacaatgttgg

SEQ ID NO: 1191270 - DNA, 15 bp, Homo sapiens
ctaaagacaatgttg

SEQ ID NO: 1191271 - DNA, 15 bp, Homo sapiens
cctaaagacaatgtt

SEQ ID NO: 1191272 - DNA, 15 bp, Homo sapiens
tcctaaagacaatgt

SEQ ID NO: 1191273 - DNA, 15 bp, Homo sapiens
ctcctaaagacaatg

SEQ ID NO: 1191274 - DNA, 15 bp, Homo sapiens
actcctaaagacaat

SEQ ID NO: 1191275 - DNA, 15 bp, Homo sapiens
cactcctaaagacaa

SEQ ID NO: 1191276 - DNA, 15 bp, Homo sapiens
tcactcctaaagaca

SEQ ID NO: 1191277 - DNA, 15 bp, Homo sapiens
atcactcctaaagac

SEQ ID NO: 1191278 - DNA, 15 bp, Homo sapiens
aatcactcctaaaga

SEQ ID NO: 1191279 - DNA, 15 bp, Homo sapiens
aaatcactcctaaag

SEQ ID NO: 1191280 - DNA, 15 bp, Homo sapiens
caaatcactcctaaa

SEQ ID NO: 1191281 - DNA, 15 bp, Homo sapiens
gcaaatcactcctaa

SEQ ID NO: 1191282 - DNA, 15 bp, Homo sapiens
tgcaaatcactccta

SEQ ID NO: 1191283 - DNA, 15 bp, Homo sapiens
gtgcaaatcactcct

SEQ ID NO: 1191284 - DNA, 15 bp, Homo sapiens
ggtgcaaatcactcc

SEQ ID NO: 1191285 - DNA, 15 bp, Homo sapiens
aggtgcaaatcactc

SEQ ID NO: 1191286 - DNA, 15 bp, Homo sapiens
aaggtgcaaatcact

SEQ ID NO: 1191287 - DNA, 15 bp, Homo sapiens
caaggtgcaaatcac

SEQ ID NO: 1191288 - DNA, 15 bp, Homo sapiens
gcaaggtgcaaatca

SEQ ID NO: 1191289 - DNA, 15 bp, Homo sapiens
tgcaaggtgcaaatc

SEQ ID NO: 1191290 - DNA, 15 bp, Homo sapiens
ttgcaaggtgcaaat

SEQ ID NO: 1191291 - DNA, 15 bp, Homo sapiens
tttgcaaggtgcaaa

SEQ ID NO: 1191292 - DNA, 15 bp, Homo sapiens
ttttgcaaggtgcaa

SEQ ID NO: 1191293 - DNA, 15 bp, Homo sapiens
tttttgcaaggtgca

SEQ ID NO: 1191294 - DNA, 15 bp, Homo sapiens
atttttgcaaggtgc

SEQ ID NO: 1191295 - DNA, 15 bp, Homo sapiens
catttttgcaaggtg

SEQ ID NO: 1191296 - DNA, 15 bp, Homo sapiens
ccatttttgcaaggt

SEQ ID NO: 1191297 - DNA, 15 bp, Homo sapiens
accatttttgcaagg

SEQ ID NO: 1191298 - DNA, 15 bp, Homo sapiens
gaccatttttgcaag

SEQ ID NO: 1191299 - DNA, 15 bp, Homo sapiens
ggaccatttttgcaa

SEQ ID NO: 1191300 - DNA, 15 bp, Homo sapiens
aggaccatttttgca

SEQ ID NO: 1191301 - DNA, 15 bp, Homo sapiens
caggaccatttttgc

SEQ ID NO: 1191302 - DNA, 15 bp, Homo sapiens
ccaggaccatttttg

SEQ ID NO: 1191303 - DNA, 15 bp, Homo sapiens
tccaggaccattttt

SEQ ID NO: 1191304 - DNA, 15 bp, Homo sapiens
ctccaggaccatttt

SEQ ID NO: 1191305 - DNA, 15 bp, Homo sapiens
actccaggaccattt

SEQ ID NO: 1191306 - DNA, 15 bp, Homo sapiens
aactccaggaccatt

SEQ ID NO: 1191307 - DNA, 15 bp, Homo sapiens
caactccaggaccat

SEQ ID NO: 1191308 - DNA, 15 bp, Homo sapiens
ccaactccaggacca

SEQ ID NO: 1191309 - DNA, 15 bp, Homo sapiens
accaactccaggacc

SEQ ID NO: 1191310 - DNA, 15 bp, Homo sapiens
taccaactccaggac

SEQ ID NO: 1191311 - DNA, 15 bp, Homo sapiens
ctaccaactccagga

SEQ ID NO: 1191312 - DNA, 15 bp, Homo sapiens
tctaccaactccagg

SEQ ID NO: 1191313 - DNA, 15 bp, Homo sapiens
atctaccaactccag

SEQ ID NO: 1191314 - DNA, 15 bp, Homo sapiens
aatctaccaactcca

SEQ ID NO: 1191315 - DNA, 15 bp, Homo sapiens
caatctaccaactcc

SEQ ID NO: 1191316 - DNA, 15 bp, Homo sapiens
gcaatctaccaactc

SEQ ID NO: 1191317 - DNA, 15 bp, Homo sapiens
agcaatctaccaact

SEQ ID NO: 1191318 - DNA, 15 bp, Homo sapiens
cagcaatctaccaac

SEQ ID NO: 1191319 - DNA, 15 bp, Homo sapiens
acagcaatctaccaa

SEQ ID NO: 1191320 - DNA, 15 bp, Homo sapiens
aacagcaatctacca

SEQ ID NO: 1191321 - DNA, 15 bp, Homo sapiens
caacagcaatctacc

SEQ ID NO: 1191322 - DNA, 15 bp, Homo sapiens
tcaacagcaatctac

SEQ ID NO: 1191323 - DNA, 15 bp, Homo sapiens
atcaacagcaatcta

SEQ ID NO: 1191324 - DNA, 15 bp, Homo sapiens
gatcaacagcaatct

SEQ ID NO: 1191325 - DNA, 15 bp, Homo sapiens
agatcaacagcaatc

SEQ ID NO: 1191326 - DNA, 15 bp, Homo sapiens
aagatcaacagcaat

SEQ ID NO: 1191327 - DNA, 15 bp, Homo sapiens
aaagatcaacagcaa

SEQ ID NO: 1191328 - DNA, 15 bp, Homo sapiens
aaaagatcaacagca

SEQ ID NO: 1191329 - DNA, 15 bp, Homo sapiens
taaaagatcaacagc

SEQ ID NO: 1191330 - DNA, 15 bp, Homo sapiens
ataaaagatcaacag

SEQ ID NO: 1191331 - DNA, 15 bp, Homo sapiens
gataaaagatcaaca

SEQ ID NO: 1191332 - DNA, 15 bp, Homo sapiens
tgataaaagatcaac

SEQ ID NO: 1191333 - DNA, 15 bp, Homo sapiens
ttgataaaagatcaa

SEQ ID NO: 1191334 - DNA, 15 bp, Homo sapiens
attgataaaagatca

SEQ ID NO: 1191335 - DNA, 15 bp, Homo sapiens
tattgataaaagatc

SEQ ID NO: 1191336 - DNA, 15 bp, Homo sapiens
ttattgataaaagat

SEQ ID NO: 1191337 - DNA, 15 bp, Homo sapiens
attattgataaaaga

SEQ ID NO: 1191338 - DNA, 15 bp, Homo sapiens
cattattgataaaag

SEQ ID NO: 1191339 - DNA, 15 bp, Homo sapiens
acattattgataaaa

SEQ ID NO: 1191340 - DNA, 15 bp, Homo sapiens
aacattattgataaa

SEQ ID NO: 1191341 - DNA, 15 bp, Homo sapiens
gaacattattgataa

SEQ ID NO: 1191342 - DNA, 15 bp, Homo sapiens
agaacattattgata

SEQ ID NO: 1191343 - DNA, 15 bp, Homo sapiens
tagaacattattgat

SEQ ID NO: 1191344 - DNA, 15 bp, Homo sapiens
atagaacattattga

SEQ ID NO: 1191345 - DNA, 15 bp, Homo sapiens
tatagaacattattg

SEQ ID NO: 1191346 - DNA, 15 bp, Homo sapiens
ctatagaacattatt

SEQ ID NO: 1191347 - DNA, 15 bp, Homo sapiens
tctatagaacattat

SEQ ID NO: 1191348 - DNA, 15 bp, Homo sapiens
ttctatagaacatta

SEQ ID NO: 1191349 - DNA, 15 bp, Homo sapiens
tttctatagaacatt

SEQ ID NO: 1191350 - DNA, 15 bp, Homo sapiens
ttttctatagaacat

SEQ ID NO: 1191351 - DNA, 15 bp, Homo sapiens
cttttctatagaaca

SEQ ID NO: 1191352 - DNA, 15 bp, Homo sapiens
tcttttctatagaac

SEQ ID NO: 1191353 - DNA, 15 bp, Homo sapiens
ttcttttctatagaa

SEQ ID NO: 1191354 - DNA, 15 bp, Homo sapiens
tttcttttctataga

SEQ ID NO: 1191355 - DNA, 15 bp, Homo sapiens
ttttcttttctatag

SEQ ID NO: 1191356 - DNA, 15 bp, Homo sapiens
tttttcttttctata

SEQ ID NO: 1191357 - DNA, 15 bp, Homo sapiens
ttttttcttttctat

SEQ ID NO: 1191358 - DNA, 15 bp, Homo sapiens
tttttttcttttcta

SEQ ID NO: 1191359 - DNA, 15 bp, Homo sapiens
tattttttttttctt

SEQ ID NO: 1191360 - DNA, 15 bp, Homo sapiens
atattttttttttct

SEQ ID NO: 1191361 - DNA, 15 bp, Homo sapiens
tatattttttttttc

SEQ ID NO: 1191362 - DNA, 15 bp, Homo sapiens
taagatatatatata

SEQ ID NO: 1191363 - DNA, 15 bp, Homo sapiens
ctaagatatatatat

SEQ ID NO: 1191364 - DNA, 15 bp, Homo sapiens
actaagatatatata

SEQ ID NO: 1191365 - DNA, 15 bp, Homo sapiens
gactaagatatatat

SEQ ID NO: 1191366 - DNA, 15 bp, Homo sapiens
ggactaagatatata

SEQ ID NO: 1191367 - DNA, 15 bp, Homo sapiens
gggactaagatatat

SEQ ID NO: 1191368 - DNA, 15 bp, Homo sapiens
agggactaagatata

SEQ ID NO: 1191369 - DNA, 15 bp, Homo sapiens
cagggactaagatat

SEQ ID NO: 1191370 - DNA, 15 bp, Homo sapiens
gcagggactaagata

SEQ ID NO: 1191371 - DNA, 15 bp, Homo sapiens
ggcagggactaagat

SEQ ID NO: 1191372 - DNA, 15 bp, Homo sapiens
aggcagggactaaga

SEQ ID NO: 1191373 - DNA, 15 bp, Homo sapiens
gaggcagggactaag

SEQ ID NO: 1191374 - DNA, 15 bp, Homo sapiens
agaggcagggactaa

SEQ ID NO: 1191375 - DNA, 15 bp, Homo sapiens
gagaggcagggacta

SEQ ID NO: 1191376 - DNA, 15 bp, Homo sapiens
tgagaggcagggact

SEQ ID NO: 1191377 - DNA, 15 bp, Homo sapiens
ttgagaggcagggac

SEQ ID NO: 1191378 - DNA, 15 bp, Homo sapiens
cttgagaggcaggga

SEQ ID NO: 1191379 - DNA, 15 bp, Homo sapiens
tcttgagaggcaggg

SEQ ID NO: 1191380 - DNA, 15 bp, Homo sapiens
ctcttgagaggcagg

SEQ ID NO: 1191381 - DNA, 15 bp, Homo sapiens
gctcttgagaggcag

SEQ ID NO: 1191382 - DNA, 15 bp, Homo sapiens
ggctcttgagaggca

SEQ ID NO: 1191383 - DNA, 15 bp, Homo sapiens
tggctcttgagaggc

SEQ ID NO: 1191384 - DNA, 15 bp, Homo sapiens
gtggctcttgagagg

SEQ ID NO: 1191385 - DNA, 15 bp, Homo sapiens
tgtggctcttgagag

SEQ ID NO: 1191386 - DNA, 15 bp, Homo sapiens
ttgtggctcttgaga

SEQ ID NO: 1191387 - DNA, 15 bp, Homo sapiens
tttgtggctcttgag

SEQ ID NO: 1191388 - DNA, 15 bp, Homo sapiens
atttgtggctcttga

SEQ ID NO: 1191389 - DNA, 15 bp, Homo sapiens
catttgtggctcttg

SEQ ID NO: 1191390 - DNA, 15 bp, Homo sapiens
gcatttgtggctctt

SEQ ID NO: 1191391 - DNA, 15 bp, Homo sapiens
tgcatttgtggctct

SEQ ID NO: 1191392 - DNA, 15 bp, Homo sapiens
atgcatttgtggctc

SEQ ID NO: 1191393 - DNA, 15 bp, Homo sapiens
catgcatttgtggct

SEQ ID NO: 1191394 - DNA, 15 bp, Homo sapiens
ccatgcatttgtggc

SEQ ID NO: 1191395 - DNA, 15 bp, Homo sapiens
cccatgcatttgtgg

SEQ ID NO: 1191396 - DNA, 15 bp, Homo sapiens
acccatgcatttgtg

SEQ ID NO: 1191397 - DNA, 15 bp, Homo sapiens
cacccatgcatttgt

SEQ ID NO: 1191398 - DNA, 15 bp, Homo sapiens
acacccatgcatttg

SEQ ID NO: 1191399 - DNA, 15 bp, Homo sapiens
aacacccatgcattt

SEQ ID NO: 1191400 - DNA, 15 bp, Homo sapiens
caacacccatgcatt

SEQ ID NO: 1191401 - DNA, 15 bp, Homo sapiens
acaacacccatgcat

SEQ ID NO: 1191402 - DNA, 15 bp, Homo sapiens
tacaacacccatgca

SEQ ID NO: 1191403 - DNA, 15 bp, Homo sapiens
atacaacacccatgc

SEQ ID NO: 1191404 - DNA, 15 bp, Homo sapiens
tatacaacacccatg

SEQ ID NO: 1191405 - DNA, 15 bp, Homo sapiens
ctatacaacacccat

SEQ ID NO: 1191406 - DNA, 15 bp, Homo sapiens
tctatacaacaccca

SEQ ID NO: 1191407 - DNA, 15 bp, Homo sapiens
atctatacaacaccc

SEQ ID NO: 1191408 - DNA, 15 bp, Homo sapiens
gatctatacaacacc

SEQ ID NO: 1191409 - DNA, 15 bp, Homo sapiens
ggatctatacaacac

SEQ ID NO: 1191410 - DNA, 15 bp, Homo sapiens
tggatctatacaaca

SEQ ID NO: 1191411 - DNA, 15 bp, Homo sapiens
ctggatctatacaac

SEQ ID NO: 1191412 - DNA, 15 bp, Homo sapiens
actggatctatacaa

SEQ ID NO: 1191413 - DNA, 15 bp, Homo sapiens
aactggatctataca

SEQ ID NO: 1191414 - DNA, 15 bp, Homo sapiens
caactggatctatac

SEQ ID NO: 1191415 - DNA, 15 bp, Homo sapiens
gcaactggatctata

SEQ ID NO: 1191416 - DNA, 15 bp, Homo sapiens
tgcaactggatctat

SEQ ID NO: 1191417 - DNA, 15 bp, Homo sapiens
gtgcaactggatcta

SEQ ID NO: 1191418 - DNA, 15 bp, Homo sapiens
agtgcaactggatct

SEQ ID NO: 1191419 - DNA, 15 bp, Homo sapiens
tagtgcaactggatc

SEQ ID NO: 1191420 - DNA, 15 bp, Homo sapiens
ttagtgcaactggat

SEQ ID NO: 1191421 - DNA, 15 bp, Homo sapiens
tttagtgcaactgga

SEQ ID NO: 1191422 - DNA, 15 bp, Homo sapiens
atttagtgcaactgg

SEQ ID NO: 1191423 - DNA, 15 bp, Homo sapiens
aatttagtgcaactg

SEQ ID NO: 1191424 - DNA, 15 bp, Homo sapiens
gaatttagtgcaact

SEQ ID NO: 1191425 - DNA, 15 bp, Homo sapiens
ggaatttagtgcaac

SEQ ID NO: 1191426 - DNA, 15 bp, Homo sapiens
aggaatttagtgcaa

SEQ ID NO: 1191427 - DNA, 15 bp, Homo sapiens
gaggaatttagtgca

SEQ ID NO: 1191428 - DNA, 15 bp, Homo sapiens
agaggaatttagtgc

SEQ ID NO: 1191429 - DNA, 15 bp, Homo sapiens
gagaggaatttagtg

SEQ ID NO: 1191430 - DNA, 15 bp, Homo sapiens
agagaggaatttagt

SEQ ID NO: 1191431 - DNA, 15 bp, Homo sapiens
cagagaggaatttag

SEQ ID NO: 1191432 - DNA, 15 bp, Homo sapiens
tcagagaggaattta

SEQ ID NO: 1191433 - DNA, 15 bp, Homo sapiens
ttcagagaggaattt

SEQ ID NO: 1191434 - DNA, 15 bp, Homo sapiens
attcagagaggaatt

SEQ ID NO: 1191435 - DNA, 15 bp, Homo sapiens
gattcagagaggaat

SEQ ID NO: 1191436 - DNA, 15 bp, Homo sapiens
agattcagagaggaa

SEQ ID NO: 1191437 - DNA, 15 bp, Homo sapiens
aagattcagagagga

SEQ ID NO: 1191438 - DNA, 15 bp, Homo sapiens
caagattcagagagg

SEQ ID NO: 1191439 - DNA, 15 bp, Homo sapiens
ccaagattcagagag

SEQ ID NO: 1191440 - DNA, 15 bp, Homo sapiens
gccaagattcagaga

SEQ ID NO: 1191441 - DNA, 15 bp, Homo sapiens
agccaagattcagag

SEQ ID NO: 1191442 - DNA, 15 bp, Homo sapiens
cagccaagattcaga

SEQ ID NO: 1191443 - DNA, 15 bp, Homo sapiens
gcagccaagattcag

SEQ ID NO: 1191444 - DNA, 15 bp, Homo sapiens
agcagccaagattca

SEQ ID NO: 1191445 - DNA, 15 bp, Homo sapiens
cagcagccaagattc

SEQ ID NO: 1191446 - DNA, 15 bp, Homo sapiens
ccagcagccaagatt

SEQ ID NO: 1191447 - DNA, 15 bp, Homo sapiens
tccagcagccaagat

SEQ ID NO: 1191448 - DNA, 15 bp, Homo sapiens
ctccagcagccaaga

SEQ ID NO: 1191449 - DNA, 15 bp, Homo sapiens
gctccagcagccaag

SEQ ID NO: 1191450 - DNA, 15 bp, Homo sapiens
ggctccagcagccaa

SEQ ID NO: 1191451 - DNA, 15 bp, Homo sapiens
tggctccagcagcca

SEQ ID NO: 1191452 - DNA, 15 bp, Homo sapiens
atggctccagcagcc

SEQ ID NO: 1191453 - DNA, 15 bp, Homo sapiens
aatggctccagcagc

SEQ ID NO: 1191454 - DNA, 15 bp, Homo sapiens
gaatggctccagcag

SEQ ID NO: 1191455 - DNA, 15 bp, Homo sapiens
tgaatggctccagca

SEQ ID NO: 1191456 - DNA, 15 bp, Homo sapiens
atgaatggctccagc

SEQ ID NO: 1191457 - DNA, 15 bp, Homo sapiens
aatgaatggctccag

SEQ ID NO: 1191458 - DNA, 15 bp, Homo sapiens
gaatgaatggctcca

SEQ ID NO: 1191459 - DNA, 15 bp, Homo sapiens
tgaatgaatggctcc

SEQ ID NO: 1191460 - DNA, 15 bp, Homo sapiens
ctgaatgaatggctc

SEQ ID NO: 1191461 - DNA, 15 bp, Homo sapiens
gctgaatgaatggct

SEQ ID NO: 1191462 - DNA, 15 bp, Homo sapiens
tgctgaatgaatggc

SEQ ID NO: 1191463 - DNA, 15 bp, Homo sapiens
ttgctgaatgaatgg

SEQ ID NO: 1191464 - DNA, 15 bp, Homo sapiens
gttgctgaatgaatg

SEQ ID NO: 1191465 - DNA, 15 bp, Homo sapiens
ggttgctgaatgaat

SEQ ID NO: 1191466 - DNA, 15 bp, Homo sapiens
aggttgctgaatgaa

SEQ ID NO: 1191467 - DNA, 15 bp, Homo sapiens
aaggttgctgaatga

SEQ ID NO: 1191468 - DNA, 15 bp, Homo sapiens
caaggttgctgaatg

SEQ ID NO: 1191469 - DNA, 15 bp, Homo sapiens
acaaggttgctgaat

SEQ ID NO: 1191470 - DNA, 15 bp, Homo sapiens
gacaaggttgctgaa

SEQ ID NO: 1191471 - DNA, 15 bp, Homo sapiens
agacaaggttgctga

SEQ ID NO: 1191472 - DNA, 15 bp, Homo sapiens
tagacaaggttgctg

SEQ ID NO: 1191473 - DNA, 15 bp, Homo sapiens
ttagacaaggttgct

SEQ ID NO: 1191474 - DNA, 15 bp, Homo sapiens
cttagacaaggttgc

SEQ ID NO: 1191475 - DNA, 15 bp, Homo sapiens
acttagacaaggttg

SEQ ID NO: 1191476 - DNA, 15 bp, Homo sapiens
cacttagacaaggtt

SEQ ID NO: 1191477 - DNA, 15 bp, Homo sapiens
ccacttagacaaggt

SEQ ID NO: 1191478 - DNA, 15 bp, Homo sapiens
accacttagacaagg

SEQ ID NO: 1191479 - DNA, 15 bp, Homo sapiens
aaccacttagacaag

SEQ ID NO: 1191480 - DNA, 15 bp, Homo sapiens
aaaccacttagacaa

SEQ ID NO: 1191481 - DNA, 15 bp, Homo sapiens
taaaccacttagaca

SEQ ID NO: 1191482 - DNA, 15 bp, Homo sapiens
ataaaccacttagac

SEQ ID NO: 1191483 - DNA, 15 bp, Homo sapiens
cataaaccacttaga

SEQ ID NO: 1191484 - DNA, 15 bp, Homo sapiens
tcataaaccacttag

SEQ ID NO: 1191485 - DNA, 15 bp, Homo sapiens
ttcataaaccactta

SEQ ID NO: 1191486 - DNA, 15 bp, Homo sapiens
attcataaaccactt

SEQ ID NO: 1191487 - DNA, 15 bp, Homo sapiens
aattcataaaccact

SEQ ID NO: 1191488 - DNA, 15 bp, Homo sapiens
caattcataaaccac

SEQ ID NO: 1191489 - DNA, 15 bp, Homo sapiens
acaattcataaacca

SEQ ID NO: 1191490 - DNA, 15 bp, Homo sapiens
aacaattcataaacc

SEQ ID NO: 1191491 - DNA, 15 bp, Homo sapiens
aaacaattcataaac

SEQ ID NO: 1191492 - DNA, 15 bp, Homo sapiens
gaaacaattcataaa

SEQ ID NO: 1191493 - DNA, 15 bp, Homo sapiens
ggaaacaattcataa

SEQ ID NO: 1191494 - DNA, 15 bp, Homo sapiens
aggaaacaattcata

SEQ ID NO: 1191495 - DNA, 15 bp, Homo sapiens
aaggaaacaattcat

SEQ ID NO: 1191496 - DNA, 15 bp, Homo sapiens
taaggaaacaattca

SEQ ID NO: 1191497 - DNA, 15 bp, Homo sapiens
ataaggaaacaattc

SEQ ID NO: 1191498 - DNA, 15 bp, Homo sapiens
aataaggaaacaatt

SEQ ID NO: 1191499 - DNA, 15 bp, Homo sapiens
aaataaggaaacaat

SEQ ID NO: 1191500 - DNA, 15 bp, Homo sapiens
caaataaggaaacaa

SEQ ID NO: 1191501 - DNA, 15 bp, Homo sapiens
gcaaataaggaaaca

SEQ ID NO: 1191502 - DNA, 15 bp, Homo sapiens
tgcaaataaggaaac

SEQ ID NO: 1191503 - DNA, 15 bp, Homo sapiens
gtgcaaataaggaaa

SEQ ID NO: 1191504 - DNA, 15 bp, Homo sapiens
agtgcaaataaggaa

SEQ ID NO: 1191505 - DNA, 15 bp, Homo sapiens
aagtgcaaataagga

SEQ ID NO: 1191506 - DNA, 15 bp, Homo sapiens
gaagtgcaaataagg

SEQ ID NO: 1191507 - DNA, 15 bp, Homo sapiens
agaagtgcaaataag

SEQ ID NO: 1191508 - DNA, 15 bp, Homo sapiens
aagaagtgcaaataa

SEQ ID NO: 1191509 - DNA, 15 bp, Homo sapiens
aaagaagtgcaaata

SEQ ID NO: 1191510 - DNA, 15 bp, Homo sapiens
gaaagaagtgcaaat

SEQ ID NO: 1191511 - DNA, 15 bp, Homo sapiens
agaaagaagtgcaaa

SEQ ID NO: 1191512 - DNA, 15 bp, Homo sapiens
tagaaagaagtgcaa

SEQ ID NO: 1191513 - DNA, 15 bp, Homo sapiens
gtagaaagaagtgca

SEQ ID NO: 1191514 - DNA, 15 bp, Homo sapiens
tgtagaaagaagtgc

SEQ ID NO: 1191515 - DNA, 15 bp, Homo sapiens
gtgtagaaagaagtg

SEQ ID NO: 1191516 - DNA, 15 bp, Homo sapiens
tgtgtagaaagaagt

SEQ ID NO: 1191517 - DNA, 15 bp, Homo sapiens
ttgtgtagaaagaag

SEQ ID NO: 1191518 - DNA, 15 bp, Homo sapiens
gttgtgtagaaagaa

SEQ ID NO: 1191519 - DNA, 15 bp, Homo sapiens
agttgtgtagaaaga

SEQ ID NO: 1191520 - DNA, 15 bp, Homo sapiens
gagttgtgtagaaag

SEQ ID NO: 1191521 - DNA, 15 bp, Homo sapiens
cgagttgtgtagaaa

SEQ ID NO: 1191522 - DNA, 15 bp, Homo sapiens
ccgagttgtgtagaa

SEQ ID NO: 1191523 - DNA, 15 bp, Homo sapiens
cccgagttgtgtaga

SEQ ID NO: 1191524 - DNA, 15 bp, Homo sapiens
gcccgagttgtgtag

SEQ ID NO: 1191525 - DNA, 15 bp, Homo sapiens
agcccgagttgtgta

SEQ ID NO: 1191526 - DNA, 15 bp, Homo sapiens
cagcccgagttgtgt

SEQ ID NO: 1191527 - DNA, 15 bp, Homo sapiens
acagcccgagttgtg

SEQ ID NO: 1191528 - DNA, 15 bp, Homo sapiens
aacagcccgagttgt

SEQ ID NO: 1191529 - DNA, 15 bp, Homo sapiens
aaacagcccgagttg

SEQ ID NO: 1191530 - DNA, 15 bp, Homo sapiens
caaacagcccgagtt

SEQ ID NO: 1191531 - DNA, 15 bp, Homo sapiens
acaaacagcccgagt

SEQ ID NO: 1191532 - DNA, 15 bp, Homo sapiens
aacaaacagcccgag

SEQ ID NO: 1191533 - DNA, 15 bp, Homo sapiens
aaacaaacagcccga

SEQ ID NO: 1191534 - DNA, 15 bp, Homo sapiens
aaaacaaacagcccg

SEQ ID NO: 1191535 - DNA, 15 bp, Homo sapiens
taaaacaaacagccc

SEQ ID NO: 1191536 - DNA, 15 bp, Homo sapiens
gtaaaacaaacagcc

SEQ ID NO: 1191537 - DNA, 15 bp, Homo sapiens
tgtaaaacaaacagc

SEQ ID NO: 1191538 - DNA, 15 bp, Homo sapiens
ctgtaaaacaaacag

SEQ ID NO: 1191539 - DNA, 15 bp, Homo sapiens
actgtaaaacaaaca

SEQ ID NO: 1191540 - DNA, 15 bp, Homo sapiens
cactgtaaaacaaac

SEQ ID NO: 1191541 - DNA, 15 bp, Homo sapiens
acactgtaaaacaaa

SEQ ID NO: 1191542 - DNA, 15 bp, Homo sapiens
gacactgtaaaacaa

SEQ ID NO: 1191543 - DNA, 15 bp, Homo sapiens
agacactgtaaaaca

SEQ ID NO: 1191544 - DNA, 15 bp, Homo sapiens
cagacactgtaaaac

SEQ ID NO: 1191545 - DNA, 15 bp, Homo sapiens
tcagacactgtaaaa

SEQ ID NO: 1191546 - DNA, 15 bp, Homo sapiens
atcagacactgtaaa

SEQ ID NO: 1191547 - DNA, 15 bp, Homo sapiens
tatcagacactgtaa

SEQ ID NO: 1191548 - DNA, 15 bp, Homo sapiens
ttatcagacactgta

SEQ ID NO: 1191549 - DNA, 15 bp, Homo sapiens
attatcagacactgt

SEQ ID NO: 1191550 - DNA, 15 bp, Homo sapiens
gattatcagacactg

SEQ ID NO: 1191551 - DNA, 15 bp, Homo sapiens
agattatcagacact

SEQ ID NO: 1191552 - DNA, 15 bp, Homo sapiens
aagattatcagacac

SEQ ID NO: 1191553 - DNA, 15 bp, Homo sapiens
caagattatcagaca

SEQ ID NO: 1191554 - DNA, 15 bp, Homo sapiens
acaagattatcagac

SEQ ID NO: 1191555 - DNA, 15 bp, Homo sapiens
aacaagattatcaga

SEQ ID NO: 1191556 - DNA, 15 bp, Homo sapiens
taacaagattatcag

SEQ ID NO: 1191557 - DNA, 15 bp, Homo sapiens
ctaacaagattatca

SEQ ID NO: 1191558 - DNA, 15 bp, Homo sapiens
actaacaagattatc

SEQ ID NO: 1191559 - DNA, 15 bp, Homo sapiens
gactaacaagattat

SEQ ID NO: 1191560 - DNA, 15 bp, Homo sapiens
agactaacaagatta

SEQ ID NO: 1191561 - DNA, 15 bp, Homo sapiens
tagactaacaagatt

SEQ ID NO: 1191562 - DNA, 15 bp, Homo sapiens
atagactaacaagat

SEQ ID NO: 1191563 - DNA, 15 bp, Homo sapiens
tatagactaacaaga

SEQ ID NO: 1191564 - DNA, 15 bp, Homo sapiens
gtatagactaacaag

SEQ ID NO: 1191565 - DNA, 15 bp, Homo sapiens
ggtatagactaacaa

SEQ ID NO: 1191566 - DNA, 15 bp, Homo sapiens
gggtatagactaaca

SEQ ID NO: 1191567 - DNA, 15 bp, Homo sapiens
tgggtatagactaac

SEQ ID NO: 1191568 - DNA, 15 bp, Homo sapiens
gtgggtatagactaa

SEQ ID NO: 1191569 - DNA, 15 bp, Homo sapiens
ggtgggtatagacta

SEQ ID NO: 1191570 - DNA, 15 bp, Homo sapiens
tggtgggtatagact

SEQ ID NO: 1191571 - DNA, 15 bp, Homo sapiens
gtggtgggtatagac

SEQ ID NO: 1191572 - DNA, 15 bp, Homo sapiens
ggtggtgggtataga

SEQ ID NO: 1191573 - DNA, 15 bp, Homo sapiens
aggtggtgggtatag

SEQ ID NO: 1191574 - DNA, 15 bp, Homo sapiens
gaggtggtgggtata

SEQ ID NO: 1191575 - DNA, 15 bp, Homo sapiens
ggaggtggtgggtat

SEQ ID NO: 1191576 - DNA, 15 bp, Homo sapiens
gggaggtggtgggta

SEQ ID NO: 1191577 - DNA, 15 bp, Homo sapiens
agggaggtggtgggt

SEQ ID NO: 1191578 - DNA, 15 bp, Homo sapiens
aagggaggtggtggg

SEQ ID NO: 1191579 - DNA, 15 bp, Homo sapiens
gaagggaggtggtgg

SEQ ID NO: 1191580 - DNA, 15 bp, Homo sapiens
tgaagggaggtggtg

SEQ ID NO: 1191581 - DNA, 15 bp, Homo sapiens
atgaagggaggtggt

SEQ ID NO: 1191582 - DNA, 15 bp, Homo sapiens
tatgaagggaggtgg

SEQ ID NO: 1191583 - DNA, 15 bp, Homo sapiens
ttatgaagggaggtg

SEQ ID NO: 1191584 - DNA, 15 bp, Homo sapiens
gttatgaagggaggt

SEQ ID NO: 1191585 - DNA, 15 bp, Homo sapiens
ggttatgaagggagg

SEQ ID NO: 1191586 - DNA, 15 bp, Homo sapiens
aggttatgaagggag

SEQ ID NO: 1191587 - DNA, 15 bp, Homo sapiens
aaggttatgaaggga

SEQ ID NO: 1191588 - DNA, 15 bp, Homo sapiens
aaaggttatgaaggg

SEQ ID NO: 1191589 - DNA, 15 bp, Homo sapiens
taaaggttatgaagg

SEQ ID NO: 1191590 - DNA, 15 bp, Homo sapiens
ataaaggttatgaag

SEQ ID NO: 1191591 - DNA, 15 bp, Homo sapiens
tataaaggttatgaa

SEQ ID NO: 1191592 - DNA, 15 bp, Homo sapiens
atataaaggttatga

SEQ ID NO: 1191593 - DNA, 15 bp, Homo sapiens
aatataaaggttatg

SEQ ID NO: 1191594 - DNA, 15 bp, Homo sapiens
aaatataaaggttat

SEQ ID NO: 1191595 - DNA, 15 bp, Homo sapiens
caaatataaaggtta

SEQ ID NO: 1191596 - DNA, 15 bp, Homo sapiens
gcaaatataaaggtt

SEQ ID NO: 1191597 - DNA, 15 bp, Homo sapiens
ggcaaatataaaggt

SEQ ID NO: 1191598 - DNA, 15 bp, Homo sapiens
cggcaaatataaagg

SEQ ID NO: 1191599 - DNA, 15 bp, Homo sapiens
tcggcaaatataaag

SEQ ID NO: 1191600 - DNA, 15 bp, Homo sapiens
ttcggcaaatataaa

SEQ ID NO: 1191601 - DNA, 15 bp, Homo sapiens
attcggcaaatataa

SEQ ID NO: 1191602 - DNA, 15 bp, Homo sapiens
aattcggcaaatata

SEQ ID NO: 1191603 - DNA, 15 bp, Homo sapiens
aaattcggcaaatat

SEQ ID NO: 1191604 - DNA, 15 bp, Homo sapiens
caaattcggcaaata

SEQ ID NO: 1191605 - DNA, 15 bp, Homo sapiens
ccaaattcggcaaat

SEQ ID NO: 1191606 - DNA, 15 bp, Homo sapiens
gccaaattcggcaaa

SEQ ID NO: 1191607 - DNA, 15 bp, Homo sapiens
ggccaaattcggcaa

SEQ ID NO: 1191608 - DNA, 15 bp, Homo sapiens
aggccaaattcggca

SEQ ID NO: 1191609 - DNA, 15 bp, Homo sapiens
gaggccaaattcggc

SEQ ID NO: 1191610 - DNA, 15 bp, Homo sapiens
ggaggccaaattcgg

SEQ ID NO: 1191611 - DNA, 15 bp, Homo sapiens
aggaggccaaattcg

SEQ ID NO: 1191612 - DNA, 15 bp, Homo sapiens
gaggaggccaaattc

SEQ ID NO: 1191613 - DNA, 15 bp, Homo sapiens
tgaggaggccaaatt

SEQ ID NO: 1191614 - DNA, 15 bp, Homo sapiens
ttgaggaggccaaat

SEQ ID NO: 1191615 - DNA, 15 bp, Homo sapiens
tttgaggaggccaaa

SEQ ID NO: 1191616 - DNA, 15 bp, Homo sapiens
ttttgaggaggccaa

SEQ ID NO: 1191617 - DNA, 15 bp, Homo sapiens
cttttgaggaggcca

SEQ ID NO: 1191618 - DNA, 15 bp, Homo sapiens
gcttttgaggaggcc

SEQ ID NO: 1191619 - DNA, 15 bp, Homo sapiens
tgcttttgaggaggc

SEQ ID NO: 1191620 - DNA, 15 bp, Homo sapiens
ctgcttttgaggagg

SEQ ID NO: 1191621 - DNA, 15 bp, Homo sapiens
gctgcttttgaggag

SEQ ID NO: 1191622 - DNA, 15 bp, Homo sapiens
tgctgcttttgagga

SEQ ID NO: 1191623 - DNA, 15 bp, Homo sapiens
ctgctgcttttgagg

SEQ ID NO: 1191624 - DNA, 15 bp, Homo sapiens
gctgctgcttttgag

SEQ ID NO: 1191625 - DNA, 15 bp, Homo sapiens
tgctgctgcttttga

SEQ ID NO: 1191626 - DNA, 15 bp, Homo sapiens
ttgctgctgcttttg

SEQ ID NO: 1191627 - DNA, 15 bp, Homo sapiens
cttgctgctgctttt

SEQ ID NO: 1191628 - DNA, 15 bp, Homo sapiens
acttgctgctgcttt

SEQ ID NO: 1191629 - DNA, 15 bp, Homo sapiens
gacttgctgctgctt

SEQ ID NO: 1191630 - DNA, 15 bp, Homo sapiens
cgacttgctgctgct

SEQ ID NO: 1191631 - DNA, 15 bp, Homo sapiens
acgacttgctgctgc

SEQ ID NO: 1191632 - DNA, 15 bp, Homo sapiens
gacgacttgctgctg

SEQ ID NO: 1191633 - DNA, 15 bp, Homo sapiens
tgacgacttgctgct

SEQ ID NO: 1191634 - DNA, 15 bp, Homo sapiens
ttgacgacttgctgc

SEQ ID NO: 1191635 - DNA, 15 bp, Homo sapiens
cttgacgacttgctg

SEQ ID NO: 1191636 - DNA, 15 bp, Homo sapiens
tcttgacgacttgct

SEQ ID NO: 1191637 - DNA, 15 bp, Homo sapiens
ttcttgacgacttgc

SEQ ID NO: 1191638 - DNA, 15 bp, Homo sapiens
cttcttgacgacttg

SEQ ID NO: 1191639 - DNA, 15 bp, Homo sapiens
gcttcttgacgactt

SEQ ID NO: 1191640 - DNA, 15 bp, Homo sapiens
tgcttcttgacgact

SEQ ID NO: 1191641 - DNA, 15 bp, Homo sapiens
gtgcttcttgacgac

SEQ ID NO: 1191642 - DNA, 15 bp, Homo sapiens
tgtgcttcttgacga

SEQ ID NO: 1191643 - DNA, 15 bp, Homo sapiens
gtgtgcttcttgacg

SEQ ID NO: 1191644 - DNA, 15 bp, Homo sapiens
ggtgtgcttcttgac

SEQ ID NO: 1191645 - DNA, 15 bp, Homo sapiens
tggtgtgcttcttga

SEQ ID NO: 1191646 - DNA, 15 bp, Homo sapiens
ttggtgtgcttcttg

SEQ ID NO: 1191647 - DNA, 15 bp, Homo sapiens
attggtgtgcttctt

SEQ ID NO: 1191648 - DNA, 15 bp, Homo sapiens
aattggtgtgcttct

SEQ ID NO: 1191649 - DNA, 15 bp, Homo sapiens
gaattggtgtgcttc

SEQ ID NO: 1191650 - DNA, 15 bp, Homo sapiens
agaattggtgtgctt

SEQ ID NO: 1191651 - DNA, 15 bp, Homo sapiens
tagaattggtgtgct

SEQ ID NO: 1191652 - DNA, 15 bp, Homo sapiens
ttagaattggtgtgc

SEQ ID NO: 1191653 - DNA, 15 bp, Homo sapiens
gttagaattggtgtg

SEQ ID NO: 1191654 - DNA, 15 bp, Homo sapiens
ggttagaattggtgt

SEQ ID NO: 1191655 - DNA, 15 bp, Homo sapiens
gggttagaattggtg

SEQ ID NO: 1191656 - DNA, 15 bp, Homo sapiens
tgggttagaattggt

SEQ ID NO: 1191657 - DNA, 15 bp, Homo sapiens
gtgggttagaattgg

SEQ ID NO: 1191658 - DNA, 15 bp, Homo sapiens
tgtgggttagaattg

SEQ ID NO: 1191659 - DNA, 15 bp, Homo sapiens
ttgtgggttagaatt

SEQ ID NO: 1191660 - DNA, 15 bp, Homo sapiens
cttgtgggttagaat

SEQ ID NO: 1191661 - DNA, 15 bp, Homo sapiens
tcttgtgggttagaa

SEQ ID NO: 1191662 - DNA, 15 bp, Homo sapiens
atcttgtgggttaga

SEQ ID NO: 1191663 - DNA, 15 bp, Homo sapiens
aatcttgtgggttag

SEQ ID NO: 1191664 - DNA, 15 bp, Homo sapiens
gaatcttgtgggtta

SEQ ID NO: 1191665 - DNA, 15 bp, Homo sapiens
ggaatcttgtgggtt

SEQ ID NO: 1191666 - DNA, 15 bp, Homo sapiens
tggaatcttgtgggt

SEQ ID NO: 1191667 - DNA, 15 bp, Homo sapiens
atggaatcttgtggg

SEQ ID NO: 1191668 - DNA, 15 bp, Homo sapiens
gatggaatcttgtgg

SEQ ID NO: 1191669 - DNA, 15 bp, Homo sapiens
agatggaatcttgtg

SEQ ID NO: 1191670 - DNA, 15 bp, Homo sapiens
cagatggaatcttgt

SEQ ID NO: 1191671 - DNA, 15 bp, Homo sapiens
acagatggaatcttg

SEQ ID NO: 1191672 - DNA, 15 bp, Homo sapiens
cacagatggaatctt

SEQ ID NO: 1191673 - DNA, 15 bp, Homo sapiens
ccacagatggaatct

SEQ ID NO: 1191674 - DNA, 15 bp, Homo sapiens
gccacagatggaatc

SEQ ID NO: 1191675 - DNA, 15 bp, Homo sapiens
tgccacagatggaat

SEQ ID NO: 1191676 - DNA, 15 bp, Homo sapiens
atgccacagatggaa

SEQ ID NO: 1191677 - DNA, 15 bp, Homo sapiens
aatgccacagatgga

SEQ ID NO: 1191678 - DNA, 15 bp, Homo sapiens
aaatgccacagatgg

SEQ ID NO: 1191679 - DNA, 15 bp, Homo sapiens
caaatgccacagatg

SEQ ID NO: 1191680 - DNA, 15 bp, Homo sapiens
acaaatgccacagat

SEQ ID NO: 1191681 - DNA, 15 bp, Homo sapiens
tacaaatgccacaga

SEQ ID NO: 1191682 - DNA, 15 bp, Homo sapiens
gtacaaatgccacag

SEQ ID NO: 1191683 - DNA, 15 bp, Homo sapiens
ggtacaaatgccaca

SEQ ID NO: 1191684 - DNA, 15 bp, Homo sapiens
tggtacaaatgccac

SEQ ID NO: 1191685 - DNA, 15 bp, Homo sapiens
ttggtacaaatgcca

SEQ ID NO: 1191686 - DNA, 15 bp, Homo sapiens
tttggtacaaatgcc

SEQ ID NO: 1191687 - DNA, 15 bp, Homo sapiens
atttggtacaaatgc

SEQ ID NO: 1191688 - DNA, 15 bp, Homo sapiens
tatttggtacaaatg

SEQ ID NO: 1191689 - DNA, 15 bp, Homo sapiens
atatttggtacaaat

SEQ ID NO: 1191690 - DNA, 15 bp, Homo sapiens
tatatttggtacaaa

SEQ ID NO: 1191691 - DNA, 15 bp, Homo sapiens
ttatatttggtacaa

SEQ ID NO: 1191692 - DNA, 15 bp, Homo sapiens
cttatatttggtaca

SEQ ID NO: 1191693 - DNA, 15 bp, Homo sapiens
acttatatttggtac

SEQ ID NO: 1191694 - DNA, 15 bp, Homo sapiens
aacttatatttggta

SEQ ID NO: 1191695 - DNA, 15 bp, Homo sapiens
caacttatatttggt

SEQ ID NO: 1191696 - DNA, 15 bp, Homo sapiens
ccaacttatatttgg

SEQ ID NO: 1191697 - DNA, 15 bp, Homo sapiens
tccaacttatatttg

SEQ ID NO: 1191698 - DNA, 15 bp, Homo sapiens
atccaacttatattt

SEQ ID NO: 1191699 - DNA, 15 bp, Homo sapiens
catccaacttatatt

SEQ ID NO: 1191700 - DNA, 15 bp, Homo sapiens
gcatccaacttatat

SEQ ID NO: 1191701 - DNA, 15 bp, Homo sapiens
tgcatccaacttata

SEQ ID NO: 1191702 - DNA, 15 bp, Homo sapiens
atgcatccaacttat

SEQ ID NO: 1191703 - DNA, 15 bp, Homo sapiens
aatgcatccaactta

SEQ ID NO: 1191704 - DNA, 15 bp, Homo sapiens
aaatgcatccaactt

SEQ ID NO: 1191705 - DNA, 15 bp, Homo sapiens
aaaatgcatccaact

SEQ ID NO: 1191706 - DNA, 15 bp, Homo sapiens
taaaatgcatccaac

SEQ ID NO: 1191707 - DNA, 15 bp, Homo sapiens
ataaaatgcatccaa

SEQ ID NO: 1191708 - DNA, 15 bp, Homo sapiens
aataaaatgcatcca

SEQ ID NO: 1191709 - DNA, 15 bp, Homo sapiens
aaataaaatgcatcc

SEQ ID NO: 1191710 - DNA, 15 bp, Homo sapiens
aaaataaaatgcatc

SEQ ID NO: 1191711 - DNA, 15 bp, Homo sapiens
taaaataaaatgcat

SEQ ID NO: 1191712 - DNA, 15 bp, Homo sapiens
ctaaaataaaatgca

SEQ ID NO: 1191713 - DNA, 15 bp, Homo sapiens
tctaaaataaaatgc

SEQ ID NO: 1191714 - DNA, 15 bp, Homo sapiens
gtctaaaataaaatg

SEQ ID NO: 1191715 - DNA, 15 bp, Homo sapiens
tgtctaaaataaaat

SEQ ID NO: 1191716 - DNA, 15 bp, Homo sapiens
gtgtctaaaataaaa

SEQ ID NO: 1191717 - DNA, 15 bp, Homo sapiens
tgtgtctaaaataaa

SEQ ID NO: 1191718 - DNA, 15 bp, Homo sapiens
ttgtgtctaaaataa

SEQ ID NO: 1191719 - DNA, 15 bp, Homo sapiens
tttgtgtctaaaata

SEQ ID NO: 1191720 - DNA, 15 bp, Homo sapiens
ctttgtgtctaaaat

SEQ ID NO: 1191721 - DNA, 15 bp, Homo sapiens
gctttgtgtctaaaa

SEQ ID NO: 1191722 - DNA, 15 bp, Homo sapiens
agctttgtgtctaaa

SEQ ID NO: 1191723 - DNA, 15 bp, Homo sapiens
aagctttgtgtctaa

SEQ ID NO: 1191724 - DNA, 15 bp, Homo sapiens
aaagctttgtgtcta

SEQ ID NO: 1191725 - DNA, 15 bp, Homo sapiens
taaagctttgtgtct

SEQ ID NO: 1191726 - DNA, 15 bp, Homo sapiens
ataaagctttgtgtc

SEQ ID NO: 1191727 - DNA, 15 bp, Homo sapiens
aataaagctttgtgt

SEQ ID NO: 1191728 - DNA, 15 bp, Homo sapiens
aaataaagctttgtg

SEQ ID NO: 1191729 - DNA, 15 bp, Homo sapiens
aaaataaagctttgt

SEQ ID NO: 1191730 - DNA, 15 bp, Homo sapiens
aaaaataaagctttg

SEQ ID NO: 1191731 - DNA, 15 bp, Homo sapiens
gaaaaataaagcttt

SEQ ID NO: 1191732 - DNA, 15 bp, Homo sapiens
ggaaaaataaagctt

SEQ ID NO: 1191733 - DNA, 15 bp, Homo sapiens
tggaaaaataaagct

SEQ ID NO: 1191734 - DNA, 15 bp, Homo sapiens
gtggaaaaataaagc

SEQ ID NO: 1191735 - DNA, 15 bp, Homo sapiens
tgtggaaaaataaag

SEQ ID NO: 1191736 - DNA, 15 bp, Homo sapiens
atgtggaaaaataaa

SEQ ID NO: 1191737 - DNA, 15 bp, Homo sapiens
gatgtggaaaaataa

SEQ ID NO: 1191738 - DNA, 15 bp, Homo sapiens
tgatgtggaaaaata

SEQ ID NO: 1191739 - DNA, 15 bp, Homo sapiens
atgatgtggaaaaat

SEQ ID NO: 1191740 - DNA, 15 bp, Homo sapiens
catgatgtggaaaaa

SEQ ID NO: 1191741 - DNA, 15 bp, Homo sapiens
gcatgatgtggaaaa

SEQ ID NO: 1191742 - DNA, 15 bp, Homo sapiens
agcatgatgtggaaa

SEQ ID NO: 1191743 - DNA, 15 bp, Homo sapiens
aagcatgatgtggaa

SEQ ID NO: 1191744 - DNA, 15 bp, Homo sapiens
taagcatgatgtgga

SEQ ID NO: 1191745 - DNA, 15 bp, Homo sapiens
gtaagcatgatgtgg

SEQ ID NO: 1191746 - DNA, 15 bp, Homo sapiens
tgtaagcatgatgtg

SEQ ID NO: 1191747 - DNA, 15 bp, Homo sapiens
ttgtaagcatgatgt

SEQ ID NO: 1191748 - DNA, 15 bp, Homo sapiens
tttgtaagcatgatg

SEQ ID NO: 1191749 - DNA, 15 bp, Homo sapiens
ttttgtaagcatgat

SEQ ID NO: 1191750 - DNA, 15 bp, Homo sapiens
tttttgtaagcatga

SEQ ID NO: 1191751 - DNA, 15 bp, Homo sapiens
ttttttgtaagcatg

SEQ ID NO: 1191752 - DNA, 15 bp, Homo sapiens
cttttttgtaagcat

SEQ ID NO: 1191753 - DNA, 15 bp, Homo sapiens
tcttttttgtaagca

SEQ ID NO: 1191754 - DNA, 15 bp, Homo sapiens
ttcttttttgtaagc

SEQ ID NO: 1191755 - DNA, 15 bp, Homo sapiens
attcttttttgtaag

SEQ ID NO: 1191756 - DNA, 15 bp, Homo sapiens
tattcttttttgtaa

SEQ ID NO: 1191757 - DNA, 15 bp, Homo sapiens
ttattcttttttgta

SEQ ID NO: 1191758 - DNA, 15 bp, Homo sapiens
attattcttttttgt

SEQ ID NO: 1191759 - DNA, 15 bp, Homo sapiens
cattattcttttttg

SEQ ID NO: 1191760 - DNA, 15 bp, Homo sapiens
gcattattctttttt

SEQ ID NO: 1191761 - DNA, 15 bp, Homo sapiens
tgcattattcttttt

SEQ ID NO: 1191762 - DNA, 15 bp, Homo sapiens
ttgcattattctttt

SEQ ID NO: 1191763 - DNA, 15 bp, Homo sapiens
tttgcattattcttt

SEQ ID NO: 1191764 - DNA, 15 bp, Homo sapiens
atttgcattattctt

SEQ ID NO: 1191765 - DNA, 15 bp, Homo sapiens
tatttgcattattct

SEQ ID NO: 1191766 - DNA, 15 bp, Homo sapiens
ctatttgcattattc

SEQ ID NO: 1191767 - DNA, 15 bp, Homo sapiens
actatttgcattatt

SEQ ID NO: 1191768 - DNA, 15 bp, Homo sapiens
aactatttgcattat

SEQ ID NO: 1191769 - DNA, 15 bp, Homo sapiens
caactatttgcatta

SEQ ID NO: 1191770 - DNA, 15 bp, Homo sapiens
gcaactatttgcatt

SEQ ID NO: 1191771 - DNA, 15 bp, Homo sapiens
tgcaactatttgcat

SEQ ID NO: 1191772 - DNA, 15 bp, Homo sapiens
ttgcaactatttgca

SEQ ID NO: 1191773 - DNA, 15 bp, Homo sapiens
gttgcaactatttgc

SEQ ID NO: 1191774 - DNA, 15 bp, Homo sapiens
agttgcaactatttg

SEQ ID NO: 1191775 - DNA, 15 bp, Homo sapiens
aagttgcaactattt

SEQ ID NO: 1191776 - DNA, 15 bp, Homo sapiens
aaagttgcaactatt

SEQ ID NO: 1191777 - DNA, 15 bp, Homo sapiens
caaagttgcaactat

SEQ ID NO: 1191778 - DNA, 15 bp, Homo sapiens
tcaaagttgcaacta

SEQ ID NO: 1191779 - DNA, 15 bp, Homo sapiens
ctcaaagttgcaact

SEQ ID NO: 1191780 - DNA, 15 bp, Homo sapiens
cctcaaagttgcaac

SEQ ID NO: 1191781 - DNA, 15 bp, Homo sapiens
gcctcaaagttgcaa

SEQ ID NO: 1191782 - DNA, 15 bp, Homo sapiens
ggcctcaaagttgca

SEQ ID NO: 1191783 - DNA, 15 bp, Homo sapiens
tggcctcaaagttgc

SEQ ID NO: 1191784 - DNA, 15 bp, Homo sapiens
ttggcctcaaagttg

SEQ ID NO: 1191785 - DNA, 15 bp, Homo sapiens
attggcctcaaagtt

SEQ ID NO: 1191786 - DNA, 15 bp, Homo sapiens
gattggcctcaaagt

SEQ ID NO: 1191787 - DNA, 15 bp, Homo sapiens
tgattggcctcaaag

SEQ ID NO: 1191788 - DNA, 15 bp, Homo sapiens
atgattggcctcaaa

SEQ ID NO: 1191789 - DNA, 15 bp, Homo sapiens
aatgattggcctcaa

SEQ ID NO: 1191790 - DNA, 15 bp, Homo sapiens
aaatgattggcctca

SEQ ID NO: 1191791 - DNA, 15 bp, Homo sapiens
aaaatgattggcctc

SEQ ID NO: 1191792 - DNA, 15 bp, Homo sapiens
aaaaatgattggcct

SEQ ID NO: 1191793 - DNA, 15 bp, Homo sapiens
taaaaatgattggcc

SEQ ID NO: 1191794 - DNA, 15 bp, Homo sapiens
ctaaaaatgattggc

SEQ ID NO: 1191795 - DNA, 15 bp, Homo sapiens
cctaaaaatgattgg

SEQ ID NO: 1191796 - DNA, 15 bp, Homo sapiens
gcctaaaaatgattg

SEQ ID NO: 1191797 - DNA, 15 bp, Homo sapiens
tgcctaaaaatgatt

SEQ ID NO: 1191798 - DNA, 15 bp, Homo sapiens
atgcctaaaaatgat

SEQ ID NO: 1191799 - DNA, 15 bp, Homo sapiens
tatgcctaaaaatga

SEQ ID NO: 1191800 - DNA, 15 bp, Homo sapiens
atatgcctaaaaatg

SEQ ID NO: 1191801 - DNA, 15 bp, Homo sapiens
catatgcctaaaaat

SEQ ID NO: 1191802 - DNA, 15 bp, Homo sapiens
acatatgcctaaaaa

SEQ ID NO: 1191803 - DNA, 15 bp, Homo sapiens
aacatatgcctaaaa

SEQ ID NO: 1191804 - DNA, 15 bp, Homo sapiens
aaacatatgcctaaa

SEQ ID NO: 1191805 - DNA, 15 bp, Homo sapiens
aaaacatatgcctaa

SEQ ID NO: 1191806 - DNA, 15 bp, Homo sapiens
taaaacatatgccta

SEQ ID NO: 1191807 - DNA, 15 bp, Homo sapiens
ttaaaacatatgcct

SEQ ID NO: 1191808 - DNA, 15 bp, Homo sapiens
tttaaaacatatgcc

SEQ ID NO: 1191809 - DNA, 15 bp, Homo sapiens
gtttaaaacatatgc

SEQ ID NO: 1191810 - DNA, 15 bp, Homo sapiens
tgtttaaaacatatg

SEQ ID NO: 1191811 - DNA, 15 bp, Homo sapiens
atgtttaaaacatat

SEQ ID NO: 1191812 - DNA, 15 bp, Homo sapiens
tatgtttaaaacata

SEQ ID NO: 1191813 - DNA, 15 bp, Homo sapiens
ctatgtttaaaacat

SEQ ID NO: 1191814 - DNA, 15 bp, Homo sapiens
tctatgtttaaaaca

SEQ ID NO: 1191815 - DNA, 15 bp, Homo sapiens
ttctatgtttaaaac

SEQ ID NO: 1191816 - DNA, 15 bp, Homo sapiens
tttctatgtttaaaa

SEQ ID NO: 1191817 - DNA, 15 bp, Homo sapiens
ctttctatgtttaaa

SEQ ID NO: 1191818 - DNA, 15 bp, Homo sapiens
actttctatgtttaa

SEQ ID NO: 1191819 - DNA, 15 bp, Homo sapiens
aactttctatgttta

SEQ ID NO: 1191820 - DNA, 15 bp, Homo sapiens
aaactttctatgttt

SEQ ID NO: 1191821 - DNA, 15 bp, Homo sapiens
gaaactttctatgtt

SEQ ID NO: 1191822 - DNA, 15 bp, Homo sapiens
agaaactttctatgt

SEQ ID NO: 1191823 - DNA, 15 bp, Homo sapiens
aagaaactttctatg

SEQ ID NO: 1191824 - DNA, 15 bp, Homo sapiens
gaagaaactttctat

SEQ ID NO: 1191825 - DNA, 15 bp, Homo sapiens
tgaagaaactttcta

SEQ ID NO: 1191826 - DNA, 15 bp, Homo sapiens
ttgaagaaactttct

SEQ ID NO: 1191827 - DNA, 15 bp, Homo sapiens
gttgaagaaactttc

SEQ ID NO: 1191828 - DNA, 15 bp, Homo sapiens
agttgaagaaacttt

SEQ ID NO: 1191829 - DNA, 15 bp, Homo sapiens
gagttgaagaaactt

SEQ ID NO: 1191830 - DNA, 15 bp, Homo sapiens
tgagttgaagaaact

SEQ ID NO: 1191831 - DNA, 15 bp, Homo sapiens
ttgagttgaagaaac

SEQ ID NO: 1191832 - DNA, 15 bp, Homo sapiens
tttgagttgaagaaa

SEQ ID NO: 1191833 - DNA, 15 bp, Homo sapiens
ttttgagttgaagaa

SEQ ID NO: 1191834 - DNA, 15 bp, Homo sapiens
cttttgagttgaaga

SEQ ID NO: 1191835 - DNA, 15 bp, Homo sapiens
tcttttgagttgaag

SEQ ID NO: 1191836 - DNA, 15 bp, Homo sapiens
ctcttttgagttgaa

SEQ ID NO: 1191837 - DNA, 15 bp, Homo sapiens
actcttttgagttga

SEQ ID NO: 1191838 - DNA, 15 bp, Homo sapiens
aactcttttgagttg

SEQ ID NO: 1191839 - DNA, 15 bp, Homo sapiens
gaactcttttgagtt

SEQ ID NO: 1191840 - DNA, 15 bp, Homo sapiens
ggaactcttttgagt

SEQ ID NO: 1191841 - DNA, 15 bp, Homo sapiens
aggaactcttttgag

SEQ ID NO: 1191842 - DNA, 15 bp, Homo sapiens
aaggaactcttttga

SEQ ID NO: 1191843 - DNA, 15 bp, Homo sapiens
gaaggaactcttttg

SEQ ID NO: 1191844 - DNA, 15 bp, Homo sapiens
tgaaggaactctttt

SEQ ID NO: 1191845 - DNA, 15 bp, Homo sapiens
ttgaaggaactcttt

SEQ ID NO: 1191846 - DNA, 15 bp, Homo sapiens
tttgaaggaactctt

SEQ ID NO: 1191847 - DNA, 15 bp, Homo sapiens
atttgaaggaactct

SEQ ID NO: 1191848 - DNA, 15 bp, Homo sapiens
catttgaaggaactc

SEQ ID NO: 1191849 - DNA, 15 bp, Homo sapiens
tcatttgaaggaact

SEQ ID NO: 1191850 - DNA, 15 bp, Homo sapiens
atcatttgaaggaac

SEQ ID NO: 1191851 - DNA, 15 bp, Homo sapiens
catcatttgaaggaa

SEQ ID NO: 1191852 - DNA, 15 bp, Homo sapiens
tcatcatttgaagga

SEQ ID NO: 1191853 - DNA, 15 bp, Homo sapiens
ctcatcatttgaagg

SEQ ID NO: 1191854 - DNA, 15 bp, Homo sapiens
actcatcatttgaag

SEQ ID NO: 1191855 - DNA, 15 bp, Homo sapiens
aactcatcatttgaa

SEQ ID NO: 1191856 - DNA, 15 bp, Homo sapiens
taactcatcatttga

SEQ ID NO: 1191857 - DNA, 15 bp, Homo sapiens
ttaactcatcatttg

SEQ ID NO: 1191858 - DNA, 15 bp, Homo sapiens
attaactcatcattt

SEQ ID NO: 1191859 - DNA, 15 bp, Homo sapiens
cattaactcatcatt

SEQ ID NO: 1191860 - DNA, 15 bp, Homo sapiens
acattaactcatcat

SEQ ID NO: 1191861 - DNA, 15 bp, Homo sapiens
cacattaactcatca

SEQ ID NO: 1191862 - DNA, 15 bp, Homo sapiens
gcacattaactcatc

SEQ ID NO: 1191863 - DNA, 15 bp, Homo sapiens
tgcacattaactcat

SEQ ID NO: 1191864 - DNA, 15 bp, Homo sapiens
ttgcacattaactca

SEQ ID NO: 1191865 - DNA, 15 bp, Homo sapiens
gttgcacattaactc

SEQ ID NO: 1191866 - DNA, 15 bp, Homo sapiens
ggttgcacattaact

SEQ ID NO: 1191867 - DNA, 15 bp, Homo sapiens
aggttgcacattaac

SEQ ID NO: 1191868 - DNA, 15 bp, Homo sapiens
taggttgcacattaa

SEQ ID NO: 1191869 - DNA, 15 bp, Homo sapiens
ttaggttgcacatta

SEQ ID NO: 1191870 - DNA, 15 bp, Homo sapiens
attaggttgcacatt

SEQ ID NO: 1191871 - DNA, 15 bp, Homo sapiens
aattaggttgcacat

SEQ ID NO: 1191872 - DNA, 15 bp, Homo sapiens
taattaggttgcaca

SEQ ID NO: 1191873 - DNA, 15 bp, Homo sapiens
ctaattaggttgcac

SEQ ID NO: 1191874 - DNA, 15 bp, Homo sapiens
actaattaggttgca

SEQ ID NO: 1191875 - DNA, 15 bp, Homo sapiens
tactaattaggttgc

SEQ ID NO: 1191876 - DNA, 15 bp, Homo sapiens
ttactaattaggttg

SEQ ID NO: 1191877 - DNA, 15 bp, Homo sapiens
gttactaattaggtt

SEQ ID NO: 1191878 - DNA, 15 bp, Homo sapiens
agttactaattaggt

SEQ ID NO: 1191879 - DNA, 15 bp, Homo sapiens
aagttactaattagg

SEQ ID NO: 1191880 - DNA, 15 bp, Homo sapiens
aaagttactaattag

SEQ ID NO: 1191881 - DNA, 15 bp, Homo sapiens
gaaagttactaatta

SEQ ID NO: 1191882 - DNA, 15 bp, Homo sapiens
ggaaagttactaatt

SEQ ID NO: 1191883 - DNA, 15 bp, Homo sapiens
aggaaagttactaat

SEQ ID NO: 1191884 - DNA, 15 bp, Homo sapiens
gaggaaagttactaa

SEQ ID NO: 1191885 - DNA, 15 bp, Homo sapiens
agaggaaagttacta

SEQ ID NO: 1191886 - DNA, 15 bp, Homo sapiens
aagaggaaagttact

SEQ ID NO: 1191887 - DNA, 15 bp, Homo sapiens
aaagaggaaagttac

SEQ ID NO: 1191888 - DNA, 15 bp, Homo sapiens
aaaagaggaaagtta

SEQ ID NO: 1191889 - DNA, 15 bp, Homo sapiens
aaaaagaggaaagtt

SEQ ID NO: 1191890 - DNA, 15 bp, Homo sapiens
taaaaagaggaaagt

SEQ ID NO: 1191891 - DNA, 15 bp, Homo sapiens
ataaaaagaggaaag

SEQ ID NO: 1191892 - DNA, 15 bp, Homo sapiens
aataaaaagaggaaa

SEQ ID NO: 1191893 - DNA, 15 bp, Homo sapiens
aaataaaaagaggaa

SEQ ID NO: 1191894 - DNA, 15 bp, Homo sapiens
aaaataaaaagagga

SEQ ID NO: 1191895 - DNA, 15 bp, Homo sapiens
aaaaataaaaagagg

SEQ ID NO: 1191896 - DNA, 15 bp, Homo sapiens
aaaaaataaaaagag

SEQ ID NO: 1191897 - DNA, 15 bp, Homo sapiens
gaaaaaataaaaaga

SEQ ID NO: 1191898 - DNA, 15 bp, Homo sapiens
ggaaaaaataaaaag

SEQ ID NO: 1191899 - DNA, 15 bp, Homo sapiens
tggaaaaaataaaaa

SEQ ID NO: 1191900 - DNA, 15 bp, Homo sapiens
tatggaaaaaataaa

SEQ ID NO: 1191901 - DNA, 15 bp, Homo sapiens
atatggaaaaaataa

SEQ ID NO: 1191902 - DNA, 15 bp, Homo sapiens
ctatatggaaaaaat

SEQ ID NO: 1191903 - DNA, 15 bp, Homo sapiens
tctatatggaaaaaa

SEQ ID NO: 1191904 - DNA, 15 bp, Homo sapiens
ctctatatggaaaaa

SEQ ID NO: 1191905 - DNA, 15 bp, Homo sapiens
gctctatatggaaaa

SEQ ID NO: 1191906 - DNA, 15 bp, Homo sapiens
tgctctatatggaaa

SEQ ID NO: 1191907 - DNA, 15 bp, Homo sapiens
gtgctctatatggaa

SEQ ID NO: 1191908 - DNA, 15 bp, Homo sapiens
agtgctctatatgga

SEQ ID NO: 1191909 - DNA, 15 bp, Homo sapiens
tagtgctctatatgg

SEQ ID NO: 1191910 - DNA, 15 bp, Homo sapiens
atagtgctctatatg

SEQ ID NO: 1191911 - DNA, 15 bp, Homo sapiens
catagtgctctatat

SEQ ID NO: 1191912 - DNA, 15 bp, Homo sapiens
acatagtgctctata

SEQ ID NO: 1191913 - DNA, 15 bp, Homo sapiens
tacatagtgctctat

SEQ ID NO: 1191914 - DNA, 15 bp, Homo sapiens
ttacatagtgctcta

SEQ ID NO: 1191915 - DNA, 15 bp, Homo sapiens
tttacatagtgctct

SEQ ID NO: 1191916 - DNA, 15 bp, Homo sapiens
atttacatagtgctc

SEQ ID NO: 1191917 - DNA, 15 bp, Homo sapiens
aatttacatagtgct

SEQ ID NO: 1191918 - DNA, 15 bp, Homo sapiens
aaatttacatagtgc

SEQ ID NO: 1191919 - DNA, 15 bp, Homo sapiens
taaatttacatagtg

SEQ ID NO: 1191920 - DNA, 15 bp, Homo sapiens
ctaaatttacatagt

SEQ ID NO: 1191921 - DNA, 15 bp, Homo sapiens
gctaaatttacatag

SEQ ID NO: 1191922 - DNA, 15 bp, Homo sapiens
tgctaaatttacata

SEQ ID NO: 1191923 - DNA, 15 bp, Homo sapiens
atgctaaatttacat

SEQ ID NO: 1191924 - DNA, 15 bp, Homo sapiens
tatgctaaatttaca

SEQ ID NO: 1191925 - DNA, 15 bp, Homo sapiens
atatgctaaatttac

SEQ ID NO: 1191926 - DNA, 15 bp, Homo sapiens
gatatgctaaattta

SEQ ID NO: 1191927 - DNA, 15 bp, Homo sapiens
tgatatgctaaattt

SEQ ID NO: 1191928 - DNA, 15 bp, Homo sapiens
ttgatatgctaaatt

SEQ ID NO: 1191929 - DNA, 15 bp, Homo sapiens
attgatatgctaaat

SEQ ID NO: 1191930 - DNA, 15 bp, Homo sapiens
aattgatatgctaaa

SEQ ID NO: 1191931 - DNA, 15 bp, Homo sapiens
taattgatatgctaa

SEQ ID NO: 1191932 - DNA, 15 bp, Homo sapiens
ataattgatatgcta

SEQ ID NO: 1191933 - DNA, 15 bp, Homo sapiens
tataattgatatgct

SEQ ID NO: 1191934 - DNA, 15 bp, Homo sapiens
gtataattgatatgc

SEQ ID NO: 1191935 - DNA, 15 bp, Homo sapiens
tgtataattgatatg

SEQ ID NO: 1191936 - DNA, 15 bp, Homo sapiens
ctgtataattgatat

SEQ ID NO: 1191937 - DNA, 15 bp, Homo sapiens
cctgtataattgata

SEQ ID NO: 1191938 - DNA, 15 bp, Homo sapiens
tcctgtataattgat

SEQ ID NO: 1191939 - DNA, 15 bp, Homo sapiens
atcctgtataattga

SEQ ID NO: 1191940 - DNA, 15 bp, Homo sapiens
tatcctgtataattg

SEQ ID NO: 1191941 - DNA, 15 bp, Homo sapiens
atatcctgtataatt

SEQ ID NO: 1191942 - DNA, 15 bp, Homo sapiens
tatatcctgtataat

SEQ ID NO: 1191943 - DNA, 15 bp, Homo sapiens
atatatcctgtataa

SEQ ID NO: 1191944 - DNA, 15 bp, Homo sapiens
gatatatcctgtata

SEQ ID NO: 1191945 - DNA, 15 bp, Homo sapiens
tgatatatcctgtat

SEQ ID NO: 1191946 - DNA, 15 bp, Homo sapiens
ttgatatatcctgta

SEQ ID NO: 1191947 - DNA, 15 bp, Homo sapiens
tttgatatatcctgt

SEQ ID NO: 1191948 - DNA, 15 bp, Homo sapiens
gtttgatatatcctg

SEQ ID NO: 1191949 - DNA, 15 bp, Homo sapiens
tgtttgatatatcct

SEQ ID NO: 1191950 - DNA, 15 bp, Homo sapiens
ctgtttgatatatcc

SEQ ID NO: 1191951 - DNA, 15 bp, Homo sapiens
actgtttgatatatc

SEQ ID NO: 1191952 - DNA, 15 bp, Homo sapiens
tactgtttgatatat

SEQ ID NO: 1191953 - DNA, 15 bp, Homo sapiens
atactgtttgatata

SEQ ID NO: 1191954 - DNA, 15 bp, Homo sapiens
catactgtttgatat

SEQ ID NO: 1191955 - DNA, 15 bp, Homo sapiens
acatactgtttgata

SEQ ID NO: 1191956 - DNA, 15 bp, Homo sapiens
tacatactgtttgat

SEQ ID NO: 1191957 - DNA, 15 bp, Homo sapiens
ttacatactgtttga

SEQ ID NO: 1191958 - DNA, 15 bp, Homo sapiens
tttacatactgtttg

SEQ ID NO: 1191959 - DNA, 15 bp, Homo sapiens
ttttacatactgttt

SEQ ID NO: 1191960 - DNA, 15 bp, Homo sapiens
gttttacatactgtt

SEQ ID NO: 1191961 - DNA, 15 bp, Homo sapiens
agttttacatactgt

SEQ ID NO: 1191962 - DNA, 15 bp, Homo sapiens
gagttttacatactg

SEQ ID NO: 1191963 - DNA, 15 bp, Homo sapiens
agagttttacatact

SEQ ID NO: 1191964 - DNA, 15 bp, Homo sapiens
cagagttttacatac

SEQ ID NO: 1191965 - DNA, 15 bp, Homo sapiens
acagagttttacata

SEQ ID NO: 1191966 - DNA, 15 bp, Homo sapiens
aacagagttttacat

SEQ ID NO: 1191967 - DNA, 15 bp, Homo sapiens
aaacagagttttaca

SEQ ID NO: 1191968 - DNA, 15 bp, Homo sapiens
aaaacagagttttac

SEQ ID NO: 1191969 - DNA, 15 bp, Homo sapiens
aaaaacagagtttta

SEQ ID NO: 1191970 - DNA, 15 bp, Homo sapiens
aaaaaacagagtttt

SEQ ID NO: 1191971 - DNA, 15 bp, Homo sapiens
taaaaaacagagttt

SEQ ID NO: 1191972 - DNA, 15 bp, Homo sapiens
ctaaaaaacagagtt

SEQ ID NO: 1191973 - DNA, 15 bp, Homo sapiens
actaaaaaacagagt

SEQ ID NO: 1191974 - DNA, 15 bp, Homo sapiens
tactaaaaaacagag

SEQ ID NO: 1191975 - DNA, 15 bp, Homo sapiens
atactaaaaaacaga

SEQ ID NO: 1191976 - DNA, 15 bp, Homo sapiens
tatactaaaaaacag

SEQ ID NO: 1191977 - DNA, 15 bp, Homo sapiens
ttatactaaaaaaca

SEQ ID NO: 1191978 - DNA, 15 bp, Homo sapiens
attatactaaaaaac

SEQ ID NO: 1191979 - DNA, 15 bp, Homo sapiens
cattatactaaaaaa

SEQ ID NO: 1191980 - DNA, 15 bp, Homo sapiens
ccattatactaaaaa

SEQ ID NO: 1191981 - DNA, 15 bp, Homo sapiens
accattatactaaaa

SEQ ID NO: 1191982 - DNA, 15 bp, Homo sapiens
caccattatactaaa

SEQ ID NO: 1191983 - DNA, 15 bp, Homo sapiens
gcaccattatactaa

SEQ ID NO: 1191984 - DNA, 15 bp, Homo sapiens
agcaccattatacta

SEQ ID NO: 1191985 - DNA, 15 bp, Homo sapiens
tagcaccattatact

SEQ ID NO: 1191986 - DNA, 15 bp, Homo sapiens
atagcaccattatac

SEQ ID NO: 1191987 - DNA, 15 bp, Homo sapiens
aatagcaccattata

SEQ ID NO: 1191988 - DNA, 15 bp, Homo sapiens
aaatagcaccattat

SEQ ID NO: 1191989 - DNA, 15 bp, Homo sapiens
aaaatagcaccatta

SEQ ID NO: 1191990 - DNA, 15 bp, Homo sapiens
caaaatagcaccatt

SEQ ID NO: 1191991 - DNA, 15 bp, Homo sapiens
acaaaatagcaccat

SEQ ID NO: 1191992 - DNA, 15 bp, Homo sapiens
tacaaaatagcacca

SEQ ID NO: 1191993 - DNA, 15 bp, Homo sapiens
ctacaaaatagcacc

SEQ ID NO: 1191994 - DNA, 15 bp, Homo sapiens
actacaaaatagcac

SEQ ID NO: 1191995 - DNA, 15 bp, Homo sapiens
aactacaaaatagca

SEQ ID NO: 1191996 - DNA, 15 bp, Homo sapiens
aaactacaaaatagc

SEQ ID NO: 1191997 - DNA, 15 bp, Homo sapiens
caaactacaaaatag

SEQ ID NO: 1191998 - DNA, 15 bp, Homo sapiens
acaaactacaaaata

SEQ ID NO: 1191999 - DNA, 15 bp, Homo sapiens
aacaaactacaaaat

SEQ ID NO: 1192000 - DNA, 15 bp, Homo sapiens
taacaaactacaaaa

SEQ ID NO: 1192001 - DNA, 15 bp, Homo sapiens
ataacaaactacaaa

SEQ ID NO: 1192002 - DNA, 15 bp, Homo sapiens
tataacaaactacaa

SEQ ID NO: 1192003 - DNA, 15 bp, Homo sapiens
atataacaaactaca

SEQ ID NO: 1192004 - DNA, 15 bp, Homo sapiens
catataacaaactac

SEQ ID NO: 1192005 - DNA, 15 bp, Homo sapiens
tcatataacaaacta

SEQ ID NO: 1192006 - DNA, 15 bp, Homo sapiens
ttcatataacaaact

SEQ ID NO: 1192007 - DNA, 15 bp, Homo sapiens
tttcatataacaaac

SEQ ID NO: 1192008 - DNA, 15 bp, Homo sapiens
ctttcatataacaaa

SEQ ID NO: 1192009 - DNA, 15 bp, Homo sapiens
tctttcatataacaa

SEQ ID NO: 1192010 - DNA, 15 bp, Homo sapiens
ctctttcatataaca

SEQ ID NO: 1192011 - DNA, 15 bp, Homo sapiens
actctttcatataac

SEQ ID NO: 1192012 - DNA, 15 bp, Homo sapiens
gactctttcatataa

SEQ ID NO: 1192013 - DNA, 15 bp, Homo sapiens
agactctttcatata

SEQ ID NO: 1192014 - DNA, 15 bp, Homo sapiens
cagactctttcatat

SEQ ID NO: 1192015 - DNA, 15 bp, Homo sapiens
ccagactctttcata

SEQ ID NO: 1192016 - DNA, 15 bp, Homo sapiens
gccagactctttcat

SEQ ID NO: 1192017 - DNA, 15 bp, Homo sapiens
ggccagactctttca

SEQ ID NO: 1192018 - DNA, 15 bp, Homo sapiens
tggccagactctttc

SEQ ID NO: 1192019 - DNA, 15 bp, Homo sapiens
ttggccagactcttt

SEQ ID NO: 1192020 - DNA, 15 bp, Homo sapiens
tttggccagactctt

SEQ ID NO: 1192021 - DNA, 15 bp, Homo sapiens
ttttggccagactct

SEQ ID NO: 1192022 - DNA, 15 bp, Homo sapiens
gttttggccagactc

SEQ ID NO: 1192023 - DNA, 15 bp, Homo sapiens
cgttttggccagact

SEQ ID NO: 1192024 - DNA, 15 bp, Homo sapiens
ccgttttggccagac

SEQ ID NO: 1192025 - DNA, 15 bp, Homo sapiens
accgttttggccaga

SEQ ID NO: 1192026 - DNA, 15 bp, Homo sapiens
taccgttttggccag

SEQ ID NO: 1192027 - DNA, 15 bp, Homo sapiens
ttaccgttttggcca

SEQ ID NO: 1192028 - DNA, 15 bp, Homo sapiens
attaccgttttggcc

SEQ ID NO: 1192029 - DNA, 15 bp, Homo sapiens
tattaccgttttggc

SEQ ID NO: 1192030 - DNA, 15 bp, Homo sapiens
gtattaccgttttgg

SEQ ID NO: 1192031 - DNA, 15 bp, Homo sapiens
cgtattaccgttttg

SEQ ID NO: 1192032 - DNA, 15 bp, Homo sapiens
acgtattaccgtttt

SEQ ID NO: 1192033 - DNA, 15 bp, Homo sapiens
cacgtattaccgttt

SEQ ID NO: 1192034 - DNA, 15 bp, Homo sapiens
tcacgtattaccgtt

SEQ ID NO: 1192035 - DNA, 15 bp, Homo sapiens
ttcacgtattaccgt

SEQ ID NO: 1192036 - DNA, 15 bp, Homo sapiens
tttcacgtattaccg

SEQ ID NO: 1192037 - DNA, 15 bp, Homo sapiens
ctttcacgtattacc

SEQ ID NO: 1192038 - DNA, 15 bp, Homo sapiens
gctttcacgtattac

SEQ ID NO: 1192039 - DNA, 15 bp, Homo sapiens
tgctttcacgtatta

SEQ ID NO: 1192040 - DNA, 15 bp, Homo sapiens
ttgctttcacgtatt

SEQ ID NO: 1192041 - DNA, 15 bp, Homo sapiens
tttgctttcacgtat

SEQ ID NO: 1192042 - DNA, 15 bp, Homo sapiens
ttttgctttcacgta

SEQ ID NO: 1192043 - DNA, 15 bp, Homo sapiens
gttttgctttcacgt

SEQ ID NO: 1192044 - DNA, 15 bp, Homo sapiens
tgttttgctttcacg

SEQ ID NO: 1192045 - DNA, 15 bp, Homo sapiens
ttgttttgctttcac

SEQ ID NO: 1192046 - DNA, 15 bp, Homo sapiens
attgttttgctttca

SEQ ID NO: 1192047 - DNA, 15 bp, Homo sapiens
tattgttttgctttc

SEQ ID NO: 1192048 - DNA, 15 bp, Homo sapiens
ctattgttttgcttt

SEQ ID NO: 1192049 - DNA, 15 bp, Homo sapiens
cctattgttttgctt

SEQ ID NO: 1192050 - DNA, 15 bp, Homo sapiens
ccctattgttttgct

SEQ ID NO: 1192051 - DNA, 15 bp, Homo sapiens
cccctattgttttgc

SEQ ID NO: 1192052 - DNA, 15 bp, Homo sapiens
tcccctattgttttg

SEQ ID NO: 1192053 - DNA, 15 bp, Homo sapiens
ttcccctattgtttt

SEQ ID NO: 1192054 - DNA, 15 bp, Homo sapiens
cttcccctattgttt

SEQ ID NO: 1192055 - DNA, 15 bp, Homo sapiens
gcttcccctattgtt

SEQ ID NO: 1192056 - DNA, 15 bp, Homo sapiens
ggcttcccctattgt

SEQ ID NO: 1192057 - DNA, 15 bp, Homo sapiens
aggcttcccctattg

SEQ ID NO: 1192058 - DNA, 15 bp, Homo sapiens
caggcttcccctatt

SEQ ID NO: 1192059 - DNA, 15 bp, Homo sapiens
ccaggcttcccctat

SEQ ID NO: 1192060 - DNA, 15 bp, Homo sapiens
tccaggcttccccta

SEQ ID NO: 1192061 - DNA, 15 bp, Homo sapiens
ctccaggcttcccct

SEQ ID NO: 1192062 - DNA, 15 bp, Homo sapiens
gctccaggcttcccc

SEQ ID NO: 1192063 - DNA, 15 bp, Homo sapiens
ggctccaggcttccc

SEQ ID NO: 1192064 - DNA, 15 bp, Homo sapiens
tggctccaggcttcc

SEQ ID NO: 1192065 - DNA, 15 bp, Homo sapiens
ttggctccaggcttc

SEQ ID NO: 1192066 - DNA, 15 bp, Homo sapiens
tttggctccaggctt

SEQ ID NO: 1192067 - DNA, 15 bp, Homo sapiens
ctttggctccaggct

SEQ ID NO: 1192068 - DNA, 15 bp, Homo sapiens
tctttggctccaggc

SEQ ID NO: 1192069 - DNA, 15 bp, Homo sapiens
atctttggctccagg

SEQ ID NO: 1192070 - DNA, 15 bp, Homo sapiens
catctttggctccag

SEQ ID NO: 1192071 - DNA, 15 bp, Homo sapiens
tcatctttggctcca

SEQ ID NO: 1192072 - DNA, 15 bp, Homo sapiens
gtcatctttggctcc

SEQ ID NO: 1192073 - DNA, 15 bp, Homo sapiens
tgtcatctttggctc

SEQ ID NO: 1192074 - DNA, 15 bp, Homo sapiens
gtgtcatctttggct

SEQ ID NO: 1192075 - DNA, 15 bp, Homo sapiens
tgtgtcatctttggc

SEQ ID NO: 1192076 - DNA, 15 bp, Homo sapiens
ttgtgtcatctttgg

SEQ ID NO: 1192077 - DNA, 15 bp, Homo sapiens
cttgtgtcatctttg

SEQ ID NO: 1192078 - DNA, 15 bp, Homo sapiens
ccttgtgtcatcttt

SEQ ID NO: 1192079 - DNA, 15 bp, Homo sapiens
cccttgtgtcatctt

SEQ ID NO: 1192080 - DNA, 15 bp, Homo sapiens
ccccttgtgtcatct

SEQ ID NO: 1192081 - DNA, 15 bp, Homo sapiens
ttccccttgtgtcat

SEQ ID NO: 1192082 - DNA, 15 bp, Homo sapiens
cttccccttgtgtca

SEQ ID NO: 1192083 - DNA, 15 bp, Homo sapiens
ccttccccttgtgtc

SEQ ID NO: 1192084 - DNA, 15 bp, Homo sapiens
cccttccccttgtgt

SEQ ID NO: 1192085 - DNA, 15 bp, Homo sapiens
acccttccccttgtg

SEQ ID NO: 1192086 - DNA, 15 bp, Homo sapiens
tacccttccccttgt

SEQ ID NO: 1192087 - DNA, 15 bp, Homo sapiens
gtacccttccccttg

SEQ ID NO: 1192088 - DNA, 15 bp, Homo sapiens
agtacccttcccctt

SEQ ID NO: 1192089 - DNA, 15 bp, Homo sapiens
cagtacccttcccct

SEQ ID NO: 1192090 - DNA, 15 bp, Homo sapiens
tcagtacccttcccc

SEQ ID NO: 1192091 - DNA, 15 bp, Homo sapiens
ttcagtacccttccc

SEQ ID NO: 1192092 - DNA, 15 bp, Homo sapiens
tttcagtacccttcc

SEQ ID NO: 1192093 - DNA, 15 bp, Homo sapiens
ttttcagtacccttc

SEQ ID NO: 1192094 - DNA, 15 bp, Homo sapiens
gttttcagtaccctt

SEQ ID NO: 1192095 - DNA, 15 bp, Homo sapiens
tgttttcagtaccct

SEQ ID NO: 1192096 - DNA, 15 bp, Homo sapiens
gtgttttcagtaccc

SEQ ID NO: 1192097 - DNA, 15 bp, Homo sapiens
ggtgttttcagtacc

SEQ ID NO: 1192098 - DNA, 15 bp, Homo sapiens
tggtgttttcagtac

SEQ ID NO: 1192099 - DNA, 15 bp, Homo sapiens
atggtgttttcagta

SEQ ID NO: 1192100 - DNA, 15 bp, Homo sapiens
gatggtgttttcagt

SEQ ID NO: 1192101 - DNA, 15 bp, Homo sapiens
ggatggtgttttcag

SEQ ID NO: 1192102 - DNA, 15 bp, Homo sapiens
tggatggtgttttca

SEQ ID NO: 1192103 - DNA, 15 bp, Homo sapiens
atggatggtgttttc

SEQ ID NO: 1192104 - DNA, 15 bp, Homo sapiens
aatggatggtgtttt

SEQ ID NO: 1192105 - DNA, 15 bp, Homo sapiens
aaatggatggtgttt

SEQ ID NO: 1192106 - DNA, 15 bp, Homo sapiens
caaatggatggtgtt

SEQ ID NO: 1192107 - DNA, 15 bp, Homo sapiens
ccaaatggatggtgt

SEQ ID NO: 1192108 - DNA, 15 bp, Homo sapiens
cccaaatggatggtg

SEQ ID NO: 1192109 - DNA, 15 bp, Homo sapiens
tcccaaatggatggt

SEQ ID NO: 1192110 - DNA, 15 bp, Homo sapiens
ttcccaaatggatgg

SEQ ID NO: 1192111 - DNA, 15 bp, Homo sapiens
tttcccaaatggatg

SEQ ID NO: 1192112 - DNA, 15 bp, Homo sapiens
ctttcccaaatggat

SEQ ID NO: 1192113 - DNA, 15 bp, Homo sapiens
tctttcccaaatgga

SEQ ID NO: 1192114 - DNA, 15 bp, Homo sapiens
ttctttcccaaatgg

SEQ ID NO: 1192115 - DNA, 15 bp, Homo sapiens
cttctttcccaaatg

SEQ ID NO: 1192116 - DNA, 15 bp, Homo sapiens
ccttctttcccaaat

SEQ ID NO: 1192117 - DNA, 15 bp, Homo sapiens
gccttctttcccaaa

SEQ ID NO: 1192118 - DNA, 15 bp, Homo sapiens
tgccttctttcccaa

SEQ ID NO: 1192119 - DNA, 15 bp, Homo sapiens
ttgccttctttccca

SEQ ID NO: 1192120 - DNA, 15 bp, Homo sapiens
tttgccttctttccc

SEQ ID NO: 1192121 - DNA, 15 bp, Homo sapiens
ctttgccttctttcc

SEQ ID NO: 1192122 - DNA, 15 bp, Homo sapiens
actttgccttctttc

SEQ ID NO: 1192123 - DNA, 15 bp, Homo sapiens
gactttgccttcttt

SEQ ID NO: 1192124 - DNA, 15 bp, Homo sapiens
ggactttgccttctt

SEQ ID NO: 1192125 - DNA, 15 bp, Homo sapiens
gggactttgccttct

SEQ ID NO: 1192126 - DNA, 15 bp, Homo sapiens
ggggactttgccttc

SEQ ID NO: 1192127 - DNA, 15 bp, Homo sapiens
gggggactttgcctt

SEQ ID NO: 1192128 - DNA, 15 bp, Homo sapiens
ggggggactttgcct

SEQ ID NO: 1192129 - DNA, 15 bp, Homo sapiens
tggggggactttgcc

SEQ ID NO: 1192130 - DNA, 15 bp, Homo sapiens
ctggggggactttgc

SEQ ID NO: 1192131 - DNA, 15 bp, Homo sapiens
actggggggactttg

SEQ ID NO: 1192132 - DNA, 15 bp, Homo sapiens
aactggggggacttt

SEQ ID NO: 1192133 - DNA, 15 bp, Homo sapiens
taactggggggactt

SEQ ID NO: 1192134 - DNA, 15 bp, Homo sapiens
ataactggggggact

SEQ ID NO: 1192135 - DNA, 15 bp, Homo sapiens
cataactggggggac

SEQ ID NO: 1192136 - DNA, 15 bp, Homo sapiens
gcataactgggggga

SEQ ID NO: 1192137 - DNA, 15 bp, Homo sapiens
ggcataactgggggg

SEQ ID NO: 1192138 - DNA, 15 bp, Homo sapiens
aggcataactggggg

SEQ ID NO: 1192139 - DNA, 15 bp, Homo sapiens
aaggcataactgggg

SEQ ID NO: 1192140 - DNA, 15 bp, Homo sapiens
gaaggcataactggg

SEQ ID NO: 1192141 - DNA, 15 bp, Homo sapiens
ggaaggcataactgg

SEQ ID NO: 1192142 - DNA, 15 bp, Homo sapiens
tggaaggcataactg

SEQ ID NO: 1192143 - DNA, 15 bp, Homo sapiens
ttggaaggcataact

SEQ ID NO: 1192144 - DNA, 15 bp, Homo sapiens
cttggaaggcataac

SEQ ID NO: 1192145 - DNA, 15 bp, Homo sapiens
tcttggaaggcataa

SEQ ID NO: 1192146 - DNA, 15 bp, Homo sapiens
ctcttggaaggcata

SEQ ID NO: 1192147 - DNA, 15 bp, Homo sapiens
cctcttggaaggcat

SEQ ID NO: 1192148 - DNA, 15 bp, Homo sapiens
tcctcttggaaggca

SEQ ID NO: 1192149 - DNA, 15 bp, Homo sapiens
ttcctcttggaaggc

SEQ ID NO: 1192150 - DNA, 15 bp, Homo sapiens
gttcctcttggaagg

SEQ ID NO: 1192151 - DNA, 15 bp, Homo sapiens
agttcctcttggaag

SEQ ID NO: 1192152 - DNA, 15 bp, Homo sapiens
aagttcctcttggaa

SEQ ID NO: 1192153 - DNA, 15 bp, Homo sapiens
gaagttcctcttgga

SEQ ID NO: 1192154 - DNA, 15 bp, Homo sapiens
tgaagttcctcttgg

SEQ ID NO: 1192155 - DNA, 15 bp, Homo sapiens
ctgaagttcctcttg

SEQ ID NO: 1192156 - DNA, 15 bp, Homo sapiens
tctgaagttcctctt

SEQ ID NO: 1192157 - DNA, 15 bp, Homo sapiens
gtctgaagttcctct

SEQ ID NO: 1192158 - DNA, 15 bp, Homo sapiens
tgtctgaagttcctc

SEQ ID NO: 1192159 - DNA, 15 bp, Homo sapiens
gtgtctgaagttcct

SEQ ID NO: 1192160 - DNA, 15 bp, Homo sapiens
tgtgtctgaagttcc

SEQ ID NO: 1192161 - DNA, 15 bp, Homo sapiens
ttgtgtctgaagttc

SEQ ID NO: 1192162 - DNA, 15 bp, Homo sapiens
tttgtgtctgaagtt

SEQ ID NO: 1192163 - DNA, 15 bp, Homo sapiens
ttttgtgtctgaagt

SEQ ID NO: 1192164 - DNA, 15 bp, Homo sapiens
cttttgtgtctgaag

SEQ ID NO: 1192165 - DNA, 15 bp, Homo sapiens
acttttgtgtctgaa

SEQ ID NO: 1192166 - DNA, 15 bp, Homo sapiens
gacttttgtgtctga

SEQ ID NO: 1192167 - DNA, 15 bp, Homo sapiens
ggacttttgtgtctg

SEQ ID NO: 1192168 - DNA, 15 bp, Homo sapiens
tggacttttgtgtct

SEQ ID NO: 1192169 - DNA, 15 bp, Homo sapiens
gtggacttttgtgtc

SEQ ID NO: 1192170 - DNA, 15 bp, Homo sapiens
agtggacttttgtgt

SEQ ID NO: 1192171 - DNA, 15 bp, Homo sapiens
cagtggacttttgtg

SEQ ID NO: 1192172 - DNA, 15 bp, Homo sapiens
tcagtggacttttgt

SEQ ID NO: 1192173 - DNA, 15 bp, Homo sapiens
atcagtggacttttg

SEQ ID NO: 1192174 - DNA, 15 bp, Homo sapiens
catcagtggactttt

SEQ ID NO: 1192175 - DNA, 15 bp, Homo sapiens
gcatcagtggacttt

SEQ ID NO: 1192176 - DNA, 15 bp, Homo sapiens
tgcatcagtggactt

SEQ ID NO: 1192177 - DNA, 15 bp, Homo sapiens
ttgcatcagtggact

SEQ ID NO: 1192178 - DNA, 15 bp, Homo sapiens
tttgcatcagtggac

SEQ ID NO: 1192179 - DNA, 15 bp, Homo sapiens
atttgcatcagtgga

SEQ ID NO: 1192180 - DNA, 15 bp, Homo sapiens
aatttgcatcagtgg

SEQ ID NO: 1192181 - DNA, 15 bp, Homo sapiens
caatttgcatcagtg

SEQ ID NO: 1192182 - DNA, 15 bp, Homo sapiens
ccaatttgcatcagt

SEQ ID NO: 1192183 - DNA, 15 bp, Homo sapiens
tccaatttgcatcag

SEQ ID NO: 1192184 - DNA, 15 bp, Homo sapiens
gtccaatttgcatca

SEQ ID NO: 1192185 - DNA, 15 bp, Homo sapiens
agtccaatttgcatc

SEQ ID NO: 1192186 - DNA, 15 bp, Homo sapiens
cagtccaatttgcat

SEQ ID NO: 1192187 - DNA, 15 bp, Homo sapiens
ccagtccaatttgca

SEQ ID NO: 1192188 - DNA, 15 bp, Homo sapiens
gccagtccaatttgc

SEQ ID NO: 1192189 - DNA, 15 bp, Homo sapiens
cgccagtccaatttg

SEQ ID NO: 1192190 - DNA, 15 bp, Homo sapiens
tcgccagtccaattt

SEQ ID NO: 1192191 - DNA, 15 bp, Homo sapiens
ctcgccagtccaatt

SEQ ID NO: 1192192 - DNA, 15 bp, Homo sapiens
actcgccagtccaat

SEQ ID NO: 1192193 - DNA, 15 bp, Homo sapiens
gactcgccagtccaa

SEQ ID NO: 1192194 - DNA, 15 bp, Homo sapiens
ggactcgccagtcca

SEQ ID NO: 1192195 - DNA, 15 bp, Homo sapiens
tggactcgccagtcc

SEQ ID NO: 1192196 - DNA, 15 bp, Homo sapiens
ctggactcgccagtc

SEQ ID NO: 1192197 - DNA, 15 bp, Homo sapiens
tctggactcgccagt

SEQ ID NO: 1192198 - DNA, 15 bp, Homo sapiens
ctctggactcgccag

SEQ ID NO: 1192199 - DNA, 15 bp, Homo sapiens
tctctggactcgcca

SEQ ID NO: 1192200 - DNA, 15 bp, Homo sapiens
ctctctggactcgcc

SEQ ID NO: 1192201 - DNA, 15 bp, Homo sapiens
cctctctggactcgc

SEQ ID NO: 1192202 - DNA, 15 bp, Homo sapiens
tcctctctggactcg

SEQ ID NO: 1192203 - DNA, 15 bp, Homo sapiens
ttcctctctggactc

SEQ ID NO: 1192204 - DNA, 15 bp, Homo sapiens
tttcctctctggact

SEQ ID NO: 1192205 - DNA, 15 bp, Homo sapiens
gtttcctctctggac

SEQ ID NO: 1192206 - DNA, 15 bp, Homo sapiens
agtttcctctctgga

SEQ ID NO: 1192207 - DNA, 15 bp, Homo sapiens
cagtttcctctctgg

SEQ ID NO: 1192208 - DNA, 15 bp, Homo sapiens
acagtttcctctctg

SEQ ID NO: 1192209 - DNA, 15 bp, Homo sapiens
cacagtttcctctct

SEQ ID NO: 1192210 - DNA, 15 bp, Homo sapiens
ccacagtttcctctc

SEQ ID NO: 1192211 - DNA, 15 bp, Homo sapiens
tccacagtttcctct

SEQ ID NO: 1192212 - DNA, 15 bp, Homo sapiens
ttccacagtttcctc

SEQ ID NO: 1192213 - DNA, 15 bp, Homo sapiens
attccacagtttcct

SEQ ID NO: 1192214 - DNA, 15 bp, Homo sapiens
cattccacagtttcc

SEQ ID NO: 1192215 - DNA, 15 bp, Homo sapiens
ccattccacagtttc

SEQ ID NO: 1192216 - DNA, 15 bp, Homo sapiens
tccattccacagttt

SEQ ID NO: 1192217 - DNA, 15 bp, Homo sapiens
ttccattccacagtt

SEQ ID NO: 1192218 - DNA, 15 bp, Homo sapiens
tttccattccacagt

SEQ ID NO: 1192219 - DNA, 15 bp, Homo sapiens
ttttccattccacag

SEQ ID NO: 1192220 - DNA, 15 bp, Homo sapiens
tttttccattccaca

SEQ ID NO: 1192221 - DNA, 15 bp, Homo sapiens
ctttttccattccac

SEQ ID NO: 1192222 - DNA, 15 bp, Homo sapiens
gctttttccattcca

SEQ ID NO: 1192223 - DNA, 15 bp, Homo sapiens
tgctttttccattcc

SEQ ID NO: 1192224 - DNA, 15 bp, Homo sapiens
ctgctttttccattc

SEQ ID NO: 1192225 - DNA, 15 bp, Homo sapiens
tctgctttttccatt

SEQ ID NO: 1192226 - DNA, 15 bp, Homo sapiens
ttctgctttttccat

SEQ ID NO: 1192227 - DNA, 15 bp, Homo sapiens
cttctgctttttcca

SEQ ID NO: 1192228 - DNA, 15 bp, Homo sapiens
ccttctgctttttcc

SEQ ID NO: 1192229 - DNA, 15 bp, Homo sapiens
gccttctgctttttc

SEQ ID NO: 1192230 - DNA, 15 bp, Homo sapiens
agccttctgcttttt

SEQ ID NO: 1192231 - DNA, 15 bp, Homo sapiens
tagccttctgctttt

SEQ ID NO: 1192232 - DNA, 15 bp, Homo sapiens
ctagccttctgcttt

SEQ ID NO: 1192233 - DNA, 15 bp, Homo sapiens
cctagccttctgctt

SEQ ID NO: 1192234 - DNA, 15 bp, Homo sapiens
tcctagccttctgct

SEQ ID NO: 1192235 - DNA, 15 bp, Homo sapiens
ttcctagccttctgc

SEQ ID NO: 1192236 - DNA, 15 bp, Homo sapiens
attcctagccttctg

SEQ ID NO: 1192237 - DNA, 15 bp, Homo sapiens
aattcctagccttct

SEQ ID NO: 1192238 - DNA, 15 bp, Homo sapiens
aaattcctagccttc

SEQ ID NO: 1192239 - DNA, 15 bp, Homo sapiens
aaaattcctagcctt

SEQ ID NO: 1192240 - DNA, 15 bp, Homo sapiens
taaaattcctagcct

SEQ ID NO: 1192241 - DNA, 15 bp, Homo sapiens
ctaaaattcctagcc

SEQ ID NO: 1192242 - DNA, 15 bp, Homo sapiens
gctaaaattcctagc

SEQ ID NO: 1192243 - DNA, 15 bp, Homo sapiens
tgctaaaattcctag

SEQ ID NO: 1192244 - DNA, 15 bp, Homo sapiens
ctgctaaaattccta

SEQ ID NO: 1192245 - DNA, 15 bp, Homo sapiens
actgctaaaattcct

SEQ ID NO: 1192246 - DNA, 15 bp, Homo sapiens
gactgctaaaattcc

SEQ ID NO: 1192247 - DNA, 15 bp, Homo sapiens
ggactgctaaaattc

SEQ ID NO: 1192248 - DNA, 15 bp, Homo sapiens
aggactgctaaaatt

SEQ ID NO: 1192249 - DNA, 15 bp, Homo sapiens
caggactgctaaaat

SEQ ID NO: 1192250 - DNA, 15 bp, Homo sapiens
ccaggactgctaaaa

SEQ ID NO: 1192251 - DNA, 15 bp, Homo sapiens
accaggactgctaaa

SEQ ID NO: 1192252 - DNA, 15 bp, Homo sapiens
aaccaggactgctaa

SEQ ID NO: 1192253 - DNA, 15 bp, Homo sapiens
aaaccaggactgcta

SEQ ID NO: 1192254 - DNA, 15 bp, Homo sapiens
gaaaccaggactgct

SEQ ID NO: 1192255 - DNA, 15 bp, Homo sapiens
agaaaccaggactgc

SEQ ID NO: 1192256 - DNA, 15 bp, Homo sapiens
aagaaaccaggactg

SEQ ID NO: 1192257 - DNA, 15 bp, Homo sapiens
aaagaaaccaggact

SEQ ID NO: 1192258 - DNA, 15 bp, Homo sapiens
aaaagaaaccaggac

SEQ ID NO: 1192259 - DNA, 15 bp, Homo sapiens
aaaaagaaaccagga

SEQ ID NO: 1192260 - DNA, 15 bp, Homo sapiens
gaaaaagaaaccagg

SEQ ID NO: 1192261 - DNA, 15 bp, Homo sapiens
agaaaaagaaaccag

SEQ ID NO: 1192262 - DNA, 15 bp, Homo sapiens
gagaaaaagaaacca

SEQ ID NO: 1192263 - DNA, 15 bp, Homo sapiens
tgagaaaaagaaacc

SEQ ID NO: 1192264 - DNA, 15 bp, Homo sapiens
atgagaaaaagaaac

SEQ ID NO: 1192265 - DNA, 15 bp, Homo sapiens
catgagaaaaagaaa

SEQ ID NO: 1192266 - DNA, 15 bp, Homo sapiens
ccatgagaaaaagaa

SEQ ID NO: 1192267 - DNA, 15 bp, Homo sapiens
tccatgagaaaaaga

SEQ ID NO: 1192268 - DNA, 15 bp, Homo sapiens
ttccatgagaaaaag

SEQ ID NO: 1192269 - DNA, 15 bp, Homo sapiens
cttccatgagaaaaa

SEQ ID NO: 1192270 - DNA, 15 bp, Homo sapiens
tcttccatgagaaaa

SEQ ID NO: 1192271 - DNA, 15 bp, Homo sapiens
ttcttccatgagaaa

SEQ ID NO: 1192272 - DNA, 15 bp, Homo sapiens
tttcttccatgagaa

SEQ ID NO: 1192273 - DNA, 15 bp, Homo sapiens
atttcttccatgaga

SEQ ID NO: 1192274 - DNA, 15 bp, Homo sapiens
catttcttccatgag

SEQ ID NO: 1192275 - DNA, 15 bp, Homo sapiens
tcatttcttccatga

SEQ ID NO: 1192276 - DNA, 15 bp, Homo sapiens
ttcatttcttccatg

SEQ ID NO: 1192277 - DNA, 15 bp, Homo sapiens
gttcatttcttccat

SEQ ID NO: 1192278 - DNA, 15 bp, Homo sapiens
tgttcatttcttcca

SEQ ID NO: 1192279 - DNA, 15 bp, Homo sapiens
atgttcatttcttcc

SEQ ID NO: 1192280 - DNA, 15 bp, Homo sapiens
gatgttcatttcttc

SEQ ID NO: 1192281 - DNA, 15 bp, Homo sapiens
agatgttcatttctt

SEQ ID NO: 1192282 - DNA, 15 bp, Homo sapiens
cagatgttcatttct

SEQ ID NO: 1192283 - DNA, 15 bp, Homo sapiens
gcagatgttcatttc

SEQ ID NO: 1192284 - DNA, 15 bp, Homo sapiens
ggcagatgttcattt

SEQ ID NO: 1192285 - DNA, 15 bp, Homo sapiens
tggcagatgttcatt

SEQ ID NO: 1192286 - DNA, 15 bp, Homo sapiens
ctggcagatgttcat

SEQ ID NO: 1192287 - DNA, 15 bp, Homo sapiens
gctggcagatgttca

SEQ ID NO: 1192288 - DNA, 15 bp, Homo sapiens
agctggcagatgttc

SEQ ID NO: 1192289 - DNA, 15 bp, Homo sapiens
cagctggcagatgtt

SEQ ID NO: 1192290 - DNA, 15 bp, Homo sapiens
acagctggcagatgt

SEQ ID NO: 1192291 - DNA, 15 bp, Homo sapiens
cacagctggcagatg

SEQ ID NO: 1192292 - DNA, 15 bp, Homo sapiens
acacagctggcagat

SEQ ID NO: 1192293 - DNA, 15 bp, Homo sapiens
gacacagctggcaga

SEQ ID NO: 1192294 - DNA, 15 bp, Homo sapiens
tgacacagctggcag

SEQ ID NO: 1192295 - DNA, 15 bp, Homo sapiens
atgacacagctggca

SEQ ID NO: 1192296 - DNA, 15 bp, Homo sapiens
catgacacagctggc

SEQ ID NO: 1192297 - DNA, 15 bp, Homo sapiens
ccatgacacagctgg

SEQ ID NO: 1192298 - DNA, 15 bp, Homo sapiens
tccatgacacagctg

SEQ ID NO: 1192299 - DNA, 15 bp, Homo sapiens
gtccatgacacagct

SEQ ID NO: 1192300 - DNA, 15 bp, Homo sapiens
agtccatgacacagc

SEQ ID NO: 1192301 - DNA, 15 bp, Homo sapiens
gagtccatgacacag

SEQ ID NO: 1192302 - DNA, 15 bp, Homo sapiens
tgagtccatgacaca

SEQ ID NO: 1192303 - DNA, 15 bp, Homo sapiens
gtgagtccatgacac

SEQ ID NO: 1192304 - DNA, 15 bp, Homo sapiens
ggtgagtccatgaca

SEQ ID NO: 1192305 - DNA, 15 bp, Homo sapiens
tggtgagtccatgac

SEQ ID NO: 1192306 - DNA, 15 bp, Homo sapiens
gtggtgagtccatga

SEQ ID NO: 1192307 - DNA, 15 bp, Homo sapiens
agtggtgagtccatg

SEQ ID NO: 1192308 - DNA, 15 bp, Homo sapiens
cagtggtgagtccat

SEQ ID NO: 1192309 - DNA, 15 bp, Homo sapiens
acagtggtgagtcca

SEQ ID NO: 1192310 - DNA, 15 bp, Homo sapiens
cacagtggtgagtcc

SEQ ID NO: 1192311 - DNA, 15 bp, Homo sapiens
acacagtggtgagtc

SEQ ID NO: 1192312 - DNA, 15 bp, Homo sapiens
cacacagtggtgagt

SEQ ID NO: 1192313 - DNA, 15 bp, Homo sapiens
tcacacagtggtgag

SEQ ID NO: 1192314 - DNA, 15 bp, Homo sapiens
gtcacacagtggtga

SEQ ID NO: 1192315 - DNA, 15 bp, Homo sapiens
ggtcacacagtggtg

SEQ ID NO: 1192316 - DNA, 15 bp, Homo sapiens
aggtcacacagtggt

SEQ ID NO: 1192317 - DNA, 15 bp, Homo sapiens
aaggtcacacagtgg

SEQ ID NO: 1192318 - DNA, 15 bp, Homo sapiens
caaggtcacacagtg

SEQ ID NO: 1192319 - DNA, 15 bp, Homo sapiens
ccaaggtcacacagt

SEQ ID NO: 1192320 - DNA, 15 bp, Homo sapiens
cccaaggtcacacag

SEQ ID NO: 1192321 - DNA, 15 bp, Homo sapiens
gcccaaggtcacaca

SEQ ID NO: 1192322 - DNA, 15 bp, Homo sapiens
tgcccaaggtcacac

SEQ ID NO: 1192323 - DNA, 15 bp, Homo sapiens
ttgcccaaggtcaca

SEQ ID NO: 1192324 - DNA, 15 bp, Homo sapiens
cttgcccaaggtcac

SEQ ID NO: 1192325 - DNA, 15 bp, Homo sapiens
gacttgcccaaggtc

SEQ ID NO: 1192326 - DNA, 15 bp, Homo sapiens
tgacttgcccaaggt

SEQ ID NO: 1192327 - DNA, 15 bp, Homo sapiens
gtgacttgcccaagg

SEQ ID NO: 1192328 - DNA, 15 bp, Homo sapiens
agtgacttgcccaag

SEQ ID NO: 1192329 - DNA, 15 bp, Homo sapiens
aagtgacttgcccaa

SEQ ID NO: 1192330 - DNA, 15 bp, Homo sapiens
gaagtgacttgccca

SEQ ID NO: 1192331 - DNA, 15 bp, Homo sapiens
tgaagtgacttgccc

SEQ ID NO: 1192332 - DNA, 15 bp, Homo sapiens
gtgaagtgacttgcc

SEQ ID NO: 1192333 - DNA, 15 bp, Homo sapiens
ggtgaagtgacttgc

SEQ ID NO: 1192334 - DNA, 15 bp, Homo sapiens
aggtgaagtgacttg

SEQ ID NO: 1192335 - DNA, 15 bp, Homo sapiens
gaggtgaagtgactt

SEQ ID NO: 1192336 - DNA, 15 bp, Homo sapiens
agaggtgaagtgact

SEQ ID NO: 1192337 - DNA, 15 bp, Homo sapiens
gagaggtgaagtgac

SEQ ID NO: 1192338 - DNA, 15 bp, Homo sapiens
agagaggtgaagtga

SEQ ID NO: 1192339 - DNA, 15 bp, Homo sapiens
cagagaggtgaagtg

SEQ ID NO: 1192340 - DNA, 15 bp, Homo sapiens
acagagaggtgaagt

SEQ ID NO: 1192341 - DNA, 15 bp, Homo sapiens
cacagagaggtgaag

SEQ ID NO: 1192342 - DNA, 15 bp, Homo sapiens
gcacagagaggtgaa

SEQ ID NO: 1192343 - DNA, 15 bp, Homo sapiens
ggcacagagaggtga

SEQ ID NO: 1192344 - DNA, 15 bp, Homo sapiens
aggcacagagaggtg

SEQ ID NO: 1192345 - DNA, 15 bp, Homo sapiens
gaggcacagagaggt

SEQ ID NO: 1192346 - DNA, 15 bp, Homo sapiens
tgaggcacagagagg

SEQ ID NO: 1192347 - DNA, 15 bp, Homo sapiens
ctgaggcacagagag

SEQ ID NO: 1192348 - DNA, 15 bp, Homo sapiens
gaaactgaggcacag

SEQ ID NO: 1192349 - DNA, 15 bp, Homo sapiens
tttgcagatgaggaa

SEQ ID NO: 1192350 - DNA, 15 bp, Homo sapiens
ttttgcagatgagga

SEQ ID NO: 1192351 - DNA, 15 bp, Homo sapiens
attttgcagatgagg

SEQ ID NO: 1192352 - DNA, 15 bp, Homo sapiens
cattttgcagatgag

SEQ ID NO: 1192353 - DNA, 15 bp, Homo sapiens
ccattttgcagatga

SEQ ID NO: 1192354 - DNA, 15 bp, Homo sapiens
cccattttgcagatg

SEQ ID NO: 1192355 - DNA, 15 bp, Homo sapiens
ccccattttgcagat

SEQ ID NO: 1192356 - DNA, 15 bp, Homo sapiens
cccccattttgcaga

SEQ ID NO: 1192357 - DNA, 15 bp, Homo sapiens
gcccccattttgcag

SEQ ID NO: 1192358 - DNA, 15 bp, Homo sapiens
tgcccccattttgca

SEQ ID NO: 1192359 - DNA, 15 bp, Homo sapiens
ttgcccccattttgc

SEQ ID NO: 1192360 - DNA, 15 bp, Homo sapiens
attgcccccattttg

SEQ ID NO: 1192361 - DNA, 15 bp, Homo sapiens
tattgcccccatttt

SEQ ID NO: 1192362 - DNA, 15 bp, Homo sapiens
atattgcccccattt

SEQ ID NO: 1192363 - DNA, 15 bp, Homo sapiens
catattgcccccatt

SEQ ID NO: 1192364 - DNA, 15 bp, Homo sapiens
acatattgcccccat

SEQ ID NO: 1192365 - DNA, 15 bp, Homo sapiens
gacatattgccccca

SEQ ID NO: 1192366 - DNA, 15 bp, Homo sapiens
tgacatattgccccc

SEQ ID NO: 1192367 - DNA, 15 bp, Homo sapiens
atgacatattgcccc

SEQ ID NO: 1192368 - DNA, 15 bp, Homo sapiens
gatgacatattgccc

SEQ ID NO: 1192369 - DNA, 15 bp, Homo sapiens
agatgacatattgcc

SEQ ID NO: 1192370 - DNA, 15 bp, Homo sapiens
tagatgacatattgc

SEQ ID NO: 1192371 - DNA, 15 bp, Homo sapiens
gtagatgacatattg

SEQ ID NO: 1192372 - DNA, 15 bp, Homo sapiens
ggtagatgacatatt

SEQ ID NO: 1192373 - DNA, 15 bp, Homo sapiens
aggtagatgacatat

SEQ ID NO: 1192374 - DNA, 15 bp, Homo sapiens
taggtagatgacata

SEQ ID NO: 1192375 - DNA, 15 bp, Homo sapiens
gtaggtagatgacat

SEQ ID NO: 1192376 - DNA, 15 bp, Homo sapiens
ggtaggtagatgaca

SEQ ID NO: 1192377 - DNA, 15 bp, Homo sapiens
aggtaggtagatgac

SEQ ID NO: 1192378 - DNA, 15 bp, Homo sapiens
gaggtaggtagatga

SEQ ID NO: 1192379 - DNA, 15 bp, Homo sapiens
tgaggtaggtagatg

SEQ ID NO: 1192380 - DNA, 15 bp, Homo sapiens
ttgaggtaggtagat

SEQ ID NO: 1192381 - DNA, 15 bp, Homo sapiens
tttgaggtaggtaga

SEQ ID NO: 1192382 - DNA, 15 bp, Homo sapiens
ctttgaggtaggtag

SEQ ID NO: 1192383 - DNA, 15 bp, Homo sapiens
ccctttgaggtaggt

SEQ ID NO: 1192384 - DNA, 15 bp, Homo sapiens
cccctttgaggtagg

SEQ ID NO: 1192385 - DNA, 15 bp, Homo sapiens
acccctttgaggtag

SEQ ID NO: 1192386 - DNA, 15 bp, Homo sapiens
cacccctttgaggta

SEQ ID NO: 1192387 - DNA, 15 bp, Homo sapiens
ccacccctttgaggt

SEQ ID NO: 1192388 - DNA, 15 bp, Homo sapiens
accacccctttgagg

SEQ ID NO: 1192389 - DNA, 15 bp, Homo sapiens
taccacccctttgag

SEQ ID NO: 1192390 - DNA, 15 bp, Homo sapiens
ataccacccctttga

SEQ ID NO: 1192391 - DNA, 15 bp, Homo sapiens
tataccacccctttg

SEQ ID NO: 1192392 - DNA, 15 bp, Homo sapiens
ttataccaccccttt

SEQ ID NO: 1192393 - DNA, 15 bp, Homo sapiens
cttataccacccctt

SEQ ID NO: 1192394 - DNA, 15 bp, Homo sapiens
ccttataccacccct

SEQ ID NO: 1192395 - DNA, 15 bp, Homo sapiens
accttataccacccc

SEQ ID NO: 1192396 - DNA, 15 bp, Homo sapiens
aaccttataccaccc

SEQ ID NO: 1192397 - DNA, 15 bp, Homo sapiens
aaaccttataccacc

SEQ ID NO: 1192398 - DNA, 15 bp, Homo sapiens
taaaccttataccac

SEQ ID NO: 1192399 - DNA, 15 bp, Homo sapiens
ttaaaccttatacca

SEQ ID NO: 1192400 - DNA, 15 bp, Homo sapiens
tttaaaccttatacc

SEQ ID NO: 1192401 - DNA, 15 bp, Homo sapiens
ttttaaaccttatac

SEQ ID NO: 1192402 - DNA, 15 bp, Homo sapiens
tttttaaaccttata

SEQ ID NO: 1192403 - DNA, 15 bp, Homo sapiens
ctttttaaaccttat

SEQ ID NO: 1192404 - DNA, 15 bp, Homo sapiens
tctttttaaacctta

SEQ ID NO: 1192405 - DNA, 15 bp, Homo sapiens
atctttttaaacctt

SEQ ID NO: 1192406 - DNA, 15 bp, Homo sapiens
tatctttttaaacct

SEQ ID NO: 1192407 - DNA, 15 bp, Homo sapiens
ttatctttttaaacc

SEQ ID NO: 1192408 - DNA, 15 bp, Homo sapiens
tttatctttttaaac

SEQ ID NO: 1192409 - DNA, 15 bp, Homo sapiens
ctttatctttttaaa

SEQ ID NO: 1192410 - DNA, 15 bp, Homo sapiens
tctttatctttttaa

SEQ ID NO: 1192411 - DNA, 15 bp, Homo sapiens
atctttatcttttta

SEQ ID NO: 1192412 - DNA, 15 bp, Homo sapiens
aatctttatcttttt

SEQ ID NO: 1192413 - DNA, 15 bp, Homo sapiens
gaatctttatctttt

SEQ ID NO: 1192414 - DNA, 15 bp, Homo sapiens
tgaatctttatcttt

SEQ ID NO: 1192415 - DNA, 15 bp, Homo sapiens
ctgaatctttatctt

SEQ ID NO: 1192416 - DNA, 15 bp, Homo sapiens
tctgaatctttatct

SEQ ID NO: 1192417 - DNA, 15 bp, Homo sapiens
atctgaatctttatc

SEQ ID NO: 1192418 - DNA, 15 bp, Homo sapiens
aatctgaatctttat

SEQ ID NO: 1192419 - DNA, 15 bp, Homo sapiens
aaatctgaatcttta

SEQ ID NO: 1192420 - DNA, 15 bp, Homo sapiens
aaaatctgaatcttt

SEQ ID NO: 1192421 - DNA, 15 bp, Homo sapiens
aaaaatctgaatctt

SEQ ID NO: 1192422 - DNA, 15 bp, Homo sapiens
aaaaaatctgaatct

SEQ ID NO: 1192423 - DNA, 15 bp, Homo sapiens
aaaaaaatctgaatc

SEQ ID NO: 1192424 - DNA, 15 bp, Homo sapiens
aaaaaaaatctgaat

SEQ ID NO: 1192425 - DNA, 15 bp, Homo sapiens
taaaaaaaatctgaa

SEQ ID NO: 1192426 - DNA, 15 bp, Homo sapiens
gtaaaaaaaatctga

SEQ ID NO: 1192427 - DNA, 15 bp, Homo sapiens
ggtaaaaaaaatctg

SEQ ID NO: 1192428 - DNA, 15 bp, Homo sapiens
gggtaaaaaaaatct

SEQ ID NO: 1192429 - DNA, 15 bp, Homo sapiens
agggtaaaaaaaatc

SEQ ID NO: 1192430 - DNA, 15 bp, Homo sapiens
cagggtaaaaaaaat

SEQ ID NO: 1192431 - DNA, 15 bp, Homo sapiens
ccagggtaaaaaaaa

SEQ ID NO: 1192432 - DNA, 15 bp, Homo sapiens
cccagggtaaaaaaa

SEQ ID NO: 1192433 - DNA, 15 bp, Homo sapiens
acccagggtaaaaaa

SEQ ID NO: 1192434 - DNA, 15 bp, Homo sapiens
aacccagggtaaaaa

SEQ ID NO: 1192435 - DNA, 15 bp, Homo sapiens
caacccagggtaaaa

SEQ ID NO: 1192436 - DNA, 15 bp, Homo sapiens
gcaacccagggtaaa

SEQ ID NO: 1192437 - DNA, 15 bp, Homo sapiens
agcaacccagggtaa

SEQ ID NO: 1192438 - DNA, 15 bp, Homo sapiens
cagcaacccagggta

SEQ ID NO: 1192439 - DNA, 15 bp, Homo sapiens
acagcaacccagggt

SEQ ID NO: 1192440 - DNA, 15 bp, Homo sapiens
tacagcaacccaggg

SEQ ID NO: 1192441 - DNA, 15 bp, Homo sapiens
ttacagcaacccagg

SEQ ID NO: 1192442 - DNA, 15 bp, Homo sapiens
cttacagcaacccag

SEQ ID NO: 1192443 - DNA, 15 bp, Homo sapiens
ccttacagcaaccca

SEQ ID NO: 1192444 - DNA, 15 bp, Homo sapiens
cccttacagcaaccc

SEQ ID NO: 1192445 - DNA, 15 bp, Homo sapiens
acccttacagcaacc

SEQ ID NO: 1192446 - DNA, 15 bp, Homo sapiens
cacccttacagcaac

SEQ ID NO: 1192447 - DNA, 15 bp, Homo sapiens
gcacccttacagcaa

SEQ ID NO: 1192448 - DNA, 15 bp, Homo sapiens
tgcacccttacagca

SEQ ID NO: 1192449 - DNA, 15 bp, Homo sapiens
ttgcacccttacagc

SEQ ID NO: 1192450 - DNA, 15 bp, Homo sapiens
gttgcacccttacag

SEQ ID NO: 1192451 - DNA, 15 bp, Homo sapiens
tgttgcacccttaca

SEQ ID NO: 1192452 - DNA, 15 bp, Homo sapiens
atgttgcacccttac

SEQ ID NO: 1192453 - DNA, 15 bp, Homo sapiens
gatgttgcaccctta

SEQ ID NO: 1192454 - DNA, 15 bp, Homo sapiens
tgatgttgcaccctt

SEQ ID NO: 1192455 - DNA, 15 bp, Homo sapiens
ctgatgttgcaccct

SEQ ID NO: 1192456 - DNA, 15 bp, Homo sapiens
cctgatgttgcaccc

SEQ ID NO: 1192457 - DNA, 15 bp, Homo sapiens
ccctgatgttgcacc

SEQ ID NO: 1192458 - DNA, 15 bp, Homo sapiens
gccctgatgttgcac

SEQ ID NO: 1192459 - DNA, 15 bp, Homo sapiens
cgccctgatgttgca

SEQ ID NO: 1192460 - DNA, 15 bp, Homo sapiens
gcgccctgatgttgc

SEQ ID NO: 1192461 - DNA, 15 bp, Homo sapiens
agcgccctgatgttg

SEQ ID NO: 1192462 - DNA, 15 bp, Homo sapiens
aagcgccctgatgtt

SEQ ID NO: 1192463 - DNA, 15 bp, Homo sapiens
caagcgccctgatgt

SEQ ID NO: 1192464 - DNA, 15 bp, Homo sapiens
tcaagcgccctgatg

SEQ ID NO: 1192465 - DNA, 15 bp, Homo sapiens
ctcaagcgccctgat

SEQ ID NO: 1192466 - DNA, 15 bp, Homo sapiens
actcaagcgccctga

SEQ ID NO: 1192467 - DNA, 15 bp, Homo sapiens
aactcaagcgccctg

SEQ ID NO: 1192468 - DNA, 15 bp, Homo sapiens
caactcaagcgccct

SEQ ID NO: 1192469 - DNA, 15 bp, Homo sapiens
gcaactcaagcgccc

SEQ ID NO: 1192470 - DNA, 15 bp, Homo sapiens
agcaactcaagcgcc

SEQ ID NO: 1192471 - DNA, 15 bp, Homo sapiens
cagcaactcaagcgc

SEQ ID NO: 1192472 - DNA, 15 bp, Homo sapiens
tcagcaactcaagcg

SEQ ID NO: 1192473 - DNA, 15 bp, Homo sapiens
ctcagcaactcaagc

SEQ ID NO: 1192474 - DNA, 15 bp, Homo sapiens
tctcagcaactcaag

SEQ ID NO: 1192475 - DNA, 15 bp, Homo sapiens
atctcagcaactcaa

SEQ ID NO: 1192476 - DNA, 15 bp, Homo sapiens
catctcagcaactca

SEQ ID NO: 1192477 - DNA, 15 bp, Homo sapiens
gcatctcagcaactc

SEQ ID NO: 1192478 - DNA, 15 bp, Homo sapiens
tgcatctcagcaact

SEQ ID NO: 1192479 - DNA, 15 bp, Homo sapiens
ttgcatctcagcaac

SEQ ID NO: 1192480 - DNA, 15 bp, Homo sapiens
cttgcatctcagcaa

SEQ ID NO: 1192481 - DNA, 15 bp, Homo sapiens
ccttgcatctcagca

SEQ ID NO: 1192482 - DNA, 15 bp, Homo sapiens
tccttgcatctcagc

SEQ ID NO: 1192483 - DNA, 15 bp, Homo sapiens
ttccttgcatctcag

SEQ ID NO: 1192484 - DNA, 15 bp, Homo sapiens
attccttgcatctca

SEQ ID NO: 1192485 - DNA, 15 bp, Homo sapiens
aattccttgcatctc

SEQ ID NO: 1192486 - DNA, 15 bp, Homo sapiens
gaattccttgcatct

SEQ ID NO: 1192487 - DNA, 15 bp, Homo sapiens
agaattccttgcatc

SEQ ID NO: 1192488 - DNA, 15 bp, Homo sapiens
tagaattccttgcat

SEQ ID NO: 1192489 - DNA, 15 bp, Homo sapiens
atagaattccttgca

SEQ ID NO: 1192490 - DNA, 15 bp, Homo sapiens
tatagaattccttgc

SEQ ID NO: 1192491 - DNA, 15 bp, Homo sapiens
ttatagaattccttg

SEQ ID NO: 1192492 - DNA, 15 bp, Homo sapiens
tttatagaattcctt

SEQ ID NO: 1192493 - DNA, 15 bp, Homo sapiens
atttatagaattcct

SEQ ID NO: 1192494 - DNA, 15 bp, Homo sapiens
tatttatagaattcc

SEQ ID NO: 1192495 - DNA, 15 bp, Homo sapiens
ttatttatagaattc

SEQ ID NO: 1192496 - DNA, 15 bp, Homo sapiens
gttatttatagaatt

SEQ ID NO: 1192497 - DNA, 15 bp, Homo sapiens
ggttatttatagaat

SEQ ID NO: 1192498 - DNA, 15 bp, Homo sapiens
gggttatttatagaa

SEQ ID NO: 1192499 - DNA, 15 bp, Homo sapiens
tgggttatttataga

SEQ ID NO: 1192500 - DNA, 15 bp, Homo sapiens
atgggttatttatag

SEQ ID NO: 1192501 - DNA, 15 bp, Homo sapiens
aatgggttatttata

SEQ ID NO: 1192502 - DNA, 15 bp, Homo sapiens
gaatgggttatttat

SEQ ID NO: 1192503 - DNA, 15 bp, Homo sapiens
tgaatgggttattta

SEQ ID NO: 1192504 - DNA, 15 bp, Homo sapiens
atgaatgggttattt

SEQ ID NO: 1192505 - DNA, 15 bp, Homo sapiens
tatgaatgggttatt

SEQ ID NO: 1192506 - DNA, 15 bp, Homo sapiens
ctatgaatgggttat

SEQ ID NO: 1192507 - DNA, 15 bp, Homo sapiens
gctatgaatgggtta

SEQ ID NO: 1192508 - DNA, 15 bp, Homo sapiens
tgctatgaatgggtt

SEQ ID NO: 1192509 - DNA, 15 bp, Homo sapiens
atgctatgaatgggt

SEQ ID NO: 1192510 - DNA, 15 bp, Homo sapiens
tatgctatgaatggg

SEQ ID NO: 1192511 - DNA, 15 bp, Homo sapiens
ctatgctatgaatgg

SEQ ID NO: 1192512 - DNA, 15 bp, Homo sapiens
gctatgctatgaatg

SEQ ID NO: 1192513 - DNA, 15 bp, Homo sapiens
agctatgctatgaat

SEQ ID NO: 1192514 - DNA, 15 bp, Homo sapiens
tagctatgctatgaa

SEQ ID NO: 1192515 - DNA, 15 bp, Homo sapiens
ctagctatgctatga

SEQ ID NO: 1192516 - DNA, 15 bp, Homo sapiens
tctagctatgctatg

SEQ ID NO: 1192517 - DNA, 15 bp, Homo sapiens
ctctagctatgctat

SEQ ID NO: 1192518 - DNA, 15 bp, Homo sapiens
tctctagctatgcta

SEQ ID NO: 1192519 - DNA, 15 bp, Homo sapiens
atctctagctatgct

SEQ ID NO: 1192520 - DNA, 15 bp, Homo sapiens
aatctctagctatgc

SEQ ID NO: 1192521 - DNA, 15 bp, Homo sapiens
caatctctagctatg

SEQ ID NO: 1192522 - DNA, 15 bp, Homo sapiens
ccaatctctagctat

SEQ ID NO: 1192523 - DNA, 15 bp, Homo sapiens
accaatctctagcta

SEQ ID NO: 1192524 - DNA, 15 bp, Homo sapiens
caccaatctctagct

SEQ ID NO: 1192525 - DNA, 15 bp, Homo sapiens
tcaccaatctctagc

SEQ ID NO: 1192526 - DNA, 15 bp, Homo sapiens
ttcaccaatctctag

SEQ ID NO: 1192527 - DNA, 15 bp, Homo sapiens
attcaccaatctcta

SEQ ID NO: 1192528 - DNA, 15 bp, Homo sapiens
aattcaccaatctct

SEQ ID NO: 1192529 - DNA, 15 bp, Homo sapiens
caattcaccaatctc

SEQ ID NO: 1192530 - DNA, 15 bp, Homo sapiens
tcaattcaccaatct

SEQ ID NO: 1192531 - DNA, 15 bp, Homo sapiens
ttcaattcaccaatc

SEQ ID NO: 1192532 - DNA, 15 bp, Homo sapiens
attcaattcaccaat

SEQ ID NO: 1192533 - DNA, 15 bp, Homo sapiens
cattcaattcaccaa

SEQ ID NO: 1192534 - DNA, 15 bp, Homo sapiens
gcattcaattcacca

SEQ ID NO: 1192535 - DNA, 15 bp, Homo sapiens
agcattcaattcacc

SEQ ID NO: 1192536 - DNA, 15 bp, Homo sapiens
gagcattcaattcac

SEQ ID NO: 1192537 - DNA, 15 bp, Homo sapiens
ggagcattcaattca

SEQ ID NO: 1192538 - DNA, 15 bp, Homo sapiens
aggagcattcaattc

SEQ ID NO: 1192539 - DNA, 15 bp, Homo sapiens
caggagcattcaatt

SEQ ID NO: 1192540 - DNA, 15 bp, Homo sapiens
tcaggagcattcaat

SEQ ID NO: 1192541 - DNA, 15 bp, Homo sapiens
gtcaggagcattcaa

SEQ ID NO: 1192542 - DNA, 15 bp, Homo sapiens
tgtcaggagcattca

SEQ ID NO: 1192543 - DNA, 15 bp, Homo sapiens
atgtcaggagcattc

SEQ ID NO: 1192544 - DNA, 15 bp, Homo sapiens
gatgtcaggagcatt

SEQ ID NO: 1192545 - DNA, 15 bp, Homo sapiens
agatgtcaggagcat

SEQ ID NO: 1192546 - DNA, 15 bp, Homo sapiens
gagatgtcaggagca

SEQ ID NO: 1192547 - DNA, 15 bp, Homo sapiens
tgagatgtcaggagc

SEQ ID NO: 1192548 - DNA, 15 bp, Homo sapiens
ctgagatgtcaggag

SEQ ID NO: 1192549 - DNA, 15 bp, Homo sapiens
actgagatgtcagga

SEQ ID NO: 1192550 - DNA, 15 bp, Homo sapiens
aactgagatgtcagg

SEQ ID NO: 1192551 - DNA, 15 bp, Homo sapiens
gaactgagatgtcag

SEQ ID NO: 1192552 - DNA, 15 bp, Homo sapiens
agaactgagatgtca

SEQ ID NO: 1192553 - DNA, 15 bp, Homo sapiens
aagaactgagatgtc

SEQ ID NO: 1192554 - DNA, 15 bp, Homo sapiens
caagaactgagatgt

SEQ ID NO: 1192555 - DNA, 15 bp, Homo sapiens
acaagaactgagatg

SEQ ID NO: 1192556 - DNA, 15 bp, Homo sapiens
gacaagaactgagat

SEQ ID NO: 1192557 - DNA, 15 bp, Homo sapiens
tgacaagaactgaga

SEQ ID NO: 1192558 - DNA, 15 bp, Homo sapiens
ctgacaagaactgag

SEQ ID NO: 1192559 - DNA, 15 bp, Homo sapiens
actgacaagaactga

SEQ ID NO: 1192560 - DNA, 15 bp, Homo sapiens
cactgacaagaactg

SEQ ID NO: 1192561 - DNA, 15 bp, Homo sapiens
tcactgacaagaact

SEQ ID NO: 1192562 - DNA, 15 bp, Homo sapiens
ttcactgacaagaac

SEQ ID NO: 1192563 - DNA, 15 bp, Homo sapiens
cttcactgacaagaa

SEQ ID NO: 1192564 - DNA, 15 bp, Homo sapiens
gcttcactgacaaga

SEQ ID NO: 1192565 - DNA, 15 bp, Homo sapiens
agcttcactgacaag

SEQ ID NO: 1192566 - DNA, 15 bp, Homo sapiens
tagcttcactgacaa

SEQ ID NO: 1192567 - DNA, 15 bp, Homo sapiens
atagcttcactgaca

SEQ ID NO: 1192568 - DNA, 15 bp, Homo sapiens
gatagcttcactgac

SEQ ID NO: 1192569 - DNA, 15 bp, Homo sapiens
ggatagcttcactga

SEQ ID NO: 1192570 - DNA, 15 bp, Homo sapiens
tggatagcttcactg

SEQ ID NO: 1192571 - DNA, 15 bp, Homo sapiens
ttggatagcttcact

SEQ ID NO: 1192572 - DNA, 15 bp, Homo sapiens
tttggatagcttcac

SEQ ID NO: 1192573 - DNA, 15 bp, Homo sapiens
atttggatagcttca

SEQ ID NO: 1192574 - DNA, 15 bp, Homo sapiens
tatttggatagcttc

SEQ ID NO: 1192575 - DNA, 15 bp, Homo sapiens
ttatttggatagctt

SEQ ID NO: 1192576 - DNA, 15 bp, Homo sapiens
gttatttggatagct

SEQ ID NO: 1192577 - DNA, 15 bp, Homo sapiens
agttatttggatagc

SEQ ID NO: 1192578 - DNA, 15 bp, Homo sapiens
cagttatttggatag

SEQ ID NO: 1192579 - DNA, 15 bp, Homo sapiens
ccagttatttggata

SEQ ID NO: 1192580 - DNA, 15 bp, Homo sapiens
gccagttatttggat

SEQ ID NO: 1192581 - DNA, 15 bp, Homo sapiens
ggccagttatttgga

SEQ ID NO: 1192582 - DNA, 15 bp, Homo sapiens
tggccagttatttgg

SEQ ID NO: 1192583 - DNA, 15 bp, Homo sapiens
ttggccagttatttg

SEQ ID NO: 1192584 - DNA, 15 bp, Homo sapiens
gttggccagttattt

SEQ ID NO: 1192585 - DNA, 15 bp, Homo sapiens
agttggccagttatt

SEQ ID NO: 1192586 - DNA, 15 bp, Homo sapiens
tagttggccagttat

SEQ ID NO: 1192587 - DNA, 15 bp, Homo sapiens
ctagttggccagtta

SEQ ID NO: 1192588 - DNA, 15 bp, Homo sapiens
actagttggccagtt

SEQ ID NO: 1192589 - DNA, 15 bp, Homo sapiens
aactagttggccagt

SEQ ID NO: 1192590 - DNA, 15 bp, Homo sapiens
caactagttggccag

SEQ ID NO: 1192591 - DNA, 15 bp, Homo sapiens
acaactagttggcca

SEQ ID NO: 1192592 - DNA, 15 bp, Homo sapiens
aacaactagttggcc

SEQ ID NO: 1192593 - DNA, 15 bp, Homo sapiens
taacaactagttggc

SEQ ID NO: 1192594 - DNA, 15 bp, Homo sapiens
ttaacaactagttgg

SEQ ID NO: 1192595 - DNA, 15 bp, Homo sapiens
tttaacaactagttg

SEQ ID NO: 1192596 - DNA, 15 bp, Homo sapiens
ttttaacaactagtt

SEQ ID NO: 1192597 - DNA, 15 bp, Homo sapiens
cttttaacaactagt

SEQ ID NO: 1192598 - DNA, 15 bp, Homo sapiens
gcttttaacaactag

SEQ ID NO: 1192599 - DNA, 15 bp, Homo sapiens
agcttttaacaacta

SEQ ID NO: 1192600 - DNA, 15 bp, Homo sapiens
tagcttttaacaact

SEQ ID NO: 1192601 - DNA, 15 bp, Homo sapiens
ttagcttttaacaac

SEQ ID NO: 1192602 - DNA, 15 bp, Homo sapiens
gttagcttttaacaa

SEQ ID NO: 1192603 - DNA, 15 bp, Homo sapiens
tgttagcttttaaca

SEQ ID NO: 1192604 - DNA, 15 bp, Homo sapiens
ctgttagcttttaac

SEQ ID NO: 1192605 - DNA, 15 bp, Homo sapiens
gctgttagcttttaa

SEQ ID NO: 1192606 - DNA, 15 bp, Homo sapiens
agctgttagctttta

SEQ ID NO: 1192607 - DNA, 15 bp, Homo sapiens
gagctgttagctttt

SEQ ID NO: 1192608 - DNA, 15 bp, Homo sapiens
tgagctgttagcttt

SEQ ID NO: 1192609 - DNA, 15 bp, Homo sapiens
ttgagctgttagctt

SEQ ID NO: 1192610 - DNA, 15 bp, Homo sapiens
attgagctgttagct

SEQ ID NO: 1192611 - DNA, 15 bp, Homo sapiens
gattgagctgttagc

SEQ ID NO: 1192612 - DNA, 15 bp, Homo sapiens
agattgagctgttag

SEQ ID NO: 1192613 - DNA, 15 bp, Homo sapiens
gagattgagctgtta

SEQ ID NO: 1192614 - DNA, 15 bp, Homo sapiens
agagattgagctgtt

SEQ ID NO: 1192615 - DNA, 15 bp, Homo sapiens
aagagattgagctgt

SEQ ID NO: 1192616 - DNA, 15 bp, Homo sapiens
taagagattgagctg

SEQ ID NO: 1192617 - DNA, 15 bp, Homo sapiens
ttaagagattgagct

SEQ ID NO: 1192618 - DNA, 15 bp, Homo sapiens
tttaagagattgagc

SEQ ID NO: 1192619 - DNA, 15 bp, Homo sapiens
ttttaagagattgag

SEQ ID NO: 1192620 - DNA, 15 bp, Homo sapiens
gttttaagagattga

SEQ ID NO: 1192621 - DNA, 15 bp, Homo sapiens
tgttttaagagattg

SEQ ID NO: 1192622 - DNA, 15 bp, Homo sapiens
gtgttttaagagatt

SEQ ID NO: 1192623 - DNA, 15 bp, Homo sapiens
agtgttttaagagat

SEQ ID NO: 1192624 - DNA, 15 bp, Homo sapiens
aagtgttttaagaga

SEQ ID NO: 1192625 - DNA, 15 bp, Homo sapiens
aaagtgttttaagag

SEQ ID NO: 1192626 - DNA, 15 bp, Homo sapiens
aaaagtgttttaaga

SEQ ID NO: 1192627 - DNA, 15 bp, Homo sapiens
gaaaagtgttttaag

SEQ ID NO: 1192628 - DNA, 15 bp, Homo sapiens
tgaaaagtgttttaa

SEQ ID NO: 1192629 - DNA, 15 bp, Homo sapiens
ttgaaaagtgtttta

SEQ ID NO: 1192630 - DNA, 15 bp, Homo sapiens
tttgaaaagtgtttt

SEQ ID NO: 1192631 - DNA, 15 bp, Homo sapiens
ttttgaaaagtgttt

SEQ ID NO: 1192632 - DNA, 15 bp, Homo sapiens
attttgaaaagtgtt

SEQ ID NO: 1192633 - DNA, 15 bp, Homo sapiens
tattttgaaaagtgt

SEQ ID NO: 1192634 - DNA, 15 bp, Homo sapiens
atattttgaaaagtg

SEQ ID NO: 1192635 - DNA, 15 bp, Homo sapiens
catattttgaaaagt

SEQ ID NO: 1192636 - DNA, 15 bp, Homo sapiens
acatattttgaaaag

SEQ ID NO: 1192637 - DNA, 15 bp, Homo sapiens
cacatattttgaaaa

SEQ ID NO: 1192638 - DNA, 15 bp, Homo sapiens
ccacatattttgaaa

SEQ ID NO: 1192639 - DNA, 15 bp, Homo sapiens
cccacatattttgaa

SEQ ID NO: 1192640 - DNA, 15 bp, Homo sapiens
tcccacatattttga

SEQ ID NO: 1192641 - DNA, 15 bp, Homo sapiens
ttcccacatattttg

SEQ ID NO: 1192642 - DNA, 15 bp, Homo sapiens
cttcccacatatttt

SEQ ID NO: 1192643 - DNA, 15 bp, Homo sapiens
gcttcccacatattt

SEQ ID NO: 1192644 - DNA, 15 bp, Homo sapiens
tgcttcccacatatt

SEQ ID NO: 1192645 - DNA, 15 bp, Homo sapiens
atgcttcccacatat

SEQ ID NO: 1192646 - DNA, 15 bp, Homo sapiens
aatgcttcccacata

SEQ ID NO: 1192647 - DNA, 15 bp, Homo sapiens
aaatgcttcccacat

SEQ ID NO: 1192648 - DNA, 15 bp, Homo sapiens
caaatgcttcccaca

SEQ ID NO: 1192649 - DNA, 15 bp, Homo sapiens
tcaaatgcttcccac

SEQ ID NO: 1192650 - DNA, 15 bp, Homo sapiens
atcaaatgcttccca

SEQ ID NO: 1192651 - DNA, 15 bp, Homo sapiens
aatcaaatgcttccc

SEQ ID NO: 1192652 - DNA, 15 bp, Homo sapiens
aaatcaaatgcttcc

SEQ ID NO: 1192653 - DNA, 15 bp, Homo sapiens
aaaatcaaatgcttc

SEQ ID NO: 1192654 - DNA, 15 bp, Homo sapiens
gaaaatcaaatgctt

SEQ ID NO: 1192655 - DNA, 15 bp, Homo sapiens
tgaaaatcaaatgct

SEQ ID NO: 1192656 - DNA, 15 bp, Homo sapiens
ttgaaaatcaaatgc

SEQ ID NO: 1192657 - DNA, 15 bp, Homo sapiens
attgaaaatcaaatg

SEQ ID NO: 1192658 - DNA, 15 bp, Homo sapiens
aattgaaaatcaaat

SEQ ID NO: 1192659 - DNA, 15 bp, Homo sapiens
aaattgaaaatcaaa

SEQ ID NO: 1192660 - DNA, 15 bp, Homo sapiens
caaattgaaaatcaa

SEQ ID NO: 1192661 - DNA, 15 bp, Homo sapiens
tcaaattgaaaatca

SEQ ID NO: 1192662 - DNA, 15 bp, Homo sapiens
atcaaattgaaaatc

SEQ ID NO: 1192663 - DNA, 15 bp, Homo sapiens
aatcaaattgaaaat

SEQ ID NO: 1192664 - DNA, 15 bp, Homo sapiens
aaatcaaattgaaaa

SEQ ID NO: 1192665 - DNA, 15 bp, Homo sapiens
aaaatcaaattgaaa

SEQ ID NO: 1192666 - DNA, 15 bp, Homo sapiens
caaaatcaaattgaa

SEQ ID NO: 1192667 - DNA, 15 bp, Homo sapiens
tcaaaatcaaattga

SEQ ID NO: 1192668 - DNA, 15 bp, Homo sapiens
ttcaaaatcaaattg

SEQ ID NO: 1192669 - DNA, 15 bp, Homo sapiens
attcaaaatcaaatt

SEQ ID NO: 1192670 - DNA, 15 bp, Homo sapiens
aattcaaaatcaaat

SEQ ID NO: 1192671 - DNA, 15 bp, Homo sapiens
gaattcaaaatcaaa

SEQ ID NO: 1192672 - DNA, 15 bp, Homo sapiens
agaattcaaaatcaa

SEQ ID NO: 1192673 - DNA, 15 bp, Homo sapiens
cagaattcaaaatca

SEQ ID NO: 1192674 - DNA, 15 bp, Homo sapiens
gcagaattcaaaatc

SEQ ID NO: 1192675 - DNA, 15 bp, Homo sapiens
tgcagaattcaaaat

SEQ ID NO: 1192676 - DNA, 15 bp, Homo sapiens
atgcagaattcaaaa

SEQ ID NO: 1192677 - DNA, 15 bp, Homo sapiens
aatgcagaattcaaa

SEQ ID NO: 1192678 - DNA, 15 bp, Homo sapiens
aaatgcagaattcaa

SEQ ID NO: 1192679 - DNA, 15 bp, Homo sapiens
caaatgcagaattca

SEQ ID NO: 1192680 - DNA, 15 bp, Homo sapiens
ccaaatgcagaattc

SEQ ID NO: 1192681 - DNA, 15 bp, Homo sapiens
accaaatgcagaatt

SEQ ID NO: 1192682 - DNA, 15 bp, Homo sapiens
aaccaaatgcagaat

SEQ ID NO: 1192683 - DNA, 15 bp, Homo sapiens
aaaccaaatgcagaa

SEQ ID NO: 1192684 - DNA, 15 bp, Homo sapiens
aaaaccaaatgcaga

SEQ ID NO: 1192685 - DNA, 15 bp, Homo sapiens
taaaaccaaatgcag

SEQ ID NO: 1192686 - DNA, 15 bp, Homo sapiens
ataaaaccaaatgca

SEQ ID NO: 1192687 - DNA, 15 bp, Homo sapiens
cataaaaccaaatgc

SEQ ID NO: 1192688 - DNA, 15 bp, Homo sapiens
tcataaaaccaaatg

SEQ ID NO: 1192689 - DNA, 15 bp, Homo sapiens
ttcataaaaccaaat

SEQ ID NO: 1192690 - DNA, 15 bp, Homo sapiens
attcataaaaccaaa

SEQ ID NO: 1192691 - DNA, 15 bp, Homo sapiens
tattcataaaaccaa

SEQ ID NO: 1192692 - DNA, 15 bp, Homo sapiens
gtattcataaaacca

SEQ ID NO: 1192693 - DNA, 15 bp, Homo sapiens
tgtattcataaaacc

SEQ ID NO: 1192694 - DNA, 15 bp, Homo sapiens
ttgtattcataaaac

SEQ ID NO: 1192695 - DNA, 15 bp, Homo sapiens
tttgtattcataaaa

SEQ ID NO: 1192696 - DNA, 15 bp, Homo sapiens
ctttgtattcataaa

SEQ ID NO: 1192697 - DNA, 15 bp, Homo sapiens
tctttgtattcataa

SEQ ID NO: 1192698 - DNA, 15 bp, Homo sapiens
atctttgtattcata

SEQ ID NO: 1192699 - DNA, 15 bp, Homo sapiens
tatctttgtattcat

SEQ ID NO: 1192700 - DNA, 15 bp, Homo sapiens
ttatctttgtattca

SEQ ID NO: 1192701 - DNA, 15 bp, Homo sapiens
cttatctttgtattc

SEQ ID NO: 1192702 - DNA, 15 bp, Homo sapiens
acttatctttgtatt

SEQ ID NO: 1192703 - DNA, 15 bp, Homo sapiens
cacttatctttgtat

SEQ ID NO: 1192704 - DNA, 15 bp, Homo sapiens
tcacttatctttgta

SEQ ID NO: 1192705 - DNA, 15 bp, Homo sapiens
ttcacttatctttgt

SEQ ID NO: 1192706 - DNA, 15 bp, Homo sapiens
tttcacttatctttg

SEQ ID NO: 1192707 - DNA, 15 bp, Homo sapiens
ttttcacttatcttt

SEQ ID NO: 1192708 - DNA, 15 bp, Homo sapiens
cttttcacttatctt

SEQ ID NO: 1192709 - DNA, 15 bp, Homo sapiens
tcttttcacttatct

SEQ ID NO: 1192710 - DNA, 15 bp, Homo sapiens
ctcttttcacttatc

SEQ ID NO: 1192711 - DNA, 15 bp, Homo sapiens
tctcttttcacttat

SEQ ID NO: 1192712 - DNA, 15 bp, Homo sapiens
ctctcttttcactta

SEQ ID NO: 1192713 - DNA, 15 bp, Homo sapiens
tctctcttttcactt

SEQ ID NO: 1192714 - DNA, 15 bp, Homo sapiens
ttctctcttttcact

SEQ ID NO: 1192715 - DNA, 15 bp, Homo sapiens
tttctctcttttcac

SEQ ID NO: 1192716 - DNA, 15 bp, Homo sapiens
ctttctctcttttca

SEQ ID NO: 1192717 - DNA, 15 bp, Homo sapiens
cctttctctcttttc

SEQ ID NO: 1192718 - DNA, 15 bp, Homo sapiens
tcctttctctctttt

SEQ ID NO: 1192719 - DNA, 15 bp, Homo sapiens
ttcctttctctcttt

SEQ ID NO: 1192720 - DNA, 15 bp, Homo sapiens
tttcctttctctctt

SEQ ID NO: 1192721 - DNA, 15 bp, Homo sapiens
ttttcctttctctct

SEQ ID NO: 1192722 - DNA, 15 bp, Homo sapiens
cttttcctttctctc

SEQ ID NO: 1192723 - DNA, 15 bp, Homo sapiens
tcttttcctttctct

SEQ ID NO: 1192724 - DNA, 15 bp, Homo sapiens
ttcttttcctttctc

SEQ ID NO: 1192725 - DNA, 15 bp, Homo sapiens
ttttcttttcctttc

SEQ ID NO: 1192726 - DNA, 15 bp, Homo sapiens
tttttcttttccttt

SEQ ID NO: 1192727 - DNA, 15 bp, Homo sapiens
ctttttcttttcctt

SEQ ID NO: 1192728 - DNA, 15 bp, Homo sapiens
cctttttcttttcct

SEQ ID NO: 1192729 - DNA, 15 bp, Homo sapiens
tcctttttcttttcc

SEQ ID NO: 1192730 - DNA, 15 bp, Homo sapiens
ctcctttttcttttc

SEQ ID NO: 1192731 - DNA, 15 bp, Homo sapiens
tctcctttttctttt

SEQ ID NO: 1192732 - DNA, 15 bp, Homo sapiens
ttctcctttttcttt

SEQ ID NO: 1192733 - DNA, 15 bp, Homo sapiens
tttctcctttttctt

SEQ ID NO: 1192734 - DNA, 15 bp, Homo sapiens
ttttctcctttttct

SEQ ID NO: 1192735 - DNA, 15 bp, Homo sapiens
tttttctcctttttc

SEQ ID NO: 1192736 - DNA, 15 bp, Homo sapiens
gtttttctccttttt

SEQ ID NO: 1192737 - DNA, 15 bp, Homo sapiens
tgtttttctcctttt

SEQ ID NO: 1192738 - DNA, 15 bp, Homo sapiens
ttgtttttctccttt

SEQ ID NO: 1192739 - DNA, 15 bp, Homo sapiens
tttgtttttctcctt

SEQ ID NO: 1192740 - DNA, 15 bp, Homo sapiens
ctttgtttttctcct

SEQ ID NO: 1192741 - DNA, 15 bp, Homo sapiens
tctttgtttttctcc

SEQ ID NO: 1192742 - DNA, 15 bp, Homo sapiens
ctctttgtttttctc

SEQ ID NO: 1192743 - DNA, 15 bp, Homo sapiens
tctctttgtttttct

SEQ ID NO: 1192744 - DNA, 15 bp, Homo sapiens
atctctttgtttttc

SEQ ID NO: 1192745 - DNA, 15 bp, Homo sapiens
aatctctttgttttt

SEQ ID NO: 1192746 - DNA, 15 bp, Homo sapiens
aaatctctttgtttt

SEQ ID NO: 1192747 - DNA, 15 bp, Homo sapiens
gaaatctctttgttt

SEQ ID NO: 1192748 - DNA, 15 bp, Homo sapiens
agaaatctctttgtt

SEQ ID NO: 1192749 - DNA, 15 bp, Homo sapiens
tagaaatctctttgt

SEQ ID NO: 1192750 - DNA, 15 bp, Homo sapiens
gtagaaatctctttg

SEQ ID NO: 1192751 - DNA, 15 bp, Homo sapiens
ggtagaaatctcttt

SEQ ID NO: 1192752 - DNA, 15 bp, Homo sapiens
tggtagaaatctctt

SEQ ID NO: 1192753 - DNA, 15 bp, Homo sapiens
ctggtagaaatctct

SEQ ID NO: 1192754 - DNA, 15 bp, Homo sapiens
actggtagaaatctc

SEQ ID NO: 1192755 - DNA, 15 bp, Homo sapiens
cactggtagaaatct

SEQ ID NO: 1192756 - DNA, 15 bp, Homo sapiens
tcactggtagaaatc

SEQ ID NO: 1192757 - DNA, 15 bp, Homo sapiens
ttcactggtagaaat

SEQ ID NO: 1192758 - DNA, 15 bp, Homo sapiens
tttcactggtagaaa

SEQ ID NO: 1192759 - DNA, 15 bp, Homo sapiens
ctttcactggtagaa

SEQ ID NO: 1192760 - DNA, 15 bp, Homo sapiens
cctttcactggtaga

SEQ ID NO: 1192761 - DNA, 15 bp, Homo sapiens
ccctttcactggtag

SEQ ID NO: 1192762 - DNA, 15 bp, Homo sapiens
cccctttcactggta

SEQ ID NO: 1192763 - DNA, 15 bp, Homo sapiens
tcccctttcactggt

SEQ ID NO: 1192764 - DNA, 15 bp, Homo sapiens
ttcccctttcactgg

SEQ ID NO: 1192765 - DNA, 15 bp, Homo sapiens
attcccctttcactg

SEQ ID NO: 1192766 - DNA, 15 bp, Homo sapiens
aattcccctttcact

SEQ ID NO: 1192767 - DNA, 15 bp, Homo sapiens
taattcccctttcac

SEQ ID NO: 1192768 - DNA, 15 bp, Homo sapiens
ttaattcccctttca

SEQ ID NO: 1192769 - DNA, 15 bp, Homo sapiens
attaattcccctttc

SEQ ID NO: 1192770 - DNA, 15 bp, Homo sapiens
aattaattccccttt

SEQ ID NO: 1192771 - DNA, 15 bp, Homo sapiens
taattaattcccctt

SEQ ID NO: 1192772 - DNA, 15 bp, Homo sapiens
gtaattaattcccct

SEQ ID NO: 1192773 - DNA, 15 bp, Homo sapiens
agtaattaattcccc

SEQ ID NO: 1192774 - DNA, 15 bp, Homo sapiens
gagtaattaattccc

SEQ ID NO: 1192775 - DNA, 15 bp, Homo sapiens
agagtaattaattcc

SEQ ID NO: 1192776 - DNA, 15 bp, Homo sapiens
aagagtaattaattc

SEQ ID NO: 1192777 - DNA, 15 bp, Homo sapiens
aaagagtaattaatt

SEQ ID NO: 1192778 - DNA, 15 bp, Homo sapiens
caaagagtaattaat

SEQ ID NO: 1192779 - DNA, 15 bp, Homo sapiens
acaaagagtaattaa

SEQ ID NO: 1192780 - DNA, 15 bp, Homo sapiens
aacaaagagtaatta

SEQ ID NO: 1192781 - DNA, 15 bp, Homo sapiens
taacaaagagtaatt

SEQ ID NO: 1192782 - DNA, 15 bp, Homo sapiens
ctaacaaagagtaat

SEQ ID NO: 1192783 - DNA, 15 bp, Homo sapiens
gctaacaaagagtaa

SEQ ID NO: 1192784 - DNA, 15 bp, Homo sapiens
tgctaacaaagagta

SEQ ID NO: 1192785 - DNA, 15 bp, Homo sapiens
gtgctaacaaagagt

SEQ ID NO: 1192786 - DNA, 15 bp, Homo sapiens
agtgctaacaaagag

SEQ ID NO: 1192787 - DNA, 15 bp, Homo sapiens
gagtgctaacaaaga

SEQ ID NO: 1192788 - DNA, 15 bp, Homo sapiens
tgagtgctaacaaag

SEQ ID NO: 1192789 - DNA, 15 bp, Homo sapiens
gtgagtgctaacaaa

SEQ ID NO: 1192790 - DNA, 15 bp, Homo sapiens
agtgagtgctaacaa

SEQ ID NO: 1192791 - DNA, 15 bp, Homo sapiens
cagtgagtgctaaca

SEQ ID NO: 1192792 - DNA, 15 bp, Homo sapiens
tcagtgagtgctaac

SEQ ID NO: 1192793 - DNA, 15 bp, Homo sapiens
gtcagtgagtgctaa

SEQ ID NO: 1192794 - DNA, 15 bp, Homo sapiens
agtcagtgagtgcta

SEQ ID NO: 1192795 - DNA, 15 bp, Homo sapiens
gagtcagtgagtgct

SEQ ID NO: 1192796 - DNA, 15 bp, Homo sapiens
agagtcagtgagtgc

SEQ ID NO: 1192797 - DNA, 15 bp, Homo sapiens
aagagtcagtgagtg

SEQ ID NO: 1192798 - DNA, 15 bp, Homo sapiens
gaagagtcagtgagt

SEQ ID NO: 1192799 - DNA, 15 bp, Homo sapiens
agaagagtcagtgag

SEQ ID NO: 1192800 - DNA, 15 bp, Homo sapiens
tagaagagtcagtga

SEQ ID NO: 1192801 - DNA, 15 bp, Homo sapiens
atagaagagtcagtg

SEQ ID NO: 1192802 - DNA, 15 bp, Homo sapiens
catagaagagtcagt

SEQ ID NO: 1192803 - DNA, 15 bp, Homo sapiens
gcatagaagagtcag

SEQ ID NO: 1192804 - DNA, 15 bp, Homo sapiens
tgcatagaagagtca

SEQ ID NO: 1192805 - DNA, 15 bp, Homo sapiens
ctgcatagaagagtc

SEQ ID NO: 1192806 - DNA, 15 bp, Homo sapiens
actgcatagaagagt

SEQ ID NO: 1192807 - DNA, 15 bp, Homo sapiens
aactgcatagaagag

SEQ ID NO: 1192808 - DNA, 15 bp, Homo sapiens
taactgcatagaaga

SEQ ID NO: 1192809 - DNA, 15 bp, Homo sapiens
gtaactgcatagaag

SEQ ID NO: 1192810 - DNA, 15 bp, Homo sapiens
agtaactgcatagaa

SEQ ID NO: 1192811 - DNA, 15 bp, Homo sapiens
tagtaactgcataga

SEQ ID NO: 1192812 - DNA, 15 bp, Homo sapiens
gtagtaactgcatag

SEQ ID NO: 1192813 - DNA, 15 bp, Homo sapiens
tgtagtaactgcata

SEQ ID NO: 1192814 - DNA, 15 bp, Homo sapiens
atgtagtaactgcat

SEQ ID NO: 1192815 - DNA, 15 bp, Homo sapiens
tatgtagtaactgca

SEQ ID NO: 1192816 - DNA, 15 bp, Homo sapiens
atatgtagtaactgc

SEQ ID NO: 1192817 - DNA, 15 bp, Homo sapiens
gatatgtagtaactg

SEQ ID NO: 1192818 - DNA, 15 bp, Homo sapiens
agatatgtagtaact

SEQ ID NO: 1192819 - DNA, 15 bp, Homo sapiens
tagatatgtagtaac

SEQ ID NO: 1192820 - DNA, 15 bp, Homo sapiens
ctagatatgtagtaa

SEQ ID NO: 1192821 - DNA, 15 bp, Homo sapiens
actagatatgtagta

SEQ ID NO: 1192822 - DNA, 15 bp, Homo sapiens
tactagatatgtagt

SEQ ID NO: 1192823 - DNA, 15 bp, Homo sapiens
ttactagatatgtag

SEQ ID NO: 1192824 - DNA, 15 bp, Homo sapiens
tttactagatatgta

SEQ ID NO: 1192825 - DNA, 15 bp, Homo sapiens
ttttactagatatgt

SEQ ID NO: 1192826 - DNA, 15 bp, Homo sapiens
gttttactagatatg

SEQ ID NO: 1192827 - DNA, 15 bp, Homo sapiens
ggttttactagatat

SEQ ID NO: 1192828 - DNA, 15 bp, Homo sapiens
aggttttactagata

SEQ ID NO: 1192829 - DNA, 15 bp, Homo sapiens
gaggttttactagat

SEQ ID NO: 1192830 - DNA, 15 bp, Homo sapiens
cgaggttttactaga

SEQ ID NO: 1192831 - DNA, 15 bp, Homo sapiens
acgaggttttactag

SEQ ID NO: 1192832 - DNA, 15 bp, Homo sapiens
aacgaggttttacta

SEQ ID NO: 1192833 - DNA, 15 bp, Homo sapiens
taaacgaggttttac

SEQ ID NO: 1192834 - DNA, 15 bp, Homo sapiens
ttaaacgaggtttta

SEQ ID NO: 1192835 - DNA, 15 bp, Homo sapiens
attaaacgaggtttt

SEQ ID NO: 1192836 - DNA, 15 bp, Homo sapiens
tattaaacgaggttt

SEQ ID NO: 1192837 - DNA, 15 bp, Homo sapiens
gtattaaacgaggtt

SEQ ID NO: 1192838 - DNA, 15 bp, Homo sapiens
agtattaaacgaggt

SEQ ID NO: 1192839 - DNA, 15 bp, Homo sapiens
tagtattaaacgagg

SEQ ID NO: 1192840 - DNA, 15 bp, Homo sapiens
atagtattaaacgag

SEQ ID NO: 1192841 - DNA, 15 bp, Homo sapiens
tatagtattaaacga

SEQ ID NO: 1192842 - DNA, 15 bp, Homo sapiens
ttatagtattaaacg

SEQ ID NO: 1192843 - DNA, 15 bp, Homo sapiens
tttatagtattaaac

SEQ ID NO: 1192844 - DNA, 15 bp, Homo sapiens
atttatagtattaaa

SEQ ID NO: 1192845 - DNA, 15 bp, Homo sapiens
tatttatagtattaa

SEQ ID NO: 1192846 - DNA, 15 bp, Homo sapiens
ttatttatagtatta

SEQ ID NO: 1192847 - DNA, 15 bp, Homo sapiens
attatttatagtatt

SEQ ID NO: 1192848 - DNA, 15 bp, Homo sapiens
tattatttatagtat

SEQ ID NO: 1192849 - DNA, 15 bp, Homo sapiens
atattatttatagta

SEQ ID NO: 1192850 - DNA, 15 bp, Homo sapiens
aatattatttatagt

SEQ ID NO: 1192851 - DNA, 15 bp, Homo sapiens
gaatattatttatag

SEQ ID NO: 1192852 - DNA, 15 bp, Homo sapiens
agaatattatttata

SEQ ID NO: 1192853 - DNA, 15 bp, Homo sapiens
tagaatattatttat

SEQ ID NO: 1192854 - DNA, 15 bp, Homo sapiens
atagaatattattta

SEQ ID NO: 1192855 - DNA, 15 bp, Homo sapiens
aatagaatattattt

SEQ ID NO: 1192856 - DNA, 15 bp, Homo sapiens
gaatagaatattatt

SEQ ID NO: 1192857 - DNA, 15 bp, Homo sapiens
tgaatagaatattat

SEQ ID NO: 1192858 - DNA, 15 bp, Homo sapiens
atgaatagaatatta

SEQ ID NO: 1192859 - DNA, 15 bp, Homo sapiens
aatgaatagaatatt

SEQ ID NO: 1192860 - DNA, 15 bp, Homo sapiens
aaatgaatagaatat

SEQ ID NO: 1192861 - DNA, 15 bp, Homo sapiens
aaaatgaatagaata

SEQ ID NO: 1192862 - DNA, 15 bp, Homo sapiens
caaaatgaatagaat

SEQ ID NO: 1192863 - DNA, 15 bp, Homo sapiens
tcaaaatgaatagaa

SEQ ID NO: 1192864 - DNA, 15 bp, Homo sapiens
ttcaaaatgaataga

SEQ ID NO: 1192865 - DNA, 15 bp, Homo sapiens
tttcaaaatgaatag

SEQ ID NO: 1192866 - DNA, 15 bp, Homo sapiens
ttttcaaaatgaata

SEQ ID NO: 1192867 - DNA, 15 bp, Homo sapiens
tttttcaaaatgaat

SEQ ID NO: 1192868 - DNA, 15 bp, Homo sapiens
gtttttcaaaatgaa

SEQ ID NO: 1192869 - DNA, 15 bp, Homo sapiens
tgtttttcaaaatga

SEQ ID NO: 1192870 - DNA, 15 bp, Homo sapiens
gtgtttttcaaaatg

SEQ ID NO: 1192871 - DNA, 15 bp, Homo sapiens
tgtgtttttcaaaat

SEQ ID NO: 1192872 - DNA, 15 bp, Homo sapiens
ttgtgtttttcaaaa

SEQ ID NO: 1192873 - DNA, 15 bp, Homo sapiens
attgtgtttttcaaa

SEQ ID NO: 1192874 - DNA, 15 bp, Homo sapiens
cattgtgtttttcaa

SEQ ID NO: 1192875 - DNA, 15 bp, Homo sapiens
tcattgtgtttttca

SEQ ID NO: 1192876 - DNA, 15 bp, Homo sapiens
atcattgtgtttttc

SEQ ID NO: 1192877 - DNA, 15 bp, Homo sapiens
aatcattgtgttttt

SEQ ID NO: 1192878 - DNA, 15 bp, Homo sapiens
gaatcattgtgtttt

SEQ ID NO: 1192879 - DNA, 15 bp, Homo sapiens
ggaatcattgtgttt

SEQ ID NO: 1192880 - DNA, 15 bp, Homo sapiens
aggaatcattgtgtt

SEQ ID NO: 1192881 - DNA, 15 bp, Homo sapiens
aaggaatcattgtgt

SEQ ID NO: 1192882 - DNA, 15 bp, Homo sapiens
gaaggaatcattgtg

SEQ ID NO: 1192883 - DNA, 15 bp, Homo sapiens
agaaggaatcattgt

SEQ ID NO: 1192884 - DNA, 15 bp, Homo sapiens
aagaaggaatcattg

SEQ ID NO: 1192885 - DNA, 15 bp, Homo sapiens
aaagaaggaatcatt

SEQ ID NO: 1192886 - DNA, 15 bp, Homo sapiens
aaaagaaggaatcat

SEQ ID NO: 1192887 - DNA, 15 bp, Homo sapiens
gaaaagaaggaatca

SEQ ID NO: 1192888 - DNA, 15 bp, Homo sapiens
tagaaaagaaggaat

SEQ ID NO: 1192889 - DNA, 15 bp, Homo sapiens
ctagaaaagaaggaa

SEQ ID NO: 1192890 - DNA, 15 bp, Homo sapiens
cctagaaaagaagga

SEQ ID NO: 1192891 - DNA, 15 bp, Homo sapiens
gcctagaaaagaagg

SEQ ID NO: 1192892 - DNA, 15 bp, Homo sapiens
tgcctagaaaagaag

SEQ ID NO: 1192893 - DNA, 15 bp, Homo sapiens
ttgcctagaaaagaa

SEQ ID NO: 1192894 - DNA, 15 bp, Homo sapiens
attgcctagaaaaga

SEQ ID NO: 1192895 - DNA, 15 bp, Homo sapiens
tattgcctagaaaag

SEQ ID NO: 1192896 - DNA, 15 bp, Homo sapiens
atattgcctagaaaa

SEQ ID NO: 1192897 - DNA, 15 bp, Homo sapiens
tatattgcctagaaa

SEQ ID NO: 1192898 - DNA, 15 bp, Homo sapiens
ttatattgcctagaa

SEQ ID NO: 1192899 - DNA, 15 bp, Homo sapiens
cttatattgcctaga

SEQ ID NO: 1192900 - DNA, 15 bp, Homo sapiens
ccttatattgcctag

SEQ ID NO: 1192901 - DNA, 15 bp, Homo sapiens
tccttatattgccta

SEQ ID NO: 1192902 - DNA, 15 bp, Homo sapiens
ttccttatattgcct

SEQ ID NO: 1192903 - DNA, 15 bp, Homo sapiens
tttccttatattgcc

SEQ ID NO: 1192904 - DNA, 15 bp, Homo sapiens
ctttccttatattgc

SEQ ID NO: 1192905 - DNA, 15 bp, Homo sapiens
actttccttatattg

SEQ ID NO: 1192906 - DNA, 15 bp, Homo sapiens
cactttccttatatt

SEQ ID NO: 1192907 - DNA, 15 bp, Homo sapiens
tcactttccttatat

SEQ ID NO: 1192908 - DNA, 15 bp, Homo sapiens
atcactttccttata

SEQ ID NO: 1192909 - DNA, 15 bp, Homo sapiens
gatcactttccttat

SEQ ID NO: 1192910 - DNA, 15 bp, Homo sapiens
ggatcactttcctta

SEQ ID NO: 1192911 - DNA, 15 bp, Homo sapiens
tggatcactttcctt

SEQ ID NO: 1192912 - DNA, 15 bp, Homo sapiens
ttggatcactttcct

SEQ ID NO: 1192913 - DNA, 15 bp, Homo sapiens
tttggatcactttcc

SEQ ID NO: 1192914 - DNA, 15 bp, Homo sapiens
ttttggatcactttc

SEQ ID NO: 1192915 - DNA, 15 bp, Homo sapiens
attttggatcacttt

SEQ ID NO: 1192916 - DNA, 15 bp, Homo sapiens
aattttggatcactt

SEQ ID NO: 1192917 - DNA, 15 bp, Homo sapiens
aaattttggatcact

SEQ ID NO: 1192918 - DNA, 15 bp, Homo sapiens
caaattttggatcac

SEQ ID NO: 1192919 - DNA, 15 bp, Homo sapiens
tcaaattttggatca

SEQ ID NO: 1192920 - DNA, 15 bp, Homo sapiens
ttcaaattttggatc

SEQ ID NO: 1192921 - DNA, 15 bp, Homo sapiens
tttcaaattttggat

SEQ ID NO: 1192922 - DNA, 15 bp, Homo sapiens
atttcaaattttgga

SEQ ID NO: 1192923 - DNA, 15 bp, Homo sapiens
tatttcaaattttgg

SEQ ID NO: 1192924 - DNA, 15 bp, Homo sapiens
atatttcaaattttg

SEQ ID NO: 1192925 - DNA, 15 bp, Homo sapiens
aatatttcaaatttt

SEQ ID NO: 1192926 - DNA, 15 bp, Homo sapiens
taatatttcaaattt

SEQ ID NO: 1192927 - DNA, 15 bp, Homo sapiens
ttaatatttcaaatt

SEQ ID NO: 1192928 - DNA, 15 bp, Homo sapiens
tttaatatttcaaat

SEQ ID NO: 1192929 - DNA, 15 bp, Homo sapiens
ttttaatatttcaaa

SEQ ID NO: 1192930 - DNA, 15 bp, Homo sapiens
attttaatatttcaa

SEQ ID NO: 1192931 - DNA, 15 bp, Homo sapiens
tattttaatatttca

SEQ ID NO: 1192932 - DNA, 15 bp, Homo sapiens
ttattttaatatttc

SEQ ID NO: 1192933 - DNA, 15 bp, Homo sapiens
attattttaatattt

SEQ ID NO: 1192934 - DNA, 15 bp, Homo sapiens
tattattttaatatt

SEQ ID NO: 1192935 - DNA, 15 bp, Homo sapiens
atattattttaatat

SEQ ID NO: 1192936 - DNA, 15 bp, Homo sapiens
gatattattttaata

SEQ ID NO: 1192937 - DNA, 15 bp, Homo sapiens
agatattattttaat

SEQ ID NO: 1192938 - DNA, 15 bp, Homo sapiens
tagatattattttaa

SEQ ID NO: 1192939 - DNA, 15 bp, Homo sapiens
ttagatattatttta

SEQ ID NO: 1192940 - DNA, 15 bp, Homo sapiens
attagatattatttt

SEQ ID NO: 1192941 - DNA, 15 bp, Homo sapiens
tattagatattattt

SEQ ID NO: 1192942 - DNA, 15 bp, Homo sapiens
ttattagatattatt

SEQ ID NO: 1192943 - DNA, 15 bp, Homo sapiens
tttattagatattat

SEQ ID NO: 1192944 - DNA, 15 bp, Homo sapiens
ttttattagatatta

SEQ ID NO: 1192945 - DNA, 15 bp, Homo sapiens
tttttattagatatt

SEQ ID NO: 1192946 - DNA, 15 bp, Homo sapiens
ctttttattagatat

SEQ ID NO: 1192947 - DNA, 15 bp, Homo sapiens
actttttattagata

SEQ ID NO: 1192948 - DNA, 15 bp, Homo sapiens
gactttttattagat

SEQ ID NO: 1192949 - DNA, 15 bp, Homo sapiens
tgactttttattaga

SEQ ID NO: 1192950 - DNA, 15 bp, Homo sapiens
gtgactttttattag

SEQ ID NO: 1192951 - DNA, 15 bp, Homo sapiens
tgtgactttttatta

SEQ ID NO: 1192952 - DNA, 15 bp, Homo sapiens
ttgtgactttttatt

SEQ ID NO: 1192953 - DNA, 15 bp, Homo sapiens
tttgtgactttttat

SEQ ID NO: 1192954 - DNA, 15 bp, Homo sapiens
aactttgtgactttt

SEQ ID NO: 1192955 - DNA, 15 bp, Homo sapiens
taactttgtgacttt

SEQ ID NO: 1192956 - DNA, 15 bp, Homo sapiens
ataactttgtgactt

SEQ ID NO: 1192957 - DNA, 15 bp, Homo sapiens
gataactttgtgact

SEQ ID NO: 1192958 - DNA, 15 bp, Homo sapiens
agataactttgtgac

SEQ ID NO: 1192959 - DNA, 15 bp, Homo sapiens
aagataactttgtga

SEQ ID NO: 1192960 - DNA, 15 bp, Homo sapiens
gaagataactttgtg

SEQ ID NO: 1192961 - DNA, 15 bp, Homo sapiens
agaagataactttgt

SEQ ID NO: 1192962 - DNA, 15 bp, Homo sapiens
aagaagataactttg

SEQ ID NO: 1192963 - DNA, 15 bp, Homo sapiens
aaagaagataacttt

SEQ ID NO: 1192964 - DNA, 15 bp, Homo sapiens
taaagaagataactt

SEQ ID NO: 1192965 - DNA, 15 bp, Homo sapiens
ttaaagaagataact

SEQ ID NO: 1192966 - DNA, 15 bp, Homo sapiens
gttaaagaagataac

SEQ ID NO: 1192967 - DNA, 15 bp, Homo sapiens
tgttaaagaagataa

SEQ ID NO: 1192968 - DNA, 15 bp, Homo sapiens
ttgttaaagaagata

SEQ ID NO: 1192969 - DNA, 15 bp, Homo sapiens
tttgttaaagaagat

SEQ ID NO: 1192970 - DNA, 15 bp, Homo sapiens
gtttgttaaagaaga

SEQ ID NO: 1192971 - DNA, 15 bp, Homo sapiens
agtttgttaaagaag

SEQ ID NO: 1192972 - DNA, 15 bp, Homo sapiens
aagtttgttaaagaa

SEQ ID NO: 1192973 - DNA, 15 bp, Homo sapiens
aaagtttgttaaaga

SEQ ID NO: 1192974 - DNA, 15 bp, Homo sapiens
taaagtttgttaaag

SEQ ID NO: 1192975 - DNA, 15 bp, Homo sapiens
gtaaagtttgttaaa

SEQ ID NO: 1192976 - DNA, 15 bp, Homo sapiens
agtaaagtttgttaa

SEQ ID NO: 1192977 - DNA, 15 bp, Homo sapiens
gagtaaagtttgtta

SEQ ID NO: 1192978 - DNA, 15 bp, Homo sapiens
agagtaaagtttgtt

SEQ ID NO: 1192979 - DNA, 15 bp, Homo sapiens
aagagtaaagtttgt

SEQ ID NO: 1192980 - DNA, 15 bp, Homo sapiens
taagagtaaagtttg

SEQ ID NO: 1192981 - DNA, 15 bp, Homo sapiens
ataagagtaaagttt

SEQ ID NO: 1192982 - DNA, 15 bp, Homo sapiens
aataagagtaaagtt

SEQ ID NO: 1192983 - DNA, 15 bp, Homo sapiens
gaataagagtaaagt

SEQ ID NO: 1192984 - DNA, 15 bp, Homo sapiens
agaataagagtaaag

SEQ ID NO: 1192985 - DNA, 15 bp, Homo sapiens
aagaataagagtaaa

SEQ ID NO: 1192986 - DNA, 15 bp, Homo sapiens
taagaataagagtaa

SEQ ID NO: 1192987 - DNA, 15 bp, Homo sapiens
ctaagaataagagta

SEQ ID NO: 1192988 - DNA, 15 bp, Homo sapiens
gctaagaataagagt

SEQ ID NO: 1192989 - DNA, 15 bp, Homo sapiens
agctaagaataagag

SEQ ID NO: 1192990 - DNA, 15 bp, Homo sapiens
cagctaagaataaga

SEQ ID NO: 1192991 - DNA, 15 bp, Homo sapiens
acagctaagaataag

SEQ ID NO: 1192992 - DNA, 15 bp, Homo sapiens
tacagctaagaataa

SEQ ID NO: 1192993 - DNA, 15 bp, Homo sapiens
atacagctaagaata

SEQ ID NO: 1192994 - DNA, 15 bp, Homo sapiens
tatacagctaagaat

SEQ ID NO: 1192995 - DNA, 15 bp, Homo sapiens
atatacagctaagaa

SEQ ID NO: 1192996 - DNA, 15 bp, Homo sapiens
tatatacagctaaga

SEQ ID NO: 1192997 - DNA, 15 bp, Homo sapiens
gtatatacagctaag

SEQ ID NO: 1192998 - DNA, 15 bp, Homo sapiens
tgtatatacagctaa

SEQ ID NO: 1192999 - DNA, 15 bp, Homo sapiens
atgtatatacagcta

SEQ ID NO: 1193000 - DNA, 15 bp, Homo sapiens
aatgtatatacagct

SEQ ID NO: 1193001 - DNA, 15 bp, Homo sapiens
aaatgtatatacagc

SEQ ID NO: 1193002 - DNA, 15 bp, Homo sapiens
aaaatgtatatacag

SEQ ID NO: 1193003 - DNA, 15 bp, Homo sapiens
aaaaatgtatataca

SEQ ID NO: 1193004 - DNA, 15 bp, Homo sapiens
aaaaaatgtatatac

SEQ ID NO: 1193005 - DNA, 15 bp, Homo sapiens
aaaaaaatgtatata

SEQ ID NO: 1193006 - DNA, 15 bp, Homo sapiens
taaaaaaatgtatat

SEQ ID NO: 1193007 - DNA, 15 bp, Homo sapiens
ttaaaaaaatgtata

SEQ ID NO: 1193008 - DNA, 15 bp, Homo sapiens
tttaaaaaaatgtat

SEQ ID NO: 1193009 - DNA, 15 bp, Homo sapiens
ttttaaaaaaatgta

SEQ ID NO: 1193010 - DNA, 15 bp, Homo sapiens
cttttaaaaaaatgt

SEQ ID NO: 1193011 - DNA, 15 bp, Homo sapiens
aacttttaaaaaaat

SEQ ID NO: 1193012 - DNA, 15 bp, Homo sapiens
aaacttttaaaaaaa

SEQ ID NO: 1193013 - DNA, 15 bp, Homo sapiens
caaacttttaaaaaa

SEQ ID NO: 1193014 - DNA, 15 bp, Homo sapiens
acaaacttttaaaaa

SEQ ID NO: 1193015 - DNA, 15 bp, Homo sapiens
aacaaacttttaaaa

SEQ ID NO: 1193016 - DNA, 15 bp, Homo sapiens
taacaaacttttaaa

SEQ ID NO: 1193017 - DNA, 15 bp, Homo sapiens
ttaacaaacttttaa

SEQ ID NO: 1193018 - DNA, 15 bp, Homo sapiens
tttaacaaactttta

SEQ ID NO: 1193019 - DNA, 15 bp, Homo sapiens
ttttaacaaactttt

SEQ ID NO: 1193020 - DNA, 15 bp, Homo sapiens
attttaacaaacttt

SEQ ID NO: 1193021 - DNA, 15 bp, Homo sapiens
tattttaacaaactt

SEQ ID NO: 1193022 - DNA, 15 bp, Homo sapiens
atattttaacaaact

SEQ ID NO: 1193023 - DNA, 15 bp, Homo sapiens
catattttaacaaac

SEQ ID NO: 1193024 - DNA, 15 bp, Homo sapiens
gcatattttaacaaa

SEQ ID NO: 1193025 - DNA, 15 bp, Homo sapiens
agcatattttaacaa

SEQ ID NO: 1193026 - DNA, 15 bp, Homo sapiens
aagcatattttaaca

SEQ ID NO: 1193027 - DNA, 15 bp, Homo sapiens
caagcatattttaac

SEQ ID NO: 1193028 - DNA, 15 bp, Homo sapiens
tcaagcatattttaa

SEQ ID NO: 1193029 - DNA, 15 bp, Homo sapiens
gtcaagcatatttta

SEQ ID NO: 1193030 - DNA, 15 bp, Homo sapiens
agtcaagcatatttt

SEQ ID NO: 1193031 - DNA, 15 bp, Homo sapiens
tagtcaagcatattt

SEQ ID NO: 1193032 - DNA, 15 bp, Homo sapiens
ctagtcaagcatatt

SEQ ID NO: 1193033 - DNA, 15 bp, Homo sapiens
tctagtcaagcatat

SEQ ID NO: 1193034 - DNA, 15 bp, Homo sapiens
ctctagtcaagcata

SEQ ID NO: 1193035 - DNA, 15 bp, Homo sapiens
actctagtcaagcat

SEQ ID NO: 1193036 - DNA, 15 bp, Homo sapiens
aactctagtcaagca

SEQ ID NO: 1193037 - DNA, 15 bp, Homo sapiens
aaactctagtcaagc

SEQ ID NO: 1193038 - DNA, 15 bp, Homo sapiens
gaaactctagtcaag

SEQ ID NO: 1193039 - DNA, 15 bp, Homo sapiens
ggaaactctagtcaa

SEQ ID NO: 1193040 - DNA, 15 bp, Homo sapiens
tggaaactctagtca

SEQ ID NO: 1193041 - DNA, 15 bp, Homo sapiens
ctggaaactctagtc

SEQ ID NO: 1193042 - DNA, 15 bp, Homo sapiens
actggaaactctagt

SEQ ID NO: 1193043 - DNA, 15 bp, Homo sapiens
aactggaaactctag

SEQ ID NO: 1193044 - DNA, 15 bp, Homo sapiens
caactggaaactcta

SEQ ID NO: 1193045 - DNA, 15 bp, Homo sapiens
tcaactggaaactct

SEQ ID NO: 1193046 - DNA, 15 bp, Homo sapiens
ttcaactggaaactc

SEQ ID NO: 1193047 - DNA, 15 bp, Homo sapiens
tttcaactggaaact

SEQ ID NO: 1193048 - DNA, 15 bp, Homo sapiens
ctttcaactggaaac

SEQ ID NO: 1193049 - DNA, 15 bp, Homo sapiens
cctttcaactggaaa

SEQ ID NO: 1193050 - DNA, 15 bp, Homo sapiens
gcctttcaactggaa

SEQ ID NO: 1193051 - DNA, 15 bp, Homo sapiens
tgcctttcaactgga

SEQ ID NO: 1193052 - DNA, 15 bp, Homo sapiens
ttgcctttcaactgg

SEQ ID NO: 1193053 - DNA, 15 bp, Homo sapiens
tttgcctttcaactg

SEQ ID NO: 1193054 - DNA, 15 bp, Homo sapiens
ttttgcctttcaact

SEQ ID NO: 1193055 - DNA, 15 bp, Homo sapiens
tttttgcctttcaac

SEQ ID NO: 1193056 - DNA, 15 bp, Homo sapiens
gtttttgcctttcaa

SEQ ID NO: 1193057 - DNA, 15 bp, Homo sapiens
agtttttgcctttca

SEQ ID NO: 1193058 - DNA, 15 bp, Homo sapiens
aagtttttgcctttc

SEQ ID NO: 1193059 - DNA, 15 bp, Homo sapiens
gaagtttttgccttt

SEQ ID NO: 1193060 - DNA, 15 bp, Homo sapiens
ggaagtttttgcctt

SEQ ID NO: 1193061 - DNA, 15 bp, Homo sapiens
tggaagtttttgcct

SEQ ID NO: 1193062 - DNA, 15 bp, Homo sapiens
atggaagtttttgcc

SEQ ID NO: 1193063 - DNA, 15 bp, Homo sapiens
gatggaagtttttgc

SEQ ID NO: 1193064 - DNA, 15 bp, Homo sapiens
tgatggaagtttttg

SEQ ID NO: 1193065 - DNA, 15 bp, Homo sapiens
gtgatggaagttttt

SEQ ID NO: 1193066 - DNA, 15 bp, Homo sapiens
tgtgatggaagtttt

SEQ ID NO: 1193067 - DNA, 15 bp, Homo sapiens
ttgtgatggaagttt

SEQ ID NO: 1193068 - DNA, 15 bp, Homo sapiens
gttgtgatggaagtt

SEQ ID NO: 1193069 - DNA, 15 bp, Homo sapiens
tgttgtgatggaagt

SEQ ID NO: 1193070 - DNA, 15 bp, Homo sapiens
ttgttgtgatggaag

SEQ ID NO: 1193071 - DNA, 15 bp, Homo sapiens
cttgttgtgatggaa

SEQ ID NO: 1193072 - DNA, 15 bp, Homo sapiens
tcttgttgtgatgga

SEQ ID NO: 1193073 - DNA, 15 bp, Homo sapiens
ttcttgttgtgatgg

SEQ ID NO: 1193074 - DNA, 15 bp, Homo sapiens
tttcttgttgtgatg

SEQ ID NO: 1193075 - DNA, 15 bp, Homo sapiens
atttcttgttgtgat

SEQ ID NO: 1193076 - DNA, 15 bp, Homo sapiens
aatttcttgttgtga

SEQ ID NO: 1193077 - DNA, 15 bp, Homo sapiens
aaatttcttgttgtg

SEQ ID NO: 1193078 - DNA, 15 bp, Homo sapiens
gaaatttcttgttgt

SEQ ID NO: 1193079 - DNA, 15 bp, Homo sapiens
ggaaatttcttgttg

SEQ ID NO: 1193080 - DNA, 15 bp, Homo sapiens
tgggaaatttcttgt

SEQ ID NO: 1193081 - DNA, 15 bp, Homo sapiens
atgggaaatttcttg

SEQ ID NO: 1193082 - DNA, 15 bp, Homo sapiens
catgggaaatttctt

SEQ ID NO: 1193083 - DNA, 15 bp, Homo sapiens
gcatgggaaatttct

SEQ ID NO: 1193084 - DNA, 15 bp, Homo sapiens
ggcatgggaaatttc

SEQ ID NO: 1193085 - DNA, 15 bp, Homo sapiens
aggcatgggaaattt

SEQ ID NO: 1193086 - DNA, 15 bp, Homo sapiens
caggcatgggaaatt

SEQ ID NO: 1193087 - DNA, 15 bp, Homo sapiens
gcaggcatgggaaat

SEQ ID NO: 1193088 - DNA, 15 bp, Homo sapiens
agcaggcatgggaaa

SEQ ID NO: 1193089 - DNA, 15 bp, Homo sapiens
gagcaggcatgggaa

SEQ ID NO: 1193090 - DNA, 15 bp, Homo sapiens
tgagcaggcatggga

SEQ ID NO: 1193091 - DNA, 15 bp, Homo sapiens
ctgagcaggcatggg

SEQ ID NO: 1193092 - DNA, 15 bp, Homo sapiens
tctgagcaggcatgg

SEQ ID NO: 1193093 - DNA, 15 bp, Homo sapiens
ttctgagcaggcatg

SEQ ID NO: 1193094 - DNA, 15 bp, Homo sapiens
cttctgagcaggcat

SEQ ID NO: 1193095 - DNA, 15 bp, Homo sapiens
ccttctgagcaggca

SEQ ID NO: 1193096 - DNA, 15 bp, Homo sapiens
cccttctgagcaggc

SEQ ID NO: 1193097 - DNA, 15 bp, Homo sapiens
acccttctgagcagg

SEQ ID NO: 1193098 - DNA, 15 bp, Homo sapiens
tacccttctgagcag

SEQ ID NO: 1193099 - DNA, 15 bp, Homo sapiens
ctacccttctgagca

SEQ ID NO: 1193100 - DNA, 15 bp, Homo sapiens
gctacccttctgagc

SEQ ID NO: 1193101 - DNA, 15 bp, Homo sapiens
ggctacccttctgag

SEQ ID NO: 1193102 - DNA, 15 bp, Homo sapiens
gggctacccttctga

SEQ ID NO: 1193103 - DNA, 15 bp, Homo sapiens
ggggctacccttctg

SEQ ID NO: 1193104 - DNA, 15 bp, Homo sapiens
aggggctacccttct

SEQ ID NO: 1193105 - DNA, 15 bp, Homo sapiens
taggggctacccttc

SEQ ID NO: 1193106 - DNA, 15 bp, Homo sapiens
ctaggggctaccctt

SEQ ID NO: 1193107 - DNA, 15 bp, Homo sapiens
gctaggggctaccct

SEQ ID NO: 1193108 - DNA, 15 bp, Homo sapiens
agctaggggctaccc

SEQ ID NO: 1193109 - DNA, 15 bp, Homo sapiens
gagctaggggctacc

SEQ ID NO: 1193110 - DNA, 15 bp, Homo sapiens
agagctaggggctac

SEQ ID NO: 1193111 - DNA, 15 bp, Homo sapiens
gagagctaggggcta

SEQ ID NO: 1193112 - DNA, 15 bp, Homo sapiens
agagagctaggggct

SEQ ID NO: 1193113 - DNA, 15 bp, Homo sapiens
cagagagctaggggc

SEQ ID NO: 1193114 - DNA, 15 bp, Homo sapiens
acagagagctagggg

SEQ ID NO: 1193115 - DNA, 15 bp, Homo sapiens
cacagagagctaggg

SEQ ID NO: 1193116 - DNA, 15 bp, Homo sapiens
tcacagagagctagg

SEQ ID NO: 1193117 - DNA, 15 bp, Homo sapiens
ttcacagagagctag

SEQ ID NO: 1193118 - DNA, 15 bp, Homo sapiens
attcacagagagcta

SEQ ID NO: 1193119 - DNA, 15 bp, Homo sapiens
cattcacagagagct

SEQ ID NO: 1193120 - DNA, 15 bp, Homo sapiens
acattcacagagagc

SEQ ID NO: 1193121 - DNA, 15 bp, Homo sapiens
cacattcacagagag

SEQ ID NO: 1193122 - DNA, 15 bp, Homo sapiens
acacattcacagaga

SEQ ID NO: 1193123 - DNA, 15 bp, Homo sapiens
aacacattcacagag

SEQ ID NO: 1193124 - DNA, 15 bp, Homo sapiens
aaacacattcacaga

SEQ ID NO: 1193125 - DNA, 15 bp, Homo sapiens
aaaacacattcacag

SEQ ID NO: 1193126 - DNA, 15 bp, Homo sapiens
taaaacacattcaca

SEQ ID NO: 1193127 - DNA, 15 bp, Homo sapiens
ataaaacacattcac

SEQ ID NO: 1193128 - DNA, 15 bp, Homo sapiens
gataaaacacattca

SEQ ID NO: 1193129 - DNA, 15 bp, Homo sapiens
ggataaaacacattc

SEQ ID NO: 1193130 - DNA, 15 bp, Homo sapiens
tggataaaacacatt

SEQ ID NO: 1193131 - DNA, 15 bp, Homo sapiens
atggataaaacacat

SEQ ID NO: 1193132 - DNA, 15 bp, Homo sapiens
aatggataaaacaca

SEQ ID NO: 1193133 - DNA, 15 bp, Homo sapiens
gaatggataaaacac

SEQ ID NO: 1193134 - DNA, 15 bp, Homo sapiens
tgaatggataaaaca

SEQ ID NO: 1193135 - DNA, 15 bp, Homo sapiens
ttgaatggataaaac

SEQ ID NO: 1193136 - DNA, 15 bp, Homo sapiens
gttgaatggataaaa

SEQ ID NO: 1193137 - DNA, 15 bp, Homo sapiens
agttgaatggataaa

SEQ ID NO: 1193138 - DNA, 15 bp, Homo sapiens
cagttgaatggataa

SEQ ID NO: 1193139 - DNA, 15 bp, Homo sapiens
tcagttgaatggata

SEQ ID NO: 1193140 - DNA, 15 bp, Homo sapiens
ttcagttgaatggat

SEQ ID NO: 1193141 - DNA, 15 bp, Homo sapiens
tttcagttgaatgga

SEQ ID NO: 1193142 - DNA, 15 bp, Homo sapiens
ttttcagttgaatgg

SEQ ID NO: 1193143 - DNA, 15 bp, Homo sapiens
attttcagttgaatg

SEQ ID NO: 1193144 - DNA, 15 bp, Homo sapiens
aattttcagttgaat

SEQ ID NO: 1193145 - DNA, 15 bp, Homo sapiens
caattttcagttgaa

SEQ ID NO: 1193146 - DNA, 15 bp, Homo sapiens
ccaattttcagttga

SEQ ID NO: 1193147 - DNA, 15 bp, Homo sapiens
accaattttcagttg

SEQ ID NO: 1193148 - DNA, 15 bp, Homo sapiens
taccaattttcagtt

SEQ ID NO: 1193149 - DNA, 15 bp, Homo sapiens
ataccaattttcagt

SEQ ID NO: 1193150 - DNA, 15 bp, Homo sapiens
gataccaattttcag

SEQ ID NO: 1193151 - DNA, 15 bp, Homo sapiens
tgataccaattttca

SEQ ID NO: 1193152 - DNA, 15 bp, Homo sapiens
ttgataccaattttc

SEQ ID NO: 1193153 - DNA, 15 bp, Homo sapiens
cttgataccaatttt

SEQ ID NO: 1193154 - DNA, 15 bp, Homo sapiens
tcttgataccaattt

SEQ ID NO: 1193155 - DNA, 15 bp, Homo sapiens
ttcttgataccaatt

SEQ ID NO: 1193156 - DNA, 15 bp, Homo sapiens
tttcttgataccaat

SEQ ID NO: 1193157 - DNA, 15 bp, Homo sapiens
ctttcttgataccaa

SEQ ID NO: 1193158 - DNA, 15 bp, Homo sapiens
actttcttgatacca

SEQ ID NO: 1193159 - DNA, 15 bp, Homo sapiens
gactttcttgatacc

SEQ ID NO: 1193160 - DNA, 15 bp, Homo sapiens
ggactttcttgatac

SEQ ID NO: 1193161 - DNA, 15 bp, Homo sapiens
tggactttcttgata

SEQ ID NO: 1193162 - DNA, 15 bp, Homo sapiens
gtggactttcttgat

SEQ ID NO: 1193163 - DNA, 15 bp, Homo sapiens
agtggactttcttga

SEQ ID NO: 1193164 - DNA, 15 bp, Homo sapiens
cagtggactttcttg

SEQ ID NO: 1193165 - DNA, 15 bp, Homo sapiens
ccagtggactttctt

SEQ ID NO: 1193166 - DNA, 15 bp, Homo sapiens
accagtggactttct

SEQ ID NO: 1193167 - DNA, 15 bp, Homo sapiens
aaccagtggactttc

SEQ ID NO: 1193168 - DNA, 15 bp, Homo sapiens
taaccagtggacttt

SEQ ID NO: 1193169 - DNA, 15 bp, Homo sapiens
ctaaccagtggactt

SEQ ID NO: 1193170 - DNA, 15 bp, Homo sapiens
actaaccagtggact

SEQ ID NO: 1193171 - DNA, 15 bp, Homo sapiens
cactaaccagtggac

SEQ ID NO: 1193172 - DNA, 15 bp, Homo sapiens
acactaaccagtgga

SEQ ID NO: 1193173 - DNA, 15 bp, Homo sapiens
tacactaaccagtgg

SEQ ID NO: 1193174 - DNA, 15 bp, Homo sapiens
gtacactaaccagtg

SEQ ID NO: 1193175 - DNA, 15 bp, Homo sapiens
agtacactaaccagt

SEQ ID NO: 1193176 - DNA, 15 bp, Homo sapiens
tagtacactaaccag

SEQ ID NO: 1193177 - DNA, 15 bp, Homo sapiens
actagtacactaacc

SEQ ID NO: 1193178 - DNA, 15 bp, Homo sapiens
gactagtacactaac

SEQ ID NO: 1193179 - DNA, 15 bp, Homo sapiens
ggactagtacactaa

SEQ ID NO: 1193180 - DNA, 15 bp, Homo sapiens
tggactagtacacta

SEQ ID NO: 1193181 - DNA, 15 bp, Homo sapiens
atggactagtacact

SEQ ID NO: 1193182 - DNA, 15 bp, Homo sapiens
gatggactagtacac

SEQ ID NO: 1193183 - DNA, 15 bp, Homo sapiens
tgatggactagtaca

SEQ ID NO: 1193184 - DNA, 15 bp, Homo sapiens
atgatggactagtac

SEQ ID NO: 1193185 - DNA, 15 bp, Homo sapiens
tatgatggactagta

SEQ ID NO: 1193186 - DNA, 15 bp, Homo sapiens
ctatgatggactagt

SEQ ID NO: 1193187 - DNA, 15 bp, Homo sapiens
gctatgatggactag

SEQ ID NO: 1193188 - DNA, 15 bp, Homo sapiens
ggctatgatggacta

SEQ ID NO: 1193189 - DNA, 15 bp, Homo sapiens
aggctatgatggact

SEQ ID NO: 1193190 - DNA, 15 bp, Homo sapiens
taggctatgatggac

SEQ ID NO: 1193191 - DNA, 15 bp, Homo sapiens
ctaggctatgatgga

SEQ ID NO: 1193192 - DNA, 15 bp, Homo sapiens
tctaggctatgatgg

SEQ ID NO: 1193193 - DNA, 15 bp, Homo sapiens
ttctaggctatgatg

SEQ ID NO: 1193194 - DNA, 15 bp, Homo sapiens
tttctaggctatgat

SEQ ID NO: 1193195 - DNA, 15 bp, Homo sapiens
ttttctaggctatga

SEQ ID NO: 1193196 - DNA, 15 bp, Homo sapiens
attttctaggctatg

SEQ ID NO: 1193197 - DNA, 15 bp, Homo sapiens
cattttctaggctat

SEQ ID NO: 1193198 - DNA, 15 bp, Homo sapiens
tcattttctaggcta

SEQ ID NO: 1193199 - DNA, 15 bp, Homo sapiens
atcattttctaggct

SEQ ID NO: 1193200 - DNA, 15 bp, Homo sapiens
gatcattttctaggc

SEQ ID NO: 1193201 - DNA, 15 bp, Homo sapiens
ggatcattttctagg

SEQ ID NO: 1193202 - DNA, 15 bp, Homo sapiens
gggatcattttctag

SEQ ID NO: 1193203 - DNA, 15 bp, Homo sapiens
agggatcattttcta

SEQ ID NO: 1193204 - DNA, 15 bp, Homo sapiens
tagggatcattttct

SEQ ID NO: 1193205 - DNA, 15 bp, Homo sapiens
atagggatcattttc

SEQ ID NO: 1193206 - DNA, 15 bp, Homo sapiens
gatagggatcatttt

SEQ ID NO: 1193207 - DNA, 15 bp, Homo sapiens
agatagggatcattt

SEQ ID NO: 1193208 - DNA, 15 bp, Homo sapiens
cagatagggatcatt

SEQ ID NO: 1193209 - DNA, 15 bp, Homo sapiens
gcagatagggatcat

SEQ ID NO: 1193210 - DNA, 15 bp, Homo sapiens
tgcagatagggatca

SEQ ID NO: 1193211 - DNA, 15 bp, Homo sapiens
ctgcagatagggatc

SEQ ID NO: 1193212 - DNA, 15 bp, Homo sapiens
tctgcagatagggat

SEQ ID NO: 1193213 - DNA, 15 bp, Homo sapiens
atctgcagataggga

SEQ ID NO: 1193214 - DNA, 15 bp, Homo sapiens
gatctgcagataggg

SEQ ID NO: 1193215 - DNA, 15 bp, Homo sapiens
tgatctgcagatagg

SEQ ID NO: 1193216 - DNA, 15 bp, Homo sapiens
ttgatctgcagatag

SEQ ID NO: 1193217 - DNA, 15 bp, Homo sapiens
cttgatctgcagata

SEQ ID NO: 1193218 - DNA, 15 bp, Homo sapiens
tcttgatctgcagat

SEQ ID NO: 1193219 - DNA, 15 bp, Homo sapiens
atcttgatctgcaga

SEQ ID NO: 1193220 - DNA, 15 bp, Homo sapiens
aatcttgatctgcag

SEQ ID NO: 1193221 - DNA, 15 bp, Homo sapiens
aaatcttgatctgca

SEQ ID NO: 1193222 - DNA, 15 bp, Homo sapiens
aaaatcttgatctgc

SEQ ID NO: 1193223 - DNA, 15 bp, Homo sapiens
gaaaatcttgatctg

SEQ ID NO: 1193224 - DNA, 15 bp, Homo sapiens
agaaaatcttgatct

SEQ ID NO: 1193225 - DNA, 15 bp, Homo sapiens
gagaaaatcttgatc

SEQ ID NO: 1193226 - DNA, 15 bp, Homo sapiens
tgagaaaatcttgat

SEQ ID NO: 1193227 - DNA, 15 bp, Homo sapiens
atgagaaaatcttga

SEQ ID NO: 1193228 - DNA, 15 bp, Homo sapiens
aatgagaaaatcttg

SEQ ID NO: 1193229 - DNA, 15 bp, Homo sapiens
taatgagaaaatctt

SEQ ID NO: 1193230 - DNA, 15 bp, Homo sapiens
ctaatgagaaaatct

SEQ ID NO: 1193231 - DNA, 15 bp, Homo sapiens
tctaatgagaaaatc

SEQ ID NO: 1193232 - DNA, 15 bp, Homo sapiens
ttctaatgagaaaat

SEQ ID NO: 1193233 - DNA, 15 bp, Homo sapiens
gttctaatgagaaaa

SEQ ID NO: 1193234 - DNA, 15 bp, Homo sapiens
tgttctaatgagaaa

SEQ ID NO: 1193235 - DNA, 15 bp, Homo sapiens
ttgttctaatgagaa

SEQ ID NO: 1193236 - DNA, 15 bp, Homo sapiens
attgttctaatgaga

SEQ ID NO: 1193237 - DNA, 15 bp, Homo sapiens
cattgttctaatgag

SEQ ID NO: 1193238 - DNA, 15 bp, Homo sapiens
ttcattgttctaatg

SEQ ID NO: 1193239 - DNA, 15 bp, Homo sapiens
attcattgttctaat

SEQ ID NO: 1193240 - DNA, 15 bp, Homo sapiens
aattcattgttctaa

SEQ ID NO: 1193241 - DNA, 15 bp, Homo sapiens
taattcattgttcta

SEQ ID NO: 1193242 - DNA, 15 bp, Homo sapiens
ataattcattgttct

SEQ ID NO: 1193243 - DNA, 15 bp, Homo sapiens
gataattcattgttc

SEQ ID NO: 1193244 - DNA, 15 bp, Homo sapiens
ggataattcattgtt

SEQ ID NO: 1193245 - DNA, 15 bp, Homo sapiens
tggataattcattgt

SEQ ID NO: 1193246 - DNA, 15 bp, Homo sapiens
ctggataattcattg

SEQ ID NO: 1193247 - DNA, 15 bp, Homo sapiens
gctggataattcatt

SEQ ID NO: 1193248 - DNA, 15 bp, Homo sapiens
tgctggataattcat

SEQ ID NO: 1193249 - DNA, 15 bp, Homo sapiens
atgctggataattca

SEQ ID NO: 1193250 - DNA, 15 bp, Homo sapiens
aatgctggataattc

SEQ ID NO: 1193251 - DNA, 15 bp, Homo sapiens
gaatgctggataatt

SEQ ID NO: 1193252 - DNA, 15 bp, Homo sapiens
tgaatgctggataat

SEQ ID NO: 1193253 - DNA, 15 bp, Homo sapiens
ctgaatgctggataa

SEQ ID NO: 1193254 - DNA, 15 bp, Homo sapiens
tctgaatgctggata

SEQ ID NO: 1193255 - DNA, 15 bp, Homo sapiens
atctgaatgctggat

SEQ ID NO: 1193256 - DNA, 15 bp, Homo sapiens
gatctgaatgctgga

SEQ ID NO: 1193257 - DNA, 15 bp, Homo sapiens
agatctgaatgctgg

SEQ ID NO: 1193258 - DNA, 15 bp, Homo sapiens
aagatctgaatgctg

SEQ ID NO: 1193259 - DNA, 15 bp, Homo sapiens
aaagatctgaatgct

SEQ ID NO: 1193260 - DNA, 15 bp, Homo sapiens
gaaagatctgaatgc

SEQ ID NO: 1193261 - DNA, 15 bp, Homo sapiens
agaaagatctgaatg

SEQ ID NO: 1193262 - DNA, 15 bp, Homo sapiens
tagaaagatctgaat

SEQ ID NO: 1193263 - DNA, 15 bp, Homo sapiens
ctagaaagatctgaa

SEQ ID NO: 1193264 - DNA, 15 bp, Homo sapiens
actagaaagatctga

SEQ ID NO: 1193265 - DNA, 15 bp, Homo sapiens
gactagaaagatctg

SEQ ID NO: 1193266 - DNA, 15 bp, Homo sapiens
tgactagaaagatct

SEQ ID NO: 1193267 - DNA, 15 bp, Homo sapiens
gtgactagaaagatc

SEQ ID NO: 1193268 - DNA, 15 bp, Homo sapiens
ggtgactagaaagat

SEQ ID NO: 1193269 - DNA, 15 bp, Homo sapiens
aggtgactagaaaga

SEQ ID NO: 1193270 - DNA, 15 bp, Homo sapiens
aaggtgactagaaag

SEQ ID NO: 1193271 - DNA, 15 bp, Homo sapiens
taaggtgactagaaa

SEQ ID NO: 1193272 - DNA, 15 bp, Homo sapiens
ctaaggtgactagaa

SEQ ID NO: 1193273 - DNA, 15 bp, Homo sapiens
tctaaggtgactaga

SEQ ID NO: 1193274 - DNA, 15 bp, Homo sapiens
ttctaaggtgactag

SEQ ID NO: 1193275 - DNA, 15 bp, Homo sapiens
gttctaaggtgacta

SEQ ID NO: 1193276 - DNA, 15 bp, Homo sapiens
agttctaaggtgact

SEQ ID NO: 1193277 - DNA, 15 bp, Homo sapiens
aagttctaaggtgac

SEQ ID NO: 1193278 - DNA, 15 bp, Homo sapiens
aaagttctaaggtga

SEQ ID NO: 1193279 - DNA, 15 bp, Homo sapiens
aaaagttctaaggtg

SEQ ID NO: 1193280 - DNA, 15 bp, Homo sapiens
aaaaagttctaaggt

SEQ ID NO: 1193281 - DNA, 15 bp, Homo sapiens
caaaaagttctaagg

SEQ ID NO: 1193282 - DNA, 15 bp, Homo sapiens
ccaaaaagttctaag

SEQ ID NO: 1193283 - DNA, 15 bp, Homo sapiens
accaaaaagttctaa

SEQ ID NO: 1193284 - DNA, 15 bp, Homo sapiens
aaccaaaaagttcta

SEQ ID NO: 1193285 - DNA, 15 bp, Homo sapiens
taaccaaaaagttct

SEQ ID NO: 1193286 - DNA, 15 bp, Homo sapiens
ttaaccaaaaagttc

SEQ ID NO: 1193287 - DNA, 15 bp, Homo sapiens
tttaaccaaaaagtt

SEQ ID NO: 1193288 - DNA, 15 bp, Homo sapiens
ttttaaccaaaaagt

SEQ ID NO: 1193289 - DNA, 15 bp, Homo sapiens
cttttaaccaaaaag

SEQ ID NO: 1193290 - DNA, 15 bp, Homo sapiens
acttttaaccaaaaa

SEQ ID NO: 1193291 - DNA, 15 bp, Homo sapiens
tacttttaaccaaaa

SEQ ID NO: 1193292 - DNA, 15 bp, Homo sapiens
gtacttttaaccaaa

SEQ ID NO: 1193293 - DNA, 15 bp, Homo sapiens
ggtacttttaaccaa

SEQ ID NO: 1193294 - DNA, 15 bp, Homo sapiens
gggtacttttaacca

SEQ ID NO: 1193295 - DNA, 15 bp, Homo sapiens
tgggtacttttaacc

SEQ ID NO: 1193296 - DNA, 15 bp, Homo sapiens
ctgggtacttttaac

SEQ ID NO: 1193297 - DNA, 15 bp, Homo sapiens
cctgggtacttttaa

SEQ ID NO: 1193298 - DNA, 15 bp, Homo sapiens
gcctgggtactttta

SEQ ID NO: 1193299 - DNA, 15 bp, Homo sapiens
agcctgggtactttt

SEQ ID NO: 1193300 - DNA, 15 bp, Homo sapiens
aagcctgggtacttt

SEQ ID NO: 1193301 - DNA, 15 bp, Homo sapiens
caagcctgggtactt

SEQ ID NO: 1193302 - DNA, 15 bp, Homo sapiens
tcaagcctgggtact

SEQ ID NO: 1193303 - DNA, 15 bp, Homo sapiens
atcaagcctgggtac

SEQ ID NO: 1193304 - DNA, 15 bp, Homo sapiens
aatcaagcctgggta

SEQ ID NO: 1193305 - DNA, 15 bp, Homo sapiens
taatcaagcctgggt

SEQ ID NO: 1193306 - DNA, 15 bp, Homo sapiens
ataatcaagcctggg

SEQ ID NO: 1193307 - DNA, 15 bp, Homo sapiens
aataatcaagcctgg

SEQ ID NO: 1193308 - DNA, 15 bp, Homo sapiens
aaataatcaagcctg

SEQ ID NO: 1193309 - DNA, 15 bp, Homo sapiens
gaaataatcaagcct

SEQ ID NO: 1193310 - DNA, 15 bp, Homo sapiens
tgaaataatcaagcc

SEQ ID NO: 1193311 - DNA, 15 bp, Homo sapiens
atgaaataatcaagc

SEQ ID NO: 1193312 - DNA, 15 bp, Homo sapiens
catgaaataatcaag

SEQ ID NO: 1193313 - DNA, 15 bp, Homo sapiens
gcatgaaataatcaa

SEQ ID NO: 1193314 - DNA, 15 bp, Homo sapiens
tgcatgaaataatca

SEQ ID NO: 1193315 - DNA, 15 bp, Homo sapiens
ttgcatgaaataatc

SEQ ID NO: 1193316 - DNA, 15 bp, Homo sapiens
tttgcatgaaataat

SEQ ID NO: 1193317 - DNA, 15 bp, Homo sapiens
atttgcatgaaataa

SEQ ID NO: 1193318 - DNA, 15 bp, Homo sapiens
aatttgcatgaaata

SEQ ID NO: 1193319 - DNA, 15 bp, Homo sapiens
gaatttgcatgaaat

SEQ ID NO: 1193320 - DNA, 15 bp, Homo sapiens
agaatttgcatgaaa

SEQ ID NO: 1193321 - DNA, 15 bp, Homo sapiens
tagaatttgcatgaa

SEQ ID NO: 1193322 - DNA, 15 bp, Homo sapiens
atagaatttgcatga

SEQ ID NO: 1193323 - DNA, 15 bp, Homo sapiens
tatagaatttgcatg

SEQ ID NO: 1193324 - DNA, 15 bp, Homo sapiens
atatagaatttgcat

SEQ ID NO: 1193325 - DNA, 15 bp, Homo sapiens
aatatagaatttgca

SEQ ID NO: 1193326 - DNA, 15 bp, Homo sapiens
aaatatagaatttgc

SEQ ID NO: 1193327 - DNA, 15 bp, Homo sapiens
aaaatatagaatttg

SEQ ID NO: 1193328 - DNA, 15 bp, Homo sapiens
taaaatatagaattt

SEQ ID NO: 1193329 - DNA, 15 bp, Homo sapiens
gtaaaatatagaatt

SEQ ID NO: 1193330 - DNA, 15 bp, Homo sapiens
tgtaaaatatagaat

SEQ ID NO: 1193331 - DNA, 15 bp, Homo sapiens
atgtaaaatatagaa

SEQ ID NO: 1193332 - DNA, 15 bp, Homo sapiens
aatgtaaaatataga

SEQ ID NO: 1193333 - DNA, 15 bp, Homo sapiens
gaatgtaaaatatag

SEQ ID NO: 1193334 - DNA, 15 bp, Homo sapiens
agaatgtaaaatata

SEQ ID NO: 1193335 - DNA, 15 bp, Homo sapiens
aagaatgtaaaatat

SEQ ID NO: 1193336 - DNA, 15 bp, Homo sapiens
caagaatgtaaaata

SEQ ID NO: 1193337 - DNA, 15 bp, Homo sapiens
ccaagaatgtaaaat

SEQ ID NO: 1193338 - DNA, 15 bp, Homo sapiens
tccaagaatgtaaaa

SEQ ID NO: 1193339 - DNA, 15 bp, Homo sapiens
ttccaagaatgtaaa

SEQ ID NO: 1193340 - DNA, 15 bp, Homo sapiens
tttccaagaatgtaa

SEQ ID NO: 1193341 - DNA, 15 bp, Homo sapiens
ctttccaagaatgta

SEQ ID NO: 1193342 - DNA, 15 bp, Homo sapiens
actttccaagaatgt

SEQ ID NO: 1193343 - DNA, 15 bp, Homo sapiens
gactttccaagaatg

SEQ ID NO: 1193344 - DNA, 15 bp, Homo sapiens
agactttccaagaat

SEQ ID NO: 1193345 - DNA, 15 bp, Homo sapiens
tagactttccaagaa

SEQ ID NO: 1193346 - DNA, 15 bp, Homo sapiens
atagactttccaaga

SEQ ID NO: 1193347 - DNA, 15 bp, Homo sapiens
tatagactttccaag

SEQ ID NO: 1193348 - DNA, 15 bp, Homo sapiens
atatagactttccaa

SEQ ID NO: 1193349 - DNA, 15 bp, Homo sapiens
catatagactttcca

SEQ ID NO: 1193350 - DNA, 15 bp, Homo sapiens
tcatatagactttcc

SEQ ID NO: 1193351 - DNA, 15 bp, Homo sapiens
ttcatatagactttc

SEQ ID NO: 1193352 - DNA, 15 bp, Homo sapiens
tttcatatagacttt

SEQ ID NO: 1193353 - DNA, 15 bp, Homo sapiens
ttttcatatagactt

SEQ ID NO: 1193354 - DNA, 15 bp, Homo sapiens
tttttcatatagact

SEQ ID NO: 1193355 - DNA, 15 bp, Homo sapiens
gtttttcatatagac

SEQ ID NO: 1193356 - DNA, 15 bp, Homo sapiens
tgtttttcatataga

SEQ ID NO: 1193357 - DNA, 15 bp, Homo sapiens
ttgtttttcatatag

SEQ ID NO: 1193358 - DNA, 15 bp, Homo sapiens
tttgtttttcatata

SEQ ID NO: 1193359 - DNA, 15 bp, Homo sapiens
ttttgtttttcatat

SEQ ID NO: 1193360 - DNA, 15 bp, Homo sapiens
tttttgtttttcata

SEQ ID NO: 1193361 - DNA, 15 bp, Homo sapiens
atttttgtttttcat

SEQ ID NO: 1193362 - DNA, 15 bp, Homo sapiens
tatttttgtttttca

SEQ ID NO: 1193363 - DNA, 15 bp, Homo sapiens
ttatttttgtttttc

SEQ ID NO: 1193364 - DNA, 15 bp, Homo sapiens
gttatttttgttttt

SEQ ID NO: 1193365 - DNA, 15 bp, Homo sapiens
tgttatttttgtttt

SEQ ID NO: 1193366 - DNA, 15 bp, Homo sapiens
atgttatttttgttt

SEQ ID NO: 1193367 - DNA, 15 bp, Homo sapiens
gatgttatttttgtt

SEQ ID NO: 1193368 - DNA, 15 bp, Homo sapiens
agatgttatttttgt

SEQ ID NO: 1193369 - DNA, 15 bp, Homo sapiens
aagatgttatttttg

SEQ ID NO: 1193370 - DNA, 15 bp, Homo sapiens
gaagatgttattttt

SEQ ID NO: 1193371 - DNA, 15 bp, Homo sapiens
tgaagatgttatttt

SEQ ID NO: 1193372 - DNA, 15 bp, Homo sapiens
ctgaagatgttattt

SEQ ID NO: 1193373 - DNA, 15 bp, Homo sapiens
actgaagatgttatt

SEQ ID NO: 1193374 - DNA, 15 bp, Homo sapiens
aactgaagatgttat

SEQ ID NO: 1193375 - DNA, 15 bp, Homo sapiens
aaactgaagatgtta

SEQ ID NO: 1193376 - DNA, 15 bp, Homo sapiens
aaaactgaagatgtt

SEQ ID NO: 1193377 - DNA, 15 bp, Homo sapiens
aaaaactgaagatgt

SEQ ID NO: 1193378 - DNA, 15 bp, Homo sapiens
gaaaaactgaagatg

SEQ ID NO: 1193379 - DNA, 15 bp, Homo sapiens
agaaaaactgaagat

SEQ ID NO: 1193380 - DNA, 15 bp, Homo sapiens
gagaaaaactgaaga

SEQ ID NO: 1193381 - DNA, 15 bp, Homo sapiens
ggagaaaaactgaag

SEQ ID NO: 1193382 - DNA, 15 bp, Homo sapiens
gggagaaaaactgaa

SEQ ID NO: 1193383 - DNA, 15 bp, Homo sapiens
tgggagaaaaactga

SEQ ID NO: 1193384 - DNA, 15 bp, Homo sapiens
gtgggagaaaaactg

SEQ ID NO: 1193385 - DNA, 15 bp, Homo sapiens
agtgggagaaaaact

SEQ ID NO: 1193386 - DNA, 15 bp, Homo sapiens
cagtgggagaaaaac

SEQ ID NO: 1193387 - DNA, 15 bp, Homo sapiens
ccagtgggagaaaaa

SEQ ID NO: 1193388 - DNA, 15 bp, Homo sapiens
cccagtgggagaaaa

SEQ ID NO: 1193389 - DNA, 15 bp, Homo sapiens
acccagtgggagaaa

SEQ ID NO: 1193390 - DNA, 15 bp, Homo sapiens
gacccagtgggagaa

SEQ ID NO: 1193391 - DNA, 15 bp, Homo sapiens
tgacccagtgggaga

SEQ ID NO: 1193392 - DNA, 15 bp, Homo sapiens
gtgacccagtgggag

SEQ ID NO: 1193393 - DNA, 15 bp, Homo sapiens
ggtgacccagtggga

SEQ ID NO: 1193394 - DNA, 15 bp, Homo sapiens
aggtgacccagtggg

SEQ ID NO: 1193395 - DNA, 15 bp, Homo sapiens
gaggtgacccagtgg

SEQ ID NO: 1193396 - DNA, 15 bp, Homo sapiens
tgaggtgacccagtg

SEQ ID NO: 1193397 - DNA, 15 bp, Homo sapiens
ttgaggtgacccagt

SEQ ID NO: 1193398 - DNA, 15 bp, Homo sapiens
cttgaggtgacccag

SEQ ID NO: 1193399 - DNA, 15 bp, Homo sapiens
ccttgaggtgaccca

SEQ ID NO: 1193400 - DNA, 15 bp, Homo sapiens
tccttgaggtgaccc

SEQ ID NO: 1193401 - DNA, 15 bp, Homo sapiens
atccttgaggtgacc

SEQ ID NO: 1193402 - DNA, 15 bp, Homo sapiens
gatccttgaggtgac

SEQ ID NO: 1193403 - DNA, 15 bp, Homo sapiens
tgatccttgaggtga

SEQ ID NO: 1193404 - DNA, 15 bp, Homo sapiens
ctgatccttgaggtg

SEQ ID NO: 1193405 - DNA, 15 bp, Homo sapiens
tctgatccttgaggt

SEQ ID NO: 1193406 - DNA, 15 bp, Homo sapiens
ctctgatccttgagg

SEQ ID NO: 1193407 - DNA, 15 bp, Homo sapiens
cctctgatccttgag

SEQ ID NO: 1193408 - DNA, 15 bp, Homo sapiens
gcctctgatccttga

SEQ ID NO: 1193409 - DNA, 15 bp, Homo sapiens
ggcctctgatccttg

SEQ ID NO: 1193410 - DNA, 15 bp, Homo sapiens
tggcctctgatcctt

SEQ ID NO: 1193411 - DNA, 15 bp, Homo sapiens
ctggcctctgatcct

SEQ ID NO: 1193412 - DNA, 15 bp, Homo sapiens
cctggcctctgatcc

SEQ ID NO: 1193413 - DNA, 15 bp, Homo sapiens
tcctggcctctgatc

SEQ ID NO: 1193414 - DNA, 15 bp, Homo sapiens
ttcctggcctctgat

SEQ ID NO: 1193415 - DNA, 15 bp, Homo sapiens
tttcctggcctctga

SEQ ID NO: 1193416 - DNA, 15 bp, Homo sapiens
ttttcctggcctctg

SEQ ID NO: 1193417 - DNA, 15 bp, Homo sapiens
tttttcctggcctct

SEQ ID NO: 1193418 - DNA, 15 bp, Homo sapiens
ttttttcctggcctc

SEQ ID NO: 1193419 - DNA, 15 bp, Homo sapiens
tttttttcctggcct

SEQ ID NO: 1193420 - DNA, 15 bp, Homo sapiens
ttttttttcctggcc

SEQ ID NO: 1193421 - DNA, 15 bp, Homo sapiens
tttttttttcctggc

SEQ ID NO: 1193422 - DNA, 15 bp, Homo sapiens
ttttttttttcctgg

SEQ ID NO: 1193423 - DNA, 15 bp, Homo sapiens
tttttttttttcctg

SEQ ID NO: 1193424 - DNA, 15 bp, Homo sapiens
gagtctttttttttt

SEQ ID NO: 1193425 - DNA, 15 bp, Homo sapiens
ggagtcttttttttt

SEQ ID NO: 1193426 - DNA, 15 bp, Homo sapiens
gggagtctttttttt

SEQ ID NO: 1193427 - DNA, 15 bp, Homo sapiens
agggagtcttttttt

SEQ ID NO: 1193428 - DNA, 15 bp, Homo sapiens
cagggagtctttttt

SEQ ID NO: 1193429 - DNA, 15 bp, Homo sapiens
ccagggagtcttttt

SEQ ID NO: 1193430 - DNA, 15 bp, Homo sapiens
tccagggagtctttt

SEQ ID NO: 1193431 - DNA, 15 bp, Homo sapiens
atccagggagtcttt

SEQ ID NO: 1193432 - DNA, 15 bp, Homo sapiens
gatccagggagtctt

SEQ ID NO: 1193433 - DNA, 15 bp, Homo sapiens
agatccagggagtct

SEQ ID NO: 1193434 - DNA, 15 bp, Homo sapiens
gagatccagggagtc

SEQ ID NO: 1193435 - DNA, 15 bp, Homo sapiens
agagatccagggagt

SEQ ID NO: 1193436 - DNA, 15 bp, Homo sapiens
cagagatccagggag

SEQ ID NO: 1193437 - DNA, 15 bp, Homo sapiens
tcagagatccaggga

SEQ ID NO: 1193438 - DNA, 15 bp, Homo sapiens
ttcagagatccaggg

SEQ ID NO: 1193439 - DNA, 15 bp, Homo sapiens
attcagagatccagg

SEQ ID NO: 1193440 - DNA, 15 bp, Homo sapiens
tattcagagatccag

SEQ ID NO: 1193441 - DNA, 15 bp, Homo sapiens
atattcagagatcca

SEQ ID NO: 1193442 - DNA, 15 bp, Homo sapiens
tatattcagagatcc

SEQ ID NO: 1193443 - DNA, 15 bp, Homo sapiens
atatattcagagatc

SEQ ID NO: 1193444 - DNA, 15 bp, Homo sapiens
catatattcagagat

SEQ ID NO: 1193445 - DNA, 15 bp, Homo sapiens
gcatatattcagaga

SEQ ID NO: 1193446 - DNA, 15 bp, Homo sapiens
tgcatatattcagag

SEQ ID NO: 1193447 - DNA, 15 bp, Homo sapiens
ttgcatatattcaga

SEQ ID NO: 1193448 - DNA, 15 bp, Homo sapiens
tttgcatatattcag

SEQ ID NO: 1193449 - DNA, 15 bp, Homo sapiens
ttttgcatatattca

SEQ ID NO: 1193450 - DNA, 15 bp, Homo sapiens
tttttgcatatattc

SEQ ID NO: 1193451 - DNA, 15 bp, Homo sapiens
ctttttgcatatatt

SEQ ID NO: 1193452 - DNA, 15 bp, Homo sapiens
tctttttgcatatat

SEQ ID NO: 1193453 - DNA, 15 bp, Homo sapiens
ttctttttgcatata

SEQ ID NO: 1193454 - DNA, 15 bp, Homo sapiens
cttctttttgcatat

SEQ ID NO: 1193455 - DNA, 15 bp, Homo sapiens
ccttctttttgcata

SEQ ID NO: 1193456 - DNA, 15 bp, Homo sapiens
gccttctttttgcat

SEQ ID NO: 1193457 - DNA, 15 bp, Homo sapiens
ggccttctttttgca

SEQ ID NO: 1193458 - DNA, 15 bp, Homo sapiens
gggccttctttttgc

SEQ ID NO: 1193459 - DNA, 15 bp, Homo sapiens
ggggccttctttttg

SEQ ID NO: 1193460 - DNA, 15 bp, Homo sapiens
tggggccttcttttt

SEQ ID NO: 1193461 - DNA, 15 bp, Homo sapiens
atggggccttctttt

SEQ ID NO: 1193462 - DNA, 15 bp, Homo sapiens
aatggggccttcttt

SEQ ID NO: 1193463 - DNA, 15 bp, Homo sapiens
aaatggggccttctt

SEQ ID NO: 1193464 - DNA, 15 bp, Homo sapiens
taaatggggccttct

SEQ ID NO: 1193465 - DNA, 15 bp, Homo sapiens
ctaaatggggccttc

SEQ ID NO: 1193466 - DNA, 15 bp, Homo sapiens
actaaatggggcctt

SEQ ID NO: 1193467 - DNA, 15 bp, Homo sapiens
cactaaatggggcct

SEQ ID NO: 1193468 - DNA, 15 bp, Homo sapiens
ccactaaatggggcc

SEQ ID NO: 1193469 - DNA, 15 bp, Homo sapiens
tccactaaatggggc

SEQ ID NO: 1193470 - DNA, 15 bp, Homo sapiens
ctccactaaatgggg

SEQ ID NO: 1193471 - DNA, 15 bp, Homo sapiens
gctccactaaatggg

SEQ ID NO: 1193472 - DNA, 15 bp, Homo sapiens
ggctccactaaatgg

SEQ ID NO: 1193473 - DNA, 15 bp, Homo sapiens
tggctccactaaatg

SEQ ID NO: 1193474 - DNA, 15 bp, Homo sapiens
ctggctccactaaat

SEQ ID NO: 1193475 - DNA, 15 bp, Homo sapiens
gctggctccactaaa

SEQ ID NO: 1193476 - DNA, 15 bp, Homo sapiens
tgctggctccactaa

SEQ ID NO: 1193477 - DNA, 15 bp, Homo sapiens
ttgctggctccacta

SEQ ID NO: 1193478 - DNA, 15 bp, Homo sapiens
attgctggctccact

SEQ ID NO: 1193479 - DNA, 15 bp, Homo sapiens
gattgctggctccac

SEQ ID NO: 1193480 - DNA, 15 bp, Homo sapiens
ggattgctggctcca

SEQ ID NO: 1193481 - DNA, 15 bp, Homo sapiens
aggattgctggctcc

SEQ ID NO: 1193482 - DNA, 15 bp, Homo sapiens
caggattgctggctc

SEQ ID NO: 1193483 - DNA, 15 bp, Homo sapiens
acaggattgctggct

SEQ ID NO: 1193484 - DNA, 15 bp, Homo sapiens
aacaggattgctggc

SEQ ID NO: 1193485 - DNA, 15 bp, Homo sapiens
gaacaggattgctgg

SEQ ID NO: 1193486 - DNA, 15 bp, Homo sapiens
tgaacaggattgctg

SEQ ID NO: 1193487 - DNA, 15 bp, Homo sapiens
ctgaacaggattgct

SEQ ID NO: 1193488 - DNA, 15 bp, Homo sapiens
actgaacaggattgc

SEQ ID NO: 1193489 - DNA, 15 bp, Homo sapiens
gactgaacaggattg

SEQ ID NO: 1193490 - DNA, 15 bp, Homo sapiens
tgactgaacaggatt

SEQ ID NO: 1193491 - DNA, 15 bp, Homo sapiens
ttgactgaacaggat

SEQ ID NO: 1193492 - DNA, 15 bp, Homo sapiens
gttgactgaacagga

SEQ ID NO: 1193493 - DNA, 15 bp, Homo sapiens
tgttgactgaacagg

SEQ ID NO: 1193494 - DNA, 15 bp, Homo sapiens
ttgttgactgaacag

SEQ ID NO: 1193495 - DNA, 15 bp, Homo sapiens
cttgttgactgaaca

SEQ ID NO: 1193496 - DNA, 15 bp, Homo sapiens
acttgttgactgaac

SEQ ID NO: 1193497 - DNA, 15 bp, Homo sapiens
tacttgttgactgaa

SEQ ID NO: 1193498 - DNA, 15 bp, Homo sapiens
atacttgttgactga

SEQ ID NO: 1193499 - DNA, 15 bp, Homo sapiens
aatacttgttgactg

SEQ ID NO: 1193500 - DNA, 15 bp, Homo sapiens
aaatacttgttgact

SEQ ID NO: 1193501 - DNA, 15 bp, Homo sapiens
aaaatacttgttgac

SEQ ID NO: 1193502 - DNA, 15 bp, Homo sapiens
taaaatacttgttga

SEQ ID NO: 1193503 - DNA, 15 bp, Homo sapiens
ttaaaatacttgttg

SEQ ID NO: 1193504 - DNA, 15 bp, Homo sapiens
gttaaaatacttgtt

SEQ ID NO: 1193505 - DNA, 15 bp, Homo sapiens
agttaaaatacttgt

SEQ ID NO: 1193506 - DNA, 15 bp, Homo sapiens
gagttaaaatacttg

SEQ ID NO: 1193507 - DNA, 15 bp, Homo sapiens
agagttaaaatactt

SEQ ID NO: 1193508 - DNA, 15 bp, Homo sapiens
gagagttaaaatact

SEQ ID NO: 1193509 - DNA, 15 bp, Homo sapiens
tgagagttaaaatac

SEQ ID NO: 1193510 - DNA, 15 bp, Homo sapiens
ctgagagttaaaata

SEQ ID NO: 1193511 - DNA, 15 bp, Homo sapiens
actgagagttaaaat

SEQ ID NO: 1193512 - DNA, 15 bp, Homo sapiens
gactgagagttaaaa

SEQ ID NO: 1193513 - DNA, 15 bp, Homo sapiens
ggactgagagttaaa

SEQ ID NO: 1193514 - DNA, 15 bp, Homo sapiens
tggactgagagttaa

SEQ ID NO: 1193515 - DNA, 15 bp, Homo sapiens
ttggactgagagtta

SEQ ID NO: 1193516 - DNA, 15 bp, Homo sapiens
gttggactgagagtt

SEQ ID NO: 1193517 - DNA, 15 bp, Homo sapiens
tgttggactgagagt

SEQ ID NO: 1193518 - DNA, 15 bp, Homo sapiens
atgttggactgagag

SEQ ID NO: 1193519 - DNA, 15 bp, Homo sapiens
aatgttggactgaga

SEQ ID NO: 1193520 - DNA, 15 bp, Homo sapiens
taatgttggactgag

SEQ ID NO: 1193521 - DNA, 15 bp, Homo sapiens
ataatgttggactga

SEQ ID NO: 1193522 - DNA, 15 bp, Homo sapiens
aataatgttggactg

SEQ ID NO: 1193523 - DNA, 15 bp, Homo sapiens
aaataatgttggact

SEQ ID NO: 1193524 - DNA, 15 bp, Homo sapiens
caaataatgttggac

SEQ ID NO: 1193525 - DNA, 15 bp, Homo sapiens
tcaaataatgttgga

SEQ ID NO: 1193526 - DNA, 15 bp, Homo sapiens
ttcaaataatgttgg

SEQ ID NO: 1193527 - DNA, 15 bp, Homo sapiens
attcaaataatgttg

SEQ ID NO: 1193528 - DNA, 15 bp, Homo sapiens
aattcaaataatgtt

SEQ ID NO: 1193529 - DNA, 15 bp, Homo sapiens
caattcaaataatgt

SEQ ID NO: 1193530 - DNA, 15 bp, Homo sapiens
tcaattcaaataatg

SEQ ID NO: 1193531 - DNA, 15 bp, Homo sapiens
ctcaattcaaataat

SEQ ID NO: 1193532 - DNA, 15 bp, Homo sapiens
gctcaattcaaataa

SEQ ID NO: 1193533 - DNA, 15 bp, Homo sapiens
tgctcaattcaaata

SEQ ID NO: 1193534 - DNA, 15 bp, Homo sapiens
gtgctcaattcaaat

SEQ ID NO: 1193535 - DNA, 15 bp, Homo sapiens
ggtgctcaattcaaa

SEQ ID NO: 1193536 - DNA, 15 bp, Homo sapiens
aggtgctcaattcaa

SEQ ID NO: 1193537 - DNA, 15 bp, Homo sapiens
gaggtgctcaattca

SEQ ID NO: 1193538 - DNA, 15 bp, Homo sapiens
tgaggtgctcaattc

SEQ ID NO: 1193539 - DNA, 15 bp, Homo sapiens
ttgaggtgctcaatt

SEQ ID NO: 1193540 - DNA, 15 bp, Homo sapiens
cttgaggtgctcaat

SEQ ID NO: 1193541 - DNA, 15 bp, Homo sapiens
gcttgaggtgctcaa

SEQ ID NO: 1193542 - DNA, 15 bp, Homo sapiens
tgcttgaggtgctca

SEQ ID NO: 1193543 - DNA, 15 bp, Homo sapiens
atgcttgaggtgctc

SEQ ID NO: 1193544 - DNA, 15 bp, Homo sapiens
catgcttgaggtgct

SEQ ID NO: 1193545 - DNA, 15 bp, Homo sapiens
gcatgcttgaggtgc

SEQ ID NO: 1193546 - DNA, 15 bp, Homo sapiens
agcatgcttgaggtg

SEQ ID NO: 1193547 - DNA, 15 bp, Homo sapiens
aagcatgcttgaggt

SEQ ID NO: 1193548 - DNA, 15 bp, Homo sapiens
taagcatgcttgagg

SEQ ID NO: 1193549 - DNA, 15 bp, Homo sapiens
ctaagcatgcttgag

SEQ ID NO: 1193550 - DNA, 15 bp, Homo sapiens
gctaagcatgcttga

SEQ ID NO: 1193551 - DNA, 15 bp, Homo sapiens
tgctaagcatgcttg

SEQ ID NO: 1193552 - DNA, 15 bp, Homo sapiens
ttgctaagcatgctt

SEQ ID NO: 1193553 - DNA, 15 bp, Homo sapiens
attgctaagcatgct

SEQ ID NO: 1193554 - DNA, 15 bp, Homo sapiens
cattgctaagcatgc

SEQ ID NO: 1193555 - DNA, 15 bp, Homo sapiens
acattgctaagcatg

SEQ ID NO: 1193556 - DNA, 15 bp, Homo sapiens
aacattgctaagcat

SEQ ID NO: 1193557 - DNA, 15 bp, Homo sapiens
gaacattgctaagca

SEQ ID NO: 1193558 - DNA, 15 bp, Homo sapiens
agaacattgctaagc

SEQ ID NO: 1193559 - DNA, 15 bp, Homo sapiens
tagaacattgctaag

SEQ ID NO: 1193560 - DNA, 15 bp, Homo sapiens
ttagaacattgctaa

SEQ ID NO: 1193561 - DNA, 15 bp, Homo sapiens
attagaacattgcta

SEQ ID NO: 1193562 - DNA, 15 bp, Homo sapiens
gattagaacattgct

SEQ ID NO: 1193563 - DNA, 15 bp, Homo sapiens
tgattagaacattgc

SEQ ID NO: 1193564 - DNA, 15 bp, Homo sapiens
gtgattagaacattg

SEQ ID NO: 1193565 - DNA, 15 bp, Homo sapiens
agtgattagaacatt

SEQ ID NO: 1193566 - DNA, 15 bp, Homo sapiens
tagtgattagaacat

SEQ ID NO: 1193567 - DNA, 15 bp, Homo sapiens
atagtgattagaaca

SEQ ID NO: 1193568 - DNA, 15 bp, Homo sapiens
catagtgattagaac

SEQ ID NO: 1193569 - DNA, 15 bp, Homo sapiens
ccatagtgattagaa

SEQ ID NO: 1193570 - DNA, 15 bp, Homo sapiens
tccatagtgattaga

SEQ ID NO: 1193571 - DNA, 15 bp, Homo sapiens
gtccatagtgattag

SEQ ID NO: 1193572 - DNA, 15 bp, Homo sapiens
tgtccatagtgatta

SEQ ID NO: 1193573 - DNA, 15 bp, Homo sapiens
ctgtccatagtgatt

SEQ ID NO: 1193574 - DNA, 15 bp, Homo sapiens
tctgtccatagtgat

SEQ ID NO: 1193575 - DNA, 15 bp, Homo sapiens
atctgtccatagtga

SEQ ID NO: 1193576 - DNA, 15 bp, Homo sapiens
catctgtccatagtg

SEQ ID NO: 1193577 - DNA, 15 bp, Homo sapiens
acatctgtccatagt

SEQ ID NO: 1193578 - DNA, 15 bp, Homo sapiens
tacatctgtccatag

SEQ ID NO: 1193579 - DNA, 15 bp, Homo sapiens
ttacatctgtccata

SEQ ID NO: 1193580 - DNA, 15 bp, Homo sapiens
tttacatctgtccat

SEQ ID NO: 1193581 - DNA, 15 bp, Homo sapiens
ttttacatctgtcca

SEQ ID NO: 1193582 - DNA, 15 bp, Homo sapiens
cttttacatctgtcc

SEQ ID NO: 1193583 - DNA, 15 bp, Homo sapiens
tcttttacatctgtc

SEQ ID NO: 1193584 - DNA, 15 bp, Homo sapiens
ttcttttacatctgt

SEQ ID NO: 1193585 - DNA, 15 bp, Homo sapiens
tttcttttacatctg

SEQ ID NO: 1193586 - DNA, 15 bp, Homo sapiens
gtttcttttacatct

SEQ ID NO: 1193587 - DNA, 15 bp, Homo sapiens
agtttcttttacatc

SEQ ID NO: 1193588 - DNA, 15 bp, Homo sapiens
tagtttcttttacat

SEQ ID NO: 1193589 - DNA, 15 bp, Homo sapiens
atagtttcttttaca

SEQ ID NO: 1193590 - DNA, 15 bp, Homo sapiens
tatagtttcttttac

SEQ ID NO: 1193591 - DNA, 15 bp, Homo sapiens
gtatagtttctttta

SEQ ID NO: 1193592 - DNA, 15 bp, Homo sapiens
tgtatagtttctttt

SEQ ID NO: 1193593 - DNA, 15 bp, Homo sapiens
atgtatagtttcttt

SEQ ID NO: 1193594 - DNA, 15 bp, Homo sapiens
gatgtatagtttctt

SEQ ID NO: 1193595 - DNA, 15 bp, Homo sapiens
tgatgtatagtttct

SEQ ID NO: 1193596 - DNA, 15 bp, Homo sapiens
atgatgtatagtttc

SEQ ID NO: 1193597 - DNA, 15 bp, Homo sapiens
aatgatgtatagttt

SEQ ID NO: 1193598 - DNA, 15 bp, Homo sapiens
aaatgatgtatagtt

SEQ ID NO: 1193599 - DNA, 15 bp, Homo sapiens
aaaatgatgtatagt

SEQ ID NO: 1193600 - DNA, 15 bp, Homo sapiens
aaaaatgatgtatag

SEQ ID NO: 1193601 - DNA, 15 bp, Homo sapiens
caaaaatgatgtata

SEQ ID NO: 1193602 - DNA, 15 bp, Homo sapiens
gcaaaaatgatgtat

SEQ ID NO: 1193603 - DNA, 15 bp, Homo sapiens
ggcaaaaatgatgta

SEQ ID NO: 1193604 - DNA, 15 bp, Homo sapiens
gggcaaaaatgatgt

SEQ ID NO: 1193605 - DNA, 15 bp, Homo sapiens
agggcaaaaatgatg

SEQ ID NO: 1193606 - DNA, 15 bp, Homo sapiens
gagggcaaaaatgat

SEQ ID NO: 1193607 - DNA, 15 bp, Homo sapiens
agagggcaaaaatga

SEQ ID NO: 1193608 - DNA, 15 bp, Homo sapiens
cagagggcaaaaatg

SEQ ID NO: 1193609 - DNA, 15 bp, Homo sapiens
gcagagggcaaaaat

SEQ ID NO: 1193610 - DNA, 15 bp, Homo sapiens
ggcagagggcaaaaa

SEQ ID NO: 1193611 - DNA, 15 bp, Homo sapiens
aggcagagggcaaaa

SEQ ID NO: 1193612 - DNA, 15 bp, Homo sapiens
caggcagagggcaaa

SEQ ID NO: 1193613 - DNA, 15 bp, Homo sapiens
acaggcagagggcaa

SEQ ID NO: 1193614 - DNA, 15 bp, Homo sapiens
aacaggcagagggca

SEQ ID NO: 1193615 - DNA, 15 bp, Homo sapiens
aaacaggcagagggc

SEQ ID NO: 1193616 - DNA, 15 bp, Homo sapiens
aaaacaggcagaggg

SEQ ID NO: 1193617 - DNA, 15 bp, Homo sapiens
gaaaacaggcagagg

SEQ ID NO: 1193618 - DNA, 15 bp, Homo sapiens
ggaaaacaggcagag

SEQ ID NO: 1193619 - DNA, 15 bp, Homo sapiens
tggaaaacaggcaga

SEQ ID NO: 1193620 - DNA, 15 bp, Homo sapiens
ctggaaaacaggcag

SEQ ID NO: 1193621 - DNA, 15 bp, Homo sapiens
tctggaaaacaggca

SEQ ID NO: 1193622 - DNA, 15 bp, Homo sapiens
gtctggaaaacaggc

SEQ ID NO: 1193623 - DNA, 15 bp, Homo sapiens
tgtctggaaaacagg

SEQ ID NO: 1193624 - DNA, 15 bp, Homo sapiens
atgtctggaaaacag

SEQ ID NO: 1193625 - DNA, 15 bp, Homo sapiens
tatgtctggaaaaca

SEQ ID NO: 1193626 - DNA, 15 bp, Homo sapiens
gtatgtctggaaaac

SEQ ID NO: 1193627 - DNA, 15 bp, Homo sapiens
tgtatgtctggaaaa

SEQ ID NO: 1193628 - DNA, 15 bp, Homo sapiens
ctgtatgtctggaaa

SEQ ID NO: 1193629 - DNA, 15 bp, Homo sapiens
cctgtatgtctggaa

SEQ ID NO: 1193630 - DNA, 15 bp, Homo sapiens
acctgtatgtctgga

SEQ ID NO: 1193631 - DNA, 15 bp, Homo sapiens
aacctgtatgtctgg

SEQ ID NO: 1193632 - DNA, 15 bp, Homo sapiens
gaacctgtatgtctg

SEQ ID NO: 1193633 - DNA, 15 bp, Homo sapiens
agaacctgtatgtct

SEQ ID NO: 1193634 - DNA, 15 bp, Homo sapiens
cagaacctgtatgtc

SEQ ID NO: 1193635 - DNA, 15 bp, Homo sapiens
acagaacctgtatgt

SEQ ID NO: 1193636 - DNA, 15 bp, Homo sapiens
cacagaacctgtatg

SEQ ID NO: 1193637 - DNA, 15 bp, Homo sapiens
ccacagaacctgtat

SEQ ID NO: 1193638 - DNA, 15 bp, Homo sapiens
tccacagaacctgta

SEQ ID NO: 1193639 - DNA, 15 bp, Homo sapiens
ttccacagaacctgt

SEQ ID NO: 1193640 - DNA, 15 bp, Homo sapiens
attccacagaacctg

SEQ ID NO: 1193641 - DNA, 15 bp, Homo sapiens
tattccacagaacct

SEQ ID NO: 1193642 - DNA, 15 bp, Homo sapiens
ttattccacagaacc

SEQ ID NO: 1193643 - DNA, 15 bp, Homo sapiens
cttattccacagaac

SEQ ID NO: 1193644 - DNA, 15 bp, Homo sapiens
tcttattccacagaa

SEQ ID NO: 1193645 - DNA, 15 bp, Homo sapiens
atcttattccacaga

SEQ ID NO: 1193646 - DNA, 15 bp, Homo sapiens
tatcttattccacag

SEQ ID NO: 1193647 - DNA, 15 bp, Homo sapiens
gtatcttattccaca

SEQ ID NO: 1193648 - DNA, 15 bp, Homo sapiens
agtatcttattccac

SEQ ID NO: 1193649 - DNA, 15 bp, Homo sapiens
cagtatcttattcca

SEQ ID NO: 1193650 - DNA, 15 bp, Homo sapiens
ccagtatcttattcc

SEQ ID NO: 1193651 - DNA, 15 bp, Homo sapiens
tccagtatcttattc

SEQ ID NO: 1193652 - DNA, 15 bp, Homo sapiens
gtccagtatcttatt

SEQ ID NO: 1193653 - DNA, 15 bp, Homo sapiens
agtccagtatcttat

SEQ ID NO: 1193654 - DNA, 15 bp, Homo sapiens
gagtccagtatctta

SEQ ID NO: 1193655 - DNA, 15 bp, Homo sapiens
ggagtccagtatctt

SEQ ID NO: 1193656 - DNA, 15 bp, Homo sapiens
aggagtccagtatct

SEQ ID NO: 1193657 - DNA, 15 bp, Homo sapiens
gaggagtccagtatc

SEQ ID NO: 1193658 - DNA, 15 bp, Homo sapiens
agaggagtccagtat

SEQ ID NO: 1193659 - DNA, 15 bp, Homo sapiens
aagaggagtccagta

SEQ ID NO: 1193660 - DNA, 15 bp, Homo sapiens
gaagaggagtccagt

SEQ ID NO: 1193661 - DNA, 15 bp, Homo sapiens
ggaagaggagtccag

SEQ ID NO: 1193662 - DNA, 15 bp, Homo sapiens
gggaagaggagtcca

SEQ ID NO: 1193663 - DNA, 15 bp, Homo sapiens
tgggaagaggagtcc

SEQ ID NO: 1193664 - DNA, 15 bp, Homo sapiens
ttgggaagaggagtc

SEQ ID NO: 1193665 - DNA, 15 bp, Homo sapiens
cttgggaagaggagt

SEQ ID NO: 1193666 - DNA, 15 bp, Homo sapiens
tcttgggaagaggag

SEQ ID NO: 1193667 - DNA, 15 bp, Homo sapiens
atcttgggaagagga

SEQ ID NO: 1193668 - DNA, 15 bp, Homo sapiens
catcttgggaagagg

SEQ ID NO: 1193669 - DNA, 15 bp, Homo sapiens
ccatcttgggaagag

SEQ ID NO: 1193670 - DNA, 15 bp, Homo sapiens
gccatcttgggaaga

SEQ ID NO: 1193671 - DNA, 15 bp, Homo sapiens
tgccatcttgggaag

SEQ ID NO: 1193672 - DNA, 15 bp, Homo sapiens
gtgccatcttgggaa

SEQ ID NO: 1193673 - DNA, 15 bp, Homo sapiens
agtgccatcttggga

SEQ ID NO: 1193674 - DNA, 15 bp, Homo sapiens
aagtgccatcttggg

SEQ ID NO: 1193675 - DNA, 15 bp, Homo sapiens
gaagtgccatcttgg

SEQ ID NO: 1193676 - DNA, 15 bp, Homo sapiens
agaagtgccatcttg

SEQ ID NO: 1193677 - DNA, 15 bp, Homo sapiens
aagaagtgccatctt

SEQ ID NO: 1193678 - DNA, 15 bp, Homo sapiens
aaagaagtgccatct

SEQ ID NO: 1193679 - DNA, 15 bp, Homo sapiens
aaaagaagtgccatc

SEQ ID NO: 1193680 - DNA, 15 bp, Homo sapiens
aaaaagaagtgccat

SEQ ID NO: 1193681 - DNA, 15 bp, Homo sapiens
taaaaagaagtgcca

SEQ ID NO: 1193682 - DNA, 15 bp, Homo sapiens
ataaaaagaagtgcc

SEQ ID NO: 1193683 - DNA, 15 bp, Homo sapiens
aataaaaagaagtgc

SEQ ID NO: 1193684 - DNA, 15 bp, Homo sapiens
aaataaaaagaagtg

SEQ ID NO: 1193685 - DNA, 15 bp, Homo sapiens
gaaataaaaagaagt

SEQ ID NO: 1193686 - DNA, 15 bp, Homo sapiens
agaaataaaaagaag

SEQ ID NO: 1193687 - DNA, 15 bp, Homo sapiens
aagaaataaaaagaa

SEQ ID NO: 1193688 - DNA, 15 bp, Homo sapiens
caagaaataaaaaga

SEQ ID NO: 1193689 - DNA, 15 bp, Homo sapiens
acaagaaataaaaag

SEQ ID NO: 1193690 - DNA, 15 bp, Homo sapiens
gacaagaaataaaaa

SEQ ID NO: 1193691 - DNA, 15 bp, Homo sapiens
ggacaagaaataaaa

SEQ ID NO: 1193692 - DNA, 15 bp, Homo sapiens
gggacaagaaataaa

SEQ ID NO: 1193693 - DNA, 15 bp, Homo sapiens
ggggacaagaaataa

SEQ ID NO: 1193694 - DNA, 15 bp, Homo sapiens
tggggacaagaaata

SEQ ID NO: 1193695 - DNA, 15 bp, Homo sapiens
ctggggacaagaaat

SEQ ID NO: 1193696 - DNA, 15 bp, Homo sapiens
actggggacaagaaa

SEQ ID NO: 1193697 - DNA, 15 bp, Homo sapiens
cactggggacaagaa

SEQ ID NO: 1193698 - DNA, 15 bp, Homo sapiens
acactggggacaaga

SEQ ID NO: 1193699 - DNA, 15 bp, Homo sapiens
cacactggggacaag

SEQ ID NO: 1193700 - DNA, 15 bp, Homo sapiens
acacactggggacaa

SEQ ID NO: 1193701 - DNA, 15 bp, Homo sapiens
tacacactggggaca

SEQ ID NO: 1193702 - DNA, 15 bp, Homo sapiens
gtacacactggggac

SEQ ID NO: 1193703 - DNA, 15 bp, Homo sapiens
ggtacacactgggga

SEQ ID NO: 1193704 - DNA, 15 bp, Homo sapiens
aggtacacactgggg

SEQ ID NO: 1193705 - DNA, 15 bp, Homo sapiens
aaggtacacactggg

SEQ ID NO: 1193706 - DNA, 15 bp, Homo sapiens
aaaggtacacactgg

SEQ ID NO: 1193707 - DNA, 15 bp, Homo sapiens
aaaaggtacacactg

SEQ ID NO: 1193708 - DNA, 15 bp, Homo sapiens
taaaaggtacacact

SEQ ID NO: 1193709 - DNA, 15 bp, Homo sapiens
ttaaaaggtacacac

SEQ ID NO: 1193710 - DNA, 15 bp, Homo sapiens
tttaaaaggtacaca

SEQ ID NO: 1193711 - DNA, 15 bp, Homo sapiens
ttttaaaaggtacac

SEQ ID NO: 1193712 - DNA, 15 bp, Homo sapiens
attttaaaaggtaca

SEQ ID NO: 1193713 - DNA, 15 bp, Homo sapiens
aattttaaaaggtac

SEQ ID NO: 1193714 - DNA, 15 bp, Homo sapiens
taattttaaaaggta

SEQ ID NO: 1193715 - DNA, 15 bp, Homo sapiens
ataattttaaaaggt

SEQ ID NO: 1193716 - DNA, 15 bp, Homo sapiens
aataattttaaaagg

SEQ ID NO: 1193717 - DNA, 15 bp, Homo sapiens
gaataattttaaaag

SEQ ID NO: 1193718 - DNA, 15 bp, Homo sapiens
ggaataattttaaaa

SEQ ID NO: 1193719 - DNA, 15 bp, Homo sapiens
gggaataattttaaa

SEQ ID NO: 1193720 - DNA, 15 bp, Homo sapiens
agggaataattttaa

SEQ ID NO: 1193721 - DNA, 15 bp, Homo sapiens
gagggaataatttta

SEQ ID NO: 1193722 - DNA, 15 bp, Homo sapiens
agagggaataatttt

SEQ ID NO: 1193723 - DNA, 15 bp, Homo sapiens
gagagggaataattt

SEQ ID NO: 1193724 - DNA, 15 bp, Homo sapiens
tgagagggaataatt

SEQ ID NO: 1193725 - DNA, 15 bp, Homo sapiens
ttgagagggaataat

SEQ ID NO: 1193726 - DNA, 15 bp, Homo sapiens
gttgagagggaataa

SEQ ID NO: 1193727 - DNA, 15 bp, Homo sapiens
tgttgagagggaata

SEQ ID NO: 1193728 - DNA, 15 bp, Homo sapiens
ttgttgagagggaat

SEQ ID NO: 1193729 - DNA, 15 bp, Homo sapiens
tttgttgagagggaa

SEQ ID NO: 1193730 - DNA, 15 bp, Homo sapiens
ttttgttgagaggga

SEQ ID NO: 1193731 - DNA, 15 bp, Homo sapiens
gttttgttgagaggg

SEQ ID NO: 1193732 - DNA, 15 bp, Homo sapiens
agttttgttgagagg

SEQ ID NO: 1193733 - DNA, 15 bp, Homo sapiens
aagttttgttgagag

SEQ ID NO: 1193734 - DNA, 15 bp, Homo sapiens
aaagttttgttgaga

SEQ ID NO: 1193735 - DNA, 15 bp, Homo sapiens
taaagttttgttgag

SEQ ID NO: 1193736 - DNA, 15 bp, Homo sapiens
ataaagttttgttga

SEQ ID NO: 1193737 - DNA, 15 bp, Homo sapiens
tataaagttttgttg

SEQ ID NO: 1193738 - DNA, 15 bp, Homo sapiens
ctataaagttttgtt

SEQ ID NO: 1193739 - DNA, 15 bp, Homo sapiens
cctataaagttttgt

SEQ ID NO: 1193740 - DNA, 15 bp, Homo sapiens
gcctataaagttttg

SEQ ID NO: 1193741 - DNA, 15 bp, Homo sapiens
tgcctataaagtttt

SEQ ID NO: 1193742 - DNA, 15 bp, Homo sapiens
ctgcctataaagttt

SEQ ID NO: 1193743 - DNA, 15 bp, Homo sapiens
actgcctataaagtt

SEQ ID NO: 1193744 - DNA, 15 bp, Homo sapiens
gactgcctataaagt

SEQ ID NO: 1193745 - DNA, 15 bp, Homo sapiens
agactgcctataaag

SEQ ID NO: 1193746 - DNA, 15 bp, Homo sapiens
aagactgcctataaa

SEQ ID NO: 1193747 - DNA, 15 bp, Homo sapiens
gaagactgcctataa

SEQ ID NO: 1193748 - DNA, 15 bp, Homo sapiens
agaagactgcctata

SEQ ID NO: 1193749 - DNA, 15 bp, Homo sapiens
cagaagactgcctat

SEQ ID NO: 1193750 - DNA, 15 bp, Homo sapiens
gcagaagactgccta

SEQ ID NO: 1193751 - DNA, 15 bp, Homo sapiens
tgcagaagactgcct

SEQ ID NO: 1193752 - DNA, 15 bp, Homo sapiens
ctgcagaagactgcc

SEQ ID NO: 1193753 - DNA, 15 bp, Homo sapiens
tctgcagaagactgc

SEQ ID NO: 1193754 - DNA, 15 bp, Homo sapiens
gtctgcagaagactg

SEQ ID NO: 1193755 - DNA, 15 bp, Homo sapiens
agtctgcagaagact

SEQ ID NO: 1193756 - DNA, 15 bp, Homo sapiens
aagtctgcagaagac

SEQ ID NO: 1193757 - DNA, 15 bp, Homo sapiens
taagtctgcagaaga

SEQ ID NO: 1193758 - DNA, 15 bp, Homo sapiens
ttaagtctgcagaag

SEQ ID NO: 1193759 - DNA, 15 bp, Homo sapiens
gttaagtctgcagaa

SEQ ID NO: 1193760 - DNA, 15 bp, Homo sapiens
cgttaagtctgcaga

SEQ ID NO: 1193761 - DNA, 15 bp, Homo sapiens
acgttaagtctgcag

SEQ ID NO: 1193762 - DNA, 15 bp, Homo sapiens
cacgttaagtctgca

SEQ ID NO: 1193763 - DNA, 15 bp, Homo sapiens
acacgttaagtctgc

SEQ ID NO: 1193764 - DNA, 15 bp, Homo sapiens
aacacgttaagtctg

SEQ ID NO: 1193765 - DNA, 15 bp, Homo sapiens
aaacacgttaagtct

SEQ ID NO: 1193766 - DNA, 15 bp, Homo sapiens
aaaacacgttaagtc

SEQ ID NO: 1193767 - DNA, 15 bp, Homo sapiens
gaaaacacgttaagt

SEQ ID NO: 1193768 - DNA, 15 bp, Homo sapiens
agaaaacacgttaag

SEQ ID NO: 1193769 - DNA, 15 bp, Homo sapiens
cagaaaacacgttaa

SEQ ID NO: 1193770 - DNA, 15 bp, Homo sapiens
acagaaaacacgtta

SEQ ID NO: 1193771 - DNA, 15 bp, Homo sapiens
gacagaaaacacgtt

SEQ ID NO: 1193772 - DNA, 15 bp, Homo sapiens
tgacagaaaacacgt

SEQ ID NO: 1193773 - DNA, 15 bp, Homo sapiens
atgacagaaaacacg

SEQ ID NO: 1193774 - DNA, 15 bp, Homo sapiens
tatgacagaaaacac

SEQ ID NO: 1193775 - DNA, 15 bp, Homo sapiens
ctatgacagaaaaca

SEQ ID NO: 1193776 - DNA, 15 bp, Homo sapiens
actatgacagaaaac

SEQ ID NO: 1193777 - DNA, 15 bp, Homo sapiens
aactatgacagaaaa

SEQ ID NO: 1193778 - DNA, 15 bp, Homo sapiens
taactatgacagaaa

SEQ ID NO: 1193779 - DNA, 15 bp, Homo sapiens
ctaactatgacagaa

SEQ ID NO: 1193780 - DNA, 15 bp, Homo sapiens
tctaactatgacaga

SEQ ID NO: 1193781 - DNA, 15 bp, Homo sapiens
atctaactatgacag

SEQ ID NO: 1193782 - DNA, 15 bp, Homo sapiens
catctaactatgaca

SEQ ID NO: 1193783 - DNA, 15 bp, Homo sapiens
acatctaactatgac

SEQ ID NO: 1193784 - DNA, 15 bp, Homo sapiens
cacatctaactatga

SEQ ID NO: 1193785 - DNA, 15 bp, Homo sapiens
tcacatctaactatg

SEQ ID NO: 1193786 - DNA, 15 bp, Homo sapiens
atcacatctaactat

SEQ ID NO: 1193787 - DNA, 15 bp, Homo sapiens
tatcacatctaacta

SEQ ID NO: 1193788 - DNA, 15 bp, Homo sapiens
ttatcacatctaact

SEQ ID NO: 1193789 - DNA, 15 bp, Homo sapiens
attatcacatctaac

SEQ ID NO: 1193790 - DNA, 15 bp, Homo sapiens
aattatcacatctaa

SEQ ID NO: 1193791 - DNA, 15 bp, Homo sapiens
gaattatcacatcta

SEQ ID NO: 1193792 - DNA, 15 bp, Homo sapiens
agaattatcacatct

SEQ ID NO: 1193793 - DNA, 15 bp, Homo sapiens
tagaattatcacatc

SEQ ID NO: 1193794 - DNA, 15 bp, Homo sapiens
ttagaattatcacat

SEQ ID NO: 1193795 - DNA, 15 bp, Homo sapiens
cttagaattatcaca

SEQ ID NO: 1193796 - DNA, 15 bp, Homo sapiens
tcttagaattatcac

SEQ ID NO: 1193797 - DNA, 15 bp, Homo sapiens
ctcttagaattatca

SEQ ID NO: 1193798 - DNA, 15 bp, Homo sapiens
actcttagaattatc

SEQ ID NO: 1193799 - DNA, 15 bp, Homo sapiens
cactcttagaattat

SEQ ID NO: 1193800 - DNA, 15 bp, Homo sapiens
acactcttagaatta

SEQ ID NO: 1193801 - DNA, 15 bp, Homo sapiens
gacactcttagaatt

SEQ ID NO: 1193802 - DNA, 15 bp, Homo sapiens
agacactcttagaat

SEQ ID NO: 1193803 - DNA, 15 bp, Homo sapiens
tagacactcttagaa

SEQ ID NO: 1193804 - DNA, 15 bp, Homo sapiens
atagacactcttaga

SEQ ID NO: 1193805 - DNA, 15 bp, Homo sapiens
catagacactcttag

SEQ ID NO: 1193806 - DNA, 15 bp, Homo sapiens
tcatagacactctta

SEQ ID NO: 1193807 - DNA, 15 bp, Homo sapiens
gtcatagacactctt

SEQ ID NO: 1193808 - DNA, 15 bp, Homo sapiens
agtcatagacactct

SEQ ID NO: 1193809 - DNA, 15 bp, Homo sapiens
aagtcatagacactc

SEQ ID NO: 1193810 - DNA, 15 bp, Homo sapiens
taagtcatagacact

SEQ ID NO: 1193811 - DNA, 15 bp, Homo sapiens
ataagtcatagacac

SEQ ID NO: 1193812 - DNA, 15 bp, Homo sapiens
aataagtcatagaca

SEQ ID NO: 1193813 - DNA, 15 bp, Homo sapiens
aaataagtcatagac

SEQ ID NO: 1193814 - DNA, 15 bp, Homo sapiens
gaaataagtcataga

SEQ ID NO: 1193815 - DNA, 15 bp, Homo sapiens
ggaaataagtcatag

SEQ ID NO: 1193816 - DNA, 15 bp, Homo sapiens
aggaaataagtcata

SEQ ID NO: 1193817 - DNA, 15 bp, Homo sapiens
aaggaaataagtcat

SEQ ID NO: 1193818 - DNA, 15 bp, Homo sapiens
gaaggaaataagtca

SEQ ID NO: 1193819 - DNA, 15 bp, Homo sapiens
tgaaggaaataagtc

SEQ ID NO: 1193820 - DNA, 15 bp, Homo sapiens
gtgaaggaaataagt

SEQ ID NO: 1193821 - DNA, 15 bp, Homo sapiens
agtgaaggaaataag

SEQ ID NO: 1193822 - DNA, 15 bp, Homo sapiens
aagtgaaggaaataa

SEQ ID NO: 1193823 - DNA, 15 bp, Homo sapiens
taagtgaaggaaata

SEQ ID NO: 1193824 - DNA, 15 bp, Homo sapiens
ttaagtgaaggaaat

SEQ ID NO: 1193825 - DNA, 15 bp, Homo sapiens
attaagtgaaggaaa

SEQ ID NO: 1193826 - DNA, 15 bp, Homo sapiens
aattaagtgaaggaa

SEQ ID NO: 1193827 - DNA, 15 bp, Homo sapiens
gaattaagtgaagga

SEQ ID NO: 1193828 - DNA, 15 bp, Homo sapiens
agaattaagtgaagg

SEQ ID NO: 1193829 - DNA, 15 bp, Homo sapiens
tagaattaagtgaag

SEQ ID NO: 1193830 - DNA, 15 bp, Homo sapiens
atagaattaagtgaa

SEQ ID NO: 1193831 - DNA, 15 bp, Homo sapiens
gatagaattaagtga

SEQ ID NO: 1193832 - DNA, 15 bp, Homo sapiens
ggatagaattaagtg

SEQ ID NO: 1193833 - DNA, 15 bp, Homo sapiens
tggatagaattaagt

SEQ ID NO: 1193834 - DNA, 15 bp, Homo sapiens
gtggatagaattaag

SEQ ID NO: 1193835 - DNA, 15 bp, Homo sapiens
tgtggatagaattaa

SEQ ID NO: 1193836 - DNA, 15 bp, Homo sapiens
ctgtggatagaatta

SEQ ID NO: 1193837 - DNA, 15 bp, Homo sapiens
actgtggatagaatt

SEQ ID NO: 1193838 - DNA, 15 bp, Homo sapiens
gactgtggatagaat

SEQ ID NO: 1193839 - DNA, 15 bp, Homo sapiens
tgactgtggatagaa

SEQ ID NO: 1193840 - DNA, 15 bp, Homo sapiens
ttgactgtggataga

SEQ ID NO: 1193841 - DNA, 15 bp, Homo sapiens
tttgactgtggatag

SEQ ID NO: 1193842 - DNA, 15 bp, Homo sapiens
ttttgactgtggata

SEQ ID NO: 1193843 - DNA, 15 bp, Homo sapiens
tttttgactgtggat

SEQ ID NO: 1193844 - DNA, 15 bp, Homo sapiens
atttttgactgtgga

SEQ ID NO: 1193845 - DNA, 15 bp, Homo sapiens
gatttttgactgtgg

SEQ ID NO: 1193846 - DNA, 15 bp, Homo sapiens
ggatttttgactgtg

SEQ ID NO: 1193847 - DNA, 15 bp, Homo sapiens
gggatttttgactgt

SEQ ID NO: 1193848 - DNA, 15 bp, Homo sapiens
ggggatttttgactg

SEQ ID NO: 1193849 - DNA, 15 bp, Homo sapiens
gggggatttttgact

SEQ ID NO: 1193850 - DNA, 15 bp, Homo sapiens
tgggggatttttgac

SEQ ID NO: 1193851 - DNA, 15 bp, Homo sapiens
ttgggggatttttga

SEQ ID NO: 1193852 - DNA, 15 bp, Homo sapiens
cttgggggatttttg

SEQ ID NO: 1193853 - DNA, 15 bp, Homo sapiens
ccttgggggattttt

SEQ ID NO: 1193854 - DNA, 15 bp, Homo sapiens
tccttgggggatttt

SEQ ID NO: 1193855 - DNA, 15 bp, Homo sapiens
ctccttgggggattt

SEQ ID NO: 1193856 - DNA, 15 bp, Homo sapiens
cctccttgggggatt

SEQ ID NO: 1193857 - DNA, 15 bp, Homo sapiens
tcctccttgggggat

SEQ ID NO: 1193858 - DNA, 15 bp, Homo sapiens
ttcctccttggggga

SEQ ID NO: 1193859 - DNA, 15 bp, Homo sapiens
tttcctccttggggg

SEQ ID NO: 1193860 - DNA, 15 bp, Homo sapiens
ctttcctccttgggg

SEQ ID NO: 1193861 - DNA, 15 bp, Homo sapiens
gctttcctccttggg

SEQ ID NO: 1193862 - DNA, 15 bp, Homo sapiens
agctttcctccttgg

SEQ ID NO: 1193863 - DNA, 15 bp, Homo sapiens
cagctttcctccttg

SEQ ID NO: 1193864 - DNA, 15 bp, Homo sapiens
tcagctttcctcctt

SEQ ID NO: 1193865 - DNA, 15 bp, Homo sapiens
ttcagctttcctcct

SEQ ID NO: 1193866 - DNA, 15 bp, Homo sapiens
tttcagctttcctcc

SEQ ID NO: 1193867 - DNA, 15 bp, Homo sapiens
ctttcagctttcctc

SEQ ID NO: 1193868 - DNA, 15 bp, Homo sapiens
tctttcagctttcct

SEQ ID NO: 1193869 - DNA, 15 bp, Homo sapiens
atctttcagctttcc

SEQ ID NO: 1193870 - DNA, 15 bp, Homo sapiens
catctttcagctttc

SEQ ID NO: 1193871 - DNA, 15 bp, Homo sapiens
gcatctttcagcttt

SEQ ID NO: 1193872 - DNA, 15 bp, Homo sapiens
tgcatctttcagctt

SEQ ID NO: 1193873 - DNA, 15 bp, Homo sapiens
gtgcatctttcagct

SEQ ID NO: 1193874 - DNA, 15 bp, Homo sapiens
agtgcatctttcagc

SEQ ID NO: 1193875 - DNA, 15 bp, Homo sapiens
cagtgcatctttcag

SEQ ID NO: 1193876 - DNA, 15 bp, Homo sapiens
gcagtgcatctttca

SEQ ID NO: 1193877 - DNA, 15 bp, Homo sapiens
ggcagtgcatctttc

SEQ ID NO: 1193878 - DNA, 15 bp, Homo sapiens
tggcagtgcatcttt

SEQ ID NO: 1193879 - DNA, 15 bp, Homo sapiens
atggcagtgcatctt

SEQ ID NO: 1193880 - DNA, 15 bp, Homo sapiens
tatggcagtgcatct

SEQ ID NO: 1193881 - DNA, 15 bp, Homo sapiens
atatggcagtgcatc

SEQ ID NO: 1193882 - DNA, 15 bp, Homo sapiens
aatatggcagtgcat

SEQ ID NO: 1193883 - DNA, 15 bp, Homo sapiens
taatatggcagtgca

SEQ ID NO: 1193884 - DNA, 15 bp, Homo sapiens
ataatatggcagtgc

SEQ ID NO: 1193885 - DNA, 15 bp, Homo sapiens
gataatatggcagtg

SEQ ID NO: 1193886 - DNA, 15 bp, Homo sapiens
agataatatggcagt

SEQ ID NO: 1193887 - DNA, 15 bp, Homo sapiens
aagataatatggcag

SEQ ID NO: 1193888 - DNA, 15 bp, Homo sapiens
aaagataatatggca

SEQ ID NO: 1193889 - DNA, 15 bp, Homo sapiens
gaaagataatatggc

SEQ ID NO: 1193890 - DNA, 15 bp, Homo sapiens
agaaagataatatgg

SEQ ID NO: 1193891 - DNA, 15 bp, Homo sapiens
aagaaagataatatg

SEQ ID NO: 1193892 - DNA, 15 bp, Homo sapiens
taagaaagataatat

SEQ ID NO: 1193893 - DNA, 15 bp, Homo sapiens
ttaagaaagataata

SEQ ID NO: 1193894 - DNA, 15 bp, Homo sapiens
gttaagaaagataat

SEQ ID NO: 1193895 - DNA, 15 bp, Homo sapiens
agttaagaaagataa

SEQ ID NO: 1193896 - DNA, 15 bp, Homo sapiens
aagttaagaaagata

SEQ ID NO: 1193897 - DNA, 15 bp, Homo sapiens
aaagttaagaaagat

SEQ ID NO: 1193898 - DNA, 15 bp, Homo sapiens
aaaagttaagaaaga

SEQ ID NO: 1193899 - DNA, 15 bp, Homo sapiens
aaaaagttaagaaag

SEQ ID NO: 1193900 - DNA, 15 bp, Homo sapiens
gaaaaagttaagaaa

SEQ ID NO: 1193901 - DNA, 15 bp, Homo sapiens
ggaaaaagttaagaa

SEQ ID NO: 1193902 - DNA, 15 bp, Homo sapiens
tggaaaaagttaaga

SEQ ID NO: 1193903 - DNA, 15 bp, Homo sapiens
ttggaaaaagttaag

SEQ ID NO: 1193904 - DNA, 15 bp, Homo sapiens
gttggaaaaagttaa

SEQ ID NO: 1193905 - DNA, 15 bp, Homo sapiens
tgttggaaaaagtta

SEQ ID NO: 1193906 - DNA, 15 bp, Homo sapiens
gtgttggaaaaagtt

SEQ ID NO: 1193907 - DNA, 15 bp, Homo sapiens
tgtgttggaaaaagt

SEQ ID NO: 1193908 - DNA, 15 bp, Homo sapiens
atgtgttggaaaaag

SEQ ID NO: 1193909 - DNA, 15 bp, Homo sapiens
tatgtgttggaaaaa

SEQ ID NO: 1193910 - DNA, 15 bp, Homo sapiens
ttatgtgttggaaaa

SEQ ID NO: 1193911 - DNA, 15 bp, Homo sapiens
attatgtgttggaaa

SEQ ID NO: 1193912 - DNA, 15 bp, Homo sapiens
gattatgtgttggaa

SEQ ID NO: 1193913 - DNA, 15 bp, Homo sapiens
ggattatgtgttgga

SEQ ID NO: 1193914 - DNA, 15 bp, Homo sapiens
aggattatgtgttgg

SEQ ID NO: 1193915 - DNA, 15 bp, Homo sapiens
gaggattatgtgttg

SEQ ID NO: 1193916 - DNA, 15 bp, Homo sapiens
agaggattatgtgtt

SEQ ID NO: 1193917 - DNA, 15 bp, Homo sapiens
gagaggattatgtgt

SEQ ID NO: 1193918 - DNA, 15 bp, Homo sapiens
ggagaggattatgtg

SEQ ID NO: 1193919 - DNA, 15 bp, Homo sapiens
tggagaggattatgt

SEQ ID NO: 1193920 - DNA, 15 bp, Homo sapiens
ttggagaggattatg

SEQ ID NO: 1193921 - DNA, 15 bp, Homo sapiens
gttggagaggattat

SEQ ID NO: 1193922 - DNA, 15 bp, Homo sapiens
agttggagaggatta

SEQ ID NO: 1193923 - DNA, 15 bp, Homo sapiens
cagttggagaggatt

SEQ ID NO: 1193924 - DNA, 15 bp, Homo sapiens
ccagttggagaggat

SEQ ID NO: 1193925 - DNA, 15 bp, Homo sapiens
tccagttggagagga

SEQ ID NO: 1193926 - DNA, 15 bp, Homo sapiens
atccagttggagagg

SEQ ID NO: 1193927 - DNA, 15 bp, Homo sapiens
aatccagttggagag

SEQ ID NO: 1193928 - DNA, 15 bp, Homo sapiens
taatccagttggaga

SEQ ID NO: 1193929 - DNA, 15 bp, Homo sapiens
ataatccagttggag

SEQ ID NO: 1193930 - DNA, 15 bp, Homo sapiens
tataatccagttgga

SEQ ID NO: 1193931 - DNA, 15 bp, Homo sapiens
ttataatccagttgg

SEQ ID NO: 1193932 - DNA, 15 bp, Homo sapiens
tttataatccagttg

SEQ ID NO: 1193933 - DNA, 15 bp, Homo sapiens
atttataatccagtt

SEQ ID NO: 1193934 - DNA, 15 bp, Homo sapiens
tatttataatccagt

SEQ ID NO: 1193935 - DNA, 15 bp, Homo sapiens
ttatttataatccag

SEQ ID NO: 1193936 - DNA, 15 bp, Homo sapiens
tttatttataatcca

SEQ ID NO: 1193937 - DNA, 15 bp, Homo sapiens
atttatttataatcc

SEQ ID NO: 1193938 - DNA, 15 bp, Homo sapiens
aatttatttataatc

SEQ ID NO: 1193939 - DNA, 15 bp, Homo sapiens
caatttatttataat

SEQ ID NO: 1193940 - DNA, 15 bp, Homo sapiens
tcaatttatttataa

SEQ ID NO: 1193941 - DNA, 15 bp, Homo sapiens
ttcaatttatttata

SEQ ID NO: 1193942 - DNA, 15 bp, Homo sapiens
tttcaatttatttat

SEQ ID NO: 1193943 - DNA, 15 bp, Homo sapiens
ttttcaatttattta

SEQ ID NO: 1193944 - DNA, 15 bp, Homo sapiens
attttcaatttattt

SEQ ID NO: 1193945 - DNA, 15 bp, Homo sapiens
tattttcaatttatt

SEQ ID NO: 1193946 - DNA, 15 bp, Homo sapiens
ttattttcaatttat

SEQ ID NO: 1193947 - DNA, 15 bp, Homo sapiens
gttattttcaattta

SEQ ID NO: 1193948 - DNA, 15 bp, Homo sapiens
agttattttcaattt

SEQ ID NO: 1193949 - DNA, 15 bp, Homo sapiens
gagttattttcaatt

SEQ ID NO: 1193950 - DNA, 15 bp, Homo sapiens
tgagttattttcaat

SEQ ID NO: 1193951 - DNA, 15 bp, Homo sapiens
atgagttattttcaa

SEQ ID NO: 1193952 - DNA, 15 bp, Homo sapiens
aatgagttattttca

SEQ ID NO: 1193953 - DNA, 15 bp, Homo sapiens
taatgagttattttc

SEQ ID NO: 1193954 - DNA, 15 bp, Homo sapiens
ataatgagttatttt

SEQ ID NO: 1193955 - DNA, 15 bp, Homo sapiens
tataatgagttattt

SEQ ID NO: 1193956 - DNA, 15 bp, Homo sapiens
gtataatgagttatt

SEQ ID NO: 1193957 - DNA, 15 bp, Homo sapiens
ggtataatgagttat

SEQ ID NO: 1193958 - DNA, 15 bp, Homo sapiens
tggtataatgagtta

SEQ ID NO: 1193959 - DNA, 15 bp, Homo sapiens
ttggtataatgagtt

SEQ ID NO: 1193960 - DNA, 15 bp, Homo sapiens
attggtataatgagt

SEQ ID NO: 1193961 - DNA, 15 bp, Homo sapiens
aattggtataatgag

SEQ ID NO: 1193962 - DNA, 15 bp, Homo sapiens
gaattggtataatga

SEQ ID NO: 1193963 - DNA, 15 bp, Homo sapiens
tgaattggtataatg

SEQ ID NO: 1193964 - DNA, 15 bp, Homo sapiens
gtgaattggtataat

SEQ ID NO: 1193965 - DNA, 15 bp, Homo sapiens
agtgaattggtataa

SEQ ID NO: 1193966 - DNA, 15 bp, Homo sapiens
tagtgaattggtata

SEQ ID NO: 1193967 - DNA, 15 bp, Homo sapiens
atagtgaattggtat

SEQ ID NO: 1193968 - DNA, 15 bp, Homo sapiens
aatagtgaattggta

SEQ ID NO: 1193969 - DNA, 15 bp, Homo sapiens
aaatagtgaattggt

SEQ ID NO: 1193970 - DNA, 15 bp, Homo sapiens
aaaatagtgaattgg

SEQ ID NO: 1193971 - DNA, 15 bp, Homo sapiens
taaaatagtgaattg

SEQ ID NO: 1193972 - DNA, 15 bp, Homo sapiens
ataaaatagtgaatt

SEQ ID NO: 1193973 - DNA, 15 bp, Homo sapiens
aataaaatagtgaat

SEQ ID NO: 1193974 - DNA, 15 bp, Homo sapiens
aaataaaatagtgaa

SEQ ID NO: 1193975 - DNA, 15 bp, Homo sapiens
aaaataaaatagtga

SEQ ID NO: 1193976 - DNA, 15 bp, Homo sapiens
aaaaataaaatagtg

SEQ ID NO: 1193977 - DNA, 15 bp, Homo sapiens
aaaaaataaaatagt

SEQ ID NO: 1193978 - DNA, 15 bp, Homo sapiens
taaaaaataaaatag

SEQ ID NO: 1193979 - DNA, 15 bp, Homo sapiens
attaaaaaataaaat

SEQ ID NO: 1193980 - DNA, 15 bp, Homo sapiens
tcattaaaaaataaa

SEQ ID NO: 1193981 - DNA, 15 bp, Homo sapiens
ttcattaaaaaataa

SEQ ID NO: 1193982 - DNA, 15 bp, Homo sapiens
attcattaaaaaata

SEQ ID NO: 1193983 - DNA, 15 bp, Homo sapiens
aattcattaaaaaat

SEQ ID NO: 1193984 - DNA, 15 bp, Homo sapiens
taattcattaaaaaa

SEQ ID NO: 1193985 - DNA, 15 bp, Homo sapiens
ttaattcattaaaaa

SEQ ID NO: 1193986 - DNA, 15 bp, Homo sapiens
tttaattcattaaaa

SEQ ID NO: 1193987 - DNA, 15 bp, Homo sapiens
ttttaattcattaaa

SEQ ID NO: 1193988 - DNA, 15 bp, Homo sapiens
gttttaattcattaa

SEQ ID NO: 1193989 - DNA, 15 bp, Homo sapiens
agttttaattcatta

SEQ ID NO: 1193990 - DNA, 15 bp, Homo sapiens
tagttttaattcatt

SEQ ID NO: 1193991 - DNA, 15 bp, Homo sapiens
ctagttttaattcat

SEQ ID NO: 1193992 - DNA, 15 bp, Homo sapiens
tctagttttaattca

SEQ ID NO: 1193993 - DNA, 15 bp, Homo sapiens
ttctagttttaattc

SEQ ID NO: 1193994 - DNA, 15 bp, Homo sapiens
tttctagttttaatt

SEQ ID NO: 1193995 - DNA, 15 bp, Homo sapiens
ttttctagttttaat

SEQ ID NO: 1193996 - DNA, 15 bp, Homo sapiens
gttttctagttttaa

SEQ ID NO: 1193997 - DNA, 15 bp, Homo sapiens
tgttttctagtttta

SEQ ID NO: 1193998 - DNA, 15 bp, Homo sapiens
ttgttttctagtttt

SEQ ID NO: 1193999 - DNA, 15 bp, Homo sapiens
tttgttttctagttt

SEQ ID NO: 1194000 - DNA, 15 bp, Homo sapiens
atttgttttctagtt

SEQ ID NO: 1194001 - DNA, 15 bp, Homo sapiens
aatttgttttctagt

SEQ ID NO: 1194002 - DNA, 15 bp, Homo sapiens
caatttgttttctag

SEQ ID NO: 1194003 - DNA, 15 bp, Homo sapiens
tcaatttgttttcta

SEQ ID NO: 1194004 - DNA, 15 bp, Homo sapiens
atcaatttgttttct

SEQ ID NO: 1194005 - DNA, 15 bp, Homo sapiens
catcaatttgttttc

SEQ ID NO: 1194006 - DNA, 15 bp, Homo sapiens
gcatcaatttgtttt

SEQ ID NO: 1194007 - DNA, 15 bp, Homo sapiens
tgcatcaatttgttt

SEQ ID NO: 1194008 - DNA, 15 bp, Homo sapiens
ttgcatcaatttgtt

SEQ ID NO: 1194009 - DNA, 15 bp, Homo sapiens
tttgcatcaatttgt

SEQ ID NO: 1194010 - DNA, 15 bp, Homo sapiens
gtttgcatcaatttg

SEQ ID NO: 1194011 - DNA, 15 bp, Homo sapiens
ggtttgcatcaattt

SEQ ID NO: 1194012 - DNA, 15 bp, Homo sapiens
gggtttgcatcaatt

SEQ ID NO: 1194013 - DNA, 15 bp, Homo sapiens
agggtttgcatcaat

SEQ ID NO: 1194014 - DNA, 15 bp, Homo sapiens
cagggtttgcatcaa

SEQ ID NO: 1194015 - DNA, 15 bp, Homo sapiens
ccagggtttgcatca

SEQ ID NO: 1194016 - DNA, 15 bp, Homo sapiens
tccagggtttgcatc

SEQ ID NO: 1194017 - DNA, 15 bp, Homo sapiens
ttccagggtttgcat

SEQ ID NO: 1194018 - DNA, 15 bp, Homo sapiens
cttccagggtttgca

SEQ ID NO: 1194019 - DNA, 15 bp, Homo sapiens
acttccagggtttgc

SEQ ID NO: 1194020 - DNA, 15 bp, Homo sapiens
gacttccagggtttg

SEQ ID NO: 1194021 - DNA, 15 bp, Homo sapiens
tgacttccagggttt

SEQ ID NO: 1194022 - DNA, 15 bp, Homo sapiens
ctgacttccagggtt

SEQ ID NO: 1194023 - DNA, 15 bp, Homo sapiens
actgacttccagggt

SEQ ID NO: 1194024 - DNA, 15 bp, Homo sapiens
aactgacttccaggg

SEQ ID NO: 1194025 - DNA, 15 bp, Homo sapiens
caactgacttccagg

SEQ ID NO: 1194026 - DNA, 15 bp, Homo sapiens
tcaactgacttccag

SEQ ID NO: 1194027 - DNA, 15 bp, Homo sapiens
atcaactgacttcca

SEQ ID NO: 1194028 - DNA, 15 bp, Homo sapiens
aatcaactgacttcc

SEQ ID NO: 1194029 - DNA, 15 bp, Homo sapiens
taatcaactgacttc

SEQ ID NO: 1194030 - DNA, 15 bp, Homo sapiens
gtaatcaactgactt

SEQ ID NO: 1194031 - DNA, 15 bp, Homo sapiens
agtaatcaactgact

SEQ ID NO: 1194032 - DNA, 15 bp, Homo sapiens
tagtaatcaactgac

SEQ ID NO: 1194033 - DNA, 15 bp, Homo sapiens
atagtaatcaactga

SEQ ID NO: 1194034 - DNA, 15 bp, Homo sapiens
tatagtaatcaactg

SEQ ID NO: 1194035 - DNA, 15 bp, Homo sapiens
atatagtaatcaact

SEQ ID NO: 1194036 - DNA, 15 bp, Homo sapiens
tatatagtaatcaac

SEQ ID NO: 1194037 - DNA, 15 bp, Homo sapiens
gtatatagtaatcaa

SEQ ID NO: 1194038 - DNA, 15 bp, Homo sapiens
agtatatagtaatca

SEQ ID NO: 1194039 - DNA, 15 bp, Homo sapiens
tagtatatagtaatc

SEQ ID NO: 1194040 - DNA, 15 bp, Homo sapiens
gtagtatatagtaat

SEQ ID NO: 1194041 - DNA, 15 bp, Homo sapiens
tgtagtatatagtaa

SEQ ID NO: 1194042 - DNA, 15 bp, Homo sapiens
ctgtagtatatagta

SEQ ID NO: 1194043 - DNA, 15 bp, Homo sapiens
gctgtagtatatagt

SEQ ID NO: 1194044 - DNA, 15 bp, Homo sapiens
tgctgtagtatatag

SEQ ID NO: 1194045 - DNA, 15 bp, Homo sapiens
ctgctgtagtatata

SEQ ID NO: 1194046 - DNA, 15 bp, Homo sapiens
tctgctgtagtatat

SEQ ID NO: 1194047 - DNA, 15 bp, Homo sapiens
ttctgctgtagtata

SEQ ID NO: 1194048 - DNA, 15 bp, Homo sapiens
attctgctgtagtat

SEQ ID NO: 1194049 - DNA, 15 bp, Homo sapiens
cattctgctgtagta

SEQ ID NO: 1194050 - DNA, 15 bp, Homo sapiens
tcattctgctgtagt

SEQ ID NO: 1194051 - DNA, 15 bp, Homo sapiens
gtcattctgctgtag

SEQ ID NO: 1194052 - DNA, 15 bp, Homo sapiens
agtcattctgctgta

SEQ ID NO: 1194053 - DNA, 15 bp, Homo sapiens
gagtcattctgctgt

SEQ ID NO: 1194054 - DNA, 15 bp, Homo sapiens
tgagtcattctgctg

SEQ ID NO: 1194055 - DNA, 15 bp, Homo sapiens
ctgagtcattctgct

SEQ ID NO: 1194056 - DNA, 15 bp, Homo sapiens
tctgagtcattctgc

SEQ ID NO: 1194057 - DNA, 15 bp, Homo sapiens
atctgagtcattctg

SEQ ID NO: 1194058 - DNA, 15 bp, Homo sapiens
aatctgagtcattct

SEQ ID NO: 1194059 - DNA, 15 bp, Homo sapiens
aaatctgagtcattc

SEQ ID NO: 1194060 - DNA, 15 bp, Homo sapiens
gaaatctgagtcatt

SEQ ID NO: 1194061 - DNA, 15 bp, Homo sapiens
tgaaatctgagtcat

SEQ ID NO: 1194062 - DNA, 15 bp, Homo sapiens
atgaaatctgagtca

SEQ ID NO: 1194063 - DNA, 15 bp, Homo sapiens
tatgaaatctgagtc

SEQ ID NO: 1194064 - DNA, 15 bp, Homo sapiens
ctatgaaatctgagt

SEQ ID NO: 1194065 - DNA, 15 bp, Homo sapiens
tctatgaaatctgag

SEQ ID NO: 1194066 - DNA, 15 bp, Homo sapiens
ttctatgaaatctga

SEQ ID NO: 1194067 - DNA, 15 bp, Homo sapiens
tttctatgaaatctg

SEQ ID NO: 1194068 - DNA, 15 bp, Homo sapiens
ctttctatgaaatct

SEQ ID NO: 1194069 - DNA, 15 bp, Homo sapiens
cctttctatgaaatc

SEQ ID NO: 1194070 - DNA, 15 bp, Homo sapiens
tcctttctatgaaat

SEQ ID NO: 1194071 - DNA, 15 bp, Homo sapiens
ctcctttctatgaaa

SEQ ID NO: 1194072 - DNA, 15 bp, Homo sapiens
gctcctttctatgaa

SEQ ID NO: 1194073 - DNA, 15 bp, Homo sapiens
tgctcctttctatga

SEQ ID NO: 1194074 - DNA, 15 bp, Homo sapiens
ttgctcctttctatg

SEQ ID NO: 1194075 - DNA, 15 bp, Homo sapiens
gttgctcctttctat

SEQ ID NO: 1194076 - DNA, 15 bp, Homo sapiens
ggttgctcctttcta

SEQ ID NO: 1194077 - DNA, 15 bp, Homo sapiens
tggttgctcctttct

SEQ ID NO: 1194078 - DNA, 15 bp, Homo sapiens
ttggttgctcctttc

SEQ ID NO: 1194079 - DNA, 15 bp, Homo sapiens
tttggttgctccttt

SEQ ID NO: 1194080 - DNA, 15 bp, Homo sapiens
ttttggttgctcctt

SEQ ID NO: 1194081 - DNA, 15 bp, Homo sapiens
attttggttgctcct

SEQ ID NO: 1194082 - DNA, 15 bp, Homo sapiens
cattttggttgctcc

SEQ ID NO: 1194083 - DNA, 15 bp, Homo sapiens
acattttggttgctc

SEQ ID NO: 1194084 - DNA, 15 bp, Homo sapiens
gacattttggttgct

SEQ ID NO: 1194085 - DNA, 15 bp, Homo sapiens
tgacattttggttgc

SEQ ID NO: 1194086 - DNA, 15 bp, Homo sapiens
gtgacattttggttg

SEQ ID NO: 1194087 - DNA, 15 bp, Homo sapiens
tgtgacattttggtt

SEQ ID NO: 1194088 - DNA, 15 bp, Homo sapiens
ttgtgacattttggt

SEQ ID NO: 1194089 - DNA, 15 bp, Homo sapiens
gttgtgacattttgg

SEQ ID NO: 1194090 - DNA, 15 bp, Homo sapiens
ggttgtgacattttg

SEQ ID NO: 1194091 - DNA, 15 bp, Homo sapiens
gggttgtgacatttt

SEQ ID NO: 1194092 - DNA, 15 bp, Homo sapiens
tgggttgtgacattt

SEQ ID NO: 1194093 - DNA, 15 bp, Homo sapiens
ttgggttgtgacatt

SEQ ID NO: 1194094 - DNA, 15 bp, Homo sapiens
tttgggttgtgacat

SEQ ID NO: 1194095 - DNA, 15 bp, Homo sapiens
ttttgggttgtgaca

SEQ ID NO: 1194096 - DNA, 15 bp, Homo sapiens
gttttgggttgtgac

SEQ ID NO: 1194097 - DNA, 15 bp, Homo sapiens
agttttgggttgtga

SEQ ID NO: 1194098 - DNA, 15 bp, Homo sapiens
aagttttgggttgtg

SEQ ID NO: 1194099 - DNA, 15 bp, Homo sapiens
aaagttttgggttgt

SEQ ID NO: 1194100 - DNA, 15 bp, Homo sapiens
taaagttttgggttg

SEQ ID NO: 1194101 - DNA, 15 bp, Homo sapiens
gtaaagttttgggtt

SEQ ID NO: 1194102 - DNA, 15 bp, Homo sapiens
tgtaaagttttgggt

SEQ ID NO: 1194103 - DNA, 15 bp, Homo sapiens
ttgtaaagttttggg

SEQ ID NO: 1194104 - DNA, 15 bp, Homo sapiens
cttgtaaagttttgg

SEQ ID NO: 1194105 - DNA, 15 bp, Homo sapiens
gcttgtaaagttttg

SEQ ID NO: 1194106 - DNA, 15 bp, Homo sapiens
agcttgtaaagtttt

SEQ ID NO: 1194107 - DNA, 15 bp, Homo sapiens
aagcttgtaaagttt

SEQ ID NO: 1194108 - DNA, 15 bp, Homo sapiens
aaagcttgtaaagtt

SEQ ID NO: 1194109 - DNA, 15 bp, Homo sapiens
caaagcttgtaaagt

SEQ ID NO: 1194110 - DNA, 15 bp, Homo sapiens
gcaaagcttgtaaag

SEQ ID NO: 1194111 - DNA, 15 bp, Homo sapiens
agcaaagcttgtaaa

SEQ ID NO: 1194112 - DNA, 15 bp, Homo sapiens
aagcaaagcttgtaa

SEQ ID NO: 1194113 - DNA, 15 bp, Homo sapiens
gaagcaaagcttgta

SEQ ID NO: 1194114 - DNA, 15 bp, Homo sapiens
tgaagcaaagcttgt

SEQ ID NO: 1194115 - DNA, 15 bp, Homo sapiens
ctgaagcaaagcttg

SEQ ID NO: 1194116 - DNA, 15 bp, Homo sapiens
tctgaagcaaagctt

SEQ ID NO: 1194117 - DNA, 15 bp, Homo sapiens
ttctgaagcaaagct

SEQ ID NO: 1194118 - DNA, 15 bp, Homo sapiens
attctgaagcaaagc

SEQ ID NO: 1194119 - DNA, 15 bp, Homo sapiens
aattctgaagcaaag

SEQ ID NO: 1194120 - DNA, 15 bp, Homo sapiens
taattctgaagcaaa

SEQ ID NO: 1194121 - DNA, 15 bp, Homo sapiens
ctaattctgaagcaa

SEQ ID NO: 1194122 - DNA, 15 bp, Homo sapiens
tctaattctgaagca

SEQ ID NO: 1194123 - DNA, 15 bp, Homo sapiens
atctaattctgaagc

SEQ ID NO: 1194124 - DNA, 15 bp, Homo sapiens
aatctaattctgaag

SEQ ID NO: 1194125 - DNA, 15 bp, Homo sapiens
caatctaattctgaa

SEQ ID NO: 1194126 - DNA, 15 bp, Homo sapiens
gcaatctaattctga

SEQ ID NO: 1194127 - DNA, 15 bp, Homo sapiens
agcaatctaattctg

SEQ ID NO: 1194128 - DNA, 15 bp, Homo sapiens
aagcaatctaattct

SEQ ID NO: 1194129 - DNA, 15 bp, Homo sapiens
aaagcaatctaattc

SEQ ID NO: 1194130 - DNA, 15 bp, Homo sapiens
taaagcaatctaatt

SEQ ID NO: 1194131 - DNA, 15 bp, Homo sapiens
ataaagcaatctaat

SEQ ID NO: 1194132 - DNA, 15 bp, Homo sapiens
tataaagcaatctaa

SEQ ID NO: 1194133 - DNA, 15 bp, Homo sapiens
ttataaagcaatcta

SEQ ID NO: 1194134 - DNA, 15 bp, Homo sapiens
attataaagcaatct

SEQ ID NO: 1194135 - DNA, 15 bp, Homo sapiens
aattataaagcaatc

SEQ ID NO: 1194136 - DNA, 15 bp, Homo sapiens
gaattataaagcaat

SEQ ID NO: 1194137 - DNA, 15 bp, Homo sapiens
agaattataaagcaa

SEQ ID NO: 1194138 - DNA, 15 bp, Homo sapiens
aagaattataaagca

SEQ ID NO: 1194139 - DNA, 15 bp, Homo sapiens
caagaattataaagc

SEQ ID NO: 1194140 - DNA, 15 bp, Homo sapiens
tcaagaattataaag

SEQ ID NO: 1194141 - DNA, 15 bp, Homo sapiens
ttcaagaattataaa

SEQ ID NO: 1194142 - DNA, 15 bp, Homo sapiens
attcaagaattataa

SEQ ID NO: 1194143 - DNA, 15 bp, Homo sapiens
cattcaagaattata

SEQ ID NO: 1194144 - DNA, 15 bp, Homo sapiens
tcattcaagaattat

SEQ ID NO: 1194145 - DNA, 15 bp, Homo sapiens
ctcattcaagaatta

SEQ ID NO: 1194146 - DNA, 15 bp, Homo sapiens
cctcattcaagaatt

SEQ ID NO: 1194147 - DNA, 15 bp, Homo sapiens
gcctcattcaagaat

SEQ ID NO: 1194148 - DNA, 15 bp, Homo sapiens
tgcctcattcaagaa

SEQ ID NO: 1194149 - DNA, 15 bp, Homo sapiens
ttgcctcattcaaga

SEQ ID NO: 1194150 - DNA, 15 bp, Homo sapiens
attgcctcattcaag

SEQ ID NO: 1194151 - DNA, 15 bp, Homo sapiens
aattgcctcattcaa

SEQ ID NO: 1194152 - DNA, 15 bp, Homo sapiens
aaattgcctcattca

SEQ ID NO: 1194153 - DNA, 15 bp, Homo sapiens
gaaattgcctcattc

SEQ ID NO: 1194154 - DNA, 15 bp, Homo sapiens
tgaaattgcctcatt

SEQ ID NO: 1194155 - DNA, 15 bp, Homo sapiens
ttgaaattgcctcat

SEQ ID NO: 1194156 - DNA, 15 bp, Homo sapiens
cttgaaattgcctca

SEQ ID NO: 1194157 - DNA, 15 bp, Homo sapiens
tcttgaaattgcctc

SEQ ID NO: 1194158 - DNA, 15 bp, Homo sapiens
atcttgaaattgcct

SEQ ID NO: 1194159 - DNA, 15 bp, Homo sapiens
tatcttgaaattgcc

SEQ ID NO: 1194160 - DNA, 15 bp, Homo sapiens
atatcttgaaattgc

SEQ ID NO: 1194161 - DNA, 15 bp, Homo sapiens
aatatcttgaaattg

SEQ ID NO: 1194162 - DNA, 15 bp, Homo sapiens
aaatatcttgaaatt

SEQ ID NO: 1194163 - DNA, 15 bp, Homo sapiens
caaatatcttgaaat

SEQ ID NO: 1194164 - DNA, 15 bp, Homo sapiens
acaaatatcttgaaa

SEQ ID NO: 1194165 - DNA, 15 bp, Homo sapiens
tacaaatatcttgaa

SEQ ID NO: 1194166 - DNA, 15 bp, Homo sapiens
ttacaaatatcttga

SEQ ID NO: 1194167 - DNA, 15 bp, Homo sapiens
tttacaaatatcttg

SEQ ID NO: 1194168 - DNA, 15 bp, Homo sapiens
ttttacaaatatctt

SEQ ID NO: 1194169 - DNA, 15 bp, Homo sapiens
cttttacaaatatct

SEQ ID NO: 1194170 - DNA, 15 bp, Homo sapiens
tcttttacaaatatc

SEQ ID NO: 1194171 - DNA, 15 bp, Homo sapiens
ttcttttacaaatat

SEQ ID NO: 1194172 - DNA, 15 bp, Homo sapiens
gttcttttacaaata

SEQ ID NO: 1194173 - DNA, 15 bp, Homo sapiens
tgttcttttacaaat

SEQ ID NO: 1194174 - DNA, 15 bp, Homo sapiens
ctgttcttttacaaa

SEQ ID NO: 1194175 - DNA, 15 bp, Homo sapiens
actgttcttttacaa

SEQ ID NO: 1194176 - DNA, 15 bp, Homo sapiens
tactgttcttttaca

SEQ ID NO: 1194177 - DNA, 15 bp, Homo sapiens
ttactgttcttttac

SEQ ID NO: 1194178 - DNA, 15 bp, Homo sapiens
tttactgttctttta

SEQ ID NO: 1194179 - DNA, 15 bp, Homo sapiens
gtttactgttctttt

SEQ ID NO: 1194180 - DNA, 15 bp, Homo sapiens
tgtttactgttcttt

SEQ ID NO: 1194181 - DNA, 15 bp, Homo sapiens
atgtttactgttctt

SEQ ID NO: 1194182 - DNA, 15 bp, Homo sapiens
aatgtttactgttct

SEQ ID NO: 1194183 - DNA, 15 bp, Homo sapiens
caatgtttactgttc

SEQ ID NO: 1194184 - DNA, 15 bp, Homo sapiens
ccaatgtttactgtt

SEQ ID NO: 1194185 - DNA, 15 bp, Homo sapiens
accaatgtttactgt

SEQ ID NO: 1194186 - DNA, 15 bp, Homo sapiens
taccaatgtttactg

SEQ ID NO: 1194187 - DNA, 15 bp, Homo sapiens
ttaccaatgtttact

SEQ ID NO: 1194188 - DNA, 15 bp, Homo sapiens
cttaccaatgtttac

SEQ ID NO: 1194189 - DNA, 15 bp, Homo sapiens
tcttaccaatgttta

SEQ ID NO: 1194190 - DNA, 15 bp, Homo sapiens
ttcttaccaatgttt

SEQ ID NO: 1194191 - DNA, 15 bp, Homo sapiens
attcttaccaatgtt

SEQ ID NO: 1194192 - DNA, 15 bp, Homo sapiens
cattcttaccaatgt

SEQ ID NO: 1194193 - DNA, 15 bp, Homo sapiens
tcattcttaccaatg

SEQ ID NO: 1194194 - DNA, 15 bp, Homo sapiens
ctcattcttaccaat

SEQ ID NO: 1194195 - DNA, 15 bp, Homo sapiens
gctcattcttaccaa

SEQ ID NO: 1194196 - DNA, 15 bp, Homo sapiens
agctcattcttacca

SEQ ID NO: 1194197 - DNA, 15 bp, Homo sapiens
aagctcattcttacc

SEQ ID NO: 1194198 - DNA, 15 bp, Homo sapiens
aaagctcattcttac

SEQ ID NO: 1194199 - DNA, 15 bp, Homo sapiens
gaaagctcattctta

SEQ ID NO: 1194200 - DNA, 15 bp, Homo sapiens
tgaaagctcattctt

SEQ ID NO: 1194201 - DNA, 15 bp, Homo sapiens
ttgaaagctcattct

SEQ ID NO: 1194202 - DNA, 15 bp, Homo sapiens
gttgaaagctcattc

SEQ ID NO: 1194203 - DNA, 15 bp, Homo sapiens
agttgaaagctcatt

SEQ ID NO: 1194204 - DNA, 15 bp, Homo sapiens
gagttgaaagctcat

SEQ ID NO: 1194205 - DNA, 15 bp, Homo sapiens
tgagttgaaagctca

SEQ ID NO: 1194206 - DNA, 15 bp, Homo sapiens
atgagttgaaagctc

SEQ ID NO: 1194207 - DNA, 15 bp, Homo sapiens
tatgagttgaaagct

SEQ ID NO: 1194208 - DNA, 15 bp, Homo sapiens
ctatgagttgaaagc

SEQ ID NO: 1194209 - DNA, 15 bp, Homo sapiens
cctatgagttgaaag

SEQ ID NO: 1194210 - DNA, 15 bp, Homo sapiens
gcctatgagttgaaa

SEQ ID NO: 1194211 - DNA, 15 bp, Homo sapiens
agcctatgagttgaa

SEQ ID NO: 1194212 - DNA, 15 bp, Homo sapiens
aagcctatgagttga

SEQ ID NO: 1194213 - DNA, 15 bp, Homo sapiens
taagcctatgagttg

SEQ ID NO: 1194214 - DNA, 15 bp, Homo sapiens
ataagcctatgagtt

SEQ ID NO: 1194215 - DNA, 15 bp, Homo sapiens
aataagcctatgagt

SEQ ID NO: 1194216 - DNA, 15 bp, Homo sapiens
aaataagcctatgag

SEQ ID NO: 1194217 - DNA, 15 bp, Homo sapiens
gaaataagcctatga

SEQ ID NO: 1194218 - DNA, 15 bp, Homo sapiens
ggaaataagcctatg

SEQ ID NO: 1194219 - DNA, 15 bp, Homo sapiens
tggaaataagcctat

SEQ ID NO: 1194220 - DNA, 15 bp, Homo sapiens
ttggaaataagccta

SEQ ID NO: 1194221 - DNA, 15 bp, Homo sapiens
attggaaataagcct

SEQ ID NO: 1194222 - DNA, 15 bp, Homo sapiens
aattggaaataagcc

SEQ ID NO: 1194223 - DNA, 15 bp, Homo sapiens
aaattggaaataagc

SEQ ID NO: 1194224 - DNA, 15 bp, Homo sapiens
taaattggaaataag

SEQ ID NO: 1194225 - DNA, 15 bp, Homo sapiens
ttaaattggaaataa

SEQ ID NO: 1194226 - DNA, 15 bp, Homo sapiens
attaaattggaaata

SEQ ID NO: 1194227 - DNA, 15 bp, Homo sapiens
aattaaattggaaat

SEQ ID NO: 1194228 - DNA, 15 bp, Homo sapiens
caattaaattggaaa

SEQ ID NO: 1194229 - DNA, 15 bp, Homo sapiens
tcaattaaattggaa

SEQ ID NO: 1194230 - DNA, 15 bp, Homo sapiens
gtcaattaaattgga

SEQ ID NO: 1194231 - DNA, 15 bp, Homo sapiens
ggtcaattaaattgg

SEQ ID NO: 1194232 - DNA, 15 bp, Homo sapiens
tggtcaattaaattg

SEQ ID NO: 1194233 - DNA, 15 bp, Homo sapiens
atggtcaattaaatt

SEQ ID NO: 1194234 - DNA, 15 bp, Homo sapiens
tatggtcaattaaat

SEQ ID NO: 1194235 - DNA, 15 bp, Homo sapiens
gtatggtcaattaaa

SEQ ID NO: 1194236 - DNA, 15 bp, Homo sapiens
agtatggtcaattaa

SEQ ID NO: 1194237 - DNA, 15 bp, Homo sapiens
cagtatggtcaatta

SEQ ID NO: 1194238 - DNA, 15 bp, Homo sapiens
ccagtatggtcaatt

SEQ ID NO: 1194239 - DNA, 15 bp, Homo sapiens
tccagtatggtcaat

SEQ ID NO: 1194240 - DNA, 15 bp, Homo sapiens
atccagtatggtcaa

SEQ ID NO: 1194241 - DNA, 15 bp, Homo sapiens
tatccagtatggtca

SEQ ID NO: 1194242 - DNA, 15 bp, Homo sapiens
gtatccagtatggtc

SEQ ID NO: 1194243 - DNA, 15 bp, Homo sapiens
agtatccagtatggt

SEQ ID NO: 1194244 - DNA, 15 bp, Homo sapiens
aagtatccagtatgg

SEQ ID NO: 1194245 - DNA, 15 bp, Homo sapiens
taagtatccagtatg

SEQ ID NO: 1194246 - DNA, 15 bp, Homo sapiens
ctaagtatccagtat

SEQ ID NO: 1194247 - DNA, 15 bp, Homo sapiens
cctaagtatccagta

SEQ ID NO: 1194248 - DNA, 15 bp, Homo sapiens
acctaagtatccagt

SEQ ID NO: 1194249 - DNA, 15 bp, Homo sapiens
gacctaagtatccag

SEQ ID NO: 1194250 - DNA, 15 bp, Homo sapiens
tgacctaagtatcca

SEQ ID NO: 1194251 - DNA, 15 bp, Homo sapiens
ttgacctaagtatcc

SEQ ID NO: 1194252 - DNA, 15 bp, Homo sapiens
tttgacctaagtatc

SEQ ID NO: 1194253 - DNA, 15 bp, Homo sapiens
atttgacctaagtat

SEQ ID NO: 1194254 - DNA, 15 bp, Homo sapiens
aatttgacctaagta

SEQ ID NO: 1194255 - DNA, 15 bp, Homo sapiens
aaatttgacctaagt

SEQ ID NO: 1194256 - DNA, 15 bp, Homo sapiens
gaaatttgacctaag

SEQ ID NO: 1194257 - DNA, 15 bp, Homo sapiens
agaaatttgacctaa

SEQ ID NO: 1194258 - DNA, 15 bp, Homo sapiens
cagaaatttgaccta

SEQ ID NO: 1194259 - DNA, 15 bp, Homo sapiens
acagaaatttgacct

SEQ ID NO: 1194260 - DNA, 15 bp, Homo sapiens
aacagaaatttgacc

SEQ ID NO: 1194261 - DNA, 15 bp, Homo sapiens
gaacagaaatttgac

SEQ ID NO: 1194262 - DNA, 15 bp, Homo sapiens
agaacagaaatttga

SEQ ID NO: 1194263 - DNA, 15 bp, Homo sapiens
gagaacagaaatttg

SEQ ID NO: 1194264 - DNA, 15 bp, Homo sapiens
agagaacagaaattt

SEQ ID NO: 1194265 - DNA, 15 bp, Homo sapiens
gagagaacagaaatt

SEQ ID NO: 1194266 - DNA, 15 bp, Homo sapiens
agagagaacagaaat

SEQ ID NO: 1194267 - DNA, 15 bp, Homo sapiens
aagagagaacagaaa

SEQ ID NO: 1194268 - DNA, 15 bp, Homo sapiens
gaagagagaacagaa

SEQ ID NO: 1194269 - DNA, 15 bp, Homo sapiens
ggaagagagaacaga

SEQ ID NO: 1194270 - DNA, 15 bp, Homo sapiens
gggaagagagaacag

SEQ ID NO: 1194271 - DNA, 15 bp, Homo sapiens
ggggaagagagaaca

SEQ ID NO: 1194272 - DNA, 15 bp, Homo sapiens
tggggaagagagaac

SEQ ID NO: 1194273 - DNA, 15 bp, Homo sapiens
ttggggaagagagaa

SEQ ID NO: 1194274 - DNA, 15 bp, Homo sapiens
tttggggaagagaga

SEQ ID NO: 1194275 - DNA, 15 bp, Homo sapiens
atttggggaagagag

SEQ ID NO: 1194276 - DNA, 15 bp, Homo sapiens
tatttggggaagaga

SEQ ID NO: 1194277 - DNA, 15 bp, Homo sapiens
ttatttggggaagag

SEQ ID NO: 1194278 - DNA, 15 bp, Homo sapiens
attatttggggaaga

SEQ ID NO: 1194279 - DNA, 15 bp, Homo sapiens
tattatttggggaag

SEQ ID NO: 1194280 - DNA, 15 bp, Homo sapiens
atattatttggggaa

SEQ ID NO: 1194281 - DNA, 15 bp, Homo sapiens
aatattatttgggga

SEQ ID NO: 1194282 - DNA, 15 bp, Homo sapiens
ttaatattatttggg

SEQ ID NO: 1194283 - DNA, 15 bp, Homo sapiens
tttaatattatttgg

SEQ ID NO: 1194284 - DNA, 15 bp, Homo sapiens
ctttaatattatttg

SEQ ID NO: 1194285 - DNA, 15 bp, Homo sapiens
actttaatattattt

SEQ ID NO: 1194286 - DNA, 15 bp, Homo sapiens
tactttaatattatt

SEQ ID NO: 1194287 - DNA, 15 bp, Homo sapiens
atactttaatattat

SEQ ID NO: 1194288 - DNA, 15 bp, Homo sapiens
aatactttaatatta

SEQ ID NO: 1194289 - DNA, 15 bp, Homo sapiens
taatactttaatatt

SEQ ID NO: 1194290 - DNA, 15 bp, Homo sapiens
ataatactttaatat

SEQ ID NO: 1194291 - DNA, 15 bp, Homo sapiens
aataatactttaata

SEQ ID NO: 1194292 - DNA, 15 bp, Homo sapiens
aaataatactttaat

SEQ ID NO: 1194293 - DNA, 15 bp, Homo sapiens
caaataatactttaa

SEQ ID NO: 1194294 - DNA, 15 bp, Homo sapiens
tcaaataatacttta

SEQ ID NO: 1194295 - DNA, 15 bp, Homo sapiens
ttcaaataatacttt

SEQ ID NO: 1194296 - DNA, 15 bp, Homo sapiens
gttcaaataatactt

SEQ ID NO: 1194297 - DNA, 15 bp, Homo sapiens
agttcaaataatact

SEQ ID NO: 1194298 - DNA, 15 bp, Homo sapiens
aagttcaaataatac

SEQ ID NO: 1194299 - DNA, 15 bp, Homo sapiens
aaagttcaaataata

SEQ ID NO: 1194300 - DNA, 15 bp, Homo sapiens
aaaagttcaaataat

SEQ ID NO: 1194301 - DNA, 15 bp, Homo sapiens
aaaaagttcaaataa

SEQ ID NO: 1194302 - DNA, 15 bp, Homo sapiens
taaaaagttcaaata

SEQ ID NO: 1194303 - DNA, 15 bp, Homo sapiens
ttaaaaagttcaaat

SEQ ID NO: 1194304 - DNA, 15 bp, Homo sapiens
cttaaaaagttcaaa

SEQ ID NO: 1194305 - DNA, 15 bp, Homo sapiens
tcttaaaaagttcaa

SEQ ID NO: 1194306 - DNA, 15 bp, Homo sapiens
atcttaaaaagttca

SEQ ID NO: 1194307 - DNA, 15 bp, Homo sapiens
catcttaaaaagttc

SEQ ID NO: 1194308 - DNA, 15 bp, Homo sapiens
tcatcttaaaaagtt

SEQ ID NO: 1194309 - DNA, 15 bp, Homo sapiens
ctcatcttaaaaagt

SEQ ID NO: 1194310 - DNA, 15 bp, Homo sapiens
cctcatcttaaaaag

SEQ ID NO: 1194311 - DNA, 15 bp, Homo sapiens
gcctcatcttaaaaa

SEQ ID NO: 1194312 - DNA, 15 bp, Homo sapiens
tgcctcatcttaaaa

SEQ ID NO: 1194313 - DNA, 15 bp, Homo sapiens
ctgcctcatcttaaa

SEQ ID NO: 1194314 - DNA, 15 bp, Homo sapiens
actgcctcatcttaa

SEQ ID NO: 1194315 - DNA, 15 bp, Homo sapiens
aactgcctcatctta

SEQ ID NO: 1194316 - DNA, 15 bp, Homo sapiens
gaactgcctcatctt

SEQ ID NO: 1194317 - DNA, 15 bp, Homo sapiens
ggaactgcctcatct

SEQ ID NO: 1194318 - DNA, 15 bp, Homo sapiens
gggaactgcctcatc

SEQ ID NO: 1194319 - DNA, 15 bp, Homo sapiens
ggggaactgcctcat

SEQ ID NO: 1194320 - DNA, 15 bp, Homo sapiens
aggggaactgcctca

SEQ ID NO: 1194321 - DNA, 15 bp, Homo sapiens
caggggaactgcctc

SEQ ID NO: 1194322 - DNA, 15 bp, Homo sapiens
tcaggggaactgcct

SEQ ID NO: 1194323 - DNA, 15 bp, Homo sapiens
ttcaggggaactgcc

SEQ ID NO: 1194324 - DNA, 15 bp, Homo sapiens
tttcaggggaactgc

SEQ ID NO: 1194325 - DNA, 15 bp, Homo sapiens
ttttcaggggaactg

SEQ ID NO: 1194326 - DNA, 15 bp, Homo sapiens
tttttcaggggaact

SEQ ID NO: 1194327 - DNA, 15 bp, Homo sapiens
ctttttcaggggaac

SEQ ID NO: 1194328 - DNA, 15 bp, Homo sapiens
actttttcaggggaa

SEQ ID NO: 1194329 - DNA, 15 bp, Homo sapiens
aactttttcagggga

SEQ ID NO: 1194330 - DNA, 15 bp, Homo sapiens
taactttttcagggg

SEQ ID NO: 1194331 - DNA, 15 bp, Homo sapiens
ttaactttttcaggg

SEQ ID NO: 1194332 - DNA, 15 bp, Homo sapiens
attaactttttcagg

SEQ ID NO: 1194333 - DNA, 15 bp, Homo sapiens
cattaactttttcag

SEQ ID NO: 1194334 - DNA, 15 bp, Homo sapiens
gcattaactttttca

SEQ ID NO: 1194335 - DNA, 15 bp, Homo sapiens
tgcattaactttttc

SEQ ID NO: 1194336 - DNA, 15 bp, Homo sapiens
ctgcattaacttttt

SEQ ID NO: 1194337 - DNA, 15 bp, Homo sapiens
gctgcattaactttt

SEQ ID NO: 1194338 - DNA, 15 bp, Homo sapiens
agctgcattaacttt

SEQ ID NO: 1194339 - DNA, 15 bp, Homo sapiens
gagctgcattaactt

SEQ ID NO: 1194340 - DNA, 15 bp, Homo sapiens
agagctgcattaact

SEQ ID NO: 1194341 - DNA, 15 bp, Homo sapiens
gagagctgcattaac

SEQ ID NO: 1194342 - DNA, 15 bp, Homo sapiens
ggagagctgcattaa

SEQ ID NO: 1194343 - DNA, 15 bp, Homo sapiens
tggagagctgcatta

SEQ ID NO: 1194344 - DNA, 15 bp, Homo sapiens
atggagagctgcatt

SEQ ID NO: 1194345 - DNA, 15 bp, Homo sapiens
gatggagagctgcat

SEQ ID NO: 1194346 - DNA, 15 bp, Homo sapiens
tgatggagagctgca

SEQ ID NO: 1194347 - DNA, 15 bp, Homo sapiens
ctgatggagagctgc

SEQ ID NO: 1194348 - DNA, 15 bp, Homo sapiens
tctgatggagagctg

SEQ ID NO: 1194349 - DNA, 15 bp, Homo sapiens
ttctgatggagagct

SEQ ID NO: 1194350 - DNA, 15 bp, Homo sapiens
attctgatggagagc

SEQ ID NO: 1194351 - DNA, 15 bp, Homo sapiens
gattctgatggagag

SEQ ID NO: 1194352 - DNA, 15 bp, Homo sapiens
ggattctgatggaga

SEQ ID NO: 1194353 - DNA, 15 bp, Homo sapiens
tggattctgatggag

SEQ ID NO: 1194354 - DNA, 15 bp, Homo sapiens
gtggattctgatgga

SEQ ID NO: 1194355 - DNA, 15 bp, Homo sapiens
agtggattctgatgg

SEQ ID NO: 1194356 - DNA, 15 bp, Homo sapiens
gagtggattctgatg

SEQ ID NO: 1194357 - DNA, 15 bp, Homo sapiens
agagtggattctgat

SEQ ID NO: 1194358 - DNA, 15 bp, Homo sapiens
aagagtggattctga

SEQ ID NO: 1194359 - DNA, 15 bp, Homo sapiens
gaagagtggattctg

SEQ ID NO: 1194360 - DNA, 15 bp, Homo sapiens
agaagagtggattct

SEQ ID NO: 1194361 - DNA, 15 bp, Homo sapiens
tagaagagtggattc

SEQ ID NO: 1194362 - DNA, 15 bp, Homo sapiens
ctagaagagtggatt

SEQ ID NO: 1194363 - DNA, 15 bp, Homo sapiens
cctagaagagtggat

SEQ ID NO: 1194364 - DNA, 15 bp, Homo sapiens
ccctagaagagtgga

SEQ ID NO: 1194365 - DNA, 15 bp, Homo sapiens
tccctagaagagtgg

SEQ ID NO: 1194366 - DNA, 15 bp, Homo sapiens
atccctagaagagtg

SEQ ID NO: 1194367 - DNA, 15 bp, Homo sapiens
tatccctagaagagt

SEQ ID NO: 1194368 - DNA, 15 bp, Homo sapiens
atatccctagaagag

SEQ ID NO: 1194369 - DNA, 15 bp, Homo sapiens
catatccctagaaga

SEQ ID NO: 1194370 - DNA, 15 bp, Homo sapiens
tcatatccctagaag

SEQ ID NO: 1194371 - DNA, 15 bp, Homo sapiens
ttcatatccctagaa

SEQ ID NO: 1194372 - DNA, 15 bp, Homo sapiens
tttcatatccctaga

SEQ ID NO: 1194373 - DNA, 15 bp, Homo sapiens
ttttcatatccctag

SEQ ID NO: 1194374 - DNA, 15 bp, Homo sapiens
attttcatatcccta

SEQ ID NO: 1194375 - DNA, 15 bp, Homo sapiens
gattttcatatccct

SEQ ID NO: 1194376 - DNA, 15 bp, Homo sapiens
agattttcatatccc

SEQ ID NO: 1194377 - DNA, 15 bp, Homo sapiens
gagattttcatatcc

SEQ ID NO: 1194378 - DNA, 15 bp, Homo sapiens
aagagattttcatat

SEQ ID NO: 1194379 - DNA, 15 bp, Homo sapiens
taagagattttcata

SEQ ID NO: 1194380 - DNA, 15 bp, Homo sapiens
ttaagagattttcat

SEQ ID NO: 1194381 - DNA, 15 bp, Homo sapiens
gttaagagattttca

SEQ ID NO: 1194382 - DNA, 15 bp, Homo sapiens
tgttaagagattttc

SEQ ID NO: 1194383 - DNA, 15 bp, Homo sapiens
gtgttaagagatttt

SEQ ID NO: 1194384 - DNA, 15 bp, Homo sapiens
ggtgttaagagattt

SEQ ID NO: 1194385 - DNA, 15 bp, Homo sapiens
gggtgttaagagatt

SEQ ID NO: 1194386 - DNA, 15 bp, Homo sapiens
tgggtgttaagagat

SEQ ID NO: 1194387 - DNA, 15 bp, Homo sapiens
gtgggtgttaagaga

SEQ ID NO: 1194388 - DNA, 15 bp, Homo sapiens
ggtgggtgttaagag

SEQ ID NO: 1194389 - DNA, 15 bp, Homo sapiens
gggtgggtgttaaga

SEQ ID NO: 1194390 - DNA, 15 bp, Homo sapiens
agggtgggtgttaag

SEQ ID NO: 1194391 - DNA, 15 bp, Homo sapiens
tagggtgggtgttaa

SEQ ID NO: 1194392 - DNA, 15 bp, Homo sapiens
gtagggtgggtgtta

SEQ ID NO: 1194393 - DNA, 15 bp, Homo sapiens
tgtagggtgggtgtt

SEQ ID NO: 1194394 - DNA, 15 bp, Homo sapiens
atgtagggtgggtgt

SEQ ID NO: 1194395 - DNA, 15 bp, Homo sapiens
tatgtagggtgggtg

SEQ ID NO: 1194396 - DNA, 15 bp, Homo sapiens
gtatgtagggtgggt

SEQ ID NO: 1194397 - DNA, 15 bp, Homo sapiens
tgtatgtagggtggg

SEQ ID NO: 1194398 - DNA, 15 bp, Homo sapiens
gtgtatgtagggtgg

SEQ ID NO: 1194399 - DNA, 15 bp, Homo sapiens
tgtgtatgtagggtg

SEQ ID NO: 1194400 - DNA, 15 bp, Homo sapiens
ctgtgtatgtagggt

SEQ ID NO: 1194401 - DNA, 15 bp, Homo sapiens
tctgtgtatgtaggg

SEQ ID NO: 1194402 - DNA, 15 bp, Homo sapiens
gtctgtgtatgtagg

SEQ ID NO: 1194403 - DNA, 15 bp, Homo sapiens
gtgtgtctgtgtatg

SEQ ID NO: 1194404 - DNA, 15 bp, Homo sapiens
tgtgtgtctgtgtat

SEQ ID NO: 1194405 - DNA, 15 bp, Homo sapiens
gtgtgtgtctgtgta

SEQ ID NO: 1194406 - DNA, 15 bp, Homo sapiens
aatgtgtgtgtgtgt

SEQ ID NO: 1194407 - DNA, 15 bp, Homo sapiens
gaatgtgtgtgtgtg

SEQ ID NO: 1194408 - DNA, 15 bp, Homo sapiens
tgaatgtgtgtgtgt

SEQ ID NO: 1194409 - DNA, 15 bp, Homo sapiens
gtgaatgtgtgtgtg

SEQ ID NO: 1194410 - DNA, 15 bp, Homo sapiens
ggtgaatgtgtgtgt

SEQ ID NO: 1194411 - DNA, 15 bp, Homo sapiens
gggtgaatgtgtgtg

SEQ ID NO: 1194412 - DNA, 15 bp, Homo sapiens
agggtgaatgtgtgt

SEQ ID NO: 1194413 - DNA, 15 bp, Homo sapiens
tagggtgaatgtgtg

SEQ ID NO: 1194414 - DNA, 15 bp, Homo sapiens
ttagggtgaatgtgt

SEQ ID NO: 1194415 - DNA, 15 bp, Homo sapiens
cttagggtgaatgtg

SEQ ID NO: 1194416 - DNA, 15 bp, Homo sapiens
ccttagggtgaatgt

SEQ ID NO: 1194417 - DNA, 15 bp, Homo sapiens
tccttagggtgaatg

SEQ ID NO: 1194418 - DNA, 15 bp, Homo sapiens
atccttagggtgaat

SEQ ID NO: 1194419 - DNA, 15 bp, Homo sapiens
gatccttagggtgaa

SEQ ID NO: 1194420 - DNA, 15 bp, Homo sapiens
ggatccttagggtga

SEQ ID NO: 1194421 - DNA, 15 bp, Homo sapiens
tggatccttagggtg

SEQ ID NO: 1194422 - DNA, 15 bp, Homo sapiens
ttggatccttagggt

SEQ ID NO: 1194423 - DNA, 15 bp, Homo sapiens
attggatccttaggg

SEQ ID NO: 1194424 - DNA, 15 bp, Homo sapiens
cattggatccttagg

SEQ ID NO: 1194425 - DNA, 15 bp, Homo sapiens
ccattggatccttag

SEQ ID NO: 1194426 - DNA, 15 bp, Homo sapiens
tccattggatcctta

SEQ ID NO: 1194427 - DNA, 15 bp, Homo sapiens
ttccattggatcctt

SEQ ID NO: 1194428 - DNA, 15 bp, Homo sapiens
attccattggatcct

SEQ ID NO: 1194429 - DNA, 15 bp, Homo sapiens
tattccattggatcc

SEQ ID NO: 1194430 - DNA, 15 bp, Homo sapiens
gtattccattggatc

SEQ ID NO: 1194431 - DNA, 15 bp, Homo sapiens
agtattccattggat

SEQ ID NO: 1194432 - DNA, 15 bp, Homo sapiens
cagtattccattgga

SEQ ID NO: 1194433 - DNA, 15 bp, Homo sapiens
tcagtattccattgg

SEQ ID NO: 1194434 - DNA, 15 bp, Homo sapiens
ttcagtattccattg

SEQ ID NO: 1194435 - DNA, 15 bp, Homo sapiens
tttcagtattccatt

SEQ ID NO: 1194436 - DNA, 15 bp, Homo sapiens
ttttcagtattccat

SEQ ID NO: 1194437 - DNA, 15 bp, Homo sapiens
cttttcagtattcca

SEQ ID NO: 1194438 - DNA, 15 bp, Homo sapiens
tcttttcagtattcc

SEQ ID NO: 1194439 - DNA, 15 bp, Homo sapiens
ttcttttcagtattc

SEQ ID NO: 1194440 - DNA, 15 bp, Homo sapiens
tttcttttcagtatt

SEQ ID NO: 1194441 - DNA, 15 bp, Homo sapiens
atttcttttcagtat

SEQ ID NO: 1194442 - DNA, 15 bp, Homo sapiens
gatttcttttcagta

SEQ ID NO: 1194443 - DNA, 15 bp, Homo sapiens
tgatttcttttcagt

SEQ ID NO: 1194444 - DNA, 15 bp, Homo sapiens
gtgatttcttttcag

SEQ ID NO: 1194445 - DNA, 15 bp, Homo sapiens
agtgatttcttttca

SEQ ID NO: 1194446 - DNA, 15 bp, Homo sapiens
aagtgatttcttttc

SEQ ID NO: 1194447 - DNA, 15 bp, Homo sapiens
gaagtgatttctttt

SEQ ID NO: 1194448 - DNA, 15 bp, Homo sapiens
ggaagtgatttcttt

SEQ ID NO: 1194449 - DNA, 15 bp, Homo sapiens
aggaagtgatttctt

SEQ ID NO: 1194450 - DNA, 15 bp, Homo sapiens
aaggaagtgatttct

SEQ ID NO: 1194451 - DNA, 15 bp, Homo sapiens
caaggaagtgatttc

SEQ ID NO: 1194452 - DNA, 15 bp, Homo sapiens
tcaaggaagtgattt

SEQ ID NO: 1194453 - DNA, 15 bp, Homo sapiens
ttcaaggaagtgatt

SEQ ID NO: 1194454 - DNA, 15 bp, Homo sapiens
tttcaaggaagtgat

SEQ ID NO: 1194455 - DNA, 15 bp, Homo sapiens
ttttcaaggaagtga

SEQ ID NO: 1194456 - DNA, 15 bp, Homo sapiens
attttcaaggaagtg

SEQ ID NO: 1194457 - DNA, 15 bp, Homo sapiens
aattttcaaggaagt

SEQ ID NO: 1194458 - DNA, 15 bp, Homo sapiens
aaattttcaaggaag

SEQ ID NO: 1194459 - DNA, 15 bp, Homo sapiens
aaaattttcaaggaa

SEQ ID NO: 1194460 - DNA, 15 bp, Homo sapiens
taaaattttcaagga

SEQ ID NO: 1194461 - DNA, 15 bp, Homo sapiens
ataaaattttcaagg

SEQ ID NO: 1194462 - DNA, 15 bp, Homo sapiens
aataaaattttcaag

SEQ ID NO: 1194463 - DNA, 15 bp, Homo sapiens
taataaaattttcaa

SEQ ID NO: 1194464 - DNA, 15 bp, Homo sapiens
ttaataaaattttca

SEQ ID NO: 1194465 - DNA, 15 bp, Homo sapiens
tttaataaaattttc

SEQ ID NO: 1194466 - DNA, 15 bp, Homo sapiens
ttttaataaaatttt

SEQ ID NO: 1194467 - DNA, 15 bp, Homo sapiens
tttttaataaaattt

SEQ ID NO: 1194468 - DNA, 15 bp, Homo sapiens
ttttttaataaaatt

SEQ ID NO: 1194469 - DNA, 15 bp, Homo sapiens
gttttttaataaaat

SEQ ID NO: 1194470 - DNA, 15 bp, Homo sapiens
tgttttttaataaaa

SEQ ID NO: 1194471 - DNA, 15 bp, Homo sapiens
ttgttttttaataaa

SEQ ID NO: 1194472 - DNA, 15 bp, Homo sapiens
tttgttttttaataa

SEQ ID NO: 1194473 - DNA, 15 bp, Homo sapiens
gtttgttttttaata

SEQ ID NO: 1194474 - DNA, 15 bp, Homo sapiens
tgtttgttttttaat

SEQ ID NO: 1194475 - DNA, 15 bp, Homo sapiens
ttgtttgttttttaa

SEQ ID NO: 1194476 - DNA, 15 bp, Homo sapiens
ggctttttgtttgtt

SEQ ID NO: 1194477 - DNA, 15 bp, Homo sapiens
aggctttttgtttgt

SEQ ID NO: 1194478 - DNA, 15 bp, Homo sapiens
caggctttttgtttg

SEQ ID NO: 1194479 - DNA, 15 bp, Homo sapiens
acaggctttttgttt

SEQ ID NO: 1194480 - DNA, 15 bp, Homo sapiens
gacaggctttttgtt

SEQ ID NO: 1194481 - DNA, 15 bp, Homo sapiens
ggacaggctttttgt

SEQ ID NO: 1194482 - DNA, 15 bp, Homo sapiens
tggacaggctttttg

SEQ ID NO: 1194483 - DNA, 15 bp, Homo sapiens
gtggacaggcttttt

SEQ ID NO: 1194484 - DNA, 15 bp, Homo sapiens
ggtggacaggctttt

SEQ ID NO: 1194485 - DNA, 15 bp, Homo sapiens
gggtggacaggcttt

SEQ ID NO: 1194486 - DNA, 15 bp, Homo sapiens
agggtggacaggctt

SEQ ID NO: 1194487 - DNA, 15 bp, Homo sapiens
aagggtggacaggct

SEQ ID NO: 1194488 - DNA, 15 bp, Homo sapiens
caagggtggacaggc

SEQ ID NO: 1194489 - DNA, 15 bp, Homo sapiens
tcaagggtggacagg

SEQ ID NO: 1194490 - DNA, 15 bp, Homo sapiens
ctcaagggtggacag

SEQ ID NO: 1194491 - DNA, 15 bp, Homo sapiens
tctcaagggtggaca

SEQ ID NO: 1194492 - DNA, 15 bp, Homo sapiens
ttctcaagggtggac

SEQ ID NO: 1194493 - DNA, 15 bp, Homo sapiens
attctcaagggtgga

SEQ ID NO: 1194494 - DNA, 15 bp, Homo sapiens
gattctcaagggtgg

SEQ ID NO: 1194495 - DNA, 15 bp, Homo sapiens
ggattctcaagggtg

SEQ ID NO: 1194496 - DNA, 15 bp, Homo sapiens
aggattctcaagggt

SEQ ID NO: 1194497 - DNA, 15 bp, Homo sapiens
aaggattctcaaggg

SEQ ID NO: 1194498 - DNA, 15 bp, Homo sapiens
gaaggattctcaagg

SEQ ID NO: 1194499 - DNA, 15 bp, Homo sapiens
ggaaggattctcaag

SEQ ID NO: 1194500 - DNA, 15 bp, Homo sapiens
aggaaggattctcaa

SEQ ID NO: 1194501 - DNA, 15 bp, Homo sapiens
gaggaaggattctca

SEQ ID NO: 1194502 - DNA, 15 bp, Homo sapiens
agaggaaggattctc

SEQ ID NO: 1194503 - DNA, 15 bp, Homo sapiens
gagaggaaggattct

SEQ ID NO: 1194504 - DNA, 15 bp, Homo sapiens
aggagaggaaggatt

SEQ ID NO: 1194505 - DNA, 15 bp, Homo sapiens
aaggagaggaaggat

SEQ ID NO: 1194506 - DNA, 15 bp, Homo sapiens
caaggagaggaagga

SEQ ID NO: 1194507 - DNA, 15 bp, Homo sapiens
ccaaggagaggaagg

SEQ ID NO: 1194508 - DNA, 15 bp, Homo sapiens
tccaaggagaggaag

SEQ ID NO: 1194509 - DNA, 15 bp, Homo sapiens
ttccaaggagaggaa

SEQ ID NO: 1194510 - DNA, 15 bp, Homo sapiens
gttccaaggagagga

SEQ ID NO: 1194511 - DNA, 15 bp, Homo sapiens
cgttccaaggagagg

SEQ ID NO: 1194512 - DNA, 15 bp, Homo sapiens
acgttccaaggagag

SEQ ID NO: 1194513 - DNA, 15 bp, Homo sapiens
gacgttccaaggaga

SEQ ID NO: 1194514 - DNA, 15 bp, Homo sapiens
tgacgttccaaggag

SEQ ID NO: 1194515 - DNA, 15 bp, Homo sapiens
ttgacgttccaagga

SEQ ID NO: 1194516 - DNA, 15 bp, Homo sapiens
attgacgttccaagg

SEQ ID NO: 1194517 - DNA, 15 bp, Homo sapiens
cattgacgttccaag

SEQ ID NO: 1194518 - DNA, 15 bp, Homo sapiens
acattgacgttccaa

SEQ ID NO: 1194519 - DNA, 15 bp, Homo sapiens
aacattgacgttcca

SEQ ID NO: 1194520 - DNA, 15 bp, Homo sapiens
aaacattgacgttcc

SEQ ID NO: 1194521 - DNA, 15 bp, Homo sapiens
caaacattgacgttc

SEQ ID NO: 1194522 - DNA, 15 bp, Homo sapiens
acaaacattgacgtt

SEQ ID NO: 1194523 - DNA, 15 bp, Homo sapiens
cacaaacattgacgt

SEQ ID NO: 1194524 - DNA, 15 bp, Homo sapiens
acacaaacattgacg

SEQ ID NO: 1194525 - DNA, 15 bp, Homo sapiens
tacacaaacattgac

SEQ ID NO: 1194526 - DNA, 15 bp, Homo sapiens
ctacacaaacattga

SEQ ID NO: 1194527 - DNA, 15 bp, Homo sapiens
tctacacaaacattg

SEQ ID NO: 1194528 - DNA, 15 bp, Homo sapiens
atctacacaaacatt

SEQ ID NO: 1194529 - DNA, 15 bp, Homo sapiens
catctacacaaacat

SEQ ID NO: 1194530 - DNA, 15 bp, Homo sapiens
tcatctacacaaaca

SEQ ID NO: 1194531 - DNA, 15 bp, Homo sapiens
ttcatctacacaaac

SEQ ID NO: 1194532 - DNA, 15 bp, Homo sapiens
tttcatctacacaaa

SEQ ID NO: 1194533 - DNA, 15 bp, Homo sapiens
gtttcatctacacaa

SEQ ID NO: 1194534 - DNA, 15 bp, Homo sapiens
ggtttcatctacaca

SEQ ID NO: 1194535 - DNA, 15 bp, Homo sapiens
tggtttcatctacac

SEQ ID NO: 1194536 - DNA, 15 bp, Homo sapiens
atggtttcatctaca

SEQ ID NO: 1194537 - DNA, 15 bp, Homo sapiens
gatggtttcatctac

SEQ ID NO: 1194538 - DNA, 15 bp, Homo sapiens
agatggtttcatcta

SEQ ID NO: 1194539 - DNA, 15 bp, Homo sapiens
gagatggtttcatct

SEQ ID NO: 1194540 - DNA, 15 bp, Homo sapiens
tgagatggtttcatc

SEQ ID NO: 1194541 - DNA, 15 bp, Homo sapiens
atgagatggtttcat

SEQ ID NO: 1194542 - DNA, 15 bp, Homo sapiens
catgagatggtttca

SEQ ID NO: 1194543 - DNA, 15 bp, Homo sapiens
gcatgagatggtttc

SEQ ID NO: 1194544 - DNA, 15 bp, Homo sapiens
agcatgagatggttt

SEQ ID NO: 1194545 - DNA, 15 bp, Homo sapiens
gagcatgagatggtt

SEQ ID NO: 1194546 - DNA, 15 bp, Homo sapiens
agagcatgagatggt

SEQ ID NO: 1194547 - DNA, 15 bp, Homo sapiens
cagagcatgagatgg

SEQ ID NO: 1194548 - DNA, 15 bp, Homo sapiens
acagagcatgagatg

SEQ ID NO: 1194549 - DNA, 15 bp, Homo sapiens
cacagagcatgagat

SEQ ID NO: 1194550 - DNA, 15 bp, Homo sapiens
ccacagagcatgaga

SEQ ID NO: 1194551 - DNA, 15 bp, Homo sapiens
gccacagagcatgag

SEQ ID NO: 1194552 - DNA, 15 bp, Homo sapiens
agccacagagcatga

SEQ ID NO: 1194553 - DNA, 15 bp, Homo sapiens
gagccacagagcatg

SEQ ID NO: 1194554 - DNA, 15 bp, Homo sapiens
ggagccacagagcat

SEQ ID NO: 1194555 - DNA, 15 bp, Homo sapiens
tggagccacagagca

SEQ ID NO: 1194556 - DNA, 15 bp, Homo sapiens
ctggagccacagagc

SEQ ID NO: 1194557 - DNA, 15 bp, Homo sapiens
cctggagccacagag

SEQ ID NO: 1194558 - DNA, 15 bp, Homo sapiens
ccctggagccacaga

SEQ ID NO: 1194559 - DNA, 15 bp, Homo sapiens
accctggagccacag

SEQ ID NO: 1194560 - DNA, 15 bp, Homo sapiens
aaccctggagccaca

SEQ ID NO: 1194561 - DNA, 15 bp, Homo sapiens
aaaccctggagccac

SEQ ID NO: 1194562 - DNA, 15 bp, Homo sapiens
gaaaccctggagcca

SEQ ID NO: 1194563 - DNA, 15 bp, Homo sapiens
agaaaccctggagcc

SEQ ID NO: 1194564 - DNA, 15 bp, Homo sapiens
cagaaaccctggagc

SEQ ID NO: 1194565 - DNA, 15 bp, Homo sapiens
acagaaaccctggag

SEQ ID NO: 1194566 - DNA, 15 bp, Homo sapiens
aacagaaaccctgga

SEQ ID NO: 1194567 - DNA, 15 bp, Homo sapiens
taacagaaaccctgg

SEQ ID NO: 1194568 - DNA, 15 bp, Homo sapiens
gtaacagaaaccctg

SEQ ID NO: 1194569 - DNA, 15 bp, Homo sapiens
agtaacagaaaccct

SEQ ID NO: 1194570 - DNA, 15 bp, Homo sapiens
tagtaacagaaaccc

SEQ ID NO: 1194571 - DNA, 15 bp, Homo sapiens
atagtaacagaaacc

SEQ ID NO: 1194572 - DNA, 15 bp, Homo sapiens
aatagtaacagaaac

SEQ ID NO: 1194573 - DNA, 15 bp, Homo sapiens
aaatagtaacagaaa

SEQ ID NO: 1194574 - DNA, 15 bp, Homo sapiens
aaaatagtaacagaa

SEQ ID NO: 1194575 - DNA, 15 bp, Homo sapiens
taaaatagtaacaga

SEQ ID NO: 1194576 - DNA, 15 bp, Homo sapiens
ataaaatagtaacag

SEQ ID NO: 1194577 - DNA, 15 bp, Homo sapiens
cataaaatagtaaca

SEQ ID NO: 1194578 - DNA, 15 bp, Homo sapiens
gcataaaatagtaac

SEQ ID NO: 1194579 - DNA, 15 bp, Homo sapiens
tgcataaaatagtaa

SEQ ID NO: 1194580 - DNA, 15 bp, Homo sapiens
gtgcataaaatagta

SEQ ID NO: 1194581 - DNA, 15 bp, Homo sapiens
agtgcataaaatagt

SEQ ID NO: 1194582 - DNA, 15 bp, Homo sapiens
aagtgcataaaatag

SEQ ID NO: 1194583 - DNA, 15 bp, Homo sapiens
caagtgcataaaata

SEQ ID NO: 1194584 - DNA, 15 bp, Homo sapiens
ccaagtgcataaaat

SEQ ID NO: 1194585 - DNA, 15 bp, Homo sapiens
cccaagtgcataaaa

SEQ ID NO: 1194586 - DNA, 15 bp, Homo sapiens
tcccaagtgcataaa

SEQ ID NO: 1194587 - DNA, 15 bp, Homo sapiens
ctcccaagtgcataa

SEQ ID NO: 1194588 - DNA, 15 bp, Homo sapiens
tctcccaagtgcata

SEQ ID NO: 1194589 - DNA, 15 bp, Homo sapiens
ttctcccaagtgcat

SEQ ID NO: 1194590 - DNA, 15 bp, Homo sapiens
cttctcccaagtgca

SEQ ID NO: 1194591 - DNA, 15 bp, Homo sapiens
ccttctcccaagtgc

SEQ ID NO: 1194592 - DNA, 15 bp, Homo sapiens
gccttctcccaagtg

SEQ ID NO: 1194593 - DNA, 15 bp, Homo sapiens
agccttctcccaagt

SEQ ID NO: 1194594 - DNA, 15 bp, Homo sapiens
aagccttctcccaag

SEQ ID NO: 1194595 - DNA, 15 bp, Homo sapiens
taagccttctcccaa

SEQ ID NO: 1194596 - DNA, 15 bp, Homo sapiens
ctaagccttctccca

SEQ ID NO: 1194597 - DNA, 15 bp, Homo sapiens
tctaagccttctccc

SEQ ID NO: 1194598 - DNA, 15 bp, Homo sapiens
ttctaagccttctcc

SEQ ID NO: 1194599 - DNA, 15 bp, Homo sapiens
attctaagccttctc

SEQ ID NO: 1194600 - DNA, 15 bp, Homo sapiens
tattctaagccttct

SEQ ID NO: 1194601 - DNA, 15 bp, Homo sapiens
ttattctaagccttc

SEQ ID NO: 1194602 - DNA, 15 bp, Homo sapiens
tttattctaagcctt

SEQ ID NO: 1194603 - DNA, 15 bp, Homo sapiens
ttttattctaagcct

SEQ ID NO: 1194604 - DNA, 15 bp, Homo sapiens
cttttattctaagcc

SEQ ID NO: 1194605 - DNA, 15 bp, Homo sapiens
tcttttattctaagc

SEQ ID NO: 1194606 - DNA, 15 bp, Homo sapiens
atcttttattctaag

SEQ ID NO: 1194607 - DNA, 15 bp, Homo sapiens
catcttttattctaa

SEQ ID NO: 1194608 - DNA, 15 bp, Homo sapiens
acatcttttattcta

SEQ ID NO: 1194609 - DNA, 15 bp, Homo sapiens
tacatcttttattct

SEQ ID NO: 1194610 - DNA, 15 bp, Homo sapiens
ctacatcttttattc

SEQ ID NO: 1194611 - DNA, 15 bp, Homo sapiens
gctacatcttttatt

SEQ ID NO: 1194612 - DNA, 15 bp, Homo sapiens
tgctacatcttttat

SEQ ID NO: 1194613 - DNA, 15 bp, Homo sapiens
gtgctacatctttta

SEQ ID NO: 1194614 - DNA, 15 bp, Homo sapiens
tgtgctacatctttt

SEQ ID NO: 1194615 - DNA, 15 bp, Homo sapiens
atgtgctacatcttt

SEQ ID NO: 1194616 - DNA, 15 bp, Homo sapiens
aatgtgctacatctt

SEQ ID NO: 1194617 - DNA, 15 bp, Homo sapiens
aaatgtgctacatct

SEQ ID NO: 1194618 - DNA, 15 bp, Homo sapiens
aaaatgtgctacatc

SEQ ID NO: 1194619 - DNA, 15 bp, Homo sapiens
caaaatgtgctacat

SEQ ID NO: 1194620 - DNA, 15 bp, Homo sapiens
gcaaaatgtgctaca

SEQ ID NO: 1194621 - DNA, 15 bp, Homo sapiens
agcaaaatgtgctac

SEQ ID NO: 1194622 - DNA, 15 bp, Homo sapiens
aagcaaaatgtgcta

SEQ ID NO: 1194623 - DNA, 15 bp, Homo sapiens
aaagcaaaatgtgct

SEQ ID NO: 1194624 - DNA, 15 bp, Homo sapiens
gaaagcaaaatgtgc

SEQ ID NO: 1194625 - DNA, 15 bp, Homo sapiens
ggaaagcaaaatgtg

SEQ ID NO: 1194626 - DNA, 15 bp, Homo sapiens
gggaaagcaaaatgt

SEQ ID NO: 1194627 - DNA, 15 bp, Homo sapiens
tgggaaagcaaaatg

SEQ ID NO: 1194628 - DNA, 15 bp, Homo sapiens
atgggaaagcaaaat

SEQ ID NO: 1194629 - DNA, 15 bp, Homo sapiens
aatgggaaagcaaaa

SEQ ID NO: 1194630 - DNA, 15 bp, Homo sapiens
aaatgggaaagcaaa

SEQ ID NO: 1194631 - DNA, 15 bp, Homo sapiens
taaatgggaaagcaa

SEQ ID NO: 1194632 - DNA, 15 bp, Homo sapiens
ataaatgggaaagca

SEQ ID NO: 1194633 - DNA, 15 bp, Homo sapiens
aataaatgggaaagc

SEQ ID NO: 1194634 - DNA, 15 bp, Homo sapiens
caataaatgggaaag

SEQ ID NO: 1194635 - DNA, 15 bp, Homo sapiens
acaataaatgggaaa

SEQ ID NO: 1194636 - DNA, 15 bp, Homo sapiens
aacaataaatgggaa

SEQ ID NO: 1194637 - DNA, 15 bp, Homo sapiens
aaacaataaatggga

SEQ ID NO: 1194638 - DNA, 15 bp, Homo sapiens
caaacaataaatggg

SEQ ID NO: 1194639 - DNA, 15 bp, Homo sapiens
ccaaacaataaatgg

SEQ ID NO: 1194640 - DNA, 15 bp, Homo sapiens
gccaaacaataaatg

SEQ ID NO: 1194641 - DNA, 15 bp, Homo sapiens
ggccaaacaataaat

SEQ ID NO: 1194642 - DNA, 15 bp, Homo sapiens
tggccaaacaataaa

SEQ ID NO: 1194643 - DNA, 15 bp, Homo sapiens
ctggccaaacaataa

SEQ ID NO: 1194644 - DNA, 15 bp, Homo sapiens
gctggccaaacaata

SEQ ID NO: 1194645 - DNA, 15 bp, Homo sapiens
agctggccaaacaat

SEQ ID NO: 1194646 - DNA, 15 bp, Homo sapiens
tagctggccaaacaa

SEQ ID NO: 1194647 - DNA, 15 bp, Homo sapiens
atagctggccaaaca

SEQ ID NO: 1194648 - DNA, 15 bp, Homo sapiens
catagctggccaaac

SEQ ID NO: 1194649 - DNA, 15 bp, Homo sapiens
gcatagctggccaaa

SEQ ID NO: 1194650 - DNA, 15 bp, Homo sapiens
ggcatagctggccaa

SEQ ID NO: 1194651 - DNA, 15 bp, Homo sapiens
tggcatagctggcca

SEQ ID NO: 1194652 - DNA, 15 bp, Homo sapiens
ttggcatagctggcc

SEQ ID NO: 1194653 - DNA, 15 bp, Homo sapiens
attggcatagctggc

SEQ ID NO: 1194654 - DNA, 15 bp, Homo sapiens
cattggcatagctgg

SEQ ID NO: 1194655 - DNA, 15 bp, Homo sapiens
acattggcatagctg

SEQ ID NO: 1194656 - DNA, 15 bp, Homo sapiens
cacattggcatagct

SEQ ID NO: 1194657 - DNA, 15 bp, Homo sapiens
ccacattggcatagc

SEQ ID NO: 1194658 - DNA, 15 bp, Homo sapiens
accacattggcatag

SEQ ID NO: 1194659 - DNA, 15 bp, Homo sapiens
caccacattggcata

SEQ ID NO: 1194660 - DNA, 15 bp, Homo sapiens
gcaccacattggcat

SEQ ID NO: 1194661 - DNA, 15 bp, Homo sapiens
agcaccacattggca

SEQ ID NO: 1194662 - DNA, 15 bp, Homo sapiens
tagcaccacattggc

SEQ ID NO: 1194663 - DNA, 15 bp, Homo sapiens
atagcaccacattgg

SEQ ID NO: 1194664 - DNA, 15 bp, Homo sapiens
aatagcaccacattg

SEQ ID NO: 1194665 - DNA, 15 bp, Homo sapiens
caatagcaccacatt

SEQ ID NO: 1194666 - DNA, 15 bp, Homo sapiens
acaatagcaccacat

SEQ ID NO: 1194667 - DNA, 15 bp, Homo sapiens
aacaatagcaccaca

SEQ ID NO: 1194668 - DNA, 15 bp, Homo sapiens
aaacaatagcaccac

SEQ ID NO: 1194669 - DNA, 15 bp, Homo sapiens
gaaacaatagcacca

SEQ ID NO: 1194670 - DNA, 15 bp, Homo sapiens
agaaacaatagcacc

SEQ ID NO: 1194671 - DNA, 15 bp, Homo sapiens
aagaaacaatagcac

SEQ ID NO: 1194672 - DNA, 15 bp, Homo sapiens
aaagaaacaatagca

SEQ ID NO: 1194673 - DNA, 15 bp, Homo sapiens
taaagaaacaatagc

SEQ ID NO: 1194674 - DNA, 15 bp, Homo sapiens
ttaaagaaacaatag

SEQ ID NO: 1194675 - DNA, 15 bp, Homo sapiens
cttaaagaaacaata

SEQ ID NO: 1194676 - DNA, 15 bp, Homo sapiens
tcttaaagaaacaat

SEQ ID NO: 1194677 - DNA, 15 bp, Homo sapiens
ttcttaaagaaacaa

SEQ ID NO: 1194678 - DNA, 15 bp, Homo sapiens
tttcttaaagaaaca

SEQ ID NO: 1194679 - DNA, 15 bp, Homo sapiens
ctttcttaaagaaac

SEQ ID NO: 1194680 - DNA, 15 bp, Homo sapiens
actttcttaaagaaa

SEQ ID NO: 1194681 - DNA, 15 bp, Homo sapiens
tactttcttaaagaa

SEQ ID NO: 1194682 - DNA, 15 bp, Homo sapiens
gtactttcttaaaga

SEQ ID NO: 1194683 - DNA, 15 bp, Homo sapiens
agtactttcttaaag

SEQ ID NO: 1194684 - DNA, 15 bp, Homo sapiens
aagtactttcttaaa

SEQ ID NO: 1194685 - DNA, 15 bp, Homo sapiens
caagtactttcttaa

SEQ ID NO: 1194686 - DNA, 15 bp, Homo sapiens
tcaagtactttctta

SEQ ID NO: 1194687 - DNA, 15 bp, Homo sapiens
gtcaagtactttctt

SEQ ID NO: 1194688 - DNA, 15 bp, Homo sapiens
agtcaagtactttct

SEQ ID NO: 1194689 - DNA, 15 bp, Homo sapiens
tagtcaagtactttc

SEQ ID NO: 1194690 - DNA, 15 bp, Homo sapiens
ttagtcaagtacttt

SEQ ID NO: 1194691 - DNA, 15 bp, Homo sapiens
tttagtcaagtactt

SEQ ID NO: 1194692 - DNA, 15 bp, Homo sapiens
ttttagtcaagtact

SEQ ID NO: 1194693 - DNA, 15 bp, Homo sapiens
tttttagtcaagtac

SEQ ID NO: 1194694 - DNA, 15 bp, Homo sapiens
ttttttagtcaagta

SEQ ID NO: 1194695 - DNA, 15 bp, Homo sapiens
tttttttagtcaagt

SEQ ID NO: 1194696 - DNA, 15 bp, Homo sapiens
ttttttttagtcaag

SEQ ID NO: 1194697 - DNA, 15 bp, Homo sapiens
tttttttttagtcaa

SEQ ID NO: 1194698 - DNA, 15 bp, Homo sapiens
ttttttttttagtca

SEQ ID NO: 1194699 - DNA, 15 bp, Homo sapiens
cttttttttttagtc

SEQ ID NO: 1194700 - DNA, 15 bp, Homo sapiens
tcttttttttttagt

SEQ ID NO: 1194701 - DNA, 15 bp, Homo sapiens
ttcttttttttttag

SEQ ID NO: 1194702 - DNA, 15 bp, Homo sapiens
tttctttttttttta

SEQ ID NO: 1194703 - DNA, 15 bp, Homo sapiens
ctttttttctttttt

SEQ ID NO: 1194704 - DNA, 15 bp, Homo sapiens
tctttttttcttttt

SEQ ID NO: 1194705 - DNA, 15 bp, Homo sapiens
ctttcttttttttct

SEQ ID NO: 1194706 - DNA, 15 bp, Homo sapiens
gctttcttttttttc

SEQ ID NO: 1194707 - DNA, 15 bp, Homo sapiens
tgctttctttttttt

SEQ ID NO: 1194708 - DNA, 15 bp, Homo sapiens
atgctttcttttttt

SEQ ID NO: 1194709 - DNA, 15 bp, Homo sapiens
tatgctttctttttt

SEQ ID NO: 1194710 - DNA, 15 bp, Homo sapiens
ctatgctttcttttt

SEQ ID NO: 1194711 - DNA, 15 bp, Homo sapiens
tctatgctttctttt

SEQ ID NO: 1194712 - DNA, 15 bp, Homo sapiens
gtctatgctttcttt

SEQ ID NO: 1194713 - DNA, 15 bp, Homo sapiens
tgtctatgctttctt

SEQ ID NO: 1194714 - DNA, 15 bp, Homo sapiens
atgtctatgctttct

SEQ ID NO: 1194715 - DNA, 15 bp, Homo sapiens
tatgtctatgctttc

SEQ ID NO: 1194716 - DNA, 15 bp, Homo sapiens
atatgtctatgcttt

SEQ ID NO: 1194717 - DNA, 15 bp, Homo sapiens
aatatgtctatgctt

SEQ ID NO: 1194718 - DNA, 15 bp, Homo sapiens
aaatatgtctatgct

SEQ ID NO: 1194719 - DNA, 15 bp, Homo sapiens
aaaatatgtctatgc

SEQ ID NO: 1194720 - DNA, 15 bp, Homo sapiens
aaaaatatgtctatg

SEQ ID NO: 1194721 - DNA, 15 bp, Homo sapiens
aaaaaatatgtctat

SEQ ID NO: 1194722 - DNA, 15 bp, Homo sapiens
aaaaaaatatgtcta

SEQ ID NO: 1194723 - DNA, 15 bp, Homo sapiens
taaaaaaatatgtct

SEQ ID NO: 1194724 - DNA, 15 bp, Homo sapiens
ttaaaaaaatatgtc

SEQ ID NO: 1194725 - DNA, 15 bp, Homo sapiens
tttaaaaaaatatgt

SEQ ID NO: 1194726 - DNA, 15 bp, Homo sapiens
ctttaaaaaaatatg

SEQ ID NO: 1194727 - DNA, 15 bp, Homo sapiens
actttaaaaaaatat

SEQ ID NO: 1194728 - DNA, 15 bp, Homo sapiens
tactttaaaaaaata

SEQ ID NO: 1194729 - DNA, 15 bp, Homo sapiens
atactttaaaaaaat

SEQ ID NO: 1194730 - DNA, 15 bp, Homo sapiens
tatactttaaaaaaa

SEQ ID NO: 1194731 - DNA, 15 bp, Homo sapiens
ttatactttaaaaaa

SEQ ID NO: 1194732 - DNA, 15 bp, Homo sapiens
tttatactttaaaaa

SEQ ID NO: 1194733 - DNA, 15 bp, Homo sapiens
ttttatactttaaaa

SEQ ID NO: 1194734 - DNA, 15 bp, Homo sapiens
tttttatactttaaa

SEQ ID NO: 1194735 - DNA, 15 bp, Homo sapiens
gtttttatactttaa

SEQ ID NO: 1194736 - DNA, 15 bp, Homo sapiens
tgtttttatacttta

SEQ ID NO: 1194737 - DNA, 15 bp, Homo sapiens
ttgtttttatacttt

SEQ ID NO: 1194738 - DNA, 15 bp, Homo sapiens
gttgtttttatactt

SEQ ID NO: 1194739 - DNA, 15 bp, Homo sapiens
tgttgtttttatact

SEQ ID NO: 1194740 - DNA, 15 bp, Homo sapiens
ttgttgtttttatac

SEQ ID NO: 1194741 - DNA, 15 bp, Homo sapiens
attgttgtttttata

SEQ ID NO: 1194742 - DNA, 15 bp, Homo sapiens
aattgttgtttttat

SEQ ID NO: 1194743 - DNA, 15 bp, Homo sapiens
gaattgttgttttta

SEQ ID NO: 1194744 - DNA, 15 bp, Homo sapiens
agaattgttgttttt

SEQ ID NO: 1194745 - DNA, 15 bp, Homo sapiens
tagaattgttgtttt

SEQ ID NO: 1194746 - DNA, 15 bp, Homo sapiens
atagaattgttgttt

SEQ ID NO: 1194747 - DNA, 15 bp, Homo sapiens
tatagaattgttgtt

SEQ ID NO: 1194748 - DNA, 15 bp, Homo sapiens
ctatagaattgttgt

SEQ ID NO: 1194749 - DNA, 15 bp, Homo sapiens
tctatagaattgttg

SEQ ID NO: 1194750 - DNA, 15 bp, Homo sapiens
atctatagaattgtt

SEQ ID NO: 1194751 - DNA, 15 bp, Homo sapiens
tatctatagaattgt

SEQ ID NO: 1194752 - DNA, 15 bp, Homo sapiens
ctatctatagaattg

SEQ ID NO: 1194753 - DNA, 15 bp, Homo sapiens
tctatctatagaatt

SEQ ID NO: 1194754 - DNA, 15 bp, Homo sapiens
atctatctatagaat

SEQ ID NO: 1194755 - DNA, 15 bp, Homo sapiens
catctatctatagaa

SEQ ID NO: 1194756 - DNA, 15 bp, Homo sapiens
ccatctatctataga

SEQ ID NO: 1194757 - DNA, 15 bp, Homo sapiens
gccatctatctatag

SEQ ID NO: 1194758 - DNA, 15 bp, Homo sapiens
agccatctatctata

SEQ ID NO: 1194759 - DNA, 15 bp, Homo sapiens
aagccatctatctat

SEQ ID NO: 1194760 - DNA, 15 bp, Homo sapiens
taagccatctatcta

SEQ ID NO: 1194761 - DNA, 15 bp, Homo sapiens
ttaagccatctatct

SEQ ID NO: 1194762 - DNA, 15 bp, Homo sapiens
attaagccatctatc

SEQ ID NO: 1194763 - DNA, 15 bp, Homo sapiens
tattaagccatctat

SEQ ID NO: 1194764 - DNA, 15 bp, Homo sapiens
ttattaagccatcta

SEQ ID NO: 1194765 - DNA, 15 bp, Homo sapiens
tttattaagccatct

SEQ ID NO: 1194766 - DNA, 15 bp, Homo sapiens
ttttattaagccatc

SEQ ID NO: 1194767 - DNA, 15 bp, Homo sapiens
attttattaagccat

SEQ ID NO: 1194768 - DNA, 15 bp, Homo sapiens
tattttattaagcca

SEQ ID NO: 1194769 - DNA, 15 bp, Homo sapiens
ctattttattaagcc

SEQ ID NO: 1194770 - DNA, 15 bp, Homo sapiens
gctattttattaagc

SEQ ID NO: 1194771 - DNA, 15 bp, Homo sapiens
tgctattttattaag

SEQ ID NO: 1194772 - DNA, 15 bp, Homo sapiens
atgctattttattaa

SEQ ID NO: 1194773 - DNA, 15 bp, Homo sapiens
aatgctattttatta

SEQ ID NO: 1194774 - DNA, 15 bp, Homo sapiens
taatgctattttatt

SEQ ID NO: 1194775 - DNA, 15 bp, Homo sapiens
ctaatgctattttat

SEQ ID NO: 1194776 - DNA, 15 bp, Homo sapiens
cctaatgctatttta

SEQ ID NO: 1194777 - DNA, 15 bp, Homo sapiens
acctaatgctatttt

SEQ ID NO: 1194778 - DNA, 15 bp, Homo sapiens
gacctaatgctattt

SEQ ID NO: 1194779 - DNA, 15 bp, Homo sapiens
agacctaatgctatt

SEQ ID NO: 1194780 - DNA, 15 bp, Homo sapiens
tagacctaatgctat

SEQ ID NO: 1194781 - DNA, 15 bp, Homo sapiens
atagacctaatgcta

SEQ ID NO: 1194782 - DNA, 15 bp, Homo sapiens
gatagacctaatgct

SEQ ID NO: 1194783 - DNA, 15 bp, Homo sapiens
agatagacctaatgc

SEQ ID NO: 1194784 - DNA, 15 bp, Homo sapiens
tagatagacctaatg

SEQ ID NO: 1194785 - DNA, 15 bp, Homo sapiens
ctagatagacctaat

SEQ ID NO: 1194786 - DNA, 15 bp, Homo sapiens
gctagatagacctaa

SEQ ID NO: 1194787 - DNA, 15 bp, Homo sapiens
ggctagatagaccta

SEQ ID NO: 1194788 - DNA, 15 bp, Homo sapiens
tggctagatagacct

SEQ ID NO: 1194789 - DNA, 15 bp, Homo sapiens
gtggctagatagacc

SEQ ID NO: 1194790 - DNA, 15 bp, Homo sapiens
ggtggctagatagac

SEQ ID NO: 1194791 - DNA, 15 bp, Homo sapiens
tggtggctagataga

SEQ ID NO: 1194792 - DNA, 15 bp, Homo sapiens
gtggtggctagatag

SEQ ID NO: 1194793 - DNA, 15 bp, Homo sapiens
ggtggtggctagata

SEQ ID NO: 1194794 - DNA, 15 bp, Homo sapiens
tggtggtggctagat

SEQ ID NO: 1194795 - DNA, 15 bp, Homo sapiens
gtggtggtggctaga

SEQ ID NO: 1194796 - DNA, 15 bp, Homo sapiens
ggtggtggtggctag

SEQ ID NO: 1194797 - DNA, 15 bp, Homo sapiens
aggtggtggtggcta

SEQ ID NO: 1194798 - DNA, 15 bp, Homo sapiens
aaggtggtggtggct

SEQ ID NO: 1194799 - DNA, 15 bp, Homo sapiens
aaaggtggtggtggc

SEQ ID NO: 1194800 - DNA, 15 bp, Homo sapiens
gaaaggtggtggtgg

SEQ ID NO: 1194801 - DNA, 15 bp, Homo sapiens
tgaaaggtggtggtg

SEQ ID NO: 1194802 - DNA, 15 bp, Homo sapiens
ttgaaaggtggtggt

SEQ ID NO: 1194803 - DNA, 15 bp, Homo sapiens
gttgaaaggtggtgg

SEQ ID NO: 1194804 - DNA, 15 bp, Homo sapiens
agttgaaaggtggtg

SEQ ID NO: 1194805 - DNA, 15 bp, Homo sapiens
aagttgaaaggtggt

SEQ ID NO: 1194806 - DNA, 15 bp, Homo sapiens
aaagttgaaaggtgg

SEQ ID NO: 1194807 - DNA, 15 bp, Homo sapiens
aaaagttgaaaggtg

SEQ ID NO: 1194808 - DNA, 15 bp, Homo sapiens
aaaaagttgaaaggt

SEQ ID NO: 1194809 - DNA, 15 bp, Homo sapiens
taaaaagttgaaagg

SEQ ID NO: 1194810 - DNA, 15 bp, Homo sapiens
ataaaaagttgaaag

SEQ ID NO: 1194811 - DNA, 15 bp, Homo sapiens
gataaaaagttgaaa

SEQ ID NO: 1194812 - DNA, 15 bp, Homo sapiens
tgataaaaagttgaa

SEQ ID NO: 1194813 - DNA, 15 bp, Homo sapiens
gtgataaaaagttga

SEQ ID NO: 1194814 - DNA, 15 bp, Homo sapiens
agtgataaaaagttg

SEQ ID NO: 1194815 - DNA, 15 bp, Homo sapiens
gagtgataaaaagtt

SEQ ID NO: 1194816 - DNA, 15 bp, Homo sapiens
tgagtgataaaaagt

SEQ ID NO: 1194817 - DNA, 15 bp, Homo sapiens
gtgagtgataaaaag

SEQ ID NO: 1194818 - DNA, 15 bp, Homo sapiens
tgtgagtgataaaaa

SEQ ID NO: 1194819 - DNA, 15 bp, Homo sapiens
ttgtgagtgataaaa

SEQ ID NO: 1194820 - DNA, 15 bp, Homo sapiens
cttgtgagtgataaa

SEQ ID NO: 1194821 - DNA, 15 bp, Homo sapiens
acttgtgagtgataa

SEQ ID NO: 1194822 - DNA, 15 bp, Homo sapiens
tacttgtgagtgata

SEQ ID NO: 1194823 - DNA, 15 bp, Homo sapiens
ctacttgtgagtgat

SEQ ID NO: 1194824 - DNA, 15 bp, Homo sapiens
actacttgtgagtga

SEQ ID NO: 1194825 - DNA, 15 bp, Homo sapiens
cactacttgtgagtg

SEQ ID NO: 1194826 - DNA, 15 bp, Homo sapiens
acactacttgtgagt

SEQ ID NO: 1194827 - DNA, 15 bp, Homo sapiens
tacactacttgtgag

SEQ ID NO: 1194828 - DNA, 15 bp, Homo sapiens
gtacactacttgtga

SEQ ID NO: 1194829 - DNA, 15 bp, Homo sapiens
agtacactacttgtg

SEQ ID NO: 1194830 - DNA, 15 bp, Homo sapiens
cagtacactacttgt

SEQ ID NO: 1194831 - DNA, 15 bp, Homo sapiens
acagtacactacttg

SEQ ID NO: 1194832 - DNA, 15 bp, Homo sapiens
aacagtacactactt

SEQ ID NO: 1194833 - DNA, 15 bp, Homo sapiens
gaacagtacactact

SEQ ID NO: 1194834 - DNA, 15 bp, Homo sapiens
tgaacagtacactac

SEQ ID NO: 1194835 - DNA, 15 bp, Homo sapiens
gtgaacagtacacta

SEQ ID NO: 1194836 - DNA, 15 bp, Homo sapiens
ggtgaacagtacact

SEQ ID NO: 1194837 - DNA, 15 bp, Homo sapiens
tggtgaacagtacac

SEQ ID NO: 1194838 - DNA, 15 bp, Homo sapiens
ttggtgaacagtaca

SEQ ID NO: 1194839 - DNA, 15 bp, Homo sapiens
tttggtgaacagtac

SEQ ID NO: 1194840 - DNA, 15 bp, Homo sapiens
atttggtgaacagta

SEQ ID NO: 1194841 - DNA, 15 bp, Homo sapiens
aatttggtgaacagt

SEQ ID NO: 1194842 - DNA, 15 bp, Homo sapiens
caatttggtgaacag

SEQ ID NO: 1194843 - DNA, 15 bp, Homo sapiens
acaatttggtgaaca

SEQ ID NO: 1194844 - DNA, 15 bp, Homo sapiens
cacaatttggtgaac

SEQ ID NO: 1194845 - DNA, 15 bp, Homo sapiens
tcacaatttggtgaa

SEQ ID NO: 1194846 - DNA, 15 bp, Homo sapiens
ttcacaatttggtga

SEQ ID NO: 1194847 - DNA, 15 bp, Homo sapiens
attcacaatttggtg

SEQ ID NO: 1194848 - DNA, 15 bp, Homo sapiens
aattcacaatttggt

SEQ ID NO: 1194849 - DNA, 15 bp, Homo sapiens
aaattcacaatttgg

SEQ ID NO: 1194850 - DNA, 15 bp, Homo sapiens
caaattcacaatttg

SEQ ID NO: 1194851 - DNA, 15 bp, Homo sapiens
ccaaattcacaattt

SEQ ID NO: 1194852 - DNA, 15 bp, Homo sapiens
cccaaattcacaatt

SEQ ID NO: 1194853 - DNA, 15 bp, Homo sapiens
ccccaaattcacaat

SEQ ID NO: 1194854 - DNA, 15 bp, Homo sapiens
cccccaaattcacaa

SEQ ID NO: 1194855 - DNA, 15 bp, Homo sapiens
acccccaaattcaca

SEQ ID NO: 1194856 - DNA, 15 bp, Homo sapiens
cacccccaaattcac

SEQ ID NO: 1194857 - DNA, 15 bp, Homo sapiens
gcacccccaaattca

SEQ ID NO: 1194858 - DNA, 15 bp, Homo sapiens
tgcacccccaaattc

SEQ ID NO: 1194859 - DNA, 15 bp, Homo sapiens
cctgcacccccaaat

SEQ ID NO: 1194860 - DNA, 15 bp, Homo sapiens
ccctgcacccccaaa

SEQ ID NO: 1194861 - DNA, 15 bp, Homo sapiens
cccctgcacccccaa

SEQ ID NO: 1194862 - DNA, 15 bp, Homo sapiens
gcccctgcaccccca

SEQ ID NO: 1194863 - DNA, 15 bp, Homo sapiens
tgcccctgcaccccc

SEQ ID NO: 1194864 - DNA, 15 bp, Homo sapiens
ctgcccctgcacccc

SEQ ID NO: 1194865 - DNA, 15 bp, Homo sapiens
cctgcccctgcaccc

SEQ ID NO: 1194866 - DNA, 15 bp, Homo sapiens
tcctgcccctgcacc

SEQ ID NO: 1194867 - DNA, 15 bp, Homo sapiens
ctcctgcccctgcac

SEQ ID NO: 1194868 - DNA, 15 bp, Homo sapiens
actcctgcccctgca

SEQ ID NO: 1194869 - DNA, 15 bp, Homo sapiens
aactcctgcccctgc

SEQ ID NO: 1194870 - DNA, 15 bp, Homo sapiens
caactcctgcccctg

SEQ ID NO: 1194871 - DNA, 15 bp, Homo sapiens
ccaactcctgcccct

SEQ ID NO: 1194872 - DNA, 15 bp, Homo sapiens
tccaactcctgcccc

SEQ ID NO: 1194873 - DNA, 15 bp, Homo sapiens
ttccaactcctgccc

SEQ ID NO: 1194874 - DNA, 15 bp, Homo sapiens
tttccaactcctgcc

SEQ ID NO: 1194875 - DNA, 15 bp, Homo sapiens
atttccaactcctgc

SEQ ID NO: 1194876 - DNA, 15 bp, Homo sapiens
aatttccaactcctg

SEQ ID NO: 1194877 - DNA, 15 bp, Homo sapiens
aaatttccaactcct

SEQ ID NO: 1194878 - DNA, 15 bp, Homo sapiens
aaaatttccaactcc

SEQ ID NO: 1194879 - DNA, 15 bp, Homo sapiens
aaaaatttccaactc

SEQ ID NO: 1194880 - DNA, 15 bp, Homo sapiens
aaaaaatttccaact

SEQ ID NO: 1194881 - DNA, 15 bp, Homo sapiens
taaaaaatttccaac

SEQ ID NO: 1194882 - DNA, 15 bp, Homo sapiens
ttaaaaaatttccaa

SEQ ID NO: 1194883 - DNA, 15 bp, Homo sapiens
tttaaaaaatttcca

SEQ ID NO: 1194884 - DNA, 15 bp, Homo sapiens
ctttaaaaaatttcc

SEQ ID NO: 1194885 - DNA, 15 bp, Homo sapiens
actttaaaaaatttc

SEQ ID NO: 1194886 - DNA, 15 bp, Homo sapiens
aactttaaaaaattt

SEQ ID NO: 1194887 - DNA, 15 bp, Homo sapiens
taactttaaaaaatt

SEQ ID NO: 1194888 - DNA, 15 bp, Homo sapiens
ctaactttaaaaaat

SEQ ID NO: 1194889 - DNA, 15 bp, Homo sapiens
tctaactttaaaaaa

SEQ ID NO: 1194890 - DNA, 15 bp, Homo sapiens
ttctaactttaaaaa

SEQ ID NO: 1194891 - DNA, 15 bp, Homo sapiens
cttctaactttaaaa

SEQ ID NO: 1194892 - DNA, 15 bp, Homo sapiens
ccttctaactttaaa

SEQ ID NO: 1194893 - DNA, 15 bp, Homo sapiens
gccttctaactttaa

SEQ ID NO: 1194894 - DNA, 15 bp, Homo sapiens
agccttctaacttta

SEQ ID NO: 1194895 - DNA, 15 bp, Homo sapiens
gagccttctaacttt

SEQ ID NO: 1194896 - DNA, 15 bp, Homo sapiens
ggagccttctaactt

SEQ ID NO: 1194897 - DNA, 15 bp, Homo sapiens
tggagccttctaact

SEQ ID NO: 1194898 - DNA, 15 bp, Homo sapiens
atggagccttctaac

SEQ ID NO: 1194899 - DNA, 15 bp, Homo sapiens
aatggagccttctaa

SEQ ID NO: 1194900 - DNA, 15 bp, Homo sapiens
caatggagccttcta

SEQ ID NO: 1194901 - DNA, 15 bp, Homo sapiens
acaatggagccttct

SEQ ID NO: 1194902 - DNA, 15 bp, Homo sapiens
aacaatggagccttc

SEQ ID NO: 1194903 - DNA, 15 bp, Homo sapiens
aaacaatggagcctt

SEQ ID NO: 1194904 - DNA, 15 bp, Homo sapiens
aaaacaatggagcct

SEQ ID NO: 1194905 - DNA, 15 bp, Homo sapiens
caaaacaatggagcc

SEQ ID NO: 1194906 - DNA, 15 bp, Homo sapiens
acaaaacaatggagc

SEQ ID NO: 1194907 - DNA, 15 bp, Homo sapiens
aacaaaacaatggag

SEQ ID NO: 1194908 - DNA, 15 bp, Homo sapiens
caacaaaacaatgga

SEQ ID NO: 1194909 - DNA, 15 bp, Homo sapiens
ccaacaaaacaatgg

SEQ ID NO: 1194910 - DNA, 15 bp, Homo sapiens
gccaacaaaacaatg

SEQ ID NO: 1194911 - DNA, 15 bp, Homo sapiens
agccaacaaaacaat

SEQ ID NO: 1194912 - DNA, 15 bp, Homo sapiens
gagccaacaaaacaa

SEQ ID NO: 1194913 - DNA, 15 bp, Homo sapiens
agagccaacaaaaca

SEQ ID NO: 1194914 - DNA, 15 bp, Homo sapiens
gagagccaacaaaac

SEQ ID NO: 1194915 - DNA, 15 bp, Homo sapiens
tgagagccaacaaaa

SEQ ID NO: 1194916 - DNA, 15 bp, Homo sapiens
ttgagagccaacaaa

SEQ ID NO: 1194917 - DNA, 15 bp, Homo sapiens
tttgagagccaacaa

SEQ ID NO: 1194918 - DNA, 15 bp, Homo sapiens
gtttgagagccaaca

SEQ ID NO: 1194919 - DNA, 15 bp, Homo sapiens
agtttgagagccaac

SEQ ID NO: 1194920 - DNA, 15 bp, Homo sapiens
aagtttgagagccaa

SEQ ID NO: 1194921 - DNA, 15 bp, Homo sapiens
taagtttgagagcca

SEQ ID NO: 1194922 - DNA, 15 bp, Homo sapiens
ctaagtttgagagcc

SEQ ID NO: 1194923 - DNA, 15 bp, Homo sapiens
gctaagtttgagagc

SEQ ID NO: 1194924 - DNA, 15 bp, Homo sapiens
tgctaagtttgagag

SEQ ID NO: 1194925 - DNA, 15 bp, Homo sapiens
ttgctaagtttgaga

SEQ ID NO: 1194926 - DNA, 15 bp, Homo sapiens
tttgctaagtttgag

SEQ ID NO: 1194927 - DNA, 15 bp, Homo sapiens
ttttgctaagtttga

SEQ ID NO: 1194928 - DNA, 15 bp, Homo sapiens
attttgctaagtttg

SEQ ID NO: 1194929 - DNA, 15 bp, Homo sapiens
aattttgctaagttt

SEQ ID NO: 1194930 - DNA, 15 bp, Homo sapiens
taattttgctaagtt

SEQ ID NO: 1194931 - DNA, 15 bp, Homo sapiens
ctaattttgctaagt

SEQ ID NO: 1194932 - DNA, 15 bp, Homo sapiens
gctaattttgctaag

SEQ ID NO: 1194933 - DNA, 15 bp, Homo sapiens
tgctaattttgctaa

SEQ ID NO: 1194934 - DNA, 15 bp, Homo sapiens
ttgctaattttgcta

SEQ ID NO: 1194935 - DNA, 15 bp, Homo sapiens
attgctaattttgct

SEQ ID NO: 1194936 - DNA, 15 bp, Homo sapiens
tattgctaattttgc

SEQ ID NO: 1194937 - DNA, 15 bp, Homo sapiens
atattgctaattttg

SEQ ID NO: 1194938 - DNA, 15 bp, Homo sapiens
tatattgctaatttt

SEQ ID NO: 1194939 - DNA, 15 bp, Homo sapiens
atatattgctaattt

SEQ ID NO: 1194940 - DNA, 15 bp, Homo sapiens
aatatattgctaatt

SEQ ID NO: 1194941 - DNA, 15 bp, Homo sapiens
taatatattgctaat

SEQ ID NO: 1194942 - DNA, 15 bp, Homo sapiens
ataatatattgctaa

SEQ ID NO: 1194943 - DNA, 15 bp, Homo sapiens
gataatatattgcta

SEQ ID NO: 1194944 - DNA, 15 bp, Homo sapiens
ggataatatattgct

SEQ ID NO: 1194945 - DNA, 15 bp, Homo sapiens
tggataatatattgc

SEQ ID NO: 1194946 - DNA, 15 bp, Homo sapiens
ttggataatatattg

SEQ ID NO: 1194947 - DNA, 15 bp, Homo sapiens
attggataatatatt

SEQ ID NO: 1194948 - DNA, 15 bp, Homo sapiens
gattggataatatat

SEQ ID NO: 1194949 - DNA, 15 bp, Homo sapiens
agattggataatata

SEQ ID NO: 1194950 - DNA, 15 bp, Homo sapiens
aagattggataatat

SEQ ID NO: 1194951 - DNA, 15 bp, Homo sapiens
gaagattggataata

SEQ ID NO: 1194952 - DNA, 15 bp, Homo sapiens
agaagattggataat

SEQ ID NO: 1194953 - DNA, 15 bp, Homo sapiens
cagaagattggataa

SEQ ID NO: 1194954 - DNA, 15 bp, Homo sapiens
tcagaagattggata

SEQ ID NO: 1194955 - DNA, 15 bp, Homo sapiens
ttcagaagattggat

SEQ ID NO: 1194956 - DNA, 15 bp, Homo sapiens
gttcagaagattgga

SEQ ID NO: 1194957 - DNA, 15 bp, Homo sapiens
agttcagaagattgg

SEQ ID NO: 1194958 - DNA, 15 bp, Homo sapiens
aagttcagaagattg

SEQ ID NO: 1194959 - DNA, 15 bp, Homo sapiens
caagttcagaagatt

SEQ ID NO: 1194960 - DNA, 15 bp, Homo sapiens
tcaagttcagaagat

SEQ ID NO: 1194961 - DNA, 15 bp, Homo sapiens
atcaagttcagaaga

SEQ ID NO: 1194962 - DNA, 15 bp, Homo sapiens
gatcaagttcagaag

SEQ ID NO: 1194963 - DNA, 15 bp, Homo sapiens
tgatcaagttcagaa

SEQ ID NO: 1194964 - DNA, 15 bp, Homo sapiens
ttgatcaagttcaga

SEQ ID NO: 1194965 - DNA, 15 bp, Homo sapiens
cttgatcaagttcag

SEQ ID NO: 1194966 - DNA, 15 bp, Homo sapiens
tcttgatcaagttca

SEQ ID NO: 1194967 - DNA, 15 bp, Homo sapiens
ctcttgatcaagttc

SEQ ID NO: 1194968 - DNA, 15 bp, Homo sapiens
gctcttgatcaagtt

SEQ ID NO: 1194969 - DNA, 15 bp, Homo sapiens
tgctcttgatcaagt

SEQ ID NO: 1194970 - DNA, 15 bp, Homo sapiens
atgctcttgatcaag

SEQ ID NO: 1194971 - DNA, 15 bp, Homo sapiens
catgctcttgatcaa

SEQ ID NO: 1194972 - DNA, 15 bp, Homo sapiens
ccatgctcttgatca

SEQ ID NO: 1194973 - DNA, 15 bp, Homo sapiens
tccatgctcttgatc

SEQ ID NO: 1194974 - DNA, 15 bp, Homo sapiens
ctccatgctcttgat

SEQ ID NO: 1194975 - DNA, 15 bp, Homo sapiens
tctccatgctcttga

SEQ ID NO: 1194976 - DNA, 15 bp, Homo sapiens
ttctccatgctcttg

SEQ ID NO: 1194977 - DNA, 15 bp, Homo sapiens
attctccatgctctt

SEQ ID NO: 1194978 - DNA, 15 bp, Homo sapiens
tattctccatgctct

SEQ ID NO: 1194979 - DNA, 15 bp, Homo sapiens
ttattctccatgctc

SEQ ID NO: 1194980 - DNA, 15 bp, Homo sapiens
tttattctccatgct

SEQ ID NO: 1194981 - DNA, 15 bp, Homo sapiens
gtttattctccatgc

SEQ ID NO: 1194982 - DNA, 15 bp, Homo sapiens
cgtttattctccatg

SEQ ID NO: 1194983 - DNA, 15 bp, Homo sapiens
gcgtttattctccat

SEQ ID NO: 1194984 - DNA, 15 bp, Homo sapiens
cgcgtttattctcca

SEQ ID NO: 1194985 - DNA, 15 bp, Homo sapiens
ccgcgtttattctcc

SEQ ID NO: 1194986 - DNA, 15 bp, Homo sapiens
cccgcgtttattctc

SEQ ID NO: 1194987 - DNA, 15 bp, Homo sapiens
tcccgcgtttattct

SEQ ID NO: 1194988 - DNA, 15 bp, Homo sapiens
ttcccgcgtttattc

SEQ ID NO: 1194989 - DNA, 15 bp, Homo sapiens
tttcccgcgtttatt

SEQ ID NO: 1194990 - DNA, 15 bp, Homo sapiens
ttttcccgcgtttat

SEQ ID NO: 1194991 - DNA, 15 bp, Homo sapiens
tttttcccgcgttta

SEQ ID NO: 1194992 - DNA, 15 bp, Homo sapiens
ttttttcccgcgttt

SEQ ID NO: 1194993 - DNA, 15 bp, Homo sapiens
cttttttcccgcgtt

SEQ ID NO: 1194994 - DNA, 15 bp, Homo sapiens
tcttttttcccgcgt

SEQ ID NO: 1194995 - DNA, 15 bp, Homo sapiens
atcttttttcccgcg

SEQ ID NO: 1194996 - DNA, 15 bp, Homo sapiens
gatcttttttcccgc

SEQ ID NO: 1194997 - DNA, 15 bp, Homo sapiens
agatcttttttcccg

SEQ ID NO: 1194998 - DNA, 15 bp, Homo sapiens
aagatcttttttccc

SEQ ID NO: 1194999 - DNA, 15 bp, Homo sapiens
taagatcttttttcc

SEQ ID NO: 1195000 - DNA, 15 bp, Homo sapiens
ataagatcttttttc

SEQ ID NO: 1195001 - DNA, 15 bp, Homo sapiens
tataagatctttttt

SEQ ID NO: 1195002 - DNA, 15 bp, Homo sapiens
ctataagatcttttt

SEQ ID NO: 1195003 - DNA, 15 bp, Homo sapiens
cctataagatctttt

SEQ ID NO: 1195004 - DNA, 15 bp, Homo sapiens
gcctataagatcttt

SEQ ID NO: 1195005 - DNA, 15 bp, Homo sapiens
tgcctataagatctt

SEQ ID NO: 1195006 - DNA, 15 bp, Homo sapiens
ttgcctataagatct

SEQ ID NO: 1195007 - DNA, 15 bp, Homo sapiens
tttgcctataagatc

SEQ ID NO: 1195008 - DNA, 15 bp, Homo sapiens
atttgcctataagat

SEQ ID NO: 1195009 - DNA, 15 bp, Homo sapiens
tatttgcctataaga

SEQ ID NO: 1195010 - DNA, 15 bp, Homo sapiens
ctatttgcctataag

SEQ ID NO: 1195011 - DNA, 15 bp, Homo sapiens
tctatttgcctataa

SEQ ID NO: 1195012 - DNA, 15 bp, Homo sapiens
ttctatttgcctata

SEQ ID NO: 1195013 - DNA, 15 bp, Homo sapiens
cttctatttgcctat

SEQ ID NO: 1195014 - DNA, 15 bp, Homo sapiens
tcttctatttgccta

SEQ ID NO: 1195015 - DNA, 15 bp, Homo sapiens
ttcttctatttgcct

SEQ ID NO: 1195016 - DNA, 15 bp, Homo sapiens
attcttctatttgcc

SEQ ID NO: 1195017 - DNA, 15 bp, Homo sapiens
aattcttctatttgc

SEQ ID NO: 1195018 - DNA, 15 bp, Homo sapiens
aaattcttctatttg

SEQ ID NO: 1195019 - DNA, 15 bp, Homo sapiens
taaattcttctattt

SEQ ID NO: 1195020 - DNA, 15 bp, Homo sapiens
ttaaattcttctatt

SEQ ID NO: 1195021 - DNA, 15 bp, Homo sapiens
tttaaattcttctat

SEQ ID NO: 1195022 - DNA, 15 bp, Homo sapiens
ttttaaattcttcta

SEQ ID NO: 1195023 - DNA, 15 bp, Homo sapiens
cttttaaattcttct

SEQ ID NO: 1195024 - DNA, 15 bp, Homo sapiens
tcttttaaattcttc

SEQ ID NO: 1195025 - DNA, 15 bp, Homo sapiens
atcttttaaattctt

SEQ ID NO: 1195026 - DNA, 15 bp, Homo sapiens
tatcttttaaattct

SEQ ID NO: 1195027 - DNA, 15 bp, Homo sapiens
ttatcttttaaattc

SEQ ID NO: 1195028 - DNA, 15 bp, Homo sapiens
cttatcttttaaatt

SEQ ID NO: 1195029 - DNA, 15 bp, Homo sapiens
acttatcttttaaat

SEQ ID NO: 1195030 - DNA, 15 bp, Homo sapiens
tacttatcttttaaa

SEQ ID NO: 1195031 - DNA, 15 bp, Homo sapiens
ttacttatcttttaa

SEQ ID NO: 1195032 - DNA, 15 bp, Homo sapiens
cttacttatctttta

SEQ ID NO: 1195033 - DNA, 15 bp, Homo sapiens
acttacttatctttt

SEQ ID NO: 1195034 - DNA, 15 bp, Homo sapiens
aacttacttatcttt

SEQ ID NO: 1195035 - DNA, 15 bp, Homo sapiens
gaacttacttatctt

SEQ ID NO: 1195036 - DNA, 15 bp, Homo sapiens
ggaacttacttatct

SEQ ID NO: 1195037 - DNA, 15 bp, Homo sapiens
aggaacttacttatc

SEQ ID NO: 1195038 - DNA, 15 bp, Homo sapiens
aaggaacttacttat

SEQ ID NO: 1195039 - DNA, 15 bp, Homo sapiens
taaggaacttactta

SEQ ID NO: 1195040 - DNA, 15 bp, Homo sapiens
ataaggaacttactt

SEQ ID NO: 1195041 - DNA, 15 bp, Homo sapiens
aataaggaacttact

SEQ ID NO: 1195042 - DNA, 15 bp, Homo sapiens
caataaggaacttac

SEQ ID NO: 1195043 - DNA, 15 bp, Homo sapiens
tcaataaggaactta

SEQ ID NO: 1195044 - DNA, 15 bp, Homo sapiens
atcaataaggaactt

SEQ ID NO: 1195045 - DNA, 15 bp, Homo sapiens
aatcaataaggaact

SEQ ID NO: 1195046 - DNA, 15 bp, Homo sapiens
aaatcaataaggaac

SEQ ID NO: 1195047 - DNA, 15 bp, Homo sapiens
aaaatcaataaggaa

SEQ ID NO: 1195048 - DNA, 15 bp, Homo sapiens
aaaaatcaataagga

SEQ ID NO: 1195049 - DNA, 15 bp, Homo sapiens
caaaaatcaataagg

SEQ ID NO: 1195050 - DNA, 15 bp, Homo sapiens
acaaaaatcaataag

SEQ ID NO: 1195051 - DNA, 15 bp, Homo sapiens
gcacaaaaatcaata

SEQ ID NO: 1195052 - DNA, 15 bp, Homo sapiens
tgcacaaaaatcaat

SEQ ID NO: 1195053 - DNA, 15 bp, Homo sapiens
gtgcacaaaaatcaa

SEQ ID NO: 1195054 - DNA, 15 bp, Homo sapiens
agtgcacaaaaatca

SEQ ID NO: 1195055 - DNA, 15 bp, Homo sapiens
gagtgcacaaaaatc

SEQ ID NO: 1195056 - DNA, 15 bp, Homo sapiens
agagtgcacaaaaat

SEQ ID NO: 1195057 - DNA, 15 bp, Homo sapiens
cagagtgcacaaaaa

SEQ ID NO: 1195058 - DNA, 15 bp, Homo sapiens
gcagagtgcacaaaa

SEQ ID NO: 1195059 - DNA, 15 bp, Homo sapiens
agcagagtgcacaaa

SEQ ID NO: 1195060 - DNA, 15 bp, Homo sapiens
gagcagagtgcacaa

SEQ ID NO: 1195061 - DNA, 15 bp, Homo sapiens
agagcagagtgcaca

SEQ ID NO: 1195062 - DNA, 15 bp, Homo sapiens
tagagcagagtgcac

SEQ ID NO: 1195063 - DNA, 15 bp, Homo sapiens
ttagagcagagtgca

SEQ ID NO: 1195064 - DNA, 15 bp, Homo sapiens
tttagagcagagtgc

SEQ ID NO: 1195065 - DNA, 15 bp, Homo sapiens
ttttagagcagagtg

SEQ ID NO: 1195066 - DNA, 15 bp, Homo sapiens
gttttagagcagagt

SEQ ID NO: 1195067 - DNA, 15 bp, Homo sapiens
tgttttagagcagag

SEQ ID NO: 1195068 - DNA, 15 bp, Homo sapiens
ctgttttagagcaga

SEQ ID NO: 1195069 - DNA, 15 bp, Homo sapiens
tctgttttagagcag

SEQ ID NO: 1195070 - DNA, 15 bp, Homo sapiens
atctgttttagagca

SEQ ID NO: 1195071 - DNA, 15 bp, Homo sapiens
tatctgttttagagc

SEQ ID NO: 1195072 - DNA, 15 bp, Homo sapiens
aatatctgttttaga

SEQ ID NO: 1195073 - DNA, 15 bp, Homo sapiens
gaatatctgttttag

SEQ ID NO: 1195074 - DNA, 15 bp, Homo sapiens
tgaatatctgtttta

SEQ ID NO: 1195075 - DNA, 15 bp, Homo sapiens
ctgaatatctgtttt

SEQ ID NO: 1195076 - DNA, 15 bp, Homo sapiens
gctgaatatctgttt

SEQ ID NO: 1195077 - DNA, 15 bp, Homo sapiens
tgctgaatatctgtt

SEQ ID NO: 1195078 - DNA, 15 bp, Homo sapiens
ttgctgaatatctgt

SEQ ID NO: 1195079 - DNA, 15 bp, Homo sapiens
cttgctgaatatctg

SEQ ID NO: 1195080 - DNA, 15 bp, Homo sapiens
acttgctgaatatct

SEQ ID NO: 1195081 - DNA, 15 bp, Homo sapiens
cacttgctgaatatc

SEQ ID NO: 1195082 - DNA, 15 bp, Homo sapiens
ccacttgctgaatat

SEQ ID NO: 1195083 - DNA, 15 bp, Homo sapiens
tccacttgctgaata

SEQ ID NO: 1195084 - DNA, 15 bp, Homo sapiens
ctccacttgctgaat

SEQ ID NO: 1195085 - DNA, 15 bp, Homo sapiens
tctccacttgctgaa

SEQ ID NO: 1195086 - DNA, 15 bp, Homo sapiens
ttctccacttgctga

SEQ ID NO: 1195087 - DNA, 15 bp, Homo sapiens
tttctccacttgctg

SEQ ID NO: 1195088 - DNA, 15 bp, Homo sapiens
ttttctccacttgct

SEQ ID NO: 1195089 - DNA, 15 bp, Homo sapiens
attttctccacttgc

SEQ ID NO: 1195090 - DNA, 15 bp, Homo sapiens
tattttctccacttg

SEQ ID NO: 1195091 - DNA, 15 bp, Homo sapiens
ttattttctccactt

SEQ ID NO: 1195092 - DNA, 15 bp, Homo sapiens
cttattttctccact

SEQ ID NO: 1195093 - DNA, 15 bp, Homo sapiens
tcttattttctccac

SEQ ID NO: 1195094 - DNA, 15 bp, Homo sapiens
ttcttattttctcca

SEQ ID NO: 1195095 - DNA, 15 bp, Homo sapiens
gttcttattttctcc

SEQ ID NO: 1195096 - DNA, 15 bp, Homo sapiens
tgttcttattttctc

SEQ ID NO: 1195097 - DNA, 15 bp, Homo sapiens
ttgttcttattttct

SEQ ID NO: 1195098 - DNA, 15 bp, Homo sapiens
tttgttcttattttc

SEQ ID NO: 1195099 - DNA, 15 bp, Homo sapiens
ctttgttcttatttt

SEQ ID NO: 1195100 - DNA, 15 bp, Homo sapiens
tctttgttcttattt

SEQ ID NO: 1195101 - DNA, 15 bp, Homo sapiens
ctctttgttcttatt

SEQ ID NO: 1195102 - DNA, 15 bp, Homo sapiens
tctctttgttcttat

SEQ ID NO: 1195103 - DNA, 15 bp, Homo sapiens
ttctctttgttctta

SEQ ID NO: 1195104 - DNA, 15 bp, Homo sapiens
tttctctttgttctt

SEQ ID NO: 1195105 - DNA, 15 bp, Homo sapiens
ttttctctttgttct

SEQ ID NO: 1195106 - DNA, 15 bp, Homo sapiens
tttttctctttgttc

SEQ ID NO: 1195107 - DNA, 15 bp, Homo sapiens
ttttttctctttgtt

SEQ ID NO: 1195108 - DNA, 15 bp, Homo sapiens
attttttctctttgt

SEQ ID NO: 1195109 - DNA, 15 bp, Homo sapiens
tattttttctctttg

SEQ ID NO: 1195110 - DNA, 15 bp, Homo sapiens
gtattttttctcttt

SEQ ID NO: 1195111 - DNA, 15 bp, Homo sapiens
tgtattttttctctt

SEQ ID NO: 1195112 - DNA, 15 bp, Homo sapiens
atgtattttttctct

SEQ ID NO: 1195113 - DNA, 15 bp, Homo sapiens
tatgtattttttctc

SEQ ID NO: 1195114 - DNA, 15 bp, Homo sapiens
ctatgtattttttct

SEQ ID NO: 1195115 - DNA, 15 bp, Homo sapiens
tctatgtattttttc

SEQ ID NO: 1195116 - DNA, 15 bp, Homo sapiens
atctatgtatttttt

SEQ ID NO: 1195117 - DNA, 15 bp, Homo sapiens
aatctatgtattttt

SEQ ID NO: 1195118 - DNA, 15 bp, Homo sapiens
aaatctatgtatttt

SEQ ID NO: 1195119 - DNA, 15 bp, Homo sapiens
taaatctatgtattt

SEQ ID NO: 1195120 - DNA, 15 bp, Homo sapiens
gtaaatctatgtatt

SEQ ID NO: 1195121 - DNA, 15 bp, Homo sapiens
ggtaaatctatgtat

SEQ ID NO: 1195122 - DNA, 15 bp, Homo sapiens
aggtaaatctatgta

SEQ ID NO: 1195123 - DNA, 15 bp, Homo sapiens
caggtaaatctatgt

SEQ ID NO: 1195124 - DNA, 15 bp, Homo sapiens
gcaggtaaatctatg

SEQ ID NO: 1195125 - DNA, 15 bp, Homo sapiens
tgcaggtaaatctat

SEQ ID NO: 1195126 - DNA, 15 bp, Homo sapiens
ttgcaggtaaatcta

SEQ ID NO: 1195127 - DNA, 15 bp, Homo sapiens
tttgcaggtaaatct

SEQ ID NO: 1195128 - DNA, 15 bp, Homo sapiens
ttttgcaggtaaatc

SEQ ID NO: 1195129 - DNA, 15 bp, Homo sapiens
tttttgcaggtaaat

SEQ ID NO: 1195130 - DNA, 15 bp, Homo sapiens
ttttttgcaggtaaa

SEQ ID NO: 1195131 - DNA, 15 bp, Homo sapiens
attttttgcaggtaa

SEQ ID NO: 1195132 - DNA, 15 bp, Homo sapiens
tattttttgcaggta

SEQ ID NO: 1195133 - DNA, 15 bp, Homo sapiens
ctattttttgcaggt

SEQ ID NO: 1195134 - DNA, 15 bp, Homo sapiens
gctattttttgcagg

SEQ ID NO: 1195135 - DNA, 15 bp, Homo sapiens
agctattttttgcag

SEQ ID NO: 1195136 - DNA, 15 bp, Homo sapiens
aagctattttttgca

SEQ ID NO: 1195137 - DNA, 15 bp, Homo sapiens
gaagctattttttgc

SEQ ID NO: 1195138 - DNA, 15 bp, Homo sapiens
agaagctattttttg

SEQ ID NO: 1195139 - DNA, 15 bp, Homo sapiens
cagaagctatttttt

SEQ ID NO: 1195140 - DNA, 15 bp, Homo sapiens
gcagaagctattttt

SEQ ID NO: 1195141 - DNA, 15 bp, Homo sapiens
ggcagaagctatttt

SEQ ID NO: 1195142 - DNA, 15 bp, Homo sapiens
tggcagaagctattt

SEQ ID NO: 1195143 - DNA, 15 bp, Homo sapiens
ttggcagaagctatt

SEQ ID NO: 1195144 - DNA, 15 bp, Homo sapiens
tttggcagaagctat

SEQ ID NO: 1195145 - DNA, 15 bp, Homo sapiens
atttggcagaagcta

SEQ ID NO: 1195146 - DNA, 15 bp, Homo sapiens
gatttggcagaagct

SEQ ID NO: 1195147 - DNA, 15 bp, Homo sapiens
ggatttggcagaagc

SEQ ID NO: 1195148 - DNA, 15 bp, Homo sapiens
gggatttggcagaag

SEQ ID NO: 1195149 - DNA, 15 bp, Homo sapiens
ggggatttggcagaa

SEQ ID NO: 1195150 - DNA, 15 bp, Homo sapiens
agggggatttggcag

SEQ ID NO: 1195151 - DNA, 15 bp, Homo sapiens
aagggggatttggca

SEQ ID NO: 1195152 - DNA, 15 bp, Homo sapiens
caagggggatttggc

SEQ ID NO: 1195153 - DNA, 15 bp, Homo sapiens
ccaagggggatttgg

SEQ ID NO: 1195154 - DNA, 15 bp, Homo sapiens
cccaagggggatttg

SEQ ID NO: 1195155 - DNA, 15 bp, Homo sapiens
acccaagggggattt

SEQ ID NO: 1195156 - DNA, 15 bp, Homo sapiens
tacccaagggggatt

SEQ ID NO: 1195157 - DNA, 15 bp, Homo sapiens
atacccaagggggat

SEQ ID NO: 1195158 - DNA, 15 bp, Homo sapiens
aatacccaaggggga

SEQ ID NO: 1195159 - DNA, 15 bp, Homo sapiens
gaatacccaaggggg

SEQ ID NO: 1195160 - DNA, 15 bp, Homo sapiens
agaatacccaagggg

SEQ ID NO: 1195161 - DNA, 15 bp, Homo sapiens
aagaatacccaaggg

SEQ ID NO: 1195162 - DNA, 15 bp, Homo sapiens
aaagaatacccaagg

SEQ ID NO: 1195163 - DNA, 15 bp, Homo sapiens
caaagaatacccaag

SEQ ID NO: 1195164 - DNA, 15 bp, Homo sapiens
ccaaagaatacccaa

SEQ ID NO: 1195165 - DNA, 15 bp, Homo sapiens
gccaaagaataccca

SEQ ID NO: 1195166 - DNA, 15 bp, Homo sapiens
tgccaaagaataccc

SEQ ID NO: 1195167 - DNA, 15 bp, Homo sapiens
atgccaaagaatacc

SEQ ID NO: 1195168 - DNA, 15 bp, Homo sapiens
aatgccaaagaatac

SEQ ID NO: 1195169 - DNA, 15 bp, Homo sapiens
aaatgccaaagaata

SEQ ID NO: 1195170 - DNA, 15 bp, Homo sapiens
taaatgccaaagaat

SEQ ID NO: 1195171 - DNA, 15 bp, Homo sapiens
gtaaatgccaaagaa

SEQ ID NO: 1195172 - DNA, 15 bp, Homo sapiens
agtaaatgccaaaga

SEQ ID NO: 1195173 - DNA, 15 bp, Homo sapiens
cagtaaatgccaaag

SEQ ID NO: 1195174 - DNA, 15 bp, Homo sapiens
ccagtaaatgccaaa

SEQ ID NO: 1195175 - DNA, 15 bp, Homo sapiens
accagtaaatgccaa

SEQ ID NO: 1195176 - DNA, 15 bp, Homo sapiens
aaccagtaaatgcca

SEQ ID NO: 1195177 - DNA, 15 bp, Homo sapiens
aaaccagtaaatgcc

SEQ ID NO: 1195178 - DNA, 15 bp, Homo sapiens
taaaccagtaaatgc

SEQ ID NO: 1195179 - DNA, 15 bp, Homo sapiens
ataaaccagtaaatg

SEQ ID NO: 1195180 - DNA, 15 bp, Homo sapiens
tataaaccagtaaat

SEQ ID NO: 1195181 - DNA, 15 bp, Homo sapiens
ctataaaccagtaaa

SEQ ID NO: 1195182 - DNA, 15 bp, Homo sapiens
tctataaaccagtaa

SEQ ID NO: 1195183 - DNA, 15 bp, Homo sapiens
ttctataaaccagta

SEQ ID NO: 1195184 - DNA, 15 bp, Homo sapiens
cttctataaaccagt

SEQ ID NO: 1195185 - DNA, 15 bp, Homo sapiens
tcttctataaaccag

SEQ ID NO: 1195186 - DNA, 15 bp, Homo sapiens
gtcttctataaacca

SEQ ID NO: 1195187 - DNA, 15 bp, Homo sapiens
tgtcttctataaacc

SEQ ID NO: 1195188 - DNA, 15 bp, Homo sapiens
atgtcttctataaac

SEQ ID NO: 1195189 - DNA, 15 bp, Homo sapiens
aatgtcttctataaa

SEQ ID NO: 1195190 - DNA, 15 bp, Homo sapiens
gaatgtcttctataa

SEQ ID NO: 1195191 - DNA, 15 bp, Homo sapiens
agaatgtcttctata

SEQ ID NO: 1195192 - DNA, 15 bp, Homo sapiens
gagaatgtcttctat

SEQ ID NO: 1195193 - DNA, 15 bp, Homo sapiens
ggagaatgtcttcta

SEQ ID NO: 1195194 - DNA, 15 bp, Homo sapiens
gggagaatgtcttct

SEQ ID NO: 1195195 - DNA, 15 bp, Homo sapiens
agggagaatgtcttc

SEQ ID NO: 1195196 - DNA, 15 bp, Homo sapiens
aagggagaatgtctt

SEQ ID NO: 1195197 - DNA, 15 bp, Homo sapiens
gaagggagaatgtct

SEQ ID NO: 1195198 - DNA, 15 bp, Homo sapiens
tgaagggagaatgtc

SEQ ID NO: 1195199 - DNA, 15 bp, Homo sapiens
gtgaagggagaatgt

SEQ ID NO: 1195200 - DNA, 15 bp, Homo sapiens
ggtgaagggagaatg

SEQ ID NO: 1195201 - DNA, 15 bp, Homo sapiens
gggtgaagggagaat

SEQ ID NO: 1195202 - DNA, 15 bp, Homo sapiens
tgggtgaagggagaa

SEQ ID NO: 1195203 - DNA, 15 bp, Homo sapiens
ctgggtgaagggaga

SEQ ID NO: 1195204 - DNA, 15 bp, Homo sapiens
tctgggtgaagggag

SEQ ID NO: 1195205 - DNA, 15 bp, Homo sapiens
gtctgggtgaaggga

SEQ ID NO: 1195206 - DNA, 15 bp, Homo sapiens
tgtctgggtgaaggg

SEQ ID NO: 1195207 - DNA, 15 bp, Homo sapiens
atgtctgggtgaagg

SEQ ID NO: 1195208 - DNA, 15 bp, Homo sapiens
gatgtctgggtgaag

SEQ ID NO: 1195209 - DNA, 15 bp, Homo sapiens
agatgtctgggtgaa

SEQ ID NO: 1195210 - DNA, 15 bp, Homo sapiens
gagatgtctgggtga

SEQ ID NO: 1195211 - DNA, 15 bp, Homo sapiens
tgagatgtctgggtg

SEQ ID NO: 1195212 - DNA, 15 bp, Homo sapiens
ttgagatgtctgggt

SEQ ID NO: 1195213 - DNA, 15 bp, Homo sapiens
tttgagatgtctggg

SEQ ID NO: 1195214 - DNA, 15 bp, Homo sapiens
ctttgagatgtctgg

SEQ ID NO: 1195215 - DNA, 15 bp, Homo sapiens
tctttgagatgtctg

SEQ ID NO: 1195216 - DNA, 15 bp, Homo sapiens
ctctttgagatgtct

SEQ ID NO: 1195217 - DNA, 15 bp, Homo sapiens
gctctttgagatgtc

SEQ ID NO: 1195218 - DNA, 15 bp, Homo sapiens
tgctctttgagatgt

SEQ ID NO: 1195219 - DNA, 15 bp, Homo sapiens
ctgctctttgagatg

SEQ ID NO: 1195220 - DNA, 15 bp, Homo sapiens
actgctctttgagat

SEQ ID NO: 1195221 - DNA, 15 bp, Homo sapiens
tactgctctttgaga

SEQ ID NO: 1195222 - DNA, 15 bp, Homo sapiens
ctactgctctttgag

SEQ ID NO: 1195223 - DNA, 15 bp, Homo sapiens
gctactgctctttga

SEQ ID NO: 1195224 - DNA, 15 bp, Homo sapiens
agctactgctctttg

SEQ ID NO: 1195225 - DNA, 15 bp, Homo sapiens
gagctactgctcttt

SEQ ID NO: 1195226 - DNA, 15 bp, Homo sapiens
agagctactgctctt

SEQ ID NO: 1195227 - DNA, 15 bp, Homo sapiens
gagagctactgctct

SEQ ID NO: 1195228 - DNA, 15 bp, Homo sapiens
tgagagctactgctc

SEQ ID NO: 1195229 - DNA, 15 bp, Homo sapiens
atgagagctactgct

SEQ ID NO: 1195230 - DNA, 15 bp, Homo sapiens
catgagagctactgc

SEQ ID NO: 1195231 - DNA, 15 bp, Homo sapiens
tcatgagagctactg

SEQ ID NO: 1195232 - DNA, 15 bp, Homo sapiens
ttcatgagagctact

SEQ ID NO: 1195233 - DNA, 15 bp, Homo sapiens
tttcatgagagctac

SEQ ID NO: 1195234 - DNA, 15 bp, Homo sapiens
ttttcatgagagcta

SEQ ID NO: 1195235 - DNA, 15 bp, Homo sapiens
cttttcatgagagct

SEQ ID NO: 1195236 - DNA, 15 bp, Homo sapiens
gcttttcatgagagc

SEQ ID NO: 1195237 - DNA, 15 bp, Homo sapiens
tgcttttcatgagag

SEQ ID NO: 1195238 - DNA, 15 bp, Homo sapiens
ttgcttttcatgaga

SEQ ID NO: 1195239 - DNA, 15 bp, Homo sapiens
attgcttttcatgag

SEQ ID NO: 1195240 - DNA, 15 bp, Homo sapiens
gattgcttttcatga

SEQ ID NO: 1195241 - DNA, 15 bp, Homo sapiens
tgattgcttttcatg

SEQ ID NO: 1195242 - DNA, 15 bp, Homo sapiens
gtgattgcttttcat

SEQ ID NO: 1195243 - DNA, 15 bp, Homo sapiens
agtgattgcttttca

SEQ ID NO: 1195244 - DNA, 15 bp, Homo sapiens
cagtgattgcttttc

SEQ ID NO: 1195245 - DNA, 15 bp, Homo sapiens
tcagtgattgctttt

SEQ ID NO: 1195246 - DNA, 15 bp, Homo sapiens
atcagtgattgcttt

SEQ ID NO: 1195247 - DNA, 15 bp, Homo sapiens
gatcagtgattgctt

SEQ ID NO: 1195248 - DNA, 15 bp, Homo sapiens
agatcagtgattgct

SEQ ID NO: 1195249 - DNA, 15 bp, Homo sapiens
gagatcagtgattgc

SEQ ID NO: 1195250 - DNA, 15 bp, Homo sapiens
tgagatcagtgattg

SEQ ID NO: 1195251 - DNA, 15 bp, Homo sapiens
atgagatcagtgatt

SEQ ID NO: 1195252 - DNA, 15 bp, Homo sapiens
aatgagatcagtgat

SEQ ID NO: 1195253 - DNA, 15 bp, Homo sapiens
aaatgagatcagtga

SEQ ID NO: 1195254 - DNA, 15 bp, Homo sapiens
caaatgagatcagtg

SEQ ID NO: 1195255 - DNA, 15 bp, Homo sapiens
ccaaatgagatcagt

SEQ ID NO: 1195256 - DNA, 15 bp, Homo sapiens
cccaaatgagatcag

SEQ ID NO: 1195257 - DNA, 15 bp, Homo sapiens
tcccaaatgagatca

SEQ ID NO: 1195258 - DNA, 15 bp, Homo sapiens
ttcccaaatgagatc

SEQ ID NO: 1195259 - DNA, 15 bp, Homo sapiens
tttcccaaatgagat

SEQ ID NO: 1195260 - DNA, 15 bp, Homo sapiens
atttcccaaatgaga

SEQ ID NO: 1195261 - DNA, 15 bp, Homo sapiens
catttcccaaatgag

SEQ ID NO: 1195262 - DNA, 15 bp, Homo sapiens
acatttcccaaatga

SEQ ID NO: 1195263 - DNA, 15 bp, Homo sapiens
aacatttcccaaatg

SEQ ID NO: 1195264 - DNA, 15 bp, Homo sapiens
caacatttcccaaat

SEQ ID NO: 1195265 - DNA, 15 bp, Homo sapiens
ccaacatttcccaaa

SEQ ID NO: 1195266 - DNA, 15 bp, Homo sapiens
tccaacatttcccaa

SEQ ID NO: 1195267 - DNA, 15 bp, Homo sapiens
ttccaacatttccca

SEQ ID NO: 1195268 - DNA, 15 bp, Homo sapiens
tttccaacatttccc

SEQ ID NO: 1195269 - DNA, 15 bp, Homo sapiens
ctttccaacatttcc

SEQ ID NO: 1195270 - DNA, 15 bp, Homo sapiens
actttccaacatttc

SEQ ID NO: 1195271 - DNA, 15 bp, Homo sapiens
tactttccaacattt

SEQ ID NO: 1195272 - DNA, 15 bp, Homo sapiens
atactttccaacatt

SEQ ID NO: 1195273 - DNA, 15 bp, Homo sapiens
aatactttccaacat

SEQ ID NO: 1195274 - DNA, 15 bp, Homo sapiens
aaatactttccaaca

SEQ ID NO: 1195275 - DNA, 15 bp, Homo sapiens
gaaatactttccaac

SEQ ID NO: 1195276 - DNA, 15 bp, Homo sapiens
ggaaatactttccaa

SEQ ID NO: 1195277 - DNA, 15 bp, Homo sapiens
aggaaatactttcca

SEQ ID NO: 1195278 - DNA, 15 bp, Homo sapiens
aaggaaatactttcc

SEQ ID NO: 1195279 - DNA, 15 bp, Homo sapiens
taaggaaatactttc

SEQ ID NO: 1195280 - DNA, 15 bp, Homo sapiens
ataaggaaatacttt

SEQ ID NO: 1195281 - DNA, 15 bp, Homo sapiens
cataaggaaatactt

SEQ ID NO: 1195282 - DNA, 15 bp, Homo sapiens
tcataaggaaatact

SEQ ID NO: 1195283 - DNA, 15 bp, Homo sapiens
ctcataaggaaatac

SEQ ID NO: 1195284 - DNA, 15 bp, Homo sapiens
tctcataaggaaata

SEQ ID NO: 1195285 - DNA, 15 bp, Homo sapiens
atctcataaggaaat

SEQ ID NO: 1195286 - DNA, 15 bp, Homo sapiens
catctcataaggaaa

SEQ ID NO: 1195287 - DNA, 15 bp, Homo sapiens
ccatctcataaggaa

SEQ ID NO: 1195288 - DNA, 15 bp, Homo sapiens
cccatctcataagga

SEQ ID NO: 1195289 - DNA, 15 bp, Homo sapiens
ccccatctcataagg

SEQ ID NO: 1195290 - DNA, 15 bp, Homo sapiens
cccccatctcataag

SEQ ID NO: 1195291 - DNA, 15 bp, Homo sapiens
acccccatctcataa

SEQ ID NO: 1195292 - DNA, 15 bp, Homo sapiens
aacccccatctcata

SEQ ID NO: 1195293 - DNA, 15 bp, Homo sapiens
taacccccatctcat

SEQ ID NO: 1195294 - DNA, 15 bp, Homo sapiens
ataacccccatctca

SEQ ID NO: 1195295 - DNA, 15 bp, Homo sapiens
gataacccccatctc

SEQ ID NO: 1195296 - DNA, 15 bp, Homo sapiens
agataacccccatct

SEQ ID NO: 1195297 - DNA, 15 bp, Homo sapiens
tagataacccccatc

SEQ ID NO: 1195298 - DNA, 15 bp, Homo sapiens
gtagataacccccat

SEQ ID NO: 1195299 - DNA, 15 bp, Homo sapiens
agtagataaccccca

SEQ ID NO: 1195300 - DNA, 15 bp, Homo sapiens
cagtagataaccccc

SEQ ID NO: 1195301 - DNA, 15 bp, Homo sapiens
tcagtagataacccc

SEQ ID NO: 1195302 - DNA, 15 bp, Homo sapiens
atcagtagataaccc

SEQ ID NO: 1195303 - DNA, 15 bp, Homo sapiens
tatcagtagataacc

SEQ ID NO: 1195304 - DNA, 15 bp, Homo sapiens
ttatcagtagataac

SEQ ID NO: 1195305 - DNA, 15 bp, Homo sapiens
tttatcagtagataa

SEQ ID NO: 1195306 - DNA, 15 bp, Homo sapiens
ctttatcagtagata

SEQ ID NO: 1195307 - DNA, 15 bp, Homo sapiens
tctttatcagtagat

SEQ ID NO: 1195308 - DNA, 15 bp, Homo sapiens
ttctttatcagtaga

SEQ ID NO: 1195309 - DNA, 15 bp, Homo sapiens
tttctttatcagtag

SEQ ID NO: 1195310 - DNA, 15 bp, Homo sapiens
ctttctttatcagta

SEQ ID NO: 1195311 - DNA, 15 bp, Homo sapiens
tctttctttatcagt

SEQ ID NO: 1195312 - DNA, 15 bp, Homo sapiens
ttctttctttatcag

SEQ ID NO: 1195313 - DNA, 15 bp, Homo sapiens
attctttctttatca

SEQ ID NO: 1195314 - DNA, 15 bp, Homo sapiens
aattctttctttatc

SEQ ID NO: 1195315 - DNA, 15 bp, Homo sapiens
aaattctttctttat

SEQ ID NO: 1195316 - DNA, 15 bp, Homo sapiens
taaattctttcttta

SEQ ID NO: 1195317 - DNA, 15 bp, Homo sapiens
ataaattctttcttt

SEQ ID NO: 1195318 - DNA, 15 bp, Homo sapiens
cataaattctttctt

SEQ ID NO: 1195319 - DNA, 15 bp, Homo sapiens
tcataaattctttct

SEQ ID NO: 1195320 - DNA, 15 bp, Homo sapiens
ctcataaattctttc

SEQ ID NO: 1195321 - DNA, 15 bp, Homo sapiens
tctcataaattcttt

SEQ ID NO: 1195322 - DNA, 15 bp, Homo sapiens
ttctcataaattctt

SEQ ID NO: 1195323 - DNA, 15 bp, Homo sapiens
tttctcataaattct

SEQ ID NO: 1195324 - DNA, 15 bp, Homo sapiens
atttctcataaattc

SEQ ID NO: 1195325 - DNA, 15 bp, Homo sapiens
aatttctcataaatt

SEQ ID NO: 1195326 - DNA, 15 bp, Homo sapiens
caatttctcataaat

SEQ ID NO: 1195327 - DNA, 15 bp, Homo sapiens
acaatttctcataaa

SEQ ID NO: 1195328 - DNA, 15 bp, Homo sapiens
aacaatttctcataa

SEQ ID NO: 1195329 - DNA, 15 bp, Homo sapiens
caacaatttctcata

SEQ ID NO: 1195330 - DNA, 15 bp, Homo sapiens
tcaacaatttctcat

SEQ ID NO: 1195331 - DNA, 15 bp, Homo sapiens
ttcaacaatttctca

SEQ ID NO: 1195332 - DNA, 15 bp, Homo sapiens
tttcaacaatttctc

SEQ ID NO: 1195333 - DNA, 15 bp, Homo sapiens
ctttcaacaatttct

SEQ ID NO: 1195334 - DNA, 15 bp, Homo sapiens
tctttcaacaatttc

SEQ ID NO: 1195335 - DNA, 15 bp, Homo sapiens
ctctttcaacaattt

SEQ ID NO: 1195336 - DNA, 15 bp, Homo sapiens
tctctttcaacaatt

SEQ ID NO: 1195337 - DNA, 15 bp, Homo sapiens
atctctttcaacaat

SEQ ID NO: 1195338 - DNA, 15 bp, Homo sapiens
catctctttcaacaa

SEQ ID NO: 1195339 - DNA, 15 bp, Homo sapiens
ccatctctttcaaca

SEQ ID NO: 1195340 - DNA, 15 bp, Homo sapiens
gccatctctttcaac

SEQ ID NO: 1195341 - DNA, 15 bp, Homo sapiens
agccatctctttcaa

SEQ ID NO: 1195342 - DNA, 15 bp, Homo sapiens
tagccatctctttca

SEQ ID NO: 1195343 - DNA, 15 bp, Homo sapiens
ttagccatctctttc

SEQ ID NO: 1195344 - DNA, 15 bp, Homo sapiens
gttagccatctcttt

SEQ ID NO: 1195345 - DNA, 15 bp, Homo sapiens
tgttagccatctctt

SEQ ID NO: 1195346 - DNA, 15 bp, Homo sapiens
ttgttagccatctct

SEQ ID NO: 1195347 - DNA, 15 bp, Homo sapiens
attgttagccatctc

SEQ ID NO: 1195348 - DNA, 15 bp, Homo sapiens
gattgttagccatct

SEQ ID NO: 1195349 - DNA, 15 bp, Homo sapiens
agattgttagccatc

SEQ ID NO: 1195350 - DNA, 15 bp, Homo sapiens
cagattgttagccat

SEQ ID NO: 1195351 - DNA, 15 bp, Homo sapiens
acagattgttagcca

SEQ ID NO: 1195352 - DNA, 15 bp, Homo sapiens
cacagattgttagcc

SEQ ID NO: 1195353 - DNA, 15 bp, Homo sapiens
ttagatgccatttat

SEQ ID NO: 1195354 - DNA, 15 bp, Homo sapiens
attagatgccattta

SEQ ID NO: 1195355 - DNA, 15 bp, Homo sapiens
tattagatgccattt

SEQ ID NO: 1195356 - DNA, 15 bp, Homo sapiens
gtattagatgccatt

SEQ ID NO: 1195357 - DNA, 15 bp, Homo sapiens
tgtattagatgccat

SEQ ID NO: 1195358 - DNA, 15 bp, Homo sapiens
atgtattagatgcca

SEQ ID NO: 1195359 - DNA, 15 bp, Homo sapiens
aatgtattagatgcc

SEQ ID NO: 1195360 - DNA, 15 bp, Homo sapiens
gaatgtattagatgc

SEQ ID NO: 1195361 - DNA, 15 bp, Homo sapiens
ggaatgtattagatg

SEQ ID NO: 1195362 - DNA, 15 bp, Homo sapiens
gggaatgtattagat

SEQ ID NO: 1195363 - DNA, 15 bp, Homo sapiens
tgggaatgtattaga

SEQ ID NO: 1195364 - DNA, 15 bp, Homo sapiens
atgggaatgtattag

SEQ ID NO: 1195365 - DNA, 15 bp, Homo sapiens
tatgggaatgtatta

SEQ ID NO: 1195366 - DNA, 15 bp, Homo sapiens
gtatgggaatgtatt

SEQ ID NO: 1195367 - DNA, 15 bp, Homo sapiens
ggtatgggaatgtat

SEQ ID NO: 1195368 - DNA, 15 bp, Homo sapiens
tggtatgggaatgta

SEQ ID NO: 1195369 - DNA, 15 bp, Homo sapiens
ttggtatgggaatgt

SEQ ID NO: 1195370 - DNA, 15 bp, Homo sapiens
cttggtatgggaatg

SEQ ID NO: 1195371 - DNA, 15 bp, Homo sapiens
tcttggtatgggaat

SEQ ID NO: 1195372 - DNA, 15 bp, Homo sapiens
ctcttggtatgggaa

SEQ ID NO: 1195373 - DNA, 15 bp, Homo sapiens
tctcttggtatggga

SEQ ID NO: 1195374 - DNA, 15 bp, Homo sapiens
atctcttggtatggg

SEQ ID NO: 1195375 - DNA, 15 bp, Homo sapiens
aatctcttggtatgg

SEQ ID NO: 1195376 - DNA, 15 bp, Homo sapiens
aaatctcttggtatg

SEQ ID NO: 1195377 - DNA, 15 bp, Homo sapiens
taaatctcttggtat

SEQ ID NO: 1195378 - DNA, 15 bp, Homo sapiens
ataaatctcttggta

SEQ ID NO: 1195379 - DNA, 15 bp, Homo sapiens
tataaatctcttggt

SEQ ID NO: 1195380 - DNA, 15 bp, Homo sapiens
ttataaatctcttgg

SEQ ID NO: 1195381 - DNA, 15 bp, Homo sapiens
cttataaatctcttg

SEQ ID NO: 1195382 - DNA, 15 bp, Homo sapiens
tcttataaatctctt

SEQ ID NO: 1195383 - DNA, 15 bp, Homo sapiens
ttcttataaatctct

SEQ ID NO: 1195384 - DNA, 15 bp, Homo sapiens
attcttataaatctc

SEQ ID NO: 1195385 - DNA, 15 bp, Homo sapiens
cattcttataaatct

SEQ ID NO: 1195386 - DNA, 15 bp, Homo sapiens
acattcttataaatc

SEQ ID NO: 1195387 - DNA, 15 bp, Homo sapiens
cacattcttataaat

SEQ ID NO: 1195388 - DNA, 15 bp, Homo sapiens
tcacattcttataaa

SEQ ID NO: 1195389 - DNA, 15 bp, Homo sapiens
atcacattcttataa

SEQ ID NO: 1195390 - DNA, 15 bp, Homo sapiens
gatcacattcttata

SEQ ID NO: 1195391 - DNA, 15 bp, Homo sapiens
agatcacattcttat

SEQ ID NO: 1195392 - DNA, 15 bp, Homo sapiens
gagatcacattctta

SEQ ID NO: 1195393 - DNA, 15 bp, Homo sapiens
agagatcacattctt

SEQ ID NO: 1195394 - DNA, 15 bp, Homo sapiens
gagagatcacattct

SEQ ID NO: 1195395 - DNA, 15 bp, Homo sapiens
tgagagatcacattc

SEQ ID NO: 1195396 - DNA, 15 bp, Homo sapiens
ctgagagatcacatt

SEQ ID NO: 1195397 - DNA, 15 bp, Homo sapiens
gctgagagatcacat

SEQ ID NO: 1195398 - DNA, 15 bp, Homo sapiens
tgctgagagatcaca

SEQ ID NO: 1195399 - DNA, 15 bp, Homo sapiens
atgctgagagatcac

SEQ ID NO: 1195400 - DNA, 15 bp, Homo sapiens
aatgctgagagatca

SEQ ID NO: 1195401 - DNA, 15 bp, Homo sapiens
caatgctgagagatc

SEQ ID NO: 1195402 - DNA, 15 bp, Homo sapiens
tcaatgctgagagat

SEQ ID NO: 1195403 - DNA, 15 bp, Homo sapiens
ctcaatgctgagaga

SEQ ID NO: 1195404 - DNA, 15 bp, Homo sapiens
actcaatgctgagag

SEQ ID NO: 1195405 - DNA, 15 bp, Homo sapiens
aactcaatgctgaga

SEQ ID NO: 1195406 - DNA, 15 bp, Homo sapiens
aaactcaatgctgag

SEQ ID NO: 1195407 - DNA, 15 bp, Homo sapiens
aaaactcaatgctga

SEQ ID NO: 1195408 - DNA, 15 bp, Homo sapiens
aaaaactcaatgctg

SEQ ID NO: 1195409 - DNA, 15 bp, Homo sapiens
caaaaactcaatgct

SEQ ID NO: 1195410 - DNA, 15 bp, Homo sapiens
acaaaaactcaatgc

SEQ ID NO: 1195411 - DNA, 15 bp, Homo sapiens
aacaaaaactcaatg

SEQ ID NO: 1195412 - DNA, 15 bp, Homo sapiens
aaacaaaaactcaat

SEQ ID NO: 1195413 - DNA, 15 bp, Homo sapiens
gaaacaaaaactcaa

SEQ ID NO: 1195414 - DNA, 15 bp, Homo sapiens
tgaaacaaaaactca

SEQ ID NO: 1195415 - DNA, 15 bp, Homo sapiens
ttgaaacaaaaactc

SEQ ID NO: 1195416 - DNA, 15 bp, Homo sapiens
attgaaacaaaaact

SEQ ID NO: 1195417 - DNA, 15 bp, Homo sapiens
tattgaaacaaaaac

SEQ ID NO: 1195418 - DNA, 15 bp, Homo sapiens
ttattgaaacaaaaa

SEQ ID NO: 1195419 - DNA, 15 bp, Homo sapiens
tttattgaaacaaaa

SEQ ID NO: 1195420 - DNA, 15 bp, Homo sapiens
atttattgaaacaaa

SEQ ID NO: 1195421 - DNA, 15 bp, Homo sapiens
gatttattgaaacaa

SEQ ID NO: 1195422 - DNA, 15 bp, Homo sapiens
cgatttattgaaaca

SEQ ID NO: 1195423 - DNA, 15 bp, Homo sapiens
acgatttattgaaac

SEQ ID NO: 1195424 - DNA, 15 bp, Homo sapiens
aacgatttattgaaa

SEQ ID NO: 1195425 - DNA, 15 bp, Homo sapiens
gaacgatttattgaa

SEQ ID NO: 1195426 - DNA, 15 bp, Homo sapiens
ggaacgatttattga

SEQ ID NO: 1195427 - DNA, 15 bp, Homo sapiens
tggaacgatttattg

SEQ ID NO: 1195428 - DNA, 15 bp, Homo sapiens
ttggaacgatttatt

SEQ ID NO: 1195429 - DNA, 15 bp, Homo sapiens
attggaacgatttat

SEQ ID NO: 1195430 - DNA, 15 bp, Homo sapiens
aattggaacgattta

SEQ ID NO: 1195431 - DNA, 15 bp, Homo sapiens
aaattggaacgattt

SEQ ID NO: 1195432 - DNA, 15 bp, Homo sapiens
aaaattggaacgatt

SEQ ID NO: 1195433 - DNA, 15 bp, Homo sapiens
aaaaattggaacgat

SEQ ID NO: 1195434 - DNA, 15 bp, Homo sapiens
aaaaaattggaacga

SEQ ID NO: 1195435 - DNA, 15 bp, Homo sapiens
taaaaaattggaacg

SEQ ID NO: 1195436 - DNA, 15 bp, Homo sapiens
gtaaaaaattggaac

SEQ ID NO: 1195437 - DNA, 15 bp, Homo sapiens
agtaaaaaattggaa

SEQ ID NO: 1195438 - DNA, 15 bp, Homo sapiens
cagtaaaaaattgga

SEQ ID NO: 1195439 - DNA, 15 bp, Homo sapiens
tcagtaaaaaattgg

SEQ ID NO: 1195440 - DNA, 15 bp, Homo sapiens
ttcagtaaaaaattg

SEQ ID NO: 1195441 - DNA, 15 bp, Homo sapiens
attcagtaaaaaatt

SEQ ID NO: 1195442 - DNA, 15 bp, Homo sapiens
tattcagtaaaaaat

SEQ ID NO: 1195443 - DNA, 15 bp, Homo sapiens
ctattcagtaaaaaa

SEQ ID NO: 1195444 - DNA, 15 bp, Homo sapiens
tctattcagtaaaaa

SEQ ID NO: 1195445 - DNA, 15 bp, Homo sapiens
atctattcagtaaaa

SEQ ID NO: 1195446 - DNA, 15 bp, Homo sapiens
tatctattcagtaaa

SEQ ID NO: 1195447 - DNA, 15 bp, Homo sapiens
gtatctattcagtaa

SEQ ID NO: 1195448 - DNA, 15 bp, Homo sapiens
agtatctattcagta

SEQ ID NO: 1195449 - DNA, 15 bp, Homo sapiens
cagtatctattcagt

SEQ ID NO: 1195450 - DNA, 15 bp, Homo sapiens
acagtatctattcag

SEQ ID NO: 1195451 - DNA, 15 bp, Homo sapiens
cacagtatctattca

SEQ ID NO: 1195452 - DNA, 15 bp, Homo sapiens
tcacagtatctattc

SEQ ID NO: 1195453 - DNA, 15 bp, Homo sapiens
ttcacagtatctatt

SEQ ID NO: 1195454 - DNA, 15 bp, Homo sapiens
attcacagtatctat

SEQ ID NO: 1195455 - DNA, 15 bp, Homo sapiens
tattcacagtatcta

SEQ ID NO: 1195456 - DNA, 15 bp, Homo sapiens
atattcacagtatct

SEQ ID NO: 1195457 - DNA, 15 bp, Homo sapiens
gatattcacagtatc

SEQ ID NO: 1195458 - DNA, 15 bp, Homo sapiens
tgatattcacagtat

SEQ ID NO: 1195459 - DNA, 15 bp, Homo sapiens
ttgatattcacagta

SEQ ID NO: 1195460 - DNA, 15 bp, Homo sapiens
tttgatattcacagt

SEQ ID NO: 1195461 - DNA, 15 bp, Homo sapiens
atttgatattcacag

SEQ ID NO: 1195462 - DNA, 15 bp, Homo sapiens
aatttgatattcaca

SEQ ID NO: 1195463 - DNA, 15 bp, Homo sapiens
gaatttgatattcac

SEQ ID NO: 1195464 - DNA, 15 bp, Homo sapiens
tgaatttgatattca

SEQ ID NO: 1195465 - DNA, 15 bp, Homo sapiens
gtgaatttgatattc

SEQ ID NO: 1195466 - DNA, 15 bp, Homo sapiens
tgtgaatttgatatt

SEQ ID NO: 1195467 - DNA, 15 bp, Homo sapiens
ttgtgaatttgatat

SEQ ID NO: 1195468 - DNA, 15 bp, Homo sapiens
gttgtgaatttgata

SEQ ID NO: 1195469 - DNA, 15 bp, Homo sapiens
tgttgtgaatttgat

SEQ ID NO: 1195470 - DNA, 15 bp, Homo sapiens
ctgttgtgaatttga

SEQ ID NO: 1195471 - DNA, 15 bp, Homo sapiens
gctgttgtgaatttg

SEQ ID NO: 1195472 - DNA, 15 bp, Homo sapiens
tgctgttgtgaattt

SEQ ID NO: 1195473 - DNA, 15 bp, Homo sapiens
atgctgttgtgaatt

SEQ ID NO: 1195474 - DNA, 15 bp, Homo sapiens
aatgctgttgtgaat

SEQ ID NO: 1195475 - DNA, 15 bp, Homo sapiens
aaatgctgttgtgaa

SEQ ID NO: 1195476 - DNA, 15 bp, Homo sapiens
taaatgctgttgtga

SEQ ID NO: 1195477 - DNA, 15 bp, Homo sapiens
ataaatgctgttgtg

SEQ ID NO: 1195478 - DNA, 15 bp, Homo sapiens
tataaatgctgttgt

SEQ ID NO: 1195479 - DNA, 15 bp, Homo sapiens
ctataaatgctgttg

SEQ ID NO: 1195480 - DNA, 15 bp, Homo sapiens
tctataaatgctgtt

SEQ ID NO: 1195481 - DNA, 15 bp, Homo sapiens
ttctataaatgctgt

SEQ ID NO: 1195482 - DNA, 15 bp, Homo sapiens
cttctataaatgctg

SEQ ID NO: 1195483 - DNA, 15 bp, Homo sapiens
acttctataaatgct

SEQ ID NO: 1195484 - DNA, 15 bp, Homo sapiens
tacttctataaatgc

SEQ ID NO: 1195485 - DNA, 15 bp, Homo sapiens
gtacttctataaatg

SEQ ID NO: 1195486 - DNA, 15 bp, Homo sapiens
tgtacttctataaat

SEQ ID NO: 1195487 - DNA, 15 bp, Homo sapiens
ttgtacttctataaa

SEQ ID NO: 1195488 - DNA, 15 bp, Homo sapiens
cttgtacttctataa

SEQ ID NO: 1195489 - DNA, 15 bp, Homo sapiens
ccttgtacttctata

SEQ ID NO: 1195490 - DNA, 15 bp, Homo sapiens
accttgtacttctat

SEQ ID NO: 1195491 - DNA, 15 bp, Homo sapiens
taccttgtacttcta

SEQ ID NO: 1195492 - DNA, 15 bp, Homo sapiens
ataccttgtacttct

SEQ ID NO: 1195493 - DNA, 15 bp, Homo sapiens
tataccttgtacttc

SEQ ID NO: 1195494 - DNA, 15 bp, Homo sapiens
ttataccttgtactt

SEQ ID NO: 1195495 - DNA, 15 bp, Homo sapiens
tttataccttgtact

SEQ ID NO: 1195496 - DNA, 15 bp, Homo sapiens
ctttataccttgtac

SEQ ID NO: 1195497 - DNA, 15 bp, Homo sapiens
tctttataccttgta

SEQ ID NO: 1195498 - DNA, 15 bp, Homo sapiens
atctttataccttgt

SEQ ID NO: 1195499 - DNA, 15 bp, Homo sapiens
aatctttataccttg

SEQ ID NO: 1195500 - DNA, 15 bp, Homo sapiens
caatctttatacctt

SEQ ID NO: 1195501 - DNA, 15 bp, Homo sapiens
ccaatctttatacct

SEQ ID NO: 1195502 - DNA, 15 bp, Homo sapiens
accaatctttatacc

SEQ ID NO: 1195503 - DNA, 15 bp, Homo sapiens
taccaatctttatac

SEQ ID NO: 1195504 - DNA, 15 bp, Homo sapiens
ttaccaatctttata

SEQ ID NO: 1195505 - DNA, 15 bp, Homo sapiens
attaccaatctttat

SEQ ID NO: 1195506 - DNA, 15 bp, Homo sapiens
gattaccaatcttta

SEQ ID NO: 1195507 - DNA, 15 bp, Homo sapiens
agattaccaatcttt

SEQ ID NO: 1195508 - DNA, 15 bp, Homo sapiens
gagattaccaatctt

SEQ ID NO: 1195509 - DNA, 15 bp, Homo sapiens
ggagattaccaatct

SEQ ID NO: 1195510 - DNA, 15 bp, Homo sapiens
gggagattaccaatc

SEQ ID NO: 1195511 - DNA, 15 bp, Homo sapiens
agggagattaccaat

SEQ ID NO: 1195512 - DNA, 15 bp, Homo sapiens
gagggagattaccaa

SEQ ID NO: 1195513 - DNA, 15 bp, Homo sapiens
cgagggagattacca

SEQ ID NO: 1195514 - DNA, 15 bp, Homo sapiens
acgagggagattacc

SEQ ID NO: 1195515 - DNA, 15 bp, Homo sapiens
aacgagggagattac

SEQ ID NO: 1195516 - DNA, 15 bp, Homo sapiens
aaacgagggagatta

SEQ ID NO: 1195517 - DNA, 15 bp, Homo sapiens
taaacgagggagatt

SEQ ID NO: 1195518 - DNA, 15 bp, Homo sapiens
ttaaacgagggagat

SEQ ID NO: 1195519 - DNA, 15 bp, Homo sapiens
tttaaacgagggaga

SEQ ID NO: 1195520 - DNA, 15 bp, Homo sapiens
ttttaaacgagggag

SEQ ID NO: 1195521 - DNA, 15 bp, Homo sapiens
cttttaaacgaggga

SEQ ID NO: 1195522 - DNA, 15 bp, Homo sapiens
gcttttaaacgaggg

SEQ ID NO: 1195523 - DNA, 15 bp, Homo sapiens
tgcttttaaacgagg

SEQ ID NO: 1195524 - DNA, 15 bp, Homo sapiens
atgcttttaaacgag

SEQ ID NO: 1195525 - DNA, 15 bp, Homo sapiens
gatgcttttaaacga

SEQ ID NO: 1195526 - DNA, 15 bp, Homo sapiens
agatgcttttaaacg

SEQ ID NO: 1195527 - DNA, 15 bp, Homo sapiens
gagatgcttttaaac

SEQ ID NO: 1195528 - DNA, 15 bp, Homo sapiens
tgagatgcttttaaa

SEQ ID NO: 1195529 - DNA, 15 bp, Homo sapiens
atgagatgcttttaa

SEQ ID NO: 1195530 - DNA, 15 bp, Homo sapiens
aatgagatgctttta

SEQ ID NO: 1195531 - DNA, 15 bp, Homo sapiens
aaatgagatgctttt

SEQ ID NO: 1195532 - DNA, 15 bp, Homo sapiens
gaaatgagatgcttt

SEQ ID NO: 1195533 - DNA, 15 bp, Homo sapiens
tgaaatgagatgctt

SEQ ID NO: 1195534 - DNA, 15 bp, Homo sapiens
atgaaatgagatgct

SEQ ID NO: 1195535 - DNA, 15 bp, Homo sapiens
aatgaaatgagatgc

SEQ ID NO: 1195536 - DNA, 15 bp, Homo sapiens
aaatgaaatgagatg

SEQ ID NO: 1195537 - DNA, 15 bp, Homo sapiens
aaaatgaaatgagat

SEQ ID NO: 1195538 - DNA, 15 bp, Homo sapiens
aaaaatgaaatgaga

SEQ ID NO: 1195539 - DNA, 15 bp, Homo sapiens
aaaaaatgaaatgag

SEQ ID NO: 1195540 - DNA, 15 bp, Homo sapiens
taaaaaatgaaatga

SEQ ID NO: 1195541 - DNA, 15 bp, Homo sapiens
ttaaaaaatgaaatg

SEQ ID NO: 1195542 - DNA, 15 bp, Homo sapiens
tttaaaaaatgaaat

SEQ ID NO: 1195543 - DNA, 15 bp, Homo sapiens
atgaatttttaaaaa

SEQ ID NO: 1195544 - DNA, 15 bp, Homo sapiens
aatgaatttttaaaa

SEQ ID NO: 1195545 - DNA, 15 bp, Homo sapiens
taatgaatttttaaa

SEQ ID NO: 1195546 - DNA, 15 bp, Homo sapiens
ttaatgaatttttaa

SEQ ID NO: 1195547 - DNA, 15 bp, Homo sapiens
gttaatgaattttta

SEQ ID NO: 1195548 - DNA, 15 bp, Homo sapiens
agttaatgaattttt

SEQ ID NO: 1195549 - DNA, 15 bp, Homo sapiens
tagttaatgaatttt

SEQ ID NO: 1195550 - DNA, 15 bp, Homo sapiens
atagttaatgaattt

SEQ ID NO: 1195551 - DNA, 15 bp, Homo sapiens
aatagttaatgaatt

SEQ ID NO: 1195552 - DNA, 15 bp, Homo sapiens
aaatagttaatgaat

SEQ ID NO: 1195553 - DNA, 15 bp, Homo sapiens
caaatagttaatgaa

SEQ ID NO: 1195554 - DNA, 15 bp, Homo sapiens
ccaaatagttaatga

SEQ ID NO: 1195555 - DNA, 15 bp, Homo sapiens
tccaaatagttaatg

SEQ ID NO: 1195556 - DNA, 15 bp, Homo sapiens
ttccaaatagttaat

SEQ ID NO: 1195557 - DNA, 15 bp, Homo sapiens
tttccaaatagttaa

SEQ ID NO: 1195558 - DNA, 15 bp, Homo sapiens
ctttccaaatagtta

SEQ ID NO: 1195559 - DNA, 15 bp, Homo sapiens
actttccaaatagtt

SEQ ID NO: 1195560 - DNA, 15 bp, Homo sapiens
aactttccaaatagt

SEQ ID NO: 1195561 - DNA, 15 bp, Homo sapiens
taactttccaaatag

SEQ ID NO: 1195562 - DNA, 15 bp, Homo sapiens
gtaactttccaaata

SEQ ID NO: 1195563 - DNA, 15 bp, Homo sapiens
ggtaactttccaaat

SEQ ID NO: 1195564 - DNA, 15 bp, Homo sapiens
gggtaactttccaaa

SEQ ID NO: 1195565 - DNA, 15 bp, Homo sapiens
tgggtaactttccaa

SEQ ID NO: 1195566 - DNA, 15 bp, Homo sapiens
ttgggtaactttcca

SEQ ID NO: 1195567 - DNA, 15 bp, Homo sapiens
tttgggtaactttcc

SEQ ID NO: 1195568 - DNA, 15 bp, Homo sapiens
atttgggtaactttc

SEQ ID NO: 1195569 - DNA, 15 bp, Homo sapiens
tatttgggtaacttt

SEQ ID NO: 1195570 - DNA, 15 bp, Homo sapiens
atatttgggtaactt

SEQ ID NO: 1195571 - DNA, 15 bp, Homo sapiens
tatatttgggtaact

SEQ ID NO: 1195572 - DNA, 15 bp, Homo sapiens
ttatatttgggtaac

SEQ ID NO: 1195573 - DNA, 15 bp, Homo sapiens
tttatatttgggtaa

SEQ ID NO: 1195574 - DNA, 15 bp, Homo sapiens
ttttatatttgggta

SEQ ID NO: 1195575 - DNA, 15 bp, Homo sapiens
tttttatatttgggt

SEQ ID NO: 1195576 - DNA, 15 bp, Homo sapiens
ttttttatatttggg

SEQ ID NO: 1195577 - DNA, 15 bp, Homo sapiens
tttttttatatttgg

SEQ ID NO: 1195578 - DNA, 15 bp, Homo sapiens
ctttttttatatttg

SEQ ID NO: 1195579 - DNA, 15 bp, Homo sapiens
actttttttatattt

SEQ ID NO: 1195580 - DNA, 15 bp, Homo sapiens
gactttttttatatt

SEQ ID NO: 1195581 - DNA, 15 bp, Homo sapiens
agactttttttatat

SEQ ID NO: 1195582 - DNA, 15 bp, Homo sapiens
gagactttttttata

SEQ ID NO: 1195583 - DNA, 15 bp, Homo sapiens
tgagactttttttat

SEQ ID NO: 1195584 - DNA, 15 bp, Homo sapiens
gtgagacttttttta

SEQ ID NO: 1195585 - DNA, 15 bp, Homo sapiens
tgtgagacttttttt

SEQ ID NO: 1195586 - DNA, 15 bp, Homo sapiens
ttgtgagactttttt

SEQ ID NO: 1195587 - DNA, 15 bp, Homo sapiens
cttgtgagacttttt

SEQ ID NO: 1195588 - DNA, 15 bp, Homo sapiens
acttgtgagactttt

SEQ ID NO: 1195589 - DNA, 15 bp, Homo sapiens
aacttgtgagacttt

SEQ ID NO: 1195590 - DNA, 15 bp, Homo sapiens
aaacttgtgagactt

SEQ ID NO: 1195591 - DNA, 15 bp, Homo sapiens
aaaacttgtgagact

SEQ ID NO: 1195592 - DNA, 15 bp, Homo sapiens
caaaacttgtgagac

SEQ ID NO: 1195593 - DNA, 15 bp, Homo sapiens
acaaaacttgtgaga

SEQ ID NO: 1195594 - DNA, 15 bp, Homo sapiens
tacaaaacttgtgag

SEQ ID NO: 1195595 - DNA, 15 bp, Homo sapiens
gtacaaaacttgtga

SEQ ID NO: 1195596 - DNA, 15 bp, Homo sapiens
agtacaaaacttgtg

SEQ ID NO: 1195597 - DNA, 15 bp, Homo sapiens
aagtacaaaacttgt

SEQ ID NO: 1195598 - DNA, 15 bp, Homo sapiens
taagtacaaaacttg

SEQ ID NO: 1195599 - DNA, 15 bp, Homo sapiens
ctaagtacaaaactt

SEQ ID NO: 1195600 - DNA, 15 bp, Homo sapiens
actaagtacaaaact

SEQ ID NO: 1195601 - DNA, 15 bp, Homo sapiens
aactaagtacaaaac

SEQ ID NO: 1195602 - DNA, 15 bp, Homo sapiens
aaactaagtacaaaa

SEQ ID NO: 1195603 - DNA, 15 bp, Homo sapiens
aaaactaagtacaaa

SEQ ID NO: 1195604 - DNA, 15 bp, Homo sapiens
taaaactaagtacaa

SEQ ID NO: 1195605 - DNA, 15 bp, Homo sapiens
ttaaaactaagtaca

SEQ ID NO: 1195606 - DNA, 15 bp, Homo sapiens
cttaaaactaagtac

SEQ ID NO: 1195607 - DNA, 15 bp, Homo sapiens
ccttaaaactaagta

SEQ ID NO: 1195608 - DNA, 15 bp, Homo sapiens
tccttaaaactaagt

SEQ ID NO: 1195609 - DNA, 15 bp, Homo sapiens
ttccttaaaactaag

SEQ ID NO: 1195610 - DNA, 15 bp, Homo sapiens
tttccttaaaactaa

SEQ ID NO: 1195611 - DNA, 15 bp, Homo sapiens
atttccttaaaacta

SEQ ID NO: 1195612 - DNA, 15 bp, Homo sapiens
aatttccttaaaact

SEQ ID NO: 1195613 - DNA, 15 bp, Homo sapiens
taatttccttaaaac

SEQ ID NO: 1195614 - DNA, 15 bp, Homo sapiens
ataatttccttaaaa

SEQ ID NO: 1195615 - DNA, 15 bp, Homo sapiens
tataatttccttaaa

SEQ ID NO: 1195616 - DNA, 15 bp, Homo sapiens
ctataatttccttaa

SEQ ID NO: 1195617 - DNA, 15 bp, Homo sapiens
actataatttcctta

SEQ ID NO: 1195618 - DNA, 15 bp, Homo sapiens
tactataatttcctt

SEQ ID NO: 1195619 - DNA, 15 bp, Homo sapiens
ttactataatttcct

SEQ ID NO: 1195620 - DNA, 15 bp, Homo sapiens
tttactataatttcc

SEQ ID NO: 1195621 - DNA, 15 bp, Homo sapiens
ctttactataatttc

SEQ ID NO: 1195622 - DNA, 15 bp, Homo sapiens
actttactataattt

SEQ ID NO: 1195623 - DNA, 15 bp, Homo sapiens
aactttactataatt

SEQ ID NO: 1195624 - DNA, 15 bp, Homo sapiens
aaactttactataat

SEQ ID NO: 1195625 - DNA, 15 bp, Homo sapiens
aaaactttactataa

SEQ ID NO: 1195626 - DNA, 15 bp, Homo sapiens
gaaaactttactata

SEQ ID NO: 1195627 - DNA, 15 bp, Homo sapiens
agaaaactttactat

SEQ ID NO: 1195628 - DNA, 15 bp, Homo sapiens
aagaaaactttacta

SEQ ID NO: 1195629 - DNA, 15 bp, Homo sapiens
aaagaaaactttact

SEQ ID NO: 1195630 - DNA, 15 bp, Homo sapiens
taaagaaaactttac

SEQ ID NO: 1195631 - DNA, 15 bp, Homo sapiens
ttaaagaaaacttta

SEQ ID NO: 1195632 - DNA, 15 bp, Homo sapiens
attaaagaaaacttt

SEQ ID NO: 1195633 - DNA, 15 bp, Homo sapiens
tattaaagaaaactt

SEQ ID NO: 1195634 - DNA, 15 bp, Homo sapiens
atattaaagaaaact

SEQ ID NO: 1195635 - DNA, 15 bp, Homo sapiens
aatattaaagaaaac

SEQ ID NO: 1195636 - DNA, 15 bp, Homo sapiens
aaatattaaagaaaa

SEQ ID NO: 1195637 - DNA, 15 bp, Homo sapiens
aaaatattaaagaaa

SEQ ID NO: 1195638 - DNA, 15 bp, Homo sapiens
gaaaatattaaagaa

SEQ ID NO: 1195639 - DNA, 15 bp, Homo sapiens
agaaaatattaaaga

SEQ ID NO: 1195640 - DNA, 15 bp, Homo sapiens
gagaaaatattaaag

SEQ ID NO: 1195641 - DNA, 15 bp, Homo sapiens
tgagaaaatattaaa

SEQ ID NO: 1195642 - DNA, 15 bp, Homo sapiens
gtgagaaaatattaa

SEQ ID NO: 1195643 - DNA, 15 bp, Homo sapiens
cgtgagaaaatatta

SEQ ID NO: 1195644 - DNA, 15 bp, Homo sapiens
acgtgagaaaatatt

SEQ ID NO: 1195645 - DNA, 15 bp, Homo sapiens
cacgtgagaaaatat

SEQ ID NO: 1195646 - DNA, 15 bp, Homo sapiens
gcacgtgagaaaata

SEQ ID NO: 1195647 - DNA, 15 bp, Homo sapiens
ggcacgtgagaaaat

SEQ ID NO: 1195648 - DNA, 15 bp, Homo sapiens
tggcacgtgagaaaa

SEQ ID NO: 1195649 - DNA, 15 bp, Homo sapiens
atggcacgtgagaaa

SEQ ID NO: 1195650 - DNA, 15 bp, Homo sapiens
aatggcacgtgagaa

SEQ ID NO: 1195651 - DNA, 15 bp, Homo sapiens
caatggcacgtgaga

SEQ ID NO: 1195652 - DNA, 15 bp, Homo sapiens
ccaatggcacgtgag

SEQ ID NO: 1195653 - DNA, 15 bp, Homo sapiens
accaatggcacgtga

SEQ ID NO: 1195654 - DNA, 15 bp, Homo sapiens
caccaatggcacgtg

SEQ ID NO: 1195655 - DNA, 15 bp, Homo sapiens
acaccaatggcacgt

SEQ ID NO: 1195656 - DNA, 15 bp, Homo sapiens
gacaccaatggcacg

SEQ ID NO: 1195657 - DNA, 15 bp, Homo sapiens
ggacaccaatggcac

SEQ ID NO: 1195658 - DNA, 15 bp, Homo sapiens
gggacaccaatggca

SEQ ID NO: 1195659 - DNA, 15 bp, Homo sapiens
tgggacaccaatggc

SEQ ID NO: 1195660 - DNA, 15 bp, Homo sapiens
atgggacaccaatgg

SEQ ID NO: 1195661 - DNA, 15 bp, Homo sapiens
gatgggacaccaatg

SEQ ID NO: 1195662 - DNA, 15 bp, Homo sapiens
agatgggacaccaat

SEQ ID NO: 1195663 - DNA, 15 bp, Homo sapiens
gagatgggacaccaa

SEQ ID NO: 1195664 - DNA, 15 bp, Homo sapiens
tgagatgggacacca

SEQ ID NO: 1195665 - DNA, 15 bp, Homo sapiens
gtgagatgggacacc

SEQ ID NO: 1195666 - DNA, 15 bp, Homo sapiens
cgtgagatgggacac

SEQ ID NO: 1195667 - DNA, 15 bp, Homo sapiens
acgtgagatgggaca

SEQ ID NO: 1195668 - DNA, 15 bp, Homo sapiens
gaacgtgagatggga

SEQ ID NO: 1195669 - DNA, 15 bp, Homo sapiens
tgaacgtgagatggg

SEQ ID NO: 1195670 - DNA, 15 bp, Homo sapiens
atgaacgtgagatgg

SEQ ID NO: 1195671 - DNA, 15 bp, Homo sapiens
aatgaacgtgagatg

SEQ ID NO: 1195672 - DNA, 15 bp, Homo sapiens
gaatgaacgtgagat

SEQ ID NO: 1195673 - DNA, 15 bp, Homo sapiens
ggaatgaacgtgaga

SEQ ID NO: 1195674 - DNA, 15 bp, Homo sapiens
aggaatgaacgtgag

SEQ ID NO: 1195675 - DNA, 15 bp, Homo sapiens
taggaatgaacgtga

SEQ ID NO: 1195676 - DNA, 15 bp, Homo sapiens
gtaggaatgaacgtg

SEQ ID NO: 1195677 - DNA, 15 bp, Homo sapiens
ggtaggaatgaacgt

SEQ ID NO: 1195678 - DNA, 15 bp, Homo sapiens
aggtaggaatgaacg

SEQ ID NO: 1195679 - DNA, 15 bp, Homo sapiens
aaggtaggaatgaac

SEQ ID NO: 1195680 - DNA, 15 bp, Homo sapiens
aaaggtaggaatgaa

SEQ ID NO: 1195681 - DNA, 15 bp, Homo sapiens
caaaggtaggaatga

SEQ ID NO: 1195682 - DNA, 15 bp, Homo sapiens
gcaaaggtaggaatg

SEQ ID NO: 1195683 - DNA, 15 bp, Homo sapiens
agcaaaggtaggaat

SEQ ID NO: 1195684 - DNA, 15 bp, Homo sapiens
gagcaaaggtaggaa

SEQ ID NO: 1195685 - DNA, 15 bp, Homo sapiens
ggagcaaaggtagga

SEQ ID NO: 1195686 - DNA, 15 bp, Homo sapiens
gggagcaaaggtagg

SEQ ID NO: 1195687 - DNA, 15 bp, Homo sapiens
agggagcaaaggtag

SEQ ID NO: 1195688 - DNA, 15 bp, Homo sapiens
gagggagcaaaggta

SEQ ID NO: 1195689 - DNA, 15 bp, Homo sapiens
tgagggagcaaaggt

SEQ ID NO: 1195690 - DNA, 15 bp, Homo sapiens
ttgagggagcaaagg

SEQ ID NO: 1195691 - DNA, 15 bp, Homo sapiens
tttgagggagcaaag

SEQ ID NO: 1195692 - DNA, 15 bp, Homo sapiens
ttttgagggagcaaa

SEQ ID NO: 1195693 - DNA, 15 bp, Homo sapiens
attttgagggagcaa

SEQ ID NO: 1195694 - DNA, 15 bp, Homo sapiens
cattttgagggagca

SEQ ID NO: 1195695 - DNA, 15 bp, Homo sapiens
acattttgagggagc

SEQ ID NO: 1195696 - DNA, 15 bp, Homo sapiens
gacattttgagggag

SEQ ID NO: 1195697 - DNA, 15 bp, Homo sapiens
ggacattttgaggga

SEQ ID NO: 1195698 - DNA, 15 bp, Homo sapiens
tggacattttgaggg

SEQ ID NO: 1195699 - DNA, 15 bp, Homo sapiens
ttggacattttgagg

SEQ ID NO: 1195700 - DNA, 15 bp, Homo sapiens
cttggacattttgag

SEQ ID NO: 1195701 - DNA, 15 bp, Homo sapiens
tcttggacattttga

SEQ ID NO: 1195702 - DNA, 15 bp, Homo sapiens
ttcttggacattttg

SEQ ID NO: 1195703 - DNA, 15 bp, Homo sapiens
attcttggacatttt

SEQ ID NO: 1195704 - DNA, 15 bp, Homo sapiens
gattcttggacattt

SEQ ID NO: 1195705 - DNA, 15 bp, Homo sapiens
agattcttggacatt

SEQ ID NO: 1195706 - DNA, 15 bp, Homo sapiens
gagattcttggacat

SEQ ID NO: 1195707 - DNA, 15 bp, Homo sapiens
ggagattcttggaca

SEQ ID NO: 1195708 - DNA, 15 bp, Homo sapiens
gggagattcttggac

SEQ ID NO: 1195709 - DNA, 15 bp, Homo sapiens
agggagattcttgga

SEQ ID NO: 1195710 - DNA, 15 bp, Homo sapiens
cagggagattcttgg

SEQ ID NO: 1195711 - DNA, 15 bp, Homo sapiens
ccagggagattcttg

SEQ ID NO: 1195712 - DNA, 15 bp, Homo sapiens
cccagggagattctt

SEQ ID NO: 1195713 - DNA, 15 bp, Homo sapiens
tcccagggagattct

SEQ ID NO: 1195714 - DNA, 15 bp, Homo sapiens
gtcccagggagattc

SEQ ID NO: 1195715 - DNA, 15 bp, Homo sapiens
agtcccagggagatt

SEQ ID NO: 1195716 - DNA, 15 bp, Homo sapiens
tagtcccagggagat

SEQ ID NO: 1195717 - DNA, 15 bp, Homo sapiens
ttagtcccagggaga

SEQ ID NO: 1195718 - DNA, 15 bp, Homo sapiens
gttagtcccagggag

SEQ ID NO: 1195719 - DNA, 15 bp, Homo sapiens
tgttagtcccaggga

SEQ ID NO: 1195720 - DNA, 15 bp, Homo sapiens
atgttagtcccaggg

SEQ ID NO: 1195721 - DNA, 15 bp, Homo sapiens
aatgttagtcccagg

SEQ ID NO: 1195722 - DNA, 15 bp, Homo sapiens
taatgttagtcccag

SEQ ID NO: 1195723 - DNA, 15 bp, Homo sapiens
ataatgttagtccca

SEQ ID NO: 1195724 - DNA, 15 bp, Homo sapiens
cataatgttagtccc

SEQ ID NO: 1195725 - DNA, 15 bp, Homo sapiens
gcataatgttagtcc

SEQ ID NO: 1195726 - DNA, 15 bp, Homo sapiens
cgcataatgttagtc

SEQ ID NO: 1195727 - DNA, 15 bp, Homo sapiens
ccgcataatgttagt

SEQ ID NO: 1195728 - DNA, 15 bp, Homo sapiens
cccgcataatgttag

SEQ ID NO: 1195729 - DNA, 15 bp, Homo sapiens
gcccgcataatgtta

SEQ ID NO: 1195730 - DNA, 15 bp, Homo sapiens
ggcccgcataatgtt

SEQ ID NO: 1195731 - DNA, 15 bp, Homo sapiens
gggcccgcataatgt

SEQ ID NO: 1195732 - DNA, 15 bp, Homo sapiens
ggggcccgcataatg

SEQ ID NO: 1195733 - DNA, 15 bp, Homo sapiens
aggggcccgcataat

SEQ ID NO: 1195734 - DNA, 15 bp, Homo sapiens
aaggggcccgcataa

SEQ ID NO: 1195735 - DNA, 15 bp, Homo sapiens
gaaggggcccgcata

SEQ ID NO: 1195736 - DNA, 15 bp, Homo sapiens
agaaggggcccgcat

SEQ ID NO: 1195737 - DNA, 15 bp, Homo sapiens
aagaaggggcccgca

SEQ ID NO: 1195738 - DNA, 15 bp, Homo sapiens
gaagaaggggcccgc

SEQ ID NO: 1195739 - DNA, 15 bp, Homo sapiens
ggaagaaggggcccg

SEQ ID NO: 1195740 - DNA, 15 bp, Homo sapiens
aggaagaaggggccc

SEQ ID NO: 1195741 - DNA, 15 bp, Homo sapiens
gaggaagaaggggcc

SEQ ID NO: 1195742 - DNA, 15 bp, Homo sapiens
ggaggaagaaggggc

SEQ ID NO: 1195743 - DNA, 15 bp, Homo sapiens
tggaggaagaagggg

SEQ ID NO: 1195744 - DNA, 15 bp, Homo sapiens
ttggaggaagaaggg

SEQ ID NO: 1195745 - DNA, 15 bp, Homo sapiens
tttggaggaagaagg

SEQ ID NO: 1195746 - DNA, 15 bp, Homo sapiens
atttggaggaagaag

SEQ ID NO: 1195747 - DNA, 15 bp, Homo sapiens
catttggaggaagaa

SEQ ID NO: 1195748 - DNA, 15 bp, Homo sapiens
acatttggaggaaga

SEQ ID NO: 1195749 - DNA, 15 bp, Homo sapiens
gacatttggaggaag

SEQ ID NO: 1195750 - DNA, 15 bp, Homo sapiens
agacatttggaggaa

SEQ ID NO: 1195751 - DNA, 15 bp, Homo sapiens
aagacatttggagga

SEQ ID NO: 1195752 - DNA, 15 bp, Homo sapiens
caagacatttggagg

SEQ ID NO: 1195753 - DNA, 15 bp, Homo sapiens
acaagacatttggag

SEQ ID NO: 1195754 - DNA, 15 bp, Homo sapiens
aacaagacatttgga

SEQ ID NO: 1195755 - DNA, 15 bp, Homo sapiens
gaacaagacatttgg

SEQ ID NO: 1195756 - DNA, 15 bp, Homo sapiens
tgaacaagacatttg

SEQ ID NO: 1195757 - DNA, 15 bp, Homo sapiens
atgaacaagacattt

SEQ ID NO: 1195758 - DNA, 15 bp, Homo sapiens
catgaacaagacatt

SEQ ID NO: 1195759 - DNA, 15 bp, Homo sapiens
gcatgaacaagacat

SEQ ID NO: 1195760 - DNA, 15 bp, Homo sapiens
agcatgaacaagaca

SEQ ID NO: 1195761 - DNA, 15 bp, Homo sapiens
gagcatgaacaagac

SEQ ID NO: 1195762 - DNA, 15 bp, Homo sapiens
agagcatgaacaaga

SEQ ID NO: 1195763 - DNA, 15 bp, Homo sapiens
aagagcatgaacaag

SEQ ID NO: 1195764 - DNA, 15 bp, Homo sapiens
taagagcatgaacaa

SEQ ID NO: 1195765 - DNA, 15 bp, Homo sapiens
ctaagagcatgaaca

SEQ ID NO: 1195766 - DNA, 15 bp, Homo sapiens
gctaagagcatgaac

SEQ ID NO: 1195767 - DNA, 15 bp, Homo sapiens
tgctaagagcatgaa

SEQ ID NO: 1195768 - DNA, 15 bp, Homo sapiens
atgctaagagcatga

SEQ ID NO: 1195769 - DNA, 15 bp, Homo sapiens
aatgctaagagcatg

SEQ ID NO: 1195770 - DNA, 15 bp, Homo sapiens
aaatgctaagagcat

SEQ ID NO: 1195771 - DNA, 15 bp, Homo sapiens
aaaatgctaagagca

SEQ ID NO: 1195772 - DNA, 15 bp, Homo sapiens
caaaatgctaagagc

SEQ ID NO: 1195773 - DNA, 15 bp, Homo sapiens
gcaaaatgctaagag

SEQ ID NO: 1195774 - DNA, 15 bp, Homo sapiens
ggcaaaatgctaaga

SEQ ID NO: 1195775 - DNA, 15 bp, Homo sapiens
aggcaaaatgctaag

SEQ ID NO: 1195776 - DNA, 15 bp, Homo sapiens
gaggcaaaatgctaa

SEQ ID NO: 1195777 - DNA, 15 bp, Homo sapiens
ggaggcaaaatgcta

SEQ ID NO: 1195778 - DNA, 15 bp, Homo sapiens
aggaggcaaaatgct

SEQ ID NO: 1195779 - DNA, 15 bp, Homo sapiens
taggaggcaaaatgc

SEQ ID NO: 1195780 - DNA, 15 bp, Homo sapiens
ataggaggcaaaatg

SEQ ID NO: 1195781 - DNA, 15 bp, Homo sapiens
tataggaggcaaaat

SEQ ID NO: 1195782 - DNA, 15 bp, Homo sapiens
ctataggaggcaaaa

SEQ ID NO: 1195783 - DNA, 15 bp, Homo sapiens
actataggaggcaaa

SEQ ID NO: 1195784 - DNA, 15 bp, Homo sapiens
gactataggaggcaa

SEQ ID NO: 1195785 - DNA, 15 bp, Homo sapiens
tgactataggaggca

SEQ ID NO: 1195786 - DNA, 15 bp, Homo sapiens
atgactataggaggc

SEQ ID NO: 1195787 - DNA, 15 bp, Homo sapiens
catgactataggagg

SEQ ID NO: 1195788 - DNA, 15 bp, Homo sapiens
ccatgactataggag

SEQ ID NO: 1195789 - DNA, 15 bp, Homo sapiens
accatgactatagga

SEQ ID NO: 1195790 - DNA, 15 bp, Homo sapiens
caccatgactatagg

SEQ ID NO: 1195791 - DNA, 15 bp, Homo sapiens
acaccatgactatag

SEQ ID NO: 1195792 - DNA, 15 bp, Homo sapiens
aacaccatgactata

SEQ ID NO: 1195793 - DNA, 15 bp, Homo sapiens
gaacaccatgactat

SEQ ID NO: 1195794 - DNA, 15 bp, Homo sapiens
agaacaccatgacta

SEQ ID NO: 1195795 - DNA, 15 bp, Homo sapiens
cagaacaccatgact

SEQ ID NO: 1195796 - DNA, 15 bp, Homo sapiens
acagaacaccatgac

SEQ ID NO: 1195797 - DNA, 15 bp, Homo sapiens
tacagaacaccatga

SEQ ID NO: 1195798 - DNA, 15 bp, Homo sapiens
gtacagaacaccatg

SEQ ID NO: 1195799 - DNA, 15 bp, Homo sapiens
agtacagaacaccat

SEQ ID NO: 1195800 - DNA, 15 bp, Homo sapiens
tagtacagaacacca

SEQ ID NO: 1195801 - DNA, 15 bp, Homo sapiens
gtagtacagaacacc

SEQ ID NO: 1195802 - DNA, 15 bp, Homo sapiens
agtagtacagaacac

SEQ ID NO: 1195803 - DNA, 15 bp, Homo sapiens
aagtagtacagaaca

SEQ ID NO: 1195804 - DNA, 15 bp, Homo sapiens
gaagtagtacagaac

SEQ ID NO: 1195805 - DNA, 15 bp, Homo sapiens
agaagtagtacagaa

SEQ ID NO: 1195806 - DNA, 15 bp, Homo sapiens
gagaagtagtacaga

SEQ ID NO: 1195807 - DNA, 15 bp, Homo sapiens
ggagaagtagtacag

SEQ ID NO: 1195808 - DNA, 15 bp, Homo sapiens
gggagaagtagtaca

SEQ ID NO: 1195809 - DNA, 15 bp, Homo sapiens
ggggagaagtagtac

SEQ ID NO: 1195810 - DNA, 15 bp, Homo sapiens
aggggagaagtagta

SEQ ID NO: 1195811 - DNA, 15 bp, Homo sapiens
gaggggagaagtagt

SEQ ID NO: 1195812 - DNA, 15 bp, Homo sapiens
cgaggggagaagtag

SEQ ID NO: 1195813 - DNA, 15 bp, Homo sapiens
gcgaggggagaagta

SEQ ID NO: 1195814 - DNA, 15 bp, Homo sapiens
agcgaggggagaagt

SEQ ID NO: 1195815 - DNA, 15 bp, Homo sapiens
gagcgaggggagaag

SEQ ID NO: 1195816 - DNA, 15 bp, Homo sapiens
ggagcgaggggagaa

SEQ ID NO: 1195817 - DNA, 15 bp, Homo sapiens
tggagcgaggggaga

SEQ ID NO: 1195818 - DNA, 15 bp, Homo sapiens
gtggagcgaggggag

SEQ ID NO: 1195819 - DNA, 15 bp, Homo sapiens
agtggagcgagggga

SEQ ID NO: 1195820 - DNA, 15 bp, Homo sapiens
gagtggagcgagggg

SEQ ID NO: 1195821 - DNA, 15 bp, Homo sapiens
ggagtggagcgaggg

SEQ ID NO: 1195822 - DNA, 15 bp, Homo sapiens
tggagtggagcgagg

SEQ ID NO: 1195823 - DNA, 15 bp, Homo sapiens
ctggagtggagcgag

SEQ ID NO: 1195824 - DNA, 15 bp, Homo sapiens
tctggagtggagcga

SEQ ID NO: 1195825 - DNA, 15 bp, Homo sapiens
gtctggagtggagcg

SEQ ID NO: 1195826 - DNA, 15 bp, Homo sapiens
tgtctggagtggagc

SEQ ID NO: 1195827 - DNA, 15 bp, Homo sapiens
ttgtctggagtggag

SEQ ID NO: 1195828 - DNA, 15 bp, Homo sapiens
attgtctggagtgga

SEQ ID NO: 1195829 - DNA, 15 bp, Homo sapiens
gattgtctggagtgg

SEQ ID NO: 1195830 - DNA, 15 bp, Homo sapiens
ggattgtctggagtg

SEQ ID NO: 1195831 - DNA, 15 bp, Homo sapiens
gggattgtctggagt

SEQ ID NO: 1195832 - DNA, 15 bp, Homo sapiens
agggattgtctggag

SEQ ID NO: 1195833 - DNA, 15 bp, Homo sapiens
gagggattgtctgga

SEQ ID NO: 1195834 - DNA, 15 bp, Homo sapiens
agagggattgtctgg

SEQ ID NO: 1195835 - DNA, 15 bp, Homo sapiens
gagagggattgtctg

SEQ ID NO: 1195836 - DNA, 15 bp, Homo sapiens
agagagggattgtct

SEQ ID NO: 1195837 - DNA, 15 bp, Homo sapiens
gagagagggattgtc

SEQ ID NO: 1195838 - DNA, 15 bp, Homo sapiens
ggagagagggattgt

SEQ ID NO: 1195839 - DNA, 15 bp, Homo sapiens
aggagagagggattg

SEQ ID NO: 1195840 - DNA, 15 bp, Homo sapiens
aaggagagagggatt

SEQ ID NO: 1195841 - DNA, 15 bp, Homo sapiens
aaaggagagagggat

SEQ ID NO: 1195842 - DNA, 15 bp, Homo sapiens
gaaaggagagaggga

SEQ ID NO: 1195843 - DNA, 15 bp, Homo sapiens
tgaaaggagagaggg

SEQ ID NO: 1195844 - DNA, 15 bp, Homo sapiens
atgaaaggagagagg

SEQ ID NO: 1195845 - DNA, 15 bp, Homo sapiens
aatgaaaggagagag

SEQ ID NO: 1195846 - DNA, 15 bp, Homo sapiens
gaatgaaaggagaga

SEQ ID NO: 1195847 - DNA, 15 bp, Homo sapiens
tgaatgaaaggagag

SEQ ID NO: 1195848 - DNA, 15 bp, Homo sapiens
gtgaatgaaaggaga

SEQ ID NO: 1195849 - DNA, 15 bp, Homo sapiens
tgtgaatgaaaggag

SEQ ID NO: 1195850 - DNA, 15 bp, Homo sapiens
gtgtgaatgaaagga

SEQ ID NO: 1195851 - DNA, 15 bp, Homo sapiens
agtgtgaatgaaagg

SEQ ID NO: 1195852 - DNA, 15 bp, Homo sapiens
tagtgtgaatgaaag

SEQ ID NO: 1195853 - DNA, 15 bp, Homo sapiens
ctagtgtgaatgaaa

SEQ ID NO: 1195854 - DNA, 15 bp, Homo sapiens
cctagtgtgaatgaa

SEQ ID NO: 1195855 - DNA, 15 bp, Homo sapiens
ccctagtgtgaatga

SEQ ID NO: 1195856 - DNA, 15 bp, Homo sapiens
accctagtgtgaatg

SEQ ID NO: 1195857 - DNA, 15 bp, Homo sapiens
caccctagtgtgaat

SEQ ID NO: 1195858 - DNA, 15 bp, Homo sapiens
tcaccctagtgtgaa

SEQ ID NO: 1195859 - DNA, 15 bp, Homo sapiens
atcaccctagtgtga

SEQ ID NO: 1195860 - DNA, 15 bp, Homo sapiens
gatcaccctagtgtg

SEQ ID NO: 1195861 - DNA, 15 bp, Homo sapiens
agatcaccctagtgt

SEQ ID NO: 1195862 - DNA, 15 bp, Homo sapiens
tagatcaccctagtg

SEQ ID NO: 1195863 - DNA, 15 bp, Homo sapiens
ctagatcaccctagt

SEQ ID NO: 1195864 - DNA, 15 bp, Homo sapiens
gctagatcaccctag

SEQ ID NO: 1195865 - DNA, 15 bp, Homo sapiens
ggctagatcacccta

SEQ ID NO: 1195866 - DNA, 15 bp, Homo sapiens
tggctagatcaccct

SEQ ID NO: 1195867 - DNA, 15 bp, Homo sapiens
gtggctagatcaccc

SEQ ID NO: 1195868 - DNA, 15 bp, Homo sapiens
tgtggctagatcacc

SEQ ID NO: 1195869 - DNA, 15 bp, Homo sapiens
ctgtggctagatcac

SEQ ID NO: 1195870 - DNA, 15 bp, Homo sapiens
gctgtggctagatca

SEQ ID NO: 1195871 - DNA, 15 bp, Homo sapiens
ggctgtggctagatc

SEQ ID NO: 1195872 - DNA, 15 bp, Homo sapiens
aggctgtggctagat

SEQ ID NO: 1195873 - DNA, 15 bp, Homo sapiens
aaggctgtggctaga

SEQ ID NO: 1195874 - DNA, 15 bp, Homo sapiens
aaaggctgtggctag

SEQ ID NO: 1195875 - DNA, 15 bp, Homo sapiens
gaaaggctgtggcta

SEQ ID NO: 1195876 - DNA, 15 bp, Homo sapiens
tgaaaggctgtggct

SEQ ID NO: 1195877 - DNA, 15 bp, Homo sapiens
gtgaaaggctgtggc

SEQ ID NO: 1195878 - DNA, 15 bp, Homo sapiens
agtgaaaggctgtgg

SEQ ID NO: 1195879 - DNA, 15 bp, Homo sapiens
tagtgaaaggctgtg

SEQ ID NO: 1195880 - DNA, 15 bp, Homo sapiens
ttagtgaaaggctgt

SEQ ID NO: 1195881 - DNA, 15 bp, Homo sapiens
tttagtgaaaggctg

SEQ ID NO: 1195882 - DNA, 15 bp, Homo sapiens
ctttagtgaaaggct

SEQ ID NO: 1195883 - DNA, 15 bp, Homo sapiens
tctttagtgaaaggc

SEQ ID NO: 1195884 - DNA, 15 bp, Homo sapiens
atctttagtgaaagg

SEQ ID NO: 1195885 - DNA, 15 bp, Homo sapiens
aatctttagtgaaag

SEQ ID NO: 1195886 - DNA, 15 bp, Homo sapiens
aaatctttagtgaaa

SEQ ID NO: 1195887 - DNA, 15 bp, Homo sapiens
aaaatctttagtgaa

SEQ ID NO: 1195888 - DNA, 15 bp, Homo sapiens
caaaatctttagtga

SEQ ID NO: 1195889 - DNA, 15 bp, Homo sapiens
acaaaatctttagtg

SEQ ID NO: 1195890 - DNA, 15 bp, Homo sapiens
tacaaaatctttagt

SEQ ID NO: 1195891 - DNA, 15 bp, Homo sapiens
ttacaaaatctttag

SEQ ID NO: 1195892 - DNA, 15 bp, Homo sapiens
tttacaaaatcttta

SEQ ID NO: 1195893 - DNA, 15 bp, Homo sapiens
gtttacaaaatcttt

SEQ ID NO: 1195894 - DNA, 15 bp, Homo sapiens
tgtttacaaaatctt

SEQ ID NO: 1195895 - DNA, 15 bp, Homo sapiens
ttgtttacaaaatct

SEQ ID NO: 1195896 - DNA, 15 bp, Homo sapiens
attgtttacaaaatc

SEQ ID NO: 1195897 - DNA, 15 bp, Homo sapiens
cattgtttacaaaat

SEQ ID NO: 1195898 - DNA, 15 bp, Homo sapiens
tcattgtttacaaaa

SEQ ID NO: 1195899 - DNA, 15 bp, Homo sapiens
ttcattgtttacaaa

SEQ ID NO: 1195900 - DNA, 15 bp, Homo sapiens
tttcattgtttacaa

SEQ ID NO: 1195901 - DNA, 15 bp, Homo sapiens
ttttcattgtttaca

SEQ ID NO: 1195902 - DNA, 15 bp, Homo sapiens
cttttcattgtttac

SEQ ID NO: 1195903 - DNA, 15 bp, Homo sapiens
ccttttcattgttta

SEQ ID NO: 1195904 - DNA, 15 bp, Homo sapiens
ccccttttcattgtt

SEQ ID NO: 1195905 - DNA, 15 bp, Homo sapiens
tccccttttcattgt

SEQ ID NO: 1195906 - DNA, 15 bp, Homo sapiens
atccccttttcattg

SEQ ID NO: 1195907 - DNA, 15 bp, Homo sapiens
catccccttttcatt

SEQ ID NO: 1195908 - DNA, 15 bp, Homo sapiens
tcatccccttttcat

SEQ ID NO: 1195909 - DNA, 15 bp, Homo sapiens
ctcatccccttttca

SEQ ID NO: 1195910 - DNA, 15 bp, Homo sapiens
actcatccccttttc

SEQ ID NO: 1195911 - DNA, 15 bp, Homo sapiens
aactcatcccctttt

SEQ ID NO: 1195912 - DNA, 15 bp, Homo sapiens
taactcatccccttt

SEQ ID NO: 1195913 - DNA, 15 bp, Homo sapiens
ttaactcatcccctt

SEQ ID NO: 1195914 - DNA, 15 bp, Homo sapiens
cttaactcatcccct

SEQ ID NO: 1195915 - DNA, 15 bp, Homo sapiens
gcttaactcatcccc

SEQ ID NO: 1195916 - DNA, 15 bp, Homo sapiens
tgcttaactcatccc

SEQ ID NO: 1195917 - DNA, 15 bp, Homo sapiens
gtgcttaactcatcc

SEQ ID NO: 1195918 - DNA, 15 bp, Homo sapiens
tgtgcttaactcatc

SEQ ID NO: 1195919 - DNA, 15 bp, Homo sapiens
ctgtgcttaactcat

SEQ ID NO: 1195920 - DNA, 15 bp, Homo sapiens
cctgtgcttaactca

SEQ ID NO: 1195921 - DNA, 15 bp, Homo sapiens
tcctgtgcttaactc

SEQ ID NO: 1195922 - DNA, 15 bp, Homo sapiens
gtcctgtgcttaact

SEQ ID NO: 1195923 - DNA, 15 bp, Homo sapiens
tgtcctgtgcttaac

SEQ ID NO: 1195924 - DNA, 15 bp, Homo sapiens
ctgtcctgtgcttaa

SEQ ID NO: 1195925 - DNA, 15 bp, Homo sapiens
tctgtcctgtgctta

SEQ ID NO: 1195926 - DNA, 15 bp, Homo sapiens
ttctgtcctgtgctt

SEQ ID NO: 1195927 - DNA, 15 bp, Homo sapiens
tttctgtcctgtgct

SEQ ID NO: 1195928 - DNA, 15 bp, Homo sapiens
ttttctgtcctgtgc

SEQ ID NO: 1195929 - DNA, 15 bp, Homo sapiens
attttctgtcctgtg

SEQ ID NO: 1195930 - DNA, 15 bp, Homo sapiens
tattttctgtcctgt

SEQ ID NO: 1195931 - DNA, 15 bp, Homo sapiens
gtattttctgtcctg

SEQ ID NO: 1195932 - DNA, 15 bp, Homo sapiens
ggtattttctgtcct

SEQ ID NO: 1195933 - DNA, 15 bp, Homo sapiens
aggtattttctgtcc

SEQ ID NO: 1195934 - DNA, 15 bp, Homo sapiens
aaggtattttctgtc

SEQ ID NO: 1195935 - DNA, 15 bp, Homo sapiens
gaaggtattttctgt

SEQ ID NO: 1195936 - DNA, 15 bp, Homo sapiens
ggaaggtattttctg

SEQ ID NO: 1195937 - DNA, 15 bp, Homo sapiens
tggaaggtattttct

SEQ ID NO: 1195938 - DNA, 15 bp, Homo sapiens
atggaaggtattttc

SEQ ID NO: 1195939 - DNA, 15 bp, Homo sapiens
aatggaaggtatttt

SEQ ID NO: 1195940 - DNA, 15 bp, Homo sapiens
aaatggaaggtattt

SEQ ID NO: 1195941 - DNA, 15 bp, Homo sapiens
gaaatggaaggtatt

SEQ ID NO: 1195942 - DNA, 15 bp, Homo sapiens
tgaaatggaaggtat

SEQ ID NO: 1195943 - DNA, 15 bp, Homo sapiens
ttgaaatggaaggta

SEQ ID NO: 1195944 - DNA, 15 bp, Homo sapiens
attgaaatggaaggt

SEQ ID NO: 1195945 - DNA, 15 bp, Homo sapiens
cattgaaatggaagg

SEQ ID NO: 1195946 - DNA, 15 bp, Homo sapiens
ccattgaaatggaag

SEQ ID NO: 1195947 - DNA, 15 bp, Homo sapiens
gccattgaaatggaa

SEQ ID NO: 1195948 - DNA, 15 bp, Homo sapiens
tgccattgaaatgga

SEQ ID NO: 1195949 - DNA, 15 bp, Homo sapiens
ttgccattgaaatgg

SEQ ID NO: 1195950 - DNA, 15 bp, Homo sapiens
tttgccattgaaatg

SEQ ID NO: 1195951 - DNA, 15 bp, Homo sapiens
gtttgccattgaaat

SEQ ID NO: 1195952 - DNA, 15 bp, Homo sapiens
tgtttgccattgaaa

SEQ ID NO: 1195953 - DNA, 15 bp, Homo sapiens
atgtttgccattgaa

SEQ ID NO: 1195954 - DNA, 15 bp, Homo sapiens
gatgtttgccattga

SEQ ID NO: 1195955 - DNA, 15 bp, Homo sapiens
tgatgtttgccattg

SEQ ID NO: 1195956 - DNA, 15 bp, Homo sapiens
gtgatgtttgccatt

SEQ ID NO: 1195957 - DNA, 15 bp, Homo sapiens
agtgatgtttgccat

SEQ ID NO: 1195958 - DNA, 15 bp, Homo sapiens
tagtgatgtttgcca

SEQ ID NO: 1195959 - DNA, 15 bp, Homo sapiens
atagtgatgtttgcc

SEQ ID NO: 1195960 - DNA, 15 bp, Homo sapiens
aatagtgatgtttgc

SEQ ID NO: 1195961 - DNA, 15 bp, Homo sapiens
taatagtgatgtttg

SEQ ID NO: 1195962 - DNA, 15 bp, Homo sapiens
gtaatagtgatgttt

SEQ ID NO: 1195963 - DNA, 15 bp, Homo sapiens
agtaatagtgatgtt

SEQ ID NO: 1195964 - DNA, 15 bp, Homo sapiens
tagtaatagtgatgt

SEQ ID NO: 1195965 - DNA, 15 bp, Homo sapiens
atagtaatagtgatg

SEQ ID NO: 1195966 - DNA, 15 bp, Homo sapiens
catagtaatagtgat

SEQ ID NO: 1195967 - DNA, 15 bp, Homo sapiens
tcatagtaatagtga

SEQ ID NO: 1195968 - DNA, 15 bp, Homo sapiens
ttcatagtaatagtg

SEQ ID NO: 1195969 - DNA, 15 bp, Homo sapiens
attcatagtaatagt

SEQ ID NO: 1195970 - DNA, 15 bp, Homo sapiens
gattcatagtaatag

SEQ ID NO: 1195971 - DNA, 15 bp, Homo sapiens
ggattcatagtaata

SEQ ID NO: 1195972 - DNA, 15 bp, Homo sapiens
tggattcatagtaat

SEQ ID NO: 1195973 - DNA, 15 bp, Homo sapiens
ttggattcatagtaa

SEQ ID NO: 1195974 - DNA, 15 bp, Homo sapiens
cttggattcatagta

SEQ ID NO: 1195975 - DNA, 15 bp, Homo sapiens
ccttggattcatagt

SEQ ID NO: 1195976 - DNA, 15 bp, Homo sapiens
tccttggattcatag

SEQ ID NO: 1195977 - DNA, 15 bp, Homo sapiens
ttccttggattcata

SEQ ID NO: 1195978 - DNA, 15 bp, Homo sapiens
attccttggattcat

SEQ ID NO: 1195979 - DNA, 15 bp, Homo sapiens
aattccttggattca

SEQ ID NO: 1195980 - DNA, 15 bp, Homo sapiens
aaattccttggattc

SEQ ID NO: 1195981 - DNA, 15 bp, Homo sapiens
gaaattccttggatt

SEQ ID NO: 1195982 - DNA, 15 bp, Homo sapiens
agaaattccttggat

SEQ ID NO: 1195983 - DNA, 15 bp, Homo sapiens
cagaaattccttgga

SEQ ID NO: 1195984 - DNA, 15 bp, Homo sapiens
ccagaaattccttgg

SEQ ID NO: 1195985 - DNA, 15 bp, Homo sapiens
accagaaattccttg

SEQ ID NO: 1195986 - DNA, 15 bp, Homo sapiens
caccagaaattcctt

SEQ ID NO: 1195987 - DNA, 15 bp, Homo sapiens
ccaccagaaattcct

SEQ ID NO: 1195988 - DNA, 15 bp, Homo sapiens
gccaccagaaattcc

SEQ ID NO: 1195989 - DNA, 15 bp, Homo sapiens
agccaccagaaattc

SEQ ID NO: 1195990 - DNA, 15 bp, Homo sapiens
gagccaccagaaatt

SEQ ID NO: 1195991 - DNA, 15 bp, Homo sapiens
tgagccaccagaaat

SEQ ID NO: 1195992 - DNA, 15 bp, Homo sapiens
atgagccaccagaaa

SEQ ID NO: 1195993 - DNA, 15 bp, Homo sapiens
catgagccaccagaa

SEQ ID NO: 1195994 - DNA, 15 bp, Homo sapiens
acatgagccaccaga

SEQ ID NO: 1195995 - DNA, 15 bp, Homo sapiens
cacatgagccaccag

SEQ ID NO: 1195996 - DNA, 15 bp, Homo sapiens
gcacatgagccacca

SEQ ID NO: 1195997 - DNA, 15 bp, Homo sapiens
ggcacatgagccacc

SEQ ID NO: 1195998 - DNA, 15 bp, Homo sapiens
aggcacatgagccac

SEQ ID NO: 1195999 - DNA, 15 bp, Homo sapiens
gaggcacatgagcca

SEQ ID NO: 1196000 - DNA, 15 bp, Homo sapiens
ggaggcacatgagcc

SEQ ID NO: 1196001 - DNA, 15 bp, Homo sapiens
aggaggcacatgagc

SEQ ID NO: 1196002 - DNA, 15 bp, Homo sapiens
caggaggcacatgag

SEQ ID NO: 1196003 - DNA, 15 bp, Homo sapiens
acaggaggcacatga

SEQ ID NO: 1196004 - DNA, 15 bp, Homo sapiens
gacaggaggcacatg

SEQ ID NO: 1196005 - DNA, 15 bp, Homo sapiens
tgacaggaggcacat

SEQ ID NO: 1196006 - DNA, 15 bp, Homo sapiens
atgacaggaggcaca

SEQ ID NO: 1196007 - DNA, 15 bp, Homo sapiens
gatgacaggaggcac

SEQ ID NO: 1196008 - DNA, 15 bp, Homo sapiens
agatgacaggaggca

SEQ ID NO: 1196009 - DNA, 15 bp, Homo sapiens
aagatgacaggaggc

SEQ ID NO: 1196010 - DNA, 15 bp, Homo sapiens
taagatgacaggagg

SEQ ID NO: 1196011 - DNA, 15 bp, Homo sapiens
ctaagatgacaggag

SEQ ID NO: 1196012 - DNA, 15 bp, Homo sapiens
gctaagatgacagga

SEQ ID NO: 1196013 - DNA, 15 bp, Homo sapiens
tgctaagatgacagg

SEQ ID NO: 1196014 - DNA, 15 bp, Homo sapiens
ttgctaagatgacag

SEQ ID NO: 1196015 - DNA, 15 bp, Homo sapiens
cttgctaagatgaca

SEQ ID NO: 1196016 - DNA, 15 bp, Homo sapiens
tcttgctaagatgac

SEQ ID NO: 1196017 - DNA, 15 bp, Homo sapiens
atcttgctaagatga

SEQ ID NO: 1196018 - DNA, 15 bp, Homo sapiens
gatcttgctaagatg

SEQ ID NO: 1196019 - DNA, 15 bp, Homo sapiens
agatcttgctaagat

SEQ ID NO: 1196020 - DNA, 15 bp, Homo sapiens
aagatcttgctaaga

SEQ ID NO: 1196021 - DNA, 15 bp, Homo sapiens
aaagatcttgctaag

SEQ ID NO: 1196022 - DNA, 15 bp, Homo sapiens
aaaagatcttgctaa

SEQ ID NO: 1196023 - DNA, 15 bp, Homo sapiens
gaaaagatcttgcta

SEQ ID NO: 1196024 - DNA, 15 bp, Homo sapiens
ggaaaagatcttgct

SEQ ID NO: 1196025 - DNA, 15 bp, Homo sapiens
tggaaaagatcttgc

SEQ ID NO: 1196026 - DNA, 15 bp, Homo sapiens
gtggaaaagatcttg

SEQ ID NO: 1196027 - DNA, 15 bp, Homo sapiens
agtggaaaagatctt

SEQ ID NO: 1196028 - DNA, 15 bp, Homo sapiens
gagtggaaaagatct

SEQ ID NO: 1196029 - DNA, 15 bp, Homo sapiens
agagtggaaaagatc

SEQ ID NO: 1196030 - DNA, 15 bp, Homo sapiens
aagagtggaaaagat

SEQ ID NO: 1196031 - DNA, 15 bp, Homo sapiens
gaagagtggaaaaga

SEQ ID NO: 1196032 - DNA, 15 bp, Homo sapiens
agaagagtggaaaag

SEQ ID NO: 1196033 - DNA, 15 bp, Homo sapiens
cagaagagtggaaaa

SEQ ID NO: 1196034 - DNA, 15 bp, Homo sapiens
gcagaagagtggaaa

SEQ ID NO: 1196035 - DNA, 15 bp, Homo sapiens
tgcagaagagtggaa

SEQ ID NO: 1196036 - DNA, 15 bp, Homo sapiens
ttgcagaagagtgga

SEQ ID NO: 1196037 - DNA, 15 bp, Homo sapiens
tttgcagaagagtgg

SEQ ID NO: 1196038 - DNA, 15 bp, Homo sapiens
gtttgcagaagagtg

SEQ ID NO: 1196039 - DNA, 15 bp, Homo sapiens
agtttgcagaagagt

SEQ ID NO: 1196040 - DNA, 15 bp, Homo sapiens
gagtttgcagaagag

SEQ ID NO: 1196041 - DNA, 15 bp, Homo sapiens
agagtttgcagaaga

SEQ ID NO: 1196042 - DNA, 15 bp, Homo sapiens
gagagtttgcagaag

SEQ ID NO: 1196043 - DNA, 15 bp, Homo sapiens
ggagagtttgcagaa

SEQ ID NO: 1196044 - DNA, 15 bp, Homo sapiens
gggagagtttgcaga

SEQ ID NO: 1196045 - DNA, 15 bp, Homo sapiens
tgggagagtttgcag

SEQ ID NO: 1196046 - DNA, 15 bp, Homo sapiens
ctgggagagtttgca

SEQ ID NO: 1196047 - DNA, 15 bp, Homo sapiens
cctgggagagtttgc

SEQ ID NO: 1196048 - DNA, 15 bp, Homo sapiens
tcctgggagagtttg

SEQ ID NO: 1196049 - DNA, 15 bp, Homo sapiens
ttcctgggagagttt

SEQ ID NO: 1196050 - DNA, 15 bp, Homo sapiens
gttcctgggagagtt

SEQ ID NO: 1196051 - DNA, 15 bp, Homo sapiens
ggttcctgggagagt

SEQ ID NO: 1196052 - DNA, 15 bp, Homo sapiens
tggttcctgggagag

SEQ ID NO: 1196053 - DNA, 15 bp, Homo sapiens
gtggttcctgggaga

SEQ ID NO: 1196054 - DNA, 15 bp, Homo sapiens
agtggttcctgggag

SEQ ID NO: 1196055 - DNA, 15 bp, Homo sapiens
aagtggttcctggga

SEQ ID NO: 1196056 - DNA, 15 bp, Homo sapiens
aaagtggttcctggg

SEQ ID NO: 1196057 - DNA, 15 bp, Homo sapiens
gaaagtggttcctgg

SEQ ID NO: 1196058 - DNA, 15 bp, Homo sapiens
agaaagtggttcctg

SEQ ID NO: 1196059 - DNA, 15 bp, Homo sapiens
tagaaagtggttcct

SEQ ID NO: 1196060 - DNA, 15 bp, Homo sapiens
atagaaagtggttcc

SEQ ID NO: 1196061 - DNA, 15 bp, Homo sapiens
gatagaaagtggttc

SEQ ID NO: 1196062 - DNA, 15 bp, Homo sapiens
tgatagaaagtggtt

SEQ ID NO: 1196063 - DNA, 15 bp, Homo sapiens
ttgatagaaagtggt

SEQ ID NO: 1196064 - DNA, 15 bp, Homo sapiens
tttgatagaaagtgg

SEQ ID NO: 1196065 - DNA, 15 bp, Homo sapiens
gtttgatagaaagtg

SEQ ID NO: 1196066 - DNA, 15 bp, Homo sapiens
ggtttgatagaaagt

SEQ ID NO: 1196067 - DNA, 15 bp, Homo sapiens
gggtttgatagaaag

SEQ ID NO: 1196068 - DNA, 15 bp, Homo sapiens
agggtttgatagaaa

SEQ ID NO: 1196069 - DNA, 15 bp, Homo sapiens
aagggtttgatagaa

SEQ ID NO: 1196070 - DNA, 15 bp, Homo sapiens
aaagggtttgataga

SEQ ID NO: 1196071 - DNA, 15 bp, Homo sapiens
taaagggtttgatag

SEQ ID NO: 1196072 - DNA, 15 bp, Homo sapiens
ataaagggtttgata

SEQ ID NO: 1196073 - DNA, 15 bp, Homo sapiens
gataaagggtttgat

SEQ ID NO: 1196074 - DNA, 15 bp, Homo sapiens
ggataaagggtttga

SEQ ID NO: 1196075 - DNA, 15 bp, Homo sapiens
gggataaagggtttg

SEQ ID NO: 1196076 - DNA, 15 bp, Homo sapiens
ggggataaagggttt

SEQ ID NO: 1196077 - DNA, 15 bp, Homo sapiens
aggggataaagggtt

SEQ ID NO: 1196078 - DNA, 15 bp, Homo sapiens
gaggggataaagggt

SEQ ID NO: 1196079 - DNA, 15 bp, Homo sapiens
ggaggggataaaggg

SEQ ID NO: 1196080 - DNA, 15 bp, Homo sapiens
aggaggggataaagg

SEQ ID NO: 1196081 - DNA, 15 bp, Homo sapiens
aaggaggggataaag

SEQ ID NO: 1196082 - DNA, 15 bp, Homo sapiens
aaaggaggggataaa

SEQ ID NO: 1196083 - DNA, 15 bp, Homo sapiens
caaaggaggggataa

SEQ ID NO: 1196084 - DNA, 15 bp, Homo sapiens
ccaaaggaggggata

SEQ ID NO: 1196085 - DNA, 15 bp, Homo sapiens
tccaaaggaggggat

SEQ ID NO: 1196086 - DNA, 15 bp, Homo sapiens
ttccaaaggagggga

SEQ ID NO: 1196087 - DNA, 15 bp, Homo sapiens
tttccaaaggagggg

SEQ ID NO: 1196088 - DNA, 15 bp, Homo sapiens
ctttccaaaggaggg

SEQ ID NO: 1196089 - DNA, 15 bp, Homo sapiens
tctttccaaaggagg

SEQ ID NO: 1196090 - DNA, 15 bp, Homo sapiens
ttctttccaaaggag

SEQ ID NO: 1196091 - DNA, 15 bp, Homo sapiens
gttctttccaaagga

SEQ ID NO: 1196092 - DNA, 15 bp, Homo sapiens
agttctttccaaagg

SEQ ID NO: 1196093 - DNA, 15 bp, Homo sapiens
aagttctttccaaag

SEQ ID NO: 1196094 - DNA, 15 bp, Homo sapiens
taagttctttccaaa

SEQ ID NO: 1196095 - DNA, 15 bp, Homo sapiens
ataagttctttccaa

SEQ ID NO: 1196096 - DNA, 15 bp, Homo sapiens
tataagttctttcca

SEQ ID NO: 1196097 - DNA, 15 bp, Homo sapiens
ttataagttctttcc

SEQ ID NO: 1196098 - DNA, 15 bp, Homo sapiens
cttataagttctttc

SEQ ID NO: 1196099 - DNA, 15 bp, Homo sapiens
tcttataagttcttt

SEQ ID NO: 1196100 - DNA, 15 bp, Homo sapiens
ttcttataagttctt

SEQ ID NO: 1196101 - DNA, 15 bp, Homo sapiens
tttcttataagttct

SEQ ID NO: 1196102 - DNA, 15 bp, Homo sapiens
ttttcttataagttc

SEQ ID NO: 1196103 - DNA, 15 bp, Homo sapiens
attttcttataagtt

SEQ ID NO: 1196104 - DNA, 15 bp, Homo sapiens
aattttcttataagt

SEQ ID NO: 1196105 - DNA, 15 bp, Homo sapiens
taattttcttataag

SEQ ID NO: 1196106 - DNA, 15 bp, Homo sapiens
ataattttcttataa

SEQ ID NO: 1196107 - DNA, 15 bp, Homo sapiens
tataattttcttata

SEQ ID NO: 1196108 - DNA, 15 bp, Homo sapiens
atataattttcttat

SEQ ID NO: 1196109 - DNA, 15 bp, Homo sapiens
aatataattttctta

SEQ ID NO: 1196110 - DNA, 15 bp, Homo sapiens
caatataattttctt

SEQ ID NO: 1196111 - DNA, 15 bp, Homo sapiens
acaatataattttct

SEQ ID NO: 1196112 - DNA, 15 bp, Homo sapiens
tacaatataattttc

SEQ ID NO: 1196113 - DNA, 15 bp, Homo sapiens
atacaatataatttt

SEQ ID NO: 1196114 - DNA, 15 bp, Homo sapiens
aatacaatataattt

SEQ ID NO: 1196115 - DNA, 15 bp, Homo sapiens
gaatacaatataatt

SEQ ID NO: 1196116 - DNA, 15 bp, Homo sapiens
agaatacaatataat

SEQ ID NO: 1196117 - DNA, 15 bp, Homo sapiens
aagaatacaatataa

SEQ ID NO: 1196118 - DNA, 15 bp, Homo sapiens
taagaatacaatata

SEQ ID NO: 1196119 - DNA, 15 bp, Homo sapiens
ataagaatacaatat

SEQ ID NO: 1196120 - DNA, 15 bp, Homo sapiens
cataagaatacaata

SEQ ID NO: 1196121 - DNA, 15 bp, Homo sapiens
gcataagaatacaat

SEQ ID NO: 1196122 - DNA, 15 bp, Homo sapiens
tgcataagaatacaa

SEQ ID NO: 1196123 - DNA, 15 bp, Homo sapiens
ctgcataagaataca

SEQ ID NO: 1196124 - DNA, 15 bp, Homo sapiens
cctgcataagaatac

SEQ ID NO: 1196125 - DNA, 15 bp, Homo sapiens
ccctgcataagaata

SEQ ID NO: 1196126 - DNA, 15 bp, Homo sapiens
gccctgcataagaat

SEQ ID NO: 1196127 - DNA, 15 bp, Homo sapiens
tgccctgcataagaa

SEQ ID NO: 1196128 - DNA, 15 bp, Homo sapiens
ttgccctgcataaga

SEQ ID NO: 1196129 - DNA, 15 bp, Homo sapiens
attgccctgcataag

SEQ ID NO: 1196130 - DNA, 15 bp, Homo sapiens
gattgccctgcataa

SEQ ID NO: 1196131 - DNA, 15 bp, Homo sapiens
agattgccctgcata

SEQ ID NO: 1196132 - DNA, 15 bp, Homo sapiens
aagattgccctgcat

SEQ ID NO: 1196133 - DNA, 15 bp, Homo sapiens
aaagattgccctgca

SEQ ID NO: 1196134 - DNA, 15 bp, Homo sapiens
gaaagattgccctgc

SEQ ID NO: 1196135 - DNA, 15 bp, Homo sapiens
ggaaagattgccctg

SEQ ID NO: 1196136 - DNA, 15 bp, Homo sapiens
gggaaagattgccct

SEQ ID NO: 1196137 - DNA, 15 bp, Homo sapiens
ggggaaagattgccc

SEQ ID NO: 1196138 - DNA, 15 bp, Homo sapiens
tggggaaagattgcc

SEQ ID NO: 1196139 - DNA, 15 bp, Homo sapiens
atggggaaagattgc

SEQ ID NO: 1196140 - DNA, 15 bp, Homo sapiens
gatggggaaagattg

SEQ ID NO: 1196141 - DNA, 15 bp, Homo sapiens
ggatggggaaagatt

SEQ ID NO: 1196142 - DNA, 15 bp, Homo sapiens
gggatggggaaagat

SEQ ID NO: 1196143 - DNA, 15 bp, Homo sapiens
tgggatggggaaaga

SEQ ID NO: 1196144 - DNA, 15 bp, Homo sapiens
ctgggatggggaaag

SEQ ID NO: 1196145 - DNA, 15 bp, Homo sapiens
gctgggatggggaaa

SEQ ID NO: 1196146 - DNA, 15 bp, Homo sapiens
agctgggatggggaa

SEQ ID NO: 1196147 - DNA, 15 bp, Homo sapiens
aagctgggatgggga

SEQ ID NO: 1196148 - DNA, 15 bp, Homo sapiens
aaagctgggatgggg

SEQ ID NO: 1196149 - DNA, 15 bp, Homo sapiens
caaagctgggatggg

SEQ ID NO: 1196150 - DNA, 15 bp, Homo sapiens
gcaaagctgggatgg

SEQ ID NO: 1196151 - DNA, 15 bp, Homo sapiens
ggcaaagctgggatg

SEQ ID NO: 1196152 - DNA, 15 bp, Homo sapiens
tggcaaagctgggat

SEQ ID NO: 1196153 - DNA, 15 bp, Homo sapiens
ctggcaaagctggga

SEQ ID NO: 1196154 - DNA, 15 bp, Homo sapiens
actggcaaagctggg

SEQ ID NO: 1196155 - DNA, 15 bp, Homo sapiens
cactggcaaagctgg

SEQ ID NO: 1196156 - DNA, 15 bp, Homo sapiens
ccactggcaaagctg

SEQ ID NO: 1196157 - DNA, 15 bp, Homo sapiens
accactggcaaagct

SEQ ID NO: 1196158 - DNA, 15 bp, Homo sapiens
caccactggcaaagc

SEQ ID NO: 1196159 - DNA, 15 bp, Homo sapiens
ccaccactggcaaag

SEQ ID NO: 1196160 - DNA, 15 bp, Homo sapiens
cccaccactggcaaa

SEQ ID NO: 1196161 - DNA, 15 bp, Homo sapiens
ccccaccactggcaa

SEQ ID NO: 1196162 - DNA, 15 bp, Homo sapiens
cccccaccactggca

SEQ ID NO: 1196163 - DNA, 15 bp, Homo sapiens
acccccaccactggc

SEQ ID NO: 1196164 - DNA, 15 bp, Homo sapiens
cacccccaccactgg

SEQ ID NO: 1196165 - DNA, 15 bp, Homo sapiens
ccacccccaccactg

SEQ ID NO: 1196166 - DNA, 15 bp, Homo sapiens
cccacccccaccact

SEQ ID NO: 1196167 - DNA, 15 bp, Homo sapiens
ccccacccccaccac

SEQ ID NO: 1196168 - DNA, 15 bp, Homo sapiens
cccccacccccacca

SEQ ID NO: 1196169 - DNA, 15 bp, Homo sapiens
gcccccacccccacc

SEQ ID NO: 1196170 - DNA, 15 bp, Homo sapiens
tgcccccacccccac

SEQ ID NO: 1196171 - DNA, 15 bp, Homo sapiens
ctgcccccaccccca

SEQ ID NO: 1196172 - DNA, 15 bp, Homo sapiens
cctgcccccaccccc

SEQ ID NO: 1196173 - DNA, 15 bp, Homo sapiens
ccctgcccccacccc

SEQ ID NO: 1196174 - DNA, 15 bp, Homo sapiens
gccctgcccccaccc

SEQ ID NO: 1196175 - DNA, 15 bp, Homo sapiens
agccctgcccccacc

SEQ ID NO: 1196176 - DNA, 15 bp, Homo sapiens
cagccctgcccccac

SEQ ID NO: 1196177 - DNA, 15 bp, Homo sapiens
ccagccctgccccca

SEQ ID NO: 1196178 - DNA, 15 bp, Homo sapiens
gccagccctgccccc

SEQ ID NO: 1196179 - DNA, 15 bp, Homo sapiens
agccagccctgcccc

SEQ ID NO: 1196180 - DNA, 15 bp, Homo sapiens
gagccagccctgccc

SEQ ID NO: 1196181 - DNA, 15 bp, Homo sapiens
tgagccagccctgcc

SEQ ID NO: 1196182 - DNA, 15 bp, Homo sapiens
gtgagccagccctgc

SEQ ID NO: 1196183 - DNA, 15 bp, Homo sapiens
ggtgagccagccctg

SEQ ID NO: 1196184 - DNA, 15 bp, Homo sapiens
aggtgagccagccct

SEQ ID NO: 1196185 - DNA, 15 bp, Homo sapiens
aaggtgagccagccc

SEQ ID NO: 1196186 - DNA, 15 bp, Homo sapiens
aaaggtgagccagcc

SEQ ID NO: 1196187 - DNA, 15 bp, Homo sapiens
aaaaggtgagccagc

SEQ ID NO: 1196188 - DNA, 15 bp, Homo sapiens
caaaaggtgagccag

SEQ ID NO: 1196189 - DNA, 15 bp, Homo sapiens
acaaaaggtgagcca

SEQ ID NO: 1196190 - DNA, 15 bp, Homo sapiens
aacaaaaggtgagcc

SEQ ID NO: 1196191 - DNA, 15 bp, Homo sapiens
taacaaaaggtgagc

SEQ ID NO: 1196192 - DNA, 15 bp, Homo sapiens
gtaacaaaaggtgag

SEQ ID NO: 1196193 - DNA, 15 bp, Homo sapiens
agtaacaaaaggtga

SEQ ID NO: 1196194 - DNA, 15 bp, Homo sapiens
cagtaacaaaaggtg

SEQ ID NO: 1196195 - DNA, 15 bp, Homo sapiens
tcagtaacaaaaggt

SEQ ID NO: 1196196 - DNA, 15 bp, Homo sapiens
ttcagtaacaaaagg

SEQ ID NO: 1196197 - DNA, 15 bp, Homo sapiens
attcagtaacaaaag

SEQ ID NO: 1196198 - DNA, 15 bp, Homo sapiens
tattcagtaacaaaa

SEQ ID NO: 1196199 - DNA, 15 bp, Homo sapiens
atattcagtaacaaa

SEQ ID NO: 1196200 - DNA, 15 bp, Homo sapiens
catattcagtaacaa

SEQ ID NO: 1196201 - DNA, 15 bp, Homo sapiens
acatattcagtaaca

SEQ ID NO: 1196202 - DNA, 15 bp, Homo sapiens
tacatattcagtaac

SEQ ID NO: 1196203 - DNA, 15 bp, Homo sapiens
gtacatattcagtaa

SEQ ID NO: 1196204 - DNA, 15 bp, Homo sapiens
tgtacatattcagta

SEQ ID NO: 1196205 - DNA, 15 bp, Homo sapiens
ttgtacatattcagt

SEQ ID NO: 1196206 - DNA, 15 bp, Homo sapiens
tttgtacatattcag

SEQ ID NO: 1196207 - DNA, 15 bp, Homo sapiens
ttttgtacatattca

SEQ ID NO: 1196208 - DNA, 15 bp, Homo sapiens
cttttgtacatattc

SEQ ID NO: 1196209 - DNA, 15 bp, Homo sapiens
ccttttgtacatatt

SEQ ID NO: 1196210 - DNA, 15 bp, Homo sapiens
accttttgtacatat

SEQ ID NO: 1196211 - DNA, 15 bp, Homo sapiens
caccttttgtacata

SEQ ID NO: 1196212 - DNA, 15 bp, Homo sapiens
acaccttttgtacat

SEQ ID NO: 1196213 - DNA, 15 bp, Homo sapiens
aacaccttttgtaca

SEQ ID NO: 1196214 - DNA, 15 bp, Homo sapiens
gaacaccttttgtac

SEQ ID NO: 1196215 - DNA, 15 bp, Homo sapiens
agaacaccttttgta

SEQ ID NO: 1196216 - DNA, 15 bp, Homo sapiens
aagaacaccttttgt

SEQ ID NO: 1196217 - DNA, 15 bp, Homo sapiens
aaagaacaccttttg

SEQ ID NO: 1196218 - DNA, 15 bp, Homo sapiens
gaaagaacacctttt

SEQ ID NO: 1196219 - DNA, 15 bp, Homo sapiens
ggaaagaacaccttt

SEQ ID NO: 1196220 - DNA, 15 bp, Homo sapiens
aggaaagaacacctt

SEQ ID NO: 1196221 - DNA, 15 bp, Homo sapiens
taggaaagaacacct

SEQ ID NO: 1196222 - DNA, 15 bp, Homo sapiens
ttaggaaagaacacc

SEQ ID NO: 1196223 - DNA, 15 bp, Homo sapiens
tttaggaaagaacac

SEQ ID NO: 1196224 - DNA, 15 bp, Homo sapiens
ctttaggaaagaaca

SEQ ID NO: 1196225 - DNA, 15 bp, Homo sapiens
cctttaggaaagaac

SEQ ID NO: 1196226 - DNA, 15 bp, Homo sapiens
tcctttaggaaagaa

SEQ ID NO: 1196227 - DNA, 15 bp, Homo sapiens
ttcctttaggaaaga

SEQ ID NO: 1196228 - DNA, 15 bp, Homo sapiens
tttcctttaggaaag

SEQ ID NO: 1196229 - DNA, 15 bp, Homo sapiens
atttcctttaggaaa

SEQ ID NO: 1196230 - DNA, 15 bp, Homo sapiens
tatttcctttaggaa

SEQ ID NO: 1196231 - DNA, 15 bp, Homo sapiens
gtatttcctttagga

SEQ ID NO: 1196232 - DNA, 15 bp, Homo sapiens
ggtatttcctttagg

SEQ ID NO: 1196233 - DNA, 15 bp, Homo sapiens
tggtatttcctttag

SEQ ID NO: 1196234 - DNA, 15 bp, Homo sapiens
ttggtatttccttta

SEQ ID NO: 1196235 - DNA, 15 bp, Homo sapiens
attggtatttccttt

SEQ ID NO: 1196236 - DNA, 15 bp, Homo sapiens
aattggtatttcctt

SEQ ID NO: 1196237 - DNA, 15 bp, Homo sapiens
gaattggtatttcct

SEQ ID NO: 1196238 - DNA, 15 bp, Homo sapiens
agaattggtatttcc

SEQ ID NO: 1196239 - DNA, 15 bp, Homo sapiens
tagaattggtatttc

SEQ ID NO: 1196240 - DNA, 15 bp, Homo sapiens
atagaattggtattt

SEQ ID NO: 1196241 - DNA, 15 bp, Homo sapiens
gatagaattggtatt

SEQ ID NO: 1196242 - DNA, 15 bp, Homo sapiens
ggatagaattggtat

SEQ ID NO: 1196243 - DNA, 15 bp, Homo sapiens
gggatagaattggta

SEQ ID NO: 1196244 - DNA, 15 bp, Homo sapiens
agggatagaattggt

SEQ ID NO: 1196245 - DNA, 15 bp, Homo sapiens
tagggatagaattgg

SEQ ID NO: 1196246 - DNA, 15 bp, Homo sapiens
ttagggatagaattg

SEQ ID NO: 1196247 - DNA, 15 bp, Homo sapiens
cttagggatagaatt

SEQ ID NO: 1196248 - DNA, 15 bp, Homo sapiens
tcttagggatagaat

SEQ ID NO: 1196249 - DNA, 15 bp, Homo sapiens
ctcttagggatagaa

SEQ ID NO: 1196250 - DNA, 15 bp, Homo sapiens
cctcttagggataga

SEQ ID NO: 1196251 - DNA, 15 bp, Homo sapiens
tcctcttagggatag

SEQ ID NO: 1196252 - DNA, 15 bp, Homo sapiens
ttcctcttagggata

SEQ ID NO: 1196253 - DNA, 15 bp, Homo sapiens
attcctcttagggat

SEQ ID NO: 1196254 - DNA, 15 bp, Homo sapiens
aattcctcttaggga

SEQ ID NO: 1196255 - DNA, 15 bp, Homo sapiens
gaattcctcttaggg

SEQ ID NO: 1196256 - DNA, 15 bp, Homo sapiens
agaattcctcttagg

SEQ ID NO: 1196257 - DNA, 15 bp, Homo sapiens
tagaattcctcttag

SEQ ID NO: 1196258 - DNA, 15 bp, Homo sapiens
atagaattcctctta

SEQ ID NO: 1196259 - DNA, 15 bp, Homo sapiens
gatagaattcctctt

SEQ ID NO: 1196260 - DNA, 15 bp, Homo sapiens
agatagaattcctct

SEQ ID NO: 1196261 - DNA, 15 bp, Homo sapiens
aagatagaattcctc

SEQ ID NO: 1196262 - DNA, 15 bp, Homo sapiens
gaagatagaattcct

SEQ ID NO: 1196263 - DNA, 15 bp, Homo sapiens
ggaagatagaattcc

SEQ ID NO: 1196264 - DNA, 15 bp, Homo sapiens
aggaagatagaattc

SEQ ID NO: 1196265 - DNA, 15 bp, Homo sapiens
aaggaagatagaatt

SEQ ID NO: 1196266 - DNA, 15 bp, Homo sapiens
gaaggaagatagaat

SEQ ID NO: 1196267 - DNA, 15 bp, Homo sapiens
ggaaggaagatagaa

SEQ ID NO: 1196268 - DNA, 15 bp, Homo sapiens
tggaaggaagataga

SEQ ID NO: 1196269 - DNA, 15 bp, Homo sapiens
ctggaaggaagatag

SEQ ID NO: 1196270 - DNA, 15 bp, Homo sapiens
cctggaaggaagata

SEQ ID NO: 1196271 - DNA, 15 bp, Homo sapiens
acctggaaggaagat

SEQ ID NO: 1196272 - DNA, 15 bp, Homo sapiens
gacctggaaggaaga

SEQ ID NO: 1196273 - DNA, 15 bp, Homo sapiens
tgacctggaaggaag

SEQ ID NO: 1196274 - DNA, 15 bp, Homo sapiens
atgacctggaaggaa

SEQ ID NO: 1196275 - DNA, 15 bp, Homo sapiens
gatgacctggaagga

SEQ ID NO: 1196276 - DNA, 15 bp, Homo sapiens
agatgacctggaagg

SEQ ID NO: 1196277 - DNA, 15 bp, Homo sapiens
tagatgacctggaag

SEQ ID NO: 1196278 - DNA, 15 bp, Homo sapiens
gtagatgacctggaa

SEQ ID NO: 1196279 - DNA, 15 bp, Homo sapiens
cgtagatgacctgga

SEQ ID NO: 1196280 - DNA, 15 bp, Homo sapiens
acgtagatgacctgg

SEQ ID NO: 1196281 - DNA, 15 bp, Homo sapiens
gacgtagatgacctg

SEQ ID NO: 1196282 - DNA, 15 bp, Homo sapiens
tgacgtagatgacct

SEQ ID NO: 1196283 - DNA, 15 bp, Homo sapiens
ttgacgtagatgacc

SEQ ID NO: 1196284 - DNA, 15 bp, Homo sapiens
tttgacgtagatgac

SEQ ID NO: 1196285 - DNA, 15 bp, Homo sapiens
atttgacgtagatga

SEQ ID NO: 1196286 - DNA, 15 bp, Homo sapiens
tatttgacgtagatg

SEQ ID NO: 1196287 - DNA, 15 bp, Homo sapiens
ttatttgacgtagat

SEQ ID NO: 1196288 - DNA, 15 bp, Homo sapiens
gttatttgacgtaga

SEQ ID NO: 1196289 - DNA, 15 bp, Homo sapiens
tgttatttgacgtag

SEQ ID NO: 1196290 - DNA, 15 bp, Homo sapiens
ctgttatttgacgta

SEQ ID NO: 1196291 - DNA, 15 bp, Homo sapiens
gctgttatttgacgt

SEQ ID NO: 1196292 - DNA, 15 bp, Homo sapiens
ggctgttatttgacg

SEQ ID NO: 1196293 - DNA, 15 bp, Homo sapiens
aggctgttatttgac

SEQ ID NO: 1196294 - DNA, 15 bp, Homo sapiens
gaggctgttatttga

SEQ ID NO: 1196295 - DNA, 15 bp, Homo sapiens
agaggctgttatttg

SEQ ID NO: 1196296 - DNA, 15 bp, Homo sapiens
aagaggctgttattt

SEQ ID NO: 1196297 - DNA, 15 bp, Homo sapiens
aaagaggctgttatt

SEQ ID NO: 1196298 - DNA, 15 bp, Homo sapiens
aaaagaggctgttat

SEQ ID NO: 1196299 - DNA, 15 bp, Homo sapiens
aaaaagaggctgtta

SEQ ID NO: 1196300 - DNA, 15 bp, Homo sapiens
aaaaaagaggctgtt

SEQ ID NO: 1196301 - DNA, 15 bp, Homo sapiens
aaaaaaagaggctgt

SEQ ID NO: 1196302 - DNA, 15 bp, Homo sapiens
taaaaaaagaggctg

SEQ ID NO: 1196303 - DNA, 15 bp, Homo sapiens
ttaaaaaaagaggct

SEQ ID NO: 1196304 - DNA, 15 bp, Homo sapiens
tttaaaaaaagaggc

SEQ ID NO: 1196305 - DNA, 15 bp, Homo sapiens
ttttaaaaaaagagg

SEQ ID NO: 1196306 - DNA, 15 bp, Homo sapiens
cttttaaaaaaagag

SEQ ID NO: 1196307 - DNA, 15 bp, Homo sapiens
tcttttaaaaaaaga

SEQ ID NO: 1196308 - DNA, 15 bp, Homo sapiens
ttcttttaaaaaaag

SEQ ID NO: 1196309 - DNA, 15 bp, Homo sapiens
gttcttttaaaaaaa

SEQ ID NO: 1196310 - DNA, 15 bp, Homo sapiens
tgttcttttaaaaaa

SEQ ID NO: 1196311 - DNA, 15 bp, Homo sapiens
atgttcttttaaaaa

SEQ ID NO: 1196312 - DNA, 15 bp, Homo sapiens
gatgttcttttaaaa

SEQ ID NO: 1196313 - DNA, 15 bp, Homo sapiens
agatgttcttttaaa

SEQ ID NO: 1196314 - DNA, 15 bp, Homo sapiens
aagatgttcttttaa

SEQ ID NO: 1196315 - DNA, 15 bp, Homo sapiens
aaagatgttctttta

SEQ ID NO: 1196316 - DNA, 15 bp, Homo sapiens
aaaagatgttctttt

SEQ ID NO: 1196317 - DNA, 15 bp, Homo sapiens
aaaaagatgttcttt

SEQ ID NO: 1196318 - DNA, 15 bp, Homo sapiens
gaaaaagatgttctt

SEQ ID NO: 1196319 - DNA, 15 bp, Homo sapiens
agaaaaagatgttct

SEQ ID NO: 1196320 - DNA, 15 bp, Homo sapiens
aagaaaaagatgttc

SEQ ID NO: 1196321 - DNA, 15 bp, Homo sapiens
gaagaaaaagatgtt

SEQ ID NO: 1196322 - DNA, 15 bp, Homo sapiens
agaagaaaaagatgt

SEQ ID NO: 1196323 - DNA, 15 bp, Homo sapiens
cagaagaaaaagatg

SEQ ID NO: 1196324 - DNA, 15 bp, Homo sapiens
acagaagaaaaagat

SEQ ID NO: 1196325 - DNA, 15 bp, Homo sapiens
tacagaagaaaaaga

SEQ ID NO: 1196326 - DNA, 15 bp, Homo sapiens
ttacagaagaaaaag

SEQ ID NO: 1196327 - DNA, 15 bp, Homo sapiens
cttacagaagaaaaa

SEQ ID NO: 1196328 - DNA, 15 bp, Homo sapiens
tcttacagaagaaaa

SEQ ID NO: 1196329 - DNA, 15 bp, Homo sapiens
atcttacagaagaaa

SEQ ID NO: 1196330 - DNA, 15 bp, Homo sapiens
gatcttacagaagaa

SEQ ID NO: 1196331 - DNA, 15 bp, Homo sapiens
agatcttacagaaga

SEQ ID NO: 1196332 - DNA, 15 bp, Homo sapiens
aagatcttacagaag

SEQ ID NO: 1196333 - DNA, 15 bp, Homo sapiens
aaagatcttacagaa

SEQ ID NO: 1196334 - DNA, 15 bp, Homo sapiens
taaagatcttacaga

SEQ ID NO: 1196335 - DNA, 15 bp, Homo sapiens
ataaagatcttacag

SEQ ID NO: 1196336 - DNA, 15 bp, Homo sapiens
aataaagatcttaca

SEQ ID NO: 1196337 - DNA, 15 bp, Homo sapiens
caataaagatcttac

SEQ ID NO: 1196338 - DNA, 15 bp, Homo sapiens
ccaataaagatctta

SEQ ID NO: 1196339 - DNA, 15 bp, Homo sapiens
tccaataaagatctt

SEQ ID NO: 1196340 - DNA, 15 bp, Homo sapiens
ctccaataaagatct

SEQ ID NO: 1196341 - DNA, 15 bp, Homo sapiens
tctccaataaagatc

SEQ ID NO: 1196342 - DNA, 15 bp, Homo sapiens
atctccaataaagat

SEQ ID NO: 1196343 - DNA, 15 bp, Homo sapiens
tatctccaataaaga

SEQ ID NO: 1196344 - DNA, 15 bp, Homo sapiens
ttatctccaataaag

SEQ ID NO: 1196345 - DNA, 15 bp, Homo sapiens
attatctccaataaa

SEQ ID NO: 1196346 - DNA, 15 bp, Homo sapiens
aattatctccaataa

SEQ ID NO: 1196347 - DNA, 15 bp, Homo sapiens
taattatctccaata

SEQ ID NO: 1196348 - DNA, 15 bp, Homo sapiens
gtaattatctccaat

SEQ ID NO: 1196349 - DNA, 15 bp, Homo sapiens
ggtaattatctccaa

SEQ ID NO: 1196350 - DNA, 15 bp, Homo sapiens
tggtaattatctcca

SEQ ID NO: 1196351 - DNA, 15 bp, Homo sapiens
gtggtaattatctcc

SEQ ID NO: 1196352 - DNA, 15 bp, Homo sapiens
ggtggtaattatctc

SEQ ID NO: 1196353 - DNA, 15 bp, Homo sapiens
tggtggtaattatct

SEQ ID NO: 1196354 - DNA, 15 bp, Homo sapiens
gtggtggtaattatc

SEQ ID NO: 1196355 - DNA, 15 bp, Homo sapiens
agtggtggtaattat

SEQ ID NO: 1196356 - DNA, 15 bp, Homo sapiens
gagtggtggtaatta

SEQ ID NO: 1196357 - DNA, 15 bp, Homo sapiens
ggagtggtggtaatt

SEQ ID NO: 1196358 - DNA, 15 bp, Homo sapiens
tggagtggtggtaat

SEQ ID NO: 1196359 - DNA, 15 bp, Homo sapiens
ttggagtggtggtaa

SEQ ID NO: 1196360 - DNA, 15 bp, Homo sapiens
gttggagtggtggta

SEQ ID NO: 1196361 - DNA, 15 bp, Homo sapiens
tgttggagtggtggt

SEQ ID NO: 1196362 - DNA, 15 bp, Homo sapiens
ttgttggagtggtgg

SEQ ID NO: 1196363 - DNA, 15 bp, Homo sapiens
attgttggagtggtg

SEQ ID NO: 1196364 - DNA, 15 bp, Homo sapiens
tattgttggagtggt

SEQ ID NO: 1196365 - DNA, 15 bp, Homo sapiens
ttattgttggagtgg

SEQ ID NO: 1196366 - DNA, 15 bp, Homo sapiens
cttattgttggagtg

SEQ ID NO: 1196367 - DNA, 15 bp, Homo sapiens
ccttattgttggagt

SEQ ID NO: 1196368 - DNA, 15 bp, Homo sapiens
cccttattgttggag

SEQ ID NO: 1196369 - DNA, 15 bp, Homo sapiens
acccttattgttgga

SEQ ID NO: 1196370 - DNA, 15 bp, Homo sapiens
cacccttattgttgg

SEQ ID NO: 1196371 - DNA, 15 bp, Homo sapiens
ccacccttattgttg

SEQ ID NO: 1196372 - DNA, 15 bp, Homo sapiens
accacccttattgtt

SEQ ID NO: 1196373 - DNA, 15 bp, Homo sapiens
aaccacccttattgt

SEQ ID NO: 1196374 - DNA, 15 bp, Homo sapiens
taaccacccttattg

SEQ ID NO: 1196375 - DNA, 15 bp, Homo sapiens
ttaaccacccttatt

SEQ ID NO: 1196376 - DNA, 15 bp, Homo sapiens
attaaccacccttat

SEQ ID NO: 1196377 - DNA, 15 bp, Homo sapiens
tattaaccaccctta

SEQ ID NO: 1196378 - DNA, 15 bp, Homo sapiens
atattaaccaccctt

SEQ ID NO: 1196379 - DNA, 15 bp, Homo sapiens
aatattaaccaccct

SEQ ID NO: 1196380 - DNA, 15 bp, Homo sapiens
aaatattaaccaccc

SEQ ID NO: 1196381 - DNA, 15 bp, Homo sapiens
taaatattaaccacc

SEQ ID NO: 1196382 - DNA, 15 bp, Homo sapiens
gtaaatattaaccac

SEQ ID NO: 1196383 - DNA, 15 bp, Homo sapiens
agtaaatattaacca

SEQ ID NO: 1196384 - DNA, 15 bp, Homo sapiens
cagtaaatattaacc

SEQ ID NO: 1196385 - DNA, 15 bp, Homo sapiens
tcagtaaatattaac

SEQ ID NO: 1196386 - DNA, 15 bp, Homo sapiens
ctcagtaaatattaa

SEQ ID NO: 1196387 - DNA, 15 bp, Homo sapiens
gctcagtaaatatta

SEQ ID NO: 1196388 - DNA, 15 bp, Homo sapiens
gtgctcagtaaatat

SEQ ID NO: 1196389 - DNA, 15 bp, Homo sapiens
agtgctcagtaaata

SEQ ID NO: 1196390 - DNA, 15 bp, Homo sapiens
aagtgctcagtaaat

SEQ ID NO: 1196391 - DNA, 15 bp, Homo sapiens
taagtgctcagtaaa

SEQ ID NO: 1196392 - DNA, 15 bp, Homo sapiens
gtaagtgctcagtaa

SEQ ID NO: 1196393 - DNA, 15 bp, Homo sapiens
agtaagtgctcagta

SEQ ID NO: 1196394 - DNA, 15 bp, Homo sapiens
cagtaagtgctcagt

SEQ ID NO: 1196395 - DNA, 15 bp, Homo sapiens
acagtaagtgctcag

SEQ ID NO: 1196396 - DNA, 15 bp, Homo sapiens
cacagtaagtgctca

SEQ ID NO: 1196397 - DNA, 15 bp, Homo sapiens
tcacagtaagtgctc

SEQ ID NO: 1196398 - DNA, 15 bp, Homo sapiens
ctcacagtaagtgct

SEQ ID NO: 1196399 - DNA, 15 bp, Homo sapiens
actcacagtaagtgc

SEQ ID NO: 1196400 - DNA, 15 bp, Homo sapiens
gactcacagtaagtg

SEQ ID NO: 1196401 - DNA, 15 bp, Homo sapiens
tgactcacagtaagt

SEQ ID NO: 1196402 - DNA, 15 bp, Homo sapiens
ctgactcacagtaag

SEQ ID NO: 1196403 - DNA, 15 bp, Homo sapiens
actgactcacagtaa

SEQ ID NO: 1196404 - DNA, 15 bp, Homo sapiens
gactgactcacagta

SEQ ID NO: 1196405 - DNA, 15 bp, Homo sapiens
tgactgactcacagt

SEQ ID NO: 1196406 - DNA, 15 bp, Homo sapiens
atgactgactcacag

SEQ ID NO: 1196407 - DNA, 15 bp, Homo sapiens
aatgactgactcaca

SEQ ID NO: 1196408 - DNA, 15 bp, Homo sapiens
taatgactgactcac

SEQ ID NO: 1196409 - DNA, 15 bp, Homo sapiens
ataatgactgactca

SEQ ID NO: 1196410 - DNA, 15 bp, Homo sapiens
cataatgactgactc

SEQ ID NO: 1196411 - DNA, 15 bp, Homo sapiens
gcataatgactgact

SEQ ID NO: 1196412 - DNA, 15 bp, Homo sapiens
ggcataatgactgac

SEQ ID NO: 1196413 - DNA, 15 bp, Homo sapiens
tggcataatgactga

SEQ ID NO: 1196414 - DNA, 15 bp, Homo sapiens
ttggcataatgactg

SEQ ID NO: 1196415 - DNA, 15 bp, Homo sapiens
cttggcataatgact

SEQ ID NO: 1196416 - DNA, 15 bp, Homo sapiens
acttggcataatgac

SEQ ID NO: 1196417 - DNA, 15 bp, Homo sapiens
cacttggcataatga

SEQ ID NO: 1196418 - DNA, 15 bp, Homo sapiens
ccacttggcataatg

SEQ ID NO: 1196419 - DNA, 15 bp, Homo sapiens
accacttggcataat

SEQ ID NO: 1196420 - DNA, 15 bp, Homo sapiens
aaccacttggcataa

SEQ ID NO: 1196421 - DNA, 15 bp, Homo sapiens
aaaccacttggcata

SEQ ID NO: 1196422 - DNA, 15 bp, Homo sapiens
taaaccacttggcat

SEQ ID NO: 1196423 - DNA, 15 bp, Homo sapiens
gtaaaccacttggca

SEQ ID NO: 1196424 - DNA, 15 bp, Homo sapiens
ggtaaaccacttggc

SEQ ID NO: 1196425 - DNA, 15 bp, Homo sapiens
aggtaaaccacttgg

SEQ ID NO: 1196426 - DNA, 15 bp, Homo sapiens
taggtaaaccacttg

SEQ ID NO: 1196427 - DNA, 15 bp, Homo sapiens
ataggtaaaccactt

SEQ ID NO: 1196428 - DNA, 15 bp, Homo sapiens
tataggtaaaccact

SEQ ID NO: 1196429 - DNA, 15 bp, Homo sapiens
atataggtaaaccac

SEQ ID NO: 1196430 - DNA, 15 bp, Homo sapiens
aatataggtaaacca

SEQ ID NO: 1196431 - DNA, 15 bp, Homo sapiens
taatataggtaaacc

SEQ ID NO: 1196432 - DNA, 15 bp, Homo sapiens
ataatataggtaaac

SEQ ID NO: 1196433 - DNA, 15 bp, Homo sapiens
gataatataggtaaa

SEQ ID NO: 1196434 - DNA, 15 bp, Homo sapiens
agataatataggtaa

SEQ ID NO: 1196435 - DNA, 15 bp, Homo sapiens
gagataatataggta

SEQ ID NO: 1196436 - DNA, 15 bp, Homo sapiens
tgagataatataggt

SEQ ID NO: 1196437 - DNA, 15 bp, Homo sapiens
atgagataatatagg

SEQ ID NO: 1196438 - DNA, 15 bp, Homo sapiens
aatgagataatatag

SEQ ID NO: 1196439 - DNA, 15 bp, Homo sapiens
gaatgagataatata

SEQ ID NO: 1196440 - DNA, 15 bp, Homo sapiens
tgaatgagataatat

SEQ ID NO: 1196441 - DNA, 15 bp, Homo sapiens
atgaatgagataata

SEQ ID NO: 1196442 - DNA, 15 bp, Homo sapiens
gatgaatgagataat

SEQ ID NO: 1196443 - DNA, 15 bp, Homo sapiens
ggatgaatgagataa

SEQ ID NO: 1196444 - DNA, 15 bp, Homo sapiens
aggatgaatgagata

SEQ ID NO: 1196445 - DNA, 15 bp, Homo sapiens
aaggatgaatgagat

SEQ ID NO: 1196446 - DNA, 15 bp, Homo sapiens
gaaggatgaatgaga

SEQ ID NO: 1196447 - DNA, 15 bp, Homo sapiens
ggaaggatgaatgag

SEQ ID NO: 1196448 - DNA, 15 bp, Homo sapiens
tggaaggatgaatga

SEQ ID NO: 1196449 - DNA, 15 bp, Homo sapiens
ttggaaggatgaatg

SEQ ID NO: 1196450 - DNA, 15 bp, Homo sapiens
gttggaaggatgaat

SEQ ID NO: 1196451 - DNA, 15 bp, Homo sapiens
tgttggaaggatgaa

SEQ ID NO: 1196452 - DNA, 15 bp, Homo sapiens
ttgttggaaggatga

SEQ ID NO: 1196453 - DNA, 15 bp, Homo sapiens
cttgttggaaggatg

SEQ ID NO: 1196454 - DNA, 15 bp, Homo sapiens
gcttgttggaaggat

SEQ ID NO: 1196455 - DNA, 15 bp, Homo sapiens
ggcttgttggaagga

SEQ ID NO: 1196456 - DNA, 15 bp, Homo sapiens
aggcttgttggaagg

SEQ ID NO: 1196457 - DNA, 15 bp, Homo sapiens
taggcttgttggaag

SEQ ID NO: 1196458 - DNA, 15 bp, Homo sapiens
ataggcttgttggaa

SEQ ID NO: 1196459 - DNA, 15 bp, Homo sapiens
cataggcttgttgga

SEQ ID NO: 1196460 - DNA, 15 bp, Homo sapiens
gcataggcttgttgg

SEQ ID NO: 1196461 - DNA, 15 bp, Homo sapiens
tgcataggcttgttg

SEQ ID NO: 1196462 - DNA, 15 bp, Homo sapiens
atgcataggcttgtt

SEQ ID NO: 1196463 - DNA, 15 bp, Homo sapiens
gatgcataggcttgt

SEQ ID NO: 1196464 - DNA, 15 bp, Homo sapiens
tgatgcataggcttg

SEQ ID NO: 1196465 - DNA, 15 bp, Homo sapiens
ctgatgcataggctt

SEQ ID NO: 1196466 - DNA, 15 bp, Homo sapiens
cctgatgcataggct

SEQ ID NO: 1196467 - DNA, 15 bp, Homo sapiens
gcctgatgcataggc

SEQ ID NO: 1196468 - DNA, 15 bp, Homo sapiens
tgcctgatgcatagg

SEQ ID NO: 1196469 - DNA, 15 bp, Homo sapiens
gtgcctgatgcatag

SEQ ID NO: 1196470 - DNA, 15 bp, Homo sapiens
agtgcctgatgcata

SEQ ID NO: 1196471 - DNA, 15 bp, Homo sapiens
tagtgcctgatgcat

SEQ ID NO: 1196472 - DNA, 15 bp, Homo sapiens
atagtgcctgatgca

SEQ ID NO: 1196473 - DNA, 15 bp, Homo sapiens
aatagtgcctgatgc

SEQ ID NO: 1196474 - DNA, 15 bp, Homo sapiens
caatagtgcctgatg

SEQ ID NO: 1196475 - DNA, 15 bp, Homo sapiens
acaatagtgcctgat

SEQ ID NO: 1196476 - DNA, 15 bp, Homo sapiens
tacaatagtgcctga

SEQ ID NO: 1196477 - DNA, 15 bp, Homo sapiens
ttacaatagtgcctg

SEQ ID NO: 1196478 - DNA, 15 bp, Homo sapiens
tttacaatagtgcct

SEQ ID NO: 1196479 - DNA, 15 bp, Homo sapiens
gtttacaatagtgcc

SEQ ID NO: 1196480 - DNA, 15 bp, Homo sapiens
tgtttacaatagtgc

SEQ ID NO: 1196481 - DNA, 15 bp, Homo sapiens
gtgtttacaatagtg

SEQ ID NO: 1196482 - DNA, 15 bp, Homo sapiens
agtgtttacaatagt

SEQ ID NO: 1196483 - DNA, 15 bp, Homo sapiens
cagtgtttacaatag

SEQ ID NO: 1196484 - DNA, 15 bp, Homo sapiens
tcagtgtttacaata

SEQ ID NO: 1196485 - DNA, 15 bp, Homo sapiens
gtcagtgtttacaat

SEQ ID NO: 1196486 - DNA, 15 bp, Homo sapiens
agtcagtgtttacaa

SEQ ID NO: 1196487 - DNA, 15 bp, Homo sapiens
cagtcagtgtttaca

SEQ ID NO: 1196488 - DNA, 15 bp, Homo sapiens
tcagtcagtgtttac

SEQ ID NO: 1196489 - DNA, 15 bp, Homo sapiens
atcagtcagtgttta

SEQ ID NO: 1196490 - DNA, 15 bp, Homo sapiens
tatcagtcagtgttt

SEQ ID NO: 1196491 - DNA, 15 bp, Homo sapiens
ttatcagtcagtgtt

SEQ ID NO: 1196492 - DNA, 15 bp, Homo sapiens
cttatcagtcagtgt

SEQ ID NO: 1196493 - DNA, 15 bp, Homo sapiens
ccttatcagtcagtg

SEQ ID NO: 1196494 - DNA, 15 bp, Homo sapiens
tccttatcagtcagt

SEQ ID NO: 1196495 - DNA, 15 bp, Homo sapiens
ttccttatcagtcag

SEQ ID NO: 1196496 - DNA, 15 bp, Homo sapiens
tttccttatcagtca

SEQ ID NO: 1196497 - DNA, 15 bp, Homo sapiens
atttccttatcagtc

SEQ ID NO: 1196498 - DNA, 15 bp, Homo sapiens
catttccttatcagt

SEQ ID NO: 1196499 - DNA, 15 bp, Homo sapiens
ccatttccttatcag

SEQ ID NO: 1196500 - DNA, 15 bp, Homo sapiens
tccatttccttatca

SEQ ID NO: 1196501 - DNA, 15 bp, Homo sapiens
ctccatttccttatc

SEQ ID NO: 1196502 - DNA, 15 bp, Homo sapiens
cctccatttccttat

SEQ ID NO: 1196503 - DNA, 15 bp, Homo sapiens
gcctccatttcctta

SEQ ID NO: 1196504 - DNA, 15 bp, Homo sapiens
agcctccatttcctt

SEQ ID NO: 1196505 - DNA, 15 bp, Homo sapiens
gagcctccatttcct

SEQ ID NO: 1196506 - DNA, 15 bp, Homo sapiens
tgagcctccatttcc

SEQ ID NO: 1196507 - DNA, 15 bp, Homo sapiens
ttgagcctccatttc

SEQ ID NO: 1196508 - DNA, 15 bp, Homo sapiens
tttgagcctccattt

SEQ ID NO: 1196509 - DNA, 15 bp, Homo sapiens
ctttgagcctccatt

SEQ ID NO: 1196510 - DNA, 15 bp, Homo sapiens
tctttgagcctccat

SEQ ID NO: 1196511 - DNA, 15 bp, Homo sapiens
gtctttgagcctcca

SEQ ID NO: 1196512 - DNA, 15 bp, Homo sapiens
tgtctttgagcctcc

SEQ ID NO: 1196513 - DNA, 15 bp, Homo sapiens
atgtctttgagcctc

SEQ ID NO: 1196514 - DNA, 15 bp, Homo sapiens
aatgtctttgagcct

SEQ ID NO: 1196515 - DNA, 15 bp, Homo sapiens
taatgtctttgagcc

SEQ ID NO: 1196516 - DNA, 15 bp, Homo sapiens
gtaatgtctttgagc

SEQ ID NO: 1196517 - DNA, 15 bp, Homo sapiens
agtaatgtctttgag

SEQ ID NO: 1196518 - DNA, 15 bp, Homo sapiens
aagtaatgtctttga

SEQ ID NO: 1196519 - DNA, 15 bp, Homo sapiens
taagtaatgtctttg

SEQ ID NO: 1196520 - DNA, 15 bp, Homo sapiens
ctaagtaatgtcttt

SEQ ID NO: 1196521 - DNA, 15 bp, Homo sapiens
actaagtaatgtctt

SEQ ID NO: 1196522 - DNA, 15 bp, Homo sapiens
aactaagtaatgtct

SEQ ID NO: 1196523 - DNA, 15 bp, Homo sapiens
aaactaagtaatgtc

SEQ ID NO: 1196524 - DNA, 15 bp, Homo sapiens
taaactaagtaatgt

SEQ ID NO: 1196525 - DNA, 15 bp, Homo sapiens
gtaaactaagtaatg

SEQ ID NO: 1196526 - DNA, 15 bp, Homo sapiens
agtaaactaagtaat

SEQ ID NO: 1196527 - DNA, 15 bp, Homo sapiens
cagtaaactaagtaa

SEQ ID NO: 1196528 - DNA, 15 bp, Homo sapiens
tcagtaaactaagta

SEQ ID NO: 1196529 - DNA, 15 bp, Homo sapiens
ttcagtaaactaagt

SEQ ID NO: 1196530 - DNA, 15 bp, Homo sapiens
cttcagtaaactaag

SEQ ID NO: 1196531 - DNA, 15 bp, Homo sapiens
ccttcagtaaactaa

SEQ ID NO: 1196532 - DNA, 15 bp, Homo sapiens
accttcagtaaacta

SEQ ID NO: 1196533 - DNA, 15 bp, Homo sapiens
gaccttcagtaaact

SEQ ID NO: 1196534 - DNA, 15 bp, Homo sapiens
tgaccttcagtaaac

SEQ ID NO: 1196535 - DNA, 15 bp, Homo sapiens
gtgaccttcagtaaa

SEQ ID NO: 1196536 - DNA, 15 bp, Homo sapiens
tgtgaccttcagtaa

SEQ ID NO: 1196537 - DNA, 15 bp, Homo sapiens
ctgtgaccttcagta

SEQ ID NO: 1196538 - DNA, 15 bp, Homo sapiens
tctgtgaccttcagt

SEQ ID NO: 1196539 - DNA, 15 bp, Homo sapiens
gtctgtgaccttcag

SEQ ID NO: 1196540 - DNA, 15 bp, Homo sapiens
ggtctgtgaccttca

SEQ ID NO: 1196541 - DNA, 15 bp, Homo sapiens
tggtctgtgaccttc

SEQ ID NO: 1196542 - DNA, 15 bp, Homo sapiens
ctggtctgtgacctt

SEQ ID NO: 1196543 - DNA, 15 bp, Homo sapiens
gctggtctgtgacct

SEQ ID NO: 1196544 - DNA, 15 bp, Homo sapiens
tgctggtctgtgacc

SEQ ID NO: 1196545 - DNA, 15 bp, Homo sapiens
ctgctggtctgtgac

SEQ ID NO: 1196546 - DNA, 15 bp, Homo sapiens
tctgctggtctgtga

SEQ ID NO: 1196547 - DNA, 15 bp, Homo sapiens
ctctgctggtctgtg

SEQ ID NO: 1196548 - DNA, 15 bp, Homo sapiens
tctctgctggtctgt

SEQ ID NO: 1196549 - DNA, 15 bp, Homo sapiens
ttctctgctggtctg

SEQ ID NO: 1196550 - DNA, 15 bp, Homo sapiens
cttctctgctggtct

SEQ ID NO: 1196551 - DNA, 15 bp, Homo sapiens
ccttctctgctggtc

SEQ ID NO: 1196552 - DNA, 15 bp, Homo sapiens
gccttctctgctggt

SEQ ID NO: 1196553 - DNA, 15 bp, Homo sapiens
agccttctctgctgg

SEQ ID NO: 1196554 - DNA, 15 bp, Homo sapiens
aagccttctctgctg

SEQ ID NO: 1196555 - DNA, 15 bp, Homo sapiens
caagccttctctgct

SEQ ID NO: 1196556 - DNA, 15 bp, Homo sapiens
tcaagccttctctgc

SEQ ID NO: 1196557 - DNA, 15 bp, Homo sapiens
ttcaagccttctctg

SEQ ID NO: 1196558 - DNA, 15 bp, Homo sapiens
attcaagccttctct

SEQ ID NO: 1196559 - DNA, 15 bp, Homo sapiens
gattcaagccttctc

SEQ ID NO: 1196560 - DNA, 15 bp, Homo sapiens
agattcaagccttct

SEQ ID NO: 1196561 - DNA, 15 bp, Homo sapiens
cagattcaagccttc

SEQ ID NO: 1196562 - DNA, 15 bp, Homo sapiens
ccagattcaagcctt

SEQ ID NO: 1196563 - DNA, 15 bp, Homo sapiens
cccagattcaagcct

SEQ ID NO: 1196564 - DNA, 15 bp, Homo sapiens
acccagattcaagcc

SEQ ID NO: 1196565 - DNA, 15 bp, Homo sapiens
gacccagattcaagc

SEQ ID NO: 1196566 - DNA, 15 bp, Homo sapiens
agacccagattcaag

SEQ ID NO: 1196567 - DNA, 15 bp, Homo sapiens
cagacccagattcaa

SEQ ID NO: 1196568 - DNA, 15 bp, Homo sapiens
tcagacccagattca

SEQ ID NO: 1196569 - DNA, 15 bp, Homo sapiens
ctcagacccagattc

SEQ ID NO: 1196570 - DNA, 15 bp, Homo sapiens
cctcagacccagatt

SEQ ID NO: 1196571 - DNA, 15 bp, Homo sapiens
tcctcagacccagat

SEQ ID NO: 1196572 - DNA, 15 bp, Homo sapiens
gtcctcagacccaga

SEQ ID NO: 1196573 - DNA, 15 bp, Homo sapiens
tgtcctcagacccag

SEQ ID NO: 1196574 - DNA, 15 bp, Homo sapiens
atgtcctcagaccca

SEQ ID NO: 1196575 - DNA, 15 bp, Homo sapiens
gatgtcctcagaccc

SEQ ID NO: 1196576 - DNA, 15 bp, Homo sapiens
tgatgtcctcagacc

SEQ ID NO: 1196577 - DNA, 15 bp, Homo sapiens
ttgatgtcctcagac

SEQ ID NO: 1196578 - DNA, 15 bp, Homo sapiens
tttgatgtcctcaga

SEQ ID NO: 1196579 - DNA, 15 bp, Homo sapiens
atttgatgtcctcag

SEQ ID NO: 1196580 - DNA, 15 bp, Homo sapiens
gatttgatgtcctca

SEQ ID NO: 1196581 - DNA, 15 bp, Homo sapiens
agatttgatgtcctc

SEQ ID NO: 1196582 - DNA, 15 bp, Homo sapiens
cagatttgatgtcct

SEQ ID NO: 1196583 - DNA, 15 bp, Homo sapiens
ccagatttgatgtcc

SEQ ID NO: 1196584 - DNA, 15 bp, Homo sapiens
cccagatttgatgtc

SEQ ID NO: 1196585 - DNA, 15 bp, Homo sapiens
acccagatttgatgt

SEQ ID NO: 1196586 - DNA, 15 bp, Homo sapiens
gacccagatttgatg

SEQ ID NO: 1196587 - DNA, 15 bp, Homo sapiens
agacccagatttgat

SEQ ID NO: 1196588 - DNA, 15 bp, Homo sapiens
cagacccagatttga

SEQ ID NO: 1196589 - DNA, 15 bp, Homo sapiens
tcagacccagatttg

SEQ ID NO: 1196590 - DNA, 15 bp, Homo sapiens
ttcagacccagattt

SEQ ID NO: 1196591 - DNA, 15 bp, Homo sapiens
cttcagacccagatt

SEQ ID NO: 1196592 - DNA, 15 bp, Homo sapiens
tcttcagacccagat

SEQ ID NO: 1196593 - DNA, 15 bp, Homo sapiens
gtcttcagacccaga

SEQ ID NO: 1196594 - DNA, 15 bp, Homo sapiens
tgtcttcagacccag

SEQ ID NO: 1196595 - DNA, 15 bp, Homo sapiens
gtgtcttcagaccca

SEQ ID NO: 1196596 - DNA, 15 bp, Homo sapiens
agtgtcttcagaccc

SEQ ID NO: 1196597 - DNA, 15 bp, Homo sapiens
aagtgtcttcagacc

SEQ ID NO: 1196598 - DNA, 15 bp, Homo sapiens
caagtgtcttcagac

SEQ ID NO: 1196599 - DNA, 15 bp, Homo sapiens
gcaagtgtcttcaga

SEQ ID NO: 1196600 - DNA, 15 bp, Homo sapiens
agcaagtgtcttcag

SEQ ID NO: 1196601 - DNA, 15 bp, Homo sapiens
aagcaagtgtcttca

SEQ ID NO: 1196602 - DNA, 15 bp, Homo sapiens
aaagcaagtgtcttc

SEQ ID NO: 1196603 - DNA, 15 bp, Homo sapiens
aaaagcaagtgtctt

SEQ ID NO: 1196604 - DNA, 15 bp, Homo sapiens
taaaagcaagtgtct

SEQ ID NO: 1196605 - DNA, 15 bp, Homo sapiens
gtaaaagcaagtgtc

SEQ ID NO: 1196606 - DNA, 15 bp, Homo sapiens
agtaaaagcaagtgt

SEQ ID NO: 1196607 - DNA, 15 bp, Homo sapiens
tagtaaaagcaagtg

SEQ ID NO: 1196608 - DNA, 15 bp, Homo sapiens
gtagtaaaagcaagt

SEQ ID NO: 1196609 - DNA, 15 bp, Homo sapiens
agtagtaaaagcaag

SEQ ID NO: 1196610 - DNA, 15 bp, Homo sapiens
gagtagtaaaagcaa

SEQ ID NO: 1196611 - DNA, 15 bp, Homo sapiens
ggagtagtaaaagca

SEQ ID NO: 1196612 - DNA, 15 bp, Homo sapiens
tggagtagtaaaagc

SEQ ID NO: 1196613 - DNA, 15 bp, Homo sapiens
gtggagtagtaaaag

SEQ ID NO: 1196614 - DNA, 15 bp, Homo sapiens
ggtggagtagtaaaa

SEQ ID NO: 1196615 - DNA, 15 bp, Homo sapiens
tggtggagtagtaaa

SEQ ID NO: 1196616 - DNA, 15 bp, Homo sapiens
gtggtggagtagtaa

SEQ ID NO: 1196617 - DNA, 15 bp, Homo sapiens
agtggtggagtagta

SEQ ID NO: 1196618 - DNA, 15 bp, Homo sapiens
aagtggtggagtagt

SEQ ID NO: 1196619 - DNA, 15 bp, Homo sapiens
taagtggtggagtag

SEQ ID NO: 1196620 - DNA, 15 bp, Homo sapiens
gtaagtggtggagta

SEQ ID NO: 1196621 - DNA, 15 bp, Homo sapiens
tgtaagtggtggagt

SEQ ID NO: 1196622 - DNA, 15 bp, Homo sapiens
gtgtaagtggtggag

SEQ ID NO: 1196623 - DNA, 15 bp, Homo sapiens
ggtgtaagtggtgga

SEQ ID NO: 1196624 - DNA, 15 bp, Homo sapiens
gggtgtaagtggtgg

SEQ ID NO: 1196625 - DNA, 15 bp, Homo sapiens
tgggtgtaagtggtg

SEQ ID NO: 1196626 - DNA, 15 bp, Homo sapiens
ttgggtgtaagtggt

SEQ ID NO: 1196627 - DNA, 15 bp, Homo sapiens
attgggtgtaagtgg

SEQ ID NO: 1196628 - DNA, 15 bp, Homo sapiens
gattgggtgtaagtg

SEQ ID NO: 1196629 - DNA, 15 bp, Homo sapiens
ggattgggtgtaagt

SEQ ID NO: 1196630 - DNA, 15 bp, Homo sapiens
tggattgggtgtaag

SEQ ID NO: 1196631 - DNA, 15 bp, Homo sapiens
ctggattgggtgtaa

SEQ ID NO: 1196632 - DNA, 15 bp, Homo sapiens
cctggattgggtgta

SEQ ID NO: 1196633 - DNA, 15 bp, Homo sapiens
gcctggattgggtgt

SEQ ID NO: 1196634 - DNA, 15 bp, Homo sapiens
tgcctggattgggtg

SEQ ID NO: 1196635 - DNA, 15 bp, Homo sapiens
atgcctggattgggt

SEQ ID NO: 1196636 - DNA, 15 bp, Homo sapiens
catgcctggattggg

SEQ ID NO: 1196637 - DNA, 15 bp, Homo sapiens
tcatgcctggattgg

SEQ ID NO: 1196638 - DNA, 15 bp, Homo sapiens
ctcatgcctggattg

SEQ ID NO: 1196639 - DNA, 15 bp, Homo sapiens
cctcatgcctggatt

SEQ ID NO: 1196640 - DNA, 15 bp, Homo sapiens
tcctcatgcctggat

SEQ ID NO: 1196641 - DNA, 15 bp, Homo sapiens
gtcctcatgcctgga

SEQ ID NO: 1196642 - DNA, 15 bp, Homo sapiens
tgtcctcatgcctgg

SEQ ID NO: 1196643 - DNA, 15 bp, Homo sapiens
ctgtcctcatgcctg

SEQ ID NO: 1196644 - DNA, 15 bp, Homo sapiens
gctgtcctcatgcct

SEQ ID NO: 1196645 - DNA, 15 bp, Homo sapiens
agctgtcctcatgcc

SEQ ID NO: 1196646 - DNA, 15 bp, Homo sapiens
gagctgtcctcatgc

SEQ ID NO: 1196647 - DNA, 15 bp, Homo sapiens
tgagctgtcctcatg

SEQ ID NO: 1196648 - DNA, 15 bp, Homo sapiens
ctgagctgtcctcat

SEQ ID NO: 1196649 - DNA, 15 bp, Homo sapiens
tctgagctgtcctca

SEQ ID NO: 1196650 - DNA, 15 bp, Homo sapiens
ttctgagctgtcctc

SEQ ID NO: 1196651 - DNA, 15 bp, Homo sapiens
attctgagctgtcct

SEQ ID NO: 1196652 - DNA, 15 bp, Homo sapiens
tattctgagctgtcc

SEQ ID NO: 1196653 - DNA, 15 bp, Homo sapiens
gtattctgagctgtc

SEQ ID NO: 1196654 - DNA, 15 bp, Homo sapiens
agtattctgagctgt

SEQ ID NO: 1196655 - DNA, 15 bp, Homo sapiens
cagtattctgagctg

SEQ ID NO: 1196656 - DNA, 15 bp, Homo sapiens
tcagtattctgagct

SEQ ID NO: 1196657 - DNA, 15 bp, Homo sapiens
gtcagtattctgagc

SEQ ID NO: 1196658 - DNA, 15 bp, Homo sapiens
agtcagtattctgag

SEQ ID NO: 1196659 - DNA, 15 bp, Homo sapiens
cagtcagtattctga

SEQ ID NO: 1196660 - DNA, 15 bp, Homo sapiens
tcagtcagtattctg

SEQ ID NO: 1196661 - DNA, 15 bp, Homo sapiens
atcagtcagtattct

SEQ ID NO: 1196662 - DNA, 15 bp, Homo sapiens
tatcagtcagtattc

SEQ ID NO: 1196663 - DNA, 15 bp, Homo sapiens
gtatcagtcagtatt

SEQ ID NO: 1196664 - DNA, 15 bp, Homo sapiens
agtatcagtcagtat

SEQ ID NO: 1196665 - DNA, 15 bp, Homo sapiens
aagtatcagtcagta

SEQ ID NO: 1196666 - DNA, 15 bp, Homo sapiens
aaagtatcagtcagt

SEQ ID NO: 1196667 - DNA, 15 bp, Homo sapiens
gaaagtatcagtcag

SEQ ID NO: 1196668 - DNA, 15 bp, Homo sapiens
agaaagtatcagtca

SEQ ID NO: 1196669 - DNA, 15 bp, Homo sapiens
aagaaagtatcagtc

SEQ ID NO: 1196670 - DNA, 15 bp, Homo sapiens
caagaaagtatcagt

SEQ ID NO: 1196671 - DNA, 15 bp, Homo sapiens
acaagaaagtatcag

SEQ ID NO: 1196672 - DNA, 15 bp, Homo sapiens
aacaagaaagtatca

SEQ ID NO: 1196673 - DNA, 15 bp, Homo sapiens
gaacaagaaagtatc

SEQ ID NO: 1196674 - DNA, 15 bp, Homo sapiens
tgaacaagaaagtat

SEQ ID NO: 1196675 - DNA, 15 bp, Homo sapiens
ttgaacaagaaagta

SEQ ID NO: 1196676 - DNA, 15 bp, Homo sapiens
tttgaacaagaaagt

SEQ ID NO: 1196677 - DNA, 15 bp, Homo sapiens
ttttgaacaagaaag

SEQ ID NO: 1196678 - DNA, 15 bp, Homo sapiens
attttgaacaagaaa

SEQ ID NO: 1196679 - DNA, 15 bp, Homo sapiens
aattttgaacaagaa

SEQ ID NO: 1196680 - DNA, 15 bp, Homo sapiens
caattttgaacaaga

SEQ ID NO: 1196681 - DNA, 15 bp, Homo sapiens
ccaattttgaacaag

SEQ ID NO: 1196682 - DNA, 15 bp, Homo sapiens
gccaattttgaacaa

SEQ ID NO: 1196683 - DNA, 15 bp, Homo sapiens
agccaattttgaaca

SEQ ID NO: 1196684 - DNA, 15 bp, Homo sapiens
aagccaattttgaac

SEQ ID NO: 1196685 - DNA, 15 bp, Homo sapiens
aaagccaattttgaa

SEQ ID NO: 1196686 - DNA, 15 bp, Homo sapiens
taaagccaattttga

SEQ ID NO: 1196687 - DNA, 15 bp, Homo sapiens
gtaaagccaattttg

SEQ ID NO: 1196688 - DNA, 15 bp, Homo sapiens
tgtaaagccaatttt

SEQ ID NO: 1196689 - DNA, 15 bp, Homo sapiens
gtgtaaagccaattt

SEQ ID NO: 1196690 - DNA, 15 bp, Homo sapiens
cgtgtaaagccaatt

SEQ ID NO: 1196691 - DNA, 15 bp, Homo sapiens
gcgtgtaaagccaat

SEQ ID NO: 1196692 - DNA, 15 bp, Homo sapiens
agcgtgtaaagccaa

SEQ ID NO: 1196693 - DNA, 15 bp, Homo sapiens
tagcgtgtaaagcca

SEQ ID NO: 1196694 - DNA, 15 bp, Homo sapiens
gtagcgtgtaaagcc

SEQ ID NO: 1196695 - DNA, 15 bp, Homo sapiens
tgtagcgtgtaaagc

SEQ ID NO: 1196696 - DNA, 15 bp, Homo sapiens
ctgtagcgtgtaaag

SEQ ID NO: 1196697 - DNA, 15 bp, Homo sapiens
cctgtagcgtgtaaa

SEQ ID NO: 1196698 - DNA, 15 bp, Homo sapiens
gcctgtagcgtgtaa

SEQ ID NO: 1196699 - DNA, 15 bp, Homo sapiens
tgcctgtagcgtgta

SEQ ID NO: 1196700 - DNA, 15 bp, Homo sapiens
ctgcctgtagcgtgt

SEQ ID NO: 1196701 - DNA, 15 bp, Homo sapiens
tctgcctgtagcgtg

SEQ ID NO: 1196702 - DNA, 15 bp, Homo sapiens
gtctgcctgtagcgt

SEQ ID NO: 1196703 - DNA, 15 bp, Homo sapiens
tgtctgcctgtagcg

SEQ ID NO: 1196704 - DNA, 15 bp, Homo sapiens
gtgtctgcctgtagc

SEQ ID NO: 1196705 - DNA, 15 bp, Homo sapiens
tgtgtctgcctgtag

SEQ ID NO: 1196706 - DNA, 15 bp, Homo sapiens
atgtgtctgcctgta

SEQ ID NO: 1196707 - DNA, 15 bp, Homo sapiens
catgtgtctgcctgt

SEQ ID NO: 1196708 - DNA, 15 bp, Homo sapiens
ccatgtgtctgcctg

SEQ ID NO: 1196709 - DNA, 15 bp, Homo sapiens
gccatgtgtctgcct

SEQ ID NO: 1196710 - DNA, 15 bp, Homo sapiens
agccatgtgtctgcc

SEQ ID NO: 1196711 - DNA, 15 bp, Homo sapiens
tagccatgtgtctgc

SEQ ID NO: 1196712 - DNA, 15 bp, Homo sapiens
ttagccatgtgtctg

SEQ ID NO: 1196713 - DNA, 15 bp, Homo sapiens
attagccatgtgtct

SEQ ID NO: 1196714 - DNA, 15 bp, Homo sapiens
cattagccatgtgtc

SEQ ID NO: 1196715 - DNA, 15 bp, Homo sapiens
ccattagccatgtgt

SEQ ID NO: 1196716 - DNA, 15 bp, Homo sapiens
gccattagccatgtg

SEQ ID NO: 1196717 - DNA, 15 bp, Homo sapiens
tgccattagccatgt

SEQ ID NO: 1196718 - DNA, 15 bp, Homo sapiens
gtgccattagccatg

SEQ ID NO: 1196719 - DNA, 15 bp, Homo sapiens
ggtgccattagccat

SEQ ID NO: 1196720 - DNA, 15 bp, Homo sapiens
aggtgccattagcca

SEQ ID NO: 1196721 - DNA, 15 bp, Homo sapiens
aaggtgccattagcc

SEQ ID NO: 1196722 - DNA, 15 bp, Homo sapiens
aaaggtgccattagc

SEQ ID NO: 1196723 - DNA, 15 bp, Homo sapiens
caaaggtgccattag

SEQ ID NO: 1196724 - DNA, 15 bp, Homo sapiens
tcaaaggtgccatta

SEQ ID NO: 1196725 - DNA, 15 bp, Homo sapiens
ctcaaaggtgccatt

SEQ ID NO: 1196726 - DNA, 15 bp, Homo sapiens
actcaaaggtgccat

SEQ ID NO: 1196727 - DNA, 15 bp, Homo sapiens
cactcaaaggtgcca

SEQ ID NO: 1196728 - DNA, 15 bp, Homo sapiens
tcactcaaaggtgcc

SEQ ID NO: 1196729 - DNA, 15 bp, Homo sapiens
atcactcaaaggtgc

SEQ ID NO: 1196730 - DNA, 15 bp, Homo sapiens
catcactcaaaggtg

SEQ ID NO: 1196731 - DNA, 15 bp, Homo sapiens
tcatcactcaaaggt

SEQ ID NO: 1196732 - DNA, 15 bp, Homo sapiens
gtcatcactcaaagg

SEQ ID NO: 1196733 - DNA, 15 bp, Homo sapiens
ggtcatcactcaaag

SEQ ID NO: 1196734 - DNA, 15 bp, Homo sapiens
aggtcatcactcaaa

SEQ ID NO: 1196735 - DNA, 15 bp, Homo sapiens
taggtcatcactcaa

SEQ ID NO: 1196736 - DNA, 15 bp, Homo sapiens
ataggtcatcactca

SEQ ID NO: 1196737 - DNA, 15 bp, Homo sapiens
aataggtcatcactc

SEQ ID NO: 1196738 - DNA, 15 bp, Homo sapiens
taataggtcatcact

SEQ ID NO: 1196739 - DNA, 15 bp, Homo sapiens
ataataggtcatcac

SEQ ID NO: 1196740 - DNA, 15 bp, Homo sapiens
aataataggtcatca

SEQ ID NO: 1196741 - DNA, 15 bp, Homo sapiens
caataataggtcatc

SEQ ID NO: 1196742 - DNA, 15 bp, Homo sapiens
tcaataataggtcat

SEQ ID NO: 1196743 - DNA, 15 bp, Homo sapiens
ctcaataataggtca

SEQ ID NO: 1196744 - DNA, 15 bp, Homo sapiens
actcaataataggtc

SEQ ID NO: 1196745 - DNA, 15 bp, Homo sapiens
tactcaataataggt

SEQ ID NO: 1196746 - DNA, 15 bp, Homo sapiens
atactcaataatagg

SEQ ID NO: 1196747 - DNA, 15 bp, Homo sapiens
catactcaataatag

SEQ ID NO: 1196748 - DNA, 15 bp, Homo sapiens
tcatactcaataata

SEQ ID NO: 1196749 - DNA, 15 bp, Homo sapiens
atcatactcaataat

SEQ ID NO: 1196750 - DNA, 15 bp, Homo sapiens
tatcatactcaataa

SEQ ID NO: 1196751 - DNA, 15 bp, Homo sapiens
atatcatactcaata

SEQ ID NO: 1196752 - DNA, 15 bp, Homo sapiens
aatatcatactcaat

SEQ ID NO: 1196753 - DNA, 15 bp, Homo sapiens
taatatcatactcaa

SEQ ID NO: 1196754 - DNA, 15 bp, Homo sapiens
ataatatcatactca

SEQ ID NO: 1196755 - DNA, 15 bp, Homo sapiens
gataatatcatactc

SEQ ID NO: 1196756 - DNA, 15 bp, Homo sapiens
tgataatatcatact

SEQ ID NO: 1196757 - DNA, 15 bp, Homo sapiens
ctgataatatcatac

SEQ ID NO: 1196758 - DNA, 15 bp, Homo sapiens
cctgataatatcata

SEQ ID NO: 1196759 - DNA, 15 bp, Homo sapiens
tcctgataatatcat

SEQ ID NO: 1196760 - DNA, 15 bp, Homo sapiens
atcctgataatatca

SEQ ID NO: 1196761 - DNA, 15 bp, Homo sapiens
tatcctgataatatc

SEQ ID NO: 1196762 - DNA, 15 bp, Homo sapiens
ttatcctgataatat

SEQ ID NO: 1196763 - DNA, 15 bp, Homo sapiens
tttatcctgataata

SEQ ID NO: 1196764 - DNA, 15 bp, Homo sapiens
ctttatcctgataat

SEQ ID NO: 1196765 - DNA, 15 bp, Homo sapiens
tctttatcctgataa

SEQ ID NO: 1196766 - DNA, 15 bp, Homo sapiens
ttctttatcctgata

SEQ ID NO: 1196767 - DNA, 15 bp, Homo sapiens
cttctttatcctgat

SEQ ID NO: 1196768 - DNA, 15 bp, Homo sapiens
gcttctttatcctga

SEQ ID NO: 1196769 - DNA, 15 bp, Homo sapiens
tgcttctttatcctg

SEQ ID NO: 1196770 - DNA, 15 bp, Homo sapiens
atgcttctttatcct

SEQ ID NO: 1196771 - DNA, 15 bp, Homo sapiens
aatgcttctttatcc

SEQ ID NO: 1196772 - DNA, 15 bp, Homo sapiens
aaatgcttctttatc

SEQ ID NO: 1196773 - DNA, 15 bp, Homo sapiens
gaaatgcttctttat

SEQ ID NO: 1196774 - DNA, 15 bp, Homo sapiens
agaaatgcttcttta

SEQ ID NO: 1196775 - DNA, 15 bp, Homo sapiens
cagaaatgcttcttt

SEQ ID NO: 1196776 - DNA, 15 bp, Homo sapiens
gcagaaatgcttctt

SEQ ID NO: 1196777 - DNA, 15 bp, Homo sapiens
tgcagaaatgcttct

SEQ ID NO: 1196778 - DNA, 15 bp, Homo sapiens
gtgcagaaatgcttc

SEQ ID NO: 1196779 - DNA, 15 bp, Homo sapiens
cgtgcagaaatgctt

SEQ ID NO: 1196780 - DNA, 15 bp, Homo sapiens
ccgtgcagaaatgct

SEQ ID NO: 1196781 - DNA, 15 bp, Homo sapiens
accgtgcagaaatgc

SEQ ID NO: 1196782 - DNA, 15 bp, Homo sapiens
taccgtgcagaaatg

SEQ ID NO: 1196783 - DNA, 15 bp, Homo sapiens
ttaccgtgcagaaat

SEQ ID NO: 1196784 - DNA, 15 bp, Homo sapiens
gttaccgtgcagaaa

SEQ ID NO: 1196785 - DNA, 15 bp, Homo sapiens
ggttaccgtgcagaa

SEQ ID NO: 1196786 - DNA, 15 bp, Homo sapiens
tggttaccgtgcaga

SEQ ID NO: 1196787 - DNA, 15 bp, Homo sapiens
ttggttaccgtgcag

SEQ ID NO: 1196788 - DNA, 15 bp, Homo sapiens
attggttaccgtgca

SEQ ID NO: 1196789 - DNA, 15 bp, Homo sapiens
cattggttaccgtgc

SEQ ID NO: 1196790 - DNA, 15 bp, Homo sapiens
acattggttaccgtg

SEQ ID NO: 1196791 - DNA, 15 bp, Homo sapiens
tacattggttaccgt

SEQ ID NO: 1196792 - DNA, 15 bp, Homo sapiens
atacattggttaccg

SEQ ID NO: 1196793 - DNA, 15 bp, Homo sapiens
gatacattggttacc

SEQ ID NO: 1196794 - DNA, 15 bp, Homo sapiens
agatacattggttac

SEQ ID NO: 1196795 - DNA, 15 bp, Homo sapiens
tagatacattggtta

SEQ ID NO: 1196796 - DNA, 15 bp, Homo sapiens
ttagatacattggtt

SEQ ID NO: 1196797 - DNA, 15 bp, Homo sapiens
attagatacattggt

SEQ ID NO: 1196798 - DNA, 15 bp, Homo sapiens
tattagatacattgg

SEQ ID NO: 1196799 - DNA, 15 bp, Homo sapiens
ttattagatacattg

SEQ ID NO: 1196800 - DNA, 15 bp, Homo sapiens
attattagatacatt

SEQ ID NO: 1196801 - DNA, 15 bp, Homo sapiens
cattattagatacat

SEQ ID NO: 1196802 - DNA, 15 bp, Homo sapiens
acattattagataca

SEQ ID NO: 1196803 - DNA, 15 bp, Homo sapiens
cacattattagatac

SEQ ID NO: 1196804 - DNA, 15 bp, Homo sapiens
acacattattagata

SEQ ID NO: 1196805 - DNA, 15 bp, Homo sapiens
gacacattattagat

SEQ ID NO: 1196806 - DNA, 15 bp, Homo sapiens
tgacacattattaga

SEQ ID NO: 1196807 - DNA, 15 bp, Homo sapiens
atgacacattattag

SEQ ID NO: 1196808 - DNA, 15 bp, Homo sapiens
aatgacacattatta

SEQ ID NO: 1196809 - DNA, 15 bp, Homo sapiens
gaatgacacattatt

SEQ ID NO: 1196810 - DNA, 15 bp, Homo sapiens
ggaatgacacattat

SEQ ID NO: 1196811 - DNA, 15 bp, Homo sapiens
gggaatgacacatta

SEQ ID NO: 1196812 - DNA, 15 bp, Homo sapiens
ggggaatgacacatt

SEQ ID NO: 1196813 - DNA, 15 bp, Homo sapiens
tggggaatgacacat

SEQ ID NO: 1196814 - DNA, 15 bp, Homo sapiens
gtggggaatgacaca

SEQ ID NO: 1196815 - DNA, 15 bp, Homo sapiens
agtggggaatgacac

SEQ ID NO: 1196816 - DNA, 15 bp, Homo sapiens
cagtggggaatgaca

SEQ ID NO: 1196817 - DNA, 15 bp, Homo sapiens
gcagtggggaatgac

SEQ ID NO: 1196818 - DNA, 15 bp, Homo sapiens
ggcagtggggaatga

SEQ ID NO: 1196819 - DNA, 15 bp, Homo sapiens
cggcagtggggaatg

SEQ ID NO: 1196820 - DNA, 15 bp, Homo sapiens
acggcagtggggaat

SEQ ID NO: 1196821 - DNA, 15 bp, Homo sapiens
aacggcagtggggaa

SEQ ID NO: 1196822 - DNA, 15 bp, Homo sapiens
gaacggcagtgggga

SEQ ID NO: 1196823 - DNA, 15 bp, Homo sapiens
agaacggcagtgggg

SEQ ID NO: 1196824 - DNA, 15 bp, Homo sapiens
aagaacggcagtggg

SEQ ID NO: 1196825 - DNA, 15 bp, Homo sapiens
gaagaacggcagtgg

SEQ ID NO: 1196826 - DNA, 15 bp, Homo sapiens
ggaagaacggcagtg

SEQ ID NO: 1196827 - DNA, 15 bp, Homo sapiens
tggaagaacggcagt

SEQ ID NO: 1196828 - DNA, 15 bp, Homo sapiens
gtggaagaacggcag

SEQ ID NO: 1196829 - DNA, 15 bp, Homo sapiens
tgtggaagaacggca

SEQ ID NO: 1196830 - DNA, 15 bp, Homo sapiens
atgtggaagaacggc

SEQ ID NO: 1196831 - DNA, 15 bp, Homo sapiens
catgtggaagaacgg

SEQ ID NO: 1196832 - DNA, 15 bp, Homo sapiens
acatgtggaagaacg

SEQ ID NO: 1196833 - DNA, 15 bp, Homo sapiens
cacatgtggaagaac

SEQ ID NO: 1196834 - DNA, 15 bp, Homo sapiens
gcacatgtggaagaa

SEQ ID NO: 1196835 - DNA, 15 bp, Homo sapiens
tgcacatgtggaaga

SEQ ID NO: 1196836 - DNA, 15 bp, Homo sapiens
atgcacatgtggaag

SEQ ID NO: 1196837 - DNA, 15 bp, Homo sapiens
catgcacatgtggaa

SEQ ID NO: 1196838 - DNA, 15 bp, Homo sapiens
acatgcacatgtgga

SEQ ID NO: 1196839 - DNA, 15 bp, Homo sapiens
gacatgcacatgtgg

SEQ ID NO: 1196840 - DNA, 15 bp, Homo sapiens
tgacatgcacatgtg

SEQ ID NO: 1196841 - DNA, 15 bp, Homo sapiens
ctgacatgcacatgt

SEQ ID NO: 1196842 - DNA, 15 bp, Homo sapiens
actgacatgcacatg

SEQ ID NO: 1196843 - DNA, 15 bp, Homo sapiens
aactgacatgcacat

SEQ ID NO: 1196844 - DNA, 15 bp, Homo sapiens
gaactgacatgcaca

SEQ ID NO: 1196845 - DNA, 15 bp, Homo sapiens
agaactgacatgcac

SEQ ID NO: 1196846 - DNA, 15 bp, Homo sapiens
cagaactgacatgca

SEQ ID NO: 1196847 - DNA, 15 bp, Homo sapiens
ccagaactgacatgc

SEQ ID NO: 1196848 - DNA, 15 bp, Homo sapiens
tccagaactgacatg

SEQ ID NO: 1196849 - DNA, 15 bp, Homo sapiens
atccagaactgacat

SEQ ID NO: 1196850 - DNA, 15 bp, Homo sapiens
tatccagaactgaca

SEQ ID NO: 1196851 - DNA, 15 bp, Homo sapiens
ctatccagaactgac

SEQ ID NO: 1196852 - DNA, 15 bp, Homo sapiens
actatccagaactga

SEQ ID NO: 1196853 - DNA, 15 bp, Homo sapiens
tactatccagaactg

SEQ ID NO: 1196854 - DNA, 15 bp, Homo sapiens
gtactatccagaact

SEQ ID NO: 1196855 - DNA, 15 bp, Homo sapiens
agtactatccagaac

SEQ ID NO: 1196856 - DNA, 15 bp, Homo sapiens
aagtactatccagaa

SEQ ID NO: 1196857 - DNA, 15 bp, Homo sapiens
gaagtactatccaga

SEQ ID NO: 1196858 - DNA, 15 bp, Homo sapiens
tgaagtactatccag

SEQ ID NO: 1196859 - DNA, 15 bp, Homo sapiens
atgaagtactatcca

SEQ ID NO: 1196860 - DNA, 15 bp, Homo sapiens
catgaagtactatcc

SEQ ID NO: 1196861 - DNA, 15 bp, Homo sapiens
gcatgaagtactatc

SEQ ID NO: 1196862 - DNA, 15 bp, Homo sapiens
agcatgaagtactat

SEQ ID NO: 1196863 - DNA, 15 bp, Homo sapiens
tagcatgaagtacta

SEQ ID NO: 1196864 - DNA, 15 bp, Homo sapiens
atagcatgaagtact

SEQ ID NO: 1196865 - DNA, 15 bp, Homo sapiens
catagcatgaagtac

SEQ ID NO: 1196866 - DNA, 15 bp, Homo sapiens
gcatagcatgaagta

SEQ ID NO: 1196867 - DNA, 15 bp, Homo sapiens
tgcatagcatgaagt

SEQ ID NO: 1196868 - DNA, 15 bp, Homo sapiens
ctgcatagcatgaag

SEQ ID NO: 1196869 - DNA, 15 bp, Homo sapiens
cctgcatagcatgaa

SEQ ID NO: 1196870 - DNA, 15 bp, Homo sapiens
acctgcatagcatga

SEQ ID NO: 1196871 - DNA, 15 bp, Homo sapiens
tacctgcatagcatg

SEQ ID NO: 1196872 - DNA, 15 bp, Homo sapiens
ttacctgcatagcat

SEQ ID NO: 1196873 - DNA, 15 bp, Homo sapiens
gttacctgcatagca

SEQ ID NO: 1196874 - DNA, 15 bp, Homo sapiens
tgttacctgcatagc

SEQ ID NO: 1196875 - DNA, 15 bp, Homo sapiens
gtgttacctgcatag

SEQ ID NO: 1196876 - DNA, 15 bp, Homo sapiens
ggtgttacctgcata

SEQ ID NO: 1196877 - DNA, 15 bp, Homo sapiens
gggtgttacctgcat

SEQ ID NO: 1196878 - DNA, 15 bp, Homo sapiens
tgggtgttacctgca

SEQ ID NO: 1196879 - DNA, 15 bp, Homo sapiens
ctgggtgttacctgc

SEQ ID NO: 1196880 - DNA, 15 bp, Homo sapiens
cctgggtgttacctg

SEQ ID NO: 1196881 - DNA, 15 bp, Homo sapiens
ccctgggtgttacct

SEQ ID NO: 1196882 - DNA, 15 bp, Homo sapiens
tccctgggtgttacc

SEQ ID NO: 1196883 - DNA, 15 bp, Homo sapiens
atccctgggtgttac

SEQ ID NO: 1196884 - DNA, 15 bp, Homo sapiens
tatccctgggtgtta

SEQ ID NO: 1196885 - DNA, 15 bp, Homo sapiens
atatccctgggtgtt

SEQ ID NO: 1196886 - DNA, 15 bp, Homo sapiens
tatatccctgggtgt

SEQ ID NO: 1196887 - DNA, 15 bp, Homo sapiens
ctatatccctgggtg

SEQ ID NO: 1196888 - DNA, 15 bp, Homo sapiens
tctatatccctgggt

SEQ ID NO: 1196889 - DNA, 15 bp, Homo sapiens
ctctatatccctggg

SEQ ID NO: 1196890 - DNA, 15 bp, Homo sapiens
gctctatatccctgg

SEQ ID NO: 1196891 - DNA, 15 bp, Homo sapiens
ggctctatatccctg

SEQ ID NO: 1196892 - DNA, 15 bp, Homo sapiens
tggctctatatccct

SEQ ID NO: 1196893 - DNA, 15 bp, Homo sapiens
ttggctctatatccc

SEQ ID NO: 1196894 - DNA, 15 bp, Homo sapiens
attggctctatatcc

SEQ ID NO: 1196895 - DNA, 15 bp, Homo sapiens
gattggctctatatc

SEQ ID NO: 1196896 - DNA, 15 bp, Homo sapiens
agattggctctatat

SEQ ID NO: 1196897 - DNA, 15 bp, Homo sapiens
gagattggctctata

SEQ ID NO: 1196898 - DNA, 15 bp, Homo sapiens
cgagattggctctat

SEQ ID NO: 1196899 - DNA, 15 bp, Homo sapiens
ccgagattggctcta

SEQ ID NO: 1196900 - DNA, 15 bp, Homo sapiens
cccgagattggctct

SEQ ID NO: 1196901 - DNA, 15 bp, Homo sapiens
tcccgagattggctc

SEQ ID NO: 1196902 - DNA, 15 bp, Homo sapiens
atcccgagattggct

SEQ ID NO: 1196903 - DNA, 15 bp, Homo sapiens
tatcccgagattggc

SEQ ID NO: 1196904 - DNA, 15 bp, Homo sapiens
gtatcccgagattgg

SEQ ID NO: 1196905 - DNA, 15 bp, Homo sapiens
ggtatcccgagattg

SEQ ID NO: 1196906 - DNA, 15 bp, Homo sapiens
aggtatcccgagatt

SEQ ID NO: 1196907 - DNA, 15 bp, Homo sapiens
gaggtatcccgagat

SEQ ID NO: 1196908 - DNA, 15 bp, Homo sapiens
ggaggtatcccgaga

SEQ ID NO: 1196909 - DNA, 15 bp, Homo sapiens
tggaggtatcccgag

SEQ ID NO: 1196910 - DNA, 15 bp, Homo sapiens
atggaggtatcccga

SEQ ID NO: 1196911 - DNA, 15 bp, Homo sapiens
catggaggtatcccg

SEQ ID NO: 1196912 - DNA, 15 bp, Homo sapiens
tcatggaggtatccc

SEQ ID NO: 1196913 - DNA, 15 bp, Homo sapiens
ttcatggaggtatcc

SEQ ID NO: 1196914 - DNA, 15 bp, Homo sapiens
cttcatggaggtatc

SEQ ID NO: 1196915 - DNA, 15 bp, Homo sapiens
tcttcatggaggtat

SEQ ID NO: 1196916 - DNA, 15 bp, Homo sapiens
ttcttcatggaggta

SEQ ID NO: 1196917 - DNA, 15 bp, Homo sapiens
tttcttcatggaggt

SEQ ID NO: 1196918 - DNA, 15 bp, Homo sapiens
ctttcttcatggagg

SEQ ID NO: 1196919 - DNA, 15 bp, Homo sapiens
actttcttcatggag

SEQ ID NO: 1196920 - DNA, 15 bp, Homo sapiens
aactttcttcatgga

SEQ ID NO: 1196921 - DNA, 15 bp, Homo sapiens
taactttcttcatgg

SEQ ID NO: 1196922 - DNA, 15 bp, Homo sapiens
ataactttcttcatg

SEQ ID NO: 1196923 - DNA, 15 bp, Homo sapiens
cataactttcttcat

SEQ ID NO: 1196924 - DNA, 15 bp, Homo sapiens
acataactttcttca

SEQ ID NO: 1196925 - DNA, 15 bp, Homo sapiens
tacataactttcttc

SEQ ID NO: 1196926 - DNA, 15 bp, Homo sapiens
atacataactttctt

SEQ ID NO: 1196927 - DNA, 15 bp, Homo sapiens
aatacataactttct

SEQ ID NO: 1196928 - DNA, 15 bp, Homo sapiens
caatacataactttc

SEQ ID NO: 1196929 - DNA, 15 bp, Homo sapiens
ccaatacataacttt

SEQ ID NO: 1196930 - DNA, 15 bp, Homo sapiens
gccaatacataactt

SEQ ID NO: 1196931 - DNA, 15 bp, Homo sapiens
agccaatacataact

SEQ ID NO: 1196932 - DNA, 15 bp, Homo sapiens
gagccaatacataac

SEQ ID NO: 1196933 - DNA, 15 bp, Homo sapiens
agagccaatacataa

SEQ ID NO: 1196934 - DNA, 15 bp, Homo sapiens
aagagccaatacata

SEQ ID NO: 1196935 - DNA, 15 bp, Homo sapiens
taagagccaatacat

SEQ ID NO: 1196936 - DNA, 15 bp, Homo sapiens
gtaagagccaataca

SEQ ID NO: 1196937 - DNA, 15 bp, Homo sapiens
tgtaagagccaatac

SEQ ID NO: 1196938 - DNA, 15 bp, Homo sapiens
gtgtaagagccaata

SEQ ID NO: 1196939 - DNA, 15 bp, Homo sapiens
tgtgtaagagccaat

SEQ ID NO: 1196940 - DNA, 15 bp, Homo sapiens
ctgtgtaagagccaa

SEQ ID NO: 1196941 - DNA, 15 bp, Homo sapiens
actgtgtaagagcca

SEQ ID NO: 1196942 - DNA, 15 bp, Homo sapiens
gactgtgtaagagcc

SEQ ID NO: 1196943 - DNA, 15 bp, Homo sapiens
agactgtgtaagagc

SEQ ID NO: 1196944 - DNA, 15 bp, Homo sapiens
tagactgtgtaagag

SEQ ID NO: 1196945 - DNA, 15 bp, Homo sapiens
ctagactgtgtaaga

SEQ ID NO: 1196946 - DNA, 15 bp, Homo sapiens
cctagactgtgtaag

SEQ ID NO: 1196947 - DNA, 15 bp, Homo sapiens
tcctagactgtgtaa

SEQ ID NO: 1196948 - DNA, 15 bp, Homo sapiens
ttcctagactgtgta

SEQ ID NO: 1196949 - DNA, 15 bp, Homo sapiens
attcctagactgtgt

SEQ ID NO: 1196950 - DNA, 15 bp, Homo sapiens
tattcctagactgtg

SEQ ID NO: 1196951 - DNA, 15 bp, Homo sapiens
ttattcctagactgt

SEQ ID NO: 1196952 - DNA, 15 bp, Homo sapiens
tttattcctagactg

SEQ ID NO: 1196953 - DNA, 15 bp, Homo sapiens
gtttattcctagact

SEQ ID NO: 1196954 - DNA, 15 bp, Homo sapiens
ggtttattcctagac

SEQ ID NO: 1196955 - DNA, 15 bp, Homo sapiens
tggtttattcctaga

SEQ ID NO: 1196956 - DNA, 15 bp, Homo sapiens
atggtttattcctag

SEQ ID NO: 1196957 - DNA, 15 bp, Homo sapiens
aatggtttattccta

SEQ ID NO: 1196958 - DNA, 15 bp, Homo sapiens
gaatggtttattcct

SEQ ID NO: 1196959 - DNA, 15 bp, Homo sapiens
ggaatggtttattcc

SEQ ID NO: 1196960 - DNA, 15 bp, Homo sapiens
gggaatggtttattc

SEQ ID NO: 1196961 - DNA, 15 bp, Homo sapiens
tgggaatggtttatt

SEQ ID NO: 1196962 - DNA, 15 bp, Homo sapiens
gtgggaatggtttat

SEQ ID NO: 1196963 - DNA, 15 bp, Homo sapiens
ggtgggaatggttta

SEQ ID NO: 1196964 - DNA, 15 bp, Homo sapiens
aggtgggaatggttt

SEQ ID NO: 1196965 - DNA, 15 bp, Homo sapiens
taggtgggaatggtt

SEQ ID NO: 1196966 - DNA, 15 bp, Homo sapiens
ttaggtgggaatggt

SEQ ID NO: 1196967 - DNA, 15 bp, Homo sapiens
cttaggtgggaatgg

SEQ ID NO: 1196968 - DNA, 15 bp, Homo sapiens
acttaggtgggaatg

SEQ ID NO: 1196969 - DNA, 15 bp, Homo sapiens
cacttaggtgggaat

SEQ ID NO: 1196970 - DNA, 15 bp, Homo sapiens
tcacttaggtgggaa

SEQ ID NO: 1196971 - DNA, 15 bp, Homo sapiens
ttcacttaggtggga

SEQ ID NO: 1196972 - DNA, 15 bp, Homo sapiens
tttcacttaggtggg

SEQ ID NO: 1196973 - DNA, 15 bp, Homo sapiens
gtttcacttaggtgg

SEQ ID NO: 1196974 - DNA, 15 bp, Homo sapiens
agtttcacttaggtg

SEQ ID NO: 1196975 - DNA, 15 bp, Homo sapiens
cagtttcacttaggt

SEQ ID NO: 1196976 - DNA, 15 bp, Homo sapiens
ccagtttcacttagg

SEQ ID NO: 1196977 - DNA, 15 bp, Homo sapiens
tccagtttcacttag

SEQ ID NO: 1196978 - DNA, 15 bp, Homo sapiens
ttccagtttcactta

SEQ ID NO: 1196979 - DNA, 15 bp, Homo sapiens
cttccagtttcactt

SEQ ID NO: 1196980 - DNA, 15 bp, Homo sapiens
gcttccagtttcact

SEQ ID NO: 1196981 - DNA, 15 bp, Homo sapiens
agcttccagtttcac

SEQ ID NO: 1196982 - DNA, 15 bp, Homo sapiens
cagcttccagtttca

SEQ ID NO: 1196983 - DNA, 15 bp, Homo sapiens
tcagcttccagtttc

SEQ ID NO: 1196984 - DNA, 15 bp, Homo sapiens
atcagcttccagttt

SEQ ID NO: 1196985 - DNA, 15 bp, Homo sapiens
aatcagcttccagtt

SEQ ID NO: 1196986 - DNA, 15 bp, Homo sapiens
taatcagcttccagt

SEQ ID NO: 1196987 - DNA, 15 bp, Homo sapiens
ataatcagcttccag

SEQ ID NO: 1196988 - DNA, 15 bp, Homo sapiens
tataatcagcttcca

SEQ ID NO: 1196989 - DNA, 15 bp, Homo sapiens
ttataatcagcttcc

SEQ ID NO: 1196990 - DNA, 15 bp, Homo sapiens
tttataatcagcttc

SEQ ID NO: 1196991 - DNA, 15 bp, Homo sapiens
ctttataatcagctt

SEQ ID NO: 1196992 - DNA, 15 bp, Homo sapiens
ttctttataatcagc

SEQ ID NO: 1196993 - DNA, 15 bp, Homo sapiens
attctttataatcag

SEQ ID NO: 1196994 - DNA, 15 bp, Homo sapiens
gattctttataatca

SEQ ID NO: 1196995 - DNA, 15 bp, Homo sapiens
agattctttataatc

SEQ ID NO: 1196996 - DNA, 15 bp, Homo sapiens
aagattctttataat

SEQ ID NO: 1196997 - DNA, 15 bp, Homo sapiens
taagattctttataa

SEQ ID NO: 1196998 - DNA, 15 bp, Homo sapiens
gtaagattctttata

SEQ ID NO: 1196999 - DNA, 15 bp, Homo sapiens
ggtaagattctttat

SEQ ID NO: 1197000 - DNA, 15 bp, Homo sapiens
tggtaagattcttta

SEQ ID NO: 1197001 - DNA, 15 bp, Homo sapiens
ttggtaagattcttt

SEQ ID NO: 1197002 - DNA, 15 bp, Homo sapiens
cttggtaagattctt

SEQ ID NO: 1197003 - DNA, 15 bp, Homo sapiens
tcttggtaagattct

SEQ ID NO: 1197004 - DNA, 15 bp, Homo sapiens
gtcttggtaagattc

SEQ ID NO: 1197005 - DNA, 15 bp, Homo sapiens
ggtcttggtaagatt

SEQ ID NO: 1197006 - DNA, 15 bp, Homo sapiens
aggtcttggtaagat

SEQ ID NO: 1197007 - DNA, 15 bp, Homo sapiens
gaggtcttggtaaga

SEQ ID NO: 1197008 - DNA, 15 bp, Homo sapiens
agaggtcttggtaag

SEQ ID NO: 1197009 - DNA, 15 bp, Homo sapiens
cagaggtcttggtaa

SEQ ID NO: 1197010 - DNA, 15 bp, Homo sapiens
ccagaggtcttggta

SEQ ID NO: 1197011 - DNA, 15 bp, Homo sapiens
gccagaggtcttggt

SEQ ID NO: 1197012 - DNA, 15 bp, Homo sapiens
tgccagaggtcttgg

SEQ ID NO: 1197013 - DNA, 15 bp, Homo sapiens
ttgccagaggtcttg

SEQ ID NO: 1197014 - DNA, 15 bp, Homo sapiens
gttgccagaggtctt

SEQ ID NO: 1197015 - DNA, 15 bp, Homo sapiens
tgttgccagaggtct

SEQ ID NO: 1197016 - DNA, 15 bp, Homo sapiens
ttgttgccagaggtc

SEQ ID NO: 1197017 - DNA, 15 bp, Homo sapiens
attgttgccagaggt

SEQ ID NO: 1197018 - DNA, 15 bp, Homo sapiens
gattgttgccagagg

SEQ ID NO: 1197019 - DNA, 15 bp, Homo sapiens
ggattgttgccagag

SEQ ID NO: 1197020 - DNA, 15 bp, Homo sapiens
tggattgttgccaga

SEQ ID NO: 1197021 - DNA, 15 bp, Homo sapiens
ttggattgttgccag

SEQ ID NO: 1197022 - DNA, 15 bp, Homo sapiens
gttggattgttgcca

SEQ ID NO: 1197023 - DNA, 15 bp, Homo sapiens
agttggattgttgcc

SEQ ID NO: 1197024 - DNA, 15 bp, Homo sapiens
tagttggattgttgc

SEQ ID NO: 1197025 - DNA, 15 bp, Homo sapiens
atagttggattgttg

SEQ ID NO: 1197026 - DNA, 15 bp, Homo sapiens
aatagttggattgtt

SEQ ID NO: 1197027 - DNA, 15 bp, Homo sapiens
aaatagttggattgt

SEQ ID NO: 1197028 - DNA, 15 bp, Homo sapiens
aaaatagttggattg

SEQ ID NO: 1197029 - DNA, 15 bp, Homo sapiens
aaaaatagttggatt

SEQ ID NO: 1197030 - DNA, 15 bp, Homo sapiens
gaaaaatagttggat

SEQ ID NO: 1197031 - DNA, 15 bp, Homo sapiens
agaaaaatagttgga

SEQ ID NO: 1197032 - DNA, 15 bp, Homo sapiens
gagaaaaatagttgg

SEQ ID NO: 1197033 - DNA, 15 bp, Homo sapiens
agagaaaaatagttg

SEQ ID NO: 1197034 - DNA, 15 bp, Homo sapiens
aagagaaaaatagtt

SEQ ID NO: 1197035 - DNA, 15 bp, Homo sapiens
caagagaaaaatagt

SEQ ID NO: 1197036 - DNA, 15 bp, Homo sapiens
tcaagagaaaaatag

SEQ ID NO: 1197037 - DNA, 15 bp, Homo sapiens
gtcaagagaaaaata

SEQ ID NO: 1197038 - DNA, 15 bp, Homo sapiens
tgtcaagagaaaaat

SEQ ID NO: 1197039 - DNA, 15 bp, Homo sapiens
ctgtcaagagaaaaa

SEQ ID NO: 1197040 - DNA, 15 bp, Homo sapiens
gctgtcaagagaaaa

SEQ ID NO: 1197041 - DNA, 15 bp, Homo sapiens
agctgtcaagagaaa

SEQ ID NO: 1197042 - DNA, 15 bp, Homo sapiens
aagctgtcaagagaa

SEQ ID NO: 1197043 - DNA, 15 bp, Homo sapiens
taagctgtcaagaga

SEQ ID NO: 1197044 - DNA, 15 bp, Homo sapiens
ataagctgtcaagag

SEQ ID NO: 1197045 - DNA, 15 bp, Homo sapiens
aataagctgtcaaga

SEQ ID NO: 1197046 - DNA, 15 bp, Homo sapiens
caataagctgtcaag

SEQ ID NO: 1197047 - DNA, 15 bp, Homo sapiens
tcaataagctgtcaa

SEQ ID NO: 1197048 - DNA, 15 bp, Homo sapiens
ttcaataagctgtca

SEQ ID NO: 1197049 - DNA, 15 bp, Homo sapiens
cttcaataagctgtc

SEQ ID NO: 1197050 - DNA, 15 bp, Homo sapiens
acttcaataagctgt

SEQ ID NO: 1197051 - DNA, 15 bp, Homo sapiens
aacttcaataagctg

SEQ ID NO: 1197052 - DNA, 15 bp, Homo sapiens
caacttcaataagct

SEQ ID NO: 1197053 - DNA, 15 bp, Homo sapiens
tcaacttcaataagc

SEQ ID NO: 1197054 - DNA, 15 bp, Homo sapiens
ctcaacttcaataag

SEQ ID NO: 1197055 - DNA, 15 bp, Homo sapiens
cctcaacttcaataa

SEQ ID NO: 1197056 - DNA, 15 bp, Homo sapiens
acctcaacttcaata

SEQ ID NO: 1197057 - DNA, 15 bp, Homo sapiens
tacctcaacttcaat

SEQ ID NO: 1197058 - DNA, 15 bp, Homo sapiens
ctacctcaacttcaa

SEQ ID NO: 1197059 - DNA, 15 bp, Homo sapiens
actacctcaacttca

SEQ ID NO: 1197060 - DNA, 15 bp, Homo sapiens
gactacctcaacttc

SEQ ID NO: 1197061 - DNA, 15 bp, Homo sapiens
agactacctcaactt

SEQ ID NO: 1197062 - DNA, 15 bp, Homo sapiens
gagactacctcaact

SEQ ID NO: 1197063 - DNA, 15 bp, Homo sapiens
tgagactacctcaac

SEQ ID NO: 1197064 - DNA, 15 bp, Homo sapiens
ttgagactacctcaa

SEQ ID NO: 1197065 - DNA, 15 bp, Homo sapiens
cttgagactacctca

SEQ ID NO: 1197066 - DNA, 15 bp, Homo sapiens
acttgagactacctc

SEQ ID NO: 1197067 - DNA, 15 bp, Homo sapiens
cacttgagactacct

SEQ ID NO: 1197068 - DNA, 15 bp, Homo sapiens
gcacttgagactacc

SEQ ID NO: 1197069 - DNA, 15 bp, Homo sapiens
agcacttgagactac

SEQ ID NO: 1197070 - DNA, 15 bp, Homo sapiens
tagcacttgagacta

SEQ ID NO: 1197071 - DNA, 15 bp, Homo sapiens
atagcacttgagact

SEQ ID NO: 1197072 - DNA, 15 bp, Homo sapiens
catagcacttgagac

SEQ ID NO: 1197073 - DNA, 15 bp, Homo sapiens
ccatagcacttgaga

SEQ ID NO: 1197074 - DNA, 15 bp, Homo sapiens
accatagcacttgag

SEQ ID NO: 1197075 - DNA, 15 bp, Homo sapiens
aaccatagcacttga

SEQ ID NO: 1197076 - DNA, 15 bp, Homo sapiens
caaccatagcacttg

SEQ ID NO: 1197077 - DNA, 15 bp, Homo sapiens
tcaaccatagcactt

SEQ ID NO: 1197078 - DNA, 15 bp, Homo sapiens
ttcaaccatagcact

SEQ ID NO: 1197079 - DNA, 15 bp, Homo sapiens
attcaaccatagcac

SEQ ID NO: 1197080 - DNA, 15 bp, Homo sapiens
gattcaaccatagca

SEQ ID NO: 1197081 - DNA, 15 bp, Homo sapiens
tgattcaaccatagc

SEQ ID NO: 1197082 - DNA, 15 bp, Homo sapiens
ctgattcaaccatag

SEQ ID NO: 1197083 - DNA, 15 bp, Homo sapiens
cctgattcaaccata

SEQ ID NO: 1197084 - DNA, 15 bp, Homo sapiens
ccctgattcaaccat

SEQ ID NO: 1197085 - DNA, 15 bp, Homo sapiens
gccctgattcaacca

SEQ ID NO: 1197086 - DNA, 15 bp, Homo sapiens
agccctgattcaacc

SEQ ID NO: 1197087 - DNA, 15 bp, Homo sapiens
aagccctgattcaac

SEQ ID NO: 1197088 - DNA, 15 bp, Homo sapiens
gaagccctgattcaa

SEQ ID NO: 1197089 - DNA, 15 bp, Homo sapiens
agaagccctgattca

SEQ ID NO: 1197090 - DNA, 15 bp, Homo sapiens
cagaagccctgattc

SEQ ID NO: 1197091 - DNA, 15 bp, Homo sapiens
ccagaagccctgatt

SEQ ID NO: 1197092 - DNA, 15 bp, Homo sapiens
tccagaagccctgat

SEQ ID NO: 1197093 - DNA, 15 bp, Homo sapiens
ctccagaagccctga

SEQ ID NO: 1197094 - DNA, 15 bp, Homo sapiens
tctccagaagccctg

SEQ ID NO: 1197095 - DNA, 15 bp, Homo sapiens
ttctccagaagccct

SEQ ID NO: 1197096 - DNA, 15 bp, Homo sapiens
tttctccagaagccc

SEQ ID NO: 1197097 - DNA, 15 bp, Homo sapiens
ttttctccagaagcc

SEQ ID NO: 1197098 - DNA, 15 bp, Homo sapiens
tttttctccagaagc

SEQ ID NO: 1197099 - DNA, 15 bp, Homo sapiens
gtttttctccagaag

SEQ ID NO: 1197100 - DNA, 15 bp, Homo sapiens
agtttttctccagaa

SEQ ID NO: 1197101 - DNA, 15 bp, Homo sapiens
cagtttttctccaga

SEQ ID NO: 1197102 - DNA, 15 bp, Homo sapiens
acagtttttctccag

SEQ ID NO: 1197103 - DNA, 15 bp, Homo sapiens
cacagtttttctcca

SEQ ID NO: 1197104 - DNA, 15 bp, Homo sapiens
ccacagtttttctcc

SEQ ID NO: 1197105 - DNA, 15 bp, Homo sapiens
tccacagtttttctc

SEQ ID NO: 1197106 - DNA, 15 bp, Homo sapiens
gtccacagtttttct

SEQ ID NO: 1197107 - DNA, 15 bp, Homo sapiens
agtccacagtttttc

SEQ ID NO: 1197108 - DNA, 15 bp, Homo sapiens
aagtccacagttttt

SEQ ID NO: 1197109 - DNA, 15 bp, Homo sapiens
taagtccacagtttt

SEQ ID NO: 1197110 - DNA, 15 bp, Homo sapiens
ctaagtccacagttt

SEQ ID NO: 1197111 - DNA, 15 bp, Homo sapiens
tctaagtccacagtt

SEQ ID NO: 1197112 - DNA, 15 bp, Homo sapiens
ctctaagtccacagt

SEQ ID NO: 1197113 - DNA, 15 bp, Homo sapiens
gctctaagtccacag

SEQ ID NO: 1197114 - DNA, 15 bp, Homo sapiens
ggctctaagtccaca

SEQ ID NO: 1197115 - DNA, 15 bp, Homo sapiens
aggctctaagtccac

SEQ ID NO: 1197116 - DNA, 15 bp, Homo sapiens
taggctctaagtcca

SEQ ID NO: 1197117 - DNA, 15 bp, Homo sapiens
ctaggctctaagtcc

SEQ ID NO: 1197118 - DNA, 15 bp, Homo sapiens
tctaggctctaagtc

SEQ ID NO: 1197119 - DNA, 15 bp, Homo sapiens
ctctaggctctaagt

SEQ ID NO: 1197120 - DNA, 15 bp, Homo sapiens
actctaggctctaag

SEQ ID NO: 1197121 - DNA, 15 bp, Homo sapiens
aactctaggctctaa

SEQ ID NO: 1197122 - DNA, 15 bp, Homo sapiens
gaactctaggctcta

SEQ ID NO: 1197123 - DNA, 15 bp, Homo sapiens
ggaactctaggctct

SEQ ID NO: 1197124 - DNA, 15 bp, Homo sapiens
tggaactctaggctc

SEQ ID NO: 1197125 - DNA, 15 bp, Homo sapiens
atggaactctaggct

SEQ ID NO: 1197126 - DNA, 15 bp, Homo sapiens
catggaactctaggc

SEQ ID NO: 1197127 - DNA, 15 bp, Homo sapiens
tcatggaactctagg

SEQ ID NO: 1197128 - DNA, 15 bp, Homo sapiens
ctcatggaactctag

SEQ ID NO: 1197129 - DNA, 15 bp, Homo sapiens
tctcatggaactcta

SEQ ID NO: 1197130 - DNA, 15 bp, Homo sapiens
gtctcatggaactct

SEQ ID NO: 1197131 - DNA, 15 bp, Homo sapiens
tgtctcatggaactc

SEQ ID NO: 1197132 - DNA, 15 bp, Homo sapiens
ttgtctcatggaact

SEQ ID NO: 1197133 - DNA, 15 bp, Homo sapiens
tttgtctcatggaac

SEQ ID NO: 1197134 - DNA, 15 bp, Homo sapiens
gtttgtctcatggaa

SEQ ID NO: 1197135 - DNA, 15 bp, Homo sapiens
tgtttgtctcatgga

SEQ ID NO: 1197136 - DNA, 15 bp, Homo sapiens
atgtttgtctcatgg

SEQ ID NO: 1197137 - DNA, 15 bp, Homo sapiens
aatgtttgtctcatg

SEQ ID NO: 1197138 - DNA, 15 bp, Homo sapiens
gaatgtttgtctcat

SEQ ID NO: 1197139 - DNA, 15 bp, Homo sapiens
ggaatgtttgtctca

SEQ ID NO: 1197140 - DNA, 15 bp, Homo sapiens
gggaatgtttgtctc

SEQ ID NO: 1197141 - DNA, 15 bp, Homo sapiens
tgggaatgtttgtct

SEQ ID NO: 1197142 - DNA, 15 bp, Homo sapiens
atgggaatgtttgtc

SEQ ID NO: 1197143 - DNA, 15 bp, Homo sapiens
tatgggaatgtttgt

SEQ ID NO: 1197144 - DNA, 15 bp, Homo sapiens
atatgggaatgtttg

SEQ ID NO: 1197145 - DNA, 15 bp, Homo sapiens
gatatgggaatgttt

SEQ ID NO: 1197146 - DNA, 15 bp, Homo sapiens
ggatatgggaatgtt

SEQ ID NO: 1197147 - DNA, 15 bp, Homo sapiens
gggatatgggaatgt

SEQ ID NO: 1197148 - DNA, 15 bp, Homo sapiens
agggatatgggaatg

SEQ ID NO: 1197149 - DNA, 15 bp, Homo sapiens
cagggatatgggaat

SEQ ID NO: 1197150 - DNA, 15 bp, Homo sapiens
gcagggatatgggaa

SEQ ID NO: 1197151 - DNA, 15 bp, Homo sapiens
ggcagggatatggga

SEQ ID NO: 1197152 - DNA, 15 bp, Homo sapiens
gggcagggatatggg

SEQ ID NO: 1197153 - DNA, 15 bp, Homo sapiens
agggcagggatatgg

SEQ ID NO: 1197154 - DNA, 15 bp, Homo sapiens
gagggcagggatatg

SEQ ID NO: 1197155 - DNA, 15 bp, Homo sapiens
ggagggcagggatat

SEQ ID NO: 1197156 - DNA, 15 bp, Homo sapiens
tggagggcagggata

SEQ ID NO: 1197157 - DNA, 15 bp, Homo sapiens
ttggagggcagggat

SEQ ID NO: 1197158 - DNA, 15 bp, Homo sapiens
tttggagggcaggga

SEQ ID NO: 1197159 - DNA, 15 bp, Homo sapiens
ctttggagggcaggg

SEQ ID NO: 1197160 - DNA, 15 bp, Homo sapiens
actttggagggcagg

SEQ ID NO: 1197161 - DNA, 15 bp, Homo sapiens
cactttggagggcag

SEQ ID NO: 1197162 - DNA, 15 bp, Homo sapiens
ccactttggagggca

SEQ ID NO: 1197163 - DNA, 15 bp, Homo sapiens
accactttggagggc

SEQ ID NO: 1197164 - DNA, 15 bp, Homo sapiens
gaccactttggaggg

SEQ ID NO: 1197165 - DNA, 15 bp, Homo sapiens
agaccactttggagg

SEQ ID NO: 1197166 - DNA, 15 bp, Homo sapiens
aagaccactttggag

SEQ ID NO: 1197167 - DNA, 15 bp, Homo sapiens
taagaccactttgga

SEQ ID NO: 1197168 - DNA, 15 bp, Homo sapiens
ctaagaccactttgg

SEQ ID NO: 1197169 - DNA, 15 bp, Homo sapiens
tctaagaccactttg

SEQ ID NO: 1197170 - DNA, 15 bp, Homo sapiens
gtctaagaccacttt

SEQ ID NO: 1197171 - DNA, 15 bp, Homo sapiens
tgtctaagaccactt

SEQ ID NO: 1197172 - DNA, 15 bp, Homo sapiens
ctgtctaagaccact

SEQ ID NO: 1197173 - DNA, 15 bp, Homo sapiens
gctgtctaagaccac

SEQ ID NO: 1197174 - DNA, 15 bp, Homo sapiens
ggctgtctaagacca

SEQ ID NO: 1197175 - DNA, 15 bp, Homo sapiens
gggctgtctaagacc

SEQ ID NO: 1197176 - DNA, 15 bp, Homo sapiens
tgggctgtctaagac

SEQ ID NO: 1197177 - DNA, 15 bp, Homo sapiens
gtgggctgtctaaga

SEQ ID NO: 1197178 - DNA, 15 bp, Homo sapiens
tgtgggctgtctaag

SEQ ID NO: 1197179 - DNA, 15 bp, Homo sapiens
gtgtgggctgtctaa

SEQ ID NO: 1197180 - DNA, 15 bp, Homo sapiens
tgtgtgggctgtcta

SEQ ID NO: 1197181 - DNA, 15 bp, Homo sapiens
ttgtgtgggctgtct

SEQ ID NO: 1197182 - DNA, 15 bp, Homo sapiens
cttgtgtgggctgtc

SEQ ID NO: 1197183 - DNA, 15 bp, Homo sapiens
gcttgtgtgggctgt

SEQ ID NO: 1197184 - DNA, 15 bp, Homo sapiens
tgcttgtgtgggctg

SEQ ID NO: 1197185 - DNA, 15 bp, Homo sapiens
atgcttgtgtgggct

SEQ ID NO: 1197186 - DNA, 15 bp, Homo sapiens
aatgcttgtgtgggc

SEQ ID NO: 1197187 - DNA, 15 bp, Homo sapiens
gaatgcttgtgtggg

SEQ ID NO: 1197188 - DNA, 15 bp, Homo sapiens
ggaatgcttgtgtgg

SEQ ID NO: 1197189 - DNA, 15 bp, Homo sapiens
gggaatgcttgtgtg

SEQ ID NO: 1197190 - DNA, 15 bp, Homo sapiens
tgggaatgcttgtgt

SEQ ID NO: 1197191 - DNA, 15 bp, Homo sapiens
ttgggaatgcttgtg

SEQ ID NO: 1197192 - DNA, 15 bp, Homo sapiens
tttgggaatgcttgt

SEQ ID NO: 1197193 - DNA, 15 bp, Homo sapiens
ctttgggaatgcttg

SEQ ID NO: 1197194 - DNA, 15 bp, Homo sapiens
cctttgggaatgctt

SEQ ID NO: 1197195 - DNA, 15 bp, Homo sapiens
ccctttgggaatgct

SEQ ID NO: 1197196 - DNA, 15 bp, Homo sapiens
accctttgggaatgc

SEQ ID NO: 1197197 - DNA, 15 bp, Homo sapiens
caccctttgggaatg

SEQ ID NO: 1197198 - DNA, 15 bp, Homo sapiens
ccaccctttgggaat

SEQ ID NO: 1197199 - DNA, 15 bp, Homo sapiens
tccaccctttgggaa

SEQ ID NO: 1197200 - DNA, 15 bp, Homo sapiens
ctccaccctttggga

SEQ ID NO: 1197201 - DNA, 15 bp, Homo sapiens
actccaccctttggg

SEQ ID NO: 1197202 - DNA, 15 bp, Homo sapiens
cactccaccctttgg

SEQ ID NO: 1197203 - DNA, 15 bp, Homo sapiens
ccactccaccctttg

SEQ ID NO: 1197204 - DNA, 15 bp, Homo sapiens
accactccacccttt

SEQ ID NO: 1197205 - DNA, 15 bp, Homo sapiens
caccactccaccctt

SEQ ID NO: 1197206 - DNA, 15 bp, Homo sapiens
gcaccactccaccct

SEQ ID NO: 1197207 - DNA, 15 bp, Homo sapiens
agcaccactccaccc

SEQ ID NO: 1197208 - DNA, 15 bp, Homo sapiens
cagcaccactccacc

SEQ ID NO: 1197209 - DNA, 15 bp, Homo sapiens
ccagcaccactccac

SEQ ID NO: 1197210 - DNA, 15 bp, Homo sapiens
accagcaccactcca

SEQ ID NO: 1197211 - DNA, 15 bp, Homo sapiens
gaccagcaccactcc

SEQ ID NO: 1197212 - DNA, 15 bp, Homo sapiens
ggaccagcaccactc

SEQ ID NO: 1197213 - DNA, 15 bp, Homo sapiens
aggaccagcaccact

SEQ ID NO: 1197214 - DNA, 15 bp, Homo sapiens
taggaccagcaccac

SEQ ID NO: 1197215 - DNA, 15 bp, Homo sapiens
ctaggaccagcacca

SEQ ID NO: 1197216 - DNA, 15 bp, Homo sapiens
tctaggaccagcacc

SEQ ID NO: 1197217 - DNA, 15 bp, Homo sapiens
atctaggaccagcac

SEQ ID NO: 1197218 - DNA, 15 bp, Homo sapiens
tatctaggaccagca

SEQ ID NO: 1197219 - DNA, 15 bp, Homo sapiens
ttatctaggaccagc

SEQ ID NO: 1197220 - DNA, 15 bp, Homo sapiens
attatctaggaccag

SEQ ID NO: 1197221 - DNA, 15 bp, Homo sapiens
aattatctaggacca

SEQ ID NO: 1197222 - DNA, 15 bp, Homo sapiens
aaattatctaggacc

SEQ ID NO: 1197223 - DNA, 15 bp, Homo sapiens
caaattatctaggac

SEQ ID NO: 1197224 - DNA, 15 bp, Homo sapiens
ccaaattatctagga

SEQ ID NO: 1197225 - DNA, 15 bp, Homo sapiens
cccaaattatctagg

SEQ ID NO: 1197226 - DNA, 15 bp, Homo sapiens
tcccaaattatctag

SEQ ID NO: 1197227 - DNA, 15 bp, Homo sapiens
ctcccaaattatcta

SEQ ID NO: 1197228 - DNA, 15 bp, Homo sapiens
tctcccaaattatct

SEQ ID NO: 1197229 - DNA, 15 bp, Homo sapiens
gtctcccaaattatc

SEQ ID NO: 1197230 - DNA, 15 bp, Homo sapiens
tgtctcccaaattat

SEQ ID NO: 1197231 - DNA, 15 bp, Homo sapiens
atgtctcccaaatta

SEQ ID NO: 1197232 - DNA, 15 bp, Homo sapiens
aatgtctcccaaatt

SEQ ID NO: 1197233 - DNA, 15 bp, Homo sapiens
aaatgtctcccaaat

SEQ ID NO: 1197234 - DNA, 15 bp, Homo sapiens
caaatgtctcccaaa

SEQ ID NO: 1197235 - DNA, 15 bp, Homo sapiens
ccaaatgtctcccaa

SEQ ID NO: 1197236 - DNA, 15 bp, Homo sapiens
gccaaatgtctccca

SEQ ID NO: 1197237 - DNA, 15 bp, Homo sapiens
tgccaaatgtctccc

SEQ ID NO: 1197238 - DNA, 15 bp, Homo sapiens
gtgccaaatgtctcc

SEQ ID NO: 1197239 - DNA, 15 bp, Homo sapiens
agtgccaaatgtctc

SEQ ID NO: 1197240 - DNA, 15 bp, Homo sapiens
cagtgccaaatgtct

SEQ ID NO: 1197241 - DNA, 15 bp, Homo sapiens
acagtgccaaatgtc

SEQ ID NO: 1197242 - DNA, 15 bp, Homo sapiens
aacagtgccaaatgt

SEQ ID NO: 1197243 - DNA, 15 bp, Homo sapiens
caacagtgccaaatg

SEQ ID NO: 1197244 - DNA, 15 bp, Homo sapiens
gcaacagtgccaaat

SEQ ID NO: 1197245 - DNA, 15 bp, Homo sapiens
tgcaacagtgccaaa

SEQ ID NO: 1197246 - DNA, 15 bp, Homo sapiens
ttgcaacagtgccaa

SEQ ID NO: 1197247 - DNA, 15 bp, Homo sapiens
attgcaacagtgcca

SEQ ID NO: 1197248 - DNA, 15 bp, Homo sapiens
cattgcaacagtgcc

SEQ ID NO: 1197249 - DNA, 15 bp, Homo sapiens
tcattgcaacagtgc

SEQ ID NO: 1197250 - DNA, 15 bp, Homo sapiens
gtcattgcaacagtg

SEQ ID NO: 1197251 - DNA, 15 bp, Homo sapiens
agtcattgcaacagt

SEQ ID NO: 1197252 - DNA, 15 bp, Homo sapiens
cagtcattgcaacag

SEQ ID NO: 1197253 - DNA, 15 bp, Homo sapiens
ccagtcattgcaaca

SEQ ID NO: 1197254 - DNA, 15 bp, Homo sapiens
cccagtcattgcaac

SEQ ID NO: 1197255 - DNA, 15 bp, Homo sapiens
ccccagtcattgcaa

SEQ ID NO: 1197256 - DNA, 15 bp, Homo sapiens
tccccagtcattgca

SEQ ID NO: 1197257 - DNA, 15 bp, Homo sapiens
ctccccagtcattgc

SEQ ID NO: 1197258 - DNA, 15 bp, Homo sapiens
tctccccagtcattg

SEQ ID NO: 1197259 - DNA, 15 bp, Homo sapiens
ctctccccagtcatt

SEQ ID NO: 1197260 - DNA, 15 bp, Homo sapiens
gctctccccagtcat

SEQ ID NO: 1197261 - DNA, 15 bp, Homo sapiens
tgctctccccagtca

SEQ ID NO: 1197262 - DNA, 15 bp, Homo sapiens
atgctctccccagtc

SEQ ID NO: 1197263 - DNA, 15 bp, Homo sapiens
aatgctctccccagt

SEQ ID NO: 1197264 - DNA, 15 bp, Homo sapiens
aaatgctctccccag

SEQ ID NO: 1197265 - DNA, 15 bp, Homo sapiens
gaaatgctctcccca

SEQ ID NO: 1197266 - DNA, 15 bp, Homo sapiens
agaaatgctctcccc

SEQ ID NO: 1197267 - DNA, 15 bp, Homo sapiens
cagaaatgctctccc

SEQ ID NO: 1197268 - DNA, 15 bp, Homo sapiens
tcagaaatgctctcc

SEQ ID NO: 1197269 - DNA, 15 bp, Homo sapiens
gtcagaaatgctctc

SEQ ID NO: 1197270 - DNA, 15 bp, Homo sapiens
tgtcagaaatgctct

SEQ ID NO: 1197271 - DNA, 15 bp, Homo sapiens
atgtcagaaatgctc

SEQ ID NO: 1197272 - DNA, 15 bp, Homo sapiens
aatgtcagaaatgct

SEQ ID NO: 1197273 - DNA, 15 bp, Homo sapiens
aaatgtcagaaatgc

SEQ ID NO: 1197274 - DNA, 15 bp, Homo sapiens
taaatgtcagaaatg

SEQ ID NO: 1197275 - DNA, 15 bp, Homo sapiens
ataaatgtcagaaat

SEQ ID NO: 1197276 - DNA, 15 bp, Homo sapiens
aataaatgtcagaaa

SEQ ID NO: 1197277 - DNA, 15 bp, Homo sapiens
caataaatgtcagaa

SEQ ID NO: 1197278 - DNA, 15 bp, Homo sapiens
ccaataaatgtcaga

SEQ ID NO: 1197279 - DNA, 15 bp, Homo sapiens
cccaataaatgtcag

SEQ ID NO: 1197280 - DNA, 15 bp, Homo sapiens
acccaataaatgtca

SEQ ID NO: 1197281 - DNA, 15 bp, Homo sapiens
tacccaataaatgtc

SEQ ID NO: 1197282 - DNA, 15 bp, Homo sapiens
atacccaataaatgt

SEQ ID NO: 1197283 - DNA, 15 bp, Homo sapiens
catacccaataaatg

SEQ ID NO: 1197284 - DNA, 15 bp, Homo sapiens
ccatacccaataaat

SEQ ID NO: 1197285 - DNA, 15 bp, Homo sapiens
tccatacccaataaa

SEQ ID NO: 1197286 - DNA, 15 bp, Homo sapiens
gtccatacccaataa

SEQ ID NO: 1197287 - DNA, 15 bp, Homo sapiens
ggtccatacccaata

SEQ ID NO: 1197288 - DNA, 15 bp, Homo sapiens
tggtccatacccaat

SEQ ID NO: 1197289 - DNA, 15 bp, Homo sapiens
ctggtccatacccaa

SEQ ID NO: 1197290 - DNA, 15 bp, Homo sapiens
cctggtccataccca

SEQ ID NO: 1197291 - DNA, 15 bp, Homo sapiens
acctggtccataccc

SEQ ID NO: 1197292 - DNA, 15 bp, Homo sapiens
gacctggtccatacc

SEQ ID NO: 1197293 - DNA, 15 bp, Homo sapiens
agacctggtccatac

SEQ ID NO: 1197294 - DNA, 15 bp, Homo sapiens
gagacctggtccata

SEQ ID NO: 1197295 - DNA, 15 bp, Homo sapiens
ggagacctggtccat

SEQ ID NO: 1197296 - DNA, 15 bp, Homo sapiens
tggagacctggtcca

SEQ ID NO: 1197297 - DNA, 15 bp, Homo sapiens
ctggagacctggtcc

SEQ ID NO: 1197298 - DNA, 15 bp, Homo sapiens
tctggagacctggtc

SEQ ID NO: 1197299 - DNA, 15 bp, Homo sapiens
gtctggagacctggt

SEQ ID NO: 1197300 - DNA, 15 bp, Homo sapiens
tgtctggagacctgg

SEQ ID NO: 1197301 - DNA, 15 bp, Homo sapiens
atgtctggagacctg

SEQ ID NO: 1197302 - DNA, 15 bp, Homo sapiens
aatgtctggagacct

SEQ ID NO: 1197303 - DNA, 15 bp, Homo sapiens
aaatgtctggagacc

SEQ ID NO: 1197304 - DNA, 15 bp, Homo sapiens
gaaatgtctggagac

SEQ ID NO: 1197305 - DNA, 15 bp, Homo sapiens
tgaaatgtctggaga

SEQ ID NO: 1197306 - DNA, 15 bp, Homo sapiens
ttgaaatgtctggag

SEQ ID NO: 1197307 - DNA, 15 bp, Homo sapiens
cttgaaatgtctgga

SEQ ID NO: 1197308 - DNA, 15 bp, Homo sapiens
acttgaaatgtctgg

SEQ ID NO: 1197309 - DNA, 15 bp, Homo sapiens
tacttgaaatgtctg

SEQ ID NO: 1197310 - DNA, 15 bp, Homo sapiens
ctacttgaaatgtct

SEQ ID NO: 1197311 - DNA, 15 bp, Homo sapiens
cctacttgaaatgtc

SEQ ID NO: 1197312 - DNA, 15 bp, Homo sapiens
tcctacttgaaatgt

SEQ ID NO: 1197313 - DNA, 15 bp, Homo sapiens
ctcctacttgaaatg

SEQ ID NO: 1197314 - DNA, 15 bp, Homo sapiens
tctcctacttgaaat

SEQ ID NO: 1197315 - DNA, 15 bp, Homo sapiens
atctcctacttgaaa

SEQ ID NO: 1197316 - DNA, 15 bp, Homo sapiens
tatctcctacttgaa

SEQ ID NO: 1197317 - DNA, 15 bp, Homo sapiens
ttatctcctacttga

SEQ ID NO: 1197318 - DNA, 15 bp, Homo sapiens
attatctcctacttg

SEQ ID NO: 1197319 - DNA, 15 bp, Homo sapiens
gattatctcctactt

SEQ ID NO: 1197320 - DNA, 15 bp, Homo sapiens
ggattatctcctact

SEQ ID NO: 1197321 - DNA, 15 bp, Homo sapiens
aggattatctcctac

SEQ ID NO: 1197322 - DNA, 15 bp, Homo sapiens
caggattatctccta

SEQ ID NO: 1197323 - DNA, 15 bp, Homo sapiens
acaggattatctcct

SEQ ID NO: 1197324 - DNA, 15 bp, Homo sapiens
aacaggattatctcc

SEQ ID NO: 1197325 - DNA, 15 bp, Homo sapiens
aaacaggattatctc

SEQ ID NO: 1197326 - DNA, 15 bp, Homo sapiens
taaacaggattatct

SEQ ID NO: 1197327 - DNA, 15 bp, Homo sapiens
ataaacaggattatc

SEQ ID NO: 1197328 - DNA, 15 bp, Homo sapiens
tataaacaggattat

SEQ ID NO: 1197329 - DNA, 15 bp, Homo sapiens
ttataaacaggatta

SEQ ID NO: 1197330 - DNA, 15 bp, Homo sapiens
attataaacaggatt

SEQ ID NO: 1197331 - DNA, 15 bp, Homo sapiens
gattataaacaggat

SEQ ID NO: 1197332 - DNA, 15 bp, Homo sapiens
tgattataaacagga

SEQ ID NO: 1197333 - DNA, 15 bp, Homo sapiens
gtgattataaacagg

SEQ ID NO: 1197334 - DNA, 15 bp, Homo sapiens
ggtgattataaacag

SEQ ID NO: 1197335 - DNA, 15 bp, Homo sapiens
aggtgattataaaca

SEQ ID NO: 1197336 - DNA, 15 bp, Homo sapiens
taggtgattataaac

SEQ ID NO: 1197337 - DNA, 15 bp, Homo sapiens
ttaggtgattataaa

SEQ ID NO: 1197338 - DNA, 15 bp, Homo sapiens
cttaggtgattataa

SEQ ID NO: 1197339 - DNA, 15 bp, Homo sapiens
acttaggtgattata

SEQ ID NO: 1197340 - DNA, 15 bp, Homo sapiens
gacttaggtgattat

SEQ ID NO: 1197341 - DNA, 15 bp, Homo sapiens
ggacttaggtgatta

SEQ ID NO: 1197342 - DNA, 15 bp, Homo sapiens
cggacttaggtgatt

SEQ ID NO: 1197343 - DNA, 15 bp, Homo sapiens
ccggacttaggtgat

SEQ ID NO: 1197344 - DNA, 15 bp, Homo sapiens
tccggacttaggtga

SEQ ID NO: 1197345 - DNA, 15 bp, Homo sapiens
ttccggacttaggtg

SEQ ID NO: 1197346 - DNA, 15 bp, Homo sapiens
attccggacttaggt

SEQ ID NO: 1197347 - DNA, 15 bp, Homo sapiens
tattccggacttagg

SEQ ID NO: 1197348 - DNA, 15 bp, Homo sapiens
atattccggacttag

SEQ ID NO: 1197349 - DNA, 15 bp, Homo sapiens
tatattccggactta

SEQ ID NO: 1197350 - DNA, 15 bp, Homo sapiens
ttatattccggactt

SEQ ID NO: 1197351 - DNA, 15 bp, Homo sapiens
gttatattccggact

SEQ ID NO: 1197352 - DNA, 15 bp, Homo sapiens
agttatattccggac

SEQ ID NO: 1197353 - DNA, 15 bp, Homo sapiens
gagttatattccgga

SEQ ID NO: 1197354 - DNA, 15 bp, Homo sapiens
ggagttatattccgg

SEQ ID NO: 1197355 - DNA, 15 bp, Homo sapiens
tggagttatattccg

SEQ ID NO: 1197356 - DNA, 15 bp, Homo sapiens
ttggagttatattcc

SEQ ID NO: 1197357 - DNA, 15 bp, Homo sapiens
attggagttatattc

SEQ ID NO: 1197358 - DNA, 15 bp, Homo sapiens
aattggagttatatt

SEQ ID NO: 1197359 - DNA, 15 bp, Homo sapiens
aaattggagttatat

SEQ ID NO: 1197360 - DNA, 15 bp, Homo sapiens
aaaattggagttata

SEQ ID NO: 1197361 - DNA, 15 bp, Homo sapiens
aaaaattggagttat

SEQ ID NO: 1197362 - DNA, 15 bp, Homo sapiens
taaaaattggagtta

SEQ ID NO: 1197363 - DNA, 15 bp, Homo sapiens
ataaaaattggagtt

SEQ ID NO: 1197364 - DNA, 15 bp, Homo sapiens
tataaaaattggagt

SEQ ID NO: 1197365 - DNA, 15 bp, Homo sapiens
ttataaaaattggag

SEQ ID NO: 1197366 - DNA, 15 bp, Homo sapiens
tttataaaaattgga

SEQ ID NO: 1197367 - DNA, 15 bp, Homo sapiens
gtttataaaaattgg

SEQ ID NO: 1197368 - DNA, 15 bp, Homo sapiens
agtttataaaaattg

SEQ ID NO: 1197369 - DNA, 15 bp, Homo sapiens
gagtttataaaaatt

SEQ ID NO: 1197370 - DNA, 15 bp, Homo sapiens
tgagtttataaaaat

SEQ ID NO: 1197371 - DNA, 15 bp, Homo sapiens
ttgagtttataaaaa

SEQ ID NO: 1197372 - DNA, 15 bp, Homo sapiens
tttgagtttataaaa

SEQ ID NO: 1197373 - DNA, 15 bp, Homo sapiens
ctttgagtttataaa

SEQ ID NO: 1197374 - DNA, 15 bp, Homo sapiens
actttgagtttataa

SEQ ID NO: 1197375 - DNA, 15 bp, Homo sapiens
cactttgagtttata

SEQ ID NO: 1197376 - DNA, 15 bp, Homo sapiens
acactttgagtttat

SEQ ID NO: 1197377 - DNA, 15 bp, Homo sapiens
aacactttgagttta

SEQ ID NO: 1197378 - DNA, 15 bp, Homo sapiens
aaacactttgagttt

SEQ ID NO: 1197379 - DNA, 15 bp, Homo sapiens
aaaacactttgagtt

SEQ ID NO: 1197380 - DNA, 15 bp, Homo sapiens
aaaaacactttgagt

SEQ ID NO: 1197381 - DNA, 15 bp, Homo sapiens
caaaaacactttgag

SEQ ID NO: 1197382 - DNA, 15 bp, Homo sapiens
gcaaaaacactttga

SEQ ID NO: 1197383 - DNA, 15 bp, Homo sapiens
tgcaaaaacactttg

SEQ ID NO: 1197384 - DNA, 15 bp, Homo sapiens
gtgcaaaaacacttt

SEQ ID NO: 1197385 - DNA, 15 bp, Homo sapiens
tgtgcaaaaacactt

SEQ ID NO: 1197386 - DNA, 15 bp, Homo sapiens
ttgtgcaaaaacact

SEQ ID NO: 1197387 - DNA, 15 bp, Homo sapiens
attgtgcaaaaacac

SEQ ID NO: 1197388 - DNA, 15 bp, Homo sapiens
aattgtgcaaaaaca

SEQ ID NO: 1197389 - DNA, 15 bp, Homo sapiens
aaattgtgcaaaaac

SEQ ID NO: 1197390 - DNA, 15 bp, Homo sapiens
aaaattgtgcaaaaa

SEQ ID NO: 1197391 - DNA, 15 bp, Homo sapiens
taaaattgtgcaaaa

SEQ ID NO: 1197392 - DNA, 15 bp, Homo sapiens
ttaaaattgtgcaaa

SEQ ID NO: 1197393 - DNA, 15 bp, Homo sapiens
gttaaaattgtgcaa

SEQ ID NO: 1197394 - DNA, 15 bp, Homo sapiens
tgttaaaattgtgca

SEQ ID NO: 1197395 - DNA, 15 bp, Homo sapiens
atgttaaaattgtgc

SEQ ID NO: 1197396 - DNA, 15 bp, Homo sapiens
tatgttaaaattgtg

SEQ ID NO: 1197397 - DNA, 15 bp, Homo sapiens
ttatgttaaaattgt

SEQ ID NO: 1197398 - DNA, 15 bp, Homo sapiens
tttatgttaaaattg

SEQ ID NO: 1197399 - DNA, 15 bp, Homo sapiens
gtttatgttaaaatt

SEQ ID NO: 1197400 - DNA, 15 bp, Homo sapiens
ggtttatgttaaaat

SEQ ID NO: 1197401 - DNA, 15 bp, Homo sapiens
cggtttatgttaaaa

SEQ ID NO: 1197402 - DNA, 15 bp, Homo sapiens
tcggtttatgttaaa

SEQ ID NO: 1197403 - DNA, 15 bp, Homo sapiens
gtcggtttatgttaa

SEQ ID NO: 1197404 - DNA, 15 bp, Homo sapiens
agtcggtttatgtta

SEQ ID NO: 1197405 - DNA, 15 bp, Homo sapiens
aagtcggtttatgtt

SEQ ID NO: 1197406 - DNA, 15 bp, Homo sapiens
gaagtcggtttatgt

SEQ ID NO: 1197407 - DNA, 15 bp, Homo sapiens
agaagtcggtttatg

SEQ ID NO: 1197408 - DNA, 15 bp, Homo sapiens
aagaagtcggtttat

SEQ ID NO: 1197409 - DNA, 15 bp, Homo sapiens
gaagaagtcggttta

SEQ ID NO: 1197410 - DNA, 15 bp, Homo sapiens
tgaagaagtcggttt

SEQ ID NO: 1197411 - DNA, 15 bp, Homo sapiens
ctgaagaagtcggtt

SEQ ID NO: 1197412 - DNA, 15 bp, Homo sapiens
cctgaagaagtcggt

SEQ ID NO: 1197413 - DNA, 15 bp, Homo sapiens
ccctgaagaagtcgg

SEQ ID NO: 1197414 - DNA, 15 bp, Homo sapiens
tccctgaagaagtcg

SEQ ID NO: 1197415 - DNA, 15 bp, Homo sapiens
atccctgaagaagtc

SEQ ID NO: 1197416 - DNA, 15 bp, Homo sapiens
catccctgaagaagt

SEQ ID NO: 1197417 - DNA, 15 bp, Homo sapiens
gcatccctgaagaag

SEQ ID NO: 1197418 - DNA, 15 bp, Homo sapiens
tgcatccctgaagaa

SEQ ID NO: 1197419 - DNA, 15 bp, Homo sapiens
ttgcatccctgaaga

SEQ ID NO: 1197420 - DNA, 15 bp, Homo sapiens
attgcatccctgaag

SEQ ID NO: 1197421 - DNA, 15 bp, Homo sapiens
aattgcatccctgaa

SEQ ID NO: 1197422 - DNA, 15 bp, Homo sapiens
taattgcatccctga

SEQ ID NO: 1197423 - DNA, 15 bp, Homo sapiens
gtaattgcatccctg

SEQ ID NO: 1197424 - DNA, 15 bp, Homo sapiens
ggtaattgcatccct

SEQ ID NO: 1197425 - DNA, 15 bp, Homo sapiens
tggtaattgcatccc

SEQ ID NO: 1197426 - DNA, 15 bp, Homo sapiens
atggtaattgcatcc

SEQ ID NO: 1197427 - DNA, 15 bp, Homo sapiens
tatggtaattgcatc

SEQ ID NO: 1197428 - DNA, 15 bp, Homo sapiens
gtatggtaattgcat

SEQ ID NO: 1197429 - DNA, 15 bp, Homo sapiens
tgtatggtaattgca

SEQ ID NO: 1197430 - DNA, 15 bp, Homo sapiens
ttgtatggtaattgc

SEQ ID NO: 1197431 - DNA, 15 bp, Homo sapiens
tttgtatggtaattg

SEQ ID NO: 1197432 - DNA, 15 bp, Homo sapiens
atttgtatggtaatt

SEQ ID NO: 1197433 - DNA, 15 bp, Homo sapiens
aatttgtatggtaat

SEQ ID NO: 1197434 - DNA, 15 bp, Homo sapiens
taatttgtatggtaa

SEQ ID NO: 1197435 - DNA, 15 bp, Homo sapiens
ttaatttgtatggta

SEQ ID NO: 1197436 - DNA, 15 bp, Homo sapiens
cttaatttgtatggt

SEQ ID NO: 1197437 - DNA, 15 bp, Homo sapiens
tcttaatttgtatgg

SEQ ID NO: 1197438 - DNA, 15 bp, Homo sapiens
ttcttaatttgtatg

SEQ ID NO: 1197439 - DNA, 15 bp, Homo sapiens
tttcttaatttgtat

SEQ ID NO: 1197440 - DNA, 15 bp, Homo sapiens
ttttcttaatttgta

SEQ ID NO: 1197441 - DNA, 15 bp, Homo sapiens
cttttcttaatttgt

SEQ ID NO: 1197442 - DNA, 15 bp, Homo sapiens
ccttttcttaatttg

SEQ ID NO: 1197443 - DNA, 15 bp, Homo sapiens
accttttcttaattt

SEQ ID NO: 1197444 - DNA, 15 bp, Homo sapiens
taccttttcttaatt

SEQ ID NO: 1197445 - DNA, 15 bp, Homo sapiens
ctaccttttcttaat

SEQ ID NO: 1197446 - DNA, 15 bp, Homo sapiens
tctaccttttcttaa

SEQ ID NO: 1197447 - DNA, 15 bp, Homo sapiens
ttctaccttttctta

SEQ ID NO: 1197448 - DNA, 15 bp, Homo sapiens
gttctaccttttctt

SEQ ID NO: 1197449 - DNA, 15 bp, Homo sapiens
agttctaccttttct

SEQ ID NO: 1197450 - DNA, 15 bp, Homo sapiens
aagttctaccttttc

SEQ ID NO: 1197451 - DNA, 15 bp, Homo sapiens
aaagttctacctttt

SEQ ID NO: 1197452 - DNA, 15 bp, Homo sapiens
taaagttctaccttt

SEQ ID NO: 1197453 - DNA, 15 bp, Homo sapiens
gtaaagttctacctt

SEQ ID NO: 1197454 - DNA, 15 bp, Homo sapiens
ggtaaagttctacct

SEQ ID NO: 1197455 - DNA, 15 bp, Homo sapiens
tggtaaagttctacc

SEQ ID NO: 1197456 - DNA, 15 bp, Homo sapiens
ttggtaaagttctac

SEQ ID NO: 1197457 - DNA, 15 bp, Homo sapiens
cttggtaaagttcta

SEQ ID NO: 1197458 - DNA, 15 bp, Homo sapiens
acttggtaaagttct

SEQ ID NO: 1197459 - DNA, 15 bp, Homo sapiens
gacttggtaaagttc

SEQ ID NO: 1197460 - DNA, 15 bp, Homo sapiens
agacttggtaaagtt

SEQ ID NO: 1197461 - DNA, 15 bp, Homo sapiens
aagacttggtaaagt

SEQ ID NO: 1197462 - DNA, 15 bp, Homo sapiens
aaagacttggtaaag

SEQ ID NO: 1197463 - DNA, 15 bp, Homo sapiens
aaaagacttggtaaa

SEQ ID NO: 1197464 - DNA, 15 bp, Homo sapiens
aaaaagacttggtaa

SEQ ID NO: 1197465 - DNA, 15 bp, Homo sapiens
gaaaaagacttggta

SEQ ID NO: 1197466 - DNA, 15 bp, Homo sapiens
tgaaaaagacttggt

SEQ ID NO: 1197467 - DNA, 15 bp, Homo sapiens
gtgaaaaagacttgg

SEQ ID NO: 1197468 - DNA, 15 bp, Homo sapiens
agtgaaaaagacttg

SEQ ID NO: 1197469 - DNA, 15 bp, Homo sapiens
cagtgaaaaagactt

SEQ ID NO: 1197470 - DNA, 15 bp, Homo sapiens
acagtgaaaaagact

SEQ ID NO: 1197471 - DNA, 15 bp, Homo sapiens
aacagtgaaaaagac

SEQ ID NO: 1197472 - DNA, 15 bp, Homo sapiens
aaacagtgaaaaaga

SEQ ID NO: 1197473 - DNA, 15 bp, Homo sapiens
aaaacagtgaaaaag

SEQ ID NO: 1197474 - DNA, 15 bp, Homo sapiens
taaaacagtgaaaaa

SEQ ID NO: 1197475 - DNA, 15 bp, Homo sapiens
ctaaaacagtgaaaa

SEQ ID NO: 1197476 - DNA, 15 bp, Homo sapiens
tctaaaacagtgaaa

SEQ ID NO: 1197477 - DNA, 15 bp, Homo sapiens
ttctaaaacagtgaa

SEQ ID NO: 1197478 - DNA, 15 bp, Homo sapiens
tttctaaaacagtga

SEQ ID NO: 1197479 - DNA, 15 bp, Homo sapiens
ttttctaaaacagtg

SEQ ID NO: 1197480 - DNA, 15 bp, Homo sapiens
attttctaaaacagt

SEQ ID NO: 1197481 - DNA, 15 bp, Homo sapiens
gattttctaaaacag

SEQ ID NO: 1197482 - DNA, 15 bp, Homo sapiens
tgattttctaaaaca

SEQ ID NO: 1197483 - DNA, 15 bp, Homo sapiens
gtgattttctaaaac

SEQ ID NO: 1197484 - DNA, 15 bp, Homo sapiens
atgtgattttctaaa

SEQ ID NO: 1197485 - DNA, 15 bp, Homo sapiens
gatgtgattttctaa

SEQ ID NO: 1197486 - DNA, 15 bp, Homo sapiens
tgatgtgattttcta

SEQ ID NO: 1197487 - DNA, 15 bp, Homo sapiens
atgatgtgattttct

SEQ ID NO: 1197488 - DNA, 15 bp, Homo sapiens
gatgatgtgattttc

SEQ ID NO: 1197489 - DNA, 15 bp, Homo sapiens
tgatgatgtgatttt

SEQ ID NO: 1197490 - DNA, 15 bp, Homo sapiens
ctgatgatgtgattt

SEQ ID NO: 1197491 - DNA, 15 bp, Homo sapiens
actgatgatgtgatt

SEQ ID NO: 1197492 - DNA, 15 bp, Homo sapiens
cactgatgatgtgat

SEQ ID NO: 1197493 - DNA, 15 bp, Homo sapiens
ccactgatgatgtga

SEQ ID NO: 1197494 - DNA, 15 bp, Homo sapiens
gccactgatgatgtg

SEQ ID NO: 1197495 - DNA, 15 bp, Homo sapiens
tgccactgatgatgt

SEQ ID NO: 1197496 - DNA, 15 bp, Homo sapiens
ttgccactgatgatg

SEQ ID NO: 1197497 - DNA, 15 bp, Homo sapiens
attgccactgatgat

SEQ ID NO: 1197498 - DNA, 15 bp, Homo sapiens
cattgccactgatga

SEQ ID NO: 1197499 - DNA, 15 bp, Homo sapiens
gcattgccactgatg

SEQ ID NO: 1197500 - DNA, 15 bp, Homo sapiens
agcattgccactgat

SEQ ID NO: 1197501 - DNA, 15 bp, Homo sapiens
tagcattgccactga

SEQ ID NO: 1197502 - DNA, 15 bp, Homo sapiens
ttagcattgccactg

SEQ ID NO: 1197503 - DNA, 15 bp, Homo sapiens
attagcattgccact

SEQ ID NO: 1197504 - DNA, 15 bp, Homo sapiens
aattagcattgccac

SEQ ID NO: 1197505 - DNA, 15 bp, Homo sapiens
caattagcattgcca

SEQ ID NO: 1197506 - DNA, 15 bp, Homo sapiens
acaattagcattgcc

SEQ ID NO: 1197507 - DNA, 15 bp, Homo sapiens
cacaattagcattgc

SEQ ID NO: 1197508 - DNA, 15 bp, Homo sapiens
gcacaattagcattg

SEQ ID NO: 1197509 - DNA, 15 bp, Homo sapiens
agcacaattagcatt

SEQ ID NO: 1197510 - DNA, 15 bp, Homo sapiens
cagcacaattagcat

SEQ ID NO: 1197511 - DNA, 15 bp, Homo sapiens
acagcacaattagca

SEQ ID NO: 1197512 - DNA, 15 bp, Homo sapiens
aacagcacaattagc

SEQ ID NO: 1197513 - DNA, 15 bp, Homo sapiens
aaacagcacaattag

SEQ ID NO: 1197514 - DNA, 15 bp, Homo sapiens
caaacagcacaatta

SEQ ID NO: 1197515 - DNA, 15 bp, Homo sapiens
tcaaacagcacaatt

SEQ ID NO: 1197516 - DNA, 15 bp, Homo sapiens
ttcaaacagcacaat

SEQ ID NO: 1197517 - DNA, 15 bp, Homo sapiens
attcaaacagcacaa

SEQ ID NO: 1197518 - DNA, 15 bp, Homo sapiens
gattcaaacagcaca

SEQ ID NO: 1197519 - DNA, 15 bp, Homo sapiens
agattcaaacagcac

SEQ ID NO: 1197520 - DNA, 15 bp, Homo sapiens
aagattcaaacagca

SEQ ID NO: 1197521 - DNA, 15 bp, Homo sapiens
aaagattcaaacagc

SEQ ID NO: 1197522 - DNA, 15 bp, Homo sapiens
gaaagattcaaacag

SEQ ID NO: 1197523 - DNA, 15 bp, Homo sapiens
ggaaagattcaaaca

SEQ ID NO: 1197524 - DNA, 15 bp, Homo sapiens
tggaaagattcaaac

SEQ ID NO: 1197525 - DNA, 15 bp, Homo sapiens
gtggaaagattcaaa

SEQ ID NO: 1197526 - DNA, 15 bp, Homo sapiens
agtggaaagattcaa

SEQ ID NO: 1197527 - DNA, 15 bp, Homo sapiens
gagtggaaagattca

SEQ ID NO: 1197528 - DNA, 15 bp, Homo sapiens
ggagtggaaagattc

SEQ ID NO: 1197529 - DNA, 15 bp, Homo sapiens
tggagtggaaagatt

SEQ ID NO: 1197530 - DNA, 15 bp, Homo sapiens
gtggagtggaaagat

SEQ ID NO: 1197531 - DNA, 15 bp, Homo sapiens
tgtggagtggaaaga

SEQ ID NO: 1197532 - DNA, 15 bp, Homo sapiens
atgtggagtggaaag

SEQ ID NO: 1197533 - DNA, 15 bp, Homo sapiens
gatgtggagtggaaa

SEQ ID NO: 1197534 - DNA, 15 bp, Homo sapiens
agatgtggagtggaa

SEQ ID NO: 1197535 - DNA, 15 bp, Homo sapiens
cagatgtggagtgga

SEQ ID NO: 1197536 - DNA, 15 bp, Homo sapiens
gcagatgtggagtgg

SEQ ID NO: 1197537 - DNA, 15 bp, Homo sapiens
tgcagatgtggagtg

SEQ ID NO: 1197538 - DNA, 15 bp, Homo sapiens
atgcagatgtggagt

SEQ ID NO: 1197539 - DNA, 15 bp, Homo sapiens
gatgcagatgtggag

SEQ ID NO: 1197540 - DNA, 15 bp, Homo sapiens
tgatgcagatgtgga

SEQ ID NO: 1197541 - DNA, 15 bp, Homo sapiens
ctgatgcagatgtgg

SEQ ID NO: 1197542 - DNA, 15 bp, Homo sapiens
actgatgcagatgtg

SEQ ID NO: 1197543 - DNA, 15 bp, Homo sapiens
gactgatgcagatgt

SEQ ID NO: 1197544 - DNA, 15 bp, Homo sapiens
ggactgatgcagatg

SEQ ID NO: 1197545 - DNA, 15 bp, Homo sapiens
cggactgatgcagat

SEQ ID NO: 1197546 - DNA, 15 bp, Homo sapiens
gcggactgatgcaga

SEQ ID NO: 1197547 - DNA, 15 bp, Homo sapiens
tgcggactgatgcag

SEQ ID NO: 1197548 - DNA, 15 bp, Homo sapiens
gtgcggactgatgca

SEQ ID NO: 1197549 - DNA, 15 bp, Homo sapiens
tgtgcggactgatgc

SEQ ID NO: 1197550 - DNA, 15 bp, Homo sapiens
atgtgcggactgatg

SEQ ID NO: 1197551 - DNA, 15 bp, Homo sapiens
catgtgcggactgat

SEQ ID NO: 1197552 - DNA, 15 bp, Homo sapiens
gcatgtgcggactga

SEQ ID NO: 1197553 - DNA, 15 bp, Homo sapiens
tgcatgtgcggactg

SEQ ID NO: 1197554 - DNA, 15 bp, Homo sapiens
ctgcatgtgcggact

SEQ ID NO: 1197555 - DNA, 15 bp, Homo sapiens
gctgcatgtgcggac

SEQ ID NO: 1197556 - DNA, 15 bp, Homo sapiens
agctgcatgtgcgga

SEQ ID NO: 1197557 - DNA, 15 bp, Homo sapiens
cagctgcatgtgcgg

SEQ ID NO: 1197558 - DNA, 15 bp, Homo sapiens
acagctgcatgtgcg

SEQ ID NO: 1197559 - DNA, 15 bp, Homo sapiens
gacagctgcatgtgc

SEQ ID NO: 1197560 - DNA, 15 bp, Homo sapiens
ggacagctgcatgtg

SEQ ID NO: 1197561 - DNA, 15 bp, Homo sapiens
gggacagctgcatgt

SEQ ID NO: 1197562 - DNA, 15 bp, Homo sapiens
tgggacagctgcatg

SEQ ID NO: 1197563 - DNA, 15 bp, Homo sapiens
atgggacagctgcat

SEQ ID NO: 1197564 - DNA, 15 bp, Homo sapiens
catgggacagctgca

SEQ ID NO: 1197565 - DNA, 15 bp, Homo sapiens
gcatgggacagctgc

SEQ ID NO: 1197566 - DNA, 15 bp, Homo sapiens
cgcatgggacagctg

SEQ ID NO: 1197567 - DNA, 15 bp, Homo sapiens
acgcatgggacagct

SEQ ID NO: 1197568 - DNA, 15 bp, Homo sapiens
cacgcatgggacagc

SEQ ID NO: 1197569 - DNA, 15 bp, Homo sapiens
tcacgcatgggacag

SEQ ID NO: 1197570 - DNA, 15 bp, Homo sapiens
atcacgcatgggaca

SEQ ID NO: 1197571 - DNA, 15 bp, Homo sapiens
aatcacgcatgggac

SEQ ID NO: 1197572 - DNA, 15 bp, Homo sapiens
gaatcacgcatggga

SEQ ID NO: 1197573 - DNA, 15 bp, Homo sapiens
agaatcacgcatggg

SEQ ID NO: 1197574 - DNA, 15 bp, Homo sapiens
gagaatcacgcatgg

SEQ ID NO: 1197575 - DNA, 15 bp, Homo sapiens
ggagaatcacgcatg

SEQ ID NO: 1197576 - DNA, 15 bp, Homo sapiens
tggagaatcacgcat

SEQ ID NO: 1197577 - DNA, 15 bp, Homo sapiens
gtggagaatcacgca

SEQ ID NO: 1197578 - DNA, 15 bp, Homo sapiens
cgtggagaatcacgc

SEQ ID NO: 1197579 - DNA, 15 bp, Homo sapiens
tcgtggagaatcacg

SEQ ID NO: 1197580 - DNA, 15 bp, Homo sapiens
ctcgtggagaatcac

SEQ ID NO: 1197581 - DNA, 15 bp, Homo sapiens
actcgtggagaatca

SEQ ID NO: 1197582 - DNA, 15 bp, Homo sapiens
tactcgtggagaatc

SEQ ID NO: 1197583 - DNA, 15 bp, Homo sapiens
atactcgtggagaat

SEQ ID NO: 1197584 - DNA, 15 bp, Homo sapiens
tatactcgtggagaa

SEQ ID NO: 1197585 - DNA, 15 bp, Homo sapiens
ttatactcgtggaga

SEQ ID NO: 1197586 - DNA, 15 bp, Homo sapiens
tttatactcgtggag

SEQ ID NO: 1197587 - DNA, 15 bp, Homo sapiens
gtttatactcgtgga

SEQ ID NO: 1197588 - DNA, 15 bp, Homo sapiens
tgtttatactcgtgg

SEQ ID NO: 1197589 - DNA, 15 bp, Homo sapiens
atgtttatactcgtg

SEQ ID NO: 1197590 - DNA, 15 bp, Homo sapiens
gatgtttatactcgt

SEQ ID NO: 1197591 - DNA, 15 bp, Homo sapiens
agatgtttatactcg

SEQ ID NO: 1197592 - DNA, 15 bp, Homo sapiens
cagatgtttatactc

SEQ ID NO: 1197593 - DNA, 15 bp, Homo sapiens
tcagatgtttatact

SEQ ID NO: 1197594 - DNA, 15 bp, Homo sapiens
gtcagatgtttatac

SEQ ID NO: 1197595 - DNA, 15 bp, Homo sapiens
ggtcagatgtttata

SEQ ID NO: 1197596 - DNA, 15 bp, Homo sapiens
tggtcagatgtttat

SEQ ID NO: 1197597 - DNA, 15 bp, Homo sapiens
gtggtcagatgttta

SEQ ID NO: 1197598 - DNA, 15 bp, Homo sapiens
agtggtcagatgttt

SEQ ID NO: 1197599 - DNA, 15 bp, Homo sapiens
aagtggtcagatgtt

SEQ ID NO: 1197600 - DNA, 15 bp, Homo sapiens
gaagtggtcagatgt

SEQ ID NO: 1197601 - DNA, 15 bp, Homo sapiens
ggaagtggtcagatg

SEQ ID NO: 1197602 - DNA, 15 bp, Homo sapiens
cggaagtggtcagat

SEQ ID NO: 1197603 - DNA, 15 bp, Homo sapiens
acggaagtggtcaga

SEQ ID NO: 1197604 - DNA, 15 bp, Homo sapiens
cacggaagtggtcag

SEQ ID NO: 1197605 - DNA, 15 bp, Homo sapiens
acacggaagtggtca

SEQ ID NO: 1197606 - DNA, 15 bp, Homo sapiens
cacacggaagtggtc

SEQ ID NO: 1197607 - DNA, 15 bp, Homo sapiens
acacacggaagtggt

SEQ ID NO: 1197608 - DNA, 15 bp, Homo sapiens
aacacacggaagtgg

SEQ ID NO: 1197609 - DNA, 15 bp, Homo sapiens
aaacacacggaagtg

SEQ ID NO: 1197610 - DNA, 15 bp, Homo sapiens
aaaacacacggaagt

SEQ ID NO: 1197611 - DNA, 15 bp, Homo sapiens
gaaaacacacggaag

SEQ ID NO: 1197612 - DNA, 15 bp, Homo sapiens
agaaaacacacggaa

SEQ ID NO: 1197613 - DNA, 15 bp, Homo sapiens
tagaaaacacacgga

SEQ ID NO: 1197614 - DNA, 15 bp, Homo sapiens
ctagaaaacacacgg

SEQ ID NO: 1197615 - DNA, 15 bp, Homo sapiens
cctagaaaacacacg

SEQ ID NO: 1197616 - DNA, 15 bp, Homo sapiens
tcctagaaaacacac

SEQ ID NO: 1197617 - DNA, 15 bp, Homo sapiens
ctcctagaaaacaca

SEQ ID NO: 1197618 - DNA, 15 bp, Homo sapiens
tctcctagaaaacac

SEQ ID NO: 1197619 - DNA, 15 bp, Homo sapiens
ctctcctagaaaaca

SEQ ID NO: 1197620 - DNA, 15 bp, Homo sapiens
actctcctagaaaac

SEQ ID NO: 1197621 - DNA, 15 bp, Homo sapiens
aactctcctagaaaa

SEQ ID NO: 1197622 - DNA, 15 bp, Homo sapiens
caactctcctagaaa

SEQ ID NO: 1197623 - DNA, 15 bp, Homo sapiens
acaactctcctagaa

SEQ ID NO: 1197624 - DNA, 15 bp, Homo sapiens
cacaactctcctaga

SEQ ID NO: 1197625 - DNA, 15 bp, Homo sapiens
gcacaactctcctag

SEQ ID NO: 1197626 - DNA, 15 bp, Homo sapiens
ggcacaactctccta

SEQ ID NO: 1197627 - DNA, 15 bp, Homo sapiens
aggcacaactctcct

SEQ ID NO: 1197628 - DNA, 15 bp, Homo sapiens
taggcacaactctcc

SEQ ID NO: 1197629 - DNA, 15 bp, Homo sapiens
ttaggcacaactctc

SEQ ID NO: 1197630 - DNA, 15 bp, Homo sapiens
cttaggcacaactct

SEQ ID NO: 1197631 - DNA, 15 bp, Homo sapiens
gcttaggcacaactc

SEQ ID NO: 1197632 - DNA, 15 bp, Homo sapiens
tgcttaggcacaact

SEQ ID NO: 1197633 - DNA, 15 bp, Homo sapiens
atgcttaggcacaac

SEQ ID NO: 1197634 - DNA, 15 bp, Homo sapiens
aatgcttaggcacaa

SEQ ID NO: 1197635 - DNA, 15 bp, Homo sapiens
gaatgcttaggcaca

SEQ ID NO: 1197636 - DNA, 15 bp, Homo sapiens
agaatgcttaggcac

SEQ ID NO: 1197637 - DNA, 15 bp, Homo sapiens
tagaatgcttaggca

SEQ ID NO: 1197638 - DNA, 15 bp, Homo sapiens
atagaatgcttaggc

SEQ ID NO: 1197639 - DNA, 15 bp, Homo sapiens
gatagaatgcttagg

SEQ ID NO: 1197640 - DNA, 15 bp, Homo sapiens
agatagaatgcttag

SEQ ID NO: 1197641 - DNA, 15 bp, Homo sapiens
aagatagaatgctta

SEQ ID NO: 1197642 - DNA, 15 bp, Homo sapiens
caagatagaatgctt

SEQ ID NO: 1197643 - DNA, 15 bp, Homo sapiens
acaagatagaatgct

SEQ ID NO: 1197644 - DNA, 15 bp, Homo sapiens
tacaagatagaatgc

SEQ ID NO: 1197645 - DNA, 15 bp, Homo sapiens
ttacaagatagaatg

SEQ ID NO: 1197646 - DNA, 15 bp, Homo sapiens
attacaagatagaat

SEQ ID NO: 1197647 - DNA, 15 bp, Homo sapiens
cattacaagatagaa

SEQ ID NO: 1197648 - DNA, 15 bp, Homo sapiens
gcattacaagataga

SEQ ID NO: 1197649 - DNA, 15 bp, Homo sapiens
tgcattacaagatag

SEQ ID NO: 1197650 - DNA, 15 bp, Homo sapiens
atgcattacaagata

SEQ ID NO: 1197651 - DNA, 15 bp, Homo sapiens
catgcattacaagat

SEQ ID NO: 1197652 - DNA, 15 bp, Homo sapiens
acatgcattacaaga

SEQ ID NO: 1197653 - DNA, 15 bp, Homo sapiens
aacatgcattacaag

SEQ ID NO: 1197654 - DNA, 15 bp, Homo sapiens
taacatgcattacaa

SEQ ID NO: 1197655 - DNA, 15 bp, Homo sapiens
ataacatgcattaca

SEQ ID NO: 1197656 - DNA, 15 bp, Homo sapiens
aataacatgcattac

SEQ ID NO: 1197657 - DNA, 15 bp, Homo sapiens
aaataacatgcatta

SEQ ID NO: 1197658 - DNA, 15 bp, Homo sapiens
aaaataacatgcatt

SEQ ID NO: 1197659 - DNA, 15 bp, Homo sapiens
taaaataacatgcat

SEQ ID NO: 1197660 - DNA, 15 bp, Homo sapiens
ataaaataacatgca

SEQ ID NO: 1197661 - DNA, 15 bp, Homo sapiens
aataaaataacatgc

SEQ ID NO: 1197662 - DNA, 15 bp, Homo sapiens
taataaaataacatg

SEQ ID NO: 1197663 - DNA, 15 bp, Homo sapiens
gtaataaaataacat

SEQ ID NO: 1197664 - DNA, 15 bp, Homo sapiens
tgtaataaaataaca

SEQ ID NO: 1197665 - DNA, 15 bp, Homo sapiens
ttgtaataaaataac

SEQ ID NO: 1197666 - DNA, 15 bp, Homo sapiens
tttgtaataaaataa

SEQ ID NO: 1197667 - DNA, 15 bp, Homo sapiens
gtttgtaataaaata

SEQ ID NO: 1197668 - DNA, 15 bp, Homo sapiens
agtttgtaataaaat

SEQ ID NO: 1197669 - DNA, 15 bp, Homo sapiens
aagtttgtaataaaa

SEQ ID NO: 1197670 - DNA, 15 bp, Homo sapiens
aaagtttgtaataaa

SEQ ID NO: 1197671 - DNA, 15 bp, Homo sapiens
aaaagtttgtaataa

SEQ ID NO: 1197672 - DNA, 15 bp, Homo sapiens
aaaaagtttgtaata

SEQ ID NO: 1197673 - DNA, 15 bp, Homo sapiens
aaaaaagtttgtaat

SEQ ID NO: 1197674 - DNA, 15 bp, Homo sapiens
gaaaaaagtttgtaa

SEQ ID NO: 1197675 - DNA, 15 bp, Homo sapiens
ggaaaaaagtttgta

SEQ ID NO: 1197676 - DNA, 15 bp, Homo sapiens
aggaaaaaagtttgt

SEQ ID NO: 1197677 - DNA, 15 bp, Homo sapiens
aaggaaaaaagtttg

SEQ ID NO: 1197678 - DNA, 15 bp, Homo sapiens
aaaggaaaaaagttt

SEQ ID NO: 1197679 - DNA, 15 bp, Homo sapiens
aaaaggaaaaaagtt

SEQ ID NO: 1197680 - DNA, 15 bp, Homo sapiens
taaaaggaaaaaagt

SEQ ID NO: 1197681 - DNA, 15 bp, Homo sapiens
ataaaaggaaaaaag

SEQ ID NO: 1197682 - DNA, 15 bp, Homo sapiens
aataaaaggaaaaaa

SEQ ID NO: 1197683 - DNA, 15 bp, Homo sapiens
aaataaaaggaaaaa

SEQ ID NO: 1197684 - DNA, 15 bp, Homo sapiens
gaaataaaaggaaaa

SEQ ID NO: 1197685 - DNA, 15 bp, Homo sapiens
agaaataaaaggaaa

SEQ ID NO: 1197686 - DNA, 15 bp, Homo sapiens
tagaaataaaaggaa

SEQ ID NO: 1197687 - DNA, 15 bp, Homo sapiens
gtagaaataaaagga

SEQ ID NO: 1197688 - DNA, 15 bp, Homo sapiens
agtagaaataaaagg

SEQ ID NO: 1197689 - DNA, 15 bp, Homo sapiens
aagtagaaataaaag

SEQ ID NO: 1197690 - DNA, 15 bp, Homo sapiens
aaagtagaaataaaa

SEQ ID NO: 1197691 - DNA, 15 bp, Homo sapiens
taaagtagaaataaa

SEQ ID NO: 1197692 - DNA, 15 bp, Homo sapiens
ataaagtagaaataa

SEQ ID NO: 1197693 - DNA, 15 bp, Homo sapiens
cataaagtagaaata

SEQ ID NO: 1197694 - DNA, 15 bp, Homo sapiens
acataaagtagaaat

SEQ ID NO: 1197695 - DNA, 15 bp, Homo sapiens
tacataaagtagaaa

SEQ ID NO: 1197696 - DNA, 15 bp, Homo sapiens
gtacataaagtagaa

SEQ ID NO: 1197697 - DNA, 15 bp, Homo sapiens
tgtacataaagtaga

SEQ ID NO: 1197698 - DNA, 15 bp, Homo sapiens
ctgtacataaagtag

SEQ ID NO: 1197699 - DNA, 15 bp, Homo sapiens
actgtacataaagta

SEQ ID NO: 1197700 - DNA, 15 bp, Homo sapiens
aactgtacataaagt

SEQ ID NO: 1197701 - DNA, 15 bp, Homo sapiens
gaactgtacataaag

SEQ ID NO: 1197702 - DNA, 15 bp, Homo sapiens
tgaactgtacataaa

SEQ ID NO: 1197703 - DNA, 15 bp, Homo sapiens
ctgaactgtacataa

SEQ ID NO: 1197704 - DNA, 15 bp, Homo sapiens
cctgaactgtacata

SEQ ID NO: 1197705 - DNA, 15 bp, Homo sapiens
gcctgaactgtacat

SEQ ID NO: 1197706 - DNA, 15 bp, Homo sapiens
tgcctgaactgtaca

SEQ ID NO: 1197707 - DNA, 15 bp, Homo sapiens
atgcctgaactgtac

SEQ ID NO: 1197708 - DNA, 15 bp, Homo sapiens
gatgcctgaactgta

SEQ ID NO: 1197709 - DNA, 15 bp, Homo sapiens
tgatgcctgaactgt

SEQ ID NO: 1197710 - DNA, 15 bp, Homo sapiens
atgatgcctgaactg

SEQ ID NO: 1197711 - DNA, 15 bp, Homo sapiens
aatgatgcctgaact

SEQ ID NO: 1197712 - DNA, 15 bp, Homo sapiens
aaatgatgcctgaac

SEQ ID NO: 1197713 - DNA, 15 bp, Homo sapiens
aaaatgatgcctgaa

SEQ ID NO: 1197714 - DNA, 15 bp, Homo sapiens
caaaatgatgcctga

SEQ ID NO: 1197715 - DNA, 15 bp, Homo sapiens
gcaaaatgatgcctg

SEQ ID NO: 1197716 - DNA, 15 bp, Homo sapiens
agcaaaatgatgcct

SEQ ID NO: 1197717 - DNA, 15 bp, Homo sapiens
aagcaaaatgatgcc

SEQ ID NO: 1197718 - DNA, 15 bp, Homo sapiens
aaagcaaaatgatgc

SEQ ID NO: 1197719 - DNA, 15 bp, Homo sapiens
aaaagcaaaatgatg

SEQ ID NO: 1197720 - DNA, 15 bp, Homo sapiens
aaaaagcaaaatgat

SEQ ID NO: 1197721 - DNA, 15 bp, Homo sapiens
caaaaagcaaaatga

SEQ ID NO: 1197722 - DNA, 15 bp, Homo sapiens
acaaaaagcaaaatg

SEQ ID NO: 1197723 - DNA, 15 bp, Homo sapiens
aacaaaaagcaaaat

SEQ ID NO: 1197724 - DNA, 15 bp, Homo sapiens
taacaaaaagcaaaa

SEQ ID NO: 1197725 - DNA, 15 bp, Homo sapiens
ttaacaaaaagcaaa

SEQ ID NO: 1197726 - DNA, 15 bp, Homo sapiens
tttaacaaaaagcaa

SEQ ID NO: 1197727 - DNA, 15 bp, Homo sapiens
ttttaacaaaaagca

SEQ ID NO: 1197728 - DNA, 15 bp, Homo sapiens
attttaacaaaaagc

SEQ ID NO: 1197729 - DNA, 15 bp, Homo sapiens
aattttaacaaaaag

SEQ ID NO: 1197730 - DNA, 15 bp, Homo sapiens
caattttaacaaaaa

SEQ ID NO: 1197731 - DNA, 15 bp, Homo sapiens
acaattttaacaaaa

SEQ ID NO: 1197732 - DNA, 15 bp, Homo sapiens
cacaattttaacaaa

SEQ ID NO: 1197733 - DNA, 15 bp, Homo sapiens
acacaattttaacaa

SEQ ID NO: 1197734 - DNA, 15 bp, Homo sapiens
tacacaattttaaca

SEQ ID NO: 1197735 - DNA, 15 bp, Homo sapiens
atacacaattttaac

SEQ ID NO: 1197736 - DNA, 15 bp, Homo sapiens
catacacaattttaa

SEQ ID NO: 1197737 - DNA, 15 bp, Homo sapiens
acatacacaatttta

SEQ ID NO: 1197738 - DNA, 15 bp, Homo sapiens
aacatacacaatttt

SEQ ID NO: 1197739 - DNA, 15 bp, Homo sapiens
caacatacacaattt

SEQ ID NO: 1197740 - DNA, 15 bp, Homo sapiens
tcaacatacacaatt

SEQ ID NO: 1197741 - DNA, 15 bp, Homo sapiens
atcaacatacacaat

SEQ ID NO: 1197742 - DNA, 15 bp, Homo sapiens
tatcaacatacacaa

SEQ ID NO: 1197743 - DNA, 15 bp, Homo sapiens
atatcaacatacaca

SEQ ID NO: 1197744 - DNA, 15 bp, Homo sapiens
aatatcaacatacac

SEQ ID NO: 1197745 - DNA, 15 bp, Homo sapiens
taatatcaacataca

SEQ ID NO: 1197746 - DNA, 15 bp, Homo sapiens
ataatatcaacatac

SEQ ID NO: 1197747 - DNA, 15 bp, Homo sapiens
gataatatcaacata

SEQ ID NO: 1197748 - DNA, 15 bp, Homo sapiens
agataatatcaacat

SEQ ID NO: 1197749 - DNA, 15 bp, Homo sapiens
cagataatatcaaca

SEQ ID NO: 1197750 - DNA, 15 bp, Homo sapiens
acagataatatcaac

SEQ ID NO: 1197751 - DNA, 15 bp, Homo sapiens
cacagataatatcaa

SEQ ID NO: 1197752 - DNA, 15 bp, Homo sapiens
tcacagataatatca

SEQ ID NO: 1197753 - DNA, 15 bp, Homo sapiens
ttcacagataatatc

SEQ ID NO: 1197754 - DNA, 15 bp, Homo sapiens
attcacagataatat

SEQ ID NO: 1197755 - DNA, 15 bp, Homo sapiens
aattcacagataata

SEQ ID NO: 1197756 - DNA, 15 bp, Homo sapiens
aaattcacagataat

SEQ ID NO: 1197757 - DNA, 15 bp, Homo sapiens
gaaattcacagataa

SEQ ID NO: 1197758 - DNA, 15 bp, Homo sapiens
tgaaattcacagata

SEQ ID NO: 1197759 - DNA, 15 bp, Homo sapiens
gtgaaattcacagat

SEQ ID NO: 1197760 - DNA, 15 bp, Homo sapiens
agtgaaattcacaga

SEQ ID NO: 1197761 - DNA, 15 bp, Homo sapiens
aagtgaaattcacag

SEQ ID NO: 1197762 - DNA, 15 bp, Homo sapiens
taagtgaaattcaca

SEQ ID NO: 1197763 - DNA, 15 bp, Homo sapiens
ctaagtgaaattcac

SEQ ID NO: 1197764 - DNA, 15 bp, Homo sapiens
cctaagtgaaattca

SEQ ID NO: 1197765 - DNA, 15 bp, Homo sapiens
ccctaagtgaaattc

SEQ ID NO: 1197766 - DNA, 15 bp, Homo sapiens
tccctaagtgaaatt

SEQ ID NO: 1197767 - DNA, 15 bp, Homo sapiens
gtccctaagtgaaat

SEQ ID NO: 1197768 - DNA, 15 bp, Homo sapiens
tgtccctaagtgaaa

SEQ ID NO: 1197769 - DNA, 15 bp, Homo sapiens
atgtccctaagtgaa

SEQ ID NO: 1197770 - DNA, 15 bp, Homo sapiens
aatgtccctaagtga

SEQ ID NO: 1197771 - DNA, 15 bp, Homo sapiens
taatgtccctaagtg

SEQ ID NO: 1197772 - DNA, 15 bp, Homo sapiens
ttaatgtccctaagt

SEQ ID NO: 1197773 - DNA, 15 bp, Homo sapiens
tttaatgtccctaag

SEQ ID NO: 1197774 - DNA, 15 bp, Homo sapiens
ctttaatgtccctaa

SEQ ID NO: 1197775 - DNA, 15 bp, Homo sapiens
cctttaatgtcccta

SEQ ID NO: 1197776 - DNA, 15 bp, Homo sapiens
ccctttaatgtccct

SEQ ID NO: 1197777 - DNA, 15 bp, Homo sapiens
accctttaatgtccc

SEQ ID NO: 1197778 - DNA, 15 bp, Homo sapiens
taccctttaatgtcc

SEQ ID NO: 1197779 - DNA, 15 bp, Homo sapiens
ctaccctttaatgtc

SEQ ID NO: 1197780 - DNA, 15 bp, Homo sapiens
tctaccctttaatgt

SEQ ID NO: 1197781 - DNA, 15 bp, Homo sapiens
atctaccctttaatg

SEQ ID NO: 1197782 - DNA, 15 bp, Homo sapiens
gatctaccctttaat

SEQ ID NO: 1197783 - DNA, 15 bp, Homo sapiens
tgatctaccctttaa

SEQ ID NO: 1197784 - DNA, 15 bp, Homo sapiens
atgatctacccttta

SEQ ID NO: 1197785 - DNA, 15 bp, Homo sapiens
tatgatctacccttt

SEQ ID NO: 1197786 - DNA, 15 bp, Homo sapiens
ttatgatctaccctt

SEQ ID NO: 1197787 - DNA, 15 bp, Homo sapiens
tttatgatctaccct

SEQ ID NO: 1197788 - DNA, 15 bp, Homo sapiens
ttttatgatctaccc

SEQ ID NO: 1197789 - DNA, 15 bp, Homo sapiens
attttatgatctacc

SEQ ID NO: 1197790 - DNA, 15 bp, Homo sapiens
tattttatgatctac

SEQ ID NO: 1197791 - DNA, 15 bp, Homo sapiens
atattttatgatcta

SEQ ID NO: 1197792 - DNA, 15 bp, Homo sapiens
tatattttatgatct

SEQ ID NO: 1197793 - DNA, 15 bp, Homo sapiens
atatattttatgatc

SEQ ID NO: 1197794 - DNA, 15 bp, Homo sapiens
catatattttatgat

SEQ ID NO: 1197795 - DNA, 15 bp, Homo sapiens
acatatattttatga

SEQ ID NO: 1197796 - DNA, 15 bp, Homo sapiens
aacatatattttatg

SEQ ID NO: 1197797 - DNA, 15 bp, Homo sapiens
taacatatattttat

SEQ ID NO: 1197798 - DNA, 15 bp, Homo sapiens
ataacatatatttta

SEQ ID NO: 1197799 - DNA, 15 bp, Homo sapiens
tataacatatatttt

SEQ ID NO: 1197800 - DNA, 15 bp, Homo sapiens
ttataacatatattt

SEQ ID NO: 1197801 - DNA, 15 bp, Homo sapiens
tttataacatatatt

SEQ ID NO: 1197802 - DNA, 15 bp, Homo sapiens
ttttataacatatat

SEQ ID NO: 1197803 - DNA, 15 bp, Homo sapiens
tttttataacatata

SEQ ID NO: 1197804 - DNA, 15 bp, Homo sapiens
ctttttataacatat

SEQ ID NO: 1197805 - DNA, 15 bp, Homo sapiens
cctttttataacata

SEQ ID NO: 1197806 - DNA, 15 bp, Homo sapiens
tcctttttataacat

SEQ ID NO: 1197807 - DNA, 15 bp, Homo sapiens
ctcctttttataaca

SEQ ID NO: 1197808 - DNA, 15 bp, Homo sapiens
tctcctttttataac

SEQ ID NO: 1197809 - DNA, 15 bp, Homo sapiens
ctctcctttttataa

SEQ ID NO: 1197810 - DNA, 15 bp, Homo sapiens
gctctcctttttata

SEQ ID NO: 1197811 - DNA, 15 bp, Homo sapiens
agctctcctttttat

SEQ ID NO: 1197812 - DNA, 15 bp, Homo sapiens
aagctctccttttta

SEQ ID NO: 1197813 - DNA, 15 bp, Homo sapiens
aaagctctccttttt

SEQ ID NO: 1197814 - DNA, 15 bp, Homo sapiens
caaagctctcctttt

SEQ ID NO: 1197815 - DNA, 15 bp, Homo sapiens
ccaaagctctccttt

SEQ ID NO: 1197816 - DNA, 15 bp, Homo sapiens
cccaaagctctcctt

SEQ ID NO: 1197817 - DNA, 15 bp, Homo sapiens
acccaaagctctcct

SEQ ID NO: 1197818 - DNA, 15 bp, Homo sapiens
gacccaaagctctcc

SEQ ID NO: 1197819 - DNA, 15 bp, Homo sapiens
agacccaaagctctc

SEQ ID NO: 1197820 - DNA, 15 bp, Homo sapiens
cagacccaaagctct

SEQ ID NO: 1197821 - DNA, 15 bp, Homo sapiens
tcagacccaaagctc

SEQ ID NO: 1197822 - DNA, 15 bp, Homo sapiens
atcagacccaaagct

SEQ ID NO: 1197823 - DNA, 15 bp, Homo sapiens
tatcagacccaaagc

SEQ ID NO: 1197824 - DNA, 15 bp, Homo sapiens
ctatcagacccaaag

SEQ ID NO: 1197825 - DNA, 15 bp, Homo sapiens
cctatcagacccaaa

SEQ ID NO: 1197826 - DNA, 15 bp, Homo sapiens
ccctatcagacccaa

SEQ ID NO: 1197827 - DNA, 15 bp, Homo sapiens
accctatcagaccca

SEQ ID NO: 1197828 - DNA, 15 bp, Homo sapiens
aaccctatcagaccc

SEQ ID NO: 1197829 - DNA, 15 bp, Homo sapiens
caaccctatcagacc

SEQ ID NO: 1197830 - DNA, 15 bp, Homo sapiens
tcaaccctatcagac

SEQ ID NO: 1197831 - DNA, 15 bp, Homo sapiens
ttcaaccctatcaga

SEQ ID NO: 1197832 - DNA, 15 bp, Homo sapiens
tttcaaccctatcag

SEQ ID NO: 1197833 - DNA, 15 bp, Homo sapiens
gtttcaaccctatca

SEQ ID NO: 1197834 - DNA, 15 bp, Homo sapiens
agtttcaaccctatc

SEQ ID NO: 1197835 - DNA, 15 bp, Homo sapiens
cagtttcaaccctat

SEQ ID NO: 1197836 - DNA, 15 bp, Homo sapiens
gcagtttcaacccta

SEQ ID NO: 1197837 - DNA, 15 bp, Homo sapiens
agcagtttcaaccct

SEQ ID NO: 1197838 - DNA, 15 bp, Homo sapiens
cagcagtttcaaccc

SEQ ID NO: 1197839 - DNA, 15 bp, Homo sapiens
ccagcagtttcaacc

SEQ ID NO: 1197840 - DNA, 15 bp, Homo sapiens
cccagcagtttcaac

SEQ ID NO: 1197841 - DNA, 15 bp, Homo sapiens
gcccagcagtttcaa

SEQ ID NO: 1197842 - DNA, 15 bp, Homo sapiens
agcccagcagtttca

SEQ ID NO: 1197843 - DNA, 15 bp, Homo sapiens
tagcccagcagtttc

SEQ ID NO: 1197844 - DNA, 15 bp, Homo sapiens
atagcccagcagttt

SEQ ID NO: 1197845 - DNA, 15 bp, Homo sapiens
tatagcccagcagtt

SEQ ID NO: 1197846 - DNA, 15 bp, Homo sapiens
gtatagcccagcagt

SEQ ID NO: 1197847 - DNA, 15 bp, Homo sapiens
ggtatagcccagcag

SEQ ID NO: 1197848 - DNA, 15 bp, Homo sapiens
gggtatagcccagca

SEQ ID NO: 1197849 - DNA, 15 bp, Homo sapiens
tgggtatagcccagc

SEQ ID NO: 1197850 - DNA, 15 bp, Homo sapiens
atgggtatagcccag

SEQ ID NO: 1197851 - DNA, 15 bp, Homo sapiens
gatgggtatagccca

SEQ ID NO: 1197852 - DNA, 15 bp, Homo sapiens
ggatgggtatagccc

SEQ ID NO: 1197853 - DNA, 15 bp, Homo sapiens
tggatgggtatagcc

SEQ ID NO: 1197854 - DNA, 15 bp, Homo sapiens
atggatgggtatagc

SEQ ID NO: 1197855 - DNA, 15 bp, Homo sapiens
aatggatgggtatag

SEQ ID NO: 1197856 - DNA, 15 bp, Homo sapiens
taatggatgggtata

SEQ ID NO: 1197857 - DNA, 15 bp, Homo sapiens
ataatggatgggtat

SEQ ID NO: 1197858 - DNA, 15 bp, Homo sapiens
cataatggatgggta

SEQ ID NO: 1197859 - DNA, 15 bp, Homo sapiens
tcataatggatgggt

SEQ ID NO: 1197860 - DNA, 15 bp, Homo sapiens
ctcataatggatggg

SEQ ID NO: 1197861 - DNA, 15 bp, Homo sapiens
gctcataatggatgg

SEQ ID NO: 1197862 - DNA, 15 bp, Homo sapiens
ggctcataatggatg

SEQ ID NO: 1197863 - DNA, 15 bp, Homo sapiens
aggctcataatggat

SEQ ID NO: 1197864 - DNA, 15 bp, Homo sapiens
gaggctcataatgga

SEQ ID NO: 1197865 - DNA, 15 bp, Homo sapiens
ggaggctcataatgg

SEQ ID NO: 1197866 - DNA, 15 bp, Homo sapiens
gggaggctcataatg

SEQ ID NO: 1197867 - DNA, 15 bp, Homo sapiens
ggggaggctcataat

SEQ ID NO: 1197868 - DNA, 15 bp, Homo sapiens
cggggaggctcataa

SEQ ID NO: 1197869 - DNA, 15 bp, Homo sapiens
tcggggaggctcata

SEQ ID NO: 1197870 - DNA, 15 bp, Homo sapiens
ctcggggaggctcat

SEQ ID NO: 1197871 - DNA, 15 bp, Homo sapiens
actcggggaggctca

SEQ ID NO: 1197872 - DNA, 15 bp, Homo sapiens
gactcggggaggctc

SEQ ID NO: 1197873 - DNA, 15 bp, Homo sapiens
tgactcggggaggct

SEQ ID NO: 1197874 - DNA, 15 bp, Homo sapiens
atgactcggggaggc

SEQ ID NO: 1197875 - DNA, 15 bp, Homo sapiens
tatgactcggggagg

SEQ ID NO: 1197876 - DNA, 15 bp, Homo sapiens
ttatgactcggggag

SEQ ID NO: 1197877 - DNA, 15 bp, Homo sapiens
attatgactcgggga

SEQ ID NO: 1197878 - DNA, 15 bp, Homo sapiens
cattatgactcgggg

SEQ ID NO: 1197879 - DNA, 15 bp, Homo sapiens
tcattatgactcggg

SEQ ID NO: 1197880 - DNA, 15 bp, Homo sapiens
gtcattatgactcgg

SEQ ID NO: 1197881 - DNA, 15 bp, Homo sapiens
tgtcattatgactcg

SEQ ID NO: 1197882 - DNA, 15 bp, Homo sapiens
ctgtcattatgactc

SEQ ID NO: 1197883 - DNA, 15 bp, Homo sapiens
tctgtcattatgact

SEQ ID NO: 1197884 - DNA, 15 bp, Homo sapiens
atctgtcattatgac

SEQ ID NO: 1197885 - DNA, 15 bp, Homo sapiens
catctgtcattatga

SEQ ID NO: 1197886 - DNA, 15 bp, Homo sapiens
ccatctgtcattatg

SEQ ID NO: 1197887 - DNA, 15 bp, Homo sapiens
tccatctgtcattat

SEQ ID NO: 1197888 - DNA, 15 bp, Homo sapiens
atccatctgtcatta

SEQ ID NO: 1197889 - DNA, 15 bp, Homo sapiens
catccatctgtcatt

SEQ ID NO: 1197890 - DNA, 15 bp, Homo sapiens
ccatccatctgtcat

SEQ ID NO: 1197891 - DNA, 15 bp, Homo sapiens
gccatccatctgtca

SEQ ID NO: 1197892 - DNA, 15 bp, Homo sapiens
tgccatccatctgtc

SEQ ID NO: 1197893 - DNA, 15 bp, Homo sapiens
ctgccatccatctgt

SEQ ID NO: 1197894 - DNA, 15 bp, Homo sapiens
tctgccatccatctg

SEQ ID NO: 1197895 - DNA, 15 bp, Homo sapiens
ctctgccatccatct

SEQ ID NO: 1197896 - DNA, 15 bp, Homo sapiens
gctctgccatccatc

SEQ ID NO: 1197897 - DNA, 15 bp, Homo sapiens
ggctctgccatccat

SEQ ID NO: 1197898 - DNA, 15 bp, Homo sapiens
aggctctgccatcca

SEQ ID NO: 1197899 - DNA, 15 bp, Homo sapiens
aaggctctgccatcc

SEQ ID NO: 1197900 - DNA, 15 bp, Homo sapiens
gaaggctctgccatc

SEQ ID NO: 1197901 - DNA, 15 bp, Homo sapiens
cgaaggctctgccat

SEQ ID NO: 1197902 - DNA, 15 bp, Homo sapiens
gcgaaggctctgcca

SEQ ID NO: 1197903 - DNA, 15 bp, Homo sapiens
ggcgaaggctctgcc

SEQ ID NO: 1197904 - DNA, 15 bp, Homo sapiens
gggcgaaggctctgc

SEQ ID NO: 1197905 - DNA, 15 bp, Homo sapiens
ggggcgaaggctctg

SEQ ID NO: 1197906 - DNA, 15 bp, Homo sapiens
gggggcgaaggctct

SEQ ID NO: 1197907 - DNA, 15 bp, Homo sapiens
agggggcgaaggctc

SEQ ID NO: 1197908 - DNA, 15 bp, Homo sapiens
aagggggcgaaggct

SEQ ID NO: 1197909 - DNA, 15 bp, Homo sapiens
gaagggggcgaaggc

SEQ ID NO: 1197910 - DNA, 15 bp, Homo sapiens
agaagggggcgaagg

SEQ ID NO: 1197911 - DNA, 15 bp, Homo sapiens
gagaagggggcgaag

SEQ ID NO: 1197912 - DNA, 15 bp, Homo sapiens
tgagaagggggcgaa

SEQ ID NO: 1197913 - DNA, 15 bp, Homo sapiens
ctgagaagggggcga

SEQ ID NO: 1197914 - DNA, 15 bp, Homo sapiens
actgagaagggggcg

SEQ ID NO: 1197915 - DNA, 15 bp, Homo sapiens
cactgagaagggggc

SEQ ID NO: 1197916 - DNA, 15 bp, Homo sapiens
tcactgagaaggggg

SEQ ID NO: 1197917 - DNA, 15 bp, Homo sapiens
ttcactgagaagggg

SEQ ID NO: 1197918 - DNA, 15 bp, Homo sapiens
cttcactgagaaggg

SEQ ID NO: 1197919 - DNA, 15 bp, Homo sapiens
gcttcactgagaagg

SEQ ID NO: 1197920 - DNA, 15 bp, Homo sapiens
tgcttcactgagaag

SEQ ID NO: 1197921 - DNA, 15 bp, Homo sapiens
atgcttcactgagaa

SEQ ID NO: 1197922 - DNA, 15 bp, Homo sapiens
gatgcttcactgaga

SEQ ID NO: 1197923 - DNA, 15 bp, Homo sapiens
ggatgcttcactgag

SEQ ID NO: 1197924 - DNA, 15 bp, Homo sapiens
aggatgcttcactga

SEQ ID NO: 1197925 - DNA, 15 bp, Homo sapiens
taggatgcttcactg

SEQ ID NO: 1197926 - DNA, 15 bp, Homo sapiens
ttaggatgcttcact

SEQ ID NO: 1197927 - DNA, 15 bp, Homo sapiens
gttaggatgcttcac

SEQ ID NO: 1197928 - DNA, 15 bp, Homo sapiens
agttaggatgcttca

SEQ ID NO: 1197929 - DNA, 15 bp, Homo sapiens
cagttaggatgcttc

SEQ ID NO: 1197930 - DNA, 15 bp, Homo sapiens
acagttaggatgctt

SEQ ID NO: 1197931 - DNA, 15 bp, Homo sapiens
tacagttaggatgct

SEQ ID NO: 1197932 - DNA, 15 bp, Homo sapiens
ttacagttaggatgc

SEQ ID NO: 1197933 - DNA, 15 bp, Homo sapiens
tttacagttaggatg

SEQ ID NO: 1197934 - DNA, 15 bp, Homo sapiens
ctttacagttaggat

SEQ ID NO: 1197935 - DNA, 15 bp, Homo sapiens
gctttacagttagga

SEQ ID NO: 1197936 - DNA, 15 bp, Homo sapiens
agctttacagttagg

SEQ ID NO: 1197937 - DNA, 15 bp, Homo sapiens
gagctttacagttag

SEQ ID NO: 1197938 - DNA, 15 bp, Homo sapiens
tgagctttacagtta

SEQ ID NO: 1197939 - DNA, 15 bp, Homo sapiens
ctgagctttacagtt

SEQ ID NO: 1197940 - DNA, 15 bp, Homo sapiens
gctgagctttacagt

SEQ ID NO: 1197941 - DNA, 15 bp, Homo sapiens
agctgagctttacag

SEQ ID NO: 1197942 - DNA, 15 bp, Homo sapiens
cagctgagctttaca

SEQ ID NO: 1197943 - DNA, 15 bp, Homo sapiens
tcagctgagctttac

SEQ ID NO: 1197944 - DNA, 15 bp, Homo sapiens
ttcagctgagcttta

SEQ ID NO: 1197945 - DNA, 15 bp, Homo sapiens
tttcagctgagcttt

SEQ ID NO: 1197946 - DNA, 15 bp, Homo sapiens
ctttcagctgagctt

SEQ ID NO: 1197947 - DNA, 15 bp, Homo sapiens
gctttcagctgagct

SEQ ID NO: 1197948 - DNA, 15 bp, Homo sapiens
agctttcagctgagc

SEQ ID NO: 1197949 - DNA, 15 bp, Homo sapiens
cagctttcagctgag

SEQ ID NO: 1197950 - DNA, 15 bp, Homo sapiens
ccagctttcagctga

SEQ ID NO: 1197951 - DNA, 15 bp, Homo sapiens
accagctttcagctg

SEQ ID NO: 1197952 - DNA, 15 bp, Homo sapiens
taccagctttcagct

SEQ ID NO: 1197953 - DNA, 15 bp, Homo sapiens
ataccagctttcagc

SEQ ID NO: 1197954 - DNA, 15 bp, Homo sapiens
gataccagctttcag

SEQ ID NO: 1197955 - DNA, 15 bp, Homo sapiens
agataccagctttca

SEQ ID NO: 1197956 - DNA, 15 bp, Homo sapiens
aagataccagctttc

SEQ ID NO: 1197957 - DNA, 15 bp, Homo sapiens
gaagataccagcttt

SEQ ID NO: 1197958 - DNA, 15 bp, Homo sapiens
ggaagataccagctt

SEQ ID NO: 1197959 - DNA, 15 bp, Homo sapiens
aggaagataccagct

SEQ ID NO: 1197960 - DNA, 15 bp, Homo sapiens
gaggaagataccagc

SEQ ID NO: 1197961 - DNA, 15 bp, Homo sapiens
tgaggaagataccag

SEQ ID NO: 1197962 - DNA, 15 bp, Homo sapiens
gtgaggaagatacca

SEQ ID NO: 1197963 - DNA, 15 bp, Homo sapiens
ggtgaggaagatacc

SEQ ID NO: 1197964 - DNA, 15 bp, Homo sapiens
aggtgaggaagatac

SEQ ID NO: 1197965 - DNA, 15 bp, Homo sapiens
caggtgaggaagata

SEQ ID NO: 1197966 - DNA, 15 bp, Homo sapiens
acaggtgaggaagat

SEQ ID NO: 1197967 - DNA, 15 bp, Homo sapiens
aacaggtgaggaaga

SEQ ID NO: 1197968 - DNA, 15 bp, Homo sapiens
aaacaggtgaggaag

SEQ ID NO: 1197969 - DNA, 15 bp, Homo sapiens
taaacaggtgaggaa

SEQ ID NO: 1197970 - DNA, 15 bp, Homo sapiens
ataaacaggtgagga

SEQ ID NO: 1197971 - DNA, 15 bp, Homo sapiens
cataaacaggtgagg

SEQ ID NO: 1197972 - DNA, 15 bp, Homo sapiens
ccataaacaggtgag

SEQ ID NO: 1197973 - DNA, 15 bp, Homo sapiens
tccataaacaggtga

SEQ ID NO: 1197974 - DNA, 15 bp, Homo sapiens
atccataaacaggtg

SEQ ID NO: 1197975 - DNA, 15 bp, Homo sapiens
tatccataaacaggt

SEQ ID NO: 1197976 - DNA, 15 bp, Homo sapiens
ctatccataaacagg

SEQ ID NO: 1197977 - DNA, 15 bp, Homo sapiens
tctatccataaacag

SEQ ID NO: 1197978 - DNA, 15 bp, Homo sapiens
ctctatccataaaca

SEQ ID NO: 1197979 - DNA, 15 bp, Homo sapiens
tctctatccataaac

SEQ ID NO: 1197980 - DNA, 15 bp, Homo sapiens
atctctatccataaa

SEQ ID NO: 1197981 - DNA, 15 bp, Homo sapiens
aatctctatccataa

SEQ ID NO: 1197982 - DNA, 15 bp, Homo sapiens
taatctctatccata

SEQ ID NO: 1197983 - DNA, 15 bp, Homo sapiens
ttaatctctatccat

SEQ ID NO: 1197984 - DNA, 15 bp, Homo sapiens
tttaatctctatcca

SEQ ID NO: 1197985 - DNA, 15 bp, Homo sapiens
gtttaatctctatcc

SEQ ID NO: 1197986 - DNA, 15 bp, Homo sapiens
ggtttaatctctatc

SEQ ID NO: 1197987 - DNA, 15 bp, Homo sapiens
aggtttaatctctat

SEQ ID NO: 1197988 - DNA, 15 bp, Homo sapiens
gaggtttaatctcta

SEQ ID NO: 1197989 - DNA, 15 bp, Homo sapiens
agaggtttaatctct

SEQ ID NO: 1197990 - DNA, 15 bp, Homo sapiens
cagaggtttaatctc

SEQ ID NO: 1197991 - DNA, 15 bp, Homo sapiens
ccagaggtttaatct

SEQ ID NO: 1197992 - DNA, 15 bp, Homo sapiens
cccagaggtttaatc

SEQ ID NO: 1197993 - DNA, 15 bp, Homo sapiens
tcccagaggtttaat

SEQ ID NO: 1197994 - DNA, 15 bp, Homo sapiens
atcccagaggtttaa

SEQ ID NO: 1197995 - DNA, 15 bp, Homo sapiens
gatcccagaggttta

SEQ ID NO: 1197996 - DNA, 15 bp, Homo sapiens
ggatcccagaggttt

SEQ ID NO: 1197997 - DNA, 15 bp, Homo sapiens
gggatcccagaggtt

SEQ ID NO: 1197998 - DNA, 15 bp, Homo sapiens
tgggatcccagaggt

SEQ ID NO: 1197999 - DNA, 15 bp, Homo sapiens
atgggatcccagagg

SEQ ID NO: 1198000 - DNA, 15 bp, Homo sapiens
tatgggatcccagag

SEQ ID NO: 1198001 - DNA, 15 bp, Homo sapiens
ttatgggatcccaga

SEQ ID NO: 1198002 - DNA, 15 bp, Homo sapiens
tttatgggatcccag

SEQ ID NO: 1198003 - DNA, 15 bp, Homo sapiens
ctttatgggatccca

SEQ ID NO: 1198004 - DNA, 15 bp, Homo sapiens
cctttatgggatccc

SEQ ID NO: 1198005 - DNA, 15 bp, Homo sapiens
tcctttatgggatcc

SEQ ID NO: 1198006 - DNA, 15 bp, Homo sapiens
atcctttatgggatc

SEQ ID NO: 1198007 - DNA, 15 bp, Homo sapiens
tatcctttatgggat

SEQ ID NO: 1198008 - DNA, 15 bp, Homo sapiens
ttatcctttatggga

SEQ ID NO: 1198009 - DNA, 15 bp, Homo sapiens
attatcctttatggg

SEQ ID NO: 1198010 - DNA, 15 bp, Homo sapiens
cattatcctttatgg

SEQ ID NO: 1198011 - DNA, 15 bp, Homo sapiens
ccattatcctttatg

SEQ ID NO: 1198012 - DNA, 15 bp, Homo sapiens
accattatcctttat

SEQ ID NO: 1198013 - DNA, 15 bp, Homo sapiens
aaccattatccttta

SEQ ID NO: 1198014 - DNA, 15 bp, Homo sapiens
taaccattatccttt

SEQ ID NO: 1198015 - DNA, 15 bp, Homo sapiens
ataaccattatcctt

SEQ ID NO: 1198016 - DNA, 15 bp, Homo sapiens
tataaccattatcct

SEQ ID NO: 1198017 - DNA, 15 bp, Homo sapiens
ctataaccattatcc

SEQ ID NO: 1198018 - DNA, 15 bp, Homo sapiens
actataaccattatc

SEQ ID NO: 1198019 - DNA, 15 bp, Homo sapiens
aactataaccattat

SEQ ID NO: 1198020 - DNA, 15 bp, Homo sapiens
taactataaccatta

SEQ ID NO: 1198021 - DNA, 15 bp, Homo sapiens
ttaactataaccatt

SEQ ID NO: 1198022 - DNA, 15 bp, Homo sapiens
attaactataaccat

SEQ ID NO: 1198023 - DNA, 15 bp, Homo sapiens
tattaactataacca

SEQ ID NO: 1198024 - DNA, 15 bp, Homo sapiens
gtattaactataacc

SEQ ID NO: 1198025 - DNA, 15 bp, Homo sapiens
tgtattaactataac

SEQ ID NO: 1198026 - DNA, 15 bp, Homo sapiens
ttgtattaactataa

SEQ ID NO: 1198027 - DNA, 15 bp, Homo sapiens
gttgtattaactata

SEQ ID NO: 1198028 - DNA, 15 bp, Homo sapiens
tgttgtattaactat

SEQ ID NO: 1198029 - DNA, 15 bp, Homo sapiens
atgttgtattaacta

SEQ ID NO: 1198030 - DNA, 15 bp, Homo sapiens
gatgttgtattaact

SEQ ID NO: 1198031 - DNA, 15 bp, Homo sapiens
agatgttgtattaac

SEQ ID NO: 1198032 - DNA, 15 bp, Homo sapiens
cagatgttgtattaa

SEQ ID NO: 1198033 - DNA, 15 bp, Homo sapiens
ccagatgttgtatta

SEQ ID NO: 1198034 - DNA, 15 bp, Homo sapiens
accagatgttgtatt

SEQ ID NO: 1198035 - DNA, 15 bp, Homo sapiens
aaccagatgttgtat

SEQ ID NO: 1198036 - DNA, 15 bp, Homo sapiens
aaaccagatgttgta

SEQ ID NO: 1198037 - DNA, 15 bp, Homo sapiens
gaaaccagatgttgt

SEQ ID NO: 1198038 - DNA, 15 bp, Homo sapiens
agaaaccagatgttg

SEQ ID NO: 1198039 - DNA, 15 bp, Homo sapiens
tagaaaccagatgtt

SEQ ID NO: 1198040 - DNA, 15 bp, Homo sapiens
ttagaaaccagatgt

SEQ ID NO: 1198041 - DNA, 15 bp, Homo sapiens
tttagaaaccagatg

SEQ ID NO: 1198042 - DNA, 15 bp, Homo sapiens
atttagaaaccagat

SEQ ID NO: 1198043 - DNA, 15 bp, Homo sapiens
catttagaaaccaga

SEQ ID NO: 1198044 - DNA, 15 bp, Homo sapiens
acatttagaaaccag

SEQ ID NO: 1198045 - DNA, 15 bp, Homo sapiens
aacatttagaaacca

SEQ ID NO: 1198046 - DNA, 15 bp, Homo sapiens
gaacatttagaaacc

SEQ ID NO: 1198047 - DNA, 15 bp, Homo sapiens
agaacatttagaaac

SEQ ID NO: 1198048 - DNA, 15 bp, Homo sapiens
aagaacatttagaaa

SEQ ID NO: 1198049 - DNA, 15 bp, Homo sapiens
aaagaacatttagaa

SEQ ID NO: 1198050 - DNA, 15 bp, Homo sapiens
aaaagaacatttaga

SEQ ID NO: 1198051 - DNA, 15 bp, Homo sapiens
gaaaagaacatttag

SEQ ID NO: 1198052 - DNA, 15 bp, Homo sapiens
agaaaagaacattta

SEQ ID NO: 1198053 - DNA, 15 bp, Homo sapiens
aagaaaagaacattt

SEQ ID NO: 1198054 - DNA, 15 bp, Homo sapiens
gaagaaaagaacatt

SEQ ID NO: 1198055 - DNA, 15 bp, Homo sapiens
cgaagaaaagaacat

SEQ ID NO: 1198056 - DNA, 15 bp, Homo sapiens
gcgaagaaaagaaca

SEQ ID NO: 1198057 - DNA, 15 bp, Homo sapiens
ggcgaagaaaagaac

SEQ ID NO: 1198058 - DNA, 15 bp, Homo sapiens
gggcgaagaaaagaa

SEQ ID NO: 1198059 - DNA, 15 bp, Homo sapiens
agggcgaagaaaaga

SEQ ID NO: 1198060 - DNA, 15 bp, Homo sapiens
cagggcgaagaaaag

SEQ ID NO: 1198061 - DNA, 15 bp, Homo sapiens
acagggcgaagaaaa

SEQ ID NO: 1198062 - DNA, 15 bp, Homo sapiens
cacagggcgaagaaa

SEQ ID NO: 1198063 - DNA, 15 bp, Homo sapiens
tcacagggcgaagaa

SEQ ID NO: 1198064 - DNA, 15 bp, Homo sapiens
atcacagggcgaaga

SEQ ID NO: 1198065 - DNA, 15 bp, Homo sapiens
catcacagggcgaag

SEQ ID NO: 1198066 - DNA, 15 bp, Homo sapiens
ccatcacagggcgaa

SEQ ID NO: 1198067 - DNA, 15 bp, Homo sapiens
tccatcacagggcga

SEQ ID NO: 1198068 - DNA, 15 bp, Homo sapiens
ttccatcacagggcg

SEQ ID NO: 1198069 - DNA, 15 bp, Homo sapiens
attccatcacagggc

SEQ ID NO: 1198070 - DNA, 15 bp, Homo sapiens
cattccatcacaggg

SEQ ID NO: 1198071 - DNA, 15 bp, Homo sapiens
tcattccatcacagg

SEQ ID NO: 1198072 - DNA, 15 bp, Homo sapiens
ctcattccatcacag

SEQ ID NO: 1198073 - DNA, 15 bp, Homo sapiens
tctcattccatcaca

SEQ ID NO: 1198074 - DNA, 15 bp, Homo sapiens
atctcattccatcac

SEQ ID NO: 1198075 - DNA, 15 bp, Homo sapiens
catctcattccatca

SEQ ID NO: 1198076 - DNA, 15 bp, Homo sapiens
ccatctcattccatc

SEQ ID NO: 1198077 - DNA, 15 bp, Homo sapiens
gccatctcattccat

SEQ ID NO: 1198078 - DNA, 15 bp, Homo sapiens
agccatctcattcca

SEQ ID NO: 1198079 - DNA, 15 bp, Homo sapiens
aagccatctcattcc

SEQ ID NO: 1198080 - DNA, 15 bp, Homo sapiens
caagccatctcattc

SEQ ID NO: 1198081 - DNA, 15 bp, Homo sapiens
acaagccatctcatt

SEQ ID NO: 1198082 - DNA, 15 bp, Homo sapiens
tacaagccatctcat

SEQ ID NO: 1198083 - DNA, 15 bp, Homo sapiens
ttacaagccatctca

SEQ ID NO: 1198084 - DNA, 15 bp, Homo sapiens
tttacaagccatctc

SEQ ID NO: 1198085 - DNA, 15 bp, Homo sapiens
ttttacaagccatct

SEQ ID NO: 1198086 - DNA, 15 bp, Homo sapiens
cttttacaagccatc

SEQ ID NO: 1198087 - DNA, 15 bp, Homo sapiens
tcttttacaagccat

SEQ ID NO: 1198088 - DNA, 15 bp, Homo sapiens
ttcttttacaagcca

SEQ ID NO: 1198089 - DNA, 15 bp, Homo sapiens
attcttttacaagcc

SEQ ID NO: 1198090 - DNA, 15 bp, Homo sapiens
tattcttttacaagc

SEQ ID NO: 1198091 - DNA, 15 bp, Homo sapiens
ttattcttttacaag

SEQ ID NO: 1198092 - DNA, 15 bp, Homo sapiens
tttattcttttacaa

SEQ ID NO: 1198093 - DNA, 15 bp, Homo sapiens
ttttattcttttaca

SEQ ID NO: 1198094 - DNA, 15 bp, Homo sapiens
gttttattcttttac

SEQ ID NO: 1198095 - DNA, 15 bp, Homo sapiens
tgttttattctttta

SEQ ID NO: 1198096 - DNA, 15 bp, Homo sapiens
ttgttttattctttt

SEQ ID NO: 1198097 - DNA, 15 bp, Homo sapiens
attgttttattcttt

SEQ ID NO: 1198098 - DNA, 15 bp, Homo sapiens
gattgttttattctt

SEQ ID NO: 1198099 - DNA, 15 bp, Homo sapiens
tgattgttttattct

SEQ ID NO: 1198100 - DNA, 15 bp, Homo sapiens
gtgattgttttattc

SEQ ID NO: 1198101 - DNA, 15 bp, Homo sapiens
agtgattgttttatt

SEQ ID NO: 1198102 - DNA, 15 bp, Homo sapiens
tagtgattgttttat

SEQ ID NO: 1198103 - DNA, 15 bp, Homo sapiens
ttagtgattgtttta

SEQ ID NO: 1198104 - DNA, 15 bp, Homo sapiens
tttagtgattgtttt

SEQ ID NO: 1198105 - DNA, 15 bp, Homo sapiens
ttttagtgattgttt

SEQ ID NO: 1198106 - DNA, 15 bp, Homo sapiens
tttttagtgattgtt

SEQ ID NO: 1198107 - DNA, 15 bp, Homo sapiens
gtttttagtgattgt

SEQ ID NO: 1198108 - DNA, 15 bp, Homo sapiens
tgtttttagtgattg

SEQ ID NO: 1198109 - DNA, 15 bp, Homo sapiens
ctgtttttagtgatt

SEQ ID NO: 1198110 - DNA, 15 bp, Homo sapiens
cctgtttttagtgat

SEQ ID NO: 1198111 - DNA, 15 bp, Homo sapiens
tcctgtttttagtga

SEQ ID NO: 1198112 - DNA, 15 bp, Homo sapiens
ctcctgtttttagtg

SEQ ID NO: 1198113 - DNA, 15 bp, Homo sapiens
gctcctgtttttagt

SEQ ID NO: 1198114 - DNA, 15 bp, Homo sapiens
tgctcctgtttttag

SEQ ID NO: 1198115 - DNA, 15 bp, Homo sapiens
ctgctcctgttttta

SEQ ID NO: 1198116 - DNA, 15 bp, Homo sapiens
tctgctcctgttttt

SEQ ID NO: 1198117 - DNA, 15 bp, Homo sapiens
atctgctcctgtttt

SEQ ID NO: 1198118 - DNA, 15 bp, Homo sapiens
catctgctcctgttt

SEQ ID NO: 1198119 - DNA, 15 bp, Homo sapiens
acatctgctcctgtt

SEQ ID NO: 1198120 - DNA, 15 bp, Homo sapiens
tacatctgctcctgt

SEQ ID NO: 1198121 - DNA, 15 bp, Homo sapiens
ttacatctgctcctg

SEQ ID NO: 1198122 - DNA, 15 bp, Homo sapiens
tttacatctgctcct

SEQ ID NO: 1198123 - DNA, 15 bp, Homo sapiens
atttacatctgctcc

SEQ ID NO: 1198124 - DNA, 15 bp, Homo sapiens
aatttacatctgctc

SEQ ID NO: 1198125 - DNA, 15 bp, Homo sapiens
caatttacatctgct

SEQ ID NO: 1198126 - DNA, 15 bp, Homo sapiens
ccaatttacatctgc

SEQ ID NO: 1198127 - DNA, 15 bp, Homo sapiens
tccaatttacatctg

SEQ ID NO: 1198128 - DNA, 15 bp, Homo sapiens
atccaatttacatct

SEQ ID NO: 1198129 - DNA, 15 bp, Homo sapiens
aatccaatttacatc

SEQ ID NO: 1198130 - DNA, 15 bp, Homo sapiens
aaatccaatttacat

SEQ ID NO: 1198131 - DNA, 15 bp, Homo sapiens
caaatccaatttaca

SEQ ID NO: 1198132 - DNA, 15 bp, Homo sapiens
tcaaatccaatttac

SEQ ID NO: 1198133 - DNA, 15 bp, Homo sapiens
ctcaaatccaattta

SEQ ID NO: 1198134 - DNA, 15 bp, Homo sapiens
tctcaaatccaattt

SEQ ID NO: 1198135 - DNA, 15 bp, Homo sapiens
gtctcaaatccaatt

SEQ ID NO: 1198136 - DNA, 15 bp, Homo sapiens
tgtctcaaatccaat

SEQ ID NO: 1198137 - DNA, 15 bp, Homo sapiens
ttgtctcaaatccaa

SEQ ID NO: 1198138 - DNA, 15 bp, Homo sapiens
attgtctcaaatcca

SEQ ID NO: 1198139 - DNA, 15 bp, Homo sapiens
aattgtctcaaatcc

SEQ ID NO: 1198140 - DNA, 15 bp, Homo sapiens
caattgtctcaaatc

SEQ ID NO: 1198141 - DNA, 15 bp, Homo sapiens
gcaattgtctcaaat

SEQ ID NO: 1198142 - DNA, 15 bp, Homo sapiens
tgcaattgtctcaaa

SEQ ID NO: 1198143 - DNA, 15 bp, Homo sapiens
ctgcaattgtctcaa

SEQ ID NO: 1198144 - DNA, 15 bp, Homo sapiens
gctgcaattgtctca

SEQ ID NO: 1198145 - DNA, 15 bp, Homo sapiens
tgctgcaattgtctc

SEQ ID NO: 1198146 - DNA, 15 bp, Homo sapiens
ctgctgcaattgtct

SEQ ID NO: 1198147 - DNA, 15 bp, Homo sapiens
tactgctgcaattgt

SEQ ID NO: 1198148 - DNA, 15 bp, Homo sapiens
gtactgctgcaattg

SEQ ID NO: 1198149 - DNA, 15 bp, Homo sapiens
tgtactgctgcaatt

SEQ ID NO: 1198150 - DNA, 15 bp, Homo sapiens
atgtactgctgcaat

SEQ ID NO: 1198151 - DNA, 15 bp, Homo sapiens
gatgtactgctgcaa

SEQ ID NO: 1198152 - DNA, 15 bp, Homo sapiens
tgatgtactgctgca

SEQ ID NO: 1198153 - DNA, 15 bp, Homo sapiens
ttgatgtactgctgc

SEQ ID NO: 1198154 - DNA, 15 bp, Homo sapiens
tttgatgtactgctg

SEQ ID NO: 1198155 - DNA, 15 bp, Homo sapiens
ttttgatgtactgct

SEQ ID NO: 1198156 - DNA, 15 bp, Homo sapiens
cttttgatgtactgc

SEQ ID NO: 1198157 - DNA, 15 bp, Homo sapiens
acttttgatgtactg

SEQ ID NO: 1198158 - DNA, 15 bp, Homo sapiens
tacttttgatgtact

SEQ ID NO: 1198159 - DNA, 15 bp, Homo sapiens
ttacttttgatgtac

SEQ ID NO: 1198160 - DNA, 15 bp, Homo sapiens
tttacttttgatgta

SEQ ID NO: 1198161 - DNA, 15 bp, Homo sapiens
ttttacttttgatgt

SEQ ID NO: 1198162 - DNA, 15 bp, Homo sapiens
attttacttttgatg

SEQ ID NO: 1198163 - DNA, 15 bp, Homo sapiens
aattttacttttgat

SEQ ID NO: 1198164 - DNA, 15 bp, Homo sapiens
aaattttacttttga

SEQ ID NO: 1198165 - DNA, 15 bp, Homo sapiens
caaattttacttttg

SEQ ID NO: 1198166 - DNA, 15 bp, Homo sapiens
tcaaattttactttt

SEQ ID NO: 1198167 - DNA, 15 bp, Homo sapiens
gtcaaattttacttt

SEQ ID NO: 1198168 - DNA, 15 bp, Homo sapiens
agtcaaattttactt

SEQ ID NO: 1198169 - DNA, 15 bp, Homo sapiens
aagtcaaattttact

SEQ ID NO: 1198170 - DNA, 15 bp, Homo sapiens
aaagtcaaattttac

SEQ ID NO: 1198171 - DNA, 15 bp, Homo sapiens
caaagtcaaatttta

SEQ ID NO: 1198172 - DNA, 15 bp, Homo sapiens
tcaaagtcaaatttt

SEQ ID NO: 1198173 - DNA, 15 bp, Homo sapiens
ttcaaagtcaaattt

SEQ ID NO: 1198174 - DNA, 15 bp, Homo sapiens
gttcaaagtcaaatt

SEQ ID NO: 1198175 - DNA, 15 bp, Homo sapiens
agttcaaagtcaaat

SEQ ID NO: 1198176 - DNA, 15 bp, Homo sapiens
tagttcaaagtcaaa

SEQ ID NO: 1198177 - DNA, 15 bp, Homo sapiens
gtagttcaaagtcaa

SEQ ID NO: 1198178 - DNA, 15 bp, Homo sapiens
tgtagttcaaagtca

SEQ ID NO: 1198179 - DNA, 15 bp, Homo sapiens
ttgtagttcaaagtc

SEQ ID NO: 1198180 - DNA, 15 bp, Homo sapiens
cttgtagttcaaagt

SEQ ID NO: 1198181 - DNA, 15 bp, Homo sapiens
acttgtagttcaaag

SEQ ID NO: 1198182 - DNA, 15 bp, Homo sapiens
tacttgtagttcaaa

SEQ ID NO: 1198183 - DNA, 15 bp, Homo sapiens
ttacttgtagttcaa

SEQ ID NO: 1198184 - DNA, 15 bp, Homo sapiens
tttacttgtagttca

SEQ ID NO: 1198185 - DNA, 15 bp, Homo sapiens
ctttacttgtagttc

SEQ ID NO: 1198186 - DNA, 15 bp, Homo sapiens
actttacttgtagtt

SEQ ID NO: 1198187 - DNA, 15 bp, Homo sapiens
tactttacttgtagt

SEQ ID NO: 1198188 - DNA, 15 bp, Homo sapiens
ctactttacttgtag

SEQ ID NO: 1198189 - DNA, 15 bp, Homo sapiens
cctactttacttgta

SEQ ID NO: 1198190 - DNA, 15 bp, Homo sapiens
tcctactttacttgt

SEQ ID NO: 1198191 - DNA, 15 bp, Homo sapiens
ttcctactttacttg

SEQ ID NO: 1198192 - DNA, 15 bp, Homo sapiens
tttcctactttactt

SEQ ID NO: 1198193 - DNA, 15 bp, Homo sapiens
atttcctactttact

SEQ ID NO: 1198194 - DNA, 15 bp, Homo sapiens
catttcctactttac

SEQ ID NO: 1198195 - DNA, 15 bp, Homo sapiens
acatttcctacttta

SEQ ID NO: 1198196 - DNA, 15 bp, Homo sapiens
cacatttcctacttt

SEQ ID NO: 1198197 - DNA, 15 bp, Homo sapiens
ccacatttcctactt

SEQ ID NO: 1198198 - DNA, 15 bp, Homo sapiens
gccacatttcctact

SEQ ID NO: 1198199 - DNA, 15 bp, Homo sapiens
ggccacatttcctac

SEQ ID NO: 1198200 - DNA, 15 bp, Homo sapiens
aggccacatttccta

SEQ ID NO: 1198201 - DNA, 15 bp, Homo sapiens
caggccacatttcct

SEQ ID NO: 1198202 - DNA, 15 bp, Homo sapiens
ccaggccacatttcc

SEQ ID NO: 1198203 - DNA, 15 bp, Homo sapiens
accaggccacatttc

SEQ ID NO: 1198204 - DNA, 15 bp, Homo sapiens
taccaggccacattt

SEQ ID NO: 1198205 - DNA, 15 bp, Homo sapiens
ctaccaggccacatt

SEQ ID NO: 1198206 - DNA, 15 bp, Homo sapiens
cctaccaggccacat

SEQ ID NO: 1198207 - DNA, 15 bp, Homo sapiens
ccctaccaggccaca

SEQ ID NO: 1198208 - DNA, 15 bp, Homo sapiens
tccctaccaggccac

SEQ ID NO: 1198209 - DNA, 15 bp, Homo sapiens
ctccctaccaggcca

SEQ ID NO: 1198210 - DNA, 15 bp, Homo sapiens
cctccctaccaggcc

SEQ ID NO: 1198211 - DNA, 15 bp, Homo sapiens
acctccctaccaggc

SEQ ID NO: 1198212 - DNA, 15 bp, Homo sapiens
aacctccctaccagg

SEQ ID NO: 1198213 - DNA, 15 bp, Homo sapiens
aaacctccctaccag

SEQ ID NO: 1198214 - DNA, 15 bp, Homo sapiens
aaaacctccctacca

SEQ ID NO: 1198215 - DNA, 15 bp, Homo sapiens
gaaaacctccctacc

SEQ ID NO: 1198216 - DNA, 15 bp, Homo sapiens
ggaaaacctccctac

SEQ ID NO: 1198217 - DNA, 15 bp, Homo sapiens
aggaaaacctcccta

SEQ ID NO: 1198218 - DNA, 15 bp, Homo sapiens
aaggaaaacctccct

SEQ ID NO: 1198219 - DNA, 15 bp, Homo sapiens
aaaggaaaacctccc

SEQ ID NO: 1198220 - DNA, 15 bp, Homo sapiens
aaaaggaaaacctcc

SEQ ID NO: 1198221 - DNA, 15 bp, Homo sapiens
taaaaggaaaacctc

SEQ ID NO: 1198222 - DNA, 15 bp, Homo sapiens
ttaaaaggaaaacct

SEQ ID NO: 1198223 - DNA, 15 bp, Homo sapiens
cttaaaaggaaaacc

SEQ ID NO: 1198224 - DNA, 15 bp, Homo sapiens
tcttaaaaggaaaac

SEQ ID NO: 1198225 - DNA, 15 bp, Homo sapiens
ctcttaaaaggaaaa

SEQ ID NO: 1198226 - DNA, 15 bp, Homo sapiens
cctcttaaaaggaaa

SEQ ID NO: 1198227 - DNA, 15 bp, Homo sapiens
tcctcttaaaaggaa

SEQ ID NO: 1198228 - DNA, 15 bp, Homo sapiens
ctcctcttaaaagga

SEQ ID NO: 1198229 - DNA, 15 bp, Homo sapiens
tctcctcttaaaagg

SEQ ID NO: 1198230 - DNA, 15 bp, Homo sapiens
atctcctcttaaaag

SEQ ID NO: 1198231 - DNA, 15 bp, Homo sapiens
aatctcctcttaaaa

SEQ ID NO: 1198232 - DNA, 15 bp, Homo sapiens
aaatctcctcttaaa

SEQ ID NO: 1198233 - DNA, 15 bp, Homo sapiens
taaatctcctcttaa

SEQ ID NO: 1198234 - DNA, 15 bp, Homo sapiens
ttaaatctcctctta

SEQ ID NO: 1198235 - DNA, 15 bp, Homo sapiens
tttaaatctcctctt

SEQ ID NO: 1198236 - DNA, 15 bp, Homo sapiens
ttttaaatctcctct

SEQ ID NO: 1198237 - DNA, 15 bp, Homo sapiens
tttttaaatctcctc

SEQ ID NO: 1198238 - DNA, 15 bp, Homo sapiens
atttttaaatctcct

SEQ ID NO: 1198239 - DNA, 15 bp, Homo sapiens
aatttttaaatctcc

SEQ ID NO: 1198240 - DNA, 15 bp, Homo sapiens
caatttttaaatctc

SEQ ID NO: 1198241 - DNA, 15 bp, Homo sapiens
tcaatttttaaatct

SEQ ID NO: 1198242 - DNA, 15 bp, Homo sapiens
ctcaatttttaaatc

SEQ ID NO: 1198243 - DNA, 15 bp, Homo sapiens
actcaatttttaaat

SEQ ID NO: 1198244 - DNA, 15 bp, Homo sapiens
tactcaatttttaaa

SEQ ID NO: 1198245 - DNA, 15 bp, Homo sapiens
ttactcaatttttaa

SEQ ID NO: 1198246 - DNA, 15 bp, Homo sapiens
gttactcaattttta

SEQ ID NO: 1198247 - DNA, 15 bp, Homo sapiens
agttactcaattttt

SEQ ID NO: 1198248 - DNA, 15 bp, Homo sapiens
cagttactcaatttt

SEQ ID NO: 1198249 - DNA, 15 bp, Homo sapiens
acagttactcaattt

SEQ ID NO: 1198250 - DNA, 15 bp, Homo sapiens
cacagttactcaatt

SEQ ID NO: 1198251 - DNA, 15 bp, Homo sapiens
gcacagttactcaat

SEQ ID NO: 1198252 - DNA, 15 bp, Homo sapiens
agcacagttactcaa

SEQ ID NO: 1198253 - DNA, 15 bp, Homo sapiens
tagcacagttactca

SEQ ID NO: 1198254 - DNA, 15 bp, Homo sapiens
atagcacagttactc

SEQ ID NO: 1198255 - DNA, 15 bp, Homo sapiens
tatagcacagttact

SEQ ID NO: 1198256 - DNA, 15 bp, Homo sapiens
ttatagcacagttac

SEQ ID NO: 1198257 - DNA, 15 bp, Homo sapiens
attatagcacagtta

SEQ ID NO: 1198258 - DNA, 15 bp, Homo sapiens
aattatagcacagtt

SEQ ID NO: 1198259 - DNA, 15 bp, Homo sapiens
aaattatagcacagt

SEQ ID NO: 1198260 - DNA, 15 bp, Homo sapiens
aaaattatagcacag

SEQ ID NO: 1198261 - DNA, 15 bp, Homo sapiens
gaaaattatagcaca

SEQ ID NO: 1198262 - DNA, 15 bp, Homo sapiens
agaaaattatagcac

SEQ ID NO: 1198263 - DNA, 15 bp, Homo sapiens
tagaaaattatagca

SEQ ID NO: 1198264 - DNA, 15 bp, Homo sapiens
ttagaaaattatagc

SEQ ID NO: 1198265 - DNA, 15 bp, Homo sapiens
gttagaaaattatag

SEQ ID NO: 1198266 - DNA, 15 bp, Homo sapiens
agttagaaaattata

SEQ ID NO: 1198267 - DNA, 15 bp, Homo sapiens
gagttagaaaattat

SEQ ID NO: 1198268 - DNA, 15 bp, Homo sapiens
ggagttagaaaatta

SEQ ID NO: 1198269 - DNA, 15 bp, Homo sapiens
tggagttagaaaatt

SEQ ID NO: 1198270 - DNA, 15 bp, Homo sapiens
gtggagttagaaaat

SEQ ID NO: 1198271 - DNA, 15 bp, Homo sapiens
ggtggagttagaaaa

SEQ ID NO: 1198272 - DNA, 15 bp, Homo sapiens
aggtggagttagaaa

SEQ ID NO: 1198273 - DNA, 15 bp, Homo sapiens
gaggtggagttagaa

SEQ ID NO: 1198274 - DNA, 15 bp, Homo sapiens
tgaggtggagttaga

SEQ ID NO: 1198275 - DNA, 15 bp, Homo sapiens
gtgaggtggagttag

SEQ ID NO: 1198276 - DNA, 15 bp, Homo sapiens
agtgaggtggagtta

SEQ ID NO: 1198277 - DNA, 15 bp, Homo sapiens
aagtgaggtggagtt

SEQ ID NO: 1198278 - DNA, 15 bp, Homo sapiens
taagtgaggtggagt

SEQ ID NO: 1198279 - DNA, 15 bp, Homo sapiens
ataagtgaggtggag

SEQ ID NO: 1198280 - DNA, 15 bp, Homo sapiens
aataagtgaggtgga

SEQ ID NO: 1198281 - DNA, 15 bp, Homo sapiens
aaataagtgaggtgg

SEQ ID NO: 1198282 - DNA, 15 bp, Homo sapiens
taaataagtgaggtg

SEQ ID NO: 1198283 - DNA, 15 bp, Homo sapiens
ttaaataagtgaggt

SEQ ID NO: 1198284 - DNA, 15 bp, Homo sapiens
attaaataagtgagg

SEQ ID NO: 1198285 - DNA, 15 bp, Homo sapiens
aattaaataagtgag

SEQ ID NO: 1198286 - DNA, 15 bp, Homo sapiens
gaattaaataagtga

SEQ ID NO: 1198287 - DNA, 15 bp, Homo sapiens
tgaattaaataagtg

SEQ ID NO: 1198288 - DNA, 15 bp, Homo sapiens
ctgaattaaataagt

SEQ ID NO: 1198289 - DNA, 15 bp, Homo sapiens
actgaattaaataag

SEQ ID NO: 1198290 - DNA, 15 bp, Homo sapiens
cactgaattaaataa

SEQ ID NO: 1198291 - DNA, 15 bp, Homo sapiens
ccactgaattaaata

SEQ ID NO: 1198292 - DNA, 15 bp, Homo sapiens
accactgaattaaat

SEQ ID NO: 1198293 - DNA, 15 bp, Homo sapiens
aaccactgaattaaa

SEQ ID NO: 1198294 - DNA, 15 bp, Homo sapiens
gaaccactgaattaa

SEQ ID NO: 1198295 - DNA, 15 bp, Homo sapiens
ggaaccactgaatta

SEQ ID NO: 1198296 - DNA, 15 bp, Homo sapiens
aggaaccactgaatt

SEQ ID NO: 1198297 - DNA, 15 bp, Homo sapiens
caggaaccactgaat

SEQ ID NO: 1198298 - DNA, 15 bp, Homo sapiens
gcaggaaccactgaa

SEQ ID NO: 1198299 - DNA, 15 bp, Homo sapiens
agcaggaaccactga

SEQ ID NO: 1198300 - DNA, 15 bp, Homo sapiens
aagcaggaaccactg

SEQ ID NO: 1198301 - DNA, 15 bp, Homo sapiens
taagcaggaaccact

SEQ ID NO: 1198302 - DNA, 15 bp, Homo sapiens
ctaagcaggaaccac

SEQ ID NO: 1198303 - DNA, 15 bp, Homo sapiens
cctaagcaggaacca

SEQ ID NO: 1198304 - DNA, 15 bp, Homo sapiens
acctaagcaggaacc

SEQ ID NO: 1198305 - DNA, 15 bp, Homo sapiens
cacctaagcaggaac

SEQ ID NO: 1198306 - DNA, 15 bp, Homo sapiens
gcacctaagcaggaa

SEQ ID NO: 1198307 - DNA, 15 bp, Homo sapiens
tgcacctaagcagga

SEQ ID NO: 1198308 - DNA, 15 bp, Homo sapiens
ttgcacctaagcagg

SEQ ID NO: 1198309 - DNA, 15 bp, Homo sapiens
tttgcacctaagcag

SEQ ID NO: 1198310 - DNA, 15 bp, Homo sapiens
gtttgcacctaagca

SEQ ID NO: 1198311 - DNA, 15 bp, Homo sapiens
ggtttgcacctaagc

SEQ ID NO: 1198312 - DNA, 15 bp, Homo sapiens
aggtttgcacctaag

SEQ ID NO: 1198313 - DNA, 15 bp, Homo sapiens
gaggtttgcacctaa

SEQ ID NO: 1198314 - DNA, 15 bp, Homo sapiens
ggaggtttgcaccta

SEQ ID NO: 1198315 - DNA, 15 bp, Homo sapiens
aggaggtttgcacct

SEQ ID NO: 1198316 - DNA, 15 bp, Homo sapiens
aaggaggtttgcacc

SEQ ID NO: 1198317 - DNA, 15 bp, Homo sapiens
gaaggaggtttgcac

SEQ ID NO: 1198318 - DNA, 15 bp, Homo sapiens
tgaaggaggtttgca

SEQ ID NO: 1198319 - DNA, 15 bp, Homo sapiens
ctgaaggaggtttgc

SEQ ID NO: 1198320 - DNA, 15 bp, Homo sapiens
tctgaaggaggtttg

SEQ ID NO: 1198321 - DNA, 15 bp, Homo sapiens
ttctgaaggaggttt

SEQ ID NO: 1198322 - DNA, 15 bp, Homo sapiens
tttctgaaggaggtt

SEQ ID NO: 1198323 - DNA, 15 bp, Homo sapiens
ctttctgaaggaggt

SEQ ID NO: 1198324 - DNA, 15 bp, Homo sapiens
tctttctgaaggagg

SEQ ID NO: 1198325 - DNA, 15 bp, Homo sapiens
ttctttctgaaggag

SEQ ID NO: 1198326 - DNA, 15 bp, Homo sapiens
gttctttctgaagga

SEQ ID NO: 1198327 - DNA, 15 bp, Homo sapiens
ggttctttctgaagg

SEQ ID NO: 1198328 - DNA, 15 bp, Homo sapiens
gggttctttctgaag

SEQ ID NO: 1198329 - DNA, 15 bp, Homo sapiens
agggttctttctgaa

SEQ ID NO: 1198330 - DNA, 15 bp, Homo sapiens
cagggttctttctga

SEQ ID NO: 1198331 - DNA, 15 bp, Homo sapiens
tcagggttctttctg

SEQ ID NO: 1198332 - DNA, 15 bp, Homo sapiens
ctcagggttctttct

SEQ ID NO: 1198333 - DNA, 15 bp, Homo sapiens
actcagggttctttc

SEQ ID NO: 1198334 - DNA, 15 bp, Homo sapiens
tactcagggttcttt

SEQ ID NO: 1198335 - DNA, 15 bp, Homo sapiens
ctactcagggttctt

SEQ ID NO: 1198336 - DNA, 15 bp, Homo sapiens
cctactcagggttct

SEQ ID NO: 1198337 - DNA, 15 bp, Homo sapiens
ccctactcagggttc

SEQ ID NO: 1198338 - DNA, 15 bp, Homo sapiens
accctactcagggtt

SEQ ID NO: 1198339 - DNA, 15 bp, Homo sapiens
gaccctactcagggt

SEQ ID NO: 1198340 - DNA, 15 bp, Homo sapiens
agaccctactcaggg

SEQ ID NO: 1198341 - DNA, 15 bp, Homo sapiens
gagaccctactcagg

SEQ ID NO: 1198342 - DNA, 15 bp, Homo sapiens
agagaccctactcag

SEQ ID NO: 1198343 - DNA, 15 bp, Homo sapiens
gagagaccctactca

SEQ ID NO: 1198344 - DNA, 15 bp, Homo sapiens
ggagagaccctactc

SEQ ID NO: 1198345 - DNA, 15 bp, Homo sapiens
gggagagaccctact

SEQ ID NO: 1198346 - DNA, 15 bp, Homo sapiens
agggagagaccctac

SEQ ID NO: 1198347 - DNA, 15 bp, Homo sapiens
aagggagagacccta

SEQ ID NO: 1198348 - DNA, 15 bp, Homo sapiens
gaagggagagaccct

SEQ ID NO: 1198349 - DNA, 15 bp, Homo sapiens
tgaagggagagaccc

SEQ ID NO: 1198350 - DNA, 15 bp, Homo sapiens
ttgaagggagagacc

SEQ ID NO: 1198351 - DNA, 15 bp, Homo sapiens
tttgaagggagagac

SEQ ID NO: 1198352 - DNA, 15 bp, Homo sapiens
atttgaagggagaga

SEQ ID NO: 1198353 - DNA, 15 bp, Homo sapiens
catttgaagggagag

SEQ ID NO: 1198354 - DNA, 15 bp, Homo sapiens
ccatttgaagggaga

SEQ ID NO: 1198355 - DNA, 15 bp, Homo sapiens
tccatttgaagggag

SEQ ID NO: 1198356 - DNA, 15 bp, Homo sapiens
gtccatttgaaggga

SEQ ID NO: 1198357 - DNA, 15 bp, Homo sapiens
tgtccatttgaaggg

SEQ ID NO: 1198358 - DNA, 15 bp, Homo sapiens
atgtccatttgaagg

SEQ ID NO: 1198359 - DNA, 15 bp, Homo sapiens
catgtccatttgaag

SEQ ID NO: 1198360 - DNA, 15 bp, Homo sapiens
acatgtccatttgaa

SEQ ID NO: 1198361 - DNA, 15 bp, Homo sapiens
tacatgtccatttga

SEQ ID NO: 1198362 - DNA, 15 bp, Homo sapiens
ctacatgtccatttg

SEQ ID NO: 1198363 - DNA, 15 bp, Homo sapiens
cctacatgtccattt

SEQ ID NO: 1198364 - DNA, 15 bp, Homo sapiens
ccctacatgtccatt

SEQ ID NO: 1198365 - DNA, 15 bp, Homo sapiens
cccctacatgtccat

SEQ ID NO: 1198366 - DNA, 15 bp, Homo sapiens
tcccctacatgtcca

SEQ ID NO: 1198367 - DNA, 15 bp, Homo sapiens
atcccctacatgtcc

SEQ ID NO: 1198368 - DNA, 15 bp, Homo sapiens
tatcccctacatgtc

SEQ ID NO: 1198369 - DNA, 15 bp, Homo sapiens
ttatcccctacatgt

SEQ ID NO: 1198370 - DNA, 15 bp, Homo sapiens
gttatcccctacatg

SEQ ID NO: 1198371 - DNA, 15 bp, Homo sapiens
tgttatcccctacat

SEQ ID NO: 1198372 - DNA, 15 bp, Homo sapiens
ctgttatcccctaca

SEQ ID NO: 1198373 - DNA, 15 bp, Homo sapiens
cctgttatcccctac

SEQ ID NO: 1198374 - DNA, 15 bp, Homo sapiens
ccctgttatccccta

SEQ ID NO: 1198375 - DNA, 15 bp, Homo sapiens
tccctgttatcccct

SEQ ID NO: 1198376 - DNA, 15 bp, Homo sapiens
atccctgttatcccc

SEQ ID NO: 1198377 - DNA, 15 bp, Homo sapiens
gatccctgttatccc

SEQ ID NO: 1198378 - DNA, 15 bp, Homo sapiens
tgatccctgttatcc

SEQ ID NO: 1198379 - DNA, 15 bp, Homo sapiens
atgatccctgttatc

SEQ ID NO: 1198380 - DNA, 15 bp, Homo sapiens
tatgatccctgttat

SEQ ID NO: 1198381 - DNA, 15 bp, Homo sapiens
ctatgatccctgtta

SEQ ID NO: 1198382 - DNA, 15 bp, Homo sapiens
tctatgatccctgtt

SEQ ID NO: 1198383 - DNA, 15 bp, Homo sapiens
ttctatgatccctgt

SEQ ID NO: 1198384 - DNA, 15 bp, Homo sapiens
tttctatgatccctg

SEQ ID NO: 1198385 - DNA, 15 bp, Homo sapiens
atttctatgatccct

SEQ ID NO: 1198386 - DNA, 15 bp, Homo sapiens
catttctatgatccc

SEQ ID NO: 1198387 - DNA, 15 bp, Homo sapiens
acatttctatgatcc

SEQ ID NO: 1198388 - DNA, 15 bp, Homo sapiens
gacatttctatgatc

SEQ ID NO: 1198389 - DNA, 15 bp, Homo sapiens
ggacatttctatgat

SEQ ID NO: 1198390 - DNA, 15 bp, Homo sapiens
gggacatttctatga

SEQ ID NO: 1198391 - DNA, 15 bp, Homo sapiens
agggacatttctatg

SEQ ID NO: 1198392 - DNA, 15 bp, Homo sapiens
tagggacatttctat

SEQ ID NO: 1198393 - DNA, 15 bp, Homo sapiens
atagggacatttcta

SEQ ID NO: 1198394 - DNA, 15 bp, Homo sapiens
tatagggacatttct

SEQ ID NO: 1198395 - DNA, 15 bp, Homo sapiens
gtatagggacatttc

SEQ ID NO: 1198396 - DNA, 15 bp, Homo sapiens
tgtatagggacattt

SEQ ID NO: 1198397 - DNA, 15 bp, Homo sapiens
gtgtatagggacatt

SEQ ID NO: 1198398 - DNA, 15 bp, Homo sapiens
cgtgtatagggacat

SEQ ID NO: 1198399 - DNA, 15 bp, Homo sapiens
acgtgtatagggaca

SEQ ID NO: 1198400 - DNA, 15 bp, Homo sapiens
cacgtgtatagggac

SEQ ID NO: 1198401 - DNA, 15 bp, Homo sapiens
gcacgtgtataggga

SEQ ID NO: 1198402 - DNA, 15 bp, Homo sapiens
agcacgtgtataggg

SEQ ID NO: 1198403 - DNA, 15 bp, Homo sapiens
tagcacgtgtatagg

SEQ ID NO: 1198404 - DNA, 15 bp, Homo sapiens
atagcacgtgtatag

SEQ ID NO: 1198405 - DNA, 15 bp, Homo sapiens
gatagcacgtgtata

SEQ ID NO: 1198406 - DNA, 15 bp, Homo sapiens
cgatagcacgtgtat

SEQ ID NO: 1198407 - DNA, 15 bp, Homo sapiens
gcgatagcacgtgta

SEQ ID NO: 1198408 - DNA, 15 bp, Homo sapiens
agcgatagcacgtgt

SEQ ID NO: 1198409 - DNA, 15 bp, Homo sapiens
cagcgatagcacgtg

SEQ ID NO: 1198410 - DNA, 15 bp, Homo sapiens
tcagcgatagcacgt

SEQ ID NO: 1198411 - DNA, 15 bp, Homo sapiens
ttcagcgatagcacg

SEQ ID NO: 1198412 - DNA, 15 bp, Homo sapiens
cttcagcgatagcac

SEQ ID NO: 1198413 - DNA, 15 bp, Homo sapiens
gcttcagcgatagca

SEQ ID NO: 1198414 - DNA, 15 bp, Homo sapiens
agcttcagcgatagc

SEQ ID NO: 1198415 - DNA, 15 bp, Homo sapiens
tagcttcagcgatag

SEQ ID NO: 1198416 - DNA, 15 bp, Homo sapiens
atagcttcagcgata

SEQ ID NO: 1198417 - DNA, 15 bp, Homo sapiens
gatagcttcagcgat

SEQ ID NO: 1198418 - DNA, 15 bp, Homo sapiens
tgatagcttcagcga

SEQ ID NO: 1198419 - DNA, 15 bp, Homo sapiens
gtgatagcttcagcg

SEQ ID NO: 1198420 - DNA, 15 bp, Homo sapiens
agtgatagcttcagc

SEQ ID NO: 1198421 - DNA, 15 bp, Homo sapiens
gagtgatagcttcag

SEQ ID NO: 1198422 - DNA, 15 bp, Homo sapiens
ggagtgatagcttca

SEQ ID NO: 1198423 - DNA, 15 bp, Homo sapiens
tggagtgatagcttc

SEQ ID NO: 1198424 - DNA, 15 bp, Homo sapiens
gtggagtgatagctt

SEQ ID NO: 1198425 - DNA, 15 bp, Homo sapiens
ggtggagtgatagct

SEQ ID NO: 1198426 - DNA, 15 bp, Homo sapiens
gggtggagtgatagc

SEQ ID NO: 1198427 - DNA, 15 bp, Homo sapiens
ggggtggagtgatag

SEQ ID NO: 1198428 - DNA, 15 bp, Homo sapiens
tggggtggagtgata

SEQ ID NO: 1198429 - DNA, 15 bp, Homo sapiens
atggggtggagtgat

SEQ ID NO: 1198430 - DNA, 15 bp, Homo sapiens
catggggtggagtga

SEQ ID NO: 1198431 - DNA, 15 bp, Homo sapiens
tcatggggtggagtg

SEQ ID NO: 1198432 - DNA, 15 bp, Homo sapiens
ttcatggggtggagt

SEQ ID NO: 1198433 - DNA, 15 bp, Homo sapiens
attcatggggtggag

SEQ ID NO: 1198434 - DNA, 15 bp, Homo sapiens
tattcatggggtgga

SEQ ID NO: 1198435 - DNA, 15 bp, Homo sapiens
atattcatggggtgg

SEQ ID NO: 1198436 - DNA, 15 bp, Homo sapiens
catattcatggggtg

SEQ ID NO: 1198437 - DNA, 15 bp, Homo sapiens
ccatattcatggggt

SEQ ID NO: 1198438 - DNA, 15 bp, Homo sapiens
tccatattcatgggg

SEQ ID NO: 1198439 - DNA, 15 bp, Homo sapiens
ttccatattcatggg

SEQ ID NO: 1198440 - DNA, 15 bp, Homo sapiens
gttccatattcatgg

SEQ ID NO: 1198441 - DNA, 15 bp, Homo sapiens
agttccatattcatg

SEQ ID NO: 1198442 - DNA, 15 bp, Homo sapiens
cagttccatattcat

SEQ ID NO: 1198443 - DNA, 15 bp, Homo sapiens
acagttccatattca

SEQ ID NO: 1198444 - DNA, 15 bp, Homo sapiens
gacagttccatattc

SEQ ID NO: 1198445 - DNA, 15 bp, Homo sapiens
agacagttccatatt

SEQ ID NO: 1198446 - DNA, 15 bp, Homo sapiens
aagacagttccatat

SEQ ID NO: 1198447 - DNA, 15 bp, Homo sapiens
aaagacagttccata

SEQ ID NO: 1198448 - DNA, 15 bp, Homo sapiens
gaaagacagttccat

SEQ ID NO: 1198449 - DNA, 15 bp, Homo sapiens
ggaaagacagttcca

SEQ ID NO: 1198450 - DNA, 15 bp, Homo sapiens
gggaaagacagttcc

SEQ ID NO: 1198451 - DNA, 15 bp, Homo sapiens
tgggaaagacagttc

SEQ ID NO: 1198452 - DNA, 15 bp, Homo sapiens
ttgggaaagacagtt

SEQ ID NO: 1198453 - DNA, 15 bp, Homo sapiens
tttgggaaagacagt

SEQ ID NO: 1198454 - DNA, 15 bp, Homo sapiens
gtttgggaaagacag

SEQ ID NO: 1198455 - DNA, 15 bp, Homo sapiens
ggtttgggaaagaca

SEQ ID NO: 1198456 - DNA, 15 bp, Homo sapiens
gggtttgggaaagac

SEQ ID NO: 1198457 - DNA, 15 bp, Homo sapiens
tgggtttgggaaaga

SEQ ID NO: 1198458 - DNA, 15 bp, Homo sapiens
ttgggtttgggaaag

SEQ ID NO: 1198459 - DNA, 15 bp, Homo sapiens
tttgggtttgggaaa

SEQ ID NO: 1198460 - DNA, 15 bp, Homo sapiens
atttgggtttgggaa

SEQ ID NO: 1198461 - DNA, 15 bp, Homo sapiens
gatttgggtttggga

SEQ ID NO: 1198462 - DNA, 15 bp, Homo sapiens
agatttgggtttggg

SEQ ID NO: 1198463 - DNA, 15 bp, Homo sapiens
gagatttgggtttgg

SEQ ID NO: 1198464 - DNA, 15 bp, Homo sapiens
agagatttgggtttg

SEQ ID NO: 1198465 - DNA, 15 bp, Homo sapiens
tagagatttgggttt

SEQ ID NO: 1198466 - DNA, 15 bp, Homo sapiens
ttagagatttgggtt

SEQ ID NO: 1198467 - DNA, 15 bp, Homo sapiens
tttagagatttgggt

SEQ ID NO: 1198468 - DNA, 15 bp, Homo sapiens
ttttagagatttggg

SEQ ID NO: 1198469 - DNA, 15 bp, Homo sapiens
cttttagagatttgg

SEQ ID NO: 1198470 - DNA, 15 bp, Homo sapiens
ccttttagagatttg

SEQ ID NO: 1198471 - DNA, 15 bp, Homo sapiens
cccttttagagattt

SEQ ID NO: 1198472 - DNA, 15 bp, Homo sapiens
tcccttttagagatt

SEQ ID NO: 1198473 - DNA, 15 bp, Homo sapiens
ttcccttttagagat

SEQ ID NO: 1198474 - DNA, 15 bp, Homo sapiens
tttcccttttagaga

SEQ ID NO: 1198475 - DNA, 15 bp, Homo sapiens
gtttcccttttagag

SEQ ID NO: 1198476 - DNA, 15 bp, Homo sapiens
tgtttcccttttaga

SEQ ID NO: 1198477 - DNA, 15 bp, Homo sapiens
ctgtttcccttttag

SEQ ID NO: 1198478 - DNA, 15 bp, Homo sapiens
tctgtttccctttta

SEQ ID NO: 1198479 - DNA, 15 bp, Homo sapiens
ctctgtttccctttt

SEQ ID NO: 1198480 - DNA, 15 bp, Homo sapiens
cctctgtttcccttt

SEQ ID NO: 1198481 - DNA, 15 bp, Homo sapiens
acctctgtttccctt

SEQ ID NO: 1198482 - DNA, 15 bp, Homo sapiens
cacctctgtttccct

SEQ ID NO: 1198483 - DNA, 15 bp, Homo sapiens
ccacctctgtttccc

SEQ ID NO: 1198484 - DNA, 15 bp, Homo sapiens
cccacctctgtttcc

SEQ ID NO: 1198485 - DNA, 15 bp, Homo sapiens
tcccacctctgtttc

SEQ ID NO: 1198486 - DNA, 15 bp, Homo sapiens
ctcccacctctgttt

SEQ ID NO: 1198487 - DNA, 15 bp, Homo sapiens
cctcccacctctgtt

SEQ ID NO: 1198488 - DNA, 15 bp, Homo sapiens
acctcccacctctgt

SEQ ID NO: 1198489 - DNA, 15 bp, Homo sapiens
cacctcccacctctg

SEQ ID NO: 1198490 - DNA, 15 bp, Homo sapiens
tcacctcccacctct

SEQ ID NO: 1198491 - DNA, 15 bp, Homo sapiens
atcacctcccacctc

SEQ ID NO: 1198492 - DNA, 15 bp, Homo sapiens
aatcacctcccacct

SEQ ID NO: 1198493 - DNA, 15 bp, Homo sapiens
caatcacctcccacc

SEQ ID NO: 1198494 - DNA, 15 bp, Homo sapiens
acaatcacctcccac

SEQ ID NO: 1198495 - DNA, 15 bp, Homo sapiens
aacaatcacctccca

SEQ ID NO: 1198496 - DNA, 15 bp, Homo sapiens
gaacaatcacctccc

SEQ ID NO: 1198497 - DNA, 15 bp, Homo sapiens
ggaacaatcacctcc

SEQ ID NO: 1198498 - DNA, 15 bp, Homo sapiens
aggaacaatcacctc

SEQ ID NO: 1198499 - DNA, 15 bp, Homo sapiens
caggaacaatcacct

SEQ ID NO: 1198500 - DNA, 15 bp, Homo sapiens
ccaggaacaatcacc

SEQ ID NO: 1198501 - DNA, 15 bp, Homo sapiens
tccaggaacaatcac

SEQ ID NO: 1198502 - DNA, 15 bp, Homo sapiens
ctccaggaacaatca

SEQ ID NO: 1198503 - DNA, 15 bp, Homo sapiens
tctccaggaacaatc

SEQ ID NO: 1198504 - DNA, 15 bp, Homo sapiens
ctctccaggaacaat

SEQ ID NO: 1198505 - DNA, 15 bp, Homo sapiens
tctctccaggaacaa

SEQ ID NO: 1198506 - DNA, 15 bp, Homo sapiens
ctctctccaggaaca

SEQ ID NO: 1198507 - DNA, 15 bp, Homo sapiens
cctctctccaggaac

SEQ ID NO: 1198508 - DNA, 15 bp, Homo sapiens
ccctctctccaggaa

SEQ ID NO: 1198509 - DNA, 15 bp, Homo sapiens
tccctctctccagga

SEQ ID NO: 1198510 - DNA, 15 bp, Homo sapiens
ttccctctctccagg

SEQ ID NO: 1198511 - DNA, 15 bp, Homo sapiens
cttccctctctccag

SEQ ID NO: 1198512 - DNA, 15 bp, Homo sapiens
ccttccctctctcca

SEQ ID NO: 1198513 - DNA, 15 bp, Homo sapiens
tctccttccctctct

SEQ ID NO: 1198514 - DNA, 15 bp, Homo sapiens
ttctccttccctctc

SEQ ID NO: 1198515 - DNA, 15 bp, Homo sapiens
tttctccttccctct

SEQ ID NO: 1198516 - DNA, 15 bp, Homo sapiens
ttttctccttccctc

SEQ ID NO: 1198517 - DNA, 15 bp, Homo sapiens
gttttctccttccct

SEQ ID NO: 1198518 - DNA, 15 bp, Homo sapiens
tgttttctccttccc

SEQ ID NO: 1198519 - DNA, 15 bp, Homo sapiens
ctgttttctccttcc

SEQ ID NO: 1198520 - DNA, 15 bp, Homo sapiens
actgttttctccttc

SEQ ID NO: 1198521 - DNA, 15 bp, Homo sapiens
tactgttttctcctt

SEQ ID NO: 1198522 - DNA, 15 bp, Homo sapiens
ttactgttttctcct

SEQ ID NO: 1198523 - DNA, 15 bp, Homo sapiens
cttactgttttctcc

SEQ ID NO: 1198524 - DNA, 15 bp, Homo sapiens
tcttactgttttctc

SEQ ID NO: 1198525 - DNA, 15 bp, Homo sapiens
ttcttactgttttct

SEQ ID NO: 1198526 - DNA, 15 bp, Homo sapiens
tttcttactgttttc

SEQ ID NO: 1198527 - DNA, 15 bp, Homo sapiens
ctttcttactgtttt

SEQ ID NO: 1198528 - DNA, 15 bp, Homo sapiens
tctttcttactgttt

SEQ ID NO: 1198529 - DNA, 15 bp, Homo sapiens
ttctttcttactgtt

SEQ ID NO: 1198530 - DNA, 15 bp, Homo sapiens
tttctttcttactgt

SEQ ID NO: 1198531 - DNA, 15 bp, Homo sapiens
gtttctttcttactg

SEQ ID NO: 1198532 - DNA, 15 bp, Homo sapiens
tgtttctttcttact

SEQ ID NO: 1198533 - DNA, 15 bp, Homo sapiens
gtgtttctttcttac

SEQ ID NO: 1198534 - DNA, 15 bp, Homo sapiens
cgtgtttctttctta

SEQ ID NO: 1198535 - DNA, 15 bp, Homo sapiens
tcgtgtttctttctt

SEQ ID NO: 1198536 - DNA, 15 bp, Homo sapiens
gtcgtgtttctttct

SEQ ID NO: 1198537 - DNA, 15 bp, Homo sapiens
ggtcgtgtttctttc

SEQ ID NO: 1198538 - DNA, 15 bp, Homo sapiens
gggtcgtgtttcttt

SEQ ID NO: 1198539 - DNA, 15 bp, Homo sapiens
tgggtcgtgtttctt

SEQ ID NO: 1198540 - DNA, 15 bp, Homo sapiens
ctgggtcgtgtttct

SEQ ID NO: 1198541 - DNA, 15 bp, Homo sapiens
cctgggtcgtgtttc

SEQ ID NO: 1198542 - DNA, 15 bp, Homo sapiens
tcctgggtcgtgttt

SEQ ID NO: 1198543 - DNA, 15 bp, Homo sapiens
atcctgggtcgtgtt

SEQ ID NO: 1198544 - DNA, 15 bp, Homo sapiens
aatcctgggtcgtgt

SEQ ID NO: 1198545 - DNA, 15 bp, Homo sapiens
caatcctgggtcgtg

SEQ ID NO: 1198546 - DNA, 15 bp, Homo sapiens
acaatcctgggtcgt

SEQ ID NO: 1198547 - DNA, 15 bp, Homo sapiens
cacaatcctgggtcg

SEQ ID NO: 1198548 - DNA, 15 bp, Homo sapiens
gcacaatcctgggtc

SEQ ID NO: 1198549 - DNA, 15 bp, Homo sapiens
agcacaatcctgggt

SEQ ID NO: 1198550 - DNA, 15 bp, Homo sapiens
aagcacaatcctggg

SEQ ID NO: 1198551 - DNA, 15 bp, Homo sapiens
gaagcacaatcctgg

SEQ ID NO: 1198552 - DNA, 15 bp, Homo sapiens
agaagcacaatcctg

SEQ ID NO: 1198553 - DNA, 15 bp, Homo sapiens
gagaagcacaatcct

SEQ ID NO: 1198554 - DNA, 15 bp, Homo sapiens
ggagaagcacaatcc

SEQ ID NO: 1198555 - DNA, 15 bp, Homo sapiens
tggagaagcacaatc

SEQ ID NO: 1198556 - DNA, 15 bp, Homo sapiens
atggagaagcacaat

SEQ ID NO: 1198557 - DNA, 15 bp, Homo sapiens
gatggagaagcacaa

SEQ ID NO: 1198558 - DNA, 15 bp, Homo sapiens
ggatggagaagcaca

SEQ ID NO: 1198559 - DNA, 15 bp, Homo sapiens
aggatggagaagcac

SEQ ID NO: 1198560 - DNA, 15 bp, Homo sapiens
taggatggagaagca

SEQ ID NO: 1198561 - DNA, 15 bp, Homo sapiens
ataggatggagaagc

SEQ ID NO: 1198562 - DNA, 15 bp, Homo sapiens
aataggatggagaag

SEQ ID NO: 1198563 - DNA, 15 bp, Homo sapiens
aaataggatggagaa

SEQ ID NO: 1198564 - DNA, 15 bp, Homo sapiens
taaataggatggaga

SEQ ID NO: 1198565 - DNA, 15 bp, Homo sapiens
ctaaataggatggag

SEQ ID NO: 1198566 - DNA, 15 bp, Homo sapiens
actaaataggatgga

SEQ ID NO: 1198567 - DNA, 15 bp, Homo sapiens
aactaaataggatgg

SEQ ID NO: 1198568 - DNA, 15 bp, Homo sapiens
gaactaaataggatg

SEQ ID NO: 1198569 - DNA, 15 bp, Homo sapiens
tgaactaaataggat

SEQ ID NO: 1198570 - DNA, 15 bp, Homo sapiens
ctgaactaaatagga

SEQ ID NO: 1198571 - DNA, 15 bp, Homo sapiens
tctgaactaaatagg

SEQ ID NO: 1198572 - DNA, 15 bp, Homo sapiens
ctctgaactaaatag

SEQ ID NO: 1198573 - DNA, 15 bp, Homo sapiens
gctctgaactaaata

SEQ ID NO: 1198574 - DNA, 15 bp, Homo sapiens
agctctgaactaaat

SEQ ID NO: 1198575 - DNA, 15 bp, Homo sapiens
aagctctgaactaaa

SEQ ID NO: 1198576 - DNA, 15 bp, Homo sapiens
gaagctctgaactaa

SEQ ID NO: 1198577 - DNA, 15 bp, Homo sapiens
tgaagctctgaacta

SEQ ID NO: 1198578 - DNA, 15 bp, Homo sapiens
ttgaagctctgaact

SEQ ID NO: 1198579 - DNA, 15 bp, Homo sapiens
tttgaagctctgaac

SEQ ID NO: 1198580 - DNA, 15 bp, Homo sapiens
atttgaagctctgaa

SEQ ID NO: 1198581 - DNA, 15 bp, Homo sapiens
aatttgaagctctga

SEQ ID NO: 1198582 - DNA, 15 bp, Homo sapiens
gaatttgaagctctg

SEQ ID NO: 1198583 - DNA, 15 bp, Homo sapiens
tgaatttgaagctct

SEQ ID NO: 1198584 - DNA, 15 bp, Homo sapiens
ctgaatttgaagctc

SEQ ID NO: 1198585 - DNA, 15 bp, Homo sapiens
gctgaatttgaagct

SEQ ID NO: 1198586 - DNA, 15 bp, Homo sapiens
ggctgaatttgaagc

SEQ ID NO: 1198587 - DNA, 15 bp, Homo sapiens
tggctgaatttgaag

SEQ ID NO: 1198588 - DNA, 15 bp, Homo sapiens
gtggctgaatttgaa

SEQ ID NO: 1198589 - DNA, 15 bp, Homo sapiens
ggtggctgaatttga

SEQ ID NO: 1198590 - DNA, 15 bp, Homo sapiens
gggtggctgaatttg

SEQ ID NO: 1198591 - DNA, 15 bp, Homo sapiens
agggtggctgaattt

SEQ ID NO: 1198592 - DNA, 15 bp, Homo sapiens
aagggtggctgaatt

SEQ ID NO: 1198593 - DNA, 15 bp, Homo sapiens
taagggtggctgaat

SEQ ID NO: 1198594 - DNA, 15 bp, Homo sapiens
ataagggtggctgaa

SEQ ID NO: 1198595 - DNA, 15 bp, Homo sapiens
tataagggtggctga

SEQ ID NO: 1198596 - DNA, 15 bp, Homo sapiens
atataagggtggctg

SEQ ID NO: 1198597 - DNA, 15 bp, Homo sapiens
catataagggtggct

SEQ ID NO: 1198598 - DNA, 15 bp, Homo sapiens
tcatataagggtggc

SEQ ID NO: 1198599 - DNA, 15 bp, Homo sapiens
atcatataagggtgg

SEQ ID NO: 1198600 - DNA, 15 bp, Homo sapiens
gatcatataagggtg

SEQ ID NO: 1198601 - DNA, 15 bp, Homo sapiens
agatcatataagggt

SEQ ID NO: 1198602 - DNA, 15 bp, Homo sapiens
tagatcatataaggg

SEQ ID NO: 1198603 - DNA, 15 bp, Homo sapiens
ttagatcatataagg

SEQ ID NO: 1198604 - DNA, 15 bp, Homo sapiens
tttagatcatataag

SEQ ID NO: 1198605 - DNA, 15 bp, Homo sapiens
ttttagatcatataa

SEQ ID NO: 1198606 - DNA, 15 bp, Homo sapiens
attttagatcatata

SEQ ID NO: 1198607 - DNA, 15 bp, Homo sapiens
tattttagatcatat

SEQ ID NO: 1198608 - DNA, 15 bp, Homo sapiens
gtattttagatcata

SEQ ID NO: 1198609 - DNA, 15 bp, Homo sapiens
agtattttagatcat

SEQ ID NO: 1198610 - DNA, 15 bp, Homo sapiens
gagtattttagatca

SEQ ID NO: 1198611 - DNA, 15 bp, Homo sapiens
tgagtattttagatc

SEQ ID NO: 1198612 - DNA, 15 bp, Homo sapiens
ttgagtattttagat

SEQ ID NO: 1198613 - DNA, 15 bp, Homo sapiens
tttgagtattttaga

SEQ ID NO: 1198614 - DNA, 15 bp, Homo sapiens
ttttgagtattttag

SEQ ID NO: 1198615 - DNA, 15 bp, Homo sapiens
tttttgagtatttta

SEQ ID NO: 1198616 - DNA, 15 bp, Homo sapiens
atttttgagtatttt

SEQ ID NO: 1198617 - DNA, 15 bp, Homo sapiens
tatttttgagtattt

SEQ ID NO: 1198618 - DNA, 15 bp, Homo sapiens
ttatttttgagtatt

SEQ ID NO: 1198619 - DNA, 15 bp, Homo sapiens
cttatttttgagtat

SEQ ID NO: 1198620 - DNA, 15 bp, Homo sapiens
ccttatttttgagta

SEQ ID NO: 1198621 - DNA, 15 bp, Homo sapiens
gccttatttttgagt

SEQ ID NO: 1198622 - DNA, 15 bp, Homo sapiens
agccttatttttgag

SEQ ID NO: 1198623 - DNA, 15 bp, Homo sapiens
tagccttatttttga

SEQ ID NO: 1198624 - DNA, 15 bp, Homo sapiens
gtagccttatttttg

SEQ ID NO: 1198625 - DNA, 15 bp, Homo sapiens
ggtagccttattttt

SEQ ID NO: 1198626 - DNA, 15 bp, Homo sapiens
gggtagccttatttt

SEQ ID NO: 1198627 - DNA, 15 bp, Homo sapiens
ggggtagccttattt

SEQ ID NO: 1198628 - DNA, 15 bp, Homo sapiens
tggggtagccttatt

SEQ ID NO: 1198629 - DNA, 15 bp, Homo sapiens
ctggggtagccttat

SEQ ID NO: 1198630 - DNA, 15 bp, Homo sapiens
tctggggtagcctta

SEQ ID NO: 1198631 - DNA, 15 bp, Homo sapiens
ctctggggtagcctt

SEQ ID NO: 1198632 - DNA, 15 bp, Homo sapiens
gctctggggtagcct

SEQ ID NO: 1198633 - DNA, 15 bp, Homo sapiens
ggctctggggtagcc

SEQ ID NO: 1198634 - DNA, 15 bp, Homo sapiens
tggctctggggtagc

SEQ ID NO: 1198635 - DNA, 15 bp, Homo sapiens
ttggctctggggtag

SEQ ID NO: 1198636 - DNA, 15 bp, Homo sapiens
tttggctctggggta

SEQ ID NO: 1198637 - DNA, 15 bp, Homo sapiens
atttggctctggggt

SEQ ID NO: 1198638 - DNA, 15 bp, Homo sapiens
aatttggctctgggg

SEQ ID NO: 1198639 - DNA, 15 bp, Homo sapiens
aaatttggctctggg

SEQ ID NO: 1198640 - DNA, 15 bp, Homo sapiens
gaaatttggctctgg

SEQ ID NO: 1198641 - DNA, 15 bp, Homo sapiens
agaaatttggctctg

SEQ ID NO: 1198642 - DNA, 15 bp, Homo sapiens
aagaaatttggctct

SEQ ID NO: 1198643 - DNA, 15 bp, Homo sapiens
aaagaaatttggctc

SEQ ID NO: 1198644 - DNA, 15 bp, Homo sapiens
aaaagaaatttggct

SEQ ID NO: 1198645 - DNA, 15 bp, Homo sapiens
aaaaagaaatttggc

SEQ ID NO: 1198646 - DNA, 15 bp, Homo sapiens
taaaaagaaatttgg

SEQ ID NO: 1198647 - DNA, 15 bp, Homo sapiens
ataaaaagaaatttg

SEQ ID NO: 1198648 - DNA, 15 bp, Homo sapiens
aataaaaagaaattt

SEQ ID NO: 1198649 - DNA, 15 bp, Homo sapiens
aaataaaaagaaatt

SEQ ID NO: 1198650 - DNA, 15 bp, Homo sapiens
gaaataaaaagaaat

SEQ ID NO: 1198651 - DNA, 15 bp, Homo sapiens
agaaataaaaagaaa

SEQ ID NO: 1198652 - DNA, 15 bp, Homo sapiens
gaagaaataaaaaga

SEQ ID NO: 1198653 - DNA, 15 bp, Homo sapiens
agaagaaataaaaag

SEQ ID NO: 1198654 - DNA, 15 bp, Homo sapiens
cagaagaaataaaaa

SEQ ID NO: 1198655 - DNA, 15 bp, Homo sapiens
gcagaagaaataaaa

SEQ ID NO: 1198656 - DNA, 15 bp, Homo sapiens
ggcagaagaaataaa

SEQ ID NO: 1198657 - DNA, 15 bp, Homo sapiens
aggcagaagaaataa

SEQ ID NO: 1198658 - DNA, 15 bp, Homo sapiens
gaggcagaagaaata

SEQ ID NO: 1198659 - DNA, 15 bp, Homo sapiens
tgaggcagaagaaat

SEQ ID NO: 1198660 - DNA, 15 bp, Homo sapiens
gtgaggcagaagaaa

SEQ ID NO: 1198661 - DNA, 15 bp, Homo sapiens
agtgaggcagaagaa

SEQ ID NO: 1198662 - DNA, 15 bp, Homo sapiens
gagtgaggcagaaga

SEQ ID NO: 1198663 - DNA, 15 bp, Homo sapiens
agagtgaggcagaag

SEQ ID NO: 1198664 - DNA, 15 bp, Homo sapiens
cagagtgaggcagaa

SEQ ID NO: 1198665 - DNA, 15 bp, Homo sapiens
gcagagtgaggcaga

SEQ ID NO: 1198666 - DNA, 15 bp, Homo sapiens
agcagagtgaggcag

SEQ ID NO: 1198667 - DNA, 15 bp, Homo sapiens
aagcagagtgaggca

SEQ ID NO: 1198668 - DNA, 15 bp, Homo sapiens
aaagcagagtgaggc

SEQ ID NO: 1198669 - DNA, 15 bp, Homo sapiens
taaagcagagtgagg

SEQ ID NO: 1198670 - DNA, 15 bp, Homo sapiens
ttaaagcagagtgag

SEQ ID NO: 1198671 - DNA, 15 bp, Homo sapiens
tttaaagcagagtga

SEQ ID NO: 1198672 - DNA, 15 bp, Homo sapiens
ctttaaagcagagtg

SEQ ID NO: 1198673 - DNA, 15 bp, Homo sapiens
tctttaaagcagagt

SEQ ID NO: 1198674 - DNA, 15 bp, Homo sapiens
atctttaaagcagag

SEQ ID NO: 1198675 - DNA, 15 bp, Homo sapiens
catctttaaagcaga

SEQ ID NO: 1198676 - DNA, 15 bp, Homo sapiens
tcatctttaaagcag

SEQ ID NO: 1198677 - DNA, 15 bp, Homo sapiens
ttcatctttaaagca

SEQ ID NO: 1198678 - DNA, 15 bp, Homo sapiens
attcatctttaaagc

SEQ ID NO: 1198679 - DNA, 15 bp, Homo sapiens
aattcatctttaaag

SEQ ID NO: 1198680 - DNA, 15 bp, Homo sapiens
caattcatctttaaa

SEQ ID NO: 1198681 - DNA, 15 bp, Homo sapiens
ccaattcatctttaa

SEQ ID NO: 1198682 - DNA, 15 bp, Homo sapiens
tccaattcatcttta

SEQ ID NO: 1198683 - DNA, 15 bp, Homo sapiens
ttccaattcatcttt

SEQ ID NO: 1198684 - DNA, 15 bp, Homo sapiens
tttccaattcatctt

SEQ ID NO: 1198685 - DNA, 15 bp, Homo sapiens
atttccaattcatct

SEQ ID NO: 1198686 - DNA, 15 bp, Homo sapiens
tatttccaattcatc

SEQ ID NO: 1198687 - DNA, 15 bp, Homo sapiens
ctatttccaattcat

SEQ ID NO: 1198688 - DNA, 15 bp, Homo sapiens
tctatttccaattca

SEQ ID NO: 1198689 - DNA, 15 bp, Homo sapiens
ctctatttccaattc

SEQ ID NO: 1198690 - DNA, 15 bp, Homo sapiens
tctctatttccaatt

SEQ ID NO: 1198691 - DNA, 15 bp, Homo sapiens
gtctctatttccaat

SEQ ID NO: 1198692 - DNA, 15 bp, Homo sapiens
tgtctctatttccaa

SEQ ID NO: 1198693 - DNA, 15 bp, Homo sapiens
atgtctctatttcca

SEQ ID NO: 1198694 - DNA, 15 bp, Homo sapiens
gatgtctctatttcc

SEQ ID NO: 1198695 - DNA, 15 bp, Homo sapiens
ggatgtctctatttc

SEQ ID NO: 1198696 - DNA, 15 bp, Homo sapiens
aggatgtctctattt

SEQ ID NO: 1198697 - DNA, 15 bp, Homo sapiens
gaggatgtctctatt

SEQ ID NO: 1198698 - DNA, 15 bp, Homo sapiens
tgaggatgtctctat

SEQ ID NO: 1198699 - DNA, 15 bp, Homo sapiens
atgaggatgtctcta

SEQ ID NO: 1198700 - DNA, 15 bp, Homo sapiens
gatgaggatgtctct

SEQ ID NO: 1198701 - DNA, 15 bp, Homo sapiens
agatgaggatgtctc

SEQ ID NO: 1198702 - DNA, 15 bp, Homo sapiens
cagatgaggatgtct

SEQ ID NO: 1198703 - DNA, 15 bp, Homo sapiens
acagatgaggatgtc

SEQ ID NO: 1198704 - DNA, 15 bp, Homo sapiens
gacagatgaggatgt

SEQ ID NO: 1198705 - DNA, 15 bp, Homo sapiens
tgacagatgaggatg

SEQ ID NO: 1198706 - DNA, 15 bp, Homo sapiens
ttgacagatgaggat

SEQ ID NO: 1198707 - DNA, 15 bp, Homo sapiens
gttgacagatgagga

SEQ ID NO: 1198708 - DNA, 15 bp, Homo sapiens
agttgacagatgagg

SEQ ID NO: 1198709 - DNA, 15 bp, Homo sapiens
tagttgacagatgag

SEQ ID NO: 1198710 - DNA, 15 bp, Homo sapiens
atagttgacagatga

SEQ ID NO: 1198711 - DNA, 15 bp, Homo sapiens
gatagttgacagatg

SEQ ID NO: 1198712 - DNA, 15 bp, Homo sapiens
tgatagttgacagat

SEQ ID NO: 1198713 - DNA, 15 bp, Homo sapiens
gtgatagttgacaga

SEQ ID NO: 1198714 - DNA, 15 bp, Homo sapiens
ggtgatagttgacag

SEQ ID NO: 1198715 - DNA, 15 bp, Homo sapiens
tggtgatagttgaca

SEQ ID NO: 1198716 - DNA, 15 bp, Homo sapiens
ttggtgatagttgac

SEQ ID NO: 1198717 - DNA, 15 bp, Homo sapiens
cttggtgatagttga

SEQ ID NO: 1198718 - DNA, 15 bp, Homo sapiens
acttggtgatagttg

SEQ ID NO: 1198719 - DNA, 15 bp, Homo sapiens
tacttggtgatagtt

SEQ ID NO: 1198720 - DNA, 15 bp, Homo sapiens
ctacttggtgatagt

SEQ ID NO: 1198721 - DNA, 15 bp, Homo sapiens
tctacttggtgatag

SEQ ID NO: 1198722 - DNA, 15 bp, Homo sapiens
atctacttggtgata

SEQ ID NO: 1198723 - DNA, 15 bp, Homo sapiens
aatctacttggtgat

SEQ ID NO: 1198724 - DNA, 15 bp, Homo sapiens
gaatctacttggtga

SEQ ID NO: 1198725 - DNA, 15 bp, Homo sapiens
agaatctacttggtg

SEQ ID NO: 1198726 - DNA, 15 bp, Homo sapiens
gagaatctacttggt

SEQ ID NO: 1198727 - DNA, 15 bp, Homo sapiens
agagaatctacttgg

SEQ ID NO: 1198728 - DNA, 15 bp, Homo sapiens
aagagaatctacttg

SEQ ID NO: 1198729 - DNA, 15 bp, Homo sapiens
taagagaatctactt

SEQ ID NO: 1198730 - DNA, 15 bp, Homo sapiens
ctaagagaatctact

SEQ ID NO: 1198731 - DNA, 15 bp, Homo sapiens
tctaagagaatctac

SEQ ID NO: 1198732 - DNA, 15 bp, Homo sapiens
atctaagagaatcta

SEQ ID NO: 1198733 - DNA, 15 bp, Homo sapiens
tatctaagagaatct

SEQ ID NO: 1198734 - DNA, 15 bp, Homo sapiens
ctatctaagagaatc

SEQ ID NO: 1198735 - DNA, 15 bp, Homo sapiens
actatctaagagaat

SEQ ID NO: 1198736 - DNA, 15 bp, Homo sapiens
aactatctaagagaa

SEQ ID NO: 1198737 - DNA, 15 bp, Homo sapiens
taactatctaagaga

SEQ ID NO: 1198738 - DNA, 15 bp, Homo sapiens
ttaactatctaagag

SEQ ID NO: 1198739 - DNA, 15 bp, Homo sapiens
attaactatctaaga

SEQ ID NO: 1198740 - DNA, 15 bp, Homo sapiens
tattaactatctaag

SEQ ID NO: 1198741 - DNA, 15 bp, Homo sapiens
atattaactatctaa

SEQ ID NO: 1198742 - DNA, 15 bp, Homo sapiens
aatattaactatcta

SEQ ID NO: 1198743 - DNA, 15 bp, Homo sapiens
caatattaactatct

SEQ ID NO: 1198744 - DNA, 15 bp, Homo sapiens
tcaatattaactatc

SEQ ID NO: 1198745 - DNA, 15 bp, Homo sapiens
ttcaatattaactat

SEQ ID NO: 1198746 - DNA, 15 bp, Homo sapiens
tttcaatattaacta

SEQ ID NO: 1198747 - DNA, 15 bp, Homo sapiens
ttttcaatattaact

SEQ ID NO: 1198748 - DNA, 15 bp, Homo sapiens
cttttcaatattaac

SEQ ID NO: 1198749 - DNA, 15 bp, Homo sapiens
gcttttcaatattaa

SEQ ID NO: 1198750 - DNA, 15 bp, Homo sapiens
cgcttttcaatatta

SEQ ID NO: 1198751 - DNA, 15 bp, Homo sapiens
acgcttttcaatatt

SEQ ID NO: 1198752 - DNA, 15 bp, Homo sapiens
gacgcttttcaatat

SEQ ID NO: 1198753 - DNA, 15 bp, Homo sapiens
ggacgcttttcaata

SEQ ID NO: 1198754 - DNA, 15 bp, Homo sapiens
aggacgcttttcaat

SEQ ID NO: 1198755 - DNA, 15 bp, Homo sapiens
gaggacgcttttcaa

SEQ ID NO: 1198756 - DNA, 15 bp, Homo sapiens
agaggacgcttttca

SEQ ID NO: 1198757 - DNA, 15 bp, Homo sapiens
cagaggacgcttttc

SEQ ID NO: 1198758 - DNA, 15 bp, Homo sapiens
ccagaggacgctttt

SEQ ID NO: 1198759 - DNA, 15 bp, Homo sapiens
accagaggacgcttt

SEQ ID NO: 1198760 - DNA, 15 bp, Homo sapiens
taccagaggacgctt

SEQ ID NO: 1198761 - DNA, 15 bp, Homo sapiens
ataccagaggacgct

SEQ ID NO: 1198762 - DNA, 15 bp, Homo sapiens
gataccagaggacgc

SEQ ID NO: 1198763 - DNA, 15 bp, Homo sapiens
agataccagaggacg

SEQ ID NO: 1198764 - DNA, 15 bp, Homo sapiens
gagataccagaggac

SEQ ID NO: 1198765 - DNA, 15 bp, Homo sapiens
agagataccagagga

SEQ ID NO: 1198766 - DNA, 15 bp, Homo sapiens
tagagataccagagg

SEQ ID NO: 1198767 - DNA, 15 bp, Homo sapiens
ctagagataccagag

SEQ ID NO: 1198768 - DNA, 15 bp, Homo sapiens
tctagagataccaga

SEQ ID NO: 1198769 - DNA, 15 bp, Homo sapiens
gtctagagataccag

SEQ ID NO: 1198770 - DNA, 15 bp, Homo sapiens
ggtctagagatacca

SEQ ID NO: 1198771 - DNA, 15 bp, Homo sapiens
aggtctagagatacc

SEQ ID NO: 1198772 - DNA, 15 bp, Homo sapiens
gaggtctagagatac

SEQ ID NO: 1198773 - DNA, 15 bp, Homo sapiens
tgaggtctagagata

SEQ ID NO: 1198774 - DNA, 15 bp, Homo sapiens
gtgaggtctagagat

SEQ ID NO: 1198775 - DNA, 15 bp, Homo sapiens
agtgaggtctagaga

SEQ ID NO: 1198776 - DNA, 15 bp, Homo sapiens
cagtgaggtctagag

SEQ ID NO: 1198777 - DNA, 15 bp, Homo sapiens
gcagtgaggtctaga

SEQ ID NO: 1198778 - DNA, 15 bp, Homo sapiens
agcagtgaggtctag

SEQ ID NO: 1198779 - DNA, 15 bp, Homo sapiens
tagcagtgaggtcta

SEQ ID NO: 1198780 - DNA, 15 bp, Homo sapiens
atagcagtgaggtct

SEQ ID NO: 1198781 - DNA, 15 bp, Homo sapiens
tatagcagtgaggtc

SEQ ID NO: 1198782 - DNA, 15 bp, Homo sapiens
ctatagcagtgaggt

SEQ ID NO: 1198783 - DNA, 15 bp, Homo sapiens
actatagcagtgagg

SEQ ID NO: 1198784 - DNA, 15 bp, Homo sapiens
tactatagcagtgag

SEQ ID NO: 1198785 - DNA, 15 bp, Homo sapiens
ttactatagcagtga

SEQ ID NO: 1198786 - DNA, 15 bp, Homo sapiens
tttactatagcagtg

SEQ ID NO: 1198787 - DNA, 15 bp, Homo sapiens
ttttactatagcagt

SEQ ID NO: 1198788 - DNA, 15 bp, Homo sapiens
cttttactatagcag

SEQ ID NO: 1198789 - DNA, 15 bp, Homo sapiens
ccttttactatagca

SEQ ID NO: 1198790 - DNA, 15 bp, Homo sapiens
accttttactatagc

SEQ ID NO: 1198791 - DNA, 15 bp, Homo sapiens
taccttttactatag

SEQ ID NO: 1198792 - DNA, 15 bp, Homo sapiens
gtaccttttactata

SEQ ID NO: 1198793 - DNA, 15 bp, Homo sapiens
tgtaccttttactat

SEQ ID NO: 1198794 - DNA, 15 bp, Homo sapiens
ctgtaccttttacta

SEQ ID NO: 1198795 - DNA, 15 bp, Homo sapiens
actgtaccttttact

SEQ ID NO: 1198796 - DNA, 15 bp, Homo sapiens
cactgtaccttttac

SEQ ID NO: 1198797 - DNA, 15 bp, Homo sapiens
ccactgtacctttta

SEQ ID NO: 1198798 - DNA, 15 bp, Homo sapiens
tccactgtacctttt

SEQ ID NO: 1198799 - DNA, 15 bp, Homo sapiens
ttccactgtaccttt

SEQ ID NO: 1198800 - DNA, 15 bp, Homo sapiens
attccactgtacctt

SEQ ID NO: 1198801 - DNA, 15 bp, Homo sapiens
tattccactgtacct

SEQ ID NO: 1198802 - DNA, 15 bp, Homo sapiens
ttattccactgtacc

SEQ ID NO: 1198803 - DNA, 15 bp, Homo sapiens
gttattccactgtac

SEQ ID NO: 1198804 - DNA, 15 bp, Homo sapiens
agttattccactgta

SEQ ID NO: 1198805 - DNA, 15 bp, Homo sapiens
aagttattccactgt

SEQ ID NO: 1198806 - DNA, 15 bp, Homo sapiens
taagttattccactg

SEQ ID NO: 1198807 - DNA, 15 bp, Homo sapiens
ttaagttattccact

SEQ ID NO: 1198808 - DNA, 15 bp, Homo sapiens
attaagttattccac

SEQ ID NO: 1198809 - DNA, 15 bp, Homo sapiens
tattaagttattcca

SEQ ID NO: 1198810 - DNA, 15 bp, Homo sapiens
gtattaagttattcc

SEQ ID NO: 1198811 - DNA, 15 bp, Homo sapiens
tgtattaagttattc

SEQ ID NO: 1198812 - DNA, 15 bp, Homo sapiens
ctgtattaagttatt

SEQ ID NO: 1198813 - DNA, 15 bp, Homo sapiens
tctgtattaagttat

SEQ ID NO: 1198814 - DNA, 15 bp, Homo sapiens
atctgtattaagtta

SEQ ID NO: 1198815 - DNA, 15 bp, Homo sapiens
aatctgtattaagtt

SEQ ID NO: 1198816 - DNA, 15 bp, Homo sapiens
aaatctgtattaagt

SEQ ID NO: 1198817 - DNA, 15 bp, Homo sapiens
caaatctgtattaag

SEQ ID NO: 1198818 - DNA, 15 bp, Homo sapiens
acaaatctgtattaa

SEQ ID NO: 1198819 - DNA, 15 bp, Homo sapiens
cacaaatctgtatta

SEQ ID NO: 1198820 - DNA, 15 bp, Homo sapiens
gcacaaatctgtatt

SEQ ID NO: 1198821 - DNA, 15 bp, Homo sapiens
agcacaaatctgtat

SEQ ID NO: 1198822 - DNA, 15 bp, Homo sapiens
tagcacaaatctgta

SEQ ID NO: 1198823 - DNA, 15 bp, Homo sapiens
ctagcacaaatctgt

SEQ ID NO: 1198824 - DNA, 15 bp, Homo sapiens
tctagcacaaatctg

SEQ ID NO: 1198825 - DNA, 15 bp, Homo sapiens
ttctagcacaaatct

SEQ ID NO: 1198826 - DNA, 15 bp, Homo sapiens
attctagcacaaatc

SEQ ID NO: 1198827 - DNA, 15 bp, Homo sapiens
cattctagcacaaat

SEQ ID NO: 1198828 - DNA, 15 bp, Homo sapiens
acattctagcacaaa

SEQ ID NO: 1198829 - DNA, 15 bp, Homo sapiens
cacattctagcacaa

SEQ ID NO: 1198830 - DNA, 15 bp, Homo sapiens
gcacattctagcaca

SEQ ID NO: 1198831 - DNA, 15 bp, Homo sapiens
agcacattctagcac

SEQ ID NO: 1198832 - DNA, 15 bp, Homo sapiens
cagcacattctagca

SEQ ID NO: 1198833 - DNA, 15 bp, Homo sapiens
ccagcacattctagc

SEQ ID NO: 1198834 - DNA, 15 bp, Homo sapiens
gccagcacattctag

SEQ ID NO: 1198835 - DNA, 15 bp, Homo sapiens
agccagcacattcta

SEQ ID NO: 1198836 - DNA, 15 bp, Homo sapiens
cagccagcacattct

SEQ ID NO: 1198837 - DNA, 15 bp, Homo sapiens
tcagccagcacattc

SEQ ID NO: 1198838 - DNA, 15 bp, Homo sapiens
atcagccagcacatt

SEQ ID NO: 1198839 - DNA, 15 bp, Homo sapiens
aatcagccagcacat

SEQ ID NO: 1198840 - DNA, 15 bp, Homo sapiens
taatcagccagcaca

SEQ ID NO: 1198841 - DNA, 15 bp, Homo sapiens
gtaatcagccagcac

SEQ ID NO: 1198842 - DNA, 15 bp, Homo sapiens
agtaatcagccagca

SEQ ID NO: 1198843 - DNA, 15 bp, Homo sapiens
aagtaatcagccagc

SEQ ID NO: 1198844 - DNA, 15 bp, Homo sapiens
caagtaatcagccag

SEQ ID NO: 1198845 - DNA, 15 bp, Homo sapiens
acaagtaatcagcca

SEQ ID NO: 1198846 - DNA, 15 bp, Homo sapiens
gacaagtaatcagcc

SEQ ID NO: 1198847 - DNA, 15 bp, Homo sapiens
agacaagtaatcagc

SEQ ID NO: 1198848 - DNA, 15 bp, Homo sapiens
cagacaagtaatcag

SEQ ID NO: 1198849 - DNA, 15 bp, Homo sapiens
gcagacaagtaatca

SEQ ID NO: 1198850 - DNA, 15 bp, Homo sapiens
agcagacaagtaatc

SEQ ID NO: 1198851 - DNA, 15 bp, Homo sapiens
gagcagacaagtaat

SEQ ID NO: 1198852 - DNA, 15 bp, Homo sapiens
agagcagacaagtaa

SEQ ID NO: 1198853 - DNA, 15 bp, Homo sapiens
gagagcagacaagta

SEQ ID NO: 1198854 - DNA, 15 bp, Homo sapiens
tgagagcagacaagt

SEQ ID NO: 1198855 - DNA, 15 bp, Homo sapiens
atgagagcagacaag

SEQ ID NO: 1198856 - DNA, 15 bp, Homo sapiens
tatgagagcagacaa

SEQ ID NO: 1198857 - DNA, 15 bp, Homo sapiens
atatgagagcagaca

SEQ ID NO: 1198858 - DNA, 15 bp, Homo sapiens
gatatgagagcagac

SEQ ID NO: 1198859 - DNA, 15 bp, Homo sapiens
ggatatgagagcaga

SEQ ID NO: 1198860 - DNA, 15 bp, Homo sapiens
tggatatgagagcag

SEQ ID NO: 1198861 - DNA, 15 bp, Homo sapiens
atggatatgagagca

SEQ ID NO: 1198862 - DNA, 15 bp, Homo sapiens
aatggatatgagagc

SEQ ID NO: 1198863 - DNA, 15 bp, Homo sapiens
aaatggatatgagag

SEQ ID NO: 1198864 - DNA, 15 bp, Homo sapiens
gaaatggatatgaga

SEQ ID NO: 1198865 - DNA, 15 bp, Homo sapiens
ggaaatggatatgag

SEQ ID NO: 1198866 - DNA, 15 bp, Homo sapiens
gggaaatggatatga

SEQ ID NO: 1198867 - DNA, 15 bp, Homo sapiens
tgggaaatggatatg

SEQ ID NO: 1198868 - DNA, 15 bp, Homo sapiens
ttgggaaatggatat

SEQ ID NO: 1198869 - DNA, 15 bp, Homo sapiens
gttgggaaatggata

SEQ ID NO: 1198870 - DNA, 15 bp, Homo sapiens
tgttgggaaatggat

SEQ ID NO: 1198871 - DNA, 15 bp, Homo sapiens
atgttgggaaatgga

SEQ ID NO: 1198872 - DNA, 15 bp, Homo sapiens
aatgttgggaaatgg

SEQ ID NO: 1198873 - DNA, 15 bp, Homo sapiens
gaatgttgggaaatg

SEQ ID NO: 1198874 - DNA, 15 bp, Homo sapiens
ggaatgttgggaaat

SEQ ID NO: 1198875 - DNA, 15 bp, Homo sapiens
gggaatgttgggaaa

SEQ ID NO: 1198876 - DNA, 15 bp, Homo sapiens
agggaatgttgggaa

SEQ ID NO: 1198877 - DNA, 15 bp, Homo sapiens
aagggaatgttggga

SEQ ID NO: 1198878 - DNA, 15 bp, Homo sapiens
caagggaatgttggg

SEQ ID NO: 1198879 - DNA, 15 bp, Homo sapiens
tcaagggaatgttgg

SEQ ID NO: 1198880 - DNA, 15 bp, Homo sapiens
atcaagggaatgttg

SEQ ID NO: 1198881 - DNA, 15 bp, Homo sapiens
aatcaagggaatgtt

SEQ ID NO: 1198882 - DNA, 15 bp, Homo sapiens
aaatcaagggaatgt

SEQ ID NO: 1198883 - DNA, 15 bp, Homo sapiens
caaatcaagggaatg

SEQ ID NO: 1198884 - DNA, 15 bp, Homo sapiens
gcaaatcaagggaat

SEQ ID NO: 1198885 - DNA, 15 bp, Homo sapiens
agcaaatcaagggaa

SEQ ID NO: 1198886 - DNA, 15 bp, Homo sapiens
gagcaaatcaaggga

SEQ ID NO: 1198887 - DNA, 15 bp, Homo sapiens
cgagcaaatcaaggg

SEQ ID NO: 1198888 - DNA, 15 bp, Homo sapiens
acgagcaaatcaagg

SEQ ID NO: 1198889 - DNA, 15 bp, Homo sapiens
aacgagcaaatcaag

SEQ ID NO: 1198890 - DNA, 15 bp, Homo sapiens
aaacgagcaaatcaa

SEQ ID NO: 1198891 - DNA, 15 bp, Homo sapiens
aaaacgagcaaatca

SEQ ID NO: 1198892 - DNA, 15 bp, Homo sapiens
gaaaacgagcaaatc

SEQ ID NO: 1198893 - DNA, 15 bp, Homo sapiens
tgaaaacgagcaaat

SEQ ID NO: 1198894 - DNA, 15 bp, Homo sapiens
gtgaaaacgagcaaa

SEQ ID NO: 1198895 - DNA, 15 bp, Homo sapiens
tgtgaaaacgagcaa

SEQ ID NO: 1198896 - DNA, 15 bp, Homo sapiens
ttgtgaaaacgagca

SEQ ID NO: 1198897 - DNA, 15 bp, Homo sapiens
attgtgaaaacgagc

SEQ ID NO: 1198898 - DNA, 15 bp, Homo sapiens
cattgtgaaaacgag

SEQ ID NO: 1198899 - DNA, 15 bp, Homo sapiens
tcattgtgaaaacga

SEQ ID NO: 1198900 - DNA, 15 bp, Homo sapiens
ctcattgtgaaaacg

SEQ ID NO: 1198901 - DNA, 15 bp, Homo sapiens
gctcattgtgaaaac

SEQ ID NO: 1198902 - DNA, 15 bp, Homo sapiens
ggctcattgtgaaaa

SEQ ID NO: 1198903 - DNA, 15 bp, Homo sapiens
tggctcattgtgaaa

SEQ ID NO: 1198904 - DNA, 15 bp, Homo sapiens
gtggctcattgtgaa

SEQ ID NO: 1198905 - DNA, 15 bp, Homo sapiens
tgtggctcattgtga

SEQ ID NO: 1198906 - DNA, 15 bp, Homo sapiens
atgtggctcattgtg

SEQ ID NO: 1198907 - DNA, 15 bp, Homo sapiens
aatgtggctcattgt

SEQ ID NO: 1198908 - DNA, 15 bp, Homo sapiens
aaatgtggctcattg

SEQ ID NO: 1198909 - DNA, 15 bp, Homo sapiens
gaaatgtggctcatt

SEQ ID NO: 1198910 - DNA, 15 bp, Homo sapiens
agaaatgtggctcat

SEQ ID NO: 1198911 - DNA, 15 bp, Homo sapiens
gagaaatgtggctca

SEQ ID NO: 1198912 - DNA, 15 bp, Homo sapiens
tgagaaatgtggctc

SEQ ID NO: 1198913 - DNA, 15 bp, Homo sapiens
ctgagaaatgtggct

SEQ ID NO: 1198914 - DNA, 15 bp, Homo sapiens
gctgagaaatgtggc

SEQ ID NO: 1198915 - DNA, 15 bp, Homo sapiens
tgctgagaaatgtgg

SEQ ID NO: 1198916 - DNA, 15 bp, Homo sapiens
gtgctgagaaatgtg

SEQ ID NO: 1198917 - DNA, 15 bp, Homo sapiens
ggtgctgagaaatgt

SEQ ID NO: 1198918 - DNA, 15 bp, Homo sapiens
aggtgctgagaaatg

SEQ ID NO: 1198919 - DNA, 15 bp, Homo sapiens
taggtgctgagaaat

SEQ ID NO: 1198920 - DNA, 15 bp, Homo sapiens
ataggtgctgagaaa

SEQ ID NO: 1198921 - DNA, 15 bp, Homo sapiens
cataggtgctgagaa

SEQ ID NO: 1198922 - DNA, 15 bp, Homo sapiens
tcataggtgctgaga

SEQ ID NO: 1198923 - DNA, 15 bp, Homo sapiens
ctcataggtgctgag

SEQ ID NO: 1198924 - DNA, 15 bp, Homo sapiens
gctcataggtgctga

SEQ ID NO: 1198925 - DNA, 15 bp, Homo sapiens
agctcataggtgctg

SEQ ID NO: 1198926 - DNA, 15 bp, Homo sapiens
gagctcataggtgct

SEQ ID NO: 1198927 - DNA, 15 bp, Homo sapiens
agagctcataggtgc

SEQ ID NO: 1198928 - DNA, 15 bp, Homo sapiens
cagagctcataggtg

SEQ ID NO: 1198929 - DNA, 15 bp, Homo sapiens
ccagagctcataggt

SEQ ID NO: 1198930 - DNA, 15 bp, Homo sapiens
accagagctcatagg

SEQ ID NO: 1198931 - DNA, 15 bp, Homo sapiens
aaccagagctcatag

SEQ ID NO: 1198932 - DNA, 15 bp, Homo sapiens
aaaccagagctcata

SEQ ID NO: 1198933 - DNA, 15 bp, Homo sapiens
gaaaccagagctcat

SEQ ID NO: 1198934 - DNA, 15 bp, Homo sapiens
agaaaccagagctca

SEQ ID NO: 1198935 - DNA, 15 bp, Homo sapiens
cagaaaccagagctc

SEQ ID NO: 1198936 - DNA, 15 bp, Homo sapiens
ccagaaaccagagct

SEQ ID NO: 1198937 - DNA, 15 bp, Homo sapiens
cccagaaaccagagc

SEQ ID NO: 1198938 - DNA, 15 bp, Homo sapiens
acccagaaaccagag

SEQ ID NO: 1198939 - DNA, 15 bp, Homo sapiens
tacccagaaaccaga

SEQ ID NO: 1198940 - DNA, 15 bp, Homo sapiens
ttacccagaaaccag

SEQ ID NO: 1198941 - DNA, 15 bp, Homo sapiens
cttacccagaaacca

SEQ ID NO: 1198942 - DNA, 15 bp, Homo sapiens
acttacccagaaacc

SEQ ID NO: 1198943 - DNA, 15 bp, Homo sapiens
aacttacccagaaac

SEQ ID NO: 1198944 - DNA, 15 bp, Homo sapiens
aaacttacccagaaa

SEQ ID NO: 1198945 - DNA, 15 bp, Homo sapiens
caaacttacccagaa

SEQ ID NO: 1198946 - DNA, 15 bp, Homo sapiens
ccaaacttacccaga

SEQ ID NO: 1198947 - DNA, 15 bp, Homo sapiens
gccaaacttacccag

SEQ ID NO: 1198948 - DNA, 15 bp, Homo sapiens
ggccaaacttaccca

SEQ ID NO: 1198949 - DNA, 15 bp, Homo sapiens
tggccaaacttaccc

SEQ ID NO: 1198950 - DNA, 15 bp, Homo sapiens
ttggccaaacttacc

SEQ ID NO: 1198951 - DNA, 15 bp, Homo sapiens
attggccaaacttac

SEQ ID NO: 1198952 - DNA, 15 bp, Homo sapiens
tattggccaaactta

SEQ ID NO: 1198953 - DNA, 15 bp, Homo sapiens
ctattggccaaactt

SEQ ID NO: 1198954 - DNA, 15 bp, Homo sapiens
cctattggccaaact

SEQ ID NO: 1198955 - DNA, 15 bp, Homo sapiens
tcctattggccaaac

SEQ ID NO: 1198956 - DNA, 15 bp, Homo sapiens
ctcctattggccaaa

SEQ ID NO: 1198957 - DNA, 15 bp, Homo sapiens
cctcctattggccaa

SEQ ID NO: 1198958 - DNA, 15 bp, Homo sapiens
gcctcctattggcca

SEQ ID NO: 1198959 - DNA, 15 bp, Homo sapiens
tgcctcctattggcc

SEQ ID NO: 1198960 - DNA, 15 bp, Homo sapiens
atgcctcctattggc

SEQ ID NO: 1198961 - DNA, 15 bp, Homo sapiens
aatgcctcctattgg

SEQ ID NO: 1198962 - DNA, 15 bp, Homo sapiens
taatgcctcctattg

SEQ ID NO: 1198963 - DNA, 15 bp, Homo sapiens
ctaatgcctcctatt

SEQ ID NO: 1198964 - DNA, 15 bp, Homo sapiens
gctaatgcctcctat

SEQ ID NO: 1198965 - DNA, 15 bp, Homo sapiens
tgctaatgcctccta

SEQ ID NO: 1198966 - DNA, 15 bp, Homo sapiens
ttgctaatgcctcct

SEQ ID NO: 1198967 - DNA, 15 bp, Homo sapiens
tttgctaatgcctcc

SEQ ID NO: 1198968 - DNA, 15 bp, Homo sapiens
ttttgctaatgcctc

SEQ ID NO: 1198969 - DNA, 15 bp, Homo sapiens
cttttgctaatgcct

SEQ ID NO: 1198970 - DNA, 15 bp, Homo sapiens
tcttttgctaatgcc

SEQ ID NO: 1198971 - DNA, 15 bp, Homo sapiens
gtcttttgctaatgc

SEQ ID NO: 1198972 - DNA, 15 bp, Homo sapiens
tgtcttttgctaatg

SEQ ID NO: 1198973 - DNA, 15 bp, Homo sapiens
ttgtcttttgctaat

SEQ ID NO: 1198974 - DNA, 15 bp, Homo sapiens
tttgtcttttgctaa

SEQ ID NO: 1198975 - DNA, 15 bp, Homo sapiens
ttttgtcttttgcta

SEQ ID NO: 1198976 - DNA, 15 bp, Homo sapiens
cttttgtcttttgct

SEQ ID NO: 1198977 - DNA, 15 bp, Homo sapiens
tcttttgtcttttgc

SEQ ID NO: 1198978 - DNA, 15 bp, Homo sapiens
gtcttttgtcttttg

SEQ ID NO: 1198979 - DNA, 15 bp, Homo sapiens
tgtcttttgtctttt

SEQ ID NO: 1198980 - DNA, 15 bp, Homo sapiens
ttgtcttttgtcttt

SEQ ID NO: 1198981 - DNA, 15 bp, Homo sapiens
cttgtcttttgtctt

SEQ ID NO: 1198982 - DNA, 15 bp, Homo sapiens
tcttgtcttttgtct

SEQ ID NO: 1198983 - DNA, 15 bp, Homo sapiens
ttcttgtcttttgtc

SEQ ID NO: 1198984 - DNA, 15 bp, Homo sapiens
cttcttgtcttttgt

SEQ ID NO: 1198985 - DNA, 15 bp, Homo sapiens
tcttcttgtcttttg

SEQ ID NO: 1198986 - DNA, 15 bp, Homo sapiens
ttcttcttgtctttt

SEQ ID NO: 1198987 - DNA, 15 bp, Homo sapiens
cttcttcttgtcttt

SEQ ID NO: 1198988 - DNA, 15 bp, Homo sapiens
ccttcttcttgtctt

SEQ ID NO: 1198989 - DNA, 15 bp, Homo sapiens
cccttcttcttgtct

SEQ ID NO: 1198990 - DNA, 15 bp, Homo sapiens
tcccttcttcttgtc

SEQ ID NO: 1198991 - DNA, 15 bp, Homo sapiens
ctcccttcttcttgt

SEQ ID NO: 1198992 - DNA, 15 bp, Homo sapiens
tctcccttcttcttg

SEQ ID NO: 1198993 - DNA, 15 bp, Homo sapiens
ttctcccttcttctt

SEQ ID NO: 1198994 - DNA, 15 bp, Homo sapiens
cttctcccttcttct

SEQ ID NO: 1198995 - DNA, 15 bp, Homo sapiens
gcttctcccttcttc

SEQ ID NO: 1198996 - DNA, 15 bp, Homo sapiens
ggcttctcccttctt

SEQ ID NO: 1198997 - DNA, 15 bp, Homo sapiens
tggcttctcccttct

SEQ ID NO: 1198998 - DNA, 15 bp, Homo sapiens
ctggcttctcccttc

SEQ ID NO: 1198999 - DNA, 15 bp, Homo sapiens
cctggcttctccctt

SEQ ID NO: 1199000 - DNA, 15 bp, Homo sapiens
acctggcttctccct

SEQ ID NO: 1199001 - DNA, 15 bp, Homo sapiens
tacctggcttctccc

SEQ ID NO: 1199002 - DNA, 15 bp, Homo sapiens
atacctggcttctcc

SEQ ID NO: 1199003 - DNA, 15 bp, Homo sapiens
aatacctggcttctc

SEQ ID NO: 1199004 - DNA, 15 bp, Homo sapiens
taatacctggcttct

SEQ ID NO: 1199005 - DNA, 15 bp, Homo sapiens
ataatacctggcttc

SEQ ID NO: 1199006 - DNA, 15 bp, Homo sapiens
gataatacctggctt

SEQ ID NO: 1199007 - DNA, 15 bp, Homo sapiens
ggataatacctggct

SEQ ID NO: 1199008 - DNA, 15 bp, Homo sapiens
gggataatacctggc

SEQ ID NO: 1199009 - DNA, 15 bp, Homo sapiens
ggggataatacctgg

SEQ ID NO: 1199010 - DNA, 15 bp, Homo sapiens
gggggataatacctg

SEQ ID NO: 1199011 - DNA, 15 bp, Homo sapiens
agggggataatacct

SEQ ID NO: 1199012 - DNA, 15 bp, Homo sapiens
aagggggataatacc

SEQ ID NO: 1199013 - DNA, 15 bp, Homo sapiens
aaagggggataatac

SEQ ID NO: 1199014 - DNA, 15 bp, Homo sapiens
aaaagggggataata

SEQ ID NO: 1199015 - DNA, 15 bp, Homo sapiens
gaaaagggggataat

SEQ ID NO: 1199016 - DNA, 15 bp, Homo sapiens
agaaaagggggataa

SEQ ID NO: 1199017 - DNA, 15 bp, Homo sapiens
gagaaaagggggata

SEQ ID NO: 1199018 - DNA, 15 bp, Homo sapiens
agagaaaagggggat

SEQ ID NO: 1199019 - DNA, 15 bp, Homo sapiens
aagagaaaaggggga

SEQ ID NO: 1199020 - DNA, 15 bp, Homo sapiens
aaagagaaaaggggg

SEQ ID NO: 1199021 - DNA, 15 bp, Homo sapiens
caaagagaaaagggg

SEQ ID NO: 1199022 - DNA, 15 bp, Homo sapiens
gcaaagagaaaaggg

SEQ ID NO: 1199023 - DNA, 15 bp, Homo sapiens
ggcaaagagaaaagg

SEQ ID NO: 1199024 - DNA, 15 bp, Homo sapiens
aggcaaagagaaaag

SEQ ID NO: 1199025 - DNA, 15 bp, Homo sapiens
gaggcaaagagaaaa

SEQ ID NO: 1199026 - DNA, 15 bp, Homo sapiens
ggaggcaaagagaaa

SEQ ID NO: 1199027 - DNA, 15 bp, Homo sapiens
tggaggcaaagagaa

SEQ ID NO: 1199028 - DNA, 15 bp, Homo sapiens
ttggaggcaaagaga

SEQ ID NO: 1199029 - DNA, 15 bp, Homo sapiens
gttggaggcaaagag

SEQ ID NO: 1199030 - DNA, 15 bp, Homo sapiens
tgttggaggcaaaga

SEQ ID NO: 1199031 - DNA, 15 bp, Homo sapiens
ctgttggaggcaaag

SEQ ID NO: 1199032 - DNA, 15 bp, Homo sapiens
gctgttggaggcaaa

SEQ ID NO: 1199033 - DNA, 15 bp, Homo sapiens
cgctgttggaggcaa

SEQ ID NO: 1199034 - DNA, 15 bp, Homo sapiens
acgctgttggaggca

SEQ ID NO: 1199035 - DNA, 15 bp, Homo sapiens
gacgctgttggaggc

SEQ ID NO: 1199036 - DNA, 15 bp, Homo sapiens
agacgctgttggagg

SEQ ID NO: 1199037 - DNA, 15 bp, Homo sapiens
aagacgctgttggag

SEQ ID NO: 1199038 - DNA, 15 bp, Homo sapiens
gaagacgctgttgga

SEQ ID NO: 1199039 - DNA, 15 bp, Homo sapiens
tgaagacgctgttgg

SEQ ID NO: 1199040 - DNA, 15 bp, Homo sapiens
ctgaagacgctgttg

SEQ ID NO: 1199041 - DNA, 15 bp, Homo sapiens
gctgaagacgctgtt

SEQ ID NO: 1199042 - DNA, 15 bp, Homo sapiens
tgctgaagacgctgt

SEQ ID NO: 1199043 - DNA, 15 bp, Homo sapiens
ctgctgaagacgctg

SEQ ID NO: 1199044 - DNA, 15 bp, Homo sapiens
actgctgaagacgct

SEQ ID NO: 1199045 - DNA, 15 bp, Homo sapiens
tactgctgaagacgc

SEQ ID NO: 1199046 - DNA, 15 bp, Homo sapiens
gtactgctgaagacg

SEQ ID NO: 1199047 - DNA, 15 bp, Homo sapiens
agtactgctgaagac

SEQ ID NO: 1199048 - DNA, 15 bp, Homo sapiens
aagtactgctgaaga

SEQ ID NO: 1199049 - DNA, 15 bp, Homo sapiens
caagtactgctgaag

SEQ ID NO: 1199050 - DNA, 15 bp, Homo sapiens
gcaagtactgctgaa

SEQ ID NO: 1199051 - DNA, 15 bp, Homo sapiens
tgcaagtactgctga

SEQ ID NO: 1199052 - DNA, 15 bp, Homo sapiens
ctgcaagtactgctg

SEQ ID NO: 1199053 - DNA, 15 bp, Homo sapiens
gctgcaagtactgct

SEQ ID NO: 1199054 - DNA, 15 bp, Homo sapiens
agctgcaagtactgc

SEQ ID NO: 1199055 - DNA, 15 bp, Homo sapiens
gagctgcaagtactg

SEQ ID NO: 1199056 - DNA, 15 bp, Homo sapiens
agagctgcaagtact

SEQ ID NO: 1199057 - DNA, 15 bp, Homo sapiens
aagagctgcaagtac

SEQ ID NO: 1199058 - DNA, 15 bp, Homo sapiens
caagagctgcaagta

SEQ ID NO: 1199059 - DNA, 15 bp, Homo sapiens
ccaagagctgcaagt

SEQ ID NO: 1199060 - DNA, 15 bp, Homo sapiens
gccaagagctgcaag

SEQ ID NO: 1199061 - DNA, 15 bp, Homo sapiens
agccaagagctgcaa

SEQ ID NO: 1199062 - DNA, 15 bp, Homo sapiens
gagccaagagctgca

SEQ ID NO: 1199063 - DNA, 15 bp, Homo sapiens
ggagccaagagctgc

SEQ ID NO: 1199064 - DNA, 15 bp, Homo sapiens
tggagccaagagctg

SEQ ID NO: 1199065 - DNA, 15 bp, Homo sapiens
atggagccaagagct

SEQ ID NO: 1199066 - DNA, 15 bp, Homo sapiens
tatggagccaagagc

SEQ ID NO: 1199067 - DNA, 15 bp, Homo sapiens
ttatggagccaagag

SEQ ID NO: 1199068 - DNA, 15 bp, Homo sapiens
gttatggagccaaga

SEQ ID NO: 1199069 - DNA, 15 bp, Homo sapiens
ggttatggagccaag

SEQ ID NO: 1199070 - DNA, 15 bp, Homo sapiens
gggttatggagccaa

SEQ ID NO: 1199071 - DNA, 15 bp, Homo sapiens
ggggttatggagcca

SEQ ID NO: 1199072 - DNA, 15 bp, Homo sapiens
aggggttatggagcc

SEQ ID NO: 1199073 - DNA, 15 bp, Homo sapiens
aaggggttatggagc

SEQ ID NO: 1199074 - DNA, 15 bp, Homo sapiens
gaaggggttatggag

SEQ ID NO: 1199075 - DNA, 15 bp, Homo sapiens
ggaaggggttatgga

SEQ ID NO: 1199076 - DNA, 15 bp, Homo sapiens
aggaaggggttatgg

SEQ ID NO: 1199077 - DNA, 15 bp, Homo sapiens
gaggaaggggttatg

SEQ ID NO: 1199078 - DNA, 15 bp, Homo sapiens
ggaggaaggggttat

SEQ ID NO: 1199079 - DNA, 15 bp, Homo sapiens
gggaggaaggggtta

SEQ ID NO: 1199080 - DNA, 15 bp, Homo sapiens
tgggaggaaggggtt

SEQ ID NO: 1199081 - DNA, 15 bp, Homo sapiens
ctgggaggaaggggt

SEQ ID NO: 1199082 - DNA, 15 bp, Homo sapiens
actgggaggaagggg

SEQ ID NO: 1199083 - DNA, 15 bp, Homo sapiens
cactgggaggaaggg

SEQ ID NO: 1199084 - DNA, 15 bp, Homo sapiens
gcactgggaggaagg

SEQ ID NO: 1199085 - DNA, 15 bp, Homo sapiens
tgcactgggaggaag

SEQ ID NO: 1199086 - DNA, 15 bp, Homo sapiens
ttgcactgggaggaa

SEQ ID NO: 1199087 - DNA, 15 bp, Homo sapiens
cttgcactgggagga

SEQ ID NO: 1199088 - DNA, 15 bp, Homo sapiens
gcttgcactgggagg

SEQ ID NO: 1199089 - DNA, 15 bp, Homo sapiens
tgcttgcactgggag

SEQ ID NO: 1199090 - DNA, 15 bp, Homo sapiens
ctgcttgcactggga

SEQ ID NO: 1199091 - DNA, 15 bp, Homo sapiens
gctgcttgcactggg

SEQ ID NO: 1199092 - DNA, 15 bp, Homo sapiens
tgctgcttgcactgg

SEQ ID NO: 1199093 - DNA, 15 bp, Homo sapiens
atgctgcttgcactg

SEQ ID NO: 1199094 - DNA, 15 bp, Homo sapiens
aatgctgcttgcact

SEQ ID NO: 1199095 - DNA, 15 bp, Homo sapiens
gaatgctgcttgcac

SEQ ID NO: 1199096 - DNA, 15 bp, Homo sapiens
agaatgctgcttgca

SEQ ID NO: 1199097 - DNA, 15 bp, Homo sapiens
cagaatgctgcttgc

SEQ ID NO: 1199098 - DNA, 15 bp, Homo sapiens
acagaatgctgcttg

SEQ ID NO: 1199099 - DNA, 15 bp, Homo sapiens
aacagaatgctgctt

SEQ ID NO: 1199100 - DNA, 15 bp, Homo sapiens
gaacagaatgctgct

SEQ ID NO: 1199101 - DNA, 15 bp, Homo sapiens
ggaacagaatgctgc

SEQ ID NO: 1199102 - DNA, 15 bp, Homo sapiens
gggaacagaatgctg

SEQ ID NO: 1199103 - DNA, 15 bp, Homo sapiens
ggggaacagaatgct

SEQ ID NO: 1199104 - DNA, 15 bp, Homo sapiens
aggggaacagaatgc

SEQ ID NO: 1199105 - DNA, 15 bp, Homo sapiens
taggggaacagaatg

SEQ ID NO: 1199106 - DNA, 15 bp, Homo sapiens
ctaggggaacagaat

SEQ ID NO: 1199107 - DNA, 15 bp, Homo sapiens
actaggggaacagaa

SEQ ID NO: 1199108 - DNA, 15 bp, Homo sapiens
cactaggggaacaga

SEQ ID NO: 1199109 - DNA, 15 bp, Homo sapiens
ccactaggggaacag

SEQ ID NO: 1199110 - DNA, 15 bp, Homo sapiens
tccactaggggaaca

SEQ ID NO: 1199111 - DNA, 15 bp, Homo sapiens
gtccactaggggaac

SEQ ID NO: 1199112 - DNA, 15 bp, Homo sapiens
ggtccactaggggaa

SEQ ID NO: 1199113 - DNA, 15 bp, Homo sapiens
aggtccactagggga

SEQ ID NO: 1199114 - DNA, 15 bp, Homo sapiens
taggtccactagggg

SEQ ID NO: 1199115 - DNA, 15 bp, Homo sapiens
ctaggtccactaggg

SEQ ID NO: 1199116 - DNA, 15 bp, Homo sapiens
tctaggtccactagg

SEQ ID NO: 1199117 - DNA, 15 bp, Homo sapiens
atctaggtccactag

SEQ ID NO: 1199118 - DNA, 15 bp, Homo sapiens
gatctaggtccacta

SEQ ID NO: 1199119 - DNA, 15 bp, Homo sapiens
ggatctaggtccact

SEQ ID NO: 1199120 - DNA, 15 bp, Homo sapiens
tggatctaggtccac

SEQ ID NO: 1199121 - DNA, 15 bp, Homo sapiens
atggatctaggtcca

SEQ ID NO: 1199122 - DNA, 15 bp, Homo sapiens
catggatctaggtcc

SEQ ID NO: 1199123 - DNA, 15 bp, Homo sapiens
gcatggatctaggtc

SEQ ID NO: 1199124 - DNA, 15 bp, Homo sapiens
tgcatggatctaggt

SEQ ID NO: 1199125 - DNA, 15 bp, Homo sapiens
ctgcatggatctagg

SEQ ID NO: 1199126 - DNA, 15 bp, Homo sapiens
tctgcatggatctag

SEQ ID NO: 1199127 - DNA, 15 bp, Homo sapiens
atctgcatggatcta

SEQ ID NO: 1199128 - DNA, 15 bp, Homo sapiens
catctgcatggatct

SEQ ID NO: 1199129 - DNA, 15 bp, Homo sapiens
ccatctgcatggatc

SEQ ID NO: 1199130 - DNA, 15 bp, Homo sapiens
accatctgcatggat

SEQ ID NO: 1199131 - DNA, 15 bp, Homo sapiens
aaccatctgcatgga

SEQ ID NO: 1199132 - DNA, 15 bp, Homo sapiens
aaaccatctgcatgg

SEQ ID NO: 1199133 - DNA, 15 bp, Homo sapiens
aaaaccatctgcatg

SEQ ID NO: 1199134 - DNA, 15 bp, Homo sapiens
aaaaaccatctgcat

SEQ ID NO: 1199135 - DNA, 15 bp, Homo sapiens
gaaaaaccatctgca

SEQ ID NO: 1199136 - DNA, 15 bp, Homo sapiens
ggaaaaaccatctgc

SEQ ID NO: 1199137 - DNA, 15 bp, Homo sapiens
gggaaaaaccatctg

SEQ ID NO: 1199138 - DNA, 15 bp, Homo sapiens
ggggaaaaaccatct

SEQ ID NO: 1199139 - DNA, 15 bp, Homo sapiens
aggggaaaaaccatc

SEQ ID NO: 1199140 - DNA, 15 bp, Homo sapiens
gaggggaaaaaccat

SEQ ID NO: 1199141 - DNA, 15 bp, Homo sapiens
agaggggaaaaacca

SEQ ID NO: 1199142 - DNA, 15 bp, Homo sapiens
gagaggggaaaaacc

SEQ ID NO: 1199143 - DNA, 15 bp, Homo sapiens
agagaggggaaaaac

SEQ ID NO: 1199144 - DNA, 15 bp, Homo sapiens
cagagaggggaaaaa

SEQ ID NO: 1199145 - DNA, 15 bp, Homo sapiens
tcagagaggggaaaa

SEQ ID NO: 1199146 - DNA, 15 bp, Homo sapiens
ctcagagaggggaaa

SEQ ID NO: 1199147 - DNA, 15 bp, Homo sapiens
actcagagaggggaa

SEQ ID NO: 1199148 - DNA, 15 bp, Homo sapiens
tactcagagagggga

SEQ ID NO: 1199149 - DNA, 15 bp, Homo sapiens
atactcagagagggg

SEQ ID NO: 1199150 - DNA, 15 bp, Homo sapiens
gatactcagagaggg

SEQ ID NO: 1199151 - DNA, 15 bp, Homo sapiens
agatactcagagagg

SEQ ID NO: 1199152 - DNA, 15 bp, Homo sapiens
gagatactcagagag

SEQ ID NO: 1199153 - DNA, 15 bp, Homo sapiens
agagatactcagaga

SEQ ID NO: 1199154 - DNA, 15 bp, Homo sapiens
tagagatactcagag

SEQ ID NO: 1199155 - DNA, 15 bp, Homo sapiens
ctagagatactcaga

SEQ ID NO: 1199156 - DNA, 15 bp, Homo sapiens
gctagagatactcag

SEQ ID NO: 1199157 - DNA, 15 bp, Homo sapiens
ggctagagatactca

SEQ ID NO: 1199158 - DNA, 15 bp, Homo sapiens
tggctagagatactc

SEQ ID NO: 1199159 - DNA, 15 bp, Homo sapiens
atggctagagatact

SEQ ID NO: 1199160 - DNA, 15 bp, Homo sapiens
tatggctagagatac

SEQ ID NO: 1199161 - DNA, 15 bp, Homo sapiens
ctatggctagagata

SEQ ID NO: 1199162 - DNA, 15 bp, Homo sapiens
cctatggctagagat

SEQ ID NO: 1199163 - DNA, 15 bp, Homo sapiens
ccctatggctagaga

SEQ ID NO: 1199164 - DNA, 15 bp, Homo sapiens
tccctatggctagag

SEQ ID NO: 1199165 - DNA, 15 bp, Homo sapiens
atccctatggctaga

SEQ ID NO: 1199166 - DNA, 15 bp, Homo sapiens
catccctatggctag

SEQ ID NO: 1199167 - DNA, 15 bp, Homo sapiens
ccatccctatggcta

SEQ ID NO: 1199168 - DNA, 15 bp, Homo sapiens
accatccctatggct

SEQ ID NO: 1199169 - DNA, 15 bp, Homo sapiens
taccatccctatggc

SEQ ID NO: 1199170 - DNA, 15 bp, Homo sapiens
ctaccatccctatgg

SEQ ID NO: 1199171 - DNA, 15 bp, Homo sapiens
actaccatccctatg

SEQ ID NO: 1199172 - DNA, 15 bp, Homo sapiens
cactaccatccctat

SEQ ID NO: 1199173 - DNA, 15 bp, Homo sapiens
tcactaccatcccta

SEQ ID NO: 1199174 - DNA, 15 bp, Homo sapiens
atcactaccatccct

SEQ ID NO: 1199175 - DNA, 15 bp, Homo sapiens
aatcactaccatccc

SEQ ID NO: 1199176 - DNA, 15 bp, Homo sapiens
aaatcactaccatcc

SEQ ID NO: 1199177 - DNA, 15 bp, Homo sapiens
aaaatcactaccatc

SEQ ID NO: 1199178 - DNA, 15 bp, Homo sapiens
taaaatcactaccat

SEQ ID NO: 1199179 - DNA, 15 bp, Homo sapiens
ctaaaatcactacca

SEQ ID NO: 1199180 - DNA, 15 bp, Homo sapiens
cctaaaatcactacc

SEQ ID NO: 1199181 - DNA, 15 bp, Homo sapiens
tcctaaaatcactac

SEQ ID NO: 1199182 - DNA, 15 bp, Homo sapiens
atcctaaaatcacta

SEQ ID NO: 1199183 - DNA, 15 bp, Homo sapiens
catcctaaaatcact

SEQ ID NO: 1199184 - DNA, 15 bp, Homo sapiens
acatcctaaaatcac

SEQ ID NO: 1199185 - DNA, 15 bp, Homo sapiens
aacatcctaaaatca

SEQ ID NO: 1199186 - DNA, 15 bp, Homo sapiens
caacatcctaaaatc

SEQ ID NO: 1199187 - DNA, 15 bp, Homo sapiens
acaacatcctaaaat

SEQ ID NO: 1199188 - DNA, 15 bp, Homo sapiens
aacaacatcctaaaa

SEQ ID NO: 1199189 - DNA, 15 bp, Homo sapiens
aaacaacatcctaaa

SEQ ID NO: 1199190 - DNA, 15 bp, Homo sapiens
aaaacaacatcctaa

SEQ ID NO: 1199191 - DNA, 15 bp, Homo sapiens
aaaaacaacatccta

SEQ ID NO: 1199192 - DNA, 15 bp, Homo sapiens
aaaaaacaacatcct

SEQ ID NO: 1199193 - DNA, 15 bp, Homo sapiens
gaaaaaacaacatcc

SEQ ID NO: 1199194 - DNA, 15 bp, Homo sapiens
agaaaaaacaacatc

SEQ ID NO: 1199195 - DNA, 15 bp, Homo sapiens
cagaaaaaacaacat

SEQ ID NO: 1199196 - DNA, 15 bp, Homo sapiens
ccagaaaaaacaaca

SEQ ID NO: 1199197 - DNA, 15 bp, Homo sapiens
cccagaaaaaacaac

SEQ ID NO: 1199198 - DNA, 15 bp, Homo sapiens
acccagaaaaaacaa

SEQ ID NO: 1199199 - DNA, 15 bp, Homo sapiens
aacccagaaaaaaca

SEQ ID NO: 1199200 - DNA, 15 bp, Homo sapiens
caacccagaaaaaac

SEQ ID NO: 1199201 - DNA, 15 bp, Homo sapiens
tcaacccagaaaaaa

SEQ ID NO: 1199202 - DNA, 15 bp, Homo sapiens
gtcaacccagaaaaa

SEQ ID NO: 1199203 - DNA, 15 bp, Homo sapiens
agtcaacccagaaaa

SEQ ID NO: 1199204 - DNA, 15 bp, Homo sapiens
gagtcaacccagaaa

SEQ ID NO: 1199205 - DNA, 15 bp, Homo sapiens
ggagtcaacccagaa

SEQ ID NO: 1199206 - DNA, 15 bp, Homo sapiens
gggagtcaacccaga

SEQ ID NO: 1199207 - DNA, 15 bp, Homo sapiens
ggggagtcaacccag

SEQ ID NO: 1199208 - DNA, 15 bp, Homo sapiens
aggggagtcaaccca

SEQ ID NO: 1199209 - DNA, 15 bp, Homo sapiens
gaggggagtcaaccc

SEQ ID NO: 1199210 - DNA, 15 bp, Homo sapiens
ggaggggagtcaacc

SEQ ID NO: 1199211 - DNA, 15 bp, Homo sapiens
gggaggggagtcaac

SEQ ID NO: 1199212 - DNA, 15 bp, Homo sapiens
agggaggggagtcaa

SEQ ID NO: 1199213 - DNA, 15 bp, Homo sapiens
aagggaggggagtca

SEQ ID NO: 1199214 - DNA, 15 bp, Homo sapiens
taagggaggggagtc

SEQ ID NO: 1199215 - DNA, 15 bp, Homo sapiens
ataagggaggggagt

SEQ ID NO: 1199216 - DNA, 15 bp, Homo sapiens
aataagggaggggag

SEQ ID NO: 1199217 - DNA, 15 bp, Homo sapiens
aaataagggagggga

SEQ ID NO: 1199218 - DNA, 15 bp, Homo sapiens
taaataagggagggg

SEQ ID NO: 1199219 - DNA, 15 bp, Homo sapiens
ctaaataagggaggg

SEQ ID NO: 1199220 - DNA, 15 bp, Homo sapiens
gctaaataagggagg

SEQ ID NO: 1199221 - DNA, 15 bp, Homo sapiens
agctaaataagggag

SEQ ID NO: 1199222 - DNA, 15 bp, Homo sapiens
tagctaaataaggga

SEQ ID NO: 1199223 - DNA, 15 bp, Homo sapiens
gtagctaaataaggg

SEQ ID NO: 1199224 - DNA, 15 bp, Homo sapiens
agtagctaaataagg

SEQ ID NO: 1199225 - DNA, 15 bp, Homo sapiens
gagtagctaaataag

SEQ ID NO: 1199226 - DNA, 15 bp, Homo sapiens
tgagtagctaaataa

SEQ ID NO: 1199227 - DNA, 15 bp, Homo sapiens
atgagtagctaaata

SEQ ID NO: 1199228 - DNA, 15 bp, Homo sapiens
gatgagtagctaaat

SEQ ID NO: 1199229 - DNA, 15 bp, Homo sapiens
agatgagtagctaaa

SEQ ID NO: 1199230 - DNA, 15 bp, Homo sapiens
gagatgagtagctaa

SEQ ID NO: 1199231 - DNA, 15 bp, Homo sapiens
agagatgagtagcta

SEQ ID NO: 1199232 - DNA, 15 bp, Homo sapiens
aagagatgagtagct

SEQ ID NO: 1199233 - DNA, 15 bp, Homo sapiens
gaagagatgagtagc

SEQ ID NO: 1199234 - DNA, 15 bp, Homo sapiens
ggaagagatgagtag

SEQ ID NO: 1199235 - DNA, 15 bp, Homo sapiens
tggaagagatgagta

SEQ ID NO: 1199236 - DNA, 15 bp, Homo sapiens
atggaagagatgagt

SEQ ID NO: 1199237 - DNA, 15 bp, Homo sapiens
gatggaagagatgag

SEQ ID NO: 1199238 - DNA, 15 bp, Homo sapiens
tgatggaagagatga

SEQ ID NO: 1199239 - DNA, 15 bp, Homo sapiens
atgatggaagagatg

SEQ ID NO: 1199240 - DNA, 15 bp, Homo sapiens
gatgatggaagagat

SEQ ID NO: 1199241 - DNA, 15 bp, Homo sapiens
agatgatggaagaga

SEQ ID NO: 1199242 - DNA, 15 bp, Homo sapiens
cagatgatggaagag

SEQ ID NO: 1199243 - DNA, 15 bp, Homo sapiens
acagatgatggaaga

SEQ ID NO: 1199244 - DNA, 15 bp, Homo sapiens
tacagatgatggaag

SEQ ID NO: 1199245 - DNA, 15 bp, Homo sapiens
atacagatgatggaa

SEQ ID NO: 1199246 - DNA, 15 bp, Homo sapiens
aatacagatgatgga

SEQ ID NO: 1199247 - DNA, 15 bp, Homo sapiens
taatacagatgatgg

SEQ ID NO: 1199248 - DNA, 15 bp, Homo sapiens
ttaatacagatgatg

SEQ ID NO: 1199249 - DNA, 15 bp, Homo sapiens
tttaatacagatgat

SEQ ID NO: 1199250 - DNA, 15 bp, Homo sapiens
atttaatacagatga

SEQ ID NO: 1199251 - DNA, 15 bp, Homo sapiens
gatttaatacagatg

SEQ ID NO: 1199252 - DNA, 15 bp, Homo sapiens
ggatttaatacagat

SEQ ID NO: 1199253 - DNA, 15 bp, Homo sapiens
aggatttaatacaga

SEQ ID NO: 1199254 - DNA, 15 bp, Homo sapiens
gaggatttaatacag

SEQ ID NO: 1199255 - DNA, 15 bp, Homo sapiens
agaggatttaataca

SEQ ID NO: 1199256 - DNA, 15 bp, Homo sapiens
gagaggatttaatac

SEQ ID NO: 1199257 - DNA, 15 bp, Homo sapiens
agagaggatttaata

SEQ ID NO: 1199258 - DNA, 15 bp, Homo sapiens
cagagaggatttaat

SEQ ID NO: 1199259 - DNA, 15 bp, Homo sapiens
acagagaggatttaa

SEQ ID NO: 1199260 - DNA, 15 bp, Homo sapiens
aacagagaggattta

SEQ ID NO: 1199261 - DNA, 15 bp, Homo sapiens
caacagagaggattt

SEQ ID NO: 1199262 - DNA, 15 bp, Homo sapiens
tcaacagagaggatt

SEQ ID NO: 1199263 - DNA, 15 bp, Homo sapiens
ttcaacagagaggat

SEQ ID NO: 1199264 - DNA, 15 bp, Homo sapiens
attcaacagagagga

SEQ ID NO: 1199265 - DNA, 15 bp, Homo sapiens
cattcaacagagagg

SEQ ID NO: 1199266 - DNA, 15 bp, Homo sapiens
acattcaacagagag

SEQ ID NO: 1199267 - DNA, 15 bp, Homo sapiens
cacattcaacagaga

SEQ ID NO: 1199268 - DNA, 15 bp, Homo sapiens
gcacattcaacagag

SEQ ID NO: 1199269 - DNA, 15 bp, Homo sapiens
tgcacattcaacaga

SEQ ID NO: 1199270 - DNA, 15 bp, Homo sapiens
gtgcacattcaacag

SEQ ID NO: 1199271 - DNA, 15 bp, Homo sapiens
tgtgcacattcaaca

SEQ ID NO: 1199272 - DNA, 15 bp, Homo sapiens
ctgtgcacattcaac

SEQ ID NO: 1199273 - DNA, 15 bp, Homo sapiens
actgtgcacattcaa

SEQ ID NO: 1199274 - DNA, 15 bp, Homo sapiens
cactgtgcacattca

SEQ ID NO: 1199275 - DNA, 15 bp, Homo sapiens
ccactgtgcacattc

SEQ ID NO: 1199276 - DNA, 15 bp, Homo sapiens
gccactgtgcacatt

SEQ ID NO: 1199277 - DNA, 15 bp, Homo sapiens
agccactgtgcacat

SEQ ID NO: 1199278 - DNA, 15 bp, Homo sapiens
gagccactgtgcaca

SEQ ID NO: 1199279 - DNA, 15 bp, Homo sapiens
tgagccactgtgcac

SEQ ID NO: 1199280 - DNA, 15 bp, Homo sapiens
gtgagccactgtgca

SEQ ID NO: 1199281 - DNA, 15 bp, Homo sapiens
ggtgctgggattata

SEQ ID NO: 1199282 - DNA, 15 bp, Homo sapiens
aggtgctgggattat

SEQ ID NO: 1199283 - DNA, 15 bp, Homo sapiens
aaaggtgctgggatt

SEQ ID NO: 1199284 - DNA, 15 bp, Homo sapiens
caaaggtgctgggat

SEQ ID NO: 1199285 - DNA, 15 bp, Homo sapiens
ccaaaggtgctggga

SEQ ID NO: 1199286 - DNA, 15 bp, Homo sapiens
cccaaaggtgctggg

SEQ ID NO: 1199287 - DNA, 15 bp, Homo sapiens
ccccaaaggtgctgg

SEQ ID NO: 1199288 - DNA, 15 bp, Homo sapiens
cccccaaaggtgctg

SEQ ID NO: 1199289 - DNA, 15 bp, Homo sapiens
acccccaaaggtgct

SEQ ID NO: 1199290 - DNA, 15 bp, Homo sapiens
gacccccaaaggtgc

SEQ ID NO: 1199291 - DNA, 15 bp, Homo sapiens
tgacccccaaaggtg

SEQ ID NO: 1199292 - DNA, 15 bp, Homo sapiens
ttgacccccaaaggt

SEQ ID NO: 1199293 - DNA, 15 bp, Homo sapiens
cttgacccccaaagg

SEQ ID NO: 1199294 - DNA, 15 bp, Homo sapiens
ccttgacccccaaag

SEQ ID NO: 1199295 - DNA, 15 bp, Homo sapiens
gccttgacccccaaa

SEQ ID NO: 1199296 - DNA, 15 bp, Homo sapiens
tgccttgacccccaa

SEQ ID NO: 1199297 - DNA, 15 bp, Homo sapiens
ctgccttgaccccca

SEQ ID NO: 1199298 - DNA, 15 bp, Homo sapiens
cctgccttgaccccc

SEQ ID NO: 1199299 - DNA, 15 bp, Homo sapiens
tcctgccttgacccc

SEQ ID NO: 1199300 - DNA, 15 bp, Homo sapiens
ctcctgccttgaccc

SEQ ID NO: 1199301 - DNA, 15 bp, Homo sapiens
cctcctgccttgacc

SEQ ID NO: 1199302 - DNA, 15 bp, Homo sapiens
tcctcctgccttgac

SEQ ID NO: 1199303 - DNA, 15 bp, Homo sapiens
atcctcctgccttga

SEQ ID NO: 1199304 - DNA, 15 bp, Homo sapiens
gatcctcctgccttg

SEQ ID NO: 1199305 - DNA, 15 bp, Homo sapiens
cgatcctcctgcctt

SEQ ID NO: 1199306 - DNA, 15 bp, Homo sapiens
gcgatcctcctgcct

SEQ ID NO: 1199307 - DNA, 15 bp, Homo sapiens
atcaagcgatcctcc

SEQ ID NO: 1199308 - DNA, 15 bp, Homo sapiens
aatcaagcgatcctc

SEQ ID NO: 1199309 - DNA, 15 bp, Homo sapiens
gaatcaagcgatcct

SEQ ID NO: 1199310 - DNA, 15 bp, Homo sapiens
ggaatcaagcgatcc

SEQ ID NO: 1199311 - DNA, 15 bp, Homo sapiens
tggaatcaagcgatc

SEQ ID NO: 1199312 - DNA, 15 bp, Homo sapiens
ctggaatcaagcgat

SEQ ID NO: 1199313 - DNA, 15 bp, Homo sapiens
cctggaatcaagcga

SEQ ID NO: 1199314 - DNA, 15 bp, Homo sapiens
tcctggaatcaagcg

SEQ ID NO: 1199315 - DNA, 15 bp, Homo sapiens
ctcctggaatcaagc

SEQ ID NO: 1199316 - DNA, 15 bp, Homo sapiens
actcctggaatcaag

SEQ ID NO: 1199317 - DNA, 15 bp, Homo sapiens
aactcctggaatcaa

SEQ ID NO: 1199318 - DNA, 15 bp, Homo sapiens
caactcctggaatca

SEQ ID NO: 1199319 - DNA, 15 bp, Homo sapiens
ccaactcctggaatc

SEQ ID NO: 1199320 - DNA, 15 bp, Homo sapiens
tccaactcctggaat

SEQ ID NO: 1199321 - DNA, 15 bp, Homo sapiens
ctccaactcctggaa

SEQ ID NO: 1199322 - DNA, 15 bp, Homo sapiens
tctccaactcctgga

SEQ ID NO: 1199323 - DNA, 15 bp, Homo sapiens
tgctggtctccaact

SEQ ID NO: 1199324 - DNA, 15 bp, Homo sapiens
atgctggtctccaac

SEQ ID NO: 1199325 - DNA, 15 bp, Homo sapiens
catgctggtctccaa

SEQ ID NO: 1199326 - DNA, 15 bp, Homo sapiens
ccatgctggtctcca

SEQ ID NO: 1199327 - DNA, 15 bp, Homo sapiens
cccatgctggtctcc

SEQ ID NO: 1199328 - DNA, 15 bp, Homo sapiens
acccatgctggtctc

SEQ ID NO: 1199329 - DNA, 15 bp, Homo sapiens
tacccatgctggtct

SEQ ID NO: 1199330 - DNA, 15 bp, Homo sapiens
ttacccatgctggtc

SEQ ID NO: 1199331 - DNA, 15 bp, Homo sapiens
gttacccatgctggt

SEQ ID NO: 1199332 - DNA, 15 bp, Homo sapiens
tgttacccatgctgg

SEQ ID NO: 1199333 - DNA, 15 bp, Homo sapiens
ctgttacccatgctg

SEQ ID NO: 1199334 - DNA, 15 bp, Homo sapiens
tctgttacccatgct

SEQ ID NO: 1199335 - DNA, 15 bp, Homo sapiens
ctctgttacccatgc

SEQ ID NO: 1199336 - DNA, 15 bp, Homo sapiens
actctgttacccatg

SEQ ID NO: 1199337 - DNA, 15 bp, Homo sapiens
cactctgttacccat

SEQ ID NO: 1199338 - DNA, 15 bp, Homo sapiens
tcactctgttaccca

SEQ ID NO: 1199339 - DNA, 15 bp, Homo sapiens
ctcactctgttaccc

SEQ ID NO: 1199340 - DNA, 15 bp, Homo sapiens
tctcactctgttacc

SEQ ID NO: 1199341 - DNA, 15 bp, Homo sapiens
gtctcactctgttac

SEQ ID NO: 1199342 - DNA, 15 bp, Homo sapiens
ggtctcactctgtta

SEQ ID NO: 1199343 - DNA, 15 bp, Homo sapiens
aggtctcactctgtt

SEQ ID NO: 1199344 - DNA, 15 bp, Homo sapiens
taaggtctcactctg

SEQ ID NO: 1199345 - DNA, 15 bp, Homo sapiens
ataaggtctcactct

SEQ ID NO: 1199346 - DNA, 15 bp, Homo sapiens
gataaggtctcactc

SEQ ID NO: 1199347 - DNA, 15 bp, Homo sapiens
agataaggtctcact

SEQ ID NO: 1199348 - DNA, 15 bp, Homo sapiens
gagataaggtctcac

SEQ ID NO: 1199349 - DNA, 15 bp, Homo sapiens
agagataaggtctca

SEQ ID NO: 1199350 - DNA, 15 bp, Homo sapiens
gagagataaggtctc

SEQ ID NO: 1199351 - DNA, 15 bp, Homo sapiens
ggagagataaggtct

SEQ ID NO: 1199352 - DNA, 15 bp, Homo sapiens
aggagagataaggtc

SEQ ID NO: 1199353 - DNA, 15 bp, Homo sapiens
taggagagataaggt

SEQ ID NO: 1199354 - DNA, 15 bp, Homo sapiens
ttaggagagataagg

SEQ ID NO: 1199355 - DNA, 15 bp, Homo sapiens
tttaggagagataag

SEQ ID NO: 1199356 - DNA, 15 bp, Homo sapiens
ttttaggagagataa

SEQ ID NO: 1199357 - DNA, 15 bp, Homo sapiens
tttttaggagagata

SEQ ID NO: 1199358 - DNA, 15 bp, Homo sapiens
atttttaggagagat

SEQ ID NO: 1199359 - DNA, 15 bp, Homo sapiens
ttatttttaggagag

SEQ ID NO: 1199360 - DNA, 15 bp, Homo sapiens
tttatttttaggaga

SEQ ID NO: 1199361 - DNA, 15 bp, Homo sapiens
ttttatttttaggag

SEQ ID NO: 1199362 - DNA, 15 bp, Homo sapiens
tttttatttttagga

SEQ ID NO: 1199363 - DNA, 15 bp, Homo sapiens
atttttatttttagg

SEQ ID NO: 1199364 - DNA, 15 bp, Homo sapiens
tatttttatttttag

SEQ ID NO: 1199365 - DNA, 15 bp, Homo sapiens
aaatttatttattta

SEQ ID NO: 1199366 - DNA, 15 bp, Homo sapiens
aaaatttatttattt

SEQ ID NO: 1199367 - DNA, 15 bp, Homo sapiens
taaaatttatttatt

SEQ ID NO: 1199368 - DNA, 15 bp, Homo sapiens
ttaaaatttatttat

SEQ ID NO: 1199369 - DNA, 15 bp, Homo sapiens
tttaaaatttattta

SEQ ID NO: 1199370 - DNA, 15 bp, Homo sapiens
ttttaaaatttattt

SEQ ID NO: 1199371 - DNA, 15 bp, Homo sapiens
tttttaaaatttatt

SEQ ID NO: 1199372 - DNA, 15 bp, Homo sapiens
ttttttaaaatttat

SEQ ID NO: 1199373 - DNA, 15 bp, Homo sapiens
cttttttaaaattta

SEQ ID NO: 1199374 - DNA, 15 bp, Homo sapiens
gcttttttaaaattt

SEQ ID NO: 1199375 - DNA, 15 bp, Homo sapiens
agcttttttaaaatt

SEQ ID NO: 1199376 - DNA, 15 bp, Homo sapiens
cagcttttttaaaat

SEQ ID NO: 1199377 - DNA, 15 bp, Homo sapiens
ccagcttttttaaaa

SEQ ID NO: 1199378 - DNA, 15 bp, Homo sapiens
cccagcttttttaaa

SEQ ID NO: 1199379 - DNA, 15 bp, Homo sapiens
acccagcttttttaa

SEQ ID NO: 1199380 - DNA, 15 bp, Homo sapiens
cacccagctttttta

SEQ ID NO: 1199381 - DNA, 15 bp, Homo sapiens
acacccagctttttt

SEQ ID NO: 1199382 - DNA, 15 bp, Homo sapiens
cacacccagcttttt

SEQ ID NO: 1199383 - DNA, 15 bp, Homo sapiens
tcacacccagctttt

SEQ ID NO: 1199384 - DNA, 15 bp, Homo sapiens
atcacacccagcttt

SEQ ID NO: 1199385 - DNA, 15 bp, Homo sapiens
catcacacccagctt

SEQ ID NO: 1199386 - DNA, 15 bp, Homo sapiens
accatcacacccagc

SEQ ID NO: 1199387 - DNA, 15 bp, Homo sapiens
caccatcacacccag

SEQ ID NO: 1199388 - DNA, 15 bp, Homo sapiens
gcaccatcacaccca

SEQ ID NO: 1199389 - DNA, 15 bp, Homo sapiens
cgcaccatcacaccc

SEQ ID NO: 1199390 - DNA, 15 bp, Homo sapiens
gcgcaccatcacacc

SEQ ID NO: 1199391 - DNA, 15 bp, Homo sapiens
agcgcaccatcacac

SEQ ID NO: 1199392 - DNA, 15 bp, Homo sapiens
gagcgcaccatcaca

SEQ ID NO: 1199393 - DNA, 15 bp, Homo sapiens
ggagcgcaccatcac

SEQ ID NO: 1199394 - DNA, 15 bp, Homo sapiens
gataataaaagtaat

SEQ ID NO: 1199395 - DNA, 15 bp, Homo sapiens
tgataataaaagtaa

SEQ ID NO: 1199396 - DNA, 15 bp, Homo sapiens
atgataataaaagta

SEQ ID NO: 1199397 - DNA, 15 bp, Homo sapiens
aatgataataaaagt

SEQ ID NO: 1199398 - DNA, 15 bp, Homo sapiens
taatgataataaaag

SEQ ID NO: 1199399 - DNA, 15 bp, Homo sapiens
gtaatgataataaaa

SEQ ID NO: 1199400 - DNA, 15 bp, Homo sapiens
agtaatgataataaa

SEQ ID NO: 1199401 - DNA, 15 bp, Homo sapiens
aagtaatgataataa

SEQ ID NO: 1199402 - DNA, 15 bp, Homo sapiens
gaagtaatgataata

SEQ ID NO: 1199403 - DNA, 15 bp, Homo sapiens
agaagtaatgataat

SEQ ID NO: 1199404 - DNA, 15 bp, Homo sapiens
cagaagtaatgataa

SEQ ID NO: 1199405 - DNA, 15 bp, Homo sapiens
gcagaagtaatgata

SEQ ID NO: 1199406 - DNA, 15 bp, Homo sapiens
agcagaagtaatgat

SEQ ID NO: 1199407 - DNA, 15 bp, Homo sapiens
tagcagaagtaatga

SEQ ID NO: 1199408 - DNA, 15 bp, Homo sapiens
atagcagaagtaatg

SEQ ID NO: 1199409 - DNA, 15 bp, Homo sapiens
aatagcagaagtaat

SEQ ID NO: 1199410 - DNA, 15 bp, Homo sapiens
taatagcagaagtaa

SEQ ID NO: 1199411 - DNA, 15 bp, Homo sapiens
ataatagcagaagta

SEQ ID NO: 1199412 - DNA, 15 bp, Homo sapiens
aataatagcagaagt

SEQ ID NO: 1199413 - DNA, 15 bp, Homo sapiens
taataatagcagaag

SEQ ID NO: 1199414 - DNA, 15 bp, Homo sapiens
ttaataatagcagaa

SEQ ID NO: 1199415 - DNA, 15 bp, Homo sapiens
cttaataatagcaga

SEQ ID NO: 1199416 - DNA, 15 bp, Homo sapiens
tcttaataatagcag

SEQ ID NO: 1199417 - DNA, 15 bp, Homo sapiens
ttcttaataatagca

SEQ ID NO: 1199418 - DNA, 15 bp, Homo sapiens
attcttaataatagc

SEQ ID NO: 1199419 - DNA, 15 bp, Homo sapiens
cattcttaataatag

SEQ ID NO: 1199420 - DNA, 15 bp, Homo sapiens
tcattcttaataata

SEQ ID NO: 1199421 - DNA, 15 bp, Homo sapiens
ctcattcttaataat

SEQ ID NO: 1199422 - DNA, 15 bp, Homo sapiens
tctcattcttaataa

SEQ ID NO: 1199423 - DNA, 15 bp, Homo sapiens
ctctcattcttaata

SEQ ID NO: 1199424 - DNA, 15 bp, Homo sapiens
actctcattcttaat

SEQ ID NO: 1199425 - DNA, 15 bp, Homo sapiens
tactctcattcttaa

SEQ ID NO: 1199426 - DNA, 15 bp, Homo sapiens
atactctcattctta

SEQ ID NO: 1199427 - DNA, 15 bp, Homo sapiens
aatactctcattctt

SEQ ID NO: 1199428 - DNA, 15 bp, Homo sapiens
taatactctcattct

SEQ ID NO: 1199429 - DNA, 15 bp, Homo sapiens
ttaatactctcattc

SEQ ID NO: 1199430 - DNA, 15 bp, Homo sapiens
attaatactctcatt

SEQ ID NO: 1199431 - DNA, 15 bp, Homo sapiens
aattaatactctcat

SEQ ID NO: 1199432 - DNA, 15 bp, Homo sapiens
taattaatactctca

SEQ ID NO: 1199433 - DNA, 15 bp, Homo sapiens
ttaattaatactctc

SEQ ID NO: 1199434 - DNA, 15 bp, Homo sapiens
cttaattaatactct

SEQ ID NO: 1199435 - DNA, 15 bp, Homo sapiens
ccttaattaatactc

SEQ ID NO: 1199436 - DNA, 15 bp, Homo sapiens
tccttaattaatact

SEQ ID NO: 1199437 - DNA, 15 bp, Homo sapiens
atccttaattaatac

SEQ ID NO: 1199438 - DNA, 15 bp, Homo sapiens
gatccttaattaata

SEQ ID NO: 1199439 - DNA, 15 bp, Homo sapiens
agatccttaattaat

SEQ ID NO: 1199440 - DNA, 15 bp, Homo sapiens
tagatccttaattaa

SEQ ID NO: 1199441 - DNA, 15 bp, Homo sapiens
ttagatccttaatta

SEQ ID NO: 1199442 - DNA, 15 bp, Homo sapiens
cttagatccttaatt

SEQ ID NO: 1199443 - DNA, 15 bp, Homo sapiens
tcttagatccttaat

SEQ ID NO: 1199444 - DNA, 15 bp, Homo sapiens
atcttagatccttaa

SEQ ID NO: 1199445 - DNA, 15 bp, Homo sapiens
tatcttagatcctta

SEQ ID NO: 1199446 - DNA, 15 bp, Homo sapiens
ctatcttagatcctt

SEQ ID NO: 1199447 - DNA, 15 bp, Homo sapiens
gctatcttagatcct

SEQ ID NO: 1199448 - DNA, 15 bp, Homo sapiens
ggctatcttagatcc

SEQ ID NO: 1199449 - DNA, 15 bp, Homo sapiens
tggctatcttagatc

SEQ ID NO: 1199450 - DNA, 15 bp, Homo sapiens
ttggctatcttagat

SEQ ID NO: 1199451 - DNA, 15 bp, Homo sapiens
tttggctatcttaga

SEQ ID NO: 1199452 - DNA, 15 bp, Homo sapiens
ctttggctatcttag

SEQ ID NO: 1199453 - DNA, 15 bp, Homo sapiens
actttggctatctta

SEQ ID NO: 1199454 - DNA, 15 bp, Homo sapiens
tactttggctatctt

SEQ ID NO: 1199455 - DNA, 15 bp, Homo sapiens
ctactttggctatct

SEQ ID NO: 1199456 - DNA, 15 bp, Homo sapiens
tctactttggctatc

SEQ ID NO: 1199457 - DNA, 15 bp, Homo sapiens
ttctactttggctat

SEQ ID NO: 1199458 - DNA, 15 bp, Homo sapiens
attctactttggcta

SEQ ID NO: 1199459 - DNA, 15 bp, Homo sapiens
aattctactttggct

SEQ ID NO: 1199460 - DNA, 15 bp, Homo sapiens
gaattctactttggc

SEQ ID NO: 1199461 - DNA, 15 bp, Homo sapiens
agaattctactttgg

SEQ ID NO: 1199462 - DNA, 15 bp, Homo sapiens
gagaattctactttg

SEQ ID NO: 1199463 - DNA, 15 bp, Homo sapiens
agagaattctacttt

SEQ ID NO: 1199464 - DNA, 15 bp, Homo sapiens
gagagaattctactt

SEQ ID NO: 1199465 - DNA, 15 bp, Homo sapiens
ggagagaattctact

SEQ ID NO: 1199466 - DNA, 15 bp, Homo sapiens
tggagagaattctac

SEQ ID NO: 1199467 - DNA, 15 bp, Homo sapiens
atggagagaattcta

SEQ ID NO: 1199468 - DNA, 15 bp, Homo sapiens
aatggagagaattct

SEQ ID NO: 1199469 - DNA, 15 bp, Homo sapiens
caatggagagaattc

SEQ ID NO: 1199470 - DNA, 15 bp, Homo sapiens
ccaatggagagaatt

SEQ ID NO: 1199471 - DNA, 15 bp, Homo sapiens
gccaatggagagaat

SEQ ID NO: 1199472 - DNA, 15 bp, Homo sapiens
agccaatggagagaa

SEQ ID NO: 1199473 - DNA, 15 bp, Homo sapiens
aagccaatggagaga

SEQ ID NO: 1199474 - DNA, 15 bp, Homo sapiens
aaagccaatggagag

SEQ ID NO: 1199475 - DNA, 15 bp, Homo sapiens
caaagccaatggaga

SEQ ID NO: 1199476 - DNA, 15 bp, Homo sapiens
acaaagccaatggag

SEQ ID NO: 1199477 - DNA, 15 bp, Homo sapiens
gacaaagccaatgga

SEQ ID NO: 1199478 - DNA, 15 bp, Homo sapiens
tgacaaagccaatgg

SEQ ID NO: 1199479 - DNA, 15 bp, Homo sapiens
gtgacaaagccaatg

SEQ ID NO: 1199480 - DNA, 15 bp, Homo sapiens
tgtgacaaagccaat

SEQ ID NO: 1199481 - DNA, 15 bp, Homo sapiens
atgtgacaaagccaa

SEQ ID NO: 1199482 - DNA, 15 bp, Homo sapiens
gatgtgacaaagcca

SEQ ID NO: 1199483 - DNA, 15 bp, Homo sapiens
tgatgtgacaaagcc

SEQ ID NO: 1199484 - DNA, 15 bp, Homo sapiens
atgatgtgacaaagc

SEQ ID NO: 1199485 - DNA, 15 bp, Homo sapiens
aatgatgtgacaaag

SEQ ID NO: 1199486 - DNA, 15 bp, Homo sapiens
aaatgatgtgacaaa

SEQ ID NO: 1199487 - DNA, 15 bp, Homo sapiens
aaaatgatgtgacaa

SEQ ID NO: 1199488 - DNA, 15 bp, Homo sapiens
gaaaatgatgtgaca

SEQ ID NO: 1199489 - DNA, 15 bp, Homo sapiens
agaaaatgatgtgac

SEQ ID NO: 1199490 - DNA, 15 bp, Homo sapiens
aagaaaatgatgtga

SEQ ID NO: 1199491 - DNA, 15 bp, Homo sapiens
aaagaaaatgatgtg

SEQ ID NO: 1199492 - DNA, 15 bp, Homo sapiens
gaaagaaaatgatgt

SEQ ID NO: 1199493 - DNA, 15 bp, Homo sapiens
agaaagaaaatgatg

SEQ ID NO: 1199494 - DNA, 15 bp, Homo sapiens
aagaaagaaaatgat

SEQ ID NO: 1199495 - DNA, 15 bp, Homo sapiens
aaagaaagaaaatga

SEQ ID NO: 1199496 - DNA, 15 bp, Homo sapiens
aaaagaaagaaaatg

SEQ ID NO: 1199497 - DNA, 15 bp, Homo sapiens
aaaaagaaagaaaat

SEQ ID NO: 1199498 - DNA, 15 bp, Homo sapiens
taaaaaaaagaaaga

SEQ ID NO: 1199499 - DNA, 15 bp, Homo sapiens
ataaaaaaaagaaag

SEQ ID NO: 1199500 - DNA, 15 bp, Homo sapiens
aataaaaaaaagaaa

SEQ ID NO: 1199501 - DNA, 15 bp, Homo sapiens
aaataaaaaaaagaa

SEQ ID NO: 1199502 - DNA, 15 bp, Homo sapiens
aaaataaaaaaaaga

SEQ ID NO: 1199503 - DNA, 15 bp, Homo sapiens
aaaaataaaaaaaag

SEQ ID NO: 1199504 - DNA, 15 bp, Homo sapiens
taaaaataaaaaata

SEQ ID NO: 1199505 - DNA, 15 bp, Homo sapiens
ttaaaaataaaaaat

SEQ ID NO: 1199506 - DNA, 15 bp, Homo sapiens
attaaaaataaaaaa

SEQ ID NO: 1199507 - DNA, 15 bp, Homo sapiens
aattaaaaataaaaa

SEQ ID NO: 1199508 - DNA, 15 bp, Homo sapiens
taattaaaaataaaa

SEQ ID NO: 1199509 - DNA, 15 bp, Homo sapiens
ataattaaaaataaa

SEQ ID NO: 1199510 - DNA, 15 bp, Homo sapiens
tataattaaaaataa

SEQ ID NO: 1199511 - DNA, 15 bp, Homo sapiens
gtataattaaaaata

SEQ ID NO: 1199512 - DNA, 15 bp, Homo sapiens
agtataattaaaaat

SEQ ID NO: 1199513 - DNA, 15 bp, Homo sapiens
cttaaagtataatta

SEQ ID NO: 1199514 - DNA, 15 bp, Homo sapiens
acttaaagtataatt

SEQ ID NO: 1199515 - DNA, 15 bp, Homo sapiens
ccccagaacttaaag

SEQ ID NO: 1199516 - DNA, 15 bp, Homo sapiens
accccagaacttaaa

SEQ ID NO: 1199517 - DNA, 15 bp, Homo sapiens
taccccagaacttaa

SEQ ID NO: 1199518 - DNA, 15 bp, Homo sapiens
gtaccccagaactta

SEQ ID NO: 1199519 - DNA, 15 bp, Homo sapiens
tgtaccccagaactt

SEQ ID NO: 1199520 - DNA, 15 bp, Homo sapiens
atgtaccccagaact

SEQ ID NO: 1199521 - DNA, 15 bp, Homo sapiens
catgtaccccagaac

SEQ ID NO: 1199522 - DNA, 15 bp, Homo sapiens
acatgtaccccagaa

SEQ ID NO: 1199523 - DNA, 15 bp, Homo sapiens
cacatgtaccccaga

SEQ ID NO: 1199524 - DNA, 15 bp, Homo sapiens
gcacatgtaccccag

SEQ ID NO: 1199525 - DNA, 15 bp, Homo sapiens
tgcacatgtacccca

SEQ ID NO: 1199526 - DNA, 15 bp, Homo sapiens
ctgcacatgtacccc

SEQ ID NO: 1199527 - DNA, 15 bp, Homo sapiens
tctgcacatgtaccc

SEQ ID NO: 1199528 - DNA, 15 bp, Homo sapiens
ttctgcacatgtacc

SEQ ID NO: 1199529 - DNA, 15 bp, Homo sapiens
gttctgcacatgtac

SEQ ID NO: 1199530 - DNA, 15 bp, Homo sapiens
cgttctgcacatgta

SEQ ID NO: 1199531 - DNA, 15 bp, Homo sapiens
gctgcacgttctgca

SEQ ID NO: 1199532 - DNA, 15 bp, Homo sapiens
ggctgcacgttctgc

SEQ ID NO: 1199533 - DNA, 15 bp, Homo sapiens
aggctgcacgttctg

SEQ ID NO: 1199534 - DNA, 15 bp, Homo sapiens
aaggctgcacgttct

SEQ ID NO: 1199535 - DNA, 15 bp, Homo sapiens
caaggctgcacgttc

SEQ ID NO: 1199536 - DNA, 15 bp, Homo sapiens
acaaggctgcacgtt

SEQ ID NO: 1199537 - DNA, 15 bp, Homo sapiens
aacaaggctgcacgt

SEQ ID NO: 1199538 - DNA, 15 bp, Homo sapiens
taacaaggctgcacg

SEQ ID NO: 1199539 - DNA, 15 bp, Homo sapiens
gtaacaaggctgcac

SEQ ID NO: 1199540 - DNA, 15 bp, Homo sapiens
tgtaacaaggctgca

SEQ ID NO: 1199541 - DNA, 15 bp, Homo sapiens
atgtaacaaggctgc

SEQ ID NO: 1199542 - DNA, 15 bp, Homo sapiens
tatgtaacaaggctg

SEQ ID NO: 1199543 - DNA, 15 bp, Homo sapiens
ctatgtaacaaggct

SEQ ID NO: 1199544 - DNA, 15 bp, Homo sapiens
cctatgtaacaaggc

SEQ ID NO: 1199545 - DNA, 15 bp, Homo sapiens
acctatgtaacaagg

SEQ ID NO: 1199546 - DNA, 15 bp, Homo sapiens
tacctatgtaacaag

SEQ ID NO: 1199547 - DNA, 15 bp, Homo sapiens
gtgtatacctatgta

SEQ ID NO: 1199548 - DNA, 15 bp, Homo sapiens
cgtgtatacctatgt

SEQ ID NO: 1199549 - DNA, 15 bp, Homo sapiens
acgtgtatacctatg

SEQ ID NO: 1199550 - DNA, 15 bp, Homo sapiens
cacgtgtatacctat

SEQ ID NO: 1199551 - DNA, 15 bp, Homo sapiens
gcacgtgtataccta

SEQ ID NO: 1199552 - DNA, 15 bp, Homo sapiens
ggcacgtgtatacct

SEQ ID NO: 1199553 - DNA, 15 bp, Homo sapiens
tggcacgtgtatacc

SEQ ID NO: 1199554 - DNA, 15 bp, Homo sapiens
atggcacgtgtatac

SEQ ID NO: 1199555 - DNA, 15 bp, Homo sapiens
catggcacgtgtata

SEQ ID NO: 1199556 - DNA, 15 bp, Homo sapiens
ccatggcacgtgtat

SEQ ID NO: 1199557 - DNA, 15 bp, Homo sapiens
accatggcacgtgta

SEQ ID NO: 1199558 - DNA, 15 bp, Homo sapiens
caccatggcacgtgt

SEQ ID NO: 1199559 - DNA, 15 bp, Homo sapiens
ccaccatggcacgtg

SEQ ID NO: 1199560 - DNA, 15 bp, Homo sapiens
accaccatggcacgt

SEQ ID NO: 1199561 - DNA, 15 bp, Homo sapiens
aaccaccatggcacg

SEQ ID NO: 1199562 - DNA, 15 bp, Homo sapiens
aaaccaccatggcac

SEQ ID NO: 1199563 - DNA, 15 bp, Homo sapiens
taaaccaccatggca

SEQ ID NO: 1199564 - DNA, 15 bp, Homo sapiens
gtaaaccaccatggc

SEQ ID NO: 1199565 - DNA, 15 bp, Homo sapiens
agtaaaccaccatgg

SEQ ID NO: 1199566 - DNA, 15 bp, Homo sapiens
cagtaaaccaccatg

SEQ ID NO: 1199567 - DNA, 15 bp, Homo sapiens
gcagtaaaccaccat

SEQ ID NO: 1199568 - DNA, 15 bp, Homo sapiens
tgcagtaaaccacca

SEQ ID NO: 1199569 - DNA, 15 bp, Homo sapiens
gtgcagtaaaccacc

SEQ ID NO: 1199570 - DNA, 15 bp, Homo sapiens
aggtgcagtaaacca

SEQ ID NO: 1199571 - DNA, 15 bp, Homo sapiens
taggtgcagtaaacc

SEQ ID NO: 1199572 - DNA, 15 bp, Homo sapiens
ataggtgcagtaaac

SEQ ID NO: 1199573 - DNA, 15 bp, Homo sapiens
gataggtgcagtaaa

SEQ ID NO: 1199574 - DNA, 15 bp, Homo sapiens
tgataggtgcagtaa

SEQ ID NO: 1199575 - DNA, 15 bp, Homo sapiens
ttgataggtgcagta

SEQ ID NO: 1199576 - DNA, 15 bp, Homo sapiens
gttgataggtgcagt

SEQ ID NO: 1199577 - DNA, 15 bp, Homo sapiens
tgggttgataggtgc

SEQ ID NO: 1199578 - DNA, 15 bp, Homo sapiens
atgggttgataggtg

SEQ ID NO: 1199579 - DNA, 15 bp, Homo sapiens
gatgggttgataggt

SEQ ID NO: 1199580 - DNA, 15 bp, Homo sapiens
tgatgggttgatagg

SEQ ID NO: 1199581 - DNA, 15 bp, Homo sapiens
atgatgggttgatag

SEQ ID NO: 1199582 - DNA, 15 bp, Homo sapiens
gatgatgggttgata

SEQ ID NO: 1199583 - DNA, 15 bp, Homo sapiens
agatgatgggttgat

SEQ ID NO: 1199584 - DNA, 15 bp, Homo sapiens
tagatgatgggttga

SEQ ID NO: 1199585 - DNA, 15 bp, Homo sapiens
gtagatgatgggttg

SEQ ID NO: 1199586 - DNA, 15 bp, Homo sapiens
tgtagatgatgggtt

SEQ ID NO: 1199587 - DNA, 15 bp, Homo sapiens
atgtagatgatgggt

SEQ ID NO: 1199588 - DNA, 15 bp, Homo sapiens
aatgtagatgatggg

SEQ ID NO: 1199589 - DNA, 15 bp, Homo sapiens
taatgtagatgatgg

SEQ ID NO: 1199590 - DNA, 15 bp, Homo sapiens
ctaatgtagatgatg

SEQ ID NO: 1199591 - DNA, 15 bp, Homo sapiens
cctaatgtagatgat

SEQ ID NO: 1199592 - DNA, 15 bp, Homo sapiens
acctaatgtagatga

SEQ ID NO: 1199593 - DNA, 15 bp, Homo sapiens
cacctaatgtagatg

SEQ ID NO: 1199594 - DNA, 15 bp, Homo sapiens
acacctaatgtagat

SEQ ID NO: 1199595 - DNA, 15 bp, Homo sapiens
aacacctaatgtaga

SEQ ID NO: 1199596 - DNA, 15 bp, Homo sapiens
aaacacctaatgtag

SEQ ID NO: 1199597 - DNA, 15 bp, Homo sapiens
gaaacacctaatgta

SEQ ID NO: 1199598 - DNA, 15 bp, Homo sapiens
agaaacacctaatgt

SEQ ID NO: 1199599 - DNA, 15 bp, Homo sapiens
gagaaacacctaatg

SEQ ID NO: 1199600 - DNA, 15 bp, Homo sapiens
ggagaaacacctaat

SEQ ID NO: 1199601 - DNA, 15 bp, Homo sapiens
aggagaaacacctaa

SEQ ID NO: 1199602 - DNA, 15 bp, Homo sapiens
taggagaaacaccta

SEQ ID NO: 1199603 - DNA, 15 bp, Homo sapiens
ttaggagaaacacct

SEQ ID NO: 1199604 - DNA, 15 bp, Homo sapiens
attaggagaaacacc

SEQ ID NO: 1199605 - DNA, 15 bp, Homo sapiens
cattaggagaaacac

SEQ ID NO: 1199606 - DNA, 15 bp, Homo sapiens
gcattaggagaaaca

SEQ ID NO: 1199607 - DNA, 15 bp, Homo sapiens
agcattaggagaaac

SEQ ID NO: 1199608 - DNA, 15 bp, Homo sapiens
cagcattaggagaaa

SEQ ID NO: 1199609 - DNA, 15 bp, Homo sapiens
acagcattaggagaa

SEQ ID NO: 1199610 - DNA, 15 bp, Homo sapiens
gacagcattaggaga

SEQ ID NO: 1199611 - DNA, 15 bp, Homo sapiens
ggacagcattaggag

SEQ ID NO: 1199612 - DNA, 15 bp, Homo sapiens
gggacagcattagga

SEQ ID NO: 1199613 - DNA, 15 bp, Homo sapiens
agggacagcattagg

SEQ ID NO: 1199614 - DNA, 15 bp, Homo sapiens
gagggacagcattag

SEQ ID NO: 1199615 - DNA, 15 bp, Homo sapiens
ggagggacagcatta

SEQ ID NO: 1199616 - DNA, 15 bp, Homo sapiens
gggagggacagcatt

SEQ ID NO: 1199617 - DNA, 15 bp, Homo sapiens
ggggagggacagcat

SEQ ID NO: 1199618 - DNA, 15 bp, Homo sapiens
gggggagggacagca

SEQ ID NO: 1199619 - DNA, 15 bp, Homo sapiens
tgggggagggacagc

SEQ ID NO: 1199620 - DNA, 15 bp, Homo sapiens
ctgggggagggacag

SEQ ID NO: 1199621 - DNA, 15 bp, Homo sapiens
gctgggggagggaca

SEQ ID NO: 1199622 - DNA, 15 bp, Homo sapiens
ggctgggggagggac

SEQ ID NO: 1199623 - DNA, 15 bp, Homo sapiens
gggctgggggaggga

SEQ ID NO: 1199624 - DNA, 15 bp, Homo sapiens
ggggctgggggaggg

SEQ ID NO: 1199625 - DNA, 15 bp, Homo sapiens
gggggctgggggagg

SEQ ID NO: 1199626 - DNA, 15 bp, Homo sapiens
ggggggctgggggag

SEQ ID NO: 1199627 - DNA, 15 bp, Homo sapiens
tggggggctggggga

SEQ ID NO: 1199628 - DNA, 15 bp, Homo sapiens
ctggggggctggggg

SEQ ID NO: 1199629 - DNA, 15 bp, Homo sapiens
gctggggggctgggg

SEQ ID NO: 1199630 - DNA, 15 bp, Homo sapiens
ggctggggggctggg

SEQ ID NO: 1199631 - DNA, 15 bp, Homo sapiens
gggctggggggctgg

SEQ ID NO: 1199632 - DNA, 15 bp, Homo sapiens
agggctggggggctg

SEQ ID NO: 1199633 - DNA, 15 bp, Homo sapiens
aagggctggggggct

SEQ ID NO: 1199634 - DNA, 15 bp, Homo sapiens
caagggctggggggc

SEQ ID NO: 1199635 - DNA, 15 bp, Homo sapiens
tcaagggctgggggg

SEQ ID NO: 1199636 - DNA, 15 bp, Homo sapiens
gtcaagggctggggg

SEQ ID NO: 1199637 - DNA, 15 bp, Homo sapiens
tgtcaagggctgggg

SEQ ID NO: 1199638 - DNA, 15 bp, Homo sapiens
ctgtcaagggctggg

SEQ ID NO: 1199639 - DNA, 15 bp, Homo sapiens
cctgtcaagggctgg

SEQ ID NO: 1199640 - DNA, 15 bp, Homo sapiens
acctgtcaagggctg

SEQ ID NO: 1199641 - DNA, 15 bp, Homo sapiens
gacctgtcaagggct

SEQ ID NO: 1199642 - DNA, 15 bp, Homo sapiens
ggacctgtcaagggc

SEQ ID NO: 1199643 - DNA, 15 bp, Homo sapiens
gggacctgtcaaggg

SEQ ID NO: 1199644 - DNA, 15 bp, Homo sapiens
cgggacctgtcaagg

SEQ ID NO: 1199645 - DNA, 15 bp, Homo sapiens
ccgggacctgtcaag

SEQ ID NO: 1199646 - DNA, 15 bp, Homo sapiens
accgggacctgtcaa

SEQ ID NO: 1199647 - DNA, 15 bp, Homo sapiens
caccgggacctgtca

SEQ ID NO: 1199648 - DNA, 15 bp, Homo sapiens
acaccgggacctgtc

SEQ ID NO: 1199649 - DNA, 15 bp, Homo sapiens
cacaccgggacctgt

SEQ ID NO: 1199650 - DNA, 15 bp, Homo sapiens
acacaccgggacctg

SEQ ID NO: 1199651 - DNA, 15 bp, Homo sapiens
cacacaccgggacct

SEQ ID NO: 1199652 - DNA, 15 bp, Homo sapiens
acacacaccgggacc

SEQ ID NO: 1199653 - DNA, 15 bp, Homo sapiens
gacacacaccgggac

SEQ ID NO: 1199654 - DNA, 15 bp, Homo sapiens
tgacacacaccggga

SEQ ID NO: 1199655 - DNA, 15 bp, Homo sapiens
gtgacacacaccggg

SEQ ID NO: 1199656 - DNA, 15 bp, Homo sapiens
tgtgacacacaccgg

SEQ ID NO: 1199657 - DNA, 15 bp, Homo sapiens
gtgtgacacacaccg

SEQ ID NO: 1199658 - DNA, 15 bp, Homo sapiens
ggtgtgacacacacc

SEQ ID NO: 1199659 - DNA, 15 bp, Homo sapiens
cggtgtgacacacac

SEQ ID NO: 1199660 - DNA, 15 bp, Homo sapiens
acggtgtgacacaca

SEQ ID NO: 1199661 - DNA, 15 bp, Homo sapiens
aacggtgtgacacac

SEQ ID NO: 1199662 - DNA, 15 bp, Homo sapiens
aaacggtgtgacaca

SEQ ID NO: 1199663 - DNA, 15 bp, Homo sapiens
aaaacggtgtgacac

SEQ ID NO: 1199664 - DNA, 15 bp, Homo sapiens
gaaaacggtgtgaca

SEQ ID NO: 1199665 - DNA, 15 bp, Homo sapiens
agaaaacggtgtgac

SEQ ID NO: 1199666 - DNA, 15 bp, Homo sapiens
tagaaaacggtgtga

SEQ ID NO: 1199667 - DNA, 15 bp, Homo sapiens
atagaaaacggtgtg

SEQ ID NO: 1199668 - DNA, 15 bp, Homo sapiens
tatagaaaacggtgt

SEQ ID NO: 1199669 - DNA, 15 bp, Homo sapiens
atatagaaaacggtg

SEQ ID NO: 1199670 - DNA, 15 bp, Homo sapiens
tatatagaaaacggt

SEQ ID NO: 1199671 - DNA, 15 bp, Homo sapiens
atatatagaaaacgg

SEQ ID NO: 1199672 - DNA, 15 bp, Homo sapiens
tatatatagaaaacg

SEQ ID NO: 1199673 - DNA, 15 bp, Homo sapiens
gtatatatagaaaac

SEQ ID NO: 1199674 - DNA, 15 bp, Homo sapiens
agtatatatagaaaa

SEQ ID NO: 1199675 - DNA, 15 bp, Homo sapiens
gagtatatatagaaa

SEQ ID NO: 1199676 - DNA, 15 bp, Homo sapiens
agagtatatatagaa

SEQ ID NO: 1199677 - DNA, 15 bp, Homo sapiens
aagagtatatataga

SEQ ID NO: 1199678 - DNA, 15 bp, Homo sapiens
taagagtatatatag

SEQ ID NO: 1199679 - DNA, 15 bp, Homo sapiens
ttaagagtatatata

SEQ ID NO: 1199680 - DNA, 15 bp, Homo sapiens
gttaagagtatatat

SEQ ID NO: 1199681 - DNA, 15 bp, Homo sapiens
agttaagagtatata

SEQ ID NO: 1199682 - DNA, 15 bp, Homo sapiens
gagttaagagtatat

SEQ ID NO: 1199683 - DNA, 15 bp, Homo sapiens
tgagttaagagtata

SEQ ID NO: 1199684 - DNA, 15 bp, Homo sapiens
atgagttaagagtat

SEQ ID NO: 1199685 - DNA, 15 bp, Homo sapiens
catgagttaagagta

SEQ ID NO: 1199686 - DNA, 15 bp, Homo sapiens
ccatgagttaagagt

SEQ ID NO: 1199687 - DNA, 15 bp, Homo sapiens
accatgagttaagag

SEQ ID NO: 1199688 - DNA, 15 bp, Homo sapiens
gaccatgagttaaga

SEQ ID NO: 1199689 - DNA, 15 bp, Homo sapiens
agaccatgagttaag

SEQ ID NO: 1199690 - DNA, 15 bp, Homo sapiens
gagaccatgagttaa

SEQ ID NO: 1199691 - DNA, 15 bp, Homo sapiens
tgagaccatgagtta

SEQ ID NO: 1199692 - DNA, 15 bp, Homo sapiens
ttgagaccatgagtt

SEQ ID NO: 1199693 - DNA, 15 bp, Homo sapiens
gttgagaccatgagt

SEQ ID NO: 1199694 - DNA, 15 bp, Homo sapiens
tgttgagaccatgag

SEQ ID NO: 1199695 - DNA, 15 bp, Homo sapiens
atgttgagaccatga

SEQ ID NO: 1199696 - DNA, 15 bp, Homo sapiens
aatgttgagaccatg

SEQ ID NO: 1199697 - DNA, 15 bp, Homo sapiens
aaatgttgagaccat

SEQ ID NO: 1199698 - DNA, 15 bp, Homo sapiens
gaaatgttgagacca

SEQ ID NO: 1199699 - DNA, 15 bp, Homo sapiens
agaaatgttgagacc

SEQ ID NO: 1199700 - DNA, 15 bp, Homo sapiens
cagaaatgttgagac

SEQ ID NO: 1199701 - DNA, 15 bp, Homo sapiens
tcagaaatgttgaga

SEQ ID NO: 1199702 - DNA, 15 bp, Homo sapiens
gtcagaaatgttgag

SEQ ID NO: 1199703 - DNA, 15 bp, Homo sapiens
tgtcagaaatgttga

SEQ ID NO: 1199704 - DNA, 15 bp, Homo sapiens
gtgtcagaaatgttg

SEQ ID NO: 1199705 - DNA, 15 bp, Homo sapiens
agtgtcagaaatgtt

SEQ ID NO: 1199706 - DNA, 15 bp, Homo sapiens
cagtgtcagaaatgt

SEQ ID NO: 1199707 - DNA, 15 bp, Homo sapiens
tcagtgtcagaaatg

SEQ ID NO: 1199708 - DNA, 15 bp, Homo sapiens
gtcagtgtcagaaat

SEQ ID NO: 1199709 - DNA, 15 bp, Homo sapiens
ggtcagtgtcagaaa

SEQ ID NO: 1199710 - DNA, 15 bp, Homo sapiens
tggtcagtgtcagaa

SEQ ID NO: 1199711 - DNA, 15 bp, Homo sapiens
gtggtcagtgtcaga

SEQ ID NO: 1199712 - DNA, 15 bp, Homo sapiens
tgtggtcagtgtcag

SEQ ID NO: 1199713 - DNA, 15 bp, Homo sapiens
atgtggtcagtgtca

SEQ ID NO: 1199714 - DNA, 15 bp, Homo sapiens
aatgtggtcagtgtc

SEQ ID NO: 1199715 - DNA, 15 bp, Homo sapiens
aaatgtggtcagtgt

SEQ ID NO: 1199716 - DNA, 15 bp, Homo sapiens
gaaatgtggtcagtg

SEQ ID NO: 1199717 - DNA, 15 bp, Homo sapiens
ggaaatgtggtcagt

SEQ ID NO: 1199718 - DNA, 15 bp, Homo sapiens
gggaaatgtggtcag

SEQ ID NO: 1199719 - DNA, 15 bp, Homo sapiens
ggggaaatgtggtca

SEQ ID NO: 1199720 - DNA, 15 bp, Homo sapiens
gggggaaatgtggtc

SEQ ID NO: 1199721 - DNA, 15 bp, Homo sapiens
agggggaaatgtggt

SEQ ID NO: 1199722 - DNA, 15 bp, Homo sapiens
tagggggaaatgtgg

SEQ ID NO: 1199723 - DNA, 15 bp, Homo sapiens
ttagggggaaatgtg

SEQ ID NO: 1199724 - DNA, 15 bp, Homo sapiens
attagggggaaatgt

SEQ ID NO: 1199725 - DNA, 15 bp, Homo sapiens
aattagggggaaatg

SEQ ID NO: 1199726 - DNA, 15 bp, Homo sapiens
aaattagggggaaat

SEQ ID NO: 1199727 - DNA, 15 bp, Homo sapiens
caaattagggggaaa

SEQ ID NO: 1199728 - DNA, 15 bp, Homo sapiens
tcaaattagggggaa

SEQ ID NO: 1199729 - DNA, 15 bp, Homo sapiens
gtcaaattaggggga

SEQ ID NO: 1199730 - DNA, 15 bp, Homo sapiens
agtcaaattaggggg

SEQ ID NO: 1199731 - DNA, 15 bp, Homo sapiens
gagtcaaattagggg

SEQ ID NO: 1199732 - DNA, 15 bp, Homo sapiens
agagtcaaattaggg

SEQ ID NO: 1199733 - DNA, 15 bp, Homo sapiens
cagagtcaaattagg

SEQ ID NO: 1199734 - DNA, 15 bp, Homo sapiens
tcagagtcaaattag

SEQ ID NO: 1199735 - DNA, 15 bp, Homo sapiens
gtcagagtcaaatta

SEQ ID NO: 1199736 - DNA, 15 bp, Homo sapiens
ggtcagagtcaaatt

SEQ ID NO: 1199737 - DNA, 15 bp, Homo sapiens
tggtcagagtcaaat

SEQ ID NO: 1199738 - DNA, 15 bp, Homo sapiens
ctggtcagagtcaaa

SEQ ID NO: 1199739 - DNA, 15 bp, Homo sapiens
tctggtcagagtcaa

SEQ ID NO: 1199740 - DNA, 15 bp, Homo sapiens
ttctggtcagagtca

SEQ ID NO: 1199741 - DNA, 15 bp, Homo sapiens
tttctggtcagagtc

SEQ ID NO: 1199742 - DNA, 15 bp, Homo sapiens
ttttctggtcagagt

SEQ ID NO: 1199743 - DNA, 15 bp, Homo sapiens
tttttctggtcagag

SEQ ID NO: 1199744 - DNA, 15 bp, Homo sapiens
atttttctggtcaga

SEQ ID NO: 1199745 - DNA, 15 bp, Homo sapiens
gatttttctggtcag

SEQ ID NO: 1199746 - DNA, 15 bp, Homo sapiens
tgatttttctggtca

SEQ ID NO: 1199747 - DNA, 15 bp, Homo sapiens
ctgatttttctggtc

SEQ ID NO: 1199748 - DNA, 15 bp, Homo sapiens
cctgatttttctggt

SEQ ID NO: 1199749 - DNA, 15 bp, Homo sapiens
acctgatttttctgg

SEQ ID NO: 1199750 - DNA, 15 bp, Homo sapiens
tacctgatttttctg

SEQ ID NO: 1199751 - DNA, 15 bp, Homo sapiens
ttacctgatttttct

SEQ ID NO: 1199752 - DNA, 15 bp, Homo sapiens
tttacctgatttttc

SEQ ID NO: 1199753 - DNA, 15 bp, Homo sapiens
ttttacctgattttt

SEQ ID NO: 1199754 - DNA, 15 bp, Homo sapiens
tttttacctgatttt

SEQ ID NO: 1199755 - DNA, 15 bp, Homo sapiens
ctttttacctgattt

SEQ ID NO: 1199756 - DNA, 15 bp, Homo sapiens
actttttacctgatt

SEQ ID NO: 1199757 - DNA, 15 bp, Homo sapiens
cactttttacctgat

SEQ ID NO: 1199758 - DNA, 15 bp, Homo sapiens
gcactttttacctga

SEQ ID NO: 1199759 - DNA, 15 bp, Homo sapiens
agcactttttacctg

SEQ ID NO: 1199760 - DNA, 15 bp, Homo sapiens
tagcactttttacct

SEQ ID NO: 1199761 - DNA, 15 bp, Homo sapiens
ctagcactttttacc

SEQ ID NO: 1199762 - DNA, 15 bp, Homo sapiens
actagcactttttac

SEQ ID NO: 1199763 - DNA, 15 bp, Homo sapiens
cactagcacttttta

SEQ ID NO: 1199764 - DNA, 15 bp, Homo sapiens
gcactagcacttttt

SEQ ID NO: 1199765 - DNA, 15 bp, Homo sapiens
tgcactagcactttt

SEQ ID NO: 1199766 - DNA, 15 bp, Homo sapiens
ctgcactagcacttt

SEQ ID NO: 1199767 - DNA, 15 bp, Homo sapiens
tctgcactagcactt

SEQ ID NO: 1199768 - DNA, 15 bp, Homo sapiens
atctgcactagcact

SEQ ID NO: 1199769 - DNA, 15 bp, Homo sapiens
gatctgcactagcac

SEQ ID NO: 1199770 - DNA, 15 bp, Homo sapiens
ggatctgcactagca

SEQ ID NO: 1199771 - DNA, 15 bp, Homo sapiens
aggatctgcactagc

SEQ ID NO: 1199772 - DNA, 15 bp, Homo sapiens
aaggatctgcactag

SEQ ID NO: 1199773 - DNA, 15 bp, Homo sapiens
caaggatctgcacta

SEQ ID NO: 1199774 - DNA, 15 bp, Homo sapiens
gcaaggatctgcact

SEQ ID NO: 1199775 - DNA, 15 bp, Homo sapiens
tgcaaggatctgcac

SEQ ID NO: 1199776 - DNA, 15 bp, Homo sapiens
gtgcaaggatctgca

SEQ ID NO: 1199777 - DNA, 15 bp, Homo sapiens
ggtgcaaggatctgc

SEQ ID NO: 1199778 - DNA, 15 bp, Homo sapiens
tggtgcaaggatctg

SEQ ID NO: 1199779 - DNA, 15 bp, Homo sapiens
gtggtgcaaggatct

SEQ ID NO: 1199780 - DNA, 15 bp, Homo sapiens
tgtggtgcaaggatc

SEQ ID NO: 1199781 - DNA, 15 bp, Homo sapiens
ttgtggtgcaaggat

SEQ ID NO: 1199782 - DNA, 15 bp, Homo sapiens
attgtggtgcaagga

SEQ ID NO: 1199783 - DNA, 15 bp, Homo sapiens
cattgtggtgcaagg

SEQ ID NO: 1199784 - DNA, 15 bp, Homo sapiens
gcattgtggtgcaag

SEQ ID NO: 1199785 - DNA, 15 bp, Homo sapiens
tgcattgtggtgcaa

SEQ ID NO: 1199786 - DNA, 15 bp, Homo sapiens
ctgcattgtggtgca

SEQ ID NO: 1199787 - DNA, 15 bp, Homo sapiens
tctgcattgtggtgc

SEQ ID NO: 1199788 - DNA, 15 bp, Homo sapiens
atctgcattgtggtg

SEQ ID NO: 1199789 - DNA, 15 bp, Homo sapiens
catctgcattgtggt

SEQ ID NO: 1199790 - DNA, 15 bp, Homo sapiens
acatctgcattgtgg

SEQ ID NO: 1199791 - DNA, 15 bp, Homo sapiens
tacatctgcattgtg

SEQ ID NO: 1199792 - DNA, 15 bp, Homo sapiens
ttacatctgcattgt

SEQ ID NO: 1199793 - DNA, 15 bp, Homo sapiens
tttacatctgcattg

SEQ ID NO: 1199794 - DNA, 15 bp, Homo sapiens
ttttacatctgcatt

SEQ ID NO: 1199795 - DNA, 15 bp, Homo sapiens
tttttacatctgcat

SEQ ID NO: 1199796 - DNA, 15 bp, Homo sapiens
atttttacatctgca

SEQ ID NO: 1199797 - DNA, 15 bp, Homo sapiens
aatttttacatctgc

SEQ ID NO: 1199798 - DNA, 15 bp, Homo sapiens
aaatttttacatctg

SEQ ID NO: 1199799 - DNA, 15 bp, Homo sapiens
gaaatttttacatct

SEQ ID NO: 1199800 - DNA, 15 bp, Homo sapiens
tgaaatttttacatc

SEQ ID NO: 1199801 - DNA, 15 bp, Homo sapiens
ttgaaatttttacat

SEQ ID NO: 1199802 - DNA, 15 bp, Homo sapiens
cttgaaatttttaca

SEQ ID NO: 1199803 - DNA, 15 bp, Homo sapiens
acttgaaatttttac

SEQ ID NO: 1199804 - DNA, 15 bp, Homo sapiens
gacttgaaattttta

SEQ ID NO: 1199805 - DNA, 15 bp, Homo sapiens
agacttgaaattttt

SEQ ID NO: 1199806 - DNA, 15 bp, Homo sapiens
tagacttgaaatttt

SEQ ID NO: 1199807 - DNA, 15 bp, Homo sapiens
ttagacttgaaattt

SEQ ID NO: 1199808 - DNA, 15 bp, Homo sapiens
gttagacttgaaatt

SEQ ID NO: 1199809 - DNA, 15 bp, Homo sapiens
tgttagacttgaaat

SEQ ID NO: 1199810 - DNA, 15 bp, Homo sapiens
atgttagacttgaaa

SEQ ID NO: 1199811 - DNA, 15 bp, Homo sapiens
aatgttagacttgaa

SEQ ID NO: 1199812 - DNA, 15 bp, Homo sapiens
aaatgttagacttga

SEQ ID NO: 1199813 - DNA, 15 bp, Homo sapiens
aaaatgttagacttg

SEQ ID NO: 1199814 - DNA, 15 bp, Homo sapiens
gaaaatgttagactt

SEQ ID NO: 1199815 - DNA, 15 bp, Homo sapiens
agaaaatgttagact

SEQ ID NO: 1199816 - DNA, 15 bp, Homo sapiens
aagaaaatgttagac

SEQ ID NO: 1199817 - DNA, 15 bp, Homo sapiens
taagaaaatgttaga

SEQ ID NO: 1199818 - DNA, 15 bp, Homo sapiens
gtaagaaaatgttag

SEQ ID NO: 1199819 - DNA, 15 bp, Homo sapiens
agtaagaaaatgtta

SEQ ID NO: 1199820 - DNA, 15 bp, Homo sapiens
cagtaagaaaatgtt

SEQ ID NO: 1199821 - DNA, 15 bp, Homo sapiens
acagtaagaaaatgt

SEQ ID NO: 1199822 - DNA, 15 bp, Homo sapiens
cacagtaagaaaatg

SEQ ID NO: 1199823 - DNA, 15 bp, Homo sapiens
acacagtaagaaaat

SEQ ID NO: 1199824 - DNA, 15 bp, Homo sapiens
gacacagtaagaaaa

SEQ ID NO: 1199825 - DNA, 15 bp, Homo sapiens
tgacacagtaagaaa

SEQ ID NO: 1199826 - DNA, 15 bp, Homo sapiens
atgacacagtaagaa

SEQ ID NO: 1199827 - DNA, 15 bp, Homo sapiens
tatgacacagtaaga

SEQ ID NO: 1199828 - DNA, 15 bp, Homo sapiens
ttatgacacagtaag

SEQ ID NO: 1199829 - DNA, 15 bp, Homo sapiens
agaattatgacacag

SEQ ID NO: 1199830 - DNA, 15 bp, Homo sapiens
aagaattatgacaca

SEQ ID NO: 1199831 - DNA, 15 bp, Homo sapiens
aaagaattatgacac

SEQ ID NO: 1199832 - DNA, 15 bp, Homo sapiens
taaagaattatgaca

SEQ ID NO: 1199833 - DNA, 15 bp, Homo sapiens
ataaagaattatgac

SEQ ID NO: 1199834 - DNA, 15 bp, Homo sapiens
aagataaagaattat

SEQ ID NO: 1199835 - DNA, 15 bp, Homo sapiens
aaagataaagaatta

SEQ ID NO: 1199836 - DNA, 15 bp, Homo sapiens
gaaagataaagaatt

SEQ ID NO: 1199837 - DNA, 15 bp, Homo sapiens
agaaagataaagaat

SEQ ID NO: 1199838 - DNA, 15 bp, Homo sapiens
aagaaagataaagaa

SEQ ID NO: 1199839 - DNA, 15 bp, Homo sapiens
gaagaaagataaaga

SEQ ID NO: 1199840 - DNA, 15 bp, Homo sapiens
tgaagaaagataaag

SEQ ID NO: 1199841 - DNA, 15 bp, Homo sapiens
gtgaagaaagataaa

SEQ ID NO: 1199842 - DNA, 15 bp, Homo sapiens
agtgaagaaagataa

SEQ ID NO: 1199843 - DNA, 15 bp, Homo sapiens
gagtgaagaaagata

SEQ ID NO: 1199844 - DNA, 15 bp, Homo sapiens
ggagtgaagaaagat

SEQ ID NO: 1199845 - DNA, 15 bp, Homo sapiens
tggagtgaagaaaga

SEQ ID NO: 1199846 - DNA, 15 bp, Homo sapiens
ctggagtgaagaaag

SEQ ID NO: 1199847 - DNA, 15 bp, Homo sapiens
gctggagtgaagaaa

SEQ ID NO: 1199848 - DNA, 15 bp, Homo sapiens
ggctggagtgaagaa

SEQ ID NO: 1199849 - DNA, 15 bp, Homo sapiens
gggctggagtgaaga

SEQ ID NO: 1199850 - DNA, 15 bp, Homo sapiens
tgggctggagtgaag

SEQ ID NO: 1199851 - DNA, 15 bp, Homo sapiens
ctgggctggagtgaa

SEQ ID NO: 1199852 - DNA, 15 bp, Homo sapiens
gctgggctggagtga

SEQ ID NO: 1199853 - DNA, 15 bp, Homo sapiens
ggctgggctggagtg

SEQ ID NO: 1199854 - DNA, 15 bp, Homo sapiens
gggctgggctggagt

SEQ ID NO: 1199855 - DNA, 15 bp, Homo sapiens
tgggctgggctggag

SEQ ID NO: 1199856 - DNA, 15 bp, Homo sapiens
ctgggctgggctgga

SEQ ID NO: 1199857 - DNA, 15 bp, Homo sapiens
gctgggctgggctgg

SEQ ID NO: 1199858 - DNA, 15 bp, Homo sapiens
ggctgggctgggctg

SEQ ID NO: 1199859 - DNA, 15 bp, Homo sapiens
tggctgggctgggct

SEQ ID NO: 1199860 - DNA, 15 bp, Homo sapiens
ctggctgggctgggc

SEQ ID NO: 1199861 - DNA, 15 bp, Homo sapiens
gctggctgggctggg

SEQ ID NO: 1199862 - DNA, 15 bp, Homo sapiens
tgctggctgggctgg

SEQ ID NO: 1199863 - DNA, 15 bp, Homo sapiens
ctgctggctgggctg

SEQ ID NO: 1199864 - DNA, 15 bp, Homo sapiens
tctgctggctgggct

SEQ ID NO: 1199865 - DNA, 15 bp, Homo sapiens
gtctgctggctgggc

SEQ ID NO: 1199866 - DNA, 15 bp, Homo sapiens
tgtctgctggctggg

SEQ ID NO: 1199867 - DNA, 15 bp, Homo sapiens
atgtctgctggctgg

SEQ ID NO: 1199868 - DNA, 15 bp, Homo sapiens
catgtctgctggctg

SEQ ID NO: 1199869 - DNA, 15 bp, Homo sapiens
gcatgtctgctggct

SEQ ID NO: 1199870 - DNA, 15 bp, Homo sapiens
tgcatgtctgctggc

SEQ ID NO: 1199871 - DNA, 15 bp, Homo sapiens
ttgcatgtctgctgg

SEQ ID NO: 1199872 - DNA, 15 bp, Homo sapiens
tttgcatgtctgctg

SEQ ID NO: 1199873 - DNA, 15 bp, Homo sapiens
ctttgcatgtctgct

SEQ ID NO: 1199874 - DNA, 15 bp, Homo sapiens
actttgcatgtctgc

SEQ ID NO: 1199875 - DNA, 15 bp, Homo sapiens
aactttgcatgtctg

SEQ ID NO: 1199876 - DNA, 15 bp, Homo sapiens
aaactttgcatgtct

SEQ ID NO: 1199877 - DNA, 15 bp, Homo sapiens
aaaactttgcatgtc

SEQ ID NO: 1199878 - DNA, 15 bp, Homo sapiens
gaaaactttgcatgt

SEQ ID NO: 1199879 - DNA, 15 bp, Homo sapiens
tgaaaactttgcatg

SEQ ID NO: 1199880 - DNA, 15 bp, Homo sapiens
atgaaaactttgcat

SEQ ID NO: 1199881 - DNA, 15 bp, Homo sapiens
catgaaaactttgca

SEQ ID NO: 1199882 - DNA, 15 bp, Homo sapiens
acatgaaaactttgc

SEQ ID NO: 1199883 - DNA, 15 bp, Homo sapiens
tacatgaaaactttg

SEQ ID NO: 1199884 - DNA, 15 bp, Homo sapiens
ttacatgaaaacttt

SEQ ID NO: 1199885 - DNA, 15 bp, Homo sapiens
attacatgaaaactt

SEQ ID NO: 1199886 - DNA, 15 bp, Homo sapiens
tattacatgaaaact

SEQ ID NO: 1199887 - DNA, 15 bp, Homo sapiens
ttattacatgaaaac

SEQ ID NO: 1199888 - DNA, 15 bp, Homo sapiens
attattacatgaaaa

SEQ ID NO: 1199889 - DNA, 15 bp, Homo sapiens
aattattacatgaaa

SEQ ID NO: 1199890 - DNA, 15 bp, Homo sapiens
aaattattacatgaa

SEQ ID NO: 1199891 - DNA, 15 bp, Homo sapiens
aaaattattacatga

SEQ ID NO: 1199892 - DNA, 15 bp, Homo sapiens
aaaaattattacatg

SEQ ID NO: 1199893 - DNA, 15 bp, Homo sapiens
taaaaattattacat

SEQ ID NO: 1199894 - DNA, 15 bp, Homo sapiens
ttaaaaattattaca

SEQ ID NO: 1199895 - DNA, 15 bp, Homo sapiens
gttaaaaattattac

SEQ ID NO: 1199896 - DNA, 15 bp, Homo sapiens
agttaaaaattatta

SEQ ID NO: 1199897 - DNA, 15 bp, Homo sapiens
tagttaaaaattatt

SEQ ID NO: 1199898 - DNA, 15 bp, Homo sapiens
gtagttaaaaattat

SEQ ID NO: 1199899 - DNA, 15 bp, Homo sapiens
agtagttaaaaatta

SEQ ID NO: 1199900 - DNA, 15 bp, Homo sapiens
aagtagttaaaaatt

SEQ ID NO: 1199901 - DNA, 15 bp, Homo sapiens
taagtagttaaaaat

SEQ ID NO: 1199902 - DNA, 15 bp, Homo sapiens
ataagtagttaaaaa

SEQ ID NO: 1199903 - DNA, 15 bp, Homo sapiens
aataagtagttaaaa

SEQ ID NO: 1199904 - DNA, 15 bp, Homo sapiens
aaataagtagttaaa

SEQ ID NO: 1199905 - DNA, 15 bp, Homo sapiens
caaataagtagttaa

SEQ ID NO: 1199906 - DNA, 15 bp, Homo sapiens
tcaaataagtagtta

SEQ ID NO: 1199907 - DNA, 15 bp, Homo sapiens
atcaaataagtagtt

SEQ ID NO: 1199908 - DNA, 15 bp, Homo sapiens
tatcaaataagtagt

SEQ ID NO: 1199909 - DNA, 15 bp, Homo sapiens
atatcaaataagtag

SEQ ID NO: 1199910 - DNA, 15 bp, Homo sapiens
aatatcaaataagta

SEQ ID NO: 1199911 - DNA, 15 bp, Homo sapiens
aaatatcaaataagt

SEQ ID NO: 1199912 - DNA, 15 bp, Homo sapiens
aaaatatcaaataag

SEQ ID NO: 1199913 - DNA, 15 bp, Homo sapiens
gaaaatatcaaataa

SEQ ID NO: 1199914 - DNA, 15 bp, Homo sapiens
tgaaaatatcaaata

SEQ ID NO: 1199915 - DNA, 15 bp, Homo sapiens
ctgaaaatatcaaat

SEQ ID NO: 1199916 - DNA, 15 bp, Homo sapiens
cctgaaaatatcaaa

SEQ ID NO: 1199917 - DNA, 15 bp, Homo sapiens
gcctgaaaatatcaa

SEQ ID NO: 1199918 - DNA, 15 bp, Homo sapiens
agcctgaaaatatca

SEQ ID NO: 1199919 - DNA, 15 bp, Homo sapiens
cagcctgaaaatatc

SEQ ID NO: 1199920 - DNA, 15 bp, Homo sapiens
acagcctgaaaatat

SEQ ID NO: 1199921 - DNA, 15 bp, Homo sapiens
gacagcctgaaaata

SEQ ID NO: 1199922 - DNA, 15 bp, Homo sapiens
ggacagcctgaaaat

SEQ ID NO: 1199923 - DNA, 15 bp, Homo sapiens
gggacagcctgaaaa

SEQ ID NO: 1199924 - DNA, 15 bp, Homo sapiens
agggacagcctgaaa

SEQ ID NO: 1199925 - DNA, 15 bp, Homo sapiens
aagggacagcctgaa

SEQ ID NO: 1199926 - DNA, 15 bp, Homo sapiens
aaagggacagcctga

SEQ ID NO: 1199927 - DNA, 15 bp, Homo sapiens
taaagggacagcctg

SEQ ID NO: 1199928 - DNA, 15 bp, Homo sapiens
ataaagggacagcct

SEQ ID NO: 1199929 - DNA, 15 bp, Homo sapiens
tataaagggacagcc

SEQ ID NO: 1199930 - DNA, 15 bp, Homo sapiens
ttataaagggacagc

SEQ ID NO: 1199931 - DNA, 15 bp, Homo sapiens
attataaagggacag

SEQ ID NO: 1199932 - DNA, 15 bp, Homo sapiens
cattataaagggaca

SEQ ID NO: 1199933 - DNA, 15 bp, Homo sapiens
acattataaagggac

SEQ ID NO: 1199934 - DNA, 15 bp, Homo sapiens
aacattataaaggga

SEQ ID NO: 1199935 - DNA, 15 bp, Homo sapiens
taacattataaaggg

SEQ ID NO: 1199936 - DNA, 15 bp, Homo sapiens
ttaacattataaagg

SEQ ID NO: 1199937 - DNA, 15 bp, Homo sapiens
tttaacattataaag

SEQ ID NO: 1199938 - DNA, 15 bp, Homo sapiens
ttttaacattataaa

SEQ ID NO: 1199939 - DNA, 15 bp, Homo sapiens
attttaacattataa

SEQ ID NO: 1199940 - DNA, 15 bp, Homo sapiens
tattttaacattata

SEQ ID NO: 1199941 - DNA, 15 bp, Homo sapiens
ttattttaacattat

SEQ ID NO: 1199942 - DNA, 15 bp, Homo sapiens
attattttaacatta

SEQ ID NO: 1199943 - DNA, 15 bp, Homo sapiens
aattattttaacatt

SEQ ID NO: 1199944 - DNA, 15 bp, Homo sapiens
aaattattttaacat

SEQ ID NO: 1199945 - DNA, 15 bp, Homo sapiens
taaattattttaaca

SEQ ID NO: 1199946 - DNA, 15 bp, Homo sapiens
ataaattattttaac

SEQ ID NO: 1199947 - DNA, 15 bp, Homo sapiens
gataaattattttaa

SEQ ID NO: 1199948 - DNA, 15 bp, Homo sapiens
agataaattatttta

SEQ ID NO: 1199949 - DNA, 15 bp, Homo sapiens
aagataaattatttt

SEQ ID NO: 1199950 - DNA, 15 bp, Homo sapiens
gaagataaattattt

SEQ ID NO: 1199951 - DNA, 15 bp, Homo sapiens
tgaagataaattatt

SEQ ID NO: 1199952 - DNA, 15 bp, Homo sapiens
ttgaagataaattat

SEQ ID NO: 1199953 - DNA, 15 bp, Homo sapiens
attgaagataaatta

SEQ ID NO: 1199954 - DNA, 15 bp, Homo sapiens
cattgaagataaatt

SEQ ID NO: 1199955 - DNA, 15 bp, Homo sapiens
acattgaagataaat

SEQ ID NO: 1199956 - DNA, 15 bp, Homo sapiens
tacattgaagataaa

SEQ ID NO: 1199957 - DNA, 15 bp, Homo sapiens
ttacattgaagataa

SEQ ID NO: 1199958 - DNA, 15 bp, Homo sapiens
attacattgaagata

SEQ ID NO: 1199959 - DNA, 15 bp, Homo sapiens
gattacattgaagat

SEQ ID NO: 1199960 - DNA, 15 bp, Homo sapiens
tgattacattgaaga

SEQ ID NO: 1199961 - DNA, 15 bp, Homo sapiens
ttgattacattgaag

SEQ ID NO: 1199962 - DNA, 15 bp, Homo sapiens
attgattacattgaa

SEQ ID NO: 1199963 - DNA, 15 bp, Homo sapiens
aattgattacattga

SEQ ID NO: 1199964 - DNA, 15 bp, Homo sapiens
aaattgattacattg

SEQ ID NO: 1199965 - DNA, 15 bp, Homo sapiens
caaattgattacatt

SEQ ID NO: 1199966 - DNA, 15 bp, Homo sapiens
tcaaattgattacat

SEQ ID NO: 1199967 - DNA, 15 bp, Homo sapiens
ttcaaattgattaca

SEQ ID NO: 1199968 - DNA, 15 bp, Homo sapiens
cttcaaattgattac

SEQ ID NO: 1199969 - DNA, 15 bp, Homo sapiens
ccttcaaattgatta

SEQ ID NO: 1199970 - DNA, 15 bp, Homo sapiens
tccttcaaattgatt

SEQ ID NO: 1199971 - DNA, 15 bp, Homo sapiens
ttccttcaaattgat

SEQ ID NO: 1199972 - DNA, 15 bp, Homo sapiens
gttccttcaaattga

SEQ ID NO: 1199973 - DNA, 15 bp, Homo sapiens
tgttccttcaaattg

SEQ ID NO: 1199974 - DNA, 15 bp, Homo sapiens
ttgttccttcaaatt

SEQ ID NO: 1199975 - DNA, 15 bp, Homo sapiens
attgttccttcaaat

SEQ ID NO: 1199976 - DNA, 15 bp, Homo sapiens
cattgttccttcaaa

SEQ ID NO: 1199977 - DNA, 15 bp, Homo sapiens
gcattgttccttcaa

SEQ ID NO: 1199978 - DNA, 15 bp, Homo sapiens
tgcattgttccttca

SEQ ID NO: 1199979 - DNA, 15 bp, Homo sapiens
ttgcattgttccttc

SEQ ID NO: 1199980 - DNA, 15 bp, Homo sapiens
tttgcattgttcctt

SEQ ID NO: 1199981 - DNA, 15 bp, Homo sapiens
atttgcattgttcct

SEQ ID NO: 1199982 - DNA, 15 bp, Homo sapiens
tatttgcattgttcc

SEQ ID NO: 1199983 - DNA, 15 bp, Homo sapiens
ttatttgcattgttc

SEQ ID NO: 1199984 - DNA, 15 bp, Homo sapiens
cttatttgcattgtt

SEQ ID NO: 1199985 - DNA, 15 bp, Homo sapiens
acttatttgcattgt

SEQ ID NO: 1199986 - DNA, 15 bp, Homo sapiens
tacttatttgcattg

SEQ ID NO: 1199987 - DNA, 15 bp, Homo sapiens
atacttatttgcatt

SEQ ID NO: 1199988 - DNA, 15 bp, Homo sapiens
catacttatttgcat

SEQ ID NO: 1199989 - DNA, 15 bp, Homo sapiens
acatacttatttgca

SEQ ID NO: 1199990 - DNA, 15 bp, Homo sapiens
aacatacttatttgc

SEQ ID NO: 1199991 - DNA, 15 bp, Homo sapiens
caacatacttatttg

SEQ ID NO: 1199992 - DNA, 15 bp, Homo sapiens
gcaacatacttattt

SEQ ID NO: 1199993 - DNA, 15 bp, Homo sapiens
agcaacatacttatt

SEQ ID NO: 1199994 - DNA, 15 bp, Homo sapiens
aagcaacatacttat

SEQ ID NO: 1199995 - DNA, 15 bp, Homo sapiens
caagcaacatactta

SEQ ID NO: 1199996 - DNA, 15 bp, Homo sapiens
acaagcaacatactt

SEQ ID NO: 1199997 - DNA, 15 bp, Homo sapiens
gacaagcaacatact

SEQ ID NO: 1199998 - DNA, 15 bp, Homo sapiens
agacaagcaacatac

SEQ ID NO: 1199999 - DNA, 15 bp, Homo sapiens
cagacaagcaacata

SEQ ID NO: 1200000 - DNA, 15 bp, Homo sapiens
acagacaagcaacat

SEQ ID NO: 1200001 - DNA, 15 bp, Homo sapiens
cacagacaagcaaca

SEQ ID NO: 1200002 - DNA, 15 bp, Homo sapiens
acacagacaagcaac

SEQ ID NO: 1200003 - DNA, 15 bp, Homo sapiens
tacacagacaagcaa

SEQ ID NO: 1200004 - DNA, 15 bp, Homo sapiens
gtacacagacaagca

SEQ ID NO: 1200005 - DNA, 15 bp, Homo sapiens
tgtacacagacaagc

SEQ ID NO: 1200006 - DNA, 15 bp, Homo sapiens
ttgtacacagacaag

SEQ ID NO: 1200007 - DNA, 15 bp, Homo sapiens
tttgtacacagacaa

SEQ ID NO: 1200008 - DNA, 15 bp, Homo sapiens
gtttgtacacagaca

SEQ ID NO: 1200009 - DNA, 15 bp, Homo sapiens
ggtttgtacacagac

SEQ ID NO: 1200010 - DNA, 15 bp, Homo sapiens
tggtttgtacacaga

SEQ ID NO: 1200011 - DNA, 15 bp, Homo sapiens
ttggtttgtacacag

SEQ ID NO: 1200012 - DNA, 15 bp, Homo sapiens
tttggtttgtacaca

SEQ ID NO: 1200013 - DNA, 15 bp, Homo sapiens
gtttggtttgtacac

SEQ ID NO: 1200014 - DNA, 15 bp, Homo sapiens
tgtttggtttgtaca

SEQ ID NO: 1200015 - DNA, 15 bp, Homo sapiens
gtgtttggtttgtac

SEQ ID NO: 1200016 - DNA, 15 bp, Homo sapiens
agtgtttggtttgta

SEQ ID NO: 1200017 - DNA, 15 bp, Homo sapiens
tagtgtttggtttgt

SEQ ID NO: 1200018 - DNA, 15 bp, Homo sapiens
ttagtgtttggtttg

SEQ ID NO: 1200019 - DNA, 15 bp, Homo sapiens
cttagtgtttggttt

SEQ ID NO: 1200020 - DNA, 15 bp, Homo sapiens
tcttagtgtttggtt

SEQ ID NO: 1200021 - DNA, 15 bp, Homo sapiens
ttcttagtgtttggt

SEQ ID NO: 1200022 - DNA, 15 bp, Homo sapiens
attcttagtgtttgg

SEQ ID NO: 1200023 - DNA, 15 bp, Homo sapiens
aattcttagtgtttg

SEQ ID NO: 1200024 - DNA, 15 bp, Homo sapiens
aaattcttagtgttt

SEQ ID NO: 1200025 - DNA, 15 bp, Homo sapiens
aaaattcttagtgtt

SEQ ID NO: 1200026 - DNA, 15 bp, Homo sapiens
aaaaattcttagtgt

SEQ ID NO: 1200027 - DNA, 15 bp, Homo sapiens
gaaaaattcttagtg

SEQ ID NO: 1200028 - DNA, 15 bp, Homo sapiens
tgaaaaattcttagt

SEQ ID NO: 1200029 - DNA, 15 bp, Homo sapiens
ttgaaaaattcttag

SEQ ID NO: 1200030 - DNA, 15 bp, Homo sapiens
gttgaaaaattctta

SEQ ID NO: 1200031 - DNA, 15 bp, Homo sapiens
ggttgaaaaattctt

SEQ ID NO: 1200032 - DNA, 15 bp, Homo sapiens
tggttgaaaaattct

SEQ ID NO: 1200033 - DNA, 15 bp, Homo sapiens
ctggttgaaaaattc

SEQ ID NO: 1200034 - DNA, 15 bp, Homo sapiens
actggttgaaaaatt

SEQ ID NO: 1200035 - DNA, 15 bp, Homo sapiens
aactggttgaaaaat

SEQ ID NO: 1200036 - DNA, 15 bp, Homo sapiens
aaactggttgaaaaa

SEQ ID NO: 1200037 - DNA, 15 bp, Homo sapiens
aaaactggttgaaaa

SEQ ID NO: 1200038 - DNA, 15 bp, Homo sapiens
caaaactggttgaaa

SEQ ID NO: 1200039 - DNA, 15 bp, Homo sapiens
gcaaaactggttgaa

SEQ ID NO: 1200040 - DNA, 15 bp, Homo sapiens
agcaaaactggttga

SEQ ID NO: 1200041 - DNA, 15 bp, Homo sapiens
cagcaaaactggttg

SEQ ID NO: 1200042 - DNA, 15 bp, Homo sapiens
ccagcaaaactggtt

SEQ ID NO: 1200043 - DNA, 15 bp, Homo sapiens
tccagcaaaactggt

SEQ ID NO: 1200044 - DNA, 15 bp, Homo sapiens
atccagcaaaactgg

SEQ ID NO: 1200045 - DNA, 15 bp, Homo sapiens
aatccagcaaaactg

SEQ ID NO: 1200046 - DNA, 15 bp, Homo sapiens
gaatccagcaaaact

SEQ ID NO: 1200047 - DNA, 15 bp, Homo sapiens
tgaatccagcaaaac

SEQ ID NO: 1200048 - DNA, 15 bp, Homo sapiens
atgaatccagcaaaa

SEQ ID NO: 1200049 - DNA, 15 bp, Homo sapiens
gatgaatccagcaaa

SEQ ID NO: 1200050 - DNA, 15 bp, Homo sapiens
tgatgaatccagcaa

SEQ ID NO: 1200051 - DNA, 15 bp, Homo sapiens
ctgatgaatccagca

SEQ ID NO: 1200052 - DNA, 15 bp, Homo sapiens
gctgatgaatccagc

SEQ ID NO: 1200053 - DNA, 15 bp, Homo sapiens
tgctgatgaatccag

SEQ ID NO: 1200054 - DNA, 15 bp, Homo sapiens
atgctgatgaatcca

SEQ ID NO: 1200055 - DNA, 15 bp, Homo sapiens
tatgctgatgaatcc

SEQ ID NO: 1200056 - DNA, 15 bp, Homo sapiens
atatgctgatgaatc

SEQ ID NO: 1200057 - DNA, 15 bp, Homo sapiens
tatatgctgatgaat

SEQ ID NO: 1200058 - DNA, 15 bp, Homo sapiens
ttatatgctgatgaa

SEQ ID NO: 1200059 - DNA, 15 bp, Homo sapiens
attatatgctgatga

SEQ ID NO: 1200060 - DNA, 15 bp, Homo sapiens
aattatatgctgatg

SEQ ID NO: 1200061 - DNA, 15 bp, Homo sapiens
aaattatatgctgat

SEQ ID NO: 1200062 - DNA, 15 bp, Homo sapiens
aaaattatatgctga

SEQ ID NO: 1200063 - DNA, 15 bp, Homo sapiens
taaaattatatgctg

SEQ ID NO: 1200064 - DNA, 15 bp, Homo sapiens
ataaaattatatgct

SEQ ID NO: 1200065 - DNA, 15 bp, Homo sapiens
aataaaattatatgc

SEQ ID NO: 1200066 - DNA, 15 bp, Homo sapiens
gaataaaattatatg

SEQ ID NO: 1200067 - DNA, 15 bp, Homo sapiens
agaataaaattatat

SEQ ID NO: 1200068 - DNA, 15 bp, Homo sapiens
cagaataaaattata

SEQ ID NO: 1200069 - DNA, 15 bp, Homo sapiens
gcagaataaaattat

SEQ ID NO: 1200070 - DNA, 15 bp, Homo sapiens
ggcagaataaaatta

SEQ ID NO: 1200071 - DNA, 15 bp, Homo sapiens
aggcagaataaaatt

SEQ ID NO: 1200072 - DNA, 15 bp, Homo sapiens
aaggcagaataaaat

SEQ ID NO: 1200073 - DNA, 15 bp, Homo sapiens
aaaggcagaataaaa

SEQ ID NO: 1200074 - DNA, 15 bp, Homo sapiens
aaaaggcagaataaa

SEQ ID NO: 1200075 - DNA, 15 bp, Homo sapiens
taaaaggcagaataa

SEQ ID NO: 1200076 - DNA, 15 bp, Homo sapiens
gtaaaaggcagaata

SEQ ID NO: 1200077 - DNA, 15 bp, Homo sapiens
agtaaaaggcagaat

SEQ ID NO: 1200078 - DNA, 15 bp, Homo sapiens
aagtaaaaggcagaa

SEQ ID NO: 1200079 - DNA, 15 bp, Homo sapiens
aaagtaaaaggcaga

SEQ ID NO: 1200080 - DNA, 15 bp, Homo sapiens
aaaagtaaaaggcag

SEQ ID NO: 1200081 - DNA, 15 bp, Homo sapiens
taaaagtaaaaggca

SEQ ID NO: 1200082 - DNA, 15 bp, Homo sapiens
ctaaaagtaaaaggc

SEQ ID NO: 1200083 - DNA, 15 bp, Homo sapiens
actaaaagtaaaagg

SEQ ID NO: 1200084 - DNA, 15 bp, Homo sapiens
gactaaaagtaaaag

SEQ ID NO: 1200085 - DNA, 15 bp, Homo sapiens
tgactaaaagtaaaa

SEQ ID NO: 1200086 - DNA, 15 bp, Homo sapiens
atgactaaaagtaaa

SEQ ID NO: 1200087 - DNA, 15 bp, Homo sapiens
tatgactaaaagtaa

SEQ ID NO: 1200088 - DNA, 15 bp, Homo sapiens
atatgactaaaagta

SEQ ID NO: 1200089 - DNA, 15 bp, Homo sapiens
aatatgactaaaagt

SEQ ID NO: 1200090 - DNA, 15 bp, Homo sapiens
aaatatgactaaaag

SEQ ID NO: 1200091 - DNA, 15 bp, Homo sapiens
taaatatgactaaaa

SEQ ID NO: 1200092 - DNA, 15 bp, Homo sapiens
ataaatatgactaaa

SEQ ID NO: 1200093 - DNA, 15 bp, Homo sapiens
aataaatatgactaa

SEQ ID NO: 1200094 - DNA, 15 bp, Homo sapiens
gaataaatatgacta

SEQ ID NO: 1200095 - DNA, 15 bp, Homo sapiens
ggaataaatatgact

SEQ ID NO: 1200096 - DNA, 15 bp, Homo sapiens
tggaataaatatgac

SEQ ID NO: 1200097 - DNA, 15 bp, Homo sapiens
atggaataaatatga

SEQ ID NO: 1200098 - DNA, 15 bp, Homo sapiens
tatggaataaatatg

SEQ ID NO: 1200099 - DNA, 15 bp, Homo sapiens
ttatggaataaatat

SEQ ID NO: 1200100 - DNA, 15 bp, Homo sapiens
gttatggaataaata

SEQ ID NO: 1200101 - DNA, 15 bp, Homo sapiens
tgttatggaataaat

SEQ ID NO: 1200102 - DNA, 15 bp, Homo sapiens
atgttatggaataaa

SEQ ID NO: 1200103 - DNA, 15 bp, Homo sapiens
tatgttatggaataa

SEQ ID NO: 1200104 - DNA, 15 bp, Homo sapiens
atatgttatggaata

SEQ ID NO: 1200105 - DNA, 15 bp, Homo sapiens
aatatgttatggaat

SEQ ID NO: 1200106 - DNA, 15 bp, Homo sapiens
gaatatgttatggaa

SEQ ID NO: 1200107 - DNA, 15 bp, Homo sapiens
agaatatgttatgga

SEQ ID NO: 1200108 - DNA, 15 bp, Homo sapiens
aagaatatgttatgg

SEQ ID NO: 1200109 - DNA, 15 bp, Homo sapiens
aaagaatatgttatg

SEQ ID NO: 1200110 - DNA, 15 bp, Homo sapiens
aaaagaatatgttat

SEQ ID NO: 1200111 - DNA, 15 bp, Homo sapiens
taaaagaatatgtta

SEQ ID NO: 1200112 - DNA, 15 bp, Homo sapiens
ttaaaagaatatgtt

SEQ ID NO: 1200113 - DNA, 15 bp, Homo sapiens
cttaaaagaatatgt

SEQ ID NO: 1200114 - DNA, 15 bp, Homo sapiens
tcttaaaagaatatg

SEQ ID NO: 1200115 - DNA, 15 bp, Homo sapiens
gtcttaaaagaatat

SEQ ID NO: 1200116 - DNA, 15 bp, Homo sapiens
tgtcttaaaagaata

SEQ ID NO: 1200117 - DNA, 15 bp, Homo sapiens
atgtcttaaaagaat

SEQ ID NO: 1200118 - DNA, 15 bp, Homo sapiens
gatgtcttaaaagaa

SEQ ID NO: 1200119 - DNA, 15 bp, Homo sapiens
tgatgtcttaaaaga

SEQ ID NO: 1200120 - DNA, 15 bp, Homo sapiens
gtgatgtcttaaaag

SEQ ID NO: 1200121 - DNA, 15 bp, Homo sapiens
agtgatgtcttaaaa

SEQ ID NO: 1200122 - DNA, 15 bp, Homo sapiens
tagtgatgtcttaaa

SEQ ID NO: 1200123 - DNA, 15 bp, Homo sapiens
atagtgatgtcttaa

SEQ ID NO: 1200124 - DNA, 15 bp, Homo sapiens
aatagtgatgtctta

SEQ ID NO: 1200125 - DNA, 15 bp, Homo sapiens
taatagtgatgtctt

SEQ ID NO: 1200126 - DNA, 15 bp, Homo sapiens
ctaatagtgatgtct

SEQ ID NO: 1200127 - DNA, 15 bp, Homo sapiens
actaatagtgatgtc

SEQ ID NO: 1200128 - DNA, 15 bp, Homo sapiens
gactaatagtgatgt

SEQ ID NO: 1200129 - DNA, 15 bp, Homo sapiens
agactaatagtgatg

SEQ ID NO: 1200130 - DNA, 15 bp, Homo sapiens
aagactaatagtgat

SEQ ID NO: 1200131 - DNA, 15 bp, Homo sapiens
taagactaatagtga

SEQ ID NO: 1200132 - DNA, 15 bp, Homo sapiens
ctaagactaatagtg

SEQ ID NO: 1200133 - DNA, 15 bp, Homo sapiens
tctaagactaatagt

SEQ ID NO: 1200134 - DNA, 15 bp, Homo sapiens
ttctaagactaatag

SEQ ID NO: 1200135 - DNA, 15 bp, Homo sapiens
tttctaagactaata

SEQ ID NO: 1200136 - DNA, 15 bp, Homo sapiens
atttctaagactaat

SEQ ID NO: 1200137 - DNA, 15 bp, Homo sapiens
gatttctaagactaa

SEQ ID NO: 1200138 - DNA, 15 bp, Homo sapiens
tgatttctaagacta

SEQ ID NO: 1200139 - DNA, 15 bp, Homo sapiens
ttgatttctaagact

SEQ ID NO: 1200140 - DNA, 15 bp, Homo sapiens
attgatttctaagac

SEQ ID NO: 1200141 - DNA, 15 bp, Homo sapiens
cattgatttctaaga

SEQ ID NO: 1200142 - DNA, 15 bp, Homo sapiens
tcattgatttctaag

SEQ ID NO: 1200143 - DNA, 15 bp, Homo sapiens
ttcattgatttctaa

SEQ ID NO: 1200144 - DNA, 15 bp, Homo sapiens
tttcattgatttcta

SEQ ID NO: 1200145 - DNA, 15 bp, Homo sapiens
atttcattgatttct

SEQ ID NO: 1200146 - DNA, 15 bp, Homo sapiens
tatttcattgatttc

SEQ ID NO: 1200147 - DNA, 15 bp, Homo sapiens
ttatttcattgattt

SEQ ID NO: 1200148 - DNA, 15 bp, Homo sapiens
cttatttcattgatt

SEQ ID NO: 1200149 - DNA, 15 bp, Homo sapiens
tcttatttcattgat

SEQ ID NO: 1200150 - DNA, 15 bp, Homo sapiens
atcttatttcattga

SEQ ID NO: 1200151 - DNA, 15 bp, Homo sapiens
aatcttatttcattg

SEQ ID NO: 1200152 - DNA, 15 bp, Homo sapiens
aaatcttatttcatt

SEQ ID NO: 1200153 - DNA, 15 bp, Homo sapiens
caaatcttatttcat

SEQ ID NO: 1200154 - DNA, 15 bp, Homo sapiens
tcaaatcttatttca

SEQ ID NO: 1200155 - DNA, 15 bp, Homo sapiens
atcaaatcttatttc

SEQ ID NO: 1200156 - DNA, 15 bp, Homo sapiens
catcaaatcttattt

SEQ ID NO: 1200157 - DNA, 15 bp, Homo sapiens
ccatcaaatcttatt

SEQ ID NO: 1200158 - DNA, 15 bp, Homo sapiens
accatcaaatcttat

SEQ ID NO: 1200159 - DNA, 15 bp, Homo sapiens
gaccatcaaatctta

SEQ ID NO: 1200160 - DNA, 15 bp, Homo sapiens
agaccatcaaatctt

SEQ ID NO: 1200161 - DNA, 15 bp, Homo sapiens
cagaccatcaaatct

SEQ ID NO: 1200162 - DNA, 15 bp, Homo sapiens
ccagaccatcaaatc

SEQ ID NO: 1200163 - DNA, 15 bp, Homo sapiens
accagaccatcaaat

SEQ ID NO: 1200164 - DNA, 15 bp, Homo sapiens
gaccagaccatcaaa

SEQ ID NO: 1200165 - DNA, 15 bp, Homo sapiens
agaccagaccatcaa

SEQ ID NO: 1200166 - DNA, 15 bp, Homo sapiens
gagaccagaccatca

SEQ ID NO: 1200167 - DNA, 15 bp, Homo sapiens
agagaccagaccatc

SEQ ID NO: 1200168 - DNA, 15 bp, Homo sapiens
aagagaccagaccat

SEQ ID NO: 1200169 - DNA, 15 bp, Homo sapiens
taagagaccagacca

SEQ ID NO: 1200170 - DNA, 15 bp, Homo sapiens
gtaagagaccagacc

SEQ ID NO: 1200171 - DNA, 15 bp, Homo sapiens
agtaagagaccagac

SEQ ID NO: 1200172 - DNA, 15 bp, Homo sapiens
aagtaagagaccaga

SEQ ID NO: 1200173 - DNA, 15 bp, Homo sapiens
gaagtaagagaccag

SEQ ID NO: 1200174 - DNA, 15 bp, Homo sapiens
agaagtaagagacca

SEQ ID NO: 1200175 - DNA, 15 bp, Homo sapiens
gagaagtaagagacc

SEQ ID NO: 1200176 - DNA, 15 bp, Homo sapiens
tgagaagtaagagac

SEQ ID NO: 1200177 - DNA, 15 bp, Homo sapiens
ctgagaagtaagaga

SEQ ID NO: 1200178 - DNA, 15 bp, Homo sapiens
gctgagaagtaagag

SEQ ID NO: 1200179 - DNA, 15 bp, Homo sapiens
ggctgagaagtaaga

SEQ ID NO: 1200180 - DNA, 15 bp, Homo sapiens
aggctgagaagtaag

SEQ ID NO: 1200181 - DNA, 15 bp, Homo sapiens
gaggctgagaagtaa

SEQ ID NO: 1200182 - DNA, 15 bp, Homo sapiens
ggaggctgagaagta

SEQ ID NO: 1200183 - DNA, 15 bp, Homo sapiens
ttggaggctgagaag

SEQ ID NO: 1200184 - DNA, 15 bp, Homo sapiens
tttggaggctgagaa

SEQ ID NO: 1200185 - DNA, 15 bp, Homo sapiens
ttttggaggctgaga

SEQ ID NO: 1200186 - DNA, 15 bp, Homo sapiens
attttggaggctgag

SEQ ID NO: 1200187 - DNA, 15 bp, Homo sapiens
aattttggaggctga

SEQ ID NO: 1200188 - DNA, 15 bp, Homo sapiens
aaattttggaggctg

SEQ ID NO: 1200189 - DNA, 15 bp, Homo sapiens
aaaattttggaggct

SEQ ID NO: 1200190 - DNA, 15 bp, Homo sapiens
gaaaattttggaggc

SEQ ID NO: 1200191 - DNA, 15 bp, Homo sapiens
ggaaaattttggagg

SEQ ID NO: 1200192 - DNA, 15 bp, Homo sapiens
tggaaaattttggag

SEQ ID NO: 1200193 - DNA, 15 bp, Homo sapiens
atggaaaattttgga

SEQ ID NO: 1200194 - DNA, 15 bp, Homo sapiens
tatggaaaattttgg

SEQ ID NO: 1200195 - DNA, 15 bp, Homo sapiens
ttatggaaaattttg

SEQ ID NO: 1200196 - DNA, 15 bp, Homo sapiens
attatggaaaatttt

SEQ ID NO: 1200197 - DNA, 15 bp, Homo sapiens
cattatggaaaattt

SEQ ID NO: 1200198 - DNA, 15 bp, Homo sapiens
gcattatggaaaatt

SEQ ID NO: 1200199 - DNA, 15 bp, Homo sapiens
ggcattatggaaaat

SEQ ID NO: 1200200 - DNA, 15 bp, Homo sapiens
tggcattatggaaaa

SEQ ID NO: 1200201 - DNA, 15 bp, Homo sapiens
ttggcattatggaaa

SEQ ID NO: 1200202 - DNA, 15 bp, Homo sapiens
tttggcattatggaa

SEQ ID NO: 1200203 - DNA, 15 bp, Homo sapiens
atttggcattatgga

SEQ ID NO: 1200204 - DNA, 15 bp, Homo sapiens
tatttggcattatgg

SEQ ID NO: 1200205 - DNA, 15 bp, Homo sapiens
ttatttggcattatg

SEQ ID NO: 1200206 - DNA, 15 bp, Homo sapiens
cttatttggcattat

SEQ ID NO: 1200207 - DNA, 15 bp, Homo sapiens
tcttatttggcatta

SEQ ID NO: 1200208 - DNA, 15 bp, Homo sapiens
ctcttatttggcatt

SEQ ID NO: 1200209 - DNA, 15 bp, Homo sapiens
tctcttatttggcat

SEQ ID NO: 1200210 - DNA, 15 bp, Homo sapiens
ttctcttatttggca

SEQ ID NO: 1200211 - DNA, 15 bp, Homo sapiens
tttctcttatttggc

SEQ ID NO: 1200212 - DNA, 15 bp, Homo sapiens
atttctcttatttgg

SEQ ID NO: 1200213 - DNA, 15 bp, Homo sapiens
tatttctcttatttg

SEQ ID NO: 1200214 - DNA, 15 bp, Homo sapiens
atatttctcttattt

SEQ ID NO: 1200215 - DNA, 15 bp, Homo sapiens
gatatttctcttatt

SEQ ID NO: 1200216 - DNA, 15 bp, Homo sapiens
ggatatttctcttat

SEQ ID NO: 1200217 - DNA, 15 bp, Homo sapiens
gggatatttctctta

SEQ ID NO: 1200218 - DNA, 15 bp, Homo sapiens
agggatatttctctt

SEQ ID NO: 1200219 - DNA, 15 bp, Homo sapiens
cagggatatttctct

SEQ ID NO: 1200220 - DNA, 15 bp, Homo sapiens
ccagggatatttctc

SEQ ID NO: 1200221 - DNA, 15 bp, Homo sapiens
accagggatatttct

SEQ ID NO: 1200222 - DNA, 15 bp, Homo sapiens
caccagggatatttc

SEQ ID NO: 1200223 - DNA, 15 bp, Homo sapiens
acaccagggatattt

SEQ ID NO: 1200224 - DNA, 15 bp, Homo sapiens
tacaccagggatatt

SEQ ID NO: 1200225 - DNA, 15 bp, Homo sapiens
ctacaccagggatat

SEQ ID NO: 1200226 - DNA, 15 bp, Homo sapiens
gctacaccagggata

SEQ ID NO: 1200227 - DNA, 15 bp, Homo sapiens
tgctacaccagggat

SEQ ID NO: 1200228 - DNA, 15 bp, Homo sapiens
ttgctacaccaggga

SEQ ID NO: 1200229 - DNA, 15 bp, Homo sapiens
attgctacaccaggg

SEQ ID NO: 1200230 - DNA, 15 bp, Homo sapiens
gattgctacaccagg

SEQ ID NO: 1200231 - DNA, 15 bp, Homo sapiens
agattgctacaccag

SEQ ID NO: 1200232 - DNA, 15 bp, Homo sapiens
gagattgctacacca

SEQ ID NO: 1200233 - DNA, 15 bp, Homo sapiens
ggagattgctacacc

SEQ ID NO: 1200234 - DNA, 15 bp, Homo sapiens
tggagattgctacac

SEQ ID NO: 1200235 - DNA, 15 bp, Homo sapiens
ttggagattgctaca

SEQ ID NO: 1200236 - DNA, 15 bp, Homo sapiens
attggagattgctac

SEQ ID NO: 1200237 - DNA, 15 bp, Homo sapiens
aattggagattgcta

SEQ ID NO: 1200238 - DNA, 15 bp, Homo sapiens
gaattggagattgct

SEQ ID NO: 1200239 - DNA, 15 bp, Homo sapiens
ggaattggagattgc

SEQ ID NO: 1200240 - DNA, 15 bp, Homo sapiens
gggaattggagattg

SEQ ID NO: 1200241 - DNA, 15 bp, Homo sapiens
agggaattggagatt

SEQ ID NO: 1200242 - DNA, 15 bp, Homo sapiens
cagggaattggagat

SEQ ID NO: 1200243 - DNA, 15 bp, Homo sapiens
tcagggaattggaga

SEQ ID NO: 1200244 - DNA, 15 bp, Homo sapiens
ttcagggaattggag

SEQ ID NO: 1200245 - DNA, 15 bp, Homo sapiens
tttcagggaattgga

SEQ ID NO: 1200246 - DNA, 15 bp, Homo sapiens
ctttcagggaattgg

SEQ ID NO: 1200247 - DNA, 15 bp, Homo sapiens
tctttcagggaattg

SEQ ID NO: 1200248 - DNA, 15 bp, Homo sapiens
ctctttcagggaatt

SEQ ID NO: 1200249 - DNA, 15 bp, Homo sapiens
tctctttcagggaat

SEQ ID NO: 1200250 - DNA, 15 bp, Homo sapiens
ttctctttcagggaa

SEQ ID NO: 1200251 - DNA, 15 bp, Homo sapiens
cttctctttcaggga

SEQ ID NO: 1200252 - DNA, 15 bp, Homo sapiens
acttctctttcaggg

SEQ ID NO: 1200253 - DNA, 15 bp, Homo sapiens
cacttctctttcagg

SEQ ID NO: 1200254 - DNA, 15 bp, Homo sapiens
tcacttctctttcag

SEQ ID NO: 1200255 - DNA, 15 bp, Homo sapiens
ttcacttctctttca

SEQ ID NO: 1200256 - DNA, 15 bp, Homo sapiens
gttcacttctctttc

SEQ ID NO: 1200257 - DNA, 15 bp, Homo sapiens
agttcacttctcttt

SEQ ID NO: 1200258 - DNA, 15 bp, Homo sapiens
aagttcacttctctt

SEQ ID NO: 1200259 - DNA, 15 bp, Homo sapiens
caagttcacttctct

SEQ ID NO: 1200260 - DNA, 15 bp, Homo sapiens
tcaagttcacttctc

SEQ ID NO: 1200261 - DNA, 15 bp, Homo sapiens
ttcaagttcacttct

SEQ ID NO: 1200262 - DNA, 15 bp, Homo sapiens
tttcaagttcacttc

SEQ ID NO: 1200263 - DNA, 15 bp, Homo sapiens
ttttcaagttcactt

SEQ ID NO: 1200264 - DNA, 15 bp, Homo sapiens
attttcaagttcact

SEQ ID NO: 1200265 - DNA, 15 bp, Homo sapiens
tattttcaagttcac

SEQ ID NO: 1200266 - DNA, 15 bp, Homo sapiens
ttattttcaagttca

SEQ ID NO: 1200267 - DNA, 15 bp, Homo sapiens
attattttcaagttc

SEQ ID NO: 1200268 - DNA, 15 bp, Homo sapiens
aattattttcaagtt

SEQ ID NO: 1200269 - DNA, 15 bp, Homo sapiens
aaattattttcaagt

SEQ ID NO: 1200270 - DNA, 15 bp, Homo sapiens
aaaattattttcaag

SEQ ID NO: 1200271 - DNA, 15 bp, Homo sapiens
gaaaattattttcaa

SEQ ID NO: 1200272 - DNA, 15 bp, Homo sapiens
tgaaaattattttca

SEQ ID NO: 1200273 - DNA, 15 bp, Homo sapiens
ttgaaaattattttc

SEQ ID NO: 1200274 - DNA, 15 bp, Homo sapiens
cttgaaaattatttt

SEQ ID NO: 1200275 - DNA, 15 bp, Homo sapiens
acttgaaaattattt

SEQ ID NO: 1200276 - DNA, 15 bp, Homo sapiens
gacttgaaaattatt

SEQ ID NO: 1200277 - DNA, 15 bp, Homo sapiens
ggacttgaaaattat

SEQ ID NO: 1200278 - DNA, 15 bp, Homo sapiens
aggacttgaaaatta

SEQ ID NO: 1200279 - DNA, 15 bp, Homo sapiens
aaggacttgaaaatt

SEQ ID NO: 1200280 - DNA, 15 bp, Homo sapiens
aaaggacttgaaaat

SEQ ID NO: 1200281 - DNA, 15 bp, Homo sapiens
aaaaggacttgaaaa

SEQ ID NO: 1200282 - DNA, 15 bp, Homo sapiens
aaaaaggacttgaaa

SEQ ID NO: 1200283 - DNA, 15 bp, Homo sapiens
taaaaaggacttgaa

SEQ ID NO: 1200284 - DNA, 15 bp, Homo sapiens
ttaaaaaggacttga

SEQ ID NO: 1200285 - DNA, 15 bp, Homo sapiens
cttaaaaaggacttg

SEQ ID NO: 1200286 - DNA, 15 bp, Homo sapiens
gcttaaaaaggactt

SEQ ID NO: 1200287 - DNA, 15 bp, Homo sapiens
ggcttaaaaaggact

SEQ ID NO: 1200288 - DNA, 15 bp, Homo sapiens
tggcttaaaaaggac

SEQ ID NO: 1200289 - DNA, 15 bp, Homo sapiens
atggcttaaaaagga

SEQ ID NO: 1200290 - DNA, 15 bp, Homo sapiens
catggcttaaaaagg

SEQ ID NO: 1200291 - DNA, 15 bp, Homo sapiens
tcatggcttaaaaag

SEQ ID NO: 1200292 - DNA, 15 bp, Homo sapiens
ttcatggcttaaaaa

SEQ ID NO: 1200293 - DNA, 15 bp, Homo sapiens
cttcatggcttaaaa

SEQ ID NO: 1200294 - DNA, 15 bp, Homo sapiens
tcttcatggcttaaa

SEQ ID NO: 1200295 - DNA, 15 bp, Homo sapiens
atcttcatggcttaa

SEQ ID NO: 1200296 - DNA, 15 bp, Homo sapiens
aatcttcatggctta

SEQ ID NO: 1200297 - DNA, 15 bp, Homo sapiens
aaatcttcatggctt

SEQ ID NO: 1200298 - DNA, 15 bp, Homo sapiens
taaatcttcatggct

SEQ ID NO: 1200299 - DNA, 15 bp, Homo sapiens
ataaatcttcatggc

SEQ ID NO: 1200300 - DNA, 15 bp, Homo sapiens
aataaatcttcatgg

SEQ ID NO: 1200301 - DNA, 15 bp, Homo sapiens
aaataaatcttcatg

SEQ ID NO: 1200302 - DNA, 15 bp, Homo sapiens
aaaataaatcttcat

SEQ ID NO: 1200303 - DNA, 15 bp, Homo sapiens
caaaataaatcttca

SEQ ID NO: 1200304 - DNA, 15 bp, Homo sapiens
tcaaaataaatcttc

SEQ ID NO: 1200305 - DNA, 15 bp, Homo sapiens
ttcaaaataaatctt

SEQ ID NO: 1200306 - DNA, 15 bp, Homo sapiens
attcaaaataaatct

SEQ ID NO: 1200307 - DNA, 15 bp, Homo sapiens
gattcaaaataaatc

SEQ ID NO: 1200308 - DNA, 15 bp, Homo sapiens
agattcaaaataaat

SEQ ID NO: 1200309 - DNA, 15 bp, Homo sapiens
aagattcaaaataaa

SEQ ID NO: 1200310 - DNA, 15 bp, Homo sapiens
aaagattcaaaataa

SEQ ID NO: 1200311 - DNA, 15 bp, Homo sapiens
gaaagattcaaaata

SEQ ID NO: 1200312 - DNA, 15 bp, Homo sapiens
tgaaagattcaaaat

SEQ ID NO: 1200313 - DNA, 15 bp, Homo sapiens
ctgaaagattcaaaa

SEQ ID NO: 1200314 - DNA, 15 bp, Homo sapiens
actgaaagattcaaa

SEQ ID NO: 1200315 - DNA, 15 bp, Homo sapiens
cactgaaagattcaa

SEQ ID NO: 1200316 - DNA, 15 bp, Homo sapiens
acactgaaagattca

SEQ ID NO: 1200317 - DNA, 15 bp, Homo sapiens
cacactgaaagattc

SEQ ID NO: 1200318 - DNA, 15 bp, Homo sapiens
acacactgaaagatt

SEQ ID NO: 1200319 - DNA, 15 bp, Homo sapiens
cacacactgaaagat

SEQ ID NO: 1200320 - DNA, 15 bp, Homo sapiens
gcacacactgaaaga

SEQ ID NO: 1200321 - DNA, 15 bp, Homo sapiens
tgcacacactgaaag

SEQ ID NO: 1200322 - DNA, 15 bp, Homo sapiens
atgcacacactgaaa

SEQ ID NO: 1200323 - DNA, 15 bp, Homo sapiens
tatgcacacactgaa

SEQ ID NO: 1200324 - DNA, 15 bp, Homo sapiens
ctatgcacacactga

SEQ ID NO: 1200325 - DNA, 15 bp, Homo sapiens
gctatgcacacactg

SEQ ID NO: 1200326 - DNA, 15 bp, Homo sapiens
tgctatgcacacact

SEQ ID NO: 1200327 - DNA, 15 bp, Homo sapiens
atgctatgcacacac

SEQ ID NO: 1200328 - DNA, 15 bp, Homo sapiens
aatgctatgcacaca

SEQ ID NO: 1200329 - DNA, 15 bp, Homo sapiens
taatgctatgcacac

SEQ ID NO: 1200330 - DNA, 15 bp, Homo sapiens
ataatgctatgcaca

SEQ ID NO: 1200331 - DNA, 15 bp, Homo sapiens
aataatgctatgcac

SEQ ID NO: 1200332 - DNA, 15 bp, Homo sapiens
gaataatgctatgca

SEQ ID NO: 1200333 - DNA, 15 bp, Homo sapiens
ggaataatgctatgc

SEQ ID NO: 1200334 - DNA, 15 bp, Homo sapiens
tggaataatgctatg

SEQ ID NO: 1200335 - DNA, 15 bp, Homo sapiens
ttggaataatgctat

SEQ ID NO: 1200336 - DNA, 15 bp, Homo sapiens
cttggaataatgcta

SEQ ID NO: 1200337 - DNA, 15 bp, Homo sapiens
acttggaataatgct

SEQ ID NO: 1200338 - DNA, 15 bp, Homo sapiens
gacttggaataatgc

SEQ ID NO: 1200339 - DNA, 15 bp, Homo sapiens
ggacttggaataatg

SEQ ID NO: 1200340 - DNA, 15 bp, Homo sapiens
aggacttggaataat

SEQ ID NO: 1200341 - DNA, 15 bp, Homo sapiens
gaggacttggaataa

SEQ ID NO: 1200342 - DNA, 15 bp, Homo sapiens
agaggacttggaata

SEQ ID NO: 1200343 - DNA, 15 bp, Homo sapiens
aagaggacttggaat

SEQ ID NO: 1200344 - DNA, 15 bp, Homo sapiens
gaagaggacttggaa

SEQ ID NO: 1200345 - DNA, 15 bp, Homo sapiens
tgaagaggacttgga

SEQ ID NO: 1200346 - DNA, 15 bp, Homo sapiens
ctgaagaggacttgg

SEQ ID NO: 1200347 - DNA, 15 bp, Homo sapiens
cctgaagaggacttg

SEQ ID NO: 1200348 - DNA, 15 bp, Homo sapiens
ccctgaagaggactt

SEQ ID NO: 1200349 - DNA, 15 bp, Homo sapiens
accctgaagaggact

SEQ ID NO: 1200350 - DNA, 15 bp, Homo sapiens
taccctgaagaggac

SEQ ID NO: 1200351 - DNA, 15 bp, Homo sapiens
ttaccctgaagagga

SEQ ID NO: 1200352 - DNA, 15 bp, Homo sapiens
gttaccctgaagagg

SEQ ID NO: 1200353 - DNA, 15 bp, Homo sapiens
agttaccctgaagag

SEQ ID NO: 1200354 - DNA, 15 bp, Homo sapiens
gagttaccctgaaga

SEQ ID NO: 1200355 - DNA, 15 bp, Homo sapiens
agagttaccctgaag

SEQ ID NO: 1200356 - DNA, 15 bp, Homo sapiens
aagagttaccctgaa

SEQ ID NO: 1200357 - DNA, 15 bp, Homo sapiens
caagagttaccctga

SEQ ID NO: 1200358 - DNA, 15 bp, Homo sapiens
acaagagttaccctg

SEQ ID NO: 1200359 - DNA, 15 bp, Homo sapiens
tacaagagttaccct

SEQ ID NO: 1200360 - DNA, 15 bp, Homo sapiens
ctacaagagttaccc

SEQ ID NO: 1200361 - DNA, 15 bp, Homo sapiens
cctacaagagttacc

SEQ ID NO: 1200362 - DNA, 15 bp, Homo sapiens
tcctacaagagttac

SEQ ID NO: 1200363 - DNA, 15 bp, Homo sapiens
gtcctacaagagtta

SEQ ID NO: 1200364 - DNA, 15 bp, Homo sapiens
ggtcctacaagagtt

SEQ ID NO: 1200365 - DNA, 15 bp, Homo sapiens
gggtcctacaagagt

SEQ ID NO: 1200366 - DNA, 15 bp, Homo sapiens
tgggtcctacaagag

SEQ ID NO: 1200367 - DNA, 15 bp, Homo sapiens
ctgggtcctacaaga

SEQ ID NO: 1200368 - DNA, 15 bp, Homo sapiens
cctgggtcctacaag

SEQ ID NO: 1200369 - DNA, 15 bp, Homo sapiens
ccctgggtcctacaa

SEQ ID NO: 1200370 - DNA, 15 bp, Homo sapiens
accctgggtcctaca

SEQ ID NO: 1200371 - DNA, 15 bp, Homo sapiens
taccctgggtcctac

SEQ ID NO: 1200372 - DNA, 15 bp, Homo sapiens
ataccctgggtccta

SEQ ID NO: 1200373 - DNA, 15 bp, Homo sapiens
tataccctgggtcct

SEQ ID NO: 1200374 - DNA, 15 bp, Homo sapiens
atataccctgggtcc

SEQ ID NO: 1200375 - DNA, 15 bp, Homo sapiens
gatataccctgggtc

SEQ ID NO: 1200376 - DNA, 15 bp, Homo sapiens
agatataccctgggt

SEQ ID NO: 1200377 - DNA, 15 bp, Homo sapiens
cagatataccctggg

SEQ ID NO: 1200378 - DNA, 15 bp, Homo sapiens
acagatataccctgg

SEQ ID NO: 1200379 - DNA, 15 bp, Homo sapiens
aacagatataccctg

SEQ ID NO: 1200380 - DNA, 15 bp, Homo sapiens
taacagatataccct

SEQ ID NO: 1200381 - DNA, 15 bp, Homo sapiens
ttaacagatataccc

SEQ ID NO: 1200382 - DNA, 15 bp, Homo sapiens
gttaacagatatacc

SEQ ID NO: 1200383 - DNA, 15 bp, Homo sapiens
agttaacagatatac

SEQ ID NO: 1200384 - DNA, 15 bp, Homo sapiens
cagttaacagatata

SEQ ID NO: 1200385 - DNA, 15 bp, Homo sapiens
tcagttaacagatat

SEQ ID NO: 1200386 - DNA, 15 bp, Homo sapiens
ttcagttaacagata

SEQ ID NO: 1200387 - DNA, 15 bp, Homo sapiens
tttcagttaacagat

SEQ ID NO: 1200388 - DNA, 15 bp, Homo sapiens
ttttcagttaacaga

SEQ ID NO: 1200389 - DNA, 15 bp, Homo sapiens
tttttcagttaacag

SEQ ID NO: 1200390 - DNA, 15 bp, Homo sapiens
ctttttcagttaaca

SEQ ID NO: 1200391 - DNA, 15 bp, Homo sapiens
gctttttcagttaac

SEQ ID NO: 1200392 - DNA, 15 bp, Homo sapiens
tgctttttcagttaa

SEQ ID NO: 1200393 - DNA, 15 bp, Homo sapiens
ttgctttttcagtta

SEQ ID NO: 1200394 - DNA, 15 bp, Homo sapiens
attgctttttcagtt

SEQ ID NO: 1200395 - DNA, 15 bp, Homo sapiens
aattgctttttcagt

SEQ ID NO: 1200396 - DNA, 15 bp, Homo sapiens
aaattgctttttcag

SEQ ID NO: 1200397 - DNA, 15 bp, Homo sapiens
caaattgctttttca

SEQ ID NO: 1200398 - DNA, 15 bp, Homo sapiens
tcaaattgctttttc

SEQ ID NO: 1200399 - DNA, 15 bp, Homo sapiens
ctcaaattgcttttt

SEQ ID NO: 1200400 - DNA, 15 bp, Homo sapiens
tctcaaattgctttt

SEQ ID NO: 1200401 - DNA, 15 bp, Homo sapiens
ttctcaaattgcttt

SEQ ID NO: 1200402 - DNA, 15 bp, Homo sapiens
gttctcaaattgctt

SEQ ID NO: 1200403 - DNA, 15 bp, Homo sapiens
ggttctcaaattgct

SEQ ID NO: 1200404 - DNA, 15 bp, Homo sapiens
aggttctcaaattgc

SEQ ID NO: 1200405 - DNA, 15 bp, Homo sapiens
gaggttctcaaattg

SEQ ID NO: 1200406 - DNA, 15 bp, Homo sapiens
agaggttctcaaatt

SEQ ID NO: 1200407 - DNA, 15 bp, Homo sapiens
tagaggttctcaaat

SEQ ID NO: 1200408 - DNA, 15 bp, Homo sapiens
ttagaggttctcaaa

SEQ ID NO: 1200409 - DNA, 15 bp, Homo sapiens
cttagaggttctcaa

SEQ ID NO: 1200410 - DNA, 15 bp, Homo sapiens
tcttagaggttctca

SEQ ID NO: 1200411 - DNA, 15 bp, Homo sapiens
gtcttagaggttctc

SEQ ID NO: 1200412 - DNA, 15 bp, Homo sapiens
agtcttagaggttct

SEQ ID NO: 1200413 - DNA, 15 bp, Homo sapiens
cagtcttagaggttc

SEQ ID NO: 1200414 - DNA, 15 bp, Homo sapiens
tcagtcttagaggtt

SEQ ID NO: 1200415 - DNA, 15 bp, Homo sapiens
atcagtcttagaggt

SEQ ID NO: 1200416 - DNA, 15 bp, Homo sapiens
aatcagtcttagagg

SEQ ID NO: 1200417 - DNA, 15 bp, Homo sapiens
aaatcagtcttagag

SEQ ID NO: 1200418 - DNA, 15 bp, Homo sapiens
aaaatcagtcttaga

SEQ ID NO: 1200419 - DNA, 15 bp, Homo sapiens
aaaaatcagtcttag

SEQ ID NO: 1200420 - DNA, 15 bp, Homo sapiens
caaaaatcagtctta

SEQ ID NO: 1200421 - DNA, 15 bp, Homo sapiens
tcaaaaatcagtctt

SEQ ID NO: 1200422 - DNA, 15 bp, Homo sapiens
ttcaaaaatcagtct

SEQ ID NO: 1200423 - DNA, 15 bp, Homo sapiens
tttcaaaaatcagtc

SEQ ID NO: 1200424 - DNA, 15 bp, Homo sapiens
ttttcaaaaatcagt

SEQ ID NO: 1200425 - DNA, 15 bp, Homo sapiens
attttcaaaaatcag

SEQ ID NO: 1200426 - DNA, 15 bp, Homo sapiens
cattttcaaaaatca

SEQ ID NO: 1200427 - DNA, 15 bp, Homo sapiens
gcattttcaaaaatc

SEQ ID NO: 1200428 - DNA, 15 bp, Homo sapiens
tgcattttcaaaaat

SEQ ID NO: 1200429 - DNA, 15 bp, Homo sapiens
ctgcattttcaaaaa

SEQ ID NO: 1200430 - DNA, 15 bp, Homo sapiens
actgcattttcaaaa

SEQ ID NO: 1200431 - DNA, 15 bp, Homo sapiens
tactgcattttcaaa

SEQ ID NO: 1200432 - DNA, 15 bp, Homo sapiens
atactgcattttcaa

SEQ ID NO: 1200433 - DNA, 15 bp, Homo sapiens
gatactgcattttca

SEQ ID NO: 1200434 - DNA, 15 bp, Homo sapiens
ggatactgcattttc

SEQ ID NO: 1200435 - DNA, 15 bp, Homo sapiens
tggatactgcatttt

SEQ ID NO: 1200436 - DNA, 15 bp, Homo sapiens
ttggatactgcattt

SEQ ID NO: 1200437 - DNA, 15 bp, Homo sapiens
tttggatactgcatt

SEQ ID NO: 1200438 - DNA, 15 bp, Homo sapiens
ttttggatactgcat

SEQ ID NO: 1200439 - DNA, 15 bp, Homo sapiens
tttttggatactgca

SEQ ID NO: 1200440 - DNA, 15 bp, Homo sapiens
ttttttggatactgc

SEQ ID NO: 1200441 - DNA, 15 bp, Homo sapiens
gtttttttggatact

SEQ ID NO: 1200442 - DNA, 15 bp, Homo sapiens
tgtttttttggatac

SEQ ID NO: 1200443 - DNA, 15 bp, Homo sapiens
ctgtttttttggata

SEQ ID NO: 1200444 - DNA, 15 bp, Homo sapiens
tctgtttttttggat

SEQ ID NO: 1200445 - DNA, 15 bp, Homo sapiens
atctgtttttttgga

SEQ ID NO: 1200446 - DNA, 15 bp, Homo sapiens
aatctgtttttttgg

SEQ ID NO: 1200447 - DNA, 15 bp, Homo sapiens
aaatctgtttttttg

SEQ ID NO: 1200448 - DNA, 15 bp, Homo sapiens
aaaatctgttttttt

SEQ ID NO: 1200449 - DNA, 15 bp, Homo sapiens
taaaatctgtttttt

SEQ ID NO: 1200450 - DNA, 15 bp, Homo sapiens
ctaaaatctgttttt

SEQ ID NO: 1200451 - DNA, 15 bp, Homo sapiens
tctaaaatctgtttt

SEQ ID NO: 1200452 - DNA, 15 bp, Homo sapiens
atctaaaatctgttt

SEQ ID NO: 1200453 - DNA, 15 bp, Homo sapiens
catctaaaatctgtt

SEQ ID NO: 1200454 - DNA, 15 bp, Homo sapiens
gcatctaaaatctgt

SEQ ID NO: 1200455 - DNA, 15 bp, Homo sapiens
ggcatctaaaatctg

SEQ ID NO: 1200456 - DNA, 15 bp, Homo sapiens
tggcatctaaaatct

SEQ ID NO: 1200457 - DNA, 15 bp, Homo sapiens
atggcatctaaaatc

SEQ ID NO: 1200458 - DNA, 15 bp, Homo sapiens
gatggcatctaaaat

SEQ ID NO: 1200459 - DNA, 15 bp, Homo sapiens
ggatggcatctaaaa

SEQ ID NO: 1200460 - DNA, 15 bp, Homo sapiens
gggatggcatctaaa

SEQ ID NO: 1200461 - DNA, 15 bp, Homo sapiens
tgggatggcatctaa

SEQ ID NO: 1200462 - DNA, 15 bp, Homo sapiens
ctgggatggcatcta

SEQ ID NO: 1200463 - DNA, 15 bp, Homo sapiens
gctgggatggcatct

SEQ ID NO: 1200464 - DNA, 15 bp, Homo sapiens
tgctgggatggcatc

SEQ ID NO: 1200465 - DNA, 15 bp, Homo sapiens
ctgctgggatggcat

SEQ ID NO: 1200466 - DNA, 15 bp, Homo sapiens
cctgctgggatggca

SEQ ID NO: 1200467 - DNA, 15 bp, Homo sapiens
acctgctgggatggc

SEQ ID NO: 1200468 - DNA, 15 bp, Homo sapiens
cacctgctgggatgg

SEQ ID NO: 1200469 - DNA, 15 bp, Homo sapiens
gcacctgctgggatg

SEQ ID NO: 1200470 - DNA, 15 bp, Homo sapiens
agcacctgctgggat

SEQ ID NO: 1200471 - DNA, 15 bp, Homo sapiens
cagcacctgctggga

SEQ ID NO: 1200472 - DNA, 15 bp, Homo sapiens
ccagcacctgctggg

SEQ ID NO: 1200473 - DNA, 15 bp, Homo sapiens
accagcacctgctgg

SEQ ID NO: 1200474 - DNA, 15 bp, Homo sapiens
taccagcacctgctg

SEQ ID NO: 1200475 - DNA, 15 bp, Homo sapiens
ttaccagcacctgct

SEQ ID NO: 1200476 - DNA, 15 bp, Homo sapiens
gttaccagcacctgc

SEQ ID NO: 1200477 - DNA, 15 bp, Homo sapiens
agttaccagcacctg

SEQ ID NO: 1200478 - DNA, 15 bp, Homo sapiens
gagttaccagcacct

SEQ ID NO: 1200479 - DNA, 15 bp, Homo sapiens
agagttaccagcacc

SEQ ID NO: 1200480 - DNA, 15 bp, Homo sapiens
cagagttaccagcac

SEQ ID NO: 1200481 - DNA, 15 bp, Homo sapiens
acagagttaccagca

SEQ ID NO: 1200482 - DNA, 15 bp, Homo sapiens
tacagagttaccagc

SEQ ID NO: 1200483 - DNA, 15 bp, Homo sapiens
gtacagagttaccag

SEQ ID NO: 1200484 - DNA, 15 bp, Homo sapiens
agtacagagttacca

SEQ ID NO: 1200485 - DNA, 15 bp, Homo sapiens
aagtacagagttacc

SEQ ID NO: 1200486 - DNA, 15 bp, Homo sapiens
caagtacagagttac

SEQ ID NO: 1200487 - DNA, 15 bp, Homo sapiens
acaagtacagagtta

SEQ ID NO: 1200488 - DNA, 15 bp, Homo sapiens
cacaagtacagagtt

SEQ ID NO: 1200489 - DNA, 15 bp, Homo sapiens
acacaagtacagagt

SEQ ID NO: 1200490 - DNA, 15 bp, Homo sapiens
cacacaagtacagag

SEQ ID NO: 1200491 - DNA, 15 bp, Homo sapiens
ccacacaagtacaga

SEQ ID NO: 1200492 - DNA, 15 bp, Homo sapiens
tccacacaagtacag

SEQ ID NO: 1200493 - DNA, 15 bp, Homo sapiens
ttccacacaagtaca

SEQ ID NO: 1200494 - DNA, 15 bp, Homo sapiens
cttccacacaagtac

SEQ ID NO: 1200495 - DNA, 15 bp, Homo sapiens
tcttccacacaagta

SEQ ID NO: 1200496 - DNA, 15 bp, Homo sapiens
atcttccacacaagt

SEQ ID NO: 1200497 - DNA, 15 bp, Homo sapiens
catcttccacacaag

SEQ ID NO: 1200498 - DNA, 15 bp, Homo sapiens
gcatcttccacacaa

SEQ ID NO: 1200499 - DNA, 15 bp, Homo sapiens
ggcatcttccacaca

SEQ ID NO: 1200500 - DNA, 15 bp, Homo sapiens
aggcatcttccacac

SEQ ID NO: 1200501 - DNA, 15 bp, Homo sapiens
aaggcatcttccaca

SEQ ID NO: 1200502 - DNA, 15 bp, Homo sapiens
gaaggcatcttccac

SEQ ID NO: 1200503 - DNA, 15 bp, Homo sapiens
agaaggcatcttcca

SEQ ID NO: 1200504 - DNA, 15 bp, Homo sapiens
cagaaggcatcttcc

SEQ ID NO: 1200505 - DNA, 15 bp, Homo sapiens
acagaaggcatcttc

SEQ ID NO: 1200506 - DNA, 15 bp, Homo sapiens
cacagaaggcatctt

SEQ ID NO: 1200507 - DNA, 15 bp, Homo sapiens
ccacagaaggcatct

SEQ ID NO: 1200508 - DNA, 15 bp, Homo sapiens
cccacagaaggcatc

SEQ ID NO: 1200509 - DNA, 15 bp, Homo sapiens
acccacagaaggcat

SEQ ID NO: 1200510 - DNA, 15 bp, Homo sapiens
aacccacagaaggca

SEQ ID NO: 1200511 - DNA, 15 bp, Homo sapiens
aaacccacagaaggc

SEQ ID NO: 1200512 - DNA, 15 bp, Homo sapiens
caaacccacagaagg

SEQ ID NO: 1200513 - DNA, 15 bp, Homo sapiens
acaaacccacagaag

SEQ ID NO: 1200514 - DNA, 15 bp, Homo sapiens
aacaaacccacagaa

SEQ ID NO: 1200515 - DNA, 15 bp, Homo sapiens
aaacaaacccacaga

SEQ ID NO: 1200516 - DNA, 15 bp, Homo sapiens
taaacaaacccacag

SEQ ID NO: 1200517 - DNA, 15 bp, Homo sapiens
ctaaacaaacccaca

SEQ ID NO: 1200518 - DNA, 15 bp, Homo sapiens
cctaaacaaacccac

SEQ ID NO: 1200519 - DNA, 15 bp, Homo sapiens
tcctaaacaaaccca

SEQ ID NO: 1200520 - DNA, 15 bp, Homo sapiens
ctcctaaacaaaccc

SEQ ID NO: 1200521 - DNA, 15 bp, Homo sapiens
actcctaaacaaacc

SEQ ID NO: 1200522 - DNA, 15 bp, Homo sapiens
aactcctaaacaaac

SEQ ID NO: 1200523 - DNA, 15 bp, Homo sapiens
caactcctaaacaaa

SEQ ID NO: 1200524 - DNA, 15 bp, Homo sapiens
acaactcctaaacaa

SEQ ID NO: 1200525 - DNA, 15 bp, Homo sapiens
aacaactcctaaaca

SEQ ID NO: 1200526 - DNA, 15 bp, Homo sapiens
aaacaactcctaaac

SEQ ID NO: 1200527 - DNA, 15 bp, Homo sapiens
aaaacaactcctaaa

SEQ ID NO: 1200528 - DNA, 15 bp, Homo sapiens
taaaacaactcctaa

SEQ ID NO: 1200529 - DNA, 15 bp, Homo sapiens
ataaaacaactccta

SEQ ID NO: 1200530 - DNA, 15 bp, Homo sapiens
cataaaacaactcct

SEQ ID NO: 1200531 - DNA, 15 bp, Homo sapiens
ccataaaacaactcc

SEQ ID NO: 1200532 - DNA, 15 bp, Homo sapiens
tccataaaacaactc

SEQ ID NO: 1200533 - DNA, 15 bp, Homo sapiens
atccataaaacaact

SEQ ID NO: 1200534 - DNA, 15 bp, Homo sapiens
tatccataaaacaac

SEQ ID NO: 1200535 - DNA, 15 bp, Homo sapiens
gtatccataaaacaa

SEQ ID NO: 1200536 - DNA, 15 bp, Homo sapiens
ggtatccataaaaca

SEQ ID NO: 1200537 - DNA, 15 bp, Homo sapiens
tggtatccataaaac

SEQ ID NO: 1200538 - DNA, 15 bp, Homo sapiens
ctggtatccataaaa

SEQ ID NO: 1200539 - DNA, 15 bp, Homo sapiens
gctggtatccataaa

SEQ ID NO: 1200540 - DNA, 15 bp, Homo sapiens
tgctggtatccataa

SEQ ID NO: 1200541 - DNA, 15 bp, Homo sapiens
atgctggtatccata

SEQ ID NO: 1200542 - DNA, 15 bp, Homo sapiens
aatgctggtatccat

SEQ ID NO: 1200543 - DNA, 15 bp, Homo sapiens
gaatgctggtatcca

SEQ ID NO: 1200544 - DNA, 15 bp, Homo sapiens
agaatgctggtatcc

SEQ ID NO: 1200545 - DNA, 15 bp, Homo sapiens
aagaatgctggtatc

SEQ ID NO: 1200546 - DNA, 15 bp, Homo sapiens
gaagaatgctggtat

SEQ ID NO: 1200547 - DNA, 15 bp, Homo sapiens
agaagaatgctggta

SEQ ID NO: 1200548 - DNA, 15 bp, Homo sapiens
gagaagaatgctggt

SEQ ID NO: 1200549 - DNA, 15 bp, Homo sapiens
tgagaagaatgctgg

SEQ ID NO: 1200550 - DNA, 15 bp, Homo sapiens
ttgagaagaatgctg

SEQ ID NO: 1200551 - DNA, 15 bp, Homo sapiens
cttgagaagaatgct

SEQ ID NO: 1200552 - DNA, 15 bp, Homo sapiens
tcttgagaagaatgc

SEQ ID NO: 1200553 - DNA, 15 bp, Homo sapiens
ttcttgagaagaatg

SEQ ID NO: 1200554 - DNA, 15 bp, Homo sapiens
gttcttgagaagaat

SEQ ID NO: 1200555 - DNA, 15 bp, Homo sapiens
tgttcttgagaagaa

SEQ ID NO: 1200556 - DNA, 15 bp, Homo sapiens
gtgttcttgagaaga

SEQ ID NO: 1200557 - DNA, 15 bp, Homo sapiens
agtgttcttgagaag

SEQ ID NO: 1200558 - DNA, 15 bp, Homo sapiens
cagtgttcttgagaa

SEQ ID NO: 1200559 - DNA, 15 bp, Homo sapiens
tcagtgttcttgaga

SEQ ID NO: 1200560 - DNA, 15 bp, Homo sapiens
ctcagtgttcttgag

SEQ ID NO: 1200561 - DNA, 15 bp, Homo sapiens
tctcagtgttcttga

SEQ ID NO: 1200562 - DNA, 15 bp, Homo sapiens
ttctcagtgttcttg

SEQ ID NO: 1200563 - DNA, 15 bp, Homo sapiens
attctcagtgttctt

SEQ ID NO: 1200564 - DNA, 15 bp, Homo sapiens
aattctcagtgttct

SEQ ID NO: 1200565 - DNA, 15 bp, Homo sapiens
gaattctcagtgttc

SEQ ID NO: 1200566 - DNA, 15 bp, Homo sapiens
agaattctcagtgtt

SEQ ID NO: 1200567 - DNA, 15 bp, Homo sapiens
tagaattctcagtgt

SEQ ID NO: 1200568 - DNA, 15 bp, Homo sapiens
atagaattctcagtg

SEQ ID NO: 1200569 - DNA, 15 bp, Homo sapiens
catagaattctcagt

SEQ ID NO: 1200570 - DNA, 15 bp, Homo sapiens
gcatagaattctcag

SEQ ID NO: 1200571 - DNA, 15 bp, Homo sapiens
agcatagaattctca

SEQ ID NO: 1200572 - DNA, 15 bp, Homo sapiens
cagcatagaattctc

SEQ ID NO: 1200573 - DNA, 15 bp, Homo sapiens
acagcatagaattct

SEQ ID NO: 1200574 - DNA, 15 bp, Homo sapiens
tacagcatagaattc

SEQ ID NO: 1200575 - DNA, 15 bp, Homo sapiens
atacagcatagaatt

SEQ ID NO: 1200576 - DNA, 15 bp, Homo sapiens
gatacagcatagaat

SEQ ID NO: 1200577 - DNA, 15 bp, Homo sapiens
ggatacagcatagaa

SEQ ID NO: 1200578 - DNA, 15 bp, Homo sapiens
aggatacagcataga

SEQ ID NO: 1200579 - DNA, 15 bp, Homo sapiens
aaggatacagcatag

SEQ ID NO: 1200580 - DNA, 15 bp, Homo sapiens
caaggatacagcata

SEQ ID NO: 1200581 - DNA, 15 bp, Homo sapiens
acaaggatacagcat

SEQ ID NO: 1200582 - DNA, 15 bp, Homo sapiens
tacaaggatacagca

SEQ ID NO: 1200583 - DNA, 15 bp, Homo sapiens
atacaaggatacagc

SEQ ID NO: 1200584 - DNA, 15 bp, Homo sapiens
catacaaggatacag

SEQ ID NO: 1200585 - DNA, 15 bp, Homo sapiens
tcatacaaggataca

SEQ ID NO: 1200586 - DNA, 15 bp, Homo sapiens
gtcatacaaggatac

SEQ ID NO: 1200587 - DNA, 15 bp, Homo sapiens
ggtcatacaaggata

SEQ ID NO: 1200588 - DNA, 15 bp, Homo sapiens
tggtcatacaaggat

SEQ ID NO: 1200589 - DNA, 15 bp, Homo sapiens
ttggtcatacaagga

SEQ ID NO: 1200590 - DNA, 15 bp, Homo sapiens
attggtcatacaagg

SEQ ID NO: 1200591 - DNA, 15 bp, Homo sapiens
aattggtcatacaag

SEQ ID NO: 1200592 - DNA, 15 bp, Homo sapiens
caattggtcatacaa

SEQ ID NO: 1200593 - DNA, 15 bp, Homo sapiens
tcaattggtcataca

SEQ ID NO: 1200594 - DNA, 15 bp, Homo sapiens
gtcaattggtcatac

SEQ ID NO: 1200595 - DNA, 15 bp, Homo sapiens
tgtcaattggtcata

SEQ ID NO: 1200596 - DNA, 15 bp, Homo sapiens
ttgtcaattggtcat

SEQ ID NO: 1200597 - DNA, 15 bp, Homo sapiens
cttgtcaattggtca

SEQ ID NO: 1200598 - DNA, 15 bp, Homo sapiens
tcttgtcaattggtc

SEQ ID NO: 1200599 - DNA, 15 bp, Homo sapiens
ttcttgtcaattggt

SEQ ID NO: 1200600 - DNA, 15 bp, Homo sapiens
attcttgtcaattgg

SEQ ID NO: 1200601 - DNA, 15 bp, Homo sapiens
aattcttgtcaattg

SEQ ID NO: 1200602 - DNA, 15 bp, Homo sapiens
gaattcttgtcaatt

SEQ ID NO: 1200603 - DNA, 15 bp, Homo sapiens
agaattcttgtcaat

SEQ ID NO: 1200604 - DNA, 15 bp, Homo sapiens
cagaattcttgtcaa

SEQ ID NO: 1200605 - DNA, 15 bp, Homo sapiens
acagaattcttgtca

SEQ ID NO: 1200606 - DNA, 15 bp, Homo sapiens
cacagaattcttgtc

SEQ ID NO: 1200607 - DNA, 15 bp, Homo sapiens
acacagaattcttgt

SEQ ID NO: 1200608 - DNA, 15 bp, Homo sapiens
aacacagaattcttg

SEQ ID NO: 1200609 - DNA, 15 bp, Homo sapiens
caacacagaattctt

SEQ ID NO: 1200610 - DNA, 15 bp, Homo sapiens
tcaacacagaattct

SEQ ID NO: 1200611 - DNA, 15 bp, Homo sapiens
gtcaacacagaattc

SEQ ID NO: 1200612 - DNA, 15 bp, Homo sapiens
agtcaacacagaatt

SEQ ID NO: 1200613 - DNA, 15 bp, Homo sapiens
aagtcaacacagaat

SEQ ID NO: 1200614 - DNA, 15 bp, Homo sapiens
taagtcaacacagaa

SEQ ID NO: 1200615 - DNA, 15 bp, Homo sapiens
ataagtcaacacaga

SEQ ID NO: 1200616 - DNA, 15 bp, Homo sapiens
tataagtcaacacag

SEQ ID NO: 1200617 - DNA, 15 bp, Homo sapiens
atataagtcaacaca

SEQ ID NO: 1200618 - DNA, 15 bp, Homo sapiens
aatataagtcaacac

SEQ ID NO: 1200619 - DNA, 15 bp, Homo sapiens
aaatataagtcaaca

SEQ ID NO: 1200620 - DNA, 15 bp, Homo sapiens
gaaatataagtcaac

SEQ ID NO: 1200621 - DNA, 15 bp, Homo sapiens
ggaaatataagtcaa

SEQ ID NO: 1200622 - DNA, 15 bp, Homo sapiens
gggaaatataagtca

SEQ ID NO: 1200623 - DNA, 15 bp, Homo sapiens
tgggaaatataagtc

SEQ ID NO: 1200624 - DNA, 15 bp, Homo sapiens
ctgggaaatataagt

SEQ ID NO: 1200625 - DNA, 15 bp, Homo sapiens
actgggaaatataag

SEQ ID NO: 1200626 - DNA, 15 bp, Homo sapiens
tactgggaaatataa

SEQ ID NO: 1200627 - DNA, 15 bp, Homo sapiens
ttactgggaaatata

SEQ ID NO: 1200628 - DNA, 15 bp, Homo sapiens
tttactgggaaatat

SEQ ID NO: 1200629 - DNA, 15 bp, Homo sapiens
ttttactgggaaata

SEQ ID NO: 1200630 - DNA, 15 bp, Homo sapiens
cttttactgggaaat

SEQ ID NO: 1200631 - DNA, 15 bp, Homo sapiens
acttttactgggaaa

SEQ ID NO: 1200632 - DNA, 15 bp, Homo sapiens
tacttttactgggaa

SEQ ID NO: 1200633 - DNA, 15 bp, Homo sapiens
gtacttttactggga

SEQ ID NO: 1200634 - DNA, 15 bp, Homo sapiens
cgtacttttactggg

SEQ ID NO: 1200635 - DNA, 15 bp, Homo sapiens
tcgtacttttactgg

SEQ ID NO: 1200636 - DNA, 15 bp, Homo sapiens
ttcgtacttttactg

SEQ ID NO: 1200637 - DNA, 15 bp, Homo sapiens
cttcgtacttttact

SEQ ID NO: 1200638 - DNA, 15 bp, Homo sapiens
gcttcgtacttttac

SEQ ID NO: 1200639 - DNA, 15 bp, Homo sapiens
tgcttcgtactttta

SEQ ID NO: 1200640 - DNA, 15 bp, Homo sapiens
ttgcttcgtactttt

SEQ ID NO: 1200641 - DNA, 15 bp, Homo sapiens
cttgcttcgtacttt

SEQ ID NO: 1200642 - DNA, 15 bp, Homo sapiens
gcttgcttcgtactt

SEQ ID NO: 1200643 - DNA, 15 bp, Homo sapiens
tgcttgcttcgtact

SEQ ID NO: 1200644 - DNA, 15 bp, Homo sapiens
ttgcttgcttcgtac

SEQ ID NO: 1200645 - DNA, 15 bp, Homo sapiens
tttgcttgcttcgta

SEQ ID NO: 1200646 - DNA, 15 bp, Homo sapiens
ttttgcttgcttcgt

SEQ ID NO: 1200647 - DNA, 15 bp, Homo sapiens
cttttgcttgcttcg

SEQ ID NO: 1200648 - DNA, 15 bp, Homo sapiens
gcttttgcttgcttc

SEQ ID NO: 1200649 - DNA, 15 bp, Homo sapiens
tgcttttgcttgctt

SEQ ID NO: 1200650 - DNA, 15 bp, Homo sapiens
ctgcttttgcttgct

SEQ ID NO: 1200651 - DNA, 15 bp, Homo sapiens
actgcttttgcttgc

SEQ ID NO: 1200652 - DNA, 15 bp, Homo sapiens
gactgcttttgcttg

SEQ ID NO: 1200653 - DNA, 15 bp, Homo sapiens
agactgcttttgctt

SEQ ID NO: 1200654 - DNA, 15 bp, Homo sapiens
cagactgcttttgct

SEQ ID NO: 1200655 - DNA, 15 bp, Homo sapiens
tcagactgcttttgc

SEQ ID NO: 1200656 - DNA, 15 bp, Homo sapiens
atcagactgcttttg

SEQ ID NO: 1200657 - DNA, 15 bp, Homo sapiens
tatcagactgctttt

SEQ ID NO: 1200658 - DNA, 15 bp, Homo sapiens
ttatcagactgcttt

SEQ ID NO: 1200659 - DNA, 15 bp, Homo sapiens
cttatcagactgctt

SEQ ID NO: 1200660 - DNA, 15 bp, Homo sapiens
ccttatcagactgct

SEQ ID NO: 1200661 - DNA, 15 bp, Homo sapiens
tccttatcagactgc

SEQ ID NO: 1200662 - DNA, 15 bp, Homo sapiens
ttccttatcagactg

SEQ ID NO: 1200663 - DNA, 15 bp, Homo sapiens
tttccttatcagact

SEQ ID NO: 1200664 - DNA, 15 bp, Homo sapiens
ttttccttatcagac

SEQ ID NO: 1200665 - DNA, 15 bp, Homo sapiens
attttccttatcaga

SEQ ID NO: 1200666 - DNA, 15 bp, Homo sapiens
gattttccttatcag

SEQ ID NO: 1200667 - DNA, 15 bp, Homo sapiens
agattttccttatca

SEQ ID NO: 1200668 - DNA, 15 bp, Homo sapiens
cagattttccttatc

SEQ ID NO: 1200669 - DNA, 15 bp, Homo sapiens
acagattttccttat

SEQ ID NO: 1200670 - DNA, 15 bp, Homo sapiens
aacagattttcctta

SEQ ID NO: 1200671 - DNA, 15 bp, Homo sapiens
caacagattttcctt

SEQ ID NO: 1200672 - DNA, 15 bp, Homo sapiens
ccaacagattttcct

SEQ ID NO: 1200673 - DNA, 15 bp, Homo sapiens
cccaacagattttcc

SEQ ID NO: 1200674 - DNA, 15 bp, Homo sapiens
ccccaacagattttc

SEQ ID NO: 1200675 - DNA, 15 bp, Homo sapiens
tccccaacagatttt

SEQ ID NO: 1200676 - DNA, 15 bp, Homo sapiens
ttccccaacagattt

SEQ ID NO: 1200677 - DNA, 15 bp, Homo sapiens
tttccccaacagatt

SEQ ID NO: 1200678 - DNA, 15 bp, Homo sapiens
ctttccccaacagat

SEQ ID NO: 1200679 - DNA, 15 bp, Homo sapiens
cctttccccaacaga

SEQ ID NO: 1200680 - DNA, 15 bp, Homo sapiens
acctttccccaacag

SEQ ID NO: 1200681 - DNA, 15 bp, Homo sapiens
aacctttccccaaca

SEQ ID NO: 1200682 - DNA, 15 bp, Homo sapiens
aaacctttccccaac

SEQ ID NO: 1200683 - DNA, 15 bp, Homo sapiens
caaacctttccccaa

SEQ ID NO: 1200684 - DNA, 15 bp, Homo sapiens
gcaaacctttcccca

SEQ ID NO: 1200685 - DNA, 15 bp, Homo sapiens
agcaaacctttcccc

SEQ ID NO: 1200686 - DNA, 15 bp, Homo sapiens
aagcaaacctttccc

SEQ ID NO: 1200687 - DNA, 15 bp, Homo sapiens
taagcaaacctttcc

SEQ ID NO: 1200688 - DNA, 15 bp, Homo sapiens
ctaagcaaacctttc

SEQ ID NO: 1200689 - DNA, 15 bp, Homo sapiens
tctaagcaaaccttt

SEQ ID NO: 1200690 - DNA, 15 bp, Homo sapiens
ctctaagcaaacctt

SEQ ID NO: 1200691 - DNA, 15 bp, Homo sapiens
tctctaagcaaacct

SEQ ID NO: 1200692 - DNA, 15 bp, Homo sapiens
ctctctaagcaaacc

SEQ ID NO: 1200693 - DNA, 15 bp, Homo sapiens
actctctaagcaaac

SEQ ID NO: 1200694 - DNA, 15 bp, Homo sapiens
gactctctaagcaaa

SEQ ID NO: 1200695 - DNA, 15 bp, Homo sapiens
agactctctaagcaa

SEQ ID NO: 1200696 - DNA, 15 bp, Homo sapiens
aagactctctaagca

SEQ ID NO: 1200697 - DNA, 15 bp, Homo sapiens
aaagactctctaagc

SEQ ID NO: 1200698 - DNA, 15 bp, Homo sapiens
aaaagactctctaag

SEQ ID NO: 1200699 - DNA, 15 bp, Homo sapiens
caaaagactctctaa

SEQ ID NO: 1200700 - DNA, 15 bp, Homo sapiens
ccaaaagactctcta

SEQ ID NO: 1200701 - DNA, 15 bp, Homo sapiens
cccaaaagactctct

SEQ ID NO: 1200702 - DNA, 15 bp, Homo sapiens
gcccaaaagactctc

SEQ ID NO: 1200703 - DNA, 15 bp, Homo sapiens
tgcccaaaagactct

SEQ ID NO: 1200704 - DNA, 15 bp, Homo sapiens
gtgcccaaaagactc

SEQ ID NO: 1200705 - DNA, 15 bp, Homo sapiens
tgtgcccaaaagact

SEQ ID NO: 1200706 - DNA, 15 bp, Homo sapiens
atgtgcccaaaagac

SEQ ID NO: 1200707 - DNA, 15 bp, Homo sapiens
aatgtgcccaaaaga

SEQ ID NO: 1200708 - DNA, 15 bp, Homo sapiens
gaatgtgcccaaaag

SEQ ID NO: 1200709 - DNA, 15 bp, Homo sapiens
tgaatgtgcccaaaa

SEQ ID NO: 1200710 - DNA, 15 bp, Homo sapiens
atgaatgtgcccaaa

SEQ ID NO: 1200711 - DNA, 15 bp, Homo sapiens
catgaatgtgcccaa

SEQ ID NO: 1200712 - DNA, 15 bp, Homo sapiens
gcatgaatgtgccca

SEQ ID NO: 1200713 - DNA, 15 bp, Homo sapiens
agcatgaatgtgccc

SEQ ID NO: 1200714 - DNA, 15 bp, Homo sapiens
gagcatgaatgtgcc

SEQ ID NO: 1200715 - DNA, 15 bp, Homo sapiens
agagcatgaatgtgc

SEQ ID NO: 1200716 - DNA, 15 bp, Homo sapiens
gagagcatgaatgtg

SEQ ID NO: 1200717 - DNA, 15 bp, Homo sapiens
agagagcatgaatgt

SEQ ID NO: 1200718 - DNA, 15 bp, Homo sapiens
tagagagcatgaatg

SEQ ID NO: 1200719 - DNA, 15 bp, Homo sapiens
ctagagagcatgaat

SEQ ID NO: 1200720 - DNA, 15 bp, Homo sapiens
cctagagagcatgaa

SEQ ID NO: 1200721 - DNA, 15 bp, Homo sapiens
ccctagagagcatga

SEQ ID NO: 1200722 - DNA, 15 bp, Homo sapiens
gccctagagagcatg

SEQ ID NO: 1200723 - DNA, 15 bp, Homo sapiens
agccctagagagcat

SEQ ID NO: 1200724 - DNA, 15 bp, Homo sapiens
aagccctagagagca

SEQ ID NO: 1200725 - DNA, 15 bp, Homo sapiens
aaagccctagagagc

SEQ ID NO: 1200726 - DNA, 15 bp, Homo sapiens
aaaagccctagagag

SEQ ID NO: 1200727 - DNA, 15 bp, Homo sapiens
aaaaagccctagaga

SEQ ID NO: 1200728 - DNA, 15 bp, Homo sapiens
aaaaaagccctagag

SEQ ID NO: 1200729 - DNA, 15 bp, Homo sapiens
caaaaaagccctaga

SEQ ID NO: 1200730 - DNA, 15 bp, Homo sapiens
acaaaaaagccctag

SEQ ID NO: 1200731 - DNA, 15 bp, Homo sapiens
tacaaaaaagcccta

SEQ ID NO: 1200732 - DNA, 15 bp, Homo sapiens
gtacaaaaaagccct

SEQ ID NO: 1200733 - DNA, 15 bp, Homo sapiens
tgtacaaaaaagccc

SEQ ID NO: 1200734 - DNA, 15 bp, Homo sapiens
ttgtacaaaaaagcc

SEQ ID NO: 1200735 - DNA, 15 bp, Homo sapiens
gttgtacaaaaaagc

SEQ ID NO: 1200736 - DNA, 15 bp, Homo sapiens
tgttgtacaaaaaag

SEQ ID NO: 1200737 - DNA, 15 bp, Homo sapiens
gtgttgtacaaaaaa

SEQ ID NO: 1200738 - DNA, 15 bp, Homo sapiens
agtgttgtacaaaaa

SEQ ID NO: 1200739 - DNA, 15 bp, Homo sapiens
cagtgttgtacaaaa

SEQ ID NO: 1200740 - DNA, 15 bp, Homo sapiens
ccagtgttgtacaaa

SEQ ID NO: 1200741 - DNA, 15 bp, Homo sapiens
accagtgttgtacaa

SEQ ID NO: 1200742 - DNA, 15 bp, Homo sapiens
taccagtgttgtaca

SEQ ID NO: 1200743 - DNA, 15 bp, Homo sapiens
ttaccagtgttgtac

SEQ ID NO: 1200744 - DNA, 15 bp, Homo sapiens
cttaccagtgttgta

SEQ ID NO: 1200745 - DNA, 15 bp, Homo sapiens
gcttaccagtgttgt

SEQ ID NO: 1200746 - DNA, 15 bp, Homo sapiens
ggcttaccagtgttg

SEQ ID NO: 1200747 - DNA, 15 bp, Homo sapiens
tggcttaccagtgtt

SEQ ID NO: 1200748 - DNA, 15 bp, Homo sapiens
ctggcttaccagtgt

SEQ ID NO: 1200749 - DNA, 15 bp, Homo sapiens
actggcttaccagtg

SEQ ID NO: 1200750 - DNA, 15 bp, Homo sapiens
aactggcttaccagt

SEQ ID NO: 1200751 - DNA, 15 bp, Homo sapiens
gaactggcttaccag

SEQ ID NO: 1200752 - DNA, 15 bp, Homo sapiens
agaactggcttacca

SEQ ID NO: 1200753 - DNA, 15 bp, Homo sapiens
gagaactggcttacc

SEQ ID NO: 1200754 - DNA, 15 bp, Homo sapiens
tgagaactggcttac

SEQ ID NO: 1200755 - DNA, 15 bp, Homo sapiens
ttgagaactggctta

SEQ ID NO: 1200756 - DNA, 15 bp, Homo sapiens
tttgagaactggctt

SEQ ID NO: 1200757 - DNA, 15 bp, Homo sapiens
ctttgagaactggct

SEQ ID NO: 1200758 - DNA, 15 bp, Homo sapiens
actttgagaactggc

SEQ ID NO: 1200759 - DNA, 15 bp, Homo sapiens
gactttgagaactgg

SEQ ID NO: 1200760 - DNA, 15 bp, Homo sapiens
tgactttgagaactg

SEQ ID NO: 1200761 - DNA, 15 bp, Homo sapiens
ttgactttgagaact

SEQ ID NO: 1200762 - DNA, 15 bp, Homo sapiens
tttgactttgagaac

SEQ ID NO: 1200763 - DNA, 15 bp, Homo sapiens
gtttgactttgagaa

SEQ ID NO: 1200764 - DNA, 15 bp, Homo sapiens
agtttgactttgaga

SEQ ID NO: 1200765 - DNA, 15 bp, Homo sapiens
cagtttgactttgag

SEQ ID NO: 1200766 - DNA, 15 bp, Homo sapiens
tcagtttgactttga

SEQ ID NO: 1200767 - DNA, 15 bp, Homo sapiens
atcagtttgactttg

SEQ ID NO: 1200768 - DNA, 15 bp, Homo sapiens
tatcagtttgacttt

SEQ ID NO: 1200769 - DNA, 15 bp, Homo sapiens
ttatcagtttgactt

SEQ ID NO: 1200770 - DNA, 15 bp, Homo sapiens
attatcagtttgact

SEQ ID NO: 1200771 - DNA, 15 bp, Homo sapiens
tattatcagtttgac

SEQ ID NO: 1200772 - DNA, 15 bp, Homo sapiens
gtattatcagtttga

SEQ ID NO: 1200773 - DNA, 15 bp, Homo sapiens
agtattatcagtttg

SEQ ID NO: 1200774 - DNA, 15 bp, Homo sapiens
gagtattatcagttt

SEQ ID NO: 1200775 - DNA, 15 bp, Homo sapiens
ggagtattatcagtt

SEQ ID NO: 1200776 - DNA, 15 bp, Homo sapiens
tggagtattatcagt

SEQ ID NO: 1200777 - DNA, 15 bp, Homo sapiens
ttggagtattatcag

SEQ ID NO: 1200778 - DNA, 15 bp, Homo sapiens
attggagtattatca

SEQ ID NO: 1200779 - DNA, 15 bp, Homo sapiens
tattggagtattatc

SEQ ID NO: 1200780 - DNA, 15 bp, Homo sapiens
gtattggagtattat

SEQ ID NO: 1200781 - DNA, 15 bp, Homo sapiens
agtattggagtatta

SEQ ID NO: 1200782 - DNA, 15 bp, Homo sapiens
aagtattggagtatt

SEQ ID NO: 1200783 - DNA, 15 bp, Homo sapiens
taagtattggagtat

SEQ ID NO: 1200784 - DNA, 15 bp, Homo sapiens
gtaagtattggagta

SEQ ID NO: 1200785 - DNA, 15 bp, Homo sapiens
tgtaagtattggagt

SEQ ID NO: 1200786 - DNA, 15 bp, Homo sapiens
ttgtaagtattggag

SEQ ID NO: 1200787 - DNA, 15 bp, Homo sapiens
cttgtaagtattgga

SEQ ID NO: 1200788 - DNA, 15 bp, Homo sapiens
acttgtaagtattgg

SEQ ID NO: 1200789 - DNA, 15 bp, Homo sapiens
tacttgtaagtattg

SEQ ID NO: 1200790 - DNA, 15 bp, Homo sapiens
ctacttgtaagtatt

SEQ ID NO: 1200791 - DNA, 15 bp, Homo sapiens
tctacttgtaagtat

SEQ ID NO: 1200792 - DNA, 15 bp, Homo sapiens
gtctacttgtaagta

SEQ ID NO: 1200793 - DNA, 15 bp, Homo sapiens
tgtctacttgtaagt

SEQ ID NO: 1200794 - DNA, 15 bp, Homo sapiens
gtgtctacttgtaag

SEQ ID NO: 1200795 - DNA, 15 bp, Homo sapiens
agtgtctacttgtaa

SEQ ID NO: 1200796 - DNA, 15 bp, Homo sapiens
aagtgtctacttgta

SEQ ID NO: 1200797 - DNA, 15 bp, Homo sapiens
caagtgtctacttgt

SEQ ID NO: 1200798 - DNA, 15 bp, Homo sapiens
acaagtgtctacttg

SEQ ID NO: 1200799 - DNA, 15 bp, Homo sapiens
tacaagtgtctactt

SEQ ID NO: 1200800 - DNA, 15 bp, Homo sapiens
gtacaagtgtctact

SEQ ID NO: 1200801 - DNA, 15 bp, Homo sapiens
ggtacaagtgtctac

SEQ ID NO: 1200802 - DNA, 15 bp, Homo sapiens
tggtacaagtgtcta

SEQ ID NO: 1200803 - DNA, 15 bp, Homo sapiens
ttggtacaagtgtct

SEQ ID NO: 1200804 - DNA, 15 bp, Homo sapiens
tttggtacaagtgtc

SEQ ID NO: 1200805 - DNA, 15 bp, Homo sapiens
ctttggtacaagtgt

SEQ ID NO: 1200806 - DNA, 15 bp, Homo sapiens
tctttggtacaagtg

SEQ ID NO: 1200807 - DNA, 15 bp, Homo sapiens
ttctttggtacaagt

SEQ ID NO: 1200808 - DNA, 15 bp, Homo sapiens
gttctttggtacaag

SEQ ID NO: 1200809 - DNA, 15 bp, Homo sapiens
agttctttggtacaa

SEQ ID NO: 1200810 - DNA, 15 bp, Homo sapiens
tagttctttggtaca

SEQ ID NO: 1200811 - DNA, 15 bp, Homo sapiens
atagttctttggtac

SEQ ID NO: 1200812 - DNA, 15 bp, Homo sapiens
tatagttctttggta

SEQ ID NO: 1200813 - DNA, 15 bp, Homo sapiens
gtatagttctttggt

SEQ ID NO: 1200814 - DNA, 15 bp, Homo sapiens
cgtatagttctttgg

SEQ ID NO: 1200815 - DNA, 15 bp, Homo sapiens
gcgtatagttctttg

SEQ ID NO: 1200816 - DNA, 15 bp, Homo sapiens
agcgtatagttcttt

SEQ ID NO: 1200817 - DNA, 15 bp, Homo sapiens
gagcgtatagttctt

SEQ ID NO: 1200818 - DNA, 15 bp, Homo sapiens
ggagcgtatagttct

SEQ ID NO: 1200819 - DNA, 15 bp, Homo sapiens
aggagcgtatagttc

SEQ ID NO: 1200820 - DNA, 15 bp, Homo sapiens
caggagcgtatagtt

SEQ ID NO: 1200821 - DNA, 15 bp, Homo sapiens
ccaggagcgtatagt

SEQ ID NO: 1200822 - DNA, 15 bp, Homo sapiens
cccaggagcgtatag

SEQ ID NO: 1200823 - DNA, 15 bp, Homo sapiens
acccaggagcgtata

SEQ ID NO: 1200824 - DNA, 15 bp, Homo sapiens
cacccaggagcgtat

SEQ ID NO: 1200825 - DNA, 15 bp, Homo sapiens
gcacccaggagcgta

SEQ ID NO: 1200826 - DNA, 15 bp, Homo sapiens
agcacccaggagcgt

SEQ ID NO: 1200827 - DNA, 15 bp, Homo sapiens
gagcacccaggagcg

SEQ ID NO: 1200828 - DNA, 15 bp, Homo sapiens
tgagcacccaggagc

SEQ ID NO: 1200829 - DNA, 15 bp, Homo sapiens
gtgagcacccaggag

SEQ ID NO: 1200830 - DNA, 15 bp, Homo sapiens
tgtgagcacccagga

SEQ ID NO: 1200831 - DNA, 15 bp, Homo sapiens
gtgtgagcacccagg

SEQ ID NO: 1200832 - DNA, 15 bp, Homo sapiens
agtgtgagcacccag

SEQ ID NO: 1200833 - DNA, 15 bp, Homo sapiens
cagtgtgagcaccca

SEQ ID NO: 1200834 - DNA, 15 bp, Homo sapiens
gcagtgtgagcaccc

SEQ ID NO: 1200835 - DNA, 15 bp, Homo sapiens
ggcagtgtgagcacc

SEQ ID NO: 1200836 - DNA, 15 bp, Homo sapiens
gggcagtgtgagcac

SEQ ID NO: 1200837 - DNA, 15 bp, Homo sapiens
agggcagtgtgagca

SEQ ID NO: 1200838 - DNA, 15 bp, Homo sapiens
aagggcagtgtgagc

SEQ ID NO: 1200839 - DNA, 15 bp, Homo sapiens
aaagggcagtgtgag

SEQ ID NO: 1200840 - DNA, 15 bp, Homo sapiens
caaagggcagtgtga

SEQ ID NO: 1200841 - DNA, 15 bp, Homo sapiens
gcaaagggcagtgtg

SEQ ID NO: 1200842 - DNA, 15 bp, Homo sapiens
agcaaagggcagtgt

SEQ ID NO: 1200843 - DNA, 15 bp, Homo sapiens
aagcaaagggcagtg

SEQ ID NO: 1200844 - DNA, 15 bp, Homo sapiens
caagcaaagggcagt

SEQ ID NO: 1200845 - DNA, 15 bp, Homo sapiens
tcaagcaaagggcag

SEQ ID NO: 1200846 - DNA, 15 bp, Homo sapiens
ctcaagcaaagggca

SEQ ID NO: 1200847 - DNA, 15 bp, Homo sapiens
tctcaagcaaagggc

SEQ ID NO: 1200848 - DNA, 15 bp, Homo sapiens
ttctcaagcaaaggg

SEQ ID NO: 1200849 - DNA, 15 bp, Homo sapiens
cttctcaagcaaagg

SEQ ID NO: 1200850 - DNA, 15 bp, Homo sapiens
acttctcaagcaaag

SEQ ID NO: 1200851 - DNA, 15 bp, Homo sapiens
tacttctcaagcaaa

SEQ ID NO: 1200852 - DNA, 15 bp, Homo sapiens
ttacttctcaagcaa

SEQ ID NO: 1200853 - DNA, 15 bp, Homo sapiens
tttacttctcaagca

SEQ ID NO: 1200854 - DNA, 15 bp, Homo sapiens
atttacttctcaagc

SEQ ID NO: 1200855 - DNA, 15 bp, Homo sapiens
catttacttctcaag

SEQ ID NO: 1200856 - DNA, 15 bp, Homo sapiens
tcatttacttctcaa

SEQ ID NO: 1200857 - DNA, 15 bp, Homo sapiens
ttcatttacttctca

SEQ ID NO: 1200858 - DNA, 15 bp, Homo sapiens
gttcatttacttctc

SEQ ID NO: 1200859 - DNA, 15 bp, Homo sapiens
tgttcatttacttct

SEQ ID NO: 1200860 - DNA, 15 bp, Homo sapiens
atgttcatttacttc

SEQ ID NO: 1200861 - DNA, 15 bp, Homo sapiens
tatgttcatttactt

SEQ ID NO: 1200862 - DNA, 15 bp, Homo sapiens
ctatgttcatttact

SEQ ID NO: 1200863 - DNA, 15 bp, Homo sapiens
cctatgttcatttac

SEQ ID NO: 1200864 - DNA, 15 bp, Homo sapiens
tcctatgttcattta

SEQ ID NO: 1200865 - DNA, 15 bp, Homo sapiens
ttcctatgttcattt

SEQ ID NO: 1200866 - DNA, 15 bp, Homo sapiens
gttcctatgttcatt

SEQ ID NO: 1200867 - DNA, 15 bp, Homo sapiens
cgttcctatgttcat

SEQ ID NO: 1200868 - DNA, 15 bp, Homo sapiens
gcgttcctatgttca

SEQ ID NO: 1200869 - DNA, 15 bp, Homo sapiens
tgcgttcctatgttc

SEQ ID NO: 1200870 - DNA, 15 bp, Homo sapiens
ctgcgttcctatgtt

SEQ ID NO: 1200871 - DNA, 15 bp, Homo sapiens
tctgcgttcctatgt

SEQ ID NO: 1200872 - DNA, 15 bp, Homo sapiens
atctgcgttcctatg

SEQ ID NO: 1200873 - DNA, 15 bp, Homo sapiens
catctgcgttcctat

SEQ ID NO: 1200874 - DNA, 15 bp, Homo sapiens
gcatctgcgttccta

SEQ ID NO: 1200875 - DNA, 15 bp, Homo sapiens
tgcatctgcgttcct

SEQ ID NO: 1200876 - DNA, 15 bp, Homo sapiens
ctgcatctgcgttcc

SEQ ID NO: 1200877 - DNA, 15 bp, Homo sapiens
cctgcatctgcgttc

SEQ ID NO: 1200878 - DNA, 15 bp, Homo sapiens
gcctgcatctgcgtt

SEQ ID NO: 1200879 - DNA, 15 bp, Homo sapiens
tgcctgcatctgcgt

SEQ ID NO: 1200880 - DNA, 15 bp, Homo sapiens
ctgcctgcatctgcg

SEQ ID NO: 1200881 - DNA, 15 bp, Homo sapiens
tctgcctgcatctgc

SEQ ID NO: 1200882 - DNA, 15 bp, Homo sapiens
gtctgcctgcatctg

SEQ ID NO: 1200883 - DNA, 15 bp, Homo sapiens
tgtctgcctgcatct

SEQ ID NO: 1200884 - DNA, 15 bp, Homo sapiens
atgtctgcctgcatc

SEQ ID NO: 1200885 - DNA, 15 bp, Homo sapiens
catgtctgcctgcat

SEQ ID NO: 1200886 - DNA, 15 bp, Homo sapiens
tcatgtctgcctgca

SEQ ID NO: 1200887 - DNA, 15 bp, Homo sapiens
ctcatgtctgcctgc

SEQ ID NO: 1200888 - DNA, 15 bp, Homo sapiens
gctcatgtctgcctg

SEQ ID NO: 1200889 - DNA, 15 bp, Homo sapiens
tgctcatgtctgcct

SEQ ID NO: 1200890 - DNA, 15 bp, Homo sapiens
atgctcatgtctgcc

SEQ ID NO: 1200891 - DNA, 15 bp, Homo sapiens
catgctcatgtctgc

SEQ ID NO: 1200892 - DNA, 15 bp, Homo sapiens
tcatgctcatgtctg

SEQ ID NO: 1200893 - DNA, 15 bp, Homo sapiens
gtcatgctcatgtct

SEQ ID NO: 1200894 - DNA, 15 bp, Homo sapiens
tgtcatgctcatgtc

SEQ ID NO: 1200895 - DNA, 15 bp, Homo sapiens
ctgtcatgctcatgt

SEQ ID NO: 1200896 - DNA, 15 bp, Homo sapiens
actgtcatgctcatg

SEQ ID NO: 1200897 - DNA, 15 bp, Homo sapiens
aactgtcatgctcat

SEQ ID NO: 1200898 - DNA, 15 bp, Homo sapiens
aaactgtcatgctca

SEQ ID NO: 1200899 - DNA, 15 bp, Homo sapiens
gaaactgtcatgctc

SEQ ID NO: 1200900 - DNA, 15 bp, Homo sapiens
tgaaactgtcatgct

SEQ ID NO: 1200901 - DNA, 15 bp, Homo sapiens
atgaaactgtcatgc

SEQ ID NO: 1200902 - DNA, 15 bp, Homo sapiens
catgaaactgtcatg

SEQ ID NO: 1200903 - DNA, 15 bp, Homo sapiens
acatgaaactgtcat

SEQ ID NO: 1200904 - DNA, 15 bp, Homo sapiens
cacatgaaactgtca

SEQ ID NO: 1200905 - DNA, 15 bp, Homo sapiens
gcacatgaaactgtc

SEQ ID NO: 1200906 - DNA, 15 bp, Homo sapiens
tgcacatgaaactgt

SEQ ID NO: 1200907 - DNA, 15 bp, Homo sapiens
atgcacatgaaactg

SEQ ID NO: 1200908 - DNA, 15 bp, Homo sapiens
aatgcacatgaaact

SEQ ID NO: 1200909 - DNA, 15 bp, Homo sapiens
aaatgcacatgaaac

SEQ ID NO: 1200910 - DNA, 15 bp, Homo sapiens
caaatgcacatgaaa

SEQ ID NO: 1200911 - DNA, 15 bp, Homo sapiens
acaaatgcacatgaa

SEQ ID NO: 1200912 - DNA, 15 bp, Homo sapiens
aacaaatgcacatga

SEQ ID NO: 1200913 - DNA, 15 bp, Homo sapiens
gaacaaatgcacatg

SEQ ID NO: 1200914 - DNA, 15 bp, Homo sapiens
tgaacaaatgcacat

SEQ ID NO: 1200915 - DNA, 15 bp, Homo sapiens
atgaacaaatgcaca

SEQ ID NO: 1200916 - DNA, 15 bp, Homo sapiens
catgaacaaatgcac

SEQ ID NO: 1200917 - DNA, 15 bp, Homo sapiens
ccatgaacaaatgca

SEQ ID NO: 1200918 - DNA, 15 bp, Homo sapiens
accatgaacaaatgc

SEQ ID NO: 1200919 - DNA, 15 bp, Homo sapiens
caccatgaacaaatg

SEQ ID NO: 1200920 - DNA, 15 bp, Homo sapiens
acaccatgaacaaat

SEQ ID NO: 1200921 - DNA, 15 bp, Homo sapiens
aacaccatgaacaaa

SEQ ID NO: 1200922 - DNA, 15 bp, Homo sapiens
caacaccatgaacaa

SEQ ID NO: 1200923 - DNA, 15 bp, Homo sapiens
acaacaccatgaaca

SEQ ID NO: 1200924 - DNA, 15 bp, Homo sapiens
gacaacaccatgaac

SEQ ID NO: 1200925 - DNA, 15 bp, Homo sapiens
agacaacaccatgaa

SEQ ID NO: 1200926 - DNA, 15 bp, Homo sapiens
gagacaacaccatga

SEQ ID NO: 1200927 - DNA, 15 bp, Homo sapiens
agagacaacaccatg

SEQ ID NO: 1200928 - DNA, 15 bp, Homo sapiens
cagagacaacaccat

SEQ ID NO: 1200929 - DNA, 15 bp, Homo sapiens
tcagagacaacacca

SEQ ID NO: 1200930 - DNA, 15 bp, Homo sapiens
ttcagagacaacacc

SEQ ID NO: 1200931 - DNA, 15 bp, Homo sapiens
tttcagagacaacac

SEQ ID NO: 1200932 - DNA, 15 bp, Homo sapiens
ttttcagagacaaca

SEQ ID NO: 1200933 - DNA, 15 bp, Homo sapiens
cttttcagagacaac

SEQ ID NO: 1200934 - DNA, 15 bp, Homo sapiens
ccttttcagagacaa

SEQ ID NO: 1200935 - DNA, 15 bp, Homo sapiens
accttttcagagaca

SEQ ID NO: 1200936 - DNA, 15 bp, Homo sapiens
caccttttcagagac

SEQ ID NO: 1200937 - DNA, 15 bp, Homo sapiens
tcaccttttcagaga

SEQ ID NO: 1200938 - DNA, 15 bp, Homo sapiens
atcaccttttcagag

SEQ ID NO: 1200939 - DNA, 15 bp, Homo sapiens
gatcaccttttcaga

SEQ ID NO: 1200940 - DNA, 15 bp, Homo sapiens
agatcaccttttcag

SEQ ID NO: 1200941 - DNA, 15 bp, Homo sapiens
gagatcaccttttca

SEQ ID NO: 1200942 - DNA, 15 bp, Homo sapiens
agagatcaccttttc

SEQ ID NO: 1200943 - DNA, 15 bp, Homo sapiens
cagagatcacctttt

SEQ ID NO: 1200944 - DNA, 15 bp, Homo sapiens
acagagatcaccttt

SEQ ID NO: 1200945 - DNA, 15 bp, Homo sapiens
gacagagatcacctt

SEQ ID NO: 1200946 - DNA, 15 bp, Homo sapiens
ggacagagatcacct

SEQ ID NO: 1200947 - DNA, 15 bp, Homo sapiens
gggacagagatcacc

SEQ ID NO: 1200948 - DNA, 15 bp, Homo sapiens
tgggacagagatcac

SEQ ID NO: 1200949 - DNA, 15 bp, Homo sapiens
ttgggacagagatca

SEQ ID NO: 1200950 - DNA, 15 bp, Homo sapiens
cttgggacagagatc

SEQ ID NO: 1200951 - DNA, 15 bp, Homo sapiens
tcttgggacagagat

SEQ ID NO: 1200952 - DNA, 15 bp, Homo sapiens
ctcttgggacagaga

SEQ ID NO: 1200953 - DNA, 15 bp, Homo sapiens
actcttgggacagag

SEQ ID NO: 1200954 - DNA, 15 bp, Homo sapiens
aactcttgggacaga

SEQ ID NO: 1200955 - DNA, 15 bp, Homo sapiens
caactcttgggacag

SEQ ID NO: 1200956 - DNA, 15 bp, Homo sapiens
tcaactcttgggaca

SEQ ID NO: 1200957 - DNA, 15 bp, Homo sapiens
ctcaactcttgggac

SEQ ID NO: 1200958 - DNA, 15 bp, Homo sapiens
cctcaactcttggga

SEQ ID NO: 1200959 - DNA, 15 bp, Homo sapiens
tcctcaactcttggg

SEQ ID NO: 1200960 - DNA, 15 bp, Homo sapiens
ttcctcaactcttgg

SEQ ID NO: 1200961 - DNA, 15 bp, Homo sapiens
cttcctcaactcttg

SEQ ID NO: 1200962 - DNA, 15 bp, Homo sapiens
ccttcctcaactctt

SEQ ID NO: 1200963 - DNA, 15 bp, Homo sapiens
tccttcctcaactct

SEQ ID NO: 1200964 - DNA, 15 bp, Homo sapiens
ctccttcctcaactc

SEQ ID NO: 1200965 - DNA, 15 bp, Homo sapiens
cctccttcctcaact

SEQ ID NO: 1200966 - DNA, 15 bp, Homo sapiens
ccctccttcctcaac

SEQ ID NO: 1200967 - DNA, 15 bp, Homo sapiens
gccctccttcctcaa

SEQ ID NO: 1200968 - DNA, 15 bp, Homo sapiens
tgccctccttcctca

SEQ ID NO: 1200969 - DNA, 15 bp, Homo sapiens
ctgccctccttcctc

SEQ ID NO: 1200970 - DNA, 15 bp, Homo sapiens
tctgccctccttcct

SEQ ID NO: 1200971 - DNA, 15 bp, Homo sapiens
gtctgccctccttcc

SEQ ID NO: 1200972 - DNA, 15 bp, Homo sapiens
tgtctgccctccttc

SEQ ID NO: 1200973 - DNA, 15 bp, Homo sapiens
ttgtctgccctcctt

SEQ ID NO: 1200974 - DNA, 15 bp, Homo sapiens
tttgtctgccctcct

SEQ ID NO: 1200975 - DNA, 15 bp, Homo sapiens
ttttgtctgccctcc

SEQ ID NO: 1200976 - DNA, 15 bp, Homo sapiens
gttttgtctgccctc

SEQ ID NO: 1200977 - DNA, 15 bp, Homo sapiens
agttttgtctgccct

SEQ ID NO: 1200978 - DNA, 15 bp, Homo sapiens
aagttttgtctgccc

SEQ ID NO: 1200979 - DNA, 15 bp, Homo sapiens
gaagttttgtctgcc

SEQ ID NO: 1200980 - DNA, 15 bp, Homo sapiens
ggaagttttgtctgc

SEQ ID NO: 1200981 - DNA, 15 bp, Homo sapiens
aggaagttttgtctg

SEQ ID NO: 1200982 - DNA, 15 bp, Homo sapiens
caggaagttttgtct

SEQ ID NO: 1200983 - DNA, 15 bp, Homo sapiens
tcaggaagttttgtc

SEQ ID NO: 1200984 - DNA, 15 bp, Homo sapiens
ttcaggaagttttgt

SEQ ID NO: 1200985 - DNA, 15 bp, Homo sapiens
cttcaggaagttttg

SEQ ID NO: 1200986 - DNA, 15 bp, Homo sapiens
tcttcaggaagtttt

SEQ ID NO: 1200987 - DNA, 15 bp, Homo sapiens
ttcttcaggaagttt

SEQ ID NO: 1200988 - DNA, 15 bp, Homo sapiens
cttcttcaggaagtt

SEQ ID NO: 1200989 - DNA, 15 bp, Homo sapiens
gcttcttcaggaagt

SEQ ID NO: 1200990 - DNA, 15 bp, Homo sapiens
tgcttcttcaggaag

SEQ ID NO: 1200991 - DNA, 15 bp, Homo sapiens
ttgcttcttcaggaa

SEQ ID NO: 1200992 - DNA, 15 bp, Homo sapiens
gttgcttcttcagga

SEQ ID NO: 1200993 - DNA, 15 bp, Homo sapiens
agttgcttcttcagg

SEQ ID NO: 1200994 - DNA, 15 bp, Homo sapiens
tagttgcttcttcag

SEQ ID NO: 1200995 - DNA, 15 bp, Homo sapiens
ctagttgcttcttca

SEQ ID NO: 1200996 - DNA, 15 bp, Homo sapiens
tctagttgcttcttc

SEQ ID NO: 1200997 - DNA, 15 bp, Homo sapiens
atctagttgcttctt

SEQ ID NO: 1200998 - DNA, 15 bp, Homo sapiens
tatctagttgcttct

SEQ ID NO: 1200999 - DNA, 15 bp, Homo sapiens
ttatctagttgcttc

SEQ ID NO: 1201000 - DNA, 15 bp, Homo sapiens
tttatctagttgctt

SEQ ID NO: 1201001 - DNA, 15 bp, Homo sapiens
gtttatctagttgct

SEQ ID NO: 1201002 - DNA, 15 bp, Homo sapiens
ggtttatctagttgc

SEQ ID NO: 1201003 - DNA, 15 bp, Homo sapiens
gggtttatctagttg

SEQ ID NO: 1201004 - DNA, 15 bp, Homo sapiens
tgggtttatctagtt

SEQ ID NO: 1201005 - DNA, 15 bp, Homo sapiens
gtgggtttatctagt

SEQ ID NO: 1201006 - DNA, 15 bp, Homo sapiens
agtgggtttatctag

SEQ ID NO: 1201007 - DNA, 15 bp, Homo sapiens
aagtgggtttatcta

SEQ ID NO: 1201008 - DNA, 15 bp, Homo sapiens
caagtgggtttatct

SEQ ID NO: 1201009 - DNA, 15 bp, Homo sapiens
ccaagtgggtttatc

SEQ ID NO: 1201010 - DNA, 15 bp, Homo sapiens
tccaagtgggtttat

SEQ ID NO: 1201011 - DNA, 15 bp, Homo sapiens
ctccaagtgggttta

SEQ ID NO: 1201012 - DNA, 15 bp, Homo sapiens
actccaagtgggttt

SEQ ID NO: 1201013 - DNA, 15 bp, Homo sapiens
aactccaagtgggtt

SEQ ID NO: 1201014 - DNA, 15 bp, Homo sapiens
taactccaagtgggt

SEQ ID NO: 1201015 - DNA, 15 bp, Homo sapiens
ataactccaagtggg

SEQ ID NO: 1201016 - DNA, 15 bp, Homo sapiens
aataactccaagtgg

SEQ ID NO: 1201017 - DNA, 15 bp, Homo sapiens
gaataactccaagtg

SEQ ID NO: 1201018 - DNA, 15 bp, Homo sapiens
agaataactccaagt

SEQ ID NO: 1201019 - DNA, 15 bp, Homo sapiens
aagaataactccaag

SEQ ID NO: 1201020 - DNA, 15 bp, Homo sapiens
gaagaataactccaa

SEQ ID NO: 1201021 - DNA, 15 bp, Homo sapiens
ggaagaataactcca

SEQ ID NO: 1201022 - DNA, 15 bp, Homo sapiens
tggaagaataactcc

SEQ ID NO: 1201023 - DNA, 15 bp, Homo sapiens
ctggaagaataactc

SEQ ID NO: 1201024 - DNA, 15 bp, Homo sapiens
actggaagaataact

SEQ ID NO: 1201025 - DNA, 15 bp, Homo sapiens
tactggaagaataac

SEQ ID NO: 1201026 - DNA, 15 bp, Homo sapiens
ctactggaagaataa

SEQ ID NO: 1201027 - DNA, 15 bp, Homo sapiens
actactggaagaata

SEQ ID NO: 1201028 - DNA, 15 bp, Homo sapiens
aactactggaagaat

SEQ ID NO: 1201029 - DNA, 15 bp, Homo sapiens
aaactactggaagaa

SEQ ID NO: 1201030 - DNA, 15 bp, Homo sapiens
taaactactggaaga

SEQ ID NO: 1201031 - DNA, 15 bp, Homo sapiens
ttaaactactggaag

SEQ ID NO: 1201032 - DNA, 15 bp, Homo sapiens
tttaaactactggaa

SEQ ID NO: 1201033 - DNA, 15 bp, Homo sapiens
atttaaactactgga

SEQ ID NO: 1201034 - DNA, 15 bp, Homo sapiens
tatttaaactactgg

SEQ ID NO: 1201035 - DNA, 15 bp, Homo sapiens
ctatttaaactactg

SEQ ID NO: 1201036 - DNA, 15 bp, Homo sapiens
tctatttaaactact

SEQ ID NO: 1201037 - DNA, 15 bp, Homo sapiens
atctatttaaactac

SEQ ID NO: 1201038 - DNA, 15 bp, Homo sapiens
aatctatttaaacta

SEQ ID NO: 1201039 - DNA, 15 bp, Homo sapiens
caatctatttaaact

SEQ ID NO: 1201040 - DNA, 15 bp, Homo sapiens
gcaatctatttaaac

SEQ ID NO: 1201041 - DNA, 15 bp, Homo sapiens
cgcaatctatttaaa

SEQ ID NO: 1201042 - DNA, 15 bp, Homo sapiens
gcgcaatctatttaa

SEQ ID NO: 1201043 - DNA, 15 bp, Homo sapiens
tgcgcaatctattta

SEQ ID NO: 1201044 - DNA, 15 bp, Homo sapiens
gtgcgcaatctattt

SEQ ID NO: 1201045 - DNA, 15 bp, Homo sapiens
tgtgcgcaatctatt

SEQ ID NO: 1201046 - DNA, 15 bp, Homo sapiens
gtgtgcgcaatctat

SEQ ID NO: 1201047 - DNA, 15 bp, Homo sapiens
tgtgtgcgcaatcta

SEQ ID NO: 1201048 - DNA, 15 bp, Homo sapiens
ttgtgtgcgcaatct

SEQ ID NO: 1201049 - DNA, 15 bp, Homo sapiens
gttgtgtgcgcaatc

SEQ ID NO: 1201050 - DNA, 15 bp, Homo sapiens
agttgtgtgcgcaat

SEQ ID NO: 1201051 - DNA, 15 bp, Homo sapiens
cagttgtgtgcgcaa

SEQ ID NO: 1201052 - DNA, 15 bp, Homo sapiens
gcagttgtgtgcgca

SEQ ID NO: 1201053 - DNA, 15 bp, Homo sapiens
agcagttgtgtgcgc

SEQ ID NO: 1201054 - DNA, 15 bp, Homo sapiens
gagcagttgtgtgcg

SEQ ID NO: 1201055 - DNA, 15 bp, Homo sapiens
tgagcagttgtgtgc

SEQ ID NO: 1201056 - DNA, 15 bp, Homo sapiens
gtgagcagttgtgtg

SEQ ID NO: 1201057 - DNA, 15 bp, Homo sapiens
tgtgagcagttgtgt

SEQ ID NO: 1201058 - DNA, 15 bp, Homo sapiens
gtgtgagcagttgtg

SEQ ID NO: 1201059 - DNA, 15 bp, Homo sapiens
agtgtgagcagttgt

SEQ ID NO: 1201060 - DNA, 15 bp, Homo sapiens
aagtgtgagcagttg

SEQ ID NO: 1201061 - DNA, 15 bp, Homo sapiens
aaagtgtgagcagtt

SEQ ID NO: 1201062 - DNA, 15 bp, Homo sapiens
gaaagtgtgagcagt

SEQ ID NO: 1201063 - DNA, 15 bp, Homo sapiens
agaaagtgtgagcag

SEQ ID NO: 1201064 - DNA, 15 bp, Homo sapiens
gagaaagtgtgagca

SEQ ID NO: 1201065 - DNA, 15 bp, Homo sapiens
tgagaaagtgtgagc

SEQ ID NO: 1201066 - DNA, 15 bp, Homo sapiens
gtgagaaagtgtgag

SEQ ID NO: 1201067 - DNA, 15 bp, Homo sapiens
agtgagaaagtgtga

SEQ ID NO: 1201068 - DNA, 15 bp, Homo sapiens
cagtgagaaagtgtg

SEQ ID NO: 1201069 - DNA, 15 bp, Homo sapiens
ccagtgagaaagtgt

SEQ ID NO: 1201070 - DNA, 15 bp, Homo sapiens
cccagtgagaaagtg

SEQ ID NO: 1201071 - DNA, 15 bp, Homo sapiens
gcccagtgagaaagt

SEQ ID NO: 1201072 - DNA, 15 bp, Homo sapiens
ggcccagtgagaaag

SEQ ID NO: 1201073 - DNA, 15 bp, Homo sapiens
gggcccagtgagaaa

SEQ ID NO: 1201074 - DNA, 15 bp, Homo sapiens
agggcccagtgagaa

SEQ ID NO: 1201075 - DNA, 15 bp, Homo sapiens
gagggcccagtgaga

SEQ ID NO: 1201076 - DNA, 15 bp, Homo sapiens
agagggcccagtgag

SEQ ID NO: 1201077 - DNA, 15 bp, Homo sapiens
aagagggcccagtga

SEQ ID NO: 1201078 - DNA, 15 bp, Homo sapiens
caagagggcccagtg

SEQ ID NO: 1201079 - DNA, 15 bp, Homo sapiens
ccaagagggcccagt

SEQ ID NO: 1201080 - DNA, 15 bp, Homo sapiens
cccaagagggcccag

SEQ ID NO: 1201081 - DNA, 15 bp, Homo sapiens
tcccaagagggccca

SEQ ID NO: 1201082 - DNA, 15 bp, Homo sapiens
gtcccaagagggccc

SEQ ID NO: 1201083 - DNA, 15 bp, Homo sapiens
ggtcccaagagggcc

SEQ ID NO: 1201084 - DNA, 15 bp, Homo sapiens
tggtcccaagagggc

SEQ ID NO: 1201085 - DNA, 15 bp, Homo sapiens
ttggtcccaagaggg

SEQ ID NO: 1201086 - DNA, 15 bp, Homo sapiens
attggtcccaagagg

SEQ ID NO: 1201087 - DNA, 15 bp, Homo sapiens
cattggtcccaagag

SEQ ID NO: 1201088 - DNA, 15 bp, Homo sapiens
gcattggtcccaaga

SEQ ID NO: 1201089 - DNA, 15 bp, Homo sapiens
agcattggtcccaag

SEQ ID NO: 1201090 - DNA, 15 bp, Homo sapiens
tagcattggtcccaa

SEQ ID NO: 1201091 - DNA, 15 bp, Homo sapiens
ctagcattggtccca

SEQ ID NO: 1201092 - DNA, 15 bp, Homo sapiens
tctagcattggtccc

SEQ ID NO: 1201093 - DNA, 15 bp, Homo sapiens
atctagcattggtcc

SEQ ID NO: 1201094 - DNA, 15 bp, Homo sapiens
tatctagcattggtc

SEQ ID NO: 1201095 - DNA, 15 bp, Homo sapiens
ctatctagcattggt

SEQ ID NO: 1201096 - DNA, 15 bp, Homo sapiens
actatctagcattgg

SEQ ID NO: 1201097 - DNA, 15 bp, Homo sapiens
aactatctagcattg

SEQ ID NO: 1201098 - DNA, 15 bp, Homo sapiens
aaactatctagcatt

SEQ ID NO: 1201099 - DNA, 15 bp, Homo sapiens
aaaactatctagcat

SEQ ID NO: 1201100 - DNA, 15 bp, Homo sapiens
caaaactatctagca

SEQ ID NO: 1201101 - DNA, 15 bp, Homo sapiens
tcaaaactatctagc

SEQ ID NO: 1201102 - DNA, 15 bp, Homo sapiens
ctcaaaactatctag

SEQ ID NO: 1201103 - DNA, 15 bp, Homo sapiens
tctcaaaactatcta

SEQ ID NO: 1201104 - DNA, 15 bp, Homo sapiens
gtctcaaaactatct

SEQ ID NO: 1201105 - DNA, 15 bp, Homo sapiens
tgtctcaaaactatc

SEQ ID NO: 1201106 - DNA, 15 bp, Homo sapiens
ttgtctcaaaactat

SEQ ID NO: 1201107 - DNA, 15 bp, Homo sapiens
cttgtctcaaaacta

SEQ ID NO: 1201108 - DNA, 15 bp, Homo sapiens
gcttgtctcaaaact

SEQ ID NO: 1201109 - DNA, 15 bp, Homo sapiens
tgcttgtctcaaaac

SEQ ID NO: 1201110 - DNA, 15 bp, Homo sapiens
ctgcttgtctcaaaa

SEQ ID NO: 1201111 - DNA, 15 bp, Homo sapiens
tctgcttgtctcaaa

SEQ ID NO: 1201112 - DNA, 15 bp, Homo sapiens
gtctgcttgtctcaa

SEQ ID NO: 1201113 - DNA, 15 bp, Homo sapiens
tgtctgcttgtctca

SEQ ID NO: 1201114 - DNA, 15 bp, Homo sapiens
ctgtctgcttgtctc

SEQ ID NO: 1201115 - DNA, 15 bp, Homo sapiens
cctgtctgcttgtct

SEQ ID NO: 1201116 - DNA, 15 bp, Homo sapiens
tcctgtctgcttgtc

SEQ ID NO: 1201117 - DNA, 15 bp, Homo sapiens
atcctgtctgcttgt

SEQ ID NO: 1201118 - DNA, 15 bp, Homo sapiens
aatcctgtctgcttg

SEQ ID NO: 1201119 - DNA, 15 bp, Homo sapiens
taatcctgtctgctt

SEQ ID NO: 1201120 - DNA, 15 bp, Homo sapiens
ctaatcctgtctgct

SEQ ID NO: 1201121 - DNA, 15 bp, Homo sapiens
cctaatcctgtctgc

SEQ ID NO: 1201122 - DNA, 15 bp, Homo sapiens
ccctaatcctgtctg

SEQ ID NO: 1201123 - DNA, 15 bp, Homo sapiens
cccctaatcctgtct

SEQ ID NO: 1201124 - DNA, 15 bp, Homo sapiens
acccctaatcctgtc

SEQ ID NO: 1201125 - DNA, 15 bp, Homo sapiens
gacccctaatcctgt

SEQ ID NO: 1201126 - DNA, 15 bp, Homo sapiens
tgacccctaatcctg

SEQ ID NO: 1201127 - DNA, 15 bp, Homo sapiens
ttgacccctaatcct

SEQ ID NO: 1201128 - DNA, 15 bp, Homo sapiens
cttgacccctaatcc

SEQ ID NO: 1201129 - DNA, 15 bp, Homo sapiens
acttgacccctaatc

SEQ ID NO: 1201130 - DNA, 15 bp, Homo sapiens
gacttgacccctaat

SEQ ID NO: 1201131 - DNA, 15 bp, Homo sapiens
agacttgacccctaa

SEQ ID NO: 1201132 - DNA, 15 bp, Homo sapiens
cagacttgaccccta

SEQ ID NO: 1201133 - DNA, 15 bp, Homo sapiens
acagacttgacccct

SEQ ID NO: 1201134 - DNA, 15 bp, Homo sapiens
cacagacttgacccc

SEQ ID NO: 1201135 - DNA, 15 bp, Homo sapiens
tcacagacttgaccc

SEQ ID NO: 1201136 - DNA, 15 bp, Homo sapiens
ttcacagacttgacc

SEQ ID NO: 1201137 - DNA, 15 bp, Homo sapiens
gttcacagacttgac

SEQ ID NO: 1201138 - DNA, 15 bp, Homo sapiens
ggttcacagacttga

SEQ ID NO: 1201139 - DNA, 15 bp, Homo sapiens
tggttcacagacttg

SEQ ID NO: 1201140 - DNA, 15 bp, Homo sapiens
atggttcacagactt

SEQ ID NO: 1201141 - DNA, 15 bp, Homo sapiens
catggttcacagact

SEQ ID NO: 1201142 - DNA, 15 bp, Homo sapiens
ccatggttcacagac

SEQ ID NO: 1201143 - DNA, 15 bp, Homo sapiens
tccatggttcacaga

SEQ ID NO: 1201144 - DNA, 15 bp, Homo sapiens
ttccatggttcacag

SEQ ID NO: 1201145 - DNA, 15 bp, Homo sapiens
attccatggttcaca

SEQ ID NO: 1201146 - DNA, 15 bp, Homo sapiens
cattccatggttcac

SEQ ID NO: 1201147 - DNA, 15 bp, Homo sapiens
gcattccatggttca

SEQ ID NO: 1201148 - DNA, 15 bp, Homo sapiens
tgcattccatggttc

SEQ ID NO: 1201149 - DNA, 15 bp, Homo sapiens
ttgcattccatggtt

SEQ ID NO: 1201150 - DNA, 15 bp, Homo sapiens
attgcattccatggt

SEQ ID NO: 1201151 - DNA, 15 bp, Homo sapiens
aattgcattccatgg

SEQ ID NO: 1201152 - DNA, 15 bp, Homo sapiens
aaattgcattccatg

SEQ ID NO: 1201153 - DNA, 15 bp, Homo sapiens
aaaattgcattccat

SEQ ID NO: 1201154 - DNA, 15 bp, Homo sapiens
gaaaattgcattcca

SEQ ID NO: 1201155 - DNA, 15 bp, Homo sapiens
ggaaaattgcattcc

SEQ ID NO: 1201156 - DNA, 15 bp, Homo sapiens
aggaaaattgcattc

SEQ ID NO: 1201157 - DNA, 15 bp, Homo sapiens
gaggaaaattgcatt

SEQ ID NO: 1201158 - DNA, 15 bp, Homo sapiens
agaggaaaattgcat

SEQ ID NO: 1201159 - DNA, 15 bp, Homo sapiens
gagaggaaaattgca

SEQ ID NO: 1201160 - DNA, 15 bp, Homo sapiens
ggagaggaaaattgc

SEQ ID NO: 1201161 - DNA, 15 bp, Homo sapiens
tggagaggaaaattg

SEQ ID NO: 1201162 - DNA, 15 bp, Homo sapiens
atggagaggaaaatt

SEQ ID NO: 1201163 - DNA, 15 bp, Homo sapiens
catggagaggaaaat

SEQ ID NO: 1201164 - DNA, 15 bp, Homo sapiens
tcatggagaggaaaa

SEQ ID NO: 1201165 - DNA, 15 bp, Homo sapiens
ttcatggagaggaaa

SEQ ID NO: 1201166 - DNA, 15 bp, Homo sapiens
tttcatggagaggaa

SEQ ID NO: 1201167 - DNA, 15 bp, Homo sapiens
gtttcatggagagga

SEQ ID NO: 1201168 - DNA, 15 bp, Homo sapiens
agtttcatggagagg

SEQ ID NO: 1201169 - DNA, 15 bp, Homo sapiens
tagtttcatggagag

SEQ ID NO: 1201170 - DNA, 15 bp, Homo sapiens
ttagtttcatggaga

SEQ ID NO: 1201171 - DNA, 15 bp, Homo sapiens
gttagtttcatggag

SEQ ID NO: 1201172 - DNA, 15 bp, Homo sapiens
agttagtttcatgga

SEQ ID NO: 1201173 - DNA, 15 bp, Homo sapiens
cagttagtttcatgg

SEQ ID NO: 1201174 - DNA, 15 bp, Homo sapiens
ccagttagtttcatg

SEQ ID NO: 1201175 - DNA, 15 bp, Homo sapiens
gccagttagtttcat

SEQ ID NO: 1201176 - DNA, 15 bp, Homo sapiens
ggccagttagtttca

SEQ ID NO: 1201177 - DNA, 15 bp, Homo sapiens
gggccagttagtttc

SEQ ID NO: 1201178 - DNA, 15 bp, Homo sapiens
agggccagttagttt

SEQ ID NO: 1201179 - DNA, 15 bp, Homo sapiens
aagggccagttagtt

SEQ ID NO: 1201180 - DNA, 15 bp, Homo sapiens
aaagggccagttagt

SEQ ID NO: 1201181 - DNA, 15 bp, Homo sapiens
aaaagggccagttag

SEQ ID NO: 1201182 - DNA, 15 bp, Homo sapiens
caaaagggccagtta

SEQ ID NO: 1201183 - DNA, 15 bp, Homo sapiens
ccaaaagggccagtt

SEQ ID NO: 1201184 - DNA, 15 bp, Homo sapiens
cccaaaagggccagt

SEQ ID NO: 1201185 - DNA, 15 bp, Homo sapiens
ccccaaaagggccag

SEQ ID NO: 1201186 - DNA, 15 bp, Homo sapiens
tccccaaaagggcca

SEQ ID NO: 1201187 - DNA, 15 bp, Homo sapiens
atccccaaaagggcc

SEQ ID NO: 1201188 - DNA, 15 bp, Homo sapiens
gatccccaaaagggc

SEQ ID NO: 1201189 - DNA, 15 bp, Homo sapiens
tgatccccaaaaggg

SEQ ID NO: 1201190 - DNA, 15 bp, Homo sapiens
ttgatccccaaaagg

SEQ ID NO: 1201191 - DNA, 15 bp, Homo sapiens
tttgatccccaaaag

SEQ ID NO: 1201192 - DNA, 15 bp, Homo sapiens
gtttgatccccaaaa

SEQ ID NO: 1201193 - DNA, 15 bp, Homo sapiens
ggtttgatccccaaa

SEQ ID NO: 1201194 - DNA, 15 bp, Homo sapiens
aggtttgatccccaa

SEQ ID NO: 1201195 - DNA, 15 bp, Homo sapiens
taggtttgatcccca

SEQ ID NO: 1201196 - DNA, 15 bp, Homo sapiens
ataggtttgatcccc

SEQ ID NO: 1201197 - DNA, 15 bp, Homo sapiens
cataggtttgatccc

SEQ ID NO: 1201198 - DNA, 15 bp, Homo sapiens
tcataggtttgatcc

SEQ ID NO: 1201199 - DNA, 15 bp, Homo sapiens
gtcataggtttgatc

SEQ ID NO: 1201200 - DNA, 15 bp, Homo sapiens
ggtcataggtttgat

SEQ ID NO: 1201201 - DNA, 15 bp, Homo sapiens
aggtcataggtttga

SEQ ID NO: 1201202 - DNA, 15 bp, Homo sapiens
aaggtcataggtttg

SEQ ID NO: 1201203 - DNA, 15 bp, Homo sapiens
caaggtcataggttt

SEQ ID NO: 1201204 - DNA, 15 bp, Homo sapiens
tcaaggtcataggtt

SEQ ID NO: 1201205 - DNA, 15 bp, Homo sapiens
ctcaaggtcataggt

SEQ ID NO: 1201206 - DNA, 15 bp, Homo sapiens
gctcaaggtcatagg

SEQ ID NO: 1201207 - DNA, 15 bp, Homo sapiens
agctcaaggtcatag

SEQ ID NO: 1201208 - DNA, 15 bp, Homo sapiens
aagctcaaggtcata

SEQ ID NO: 1201209 - DNA, 15 bp, Homo sapiens
caagctcaaggtcat

SEQ ID NO: 1201210 - DNA, 15 bp, Homo sapiens
acaagctcaaggtca

SEQ ID NO: 1201211 - DNA, 15 bp, Homo sapiens
aacaagctcaaggtc

SEQ ID NO: 1201212 - DNA, 15 bp, Homo sapiens
taacaagctcaaggt

SEQ ID NO: 1201213 - DNA, 15 bp, Homo sapiens
ctaacaagctcaagg

SEQ ID NO: 1201214 - DNA, 15 bp, Homo sapiens
gctaacaagctcaag

SEQ ID NO: 1201215 - DNA, 15 bp, Homo sapiens
tgctaacaagctcaa

SEQ ID NO: 1201216 - DNA, 15 bp, Homo sapiens
gtgctaacaagctca

SEQ ID NO: 1201217 - DNA, 15 bp, Homo sapiens
agtgctaacaagctc

SEQ ID NO: 1201218 - DNA, 15 bp, Homo sapiens
gagtgctaacaagct

SEQ ID NO: 1201219 - DNA, 15 bp, Homo sapiens
agagtgctaacaagc

SEQ ID NO: 1201220 - DNA, 15 bp, Homo sapiens
tagagtgctaacaag

SEQ ID NO: 1201221 - DNA, 15 bp, Homo sapiens
gtagagtgctaacaa

SEQ ID NO: 1201222 - DNA, 15 bp, Homo sapiens
agtagagtgctaaca

SEQ ID NO: 1201223 - DNA, 15 bp, Homo sapiens
gagtagagtgctaac

SEQ ID NO: 1201224 - DNA, 15 bp, Homo sapiens
ggagtagagtgctaa

SEQ ID NO: 1201225 - DNA, 15 bp, Homo sapiens
tggagtagagtgcta

SEQ ID NO: 1201226 - DNA, 15 bp, Homo sapiens
ttggagtagagtgct

SEQ ID NO: 1201227 - DNA, 15 bp, Homo sapiens
gttggagtagagtgc

SEQ ID NO: 1201228 - DNA, 15 bp, Homo sapiens
agttggagtagagtg

SEQ ID NO: 1201229 - DNA, 15 bp, Homo sapiens
tagttggagtagagt

SEQ ID NO: 1201230 - DNA, 15 bp, Homo sapiens
atagttggagtagag

SEQ ID NO: 1201231 - DNA, 15 bp, Homo sapiens
catagttggagtaga

SEQ ID NO: 1201232 - DNA, 15 bp, Homo sapiens
gcatagttggagtag

SEQ ID NO: 1201233 - DNA, 15 bp, Homo sapiens
ggcatagttggagta

SEQ ID NO: 1201234 - DNA, 15 bp, Homo sapiens
gggcatagttggagt

SEQ ID NO: 1201235 - DNA, 15 bp, Homo sapiens
tgggcatagttggag

SEQ ID NO: 1201236 - DNA, 15 bp, Homo sapiens
ttgggcatagttgga

SEQ ID NO: 1201237 - DNA, 15 bp, Homo sapiens
tttgggcatagttgg

SEQ ID NO: 1201238 - DNA, 15 bp, Homo sapiens
ttttgggcatagttg

SEQ ID NO: 1201239 - DNA, 15 bp, Homo sapiens
gttttgggcatagtt

SEQ ID NO: 1201240 - DNA, 15 bp, Homo sapiens
tgttttgggcatagt

SEQ ID NO: 1201241 - DNA, 15 bp, Homo sapiens
ttgttttgggcatag

SEQ ID NO: 1201242 - DNA, 15 bp, Homo sapiens
tttgttttgggcata

SEQ ID NO: 1201243 - DNA, 15 bp, Homo sapiens
atttgttttgggcat

SEQ ID NO: 1201244 - DNA, 15 bp, Homo sapiens
tatttgttttgggca

SEQ ID NO: 1201245 - DNA, 15 bp, Homo sapiens
gtatttgttttgggc

SEQ ID NO: 1201246 - DNA, 15 bp, Homo sapiens
tgtatttgttttggg

SEQ ID NO: 1201247 - DNA, 15 bp, Homo sapiens
ctgtatttgttttgg

SEQ ID NO: 1201248 - DNA, 15 bp, Homo sapiens
cctgtatttgttttg

SEQ ID NO: 1201249 - DNA, 15 bp, Homo sapiens
acctgtatttgtttt

SEQ ID NO: 1201250 - DNA, 15 bp, Homo sapiens
gacctgtatttgttt

SEQ ID NO: 1201251 - DNA, 15 bp, Homo sapiens
agacctgtatttgtt

SEQ ID NO: 1201252 - DNA, 15 bp, Homo sapiens
cagacctgtatttgt

SEQ ID NO: 1201253 - DNA, 15 bp, Homo sapiens
tcagacctgtatttg

SEQ ID NO: 1201254 - DNA, 15 bp, Homo sapiens
ttcagacctgtattt

SEQ ID NO: 1201255 - DNA, 15 bp, Homo sapiens
cttcagacctgtatt

SEQ ID NO: 1201256 - DNA, 15 bp, Homo sapiens
gcttcagacctgtat

SEQ ID NO: 1201257 - DNA, 15 bp, Homo sapiens
ggcttcagacctgta

SEQ ID NO: 1201258 - DNA, 15 bp, Homo sapiens
tggcttcagacctgt

SEQ ID NO: 1201259 - DNA, 15 bp, Homo sapiens
ctggcttcagacctg

SEQ ID NO: 1201260 - DNA, 15 bp, Homo sapiens
tctggcttcagacct

SEQ ID NO: 1201261 - DNA, 15 bp, Homo sapiens
ctctggcttcagacc

SEQ ID NO: 1201262 - DNA, 15 bp, Homo sapiens
cctctggcttcagac

SEQ ID NO: 1201263 - DNA, 15 bp, Homo sapiens
tcctctggcttcaga

SEQ ID NO: 1201264 - DNA, 15 bp, Homo sapiens
ctcctctggcttcag

SEQ ID NO: 1201265 - DNA, 15 bp, Homo sapiens
gctcctctggcttca

SEQ ID NO: 1201266 - DNA, 15 bp, Homo sapiens
agctcctctggcttc

SEQ ID NO: 1201267 - DNA, 15 bp, Homo sapiens
gagctcctctggctt

SEQ ID NO: 1201268 - DNA, 15 bp, Homo sapiens
ggagctcctctggct

SEQ ID NO: 1201269 - DNA, 15 bp, Homo sapiens
tggagctcctctggc

SEQ ID NO: 1201270 - DNA, 15 bp, Homo sapiens
ttggagctcctctgg

SEQ ID NO: 1201271 - DNA, 15 bp, Homo sapiens
tttggagctcctctg

SEQ ID NO: 1201272 - DNA, 15 bp, Homo sapiens
gtttggagctcctct

SEQ ID NO: 1201273 - DNA, 15 bp, Homo sapiens
ggtttggagctcctc

SEQ ID NO: 1201274 - DNA, 15 bp, Homo sapiens
tggtttggagctcct

SEQ ID NO: 1201275 - DNA, 15 bp, Homo sapiens
gtggtttggagctcc

SEQ ID NO: 1201276 - DNA, 15 bp, Homo sapiens
tgtggtttggagctc

SEQ ID NO: 1201277 - DNA, 15 bp, Homo sapiens
gtgtggtttggagct

SEQ ID NO: 1201278 - DNA, 15 bp, Homo sapiens
tgtgtggtttggagc

SEQ ID NO: 1201279 - DNA, 15 bp, Homo sapiens
atgtgtggtttggag

SEQ ID NO: 1201280 - DNA, 15 bp, Homo sapiens
tatgtgtggtttgga

SEQ ID NO: 1201281 - DNA, 15 bp, Homo sapiens
ttatgtgtggtttgg

SEQ ID NO: 1201282 - DNA, 15 bp, Homo sapiens
tttatgtgtggtttg

SEQ ID NO: 1201283 - DNA, 15 bp, Homo sapiens
ttttatgtgtggttt

SEQ ID NO: 1201284 - DNA, 15 bp, Homo sapiens
tttttatgtgtggtt

SEQ ID NO: 1201285 - DNA, 15 bp, Homo sapiens
atttttatgtgtggt

SEQ ID NO: 1201286 - DNA, 15 bp, Homo sapiens
catttttatgtgtgg

SEQ ID NO: 1201287 - DNA, 15 bp, Homo sapiens
acatttttatgtgtg

SEQ ID NO: 1201288 - DNA, 15 bp, Homo sapiens
tacatttttatgtgt

SEQ ID NO: 1201289 - DNA, 15 bp, Homo sapiens
ttacatttttatgtg

SEQ ID NO: 1201290 - DNA, 15 bp, Homo sapiens
attacatttttatgt

SEQ ID NO: 1201291 - DNA, 15 bp, Homo sapiens
gattacatttttatg

SEQ ID NO: 1201292 - DNA, 15 bp, Homo sapiens
tgattacatttttat

SEQ ID NO: 1201293 - DNA, 15 bp, Homo sapiens
ttgattacattttta

SEQ ID NO: 1201294 - DNA, 15 bp, Homo sapiens
gttgattacattttt

SEQ ID NO: 1201295 - DNA, 15 bp, Homo sapiens
tgttgattacatttt

SEQ ID NO: 1201296 - DNA, 15 bp, Homo sapiens
ctgttgattacattt

SEQ ID NO: 1201297 - DNA, 15 bp, Homo sapiens
tctgttgattacatt

SEQ ID NO: 1201298 - DNA, 15 bp, Homo sapiens
ctctgttgattacat

SEQ ID NO: 1201299 - DNA, 15 bp, Homo sapiens
gctctgttgattaca

SEQ ID NO: 1201300 - DNA, 15 bp, Homo sapiens
ggctctgttgattac

SEQ ID NO: 1201301 - DNA, 15 bp, Homo sapiens
tggctctgttgatta

SEQ ID NO: 1201302 - DNA, 15 bp, Homo sapiens
gtggctctgttgatt

SEQ ID NO: 1201303 - DNA, 15 bp, Homo sapiens
tgtggctctgttgat

SEQ ID NO: 1201304 - DNA, 15 bp, Homo sapiens
ttgtggctctgttga

SEQ ID NO: 1201305 - DNA, 15 bp, Homo sapiens
cttgtggctctgttg

SEQ ID NO: 1201306 - DNA, 15 bp, Homo sapiens
ccttgtggctctgtt

SEQ ID NO: 1201307 - DNA, 15 bp, Homo sapiens
tccttgtggctctgt

SEQ ID NO: 1201308 - DNA, 15 bp, Homo sapiens
ttccttgtggctctg

SEQ ID NO: 1201309 - DNA, 15 bp, Homo sapiens
tttccttgtggctct

SEQ ID NO: 1201310 - DNA, 15 bp, Homo sapiens
gtttccttgtggctc

SEQ ID NO: 1201311 - DNA, 15 bp, Homo sapiens
tgtttccttgtggct

SEQ ID NO: 1201312 - DNA, 15 bp, Homo sapiens
gtgtttccttgtggc

SEQ ID NO: 1201313 - DNA, 15 bp, Homo sapiens
tgtgtttccttgtgg

SEQ ID NO: 1201314 - DNA, 15 bp, Homo sapiens
atgtgtttccttgtg

SEQ ID NO: 1201315 - DNA, 15 bp, Homo sapiens
tatgtgtttccttgt

SEQ ID NO: 1201316 - DNA, 15 bp, Homo sapiens
ttatgtgtttccttg

SEQ ID NO: 1201317 - DNA, 15 bp, Homo sapiens
tttatgtgtttcctt

SEQ ID NO: 1201318 - DNA, 15 bp, Homo sapiens
ctttatgtgtttcct

SEQ ID NO: 1201319 - DNA, 15 bp, Homo sapiens
actttatgtgtttcc

SEQ ID NO: 1201320 - DNA, 15 bp, Homo sapiens
tactttatgtgtttc

SEQ ID NO: 1201321 - DNA, 15 bp, Homo sapiens
ttactttatgtgttt

SEQ ID NO: 1201322 - DNA, 15 bp, Homo sapiens
tttactttatgtgtt

SEQ ID NO: 1201323 - DNA, 15 bp, Homo sapiens
gtttactttatgtgt

SEQ ID NO: 1201324 - DNA, 15 bp, Homo sapiens
tgtttactttatgtg

SEQ ID NO: 1201325 - DNA, 15 bp, Homo sapiens
gtgtttactttatgt

SEQ ID NO: 1201326 - DNA, 15 bp, Homo sapiens
agtgtttactttatg

SEQ ID NO: 1201327 - DNA, 15 bp, Homo sapiens
aagtgtttactttat

SEQ ID NO: 1201328 - DNA, 15 bp, Homo sapiens
aaagtgtttacttta

SEQ ID NO: 1201329 - DNA, 15 bp, Homo sapiens
gaaagtgtttacttt

SEQ ID NO: 1201330 - DNA, 15 bp, Homo sapiens
agaaagtgtttactt

SEQ ID NO: 1201331 - DNA, 15 bp, Homo sapiens
tagaaagtgtttact

SEQ ID NO: 1201332 - DNA, 15 bp, Homo sapiens
atagaaagtgtttac

SEQ ID NO: 1201333 - DNA, 15 bp, Homo sapiens
tatagaaagtgttta

SEQ ID NO: 1201334 - DNA, 15 bp, Homo sapiens
atatagaaagtgttt

SEQ ID NO: 1201335 - DNA, 15 bp, Homo sapiens
tatatagaaagtgtt

SEQ ID NO: 1201336 - DNA, 15 bp, Homo sapiens
ctatatagaaagtgt

SEQ ID NO: 1201337 - DNA, 15 bp, Homo sapiens
cctatatagaaagtg

SEQ ID NO: 1201338 - DNA, 15 bp, Homo sapiens
gcctatatagaaagt

SEQ ID NO: 1201339 - DNA, 15 bp, Homo sapiens
tgcctatatagaaag

SEQ ID NO: 1201340 - DNA, 15 bp, Homo sapiens
ttgcctatatagaaa

SEQ ID NO: 1201341 - DNA, 15 bp, Homo sapiens
tttgcctatatagaa

SEQ ID NO: 1201342 - DNA, 15 bp, Homo sapiens
ttttgcctatataga

SEQ ID NO: 1201343 - DNA, 15 bp, Homo sapiens
tttttgcctatatag

SEQ ID NO: 1201344 - DNA, 15 bp, Homo sapiens
ctttttgcctatata

SEQ ID NO: 1201345 - DNA, 15 bp, Homo sapiens
tctttttgcctatat

SEQ ID NO: 1201346 - DNA, 15 bp, Homo sapiens
ttctttttgcctata

SEQ ID NO: 1201347 - DNA, 15 bp, Homo sapiens
gttctttttgcctat

SEQ ID NO: 1201348 - DNA, 15 bp, Homo sapiens
tgttctttttgccta

SEQ ID NO: 1201349 - DNA, 15 bp, Homo sapiens
ctgttctttttgcct

SEQ ID NO: 1201350 - DNA, 15 bp, Homo sapiens
tctgttctttttgcc

SEQ ID NO: 1201351 - DNA, 15 bp, Homo sapiens
ttctgttctttttgc

SEQ ID NO: 1201352 - DNA, 15 bp, Homo sapiens
cttctgttctttttg

SEQ ID NO: 1201353 - DNA, 15 bp, Homo sapiens
tcttctgttcttttt

SEQ ID NO: 1201354 - DNA, 15 bp, Homo sapiens
atcttctgttctttt

SEQ ID NO: 1201355 - DNA, 15 bp, Homo sapiens
aatcttctgttcttt

SEQ ID NO: 1201356 - DNA, 15 bp, Homo sapiens
aaatcttctgttctt

SEQ ID NO: 1201357 - DNA, 15 bp, Homo sapiens
caaatcttctgttct

SEQ ID NO: 1201358 - DNA, 15 bp, Homo sapiens
ccaaatcttctgttc

SEQ ID NO: 1201359 - DNA, 15 bp, Homo sapiens
tccaaatcttctgtt

SEQ ID NO: 1201360 - DNA, 15 bp, Homo sapiens
ttccaaatcttctgt

SEQ ID NO: 1201361 - DNA, 15 bp, Homo sapiens
tttccaaatcttctg

SEQ ID NO: 1201362 - DNA, 15 bp, Homo sapiens
ctttccaaatcttct

SEQ ID NO: 1201363 - DNA, 15 bp, Homo sapiens
tctttccaaatcttc

SEQ ID NO: 1201364 - DNA, 15 bp, Homo sapiens
ctctttccaaatctt

SEQ ID NO: 1201365 - DNA, 15 bp, Homo sapiens
gctctttccaaatct

SEQ ID NO: 1201366 - DNA, 15 bp, Homo sapiens
ggctctttccaaatc

SEQ ID NO: 1201367 - DNA, 15 bp, Homo sapiens
aggctctttccaaat

SEQ ID NO: 1201368 - DNA, 15 bp, Homo sapiens
taggctctttccaaa

SEQ ID NO: 1201369 - DNA, 15 bp, Homo sapiens
gtaggctctttccaa

SEQ ID NO: 1201370 - DNA, 15 bp, Homo sapiens
tgtaggctctttcca

SEQ ID NO: 1201371 - DNA, 15 bp, Homo sapiens
atgtaggctctttcc

SEQ ID NO: 1201372 - DNA, 15 bp, Homo sapiens
aatgtaggctctttc

SEQ ID NO: 1201373 - DNA, 15 bp, Homo sapiens
gaatgtaggctcttt

SEQ ID NO: 1201374 - DNA, 15 bp, Homo sapiens
agaatgtaggctctt

SEQ ID NO: 1201375 - DNA, 15 bp, Homo sapiens
gagaatgtaggctct

SEQ ID NO: 1201376 - DNA, 15 bp, Homo sapiens
agagaatgtaggctc

SEQ ID NO: 1201377 - DNA, 15 bp, Homo sapiens
cagagaatgtaggct

SEQ ID NO: 1201378 - DNA, 15 bp, Homo sapiens
tcagagaatgtaggc

SEQ ID NO: 1201379 - DNA, 15 bp, Homo sapiens
ttcagagaatgtagg

SEQ ID NO: 1201380 - DNA, 15 bp, Homo sapiens
attcagagaatgtag

SEQ ID NO: 1201381 - DNA, 15 bp, Homo sapiens
gattcagagaatgta

SEQ ID NO: 1201382 - DNA, 15 bp, Homo sapiens
ggattcagagaatgt

SEQ ID NO: 1201383 - DNA, 15 bp, Homo sapiens
gggattcagagaatg

SEQ ID NO: 1201384 - DNA, 15 bp, Homo sapiens
agggattcagagaat

SEQ ID NO: 1201385 - DNA, 15 bp, Homo sapiens
aagggattcagagaa

SEQ ID NO: 1201386 - DNA, 15 bp, Homo sapiens
taagggattcagaga

SEQ ID NO: 1201387 - DNA, 15 bp, Homo sapiens
ctaagggattcagag

SEQ ID NO: 1201388 - DNA, 15 bp, Homo sapiens
actaagggattcaga

SEQ ID NO: 1201389 - DNA, 15 bp, Homo sapiens
gactaagggattcag

SEQ ID NO: 1201390 - DNA, 15 bp, Homo sapiens
tgactaagggattca

SEQ ID NO: 1201391 - DNA, 15 bp, Homo sapiens
atgactaagggattc

SEQ ID NO: 1201392 - DNA, 15 bp, Homo sapiens
gatgactaagggatt

SEQ ID NO: 1201393 - DNA, 15 bp, Homo sapiens
agatgactaagggat

SEQ ID NO: 1201394 - DNA, 15 bp, Homo sapiens
cagatgactaaggga

SEQ ID NO: 1201395 - DNA, 15 bp, Homo sapiens
tcagatgactaaggg

SEQ ID NO: 1201396 - DNA, 15 bp, Homo sapiens
ttcagatgactaagg

SEQ ID NO: 1201397 - DNA, 15 bp, Homo sapiens
cttcagatgactaag

SEQ ID NO: 1201398 - DNA, 15 bp, Homo sapiens
ccttcagatgactaa

SEQ ID NO: 1201399 - DNA, 15 bp, Homo sapiens
gccttcagatgacta

SEQ ID NO: 1201400 - DNA, 15 bp, Homo sapiens
agccttcagatgact

SEQ ID NO: 1201401 - DNA, 15 bp, Homo sapiens
aagccttcagatgac

SEQ ID NO: 1201402 - DNA, 15 bp, Homo sapiens
taagccttcagatga

SEQ ID NO: 1201403 - DNA, 15 bp, Homo sapiens
gtaagccttcagatg

SEQ ID NO: 1201404 - DNA, 15 bp, Homo sapiens
agtaagccttcagat

SEQ ID NO: 1201405 - DNA, 15 bp, Homo sapiens
cagtaagccttcaga

SEQ ID NO: 1201406 - DNA, 15 bp, Homo sapiens
ccagtaagccttcag

SEQ ID NO: 1201407 - DNA, 15 bp, Homo sapiens
tccagtaagccttca

SEQ ID NO: 1201408 - DNA, 15 bp, Homo sapiens
ttccagtaagccttc

SEQ ID NO: 1201409 - DNA, 15 bp, Homo sapiens
tttccagtaagcctt

SEQ ID NO: 1201410 - DNA, 15 bp, Homo sapiens
atttccagtaagcct

SEQ ID NO: 1201411 - DNA, 15 bp, Homo sapiens
aatttccagtaagcc

SEQ ID NO: 1201412 - DNA, 15 bp, Homo sapiens
aaatttccagtaagc

SEQ ID NO: 1201413 - DNA, 15 bp, Homo sapiens
gaaatttccagtaag

SEQ ID NO: 1201414 - DNA, 15 bp, Homo sapiens
ggaaatttccagtaa

SEQ ID NO: 1201415 - DNA, 15 bp, Homo sapiens
tggaaatttccagta

SEQ ID NO: 1201416 - DNA, 15 bp, Homo sapiens
gtggaaatttccagt

SEQ ID NO: 1201417 - DNA, 15 bp, Homo sapiens
cgtggaaatttccag

SEQ ID NO: 1201418 - DNA, 15 bp, Homo sapiens
acgtggaaatttcca

SEQ ID NO: 1201419 - DNA, 15 bp, Homo sapiens
cacgtggaaatttcc

SEQ ID NO: 1201420 - DNA, 15 bp, Homo sapiens
ccacgtggaaatttc

SEQ ID NO: 1201421 - DNA, 15 bp, Homo sapiens
tccacgtggaaattt

SEQ ID NO: 1201422 - DNA, 15 bp, Homo sapiens
atccacgtggaaatt

SEQ ID NO: 1201423 - DNA, 15 bp, Homo sapiens
tatccacgtggaaat

SEQ ID NO: 1201424 - DNA, 15 bp, Homo sapiens
atatccacgtggaaa

SEQ ID NO: 1201425 - DNA, 15 bp, Homo sapiens
gatatccacgtggaa

SEQ ID NO: 1201426 - DNA, 15 bp, Homo sapiens
agatatccacgtgga

SEQ ID NO: 1201427 - DNA, 15 bp, Homo sapiens
aagatatccacgtgg

SEQ ID NO: 1201428 - DNA, 15 bp, Homo sapiens
gaagatatccacgtg

SEQ ID NO: 1201429 - DNA, 15 bp, Homo sapiens
ggaagatatccacgt

SEQ ID NO: 1201430 - DNA, 15 bp, Homo sapiens
tggaagatatccacg

SEQ ID NO: 1201431 - DNA, 15 bp, Homo sapiens
ttggaagatatccac

SEQ ID NO: 1201432 - DNA, 15 bp, Homo sapiens
gttggaagatatcca

SEQ ID NO: 1201433 - DNA, 15 bp, Homo sapiens
tgttggaagatatcc

SEQ ID NO: 1201434 - DNA, 15 bp, Homo sapiens
gtgttggaagatatc

SEQ ID NO: 1201435 - DNA, 15 bp, Homo sapiens
agtgttggaagatat

SEQ ID NO: 1201436 - DNA, 15 bp, Homo sapiens
aagtgttggaagata

SEQ ID NO: 1201437 - DNA, 15 bp, Homo sapiens
aaagtgttggaagat

SEQ ID NO: 1201438 - DNA, 15 bp, Homo sapiens
caaagtgttggaaga

SEQ ID NO: 1201439 - DNA, 15 bp, Homo sapiens
tcaaagtgttggaag

SEQ ID NO: 1201440 - DNA, 15 bp, Homo sapiens
gtcaaagtgttggaa

SEQ ID NO: 1201441 - DNA, 15 bp, Homo sapiens
agtcaaagtgttgga

SEQ ID NO: 1201442 - DNA, 15 bp, Homo sapiens
aagtcaaagtgttgg

SEQ ID NO: 1201443 - DNA, 15 bp, Homo sapiens
gaagtcaaagtgttg

SEQ ID NO: 1201444 - DNA, 15 bp, Homo sapiens
tgaagtcaaagtgtt

SEQ ID NO: 1201445 - DNA, 15 bp, Homo sapiens
ttgaagtcaaagtgt

SEQ ID NO: 1201446 - DNA, 15 bp, Homo sapiens
gttgaagtcaaagtg

SEQ ID NO: 1201447 - DNA, 15 bp, Homo sapiens
ggttgaagtcaaagt

SEQ ID NO: 1201448 - DNA, 15 bp, Homo sapiens
gggttgaagtcaaag

SEQ ID NO: 1201449 - DNA, 15 bp, Homo sapiens
tgggttgaagtcaaa

SEQ ID NO: 1201450 - DNA, 15 bp, Homo sapiens
atgggttgaagtcaa

SEQ ID NO: 1201451 - DNA, 15 bp, Homo sapiens
aatgggttgaagtca

SEQ ID NO: 1201452 - DNA, 15 bp, Homo sapiens
aaatgggttgaagtc

SEQ ID NO: 1201453 - DNA, 15 bp, Homo sapiens
aaaatgggttgaagt

SEQ ID NO: 1201454 - DNA, 15 bp, Homo sapiens
gaaaatgggttgaag

SEQ ID NO: 1201455 - DNA, 15 bp, Homo sapiens
ggaaaatgggttgaa

SEQ ID NO: 1201456 - DNA, 15 bp, Homo sapiens
aggaaaatgggttga

SEQ ID NO: 1201457 - DNA, 15 bp, Homo sapiens
gaggaaaatgggttg

SEQ ID NO: 1201458 - DNA, 15 bp, Homo sapiens
agaggaaaatgggtt

SEQ ID NO: 1201459 - DNA, 15 bp, Homo sapiens
gagaggaaaatgggt

SEQ ID NO: 1201460 - DNA, 15 bp, Homo sapiens
agagaggaaaatggg

SEQ ID NO: 1201461 - DNA, 15 bp, Homo sapiens
tagagaggaaaatgg

SEQ ID NO: 1201462 - DNA, 15 bp, Homo sapiens
ctagagaggaaaatg

SEQ ID NO: 1201463 - DNA, 15 bp, Homo sapiens
actagagaggaaaat

SEQ ID NO: 1201464 - DNA, 15 bp, Homo sapiens
gactagagaggaaaa

SEQ ID NO: 1201465 - DNA, 15 bp, Homo sapiens
agactagagaggaaa

SEQ ID NO: 1201466 - DNA, 15 bp, Homo sapiens
aagactagagaggaa

SEQ ID NO: 1201467 - DNA, 15 bp, Homo sapiens
gaagactagagagga

SEQ ID NO: 1201468 - DNA, 15 bp, Homo sapiens
tgaagactagagagg

SEQ ID NO: 1201469 - DNA, 15 bp, Homo sapiens
gtgaagactagagag

SEQ ID NO: 1201470 - DNA, 15 bp, Homo sapiens
ggtgaagactagaga

SEQ ID NO: 1201471 - DNA, 15 bp, Homo sapiens
aggtgaagactagag

SEQ ID NO: 1201472 - DNA, 15 bp, Homo sapiens
gaggtgaagactaga

SEQ ID NO: 1201473 - DNA, 15 bp, Homo sapiens
agaggtgaagactag

SEQ ID NO: 1201474 - DNA, 15 bp, Homo sapiens
tagaggtgaagacta

SEQ ID NO: 1201475 - DNA, 15 bp, Homo sapiens
ttagaggtgaagact

SEQ ID NO: 1201476 - DNA, 15 bp, Homo sapiens
tttagaggtgaagac

SEQ ID NO: 1201477 - DNA, 15 bp, Homo sapiens
ttttagaggtgaaga

SEQ ID NO: 1201478 - DNA, 15 bp, Homo sapiens
cttttagaggtgaag

SEQ ID NO: 1201479 - DNA, 15 bp, Homo sapiens
gcttttagaggtgaa

SEQ ID NO: 1201480 - DNA, 15 bp, Homo sapiens
tgcttttagaggtga

SEQ ID NO: 1201481 - DNA, 15 bp, Homo sapiens
ttgcttttagaggtg

SEQ ID NO: 1201482 - DNA, 15 bp, Homo sapiens
attgcttttagaggt

SEQ ID NO: 1201483 - DNA, 15 bp, Homo sapiens
aattgcttttagagg

SEQ ID NO: 1201484 - DNA, 15 bp, Homo sapiens
aaattgcttttagag

SEQ ID NO: 1201485 - DNA, 15 bp, Homo sapiens
caaattgcttttaga

SEQ ID NO: 1201486 - DNA, 15 bp, Homo sapiens
gcaaattgcttttag

SEQ ID NO: 1201487 - DNA, 15 bp, Homo sapiens
agcaaattgctttta

SEQ ID NO: 1201488 - DNA, 15 bp, Homo sapiens
tagcaaattgctttt

SEQ ID NO: 1201489 - DNA, 15 bp, Homo sapiens
atagcaaattgcttt

SEQ ID NO: 1201490 - DNA, 15 bp, Homo sapiens
aatagcaaattgctt

SEQ ID NO: 1201491 - DNA, 15 bp, Homo sapiens
aaatagcaaattgct

SEQ ID NO: 1201492 - DNA, 15 bp, Homo sapiens
caaatagcaaattgc

SEQ ID NO: 1201493 - DNA, 15 bp, Homo sapiens
ccaaatagcaaattg

SEQ ID NO: 1201494 - DNA, 15 bp, Homo sapiens
tccaaatagcaaatt

SEQ ID NO: 1201495 - DNA, 15 bp, Homo sapiens
ttccaaatagcaaat

SEQ ID NO: 1201496 - DNA, 15 bp, Homo sapiens
gttccaaatagcaaa

SEQ ID NO: 1201497 - DNA, 15 bp, Homo sapiens
agttccaaatagcaa

SEQ ID NO: 1201498 - DNA, 15 bp, Homo sapiens
aagttccaaatagca

SEQ ID NO: 1201499 - DNA, 15 bp, Homo sapiens
aaagttccaaatagc

SEQ ID NO: 1201500 - DNA, 15 bp, Homo sapiens
gaaagttccaaatag

SEQ ID NO: 1201501 - DNA, 15 bp, Homo sapiens
agaaagttccaaata

SEQ ID NO: 1201502 - DNA, 15 bp, Homo sapiens
cagaaagttccaaat

SEQ ID NO: 1201503 - DNA, 15 bp, Homo sapiens
acagaaagttccaaa

SEQ ID NO: 1201504 - DNA, 15 bp, Homo sapiens
gacagaaagttccaa

SEQ ID NO: 1201505 - DNA, 15 bp, Homo sapiens
agacagaaagttcca

SEQ ID NO: 1201506 - DNA, 15 bp, Homo sapiens
tagacagaaagttcc

SEQ ID NO: 1201507 - DNA, 15 bp, Homo sapiens
atagacagaaagttc

SEQ ID NO: 1201508 - DNA, 15 bp, Homo sapiens
catagacagaaagtt

SEQ ID NO: 1201509 - DNA, 15 bp, Homo sapiens
ccatagacagaaagt

SEQ ID NO: 1201510 - DNA, 15 bp, Homo sapiens
gccatagacagaaag

SEQ ID NO: 1201511 - DNA, 15 bp, Homo sapiens
tgccatagacagaaa

SEQ ID NO: 1201512 - DNA, 15 bp, Homo sapiens
gtgccatagacagaa

SEQ ID NO: 1201513 - DNA, 15 bp, Homo sapiens
ggtgccatagacaga

SEQ ID NO: 1201514 - DNA, 15 bp, Homo sapiens
tggtgccatagacag

SEQ ID NO: 1201515 - DNA, 15 bp, Homo sapiens
atggtgccatagaca

SEQ ID NO: 1201516 - DNA, 15 bp, Homo sapiens
tatggtgccatagac

SEQ ID NO: 1201517 - DNA, 15 bp, Homo sapiens
ttatggtgccataga

SEQ ID NO: 1201518 - DNA, 15 bp, Homo sapiens
attatggtgccatag

SEQ ID NO: 1201519 - DNA, 15 bp, Homo sapiens
aattatggtgccata

SEQ ID NO: 1201520 - DNA, 15 bp, Homo sapiens
gaattatggtgccat

SEQ ID NO: 1201521 - DNA, 15 bp, Homo sapiens
tgaattatggtgcca

SEQ ID NO: 1201522 - DNA, 15 bp, Homo sapiens
ctgaattatggtgcc

SEQ ID NO: 1201523 - DNA, 15 bp, Homo sapiens
actgaattatggtgc

SEQ ID NO: 1201524 - DNA, 15 bp, Homo sapiens
gactgaattatggtg

SEQ ID NO: 1201525 - DNA, 15 bp, Homo sapiens
tgactgaattatggt

SEQ ID NO: 1201526 - DNA, 15 bp, Homo sapiens
ttgactgaattatgg

SEQ ID NO: 1201527 - DNA, 15 bp, Homo sapiens
gttgactgaattatg

SEQ ID NO: 1201528 - DNA, 15 bp, Homo sapiens
ggttgactgaattat

SEQ ID NO: 1201529 - DNA, 15 bp, Homo sapiens
tggttgactgaatta

SEQ ID NO: 1201530 - DNA, 15 bp, Homo sapiens
ttggttgactgaatt

SEQ ID NO: 1201531 - DNA, 15 bp, Homo sapiens
cttggttgactgaat

SEQ ID NO: 1201532 - DNA, 15 bp, Homo sapiens
acttggttgactgaa

SEQ ID NO: 1201533 - DNA, 15 bp, Homo sapiens
aacttggttgactga

SEQ ID NO: 1201534 - DNA, 15 bp, Homo sapiens
gaacttggttgactg

SEQ ID NO: 1201535 - DNA, 15 bp, Homo sapiens
tgaacttggttgact

SEQ ID NO: 1201536 - DNA, 15 bp, Homo sapiens
ctgaacttggttgac

SEQ ID NO: 1201537 - DNA, 15 bp, Homo sapiens
tctgaacttggttga

SEQ ID NO: 1201538 - DNA, 15 bp, Homo sapiens
ttctgaacttggttg

SEQ ID NO: 1201539 - DNA, 15 bp, Homo sapiens
gttctgaacttggtt

SEQ ID NO: 1201540 - DNA, 15 bp, Homo sapiens
ggttctgaacttggt

SEQ ID NO: 1201541 - DNA, 15 bp, Homo sapiens
aggttctgaacttgg

SEQ ID NO: 1201542 - DNA, 15 bp, Homo sapiens
aaggttctgaacttg

SEQ ID NO: 1201543 - DNA, 15 bp, Homo sapiens
caaggttctgaactt

SEQ ID NO: 1201544 - DNA, 15 bp, Homo sapiens
ccaaggttctgaact

SEQ ID NO: 1201545 - DNA, 15 bp, Homo sapiens
tccaaggttctgaac

SEQ ID NO: 1201546 - DNA, 15 bp, Homo sapiens
ctccaaggttctgaa

SEQ ID NO: 1201547 - DNA, 15 bp, Homo sapiens
actccaaggttctga

SEQ ID NO: 1201548 - DNA, 15 bp, Homo sapiens
aactccaaggttctg

SEQ ID NO: 1201549 - DNA, 15 bp, Homo sapiens
aaactccaaggttct

SEQ ID NO: 1201550 - DNA, 15 bp, Homo sapiens
aaaactccaaggttc

SEQ ID NO: 1201551 - DNA, 15 bp, Homo sapiens
gaaaactccaaggtt

SEQ ID NO: 1201552 - DNA, 15 bp, Homo sapiens
ggaaaactccaaggt

SEQ ID NO: 1201553 - DNA, 15 bp, Homo sapiens
aggaaaactccaagg

SEQ ID NO: 1201554 - DNA, 15 bp, Homo sapiens
gaggaaaactccaag

SEQ ID NO: 1201555 - DNA, 15 bp, Homo sapiens
tgaggaaaactccaa

SEQ ID NO: 1201556 - DNA, 15 bp, Homo sapiens
ctgaggaaaactcca

SEQ ID NO: 1201557 - DNA, 15 bp, Homo sapiens
gctgaggaaaactcc

SEQ ID NO: 1201558 - DNA, 15 bp, Homo sapiens
tgctgaggaaaactc

SEQ ID NO: 1201559 - DNA, 15 bp, Homo sapiens
ttgctgaggaaaact

SEQ ID NO: 1201560 - DNA, 15 bp, Homo sapiens
gttgctgaggaaaac

SEQ ID NO: 1201561 - DNA, 15 bp, Homo sapiens
tgttgctgaggaaaa

SEQ ID NO: 1201562 - DNA, 15 bp, Homo sapiens
gtgttgctgaggaaa

SEQ ID NO: 1201563 - DNA, 15 bp, Homo sapiens
tgtgttgctgaggaa

SEQ ID NO: 1201564 - DNA, 15 bp, Homo sapiens
atgtgttgctgagga

SEQ ID NO: 1201565 - DNA, 15 bp, Homo sapiens
aatgtgttgctgagg

SEQ ID NO: 1201566 - DNA, 15 bp, Homo sapiens
gaatgtgttgctgag

SEQ ID NO: 1201567 - DNA, 15 bp, Homo sapiens
tgaatgtgttgctga

SEQ ID NO: 1201568 - DNA, 15 bp, Homo sapiens
ttgaatgtgttgctg

SEQ ID NO: 1201569 - DNA, 15 bp, Homo sapiens
tttgaatgtgttgct

SEQ ID NO: 1201570 - DNA, 15 bp, Homo sapiens
gtttgaatgtgttgc

SEQ ID NO: 1201571 - DNA, 15 bp, Homo sapiens
tgtttgaatgtgttg

SEQ ID NO: 1201572 - DNA, 15 bp, Homo sapiens
atgtttgaatgtgtt

SEQ ID NO: 1201573 - DNA, 15 bp, Homo sapiens
gatgtttgaatgtgt

SEQ ID NO: 1201574 - DNA, 15 bp, Homo sapiens
ggatgtttgaatgtg

SEQ ID NO: 1201575 - DNA, 15 bp, Homo sapiens
tggatgtttgaatgt

SEQ ID NO: 1201576 - DNA, 15 bp, Homo sapiens
ctggatgtttgaatg

SEQ ID NO: 1201577 - DNA, 15 bp, Homo sapiens
actggatgtttgaat

SEQ ID NO: 1201578 - DNA, 15 bp, Homo sapiens
cactggatgtttgaa

SEQ ID NO: 1201579 - DNA, 15 bp, Homo sapiens
gcactggatgtttga

SEQ ID NO: 1201580 - DNA, 15 bp, Homo sapiens
agcactggatgtttg

SEQ ID NO: 1201581 - DNA, 15 bp, Homo sapiens
gagcactggatgttt

SEQ ID NO: 1201582 - DNA, 15 bp, Homo sapiens
tgagcactggatgtt

SEQ ID NO: 1201583 - DNA, 15 bp, Homo sapiens
atgagcactggatgt

SEQ ID NO: 1201584 - DNA, 15 bp, Homo sapiens
aatgagcactggatg

SEQ ID NO: 1201585 - DNA, 15 bp, Homo sapiens
taatgagcactggat

SEQ ID NO: 1201586 - DNA, 15 bp, Homo sapiens
ctaatgagcactgga

SEQ ID NO: 1201587 - DNA, 15 bp, Homo sapiens
cctaatgagcactgg

SEQ ID NO: 1201588 - DNA, 15 bp, Homo sapiens
acctaatgagcactg

SEQ ID NO: 1201589 - DNA, 15 bp, Homo sapiens
gacctaatgagcact

SEQ ID NO: 1201590 - DNA, 15 bp, Homo sapiens
tgacctaatgagcac

SEQ ID NO: 1201591 - DNA, 15 bp, Homo sapiens
atgacctaatgagca

SEQ ID NO: 1201592 - DNA, 15 bp, Homo sapiens
gatgacctaatgagc

SEQ ID NO: 1201593 - DNA, 15 bp, Homo sapiens
ggatgacctaatgag

SEQ ID NO: 1201594 - DNA, 15 bp, Homo sapiens
aggatgacctaatga

SEQ ID NO: 1201595 - DNA, 15 bp, Homo sapiens
aaggatgacctaatg

SEQ ID NO: 1201596 - DNA, 15 bp, Homo sapiens
gaaggatgacctaat

SEQ ID NO: 1201597 - DNA, 15 bp, Homo sapiens
tgaaggatgacctaa

SEQ ID NO: 1201598 - DNA, 15 bp, Homo sapiens
ttgaaggatgaccta

SEQ ID NO: 1201599 - DNA, 15 bp, Homo sapiens
cttgaaggatgacct

SEQ ID NO: 1201600 - DNA, 15 bp, Homo sapiens
ccttgaaggatgacc

SEQ ID NO: 1201601 - DNA, 15 bp, Homo sapiens
accttgaaggatgac

SEQ ID NO: 1201602 - DNA, 15 bp, Homo sapiens
gaccttgaaggatga

SEQ ID NO: 1201603 - DNA, 15 bp, Homo sapiens
tgaccttgaaggatg

SEQ ID NO: 1201604 - DNA, 15 bp, Homo sapiens
atgaccttgaaggat

SEQ ID NO: 1201605 - DNA, 15 bp, Homo sapiens
aatgaccttgaagga

SEQ ID NO: 1201606 - DNA, 15 bp, Homo sapiens
aaatgaccttgaagg

SEQ ID NO: 1201607 - DNA, 15 bp, Homo sapiens
taaatgaccttgaag

SEQ ID NO: 1201608 - DNA, 15 bp, Homo sapiens
ataaatgaccttgaa

SEQ ID NO: 1201609 - DNA, 15 bp, Homo sapiens
cataaatgaccttga

SEQ ID NO: 1201610 - DNA, 15 bp, Homo sapiens
gcataaatgaccttg

SEQ ID NO: 1201611 - DNA, 15 bp, Homo sapiens
agcataaatgacctt

SEQ ID NO: 1201612 - DNA, 15 bp, Homo sapiens
tagcataaatgacct

SEQ ID NO: 1201613 - DNA, 15 bp, Homo sapiens
ttagcataaatgacc

SEQ ID NO: 1201614 - DNA, 15 bp, Homo sapiens
tttagcataaatgac

SEQ ID NO: 1201615 - DNA, 15 bp, Homo sapiens
atttagcataaatga

SEQ ID NO: 1201616 - DNA, 15 bp, Homo sapiens
tatttagcataaatg

SEQ ID NO: 1201617 - DNA, 15 bp, Homo sapiens
ttatttagcataaat

SEQ ID NO: 1201618 - DNA, 15 bp, Homo sapiens
gttatttagcataaa

SEQ ID NO: 1201619 - DNA, 15 bp, Homo sapiens
tgttatttagcataa

SEQ ID NO: 1201620 - DNA, 15 bp, Homo sapiens
ctgttatttagcata

SEQ ID NO: 1201621 - DNA, 15 bp, Homo sapiens
gctgttatttagcat

SEQ ID NO: 1201622 - DNA, 15 bp, Homo sapiens
ggctgttatttagca

SEQ ID NO: 1201623 - DNA, 15 bp, Homo sapiens
aggctgttatttagc

SEQ ID NO: 1201624 - DNA, 15 bp, Homo sapiens
gaggctgttatttag

SEQ ID NO: 1201625 - DNA, 15 bp, Homo sapiens
agaggctgttattta

SEQ ID NO: 1201626 - DNA, 15 bp, Homo sapiens
taaaaagaggctgtt

SEQ ID NO: 1201627 - DNA, 15 bp, Homo sapiens
ttaaaaagaggctgt

SEQ ID NO: 1201628 - DNA, 15 bp, Homo sapiens
tttaaaaagaggctg

SEQ ID NO: 1201629 - DNA, 15 bp, Homo sapiens
ttttaaaaagaggct

SEQ ID NO: 1201630 - DNA, 15 bp, Homo sapiens
tttttaaaaagaggc

SEQ ID NO: 1201631 - DNA, 15 bp, Homo sapiens
atttttaaaaagagg

SEQ ID NO: 1201632 - DNA, 15 bp, Homo sapiens
tatttttaaaaagag

SEQ ID NO: 1201633 - DNA, 15 bp, Homo sapiens
ctatttttaaaaaga

SEQ ID NO: 1201634 - DNA, 15 bp, Homo sapiens
tctatttttaaaaag

SEQ ID NO: 1201635 - DNA, 15 bp, Homo sapiens
ctctatttttaaaaa

SEQ ID NO: 1201636 - DNA, 15 bp, Homo sapiens
atctctatttttaaa

SEQ ID NO: 1201637 - DNA, 15 bp, Homo sapiens
gatctctatttttaa

SEQ ID NO: 1201638 - DNA, 15 bp, Homo sapiens
tgatctctattttta

SEQ ID NO: 1201639 - DNA, 15 bp, Homo sapiens
ttgatctctattttt

SEQ ID NO: 1201640 - DNA, 15 bp, Homo sapiens
tttgatctctatttt

SEQ ID NO: 1201641 - DNA, 15 bp, Homo sapiens
ttttgatctctattt

SEQ ID NO: 1201642 - DNA, 15 bp, Homo sapiens
attttgatctctatt

SEQ ID NO: 1201643 - DNA, 15 bp, Homo sapiens
tattttgatctctat

SEQ ID NO: 1201644 - DNA, 15 bp, Homo sapiens
atattttgatctcta

SEQ ID NO: 1201645 - DNA, 15 bp, Homo sapiens
catattttgatctct

SEQ ID NO: 1201646 - DNA, 15 bp, Homo sapiens
gcatattttgatctc

SEQ ID NO: 1201647 - DNA, 15 bp, Homo sapiens
ggcatattttgatct

SEQ ID NO: 1201648 - DNA, 15 bp, Homo sapiens
tggcatattttgatc

SEQ ID NO: 1201649 - DNA, 15 bp, Homo sapiens
ttggcatattttgat

SEQ ID NO: 1201650 - DNA, 15 bp, Homo sapiens
cttggcatattttga

SEQ ID NO: 1201651 - DNA, 15 bp, Homo sapiens
ccttggcatattttg

SEQ ID NO: 1201652 - DNA, 15 bp, Homo sapiens
gccttggcatatttt

SEQ ID NO: 1201653 - DNA, 15 bp, Homo sapiens
ggccttggcatattt

SEQ ID NO: 1201654 - DNA, 15 bp, Homo sapiens
tggccttggcatatt

SEQ ID NO: 1201655 - DNA, 15 bp, Homo sapiens
atggccttggcatat

SEQ ID NO: 1201656 - DNA, 15 bp, Homo sapiens
aatggccttggcata

SEQ ID NO: 1201657 - DNA, 15 bp, Homo sapiens
taatggccttggcat

SEQ ID NO: 1201658 - DNA, 15 bp, Homo sapiens
ataatggccttggca

SEQ ID NO: 1201659 - DNA, 15 bp, Homo sapiens
aataatggccttggc

SEQ ID NO: 1201660 - DNA, 15 bp, Homo sapiens
gaataatggccttgg

SEQ ID NO: 1201661 - DNA, 15 bp, Homo sapiens
tgaataatggccttg

SEQ ID NO: 1201662 - DNA, 15 bp, Homo sapiens
ttgaataatggcctt

SEQ ID NO: 1201663 - DNA, 15 bp, Homo sapiens
tttgaataatggcct

SEQ ID NO: 1201664 - DNA, 15 bp, Homo sapiens
gtttgaataatggcc

SEQ ID NO: 1201665 - DNA, 15 bp, Homo sapiens
tgtttgaataatggc

SEQ ID NO: 1201666 - DNA, 15 bp, Homo sapiens
atgtttgaataatgg

SEQ ID NO: 1201667 - DNA, 15 bp, Homo sapiens
gatgtttgaataatg

SEQ ID NO: 1201668 - DNA, 15 bp, Homo sapiens
agatgtttgaataat

SEQ ID NO: 1201669 - DNA, 15 bp, Homo sapiens
gagatgtttgaataa

SEQ ID NO: 1201670 - DNA, 15 bp, Homo sapiens
agagatgtttgaata

SEQ ID NO: 1201671 - DNA, 15 bp, Homo sapiens
aagagatgtttgaat

SEQ ID NO: 1201672 - DNA, 15 bp, Homo sapiens
taagagatgtttgaa

SEQ ID NO: 1201673 - DNA, 15 bp, Homo sapiens
ataagagatgtttga

SEQ ID NO: 1201674 - DNA, 15 bp, Homo sapiens
tataagagatgtttg

SEQ ID NO: 1201675 - DNA, 15 bp, Homo sapiens
atataagagatgttt

SEQ ID NO: 1201676 - DNA, 15 bp, Homo sapiens
gatataagagatgtt

SEQ ID NO: 1201677 - DNA, 15 bp, Homo sapiens
agatataagagatgt

SEQ ID NO: 1201678 - DNA, 15 bp, Homo sapiens
aagatataagagatg

SEQ ID NO: 1201679 - DNA, 15 bp, Homo sapiens
aaagatataagagat

SEQ ID NO: 1201680 - DNA, 15 bp, Homo sapiens
gaaagatataagaga

SEQ ID NO: 1201681 - DNA, 15 bp, Homo sapiens
ggaaagatataagag

SEQ ID NO: 1201682 - DNA, 15 bp, Homo sapiens
aggaaagatataaga

SEQ ID NO: 1201683 - DNA, 15 bp, Homo sapiens
gaggaaagatataag

SEQ ID NO: 1201684 - DNA, 15 bp, Homo sapiens
ggaggaaagatataa

SEQ ID NO: 1201685 - DNA, 15 bp, Homo sapiens
aggaggaaagatata

SEQ ID NO: 1201686 - DNA, 15 bp, Homo sapiens
gaggaggaaagatat

SEQ ID NO: 1201687 - DNA, 15 bp, Homo sapiens
ggaggaggaaagata

SEQ ID NO: 1201688 - DNA, 15 bp, Homo sapiens
aggaggaggaaagat

SEQ ID NO: 1201689 - DNA, 15 bp, Homo sapiens
taggaggaggaaaga

SEQ ID NO: 1201690 - DNA, 15 bp, Homo sapiens
gtaggaggaggaaag

SEQ ID NO: 1201691 - DNA, 15 bp, Homo sapiens
ggtaggaggaggaaa

SEQ ID NO: 1201692 - DNA, 15 bp, Homo sapiens
gggtaggaggaggaa

SEQ ID NO: 1201693 - DNA, 15 bp, Homo sapiens
ggggtaggaggagga

SEQ ID NO: 1201694 - DNA, 15 bp, Homo sapiens
gggggtaggaggagg

SEQ ID NO: 1201695 - DNA, 15 bp, Homo sapiens
tgggggtaggaggag

SEQ ID NO: 1201696 - DNA, 15 bp, Homo sapiens
ttgggggtaggagga

SEQ ID NO: 1201697 - DNA, 15 bp, Homo sapiens
tttgggggtaggagg

SEQ ID NO: 1201698 - DNA, 15 bp, Homo sapiens
ctttgggggtaggag

SEQ ID NO: 1201699 - DNA, 15 bp, Homo sapiens
cctttgggggtagga

SEQ ID NO: 1201700 - DNA, 15 bp, Homo sapiens
gcctttgggggtagg

SEQ ID NO: 1201701 - DNA, 15 bp, Homo sapiens
tgcctttgggggtag

SEQ ID NO: 1201702 - DNA, 15 bp, Homo sapiens
atgcctttgggggta

SEQ ID NO: 1201703 - DNA, 15 bp, Homo sapiens
gatgcctttgggggt

SEQ ID NO: 1201704 - DNA, 15 bp, Homo sapiens
tgatgcctttggggg

SEQ ID NO: 1201705 - DNA, 15 bp, Homo sapiens
gtgatgcctttgggg

SEQ ID NO: 1201706 - DNA, 15 bp, Homo sapiens
agtgatgcctttggg

SEQ ID NO: 1201707 - DNA, 15 bp, Homo sapiens
gagtgatgcctttgg

SEQ ID NO: 1201708 - DNA, 15 bp, Homo sapiens
agagtgatgcctttg

SEQ ID NO: 1201709 - DNA, 15 bp, Homo sapiens
aagagtgatgccttt

SEQ ID NO: 1201710 - DNA, 15 bp, Homo sapiens
taagagtgatgcctt

SEQ ID NO: 1201711 - DNA, 15 bp, Homo sapiens
ataagagtgatgcct

SEQ ID NO: 1201712 - DNA, 15 bp, Homo sapiens
aataagagtgatgcc

SEQ ID NO: 1201713 - DNA, 15 bp, Homo sapiens
taataagagtgatgc

SEQ ID NO: 1201714 - DNA, 15 bp, Homo sapiens
ctaataagagtgatg

SEQ ID NO: 1201715 - DNA, 15 bp, Homo sapiens
actaataagagtgat

SEQ ID NO: 1201716 - DNA, 15 bp, Homo sapiens
gactaataagagtga

SEQ ID NO: 1201717 - DNA, 15 bp, Homo sapiens
ggactaataagagtg

SEQ ID NO: 1201718 - DNA, 15 bp, Homo sapiens
tggactaataagagt

SEQ ID NO: 1201719 - DNA, 15 bp, Homo sapiens
ttggactaataagag

SEQ ID NO: 1201720 - DNA, 15 bp, Homo sapiens
gttggactaataaga

SEQ ID NO: 1201721 - DNA, 15 bp, Homo sapiens
ggttggactaataag

SEQ ID NO: 1201722 - DNA, 15 bp, Homo sapiens
aggttggactaataa

SEQ ID NO: 1201723 - DNA, 15 bp, Homo sapiens
aaggttggactaata

SEQ ID NO: 1201724 - DNA, 15 bp, Homo sapiens
aaaggttggactaat

SEQ ID NO: 1201725 - DNA, 15 bp, Homo sapiens
taaaggttggactaa

SEQ ID NO: 1201726 - DNA, 15 bp, Homo sapiens
ataaaggttggacta

SEQ ID NO: 1201727 - DNA, 15 bp, Homo sapiens
aataaaggttggact

SEQ ID NO: 1201728 - DNA, 15 bp, Homo sapiens
caataaaggttggac

SEQ ID NO: 1201729 - DNA, 15 bp, Homo sapiens
gcaataaaggttgga

SEQ ID NO: 1201730 - DNA, 15 bp, Homo sapiens
ggcaataaaggttgg

SEQ ID NO: 1201731 - DNA, 15 bp, Homo sapiens
aggcaataaaggttg

SEQ ID NO: 1201732 - DNA, 15 bp, Homo sapiens
aaggcaataaaggtt

SEQ ID NO: 1201733 - DNA, 15 bp, Homo sapiens
gaaggcaataaaggt

SEQ ID NO: 1201734 - DNA, 15 bp, Homo sapiens
agaaggcaataaagg

SEQ ID NO: 1201735 - DNA, 15 bp, Homo sapiens
cagaaggcaataaag

SEQ ID NO: 1201736 - DNA, 15 bp, Homo sapiens
ccagaaggcaataaa

SEQ ID NO: 1201737 - DNA, 15 bp, Homo sapiens
tccagaaggcaataa

SEQ ID NO: 1201738 - DNA, 15 bp, Homo sapiens
gtccagaaggcaata

SEQ ID NO: 1201739 - DNA, 15 bp, Homo sapiens
tgtccagaaggcaat

SEQ ID NO: 1201740 - DNA, 15 bp, Homo sapiens
ttgtccagaaggcaa

SEQ ID NO: 1201741 - DNA, 15 bp, Homo sapiens
attgtccagaaggca

SEQ ID NO: 1201742 - DNA, 15 bp, Homo sapiens
aattgtccagaaggc

SEQ ID NO: 1201743 - DNA, 15 bp, Homo sapiens
caattgtccagaagg

SEQ ID NO: 1201744 - DNA, 15 bp, Homo sapiens
gcaattgtccagaag

SEQ ID NO: 1201745 - DNA, 15 bp, Homo sapiens
tgcaattgtccagaa

SEQ ID NO: 1201746 - DNA, 15 bp, Homo sapiens
ttgcaattgtccaga

SEQ ID NO: 1201747 - DNA, 15 bp, Homo sapiens
attgcaattgtccag

SEQ ID NO: 1201748 - DNA, 15 bp, Homo sapiens
cattgcaattgtcca

SEQ ID NO: 1201749 - DNA, 15 bp, Homo sapiens
ccattgcaattgtcc

SEQ ID NO: 1201750 - DNA, 15 bp, Homo sapiens
gccattgcaattgtc

SEQ ID NO: 1201751 - DNA, 15 bp, Homo sapiens
agccattgcaattgt

SEQ ID NO: 1201752 - DNA, 15 bp, Homo sapiens
cagccattgcaattg

SEQ ID NO: 1201753 - DNA, 15 bp, Homo sapiens
gcagccattgcaatt

SEQ ID NO: 1201754 - DNA, 15 bp, Homo sapiens
agcagccattgcaat

SEQ ID NO: 1201755 - DNA, 15 bp, Homo sapiens
gagcagccattgcaa

SEQ ID NO: 1201756 - DNA, 15 bp, Homo sapiens
tgagcagccattgca

SEQ ID NO: 1201757 - DNA, 15 bp, Homo sapiens
gtgagcagccattgc

SEQ ID NO: 1201758 - DNA, 15 bp, Homo sapiens
ggtgagcagccattg

SEQ ID NO: 1201759 - DNA, 15 bp, Homo sapiens
tggtgagcagccatt

SEQ ID NO: 1201760 - DNA, 15 bp, Homo sapiens
ctggtgagcagccat

SEQ ID NO: 1201761 - DNA, 15 bp, Homo sapiens
actggtgagcagcca

SEQ ID NO: 1201762 - DNA, 15 bp, Homo sapiens
tactggtgagcagcc

SEQ ID NO: 1201763 - DNA, 15 bp, Homo sapiens
gtactggtgagcagc

SEQ ID NO: 1201764 - DNA, 15 bp, Homo sapiens
agtactggtgagcag

SEQ ID NO: 1201765 - DNA, 15 bp, Homo sapiens
gagtactggtgagca

SEQ ID NO: 1201766 - DNA, 15 bp, Homo sapiens
ggagtactggtgagc

SEQ ID NO: 1201767 - DNA, 15 bp, Homo sapiens
aggagtactggtgag

SEQ ID NO: 1201768 - DNA, 15 bp, Homo sapiens
gaggagtactggtga

SEQ ID NO: 1201769 - DNA, 15 bp, Homo sapiens
agaggagtactggtg

SEQ ID NO: 1201770 - DNA, 15 bp, Homo sapiens
gagaggagtactggt

SEQ ID NO: 1201771 - DNA, 15 bp, Homo sapiens
agagaggagtactgg

SEQ ID NO: 1201772 - DNA, 15 bp, Homo sapiens
gagagaggagtactg

SEQ ID NO: 1201773 - DNA, 15 bp, Homo sapiens
tgagagaggagtact

SEQ ID NO: 1201774 - DNA, 15 bp, Homo sapiens
ttgagagaggagtac

SEQ ID NO: 1201775 - DNA, 15 bp, Homo sapiens
attgagagaggagta

SEQ ID NO: 1201776 - DNA, 15 bp, Homo sapiens
gattgagagaggagt

SEQ ID NO: 1201777 - DNA, 15 bp, Homo sapiens
ggattgagagaggag

SEQ ID NO: 1201778 - DNA, 15 bp, Homo sapiens
tggattgagagagga

SEQ ID NO: 1201779 - DNA, 15 bp, Homo sapiens
atggattgagagagg

SEQ ID NO: 1201780 - DNA, 15 bp, Homo sapiens
aatggattgagagag

SEQ ID NO: 1201781 - DNA, 15 bp, Homo sapiens
aaatggattgagaga

SEQ ID NO: 1201782 - DNA, 15 bp, Homo sapiens
caaatggattgagag

SEQ ID NO: 1201783 - DNA, 15 bp, Homo sapiens
tcaaatggattgaga

SEQ ID NO: 1201784 - DNA, 15 bp, Homo sapiens
atcaaatggattgag

SEQ ID NO: 1201785 - DNA, 15 bp, Homo sapiens
tatcaaatggattga

SEQ ID NO: 1201786 - DNA, 15 bp, Homo sapiens
atatcaaatggattg

SEQ ID NO: 1201787 - DNA, 15 bp, Homo sapiens
tatatcaaatggatt

SEQ ID NO: 1201788 - DNA, 15 bp, Homo sapiens
ctatatcaaatggat

SEQ ID NO: 1201789 - DNA, 15 bp, Homo sapiens
gctatatcaaatgga

SEQ ID NO: 1201790 - DNA, 15 bp, Homo sapiens
tgctatatcaaatgg

SEQ ID NO: 1201791 - DNA, 15 bp, Homo sapiens
atgctatatcaaatg

SEQ ID NO: 1201792 - DNA, 15 bp, Homo sapiens
aatgctatatcaaat

SEQ ID NO: 1201793 - DNA, 15 bp, Homo sapiens
aaatgctatatcaaa

SEQ ID NO: 1201794 - DNA, 15 bp, Homo sapiens
aaaatgctatatcaa

SEQ ID NO: 1201795 - DNA, 15 bp, Homo sapiens
aaaaatgctatatca

SEQ ID NO: 1201796 - DNA, 15 bp, Homo sapiens
taaaaatgctatatc

SEQ ID NO: 1201797 - DNA, 15 bp, Homo sapiens
ttaaaaatgctatat

SEQ ID NO: 1201798 - DNA, 15 bp, Homo sapiens
tttaaaaatgctata

SEQ ID NO: 1201799 - DNA, 15 bp, Homo sapiens
ctttaaaaatgctat

SEQ ID NO: 1201800 - DNA, 15 bp, Homo sapiens
actttaaaaatgcta

SEQ ID NO: 1201801 - DNA, 15 bp, Homo sapiens
aactttaaaaatgct

SEQ ID NO: 1201802 - DNA, 15 bp, Homo sapiens
aaactttaaaaatgc

SEQ ID NO: 1201803 - DNA, 15 bp, Homo sapiens
caaaactttaaaaat

SEQ ID NO: 1201804 - DNA, 15 bp, Homo sapiens
gcaaaactttaaaaa

SEQ ID NO: 1201805 - DNA, 15 bp, Homo sapiens
agcaaaactttaaaa

SEQ ID NO: 1201806 - DNA, 15 bp, Homo sapiens
aagcaaaactttaaa

SEQ ID NO: 1201807 - DNA, 15 bp, Homo sapiens
caagcaaaactttaa

SEQ ID NO: 1201808 - DNA, 15 bp, Homo sapiens
ccaagcaaaacttta

SEQ ID NO: 1201809 - DNA, 15 bp, Homo sapiens
gccaagcaaaacttt

SEQ ID NO: 1201810 - DNA, 15 bp, Homo sapiens
tgccaagcaaaactt

SEQ ID NO: 1201811 - DNA, 15 bp, Homo sapiens
atgccaagcaaaact

SEQ ID NO: 1201812 - DNA, 15 bp, Homo sapiens
tatgccaagcaaaac

SEQ ID NO: 1201813 - DNA, 15 bp, Homo sapiens
gtatgccaagcaaaa

SEQ ID NO: 1201814 - DNA, 15 bp, Homo sapiens
ggtatgccaagcaaa

SEQ ID NO: 1201815 - DNA, 15 bp, Homo sapiens
aggtatgccaagcaa

SEQ ID NO: 1201816 - DNA, 15 bp, Homo sapiens
aaggtatgccaagca

SEQ ID NO: 1201817 - DNA, 15 bp, Homo sapiens
taaggtatgccaagc

SEQ ID NO: 1201818 - DNA, 15 bp, Homo sapiens
ataaggtatgccaag

SEQ ID NO: 1201819 - DNA, 15 bp, Homo sapiens
cataaggtatgccaa

SEQ ID NO: 1201820 - DNA, 15 bp, Homo sapiens
tcataaggtatgcca

SEQ ID NO: 1201821 - DNA, 15 bp, Homo sapiens
ttcataaggtatgcc

SEQ ID NO: 1201822 - DNA, 15 bp, Homo sapiens
tttcataaggtatgc

SEQ ID NO: 1201823 - DNA, 15 bp, Homo sapiens
ttttcataaggtatg

SEQ ID NO: 1201824 - DNA, 15 bp, Homo sapiens
tttttcataaggtat

SEQ ID NO: 1201825 - DNA, 15 bp, Homo sapiens
gtttttcataaggta

SEQ ID NO: 1201826 - DNA, 15 bp, Homo sapiens
agtttttcataaggt

SEQ ID NO: 1201827 - DNA, 15 bp, Homo sapiens
aagtttttcataagg

SEQ ID NO: 1201828 - DNA, 15 bp, Homo sapiens
gaagtttttcataag

SEQ ID NO: 1201829 - DNA, 15 bp, Homo sapiens
tgaagtttttcataa

SEQ ID NO: 1201830 - DNA, 15 bp, Homo sapiens
ctgaagtttttcata

SEQ ID NO: 1201831 - DNA, 15 bp, Homo sapiens
actgaagtttttcat

SEQ ID NO: 1201832 - DNA, 15 bp, Homo sapiens
cactgaagtttttca

SEQ ID NO: 1201833 - DNA, 15 bp, Homo sapiens
ccactgaagtttttc

SEQ ID NO: 1201834 - DNA, 15 bp, Homo sapiens
gccactgaagttttt

SEQ ID NO: 1201835 - DNA, 15 bp, Homo sapiens
ggccactgaagtttt

SEQ ID NO: 1201836 - DNA, 15 bp, Homo sapiens
tggccactgaagttt

SEQ ID NO: 1201837 - DNA, 15 bp, Homo sapiens
gtggccactgaagtt

SEQ ID NO: 1201838 - DNA, 15 bp, Homo sapiens
ggtggccactgaagt

SEQ ID NO: 1201839 - DNA, 15 bp, Homo sapiens
tggtggccactgaag

SEQ ID NO: 1201840 - DNA, 15 bp, Homo sapiens
atggtggccactgaa

SEQ ID NO: 1201841 - DNA, 15 bp, Homo sapiens
aatggtggccactga

SEQ ID NO: 1201842 - DNA, 15 bp, Homo sapiens
aaatggtggccactg

SEQ ID NO: 1201843 - DNA, 15 bp, Homo sapiens
aaaatggtggccact

SEQ ID NO: 1201844 - DNA, 15 bp, Homo sapiens
gaaaatggtggccac

SEQ ID NO: 1201845 - DNA, 15 bp, Homo sapiens
tgaaaatggtggcca

SEQ ID NO: 1201846 - DNA, 15 bp, Homo sapiens
ttgaaaatggtggcc

SEQ ID NO: 1201847 - DNA, 15 bp, Homo sapiens
attgaaaatggtggc

SEQ ID NO: 1201848 - DNA, 15 bp, Homo sapiens
aattgaaaatggtgg

SEQ ID NO: 1201849 - DNA, 15 bp, Homo sapiens
aaattgaaaatggtg

SEQ ID NO: 1201850 - DNA, 15 bp, Homo sapiens
caaattgaaaatggt

SEQ ID NO: 1201851 - DNA, 15 bp, Homo sapiens
tcaaattgaaaatgg

SEQ ID NO: 1201852 - DNA, 15 bp, Homo sapiens
atcaaattgaaaatg

SEQ ID NO: 1201853 - DNA, 15 bp, Homo sapiens
tatcaaattgaaaat

SEQ ID NO: 1201854 - DNA, 15 bp, Homo sapiens
atatcaaattgaaaa

SEQ ID NO: 1201855 - DNA, 15 bp, Homo sapiens
gatatcaaattgaaa

SEQ ID NO: 1201856 - DNA, 15 bp, Homo sapiens
agatatcaaattgaa

SEQ ID NO: 1201857 - DNA, 15 bp, Homo sapiens
aagatatcaaattga

SEQ ID NO: 1201858 - DNA, 15 bp, Homo sapiens
aaagatatcaaattg

SEQ ID NO: 1201859 - DNA, 15 bp, Homo sapiens
gaaagatatcaaatt

SEQ ID NO: 1201860 - DNA, 15 bp, Homo sapiens
agaaagatatcaaat

SEQ ID NO: 1201861 - DNA, 15 bp, Homo sapiens
aagaaagatatcaaa

SEQ ID NO: 1201862 - DNA, 15 bp, Homo sapiens
aaagaaagatatcaa

SEQ ID NO: 1201863 - DNA, 15 bp, Homo sapiens
aaaagaaagatatca

SEQ ID NO: 1201864 - DNA, 15 bp, Homo sapiens
aaaaagaaagatatc

SEQ ID NO: 1201865 - DNA, 15 bp, Homo sapiens
gaaaaagaaagatat

SEQ ID NO: 1201866 - DNA, 15 bp, Homo sapiens
agaaaaagaaagata

SEQ ID NO: 1201867 - DNA, 15 bp, Homo sapiens
aagaaaaagaaagat

SEQ ID NO: 1201868 - DNA, 15 bp, Homo sapiens
taagaaaaagaaaga

SEQ ID NO: 1201869 - DNA, 15 bp, Homo sapiens
ttaagaaaaagaaag

SEQ ID NO: 1201870 - DNA, 15 bp, Homo sapiens
attaagaaaaagaaa

SEQ ID NO: 1201871 - DNA, 15 bp, Homo sapiens
tattaagaaaaagaa

SEQ ID NO: 1201872 - DNA, 15 bp, Homo sapiens
ctattaagaaaaaga

SEQ ID NO: 1201873 - DNA, 15 bp, Homo sapiens
gctattaagaaaaag

SEQ ID NO: 1201874 - DNA, 15 bp, Homo sapiens
agctattaagaaaaa

SEQ ID NO: 1201875 - DNA, 15 bp, Homo sapiens
tagctattaagaaaa

SEQ ID NO: 1201876 - DNA, 15 bp, Homo sapiens
atagctattaagaaa

SEQ ID NO: 1201877 - DNA, 15 bp, Homo sapiens
aatagctattaagaa

SEQ ID NO: 1201878 - DNA, 15 bp, Homo sapiens
caatagctattaaga

SEQ ID NO: 1201879 - DNA, 15 bp, Homo sapiens
gcaatagctattaag

SEQ ID NO: 1201880 - DNA, 15 bp, Homo sapiens
tgcaatagctattaa

SEQ ID NO: 1201881 - DNA, 15 bp, Homo sapiens
ttgcaatagctatta

SEQ ID NO: 1201882 - DNA, 15 bp, Homo sapiens
gttgcaatagctatt

SEQ ID NO: 1201883 - DNA, 15 bp, Homo sapiens
agttgcaatagctat

SEQ ID NO: 1201884 - DNA, 15 bp, Homo sapiens
tagttgcaatagcta

SEQ ID NO: 1201885 - DNA, 15 bp, Homo sapiens
ttagttgcaatagct

SEQ ID NO: 1201886 - DNA, 15 bp, Homo sapiens
tttagttgcaatagc

SEQ ID NO: 1201887 - DNA, 15 bp, Homo sapiens
ttttagttgcaatag

SEQ ID NO: 1201888 - DNA, 15 bp, Homo sapiens
attttagttgcaata

SEQ ID NO: 1201889 - DNA, 15 bp, Homo sapiens
tattttagttgcaat

SEQ ID NO: 1201890 - DNA, 15 bp, Homo sapiens
atattttagttgcaa

SEQ ID NO: 1201891 - DNA, 15 bp, Homo sapiens
aatattttagttgca

SEQ ID NO: 1201892 - DNA, 15 bp, Homo sapiens
gaatattttagttgc

SEQ ID NO: 1201893 - DNA, 15 bp, Homo sapiens
tgaatattttagttg

SEQ ID NO: 1201894 - DNA, 15 bp, Homo sapiens
gtgaatattttagtt

SEQ ID NO: 1201895 - DNA, 15 bp, Homo sapiens
tgtgaatattttagt

SEQ ID NO: 1201896 - DNA, 15 bp, Homo sapiens
atgtgaatattttag

SEQ ID NO: 1201897 - DNA, 15 bp, Homo sapiens
catgtgaatatttta

SEQ ID NO: 1201898 - DNA, 15 bp, Homo sapiens
gcatgtgaatatttt

SEQ ID NO: 1201899 - DNA, 15 bp, Homo sapiens
tgcatgtgaatattt

SEQ ID NO: 1201900 - DNA, 15 bp, Homo sapiens
gtgcatgtgaatatt

SEQ ID NO: 1201901 - DNA, 15 bp, Homo sapiens
ggtgcatgtgaatat

SEQ ID NO: 1201902 - DNA, 15 bp, Homo sapiens
tggtgcatgtgaata

SEQ ID NO: 1201903 - DNA, 15 bp, Homo sapiens
gtggtgcatgtgaat

SEQ ID NO: 1201904 - DNA, 15 bp, Homo sapiens
tgtggtgcatgtgaa

SEQ ID NO: 1201905 - DNA, 15 bp, Homo sapiens
gtgtggtgcatgtga

SEQ ID NO: 1201906 - DNA, 15 bp, Homo sapiens
ggtgtggtgcatgtg

SEQ ID NO: 1201907 - DNA, 15 bp, Homo sapiens
aggtgtggtgcatgt

SEQ ID NO: 1201908 - DNA, 15 bp, Homo sapiens
aaggtgtggtgcatg

SEQ ID NO: 1201909 - DNA, 15 bp, Homo sapiens
aaaggtgtggtgcat

SEQ ID NO: 1201910 - DNA, 15 bp, Homo sapiens
caaaggtgtggtgca

SEQ ID NO: 1201911 - DNA, 15 bp, Homo sapiens
gcaaaggtgtggtgc

SEQ ID NO: 1201912 - DNA, 15 bp, Homo sapiens
tgcaaaggtgtggtg

SEQ ID NO: 1201913 - DNA, 15 bp, Homo sapiens
atgcaaaggtgtggt

SEQ ID NO: 1201914 - DNA, 15 bp, Homo sapiens
tatgcaaaggtgtgg

SEQ ID NO: 1201915 - DNA, 15 bp, Homo sapiens
ttatgcaaaggtgtg

SEQ ID NO: 1201916 - DNA, 15 bp, Homo sapiens
cttatgcaaaggtgt

SEQ ID NO: 1201917 - DNA, 15 bp, Homo sapiens
acttatgcaaaggtg

SEQ ID NO: 1201918 - DNA, 15 bp, Homo sapiens
gacttatgcaaaggt

SEQ ID NO: 1201919 - DNA, 15 bp, Homo sapiens
tgacttatgcaaagg

SEQ ID NO: 1201920 - DNA, 15 bp, Homo sapiens
atgacttatgcaaag

SEQ ID NO: 1201921 - DNA, 15 bp, Homo sapiens
aatgacttatgcaaa

SEQ ID NO: 1201922 - DNA, 15 bp, Homo sapiens
gaatgacttatgcaa

SEQ ID NO: 1201923 - DNA, 15 bp, Homo sapiens
tgaatgacttatgca

SEQ ID NO: 1201924 - DNA, 15 bp, Homo sapiens
gtgaatgacttatgc

SEQ ID NO: 1201925 - DNA, 15 bp, Homo sapiens
ggtgaatgacttatg

SEQ ID NO: 1201926 - DNA, 15 bp, Homo sapiens
gggtgaatgacttat

SEQ ID NO: 1201927 - DNA, 15 bp, Homo sapiens
agggtgaatgactta

SEQ ID NO: 1201928 - DNA, 15 bp, Homo sapiens
tagggtgaatgactt

SEQ ID NO: 1201929 - DNA, 15 bp, Homo sapiens
gtagggtgaatgact

SEQ ID NO: 1201930 - DNA, 15 bp, Homo sapiens
agtagggtgaatgac

SEQ ID NO: 1201931 - DNA, 15 bp, Homo sapiens
aagtagggtgaatga

SEQ ID NO: 1201932 - DNA, 15 bp, Homo sapiens
caagtagggtgaatg

SEQ ID NO: 1201933 - DNA, 15 bp, Homo sapiens
ccaagtagggtgaat

SEQ ID NO: 1201934 - DNA, 15 bp, Homo sapiens
tccaagtagggtgaa

SEQ ID NO: 1201935 - DNA, 15 bp, Homo sapiens
ttccaagtagggtga

SEQ ID NO: 1201936 - DNA, 15 bp, Homo sapiens
tttccaagtagggtg

SEQ ID NO: 1201937 - DNA, 15 bp, Homo sapiens
ctttccaagtagggt

SEQ ID NO: 1201938 - DNA, 15 bp, Homo sapiens
gctttccaagtaggg

SEQ ID NO: 1201939 - DNA, 15 bp, Homo sapiens
agctttccaagtagg

SEQ ID NO: 1201940 - DNA, 15 bp, Homo sapiens
aagctttccaagtag

SEQ ID NO: 1201941 - DNA, 15 bp, Homo sapiens
gaagctttccaagta

SEQ ID NO: 1201942 - DNA, 15 bp, Homo sapiens
ggaagctttccaagt

SEQ ID NO: 1201943 - DNA, 15 bp, Homo sapiens
gggaagctttccaag

SEQ ID NO: 1201944 - DNA, 15 bp, Homo sapiens
ggggaagctttccaa

SEQ ID NO: 1201945 - DNA, 15 bp, Homo sapiens
aggggaagctttcca

SEQ ID NO: 1201946 - DNA, 15 bp, Homo sapiens
aaggggaagctttcc

SEQ ID NO: 1201947 - DNA, 15 bp, Homo sapiens
caaggggaagctttc

SEQ ID NO: 1201948 - DNA, 15 bp, Homo sapiens
gcaaggggaagcttt

SEQ ID NO: 1201949 - DNA, 15 bp, Homo sapiens
agcaaggggaagctt

SEQ ID NO: 1201950 - DNA, 15 bp, Homo sapiens
aagcaaggggaagct

SEQ ID NO: 1201951 - DNA, 15 bp, Homo sapiens
gaagcaaggggaagc

SEQ ID NO: 1201952 - DNA, 15 bp, Homo sapiens
ggaagcaaggggaag

SEQ ID NO: 1201953 - DNA, 15 bp, Homo sapiens
gggaagcaaggggaa

SEQ ID NO: 1201954 - DNA, 15 bp, Homo sapiens
tgggaagcaagggga

SEQ ID NO: 1201955 - DNA, 15 bp, Homo sapiens
atgggaagcaagggg

SEQ ID NO: 1201956 - DNA, 15 bp, Homo sapiens
tatgggaagcaaggg

SEQ ID NO: 1201957 - DNA, 15 bp, Homo sapiens
gtatgggaagcaagg

SEQ ID NO: 1201958 - DNA, 15 bp, Homo sapiens
tgtatgggaagcaag

SEQ ID NO: 1201959 - DNA, 15 bp, Homo sapiens
atgtatgggaagcaa

SEQ ID NO: 1201960 - DNA, 15 bp, Homo sapiens
aatgtatgggaagca

SEQ ID NO: 1201961 - DNA, 15 bp, Homo sapiens
gaatgtatgggaagc

SEQ ID NO: 1201962 - DNA, 15 bp, Homo sapiens
tgaatgtatgggaag

SEQ ID NO: 1201963 - DNA, 15 bp, Homo sapiens
ttgaatgtatgggaa

SEQ ID NO: 1201964 - DNA, 15 bp, Homo sapiens
tttgaatgtatggga

SEQ ID NO: 1201965 - DNA, 15 bp, Homo sapiens
ctttgaatgtatggg

SEQ ID NO: 1201966 - DNA, 15 bp, Homo sapiens
cctttgaatgtatgg

SEQ ID NO: 1201967 - DNA, 15 bp, Homo sapiens
gcctttgaatgtatg

SEQ ID NO: 1201968 - DNA, 15 bp, Homo sapiens
agcctttgaatgtat

SEQ ID NO: 1201969 - DNA, 15 bp, Homo sapiens
tagcctttgaatgta

SEQ ID NO: 1201970 - DNA, 15 bp, Homo sapiens
ctagcctttgaatgt

SEQ ID NO: 1201971 - DNA, 15 bp, Homo sapiens
gctagcctttgaatg

SEQ ID NO: 1201972 - DNA, 15 bp, Homo sapiens
ggctagcctttgaat

SEQ ID NO: 1201973 - DNA, 15 bp, Homo sapiens
tggctagcctttgaa

SEQ ID NO: 1201974 - DNA, 15 bp, Homo sapiens
atggctagcctttga

SEQ ID NO: 1201975 - DNA, 15 bp, Homo sapiens
gatggctagcctttg

SEQ ID NO: 1201976 - DNA, 15 bp, Homo sapiens
tgatggctagccttt

SEQ ID NO: 1201977 - DNA, 15 bp, Homo sapiens
atgatggctagcctt

SEQ ID NO: 1201978 - DNA, 15 bp, Homo sapiens
aatgatggctagcct

SEQ ID NO: 1201979 - DNA, 15 bp, Homo sapiens
aaatgatggctagcc

SEQ ID NO: 1201980 - DNA, 15 bp, Homo sapiens
taaatgatggctagc

SEQ ID NO: 1201981 - DNA, 15 bp, Homo sapiens
ttaaatgatggctag

SEQ ID NO: 1201982 - DNA, 15 bp, Homo sapiens
cttaaatgatggcta

SEQ ID NO: 1201983 - DNA, 15 bp, Homo sapiens
ccttaaatgatggct

SEQ ID NO: 1201984 - DNA, 15 bp, Homo sapiens
gccttaaatgatggc

SEQ ID NO: 1201985 - DNA, 15 bp, Homo sapiens
tgccttaaatgatgg

SEQ ID NO: 1201986 - DNA, 15 bp, Homo sapiens
atgccttaaatgatg

SEQ ID NO: 1201987 - DNA, 15 bp, Homo sapiens
tatgccttaaatgat

SEQ ID NO: 1201988 - DNA, 15 bp, Homo sapiens
ctatgccttaaatga

SEQ ID NO: 1201989 - DNA, 15 bp, Homo sapiens
tctatgccttaaatg

SEQ ID NO: 1201990 - DNA, 15 bp, Homo sapiens
gtctatgccttaaat

SEQ ID NO: 1201991 - DNA, 15 bp, Homo sapiens
ggtctatgccttaaa

SEQ ID NO: 1201992 - DNA, 15 bp, Homo sapiens
tggtctatgccttaa

SEQ ID NO: 1201993 - DNA, 15 bp, Homo sapiens
atggtctatgcctta

SEQ ID NO: 1201994 - DNA, 15 bp, Homo sapiens
aacatggtctatgcc

SEQ ID NO: 1201995 - DNA, 15 bp, Homo sapiens
aaacatggtctatgc

SEQ ID NO: 1201996 - DNA, 15 bp, Homo sapiens
gaaacatggtctatg

SEQ ID NO: 1201997 - DNA, 15 bp, Homo sapiens
tgaaacatggtctat

SEQ ID NO: 1201998 - DNA, 15 bp, Homo sapiens
ttgaaacatggtcta

SEQ ID NO: 1201999 - DNA, 15 bp, Homo sapiens
attgaaacatggtct

SEQ ID NO: 1202000 - DNA, 15 bp, Homo sapiens
aattgaaacatggtc

SEQ ID NO: 1202001 - DNA, 15 bp, Homo sapiens
gaattgaaacatggt

SEQ ID NO: 1202002 - DNA, 15 bp, Homo sapiens
agaattgaaacatgg

SEQ ID NO: 1202003 - DNA, 15 bp, Homo sapiens
cagaattgaaacatg

SEQ ID NO: 1202004 - DNA, 15 bp, Homo sapiens
acagaattgaaacat

SEQ ID NO: 1202005 - DNA, 15 bp, Homo sapiens
tacagaattgaaaca

SEQ ID NO: 1202006 - DNA, 15 bp, Homo sapiens
atacagaattgaaac

SEQ ID NO: 1202007 - DNA, 15 bp, Homo sapiens
aatacagaattgaaa

SEQ ID NO: 1202008 - DNA, 15 bp, Homo sapiens
aaatacagaattgaa

SEQ ID NO: 1202009 - DNA, 15 bp, Homo sapiens
gaaatacagaattga

SEQ ID NO: 1202010 - DNA, 15 bp, Homo sapiens
agaaatacagaattg

SEQ ID NO: 1202011 - DNA, 15 bp, Homo sapiens
tagaaatacagaatt

SEQ ID NO: 1202012 - DNA, 15 bp, Homo sapiens
ctagaaatacagaat

SEQ ID NO: 1202013 - DNA, 15 bp, Homo sapiens
cctagaaatacagaa

SEQ ID NO: 1202014 - DNA, 15 bp, Homo sapiens
gcctagaaatacaga

SEQ ID NO: 1202015 - DNA, 15 bp, Homo sapiens
agcctagaaatacag

SEQ ID NO: 1202016 - DNA, 15 bp, Homo sapiens
gagcctagaaataca

SEQ ID NO: 1202017 - DNA, 15 bp, Homo sapiens
ggagcctagaaatac

SEQ ID NO: 1202018 - DNA, 15 bp, Homo sapiens
aggagcctagaaata

SEQ ID NO: 1202019 - DNA, 15 bp, Homo sapiens
gaggagcctagaaat

SEQ ID NO: 1202020 - DNA, 15 bp, Homo sapiens
ggaggagcctagaaa

SEQ ID NO: 1202021 - DNA, 15 bp, Homo sapiens
tggaggagcctagaa

SEQ ID NO: 1202022 - DNA, 15 bp, Homo sapiens
ttggaggagcctaga

SEQ ID NO: 1202023 - DNA, 15 bp, Homo sapiens
tttggaggagcctag

SEQ ID NO: 1202024 - DNA, 15 bp, Homo sapiens
ttttggaggagccta

SEQ ID NO: 1202025 - DNA, 15 bp, Homo sapiens
attttggaggagcct

SEQ ID NO: 1202026 - DNA, 15 bp, Homo sapiens
gattttggaggagcc

SEQ ID NO: 1202027 - DNA, 15 bp, Homo sapiens
tgattttggaggagc

SEQ ID NO: 1202028 - DNA, 15 bp, Homo sapiens
ttgattttggaggag

SEQ ID NO: 1202029 - DNA, 15 bp, Homo sapiens
attgattttggagga

SEQ ID NO: 1202030 - DNA, 15 bp, Homo sapiens
cattgattttggagg

SEQ ID NO: 1202031 - DNA, 15 bp, Homo sapiens
tcattgattttggag

SEQ ID NO: 1202032 - DNA, 15 bp, Homo sapiens
gtcattgattttgga

SEQ ID NO: 1202033 - DNA, 15 bp, Homo sapiens
agtcattgattttgg

SEQ ID NO: 1202034 - DNA, 15 bp, Homo sapiens
gagtcattgattttg

SEQ ID NO: 1202035 - DNA, 15 bp, Homo sapiens
agagtcattgatttt

SEQ ID NO: 1202036 - DNA, 15 bp, Homo sapiens
aagagtcattgattt

SEQ ID NO: 1202037 - DNA, 15 bp, Homo sapiens
aaagagtcattgatt

SEQ ID NO: 1202038 - DNA, 15 bp, Homo sapiens
gaaagagtcattgat

SEQ ID NO: 1202039 - DNA, 15 bp, Homo sapiens
agaaagagtcattga

SEQ ID NO: 1202040 - DNA, 15 bp, Homo sapiens
gagaaagagtcattg

SEQ ID NO: 1202041 - DNA, 15 bp, Homo sapiens
agagaaagagtcatt

SEQ ID NO: 1202042 - DNA, 15 bp, Homo sapiens
gagagaaagagtcat

SEQ ID NO: 1202043 - DNA, 15 bp, Homo sapiens
agagagaaagagtca

SEQ ID NO: 1202044 - DNA, 15 bp, Homo sapiens
cagagagaaagagtc

SEQ ID NO: 1202045 - DNA, 15 bp, Homo sapiens
acagagagaaagagt

SEQ ID NO: 1202046 - DNA, 15 bp, Homo sapiens
aacagagagaaagag

SEQ ID NO: 1202047 - DNA, 15 bp, Homo sapiens
caacagagagaaaga

SEQ ID NO: 1202048 - DNA, 15 bp, Homo sapiens
tcaacagagagaaag

SEQ ID NO: 1202049 - DNA, 15 bp, Homo sapiens
ttcaacagagagaaa

SEQ ID NO: 1202050 - DNA, 15 bp, Homo sapiens
gttcaacagagagaa

SEQ ID NO: 1202051 - DNA, 15 bp, Homo sapiens
agttcaacagagaga

SEQ ID NO: 1202052 - DNA, 15 bp, Homo sapiens
gagttcaacagagag

SEQ ID NO: 1202053 - DNA, 15 bp, Homo sapiens
ggagttcaacagaga

SEQ ID NO: 1202054 - DNA, 15 bp, Homo sapiens
aggagttcaacagag

SEQ ID NO: 1202055 - DNA, 15 bp, Homo sapiens
caggagttcaacaga

SEQ ID NO: 1202056 - DNA, 15 bp, Homo sapiens
ccaggagttcaacag

SEQ ID NO: 1202057 - DNA, 15 bp, Homo sapiens
tccaggagttcaaca

SEQ ID NO: 1202058 - DNA, 15 bp, Homo sapiens
gtccaggagttcaac

SEQ ID NO: 1202059 - DNA, 15 bp, Homo sapiens
ggtccaggagttcaa

SEQ ID NO: 1202060 - DNA, 15 bp, Homo sapiens
gggtccaggagttca

SEQ ID NO: 1202061 - DNA, 15 bp, Homo sapiens
tgggtccaggagttc

SEQ ID NO: 1202062 - DNA, 15 bp, Homo sapiens
ttgggtccaggagtt

SEQ ID NO: 1202063 - DNA, 15 bp, Homo sapiens
gttgggtccaggagt

SEQ ID NO: 1202064 - DNA, 15 bp, Homo sapiens
ggttgggtccaggag

SEQ ID NO: 1202065 - DNA, 15 bp, Homo sapiens
aggttgggtccagga

SEQ ID NO: 1202066 - DNA, 15 bp, Homo sapiens
aaggttgggtccagg

SEQ ID NO: 1202067 - DNA, 15 bp, Homo sapiens
taaggttgggtccag

SEQ ID NO: 1202068 - DNA, 15 bp, Homo sapiens
ctaaggttgggtcca

SEQ ID NO: 1202069 - DNA, 15 bp, Homo sapiens
gctaaggttgggtcc

SEQ ID NO: 1202070 - DNA, 15 bp, Homo sapiens
tgctaaggttgggtc

SEQ ID NO: 1202071 - DNA, 15 bp, Homo sapiens
ttgctaaggttgggt

SEQ ID NO: 1202072 - DNA, 15 bp, Homo sapiens
attgctaaggttggg

SEQ ID NO: 1202073 - DNA, 15 bp, Homo sapiens
tattgctaaggttgg

SEQ ID NO: 1202074 - DNA, 15 bp, Homo sapiens
atattgctaaggttg

SEQ ID NO: 1202075 - DNA, 15 bp, Homo sapiens
gatattgctaaggtt

SEQ ID NO: 1202076 - DNA, 15 bp, Homo sapiens
tgatattgctaaggt

SEQ ID NO: 1202077 - DNA, 15 bp, Homo sapiens
atgatattgctaagg

SEQ ID NO: 1202078 - DNA, 15 bp, Homo sapiens
aatgatattgctaag

SEQ ID NO: 1202079 - DNA, 15 bp, Homo sapiens
gaatgatattgctaa

SEQ ID NO: 1202080 - DNA, 15 bp, Homo sapiens
tgaatgatattgcta

SEQ ID NO: 1202081 - DNA, 15 bp, Homo sapiens
atgaatgatattgct

SEQ ID NO: 1202082 - DNA, 15 bp, Homo sapiens
gatgaatgatattgc

SEQ ID NO: 1202083 - DNA, 15 bp, Homo sapiens
tgatgaatgatattg

SEQ ID NO: 1202084 - DNA, 15 bp, Homo sapiens
ctgatgaatgatatt

SEQ ID NO: 1202085 - DNA, 15 bp, Homo sapiens
cctgatgaatgatat

SEQ ID NO: 1202086 - DNA, 15 bp, Homo sapiens
tcctgatgaatgata

SEQ ID NO: 1202087 - DNA, 15 bp, Homo sapiens
ttcctgatgaatgat

SEQ ID NO: 1202088 - DNA, 15 bp, Homo sapiens
attcctgatgaatga

SEQ ID NO: 1202089 - DNA, 15 bp, Homo sapiens
gattcctgatgaatg

SEQ ID NO: 1202090 - DNA, 15 bp, Homo sapiens
agattcctgatgaat

SEQ ID NO: 1202091 - DNA, 15 bp, Homo sapiens
tagattcctgatgaa

SEQ ID NO: 1202092 - DNA, 15 bp, Homo sapiens
ttagattcctgatga

SEQ ID NO: 1202093 - DNA, 15 bp, Homo sapiens
attagattcctgatg

SEQ ID NO: 1202094 - DNA, 15 bp, Homo sapiens
aattagattcctgat

SEQ ID NO: 1202095 - DNA, 15 bp, Homo sapiens
gaattagattcctga

SEQ ID NO: 1202096 - DNA, 15 bp, Homo sapiens
agaattagattcctg

SEQ ID NO: 1202097 - DNA, 15 bp, Homo sapiens
gagaattagattcct

SEQ ID NO: 1202098 - DNA, 15 bp, Homo sapiens
agagaattagattcc

SEQ ID NO: 1202099 - DNA, 15 bp, Homo sapiens
tagagaattagattc

SEQ ID NO: 1202100 - DNA, 15 bp, Homo sapiens
atagagaattagatt

SEQ ID NO: 1202101 - DNA, 15 bp, Homo sapiens
catagagaattagat

SEQ ID NO: 1202102 - DNA, 15 bp, Homo sapiens
tcatagagaattaga

SEQ ID NO: 1202103 - DNA, 15 bp, Homo sapiens
ttcatagagaattag

SEQ ID NO: 1202104 - DNA, 15 bp, Homo sapiens
attcatagagaatta

SEQ ID NO: 1202105 - DNA, 15 bp, Homo sapiens
gattcatagagaatt

SEQ ID NO: 1202106 - DNA, 15 bp, Homo sapiens
agattcatagagaat

SEQ ID NO: 1202107 - DNA, 15 bp, Homo sapiens
tagattcatagagaa

SEQ ID NO: 1202108 - DNA, 15 bp, Homo sapiens
atagattcatagaga

SEQ ID NO: 1202109 - DNA, 15 bp, Homo sapiens
gatagattcatagag

SEQ ID NO: 1202110 - DNA, 15 bp, Homo sapiens
tgatagattcataga

SEQ ID NO: 1202111 - DNA, 15 bp, Homo sapiens
atgatagattcatag

SEQ ID NO: 1202112 - DNA, 15 bp, Homo sapiens
aatgatagattcata

SEQ ID NO: 1202113 - DNA, 15 bp, Homo sapiens
taatgatagattcat

SEQ ID NO: 1202114 - DNA, 15 bp, Homo sapiens
ctaatgatagattca

SEQ ID NO: 1202115 - DNA, 15 bp, Homo sapiens
actaatgatagattc

SEQ ID NO: 1202116 - DNA, 15 bp, Homo sapiens
tactaatgatagatt

SEQ ID NO: 1202117 - DNA, 15 bp, Homo sapiens
atactaatgatagat

SEQ ID NO: 1202118 - DNA, 15 bp, Homo sapiens
tatactaatgataga

SEQ ID NO: 1202119 - DNA, 15 bp, Homo sapiens
atatactaatgatag

SEQ ID NO: 1202120 - DNA, 15 bp, Homo sapiens
aatatactaatgata

SEQ ID NO: 1202121 - DNA, 15 bp, Homo sapiens
aaatatactaatgat

SEQ ID NO: 1202122 - DNA, 15 bp, Homo sapiens
aaaatatactaatga

SEQ ID NO: 1202123 - DNA, 15 bp, Homo sapiens
aaaaatatactaatg

SEQ ID NO: 1202124 - DNA, 15 bp, Homo sapiens
gaaaaatatactaat

SEQ ID NO: 1202125 - DNA, 15 bp, Homo sapiens
ggaaaaatatactaa

SEQ ID NO: 1202126 - DNA, 15 bp, Homo sapiens
aggaaaaatatacta

SEQ ID NO: 1202127 - DNA, 15 bp, Homo sapiens
gaggaaaaatatact

SEQ ID NO: 1202128 - DNA, 15 bp, Homo sapiens
agaggaaaaatatac

SEQ ID NO: 1202129 - DNA, 15 bp, Homo sapiens
tagaggaaaaatata

SEQ ID NO: 1202130 - DNA, 15 bp, Homo sapiens
atagaggaaaaatat

SEQ ID NO: 1202131 - DNA, 15 bp, Homo sapiens
catagaggaaaaata

SEQ ID NO: 1202132 - DNA, 15 bp, Homo sapiens
acatagaggaaaaat

SEQ ID NO: 1202133 - DNA, 15 bp, Homo sapiens
tacatagaggaaaaa

SEQ ID NO: 1202134 - DNA, 15 bp, Homo sapiens
ttacatagaggaaaa

SEQ ID NO: 1202135 - DNA, 15 bp, Homo sapiens
attacatagaggaaa

SEQ ID NO: 1202136 - DNA, 15 bp, Homo sapiens
cattacatagaggaa

SEQ ID NO: 1202137 - DNA, 15 bp, Homo sapiens
ccattacatagagga

SEQ ID NO: 1202138 - DNA, 15 bp, Homo sapiens
accattacatagagg

SEQ ID NO: 1202139 - DNA, 15 bp, Homo sapiens
aaccattacatagag

SEQ ID NO: 1202140 - DNA, 15 bp, Homo sapiens
aaaccattacataga

SEQ ID NO: 1202141 - DNA, 15 bp, Homo sapiens
aaaaccattacatag

SEQ ID NO: 1202142 - DNA, 15 bp, Homo sapiens
aaaaaccattacata

SEQ ID NO: 1202143 - DNA, 15 bp, Homo sapiens
aaaaaaccattacat

SEQ ID NO: 1202144 - DNA, 15 bp, Homo sapiens
taaaaaaccattaca

SEQ ID NO: 1202145 - DNA, 15 bp, Homo sapiens
gtaaaaaaccattac

SEQ ID NO: 1202146 - DNA, 15 bp, Homo sapiens
ggtaaaaaaccatta

SEQ ID NO: 1202147 - DNA, 15 bp, Homo sapiens
gggtaaaaaaccatt

SEQ ID NO: 1202148 - DNA, 15 bp, Homo sapiens
tgggtaaaaaaccat

SEQ ID NO: 1202149 - DNA, 15 bp, Homo sapiens
atgggtaaaaaacca

SEQ ID NO: 1202150 - DNA, 15 bp, Homo sapiens
gatgggtaaaaaacc

SEQ ID NO: 1202151 - DNA, 15 bp, Homo sapiens
tgatgggtaaaaaac

SEQ ID NO: 1202152 - DNA, 15 bp, Homo sapiens
atgatgggtaaaaaa

SEQ ID NO: 1202153 - DNA, 15 bp, Homo sapiens
tatgatgggtaaaaa

SEQ ID NO: 1202154 - DNA, 15 bp, Homo sapiens
atatgatgggtaaaa

SEQ ID NO: 1202155 - DNA, 15 bp, Homo sapiens
aatatgatgggtaaa

SEQ ID NO: 1202156 - DNA, 15 bp, Homo sapiens
caatatgatgggtaa

SEQ ID NO: 1202157 - DNA, 15 bp, Homo sapiens
acaatatgatgggta

SEQ ID NO: 1202158 - DNA, 15 bp, Homo sapiens
tacaatatgatgggt

SEQ ID NO: 1202159 - DNA, 15 bp, Homo sapiens
ttacaatatgatggg

SEQ ID NO: 1202160 - DNA, 15 bp, Homo sapiens
tttacaatatgatgg

SEQ ID NO: 1202161 - DNA, 15 bp, Homo sapiens
atttacaatatgatg

SEQ ID NO: 1202162 - DNA, 15 bp, Homo sapiens
aatttacaatatgat

SEQ ID NO: 1202163 - DNA, 15 bp, Homo sapiens
aaatttacaatatga

SEQ ID NO: 1202164 - DNA, 15 bp, Homo sapiens
aaaatttacaatatg

SEQ ID NO: 1202165 - DNA, 15 bp, Homo sapiens
gaaaatttacaatat

SEQ ID NO: 1202166 - DNA, 15 bp, Homo sapiens
agaaaatttacaata

SEQ ID NO: 1202167 - DNA, 15 bp, Homo sapiens
cagaaaatttacaat

SEQ ID NO: 1202168 - DNA, 15 bp, Homo sapiens
tcagaaaatttacaa

SEQ ID NO: 1202169 - DNA, 15 bp, Homo sapiens
ttcagaaaatttaca

SEQ ID NO: 1202170 - DNA, 15 bp, Homo sapiens
cttcagaaaatttac

SEQ ID NO: 1202171 - DNA, 15 bp, Homo sapiens
ccttcagaaaattta

SEQ ID NO: 1202172 - DNA, 15 bp, Homo sapiens
accttcagaaaattt

SEQ ID NO: 1202173 - DNA, 15 bp, Homo sapiens
taccttcagaaaatt

SEQ ID NO: 1202174 - DNA, 15 bp, Homo sapiens
ctaccttcagaaaat

SEQ ID NO: 1202175 - DNA, 15 bp, Homo sapiens
tctaccttcagaaaa

SEQ ID NO: 1202176 - DNA, 15 bp, Homo sapiens
ctctaccttcagaaa

SEQ ID NO: 1202177 - DNA, 15 bp, Homo sapiens
tctctaccttcagaa

SEQ ID NO: 1202178 - DNA, 15 bp, Homo sapiens
atctctaccttcaga

SEQ ID NO: 1202179 - DNA, 15 bp, Homo sapiens
aatctctaccttcag

SEQ ID NO: 1202180 - DNA, 15 bp, Homo sapiens
taatctctaccttca

SEQ ID NO: 1202181 - DNA, 15 bp, Homo sapiens
ctaatctctaccttc

SEQ ID NO: 1202182 - DNA, 15 bp, Homo sapiens
tctaatctctacctt

SEQ ID NO: 1202183 - DNA, 15 bp, Homo sapiens
gtctaatctctacct

SEQ ID NO: 1202184 - DNA, 15 bp, Homo sapiens
agtctaatctctacc

SEQ ID NO: 1202185 - DNA, 15 bp, Homo sapiens
aagtctaatctctac

SEQ ID NO: 1202186 - DNA, 15 bp, Homo sapiens
aaagtctaatctcta

SEQ ID NO: 1202187 - DNA, 15 bp, Homo sapiens
aaaagtctaatctct

SEQ ID NO: 1202188 - DNA, 15 bp, Homo sapiens
taaaagtctaatctc

SEQ ID NO: 1202189 - DNA, 15 bp, Homo sapiens
ataaaagtctaatct

SEQ ID NO: 1202190 - DNA, 15 bp, Homo sapiens
gataaaagtctaatc

SEQ ID NO: 1202191 - DNA, 15 bp, Homo sapiens
agataaaagtctaat

SEQ ID NO: 1202192 - DNA, 15 bp, Homo sapiens
gagataaaagtctaa

SEQ ID NO: 1202193 - DNA, 15 bp, Homo sapiens
tgagataaaagtcta

SEQ ID NO: 1202194 - DNA, 15 bp, Homo sapiens
gtgagataaaagtct

SEQ ID NO: 1202195 - DNA, 15 bp, Homo sapiens
tgtgagataaaagtc

SEQ ID NO: 1202196 - DNA, 15 bp, Homo sapiens
ctgtgagataaaagt

SEQ ID NO: 1202197 - DNA, 15 bp, Homo sapiens
cctgtgagataaaag

SEQ ID NO: 1202198 - DNA, 15 bp, Homo sapiens
gcctgtgagataaaa

SEQ ID NO: 1202199 - DNA, 15 bp, Homo sapiens
tgcctgtgagataaa

SEQ ID NO: 1202200 - DNA, 15 bp, Homo sapiens
atgcctgtgagataa

SEQ ID NO: 1202201 - DNA, 15 bp, Homo sapiens
aatgcctgtgagata

SEQ ID NO: 1202202 - DNA, 15 bp, Homo sapiens
aaatgcctgtgagat

SEQ ID NO: 1202203 - DNA, 15 bp, Homo sapiens
taaatgcctgtgaga

SEQ ID NO: 1202204 - DNA, 15 bp, Homo sapiens
gtaaatgcctgtgag

SEQ ID NO: 1202205 - DNA, 15 bp, Homo sapiens
agtaaatgcctgtga

SEQ ID NO: 1202206 - DNA, 15 bp, Homo sapiens
cagtaaatgcctgtg

SEQ ID NO: 1202207 - DNA, 15 bp, Homo sapiens
tcagtaaatgcctgt

SEQ ID NO: 1202208 - DNA, 15 bp, Homo sapiens
ctcagtaaatgcctg

SEQ ID NO: 1202209 - DNA, 15 bp, Homo sapiens
gctcagtaaatgcct

SEQ ID NO: 1202210 - DNA, 15 bp, Homo sapiens
tgctcagtaaatgcc

SEQ ID NO: 1202211 - DNA, 15 bp, Homo sapiens
gtgctcagtaaatgc

SEQ ID NO: 1202212 - DNA, 15 bp, Homo sapiens
tagtgctcagtaaat

SEQ ID NO: 1202213 - DNA, 15 bp, Homo sapiens
ttagtgctcagtaaa

SEQ ID NO: 1202214 - DNA, 15 bp, Homo sapiens
attagtgctcagtaa

SEQ ID NO: 1202215 - DNA, 15 bp, Homo sapiens
cattagtgctcagta

SEQ ID NO: 1202216 - DNA, 15 bp, Homo sapiens
acattagtgctcagt

SEQ ID NO: 1202217 - DNA, 15 bp, Homo sapiens
cacattagtgctcag

SEQ ID NO: 1202218 - DNA, 15 bp, Homo sapiens
acacattagtgctca

SEQ ID NO: 1202219 - DNA, 15 bp, Homo sapiens
cacacattagtgctc

SEQ ID NO: 1202220 - DNA, 15 bp, Homo sapiens
tcacacattagtgct

SEQ ID NO: 1202221 - DNA, 15 bp, Homo sapiens
ctcacacattagtgc

SEQ ID NO: 1202222 - DNA, 15 bp, Homo sapiens
tctcacacattagtg

SEQ ID NO: 1202223 - DNA, 15 bp, Homo sapiens
ctctcacacattagt

SEQ ID NO: 1202224 - DNA, 15 bp, Homo sapiens
tctctcacacattag

SEQ ID NO: 1202225 - DNA, 15 bp, Homo sapiens
atctctcacacatta

SEQ ID NO: 1202226 - DNA, 15 bp, Homo sapiens
catctctcacacatt

SEQ ID NO: 1202227 - DNA, 15 bp, Homo sapiens
acatctctcacacat

SEQ ID NO: 1202228 - DNA, 15 bp, Homo sapiens
aacatctctcacaca

SEQ ID NO: 1202229 - DNA, 15 bp, Homo sapiens
taacatctctcacac

SEQ ID NO: 1202230 - DNA, 15 bp, Homo sapiens
ataacatctctcaca

SEQ ID NO: 1202231 - DNA, 15 bp, Homo sapiens
aataacatctctcac

SEQ ID NO: 1202232 - DNA, 15 bp, Homo sapiens
gaataacatctctca

SEQ ID NO: 1202233 - DNA, 15 bp, Homo sapiens
agaataacatctctc

SEQ ID NO: 1202234 - DNA, 15 bp, Homo sapiens
cagaataacatctct

SEQ ID NO: 1202235 - DNA, 15 bp, Homo sapiens
ccagaataacatctc

SEQ ID NO: 1202236 - DNA, 15 bp, Homo sapiens
tccagaataacatct

SEQ ID NO: 1202237 - DNA, 15 bp, Homo sapiens
ttccagaataacatc

SEQ ID NO: 1202238 - DNA, 15 bp, Homo sapiens
tttccagaataacat

SEQ ID NO: 1202239 - DNA, 15 bp, Homo sapiens
atttccagaataaca

SEQ ID NO: 1202240 - DNA, 15 bp, Homo sapiens
tatttccagaataac

SEQ ID NO: 1202241 - DNA, 15 bp, Homo sapiens
atatttccagaataa

SEQ ID NO: 1202242 - DNA, 15 bp, Homo sapiens
tatatttccagaata

SEQ ID NO: 1202243 - DNA, 15 bp, Homo sapiens
ttatatttccagaat

SEQ ID NO: 1202244 - DNA, 15 bp, Homo sapiens
attatatttccagaa

SEQ ID NO: 1202245 - DNA, 15 bp, Homo sapiens
aattatatttccaga

SEQ ID NO: 1202246 - DNA, 15 bp, Homo sapiens
caattatatttccag

SEQ ID NO: 1202247 - DNA, 15 bp, Homo sapiens
acaattatatttcca

SEQ ID NO: 1202248 - DNA, 15 bp, Homo sapiens
cacaattatatttcc

SEQ ID NO: 1202249 - DNA, 15 bp, Homo sapiens
tcacaattatatttc

SEQ ID NO: 1202250 - DNA, 15 bp, Homo sapiens
ctcacaattatattt

SEQ ID NO: 1202251 - DNA, 15 bp, Homo sapiens
gctcacaattatatt

SEQ ID NO: 1202252 - DNA, 15 bp, Homo sapiens
tgctcacaattatat

SEQ ID NO: 1202253 - DNA, 15 bp, Homo sapiens
ttgctcacaattata

SEQ ID NO: 1202254 - DNA, 15 bp, Homo sapiens
tttgctcacaattat

SEQ ID NO: 1202255 - DNA, 15 bp, Homo sapiens
ttttgctcacaatta

SEQ ID NO: 1202256 - DNA, 15 bp, Homo sapiens
gttttgctcacaatt

SEQ ID NO: 1202257 - DNA, 15 bp, Homo sapiens
tgttttgctcacaat

SEQ ID NO: 1202258 - DNA, 15 bp, Homo sapiens
ctgttttgctcacaa

SEQ ID NO: 1202259 - DNA, 15 bp, Homo sapiens
tctgttttgctcaca

SEQ ID NO: 1202260 - DNA, 15 bp, Homo sapiens
atctgttttgctcac

SEQ ID NO: 1202261 - DNA, 15 bp, Homo sapiens
aatctgttttgctca

SEQ ID NO: 1202262 - DNA, 15 bp, Homo sapiens
aaatctgttttgctc

SEQ ID NO: 1202263 - DNA, 15 bp, Homo sapiens
taaatctgttttgct

SEQ ID NO: 1202264 - DNA, 15 bp, Homo sapiens
gtaaatctgttttgc

SEQ ID NO: 1202265 - DNA, 15 bp, Homo sapiens
tgtaaatctgttttg

SEQ ID NO: 1202266 - DNA, 15 bp, Homo sapiens
atgtaaatctgtttt

SEQ ID NO: 1202267 - DNA, 15 bp, Homo sapiens
aatgtaaatctgttt

SEQ ID NO: 1202268 - DNA, 15 bp, Homo sapiens
taatgtaaatctgtt

SEQ ID NO: 1202269 - DNA, 15 bp, Homo sapiens
ataatgtaaatctgt

SEQ ID NO: 1202270 - DNA, 15 bp, Homo sapiens
cataatgtaaatctg

SEQ ID NO: 1202271 - DNA, 15 bp, Homo sapiens
ccataatgtaaatct

SEQ ID NO: 1202272 - DNA, 15 bp, Homo sapiens
accataatgtaaatc

SEQ ID NO: 1202273 - DNA, 15 bp, Homo sapiens
taccataatgtaaat

SEQ ID NO: 1202274 - DNA, 15 bp, Homo sapiens
ttaccataatgtaaa

SEQ ID NO: 1202275 - DNA, 15 bp, Homo sapiens
attaccataatgtaa

SEQ ID NO: 1202276 - DNA, 15 bp, Homo sapiens
cattaccataatgta

SEQ ID NO: 1202277 - DNA, 15 bp, Homo sapiens
tcattaccataatgt

SEQ ID NO: 1202278 - DNA, 15 bp, Homo sapiens
ctcattaccataatg

SEQ ID NO: 1202279 - DNA, 15 bp, Homo sapiens
cctcattaccataat

SEQ ID NO: 1202280 - DNA, 15 bp, Homo sapiens
tcctcattaccataa

SEQ ID NO: 1202281 - DNA, 15 bp, Homo sapiens
ctcctcattaccata

SEQ ID NO: 1202282 - DNA, 15 bp, Homo sapiens
tctcctcattaccat

SEQ ID NO: 1202283 - DNA, 15 bp, Homo sapiens
atctcctcattacca

SEQ ID NO: 1202284 - DNA, 15 bp, Homo sapiens
catctcctcattacc

SEQ ID NO: 1202285 - DNA, 15 bp, Homo sapiens
ccatctcctcattac

SEQ ID NO: 1202286 - DNA, 15 bp, Homo sapiens
tccatctcctcatta

SEQ ID NO: 1202287 - DNA, 15 bp, Homo sapiens
gtccatctcctcatt

SEQ ID NO: 1202288 - DNA, 15 bp, Homo sapiens
tgtccatctcctcat

SEQ ID NO: 1202289 - DNA, 15 bp, Homo sapiens
ttgtccatctcctca

SEQ ID NO: 1202290 - DNA, 15 bp, Homo sapiens
attgtccatctcctc

SEQ ID NO: 1202291 - DNA, 15 bp, Homo sapiens
tattgtccatctcct

SEQ ID NO: 1202292 - DNA, 15 bp, Homo sapiens
ttattgtccatctcc

SEQ ID NO: 1202293 - DNA, 15 bp, Homo sapiens
tttattgtccatctc

SEQ ID NO: 1202294 - DNA, 15 bp, Homo sapiens
gtttattgtccatct

SEQ ID NO: 1202295 - DNA, 15 bp, Homo sapiens
tgtttattgtccatc

SEQ ID NO: 1202296 - DNA, 15 bp, Homo sapiens
ttgtttattgtccat

SEQ ID NO: 1202297 - DNA, 15 bp, Homo sapiens
tttgtttattgtcca

SEQ ID NO: 1202298 - DNA, 15 bp, Homo sapiens
atttgtttattgtcc

SEQ ID NO: 1202299 - DNA, 15 bp, Homo sapiens
tatttgtttattgtc

SEQ ID NO: 1202300 - DNA, 15 bp, Homo sapiens
gtatttgtttattgt

SEQ ID NO: 1202301 - DNA, 15 bp, Homo sapiens
tgtatttgtttattg

SEQ ID NO: 1202302 - DNA, 15 bp, Homo sapiens
atgtatttgtttatt

SEQ ID NO: 1202303 - DNA, 15 bp, Homo sapiens
catgtatttgtttat

SEQ ID NO: 1202304 - DNA, 15 bp, Homo sapiens
tcatgtatttgttta

SEQ ID NO: 1202305 - DNA, 15 bp, Homo sapiens
ttcatgtatttgttt

SEQ ID NO: 1202306 - DNA, 15 bp, Homo sapiens
gttcatgtatttgtt

SEQ ID NO: 1202307 - DNA, 15 bp, Homo sapiens
tgttcatgtatttgt

SEQ ID NO: 1202308 - DNA, 15 bp, Homo sapiens
ttgttcatgtatttg

SEQ ID NO: 1202309 - DNA, 15 bp, Homo sapiens
cttgttcatgtattt

SEQ ID NO: 1202310 - DNA, 15 bp, Homo sapiens
tcttgttcatgtatt

SEQ ID NO: 1202311 - DNA, 15 bp, Homo sapiens
atcttgttcatgtat

SEQ ID NO: 1202312 - DNA, 15 bp, Homo sapiens
catcttgttcatgta

SEQ ID NO: 1202313 - DNA, 15 bp, Homo sapiens
gcatcttgttcatgt

SEQ ID NO: 1202314 - DNA, 15 bp, Homo sapiens
agcatcttgttcatg

SEQ ID NO: 1202315 - DNA, 15 bp, Homo sapiens
aagcatcttgttcat

SEQ ID NO: 1202316 - DNA, 15 bp, Homo sapiens
caagcatcttgttca

SEQ ID NO: 1202317 - DNA, 15 bp, Homo sapiens
gcaagcatcttgttc

SEQ ID NO: 1202318 - DNA, 15 bp, Homo sapiens
tgcaagcatcttgtt

SEQ ID NO: 1202319 - DNA, 15 bp, Homo sapiens
ttgcaagcatcttgt

SEQ ID NO: 1202320 - DNA, 15 bp, Homo sapiens
tttgcaagcatcttg

SEQ ID NO: 1202321 - DNA, 15 bp, Homo sapiens
atttgcaagcatctt

SEQ ID NO: 1202322 - DNA, 15 bp, Homo sapiens
tatttgcaagcatct

SEQ ID NO: 1202323 - DNA, 15 bp, Homo sapiens
ctatttgcaagcatc

SEQ ID NO: 1202324 - DNA, 15 bp, Homo sapiens
actatttgcaagcat

SEQ ID NO: 1202325 - DNA, 15 bp, Homo sapiens
tactatttgcaagca

SEQ ID NO: 1202326 - DNA, 15 bp, Homo sapiens
ctactatttgcaagc

SEQ ID NO: 1202327 - DNA, 15 bp, Homo sapiens
tctactatttgcaag

SEQ ID NO: 1202328 - DNA, 15 bp, Homo sapiens
ttctactatttgcaa

SEQ ID NO: 1202329 - DNA, 15 bp, Homo sapiens
attctactatttgca

SEQ ID NO: 1202330 - DNA, 15 bp, Homo sapiens
aattctactatttgc

SEQ ID NO: 1202331 - DNA, 15 bp, Homo sapiens
taattctactatttg

SEQ ID NO: 1202332 - DNA, 15 bp, Homo sapiens
ttaattctactattt

SEQ ID NO: 1202333 - DNA, 15 bp, Homo sapiens
tttaattctactatt

SEQ ID NO: 1202334 - DNA, 15 bp, Homo sapiens
ttttaattctactat

SEQ ID NO: 1202335 - DNA, 15 bp, Homo sapiens
tttttaattctacta

SEQ ID NO: 1202336 - DNA, 15 bp, Homo sapiens
ttttttaattctact

SEQ ID NO: 1202337 - DNA, 15 bp, Homo sapiens
gttttttaattctac

SEQ ID NO: 1202338 - DNA, 15 bp, Homo sapiens
ggttttttaattcta

SEQ ID NO: 1202339 - DNA, 15 bp, Homo sapiens
tggttttttaattct

SEQ ID NO: 1202340 - DNA, 15 bp, Homo sapiens
ttggttttttaattc

SEQ ID NO: 1202341 - DNA, 15 bp, Homo sapiens
cttggttttttaatt

SEQ ID NO: 1202342 - DNA, 15 bp, Homo sapiens
tcttggttttttaat

SEQ ID NO: 1202343 - DNA, 15 bp, Homo sapiens
ctcttggttttttaa

SEQ ID NO: 1202344 - DNA, 15 bp, Homo sapiens
cctcttggtttttta

SEQ ID NO: 1202345 - DNA, 15 bp, Homo sapiens
acctcttggtttttt

SEQ ID NO: 1202346 - DNA, 15 bp, Homo sapiens
gacctcttggttttt

SEQ ID NO: 1202347 - DNA, 15 bp, Homo sapiens
ggacctcttggtttt

SEQ ID NO: 1202348 - DNA, 15 bp, Homo sapiens
tggacctcttggttt

SEQ ID NO: 1202349 - DNA, 15 bp, Homo sapiens
atggacctcttggtt

SEQ ID NO: 1202350 - DNA, 15 bp, Homo sapiens
tatggacctcttggt

SEQ ID NO: 1202351 - DNA, 15 bp, Homo sapiens
atatggacctcttgg

SEQ ID NO: 1202352 - DNA, 15 bp, Homo sapiens
catatggacctcttg

SEQ ID NO: 1202353 - DNA, 15 bp, Homo sapiens
acatatggacctctt

SEQ ID NO: 1202354 - DNA, 15 bp, Homo sapiens
aacatatggacctct

SEQ ID NO: 1202355 - DNA, 15 bp, Homo sapiens
taacatatggacctc

SEQ ID NO: 1202356 - DNA, 15 bp, Homo sapiens
ttaacatatggacct

SEQ ID NO: 1202357 - DNA, 15 bp, Homo sapiens
tttaacatatggacc

SEQ ID NO: 1202358 - DNA, 15 bp, Homo sapiens
ttttaacatatggac

SEQ ID NO: 1202359 - DNA, 15 bp, Homo sapiens
tttttaacatatgga

SEQ ID NO: 1202360 - DNA, 15 bp, Homo sapiens
gtttttaacatatgg

SEQ ID NO: 1202361 - DNA, 15 bp, Homo sapiens
tgtttttaacatatg

SEQ ID NO: 1202362 - DNA, 15 bp, Homo sapiens
atgtttttaacatat

SEQ ID NO: 1202363 - DNA, 15 bp, Homo sapiens
catgtttttaacata

SEQ ID NO: 1202364 - DNA, 15 bp, Homo sapiens
gcatgtttttaacat

SEQ ID NO: 1202365 - DNA, 15 bp, Homo sapiens
tgcatgtttttaaca

SEQ ID NO: 1202366 - DNA, 15 bp, Homo sapiens
atgcatgtttttaac

SEQ ID NO: 1202367 - DNA, 15 bp, Homo sapiens
aatgcatgtttttaa

SEQ ID NO: 1202368 - DNA, 15 bp, Homo sapiens
caatgcatgttttta

SEQ ID NO: 1202369 - DNA, 15 bp, Homo sapiens
tcaatgcatgttttt

SEQ ID NO: 1202370 - DNA, 15 bp, Homo sapiens
ttcaatgcatgtttt

SEQ ID NO: 1202371 - DNA, 15 bp, Homo sapiens
attcaatgcatgttt

SEQ ID NO: 1202372 - DNA, 15 bp, Homo sapiens
gattcaatgcatgtt

SEQ ID NO: 1202373 - DNA, 15 bp, Homo sapiens
tgattcaatgcatgt

SEQ ID NO: 1202374 - DNA, 15 bp, Homo sapiens
gtgattcaatgcatg

SEQ ID NO: 1202375 - DNA, 15 bp, Homo sapiens
agtgattcaatgcat

SEQ ID NO: 1202376 - DNA, 15 bp, Homo sapiens
tagtgattcaatgca

SEQ ID NO: 1202377 - DNA, 15 bp, Homo sapiens
atagtgattcaatgc

SEQ ID NO: 1202378 - DNA, 15 bp, Homo sapiens
aatagtgattcaatg

SEQ ID NO: 1202379 - DNA, 15 bp, Homo sapiens
taatagtgattcaat

SEQ ID NO: 1202380 - DNA, 15 bp, Homo sapiens
gtaatagtgattcaa

SEQ ID NO: 1202381 - DNA, 15 bp, Homo sapiens
agtaatagtgattca

SEQ ID NO: 1202382 - DNA, 15 bp, Homo sapiens
tagtaatagtgattc

SEQ ID NO: 1202383 - DNA, 15 bp, Homo sapiens
ttagtaatagtgatt

SEQ ID NO: 1202384 - DNA, 15 bp, Homo sapiens
attagtaatagtgat

SEQ ID NO: 1202385 - DNA, 15 bp, Homo sapiens
aattagtaatagtga

SEQ ID NO: 1202386 - DNA, 15 bp, Homo sapiens
gaattagtaatagtg

SEQ ID NO: 1202387 - DNA, 15 bp, Homo sapiens
tgaattagtaatagt

SEQ ID NO: 1202388 - DNA, 15 bp, Homo sapiens
gtgaattagtaatag

SEQ ID NO: 1202389 - DNA, 15 bp, Homo sapiens
ggtgaattagtaata

SEQ ID NO: 1202390 - DNA, 15 bp, Homo sapiens
aggtgaattagtaat

SEQ ID NO: 1202391 - DNA, 15 bp, Homo sapiens
gaggtgaattagtaa

SEQ ID NO: 1202392 - DNA, 15 bp, Homo sapiens
agaggtgaattagta

SEQ ID NO: 1202393 - DNA, 15 bp, Homo sapiens
aagaggtgaattagt

SEQ ID NO: 1202394 - DNA, 15 bp, Homo sapiens
aaagaggtgaattag

SEQ ID NO: 1202395 - DNA, 15 bp, Homo sapiens
aaaagaggtgaatta

SEQ ID NO: 1202396 - DNA, 15 bp, Homo sapiens
gaaaagaggtgaatt

SEQ ID NO: 1202397 - DNA, 15 bp, Homo sapiens
tgaaaagaggtgaat

SEQ ID NO: 1202398 - DNA, 15 bp, Homo sapiens
ctgaaaagaggtgaa

SEQ ID NO: 1202399 - DNA, 15 bp, Homo sapiens
cctgaaaagaggtga

SEQ ID NO: 1202400 - DNA, 15 bp, Homo sapiens
ccctgaaaagaggtg

SEQ ID NO: 1202401 - DNA, 15 bp, Homo sapiens
cccctgaaaagaggt

SEQ ID NO: 1202402 - DNA, 15 bp, Homo sapiens
gcccctgaaaagagg

SEQ ID NO: 1202403 - DNA, 15 bp, Homo sapiens
agcccctgaaaagag

SEQ ID NO: 1202404 - DNA, 15 bp, Homo sapiens
cagcccctgaaaaga

SEQ ID NO: 1202405 - DNA, 15 bp, Homo sapiens
ccagcccctgaaaag

SEQ ID NO: 1202406 - DNA, 15 bp, Homo sapiens
cccagcccctgaaaa

SEQ ID NO: 1202407 - DNA, 15 bp, Homo sapiens
gcccagcccctgaaa

SEQ ID NO: 1202408 - DNA, 15 bp, Homo sapiens
tgcccagcccctgaa

SEQ ID NO: 1202409 - DNA, 15 bp, Homo sapiens
ctgcccagcccctga

SEQ ID NO: 1202410 - DNA, 15 bp, Homo sapiens
actgcccagcccctg

SEQ ID NO: 1202411 - DNA, 15 bp, Homo sapiens
gactgcccagcccct

SEQ ID NO: 1202412 - DNA, 15 bp, Homo sapiens
agactgcccagcccc

SEQ ID NO: 1202413 - DNA, 15 bp, Homo sapiens
tagactgcccagccc

SEQ ID NO: 1202414 - DNA, 15 bp, Homo sapiens
ttagactgcccagcc

SEQ ID NO: 1202415 - DNA, 15 bp, Homo sapiens
attagactgcccagc

SEQ ID NO: 1202416 - DNA, 15 bp, Homo sapiens
cattagactgcccag

SEQ ID NO: 1202417 - DNA, 15 bp, Homo sapiens
ccattagactgccca

SEQ ID NO: 1202418 - DNA, 15 bp, Homo sapiens
tccattagactgccc

SEQ ID NO: 1202419 - DNA, 15 bp, Homo sapiens
ttccattagactgcc

SEQ ID NO: 1202420 - DNA, 15 bp, Homo sapiens
tttccattagactgc

SEQ ID NO: 1202421 - DNA, 15 bp, Homo sapiens
ttttccattagactg

SEQ ID NO: 1202422 - DNA, 15 bp, Homo sapiens
tttttccattagact

SEQ ID NO: 1202423 - DNA, 15 bp, Homo sapiens
gtttttccattagac

SEQ ID NO: 1202424 - DNA, 15 bp, Homo sapiens
ggtttttccattaga

SEQ ID NO: 1202425 - DNA, 15 bp, Homo sapiens
tggtttttccattag

SEQ ID NO: 1202426 - DNA, 15 bp, Homo sapiens
ttggtttttccatta

SEQ ID NO: 1202427 - DNA, 15 bp, Homo sapiens
tttggtttttccatt

SEQ ID NO: 1202428 - DNA, 15 bp, Homo sapiens
gtttggtttttccat

SEQ ID NO: 1202429 - DNA, 15 bp, Homo sapiens
ggtttggtttttcca

SEQ ID NO: 1202430 - DNA, 15 bp, Homo sapiens
aggtttggtttttcc

SEQ ID NO: 1202431 - DNA, 15 bp, Homo sapiens
aaggtttggtttttc

SEQ ID NO: 1202432 - DNA, 15 bp, Homo sapiens
aaaggtttggttttt

SEQ ID NO: 1202433 - DNA, 15 bp, Homo sapiens
caaaggtttggtttt

SEQ ID NO: 1202434 - DNA, 15 bp, Homo sapiens
gcaaaggtttggttt

SEQ ID NO: 1202435 - DNA, 15 bp, Homo sapiens
tgcaaaggtttggtt

SEQ ID NO: 1202436 - DNA, 15 bp, Homo sapiens
ttgcaaaggtttggt

SEQ ID NO: 1202437 - DNA, 15 bp, Homo sapiens
tttgcaaaggtttgg

SEQ ID NO: 1202438 - DNA, 15 bp, Homo sapiens
ttttgcaaaggtttg

SEQ ID NO: 1202439 - DNA, 15 bp, Homo sapiens
attttgcaaaggttt

SEQ ID NO: 1202440 - DNA, 15 bp, Homo sapiens
cattttgcaaaggtt

SEQ ID NO: 1202441 - DNA, 15 bp, Homo sapiens
tcattttgcaaaggt

SEQ ID NO: 1202442 - DNA, 15 bp, Homo sapiens
ttcattttgcaaagg

SEQ ID NO: 1202443 - DNA, 15 bp, Homo sapiens
attcattttgcaaag

SEQ ID NO: 1202444 - DNA, 15 bp, Homo sapiens
aattcattttgcaaa

SEQ ID NO: 1202445 - DNA, 15 bp, Homo sapiens
caattcattttgcaa

SEQ ID NO: 1202446 - DNA, 15 bp, Homo sapiens
acaattcattttgca

SEQ ID NO: 1202447 - DNA, 15 bp, Homo sapiens
aacaattcattttgc

SEQ ID NO: 1202448 - DNA, 15 bp, Homo sapiens
gaacaattcattttg

SEQ ID NO: 1202449 - DNA, 15 bp, Homo sapiens
ggaacaattcatttt

SEQ ID NO: 1202450 - DNA, 15 bp, Homo sapiens
gggaacaattcattt

SEQ ID NO: 1202451 - DNA, 15 bp, Homo sapiens
ggggaacaattcatt

SEQ ID NO: 1202452 - DNA, 15 bp, Homo sapiens
gggggaacaattcat

SEQ ID NO: 1202453 - DNA, 15 bp, Homo sapiens
tgggggaacaattca

SEQ ID NO: 1202454 - DNA, 15 bp, Homo sapiens
atgggggaacaattc

SEQ ID NO: 1202455 - DNA, 15 bp, Homo sapiens
aatgggggaacaatt

SEQ ID NO: 1202456 - DNA, 15 bp, Homo sapiens
gaatgggggaacaat

SEQ ID NO: 1202457 - DNA, 15 bp, Homo sapiens
agaatgggggaacaa

SEQ ID NO: 1202458 - DNA, 15 bp, Homo sapiens
tagaatgggggaaca

SEQ ID NO: 1202459 - DNA, 15 bp, Homo sapiens
atagaatgggggaac

SEQ ID NO: 1202460 - DNA, 15 bp, Homo sapiens
gatagaatgggggaa

SEQ ID NO: 1202461 - DNA, 15 bp, Homo sapiens
agatagaatggggga

SEQ ID NO: 1202462 - DNA, 15 bp, Homo sapiens
aagatagaatggggg

SEQ ID NO: 1202463 - DNA, 15 bp, Homo sapiens
taagatagaatgggg

SEQ ID NO: 1202464 - DNA, 15 bp, Homo sapiens
ctaagatagaatggg

SEQ ID NO: 1202465 - DNA, 15 bp, Homo sapiens
cctaagatagaatgg

SEQ ID NO: 1202466 - DNA, 15 bp, Homo sapiens
acctaagatagaatg

SEQ ID NO: 1202467 - DNA, 15 bp, Homo sapiens
aacctaagatagaat

SEQ ID NO: 1202468 - DNA, 15 bp, Homo sapiens
gaacctaagatagaa

SEQ ID NO: 1202469 - DNA, 15 bp, Homo sapiens
ggaacctaagataga

SEQ ID NO: 1202470 - DNA, 15 bp, Homo sapiens
gggaacctaagatag

SEQ ID NO: 1202471 - DNA, 15 bp, Homo sapiens
agggaacctaagata

SEQ ID NO: 1202472 - DNA, 15 bp, Homo sapiens
aagggaacctaagat

SEQ ID NO: 1202473 - DNA, 15 bp, Homo sapiens
gaagggaacctaaga

SEQ ID NO: 1202474 - DNA, 15 bp, Homo sapiens
agaagggaacctaag

SEQ ID NO: 1202475 - DNA, 15 bp, Homo sapiens
gagaagggaacctaa

SEQ ID NO: 1202476 - DNA, 15 bp, Homo sapiens
agagaagggaaccta

SEQ ID NO: 1202477 - DNA, 15 bp, Homo sapiens
aagagaagggaacct

SEQ ID NO: 1202478 - DNA, 15 bp, Homo sapiens
aaagagaagggaacc

SEQ ID NO: 1202479 - DNA, 15 bp, Homo sapiens
aaaagagaagggaac

SEQ ID NO: 1202480 - DNA, 15 bp, Homo sapiens
taaaagagaagggaa

SEQ ID NO: 1202481 - DNA, 15 bp, Homo sapiens
ctaaaagagaaggga

SEQ ID NO: 1202482 - DNA, 15 bp, Homo sapiens
actaaaagagaaggg

SEQ ID NO: 1202483 - DNA, 15 bp, Homo sapiens
tactaaaagagaagg

SEQ ID NO: 1202484 - DNA, 15 bp, Homo sapiens
atactaaaagagaag

SEQ ID NO: 1202485 - DNA, 15 bp, Homo sapiens
aatactaaaagagaa

SEQ ID NO: 1202486 - DNA, 15 bp, Homo sapiens
gaatactaaaagaga

SEQ ID NO: 1202487 - DNA, 15 bp, Homo sapiens
agaatactaaaagag

SEQ ID NO: 1202488 - DNA, 15 bp, Homo sapiens
gagaatactaaaaga

SEQ ID NO: 1202489 - DNA, 15 bp, Homo sapiens
agagaatactaaaag

SEQ ID NO: 1202490 - DNA, 15 bp, Homo sapiens
gagagaatactaaaa

SEQ ID NO: 1202491 - DNA, 15 bp, Homo sapiens
agagagaatactaaa

SEQ ID NO: 1202492 - DNA, 15 bp, Homo sapiens
gagagagaatactaa

SEQ ID NO: 1202493 - DNA, 15 bp, Homo sapiens
agagagagaatacta

SEQ ID NO: 1202494 - DNA, 15 bp, Homo sapiens
aagagagagaatact

SEQ ID NO: 1202495 - DNA, 15 bp, Homo sapiens
taagagagagaatac

SEQ ID NO: 1202496 - DNA, 15 bp, Homo sapiens
gtaagagagagaata

SEQ ID NO: 1202497 - DNA, 15 bp, Homo sapiens
tgtaagagagagaat

SEQ ID NO: 1202498 - DNA, 15 bp, Homo sapiens
ttgtaagagagagaa

SEQ ID NO: 1202499 - DNA, 15 bp, Homo sapiens
tttgtaagagagaga

SEQ ID NO: 1202500 - DNA, 15 bp, Homo sapiens
ctttgtaagagagag

SEQ ID NO: 1202501 - DNA, 15 bp, Homo sapiens
actttgtaagagaga

SEQ ID NO: 1202502 - DNA, 15 bp, Homo sapiens
aactttgtaagagag

SEQ ID NO: 1202503 - DNA, 15 bp, Homo sapiens
gaactttgtaagaga

SEQ ID NO: 1202504 - DNA, 15 bp, Homo sapiens
tgaactttgtaagag

SEQ ID NO: 1202505 - DNA, 15 bp, Homo sapiens
atgaactttgtaaga

SEQ ID NO: 1202506 - DNA, 15 bp, Homo sapiens
gatgaactttgtaag

SEQ ID NO: 1202507 - DNA, 15 bp, Homo sapiens
ggatgaactttgtaa

SEQ ID NO: 1202508 - DNA, 15 bp, Homo sapiens
aggatgaactttgta

SEQ ID NO: 1202509 - DNA, 15 bp, Homo sapiens
taggatgaactttgt

SEQ ID NO: 1202510 - DNA, 15 bp, Homo sapiens
ataggatgaactttg

SEQ ID NO: 1202511 - DNA, 15 bp, Homo sapiens
aataggatgaacttt

SEQ ID NO: 1202512 - DNA, 15 bp, Homo sapiens
taataggatgaactt

SEQ ID NO: 1202513 - DNA, 15 bp, Homo sapiens
gtaataggatgaact

SEQ ID NO: 1202514 - DNA, 15 bp, Homo sapiens
ggtaataggatgaac

SEQ ID NO: 1202515 - DNA, 15 bp, Homo sapiens
aggtaataggatgaa

SEQ ID NO: 1202516 - DNA, 15 bp, Homo sapiens
caggtaataggatga

SEQ ID NO: 1202517 - DNA, 15 bp, Homo sapiens
ccaggtaataggatg

SEQ ID NO: 1202518 - DNA, 15 bp, Homo sapiens
accaggtaataggat

SEQ ID NO: 1202519 - DNA, 15 bp, Homo sapiens
aaccaggtaatagga

SEQ ID NO: 1202520 - DNA, 15 bp, Homo sapiens
aaaccaggtaatagg

SEQ ID NO: 1202521 - DNA, 15 bp, Homo sapiens
gaaaccaggtaatag

SEQ ID NO: 1202522 - DNA, 15 bp, Homo sapiens
ggaaaccaggtaata

SEQ ID NO: 1202523 - DNA, 15 bp, Homo sapiens
aggaaaccaggtaat

SEQ ID NO: 1202524 - DNA, 15 bp, Homo sapiens
gaggaaaccaggtaa

SEQ ID NO: 1202525 - DNA, 15 bp, Homo sapiens
agaggaaaccaggta

SEQ ID NO: 1202526 - DNA, 15 bp, Homo sapiens
aagaggaaaccaggt

SEQ ID NO: 1202527 - DNA, 15 bp, Homo sapiens
gaagaggaaaccagg

SEQ ID NO: 1202528 - DNA, 15 bp, Homo sapiens
ggaagaggaaaccag

SEQ ID NO: 1202529 - DNA, 15 bp, Homo sapiens
tggaagaggaaacca

SEQ ID NO: 1202530 - DNA, 15 bp, Homo sapiens
atggaagaggaaacc

SEQ ID NO: 1202531 - DNA, 15 bp, Homo sapiens
tatggaagaggaaac

SEQ ID NO: 1202532 - DNA, 15 bp, Homo sapiens
gtatggaagaggaaa

SEQ ID NO: 1202533 - DNA, 15 bp, Homo sapiens
tgtatggaagaggaa

SEQ ID NO: 1202534 - DNA, 15 bp, Homo sapiens
ctgtatggaagagga

SEQ ID NO: 1202535 - DNA, 15 bp, Homo sapiens
cctgtatggaagagg

SEQ ID NO: 1202536 - DNA, 15 bp, Homo sapiens
acctgtatggaagag

SEQ ID NO: 1202537 - DNA, 15 bp, Homo sapiens
cacctgtatggaaga

SEQ ID NO: 1202538 - DNA, 15 bp, Homo sapiens
tcacctgtatggaag

SEQ ID NO: 1202539 - DNA, 15 bp, Homo sapiens
atcacctgtatggaa

SEQ ID NO: 1202540 - DNA, 15 bp, Homo sapiens
aatcacctgtatgga

SEQ ID NO: 1202541 - DNA, 15 bp, Homo sapiens
aaatcacctgtatgg

SEQ ID NO: 1202542 - DNA, 15 bp, Homo sapiens
aaaatcacctgtatg

SEQ ID NO: 1202543 - DNA, 15 bp, Homo sapiens
taaaatcacctgtat

SEQ ID NO: 1202544 - DNA, 15 bp, Homo sapiens
ctaaaatcacctgta

SEQ ID NO: 1202545 - DNA, 15 bp, Homo sapiens
tctaaaatcacctgt

SEQ ID NO: 1202546 - DNA, 15 bp, Homo sapiens
atctaaaatcacctg

SEQ ID NO: 1202547 - DNA, 15 bp, Homo sapiens
aatctaaaatcacct

SEQ ID NO: 1202548 - DNA, 15 bp, Homo sapiens
caatctaaaatcacc

SEQ ID NO: 1202549 - DNA, 15 bp, Homo sapiens
tcaatctaaaatcac

SEQ ID NO: 1202550 - DNA, 15 bp, Homo sapiens
atcaatctaaaatca

SEQ ID NO: 1202551 - DNA, 15 bp, Homo sapiens
catcaatctaaaatc

SEQ ID NO: 1202552 - DNA, 15 bp, Homo sapiens
gcatcaatctaaaat

SEQ ID NO: 1202553 - DNA, 15 bp, Homo sapiens
ggcatcaatctaaaa

SEQ ID NO: 1202554 - DNA, 15 bp, Homo sapiens
aggcatcaatctaaa

SEQ ID NO: 1202555 - DNA, 15 bp, Homo sapiens
caggcatcaatctaa

SEQ ID NO: 1202556 - DNA, 15 bp, Homo sapiens
acaggcatcaatcta

SEQ ID NO: 1202557 - DNA, 15 bp, Homo sapiens
gacaggcatcaatct

SEQ ID NO: 1202558 - DNA, 15 bp, Homo sapiens
agacaggcatcaatc

SEQ ID NO: 1202559 - DNA, 15 bp, Homo sapiens
aagacaggcatcaat

SEQ ID NO: 1202560 - DNA, 15 bp, Homo sapiens
aaagacaggcatcaa

SEQ ID NO: 1202561 - DNA, 15 bp, Homo sapiens
gaaagacaggcatca

SEQ ID NO: 1202562 - DNA, 15 bp, Homo sapiens
cgaaagacaggcatc

SEQ ID NO: 1202563 - DNA, 15 bp, Homo sapiens
tcgaaagacaggcat

SEQ ID NO: 1202564 - DNA, 15 bp, Homo sapiens
ttcgaaagacaggca

SEQ ID NO: 1202565 - DNA, 15 bp, Homo sapiens
cttcgaaagacaggc

SEQ ID NO: 1202566 - DNA, 15 bp, Homo sapiens
acttcgaaagacagg

SEQ ID NO: 1202567 - DNA, 15 bp, Homo sapiens
cacttcgaaagacag

SEQ ID NO: 1202568 - DNA, 15 bp, Homo sapiens
gcacttcgaaagaca

SEQ ID NO: 1202569 - DNA, 15 bp, Homo sapiens
tgcacttcgaaagac

SEQ ID NO: 1202570 - DNA, 15 bp, Homo sapiens
ctgcacttcgaaaga

SEQ ID NO: 1202571 - DNA, 15 bp, Homo sapiens
actgcacttcgaaag

SEQ ID NO: 1202572 - DNA, 15 bp, Homo sapiens
aactgcacttcgaaa

SEQ ID NO: 1202573 - DNA, 15 bp, Homo sapiens
taactgcacttcgaa

SEQ ID NO: 1202574 - DNA, 15 bp, Homo sapiens
ataactgcacttcga

SEQ ID NO: 1202575 - DNA, 15 bp, Homo sapiens
gataactgcacttcg

SEQ ID NO: 1202576 - DNA, 15 bp, Homo sapiens
tgataactgcacttc

SEQ ID NO: 1202577 - DNA, 15 bp, Homo sapiens
atgataactgcactt

SEQ ID NO: 1202578 - DNA, 15 bp, Homo sapiens
tatgataactgcact

SEQ ID NO: 1202579 - DNA, 15 bp, Homo sapiens
ttatgataactgcac

SEQ ID NO: 1202580 - DNA, 15 bp, Homo sapiens
attatgataactgca

SEQ ID NO: 1202581 - DNA, 15 bp, Homo sapiens
gattatgataactgc

SEQ ID NO: 1202582 - DNA, 15 bp, Homo sapiens
agattatgataactg

SEQ ID NO: 1202583 - DNA, 15 bp, Homo sapiens
tagattatgataact

SEQ ID NO: 1202584 - DNA, 15 bp, Homo sapiens
gtagattatgataac

SEQ ID NO: 1202585 - DNA, 15 bp, Homo sapiens
agtagattatgataa

SEQ ID NO: 1202586 - DNA, 15 bp, Homo sapiens
cagtagattatgata

SEQ ID NO: 1202587 - DNA, 15 bp, Homo sapiens
gcagtagattatgat

SEQ ID NO: 1202588 - DNA, 15 bp, Homo sapiens
ggcagtagattatga

SEQ ID NO: 1202589 - DNA, 15 bp, Homo sapiens
aggcagtagattatg

SEQ ID NO: 1202590 - DNA, 15 bp, Homo sapiens
caggcagtagattat

SEQ ID NO: 1202591 - DNA, 15 bp, Homo sapiens
tcaggcagtagatta

SEQ ID NO: 1202592 - DNA, 15 bp, Homo sapiens
gtcaggcagtagatt

SEQ ID NO: 1202593 - DNA, 15 bp, Homo sapiens
tgtcaggcagtagat

SEQ ID NO: 1202594 - DNA, 15 bp, Homo sapiens
ttgtcaggcagtaga

SEQ ID NO: 1202595 - DNA, 15 bp, Homo sapiens
attgtcaggcagtag

SEQ ID NO: 1202596 - DNA, 15 bp, Homo sapiens
gattgtcaggcagta

SEQ ID NO: 1202597 - DNA, 15 bp, Homo sapiens
tgattgtcaggcagt

SEQ ID NO: 1202598 - DNA, 15 bp, Homo sapiens
gtgattgtcaggcag

SEQ ID NO: 1202599 - DNA, 15 bp, Homo sapiens
ggtgattgtcaggca

SEQ ID NO: 1202600 - DNA, 15 bp, Homo sapiens
aggtgattgtcaggc

SEQ ID NO: 1202601 - DNA, 15 bp, Homo sapiens
gaggtgattgtcagg

SEQ ID NO: 1202602 - DNA, 15 bp, Homo sapiens
ggaggtgattgtcag

SEQ ID NO: 1202603 - DNA, 15 bp, Homo sapiens
tggaggtgattgtca

SEQ ID NO: 1202604 - DNA, 15 bp, Homo sapiens
gtggaggtgattgtc

SEQ ID NO: 1202605 - DNA, 15 bp, Homo sapiens
ggtggaggtgattgt

SEQ ID NO: 1202606 - DNA, 15 bp, Homo sapiens
aggtggaggtgattg

SEQ ID NO: 1202607 - DNA, 15 bp, Homo sapiens
taggtggaggtgatt

SEQ ID NO: 1202608 - DNA, 15 bp, Homo sapiens
ctaggtggaggtgat

SEQ ID NO: 1202609 - DNA, 15 bp, Homo sapiens
tctaggtggaggtga

SEQ ID NO: 1202610 - DNA, 15 bp, Homo sapiens
ttctaggtggaggtg

SEQ ID NO: 1202611 - DNA, 15 bp, Homo sapiens
attctaggtggaggt

SEQ ID NO: 1202612 - DNA, 15 bp, Homo sapiens
aattctaggtggagg

SEQ ID NO: 1202613 - DNA, 15 bp, Homo sapiens
taattctaggtggag

SEQ ID NO: 1202614 - DNA, 15 bp, Homo sapiens
ataattctaggtgga

SEQ ID NO: 1202615 - DNA, 15 bp, Homo sapiens
tataattctaggtgg

SEQ ID NO: 1202616 - DNA, 15 bp, Homo sapiens
gtataattctaggtg

SEQ ID NO: 1202617 - DNA, 15 bp, Homo sapiens
agtataattctaggt

SEQ ID NO: 1202618 - DNA, 15 bp, Homo sapiens
tagtataattctagg

SEQ ID NO: 1202619 - DNA, 15 bp, Homo sapiens
atagtataattctag

SEQ ID NO: 1202620 - DNA, 15 bp, Homo sapiens
gatagtataattcta

SEQ ID NO: 1202621 - DNA, 15 bp, Homo sapiens
ggatagtataattct

SEQ ID NO: 1202622 - DNA, 15 bp, Homo sapiens
tggatagtataattc

SEQ ID NO: 1202623 - DNA, 15 bp, Homo sapiens
ttggatagtataatt

SEQ ID NO: 1202624 - DNA, 15 bp, Homo sapiens
attggatagtataat

SEQ ID NO: 1202625 - DNA, 15 bp, Homo sapiens
tattggatagtataa

SEQ ID NO: 1202626 - DNA, 15 bp, Homo sapiens
gtattggatagtata

SEQ ID NO: 1202627 - DNA, 15 bp, Homo sapiens
tgtattggatagtat

SEQ ID NO: 1202628 - DNA, 15 bp, Homo sapiens
ctgtattggatagta

SEQ ID NO: 1202629 - DNA, 15 bp, Homo sapiens
gctgtattggatagt

SEQ ID NO: 1202630 - DNA, 15 bp, Homo sapiens
tgctgtattggatag

SEQ ID NO: 1202631 - DNA, 15 bp, Homo sapiens
ctgctgtattggata

SEQ ID NO: 1202632 - DNA, 15 bp, Homo sapiens
gctgctgtattggat

SEQ ID NO: 1202633 - DNA, 15 bp, Homo sapiens
agctgctgtattgga

SEQ ID NO: 1202634 - DNA, 15 bp, Homo sapiens
tagctgctgtattgg

SEQ ID NO: 1202635 - DNA, 15 bp, Homo sapiens
ctagctgctgtattg

SEQ ID NO: 1202636 - DNA, 15 bp, Homo sapiens
actagctgctgtatt

SEQ ID NO: 1202637 - DNA, 15 bp, Homo sapiens
cactagctgctgtat

SEQ ID NO: 1202638 - DNA, 15 bp, Homo sapiens
tcactagctgctgta

SEQ ID NO: 1202639 - DNA, 15 bp, Homo sapiens
ctcactagctgctgt

SEQ ID NO: 1202640 - DNA, 15 bp, Homo sapiens
gctcactagctgctg

SEQ ID NO: 1202641 - DNA, 15 bp, Homo sapiens
tgctcactagctgct

SEQ ID NO: 1202642 - DNA, 15 bp, Homo sapiens
gtgctcactagctgc

SEQ ID NO: 1202643 - DNA, 15 bp, Homo sapiens
agtgctcactagctg

SEQ ID NO: 1202644 - DNA, 15 bp, Homo sapiens
gagtgctcactagct

SEQ ID NO: 1202645 - DNA, 15 bp, Homo sapiens
cgagtgctcactagc

SEQ ID NO: 1202646 - DNA, 15 bp, Homo sapiens
tcgagtgctcactag

SEQ ID NO: 1202647 - DNA, 15 bp, Homo sapiens
ctcgagtgctcacta

SEQ ID NO: 1202648 - DNA, 15 bp, Homo sapiens
tctcgagtgctcact

SEQ ID NO: 1202649 - DNA, 15 bp, Homo sapiens
atctcgagtgctcac

SEQ ID NO: 1202650 - DNA, 15 bp, Homo sapiens
tatctcgagtgctca

SEQ ID NO: 1202651 - DNA, 15 bp, Homo sapiens
atatctcgagtgctc

SEQ ID NO: 1202652 - DNA, 15 bp, Homo sapiens
catatctcgagtgct

SEQ ID NO: 1202653 - DNA, 15 bp, Homo sapiens
ccatatctcgagtgc

SEQ ID NO: 1202654 - DNA, 15 bp, Homo sapiens
gccatatctcgagtg

SEQ ID NO: 1202655 - DNA, 15 bp, Homo sapiens
agccatatctcgagt

SEQ ID NO: 1202656 - DNA, 15 bp, Homo sapiens
tagccatatctcgag

SEQ ID NO: 1202657 - DNA, 15 bp, Homo sapiens
ctagccatatctcga

SEQ ID NO: 1202658 - DNA, 15 bp, Homo sapiens
actagccatatctcg

SEQ ID NO: 1202659 - DNA, 15 bp, Homo sapiens
tactagccatatctc

SEQ ID NO: 1202660 - DNA, 15 bp, Homo sapiens
gtactagccatatct

SEQ ID NO: 1202661 - DNA, 15 bp, Homo sapiens
tgtactagccatatc

SEQ ID NO: 1202662 - DNA, 15 bp, Homo sapiens
ttgtactagccatat

SEQ ID NO: 1202663 - DNA, 15 bp, Homo sapiens
tttgtactagccata

SEQ ID NO: 1202664 - DNA, 15 bp, Homo sapiens
atttgtactagccat

SEQ ID NO: 1202665 - DNA, 15 bp, Homo sapiens
aatttgtactagcca

SEQ ID NO: 1202666 - DNA, 15 bp, Homo sapiens
caatttgtactagcc

SEQ ID NO: 1202667 - DNA, 15 bp, Homo sapiens
ccaatttgtactagc

SEQ ID NO: 1202668 - DNA, 15 bp, Homo sapiens
cccaatttgtactag

SEQ ID NO: 1202669 - DNA, 15 bp, Homo sapiens
tcccaatttgtacta

SEQ ID NO: 1202670 - DNA, 15 bp, Homo sapiens
atcccaatttgtact

SEQ ID NO: 1202671 - DNA, 15 bp, Homo sapiens
catcccaatttgtac

SEQ ID NO: 1202672 - DNA, 15 bp, Homo sapiens
acatcccaatttgta

SEQ ID NO: 1202673 - DNA, 15 bp, Homo sapiens
cacatcccaatttgt

SEQ ID NO: 1202674 - DNA, 15 bp, Homo sapiens
gcacatcccaatttg

SEQ ID NO: 1202675 - DNA, 15 bp, Homo sapiens
agcacatcccaattt

SEQ ID NO: 1202676 - DNA, 15 bp, Homo sapiens
cagcacatcccaatt

SEQ ID NO: 1202677 - DNA, 15 bp, Homo sapiens
acagcacatcccaat

SEQ ID NO: 1202678 - DNA, 15 bp, Homo sapiens
cacagcacatcccaa

SEQ ID NO: 1202679 - DNA, 15 bp, Homo sapiens
ccacagcacatccca

SEQ ID NO: 1202680 - DNA, 15 bp, Homo sapiens
cccacagcacatccc

SEQ ID NO: 1202681 - DNA, 15 bp, Homo sapiens
acccacagcacatcc

SEQ ID NO: 1202682 - DNA, 15 bp, Homo sapiens
tacccacagcacatc

SEQ ID NO: 1202683 - DNA, 15 bp, Homo sapiens
atacccacagcacat

SEQ ID NO: 1202684 - DNA, 15 bp, Homo sapiens
tatacccacagcaca

SEQ ID NO: 1202685 - DNA, 15 bp, Homo sapiens
ttatacccacagcac

SEQ ID NO: 1202686 - DNA, 15 bp, Homo sapiens
tttatacccacagca

SEQ ID NO: 1202687 - DNA, 15 bp, Homo sapiens
ttttatacccacagc

SEQ ID NO: 1202688 - DNA, 15 bp, Homo sapiens
attttatacccacag

SEQ ID NO: 1202689 - DNA, 15 bp, Homo sapiens
tattttatacccaca

SEQ ID NO: 1202690 - DNA, 15 bp, Homo sapiens
gtattttatacccac

SEQ ID NO: 1202691 - DNA, 15 bp, Homo sapiens
tgtattttataccca

SEQ ID NO: 1202692 - DNA, 15 bp, Homo sapiens
atgtattttataccc

SEQ ID NO: 1202693 - DNA, 15 bp, Homo sapiens
tatgtattttatacc

SEQ ID NO: 1202694 - DNA, 15 bp, Homo sapiens
atatgtattttatac

SEQ ID NO: 1202695 - DNA, 15 bp, Homo sapiens
catatgtattttata

SEQ ID NO: 1202696 - DNA, 15 bp, Homo sapiens
ccatatgtattttat

SEQ ID NO: 1202697 - DNA, 15 bp, Homo sapiens
cccatatgtatttta

SEQ ID NO: 1202698 - DNA, 15 bp, Homo sapiens
tcccatatgtatttt

SEQ ID NO: 1202699 - DNA, 15 bp, Homo sapiens
atcccatatgtattt

SEQ ID NO: 1202700 - DNA, 15 bp, Homo sapiens
aatcccatatgtatt

SEQ ID NO: 1202701 - DNA, 15 bp, Homo sapiens
aaatcccatatgtat

SEQ ID NO: 1202702 - DNA, 15 bp, Homo sapiens
gaaatcccatatgta

SEQ ID NO: 1202703 - DNA, 15 bp, Homo sapiens
tgaaatcccatatgt

SEQ ID NO: 1202704 - DNA, 15 bp, Homo sapiens
ttgaaatcccatatg

SEQ ID NO: 1202705 - DNA, 15 bp, Homo sapiens
tttgaaatcccatat

SEQ ID NO: 1202706 - DNA, 15 bp, Homo sapiens
ttttgaaatcccata

SEQ ID NO: 1202707 - DNA, 15 bp, Homo sapiens
tttttgaaatcccat

SEQ ID NO: 1202708 - DNA, 15 bp, Homo sapiens
gtttttgaaatccca

SEQ ID NO: 1202709 - DNA, 15 bp, Homo sapiens
agtttttgaaatccc

SEQ ID NO: 1202710 - DNA, 15 bp, Homo sapiens
aagtttttgaaatcc

SEQ ID NO: 1202711 - DNA, 15 bp, Homo sapiens
taagtttttgaaatc

SEQ ID NO: 1202712 - DNA, 15 bp, Homo sapiens
ctaagtttttgaaat

SEQ ID NO: 1202713 - DNA, 15 bp, Homo sapiens
gctaagtttttgaaa

SEQ ID NO: 1202714 - DNA, 15 bp, Homo sapiens
ggctaagtttttgaa

SEQ ID NO: 1202715 - DNA, 15 bp, Homo sapiens
aggctaagtttttga

SEQ ID NO: 1202716 - DNA, 15 bp, Homo sapiens
caggctaagtttttg

SEQ ID NO: 1202717 - DNA, 15 bp, Homo sapiens
tcaggctaagttttt

SEQ ID NO: 1202718 - DNA, 15 bp, Homo sapiens
ttcaggctaagtttt

SEQ ID NO: 1202719 - DNA, 15 bp, Homo sapiens
tttcaggctaagttt

SEQ ID NO: 1202720 - DNA, 15 bp, Homo sapiens
ttttcaggctaagtt

SEQ ID NO: 1202721 - DNA, 15 bp, Homo sapiens
tttttcaggctaagt

SEQ ID NO: 1202722 - DNA, 15 bp, Homo sapiens
ttttttcaggctaag

SEQ ID NO: 1202723 - DNA, 15 bp, Homo sapiens
tttttttcaggctaa

SEQ ID NO: 1202724 - DNA, 15 bp, Homo sapiens
ctttttttcaggcta

SEQ ID NO: 1202725 - DNA, 15 bp, Homo sapiens
tctttttttcaggct

SEQ ID NO: 1202726 - DNA, 15 bp, Homo sapiens
ttctttttttcaggc

SEQ ID NO: 1202727 - DNA, 15 bp, Homo sapiens
attctttttttcagg

SEQ ID NO: 1202728 - DNA, 15 bp, Homo sapiens
tattctttttttcag

SEQ ID NO: 1202729 - DNA, 15 bp, Homo sapiens
atattctttttttca

SEQ ID NO: 1202730 - DNA, 15 bp, Homo sapiens
tatattctttttttc

SEQ ID NO: 1202731 - DNA, 15 bp, Homo sapiens
ttatattcttttttt

SEQ ID NO: 1202732 - DNA, 15 bp, Homo sapiens
gttatattctttttt

SEQ ID NO: 1202733 - DNA, 15 bp, Homo sapiens
tgttatattcttttt

SEQ ID NO: 1202734 - DNA, 15 bp, Homo sapiens
atgttatattctttt

SEQ ID NO: 1202735 - DNA, 15 bp, Homo sapiens
tatgttatattcttt

SEQ ID NO: 1202736 - DNA, 15 bp, Homo sapiens
ttatgttatattctt

SEQ ID NO: 1202737 - DNA, 15 bp, Homo sapiens
attatgttatattct

SEQ ID NO: 1202738 - DNA, 15 bp, Homo sapiens
gattatgttatattc

SEQ ID NO: 1202739 - DNA, 15 bp, Homo sapiens
tgattatgttatatt

SEQ ID NO: 1202740 - DNA, 15 bp, Homo sapiens
ttgattatgttatat

SEQ ID NO: 1202741 - DNA, 15 bp, Homo sapiens
attgattatgttata

SEQ ID NO: 1202742 - DNA, 15 bp, Homo sapiens
tattgattatgttat

SEQ ID NO: 1202743 - DNA, 15 bp, Homo sapiens
atattgattatgtta

SEQ ID NO: 1202744 - DNA, 15 bp, Homo sapiens
aatattgattatgtt

SEQ ID NO: 1202745 - DNA, 15 bp, Homo sapiens
aaatattgattatgt

SEQ ID NO: 1202746 - DNA, 15 bp, Homo sapiens
aaaatattgattatg

SEQ ID NO: 1202747 - DNA, 15 bp, Homo sapiens
taaaatattgattat

SEQ ID NO: 1202748 - DNA, 15 bp, Homo sapiens
ataaaatattgatta

SEQ ID NO: 1202749 - DNA, 15 bp, Homo sapiens
cataaaatattgatt

SEQ ID NO: 1202750 - DNA, 15 bp, Homo sapiens
ccataaaatattgat

SEQ ID NO: 1202751 - DNA, 15 bp, Homo sapiens
gccataaaatattga

SEQ ID NO: 1202752 - DNA, 15 bp, Homo sapiens
tgccataaaatattg

SEQ ID NO: 1202753 - DNA, 15 bp, Homo sapiens
ttgccataaaatatt

SEQ ID NO: 1202754 - DNA, 15 bp, Homo sapiens
attgccataaaatat

SEQ ID NO: 1202755 - DNA, 15 bp, Homo sapiens
aattgccataaaata

SEQ ID NO: 1202756 - DNA, 15 bp, Homo sapiens
taattgccataaaat

SEQ ID NO: 1202757 - DNA, 15 bp, Homo sapiens
gtaattgccataaaa

SEQ ID NO: 1202758 - DNA, 15 bp, Homo sapiens
tgtaattgccataaa

SEQ ID NO: 1202759 - DNA, 15 bp, Homo sapiens
atgtaattgccataa

SEQ ID NO: 1202760 - DNA, 15 bp, Homo sapiens
tatgtaattgccata

SEQ ID NO: 1202761 - DNA, 15 bp, Homo sapiens
atatgtaattgccat

SEQ ID NO: 1202762 - DNA, 15 bp, Homo sapiens
aatatgtaattgcca

SEQ ID NO: 1202763 - DNA, 15 bp, Homo sapiens
caatatgtaattgcc

SEQ ID NO: 1202764 - DNA, 15 bp, Homo sapiens
ccaatatgtaattgc

SEQ ID NO: 1202765 - DNA, 15 bp, Homo sapiens
tccaatatgtaattg

SEQ ID NO: 1202766 - DNA, 15 bp, Homo sapiens
ttccaatatgtaatt

SEQ ID NO: 1202767 - DNA, 15 bp, Homo sapiens
attccaatatgtaat

SEQ ID NO: 1202768 - DNA, 15 bp, Homo sapiens
cattccaatatgtaa

SEQ ID NO: 1202769 - DNA, 15 bp, Homo sapiens
tcattccaatatgta

SEQ ID NO: 1202770 - DNA, 15 bp, Homo sapiens
ttcattccaatatgt

SEQ ID NO: 1202771 - DNA, 15 bp, Homo sapiens
tttcattccaatatg

SEQ ID NO: 1202772 - DNA, 15 bp, Homo sapiens
ctttcattccaatat

SEQ ID NO: 1202773 - DNA, 15 bp, Homo sapiens
actttcattccaata

SEQ ID NO: 1202774 - DNA, 15 bp, Homo sapiens
tactttcattccaat

SEQ ID NO: 1202775 - DNA, 15 bp, Homo sapiens
atactttcattccaa

SEQ ID NO: 1202776 - DNA, 15 bp, Homo sapiens
aatactttcattcca

SEQ ID NO: 1202777 - DNA, 15 bp, Homo sapiens
aaatactttcattcc

SEQ ID NO: 1202778 - DNA, 15 bp, Homo sapiens
aaaatactttcattc

SEQ ID NO: 1202779 - DNA, 15 bp, Homo sapiens
caaaatactttcatt

SEQ ID NO: 1202780 - DNA, 15 bp, Homo sapiens
ccaaaatactttcat

SEQ ID NO: 1202781 - DNA, 15 bp, Homo sapiens
accaaaatactttca

SEQ ID NO: 1202782 - DNA, 15 bp, Homo sapiens
aaccaaaatactttc

SEQ ID NO: 1202783 - DNA, 15 bp, Homo sapiens
taaccaaaatacttt

SEQ ID NO: 1202784 - DNA, 15 bp, Homo sapiens
ataaccaaaatactt

SEQ ID NO: 1202785 - DNA, 15 bp, Homo sapiens
tataaccaaaatact

SEQ ID NO: 1202786 - DNA, 15 bp, Homo sapiens
atataaccaaaatac

SEQ ID NO: 1202787 - DNA, 15 bp, Homo sapiens
aatataaccaaaata

SEQ ID NO: 1202788 - DNA, 15 bp, Homo sapiens
taatataaccaaaat

SEQ ID NO: 1202789 - DNA, 15 bp, Homo sapiens
ctaatataaccaaaa

SEQ ID NO: 1202790 - DNA, 15 bp, Homo sapiens
cctaatataaccaaa

SEQ ID NO: 1202791 - DNA, 15 bp, Homo sapiens
acctaatataaccaa

SEQ ID NO: 1202792 - DNA, 15 bp, Homo sapiens
aacctaatataacca

SEQ ID NO: 1202793 - DNA, 15 bp, Homo sapiens
taacctaatataacc

SEQ ID NO: 1202794 - DNA, 15 bp, Homo sapiens
ttaacctaatataac

SEQ ID NO: 1202795 - DNA, 15 bp, Homo sapiens
tttaacctaatataa

SEQ ID NO: 1202796 - DNA, 15 bp, Homo sapiens
atttaacctaatata

SEQ ID NO: 1202797 - DNA, 15 bp, Homo sapiens
tatttaacctaatat

SEQ ID NO: 1202798 - DNA, 15 bp, Homo sapiens
ttatttaacctaata

SEQ ID NO: 1202799 - DNA, 15 bp, Homo sapiens
tttatttaacctaat

SEQ ID NO: 1202800 - DNA, 15 bp, Homo sapiens
ttttatttaacctaa

SEQ ID NO: 1202801 - DNA, 15 bp, Homo sapiens
gttttatttaaccta

SEQ ID NO: 1202802 - DNA, 15 bp, Homo sapiens
tgttttatttaacct

SEQ ID NO: 1202803 - DNA, 15 bp, Homo sapiens
atgttttatttaacc

SEQ ID NO: 1202804 - DNA, 15 bp, Homo sapiens
tatgttttatttaac

SEQ ID NO: 1202805 - DNA, 15 bp, Homo sapiens
atatgttttatttaa

SEQ ID NO: 1202806 - DNA, 15 bp, Homo sapiens
aatatgttttattta

SEQ ID NO: 1202807 - DNA, 15 bp, Homo sapiens
taatatgttttattt

SEQ ID NO: 1202808 - DNA, 15 bp, Homo sapiens
ataatatgttttatt

SEQ ID NO: 1202809 - DNA, 15 bp, Homo sapiens
gataatatgttttat

SEQ ID NO: 1202810 - DNA, 15 bp, Homo sapiens
tgataatatgtttta

SEQ ID NO: 1202811 - DNA, 15 bp, Homo sapiens
ttgataatatgtttt

SEQ ID NO: 1202812 - DNA, 15 bp, Homo sapiens
tttgataatatgttt

SEQ ID NO: 1202813 - DNA, 15 bp, Homo sapiens
ttttgataatatgtt

SEQ ID NO: 1202814 - DNA, 15 bp, Homo sapiens
attttgataatatgt

SEQ ID NO: 1202815 - DNA, 15 bp, Homo sapiens
aattttgataatatg

SEQ ID NO: 1202816 - DNA, 15 bp, Homo sapiens
taattttgataatat

SEQ ID NO: 1202817 - DNA, 15 bp, Homo sapiens
ctaattttgataata

SEQ ID NO: 1202818 - DNA, 15 bp, Homo sapiens
actaattttgataat

SEQ ID NO: 1202819 - DNA, 15 bp, Homo sapiens
aactaattttgataa

SEQ ID NO: 1202820 - DNA, 15 bp, Homo sapiens
aaactaattttgata

SEQ ID NO: 1202821 - DNA, 15 bp, Homo sapiens
gaaactaattttgat

SEQ ID NO: 1202822 - DNA, 15 bp, Homo sapiens
tgaaactaattttga

SEQ ID NO: 1202823 - DNA, 15 bp, Homo sapiens
atgaaactaattttg

SEQ ID NO: 1202824 - DNA, 15 bp, Homo sapiens
aatgaaactaatttt

SEQ ID NO: 1202825 - DNA, 15 bp, Homo sapiens
gaatgaaactaattt

SEQ ID NO: 1202826 - DNA, 15 bp, Homo sapiens
agaatgaaactaatt

SEQ ID NO: 1202827 - DNA, 15 bp, Homo sapiens
tagaatgaaactaat

SEQ ID NO: 1202828 - DNA, 15 bp, Homo sapiens
gtagaatgaaactaa

SEQ ID NO: 1202829 - DNA, 15 bp, Homo sapiens
agtagaatgaaacta

SEQ ID NO: 1202830 - DNA, 15 bp, Homo sapiens
aagtagaatgaaact

SEQ ID NO: 1202831 - DNA, 15 bp, Homo sapiens
aaagtagaatgaaac

SEQ ID NO: 1202832 - DNA, 15 bp, Homo sapiens
aaaagtagaatgaaa

SEQ ID NO: 1202833 - DNA, 15 bp, Homo sapiens
aaaaagtagaatgaa

SEQ ID NO: 1202834 - DNA, 15 bp, Homo sapiens
aaaaaagtagaatga

SEQ ID NO: 1202835 - DNA, 15 bp, Homo sapiens
aaaaaaagtagaatg

SEQ ID NO: 1202836 - DNA, 15 bp, Homo sapiens
taaaaaaagtagaat

SEQ ID NO: 1202837 - DNA, 15 bp, Homo sapiens
ttaaaaaaagtagaa

SEQ ID NO: 1202838 - DNA, 15 bp, Homo sapiens
attaaaaaaagtaga

SEQ ID NO: 1202839 - DNA, 15 bp, Homo sapiens
tattaaaaaaagtag

SEQ ID NO: 1202840 - DNA, 15 bp, Homo sapiens
atattaaaaaaagta

SEQ ID NO: 1202841 - DNA, 15 bp, Homo sapiens
catattaaaaaaagt

SEQ ID NO: 1202842 - DNA, 15 bp, Homo sapiens
ccatattaaaaaaag

SEQ ID NO: 1202843 - DNA, 15 bp, Homo sapiens
gccatattaaaaaaa

SEQ ID NO: 1202844 - DNA, 15 bp, Homo sapiens
agccatattaaaaaa

SEQ ID NO: 1202845 - DNA, 15 bp, Homo sapiens
tagccatattaaaaa

SEQ ID NO: 1202846 - DNA, 15 bp, Homo sapiens
gtagccatattaaaa

SEQ ID NO: 1202847 - DNA, 15 bp, Homo sapiens
agtagccatattaaa

SEQ ID NO: 1202848 - DNA, 15 bp, Homo sapiens
tagtagccatattaa

SEQ ID NO: 1202849 - DNA, 15 bp, Homo sapiens
ctagtagccatatta

SEQ ID NO: 1202850 - DNA, 15 bp, Homo sapiens
cctagtagccatatt

SEQ ID NO: 1202851 - DNA, 15 bp, Homo sapiens
tcctagtagccatat

SEQ ID NO: 1202852 - DNA, 15 bp, Homo sapiens
ttcctagtagccata

SEQ ID NO: 1202853 - DNA, 15 bp, Homo sapiens
tttcctagtagccat

SEQ ID NO: 1202854 - DNA, 15 bp, Homo sapiens
ttttcctagtagcca

SEQ ID NO: 1202855 - DNA, 15 bp, Homo sapiens
attttcctagtagcc

SEQ ID NO: 1202856 - DNA, 15 bp, Homo sapiens
aattttcctagtagc

SEQ ID NO: 1202857 - DNA, 15 bp, Homo sapiens
aaattttcctagtag

SEQ ID NO: 1202858 - DNA, 15 bp, Homo sapiens
taaattttcctagta

SEQ ID NO: 1202859 - DNA, 15 bp, Homo sapiens
ttaaattttcctagt

SEQ ID NO: 1202860 - DNA, 15 bp, Homo sapiens
tttaaattttcctag

SEQ ID NO: 1202861 - DNA, 15 bp, Homo sapiens
atttaaattttccta

SEQ ID NO: 1202862 - DNA, 15 bp, Homo sapiens
catttaaattttcct

SEQ ID NO: 1202863 - DNA, 15 bp, Homo sapiens
tcatttaaattttcc

SEQ ID NO: 1202864 - DNA, 15 bp, Homo sapiens
gtcatttaaattttc

SEQ ID NO: 1202865 - DNA, 15 bp, Homo sapiens
ggtcatttaaatttt

SEQ ID NO: 1202866 - DNA, 15 bp, Homo sapiens
gggtcatttaaattt

SEQ ID NO: 1202867 - DNA, 15 bp, Homo sapiens
tgggtcatttaaatt

SEQ ID NO: 1202868 - DNA, 15 bp, Homo sapiens
atgggtcatttaaat

SEQ ID NO: 1202869 - DNA, 15 bp, Homo sapiens
catgggtcatttaaa

SEQ ID NO: 1202870 - DNA, 15 bp, Homo sapiens
ccatgggtcatttaa

SEQ ID NO: 1202871 - DNA, 15 bp, Homo sapiens
gccatgggtcattta

SEQ ID NO: 1202872 - DNA, 15 bp, Homo sapiens
agccatgggtcattt

SEQ ID NO: 1202873 - DNA, 15 bp, Homo sapiens
aagccatgggtcatt

SEQ ID NO: 1202874 - DNA, 15 bp, Homo sapiens
taagccatgggtcat

SEQ ID NO: 1202875 - DNA, 15 bp, Homo sapiens
gtaagccatgggtca

SEQ ID NO: 1202876 - DNA, 15 bp, Homo sapiens
tgtaagccatgggtc

SEQ ID NO: 1202877 - DNA, 15 bp, Homo sapiens
atgtaagccatgggt

SEQ ID NO: 1202878 - DNA, 15 bp, Homo sapiens
aatgtaagccatggg

SEQ ID NO: 1202879 - DNA, 15 bp, Homo sapiens
aaatgtaagccatgg

SEQ ID NO: 1202880 - DNA, 15 bp, Homo sapiens
caaatgtaagccatg

SEQ ID NO: 1202881 - DNA, 15 bp, Homo sapiens
acaaatgtaagccat

SEQ ID NO: 1202882 - DNA, 15 bp, Homo sapiens
cacaaatgtaagcca

SEQ ID NO: 1202883 - DNA, 15 bp, Homo sapiens
ccacaaatgtaagcc

SEQ ID NO: 1202884 - DNA, 15 bp, Homo sapiens
gccacaaatgtaagc

SEQ ID NO: 1202885 - DNA, 15 bp, Homo sapiens
agccacaaatgtaag

SEQ ID NO: 1202886 - DNA, 15 bp, Homo sapiens
gagccacaaatgtaa

SEQ ID NO: 1202887 - DNA, 15 bp, Homo sapiens
agagccacaaatgta

SEQ ID NO: 1202888 - DNA, 15 bp, Homo sapiens
gagagccacaaatgt

SEQ ID NO: 1202889 - DNA, 15 bp, Homo sapiens
tgagagccacaaatg

SEQ ID NO: 1202890 - DNA, 15 bp, Homo sapiens
atgagagccacaaat

SEQ ID NO: 1202891 - DNA, 15 bp, Homo sapiens
tatgagagccacaaa

SEQ ID NO: 1202892 - DNA, 15 bp, Homo sapiens
atatgagagccacaa

SEQ ID NO: 1202893 - DNA, 15 bp, Homo sapiens
catatgagagccaca

SEQ ID NO: 1202894 - DNA, 15 bp, Homo sapiens
acatatgagagccac

SEQ ID NO: 1202895 - DNA, 15 bp, Homo sapiens
gacatatgagagcca

SEQ ID NO: 1202896 - DNA, 15 bp, Homo sapiens
agacatatgagagcc

SEQ ID NO: 1202897 - DNA, 15 bp, Homo sapiens
tagacatatgagagc

SEQ ID NO: 1202898 - DNA, 15 bp, Homo sapiens
atagacatatgagag

SEQ ID NO: 1202899 - DNA, 15 bp, Homo sapiens
aatagacatatgaga

SEQ ID NO: 1202900 - DNA, 15 bp, Homo sapiens
caatagacatatgag

SEQ ID NO: 1202901 - DNA, 15 bp, Homo sapiens
ccaatagacatatga

SEQ ID NO: 1202902 - DNA, 15 bp, Homo sapiens
tccaatagacatatg

SEQ ID NO: 1202903 - DNA, 15 bp, Homo sapiens
gtccaatagacatat

SEQ ID NO: 1202904 - DNA, 15 bp, Homo sapiens
tgtccaatagacata

SEQ ID NO: 1202905 - DNA, 15 bp, Homo sapiens
ctgtccaatagacat

SEQ ID NO: 1202906 - DNA, 15 bp, Homo sapiens
actgtccaatagaca

SEQ ID NO: 1202907 - DNA, 15 bp, Homo sapiens
tactgtccaatagac

SEQ ID NO: 1202908 - DNA, 15 bp, Homo sapiens
gtactgtccaataga

SEQ ID NO: 1202909 - DNA, 15 bp, Homo sapiens
agtactgtccaatag

SEQ ID NO: 1202910 - DNA, 15 bp, Homo sapiens
cagtactgtccaata

SEQ ID NO: 1202911 - DNA, 15 bp, Homo sapiens
tcagtactgtccaat

SEQ ID NO: 1202912 - DNA, 15 bp, Homo sapiens
gtcagtactgtccaa

SEQ ID NO: 1202913 - DNA, 15 bp, Homo sapiens
ggtcagtactgtcca

SEQ ID NO: 1202914 - DNA, 15 bp, Homo sapiens
aggtcagtactgtcc

SEQ ID NO: 1202915 - DNA, 15 bp, Homo sapiens
taggtcagtactgtc

SEQ ID NO: 1202916 - DNA, 15 bp, Homo sapiens
ctaggtcagtactgt

SEQ ID NO: 1202917 - DNA, 15 bp, Homo sapiens
tctaggtcagtactg

SEQ ID NO: 1202918 - DNA, 15 bp, Homo sapiens
atctaggtcagtact

SEQ ID NO: 1202919 - DNA, 15 bp, Homo sapiens
gatctaggtcagtac

SEQ ID NO: 1202920 - DNA, 15 bp, Homo sapiens
agatctaggtcagta

SEQ ID NO: 1202921 - DNA, 15 bp, Homo sapiens
tagatctaggtcagt

SEQ ID NO: 1202922 - DNA, 15 bp, Homo sapiens
gtagatctaggtcag

SEQ ID NO: 1202923 - DNA, 15 bp, Homo sapiens
ggtagatctaggtca

SEQ ID NO: 1202924 - DNA, 15 bp, Homo sapiens
tggtagatctaggtc

SEQ ID NO: 1202925 - DNA, 15 bp, Homo sapiens
ttggtagatctaggt

SEQ ID NO: 1202926 - DNA, 15 bp, Homo sapiens
gttggtagatctagg

SEQ ID NO: 1202927 - DNA, 15 bp, Homo sapiens
ggttggtagatctag

SEQ ID NO: 1202928 - DNA, 15 bp, Homo sapiens
tggttggtagatcta

SEQ ID NO: 1202929 - DNA, 15 bp, Homo sapiens
atggttggtagatct

SEQ ID NO: 1202930 - DNA, 15 bp, Homo sapiens
aatggttggtagatc

SEQ ID NO: 1202931 - DNA, 15 bp, Homo sapiens
gaatggttggtagat

SEQ ID NO: 1202932 - DNA, 15 bp, Homo sapiens
tgaatggttggtaga

SEQ ID NO: 1202933 - DNA, 15 bp, Homo sapiens
ctgaatggttggtag

SEQ ID NO: 1202934 - DNA, 15 bp, Homo sapiens
tctgaatggttggta

SEQ ID NO: 1202935 - DNA, 15 bp, Homo sapiens
atctgaatggttggt

SEQ ID NO: 1202936 - DNA, 15 bp, Homo sapiens
tatctgaatggttgg

SEQ ID NO: 1202937 - DNA, 15 bp, Homo sapiens
atatctgaatggttg

SEQ ID NO: 1202938 - DNA, 15 bp, Homo sapiens
catatctgaatggtt

SEQ ID NO: 1202939 - DNA, 15 bp, Homo sapiens
ccatatctgaatggt

SEQ ID NO: 1202940 - DNA, 15 bp, Homo sapiens
tccatatctgaatgg

SEQ ID NO: 1202941 - DNA, 15 bp, Homo sapiens
ctccatatctgaatg

SEQ ID NO: 1202942 - DNA, 15 bp, Homo sapiens
gctccatatctgaat

SEQ ID NO: 1202943 - DNA, 15 bp, Homo sapiens
tgctccatatctgaa

SEQ ID NO: 1202944 - DNA, 15 bp, Homo sapiens
gtgctccatatctga

SEQ ID NO: 1202945 - DNA, 15 bp, Homo sapiens
agtgctccatatctg

SEQ ID NO: 1202946 - DNA, 15 bp, Homo sapiens
aagtgctccatatct

SEQ ID NO: 1202947 - DNA, 15 bp, Homo sapiens
taagtgctccatatc

SEQ ID NO: 1202948 - DNA, 15 bp, Homo sapiens
gtaagtgctccatat

SEQ ID NO: 1202949 - DNA, 15 bp, Homo sapiens
agtaagtgctccata

SEQ ID NO: 1202950 - DNA, 15 bp, Homo sapiens
cagtaagtgctccat

SEQ ID NO: 1202951 - DNA, 15 bp, Homo sapiens
gcagtaagtgctcca

SEQ ID NO: 1202952 - DNA, 15 bp, Homo sapiens
tgcagtaagtgctcc

SEQ ID NO: 1202953 - DNA, 15 bp, Homo sapiens
atgcagtaagtgctc

SEQ ID NO: 1202954 - DNA, 15 bp, Homo sapiens
catgcagtaagtgct

SEQ ID NO: 1202955 - DNA, 15 bp, Homo sapiens
gcatgcagtaagtgc

SEQ ID NO: 1202956 - DNA, 15 bp, Homo sapiens
ggcatgcagtaagtg

SEQ ID NO: 1202957 - DNA, 15 bp, Homo sapiens
tggcatgcagtaagt

SEQ ID NO: 1202958 - DNA, 15 bp, Homo sapiens
atggcatgcagtaag

SEQ ID NO: 1202959 - DNA, 15 bp, Homo sapiens
catggcatgcagtaa

SEQ ID NO: 1202960 - DNA, 15 bp, Homo sapiens
tcatggcatgcagta

SEQ ID NO: 1202961 - DNA, 15 bp, Homo sapiens
atcatggcatgcagt

SEQ ID NO: 1202962 - DNA, 15 bp, Homo sapiens
aatcatggcatgcag

SEQ ID NO: 1202963 - DNA, 15 bp, Homo sapiens
gaatcatggcatgca

SEQ ID NO: 1202964 - DNA, 15 bp, Homo sapiens
agaatcatggcatgc

SEQ ID NO: 1202965 - DNA, 15 bp, Homo sapiens
tagaatcatggcatg

SEQ ID NO: 1202966 - DNA, 15 bp, Homo sapiens
gtagaatcatggcat

SEQ ID NO: 1202967 - DNA, 15 bp, Homo sapiens
agtagaatcatggca

SEQ ID NO: 1202968 - DNA, 15 bp, Homo sapiens
aagtagaatcatggc

SEQ ID NO: 1202969 - DNA, 15 bp, Homo sapiens
caagtagaatcatgg

SEQ ID NO: 1202970 - DNA, 15 bp, Homo sapiens
ccaagtagaatcatg

SEQ ID NO: 1202971 - DNA, 15 bp, Homo sapiens
accaagtagaatcat

SEQ ID NO: 1202972 - DNA, 15 bp, Homo sapiens
caccaagtagaatca

SEQ ID NO: 1202973 - DNA, 15 bp, Homo sapiens
gcaccaagtagaatc

SEQ ID NO: 1202974 - DNA, 15 bp, Homo sapiens
ggcaccaagtagaat

SEQ ID NO: 1202975 - DNA, 15 bp, Homo sapiens
aggcaccaagtagaa

SEQ ID NO: 1202976 - DNA, 15 bp, Homo sapiens
taggcaccaagtaga

SEQ ID NO: 1202977 - DNA, 15 bp, Homo sapiens
ttaggcaccaagtag

SEQ ID NO: 1202978 - DNA, 15 bp, Homo sapiens
attaggcaccaagta

SEQ ID NO: 1202979 - DNA, 15 bp, Homo sapiens
aattaggcaccaagt

SEQ ID NO: 1202980 - DNA, 15 bp, Homo sapiens
aaattaggcaccaag

SEQ ID NO: 1202981 - DNA, 15 bp, Homo sapiens
gaaattaggcaccaa

SEQ ID NO: 1202982 - DNA, 15 bp, Homo sapiens
agaaattaggcacca

SEQ ID NO: 1202983 - DNA, 15 bp, Homo sapiens
aagaaattaggcacc

SEQ ID NO: 1202984 - DNA, 15 bp, Homo sapiens
taagaaattaggcac

SEQ ID NO: 1202985 - DNA, 15 bp, Homo sapiens
tataagaaattaggc

SEQ ID NO: 1202986 - DNA, 15 bp, Homo sapiens
gtataagaaattagg

SEQ ID NO: 1202987 - DNA, 15 bp, Homo sapiens
agtataagaaattag

SEQ ID NO: 1202988 - DNA, 15 bp, Homo sapiens
cagtataagaaatta

SEQ ID NO: 1202989 - DNA, 15 bp, Homo sapiens
acagtataagaaatt

SEQ ID NO: 1202990 - DNA, 15 bp, Homo sapiens
gacagtataagaaat

SEQ ID NO: 1202991 - DNA, 15 bp, Homo sapiens
tgacagtataagaaa

SEQ ID NO: 1202992 - DNA, 15 bp, Homo sapiens
ctgacagtataagaa

SEQ ID NO: 1202993 - DNA, 15 bp, Homo sapiens
actgacagtataaga

SEQ ID NO: 1202994 - DNA, 15 bp, Homo sapiens
tactgacagtataag

SEQ ID NO: 1202995 - DNA, 15 bp, Homo sapiens
gtactgacagtataa

SEQ ID NO: 1202996 - DNA, 15 bp, Homo sapiens
agtactgacagtata

SEQ ID NO: 1202997 - DNA, 15 bp, Homo sapiens
aagtactgacagtat

SEQ ID NO: 1202998 - DNA, 15 bp, Homo sapiens
gaagtactgacagta

SEQ ID NO: 1202999 - DNA, 15 bp, Homo sapiens
tgaagtactgacagt

SEQ ID NO: 1203000 - DNA, 15 bp, Homo sapiens
ttgaagtactgacag

SEQ ID NO: 1203001 - DNA, 15 bp, Homo sapiens
attgaagtactgaca

SEQ ID NO: 1203002 - DNA, 15 bp, Homo sapiens
gattgaagtactgac

SEQ ID NO: 1203003 - DNA, 15 bp, Homo sapiens
agattgaagtactga

SEQ ID NO: 1203004 - DNA, 15 bp, Homo sapiens
cagattgaagtactg

SEQ ID NO: 1203005 - DNA, 15 bp, Homo sapiens
ccagattgaagtact

SEQ ID NO: 1203006 - DNA, 15 bp, Homo sapiens
accagattgaagtac

SEQ ID NO: 1203007 - DNA, 15 bp, Homo sapiens
caccagattgaagta

SEQ ID NO: 1203008 - DNA, 15 bp, Homo sapiens
tcaccagattgaagt

SEQ ID NO: 1203009 - DNA, 15 bp, Homo sapiens
ctcaccagattgaag

SEQ ID NO: 1203010 - DNA, 15 bp, Homo sapiens
actcaccagattgaa

SEQ ID NO: 1203011 - DNA, 15 bp, Homo sapiens
gactcaccagattga

SEQ ID NO: 1203012 - DNA, 15 bp, Homo sapiens
agactcaccagattg

SEQ ID NO: 1203013 - DNA, 15 bp, Homo sapiens
tagactcaccagatt

SEQ ID NO: 1203014 - DNA, 15 bp, Homo sapiens
ttagactcaccagat

SEQ ID NO: 1203015 - DNA, 15 bp, Homo sapiens
tttagactcaccaga

SEQ ID NO: 1203016 - DNA, 15 bp, Homo sapiens
gtttagactcaccag

SEQ ID NO: 1203017 - DNA, 15 bp, Homo sapiens
agtttagactcacca

SEQ ID NO: 1203018 - DNA, 15 bp, Homo sapiens
cagtttagactcacc

SEQ ID NO: 1203019 - DNA, 15 bp, Homo sapiens
tcagtttagactcac

SEQ ID NO: 1203020 - DNA, 15 bp, Homo sapiens
ttcagtttagactca

SEQ ID NO: 1203021 - DNA, 15 bp, Homo sapiens
attcagtttagactc

SEQ ID NO: 1203022 - DNA, 15 bp, Homo sapiens
tattcagtttagact

SEQ ID NO: 1203023 - DNA, 15 bp, Homo sapiens
atattcagtttagac

SEQ ID NO: 1203024 - DNA, 15 bp, Homo sapiens
catattcagtttaga

SEQ ID NO: 1203025 - DNA, 15 bp, Homo sapiens
gcatattcagtttag

SEQ ID NO: 1203026 - DNA, 15 bp, Homo sapiens
agcatattcagttta

SEQ ID NO: 1203027 - DNA, 15 bp, Homo sapiens
gagcatattcagttt

SEQ ID NO: 1203028 - DNA, 15 bp, Homo sapiens
ggagcatattcagtt

SEQ ID NO: 1203029 - DNA, 15 bp, Homo sapiens
aggagcatattcagt

SEQ ID NO: 1203030 - DNA, 15 bp, Homo sapiens
aaggagcatattcag

SEQ ID NO: 1203031 - DNA, 15 bp, Homo sapiens
gaaggagcatattca

SEQ ID NO: 1203032 - DNA, 15 bp, Homo sapiens
ggaaggagcatattc

SEQ ID NO: 1203033 - DNA, 15 bp, Homo sapiens
gggaaggagcatatt

SEQ ID NO: 1203034 - DNA, 15 bp, Homo sapiens
ggggaaggagcatat

SEQ ID NO: 1203035 - DNA, 15 bp, Homo sapiens
aggggaaggagcata

SEQ ID NO: 1203036 - DNA, 15 bp, Homo sapiens
aaggggaaggagcat

SEQ ID NO: 1203037 - DNA, 15 bp, Homo sapiens
aaaggggaaggagca

SEQ ID NO: 1203038 - DNA, 15 bp, Homo sapiens
gaaaggggaaggagc

SEQ ID NO: 1203039 - DNA, 15 bp, Homo sapiens
agaaaggggaaggag

SEQ ID NO: 1203040 - DNA, 15 bp, Homo sapiens
gagaaaggggaagga

SEQ ID NO: 1203041 - DNA, 15 bp, Homo sapiens
tgagaaaggggaagg

SEQ ID NO: 1203042 - DNA, 15 bp, Homo sapiens
atgagaaaggggaag

SEQ ID NO: 1203043 - DNA, 15 bp, Homo sapiens
gatgagaaaggggaa

SEQ ID NO: 1203044 - DNA, 15 bp, Homo sapiens
ggatgagaaagggga

SEQ ID NO: 1203045 - DNA, 15 bp, Homo sapiens
gggatgagaaagggg

SEQ ID NO: 1203046 - DNA, 15 bp, Homo sapiens
tgggatgagaaaggg

SEQ ID NO: 1203047 - DNA, 15 bp, Homo sapiens
ttgggatgagaaagg

SEQ ID NO: 1203048 - DNA, 15 bp, Homo sapiens
cttgggatgagaaag

SEQ ID NO: 1203049 - DNA, 15 bp, Homo sapiens
ccttgggatgagaaa

SEQ ID NO: 1203050 - DNA, 15 bp, Homo sapiens
accttgggatgagaa

SEQ ID NO: 1203051 - DNA, 15 bp, Homo sapiens
aaccttgggatgaga

SEQ ID NO: 1203052 - DNA, 15 bp, Homo sapiens
taaccttgggatgag

SEQ ID NO: 1203053 - DNA, 15 bp, Homo sapiens
gtaaccttgggatga

SEQ ID NO: 1203054 - DNA, 15 bp, Homo sapiens
agtaaccttgggatg

SEQ ID NO: 1203055 - DNA, 15 bp, Homo sapiens
gagtaaccttgggat

SEQ ID NO: 1203056 - DNA, 15 bp, Homo sapiens
agagtaaccttggga

SEQ ID NO: 1203057 - DNA, 15 bp, Homo sapiens
tagagtaaccttggg

SEQ ID NO: 1203058 - DNA, 15 bp, Homo sapiens
gtagagtaaccttgg

SEQ ID NO: 1203059 - DNA, 15 bp, Homo sapiens
tgtagagtaaccttg

SEQ ID NO: 1203060 - DNA, 15 bp, Homo sapiens
gtgtagagtaacctt

SEQ ID NO: 1203061 - DNA, 15 bp, Homo sapiens
agtgtagagtaacct

SEQ ID NO: 1203062 - DNA, 15 bp, Homo sapiens
aagtgtagagtaacc

SEQ ID NO: 1203063 - DNA, 15 bp, Homo sapiens
gaagtgtagagtaac

SEQ ID NO: 1203064 - DNA, 15 bp, Homo sapiens
ggaagtgtagagtaa

SEQ ID NO: 1203065 - DNA, 15 bp, Homo sapiens
tggaagtgtagagta

SEQ ID NO: 1203066 - DNA, 15 bp, Homo sapiens
gtggaagtgtagagt

SEQ ID NO: 1203067 - DNA, 15 bp, Homo sapiens
agtggaagtgtagag

SEQ ID NO: 1203068 - DNA, 15 bp, Homo sapiens
aagtggaagtgtaga

SEQ ID NO: 1203069 - DNA, 15 bp, Homo sapiens
aaagtggaagtgtag

SEQ ID NO: 1203070 - DNA, 15 bp, Homo sapiens
caaagtggaagtgta

SEQ ID NO: 1203071 - DNA, 15 bp, Homo sapiens
gcaaagtggaagtgt

SEQ ID NO: 1203072 - DNA, 15 bp, Homo sapiens
ggcaaagtggaagtg

SEQ ID NO: 1203073 - DNA, 15 bp, Homo sapiens
tggcaaagtggaagt

SEQ ID NO: 1203074 - DNA, 15 bp, Homo sapiens
gtggcaaagtggaag

SEQ ID NO: 1203075 - DNA, 15 bp, Homo sapiens
agtggcaaagtggaa

SEQ ID NO: 1203076 - DNA, 15 bp, Homo sapiens
aagtggcaaagtgga

SEQ ID NO: 1203077 - DNA, 15 bp, Homo sapiens
aaagtggcaaagtgg

SEQ ID NO: 1203078 - DNA, 15 bp, Homo sapiens
gaaagtggcaaagtg

SEQ ID NO: 1203079 - DNA, 15 bp, Homo sapiens
tgaaagtggcaaagt

SEQ ID NO: 1203080 - DNA, 15 bp, Homo sapiens
atgaaagtggcaaag

SEQ ID NO: 1203081 - DNA, 15 bp, Homo sapiens
gatgaaagtggcaaa

SEQ ID NO: 1203082 - DNA, 15 bp, Homo sapiens
tgatgaaagtggcaa

SEQ ID NO: 1203083 - DNA, 15 bp, Homo sapiens
ctgatgaaagtggca

SEQ ID NO: 1203084 - DNA, 15 bp, Homo sapiens
actgatgaaagtggc

SEQ ID NO: 1203085 - DNA, 15 bp, Homo sapiens
aactgatgaaagtgg

SEQ ID NO: 1203086 - DNA, 15 bp, Homo sapiens
taactgatgaaagtg

SEQ ID NO: 1203087 - DNA, 15 bp, Homo sapiens
gtaactgatgaaagt

SEQ ID NO: 1203088 - DNA, 15 bp, Homo sapiens
agtaactgatgaaag

SEQ ID NO: 1203089 - DNA, 15 bp, Homo sapiens
cagtaactgatgaaa

SEQ ID NO: 1203090 - DNA, 15 bp, Homo sapiens
acagtaactgatgaa

SEQ ID NO: 1203091 - DNA, 15 bp, Homo sapiens
cacagtaactgatga

SEQ ID NO: 1203092 - DNA, 15 bp, Homo sapiens
acacagtaactgatg

SEQ ID NO: 1203093 - DNA, 15 bp, Homo sapiens
aacacagtaactgat

SEQ ID NO: 1203094 - DNA, 15 bp, Homo sapiens
gaacacagtaactga

SEQ ID NO: 1203095 - DNA, 15 bp, Homo sapiens
ggaacacagtaactg

SEQ ID NO: 1203096 - DNA, 15 bp, Homo sapiens
tggaacacagtaact

SEQ ID NO: 1203097 - DNA, 15 bp, Homo sapiens
ttggaacacagtaac

SEQ ID NO: 1203098 - DNA, 15 bp, Homo sapiens
gttggaacacagtaa

SEQ ID NO: 1203099 - DNA, 15 bp, Homo sapiens
agttggaacacagta

SEQ ID NO: 1203100 - DNA, 15 bp, Homo sapiens
aagttggaacacagt

SEQ ID NO: 1203101 - DNA, 15 bp, Homo sapiens
aaagttggaacacag

SEQ ID NO: 1203102 - DNA, 15 bp, Homo sapiens
gaaagttggaacaca

SEQ ID NO: 1203103 - DNA, 15 bp, Homo sapiens
ggaaagttggaacac

SEQ ID NO: 1203104 - DNA, 15 bp, Homo sapiens
tggaaagttggaaca

SEQ ID NO: 1203105 - DNA, 15 bp, Homo sapiens
ctggaaagttggaac

SEQ ID NO: 1203106 - DNA, 15 bp, Homo sapiens
tctggaaagttggaa

SEQ ID NO: 1203107 - DNA, 15 bp, Homo sapiens
ctctggaaagttgga

SEQ ID NO: 1203108 - DNA, 15 bp, Homo sapiens
actctggaaagttgg

SEQ ID NO: 1203109 - DNA, 15 bp, Homo sapiens
aactctggaaagttg

SEQ ID NO: 1203110 - DNA, 15 bp, Homo sapiens
taactctggaaagtt

SEQ ID NO: 1203111 - DNA, 15 bp, Homo sapiens
ctaactctggaaagt

SEQ ID NO: 1203112 - DNA, 15 bp, Homo sapiens
tctaactctggaaag

SEQ ID NO: 1203113 - DNA, 15 bp, Homo sapiens
ttctaactctggaaa

SEQ ID NO: 1203114 - DNA, 15 bp, Homo sapiens
tttctaactctggaa

SEQ ID NO: 1203115 - DNA, 15 bp, Homo sapiens
ctttctaactctgga

SEQ ID NO: 1203116 - DNA, 15 bp, Homo sapiens
actttctaactctgg

SEQ ID NO: 1203117 - DNA, 15 bp, Homo sapiens
gactttctaactctg

SEQ ID NO: 1203118 - DNA, 15 bp, Homo sapiens
tgactttctaactct

SEQ ID NO: 1203119 - DNA, 15 bp, Homo sapiens
ctgactttctaactc

SEQ ID NO: 1203120 - DNA, 15 bp, Homo sapiens
tctgactttctaact

SEQ ID NO: 1203121 - DNA, 15 bp, Homo sapiens
gtctgactttctaac

SEQ ID NO: 1203122 - DNA, 15 bp, Homo sapiens
tgtctgactttctaa

SEQ ID NO: 1203123 - DNA, 15 bp, Homo sapiens
atgtctgactttcta

SEQ ID NO: 1203124 - DNA, 15 bp, Homo sapiens
gatgtctgactttct

SEQ ID NO: 1203125 - DNA, 15 bp, Homo sapiens
agatgtctgactttc

SEQ ID NO: 1203126 - DNA, 15 bp, Homo sapiens
aagatgtctgacttt

SEQ ID NO: 1203127 - DNA, 15 bp, Homo sapiens
aaagatgtctgactt

SEQ ID NO: 1203128 - DNA, 15 bp, Homo sapiens
taaagatgtctgact

SEQ ID NO: 1203129 - DNA, 15 bp, Homo sapiens
ataaagatgtctgac

SEQ ID NO: 1203130 - DNA, 15 bp, Homo sapiens
gataaagatgtctga

SEQ ID NO: 1203131 - DNA, 15 bp, Homo sapiens
agataaagatgtctg

SEQ ID NO: 1203132 - DNA, 15 bp, Homo sapiens
aagataaagatgtct

SEQ ID NO: 1203133 - DNA, 15 bp, Homo sapiens
aaagataaagatgtc

SEQ ID NO: 1203134 - DNA, 15 bp, Homo sapiens
aaaagataaagatgt

SEQ ID NO: 1203135 - DNA, 15 bp, Homo sapiens
gaaaagataaagatg

SEQ ID NO: 1203136 - DNA, 15 bp, Homo sapiens
agaaaagataaagat

SEQ ID NO: 1203137 - DNA, 15 bp, Homo sapiens
gagaaaagataaaga

SEQ ID NO: 1203138 - DNA, 15 bp, Homo sapiens
tgagaaaagataaag

SEQ ID NO: 1203139 - DNA, 15 bp, Homo sapiens
gtgagaaaagataaa

SEQ ID NO: 1203140 - DNA, 15 bp, Homo sapiens
tgtgagaaaagataa

SEQ ID NO: 1203141 - DNA, 15 bp, Homo sapiens
ctgtgagaaaagata

SEQ ID NO: 1203142 - DNA, 15 bp, Homo sapiens
actgtgagaaaagat

SEQ ID NO: 1203143 - DNA, 15 bp, Homo sapiens
cactgtgagaaaaga

SEQ ID NO: 1203144 - DNA, 15 bp, Homo sapiens
gcactgtgagaaaag

SEQ ID NO: 1203145 - DNA, 15 bp, Homo sapiens
tgcactgtgagaaaa

SEQ ID NO: 1203146 - DNA, 15 bp, Homo sapiens
atgcactgtgagaaa

SEQ ID NO: 1203147 - DNA, 15 bp, Homo sapiens
gatgcactgtgagaa

SEQ ID NO: 1203148 - DNA, 15 bp, Homo sapiens
tgatgcactgtgaga

SEQ ID NO: 1203149 - DNA, 15 bp, Homo sapiens
atgatgcactgtgag

SEQ ID NO: 1203150 - DNA, 15 bp, Homo sapiens
aatgatgcactgtga

SEQ ID NO: 1203151 - DNA, 15 bp, Homo sapiens
aaatgatgcactgtg

SEQ ID NO: 1203152 - DNA, 15 bp, Homo sapiens
caaatgatgcactgt

SEQ ID NO: 1203153 - DNA, 15 bp, Homo sapiens
gcaaatgatgcactg

SEQ ID NO: 1203154 - DNA, 15 bp, Homo sapiens
ggcaaatgatgcact

SEQ ID NO: 1203155 - DNA, 15 bp, Homo sapiens
tggcaaatgatgcac

SEQ ID NO: 1203156 - DNA, 15 bp, Homo sapiens
ctggcaaatgatgca

SEQ ID NO: 1203157 - DNA, 15 bp, Homo sapiens
cctggcaaatgatgc

SEQ ID NO: 1203158 - DNA, 15 bp, Homo sapiens
acctggcaaatgatg

SEQ ID NO: 1203159 - DNA, 15 bp, Homo sapiens
gacctggcaaatgat

SEQ ID NO: 1203160 - DNA, 15 bp, Homo sapiens
ggacctggcaaatga

SEQ ID NO: 1203161 - DNA, 15 bp, Homo sapiens
aggacctggcaaatg

SEQ ID NO: 1203162 - DNA, 15 bp, Homo sapiens
caggacctggcaaat

SEQ ID NO: 1203163 - DNA, 15 bp, Homo sapiens
acaggacctggcaaa

SEQ ID NO: 1203164 - DNA, 15 bp, Homo sapiens
cacaggacctggcaa

SEQ ID NO: 1203165 - DNA, 15 bp, Homo sapiens
gcacaggacctggca

SEQ ID NO: 1203166 - DNA, 15 bp, Homo sapiens
tgcacaggacctggc

SEQ ID NO: 1203167 - DNA, 15 bp, Homo sapiens
ctgcacaggacctgg

SEQ ID NO: 1203168 - DNA, 15 bp, Homo sapiens
actgcacaggacctg

SEQ ID NO: 1203169 - DNA, 15 bp, Homo sapiens
aactgcacaggacct

SEQ ID NO: 1203170 - DNA, 15 bp, Homo sapiens
gaactgcacaggacc

SEQ ID NO: 1203171 - DNA, 15 bp, Homo sapiens
ggaactgcacaggac

SEQ ID NO: 1203172 - DNA, 15 bp, Homo sapiens
gggaactgcacagga

SEQ ID NO: 1203173 - DNA, 15 bp, Homo sapiens
agggaactgcacagg

SEQ ID NO: 1203174 - DNA, 15 bp, Homo sapiens
gagggaactgcacag

SEQ ID NO: 1203175 - DNA, 15 bp, Homo sapiens
tgagggaactgcaca

SEQ ID NO: 1203176 - DNA, 15 bp, Homo sapiens
ttgagggaactgcac

SEQ ID NO: 1203177 - DNA, 15 bp, Homo sapiens
attgagggaactgca

SEQ ID NO: 1203178 - DNA, 15 bp, Homo sapiens
tattgagggaactgc

SEQ ID NO: 1203179 - DNA, 15 bp, Homo sapiens
ttattgagggaactg

SEQ ID NO: 1203180 - DNA, 15 bp, Homo sapiens
gttattgagggaact

SEQ ID NO: 1203181 - DNA, 15 bp, Homo sapiens
cgttattgagggaac

SEQ ID NO: 1203182 - DNA, 15 bp, Homo sapiens
acgttattgagggaa

SEQ ID NO: 1203183 - DNA, 15 bp, Homo sapiens
gacgttattgaggga

SEQ ID NO: 1203184 - DNA, 15 bp, Homo sapiens
ggacgttattgaggg

SEQ ID NO: 1203185 - DNA, 15 bp, Homo sapiens
aggacgttattgagg

SEQ ID NO: 1203186 - DNA, 15 bp, Homo sapiens
gaggacgttattgag

SEQ ID NO: 1203187 - DNA, 15 bp, Homo sapiens
agaggacgttattga

SEQ ID NO: 1203188 - DNA, 15 bp, Homo sapiens
gagaggacgttattg

SEQ ID NO: 1203189 - DNA, 15 bp, Homo sapiens
agagaggacgttatt

SEQ ID NO: 1203190 - DNA, 15 bp, Homo sapiens
cagagaggacgttat

SEQ ID NO: 1203191 - DNA, 15 bp, Homo sapiens
acagagaggacgtta

SEQ ID NO: 1203192 - DNA, 15 bp, Homo sapiens
aacagagaggacgtt

SEQ ID NO: 1203193 - DNA, 15 bp, Homo sapiens
aaacagagaggacgt

SEQ ID NO: 1203194 - DNA, 15 bp, Homo sapiens
aaaacagagaggacg

SEQ ID NO: 1203195 - DNA, 15 bp, Homo sapiens
gaaaacagagaggac

SEQ ID NO: 1203196 - DNA, 15 bp, Homo sapiens
gagaaaacagagagg

SEQ ID NO: 1203197 - DNA, 15 bp, Homo sapiens
agagaaaacagagag

SEQ ID NO: 1203198 - DNA, 15 bp, Homo sapiens
aagagaaaacagaga

SEQ ID NO: 1203199 - DNA, 15 bp, Homo sapiens
aaagagaaaacagag

SEQ ID NO: 1203200 - DNA, 15 bp, Homo sapiens
gaaagagaaaacaga

SEQ ID NO: 1203201 - DNA, 15 bp, Homo sapiens
ggggaaagagaaaac

SEQ ID NO: 1203202 - DNA, 15 bp, Homo sapiens
tggggaaagagaaaa

SEQ ID NO: 1203203 - DNA, 15 bp, Homo sapiens
gtggggaaagagaaa

SEQ ID NO: 1203204 - DNA, 15 bp, Homo sapiens
agtggggaaagagaa

SEQ ID NO: 1203205 - DNA, 15 bp, Homo sapiens
tagtggggaaagaga

SEQ ID NO: 1203206 - DNA, 15 bp, Homo sapiens
atagtggggaaagag

SEQ ID NO: 1203207 - DNA, 15 bp, Homo sapiens
aatagtggggaaaga

SEQ ID NO: 1203208 - DNA, 15 bp, Homo sapiens
gaatagtggggaaag

SEQ ID NO: 1203209 - DNA, 15 bp, Homo sapiens
agaatagtggggaaa

SEQ ID NO: 1203210 - DNA, 15 bp, Homo sapiens
gagaatagtggggaa

SEQ ID NO: 1203211 - DNA, 15 bp, Homo sapiens
tgagaatagtgggga

SEQ ID NO: 1203212 - DNA, 15 bp, Homo sapiens
atgagaatagtgggg

SEQ ID NO: 1203213 - DNA, 15 bp, Homo sapiens
catgagaatagtggg

SEQ ID NO: 1203214 - DNA, 15 bp, Homo sapiens
gcatgagaatagtgg

SEQ ID NO: 1203215 - DNA, 15 bp, Homo sapiens
ggcatgagaatagtg

SEQ ID NO: 1203216 - DNA, 15 bp, Homo sapiens
tggcatgagaatagt

SEQ ID NO: 1203217 - DNA, 15 bp, Homo sapiens
gtggcatgagaatag

SEQ ID NO: 1203218 - DNA, 15 bp, Homo sapiens
agtggcatgagaata

SEQ ID NO: 1203219 - DNA, 15 bp, Homo sapiens
cagtggcatgagaat

SEQ ID NO: 1203220 - DNA, 15 bp, Homo sapiens
tcagtggcatgagaa

SEQ ID NO: 1203221 - DNA, 15 bp, Homo sapiens
gtcagtggcatgaga

SEQ ID NO: 1203222 - DNA, 15 bp, Homo sapiens
tgtcagtggcatgag

SEQ ID NO: 1203223 - DNA, 15 bp, Homo sapiens
atgtcagtggcatga

SEQ ID NO: 1203224 - DNA, 15 bp, Homo sapiens
gatgtcagtggcatg

SEQ ID NO: 1203225 - DNA, 15 bp, Homo sapiens
agatgtcagtggcat

SEQ ID NO: 1203226 - DNA, 15 bp, Homo sapiens
gagatgtcagtggca

SEQ ID NO: 1203227 - DNA, 15 bp, Homo sapiens
agagatgtcagtggc

SEQ ID NO: 1203228 - DNA, 15 bp, Homo sapiens
gagagatgtcagtgg

SEQ ID NO: 1203229 - DNA, 15 bp, Homo sapiens
tgagagatgtcagtg

SEQ ID NO: 1203230 - DNA, 15 bp, Homo sapiens
ttgagagatgtcagt

SEQ ID NO: 1203231 - DNA, 15 bp, Homo sapiens
attgagagatgtcag

SEQ ID NO: 1203232 - DNA, 15 bp, Homo sapiens
cattgagagatgtca

SEQ ID NO: 1203233 - DNA, 15 bp, Homo sapiens
ccattgagagatgtc

SEQ ID NO: 1203234 - DNA, 15 bp, Homo sapiens
tccattgagagatgt

SEQ ID NO: 1203235 - DNA, 15 bp, Homo sapiens
gtccattgagagatg

SEQ ID NO: 1203236 - DNA, 15 bp, Homo sapiens
tgtccattgagagat

SEQ ID NO: 1203237 - DNA, 15 bp, Homo sapiens
ttgtccattgagaga

SEQ ID NO: 1203238 - DNA, 15 bp, Homo sapiens
gttgtccattgagag

SEQ ID NO: 1203239 - DNA, 15 bp, Homo sapiens
agttgtccattgaga

SEQ ID NO: 1203240 - DNA, 15 bp, Homo sapiens
aagttgtccattgag

SEQ ID NO: 1203241 - DNA, 15 bp, Homo sapiens
taagttgtccattga

SEQ ID NO: 1203242 - DNA, 15 bp, Homo sapiens
ctaagttgtccattg

SEQ ID NO: 1203243 - DNA, 15 bp, Homo sapiens
actaagttgtccatt

SEQ ID NO: 1203244 - DNA, 15 bp, Homo sapiens
tactaagttgtccat

SEQ ID NO: 1203245 - DNA, 15 bp, Homo sapiens
ctactaagttgtcca

SEQ ID NO: 1203246 - DNA, 15 bp, Homo sapiens
cctactaagttgtcc

SEQ ID NO: 1203247 - DNA, 15 bp, Homo sapiens
acctactaagttgtc

SEQ ID NO: 1203248 - DNA, 15 bp, Homo sapiens
aacctactaagttgt

SEQ ID NO: 1203249 - DNA, 15 bp, Homo sapiens
gaacctactaagttg

SEQ ID NO: 1203250 - DNA, 15 bp, Homo sapiens
ggaacctactaagtt

SEQ ID NO: 1203251 - DNA, 15 bp, Homo sapiens
gggaacctactaagt

SEQ ID NO: 1203252 - DNA, 15 bp, Homo sapiens
agggaacctactaag

SEQ ID NO: 1203253 - DNA, 15 bp, Homo sapiens
cagggaacctactaa

SEQ ID NO: 1203254 - DNA, 15 bp, Homo sapiens
gcagggaacctacta

SEQ ID NO: 1203255 - DNA, 15 bp, Homo sapiens
ggcagggaacctact

SEQ ID NO: 1203256 - DNA, 15 bp, Homo sapiens
aggcagggaacctac

SEQ ID NO: 1203257 - DNA, 15 bp, Homo sapiens
gaggcagggaaccta

SEQ ID NO: 1203258 - DNA, 15 bp, Homo sapiens
ggaggcagggaacct

SEQ ID NO: 1203259 - DNA, 15 bp, Homo sapiens
aggaggcagggaacc

SEQ ID NO: 1203260 - DNA, 15 bp, Homo sapiens
aaggaggcagggaac

SEQ ID NO: 1203261 - DNA, 15 bp, Homo sapiens
gaaggaggcagggaa

SEQ ID NO: 1203262 - DNA, 15 bp, Homo sapiens
agaaggaggcaggga

SEQ ID NO: 1203263 - DNA, 15 bp, Homo sapiens
gagaaggaggcaggg

SEQ ID NO: 1203264 - DNA, 15 bp, Homo sapiens
agagaaggaggcagg

SEQ ID NO: 1203265 - DNA, 15 bp, Homo sapiens
aagagaaggaggcag

SEQ ID NO: 1203266 - DNA, 15 bp, Homo sapiens
gaagagaaggaggca

SEQ ID NO: 1203267 - DNA, 15 bp, Homo sapiens
ggaagagaaggaggc

SEQ ID NO: 1203268 - DNA, 15 bp, Homo sapiens
gggaagagaaggagg

SEQ ID NO: 1203269 - DNA, 15 bp, Homo sapiens
tgggaagagaaggag

SEQ ID NO: 1203270 - DNA, 15 bp, Homo sapiens
gtgggaagagaagga

SEQ ID NO: 1203271 - DNA, 15 bp, Homo sapiens
ggtgggaagagaagg

SEQ ID NO: 1203272 - DNA, 15 bp, Homo sapiens
gggtgggaagagaag

SEQ ID NO: 1203273 - DNA, 15 bp, Homo sapiens
ggggtgggaagagaa

SEQ ID NO: 1203274 - DNA, 15 bp, Homo sapiens
tggggtgggaagaga

SEQ ID NO: 1203275 - DNA, 15 bp, Homo sapiens
ctggggtgggaagag

SEQ ID NO: 1203276 - DNA, 15 bp, Homo sapiens
actggggtgggaaga

SEQ ID NO: 1203277 - DNA, 15 bp, Homo sapiens
gactggggtgggaag

SEQ ID NO: 1203278 - DNA, 15 bp, Homo sapiens
agactggggtgggaa

SEQ ID NO: 1203279 - DNA, 15 bp, Homo sapiens
tagactggggtggga

SEQ ID NO: 1203280 - DNA, 15 bp, Homo sapiens
ttagactggggtggg

SEQ ID NO: 1203281 - DNA, 15 bp, Homo sapiens
attagactggggtgg

SEQ ID NO: 1203282 - DNA, 15 bp, Homo sapiens
gattagactggggtg

SEQ ID NO: 1203283 - DNA, 15 bp, Homo sapiens
agattagactggggt

SEQ ID NO: 1203284 - DNA, 15 bp, Homo sapiens
tagattagactgggg

SEQ ID NO: 1203285 - DNA, 15 bp, Homo sapiens
atagattagactggg

SEQ ID NO: 1203286 - DNA, 15 bp, Homo sapiens
tatagattagactgg

SEQ ID NO: 1203287 - DNA, 15 bp, Homo sapiens
atatagattagactg

SEQ ID NO: 1203288 - DNA, 15 bp, Homo sapiens
catatagattagact

SEQ ID NO: 1203289 - DNA, 15 bp, Homo sapiens
gcatatagattagac

SEQ ID NO: 1203290 - DNA, 15 bp, Homo sapiens
agcatatagattaga

SEQ ID NO: 1203291 - DNA, 15 bp, Homo sapiens
cagcatatagattag

SEQ ID NO: 1203292 - DNA, 15 bp, Homo sapiens
gcagcatatagatta

SEQ ID NO: 1203293 - DNA, 15 bp, Homo sapiens
agcagcatatagatt

SEQ ID NO: 1203294 - DNA, 15 bp, Homo sapiens
cagcagcatatagat

SEQ ID NO: 1203295 - DNA, 15 bp, Homo sapiens
gcagcagcatataga

SEQ ID NO: 1203296 - DNA, 15 bp, Homo sapiens
ggcagcagcatatag

SEQ ID NO: 1203297 - DNA, 15 bp, Homo sapiens
tggcagcagcatata

SEQ ID NO: 1203298 - DNA, 15 bp, Homo sapiens
gtggcagcagcatat

SEQ ID NO: 1203299 - DNA, 15 bp, Homo sapiens
tgtggcagcagcata

SEQ ID NO: 1203300 - DNA, 15 bp, Homo sapiens
atgtggcagcagcat

SEQ ID NO: 1203301 - DNA, 15 bp, Homo sapiens
gatgtggcagcagca

SEQ ID NO: 1203302 - DNA, 15 bp, Homo sapiens
tgatgtggcagcagc

SEQ ID NO: 1203303 - DNA, 15 bp, Homo sapiens
ctgatgtggcagcag

SEQ ID NO: 1203304 - DNA, 15 bp, Homo sapiens
actgatgtggcagca

SEQ ID NO: 1203305 - DNA, 15 bp, Homo sapiens
gactgatgtggcagc

SEQ ID NO: 1203306 - DNA, 15 bp, Homo sapiens
agactgatgtggcag

SEQ ID NO: 1203307 - DNA, 15 bp, Homo sapiens
aagactgatgtggca

SEQ ID NO: 1203308 - DNA, 15 bp, Homo sapiens
gaagactgatgtggc

SEQ ID NO: 1203309 - DNA, 15 bp, Homo sapiens
ggaagactgatgtgg

SEQ ID NO: 1203310 - DNA, 15 bp, Homo sapiens
aggaagactgatgtg

SEQ ID NO: 1203311 - DNA, 15 bp, Homo sapiens
taggaagactgatgt

SEQ ID NO: 1203312 - DNA, 15 bp, Homo sapiens
ttaggaagactgatg

SEQ ID NO: 1203313 - DNA, 15 bp, Homo sapiens
attaggaagactgat

SEQ ID NO: 1203314 - DNA, 15 bp, Homo sapiens
gattaggaagactga

SEQ ID NO: 1203315 - DNA, 15 bp, Homo sapiens
ggattaggaagactg

SEQ ID NO: 1203316 - DNA, 15 bp, Homo sapiens
tggattaggaagact

SEQ ID NO: 1203317 - DNA, 15 bp, Homo sapiens
gtggattaggaagac

SEQ ID NO: 1203318 - DNA, 15 bp, Homo sapiens
ggtggattaggaaga

SEQ ID NO: 1203319 - DNA, 15 bp, Homo sapiens
tggtggattaggaag

SEQ ID NO: 1203320 - DNA, 15 bp, Homo sapiens
ttggtggattaggaa

SEQ ID NO: 1203321 - DNA, 15 bp, Homo sapiens
tttggtggattagga

SEQ ID NO: 1203322 - DNA, 15 bp, Homo sapiens
ctttggtggattagg

SEQ ID NO: 1203323 - DNA, 15 bp, Homo sapiens
actttggtggattag

SEQ ID NO: 1203324 - DNA, 15 bp, Homo sapiens
cactttggtggatta

SEQ ID NO: 1203325 - DNA, 15 bp, Homo sapiens
tcactttggtggatt

SEQ ID NO: 1203326 - DNA, 15 bp, Homo sapiens
atcactttggtggat

SEQ ID NO: 1203327 - DNA, 15 bp, Homo sapiens
catcactttggtgga

SEQ ID NO: 1203328 - DNA, 15 bp, Homo sapiens
acatcactttggtgg

SEQ ID NO: 1203329 - DNA, 15 bp, Homo sapiens
gacatcactttggtg

SEQ ID NO: 1203330 - DNA, 15 bp, Homo sapiens
tgacatcactttggt

SEQ ID NO: 1203331 - DNA, 15 bp, Homo sapiens
ctgacatcactttgg

SEQ ID NO: 1203332 - DNA, 15 bp, Homo sapiens
tctgacatcactttg

SEQ ID NO: 1203333 - DNA, 15 bp, Homo sapiens
ttctgacatcacttt

SEQ ID NO: 1203334 - DNA, 15 bp, Homo sapiens
attctgacatcactt

SEQ ID NO: 1203335 - DNA, 15 bp, Homo sapiens
tattctgacatcact

SEQ ID NO: 1203336 - DNA, 15 bp, Homo sapiens
ttattctgacatcac

SEQ ID NO: 1203337 - DNA, 15 bp, Homo sapiens
tttattctgacatca

SEQ ID NO: 1203338 - DNA, 15 bp, Homo sapiens
ttttattctgacatc

SEQ ID NO: 1203339 - DNA, 15 bp, Homo sapiens
cttttattctgacat

SEQ ID NO: 1203340 - DNA, 15 bp, Homo sapiens
tcttttattctgaca

SEQ ID NO: 1203341 - DNA, 15 bp, Homo sapiens
ttcttttattctgac

SEQ ID NO: 1203342 - DNA, 15 bp, Homo sapiens
attcttttattctga

SEQ ID NO: 1203343 - DNA, 15 bp, Homo sapiens
cattcttttattctg

SEQ ID NO: 1203344 - DNA, 15 bp, Homo sapiens
ccattcttttattct

SEQ ID NO: 1203345 - DNA, 15 bp, Homo sapiens
accattcttttattc

SEQ ID NO: 1203346 - DNA, 15 bp, Homo sapiens
caccattcttttatt

SEQ ID NO: 1203347 - DNA, 15 bp, Homo sapiens
gcaccattcttttat

SEQ ID NO: 1203348 - DNA, 15 bp, Homo sapiens
tgcaccattctttta

SEQ ID NO: 1203349 - DNA, 15 bp, Homo sapiens
atgcaccattctttt

SEQ ID NO: 1203350 - DNA, 15 bp, Homo sapiens
aatgcaccattcttt

SEQ ID NO: 1203351 - DNA, 15 bp, Homo sapiens
aaatgcaccattctt

SEQ ID NO: 1203352 - DNA, 15 bp, Homo sapiens
caaatgcaccattct

SEQ ID NO: 1203353 - DNA, 15 bp, Homo sapiens
tcaaatgcaccattc

SEQ ID NO: 1203354 - DNA, 15 bp, Homo sapiens
ttcaaatgcaccatt

SEQ ID NO: 1203355 - DNA, 15 bp, Homo sapiens
cttcaaatgcaccat

SEQ ID NO: 1203356 - DNA, 15 bp, Homo sapiens
ccttcaaatgcacca

SEQ ID NO: 1203357 - DNA, 15 bp, Homo sapiens
cccttcaaatgcacc

SEQ ID NO: 1203358 - DNA, 15 bp, Homo sapiens
ccccttcaaatgcac

SEQ ID NO: 1203359 - DNA, 15 bp, Homo sapiens
gccccttcaaatgca

SEQ ID NO: 1203360 - DNA, 15 bp, Homo sapiens
ggccccttcaaatgc

SEQ ID NO: 1203361 - DNA, 15 bp, Homo sapiens
aggccccttcaaatg

SEQ ID NO: 1203362 - DNA, 15 bp, Homo sapiens
aaggccccttcaaat

SEQ ID NO: 1203363 - DNA, 15 bp, Homo sapiens
gaaggccccttcaaa

SEQ ID NO: 1203364 - DNA, 15 bp, Homo sapiens
ggaaggccccttcaa

SEQ ID NO: 1203365 - DNA, 15 bp, Homo sapiens
tggaaggccccttca

SEQ ID NO: 1203366 - DNA, 15 bp, Homo sapiens
ttggaaggccccttc

SEQ ID NO: 1203367 - DNA, 15 bp, Homo sapiens
tttggaaggcccctt

SEQ ID NO: 1203368 - DNA, 15 bp, Homo sapiens
atttggaaggcccct

SEQ ID NO: 1203369 - DNA, 15 bp, Homo sapiens
gatttggaaggcccc

SEQ ID NO: 1203370 - DNA, 15 bp, Homo sapiens
agatttggaaggccc

SEQ ID NO: 1203371 - DNA, 15 bp, Homo sapiens
gagatttggaaggcc

SEQ ID NO: 1203372 - DNA, 15 bp, Homo sapiens
agagatttggaaggc

SEQ ID NO: 1203373 - DNA, 15 bp, Homo sapiens
cagagatttggaagg

SEQ ID NO: 1203374 - DNA, 15 bp, Homo sapiens
acagagatttggaag

SEQ ID NO: 1203375 - DNA, 15 bp, Homo sapiens
tacagagatttggaa

SEQ ID NO: 1203376 - DNA, 15 bp, Homo sapiens
ctacagagatttgga

SEQ ID NO: 1203377 - DNA, 15 bp, Homo sapiens
cctacagagatttgg

SEQ ID NO: 1203378 - DNA, 15 bp, Homo sapiens
gcctacagagatttg

SEQ ID NO: 1203379 - DNA, 15 bp, Homo sapiens
agcctacagagattt

SEQ ID NO: 1203380 - DNA, 15 bp, Homo sapiens
gagcctacagagatt

SEQ ID NO: 1203381 - DNA, 15 bp, Homo sapiens
ggagcctacagagat

SEQ ID NO: 1203382 - DNA, 15 bp, Homo sapiens
aggagcctacagaga

SEQ ID NO: 1203383 - DNA, 15 bp, Homo sapiens
aaggagcctacagag

SEQ ID NO: 1203384 - DNA, 15 bp, Homo sapiens
aaaggagcctacaga

SEQ ID NO: 1203385 - DNA, 15 bp, Homo sapiens
gaaaggagcctacag

SEQ ID NO: 1203386 - DNA, 15 bp, Homo sapiens
tgaaaggagcctaca

SEQ ID NO: 1203387 - DNA, 15 bp, Homo sapiens
ttgaaaggagcctac

SEQ ID NO: 1203388 - DNA, 15 bp, Homo sapiens
tttgaaaggagccta

SEQ ID NO: 1203389 - DNA, 15 bp, Homo sapiens
ttttgaaaggagcct

SEQ ID NO: 1203390 - DNA, 15 bp, Homo sapiens
attttgaaaggagcc

SEQ ID NO: 1203391 - DNA, 15 bp, Homo sapiens
cattttgaaaggagc

SEQ ID NO: 1203392 - DNA, 15 bp, Homo sapiens
tcattttgaaaggag

SEQ ID NO: 1203393 - DNA, 15 bp, Homo sapiens
ctcattttgaaagga

SEQ ID NO: 1203394 - DNA, 15 bp, Homo sapiens
tctcattttgaaagg

SEQ ID NO: 1203395 - DNA, 15 bp, Homo sapiens
atctcattttgaaag

SEQ ID NO: 1203396 - DNA, 15 bp, Homo sapiens
catctcattttgaaa

SEQ ID NO: 1203397 - DNA, 15 bp, Homo sapiens
tcatctcattttgaa

SEQ ID NO: 1203398 - DNA, 15 bp, Homo sapiens
ttcatctcattttga

SEQ ID NO: 1203399 - DNA, 15 bp, Homo sapiens
attcatctcattttg

SEQ ID NO: 1203400 - DNA, 15 bp, Homo sapiens
tattcatctcatttt

SEQ ID NO: 1203401 - DNA, 15 bp, Homo sapiens
ctattcatctcattt

SEQ ID NO: 1203402 - DNA, 15 bp, Homo sapiens
tctattcatctcatt

SEQ ID NO: 1203403 - DNA, 15 bp, Homo sapiens
atctattcatctcat

SEQ ID NO: 1203404 - DNA, 15 bp, Homo sapiens
tatctattcatctca

SEQ ID NO: 1203405 - DNA, 15 bp, Homo sapiens
ttatctattcatctc

SEQ ID NO: 1203406 - DNA, 15 bp, Homo sapiens
cttatctattcatct

SEQ ID NO: 1203407 - DNA, 15 bp, Homo sapiens
tcttatctattcatc

SEQ ID NO: 1203408 - DNA, 15 bp, Homo sapiens
atcttatctattcat

SEQ ID NO: 1203409 - DNA, 15 bp, Homo sapiens
aatcttatctattca

SEQ ID NO: 1203410 - DNA, 15 bp, Homo sapiens
aaatcttatctattc

SEQ ID NO: 1203411 - DNA, 15 bp, Homo sapiens
taaatcttatctatt

SEQ ID NO: 1203412 - DNA, 15 bp, Homo sapiens
gtaaatcttatctat

SEQ ID NO: 1203413 - DNA, 15 bp, Homo sapiens
tgtaaatcttatcta

SEQ ID NO: 1203414 - DNA, 15 bp, Homo sapiens
ctgtaaatcttatct

SEQ ID NO: 1203415 - DNA, 15 bp, Homo sapiens
cctgtaaatcttatc

SEQ ID NO: 1203416 - DNA, 15 bp, Homo sapiens
ccctgtaaatcttat

SEQ ID NO: 1203417 - DNA, 15 bp, Homo sapiens
cccctgtaaatctta

SEQ ID NO: 1203418 - DNA, 15 bp, Homo sapiens
tcccctgtaaatctt

SEQ ID NO: 1203419 - DNA, 15 bp, Homo sapiens
ttcccctgtaaatct

SEQ ID NO: 1203420 - DNA, 15 bp, Homo sapiens
cttcccctgtaaatc

SEQ ID NO: 1203421 - DNA, 15 bp, Homo sapiens
acttcccctgtaaat

SEQ ID NO: 1203422 - DNA, 15 bp, Homo sapiens
tacttcccctgtaaa

SEQ ID NO: 1203423 - DNA, 15 bp, Homo sapiens
gtacttcccctgtaa

SEQ ID NO: 1203424 - DNA, 15 bp, Homo sapiens
agtacttcccctgta

SEQ ID NO: 1203425 - DNA, 15 bp, Homo sapiens
cagtacttcccctgt

SEQ ID NO: 1203426 - DNA, 15 bp, Homo sapiens
gcagtacttcccctg

SEQ ID NO: 1203427 - DNA, 15 bp, Homo sapiens
ggcagtacttcccct

SEQ ID NO: 1203428 - DNA, 15 bp, Homo sapiens
aggcagtacttcccc

SEQ ID NO: 1203429 - DNA, 15 bp, Homo sapiens
caggcagtacttccc

SEQ ID NO: 1203430 - DNA, 15 bp, Homo sapiens
acaggcagtacttcc

SEQ ID NO: 1203431 - DNA, 15 bp, Homo sapiens
aacaggcagtacttc

SEQ ID NO: 1203432 - DNA, 15 bp, Homo sapiens
aaacaggcagtactt

SEQ ID NO: 1203433 - DNA, 15 bp, Homo sapiens
caaacaggcagtact

SEQ ID NO: 1203434 - DNA, 15 bp, Homo sapiens
gcaaacaggcagtac

SEQ ID NO: 1203435 - DNA, 15 bp, Homo sapiens
ggcaaacaggcagta

SEQ ID NO: 1203436 - DNA, 15 bp, Homo sapiens
tggcaaacaggcagt

SEQ ID NO: 1203437 - DNA, 15 bp, Homo sapiens
gtggcaaacaggcag

SEQ ID NO: 1203438 - DNA, 15 bp, Homo sapiens
agtggcaaacaggca

SEQ ID NO: 1203439 - DNA, 15 bp, Homo sapiens
cagtggcaaacaggc

SEQ ID NO: 1203440 - DNA, 15 bp, Homo sapiens
tcagtggcaaacagg

SEQ ID NO: 1203441 - DNA, 15 bp, Homo sapiens
gtcagtggcaaacag

SEQ ID NO: 1203442 - DNA, 15 bp, Homo sapiens
agtcagtggcaaaca

SEQ ID NO: 1203443 - DNA, 15 bp, Homo sapiens
tagtcagtggcaaac

SEQ ID NO: 1203444 - DNA, 15 bp, Homo sapiens
atagtcagtggcaaa

SEQ ID NO: 1203445 - DNA, 15 bp, Homo sapiens
aatagtcagtggcaa

SEQ ID NO: 1203446 - DNA, 15 bp, Homo sapiens
taatagtcagtggca

SEQ ID NO: 1203447 - DNA, 15 bp, Homo sapiens
ttaatagtcagtggc

SEQ ID NO: 1203448 - DNA, 15 bp, Homo sapiens
attaatagtcagtgg

SEQ ID NO: 1203449 - DNA, 15 bp, Homo sapiens
tattaatagtcagtg

SEQ ID NO: 1203450 - DNA, 15 bp, Homo sapiens
ctattaatagtcagt

SEQ ID NO: 1203451 - DNA, 15 bp, Homo sapiens
gctattaatagtcag

SEQ ID NO: 1203452 - DNA, 15 bp, Homo sapiens
gagctattaatagtc

SEQ ID NO: 1203453 - DNA, 15 bp, Homo sapiens
tgagctattaatagt

SEQ ID NO: 1203454 - DNA, 15 bp, Homo sapiens
gtgagctattaatag

SEQ ID NO: 1203455 - DNA, 15 bp, Homo sapiens
tgtgagctattaata

SEQ ID NO: 1203456 - DNA, 15 bp, Homo sapiens
atgtgagctattaat

SEQ ID NO: 1203457 - DNA, 15 bp, Homo sapiens
catgtgagctattaa

SEQ ID NO: 1203458 - DNA, 15 bp, Homo sapiens
gcatgtgagctatta

SEQ ID NO: 1203459 - DNA, 15 bp, Homo sapiens
tgcatgtgagctatt

SEQ ID NO: 1203460 - DNA, 15 bp, Homo sapiens
atgcatgtgagctat

SEQ ID NO: 1203461 - DNA, 15 bp, Homo sapiens
tatgcatgtgagcta

SEQ ID NO: 1203462 - DNA, 15 bp, Homo sapiens
ttatgcatgtgagct

SEQ ID NO: 1203463 - DNA, 15 bp, Homo sapiens
attatgcatgtgagc

SEQ ID NO: 1203464 - DNA, 15 bp, Homo sapiens
gattatgcatgtgag

SEQ ID NO: 1203465 - DNA, 15 bp, Homo sapiens
tgattatgcatgtga

SEQ ID NO: 1203466 - DNA, 15 bp, Homo sapiens
atgattatgcatgtg

SEQ ID NO: 1203467 - DNA, 15 bp, Homo sapiens
catgattatgcatgt

SEQ ID NO: 1203468 - DNA, 15 bp, Homo sapiens
acatgattatgcatg

SEQ ID NO: 1203469 - DNA, 15 bp, Homo sapiens
cacatgattatgcat

SEQ ID NO: 1203470 - DNA, 15 bp, Homo sapiens
tcacatgattatgca

SEQ ID NO: 1203471 - DNA, 15 bp, Homo sapiens
ttcacatgattatgc

SEQ ID NO: 1203472 - DNA, 15 bp, Homo sapiens
tttcacatgattatg

SEQ ID NO: 1203473 - DNA, 15 bp, Homo sapiens
atttcacatgattat

SEQ ID NO: 1203474 - DNA, 15 bp, Homo sapiens
gatttcacatgatta

SEQ ID NO: 1203475 - DNA, 15 bp, Homo sapiens
tgatttcacatgatt

SEQ ID NO: 1203476 - DNA, 15 bp, Homo sapiens
atgatttcacatgat

SEQ ID NO: 1203477 - DNA, 15 bp, Homo sapiens
aatgatttcacatga

SEQ ID NO: 1203478 - DNA, 15 bp, Homo sapiens
gaatgatttcacatg

SEQ ID NO: 1203479 - DNA, 15 bp, Homo sapiens
ggaatgatttcacat

SEQ ID NO: 1203480 - DNA, 15 bp, Homo sapiens
tggaatgatttcaca

SEQ ID NO: 1203481 - DNA, 15 bp, Homo sapiens
ttggaatgatttcac

SEQ ID NO: 1203482 - DNA, 15 bp, Homo sapiens
attggaatgatttca

SEQ ID NO: 1203483 - DNA, 15 bp, Homo sapiens
tattggaatgatttc

SEQ ID NO: 1203484 - DNA, 15 bp, Homo sapiens
ttattggaatgattt

SEQ ID NO: 1203485 - DNA, 15 bp, Homo sapiens
attattggaatgatt

SEQ ID NO: 1203486 - DNA, 15 bp, Homo sapiens
tattattggaatgat

SEQ ID NO: 1203487 - DNA, 15 bp, Homo sapiens
atattattggaatga

SEQ ID NO: 1203488 - DNA, 15 bp, Homo sapiens
aatattattggaatg

SEQ ID NO: 1203489 - DNA, 15 bp, Homo sapiens
taatattattggaat

SEQ ID NO: 1203490 - DNA, 15 bp, Homo sapiens
ataatattattggaa

SEQ ID NO: 1203491 - DNA, 15 bp, Homo sapiens
cataatattattgga

SEQ ID NO: 1203492 - DNA, 15 bp, Homo sapiens
tcataatattattgg

SEQ ID NO: 1203493 - DNA, 15 bp, Homo sapiens
ctcataatattattg

SEQ ID NO: 1203494 - DNA, 15 bp, Homo sapiens
tctcataatattatt

SEQ ID NO: 1203495 - DNA, 15 bp, Homo sapiens
ctctcataatattat

SEQ ID NO: 1203496 - DNA, 15 bp, Homo sapiens
tctctcataatatta

SEQ ID NO: 1203497 - DNA, 15 bp, Homo sapiens
ctctctcataatatt

SEQ ID NO: 1203498 - DNA, 15 bp, Homo sapiens
cctctctcataatat

SEQ ID NO: 1203499 - DNA, 15 bp, Homo sapiens
acctctctcataata

SEQ ID NO: 1203500 - DNA, 15 bp, Homo sapiens
tacctctctcataat

SEQ ID NO: 1203501 - DNA, 15 bp, Homo sapiens
atacctctctcataa

SEQ ID NO: 1203502 - DNA, 15 bp, Homo sapiens
aatacctctctcata

SEQ ID NO: 1203503 - DNA, 15 bp, Homo sapiens
taatacctctctcat

SEQ ID NO: 1203504 - DNA, 15 bp, Homo sapiens
ataatacctctctca

SEQ ID NO: 1203505 - DNA, 15 bp, Homo sapiens
aataatacctctctc

SEQ ID NO: 1203506 - DNA, 15 bp, Homo sapiens
aaataatacctctct

SEQ ID NO: 1203507 - DNA, 15 bp, Homo sapiens
aaaataatacctctc

SEQ ID NO: 1203508 - DNA, 15 bp, Homo sapiens
aaaaataatacctct

SEQ ID NO: 1203509 - DNA, 15 bp, Homo sapiens
taaaaataatacctc

SEQ ID NO: 1203510 - DNA, 15 bp, Homo sapiens
ataaaaataatacct

SEQ ID NO: 1203511 - DNA, 15 bp, Homo sapiens
aataaaaataatacc

SEQ ID NO: 1203512 - DNA, 15 bp, Homo sapiens
taataaaaataatac

SEQ ID NO: 1203513 - DNA, 15 bp, Homo sapiens
ataataaaaataata

SEQ ID NO: 1203514 - DNA, 15 bp, Homo sapiens
cataataaaaataat

SEQ ID NO: 1203515 - DNA, 15 bp, Homo sapiens
gcataataaaaataa

SEQ ID NO: 1203516 - DNA, 15 bp, Homo sapiens
ggcataataaaaata

SEQ ID NO: 1203517 - DNA, 15 bp, Homo sapiens
gggcataataaaaat

SEQ ID NO: 1203518 - DNA, 15 bp, Homo sapiens
tgggcataataaaaa

SEQ ID NO: 1203519 - DNA, 15 bp, Homo sapiens
atgggcataataaaa

SEQ ID NO: 1203520 - DNA, 15 bp, Homo sapiens
aatgggcataataaa

SEQ ID NO: 1203521 - DNA, 15 bp, Homo sapiens
aaatgggcataataa

SEQ ID NO: 1203522 - DNA, 15 bp, Homo sapiens
aaaatgggcataata

SEQ ID NO: 1203523 - DNA, 15 bp, Homo sapiens
caaaatgggcataat

SEQ ID NO: 1203524 - DNA, 15 bp, Homo sapiens
gcaaaatgggcataa

SEQ ID NO: 1203525 - DNA, 15 bp, Homo sapiens
tgcaaaatgggcata

SEQ ID NO: 1203526 - DNA, 15 bp, Homo sapiens
ttgcaaaatgggcat

SEQ ID NO: 1203527 - DNA, 15 bp, Homo sapiens
tttgcaaaatgggca

SEQ ID NO: 1203528 - DNA, 15 bp, Homo sapiens
atttgcaaaatgggc

SEQ ID NO: 1203529 - DNA, 15 bp, Homo sapiens
catttgcaaaatggg

SEQ ID NO: 1203530 - DNA, 15 bp, Homo sapiens
ccatttgcaaaatgg

SEQ ID NO: 1203531 - DNA, 15 bp, Homo sapiens
cccatttgcaaaatg

SEQ ID NO: 1203532 - DNA, 15 bp, Homo sapiens
tcccatttgcaaaat

SEQ ID NO: 1203533 - DNA, 15 bp, Homo sapiens
ttcccatttgcaaaa

SEQ ID NO: 1203534 - DNA, 15 bp, Homo sapiens
attcccatttgcaaa

SEQ ID NO: 1203535 - DNA, 15 bp, Homo sapiens
gattcccatttgcaa

SEQ ID NO: 1203536 - DNA, 15 bp, Homo sapiens
ggattcccatttgca

SEQ ID NO: 1203537 - DNA, 15 bp, Homo sapiens
gggattcccatttgc

SEQ ID NO: 1203538 - DNA, 15 bp, Homo sapiens
tgggattcccatttg

SEQ ID NO: 1203539 - DNA, 15 bp, Homo sapiens
ttgggattcccattt

SEQ ID NO: 1203540 - DNA, 15 bp, Homo sapiens
cttgggattcccatt

SEQ ID NO: 1203541 - DNA, 15 bp, Homo sapiens
tcttgggattcccat

SEQ ID NO: 1203542 - DNA, 15 bp, Homo sapiens
gtcttgggattccca

SEQ ID NO: 1203543 - DNA, 15 bp, Homo sapiens
ggtcttgggattccc

SEQ ID NO: 1203544 - DNA, 15 bp, Homo sapiens
gggtcttgggattcc

SEQ ID NO: 1203545 - DNA, 15 bp, Homo sapiens
tgggtcttgggattc

SEQ ID NO: 1203546 - DNA, 15 bp, Homo sapiens
ctgggtcttgggatt

SEQ ID NO: 1203547 - DNA, 15 bp, Homo sapiens
cctgggtcttgggat

SEQ ID NO: 1203548 - DNA, 15 bp, Homo sapiens
ccctgggtcttggga

SEQ ID NO: 1203549 - DNA, 15 bp, Homo sapiens
tccctgggtcttggg

SEQ ID NO: 1203550 - DNA, 15 bp, Homo sapiens
ctccctgggtcttgg

SEQ ID NO: 1203551 - DNA, 15 bp, Homo sapiens
tctccctgggtcttg

SEQ ID NO: 1203552 - DNA, 15 bp, Homo sapiens
atctccctgggtctt

SEQ ID NO: 1203553 - DNA, 15 bp, Homo sapiens
aatctccctgggtct

SEQ ID NO: 1203554 - DNA, 15 bp, Homo sapiens
taatctccctgggtc

SEQ ID NO: 1203555 - DNA, 15 bp, Homo sapiens
ttaatctccctgggt

SEQ ID NO: 1203556 - DNA, 15 bp, Homo sapiens
cttaatctccctggg

SEQ ID NO: 1203557 - DNA, 15 bp, Homo sapiens
acttaatctccctgg

SEQ ID NO: 1203558 - DNA, 15 bp, Homo sapiens
tacttaatctccctg

SEQ ID NO: 1203559 - DNA, 15 bp, Homo sapiens
ttacttaatctccct

SEQ ID NO: 1203560 - DNA, 15 bp, Homo sapiens
tttacttaatctccc

SEQ ID NO: 1203561 - DNA, 15 bp, Homo sapiens
ttttacttaatctcc

SEQ ID NO: 1203562 - DNA, 15 bp, Homo sapiens
attttacttaatctc

SEQ ID NO: 1203563 - DNA, 15 bp, Homo sapiens
tattttacttaatct

SEQ ID NO: 1203564 - DNA, 15 bp, Homo sapiens
gtattttacttaatc

SEQ ID NO: 1203565 - DNA, 15 bp, Homo sapiens
ggtattttacttaat

SEQ ID NO: 1203566 - DNA, 15 bp, Homo sapiens
gggtattttacttaa

SEQ ID NO: 1203567 - DNA, 15 bp, Homo sapiens
ggggtattttactta

SEQ ID NO: 1203568 - DNA, 15 bp, Homo sapiens
tggggtattttactt

SEQ ID NO: 1203569 - DNA, 15 bp, Homo sapiens
ttggggtattttact

SEQ ID NO: 1203570 - DNA, 15 bp, Homo sapiens
cttggggtattttac

SEQ ID NO: 1203571 - DNA, 15 bp, Homo sapiens
ccttggggtatttta

SEQ ID NO: 1203572 - DNA, 15 bp, Homo sapiens
accttggggtatttt

SEQ ID NO: 1203573 - DNA, 15 bp, Homo sapiens
taccttggggtattt

SEQ ID NO: 1203574 - DNA, 15 bp, Homo sapiens
ataccttggggtatt

SEQ ID NO: 1203575 - DNA, 15 bp, Homo sapiens
cataccttggggtat

SEQ ID NO: 1203576 - DNA, 15 bp, Homo sapiens
acataccttggggta

SEQ ID NO: 1203577 - DNA, 15 bp, Homo sapiens
aacataccttggggt

SEQ ID NO: 1203578 - DNA, 15 bp, Homo sapiens
taacataccttgggg

SEQ ID NO: 1203579 - DNA, 15 bp, Homo sapiens
ttaacataccttggg

SEQ ID NO: 1203580 - DNA, 15 bp, Homo sapiens
gttaacataccttgg

SEQ ID NO: 1203581 - DNA, 15 bp, Homo sapiens
tgttaacataccttg

SEQ ID NO: 1203582 - DNA, 15 bp, Homo sapiens
atgttaacatacctt

SEQ ID NO: 1203583 - DNA, 15 bp, Homo sapiens
aatgttaacatacct

SEQ ID NO: 1203584 - DNA, 15 bp, Homo sapiens
taatgttaacatacc

SEQ ID NO: 1203585 - DNA, 15 bp, Homo sapiens
ataatgttaacatac

SEQ ID NO: 1203586 - DNA, 15 bp, Homo sapiens
aataatgttaacata

SEQ ID NO: 1203587 - DNA, 15 bp, Homo sapiens
aaataatgttaacat

SEQ ID NO: 1203588 - DNA, 15 bp, Homo sapiens
caaataatgttaaca

SEQ ID NO: 1203589 - DNA, 15 bp, Homo sapiens
acaaataatgttaac

SEQ ID NO: 1203590 - DNA, 15 bp, Homo sapiens
cacaaataatgttaa

SEQ ID NO: 1203591 - DNA, 15 bp, Homo sapiens
tcacaaataatgtta

SEQ ID NO: 1203592 - DNA, 15 bp, Homo sapiens
ctcacaaataatgtt

SEQ ID NO: 1203593 - DNA, 15 bp, Homo sapiens
gctcacaaataatgt

SEQ ID NO: 1203594 - DNA, 15 bp, Homo sapiens
ggctcacaaataatg

SEQ ID NO: 1203595 - DNA, 15 bp, Homo sapiens
gggctcacaaataat

SEQ ID NO: 1203596 - DNA, 15 bp, Homo sapiens
tgggctcacaaataa

SEQ ID NO: 1203597 - DNA, 15 bp, Homo sapiens
ctgggctcacaaata

SEQ ID NO: 1203598 - DNA, 15 bp, Homo sapiens
cctgggctcacaaat

SEQ ID NO: 1203599 - DNA, 15 bp, Homo sapiens
acctgggctcacaaa

SEQ ID NO: 1203600 - DNA, 15 bp, Homo sapiens
gacctgggctcacaa

SEQ ID NO: 1203601 - DNA, 15 bp, Homo sapiens
agacctgggctcaca

SEQ ID NO: 1203602 - DNA, 15 bp, Homo sapiens
tagacctgggctcac

SEQ ID NO: 1203603 - DNA, 15 bp, Homo sapiens
atagacctgggctca

SEQ ID NO: 1203604 - DNA, 15 bp, Homo sapiens
aatagacctgggctc

SEQ ID NO: 1203605 - DNA, 15 bp, Homo sapiens
aaatagacctgggct

SEQ ID NO: 1203606 - DNA, 15 bp, Homo sapiens
caaatagacctgggc

SEQ ID NO: 1203607 - DNA, 15 bp, Homo sapiens
gcaaatagacctggg

SEQ ID NO: 1203608 - DNA, 15 bp, Homo sapiens
ggcaaatagacctgg

SEQ ID NO: 1203609 - DNA, 15 bp, Homo sapiens
aggcaaatagacctg

SEQ ID NO: 1203610 - DNA, 15 bp, Homo sapiens
gaggcaaatagacct

SEQ ID NO: 1203611 - DNA, 15 bp, Homo sapiens
ggaggcaaatagacc

SEQ ID NO: 1203612 - DNA, 15 bp, Homo sapiens
tggaggcaaatagac

SEQ ID NO: 1203613 - DNA, 15 bp, Homo sapiens
ctggaggcaaataga

SEQ ID NO: 1203614 - DNA, 15 bp, Homo sapiens
tctggaggcaaatag

SEQ ID NO: 1203615 - DNA, 15 bp, Homo sapiens
ctctggaggcaaata

SEQ ID NO: 1203616 - DNA, 15 bp, Homo sapiens
cctctggaggcaaat

SEQ ID NO: 1203617 - DNA, 15 bp, Homo sapiens
acctctggaggcaaa

SEQ ID NO: 1203618 - DNA, 15 bp, Homo sapiens
cacctctggaggcaa

SEQ ID NO: 1203619 - DNA, 15 bp, Homo sapiens
acacctctggaggca

SEQ ID NO: 1203620 - DNA, 15 bp, Homo sapiens
aacacctctggaggc

SEQ ID NO: 1203621 - DNA, 15 bp, Homo sapiens
caacacctctggagg

SEQ ID NO: 1203622 - DNA, 15 bp, Homo sapiens
gcaacacctctggag

SEQ ID NO: 1203623 - DNA, 15 bp, Homo sapiens
agcaacacctctgga

SEQ ID NO: 1203624 - DNA, 15 bp, Homo sapiens
gagcaacacctctgg

SEQ ID NO: 1203625 - DNA, 15 bp, Homo sapiens
agagcaacacctctg

SEQ ID NO: 1203626 - DNA, 15 bp, Homo sapiens
aagagcaacacctct

SEQ ID NO: 1203627 - DNA, 15 bp, Homo sapiens
taagagcaacacctc

SEQ ID NO: 1203628 - DNA, 15 bp, Homo sapiens
ttaagagcaacacct

SEQ ID NO: 1203629 - DNA, 15 bp, Homo sapiens
tttaagagcaacacc

SEQ ID NO: 1203630 - DNA, 15 bp, Homo sapiens
atttaagagcaacac

SEQ ID NO: 1203631 - DNA, 15 bp, Homo sapiens
aatttaagagcaaca

SEQ ID NO: 1203632 - DNA, 15 bp, Homo sapiens
gaatttaagagcaac

SEQ ID NO: 1203633 - DNA, 15 bp, Homo sapiens
agaatttaagagcaa

SEQ ID NO: 1203634 - DNA, 15 bp, Homo sapiens
tagaatttaagagca

SEQ ID NO: 1203635 - DNA, 15 bp, Homo sapiens
atagaatttaagagc

SEQ ID NO: 1203636 - DNA, 15 bp, Homo sapiens
catagaatttaagag

SEQ ID NO: 1203637 - DNA, 15 bp, Homo sapiens
gcatagaatttaaga

SEQ ID NO: 1203638 - DNA, 15 bp, Homo sapiens
agcatagaatttaag

SEQ ID NO: 1203639 - DNA, 15 bp, Homo sapiens
tagcatagaatttaa

SEQ ID NO: 1203640 - DNA, 15 bp, Homo sapiens
atagcatagaattta

SEQ ID NO: 1203641 - DNA, 15 bp, Homo sapiens
tatagcatagaattt

SEQ ID NO: 1203642 - DNA, 15 bp, Homo sapiens
atatagcatagaatt

SEQ ID NO: 1203643 - DNA, 15 bp, Homo sapiens
aatatagcatagaat

SEQ ID NO: 1203644 - DNA, 15 bp, Homo sapiens
taatatagcatagaa

SEQ ID NO: 1203645 - DNA, 15 bp, Homo sapiens
ataatatagcataga

SEQ ID NO: 1203646 - DNA, 15 bp, Homo sapiens
aataatatagcatag

SEQ ID NO: 1203647 - DNA, 15 bp, Homo sapiens
taataatatagcata

SEQ ID NO: 1203648 - DNA, 15 bp, Homo sapiens
ttaataatatagcat

SEQ ID NO: 1203649 - DNA, 15 bp, Homo sapiens
tttaataatatagca

SEQ ID NO: 1203650 - DNA, 15 bp, Homo sapiens
ctttaataatatagc

SEQ ID NO: 1203651 - DNA, 15 bp, Homo sapiens
actttaataatatag

SEQ ID NO: 1203652 - DNA, 15 bp, Homo sapiens
tactttaataatata

SEQ ID NO: 1203653 - DNA, 15 bp, Homo sapiens
ttactttaataatat

SEQ ID NO: 1203654 - DNA, 15 bp, Homo sapiens
attactttaataata

SEQ ID NO: 1203655 - DNA, 15 bp, Homo sapiens
aattactttaataat

SEQ ID NO: 1203656 - DNA, 15 bp, Homo sapiens
caattactttaataa

SEQ ID NO: 1203657 - DNA, 15 bp, Homo sapiens
ccaattactttaata

SEQ ID NO: 1203658 - DNA, 15 bp, Homo sapiens
cccaattactttaat

SEQ ID NO: 1203659 - DNA, 15 bp, Homo sapiens
ccccaattactttaa

SEQ ID NO: 1203660 - DNA, 15 bp, Homo sapiens
tccccaattacttta

SEQ ID NO: 1203661 - DNA, 15 bp, Homo sapiens
ttccccaattacttt

SEQ ID NO: 1203662 - DNA, 15 bp, Homo sapiens
tttccccaattactt

SEQ ID NO: 1203663 - DNA, 15 bp, Homo sapiens
ctttccccaattact

SEQ ID NO: 1203664 - DNA, 15 bp, Homo sapiens
actttccccaattac

SEQ ID NO: 1203665 - DNA, 15 bp, Homo sapiens
gactttccccaatta

SEQ ID NO: 1203666 - DNA, 15 bp, Homo sapiens
agactttccccaatt

SEQ ID NO: 1203667 - DNA, 15 bp, Homo sapiens
aagactttccccaat

SEQ ID NO: 1203668 - DNA, 15 bp, Homo sapiens
gaagactttccccaa

SEQ ID NO: 1203669 - DNA, 15 bp, Homo sapiens
tgaagactttcccca

SEQ ID NO: 1203670 - DNA, 15 bp, Homo sapiens
atgaagactttcccc

SEQ ID NO: 1203671 - DNA, 15 bp, Homo sapiens
tatgaagactttccc

SEQ ID NO: 1203672 - DNA, 15 bp, Homo sapiens
ctatgaagactttcc

SEQ ID NO: 1203673 - DNA, 15 bp, Homo sapiens
actatgaagactttc

SEQ ID NO: 1203674 - DNA, 15 bp, Homo sapiens
gactatgaagacttt

SEQ ID NO: 1203675 - DNA, 15 bp, Homo sapiens
ggactatgaagactt

SEQ ID NO: 1203676 - DNA, 15 bp, Homo sapiens
aggactatgaagact

SEQ ID NO: 1203677 - DNA, 15 bp, Homo sapiens
gaggactatgaagac

SEQ ID NO: 1203678 - DNA, 15 bp, Homo sapiens
agaggactatgaaga

SEQ ID NO: 1203679 - DNA, 15 bp, Homo sapiens
gagaggactatgaag

SEQ ID NO: 1203680 - DNA, 15 bp, Homo sapiens
ggagaggactatgaa

SEQ ID NO: 1203681 - DNA, 15 bp, Homo sapiens
gggagaggactatga

SEQ ID NO: 1203682 - DNA, 15 bp, Homo sapiens
ggggagaggactatg

SEQ ID NO: 1203683 - DNA, 15 bp, Homo sapiens
gggggagaggactat

SEQ ID NO: 1203684 - DNA, 15 bp, Homo sapiens
ggggggagaggacta

SEQ ID NO: 1203685 - DNA, 15 bp, Homo sapiens
tggggggagaggact

SEQ ID NO: 1203686 - DNA, 15 bp, Homo sapiens
ttggggggagaggac

SEQ ID NO: 1203687 - DNA, 15 bp, Homo sapiens
tttggggggagagga

SEQ ID NO: 1203688 - DNA, 15 bp, Homo sapiens
ttttggggggagagg

SEQ ID NO: 1203689 - DNA, 15 bp, Homo sapiens
gttttggggggagag

SEQ ID NO: 1203690 - DNA, 15 bp, Homo sapiens
agttttggggggaga

SEQ ID NO: 1203691 - DNA, 15 bp, Homo sapiens
aagttttggggggag

SEQ ID NO: 1203692 - DNA, 15 bp, Homo sapiens
caagttttgggggga

SEQ ID NO: 1203693 - DNA, 15 bp, Homo sapiens
gcaagttttgggggg

SEQ ID NO: 1203694 - DNA, 15 bp, Homo sapiens
tgcaagttttggggg

SEQ ID NO: 1203695 - DNA, 15 bp, Homo sapiens
atgcaagttttgggg

SEQ ID NO: 1203696 - DNA, 15 bp, Homo sapiens
gatgcaagttttggg

SEQ ID NO: 1203697 - DNA, 15 bp, Homo sapiens
agatgcaagttttgg

SEQ ID NO: 1203698 - DNA, 15 bp, Homo sapiens
aagatgcaagttttg

SEQ ID NO: 1203699 - DNA, 15 bp, Homo sapiens
aaagatgcaagtttt

SEQ ID NO: 1203700 - DNA, 15 bp, Homo sapiens
gaaagatgcaagttt

SEQ ID NO: 1203701 - DNA, 15 bp, Homo sapiens
agaaagatgcaagtt

SEQ ID NO: 1203702 - DNA, 15 bp, Homo sapiens
tagaaagatgcaagt

SEQ ID NO: 1203703 - DNA, 15 bp, Homo sapiens
ctagaaagatgcaag

SEQ ID NO: 1203704 - DNA, 15 bp, Homo sapiens
tctagaaagatgcaa

SEQ ID NO: 1203705 - DNA, 15 bp, Homo sapiens
atctagaaagatgca

SEQ ID NO: 1203706 - DNA, 15 bp, Homo sapiens
gatctagaaagatgc

SEQ ID NO: 1203707 - DNA, 15 bp, Homo sapiens
tgatctagaaagatg

SEQ ID NO: 1203708 - DNA, 15 bp, Homo sapiens
ctgatctagaaagat

SEQ ID NO: 1203709 - DNA, 15 bp, Homo sapiens
actgatctagaaaga

SEQ ID NO: 1203710 - DNA, 15 bp, Homo sapiens
tactgatctagaaag

SEQ ID NO: 1203711 - DNA, 15 bp, Homo sapiens
ttactgatctagaaa

SEQ ID NO: 1203712 - DNA, 15 bp, Homo sapiens
tttactgatctagaa

SEQ ID NO: 1203713 - DNA, 15 bp, Homo sapiens
atttactgatctaga

SEQ ID NO: 1203714 - DNA, 15 bp, Homo sapiens
aatttactgatctag

SEQ ID NO: 1203715 - DNA, 15 bp, Homo sapiens
gaatttactgatcta

SEQ ID NO: 1203716 - DNA, 15 bp, Homo sapiens
tgaatttactgatct

SEQ ID NO: 1203717 - DNA, 15 bp, Homo sapiens
atgaatttactgatc

SEQ ID NO: 1203718 - DNA, 15 bp, Homo sapiens
gatgaatttactgat

SEQ ID NO: 1203719 - DNA, 15 bp, Homo sapiens
ggatgaatttactga

SEQ ID NO: 1203720 - DNA, 15 bp, Homo sapiens
aggatgaatttactg

SEQ ID NO: 1203721 - DNA, 15 bp, Homo sapiens
taggatgaatttact

SEQ ID NO: 1203722 - DNA, 15 bp, Homo sapiens
ataggatgaatttac

SEQ ID NO: 1203723 - DNA, 15 bp, Homo sapiens
cataggatgaattta

SEQ ID NO: 1203724 - DNA, 15 bp, Homo sapiens
acataggatgaattt

SEQ ID NO: 1203725 - DNA, 15 bp, Homo sapiens
gacataggatgaatt

SEQ ID NO: 1203726 - DNA, 15 bp, Homo sapiens
tgacataggatgaat

SEQ ID NO: 1203727 - DNA, 15 bp, Homo sapiens
ctgacataggatgaa

SEQ ID NO: 1203728 - DNA, 15 bp, Homo sapiens
tctgacataggatga

SEQ ID NO: 1203729 - DNA, 15 bp, Homo sapiens
atctgacataggatg

SEQ ID NO: 1203730 - DNA, 15 bp, Homo sapiens
gatctgacataggat

SEQ ID NO: 1203731 - DNA, 15 bp, Homo sapiens
tgatctgacatagga

SEQ ID NO: 1203732 - DNA, 15 bp, Homo sapiens
ttgatctgacatagg

SEQ ID NO: 1203733 - DNA, 15 bp, Homo sapiens
tttgatctgacatag

SEQ ID NO: 1203734 - DNA, 15 bp, Homo sapiens
ttttgatctgacata

SEQ ID NO: 1203735 - DNA, 15 bp, Homo sapiens
cttttgatctgacat

SEQ ID NO: 1203736 - DNA, 15 bp, Homo sapiens
acttttgatctgaca

SEQ ID NO: 1203737 - DNA, 15 bp, Homo sapiens
gacttttgatctgac

SEQ ID NO: 1203738 - DNA, 15 bp, Homo sapiens
ggacttttgatctga

SEQ ID NO: 1203739 - DNA, 15 bp, Homo sapiens
aggacttttgatctg

SEQ ID NO: 1203740 - DNA, 15 bp, Homo sapiens
taggacttttgatct

SEQ ID NO: 1203741 - DNA, 15 bp, Homo sapiens
ataggacttttgatc

SEQ ID NO: 1203742 - DNA, 15 bp, Homo sapiens
aataggacttttgat

SEQ ID NO: 1203743 - DNA, 15 bp, Homo sapiens
gaataggacttttga

SEQ ID NO: 1203744 - DNA, 15 bp, Homo sapiens
tgaataggacttttg

SEQ ID NO: 1203745 - DNA, 15 bp, Homo sapiens
atgaataggactttt

SEQ ID NO: 1203746 - DNA, 15 bp, Homo sapiens
gatgaataggacttt

SEQ ID NO: 1203747 - DNA, 15 bp, Homo sapiens
ggatgaataggactt

SEQ ID NO: 1203748 - DNA, 15 bp, Homo sapiens
aggatgaataggact

SEQ ID NO: 1203749 - DNA, 15 bp, Homo sapiens
taggatgaataggac

SEQ ID NO: 1203750 - DNA, 15 bp, Homo sapiens
ataggatgaatagga

SEQ ID NO: 1203751 - DNA, 15 bp, Homo sapiens
cataggatgaatagg

SEQ ID NO: 1203752 - DNA, 15 bp, Homo sapiens
acataggatgaatag

SEQ ID NO: 1203753 - DNA, 15 bp, Homo sapiens
gacataggatgaata

SEQ ID NO: 1203754 - DNA, 15 bp, Homo sapiens
ttgacataggatgaa

SEQ ID NO: 1203755 - DNA, 15 bp, Homo sapiens
cttgacataggatga

SEQ ID NO: 1203756 - DNA, 15 bp, Homo sapiens
acttgacataggatg

SEQ ID NO: 1203757 - DNA, 15 bp, Homo sapiens
aacttgacataggat

SEQ ID NO: 1203758 - DNA, 15 bp, Homo sapiens
taacttgacatagga

SEQ ID NO: 1203759 - DNA, 15 bp, Homo sapiens
ttaacttgacatagg

SEQ ID NO: 1203760 - DNA, 15 bp, Homo sapiens
tttaacttgacatag

SEQ ID NO: 1203761 - DNA, 15 bp, Homo sapiens
ttttaacttgacata

SEQ ID NO: 1203762 - DNA, 15 bp, Homo sapiens
cttttaacttgacat

SEQ ID NO: 1203763 - DNA, 15 bp, Homo sapiens
acttttaacttgaca

SEQ ID NO: 1203764 - DNA, 15 bp, Homo sapiens
gacttttaacttgac

SEQ ID NO: 1203765 - DNA, 15 bp, Homo sapiens
cgacttttaacttga

SEQ ID NO: 1203766 - DNA, 15 bp, Homo sapiens
tcgacttttaacttg

SEQ ID NO: 1203767 - DNA, 15 bp, Homo sapiens
ttcgacttttaactt

SEQ ID NO: 1203768 - DNA, 15 bp, Homo sapiens
cttcgacttttaact

SEQ ID NO: 1203769 - DNA, 15 bp, Homo sapiens
acttcgacttttaac

SEQ ID NO: 1203770 - DNA, 15 bp, Homo sapiens
gacttcgacttttaa

SEQ ID NO: 1203771 - DNA, 15 bp, Homo sapiens
tgacttcgactttta

SEQ ID NO: 1203772 - DNA, 15 bp, Homo sapiens
atgacttcgactttt

SEQ ID NO: 1203773 - DNA, 15 bp, Homo sapiens
aatgacttcgacttt

SEQ ID NO: 1203774 - DNA, 15 bp, Homo sapiens
aaatgacttcgactt

SEQ ID NO: 1203775 - DNA, 15 bp, Homo sapiens
aaaatgacttcgact

SEQ ID NO: 1203776 - DNA, 15 bp, Homo sapiens
aaaaatgacttcgac

SEQ ID NO: 1203777 - DNA, 15 bp, Homo sapiens
caaaaatgacttcga

SEQ ID NO: 1203778 - DNA, 15 bp, Homo sapiens
tcaaaaatgacttcg

SEQ ID NO: 1203779 - DNA, 15 bp, Homo sapiens
atcaaaaatgacttc

SEQ ID NO: 1203780 - DNA, 15 bp, Homo sapiens
catcaaaaatgactt

SEQ ID NO: 1203781 - DNA, 15 bp, Homo sapiens
gcatcaaaaatgact

SEQ ID NO: 1203782 - DNA, 15 bp, Homo sapiens
agcatcaaaaatgac

SEQ ID NO: 1203783 - DNA, 15 bp, Homo sapiens
cagcatcaaaaatga

SEQ ID NO: 1203784 - DNA, 15 bp, Homo sapiens
acagcatcaaaaatg

SEQ ID NO: 1203785 - DNA, 15 bp, Homo sapiens
aacagcatcaaaaat

SEQ ID NO: 1203786 - DNA, 15 bp, Homo sapiens
gaacagcatcaaaaa

SEQ ID NO: 1203787 - DNA, 15 bp, Homo sapiens
agaacagcatcaaaa

SEQ ID NO: 1203788 - DNA, 15 bp, Homo sapiens
aagaacagcatcaaa

SEQ ID NO: 1203789 - DNA, 15 bp, Homo sapiens
aaagaacagcatcaa

SEQ ID NO: 1203790 - DNA, 15 bp, Homo sapiens
caaagaacagcatca

SEQ ID NO: 1203791 - DNA, 15 bp, Homo sapiens
acaaagaacagcatc

SEQ ID NO: 1203792 - DNA, 15 bp, Homo sapiens
gacaaagaacagcat

SEQ ID NO: 1203793 - DNA, 15 bp, Homo sapiens
tgacaaagaacagca

SEQ ID NO: 1203794 - DNA, 15 bp, Homo sapiens
gtgacaaagaacagc

SEQ ID NO: 1203795 - DNA, 15 bp, Homo sapiens
tgtgacaaagaacag

SEQ ID NO: 1203796 - DNA, 15 bp, Homo sapiens
gtgtgacaaagaaca

SEQ ID NO: 1203797 - DNA, 15 bp, Homo sapiens
agtgtgacaaagaac

SEQ ID NO: 1203798 - DNA, 15 bp, Homo sapiens
gagtgtgacaaagaa

SEQ ID NO: 1203799 - DNA, 15 bp, Homo sapiens
ggagtgtgacaaaga

SEQ ID NO: 1203800 - DNA, 15 bp, Homo sapiens
tggagtgtgacaaag

SEQ ID NO: 1203801 - DNA, 15 bp, Homo sapiens
ttggagtgtgacaaa

SEQ ID NO: 1203802 - DNA, 15 bp, Homo sapiens
tttggagtgtgacaa

SEQ ID NO: 1203803 - DNA, 15 bp, Homo sapiens
atttggagtgtgaca

SEQ ID NO: 1203804 - DNA, 15 bp, Homo sapiens
catttggagtgtgac

SEQ ID NO: 1203805 - DNA, 15 bp, Homo sapiens
tcatttggagtgtga

SEQ ID NO: 1203806 - DNA, 15 bp, Homo sapiens
ttcatttggagtgtg

SEQ ID NO: 1203807 - DNA, 15 bp, Homo sapiens
tttcatttggagtgt

SEQ ID NO: 1203808 - DNA, 15 bp, Homo sapiens
atttcatttggagtg

SEQ ID NO: 1203809 - DNA, 15 bp, Homo sapiens
gatttcatttggagt

SEQ ID NO: 1203810 - DNA, 15 bp, Homo sapiens
ggatttcatttggag

SEQ ID NO: 1203811 - DNA, 15 bp, Homo sapiens
tggatttcatttgga

SEQ ID NO: 1203812 - DNA, 15 bp, Homo sapiens
atggatttcatttgg

SEQ ID NO: 1203813 - DNA, 15 bp, Homo sapiens
gatggatttcatttg

SEQ ID NO: 1203814 - DNA, 15 bp, Homo sapiens
tgatggatttcattt

SEQ ID NO: 1203815 - DNA, 15 bp, Homo sapiens
ctgatggatttcatt

SEQ ID NO: 1203816 - DNA, 15 bp, Homo sapiens
gctgatggatttcat

SEQ ID NO: 1203817 - DNA, 15 bp, Homo sapiens
cgctgatggatttca

SEQ ID NO: 1203818 - DNA, 15 bp, Homo sapiens
tcgctgatggatttc

SEQ ID NO: 1203819 - DNA, 15 bp, Homo sapiens
ttcgctgatggattt

SEQ ID NO: 1203820 - DNA, 15 bp, Homo sapiens
attcgctgatggatt

SEQ ID NO: 1203821 - DNA, 15 bp, Homo sapiens
gattcgctgatggat

SEQ ID NO: 1203822 - DNA, 15 bp, Homo sapiens
agattcgctgatgga

SEQ ID NO: 1203823 - DNA, 15 bp, Homo sapiens
gagattcgctgatgg

SEQ ID NO: 1203824 - DNA, 15 bp, Homo sapiens
tgagattcgctgatg

SEQ ID NO: 1203825 - DNA, 15 bp, Homo sapiens
atgagattcgctgat

SEQ ID NO: 1203826 - DNA, 15 bp, Homo sapiens
tatgagattcgctga

SEQ ID NO: 1203827 - DNA, 15 bp, Homo sapiens
ttatgagattcgctg

SEQ ID NO: 1203828 - DNA, 15 bp, Homo sapiens
attatgagattcgct

SEQ ID NO: 1203829 - DNA, 15 bp, Homo sapiens
gattatgagattcgc

SEQ ID NO: 1203830 - DNA, 15 bp, Homo sapiens
agattatgagattcg

SEQ ID NO: 1203831 - DNA, 15 bp, Homo sapiens
gagattatgagattc

SEQ ID NO: 1203832 - DNA, 15 bp, Homo sapiens
agagattatgagatt

SEQ ID NO: 1203833 - DNA, 15 bp, Homo sapiens
gagagattatgagat

SEQ ID NO: 1203834 - DNA, 15 bp, Homo sapiens
agagagattatgaga

SEQ ID NO: 1203835 - DNA, 15 bp, Homo sapiens
gagagagattatgag

SEQ ID NO: 1203836 - DNA, 15 bp, Homo sapiens
tgagagagattatga

SEQ ID NO: 1203837 - DNA, 15 bp, Homo sapiens
atgagagagattatg

SEQ ID NO: 1203838 - DNA, 15 bp, Homo sapiens
tatgagagagattat

SEQ ID NO: 1203839 - DNA, 15 bp, Homo sapiens
ctatgagagagatta

SEQ ID NO: 1203840 - DNA, 15 bp, Homo sapiens
tctatgagagagatt

SEQ ID NO: 1203841 - DNA, 15 bp, Homo sapiens
ttctatgagagagat

SEQ ID NO: 1203842 - DNA, 15 bp, Homo sapiens
tttctatgagagaga

SEQ ID NO: 1203843 - DNA, 15 bp, Homo sapiens
gtttctatgagagag

SEQ ID NO: 1203844 - DNA, 15 bp, Homo sapiens
tgtttctatgagaga

SEQ ID NO: 1203845 - DNA, 15 bp, Homo sapiens
atgtttctatgagag

SEQ ID NO: 1203846 - DNA, 15 bp, Homo sapiens
tatgtttctatgaga

SEQ ID NO: 1203847 - DNA, 15 bp, Homo sapiens
gtatgtttctatgag

SEQ ID NO: 1203848 - DNA, 15 bp, Homo sapiens
tgtatgtttctatga

SEQ ID NO: 1203849 - DNA, 15 bp, Homo sapiens
gtgtatgtttctatg

SEQ ID NO: 1203850 - DNA, 15 bp, Homo sapiens
ggtgtatgtttctat

SEQ ID NO: 1203851 - DNA, 15 bp, Homo sapiens
tggtgtatgtttcta

SEQ ID NO: 1203852 - DNA, 15 bp, Homo sapiens
ttggtgtatgtttct

SEQ ID NO: 1203853 - DNA, 15 bp, Homo sapiens
tttggtgtatgtttc

SEQ ID NO: 1203854 - DNA, 15 bp, Homo sapiens
atttggtgtatgttt

SEQ ID NO: 1203855 - DNA, 15 bp, Homo sapiens
gatttggtgtatgtt

SEQ ID NO: 1203856 - DNA, 15 bp, Homo sapiens
agatttggtgtatgt

SEQ ID NO: 1203857 - DNA, 15 bp, Homo sapiens
aagatttggtgtatg

SEQ ID NO: 1203858 - DNA, 15 bp, Homo sapiens
gaagatttggtgtat

SEQ ID NO: 1203859 - DNA, 15 bp, Homo sapiens
tgaagatttggtgta

SEQ ID NO: 1203860 - DNA, 15 bp, Homo sapiens
atgaagatttggtgt

SEQ ID NO: 1203861 - DNA, 15 bp, Homo sapiens
tatgaagatttggtg

SEQ ID NO: 1203862 - DNA, 15 bp, Homo sapiens
atatgaagatttggt

SEQ ID NO: 1203863 - DNA, 15 bp, Homo sapiens
tatatgaagatttgg

SEQ ID NO: 1203864 - DNA, 15 bp, Homo sapiens
atatatgaagatttg

SEQ ID NO: 1203865 - DNA, 15 bp, Homo sapiens
tatatatgaagattt

SEQ ID NO: 1203866 - DNA, 15 bp, Homo sapiens
gtatatatgaagatt

SEQ ID NO: 1203867 - DNA, 15 bp, Homo sapiens
tgtatatatgaagat

SEQ ID NO: 1203868 - DNA, 15 bp, Homo sapiens
gtgtatatatgaaga

SEQ ID NO: 1203869 - DNA, 15 bp, Homo sapiens
agtgtatatatgaag

SEQ ID NO: 1203870 - DNA, 15 bp, Homo sapiens
cagtgtatatatgaa

SEQ ID NO: 1203871 - DNA, 15 bp, Homo sapiens
acagtgtatatatga

SEQ ID NO: 1203872 - DNA, 15 bp, Homo sapiens
gacagtgtatatatg

SEQ ID NO: 1203873 - DNA, 15 bp, Homo sapiens
tgacagtgtatatat

SEQ ID NO: 1203874 - DNA, 15 bp, Homo sapiens
atgacagtgtatata

SEQ ID NO: 1203875 - DNA, 15 bp, Homo sapiens
gatgacagtgtatat

SEQ ID NO: 1203876 - DNA, 15 bp, Homo sapiens
tgatgacagtgtata

SEQ ID NO: 1203877 - DNA, 15 bp, Homo sapiens
atgatgacagtgtat

SEQ ID NO: 1203878 - DNA, 15 bp, Homo sapiens
tatgatgacagtgta

SEQ ID NO: 1203879 - DNA, 15 bp, Homo sapiens
ttatgatgacagtgt

SEQ ID NO: 1203880 - DNA, 15 bp, Homo sapiens
cttatgatgacagtg

SEQ ID NO: 1203881 - DNA, 15 bp, Homo sapiens
gcttatgatgacagt

SEQ ID NO: 1203882 - DNA, 15 bp, Homo sapiens
ggcttatgatgacag

SEQ ID NO: 1203883 - DNA, 15 bp, Homo sapiens
gggcttatgatgaca

SEQ ID NO: 1203884 - DNA, 15 bp, Homo sapiens
agggcttatgatgac

SEQ ID NO: 1203885 - DNA, 15 bp, Homo sapiens
cagggcttatgatga

SEQ ID NO: 1203886 - DNA, 15 bp, Homo sapiens
gcagggcttatgatg

SEQ ID NO: 1203887 - DNA, 15 bp, Homo sapiens
ggcagggcttatgat

SEQ ID NO: 1203888 - DNA, 15 bp, Homo sapiens
tggcagggcttatga

SEQ ID NO: 1203889 - DNA, 15 bp, Homo sapiens
gtggcagggcttatg

SEQ ID NO: 1203890 - DNA, 15 bp, Homo sapiens
agtggcagggcttat

SEQ ID NO: 1203891 - DNA, 15 bp, Homo sapiens
cagtggcagggctta

SEQ ID NO: 1203892 - DNA, 15 bp, Homo sapiens
gcagtggcagggctt

SEQ ID NO: 1203893 - DNA, 15 bp, Homo sapiens
agcagtggcagggct

SEQ ID NO: 1203894 - DNA, 15 bp, Homo sapiens
gagcagtggcagggc

SEQ ID NO: 1203895 - DNA, 15 bp, Homo sapiens
tgagcagtggcaggg

SEQ ID NO: 1203896 - DNA, 15 bp, Homo sapiens
gtgagcagtggcagg

SEQ ID NO: 1203897 - DNA, 15 bp, Homo sapiens
agtgagcagtggcag

SEQ ID NO: 1203898 - DNA, 15 bp, Homo sapiens
aagtgagcagtggca

SEQ ID NO: 1203899 - DNA, 15 bp, Homo sapiens
taagtgagcagtggc

SEQ ID NO: 1203900 - DNA, 15 bp, Homo sapiens
ttaagtgagcagtgg

SEQ ID NO: 1203901 - DNA, 15 bp, Homo sapiens
tttaagtgagcagtg

SEQ ID NO: 1203902 - DNA, 15 bp, Homo sapiens
ttttaagtgagcagt

SEQ ID NO: 1203903 - DNA, 15 bp, Homo sapiens
attttaagtgagcag

SEQ ID NO: 1203904 - DNA, 15 bp, Homo sapiens
aattttaagtgagca

SEQ ID NO: 1203905 - DNA, 15 bp, Homo sapiens
aaattttaagtgagc

SEQ ID NO: 1203906 - DNA, 15 bp, Homo sapiens
taaattttaagtgag

SEQ ID NO: 1203907 - DNA, 15 bp, Homo sapiens
ttaaattttaagtga

SEQ ID NO: 1203908 - DNA, 15 bp, Homo sapiens
attaaattttaagtg

SEQ ID NO: 1203909 - DNA, 15 bp, Homo sapiens
aattaaattttaagt

SEQ ID NO: 1203910 - DNA, 15 bp, Homo sapiens
aaattaaattttaag

SEQ ID NO: 1203911 - DNA, 15 bp, Homo sapiens
caaattaaattttaa

SEQ ID NO: 1203912 - DNA, 15 bp, Homo sapiens
ccaaattaaatttta

SEQ ID NO: 1203913 - DNA, 15 bp, Homo sapiens
accaaattaaatttt

SEQ ID NO: 1203914 - DNA, 15 bp, Homo sapiens
aaccaaattaaattt

SEQ ID NO: 1203915 - DNA, 15 bp, Homo sapiens
taaccaaattaaatt

SEQ ID NO: 1203916 - DNA, 15 bp, Homo sapiens
gtaaccaaattaaat

SEQ ID NO: 1203917 - DNA, 15 bp, Homo sapiens
agtaaccaaattaaa

SEQ ID NO: 1203918 - DNA, 15 bp, Homo sapiens
aagtaaccaaattaa

SEQ ID NO: 1203919 - DNA, 15 bp, Homo sapiens
taagtaaccaaatta

SEQ ID NO: 1203920 - DNA, 15 bp, Homo sapiens
ttaagtaaccaaatt

SEQ ID NO: 1203921 - DNA, 15 bp, Homo sapiens
attaagtaaccaaat

SEQ ID NO: 1203922 - DNA, 15 bp, Homo sapiens
cattaagtaaccaaa

SEQ ID NO: 1203923 - DNA, 15 bp, Homo sapiens
gcattaagtaaccaa

SEQ ID NO: 1203924 - DNA, 15 bp, Homo sapiens
agcattaagtaacca

SEQ ID NO: 1203925 - DNA, 15 bp, Homo sapiens
cagcattaagtaacc

SEQ ID NO: 1203926 - DNA, 15 bp, Homo sapiens
acagcattaagtaac

SEQ ID NO: 1203927 - DNA, 15 bp, Homo sapiens
tacagcattaagtaa

SEQ ID NO: 1203928 - DNA, 15 bp, Homo sapiens
ctacagcattaagta

SEQ ID NO: 1203929 - DNA, 15 bp, Homo sapiens
actacagcattaagt

SEQ ID NO: 1203930 - DNA, 15 bp, Homo sapiens
cactacagcattaag

SEQ ID NO: 1203931 - DNA, 15 bp, Homo sapiens
ccactacagcattaa

SEQ ID NO: 1203932 - DNA, 15 bp, Homo sapiens
cccactacagcatta

SEQ ID NO: 1203933 - DNA, 15 bp, Homo sapiens
acccactacagcatt

SEQ ID NO: 1203934 - DNA, 15 bp, Homo sapiens
aacccactacagcat

SEQ ID NO: 1203935 - DNA, 15 bp, Homo sapiens
caacccactacagca

SEQ ID NO: 1203936 - DNA, 15 bp, Homo sapiens
tcaacccactacagc

SEQ ID NO: 1203937 - DNA, 15 bp, Homo sapiens
ttcaacccactacag

SEQ ID NO: 1203938 - DNA, 15 bp, Homo sapiens
gttcaacccactaca

SEQ ID NO: 1203939 - DNA, 15 bp, Homo sapiens
agttcaacccactac

SEQ ID NO: 1203940 - DNA, 15 bp, Homo sapiens
cagttcaacccacta

SEQ ID NO: 1203941 - DNA, 15 bp, Homo sapiens
acagttcaacccact

SEQ ID NO: 1203942 - DNA, 15 bp, Homo sapiens
tacagttcaacccac

SEQ ID NO: 1203943 - DNA, 15 bp, Homo sapiens
atacagttcaaccca

SEQ ID NO: 1203944 - DNA, 15 bp, Homo sapiens
gatacagttcaaccc

SEQ ID NO: 1203945 - DNA, 15 bp, Homo sapiens
ggatacagttcaacc

SEQ ID NO: 1203946 - DNA, 15 bp, Homo sapiens
gggatacagttcaac

SEQ ID NO: 1203947 - DNA, 15 bp, Homo sapiens
agggatacagttcaa

SEQ ID NO: 1203948 - DNA, 15 bp, Homo sapiens
gagggatacagttca

SEQ ID NO: 1203949 - DNA, 15 bp, Homo sapiens
tgagggatacagttc

SEQ ID NO: 1203950 - DNA, 15 bp, Homo sapiens
ttgagggatacagtt

SEQ ID NO: 1203951 - DNA, 15 bp, Homo sapiens
tttgagggatacagt

SEQ ID NO: 1203952 - DNA, 15 bp, Homo sapiens
ttttgagggatacag

SEQ ID NO: 1203953 - DNA, 15 bp, Homo sapiens
tttttgagggataca

SEQ ID NO: 1203954 - DNA, 15 bp, Homo sapiens
ctttttgagggatac

SEQ ID NO: 1203955 - DNA, 15 bp, Homo sapiens
tctttttgagggata

SEQ ID NO: 1203956 - DNA, 15 bp, Homo sapiens
atctttttgagggat

SEQ ID NO: 1203957 - DNA, 15 bp, Homo sapiens
tatctttttgaggga

SEQ ID NO: 1203958 - DNA, 15 bp, Homo sapiens
atatctttttgaggg

SEQ ID NO: 1203959 - DNA, 15 bp, Homo sapiens
tatatctttttgagg

SEQ ID NO: 1203960 - DNA, 15 bp, Homo sapiens
atatatctttttgag

SEQ ID NO: 1203961 - DNA, 15 bp, Homo sapiens
aatatatctttttga

SEQ ID NO: 1203962 - DNA, 15 bp, Homo sapiens
aaatatatctttttg

SEQ ID NO: 1203963 - DNA, 15 bp, Homo sapiens
caaatatatcttttt

SEQ ID NO: 1203964 - DNA, 15 bp, Homo sapiens
tcaaatatatctttt

SEQ ID NO: 1203965 - DNA, 15 bp, Homo sapiens
ctcaaatatatcttt

SEQ ID NO: 1203966 - DNA, 15 bp, Homo sapiens
gctcaaatatatctt

SEQ ID NO: 1203967 - DNA, 15 bp, Homo sapiens
ggctcaaatatatct

SEQ ID NO: 1203968 - DNA, 15 bp, Homo sapiens
gggctcaaatatatc

SEQ ID NO: 1203969 - DNA, 15 bp, Homo sapiens
agggctcaaatatat

SEQ ID NO: 1203970 - DNA, 15 bp, Homo sapiens
tagggctcaaatata

SEQ ID NO: 1203971 - DNA, 15 bp, Homo sapiens
gtagggctcaaatat

SEQ ID NO: 1203972 - DNA, 15 bp, Homo sapiens
ggtagggctcaaata

SEQ ID NO: 1203973 - DNA, 15 bp, Homo sapiens
tggtagggctcaaat

SEQ ID NO: 1203974 - DNA, 15 bp, Homo sapiens
gtggtagggctcaaa

SEQ ID NO: 1203975 - DNA, 15 bp, Homo sapiens
ggtggtagggctcaa

SEQ ID NO: 1203976 - DNA, 15 bp, Homo sapiens
gggtggtagggctca

SEQ ID NO: 1203977 - DNA, 15 bp, Homo sapiens
cgggtggtagggctc

SEQ ID NO: 1203978 - DNA, 15 bp, Homo sapiens
gcgggtggtagggct

SEQ ID NO: 1203979 - DNA, 15 bp, Homo sapiens
tgcgggtggtagggc

SEQ ID NO: 1203980 - DNA, 15 bp, Homo sapiens
gtgcgggtggtaggg

SEQ ID NO: 1203981 - DNA, 15 bp, Homo sapiens
tgtgcgggtggtagg

SEQ ID NO: 1203982 - DNA, 15 bp, Homo sapiens
gtgtgcgggtggtag

SEQ ID NO: 1203983 - DNA, 15 bp, Homo sapiens
tgtgtgcgggtggta

SEQ ID NO: 1203984 - DNA, 15 bp, Homo sapiens
gtgtgtgcgggtggt

SEQ ID NO: 1203985 - DNA, 15 bp, Homo sapiens
tgtgtgtgcgggtgg

SEQ ID NO: 1203986 - DNA, 15 bp, Homo sapiens
gtgtgtgtgcgggtg

SEQ ID NO: 1203987 - DNA, 15 bp, Homo sapiens
tgtgtgtgtgcgggt

SEQ ID NO: 1203988 - DNA, 15 bp, Homo sapiens
gtgtgtgtgtgcggg

SEQ ID NO: 1203989 - DNA, 15 bp, Homo sapiens
agtgtgtgtgtgcgg

SEQ ID NO: 1203990 - DNA, 15 bp, Homo sapiens
aagtgtgtgtgtgcg

SEQ ID NO: 1203991 - DNA, 15 bp, Homo sapiens
taagtgtgtgtgtgc

SEQ ID NO: 1203992 - DNA, 15 bp, Homo sapiens
ataagtgtgtgtgtg

SEQ ID NO: 1203993 - DNA, 15 bp, Homo sapiens
aataagtgtgtgtgt

SEQ ID NO: 1203994 - DNA, 15 bp, Homo sapiens
taataagtgtgtgtg

SEQ ID NO: 1203995 - DNA, 15 bp, Homo sapiens
ttaataagtgtgtgt

SEQ ID NO: 1203996 - DNA, 15 bp, Homo sapiens
attaataagtgtgtg

SEQ ID NO: 1203997 - DNA, 15 bp, Homo sapiens
cattaataagtgtgt

SEQ ID NO: 1203998 - DNA, 15 bp, Homo sapiens
acattaataagtgtg

SEQ ID NO: 1203999 - DNA, 15 bp, Homo sapiens
cacattaataagtgt

SEQ ID NO: 1204000 - DNA, 15 bp, Homo sapiens
tcacattaataagtg

SEQ ID NO: 1204001 - DNA, 15 bp, Homo sapiens
gtcacattaataagt

SEQ ID NO: 1204002 - DNA, 15 bp, Homo sapiens
ggtcacattaataag

SEQ ID NO: 1204003 - DNA, 15 bp, Homo sapiens
aggtcacattaataa

SEQ ID NO: 1204004 - DNA, 15 bp, Homo sapiens
aaggtcacattaata

SEQ ID NO: 1204005 - DNA, 15 bp, Homo sapiens
caaggtcacattaat

SEQ ID NO: 1204006 - DNA, 15 bp, Homo sapiens
acaaggtcacattaa

SEQ ID NO: 1204007 - DNA, 15 bp, Homo sapiens
aacaaggtcacatta

SEQ ID NO: 1204008 - DNA, 15 bp, Homo sapiens
aaacaaggtcacatt

SEQ ID NO: 1204009 - DNA, 15 bp, Homo sapiens
caaacaaggtcacat

SEQ ID NO: 1204010 - DNA, 15 bp, Homo sapiens
ccaaacaaggtcaca

SEQ ID NO: 1204011 - DNA, 15 bp, Homo sapiens
tccaaacaaggtcac

SEQ ID NO: 1204012 - DNA, 15 bp, Homo sapiens
ttccaaacaaggtca

SEQ ID NO: 1204013 - DNA, 15 bp, Homo sapiens
tttccaaacaaggtc

SEQ ID NO: 1204014 - DNA, 15 bp, Homo sapiens
atttccaaacaaggt

SEQ ID NO: 1204015 - DNA, 15 bp, Homo sapiens
catttccaaacaagg

SEQ ID NO: 1204016 - DNA, 15 bp, Homo sapiens
ttggggatggaggtg

SEQ ID NO: 1204017 - DNA, 15 bp, Homo sapiens
gttggggatggaggt

SEQ ID NO: 1204018 - DNA, 15 bp, Homo sapiens
tgttggggatggagg

SEQ ID NO: 1204019 - DNA, 15 bp, Homo sapiens
gtgttggggatggag

SEQ ID NO: 1204020 - DNA, 15 bp, Homo sapiens
ggtgttggggatgga

SEQ ID NO: 1204021 - DNA, 15 bp, Homo sapiens
aggtgttggggatgg

SEQ ID NO: 1204022 - DNA, 15 bp, Homo sapiens
taggtgttggggatg

SEQ ID NO: 1204023 - DNA, 15 bp, Homo sapiens
ataggtgttggggat

SEQ ID NO: 1204024 - DNA, 15 bp, Homo sapiens
aataggtgttgggga

SEQ ID NO: 1204025 - DNA, 15 bp, Homo sapiens
gaataggtgttgggg

SEQ ID NO: 1204026 - DNA, 15 bp, Homo sapiens
ggaataggtgttggg

SEQ ID NO: 1204027 - DNA, 15 bp, Homo sapiens
gggaataggtgttgg

SEQ ID NO: 1204028 - DNA, 15 bp, Homo sapiens
ggggaataggtgttg

SEQ ID NO: 1204029 - DNA, 15 bp, Homo sapiens
gggggaataggtgtt

SEQ ID NO: 1204030 - DNA, 15 bp, Homo sapiens
tgggggaataggtgt

SEQ ID NO: 1204031 - DNA, 15 bp, Homo sapiens
ttgggggaataggtg

SEQ ID NO: 1204032 - DNA, 15 bp, Homo sapiens
tttgggggaataggt

SEQ ID NO: 1204033 - DNA, 15 bp, Homo sapiens
gtttgggggaatagg

SEQ ID NO: 1204034 - DNA, 15 bp, Homo sapiens
agtttgggggaatag

SEQ ID NO: 1204035 - DNA, 15 bp, Homo sapiens
aagtttgggggaata

SEQ ID NO: 1204036 - DNA, 15 bp, Homo sapiens
taagtttgggggaat

SEQ ID NO: 1204037 - DNA, 15 bp, Homo sapiens
ttaagtttgggggaa

SEQ ID NO: 1204038 - DNA, 15 bp, Homo sapiens
tttaagtttggggga

SEQ ID NO: 1204039 - DNA, 15 bp, Homo sapiens
atttaagtttggggg

SEQ ID NO: 1204040 - DNA, 15 bp, Homo sapiens
aatttaagtttgggg

SEQ ID NO: 1204041 - DNA, 15 bp, Homo sapiens
gaatttaagtttggg

SEQ ID NO: 1204042 - DNA, 15 bp, Homo sapiens
agaatttaagtttgg

SEQ ID NO: 1204043 - DNA, 15 bp, Homo sapiens
aagaatttaagtttg

SEQ ID NO: 1204044 - DNA, 15 bp, Homo sapiens
taagaatttaagttt

SEQ ID NO: 1204045 - DNA, 15 bp, Homo sapiens
ttaagaatttaagtt

SEQ ID NO: 1204046 - DNA, 15 bp, Homo sapiens
cttaagaatttaagt

SEQ ID NO: 1204047 - DNA, 15 bp, Homo sapiens
tcttaagaatttaag

SEQ ID NO: 1204048 - DNA, 15 bp, Homo sapiens
ctcttaagaatttaa

SEQ ID NO: 1204049 - DNA, 15 bp, Homo sapiens
tctcttaagaattta

SEQ ID NO: 1204050 - DNA, 15 bp, Homo sapiens
ttctcttaagaattt

SEQ ID NO: 1204051 - DNA, 15 bp, Homo sapiens
attctcttaagaatt

SEQ ID NO: 1204052 - DNA, 15 bp, Homo sapiens
gattctcttaagaat

SEQ ID NO: 1204053 - DNA, 15 bp, Homo sapiens
ggattctcttaagaa

SEQ ID NO: 1204054 - DNA, 15 bp, Homo sapiens
aggattctcttaaga

SEQ ID NO: 1204055 - DNA, 15 bp, Homo sapiens
taggattctcttaag

SEQ ID NO: 1204056 - DNA, 15 bp, Homo sapiens
ctaggattctcttaa

SEQ ID NO: 1204057 - DNA, 15 bp, Homo sapiens
tctaggattctctta

SEQ ID NO: 1204058 - DNA, 15 bp, Homo sapiens
atctaggattctctt

SEQ ID NO: 1204059 - DNA, 15 bp, Homo sapiens
gatctaggattctct

SEQ ID NO: 1204060 - DNA, 15 bp, Homo sapiens
tgatctaggattctc

SEQ ID NO: 1204061 - DNA, 15 bp, Homo sapiens
ttgatctaggattct

SEQ ID NO: 1204062 - DNA, 15 bp, Homo sapiens
cttgatctaggattc

SEQ ID NO: 1204063 - DNA, 15 bp, Homo sapiens
gcttgatctaggatt

SEQ ID NO: 1204064 - DNA, 15 bp, Homo sapiens
ggcttgatctaggat

SEQ ID NO: 1204065 - DNA, 15 bp, Homo sapiens
tggcttgatctagga

SEQ ID NO: 1204066 - DNA, 15 bp, Homo sapiens
atggcttgatctagg

SEQ ID NO: 1204067 - DNA, 15 bp, Homo sapiens
catggcttgatctag

SEQ ID NO: 1204068 - DNA, 15 bp, Homo sapiens
ccatggcttgatcta

SEQ ID NO: 1204069 - DNA, 15 bp, Homo sapiens
cccatggcttgatct

SEQ ID NO: 1204070 - DNA, 15 bp, Homo sapiens
acccatggcttgatc

SEQ ID NO: 1204071 - DNA, 15 bp, Homo sapiens
aacccatggcttgat

SEQ ID NO: 1204072 - DNA, 15 bp, Homo sapiens
aaacccatggcttga

SEQ ID NO: 1204073 - DNA, 15 bp, Homo sapiens
caaacccatggcttg

SEQ ID NO: 1204074 - DNA, 15 bp, Homo sapiens
ccaaacccatggctt

SEQ ID NO: 1204075 - DNA, 15 bp, Homo sapiens
accaaacccatggct

SEQ ID NO: 1204076 - DNA, 15 bp, Homo sapiens
caccaaacccatggc

SEQ ID NO: 1204077 - DNA, 15 bp, Homo sapiens
tcaccaaacccatgg

SEQ ID NO: 1204078 - DNA, 15 bp, Homo sapiens
ctcaccaaacccatg

SEQ ID NO: 1204079 - DNA, 15 bp, Homo sapiens
actcaccaaacccat

SEQ ID NO: 1204080 - DNA, 15 bp, Homo sapiens
aactcaccaaaccca

SEQ ID NO: 1204081 - DNA, 15 bp, Homo sapiens
taactcaccaaaccc

SEQ ID NO: 1204082 - DNA, 15 bp, Homo sapiens
ttaactcaccaaacc

SEQ ID NO: 1204083 - DNA, 15 bp, Homo sapiens
cttaactcaccaaac

SEQ ID NO: 1204084 - DNA, 15 bp, Homo sapiens
gcttaactcaccaaa

SEQ ID NO: 1204085 - DNA, 15 bp, Homo sapiens
agcttaactcaccaa

SEQ ID NO: 1204086 - DNA, 15 bp, Homo sapiens
tagcttaactcacca

SEQ ID NO: 1204087 - DNA, 15 bp, Homo sapiens
ttagcttaactcacc

SEQ ID NO: 1204088 - DNA, 15 bp, Homo sapiens
cttagcttaactcac

SEQ ID NO: 1204089 - DNA, 15 bp, Homo sapiens
gcttagcttaactca

SEQ ID NO: 1204090 - DNA, 15 bp, Homo sapiens
ggcttagcttaactc

SEQ ID NO: 1204091 - DNA, 15 bp, Homo sapiens
tggcttagcttaact

SEQ ID NO: 1204092 - DNA, 15 bp, Homo sapiens
ctggcttagcttaac

SEQ ID NO: 1204093 - DNA, 15 bp, Homo sapiens
tctggcttagcttaa

SEQ ID NO: 1204094 - DNA, 15 bp, Homo sapiens
atctggcttagctta

SEQ ID NO: 1204095 - DNA, 15 bp, Homo sapiens
catctggcttagctt

SEQ ID NO: 1204096 - DNA, 15 bp, Homo sapiens
tcatctggcttagct

SEQ ID NO: 1204097 - DNA, 15 bp, Homo sapiens
atcatctggcttagc

SEQ ID NO: 1204098 - DNA, 15 bp, Homo sapiens
tatcatctggcttag

SEQ ID NO: 1204099 - DNA, 15 bp, Homo sapiens
gtatcatctggctta

SEQ ID NO: 1204100 - DNA, 15 bp, Homo sapiens
tgtatcatctggctt

SEQ ID NO: 1204101 - DNA, 15 bp, Homo sapiens
ctgtatcatctggct

SEQ ID NO: 1204102 - DNA, 15 bp, Homo sapiens
actgtatcatctggc

SEQ ID NO: 1204103 - DNA, 15 bp, Homo sapiens
tactgtatcatctgg

SEQ ID NO: 1204104 - DNA, 15 bp, Homo sapiens
ttactgtatcatctg

SEQ ID NO: 1204105 - DNA, 15 bp, Homo sapiens
tttactgtatcatct

SEQ ID NO: 1204106 - DNA, 15 bp, Homo sapiens
atttactgtatcatc

SEQ ID NO: 1204107 - DNA, 15 bp, Homo sapiens
catttactgtatcat

SEQ ID NO: 1204108 - DNA, 15 bp, Homo sapiens
acatttactgtatca

SEQ ID NO: 1204109 - DNA, 15 bp, Homo sapiens
cacatttactgtatc

SEQ ID NO: 1204110 - DNA, 15 bp, Homo sapiens
gcacatttactgtat

SEQ ID NO: 1204111 - DNA, 15 bp, Homo sapiens
tgcacatttactgta

SEQ ID NO: 1204112 - DNA, 15 bp, Homo sapiens
ctgcacatttactgt

SEQ ID NO: 1204113 - DNA, 15 bp, Homo sapiens
cctgcacatttactg

SEQ ID NO: 1204114 - DNA, 15 bp, Homo sapiens
tcctgcacatttact

SEQ ID NO: 1204115 - DNA, 15 bp, Homo sapiens
ttcctgcacatttac

SEQ ID NO: 1204116 - DNA, 15 bp, Homo sapiens
tttcctgcacattta

SEQ ID NO: 1204117 - DNA, 15 bp, Homo sapiens
gtttcctgcacattt

SEQ ID NO: 1204118 - DNA, 15 bp, Homo sapiens
ggtttcctgcacatt

SEQ ID NO: 1204119 - DNA, 15 bp, Homo sapiens
aggtttcctgcacat

SEQ ID NO: 1204120 - DNA, 15 bp, Homo sapiens
caggtttcctgcaca

SEQ ID NO: 1204121 - DNA, 15 bp, Homo sapiens
gcaggtttcctgcac

SEQ ID NO: 1204122 - DNA, 15 bp, Homo sapiens
ggcaggtttcctgca

SEQ ID NO: 1204123 - DNA, 15 bp, Homo sapiens
aggcaggtttcctgc

SEQ ID NO: 1204124 - DNA, 15 bp, Homo sapiens
aaggcaggtttcctg

SEQ ID NO: 1204125 - DNA, 15 bp, Homo sapiens
taaggcaggtttcct

SEQ ID NO: 1204126 - DNA, 15 bp, Homo sapiens
ataaggcaggtttcc

SEQ ID NO: 1204127 - DNA, 15 bp, Homo sapiens
tataaggcaggtttc

SEQ ID NO: 1204128 - DNA, 15 bp, Homo sapiens
ttataaggcaggttt

SEQ ID NO: 1204129 - DNA, 15 bp, Homo sapiens
tttataaggcaggtt

SEQ ID NO: 1204130 - DNA, 15 bp, Homo sapiens
ctttataaggcaggt

SEQ ID NO: 1204131 - DNA, 15 bp, Homo sapiens
actttataaggcagg

SEQ ID NO: 1204132 - DNA, 15 bp, Homo sapiens
tactttataaggcag

SEQ ID NO: 1204133 - DNA, 15 bp, Homo sapiens
ttactttataaggca

SEQ ID NO: 1204134 - DNA, 15 bp, Homo sapiens
tttactttataaggc

SEQ ID NO: 1204135 - DNA, 15 bp, Homo sapiens
atttactttataagg

SEQ ID NO: 1204136 - DNA, 15 bp, Homo sapiens
catttactttataag

SEQ ID NO: 1204137 - DNA, 15 bp, Homo sapiens
gcatttactttataa

SEQ ID NO: 1204138 - DNA, 15 bp, Homo sapiens
cgcatttactttata

SEQ ID NO: 1204139 - DNA, 15 bp, Homo sapiens
acgcatttactttat

SEQ ID NO: 1204140 - DNA, 15 bp, Homo sapiens
aacgcatttacttta

SEQ ID NO: 1204141 - DNA, 15 bp, Homo sapiens
gaacgcatttacttt

SEQ ID NO: 1204142 - DNA, 15 bp, Homo sapiens
agaacgcatttactt

SEQ ID NO: 1204143 - DNA, 15 bp, Homo sapiens
gagaacgcatttact

SEQ ID NO: 1204144 - DNA, 15 bp, Homo sapiens
agagaacgcatttac

SEQ ID NO: 1204145 - DNA, 15 bp, Homo sapiens
gagagaacgcattta

SEQ ID NO: 1204146 - DNA, 15 bp, Homo sapiens
agagagaacgcattt

SEQ ID NO: 1204147 - DNA, 15 bp, Homo sapiens
gagagagaacgcatt

SEQ ID NO: 1204148 - DNA, 15 bp, Homo sapiens
cgagagagaacgcat

SEQ ID NO: 1204149 - DNA, 15 bp, Homo sapiens
acgagagagaacgca

SEQ ID NO: 1204150 - DNA, 15 bp, Homo sapiens
cacgagagagaacgc

SEQ ID NO: 1204151 - DNA, 15 bp, Homo sapiens
gcacgagagagaacg

SEQ ID NO: 1204152 - DNA, 15 bp, Homo sapiens
agcacgagagagaac

SEQ ID NO: 1204153 - DNA, 15 bp, Homo sapiens
cagcacgagagagaa

SEQ ID NO: 1204154 - DNA, 15 bp, Homo sapiens
tcagcacgagagaga

SEQ ID NO: 1204155 - DNA, 15 bp, Homo sapiens
ctcagcacgagagag

SEQ ID NO: 1204156 - DNA, 15 bp, Homo sapiens
tctcagcacgagaga

SEQ ID NO: 1204157 - DNA, 15 bp, Homo sapiens
ttctcagcacgagag

SEQ ID NO: 1204158 - DNA, 15 bp, Homo sapiens
tttctcagcacgaga

SEQ ID NO: 1204159 - DNA, 15 bp, Homo sapiens
gtttctcagcacgag

SEQ ID NO: 1204160 - DNA, 15 bp, Homo sapiens
agtttctcagcacga

SEQ ID NO: 1204161 - DNA, 15 bp, Homo sapiens
aagtttctcagcacg

SEQ ID NO: 1204162 - DNA, 15 bp, Homo sapiens
taagtttctcagcac

SEQ ID NO: 1204163 - DNA, 15 bp, Homo sapiens
ataagtttctcagca

SEQ ID NO: 1204164 - DNA, 15 bp, Homo sapiens
tataagtttctcagc

SEQ ID NO: 1204165 - DNA, 15 bp, Homo sapiens
ttataagtttctcag

SEQ ID NO: 1204166 - DNA, 15 bp, Homo sapiens
cttataagtttctca

SEQ ID NO: 1204167 - DNA, 15 bp, Homo sapiens
tcttataagtttctc

SEQ ID NO: 1204168 - DNA, 15 bp, Homo sapiens
atcttataagtttct

SEQ ID NO: 1204169 - DNA, 15 bp, Homo sapiens
gatcttataagtttc

SEQ ID NO: 1204170 - DNA, 15 bp, Homo sapiens
ggatcttataagttt

SEQ ID NO: 1204171 - DNA, 15 bp, Homo sapiens
aggatcttataagtt

SEQ ID NO: 1204172 - DNA, 15 bp, Homo sapiens
caggatcttataagt

SEQ ID NO: 1204173 - DNA, 15 bp, Homo sapiens
gcaggatcttataag

SEQ ID NO: 1204174 - DNA, 15 bp, Homo sapiens
agcaggatcttataa

SEQ ID NO: 1204175 - DNA, 15 bp, Homo sapiens
cagcaggatcttata

SEQ ID NO: 1204176 - DNA, 15 bp, Homo sapiens
ccagcaggatcttat

SEQ ID NO: 1204177 - DNA, 15 bp, Homo sapiens
gccagcaggatctta

SEQ ID NO: 1204178 - DNA, 15 bp, Homo sapiens
cgccagcaggatctt

SEQ ID NO: 1204179 - DNA, 15 bp, Homo sapiens
gcgccagcaggatct

SEQ ID NO: 1204180 - DNA, 15 bp, Homo sapiens
agcgccagcaggatc

SEQ ID NO: 1204181 - DNA, 15 bp, Homo sapiens
gagcgccagcaggat

SEQ ID NO: 1204182 - DNA, 15 bp, Homo sapiens
agagcgccagcagga

SEQ ID NO: 1204183 - DNA, 15 bp, Homo sapiens
tagagcgccagcagg

SEQ ID NO: 1204184 - DNA, 15 bp, Homo sapiens
atagagcgccagcag

SEQ ID NO: 1204185 - DNA, 15 bp, Homo sapiens
tatagagcgccagca

SEQ ID NO: 1204186 - DNA, 15 bp, Homo sapiens
gtatagagcgccagc

SEQ ID NO: 1204187 - DNA, 15 bp, Homo sapiens
agtatagagcgccag

SEQ ID NO: 1204188 - DNA, 15 bp, Homo sapiens
aagtatagagcgcca

SEQ ID NO: 1204189 - DNA, 15 bp, Homo sapiens
aaagtatagagcgcc

SEQ ID NO: 1204190 - DNA, 15 bp, Homo sapiens
taaagtatagagcgc

SEQ ID NO: 1204191 - DNA, 15 bp, Homo sapiens
ataaagtatagagcg

SEQ ID NO: 1204192 - DNA, 15 bp, Homo sapiens
aataaagtatagagc

SEQ ID NO: 1204193 - DNA, 15 bp, Homo sapiens
caataaagtatagag

SEQ ID NO: 1204194 - DNA, 15 bp, Homo sapiens
ccaataaagtataga

SEQ ID NO: 1204195 - DNA, 15 bp, Homo sapiens
gccaataaagtatag

SEQ ID NO: 1204196 - DNA, 15 bp, Homo sapiens
agccaataaagtata

SEQ ID NO: 1204197 - DNA, 15 bp, Homo sapiens
tagccaataaagtat

SEQ ID NO: 1204198 - DNA, 15 bp, Homo sapiens
ctagccaataaagta

SEQ ID NO: 1204199 - DNA, 15 bp, Homo sapiens
cctagccaataaagt

SEQ ID NO: 1204200 - DNA, 15 bp, Homo sapiens
tcctagccaataaag

SEQ ID NO: 1204201 - DNA, 15 bp, Homo sapiens
ctcctagccaataaa

SEQ ID NO: 1204202 - DNA, 15 bp, Homo sapiens
tctcctagccaataa

SEQ ID NO: 1204203 - DNA, 15 bp, Homo sapiens
ttctcctagccaata

SEQ ID NO: 1204204 - DNA, 15 bp, Homo sapiens
cttctcctagccaat

SEQ ID NO: 1204205 - DNA, 15 bp, Homo sapiens
acttctcctagccaa

SEQ ID NO: 1204206 - DNA, 15 bp, Homo sapiens
tacttctcctagcca

SEQ ID NO: 1204207 - DNA, 15 bp, Homo sapiens
ttacttctcctagcc

SEQ ID NO: 1204208 - DNA, 15 bp, Homo sapiens
tttacttctcctagc

SEQ ID NO: 1204209 - DNA, 15 bp, Homo sapiens
ctttacttctcctag

SEQ ID NO: 1204210 - DNA, 15 bp, Homo sapiens
tctttacttctccta

SEQ ID NO: 1204211 - DNA, 15 bp, Homo sapiens
ttctttacttctcct

SEQ ID NO: 1204212 - DNA, 15 bp, Homo sapiens
tttctttacttctcc

SEQ ID NO: 1204213 - DNA, 15 bp, Homo sapiens
atttctttacttctc

SEQ ID NO: 1204214 - DNA, 15 bp, Homo sapiens
catttctttacttct

SEQ ID NO: 1204215 - DNA, 15 bp, Homo sapiens
acatttctttacttc

SEQ ID NO: 1204216 - DNA, 15 bp, Homo sapiens
gacatttctttactt

SEQ ID NO: 1204217 - DNA, 15 bp, Homo sapiens
agacatttctttact

SEQ ID NO: 1204218 - DNA, 15 bp, Homo sapiens
cagacatttctttac

SEQ ID NO: 1204219 - DNA, 15 bp, Homo sapiens
tcagacatttcttta

SEQ ID NO: 1204220 - DNA, 15 bp, Homo sapiens
atcagacatttcttt

SEQ ID NO: 1204221 - DNA, 15 bp, Homo sapiens
aatcagacatttctt

SEQ ID NO: 1204222 - DNA, 15 bp, Homo sapiens
gaatcagacatttct

SEQ ID NO: 1204223 - DNA, 15 bp, Homo sapiens
cgaatcagacatttc

SEQ ID NO: 1204224 - DNA, 15 bp, Homo sapiens
tcgaatcagacattt

SEQ ID NO: 1204225 - DNA, 15 bp, Homo sapiens
ctcgaatcagacatt

SEQ ID NO: 1204226 - DNA, 15 bp, Homo sapiens
cctcgaatcagacat

SEQ ID NO: 1204227 - DNA, 15 bp, Homo sapiens
acctcgaatcagaca

SEQ ID NO: 1204228 - DNA, 15 bp, Homo sapiens
cacctcgaatcagac

SEQ ID NO: 1204229 - DNA, 15 bp, Homo sapiens
tcacctcgaatcaga

SEQ ID NO: 1204230 - DNA, 15 bp, Homo sapiens
ttcacctcgaatcag

SEQ ID NO: 1204231 - DNA, 15 bp, Homo sapiens
cttcacctcgaatca

SEQ ID NO: 1204232 - DNA, 15 bp, Homo sapiens
tcttcacctcgaatc

SEQ ID NO: 1204233 - DNA, 15 bp, Homo sapiens
atcttcacctcgaat

SEQ ID NO: 1204234 - DNA, 15 bp, Homo sapiens
catcttcacctcgaa

SEQ ID NO: 1204235 - DNA, 15 bp, Homo sapiens
gcatcttcacctcga

SEQ ID NO: 1204236 - DNA, 15 bp, Homo sapiens
agcatcttcacctcg

SEQ ID NO: 1204237 - DNA, 15 bp, Homo sapiens
gagcatcttcacctc

SEQ ID NO: 1204238 - DNA, 15 bp, Homo sapiens
ggagcatcttcacct

SEQ ID NO: 1204239 - DNA, 15 bp, Homo sapiens
gggagcatcttcacc

SEQ ID NO: 1204240 - DNA, 15 bp, Homo sapiens
ggggagcatcttcac

SEQ ID NO: 1204241 - DNA, 15 bp, Homo sapiens
tggggagcatcttca

SEQ ID NO: 1204242 - DNA, 15 bp, Homo sapiens
atggggagcatcttc

SEQ ID NO: 1204243 - DNA, 15 bp, Homo sapiens
catggggagcatctt

SEQ ID NO: 1204244 - DNA, 15 bp, Homo sapiens
gcatggggagcatct

SEQ ID NO: 1204245 - DNA, 15 bp, Homo sapiens
ggcatggggagcatc

SEQ ID NO: 1204246 - DNA, 15 bp, Homo sapiens
aggcatggggagcat

SEQ ID NO: 1204247 - DNA, 15 bp, Homo sapiens
aaggcatggggagca

SEQ ID NO: 1204248 - DNA, 15 bp, Homo sapiens
caaggcatggggagc

SEQ ID NO: 1204249 - DNA, 15 bp, Homo sapiens
gcaaggcatggggag

SEQ ID NO: 1204250 - DNA, 15 bp, Homo sapiens
tgcaaggcatgggga

SEQ ID NO: 1204251 - DNA, 15 bp, Homo sapiens
ctgcaaggcatgggg

SEQ ID NO: 1204252 - DNA, 15 bp, Homo sapiens
gctgcaaggcatggg

SEQ ID NO: 1204253 - DNA, 15 bp, Homo sapiens
tgctgcaaggcatgg

SEQ ID NO: 1204254 - DNA, 15 bp, Homo sapiens
ctgctgcaaggcatg

SEQ ID NO: 1204255 - DNA, 15 bp, Homo sapiens
cctgctgcaaggcat

SEQ ID NO: 1204256 - DNA, 15 bp, Homo sapiens
ccctgctgcaaggca

SEQ ID NO: 1204257 - DNA, 15 bp, Homo sapiens
tccctgctgcaaggc

SEQ ID NO: 1204258 - DNA, 15 bp, Homo sapiens
ttccctgctgcaagg

SEQ ID NO: 1204259 - DNA, 15 bp, Homo sapiens
tttccctgctgcaag

SEQ ID NO: 1204260 - DNA, 15 bp, Homo sapiens
atttccctgctgcaa

SEQ ID NO: 1204261 - DNA, 15 bp, Homo sapiens
aatttccctgctgca

SEQ ID NO: 1204262 - DNA, 15 bp, Homo sapiens
aaatttccctgctgc

SEQ ID NO: 1204263 - DNA, 15 bp, Homo sapiens
taaatttccctgctg

SEQ ID NO: 1204264 - DNA, 15 bp, Homo sapiens
ttaaatttccctgct

SEQ ID NO: 1204265 - DNA, 15 bp, Homo sapiens
tttaaatttccctgc

SEQ ID NO: 1204266 - DNA, 15 bp, Homo sapiens
atttaaatttccctg

SEQ ID NO: 1204267 - DNA, 15 bp, Homo sapiens
aatttaaatttccct

SEQ ID NO: 1204268 - DNA, 15 bp, Homo sapiens
caatttaaatttccc

SEQ ID NO: 1204269 - DNA, 15 bp, Homo sapiens
gcaatttaaatttcc

SEQ ID NO: 1204270 - DNA, 15 bp, Homo sapiens
ggcaatttaaatttc

SEQ ID NO: 1204271 - DNA, 15 bp, Homo sapiens
aggcaatttaaattt

SEQ ID NO: 1204272 - DNA, 15 bp, Homo sapiens
gaggcaatttaaatt

SEQ ID NO: 1204273 - DNA, 15 bp, Homo sapiens
agaggcaatttaaat

SEQ ID NO: 1204274 - DNA, 15 bp, Homo sapiens
cagaggcaatttaaa

SEQ ID NO: 1204275 - DNA, 15 bp, Homo sapiens
gcagaggcaatttaa

SEQ ID NO: 1204276 - DNA, 15 bp, Homo sapiens
agcagaggcaattta

SEQ ID NO: 1204277 - DNA, 15 bp, Homo sapiens
aagcagaggcaattt

SEQ ID NO: 1204278 - DNA, 15 bp, Homo sapiens
taagcagaggcaatt

SEQ ID NO: 1204279 - DNA, 15 bp, Homo sapiens
ctaagcagaggcaat

SEQ ID NO: 1204280 - DNA, 15 bp, Homo sapiens
tctaagcagaggcaa

SEQ ID NO: 1204281 - DNA, 15 bp, Homo sapiens
ctctaagcagaggca

SEQ ID NO: 1204282 - DNA, 15 bp, Homo sapiens
gctctaagcagaggc

SEQ ID NO: 1204283 - DNA, 15 bp, Homo sapiens
cgctctaagcagagg

SEQ ID NO: 1204284 - DNA, 15 bp, Homo sapiens
acgctctaagcagag

SEQ ID NO: 1204285 - DNA, 15 bp, Homo sapiens
aacgctctaagcaga

SEQ ID NO: 1204286 - DNA, 15 bp, Homo sapiens
aaacgctctaagcag

SEQ ID NO: 1204287 - DNA, 15 bp, Homo sapiens
gaaacgctctaagca

SEQ ID NO: 1204288 - DNA, 15 bp, Homo sapiens
ggaaacgctctaagc

SEQ ID NO: 1204289 - DNA, 15 bp, Homo sapiens
tggaaacgctctaag

SEQ ID NO: 1204290 - DNA, 15 bp, Homo sapiens
ctggaaacgctctaa

SEQ ID NO: 1204291 - DNA, 15 bp, Homo sapiens
tctggaaacgctcta

SEQ ID NO: 1204292 - DNA, 15 bp, Homo sapiens
gtctggaaacgctct

SEQ ID NO: 1204293 - DNA, 15 bp, Homo sapiens
ggtctggaaacgctc

SEQ ID NO: 1204294 - DNA, 15 bp, Homo sapiens
aggtctggaaacgct

SEQ ID NO: 1204295 - DNA, 15 bp, Homo sapiens
caggtctggaaacgc

SEQ ID NO: 1204296 - DNA, 15 bp, Homo sapiens
tcaggtctggaaacg

SEQ ID NO: 1204297 - DNA, 15 bp, Homo sapiens
ttcaggtctggaaac

SEQ ID NO: 1204298 - DNA, 15 bp, Homo sapiens
tttcaggtctggaaa

SEQ ID NO: 1204299 - DNA, 15 bp, Homo sapiens
ctttcaggtctggaa

SEQ ID NO: 1204300 - DNA, 15 bp, Homo sapiens
tctttcaggtctgga

SEQ ID NO: 1204301 - DNA, 15 bp, Homo sapiens
gtctttcaggtctgg

SEQ ID NO: 1204302 - DNA, 15 bp, Homo sapiens
ggtctttcaggtctg

SEQ ID NO: 1204303 - DNA, 15 bp, Homo sapiens
tggtctttcaggtct

SEQ ID NO: 1204304 - DNA, 15 bp, Homo sapiens
ctggtctttcaggtc

SEQ ID NO: 1204305 - DNA, 15 bp, Homo sapiens
actggtctttcaggt

SEQ ID NO: 1204306 - DNA, 15 bp, Homo sapiens
cactggtctttcagg

SEQ ID NO: 1204307 - DNA, 15 bp, Homo sapiens
ccactggtctttcag

SEQ ID NO: 1204308 - DNA, 15 bp, Homo sapiens
accactggtctttca

SEQ ID NO: 1204309 - DNA, 15 bp, Homo sapiens
aaccactggtctttc

SEQ ID NO: 1204310 - DNA, 15 bp, Homo sapiens
aaaccactggtcttt

SEQ ID NO: 1204311 - DNA, 15 bp, Homo sapiens
taaaccactggtctt

SEQ ID NO: 1204312 - DNA, 15 bp, Homo sapiens
ctaaaccactggtct

SEQ ID NO: 1204313 - DNA, 15 bp, Homo sapiens
cctaaaccactggtc

SEQ ID NO: 1204314 - DNA, 15 bp, Homo sapiens
ccctaaaccactggt

SEQ ID NO: 1204315 - DNA, 15 bp, Homo sapiens
tccctaaaccactgg

SEQ ID NO: 1204316 - DNA, 15 bp, Homo sapiens
ttccctaaaccactg

SEQ ID NO: 1204317 - DNA, 15 bp, Homo sapiens
cttccctaaaccact

SEQ ID NO: 1204318 - DNA, 15 bp, Homo sapiens
gcttccctaaaccac

SEQ ID NO: 1204319 - DNA, 15 bp, Homo sapiens
tgcttccctaaacca

SEQ ID NO: 1204320 - DNA, 15 bp, Homo sapiens
gtgcttccctaaacc

SEQ ID NO: 1204321 - DNA, 15 bp, Homo sapiens
agtgcttccctaaac

SEQ ID NO: 1204322 - DNA, 15 bp, Homo sapiens
gagtgcttccctaaa

SEQ ID NO: 1204323 - DNA, 15 bp, Homo sapiens
agagtgcttccctaa

SEQ ID NO: 1204324 - DNA, 15 bp, Homo sapiens
tagagtgcttcccta

SEQ ID NO: 1204325 - DNA, 15 bp, Homo sapiens
gtagagtgcttccct

SEQ ID NO: 1204326 - DNA, 15 bp, Homo sapiens
tgtagagtgcttccc

SEQ ID NO: 1204327 - DNA, 15 bp, Homo sapiens
atgtagagtgcttcc

SEQ ID NO: 1204328 - DNA, 15 bp, Homo sapiens
catgtagagtgcttc

SEQ ID NO: 1204329 - DNA, 15 bp, Homo sapiens
tcatgtagagtgctt

SEQ ID NO: 1204330 - DNA, 15 bp, Homo sapiens
ctcatgtagagtgct

SEQ ID NO: 1204331 - DNA, 15 bp, Homo sapiens
cctcatgtagagtgc

SEQ ID NO: 1204332 - DNA, 15 bp, Homo sapiens
ccctcatgtagagtg

SEQ ID NO: 1204333 - DNA, 15 bp, Homo sapiens
tccctcatgtagagt

SEQ ID NO: 1204334 - DNA, 15 bp, Homo sapiens
ttccctcatgtagag

SEQ ID NO: 1204335 - DNA, 15 bp, Homo sapiens
tttccctcatgtaga

SEQ ID NO: 1204336 - DNA, 15 bp, Homo sapiens
gtttccctcatgtag

SEQ ID NO: 1204337 - DNA, 15 bp, Homo sapiens
ggtttccctcatgta

SEQ ID NO: 1204338 - DNA, 15 bp, Homo sapiens
aggtttccctcatgt

SEQ ID NO: 1204339 - DNA, 15 bp, Homo sapiens
caggtttccctcatg

SEQ ID NO: 1204340 - DNA, 15 bp, Homo sapiens
gcaggtttccctcat

SEQ ID NO: 1204341 - DNA, 15 bp, Homo sapiens
tgcaggtttccctca

SEQ ID NO: 1204342 - DNA, 15 bp, Homo sapiens
atgcaggtttccctc

SEQ ID NO: 1204343 - DNA, 15 bp, Homo sapiens
aatgcaggtttccct

SEQ ID NO: 1204344 - DNA, 15 bp, Homo sapiens
taatgcaggtttccc

SEQ ID NO: 1204345 - DNA, 15 bp, Homo sapiens
ctaatgcaggtttcc

SEQ ID NO: 1204346 - DNA, 15 bp, Homo sapiens
tctaatgcaggtttc

SEQ ID NO: 1204347 - DNA, 15 bp, Homo sapiens
ttctaatgcaggttt

SEQ ID NO: 1204348 - DNA, 15 bp, Homo sapiens
cttctaatgcaggtt

SEQ ID NO: 1204349 - DNA, 15 bp, Homo sapiens
ccttctaatgcaggt

SEQ ID NO: 1204350 - DNA, 15 bp, Homo sapiens
tccttctaatgcagg

SEQ ID NO: 1204351 - DNA, 15 bp, Homo sapiens
ctccttctaatgcag

SEQ ID NO: 1204352 - DNA, 15 bp, Homo sapiens
gctccttctaatgca

SEQ ID NO: 1204353 - DNA, 15 bp, Homo sapiens
agctccttctaatgc

SEQ ID NO: 1204354 - DNA, 15 bp, Homo sapiens
aagctccttctaatg

SEQ ID NO: 1204355 - DNA, 15 bp, Homo sapiens
gaagctccttctaat

SEQ ID NO: 1204356 - DNA, 15 bp, Homo sapiens
agaagctccttctaa

SEQ ID NO: 1204357 - DNA, 15 bp, Homo sapiens
aagaagctccttcta

SEQ ID NO: 1204358 - DNA, 15 bp, Homo sapiens
taagaagctccttct

SEQ ID NO: 1204359 - DNA, 15 bp, Homo sapiens
ttaagaagctccttc

SEQ ID NO: 1204360 - DNA, 15 bp, Homo sapiens
attaagaagctcctt

SEQ ID NO: 1204361 - DNA, 15 bp, Homo sapiens
gattaagaagctcct

SEQ ID NO: 1204362 - DNA, 15 bp, Homo sapiens
ggattaagaagctcc

SEQ ID NO: 1204363 - DNA, 15 bp, Homo sapiens
gggattaagaagctc

SEQ ID NO: 1204364 - DNA, 15 bp, Homo sapiens
agggattaagaagct

SEQ ID NO: 1204365 - DNA, 15 bp, Homo sapiens
cagggattaagaagc

SEQ ID NO: 1204366 - DNA, 15 bp, Homo sapiens
ccagggattaagaag

SEQ ID NO: 1204367 - DNA, 15 bp, Homo sapiens
cccagggattaagaa

SEQ ID NO: 1204368 - DNA, 15 bp, Homo sapiens
tcccagggattaaga

SEQ ID NO: 1204369 - DNA, 15 bp, Homo sapiens
atcccagggattaag

SEQ ID NO: 1204370 - DNA, 15 bp, Homo sapiens
gatcccagggattaa

SEQ ID NO: 1204371 - DNA, 15 bp, Homo sapiens
agatcccagggatta

SEQ ID NO: 1204372 - DNA, 15 bp, Homo sapiens
aagatcccagggatt

SEQ ID NO: 1204373 - DNA, 15 bp, Homo sapiens
aaagatcccagggat

SEQ ID NO: 1204374 - DNA, 15 bp, Homo sapiens
gaaagatcccaggga

SEQ ID NO: 1204375 - DNA, 15 bp, Homo sapiens
ggaaagatcccaggg

SEQ ID NO: 1204376 - DNA, 15 bp, Homo sapiens
tggaaagatcccagg

SEQ ID NO: 1204377 - DNA, 15 bp, Homo sapiens
ttggaaagatcccag

SEQ ID NO: 1204378 - DNA, 15 bp, Homo sapiens
cttggaaagatccca

SEQ ID NO: 1204379 - DNA, 15 bp, Homo sapiens
gcttggaaagatccc

SEQ ID NO: 1204380 - DNA, 15 bp, Homo sapiens
agcttggaaagatcc

SEQ ID NO: 1204381 - DNA, 15 bp, Homo sapiens
tagcttggaaagatc

SEQ ID NO: 1204382 - DNA, 15 bp, Homo sapiens
ttagcttggaaagat

SEQ ID NO: 1204383 - DNA, 15 bp, Homo sapiens
tttagcttggaaaga

SEQ ID NO: 1204384 - DNA, 15 bp, Homo sapiens
gtttagcttggaaag

SEQ ID NO: 1204385 - DNA, 15 bp, Homo sapiens
agtttagcttggaaa

SEQ ID NO: 1204386 - DNA, 15 bp, Homo sapiens
cagtttagcttggaa

SEQ ID NO: 1204387 - DNA, 15 bp, Homo sapiens
ccagtttagcttgga

SEQ ID NO: 1204388 - DNA, 15 bp, Homo sapiens
tccagtttagcttgg

SEQ ID NO: 1204389 - DNA, 15 bp, Homo sapiens
atccagtttagcttg

SEQ ID NO: 1204390 - DNA, 15 bp, Homo sapiens
catccagtttagctt

SEQ ID NO: 1204391 - DNA, 15 bp, Homo sapiens
acatccagtttagct

SEQ ID NO: 1204392 - DNA, 15 bp, Homo sapiens
gacatccagtttagc

SEQ ID NO: 1204393 - DNA, 15 bp, Homo sapiens
agacatccagtttag

SEQ ID NO: 1204394 - DNA, 15 bp, Homo sapiens
tagacatccagttta

SEQ ID NO: 1204395 - DNA, 15 bp, Homo sapiens
gtagacatccagttt

SEQ ID NO: 1204396 - DNA, 15 bp, Homo sapiens
tgtagacatccagtt

SEQ ID NO: 1204397 - DNA, 15 bp, Homo sapiens
ctgtagacatccagt

SEQ ID NO: 1204398 - DNA, 15 bp, Homo sapiens
actgtagacatccag

SEQ ID NO: 1204399 - DNA, 15 bp, Homo sapiens
cactgtagacatcca

SEQ ID NO: 1204400 - DNA, 15 bp, Homo sapiens
ccactgtagacatcc

SEQ ID NO: 1204401 - DNA, 15 bp, Homo sapiens
cccactgtagacatc

SEQ ID NO: 1204402 - DNA, 15 bp, Homo sapiens
ccccactgtagacat

SEQ ID NO: 1204403 - DNA, 15 bp, Homo sapiens
tccccactgtagaca

SEQ ID NO: 1204404 - DNA, 15 bp, Homo sapiens
ctccccactgtagac

SEQ ID NO: 1204405 - DNA, 15 bp, Homo sapiens
tctccccactgtaga

SEQ ID NO: 1204406 - DNA, 15 bp, Homo sapiens
ttctccccactgtag

SEQ ID NO: 1204407 - DNA, 15 bp, Homo sapiens
tttctccccactgta

SEQ ID NO: 1204408 - DNA, 15 bp, Homo sapiens
ctttctccccactgt

SEQ ID NO: 1204409 - DNA, 15 bp, Homo sapiens
tctttctccccactg

SEQ ID NO: 1204410 - DNA, 15 bp, Homo sapiens
ttctttctccccact

SEQ ID NO: 1204411 - DNA, 15 bp, Homo sapiens
tttctttctccccac

SEQ ID NO: 1204412 - DNA, 15 bp, Homo sapiens
ttttctttctcccca

SEQ ID NO: 1204413 - DNA, 15 bp, Homo sapiens
cttttctttctcccc

SEQ ID NO: 1204414 - DNA, 15 bp, Homo sapiens
gcttttctttctccc

SEQ ID NO: 1204415 - DNA, 15 bp, Homo sapiens
tgcttttctttctcc

SEQ ID NO: 1204416 - DNA, 15 bp, Homo sapiens
ctgcttttctttctc

SEQ ID NO: 1204417 - DNA, 15 bp, Homo sapiens
tctgcttttctttct

SEQ ID NO: 1204418 - DNA, 15 bp, Homo sapiens
ctctgcttttctttc

SEQ ID NO: 1204419 - DNA, 15 bp, Homo sapiens
tctctgcttttcttt

SEQ ID NO: 1204420 - DNA, 15 bp, Homo sapiens
ttctctgcttttctt

SEQ ID NO: 1204421 - DNA, 15 bp, Homo sapiens
gttctctgcttttct

SEQ ID NO: 1204422 - DNA, 15 bp, Homo sapiens
tgttctctgcttttc

SEQ ID NO: 1204423 - DNA, 15 bp, Homo sapiens
ctgttctctgctttt

SEQ ID NO: 1204424 - DNA, 15 bp, Homo sapiens
cctgttctctgcttt

SEQ ID NO: 1204425 - DNA, 15 bp, Homo sapiens
gtcctgttctctgct

SEQ ID NO: 1204426 - DNA, 15 bp, Homo sapiens
tgtcctgttctctgc

SEQ ID NO: 1204427 - DNA, 15 bp, Homo sapiens
atgtcctgttctctg

SEQ ID NO: 1204428 - DNA, 15 bp, Homo sapiens
catgtcctgttctct

SEQ ID NO: 1204429 - DNA, 15 bp, Homo sapiens
tcatgtcctgttctc

SEQ ID NO: 1204430 - DNA, 15 bp, Homo sapiens
ctcatgtcctgttct

SEQ ID NO: 1204431 - DNA, 15 bp, Homo sapiens
cctcatgtcctgttc

SEQ ID NO: 1204432 - DNA, 15 bp, Homo sapiens
ccctcatgtcctgtt

SEQ ID NO: 1204433 - DNA, 15 bp, Homo sapiens
cccctcatgtcctgt

SEQ ID NO: 1204434 - DNA, 15 bp, Homo sapiens
ccccctcatgtcctg

SEQ ID NO: 1204435 - DNA, 15 bp, Homo sapiens
cccccctcatgtcct

SEQ ID NO: 1204436 - DNA, 15 bp, Homo sapiens
gcccccctcatgtcc

SEQ ID NO: 1204437 - DNA, 15 bp, Homo sapiens
agcccccctcatgtc

SEQ ID NO: 1204438 - DNA, 15 bp, Homo sapiens
gagcccccctcatgt

SEQ ID NO: 1204439 - DNA, 15 bp, Homo sapiens
tgagcccccctcatg

SEQ ID NO: 1204440 - DNA, 15 bp, Homo sapiens
ttgagcccccctcat

SEQ ID NO: 1204441 - DNA, 15 bp, Homo sapiens
cttgagcccccctca

SEQ ID NO: 1204442 - DNA, 15 bp, Homo sapiens
ccttgagcccccctc

SEQ ID NO: 1204443 - DNA, 15 bp, Homo sapiens
gccttgagcccccct

SEQ ID NO: 1204444 - DNA, 15 bp, Homo sapiens
ggccttgagcccccc

SEQ ID NO: 1204445 - DNA, 15 bp, Homo sapiens
gggccttgagccccc

SEQ ID NO: 1204446 - DNA, 15 bp, Homo sapiens
ggggccttgagcccc

SEQ ID NO: 1204447 - DNA, 15 bp, Homo sapiens
cggggccttgagccc

SEQ ID NO: 1204448 - DNA, 15 bp, Homo sapiens
tcggggccttgagcc

SEQ ID NO: 1204449 - DNA, 15 bp, Homo sapiens
ttcggggccttgagc

SEQ ID NO: 1204450 - DNA, 15 bp, Homo sapiens
cttcggggccttgag

SEQ ID NO: 1204451 - DNA, 15 bp, Homo sapiens
ccttcggggccttga

SEQ ID NO: 1204452 - DNA, 15 bp, Homo sapiens
cccttcggggccttg

SEQ ID NO: 1204453 - DNA, 15 bp, Homo sapiens
acccttcggggcctt

SEQ ID NO: 1204454 - DNA, 15 bp, Homo sapiens
aacccttcggggcct

SEQ ID NO: 1204455 - DNA, 15 bp, Homo sapiens
caacccttcggggcc

SEQ ID NO: 1204456 - DNA, 15 bp, Homo sapiens
tcaacccttcggggc

SEQ ID NO: 1204457 - DNA, 15 bp, Homo sapiens
gtcaacccttcgggg

SEQ ID NO: 1204458 - DNA, 15 bp, Homo sapiens
tgtcaacccttcggg

SEQ ID NO: 1204459 - DNA, 15 bp, Homo sapiens
atgtcaacccttcgg

SEQ ID NO: 1204460 - DNA, 15 bp, Homo sapiens
tatgtcaacccttcg

SEQ ID NO: 1204461 - DNA, 15 bp, Homo sapiens
ctatgtcaacccttc

SEQ ID NO: 1204462 - DNA, 15 bp, Homo sapiens
cctatgtcaaccctt

SEQ ID NO: 1204463 - DNA, 15 bp, Homo sapiens
acctatgtcaaccct

SEQ ID NO: 1204464 - DNA, 15 bp, Homo sapiens
cacctatgtcaaccc

SEQ ID NO: 1204465 - DNA, 15 bp, Homo sapiens
acacctatgtcaacc

SEQ ID NO: 1204466 - DNA, 15 bp, Homo sapiens
gacacctatgtcaac

SEQ ID NO: 1204467 - DNA, 15 bp, Homo sapiens
ggacacctatgtcaa

SEQ ID NO: 1204468 - DNA, 15 bp, Homo sapiens
gggacacctatgtca

SEQ ID NO: 1204469 - DNA, 15 bp, Homo sapiens
agggacacctatgtc

SEQ ID NO: 1204470 - DNA, 15 bp, Homo sapiens
aagggacacctatgt

SEQ ID NO: 1204471 - DNA, 15 bp, Homo sapiens
taagggacacctatg

SEQ ID NO: 1204472 - DNA, 15 bp, Homo sapiens
ttaagggacacctat

SEQ ID NO: 1204473 - DNA, 15 bp, Homo sapiens
tttaagggacaccta

SEQ ID NO: 1204474 - DNA, 15 bp, Homo sapiens
ctttaagggacacct

SEQ ID NO: 1204475 - DNA, 15 bp, Homo sapiens
gctttaagggacacc

SEQ ID NO: 1204476 - DNA, 15 bp, Homo sapiens
ggctttaagggacac

SEQ ID NO: 1204477 - DNA, 15 bp, Homo sapiens
cggctttaagggaca

SEQ ID NO: 1204478 - DNA, 15 bp, Homo sapiens
tcggctttaagggac

SEQ ID NO: 1204479 - DNA, 15 bp, Homo sapiens
ttcggctttaaggga

SEQ ID NO: 1204480 - DNA, 15 bp, Homo sapiens
attcggctttaaggg

SEQ ID NO: 1204481 - DNA, 15 bp, Homo sapiens
cattcggctttaagg

SEQ ID NO: 1204482 - DNA, 15 bp, Homo sapiens
acattcggctttaag

SEQ ID NO: 1204483 - DNA, 15 bp, Homo sapiens
tacattcggctttaa

SEQ ID NO: 1204484 - DNA, 15 bp, Homo sapiens
ctacattcggcttta

SEQ ID NO: 1204485 - DNA, 15 bp, Homo sapiens
gctacattcggcttt

SEQ ID NO: 1204486 - DNA, 15 bp, Homo sapiens
agctacattcggctt

SEQ ID NO: 1204487 - DNA, 15 bp, Homo sapiens
gagctacattcggct

SEQ ID NO: 1204488 - DNA, 15 bp, Homo sapiens
ggagctacattcggc

SEQ ID NO: 1204489 - DNA, 15 bp, Homo sapiens
cggagctacattcgg

SEQ ID NO: 1204490 - DNA, 15 bp, Homo sapiens
gcggagctacattcg

SEQ ID NO: 1204491 - DNA, 15 bp, Homo sapiens
tgcggagctacattc

SEQ ID NO: 1204492 - DNA, 15 bp, Homo sapiens
ctgcggagctacatt

SEQ ID NO: 1204493 - DNA, 15 bp, Homo sapiens
tctgcggagctacat

SEQ ID NO: 1204494 - DNA, 15 bp, Homo sapiens
ttctgcggagctaca

SEQ ID NO: 1204495 - DNA, 15 bp, Homo sapiens
tttctgcggagctac

SEQ ID NO: 1204496 - DNA, 15 bp, Homo sapiens
ctttctgcggagcta

SEQ ID NO: 1204497 - DNA, 15 bp, Homo sapiens
tctttctgcggagct

SEQ ID NO: 1204498 - DNA, 15 bp, Homo sapiens
ttctttctgcggagc

SEQ ID NO: 1204499 - DNA, 15 bp, Homo sapiens
cttctttctgcggag

SEQ ID NO: 1204500 - DNA, 15 bp, Homo sapiens
tcttctttctgcgga

SEQ ID NO: 1204501 - DNA, 15 bp, Homo sapiens
gtcttctttctgcgg

SEQ ID NO: 1204502 - DNA, 15 bp, Homo sapiens
ggtcttctttctgcg

SEQ ID NO: 1204503 - DNA, 15 bp, Homo sapiens
tggtcttctttctgc

SEQ ID NO: 1204504 - DNA, 15 bp, Homo sapiens
ctggtcttctttctg

SEQ ID NO: 1204505 - DNA, 15 bp, Homo sapiens
cctggtcttctttct

SEQ ID NO: 1204506 - DNA, 15 bp, Homo sapiens
tcctggtcttctttc

SEQ ID NO: 1204507 - DNA, 15 bp, Homo sapiens
gtcctggtcttcttt

SEQ ID NO: 1204508 - DNA, 15 bp, Homo sapiens
agtcctggtcttctt

SEQ ID NO: 1204509 - DNA, 15 bp, Homo sapiens
cagtcctggtcttct

SEQ ID NO: 1204510 - DNA, 15 bp, Homo sapiens
tcagtcctggtcttc

SEQ ID NO: 1204511 - DNA, 15 bp, Homo sapiens
ctcagtcctggtctt

SEQ ID NO: 1204512 - DNA, 15 bp, Homo sapiens
actcagtcctggtct

SEQ ID NO: 1204513 - DNA, 15 bp, Homo sapiens
gactcagtcctggtc

SEQ ID NO: 1204514 - DNA, 15 bp, Homo sapiens
tgactcagtcctggt

SEQ ID NO: 1204515 - DNA, 15 bp, Homo sapiens
ttgactcagtcctgg

SEQ ID NO: 1204516 - DNA, 15 bp, Homo sapiens
cttgactcagtcctg

SEQ ID NO: 1204517 - DNA, 15 bp, Homo sapiens
gcttgactcagtcct

SEQ ID NO: 1204518 - DNA, 15 bp, Homo sapiens
agcttgactcagtcc

SEQ ID NO: 1204519 - DNA, 15 bp, Homo sapiens
aagcttgactcagtc

SEQ ID NO: 1204520 - DNA, 15 bp, Homo sapiens
gaagcttgactcagt

SEQ ID NO: 1204521 - DNA, 15 bp, Homo sapiens
agaagcttgactcag

SEQ ID NO: 1204522 - DNA, 15 bp, Homo sapiens
cagaagcttgactca

SEQ ID NO: 1204523 - DNA, 15 bp, Homo sapiens
gcagaagcttgactc

SEQ ID NO: 1204524 - DNA, 15 bp, Homo sapiens
agcagaagcttgact

SEQ ID NO: 1204525 - DNA, 15 bp, Homo sapiens
aagcagaagcttgac

SEQ ID NO: 1204526 - DNA, 15 bp, Homo sapiens
aaagcagaagcttga

SEQ ID NO: 1204527 - DNA, 15 bp, Homo sapiens
gaaagcagaagcttg

SEQ ID NO: 1204528 - DNA, 15 bp, Homo sapiens
ggaaagcagaagctt

SEQ ID NO: 1204529 - DNA, 15 bp, Homo sapiens
gggaaagcagaagct

SEQ ID NO: 1204530 - DNA, 15 bp, Homo sapiens
agggaaagcagaagc

SEQ ID NO: 1204531 - DNA, 15 bp, Homo sapiens
aagggaaagcagaag

SEQ ID NO: 1204532 - DNA, 15 bp, Homo sapiens
gaagggaaagcagaa

SEQ ID NO: 1204533 - DNA, 15 bp, Homo sapiens
tgaagggaaagcaga

SEQ ID NO: 1204534 - DNA, 15 bp, Homo sapiens
ttgaagggaaagcag

SEQ ID NO: 1204535 - DNA, 15 bp, Homo sapiens
tttgaagggaaagca

SEQ ID NO: 1204536 - DNA, 15 bp, Homo sapiens
ttttgaagggaaagc

SEQ ID NO: 1204537 - DNA, 15 bp, Homo sapiens
attttgaagggaaag

SEQ ID NO: 1204538 - DNA, 15 bp, Homo sapiens
gattttgaagggaaa

SEQ ID NO: 1204539 - DNA, 15 bp, Homo sapiens
cgattttgaagggaa

SEQ ID NO: 1204540 - DNA, 15 bp, Homo sapiens
ccgattttgaaggga

SEQ ID NO: 1204541 - DNA, 15 bp, Homo sapiens
gccgattttgaaggg

SEQ ID NO: 1204542 - DNA, 15 bp, Homo sapiens
ggccgattttgaagg

SEQ ID NO: 1204543 - DNA, 15 bp, Homo sapiens
tggccgattttgaag

SEQ ID NO: 1204544 - DNA, 15 bp, Homo sapiens
ctggccgattttgaa

SEQ ID NO: 1204545 - DNA, 15 bp, Homo sapiens
tctggccgattttga

SEQ ID NO: 1204546 - DNA, 15 bp, Homo sapiens
atctggccgattttg

SEQ ID NO: 1204547 - DNA, 15 bp, Homo sapiens
aatctggccgatttt

SEQ ID NO: 1204548 - DNA, 15 bp, Homo sapiens
aaatctggccgattt

SEQ ID NO: 1204549 - DNA, 15 bp, Homo sapiens
aaaatctggccgatt

SEQ ID NO: 1204550 - DNA, 15 bp, Homo sapiens
aaaaatctggccgat

SEQ ID NO: 1204551 - DNA, 15 bp, Homo sapiens
aaaaaatctggccga

SEQ ID NO: 1204552 - DNA, 15 bp, Homo sapiens
taaaaaatctggccg

SEQ ID NO: 1204553 - DNA, 15 bp, Homo sapiens
ttaaaaaatctggcc

SEQ ID NO: 1204554 - DNA, 15 bp, Homo sapiens
tttaaaaaatctggc

SEQ ID NO: 1204555 - DNA, 15 bp, Homo sapiens
atttaaaaaatctgg

SEQ ID NO: 1204556 - DNA, 15 bp, Homo sapiens
tatttaaaaaatctg

SEQ ID NO: 1204557 - DNA, 15 bp, Homo sapiens
ttatttaaaaaatct

SEQ ID NO: 1204558 - DNA, 15 bp, Homo sapiens
gttatttaaaaaatc

SEQ ID NO: 1204559 - DNA, 15 bp, Homo sapiens
agttatttaaaaaat

SEQ ID NO: 1204560 - DNA, 15 bp, Homo sapiens
aagttatttaaaaaa

SEQ ID NO: 1204561 - DNA, 15 bp, Homo sapiens
caagttatttaaaaa

SEQ ID NO: 1204562 - DNA, 15 bp, Homo sapiens
tcaagttatttaaaa

SEQ ID NO: 1204563 - DNA, 15 bp, Homo sapiens
gtcaagttatttaaa

SEQ ID NO: 1204564 - DNA, 15 bp, Homo sapiens
agtcaagttatttaa

SEQ ID NO: 1204565 - DNA, 15 bp, Homo sapiens
gagtcaagttattta

SEQ ID NO: 1204566 - DNA, 15 bp, Homo sapiens
agagtcaagttattt

SEQ ID NO: 1204567 - DNA, 15 bp, Homo sapiens
cagagtcaagttatt

SEQ ID NO: 1204568 - DNA, 15 bp, Homo sapiens
tcagagtcaagttat

SEQ ID NO: 1204569 - DNA, 15 bp, Homo sapiens
ctcagagtcaagtta

SEQ ID NO: 1204570 - DNA, 15 bp, Homo sapiens
cctcagagtcaagtt

SEQ ID NO: 1204571 - DNA, 15 bp, Homo sapiens
tcctcagagtcaagt

SEQ ID NO: 1204572 - DNA, 15 bp, Homo sapiens
ctcctcagagtcaag

SEQ ID NO: 1204573 - DNA, 15 bp, Homo sapiens
cctcctcagagtcaa

SEQ ID NO: 1204574 - DNA, 15 bp, Homo sapiens
tcctcctcagagtca

SEQ ID NO: 1204575 - DNA, 15 bp, Homo sapiens
ctcctcctcagagtc

SEQ ID NO: 1204576 - DNA, 15 bp, Homo sapiens
cctcctcctcagagt

SEQ ID NO: 1204577 - DNA, 15 bp, Homo sapiens
tcctcctcctcagag

SEQ ID NO: 1204578 - DNA, 15 bp, Homo sapiens
gtcctcctcctcaga

SEQ ID NO: 1204579 - DNA, 15 bp, Homo sapiens
ggtcctcctcctcag

SEQ ID NO: 1204580 - DNA, 15 bp, Homo sapiens
aggtcctcctcctca

SEQ ID NO: 1204581 - DNA, 15 bp, Homo sapiens
caggtcctcctcctc

SEQ ID NO: 1204582 - DNA, 15 bp, Homo sapiens
atcaggtcctcctcc

SEQ ID NO: 1204583 - DNA, 15 bp, Homo sapiens
aatcaggtcctcctc

SEQ ID NO: 1204584 - DNA, 15 bp, Homo sapiens
aaatcaggtcctcct

SEQ ID NO: 1204585 - DNA, 15 bp, Homo sapiens
taaatcaggtcctcc

SEQ ID NO: 1204586 - DNA, 15 bp, Homo sapiens
ttaaatcaggtcctc

SEQ ID NO: 1204587 - DNA, 15 bp, Homo sapiens
cttaaatcaggtcct

SEQ ID NO: 1204588 - DNA, 15 bp, Homo sapiens
acttaaatcaggtcc

SEQ ID NO: 1204589 - DNA, 15 bp, Homo sapiens
cacttaaatcaggtc

SEQ ID NO: 1204590 - DNA, 15 bp, Homo sapiens
tcacttaaatcaggt

SEQ ID NO: 1204591 - DNA, 15 bp, Homo sapiens
atcacttaaatcagg

SEQ ID NO: 1204592 - DNA, 15 bp, Homo sapiens
catcacttaaatcag

SEQ ID NO: 1204593 - DNA, 15 bp, Homo sapiens
ccatcacttaaatca

SEQ ID NO: 1204594 - DNA, 15 bp, Homo sapiens
accatcacttaaatc

SEQ ID NO: 1204595 - DNA, 15 bp, Homo sapiens
gaccatcacttaaat

SEQ ID NO: 1204596 - DNA, 15 bp, Homo sapiens
ggaccatcacttaaa

SEQ ID NO: 1204597 - DNA, 15 bp, Homo sapiens
gggaccatcacttaa

SEQ ID NO: 1204598 - DNA, 15 bp, Homo sapiens
tgggaccatcactta

SEQ ID NO: 1204599 - DNA, 15 bp, Homo sapiens
atgggaccatcactt

SEQ ID NO: 1204600 - DNA, 15 bp, Homo sapiens
gatgggaccatcact

SEQ ID NO: 1204601 - DNA, 15 bp, Homo sapiens
tgatgggaccatcac

SEQ ID NO: 1204602 - DNA, 15 bp, Homo sapiens
gtgatgggaccatca

SEQ ID NO: 1204603 - DNA, 15 bp, Homo sapiens
agtgatgggaccatc

SEQ ID NO: 1204604 - DNA, 15 bp, Homo sapiens
cagtgatgggaccat

SEQ ID NO: 1204605 - DNA, 15 bp, Homo sapiens
acagtgatgggacca

SEQ ID NO: 1204606 - DNA, 15 bp, Homo sapiens
aacagtgatgggacc

SEQ ID NO: 1204607 - DNA, 15 bp, Homo sapiens
caacagtgatgggac

SEQ ID NO: 1204608 - DNA, 15 bp, Homo sapiens
tcaacagtgatggga

SEQ ID NO: 1204609 - DNA, 15 bp, Homo sapiens
ttcaacagtgatggg

SEQ ID NO: 1204610 - DNA, 15 bp, Homo sapiens
attcaacagtgatgg

SEQ ID NO: 1204611 - DNA, 15 bp, Homo sapiens
gattcaacagtgatg

SEQ ID NO: 1204612 - DNA, 15 bp, Homo sapiens
ggattcaacagtgat

SEQ ID NO: 1204613 - DNA, 15 bp, Homo sapiens
aggattcaacagtga

SEQ ID NO: 1204614 - DNA, 15 bp, Homo sapiens
gaggattcaacagtg

SEQ ID NO: 1204615 - DNA, 15 bp, Homo sapiens
agaggattcaacagt

SEQ ID NO: 1204616 - DNA, 15 bp, Homo sapiens
cagaggattcaacag

SEQ ID NO: 1204617 - DNA, 15 bp, Homo sapiens
acagaggattcaaca

SEQ ID NO: 1204618 - DNA, 15 bp, Homo sapiens
aacagaggattcaac

SEQ ID NO: 1204619 - DNA, 15 bp, Homo sapiens
aaacagaggattcaa

SEQ ID NO: 1204620 - DNA, 15 bp, Homo sapiens
aaaacagaggattca

SEQ ID NO: 1204621 - DNA, 15 bp, Homo sapiens
aaaaacagaggattc

SEQ ID NO: 1204622 - DNA, 15 bp, Homo sapiens
taaaaacagaggatt

SEQ ID NO: 1204623 - DNA, 15 bp, Homo sapiens
ttaaaaacagaggat

SEQ ID NO: 1204624 - DNA, 15 bp, Homo sapiens
tttaaaaacagagga

SEQ ID NO: 1204625 - DNA, 15 bp, Homo sapiens
ttttaaaaacagagg

SEQ ID NO: 1204626 - DNA, 15 bp, Homo sapiens
gttttaaaaacagag

SEQ ID NO: 1204627 - DNA, 15 bp, Homo sapiens
agttttaaaaacaga

SEQ ID NO: 1204628 - DNA, 15 bp, Homo sapiens
gagttttaaaaacag

SEQ ID NO: 1204629 - DNA, 15 bp, Homo sapiens
ggagttttaaaaaca

SEQ ID NO: 1204630 - DNA, 15 bp, Homo sapiens
gggagttttaaaaac

SEQ ID NO: 1204631 - DNA, 15 bp, Homo sapiens
ggggagttttaaaaa

SEQ ID NO: 1204632 - DNA, 15 bp, Homo sapiens
aggggagttttaaaa

SEQ ID NO: 1204633 - DNA, 15 bp, Homo sapiens
aaggggagttttaaa

SEQ ID NO: 1204634 - DNA, 15 bp, Homo sapiens
aaaggggagttttaa

SEQ ID NO: 1204635 - DNA, 15 bp, Homo sapiens
aaaaggggagtttta

SEQ ID NO: 1204636 - DNA, 15 bp, Homo sapiens
caaaaggggagtttt

SEQ ID NO: 1204637 - DNA, 15 bp, Homo sapiens
tcaaaaggggagttt

SEQ ID NO: 1204638 - DNA, 15 bp, Homo sapiens
atcaaaaggggagtt

SEQ ID NO: 1204639 - DNA, 15 bp, Homo sapiens
aatcaaaaggggagt

SEQ ID NO: 1204640 - DNA, 15 bp, Homo sapiens
aaatcaaaaggggag

SEQ ID NO: 1204641 - DNA, 15 bp, Homo sapiens
aaaatcaaaagggga

SEQ ID NO: 1204642 - DNA, 15 bp, Homo sapiens
aaaaatcaaaagggg

SEQ ID NO: 1204643 - DNA, 15 bp, Homo sapiens
aaaaaatcaaaaggg

SEQ ID NO: 1204644 - DNA, 15 bp, Homo sapiens
aaaaaaatcaaaagg

SEQ ID NO: 1204645 - DNA, 15 bp, Homo sapiens
caaaaaaatcaaaag

SEQ ID NO: 1204646 - DNA, 15 bp, Homo sapiens
ccaaaaaaatcaaaa

SEQ ID NO: 1204647 - DNA, 15 bp, Homo sapiens
cccaaaaaaatcaaa

SEQ ID NO: 1204648 - DNA, 15 bp, Homo sapiens
gcccaaaaaaatcaa

SEQ ID NO: 1204649 - DNA, 15 bp, Homo sapiens
ggcccaaaaaaatca

SEQ ID NO: 1204650 - DNA, 15 bp, Homo sapiens
tggcccaaaaaaatc

SEQ ID NO: 1204651 - DNA, 15 bp, Homo sapiens
ctggcccaaaaaaat

SEQ ID NO: 1204652 - DNA, 15 bp, Homo sapiens
tctggcccaaaaaaa

SEQ ID NO: 1204653 - DNA, 15 bp, Homo sapiens
ctctggcccaaaaaa

SEQ ID NO: 1204654 - DNA, 15 bp, Homo sapiens
gctctggcccaaaaa

SEQ ID NO: 1204655 - DNA, 15 bp, Homo sapiens
ggctctggcccaaaa

SEQ ID NO: 1204656 - DNA, 15 bp, Homo sapiens
tggctctggcccaaa

SEQ ID NO: 1204657 - DNA, 15 bp, Homo sapiens
ttggctctggcccaa

SEQ ID NO: 1204658 - DNA, 15 bp, Homo sapiens
attggctctggccca

SEQ ID NO: 1204659 - DNA, 15 bp, Homo sapiens
aattggctctggccc

SEQ ID NO: 1204660 - DNA, 15 bp, Homo sapiens
aaattggctctggcc

SEQ ID NO: 1204661 - DNA, 15 bp, Homo sapiens
aaaattggctctggc

SEQ ID NO: 1204662 - DNA, 15 bp, Homo sapiens
taaaattggctctgg

SEQ ID NO: 1204663 - DNA, 15 bp, Homo sapiens
ataaaattggctctg

SEQ ID NO: 1204664 - DNA, 15 bp, Homo sapiens
aataaaattggctct

SEQ ID NO: 1204665 - DNA, 15 bp, Homo sapiens
aaataaaattggctc

SEQ ID NO: 1204666 - DNA, 15 bp, Homo sapiens
taaataaaattggct

SEQ ID NO: 1204667 - DNA, 15 bp, Homo sapiens
ttaaataaaattggc

SEQ ID NO: 1204668 - DNA, 15 bp, Homo sapiens
tttaaataaaattgg

SEQ ID NO: 1204669 - DNA, 15 bp, Homo sapiens
ttttaaataaaattg

SEQ ID NO: 1204670 - DNA, 15 bp, Homo sapiens
tttttaaataaaatt

SEQ ID NO: 1204671 - DNA, 15 bp, Homo sapiens
ttttttaaataaaat

SEQ ID NO: 1204672 - DNA, 15 bp, Homo sapiens
tttttttaaataaaa

SEQ ID NO: 1204673 - DNA, 15 bp, Homo sapiens
ttttttttaaataaa

SEQ ID NO: 1204674 - DNA, 15 bp, Homo sapiens
tttttttttaaataa

SEQ ID NO: 1204675 - DNA, 15 bp, Homo sapiens
ttttttttttaaata

SEQ ID NO: 1204676 - DNA, 15 bp, Homo sapiens
atttttttttttaaa

SEQ ID NO: 1204677 - DNA, 15 bp, Homo sapiens
agattttttttttta

SEQ ID NO: 1204678 - DNA, 15 bp, Homo sapiens
gagattttttttttt

SEQ ID NO: 1204679 - DNA, 15 bp, Homo sapiens
agagatttttttttt

SEQ ID NO: 1204680 - DNA, 15 bp, Homo sapiens
tagagattttttttt

SEQ ID NO: 1204681 - DNA, 15 bp, Homo sapiens
ttagagatttttttt

SEQ ID NO: 1204682 - DNA, 15 bp, Homo sapiens
tttagagattttttt

SEQ ID NO: 1204683 - DNA, 15 bp, Homo sapiens
atttagagatttttt

SEQ ID NO: 1204684 - DNA, 15 bp, Homo sapiens
catttagagattttt

SEQ ID NO: 1204685 - DNA, 15 bp, Homo sapiens
tcatttagagatttt

SEQ ID NO: 1204686 - DNA, 15 bp, Homo sapiens
ttcatttagagattt

SEQ ID NO: 1204687 - DNA, 15 bp, Homo sapiens
tttcatttagagatt

SEQ ID NO: 1204688 - DNA, 15 bp, Homo sapiens
ctttcatttagagat

SEQ ID NO: 1204689 - DNA, 15 bp, Homo sapiens
cctttcatttagaga

SEQ ID NO: 1204690 - DNA, 15 bp, Homo sapiens
ccctttcatttagag

SEQ ID NO: 1204691 - DNA, 15 bp, Homo sapiens
gccctttcatttaga

SEQ ID NO: 1204692 - DNA, 15 bp, Homo sapiens
tgccctttcatttag

SEQ ID NO: 1204693 - DNA, 15 bp, Homo sapiens
atgccctttcattta

SEQ ID NO: 1204694 - DNA, 15 bp, Homo sapiens
gatgccctttcattt

SEQ ID NO: 1204695 - DNA, 15 bp, Homo sapiens
tgatgccctttcatt

SEQ ID NO: 1204696 - DNA, 15 bp, Homo sapiens
ttgatgccctttcat

SEQ ID NO: 1204697 - DNA, 15 bp, Homo sapiens
tttgatgccctttca

SEQ ID NO: 1204698 - DNA, 15 bp, Homo sapiens
ttttgatgccctttc

SEQ ID NO: 1204699 - DNA, 15 bp, Homo sapiens
tttttgatgcccttt

SEQ ID NO: 1204700 - DNA, 15 bp, Homo sapiens
ctttttgatgccctt

SEQ ID NO: 1204701 - DNA, 15 bp, Homo sapiens
tctttttgatgccct

SEQ ID NO: 1204702 - DNA, 15 bp, Homo sapiens
gtctttttgatgccc

SEQ ID NO: 1204703 - DNA, 15 bp, Homo sapiens
ggtctttttgatgcc

SEQ ID NO: 1204704 - DNA, 15 bp, Homo sapiens
cggtctttttgatgc

SEQ ID NO: 1204705 - DNA, 15 bp, Homo sapiens
gcggtctttttgatg

SEQ ID NO: 1204706 - DNA, 15 bp, Homo sapiens
tgcggtctttttgat

SEQ ID NO: 1204707 - DNA, 15 bp, Homo sapiens
atgcggtctttttga

SEQ ID NO: 1204708 - DNA, 15 bp, Homo sapiens
aatgcggtctttttg

SEQ ID NO: 1204709 - DNA, 15 bp, Homo sapiens
aaatgcggtcttttt

SEQ ID NO: 1204710 - DNA, 15 bp, Homo sapiens
gaaatgcggtctttt

SEQ ID NO: 1204711 - DNA, 15 bp, Homo sapiens
tgaaatgcggtcttt

SEQ ID NO: 1204712 - DNA, 15 bp, Homo sapiens
ctgaaatgcggtctt

SEQ ID NO: 1204713 - DNA, 15 bp, Homo sapiens
actgaaatgcggtct

SEQ ID NO: 1204714 - DNA, 15 bp, Homo sapiens
aactgaaatgcggtc

SEQ ID NO: 1204715 - DNA, 15 bp, Homo sapiens
taactgaaatgcggt

SEQ ID NO: 1204716 - DNA, 15 bp, Homo sapiens
ataactgaaatgcgg

SEQ ID NO: 1204717 - DNA, 15 bp, Homo sapiens
aataactgaaatgcg

SEQ ID NO: 1204718 - DNA, 15 bp, Homo sapiens
aaataactgaaatgc

SEQ ID NO: 1204719 - DNA, 15 bp, Homo sapiens
gaaataactgaaatg

SEQ ID NO: 1204720 - DNA, 15 bp, Homo sapiens
ggaaataactgaaat

SEQ ID NO: 1204721 - DNA, 15 bp, Homo sapiens
gggaaataactgaaa

SEQ ID NO: 1204722 - DNA, 15 bp, Homo sapiens
ggggaaataactgaa

SEQ ID NO: 1204723 - DNA, 15 bp, Homo sapiens
tggggaaataactga

SEQ ID NO: 1204724 - DNA, 15 bp, Homo sapiens
ttggggaaataactg

SEQ ID NO: 1204725 - DNA, 15 bp, Homo sapiens
tttggggaaataact

SEQ ID NO: 1204726 - DNA, 15 bp, Homo sapiens
gtttggggaaataac

SEQ ID NO: 1204727 - DNA, 15 bp, Homo sapiens
ggtttggggaaataa

SEQ ID NO: 1204728 - DNA, 15 bp, Homo sapiens
aggtttggggaaata

SEQ ID NO: 1204729 - DNA, 15 bp, Homo sapiens
gaggtttggggaaat

SEQ ID NO: 1204730 - DNA, 15 bp, Homo sapiens
tgaggtttggggaaa

SEQ ID NO: 1204731 - DNA, 15 bp, Homo sapiens
ttgaggtttggggaa

SEQ ID NO: 1204732 - DNA, 15 bp, Homo sapiens
cttgaggtttgggga

SEQ ID NO: 1204733 - DNA, 15 bp, Homo sapiens
acttgaggtttgggg

SEQ ID NO: 1204734 - DNA, 15 bp, Homo sapiens
aacttgaggtttggg

SEQ ID NO: 1204735 - DNA, 15 bp, Homo sapiens
gaacttgaggtttgg

SEQ ID NO: 1204736 - DNA, 15 bp, Homo sapiens
tgaacttgaggtttg

SEQ ID NO: 1204737 - DNA, 15 bp, Homo sapiens
atgaacttgaggttt

SEQ ID NO: 1204738 - DNA, 15 bp, Homo sapiens
aatgaacttgaggtt

SEQ ID NO: 1204739 - DNA, 15 bp, Homo sapiens
gaatgaacttgaggt

SEQ ID NO: 1204740 - DNA, 15 bp, Homo sapiens
agaatgaacttgagg

SEQ ID NO: 1204741 - DNA, 15 bp, Homo sapiens
gagaatgaacttgag

SEQ ID NO: 1204742 - DNA, 15 bp, Homo sapiens
ggagaatgaacttga

SEQ ID NO: 1204743 - DNA, 15 bp, Homo sapiens
aggagaatgaacttg

SEQ ID NO: 1204744 - DNA, 15 bp, Homo sapiens
aaggagaatgaactt

SEQ ID NO: 1204745 - DNA, 15 bp, Homo sapiens
aaaggagaatgaact

SEQ ID NO: 1204746 - DNA, 15 bp, Homo sapiens
aaaaggagaatgaac

SEQ ID NO: 1204747 - DNA, 15 bp, Homo sapiens
caaaaggagaatgaa

SEQ ID NO: 1204748 - DNA, 15 bp, Homo sapiens
acaaaaggagaatga

SEQ ID NO: 1204749 - DNA, 15 bp, Homo sapiens
aacaaaaggagaatg

SEQ ID NO: 1204750 - DNA, 15 bp, Homo sapiens
gaacaaaaggagaat

SEQ ID NO: 1204751 - DNA, 15 bp, Homo sapiens
agaacaaaaggagaa

SEQ ID NO: 1204752 - DNA, 15 bp, Homo sapiens
aagaacaaaaggaga

SEQ ID NO: 1204753 - DNA, 15 bp, Homo sapiens
gaagaacaaaaggag

SEQ ID NO: 1204754 - DNA, 15 bp, Homo sapiens
ggaagaacaaaagga

SEQ ID NO: 1204755 - DNA, 15 bp, Homo sapiens
aggaagaacaaaagg

SEQ ID NO: 1204756 - DNA, 15 bp, Homo sapiens
tgcaggaagaacaaa

SEQ ID NO: 1204757 - DNA, 15 bp, Homo sapiens
ctgcaggaagaacaa

SEQ ID NO: 1204758 - DNA, 15 bp, Homo sapiens
gctgcaggaagaaca

SEQ ID NO: 1204759 - DNA, 15 bp, Homo sapiens
tgctgcaggaagaac

SEQ ID NO: 1204760 - DNA, 15 bp, Homo sapiens
ttgctgcaggaagaa

SEQ ID NO: 1204761 - DNA, 15 bp, Homo sapiens
tttgctgcaggaaga

SEQ ID NO: 1204762 - DNA, 15 bp, Homo sapiens
atttgctgcaggaag

SEQ ID NO: 1204763 - DNA, 15 bp, Homo sapiens
catttgctgcaggaa

SEQ ID NO: 1204764 - DNA, 15 bp, Homo sapiens
tcatttgctgcagga

SEQ ID NO: 1204765 - DNA, 15 bp, Homo sapiens
ttcatttgctgcagg

SEQ ID NO: 1204766 - DNA, 15 bp, Homo sapiens
cttcatttgctgcag

SEQ ID NO: 1204767 - DNA, 15 bp, Homo sapiens
ccttcatttgctgca

SEQ ID NO: 1204768 - DNA, 15 bp, Homo sapiens
tccttcatttgctgc

SEQ ID NO: 1204769 - DNA, 15 bp, Homo sapiens
atccttcatttgctg

SEQ ID NO: 1204770 - DNA, 15 bp, Homo sapiens
gatccttcatttgct

SEQ ID NO: 1204771 - DNA, 15 bp, Homo sapiens
tgatccttcatttgc

SEQ ID NO: 1204772 - DNA, 15 bp, Homo sapiens
ctgatccttcatttg

SEQ ID NO: 1204773 - DNA, 15 bp, Homo sapiens
gctgatccttcattt

SEQ ID NO: 1204774 - DNA, 15 bp, Homo sapiens
agctgatccttcatt

SEQ ID NO: 1204775 - DNA, 15 bp, Homo sapiens
cagctgatccttcat

SEQ ID NO: 1204776 - DNA, 15 bp, Homo sapiens
ccagctgatccttca

SEQ ID NO: 1204777 - DNA, 15 bp, Homo sapiens
tccagctgatccttc

SEQ ID NO: 1204778 - DNA, 15 bp, Homo sapiens
gtccagctgatcctt

SEQ ID NO: 1204779 - DNA, 15 bp, Homo sapiens
tgtccagctgatcct

SEQ ID NO: 1204780 - DNA, 15 bp, Homo sapiens
ttgtccagctgatcc

SEQ ID NO: 1204781 - DNA, 15 bp, Homo sapiens
gttgtccagctgatc

SEQ ID NO: 1204782 - DNA, 15 bp, Homo sapiens
agttgtccagctgat

SEQ ID NO: 1204783 - DNA, 15 bp, Homo sapiens
aagttgtccagctga

SEQ ID NO: 1204784 - DNA, 15 bp, Homo sapiens
caagttgtccagctg

SEQ ID NO: 1204785 - DNA, 15 bp, Homo sapiens
acaagttgtccagct

SEQ ID NO: 1204786 - DNA, 15 bp, Homo sapiens
aacaagttgtccagc

SEQ ID NO: 1204787 - DNA, 15 bp, Homo sapiens
caacaagttgtccag

SEQ ID NO: 1204788 - DNA, 15 bp, Homo sapiens
acaacaagttgtcca

SEQ ID NO: 1204789 - DNA, 15 bp, Homo sapiens
aacaacaagttgtcc

SEQ ID NO: 1204790 - DNA, 15 bp, Homo sapiens
taacaacaagttgtc

SEQ ID NO: 1204791 - DNA, 15 bp, Homo sapiens
ttaacaacaagttgt

SEQ ID NO: 1204792 - DNA, 15 bp, Homo sapiens
tttaacaacaagttg

SEQ ID NO: 1204793 - DNA, 15 bp, Homo sapiens
ctttaacaacaagtt

SEQ ID NO: 1204794 - DNA, 15 bp, Homo sapiens
cctttaacaacaagt

SEQ ID NO: 1204795 - DNA, 15 bp, Homo sapiens
tcctttaacaacaag

SEQ ID NO: 1204796 - DNA, 15 bp, Homo sapiens
ctcctttaacaacaa

SEQ ID NO: 1204797 - DNA, 15 bp, Homo sapiens
actcctttaacaaca

SEQ ID NO: 1204798 - DNA, 15 bp, Homo sapiens
gactcctttaacaac

SEQ ID NO: 1204799 - DNA, 15 bp, Homo sapiens
ggactcctttaacaa

SEQ ID NO: 1204800 - DNA, 15 bp, Homo sapiens
aggactcctttaaca

SEQ ID NO: 1204801 - DNA, 15 bp, Homo sapiens
aaggactcctttaac

SEQ ID NO: 1204802 - DNA, 15 bp, Homo sapiens
caaggactcctttaa

SEQ ID NO: 1204803 - DNA, 15 bp, Homo sapiens
gcaaggactccttta

SEQ ID NO: 1204804 - DNA, 15 bp, Homo sapiens
agcaaggactccttt

SEQ ID NO: 1204805 - DNA, 15 bp, Homo sapiens
cagcaaggactcctt

SEQ ID NO: 1204806 - DNA, 15 bp, Homo sapiens
ccagcaaggactcct

SEQ ID NO: 1204807 - DNA, 15 bp, Homo sapiens
tccagcaaggactcc

SEQ ID NO: 1204808 - DNA, 15 bp, Homo sapiens
ctccagcaaggactc

SEQ ID NO: 1204809 - DNA, 15 bp, Homo sapiens
cctccagcaaggact

SEQ ID NO: 1204810 - DNA, 15 bp, Homo sapiens
tcctccagcaaggac

SEQ ID NO: 1204811 - DNA, 15 bp, Homo sapiens
gtcctccagcaagga

SEQ ID NO: 1204812 - DNA, 15 bp, Homo sapiens
agtcctccagcaagg

SEQ ID NO: 1204813 - DNA, 15 bp, Homo sapiens
aagtcctccagcaag

SEQ ID NO: 1204814 - DNA, 15 bp, Homo sapiens
aaagtcctccagcaa

SEQ ID NO: 1204815 - DNA, 15 bp, Homo sapiens
taaagtcctccagca

SEQ ID NO: 1204816 - DNA, 15 bp, Homo sapiens
ttaaagtcctccagc

SEQ ID NO: 1204817 - DNA, 15 bp, Homo sapiens
cttaaagtcctccag

SEQ ID NO: 1204818 - DNA, 15 bp, Homo sapiens
ccttaaagtcctcca

SEQ ID NO: 1204819 - DNA, 15 bp, Homo sapiens
accttaaagtcctcc

SEQ ID NO: 1204820 - DNA, 15 bp, Homo sapiens
caccttaaagtcctc

SEQ ID NO: 1204821 - DNA, 15 bp, Homo sapiens
tcaccttaaagtcct

SEQ ID NO: 1204822 - DNA, 15 bp, Homo sapiens
ctcaccttaaagtcc

SEQ ID NO: 1204823 - DNA, 15 bp, Homo sapiens
tctcaccttaaagtc

SEQ ID NO: 1204824 - DNA, 15 bp, Homo sapiens
ctctcaccttaaagt

SEQ ID NO: 1204825 - DNA, 15 bp, Homo sapiens
gctctcaccttaaag

SEQ ID NO: 1204826 - DNA, 15 bp, Homo sapiens
tgctctcaccttaaa

SEQ ID NO: 1204827 - DNA, 15 bp, Homo sapiens
ctgctctcaccttaa

SEQ ID NO: 1204828 - DNA, 15 bp, Homo sapiens
cctgctctcacctta

SEQ ID NO: 1204829 - DNA, 15 bp, Homo sapiens
ccctgctctcacctt

SEQ ID NO: 1204830 - DNA, 15 bp, Homo sapiens
cccctgctctcacct

SEQ ID NO: 1204831 - DNA, 15 bp, Homo sapiens
gcccctgctctcacc

SEQ ID NO: 1204832 - DNA, 15 bp, Homo sapiens
cgcccctgctctcac

SEQ ID NO: 1204833 - DNA, 15 bp, Homo sapiens
ccgcccctgctctca

SEQ ID NO: 1204834 - DNA, 15 bp, Homo sapiens
cccgcccctgctctc

SEQ ID NO: 1204835 - DNA, 15 bp, Homo sapiens
ccccgcccctgctct

SEQ ID NO: 1204836 - DNA, 15 bp, Homo sapiens
accccgcccctgctc

SEQ ID NO: 1204837 - DNA, 15 bp, Homo sapiens
caccccgcccctgct

SEQ ID NO: 1204838 - DNA, 15 bp, Homo sapiens
gcaccccgcccctgc

SEQ ID NO: 1204839 - DNA, 15 bp, Homo sapiens
agcaccccgcccctg

SEQ ID NO: 1204840 - DNA, 15 bp, Homo sapiens
cagcaccccgcccct

SEQ ID NO: 1204841 - DNA, 15 bp, Homo sapiens
ccagcaccccgcccc

SEQ ID NO: 1204842 - DNA, 15 bp, Homo sapiens
cccagcaccccgccc

SEQ ID NO: 1204843 - DNA, 15 bp, Homo sapiens
ccccagcaccccgcc

SEQ ID NO: 1204844 - DNA, 15 bp, Homo sapiens
cccccagcaccccgc

SEQ ID NO: 1204845 - DNA, 15 bp, Homo sapiens
tcccccagcaccccg

SEQ ID NO: 1204846 - DNA, 15 bp, Homo sapiens
actcccccagcaccc

SEQ ID NO: 1204847 - DNA, 15 bp, Homo sapiens
cactcccccagcacc

SEQ ID NO: 1204848 - DNA, 15 bp, Homo sapiens
acactcccccagcac

SEQ ID NO: 1204849 - DNA, 15 bp, Homo sapiens
cacactcccccagca

SEQ ID NO: 1204850 - DNA, 15 bp, Homo sapiens
gcacactcccccagc

SEQ ID NO: 1204851 - DNA, 15 bp, Homo sapiens
tgcacactcccccag

SEQ ID NO: 1204852 - DNA, 15 bp, Homo sapiens
ctgcacactccccca

SEQ ID NO: 1204853 - DNA, 15 bp, Homo sapiens
gctgcacactccccc

SEQ ID NO: 1204854 - DNA, 15 bp, Homo sapiens
tgctgcacactcccc

SEQ ID NO: 1204855 - DNA, 15 bp, Homo sapiens
atgctgcacactccc

SEQ ID NO: 1204856 - DNA, 15 bp, Homo sapiens
catgctgcacactcc

SEQ ID NO: 1204857 - DNA, 15 bp, Homo sapiens
tcatgctgcacactc

SEQ ID NO: 1204858 - DNA, 15 bp, Homo sapiens
atcatgctgcacact

SEQ ID NO: 1204859 - DNA, 15 bp, Homo sapiens
aatcatgctgcacac

SEQ ID NO: 1204860 - DNA, 15 bp, Homo sapiens
taatcatgctgcaca

SEQ ID NO: 1204861 - DNA, 15 bp, Homo sapiens
ttaatcatgctgcac

SEQ ID NO: 1204862 - DNA, 15 bp, Homo sapiens
cttaatcatgctgca

SEQ ID NO: 1204863 - DNA, 15 bp, Homo sapiens
ccttaatcatgctgc

SEQ ID NO: 1204864 - DNA, 15 bp, Homo sapiens
cccttaatcatgctg

SEQ ID NO: 1204865 - DNA, 15 bp, Homo sapiens
tcccttaatcatgct

SEQ ID NO: 1204866 - DNA, 15 bp, Homo sapiens
ttcccttaatcatgc

SEQ ID NO: 1204867 - DNA, 15 bp, Homo sapiens
cttcccttaatcatg

SEQ ID NO: 1204868 - DNA, 15 bp, Homo sapiens
ccttcccttaatcat

SEQ ID NO: 1204869 - DNA, 15 bp, Homo sapiens
cccttcccttaatca

SEQ ID NO: 1204870 - DNA, 15 bp, Homo sapiens
tcccttcccttaatc

SEQ ID NO: 1204871 - DNA, 15 bp, Homo sapiens
ctcccttcccttaat

SEQ ID NO: 1204872 - DNA, 15 bp, Homo sapiens
tctcccttcccttaa

SEQ ID NO: 1204873 - DNA, 15 bp, Homo sapiens
gtctcccttccctta

SEQ ID NO: 1204874 - DNA, 15 bp, Homo sapiens
agtctcccttccctt

SEQ ID NO: 1204875 - DNA, 15 bp, Homo sapiens
gagtctcccttccct

SEQ ID NO: 1204876 - DNA, 15 bp, Homo sapiens
agagtctcccttccc

SEQ ID NO: 1204877 - DNA, 15 bp, Homo sapiens
cagagtctcccttcc

SEQ ID NO: 1204878 - DNA, 15 bp, Homo sapiens
gcagagtctcccttc

SEQ ID NO: 1204879 - DNA, 15 bp, Homo sapiens
agcagagtctccctt

SEQ ID NO: 1204880 - DNA, 15 bp, Homo sapiens
aagcagagtctccct

SEQ ID NO: 1204881 - DNA, 15 bp, Homo sapiens
gaagcagagtctccc

SEQ ID NO: 1204882 - DNA, 15 bp, Homo sapiens
ggaagcagagtctcc

SEQ ID NO: 1204883 - DNA, 15 bp, Homo sapiens
aggaagcagagtctc

SEQ ID NO: 1204884 - DNA, 15 bp, Homo sapiens
caggaagcagagtct

SEQ ID NO: 1204885 - DNA, 15 bp, Homo sapiens
tcaggaagcagagtc

SEQ ID NO: 1204886 - DNA, 15 bp, Homo sapiens
atcaggaagcagagt

SEQ ID NO: 1204887 - DNA, 15 bp, Homo sapiens
aatcaggaagcagag

SEQ ID NO: 1204888 - DNA, 15 bp, Homo sapiens
caatcaggaagcaga

SEQ ID NO: 1204889 - DNA, 15 bp, Homo sapiens
gcaatcaggaagcag

SEQ ID NO: 1204890 - DNA, 15 bp, Homo sapiens
tgcaatcaggaagca

SEQ ID NO: 1204891 - DNA, 15 bp, Homo sapiens
ctgcaatcaggaagc

SEQ ID NO: 1204892 - DNA, 15 bp, Homo sapiens
cctgcaatcaggaag

SEQ ID NO: 1204893 - DNA, 15 bp, Homo sapiens
ccctgcaatcaggaa

SEQ ID NO: 1204894 - DNA, 15 bp, Homo sapiens
tccctgcaatcagga

SEQ ID NO: 1204895 - DNA, 15 bp, Homo sapiens
ttccctgcaatcagg

SEQ ID NO: 1204896 - DNA, 15 bp, Homo sapiens
attccctgcaatcag

SEQ ID NO: 1204897 - DNA, 15 bp, Homo sapiens
aattccctgcaatca

SEQ ID NO: 1204898 - DNA, 15 bp, Homo sapiens
caattccctgcaatc

SEQ ID NO: 1204899 - DNA, 15 bp, Homo sapiens
ccaattccctgcaat

SEQ ID NO: 1204900 - DNA, 15 bp, Homo sapiens
cccaattccctgcaa

SEQ ID NO: 1204901 - DNA, 15 bp, Homo sapiens
acccaattccctgca

SEQ ID NO: 1204902 - DNA, 15 bp, Homo sapiens
aacccaattccctgc

SEQ ID NO: 1204903 - DNA, 15 bp, Homo sapiens
aaacccaattccctg

SEQ ID NO: 1204904 - DNA, 15 bp, Homo sapiens
caaacccaattccct

SEQ ID NO: 1204905 - DNA, 15 bp, Homo sapiens
acaaacccaattccc

SEQ ID NO: 1204906 - DNA, 15 bp, Homo sapiens
aacaaacccaattcc

SEQ ID NO: 1204907 - DNA, 15 bp, Homo sapiens
aaacaaacccaattc

SEQ ID NO: 1204908 - DNA, 15 bp, Homo sapiens
gaaacaaacccaatt

SEQ ID NO: 1204909 - DNA, 15 bp, Homo sapiens
ggaaacaaacccaat

SEQ ID NO: 1204910 - DNA, 15 bp, Homo sapiens
aggaaacaaacccaa

SEQ ID NO: 1204911 - DNA, 15 bp, Homo sapiens
aaggaaacaaaccca

SEQ ID NO: 1204912 - DNA, 15 bp, Homo sapiens
gaaggaaacaaaccc

SEQ ID NO: 1204913 - DNA, 15 bp, Homo sapiens
cgaaggaaacaaacc

SEQ ID NO: 1204914 - DNA, 15 bp, Homo sapiens
gcgaaggaaacaaac

SEQ ID NO: 1204915 - DNA, 15 bp, Homo sapiens
agcgaaggaaacaaa

SEQ ID NO: 1204916 - DNA, 15 bp, Homo sapiens
aagcgaaggaaacaa

SEQ ID NO: 1204917 - DNA, 15 bp, Homo sapiens
aaagcgaaggaaaca

SEQ ID NO: 1204918 - DNA, 15 bp, Homo sapiens
caaagcgaaggaaac

SEQ ID NO: 1204919 - DNA, 15 bp, Homo sapiens
tcaaagcgaaggaaa

SEQ ID NO: 1204920 - DNA, 15 bp, Homo sapiens
ttcaaagcgaaggaa

SEQ ID NO: 1204921 - DNA, 15 bp, Homo sapiens
tttcaaagcgaagga

SEQ ID NO: 1204922 - DNA, 15 bp, Homo sapiens
ttttcaaagcgaagg

SEQ ID NO: 1204923 - DNA, 15 bp, Homo sapiens
cttttcaaagcgaag

SEQ ID NO: 1204924 - DNA, 15 bp, Homo sapiens
ccttttcaaagcgaa

SEQ ID NO: 1204925 - DNA, 15 bp, Homo sapiens
tccttttcaaagcga

SEQ ID NO: 1204926 - DNA, 15 bp, Homo sapiens
ctccttttcaaagcg

SEQ ID NO: 1204927 - DNA, 15 bp, Homo sapiens
tctccttttcaaagc

SEQ ID NO: 1204928 - DNA, 15 bp, Homo sapiens
ttctccttttcaaag

SEQ ID NO: 1204929 - DNA, 15 bp, Homo sapiens
cttctccttttcaaa

SEQ ID NO: 1204930 - DNA, 15 bp, Homo sapiens
acttctccttttcaa

SEQ ID NO: 1204931 - DNA, 15 bp, Homo sapiens
cacttctccttttca

SEQ ID NO: 1204932 - DNA, 15 bp, Homo sapiens
ccacttctccttttc

SEQ ID NO: 1204933 - DNA, 15 bp, Homo sapiens
cccacttctcctttt

SEQ ID NO: 1204934 - DNA, 15 bp, Homo sapiens
tcccacttctccttt

SEQ ID NO: 1204935 - DNA, 15 bp, Homo sapiens
ttcccacttctcctt

SEQ ID NO: 1204936 - DNA, 15 bp, Homo sapiens
cttcccacttctcct

SEQ ID NO: 1204937 - DNA, 15 bp, Homo sapiens
tcttcccacttctcc

SEQ ID NO: 1204938 - DNA, 15 bp, Homo sapiens
atcttcccacttctc

SEQ ID NO: 1204939 - DNA, 15 bp, Homo sapiens
catcttcccacttct

SEQ ID NO: 1204940 - DNA, 15 bp, Homo sapiens
acatcttcccacttc

SEQ ID NO: 1204941 - DNA, 15 bp, Homo sapiens
aacatcttcccactt

SEQ ID NO: 1204942 - DNA, 15 bp, Homo sapiens
taacatcttcccact

SEQ ID NO: 1204943 - DNA, 15 bp, Homo sapiens
ttaacatcttcccac

SEQ ID NO: 1204944 - DNA, 15 bp, Homo sapiens
gttaacatcttccca

SEQ ID NO: 1204945 - DNA, 15 bp, Homo sapiens
agttaacatcttccc

SEQ ID NO: 1204946 - DNA, 15 bp, Homo sapiens
gagttaacatcttcc

SEQ ID NO: 1204947 - DNA, 15 bp, Homo sapiens
tgagttaacatcttc

SEQ ID NO: 1204948 - DNA, 15 bp, Homo sapiens
ctgagttaacatctt

SEQ ID NO: 1204949 - DNA, 15 bp, Homo sapiens
gctgagttaacatct

SEQ ID NO: 1204950 - DNA, 15 bp, Homo sapiens
tgctgagttaacatc

SEQ ID NO: 1204951 - DNA, 15 bp, Homo sapiens
gtgctgagttaacat

SEQ ID NO: 1204952 - DNA, 15 bp, Homo sapiens
tgtgctgagttaaca

SEQ ID NO: 1204953 - DNA, 15 bp, Homo sapiens
atgtgctgagttaac

SEQ ID NO: 1204954 - DNA, 15 bp, Homo sapiens
gatgtgctgagttaa

SEQ ID NO: 1204955 - DNA, 15 bp, Homo sapiens
ggatgtgctgagtta

SEQ ID NO: 1204956 - DNA, 15 bp, Homo sapiens
tggatgtgctgagtt

SEQ ID NO: 1204957 - DNA, 15 bp, Homo sapiens
ctggatgtgctgagt

SEQ ID NO: 1204958 - DNA, 15 bp, Homo sapiens
gctggatgtgctgag

SEQ ID NO: 1204959 - DNA, 15 bp, Homo sapiens
tgctggatgtgctga

SEQ ID NO: 1204960 - DNA, 15 bp, Homo sapiens
ctgctggatgtgctg

SEQ ID NO: 1204961 - DNA, 15 bp, Homo sapiens
gctgctggatgtgct

SEQ ID NO: 1204962 - DNA, 15 bp, Homo sapiens
ggctgctggatgtgc

SEQ ID NO: 1204963 - DNA, 15 bp, Homo sapiens
tggctgctggatgtg

SEQ ID NO: 1204964 - DNA, 15 bp, Homo sapiens
ctggctgctggatgt

SEQ ID NO: 1204965 - DNA, 15 bp, Homo sapiens
tctggctgctggatg

SEQ ID NO: 1204966 - DNA, 15 bp, Homo sapiens
ctctggctgctggat

SEQ ID NO: 1204967 - DNA, 15 bp, Homo sapiens
cctctggctgctgga

SEQ ID NO: 1204968 - DNA, 15 bp, Homo sapiens
ccctctggctgctgg

SEQ ID NO: 1204969 - DNA, 15 bp, Homo sapiens
accctctggctgctg

SEQ ID NO: 1204970 - DNA, 15 bp, Homo sapiens
aaccctctggctgct

SEQ ID NO: 1204971 - DNA, 15 bp, Homo sapiens
aaaccctctggctgc

SEQ ID NO: 1204972 - DNA, 15 bp, Homo sapiens
taaaccctctggctg

SEQ ID NO: 1204973 - DNA, 15 bp, Homo sapiens
gtaaaccctctggct

SEQ ID NO: 1204974 - DNA, 15 bp, Homo sapiens
tgtaaaccctctggc

SEQ ID NO: 1204975 - DNA, 15 bp, Homo sapiens
ttgtaaaccctctgg

SEQ ID NO: 1204976 - DNA, 15 bp, Homo sapiens
tttgtaaaccctctg

SEQ ID NO: 1204977 - DNA, 15 bp, Homo sapiens
ctttgtaaaccctct

SEQ ID NO: 1204978 - DNA, 15 bp, Homo sapiens
cctttgtaaaccctc

SEQ ID NO: 1204979 - DNA, 15 bp, Homo sapiens
ccctttgtaaaccct

SEQ ID NO: 1204980 - DNA, 15 bp, Homo sapiens
gccctttgtaaaccc

SEQ ID NO: 1204981 - DNA, 15 bp, Homo sapiens
agccctttgtaaacc

SEQ ID NO: 1204982 - DNA, 15 bp, Homo sapiens
gagccctttgtaaac

SEQ ID NO: 1204983 - DNA, 15 bp, Homo sapiens
tgagccctttgtaaa

SEQ ID NO: 1204984 - DNA, 15 bp, Homo sapiens
ctgagccctttgtaa

SEQ ID NO: 1204985 - DNA, 15 bp, Homo sapiens
actgagccctttgta

SEQ ID NO: 1204986 - DNA, 15 bp, Homo sapiens
gactgagccctttgt

SEQ ID NO: 1204987 - DNA, 15 bp, Homo sapiens
ggactgagccctttg

SEQ ID NO: 1204988 - DNA, 15 bp, Homo sapiens
gggactgagcccttt

SEQ ID NO: 1204989 - DNA, 15 bp, Homo sapiens
agggactgagccctt

SEQ ID NO: 1204990 - DNA, 15 bp, Homo sapiens
aagggactgagccct

SEQ ID NO: 1204991 - DNA, 15 bp, Homo sapiens
gaagggactgagccc

SEQ ID NO: 1204992 - DNA, 15 bp, Homo sapiens
cgaagggactgagcc

SEQ ID NO: 1204993 - DNA, 15 bp, Homo sapiens
ccgaagggactgagc

SEQ ID NO: 1204994 - DNA, 15 bp, Homo sapiens
cccgaagggactgag

SEQ ID NO: 1204995 - DNA, 15 bp, Homo sapiens
ccccgaagggactga

SEQ ID NO: 1204996 - DNA, 15 bp, Homo sapiens
tccccgaagggactg

SEQ ID NO: 1204997 - DNA, 15 bp, Homo sapiens
ctccccgaagggact

SEQ ID NO: 1204998 - DNA, 15 bp, Homo sapiens
cctccccgaagggac

SEQ ID NO: 1204999 - DNA, 15 bp, Homo sapiens
gcctccccgaaggga

SEQ ID NO: 1205000 - DNA, 15 bp, Homo sapiens
agcctccccgaaggg

SEQ ID NO: 1205001 - DNA, 15 bp, Homo sapiens
aagcctccccgaagg

SEQ ID NO: 1205002 - DNA, 15 bp, Homo sapiens
gaagcctccccgaag

SEQ ID NO: 1205003 - DNA, 15 bp, Homo sapiens
agaagcctccccgaa

SEQ ID NO: 1205004 - DNA, 15 bp, Homo sapiens
cagaagcctccccga

SEQ ID NO: 1205005 - DNA, 15 bp, Homo sapiens
ccagaagcctccccg

SEQ ID NO: 1205006 - DNA, 15 bp, Homo sapiens
accagaagcctcccc

SEQ ID NO: 1205007 - DNA, 15 bp, Homo sapiens
caccagaagcctccc

SEQ ID NO: 1205008 - DNA, 15 bp, Homo sapiens
tcaccagaagcctcc

SEQ ID NO: 1205009 - DNA, 15 bp, Homo sapiens
ttcaccagaagcctc

SEQ ID NO: 1205010 - DNA, 15 bp, Homo sapiens
cttcaccagaagcct

SEQ ID NO: 1205011 - DNA, 15 bp, Homo sapiens
ccttcaccagaagcc

SEQ ID NO: 1205012 - DNA, 15 bp, Homo sapiens
tccttcaccagaagc

SEQ ID NO: 1205013 - DNA, 15 bp, Homo sapiens
ctccttcaccagaag

SEQ ID NO: 1205014 - DNA, 15 bp, Homo sapiens
cctccttcaccagaa

SEQ ID NO: 1205015 - DNA, 15 bp, Homo sapiens
tcctccttcaccaga

SEQ ID NO: 1205016 - DNA, 15 bp, Homo sapiens
atcctccttcaccag

SEQ ID NO: 1205017 - DNA, 15 bp, Homo sapiens
gatcctccttcacca

SEQ ID NO: 1205018 - DNA, 15 bp, Homo sapiens
cgatcctccttcacc

SEQ ID NO: 1205019 - DNA, 15 bp, Homo sapiens
gcgatcctccttcac

SEQ ID NO: 1205020 - DNA, 15 bp, Homo sapiens
agcgatcctccttca

SEQ ID NO: 1205021 - DNA, 15 bp, Homo sapiens
tagcgatcctccttc

SEQ ID NO: 1205022 - DNA, 15 bp, Homo sapiens
ctagcgatcctcctt

SEQ ID NO: 1205023 - DNA, 15 bp, Homo sapiens
tctagcgatcctcct

SEQ ID NO: 1205024 - DNA, 15 bp, Homo sapiens
ttctagcgatcctcc

SEQ ID NO: 1205025 - DNA, 15 bp, Homo sapiens
gttctagcgatcctc

SEQ ID NO: 1205026 - DNA, 15 bp, Homo sapiens
ggttctagcgatcct

SEQ ID NO: 1205027 - DNA, 15 bp, Homo sapiens
tggttctagcgatcc

SEQ ID NO: 1205028 - DNA, 15 bp, Homo sapiens
ttggttctagcgatc

SEQ ID NO: 1205029 - DNA, 15 bp, Homo sapiens
cttggttctagcgat

SEQ ID NO: 1205030 - DNA, 15 bp, Homo sapiens
gcttggttctagcga

SEQ ID NO: 1205031 - DNA, 15 bp, Homo sapiens
agcttggttctagcg

SEQ ID NO: 1205032 - DNA, 15 bp, Homo sapiens
cagcttggttctagc

SEQ ID NO: 1205033 - DNA, 15 bp, Homo sapiens
acagcttggttctag

SEQ ID NO: 1205034 - DNA, 15 bp, Homo sapiens
gacagcttggttcta

SEQ ID NO: 1205035 - DNA, 15 bp, Homo sapiens
ggacagcttggttct

SEQ ID NO: 1205036 - DNA, 15 bp, Homo sapiens
aggacagcttggttc

SEQ ID NO: 1205037 - DNA, 15 bp, Homo sapiens
gaggacagcttggtt

SEQ ID NO: 1205038 - DNA, 15 bp, Homo sapiens
agaggacagcttggt

SEQ ID NO: 1205039 - DNA, 15 bp, Homo sapiens
aagaggacagcttgg

SEQ ID NO: 1205040 - DNA, 15 bp, Homo sapiens
taagaggacagcttg

SEQ ID NO: 1205041 - DNA, 15 bp, Homo sapiens
ttaagaggacagctt

SEQ ID NO: 1205042 - DNA, 15 bp, Homo sapiens
cttaagaggacagct

SEQ ID NO: 1205043 - DNA, 15 bp, Homo sapiens
gcttaagaggacagc

SEQ ID NO: 1205044 - DNA, 15 bp, Homo sapiens
agcttaagaggacag

SEQ ID NO: 1205045 - DNA, 15 bp, Homo sapiens
tagcttaagaggaca

SEQ ID NO: 1205046 - DNA, 15 bp, Homo sapiens
ctagcttaagaggac

SEQ ID NO: 1205047 - DNA, 15 bp, Homo sapiens
actagcttaagagga

SEQ ID NO: 1205048 - DNA, 15 bp, Homo sapiens
aactagcttaagagg

SEQ ID NO: 1205049 - DNA, 15 bp, Homo sapiens
caactagcttaagag

SEQ ID NO: 1205050 - DNA, 15 bp, Homo sapiens
gcaactagcttaaga

SEQ ID NO: 1205051 - DNA, 15 bp, Homo sapiens
tgcaactagcttaag

SEQ ID NO: 1205052 - DNA, 15 bp, Homo sapiens
ctgcaactagcttaa

SEQ ID NO: 1205053 - DNA, 15 bp, Homo sapiens
gctgcaactagctta

SEQ ID NO: 1205054 - DNA, 15 bp, Homo sapiens
tgctgcaactagctt

SEQ ID NO: 1205055 - DNA, 15 bp, Homo sapiens
ctgctgcaactagct

SEQ ID NO: 1205056 - DNA, 15 bp, Homo sapiens
gctgctgcaactagc

SEQ ID NO: 1205057 - DNA, 15 bp, Homo sapiens
ggctgctgcaactag

SEQ ID NO: 1205058 - DNA, 15 bp, Homo sapiens
gggctgctgcaacta

SEQ ID NO: 1205059 - DNA, 15 bp, Homo sapiens
ggggctgctgcaact

SEQ ID NO: 1205060 - DNA, 15 bp, Homo sapiens
aggggctgctgcaac

SEQ ID NO: 1205061 - DNA, 15 bp, Homo sapiens
gaggggctgctgcaa

SEQ ID NO: 1205062 - DNA, 15 bp, Homo sapiens
ggaggggctgctgca

SEQ ID NO: 1205063 - DNA, 15 bp, Homo sapiens
aggaggggctgctgc

SEQ ID NO: 1205064 - DNA, 15 bp, Homo sapiens
gaggaggggctgctg

SEQ ID NO: 1205065 - DNA, 15 bp, Homo sapiens
ggaggaggggctgct

SEQ ID NO: 1205066 - DNA, 15 bp, Homo sapiens
gggaggaggggctgc

SEQ ID NO: 1205067 - DNA, 15 bp, Homo sapiens
tgggaggaggggctg

SEQ ID NO: 1205068 - DNA, 15 bp, Homo sapiens
ctgggaggaggggct

SEQ ID NO: 1205069 - DNA, 15 bp, Homo sapiens
gctgggaggaggggc

SEQ ID NO: 1205070 - DNA, 15 bp, Homo sapiens
ggctgggaggagggg

SEQ ID NO: 1205071 - DNA, 15 bp, Homo sapiens
tggctgggaggaggg

SEQ ID NO: 1205072 - DNA, 15 bp, Homo sapiens
gtggctgggaggagg

SEQ ID NO: 1205073 - DNA, 15 bp, Homo sapiens
ggtggctgggaggag

SEQ ID NO: 1205074 - DNA, 15 bp, Homo sapiens
aggtggctgggagga

SEQ ID NO: 1205075 - DNA, 15 bp, Homo sapiens
gaggtggctgggagg

SEQ ID NO: 1205076 - DNA, 15 bp, Homo sapiens
ggaggtggctgggag

SEQ ID NO: 1205077 - DNA, 15 bp, Homo sapiens
cggaggtggctggga

SEQ ID NO: 1205078 - DNA, 15 bp, Homo sapiens
gcggaggtggctggg

SEQ ID NO: 1205079 - DNA, 15 bp, Homo sapiens
ggcggaggtggctgg

SEQ ID NO: 1205080 - DNA, 15 bp, Homo sapiens
tggcggaggtggctg

SEQ ID NO: 1205081 - DNA, 15 bp, Homo sapiens
ttggcggaggtggct

SEQ ID NO: 1205082 - DNA, 15 bp, Homo sapiens
attggcggaggtggc

SEQ ID NO: 1205083 - DNA, 15 bp, Homo sapiens
gattggcggaggtgg

SEQ ID NO: 1205084 - DNA, 15 bp, Homo sapiens
agattggcggaggtg

SEQ ID NO: 1205085 - DNA, 15 bp, Homo sapiens
gagattggcggaggt

SEQ ID NO: 1205086 - DNA, 15 bp, Homo sapiens
agagattggcggagg

SEQ ID NO: 1205087 - DNA, 15 bp, Homo sapiens
gagagattggcggag

SEQ ID NO: 1205088 - DNA, 15 bp, Homo sapiens
tgagagattggcgga

SEQ ID NO: 1205089 - DNA, 15 bp, Homo sapiens
gtgagagattggcgg

SEQ ID NO: 1205090 - DNA, 15 bp, Homo sapiens
agtgagagattggcg

SEQ ID NO: 1205091 - DNA, 15 bp, Homo sapiens
gagtgagagattggc

SEQ ID NO: 1205092 - DNA, 15 bp, Homo sapiens
tgagtgagagattgg

SEQ ID NO: 1205093 - DNA, 15 bp, Homo sapiens
gtgagtgagagattg

SEQ ID NO: 1205094 - DNA, 15 bp, Homo sapiens
ggtgagtgagagatt

SEQ ID NO: 1205095 - DNA, 15 bp, Homo sapiens
aggtgagtgagagat

SEQ ID NO: 1205096 - DNA, 15 bp, Homo sapiens
aaggtgagtgagaga

SEQ ID NO: 1205097 - DNA, 15 bp, Homo sapiens
aaaggtgagtgagag

SEQ ID NO: 1205098 - DNA, 15 bp, Homo sapiens
caaaggtgagtgaga

SEQ ID NO: 1205099 - DNA, 15 bp, Homo sapiens
ccaaaggtgagtgag

SEQ ID NO: 1205100 - DNA, 15 bp, Homo sapiens
gccaaaggtgagtga

SEQ ID NO: 1205101 - DNA, 15 bp, Homo sapiens
agccaaaggtgagtg

SEQ ID NO: 1205102 - DNA, 15 bp, Homo sapiens
gagccaaaggtgagt

SEQ ID NO: 1205103 - DNA, 15 bp, Homo sapiens
ggagccaaaggtgag

SEQ ID NO: 1205104 - DNA, 15 bp, Homo sapiens
aggagccaaaggtga

SEQ ID NO: 1205105 - DNA, 15 bp, Homo sapiens
caggagccaaaggtg

SEQ ID NO: 1205106 - DNA, 15 bp, Homo sapiens
gcaggagccaaaggt

SEQ ID NO: 1205107 - DNA, 15 bp, Homo sapiens
ggcaggagccaaagg

SEQ ID NO: 1205108 - DNA, 15 bp, Homo sapiens
gggcaggagccaaag

SEQ ID NO: 1205109 - DNA, 15 bp, Homo sapiens
agggcaggagccaaa

SEQ ID NO: 1205110 - DNA, 15 bp, Homo sapiens
aagggcaggagccaa

SEQ ID NO: 1205111 - DNA, 15 bp, Homo sapiens
taagggcaggagcca

SEQ ID NO: 1205112 - DNA, 15 bp, Homo sapiens
ctaagggcaggagcc

SEQ ID NO: 1205113 - DNA, 15 bp, Homo sapiens
cctaagggcaggagc

SEQ ID NO: 1205114 - DNA, 15 bp, Homo sapiens
ccctaagggcaggag

SEQ ID NO: 1205115 - DNA, 15 bp, Homo sapiens
accctaagggcagga

SEQ ID NO: 1205116 - DNA, 15 bp, Homo sapiens
aaccctaagggcagg

SEQ ID NO: 1205117 - DNA, 15 bp, Homo sapiens
taaccctaagggcag

SEQ ID NO: 1205118 - DNA, 15 bp, Homo sapiens
gtaaccctaagggca

SEQ ID NO: 1205119 - DNA, 15 bp, Homo sapiens
ggtaaccctaagggc

SEQ ID NO: 1205120 - DNA, 15 bp, Homo sapiens
aggtaaccctaaggg

SEQ ID NO: 1205121 - DNA, 15 bp, Homo sapiens
caggtaaccctaagg

SEQ ID NO: 1205122 - DNA, 15 bp, Homo sapiens
ccaggtaaccctaag

SEQ ID NO: 1205123 - DNA, 15 bp, Homo sapiens
cccaggtaaccctaa

SEQ ID NO: 1205124 - DNA, 15 bp, Homo sapiens
acccaggtaacccta

SEQ ID NO: 1205125 - DNA, 15 bp, Homo sapiens
aacccaggtaaccct

SEQ ID NO: 1205126 - DNA, 15 bp, Homo sapiens
caacccaggtaaccc

SEQ ID NO: 1205127 - DNA, 15 bp, Homo sapiens
gcaacccaggtaacc

SEQ ID NO: 1205128 - DNA, 15 bp, Homo sapiens
ggcaacccaggtaac

SEQ ID NO: 1205129 - DNA, 15 bp, Homo sapiens
tggcaacccaggtaa

SEQ ID NO: 1205130 - DNA, 15 bp, Homo sapiens
ttggcaacccaggta

SEQ ID NO: 1205131 - DNA, 15 bp, Homo sapiens
cttggcaacccaggt

SEQ ID NO: 1205132 - DNA, 15 bp, Homo sapiens
gcttggcaacccagg

SEQ ID NO: 1205133 - DNA, 15 bp, Homo sapiens
ggcttggcaacccag

SEQ ID NO: 1205134 - DNA, 15 bp, Homo sapiens
aggcttggcaaccca

SEQ ID NO: 1205135 - DNA, 15 bp, Homo sapiens
aaggcttggcaaccc

SEQ ID NO: 1205136 - DNA, 15 bp, Homo sapiens
caaggcttggcaacc

SEQ ID NO: 1205137 - DNA, 15 bp, Homo sapiens
acaaggcttggcaac

SEQ ID NO: 1205138 - DNA, 15 bp, Homo sapiens
gacaaggcttggcaa

SEQ ID NO: 1205139 - DNA, 15 bp, Homo sapiens
agacaaggcttggca

SEQ ID NO: 1205140 - DNA, 15 bp, Homo sapiens
cagacaaggcttggc

SEQ ID NO: 1205141 - DNA, 15 bp, Homo sapiens
tcagacaaggcttgg

SEQ ID NO: 1205142 - DNA, 15 bp, Homo sapiens
ctcagacaaggcttg

SEQ ID NO: 1205143 - DNA, 15 bp, Homo sapiens
tctcagacaaggctt

SEQ ID NO: 1205144 - DNA, 15 bp, Homo sapiens
atctcagacaaggct

SEQ ID NO: 1205145 - DNA, 15 bp, Homo sapiens
catctcagacaaggc

SEQ ID NO: 1205146 - DNA, 15 bp, Homo sapiens
tcatctcagacaagg

SEQ ID NO: 1205147 - DNA, 15 bp, Homo sapiens
atcatctcagacaag

SEQ ID NO: 1205148 - DNA, 15 bp, Homo sapiens
gatcatctcagacaa

SEQ ID NO: 1205149 - DNA, 15 bp, Homo sapiens
ggatcatctcagaca

SEQ ID NO: 1205150 - DNA, 15 bp, Homo sapiens
tggatcatctcagac

SEQ ID NO: 1205151 - DNA, 15 bp, Homo sapiens
ctggatcatctcaga

SEQ ID NO: 1205152 - DNA, 15 bp, Homo sapiens
actggatcatctcag

SEQ ID NO: 1205153 - DNA, 15 bp, Homo sapiens
aactggatcatctca

SEQ ID NO: 1205154 - DNA, 15 bp, Homo sapiens
aaactggatcatctc

SEQ ID NO: 1205155 - DNA, 15 bp, Homo sapiens
aaaactggatcatct

SEQ ID NO: 1205156 - DNA, 15 bp, Homo sapiens
taaaactggatcatc

SEQ ID NO: 1205157 - DNA, 15 bp, Homo sapiens
gtaaaactggatcat

SEQ ID NO: 1205158 - DNA, 15 bp, Homo sapiens
ggtaaaactggatca

SEQ ID NO: 1205159 - DNA, 15 bp, Homo sapiens
aggtaaaactggatc

SEQ ID NO: 1205160 - DNA, 15 bp, Homo sapiens
caggtaaaactggat

SEQ ID NO: 1205161 - DNA, 15 bp, Homo sapiens
ccaggtaaaactgga

SEQ ID NO: 1205162 - DNA, 15 bp, Homo sapiens
tccaggtaaaactgg

SEQ ID NO: 1205163 - DNA, 15 bp, Homo sapiens
ctccaggtaaaactg

SEQ ID NO: 1205164 - DNA, 15 bp, Homo sapiens
cctccaggtaaaact

SEQ ID NO: 1205165 - DNA, 15 bp, Homo sapiens
tcctccaggtaaaac

SEQ ID NO: 1205166 - DNA, 15 bp, Homo sapiens
ctcctccaggtaaaa

SEQ ID NO: 1205167 - DNA, 15 bp, Homo sapiens
cctcctccaggtaaa

SEQ ID NO: 1205168 - DNA, 15 bp, Homo sapiens
acctcctccaggtaa

SEQ ID NO: 1205169 - DNA, 15 bp, Homo sapiens
cacctcctccaggta

SEQ ID NO: 1205170 - DNA, 15 bp, Homo sapiens
tcacctcctccaggt

SEQ ID NO: 1205171 - DNA, 15 bp, Homo sapiens
atcacctcctccagg

SEQ ID NO: 1205172 - DNA, 15 bp, Homo sapiens
catcacctcctccag

SEQ ID NO: 1205173 - DNA, 15 bp, Homo sapiens
gcatcacctcctcca

SEQ ID NO: 1205174 - DNA, 15 bp, Homo sapiens
ggcatcacctcctcc

SEQ ID NO: 1205175 - DNA, 15 bp, Homo sapiens
gggcatcacctcctc

SEQ ID NO: 1205176 - DNA, 15 bp, Homo sapiens
ggggcatcacctcct

SEQ ID NO: 1205177 - DNA, 15 bp, Homo sapiens
tggggcatcacctcc

SEQ ID NO: 1205178 - DNA, 15 bp, Homo sapiens
ttggggcatcacctc

SEQ ID NO: 1205179 - DNA, 15 bp, Homo sapiens
cttggggcatcacct

SEQ ID NO: 1205180 - DNA, 15 bp, Homo sapiens
gcttggggcatcacc

SEQ ID NO: 1205181 - DNA, 15 bp, Homo sapiens
agcttggggcatcac

SEQ ID NO: 1205182 - DNA, 15 bp, Homo sapiens
cagcttggggcatca

SEQ ID NO: 1205183 - DNA, 15 bp, Homo sapiens
tcagcttggggcatc

SEQ ID NO: 1205184 - DNA, 15 bp, Homo sapiens
ctcagcttggggcat

SEQ ID NO: 1205185 - DNA, 15 bp, Homo sapiens
tctcagcttggggca

SEQ ID NO: 1205186 - DNA, 15 bp, Homo sapiens
ttctcagcttggggc

SEQ ID NO: 1205187 - DNA, 15 bp, Homo sapiens
gttctcagcttgggg

SEQ ID NO: 1205188 - DNA, 15 bp, Homo sapiens
ggttctcagcttggg

SEQ ID NO: 1205189 - DNA, 15 bp, Homo sapiens
tggttctcagcttgg

SEQ ID NO: 1205190 - DNA, 15 bp, Homo sapiens
ttggttctcagcttg

SEQ ID NO: 1205191 - DNA, 15 bp, Homo sapiens
cttggttctcagctt

SEQ ID NO: 1205192 - DNA, 15 bp, Homo sapiens
tcttggttctcagct

SEQ ID NO: 1205193 - DNA, 15 bp, Homo sapiens
gtcttggttctcagc

SEQ ID NO: 1205194 - DNA, 15 bp, Homo sapiens
ggtcttggttctcag

SEQ ID NO: 1205195 - DNA, 15 bp, Homo sapiens
gggtcttggttctca

SEQ ID NO: 1205196 - DNA, 15 bp, Homo sapiens
tgggtcttggttctc

SEQ ID NO: 1205197 - DNA, 15 bp, Homo sapiens
ctgggtcttggttct

SEQ ID NO: 1205198 - DNA, 15 bp, Homo sapiens
tctgggtcttggttc

SEQ ID NO: 1205199 - DNA, 15 bp, Homo sapiens
gtctgggtcttggtt

SEQ ID NO: 1205200 - DNA, 15 bp, Homo sapiens
tgtctgggtcttggt

SEQ ID NO: 1205201 - DNA, 15 bp, Homo sapiens
atgtctgggtcttgg

SEQ ID NO: 1205202 - DNA, 15 bp, Homo sapiens
gatgtctgggtcttg

SEQ ID NO: 1205203 - DNA, 15 bp, Homo sapiens
tgatgtctgggtctt

SEQ ID NO: 1205204 - DNA, 15 bp, Homo sapiens
ttgatgtctgggtct

SEQ ID NO: 1205205 - DNA, 15 bp, Homo sapiens
cttgatgtctgggtc

SEQ ID NO: 1205206 - DNA, 15 bp, Homo sapiens
ccttgatgtctgggt

SEQ ID NO: 1205207 - DNA, 15 bp, Homo sapiens
gccttgatgtctggg

SEQ ID NO: 1205208 - DNA, 15 bp, Homo sapiens
cgccttgatgtctgg

SEQ ID NO: 1205209 - DNA, 15 bp, Homo sapiens
gcgccttgatgtctg

SEQ ID NO: 1205210 - DNA, 15 bp, Homo sapiens
tgcgccttgatgtct

SEQ ID NO: 1205211 - DNA, 15 bp, Homo sapiens
atgcgccttgatgtc

SEQ ID NO: 1205212 - DNA, 15 bp, Homo sapiens
catgcgccttgatgt

SEQ ID NO: 1205213 - DNA, 15 bp, Homo sapiens
acatgcgccttgatg

SEQ ID NO: 1205214 - DNA, 15 bp, Homo sapiens
cacatgcgccttgat

SEQ ID NO: 1205215 - DNA, 15 bp, Homo sapiens
tcacatgcgccttga

SEQ ID NO: 1205216 - DNA, 15 bp, Homo sapiens
ttcacatgcgccttg

SEQ ID NO: 1205217 - DNA, 15 bp, Homo sapiens
gttcacatgcgcctt

SEQ ID NO: 1205218 - DNA, 15 bp, Homo sapiens
agttcacatgcgcct

SEQ ID NO: 1205219 - DNA, 15 bp, Homo sapiens
gagttcacatgcgcc

SEQ ID NO: 1205220 - DNA, 15 bp, Homo sapiens
ggagttcacatgcgc

SEQ ID NO: 1205221 - DNA, 15 bp, Homo sapiens
gggagttcacatgcg

SEQ ID NO: 1205222 - DNA, 15 bp, Homo sapiens
agggagttcacatgc

SEQ ID NO: 1205223 - DNA, 15 bp, Homo sapiens
cagggagttcacatg

SEQ ID NO: 1205224 - DNA, 15 bp, Homo sapiens
ccagggagttcacat

SEQ ID NO: 1205225 - DNA, 15 bp, Homo sapiens
cccagggagttcaca

SEQ ID NO: 1205226 - DNA, 15 bp, Homo sapiens
ccccagggagttcac

SEQ ID NO: 1205227 - DNA, 15 bp, Homo sapiens
cccccagggagttca

SEQ ID NO: 1205228 - DNA, 15 bp, Homo sapiens
tcccccagggagttc

SEQ ID NO: 1205229 - DNA, 15 bp, Homo sapiens
ctcccccagggagtt

SEQ ID NO: 1205230 - DNA, 15 bp, Homo sapiens
tctcccccagggagt

SEQ ID NO: 1205231 - DNA, 15 bp, Homo sapiens
ttctcccccagggag

SEQ ID NO: 1205232 - DNA, 15 bp, Homo sapiens
gttctcccccaggga

SEQ ID NO: 1205233 - DNA, 15 bp, Homo sapiens
ggttctcccccaggg

SEQ ID NO: 1205234 - DNA, 15 bp, Homo sapiens
aggttctcccccagg

SEQ ID NO: 1205235 - DNA, 15 bp, Homo sapiens
caggttctcccccag

SEQ ID NO: 1205236 - DNA, 15 bp, Homo sapiens
tcaggttctccccca

SEQ ID NO: 1205237 - DNA, 15 bp, Homo sapiens
ttcaggttctccccc

SEQ ID NO: 1205238 - DNA, 15 bp, Homo sapiens
cttcaggttctcccc

SEQ ID NO: 1205239 - DNA, 15 bp, Homo sapiens
tcttcaggttctccc

SEQ ID NO: 1205240 - DNA, 15 bp, Homo sapiens
gtcttcaggttctcc

SEQ ID NO: 1205241 - DNA, 15 bp, Homo sapiens
ggtcttcaggttctc

SEQ ID NO: 1205242 - DNA, 15 bp, Homo sapiens
gggtcttcaggttct

SEQ ID NO: 1205243 - DNA, 15 bp, Homo sapiens
agggtcttcaggttc

SEQ ID NO: 1205244 - DNA, 15 bp, Homo sapiens
gagggtcttcaggtt

SEQ ID NO: 1205245 - DNA, 15 bp, Homo sapiens
tgagggtcttcaggt

SEQ ID NO: 1205246 - DNA, 15 bp, Homo sapiens
ctgagggtcttcagg

SEQ ID NO: 1205247 - DNA, 15 bp, Homo sapiens
cctgagggtcttcag

SEQ ID NO: 1205248 - DNA, 15 bp, Homo sapiens
gcctgagggtcttca

SEQ ID NO: 1205249 - DNA, 15 bp, Homo sapiens
agcctgagggtcttc

SEQ ID NO: 1205250 - DNA, 15 bp, Homo sapiens
cagcctgagggtctt

SEQ ID NO: 1205251 - DNA, 15 bp, Homo sapiens
tcagcctgagggtct

SEQ ID NO: 1205252 - DNA, 15 bp, Homo sapiens
ctcagcctgagggtc

SEQ ID NO: 1205253 - DNA, 15 bp, Homo sapiens
cctcagcctgagggt

SEQ ID NO: 1205254 - DNA, 15 bp, Homo sapiens
gcctcagcctgaggg

SEQ ID NO: 1205255 - DNA, 15 bp, Homo sapiens
agcctcagcctgagg

SEQ ID NO: 1205256 - DNA, 15 bp, Homo sapiens
tagcctcagcctgag

SEQ ID NO: 1205257 - DNA, 15 bp, Homo sapiens
gtagcctcagcctga

SEQ ID NO: 1205258 - DNA, 15 bp, Homo sapiens
cgtagcctcagcctg

SEQ ID NO: 1205259 - DNA, 15 bp, Homo sapiens
ccgtagcctcagcct

SEQ ID NO: 1205260 - DNA, 15 bp, Homo sapiens
gccgtagcctcagcc

SEQ ID NO: 1205261 - DNA, 15 bp, Homo sapiens
cgccgtagcctcagc

SEQ ID NO: 1205262 - DNA, 15 bp, Homo sapiens
gcgccgtagcctcag

SEQ ID NO: 1205263 - DNA, 15 bp, Homo sapiens
agcgccgtagcctca

SEQ ID NO: 1205264 - DNA, 15 bp, Homo sapiens
cagcgccgtagcctc

SEQ ID NO: 1205265 - DNA, 15 bp, Homo sapiens
acagcgccgtagcct

SEQ ID NO: 1205266 - DNA, 15 bp, Homo sapiens
cacagcgccgtagcc

SEQ ID NO: 1205267 - DNA, 15 bp, Homo sapiens
acacagcgccgtagc

SEQ ID NO: 1205268 - DNA, 15 bp, Homo sapiens
tacacagcgccgtag

SEQ ID NO: 1205269 - DNA, 15 bp, Homo sapiens
ttacacagcgccgta

SEQ ID NO: 1205270 - DNA, 15 bp, Homo sapiens
cttacacagcgccgt

SEQ ID NO: 1205271 - DNA, 15 bp, Homo sapiens
acttacacagcgccg

SEQ ID NO: 1205272 - DNA, 15 bp, Homo sapiens
tacttacacagcgcc

SEQ ID NO: 1205273 - DNA, 15 bp, Homo sapiens
ctacttacacagcgc

SEQ ID NO: 1205274 - DNA, 15 bp, Homo sapiens
gctacttacacagcg

SEQ ID NO: 1205275 - DNA, 15 bp, Homo sapiens
tgctacttacacagc

SEQ ID NO: 1205276 - DNA, 15 bp, Homo sapiens
ctgctacttacacag

SEQ ID NO: 1205277 - DNA, 15 bp, Homo sapiens
tctgctacttacaca

SEQ ID NO: 1205278 - DNA, 15 bp, Homo sapiens
atctgctacttacac

SEQ ID NO: 1205279 - DNA, 15 bp, Homo sapiens
gatctgctacttaca

SEQ ID NO: 1205280 - DNA, 15 bp, Homo sapiens
tgatctgctacttac

SEQ ID NO: 1205281 - DNA, 15 bp, Homo sapiens
ctgatctgctactta

SEQ ID NO: 1205282 - DNA, 15 bp, Homo sapiens
actgatctgctactt

SEQ ID NO: 1205283 - DNA, 15 bp, Homo sapiens
aaactgatctgctac

SEQ ID NO: 1205284 - DNA, 15 bp, Homo sapiens
aaaactgatctgcta

SEQ ID NO: 1205285 - DNA, 15 bp, Homo sapiens
aaaaactgatctgct

SEQ ID NO: 1205286 - DNA, 15 bp, Homo sapiens
aaaaaactgatctgc

SEQ ID NO: 1205287 - DNA, 15 bp, Homo sapiens
gaaaaaactgatctg

SEQ ID NO: 1205288 - DNA, 15 bp, Homo sapiens
ggaaaaaactgatct

SEQ ID NO: 1205289 - DNA, 15 bp, Homo sapiens
gggaaaaaactgatc

SEQ ID NO: 1205290 - DNA, 15 bp, Homo sapiens
agggaaaaaactgat

SEQ ID NO: 1205291 - DNA, 15 bp, Homo sapiens
aagggaaaaaactga

SEQ ID NO: 1205292 - DNA, 15 bp, Homo sapiens
caagggaaaaaactg

SEQ ID NO: 1205293 - DNA, 15 bp, Homo sapiens
gcaagggaaaaaact

SEQ ID NO: 1205294 - DNA, 15 bp, Homo sapiens
tgcaagggaaaaaac

SEQ ID NO: 1205295 - DNA, 15 bp, Homo sapiens
ctgcaagggaaaaaa

SEQ ID NO: 1205296 - DNA, 15 bp, Homo sapiens
gctgcaagggaaaaa

SEQ ID NO: 1205297 - DNA, 15 bp, Homo sapiens
agctgcaagggaaaa

SEQ ID NO: 1205298 - DNA, 15 bp, Homo sapiens
cagctgcaagggaaa

SEQ ID NO: 1205299 - DNA, 15 bp, Homo sapiens
gcagctgcaagggaa

SEQ ID NO: 1205300 - DNA, 15 bp, Homo sapiens
ggcagctgcaaggga

SEQ ID NO: 1205301 - DNA, 15 bp, Homo sapiens
gggcagctgcaaggg

SEQ ID NO: 1205302 - DNA, 15 bp, Homo sapiens
ggggcagctgcaagg

SEQ ID NO: 1205303 - DNA, 15 bp, Homo sapiens
gggggcagctgcaag

SEQ ID NO: 1205304 - DNA, 15 bp, Homo sapiens
tgggggcagctgcaa

SEQ ID NO: 1205305 - DNA, 15 bp, Homo sapiens
ttgggggcagctgca

SEQ ID NO: 1205306 - DNA, 15 bp, Homo sapiens
tttgggggcagctgc

SEQ ID NO: 1205307 - DNA, 15 bp, Homo sapiens
ttttgggggcagctg

SEQ ID NO: 1205308 - DNA, 15 bp, Homo sapiens
attttgggggcagct

SEQ ID NO: 1205309 - DNA, 15 bp, Homo sapiens
tattttgggggcagc

SEQ ID NO: 1205310 - DNA, 15 bp, Homo sapiens
gtattttgggggcag

SEQ ID NO: 1205311 - DNA, 15 bp, Homo sapiens
ggtattttgggggca

SEQ ID NO: 1205312 - DNA, 15 bp, Homo sapiens
tggtattttgggggc

SEQ ID NO: 1205313 - DNA, 15 bp, Homo sapiens
atggtattttggggg

SEQ ID NO: 1205314 - DNA, 15 bp, Homo sapiens
gatggtattttgggg

SEQ ID NO: 1205315 - DNA, 15 bp, Homo sapiens
agatggtattttggg

SEQ ID NO: 1205316 - DNA, 15 bp, Homo sapiens
gagatggtattttgg

SEQ ID NO: 1205317 - DNA, 15 bp, Homo sapiens
ggagatggtattttg

SEQ ID NO: 1205318 - DNA, 15 bp, Homo sapiens
aggagatggtatttt

SEQ ID NO: 1205319 - DNA, 15 bp, Homo sapiens
taggagatggtattt

SEQ ID NO: 1205320 - DNA, 15 bp, Homo sapiens
gtaggagatggtatt

SEQ ID NO: 1205321 - DNA, 15 bp, Homo sapiens
tgtaggagatggtat

SEQ ID NO: 1205322 - DNA, 15 bp, Homo sapiens
ctgtaggagatggta

SEQ ID NO: 1205323 - DNA, 15 bp, Homo sapiens
tctgtaggagatggt

SEQ ID NO: 1205324 - DNA, 15 bp, Homo sapiens
gtctgtaggagatgg

SEQ ID NO: 1205325 - DNA, 15 bp, Homo sapiens
ggtctgtaggagatg

SEQ ID NO: 1205326 - DNA, 15 bp, Homo sapiens
tggtctgtaggagat

SEQ ID NO: 1205327 - DNA, 15 bp, Homo sapiens
ctggtctgtaggaga

SEQ ID NO: 1205328 - DNA, 15 bp, Homo sapiens
gctggtctgtaggag

SEQ ID NO: 1205329 - DNA, 15 bp, Homo sapiens
tgctggtctgtagga

SEQ ID NO: 1205330 - DNA, 15 bp, Homo sapiens
ctgctggtctgtagg

SEQ ID NO: 1205331 - DNA, 15 bp, Homo sapiens
cctgctggtctgtag

SEQ ID NO: 1205332 - DNA, 15 bp, Homo sapiens
ccctgctggtctgta

SEQ ID NO: 1205333 - DNA, 15 bp, Homo sapiens
tccctgctggtctgt

SEQ ID NO: 1205334 - DNA, 15 bp, Homo sapiens
gtccctgctggtctg

SEQ ID NO: 1205335 - DNA, 15 bp, Homo sapiens
tgtccctgctggtct

SEQ ID NO: 1205336 - DNA, 15 bp, Homo sapiens
gtgtccctgctggtc

SEQ ID NO: 1205337 - DNA, 15 bp, Homo sapiens
agtgtccctgctggt

SEQ ID NO: 1205338 - DNA, 15 bp, Homo sapiens
gagtgtccctgctgg

SEQ ID NO: 1205339 - DNA, 15 bp, Homo sapiens
tgagtgtccctgctg

SEQ ID NO: 1205340 - DNA, 15 bp, Homo sapiens
gtgagtgtccctgct

SEQ ID NO: 1205341 - DNA, 15 bp, Homo sapiens
tgtgagtgtccctgc

SEQ ID NO: 1205342 - DNA, 15 bp, Homo sapiens
atgtgagtgtccctg

SEQ ID NO: 1205343 - DNA, 15 bp, Homo sapiens
gatgtgagtgtccct

SEQ ID NO: 1205344 - DNA, 15 bp, Homo sapiens
ggatgtgagtgtccc

SEQ ID NO: 1205345 - DNA, 15 bp, Homo sapiens
tggatgtgagtgtcc

SEQ ID NO: 1205346 - DNA, 15 bp, Homo sapiens
gtggatgtgagtgtc

SEQ ID NO: 1205347 - DNA, 15 bp, Homo sapiens
tgtggatgtgagtgt

SEQ ID NO: 1205348 - DNA, 15 bp, Homo sapiens
ctgtggatgtgagtg

SEQ ID NO: 1205349 - DNA, 15 bp, Homo sapiens
tctgtggatgtgagt

SEQ ID NO: 1205350 - DNA, 15 bp, Homo sapiens
gtctgtggatgtgag

SEQ ID NO: 1205351 - DNA, 15 bp, Homo sapiens
tgtctgtggatgtga

SEQ ID NO: 1205352 - DNA, 15 bp, Homo sapiens
gtgtctgtggatgtg

SEQ ID NO: 1205353 - DNA, 15 bp, Homo sapiens
tgtgtctgtggatgt

SEQ ID NO: 1205354 - DNA, 15 bp, Homo sapiens
ctgtgtctgtggatg

SEQ ID NO: 1205355 - DNA, 15 bp, Homo sapiens
gctgtgtctgtggat

SEQ ID NO: 1205356 - DNA, 15 bp, Homo sapiens
tgctgtgtctgtgga

SEQ ID NO: 1205357 - DNA, 15 bp, Homo sapiens
ttgctgtgtctgtgg

SEQ ID NO: 1205358 - DNA, 15 bp, Homo sapiens
tttgctgtgtctgtg

SEQ ID NO: 1205359 - DNA, 15 bp, Homo sapiens
ctttgctgtgtctgt

SEQ ID NO: 1205360 - DNA, 15 bp, Homo sapiens
tctttgctgtgtctg

SEQ ID NO: 1205361 - DNA, 15 bp, Homo sapiens
gtctttgctgtgtct

SEQ ID NO: 1205362 - DNA, 15 bp, Homo sapiens
tgtctttgctgtgtc

SEQ ID NO: 1205363 - DNA, 15 bp, Homo sapiens
gtgtctttgctgtgt

SEQ ID NO: 1205364 - DNA, 15 bp, Homo sapiens
tgtgtctttgctgtg

SEQ ID NO: 1205365 - DNA, 15 bp, Homo sapiens
ctgtgtctttgctgt

SEQ ID NO: 1205366 - DNA, 15 bp, Homo sapiens
tctgtgtctttgctg

SEQ ID NO: 1205367 - DNA, 15 bp, Homo sapiens
gtctgtgtctttgct

SEQ ID NO: 1205368 - DNA, 15 bp, Homo sapiens
agtctgtgtctttgc

SEQ ID NO: 1205369 - DNA, 15 bp, Homo sapiens
cagtctgtgtctttg

SEQ ID NO: 1205370 - DNA, 15 bp, Homo sapiens
ccagtctgtgtcttt

SEQ ID NO: 1205371 - DNA, 15 bp, Homo sapiens
gccagtctgtgtctt

SEQ ID NO: 1205372 - DNA, 15 bp, Homo sapiens
tgccagtctgtgtct

SEQ ID NO: 1205373 - DNA, 15 bp, Homo sapiens
ctgccagtctgtgtc

SEQ ID NO: 1205374 - DNA, 15 bp, Homo sapiens
tctgccagtctgtgt

SEQ ID NO: 1205375 - DNA, 15 bp, Homo sapiens
ctctgccagtctgtg

SEQ ID NO: 1205376 - DNA, 15 bp, Homo sapiens
gctctgccagtctgt

SEQ ID NO: 1205377 - DNA, 15 bp, Homo sapiens
agctctgccagtctg

SEQ ID NO: 1205378 - DNA, 15 bp, Homo sapiens
tagctctgccagtct

SEQ ID NO: 1205379 - DNA, 15 bp, Homo sapiens
ctagctctgccagtc

SEQ ID NO: 1205380 - DNA, 15 bp, Homo sapiens
gctagctctgccagt

SEQ ID NO: 1205381 - DNA, 15 bp, Homo sapiens
agctagctctgccag

SEQ ID NO: 1205382 - DNA, 15 bp, Homo sapiens
cagctagctctgcca

SEQ ID NO: 1205383 - DNA, 15 bp, Homo sapiens
acagctagctctgcc

SEQ ID NO: 1205384 - DNA, 15 bp, Homo sapiens
tacagctagctctgc

SEQ ID NO: 1205385 - DNA, 15 bp, Homo sapiens
ttacagctagctctg

SEQ ID NO: 1205386 - DNA, 15 bp, Homo sapiens
tttacagctagctct

SEQ ID NO: 1205387 - DNA, 15 bp, Homo sapiens
atttacagctagctc

SEQ ID NO: 1205388 - DNA, 15 bp, Homo sapiens
catttacagctagct

SEQ ID NO: 1205389 - DNA, 15 bp, Homo sapiens
tcatttacagctagc

SEQ ID NO: 1205390 - DNA, 15 bp, Homo sapiens
ctcatttacagctag

SEQ ID NO: 1205391 - DNA, 15 bp, Homo sapiens
cctcatttacagcta

SEQ ID NO: 1205392 - DNA, 15 bp, Homo sapiens
tcctcatttacagct

SEQ ID NO: 1205393 - DNA, 15 bp, Homo sapiens
ttcctcatttacagc

SEQ ID NO: 1205394 - DNA, 15 bp, Homo sapiens
tttcctcatttacag

SEQ ID NO: 1205395 - DNA, 15 bp, Homo sapiens
ctttcctcatttaca

SEQ ID NO: 1205396 - DNA, 15 bp, Homo sapiens
tctttcctcatttac

SEQ ID NO: 1205397 - DNA, 15 bp, Homo sapiens
gtctttcctcattta

SEQ ID NO: 1205398 - DNA, 15 bp, Homo sapiens
agtctttcctcattt

SEQ ID NO: 1205399 - DNA, 15 bp, Homo sapiens
gagtctttcctcatt

SEQ ID NO: 1205400 - DNA, 15 bp, Homo sapiens
ggagtctttcctcat

SEQ ID NO: 1205401 - DNA, 15 bp, Homo sapiens
aggagtctttcctca

SEQ ID NO: 1205402 - DNA, 15 bp, Homo sapiens
caggagtctttcctc

SEQ ID NO: 1205403 - DNA, 15 bp, Homo sapiens
ccaggagtctttcct

SEQ ID NO: 1205404 - DNA, 15 bp, Homo sapiens
tccaggagtctttcc

SEQ ID NO: 1205405 - DNA, 15 bp, Homo sapiens
ctccaggagtctttc

SEQ ID NO: 1205406 - DNA, 15 bp, Homo sapiens
actccaggagtcttt

SEQ ID NO: 1205407 - DNA, 15 bp, Homo sapiens
gactccaggagtctt

SEQ ID NO: 1205408 - DNA, 15 bp, Homo sapiens
tgactccaggagtct

SEQ ID NO: 1205409 - DNA, 15 bp, Homo sapiens
ctgactccaggagtc

SEQ ID NO: 1205410 - DNA, 15 bp, Homo sapiens
tctgactccaggagt

SEQ ID NO: 1205411 - DNA, 15 bp, Homo sapiens
atctgactccaggag

SEQ ID NO: 1205412 - DNA, 15 bp, Homo sapiens
gatctgactccagga

SEQ ID NO: 1205413 - DNA, 15 bp, Homo sapiens
agatctgactccagg

SEQ ID NO: 1205414 - DNA, 15 bp, Homo sapiens
gagatctgactccag

SEQ ID NO: 1205415 - DNA, 15 bp, Homo sapiens
agagatctgactcca

SEQ ID NO: 1205416 - DNA, 15 bp, Homo sapiens
aagagatctgactcc

SEQ ID NO: 1205417 - DNA, 15 bp, Homo sapiens
caagagatctgactc

SEQ ID NO: 1205418 - DNA, 15 bp, Homo sapiens
gcaagagatctgact

SEQ ID NO: 1205419 - DNA, 15 bp, Homo sapiens
agcaagagatctgac

SEQ ID NO: 1205420 - DNA, 15 bp, Homo sapiens
gagcaagagatctga

SEQ ID NO: 1205421 - DNA, 15 bp, Homo sapiens
tgagcaagagatctg

SEQ ID NO: 1205422 - DNA, 15 bp, Homo sapiens
atgagcaagagatct

SEQ ID NO: 1205423 - DNA, 15 bp, Homo sapiens
aatgagcaagagatc

SEQ ID NO: 1205424 - DNA, 15 bp, Homo sapiens
aaatgagcaagagat

SEQ ID NO: 1205425 - DNA, 15 bp, Homo sapiens
gaaatgagcaagaga

SEQ ID NO: 1205426 - DNA, 15 bp, Homo sapiens
agaaatgagcaagag

SEQ ID NO: 1205427 - DNA, 15 bp, Homo sapiens
gagaaatgagcaaga

SEQ ID NO: 1205428 - DNA, 15 bp, Homo sapiens
agagaaatgagcaag

SEQ ID NO: 1205429 - DNA, 15 bp, Homo sapiens
aagagaaatgagcaa

SEQ ID NO: 1205430 - DNA, 15 bp, Homo sapiens
aaagagaaatgagca

SEQ ID NO: 1205431 - DNA, 15 bp, Homo sapiens
caaagagaaatgagc

SEQ ID NO: 1205432 - DNA, 15 bp, Homo sapiens
tcaaagagaaatgag

SEQ ID NO: 1205433 - DNA, 15 bp, Homo sapiens
ctcaaagagaaatga

SEQ ID NO: 1205434 - DNA, 15 bp, Homo sapiens
gctcaaagagaaatg

SEQ ID NO: 1205435 - DNA, 15 bp, Homo sapiens
tgctcaaagagaaat

SEQ ID NO: 1205436 - DNA, 15 bp, Homo sapiens
ctgctcaaagagaaa

SEQ ID NO: 1205437 - DNA, 15 bp, Homo sapiens
cctgctcaaagagaa

SEQ ID NO: 1205438 - DNA, 15 bp, Homo sapiens
gcctgctcaaagaga

SEQ ID NO: 1205439 - DNA, 15 bp, Homo sapiens
cgcctgctcaaagag

SEQ ID NO: 1205440 - DNA, 15 bp, Homo sapiens
acgcctgctcaaaga

SEQ ID NO: 1205441 - DNA, 15 bp, Homo sapiens
aacgcctgctcaaag

SEQ ID NO: 1205442 - DNA, 15 bp, Homo sapiens
caacgcctgctcaaa

SEQ ID NO: 1205443 - DNA, 15 bp, Homo sapiens
ccaacgcctgctcaa

SEQ ID NO: 1205444 - DNA, 15 bp, Homo sapiens
cccaacgcctgctca

SEQ ID NO: 1205445 - DNA, 15 bp, Homo sapiens
ccccaacgcctgctc

SEQ ID NO: 1205446 - DNA, 15 bp, Homo sapiens
cccccaacgcctgct

SEQ ID NO: 1205447 - DNA, 15 bp, Homo sapiens
acccccaacgcctgc

SEQ ID NO: 1205448 - DNA, 15 bp, Homo sapiens
cacccccaacgcctg

SEQ ID NO: 1205449 - DNA, 15 bp, Homo sapiens
ccacccccaacgcct

SEQ ID NO: 1205450 - DNA, 15 bp, Homo sapiens
gccacccccaacgcc

SEQ ID NO: 1205451 - DNA, 15 bp, Homo sapiens
agccacccccaacgc

SEQ ID NO: 1205452 - DNA, 15 bp, Homo sapiens
cagccacccccaacg

SEQ ID NO: 1205453 - DNA, 15 bp, Homo sapiens
gcagccacccccaac

SEQ ID NO: 1205454 - DNA, 15 bp, Homo sapiens
agcagccacccccaa

SEQ ID NO: 1205455 - DNA, 15 bp, Homo sapiens
tagcagccaccccca

SEQ ID NO: 1205456 - DNA, 15 bp, Homo sapiens
ctagcagccaccccc

SEQ ID NO: 1205457 - DNA, 15 bp, Homo sapiens
cctagcagccacccc

SEQ ID NO: 1205458 - DNA, 15 bp, Homo sapiens
gcctagcagccaccc

SEQ ID NO: 1205459 - DNA, 15 bp, Homo sapiens
tgcctagcagccacc

SEQ ID NO: 1205460 - DNA, 15 bp, Homo sapiens
atgcctagcagccac

SEQ ID NO: 1205461 - DNA, 15 bp, Homo sapiens
aatgcctagcagcca

SEQ ID NO: 1205462 - DNA, 15 bp, Homo sapiens
aaatgcctagcagcc

SEQ ID NO: 1205463 - DNA, 15 bp, Homo sapiens
taaatgcctagcagc

SEQ ID NO: 1205464 - DNA, 15 bp, Homo sapiens
gtaaatgcctagcag

SEQ ID NO: 1205465 - DNA, 15 bp, Homo sapiens
tgtaaatgcctagca

SEQ ID NO: 1205466 - DNA, 15 bp, Homo sapiens
atgtaaatgcctagc

SEQ ID NO: 1205467 - DNA, 15 bp, Homo sapiens
catgtaaatgcctag

SEQ ID NO: 1205468 - DNA, 15 bp, Homo sapiens
acatgtaaatgccta

SEQ ID NO: 1205469 - DNA, 15 bp, Homo sapiens
cacatgtaaatgcct

SEQ ID NO: 1205470 - DNA, 15 bp, Homo sapiens
tcacatgtaaatgcc

SEQ ID NO: 1205471 - DNA, 15 bp, Homo sapiens
ttcacatgtaaatgc

SEQ ID NO: 1205472 - DNA, 15 bp, Homo sapiens
tttcacatgtaaatg

SEQ ID NO: 1205473 - DNA, 15 bp, Homo sapiens
atttcacatgtaaat

SEQ ID NO: 1205474 - DNA, 15 bp, Homo sapiens
aatttcacatgtaaa

SEQ ID NO: 1205475 - DNA, 15 bp, Homo sapiens
aaatttcacatgtaa

SEQ ID NO: 1205476 - DNA, 15 bp, Homo sapiens
caaatttcacatgta

SEQ ID NO: 1205477 - DNA, 15 bp, Homo sapiens
gcaaatttcacatgt

SEQ ID NO: 1205478 - DNA, 15 bp, Homo sapiens
tgcaaatttcacatg

SEQ ID NO: 1205479 - DNA, 15 bp, Homo sapiens
ttgcaaatttcacat

SEQ ID NO: 1205480 - DNA, 15 bp, Homo sapiens
tttgcaaatttcaca

SEQ ID NO: 1205481 - DNA, 15 bp, Homo sapiens
gtttgcaaatttcac

SEQ ID NO: 1205482 - DNA, 15 bp, Homo sapiens
tgtttgcaaatttca

SEQ ID NO: 1205483 - DNA, 15 bp, Homo sapiens
ctgtttgcaaatttc

SEQ ID NO: 1205484 - DNA, 15 bp, Homo sapiens
gctgtttgcaaattt

SEQ ID NO: 1205485 - DNA, 15 bp, Homo sapiens
agctgtttgcaaatt

SEQ ID NO: 1205486 - DNA, 15 bp, Homo sapiens
aagctgtttgcaaat

SEQ ID NO: 1205487 - DNA, 15 bp, Homo sapiens
aaagctgtttgcaaa

SEQ ID NO: 1205488 - DNA, 15 bp, Homo sapiens
gaaagctgtttgcaa

SEQ ID NO: 1205489 - DNA, 15 bp, Homo sapiens
ggaaagctgtttgca

SEQ ID NO: 1205490 - DNA, 15 bp, Homo sapiens
aggaaagctgtttgc

SEQ ID NO: 1205491 - DNA, 15 bp, Homo sapiens
caggaaagctgtttg

SEQ ID NO: 1205492 - DNA, 15 bp, Homo sapiens
acaggaaagctgttt

SEQ ID NO: 1205493 - DNA, 15 bp, Homo sapiens
aacaggaaagctgtt

SEQ ID NO: 1205494 - DNA, 15 bp, Homo sapiens
taacaggaaagctgt

SEQ ID NO: 1205495 - DNA, 15 bp, Homo sapiens
ataacaggaaagctg

SEQ ID NO: 1205496 - DNA, 15 bp, Homo sapiens
aataacaggaaagct

SEQ ID NO: 1205497 - DNA, 15 bp, Homo sapiens
aaataacaggaaagc

SEQ ID NO: 1205498 - DNA, 15 bp, Homo sapiens
caaataacaggaaag

SEQ ID NO: 1205499 - DNA, 15 bp, Homo sapiens
acaaataacaggaaa

SEQ ID NO: 1205500 - DNA, 15 bp, Homo sapiens
cacaaataacaggaa

SEQ ID NO: 1205501 - DNA, 15 bp, Homo sapiens
tcacaaataacagga

SEQ ID NO: 1205502 - DNA, 15 bp, Homo sapiens
ctcacaaataacagg

SEQ ID NO: 1205503 - DNA, 15 bp, Homo sapiens
actcacaaataacag

SEQ ID NO: 1205504 - DNA, 15 bp, Homo sapiens
gactcacaaataaca

SEQ ID NO: 1205505 - DNA, 15 bp, Homo sapiens
tgactcacaaataac

SEQ ID NO: 1205506 - DNA, 15 bp, Homo sapiens
atgactcacaaataa

SEQ ID NO: 1205507 - DNA, 15 bp, Homo sapiens
aatgactcacaaata

SEQ ID NO: 1205508 - DNA, 15 bp, Homo sapiens
aaatgactcacaaat

SEQ ID NO: 1205509 - DNA, 15 bp, Homo sapiens
caaatgactcacaaa

SEQ ID NO: 1205510 - DNA, 15 bp, Homo sapiens
acaaatgactcacaa

SEQ ID NO: 1205511 - DNA, 15 bp, Homo sapiens
cacaaatgactcaca

SEQ ID NO: 1205512 - DNA, 15 bp, Homo sapiens
ccacaaatgactcac

SEQ ID NO: 1205513 - DNA, 15 bp, Homo sapiens
cccacaaatgactca

SEQ ID NO: 1205514 - DNA, 15 bp, Homo sapiens
acccacaaatgactc

SEQ ID NO: 1205515 - DNA, 15 bp, Homo sapiens
aacccacaaatgact

SEQ ID NO: 1205516 - DNA, 15 bp, Homo sapiens
taacccacaaatgac

SEQ ID NO: 1205517 - DNA, 15 bp, Homo sapiens
ataacccacaaatga

SEQ ID NO: 1205518 - DNA, 15 bp, Homo sapiens
aataacccacaaatg

SEQ ID NO: 1205519 - DNA, 15 bp, Homo sapiens
taataacccacaaat

SEQ ID NO: 1205520 - DNA, 15 bp, Homo sapiens
ttaataacccacaaa

SEQ ID NO: 1205521 - DNA, 15 bp, Homo sapiens
gttaataacccacaa

SEQ ID NO: 1205522 - DNA, 15 bp, Homo sapiens
agttaataacccaca

SEQ ID NO: 1205523 - DNA, 15 bp, Homo sapiens
tagttaataacccac

SEQ ID NO: 1205524 - DNA, 15 bp, Homo sapiens
gtagttaataaccca

SEQ ID NO: 1205525 - DNA, 15 bp, Homo sapiens
agtagttaataaccc

SEQ ID NO: 1205526 - DNA, 15 bp, Homo sapiens
gagtagttaataacc

SEQ ID NO: 1205527 - DNA, 15 bp, Homo sapiens
ggagtagttaataac

SEQ ID NO: 1205528 - DNA, 15 bp, Homo sapiens
gggagtagttaataa

SEQ ID NO: 1205529 - DNA, 15 bp, Homo sapiens
ggggagtagttaata

SEQ ID NO: 1205530 - DNA, 15 bp, Homo sapiens
aggggagtagttaat

SEQ ID NO: 1205531 - DNA, 15 bp, Homo sapiens
gaggggagtagttaa

SEQ ID NO: 1205532 - DNA, 15 bp, Homo sapiens
agaggggagtagtta

SEQ ID NO: 1205533 - DNA, 15 bp, Homo sapiens
gagaggggagtagtt

SEQ ID NO: 1205534 - DNA, 15 bp, Homo sapiens
agagaggggagtagt

SEQ ID NO: 1205535 - DNA, 15 bp, Homo sapiens
gagagaggggagtag

SEQ ID NO: 1205536 - DNA, 15 bp, Homo sapiens
agagagaggggagta

SEQ ID NO: 1205537 - DNA, 15 bp, Homo sapiens
aagagagaggggagt

SEQ ID NO: 1205538 - DNA, 15 bp, Homo sapiens
gaagagagaggggag

SEQ ID NO: 1205539 - DNA, 15 bp, Homo sapiens
tgaagagagagggga

SEQ ID NO: 1205540 - DNA, 15 bp, Homo sapiens
atgaagagagagggg

SEQ ID NO: 1205541 - DNA, 15 bp, Homo sapiens
tatgaagagagaggg

SEQ ID NO: 1205542 - DNA, 15 bp, Homo sapiens
ttatgaagagagagg

SEQ ID NO: 1205543 - DNA, 15 bp, Homo sapiens
tttatgaagagagag

SEQ ID NO: 1205544 - DNA, 15 bp, Homo sapiens
ttttatgaagagaga

SEQ ID NO: 1205545 - DNA, 15 bp, Homo sapiens
cttttatgaagagag

SEQ ID NO: 1205546 - DNA, 15 bp, Homo sapiens
ccttttatgaagaga

SEQ ID NO: 1205547 - DNA, 15 bp, Homo sapiens
tccttttatgaagag

SEQ ID NO: 1205548 - DNA, 15 bp, Homo sapiens
ctccttttatgaaga

SEQ ID NO: 1205549 - DNA, 15 bp, Homo sapiens
gctccttttatgaag

SEQ ID NO: 1205550 - DNA, 15 bp, Homo sapiens
ggctccttttatgaa

SEQ ID NO: 1205551 - DNA, 15 bp, Homo sapiens
gggctccttttatga

SEQ ID NO: 1205552 - DNA, 15 bp, Homo sapiens
tgggctccttttatg

SEQ ID NO: 1205553 - DNA, 15 bp, Homo sapiens
ctgggctccttttat

SEQ ID NO: 1205554 - DNA, 15 bp, Homo sapiens
tctgggctcctttta

SEQ ID NO: 1205555 - DNA, 15 bp, Homo sapiens
ctctgggctcctttt

SEQ ID NO: 1205556 - DNA, 15 bp, Homo sapiens
gctctgggctccttt

SEQ ID NO: 1205557 - DNA, 15 bp, Homo sapiens
agctctgggctcctt

SEQ ID NO: 1205558 - DNA, 15 bp, Homo sapiens
aagctctgggctcct

SEQ ID NO: 1205559 - DNA, 15 bp, Homo sapiens
gaagctctgggctcc

SEQ ID NO: 1205560 - DNA, 15 bp, Homo sapiens
tgaagctctgggctc

SEQ ID NO: 1205561 - DNA, 15 bp, Homo sapiens
ctgaagctctgggct

SEQ ID NO: 1205562 - DNA, 15 bp, Homo sapiens
actgaagctctgggc

SEQ ID NO: 1205563 - DNA, 15 bp, Homo sapiens
gactgaagctctggg

SEQ ID NO: 1205564 - DNA, 15 bp, Homo sapiens
tgactgaagctctgg

SEQ ID NO: 1205565 - DNA, 15 bp, Homo sapiens
ctgactgaagctctg

SEQ ID NO: 1205566 - DNA, 15 bp, Homo sapiens
cctgactgaagctct

SEQ ID NO: 1205567 - DNA, 15 bp, Homo sapiens
gcctgactgaagctc

SEQ ID NO: 1205568 - DNA, 15 bp, Homo sapiens
ggcctgactgaagct

SEQ ID NO: 1205569 - DNA, 15 bp, Homo sapiens
aggcctgactgaagc

SEQ ID NO: 1205570 - DNA, 15 bp, Homo sapiens
gaggcctgactgaag

SEQ ID NO: 1205571 - DNA, 15 bp, Homo sapiens
ggaggcctgactgaa

SEQ ID NO: 1205572 - DNA, 15 bp, Homo sapiens
tggaggcctgactga

SEQ ID NO: 1205573 - DNA, 15 bp, Homo sapiens
gtggaggcctgactg

SEQ ID NO: 1205574 - DNA, 15 bp, Homo sapiens
agtggaggcctgact

SEQ ID NO: 1205575 - DNA, 15 bp, Homo sapiens
cagtggaggcctgac

SEQ ID NO: 1205576 - DNA, 15 bp, Homo sapiens
gcagtggaggcctga

SEQ ID NO: 1205577 - DNA, 15 bp, Homo sapiens
ggcagtggaggcctg

SEQ ID NO: 1205578 - DNA, 15 bp, Homo sapiens
aggcagtggaggcct

SEQ ID NO: 1205579 - DNA, 15 bp, Homo sapiens
gaggcagtggaggcc

SEQ ID NO: 1205580 - DNA, 15 bp, Homo sapiens
agaggcagtggaggc

SEQ ID NO: 1205581 - DNA, 15 bp, Homo sapiens
aagaggcagtggagg

SEQ ID NO: 1205582 - DNA, 15 bp, Homo sapiens
aaagaggcagtggag

SEQ ID NO: 1205583 - DNA, 15 bp, Homo sapiens
caaagaggcagtgga

SEQ ID NO: 1205584 - DNA, 15 bp, Homo sapiens
acaaagaggcagtgg

SEQ ID NO: 1205585 - DNA, 15 bp, Homo sapiens
tacaaagaggcagtg

SEQ ID NO: 1205586 - DNA, 15 bp, Homo sapiens
ttacaaagaggcagt

SEQ ID NO: 1205587 - DNA, 15 bp, Homo sapiens
gttacaaagaggcag

SEQ ID NO: 1205588 - DNA, 15 bp, Homo sapiens
agttacaaagaggca

SEQ ID NO: 1205589 - DNA, 15 bp, Homo sapiens
tagttacaaagaggc

SEQ ID NO: 1205590 - DNA, 15 bp, Homo sapiens
ctagttacaaagagg

SEQ ID NO: 1205591 - DNA, 15 bp, Homo sapiens
tctagttacaaagag

SEQ ID NO: 1205592 - DNA, 15 bp, Homo sapiens
gtctagttacaaaga

SEQ ID NO: 1205593 - DNA, 15 bp, Homo sapiens
ggtctagttacaaag

SEQ ID NO: 1205594 - DNA, 15 bp, Homo sapiens
gggtctagttacaaa

SEQ ID NO: 1205595 - DNA, 15 bp, Homo sapiens
agggtctagttacaa

SEQ ID NO: 1205596 - DNA, 15 bp, Homo sapiens
cagggtctagttaca

SEQ ID NO: 1205597 - DNA, 15 bp, Homo sapiens
ccagggtctagttac

SEQ ID NO: 1205598 - DNA, 15 bp, Homo sapiens
cccagggtctagtta

SEQ ID NO: 1205599 - DNA, 15 bp, Homo sapiens
gcccagggtctagtt

SEQ ID NO: 1205600 - DNA, 15 bp, Homo sapiens
cgcccagggtctagt

SEQ ID NO: 1205601 - DNA, 15 bp, Homo sapiens
ccgcccagggtctag

SEQ ID NO: 1205602 - DNA, 15 bp, Homo sapiens
cccgcccagggtcta

SEQ ID NO: 1205603 - DNA, 15 bp, Homo sapiens
ccccgcccagggtct

SEQ ID NO: 1205604 - DNA, 15 bp, Homo sapiens
tccccgcccagggtc

SEQ ID NO: 1205605 - DNA, 15 bp, Homo sapiens
ctccccgcccagggt

SEQ ID NO: 1205606 - DNA, 15 bp, Homo sapiens
gctccccgcccaggg

SEQ ID NO: 1205607 - DNA, 15 bp, Homo sapiens
agctccccgcccagg

SEQ ID NO: 1205608 - DNA, 15 bp, Homo sapiens
tagctccccgcccag

SEQ ID NO: 1205609 - DNA, 15 bp, Homo sapiens
ttagctccccgccca

SEQ ID NO: 1205610 - DNA, 15 bp, Homo sapiens
cttagctccccgccc

SEQ ID NO: 1205611 - DNA, 15 bp, Homo sapiens
ccttagctccccgcc

SEQ ID NO: 1205612 - DNA, 15 bp, Homo sapiens
accttagctccccgc

SEQ ID NO: 1205613 - DNA, 15 bp, Homo sapiens
aaccttagctccccg

SEQ ID NO: 1205614 - DNA, 15 bp, Homo sapiens
gaaccttagctcccc

SEQ ID NO: 1205615 - DNA, 15 bp, Homo sapiens
ggaaccttagctccc

SEQ ID NO: 1205616 - DNA, 15 bp, Homo sapiens
gggaaccttagctcc

SEQ ID NO: 1205617 - DNA, 15 bp, Homo sapiens
tgggaaccttagctc

SEQ ID NO: 1205618 - DNA, 15 bp, Homo sapiens
ttgggaaccttagct

SEQ ID NO: 1205619 - DNA, 15 bp, Homo sapiens
cttgggaaccttagc

SEQ ID NO: 1205620 - DNA, 15 bp, Homo sapiens
gcttgggaaccttag

SEQ ID NO: 1205621 - DNA, 15 bp, Homo sapiens
tgcttgggaacctta

SEQ ID NO: 1205622 - DNA, 15 bp, Homo sapiens
ctgcttgggaacctt

SEQ ID NO: 1205623 - DNA, 15 bp, Homo sapiens
tctgcttgggaacct

SEQ ID NO: 1205624 - DNA, 15 bp, Homo sapiens
ctctgcttgggaacc

SEQ ID NO: 1205625 - DNA, 15 bp, Homo sapiens
cctctgcttgggaac

SEQ ID NO: 1205626 - DNA, 15 bp, Homo sapiens
tcctctgcttgggaa

SEQ ID NO: 1205627 - DNA, 15 bp, Homo sapiens
ttcctctgcttggga

SEQ ID NO: 1205628 - DNA, 15 bp, Homo sapiens
tttcctctgcttggg

SEQ ID NO: 1205629 - DNA, 15 bp, Homo sapiens
gtttcctctgcttgg

SEQ ID NO: 1205630 - DNA, 15 bp, Homo sapiens
tgtttcctctgcttg

SEQ ID NO: 1205631 - DNA, 15 bp, Homo sapiens
atgtttcctctgctt

SEQ ID NO: 1205632 - DNA, 15 bp, Homo sapiens
gatgtttcctctgct

SEQ ID NO: 1205633 - DNA, 15 bp, Homo sapiens
tgatgtttcctctgc

SEQ ID NO: 1205634 - DNA, 15 bp, Homo sapiens
atgatgtttcctctg

SEQ ID NO: 1205635 - DNA, 15 bp, Homo sapiens
aatgatgtttcctct

SEQ ID NO: 1205636 - DNA, 15 bp, Homo sapiens
gaatgatgtttcctc

SEQ ID NO: 1205637 - DNA, 15 bp, Homo sapiens
tgaatgatgtttcct

SEQ ID NO: 1205638 - DNA, 15 bp, Homo sapiens
gtgaatgatgtttcc

SEQ ID NO: 1205639 - DNA, 15 bp, Homo sapiens
ggtgaatgatgtttc

SEQ ID NO: 1205640 - DNA, 15 bp, Homo sapiens
aggtgaatgatgttt

SEQ ID NO: 1205641 - DNA, 15 bp, Homo sapiens
gaggtgaatgatgtt

SEQ ID NO: 1205642 - DNA, 15 bp, Homo sapiens
agaggtgaatgatgt

SEQ ID NO: 1205643 - DNA, 15 bp, Homo sapiens
aagaggtgaatgatg

SEQ ID NO: 1205644 - DNA, 15 bp, Homo sapiens
aaagaggtgaatgat

SEQ ID NO: 1205645 - DNA, 15 bp, Homo sapiens
aaaagaggtgaatga

SEQ ID NO: 1205646 - DNA, 15 bp, Homo sapiens
taaaagaggtgaatg

SEQ ID NO: 1205647 - DNA, 15 bp, Homo sapiens
ttaaaagaggtgaat

SEQ ID NO: 1205648 - DNA, 15 bp, Homo sapiens
attaaaagaggtgaa

SEQ ID NO: 1205649 - DNA, 15 bp, Homo sapiens
gattaaaagaggtga

SEQ ID NO: 1205650 - DNA, 15 bp, Homo sapiens
agattaaaagaggtg

SEQ ID NO: 1205651 - DNA, 15 bp, Homo sapiens
gagattaaaagaggt

SEQ ID NO: 1205652 - DNA, 15 bp, Homo sapiens
tgagattaaaagagg

SEQ ID NO: 1205653 - DNA, 15 bp, Homo sapiens
ttgagattaaaagag

SEQ ID NO: 1205654 - DNA, 15 bp, Homo sapiens
attgagattaaaaga

SEQ ID NO: 1205655 - DNA, 15 bp, Homo sapiens
cattgagattaaaag

SEQ ID NO: 1205656 - DNA, 15 bp, Homo sapiens
acattgagattaaaa

SEQ ID NO: 1205657 - DNA, 15 bp, Homo sapiens
aacattgagattaaa

SEQ ID NO: 1205658 - DNA, 15 bp, Homo sapiens
aaacattgagattaa

SEQ ID NO: 1205659 - DNA, 15 bp, Homo sapiens
aaaacattgagatta

SEQ ID NO: 1205660 - DNA, 15 bp, Homo sapiens
caaaacattgagatt

SEQ ID NO: 1205661 - DNA, 15 bp, Homo sapiens
tcaaaacattgagat

SEQ ID NO: 1205662 - DNA, 15 bp, Homo sapiens
ttcaaaacattgaga

SEQ ID NO: 1205663 - DNA, 15 bp, Homo sapiens
tttcaaaacattgag

SEQ ID NO: 1205664 - DNA, 15 bp, Homo sapiens
ctttcaaaacattga

SEQ ID NO: 1205665 - DNA, 15 bp, Homo sapiens
gctttcaaaacattg

SEQ ID NO: 1205666 - DNA, 15 bp, Homo sapiens
tgctttcaaaacatt

SEQ ID NO: 1205667 - DNA, 15 bp, Homo sapiens
ttgctttcaaaacat

SEQ ID NO: 1205668 - DNA, 15 bp, Homo sapiens
tttgctttcaaaaca

SEQ ID NO: 1205669 - DNA, 15 bp, Homo sapiens
ctttgctttcaaaac

SEQ ID NO: 1205670 - DNA, 15 bp, Homo sapiens
gctttgctttcaaaa

SEQ ID NO: 1205671 - DNA, 15 bp, Homo sapiens
agctttgctttcaaa

SEQ ID NO: 1205672 - DNA, 15 bp, Homo sapiens
gagctttgctttcaa

SEQ ID NO: 1205673 - DNA, 15 bp, Homo sapiens
agagctttgctttca

SEQ ID NO: 1205674 - DNA, 15 bp, Homo sapiens
tagagctttgctttc

SEQ ID NO: 1205675 - DNA, 15 bp, Homo sapiens
ttagagctttgcttt

SEQ ID NO: 1205676 - DNA, 15 bp, Homo sapiens
cttagagctttgctt

SEQ ID NO: 1205677 - DNA, 15 bp, Homo sapiens
tcttagagctttgct

SEQ ID NO: 1205678 - DNA, 15 bp, Homo sapiens
ttcttagagctttgc

SEQ ID NO: 1205679 - DNA, 15 bp, Homo sapiens
cttcttagagctttg

SEQ ID NO: 1205680 - DNA, 15 bp, Homo sapiens
ccttcttagagcttt

SEQ ID NO: 1205681 - DNA, 15 bp, Homo sapiens
cccttcttagagctt

SEQ ID NO: 1205682 - DNA, 15 bp, Homo sapiens
gcccttcttagagct

SEQ ID NO: 1205683 - DNA, 15 bp, Homo sapiens
ggcccttcttagagc

SEQ ID NO: 1205684 - DNA, 15 bp, Homo sapiens
gggcccttcttagag

SEQ ID NO: 1205685 - DNA, 15 bp, Homo sapiens
tgggcccttcttaga

SEQ ID NO: 1205686 - DNA, 15 bp, Homo sapiens
ttgggcccttcttag

SEQ ID NO: 1205687 - DNA, 15 bp, Homo sapiens
attgggcccttctta

SEQ ID NO: 1205688 - DNA, 15 bp, Homo sapiens
aattgggcccttctt

SEQ ID NO: 1205689 - DNA, 15 bp, Homo sapiens
caattgggcccttct

SEQ ID NO: 1205690 - DNA, 15 bp, Homo sapiens
tcaattgggcccttc

SEQ ID NO: 1205691 - DNA, 15 bp, Homo sapiens
gtcaattgggccctt

SEQ ID NO: 1205692 - DNA, 15 bp, Homo sapiens
agtcaattgggccct

SEQ ID NO: 1205693 - DNA, 15 bp, Homo sapiens
cagtcaattgggccc

SEQ ID NO: 1205694 - DNA, 15 bp, Homo sapiens
tcagtcaattgggcc

SEQ ID NO: 1205695 - DNA, 15 bp, Homo sapiens
gtcagtcaattgggc

SEQ ID NO: 1205696 - DNA, 15 bp, Homo sapiens
tgtcagtcaattggg

SEQ ID NO: 1205697 - DNA, 15 bp, Homo sapiens
ctgtcagtcaattgg

SEQ ID NO: 1205698 - DNA, 15 bp, Homo sapiens
cctgtcagtcaattg

SEQ ID NO: 1205699 - DNA, 15 bp, Homo sapiens
tcctgtcagtcaatt

SEQ ID NO: 1205700 - DNA, 15 bp, Homo sapiens
atcctgtcagtcaat

SEQ ID NO: 1205701 - DNA, 15 bp, Homo sapiens
aatcctgtcagtcaa

SEQ ID NO: 1205702 - DNA, 15 bp, Homo sapiens
aaatcctgtcagtca

SEQ ID NO: 1205703 - DNA, 15 bp, Homo sapiens
gaaatcctgtcagtc

SEQ ID NO: 1205704 - DNA, 15 bp, Homo sapiens
ggaaatcctgtcagt

SEQ ID NO: 1205705 - DNA, 15 bp, Homo sapiens
gggaaatcctgtcag

SEQ ID NO: 1205706 - DNA, 15 bp, Homo sapiens
ggggaaatcctgtca

SEQ ID NO: 1205707 - DNA, 15 bp, Homo sapiens
aggggaaatcctgtc

SEQ ID NO: 1205708 - DNA, 15 bp, Homo sapiens
caggggaaatcctgt

SEQ ID NO: 1205709 - DNA, 15 bp, Homo sapiens
ccaggggaaatcctg

SEQ ID NO: 1205710 - DNA, 15 bp, Homo sapiens
gccaggggaaatcct

SEQ ID NO: 1205711 - DNA, 15 bp, Homo sapiens
tgccaggggaaatcc

SEQ ID NO: 1205712 - DNA, 15 bp, Homo sapiens
atgccaggggaaatc

SEQ ID NO: 1205713 - DNA, 15 bp, Homo sapiens
aatgccaggggaaat

SEQ ID NO: 1205714 - DNA, 15 bp, Homo sapiens
aaatgccaggggaaa

SEQ ID NO: 1205715 - DNA, 15 bp, Homo sapiens
aaaatgccaggggaa

SEQ ID NO: 1205716 - DNA, 15 bp, Homo sapiens
taaaatgccagggga

SEQ ID NO: 1205717 - DNA, 15 bp, Homo sapiens
ctaaaatgccagggg

SEQ ID NO: 1205718 - DNA, 15 bp, Homo sapiens
tctaaaatgccaggg

SEQ ID NO: 1205719 - DNA, 15 bp, Homo sapiens
ttctaaaatgccagg

SEQ ID NO: 1205720 - DNA, 15 bp, Homo sapiens
cttctaaaatgccag

SEQ ID NO: 1205721 - DNA, 15 bp, Homo sapiens
ccttctaaaatgcca

SEQ ID NO: 1205722 - DNA, 15 bp, Homo sapiens
cccttctaaaatgcc

SEQ ID NO: 1205723 - DNA, 15 bp, Homo sapiens
tcccttctaaaatgc

SEQ ID NO: 1205724 - DNA, 15 bp, Homo sapiens
gtcccttctaaaatg

SEQ ID NO: 1205725 - DNA, 15 bp, Homo sapiens
tgtcccttctaaaat

SEQ ID NO: 1205726 - DNA, 15 bp, Homo sapiens
ttgtcccttctaaaa

SEQ ID NO: 1205727 - DNA, 15 bp, Homo sapiens
cttgtcccttctaaa

SEQ ID NO: 1205728 - DNA, 15 bp, Homo sapiens
ccttgtcccttctaa

SEQ ID NO: 1205729 - DNA, 15 bp, Homo sapiens
cccttgtcccttcta

SEQ ID NO: 1205730 - DNA, 15 bp, Homo sapiens
ccccttgtcccttct

SEQ ID NO: 1205731 - DNA, 15 bp, Homo sapiens
cccccttgtcccttc

SEQ ID NO: 1205732 - DNA, 15 bp, Homo sapiens
gcccccttgtccctt

SEQ ID NO: 1205733 - DNA, 15 bp, Homo sapiens
agcccccttgtccct

SEQ ID NO: 1205734 - DNA, 15 bp, Homo sapiens
tagcccccttgtccc

SEQ ID NO: 1205735 - DNA, 15 bp, Homo sapiens
atagcccccttgtcc

SEQ ID NO: 1205736 - DNA, 15 bp, Homo sapiens
aatagcccccttgtc

SEQ ID NO: 1205737 - DNA, 15 bp, Homo sapiens
gaatagcccccttgt

SEQ ID NO: 1205738 - DNA, 15 bp, Homo sapiens
tgaatagcccccttg

SEQ ID NO: 1205739 - DNA, 15 bp, Homo sapiens
atgaatagccccctt

SEQ ID NO: 1205740 - DNA, 15 bp, Homo sapiens
gatgaatagccccct

SEQ ID NO: 1205741 - DNA, 15 bp, Homo sapiens
ggatgaatagccccc

SEQ ID NO: 1205742 - DNA, 15 bp, Homo sapiens
gggatgaatagcccc

SEQ ID NO: 1205743 - DNA, 15 bp, Homo sapiens
ggggatgaatagccc

SEQ ID NO: 1205744 - DNA, 15 bp, Homo sapiens
tggggatgaatagcc

SEQ ID NO: 1205745 - DNA, 15 bp, Homo sapiens
ctggggatgaatagc

SEQ ID NO: 1205746 - DNA, 15 bp, Homo sapiens
cctggggatgaatag

SEQ ID NO: 1205747 - DNA, 15 bp, Homo sapiens
gcctggggatgaata

SEQ ID NO: 1205748 - DNA, 15 bp, Homo sapiens
agcctggggatgaat

SEQ ID NO: 1205749 - DNA, 15 bp, Homo sapiens
tagcctggggatgaa

SEQ ID NO: 1205750 - DNA, 15 bp, Homo sapiens
ctagcctggggatga

SEQ ID NO: 1205751 - DNA, 15 bp, Homo sapiens
actagcctggggatg

SEQ ID NO: 1205752 - DNA, 15 bp, Homo sapiens
cactagcctggggat

SEQ ID NO: 1205753 - DNA, 15 bp, Homo sapiens
acactagcctgggga

SEQ ID NO: 1205754 - DNA, 15 bp, Homo sapiens
gacactagcctgggg

SEQ ID NO: 1205755 - DNA, 15 bp, Homo sapiens
agacactagcctggg

SEQ ID NO: 1205756 - DNA, 15 bp, Homo sapiens
tagacactagcctgg

SEQ ID NO: 1205757 - DNA, 15 bp, Homo sapiens
atagacactagcctg

SEQ ID NO: 1205758 - DNA, 15 bp, Homo sapiens
catagacactagcct

SEQ ID NO: 1205759 - DNA, 15 bp, Homo sapiens
tcatagacactagcc

SEQ ID NO: 1205760 - DNA, 15 bp, Homo sapiens
ctcatagacactagc

SEQ ID NO: 1205761 - DNA, 15 bp, Homo sapiens
actcatagacactag

SEQ ID NO: 1205762 - DNA, 15 bp, Homo sapiens
tactcatagacacta

SEQ ID NO: 1205763 - DNA, 15 bp, Homo sapiens
ttactcatagacact

SEQ ID NO: 1205764 - DNA, 15 bp, Homo sapiens
attactcatagacac

SEQ ID NO: 1205765 - DNA, 15 bp, Homo sapiens
aattactcatagaca

SEQ ID NO: 1205766 - DNA, 15 bp, Homo sapiens
gaattactcatagac

SEQ ID NO: 1205767 - DNA, 15 bp, Homo sapiens
ggaattactcataga

SEQ ID NO: 1205768 - DNA, 15 bp, Homo sapiens
aggaattactcatag

SEQ ID NO: 1205769 - DNA, 15 bp, Homo sapiens
gaggaattactcata

SEQ ID NO: 1205770 - DNA, 15 bp, Homo sapiens
ggaggaattactcat

SEQ ID NO: 1205771 - DNA, 15 bp, Homo sapiens
tggaggaattactca

SEQ ID NO: 1205772 - DNA, 15 bp, Homo sapiens
ctggaggaattactc

SEQ ID NO: 1205773 - DNA, 15 bp, Homo sapiens
cctggaggaattact

SEQ ID NO: 1205774 - DNA, 15 bp, Homo sapiens
acctggaggaattac

SEQ ID NO: 1205775 - DNA, 15 bp, Homo sapiens
tacctggaggaatta

SEQ ID NO: 1205776 - DNA, 15 bp, Homo sapiens
ttacctggaggaatt

SEQ ID NO: 1205777 - DNA, 15 bp, Homo sapiens
attacctggaggaat

SEQ ID NO: 1205778 - DNA, 15 bp, Homo sapiens
aattacctggaggaa

SEQ ID NO: 1205779 - DNA, 15 bp, Homo sapiens
aaattacctggagga

SEQ ID NO: 1205780 - DNA, 15 bp, Homo sapiens
taaattacctggagg

SEQ ID NO: 1205781 - DNA, 15 bp, Homo sapiens
ataaattacctggag

SEQ ID NO: 1205782 - DNA, 15 bp, Homo sapiens
aataaattacctgga

SEQ ID NO: 1205783 - DNA, 15 bp, Homo sapiens
aaataaattacctgg

SEQ ID NO: 1205784 - DNA, 15 bp, Homo sapiens
gaaataaattacctg

SEQ ID NO: 1205785 - DNA, 15 bp, Homo sapiens
agaaataaattacct

SEQ ID NO: 1205786 - DNA, 15 bp, Homo sapiens
gagaaataaattacc

SEQ ID NO: 1205787 - DNA, 15 bp, Homo sapiens
ggagaaataaattac

SEQ ID NO: 1205788 - DNA, 15 bp, Homo sapiens
tggagaaataaatta

SEQ ID NO: 1205789 - DNA, 15 bp, Homo sapiens
ttggagaaataaatt

SEQ ID NO: 1205790 - DNA, 15 bp, Homo sapiens
gttggagaaataaat

SEQ ID NO: 1205791 - DNA, 15 bp, Homo sapiens
agttggagaaataaa

SEQ ID NO: 1205792 - DNA, 15 bp, Homo sapiens
cagttggagaaataa

SEQ ID NO: 1205793 - DNA, 15 bp, Homo sapiens
tcagttggagaaata

SEQ ID NO: 1205794 - DNA, 15 bp, Homo sapiens
ttcagttggagaaat

SEQ ID NO: 1205795 - DNA, 15 bp, Homo sapiens
tttcagttggagaaa

SEQ ID NO: 1205796 - DNA, 15 bp, Homo sapiens
atttcagttggagaa

SEQ ID NO: 1205797 - DNA, 15 bp, Homo sapiens
catttcagttggaga

SEQ ID NO: 1205798 - DNA, 15 bp, Homo sapiens
tcatttcagttggag

SEQ ID NO: 1205799 - DNA, 15 bp, Homo sapiens
atcatttcagttgga

SEQ ID NO: 1205800 - DNA, 15 bp, Homo sapiens
catcatttcagttgg

SEQ ID NO: 1205801 - DNA, 15 bp, Homo sapiens
gcatcatttcagttg

SEQ ID NO: 1205802 - DNA, 15 bp, Homo sapiens
ggcatcatttcagtt

SEQ ID NO: 1205803 - DNA, 15 bp, Homo sapiens
gggcatcatttcagt

SEQ ID NO: 1205804 - DNA, 15 bp, Homo sapiens
agggcatcatttcag

SEQ ID NO: 1205805 - DNA, 15 bp, Homo sapiens
gagggcatcatttca

SEQ ID NO: 1205806 - DNA, 15 bp, Homo sapiens
tgagggcatcatttc

SEQ ID NO: 1205807 - DNA, 15 bp, Homo sapiens
gtgagggcatcattt

SEQ ID NO: 1205808 - DNA, 15 bp, Homo sapiens
agtgagggcatcatt

SEQ ID NO: 1205809 - DNA, 15 bp, Homo sapiens
tagtgagggcatcat

SEQ ID NO: 1205810 - DNA, 15 bp, Homo sapiens
gtagtgagggcatca

SEQ ID NO: 1205811 - DNA, 15 bp, Homo sapiens
agtagtgagggcatc

SEQ ID NO: 1205812 - DNA, 15 bp, Homo sapiens
tagtagtgagggcat

SEQ ID NO: 1205813 - DNA, 15 bp, Homo sapiens
ttagtagtgagggca

SEQ ID NO: 1205814 - DNA, 15 bp, Homo sapiens
attagtagtgagggc

SEQ ID NO: 1205815 - DNA, 15 bp, Homo sapiens
cattagtagtgaggg

SEQ ID NO: 1205816 - DNA, 15 bp, Homo sapiens
ccattagtagtgagg

SEQ ID NO: 1205817 - DNA, 15 bp, Homo sapiens
accattagtagtgag

SEQ ID NO: 1205818 - DNA, 15 bp, Homo sapiens
aaccattagtagtga

SEQ ID NO: 1205819 - DNA, 15 bp, Homo sapiens
aaaccattagtagtg

SEQ ID NO: 1205820 - DNA, 15 bp, Homo sapiens
gaaaccattagtagt

SEQ ID NO: 1205821 - DNA, 15 bp, Homo sapiens
ggaaaccattagtag

SEQ ID NO: 1205822 - DNA, 15 bp, Homo sapiens
gggaaaccattagta

SEQ ID NO: 1205823 - DNA, 15 bp, Homo sapiens
ggggaaaccattagt

SEQ ID NO: 1205824 - DNA, 15 bp, Homo sapiens
aggggaaaccattag

SEQ ID NO: 1205825 - DNA, 15 bp, Homo sapiens
caggggaaaccatta

SEQ ID NO: 1205826 - DNA, 15 bp, Homo sapiens
acaggggaaaccatt

SEQ ID NO: 1205827 - DNA, 15 bp, Homo sapiens
aacaggggaaaccat

SEQ ID NO: 1205828 - DNA, 15 bp, Homo sapiens
gaacaggggaaacca

SEQ ID NO: 1205829 - DNA, 15 bp, Homo sapiens
agaacaggggaaacc

SEQ ID NO: 1205830 - DNA, 15 bp, Homo sapiens
cagaacaggggaaac

SEQ ID NO: 1205831 - DNA, 15 bp, Homo sapiens
acagaacaggggaaa

SEQ ID NO: 1205832 - DNA, 15 bp, Homo sapiens
gacagaacaggggaa

SEQ ID NO: 1205833 - DNA, 15 bp, Homo sapiens
tgacagaacagggga

SEQ ID NO: 1205834 - DNA, 15 bp, Homo sapiens
gtgacagaacagggg

SEQ ID NO: 1205835 - DNA, 15 bp, Homo sapiens
ggtgacagaacaggg

SEQ ID NO: 1205836 - DNA, 15 bp, Homo sapiens
tggtgacagaacagg

SEQ ID NO: 1205837 - DNA, 15 bp, Homo sapiens
ttggtgacagaacag

SEQ ID NO: 1205838 - DNA, 15 bp, Homo sapiens
attggtgacagaaca

SEQ ID NO: 1205839 - DNA, 15 bp, Homo sapiens
tattggtgacagaac

SEQ ID NO: 1205840 - DNA, 15 bp, Homo sapiens
atattggtgacagaa

SEQ ID NO: 1205841 - DNA, 15 bp, Homo sapiens
aatattggtgacaga

SEQ ID NO: 1205842 - DNA, 15 bp, Homo sapiens
caatattggtgacag

SEQ ID NO: 1205843 - DNA, 15 bp, Homo sapiens
ccaatattggtgaca

SEQ ID NO: 1205844 - DNA, 15 bp, Homo sapiens
tccaatattggtgac

SEQ ID NO: 1205845 - DNA, 15 bp, Homo sapiens
ttccaatattggtga

SEQ ID NO: 1205846 - DNA, 15 bp, Homo sapiens
tttccaatattggtg

SEQ ID NO: 1205847 - DNA, 15 bp, Homo sapiens
ttttccaatattggt

SEQ ID NO: 1205848 - DNA, 15 bp, Homo sapiens
attttccaatattgg

SEQ ID NO: 1205849 - DNA, 15 bp, Homo sapiens
gattttccaatattg

SEQ ID NO: 1205850 - DNA, 15 bp, Homo sapiens
tgattttccaatatt

SEQ ID NO: 1205851 - DNA, 15 bp, Homo sapiens
ctgattttccaatat

SEQ ID NO: 1205852 - DNA, 15 bp, Homo sapiens
actgattttccaata

SEQ ID NO: 1205853 - DNA, 15 bp, Homo sapiens
aactgattttccaat

SEQ ID NO: 1205854 - DNA, 15 bp, Homo sapiens
caactgattttccaa

SEQ ID NO: 1205855 - DNA, 15 bp, Homo sapiens
ccaactgattttcca

SEQ ID NO: 1205856 - DNA, 15 bp, Homo sapiens
accaactgattttcc

SEQ ID NO: 1205857 - DNA, 15 bp, Homo sapiens
caccaactgattttc

SEQ ID NO: 1205858 - DNA, 15 bp, Homo sapiens
acaccaactgatttt

SEQ ID NO: 1205859 - DNA, 15 bp, Homo sapiens
gacaccaactgattt

SEQ ID NO: 1205860 - DNA, 15 bp, Homo sapiens
agacaccaactgatt

SEQ ID NO: 1205861 - DNA, 15 bp, Homo sapiens
tagacaccaactgat

SEQ ID NO: 1205862 - DNA, 15 bp, Homo sapiens
atagacaccaactga

SEQ ID NO: 1205863 - DNA, 15 bp, Homo sapiens
aatagacaccaactg

SEQ ID NO: 1205864 - DNA, 15 bp, Homo sapiens
aaatagacaccaact

SEQ ID NO: 1205865 - DNA, 15 bp, Homo sapiens
caaatagacaccaac

SEQ ID NO: 1205866 - DNA, 15 bp, Homo sapiens
acaaatagacaccaa

SEQ ID NO: 1205867 - DNA, 15 bp, Homo sapiens
tacaaatagacacca

SEQ ID NO: 1205868 - DNA, 15 bp, Homo sapiens
ctacaaatagacacc

SEQ ID NO: 1205869 - DNA, 15 bp, Homo sapiens
cctacaaatagacac

SEQ ID NO: 1205870 - DNA, 15 bp, Homo sapiens
tcctacaaatagaca

SEQ ID NO: 1205871 - DNA, 15 bp, Homo sapiens
gtcctacaaatagac

SEQ ID NO: 1205872 - DNA, 15 bp, Homo sapiens
tgtcctacaaataga

SEQ ID NO: 1205873 - DNA, 15 bp, Homo sapiens
ttgtcctacaaatag

SEQ ID NO: 1205874 - DNA, 15 bp, Homo sapiens
cttgtcctacaaata

SEQ ID NO: 1205875 - DNA, 15 bp, Homo sapiens
ccttgtcctacaaat

SEQ ID NO: 1205876 - DNA, 15 bp, Homo sapiens
gccttgtcctacaaa

SEQ ID NO: 1205877 - DNA, 15 bp, Homo sapiens
agccttgtcctacaa

SEQ ID NO: 1205878 - DNA, 15 bp, Homo sapiens
tagccttgtcctaca

SEQ ID NO: 1205879 - DNA, 15 bp, Homo sapiens
atagccttgtcctac

SEQ ID NO: 1205880 - DNA, 15 bp, Homo sapiens
catagccttgtccta

SEQ ID NO: 1205881 - DNA, 15 bp, Homo sapiens
acatagccttgtcct

SEQ ID NO: 1205882 - DNA, 15 bp, Homo sapiens
cacatagccttgtcc

SEQ ID NO: 1205883 - DNA, 15 bp, Homo sapiens
tcacatagccttgtc

SEQ ID NO: 1205884 - DNA, 15 bp, Homo sapiens
ttcacatagccttgt

SEQ ID NO: 1205885 - DNA, 15 bp, Homo sapiens
cttcacatagccttg

SEQ ID NO: 1205886 - DNA, 15 bp, Homo sapiens
ccttcacatagcctt

SEQ ID NO: 1205887 - DNA, 15 bp, Homo sapiens
cccttcacatagcct

SEQ ID NO: 1205888 - DNA, 15 bp, Homo sapiens
acccttcacatagcc

SEQ ID NO: 1205889 - DNA, 15 bp, Homo sapiens
aacccttcacatagc

SEQ ID NO: 1205890 - DNA, 15 bp, Homo sapiens
aaacccttcacatag

SEQ ID NO: 1205891 - DNA, 15 bp, Homo sapiens
caaacccttcacata

SEQ ID NO: 1205892 - DNA, 15 bp, Homo sapiens
ccaaacccttcacat

SEQ ID NO: 1205893 - DNA, 15 bp, Homo sapiens
accaaacccttcaca

SEQ ID NO: 1205894 - DNA, 15 bp, Homo sapiens
gaccaaacccttcac

SEQ ID NO: 1205895 - DNA, 15 bp, Homo sapiens
ggaccaaacccttca

SEQ ID NO: 1205896 - DNA, 15 bp, Homo sapiens
gggaccaaacccttc

SEQ ID NO: 1205897 - DNA, 15 bp, Homo sapiens
tgggaccaaaccctt

SEQ ID NO: 1205898 - DNA, 15 bp, Homo sapiens
ctgggaccaaaccct

SEQ ID NO: 1205899 - DNA, 15 bp, Homo sapiens
actgggaccaaaccc

SEQ ID NO: 1205900 - DNA, 15 bp, Homo sapiens
tactgggaccaaacc

SEQ ID NO: 1205901 - DNA, 15 bp, Homo sapiens
ctactgggaccaaac

SEQ ID NO: 1205902 - DNA, 15 bp, Homo sapiens
gctactgggaccaaa

SEQ ID NO: 1205903 - DNA, 15 bp, Homo sapiens
agctactgggaccaa

SEQ ID NO: 1205904 - DNA, 15 bp, Homo sapiens
aagctactgggacca

SEQ ID NO: 1205905 - DNA, 15 bp, Homo sapiens
gaagctactgggacc

SEQ ID NO: 1205906 - DNA, 15 bp, Homo sapiens
ggaagctactgggac

SEQ ID NO: 1205907 - DNA, 15 bp, Homo sapiens
gggaagctactggga

SEQ ID NO: 1205908 - DNA, 15 bp, Homo sapiens
agggaagctactggg

SEQ ID NO: 1205909 - DNA, 15 bp, Homo sapiens
gagggaagctactgg

SEQ ID NO: 1205910 - DNA, 15 bp, Homo sapiens
ggagggaagctactg

SEQ ID NO: 1205911 - DNA, 15 bp, Homo sapiens
aggagggaagctact

SEQ ID NO: 1205912 - DNA, 15 bp, Homo sapiens
gaggagggaagctac

SEQ ID NO: 1205913 - DNA, 15 bp, Homo sapiens
tgaggagggaagcta

SEQ ID NO: 1205914 - DNA, 15 bp, Homo sapiens
ctgaggagggaagct

SEQ ID NO: 1205915 - DNA, 15 bp, Homo sapiens
tctgaggagggaagc

SEQ ID NO: 1205916 - DNA, 15 bp, Homo sapiens
atctgaggagggaag

SEQ ID NO: 1205917 - DNA, 15 bp, Homo sapiens
catctgaggagggaa

SEQ ID NO: 1205918 - DNA, 15 bp, Homo sapiens
gcatctgaggaggga

SEQ ID NO: 1205919 - DNA, 15 bp, Homo sapiens
agcatctgaggaggg

SEQ ID NO: 1205920 - DNA, 15 bp, Homo sapiens
aagcatctgaggagg

SEQ ID NO: 1205921 - DNA, 15 bp, Homo sapiens
taagcatctgaggag

SEQ ID NO: 1205922 - DNA, 15 bp, Homo sapiens
ctaagcatctgagga

SEQ ID NO: 1205923 - DNA, 15 bp, Homo sapiens
tctaagcatctgagg

SEQ ID NO: 1205924 - DNA, 15 bp, Homo sapiens
ttctaagcatctgag

SEQ ID NO: 1205925 - DNA, 15 bp, Homo sapiens
cttctaagcatctga

SEQ ID NO: 1205926 - DNA, 15 bp, Homo sapiens
acttctaagcatctg

SEQ ID NO: 1205927 - DNA, 15 bp, Homo sapiens
cacttctaagcatct

SEQ ID NO: 1205928 - DNA, 15 bp, Homo sapiens
acacttctaagcatc

SEQ ID NO: 1205929 - DNA, 15 bp, Homo sapiens
aacacttctaagcat

SEQ ID NO: 1205930 - DNA, 15 bp, Homo sapiens
gaacacttctaagca

SEQ ID NO: 1205931 - DNA, 15 bp, Homo sapiens
ggaacacttctaagc

SEQ ID NO: 1205932 - DNA, 15 bp, Homo sapiens
aggaacacttctaag

SEQ ID NO: 1205933 - DNA, 15 bp, Homo sapiens
gaggaacacttctaa

SEQ ID NO: 1205934 - DNA, 15 bp, Homo sapiens
cgaggaacacttcta

SEQ ID NO: 1205935 - DNA, 15 bp, Homo sapiens
ccgaggaacacttct

SEQ ID NO: 1205936 - DNA, 15 bp, Homo sapiens
accgaggaacacttc

SEQ ID NO: 1205937 - DNA, 15 bp, Homo sapiens
caccgaggaacactt

SEQ ID NO: 1205938 - DNA, 15 bp, Homo sapiens
ccaccgaggaacact

SEQ ID NO: 1205939 - DNA, 15 bp, Homo sapiens
gccaccgaggaacac

SEQ ID NO: 1205940 - DNA, 15 bp, Homo sapiens
agccaccgaggaaca

SEQ ID NO: 1205941 - DNA, 15 bp, Homo sapiens
cagccaccgaggaac

SEQ ID NO: 1205942 - DNA, 15 bp, Homo sapiens
acagccaccgaggaa

SEQ ID NO: 1205943 - DNA, 15 bp, Homo sapiens
cacagccaccgagga

SEQ ID NO: 1205944 - DNA, 15 bp, Homo sapiens
tcacagccaccgagg

SEQ ID NO: 1205945 - DNA, 15 bp, Homo sapiens
gtcacagccaccgag

SEQ ID NO: 1205946 - DNA, 15 bp, Homo sapiens
agtcacagccaccga

SEQ ID NO: 1205947 - DNA, 15 bp, Homo sapiens
cagtcacagccaccg

SEQ ID NO: 1205948 - DNA, 15 bp, Homo sapiens
tcagtcacagccacc

SEQ ID NO: 1205949 - DNA, 15 bp, Homo sapiens
gtcagtcacagccac

SEQ ID NO: 1205950 - DNA, 15 bp, Homo sapiens
cgtcagtcacagcca

SEQ ID NO: 1205951 - DNA, 15 bp, Homo sapiens
ccgtcagtcacagcc

SEQ ID NO: 1205952 - DNA, 15 bp, Homo sapiens
cccgtcagtcacagc

SEQ ID NO: 1205953 - DNA, 15 bp, Homo sapiens
ccccgtcagtcacag

SEQ ID NO: 1205954 - DNA, 15 bp, Homo sapiens
tccccgtcagtcaca

SEQ ID NO: 1205955 - DNA, 15 bp, Homo sapiens
ctccccgtcagtcac

SEQ ID NO: 1205956 - DNA, 15 bp, Homo sapiens
cctccccgtcagtca

SEQ ID NO: 1205957 - DNA, 15 bp, Homo sapiens
tcctccccgtcagtc

SEQ ID NO: 1205958 - DNA, 15 bp, Homo sapiens
ttcctccccgtcagt

SEQ ID NO: 1205959 - DNA, 15 bp, Homo sapiens
gttcctccccgtcag

SEQ ID NO: 1205960 - DNA, 15 bp, Homo sapiens
tgttcctccccgtca

SEQ ID NO: 1205961 - DNA, 15 bp, Homo sapiens
ctgttcctccccgtc

SEQ ID NO: 1205962 - DNA, 15 bp, Homo sapiens
cctgttcctccccgt

SEQ ID NO: 1205963 - DNA, 15 bp, Homo sapiens
tcctgttcctccccg

SEQ ID NO: 1205964 - DNA, 15 bp, Homo sapiens
ctcctgttcctcccc

SEQ ID NO: 1205965 - DNA, 15 bp, Homo sapiens
tctcctgttcctccc

SEQ ID NO: 1205966 - DNA, 15 bp, Homo sapiens
ctctcctgttcctcc

SEQ ID NO: 1205967 - DNA, 15 bp, Homo sapiens
tctctcctgttcctc

SEQ ID NO: 1205968 - DNA, 15 bp, Homo sapiens
ctctctcctgttcct

SEQ ID NO: 1205969 - DNA, 15 bp, Homo sapiens
tctctctcctgttcc

SEQ ID NO: 1205970 - DNA, 15 bp, Homo sapiens
ctctctctcctgttc

SEQ ID NO: 1205971 - DNA, 15 bp, Homo sapiens
cctctctctcctgtt

SEQ ID NO: 1205972 - DNA, 15 bp, Homo sapiens
gcctctctctcctgt

SEQ ID NO: 1205973 - DNA, 15 bp, Homo sapiens
tgcctctctctcctg

SEQ ID NO: 1205974 - DNA, 15 bp, Homo sapiens
ctgcctctctctcct

SEQ ID NO: 1205975 - DNA, 15 bp, Homo sapiens
tctgcctctctctcc

SEQ ID NO: 1205976 - DNA, 15 bp, Homo sapiens
ttctgcctctctctc

SEQ ID NO: 1205977 - DNA, 15 bp, Homo sapiens
tttctgcctctctct

SEQ ID NO: 1205978 - DNA, 15 bp, Homo sapiens
ttttctgcctctctc

SEQ ID NO: 1205979 - DNA, 15 bp, Homo sapiens
cttttctgcctctct

SEQ ID NO: 1205980 - DNA, 15 bp, Homo sapiens
ccttttctgcctctc

SEQ ID NO: 1205981 - DNA, 15 bp, Homo sapiens
tccttttctgcctct

SEQ ID NO: 1205982 - DNA, 15 bp, Homo sapiens
gtccttttctgcctc

SEQ ID NO: 1205983 - DNA, 15 bp, Homo sapiens
tgtccttttctgcct

SEQ ID NO: 1205984 - DNA, 15 bp, Homo sapiens
ctgtccttttctgcc

SEQ ID NO: 1205985 - DNA, 15 bp, Homo sapiens
cctgtccttttctgc

SEQ ID NO: 1205986 - DNA, 15 bp, Homo sapiens
gcctgtccttttctg

SEQ ID NO: 1205987 - DNA, 15 bp, Homo sapiens
agcctgtccttttct

SEQ ID NO: 1205988 - DNA, 15 bp, Homo sapiens
cagcctgtccttttc

SEQ ID NO: 1205989 - DNA, 15 bp, Homo sapiens
tcagcctgtcctttt

SEQ ID NO: 1205990 - DNA, 15 bp, Homo sapiens
ttcagcctgtccttt

SEQ ID NO: 1205991 - DNA, 15 bp, Homo sapiens
cttcagcctgtcctt

SEQ ID NO: 1205992 - DNA, 15 bp, Homo sapiens
tcttcagcctgtcct

SEQ ID NO: 1205993 - DNA, 15 bp, Homo sapiens
ttcttcagcctgtcc

SEQ ID NO: 1205994 - DNA, 15 bp, Homo sapiens
attcttcagcctgtc

SEQ ID NO: 1205995 - DNA, 15 bp, Homo sapiens
cattcttcagcctgt

SEQ ID NO: 1205996 - DNA, 15 bp, Homo sapiens
gcattcttcagcctg

SEQ ID NO: 1205997 - DNA, 15 bp, Homo sapiens
ggcattcttcagcct

SEQ ID NO: 1205998 - DNA, 15 bp, Homo sapiens
aggcattcttcagcc

SEQ ID NO: 1205999 - DNA, 15 bp, Homo sapiens
gaggcattcttcagc

SEQ ID NO: 1206000 - DNA, 15 bp, Homo sapiens
cgaggcattcttcag

SEQ ID NO: 1206001 - DNA, 15 bp, Homo sapiens
gcgaggcattcttca

SEQ ID NO: 1206002 - DNA, 15 bp, Homo sapiens
agcgaggcattcttc

SEQ ID NO: 1206003 - DNA, 15 bp, Homo sapiens
gagcgaggcattctt

SEQ ID NO: 1206004 - DNA, 15 bp, Homo sapiens
tgagcgaggcattct

SEQ ID NO: 1206005 - DNA, 15 bp, Homo sapiens
ctgagcgaggcattc

SEQ ID NO: 1206006 - DNA, 15 bp, Homo sapiens
gctgagcgaggcatt

SEQ ID NO: 1206007 - DNA, 15 bp, Homo sapiens
tgctgagcgaggcat

SEQ ID NO: 1206008 - DNA, 15 bp, Homo sapiens
gtgctgagcgaggca

SEQ ID NO: 1206009 - DNA, 15 bp, Homo sapiens
agtgctgagcgaggc

SEQ ID NO: 1206010 - DNA, 15 bp, Homo sapiens
cagtgctgagcgagg

SEQ ID NO: 1206011 - DNA, 15 bp, Homo sapiens
gcagtgctgagcgag

SEQ ID NO: 1206012 - DNA, 15 bp, Homo sapiens
tgcagtgctgagcga

SEQ ID NO: 1206013 - DNA, 15 bp, Homo sapiens
ctgcagtgctgagcg

SEQ ID NO: 1206014 - DNA, 15 bp, Homo sapiens
cctgcagtgctgagc

SEQ ID NO: 1206015 - DNA, 15 bp, Homo sapiens
tcctgcagtgctgag

SEQ ID NO: 1206016 - DNA, 15 bp, Homo sapiens
ctcctgcagtgctga

SEQ ID NO: 1206017 - DNA, 15 bp, Homo sapiens
tctcctgcagtgctg

SEQ ID NO: 1206018 - DNA, 15 bp, Homo sapiens
atctcctgcagtgct

SEQ ID NO: 1206019 - DNA, 15 bp, Homo sapiens
tatctcctgcagtgc

SEQ ID NO: 1206020 - DNA, 15 bp, Homo sapiens
gtatctcctgcagtg

SEQ ID NO: 1206021 - DNA, 15 bp, Homo sapiens
agtatctcctgcagt

SEQ ID NO: 1206022 - DNA, 15 bp, Homo sapiens
cagtatctcctgcag

SEQ ID NO: 1206023 - DNA, 15 bp, Homo sapiens
acagtatctcctgca

SEQ ID NO: 1206024 - DNA, 15 bp, Homo sapiens
tacagtatctcctgc

SEQ ID NO: 1206025 - DNA, 15 bp, Homo sapiens
ctacagtatctcctg

SEQ ID NO: 1206026 - DNA, 15 bp, Homo sapiens
tctacagtatctcct

SEQ ID NO: 1206027 - DNA, 15 bp, Homo sapiens
ctctacagtatctcc

SEQ ID NO: 1206028 - DNA, 15 bp, Homo sapiens
actctacagtatctc

SEQ ID NO: 1206029 - DNA, 15 bp, Homo sapiens
aactctacagtatct

SEQ ID NO: 1206030 - DNA, 15 bp, Homo sapiens
gaactctacagtatc

SEQ ID NO: 1206031 - DNA, 15 bp, Homo sapiens
agaactctacagtat

SEQ ID NO: 1206032 - DNA, 15 bp, Homo sapiens
cagaactctacagta

SEQ ID NO: 1206033 - DNA, 15 bp, Homo sapiens
ccagaactctacagt

SEQ ID NO: 1206034 - DNA, 15 bp, Homo sapiens
cccagaactctacag

SEQ ID NO: 1206035 - DNA, 15 bp, Homo sapiens
ccccagaactctaca

SEQ ID NO: 1206036 - DNA, 15 bp, Homo sapiens
gagtgagtgtttcac

SEQ ID NO: 1206037 - DNA, 15 bp, Homo sapiens
ggagtgagtgtttca

SEQ ID NO: 1206038 - DNA, 15 bp, Homo sapiens
gggagtgagtgtttc

SEQ ID NO: 1206039 - DNA, 15 bp, Homo sapiens
ggggagtgagtgttt

SEQ ID NO: 1206040 - DNA, 15 bp, Homo sapiens
tggggagtgagtgtt

SEQ ID NO: 1206041 - DNA, 15 bp, Homo sapiens
atggggagtgagtgt

SEQ ID NO: 1206042 - DNA, 15 bp, Homo sapiens
aatggggagtgagtg

SEQ ID NO: 1206043 - DNA, 15 bp, Homo sapiens
gaatggggagtgagt

SEQ ID NO: 1206044 - DNA, 15 bp, Homo sapiens
ggaatggggagtgag

SEQ ID NO: 1206045 - DNA, 15 bp, Homo sapiens
tggaatggggagtga

SEQ ID NO: 1206046 - DNA, 15 bp, Homo sapiens
gtggaatggggagtg

SEQ ID NO: 1206047 - DNA, 15 bp, Homo sapiens
ggtggaatggggagt

SEQ ID NO: 1206048 - DNA, 15 bp, Homo sapiens
aggtggaatggggag

SEQ ID NO: 1206049 - DNA, 15 bp, Homo sapiens
gaggtggaatgggga

SEQ ID NO: 1206050 - DNA, 15 bp, Homo sapiens
ggaggtggaatgggg

SEQ ID NO: 1206051 - DNA, 15 bp, Homo sapiens
gggaggtggaatggg

SEQ ID NO: 1206052 - DNA, 15 bp, Homo sapiens
ggggaggtggaatgg

SEQ ID NO: 1206053 - DNA, 15 bp, Homo sapiens
tggggaggtggaatg

SEQ ID NO: 1206054 - DNA, 15 bp, Homo sapiens
ctggggaggtggaat

SEQ ID NO: 1206055 - DNA, 15 bp, Homo sapiens
gctggggaggtggaa

SEQ ID NO: 1206056 - DNA, 15 bp, Homo sapiens
ggctggggaggtgga

SEQ ID NO: 1206057 - DNA, 15 bp, Homo sapiens
gggctggggaggtgg

SEQ ID NO: 1206058 - DNA, 15 bp, Homo sapiens
ggggctggggaggtg

SEQ ID NO: 1206059 - DNA, 15 bp, Homo sapiens
aggggctggggaggt

SEQ ID NO: 1206060 - DNA, 15 bp, Homo sapiens
caggggctggggagg

SEQ ID NO: 1206061 - DNA, 15 bp, Homo sapiens
ccaggggctggggag

SEQ ID NO: 1206062 - DNA, 15 bp, Homo sapiens
gccaggggctgggga

SEQ ID NO: 1206063 - DNA, 15 bp, Homo sapiens
tgccaggggctgggg

SEQ ID NO: 1206064 - DNA, 15 bp, Homo sapiens
gtgccaggggctggg

SEQ ID NO: 1206065 - DNA, 15 bp, Homo sapiens
ggtgccaggggctgg

SEQ ID NO: 1206066 - DNA, 15 bp, Homo sapiens
gggtgccaggggctg

SEQ ID NO: 1206067 - DNA, 15 bp, Homo sapiens
ggggtgccaggggct

SEQ ID NO: 1206068 - DNA, 15 bp, Homo sapiens
gggggtgccaggggc

SEQ ID NO: 1206069 - DNA, 15 bp, Homo sapiens
ggggggtgccagggg

SEQ ID NO: 1206070 - DNA, 15 bp, Homo sapiens
tggggggtgccaggg

SEQ ID NO: 1206071 - DNA, 15 bp, Homo sapiens
atggggggtgccagg

SEQ ID NO: 1206072 - DNA, 15 bp, Homo sapiens
aatggggggtgccag

SEQ ID NO: 1206073 - DNA, 15 bp, Homo sapiens
aaatggggggtgcca

SEQ ID NO: 1206074 - DNA, 15 bp, Homo sapiens
aaaatggggggtgcc

SEQ ID NO: 1206075 - DNA, 15 bp, Homo sapiens
taaaatggggggtgc

SEQ ID NO: 1206076 - DNA, 15 bp, Homo sapiens
ataaaatggggggtg

SEQ ID NO: 1206077 - DNA, 15 bp, Homo sapiens
aataaaatggggggt

SEQ ID NO: 1206078 - DNA, 15 bp, Homo sapiens
gaataaaatgggggg

SEQ ID NO: 1206079 - DNA, 15 bp, Homo sapiens
agaataaaatggggg

SEQ ID NO: 1206080 - DNA, 15 bp, Homo sapiens
cagaataaaatgggg

SEQ ID NO: 1206081 - DNA, 15 bp, Homo sapiens
ccagaataaaatggg

SEQ ID NO: 1206082 - DNA, 15 bp, Homo sapiens
accagaataaaatgg

SEQ ID NO: 1206083 - DNA, 15 bp, Homo sapiens
caccagaataaaatg

SEQ ID NO: 1206084 - DNA, 15 bp, Homo sapiens
gcaccagaataaaat

SEQ ID NO: 1206085 - DNA, 15 bp, Homo sapiens
agcaccagaataaaa

SEQ ID NO: 1206086 - DNA, 15 bp, Homo sapiens
tagcaccagaataaa

SEQ ID NO: 1206087 - DNA, 15 bp, Homo sapiens
ctagcaccagaataa

SEQ ID NO: 1206088 - DNA, 15 bp, Homo sapiens
cctagcaccagaata

SEQ ID NO: 1206089 - DNA, 15 bp, Homo sapiens
ccctagcaccagaat

SEQ ID NO: 1206090 - DNA, 15 bp, Homo sapiens
cccctagcaccagaa

SEQ ID NO: 1206091 - DNA, 15 bp, Homo sapiens
tcccctagcaccaga

SEQ ID NO: 1206092 - DNA, 15 bp, Homo sapiens
ttcccctagcaccag

SEQ ID NO: 1206093 - DNA, 15 bp, Homo sapiens
attcccctagcacca

SEQ ID NO: 1206094 - DNA, 15 bp, Homo sapiens
aattcccctagcacc

SEQ ID NO: 1206095 - DNA, 15 bp, Homo sapiens
aaattcccctagcac

SEQ ID NO: 1206096 - DNA, 15 bp, Homo sapiens
gaaattcccctagca

SEQ ID NO: 1206097 - DNA, 15 bp, Homo sapiens
tgaaattcccctagc

SEQ ID NO: 1206098 - DNA, 15 bp, Homo sapiens
ttgaaattcccctag

SEQ ID NO: 1206099 - DNA, 15 bp, Homo sapiens
tttgaaattccccta

SEQ ID NO: 1206100 - DNA, 15 bp, Homo sapiens
gtttgaaattcccct

SEQ ID NO: 1206101 - DNA, 15 bp, Homo sapiens
ggtttgaaattcccc

SEQ ID NO: 1206102 - DNA, 15 bp, Homo sapiens
tggtttgaaattccc

SEQ ID NO: 1206103 - DNA, 15 bp, Homo sapiens
ctggtttgaaattcc

SEQ ID NO: 1206104 - DNA, 15 bp, Homo sapiens
cctggtttgaaattc

SEQ ID NO: 1206105 - DNA, 15 bp, Homo sapiens
gcctggtttgaaatt

SEQ ID NO: 1206106 - DNA, 15 bp, Homo sapiens
tgcctggtttgaaat

SEQ ID NO: 1206107 - DNA, 15 bp, Homo sapiens
ttgcctggtttgaaa

SEQ ID NO: 1206108 - DNA, 15 bp, Homo sapiens
cttgcctggtttgaa

SEQ ID NO: 1206109 - DNA, 15 bp, Homo sapiens
acttgcctggtttga

SEQ ID NO: 1206110 - DNA, 15 bp, Homo sapiens
gacttgcctggtttg

SEQ ID NO: 1206111 - DNA, 15 bp, Homo sapiens
agacttgcctggttt

SEQ ID NO: 1206112 - DNA, 15 bp, Homo sapiens
gagacttgcctggtt

SEQ ID NO: 1206113 - DNA, 15 bp, Homo sapiens
tgagacttgcctggt

SEQ ID NO: 1206114 - DNA, 15 bp, Homo sapiens
ttgagacttgcctgg

SEQ ID NO: 1206115 - DNA, 15 bp, Homo sapiens
gttgagacttgcctg

SEQ ID NO: 1206116 - DNA, 15 bp, Homo sapiens
tgttgagacttgcct

SEQ ID NO: 1206117 - DNA, 15 bp, Homo sapiens
gtgttgagacttgcc

SEQ ID NO: 1206118 - DNA, 15 bp, Homo sapiens
tgtgttgagacttgc

SEQ ID NO: 1206119 - DNA, 15 bp, Homo sapiens
atgtgttgagacttg

SEQ ID NO: 1206120 - DNA, 15 bp, Homo sapiens
catgtgttgagactt

SEQ ID NO: 1206121 - DNA, 15 bp, Homo sapiens
gcatgtgttgagact

SEQ ID NO: 1206122 - DNA, 15 bp, Homo sapiens
agcatgtgttgagac

SEQ ID NO: 1206123 - DNA, 15 bp, Homo sapiens
gagcatgtgttgaga

SEQ ID NO: 1206124 - DNA, 15 bp, Homo sapiens
cgagcatgtgttgag

SEQ ID NO: 1206125 - DNA, 15 bp, Homo sapiens
tcgagcatgtgttga

SEQ ID NO: 1206126 - DNA, 15 bp, Homo sapiens
ctcgagcatgtgttg

SEQ ID NO: 1206127 - DNA, 15 bp, Homo sapiens
actcgagcatgtgtt

SEQ ID NO: 1206128 - DNA, 15 bp, Homo sapiens
cactcgagcatgtgt

SEQ ID NO: 1206129 - DNA, 15 bp, Homo sapiens
acactcgagcatgtg

SEQ ID NO: 1206130 - DNA, 15 bp, Homo sapiens
tacactcgagcatgt

SEQ ID NO: 1206131 - DNA, 15 bp, Homo sapiens
ttacactcgagcatg

SEQ ID NO: 1206132 - DNA, 15 bp, Homo sapiens
cttacactcgagcat

SEQ ID NO: 1206133 - DNA, 15 bp, Homo sapiens
tcttacactcgagca

SEQ ID NO: 1206134 - DNA, 15 bp, Homo sapiens
ttcttacactcgagc

SEQ ID NO: 1206135 - DNA, 15 bp, Homo sapiens
gttcttacactcgag

SEQ ID NO: 1206136 - DNA, 15 bp, Homo sapiens
ggttcttacactcga

SEQ ID NO: 1206137 - DNA, 15 bp, Homo sapiens
tggttcttacactcg

SEQ ID NO: 1206138 - DNA, 15 bp, Homo sapiens
ctggttcttacactc

SEQ ID NO: 1206139 - DNA, 15 bp, Homo sapiens
gctggttcttacact

SEQ ID NO: 1206140 - DNA, 15 bp, Homo sapiens
ggctggttcttacac

SEQ ID NO: 1206141 - DNA, 15 bp, Homo sapiens
gggctggttcttaca

SEQ ID NO: 1206142 - DNA, 15 bp, Homo sapiens
tgggctggttcttac

SEQ ID NO: 1206143 - DNA, 15 bp, Homo sapiens
gtgggctggttctta

SEQ ID NO: 1206144 - DNA, 15 bp, Homo sapiens
tgtgggctggttctt

SEQ ID NO: 1206145 - DNA, 15 bp, Homo sapiens
ctgtgggctggttct

SEQ ID NO: 1206146 - DNA, 15 bp, Homo sapiens
gctgtgggctggttc

SEQ ID NO: 1206147 - DNA, 15 bp, Homo sapiens
ggctgtgggctggtt

SEQ ID NO: 1206148 - DNA, 15 bp, Homo sapiens
aggctgtgggctggt

SEQ ID NO: 1206149 - DNA, 15 bp, Homo sapiens
gaggctgtgggctgg

SEQ ID NO: 1206150 - DNA, 15 bp, Homo sapiens
cgaggctgtgggctg

SEQ ID NO: 1206151 - DNA, 15 bp, Homo sapiens
acgaggctgtgggct

SEQ ID NO: 1206152 - DNA, 15 bp, Homo sapiens
aacgaggctgtgggc

SEQ ID NO: 1206153 - DNA, 15 bp, Homo sapiens
gaacgaggctgtggg

SEQ ID NO: 1206154 - DNA, 15 bp, Homo sapiens
ggaacgaggctgtgg

SEQ ID NO: 1206155 - DNA, 15 bp, Homo sapiens
gggaacgaggctgtg

SEQ ID NO: 1206156 - DNA, 15 bp, Homo sapiens
agggaacgaggctgt

SEQ ID NO: 1206157 - DNA, 15 bp, Homo sapiens
tagggaacgaggctg

SEQ ID NO: 1206158 - DNA, 15 bp, Homo sapiens
ttagggaacgaggct

SEQ ID NO: 1206159 - DNA, 15 bp, Homo sapiens
attagggaacgaggc

SEQ ID NO: 1206160 - DNA, 15 bp, Homo sapiens
gattagggaacgagg

SEQ ID NO: 1206161 - DNA, 15 bp, Homo sapiens
tgattagggaacgag

SEQ ID NO: 1206162 - DNA, 15 bp, Homo sapiens
gtgattagggaacga

SEQ ID NO: 1206163 - DNA, 15 bp, Homo sapiens
cgtgattagggaacg

SEQ ID NO: 1206164 - DNA, 15 bp, Homo sapiens
ccgtgattagggaac

SEQ ID NO: 1206165 - DNA, 15 bp, Homo sapiens
accgtgattagggaa

SEQ ID NO: 1206166 - DNA, 15 bp, Homo sapiens
gaccgtgattaggga

SEQ ID NO: 1206167 - DNA, 15 bp, Homo sapiens
tgaccgtgattaggg

SEQ ID NO: 1206168 - DNA, 15 bp, Homo sapiens
ttgaccgtgattagg

SEQ ID NO: 1206169 - DNA, 15 bp, Homo sapiens
tttgaccgtgattag

SEQ ID NO: 1206170 - DNA, 15 bp, Homo sapiens
gtttgaccgtgatta

SEQ ID NO: 1206171 - DNA, 15 bp, Homo sapiens
ggtttgaccgtgatt

SEQ ID NO: 1206172 - DNA, 15 bp, Homo sapiens
tggtttgaccgtgat

SEQ ID NO: 1206173 - DNA, 15 bp, Homo sapiens
ctggtttgaccgtga

SEQ ID NO: 1206174 - DNA, 15 bp, Homo sapiens
tctggtttgaccgtg

SEQ ID NO: 1206175 - DNA, 15 bp, Homo sapiens
ttctggtttgaccgt

SEQ ID NO: 1206176 - DNA, 15 bp, Homo sapiens
attctggtttgaccg

SEQ ID NO: 1206177 - DNA, 15 bp, Homo sapiens
aattctggtttgacc

SEQ ID NO: 1206178 - DNA, 15 bp, Homo sapiens
gaattctggtttgac

SEQ ID NO: 1206179 - DNA, 15 bp, Homo sapiens
agaattctggtttga

SEQ ID NO: 1206180 - DNA, 15 bp, Homo sapiens
tagaattctggtttg

SEQ ID NO: 1206181 - DNA, 15 bp, Homo sapiens
gtagaattctggttt

SEQ ID NO: 1206182 - DNA, 15 bp, Homo sapiens
agtagaattctggtt

SEQ ID NO: 1206183 - DNA, 15 bp, Homo sapiens
gagtagaattctggt

SEQ ID NO: 1206184 - DNA, 15 bp, Homo sapiens
ggagtagaattctgg

SEQ ID NO: 1206185 - DNA, 15 bp, Homo sapiens
tggagtagaattctg

SEQ ID NO: 1206186 - DNA, 15 bp, Homo sapiens
ctggagtagaattct

SEQ ID NO: 1206187 - DNA, 15 bp, Homo sapiens
cctggagtagaattc

SEQ ID NO: 1206188 - DNA, 15 bp, Homo sapiens
acctggagtagaatt

SEQ ID NO: 1206189 - DNA, 15 bp, Homo sapiens
aacctggagtagaat

SEQ ID NO: 1206190 - DNA, 15 bp, Homo sapiens
gaacctggagtagaa

SEQ ID NO: 1206191 - DNA, 15 bp, Homo sapiens
agaacctggagtaga

SEQ ID NO: 1206192 - DNA, 15 bp, Homo sapiens
tagaacctggagtag

SEQ ID NO: 1206193 - DNA, 15 bp, Homo sapiens
gtagaacctggagta

SEQ ID NO: 1206194 - DNA, 15 bp, Homo sapiens
agtagaacctggagt

SEQ ID NO: 1206195 - DNA, 15 bp, Homo sapiens
gagtagaacctggag

SEQ ID NO: 1206196 - DNA, 15 bp, Homo sapiens
agagtagaacctgga

SEQ ID NO: 1206197 - DNA, 15 bp, Homo sapiens
cagagtagaacctgg

SEQ ID NO: 1206198 - DNA, 15 bp, Homo sapiens
acagagtagaacctg

SEQ ID NO: 1206199 - DNA, 15 bp, Homo sapiens
cacagagtagaacct

SEQ ID NO: 1206200 - DNA, 15 bp, Homo sapiens
tcacagagtagaacc

SEQ ID NO: 1206201 - DNA, 15 bp, Homo sapiens
ttcacagagtagaac

SEQ ID NO: 1206202 - DNA, 15 bp, Homo sapiens
attcacagagtagaa

SEQ ID NO: 1206203 - DNA, 15 bp, Homo sapiens
gattcacagagtaga

SEQ ID NO: 1206204 - DNA, 15 bp, Homo sapiens
agattcacagagtag

SEQ ID NO: 1206205 - DNA, 15 bp, Homo sapiens
cagattcacagagta

SEQ ID NO: 1206206 - DNA, 15 bp, Homo sapiens
gcagattcacagagt

SEQ ID NO: 1206207 - DNA, 15 bp, Homo sapiens
agcagattcacagag

SEQ ID NO: 1206208 - DNA, 15 bp, Homo sapiens
aagcagattcacaga

SEQ ID NO: 1206209 - DNA, 15 bp, Homo sapiens
aaagcagattcacag

SEQ ID NO: 1206210 - DNA, 15 bp, Homo sapiens
gaaagcagattcaca

SEQ ID NO: 1206211 - DNA, 15 bp, Homo sapiens
agaaagcagattcac

SEQ ID NO: 1206212 - DNA, 15 bp, Homo sapiens
cagaaagcagattca

SEQ ID NO: 1206213 - DNA, 15 bp, Homo sapiens
acagaaagcagattc

SEQ ID NO: 1206214 - DNA, 15 bp, Homo sapiens
cacagaaagcagatt

SEQ ID NO: 1206215 - DNA, 15 bp, Homo sapiens
tcacagaaagcagat

SEQ ID NO: 1206216 - DNA, 15 bp, Homo sapiens
ttcacagaaagcaga

SEQ ID NO: 1206217 - DNA, 15 bp, Homo sapiens
attcacagaaagcag

SEQ ID NO: 1206218 - DNA, 15 bp, Homo sapiens
gattcacagaaagca

SEQ ID NO: 1206219 - DNA, 15 bp, Homo sapiens
agattcacagaaagc

SEQ ID NO: 1206220 - DNA, 15 bp, Homo sapiens
cagattcacagaaag

SEQ ID NO: 1206221 - DNA, 15 bp, Homo sapiens
acagattcacagaaa

SEQ ID NO: 1206222 - DNA, 15 bp, Homo sapiens
aacagattcacagaa

SEQ ID NO: 1206223 - DNA, 15 bp, Homo sapiens
taacagattcacaga

SEQ ID NO: 1206224 - DNA, 15 bp, Homo sapiens
gtaacagattcacag

SEQ ID NO: 1206225 - DNA, 15 bp, Homo sapiens
agtaacagattcaca

SEQ ID NO: 1206226 - DNA, 15 bp, Homo sapiens
gagtaacagattcac

SEQ ID NO: 1206227 - DNA, 15 bp, Homo sapiens
agagtaacagattca

SEQ ID NO: 1206228 - DNA, 15 bp, Homo sapiens
cagagtaacagattc

SEQ ID NO: 1206229 - DNA, 15 bp, Homo sapiens
ccagagtaacagatt

SEQ ID NO: 1206230 - DNA, 15 bp, Homo sapiens
cccagagtaacagat

SEQ ID NO: 1206231 - DNA, 15 bp, Homo sapiens
ccccagagtaacaga

SEQ ID NO: 1206232 - DNA, 15 bp, Homo sapiens
tccccagagtaacag

SEQ ID NO: 1206233 - DNA, 15 bp, Homo sapiens
gtccccagagtaaca

SEQ ID NO: 1206234 - DNA, 15 bp, Homo sapiens
ggtccccagagtaac

SEQ ID NO: 1206235 - DNA, 15 bp, Homo sapiens
cggtccccagagtaa

SEQ ID NO: 1206236 - DNA, 15 bp, Homo sapiens
gcggtccccagagta

SEQ ID NO: 1206237 - DNA, 15 bp, Homo sapiens
ggcggtccccagagt

SEQ ID NO: 1206238 - DNA, 15 bp, Homo sapiens
aggcggtccccagag

SEQ ID NO: 1206239 - DNA, 15 bp, Homo sapiens
taggcggtccccaga

SEQ ID NO: 1206240 - DNA, 15 bp, Homo sapiens
ataggcggtccccag

SEQ ID NO: 1206241 - DNA, 15 bp, Homo sapiens
tataggcggtcccca

SEQ ID NO: 1206242 - DNA, 15 bp, Homo sapiens
ttataggcggtcccc

SEQ ID NO: 1206243 - DNA, 15 bp, Homo sapiens
cttataggcggtccc

SEQ ID NO: 1206244 - DNA, 15 bp, Homo sapiens
acttataggcggtcc

SEQ ID NO: 1206245 - DNA, 15 bp, Homo sapiens
aacttataggcggtc

SEQ ID NO: 1206246 - DNA, 15 bp, Homo sapiens
caacttataggcggt

SEQ ID NO: 1206247 - DNA, 15 bp, Homo sapiens
tcaacttataggcgg

SEQ ID NO: 1206248 - DNA, 15 bp, Homo sapiens
ttcaacttataggcg

SEQ ID NO: 1206249 - DNA, 15 bp, Homo sapiens
attcaacttataggc

SEQ ID NO: 1206250 - DNA, 15 bp, Homo sapiens
gattcaacttatagg

SEQ ID NO: 1206251 - DNA, 15 bp, Homo sapiens
ggattcaacttatag

SEQ ID NO: 1206252 - DNA, 15 bp, Homo sapiens
aggattcaacttata

SEQ ID NO: 1206253 - DNA, 15 bp, Homo sapiens
taggattcaacttat

SEQ ID NO: 1206254 - DNA, 15 bp, Homo sapiens
gtaggattcaactta

SEQ ID NO: 1206255 - DNA, 15 bp, Homo sapiens
tgtaggattcaactt

SEQ ID NO: 1206256 - DNA, 15 bp, Homo sapiens
ctgtaggattcaact

SEQ ID NO: 1206257 - DNA, 15 bp, Homo sapiens
actgtaggattcaac

SEQ ID NO: 1206258 - DNA, 15 bp, Homo sapiens
cactgtaggattcaa

SEQ ID NO: 1206259 - DNA, 15 bp, Homo sapiens
acactgtaggattca

SEQ ID NO: 1206260 - DNA, 15 bp, Homo sapiens
gacactgtaggattc

SEQ ID NO: 1206261 - DNA, 15 bp, Homo sapiens
agacactgtaggatt

SEQ ID NO: 1206262 - DNA, 15 bp, Homo sapiens
gagacactgtaggat

SEQ ID NO: 1206263 - DNA, 15 bp, Homo sapiens
ggagacactgtagga

SEQ ID NO: 1206264 - DNA, 15 bp, Homo sapiens
tggagacactgtagg

SEQ ID NO: 1206265 - DNA, 15 bp, Homo sapiens
gtggagacactgtag

SEQ ID NO: 1206266 - DNA, 15 bp, Homo sapiens
agtggagacactgta

SEQ ID NO: 1206267 - DNA, 15 bp, Homo sapiens
aagtggagacactgt

SEQ ID NO: 1206268 - DNA, 15 bp, Homo sapiens
gaagtggagacactg

SEQ ID NO: 1206269 - DNA, 15 bp, Homo sapiens
tgaagtggagacact

SEQ ID NO: 1206270 - DNA, 15 bp, Homo sapiens
ctgaagtggagacac

SEQ ID NO: 1206271 - DNA, 15 bp, Homo sapiens
actgaagtggagaca

SEQ ID NO: 1206272 - DNA, 15 bp, Homo sapiens
cactgaagtggagac

SEQ ID NO: 1206273 - DNA, 15 bp, Homo sapiens
tcactgaagtggaga

SEQ ID NO: 1206274 - DNA, 15 bp, Homo sapiens
gtcactgaagtggag

SEQ ID NO: 1206275 - DNA, 15 bp, Homo sapiens
agtcactgaagtgga

SEQ ID NO: 1206276 - DNA, 15 bp, Homo sapiens
cagtcactgaagtgg

SEQ ID NO: 1206277 - DNA, 15 bp, Homo sapiens
ccagtcactgaagtg

SEQ ID NO: 1206278 - DNA, 15 bp, Homo sapiens
gccagtcactgaagt

SEQ ID NO: 1206279 - DNA, 15 bp, Homo sapiens
agccagtcactgaag

SEQ ID NO: 1206280 - DNA, 15 bp, Homo sapiens
aagccagtcactgaa

SEQ ID NO: 1206281 - DNA, 15 bp, Homo sapiens
taagccagtcactga

SEQ ID NO: 1206282 - DNA, 15 bp, Homo sapiens
ataagccagtcactg

SEQ ID NO: 1206283 - DNA, 15 bp, Homo sapiens
aataagccagtcact

SEQ ID NO: 1206284 - DNA, 15 bp, Homo sapiens
aaagtgaaataagcc

SEQ ID NO: 1206285 - DNA, 15 bp, Homo sapiens
aaaagtgaaataagc

SEQ ID NO: 1206286 - DNA, 15 bp, Homo sapiens
gaaaagtgaaataag

SEQ ID NO: 1206287 - DNA, 15 bp, Homo sapiens
agaaaagtgaaataa

SEQ ID NO: 1206288 - DNA, 15 bp, Homo sapiens
gagaaaagtgaaata

SEQ ID NO: 1206289 - DNA, 15 bp, Homo sapiens
ggagaaaagtgaaat

SEQ ID NO: 1206290 - DNA, 15 bp, Homo sapiens
aggagaaaagtgaaa

SEQ ID NO: 1206291 - DNA, 15 bp, Homo sapiens
gaggagaaaagtgaa

SEQ ID NO: 1206292 - DNA, 15 bp, Homo sapiens
agaggagaaaagtga

SEQ ID NO: 1206293 - DNA, 15 bp, Homo sapiens
aagaggagaaaagtg

SEQ ID NO: 1206294 - DNA, 15 bp, Homo sapiens
aaagaggagaaaagt

SEQ ID NO: 1206295 - DNA, 15 bp, Homo sapiens
taaagaggagaaaag

SEQ ID NO: 1206296 - DNA, 15 bp, Homo sapiens
ataaagaggagaaaa

SEQ ID NO: 1206297 - DNA, 15 bp, Homo sapiens
aataaagaggagaaa

SEQ ID NO: 1206298 - DNA, 15 bp, Homo sapiens
aaataaagaggagaa

SEQ ID NO: 1206299 - DNA, 15 bp, Homo sapiens
taaataaagaggaga

SEQ ID NO: 1206300 - DNA, 15 bp, Homo sapiens
ataaataaagaggag

SEQ ID NO: 1206301 - DNA, 15 bp, Homo sapiens
cataaataaagagga

SEQ ID NO: 1206302 - DNA, 15 bp, Homo sapiens
tcataaataaagagg

SEQ ID NO: 1206303 - DNA, 15 bp, Homo sapiens
ctcataaataaagag

SEQ ID NO: 1206304 - DNA, 15 bp, Homo sapiens
tctcataaataaaga

SEQ ID NO: 1206305 - DNA, 15 bp, Homo sapiens
gtctcataaataaag

SEQ ID NO: 1206306 - DNA, 15 bp, Homo sapiens
tgtctcataaataaa

SEQ ID NO: 1206307 - DNA, 15 bp, Homo sapiens
ttgtctcataaataa

SEQ ID NO: 1206308 - DNA, 15 bp, Homo sapiens
tttgtctcataaata

SEQ ID NO: 1206309 - DNA, 15 bp, Homo sapiens
ttttgtctcataaat

SEQ ID NO: 1206310 - DNA, 15 bp, Homo sapiens
attttgtctcataaa

SEQ ID NO: 1206311 - DNA, 15 bp, Homo sapiens
aattttgtctcataa

SEQ ID NO: 1206312 - DNA, 15 bp, Homo sapiens
aaattttgtctcata

SEQ ID NO: 1206313 - DNA, 15 bp, Homo sapiens
gaaattttgtctcat

SEQ ID NO: 1206314 - DNA, 15 bp, Homo sapiens
cgaaattttgtctca

SEQ ID NO: 1206315 - DNA, 15 bp, Homo sapiens
gcgaaattttgtctc

SEQ ID NO: 1206316 - DNA, 15 bp, Homo sapiens
agcgaaattttgtct

SEQ ID NO: 1206317 - DNA, 15 bp, Homo sapiens
gagcgaaattttgtc

SEQ ID NO: 1206318 - DNA, 15 bp, Homo sapiens
agagcgaaattttgt

SEQ ID NO: 1206319 - DNA, 15 bp, Homo sapiens
aagagcgaaattttg

SEQ ID NO: 1206320 - DNA, 15 bp, Homo sapiens
caagagcgaaatttt

SEQ ID NO: 1206321 - DNA, 15 bp, Homo sapiens
acaagagcgaaattt

SEQ ID NO: 1206322 - DNA, 15 bp, Homo sapiens
aacaagagcgaaatt

SEQ ID NO: 1206323 - DNA, 15 bp, Homo sapiens
caacaagagcgaaat

SEQ ID NO: 1206324 - DNA, 15 bp, Homo sapiens
agcaacaagagcgaa

SEQ ID NO: 1206325 - DNA, 15 bp, Homo sapiens
gagcaacaagagcga

SEQ ID NO: 1206326 - DNA, 15 bp, Homo sapiens
tgagcaacaagagcg

SEQ ID NO: 1206327 - DNA, 15 bp, Homo sapiens
ttccagcctgagcaa

SEQ ID NO: 1206328 - DNA, 15 bp, Homo sapiens
attccagcctgagca

SEQ ID NO: 1206329 - DNA, 15 bp, Homo sapiens
cattccagcctgagc

SEQ ID NO: 1206330 - DNA, 15 bp, Homo sapiens
gcattccagcctgag

SEQ ID NO: 1206331 - DNA, 15 bp, Homo sapiens
tgcattccagcctga

SEQ ID NO: 1206332 - DNA, 15 bp, Homo sapiens
ttgcattccagcctg

SEQ ID NO: 1206333 - DNA, 15 bp, Homo sapiens
attgcattccagcct

SEQ ID NO: 1206334 - DNA, 15 bp, Homo sapiens
cattgcattccagcc

SEQ ID NO: 1206335 - DNA, 15 bp, Homo sapiens
ccattgcattccagc

SEQ ID NO: 1206336 - DNA, 15 bp, Homo sapiens
cgccattgcattcca

SEQ ID NO: 1206337 - DNA, 15 bp, Homo sapiens
acgccattgcattcc

SEQ ID NO: 1206338 - DNA, 15 bp, Homo sapiens
cacgccattgcattc

SEQ ID NO: 1206339 - DNA, 15 bp, Homo sapiens
tcacgccattgcatt

SEQ ID NO: 1206340 - DNA, 15 bp, Homo sapiens
atcacgccattgcat

SEQ ID NO: 1206341 - DNA, 15 bp, Homo sapiens
tagccgagatcacgc

SEQ ID NO: 1206342 - DNA, 15 bp, Homo sapiens
ttagccgagatcacg

SEQ ID NO: 1206343 - DNA, 15 bp, Homo sapiens
attagccgagatcac

SEQ ID NO: 1206344 - DNA, 15 bp, Homo sapiens
aattagccgagatca

SEQ ID NO: 1206345 - DNA, 15 bp, Homo sapiens
aaattagccgagatc

SEQ ID NO: 1206346 - DNA, 15 bp, Homo sapiens
aaaattagccgagat

SEQ ID NO: 1206347 - DNA, 15 bp, Homo sapiens
aaaaattagccgaga

SEQ ID NO: 1206348 - DNA, 15 bp, Homo sapiens
aaaaaattagccgag

SEQ ID NO: 1206349 - DNA, 15 bp, Homo sapiens
aaaaaaattagccga

SEQ ID NO: 1206350 - DNA, 15 bp, Homo sapiens
caaaaaaattagccg

SEQ ID NO: 1206351 - DNA, 15 bp, Homo sapiens
gcctctactaaaaat

SEQ ID NO: 1206352 - DNA, 15 bp, Homo sapiens
cgcctctactaaaaa

SEQ ID NO: 1206353 - DNA, 15 bp, Homo sapiens
ccgcctctactaaaa

SEQ ID NO: 1206354 - DNA, 15 bp, Homo sapiens
cccgcctctactaaa

SEQ ID NO: 1206355 - DNA, 15 bp, Homo sapiens
ccccgcctctactaa

SEQ ID NO: 1206356 - DNA, 15 bp, Homo sapiens
accccgcctctacta

SEQ ID NO: 1206357 - DNA, 15 bp, Homo sapiens
aaccccgcctctact

SEQ ID NO: 1206358 - DNA, 15 bp, Homo sapiens
aaaccccgcctctac

SEQ ID NO: 1206359 - DNA, 15 bp, Homo sapiens
gaaaccccgcctcta

SEQ ID NO: 1206360 - DNA, 15 bp, Homo sapiens
tgaaaccccgcctct

SEQ ID NO: 1206361 - DNA, 15 bp, Homo sapiens
gtgaaaccccgcctc

SEQ ID NO: 1206362 - DNA, 15 bp, Homo sapiens
ggtgaaaccccgcct

SEQ ID NO: 1206363 - DNA, 15 bp, Homo sapiens
tggtgaaaccccgcc

SEQ ID NO: 1206364 - DNA, 15 bp, Homo sapiens
atggtgaaaccccgc

SEQ ID NO: 1206365 - DNA, 15 bp, Homo sapiens
gtctgaggtcaggag

SEQ ID NO: 1206366 - DNA, 15 bp, Homo sapiens
cgtctgaggtcagga

SEQ ID NO: 1206367 - DNA, 15 bp, Homo sapiens
tcgtctgaggtcagg

SEQ ID NO: 1206368 - DNA, 15 bp, Homo sapiens
atcgtctgaggtcag

SEQ ID NO: 1206369 - DNA, 15 bp, Homo sapiens
gatcgtctgaggtca

SEQ ID NO: 1206370 - DNA, 15 bp, Homo sapiens
ggatcgtctgaggtc

SEQ ID NO: 1206371 - DNA, 15 bp, Homo sapiens
tggatcgtctgaggt

SEQ ID NO: 1206372 - DNA, 15 bp, Homo sapiens
gtggatcgtctgagg

SEQ ID NO: 1206373 - DNA, 15 bp, Homo sapiens
agtggatcgtctgag

SEQ ID NO: 1206374 - DNA, 15 bp, Homo sapiens
aagtggatcgtctga

SEQ ID NO: 1206375 - DNA, 15 bp, Homo sapiens
aaagtggatcgtctg

SEQ ID NO: 1206376 - DNA, 15 bp, Homo sapiens
caaagtggatcgtct

SEQ ID NO: 1206377 - DNA, 15 bp, Homo sapiens
ccaaagtggatcgtc

SEQ ID NO: 1206378 - DNA, 15 bp, Homo sapiens
gccaaagtggatcgt

SEQ ID NO: 1206379 - DNA, 15 bp, Homo sapiens
ggccaaagtggatcg

SEQ ID NO: 1206380 - DNA, 15 bp, Homo sapiens
aggccaaagtggatc

SEQ ID NO: 1206381 - DNA, 15 bp, Homo sapiens
aaggccaaagtggat

SEQ ID NO: 1206382 - DNA, 15 bp, Homo sapiens
gaaggccaaagtgga

SEQ ID NO: 1206383 - DNA, 15 bp, Homo sapiens
ggaaggccaaagtgg

SEQ ID NO: 1206384 - DNA, 15 bp, Homo sapiens
tggaaggccaaagtg

SEQ ID NO: 1206385 - DNA, 15 bp, Homo sapiens
ttggaaggccaaagt

SEQ ID NO: 1206386 - DNA, 15 bp, Homo sapiens
tttggaaggccaaag

SEQ ID NO: 1206387 - DNA, 15 bp, Homo sapiens
ctttggaaggccaaa

SEQ ID NO: 1206388 - DNA, 15 bp, Homo sapiens
ccgcgcctgtaatcc

SEQ ID NO: 1206389 - DNA, 15 bp, Homo sapiens
gccgcgcctgtaatc

SEQ ID NO: 1206390 - DNA, 15 bp, Homo sapiens
ggccgcgcctgtaat

SEQ ID NO: 1206391 - DNA, 15 bp, Homo sapiens
gggccgcgcctgtaa

SEQ ID NO: 1206392 - DNA, 15 bp, Homo sapiens
tgggccgcgcctgta

SEQ ID NO: 1206393 - DNA, 15 bp, Homo sapiens
gtgggccgcgcctgt

SEQ ID NO: 1206394 - DNA, 15 bp, Homo sapiens
ggtgggccgcgcctg

SEQ ID NO: 1206395 - DNA, 15 bp, Homo sapiens
aggtgggccgcgcct

SEQ ID NO: 1206396 - DNA, 15 bp, Homo sapiens
aaggtgggccgcgcc

SEQ ID NO: 1206397 - DNA, 15 bp, Homo sapiens
aaaggtgggccgcgc

SEQ ID NO: 1206398 - DNA, 15 bp, Homo sapiens
gaaaggtgggccgcg

SEQ ID NO: 1206399 - DNA, 15 bp, Homo sapiens
agaaaggtgggccgc

SEQ ID NO: 1206400 - DNA, 15 bp, Homo sapiens
gagaaaggtgggccg

SEQ ID NO: 1206401 - DNA, 15 bp, Homo sapiens
ggagaaaggtgggcc

SEQ ID NO: 1206402 - DNA, 15 bp, Homo sapiens
aggagaaaggtgggc

SEQ ID NO: 1206403 - DNA, 15 bp, Homo sapiens
gaggagaaaggtggg

SEQ ID NO: 1206404 - DNA, 15 bp, Homo sapiens
agaggagaaaggtgg

SEQ ID NO: 1206405 - DNA, 15 bp, Homo sapiens
aagaggagaaaggtg

SEQ ID NO: 1206406 - DNA, 15 bp, Homo sapiens
taagaggagaaaggt

SEQ ID NO: 1206407 - DNA, 15 bp, Homo sapiens
ttaagaggagaaagg

SEQ ID NO: 1206408 - DNA, 15 bp, Homo sapiens
attaagaggagaaag

SEQ ID NO: 1206409 - DNA, 15 bp, Homo sapiens
gattaagaggagaaa

SEQ ID NO: 1206410 - DNA, 15 bp, Homo sapiens
tgattaagaggagaa

SEQ ID NO: 1206411 - DNA, 15 bp, Homo sapiens
gtgattaagaggaga

SEQ ID NO: 1206412 - DNA, 15 bp, Homo sapiens
tgtgattaagaggag

SEQ ID NO: 1206413 - DNA, 15 bp, Homo sapiens
gtgtgattaagagga

SEQ ID NO: 1206414 - DNA, 15 bp, Homo sapiens
tgtgtgattaagagg

SEQ ID NO: 1206415 - DNA, 15 bp, Homo sapiens
ctgtgtgattaagag

SEQ ID NO: 1206416 - DNA, 15 bp, Homo sapiens
cctgtgtgattaaga

SEQ ID NO: 1206417 - DNA, 15 bp, Homo sapiens
acctgtgtgattaag

SEQ ID NO: 1206418 - DNA, 15 bp, Homo sapiens
tacctgtgtgattaa

SEQ ID NO: 1206419 - DNA, 15 bp, Homo sapiens
ttacctgtgtgatta

SEQ ID NO: 1206420 - DNA, 15 bp, Homo sapiens
attacctgtgtgatt

SEQ ID NO: 1206421 - DNA, 15 bp, Homo sapiens
gattacctgtgtgat

SEQ ID NO: 1206422 - DNA, 15 bp, Homo sapiens
ggattacctgtgtga

SEQ ID NO: 1206423 - DNA, 15 bp, Homo sapiens
tggattacctgtgtg

SEQ ID NO: 1206424 - DNA, 15 bp, Homo sapiens
atggattacctgtgt

SEQ ID NO: 1206425 - DNA, 15 bp, Homo sapiens
tatggattacctgtg

SEQ ID NO: 1206426 - DNA, 15 bp, Homo sapiens
gtatggattacctgt

SEQ ID NO: 1206427 - DNA, 15 bp, Homo sapiens
tgtatggattacctg

SEQ ID NO: 1206428 - DNA, 15 bp, Homo sapiens
atgtatggattacct

SEQ ID NO: 1206429 - DNA, 15 bp, Homo sapiens
tatgtatggattacc

SEQ ID NO: 1206430 - DNA, 15 bp, Homo sapiens
gtatgtatggattac

SEQ ID NO: 1206431 - DNA, 15 bp, Homo sapiens
cgtatgtatggatta

SEQ ID NO: 1206432 - DNA, 15 bp, Homo sapiens
tcgtatgtatggatt

SEQ ID NO: 1206433 - DNA, 15 bp, Homo sapiens
gtcgtatgtatggat

SEQ ID NO: 1206434 - DNA, 15 bp, Homo sapiens
tgtcgtatgtatgga

SEQ ID NO: 1206435 - DNA, 15 bp, Homo sapiens
atgtcgtatgtatgg

SEQ ID NO: 1206436 - DNA, 15 bp, Homo sapiens
aatgtcgtatgtatg

SEQ ID NO: 1206437 - DNA, 15 bp, Homo sapiens
gaatgtcgtatgtat

SEQ ID NO: 1206438 - DNA, 15 bp, Homo sapiens
agaatgtcgtatgta

SEQ ID NO: 1206439 - DNA, 15 bp, Homo sapiens
aagaatgtcgtatgt

SEQ ID NO: 1206440 - DNA, 15 bp, Homo sapiens
aaagaatgtcgtatg

SEQ ID NO: 1206441 - DNA, 15 bp, Homo sapiens
aaaagaatgtcgtat

SEQ ID NO: 1206442 - DNA, 15 bp, Homo sapiens
aaaaagaatgtcgta

SEQ ID NO: 1206443 - DNA, 15 bp, Homo sapiens
aaaaaagaatgtcgt

SEQ ID NO: 1206444 - DNA, 15 bp, Homo sapiens
aaaaaaagaatgtcg

SEQ ID NO: 1206445 - DNA, 15 bp, Homo sapiens
aaaaaaaagaatgtc

SEQ ID NO: 1206446 - DNA, 15 bp, Homo sapiens
aaaaaaaaagaatgt

SEQ ID NO: 1206447 - DNA, 15 bp, Homo sapiens
aaaaaaaaaagaatg

SEQ ID NO: 1206448 - DNA, 15 bp, Homo sapiens
cgtgtcaaaaaaaaa

SEQ ID NO: 1206449 - DNA, 15 bp, Homo sapiens
ccgtgtcaaaaaaaa

SEQ ID NO: 1206450 - DNA, 15 bp, Homo sapiens
tccgtgtcaaaaaaa

SEQ ID NO: 1206451 - DNA, 15 bp, Homo sapiens
ctccgtgtcaaaaaa

SEQ ID NO: 1206452 - DNA, 15 bp, Homo sapiens
actccgtgtcaaaaa

SEQ ID NO: 1206453 - DNA, 15 bp, Homo sapiens
aagactccgtgtcaa

SEQ ID NO: 1206454 - DNA, 15 bp, Homo sapiens
taagactccgtgtca

SEQ ID NO: 1206455 - DNA, 15 bp, Homo sapiens
gtaagactccgtgtc

SEQ ID NO: 1206456 - DNA, 15 bp, Homo sapiens
agtaagactccgtgt

SEQ ID NO: 1206457 - DNA, 15 bp, Homo sapiens
gagtaagactccgtg

SEQ ID NO: 1206458 - DNA, 15 bp, Homo sapiens
agagtaagactccgt

SEQ ID NO: 1206459 - DNA, 15 bp, Homo sapiens
cagagtaagactccg

SEQ ID NO: 1206460 - DNA, 15 bp, Homo sapiens
gacagagtaagactc

SEQ ID NO: 1206461 - DNA, 15 bp, Homo sapiens
tgacagagtaagact

SEQ ID NO: 1206462 - DNA, 15 bp, Homo sapiens
gtgacagagtaagac

SEQ ID NO: 1206463 - DNA, 15 bp, Homo sapiens
ggtgacagagtaaga

SEQ ID NO: 1206464 - DNA, 15 bp, Homo sapiens
aggtgacagagtaag

SEQ ID NO: 1206465 - DNA, 15 bp, Homo sapiens
taggtgacagagtaa

SEQ ID NO: 1206466 - DNA, 15 bp, Homo sapiens
ctaggtgacagagta

SEQ ID NO: 1206467 - DNA, 15 bp, Homo sapiens
tcctgggaggcagag

SEQ ID NO: 1206468 - DNA, 15 bp, Homo sapiens
atcctgggaggcaga

SEQ ID NO: 1206469 - DNA, 15 bp, Homo sapiens
gatcctgggaggcag

SEQ ID NO: 1206470 - DNA, 15 bp, Homo sapiens
tgatcctgggaggca

SEQ ID NO: 1206471 - DNA, 15 bp, Homo sapiens
ttgatcctgggaggc

SEQ ID NO: 1206472 - DNA, 15 bp, Homo sapiens
cttgatcctgggagg

SEQ ID NO: 1206473 - DNA, 15 bp, Homo sapiens
gcttgatcctgggag

SEQ ID NO: 1206474 - DNA, 15 bp, Homo sapiens
tgcttgatcctggga

SEQ ID NO: 1206475 - DNA, 15 bp, Homo sapiens
ttgcttgatcctggg

SEQ ID NO: 1206476 - DNA, 15 bp, Homo sapiens
attgcttgatcctgg

SEQ ID NO: 1206477 - DNA, 15 bp, Homo sapiens
aattgcttgatcctg

SEQ ID NO: 1206478 - DNA, 15 bp, Homo sapiens
gaattgcttgatcct

SEQ ID NO: 1206479 - DNA, 15 bp, Homo sapiens
agaattgcttgatcc

SEQ ID NO: 1206480 - DNA, 15 bp, Homo sapiens
gagaattgcttgatc

SEQ ID NO: 1206481 - DNA, 15 bp, Homo sapiens
ggagaattgcttgat

SEQ ID NO: 1206482 - DNA, 15 bp, Homo sapiens
ttacctgtaatccca

SEQ ID NO: 1206483 - DNA, 15 bp, Homo sapiens
gttacctgtaatccc

SEQ ID NO: 1206484 - DNA, 15 bp, Homo sapiens
ggttacctgtaatcc

SEQ ID NO: 1206485 - DNA, 15 bp, Homo sapiens
tggttacctgtaatc

SEQ ID NO: 1206486 - DNA, 15 bp, Homo sapiens
atggttacctgtaat

SEQ ID NO: 1206487 - DNA, 15 bp, Homo sapiens
gatggttacctgtaa

SEQ ID NO: 1206488 - DNA, 15 bp, Homo sapiens
tgatggttacctgta

SEQ ID NO: 1206489 - DNA, 15 bp, Homo sapiens
gtgatggttacctgt

SEQ ID NO: 1206490 - DNA, 15 bp, Homo sapiens
ggtgatggttacctg

SEQ ID NO: 1206491 - DNA, 15 bp, Homo sapiens
tggtgatggttacct

SEQ ID NO: 1206492 - DNA, 15 bp, Homo sapiens
gtggtgatggttacc

SEQ ID NO: 1206493 - DNA, 15 bp, Homo sapiens
tgtggtgatggttac

SEQ ID NO: 1206494 - DNA, 15 bp, Homo sapiens
gtgtggtgatggtta

SEQ ID NO: 1206495 - DNA, 15 bp, Homo sapiens
ggtgtggtgatggtt

SEQ ID NO: 1206496 - DNA, 15 bp, Homo sapiens
aggtgtggtgatggt

SEQ ID NO: 1206497 - DNA, 15 bp, Homo sapiens
caggtgtggtgatgg

SEQ ID NO: 1206498 - DNA, 15 bp, Homo sapiens
ccaggtgtggtgatg

SEQ ID NO: 1206499 - DNA, 15 bp, Homo sapiens
gccaggtgtggtgat

SEQ ID NO: 1206500 - DNA, 15 bp, Homo sapiens
tttagccaggtgtgg

SEQ ID NO: 1206501 - DNA, 15 bp, Homo sapiens
atttagccaggtgtg

SEQ ID NO: 1206502 - DNA, 15 bp, Homo sapiens
aatttagccaggtgt

SEQ ID NO: 1206503 - DNA, 15 bp, Homo sapiens
aaatttagccaggtg

SEQ ID NO: 1206504 - DNA, 15 bp, Homo sapiens
aaaatttagccaggt

SEQ ID NO: 1206505 - DNA, 15 bp, Homo sapiens
caaaatttagccagg

SEQ ID NO: 1206506 - DNA, 15 bp, Homo sapiens
acaaaatttagccag

SEQ ID NO: 1206507 - DNA, 15 bp, Homo sapiens
tacaaaatttagcca

SEQ ID NO: 1206508 - DNA, 15 bp, Homo sapiens
atacaaaatttagcc

SEQ ID NO: 1206509 - DNA, 15 bp, Homo sapiens
aatacaaaatttagc

SEQ ID NO: 1206510 - DNA, 15 bp, Homo sapiens
aaatacaaaatttag

SEQ ID NO: 1206511 - DNA, 15 bp, Homo sapiens
aaaatacaaaattta

SEQ ID NO: 1206512 - DNA, 15 bp, Homo sapiens
aaaaatacaaaattt

SEQ ID NO: 1206513 - DNA, 15 bp, Homo sapiens
cgtggtgaaaccccg

SEQ ID NO: 1206514 - DNA, 15 bp, Homo sapiens
gtggccaacgtggtg

SEQ ID NO: 1206515 - DNA, 15 bp, Homo sapiens
cgtggccaacgtggt

SEQ ID NO: 1206516 - DNA, 15 bp, Homo sapiens
gcgtggccaacgtgg

SEQ ID NO: 1206517 - DNA, 15 bp, Homo sapiens
agcgtggccaacgtg

SEQ ID NO: 1206518 - DNA, 15 bp, Homo sapiens
cagcgtggccaacgt

SEQ ID NO: 1206519 - DNA, 15 bp, Homo sapiens
ccagcgtggccaacg

SEQ ID NO: 1206520 - DNA, 15 bp, Homo sapiens
taccagcgtggccaa

SEQ ID NO: 1206521 - DNA, 15 bp, Homo sapiens
ataccagcgtggcca

SEQ ID NO: 1206522 - DNA, 15 bp, Homo sapiens
aataccagcgtggcc

SEQ ID NO: 1206523 - DNA, 15 bp, Homo sapiens
caataccagcgtggc

SEQ ID NO: 1206524 - DNA, 15 bp, Homo sapiens
tcaataccagcgtgg

SEQ ID NO: 1206525 - DNA, 15 bp, Homo sapiens
ttcaataccagcgtg

SEQ ID NO: 1206526 - DNA, 15 bp, Homo sapiens
gttcaataccagcgt

SEQ ID NO: 1206527 - DNA, 15 bp, Homo sapiens
agttcaataccagcg

SEQ ID NO: 1206528 - DNA, 15 bp, Homo sapiens
gagttcaataccagc

SEQ ID NO: 1206529 - DNA, 15 bp, Homo sapiens
ggagttcaataccag

SEQ ID NO: 1206530 - DNA, 15 bp, Homo sapiens
aggagttcaatacca

SEQ ID NO: 1206531 - DNA, 15 bp, Homo sapiens
caggagttcaatacc

SEQ ID NO: 1206532 - DNA, 15 bp, Homo sapiens
ccaggagttcaatac

SEQ ID NO: 1206533 - DNA, 15 bp, Homo sapiens
gccaggagttcaata

SEQ ID NO: 1206534 - DNA, 15 bp, Homo sapiens
agccaggagttcaat

SEQ ID NO: 1206535 - DNA, 15 bp, Homo sapiens
aagccaggagttcaa

SEQ ID NO: 1206536 - DNA, 15 bp, Homo sapiens
gaagccaggagttca

SEQ ID NO: 1206537 - DNA, 15 bp, Homo sapiens
tgaagccaggagttc

SEQ ID NO: 1206538 - DNA, 15 bp, Homo sapiens
acttgaagccaggag

SEQ ID NO: 1206539 - DNA, 15 bp, Homo sapiens
cacttgaagccagga

SEQ ID NO: 1206540 - DNA, 15 bp, Homo sapiens
tcacttgaagccagg

SEQ ID NO: 1206541 - DNA, 15 bp, Homo sapiens
atcacttgaagccag

SEQ ID NO: 1206542 - DNA, 15 bp, Homo sapiens
gatcacttgaagcca

SEQ ID NO: 1206543 - DNA, 15 bp, Homo sapiens
agatcacttgaagcc

SEQ ID NO: 1206544 - DNA, 15 bp, Homo sapiens
aagatcacttgaagc

SEQ ID NO: 1206545 - DNA, 15 bp, Homo sapiens
gaagatcacttgaag

SEQ ID NO: 1206546 - DNA, 15 bp, Homo sapiens
ggaagatcacttgaa

SEQ ID NO: 1206547 - DNA, 15 bp, Homo sapiens
aggaagatcacttga

SEQ ID NO: 1206548 - DNA, 15 bp, Homo sapiens
caggaagatcacttg

SEQ ID NO: 1206549 - DNA, 15 bp, Homo sapiens
acaggaagatcactt

SEQ ID NO: 1206550 - DNA, 15 bp, Homo sapiens
gacaggaagatcact

SEQ ID NO: 1206551 - DNA, 15 bp, Homo sapiens
agacaggaagatcac

SEQ ID NO: 1206552 - DNA, 15 bp, Homo sapiens
gagacaggaagatca

SEQ ID NO: 1206553 - DNA, 15 bp, Homo sapiens
cgagacaggaagatc

SEQ ID NO: 1206554 - DNA, 15 bp, Homo sapiens
ccgagacaggaagat

SEQ ID NO: 1206555 - DNA, 15 bp, Homo sapiens
accgagacaggaaga

SEQ ID NO: 1206556 - DNA, 15 bp, Homo sapiens
gaccgagacaggaag

SEQ ID NO: 1206557 - DNA, 15 bp, Homo sapiens
agaccgagacaggaa

SEQ ID NO: 1206558 - DNA, 15 bp, Homo sapiens
gagaccgagacagga

SEQ ID NO: 1206559 - DNA, 15 bp, Homo sapiens
ggagaccgagacagg

SEQ ID NO: 1206560 - DNA, 15 bp, Homo sapiens
gggagaccgagacag

SEQ ID NO: 1206561 - DNA, 15 bp, Homo sapiens
cgggagaccgagaca

SEQ ID NO: 1206562 - DNA, 15 bp, Homo sapiens
tcgggagaccgagac

SEQ ID NO: 1206563 - DNA, 15 bp, Homo sapiens
ttcgggagaccgaga

SEQ ID NO: 1206564 - DNA, 15 bp, Homo sapiens
cttcgggagaccgag

SEQ ID NO: 1206565 - DNA, 15 bp, Homo sapiens
acttcgggagaccga

SEQ ID NO: 1206566 - DNA, 15 bp, Homo sapiens
cacttcgggagaccg

SEQ ID NO: 1206567 - DNA, 15 bp, Homo sapiens
gcacttcgggagacc

SEQ ID NO: 1206568 - DNA, 15 bp, Homo sapiens
agcacttcgggagac

SEQ ID NO: 1206569 - DNA, 15 bp, Homo sapiens
cagcacttcgggaga

SEQ ID NO: 1206570 - DNA, 15 bp, Homo sapiens
tcattcctgtaatcc

SEQ ID NO: 1206571 - DNA, 15 bp, Homo sapiens
ctcattcctgtaatc

SEQ ID NO: 1206572 - DNA, 15 bp, Homo sapiens
gctcattcctgtaat

SEQ ID NO: 1206573 - DNA, 15 bp, Homo sapiens
ggctcattcctgtaa

SEQ ID NO: 1206574 - DNA, 15 bp, Homo sapiens
tggctcattcctgta

SEQ ID NO: 1206575 - DNA, 15 bp, Homo sapiens
gtggctcattcctgt

SEQ ID NO: 1206576 - DNA, 15 bp, Homo sapiens
agtggctcattcctg

SEQ ID NO: 1206577 - DNA, 15 bp, Homo sapiens
cagtggctcattcct

SEQ ID NO: 1206578 - DNA, 15 bp, Homo sapiens
acagtggctcattcc

SEQ ID NO: 1206579 - DNA, 15 bp, Homo sapiens
cacagtggctcattc

SEQ ID NO: 1206580 - DNA, 15 bp, Homo sapiens
gcacagtggctcatt

SEQ ID NO: 1206581 - DNA, 15 bp, Homo sapiens
ttggccgggcacagt

SEQ ID NO: 1206582 - DNA, 15 bp, Homo sapiens
attggccgggcacag

SEQ ID NO: 1206583 - DNA, 15 bp, Homo sapiens
tattggccgggcaca

SEQ ID NO: 1206584 - DNA, 15 bp, Homo sapiens
gtattggccgggcac

SEQ ID NO: 1206585 - DNA, 15 bp, Homo sapiens
cgtattggccgggca

SEQ ID NO: 1206586 - DNA, 15 bp, Homo sapiens
tcgtattggccgggc

SEQ ID NO: 1206587 - DNA, 15 bp, Homo sapiens
gtcgtattggccggg

SEQ ID NO: 1206588 - DNA, 15 bp, Homo sapiens
tgtcgtattggccgg

SEQ ID NO: 1206589 - DNA, 15 bp, Homo sapiens
atgtcgtattggccg

SEQ ID NO: 1206590 - DNA, 15 bp, Homo sapiens
gatgtcgtattggcc

SEQ ID NO: 1206591 - DNA, 15 bp, Homo sapiens
agatgtcgtattggc

SEQ ID NO: 1206592 - DNA, 15 bp, Homo sapiens
cagatgtcgtattgg

SEQ ID NO: 1206593 - DNA, 15 bp, Homo sapiens
acagatgtcgtattg

SEQ ID NO: 1206594 - DNA, 15 bp, Homo sapiens
cacagatgtcgtatt

SEQ ID NO: 1206595 - DNA, 15 bp, Homo sapiens
gcacagatgtcgtat

SEQ ID NO: 1206596 - DNA, 15 bp, Homo sapiens
tgcacagatgtcgta

SEQ ID NO: 1206597 - DNA, 15 bp, Homo sapiens
ttgcacagatgtcgt

SEQ ID NO: 1206598 - DNA, 15 bp, Homo sapiens
attgcacagatgtcg

SEQ ID NO: 1206599 - DNA, 15 bp, Homo sapiens
cattgcacagatgtc

SEQ ID NO: 1206600 - DNA, 15 bp, Homo sapiens
tcattgcacagatgt

SEQ ID NO: 1206601 - DNA, 15 bp, Homo sapiens
ttcattgcacagatg

SEQ ID NO: 1206602 - DNA, 15 bp, Homo sapiens
cttcattgcacagat

SEQ ID NO: 1206603 - DNA, 15 bp, Homo sapiens
acttcattgcacaga

SEQ ID NO: 1206604 - DNA, 15 bp, Homo sapiens
cacttcattgcacag

SEQ ID NO: 1206605 - DNA, 15 bp, Homo sapiens
gcacttcattgcaca

SEQ ID NO: 1206606 - DNA, 15 bp, Homo sapiens
tgcacttcattgcac

SEQ ID NO: 1206607 - DNA, 15 bp, Homo sapiens
ttgcacttcattgca

SEQ ID NO: 1206608 - DNA, 15 bp, Homo sapiens
gttgcacttcattgc

SEQ ID NO: 1206609 - DNA, 15 bp, Homo sapiens
tgttgcacttcattg

SEQ ID NO: 1206610 - DNA, 15 bp, Homo sapiens
atgttgcacttcatt

SEQ ID NO: 1206611 - DNA, 15 bp, Homo sapiens
tatgttgcacttcat

SEQ ID NO: 1206612 - DNA, 15 bp, Homo sapiens
atatgttgcacttca

SEQ ID NO: 1206613 - DNA, 15 bp, Homo sapiens
tatatgttgcacttc

SEQ ID NO: 1206614 - DNA, 15 bp, Homo sapiens
ttatatgttgcactt

SEQ ID NO: 1206615 - DNA, 15 bp, Homo sapiens
cttatatgttgcact

SEQ ID NO: 1206616 - DNA, 15 bp, Homo sapiens
tcttatatgttgcac

SEQ ID NO: 1206617 - DNA, 15 bp, Homo sapiens
gtcttatatgttgca

SEQ ID NO: 1206618 - DNA, 15 bp, Homo sapiens
tgtcttatatgttgc

SEQ ID NO: 1206619 - DNA, 15 bp, Homo sapiens
gtgtcttatatgttg

SEQ ID NO: 1206620 - DNA, 15 bp, Homo sapiens
ggtgtcttatatgtt

SEQ ID NO: 1206621 - DNA, 15 bp, Homo sapiens
gggtgtcttatatgt

SEQ ID NO: 1206622 - DNA, 15 bp, Homo sapiens
agggtgtcttatatg

SEQ ID NO: 1206623 - DNA, 15 bp, Homo sapiens
aagggtgtcttatat

SEQ ID NO: 1206624 - DNA, 15 bp, Homo sapiens
gaagggtgtcttata

SEQ ID NO: 1206625 - DNA, 15 bp, Homo sapiens
ggaagggtgtcttat

SEQ ID NO: 1206626 - DNA, 15 bp, Homo sapiens
gggaagggtgtctta

SEQ ID NO: 1206627 - DNA, 15 bp, Homo sapiens
ggggaagggtgtctt

SEQ ID NO: 1206628 - DNA, 15 bp, Homo sapiens
gggggaagggtgtct

SEQ ID NO: 1206629 - DNA, 15 bp, Homo sapiens
tgggggaagggtgtc

SEQ ID NO: 1206630 - DNA, 15 bp, Homo sapiens
gtgggggaagggtgt

SEQ ID NO: 1206631 - DNA, 15 bp, Homo sapiens
ggtgggggaagggtg

SEQ ID NO: 1206632 - DNA, 15 bp, Homo sapiens
gggtgggggaagggt

SEQ ID NO: 1206633 - DNA, 15 bp, Homo sapiens
tgggtgggggaaggg

SEQ ID NO: 1206634 - DNA, 15 bp, Homo sapiens
gtgggtgggggaagg

SEQ ID NO: 1206635 - DNA, 15 bp, Homo sapiens
agtgggtgggggaag

SEQ ID NO: 1206636 - DNA, 15 bp, Homo sapiens
cagtgggtgggggaa

SEQ ID NO: 1206637 - DNA, 15 bp, Homo sapiens
gcagtgggtggggga

SEQ ID NO: 1206638 - DNA, 15 bp, Homo sapiens
ggcagtgggtggggg

SEQ ID NO: 1206639 - DNA, 15 bp, Homo sapiens
gggcagtgggtgggg

SEQ ID NO: 1206640 - DNA, 15 bp, Homo sapiens
ggggcagtgggtggg

SEQ ID NO: 1206641 - DNA, 15 bp, Homo sapiens
gggggcagtgggtgg

SEQ ID NO: 1206642 - DNA, 15 bp, Homo sapiens
tgggggcagtgggtg

SEQ ID NO: 1206643 - DNA, 15 bp, Homo sapiens
gtgggggcagtgggt

SEQ ID NO: 1206644 - DNA, 15 bp, Homo sapiens
ggtgggggcagtggg

SEQ ID NO: 1206645 - DNA, 15 bp, Homo sapiens
tggtgggggcagtgg

SEQ ID NO: 1206646 - DNA, 15 bp, Homo sapiens
gtggtgggggcagtg

SEQ ID NO: 1206647 - DNA, 15 bp, Homo sapiens
ggtggtgggggcagt

SEQ ID NO: 1206648 - DNA, 15 bp, Homo sapiens
cggtggtgggggcag

SEQ ID NO: 1206649 - DNA, 15 bp, Homo sapiens
gcggtggtgggggca

SEQ ID NO: 1206650 - DNA, 15 bp, Homo sapiens
ggcggtggtgggggc

SEQ ID NO: 1206651 - DNA, 15 bp, Homo sapiens
gggcggtggtggggg

SEQ ID NO: 1206652 - DNA, 15 bp, Homo sapiens
ggggcggtggtgggg

SEQ ID NO: 1206653 - DNA, 15 bp, Homo sapiens
gggggcggtggtggg

SEQ ID NO: 1206654 - DNA, 15 bp, Homo sapiens
tgggggcggtggtgg

SEQ ID NO: 1206655 - DNA, 15 bp, Homo sapiens
gtgggggcggtggtg

SEQ ID NO: 1206656 - DNA, 15 bp, Homo sapiens
cgtgggggcggtggt

SEQ ID NO: 1206657 - DNA, 15 bp, Homo sapiens
gcgtgggggcggtgg

SEQ ID NO: 1206658 - DNA, 15 bp, Homo sapiens
ggcgtgggggcggtg

SEQ ID NO: 1206659 - DNA, 15 bp, Homo sapiens
gggcgtgggggcggt

SEQ ID NO: 1206660 - DNA, 15 bp, Homo sapiens
ggggcgtgggggcgg

SEQ ID NO: 1206661 - DNA, 15 bp, Homo sapiens
gggggcgtgggggcg

SEQ ID NO: 1206662 - DNA, 15 bp, Homo sapiens
gggggtgggggcgtg

SEQ ID NO: 1206663 - DNA, 15 bp, Homo sapiens
tgggggtgggggcgt

SEQ ID NO: 1206664 - DNA, 15 bp, Homo sapiens
atgggggtgggggcg

SEQ ID NO: 1206665 - DNA, 15 bp, Homo sapiens
gatgggggtgggggc

SEQ ID NO: 1206666 - DNA, 15 bp, Homo sapiens
agatgggggtggggg

SEQ ID NO: 1206667 - DNA, 15 bp, Homo sapiens
gagatgggggtgggg

SEQ ID NO: 1206668 - DNA, 15 bp, Homo sapiens
ggagatgggggtggg

SEQ ID NO: 1206669 - DNA, 15 bp, Homo sapiens
tggagatgggggtgg

SEQ ID NO: 1206670 - DNA, 15 bp, Homo sapiens
ctggagatgggggtg

SEQ ID NO: 1206671 - DNA, 15 bp, Homo sapiens
tctggagatgggggt

SEQ ID NO: 1206672 - DNA, 15 bp, Homo sapiens
atctggagatggggg

SEQ ID NO: 1206673 - DNA, 15 bp, Homo sapiens
gatctggagatgggg

SEQ ID NO: 1206674 - DNA, 15 bp, Homo sapiens
tgatctggagatggg

SEQ ID NO: 1206675 - DNA, 15 bp, Homo sapiens
ctgatctggagatgg

SEQ ID NO: 1206676 - DNA, 15 bp, Homo sapiens
tctgatctggagatg

SEQ ID NO: 1206677 - DNA, 15 bp, Homo sapiens
ttctgatctggagat

SEQ ID NO: 1206678 - DNA, 15 bp, Homo sapiens
gttctgatctggaga

SEQ ID NO: 1206679 - DNA, 15 bp, Homo sapiens
ggttctgatctggag

SEQ ID NO: 1206680 - DNA, 15 bp, Homo sapiens
aggttctgatctgga

SEQ ID NO: 1206681 - DNA, 15 bp, Homo sapiens
caggttctgatctgg

SEQ ID NO: 1206682 - DNA, 15 bp, Homo sapiens
ccaggttctgatctg

SEQ ID NO: 1206683 - DNA, 15 bp, Homo sapiens
cccaggttctgatct

SEQ ID NO: 1206684 - DNA, 15 bp, Homo sapiens
ccccaggttctgatc

SEQ ID NO: 1206685 - DNA, 15 bp, Homo sapiens
gccccaggttctgat

SEQ ID NO: 1206686 - DNA, 15 bp, Homo sapiens
agccccaggttctga

SEQ ID NO: 1206687 - DNA, 15 bp, Homo sapiens
cagccccaggttctg

SEQ ID NO: 1206688 - DNA, 15 bp, Homo sapiens
acagccccaggttct

SEQ ID NO: 1206689 - DNA, 15 bp, Homo sapiens
cacagccccaggttc

SEQ ID NO: 1206690 - DNA, 15 bp, Homo sapiens
gcacagccccaggtt

SEQ ID NO: 1206691 - DNA, 15 bp, Homo sapiens
tgcacagccccaggt

SEQ ID NO: 1206692 - DNA, 15 bp, Homo sapiens
ttgcacagccccagg

SEQ ID NO: 1206693 - DNA, 15 bp, Homo sapiens
attgcacagccccag

SEQ ID NO: 1206694 - DNA, 15 bp, Homo sapiens
aattgcacagcccca

SEQ ID NO: 1206695 - DNA, 15 bp, Homo sapiens
aaattgcacagcccc

SEQ ID NO: 1206696 - DNA, 15 bp, Homo sapiens
aaaattgcacagccc

SEQ ID NO: 1206697 - DNA, 15 bp, Homo sapiens
taaaattgcacagcc

SEQ ID NO: 1206698 - DNA, 15 bp, Homo sapiens
ttaaaattgcacagc

SEQ ID NO: 1206699 - DNA, 15 bp, Homo sapiens
tttaaaattgcacag

SEQ ID NO: 1206700 - DNA, 15 bp, Homo sapiens
gtttaaaattgcaca

SEQ ID NO: 1206701 - DNA, 15 bp, Homo sapiens
cgtttaaaattgcac

SEQ ID NO: 1206702 - DNA, 15 bp, Homo sapiens
acgtttaaaattgca

SEQ ID NO: 1206703 - DNA, 15 bp, Homo sapiens
aacgtttaaaattgc

SEQ ID NO: 1206704 - DNA, 15 bp, Homo sapiens
caacgtttaaaattg

SEQ ID NO: 1206705 - DNA, 15 bp, Homo sapiens
acaacgtttaaaatt

SEQ ID NO: 1206706 - DNA, 15 bp, Homo sapiens
tacaacgtttaaaat

SEQ ID NO: 1206707 - DNA, 15 bp, Homo sapiens
ctacaacgtttaaaa

SEQ ID NO: 1206708 - DNA, 15 bp, Homo sapiens
gctacaacgtttaaa

SEQ ID NO: 1206709 - DNA, 15 bp, Homo sapiens
ggctacaacgtttaa

SEQ ID NO: 1206710 - DNA, 15 bp, Homo sapiens
tggctacaacgttta

SEQ ID NO: 1206711 - DNA, 15 bp, Homo sapiens
gtggctacaacgttt

SEQ ID NO: 1206712 - DNA, 15 bp, Homo sapiens
agtggctacaacgtt

SEQ ID NO: 1206713 - DNA, 15 bp, Homo sapiens
aagtggctacaacgt

SEQ ID NO: 1206714 - DNA, 15 bp, Homo sapiens
caagtggctacaacg

SEQ ID NO: 1206715 - DNA, 15 bp, Homo sapiens
gcaagtggctacaac

SEQ ID NO: 1206716 - DNA, 15 bp, Homo sapiens
agcaagtggctacaa

SEQ ID NO: 1206717 - DNA, 15 bp, Homo sapiens
tagcaagtggctaca

SEQ ID NO: 1206718 - DNA, 15 bp, Homo sapiens
gtagcaagtggctac

SEQ ID NO: 1206719 - DNA, 15 bp, Homo sapiens
agtagcaagtggcta

SEQ ID NO: 1206720 - DNA, 15 bp, Homo sapiens
aagtagcaagtggct

SEQ ID NO: 1206721 - DNA, 15 bp, Homo sapiens
caagtagcaagtggc

SEQ ID NO: 1206722 - DNA, 15 bp, Homo sapiens
ccaagtagcaagtgg

SEQ ID NO: 1206723 - DNA, 15 bp, Homo sapiens
cccaagtagcaagtg

SEQ ID NO: 1206724 - DNA, 15 bp, Homo sapiens
acccaagtagcaagt

SEQ ID NO: 1206725 - DNA, 15 bp, Homo sapiens
tacccaagtagcaag

SEQ ID NO: 1206726 - DNA, 15 bp, Homo sapiens
ctacccaagtagcaa

SEQ ID NO: 1206727 - DNA, 15 bp, Homo sapiens
actacccaagtagca

SEQ ID NO: 1206728 - DNA, 15 bp, Homo sapiens
aactacccaagtagc

SEQ ID NO: 1206729 - DNA, 15 bp, Homo sapiens
caactacccaagtag

SEQ ID NO: 1206730 - DNA, 15 bp, Homo sapiens
tcaactacccaagta

SEQ ID NO: 1206731 - DNA, 15 bp, Homo sapiens
ttcaactacccaagt

SEQ ID NO: 1206732 - DNA, 15 bp, Homo sapiens
cttcaactacccaag

SEQ ID NO: 1206733 - DNA, 15 bp, Homo sapiens
acttcaactacccaa

SEQ ID NO: 1206734 - DNA, 15 bp, Homo sapiens
aacttcaactaccca

SEQ ID NO: 1206735 - DNA, 15 bp, Homo sapiens
gaacttcaactaccc

SEQ ID NO: 1206736 - DNA, 15 bp, Homo sapiens
tgaacttcaactacc

SEQ ID NO: 1206737 - DNA, 15 bp, Homo sapiens
ctgaacttcaactac

SEQ ID NO: 1206738 - DNA, 15 bp, Homo sapiens
actgaacttcaacta

SEQ ID NO: 1206739 - DNA, 15 bp, Homo sapiens
gactgaacttcaact

SEQ ID NO: 1206740 - DNA, 15 bp, Homo sapiens
agactgaacttcaac

SEQ ID NO: 1206741 - DNA, 15 bp, Homo sapiens
gagactgaacttcaa

SEQ ID NO: 1206742 - DNA, 15 bp, Homo sapiens
tgagactgaacttca

SEQ ID NO: 1206743 - DNA, 15 bp, Homo sapiens
ctgagactgaacttc

SEQ ID NO: 1206744 - DNA, 15 bp, Homo sapiens
gctgagactgaactt

SEQ ID NO: 1206745 - DNA, 15 bp, Homo sapiens
ggctgagactgaact

SEQ ID NO: 1206746 - DNA, 15 bp, Homo sapiens
tggctgagactgaac

SEQ ID NO: 1206747 - DNA, 15 bp, Homo sapiens
ctggctgagactgaa

SEQ ID NO: 1206748 - DNA, 15 bp, Homo sapiens
cctggctgagactga

SEQ ID NO: 1206749 - DNA, 15 bp, Homo sapiens
acctggctgagactg

SEQ ID NO: 1206750 - DNA, 15 bp, Homo sapiens
aacctggctgagact

SEQ ID NO: 1206751 - DNA, 15 bp, Homo sapiens
caacctggctgagac

SEQ ID NO: 1206752 - DNA, 15 bp, Homo sapiens
ccaacctggctgaga

SEQ ID NO: 1206753 - DNA, 15 bp, Homo sapiens
tccaacctggctgag

SEQ ID NO: 1206754 - DNA, 15 bp, Homo sapiens
ctccaacctggctga

SEQ ID NO: 1206755 - DNA, 15 bp, Homo sapiens
actccaacctggctg

SEQ ID NO: 1206756 - DNA, 15 bp, Homo sapiens
gactccaacctggct

SEQ ID NO: 1206757 - DNA, 15 bp, Homo sapiens
ggactccaacctggc

SEQ ID NO: 1206758 - DNA, 15 bp, Homo sapiens
aggactccaacctgg

SEQ ID NO: 1206759 - DNA, 15 bp, Homo sapiens
caggactccaacctg

SEQ ID NO: 1206760 - DNA, 15 bp, Homo sapiens
ccaggactccaacct

SEQ ID NO: 1206761 - DNA, 15 bp, Homo sapiens
tccaggactccaacc

SEQ ID NO: 1206762 - DNA, 15 bp, Homo sapiens
gtccaggactccaac

SEQ ID NO: 1206763 - DNA, 15 bp, Homo sapiens
agtccaggactccaa

SEQ ID NO: 1206764 - DNA, 15 bp, Homo sapiens
gagtccaggactcca

SEQ ID NO: 1206765 - DNA, 15 bp, Homo sapiens
agagtccaggactcc

SEQ ID NO: 1206766 - DNA, 15 bp, Homo sapiens
cagagtccaggactc

SEQ ID NO: 1206767 - DNA, 15 bp, Homo sapiens
ccagagtccaggact

SEQ ID NO: 1206768 - DNA, 15 bp, Homo sapiens
gccagagtccaggac

SEQ ID NO: 1206769 - DNA, 15 bp, Homo sapiens
ggccagagtccagga

SEQ ID NO: 1206770 - DNA, 15 bp, Homo sapiens
gggccagagtccagg

SEQ ID NO: 1206771 - DNA, 15 bp, Homo sapiens
ggggccagagtccag

SEQ ID NO: 1206772 - DNA, 15 bp, Homo sapiens
aggggccagagtcca

SEQ ID NO: 1206773 - DNA, 15 bp, Homo sapiens
gaggggccagagtcc

SEQ ID NO: 1206774 - DNA, 15 bp, Homo sapiens
agaggggccagagtc

SEQ ID NO: 1206775 - DNA, 15 bp, Homo sapiens
aagaggggccagagt

SEQ ID NO: 1206776 - DNA, 15 bp, Homo sapiens
aaagaggggccagag

SEQ ID NO: 1206777 - DNA, 15 bp, Homo sapiens
aaaagaggggccaga

SEQ ID NO: 1206778 - DNA, 15 bp, Homo sapiens
taaaagaggggccag

SEQ ID NO: 1206779 - DNA, 15 bp, Homo sapiens
ataaaagaggggcca

SEQ ID NO: 1206780 - DNA, 15 bp, Homo sapiens
aataaaagaggggcc

SEQ ID NO: 1206781 - DNA, 15 bp, Homo sapiens
aaataaaagaggggc

SEQ ID NO: 1206782 - DNA, 15 bp, Homo sapiens
aaaataaaagagggg

SEQ ID NO: 1206783 - DNA, 15 bp, Homo sapiens
aaaaataaaagaggg

SEQ ID NO: 1206784 - DNA, 15 bp, Homo sapiens
ataaaaataaaagag

SEQ ID NO: 1206785 - DNA, 15 bp, Homo sapiens
aataaaaataaaaga

SEQ ID NO: 1206786 - DNA, 15 bp, Homo sapiens
aaataaaaataaaag

SEQ ID NO: 1206787 - DNA, 15 bp, Homo sapiens
ataaaaaataaaaat

SEQ ID NO: 1206788 - DNA, 15 bp, Homo sapiens
aaaaaaaaataaaaa

SEQ ID NO: 1206789 - DNA, 15 bp, Homo sapiens
caaaaaaaaataaaa

SEQ ID NO: 1206790 - DNA, 15 bp, Homo sapiens
tcaaaaaaaaataaa

SEQ ID NO: 1206791 - DNA, 15 bp, Homo sapiens
ctcaaaaaaaaataa

SEQ ID NO: 1206792 - DNA, 15 bp, Homo sapiens
tctgggcgacagagc

SEQ ID NO: 1206793 - DNA, 15 bp, Homo sapiens
gctccagtctgggcg

SEQ ID NO: 1206794 - DNA, 15 bp, Homo sapiens
cgctccagtctgggc

SEQ ID NO: 1206795 - DNA, 15 bp, Homo sapiens
gcgctccagtctggg

SEQ ID NO: 1206796 - DNA, 15 bp, Homo sapiens
tgcgctccagtctgg

SEQ ID NO: 1206797 - DNA, 15 bp, Homo sapiens
ctgcgctccagtctg

SEQ ID NO: 1206798 - DNA, 15 bp, Homo sapiens
actgcgctccagtct

SEQ ID NO: 1206799 - DNA, 15 bp, Homo sapiens
cactgcgctccagtc

SEQ ID NO: 1206800 - DNA, 15 bp, Homo sapiens
ccactgcgctccagt

SEQ ID NO: 1206801 - DNA, 15 bp, Homo sapiens
cgcaccactgcgctc

SEQ ID NO: 1206802 - DNA, 15 bp, Homo sapiens
tcgcaccactgcgct

SEQ ID NO: 1206803 - DNA, 15 bp, Homo sapiens
atcgcaccactgcgc

SEQ ID NO: 1206804 - DNA, 15 bp, Homo sapiens
gatcgcaccactgcg

SEQ ID NO: 1206805 - DNA, 15 bp, Homo sapiens
aggaggcagagcttg

SEQ ID NO: 1206806 - DNA, 15 bp, Homo sapiens
caggaggcagagctt

SEQ ID NO: 1206807 - DNA, 15 bp, Homo sapiens
tcaggaggcagagct

SEQ ID NO: 1206808 - DNA, 15 bp, Homo sapiens
ctcaggaggcagagc

SEQ ID NO: 1206809 - DNA, 15 bp, Homo sapiens
aactcaggaggcaga

SEQ ID NO: 1206810 - DNA, 15 bp, Homo sapiens
gaactcaggaggcag

SEQ ID NO: 1206811 - DNA, 15 bp, Homo sapiens
tgaactcaggaggca

SEQ ID NO: 1206812 - DNA, 15 bp, Homo sapiens
gtgaactcaggaggc

SEQ ID NO: 1206813 - DNA, 15 bp, Homo sapiens
cgtgaactcaggagg

SEQ ID NO: 1206814 - DNA, 15 bp, Homo sapiens
gcgtgaactcaggag

SEQ ID NO: 1206815 - DNA, 15 bp, Homo sapiens
ggcgtgaactcagga

SEQ ID NO: 1206816 - DNA, 15 bp, Homo sapiens
tggcgtgaactcagg

SEQ ID NO: 1206817 - DNA, 15 bp, Homo sapiens
atggcgtgaactcag

SEQ ID NO: 1206818 - DNA, 15 bp, Homo sapiens
aatggcgtgaactca

SEQ ID NO: 1206819 - DNA, 15 bp, Homo sapiens
gaatggcgtgaactc

SEQ ID NO: 1206820 - DNA, 15 bp, Homo sapiens
ggaatggcgtgaact

SEQ ID NO: 1206821 - DNA, 15 bp, Homo sapiens
gggaatggcgtgaac

SEQ ID NO: 1206822 - DNA, 15 bp, Homo sapiens
ggggaatggcgtgaa

SEQ ID NO: 1206823 - DNA, 15 bp, Homo sapiens
gggggaatggcgtga

SEQ ID NO: 1206824 - DNA, 15 bp, Homo sapiens
cgggggaatggcgtg

SEQ ID NO: 1206825 - DNA, 15 bp, Homo sapiens
gcgggggaatggcgt

SEQ ID NO: 1206826 - DNA, 15 bp, Homo sapiens
ggcgggggaatggcg

SEQ ID NO: 1206827 - DNA, 15 bp, Homo sapiens
aggcgggggaatggc

SEQ ID NO: 1206828 - DNA, 15 bp, Homo sapiens
gaggcgggggaatgg

SEQ ID NO: 1206829 - DNA, 15 bp, Homo sapiens
tgaggcgggggaatg

SEQ ID NO: 1206830 - DNA, 15 bp, Homo sapiens
ctgaggcgggggaat

SEQ ID NO: 1206831 - DNA, 15 bp, Homo sapiens
gctgaggcgggggaa

SEQ ID NO: 1206832 - DNA, 15 bp, Homo sapiens
ggctgaggcggggga

SEQ ID NO: 1206833 - DNA, 15 bp, Homo sapiens
aggctgaggcggggg

SEQ ID NO: 1206834 - DNA, 15 bp, Homo sapiens
gaggctgaggcgggg

SEQ ID NO: 1206835 - DNA, 15 bp, Homo sapiens
cgggaggctgaggcg

SEQ ID NO: 1206836 - DNA, 15 bp, Homo sapiens
cgggtgtggtggcgg

SEQ ID NO: 1206837 - DNA, 15 bp, Homo sapiens
gaaattagccgggtg

SEQ ID NO: 1206838 - DNA, 15 bp, Homo sapiens
agaaattagccgggt

SEQ ID NO: 1206839 - DNA, 15 bp, Homo sapiens
aagaaattagccggg

SEQ ID NO: 1206840 - DNA, 15 bp, Homo sapiens
caagaaattagccgg

SEQ ID NO: 1206841 - DNA, 15 bp, Homo sapiens
acaagaaattagccg

SEQ ID NO: 1206842 - DNA, 15 bp, Homo sapiens
tacaagaaattagcc

SEQ ID NO: 1206843 - DNA, 15 bp, Homo sapiens
atacaagaaattagc

SEQ ID NO: 1206844 - DNA, 15 bp, Homo sapiens
aatacaagaaattag

SEQ ID NO: 1206845 - DNA, 15 bp, Homo sapiens
aaatacaagaaatta

SEQ ID NO: 1206846 - DNA, 15 bp, Homo sapiens
aaaatacaagaaatt

SEQ ID NO: 1206847 - DNA, 15 bp, Homo sapiens
aaaaatacaagaaat

SEQ ID NO: 1206848 - DNA, 15 bp, Homo sapiens
aaaaaatacaagaaa

SEQ ID NO: 1206849 - DNA, 15 bp, Homo sapiens
taaaaaatacaagaa

SEQ ID NO: 1206850 - DNA, 15 bp, Homo sapiens
ctaaaaaatacaaga

SEQ ID NO: 1206851 - DNA, 15 bp, Homo sapiens
gggtgaaaccccatc

SEQ ID NO: 1206852 - DNA, 15 bp, Homo sapiens
agggtgaaaccccat

SEQ ID NO: 1206853 - DNA, 15 bp, Homo sapiens
cagggtgaaacccca

SEQ ID NO: 1206854 - DNA, 15 bp, Homo sapiens
acagggtgaaacccc

SEQ ID NO: 1206855 - DNA, 15 bp, Homo sapiens
taacagggtgaaacc

SEQ ID NO: 1206856 - DNA, 15 bp, Homo sapiens
ctaacagggtgaaac

SEQ ID NO: 1206857 - DNA, 15 bp, Homo sapiens
gctaacagggtgaaa

SEQ ID NO: 1206858 - DNA, 15 bp, Homo sapiens
ggctaacagggtgaa

SEQ ID NO: 1206859 - DNA, 15 bp, Homo sapiens
tggctaacagggtga

SEQ ID NO: 1206860 - DNA, 15 bp, Homo sapiens
ctggctaacagggtg

SEQ ID NO: 1206861 - DNA, 15 bp, Homo sapiens
cctggctaacagggt

SEQ ID NO: 1206862 - DNA, 15 bp, Homo sapiens
tcctggctaacaggg

SEQ ID NO: 1206863 - DNA, 15 bp, Homo sapiens
atcctggctaacagg

SEQ ID NO: 1206864 - DNA, 15 bp, Homo sapiens
catcctggctaacag

SEQ ID NO: 1206865 - DNA, 15 bp, Homo sapiens
tagaccatcctggct

SEQ ID NO: 1206866 - DNA, 15 bp, Homo sapiens
ctagaccatcctggc

SEQ ID NO: 1206867 - DNA, 15 bp, Homo sapiens
tctagaccatcctgg

SEQ ID NO: 1206868 - DNA, 15 bp, Homo sapiens
atctagaccatcctg

SEQ ID NO: 1206869 - DNA, 15 bp, Homo sapiens
aatctagaccatcct

SEQ ID NO: 1206870 - DNA, 15 bp, Homo sapiens
aaatctagaccatcc

SEQ ID NO: 1206871 - DNA, 15 bp, Homo sapiens
gaaatctagaccatc

SEQ ID NO: 1206872 - DNA, 15 bp, Homo sapiens
ggaaatctagaccat

SEQ ID NO: 1206873 - DNA, 15 bp, Homo sapiens
aggaaatctagacca

SEQ ID NO: 1206874 - DNA, 15 bp, Homo sapiens
caggaaatctagacc

SEQ ID NO: 1206875 - DNA, 15 bp, Homo sapiens
tcaggaaatctagac

SEQ ID NO: 1206876 - DNA, 15 bp, Homo sapiens
gtcaggaaatctaga

SEQ ID NO: 1206877 - DNA, 15 bp, Homo sapiens
ggtcaggaaatctag

SEQ ID NO: 1206878 - DNA, 15 bp, Homo sapiens
aggtcaggaaatcta

SEQ ID NO: 1206879 - DNA, 15 bp, Homo sapiens
aaggtcaggaaatct

SEQ ID NO: 1206880 - DNA, 15 bp, Homo sapiens
taaggtcaggaaatc

SEQ ID NO: 1206881 - DNA, 15 bp, Homo sapiens
ataaggtcaggaaat

SEQ ID NO: 1206882 - DNA, 15 bp, Homo sapiens
cataaggtcaggaaa

SEQ ID NO: 1206883 - DNA, 15 bp, Homo sapiens
tcataaggtcaggaa

SEQ ID NO: 1206884 - DNA, 15 bp, Homo sapiens
caggcggatcataag

SEQ ID NO: 1206885 - DNA, 15 bp, Homo sapiens
gcaggcggatcataa

SEQ ID NO: 1206886 - DNA, 15 bp, Homo sapiens
ggcaggcggatcata

SEQ ID NO: 1206887 - DNA, 15 bp, Homo sapiens
cccgaggcaggcgga

SEQ ID NO: 1206888 - DNA, 15 bp, Homo sapiens
gcccgaggcaggcgg

SEQ ID NO: 1206889 - DNA, 15 bp, Homo sapiens
ggcccgaggcaggcg

SEQ ID NO: 1206890 - DNA, 15 bp, Homo sapiens
aggcccgaggcaggc

SEQ ID NO: 1206891 - DNA, 15 bp, Homo sapiens
gaggcccgaggcagg

SEQ ID NO: 1206892 - DNA, 15 bp, Homo sapiens
ggaggcccgaggcag

SEQ ID NO: 1206893 - DNA, 15 bp, Homo sapiens
gggaggcccgaggca

SEQ ID NO: 1206894 - DNA, 15 bp, Homo sapiens
tgggaggcccgaggc

SEQ ID NO: 1206895 - DNA, 15 bp, Homo sapiens
ttgggaggcccgagg

SEQ ID NO: 1206896 - DNA, 15 bp, Homo sapiens
tttgggaggcccgag

SEQ ID NO: 1206897 - DNA, 15 bp, Homo sapiens
ctttgggaggcccga

SEQ ID NO: 1206898 - DNA, 15 bp, Homo sapiens
actttgggaggcccg

SEQ ID NO: 1206899 - DNA, 15 bp, Homo sapiens
tcctgtcatcccagc

SEQ ID NO: 1206900 - DNA, 15 bp, Homo sapiens
ctcctgtcatcccag

SEQ ID NO: 1206901 - DNA, 15 bp, Homo sapiens
actcctgtcatccca

SEQ ID NO: 1206902 - DNA, 15 bp, Homo sapiens
cactcctgtcatccc

SEQ ID NO: 1206903 - DNA, 15 bp, Homo sapiens
tcactcctgtcatcc

SEQ ID NO: 1206904 - DNA, 15 bp, Homo sapiens
ctcactcctgtcatc

SEQ ID NO: 1206905 - DNA, 15 bp, Homo sapiens
gctcactcctgtcat

SEQ ID NO: 1206906 - DNA, 15 bp, Homo sapiens
ggctcactcctgtca

SEQ ID NO: 1206907 - DNA, 15 bp, Homo sapiens
tggctcactcctgtc

SEQ ID NO: 1206908 - DNA, 15 bp, Homo sapiens
gcggtggctcactcc

SEQ ID NO: 1206909 - DNA, 15 bp, Homo sapiens
cgcggtggctcactc

SEQ ID NO: 1206910 - DNA, 15 bp, Homo sapiens
gcgcggtggctcact

SEQ ID NO: 1206911 - DNA, 15 bp, Homo sapiens
aagaggccgggcgcg

SEQ ID NO: 1206912 - DNA, 15 bp, Homo sapiens
aaaagaggccgggcg

SEQ ID NO: 1206913 - DNA, 15 bp, Homo sapiens
aaaaagaggccgggc

SEQ ID NO: 1206914 - DNA, 15 bp, Homo sapiens
aaaaaagaggccggg

SEQ ID NO: 1206915 - DNA, 15 bp, Homo sapiens
aaaaaaagaggccgg

SEQ ID NO: 1206916 - DNA, 15 bp, Homo sapiens
aaaaaaaagaggccg

SEQ ID NO: 1206917 - DNA, 15 bp, Homo sapiens
aaaaaaaaagaggcc

SEQ ID NO: 1206918 - DNA, 15 bp, Homo sapiens
aaaaaaaaaagaggc

SEQ ID NO: 1206919 - DNA, 15 bp, Homo sapiens
taaaaaaaaaaaaag

SEQ ID NO: 1206920 - DNA, 15 bp, Homo sapiens
tgtctaaaaaaaaaa

SEQ ID NO: 1206921 - DNA, 15 bp, Homo sapiens
ctgtctaaaaaaaaa

SEQ ID NO: 1206922 - DNA, 15 bp, Homo sapiens
actgtctaaaaaaaa

SEQ ID NO: 1206923 - DNA, 15 bp, Homo sapiens
gactgtctaaaaaaa

SEQ ID NO: 1206924 - DNA, 15 bp, Homo sapiens
agactgtctaaaaaa

SEQ ID NO: 1206925 - DNA, 15 bp, Homo sapiens
gagactgtctaaaaa

SEQ ID NO: 1206926 - DNA, 15 bp, Homo sapiens
agagactgtctaaaa

SEQ ID NO: 1206927 - DNA, 15 bp, Homo sapiens
cagagactgtctaaa

SEQ ID NO: 1206928 - DNA, 15 bp, Homo sapiens
acagagactgtctaa

SEQ ID NO: 1206929 - DNA, 15 bp, Homo sapiens
gacagagactgtcta

SEQ ID NO: 1206930 - DNA, 15 bp, Homo sapiens
tgacagagactgtct

SEQ ID NO: 1206931 - DNA, 15 bp, Homo sapiens
gtgacagagactgtc

SEQ ID NO: 1206932 - DNA, 15 bp, Homo sapiens
ggtgacagagactgt

SEQ ID NO: 1206933 - DNA, 15 bp, Homo sapiens
gggtgacagagactg

SEQ ID NO: 1206934 - DNA, 15 bp, Homo sapiens
tgggtgacagagact

SEQ ID NO: 1206935 - DNA, 15 bp, Homo sapiens
tagcctgggtgacag

SEQ ID NO: 1206936 - DNA, 15 bp, Homo sapiens
cactctagcctgggt

SEQ ID NO: 1206937 - DNA, 15 bp, Homo sapiens
cgcactctagcctgg

SEQ ID NO: 1206938 - DNA, 15 bp, Homo sapiens
tcgcactctagcctg

SEQ ID NO: 1206939 - DNA, 15 bp, Homo sapiens
atcgcactctagcct

SEQ ID NO: 1206940 - DNA, 15 bp, Homo sapiens
catcgcactctagcc

SEQ ID NO: 1206941 - DNA, 15 bp, Homo sapiens
ccatcgcactctagc

SEQ ID NO: 1206942 - DNA, 15 bp, Homo sapiens
accatcgcactctag

SEQ ID NO: 1206943 - DNA, 15 bp, Homo sapiens
caccatcgcactcta

SEQ ID NO: 1206944 - DNA, 15 bp, Homo sapiens
gcaccatcgcactct

SEQ ID NO: 1206945 - DNA, 15 bp, Homo sapiens
cgcaccatcgcactc

SEQ ID NO: 1206946 - DNA, 15 bp, Homo sapiens
tcgcaccatcgcact

SEQ ID NO: 1206947 - DNA, 15 bp, Homo sapiens
atcgcaccatcgcac

SEQ ID NO: 1206948 - DNA, 15 bp, Homo sapiens
gatcgcaccatcgca

SEQ ID NO: 1206949 - DNA, 15 bp, Homo sapiens
agatcgcaccatcgc

SEQ ID NO: 1206950 - DNA, 15 bp, Homo sapiens
gagatcgcaccatcg

SEQ ID NO: 1206951 - DNA, 15 bp, Homo sapiens
cgagatcgcaccatc

SEQ ID NO: 1206952 - DNA, 15 bp, Homo sapiens
gaaggtggaggttgc

SEQ ID NO: 1206953 - DNA, 15 bp, Homo sapiens
ggaaggtggaggttg

SEQ ID NO: 1206954 - DNA, 15 bp, Homo sapiens
cggaaggtggaggtt

SEQ ID NO: 1206955 - DNA, 15 bp, Homo sapiens
ccggaaggtggaggt

SEQ ID NO: 1206956 - DNA, 15 bp, Homo sapiens
cccggaaggtggagg

SEQ ID NO: 1206957 - DNA, 15 bp, Homo sapiens
acccggaaggtggag

SEQ ID NO: 1206958 - DNA, 15 bp, Homo sapiens
aacccggaaggtgga

SEQ ID NO: 1206959 - DNA, 15 bp, Homo sapiens
gaacccggaaggtgg

SEQ ID NO: 1206960 - DNA, 15 bp, Homo sapiens
tgaacccggaaggtg

SEQ ID NO: 1206961 - DNA, 15 bp, Homo sapiens
ttgaacccggaaggt

SEQ ID NO: 1206962 - DNA, 15 bp, Homo sapiens
gcttgaacccggaag

SEQ ID NO: 1206963 - DNA, 15 bp, Homo sapiens
cgcttgaacccggaa

SEQ ID NO: 1206964 - DNA, 15 bp, Homo sapiens
tcgcttgaacccgga

SEQ ID NO: 1206965 - DNA, 15 bp, Homo sapiens
atactcaggaggctg

SEQ ID NO: 1206966 - DNA, 15 bp, Homo sapiens
gatactcaggaggct

SEQ ID NO: 1206967 - DNA, 15 bp, Homo sapiens
agatactcaggaggc

SEQ ID NO: 1206968 - DNA, 15 bp, Homo sapiens
cagatactcaggagg

SEQ ID NO: 1206969 - DNA, 15 bp, Homo sapiens
ccagatactcaggag

SEQ ID NO: 1206970 - DNA, 15 bp, Homo sapiens
cccagatactcagga

SEQ ID NO: 1206971 - DNA, 15 bp, Homo sapiens
tcccagatactcagg

SEQ ID NO: 1206972 - DNA, 15 bp, Homo sapiens
atcccagatactcag

SEQ ID NO: 1206973 - DNA, 15 bp, Homo sapiens
aatcccagatactca

SEQ ID NO: 1206974 - DNA, 15 bp, Homo sapiens
taatcccagatactc

SEQ ID NO: 1206975 - DNA, 15 bp, Homo sapiens
gtaatcccagatact

SEQ ID NO: 1206976 - DNA, 15 bp, Homo sapiens
tgtaatcccagatac

SEQ ID NO: 1206977 - DNA, 15 bp, Homo sapiens
ctgtaatcccagata

SEQ ID NO: 1206978 - DNA, 15 bp, Homo sapiens
cctgtaatcccagat

SEQ ID NO: 1206979 - DNA, 15 bp, Homo sapiens
gcacctgtaatccca

SEQ ID NO: 1206980 - DNA, 15 bp, Homo sapiens
ggcacctgtaatccc

SEQ ID NO: 1206981 - DNA, 15 bp, Homo sapiens
aggcacctgtaatcc

SEQ ID NO: 1206982 - DNA, 15 bp, Homo sapiens
acaggcacctgtaat

SEQ ID NO: 1206983 - DNA, 15 bp, Homo sapiens
cacaggcacctgtaa

SEQ ID NO: 1206984 - DNA, 15 bp, Homo sapiens
tcacaggcacctgta

SEQ ID NO: 1206985 - DNA, 15 bp, Homo sapiens
gtcacaggcacctgt

SEQ ID NO: 1206986 - DNA, 15 bp, Homo sapiens
ggtcacaggcacctg

SEQ ID NO: 1206987 - DNA, 15 bp, Homo sapiens
tggtcacaggcacct

SEQ ID NO: 1206988 - DNA, 15 bp, Homo sapiens
gtggtcacaggcacc

SEQ ID NO: 1206989 - DNA, 15 bp, Homo sapiens
cgtggtcacaggcac

SEQ ID NO: 1206990 - DNA, 15 bp, Homo sapiens
gcgtggtcacaggca

SEQ ID NO: 1206991 - DNA, 15 bp, Homo sapiens
ggcgtggtcacaggc

SEQ ID NO: 1206992 - DNA, 15 bp, Homo sapiens
gggcgtggtcacagg

SEQ ID NO: 1206993 - DNA, 15 bp, Homo sapiens
cgggcgtggtcacag

SEQ ID NO: 1206994 - DNA, 15 bp, Homo sapiens
ccgggcgtggtcaca

SEQ ID NO: 1206995 - DNA, 15 bp, Homo sapiens
gccgggcgtggtcac

SEQ ID NO: 1206996 - DNA, 15 bp, Homo sapiens
agccgggcgtggtca

SEQ ID NO: 1206997 - DNA, 15 bp, Homo sapiens
cagccgggcgtggtc

SEQ ID NO: 1206998 - DNA, 15 bp, Homo sapiens
atacaaaaatcagcc

SEQ ID NO: 1206999 - DNA, 15 bp, Homo sapiens
aatacaaaaatcagc

SEQ ID NO: 1207000 - DNA, 15 bp, Homo sapiens
aaatacaaaaatcag

SEQ ID NO: 1207001 - DNA, 15 bp, Homo sapiens
aaaatacaaaaatca

SEQ ID NO: 1207002 - DNA, 15 bp, Homo sapiens
aaaaatacaaaaatc

SEQ ID NO: 1207003 - DNA, 15 bp, Homo sapiens
accaatgtggtgaaa

SEQ ID NO: 1207004 - DNA, 15 bp, Homo sapiens
gaccaatgtggtgaa

SEQ ID NO: 1207005 - DNA, 15 bp, Homo sapiens
tgaccaatgtggtga

SEQ ID NO: 1207006 - DNA, 15 bp, Homo sapiens
ctgaccaatgtggtg

SEQ ID NO: 1207007 - DNA, 15 bp, Homo sapiens
cctgaccaatgtggt

SEQ ID NO: 1207008 - DNA, 15 bp, Homo sapiens
gcctgaccaatgtgg

SEQ ID NO: 1207009 - DNA, 15 bp, Homo sapiens
agcctgaccaatgtg

SEQ ID NO: 1207010 - DNA, 15 bp, Homo sapiens
tagcctgaccaatgt

SEQ ID NO: 1207011 - DNA, 15 bp, Homo sapiens
ctagcctgaccaatg

SEQ ID NO: 1207012 - DNA, 15 bp, Homo sapiens
gctagcctgaccaat

SEQ ID NO: 1207013 - DNA, 15 bp, Homo sapiens
ggctagcctgaccaa

SEQ ID NO: 1207014 - DNA, 15 bp, Homo sapiens
aggctagcctgacca

SEQ ID NO: 1207015 - DNA, 15 bp, Homo sapiens
gaggctagcctgacc

SEQ ID NO: 1207016 - DNA, 15 bp, Homo sapiens
tgaggctagcctgac

SEQ ID NO: 1207017 - DNA, 15 bp, Homo sapiens
ttgaggctagcctga

SEQ ID NO: 1207018 - DNA, 15 bp, Homo sapiens
tttgaggctagcctg

SEQ ID NO: 1207019 - DNA, 15 bp, Homo sapiens
gtttgaggctagcct

SEQ ID NO: 1207020 - DNA, 15 bp, Homo sapiens
agtttgaggctagcc

SEQ ID NO: 1207021 - DNA, 15 bp, Homo sapiens
gagtttgaggctagc

SEQ ID NO: 1207022 - DNA, 15 bp, Homo sapiens
ggagtttgaggctag

SEQ ID NO: 1207023 - DNA, 15 bp, Homo sapiens
aggagtttgaggcta

SEQ ID NO: 1207024 - DNA, 15 bp, Homo sapiens
tcaggagtttgaggc

SEQ ID NO: 1207025 - DNA, 15 bp, Homo sapiens
gtcaggagtttgagg

SEQ ID NO: 1207026 - DNA, 15 bp, Homo sapiens
cggggtcaggagttt

SEQ ID NO: 1207027 - DNA, 15 bp, Homo sapiens
acggggtcaggagtt

SEQ ID NO: 1207028 - DNA, 15 bp, Homo sapiens
cacggggtcaggagt

SEQ ID NO: 1207029 - DNA, 15 bp, Homo sapiens
tcacggggtcaggag

SEQ ID NO: 1207030 - DNA, 15 bp, Homo sapiens
atcacggggtcagga

SEQ ID NO: 1207031 - DNA, 15 bp, Homo sapiens
gatcacggggtcagg

SEQ ID NO: 1207032 - DNA, 15 bp, Homo sapiens
ggatcacggggtcag

SEQ ID NO: 1207033 - DNA, 15 bp, Homo sapiens
aggatcacggggtca

SEQ ID NO: 1207034 - DNA, 15 bp, Homo sapiens
aaggatcacggggtc

SEQ ID NO: 1207035 - DNA, 15 bp, Homo sapiens
gaaggatcacggggt

SEQ ID NO: 1207036 - DNA, 15 bp, Homo sapiens
ggaaggatcacgggg

SEQ ID NO: 1207037 - DNA, 15 bp, Homo sapiens
cggaaggatcacggg

SEQ ID NO: 1207038 - DNA, 15 bp, Homo sapiens
gcggaaggatcacgg

SEQ ID NO: 1207039 - DNA, 15 bp, Homo sapiens
ggcggaaggatcacg

SEQ ID NO: 1207040 - DNA, 15 bp, Homo sapiens
aggcggaaggatcac

SEQ ID NO: 1207041 - DNA, 15 bp, Homo sapiens
gaggcggaaggatca

SEQ ID NO: 1207042 - DNA, 15 bp, Homo sapiens
tgaggcggaaggatc

SEQ ID NO: 1207043 - DNA, 15 bp, Homo sapiens
ctgaggcggaaggat

SEQ ID NO: 1207044 - DNA, 15 bp, Homo sapiens
gctgaggcggaagga

SEQ ID NO: 1207045 - DNA, 15 bp, Homo sapiens
ggctgaggcggaagg

SEQ ID NO: 1207046 - DNA, 15 bp, Homo sapiens
aggctgaggcggaag

SEQ ID NO: 1207047 - DNA, 15 bp, Homo sapiens
gaggctgaggcggaa

SEQ ID NO: 1207048 - DNA, 15 bp, Homo sapiens
gtcctgtaatcccag

SEQ ID NO: 1207049 - DNA, 15 bp, Homo sapiens
agtcctgtaatccca

SEQ ID NO: 1207050 - DNA, 15 bp, Homo sapiens
gagtcctgtaatccc

SEQ ID NO: 1207051 - DNA, 15 bp, Homo sapiens
agagtcctgtaatcc

SEQ ID NO: 1207052 - DNA, 15 bp, Homo sapiens
cagagtcctgtaatc

SEQ ID NO: 1207053 - DNA, 15 bp, Homo sapiens
ccagagtcctgtaat

SEQ ID NO: 1207054 - DNA, 15 bp, Homo sapiens
gccagagtcctgtaa

SEQ ID NO: 1207055 - DNA, 15 bp, Homo sapiens
ggccagagtcctgta

SEQ ID NO: 1207056 - DNA, 15 bp, Homo sapiens
gggccagagtcctgt

SEQ ID NO: 1207057 - DNA, 15 bp, Homo sapiens
tgggccagagtcctg

SEQ ID NO: 1207058 - DNA, 15 bp, Homo sapiens
atgggccagagtcct

SEQ ID NO: 1207059 - DNA, 15 bp, Homo sapiens
gatgggccagagtcc

SEQ ID NO: 1207060 - DNA, 15 bp, Homo sapiens
agatgggccagagtc

SEQ ID NO: 1207061 - DNA, 15 bp, Homo sapiens
aagatgggccagagt

SEQ ID NO: 1207062 - DNA, 15 bp, Homo sapiens
caagatgggccagag

SEQ ID NO: 1207063 - DNA, 15 bp, Homo sapiens
ccaagatgggccaga

SEQ ID NO: 1207064 - DNA, 15 bp, Homo sapiens
gccaagatgggccag

SEQ ID NO: 1207065 - DNA, 15 bp, Homo sapiens
agccaagatgggcca

SEQ ID NO: 1207066 - DNA, 15 bp, Homo sapiens
cagccaagatgggcc

SEQ ID NO: 1207067 - DNA, 15 bp, Homo sapiens
gcagccaagatgggc

SEQ ID NO: 1207068 - DNA, 15 bp, Homo sapiens
agcagccaagatggg

SEQ ID NO: 1207069 - DNA, 15 bp, Homo sapiens
cagcagccaagatgg

SEQ ID NO: 1207070 - DNA, 15 bp, Homo sapiens
gcagcagccaagatg

SEQ ID NO: 1207071 - DNA, 15 bp, Homo sapiens
ggcagcagccaagat

SEQ ID NO: 1207072 - DNA, 15 bp, Homo sapiens
tggcagcagccaaga

SEQ ID NO: 1207073 - DNA, 15 bp, Homo sapiens
ttggcagcagccaag

SEQ ID NO: 1207074 - DNA, 15 bp, Homo sapiens
attggcagcagccaa

SEQ ID NO: 1207075 - DNA, 15 bp, Homo sapiens
cattggcagcagcca

SEQ ID NO: 1207076 - DNA, 15 bp, Homo sapiens
acattggcagcagcc

SEQ ID NO: 1207077 - DNA, 15 bp, Homo sapiens
gacattggcagcagc

SEQ ID NO: 1207078 - DNA, 15 bp, Homo sapiens
ggacattggcagcag

SEQ ID NO: 1207079 - DNA, 15 bp, Homo sapiens
aggacattggcagca

SEQ ID NO: 1207080 - DNA, 15 bp, Homo sapiens
aaggacattggcagc

SEQ ID NO: 1207081 - DNA, 15 bp, Homo sapiens
gaaggacattggcag

SEQ ID NO: 1207082 - DNA, 15 bp, Homo sapiens
ggaaggacattggca

SEQ ID NO: 1207083 - DNA, 15 bp, Homo sapiens
aggaaggacattggc

SEQ ID NO: 1207084 - DNA, 15 bp, Homo sapiens
aaggaaggacattgg

SEQ ID NO: 1207085 - DNA, 15 bp, Homo sapiens
gaaggaaggacattg

SEQ ID NO: 1207086 - DNA, 15 bp, Homo sapiens
agaaggaaggacatt

SEQ ID NO: 1207087 - DNA, 15 bp, Homo sapiens
tagaaggaaggacat

SEQ ID NO: 1207088 - DNA, 15 bp, Homo sapiens
atagaaggaaggaca

SEQ ID NO: 1207089 - DNA, 15 bp, Homo sapiens
gatagaaggaaggac

SEQ ID NO: 1207090 - DNA, 15 bp, Homo sapiens
agatagaaggaagga

SEQ ID NO: 1207091 - DNA, 15 bp, Homo sapiens
aagatagaaggaagg

SEQ ID NO: 1207092 - DNA, 15 bp, Homo sapiens
caagatagaaggaag

SEQ ID NO: 1207093 - DNA, 15 bp, Homo sapiens
ccaagatagaaggaa

SEQ ID NO: 1207094 - DNA, 15 bp, Homo sapiens
accaagatagaagga

SEQ ID NO: 1207095 - DNA, 15 bp, Homo sapiens
aaccaagatagaagg

SEQ ID NO: 1207096 - DNA, 15 bp, Homo sapiens
aaaccaagatagaag

SEQ ID NO: 1207097 - DNA, 15 bp, Homo sapiens
aaaaccaagatagaa

SEQ ID NO: 1207098 - DNA, 15 bp, Homo sapiens
aaaaaccaagataga

SEQ ID NO: 1207099 - DNA, 15 bp, Homo sapiens
gaaaaaccaagatag

SEQ ID NO: 1207100 - DNA, 15 bp, Homo sapiens
ggaaaaaccaagata

SEQ ID NO: 1207101 - DNA, 15 bp, Homo sapiens
tggaaaaaccaagat

SEQ ID NO: 1207102 - DNA, 15 bp, Homo sapiens
gtggaaaaaccaaga

SEQ ID NO: 1207103 - DNA, 15 bp, Homo sapiens
tgtggaaaaaccaag

SEQ ID NO: 1207104 - DNA, 15 bp, Homo sapiens
ctgtggaaaaaccaa

SEQ ID NO: 1207105 - DNA, 15 bp, Homo sapiens
actgtggaaaaacca

SEQ ID NO: 1207106 - DNA, 15 bp, Homo sapiens
aactgtggaaaaacc

SEQ ID NO: 1207107 - DNA, 15 bp, Homo sapiens
taactgtggaaaaac

SEQ ID NO: 1207108 - DNA, 15 bp, Homo sapiens
gtaactgtggaaaaa

SEQ ID NO: 1207109 - DNA, 15 bp, Homo sapiens
cgtaactgtggaaaa

SEQ ID NO: 1207110 - DNA, 15 bp, Homo sapiens
gcgtaactgtggaaa

SEQ ID NO: 1207111 - DNA, 15 bp, Homo sapiens
tgcgtaactgtggaa

SEQ ID NO: 1207112 - DNA, 15 bp, Homo sapiens
gtgcgtaactgtgga

SEQ ID NO: 1207113 - DNA, 15 bp, Homo sapiens
tgtgcgtaactgtgg

SEQ ID NO: 1207114 - DNA, 15 bp, Homo sapiens
atgtgcgtaactgtg

SEQ ID NO: 1207115 - DNA, 15 bp, Homo sapiens
catgtgcgtaactgt

SEQ ID NO: 1207116 - DNA, 15 bp, Homo sapiens
gcatgtgcgtaactg

SEQ ID NO: 1207117 - DNA, 15 bp, Homo sapiens
ggcatgtgcgtaact

SEQ ID NO: 1207118 - DNA, 15 bp, Homo sapiens
tggcatgtgcgtaac

SEQ ID NO: 1207119 - DNA, 15 bp, Homo sapiens
ctggcatgtgcgtaa

SEQ ID NO: 1207120 - DNA, 15 bp, Homo sapiens
tctggcatgtgcgta

SEQ ID NO: 1207121 - DNA, 15 bp, Homo sapiens
atctggcatgtgcgt

SEQ ID NO: 1207122 - DNA, 15 bp, Homo sapiens
tatctggcatgtgcg

SEQ ID NO: 1207123 - DNA, 15 bp, Homo sapiens
ttatctggcatgtgc

SEQ ID NO: 1207124 - DNA, 15 bp, Homo sapiens
gttatctggcatgtg

SEQ ID NO: 1207125 - DNA, 15 bp, Homo sapiens
cgttatctggcatgt

SEQ ID NO: 1207126 - DNA, 15 bp, Homo sapiens
ccgttatctggcatg

SEQ ID NO: 1207127 - DNA, 15 bp, Homo sapiens
gccgttatctggcat

SEQ ID NO: 1207128 - DNA, 15 bp, Homo sapiens
cgccgttatctggca

SEQ ID NO: 1207129 - DNA, 15 bp, Homo sapiens
tcgccgttatctggc

SEQ ID NO: 1207130 - DNA, 15 bp, Homo sapiens
ctcgccgttatctgg

SEQ ID NO: 1207131 - DNA, 15 bp, Homo sapiens
actcgccgttatctg

SEQ ID NO: 1207132 - DNA, 15 bp, Homo sapiens
gactcgccgttatct

SEQ ID NO: 1207133 - DNA, 15 bp, Homo sapiens
agactcgccgttatc

SEQ ID NO: 1207134 - DNA, 15 bp, Homo sapiens
cagactcgccgttat

SEQ ID NO: 1207135 - DNA, 15 bp, Homo sapiens
acagactcgccgtta

SEQ ID NO: 1207136 - DNA, 15 bp, Homo sapiens
aacagactcgccgtt

SEQ ID NO: 1207137 - DNA, 15 bp, Homo sapiens
gaacagactcgccgt

SEQ ID NO: 1207138 - DNA, 15 bp, Homo sapiens
ggaacagactcgccg

SEQ ID NO: 1207139 - DNA, 15 bp, Homo sapiens
gggaacagactcgcc

SEQ ID NO: 1207140 - DNA, 15 bp, Homo sapiens
ggggaacagactcgc

SEQ ID NO: 1207141 - DNA, 15 bp, Homo sapiens
tggggaacagactcg

SEQ ID NO: 1207142 - DNA, 15 bp, Homo sapiens
ctggggaacagactc

SEQ ID NO: 1207143 - DNA, 15 bp, Homo sapiens
gctggggaacagact

SEQ ID NO: 1207144 - DNA, 15 bp, Homo sapiens
tgctggggaacagac

SEQ ID NO: 1207145 - DNA, 15 bp, Homo sapiens
ttgctggggaacaga

SEQ ID NO: 1207146 - DNA, 15 bp, Homo sapiens
gttgctggggaacag

SEQ ID NO: 1207147 - DNA, 15 bp, Homo sapiens
agttgctggggaaca

SEQ ID NO: 1207148 - DNA, 15 bp, Homo sapiens
cagttgctggggaac

SEQ ID NO: 1207149 - DNA, 15 bp, Homo sapiens
gcagttgctggggaa

SEQ ID NO: 1207150 - DNA, 15 bp, Homo sapiens
tgcagttgctgggga

SEQ ID NO: 1207151 - DNA, 15 bp, Homo sapiens
ttgcagttgctgggg

SEQ ID NO: 1207152 - DNA, 15 bp, Homo sapiens
gttgcagttgctggg

SEQ ID NO: 1207153 - DNA, 15 bp, Homo sapiens
cgttgcagttgctgg

SEQ ID NO: 1207154 - DNA, 15 bp, Homo sapiens
ccgttgcagttgctg

SEQ ID NO: 1207155 - DNA, 15 bp, Homo sapiens
tccgttgcagttgct

SEQ ID NO: 1207156 - DNA, 15 bp, Homo sapiens
atccgttgcagttgc

SEQ ID NO: 1207157 - DNA, 15 bp, Homo sapiens
gatccgttgcagttg

SEQ ID NO: 1207158 - DNA, 15 bp, Homo sapiens
agatccgttgcagtt

SEQ ID NO: 1207159 - DNA, 15 bp, Homo sapiens
cagatccgttgcagt

SEQ ID NO: 1207160 - DNA, 15 bp, Homo sapiens
gcagatccgttgcag

SEQ ID NO: 1207161 - DNA, 15 bp, Homo sapiens
ggcagatccgttgca

SEQ ID NO: 1207162 - DNA, 15 bp, Homo sapiens
gggcagatccgttgc

SEQ ID NO: 1207163 - DNA, 15 bp, Homo sapiens
tgggcagatccgttg

SEQ ID NO: 1207164 - DNA, 15 bp, Homo sapiens
gtgggcagatccgtt

SEQ ID NO: 1207165 - DNA, 15 bp, Homo sapiens
ggtgggcagatccgt

SEQ ID NO: 1207166 - DNA, 15 bp, Homo sapiens
tggtgggcagatccg

SEQ ID NO: 1207167 - DNA, 15 bp, Homo sapiens
gtggtgggcagatcc

SEQ ID NO: 1207168 - DNA, 15 bp, Homo sapiens
agtggtgggcagatc

SEQ ID NO: 1207169 - DNA, 15 bp, Homo sapiens
cagtggtgggcagat

SEQ ID NO: 1207170 - DNA, 15 bp, Homo sapiens
ccagtggtgggcaga

SEQ ID NO: 1207171 - DNA, 15 bp, Homo sapiens
cccagtggtgggcag

SEQ ID NO: 1207172 - DNA, 15 bp, Homo sapiens
tcccagtggtgggca

SEQ ID NO: 1207173 - DNA, 15 bp, Homo sapiens
ttcccagtggtgggc

SEQ ID NO: 1207174 - DNA, 15 bp, Homo sapiens
tttcccagtggtggg

SEQ ID NO: 1207175 - DNA, 15 bp, Homo sapiens
atttcccagtggtgg

SEQ ID NO: 1207176 - DNA, 15 bp, Homo sapiens
catttcccagtggtg

SEQ ID NO: 1207177 - DNA, 15 bp, Homo sapiens
ccatttcccagtggt

SEQ ID NO: 1207178 - DNA, 15 bp, Homo sapiens
tccatttcccagtgg

SEQ ID NO: 1207179 - DNA, 15 bp, Homo sapiens
ttccatttcccagtg

SEQ ID NO: 1207180 - DNA, 15 bp, Homo sapiens
cttccatttcccagt

SEQ ID NO: 1207181 - DNA, 15 bp, Homo sapiens
tcttccatttcccag

SEQ ID NO: 1207182 - DNA, 15 bp, Homo sapiens
gtcttccatttccca

SEQ ID NO: 1207183 - DNA, 15 bp, Homo sapiens
ggtcttccatttccc

SEQ ID NO: 1207184 - DNA, 15 bp, Homo sapiens
aggtcttccatttcc

SEQ ID NO: 1207185 - DNA, 15 bp, Homo sapiens
aaggtcttccatttc

SEQ ID NO: 1207186 - DNA, 15 bp, Homo sapiens
caaggtcttccattt

SEQ ID NO: 1207187 - DNA, 15 bp, Homo sapiens
gcaaggtcttccatt

SEQ ID NO: 1207188 - DNA, 15 bp, Homo sapiens
tgcaaggtcttccat

SEQ ID NO: 1207189 - DNA, 15 bp, Homo sapiens
ctgcaaggtcttcca

SEQ ID NO: 1207190 - DNA, 15 bp, Homo sapiens
gctgcaaggtcttcc

SEQ ID NO: 1207191 - DNA, 15 bp, Homo sapiens
ggctgcaaggtcttc

SEQ ID NO: 1207192 - DNA, 15 bp, Homo sapiens
gggctgcaaggtctt

SEQ ID NO: 1207193 - DNA, 15 bp, Homo sapiens
tgggctgcaaggtct

SEQ ID NO: 1207194 - DNA, 15 bp, Homo sapiens
ctgggctgcaaggtc

SEQ ID NO: 1207195 - DNA, 15 bp, Homo sapiens
cctgggctgcaaggt

SEQ ID NO: 1207196 - DNA, 15 bp, Homo sapiens
acctgggctgcaagg

SEQ ID NO: 1207197 - DNA, 15 bp, Homo sapiens
gacctgggctgcaag

SEQ ID NO: 1207198 - DNA, 15 bp, Homo sapiens
agacctgggctgcaa

SEQ ID NO: 1207199 - DNA, 15 bp, Homo sapiens
aagacctgggctgca

SEQ ID NO: 1207200 - DNA, 15 bp, Homo sapiens
aaagacctgggctgc

SEQ ID NO: 1207201 - DNA, 15 bp, Homo sapiens
caaagacctgggctg

SEQ ID NO: 1207202 - DNA, 15 bp, Homo sapiens
acaaagacctgggct

SEQ ID NO: 1207203 - DNA, 15 bp, Homo sapiens
tacaaagacctgggc

SEQ ID NO: 1207204 - DNA, 15 bp, Homo sapiens
ctacaaagacctggg

SEQ ID NO: 1207205 - DNA, 15 bp, Homo sapiens
tctacaaagacctgg

SEQ ID NO: 1207206 - DNA, 15 bp, Homo sapiens
gtctacaaagacctg

SEQ ID NO: 1207207 - DNA, 15 bp, Homo sapiens
ggtctacaaagacct

SEQ ID NO: 1207208 - DNA, 15 bp, Homo sapiens
tggtctacaaagacc

SEQ ID NO: 1207209 - DNA, 15 bp, Homo sapiens
ttggtctacaaagac

SEQ ID NO: 1207210 - DNA, 15 bp, Homo sapiens
cttggtctacaaaga

SEQ ID NO: 1207211 - DNA, 15 bp, Homo sapiens
tcttggtctacaaag

SEQ ID NO: 1207212 - DNA, 15 bp, Homo sapiens
atcttggtctacaaa

SEQ ID NO: 1207213 - DNA, 15 bp, Homo sapiens
aatcttggtctacaa

SEQ ID NO: 1207214 - DNA, 15 bp, Homo sapiens
taatcttggtctaca

SEQ ID NO: 1207215 - DNA, 15 bp, Homo sapiens
ctaatcttggtctac

SEQ ID NO: 1207216 - DNA, 15 bp, Homo sapiens
tctaatcttggtcta

SEQ ID NO: 1207217 - DNA, 15 bp, Homo sapiens
atctaatcttggtct

SEQ ID NO: 1207218 - DNA, 15 bp, Homo sapiens
aatctaatcttggtc

SEQ ID NO: 1207219 - DNA, 15 bp, Homo sapiens
caatctaatcttggt

SEQ ID NO: 1207220 - DNA, 15 bp, Homo sapiens
acaatctaatcttgg

SEQ ID NO: 1207221 - DNA, 15 bp, Homo sapiens
cacaatctaatcttg

SEQ ID NO: 1207222 - DNA, 15 bp, Homo sapiens
ccacaatctaatctt

SEQ ID NO: 1207223 - DNA, 15 bp, Homo sapiens
accacaatctaatct

SEQ ID NO: 1207224 - DNA, 15 bp, Homo sapiens
gaccacaatctaatc

SEQ ID NO: 1207225 - DNA, 15 bp, Homo sapiens
tgaccacaatctaat

SEQ ID NO: 1207226 - DNA, 15 bp, Homo sapiens
ttgaccacaatctaa

SEQ ID NO: 1207227 - DNA, 15 bp, Homo sapiens
gttgaccacaatcta

SEQ ID NO: 1207228 - DNA, 15 bp, Homo sapiens
tgttgaccacaatct

SEQ ID NO: 1207229 - DNA, 15 bp, Homo sapiens
ttgttgaccacaatc

SEQ ID NO: 1207230 - DNA, 15 bp, Homo sapiens
tttgttgaccacaat

SEQ ID NO: 1207231 - DNA, 15 bp, Homo sapiens
gtttgttgaccacaa

SEQ ID NO: 1207232 - DNA, 15 bp, Homo sapiens
tgtttgttgaccaca

SEQ ID NO: 1207233 - DNA, 15 bp, Homo sapiens
gtgtttgttgaccac

SEQ ID NO: 1207234 - DNA, 15 bp, Homo sapiens
ggtgtttgttgacca

SEQ ID NO: 1207235 - DNA, 15 bp, Homo sapiens
aggtgtttgttgacc

SEQ ID NO: 1207236 - DNA, 15 bp, Homo sapiens
caggtgtttgttgac

SEQ ID NO: 1207237 - DNA, 15 bp, Homo sapiens
tcaggtgtttgttga

SEQ ID NO: 1207238 - DNA, 15 bp, Homo sapiens
gtcaggtgtttgttg

SEQ ID NO: 1207239 - DNA, 15 bp, Homo sapiens
ggtcaggtgtttgtt

SEQ ID NO: 1207240 - DNA, 15 bp, Homo sapiens
aggtcaggtgtttgt

SEQ ID NO: 1207241 - DNA, 15 bp, Homo sapiens
aaggtcaggtgtttg

SEQ ID NO: 1207242 - DNA, 15 bp, Homo sapiens
caaggtcaggtgttt

SEQ ID NO: 1207243 - DNA, 15 bp, Homo sapiens
ccaaggtcaggtgtt

SEQ ID NO: 1207244 - DNA, 15 bp, Homo sapiens
gccaaggtcaggtgt

SEQ ID NO: 1207245 - DNA, 15 bp, Homo sapiens
ggccaaggtcaggtg

SEQ ID NO: 1207246 - DNA, 15 bp, Homo sapiens
aggccaaggtcaggt

SEQ ID NO: 1207247 - DNA, 15 bp, Homo sapiens
aaggccaaggtcagg

SEQ ID NO: 1207248 - DNA, 15 bp, Homo sapiens
aaaggccaaggtcag

SEQ ID NO: 1207249 - DNA, 15 bp, Homo sapiens
caaaggccaaggtca

SEQ ID NO: 1207250 - DNA, 15 bp, Homo sapiens
ccaaaggccaaggtc

SEQ ID NO: 1207251 - DNA, 15 bp, Homo sapiens
tccaaaggccaaggt

SEQ ID NO: 1207252 - DNA, 15 bp, Homo sapiens
ttccaaaggccaagg

SEQ ID NO: 1207253 - DNA, 15 bp, Homo sapiens
gttccaaaggccaag

SEQ ID NO: 1207254 - DNA, 15 bp, Homo sapiens
ggttccaaaggccaa

SEQ ID NO: 1207255 - DNA, 15 bp, Homo sapiens
tggttccaaaggcca

SEQ ID NO: 1207256 - DNA, 15 bp, Homo sapiens
atggttccaaaggcc

SEQ ID NO: 1207257 - DNA, 15 bp, Homo sapiens
gatggttccaaaggc

SEQ ID NO: 1207258 - DNA, 15 bp, Homo sapiens
tgatggttccaaagg

SEQ ID NO: 1207259 - DNA, 15 bp, Homo sapiens
ctgatggttccaaag

SEQ ID NO: 1207260 - DNA, 15 bp, Homo sapiens
gctgatggttccaaa

SEQ ID NO: 1207261 - DNA, 15 bp, Homo sapiens
ggctgatggttccaa

SEQ ID NO: 1207262 - DNA, 15 bp, Homo sapiens
tggctgatggttcca

SEQ ID NO: 1207263 - DNA, 15 bp, Homo sapiens
atggctgatggttcc

SEQ ID NO: 1207264 - DNA, 15 bp, Homo sapiens
catggctgatggttc

SEQ ID NO: 1207265 - DNA, 15 bp, Homo sapiens
acatggctgatggtt

SEQ ID NO: 1207266 - DNA, 15 bp, Homo sapiens
gacatggctgatggt

SEQ ID NO: 1207267 - DNA, 15 bp, Homo sapiens
tgacatggctgatgg

SEQ ID NO: 1207268 - DNA, 15 bp, Homo sapiens
ctgacatggctgatg

SEQ ID NO: 1207269 - DNA, 15 bp, Homo sapiens
gctgacatggctgat

SEQ ID NO: 1207270 - DNA, 15 bp, Homo sapiens
agctgacatggctga

SEQ ID NO: 1207271 - DNA, 15 bp, Homo sapiens
tagctgacatggctg

SEQ ID NO: 1207272 - DNA, 15 bp, Homo sapiens
ttagctgacatggct

SEQ ID NO: 1207273 - DNA, 15 bp, Homo sapiens
tttagctgacatggc

SEQ ID NO: 1207274 - DNA, 15 bp, Homo sapiens
ttttagctgacatgg

SEQ ID NO: 1207275 - DNA, 15 bp, Homo sapiens
attttagctgacatg

SEQ ID NO: 1207276 - DNA, 15 bp, Homo sapiens
tattttagctgacat

SEQ ID NO: 1207277 - DNA, 15 bp, Homo sapiens
ttattttagctgaca

SEQ ID NO: 1207278 - DNA, 15 bp, Homo sapiens
tttattttagctgac

SEQ ID NO: 1207279 - DNA, 15 bp, Homo sapiens
ttttattttagctga

SEQ ID NO: 1207280 - DNA, 15 bp, Homo sapiens
cttttattttagctg

SEQ ID NO: 1207281 - DNA, 15 bp, Homo sapiens
gcttttattttagct

SEQ ID NO: 1207282 - DNA, 15 bp, Homo sapiens
tgcttttattttagc

SEQ ID NO: 1207283 - DNA, 15 bp, Homo sapiens
ctgcttttattttag

SEQ ID NO: 1207284 - DNA, 15 bp, Homo sapiens
tctgcttttatttta

SEQ ID NO: 1207285 - DNA, 15 bp, Homo sapiens
ttctgcttttatttt

SEQ ID NO: 1207286 - DNA, 15 bp, Homo sapiens
attctgcttttattt

SEQ ID NO: 1207287 - DNA, 15 bp, Homo sapiens
gattctgcttttatt

SEQ ID NO: 1207288 - DNA, 15 bp, Homo sapiens
agattctgcttttat

SEQ ID NO: 1207289 - DNA, 15 bp, Homo sapiens
cagattctgctttta

SEQ ID NO: 1207290 - DNA, 15 bp, Homo sapiens
ccagattctgctttt

SEQ ID NO: 1207291 - DNA, 15 bp, Homo sapiens
gccagattctgcttt

SEQ ID NO: 1207292 - DNA, 15 bp, Homo sapiens
agccagattctgctt

SEQ ID NO: 1207293 - DNA, 15 bp, Homo sapiens
cagccagattctgct

SEQ ID NO: 1207294 - DNA, 15 bp, Homo sapiens
ccagccagattctgc

SEQ ID NO: 1207295 - DNA, 15 bp, Homo sapiens
cccagccagattctg

SEQ ID NO: 1207296 - DNA, 15 bp, Homo sapiens
gcccagccagattct

SEQ ID NO: 1207297 - DNA, 15 bp, Homo sapiens
cgcccagccagattc

SEQ ID NO: 1207298 - DNA, 15 bp, Homo sapiens
gcgcccagccagatt

SEQ ID NO: 1207299 - DNA, 15 bp, Homo sapiens
tgcgcccagccagat

SEQ ID NO: 1207300 - DNA, 15 bp, Homo sapiens
ctgcgcccagccaga

SEQ ID NO: 1207301 - DNA, 15 bp, Homo sapiens
actgcgcccagccag

SEQ ID NO: 1207302 - DNA, 15 bp, Homo sapiens
cactgcgcccagcca

SEQ ID NO: 1207303 - DNA, 15 bp, Homo sapiens
ccccaaagtgctggg

SEQ ID NO: 1207304 - DNA, 15 bp, Homo sapiens
cccccaaagtgctgg

SEQ ID NO: 1207305 - DNA, 15 bp, Homo sapiens
ccccccaaagtgctg

SEQ ID NO: 1207306 - DNA, 15 bp, Homo sapiens
gccccccaaagtgct

SEQ ID NO: 1207307 - DNA, 15 bp, Homo sapiens
agccccccaaagtgc

SEQ ID NO: 1207308 - DNA, 15 bp, Homo sapiens
cagccccccaaagtg

SEQ ID NO: 1207309 - DNA, 15 bp, Homo sapiens
tcagccccccaaagt

SEQ ID NO: 1207310 - DNA, 15 bp, Homo sapiens
ctcagccccccaaag

SEQ ID NO: 1207311 - DNA, 15 bp, Homo sapiens
cctcagccccccaaa

SEQ ID NO: 1207312 - DNA, 15 bp, Homo sapiens
acctcagccccccaa

SEQ ID NO: 1207313 - DNA, 15 bp, Homo sapiens
cacctcagcccccca

SEQ ID NO: 1207314 - DNA, 15 bp, Homo sapiens
ccacctcagcccccc

SEQ ID NO: 1207315 - DNA, 15 bp, Homo sapiens
cccacctcagccccc

SEQ ID NO: 1207316 - DNA, 15 bp, Homo sapiens
gcccacctcagcccc

SEQ ID NO: 1207317 - DNA, 15 bp, Homo sapiens
tgcccacctcagccc

SEQ ID NO: 1207318 - DNA, 15 bp, Homo sapiens
gtctgcccacctcag

SEQ ID NO: 1207319 - DNA, 15 bp, Homo sapiens
ggtctgcccacctca

SEQ ID NO: 1207320 - DNA, 15 bp, Homo sapiens
tggtctgcccacctc

SEQ ID NO: 1207321 - DNA, 15 bp, Homo sapiens
gtggtctgcccacct

SEQ ID NO: 1207322 - DNA, 15 bp, Homo sapiens
ggtggtctgcccacc

SEQ ID NO: 1207323 - DNA, 15 bp, Homo sapiens
aggtggtctgcccac

SEQ ID NO: 1207324 - DNA, 15 bp, Homo sapiens
caggtggtctgccca

SEQ ID NO: 1207325 - DNA, 15 bp, Homo sapiens
tcaggtggtctgccc

SEQ ID NO: 1207326 - DNA, 15 bp, Homo sapiens
ctcaggtggtctgcc

SEQ ID NO: 1207327 - DNA, 15 bp, Homo sapiens
cctcaggtggtctgc

SEQ ID NO: 1207328 - DNA, 15 bp, Homo sapiens
acctcaggtggtctg

SEQ ID NO: 1207329 - DNA, 15 bp, Homo sapiens
gacctcaggtggtct

SEQ ID NO: 1207330 - DNA, 15 bp, Homo sapiens
ggacctcaggtggtc

SEQ ID NO: 1207331 - DNA, 15 bp, Homo sapiens
cggacctcaggtggt

SEQ ID NO: 1207332 - DNA, 15 bp, Homo sapiens
ccggacctcaggtgg

SEQ ID NO: 1207333 - DNA, 15 bp, Homo sapiens
gccggacctcaggtg

SEQ ID NO: 1207334 - DNA, 15 bp, Homo sapiens
cgccggacctcaggt

SEQ ID NO: 1207335 - DNA, 15 bp, Homo sapiens
acgccggacctcagg

SEQ ID NO: 1207336 - DNA, 15 bp, Homo sapiens
aacgccggacctcag

SEQ ID NO: 1207337 - DNA, 15 bp, Homo sapiens
gaacgccggacctca

SEQ ID NO: 1207338 - DNA, 15 bp, Homo sapiens
agaacgccggacctc

SEQ ID NO: 1207339 - DNA, 15 bp, Homo sapiens
tagaacgccggacct

SEQ ID NO: 1207340 - DNA, 15 bp, Homo sapiens
ctagaacgccggacc

SEQ ID NO: 1207341 - DNA, 15 bp, Homo sapiens
tctagaacgccggac

SEQ ID NO: 1207342 - DNA, 15 bp, Homo sapiens
gtctagaacgccgga

SEQ ID NO: 1207343 - DNA, 15 bp, Homo sapiens
ggtctagaacgccgg

SEQ ID NO: 1207344 - DNA, 15 bp, Homo sapiens
tggtctagaacgccg

SEQ ID NO: 1207345 - DNA, 15 bp, Homo sapiens
ctggtctagaacgcc

SEQ ID NO: 1207346 - DNA, 15 bp, Homo sapiens
gctggtctagaacgc

SEQ ID NO: 1207347 - DNA, 15 bp, Homo sapiens
ggctggtctagaacg

SEQ ID NO: 1207348 - DNA, 15 bp, Homo sapiens
tcaggctggtctaga

SEQ ID NO: 1207349 - DNA, 15 bp, Homo sapiens
gtcaggctggtctag

SEQ ID NO: 1207350 - DNA, 15 bp, Homo sapiens
ggtcaggctggtcta

SEQ ID NO: 1207351 - DNA, 15 bp, Homo sapiens
tcatattggtcaggc

SEQ ID NO: 1207352 - DNA, 15 bp, Homo sapiens
atcatattggtcagg

SEQ ID NO: 1207353 - DNA, 15 bp, Homo sapiens
catcatattggtcag

SEQ ID NO: 1207354 - DNA, 15 bp, Homo sapiens
tcatcatattggtca

SEQ ID NO: 1207355 - DNA, 15 bp, Homo sapiens
ttcatcatattggtc

SEQ ID NO: 1207356 - DNA, 15 bp, Homo sapiens
tttcatcatattggt

SEQ ID NO: 1207357 - DNA, 15 bp, Homo sapiens
gggtttcatcatatt

SEQ ID NO: 1207358 - DNA, 15 bp, Homo sapiens
ggggtttcatcatat

SEQ ID NO: 1207359 - DNA, 15 bp, Homo sapiens
cggggtttcatcata

SEQ ID NO: 1207360 - DNA, 15 bp, Homo sapiens
acggggtttcatcat

SEQ ID NO: 1207361 - DNA, 15 bp, Homo sapiens
gacggggtttcatca

SEQ ID NO: 1207362 - DNA, 15 bp, Homo sapiens
agacggggtttcatc

SEQ ID NO: 1207363 - DNA, 15 bp, Homo sapiens
gagacggggtttcat

SEQ ID NO: 1207364 - DNA, 15 bp, Homo sapiens
gtttagtagagacgg

SEQ ID NO: 1207365 - DNA, 15 bp, Homo sapiens
tgtttagtagagacg

SEQ ID NO: 1207366 - DNA, 15 bp, Homo sapiens
atgtttagtagagac

SEQ ID NO: 1207367 - DNA, 15 bp, Homo sapiens
tatgtttagtagaga

SEQ ID NO: 1207368 - DNA, 15 bp, Homo sapiens
gtatgtttagtagag

SEQ ID NO: 1207369 - DNA, 15 bp, Homo sapiens
tgtatgtttagtaga

SEQ ID NO: 1207370 - DNA, 15 bp, Homo sapiens
ttgtatgtttagtag

SEQ ID NO: 1207371 - DNA, 15 bp, Homo sapiens
tttgtatgtttagta

SEQ ID NO: 1207372 - DNA, 15 bp, Homo sapiens
ttttgtatgtttagt

SEQ ID NO: 1207373 - DNA, 15 bp, Homo sapiens
tttttgtatgtttag

SEQ ID NO: 1207374 - DNA, 15 bp, Homo sapiens
atttttgtatgttta

SEQ ID NO: 1207375 - DNA, 15 bp, Homo sapiens
aatttttgtatgttt

SEQ ID NO: 1207376 - DNA, 15 bp, Homo sapiens
taatttttgtatgtt

SEQ ID NO: 1207377 - DNA, 15 bp, Homo sapiens
ctaatttttgtatgt

SEQ ID NO: 1207378 - DNA, 15 bp, Homo sapiens
gctaatttttgtatg

SEQ ID NO: 1207379 - DNA, 15 bp, Homo sapiens
tcctcagcctcccga

SEQ ID NO: 1207380 - DNA, 15 bp, Homo sapiens
ttcctcagcctcccg

SEQ ID NO: 1207381 - DNA, 15 bp, Homo sapiens
cttcctcagcctccc

SEQ ID NO: 1207382 - DNA, 15 bp, Homo sapiens
ccttcctcagcctcc

SEQ ID NO: 1207383 - DNA, 15 bp, Homo sapiens
tccttcctcagcctc

SEQ ID NO: 1207384 - DNA, 15 bp, Homo sapiens
ctccttcctcagcct

SEQ ID NO: 1207385 - DNA, 15 bp, Homo sapiens
tctccttcctcagcc

SEQ ID NO: 1207386 - DNA, 15 bp, Homo sapiens
ttctccttcctcagc

SEQ ID NO: 1207387 - DNA, 15 bp, Homo sapiens
attctccttcctcag

SEQ ID NO: 1207388 - DNA, 15 bp, Homo sapiens
aattctccttcctca

SEQ ID NO: 1207389 - DNA, 15 bp, Homo sapiens
caattctccttcctc

SEQ ID NO: 1207390 - DNA, 15 bp, Homo sapiens
gcaattctccttcct

SEQ ID NO: 1207391 - DNA, 15 bp, Homo sapiens
agcaattctccttcc

SEQ ID NO: 1207392 - DNA, 15 bp, Homo sapiens
aagcaattctccttc

SEQ ID NO: 1207393 - DNA, 15 bp, Homo sapiens
caagcaattctcctt

SEQ ID NO: 1207394 - DNA, 15 bp, Homo sapiens
agggttcaagcaatt

SEQ ID NO: 1207395 - DNA, 15 bp, Homo sapiens
cagggttcaagcaat

SEQ ID NO: 1207396 - DNA, 15 bp, Homo sapiens
ccagggttcaagcaa

SEQ ID NO: 1207397 - DNA, 15 bp, Homo sapiens
tccagggttcaagca

SEQ ID NO: 1207398 - DNA, 15 bp, Homo sapiens
ctccagggttcaagc

SEQ ID NO: 1207399 - DNA, 15 bp, Homo sapiens
cgcaatctcggctca

SEQ ID NO: 1207400 - DNA, 15 bp, Homo sapiens
gcgcaatctcggctc

SEQ ID NO: 1207401 - DNA, 15 bp, Homo sapiens
ggcgcaatctcggct

SEQ ID NO: 1207402 - DNA, 15 bp, Homo sapiens
tggcgcaatctcggc

SEQ ID NO: 1207403 - DNA, 15 bp, Homo sapiens
ttggagtgcagtggc

SEQ ID NO: 1207404 - DNA, 15 bp, Homo sapiens
tccaggttggagtgc

SEQ ID NO: 1207405 - DNA, 15 bp, Homo sapiens
gtccaggttggagtg

SEQ ID NO: 1207406 - DNA, 15 bp, Homo sapiens
agtccaggttggagt

SEQ ID NO: 1207407 - DNA, 15 bp, Homo sapiens
cagtccaggttggag

SEQ ID NO: 1207408 - DNA, 15 bp, Homo sapiens
gcagtccaggttgga

SEQ ID NO: 1207409 - DNA, 15 bp, Homo sapiens
tgcagtccaggttgg

SEQ ID NO: 1207410 - DNA, 15 bp, Homo sapiens
ctgcagtccaggttg

SEQ ID NO: 1207411 - DNA, 15 bp, Homo sapiens
tctgcagtccaggtt

SEQ ID NO: 1207412 - DNA, 15 bp, Homo sapiens
ttctgcagtccaggt

SEQ ID NO: 1207413 - DNA, 15 bp, Homo sapiens
gttctgcagtccagg

SEQ ID NO: 1207414 - DNA, 15 bp, Homo sapiens
tgttctgcagtccag

SEQ ID NO: 1207415 - DNA, 15 bp, Homo sapiens
ttgttctgcagtcca

SEQ ID NO: 1207416 - DNA, 15 bp, Homo sapiens
cttgttctgcagtcc

SEQ ID NO: 1207417 - DNA, 15 bp, Homo sapiens
tcttgttctgcagtc

SEQ ID NO: 1207418 - DNA, 15 bp, Homo sapiens
gtcttgttctgcagt

SEQ ID NO: 1207419 - DNA, 15 bp, Homo sapiens
agtcttgttctgcag

SEQ ID NO: 1207420 - DNA, 15 bp, Homo sapiens
gagtcttgttctgca

SEQ ID NO: 1207421 - DNA, 15 bp, Homo sapiens
agagtcttgttctgc

SEQ ID NO: 1207422 - DNA, 15 bp, Homo sapiens
ggacagagtcttgtt

SEQ ID NO: 1207423 - DNA, 15 bp, Homo sapiens
gggacagagtcttgt

SEQ ID NO: 1207424 - DNA, 15 bp, Homo sapiens
tgggacagagtcttg

SEQ ID NO: 1207425 - DNA, 15 bp, Homo sapiens
ttgggacagagtctt

SEQ ID NO: 1207426 - DNA, 15 bp, Homo sapiens
tttgggacagagtct

SEQ ID NO: 1207427 - DNA, 15 bp, Homo sapiens
ttttgggacagagtc

SEQ ID NO: 1207428 - DNA, 15 bp, Homo sapiens
cttttgggacagagt

SEQ ID NO: 1207429 - DNA, 15 bp, Homo sapiens
gcttttgggacagag

SEQ ID NO: 1207430 - DNA, 15 bp, Homo sapiens
tgcttttgggacaga

SEQ ID NO: 1207431 - DNA, 15 bp, Homo sapiens
ctgcttttgggacag

SEQ ID NO: 1207432 - DNA, 15 bp, Homo sapiens
tctgcttttgggaca

SEQ ID NO: 1207433 - DNA, 15 bp, Homo sapiens
atctgcttttgggac

SEQ ID NO: 1207434 - DNA, 15 bp, Homo sapiens
tatctgcttttggga

SEQ ID NO: 1207435 - DNA, 15 bp, Homo sapiens
ttatctgcttttggg

SEQ ID NO: 1207436 - DNA, 15 bp, Homo sapiens
tttatctgcttttgg

SEQ ID NO: 1207437 - DNA, 15 bp, Homo sapiens
atttatctgcttttg

SEQ ID NO: 1207438 - DNA, 15 bp, Homo sapiens
tatttatctgctttt

SEQ ID NO: 1207439 - DNA, 15 bp, Homo sapiens
ttatttatctgcttt

SEQ ID NO: 1207440 - DNA, 15 bp, Homo sapiens
tttatttatctgctt

SEQ ID NO: 1207441 - DNA, 15 bp, Homo sapiens
ttttatttatctgct

SEQ ID NO: 1207442 - DNA, 15 bp, Homo sapiens
tttttatttatctgc

SEQ ID NO: 1207443 - DNA, 15 bp, Homo sapiens
atttttatttatctg

SEQ ID NO: 1207444 - DNA, 15 bp, Homo sapiens
tatttttatttatct

SEQ ID NO: 1207445 - DNA, 15 bp, Homo sapiens
ttatttttatttatc

SEQ ID NO: 1207446 - DNA, 15 bp, Homo sapiens
atatttttattttta

SEQ ID NO: 1207447 - DNA, 15 bp, Homo sapiens
catatttttattttt

SEQ ID NO: 1207448 - DNA, 15 bp, Homo sapiens
ccatatttttatttt

SEQ ID NO: 1207449 - DNA, 15 bp, Homo sapiens
gccatatttttattt

SEQ ID NO: 1207450 - DNA, 15 bp, Homo sapiens
ggccatatttttatt

SEQ ID NO: 1207451 - DNA, 15 bp, Homo sapiens
cggccatatttttat

SEQ ID NO: 1207452 - DNA, 15 bp, Homo sapiens
ccggccatattttta

SEQ ID NO: 1207453 - DNA, 15 bp, Homo sapiens
cccggccatattttt

SEQ ID NO: 1207454 - DNA, 15 bp, Homo sapiens
gcccggccatatttt

SEQ ID NO: 1207455 - DNA, 15 bp, Homo sapiens
tgcccggccatattt

SEQ ID NO: 1207456 - DNA, 15 bp, Homo sapiens
atgcccggccatatt

SEQ ID NO: 1207457 - DNA, 15 bp, Homo sapiens
catgcccggccatat

SEQ ID NO: 1207458 - DNA, 15 bp, Homo sapiens
ccatgcccggccata

SEQ ID NO: 1207459 - DNA, 15 bp, Homo sapiens
cagtgttgggattac

SEQ ID NO: 1207460 - DNA, 15 bp, Homo sapiens
ccagtgttgggatta

SEQ ID NO: 1207461 - DNA, 15 bp, Homo sapiens
cccagtgttgggatt

SEQ ID NO: 1207462 - DNA, 15 bp, Homo sapiens
tcccagtgttgggat

SEQ ID NO: 1207463 - DNA, 15 bp, Homo sapiens
ttcccagtgttggga

SEQ ID NO: 1207464 - DNA, 15 bp, Homo sapiens
cttcccagtgttggg

SEQ ID NO: 1207465 - DNA, 15 bp, Homo sapiens
tcttcccagtgttgg

SEQ ID NO: 1207466 - DNA, 15 bp, Homo sapiens
atcttcccagtgttg

SEQ ID NO: 1207467 - DNA, 15 bp, Homo sapiens
catcttcccagtgtt

SEQ ID NO: 1207468 - DNA, 15 bp, Homo sapiens
tcatcttcccagtgt

SEQ ID NO: 1207469 - DNA, 15 bp, Homo sapiens
ctcatcttcccagtg

SEQ ID NO: 1207470 - DNA, 15 bp, Homo sapiens
cctcatcttcccagt

SEQ ID NO: 1207471 - DNA, 15 bp, Homo sapiens
gcctcatcttcccag

SEQ ID NO: 1207472 - DNA, 15 bp, Homo sapiens
cgcctcatcttccca

SEQ ID NO: 1207473 - DNA, 15 bp, Homo sapiens
ccgcctcatcttccc

SEQ ID NO: 1207474 - DNA, 15 bp, Homo sapiens
cccgcctcatcttcc

SEQ ID NO: 1207475 - DNA, 15 bp, Homo sapiens
gcccgcctcatcttc

SEQ ID NO: 1207476 - DNA, 15 bp, Homo sapiens
tgcccgcctcatctt

SEQ ID NO: 1207477 - DNA, 15 bp, Homo sapiens
ctgcccgcctcatct

SEQ ID NO: 1207478 - DNA, 15 bp, Homo sapiens
tctgcccgcctcatc

SEQ ID NO: 1207479 - DNA, 15 bp, Homo sapiens
atctgcccgcctcat

SEQ ID NO: 1207480 - DNA, 15 bp, Homo sapiens
cgtgatctgcccgcc

SEQ ID NO: 1207481 - DNA, 15 bp, Homo sapiens
tcgtgatctgcccgc

SEQ ID NO: 1207482 - DNA, 15 bp, Homo sapiens
ctcgtgatctgcccg

SEQ ID NO: 1207483 - DNA, 15 bp, Homo sapiens
cctcgtgatctgccc

SEQ ID NO: 1207484 - DNA, 15 bp, Homo sapiens
ccctgacctcgtgat

SEQ ID NO: 1207485 - DNA, 15 bp, Homo sapiens
tccctgacctcgtga

SEQ ID NO: 1207486 - DNA, 15 bp, Homo sapiens
atccctgacctcgtg

SEQ ID NO: 1207487 - DNA, 15 bp, Homo sapiens
aatccctgacctcgt

SEQ ID NO: 1207488 - DNA, 15 bp, Homo sapiens
gaatccctgacctcg

SEQ ID NO: 1207489 - DNA, 15 bp, Homo sapiens
cgaatccctgacctc

SEQ ID NO: 1207490 - DNA, 15 bp, Homo sapiens
tcgaatccctgacct

SEQ ID NO: 1207491 - DNA, 15 bp, Homo sapiens
ctcgaatccctgacc

SEQ ID NO: 1207492 - DNA, 15 bp, Homo sapiens
tctcgaatccctgac

SEQ ID NO: 1207493 - DNA, 15 bp, Homo sapiens
gtctcgaatccctga

SEQ ID NO: 1207494 - DNA, 15 bp, Homo sapiens
ggtctcgaatccctg

SEQ ID NO: 1207495 - DNA, 15 bp, Homo sapiens
tggtctcgaatccct

SEQ ID NO: 1207496 - DNA, 15 bp, Homo sapiens
ctggtctcgaatccc

SEQ ID NO: 1207497 - DNA, 15 bp, Homo sapiens
gctggtctcgaatcc

SEQ ID NO: 1207498 - DNA, 15 bp, Homo sapiens
ggctggtctcgaatc

SEQ ID NO: 1207499 - DNA, 15 bp, Homo sapiens
gcatcatgcccggct

SEQ ID NO: 1207500 - DNA, 15 bp, Homo sapiens
agcatcatgcccggc

SEQ ID NO: 1207501 - DNA, 15 bp, Homo sapiens
cagcatcatgcccgg

SEQ ID NO: 1207502 - DNA, 15 bp, Homo sapiens
gcagcatcatgcccg

SEQ ID NO: 1207503 - DNA, 15 bp, Homo sapiens
tgcagcatcatgccc

SEQ ID NO: 1207504 - DNA, 15 bp, Homo sapiens
atgcagcatcatgcc

SEQ ID NO: 1207505 - DNA, 15 bp, Homo sapiens
catgcagcatcatgc

SEQ ID NO: 1207506 - DNA, 15 bp, Homo sapiens
gcatgcagcatcatg

SEQ ID NO: 1207507 - DNA, 15 bp, Homo sapiens
ggcatgcagcatcat

SEQ ID NO: 1207508 - DNA, 15 bp, Homo sapiens
aggcatgcagcatca

SEQ ID NO: 1207509 - DNA, 15 bp, Homo sapiens
caggcatgcagcatc

SEQ ID NO: 1207510 - DNA, 15 bp, Homo sapiens
acaggcatgcagcat

SEQ ID NO: 1207511 - DNA, 15 bp, Homo sapiens
tacaggcatgcagca

SEQ ID NO: 1207512 - DNA, 15 bp, Homo sapiens
ttacaggcatgcagc

SEQ ID NO: 1207513 - DNA, 15 bp, Homo sapiens
attacaggcatgcag

SEQ ID NO: 1207514 - DNA, 15 bp, Homo sapiens
gaagcgattctcctg

SEQ ID NO: 1207515 - DNA, 15 bp, Homo sapiens
tgaagcgattctcct

SEQ ID NO: 1207516 - DNA, 15 bp, Homo sapiens
atgaagcgattctcc

SEQ ID NO: 1207517 - DNA, 15 bp, Homo sapiens
gatgaagcgattctc

SEQ ID NO: 1207518 - DNA, 15 bp, Homo sapiens
ggatgaagcgattct

SEQ ID NO: 1207519 - DNA, 15 bp, Homo sapiens
gggatgaagcgattc

SEQ ID NO: 1207520 - DNA, 15 bp, Homo sapiens
cgggatgaagcgatt

SEQ ID NO: 1207521 - DNA, 15 bp, Homo sapiens
ccgggatgaagcgat

SEQ ID NO: 1207522 - DNA, 15 bp, Homo sapiens
cccgggatgaagcga

SEQ ID NO: 1207523 - DNA, 15 bp, Homo sapiens
tcccgggatgaagcg

SEQ ID NO: 1207524 - DNA, 15 bp, Homo sapiens
ctcccgggatgaagc

SEQ ID NO: 1207525 - DNA, 15 bp, Homo sapiens
cctcccgggatgaag

SEQ ID NO: 1207526 - DNA, 15 bp, Homo sapiens
acctcccgggatgaa

SEQ ID NO: 1207527 - DNA, 15 bp, Homo sapiens
cacctcccgggatga

SEQ ID NO: 1207528 - DNA, 15 bp, Homo sapiens
ccacctcccgggatg

SEQ ID NO: 1207529 - DNA, 15 bp, Homo sapiens
tccacctcccgggat

SEQ ID NO: 1207530 - DNA, 15 bp, Homo sapiens
ctccacctcccggga

SEQ ID NO: 1207531 - DNA, 15 bp, Homo sapiens
tttgcccaggctaga

SEQ ID NO: 1207532 - DNA, 15 bp, Homo sapiens
ttttgcccaggctag

SEQ ID NO: 1207533 - DNA, 15 bp, Homo sapiens
cttttgcccaggcta

SEQ ID NO: 1207534 - DNA, 15 bp, Homo sapiens
tcttttgcccaggct

SEQ ID NO: 1207535 - DNA, 15 bp, Homo sapiens
ctcttttgcccaggc

SEQ ID NO: 1207536 - DNA, 15 bp, Homo sapiens
actcttttgcccagg

SEQ ID NO: 1207537 - DNA, 15 bp, Homo sapiens
cactcttttgcccag

SEQ ID NO: 1207538 - DNA, 15 bp, Homo sapiens
tcactcttttgccca

SEQ ID NO: 1207539 - DNA, 15 bp, Homo sapiens
ctcactcttttgccc

SEQ ID NO: 1207540 - DNA, 15 bp, Homo sapiens
tctcactcttttgcc

SEQ ID NO: 1207541 - DNA, 15 bp, Homo sapiens
gtctcactcttttgc

SEQ ID NO: 1207542 - DNA, 15 bp, Homo sapiens
agtctcactcttttg

SEQ ID NO: 1207543 - DNA, 15 bp, Homo sapiens
gagtctcactctttt

SEQ ID NO: 1207544 - DNA, 15 bp, Homo sapiens
ggagtctcactcttt

SEQ ID NO: 1207545 - DNA, 15 bp, Homo sapiens
tggagtctcactctt

SEQ ID NO: 1207546 - DNA, 15 bp, Homo sapiens
cgatggagtctcact

SEQ ID NO: 1207547 - DNA, 15 bp, Homo sapiens
gcgatggagtctcac

SEQ ID NO: 1207548 - DNA, 15 bp, Homo sapiens
tgcgatggagtctca

SEQ ID NO: 1207549 - DNA, 15 bp, Homo sapiens
ttgcgatggagtctc

SEQ ID NO: 1207550 - DNA, 15 bp, Homo sapiens
cttgcgatggagtct

SEQ ID NO: 1207551 - DNA, 15 bp, Homo sapiens
tcttgcgatggagtc

SEQ ID NO: 1207552 - DNA, 15 bp, Homo sapiens
ttcttgcgatggagt

SEQ ID NO: 1207553 - DNA, 15 bp, Homo sapiens
tttcttgcgatggag

SEQ ID NO: 1207554 - DNA, 15 bp, Homo sapiens
ttttcttgcgatgga

SEQ ID NO: 1207555 - DNA, 15 bp, Homo sapiens
tttttcttgcgatgg

SEQ ID NO: 1207556 - DNA, 15 bp, Homo sapiens
ttttttcttgcgatg

SEQ ID NO: 1207557 - DNA, 15 bp, Homo sapiens
tttttttcttgcgat

SEQ ID NO: 1207558 - DNA, 15 bp, Homo sapiens
ttttttttcttgcga

SEQ ID NO: 1207559 - DNA, 15 bp, Homo sapiens
tttttttttcttgcg

SEQ ID NO: 1207560 - DNA, 15 bp, Homo sapiens
ttttttttttcttgc

SEQ ID NO: 1207561 - DNA, 15 bp, Homo sapiens
tttttttttttcttg

SEQ ID NO: 1207562 - DNA, 15 bp, Homo sapiens
cagcttttttttttt

SEQ ID NO: 1207563 - DNA, 15 bp, Homo sapiens
gcagctttttttttt

SEQ ID NO: 1207564 - DNA, 15 bp, Homo sapiens
tgcagcttttttttt

SEQ ID NO: 1207565 - DNA, 15 bp, Homo sapiens
ttgcagctttttttt

SEQ ID NO: 1207566 - DNA, 15 bp, Homo sapiens
cttgcagcttttttt

SEQ ID NO: 1207567 - DNA, 15 bp, Homo sapiens
gcttgcagctttttt

SEQ ID NO: 1207568 - DNA, 15 bp, Homo sapiens
agcttgcagcttttt

SEQ ID NO: 1207569 - DNA, 15 bp, Homo sapiens
gagcttgcagctttt

SEQ ID NO: 1207570 - DNA, 15 bp, Homo sapiens
agagcttgcagcttt

SEQ ID NO: 1207571 - DNA, 15 bp, Homo sapiens
cagagcttgcagctt

SEQ ID NO: 1207572 - DNA, 15 bp, Homo sapiens
acagagcttgcagct

SEQ ID NO: 1207573 - DNA, 15 bp, Homo sapiens
gacagagcttgcagc

SEQ ID NO: 1207574 - DNA, 15 bp, Homo sapiens
agacagagcttgcag

SEQ ID NO: 1207575 - DNA, 15 bp, Homo sapiens
gagacagagcttgca

SEQ ID NO: 1207576 - DNA, 15 bp, Homo sapiens
ggagacagagcttgc

SEQ ID NO: 1207577 - DNA, 15 bp, Homo sapiens
gggagacagagcttg

SEQ ID NO: 1207578 - DNA, 15 bp, Homo sapiens
cgggagacagagctt

SEQ ID NO: 1207579 - DNA, 15 bp, Homo sapiens
ccgggagacagagct

SEQ ID NO: 1207580 - DNA, 15 bp, Homo sapiens
cccgggagacagagc

SEQ ID NO: 1207581 - DNA, 15 bp, Homo sapiens
acccgggagacagag

SEQ ID NO: 1207582 - DNA, 15 bp, Homo sapiens
aacccgggagacaga

SEQ ID NO: 1207583 - DNA, 15 bp, Homo sapiens
gaacccgggagacag

SEQ ID NO: 1207584 - DNA, 15 bp, Homo sapiens
tgaacccgggagaca

SEQ ID NO: 1207585 - DNA, 15 bp, Homo sapiens
ttgaacccgggagac

SEQ ID NO: 1207586 - DNA, 15 bp, Homo sapiens
cttgaacccgggaga

SEQ ID NO: 1207587 - DNA, 15 bp, Homo sapiens
ggaaggctgaggcag

SEQ ID NO: 1207588 - DNA, 15 bp, Homo sapiens
tggaaggctgaggca

SEQ ID NO: 1207589 - DNA, 15 bp, Homo sapiens
ttggaaggctgaggc

SEQ ID NO: 1207590 - DNA, 15 bp, Homo sapiens
cttggaaggctgagg

SEQ ID NO: 1207591 - DNA, 15 bp, Homo sapiens
acttggaaggctgag

SEQ ID NO: 1207592 - DNA, 15 bp, Homo sapiens
tacttggaaggctga

SEQ ID NO: 1207593 - DNA, 15 bp, Homo sapiens
ctacttggaaggctg

SEQ ID NO: 1207594 - DNA, 15 bp, Homo sapiens
gctacttggaaggct

SEQ ID NO: 1207595 - DNA, 15 bp, Homo sapiens
agctacttggaaggc

SEQ ID NO: 1207596 - DNA, 15 bp, Homo sapiens
tagctacttggaagg

SEQ ID NO: 1207597 - DNA, 15 bp, Homo sapiens
ctagctacttggaag

SEQ ID NO: 1207598 - DNA, 15 bp, Homo sapiens
cctagctacttggaa

SEQ ID NO: 1207599 - DNA, 15 bp, Homo sapiens
tcctagctacttgga

SEQ ID NO: 1207600 - DNA, 15 bp, Homo sapiens
atcctagctacttgg

SEQ ID NO: 1207601 - DNA, 15 bp, Homo sapiens
aatcctagctacttg

SEQ ID NO: 1207602 - DNA, 15 bp, Homo sapiens
taatcctagctactt

SEQ ID NO: 1207603 - DNA, 15 bp, Homo sapiens
ataatcctagctact

SEQ ID NO: 1207604 - DNA, 15 bp, Homo sapiens
tataatcctagctac

SEQ ID NO: 1207605 - DNA, 15 bp, Homo sapiens
gtataatcctagcta

SEQ ID NO: 1207606 - DNA, 15 bp, Homo sapiens
cgtataatcctagct

SEQ ID NO: 1207607 - DNA, 15 bp, Homo sapiens
gcgtataatcctagc

SEQ ID NO: 1207608 - DNA, 15 bp, Homo sapiens
cgcgtataatcctag

SEQ ID NO: 1207609 - DNA, 15 bp, Homo sapiens
gcgcgtataatccta

SEQ ID NO: 1207610 - DNA, 15 bp, Homo sapiens
ggcgcgtataatcct

SEQ ID NO: 1207611 - DNA, 15 bp, Homo sapiens
gggcgcgtataatcc

SEQ ID NO: 1207612 - DNA, 15 bp, Homo sapiens
cgggcgcgtataatc

SEQ ID NO: 1207613 - DNA, 15 bp, Homo sapiens
gcgggcgcgtataat

SEQ ID NO: 1207614 - DNA, 15 bp, Homo sapiens
ggcgggcgcgtataa

SEQ ID NO: 1207615 - DNA, 15 bp, Homo sapiens
tggcgggcgcgtata

SEQ ID NO: 1207616 - DNA, 15 bp, Homo sapiens
gtggcgggcgcgtat

SEQ ID NO: 1207617 - DNA, 15 bp, Homo sapiens
ggtggcgggcgcgta

SEQ ID NO: 1207618 - DNA, 15 bp, Homo sapiens
tggtggcgggcgcgt

SEQ ID NO: 1207619 - DNA, 15 bp, Homo sapiens
atggtggcgggcgcg

SEQ ID NO: 1207620 - DNA, 15 bp, Homo sapiens
catggtggcgggcgc

SEQ ID NO: 1207621 - DNA, 15 bp, Homo sapiens
gcatggtggcgggcg

SEQ ID NO: 1207622 - DNA, 15 bp, Homo sapiens
ggcatggtggcgggc

SEQ ID NO: 1207623 - DNA, 15 bp, Homo sapiens
gcatctctactaaaa

SEQ ID NO: 1207624 - DNA, 15 bp, Homo sapiens
cgcatctctactaaa

SEQ ID NO: 1207625 - DNA, 15 bp, Homo sapiens
ccgcatctctactaa

SEQ ID NO: 1207626 - DNA, 15 bp, Homo sapiens
accgcatctctacta

SEQ ID NO: 1207627 - DNA, 15 bp, Homo sapiens
aaccgcatctctact

SEQ ID NO: 1207628 - DNA, 15 bp, Homo sapiens
aaaccgcatctctac

SEQ ID NO: 1207629 - DNA, 15 bp, Homo sapiens
gaaaccgcatctcta

SEQ ID NO: 1207630 - DNA, 15 bp, Homo sapiens
tgaaaccgcatctct

SEQ ID NO: 1207631 - DNA, 15 bp, Homo sapiens
gtgaaaccgcatctc

SEQ ID NO: 1207632 - DNA, 15 bp, Homo sapiens
ggtgaaaccgcatct

SEQ ID NO: 1207633 - DNA, 15 bp, Homo sapiens
tggtgaaaccgcatc

SEQ ID NO: 1207634 - DNA, 15 bp, Homo sapiens
atggtgaaaccgcat

SEQ ID NO: 1207635 - DNA, 15 bp, Homo sapiens
catggtgaaaccgca

SEQ ID NO: 1207636 - DNA, 15 bp, Homo sapiens
acatggtgaaaccgc

SEQ ID NO: 1207637 - DNA, 15 bp, Homo sapiens
aacatggtgaaaccg

SEQ ID NO: 1207638 - DNA, 15 bp, Homo sapiens
gtgaggtcaggagtt

SEQ ID NO: 1207639 - DNA, 15 bp, Homo sapiens
cgtgaggtcaggagt

SEQ ID NO: 1207640 - DNA, 15 bp, Homo sapiens
acgtgaggtcaggag

SEQ ID NO: 1207641 - DNA, 15 bp, Homo sapiens
cacgtgaggtcagga

SEQ ID NO: 1207642 - DNA, 15 bp, Homo sapiens
tcacgtgaggtcagg

SEQ ID NO: 1207643 - DNA, 15 bp, Homo sapiens
atcacgtgaggtcag

SEQ ID NO: 1207644 - DNA, 15 bp, Homo sapiens
gatcacgtgaggtca

SEQ ID NO: 1207645 - DNA, 15 bp, Homo sapiens
ggatcacgtgaggtc

SEQ ID NO: 1207646 - DNA, 15 bp, Homo sapiens
tggatcacgtgaggt

SEQ ID NO: 1207647 - DNA, 15 bp, Homo sapiens
gtggatcacgtgagg

SEQ ID NO: 1207648 - DNA, 15 bp, Homo sapiens
ggtggatcacgtgag

SEQ ID NO: 1207649 - DNA, 15 bp, Homo sapiens
aggtggatcacgtga

SEQ ID NO: 1207650 - DNA, 15 bp, Homo sapiens
caggtggatcacgtg

SEQ ID NO: 1207651 - DNA, 15 bp, Homo sapiens
gcaggtggatcacgt

SEQ ID NO: 1207652 - DNA, 15 bp, Homo sapiens
ggcaggtggatcacg

SEQ ID NO: 1207653 - DNA, 15 bp, Homo sapiens
ctgggaggccgaggc

SEQ ID NO: 1207654 - DNA, 15 bp, Homo sapiens
tctgggaggccgagg

SEQ ID NO: 1207655 - DNA, 15 bp, Homo sapiens
ctctgggaggccgag

SEQ ID NO: 1207656 - DNA, 15 bp, Homo sapiens
actctgggaggccga

SEQ ID NO: 1207657 - DNA, 15 bp, Homo sapiens
cactctgggaggccg

SEQ ID NO: 1207658 - DNA, 15 bp, Homo sapiens
gggttcacacctgta

SEQ ID NO: 1207659 - DNA, 15 bp, Homo sapiens
ggggttcacacctgt

SEQ ID NO: 1207660 - DNA, 15 bp, Homo sapiens
aggggttcacacctg

SEQ ID NO: 1207661 - DNA, 15 bp, Homo sapiens
caggggttcacacct

SEQ ID NO: 1207662 - DNA, 15 bp, Homo sapiens
gcaggggttcacacc

SEQ ID NO: 1207663 - DNA, 15 bp, Homo sapiens
cgcaggggttcacac

SEQ ID NO: 1207664 - DNA, 15 bp, Homo sapiens
gcgcaggggttcaca

SEQ ID NO: 1207665 - DNA, 15 bp, Homo sapiens
ggcgcaggggttcac

SEQ ID NO: 1207666 - DNA, 15 bp, Homo sapiens
aggcgcaggggttca

SEQ ID NO: 1207667 - DNA, 15 bp, Homo sapiens
caggcgcaggggttc

SEQ ID NO: 1207668 - DNA, 15 bp, Homo sapiens
ccaggcgcaggggtt

SEQ ID NO: 1207669 - DNA, 15 bp, Homo sapiens
gccaggcgcaggggt

SEQ ID NO: 1207670 - DNA, 15 bp, Homo sapiens
ggccaggcgcagggg

SEQ ID NO: 1207671 - DNA, 15 bp, Homo sapiens
tggccaggcgcaggg

SEQ ID NO: 1207672 - DNA, 15 bp, Homo sapiens
ttggccaggcgcagg

SEQ ID NO: 1207673 - DNA, 15 bp, Homo sapiens
cttggccaggcgcag

SEQ ID NO: 1207674 - DNA, 15 bp, Homo sapiens
tcttggccaggcgca

SEQ ID NO: 1207675 - DNA, 15 bp, Homo sapiens
ttcttggccaggcgc

SEQ ID NO: 1207676 - DNA, 15 bp, Homo sapiens
tttcttggccaggcg

SEQ ID NO: 1207677 - DNA, 15 bp, Homo sapiens
ttttcttggccaggc

SEQ ID NO: 1207678 - DNA, 15 bp, Homo sapiens
cttttcttggccagg

SEQ ID NO: 1207679 - DNA, 15 bp, Homo sapiens
acttttcttggccag

SEQ ID NO: 1207680 - DNA, 15 bp, Homo sapiens
aacttttcttggcca

SEQ ID NO: 1207681 - DNA, 15 bp, Homo sapiens
caacttttcttggcc

SEQ ID NO: 1207682 - DNA, 15 bp, Homo sapiens
gcaacttttcttggc

SEQ ID NO: 1207683 - DNA, 15 bp, Homo sapiens
agcaacttttcttgg

SEQ ID NO: 1207684 - DNA, 15 bp, Homo sapiens
aagcaacttttcttg

SEQ ID NO: 1207685 - DNA, 15 bp, Homo sapiens
caagcaacttttctt

SEQ ID NO: 1207686 - DNA, 15 bp, Homo sapiens
tcaagcaacttttct

SEQ ID NO: 1207687 - DNA, 15 bp, Homo sapiens
ttcaagcaacttttc

SEQ ID NO: 1207688 - DNA, 15 bp, Homo sapiens
attcaagcaactttt

SEQ ID NO: 1207689 - DNA, 15 bp, Homo sapiens
cattcaagcaacttt

SEQ ID NO: 1207690 - DNA, 15 bp, Homo sapiens
tcattcaagcaactt

SEQ ID NO: 1207691 - DNA, 15 bp, Homo sapiens
ttcattcaagcaact

SEQ ID NO: 1207692 - DNA, 15 bp, Homo sapiens
cttcattcaagcaac

SEQ ID NO: 1207693 - DNA, 15 bp, Homo sapiens
tcttcattcaagcaa

SEQ ID NO: 1207694 - DNA, 15 bp, Homo sapiens
ctcttcattcaagca

SEQ ID NO: 1207695 - DNA, 15 bp, Homo sapiens
actcttcattcaagc

SEQ ID NO: 1207696 - DNA, 15 bp, Homo sapiens
tactcttcattcaag

SEQ ID NO: 1207697 - DNA, 15 bp, Homo sapiens
ttactcttcattcaa

SEQ ID NO: 1207698 - DNA, 15 bp, Homo sapiens
tttactcttcattca

SEQ ID NO: 1207699 - DNA, 15 bp, Homo sapiens
atttactcttcattc

SEQ ID NO: 1207700 - DNA, 15 bp, Homo sapiens
tatttactcttcatt

SEQ ID NO: 1207701 - DNA, 15 bp, Homo sapiens
ctatttactcttcat

SEQ ID NO: 1207702 - DNA, 15 bp, Homo sapiens
tctatttactcttca

SEQ ID NO: 1207703 - DNA, 15 bp, Homo sapiens
ttctatttactcttc

SEQ ID NO: 1207704 - DNA, 15 bp, Homo sapiens
cttctatttactctt

SEQ ID NO: 1207705 - DNA, 15 bp, Homo sapiens
tcttctatttactct

SEQ ID NO: 1207706 - DNA, 15 bp, Homo sapiens
gtcttctatttactc

SEQ ID NO: 1207707 - DNA, 15 bp, Homo sapiens
ggtcttctatttact

SEQ ID NO: 1207708 - DNA, 15 bp, Homo sapiens
gggtcttctatttac

SEQ ID NO: 1207709 - DNA, 15 bp, Homo sapiens
tgggtcttctattta

SEQ ID NO: 1207710 - DNA, 15 bp, Homo sapiens
ctgggtcttctattt

SEQ ID NO: 1207711 - DNA, 15 bp, Homo sapiens
tctgggtcttctatt

SEQ ID NO: 1207712 - DNA, 15 bp, Homo sapiens
ttctgggtcttctat

SEQ ID NO: 1207713 - DNA, 15 bp, Homo sapiens
tttctgggtcttcta

SEQ ID NO: 1207714 - DNA, 15 bp, Homo sapiens
ctttctgggtcttct

SEQ ID NO: 1207715 - DNA, 15 bp, Homo sapiens
tctttctgggtcttc

SEQ ID NO: 1207716 - DNA, 15 bp, Homo sapiens
ttctttctgggtctt

SEQ ID NO: 1207717 - DNA, 15 bp, Homo sapiens
tttctttctgggtct

SEQ ID NO: 1207718 - DNA, 15 bp, Homo sapiens
atttctttctgggtc

SEQ ID NO: 1207719 - DNA, 15 bp, Homo sapiens
catttctttctgggt

SEQ ID NO: 1207720 - DNA, 15 bp, Homo sapiens
tcatttctttctggg

SEQ ID NO: 1207721 - DNA, 15 bp, Homo sapiens
atcatttctttctgg

SEQ ID NO: 1207722 - DNA, 15 bp, Homo sapiens
aatcatttctttctg

SEQ ID NO: 1207723 - DNA, 15 bp, Homo sapiens
gaatcatttctttct

SEQ ID NO: 1207724 - DNA, 15 bp, Homo sapiens
cgaatcatttctttc

SEQ ID NO: 1207725 - DNA, 15 bp, Homo sapiens
acgaatcatttcttt

SEQ ID NO: 1207726 - DNA, 15 bp, Homo sapiens
gacgaatcatttctt

SEQ ID NO: 1207727 - DNA, 15 bp, Homo sapiens
ggacgaatcatttct

SEQ ID NO: 1207728 - DNA, 15 bp, Homo sapiens
cggacgaatcatttc

SEQ ID NO: 1207729 - DNA, 15 bp, Homo sapiens
tcggacgaatcattt

SEQ ID NO: 1207730 - DNA, 15 bp, Homo sapiens
ctcggacgaatcatt

SEQ ID NO: 1207731 - DNA, 15 bp, Homo sapiens
cctcggacgaatcat

SEQ ID NO: 1207732 - DNA, 15 bp, Homo sapiens
tcctcggacgaatca

SEQ ID NO: 1207733 - DNA, 15 bp, Homo sapiens
ttcctcggacgaatc

SEQ ID NO: 1207734 - DNA, 15 bp, Homo sapiens
cttcctcggacgaat

SEQ ID NO: 1207735 - DNA, 15 bp, Homo sapiens
ccttcctcggacgaa

SEQ ID NO: 1207736 - DNA, 15 bp, Homo sapiens
accttcctcggacga

SEQ ID NO: 1207737 - DNA, 15 bp, Homo sapiens
gaccttcctcggacg

SEQ ID NO: 1207738 - DNA, 15 bp, Homo sapiens
tgaccttcctcggac

SEQ ID NO: 1207739 - DNA, 15 bp, Homo sapiens
gtgaccttcctcgga

SEQ ID NO: 1207740 - DNA, 15 bp, Homo sapiens
tgtgaccttcctcgg

SEQ ID NO: 1207741 - DNA, 15 bp, Homo sapiens
ctgtgaccttcctcg

SEQ ID NO: 1207742 - DNA, 15 bp, Homo sapiens
tctgtgaccttcctc

SEQ ID NO: 1207743 - DNA, 15 bp, Homo sapiens
ttctgtgaccttcct

SEQ ID NO: 1207744 - DNA, 15 bp, Homo sapiens
cttctgtgaccttcc

SEQ ID NO: 1207745 - DNA, 15 bp, Homo sapiens
gcttctgtgaccttc

SEQ ID NO: 1207746 - DNA, 15 bp, Homo sapiens
tgcttctgtgacctt

SEQ ID NO: 1207747 - DNA, 15 bp, Homo sapiens
ttgcttctgtgacct

SEQ ID NO: 1207748 - DNA, 15 bp, Homo sapiens
gttgcttctgtgacc

SEQ ID NO: 1207749 - DNA, 15 bp, Homo sapiens
cgttgcttctgtgac

SEQ ID NO: 1207750 - DNA, 15 bp, Homo sapiens
acgttgcttctgtga

SEQ ID NO: 1207751 - DNA, 15 bp, Homo sapiens
tacgttgcttctgtg

SEQ ID NO: 1207752 - DNA, 15 bp, Homo sapiens
ttacgttgcttctgt

SEQ ID NO: 1207753 - DNA, 15 bp, Homo sapiens
attacgttgcttctg

SEQ ID NO: 1207754 - DNA, 15 bp, Homo sapiens
gattacgttgcttct

SEQ ID NO: 1207755 - DNA, 15 bp, Homo sapiens
tgattacgttgcttc

SEQ ID NO: 1207756 - DNA, 15 bp, Homo sapiens
ttgattacgttgctt

SEQ ID NO: 1207757 - DNA, 15 bp, Homo sapiens
cttgattacgttgct

SEQ ID NO: 1207758 - DNA, 15 bp, Homo sapiens
tcttgattacgttgc

SEQ ID NO: 1207759 - DNA, 15 bp, Homo sapiens
atcttgattacgttg

SEQ ID NO: 1207760 - DNA, 15 bp, Homo sapiens
catcttgattacgtt

SEQ ID NO: 1207761 - DNA, 15 bp, Homo sapiens
ccatcttgattacgt

SEQ ID NO: 1207762 - DNA, 15 bp, Homo sapiens
tccatcttgattacg

SEQ ID NO: 1207763 - DNA, 15 bp, Homo sapiens
ttccatcttgattac

SEQ ID NO: 1207764 - DNA, 15 bp, Homo sapiens
tttccatcttgatta

SEQ ID NO: 1207765 - DNA, 15 bp, Homo sapiens
atttccatcttgatt

SEQ ID NO: 1207766 - DNA, 15 bp, Homo sapiens
gatttccatcttgat

SEQ ID NO: 1207767 - DNA, 15 bp, Homo sapiens
agatttccatcttga

SEQ ID NO: 1207768 - DNA, 15 bp, Homo sapiens
cagatttccatcttg

SEQ ID NO: 1207769 - DNA, 15 bp, Homo sapiens
tcagatttccatctt

SEQ ID NO: 1207770 - DNA, 15 bp, Homo sapiens
gtcagatttccatct

SEQ ID NO: 1207771 - DNA, 15 bp, Homo sapiens
agtcagatttccatc

SEQ ID NO: 1207772 - DNA, 15 bp, Homo sapiens
gagtcagatttccat

SEQ ID NO: 1207773 - DNA, 15 bp, Homo sapiens
agagtcagatttcca

SEQ ID NO: 1207774 - DNA, 15 bp, Homo sapiens
aagagtcagatttcc

SEQ ID NO: 1207775 - DNA, 15 bp, Homo sapiens
gaagagtcagatttc

SEQ ID NO: 1207776 - DNA, 15 bp, Homo sapiens
ggaagagtcagattt

SEQ ID NO: 1207777 - DNA, 15 bp, Homo sapiens
aggaagagtcagatt

SEQ ID NO: 1207778 - DNA, 15 bp, Homo sapiens
taggaagagtcagat

SEQ ID NO: 1207779 - DNA, 15 bp, Homo sapiens
ttaggaagagtcaga

SEQ ID NO: 1207780 - DNA, 15 bp, Homo sapiens
attaggaagagtcag

SEQ ID NO: 1207781 - DNA, 15 bp, Homo sapiens
aattaggaagagtca

SEQ ID NO: 1207782 - DNA, 15 bp, Homo sapiens
aaattaggaagagtc

SEQ ID NO: 1207783 - DNA, 15 bp, Homo sapiens
aaaattaggaagagt

SEQ ID NO: 1207784 - DNA, 15 bp, Homo sapiens
caaaattaggaagag

SEQ ID NO: 1207785 - DNA, 15 bp, Homo sapiens
ccaaaattaggaaga

SEQ ID NO: 1207786 - DNA, 15 bp, Homo sapiens
gccaaaattaggaag

SEQ ID NO: 1207787 - DNA, 15 bp, Homo sapiens
ggccaaaattaggaa

SEQ ID NO: 1207788 - DNA, 15 bp, Homo sapiens
tggccaaaattagga

SEQ ID NO: 1207789 - DNA, 15 bp, Homo sapiens
ctggccaaaattagg

SEQ ID NO: 1207790 - DNA, 15 bp, Homo sapiens
tctggccaaaattag

SEQ ID NO: 1207791 - DNA, 15 bp, Homo sapiens
gtctggccaaaatta

SEQ ID NO: 1207792 - DNA, 15 bp, Homo sapiens
agtctggccaaaatt

SEQ ID NO: 1207793 - DNA, 15 bp, Homo sapiens
aagtctggccaaaat

SEQ ID NO: 1207794 - DNA, 15 bp, Homo sapiens
gaagtctggccaaaa

SEQ ID NO: 1207795 - DNA, 15 bp, Homo sapiens
ggaagtctggccaaa

SEQ ID NO: 1207796 - DNA, 15 bp, Homo sapiens
gggaagtctggccaa

SEQ ID NO: 1207797 - DNA, 15 bp, Homo sapiens
tgggaagtctggcca

SEQ ID NO: 1207798 - DNA, 15 bp, Homo sapiens
atgggaagtctggcc

SEQ ID NO: 1207799 - DNA, 15 bp, Homo sapiens
gatgggaagtctggc

SEQ ID NO: 1207800 - DNA, 15 bp, Homo sapiens
ggatgggaagtctgg

SEQ ID NO: 1207801 - DNA, 15 bp, Homo sapiens
gggatgggaagtctg

SEQ ID NO: 1207802 - DNA, 15 bp, Homo sapiens
agggatgggaagtct

SEQ ID NO: 1207803 - DNA, 15 bp, Homo sapiens
gagggatgggaagtc

SEQ ID NO: 1207804 - DNA, 15 bp, Homo sapiens
ggagggatgggaagt

SEQ ID NO: 1207805 - DNA, 15 bp, Homo sapiens
tggagggatgggaag

SEQ ID NO: 1207806 - DNA, 15 bp, Homo sapiens
ttggagggatgggaa

SEQ ID NO: 1207807 - DNA, 15 bp, Homo sapiens
tttggagggatggga

SEQ ID NO: 1207808 - DNA, 15 bp, Homo sapiens
ctttggagggatggg

SEQ ID NO: 1207809 - DNA, 15 bp, Homo sapiens
gctttggagggatgg

SEQ ID NO: 1207810 - DNA, 15 bp, Homo sapiens
agctttggagggatg

SEQ ID NO: 1207811 - DNA, 15 bp, Homo sapiens
aagctttggagggat

SEQ ID NO: 1207812 - DNA, 15 bp, Homo sapiens
aaagctttggaggga

SEQ ID NO: 1207813 - DNA, 15 bp, Homo sapiens
gaaagctttggaggg

SEQ ID NO: 1207814 - DNA, 15 bp, Homo sapiens
ggaaagctttggagg

SEQ ID NO: 1207815 - DNA, 15 bp, Homo sapiens
tggaaagctttggag

SEQ ID NO: 1207816 - DNA, 15 bp, Homo sapiens
ctggaaagctttgga

SEQ ID NO: 1207817 - DNA, 15 bp, Homo sapiens
tctggaaagctttgg

SEQ ID NO: 1207818 - DNA, 15 bp, Homo sapiens
gtctggaaagctttg

SEQ ID NO: 1207819 - DNA, 15 bp, Homo sapiens
agtctggaaagcttt

SEQ ID NO: 1207820 - DNA, 15 bp, Homo sapiens
gagtctggaaagctt

SEQ ID NO: 1207821 - DNA, 15 bp, Homo sapiens
agagtctggaaagct

SEQ ID NO: 1207822 - DNA, 15 bp, Homo sapiens
aagagtctggaaagc

SEQ ID NO: 1207823 - DNA, 15 bp, Homo sapiens
gaagagtctggaaag

SEQ ID NO: 1207824 - DNA, 15 bp, Homo sapiens
ggaagagtctggaaa

SEQ ID NO: 1207825 - DNA, 15 bp, Homo sapiens
tggaagagtctggaa

SEQ ID NO: 1207826 - DNA, 15 bp, Homo sapiens
ctggaagagtctgga

SEQ ID NO: 1207827 - DNA, 15 bp, Homo sapiens
tctggaagagtctgg

SEQ ID NO: 1207828 - DNA, 15 bp, Homo sapiens
atctggaagagtctg

SEQ ID NO: 1207829 - DNA, 15 bp, Homo sapiens
gatctggaagagtct

SEQ ID NO: 1207830 - DNA, 15 bp, Homo sapiens
tgatctggaagagtc

SEQ ID NO: 1207831 - DNA, 15 bp, Homo sapiens
atgatctggaagagt

SEQ ID NO: 1207832 - DNA, 15 bp, Homo sapiens
aatgatctggaagag

SEQ ID NO: 1207833 - DNA, 15 bp, Homo sapiens
gaatgatctggaaga

SEQ ID NO: 1207834 - DNA, 15 bp, Homo sapiens
agaatgatctggaag

SEQ ID NO: 1207835 - DNA, 15 bp, Homo sapiens
tagaatgatctggaa

SEQ ID NO: 1207836 - DNA, 15 bp, Homo sapiens
ctagaatgatctgga

SEQ ID NO: 1207837 - DNA, 15 bp, Homo sapiens
tctagaatgatctgg

SEQ ID NO: 1207838 - DNA, 15 bp, Homo sapiens
atctagaatgatctg

SEQ ID NO: 1207839 - DNA, 15 bp, Homo sapiens
tatctagaatgatct

SEQ ID NO: 1207840 - DNA, 15 bp, Homo sapiens
atatctagaatgatc

SEQ ID NO: 1207841 - DNA, 15 bp, Homo sapiens
aatatctagaatgat

SEQ ID NO: 1207842 - DNA, 15 bp, Homo sapiens
aaatatctagaatga

SEQ ID NO: 1207843 - DNA, 15 bp, Homo sapiens
gaaatatctagaatg

SEQ ID NO: 1207844 - DNA, 15 bp, Homo sapiens
ggaaatatctagaat

SEQ ID NO: 1207845 - DNA, 15 bp, Homo sapiens
tggaaatatctagaa

SEQ ID NO: 1207846 - DNA, 15 bp, Homo sapiens
ctggaaatatctaga

SEQ ID NO: 1207847 - DNA, 15 bp, Homo sapiens
tctggaaatatctag

SEQ ID NO: 1207848 - DNA, 15 bp, Homo sapiens
ttctggaaatatcta

SEQ ID NO: 1207849 - DNA, 15 bp, Homo sapiens
tttctggaaatatct

SEQ ID NO: 1207850 - DNA, 15 bp, Homo sapiens
atttctggaaatatc

SEQ ID NO: 1207851 - DNA, 15 bp, Homo sapiens
gatttctggaaatat

SEQ ID NO: 1207852 - DNA, 15 bp, Homo sapiens
tgatttctggaaata

SEQ ID NO: 1207853 - DNA, 15 bp, Homo sapiens
atgatttctggaaat

SEQ ID NO: 1207854 - DNA, 15 bp, Homo sapiens
aatgatttctggaaa

SEQ ID NO: 1207855 - DNA, 15 bp, Homo sapiens
gaatgatttctggaa

SEQ ID NO: 1207856 - DNA, 15 bp, Homo sapiens
cgaatgatttctgga

SEQ ID NO: 1207857 - DNA, 15 bp, Homo sapiens
acgaatgatttctgg

SEQ ID NO: 1207858 - DNA, 15 bp, Homo sapiens
cacgaatgatttctg

SEQ ID NO: 1207859 - DNA, 15 bp, Homo sapiens
tcacgaatgatttct

SEQ ID NO: 1207860 - DNA, 15 bp, Homo sapiens
ttcacgaatgatttc

SEQ ID NO: 1207861 - DNA, 15 bp, Homo sapiens
tttcacgaatgattt

SEQ ID NO: 1207862 - DNA, 15 bp, Homo sapiens
atttcacgaatgatt

SEQ ID NO: 1207863 - DNA, 15 bp, Homo sapiens
gatttcacgaatgat

SEQ ID NO: 1207864 - DNA, 15 bp, Homo sapiens
agatttcacgaatga

SEQ ID NO: 1207865 - DNA, 15 bp, Homo sapiens
tagatttcacgaatg

SEQ ID NO: 1207866 - DNA, 15 bp, Homo sapiens
ttagatttcacgaat

SEQ ID NO: 1207867 - DNA, 15 bp, Homo sapiens
gttagatttcacgaa

SEQ ID NO: 1207868 - DNA, 15 bp, Homo sapiens
agttagatttcacga

SEQ ID NO: 1207869 - DNA, 15 bp, Homo sapiens
tagttagatttcacg

SEQ ID NO: 1207870 - DNA, 15 bp, Homo sapiens
ctagttagatttcac

SEQ ID NO: 1207871 - DNA, 15 bp, Homo sapiens
cctagttagatttca

SEQ ID NO: 1207872 - DNA, 15 bp, Homo sapiens
tcctagttagatttc

SEQ ID NO: 1207873 - DNA, 15 bp, Homo sapiens
ctcctagttagattt

SEQ ID NO: 1207874 - DNA, 15 bp, Homo sapiens
actcctagttagatt

SEQ ID NO: 1207875 - DNA, 15 bp, Homo sapiens
tactcctagttagat

SEQ ID NO: 1207876 - DNA, 15 bp, Homo sapiens
ctactcctagttaga

SEQ ID NO: 1207877 - DNA, 15 bp, Homo sapiens
actactcctagttag

SEQ ID NO: 1207878 - DNA, 15 bp, Homo sapiens
gactactcctagtta

SEQ ID NO: 1207879 - DNA, 15 bp, Homo sapiens
agactactcctagtt

SEQ ID NO: 1207880 - DNA, 15 bp, Homo sapiens
cagactactcctagt

SEQ ID NO: 1207881 - DNA, 15 bp, Homo sapiens
acagactactcctag

SEQ ID NO: 1207882 - DNA, 15 bp, Homo sapiens
tacagactactccta

SEQ ID NO: 1207883 - DNA, 15 bp, Homo sapiens
ttacagactactcct

SEQ ID NO: 1207884 - DNA, 15 bp, Homo sapiens
tttacagactactcc

SEQ ID NO: 1207885 - DNA, 15 bp, Homo sapiens
gtttacagactactc

SEQ ID NO: 1207886 - DNA, 15 bp, Homo sapiens
tgtttacagactact

SEQ ID NO: 1207887 - DNA, 15 bp, Homo sapiens
ttgtttacagactac

SEQ ID NO: 1207888 - DNA, 15 bp, Homo sapiens
attgtttacagacta

SEQ ID NO: 1207889 - DNA, 15 bp, Homo sapiens
cattgtttacagact

SEQ ID NO: 1207890 - DNA, 15 bp, Homo sapiens
acattgtttacagac

SEQ ID NO: 1207891 - DNA, 15 bp, Homo sapiens
cacattgtttacaga

SEQ ID NO: 1207892 - DNA, 15 bp, Homo sapiens
acacattgtttacag

SEQ ID NO: 1207893 - DNA, 15 bp, Homo sapiens
aacacattgtttaca

SEQ ID NO: 1207894 - DNA, 15 bp, Homo sapiens
aaacacattgtttac

SEQ ID NO: 1207895 - DNA, 15 bp, Homo sapiens
gaaacacattgttta

SEQ ID NO: 1207896 - DNA, 15 bp, Homo sapiens
tgaaacacattgttt

SEQ ID NO: 1207897 - DNA, 15 bp, Homo sapiens
gtgaaacacattgtt

SEQ ID NO: 1207898 - DNA, 15 bp, Homo sapiens
tgtgaaacacattgt

SEQ ID NO: 1207899 - DNA, 15 bp, Homo sapiens
gtgtgaaacacattg

SEQ ID NO: 1207900 - DNA, 15 bp, Homo sapiens
tgtgtgaaacacatt

SEQ ID NO: 1207901 - DNA, 15 bp, Homo sapiens
ctgtgtgaaacacat

SEQ ID NO: 1207902 - DNA, 15 bp, Homo sapiens
tctgtgtgaaacaca

SEQ ID NO: 1207903 - DNA, 15 bp, Homo sapiens
atctgtgtgaaacac

SEQ ID NO: 1207904 - DNA, 15 bp, Homo sapiens
tatctgtgtgaaaca

SEQ ID NO: 1207905 - DNA, 15 bp, Homo sapiens
gtatctgtgtgaaac

SEQ ID NO: 1207906 - DNA, 15 bp, Homo sapiens
tgtatctgtgtgaaa

SEQ ID NO: 1207907 - DNA, 15 bp, Homo sapiens
ttgtatctgtgtgaa

SEQ ID NO: 1207908 - DNA, 15 bp, Homo sapiens
attgtatctgtgtga

SEQ ID NO: 1207909 - DNA, 15 bp, Homo sapiens
aattgtatctgtgtg

SEQ ID NO: 1207910 - DNA, 15 bp, Homo sapiens
gaattgtatctgtgt

SEQ ID NO: 1207911 - DNA, 15 bp, Homo sapiens
tgaattgtatctgtg

SEQ ID NO: 1207912 - DNA, 15 bp, Homo sapiens
atgaattgtatctgt

SEQ ID NO: 1207913 - DNA, 15 bp, Homo sapiens
tatgaattgtatctg

SEQ ID NO: 1207914 - DNA, 15 bp, Homo sapiens
ttatgaattgtatct

SEQ ID NO: 1207915 - DNA, 15 bp, Homo sapiens
tttatgaattgtatc

SEQ ID NO: 1207916 - DNA, 15 bp, Homo sapiens
gtttatgaattgtat

SEQ ID NO: 1207917 - DNA, 15 bp, Homo sapiens
cgtttatgaattgta

SEQ ID NO: 1207918 - DNA, 15 bp, Homo sapiens
tcgtttatgaattgt

SEQ ID NO: 1207919 - DNA, 15 bp, Homo sapiens
atcgtttatgaattg

SEQ ID NO: 1207920 - DNA, 15 bp, Homo sapiens
catcgtttatgaatt

SEQ ID NO: 1207921 - DNA, 15 bp, Homo sapiens
tcatcgtttatgaat

SEQ ID NO: 1207922 - DNA, 15 bp, Homo sapiens
ctcatcgtttatgaa

SEQ ID NO: 1207923 - DNA, 15 bp, Homo sapiens
tctcatcgtttatga

SEQ ID NO: 1207924 - DNA, 15 bp, Homo sapiens
ttctcatcgtttatg

SEQ ID NO: 1207925 - DNA, 15 bp, Homo sapiens
cttctcatcgtttat

SEQ ID NO: 1207926 - DNA, 15 bp, Homo sapiens
tcttctcatcgttta

SEQ ID NO: 1207927 - DNA, 15 bp, Homo sapiens
gtcttctcatcgttt

SEQ ID NO: 1207928 - DNA, 15 bp, Homo sapiens
tgtcttctcatcgtt

SEQ ID NO: 1207929 - DNA, 15 bp, Homo sapiens
ttgtcttctcatcgt

SEQ ID NO: 1207930 - DNA, 15 bp, Homo sapiens
cttgtcttctcatcg

SEQ ID NO: 1207931 - DNA, 15 bp, Homo sapiens
ccttgtcttctcatc

SEQ ID NO: 1207932 - DNA, 15 bp, Homo sapiens
tccttgtcttctcat

SEQ ID NO: 1207933 - DNA, 15 bp, Homo sapiens
gtccttgtcttctca

SEQ ID NO: 1207934 - DNA, 15 bp, Homo sapiens
tgtccttgtcttctc

SEQ ID NO: 1207935 - DNA, 15 bp, Homo sapiens
gtgtccttgtcttct

SEQ ID NO: 1207936 - DNA, 15 bp, Homo sapiens
agtgtccttgtcttc

SEQ ID NO: 1207937 - DNA, 15 bp, Homo sapiens
aagtgtccttgtctt

SEQ ID NO: 1207938 - DNA, 15 bp, Homo sapiens
gaagtgtccttgtct

SEQ ID NO: 1207939 - DNA, 15 bp, Homo sapiens
tgaagtgtccttgtc

SEQ ID NO: 1207940 - DNA, 15 bp, Homo sapiens
atgaagtgtccttgt

SEQ ID NO: 1207941 - DNA, 15 bp, Homo sapiens
catgaagtgtccttg

SEQ ID NO: 1207942 - DNA, 15 bp, Homo sapiens
tcatgaagtgtcctt

SEQ ID NO: 1207943 - DNA, 15 bp, Homo sapiens
ttcatgaagtgtcct

SEQ ID NO: 1207944 - DNA, 15 bp, Homo sapiens
attcatgaagtgtcc

SEQ ID NO: 1207945 - DNA, 15 bp, Homo sapiens
cattcatgaagtgtc

SEQ ID NO: 1207946 - DNA, 15 bp, Homo sapiens
tcattcatgaagtgt

SEQ ID NO: 1207947 - DNA, 15 bp, Homo sapiens
ttcattcatgaagtg

SEQ ID NO: 1207948 - DNA, 15 bp, Homo sapiens
tttcattcatgaagt

SEQ ID NO: 1207949 - DNA, 15 bp, Homo sapiens
atttcattcatgaag

SEQ ID NO: 1207950 - DNA, 15 bp, Homo sapiens
aatttcattcatgaa

SEQ ID NO: 1207951 - DNA, 15 bp, Homo sapiens
aaatttcattcatga

SEQ ID NO: 1207952 - DNA, 15 bp, Homo sapiens
aaaatttcattcatg

SEQ ID NO: 1207953 - DNA, 15 bp, Homo sapiens
aaaaatttcattcat

SEQ ID NO: 1207954 - DNA, 15 bp, Homo sapiens
taaaaatttcattca

SEQ ID NO: 1207955 - DNA, 15 bp, Homo sapiens
gtaaaaatttcattc

SEQ ID NO: 1207956 - DNA, 15 bp, Homo sapiens
cgtaaaaatttcatt

SEQ ID NO: 1207957 - DNA, 15 bp, Homo sapiens
ccgtaaaaatttcat

SEQ ID NO: 1207958 - DNA, 15 bp, Homo sapiens
gccgtaaaaatttca

SEQ ID NO: 1207959 - DNA, 15 bp, Homo sapiens
ggccgtaaaaatttc

SEQ ID NO: 1207960 - DNA, 15 bp, Homo sapiens
cggccgtaaaaattt

SEQ ID NO: 1207961 - DNA, 15 bp, Homo sapiens
ccggccgtaaaaatt

SEQ ID NO: 1207962 - DNA, 15 bp, Homo sapiens
cccggccgtaaaaat

SEQ ID NO: 1207963 - DNA, 15 bp, Homo sapiens
acccggccgtaaaaa

SEQ ID NO: 1207964 - DNA, 15 bp, Homo sapiens
tacccggccgtaaaa

SEQ ID NO: 1207965 - DNA, 15 bp, Homo sapiens
atacccggccgtaaa

SEQ ID NO: 1207966 - DNA, 15 bp, Homo sapiens
catacccggccgtaa

SEQ ID NO: 1207967 - DNA, 15 bp, Homo sapiens
acatacccggccgta

SEQ ID NO: 1207968 - DNA, 15 bp, Homo sapiens
aacatacccggccgt

SEQ ID NO: 1207969 - DNA, 15 bp, Homo sapiens
caacatacccggccg

SEQ ID NO: 1207970 - DNA, 15 bp, Homo sapiens
ccaacatacccggcc

SEQ ID NO: 1207971 - DNA, 15 bp, Homo sapiens
gccaacatacccggc

SEQ ID NO: 1207972 - DNA, 15 bp, Homo sapiens
agccaacatacccgg

SEQ ID NO: 1207973 - DNA, 15 bp, Homo sapiens
gagccaacatacccg

SEQ ID NO: 1207974 - DNA, 15 bp, Homo sapiens
tgagccaacataccc

SEQ ID NO: 1207975 - DNA, 15 bp, Homo sapiens
gtgagccaacatacc

SEQ ID NO: 1207976 - DNA, 15 bp, Homo sapiens
cgtgagccaacatac

SEQ ID NO: 1207977 - DNA, 15 bp, Homo sapiens
gcgtgagccaacata

SEQ ID NO: 1207978 - DNA, 15 bp, Homo sapiens
taggcgtgagccaac

SEQ ID NO: 1207979 - DNA, 15 bp, Homo sapiens
ataggcgtgagccaa

SEQ ID NO: 1207980 - DNA, 15 bp, Homo sapiens
tataggcgtgagcca

SEQ ID NO: 1207981 - DNA, 15 bp, Homo sapiens
cctgggattataggc

SEQ ID NO: 1207982 - DNA, 15 bp, Homo sapiens
tcctgggattatagg

SEQ ID NO: 1207983 - DNA, 15 bp, Homo sapiens
gtcctgggattatag

SEQ ID NO: 1207984 - DNA, 15 bp, Homo sapiens
agtcctgggattata

SEQ ID NO: 1207985 - DNA, 15 bp, Homo sapiens
aagtcctgggattat

SEQ ID NO: 1207986 - DNA, 15 bp, Homo sapiens
tccaaagtcctggga

SEQ ID NO: 1207987 - DNA, 15 bp, Homo sapiens
ttccaaagtcctggg

SEQ ID NO: 1207988 - DNA, 15 bp, Homo sapiens
cttccaaagtcctgg

SEQ ID NO: 1207989 - DNA, 15 bp, Homo sapiens
tcttccaaagtcctg

SEQ ID NO: 1207990 - DNA, 15 bp, Homo sapiens
gtcttccaaagtcct

SEQ ID NO: 1207991 - DNA, 15 bp, Homo sapiens
ggtcttccaaagtcc

SEQ ID NO: 1207992 - DNA, 15 bp, Homo sapiens
gggtcttccaaagtc

SEQ ID NO: 1207993 - DNA, 15 bp, Homo sapiens
tgggtcttccaaagt

SEQ ID NO: 1207994 - DNA, 15 bp, Homo sapiens
ctgggtcttccaaag

SEQ ID NO: 1207995 - DNA, 15 bp, Homo sapiens
cctgggtcttccaaa

SEQ ID NO: 1207996 - DNA, 15 bp, Homo sapiens
gcctgggtcttccaa

SEQ ID NO: 1207997 - DNA, 15 bp, Homo sapiens
tgcctgggtcttcca

SEQ ID NO: 1207998 - DNA, 15 bp, Homo sapiens
ctgcctgggtcttcc

SEQ ID NO: 1207999 - DNA, 15 bp, Homo sapiens
cctgcctgggtcttc

SEQ ID NO: 1208000 - DNA, 15 bp, Homo sapiens
tcctgcctgggtctt

SEQ ID NO: 1208001 - DNA, 15 bp, Homo sapiens
ctcctgcctgggtct

SEQ ID NO: 1208002 - DNA, 15 bp, Homo sapiens
cctcctgcctgggtc

SEQ ID NO: 1208003 - DNA, 15 bp, Homo sapiens
tcctcctgcctgggt

SEQ ID NO: 1208004 - DNA, 15 bp, Homo sapiens
atcctcctgcctggg

SEQ ID NO: 1208005 - DNA, 15 bp, Homo sapiens
aatcctcctgcctgg

SEQ ID NO: 1208006 - DNA, 15 bp, Homo sapiens
caatcctcctgcctg

SEQ ID NO: 1208007 - DNA, 15 bp, Homo sapiens
actcaagcaatcctc

SEQ ID NO: 1208008 - DNA, 15 bp, Homo sapiens
gactcaagcaatcct

SEQ ID NO: 1208009 - DNA, 15 bp, Homo sapiens
ggactcaagcaatcc

SEQ ID NO: 1208010 - DNA, 15 bp, Homo sapiens
tggactcaagcaatc

SEQ ID NO: 1208011 - DNA, 15 bp, Homo sapiens
ctggactcaagcaat

SEQ ID NO: 1208012 - DNA, 15 bp, Homo sapiens
cctggactcaagcaa

SEQ ID NO: 1208013 - DNA, 15 bp, Homo sapiens
tcctggactcaagca

SEQ ID NO: 1208014 - DNA, 15 bp, Homo sapiens
ctcctggactcaagc

SEQ ID NO: 1208015 - DNA, 15 bp, Homo sapiens
tcttgaactcctgga

SEQ ID NO: 1208016 - DNA, 15 bp, Homo sapiens
cccagactggtcttg

SEQ ID NO: 1208017 - DNA, 15 bp, Homo sapiens
gcccagactggtctt

SEQ ID NO: 1208018 - DNA, 15 bp, Homo sapiens
ggcccagactggtct

SEQ ID NO: 1208019 - DNA, 15 bp, Homo sapiens
tggcccagactggtc

SEQ ID NO: 1208020 - DNA, 15 bp, Homo sapiens
gtggcccagactggt

SEQ ID NO: 1208021 - DNA, 15 bp, Homo sapiens
tgtggcccagactgg

SEQ ID NO: 1208022 - DNA, 15 bp, Homo sapiens
atgtggcccagactg

SEQ ID NO: 1208023 - DNA, 15 bp, Homo sapiens
tatgtggcccagact

SEQ ID NO: 1208024 - DNA, 15 bp, Homo sapiens
ctatgtggcccagac

SEQ ID NO: 1208025 - DNA, 15 bp, Homo sapiens
actatgtggcccaga

SEQ ID NO: 1208026 - DNA, 15 bp, Homo sapiens
cactatgtggcccag

SEQ ID NO: 1208027 - DNA, 15 bp, Homo sapiens
tcactatgtggccca

SEQ ID NO: 1208028 - DNA, 15 bp, Homo sapiens
ctcactatgtggccc

SEQ ID NO: 1208029 - DNA, 15 bp, Homo sapiens
tctcactatgtggcc

SEQ ID NO: 1208030 - DNA, 15 bp, Homo sapiens
gtctcactatgtggc

SEQ ID NO: 1208031 - DNA, 15 bp, Homo sapiens
ggtctcactatgtgg

SEQ ID NO: 1208032 - DNA, 15 bp, Homo sapiens
gggtctcactatgtg

SEQ ID NO: 1208033 - DNA, 15 bp, Homo sapiens
cagggtctcactatg

SEQ ID NO: 1208034 - DNA, 15 bp, Homo sapiens
cgacagggtctcact

SEQ ID NO: 1208035 - DNA, 15 bp, Homo sapiens
gcgacagggtctcac

SEQ ID NO: 1208036 - DNA, 15 bp, Homo sapiens
agcgacagggtctca

SEQ ID NO: 1208037 - DNA, 15 bp, Homo sapiens
tagcgacagggtctc

SEQ ID NO: 1208038 - DNA, 15 bp, Homo sapiens
gtagcgacagggtct

SEQ ID NO: 1208039 - DNA, 15 bp, Homo sapiens
tgtagcgacagggtc

SEQ ID NO: 1208040 - DNA, 15 bp, Homo sapiens
ttgtagcgacagggt

SEQ ID NO: 1208041 - DNA, 15 bp, Homo sapiens
tttgtagcgacaggg

SEQ ID NO: 1208042 - DNA, 15 bp, Homo sapiens
ttttgtagcgacagg

SEQ ID NO: 1208043 - DNA, 15 bp, Homo sapiens
tttttgtagcgacag

SEQ ID NO: 1208044 - DNA, 15 bp, Homo sapiens
ttttttgtagcgaca

SEQ ID NO: 1208045 - DNA, 15 bp, Homo sapiens
aattttttgtagcga

SEQ ID NO: 1208046 - DNA, 15 bp, Homo sapiens
aaattttttgtagcg

SEQ ID NO: 1208047 - DNA, 15 bp, Homo sapiens
taaattttttgtagc

SEQ ID NO: 1208048 - DNA, 15 bp, Homo sapiens
ttaaattttttgtag

SEQ ID NO: 1208049 - DNA, 15 bp, Homo sapiens
tttaaattttttgta

SEQ ID NO: 1208050 - DNA, 15 bp, Homo sapiens
ttttaaattttttgt

SEQ ID NO: 1208051 - DNA, 15 bp, Homo sapiens
tttttaaattttttg

SEQ ID NO: 1208052 - DNA, 15 bp, Homo sapiens
atttttaaatttttt

SEQ ID NO: 1208053 - DNA, 15 bp, Homo sapiens
aatttttaaattttt

SEQ ID NO: 1208054 - DNA, 15 bp, Homo sapiens
taatttttaaatttt

SEQ ID NO: 1208055 - DNA, 15 bp, Homo sapiens
ctaatttttaaattt

SEQ ID NO: 1208056 - DNA, 15 bp, Homo sapiens
cctaatttttaaatt

SEQ ID NO: 1208057 - DNA, 15 bp, Homo sapiens
acctaatttttaaat

SEQ ID NO: 1208058 - DNA, 15 bp, Homo sapiens
tacctaatttttaaa

SEQ ID NO: 1208059 - DNA, 15 bp, Homo sapiens
ctacctaatttttaa

SEQ ID NO: 1208060 - DNA, 15 bp, Homo sapiens
tctacctaattttta

SEQ ID NO: 1208061 - DNA, 15 bp, Homo sapiens
atctacctaattttt

SEQ ID NO: 1208062 - DNA, 15 bp, Homo sapiens
tatctacctaatttt

SEQ ID NO: 1208063 - DNA, 15 bp, Homo sapiens
atatctacctaattt

SEQ ID NO: 1208064 - DNA, 15 bp, Homo sapiens
catatctacctaatt

SEQ ID NO: 1208065 - DNA, 15 bp, Homo sapiens
ccatatctacctaat

SEQ ID NO: 1208066 - DNA, 15 bp, Homo sapiens
accatatctacctaa

SEQ ID NO: 1208067 - DNA, 15 bp, Homo sapiens
caccatatctaccta

SEQ ID NO: 1208068 - DNA, 15 bp, Homo sapiens
ccaccatatctacct

SEQ ID NO: 1208069 - DNA, 15 bp, Homo sapiens
accaccatatctacc

SEQ ID NO: 1208070 - DNA, 15 bp, Homo sapiens
caccaccatatctac

SEQ ID NO: 1208071 - DNA, 15 bp, Homo sapiens
acaccaccatatcta

SEQ ID NO: 1208072 - DNA, 15 bp, Homo sapiens
tacaccaccatatct

SEQ ID NO: 1208073 - DNA, 15 bp, Homo sapiens
atacaccaccatatc

SEQ ID NO: 1208074 - DNA, 15 bp, Homo sapiens
catacaccaccatat

SEQ ID NO: 1208075 - DNA, 15 bp, Homo sapiens
gcatacaccaccata

SEQ ID NO: 1208076 - DNA, 15 bp, Homo sapiens
ggcatacaccaccat

SEQ ID NO: 1208077 - DNA, 15 bp, Homo sapiens
aggcatacaccacca

SEQ ID NO: 1208078 - DNA, 15 bp, Homo sapiens
gaggcatacaccacc

SEQ ID NO: 1208079 - DNA, 15 bp, Homo sapiens
agaggcatacaccac

SEQ ID NO: 1208080 - DNA, 15 bp, Homo sapiens
tagaggcatacacca

SEQ ID NO: 1208081 - DNA, 15 bp, Homo sapiens
ctagaggcatacacc

SEQ ID NO: 1208082 - DNA, 15 bp, Homo sapiens
actagaggcatacac

SEQ ID NO: 1208083 - DNA, 15 bp, Homo sapiens
aactagaggcataca

SEQ ID NO: 1208084 - DNA, 15 bp, Homo sapiens
aaactagaggcatac

SEQ ID NO: 1208085 - DNA, 15 bp, Homo sapiens
aaaactagaggcata

SEQ ID NO: 1208086 - DNA, 15 bp, Homo sapiens
taaaactagaggcat

SEQ ID NO: 1208087 - DNA, 15 bp, Homo sapiens
ctaaaactagaggca

SEQ ID NO: 1208088 - DNA, 15 bp, Homo sapiens
gctaaaactagaggc

SEQ ID NO: 1208089 - DNA, 15 bp, Homo sapiens
agctaaaactagagg

SEQ ID NO: 1208090 - DNA, 15 bp, Homo sapiens
aagctaaaactagag

SEQ ID NO: 1208091 - DNA, 15 bp, Homo sapiens
aaagctaaaactaga

SEQ ID NO: 1208092 - DNA, 15 bp, Homo sapiens
aaaagctaaaactag

SEQ ID NO: 1208093 - DNA, 15 bp, Homo sapiens
aaaaagctaaaacta

SEQ ID NO: 1208094 - DNA, 15 bp, Homo sapiens
aaaaaagctaaaact

SEQ ID NO: 1208095 - DNA, 15 bp, Homo sapiens
caaaaaagctaaaac

SEQ ID NO: 1208096 - DNA, 15 bp, Homo sapiens
ccaaaaaagctaaaa

SEQ ID NO: 1208097 - DNA, 15 bp, Homo sapiens
tccaaaaaagctaaa

SEQ ID NO: 1208098 - DNA, 15 bp, Homo sapiens
ctccaaaaaagctaa

SEQ ID NO: 1208099 - DNA, 15 bp, Homo sapiens
cctccaaaaaagcta

SEQ ID NO: 1208100 - DNA, 15 bp, Homo sapiens
gcctccaaaaaagct

SEQ ID NO: 1208101 - DNA, 15 bp, Homo sapiens
agcctccaaaaaagc

SEQ ID NO: 1208102 - DNA, 15 bp, Homo sapiens
cagcctccaaaaaag

SEQ ID NO: 1208103 - DNA, 15 bp, Homo sapiens
tcagcctccaaaaaa

SEQ ID NO: 1208104 - DNA, 15 bp, Homo sapiens
ttcagcctccaaaaa

SEQ ID NO: 1208105 - DNA, 15 bp, Homo sapiens
cttcagcctccaaaa

SEQ ID NO: 1208106 - DNA, 15 bp, Homo sapiens
gcttcagcctccaaa

SEQ ID NO: 1208107 - DNA, 15 bp, Homo sapiens
tgcttcagcctccaa

SEQ ID NO: 1208108 - DNA, 15 bp, Homo sapiens
ctgcttcagcctcca

SEQ ID NO: 1208109 - DNA, 15 bp, Homo sapiens
agatcctcctgcttc

SEQ ID NO: 1208110 - DNA, 15 bp, Homo sapiens
gagatcctcctgctt

SEQ ID NO: 1208111 - DNA, 15 bp, Homo sapiens
agagatcctcctgct

SEQ ID NO: 1208112 - DNA, 15 bp, Homo sapiens
aagagatcctcctgc

SEQ ID NO: 1208113 - DNA, 15 bp, Homo sapiens
caagagatcctcctg

SEQ ID NO: 1208114 - DNA, 15 bp, Homo sapiens
tcaagagatcctcct

SEQ ID NO: 1208115 - DNA, 15 bp, Homo sapiens
ctgggctcaagagat

SEQ ID NO: 1208116 - DNA, 15 bp, Homo sapiens
cctgggctcaagaga

SEQ ID NO: 1208117 - DNA, 15 bp, Homo sapiens
tcctgggctcaagag

SEQ ID NO: 1208118 - DNA, 15 bp, Homo sapiens
ctcctgggctcaaga

SEQ ID NO: 1208119 - DNA, 15 bp, Homo sapiens
gctcaacctcctggg

SEQ ID NO: 1208120 - DNA, 15 bp, Homo sapiens
agctcaacctcctgg

SEQ ID NO: 1208121 - DNA, 15 bp, Homo sapiens
cagctcaacctcctg

SEQ ID NO: 1208122 - DNA, 15 bp, Homo sapiens
gcagctcaacctcct

SEQ ID NO: 1208123 - DNA, 15 bp, Homo sapiens
tgcagctcaacctcc

SEQ ID NO: 1208124 - DNA, 15 bp, Homo sapiens
ttgcagctcaacctc

SEQ ID NO: 1208125 - DNA, 15 bp, Homo sapiens
attgcagctcaacct

SEQ ID NO: 1208126 - DNA, 15 bp, Homo sapiens
cattgcagctcaacc

SEQ ID NO: 1208127 - DNA, 15 bp, Homo sapiens
tcattgcagctcaac

SEQ ID NO: 1208128 - DNA, 15 bp, Homo sapiens
ctcattgcagctcaa

SEQ ID NO: 1208129 - DNA, 15 bp, Homo sapiens
gctcattgcagctca

SEQ ID NO: 1208130 - DNA, 15 bp, Homo sapiens
agctcattgcagctc

SEQ ID NO: 1208131 - DNA, 15 bp, Homo sapiens
tagctcattgcagct

SEQ ID NO: 1208132 - DNA, 15 bp, Homo sapiens
gtagctcattgcagc

SEQ ID NO: 1208133 - DNA, 15 bp, Homo sapiens
cgtagctcattgcag

SEQ ID NO: 1208134 - DNA, 15 bp, Homo sapiens
tcgtagctcattgca

SEQ ID NO: 1208135 - DNA, 15 bp, Homo sapiens
atcgtagctcattgc

SEQ ID NO: 1208136 - DNA, 15 bp, Homo sapiens
aatcgtagctcattg

SEQ ID NO: 1208137 - DNA, 15 bp, Homo sapiens
caatcgtagctcatt

SEQ ID NO: 1208138 - DNA, 15 bp, Homo sapiens
tcaatcgtagctcat

SEQ ID NO: 1208139 - DNA, 15 bp, Homo sapiens
ttcaatcgtagctca

SEQ ID NO: 1208140 - DNA, 15 bp, Homo sapiens
gttcaatcgtagctc

SEQ ID NO: 1208141 - DNA, 15 bp, Homo sapiens
agttcaatcgtagct

SEQ ID NO: 1208142 - DNA, 15 bp, Homo sapiens
tagttcaatcgtagc

SEQ ID NO: 1208143 - DNA, 15 bp, Homo sapiens
gtagttcaatcgtag

SEQ ID NO: 1208144 - DNA, 15 bp, Homo sapiens
agtagttcaatcgta

SEQ ID NO: 1208145 - DNA, 15 bp, Homo sapiens
tagtagttcaatcgt

SEQ ID NO: 1208146 - DNA, 15 bp, Homo sapiens
gtagtagttcaatcg

SEQ ID NO: 1208147 - DNA, 15 bp, Homo sapiens
tgtagtagttcaatc

SEQ ID NO: 1208148 - DNA, 15 bp, Homo sapiens
gtgtagtagttcaat

SEQ ID NO: 1208149 - DNA, 15 bp, Homo sapiens
agtgtagtagttcaa

SEQ ID NO: 1208150 - DNA, 15 bp, Homo sapiens
gagtgtagtagttca

SEQ ID NO: 1208151 - DNA, 15 bp, Homo sapiens
ggagtgtagtagttc

SEQ ID NO: 1208152 - DNA, 15 bp, Homo sapiens
tggagtgtagtagtt

SEQ ID NO: 1208153 - DNA, 15 bp, Homo sapiens
ctggagtgtagtagt

SEQ ID NO: 1208154 - DNA, 15 bp, Homo sapiens
actggagtgtagtag

SEQ ID NO: 1208155 - DNA, 15 bp, Homo sapiens
gactggagtgtagta

SEQ ID NO: 1208156 - DNA, 15 bp, Homo sapiens
agactggagtgtagt

SEQ ID NO: 1208157 - DNA, 15 bp, Homo sapiens
cagactggagtgtag

SEQ ID NO: 1208158 - DNA, 15 bp, Homo sapiens
ccagactggagtgta

SEQ ID NO: 1208159 - DNA, 15 bp, Homo sapiens
cccagactggagtgt

SEQ ID NO: 1208160 - DNA, 15 bp, Homo sapiens
tctctgtcacccaga

SEQ ID NO: 1208161 - DNA, 15 bp, Homo sapiens
ttctctgtcacccag

SEQ ID NO: 1208162 - DNA, 15 bp, Homo sapiens
tttctctgtcaccca

SEQ ID NO: 1208163 - DNA, 15 bp, Homo sapiens
ctttctctgtcaccc

SEQ ID NO: 1208164 - DNA, 15 bp, Homo sapiens
tctttctctgtcacc

SEQ ID NO: 1208165 - DNA, 15 bp, Homo sapiens
ctctttctctgtcac

SEQ ID NO: 1208166 - DNA, 15 bp, Homo sapiens
cctctttctctgtca

SEQ ID NO: 1208167 - DNA, 15 bp, Homo sapiens
gcctctttctctgtc

SEQ ID NO: 1208168 - DNA, 15 bp, Homo sapiens
agcctctttctctgt

SEQ ID NO: 1208169 - DNA, 15 bp, Homo sapiens
cagcctctttctctg

SEQ ID NO: 1208170 - DNA, 15 bp, Homo sapiens
gcagcctctttctct

SEQ ID NO: 1208171 - DNA, 15 bp, Homo sapiens
ggcagcctctttctc

SEQ ID NO: 1208172 - DNA, 15 bp, Homo sapiens
aggcagcctctttct

SEQ ID NO: 1208173 - DNA, 15 bp, Homo sapiens
gaggcagcctctttc

SEQ ID NO: 1208174 - DNA, 15 bp, Homo sapiens
tgaggcagcctcttt

SEQ ID NO: 1208175 - DNA, 15 bp, Homo sapiens
ttgaggcagcctctt

SEQ ID NO: 1208176 - DNA, 15 bp, Homo sapiens
tttgaggcagcctct

SEQ ID NO: 1208177 - DNA, 15 bp, Homo sapiens
ttttgaggcagcctc

SEQ ID NO: 1208178 - DNA, 15 bp, Homo sapiens
tttttgaggcagcct

SEQ ID NO: 1208179 - DNA, 15 bp, Homo sapiens
ttttttgaggcagcc

SEQ ID NO: 1208180 - DNA, 15 bp, Homo sapiens
tttttttgaggcagc

SEQ ID NO: 1208181 - DNA, 15 bp, Homo sapiens
atttttttgaggcag

SEQ ID NO: 1208182 - DNA, 15 bp, Homo sapiens
tatttttttgaggca

SEQ ID NO: 1208183 - DNA, 15 bp, Homo sapiens
ttatttttttgaggc

SEQ ID NO: 1208184 - DNA, 15 bp, Homo sapiens
ttttttatttttatt

SEQ ID NO: 1208185 - DNA, 15 bp, Homo sapiens
tttttttatttttat

SEQ ID NO: 1208186 - DNA, 15 bp, Homo sapiens
atttttttattttta

SEQ ID NO: 1208187 - DNA, 15 bp, Homo sapiens
tatttttttattttt

SEQ ID NO: 1208188 - DNA, 15 bp, Homo sapiens
ttatttttttatttt

SEQ ID NO: 1208189 - DNA, 15 bp, Homo sapiens
cttatttttttattt

SEQ ID NO: 1208190 - DNA, 15 bp, Homo sapiens
ccttatttttttatt

SEQ ID NO: 1208191 - DNA, 15 bp, Homo sapiens
gccttatttttttat

SEQ ID NO: 1208192 - DNA, 15 bp, Homo sapiens
ggccttattttttta

SEQ ID NO: 1208193 - DNA, 15 bp, Homo sapiens
cggccttattttttt

SEQ ID NO: 1208194 - DNA, 15 bp, Homo sapiens
ccggccttatttttt

SEQ ID NO: 1208195 - DNA, 15 bp, Homo sapiens
tccggccttattttt

SEQ ID NO: 1208196 - DNA, 15 bp, Homo sapiens
gtccggccttatttt

SEQ ID NO: 1208197 - DNA, 15 bp, Homo sapiens
cgtccggccttattt

SEQ ID NO: 1208198 - DNA, 15 bp, Homo sapiens
gcgtccggccttatt

SEQ ID NO: 1208199 - DNA, 15 bp, Homo sapiens
cgcgtccggccttat

SEQ ID NO: 1208200 - DNA, 15 bp, Homo sapiens
ccgcgtccggcctta

SEQ ID NO: 1208201 - DNA, 15 bp, Homo sapiens
accgcgtccggcctt

SEQ ID NO: 1208202 - DNA, 15 bp, Homo sapiens
caccgcgtccggcct

SEQ ID NO: 1208203 - DNA, 15 bp, Homo sapiens
ccaccgcgtccggcc

SEQ ID NO: 1208204 - DNA, 15 bp, Homo sapiens
gccaccgcgtccggc

SEQ ID NO: 1208205 - DNA, 15 bp, Homo sapiens
agccaccgcgtccgg

SEQ ID NO: 1208206 - DNA, 15 bp, Homo sapiens
gagccaccgcgtccg

SEQ ID NO: 1208207 - DNA, 15 bp, Homo sapiens
tgagccaccgcgtcc

SEQ ID NO: 1208208 - DNA, 15 bp, Homo sapiens
gtgagccaccgcgtc

SEQ ID NO: 1208209 - DNA, 15 bp, Homo sapiens
cgtgagccaccgcgt

SEQ ID NO: 1208210 - DNA, 15 bp, Homo sapiens
ccagcctcccaaagt

SEQ ID NO: 1208211 - DNA, 15 bp, Homo sapiens
cccagcctcccaaag

SEQ ID NO: 1208212 - DNA, 15 bp, Homo sapiens
ccccagcctcccaaa

SEQ ID NO: 1208213 - DNA, 15 bp, Homo sapiens
accccagcctcccaa

SEQ ID NO: 1208214 - DNA, 15 bp, Homo sapiens
caccccagcctccca

SEQ ID NO: 1208215 - DNA, 15 bp, Homo sapiens
ccaccccagcctccc

SEQ ID NO: 1208216 - DNA, 15 bp, Homo sapiens
cccaccccagcctcc

SEQ ID NO: 1208217 - DNA, 15 bp, Homo sapiens
gcccaccccagcctc

SEQ ID NO: 1208218 - DNA, 15 bp, Homo sapiens
tgcccaccccagcct

SEQ ID NO: 1208219 - DNA, 15 bp, Homo sapiens
ctgcccaccccagcc

SEQ ID NO: 1208220 - DNA, 15 bp, Homo sapiens
tctgcccaccccagc

SEQ ID NO: 1208221 - DNA, 15 bp, Homo sapiens
gtctgcccaccccag

SEQ ID NO: 1208222 - DNA, 15 bp, Homo sapiens
ggtctgcccacccca

SEQ ID NO: 1208223 - DNA, 15 bp, Homo sapiens
tggtctgcccacccc

SEQ ID NO: 1208224 - DNA, 15 bp, Homo sapiens
gtggtctgcccaccc

SEQ ID NO: 1208225 - DNA, 15 bp, Homo sapiens
cgtggtctgcccacc

SEQ ID NO: 1208226 - DNA, 15 bp, Homo sapiens
tcgtggtctgcccac

SEQ ID NO: 1208227 - DNA, 15 bp, Homo sapiens
ctcgtggtctgccca

SEQ ID NO: 1208228 - DNA, 15 bp, Homo sapiens
cctcgtggtctgccc

SEQ ID NO: 1208229 - DNA, 15 bp, Homo sapiens
acctcgtggtctgcc

SEQ ID NO: 1208230 - DNA, 15 bp, Homo sapiens
gacctcgtggtctgc

SEQ ID NO: 1208231 - DNA, 15 bp, Homo sapiens
tgacctcgtggtctg

SEQ ID NO: 1208232 - DNA, 15 bp, Homo sapiens
ctgacctcgtggtct

SEQ ID NO: 1208233 - DNA, 15 bp, Homo sapiens
cctgacctcgtggtc

SEQ ID NO: 1208234 - DNA, 15 bp, Homo sapiens
tcctgacctcgtggt

SEQ ID NO: 1208235 - DNA, 15 bp, Homo sapiens
ctcctgacctcgtgg

SEQ ID NO: 1208236 - DNA, 15 bp, Homo sapiens
cctcgatctcctgac

SEQ ID NO: 1208237 - DNA, 15 bp, Homo sapiens
gcctcgatctcctga

SEQ ID NO: 1208238 - DNA, 15 bp, Homo sapiens
ggcctcgatctcctg

SEQ ID NO: 1208239 - DNA, 15 bp, Homo sapiens
tggcctcgatctcct

SEQ ID NO: 1208240 - DNA, 15 bp, Homo sapiens
atggcctcgatctcc

SEQ ID NO: 1208241 - DNA, 15 bp, Homo sapiens
gatggcctcgatctc

SEQ ID NO: 1208242 - DNA, 15 bp, Homo sapiens
ggatggcctcgatct

SEQ ID NO: 1208243 - DNA, 15 bp, Homo sapiens
aggatggcctcgatc

SEQ ID NO: 1208244 - DNA, 15 bp, Homo sapiens
caggatggcctcgat

SEQ ID NO: 1208245 - DNA, 15 bp, Homo sapiens
ccaggatggcctcga

SEQ ID NO: 1208246 - DNA, 15 bp, Homo sapiens
gccaggatggcctcg

SEQ ID NO: 1208247 - DNA, 15 bp, Homo sapiens
ggccaggatggcctc

SEQ ID NO: 1208248 - DNA, 15 bp, Homo sapiens
tggccaggatggcct

SEQ ID NO: 1208249 - DNA, 15 bp, Homo sapiens
ttggccaggatggcc

SEQ ID NO: 1208250 - DNA, 15 bp, Homo sapiens
gttggccaggatggc

SEQ ID NO: 1208251 - DNA, 15 bp, Homo sapiens
tgttggccaggatgg

SEQ ID NO: 1208252 - DNA, 15 bp, Homo sapiens
atgttggccaggatg

SEQ ID NO: 1208253 - DNA, 15 bp, Homo sapiens
catgttggccaggat

SEQ ID NO: 1208254 - DNA, 15 bp, Homo sapiens
tcatgttggccagga

SEQ ID NO: 1208255 - DNA, 15 bp, Homo sapiens
agggtttcatcatgt

SEQ ID NO: 1208256 - DNA, 15 bp, Homo sapiens
cagggtttcatcatg

SEQ ID NO: 1208257 - DNA, 15 bp, Homo sapiens
acagggtttcatcat

SEQ ID NO: 1208258 - DNA, 15 bp, Homo sapiens
gacagggtttcatca

SEQ ID NO: 1208259 - DNA, 15 bp, Homo sapiens
agacagggtttcatc

SEQ ID NO: 1208260 - DNA, 15 bp, Homo sapiens
gagacagggtttcat

SEQ ID NO: 1208261 - DNA, 15 bp, Homo sapiens
cagtagagacagggt

SEQ ID NO: 1208262 - DNA, 15 bp, Homo sapiens
tcagtagagacaggg

SEQ ID NO: 1208263 - DNA, 15 bp, Homo sapiens
ttcagtagagacagg

SEQ ID NO: 1208264 - DNA, 15 bp, Homo sapiens
tttcagtagagacag

SEQ ID NO: 1208265 - DNA, 15 bp, Homo sapiens
ttttcagtagagaca

SEQ ID NO: 1208266 - DNA, 15 bp, Homo sapiens
gttttcagtagagac

SEQ ID NO: 1208267 - DNA, 15 bp, Homo sapiens
tgttttcagtagaga

SEQ ID NO: 1208268 - DNA, 15 bp, Homo sapiens
gtgttttcagtagag

SEQ ID NO: 1208269 - DNA, 15 bp, Homo sapiens
tgtgttttcagtaga

SEQ ID NO: 1208270 - DNA, 15 bp, Homo sapiens
ttgtgttttcagtag

SEQ ID NO: 1208271 - DNA, 15 bp, Homo sapiens
tttgtgttttcagta

SEQ ID NO: 1208272 - DNA, 15 bp, Homo sapiens
ttttgtgttttcagt

SEQ ID NO: 1208273 - DNA, 15 bp, Homo sapiens
tttttgtgttttcag

SEQ ID NO: 1208274 - DNA, 15 bp, Homo sapiens
atttttgtgttttca

SEQ ID NO: 1208275 - DNA, 15 bp, Homo sapiens
aatttttgtgttttc

SEQ ID NO: 1208276 - DNA, 15 bp, Homo sapiens
acgccaccacgccca

SEQ ID NO: 1208277 - DNA, 15 bp, Homo sapiens
tacgccaccacgccc

SEQ ID NO: 1208278 - DNA, 15 bp, Homo sapiens
atacgccaccacgcc

SEQ ID NO: 1208279 - DNA, 15 bp, Homo sapiens
tatacgccaccacgc

SEQ ID NO: 1208280 - DNA, 15 bp, Homo sapiens
gtatacgccaccacg

SEQ ID NO: 1208281 - DNA, 15 bp, Homo sapiens
ggtatacgccaccac

SEQ ID NO: 1208282 - DNA, 15 bp, Homo sapiens
aggtatacgccacca

SEQ ID NO: 1208283 - DNA, 15 bp, Homo sapiens
caggtatacgccacc

SEQ ID NO: 1208284 - DNA, 15 bp, Homo sapiens
acaggtatacgccac

SEQ ID NO: 1208285 - DNA, 15 bp, Homo sapiens
tacaggtatacgcca

SEQ ID NO: 1208286 - DNA, 15 bp, Homo sapiens
ttacaggtatacgcc

SEQ ID NO: 1208287 - DNA, 15 bp, Homo sapiens
attacaggtatacgc

SEQ ID NO: 1208288 - DNA, 15 bp, Homo sapiens
gattacaggtatacg

SEQ ID NO: 1208289 - DNA, 15 bp, Homo sapiens
ggattacaggtatac

SEQ ID NO: 1208290 - DNA, 15 bp, Homo sapiens
gggattacaggtata

SEQ ID NO: 1208291 - DNA, 15 bp, Homo sapiens
tggttcaagtgattc

SEQ ID NO: 1208292 - DNA, 15 bp, Homo sapiens
ctggttcaagtgatt

SEQ ID NO: 1208293 - DNA, 15 bp, Homo sapiens
cctggttcaagtgat

SEQ ID NO: 1208294 - DNA, 15 bp, Homo sapiens
ccctggttcaagtga

SEQ ID NO: 1208295 - DNA, 15 bp, Homo sapiens
tccctggttcaagtg

SEQ ID NO: 1208296 - DNA, 15 bp, Homo sapiens
ctccctggttcaagt

SEQ ID NO: 1208297 - DNA, 15 bp, Homo sapiens
actccctggttcaag

SEQ ID NO: 1208298 - DNA, 15 bp, Homo sapiens
gactccctggttcaa

SEQ ID NO: 1208299 - DNA, 15 bp, Homo sapiens
tgactccctggttca

SEQ ID NO: 1208300 - DNA, 15 bp, Homo sapiens
ctgactccctggttc

SEQ ID NO: 1208301 - DNA, 15 bp, Homo sapiens
tctgactccctggtt

SEQ ID NO: 1208302 - DNA, 15 bp, Homo sapiens
ctctgactccctggt

SEQ ID NO: 1208303 - DNA, 15 bp, Homo sapiens
cctctgactccctgg

SEQ ID NO: 1208304 - DNA, 15 bp, Homo sapiens
acctctgactccctg

SEQ ID NO: 1208305 - DNA, 15 bp, Homo sapiens
aacctctgactccct

SEQ ID NO: 1208306 - DNA, 15 bp, Homo sapiens
caacctctgactccc

SEQ ID NO: 1208307 - DNA, 15 bp, Homo sapiens
ctgcaacctctgact

SEQ ID NO: 1208308 - DNA, 15 bp, Homo sapiens
gctgcaacctctgac

SEQ ID NO: 1208309 - DNA, 15 bp, Homo sapiens
cgctgcaacctctga

SEQ ID NO: 1208310 - DNA, 15 bp, Homo sapiens
tctcgctgcaacctc

SEQ ID NO: 1208311 - DNA, 15 bp, Homo sapiens
ctctcgctgcaacct

SEQ ID NO: 1208312 - DNA, 15 bp, Homo sapiens
cctctcgctgcaacc

SEQ ID NO: 1208313 - DNA, 15 bp, Homo sapiens
tcctctcgctgcaac

SEQ ID NO: 1208314 - DNA, 15 bp, Homo sapiens
ctcctctcgctgcaa

SEQ ID NO: 1208315 - DNA, 15 bp, Homo sapiens
tctcctctcgctgca

SEQ ID NO: 1208316 - DNA, 15 bp, Homo sapiens
atctcctctcgctgc

SEQ ID NO: 1208317 - DNA, 15 bp, Homo sapiens
aatctcctctcgctg

SEQ ID NO: 1208318 - DNA, 15 bp, Homo sapiens
caatctcctctcgct

SEQ ID NO: 1208319 - DNA, 15 bp, Homo sapiens
acaatctcctctcgc

SEQ ID NO: 1208320 - DNA, 15 bp, Homo sapiens
cacaatctcctctcg

SEQ ID NO: 1208321 - DNA, 15 bp, Homo sapiens
gcacaatctcctctc

SEQ ID NO: 1208322 - DNA, 15 bp, Homo sapiens
ggcacaatctcctct

SEQ ID NO: 1208323 - DNA, 15 bp, Homo sapiens
tggcacaatctcctc

SEQ ID NO: 1208324 - DNA, 15 bp, Homo sapiens
gtggcacaatctcct

SEQ ID NO: 1208325 - DNA, 15 bp, Homo sapiens
agtggcacaatctcc

SEQ ID NO: 1208326 - DNA, 15 bp, Homo sapiens
tgccaggctggaatg

SEQ ID NO: 1208327 - DNA, 15 bp, Homo sapiens
ttgccaggctggaat

SEQ ID NO: 1208328 - DNA, 15 bp, Homo sapiens
gttgccaggctggaa

SEQ ID NO: 1208329 - DNA, 15 bp, Homo sapiens
tgttgccaggctgga

SEQ ID NO: 1208330 - DNA, 15 bp, Homo sapiens
ctgttgccaggctgg

SEQ ID NO: 1208331 - DNA, 15 bp, Homo sapiens
tctgttgccaggctg

SEQ ID NO: 1208332 - DNA, 15 bp, Homo sapiens
cttttttgagacgga

SEQ ID NO: 1208333 - DNA, 15 bp, Homo sapiens
tcttttttgagacgg

SEQ ID NO: 1208334 - DNA, 15 bp, Homo sapiens
ttcttttttgagacg

SEQ ID NO: 1208335 - DNA, 15 bp, Homo sapiens
gtttcttttttgaga

SEQ ID NO: 1208336 - DNA, 15 bp, Homo sapiens
tgtttcttttttgag

SEQ ID NO: 1208337 - DNA, 15 bp, Homo sapiens
ttgtttcttttttga

SEQ ID NO: 1208338 - DNA, 15 bp, Homo sapiens
gttgtttcttttttg

SEQ ID NO: 1208339 - DNA, 15 bp, Homo sapiens
tgttgtttctttttt

SEQ ID NO: 1208340 - DNA, 15 bp, Homo sapiens
ttgttgtttcttttt

SEQ ID NO: 1208341 - DNA, 15 bp, Homo sapiens
gttgttgtttctttt

SEQ ID NO: 1208342 - DNA, 15 bp, Homo sapiens
tgttgttgtttcttt

SEQ ID NO: 1208343 - DNA, 15 bp, Homo sapiens
ctgttgttgtttctt

SEQ ID NO: 1208344 - DNA, 15 bp, Homo sapiens
gctgttgttgtttct

SEQ ID NO: 1208345 - DNA, 15 bp, Homo sapiens
tgctgttgttgtttc

SEQ ID NO: 1208346 - DNA, 15 bp, Homo sapiens
ttgctgttgttgttt

SEQ ID NO: 1208347 - DNA, 15 bp, Homo sapiens
gttgctgttgttgtt

SEQ ID NO: 1208348 - DNA, 15 bp, Homo sapiens
tgttgctgttgttgt

SEQ ID NO: 1208349 - DNA, 15 bp, Homo sapiens
ttgttgctgttgttg

SEQ ID NO: 1208350 - DNA, 15 bp, Homo sapiens
tttgttgttgttgct

SEQ ID NO: 1208351 - DNA, 15 bp, Homo sapiens
ttttgttgttgttgc

SEQ ID NO: 1208352 - DNA, 15 bp, Homo sapiens
tttttttgttgttgt

SEQ ID NO: 1208353 - DNA, 15 bp, Homo sapiens
ttttttttgttgttg

SEQ ID NO: 1208354 - DNA, 15 bp, Homo sapiens
gttttttttgttgtt

SEQ ID NO: 1208355 - DNA, 15 bp, Homo sapiens
tgttttttttgttgt

SEQ ID NO: 1208356 - DNA, 15 bp, Homo sapiens
atgttttttttgttg

SEQ ID NO: 1208357 - DNA, 15 bp, Homo sapiens
tatgttttttttgtt

SEQ ID NO: 1208358 - DNA, 15 bp, Homo sapiens
ttatgttttttttgt

SEQ ID NO: 1208359 - DNA, 15 bp, Homo sapiens
tttatgttttttttg

SEQ ID NO: 1208360 - DNA, 15 bp, Homo sapiens
ttttatgtttttttt

SEQ ID NO: 1208361 - DNA, 15 bp, Homo sapiens
cttttttatgttttt

SEQ ID NO: 1208362 - DNA, 15 bp, Homo sapiens
acttttttatgtttt

SEQ ID NO: 1208363 - DNA, 15 bp, Homo sapiens
aacttttttatgttt

SEQ ID NO: 1208364 - DNA, 15 bp, Homo sapiens
gaacttttttatgtt

SEQ ID NO: 1208365 - DNA, 15 bp, Homo sapiens
cgaacttttttatgt

SEQ ID NO: 1208366 - DNA, 15 bp, Homo sapiens
ccgaacttttttatg

SEQ ID NO: 1208367 - DNA, 15 bp, Homo sapiens
cccgaacttttttat

SEQ ID NO: 1208368 - DNA, 15 bp, Homo sapiens
gcccgaactttttta

SEQ ID NO: 1208369 - DNA, 15 bp, Homo sapiens
tgcccgaactttttt

SEQ ID NO: 1208370 - DNA, 15 bp, Homo sapiens
gtgcccgaacttttt

SEQ ID NO: 1208371 - DNA, 15 bp, Homo sapiens
cgtgcccgaactttt

SEQ ID NO: 1208372 - DNA, 15 bp, Homo sapiens
ccgtgcccgaacttt

SEQ ID NO: 1208373 - DNA, 15 bp, Homo sapiens
accgtgcccgaactt

SEQ ID NO: 1208374 - DNA, 15 bp, Homo sapiens
caccgtgcccgaact

SEQ ID NO: 1208375 - DNA, 15 bp, Homo sapiens
ccaccgtgcccgaac

SEQ ID NO: 1208376 - DNA, 15 bp, Homo sapiens
gccaccgtgcccgaa

SEQ ID NO: 1208377 - DNA, 15 bp, Homo sapiens
agccaccgtgcccga

SEQ ID NO: 1208378 - DNA, 15 bp, Homo sapiens
gagccaccgtgcccg

SEQ ID NO: 1208379 - DNA, 15 bp, Homo sapiens
tgagccaccgtgccc

SEQ ID NO: 1208380 - DNA, 15 bp, Homo sapiens
gtgagccaccgtgcc

SEQ ID NO: 1208381 - DNA, 15 bp, Homo sapiens
tacccaccttggcct

SEQ ID NO: 1208382 - DNA, 15 bp, Homo sapiens
ctacccaccttggcc

SEQ ID NO: 1208383 - DNA, 15 bp, Homo sapiens
tctacccaccttggc

SEQ ID NO: 1208384 - DNA, 15 bp, Homo sapiens
atctacccaccttgg

SEQ ID NO: 1208385 - DNA, 15 bp, Homo sapiens
gatctacccaccttg

SEQ ID NO: 1208386 - DNA, 15 bp, Homo sapiens
agatctacccacctt

SEQ ID NO: 1208387 - DNA, 15 bp, Homo sapiens
gagatctacccacct

SEQ ID NO: 1208388 - DNA, 15 bp, Homo sapiens
agagatctacccacc

SEQ ID NO: 1208389 - DNA, 15 bp, Homo sapiens
aagagatctacccac

SEQ ID NO: 1208390 - DNA, 15 bp, Homo sapiens
caagagatctaccca

SEQ ID NO: 1208391 - DNA, 15 bp, Homo sapiens
tcaagagatctaccc

SEQ ID NO: 1208392 - DNA, 15 bp, Homo sapiens
ctcaagagatctacc

SEQ ID NO: 1208393 - DNA, 15 bp, Homo sapiens
cctcaagagatctac

SEQ ID NO: 1208394 - DNA, 15 bp, Homo sapiens
acctcaagagatcta

SEQ ID NO: 1208395 - DNA, 15 bp, Homo sapiens
gacctcaagagatct

SEQ ID NO: 1208396 - DNA, 15 bp, Homo sapiens
tgacctcaagagatc

SEQ ID NO: 1208397 - DNA, 15 bp, Homo sapiens
ctgacctcaagagat

SEQ ID NO: 1208398 - DNA, 15 bp, Homo sapiens
cctgacctcaagaga

SEQ ID NO: 1208399 - DNA, 15 bp, Homo sapiens
tcctgacctcaagag

SEQ ID NO: 1208400 - DNA, 15 bp, Homo sapiens
ctcctgacctcaaga

SEQ ID NO: 1208401 - DNA, 15 bp, Homo sapiens
gtttgttggccaggc

SEQ ID NO: 1208402 - DNA, 15 bp, Homo sapiens
tgtttgttggccagg

SEQ ID NO: 1208403 - DNA, 15 bp, Homo sapiens
atgtttgttggccag

SEQ ID NO: 1208404 - DNA, 15 bp, Homo sapiens
catgtttgttggcca

SEQ ID NO: 1208405 - DNA, 15 bp, Homo sapiens
ccatgtttgttggcc

SEQ ID NO: 1208406 - DNA, 15 bp, Homo sapiens
accatgtttgttggc

SEQ ID NO: 1208407 - DNA, 15 bp, Homo sapiens
caccatgtttgttgg

SEQ ID NO: 1208408 - DNA, 15 bp, Homo sapiens
tcaccatgtttgttg

SEQ ID NO: 1208409 - DNA, 15 bp, Homo sapiens
ttcaccatgtttgtt

SEQ ID NO: 1208410 - DNA, 15 bp, Homo sapiens
tttcaccatgtttgt

SEQ ID NO: 1208411 - DNA, 15 bp, Homo sapiens
gtttcaccatgtttg

SEQ ID NO: 1208412 - DNA, 15 bp, Homo sapiens
ggtttcaccatgttt

SEQ ID NO: 1208413 - DNA, 15 bp, Homo sapiens
ctttttgtattttta

SEQ ID NO: 1208414 - DNA, 15 bp, Homo sapiens
actttttgtattttt

SEQ ID NO: 1208415 - DNA, 15 bp, Homo sapiens
tactttttgtatttt

SEQ ID NO: 1208416 - DNA, 15 bp, Homo sapiens
ctactttttgtattt

SEQ ID NO: 1208417 - DNA, 15 bp, Homo sapiens
gctactttttgtatt

SEQ ID NO: 1208418 - DNA, 15 bp, Homo sapiens
ggctactttttgtat

SEQ ID NO: 1208419 - DNA, 15 bp, Homo sapiens
cggctactttttgta

SEQ ID NO: 1208420 - DNA, 15 bp, Homo sapiens
ccggctactttttgt

SEQ ID NO: 1208421 - DNA, 15 bp, Homo sapiens
cccggctactttttg

SEQ ID NO: 1208422 - DNA, 15 bp, Homo sapiens
acccggctacttttt

SEQ ID NO: 1208423 - DNA, 15 bp, Homo sapiens
cacccggctactttt

SEQ ID NO: 1208424 - DNA, 15 bp, Homo sapiens
acacccggctacttt

SEQ ID NO: 1208425 - DNA, 15 bp, Homo sapiens
tacacccggctactt

SEQ ID NO: 1208426 - DNA, 15 bp, Homo sapiens
ctacacccggctact

SEQ ID NO: 1208427 - DNA, 15 bp, Homo sapiens
actacacccggctac

SEQ ID NO: 1208428 - DNA, 15 bp, Homo sapiens
gactacacccggcta

SEQ ID NO: 1208429 - DNA, 15 bp, Homo sapiens
ggactacacccggct

SEQ ID NO: 1208430 - DNA, 15 bp, Homo sapiens
gggactacacccggc

SEQ ID NO: 1208431 - DNA, 15 bp, Homo sapiens
tgggactacacccgg

SEQ ID NO: 1208432 - DNA, 15 bp, Homo sapiens
ctgggactacacccg

SEQ ID NO: 1208433 - DNA, 15 bp, Homo sapiens
gctgggactacaccc

SEQ ID NO: 1208434 - DNA, 15 bp, Homo sapiens
agctgggactacacc

SEQ ID NO: 1208435 - DNA, 15 bp, Homo sapiens
ttccgagtagctggg

SEQ ID NO: 1208436 - DNA, 15 bp, Homo sapiens
cttccgagtagctgg

SEQ ID NO: 1208437 - DNA, 15 bp, Homo sapiens
ccttccgagtagctg

SEQ ID NO: 1208438 - DNA, 15 bp, Homo sapiens
gccttccgagtagct

SEQ ID NO: 1208439 - DNA, 15 bp, Homo sapiens
agccttccgagtagc

SEQ ID NO: 1208440 - DNA, 15 bp, Homo sapiens
cagccttccgagtag

SEQ ID NO: 1208441 - DNA, 15 bp, Homo sapiens
tcagccttccgagta

SEQ ID NO: 1208442 - DNA, 15 bp, Homo sapiens
ctcagccttccgagt

SEQ ID NO: 1208443 - DNA, 15 bp, Homo sapiens
cctcagccttccgag

SEQ ID NO: 1208444 - DNA, 15 bp, Homo sapiens
gcctcagccttccga

SEQ ID NO: 1208445 - DNA, 15 bp, Homo sapiens
tgcctcagccttccg

SEQ ID NO: 1208446 - DNA, 15 bp, Homo sapiens
aggttgaagcgattc

SEQ ID NO: 1208447 - DNA, 15 bp, Homo sapiens
caggttgaagcgatt

SEQ ID NO: 1208448 - DNA, 15 bp, Homo sapiens
ccaggttgaagcgat

SEQ ID NO: 1208449 - DNA, 15 bp, Homo sapiens
cccaggttgaagcga

SEQ ID NO: 1208450 - DNA, 15 bp, Homo sapiens
tcccaggttgaagcg

SEQ ID NO: 1208451 - DNA, 15 bp, Homo sapiens
ctcccaggttgaagc

SEQ ID NO: 1208452 - DNA, 15 bp, Homo sapiens
tctcccaggttgaag

SEQ ID NO: 1208453 - DNA, 15 bp, Homo sapiens
atctcccaggttgaa

SEQ ID NO: 1208454 - DNA, 15 bp, Homo sapiens
catctcccaggttga

SEQ ID NO: 1208455 - DNA, 15 bp, Homo sapiens
ccatctcccaggttg

SEQ ID NO: 1208456 - DNA, 15 bp, Homo sapiens
tccatctcccaggtt

SEQ ID NO: 1208457 - DNA, 15 bp, Homo sapiens
ttccatctcccaggt

SEQ ID NO: 1208458 - DNA, 15 bp, Homo sapiens
cttccatctcccagg

SEQ ID NO: 1208459 - DNA, 15 bp, Homo sapiens
acttccatctcccag

SEQ ID NO: 1208460 - DNA, 15 bp, Homo sapiens
aacttccatctccca

SEQ ID NO: 1208461 - DNA, 15 bp, Homo sapiens
caacttccatctccc

SEQ ID NO: 1208462 - DNA, 15 bp, Homo sapiens
gcaacttccatctcc

SEQ ID NO: 1208463 - DNA, 15 bp, Homo sapiens
tgcaacttccatctc

SEQ ID NO: 1208464 - DNA, 15 bp, Homo sapiens
ctgcaacttccatct

SEQ ID NO: 1208465 - DNA, 15 bp, Homo sapiens
actgcaacttccatc

SEQ ID NO: 1208466 - DNA, 15 bp, Homo sapiens
ttcactgcaacttcc

SEQ ID NO: 1208467 - DNA, 15 bp, Homo sapiens
gttcactgcaacttc

SEQ ID NO: 1208468 - DNA, 15 bp, Homo sapiens
agttcactgcaactt

SEQ ID NO: 1208469 - DNA, 15 bp, Homo sapiens
cagttcactgcaact

SEQ ID NO: 1208470 - DNA, 15 bp, Homo sapiens
cgcaatctcagttca

SEQ ID NO: 1208471 - DNA, 15 bp, Homo sapiens
gcgcaatctcagttc

SEQ ID NO: 1208472 - DNA, 15 bp, Homo sapiens
ggcgcaatctcagtt

SEQ ID NO: 1208473 - DNA, 15 bp, Homo sapiens
tggcgcaatctcagt

SEQ ID NO: 1208474 - DNA, 15 bp, Homo sapiens
ccagtggcgcaatct

SEQ ID NO: 1208475 - DNA, 15 bp, Homo sapiens
cccagtggcgcaatc

SEQ ID NO: 1208476 - DNA, 15 bp, Homo sapiens
acccagtggcgcaat

SEQ ID NO: 1208477 - DNA, 15 bp, Homo sapiens
cacccagtggcgcaa

SEQ ID NO: 1208478 - DNA, 15 bp, Homo sapiens
tcacccagtggcgca

SEQ ID NO: 1208479 - DNA, 15 bp, Homo sapiens
gtcacccagtggcgc

SEQ ID NO: 1208480 - DNA, 15 bp, Homo sapiens
tgtcacccagtggcg

SEQ ID NO: 1208481 - DNA, 15 bp, Homo sapiens
ctgtcacccagtggc

SEQ ID NO: 1208482 - DNA, 15 bp, Homo sapiens
tctgtcacccagtgg

SEQ ID NO: 1208483 - DNA, 15 bp, Homo sapiens
ctctgtcacccagtg

SEQ ID NO: 1208484 - DNA, 15 bp, Homo sapiens
agtcttactctgtca

SEQ ID NO: 1208485 - DNA, 15 bp, Homo sapiens
gagtcttactctgtc

SEQ ID NO: 1208486 - DNA, 15 bp, Homo sapiens
aagagtcttactctg

SEQ ID NO: 1208487 - DNA, 15 bp, Homo sapiens
caagagtcttactct

SEQ ID NO: 1208488 - DNA, 15 bp, Homo sapiens
acaagagtcttactc

SEQ ID NO: 1208489 - DNA, 15 bp, Homo sapiens
gacaagagtcttact

SEQ ID NO: 1208490 - DNA, 15 bp, Homo sapiens
agacaagagtcttac

SEQ ID NO: 1208491 - DNA, 15 bp, Homo sapiens
gagacaagagtctta

SEQ ID NO: 1208492 - DNA, 15 bp, Homo sapiens
tgagacaagagtctt

SEQ ID NO: 1208493 - DNA, 15 bp, Homo sapiens
ttgagacaagagtct

SEQ ID NO: 1208494 - DNA, 15 bp, Homo sapiens
tttgagacaagagtc

SEQ ID NO: 1208495 - DNA, 15 bp, Homo sapiens
actttctttcttttt

SEQ ID NO: 1208496 - DNA, 15 bp, Homo sapiens
aaactttctttcttt

SEQ ID NO: 1208497 - DNA, 15 bp, Homo sapiens
taaactttctttctt

SEQ ID NO: 1208498 - DNA, 15 bp, Homo sapiens
ttaaactttctttct

SEQ ID NO: 1208499 - DNA, 15 bp, Homo sapiens
attaaactttctttc

SEQ ID NO: 1208500 - DNA, 15 bp, Homo sapiens
aattaaactttcttt

SEQ ID NO: 1208501 - DNA, 15 bp, Homo sapiens
aaattaaactttctt

SEQ ID NO: 1208502 - DNA, 15 bp, Homo sapiens
taaattaaactttct

SEQ ID NO: 1208503 - DNA, 15 bp, Homo sapiens
ttaaattaaactttc

SEQ ID NO: 1208504 - DNA, 15 bp, Homo sapiens
attaaattaaacttt

SEQ ID NO: 1208505 - DNA, 15 bp, Homo sapiens
cattaaattaaactt

SEQ ID NO: 1208506 - DNA, 15 bp, Homo sapiens
tcattaaattaaact

SEQ ID NO: 1208507 - DNA, 15 bp, Homo sapiens
atcattaaattaaac

SEQ ID NO: 1208508 - DNA, 15 bp, Homo sapiens
aatcattaaattaaa

SEQ ID NO: 1208509 - DNA, 15 bp, Homo sapiens
gaatcattaaattaa

SEQ ID NO: 1208510 - DNA, 15 bp, Homo sapiens
tgaatcattaaatta

SEQ ID NO: 1208511 - DNA, 15 bp, Homo sapiens
ttgaatcattaaatt

SEQ ID NO: 1208512 - DNA, 15 bp, Homo sapiens
tttgaatcattaaat

SEQ ID NO: 1208513 - DNA, 15 bp, Homo sapiens
atttgaatcattaaa

SEQ ID NO: 1208514 - DNA, 15 bp, Homo sapiens
tatttgaatcattaa

SEQ ID NO: 1208515 - DNA, 15 bp, Homo sapiens
ttatttgaatcatta

SEQ ID NO: 1208516 - DNA, 15 bp, Homo sapiens
attatttgaatcatt

SEQ ID NO: 1208517 - DNA, 15 bp, Homo sapiens
cattatttgaatcat

SEQ ID NO: 1208518 - DNA, 15 bp, Homo sapiens
tcattatttgaatca

SEQ ID NO: 1208519 - DNA, 15 bp, Homo sapiens
gtcattatttgaatc

SEQ ID NO: 1208520 - DNA, 15 bp, Homo sapiens
ggtcattatttgaat

SEQ ID NO: 1208521 - DNA, 15 bp, Homo sapiens
aggtcattatttgaa

SEQ ID NO: 1208522 - DNA, 15 bp, Homo sapiens
caggtcattatttga

SEQ ID NO: 1208523 - DNA, 15 bp, Homo sapiens
gcaggtcattatttg

SEQ ID NO: 1208524 - DNA, 15 bp, Homo sapiens
agcaggtcattattt

SEQ ID NO: 1208525 - DNA, 15 bp, Homo sapiens
gagcaggtcattatt

SEQ ID NO: 1208526 - DNA, 15 bp, Homo sapiens
cgagcaggtcattat

SEQ ID NO: 1208527 - DNA, 15 bp, Homo sapiens
tcgagcaggtcatta

SEQ ID NO: 1208528 - DNA, 15 bp, Homo sapiens
ctcgagcaggtcatt

SEQ ID NO: 1208529 - DNA, 15 bp, Homo sapiens
tctcgagcaggtcat

SEQ ID NO: 1208530 - DNA, 15 bp, Homo sapiens
ctctcgagcaggtca

SEQ ID NO: 1208531 - DNA, 15 bp, Homo sapiens
tctctcgagcaggtc

SEQ ID NO: 1208532 - DNA, 15 bp, Homo sapiens
atctctcgagcaggt

SEQ ID NO: 1208533 - DNA, 15 bp, Homo sapiens
tatctctcgagcagg

SEQ ID NO: 1208534 - DNA, 15 bp, Homo sapiens
ttatctctcgagcag

SEQ ID NO: 1208535 - DNA, 15 bp, Homo sapiens
tttatctctcgagca

SEQ ID NO: 1208536 - DNA, 15 bp, Homo sapiens
atttatctctcgagc

SEQ ID NO: 1208537 - DNA, 15 bp, Homo sapiens
tatttatctctcgag

SEQ ID NO: 1208538 - DNA, 15 bp, Homo sapiens
atatttatctctcga

SEQ ID NO: 1208539 - DNA, 15 bp, Homo sapiens
tatatttatctctcg

SEQ ID NO: 1208540 - DNA, 15 bp, Homo sapiens
ttatatttatctctc

SEQ ID NO: 1208541 - DNA, 15 bp, Homo sapiens
tttatatttatctct

SEQ ID NO: 1208542 - DNA, 15 bp, Homo sapiens
ctttatatttatctc

SEQ ID NO: 1208543 - DNA, 15 bp, Homo sapiens
actttatatttatct

SEQ ID NO: 1208544 - DNA, 15 bp, Homo sapiens
gactttatatttatc

SEQ ID NO: 1208545 - DNA, 15 bp, Homo sapiens
agactttatatttat

SEQ ID NO: 1208546 - DNA, 15 bp, Homo sapiens
tagactttatattta

SEQ ID NO: 1208547 - DNA, 15 bp, Homo sapiens
ttagactttatattt

SEQ ID NO: 1208548 - DNA, 15 bp, Homo sapiens
gttagactttatatt

SEQ ID NO: 1208549 - DNA, 15 bp, Homo sapiens
cgttagactttatat

SEQ ID NO: 1208550 - DNA, 15 bp, Homo sapiens
acgttagactttata

SEQ ID NO: 1208551 - DNA, 15 bp, Homo sapiens
tacgttagactttat

SEQ ID NO: 1208552 - DNA, 15 bp, Homo sapiens
ttacgttagacttta

SEQ ID NO: 1208553 - DNA, 15 bp, Homo sapiens
cttacgttagacttt

SEQ ID NO: 1208554 - DNA, 15 bp, Homo sapiens
tcttacgttagactt

SEQ ID NO: 1208555 - DNA, 15 bp, Homo sapiens
ctcttacgttagact

SEQ ID NO: 1208556 - DNA, 15 bp, Homo sapiens
cctcttacgttagac

SEQ ID NO: 1208557 - DNA, 15 bp, Homo sapiens
acctcttacgttaga

SEQ ID NO: 1208558 - DNA, 15 bp, Homo sapiens
cacctcttacgttag

SEQ ID NO: 1208559 - DNA, 15 bp, Homo sapiens
acacctcttacgtta

SEQ ID NO: 1208560 - DNA, 15 bp, Homo sapiens
tacacctcttacgtt

SEQ ID NO: 1208561 - DNA, 15 bp, Homo sapiens
atacacctcttacgt

SEQ ID NO: 1208562 - DNA, 15 bp, Homo sapiens
tatacacctcttacg

SEQ ID NO: 1208563 - DNA, 15 bp, Homo sapiens
gtatacacctcttac

SEQ ID NO: 1208564 - DNA, 15 bp, Homo sapiens
agtatacacctctta

SEQ ID NO: 1208565 - DNA, 15 bp, Homo sapiens
aagtatacacctctt

SEQ ID NO: 1208566 - DNA, 15 bp, Homo sapiens
aaagtatacacctct

SEQ ID NO: 1208567 - DNA, 15 bp, Homo sapiens
aaaagtatacacctc

SEQ ID NO: 1208568 - DNA, 15 bp, Homo sapiens
aaaaagtatacacct

SEQ ID NO: 1208569 - DNA, 15 bp, Homo sapiens
gaaaaagtatacacc

SEQ ID NO: 1208570 - DNA, 15 bp, Homo sapiens
ggaaaaagtatacac

SEQ ID NO: 1208571 - DNA, 15 bp, Homo sapiens
aggaaaaagtataca

SEQ ID NO: 1208572 - DNA, 15 bp, Homo sapiens
gaggaaaaagtatac

SEQ ID NO: 1208573 - DNA, 15 bp, Homo sapiens
agaggaaaaagtata

SEQ ID NO: 1208574 - DNA, 15 bp, Homo sapiens
cagaggaaaaagtat

SEQ ID NO: 1208575 - DNA, 15 bp, Homo sapiens
acagaggaaaaagta

SEQ ID NO: 1208576 - DNA, 15 bp, Homo sapiens
gacagaggaaaaagt

SEQ ID NO: 1208577 - DNA, 15 bp, Homo sapiens
ggacagaggaaaaag

SEQ ID NO: 1208578 - DNA, 15 bp, Homo sapiens
aggacagaggaaaaa

SEQ ID NO: 1208579 - DNA, 15 bp, Homo sapiens
caggacagaggaaaa

SEQ ID NO: 1208580 - DNA, 15 bp, Homo sapiens
gcaggacagaggaaa

SEQ ID NO: 1208581 - DNA, 15 bp, Homo sapiens
agcaggacagaggaa

SEQ ID NO: 1208582 - DNA, 15 bp, Homo sapiens
cagcaggacagagga

SEQ ID NO: 1208583 - DNA, 15 bp, Homo sapiens
acagcaggacagagg

SEQ ID NO: 1208584 - DNA, 15 bp, Homo sapiens
gacagcaggacagag

SEQ ID NO: 1208585 - DNA, 15 bp, Homo sapiens
ggacagcaggacaga

SEQ ID NO: 1208586 - DNA, 15 bp, Homo sapiens
aggacagcaggacag

SEQ ID NO: 1208587 - DNA, 15 bp, Homo sapiens
gaggacagcaggaca

SEQ ID NO: 1208588 - DNA, 15 bp, Homo sapiens
cgaggacagcaggac

SEQ ID NO: 1208589 - DNA, 15 bp, Homo sapiens
gcgaggacagcagga

SEQ ID NO: 1208590 - DNA, 15 bp, Homo sapiens
ggcgaggacagcagg

SEQ ID NO: 1208591 - DNA, 15 bp, Homo sapiens
gggcgaggacagcag

SEQ ID NO: 1208592 - DNA, 15 bp, Homo sapiens
ggggcgaggacagca

SEQ ID NO: 1208593 - DNA, 15 bp, Homo sapiens
tggggcgaggacagc

SEQ ID NO: 1208594 - DNA, 15 bp, Homo sapiens
gtggggcgaggacag

SEQ ID NO: 1208595 - DNA, 15 bp, Homo sapiens
ggtggggcgaggaca

SEQ ID NO: 1208596 - DNA, 15 bp, Homo sapiens
aggtggggcgaggac

SEQ ID NO: 1208597 - DNA, 15 bp, Homo sapiens
gaggtggggcgagga

SEQ ID NO: 1208598 - DNA, 15 bp, Homo sapiens
tgaggtggggcgagg

SEQ ID NO: 1208599 - DNA, 15 bp, Homo sapiens
gtgaggtggggcgag

SEQ ID NO: 1208600 - DNA, 15 bp, Homo sapiens
ggtgaggtggggcga

SEQ ID NO: 1208601 - DNA, 15 bp, Homo sapiens
gggtgaggtggggcg

SEQ ID NO: 1208602 - DNA, 15 bp, Homo sapiens
ggggtgaggtggggc

SEQ ID NO: 1208603 - DNA, 15 bp, Homo sapiens
tggggtgaggtgggg

SEQ ID NO: 1208604 - DNA, 15 bp, Homo sapiens
ttggggtgaggtggg

SEQ ID NO: 1208605 - DNA, 15 bp, Homo sapiens
cttggggtgaggtgg

SEQ ID NO: 1208606 - DNA, 15 bp, Homo sapiens
acttggggtgaggtg

SEQ ID NO: 1208607 - DNA, 15 bp, Homo sapiens
gacttggggtgaggt

SEQ ID NO: 1208608 - DNA, 15 bp, Homo sapiens
ggacttggggtgagg

SEQ ID NO: 1208609 - DNA, 15 bp, Homo sapiens
gggacttggggtgag

SEQ ID NO: 1208610 - DNA, 15 bp, Homo sapiens
tgggacttggggtga

SEQ ID NO: 1208611 - DNA, 15 bp, Homo sapiens
ttgggacttggggtg

SEQ ID NO: 1208612 - DNA, 15 bp, Homo sapiens
gttgggacttggggt

SEQ ID NO: 1208613 - DNA, 15 bp, Homo sapiens
ggttgggacttgggg

SEQ ID NO: 1208614 - DNA, 15 bp, Homo sapiens
aggttgggacttggg

SEQ ID NO: 1208615 - DNA, 15 bp, Homo sapiens
caggttgggacttgg

SEQ ID NO: 1208616 - DNA, 15 bp, Homo sapiens
tcaggttgggacttg

SEQ ID NO: 1208617 - DNA, 15 bp, Homo sapiens
atcaggttgggactt

SEQ ID NO: 1208618 - DNA, 15 bp, Homo sapiens
aatcaggttgggact

SEQ ID NO: 1208619 - DNA, 15 bp, Homo sapiens
caatcaggttgggac

SEQ ID NO: 1208620 - DNA, 15 bp, Homo sapiens
tcaatcaggttggga

SEQ ID NO: 1208621 - DNA, 15 bp, Homo sapiens
atcaatcaggttggg

SEQ ID NO: 1208622 - DNA, 15 bp, Homo sapiens
gatcaatcaggttgg

SEQ ID NO: 1208623 - DNA, 15 bp, Homo sapiens
tgatcaatcaggttg

SEQ ID NO: 1208624 - DNA, 15 bp, Homo sapiens
ctgatcaatcaggtt

SEQ ID NO: 1208625 - DNA, 15 bp, Homo sapiens
actgatcaatcaggt

SEQ ID NO: 1208626 - DNA, 15 bp, Homo sapiens
gactgatcaatcagg

SEQ ID NO: 1208627 - DNA, 15 bp, Homo sapiens
agactgatcaatcag

SEQ ID NO: 1208628 - DNA, 15 bp, Homo sapiens
gagactgatcaatca

SEQ ID NO: 1208629 - DNA, 15 bp, Homo sapiens
ggagactgatcaatc

SEQ ID NO: 1208630 - DNA, 15 bp, Homo sapiens
aggagactgatcaat

SEQ ID NO: 1208631 - DNA, 15 bp, Homo sapiens
aaggagactgatcaa

SEQ ID NO: 1208632 - DNA, 15 bp, Homo sapiens
aaaggagactgatca

SEQ ID NO: 1208633 - DNA, 15 bp, Homo sapiens
gaaaggagactgatc

SEQ ID NO: 1208634 - DNA, 15 bp, Homo sapiens
ggaaaggagactgat

SEQ ID NO: 1208635 - DNA, 15 bp, Homo sapiens
gggaaaggagactga

SEQ ID NO: 1208636 - DNA, 15 bp, Homo sapiens
agggaaaggagactg

SEQ ID NO: 1208637 - DNA, 15 bp, Homo sapiens
gagggaaaggagact

SEQ ID NO: 1208638 - DNA, 15 bp, Homo sapiens
agagggaaaggagac

SEQ ID NO: 1208639 - DNA, 15 bp, Homo sapiens
cagagggaaaggaga

SEQ ID NO: 1208640 - DNA, 15 bp, Homo sapiens
ccagagggaaaggag

SEQ ID NO: 1208641 - DNA, 15 bp, Homo sapiens
accagagggaaagga

SEQ ID NO: 1208642 - DNA, 15 bp, Homo sapiens
taccagagggaaagg

SEQ ID NO: 1208643 - DNA, 15 bp, Homo sapiens
ctaccagagggaaag

SEQ ID NO: 1208644 - DNA, 15 bp, Homo sapiens
gctaccagagggaaa

SEQ ID NO: 1208645 - DNA, 15 bp, Homo sapiens
ggctaccagagggaa

SEQ ID NO: 1208646 - DNA, 15 bp, Homo sapiens
gggctaccagaggga

SEQ ID NO: 1208647 - DNA, 15 bp, Homo sapiens
ggggctaccagaggg

SEQ ID NO: 1208648 - DNA, 15 bp, Homo sapiens
tggggctaccagagg

SEQ ID NO: 1208649 - DNA, 15 bp, Homo sapiens
gtggggctaccagag

SEQ ID NO: 1208650 - DNA, 15 bp, Homo sapiens
agtggggctaccaga

SEQ ID NO: 1208651 - DNA, 15 bp, Homo sapiens
gagtggggctaccag

SEQ ID NO: 1208652 - DNA, 15 bp, Homo sapiens
ggagtggggctacca

SEQ ID NO: 1208653 - DNA, 15 bp, Homo sapiens
gggagtggggctacc

SEQ ID NO: 1208654 - DNA, 15 bp, Homo sapiens
tgggagtggggctac

SEQ ID NO: 1208655 - DNA, 15 bp, Homo sapiens
atgggagtggggcta

SEQ ID NO: 1208656 - DNA, 15 bp, Homo sapiens
catgggagtggggct

SEQ ID NO: 1208657 - DNA, 15 bp, Homo sapiens
tcatgggagtggggc

SEQ ID NO: 1208658 - DNA, 15 bp, Homo sapiens
gtcatgggagtgggg

SEQ ID NO: 1208659 - DNA, 15 bp, Homo sapiens
ggtcatgggagtggg

SEQ ID NO: 1208660 - DNA, 15 bp, Homo sapiens
cggtcatgggagtgg

SEQ ID NO: 1208661 - DNA, 15 bp, Homo sapiens
tcggtcatgggagtg

SEQ ID NO: 1208662 - DNA, 15 bp, Homo sapiens
ttcggtcatgggagt

SEQ ID NO: 1208663 - DNA, 15 bp, Homo sapiens
gttcggtcatgggag

SEQ ID NO: 1208664 - DNA, 15 bp, Homo sapiens
ggttcggtcatggga

SEQ ID NO: 1208665 - DNA, 15 bp, Homo sapiens
cggttcggtcatggg

SEQ ID NO: 1208666 - DNA, 15 bp, Homo sapiens
tcggttcggtcatgg

SEQ ID NO: 1208667 - DNA, 15 bp, Homo sapiens
ctcggttcggtcatg

SEQ ID NO: 1208668 - DNA, 15 bp, Homo sapiens
tctcggttcggtcat

SEQ ID NO: 1208669 - DNA, 15 bp, Homo sapiens
ttctcggttcggtca

SEQ ID NO: 1208670 - DNA, 15 bp, Homo sapiens
cttctcggttcggtc

SEQ ID NO: 1208671 - DNA, 15 bp, Homo sapiens
acttctcggttcggt

SEQ ID NO: 1208672 - DNA, 15 bp, Homo sapiens
gacttctcggttcgg

SEQ ID NO: 1208673 - DNA, 15 bp, Homo sapiens
tgacttctcggttcg

SEQ ID NO: 1208674 - DNA, 15 bp, Homo sapiens
atgacttctcggttc

SEQ ID NO: 1208675 - DNA, 15 bp, Homo sapiens
catgacttctcggtt

SEQ ID NO: 1208676 - DNA, 15 bp, Homo sapiens
gcatgacttctcggt

SEQ ID NO: 1208677 - DNA, 15 bp, Homo sapiens
tgcatgacttctcgg

SEQ ID NO: 1208678 - DNA, 15 bp, Homo sapiens
gtgcatgacttctcg

SEQ ID NO: 1208679 - DNA, 15 bp, Homo sapiens
ggtgcatgacttctc

SEQ ID NO: 1208680 - DNA, 15 bp, Homo sapiens
gggtgcatgacttct

SEQ ID NO: 1208681 - DNA, 15 bp, Homo sapiens
cgggtgcatgacttc

SEQ ID NO: 1208682 - DNA, 15 bp, Homo sapiens
gcgggtgcatgactt

SEQ ID NO: 1208683 - DNA, 15 bp, Homo sapiens
tgcgggtgcatgact

SEQ ID NO: 1208684 - DNA, 15 bp, Homo sapiens
atgcgggtgcatgac

SEQ ID NO: 1208685 - DNA, 15 bp, Homo sapiens
tatgcgggtgcatga

SEQ ID NO: 1208686 - DNA, 15 bp, Homo sapiens
ttatgcgggtgcatg

SEQ ID NO: 1208687 - DNA, 15 bp, Homo sapiens
cttatgcgggtgcat

SEQ ID NO: 1208688 - DNA, 15 bp, Homo sapiens
tcttatgcgggtgca

SEQ ID NO: 1208689 - DNA, 15 bp, Homo sapiens
ttcttatgcgggtgc

SEQ ID NO: 1208690 - DNA, 15 bp, Homo sapiens
gttcttatgcgggtg

SEQ ID NO: 1208691 - DNA, 15 bp, Homo sapiens
agttcttatgcgggt

SEQ ID NO: 1208692 - DNA, 15 bp, Homo sapiens
gagttcttatgcggg

SEQ ID NO: 1208693 - DNA, 15 bp, Homo sapiens
agagttcttatgcgg

SEQ ID NO: 1208694 - DNA, 15 bp, Homo sapiens
tagagttcttatgcg

SEQ ID NO: 1208695 - DNA, 15 bp, Homo sapiens
ttagagttcttatgc

SEQ ID NO: 1208696 - DNA, 15 bp, Homo sapiens
attagagttcttatg

SEQ ID NO: 1208697 - DNA, 15 bp, Homo sapiens
aattagagttcttat

SEQ ID NO: 1208698 - DNA, 15 bp, Homo sapiens
aaattagagttctta

SEQ ID NO: 1208699 - DNA, 15 bp, Homo sapiens
aaaattagagttctt

SEQ ID NO: 1208700 - DNA, 15 bp, Homo sapiens
aaaaattagagttct

SEQ ID NO: 1208701 - DNA, 15 bp, Homo sapiens
aaaaaattagagttc

SEQ ID NO: 1208702 - DNA, 15 bp, Homo sapiens
aaaaaaattagagtt

SEQ ID NO: 1208703 - DNA, 15 bp, Homo sapiens
aaaaaaaattagagt

SEQ ID NO: 1208704 - DNA, 15 bp, Homo sapiens
aaaaaaaaattagag

SEQ ID NO: 1208705 - DNA, 15 bp, Homo sapiens
aaaaaaaaaattaga

SEQ ID NO: 1208706 - DNA, 15 bp, Homo sapiens
gaaaaaaaaaattag

SEQ ID NO: 1208707 - DNA, 15 bp, Homo sapiens
tgaaaaaaaaaatta

SEQ ID NO: 1208708 - DNA, 15 bp, Homo sapiens
ttgaaaaaaaaaatt

SEQ ID NO: 1208709 - DNA, 15 bp, Homo sapiens
tttgaaaaaaaaaat

SEQ ID NO: 1208710 - DNA, 15 bp, Homo sapiens
ctttgaaaaaaaaaa

SEQ ID NO: 1208711 - DNA, 15 bp, Homo sapiens
actttgaaaaaaaaa

SEQ ID NO: 1208712 - DNA, 15 bp, Homo sapiens
gactttgaaaaaaaa

SEQ ID NO: 1208713 - DNA, 15 bp, Homo sapiens
agactttgaaaaaaa

SEQ ID NO: 1208714 - DNA, 15 bp, Homo sapiens
aagactttgaaaaaa

SEQ ID NO: 1208715 - DNA, 15 bp, Homo sapiens
gaagactttgaaaaa

SEQ ID NO: 1208716 - DNA, 15 bp, Homo sapiens
agaagactttgaaaa

SEQ ID NO: 1208717 - DNA, 15 bp, Homo sapiens
gagaagactttgaaa

SEQ ID NO: 1208718 - DNA, 15 bp, Homo sapiens
tgagaagactttgaa

SEQ ID NO: 1208719 - DNA, 15 bp, Homo sapiens
gtgagaagactttga

SEQ ID NO: 1208720 - DNA, 15 bp, Homo sapiens
agtgagaagactttg

SEQ ID NO: 1208721 - DNA, 15 bp, Homo sapiens
cagtgagaagacttt

SEQ ID NO: 1208722 - DNA, 15 bp, Homo sapiens
gcagtgagaagactt

SEQ ID NO: 1208723 - DNA, 15 bp, Homo sapiens
ggcagtgagaagact

SEQ ID NO: 1208724 - DNA, 15 bp, Homo sapiens
gggcagtgagaagac

SEQ ID NO: 1208725 - DNA, 15 bp, Homo sapiens
ggggcagtgagaaga

SEQ ID NO: 1208726 - DNA, 15 bp, Homo sapiens
tggggcagtgagaag

SEQ ID NO: 1208727 - DNA, 15 bp, Homo sapiens
ttggggcagtgagaa

SEQ ID NO: 1208728 - DNA, 15 bp, Homo sapiens
tttggggcagtgaga

SEQ ID NO: 1208729 - DNA, 15 bp, Homo sapiens
ttttggggcagtgag

SEQ ID NO: 1208730 - DNA, 15 bp, Homo sapiens
tttttggggcagtga

SEQ ID NO: 1208731 - DNA, 15 bp, Homo sapiens
atttttggggcagtg

SEQ ID NO: 1208732 - DNA, 15 bp, Homo sapiens
tatttttggggcagt

SEQ ID NO: 1208733 - DNA, 15 bp, Homo sapiens
ctatttttggggcag

SEQ ID NO: 1208734 - DNA, 15 bp, Homo sapiens
actatttttggggca

SEQ ID NO: 1208735 - DNA, 15 bp, Homo sapiens
aactatttttggggc

SEQ ID NO: 1208736 - DNA, 15 bp, Homo sapiens
aaactatttttgggg

SEQ ID NO: 1208737 - DNA, 15 bp, Homo sapiens
gaaactatttttggg

SEQ ID NO: 1208738 - DNA, 15 bp, Homo sapiens
agaaactatttttgg

SEQ ID NO: 1208739 - DNA, 15 bp, Homo sapiens
aagaaactatttttg

SEQ ID NO: 1208740 - DNA, 15 bp, Homo sapiens
aaagaaactattttt

SEQ ID NO: 1208741 - DNA, 15 bp, Homo sapiens
gaaagaaactatttt

SEQ ID NO: 1208742 - DNA, 15 bp, Homo sapiens
tgaaagaaactattt

SEQ ID NO: 1208743 - DNA, 15 bp, Homo sapiens
atgaaagaaactatt

SEQ ID NO: 1208744 - DNA, 15 bp, Homo sapiens
aatgaaagaaactat

SEQ ID NO: 1208745 - DNA, 15 bp, Homo sapiens
gaatgaaagaaacta

SEQ ID NO: 1208746 - DNA, 15 bp, Homo sapiens
ggaatgaaagaaact

SEQ ID NO: 1208747 - DNA, 15 bp, Homo sapiens
gggaatgaaagaaac

SEQ ID NO: 1208748 - DNA, 15 bp, Homo sapiens
tgggaatgaaagaaa

SEQ ID NO: 1208749 - DNA, 15 bp, Homo sapiens
ctgggaatgaaagaa

SEQ ID NO: 1208750 - DNA, 15 bp, Homo sapiens
cctgggaatgaaaga

SEQ ID NO: 1208751 - DNA, 15 bp, Homo sapiens
ccctgggaatgaaag

SEQ ID NO: 1208752 - DNA, 15 bp, Homo sapiens
cccctgggaatgaaa

SEQ ID NO: 1208753 - DNA, 15 bp, Homo sapiens
tcccctgggaatgaa

SEQ ID NO: 1208754 - DNA, 15 bp, Homo sapiens
atcccctgggaatga

SEQ ID NO: 1208755 - DNA, 15 bp, Homo sapiens
catcccctgggaatg

SEQ ID NO: 1208756 - DNA, 15 bp, Homo sapiens
acatcccctgggaat

SEQ ID NO: 1208757 - DNA, 15 bp, Homo sapiens
cacatcccctgggaa

SEQ ID NO: 1208758 - DNA, 15 bp, Homo sapiens
tcacatcccctggga

SEQ ID NO: 1208759 - DNA, 15 bp, Homo sapiens
ttcacatcccctggg

SEQ ID NO: 1208760 - DNA, 15 bp, Homo sapiens
tttcacatcccctgg

SEQ ID NO: 1208761 - DNA, 15 bp, Homo sapiens
ctttcacatcccctg

SEQ ID NO: 1208762 - DNA, 15 bp, Homo sapiens
actttcacatcccct

SEQ ID NO: 1208763 - DNA, 15 bp, Homo sapiens
cactttcacatcccc

SEQ ID NO: 1208764 - DNA, 15 bp, Homo sapiens
acactttcacatccc

SEQ ID NO: 1208765 - DNA, 15 bp, Homo sapiens
gacactttcacatcc

SEQ ID NO: 1208766 - DNA, 15 bp, Homo sapiens
agacactttcacatc

SEQ ID NO: 1208767 - DNA, 15 bp, Homo sapiens
gagacactttcacat

SEQ ID NO: 1208768 - DNA, 15 bp, Homo sapiens
agagacactttcaca

SEQ ID NO: 1208769 - DNA, 15 bp, Homo sapiens
gagagacactttcac

SEQ ID NO: 1208770 - DNA, 15 bp, Homo sapiens
ggagagacactttca

SEQ ID NO: 1208771 - DNA, 15 bp, Homo sapiens
gggagagacactttc

SEQ ID NO: 1208772 - DNA, 15 bp, Homo sapiens
tgggagagacacttt

SEQ ID NO: 1208773 - DNA, 15 bp, Homo sapiens
ttgggagagacactt

SEQ ID NO: 1208774 - DNA, 15 bp, Homo sapiens
attgggagagacact

SEQ ID NO: 1208775 - DNA, 15 bp, Homo sapiens
aattgggagagacac

SEQ ID NO: 1208776 - DNA, 15 bp, Homo sapiens
aaattgggagagaca

SEQ ID NO: 1208777 - DNA, 15 bp, Homo sapiens
aaaattgggagagac

SEQ ID NO: 1208778 - DNA, 15 bp, Homo sapiens
taaaattgggagaga

SEQ ID NO: 1208779 - DNA, 15 bp, Homo sapiens
ataaaattgggagag

SEQ ID NO: 1208780 - DNA, 15 bp, Homo sapiens
aataaaattgggaga

SEQ ID NO: 1208781 - DNA, 15 bp, Homo sapiens
aaataaaattgggag

SEQ ID NO: 1208782 - DNA, 15 bp, Homo sapiens
gaaataaaattggga

SEQ ID NO: 1208783 - DNA, 15 bp, Homo sapiens
tgaaataaaattggg

SEQ ID NO: 1208784 - DNA, 15 bp, Homo sapiens
ttgaaataaaattgg

SEQ ID NO: 1208785 - DNA, 15 bp, Homo sapiens
gttgaaataaaattg

SEQ ID NO: 1208786 - DNA, 15 bp, Homo sapiens
ggttgaaataaaatt

SEQ ID NO: 1208787 - DNA, 15 bp, Homo sapiens
aggttgaaataaaat

SEQ ID NO: 1208788 - DNA, 15 bp, Homo sapiens
gaggttgaaataaaa

SEQ ID NO: 1208789 - DNA, 15 bp, Homo sapiens
ggaggttgaaataaa

SEQ ID NO: 1208790 - DNA, 15 bp, Homo sapiens
gggaggttgaaataa

SEQ ID NO: 1208791 - DNA, 15 bp, Homo sapiens
tgggaggttgaaata

SEQ ID NO: 1208792 - DNA, 15 bp, Homo sapiens
ctgggaggttgaaat

SEQ ID NO: 1208793 - DNA, 15 bp, Homo sapiens
gctgggaggttgaaa

SEQ ID NO: 1208794 - DNA, 15 bp, Homo sapiens
cgctgggaggttgaa

SEQ ID NO: 1208795 - DNA, 15 bp, Homo sapiens
acgctgggaggttga

SEQ ID NO: 1208796 - DNA, 15 bp, Homo sapiens
aacgctgggaggttg

SEQ ID NO: 1208797 - DNA, 15 bp, Homo sapiens
gaacgctgggaggtt

SEQ ID NO: 1208798 - DNA, 15 bp, Homo sapiens
ggaacgctgggaggt

SEQ ID NO: 1208799 - DNA, 15 bp, Homo sapiens
tggaacgctgggagg

SEQ ID NO: 1208800 - DNA, 15 bp, Homo sapiens
gtggaacgctgggag

SEQ ID NO: 1208801 - DNA, 15 bp, Homo sapiens
tgtggaacgctggga

SEQ ID NO: 1208802 - DNA, 15 bp, Homo sapiens
gtgtggaacgctggg

SEQ ID NO: 1208803 - DNA, 15 bp, Homo sapiens
tgtgtggaacgctgg

SEQ ID NO: 1208804 - DNA, 15 bp, Homo sapiens
atgtgtggaacgctg

SEQ ID NO: 1208805 - DNA, 15 bp, Homo sapiens
tatgtgtggaacgct

SEQ ID NO: 1208806 - DNA, 15 bp, Homo sapiens
atatgtgtggaacgc

SEQ ID NO: 1208807 - DNA, 15 bp, Homo sapiens
catatgtgtggaacg

SEQ ID NO: 1208808 - DNA, 15 bp, Homo sapiens
gcatatgtgtggaac

SEQ ID NO: 1208809 - DNA, 15 bp, Homo sapiens
ggcatatgtgtggaa

SEQ ID NO: 1208810 - DNA, 15 bp, Homo sapiens
aggcatatgtgtgga

SEQ ID NO: 1208811 - DNA, 15 bp, Homo sapiens
aaggcatatgtgtgg

SEQ ID NO: 1208812 - DNA, 15 bp, Homo sapiens
caaggcatatgtgtg

SEQ ID NO: 1208813 - DNA, 15 bp, Homo sapiens
gcaaggcatatgtgt

SEQ ID NO: 1208814 - DNA, 15 bp, Homo sapiens
ggcaaggcatatgtg

SEQ ID NO: 1208815 - DNA, 15 bp, Homo sapiens
aggcaaggcatatgt

SEQ ID NO: 1208816 - DNA, 15 bp, Homo sapiens
gaggcaaggcatatg

SEQ ID NO: 1208817 - DNA, 15 bp, Homo sapiens
tgaggcaaggcatat

SEQ ID NO: 1208818 - DNA, 15 bp, Homo sapiens
ctgaggcaaggcata

SEQ ID NO: 1208819 - DNA, 15 bp, Homo sapiens
gctgaggcaaggcat

SEQ ID NO: 1208820 - DNA, 15 bp, Homo sapiens
ggctgaggcaaggca

SEQ ID NO: 1208821 - DNA, 15 bp, Homo sapiens
tggctgaggcaaggc

SEQ ID NO: 1208822 - DNA, 15 bp, Homo sapiens
ctggctgaggcaagg

SEQ ID NO: 1208823 - DNA, 15 bp, Homo sapiens
gctggctgaggcaag

SEQ ID NO: 1208824 - DNA, 15 bp, Homo sapiens
agctggctgaggcaa

SEQ ID NO: 1208825 - DNA, 15 bp, Homo sapiens
aagctggctgaggca

SEQ ID NO: 1208826 - DNA, 15 bp, Homo sapiens
aaagctggctgaggc

SEQ ID NO: 1208827 - DNA, 15 bp, Homo sapiens
gaaagctggctgagg

SEQ ID NO: 1208828 - DNA, 15 bp, Homo sapiens
tgaaagctggctgag

SEQ ID NO: 1208829 - DNA, 15 bp, Homo sapiens
gtgaaagctggctga

SEQ ID NO: 1208830 - DNA, 15 bp, Homo sapiens
agtgaaagctggctg

SEQ ID NO: 1208831 - DNA, 15 bp, Homo sapiens
cagtgaaagctggct

SEQ ID NO: 1208832 - DNA, 15 bp, Homo sapiens
tcagtgaaagctggc

SEQ ID NO: 1208833 - DNA, 15 bp, Homo sapiens
atcagtgaaagctgg

SEQ ID NO: 1208834 - DNA, 15 bp, Homo sapiens
gatcagtgaaagctg

SEQ ID NO: 1208835 - DNA, 15 bp, Homo sapiens
agatcagtgaaagct

SEQ ID NO: 1208836 - DNA, 15 bp, Homo sapiens
cagatcagtgaaagc

SEQ ID NO: 1208837 - DNA, 15 bp, Homo sapiens
gcagatcagtgaaag

SEQ ID NO: 1208838 - DNA, 15 bp, Homo sapiens
ggcagatcagtgaaa

SEQ ID NO: 1208839 - DNA, 15 bp, Homo sapiens
tggcagatcagtgaa

SEQ ID NO: 1208840 - DNA, 15 bp, Homo sapiens
atggcagatcagtga

SEQ ID NO: 1208841 - DNA, 15 bp, Homo sapiens
aatggcagatcagtg

SEQ ID NO: 1208842 - DNA, 15 bp, Homo sapiens
aaatggcagatcagt

SEQ ID NO: 1208843 - DNA, 15 bp, Homo sapiens
gaaatggcagatcag

SEQ ID NO: 1208844 - DNA, 15 bp, Homo sapiens
ggaaatggcagatca

SEQ ID NO: 1208845 - DNA, 15 bp, Homo sapiens
tggaaatggcagatc

SEQ ID NO: 1208846 - DNA, 15 bp, Homo sapiens
gtggaaatggcagat

SEQ ID NO: 1208847 - DNA, 15 bp, Homo sapiens
ggtggaaatggcaga

SEQ ID NO: 1208848 - DNA, 15 bp, Homo sapiens
aggtggaaatggcag

SEQ ID NO: 1208849 - DNA, 15 bp, Homo sapiens
gaggtggaaatggca

SEQ ID NO: 1208850 - DNA, 15 bp, Homo sapiens
cgaggtggaaatggc

SEQ ID NO: 1208851 - DNA, 15 bp, Homo sapiens
ccgaggtggaaatgg

SEQ ID NO: 1208852 - DNA, 15 bp, Homo sapiens
gccgaggtggaaatg

SEQ ID NO: 1208853 - DNA, 15 bp, Homo sapiens
cgccgaggtggaaat

SEQ ID NO: 1208854 - DNA, 15 bp, Homo sapiens
gcgccgaggtggaaa

SEQ ID NO: 1208855 - DNA, 15 bp, Homo sapiens
agcgccgaggtggaa

SEQ ID NO: 1208856 - DNA, 15 bp, Homo sapiens
cagcgccgaggtgga

SEQ ID NO: 1208857 - DNA, 15 bp, Homo sapiens
gcagcgccgaggtgg

SEQ ID NO: 1208858 - DNA, 15 bp, Homo sapiens
agcagcgccgaggtg

SEQ ID NO: 1208859 - DNA, 15 bp, Homo sapiens
gagcagcgccgaggt

SEQ ID NO: 1208860 - DNA, 15 bp, Homo sapiens
ggagcagcgccgagg

SEQ ID NO: 1208861 - DNA, 15 bp, Homo sapiens
aggagcagcgccgag

SEQ ID NO: 1208862 - DNA, 15 bp, Homo sapiens
taggagcagcgccga

SEQ ID NO: 1208863 - DNA, 15 bp, Homo sapiens
gtaggagcagcgccg

SEQ ID NO: 1208864 - DNA, 15 bp, Homo sapiens
ggtaggagcagcgcc

SEQ ID NO: 1208865 - DNA, 15 bp, Homo sapiens
aggtaggagcagcgc

SEQ ID NO: 1208866 - DNA, 15 bp, Homo sapiens
caggtaggagcagcg

SEQ ID NO: 1208867 - DNA, 15 bp, Homo sapiens
gcaggtaggagcagc

SEQ ID NO: 1208868 - DNA, 15 bp, Homo sapiens
cgcaggtaggagcag

SEQ ID NO: 1208869 - DNA, 15 bp, Homo sapiens
ccgcaggtaggagca

SEQ ID NO: 1208870 - DNA, 15 bp, Homo sapiens
tccgcaggtaggagc

SEQ ID NO: 1208871 - DNA, 15 bp, Homo sapiens
ttccgcaggtaggag

SEQ ID NO: 1208872 - DNA, 15 bp, Homo sapiens
tttccgcaggtagga

SEQ ID NO: 1208873 - DNA, 15 bp, Homo sapiens
atttccgcaggtagg

SEQ ID NO: 1208874 - DNA, 15 bp, Homo sapiens
gatttccgcaggtag

SEQ ID NO: 1208875 - DNA, 15 bp, Homo sapiens
ggatttccgcaggta

SEQ ID NO: 1208876 - DNA, 15 bp, Homo sapiens
aggatttccgcaggt

SEQ ID NO: 1208877 - DNA, 15 bp, Homo sapiens
caggatttccgcagg

SEQ ID NO: 1208878 - DNA, 15 bp, Homo sapiens
acaggatttccgcag

SEQ ID NO: 1208879 - DNA, 15 bp, Homo sapiens
gacaggatttccgca

SEQ ID NO: 1208880 - DNA, 15 bp, Homo sapiens
ggacaggatttccgc

SEQ ID NO: 1208881 - DNA, 15 bp, Homo sapiens
tggacaggatttccg

SEQ ID NO: 1208882 - DNA, 15 bp, Homo sapiens
atggacaggatttcc

SEQ ID NO: 1208883 - DNA, 15 bp, Homo sapiens
gatggacaggatttc

SEQ ID NO: 1208884 - DNA, 15 bp, Homo sapiens
ggatggacaggattt

SEQ ID NO: 1208885 - DNA, 15 bp, Homo sapiens
tggatggacaggatt

SEQ ID NO: 1208886 - DNA, 15 bp, Homo sapiens
atggatggacaggat

SEQ ID NO: 1208887 - DNA, 15 bp, Homo sapiens
tatggatggacagga

SEQ ID NO: 1208888 - DNA, 15 bp, Homo sapiens
ctatggatggacagg

SEQ ID NO: 1208889 - DNA, 15 bp, Homo sapiens
actatggatggacag

SEQ ID NO: 1208890 - DNA, 15 bp, Homo sapiens
gactatggatggaca

SEQ ID NO: 1208891 - DNA, 15 bp, Homo sapiens
agactatggatggac

SEQ ID NO: 1208892 - DNA, 15 bp, Homo sapiens
cagactatggatgga

SEQ ID NO: 1208893 - DNA, 15 bp, Homo sapiens
tcagactatggatgg

SEQ ID NO: 1208894 - DNA, 15 bp, Homo sapiens
atcagactatggatg

SEQ ID NO: 1208895 - DNA, 15 bp, Homo sapiens
aatcagactatggat

SEQ ID NO: 1208896 - DNA, 15 bp, Homo sapiens
aaatcagactatgga

SEQ ID NO: 1208897 - DNA, 15 bp, Homo sapiens
gaaatcagactatgg

SEQ ID NO: 1208898 - DNA, 15 bp, Homo sapiens
agaaatcagactatg

SEQ ID NO: 1208899 - DNA, 15 bp, Homo sapiens
cagaaatcagactat

SEQ ID NO: 1208900 - DNA, 15 bp, Homo sapiens
acagaaatcagacta

SEQ ID NO: 1208901 - DNA, 15 bp, Homo sapiens
aacagaaatcagact

SEQ ID NO: 1208902 - DNA, 15 bp, Homo sapiens
caacagaaatcagac

SEQ ID NO: 1208903 - DNA, 15 bp, Homo sapiens
acaacagaaatcaga

SEQ ID NO: 1208904 - DNA, 15 bp, Homo sapiens
aacaacagaaatcag

SEQ ID NO: 1208905 - DNA, 15 bp, Homo sapiens
gaacaacagaaatca

SEQ ID NO: 1208906 - DNA, 15 bp, Homo sapiens
ggaacaacagaaatc

SEQ ID NO: 1208907 - DNA, 15 bp, Homo sapiens
tggaacaacagaaat

SEQ ID NO: 1208908 - DNA, 15 bp, Homo sapiens
ctggaacaacagaaa

SEQ ID NO: 1208909 - DNA, 15 bp, Homo sapiens
tctggaacaacagaa

SEQ ID NO: 1208910 - DNA, 15 bp, Homo sapiens
ttctggaacaacaga

SEQ ID NO: 1208911 - DNA, 15 bp, Homo sapiens
gttctggaacaacag

SEQ ID NO: 1208912 - DNA, 15 bp, Homo sapiens
tgttctggaacaaca

SEQ ID NO: 1208913 - DNA, 15 bp, Homo sapiens
atgttctggaacaac

SEQ ID NO: 1208914 - DNA, 15 bp, Homo sapiens
aatgttctggaacaa

SEQ ID NO: 1208915 - DNA, 15 bp, Homo sapiens
gaatgttctggaaca

SEQ ID NO: 1208916 - DNA, 15 bp, Homo sapiens
agaatgttctggaac

SEQ ID NO: 1208917 - DNA, 15 bp, Homo sapiens
aagaatgttctggaa

SEQ ID NO: 1208918 - DNA, 15 bp, Homo sapiens
aaagaatgttctgga

SEQ ID NO: 1208919 - DNA, 15 bp, Homo sapiens
aaaagaatgttctgg

SEQ ID NO: 1208920 - DNA, 15 bp, Homo sapiens
aaaaagaatgttctg

SEQ ID NO: 1208921 - DNA, 15 bp, Homo sapiens
aaaaaagaatgttct

SEQ ID NO: 1208922 - DNA, 15 bp, Homo sapiens
aaaaaaagaatgttc

SEQ ID NO: 1208923 - DNA, 15 bp, Homo sapiens
aaaaaaaagaatgtt

SEQ ID NO: 1208924 - DNA, 15 bp, Homo sapiens
gaaaaaaaaaagaat

SEQ ID NO: 1208925 - DNA, 15 bp, Homo sapiens
ggggaaaaaaaaaag

SEQ ID NO: 1208926 - DNA, 15 bp, Homo sapiens
aggggaaaaaaaaaa

SEQ ID NO: 1208927 - DNA, 15 bp, Homo sapiens
caggggaaaaaaaaa

SEQ ID NO: 1208928 - DNA, 15 bp, Homo sapiens
ccaggggaaaaaaaa

SEQ ID NO: 1208929 - DNA, 15 bp, Homo sapiens
tccaggggaaaaaaa

SEQ ID NO: 1208930 - DNA, 15 bp, Homo sapiens
ttccaggggaaaaaa

SEQ ID NO: 1208931 - DNA, 15 bp, Homo sapiens
gttccaggggaaaaa

SEQ ID NO: 1208932 - DNA, 15 bp, Homo sapiens
tgttccaggggaaaa

SEQ ID NO: 1208933 - DNA, 15 bp, Homo sapiens
atgttccaggggaaa

SEQ ID NO: 1208934 - DNA, 15 bp, Homo sapiens
aatgttccaggggaa

SEQ ID NO: 1208935 - DNA, 15 bp, Homo sapiens
gaatgttccagggga

SEQ ID NO: 1208936 - DNA, 15 bp, Homo sapiens
agaatgttccagggg

SEQ ID NO: 1208937 - DNA, 15 bp, Homo sapiens
aagaatgttccaggg

SEQ ID NO: 1208938 - DNA, 15 bp, Homo sapiens
aaagaatgttccagg

SEQ ID NO: 1208939 - DNA, 15 bp, Homo sapiens
taaagaatgttccag

SEQ ID NO: 1208940 - DNA, 15 bp, Homo sapiens
ttaaagaatgttcca

SEQ ID NO: 1208941 - DNA, 15 bp, Homo sapiens
cttaaagaatgttcc

SEQ ID NO: 1208942 - DNA, 15 bp, Homo sapiens
tcttaaagaatgttc

SEQ ID NO: 1208943 - DNA, 15 bp, Homo sapiens
atcttaaagaatgtt

SEQ ID NO: 1208944 - DNA, 15 bp, Homo sapiens
tatcttaaagaatgt

SEQ ID NO: 1208945 - DNA, 15 bp, Homo sapiens
gtatcttaaagaatg

SEQ ID NO: 1208946 - DNA, 15 bp, Homo sapiens
ggtatcttaaagaat

SEQ ID NO: 1208947 - DNA, 15 bp, Homo sapiens
aggtatcttaaagaa

SEQ ID NO: 1208948 - DNA, 15 bp, Homo sapiens
gaggtatcttaaaga

SEQ ID NO: 1208949 - DNA, 15 bp, Homo sapiens
tgaggtatcttaaag

SEQ ID NO: 1208950 - DNA, 15 bp, Homo sapiens
ttgaggtatcttaaa

SEQ ID NO: 1208951 - DNA, 15 bp, Homo sapiens
attgaggtatcttaa

SEQ ID NO: 1208952 - DNA, 15 bp, Homo sapiens
tattgaggtatctta

SEQ ID NO: 1208953 - DNA, 15 bp, Homo sapiens
ttattgaggtatctt

SEQ ID NO: 1208954 - DNA, 15 bp, Homo sapiens
tttattgaggtatct

SEQ ID NO: 1208955 - DNA, 15 bp, Homo sapiens
atttattgaggtatc

SEQ ID NO: 1208956 - DNA, 15 bp, Homo sapiens
catttattgaggtat

SEQ ID NO: 1208957 - DNA, 15 bp, Homo sapiens
tcatttattgaggta

SEQ ID NO: 1208958 - DNA, 15 bp, Homo sapiens
ttcatttattgaggt

SEQ ID NO: 1208959 - DNA, 15 bp, Homo sapiens
tttcatttattgagg

SEQ ID NO: 1208960 - DNA, 15 bp, Homo sapiens
gtttcatttattgag

SEQ ID NO: 1208961 - DNA, 15 bp, Homo sapiens
ggtttcatttattga

SEQ ID NO: 1208962 - DNA, 15 bp, Homo sapiens
tggtttcatttattg

SEQ ID NO: 1208963 - DNA, 15 bp, Homo sapiens
ctggtttcatttatt

SEQ ID NO: 1208964 - DNA, 15 bp, Homo sapiens
tctggtttcatttat

SEQ ID NO: 1208965 - DNA, 15 bp, Homo sapiens
ctctggtttcattta

SEQ ID NO: 1208966 - DNA, 15 bp, Homo sapiens
cctctggtttcattt

SEQ ID NO: 1208967 - DNA, 15 bp, Homo sapiens
ccctctggtttcatt

SEQ ID NO: 1208968 - DNA, 15 bp, Homo sapiens
accctctggtttcat

SEQ ID NO: 1208969 - DNA, 15 bp, Homo sapiens
taccctctggtttca

SEQ ID NO: 1208970 - DNA, 15 bp, Homo sapiens
ataccctctggtttc

SEQ ID NO: 1208971 - DNA, 15 bp, Homo sapiens
tataccctctggttt

SEQ ID NO: 1208972 - DNA, 15 bp, Homo sapiens
ctataccctctggtt

SEQ ID NO: 1208973 - DNA, 15 bp, Homo sapiens
tctataccctctggt

SEQ ID NO: 1208974 - DNA, 15 bp, Homo sapiens
ctctataccctctgg

SEQ ID NO: 1208975 - DNA, 15 bp, Homo sapiens
gctctataccctctg

SEQ ID NO: 1208976 - DNA, 15 bp, Homo sapiens
tgctctataccctct

SEQ ID NO: 1208977 - DNA, 15 bp, Homo sapiens
ctgctctataccctc

SEQ ID NO: 1208978 - DNA, 15 bp, Homo sapiens
actgctctataccct

SEQ ID NO: 1208979 - DNA, 15 bp, Homo sapiens
tactgctctataccc

SEQ ID NO: 1208980 - DNA, 15 bp, Homo sapiens
atactgctctatacc

SEQ ID NO: 1208981 - DNA, 15 bp, Homo sapiens
catactgctctatac

SEQ ID NO: 1208982 - DNA, 15 bp, Homo sapiens
tcatactgctctata

SEQ ID NO: 1208983 - DNA, 15 bp, Homo sapiens
ttcatactgctctat

SEQ ID NO: 1208984 - DNA, 15 bp, Homo sapiens
attcatactgctcta

SEQ ID NO: 1208985 - DNA, 15 bp, Homo sapiens
cattcatactgctct

SEQ ID NO: 1208986 - DNA, 15 bp, Homo sapiens
ccattcatactgctc

SEQ ID NO: 1208987 - DNA, 15 bp, Homo sapiens
cccattcatactgct

SEQ ID NO: 1208988 - DNA, 15 bp, Homo sapiens
acccattcatactgc

SEQ ID NO: 1208989 - DNA, 15 bp, Homo sapiens
tacccattcatactg

SEQ ID NO: 1208990 - DNA, 15 bp, Homo sapiens
gtacccattcatact

SEQ ID NO: 1208991 - DNA, 15 bp, Homo sapiens
agtacccattcatac

SEQ ID NO: 1208992 - DNA, 15 bp, Homo sapiens
tagtacccattcata

SEQ ID NO: 1208993 - DNA, 15 bp, Homo sapiens
gtagtacccattcat

SEQ ID NO: 1208994 - DNA, 15 bp, Homo sapiens
tgtagtacccattca

SEQ ID NO: 1208995 - DNA, 15 bp, Homo sapiens
ttgtagtacccattc

SEQ ID NO: 1208996 - DNA, 15 bp, Homo sapiens
attgtagtacccatt

SEQ ID NO: 1208997 - DNA, 15 bp, Homo sapiens
cattgtagtacccat

SEQ ID NO: 1208998 - DNA, 15 bp, Homo sapiens
acattgtagtaccca

SEQ ID NO: 1208999 - DNA, 15 bp, Homo sapiens
tacattgtagtaccc

SEQ ID NO: 1209000 - DNA, 15 bp, Homo sapiens
gtacattgtagtacc

SEQ ID NO: 1209001 - DNA, 15 bp, Homo sapiens
tgtacattgtagtac

SEQ ID NO: 1209002 - DNA, 15 bp, Homo sapiens
ctgtacattgtagta

SEQ ID NO: 1209003 - DNA, 15 bp, Homo sapiens
cctgtacattgtagt

SEQ ID NO: 1209004 - DNA, 15 bp, Homo sapiens
ccctgtacattgtag

SEQ ID NO: 1209005 - DNA, 15 bp, Homo sapiens
cccctgtacattgta

SEQ ID NO: 1209006 - DNA, 15 bp, Homo sapiens
ccccctgtacattgt

SEQ ID NO: 1209007 - DNA, 15 bp, Homo sapiens
tccccctgtacattg

SEQ ID NO: 1209008 - DNA, 15 bp, Homo sapiens
ttccccctgtacatt

SEQ ID NO: 1209009 - DNA, 15 bp, Homo sapiens
tttccccctgtacat

SEQ ID NO: 1209010 - DNA, 15 bp, Homo sapiens
atttccccctgtaca

SEQ ID NO: 1209011 - DNA, 15 bp, Homo sapiens
catttccccctgtac

SEQ ID NO: 1209012 - DNA, 15 bp, Homo sapiens
ccatttccccctgta

SEQ ID NO: 1209013 - DNA, 15 bp, Homo sapiens
tccatttccccctgt

SEQ ID NO: 1209014 - DNA, 15 bp, Homo sapiens
ctccatttccccctg

SEQ ID NO: 1209015 - DNA, 15 bp, Homo sapiens
cctccatttccccct

SEQ ID NO: 1209016 - DNA, 15 bp, Homo sapiens
ccctccatttccccc

SEQ ID NO: 1209017 - DNA, 15 bp, Homo sapiens
cccctccatttcccc

SEQ ID NO: 1209018 - DNA, 15 bp, Homo sapiens
tcccctccatttccc

SEQ ID NO: 1209019 - DNA, 15 bp, Homo sapiens
ttcccctccatttcc

SEQ ID NO: 1209020 - DNA, 15 bp, Homo sapiens
attcccctccatttc

SEQ ID NO: 1209021 - DNA, 15 bp, Homo sapiens
tattcccctccattt

SEQ ID NO: 1209022 - DNA, 15 bp, Homo sapiens
atattcccctccatt

SEQ ID NO: 1209023 - DNA, 15 bp, Homo sapiens
catattcccctccat

SEQ ID NO: 1209024 - DNA, 15 bp, Homo sapiens
tcatattcccctcca

SEQ ID NO: 1209025 - DNA, 15 bp, Homo sapiens
atcatattcccctcc

SEQ ID NO: 1209026 - DNA, 15 bp, Homo sapiens
tatcatattcccctc

SEQ ID NO: 1209027 - DNA, 15 bp, Homo sapiens
atatcatattcccct

SEQ ID NO: 1209028 - DNA, 15 bp, Homo sapiens
tatatcatattcccc

SEQ ID NO: 1209029 - DNA, 15 bp, Homo sapiens
gtatatcatattccc

SEQ ID NO: 1209030 - DNA, 15 bp, Homo sapiens
agtatatcatattcc

SEQ ID NO: 1209031 - DNA, 15 bp, Homo sapiens
gagtatatcatattc

SEQ ID NO: 1209032 - DNA, 15 bp, Homo sapiens
agagtatatcatatt

SEQ ID NO: 1209033 - DNA, 15 bp, Homo sapiens
gagagtatatcatat

SEQ ID NO: 1209034 - DNA, 15 bp, Homo sapiens
ggagagtatatcata

SEQ ID NO: 1209035 - DNA, 15 bp, Homo sapiens
aggagagtatatcat

SEQ ID NO: 1209036 - DNA, 15 bp, Homo sapiens
gaggagagtatatca

SEQ ID NO: 1209037 - DNA, 15 bp, Homo sapiens
ggaggagagtatatc

SEQ ID NO: 1209038 - DNA, 15 bp, Homo sapiens
aggaggagagtatat

SEQ ID NO: 1209039 - DNA, 15 bp, Homo sapiens
aaggaggagagtata

SEQ ID NO: 1209040 - DNA, 15 bp, Homo sapiens
caaggaggagagtat

SEQ ID NO: 1209041 - DNA, 15 bp, Homo sapiens
acaaggaggagagta

SEQ ID NO: 1209042 - DNA, 15 bp, Homo sapiens
tacaaggaggagagt

SEQ ID NO: 1209043 - DNA, 15 bp, Homo sapiens
atacaaggaggagag

SEQ ID NO: 1209044 - DNA, 15 bp, Homo sapiens
tatacaaggaggaga

SEQ ID NO: 1209045 - DNA, 15 bp, Homo sapiens
atatacaaggaggag

SEQ ID NO: 1209046 - DNA, 15 bp, Homo sapiens
catatacaaggagga

SEQ ID NO: 1209047 - DNA, 15 bp, Homo sapiens
gcatatacaaggagg

SEQ ID NO: 1209048 - DNA, 15 bp, Homo sapiens
agcatatacaaggag

SEQ ID NO: 1209049 - DNA, 15 bp, Homo sapiens
aagcatatacaagga

SEQ ID NO: 1209050 - DNA, 15 bp, Homo sapiens
taagcatatacaagg

SEQ ID NO: 1209051 - DNA, 15 bp, Homo sapiens
ctaagcatatacaag

SEQ ID NO: 1209052 - DNA, 15 bp, Homo sapiens
tctaagcatatacaa

SEQ ID NO: 1209053 - DNA, 15 bp, Homo sapiens
ttctaagcatataca

SEQ ID NO: 1209054 - DNA, 15 bp, Homo sapiens
attctaagcatatac

SEQ ID NO: 1209055 - DNA, 15 bp, Homo sapiens
cattctaagcatata

SEQ ID NO: 1209056 - DNA, 15 bp, Homo sapiens
acattctaagcatat

SEQ ID NO: 1209057 - DNA, 15 bp, Homo sapiens
aacattctaagcata

SEQ ID NO: 1209058 - DNA, 15 bp, Homo sapiens
gaacattctaagcat

SEQ ID NO: 1209059 - DNA, 15 bp, Homo sapiens
agaacattctaagca

SEQ ID NO: 1209060 - DNA, 15 bp, Homo sapiens
tagaacattctaagc

SEQ ID NO: 1209061 - DNA, 15 bp, Homo sapiens
ctagaacattctaag

SEQ ID NO: 1209062 - DNA, 15 bp, Homo sapiens
tctagaacattctaa

SEQ ID NO: 1209063 - DNA, 15 bp, Homo sapiens
ttctagaacattcta

SEQ ID NO: 1209064 - DNA, 15 bp, Homo sapiens
cttctagaacattct

SEQ ID NO: 1209065 - DNA, 15 bp, Homo sapiens
ccttctagaacattc

SEQ ID NO: 1209066 - DNA, 15 bp, Homo sapiens
tccttctagaacatt

SEQ ID NO: 1209067 - DNA, 15 bp, Homo sapiens
atccttctagaacat

SEQ ID NO: 1209068 - DNA, 15 bp, Homo sapiens
tatccttctagaaca

SEQ ID NO: 1209069 - DNA, 15 bp, Homo sapiens
atatccttctagaac

SEQ ID NO: 1209070 - DNA, 15 bp, Homo sapiens
catatccttctagaa

SEQ ID NO: 1209071 - DNA, 15 bp, Homo sapiens
gcatatccttctaga

SEQ ID NO: 1209072 - DNA, 15 bp, Homo sapiens
agcatatccttctag

SEQ ID NO: 1209073 - DNA, 15 bp, Homo sapiens
aagcatatccttcta

SEQ ID NO: 1209074 - DNA, 15 bp, Homo sapiens
taagcatatccttct

SEQ ID NO: 1209075 - DNA, 15 bp, Homo sapiens
ttaagcatatccttc

SEQ ID NO: 1209076 - DNA, 15 bp, Homo sapiens
tttaagcatatcctt

SEQ ID NO: 1209077 - DNA, 15 bp, Homo sapiens
ttttaagcatatcct

SEQ ID NO: 1209078 - DNA, 15 bp, Homo sapiens
cttttaagcatatcc

SEQ ID NO: 1209079 - DNA, 15 bp, Homo sapiens
ccttttaagcatatc

SEQ ID NO: 1209080 - DNA, 15 bp, Homo sapiens
accttttaagcatat

SEQ ID NO: 1209081 - DNA, 15 bp, Homo sapiens
aaccttttaagcata

SEQ ID NO: 1209082 - DNA, 15 bp, Homo sapiens
taaccttttaagcat

SEQ ID NO: 1209083 - DNA, 15 bp, Homo sapiens
ctaaccttttaagca

SEQ ID NO: 1209084 - DNA, 15 bp, Homo sapiens
gctaaccttttaagc

SEQ ID NO: 1209085 - DNA, 15 bp, Homo sapiens
tgctaaccttttaag

SEQ ID NO: 1209086 - DNA, 15 bp, Homo sapiens
ctgctaaccttttaa

SEQ ID NO: 1209087 - DNA, 15 bp, Homo sapiens
actgctaacctttta

SEQ ID NO: 1209088 - DNA, 15 bp, Homo sapiens
gactgctaacctttt

SEQ ID NO: 1209089 - DNA, 15 bp, Homo sapiens
ggactgctaaccttt

SEQ ID NO: 1209090 - DNA, 15 bp, Homo sapiens
aggactgctaacctt

SEQ ID NO: 1209091 - DNA, 15 bp, Homo sapiens
caggactgctaacct

SEQ ID NO: 1209092 - DNA, 15 bp, Homo sapiens
ccaggactgctaacc

SEQ ID NO: 1209093 - DNA, 15 bp, Homo sapiens
gccaggactgctaac

SEQ ID NO: 1209094 - DNA, 15 bp, Homo sapiens
ggccaggactgctaa

SEQ ID NO: 1209095 - DNA, 15 bp, Homo sapiens
tggccaggactgcta

SEQ ID NO: 1209096 - DNA, 15 bp, Homo sapiens
ctggccaggactgct

SEQ ID NO: 1209097 - DNA, 15 bp, Homo sapiens
cctggccaggactgc

SEQ ID NO: 1209098 - DNA, 15 bp, Homo sapiens
gcctggccaggactg

SEQ ID NO: 1209099 - DNA, 15 bp, Homo sapiens
cgcctggccaggact

SEQ ID NO: 1209100 - DNA, 15 bp, Homo sapiens
acgcctggccaggac

SEQ ID NO: 1209101 - DNA, 15 bp, Homo sapiens
cacgcctggccagga

SEQ ID NO: 1209102 - DNA, 15 bp, Homo sapiens
ccacgcctggccagg

SEQ ID NO: 1209103 - DNA, 15 bp, Homo sapiens
accacgcctggccag

SEQ ID NO: 1209104 - DNA, 15 bp, Homo sapiens
caccacgcctggcca

SEQ ID NO: 1209105 - DNA, 15 bp, Homo sapiens
agattacaggcgtga

SEQ ID NO: 1209106 - DNA, 15 bp, Homo sapiens
gagattacaggcgtg

SEQ ID NO: 1209107 - DNA, 15 bp, Homo sapiens
tgagattacaggcgt

SEQ ID NO: 1209108 - DNA, 15 bp, Homo sapiens
gcatcccaaagtgct

SEQ ID NO: 1209109 - DNA, 15 bp, Homo sapiens
tggcatcccaaagtg

SEQ ID NO: 1209110 - DNA, 15 bp, Homo sapiens
ttggcatcccaaagt

SEQ ID NO: 1209111 - DNA, 15 bp, Homo sapiens
gttggcatcccaaag

SEQ ID NO: 1209112 - DNA, 15 bp, Homo sapiens
cgttggcatcccaaa

SEQ ID NO: 1209113 - DNA, 15 bp, Homo sapiens
gcgttggcatcccaa

SEQ ID NO: 1209114 - DNA, 15 bp, Homo sapiens
cgcgttggcatccca

SEQ ID NO: 1209115 - DNA, 15 bp, Homo sapiens
ccgcgttggcatccc

SEQ ID NO: 1209116 - DNA, 15 bp, Homo sapiens
tccgcgttggcatcc

SEQ ID NO: 1209117 - DNA, 15 bp, Homo sapiens
gtccgcgttggcatc

SEQ ID NO: 1209118 - DNA, 15 bp, Homo sapiens
cgtccgcgttggcat

SEQ ID NO: 1209119 - DNA, 15 bp, Homo sapiens
ccgtccgcgttggca

SEQ ID NO: 1209120 - DNA, 15 bp, Homo sapiens
tccgtccgcgttggc

SEQ ID NO: 1209121 - DNA, 15 bp, Homo sapiens
atccgtccgcgttgg

SEQ ID NO: 1209122 - DNA, 15 bp, Homo sapiens
gatccgtccgcgttg

SEQ ID NO: 1209123 - DNA, 15 bp, Homo sapiens
tgatccgtccgcgtt

SEQ ID NO: 1209124 - DNA, 15 bp, Homo sapiens
gtgatccgtccgcgt

SEQ ID NO: 1209125 - DNA, 15 bp, Homo sapiens
tgtgatccgtccgcg

SEQ ID NO: 1209126 - DNA, 15 bp, Homo sapiens
ttgtgatccgtccgc

SEQ ID NO: 1209127 - DNA, 15 bp, Homo sapiens
cttgtgatccgtccg

SEQ ID NO: 1209128 - DNA, 15 bp, Homo sapiens
ccttgtgatccgtcc

SEQ ID NO: 1209129 - DNA, 15 bp, Homo sapiens
accttgtgatccgtc

SEQ ID NO: 1209130 - DNA, 15 bp, Homo sapiens
gaccttgtgatccgt

SEQ ID NO: 1209131 - DNA, 15 bp, Homo sapiens
agaactcctgacctt

SEQ ID NO: 1209132 - DNA, 15 bp, Homo sapiens
atctagaactcctga

SEQ ID NO: 1209133 - DNA, 15 bp, Homo sapiens
gatctagaactcctg

SEQ ID NO: 1209134 - DNA, 15 bp, Homo sapiens
tgatctagaactcct

SEQ ID NO: 1209135 - DNA, 15 bp, Homo sapiens
ctgatctagaactcc

SEQ ID NO: 1209136 - DNA, 15 bp, Homo sapiens
gctgatctagaactc

SEQ ID NO: 1209137 - DNA, 15 bp, Homo sapiens
ggctgatctagaact

SEQ ID NO: 1209138 - DNA, 15 bp, Homo sapiens
aggctgatctagaac

SEQ ID NO: 1209139 - DNA, 15 bp, Homo sapiens
caggctgatctagaa

SEQ ID NO: 1209140 - DNA, 15 bp, Homo sapiens
tcaggctgatctaga

SEQ ID NO: 1209141 - DNA, 15 bp, Homo sapiens
gtcaggctgatctag

SEQ ID NO: 1209142 - DNA, 15 bp, Homo sapiens
ggtcaggctgatcta

SEQ ID NO: 1209143 - DNA, 15 bp, Homo sapiens
tggtcaggctgatct

SEQ ID NO: 1209144 - DNA, 15 bp, Homo sapiens
ttggtcaggctgatc

SEQ ID NO: 1209145 - DNA, 15 bp, Homo sapiens
attggtcaggctgat

SEQ ID NO: 1209146 - DNA, 15 bp, Homo sapiens
tattggtcaggctga

SEQ ID NO: 1209147 - DNA, 15 bp, Homo sapiens
tatattggtcaggct

SEQ ID NO: 1209148 - DNA, 15 bp, Homo sapiens
ctatattggtcaggc

SEQ ID NO: 1209149 - DNA, 15 bp, Homo sapiens
actatattggtcagg

SEQ ID NO: 1209150 - DNA, 15 bp, Homo sapiens
cactatattggtcag

SEQ ID NO: 1209151 - DNA, 15 bp, Homo sapiens
tcactatattggtca

SEQ ID NO: 1209152 - DNA, 15 bp, Homo sapiens
ttcactatattggtc

SEQ ID NO: 1209153 - DNA, 15 bp, Homo sapiens
tttcactatattggt

SEQ ID NO: 1209154 - DNA, 15 bp, Homo sapiens
gtttcactatattgg

SEQ ID NO: 1209155 - DNA, 15 bp, Homo sapiens
ggtttcactatattg

SEQ ID NO: 1209156 - DNA, 15 bp, Homo sapiens
aggtttcactatatt

SEQ ID NO: 1209157 - DNA, 15 bp, Homo sapiens
gaggtttcactatat

SEQ ID NO: 1209158 - DNA, 15 bp, Homo sapiens
tgaggtttcactata

SEQ ID NO: 1209159 - DNA, 15 bp, Homo sapiens
atgaggtttcactat

SEQ ID NO: 1209160 - DNA, 15 bp, Homo sapiens
gatgaggtttcacta

SEQ ID NO: 1209161 - DNA, 15 bp, Homo sapiens
agatgaggtttcact

SEQ ID NO: 1209162 - DNA, 15 bp, Homo sapiens
aagatgaggtttcac

SEQ ID NO: 1209163 - DNA, 15 bp, Homo sapiens
aaagatgaggtttca

SEQ ID NO: 1209164 - DNA, 15 bp, Homo sapiens
taaagatgaggtttc

SEQ ID NO: 1209165 - DNA, 15 bp, Homo sapiens
gtaaagatgaggttt

SEQ ID NO: 1209166 - DNA, 15 bp, Homo sapiens
agtaaagatgaggtt

SEQ ID NO: 1209167 - DNA, 15 bp, Homo sapiens
tagtaaagatgaggt

SEQ ID NO: 1209168 - DNA, 15 bp, Homo sapiens
ttagtaaagatgagg

SEQ ID NO: 1209169 - DNA, 15 bp, Homo sapiens
tttagtaaagatgag

SEQ ID NO: 1209170 - DNA, 15 bp, Homo sapiens
ttttagtaaagatga

SEQ ID NO: 1209171 - DNA, 15 bp, Homo sapiens
acccggctaattttt

SEQ ID NO: 1209172 - DNA, 15 bp, Homo sapiens
tacccggctaatttt

SEQ ID NO: 1209173 - DNA, 15 bp, Homo sapiens
gtacccggctaattt

SEQ ID NO: 1209174 - DNA, 15 bp, Homo sapiens
cgtacccggctaatt

SEQ ID NO: 1209175 - DNA, 15 bp, Homo sapiens
ccgtacccggctaat

SEQ ID NO: 1209176 - DNA, 15 bp, Homo sapiens
accgtacccggctaa

SEQ ID NO: 1209177 - DNA, 15 bp, Homo sapiens
caccgtacccggcta

SEQ ID NO: 1209178 - DNA, 15 bp, Homo sapiens
ccaccgtacccggct

SEQ ID NO: 1209179 - DNA, 15 bp, Homo sapiens
gccaccgtacccggc

SEQ ID NO: 1209180 - DNA, 15 bp, Homo sapiens
tgccaccgtacccgg

SEQ ID NO: 1209181 - DNA, 15 bp, Homo sapiens
atgccaccgtacccg

SEQ ID NO: 1209182 - DNA, 15 bp, Homo sapiens
catgccaccgtaccc

SEQ ID NO: 1209183 - DNA, 15 bp, Homo sapiens
acatgccaccgtacc

SEQ ID NO: 1209184 - DNA, 15 bp, Homo sapiens
cacatgccaccgtac

SEQ ID NO: 1209185 - DNA, 15 bp, Homo sapiens
gcacatgccaccgta

SEQ ID NO: 1209186 - DNA, 15 bp, Homo sapiens
ggcacatgccaccgt

SEQ ID NO: 1209187 - DNA, 15 bp, Homo sapiens
aggcacatgccaccg

SEQ ID NO: 1209188 - DNA, 15 bp, Homo sapiens
ctacaggcacatgcc

SEQ ID NO: 1209189 - DNA, 15 bp, Homo sapiens
actacaggcacatgc

SEQ ID NO: 1209190 - DNA, 15 bp, Homo sapiens
gactacaggcacatg

SEQ ID NO: 1209191 - DNA, 15 bp, Homo sapiens
ggactacaggcacat

SEQ ID NO: 1209192 - DNA, 15 bp, Homo sapiens
aaagtagctgggact

SEQ ID NO: 1209193 - DNA, 15 bp, Homo sapiens
caaagtagctgggac

SEQ ID NO: 1209194 - DNA, 15 bp, Homo sapiens
ccaaagtagctggga

SEQ ID NO: 1209195 - DNA, 15 bp, Homo sapiens
tccaaagtagctggg

SEQ ID NO: 1209196 - DNA, 15 bp, Homo sapiens
ttccaaagtagctgg

SEQ ID NO: 1209197 - DNA, 15 bp, Homo sapiens
gttccaaagtagctg

SEQ ID NO: 1209198 - DNA, 15 bp, Homo sapiens
ggttccaaagtagct

SEQ ID NO: 1209199 - DNA, 15 bp, Homo sapiens
aggttccaaagtagc

SEQ ID NO: 1209200 - DNA, 15 bp, Homo sapiens
caggttccaaagtag

SEQ ID NO: 1209201 - DNA, 15 bp, Homo sapiens
tcaggttccaaagta

SEQ ID NO: 1209202 - DNA, 15 bp, Homo sapiens
ctcaggttccaaagt

SEQ ID NO: 1209203 - DNA, 15 bp, Homo sapiens
cctcaggttccaaag

SEQ ID NO: 1209204 - DNA, 15 bp, Homo sapiens
gcctcaggttccaaa

SEQ ID NO: 1209205 - DNA, 15 bp, Homo sapiens
tgcctcaggttccaa

SEQ ID NO: 1209206 - DNA, 15 bp, Homo sapiens
ctgcctcaggttcca

SEQ ID NO: 1209207 - DNA, 15 bp, Homo sapiens
cctgcctcaggttcc

SEQ ID NO: 1209208 - DNA, 15 bp, Homo sapiens
tcctgcctcaggttc

SEQ ID NO: 1209209 - DNA, 15 bp, Homo sapiens
ctcctgcctcaggtt

SEQ ID NO: 1209210 - DNA, 15 bp, Homo sapiens
tctcctgcctcaggt

SEQ ID NO: 1209211 - DNA, 15 bp, Homo sapiens
ttctcctgcctcagg

SEQ ID NO: 1209212 - DNA, 15 bp, Homo sapiens
tcccgagttcaagcg

SEQ ID NO: 1209213 - DNA, 15 bp, Homo sapiens
ctcccgagttcaagc

SEQ ID NO: 1209214 - DNA, 15 bp, Homo sapiens
cctcccgagttcaag

SEQ ID NO: 1209215 - DNA, 15 bp, Homo sapiens
gcctcccgagttcaa

SEQ ID NO: 1209216 - DNA, 15 bp, Homo sapiens
tgcctcccgagttca

SEQ ID NO: 1209217 - DNA, 15 bp, Homo sapiens
ctgcctcccgagttc

SEQ ID NO: 1209218 - DNA, 15 bp, Homo sapiens
tctgcctcccgagtt

SEQ ID NO: 1209219 - DNA, 15 bp, Homo sapiens
ctctgcctcccgagt

SEQ ID NO: 1209220 - DNA, 15 bp, Homo sapiens
cctctgcctcccgag

SEQ ID NO: 1209221 - DNA, 15 bp, Homo sapiens
cacagtctcggctca

SEQ ID NO: 1209222 - DNA, 15 bp, Homo sapiens
gcacagtctcggctc

SEQ ID NO: 1209223 - DNA, 15 bp, Homo sapiens
ggcacagtctcggct

SEQ ID NO: 1209224 - DNA, 15 bp, Homo sapiens
tggcacagtctcggc

SEQ ID NO: 1209225 - DNA, 15 bp, Homo sapiens
atggcacagtctcgg

SEQ ID NO: 1209226 - DNA, 15 bp, Homo sapiens
aatggcacagtctcg

SEQ ID NO: 1209227 - DNA, 15 bp, Homo sapiens
caatggcacagtctc

SEQ ID NO: 1209228 - DNA, 15 bp, Homo sapiens
gcaatggcacagtct

SEQ ID NO: 1209229 - DNA, 15 bp, Homo sapiens
tgcaatggcacagtc

SEQ ID NO: 1209230 - DNA, 15 bp, Homo sapiens
gtgcaatggcacagt

SEQ ID NO: 1209231 - DNA, 15 bp, Homo sapiens
agtgcaatggcacag

SEQ ID NO: 1209232 - DNA, 15 bp, Homo sapiens
cagtgcaatggcaca

SEQ ID NO: 1209233 - DNA, 15 bp, Homo sapiens
gcagtgcaatggcac

SEQ ID NO: 1209234 - DNA, 15 bp, Homo sapiens
ctgttctgtcaccca

SEQ ID NO: 1209235 - DNA, 15 bp, Homo sapiens
cctgttctgtcaccc

SEQ ID NO: 1209236 - DNA, 15 bp, Homo sapiens
tcctgttctgtcacc

SEQ ID NO: 1209237 - DNA, 15 bp, Homo sapiens
gtcctgttctgtcac

SEQ ID NO: 1209238 - DNA, 15 bp, Homo sapiens
agtcctgttctgtca

SEQ ID NO: 1209239 - DNA, 15 bp, Homo sapiens
gagtcctgttctgtc

SEQ ID NO: 1209240 - DNA, 15 bp, Homo sapiens
ggagtcctgttctgt

SEQ ID NO: 1209241 - DNA, 15 bp, Homo sapiens
cggagtcctgttctg

SEQ ID NO: 1209242 - DNA, 15 bp, Homo sapiens
acggagtcctgttct

SEQ ID NO: 1209243 - DNA, 15 bp, Homo sapiens
gacggagtcctgttc

SEQ ID NO: 1209244 - DNA, 15 bp, Homo sapiens
agacggagtcctgtt

SEQ ID NO: 1209245 - DNA, 15 bp, Homo sapiens
gagacggagtcctgt

SEQ ID NO: 1209246 - DNA, 15 bp, Homo sapiens
tgagacggagtcctg

SEQ ID NO: 1209247 - DNA, 15 bp, Homo sapiens
ttgagacggagtcct

SEQ ID NO: 1209248 - DNA, 15 bp, Homo sapiens
tttgagacggagtcc

SEQ ID NO: 1209249 - DNA, 15 bp, Homo sapiens
gtttttttttgagac

SEQ ID NO: 1209250 - DNA, 15 bp, Homo sapiens
tgtttttttttgaga

SEQ ID NO: 1209251 - DNA, 15 bp, Homo sapiens
ttgtttttttttgag

SEQ ID NO: 1209252 - DNA, 15 bp, Homo sapiens
tttgtttttttttga

SEQ ID NO: 1209253 - DNA, 15 bp, Homo sapiens
ttttgtttttttttg

SEQ ID NO: 1209254 - DNA, 15 bp, Homo sapiens
accttttttgttttt

SEQ ID NO: 1209255 - DNA, 15 bp, Homo sapiens
gaccttttttgtttt

SEQ ID NO: 1209256 - DNA, 15 bp, Homo sapiens
tgaccttttttgttt

SEQ ID NO: 1209257 - DNA, 15 bp, Homo sapiens
ctgaccttttttgtt

SEQ ID NO: 1209258 - DNA, 15 bp, Homo sapiens
gctgaccttttttgt

SEQ ID NO: 1209259 - DNA, 15 bp, Homo sapiens
tgctgaccttttttg

SEQ ID NO: 1209260 - DNA, 15 bp, Homo sapiens
ctgctgacctttttt

SEQ ID NO: 1209261 - DNA, 15 bp, Homo sapiens
actgctgaccttttt

SEQ ID NO: 1209262 - DNA, 15 bp, Homo sapiens
gactgctgacctttt

SEQ ID NO: 1209263 - DNA, 15 bp, Homo sapiens
agactgctgaccttt

SEQ ID NO: 1209264 - DNA, 15 bp, Homo sapiens
aagactgctgacctt

SEQ ID NO: 1209265 - DNA, 15 bp, Homo sapiens
taagactgctgacct

SEQ ID NO: 1209266 - DNA, 15 bp, Homo sapiens
ttaagactgctgacc

SEQ ID NO: 1209267 - DNA, 15 bp, Homo sapiens
attaagactgctgac

SEQ ID NO: 1209268 - DNA, 15 bp, Homo sapiens
aattaagactgctga

SEQ ID NO: 1209269 - DNA, 15 bp, Homo sapiens
caattaagactgctg

SEQ ID NO: 1209270 - DNA, 15 bp, Homo sapiens
acaattaagactgct

SEQ ID NO: 1209271 - DNA, 15 bp, Homo sapiens
gacaattaagactgc

SEQ ID NO: 1209272 - DNA, 15 bp, Homo sapiens
tgacaattaagactg

SEQ ID NO: 1209273 - DNA, 15 bp, Homo sapiens
ctgacaattaagact

SEQ ID NO: 1209274 - DNA, 15 bp, Homo sapiens
tctgacaattaagac

SEQ ID NO: 1209275 - DNA, 15 bp, Homo sapiens
ctctgacaattaaga

SEQ ID NO: 1209276 - DNA, 15 bp, Homo sapiens
cctctgacaattaag

SEQ ID NO: 1209277 - DNA, 15 bp, Homo sapiens
ccctctgacaattaa

SEQ ID NO: 1209278 - DNA, 15 bp, Homo sapiens
gccctctgacaatta

SEQ ID NO: 1209279 - DNA, 15 bp, Homo sapiens
tgccctctgacaatt

SEQ ID NO: 1209280 - DNA, 15 bp, Homo sapiens
ctgccctctgacaat

SEQ ID NO: 1209281 - DNA, 15 bp, Homo sapiens
cctgccctctgacaa

SEQ ID NO: 1209282 - DNA, 15 bp, Homo sapiens
ccctgccctctgaca

SEQ ID NO: 1209283 - DNA, 15 bp, Homo sapiens
cccctgccctctgac

SEQ ID NO: 1209284 - DNA, 15 bp, Homo sapiens
tcccctgccctctga

SEQ ID NO: 1209285 - DNA, 15 bp, Homo sapiens
gtcccctgccctctg

SEQ ID NO: 1209286 - DNA, 15 bp, Homo sapiens
ggtcccctgccctct

SEQ ID NO: 1209287 - DNA, 15 bp, Homo sapiens
aggtcccctgccctc

SEQ ID NO: 1209288 - DNA, 15 bp, Homo sapiens
caggtcccctgccct

SEQ ID NO: 1209289 - DNA, 15 bp, Homo sapiens
gcaggtcccctgccc

SEQ ID NO: 1209290 - DNA, 15 bp, Homo sapiens
tgcaggtcccctgcc

SEQ ID NO: 1209291 - DNA, 15 bp, Homo sapiens
atgcaggtcccctgc

SEQ ID NO: 1209292 - DNA, 15 bp, Homo sapiens
catgcaggtcccctg

SEQ ID NO: 1209293 - DNA, 15 bp, Homo sapiens
ccatgcaggtcccct

SEQ ID NO: 1209294 - DNA, 15 bp, Homo sapiens
cccatgcaggtcccc

SEQ ID NO: 1209295 - DNA, 15 bp, Homo sapiens
tcccatgcaggtccc

SEQ ID NO: 1209296 - DNA, 15 bp, Homo sapiens
atcccatgcaggtcc

SEQ ID NO: 1209297 - DNA, 15 bp, Homo sapiens
catcccatgcaggtc

SEQ ID NO: 1209298 - DNA, 15 bp, Homo sapiens
ccatcccatgcaggt

SEQ ID NO: 1209299 - DNA, 15 bp, Homo sapiens
tccatcccatgcagg

SEQ ID NO: 1209300 - DNA, 15 bp, Homo sapiens
ctccatcccatgcag

SEQ ID NO: 1209301 - DNA, 15 bp, Homo sapiens
cctccatcccatgca

SEQ ID NO: 1209302 - DNA, 15 bp, Homo sapiens
acctccatcccatgc

SEQ ID NO: 1209303 - DNA, 15 bp, Homo sapiens
aacctccatcccatg

SEQ ID NO: 1209304 - DNA, 15 bp, Homo sapiens
aaacctccatcccat

SEQ ID NO: 1209305 - DNA, 15 bp, Homo sapiens
aaaacctccatccca

SEQ ID NO: 1209306 - DNA, 15 bp, Homo sapiens
aaaaacctccatccc

SEQ ID NO: 1209307 - DNA, 15 bp, Homo sapiens
gaaaaacctccatcc

SEQ ID NO: 1209308 - DNA, 15 bp, Homo sapiens
ggaaaaacctccatc

SEQ ID NO: 1209309 - DNA, 15 bp, Homo sapiens
tggaaaaacctccat

SEQ ID NO: 1209310 - DNA, 15 bp, Homo sapiens
atggaaaaacctcca

SEQ ID NO: 1209311 - DNA, 15 bp, Homo sapiens
catggaaaaacctcc

SEQ ID NO: 1209312 - DNA, 15 bp, Homo sapiens
acatggaaaaacctc

SEQ ID NO: 1209313 - DNA, 15 bp, Homo sapiens
cacatggaaaaacct

SEQ ID NO: 1209314 - DNA, 15 bp, Homo sapiens
acacatggaaaaacc

SEQ ID NO: 1209315 - DNA, 15 bp, Homo sapiens
gacacatggaaaaac

SEQ ID NO: 1209316 - DNA, 15 bp, Homo sapiens
ggacacatggaaaaa

SEQ ID NO: 1209317 - DNA, 15 bp, Homo sapiens
tggacacatggaaaa

SEQ ID NO: 1209318 - DNA, 15 bp, Homo sapiens
gtggacacatggaaa

SEQ ID NO: 1209319 - DNA, 15 bp, Homo sapiens
ggtggacacatggaa

SEQ ID NO: 1209320 - DNA, 15 bp, Homo sapiens
aggtggacacatgga

SEQ ID NO: 1209321 - DNA, 15 bp, Homo sapiens
aaggtggacacatgg

SEQ ID NO: 1209322 - DNA, 15 bp, Homo sapiens
aaaggtggacacatg

SEQ ID NO: 1209323 - DNA, 15 bp, Homo sapiens
aaaaggtggacacat

SEQ ID NO: 1209324 - DNA, 15 bp, Homo sapiens
caaaaggtggacaca

SEQ ID NO: 1209325 - DNA, 15 bp, Homo sapiens
tcaaaaggtggacac

SEQ ID NO: 1209326 - DNA, 15 bp, Homo sapiens
ctcaaaaggtggaca

SEQ ID NO: 1209327 - DNA, 15 bp, Homo sapiens
gctcaaaaggtggac

SEQ ID NO: 1209328 - DNA, 15 bp, Homo sapiens
ggctcaaaaggtgga

SEQ ID NO: 1209329 - DNA, 15 bp, Homo sapiens
gggctcaaaaggtgg

SEQ ID NO: 1209330 - DNA, 15 bp, Homo sapiens
agggctcaaaaggtg

SEQ ID NO: 1209331 - DNA, 15 bp, Homo sapiens
aagggctcaaaaggt

SEQ ID NO: 1209332 - DNA, 15 bp, Homo sapiens
aaagggctcaaaagg

SEQ ID NO: 1209333 - DNA, 15 bp, Homo sapiens
aaaagggctcaaaag

SEQ ID NO: 1209334 - DNA, 15 bp, Homo sapiens
caaaagggctcaaaa

SEQ ID NO: 1209335 - DNA, 15 bp, Homo sapiens
gcaaaagggctcaaa

SEQ ID NO: 1209336 - DNA, 15 bp, Homo sapiens
agcaaaagggctcaa

SEQ ID NO: 1209337 - DNA, 15 bp, Homo sapiens
aagcaaaagggctca

SEQ ID NO: 1209338 - DNA, 15 bp, Homo sapiens
aaagcaaaagggctc

SEQ ID NO: 1209339 - DNA, 15 bp, Homo sapiens
aaaagcaaaagggct

SEQ ID NO: 1209340 - DNA, 15 bp, Homo sapiens
aaaaagcaaaagggc

SEQ ID NO: 1209341 - DNA, 15 bp, Homo sapiens
aaaaaagcaaaaggg

SEQ ID NO: 1209342 - DNA, 15 bp, Homo sapiens
aaaaaaagcaaaagg

SEQ ID NO: 1209343 - DNA, 15 bp, Homo sapiens
aaaaaaaaagcaaaa

SEQ ID NO: 1209344 - DNA, 15 bp, Homo sapiens
taaaaaaaaaaagca

SEQ ID NO: 1209345 - DNA, 15 bp, Homo sapiens
tttaaaaaaaaaaag

SEQ ID NO: 1209346 - DNA, 15 bp, Homo sapiens
agatttaaaaaaaaa

SEQ ID NO: 1209347 - DNA, 15 bp, Homo sapiens
aagatttaaaaaaaa

SEQ ID NO: 1209348 - DNA, 15 bp, Homo sapiens
aaagatttaaaaaaa

SEQ ID NO: 1209349 - DNA, 15 bp, Homo sapiens
aaaagatttaaaaaa

SEQ ID NO: 1209350 - DNA, 15 bp, Homo sapiens
taaaaagatttaaaa

SEQ ID NO: 1209351 - DNA, 15 bp, Homo sapiens
ataaaaagatttaaa

SEQ ID NO: 1209352 - DNA, 15 bp, Homo sapiens
aataaaaagatttaa

SEQ ID NO: 1209353 - DNA, 15 bp, Homo sapiens
caataaaaagattta

SEQ ID NO: 1209354 - DNA, 15 bp, Homo sapiens
acaataaaaagattt

SEQ ID NO: 1209355 - DNA, 15 bp, Homo sapiens
tacaataaaaagatt

SEQ ID NO: 1209356 - DNA, 15 bp, Homo sapiens
ctacaataaaaagat

SEQ ID NO: 1209357 - DNA, 15 bp, Homo sapiens
gctacaataaaaaga

SEQ ID NO: 1209358 - DNA, 15 bp, Homo sapiens
tgctacaataaaaag

SEQ ID NO: 1209359 - DNA, 15 bp, Homo sapiens
ttgctacaataaaaa

SEQ ID NO: 1209360 - DNA, 15 bp, Homo sapiens
tttgctacaataaaa

SEQ ID NO: 1209361 - DNA, 15 bp, Homo sapiens
ttttgctacaataaa

SEQ ID NO: 1209362 - DNA, 15 bp, Homo sapiens
attttgctacaataa

SEQ ID NO: 1209363 - DNA, 15 bp, Homo sapiens
tattttgctacaata

SEQ ID NO: 1209364 - DNA, 15 bp, Homo sapiens
ctattttgctacaat

SEQ ID NO: 1209365 - DNA, 15 bp, Homo sapiens
tctattttgctacaa

SEQ ID NO: 1209366 - DNA, 15 bp, Homo sapiens
atctattttgctaca

SEQ ID NO: 1209367 - DNA, 15 bp, Homo sapiens
tatctattttgctac

SEQ ID NO: 1209368 - DNA, 15 bp, Homo sapiens
atatctattttgcta

SEQ ID NO: 1209369 - DNA, 15 bp, Homo sapiens
tatatctattttgct

SEQ ID NO: 1209370 - DNA, 15 bp, Homo sapiens
ttatatctattttgc

SEQ ID NO: 1209371 - DNA, 15 bp, Homo sapiens
tttatatctattttg

SEQ ID NO: 1209372 - DNA, 15 bp, Homo sapiens
ttttatatctatttt

SEQ ID NO: 1209373 - DNA, 15 bp, Homo sapiens
attttatatctattt

SEQ ID NO: 1209374 - DNA, 15 bp, Homo sapiens
aattttatatctatt

SEQ ID NO: 1209375 - DNA, 15 bp, Homo sapiens
aaattttatatctat

SEQ ID NO: 1209376 - DNA, 15 bp, Homo sapiens
taaattttatatcta

SEQ ID NO: 1209377 - DNA, 15 bp, Homo sapiens
gtaaattttatatct

SEQ ID NO: 1209378 - DNA, 15 bp, Homo sapiens
ggtaaattttatatc

SEQ ID NO: 1209379 - DNA, 15 bp, Homo sapiens
gggtaaattttatat

SEQ ID NO: 1209380 - DNA, 15 bp, Homo sapiens
agggtaaattttata

SEQ ID NO: 1209381 - DNA, 15 bp, Homo sapiens
aagggtaaattttat

SEQ ID NO: 1209382 - DNA, 15 bp, Homo sapiens
aaagggtaaatttta

SEQ ID NO: 1209383 - DNA, 15 bp, Homo sapiens
aaaagggtaaatttt

SEQ ID NO: 1209384 - DNA, 15 bp, Homo sapiens
aaaaagggtaaattt

SEQ ID NO: 1209385 - DNA, 15 bp, Homo sapiens
aaaaaagggtaaatt

SEQ ID NO: 1209386 - DNA, 15 bp, Homo sapiens
aaaaaaagggtaaat

SEQ ID NO: 1209387 - DNA, 15 bp, Homo sapiens
aaaaaaaagggtaaa

SEQ ID NO: 1209388 - DNA, 15 bp, Homo sapiens
aaaaaaaaagggtaa

SEQ ID NO: 1209389 - DNA, 15 bp, Homo sapiens
aaaaaaaaaagggta

SEQ ID NO: 1209390 - DNA, 15 bp, Homo sapiens
aaaaaaaaaaagggt

SEQ ID NO: 1209391 - DNA, 15 bp, Homo sapiens
caaaaaaaaaaaggg

SEQ ID NO: 1209392 - DNA, 15 bp, Homo sapiens
tcaaaaaaaaaaagg

SEQ ID NO: 1209393 - DNA, 15 bp, Homo sapiens
ctcaaaaaaaaaaag

SEQ ID NO: 1209394 - DNA, 15 bp, Homo sapiens
ctccaacctgggcaa

SEQ ID NO: 1209395 - DNA, 15 bp, Homo sapiens
actccaacctgggca

SEQ ID NO: 1209396 - DNA, 15 bp, Homo sapiens
gagccaagatcatgc

SEQ ID NO: 1209397 - DNA, 15 bp, Homo sapiens
tgagccaagatcatg

SEQ ID NO: 1209398 - DNA, 15 bp, Homo sapiens
gtgagccaagatcat

SEQ ID NO: 1209399 - DNA, 15 bp, Homo sapiens
aaatcgcttgaaccc

SEQ ID NO: 1209400 - DNA, 15 bp, Homo sapiens
gaggcaggaaaatcg

SEQ ID NO: 1209401 - DNA, 15 bp, Homo sapiens
agcacctgtaatccc

SEQ ID NO: 1209402 - DNA, 15 bp, Homo sapiens
aagcacctgtaatcc

SEQ ID NO: 1209403 - DNA, 15 bp, Homo sapiens
caagcacctgtaatc

SEQ ID NO: 1209404 - DNA, 15 bp, Homo sapiens
gcaagcacctgtaat

SEQ ID NO: 1209405 - DNA, 15 bp, Homo sapiens
ggcaagcacctgtaa

SEQ ID NO: 1209406 - DNA, 15 bp, Homo sapiens
tggcaagcacctgta

SEQ ID NO: 1209407 - DNA, 15 bp, Homo sapiens
gtggcaagcacctgt

SEQ ID NO: 1209408 - DNA, 15 bp, Homo sapiens
ggtggcaagcacctg

SEQ ID NO: 1209409 - DNA, 15 bp, Homo sapiens
tggtggcaagcacct

SEQ ID NO: 1209410 - DNA, 15 bp, Homo sapiens
atggtggcaagcacc

SEQ ID NO: 1209411 - DNA, 15 bp, Homo sapiens
tatggtggcaagcac

SEQ ID NO: 1209412 - DNA, 15 bp, Homo sapiens
gtatggtggcaagca

SEQ ID NO: 1209413 - DNA, 15 bp, Homo sapiens
ggtatggtggcaagc

SEQ ID NO: 1209414 - DNA, 15 bp, Homo sapiens
gggtatggtggcaag

SEQ ID NO: 1209415 - DNA, 15 bp, Homo sapiens
cgggtatggtggcaa

SEQ ID NO: 1209416 - DNA, 15 bp, Homo sapiens
ccgggtatggtggca

SEQ ID NO: 1209417 - DNA, 15 bp, Homo sapiens
gccgggtatggtggc

SEQ ID NO: 1209418 - DNA, 15 bp, Homo sapiens
agccgggtatggtgg

SEQ ID NO: 1209419 - DNA, 15 bp, Homo sapiens
tagccgggtatggtg

SEQ ID NO: 1209420 - DNA, 15 bp, Homo sapiens
ttagccgggtatggt

SEQ ID NO: 1209421 - DNA, 15 bp, Homo sapiens
attagccgggtatgg

SEQ ID NO: 1209422 - DNA, 15 bp, Homo sapiens
aattagccgggtatg

SEQ ID NO: 1209423 - DNA, 15 bp, Homo sapiens
aaattagccgggtat

SEQ ID NO: 1209424 - DNA, 15 bp, Homo sapiens
aaaattagccgggta

SEQ ID NO: 1209425 - DNA, 15 bp, Homo sapiens
caaaattagccgggt

SEQ ID NO: 1209426 - DNA, 15 bp, Homo sapiens
taaccccgtctctac

SEQ ID NO: 1209427 - DNA, 15 bp, Homo sapiens
gtaaccccgtctcta

SEQ ID NO: 1209428 - DNA, 15 bp, Homo sapiens
cgtaaccccgtctct

SEQ ID NO: 1209429 - DNA, 15 bp, Homo sapiens
gcgtaaccccgtctc

SEQ ID NO: 1209430 - DNA, 15 bp, Homo sapiens
ggcgtaaccccgtct

SEQ ID NO: 1209431 - DNA, 15 bp, Homo sapiens
tggcgtaaccccgtc

SEQ ID NO: 1209432 - DNA, 15 bp, Homo sapiens
ttggcgtaaccccgt

SEQ ID NO: 1209433 - DNA, 15 bp, Homo sapiens
cttggcgtaaccccg

SEQ ID NO: 1209434 - DNA, 15 bp, Homo sapiens
acttggcgtaacccc

SEQ ID NO: 1209435 - DNA, 15 bp, Homo sapiens
aacttggcgtaaccc

SEQ ID NO: 1209436 - DNA, 15 bp, Homo sapiens
caacttggcgtaacc

SEQ ID NO: 1209437 - DNA, 15 bp, Homo sapiens
ccaacttggcgtaac

SEQ ID NO: 1209438 - DNA, 15 bp, Homo sapiens
gccaacttggcgtaa

SEQ ID NO: 1209439 - DNA, 15 bp, Homo sapiens
ggccaacttggcgta

SEQ ID NO: 1209440 - DNA, 15 bp, Homo sapiens
tggccaacttggcgt

SEQ ID NO: 1209441 - DNA, 15 bp, Homo sapiens
ttggccaacttggcg

SEQ ID NO: 1209442 - DNA, 15 bp, Homo sapiens
cttggccaacttggc

SEQ ID NO: 1209443 - DNA, 15 bp, Homo sapiens
gcttggccaacttgg

SEQ ID NO: 1209444 - DNA, 15 bp, Homo sapiens
agcttggccaacttg

SEQ ID NO: 1209445 - DNA, 15 bp, Homo sapiens
cagcttggccaactt

SEQ ID NO: 1209446 - DNA, 15 bp, Homo sapiens
ccagcttggccaact

SEQ ID NO: 1209447 - DNA, 15 bp, Homo sapiens
cgaccagcttggcca

SEQ ID NO: 1209448 - DNA, 15 bp, Homo sapiens
gcgaccagcttggcc

SEQ ID NO: 1209449 - DNA, 15 bp, Homo sapiens
tgcgaccagcttggc

SEQ ID NO: 1209450 - DNA, 15 bp, Homo sapiens
ttgcgaccagcttgg

SEQ ID NO: 1209451 - DNA, 15 bp, Homo sapiens
tttgcgaccagcttg

SEQ ID NO: 1209452 - DNA, 15 bp, Homo sapiens
gtttgcgaccagctt

SEQ ID NO: 1209453 - DNA, 15 bp, Homo sapiens
agtttgcgaccagct

SEQ ID NO: 1209454 - DNA, 15 bp, Homo sapiens
gagtttgcgaccagc

SEQ ID NO: 1209455 - DNA, 15 bp, Homo sapiens
ggagtttgcgaccag

SEQ ID NO: 1209456 - DNA, 15 bp, Homo sapiens
aggagtttgcgacca

SEQ ID NO: 1209457 - DNA, 15 bp, Homo sapiens
caggagtttgcgacc

SEQ ID NO: 1209458 - DNA, 15 bp, Homo sapiens
tcaggagtttgcgac

SEQ ID NO: 1209459 - DNA, 15 bp, Homo sapiens
gtcaggagtttgcga

SEQ ID NO: 1209460 - DNA, 15 bp, Homo sapiens
ggtcaggagtttgcg

SEQ ID NO: 1209461 - DNA, 15 bp, Homo sapiens
aggtcaggagtttgc

SEQ ID NO: 1209462 - DNA, 15 bp, Homo sapiens
ggggcggatcacttg

SEQ ID NO: 1209463 - DNA, 15 bp, Homo sapiens
gggggcggatcactt

SEQ ID NO: 1209464 - DNA, 15 bp, Homo sapiens
ggggggcggatcact

SEQ ID NO: 1209465 - DNA, 15 bp, Homo sapiens
aggggggcggatcac

SEQ ID NO: 1209466 - DNA, 15 bp, Homo sapiens
gaggggggcggatca

SEQ ID NO: 1209467 - DNA, 15 bp, Homo sapiens
cgaggggggcggatc

SEQ ID NO: 1209468 - DNA, 15 bp, Homo sapiens
ccgaggggggcggat

SEQ ID NO: 1209469 - DNA, 15 bp, Homo sapiens
ggccgaggggggcgg

SEQ ID NO: 1209470 - DNA, 15 bp, Homo sapiens
aggccgaggggggcg

SEQ ID NO: 1209471 - DNA, 15 bp, Homo sapiens
gaggccgaggggggc

SEQ ID NO: 1209472 - DNA, 15 bp, Homo sapiens
ggaggccgagggggg

SEQ ID NO: 1209473 - DNA, 15 bp, Homo sapiens
gggaggccgaggggg

SEQ ID NO: 1209474 - DNA, 15 bp, Homo sapiens
tgggaggccgagggg

SEQ ID NO: 1209475 - DNA, 15 bp, Homo sapiens
tcctgcctgtaatcc

SEQ ID NO: 1209476 - DNA, 15 bp, Homo sapiens
ctcctgcctgtaatc

SEQ ID NO: 1209477 - DNA, 15 bp, Homo sapiens
gctcctgcctgtaat

SEQ ID NO: 1209478 - DNA, 15 bp, Homo sapiens
ggctcctgcctgtaa

SEQ ID NO: 1209479 - DNA, 15 bp, Homo sapiens
tggctcctgcctgta

SEQ ID NO: 1209480 - DNA, 15 bp, Homo sapiens
gtggctcctgcctgt

SEQ ID NO: 1209481 - DNA, 15 bp, Homo sapiens
ggtggctcctgcctg

SEQ ID NO: 1209482 - DNA, 15 bp, Homo sapiens
tggtggctcctgcct

SEQ ID NO: 1209483 - DNA, 15 bp, Homo sapiens
gtggtggctcctgcc

SEQ ID NO: 1209484 - DNA, 15 bp, Homo sapiens
cgtggtggctcctgc

SEQ ID NO: 1209485 - DNA, 15 bp, Homo sapiens
gcgtggtggctcctg

SEQ ID NO: 1209486 - DNA, 15 bp, Homo sapiens
agcgtggtggctcct

SEQ ID NO: 1209487 - DNA, 15 bp, Homo sapiens
gagcgtggtggctcc

SEQ ID NO: 1209488 - DNA, 15 bp, Homo sapiens
tgagcgtggtggctc

SEQ ID NO: 1209489 - DNA, 15 bp, Homo sapiens
ctgagcgtggtggct

SEQ ID NO: 1209490 - DNA, 15 bp, Homo sapiens
gctgagcgtggtggc

SEQ ID NO: 1209491 - DNA, 15 bp, Homo sapiens
ggctgagcgtggtgg

SEQ ID NO: 1209492 - DNA, 15 bp, Homo sapiens
gggctgagcgtggtg

SEQ ID NO: 1209493 - DNA, 15 bp, Homo sapiens
agggctgagcgtggt

SEQ ID NO: 1209494 - DNA, 15 bp, Homo sapiens
tagggctgagcgtgg

SEQ ID NO: 1209495 - DNA, 15 bp, Homo sapiens
ttagggctgagcgtg

SEQ ID NO: 1209496 - DNA, 15 bp, Homo sapiens
tttagggctgagcgt

SEQ ID NO: 1209497 - DNA, 15 bp, Homo sapiens
ttttagggctgagcg

SEQ ID NO: 1209498 - DNA, 15 bp, Homo sapiens
attttagggctgagc

SEQ ID NO: 1209499 - DNA, 15 bp, Homo sapiens
aattttagggctgag

SEQ ID NO: 1209500 - DNA, 15 bp, Homo sapiens
aaattttagggctga

SEQ ID NO: 1209501 - DNA, 15 bp, Homo sapiens
taaattttagggctg

SEQ ID NO: 1209502 - DNA, 15 bp, Homo sapiens
gtaaattttagggct

SEQ ID NO: 1209503 - DNA, 15 bp, Homo sapiens
ggtaaattttagggc

SEQ ID NO: 1209504 - DNA, 15 bp, Homo sapiens
tggtaaattttaggg

SEQ ID NO: 1209505 - DNA, 15 bp, Homo sapiens
atggtaaattttagg

SEQ ID NO: 1209506 - DNA, 15 bp, Homo sapiens
tatggtaaattttag

SEQ ID NO: 1209507 - DNA, 15 bp, Homo sapiens
atatggtaaatttta

SEQ ID NO: 1209508 - DNA, 15 bp, Homo sapiens
aatatggtaaatttt

SEQ ID NO: 1209509 - DNA, 15 bp, Homo sapiens
taatatggtaaattt

SEQ ID NO: 1209510 - DNA, 15 bp, Homo sapiens
ttaatatggtaaatt

SEQ ID NO: 1209511 - DNA, 15 bp, Homo sapiens
gttaatatggtaaat

SEQ ID NO: 1209512 - DNA, 15 bp, Homo sapiens
ggttaatatggtaaa

SEQ ID NO: 1209513 - DNA, 15 bp, Homo sapiens
tggttaatatggtaa

SEQ ID NO: 1209514 - DNA, 15 bp, Homo sapiens
atggttaatatggta

SEQ ID NO: 1209515 - DNA, 15 bp, Homo sapiens
aatggttaatatggt

SEQ ID NO: 1209516 - DNA, 15 bp, Homo sapiens
aaatggttaatatgg

SEQ ID NO: 1209517 - DNA, 15 bp, Homo sapiens
aaaatggttaatatg

SEQ ID NO: 1209518 - DNA, 15 bp, Homo sapiens
gaaaatggttaatat

SEQ ID NO: 1209519 - DNA, 15 bp, Homo sapiens
tgaaaatggttaata

SEQ ID NO: 1209520 - DNA, 15 bp, Homo sapiens
ttgaaaatggttaat

SEQ ID NO: 1209521 - DNA, 15 bp, Homo sapiens
cttgaaaatggttaa

SEQ ID NO: 1209522 - DNA, 15 bp, Homo sapiens
acttgaaaatggtta

SEQ ID NO: 1209523 - DNA, 15 bp, Homo sapiens
aacttgaaaatggtt

SEQ ID NO: 1209524 - DNA, 15 bp, Homo sapiens
gaacttgaaaatggt

SEQ ID NO: 1209525 - DNA, 15 bp, Homo sapiens
tgaacttgaaaatgg

SEQ ID NO: 1209526 - DNA, 15 bp, Homo sapiens
ctgaacttgaaaatg

SEQ ID NO: 1209527 - DNA, 15 bp, Homo sapiens
tctgaacttgaaaat

SEQ ID NO: 1209528 - DNA, 15 bp, Homo sapiens
ctctgaacttgaaaa

SEQ ID NO: 1209529 - DNA, 15 bp, Homo sapiens
cctctgaacttgaaa

SEQ ID NO: 1209530 - DNA, 15 bp, Homo sapiens
gcctctgaacttgaa

SEQ ID NO: 1209531 - DNA, 15 bp, Homo sapiens
tgcctctgaacttga

SEQ ID NO: 1209532 - DNA, 15 bp, Homo sapiens
atgcctctgaacttg

SEQ ID NO: 1209533 - DNA, 15 bp, Homo sapiens
aatgcctctgaactt

SEQ ID NO: 1209534 - DNA, 15 bp, Homo sapiens
taatgcctctgaact

SEQ ID NO: 1209535 - DNA, 15 bp, Homo sapiens
ttaatgcctctgaac

SEQ ID NO: 1209536 - DNA, 15 bp, Homo sapiens
tttaatgcctctgaa

SEQ ID NO: 1209537 - DNA, 15 bp, Homo sapiens
ctttaatgcctctga

SEQ ID NO: 1209538 - DNA, 15 bp, Homo sapiens
actttaatgcctctg

SEQ ID NO: 1209539 - DNA, 15 bp, Homo sapiens
tactttaatgcctct

SEQ ID NO: 1209540 - DNA, 15 bp, Homo sapiens
atactttaatgcctc

SEQ ID NO: 1209541 - DNA, 15 bp, Homo sapiens
tatactttaatgcct

SEQ ID NO: 1209542 - DNA, 15 bp, Homo sapiens
gtatactttaatgcc

SEQ ID NO: 1209543 - DNA, 15 bp, Homo sapiens
agtatactttaatgc

SEQ ID NO: 1209544 - DNA, 15 bp, Homo sapiens
gagtatactttaatg

SEQ ID NO: 1209545 - DNA, 15 bp, Homo sapiens
tgagtatactttaat

SEQ ID NO: 1209546 - DNA, 15 bp, Homo sapiens
gtgagtatactttaa

SEQ ID NO: 1209547 - DNA, 15 bp, Homo sapiens
tgtgagtatacttta

SEQ ID NO: 1209548 - DNA, 15 bp, Homo sapiens
atgtgagtatacttt

SEQ ID NO: 1209549 - DNA, 15 bp, Homo sapiens
aatgtgagtatactt

SEQ ID NO: 1209550 - DNA, 15 bp, Homo sapiens
caatgtgagtatact

SEQ ID NO: 1209551 - DNA, 15 bp, Homo sapiens
acaatgtgagtatac

SEQ ID NO: 1209552 - DNA, 15 bp, Homo sapiens
aacaatgtgagtata

SEQ ID NO: 1209553 - DNA, 15 bp, Homo sapiens
caacaatgtgagtat

SEQ ID NO: 1209554 - DNA, 15 bp, Homo sapiens
acaacaatgtgagta

SEQ ID NO: 1209555 - DNA, 15 bp, Homo sapiens
aacaacaatgtgagt

SEQ ID NO: 1209556 - DNA, 15 bp, Homo sapiens
gaacaacaatgtgag

SEQ ID NO: 1209557 - DNA, 15 bp, Homo sapiens
tgaacaacaatgtga

SEQ ID NO: 1209558 - DNA, 15 bp, Homo sapiens
ttgaacaacaatgtg

SEQ ID NO: 1209559 - DNA, 15 bp, Homo sapiens
gttgaacaacaatgt

SEQ ID NO: 1209560 - DNA, 15 bp, Homo sapiens
agttgaacaacaatg

SEQ ID NO: 1209561 - DNA, 15 bp, Homo sapiens
cagttgaacaacaat

SEQ ID NO: 1209562 - DNA, 15 bp, Homo sapiens
acagttgaacaacaa

SEQ ID NO: 1209563 - DNA, 15 bp, Homo sapiens
gacagttgaacaaca

SEQ ID NO: 1209564 - DNA, 15 bp, Homo sapiens
tgacagttgaacaac

SEQ ID NO: 1209565 - DNA, 15 bp, Homo sapiens
gtgacagttgaacaa

SEQ ID NO: 1209566 - DNA, 15 bp, Homo sapiens
ggtgacagttgaaca

SEQ ID NO: 1209567 - DNA, 15 bp, Homo sapiens
tggtgacagttgaac

SEQ ID NO: 1209568 - DNA, 15 bp, Homo sapiens
gtggtgacagttgaa

SEQ ID NO: 1209569 - DNA, 15 bp, Homo sapiens
agtggtgacagttga

SEQ ID NO: 1209570 - DNA, 15 bp, Homo sapiens
tagtggtgacagttg

SEQ ID NO: 1209571 - DNA, 15 bp, Homo sapiens
gtagtggtgacagtt

SEQ ID NO: 1209572 - DNA, 15 bp, Homo sapiens
agtagtggtgacagt

SEQ ID NO: 1209573 - DNA, 15 bp, Homo sapiens
gagtagtggtgacag

SEQ ID NO: 1209574 - DNA, 15 bp, Homo sapiens
tgagtagtggtgaca

SEQ ID NO: 1209575 - DNA, 15 bp, Homo sapiens
gtgagtagtggtgac

SEQ ID NO: 1209576 - DNA, 15 bp, Homo sapiens
ggtgagtagtggtga

SEQ ID NO: 1209577 - DNA, 15 bp, Homo sapiens
aggtgagtagtggtg

SEQ ID NO: 1209578 - DNA, 15 bp, Homo sapiens
caggtgagtagtggt

SEQ ID NO: 1209579 - DNA, 15 bp, Homo sapiens
gcaggtgagtagtgg

SEQ ID NO: 1209580 - DNA, 15 bp, Homo sapiens
tgcaggtgagtagtg

SEQ ID NO: 1209581 - DNA, 15 bp, Homo sapiens
ctgcaggtgagtagt

SEQ ID NO: 1209582 - DNA, 15 bp, Homo sapiens
tctgcaggtgagtag

SEQ ID NO: 1209583 - DNA, 15 bp, Homo sapiens
ttctgcaggtgagta

SEQ ID NO: 1209584 - DNA, 15 bp, Homo sapiens
cttctgcaggtgagt

SEQ ID NO: 1209585 - DNA, 15 bp, Homo sapiens
acttctgcaggtgag

SEQ ID NO: 1209586 - DNA, 15 bp, Homo sapiens
aacttctgcaggtga

SEQ ID NO: 1209587 - DNA, 15 bp, Homo sapiens
aaacttctgcaggtg

SEQ ID NO: 1209588 - DNA, 15 bp, Homo sapiens
aaaacttctgcaggt

SEQ ID NO: 1209589 - DNA, 15 bp, Homo sapiens
aaaaacttctgcagg

SEQ ID NO: 1209590 - DNA, 15 bp, Homo sapiens
gaaaaacttctgcag

SEQ ID NO: 1209591 - DNA, 15 bp, Homo sapiens
tgaaaaacttctgca

SEQ ID NO: 1209592 - DNA, 15 bp, Homo sapiens
atgaaaaacttctgc

SEQ ID NO: 1209593 - DNA, 15 bp, Homo sapiens
gatgaaaaacttctg

SEQ ID NO: 1209594 - DNA, 15 bp, Homo sapiens
agatgaaaaacttct

SEQ ID NO: 1209595 - DNA, 15 bp, Homo sapiens
aagatgaaaaacttc

SEQ ID NO: 1209596 - DNA, 15 bp, Homo sapiens
caagatgaaaaactt

SEQ ID NO: 1209597 - DNA, 15 bp, Homo sapiens
gcaagatgaaaaact

SEQ ID NO: 1209598 - DNA, 15 bp, Homo sapiens
tgcaagatgaaaaac

SEQ ID NO: 1209599 - DNA, 15 bp, Homo sapiens
ttgcaagatgaaaaa

SEQ ID NO: 1209600 - DNA, 15 bp, Homo sapiens
tttgcaagatgaaaa

SEQ ID NO: 1209601 - DNA, 15 bp, Homo sapiens
cactttgcaagatga

SEQ ID NO: 1209602 - DNA, 15 bp, Homo sapiens
tcactttgcaagatg

SEQ ID NO: 1209603 - DNA, 15 bp, Homo sapiens
ttcactttgcaagat

SEQ ID NO: 1209604 - DNA, 15 bp, Homo sapiens
tttcactttgcaaga

SEQ ID NO: 1209605 - DNA, 15 bp, Homo sapiens
ttttcactttgcaag

SEQ ID NO: 1209606 - DNA, 15 bp, Homo sapiens
gttttcactttgcaa

SEQ ID NO: 1209607 - DNA, 15 bp, Homo sapiens
ggttttcactttgca

SEQ ID NO: 1209608 - DNA, 15 bp, Homo sapiens
gggttttcactttgc

SEQ ID NO: 1209609 - DNA, 15 bp, Homo sapiens
ggggttttcactttg

SEQ ID NO: 1209610 - DNA, 15 bp, Homo sapiens
tggggttttcacttt

SEQ ID NO: 1209611 - DNA, 15 bp, Homo sapiens
atggggttttcactt

SEQ ID NO: 1209612 - DNA, 15 bp, Homo sapiens
tatggggttttcact

SEQ ID NO: 1209613 - DNA, 15 bp, Homo sapiens
gtatggggttttcac

SEQ ID NO: 1209614 - DNA, 15 bp, Homo sapiens
ggtatggggttttca

SEQ ID NO: 1209615 - DNA, 15 bp, Homo sapiens
gggtatggggttttc

SEQ ID NO: 1209616 - DNA, 15 bp, Homo sapiens
tgggtatggggtttt

SEQ ID NO: 1209617 - DNA, 15 bp, Homo sapiens
ttgggtatggggttt

SEQ ID NO: 1209618 - DNA, 15 bp, Homo sapiens
attgggtatggggtt

SEQ ID NO: 1209619 - DNA, 15 bp, Homo sapiens
aattgggtatggggt

SEQ ID NO: 1209620 - DNA, 15 bp, Homo sapiens
aaattgggtatgggg

SEQ ID NO: 1209621 - DNA, 15 bp, Homo sapiens
gaaattgggtatggg

SEQ ID NO: 1209622 - DNA, 15 bp, Homo sapiens
ggaaattgggtatgg

SEQ ID NO: 1209623 - DNA, 15 bp, Homo sapiens
gggaaattgggtatg

SEQ ID NO: 1209624 - DNA, 15 bp, Homo sapiens
cgggaaattgggtat

SEQ ID NO: 1209625 - DNA, 15 bp, Homo sapiens
acgggaaattgggta

SEQ ID NO: 1209626 - DNA, 15 bp, Homo sapiens
aacgggaaattgggt

SEQ ID NO: 1209627 - DNA, 15 bp, Homo sapiens
gaacgggaaattggg

SEQ ID NO: 1209628 - DNA, 15 bp, Homo sapiens
agaacgggaaattgg

SEQ ID NO: 1209629 - DNA, 15 bp, Homo sapiens
aagaacgggaaattg

SEQ ID NO: 1209630 - DNA, 15 bp, Homo sapiens
gaagaacgggaaatt

SEQ ID NO: 1209631 - DNA, 15 bp, Homo sapiens
ggaagaacgggaaat

SEQ ID NO: 1209632 - DNA, 15 bp, Homo sapiens
aggaagaacgggaaa

SEQ ID NO: 1209633 - DNA, 15 bp, Homo sapiens
gaggaagaacgggaa

SEQ ID NO: 1209634 - DNA, 15 bp, Homo sapiens
agaggaagaacggga

SEQ ID NO: 1209635 - DNA, 15 bp, Homo sapiens
gagaggaagaacggg

SEQ ID NO: 1209636 - DNA, 15 bp, Homo sapiens
tgagaggaagaacgg

SEQ ID NO: 1209637 - DNA, 15 bp, Homo sapiens
ctgagaggaagaacg

SEQ ID NO: 1209638 - DNA, 15 bp, Homo sapiens
gctgagaggaagaac

SEQ ID NO: 1209639 - DNA, 15 bp, Homo sapiens
ggctgagaggaagaa

SEQ ID NO: 1209640 - DNA, 15 bp, Homo sapiens
gggctgagaggaaga

SEQ ID NO: 1209641 - DNA, 15 bp, Homo sapiens
ggggctgagaggaag

SEQ ID NO: 1209642 - DNA, 15 bp, Homo sapiens
aggggctgagaggaa

SEQ ID NO: 1209643 - DNA, 15 bp, Homo sapiens
caggggctgagagga

SEQ ID NO: 1209644 - DNA, 15 bp, Homo sapiens
ccaggggctgagagg

SEQ ID NO: 1209645 - DNA, 15 bp, Homo sapiens
accaggggctgagag

SEQ ID NO: 1209646 - DNA, 15 bp, Homo sapiens
taccaggggctgaga

SEQ ID NO: 1209647 - DNA, 15 bp, Homo sapiens
ttaccaggggctgag

SEQ ID NO: 1209648 - DNA, 15 bp, Homo sapiens
attaccaggggctga

SEQ ID NO: 1209649 - DNA, 15 bp, Homo sapiens
gattaccaggggctg

SEQ ID NO: 1209650 - DNA, 15 bp, Homo sapiens
tgattaccaggggct

SEQ ID NO: 1209651 - DNA, 15 bp, Homo sapiens
gtgattaccaggggc

SEQ ID NO: 1209652 - DNA, 15 bp, Homo sapiens
agtgattaccagggg

SEQ ID NO: 1209653 - DNA, 15 bp, Homo sapiens
tagtgattaccaggg

SEQ ID NO: 1209654 - DNA, 15 bp, Homo sapiens
atagtgattaccagg

SEQ ID NO: 1209655 - DNA, 15 bp, Homo sapiens
aatagtgattaccag

SEQ ID NO: 1209656 - DNA, 15 bp, Homo sapiens
gaatagtgattacca

SEQ ID NO: 1209657 - DNA, 15 bp, Homo sapiens
agaatagtgattacc

SEQ ID NO: 1209658 - DNA, 15 bp, Homo sapiens
tagaatagtgattac

SEQ ID NO: 1209659 - DNA, 15 bp, Homo sapiens
gtagaatagtgatta

SEQ ID NO: 1209660 - DNA, 15 bp, Homo sapiens
agtagaatagtgatt

SEQ ID NO: 1209661 - DNA, 15 bp, Homo sapiens
aagtagaatagtgat

SEQ ID NO: 1209662 - DNA, 15 bp, Homo sapiens
aaagtagaatagtga

SEQ ID NO: 1209663 - DNA, 15 bp, Homo sapiens
aaaagtagaatagtg

SEQ ID NO: 1209664 - DNA, 15 bp, Homo sapiens
aaaaagtagaatagt

SEQ ID NO: 1209665 - DNA, 15 bp, Homo sapiens
caaaaagtagaatag

SEQ ID NO: 1209666 - DNA, 15 bp, Homo sapiens
acaaaaagtagaata

SEQ ID NO: 1209667 - DNA, 15 bp, Homo sapiens
gacaaaaagtagaat

SEQ ID NO: 1209668 - DNA, 15 bp, Homo sapiens
agacaaaaagtagaa

SEQ ID NO: 1209669 - DNA, 15 bp, Homo sapiens
tagacaaaaagtaga

SEQ ID NO: 1209670 - DNA, 15 bp, Homo sapiens
gtagacaaaaagtag

SEQ ID NO: 1209671 - DNA, 15 bp, Homo sapiens
agtagacaaaaagta

SEQ ID NO: 1209672 - DNA, 15 bp, Homo sapiens
aagtagacaaaaagt

SEQ ID NO: 1209673 - DNA, 15 bp, Homo sapiens
aaagtagacaaaaag

SEQ ID NO: 1209674 - DNA, 15 bp, Homo sapiens
aaaagtagacaaaaa

SEQ ID NO: 1209675 - DNA, 15 bp, Homo sapiens
aaaaagtagacaaaa

SEQ ID NO: 1209676 - DNA, 15 bp, Homo sapiens
caaaaagtagacaaa

SEQ ID NO: 1209677 - DNA, 15 bp, Homo sapiens
acaaaaagtagacaa

SEQ ID NO: 1209678 - DNA, 15 bp, Homo sapiens
tacaaaaagtagaca

SEQ ID NO: 1209679 - DNA, 15 bp, Homo sapiens
atacaaaaagtagac

SEQ ID NO: 1209680 - DNA, 15 bp, Homo sapiens
catacaaaaagtaga

SEQ ID NO: 1209681 - DNA, 15 bp, Homo sapiens
tcatacaaaaagtag

SEQ ID NO: 1209682 - DNA, 15 bp, Homo sapiens
ttcatacaaaaagta

SEQ ID NO: 1209683 - DNA, 15 bp, Homo sapiens
attcatacaaaaagt

SEQ ID NO: 1209684 - DNA, 15 bp, Homo sapiens
aattcatacaaaaag

SEQ ID NO: 1209685 - DNA, 15 bp, Homo sapiens
aaattcatacaaaaa

SEQ ID NO: 1209686 - DNA, 15 bp, Homo sapiens
caaattcatacaaaa

SEQ ID NO: 1209687 - DNA, 15 bp, Homo sapiens
gcaaattcatacaaa

SEQ ID NO: 1209688 - DNA, 15 bp, Homo sapiens
ggcaaattcatacaa

SEQ ID NO: 1209689 - DNA, 15 bp, Homo sapiens
aggcaaattcataca

SEQ ID NO: 1209690 - DNA, 15 bp, Homo sapiens
taggcaaattcatac

SEQ ID NO: 1209691 - DNA, 15 bp, Homo sapiens
ataggcaaattcata

SEQ ID NO: 1209692 - DNA, 15 bp, Homo sapiens
aataggcaaattcat

SEQ ID NO: 1209693 - DNA, 15 bp, Homo sapiens
gaataggcaaattca

SEQ ID NO: 1209694 - DNA, 15 bp, Homo sapiens
agaataggcaaattc

SEQ ID NO: 1209695 - DNA, 15 bp, Homo sapiens
tagaataggcaaatt

SEQ ID NO: 1209696 - DNA, 15 bp, Homo sapiens
ctagaataggcaaat

SEQ ID NO: 1209697 - DNA, 15 bp, Homo sapiens
cctagaataggcaaa

SEQ ID NO: 1209698 - DNA, 15 bp, Homo sapiens
tcctagaataggcaa

SEQ ID NO: 1209699 - DNA, 15 bp, Homo sapiens
gtcctagaataggca

SEQ ID NO: 1209700 - DNA, 15 bp, Homo sapiens
ggtcctagaataggc

SEQ ID NO: 1209701 - DNA, 15 bp, Homo sapiens
aggtcctagaatagg

SEQ ID NO: 1209702 - DNA, 15 bp, Homo sapiens
taggtcctagaatag

SEQ ID NO: 1209703 - DNA, 15 bp, Homo sapiens
ttaggtcctagaata

SEQ ID NO: 1209704 - DNA, 15 bp, Homo sapiens
attaggtcctagaat

SEQ ID NO: 1209705 - DNA, 15 bp, Homo sapiens
tattaggtcctagaa

SEQ ID NO: 1209706 - DNA, 15 bp, Homo sapiens
ctattaggtcctaga

SEQ ID NO: 1209707 - DNA, 15 bp, Homo sapiens
tctattaggtcctag

SEQ ID NO: 1209708 - DNA, 15 bp, Homo sapiens
ttctattaggtccta

SEQ ID NO: 1209709 - DNA, 15 bp, Homo sapiens
cttctattaggtcct

SEQ ID NO: 1209710 - DNA, 15 bp, Homo sapiens
acttctattaggtcc

SEQ ID NO: 1209711 - DNA, 15 bp, Homo sapiens
cacttctattaggtc

SEQ ID NO: 1209712 - DNA, 15 bp, Homo sapiens
ccacttctattaggt

SEQ ID NO: 1209713 - DNA, 15 bp, Homo sapiens
tccacttctattagg

SEQ ID NO: 1209714 - DNA, 15 bp, Homo sapiens
ctccacttctattag

SEQ ID NO: 1209715 - DNA, 15 bp, Homo sapiens
actccacttctatta

SEQ ID NO: 1209716 - DNA, 15 bp, Homo sapiens
gactccacttctatt

SEQ ID NO: 1209717 - DNA, 15 bp, Homo sapiens
tgactccacttctat

SEQ ID NO: 1209718 - DNA, 15 bp, Homo sapiens
ttgactccacttcta

SEQ ID NO: 1209719 - DNA, 15 bp, Homo sapiens
tttgactccacttct

SEQ ID NO: 1209720 - DNA, 15 bp, Homo sapiens
gtttgactccacttc

SEQ ID NO: 1209721 - DNA, 15 bp, Homo sapiens
ggtttgactccactt

SEQ ID NO: 1209722 - DNA, 15 bp, Homo sapiens
aggtttgactccact

SEQ ID NO: 1209723 - DNA, 15 bp, Homo sapiens
caggtttgactccac

SEQ ID NO: 1209724 - DNA, 15 bp, Homo sapiens
acaggtttgactcca

SEQ ID NO: 1209725 - DNA, 15 bp, Homo sapiens
aacaggtttgactcc

SEQ ID NO: 1209726 - DNA, 15 bp, Homo sapiens
aaacaggtttgactc

SEQ ID NO: 1209727 - DNA, 15 bp, Homo sapiens
caaacaggtttgact

SEQ ID NO: 1209728 - DNA, 15 bp, Homo sapiens
acaaacaggtttgac

SEQ ID NO: 1209729 - DNA, 15 bp, Homo sapiens
gacaaacaggtttga

SEQ ID NO: 1209730 - DNA, 15 bp, Homo sapiens
ggacaaacaggtttg

SEQ ID NO: 1209731 - DNA, 15 bp, Homo sapiens
aggacaaacaggttt

SEQ ID NO: 1209732 - DNA, 15 bp, Homo sapiens
aaggacaaacaggtt

SEQ ID NO: 1209733 - DNA, 15 bp, Homo sapiens
aaaggacaaacaggt

SEQ ID NO: 1209734 - DNA, 15 bp, Homo sapiens
aaaaggacaaacagg

SEQ ID NO: 1209735 - DNA, 15 bp, Homo sapiens
caaaaggacaaacag

SEQ ID NO: 1209736 - DNA, 15 bp, Homo sapiens
ccacaaaaggacaaa

SEQ ID NO: 1209737 - DNA, 15 bp, Homo sapiens
gccacaaaaggacaa

SEQ ID NO: 1209738 - DNA, 15 bp, Homo sapiens
agccacaaaaggaca

SEQ ID NO: 1209739 - DNA, 15 bp, Homo sapiens
cagccacaaaaggac

SEQ ID NO: 1209740 - DNA, 15 bp, Homo sapiens
ccagccacaaaagga

SEQ ID NO: 1209741 - DNA, 15 bp, Homo sapiens
gccagccacaaaagg

SEQ ID NO: 1209742 - DNA, 15 bp, Homo sapiens
agccagccacaaaag

SEQ ID NO: 1209743 - DNA, 15 bp, Homo sapiens
aagccagccacaaaa

SEQ ID NO: 1209744 - DNA, 15 bp, Homo sapiens
taagccagccacaaa

SEQ ID NO: 1209745 - DNA, 15 bp, Homo sapiens
ataagccagccacaa

SEQ ID NO: 1209746 - DNA, 15 bp, Homo sapiens
aataagccagccaca

SEQ ID NO: 1209747 - DNA, 15 bp, Homo sapiens
aaataagccagccac

SEQ ID NO: 1209748 - DNA, 15 bp, Homo sapiens
gaaataagccagcca

SEQ ID NO: 1209749 - DNA, 15 bp, Homo sapiens
tgaaataagccagcc

SEQ ID NO: 1209750 - DNA, 15 bp, Homo sapiens
gtgaaataagccagc

SEQ ID NO: 1209751 - DNA, 15 bp, Homo sapiens
ggtgaaataagccag

SEQ ID NO: 1209752 - DNA, 15 bp, Homo sapiens
gggtgaaataagcca

SEQ ID NO: 1209753 - DNA, 15 bp, Homo sapiens
cgggtgaaataagcc

SEQ ID NO: 1209754 - DNA, 15 bp, Homo sapiens
ccgggtgaaataagc

SEQ ID NO: 1209755 - DNA, 15 bp, Homo sapiens
gccgggtgaaataag

SEQ ID NO: 1209756 - DNA, 15 bp, Homo sapiens
ggccgggtgaaataa

SEQ ID NO: 1209757 - DNA, 15 bp, Homo sapiens
aggccgggtgaaata

SEQ ID NO: 1209758 - DNA, 15 bp, Homo sapiens
aaggccgggtgaaat

SEQ ID NO: 1209759 - DNA, 15 bp, Homo sapiens
taaggccgggtgaaa

SEQ ID NO: 1209760 - DNA, 15 bp, Homo sapiens
ataaggccgggtgaa

SEQ ID NO: 1209761 - DNA, 15 bp, Homo sapiens
tataaggccgggtga

SEQ ID NO: 1209762 - DNA, 15 bp, Homo sapiens
atataaggccgggtg

SEQ ID NO: 1209763 - DNA, 15 bp, Homo sapiens
gatataaggccgggt

SEQ ID NO: 1209764 - DNA, 15 bp, Homo sapiens
ggatataaggccggg

SEQ ID NO: 1209765 - DNA, 15 bp, Homo sapiens
aggatataaggccgg

SEQ ID NO: 1209766 - DNA, 15 bp, Homo sapiens
gaggatataaggccg

SEQ ID NO: 1209767 - DNA, 15 bp, Homo sapiens
tgaggatataaggcc

SEQ ID NO: 1209768 - DNA, 15 bp, Homo sapiens
ttgaggatataaggc

SEQ ID NO: 1209769 - DNA, 15 bp, Homo sapiens
cttgaggatataagg

SEQ ID NO: 1209770 - DNA, 15 bp, Homo sapiens
ccttgaggatataag

SEQ ID NO: 1209771 - DNA, 15 bp, Homo sapiens
accttgaggatataa

SEQ ID NO: 1209772 - DNA, 15 bp, Homo sapiens
aaccttgaggatata

SEQ ID NO: 1209773 - DNA, 15 bp, Homo sapiens
aaaccttgaggatat

SEQ ID NO: 1209774 - DNA, 15 bp, Homo sapiens
taaaccttgaggata

SEQ ID NO: 1209775 - DNA, 15 bp, Homo sapiens
ataaaccttgaggat

SEQ ID NO: 1209776 - DNA, 15 bp, Homo sapiens
gataaaccttgagga

SEQ ID NO: 1209777 - DNA, 15 bp, Homo sapiens
ggataaaccttgagg

SEQ ID NO: 1209778 - DNA, 15 bp, Homo sapiens
tggataaaccttgag

SEQ ID NO: 1209779 - DNA, 15 bp, Homo sapiens
atggataaaccttga

SEQ ID NO: 1209780 - DNA, 15 bp, Homo sapiens
catggataaaccttg

SEQ ID NO: 1209781 - DNA, 15 bp, Homo sapiens
acatggataaacctt

SEQ ID NO: 1209782 - DNA, 15 bp, Homo sapiens
aacatggataaacct

SEQ ID NO: 1209783 - DNA, 15 bp, Homo sapiens
caacatggataaacc

SEQ ID NO: 1209784 - DNA, 15 bp, Homo sapiens
ccaacatggataaac

SEQ ID NO: 1209785 - DNA, 15 bp, Homo sapiens
tccaacatggataaa

SEQ ID NO: 1209786 - DNA, 15 bp, Homo sapiens
ctccaacatggataa

SEQ ID NO: 1209787 - DNA, 15 bp, Homo sapiens
cctccaacatggata

SEQ ID NO: 1209788 - DNA, 15 bp, Homo sapiens
tcctccaacatggat

SEQ ID NO: 1209789 - DNA, 15 bp, Homo sapiens
atcctccaacatgga

SEQ ID NO: 1209790 - DNA, 15 bp, Homo sapiens
catcctccaacatgg

SEQ ID NO: 1209791 - DNA, 15 bp, Homo sapiens
gcatcctccaacatg

SEQ ID NO: 1209792 - DNA, 15 bp, Homo sapiens
ggcatcctccaacat

SEQ ID NO: 1209793 - DNA, 15 bp, Homo sapiens
aggcatcctccaaca

SEQ ID NO: 1209794 - DNA, 15 bp, Homo sapiens
caggcatcctccaac

SEQ ID NO: 1209795 - DNA, 15 bp, Homo sapiens
tcaggcatcctccaa

SEQ ID NO: 1209796 - DNA, 15 bp, Homo sapiens
ttcaggcatcctcca

SEQ ID NO: 1209797 - DNA, 15 bp, Homo sapiens
attcaggcatcctcc

SEQ ID NO: 1209798 - DNA, 15 bp, Homo sapiens
aattcaggcatcctc

SEQ ID NO: 1209799 - DNA, 15 bp, Homo sapiens
aaattcaggcatcct

SEQ ID NO: 1209800 - DNA, 15 bp, Homo sapiens
gaaattcaggcatcc

SEQ ID NO: 1209801 - DNA, 15 bp, Homo sapiens
ggaaattcaggcatc

SEQ ID NO: 1209802 - DNA, 15 bp, Homo sapiens
aggaaattcaggcat

SEQ ID NO: 1209803 - DNA, 15 bp, Homo sapiens
aaggaaattcaggca

SEQ ID NO: 1209804 - DNA, 15 bp, Homo sapiens
caaggaaattcaggc

SEQ ID NO: 1209805 - DNA, 15 bp, Homo sapiens
acaaggaaattcagg

SEQ ID NO: 1209806 - DNA, 15 bp, Homo sapiens
aacaaggaaattcag

SEQ ID NO: 1209807 - DNA, 15 bp, Homo sapiens
aaacaaggaaattca

SEQ ID NO: 1209808 - DNA, 15 bp, Homo sapiens
aaaacaaggaaattc

SEQ ID NO: 1209809 - DNA, 15 bp, Homo sapiens
aaaaacaaggaaatt

SEQ ID NO: 1209810 - DNA, 15 bp, Homo sapiens
taaaaacaaggaaat

SEQ ID NO: 1209811 - DNA, 15 bp, Homo sapiens
ttaaaaacaaggaaa

SEQ ID NO: 1209812 - DNA, 15 bp, Homo sapiens
cttaaaaacaaggaa

SEQ ID NO: 1209813 - DNA, 15 bp, Homo sapiens
ccttaaaaacaagga

SEQ ID NO: 1209814 - DNA, 15 bp, Homo sapiens
gccttaaaaacaagg

SEQ ID NO: 1209815 - DNA, 15 bp, Homo sapiens
agccttaaaaacaag

SEQ ID NO: 1209816 - DNA, 15 bp, Homo sapiens
tagccttaaaaacaa

SEQ ID NO: 1209817 - DNA, 15 bp, Homo sapiens
ttagccttaaaaaca

SEQ ID NO: 1209818 - DNA, 15 bp, Homo sapiens
tttagccttaaaaac

SEQ ID NO: 1209819 - DNA, 15 bp, Homo sapiens
atttagccttaaaaa

SEQ ID NO: 1209820 - DNA, 15 bp, Homo sapiens
aatttagccttaaaa

SEQ ID NO: 1209821 - DNA, 15 bp, Homo sapiens
aaatttagccttaaa

SEQ ID NO: 1209822 - DNA, 15 bp, Homo sapiens
aaaatttagccttaa

SEQ ID NO: 1209823 - DNA, 15 bp, Homo sapiens
taaaatttagcctta

SEQ ID NO: 1209824 - DNA, 15 bp, Homo sapiens
ataaaatttagcctt

SEQ ID NO: 1209825 - DNA, 15 bp, Homo sapiens
aataaaatttagcct

SEQ ID NO: 1209826 - DNA, 15 bp, Homo sapiens
gaataaaatttagcc

SEQ ID NO: 1209827 - DNA, 15 bp, Homo sapiens
agaataaaatttagc

SEQ ID NO: 1209828 - DNA, 15 bp, Homo sapiens
tagaataaaatttag

SEQ ID NO: 1209829 - DNA, 15 bp, Homo sapiens
atagaataaaattta

SEQ ID NO: 1209830 - DNA, 15 bp, Homo sapiens
aatagaataaaattt

SEQ ID NO: 1209831 - DNA, 15 bp, Homo sapiens
taatagaataaaatt

SEQ ID NO: 1209832 - DNA, 15 bp, Homo sapiens
ataatagaataaaat

SEQ ID NO: 1209833 - DNA, 15 bp, Homo sapiens
tataatagaataaaa

SEQ ID NO: 1209834 - DNA, 15 bp, Homo sapiens
atataatagaataaa

SEQ ID NO: 1209835 - DNA, 15 bp, Homo sapiens
aatataatagaataa

SEQ ID NO: 1209836 - DNA, 15 bp, Homo sapiens
taatataatagaata

SEQ ID NO: 1209837 - DNA, 15 bp, Homo sapiens
ttaatataatagaat

SEQ ID NO: 1209838 - DNA, 15 bp, Homo sapiens
attaatataatagaa

SEQ ID NO: 1209839 - DNA, 15 bp, Homo sapiens
tattaatataataga

SEQ ID NO: 1209840 - DNA, 15 bp, Homo sapiens
atattaatataatag

SEQ ID NO: 1209841 - DNA, 15 bp, Homo sapiens
catattaatataata

SEQ ID NO: 1209842 - DNA, 15 bp, Homo sapiens
acatattaatataat

SEQ ID NO: 1209843 - DNA, 15 bp, Homo sapiens
gacatattaatataa

SEQ ID NO: 1209844 - DNA, 15 bp, Homo sapiens
tgacatattaatata

SEQ ID NO: 1209845 - DNA, 15 bp, Homo sapiens
atgacatattaatat

SEQ ID NO: 1209846 - DNA, 15 bp, Homo sapiens
tatgacatattaata

SEQ ID NO: 1209847 - DNA, 15 bp, Homo sapiens
atatgacatattaat

SEQ ID NO: 1209848 - DNA, 15 bp, Homo sapiens
aatatgacatattaa

SEQ ID NO: 1209849 - DNA, 15 bp, Homo sapiens
aaatatgacatatta

SEQ ID NO: 1209850 - DNA, 15 bp, Homo sapiens
aaaatatgacatatt

SEQ ID NO: 1209851 - DNA, 15 bp, Homo sapiens
caaaatatgacatat

SEQ ID NO: 1209852 - DNA, 15 bp, Homo sapiens
acaaaatatgacata

SEQ ID NO: 1209853 - DNA, 15 bp, Homo sapiens
aacaaaatatgacat

SEQ ID NO: 1209854 - DNA, 15 bp, Homo sapiens
aaacaaaatatgaca

SEQ ID NO: 1209855 - DNA, 15 bp, Homo sapiens
taaacaaaatatgac

SEQ ID NO: 1209856 - DNA, 15 bp, Homo sapiens
ataaacaaaatatga

SEQ ID NO: 1209857 - DNA, 15 bp, Homo sapiens
gataaacaaaatatg

SEQ ID NO: 1209858 - DNA, 15 bp, Homo sapiens
ggataaacaaaatat

SEQ ID NO: 1209859 - DNA, 15 bp, Homo sapiens
aggataaacaaaata

SEQ ID NO: 1209860 - DNA, 15 bp, Homo sapiens
caggataaacaaaat

SEQ ID NO: 1209861 - DNA, 15 bp, Homo sapiens
tcaggataaacaaaa

SEQ ID NO: 1209862 - DNA, 15 bp, Homo sapiens
atcaggataaacaaa

SEQ ID NO: 1209863 - DNA, 15 bp, Homo sapiens
catcaggataaacaa

SEQ ID NO: 1209864 - DNA, 15 bp, Homo sapiens
ccatcaggataaaca

SEQ ID NO: 1209865 - DNA, 15 bp, Homo sapiens
tccatcaggataaac

SEQ ID NO: 1209866 - DNA, 15 bp, Homo sapiens
gtccatcaggataaa

SEQ ID NO: 1209867 - DNA, 15 bp, Homo sapiens
tgtccatcaggataa

SEQ ID NO: 1209868 - DNA, 15 bp, Homo sapiens
gtgtccatcaggata

SEQ ID NO: 1209869 - DNA, 15 bp, Homo sapiens
agtgtccatcaggat

SEQ ID NO: 1209870 - DNA, 15 bp, Homo sapiens
aagtgtccatcagga

SEQ ID NO: 1209871 - DNA, 15 bp, Homo sapiens
caagtgtccatcagg

SEQ ID NO: 1209872 - DNA, 15 bp, Homo sapiens
ccaagtgtccatcag

SEQ ID NO: 1209873 - DNA, 15 bp, Homo sapiens
cccaagtgtccatca

SEQ ID NO: 1209874 - DNA, 15 bp, Homo sapiens
acccaagtgtccatc

SEQ ID NO: 1209875 - DNA, 15 bp, Homo sapiens
aacccaagtgtccat

SEQ ID NO: 1209876 - DNA, 15 bp, Homo sapiens
caacccaagtgtcca

SEQ ID NO: 1209877 - DNA, 15 bp, Homo sapiens
tcaacccaagtgtcc

SEQ ID NO: 1209878 - DNA, 15 bp, Homo sapiens
atcaacccaagtgtc

SEQ ID NO: 1209879 - DNA, 15 bp, Homo sapiens
aatcaacccaagtgt

SEQ ID NO: 1209880 - DNA, 15 bp, Homo sapiens
gaatcaacccaagtg

SEQ ID NO: 1209881 - DNA, 15 bp, Homo sapiens
ggaatcaacccaagt

SEQ ID NO: 1209882 - DNA, 15 bp, Homo sapiens
tggaatcaacccaag

SEQ ID NO: 1209883 - DNA, 15 bp, Homo sapiens
gtggaatcaacccaa

SEQ ID NO: 1209884 - DNA, 15 bp, Homo sapiens
ggtggaatcaaccca

SEQ ID NO: 1209885 - DNA, 15 bp, Homo sapiens
aggtggaatcaaccc

SEQ ID NO: 1209886 - DNA, 15 bp, Homo sapiens
aaggtggaatcaacc

SEQ ID NO: 1209887 - DNA, 15 bp, Homo sapiens
aaaggtggaatcaac

SEQ ID NO: 1209888 - DNA, 15 bp, Homo sapiens
caaaggtggaatcaa

SEQ ID NO: 1209889 - DNA, 15 bp, Homo sapiens
ccaaaggtggaatca

SEQ ID NO: 1209890 - DNA, 15 bp, Homo sapiens
gccaaaggtggaatc

SEQ ID NO: 1209891 - DNA, 15 bp, Homo sapiens
ggccaaaggtggaat

SEQ ID NO: 1209892 - DNA, 15 bp, Homo sapiens
tggccaaaggtggaa

SEQ ID NO: 1209893 - DNA, 15 bp, Homo sapiens
atggccaaaggtgga

SEQ ID NO: 1209894 - DNA, 15 bp, Homo sapiens
aatggccaaaggtgg

SEQ ID NO: 1209895 - DNA, 15 bp, Homo sapiens
aaatggccaaaggtg

SEQ ID NO: 1209896 - DNA, 15 bp, Homo sapiens
aaaatggccaaaggt

SEQ ID NO: 1209897 - DNA, 15 bp, Homo sapiens
caaaatggccaaagg

SEQ ID NO: 1209898 - DNA, 15 bp, Homo sapiens
tcaaaatggccaaag

SEQ ID NO: 1209899 - DNA, 15 bp, Homo sapiens
ttcaaaatggccaaa

SEQ ID NO: 1209900 - DNA, 15 bp, Homo sapiens
cttcaaaatggccaa

SEQ ID NO: 1209901 - DNA, 15 bp, Homo sapiens
tcttcaaaatggcca

SEQ ID NO: 1209902 - DNA, 15 bp, Homo sapiens
ttcttcaaaatggcc

SEQ ID NO: 1209903 - DNA, 15 bp, Homo sapiens
cttcttcaaaatggc

SEQ ID NO: 1209904 - DNA, 15 bp, Homo sapiens
gcttcttcaaaatgg

SEQ ID NO: 1209905 - DNA, 15 bp, Homo sapiens
agcttcttcaaaatg

SEQ ID NO: 1209906 - DNA, 15 bp, Homo sapiens
aagcttcttcaaaat

SEQ ID NO: 1209907 - DNA, 15 bp, Homo sapiens
gaagcttcttcaaaa

SEQ ID NO: 1209908 - DNA, 15 bp, Homo sapiens
agaagcttcttcaaa

SEQ ID NO: 1209909 - DNA, 15 bp, Homo sapiens
tagaagcttcttcaa

SEQ ID NO: 1209910 - DNA, 15 bp, Homo sapiens
atagaagcttcttca

SEQ ID NO: 1209911 - DNA, 15 bp, Homo sapiens
catagaagcttcttc

SEQ ID NO: 1209912 - DNA, 15 bp, Homo sapiens
acatagaagcttctt

SEQ ID NO: 1209913 - DNA, 15 bp, Homo sapiens
tacatagaagcttct

SEQ ID NO: 1209914 - DNA, 15 bp, Homo sapiens
gtacatagaagcttc

SEQ ID NO: 1209915 - DNA, 15 bp, Homo sapiens
tgtacatagaagctt

SEQ ID NO: 1209916 - DNA, 15 bp, Homo sapiens
atgtacatagaagct

SEQ ID NO: 1209917 - DNA, 15 bp, Homo sapiens
catgtacatagaagc

SEQ ID NO: 1209918 - DNA, 15 bp, Homo sapiens
ccatgtacatagaag

SEQ ID NO: 1209919 - DNA, 15 bp, Homo sapiens
accatgtacatagaa

SEQ ID NO: 1209920 - DNA, 15 bp, Homo sapiens
taccatgtacataga

SEQ ID NO: 1209921 - DNA, 15 bp, Homo sapiens
ataccatgtacatag

SEQ ID NO: 1209922 - DNA, 15 bp, Homo sapiens
tataccatgtacata

SEQ ID NO: 1209923 - DNA, 15 bp, Homo sapiens
gtataccatgtacat

SEQ ID NO: 1209924 - DNA, 15 bp, Homo sapiens
tgtataccatgtaca

SEQ ID NO: 1209925 - DNA, 15 bp, Homo sapiens
gtgtataccatgtac

SEQ ID NO: 1209926 - DNA, 15 bp, Homo sapiens
tgtgtataccatgta

SEQ ID NO: 1209927 - DNA, 15 bp, Homo sapiens
atgtgtataccatgt

SEQ ID NO: 1209928 - DNA, 15 bp, Homo sapiens
tatgtgtataccatg

SEQ ID NO: 1209929 - DNA, 15 bp, Homo sapiens
atatgtgtataccat

SEQ ID NO: 1209930 - DNA, 15 bp, Homo sapiens
tatatgtgtatacca

SEQ ID NO: 1209931 - DNA, 15 bp, Homo sapiens
atatatgtgtatacc

SEQ ID NO: 1209932 - DNA, 15 bp, Homo sapiens
gatatatgtgtatac

SEQ ID NO: 1209933 - DNA, 15 bp, Homo sapiens
agatatatgtgtata

SEQ ID NO: 1209934 - DNA, 15 bp, Homo sapiens
aagatatatgtgtat

SEQ ID NO: 1209935 - DNA, 15 bp, Homo sapiens
aaagatatatgtgta

SEQ ID NO: 1209936 - DNA, 15 bp, Homo sapiens
caaagatatatgtgt

SEQ ID NO: 1209937 - DNA, 15 bp, Homo sapiens
ccaaagatatatgtg

SEQ ID NO: 1209938 - DNA, 15 bp, Homo sapiens
cccaaagatatatgt

SEQ ID NO: 1209939 - DNA, 15 bp, Homo sapiens
acccaaagatatatg

SEQ ID NO: 1209940 - DNA, 15 bp, Homo sapiens
gacccaaagatatat

SEQ ID NO: 1209941 - DNA, 15 bp, Homo sapiens
agacccaaagatata

SEQ ID NO: 1209942 - DNA, 15 bp, Homo sapiens
gagacccaaagatat

SEQ ID NO: 1209943 - DNA, 15 bp, Homo sapiens
agagacccaaagata

SEQ ID NO: 1209944 - DNA, 15 bp, Homo sapiens
cagagacccaaagat

SEQ ID NO: 1209945 - DNA, 15 bp, Homo sapiens
gcagagacccaaaga

SEQ ID NO: 1209946 - DNA, 15 bp, Homo sapiens
agcagagacccaaag

SEQ ID NO: 1209947 - DNA, 15 bp, Homo sapiens
aagcagagacccaaa

SEQ ID NO: 1209948 - DNA, 15 bp, Homo sapiens
aaagcagagacccaa

SEQ ID NO: 1209949 - DNA, 15 bp, Homo sapiens
gaaagcagagaccca

SEQ ID NO: 1209950 - DNA, 15 bp, Homo sapiens
tgaaagcagagaccc

SEQ ID NO: 1209951 - DNA, 15 bp, Homo sapiens
ttgaaagcagagacc

SEQ ID NO: 1209952 - DNA, 15 bp, Homo sapiens
attgaaagcagagac

SEQ ID NO: 1209953 - DNA, 15 bp, Homo sapiens
cattgaaagcagaga

SEQ ID NO: 1209954 - DNA, 15 bp, Homo sapiens
gcattgaaagcagag

SEQ ID NO: 1209955 - DNA, 15 bp, Homo sapiens
agcattgaaagcaga

SEQ ID NO: 1209956 - DNA, 15 bp, Homo sapiens
aagcattgaaagcag

SEQ ID NO: 1209957 - DNA, 15 bp, Homo sapiens
aaagcattgaaagca

SEQ ID NO: 1209958 - DNA, 15 bp, Homo sapiens
aaaagcattgaaagc

SEQ ID NO: 1209959 - DNA, 15 bp, Homo sapiens
caaaagcattgaaag

SEQ ID NO: 1209960 - DNA, 15 bp, Homo sapiens
ccaaaagcattgaaa

SEQ ID NO: 1209961 - DNA, 15 bp, Homo sapiens
cccaaaagcattgaa

SEQ ID NO: 1209962 - DNA, 15 bp, Homo sapiens
ccccaaaagcattga

SEQ ID NO: 1209963 - DNA, 15 bp, Homo sapiens
tccccaaaagcattg

SEQ ID NO: 1209964 - DNA, 15 bp, Homo sapiens
atccccaaaagcatt

SEQ ID NO: 1209965 - DNA, 15 bp, Homo sapiens
tatccccaaaagcat

SEQ ID NO: 1209966 - DNA, 15 bp, Homo sapiens
atatccccaaaagca

SEQ ID NO: 1209967 - DNA, 15 bp, Homo sapiens
aatatccccaaaagc

SEQ ID NO: 1209968 - DNA, 15 bp, Homo sapiens
aaatatccccaaaag

SEQ ID NO: 1209969 - DNA, 15 bp, Homo sapiens
gaaatatccccaaaa

SEQ ID NO: 1209970 - DNA, 15 bp, Homo sapiens
tgaaatatccccaaa

SEQ ID NO: 1209971 - DNA, 15 bp, Homo sapiens
ctgaaatatccccaa

SEQ ID NO: 1209972 - DNA, 15 bp, Homo sapiens
tctgaaatatcccca

SEQ ID NO: 1209973 - DNA, 15 bp, Homo sapiens
atctgaaatatcccc

SEQ ID NO: 1209974 - DNA, 15 bp, Homo sapiens
catctgaaatatccc

SEQ ID NO: 1209975 - DNA, 15 bp, Homo sapiens
acatctgaaatatcc

SEQ ID NO: 1209976 - DNA, 15 bp, Homo sapiens
cacatctgaaatatc

SEQ ID NO: 1209977 - DNA, 15 bp, Homo sapiens
ccacatctgaaatat

SEQ ID NO: 1209978 - DNA, 15 bp, Homo sapiens
tccacatctgaaata

SEQ ID NO: 1209979 - DNA, 15 bp, Homo sapiens
ttccacatctgaaat

SEQ ID NO: 1209980 - DNA, 15 bp, Homo sapiens
attccacatctgaaa

SEQ ID NO: 1209981 - DNA, 15 bp, Homo sapiens
aattccacatctgaa

SEQ ID NO: 1209982 - DNA, 15 bp, Homo sapiens
aaattccacatctga

SEQ ID NO: 1209983 - DNA, 15 bp, Homo sapiens
gaaattccacatctg

SEQ ID NO: 1209984 - DNA, 15 bp, Homo sapiens
agaaattccacatct

SEQ ID NO: 1209985 - DNA, 15 bp, Homo sapiens
cagaaattccacatc

SEQ ID NO: 1209986 - DNA, 15 bp, Homo sapiens
ccagaaattccacat

SEQ ID NO: 1209987 - DNA, 15 bp, Homo sapiens
tccagaaattccaca

SEQ ID NO: 1209988 - DNA, 15 bp, Homo sapiens
atccagaaattccac

SEQ ID NO: 1209989 - DNA, 15 bp, Homo sapiens
aatccagaaattcca

SEQ ID NO: 1209990 - DNA, 15 bp, Homo sapiens
taatccagaaattcc

SEQ ID NO: 1209991 - DNA, 15 bp, Homo sapiens
ataatccagaaattc

SEQ ID NO: 1209992 - DNA, 15 bp, Homo sapiens
tataatccagaaatt

SEQ ID NO: 1209993 - DNA, 15 bp, Homo sapiens
ttataatccagaaat

SEQ ID NO: 1209994 - DNA, 15 bp, Homo sapiens
cttataatccagaaa

SEQ ID NO: 1209995 - DNA, 15 bp, Homo sapiens
ccttataatccagaa

SEQ ID NO: 1209996 - DNA, 15 bp, Homo sapiens
gccttataatccaga

SEQ ID NO: 1209997 - DNA, 15 bp, Homo sapiens
tgccttataatccag

SEQ ID NO: 1209998 - DNA, 15 bp, Homo sapiens
ttgccttataatcca

SEQ ID NO: 1209999 - DNA, 15 bp, Homo sapiens
attgccttataatcc

SEQ ID NO: 1210000 - DNA, 15 bp, Homo sapiens
aattgccttataatc

SEQ ID NO: 1210001 - DNA, 15 bp, Homo sapiens
aaattgccttataat

SEQ ID NO: 1210002 - DNA, 15 bp, Homo sapiens
aaaattgccttataa

SEQ ID NO: 1210003 - DNA, 15 bp, Homo sapiens
aaaaattgccttata

SEQ ID NO: 1210004 - DNA, 15 bp, Homo sapiens
aaaaaattgccttat

SEQ ID NO: 1210005 - DNA, 15 bp, Homo sapiens
aaaaaaattgcctta

SEQ ID NO: 1210006 - DNA, 15 bp, Homo sapiens
aaaaaaaattgcctt

SEQ ID NO: 1210007 - DNA, 15 bp, Homo sapiens
aaaaaaaaattgcct

SEQ ID NO: 1210008 - DNA, 15 bp, Homo sapiens
aaaaaaaaaattgcc

SEQ ID NO: 1210009 - DNA, 15 bp, Homo sapiens
aaaaaaaaaaattgc

SEQ ID NO: 1210010 - DNA, 15 bp, Homo sapiens
caaaaaaaaaaattg

SEQ ID NO: 1210011 - DNA, 15 bp, Homo sapiens
tcaaaaaaaaaaatt

SEQ ID NO: 1210012 - DNA, 15 bp, Homo sapiens
ctcaaaaaaaaaaat

SEQ ID NO: 1210013 - DNA, 15 bp, Homo sapiens
agagtctgtctcaaa

SEQ ID NO: 1210014 - DNA, 15 bp, Homo sapiens
gagagtctgtctcaa

SEQ ID NO: 1210015 - DNA, 15 bp, Homo sapiens
cgagagtctgtctca

SEQ ID NO: 1210016 - DNA, 15 bp, Homo sapiens
gcgagagtctgtctc

SEQ ID NO: 1210017 - DNA, 15 bp, Homo sapiens
agcgagagtctgtct

SEQ ID NO: 1210018 - DNA, 15 bp, Homo sapiens
gagcgagagtctgtc

SEQ ID NO: 1210019 - DNA, 15 bp, Homo sapiens
agagcgagagtctgt

SEQ ID NO: 1210020 - DNA, 15 bp, Homo sapiens
aagagcgagagtctg

SEQ ID NO: 1210021 - DNA, 15 bp, Homo sapiens
caagagcgagagtct

SEQ ID NO: 1210022 - DNA, 15 bp, Homo sapiens
acaagagcgagagtc

SEQ ID NO: 1210023 - DNA, 15 bp, Homo sapiens
gacaagagcgagagt

SEQ ID NO: 1210024 - DNA, 15 bp, Homo sapiens
cgacaagagcgagag

SEQ ID NO: 1210025 - DNA, 15 bp, Homo sapiens
ctagcctgggcgaca

SEQ ID NO: 1210026 - DNA, 15 bp, Homo sapiens
tctagcctgggcgac

SEQ ID NO: 1210027 - DNA, 15 bp, Homo sapiens
ttctagcctgggcga

SEQ ID NO: 1210028 - DNA, 15 bp, Homo sapiens
attctagcctgggcg

SEQ ID NO: 1210029 - DNA, 15 bp, Homo sapiens
cattctagcctgggc

SEQ ID NO: 1210030 - DNA, 15 bp, Homo sapiens
acattctagcctggg

SEQ ID NO: 1210031 - DNA, 15 bp, Homo sapiens
cacattctagcctgg

SEQ ID NO: 1210032 - DNA, 15 bp, Homo sapiens
ccacattctagcctg

SEQ ID NO: 1210033 - DNA, 15 bp, Homo sapiens
accacattctagcct

SEQ ID NO: 1210034 - DNA, 15 bp, Homo sapiens
caccacattctagcc

SEQ ID NO: 1210035 - DNA, 15 bp, Homo sapiens
ccaccacattctagc

SEQ ID NO: 1210036 - DNA, 15 bp, Homo sapiens
accaccacattctag

SEQ ID NO: 1210037 - DNA, 15 bp, Homo sapiens
caccaccacattcta

SEQ ID NO: 1210038 - DNA, 15 bp, Homo sapiens
acaccaccacattct

SEQ ID NO: 1210039 - DNA, 15 bp, Homo sapiens
cacaccaccacattc

SEQ ID NO: 1210040 - DNA, 15 bp, Homo sapiens
tcacaccaccacatt

SEQ ID NO: 1210041 - DNA, 15 bp, Homo sapiens
atcacaccaccacat

SEQ ID NO: 1210042 - DNA, 15 bp, Homo sapiens
gatcacaccaccaca

SEQ ID NO: 1210043 - DNA, 15 bp, Homo sapiens
agatcacaccaccac

SEQ ID NO: 1210044 - DNA, 15 bp, Homo sapiens
tagatcacaccacca

SEQ ID NO: 1210045 - DNA, 15 bp, Homo sapiens
atagatcacaccacc

SEQ ID NO: 1210046 - DNA, 15 bp, Homo sapiens
aatagatcacaccac

SEQ ID NO: 1210047 - DNA, 15 bp, Homo sapiens
aaatagatcacacca

SEQ ID NO: 1210048 - DNA, 15 bp, Homo sapiens
aaaatagatcacacc

SEQ ID NO: 1210049 - DNA, 15 bp, Homo sapiens
aaaaatagatcacac

SEQ ID NO: 1210050 - DNA, 15 bp, Homo sapiens
aaaaaatagatcaca

SEQ ID NO: 1210051 - DNA, 15 bp, Homo sapiens
aaaaaaatagatcac

SEQ ID NO: 1210052 - DNA, 15 bp, Homo sapiens
aaaaaaaatagatca

SEQ ID NO: 1210053 - DNA, 15 bp, Homo sapiens
aaaaaaaaatagatc

SEQ ID NO: 1210054 - DNA, 15 bp, Homo sapiens
aaaaaaaaaatagat

SEQ ID NO: 1210055 - DNA, 15 bp, Homo sapiens
acactgcactccagc

SEQ ID NO: 1210056 - DNA, 15 bp, Homo sapiens
gacactgcactccag

SEQ ID NO: 1210057 - DNA, 15 bp, Homo sapiens
tgacactgcactcca

SEQ ID NO: 1210058 - DNA, 15 bp, Homo sapiens
gtgacactgcactcc

SEQ ID NO: 1210059 - DNA, 15 bp, Homo sapiens
cgtgacactgcactc

SEQ ID NO: 1210060 - DNA, 15 bp, Homo sapiens
tcgtgacactgcact

SEQ ID NO: 1210061 - DNA, 15 bp, Homo sapiens
atcgtgacactgcac

SEQ ID NO: 1210062 - DNA, 15 bp, Homo sapiens
gatcgtgacactgca

SEQ ID NO: 1210063 - DNA, 15 bp, Homo sapiens
agatcgtgacactgc

SEQ ID NO: 1210064 - DNA, 15 bp, Homo sapiens
gagatcgtgacactg

SEQ ID NO: 1210065 - DNA, 15 bp, Homo sapiens
tgagatcgtgacact

SEQ ID NO: 1210066 - DNA, 15 bp, Homo sapiens
ctgagatcgtgacac

SEQ ID NO: 1210067 - DNA, 15 bp, Homo sapiens
gctgagatcgtgaca

SEQ ID NO: 1210068 - DNA, 15 bp, Homo sapiens
agctgagatcgtgac

SEQ ID NO: 1210069 - DNA, 15 bp, Homo sapiens
gagctgagatcgtga

SEQ ID NO: 1210070 - DNA, 15 bp, Homo sapiens
cgaacctgggaggcg

SEQ ID NO: 1210071 - DNA, 15 bp, Homo sapiens
acgaacctgggaggc

SEQ ID NO: 1210072 - DNA, 15 bp, Homo sapiens
cacgaacctgggagg

SEQ ID NO: 1210073 - DNA, 15 bp, Homo sapiens
gcacgaacctgggag

SEQ ID NO: 1210074 - DNA, 15 bp, Homo sapiens
ggcacgaacctggga

SEQ ID NO: 1210075 - DNA, 15 bp, Homo sapiens
tggcacgaacctggg

SEQ ID NO: 1210076 - DNA, 15 bp, Homo sapiens
atggcacgaacctgg

SEQ ID NO: 1210077 - DNA, 15 bp, Homo sapiens
aatggcacgaacctg

SEQ ID NO: 1210078 - DNA, 15 bp, Homo sapiens
gaatggcacgaacct

SEQ ID NO: 1210079 - DNA, 15 bp, Homo sapiens
agaatggcacgaacc

SEQ ID NO: 1210080 - DNA, 15 bp, Homo sapiens
aagaatggcacgaac

SEQ ID NO: 1210081 - DNA, 15 bp, Homo sapiens
taagaatggcacgaa

SEQ ID NO: 1210082 - DNA, 15 bp, Homo sapiens
ataagaatggcacga

SEQ ID NO: 1210083 - DNA, 15 bp, Homo sapiens
cataagaatggcacg

SEQ ID NO: 1210084 - DNA, 15 bp, Homo sapiens
gcataagaatggcac

SEQ ID NO: 1210085 - DNA, 15 bp, Homo sapiens
ggcataagaatggca

SEQ ID NO: 1210086 - DNA, 15 bp, Homo sapiens
aggcataagaatggc

SEQ ID NO: 1210087 - DNA, 15 bp, Homo sapiens
gaggcataagaatgg

SEQ ID NO: 1210088 - DNA, 15 bp, Homo sapiens
tgaggcataagaatg

SEQ ID NO: 1210089 - DNA, 15 bp, Homo sapiens
ctgaggcataagaat

SEQ ID NO: 1210090 - DNA, 15 bp, Homo sapiens
gctgaggcataagaa

SEQ ID NO: 1210091 - DNA, 15 bp, Homo sapiens
ggctgaggcataaga

SEQ ID NO: 1210092 - DNA, 15 bp, Homo sapiens
aggctgaggcataag

SEQ ID NO: 1210093 - DNA, 15 bp, Homo sapiens
gaggctgaggcataa

SEQ ID NO: 1210094 - DNA, 15 bp, Homo sapiens
ggaggctgaggcata

SEQ ID NO: 1210095 - DNA, 15 bp, Homo sapiens
ggtcccagctacttg

SEQ ID NO: 1210096 - DNA, 15 bp, Homo sapiens
tggtcccagctactt

SEQ ID NO: 1210097 - DNA, 15 bp, Homo sapiens
gctgtggtcccagct

SEQ ID NO: 1210098 - DNA, 15 bp, Homo sapiens
ggctgtggtcccagc

SEQ ID NO: 1210099 - DNA, 15 bp, Homo sapiens
cggctgtggtcccag

SEQ ID NO: 1210100 - DNA, 15 bp, Homo sapiens
gcggctgtggtccca

SEQ ID NO: 1210101 - DNA, 15 bp, Homo sapiens
ggcggctgtggtccc

SEQ ID NO: 1210102 - DNA, 15 bp, Homo sapiens
gggcggctgtggtcc

SEQ ID NO: 1210103 - DNA, 15 bp, Homo sapiens
tgggcggctgtggtc

SEQ ID NO: 1210104 - DNA, 15 bp, Homo sapiens
gtgggcggctgtggt

SEQ ID NO: 1210105 - DNA, 15 bp, Homo sapiens
ggtgggcggctgtgg

SEQ ID NO: 1210106 - DNA, 15 bp, Homo sapiens
tggtgggcggctgtg

SEQ ID NO: 1210107 - DNA, 15 bp, Homo sapiens
gtggtgggcggctgt

SEQ ID NO: 1210108 - DNA, 15 bp, Homo sapiens
ggtggtgggcggctg

SEQ ID NO: 1210109 - DNA, 15 bp, Homo sapiens
aggtggtgggcggct

SEQ ID NO: 1210110 - DNA, 15 bp, Homo sapiens
gaggtggtgggcggc

SEQ ID NO: 1210111 - DNA, 15 bp, Homo sapiens
tgaggtggtgggcgg

SEQ ID NO: 1210112 - DNA, 15 bp, Homo sapiens
gtgaggtggtgggcg

SEQ ID NO: 1210113 - DNA, 15 bp, Homo sapiens
ggtgaggtggtgggc

SEQ ID NO: 1210114 - DNA, 15 bp, Homo sapiens
gggtgaggtggtggg

SEQ ID NO: 1210115 - DNA, 15 bp, Homo sapiens
cgggtgaggtggtgg

SEQ ID NO: 1210116 - DNA, 15 bp, Homo sapiens
ccgggtgaggtggtg

SEQ ID NO: 1210117 - DNA, 15 bp, Homo sapiens
gccgggtgaggtggt

SEQ ID NO: 1210118 - DNA, 15 bp, Homo sapiens
agccgggtgaggtgg

SEQ ID NO: 1210119 - DNA, 15 bp, Homo sapiens
tagccgggtgaggtg

SEQ ID NO: 1210120 - DNA, 15 bp, Homo sapiens
ttagccgggtgaggt

SEQ ID NO: 1210121 - DNA, 15 bp, Homo sapiens
attagccgggtgagg

SEQ ID NO: 1210122 - DNA, 15 bp, Homo sapiens
aattagccgggtgag

SEQ ID NO: 1210123 - DNA, 15 bp, Homo sapiens
aaattagccgggtga

SEQ ID NO: 1210124 - DNA, 15 bp, Homo sapiens
tcctggccaacatag

SEQ ID NO: 1210125 - DNA, 15 bp, Homo sapiens
atcctggccaacata

SEQ ID NO: 1210126 - DNA, 15 bp, Homo sapiens
aggcggatcacgagg

SEQ ID NO: 1210127 - DNA, 15 bp, Homo sapiens
caggcggatcacgag

SEQ ID NO: 1210128 - DNA, 15 bp, Homo sapiens
cagccgggtgcagtg

SEQ ID NO: 1210129 - DNA, 15 bp, Homo sapiens
ccagccgggtgcagt

SEQ ID NO: 1210130 - DNA, 15 bp, Homo sapiens
accagccgggtgcag

SEQ ID NO: 1210131 - DNA, 15 bp, Homo sapiens
caccagccgggtgca

SEQ ID NO: 1210132 - DNA, 15 bp, Homo sapiens
acaccagccgggtgc

SEQ ID NO: 1210133 - DNA, 15 bp, Homo sapiens
cacaccagccgggtg

SEQ ID NO: 1210134 - DNA, 15 bp, Homo sapiens
tcacaccagccgggt

SEQ ID NO: 1210135 - DNA, 15 bp, Homo sapiens
atcacaccagccggg

SEQ ID NO: 1210136 - DNA, 15 bp, Homo sapiens
gatcacaccagccgg

SEQ ID NO: 1210137 - DNA, 15 bp, Homo sapiens
agatcacaccagccg

SEQ ID NO: 1210138 - DNA, 15 bp, Homo sapiens
aagatcacaccagcc

SEQ ID NO: 1210139 - DNA, 15 bp, Homo sapiens
caagatcacaccagc

SEQ ID NO: 1210140 - DNA, 15 bp, Homo sapiens
ccaagatcacaccag

SEQ ID NO: 1210141 - DNA, 15 bp, Homo sapiens
cgagccaagatcaca

SEQ ID NO: 1210142 - DNA, 15 bp, Homo sapiens
gcgagccaagatcac

SEQ ID NO: 1210143 - DNA, 15 bp, Homo sapiens
agcgagccaagatca

SEQ ID NO: 1210144 - DNA, 15 bp, Homo sapiens
cagcgagccaagatc

SEQ ID NO: 1210145 - DNA, 15 bp, Homo sapiens
gcagcgagccaagat

SEQ ID NO: 1210146 - DNA, 15 bp, Homo sapiens
tgcagcgagccaaga

SEQ ID NO: 1210147 - DNA, 15 bp, Homo sapiens
ttgcagcgagccaag

SEQ ID NO: 1210148 - DNA, 15 bp, Homo sapiens
gttgcagcgagccaa

SEQ ID NO: 1210149 - DNA, 15 bp, Homo sapiens
ggttgcagcgagcca

SEQ ID NO: 1210150 - DNA, 15 bp, Homo sapiens
aggttgcagcgagcc

SEQ ID NO: 1210151 - DNA, 15 bp, Homo sapiens
gaggttgcagcgagc

SEQ ID NO: 1210152 - DNA, 15 bp, Homo sapiens
agaggttgcagcgag

SEQ ID NO: 1210153 - DNA, 15 bp, Homo sapiens
cagaggttgcagcga

SEQ ID NO: 1210154 - DNA, 15 bp, Homo sapiens
gcagaggttgcagcg

SEQ ID NO: 1210155 - DNA, 15 bp, Homo sapiens
ggcagaggttgcagc

SEQ ID NO: 1210156 - DNA, 15 bp, Homo sapiens
aagaatcgcttgaac

SEQ ID NO: 1210157 - DNA, 15 bp, Homo sapiens
caagaatcgcttgaa

SEQ ID NO: 1210158 - DNA, 15 bp, Homo sapiens
acaagaatcgcttga

SEQ ID NO: 1210159 - DNA, 15 bp, Homo sapiens
cacaagaatcgcttg

SEQ ID NO: 1210160 - DNA, 15 bp, Homo sapiens
gcacaagaatcgctt

SEQ ID NO: 1210161 - DNA, 15 bp, Homo sapiens
ggcacaagaatcgct

SEQ ID NO: 1210162 - DNA, 15 bp, Homo sapiens
aggcacaagaatcgc

SEQ ID NO: 1210163 - DNA, 15 bp, Homo sapiens
gaggcacaagaatcg

SEQ ID NO: 1210164 - DNA, 15 bp, Homo sapiens
agaggctgaggcaca

SEQ ID NO: 1210165 - DNA, 15 bp, Homo sapiens
gagaggctgaggcac

SEQ ID NO: 1210166 - DNA, 15 bp, Homo sapiens
cggagaggctgaggc

SEQ ID NO: 1210167 - DNA, 15 bp, Homo sapiens
gcggagaggctgagg

SEQ ID NO: 1210168 - DNA, 15 bp, Homo sapiens
tgcggagaggctgag

SEQ ID NO: 1210169 - DNA, 15 bp, Homo sapiens
ctgcggagaggctga

SEQ ID NO: 1210170 - DNA, 15 bp, Homo sapiens
gctgcggagaggctg

SEQ ID NO: 1210171 - DNA, 15 bp, Homo sapiens
agctgcggagaggct

SEQ ID NO: 1210172 - DNA, 15 bp, Homo sapiens
cagctgcggagaggc

SEQ ID NO: 1210173 - DNA, 15 bp, Homo sapiens
ccagctgcggagagg

SEQ ID NO: 1210174 - DNA, 15 bp, Homo sapiens
cccagctgcggagag

SEQ ID NO: 1210175 - DNA, 15 bp, Homo sapiens
tcccagctgcggaga

SEQ ID NO: 1210176 - DNA, 15 bp, Homo sapiens
gtcccagctgcggag

SEQ ID NO: 1210177 - DNA, 15 bp, Homo sapiens
agtcccagctgcgga

SEQ ID NO: 1210178 - DNA, 15 bp, Homo sapiens
tagtcccagctgcgg

SEQ ID NO: 1210179 - DNA, 15 bp, Homo sapiens
gtagtcccagctgcg

SEQ ID NO: 1210180 - DNA, 15 bp, Homo sapiens
agtggcgcacacctg

SEQ ID NO: 1210181 - DNA, 15 bp, Homo sapiens
cagtggcgcacacct

SEQ ID NO: 1210182 - DNA, 15 bp, Homo sapiens
acagtggcgcacacc

SEQ ID NO: 1210183 - DNA, 15 bp, Homo sapiens
cacagtggcgcacac

SEQ ID NO: 1210184 - DNA, 15 bp, Homo sapiens
gcacagtggcgcaca

SEQ ID NO: 1210185 - DNA, 15 bp, Homo sapiens
ggcacagtggcgcac

SEQ ID NO: 1210186 - DNA, 15 bp, Homo sapiens
gggcacagtggcgca

SEQ ID NO: 1210187 - DNA, 15 bp, Homo sapiens
tgggcacagtggcgc

SEQ ID NO: 1210188 - DNA, 15 bp, Homo sapiens
ctgggcacagtggcg

SEQ ID NO: 1210189 - DNA, 15 bp, Homo sapiens
gtagctgggcacagt

SEQ ID NO: 1210190 - DNA, 15 bp, Homo sapiens
agtagctgggcacag

SEQ ID NO: 1210191 - DNA, 15 bp, Homo sapiens
aagtagctgggcaca

SEQ ID NO: 1210192 - DNA, 15 bp, Homo sapiens
aaagtagctgggcac

SEQ ID NO: 1210193 - DNA, 15 bp, Homo sapiens
aaaagtagctgggca

SEQ ID NO: 1210194 - DNA, 15 bp, Homo sapiens
aaaaagtagctgggc

SEQ ID NO: 1210195 - DNA, 15 bp, Homo sapiens
taaaaagtagctggg

SEQ ID NO: 1210196 - DNA, 15 bp, Homo sapiens
ttaaaaagtagctgg

SEQ ID NO: 1210197 - DNA, 15 bp, Homo sapiens
tttaaaaagtagctg

SEQ ID NO: 1210198 - DNA, 15 bp, Homo sapiens
ttttaaaaagtagct

SEQ ID NO: 1210199 - DNA, 15 bp, Homo sapiens
tttttaaaaagtagc

SEQ ID NO: 1210200 - DNA, 15 bp, Homo sapiens
atttttaaaaagtag

SEQ ID NO: 1210201 - DNA, 15 bp, Homo sapiens
tatttttaaaaagta

SEQ ID NO: 1210202 - DNA, 15 bp, Homo sapiens
atatttttaaaaagt

SEQ ID NO: 1210203 - DNA, 15 bp, Homo sapiens
tatatttttaaaaag

SEQ ID NO: 1210204 - DNA, 15 bp, Homo sapiens
atatatttttaaaaa

SEQ ID NO: 1210205 - DNA, 15 bp, Homo sapiens
catatatttttaaaa

SEQ ID NO: 1210206 - DNA, 15 bp, Homo sapiens
acatatatttttaaa

SEQ ID NO: 1210207 - DNA, 15 bp, Homo sapiens
cacatatatttttaa

SEQ ID NO: 1210208 - DNA, 15 bp, Homo sapiens
acacatatattttta

SEQ ID NO: 1210209 - DNA, 15 bp, Homo sapiens
tacacatatattttt

SEQ ID NO: 1210210 - DNA, 15 bp, Homo sapiens
atacacatatatttt

SEQ ID NO: 1210211 - DNA, 15 bp, Homo sapiens
aatacacatatattt

SEQ ID NO: 1210212 - DNA, 15 bp, Homo sapiens
aaatacacatatatt

SEQ ID NO: 1210213 - DNA, 15 bp, Homo sapiens
taaatacacatatat

SEQ ID NO: 1210214 - DNA, 15 bp, Homo sapiens
ataaatacacatata

SEQ ID NO: 1210215 - DNA, 15 bp, Homo sapiens
aataaatacacatat

SEQ ID NO: 1210216 - DNA, 15 bp, Homo sapiens
taataaatacacata

SEQ ID NO: 1210217 - DNA, 15 bp, Homo sapiens
tataataaatacaca

SEQ ID NO: 1210218 - DNA, 15 bp, Homo sapiens
gtataataaatacac

SEQ ID NO: 1210219 - DNA, 15 bp, Homo sapiens
agtataataaataca

SEQ ID NO: 1210220 - DNA, 15 bp, Homo sapiens
aagtataataaatac

SEQ ID NO: 1210221 - DNA, 15 bp, Homo sapiens
aaagtataataaata

SEQ ID NO: 1210222 - DNA, 15 bp, Homo sapiens
aaaagtataataaat

SEQ ID NO: 1210223 - DNA, 15 bp, Homo sapiens
taaaagtataataaa

SEQ ID NO: 1210224 - DNA, 15 bp, Homo sapiens
ttaaaagtataataa

SEQ ID NO: 1210225 - DNA, 15 bp, Homo sapiens
cttaaaagtataata

SEQ ID NO: 1210226 - DNA, 15 bp, Homo sapiens
acttaaaagtataat

SEQ ID NO: 1210227 - DNA, 15 bp, Homo sapiens
aacttaaaagtataa

SEQ ID NO: 1210228 - DNA, 15 bp, Homo sapiens
gaacttaaaagtata

SEQ ID NO: 1210229 - DNA, 15 bp, Homo sapiens
agaacttaaaagtat

SEQ ID NO: 1210230 - DNA, 15 bp, Homo sapiens
cagaacttaaaagta

SEQ ID NO: 1210231 - DNA, 15 bp, Homo sapiens
ccagaacttaaaagt

SEQ ID NO: 1210232 - DNA, 15 bp, Homo sapiens
cccagaacttaaaag

SEQ ID NO: 1210233 - DNA, 15 bp, Homo sapiens
tcccagaacttaaaa

SEQ ID NO: 1210234 - DNA, 15 bp, Homo sapiens
atcccagaacttaaa

SEQ ID NO: 1210235 - DNA, 15 bp, Homo sapiens
tatcccagaacttaa

SEQ ID NO: 1210236 - DNA, 15 bp, Homo sapiens
gtatcccagaactta

SEQ ID NO: 1210237 - DNA, 15 bp, Homo sapiens
tgtatcccagaactt

SEQ ID NO: 1210238 - DNA, 15 bp, Homo sapiens
atgtatcccagaact

SEQ ID NO: 1210239 - DNA, 15 bp, Homo sapiens
catgtatcccagaac

SEQ ID NO: 1210240 - DNA, 15 bp, Homo sapiens
acatgtatcccagaa

SEQ ID NO: 1210241 - DNA, 15 bp, Homo sapiens
tacatgtatcccaga

SEQ ID NO: 1210242 - DNA, 15 bp, Homo sapiens
gtacatgtatcccag

SEQ ID NO: 1210243 - DNA, 15 bp, Homo sapiens
tgtacatgtatccca

SEQ ID NO: 1210244 - DNA, 15 bp, Homo sapiens
ctgtacatgtatccc

SEQ ID NO: 1210245 - DNA, 15 bp, Homo sapiens
tctgtacatgtatcc

SEQ ID NO: 1210246 - DNA, 15 bp, Homo sapiens
ttctgtacatgtatc

SEQ ID NO: 1210247 - DNA, 15 bp, Homo sapiens
gttctgtacatgtat

SEQ ID NO: 1210248 - DNA, 15 bp, Homo sapiens
cgttctgtacatgta

SEQ ID NO: 1210249 - DNA, 15 bp, Homo sapiens
acgttctgtacatgt

SEQ ID NO: 1210250 - DNA, 15 bp, Homo sapiens
cacgttctgtacatg

SEQ ID NO: 1210251 - DNA, 15 bp, Homo sapiens
gcacgttctgtacat

SEQ ID NO: 1210252 - DNA, 15 bp, Homo sapiens
tgcacgttctgtaca

SEQ ID NO: 1210253 - DNA, 15 bp, Homo sapiens
ctgcacgttctgtac

SEQ ID NO: 1210254 - DNA, 15 bp, Homo sapiens
cctgcacgttctgta

SEQ ID NO: 1210255 - DNA, 15 bp, Homo sapiens
acctgcacgttctgt

SEQ ID NO: 1210256 - DNA, 15 bp, Homo sapiens
acatgtatacctatg

SEQ ID NO: 1210257 - DNA, 15 bp, Homo sapiens
cacatgtatacctat

SEQ ID NO: 1210258 - DNA, 15 bp, Homo sapiens
gcacatgtataccta

SEQ ID NO: 1210259 - DNA, 15 bp, Homo sapiens
ggcacatgtatacct

SEQ ID NO: 1210260 - DNA, 15 bp, Homo sapiens
tggcacatgtatacc

SEQ ID NO: 1210261 - DNA, 15 bp, Homo sapiens
atggcacatgtatac

SEQ ID NO: 1210262 - DNA, 15 bp, Homo sapiens
catggcacatgtata

SEQ ID NO: 1210263 - DNA, 15 bp, Homo sapiens
ccatggcacatgtat

SEQ ID NO: 1210264 - DNA, 15 bp, Homo sapiens
accatggcacatgta

SEQ ID NO: 1210265 - DNA, 15 bp, Homo sapiens
caccatggcacatgt

SEQ ID NO: 1210266 - DNA, 15 bp, Homo sapiens
ccaccatggcacatg

SEQ ID NO: 1210267 - DNA, 15 bp, Homo sapiens
accaccatggcacat

SEQ ID NO: 1210268 - DNA, 15 bp, Homo sapiens
aaccaccatggcaca

SEQ ID NO: 1210269 - DNA, 15 bp, Homo sapiens
aaaccaccatggcac

SEQ ID NO: 1210270 - DNA, 15 bp, Homo sapiens
caaaccaccatggca

SEQ ID NO: 1210271 - DNA, 15 bp, Homo sapiens
ggttgatgggtgcag

SEQ ID NO: 1210272 - DNA, 15 bp, Homo sapiens
cggttgatgggtgca

SEQ ID NO: 1210273 - DNA, 15 bp, Homo sapiens
ccggttgatgggtgc

SEQ ID NO: 1210274 - DNA, 15 bp, Homo sapiens
accggttgatgggtg

SEQ ID NO: 1210275 - DNA, 15 bp, Homo sapiens
gaccggttgatgggt

SEQ ID NO: 1210276 - DNA, 15 bp, Homo sapiens
tgaccggttgatggg

SEQ ID NO: 1210277 - DNA, 15 bp, Homo sapiens
atgaccggttgatgg

SEQ ID NO: 1210278 - DNA, 15 bp, Homo sapiens
gatgaccggttgatg

SEQ ID NO: 1210279 - DNA, 15 bp, Homo sapiens
agatgaccggttgat

SEQ ID NO: 1210280 - DNA, 15 bp, Homo sapiens
tagatgaccggttga

SEQ ID NO: 1210281 - DNA, 15 bp, Homo sapiens
gtagatgaccggttg

SEQ ID NO: 1210282 - DNA, 15 bp, Homo sapiens
tgtagatgaccggtt

SEQ ID NO: 1210283 - DNA, 15 bp, Homo sapiens
atgtagatgaccggt

SEQ ID NO: 1210284 - DNA, 15 bp, Homo sapiens
aatgtagatgaccgg

SEQ ID NO: 1210285 - DNA, 15 bp, Homo sapiens
taatgtagatgaccg

SEQ ID NO: 1210286 - DNA, 15 bp, Homo sapiens
ctaatgtagatgacc

SEQ ID NO: 1210287 - DNA, 15 bp, Homo sapiens
cctaatgtagatgac

SEQ ID NO: 1210288 - DNA, 15 bp, Homo sapiens
acctaatgtagatga

SEQ ID NO: 1210289 - DNA, 15 bp, Homo sapiens
tacctaatgtagatg

SEQ ID NO: 1210290 - DNA, 15 bp, Homo sapiens
atacctaatgtagat

SEQ ID NO: 1210291 - DNA, 15 bp, Homo sapiens
aatacctaatgtaga

SEQ ID NO: 1210292 - DNA, 15 bp, Homo sapiens
aaatacctaatgtag

SEQ ID NO: 1210293 - DNA, 15 bp, Homo sapiens
gaaatacctaatgta

SEQ ID NO: 1210294 - DNA, 15 bp, Homo sapiens
agaaatacctaatgt

SEQ ID NO: 1210295 - DNA, 15 bp, Homo sapiens
gagaaatacctaatg

SEQ ID NO: 1210296 - DNA, 15 bp, Homo sapiens
ggagaaatacctaat

SEQ ID NO: 1210297 - DNA, 15 bp, Homo sapiens
aggagaaatacctaa

SEQ ID NO: 1210298 - DNA, 15 bp, Homo sapiens
taggagaaataccta

SEQ ID NO: 1210299 - DNA, 15 bp, Homo sapiens
ttaggagaaatacct

SEQ ID NO: 1210300 - DNA, 15 bp, Homo sapiens
attaggagaaatacc

SEQ ID NO: 1210301 - DNA, 15 bp, Homo sapiens
cattaggagaaatac

SEQ ID NO: 1210302 - DNA, 15 bp, Homo sapiens
gcattaggagaaata

SEQ ID NO: 1210303 - DNA, 15 bp, Homo sapiens
agcattaggagaaat

SEQ ID NO: 1210304 - DNA, 15 bp, Homo sapiens
tagcattaggagaaa

SEQ ID NO: 1210305 - DNA, 15 bp, Homo sapiens
atagcattaggagaa

SEQ ID NO: 1210306 - DNA, 15 bp, Homo sapiens
gatagcattaggaga

SEQ ID NO: 1210307 - DNA, 15 bp, Homo sapiens
ggatagcattaggag

SEQ ID NO: 1210308 - DNA, 15 bp, Homo sapiens
gggatagcattagga

SEQ ID NO: 1210309 - DNA, 15 bp, Homo sapiens
agggatagcattagg

SEQ ID NO: 1210310 - DNA, 15 bp, Homo sapiens
aagggatagcattag

SEQ ID NO: 1210311 - DNA, 15 bp, Homo sapiens
gaagggatagcatta

SEQ ID NO: 1210312 - DNA, 15 bp, Homo sapiens
ggaagggatagcatt

SEQ ID NO: 1210313 - DNA, 15 bp, Homo sapiens
gggaagggatagcat

SEQ ID NO: 1210314 - DNA, 15 bp, Homo sapiens
agggaagggatagca

SEQ ID NO: 1210315 - DNA, 15 bp, Homo sapiens
tagggaagggatagc

SEQ ID NO: 1210316 - DNA, 15 bp, Homo sapiens
ctagggaagggatag

SEQ ID NO: 1210317 - DNA, 15 bp, Homo sapiens
gctagggaagggata

SEQ ID NO: 1210318 - DNA, 15 bp, Homo sapiens
ggctagggaagggat

SEQ ID NO: 1210319 - DNA, 15 bp, Homo sapiens
gggctagggaaggga

SEQ ID NO: 1210320 - DNA, 15 bp, Homo sapiens
agggctagggaaggg

SEQ ID NO: 1210321 - DNA, 15 bp, Homo sapiens
gagggctagggaagg

SEQ ID NO: 1210322 - DNA, 15 bp, Homo sapiens
ggagggctagggaag

SEQ ID NO: 1210323 - DNA, 15 bp, Homo sapiens
tggagggctagggaa

SEQ ID NO: 1210324 - DNA, 15 bp, Homo sapiens
gtggagggctaggga

SEQ ID NO: 1210325 - DNA, 15 bp, Homo sapiens
agtggagggctaggg

SEQ ID NO: 1210326 - DNA, 15 bp, Homo sapiens
gagtggagggctagg

SEQ ID NO: 1210327 - DNA, 15 bp, Homo sapiens
agagtggagggctag

SEQ ID NO: 1210328 - DNA, 15 bp, Homo sapiens
gagagtggagggcta

SEQ ID NO: 1210329 - DNA, 15 bp, Homo sapiens
ggagagtggagggct

SEQ ID NO: 1210330 - DNA, 15 bp, Homo sapiens
gggagagtggagggc

SEQ ID NO: 1210331 - DNA, 15 bp, Homo sapiens
cgggagagtggaggg

SEQ ID NO: 1210332 - DNA, 15 bp, Homo sapiens
ccgggagagtggagg

SEQ ID NO: 1210333 - DNA, 15 bp, Homo sapiens
accgggagagtggag

SEQ ID NO: 1210334 - DNA, 15 bp, Homo sapiens
aaccgggagagtgga

SEQ ID NO: 1210335 - DNA, 15 bp, Homo sapiens
aaaccgggagagtgg

SEQ ID NO: 1210336 - DNA, 15 bp, Homo sapiens
aaaaccgggagagtg

SEQ ID NO: 1210337 - DNA, 15 bp, Homo sapiens
aaaaaccgggagagt

SEQ ID NO: 1210338 - DNA, 15 bp, Homo sapiens
aaaaaaccgggagag

SEQ ID NO: 1210339 - DNA, 15 bp, Homo sapiens
caaaaaaccgggaga

SEQ ID NO: 1210340 - DNA, 15 bp, Homo sapiens
acaaaaaaccgggag

SEQ ID NO: 1210341 - DNA, 15 bp, Homo sapiens
aacaaaaaaccggga

SEQ ID NO: 1210342 - DNA, 15 bp, Homo sapiens
aaacaaaaaaccggg

SEQ ID NO: 1210343 - DNA, 15 bp, Homo sapiens
aaaacaaaaaaccgg

SEQ ID NO: 1210344 - DNA, 15 bp, Homo sapiens
caaaacaaaaaaccg

SEQ ID NO: 1210345 - DNA, 15 bp, Homo sapiens
acaaaacaaaaaacc

SEQ ID NO: 1210346 - DNA, 15 bp, Homo sapiens
aacaaaacaaaaaac

SEQ ID NO: 1210347 - DNA, 15 bp, Homo sapiens
caacaaaacaaaaca

SEQ ID NO: 1210348 - DNA, 15 bp, Homo sapiens
acaacaaaacaaaac

SEQ ID NO: 1210349 - DNA, 15 bp, Homo sapiens
caaaacaacaaaaca

SEQ ID NO: 1210350 - DNA, 15 bp, Homo sapiens
acaaaacaacaaaac

SEQ ID NO: 1210351 - DNA, 15 bp, Homo sapiens
aacaaaacaacaaaa

SEQ ID NO: 1210352 - DNA, 15 bp, Homo sapiens
aaaaacaaaacaaca

SEQ ID NO: 1210353 - DNA, 15 bp, Homo sapiens
taaaaacaaaacaac

SEQ ID NO: 1210354 - DNA, 15 bp, Homo sapiens
tactaaaaacaaaac

SEQ ID NO: 1210355 - DNA, 15 bp, Homo sapiens
ctactaaaaacaaaa

SEQ ID NO: 1210356 - DNA, 15 bp, Homo sapiens
tctactaaaaacaaa

SEQ ID NO: 1210357 - DNA, 15 bp, Homo sapiens
ctctactaaaaacaa

SEQ ID NO: 1210358 - DNA, 15 bp, Homo sapiens
catggtgagaccctg

SEQ ID NO: 1210359 - DNA, 15 bp, Homo sapiens
acatggtgagaccct

SEQ ID NO: 1210360 - DNA, 15 bp, Homo sapiens
aacatggtgagaccc

SEQ ID NO: 1210361 - DNA, 15 bp, Homo sapiens
caacatggtgagacc

SEQ ID NO: 1210362 - DNA, 15 bp, Homo sapiens
gcaacatggtgagac

SEQ ID NO: 1210363 - DNA, 15 bp, Homo sapiens
ggcaacatggtgaga

SEQ ID NO: 1210364 - DNA, 15 bp, Homo sapiens
gggcaacatggtgag

SEQ ID NO: 1210365 - DNA, 15 bp, Homo sapiens
tgggcaacatggtga

SEQ ID NO: 1210366 - DNA, 15 bp, Homo sapiens
ctgggcaacatggtg

SEQ ID NO: 1210367 - DNA, 15 bp, Homo sapiens
cctgggcaacatggt

SEQ ID NO: 1210368 - DNA, 15 bp, Homo sapiens
tagcctgggcaacat

SEQ ID NO: 1210369 - DNA, 15 bp, Homo sapiens
ggtgggcggatcact

SEQ ID NO: 1210370 - DNA, 15 bp, Homo sapiens
gtcacacctgtaatc

SEQ ID NO: 1210371 - DNA, 15 bp, Homo sapiens
ggtcacacctgtaat

SEQ ID NO: 1210372 - DNA, 15 bp, Homo sapiens
gggtcacacctgtaa

SEQ ID NO: 1210373 - DNA, 15 bp, Homo sapiens
tgggtcacacctgta

SEQ ID NO: 1210374 - DNA, 15 bp, Homo sapiens
gtgggtcacacctgt

SEQ ID NO: 1210375 - DNA, 15 bp, Homo sapiens
agtgggtcacacctg

SEQ ID NO: 1210376 - DNA, 15 bp, Homo sapiens
tagtgggtcacacct

SEQ ID NO: 1210377 - DNA, 15 bp, Homo sapiens
gtagtgggtcacacc

SEQ ID NO: 1210378 - DNA, 15 bp, Homo sapiens
tgtagtgggtcacac

SEQ ID NO: 1210379 - DNA, 15 bp, Homo sapiens
gtgtagtgggtcaca

SEQ ID NO: 1210380 - DNA, 15 bp, Homo sapiens
agtgtagtgggtcac

SEQ ID NO: 1210381 - DNA, 15 bp, Homo sapiens
gagtgtagtgggtca

SEQ ID NO: 1210382 - DNA, 15 bp, Homo sapiens
cgagtgtagtgggtc

SEQ ID NO: 1210383 - DNA, 15 bp, Homo sapiens
ccgagtgtagtgggt

SEQ ID NO: 1210384 - DNA, 15 bp, Homo sapiens
gccgagtgtagtggg

SEQ ID NO: 1210385 - DNA, 15 bp, Homo sapiens
ggccgagtgtagtgg

SEQ ID NO: 1210386 - DNA, 15 bp, Homo sapiens
aggccgagtgtagtg

SEQ ID NO: 1210387 - DNA, 15 bp, Homo sapiens
aaggccgagtgtagt

SEQ ID NO: 1210388 - DNA, 15 bp, Homo sapiens
taaggccgagtgtag

SEQ ID NO: 1210389 - DNA, 15 bp, Homo sapiens
ataaggccgagtgta

SEQ ID NO: 1210390 - DNA, 15 bp, Homo sapiens
aataaggccgagtgt

SEQ ID NO: 1210391 - DNA, 15 bp, Homo sapiens
aaataaggccgagtg

SEQ ID NO: 1210392 - DNA, 15 bp, Homo sapiens
aaaataaggccgagt

SEQ ID NO: 1210393 - DNA, 15 bp, Homo sapiens
gaaaataaggccgag

SEQ ID NO: 1210394 - DNA, 15 bp, Homo sapiens
tgaaaataaggccga

SEQ ID NO: 1210395 - DNA, 15 bp, Homo sapiens
gtgaaaataaggccg

SEQ ID NO: 1210396 - DNA, 15 bp, Homo sapiens
agtgaaaataaggcc

SEQ ID NO: 1210397 - DNA, 15 bp, Homo sapiens
aagtgaaaataaggc

SEQ ID NO: 1210398 - DNA, 15 bp, Homo sapiens
taagtgaaaataagg

SEQ ID NO: 1210399 - DNA, 15 bp, Homo sapiens
ataagtgaaaataag

SEQ ID NO: 1210400 - DNA, 15 bp, Homo sapiens
aataagtgaaaataa

SEQ ID NO: 1210401 - DNA, 15 bp, Homo sapiens
aaataagtgaaaata

SEQ ID NO: 1210402 - DNA, 15 bp, Homo sapiens
taaataagtgaaaat

SEQ ID NO: 1210403 - DNA, 15 bp, Homo sapiens
ataaataagtgaaaa

SEQ ID NO: 1210404 - DNA, 15 bp, Homo sapiens
cataaataagtgaaa

SEQ ID NO: 1210405 - DNA, 15 bp, Homo sapiens
gcataaataagtgaa

SEQ ID NO: 1210406 - DNA, 15 bp, Homo sapiens
tgcataaataagtga

SEQ ID NO: 1210407 - DNA, 15 bp, Homo sapiens
ttgcataaataagtg

SEQ ID NO: 1210408 - DNA, 15 bp, Homo sapiens
attgcataaataagt

SEQ ID NO: 1210409 - DNA, 15 bp, Homo sapiens
aattgcataaataag

SEQ ID NO: 1210410 - DNA, 15 bp, Homo sapiens
aaattgcataaataa

SEQ ID NO: 1210411 - DNA, 15 bp, Homo sapiens
aaaattgcataaata

SEQ ID NO: 1210412 - DNA, 15 bp, Homo sapiens
gaaaattgcataaat

SEQ ID NO: 1210413 - DNA, 15 bp, Homo sapiens
tgaaaattgcataaa

SEQ ID NO: 1210414 - DNA, 15 bp, Homo sapiens
gtgaaaattgcataa

SEQ ID NO: 1210415 - DNA, 15 bp, Homo sapiens
agtgaaaattgcata

SEQ ID NO: 1210416 - DNA, 15 bp, Homo sapiens
tagtgaaaattgcat

SEQ ID NO: 1210417 - DNA, 15 bp, Homo sapiens
atagtgaaaattgca

SEQ ID NO: 1210418 - DNA, 15 bp, Homo sapiens
aatagtgaaaattgc

SEQ ID NO: 1210419 - DNA, 15 bp, Homo sapiens
caatagtgaaaattg

SEQ ID NO: 1210420 - DNA, 15 bp, Homo sapiens
gcaatagtgaaaatt

SEQ ID NO: 1210421 - DNA, 15 bp, Homo sapiens
agcaatagtgaaaat

SEQ ID NO: 1210422 - DNA, 15 bp, Homo sapiens
tagcaatagtgaaaa

SEQ ID NO: 1210423 - DNA, 15 bp, Homo sapiens
atagcaatagtgaaa

SEQ ID NO: 1210424 - DNA, 15 bp, Homo sapiens
tatagcaatagtgaa

SEQ ID NO: 1210425 - DNA, 15 bp, Homo sapiens
atatagcaatagtga

SEQ ID NO: 1210426 - DNA, 15 bp, Homo sapiens
aatatagcaatagtg

SEQ ID NO: 1210427 - DNA, 15 bp, Homo sapiens
gaatatagcaatagt

SEQ ID NO: 1210428 - DNA, 15 bp, Homo sapiens
agaatatagcaatag

SEQ ID NO: 1210429 - DNA, 15 bp, Homo sapiens
tagaatatagcaata

SEQ ID NO: 1210430 - DNA, 15 bp, Homo sapiens
ctagaatatagcaat

SEQ ID NO: 1210431 - DNA, 15 bp, Homo sapiens
cctagaatatagcaa

SEQ ID NO: 1210432 - DNA, 15 bp, Homo sapiens
tcctagaatatagca

SEQ ID NO: 1210433 - DNA, 15 bp, Homo sapiens
ctcctagaatatagc

SEQ ID NO: 1210434 - DNA, 15 bp, Homo sapiens
cctcctagaatatag

SEQ ID NO: 1210435 - DNA, 15 bp, Homo sapiens
gcctcctagaatata

SEQ ID NO: 1210436 - DNA, 15 bp, Homo sapiens
tgcctcctagaatat

SEQ ID NO: 1210437 - DNA, 15 bp, Homo sapiens
gtgcctcctagaata

SEQ ID NO: 1210438 - DNA, 15 bp, Homo sapiens
agtgcctcctagaat

SEQ ID NO: 1210439 - DNA, 15 bp, Homo sapiens
cagtgcctcctagaa

SEQ ID NO: 1210440 - DNA, 15 bp, Homo sapiens
acagtgcctcctaga

SEQ ID NO: 1210441 - DNA, 15 bp, Homo sapiens
cacagtgcctcctag

SEQ ID NO: 1210442 - DNA, 15 bp, Homo sapiens
ccacagtgcctccta

SEQ ID NO: 1210443 - DNA, 15 bp, Homo sapiens
tccacagtgcctcct

SEQ ID NO: 1210444 - DNA, 15 bp, Homo sapiens
ttccacagtgcctcc

SEQ ID NO: 1210445 - DNA, 15 bp, Homo sapiens
attccacagtgcctc

SEQ ID NO: 1210446 - DNA, 15 bp, Homo sapiens
aattccacagtgcct

SEQ ID NO: 1210447 - DNA, 15 bp, Homo sapiens
caattccacagtgcc

SEQ ID NO: 1210448 - DNA, 15 bp, Homo sapiens
gcaattccacagtgc

SEQ ID NO: 1210449 - DNA, 15 bp, Homo sapiens
tgcaattccacagtg

SEQ ID NO: 1210450 - DNA, 15 bp, Homo sapiens
gtgcaattccacagt

SEQ ID NO: 1210451 - DNA, 15 bp, Homo sapiens
agtgcaattccacag

SEQ ID NO: 1210452 - DNA, 15 bp, Homo sapiens
cagtgcaattccaca

SEQ ID NO: 1210453 - DNA, 15 bp, Homo sapiens
acagtgcaattccac

SEQ ID NO: 1210454 - DNA, 15 bp, Homo sapiens
cacagtgcaattcca

SEQ ID NO: 1210455 - DNA, 15 bp, Homo sapiens
ccacagtgcaattcc

SEQ ID NO: 1210456 - DNA, 15 bp, Homo sapiens
tccacagtgcaattc

SEQ ID NO: 1210457 - DNA, 15 bp, Homo sapiens
ttccacagtgcaatt

SEQ ID NO: 1210458 - DNA, 15 bp, Homo sapiens
attccacagtgcaat

SEQ ID NO: 1210459 - DNA, 15 bp, Homo sapiens
aattccacagtgcaa

SEQ ID NO: 1210460 - DNA, 15 bp, Homo sapiens
aaattccacagtgca

SEQ ID NO: 1210461 - DNA, 15 bp, Homo sapiens
aaaattccacagtgc

SEQ ID NO: 1210462 - DNA, 15 bp, Homo sapiens
taaaattccacagtg

SEQ ID NO: 1210463 - DNA, 15 bp, Homo sapiens
ctaaaattccacagt

SEQ ID NO: 1210464 - DNA, 15 bp, Homo sapiens
actaaaattccacag

SEQ ID NO: 1210465 - DNA, 15 bp, Homo sapiens
tactaaaattccaca

SEQ ID NO: 1210466 - DNA, 15 bp, Homo sapiens
atactaaaattccac

SEQ ID NO: 1210467 - DNA, 15 bp, Homo sapiens
aatactaaaattcca

SEQ ID NO: 1210468 - DNA, 15 bp, Homo sapiens
caatactaaaattcc

SEQ ID NO: 1210469 - DNA, 15 bp, Homo sapiens
gcaatactaaaattc

SEQ ID NO: 1210470 - DNA, 15 bp, Homo sapiens
agcaatactaaaatt

SEQ ID NO: 1210471 - DNA, 15 bp, Homo sapiens
cagcaatactaaaat

SEQ ID NO: 1210472 - DNA, 15 bp, Homo sapiens
acagcaatactaaaa

SEQ ID NO: 1210473 - DNA, 15 bp, Homo sapiens
tacagcaatactaaa

SEQ ID NO: 1210474 - DNA, 15 bp, Homo sapiens
atacagcaatactaa

SEQ ID NO: 1210475 - DNA, 15 bp, Homo sapiens
aatacagcaatacta

SEQ ID NO: 1210476 - DNA, 15 bp, Homo sapiens
aaatacagcaatact

SEQ ID NO: 1210477 - DNA, 15 bp, Homo sapiens
gaaatacagcaatac

SEQ ID NO: 1210478 - DNA, 15 bp, Homo sapiens
tgaaatacagcaata

SEQ ID NO: 1210479 - DNA, 15 bp, Homo sapiens
ctgaaatacagcaat

SEQ ID NO: 1210480 - DNA, 15 bp, Homo sapiens
gctgaaatacagcaa

SEQ ID NO: 1210481 - DNA, 15 bp, Homo sapiens
tgctgaaatacagca

SEQ ID NO: 1210482 - DNA, 15 bp, Homo sapiens
ttgctgaaatacagc

SEQ ID NO: 1210483 - DNA, 15 bp, Homo sapiens
cttgctgaaatacag

SEQ ID NO: 1210484 - DNA, 15 bp, Homo sapiens
gcttgctgaaataca

SEQ ID NO: 1210485 - DNA, 15 bp, Homo sapiens
ggcttgctgaaatac

SEQ ID NO: 1210486 - DNA, 15 bp, Homo sapiens
tggcttgctgaaata

SEQ ID NO: 1210487 - DNA, 15 bp, Homo sapiens
atggcttgctgaaat

SEQ ID NO: 1210488 - DNA, 15 bp, Homo sapiens
catggcttgctgaaa

SEQ ID NO: 1210489 - DNA, 15 bp, Homo sapiens
tcatggcttgctgaa

SEQ ID NO: 1210490 - DNA, 15 bp, Homo sapiens
ctcatggcttgctga

SEQ ID NO: 1210491 - DNA, 15 bp, Homo sapiens
cctcatggcttgctg

SEQ ID NO: 1210492 - DNA, 15 bp, Homo sapiens
acctcatggcttgct

SEQ ID NO: 1210493 - DNA, 15 bp, Homo sapiens
gacctcatggcttgc

SEQ ID NO: 1210494 - DNA, 15 bp, Homo sapiens
agacctcatggcttg

SEQ ID NO: 1210495 - DNA, 15 bp, Homo sapiens
cagacctcatggctt

SEQ ID NO: 1210496 - DNA, 15 bp, Homo sapiens
acagacctcatggct

SEQ ID NO: 1210497 - DNA, 15 bp, Homo sapiens
gacagacctcatggc

SEQ ID NO: 1210498 - DNA, 15 bp, Homo sapiens
tgacagacctcatgg

SEQ ID NO: 1210499 - DNA, 15 bp, Homo sapiens
ctgacagacctcatg

SEQ ID NO: 1210500 - DNA, 15 bp, Homo sapiens
gctgacagacctcat

SEQ ID NO: 1210501 - DNA, 15 bp, Homo sapiens
tgctgacagacctca

SEQ ID NO: 1210502 - DNA, 15 bp, Homo sapiens
gtgctgacagacctc

SEQ ID NO: 1210503 - DNA, 15 bp, Homo sapiens
tgtgctgacagacct

SEQ ID NO: 1210504 - DNA, 15 bp, Homo sapiens
gtgtgctgacagacc

SEQ ID NO: 1210505 - DNA, 15 bp, Homo sapiens
cgtgtgctgacagac

SEQ ID NO: 1210506 - DNA, 15 bp, Homo sapiens
ccgtgtgctgacaga

SEQ ID NO: 1210507 - DNA, 15 bp, Homo sapiens
gccgtgtgctgacag

SEQ ID NO: 1210508 - DNA, 15 bp, Homo sapiens
agccgtgtgctgaca

SEQ ID NO: 1210509 - DNA, 15 bp, Homo sapiens
aagccgtgtgctgac

SEQ ID NO: 1210510 - DNA, 15 bp, Homo sapiens
aaagccgtgtgctga

SEQ ID NO: 1210511 - DNA, 15 bp, Homo sapiens
caaagccgtgtgctg

SEQ ID NO: 1210512 - DNA, 15 bp, Homo sapiens
ccaaagccgtgtgct

SEQ ID NO: 1210513 - DNA, 15 bp, Homo sapiens
cccaaagccgtgtgc

SEQ ID NO: 1210514 - DNA, 15 bp, Homo sapiens
gcccaaagccgtgtg

SEQ ID NO: 1210515 - DNA, 15 bp, Homo sapiens
tgcccaaagccgtgt

SEQ ID NO: 1210516 - DNA, 15 bp, Homo sapiens
atgcccaaagccgtg

SEQ ID NO: 1210517 - DNA, 15 bp, Homo sapiens
aatgcccaaagccgt

SEQ ID NO: 1210518 - DNA, 15 bp, Homo sapiens
aaatgcccaaagccg

SEQ ID NO: 1210519 - DNA, 15 bp, Homo sapiens
aaaatgcccaaagcc

SEQ ID NO: 1210520 - DNA, 15 bp, Homo sapiens
caaaatgcccaaagc

SEQ ID NO: 1210521 - DNA, 15 bp, Homo sapiens
acaaaatgcccaaag

SEQ ID NO: 1210522 - DNA, 15 bp, Homo sapiens
cacaaaatgcccaaa

SEQ ID NO: 1210523 - DNA, 15 bp, Homo sapiens
tcacaaaatgcccaa

SEQ ID NO: 1210524 - DNA, 15 bp, Homo sapiens
ttcacaaaatgccca

SEQ ID NO: 1210525 - DNA, 15 bp, Homo sapiens
cttcacaaaatgccc

SEQ ID NO: 1210526 - DNA, 15 bp, Homo sapiens
tcttcacaaaatgcc

SEQ ID NO: 1210527 - DNA, 15 bp, Homo sapiens
atcttcacaaaatgc

SEQ ID NO: 1210528 - DNA, 15 bp, Homo sapiens
tatcttcacaaaatg

SEQ ID NO: 1210529 - DNA, 15 bp, Homo sapiens
ttatcttcacaaaat

SEQ ID NO: 1210530 - DNA, 15 bp, Homo sapiens
gttatcttcacaaaa

SEQ ID NO: 1210531 - DNA, 15 bp, Homo sapiens
agttatcttcacaaa

SEQ ID NO: 1210532 - DNA, 15 bp, Homo sapiens
cagttatcttcacaa

SEQ ID NO: 1210533 - DNA, 15 bp, Homo sapiens
tcagttatcttcaca

SEQ ID NO: 1210534 - DNA, 15 bp, Homo sapiens
atcagttatcttcac

SEQ ID NO: 1210535 - DNA, 15 bp, Homo sapiens
catcagttatcttca

SEQ ID NO: 1210536 - DNA, 15 bp, Homo sapiens
gcatcagttatcttc

SEQ ID NO: 1210537 - DNA, 15 bp, Homo sapiens
ggcatcagttatctt

SEQ ID NO: 1210538 - DNA, 15 bp, Homo sapiens
tggcatcagttatct

SEQ ID NO: 1210539 - DNA, 15 bp, Homo sapiens
ctggcatcagttatc

SEQ ID NO: 1210540 - DNA, 15 bp, Homo sapiens
gctggcatcagttat

SEQ ID NO: 1210541 - DNA, 15 bp, Homo sapiens
agctggcatcagtta

SEQ ID NO: 1210542 - DNA, 15 bp, Homo sapiens
cagctggcatcagtt

SEQ ID NO: 1210543 - DNA, 15 bp, Homo sapiens
tcagctggcatcagt

SEQ ID NO: 1210544 - DNA, 15 bp, Homo sapiens
ctcagctggcatcag

SEQ ID NO: 1210545 - DNA, 15 bp, Homo sapiens
gctcagctggcatca

SEQ ID NO: 1210546 - DNA, 15 bp, Homo sapiens
ggctcagctggcatc

SEQ ID NO: 1210547 - DNA, 15 bp, Homo sapiens
tggctcagctggcat

SEQ ID NO: 1210548 - DNA, 15 bp, Homo sapiens
ttggctcagctggca

SEQ ID NO: 1210549 - DNA, 15 bp, Homo sapiens
cttggctcagctggc

SEQ ID NO: 1210550 - DNA, 15 bp, Homo sapiens
ccttggctcagctgg

SEQ ID NO: 1210551 - DNA, 15 bp, Homo sapiens
gccttggctcagctg

SEQ ID NO: 1210552 - DNA, 15 bp, Homo sapiens
tgccttggctcagct

SEQ ID NO: 1210553 - DNA, 15 bp, Homo sapiens
ctgccttggctcagc

SEQ ID NO: 1210554 - DNA, 15 bp, Homo sapiens
cctgccttggctcag

SEQ ID NO: 1210555 - DNA, 15 bp, Homo sapiens
acctgccttggctca

SEQ ID NO: 1210556 - DNA, 15 bp, Homo sapiens
aacctgccttggctc

SEQ ID NO: 1210557 - DNA, 15 bp, Homo sapiens
gaacctgccttggct

SEQ ID NO: 1210558 - DNA, 15 bp, Homo sapiens
ggaacctgccttggc

SEQ ID NO: 1210559 - DNA, 15 bp, Homo sapiens
aggaacctgccttgg

SEQ ID NO: 1210560 - DNA, 15 bp, Homo sapiens
caggaacctgccttg

SEQ ID NO: 1210561 - DNA, 15 bp, Homo sapiens
tcaggaacctgcctt

SEQ ID NO: 1210562 - DNA, 15 bp, Homo sapiens
atcaggaacctgcct

SEQ ID NO: 1210563 - DNA, 15 bp, Homo sapiens
aatcaggaacctgcc

SEQ ID NO: 1210564 - DNA, 15 bp, Homo sapiens
gaatcaggaacctgc

SEQ ID NO: 1210565 - DNA, 15 bp, Homo sapiens
ggaatcaggaacctg

SEQ ID NO: 1210566 - DNA, 15 bp, Homo sapiens
tggaatcaggaacct

SEQ ID NO: 1210567 - DNA, 15 bp, Homo sapiens
gtggaatcaggaacc

SEQ ID NO: 1210568 - DNA, 15 bp, Homo sapiens
ggtggaatcaggaac

SEQ ID NO: 1210569 - DNA, 15 bp, Homo sapiens
gggtggaatcaggaa

SEQ ID NO: 1210570 - DNA, 15 bp, Homo sapiens
tgggtggaatcagga

SEQ ID NO: 1210571 - DNA, 15 bp, Homo sapiens
gtgggtggaatcagg

SEQ ID NO: 1210572 - DNA, 15 bp, Homo sapiens
agtgggtggaatcag

SEQ ID NO: 1210573 - DNA, 15 bp, Homo sapiens
cagtgggtggaatca

SEQ ID NO: 1210574 - DNA, 15 bp, Homo sapiens
ccagtgggtggaatc

SEQ ID NO: 1210575 - DNA, 15 bp, Homo sapiens
gccagtgggtggaat

SEQ ID NO: 1210576 - DNA, 15 bp, Homo sapiens
tgccagtgggtggaa

SEQ ID NO: 1210577 - DNA, 15 bp, Homo sapiens
ctgccagtgggtgga

SEQ ID NO: 1210578 - DNA, 15 bp, Homo sapiens
cctgccagtgggtgg

SEQ ID NO: 1210579 - DNA, 15 bp, Homo sapiens
gcctgccagtgggtg

SEQ ID NO: 1210580 - DNA, 15 bp, Homo sapiens
tgcctgccagtgggt

SEQ ID NO: 1210581 - DNA, 15 bp, Homo sapiens
gtgcctgccagtggg

SEQ ID NO: 1210582 - DNA, 15 bp, Homo sapiens
ggtgcctgccagtgg

SEQ ID NO: 1210583 - DNA, 15 bp, Homo sapiens
cggtgcctgccagtg

SEQ ID NO: 1210584 - DNA, 15 bp, Homo sapiens
tcggtgcctgccagt

SEQ ID NO: 1210585 - DNA, 15 bp, Homo sapiens
ctcggtgcctgccag

SEQ ID NO: 1210586 - DNA, 15 bp, Homo sapiens
cctcggtgcctgcca

SEQ ID NO: 1210587 - DNA, 15 bp, Homo sapiens
acctcggtgcctgcc

SEQ ID NO: 1210588 - DNA, 15 bp, Homo sapiens
gacctcggtgcctgc

SEQ ID NO: 1210589 - DNA, 15 bp, Homo sapiens
agacctcggtgcctg

SEQ ID NO: 1210590 - DNA, 15 bp, Homo sapiens
gagacctcggtgcct

SEQ ID NO: 1210591 - DNA, 15 bp, Homo sapiens
agagacctcggtgcc

SEQ ID NO: 1210592 - DNA, 15 bp, Homo sapiens
cagagacctcggtgc

SEQ ID NO: 1210593 - DNA, 15 bp, Homo sapiens
gcagagacctcggtg

SEQ ID NO: 1210594 - DNA, 15 bp, Homo sapiens
agcagagacctcggt

SEQ ID NO: 1210595 - DNA, 15 bp, Homo sapiens
cagcagagacctcgg

SEQ ID NO: 1210596 - DNA, 15 bp, Homo sapiens
acagcagagacctcg

SEQ ID NO: 1210597 - DNA, 15 bp, Homo sapiens
aacagcagagacctc

SEQ ID NO: 1210598 - DNA, 15 bp, Homo sapiens
taacagcagagacct

SEQ ID NO: 1210599 - DNA, 15 bp, Homo sapiens
gtaacagcagagacc

SEQ ID NO: 1210600 - DNA, 15 bp, Homo sapiens
agtaacagcagagac

SEQ ID NO: 1210601 - DNA, 15 bp, Homo sapiens
cagtaacagcagaga

SEQ ID NO: 1210602 - DNA, 15 bp, Homo sapiens
tcagtaacagcagag

SEQ ID NO: 1210603 - DNA, 15 bp, Homo sapiens
atcagtaacagcaga

SEQ ID NO: 1210604 - DNA, 15 bp, Homo sapiens
catcagtaacagcag

SEQ ID NO: 1210605 - DNA, 15 bp, Homo sapiens
ccatcagtaacagca

SEQ ID NO: 1210606 - DNA, 15 bp, Homo sapiens
accatcagtaacagc

SEQ ID NO: 1210607 - DNA, 15 bp, Homo sapiens
aaccatcagtaacag

SEQ ID NO: 1210608 - DNA, 15 bp, Homo sapiens
aaaccatcagtaaca

SEQ ID NO: 1210609 - DNA, 15 bp, Homo sapiens
gaaaccatcagtaac

SEQ ID NO: 1210610 - DNA, 15 bp, Homo sapiens
agaaaccatcagtaa

SEQ ID NO: 1210611 - DNA, 15 bp, Homo sapiens
gagaaaccatcagta

SEQ ID NO: 1210612 - DNA, 15 bp, Homo sapiens
agagaaaccatcagt

SEQ ID NO: 1210613 - DNA, 15 bp, Homo sapiens
cagagaaaccatcag

SEQ ID NO: 1210614 - DNA, 15 bp, Homo sapiens
acagagaaaccatca

SEQ ID NO: 1210615 - DNA, 15 bp, Homo sapiens
cacagagaaaccatc

SEQ ID NO: 1210616 - DNA, 15 bp, Homo sapiens
ccacagagaaaccat

SEQ ID NO: 1210617 - DNA, 15 bp, Homo sapiens
tccacagagaaacca

SEQ ID NO: 1210618 - DNA, 15 bp, Homo sapiens
atccacagagaaacc

SEQ ID NO: 1210619 - DNA, 15 bp, Homo sapiens
aatccacagagaaac

SEQ ID NO: 1210620 - DNA, 15 bp, Homo sapiens
caatccacagagaaa

SEQ ID NO: 1210621 - DNA, 15 bp, Homo sapiens
tcaatccacagagaa

SEQ ID NO: 1210622 - DNA, 15 bp, Homo sapiens
atcaatccacagaga

SEQ ID NO: 1210623 - DNA, 15 bp, Homo sapiens
catcaatccacagag

SEQ ID NO: 1210624 - DNA, 15 bp, Homo sapiens
ccatcaatccacaga

SEQ ID NO: 1210625 - DNA, 15 bp, Homo sapiens
cccatcaatccacag

SEQ ID NO: 1210626 - DNA, 15 bp, Homo sapiens
gcccatcaatccaca

SEQ ID NO: 1210627 - DNA, 15 bp, Homo sapiens
agcccatcaatccac

SEQ ID NO: 1210628 - DNA, 15 bp, Homo sapiens
aagcccatcaatcca

SEQ ID NO: 1210629 - DNA, 15 bp, Homo sapiens
taagcccatcaatcc

SEQ ID NO: 1210630 - DNA, 15 bp, Homo sapiens
ttaagcccatcaatc

SEQ ID NO: 1210631 - DNA, 15 bp, Homo sapiens
cttaagcccatcaat

SEQ ID NO: 1210632 - DNA, 15 bp, Homo sapiens
ccttaagcccatcaa

SEQ ID NO: 1210633 - DNA, 15 bp, Homo sapiens
gccttaagcccatca

SEQ ID NO: 1210634 - DNA, 15 bp, Homo sapiens
ggccttaagcccatc

SEQ ID NO: 1210635 - DNA, 15 bp, Homo sapiens
tggccttaagcccat

SEQ ID NO: 1210636 - DNA, 15 bp, Homo sapiens
ctggccttaagccca

SEQ ID NO: 1210637 - DNA, 15 bp, Homo sapiens
tctggccttaagccc

SEQ ID NO: 1210638 - DNA, 15 bp, Homo sapiens
gtctggccttaagcc

SEQ ID NO: 1210639 - DNA, 15 bp, Homo sapiens
ggtctggccttaagc

SEQ ID NO: 1210640 - DNA, 15 bp, Homo sapiens
tggtctggccttaag

SEQ ID NO: 1210641 - DNA, 15 bp, Homo sapiens
gtggtctggccttaa

SEQ ID NO: 1210642 - DNA, 15 bp, Homo sapiens
tgtggtctggcctta

SEQ ID NO: 1210643 - DNA, 15 bp, Homo sapiens
ctgtggtctggcctt

SEQ ID NO: 1210644 - DNA, 15 bp, Homo sapiens
gctgtggtctggcct

SEQ ID NO: 1210645 - DNA, 15 bp, Homo sapiens
agctgtggtctggcc

SEQ ID NO: 1210646 - DNA, 15 bp, Homo sapiens
cagctgtggtctggc

SEQ ID NO: 1210647 - DNA, 15 bp, Homo sapiens
gcagctgtggtctgg

SEQ ID NO: 1210648 - DNA, 15 bp, Homo sapiens
tgcagctgtggtctg

SEQ ID NO: 1210649 - DNA, 15 bp, Homo sapiens
ttgcagctgtggtct

SEQ ID NO: 1210650 - DNA, 15 bp, Homo sapiens
attgcagctgtggtc

SEQ ID NO: 1210651 - DNA, 15 bp, Homo sapiens
cattgcagctgtggt

SEQ ID NO: 1210652 - DNA, 15 bp, Homo sapiens
ccattgcagctgtgg

SEQ ID NO: 1210653 - DNA, 15 bp, Homo sapiens
gccattgcagctgtg

SEQ ID NO: 1210654 - DNA, 15 bp, Homo sapiens
agccattgcagctgt

SEQ ID NO: 1210655 - DNA, 15 bp, Homo sapiens
gagccattgcagctg

SEQ ID NO: 1210656 - DNA, 15 bp, Homo sapiens
tgagccattgcagct

SEQ ID NO: 1210657 - DNA, 15 bp, Homo sapiens
gtgagccattgcagc

SEQ ID NO: 1210658 - DNA, 15 bp, Homo sapiens
ggtgagccattgcag

SEQ ID NO: 1210659 - DNA, 15 bp, Homo sapiens
aggtgagccattgca

SEQ ID NO: 1210660 - DNA, 15 bp, Homo sapiens
gaggtgagccattgc

SEQ ID NO: 1210661 - DNA, 15 bp, Homo sapiens
agaggtgagccattg

SEQ ID NO: 1210662 - DNA, 15 bp, Homo sapiens
cagaggtgagccatt

SEQ ID NO: 1210663 - DNA, 15 bp, Homo sapiens
gcagaggtgagccat

SEQ ID NO: 1210664 - DNA, 15 bp, Homo sapiens
ggcagaggtgagcca

SEQ ID NO: 1210665 - DNA, 15 bp, Homo sapiens
tggcagaggtgagcc

SEQ ID NO: 1210666 - DNA, 15 bp, Homo sapiens
ttggcagaggtgagc

SEQ ID NO: 1210667 - DNA, 15 bp, Homo sapiens
tttggcagaggtgag

SEQ ID NO: 1210668 - DNA, 15 bp, Homo sapiens
ctttggcagaggtga

SEQ ID NO: 1210669 - DNA, 15 bp, Homo sapiens
cctttggcagaggtg

SEQ ID NO: 1210670 - DNA, 15 bp, Homo sapiens
gcctttggcagaggt

SEQ ID NO: 1210671 - DNA, 15 bp, Homo sapiens
ggcctttggcagagg

SEQ ID NO: 1210672 - DNA, 15 bp, Homo sapiens
tggcctttggcagag

SEQ ID NO: 1210673 - DNA, 15 bp, Homo sapiens
ctggcctttggcaga

SEQ ID NO: 1210674 - DNA, 15 bp, Homo sapiens
cctggcctttggcag

SEQ ID NO: 1210675 - DNA, 15 bp, Homo sapiens
gcctggcctttggca

SEQ ID NO: 1210676 - DNA, 15 bp, Homo sapiens
agcctggcctttggc

SEQ ID NO: 1210677 - DNA, 15 bp, Homo sapiens
gagcctggcctttgg

SEQ ID NO: 1210678 - DNA, 15 bp, Homo sapiens
cgagcctggcctttg

SEQ ID NO: 1210679 - DNA, 15 bp, Homo sapiens
acgagcctggccttt

SEQ ID NO: 1210680 - DNA, 15 bp, Homo sapiens
aacgagcctggcctt

SEQ ID NO: 1210681 - DNA, 15 bp, Homo sapiens
caacgagcctggcct

SEQ ID NO: 1210682 - DNA, 15 bp, Homo sapiens
ccaacgagcctggcc

SEQ ID NO: 1210683 - DNA, 15 bp, Homo sapiens
cccaacgagcctggc

SEQ ID NO: 1210684 - DNA, 15 bp, Homo sapiens
ccccaacgagcctgg

SEQ ID NO: 1210685 - DNA, 15 bp, Homo sapiens
gccccaacgagcctg

SEQ ID NO: 1210686 - DNA, 15 bp, Homo sapiens
tgccccaacgagcct

SEQ ID NO: 1210687 - DNA, 15 bp, Homo sapiens
ctgccccaacgagcc

SEQ ID NO: 1210688 - DNA, 15 bp, Homo sapiens
tctgccccaacgagc

SEQ ID NO: 1210689 - DNA, 15 bp, Homo sapiens
ctctgccccaacgag

SEQ ID NO: 1210690 - DNA, 15 bp, Homo sapiens
tctctgccccaacga

SEQ ID NO: 1210691 - DNA, 15 bp, Homo sapiens
gtctctgccccaacg

SEQ ID NO: 1210692 - DNA, 15 bp, Homo sapiens
ggtctctgccccaac

SEQ ID NO: 1210693 - DNA, 15 bp, Homo sapiens
aggtctctgccccaa

SEQ ID NO: 1210694 - DNA, 15 bp, Homo sapiens
taggtctctgcccca

SEQ ID NO: 1210695 - DNA, 15 bp, Homo sapiens
ataggtctctgcccc

SEQ ID NO: 1210696 - DNA, 15 bp, Homo sapiens
aataggtctctgccc

SEQ ID NO: 1210697 - DNA, 15 bp, Homo sapiens
gaataggtctctgcc

SEQ ID NO: 1210698 - DNA, 15 bp, Homo sapiens
ggaataggtctctgc

SEQ ID NO: 1210699 - DNA, 15 bp, Homo sapiens
cggaataggtctctg

SEQ ID NO: 1210700 - DNA, 15 bp, Homo sapiens
ccggaataggtctct

SEQ ID NO: 1210701 - DNA, 15 bp, Homo sapiens
tccggaataggtctc

SEQ ID NO: 1210702 - DNA, 15 bp, Homo sapiens
gtccggaataggtct

SEQ ID NO: 1210703 - DNA, 15 bp, Homo sapiens
agtccggaataggtc

SEQ ID NO: 1210704 - DNA, 15 bp, Homo sapiens
cagtccggaataggt

SEQ ID NO: 1210705 - DNA, 15 bp, Homo sapiens
tcagtccggaatagg

SEQ ID NO: 1210706 - DNA, 15 bp, Homo sapiens
ctcagtccggaatag

SEQ ID NO: 1210707 - DNA, 15 bp, Homo sapiens
gctcagtccggaata

SEQ ID NO: 1210708 - DNA, 15 bp, Homo sapiens
ggctcagtccggaat

SEQ ID NO: 1210709 - DNA, 15 bp, Homo sapiens
aggctcagtccggaa

SEQ ID NO: 1210710 - DNA, 15 bp, Homo sapiens
gaggctcagtccgga

SEQ ID NO: 1210711 - DNA, 15 bp, Homo sapiens
ggaggctcagtccgg

SEQ ID NO: 1210712 - DNA, 15 bp, Homo sapiens
aggaggctcagtccg

SEQ ID NO: 1210713 - DNA, 15 bp, Homo sapiens
caggaggctcagtcc

SEQ ID NO: 1210714 - DNA, 15 bp, Homo sapiens
ccaggaggctcagtc

SEQ ID NO: 1210715 - DNA, 15 bp, Homo sapiens
accaggaggctcagt

SEQ ID NO: 1210716 - DNA, 15 bp, Homo sapiens
caccaggaggctcag

SEQ ID NO: 1210717 - DNA, 15 bp, Homo sapiens
tcaccaggaggctca

SEQ ID NO: 1210718 - DNA, 15 bp, Homo sapiens
ttcaccaggaggctc

SEQ ID NO: 1210719 - DNA, 15 bp, Homo sapiens
attcaccaggaggct

SEQ ID NO: 1210720 - DNA, 15 bp, Homo sapiens
aattcaccaggaggc

SEQ ID NO: 1210721 - DNA, 15 bp, Homo sapiens
taattcaccaggagg

SEQ ID NO: 1210722 - DNA, 15 bp, Homo sapiens
ctaattcaccaggag

SEQ ID NO: 1210723 - DNA, 15 bp, Homo sapiens
tctaattcaccagga

SEQ ID NO: 1210724 - DNA, 15 bp, Homo sapiens
ctctaattcaccagg

SEQ ID NO: 1210725 - DNA, 15 bp, Homo sapiens
tctctaattcaccag

SEQ ID NO: 1210726 - DNA, 15 bp, Homo sapiens
ctctctaattcacca

SEQ ID NO: 1210727 - DNA, 15 bp, Homo sapiens
cctctctaattcacc

SEQ ID NO: 1210728 - DNA, 15 bp, Homo sapiens
acctctctaattcac

SEQ ID NO: 1210729 - DNA, 15 bp, Homo sapiens
tacctctctaattca

SEQ ID NO: 1210730 - DNA, 15 bp, Homo sapiens
ctacctctctaattc

SEQ ID NO: 1210731 - DNA, 15 bp, Homo sapiens
tctacctctctaatt

SEQ ID NO: 1210732 - DNA, 15 bp, Homo sapiens
ttctacctctctaat

SEQ ID NO: 1210733 - DNA, 15 bp, Homo sapiens
tttctacctctctaa

SEQ ID NO: 1210734 - DNA, 15 bp, Homo sapiens
ttttctacctctcta

SEQ ID NO: 1210735 - DNA, 15 bp, Homo sapiens
attttctacctctct

SEQ ID NO: 1210736 - DNA, 15 bp, Homo sapiens
cattttctacctctc

SEQ ID NO: 1210737 - DNA, 15 bp, Homo sapiens
ccattttctacctct

SEQ ID NO: 1210738 - DNA, 15 bp, Homo sapiens
cccattttctacctc

SEQ ID NO: 1210739 - DNA, 15 bp, Homo sapiens
tcccattttctacct

SEQ ID NO: 1210740 - DNA, 15 bp, Homo sapiens
ctcccattttctacc

SEQ ID NO: 1210741 - DNA, 15 bp, Homo sapiens
cctcccattttctac

SEQ ID NO: 1210742 - DNA, 15 bp, Homo sapiens
tcctcccattttcta

SEQ ID NO: 1210743 - DNA, 15 bp, Homo sapiens
gtcctcccattttct

SEQ ID NO: 1210744 - DNA, 15 bp, Homo sapiens
cgtcctcccattttc

SEQ ID NO: 1210745 - DNA, 15 bp, Homo sapiens
ccgtcctcccatttt

SEQ ID NO: 1210746 - DNA, 15 bp, Homo sapiens
cccgtcctcccattt

SEQ ID NO: 1210747 - DNA, 15 bp, Homo sapiens
ccccgtcctcccatt

SEQ ID NO: 1210748 - DNA, 15 bp, Homo sapiens
cccccgtcctcccat

SEQ ID NO: 1210749 - DNA, 15 bp, Homo sapiens
gcccccgtcctccca

SEQ ID NO: 1210750 - DNA, 15 bp, Homo sapiens
tgcccccgtcctccc

SEQ ID NO: 1210751 - DNA, 15 bp, Homo sapiens
ctgcccccgtcctcc

SEQ ID NO: 1210752 - DNA, 15 bp, Homo sapiens
cctgcccccgtcctc

SEQ ID NO: 1210753 - DNA, 15 bp, Homo sapiens
acctgcccccgtcct

SEQ ID NO: 1210754 - DNA, 15 bp, Homo sapiens
cacctgcccccgtcc

SEQ ID NO: 1210755 - DNA, 15 bp, Homo sapiens
ccacctgcccccgtc

SEQ ID NO: 1210756 - DNA, 15 bp, Homo sapiens
cccacctgcccccgt

SEQ ID NO: 1210757 - DNA, 15 bp, Homo sapiens
gcccacctgcccccg

SEQ ID NO: 1210758 - DNA, 15 bp, Homo sapiens
agcccacctgccccc

SEQ ID NO: 1210759 - DNA, 15 bp, Homo sapiens
tagcccacctgcccc

SEQ ID NO: 1210760 - DNA, 15 bp, Homo sapiens
atagcccacctgccc

SEQ ID NO: 1210761 - DNA, 15 bp, Homo sapiens
aatagcccacctgcc

SEQ ID NO: 1210762 - DNA, 15 bp, Homo sapiens
taatagcccacctgc

SEQ ID NO: 1210763 - DNA, 15 bp, Homo sapiens
gtaatagcccacctg

SEQ ID NO: 1210764 - DNA, 15 bp, Homo sapiens
tgtaatagcccacct

SEQ ID NO: 1210765 - DNA, 15 bp, Homo sapiens
ctgtaatagcccacc

SEQ ID NO: 1210766 - DNA, 15 bp, Homo sapiens
gctgtaatagcccac

SEQ ID NO: 1210767 - DNA, 15 bp, Homo sapiens
cgctgtaatagccca

SEQ ID NO: 1210768 - DNA, 15 bp, Homo sapiens
tcgctgtaatagccc

SEQ ID NO: 1210769 - DNA, 15 bp, Homo sapiens
ctcgctgtaatagcc

SEQ ID NO: 1210770 - DNA, 15 bp, Homo sapiens
cctcgctgtaatagc

SEQ ID NO: 1210771 - DNA, 15 bp, Homo sapiens
tcctcgctgtaatag

SEQ ID NO: 1210772 - DNA, 15 bp, Homo sapiens
ttcctcgctgtaata

SEQ ID NO: 1210773 - DNA, 15 bp, Homo sapiens
tttcctcgctgtaat

SEQ ID NO: 1210774 - DNA, 15 bp, Homo sapiens
ttttcctcgctgtaa

SEQ ID NO: 1210775 - DNA, 15 bp, Homo sapiens
attttcctcgctgta

SEQ ID NO: 1210776 - DNA, 15 bp, Homo sapiens
cattttcctcgctgt

SEQ ID NO: 1210777 - DNA, 15 bp, Homo sapiens
gcattttcctcgctg

SEQ ID NO: 1210778 - DNA, 15 bp, Homo sapiens
ggcattttcctcgct

SEQ ID NO: 1210779 - DNA, 15 bp, Homo sapiens
gggcattttcctcgc

SEQ ID NO: 1210780 - DNA, 15 bp, Homo sapiens
tgggcattttcctcg

SEQ ID NO: 1210781 - DNA, 15 bp, Homo sapiens
gtgggcattttcctc

SEQ ID NO: 1210782 - DNA, 15 bp, Homo sapiens
ggtgggcattttcct

SEQ ID NO: 1210783 - DNA, 15 bp, Homo sapiens
gggtgggcattttcc

SEQ ID NO: 1210784 - DNA, 15 bp, Homo sapiens
agggtgggcattttc

SEQ ID NO: 1210785 - DNA, 15 bp, Homo sapiens
cagggtgggcatttt

SEQ ID NO: 1210786 - DNA, 15 bp, Homo sapiens
tcagggtgggcattt

SEQ ID NO: 1210787 - DNA, 15 bp, Homo sapiens
ctcagggtgggcatt

SEQ ID NO: 1210788 - DNA, 15 bp, Homo sapiens
actcagggtgggcat

SEQ ID NO: 1210789 - DNA, 15 bp, Homo sapiens
aactcagggtgggca

SEQ ID NO: 1210790 - DNA, 15 bp, Homo sapiens
caactcagggtgggc

SEQ ID NO: 1210791 - DNA, 15 bp, Homo sapiens
acaactcagggtggg

SEQ ID NO: 1210792 - DNA, 15 bp, Homo sapiens
tacaactcagggtgg

SEQ ID NO: 1210793 - DNA, 15 bp, Homo sapiens
atacaactcagggtg

SEQ ID NO: 1210794 - DNA, 15 bp, Homo sapiens
aatacaactcagggt

SEQ ID NO: 1210795 - DNA, 15 bp, Homo sapiens
taatacaactcaggg

SEQ ID NO: 1210796 - DNA, 15 bp, Homo sapiens
ctaatacaactcagg

SEQ ID NO: 1210797 - DNA, 15 bp, Homo sapiens
tctaatacaactcag

SEQ ID NO: 1210798 - DNA, 15 bp, Homo sapiens
atctaatacaactca

SEQ ID NO: 1210799 - DNA, 15 bp, Homo sapiens
tatctaatacaactc

SEQ ID NO: 1210800 - DNA, 15 bp, Homo sapiens
ttatctaatacaact

SEQ ID NO: 1210801 - DNA, 15 bp, Homo sapiens
gttatctaatacaac

SEQ ID NO: 1210802 - DNA, 15 bp, Homo sapiens
agttatctaatacaa

SEQ ID NO: 1210803 - DNA, 15 bp, Homo sapiens
aagttatctaataca

SEQ ID NO: 1210804 - DNA, 15 bp, Homo sapiens
aaagttatctaatac

SEQ ID NO: 1210805 - DNA, 15 bp, Homo sapiens
caaagttatctaata

SEQ ID NO: 1210806 - DNA, 15 bp, Homo sapiens
ccaaagttatctaat

SEQ ID NO: 1210807 - DNA, 15 bp, Homo sapiens
cccaaagttatctaa

SEQ ID NO: 1210808 - DNA, 15 bp, Homo sapiens
tcccaaagttatcta

SEQ ID NO: 1210809 - DNA, 15 bp, Homo sapiens
ctcccaaagttatct

SEQ ID NO: 1210810 - DNA, 15 bp, Homo sapiens
actcccaaagttatc

SEQ ID NO: 1210811 - DNA, 15 bp, Homo sapiens
aactcccaaagttat

SEQ ID NO: 1210812 - DNA, 15 bp, Homo sapiens
gaactcccaaagtta

SEQ ID NO: 1210813 - DNA, 15 bp, Homo sapiens
tgaactcccaaagtt

SEQ ID NO: 1210814 - DNA, 15 bp, Homo sapiens
ctgaactcccaaagt

SEQ ID NO: 1210815 - DNA, 15 bp, Homo sapiens
cctgaactcccaaag

SEQ ID NO: 1210816 - DNA, 15 bp, Homo sapiens
tcctgaactcccaaa

SEQ ID NO: 1210817 - DNA, 15 bp, Homo sapiens
ttcctgaactcccaa

SEQ ID NO: 1210818 - DNA, 15 bp, Homo sapiens
gttcctgaactccca

SEQ ID NO: 1210819 - DNA, 15 bp, Homo sapiens
agttcctgaactccc

SEQ ID NO: 1210820 - DNA, 15 bp, Homo sapiens
aagttcctgaactcc

SEQ ID NO: 1210821 - DNA, 15 bp, Homo sapiens
aaagttcctgaactc

SEQ ID NO: 1210822 - DNA, 15 bp, Homo sapiens
gaaagttcctgaact

SEQ ID NO: 1210823 - DNA, 15 bp, Homo sapiens
ggaaagttcctgaac

SEQ ID NO: 1210824 - DNA, 15 bp, Homo sapiens
tggaaagttcctgaa

SEQ ID NO: 1210825 - DNA, 15 bp, Homo sapiens
ttggaaagttcctga

SEQ ID NO: 1210826 - DNA, 15 bp, Homo sapiens
attggaaagttcctg

SEQ ID NO: 1210827 - DNA, 15 bp, Homo sapiens
tattggaaagttcct

SEQ ID NO: 1210828 - DNA, 15 bp, Homo sapiens
ttattggaaagttcc

SEQ ID NO: 1210829 - DNA, 15 bp, Homo sapiens
tttattggaaagttc

SEQ ID NO: 1210830 - DNA, 15 bp, Homo sapiens
ctttattggaaagtt

SEQ ID NO: 1210831 - DNA, 15 bp, Homo sapiens
actttattggaaagt

SEQ ID NO: 1210832 - DNA, 15 bp, Homo sapiens
cactttattggaaag

SEQ ID NO: 1210833 - DNA, 15 bp, Homo sapiens
ccactttattggaaa

SEQ ID NO: 1210834 - DNA, 15 bp, Homo sapiens
cccactttattggaa

SEQ ID NO: 1210835 - DNA, 15 bp, Homo sapiens
acccactttattgga

SEQ ID NO: 1210836 - DNA, 15 bp, Homo sapiens
aacccactttattgg

SEQ ID NO: 1210837 - DNA, 15 bp, Homo sapiens
gaacccactttattg

SEQ ID NO: 1210838 - DNA, 15 bp, Homo sapiens
ggaacccactttatt

SEQ ID NO: 1210839 - DNA, 15 bp, Homo sapiens
tggaacccactttat

SEQ ID NO: 1210840 - DNA, 15 bp, Homo sapiens
gtggaacccacttta

SEQ ID NO: 1210841 - DNA, 15 bp, Homo sapiens
tgtggaacccacttt

SEQ ID NO: 1210842 - DNA, 15 bp, Homo sapiens
ctgtggaacccactt

SEQ ID NO: 1210843 - DNA, 15 bp, Homo sapiens
gctgtggaacccact

SEQ ID NO: 1210844 - DNA, 15 bp, Homo sapiens
tgctgtggaacccac

SEQ ID NO: 1210845 - DNA, 15 bp, Homo sapiens
ctgctgtggaaccca

SEQ ID NO: 1210846 - DNA, 15 bp, Homo sapiens
cctgctgtggaaccc

SEQ ID NO: 1210847 - DNA, 15 bp, Homo sapiens
tcctgctgtggaacc

SEQ ID NO: 1210848 - DNA, 15 bp, Homo sapiens
atcctgctgtggaac

SEQ ID NO: 1210849 - DNA, 15 bp, Homo sapiens
aatcctgctgtggaa

SEQ ID NO: 1210850 - DNA, 15 bp, Homo sapiens
taatcctgctgtgga

SEQ ID NO: 1210851 - DNA, 15 bp, Homo sapiens
gtaatcctgctgtgg

SEQ ID NO: 1210852 - DNA, 15 bp, Homo sapiens
agtaatcctgctgtg

SEQ ID NO: 1210853 - DNA, 15 bp, Homo sapiens
aagtaatcctgctgt

SEQ ID NO: 1210854 - DNA, 15 bp, Homo sapiens
taagtaatcctgctg

SEQ ID NO: 1210855 - DNA, 15 bp, Homo sapiens
gtaagtaatcctgct

SEQ ID NO: 1210856 - DNA, 15 bp, Homo sapiens
agtaagtaatcctgc

SEQ ID NO: 1210857 - DNA, 15 bp, Homo sapiens
cagtaagtaatcctg

SEQ ID NO: 1210858 - DNA, 15 bp, Homo sapiens
tcagtaagtaatcct

SEQ ID NO: 1210859 - DNA, 15 bp, Homo sapiens
gtcagtaagtaatcc

SEQ ID NO: 1210860 - DNA, 15 bp, Homo sapiens
agtcagtaagtaatc

SEQ ID NO: 1210861 - DNA, 15 bp, Homo sapiens
gagtcagtaagtaat

SEQ ID NO: 1210862 - DNA, 15 bp, Homo sapiens
ggagtcagtaagtaa

SEQ ID NO: 1210863 - DNA, 15 bp, Homo sapiens
gggagtcagtaagta

SEQ ID NO: 1210864 - DNA, 15 bp, Homo sapiens
agggagtcagtaagt

SEQ ID NO: 1210865 - DNA, 15 bp, Homo sapiens
tagggagtcagtaag

SEQ ID NO: 1210866 - DNA, 15 bp, Homo sapiens
ttagggagtcagtaa

SEQ ID NO: 1210867 - DNA, 15 bp, Homo sapiens
attagggagtcagta

SEQ ID NO: 1210868 - DNA, 15 bp, Homo sapiens
tattagggagtcagt

SEQ ID NO: 1210869 - DNA, 15 bp, Homo sapiens
ctattagggagtcag

SEQ ID NO: 1210870 - DNA, 15 bp, Homo sapiens
tctattagggagtca

SEQ ID NO: 1210871 - DNA, 15 bp, Homo sapiens
ttctattagggagtc

SEQ ID NO: 1210872 - DNA, 15 bp, Homo sapiens
tttctattagggagt

SEQ ID NO: 1210873 - DNA, 15 bp, Homo sapiens
ctttctattagggag

SEQ ID NO: 1210874 - DNA, 15 bp, Homo sapiens
tctttctattaggga

SEQ ID NO: 1210875 - DNA, 15 bp, Homo sapiens
ttctttctattaggg

SEQ ID NO: 1210876 - DNA, 15 bp, Homo sapiens
cttctttctattagg

SEQ ID NO: 1210877 - DNA, 15 bp, Homo sapiens
ccttctttctattag

SEQ ID NO: 1210878 - DNA, 15 bp, Homo sapiens
gccttctttctatta

SEQ ID NO: 1210879 - DNA, 15 bp, Homo sapiens
tgccttctttctatt

SEQ ID NO: 1210880 - DNA, 15 bp, Homo sapiens
ctgccttctttctat

SEQ ID NO: 1210881 - DNA, 15 bp, Homo sapiens
cctgccttctttcta

SEQ ID NO: 1210882 - DNA, 15 bp, Homo sapiens
gcctgccttctttct

SEQ ID NO: 1210883 - DNA, 15 bp, Homo sapiens
tgcctgccttctttc

SEQ ID NO: 1210884 - DNA, 15 bp, Homo sapiens
gtgcctgccttcttt

SEQ ID NO: 1210885 - DNA, 15 bp, Homo sapiens
tgtgcctgccttctt

SEQ ID NO: 1210886 - DNA, 15 bp, Homo sapiens
ctgtgcctgccttct

SEQ ID NO: 1210887 - DNA, 15 bp, Homo sapiens
cctgtgcctgccttc

SEQ ID NO: 1210888 - DNA, 15 bp, Homo sapiens
gcctgtgcctgcctt

SEQ ID NO: 1210889 - DNA, 15 bp, Homo sapiens
ggcctgtgcctgcct

SEQ ID NO: 1210890 - DNA, 15 bp, Homo sapiens
cggcctgtgcctgcc

SEQ ID NO: 1210891 - DNA, 15 bp, Homo sapiens
ccggcctgtgcctgc

SEQ ID NO: 1210892 - DNA, 15 bp, Homo sapiens
cccggcctgtgcctg

SEQ ID NO: 1210893 - DNA, 15 bp, Homo sapiens
gcccggcctgtgcct

SEQ ID NO: 1210894 - DNA, 15 bp, Homo sapiens
cgcccggcctgtgcc

SEQ ID NO: 1210895 - DNA, 15 bp, Homo sapiens
acgcccggcctgtgc

SEQ ID NO: 1210896 - DNA, 15 bp, Homo sapiens
cacgcccggcctgtg

SEQ ID NO: 1210897 - DNA, 15 bp, Homo sapiens
acacgcccggcctgt

SEQ ID NO: 1210898 - DNA, 15 bp, Homo sapiens
aacacgcccggcctg

SEQ ID NO: 1210899 - DNA, 15 bp, Homo sapiens
caacacgcccggcct

SEQ ID NO: 1210900 - DNA, 15 bp, Homo sapiens
ccaacacgcccggcc

SEQ ID NO: 1210901 - DNA, 15 bp, Homo sapiens
gccaacacgcccggc

SEQ ID NO: 1210902 - DNA, 15 bp, Homo sapiens
agccaacacgcccgg

SEQ ID NO: 1210903 - DNA, 15 bp, Homo sapiens
gagccaacacgcccg

SEQ ID NO: 1210904 - DNA, 15 bp, Homo sapiens
tgagccaacacgccc

SEQ ID NO: 1210905 - DNA, 15 bp, Homo sapiens
atgagccaacacgcc

SEQ ID NO: 1210906 - DNA, 15 bp, Homo sapiens
catgagccaacacgc

SEQ ID NO: 1210907 - DNA, 15 bp, Homo sapiens
acatgagccaacacg

SEQ ID NO: 1210908 - DNA, 15 bp, Homo sapiens
gacatgagccaacac

SEQ ID NO: 1210909 - DNA, 15 bp, Homo sapiens
agacatgagccaaca

SEQ ID NO: 1210910 - DNA, 15 bp, Homo sapiens
cagacatgagccaac

SEQ ID NO: 1210911 - DNA, 15 bp, Homo sapiens
acagacatgagccaa

SEQ ID NO: 1210912 - DNA, 15 bp, Homo sapiens
ctgggattacagaca

SEQ ID NO: 1210913 - DNA, 15 bp, Homo sapiens
cgtgctgggattaca

SEQ ID NO: 1210914 - DNA, 15 bp, Homo sapiens
acgtgctgggattac

SEQ ID NO: 1210915 - DNA, 15 bp, Homo sapiens
aacgtgctgggatta

SEQ ID NO: 1210916 - DNA, 15 bp, Homo sapiens
caacgtgctgggatt

SEQ ID NO: 1210917 - DNA, 15 bp, Homo sapiens
ccaacgtgctgggat

SEQ ID NO: 1210918 - DNA, 15 bp, Homo sapiens
cccaacgtgctggga

SEQ ID NO: 1210919 - DNA, 15 bp, Homo sapiens
tcccaacgtgctggg

SEQ ID NO: 1210920 - DNA, 15 bp, Homo sapiens
ctcccaacgtgctgg

SEQ ID NO: 1210921 - DNA, 15 bp, Homo sapiens
cctcccaacgtgctg

SEQ ID NO: 1210922 - DNA, 15 bp, Homo sapiens
gcctcccaacgtgct

SEQ ID NO: 1210923 - DNA, 15 bp, Homo sapiens
agcctcccaacgtgc

SEQ ID NO: 1210924 - DNA, 15 bp, Homo sapiens
cagcctcccaacgtg

SEQ ID NO: 1210925 - DNA, 15 bp, Homo sapiens
tcagcctcccaacgt

SEQ ID NO: 1210926 - DNA, 15 bp, Homo sapiens
ctcagcctcccaacg

SEQ ID NO: 1210927 - DNA, 15 bp, Homo sapiens
ggatctcctgacctt

SEQ ID NO: 1210928 - DNA, 15 bp, Homo sapiens
tttgttagccaggat

SEQ ID NO: 1210929 - DNA, 15 bp, Homo sapiens
ctttgttagccagga

SEQ ID NO: 1210930 - DNA, 15 bp, Homo sapiens
actttgttagccagg

SEQ ID NO: 1210931 - DNA, 15 bp, Homo sapiens
cactttgttagccag

SEQ ID NO: 1210932 - DNA, 15 bp, Homo sapiens
tcactttgttagcca

SEQ ID NO: 1210933 - DNA, 15 bp, Homo sapiens
ttcactttgttagcc

SEQ ID NO: 1210934 - DNA, 15 bp, Homo sapiens
tttcactttgttagc

SEQ ID NO: 1210935 - DNA, 15 bp, Homo sapiens
gtttcactttgttag

SEQ ID NO: 1210936 - DNA, 15 bp, Homo sapiens
ggtttcactttgtta

SEQ ID NO: 1210937 - DNA, 15 bp, Homo sapiens
gggtttcactttgtt

SEQ ID NO: 1210938 - DNA, 15 bp, Homo sapiens
ggggtttcactttgt

SEQ ID NO: 1210939 - DNA, 15 bp, Homo sapiens
cggggtttcactttg

SEQ ID NO: 1210940 - DNA, 15 bp, Homo sapiens
acggggtttcacttt

SEQ ID NO: 1210941 - DNA, 15 bp, Homo sapiens
gacggggtttcactt

SEQ ID NO: 1210942 - DNA, 15 bp, Homo sapiens
cctaattttttgtat

SEQ ID NO: 1210943 - DNA, 15 bp, Homo sapiens
gcctaattttttgta

SEQ ID NO: 1210944 - DNA, 15 bp, Homo sapiens
agcctaattttttgt

SEQ ID NO: 1210945 - DNA, 15 bp, Homo sapiens
cagcctaattttttg

SEQ ID NO: 1210946 - DNA, 15 bp, Homo sapiens
ccagcctaatttttt

SEQ ID NO: 1210947 - DNA, 15 bp, Homo sapiens
gcccagcctaatttt

SEQ ID NO: 1210948 - DNA, 15 bp, Homo sapiens
cgcccagcctaattt

SEQ ID NO: 1210949 - DNA, 15 bp, Homo sapiens
acgcccagcctaatt

SEQ ID NO: 1210950 - DNA, 15 bp, Homo sapiens
cacgcccagcctaat

SEQ ID NO: 1210951 - DNA, 15 bp, Homo sapiens
ccacgcccagcctaa

SEQ ID NO: 1210952 - DNA, 15 bp, Homo sapiens
accacgcccagccta

SEQ ID NO: 1210953 - DNA, 15 bp, Homo sapiens
cgagccaccacgccc

SEQ ID NO: 1210954 - DNA, 15 bp, Homo sapiens
acgagccaccacgcc

SEQ ID NO: 1210955 - DNA, 15 bp, Homo sapiens
cacgagccaccacgc

SEQ ID NO: 1210956 - DNA, 15 bp, Homo sapiens
gcacgagccaccacg

SEQ ID NO: 1210957 - DNA, 15 bp, Homo sapiens
caggcacgagccacc

SEQ ID NO: 1210958 - DNA, 15 bp, Homo sapiens
acaggcacgagccac

SEQ ID NO: 1210959 - DNA, 15 bp, Homo sapiens
tacaggcacgagcca

SEQ ID NO: 1210960 - DNA, 15 bp, Homo sapiens
ttacaggcacgagcc

SEQ ID NO: 1210961 - DNA, 15 bp, Homo sapiens
attacaggcacgagc

SEQ ID NO: 1210962 - DNA, 15 bp, Homo sapiens
gattacaggcacgag

SEQ ID NO: 1210963 - DNA, 15 bp, Homo sapiens
ggattacaggcacga

SEQ ID NO: 1210964 - DNA, 15 bp, Homo sapiens
cggtctcgatctcct

SEQ ID NO: 1210965 - DNA, 15 bp, Homo sapiens
acggtctcgatctcc

SEQ ID NO: 1210966 - DNA, 15 bp, Homo sapiens
gacggtctcgatctc

SEQ ID NO: 1210967 - DNA, 15 bp, Homo sapiens
ggacggtctcgatct

SEQ ID NO: 1210968 - DNA, 15 bp, Homo sapiens
aggacggtctcgatc

SEQ ID NO: 1210969 - DNA, 15 bp, Homo sapiens
caggacggtctcgat

SEQ ID NO: 1210970 - DNA, 15 bp, Homo sapiens
ccaggacggtctcga

SEQ ID NO: 1210971 - DNA, 15 bp, Homo sapiens
gccaggacggtctcg

SEQ ID NO: 1210972 - DNA, 15 bp, Homo sapiens
agccaggacggtctc

SEQ ID NO: 1210973 - DNA, 15 bp, Homo sapiens
tagccaggacggtct

SEQ ID NO: 1210974 - DNA, 15 bp, Homo sapiens
ttagccaggacggtc

SEQ ID NO: 1210975 - DNA, 15 bp, Homo sapiens
gttagccaggacggt

SEQ ID NO: 1210976 - DNA, 15 bp, Homo sapiens
tgttagccaggacgg

SEQ ID NO: 1210977 - DNA, 15 bp, Homo sapiens
gtgttagccaggacg

SEQ ID NO: 1210978 - DNA, 15 bp, Homo sapiens
cgtgttagccaggac

SEQ ID NO: 1210979 - DNA, 15 bp, Homo sapiens
taccgtgttagccag

SEQ ID NO: 1210980 - DNA, 15 bp, Homo sapiens
ttaccgtgttagcca

SEQ ID NO: 1210981 - DNA, 15 bp, Homo sapiens
tttaccgtgttagcc

SEQ ID NO: 1210982 - DNA, 15 bp, Homo sapiens
ttttaccgtgttagc

SEQ ID NO: 1210983 - DNA, 15 bp, Homo sapiens
gttttaccgtgttag

SEQ ID NO: 1210984 - DNA, 15 bp, Homo sapiens
ggttttaccgtgtta

SEQ ID NO: 1210985 - DNA, 15 bp, Homo sapiens
gggttttaccgtgtt

SEQ ID NO: 1210986 - DNA, 15 bp, Homo sapiens
ggggttttaccgtgt

SEQ ID NO: 1210987 - DNA, 15 bp, Homo sapiens
tggggttttaccgtg

SEQ ID NO: 1210988 - DNA, 15 bp, Homo sapiens
atggggttttaccgt

SEQ ID NO: 1210989 - DNA, 15 bp, Homo sapiens
gatggggttttaccg

SEQ ID NO: 1210990 - DNA, 15 bp, Homo sapiens
gtttagtagagatgg

SEQ ID NO: 1210991 - DNA, 15 bp, Homo sapiens
tgtttagtagagatg

SEQ ID NO: 1210992 - DNA, 15 bp, Homo sapiens
atgtttagtagagat

SEQ ID NO: 1210993 - DNA, 15 bp, Homo sapiens
ttttttgtatgttta

SEQ ID NO: 1210994 - DNA, 15 bp, Homo sapiens
tttttttgtatgttt

SEQ ID NO: 1210995 - DNA, 15 bp, Homo sapiens
ttttttttgtatgtt

SEQ ID NO: 1210996 - DNA, 15 bp, Homo sapiens
tttttttttgtatgt

SEQ ID NO: 1210997 - DNA, 15 bp, Homo sapiens
atttttttttgtatg

SEQ ID NO: 1210998 - DNA, 15 bp, Homo sapiens
aatttttttttgtat

SEQ ID NO: 1210999 - DNA, 15 bp, Homo sapiens
taatttttttttgta

SEQ ID NO: 1211000 - DNA, 15 bp, Homo sapiens
ggctaattttttttt

SEQ ID NO: 1211001 - DNA, 15 bp, Homo sapiens
cgcccgccaccacac

SEQ ID NO: 1211002 - DNA, 15 bp, Homo sapiens
gcgcccgccaccaca

SEQ ID NO: 1211003 - DNA, 15 bp, Homo sapiens
cactctcctgcctca

SEQ ID NO: 1211004 - DNA, 15 bp, Homo sapiens
ccactctcctgcctc

SEQ ID NO: 1211005 - DNA, 15 bp, Homo sapiens
accactctcctgcct

SEQ ID NO: 1211006 - DNA, 15 bp, Homo sapiens
caccactctcctgcc

SEQ ID NO: 1211007 - DNA, 15 bp, Homo sapiens
acaccactctcctgc

SEQ ID NO: 1211008 - DNA, 15 bp, Homo sapiens
cacaccactctcctg

SEQ ID NO: 1211009 - DNA, 15 bp, Homo sapiens
tcacaccactctcct

SEQ ID NO: 1211010 - DNA, 15 bp, Homo sapiens
ttcacaccactctcc

SEQ ID NO: 1211011 - DNA, 15 bp, Homo sapiens
gttcacaccactctc

SEQ ID NO: 1211012 - DNA, 15 bp, Homo sapiens
agttcacaccactct

SEQ ID NO: 1211013 - DNA, 15 bp, Homo sapiens
gagttcacaccactc

SEQ ID NO: 1211014 - DNA, 15 bp, Homo sapiens
cgagttcacaccact

SEQ ID NO: 1211015 - DNA, 15 bp, Homo sapiens
ccgagttcacaccac

SEQ ID NO: 1211016 - DNA, 15 bp, Homo sapiens
cccgagttcacacca

SEQ ID NO: 1211017 - DNA, 15 bp, Homo sapiens
tcccgagttcacacc

SEQ ID NO: 1211018 - DNA, 15 bp, Homo sapiens
ctcccgagttcacac

SEQ ID NO: 1211019 - DNA, 15 bp, Homo sapiens
cctcccgagttcaca

SEQ ID NO: 1211020 - DNA, 15 bp, Homo sapiens
gcgcctcccgagttc

SEQ ID NO: 1211021 - DNA, 15 bp, Homo sapiens
tgcgcctcccgagtt

SEQ ID NO: 1211022 - DNA, 15 bp, Homo sapiens
ctgcgcctcccgagt

SEQ ID NO: 1211023 - DNA, 15 bp, Homo sapiens
gctgcgcctcccgag

SEQ ID NO: 1211024 - DNA, 15 bp, Homo sapiens
agctgcgcctcccga

SEQ ID NO: 1211025 - DNA, 15 bp, Homo sapiens
aagctgcgcctcccg

SEQ ID NO: 1211026 - DNA, 15 bp, Homo sapiens
caagctgcgcctccc

SEQ ID NO: 1211027 - DNA, 15 bp, Homo sapiens
gcaagctgcgcctcc

SEQ ID NO: 1211028 - DNA, 15 bp, Homo sapiens
tgcaagctgcgcctc

SEQ ID NO: 1211029 - DNA, 15 bp, Homo sapiens
ctgcaagctgcgcct

SEQ ID NO: 1211030 - DNA, 15 bp, Homo sapiens
actgcaagctgcgcc

SEQ ID NO: 1211031 - DNA, 15 bp, Homo sapiens
cactgcaagctgcgc

SEQ ID NO: 1211032 - DNA, 15 bp, Homo sapiens
tcactgcaagctgcg

SEQ ID NO: 1211033 - DNA, 15 bp, Homo sapiens
ctcactgcaagctgc

SEQ ID NO: 1211034 - DNA, 15 bp, Homo sapiens
gctcactgcaagctg

SEQ ID NO: 1211035 - DNA, 15 bp, Homo sapiens
gcagtctcggctcac

SEQ ID NO: 1211036 - DNA, 15 bp, Homo sapiens
cgcagtctcggctca

SEQ ID NO: 1211037 - DNA, 15 bp, Homo sapiens
gcgcagtctcggctc

SEQ ID NO: 1211038 - DNA, 15 bp, Homo sapiens
ggcgcagtctcggct

SEQ ID NO: 1211039 - DNA, 15 bp, Homo sapiens
tggcgcagtctcggc

SEQ ID NO: 1211040 - DNA, 15 bp, Homo sapiens
gtggcgcagtctcgg

SEQ ID NO: 1211041 - DNA, 15 bp, Homo sapiens
agtggcgcagtctcg

SEQ ID NO: 1211042 - DNA, 15 bp, Homo sapiens
cagtggcgcagtctc

SEQ ID NO: 1211043 - DNA, 15 bp, Homo sapiens
caaactaaatgtgcc

SEQ ID NO: 1211044 - DNA, 15 bp, Homo sapiens
acaaactaaatgtgc

SEQ ID NO: 1211045 - DNA, 15 bp, Homo sapiens
tacaaactaaatgtg

SEQ ID NO: 1211046 - DNA, 15 bp, Homo sapiens
ttacaaactaaatgt

SEQ ID NO: 1211047 - DNA, 15 bp, Homo sapiens
cttacaaactaaatg

SEQ ID NO: 1211048 - DNA, 15 bp, Homo sapiens
gcttacaaactaaat

SEQ ID NO: 1211049 - DNA, 15 bp, Homo sapiens
agcttacaaactaaa

SEQ ID NO: 1211050 - DNA, 15 bp, Homo sapiens
cagcttacaaactaa

SEQ ID NO: 1211051 - DNA, 15 bp, Homo sapiens
ccagcttacaaacta

SEQ ID NO: 1211052 - DNA, 15 bp, Homo sapiens
cccagcttacaaact

SEQ ID NO: 1211053 - DNA, 15 bp, Homo sapiens
gcccagcttacaaac

SEQ ID NO: 1211054 - DNA, 15 bp, Homo sapiens
ggcccagcttacaaa

SEQ ID NO: 1211055 - DNA, 15 bp, Homo sapiens
gggcccagcttacaa

SEQ ID NO: 1211056 - DNA, 15 bp, Homo sapiens
agggcccagcttaca

SEQ ID NO: 1211057 - DNA, 15 bp, Homo sapiens
gagggcccagcttac

SEQ ID NO: 1211058 - DNA, 15 bp, Homo sapiens
cgagggcccagctta

SEQ ID NO: 1211059 - DNA, 15 bp, Homo sapiens
acgagggcccagctt

SEQ ID NO: 1211060 - DNA, 15 bp, Homo sapiens
tacgagggcccagct

SEQ ID NO: 1211061 - DNA, 15 bp, Homo sapiens
gtacgagggcccagc

SEQ ID NO: 1211062 - DNA, 15 bp, Homo sapiens
tgtacgagggcccag

SEQ ID NO: 1211063 - DNA, 15 bp, Homo sapiens
ctgtacgagggccca

SEQ ID NO: 1211064 - DNA, 15 bp, Homo sapiens
tctgtacgagggccc

SEQ ID NO: 1211065 - DNA, 15 bp, Homo sapiens
ctctgtacgagggcc

SEQ ID NO: 1211066 - DNA, 15 bp, Homo sapiens
cctctgtacgagggc

SEQ ID NO: 1211067 - DNA, 15 bp, Homo sapiens
acctctgtacgaggg

SEQ ID NO: 1211068 - DNA, 15 bp, Homo sapiens
tacctctgtacgagg

SEQ ID NO: 1211069 - DNA, 15 bp, Homo sapiens
ctacctctgtacgag

SEQ ID NO: 1211070 - DNA, 15 bp, Homo sapiens
cctacctctgtacga

SEQ ID NO: 1211071 - DNA, 15 bp, Homo sapiens
ccctacctctgtacg

SEQ ID NO: 1211072 - DNA, 15 bp, Homo sapiens
tccctacctctgtac

SEQ ID NO: 1211073 - DNA, 15 bp, Homo sapiens
ctccctacctctgta

SEQ ID NO: 1211074 - DNA, 15 bp, Homo sapiens
cctccctacctctgt

SEQ ID NO: 1211075 - DNA, 15 bp, Homo sapiens
acctccctacctctg

SEQ ID NO: 1211076 - DNA, 15 bp, Homo sapiens
cacctccctacctct

SEQ ID NO: 1211077 - DNA, 15 bp, Homo sapiens
tcacctccctacctc

SEQ ID NO: 1211078 - DNA, 15 bp, Homo sapiens
ctcacctccctacct

SEQ ID NO: 1211079 - DNA, 15 bp, Homo sapiens
tctcacctccctacc

SEQ ID NO: 1211080 - DNA, 15 bp, Homo sapiens
ctctcacctccctac

SEQ ID NO: 1211081 - DNA, 15 bp, Homo sapiens
gctctcacctcccta

SEQ ID NO: 1211082 - DNA, 15 bp, Homo sapiens
tgctctcacctccct

SEQ ID NO: 1211083 - DNA, 15 bp, Homo sapiens
atgctctcacctccc

SEQ ID NO: 1211084 - DNA, 15 bp, Homo sapiens
aatgctctcacctcc

SEQ ID NO: 1211085 - DNA, 15 bp, Homo sapiens
caatgctctcacctc

SEQ ID NO: 1211086 - DNA, 15 bp, Homo sapiens
ccaatgctctcacct

SEQ ID NO: 1211087 - DNA, 15 bp, Homo sapiens
tccaatgctctcacc

SEQ ID NO: 1211088 - DNA, 15 bp, Homo sapiens
atccaatgctctcac

SEQ ID NO: 1211089 - DNA, 15 bp, Homo sapiens
aatccaatgctctca

SEQ ID NO: 1211090 - DNA, 15 bp, Homo sapiens
taatccaatgctctc

SEQ ID NO: 1211091 - DNA, 15 bp, Homo sapiens
ctaatccaatgctct

SEQ ID NO: 1211092 - DNA, 15 bp, Homo sapiens
actaatccaatgctc

SEQ ID NO: 1211093 - DNA, 15 bp, Homo sapiens
cactaatccaatgct

SEQ ID NO: 1211094 - DNA, 15 bp, Homo sapiens
ccactaatccaatgc

SEQ ID NO: 1211095 - DNA, 15 bp, Homo sapiens
accactaatccaatg

SEQ ID NO: 1211096 - DNA, 15 bp, Homo sapiens
gaccactaatccaat

SEQ ID NO: 1211097 - DNA, 15 bp, Homo sapiens
tgaccactaatccaa

SEQ ID NO: 1211098 - DNA, 15 bp, Homo sapiens
gtgaccactaatcca

SEQ ID NO: 1211099 - DNA, 15 bp, Homo sapiens
ggtgaccactaatcc

SEQ ID NO: 1211100 - DNA, 15 bp, Homo sapiens
tggtgaccactaatc

SEQ ID NO: 1211101 - DNA, 15 bp, Homo sapiens
ttggtgaccactaat

SEQ ID NO: 1211102 - DNA, 15 bp, Homo sapiens
tttggtgaccactaa

SEQ ID NO: 1211103 - DNA, 15 bp, Homo sapiens
ctttggtgaccacta

SEQ ID NO: 1211104 - DNA, 15 bp, Homo sapiens
gctttggtgaccact

SEQ ID NO: 1211105 - DNA, 15 bp, Homo sapiens
agctttggtgaccac

SEQ ID NO: 1211106 - DNA, 15 bp, Homo sapiens
cagctttggtgacca

SEQ ID NO: 1211107 - DNA, 15 bp, Homo sapiens
gcagctttggtgacc

SEQ ID NO: 1211108 - DNA, 15 bp, Homo sapiens
cgcagctttggtgac

SEQ ID NO: 1211109 - DNA, 15 bp, Homo sapiens
ccgcagctttggtga

SEQ ID NO: 1211110 - DNA, 15 bp, Homo sapiens
accgcagctttggtg

SEQ ID NO: 1211111 - DNA, 15 bp, Homo sapiens
gaccgcagctttggt

SEQ ID NO: 1211112 - DNA, 15 bp, Homo sapiens
tgaccgcagctttgg

SEQ ID NO: 1211113 - DNA, 15 bp, Homo sapiens
gtgaccgcagctttg

SEQ ID NO: 1211114 - DNA, 15 bp, Homo sapiens
ggtgaccgcagcttt

SEQ ID NO: 1211115 - DNA, 15 bp, Homo sapiens
aggtgaccgcagctt

SEQ ID NO: 1211116 - DNA, 15 bp, Homo sapiens
taggtgaccgcagct

SEQ ID NO: 1211117 - DNA, 15 bp, Homo sapiens
ctaggtgaccgcagc

SEQ ID NO: 1211118 - DNA, 15 bp, Homo sapiens
actaggtgaccgcag

SEQ ID NO: 1211119 - DNA, 15 bp, Homo sapiens
cactaggtgaccgca

SEQ ID NO: 1211120 - DNA, 15 bp, Homo sapiens
ccactaggtgaccgc

SEQ ID NO: 1211121 - DNA, 15 bp, Homo sapiens
cccactaggtgaccg

SEQ ID NO: 1211122 - DNA, 15 bp, Homo sapiens
ccccactaggtgacc

SEQ ID NO: 1211123 - DNA, 15 bp, Homo sapiens
accccactaggtgac

SEQ ID NO: 1211124 - DNA, 15 bp, Homo sapiens
caccccactaggtga

SEQ ID NO: 1211125 - DNA, 15 bp, Homo sapiens
tcaccccactaggtg

SEQ ID NO: 1211126 - DNA, 15 bp, Homo sapiens
atcaccccactaggt

SEQ ID NO: 1211127 - DNA, 15 bp, Homo sapiens
gatcaccccactagg

SEQ ID NO: 1211128 - DNA, 15 bp, Homo sapiens
tgatcaccccactag

SEQ ID NO: 1211129 - DNA, 15 bp, Homo sapiens
ctgatcaccccacta

SEQ ID NO: 1211130 - DNA, 15 bp, Homo sapiens
tctgatcaccccact

SEQ ID NO: 1211131 - DNA, 15 bp, Homo sapiens
ctctgatcaccccac

SEQ ID NO: 1211132 - DNA, 15 bp, Homo sapiens
cctctgatcacccca

SEQ ID NO: 1211133 - DNA, 15 bp, Homo sapiens
gcctctgatcacccc

SEQ ID NO: 1211134 - DNA, 15 bp, Homo sapiens
agcctctgatcaccc

SEQ ID NO: 1211135 - DNA, 15 bp, Homo sapiens
gagcctctgatcacc

SEQ ID NO: 1211136 - DNA, 15 bp, Homo sapiens
ggagcctctgatcac

SEQ ID NO: 1211137 - DNA, 15 bp, Homo sapiens
aggagcctctgatca

SEQ ID NO: 1211138 - DNA, 15 bp, Homo sapiens
gaggagcctctgatc

SEQ ID NO: 1211139 - DNA, 15 bp, Homo sapiens
ggaggagcctctgat

SEQ ID NO: 1211140 - DNA, 15 bp, Homo sapiens
gggaggagcctctga

SEQ ID NO: 1211141 - DNA, 15 bp, Homo sapiens
agggaggagcctctg

SEQ ID NO: 1211142 - DNA, 15 bp, Homo sapiens
aagggaggagcctct

SEQ ID NO: 1211143 - DNA, 15 bp, Homo sapiens
taagggaggagcctc

SEQ ID NO: 1211144 - DNA, 15 bp, Homo sapiens
ttaagggaggagcct

SEQ ID NO: 1211145 - DNA, 15 bp, Homo sapiens
cttaagggaggagcc

SEQ ID NO: 1211146 - DNA, 15 bp, Homo sapiens
tcttaagggaggagc

SEQ ID NO: 1211147 - DNA, 15 bp, Homo sapiens
atcttaagggaggag

SEQ ID NO: 1211148 - DNA, 15 bp, Homo sapiens
gatcttaagggagga

SEQ ID NO: 1211149 - DNA, 15 bp, Homo sapiens
agatcttaagggagg

SEQ ID NO: 1211150 - DNA, 15 bp, Homo sapiens
aagatcttaagggag

SEQ ID NO: 1211151 - DNA, 15 bp, Homo sapiens
caagatcttaaggga

SEQ ID NO: 1211152 - DNA, 15 bp, Homo sapiens
tcaagatcttaaggg

SEQ ID NO: 1211153 - DNA, 15 bp, Homo sapiens
atcaagatcttaagg

SEQ ID NO: 1211154 - DNA, 15 bp, Homo sapiens
aatcaagatcttaag

SEQ ID NO: 1211155 - DNA, 15 bp, Homo sapiens
caatcaagatcttaa

SEQ ID NO: 1211156 - DNA, 15 bp, Homo sapiens
gcaatcaagatctta

SEQ ID NO: 1211157 - DNA, 15 bp, Homo sapiens
ggcaatcaagatctt

SEQ ID NO: 1211158 - DNA, 15 bp, Homo sapiens
tggcaatcaagatct

SEQ ID NO: 1211159 - DNA, 15 bp, Homo sapiens
ttggcaatcaagatc

SEQ ID NO: 1211160 - DNA, 15 bp, Homo sapiens
gttggcaatcaagat

SEQ ID NO: 1211161 - DNA, 15 bp, Homo sapiens
cgttggcaatcaaga

SEQ ID NO: 1211162 - DNA, 15 bp, Homo sapiens
gcgttggcaatcaag

SEQ ID NO: 1211163 - DNA, 15 bp, Homo sapiens
ggcgttggcaatcaa

SEQ ID NO: 1211164 - DNA, 15 bp, Homo sapiens
aggcgttggcaatca

SEQ ID NO: 1211165 - DNA, 15 bp, Homo sapiens
gaggcgttggcaatc

SEQ ID NO: 1211166 - DNA, 15 bp, Homo sapiens
agaggcgttggcaat

SEQ ID NO: 1211167 - DNA, 15 bp, Homo sapiens
cagaggcgttggcaa

SEQ ID NO: 1211168 - DNA, 15 bp, Homo sapiens
ccagaggcgttggca

SEQ ID NO: 1211169 - DNA, 15 bp, Homo sapiens
gccagaggcgttggc

SEQ ID NO: 1211170 - DNA, 15 bp, Homo sapiens
ggccagaggcgttgg

SEQ ID NO: 1211171 - DNA, 15 bp, Homo sapiens
gggccagaggcgttg

SEQ ID NO: 1211172 - DNA, 15 bp, Homo sapiens
tgggccagaggcgtt

SEQ ID NO: 1211173 - DNA, 15 bp, Homo sapiens
ttgggccagaggcgt

SEQ ID NO: 1211174 - DNA, 15 bp, Homo sapiens
gttgggccagaggcg

SEQ ID NO: 1211175 - DNA, 15 bp, Homo sapiens
agttgggccagaggc

SEQ ID NO: 1211176 - DNA, 15 bp, Homo sapiens
aagttgggccagagg

SEQ ID NO: 1211177 - DNA, 15 bp, Homo sapiens
aaagttgggccagag

SEQ ID NO: 1211178 - DNA, 15 bp, Homo sapiens
gaaagttgggccaga

SEQ ID NO: 1211179 - DNA, 15 bp, Homo sapiens
ggaaagttgggccag

SEQ ID NO: 1211180 - DNA, 15 bp, Homo sapiens
aggaaagttgggcca

SEQ ID NO: 1211181 - DNA, 15 bp, Homo sapiens
aaggaaagttgggcc

SEQ ID NO: 1211182 - DNA, 15 bp, Homo sapiens
aaaggaaagttgggc

SEQ ID NO: 1211183 - DNA, 15 bp, Homo sapiens
aaaaggaaagttggg

SEQ ID NO: 1211184 - DNA, 15 bp, Homo sapiens
aaaaaggaaagttgg

SEQ ID NO: 1211185 - DNA, 15 bp, Homo sapiens
taaaaaggaaagttg

SEQ ID NO: 1211186 - DNA, 15 bp, Homo sapiens
ataaaaaggaaagtt

SEQ ID NO: 1211187 - DNA, 15 bp, Homo sapiens
aataaaaaggaaagt

SEQ ID NO: 1211188 - DNA, 15 bp, Homo sapiens
aaataaaaaggaaag

SEQ ID NO: 1211189 - DNA, 15 bp, Homo sapiens
taaataaaaaggaaa

SEQ ID NO: 1211190 - DNA, 15 bp, Homo sapiens
ataaataaaaaggaa

SEQ ID NO: 1211191 - DNA, 15 bp, Homo sapiens
gataaataaaaagga

SEQ ID NO: 1211192 - DNA, 15 bp, Homo sapiens
cgataaataaaaagg

SEQ ID NO: 1211193 - DNA, 15 bp, Homo sapiens
gcgataaataaaaag

SEQ ID NO: 1211194 - DNA, 15 bp, Homo sapiens
tgcgataaataaaaa

SEQ ID NO: 1211195 - DNA, 15 bp, Homo sapiens
ttgcgataaataaaa

SEQ ID NO: 1211196 - DNA, 15 bp, Homo sapiens
cttgcgataaataaa

SEQ ID NO: 1211197 - DNA, 15 bp, Homo sapiens
gcttgcgataaataa

SEQ ID NO: 1211198 - DNA, 15 bp, Homo sapiens
ggcttgcgataaata

SEQ ID NO: 1211199 - DNA, 15 bp, Homo sapiens
aggcttgcgataaat

SEQ ID NO: 1211200 - DNA, 15 bp, Homo sapiens
gaggcttgcgataaa

SEQ ID NO: 1211201 - DNA, 15 bp, Homo sapiens
ggaggcttgcgataa

SEQ ID NO: 1211202 - DNA, 15 bp, Homo sapiens
aggaggcttgcgata

SEQ ID NO: 1211203 - DNA, 15 bp, Homo sapiens
caggaggcttgcgat

SEQ ID NO: 1211204 - DNA, 15 bp, Homo sapiens
ccaggaggcttgcga

SEQ ID NO: 1211205 - DNA, 15 bp, Homo sapiens
tccaggaggcttgcg

SEQ ID NO: 1211206 - DNA, 15 bp, Homo sapiens
ttccaggaggcttgc

SEQ ID NO: 1211207 - DNA, 15 bp, Homo sapiens
attccaggaggcttg

SEQ ID NO: 1211208 - DNA, 15 bp, Homo sapiens
gattccaggaggctt

SEQ ID NO: 1211209 - DNA, 15 bp, Homo sapiens
agattccaggaggct

SEQ ID NO: 1211210 - DNA, 15 bp, Homo sapiens
gagattccaggaggc

SEQ ID NO: 1211211 - DNA, 15 bp, Homo sapiens
tgagattccaggagg

SEQ ID NO: 1211212 - DNA, 15 bp, Homo sapiens
ttgagattccaggag

SEQ ID NO: 1211213 - DNA, 15 bp, Homo sapiens
attgagattccagga

SEQ ID NO: 1211214 - DNA, 15 bp, Homo sapiens
aattgagattccagg

SEQ ID NO: 1211215 - DNA, 15 bp, Homo sapiens
caattgagattccag

SEQ ID NO: 1211216 - DNA, 15 bp, Homo sapiens
gcaattgagattcca

SEQ ID NO: 1211217 - DNA, 15 bp, Homo sapiens
agcaattgagattcc

SEQ ID NO: 1211218 - DNA, 15 bp, Homo sapiens
aagcaattgagattc

SEQ ID NO: 1211219 - DNA, 15 bp, Homo sapiens
aaagcaattgagatt

SEQ ID NO: 1211220 - DNA, 15 bp, Homo sapiens
aaaagcaattgagat

SEQ ID NO: 1211221 - DNA, 15 bp, Homo sapiens
aaaaagcaattgaga

SEQ ID NO: 1211222 - DNA, 15 bp, Homo sapiens
caaaaagcaattgag

SEQ ID NO: 1211223 - DNA, 15 bp, Homo sapiens
ggcaaaaagcaattg

SEQ ID NO: 1211224 - DNA, 15 bp, Homo sapiens
gggcaaaaagcaatt

SEQ ID NO: 1211225 - DNA, 15 bp, Homo sapiens
tgggcaaaaagcaat

SEQ ID NO: 1211226 - DNA, 15 bp, Homo sapiens
gtgggcaaaaagcaa

SEQ ID NO: 1211227 - DNA, 15 bp, Homo sapiens
ggtgggcaaaaagca

SEQ ID NO: 1211228 - DNA, 15 bp, Homo sapiens
gggtgggcaaaaagc

SEQ ID NO: 1211229 - DNA, 15 bp, Homo sapiens
cgggtgggcaaaaag

SEQ ID NO: 1211230 - DNA, 15 bp, Homo sapiens
ccgggtgggcaaaaa

SEQ ID NO: 1211231 - DNA, 15 bp, Homo sapiens
accgggtgggcaaaa

SEQ ID NO: 1211232 - DNA, 15 bp, Homo sapiens
caccgggtgggcaaa

SEQ ID NO: 1211233 - DNA, 15 bp, Homo sapiens
acaccgggtgggcaa

SEQ ID NO: 1211234 - DNA, 15 bp, Homo sapiens
cacaccgggtgggca

SEQ ID NO: 1211235 - DNA, 15 bp, Homo sapiens
acacaccgggtgggc

SEQ ID NO: 1211236 - DNA, 15 bp, Homo sapiens
gacacaccgggtggg

SEQ ID NO: 1211237 - DNA, 15 bp, Homo sapiens
tgacacaccgggtgg

SEQ ID NO: 1211238 - DNA, 15 bp, Homo sapiens
ctgacacaccgggtg

SEQ ID NO: 1211239 - DNA, 15 bp, Homo sapiens
gctgacacaccgggt

SEQ ID NO: 1211240 - DNA, 15 bp, Homo sapiens
tgctgacacaccggg

SEQ ID NO: 1211241 - DNA, 15 bp, Homo sapiens
gtgctgacacaccgg

SEQ ID NO: 1211242 - DNA, 15 bp, Homo sapiens
tgtgctgacacaccg

SEQ ID NO: 1211243 - DNA, 15 bp, Homo sapiens
ttgtgctgacacacc

SEQ ID NO: 1211244 - DNA, 15 bp, Homo sapiens
cttgtgctgacacac

SEQ ID NO: 1211245 - DNA, 15 bp, Homo sapiens
tcttgtgctgacaca

SEQ ID NO: 1211246 - DNA, 15 bp, Homo sapiens
ttcttgtgctgacac

SEQ ID NO: 1211247 - DNA, 15 bp, Homo sapiens
tttcttgtgctgaca

SEQ ID NO: 1211248 - DNA, 15 bp, Homo sapiens
atttcttgtgctgac

SEQ ID NO: 1211249 - DNA, 15 bp, Homo sapiens
catttcttgtgctga

SEQ ID NO: 1211250 - DNA, 15 bp, Homo sapiens
tcatttcttgtgctg

SEQ ID NO: 1211251 - DNA, 15 bp, Homo sapiens
ctcatttcttgtgct

SEQ ID NO: 1211252 - DNA, 15 bp, Homo sapiens
actcatttcttgtgc

SEQ ID NO: 1211253 - DNA, 15 bp, Homo sapiens
gactcatttcttgtg

SEQ ID NO: 1211254 - DNA, 15 bp, Homo sapiens
tgactcatttcttgt

SEQ ID NO: 1211255 - DNA, 15 bp, Homo sapiens
atgactcatttcttg

SEQ ID NO: 1211256 - DNA, 15 bp, Homo sapiens
aatgactcatttctt

SEQ ID NO: 1211257 - DNA, 15 bp, Homo sapiens
aaatgactcatttct

SEQ ID NO: 1211258 - DNA, 15 bp, Homo sapiens
gaaatgactcatttc

SEQ ID NO: 1211259 - DNA, 15 bp, Homo sapiens
ggaaatgactcattt

SEQ ID NO: 1211260 - DNA, 15 bp, Homo sapiens
aggaaatgactcatt

SEQ ID NO: 1211261 - DNA, 15 bp, Homo sapiens
gaggaaatgactcat

SEQ ID NO: 1211262 - DNA, 15 bp, Homo sapiens
ggaggaaatgactca

SEQ ID NO: 1211263 - DNA, 15 bp, Homo sapiens
aggaggaaatgactc

SEQ ID NO: 1211264 - DNA, 15 bp, Homo sapiens
aaggaggaaatgact

SEQ ID NO: 1211265 - DNA, 15 bp, Homo sapiens
aaaggaggaaatgac

SEQ ID NO: 1211266 - DNA, 15 bp, Homo sapiens
taaaggaggaaatga

SEQ ID NO: 1211267 - DNA, 15 bp, Homo sapiens
ttaaaggaggaaatg

SEQ ID NO: 1211268 - DNA, 15 bp, Homo sapiens
cttaaaggaggaaat

SEQ ID NO: 1211269 - DNA, 15 bp, Homo sapiens
gcttaaaggaggaaa

SEQ ID NO: 1211270 - DNA, 15 bp, Homo sapiens
tgcttaaaggaggaa

SEQ ID NO: 1211271 - DNA, 15 bp, Homo sapiens
gtgcttaaaggagga

SEQ ID NO: 1211272 - DNA, 15 bp, Homo sapiens
tgtgcttaaaggagg

SEQ ID NO: 1211273 - DNA, 15 bp, Homo sapiens
ctgtgcttaaaggag

SEQ ID NO: 1211274 - DNA, 15 bp, Homo sapiens
actgtgcttaaagga

SEQ ID NO: 1211275 - DNA, 15 bp, Homo sapiens
aactgtgcttaaagg

SEQ ID NO: 1211276 - DNA, 15 bp, Homo sapiens
caactgtgcttaaag

SEQ ID NO: 1211277 - DNA, 15 bp, Homo sapiens
tcaactgtgcttaaa

SEQ ID NO: 1211278 - DNA, 15 bp, Homo sapiens
ttcaactgtgcttaa

SEQ ID NO: 1211279 - DNA, 15 bp, Homo sapiens
tttcaactgtgctta

SEQ ID NO: 1211280 - DNA, 15 bp, Homo sapiens
atttcaactgtgctt

SEQ ID NO: 1211281 - DNA, 15 bp, Homo sapiens
aatttcaactgtgct

SEQ ID NO: 1211282 - DNA, 15 bp, Homo sapiens
caatttcaactgtgc

SEQ ID NO: 1211283 - DNA, 15 bp, Homo sapiens
tcaatttcaactgtg

SEQ ID NO: 1211284 - DNA, 15 bp, Homo sapiens
ctcaatttcaactgt

SEQ ID NO: 1211285 - DNA, 15 bp, Homo sapiens
gctcaatttcaactg

SEQ ID NO: 1211286 - DNA, 15 bp, Homo sapiens
agctcaatttcaact

SEQ ID NO: 1211287 - DNA, 15 bp, Homo sapiens
cagctcaatttcaac

SEQ ID NO: 1211288 - DNA, 15 bp, Homo sapiens
acagctcaatttcaa

SEQ ID NO: 1211289 - DNA, 15 bp, Homo sapiens
cacagctcaatttca

SEQ ID NO: 1211290 - DNA, 15 bp, Homo sapiens
tcacagctcaatttc

SEQ ID NO: 1211291 - DNA, 15 bp, Homo sapiens
ctcacagctcaattt

SEQ ID NO: 1211292 - DNA, 15 bp, Homo sapiens
actcacagctcaatt

SEQ ID NO: 1211293 - DNA, 15 bp, Homo sapiens
gactcacagctcaat

SEQ ID NO: 1211294 - DNA, 15 bp, Homo sapiens
tgactcacagctcaa

SEQ ID NO: 1211295 - DNA, 15 bp, Homo sapiens
ctgactcacagctca

SEQ ID NO: 1211296 - DNA, 15 bp, Homo sapiens
actgactcacagctc

SEQ ID NO: 1211297 - DNA, 15 bp, Homo sapiens
cactgactcacagct

SEQ ID NO: 1211298 - DNA, 15 bp, Homo sapiens
tcactgactcacagc

SEQ ID NO: 1211299 - DNA, 15 bp, Homo sapiens
ctcactgactcacag

SEQ ID NO: 1211300 - DNA, 15 bp, Homo sapiens
cctcactgactcaca

SEQ ID NO: 1211301 - DNA, 15 bp, Homo sapiens
acctcactgactcac

SEQ ID NO: 1211302 - DNA, 15 bp, Homo sapiens
cacctcactgactca

SEQ ID NO: 1211303 - DNA, 15 bp, Homo sapiens
acacctcactgactc

SEQ ID NO: 1211304 - DNA, 15 bp, Homo sapiens
cacacctcactgact

SEQ ID NO: 1211305 - DNA, 15 bp, Homo sapiens
acacacctcactgac

SEQ ID NO: 1211306 - DNA, 15 bp, Homo sapiens
tacacacctcactga

SEQ ID NO: 1211307 - DNA, 15 bp, Homo sapiens
gtacacacctcactg

SEQ ID NO: 1211308 - DNA, 15 bp, Homo sapiens
cgtacacacctcact

SEQ ID NO: 1211309 - DNA, 15 bp, Homo sapiens
tcgtacacacctcac

SEQ ID NO: 1211310 - DNA, 15 bp, Homo sapiens
atcgtacacacctca

SEQ ID NO: 1211311 - DNA, 15 bp, Homo sapiens
tatcgtacacacctc

SEQ ID NO: 1211312 - DNA, 15 bp, Homo sapiens
atatcgtacacacct

SEQ ID NO: 1211313 - DNA, 15 bp, Homo sapiens
aatatcgtacacacc

SEQ ID NO: 1211314 - DNA, 15 bp, Homo sapiens
caatatcgtacacac

SEQ ID NO: 1211315 - DNA, 15 bp, Homo sapiens
acaatatcgtacaca

SEQ ID NO: 1211316 - DNA, 15 bp, Homo sapiens
gacaatatcgtacac

SEQ ID NO: 1211317 - DNA, 15 bp, Homo sapiens
tgacaatatcgtaca

SEQ ID NO: 1211318 - DNA, 15 bp, Homo sapiens
ttgacaatatcgtac

SEQ ID NO: 1211319 - DNA, 15 bp, Homo sapiens
tttgacaatatcgta

SEQ ID NO: 1211320 - DNA, 15 bp, Homo sapiens
ctttgacaatatcgt

SEQ ID NO: 1211321 - DNA, 15 bp, Homo sapiens
gctttgacaatatcg

SEQ ID NO: 1211322 - DNA, 15 bp, Homo sapiens
cgctttgacaatatc

SEQ ID NO: 1211323 - DNA, 15 bp, Homo sapiens
ccgctttgacaatat

SEQ ID NO: 1211324 - DNA, 15 bp, Homo sapiens
cccgctttgacaata

SEQ ID NO: 1211325 - DNA, 15 bp, Homo sapiens
ccccgctttgacaat

SEQ ID NO: 1211326 - DNA, 15 bp, Homo sapiens
accccgctttgacaa

SEQ ID NO: 1211327 - DNA, 15 bp, Homo sapiens
caccccgctttgaca

SEQ ID NO: 1211328 - DNA, 15 bp, Homo sapiens
acaccccgctttgac

SEQ ID NO: 1211329 - DNA, 15 bp, Homo sapiens
cacaccccgctttga

SEQ ID NO: 1211330 - DNA, 15 bp, Homo sapiens
acacaccccgctttg

SEQ ID NO: 1211331 - DNA, 15 bp, Homo sapiens
tacacaccccgcttt

SEQ ID NO: 1211332 - DNA, 15 bp, Homo sapiens
gtacacaccccgctt

SEQ ID NO: 1211333 - DNA, 15 bp, Homo sapiens
tgtacacaccccgct

SEQ ID NO: 1211334 - DNA, 15 bp, Homo sapiens
ctgtacacaccccgc

SEQ ID NO: 1211335 - DNA, 15 bp, Homo sapiens
actgtacacaccccg

SEQ ID NO: 1211336 - DNA, 15 bp, Homo sapiens
tactgtacacacccc

SEQ ID NO: 1211337 - DNA, 15 bp, Homo sapiens
atactgtacacaccc

SEQ ID NO: 1211338 - DNA, 15 bp, Homo sapiens
aatactgtacacacc

SEQ ID NO: 1211339 - DNA, 15 bp, Homo sapiens
caatactgtacacac

SEQ ID NO: 1211340 - DNA, 15 bp, Homo sapiens
tcaatactgtacaca

SEQ ID NO: 1211341 - DNA, 15 bp, Homo sapiens
gtcaatactgtacac

SEQ ID NO: 1211342 - DNA, 15 bp, Homo sapiens
tgtcaatactgtaca

SEQ ID NO: 1211343 - DNA, 15 bp, Homo sapiens
ctgtcaatactgtac

SEQ ID NO: 1211344 - DNA, 15 bp, Homo sapiens
tctgtcaatactgta

SEQ ID NO: 1211345 - DNA, 15 bp, Homo sapiens
atctgtcaatactgt

SEQ ID NO: 1211346 - DNA, 15 bp, Homo sapiens
gatctgtcaatactg

SEQ ID NO: 1211347 - DNA, 15 bp, Homo sapiens
agatctgtcaatact

SEQ ID NO: 1211348 - DNA, 15 bp, Homo sapiens
cagatctgtcaatac

SEQ ID NO: 1211349 - DNA, 15 bp, Homo sapiens
acagatctgtcaata

SEQ ID NO: 1211350 - DNA, 15 bp, Homo sapiens
tacagatctgtcaat

SEQ ID NO: 1211351 - DNA, 15 bp, Homo sapiens
ctacagatctgtcaa

SEQ ID NO: 1211352 - DNA, 15 bp, Homo sapiens
actacagatctgtca

SEQ ID NO: 1211353 - DNA, 15 bp, Homo sapiens
aactacagatctgtc

SEQ ID NO: 1211354 - DNA, 15 bp, Homo sapiens
caactacagatctgt

SEQ ID NO: 1211355 - DNA, 15 bp, Homo sapiens
ccaactacagatctg

SEQ ID NO: 1211356 - DNA, 15 bp, Homo sapiens
cccaactacagatct

SEQ ID NO: 1211357 - DNA, 15 bp, Homo sapiens
gcccaactacagatc

SEQ ID NO: 1211358 - DNA, 15 bp, Homo sapiens
tgcccaactacagat

SEQ ID NO: 1211359 - DNA, 15 bp, Homo sapiens
ttgcccaactacaga

SEQ ID NO: 1211360 - DNA, 15 bp, Homo sapiens
cttgcccaactacag

SEQ ID NO: 1211361 - DNA, 15 bp, Homo sapiens
tcttgcccaactaca

SEQ ID NO: 1211362 - DNA, 15 bp, Homo sapiens
ctcttgcccaactac

SEQ ID NO: 1211363 - DNA, 15 bp, Homo sapiens
tctcttgcccaacta

SEQ ID NO: 1211364 - DNA, 15 bp, Homo sapiens
ttctcttgcccaact

SEQ ID NO: 1211365 - DNA, 15 bp, Homo sapiens
attctcttgcccaac

SEQ ID NO: 1211366 - DNA, 15 bp, Homo sapiens
aattctcttgcccaa

SEQ ID NO: 1211367 - DNA, 15 bp, Homo sapiens
taattctcttgccca

SEQ ID NO: 1211368 - DNA, 15 bp, Homo sapiens
ataattctcttgccc

SEQ ID NO: 1211369 - DNA, 15 bp, Homo sapiens
gataattctcttgcc

SEQ ID NO: 1211370 - DNA, 15 bp, Homo sapiens
tgataattctcttgc

SEQ ID NO: 1211371 - DNA, 15 bp, Homo sapiens
ctgataattctcttg

SEQ ID NO: 1211372 - DNA, 15 bp, Homo sapiens
tctgataattctctt

SEQ ID NO: 1211373 - DNA, 15 bp, Homo sapiens
ctctgataattctct

SEQ ID NO: 1211374 - DNA, 15 bp, Homo sapiens
actctgataattctc

SEQ ID NO: 1211375 - DNA, 15 bp, Homo sapiens
aactctgataattct

SEQ ID NO: 1211376 - DNA, 15 bp, Homo sapiens
aaactctgataattc

SEQ ID NO: 1211377 - DNA, 15 bp, Homo sapiens
caaactctgataatt

SEQ ID NO: 1211378 - DNA, 15 bp, Homo sapiens
acaaactctgataat

SEQ ID NO: 1211379 - DNA, 15 bp, Homo sapiens
cacaaactctgataa

SEQ ID NO: 1211380 - DNA, 15 bp, Homo sapiens
tcacaaactctgata

SEQ ID NO: 1211381 - DNA, 15 bp, Homo sapiens
gtcacaaactctgat

SEQ ID NO: 1211382 - DNA, 15 bp, Homo sapiens
ggtcacaaactctga

SEQ ID NO: 1211383 - DNA, 15 bp, Homo sapiens
tggtcacaaactctg

SEQ ID NO: 1211384 - DNA, 15 bp, Homo sapiens
gtggtcacaaactct

SEQ ID NO: 1211385 - DNA, 15 bp, Homo sapiens
tgtggtcacaaactc

SEQ ID NO: 1211386 - DNA, 15 bp, Homo sapiens
ctgtggtcacaaact

SEQ ID NO: 1211387 - DNA, 15 bp, Homo sapiens
gctgtggtcacaaac

SEQ ID NO: 1211388 - DNA, 15 bp, Homo sapiens
tgctgtggtcacaaa

SEQ ID NO: 1211389 - DNA, 15 bp, Homo sapiens
ctgctgtggtcacaa

SEQ ID NO: 1211390 - DNA, 15 bp, Homo sapiens
tctgctgtggtcaca

SEQ ID NO: 1211391 - DNA, 15 bp, Homo sapiens
atctgctgtggtcac

SEQ ID NO: 1211392 - DNA, 15 bp, Homo sapiens
aatctgctgtggtca

SEQ ID NO: 1211393 - DNA, 15 bp, Homo sapiens
gaatctgctgtggtc

SEQ ID NO: 1211394 - DNA, 15 bp, Homo sapiens
ggaatctgctgtggt

SEQ ID NO: 1211395 - DNA, 15 bp, Homo sapiens
tggaatctgctgtgg

SEQ ID NO: 1211396 - DNA, 15 bp, Homo sapiens
ttggaatctgctgtg

SEQ ID NO: 1211397 - DNA, 15 bp, Homo sapiens
tttggaatctgctgt

SEQ ID NO: 1211398 - DNA, 15 bp, Homo sapiens
ctttggaatctgctg

SEQ ID NO: 1211399 - DNA, 15 bp, Homo sapiens
gctttggaatctgct

SEQ ID NO: 1211400 - DNA, 15 bp, Homo sapiens
agctttggaatctgc

SEQ ID NO: 1211401 - DNA, 15 bp, Homo sapiens
gagctttggaatctg

SEQ ID NO: 1211402 - DNA, 15 bp, Homo sapiens
cgagctttggaatct

SEQ ID NO: 1211403 - DNA, 15 bp, Homo sapiens
tcgagctttggaatc

SEQ ID NO: 1211404 - DNA, 15 bp, Homo sapiens
gtcgagctttggaat

SEQ ID NO: 1211405 - DNA, 15 bp, Homo sapiens
agtcgagctttggaa

SEQ ID NO: 1211406 - DNA, 15 bp, Homo sapiens
gagtcgagctttgga

SEQ ID NO: 1211407 - DNA, 15 bp, Homo sapiens
tgagtcgagctttgg

SEQ ID NO: 1211408 - DNA, 15 bp, Homo sapiens
atgagtcgagctttg

SEQ ID NO: 1211409 - DNA, 15 bp, Homo sapiens
aatgagtcgagcttt

SEQ ID NO: 1211410 - DNA, 15 bp, Homo sapiens
aaatgagtcgagctt

SEQ ID NO: 1211411 - DNA, 15 bp, Homo sapiens
aaaatgagtcgagct

SEQ ID NO: 1211412 - DNA, 15 bp, Homo sapiens
gaaaatgagtcgagc

SEQ ID NO: 1211413 - DNA, 15 bp, Homo sapiens
agaaaatgagtcgag

SEQ ID NO: 1211414 - DNA, 15 bp, Homo sapiens
aagaaaatgagtcga

SEQ ID NO: 1211415 - DNA, 15 bp, Homo sapiens
gaagaaaatgagtcg

SEQ ID NO: 1211416 - DNA, 15 bp, Homo sapiens
agaagaaaatgagtc

SEQ ID NO: 1211417 - DNA, 15 bp, Homo sapiens
gagaagaaaatgagt

SEQ ID NO: 1211418 - DNA, 15 bp, Homo sapiens
agagaagaaaatgag

SEQ ID NO: 1211419 - DNA, 15 bp, Homo sapiens
gagagaagaaaatga

SEQ ID NO: 1211420 - DNA, 15 bp, Homo sapiens
agagagaagaaaatg

SEQ ID NO: 1211421 - DNA, 15 bp, Homo sapiens
aagagagaagaaaat

SEQ ID NO: 1211422 - DNA, 15 bp, Homo sapiens
gaagagagaagaaaa

SEQ ID NO: 1211423 - DNA, 15 bp, Homo sapiens
ggaagagagaagaaa

SEQ ID NO: 1211424 - DNA, 15 bp, Homo sapiens
aggaagagagaagaa

SEQ ID NO: 1211425 - DNA, 15 bp, Homo sapiens
ggaaggaagagagaa

SEQ ID NO: 1211426 - DNA, 15 bp, Homo sapiens
gggaaggaagagaga

SEQ ID NO: 1211427 - DNA, 15 bp, Homo sapiens
agggaaggaagagag

SEQ ID NO: 1211428 - DNA, 15 bp, Homo sapiens
aagggaaggaagaga

SEQ ID NO: 1211429 - DNA, 15 bp, Homo sapiens
aaagggaaggaagag

SEQ ID NO: 1211430 - DNA, 15 bp, Homo sapiens
aaaagggaaggaaga

SEQ ID NO: 1211431 - DNA, 15 bp, Homo sapiens
aaaaagggaaggaag

SEQ ID NO: 1211432 - DNA, 15 bp, Homo sapiens
aaaaaagggaaggaa

SEQ ID NO: 1211433 - DNA, 15 bp, Homo sapiens
gaaaaaagggaagga

SEQ ID NO: 1211434 - DNA, 15 bp, Homo sapiens
agaaaaaagggaagg

SEQ ID NO: 1211435 - DNA, 15 bp, Homo sapiens
aagaaaaaagggaag

SEQ ID NO: 1211436 - DNA, 15 bp, Homo sapiens
aaagaaaaaagggaa

SEQ ID NO: 1211437 - DNA, 15 bp, Homo sapiens
aaaagaaaaaaggga

SEQ ID NO: 1211438 - DNA, 15 bp, Homo sapiens
gaaaagaaaaaaggg

SEQ ID NO: 1211439 - DNA, 15 bp, Homo sapiens
agaaaagaaaaaagg

SEQ ID NO: 1211440 - DNA, 15 bp, Homo sapiens
gactctgtcaaaaaa

SEQ ID NO: 1211441 - DNA, 15 bp, Homo sapiens
agactctgtcaaaaa

SEQ ID NO: 1211442 - DNA, 15 bp, Homo sapiens
gagactctgtcaaaa

SEQ ID NO: 1211443 - DNA, 15 bp, Homo sapiens
cgagactctgtcaaa

SEQ ID NO: 1211444 - DNA, 15 bp, Homo sapiens
gcgagactctgtcaa

SEQ ID NO: 1211445 - DNA, 15 bp, Homo sapiens
agcgagactctgtca

SEQ ID NO: 1211446 - DNA, 15 bp, Homo sapiens
cagattgtgccactg

SEQ ID NO: 1211447 - DNA, 15 bp, Homo sapiens
ccagattgtgccact

SEQ ID NO: 1211448 - DNA, 15 bp, Homo sapiens
cccagattgtgccac

SEQ ID NO: 1211449 - DNA, 15 bp, Homo sapiens
gcccagattgtgcca

SEQ ID NO: 1211450 - DNA, 15 bp, Homo sapiens
agcccagattgtgcc

SEQ ID NO: 1211451 - DNA, 15 bp, Homo sapiens
gagcccagattgtgc

SEQ ID NO: 1211452 - DNA, 15 bp, Homo sapiens
tgagcccagattgtg

SEQ ID NO: 1211453 - DNA, 15 bp, Homo sapiens
gtgagcccagattgt

SEQ ID NO: 1211454 - DNA, 15 bp, Homo sapiens
agtgagcccagattg

SEQ ID NO: 1211455 - DNA, 15 bp, Homo sapiens
cagtgagcccagatt

SEQ ID NO: 1211456 - DNA, 15 bp, Homo sapiens
ctgcagtgagcccag

SEQ ID NO: 1211457 - DNA, 15 bp, Homo sapiens
gctgcagtgagccca

SEQ ID NO: 1211458 - DNA, 15 bp, Homo sapiens
ggctgcagtgagccc

SEQ ID NO: 1211459 - DNA, 15 bp, Homo sapiens
gggctgcagtgagcc

SEQ ID NO: 1211460 - DNA, 15 bp, Homo sapiens
aggggctgcagtgag

SEQ ID NO: 1211461 - DNA, 15 bp, Homo sapiens
caggggctgcagtga

SEQ ID NO: 1211462 - DNA, 15 bp, Homo sapiens
gcaggggctgcagtg

SEQ ID NO: 1211463 - DNA, 15 bp, Homo sapiens
ggcaggggctgcagt

SEQ ID NO: 1211464 - DNA, 15 bp, Homo sapiens
aggcaggggctgcag

SEQ ID NO: 1211465 - DNA, 15 bp, Homo sapiens
gaggcaggggctgca

SEQ ID NO: 1211466 - DNA, 15 bp, Homo sapiens
ggaggcaggggctgc

SEQ ID NO: 1211467 - DNA, 15 bp, Homo sapiens
aggaggcaggggctg

SEQ ID NO: 1211468 - DNA, 15 bp, Homo sapiens
caggaggcaggggct

SEQ ID NO: 1211469 - DNA, 15 bp, Homo sapiens
ccaggaggcaggggc

SEQ ID NO: 1211470 - DNA, 15 bp, Homo sapiens
cccaggaggcagggg

SEQ ID NO: 1211471 - DNA, 15 bp, Homo sapiens
acccaggaggcaggg

SEQ ID NO: 1211472 - DNA, 15 bp, Homo sapiens
aacccaggaggcagg

SEQ ID NO: 1211473 - DNA, 15 bp, Homo sapiens
atttgaacccaggag

SEQ ID NO: 1211474 - DNA, 15 bp, Homo sapiens
catttgaacccagga

SEQ ID NO: 1211475 - DNA, 15 bp, Homo sapiens
tcatttgaacccagg

SEQ ID NO: 1211476 - DNA, 15 bp, Homo sapiens
atcatttgaacccag

SEQ ID NO: 1211477 - DNA, 15 bp, Homo sapiens
aatcatttgaaccca

SEQ ID NO: 1211478 - DNA, 15 bp, Homo sapiens
gaatcatttgaaccc

SEQ ID NO: 1211479 - DNA, 15 bp, Homo sapiens
agaatcatttgaacc

SEQ ID NO: 1211480 - DNA, 15 bp, Homo sapiens
gagaatcatttgaac

SEQ ID NO: 1211481 - DNA, 15 bp, Homo sapiens
tgagaatcatttgaa

SEQ ID NO: 1211482 - DNA, 15 bp, Homo sapiens
atgagaatcatttga

SEQ ID NO: 1211483 - DNA, 15 bp, Homo sapiens
catgagaatcatttg

SEQ ID NO: 1211484 - DNA, 15 bp, Homo sapiens
acatgagaatcattt

SEQ ID NO: 1211485 - DNA, 15 bp, Homo sapiens
aacatgagaatcatt

SEQ ID NO: 1211486 - DNA, 15 bp, Homo sapiens
aaacatgagaatcat

SEQ ID NO: 1211487 - DNA, 15 bp, Homo sapiens
gaaacatgagaatca

SEQ ID NO: 1211488 - DNA, 15 bp, Homo sapiens
tgaaacatgagaatc

SEQ ID NO: 1211489 - DNA, 15 bp, Homo sapiens
ctgaaacatgagaat

SEQ ID NO: 1211490 - DNA, 15 bp, Homo sapiens
gctgaaacatgagaa

SEQ ID NO: 1211491 - DNA, 15 bp, Homo sapiens
ggctgaaacatgaga

SEQ ID NO: 1211492 - DNA, 15 bp, Homo sapiens
aggctgaaacatgag

SEQ ID NO: 1211493 - DNA, 15 bp, Homo sapiens
gaggctgaaacatga

SEQ ID NO: 1211494 - DNA, 15 bp, Homo sapiens
ggaggctgaaacatg

SEQ ID NO: 1211495 - DNA, 15 bp, Homo sapiens
gggaggctgaaacat

SEQ ID NO: 1211496 - DNA, 15 bp, Homo sapiens
cgggaggctgaaaca

SEQ ID NO: 1211497 - DNA, 15 bp, Homo sapiens
tcgggaggctgaaac

SEQ ID NO: 1211498 - DNA, 15 bp, Homo sapiens
ctcgggaggctgaaa

SEQ ID NO: 1211499 - DNA, 15 bp, Homo sapiens
gcagctactcgggag

SEQ ID NO: 1211500 - DNA, 15 bp, Homo sapiens
tgcagctactcggga

SEQ ID NO: 1211501 - DNA, 15 bp, Homo sapiens
ttgcagctactcggg

SEQ ID NO: 1211502 - DNA, 15 bp, Homo sapiens
attgcagctactcgg

SEQ ID NO: 1211503 - DNA, 15 bp, Homo sapiens
aattgcagctactcg

SEQ ID NO: 1211504 - DNA, 15 bp, Homo sapiens
taattgcagctactc

SEQ ID NO: 1211505 - DNA, 15 bp, Homo sapiens
gtaattgcagctact

SEQ ID NO: 1211506 - DNA, 15 bp, Homo sapiens
tgtaattgcagctac

SEQ ID NO: 1211507 - DNA, 15 bp, Homo sapiens
ctgtaattgcagcta

SEQ ID NO: 1211508 - DNA, 15 bp, Homo sapiens
cctgtaattgcagct

SEQ ID NO: 1211509 - DNA, 15 bp, Homo sapiens
gcctgtaattgcagc

SEQ ID NO: 1211510 - DNA, 15 bp, Homo sapiens
tgcctgtaattgcag

SEQ ID NO: 1211511 - DNA, 15 bp, Homo sapiens
atgcctgtaattgca

SEQ ID NO: 1211512 - DNA, 15 bp, Homo sapiens
aatgcctgtaattgc

SEQ ID NO: 1211513 - DNA, 15 bp, Homo sapiens
gaatgcctgtaattg

SEQ ID NO: 1211514 - DNA, 15 bp, Homo sapiens
cgaatgcctgtaatt

SEQ ID NO: 1211515 - DNA, 15 bp, Homo sapiens
ccgaatgcctgtaat

SEQ ID NO: 1211516 - DNA, 15 bp, Homo sapiens
cccgaatgcctgtaa

SEQ ID NO: 1211517 - DNA, 15 bp, Homo sapiens
acccgaatgcctgta

SEQ ID NO: 1211518 - DNA, 15 bp, Homo sapiens
aacccgaatgcctgt

SEQ ID NO: 1211519 - DNA, 15 bp, Homo sapiens
gaacccgaatgcctg

SEQ ID NO: 1211520 - DNA, 15 bp, Homo sapiens
tgaacccgaatgcct

SEQ ID NO: 1211521 - DNA, 15 bp, Homo sapiens
ttgaacccgaatgcc

SEQ ID NO: 1211522 - DNA, 15 bp, Homo sapiens
cttgaacccgaatgc

SEQ ID NO: 1211523 - DNA, 15 bp, Homo sapiens
acttgaacccgaatg

SEQ ID NO: 1211524 - DNA, 15 bp, Homo sapiens
cacttgaacccgaat

SEQ ID NO: 1211525 - DNA, 15 bp, Homo sapiens
tcacttgaacccgaa

SEQ ID NO: 1211526 - DNA, 15 bp, Homo sapiens
atcacttgaacccga

SEQ ID NO: 1211527 - DNA, 15 bp, Homo sapiens
tggctgaggcaggag

SEQ ID NO: 1211528 - DNA, 15 bp, Homo sapiens
gtggctgaggcagga

SEQ ID NO: 1211529 - DNA, 15 bp, Homo sapiens
ggtggctgaggcagg

SEQ ID NO: 1211530 - DNA, 15 bp, Homo sapiens
aggtggctgaggcag

SEQ ID NO: 1211531 - DNA, 15 bp, Homo sapiens
caggtggctgaggca

SEQ ID NO: 1211532 - DNA, 15 bp, Homo sapiens
tcaggtggctgaggc

SEQ ID NO: 1211533 - DNA, 15 bp, Homo sapiens
ctcaggtggctgagg

SEQ ID NO: 1211534 - DNA, 15 bp, Homo sapiens
gctcaggtggctgag

SEQ ID NO: 1211535 - DNA, 15 bp, Homo sapiens
tgctcaggtggctga

SEQ ID NO: 1211536 - DNA, 15 bp, Homo sapiens
ctgctcaggtggctg

SEQ ID NO: 1211537 - DNA, 15 bp, Homo sapiens
gctgctcaggtggct

SEQ ID NO: 1211538 - DNA, 15 bp, Homo sapiens
agctgctcaggtggc

SEQ ID NO: 1211539 - DNA, 15 bp, Homo sapiens
cagctgctcaggtgg

SEQ ID NO: 1211540 - DNA, 15 bp, Homo sapiens
ccagctgctcaggtg

SEQ ID NO: 1211541 - DNA, 15 bp, Homo sapiens
cccagctgctcaggt

SEQ ID NO: 1211542 - DNA, 15 bp, Homo sapiens
atcccagctgctcag

SEQ ID NO: 1211543 - DNA, 15 bp, Homo sapiens
aatcccagctgctca

SEQ ID NO: 1211544 - DNA, 15 bp, Homo sapiens
taatcccagctgctc

SEQ ID NO: 1211545 - DNA, 15 bp, Homo sapiens
ttcaggagttcgaga

SEQ ID NO: 1211546 - DNA, 15 bp, Homo sapiens
gttcaggagttcgag

SEQ ID NO: 1211547 - DNA, 15 bp, Homo sapiens
agttcaggagttcga

SEQ ID NO: 1211548 - DNA, 15 bp, Homo sapiens
gagttcaggagttcg

SEQ ID NO: 1211549 - DNA, 15 bp, Homo sapiens
tgagttcaggagttc

SEQ ID NO: 1211550 - DNA, 15 bp, Homo sapiens
ctgagttcaggagtt

SEQ ID NO: 1211551 - DNA, 15 bp, Homo sapiens
cctgagttcaggagt

SEQ ID NO: 1211552 - DNA, 15 bp, Homo sapiens
acctgagttcaggag

SEQ ID NO: 1211553 - DNA, 15 bp, Homo sapiens
cacctgagttcagga

SEQ ID NO: 1211554 - DNA, 15 bp, Homo sapiens
tcacctgagttcagg

SEQ ID NO: 1211555 - DNA, 15 bp, Homo sapiens
atcacctgagttcag

SEQ ID NO: 1211556 - DNA, 15 bp, Homo sapiens
gatcacctgagttca

SEQ ID NO: 1211557 - DNA, 15 bp, Homo sapiens
ggatcacctgagttc

SEQ ID NO: 1211558 - DNA, 15 bp, Homo sapiens
agtgggcggatcacc

SEQ ID NO: 1211559 - DNA, 15 bp, Homo sapiens
gtctgtaatctcagc

SEQ ID NO: 1211560 - DNA, 15 bp, Homo sapiens
cgtctgtaatctcag

SEQ ID NO: 1211561 - DNA, 15 bp, Homo sapiens
acgtctgtaatctca

SEQ ID NO: 1211562 - DNA, 15 bp, Homo sapiens
cacgtctgtaatctc

SEQ ID NO: 1211563 - DNA, 15 bp, Homo sapiens
tcacgtctgtaatct

SEQ ID NO: 1211564 - DNA, 15 bp, Homo sapiens
actcacgtctgtaat

SEQ ID NO: 1211565 - DNA, 15 bp, Homo sapiens
gactcacgtctgtaa

SEQ ID NO: 1211566 - DNA, 15 bp, Homo sapiens
tgactcacgtctgta

SEQ ID NO: 1211567 - DNA, 15 bp, Homo sapiens
gtgactcacgtctgt

SEQ ID NO: 1211568 - DNA, 15 bp, Homo sapiens
ggtgactcacgtctg

SEQ ID NO: 1211569 - DNA, 15 bp, Homo sapiens
cggtgactcacgtct

SEQ ID NO: 1211570 - DNA, 15 bp, Homo sapiens
gcggtgactcacgtc

SEQ ID NO: 1211571 - DNA, 15 bp, Homo sapiens
cgcggtgactcacgt

SEQ ID NO: 1211572 - DNA, 15 bp, Homo sapiens
gcgcggtgactcacg

SEQ ID NO: 1211573 - DNA, 15 bp, Homo sapiens
ggcgcggtgactcac

SEQ ID NO: 1211574 - DNA, 15 bp, Homo sapiens
gggcgcggtgactca

SEQ ID NO: 1211575 - DNA, 15 bp, Homo sapiens
tgggcgcggtgactc

SEQ ID NO: 1211576 - DNA, 15 bp, Homo sapiens
ctgggcgcggtgact

SEQ ID NO: 1211577 - DNA, 15 bp, Homo sapiens
gctgggcgcggtgac

SEQ ID NO: 1211578 - DNA, 15 bp, Homo sapiens
ggctgggcgcggtga

SEQ ID NO: 1211579 - DNA, 15 bp, Homo sapiens
acaggctgggcgcgg

SEQ ID NO: 1211580 - DNA, 15 bp, Homo sapiens
aacaggctgggcgcg

SEQ ID NO: 1211581 - DNA, 15 bp, Homo sapiens
gaacaggctgggcgc

SEQ ID NO: 1211582 - DNA, 15 bp, Homo sapiens
agaacaggctgggcg

SEQ ID NO: 1211583 - DNA, 15 bp, Homo sapiens
cagaacaggctgggc

SEQ ID NO: 1211584 - DNA, 15 bp, Homo sapiens
acagaacaggctggg

SEQ ID NO: 1211585 - DNA, 15 bp, Homo sapiens
aacagaacaggctgg

SEQ ID NO: 1211586 - DNA, 15 bp, Homo sapiens
gaacagaacaggctg

SEQ ID NO: 1211587 - DNA, 15 bp, Homo sapiens
agaacagaacaggct

SEQ ID NO: 1211588 - DNA, 15 bp, Homo sapiens
aagaacagaacaggc

SEQ ID NO: 1211589 - DNA, 15 bp, Homo sapiens
aaagaacagaacagg

SEQ ID NO: 1211590 - DNA, 15 bp, Homo sapiens
taaagaacagaacag

SEQ ID NO: 1211591 - DNA, 15 bp, Homo sapiens
ttaaagaacagaaca

SEQ ID NO: 1211592 - DNA, 15 bp, Homo sapiens
attaaagaacagaac

SEQ ID NO: 1211593 - DNA, 15 bp, Homo sapiens
aattaaagaacagaa

SEQ ID NO: 1211594 - DNA, 15 bp, Homo sapiens
gaattaaagaacaga

SEQ ID NO: 1211595 - DNA, 15 bp, Homo sapiens
agaattaaagaacag

SEQ ID NO: 1211596 - DNA, 15 bp, Homo sapiens
gagaattaaagaaca

SEQ ID NO: 1211597 - DNA, 15 bp, Homo sapiens
tgagaattaaagaac

SEQ ID NO: 1211598 - DNA, 15 bp, Homo sapiens
ttgagaattaaagaa

SEQ ID NO: 1211599 - DNA, 15 bp, Homo sapiens
tttgagaattaaaga

SEQ ID NO: 1211600 - DNA, 15 bp, Homo sapiens
ttttgagaattaaag

SEQ ID NO: 1211601 - DNA, 15 bp, Homo sapiens
gttttgagaattaaa

SEQ ID NO: 1211602 - DNA, 15 bp, Homo sapiens
tgttttgagaattaa

SEQ ID NO: 1211603 - DNA, 15 bp, Homo sapiens
gtgttttgagaatta

SEQ ID NO: 1211604 - DNA, 15 bp, Homo sapiens
ggtgttttgagaatt

SEQ ID NO: 1211605 - DNA, 15 bp, Homo sapiens
gggtgttttgagaat

SEQ ID NO: 1211606 - DNA, 15 bp, Homo sapiens
agggtgttttgagaa

SEQ ID NO: 1211607 - DNA, 15 bp, Homo sapiens
gagggtgttttgaga

SEQ ID NO: 1211608 - DNA, 15 bp, Homo sapiens
agagggtgttttgag

SEQ ID NO: 1211609 - DNA, 15 bp, Homo sapiens
tagagggtgttttga

SEQ ID NO: 1211610 - DNA, 15 bp, Homo sapiens
ctagagggtgttttg

SEQ ID NO: 1211611 - DNA, 15 bp, Homo sapiens
cctagagggtgtttt

SEQ ID NO: 1211612 - DNA, 15 bp, Homo sapiens
tcctagagggtgttt

SEQ ID NO: 1211613 - DNA, 15 bp, Homo sapiens
ttcctagagggtgtt

SEQ ID NO: 1211614 - DNA, 15 bp, Homo sapiens
cttcctagagggtgt

SEQ ID NO: 1211615 - DNA, 15 bp, Homo sapiens
acttcctagagggtg

SEQ ID NO: 1211616 - DNA, 15 bp, Homo sapiens
tacttcctagagggt

SEQ ID NO: 1211617 - DNA, 15 bp, Homo sapiens
ctacttcctagaggg

SEQ ID NO: 1211618 - DNA, 15 bp, Homo sapiens
tctacttcctagagg

SEQ ID NO: 1211619 - DNA, 15 bp, Homo sapiens
ctctacttcctagag

SEQ ID NO: 1211620 - DNA, 15 bp, Homo sapiens
tctctacttcctaga

SEQ ID NO: 1211621 - DNA, 15 bp, Homo sapiens
gtctctacttcctag

SEQ ID NO: 1211622 - DNA, 15 bp, Homo sapiens
agtctctacttccta

SEQ ID NO: 1211623 - DNA, 15 bp, Homo sapiens
cagtctctacttcct

SEQ ID NO: 1211624 - DNA, 15 bp, Homo sapiens
gcagtctctacttcc

SEQ ID NO: 1211625 - DNA, 15 bp, Homo sapiens
ggcagtctctacttc

SEQ ID NO: 1211626 - DNA, 15 bp, Homo sapiens
tggcagtctctactt

SEQ ID NO: 1211627 - DNA, 15 bp, Homo sapiens
atggcagtctctact

SEQ ID NO: 1211628 - DNA, 15 bp, Homo sapiens
aatggcagtctctac

SEQ ID NO: 1211629 - DNA, 15 bp, Homo sapiens
gaatggcagtctcta

SEQ ID NO: 1211630 - DNA, 15 bp, Homo sapiens
agaatggcagtctct

SEQ ID NO: 1211631 - DNA, 15 bp, Homo sapiens
gagaatggcagtctc

SEQ ID NO: 1211632 - DNA, 15 bp, Homo sapiens
ggagaatggcagtct

SEQ ID NO: 1211633 - DNA, 15 bp, Homo sapiens
gggagaatggcagtc

SEQ ID NO: 1211634 - DNA, 15 bp, Homo sapiens
ggggagaatggcagt

SEQ ID NO: 1211635 - DNA, 15 bp, Homo sapiens
gggggagaatggcag

SEQ ID NO: 1211636 - DNA, 15 bp, Homo sapiens
tgggggagaatggca

SEQ ID NO: 1211637 - DNA, 15 bp, Homo sapiens
atgggggagaatggc

SEQ ID NO: 1211638 - DNA, 15 bp, Homo sapiens
aatgggggagaatgg

SEQ ID NO: 1211639 - DNA, 15 bp, Homo sapiens
aaatgggggagaatg

SEQ ID NO: 1211640 - DNA, 15 bp, Homo sapiens
aaaatgggggagaat

SEQ ID NO: 1211641 - DNA, 15 bp, Homo sapiens
taaaatgggggagaa

SEQ ID NO: 1211642 - DNA, 15 bp, Homo sapiens
gtaaaatgggggaga

SEQ ID NO: 1211643 - DNA, 15 bp, Homo sapiens
tgtaaaatgggggag

SEQ ID NO: 1211644 - DNA, 15 bp, Homo sapiens
ctgtaaaatggggga

SEQ ID NO: 1211645 - DNA, 15 bp, Homo sapiens
tctgtaaaatggggg

SEQ ID NO: 1211646 - DNA, 15 bp, Homo sapiens
gatctgtaaaatggg

SEQ ID NO: 1211647 - DNA, 15 bp, Homo sapiens
tgatctgtaaaatgg

SEQ ID NO: 1211648 - DNA, 15 bp, Homo sapiens
ctgatctgtaaaatg

SEQ ID NO: 1211649 - DNA, 15 bp, Homo sapiens
cctgatctgtaaaat

SEQ ID NO: 1211650 - DNA, 15 bp, Homo sapiens
agtttcctgatctgt

SEQ ID NO: 1211651 - DNA, 15 bp, Homo sapiens
cagtttcctgatctg

SEQ ID NO: 1211652 - DNA, 15 bp, Homo sapiens
tcagtttcctgatct

SEQ ID NO: 1211653 - DNA, 15 bp, Homo sapiens
ctcagtttcctgatc

SEQ ID NO: 1211654 - DNA, 15 bp, Homo sapiens
actcagtttcctgat

SEQ ID NO: 1211655 - DNA, 15 bp, Homo sapiens
gactcagtttcctga

SEQ ID NO: 1211656 - DNA, 15 bp, Homo sapiens
ggactcagtttcctg

SEQ ID NO: 1211657 - DNA, 15 bp, Homo sapiens
gggactcagtttcct

SEQ ID NO: 1211658 - DNA, 15 bp, Homo sapiens
tgggactcagtttcc

SEQ ID NO: 1211659 - DNA, 15 bp, Homo sapiens
ctgggactcagtttc

SEQ ID NO: 1211660 - DNA, 15 bp, Homo sapiens
tctgggactcagttt

SEQ ID NO: 1211661 - DNA, 15 bp, Homo sapiens
ttctgggactcagtt

SEQ ID NO: 1211662 - DNA, 15 bp, Homo sapiens
cttctgggactcagt

SEQ ID NO: 1211663 - DNA, 15 bp, Homo sapiens
ccttctgggactcag

SEQ ID NO: 1211664 - DNA, 15 bp, Homo sapiens
tccttctgggactca

SEQ ID NO: 1211665 - DNA, 15 bp, Homo sapiens
atccttctgggactc

SEQ ID NO: 1211666 - DNA, 15 bp, Homo sapiens
aatccttctgggact

SEQ ID NO: 1211667 - DNA, 15 bp, Homo sapiens
aaatccttctgggac

SEQ ID NO: 1211668 - DNA, 15 bp, Homo sapiens
taaatccttctggga

SEQ ID NO: 1211669 - DNA, 15 bp, Homo sapiens
ctaaatccttctggg

SEQ ID NO: 1211670 - DNA, 15 bp, Homo sapiens
actaaatccttctgg

SEQ ID NO: 1211671 - DNA, 15 bp, Homo sapiens
gactaaatccttctg

SEQ ID NO: 1211672 - DNA, 15 bp, Homo sapiens
tgactaaatccttct

SEQ ID NO: 1211673 - DNA, 15 bp, Homo sapiens
ctgactaaatccttc

SEQ ID NO: 1211674 - DNA, 15 bp, Homo sapiens
actgactaaatcctt

SEQ ID NO: 1211675 - DNA, 15 bp, Homo sapiens
aactgactaaatcct

SEQ ID NO: 1211676 - DNA, 15 bp, Homo sapiens
taactgactaaatcc

SEQ ID NO: 1211677 - DNA, 15 bp, Homo sapiens
gtaactgactaaatc

SEQ ID NO: 1211678 - DNA, 15 bp, Homo sapiens
ggtaactgactaaat

SEQ ID NO: 1211679 - DNA, 15 bp, Homo sapiens
gggtaactgactaaa

SEQ ID NO: 1211680 - DNA, 15 bp, Homo sapiens
tgggtaactgactaa

SEQ ID NO: 1211681 - DNA, 15 bp, Homo sapiens
ttgggtaactgacta

SEQ ID NO: 1211682 - DNA, 15 bp, Homo sapiens
cttgggtaactgact

SEQ ID NO: 1211683 - DNA, 15 bp, Homo sapiens
acttgggtaactgac

SEQ ID NO: 1211684 - DNA, 15 bp, Homo sapiens
aacttgggtaactga

SEQ ID NO: 1211685 - DNA, 15 bp, Homo sapiens
caacttgggtaactg

SEQ ID NO: 1211686 - DNA, 15 bp, Homo sapiens
acaacttgggtaact

SEQ ID NO: 1211687 - DNA, 15 bp, Homo sapiens
aacaacttgggtaac

SEQ ID NO: 1211688 - DNA, 15 bp, Homo sapiens
gaacaacttgggtaa

SEQ ID NO: 1211689 - DNA, 15 bp, Homo sapiens
agaacaacttgggta

SEQ ID NO: 1211690 - DNA, 15 bp, Homo sapiens
tagaacaacttgggt

SEQ ID NO: 1211691 - DNA, 15 bp, Homo sapiens
ctagaacaacttggg

SEQ ID NO: 1211692 - DNA, 15 bp, Homo sapiens
actagaacaacttgg

SEQ ID NO: 1211693 - DNA, 15 bp, Homo sapiens
aactagaacaacttg

SEQ ID NO: 1211694 - DNA, 15 bp, Homo sapiens
taactagaacaactt

SEQ ID NO: 1211695 - DNA, 15 bp, Homo sapiens
ttaactagaacaact

SEQ ID NO: 1211696 - DNA, 15 bp, Homo sapiens
tttaactagaacaac

SEQ ID NO: 1211697 - DNA, 15 bp, Homo sapiens
atttaactagaacaa

SEQ ID NO: 1211698 - DNA, 15 bp, Homo sapiens
catttaactagaaca

SEQ ID NO: 1211699 - DNA, 15 bp, Homo sapiens
ccatttaactagaac

SEQ ID NO: 1211700 - DNA, 15 bp, Homo sapiens
gccatttaactagaa

SEQ ID NO: 1211701 - DNA, 15 bp, Homo sapiens
ggccatttaactaga

SEQ ID NO: 1211702 - DNA, 15 bp, Homo sapiens
aggccatttaactag

SEQ ID NO: 1211703 - DNA, 15 bp, Homo sapiens
caggccatttaacta

SEQ ID NO: 1211704 - DNA, 15 bp, Homo sapiens
ccaggccatttaact

SEQ ID NO: 1211705 - DNA, 15 bp, Homo sapiens
tccaggccatttaac

SEQ ID NO: 1211706 - DNA, 15 bp, Homo sapiens
ttccaggccatttaa

SEQ ID NO: 1211707 - DNA, 15 bp, Homo sapiens
tttccaggccattta

SEQ ID NO: 1211708 - DNA, 15 bp, Homo sapiens
ctttccaggccattt

SEQ ID NO: 1211709 - DNA, 15 bp, Homo sapiens
gctttccaggccatt

SEQ ID NO: 1211710 - DNA, 15 bp, Homo sapiens
ggctttccaggccat

SEQ ID NO: 1211711 - DNA, 15 bp, Homo sapiens
tggctttccaggcca

SEQ ID NO: 1211712 - DNA, 15 bp, Homo sapiens
ctggctttccaggcc

SEQ ID NO: 1211713 - DNA, 15 bp, Homo sapiens
actggctttccaggc

SEQ ID NO: 1211714 - DNA, 15 bp, Homo sapiens
cactggctttccagg

SEQ ID NO: 1211715 - DNA, 15 bp, Homo sapiens
tcactggctttccag

SEQ ID NO: 1211716 - DNA, 15 bp, Homo sapiens
ttcactggctttcca

SEQ ID NO: 1211717 - DNA, 15 bp, Homo sapiens
cttcactggctttcc

SEQ ID NO: 1211718 - DNA, 15 bp, Homo sapiens
gcttcactggctttc

SEQ ID NO: 1211719 - DNA, 15 bp, Homo sapiens
ggcttcactggcttt

SEQ ID NO: 1211720 - DNA, 15 bp, Homo sapiens
gggcttcactggctt

SEQ ID NO: 1211721 - DNA, 15 bp, Homo sapiens
tgggcttcactggct

SEQ ID NO: 1211722 - DNA, 15 bp, Homo sapiens
ctgggcttcactggc

SEQ ID NO: 1211723 - DNA, 15 bp, Homo sapiens
cctgggcttcactgg

SEQ ID NO: 1211724 - DNA, 15 bp, Homo sapiens
tcctgggcttcactg

SEQ ID NO: 1211725 - DNA, 15 bp, Homo sapiens
atcctgggcttcact

SEQ ID NO: 1211726 - DNA, 15 bp, Homo sapiens
aatcctgggcttcac

SEQ ID NO: 1211727 - DNA, 15 bp, Homo sapiens
caatcctgggcttca

SEQ ID NO: 1211728 - DNA, 15 bp, Homo sapiens
acaatcctgggcttc

SEQ ID NO: 1211729 - DNA, 15 bp, Homo sapiens
gacaatcctgggctt

SEQ ID NO: 1211730 - DNA, 15 bp, Homo sapiens
agacaatcctgggct

SEQ ID NO: 1211731 - DNA, 15 bp, Homo sapiens
tagacaatcctgggc

SEQ ID NO: 1211732 - DNA, 15 bp, Homo sapiens
atagacaatcctggg

SEQ ID NO: 1211733 - DNA, 15 bp, Homo sapiens
gatagacaatcctgg

SEQ ID NO: 1211734 - DNA, 15 bp, Homo sapiens
agatagacaatcctg

SEQ ID NO: 1211735 - DNA, 15 bp, Homo sapiens
tagatagacaatcct

SEQ ID NO: 1211736 - DNA, 15 bp, Homo sapiens
ttagatagacaatcc

SEQ ID NO: 1211737 - DNA, 15 bp, Homo sapiens
gttagatagacaatc

SEQ ID NO: 1211738 - DNA, 15 bp, Homo sapiens
ggttagatagacaat

SEQ ID NO: 1211739 - DNA, 15 bp, Homo sapiens
gggttagatagacaa

SEQ ID NO: 1211740 - DNA, 15 bp, Homo sapiens
ggggttagatagaca

SEQ ID NO: 1211741 - DNA, 15 bp, Homo sapiens
gggggttagatagac

SEQ ID NO: 1211742 - DNA, 15 bp, Homo sapiens
agggggttagataga

SEQ ID NO: 1211743 - DNA, 15 bp, Homo sapiens
aagggggttagatag

SEQ ID NO: 1211744 - DNA, 15 bp, Homo sapiens
taagggggttagata

SEQ ID NO: 1211745 - DNA, 15 bp, Homo sapiens
gtaagggggttagat

SEQ ID NO: 1211746 - DNA, 15 bp, Homo sapiens
agtaagggggttaga

SEQ ID NO: 1211747 - DNA, 15 bp, Homo sapiens
tagtaagggggttag

SEQ ID NO: 1211748 - DNA, 15 bp, Homo sapiens
gtagtaagggggtta

SEQ ID NO: 1211749 - DNA, 15 bp, Homo sapiens
agtagtaagggggtt

SEQ ID NO: 1211750 - DNA, 15 bp, Homo sapiens
gagtagtaagggggt

SEQ ID NO: 1211751 - DNA, 15 bp, Homo sapiens
agagtagtaaggggg

SEQ ID NO: 1211752 - DNA, 15 bp, Homo sapiens
tagagtagtaagggg

SEQ ID NO: 1211753 - DNA, 15 bp, Homo sapiens
ttagagtagtaaggg

SEQ ID NO: 1211754 - DNA, 15 bp, Homo sapiens
gttagagtagtaagg

SEQ ID NO: 1211755 - DNA, 15 bp, Homo sapiens
agttagagtagtaag

SEQ ID NO: 1211756 - DNA, 15 bp, Homo sapiens
aagttagagtagtaa

SEQ ID NO: 1211757 - DNA, 15 bp, Homo sapiens
aaagttagagtagta

SEQ ID NO: 1211758 - DNA, 15 bp, Homo sapiens
gaaagttagagtagt

SEQ ID NO: 1211759 - DNA, 15 bp, Homo sapiens
tgaaagttagagtag

SEQ ID NO: 1211760 - DNA, 15 bp, Homo sapiens
ctgaaagttagagta

SEQ ID NO: 1211761 - DNA, 15 bp, Homo sapiens
cctgaaagttagagt

SEQ ID NO: 1211762 - DNA, 15 bp, Homo sapiens
ccctgaaagttagag

SEQ ID NO: 1211763 - DNA, 15 bp, Homo sapiens
tccctgaaagttaga

SEQ ID NO: 1211764 - DNA, 15 bp, Homo sapiens
ttccctgaaagttag

SEQ ID NO: 1211765 - DNA, 15 bp, Homo sapiens
attccctgaaagtta

SEQ ID NO: 1211766 - DNA, 15 bp, Homo sapiens
gattccctgaaagtt

SEQ ID NO: 1211767 - DNA, 15 bp, Homo sapiens
ggattccctgaaagt

SEQ ID NO: 1211768 - DNA, 15 bp, Homo sapiens
tggattccctgaaag

SEQ ID NO: 1211769 - DNA, 15 bp, Homo sapiens
gtggattccctgaaa

SEQ ID NO: 1211770 - DNA, 15 bp, Homo sapiens
tgtggattccctgaa

SEQ ID NO: 1211771 - DNA, 15 bp, Homo sapiens
atgtggattccctga

SEQ ID NO: 1211772 - DNA, 15 bp, Homo sapiens
catgtggattccctg

SEQ ID NO: 1211773 - DNA, 15 bp, Homo sapiens
tcatgtggattccct

SEQ ID NO: 1211774 - DNA, 15 bp, Homo sapiens
ttcatgtggattccc

SEQ ID NO: 1211775 - DNA, 15 bp, Homo sapiens
attcatgtggattcc

SEQ ID NO: 1211776 - DNA, 15 bp, Homo sapiens
cattcatgtggattc

SEQ ID NO: 1211777 - DNA, 15 bp, Homo sapiens
acattcatgtggatt

SEQ ID NO: 1211778 - DNA, 15 bp, Homo sapiens
cacattcatgtggat

SEQ ID NO: 1211779 - DNA, 15 bp, Homo sapiens
gcacattcatgtgga

SEQ ID NO: 1211780 - DNA, 15 bp, Homo sapiens
agcacattcatgtgg

SEQ ID NO: 1211781 - DNA, 15 bp, Homo sapiens
cagcacattcatgtg

SEQ ID NO: 1211782 - DNA, 15 bp, Homo sapiens
ccagcacattcatgt

SEQ ID NO: 1211783 - DNA, 15 bp, Homo sapiens
cccagcacattcatg

SEQ ID NO: 1211784 - DNA, 15 bp, Homo sapiens
acccagcacattcat

SEQ ID NO: 1211785 - DNA, 15 bp, Homo sapiens
gacccagcacattca

SEQ ID NO: 1211786 - DNA, 15 bp, Homo sapiens
tgacccagcacattc

SEQ ID NO: 1211787 - DNA, 15 bp, Homo sapiens
ttgacccagcacatt

SEQ ID NO: 1211788 - DNA, 15 bp, Homo sapiens
gttgacccagcacat

SEQ ID NO: 1211789 - DNA, 15 bp, Homo sapiens
ggttgacccagcaca

SEQ ID NO: 1211790 - DNA, 15 bp, Homo sapiens
tggttgacccagcac

SEQ ID NO: 1211791 - DNA, 15 bp, Homo sapiens
atggttgacccagca

SEQ ID NO: 1211792 - DNA, 15 bp, Homo sapiens
gatggttgacccagc

SEQ ID NO: 1211793 - DNA, 15 bp, Homo sapiens
tgatggttgacccag

SEQ ID NO: 1211794 - DNA, 15 bp, Homo sapiens
ttgatggttgaccca

SEQ ID NO: 1211795 - DNA, 15 bp, Homo sapiens
tttgatggttgaccc

SEQ ID NO: 1211796 - DNA, 15 bp, Homo sapiens
ctttgatggttgacc

SEQ ID NO: 1211797 - DNA, 15 bp, Homo sapiens
actttgatggttgac

SEQ ID NO: 1211798 - DNA, 15 bp, Homo sapiens
aactttgatggttga

SEQ ID NO: 1211799 - DNA, 15 bp, Homo sapiens
caactttgatggttg

SEQ ID NO: 1211800 - DNA, 15 bp, Homo sapiens
tcaactttgatggtt

SEQ ID NO: 1211801 - DNA, 15 bp, Homo sapiens
ttcaactttgatggt

SEQ ID NO: 1211802 - DNA, 15 bp, Homo sapiens
tttcaactttgatgg

SEQ ID NO: 1211803 - DNA, 15 bp, Homo sapiens
atttcaactttgatg

SEQ ID NO: 1211804 - DNA, 15 bp, Homo sapiens
catttcaactttgat

SEQ ID NO: 1211805 - DNA, 15 bp, Homo sapiens
ccatttcaactttga

SEQ ID NO: 1211806 - DNA, 15 bp, Homo sapiens
tccatttcaactttg

SEQ ID NO: 1211807 - DNA, 15 bp, Homo sapiens
atccatttcaacttt

SEQ ID NO: 1211808 - DNA, 15 bp, Homo sapiens
tatccatttcaactt

SEQ ID NO: 1211809 - DNA, 15 bp, Homo sapiens
ttatccatttcaact

SEQ ID NO: 1211810 - DNA, 15 bp, Homo sapiens
tttatccatttcaac

SEQ ID NO: 1211811 - DNA, 15 bp, Homo sapiens
ctttatccatttcaa

SEQ ID NO: 1211812 - DNA, 15 bp, Homo sapiens
cctttatccatttca

SEQ ID NO: 1211813 - DNA, 15 bp, Homo sapiens
ccctttatccatttc

SEQ ID NO: 1211814 - DNA, 15 bp, Homo sapiens
cccctttatccattt

SEQ ID NO: 1211815 - DNA, 15 bp, Homo sapiens
ccccctttatccatt

SEQ ID NO: 1211816 - DNA, 15 bp, Homo sapiens
gccccctttatccat

SEQ ID NO: 1211817 - DNA, 15 bp, Homo sapiens
agccccctttatcca

SEQ ID NO: 1211818 - DNA, 15 bp, Homo sapiens
cagccccctttatcc

SEQ ID NO: 1211819 - DNA, 15 bp, Homo sapiens
ccagccccctttatc

SEQ ID NO: 1211820 - DNA, 15 bp, Homo sapiens
tccagccccctttat

SEQ ID NO: 1211821 - DNA, 15 bp, Homo sapiens
atccagcccccttta

SEQ ID NO: 1211822 - DNA, 15 bp, Homo sapiens
catccagcccccttt

SEQ ID NO: 1211823 - DNA, 15 bp, Homo sapiens
gcatccagccccctt

SEQ ID NO: 1211824 - DNA, 15 bp, Homo sapiens
cgcatccagccccct

SEQ ID NO: 1211825 - DNA, 15 bp, Homo sapiens
ccgcatccagccccc

SEQ ID NO: 1211826 - DNA, 15 bp, Homo sapiens
accgcatccagcccc

SEQ ID NO: 1211827 - DNA, 15 bp, Homo sapiens
caccgcatccagccc

SEQ ID NO: 1211828 - DNA, 15 bp, Homo sapiens
ccaccgcatccagcc

SEQ ID NO: 1211829 - DNA, 15 bp, Homo sapiens
gccaccgcatccagc

SEQ ID NO: 1211830 - DNA, 15 bp, Homo sapiens
agccaccgcatccag

SEQ ID NO: 1211831 - DNA, 15 bp, Homo sapiens
cagccaccgcatcca

SEQ ID NO: 1211832 - DNA, 15 bp, Homo sapiens
tcagccaccgcatcc

SEQ ID NO: 1211833 - DNA, 15 bp, Homo sapiens
atcagccaccgcatc

SEQ ID NO: 1211834 - DNA, 15 bp, Homo sapiens
catcagccaccgcat

SEQ ID NO: 1211835 - DNA, 15 bp, Homo sapiens
gcatcagccaccgca

SEQ ID NO: 1211836 - DNA, 15 bp, Homo sapiens
ggcatcagccaccgc

SEQ ID NO: 1211837 - DNA, 15 bp, Homo sapiens
aggcatcagccaccg

SEQ ID NO: 1211838 - DNA, 15 bp, Homo sapiens
aggattacaggcatc

SEQ ID NO: 1211839 - DNA, 15 bp, Homo sapiens
tctcggcctcccaaa

SEQ ID NO: 1211840 - DNA, 15 bp, Homo sapiens
atctcggcctcccaa

SEQ ID NO: 1211841 - DNA, 15 bp, Homo sapiens
catctcggcctccca

SEQ ID NO: 1211842 - DNA, 15 bp, Homo sapiens
ccatctcggcctccc

SEQ ID NO: 1211843 - DNA, 15 bp, Homo sapiens
cccacccatctcggc

SEQ ID NO: 1211844 - DNA, 15 bp, Homo sapiens
acccacccatctcgg

SEQ ID NO: 1211845 - DNA, 15 bp, Homo sapiens
cacccacccatctcg

SEQ ID NO: 1211846 - DNA, 15 bp, Homo sapiens
ccacccacccatctc

SEQ ID NO: 1211847 - DNA, 15 bp, Homo sapiens
tccacccacccatct

SEQ ID NO: 1211848 - DNA, 15 bp, Homo sapiens
atccacccacccatc

SEQ ID NO: 1211849 - DNA, 15 bp, Homo sapiens
aatccacccacccat

SEQ ID NO: 1211850 - DNA, 15 bp, Homo sapiens
caatccacccaccca

SEQ ID NO: 1211851 - DNA, 15 bp, Homo sapiens
gcaatccacccaccc

SEQ ID NO: 1211852 - DNA, 15 bp, Homo sapiens
agcaatccacccacc

SEQ ID NO: 1211853 - DNA, 15 bp, Homo sapiens
aagcaatccacccac

SEQ ID NO: 1211854 - DNA, 15 bp, Homo sapiens
caagcaatccaccca

SEQ ID NO: 1211855 - DNA, 15 bp, Homo sapiens
tcaagcaatccaccc

SEQ ID NO: 1211856 - DNA, 15 bp, Homo sapiens
ctcaagcaatccacc

SEQ ID NO: 1211857 - DNA, 15 bp, Homo sapiens
gctcaagcaatccac

SEQ ID NO: 1211858 - DNA, 15 bp, Homo sapiens
ggctcaagcaatcca

SEQ ID NO: 1211859 - DNA, 15 bp, Homo sapiens
ttgggctcaagcaat

SEQ ID NO: 1211860 - DNA, 15 bp, Homo sapiens
cttgggctcaagcaa

SEQ ID NO: 1211861 - DNA, 15 bp, Homo sapiens
tcttgggctcaagca

SEQ ID NO: 1211862 - DNA, 15 bp, Homo sapiens
ctcttgggctcaagc

SEQ ID NO: 1211863 - DNA, 15 bp, Homo sapiens
actcttgggctcaag

SEQ ID NO: 1211864 - DNA, 15 bp, Homo sapiens
aactcttgggctcaa

SEQ ID NO: 1211865 - DNA, 15 bp, Homo sapiens
aaactcttgggctca

SEQ ID NO: 1211866 - DNA, 15 bp, Homo sapiens
caaactcttgggctc

SEQ ID NO: 1211867 - DNA, 15 bp, Homo sapiens
tcaaactcttgggct

SEQ ID NO: 1211868 - DNA, 15 bp, Homo sapiens
ctcaaactcttgggc

SEQ ID NO: 1211869 - DNA, 15 bp, Homo sapiens
tctcaaactcttggg

SEQ ID NO: 1211870 - DNA, 15 bp, Homo sapiens
gtctcaaactcttgg

SEQ ID NO: 1211871 - DNA, 15 bp, Homo sapiens
tgtctcactatgttg

SEQ ID NO: 1211872 - DNA, 15 bp, Homo sapiens
gtgtctcactatgtt

SEQ ID NO: 1211873 - DNA, 15 bp, Homo sapiens
ggtgtctcactatgt

SEQ ID NO: 1211874 - DNA, 15 bp, Homo sapiens
aggtgtctcactatg

SEQ ID NO: 1211875 - DNA, 15 bp, Homo sapiens
caggtgtctcactat

SEQ ID NO: 1211876 - DNA, 15 bp, Homo sapiens
acaggtgtctcacta

SEQ ID NO: 1211877 - DNA, 15 bp, Homo sapiens
gacaggtgtctcact

SEQ ID NO: 1211878 - DNA, 15 bp, Homo sapiens
agacaggtgtctcac

SEQ ID NO: 1211879 - DNA, 15 bp, Homo sapiens
gagacaggtgtctca

SEQ ID NO: 1211880 - DNA, 15 bp, Homo sapiens
agagacaggtgtctc

SEQ ID NO: 1211881 - DNA, 15 bp, Homo sapiens
cagagacaggtgtct

SEQ ID NO: 1211882 - DNA, 15 bp, Homo sapiens
gcagagacaggtgtc

SEQ ID NO: 1211883 - DNA, 15 bp, Homo sapiens
tgcagagacaggtgt

SEQ ID NO: 1211884 - DNA, 15 bp, Homo sapiens
ttgcagagacaggtg

SEQ ID NO: 1211885 - DNA, 15 bp, Homo sapiens
tttgcagagacaggt

SEQ ID NO: 1211886 - DNA, 15 bp, Homo sapiens
ttttgcagagacagg

SEQ ID NO: 1211887 - DNA, 15 bp, Homo sapiens
tttttgcagagacag

SEQ ID NO: 1211888 - DNA, 15 bp, Homo sapiens
ttttttgcagagaca

SEQ ID NO: 1211889 - DNA, 15 bp, Homo sapiens
attttttgcagagac

SEQ ID NO: 1211890 - DNA, 15 bp, Homo sapiens
tattttttgcagaga

SEQ ID NO: 1211891 - DNA, 15 bp, Homo sapiens
ttattttttgcagag

SEQ ID NO: 1211892 - DNA, 15 bp, Homo sapiens
tttattttttgcaga

SEQ ID NO: 1211893 - DNA, 15 bp, Homo sapiens
atttattttttgcag

SEQ ID NO: 1211894 - DNA, 15 bp, Homo sapiens
tatttattttttgca

SEQ ID NO: 1211895 - DNA, 15 bp, Homo sapiens
ttatttattttttgc

SEQ ID NO: 1211896 - DNA, 15 bp, Homo sapiens
ctttttatttatttt

SEQ ID NO: 1211897 - DNA, 15 bp, Homo sapiens
actttttatttattt

SEQ ID NO: 1211898 - DNA, 15 bp, Homo sapiens
aactttttatttatt

SEQ ID NO: 1211899 - DNA, 15 bp, Homo sapiens
taactttttatttat

SEQ ID NO: 1211900 - DNA, 15 bp, Homo sapiens
ctaactttttattta

SEQ ID NO: 1211901 - DNA, 15 bp, Homo sapiens
gctaactttttattt

SEQ ID NO: 1211902 - DNA, 15 bp, Homo sapiens
agctaactttttatt

SEQ ID NO: 1211903 - DNA, 15 bp, Homo sapiens
cagctaactttttat

SEQ ID NO: 1211904 - DNA, 15 bp, Homo sapiens
tcagctaacttttta

SEQ ID NO: 1211905 - DNA, 15 bp, Homo sapiens
ctcagctaacttttt

SEQ ID NO: 1211906 - DNA, 15 bp, Homo sapiens
actcagctaactttt

SEQ ID NO: 1211907 - DNA, 15 bp, Homo sapiens
cactcagctaacttt

SEQ ID NO: 1211908 - DNA, 15 bp, Homo sapiens
acactcagctaactt

SEQ ID NO: 1211909 - DNA, 15 bp, Homo sapiens
cacactcagctaact

SEQ ID NO: 1211910 - DNA, 15 bp, Homo sapiens
tcacactcagctaac

SEQ ID NO: 1211911 - DNA, 15 bp, Homo sapiens
atcacactcagctaa

SEQ ID NO: 1211912 - DNA, 15 bp, Homo sapiens
catcacactcagcta

SEQ ID NO: 1211913 - DNA, 15 bp, Homo sapiens
ccatcacactcagct

SEQ ID NO: 1211914 - DNA, 15 bp, Homo sapiens
accatcacactcagc

SEQ ID NO: 1211915 - DNA, 15 bp, Homo sapiens
caccatcacactcag

SEQ ID NO: 1211916 - DNA, 15 bp, Homo sapiens
gcaccatcacactca

SEQ ID NO: 1211917 - DNA, 15 bp, Homo sapiens
tgcaccatcacactc

SEQ ID NO: 1211918 - DNA, 15 bp, Homo sapiens
gtgcaccatcacact

SEQ ID NO: 1211919 - DNA, 15 bp, Homo sapiens
ggtgcaccatcacac

SEQ ID NO: 1211920 - DNA, 15 bp, Homo sapiens
gggtgcaccatcaca

SEQ ID NO: 1211921 - DNA, 15 bp, Homo sapiens
ggggtgcaccatcac

SEQ ID NO: 1211922 - DNA, 15 bp, Homo sapiens
aggggtgcaccatca

SEQ ID NO: 1211923 - DNA, 15 bp, Homo sapiens
gaggggtgcaccatc

SEQ ID NO: 1211924 - DNA, 15 bp, Homo sapiens
agaggggtgcaccat

SEQ ID NO: 1211925 - DNA, 15 bp, Homo sapiens
tagaggggtgcacca

SEQ ID NO: 1211926 - DNA, 15 bp, Homo sapiens
ctagaggggtgcacc

SEQ ID NO: 1211927 - DNA, 15 bp, Homo sapiens
actagaggggtgcac

SEQ ID NO: 1211928 - DNA, 15 bp, Homo sapiens
gactagaggggtgca

SEQ ID NO: 1211929 - DNA, 15 bp, Homo sapiens
tgactagaggggtgc

SEQ ID NO: 1211930 - DNA, 15 bp, Homo sapiens
gtgactagaggggtg

SEQ ID NO: 1211931 - DNA, 15 bp, Homo sapiens
tgtgactagaggggt

SEQ ID NO: 1211932 - DNA, 15 bp, Homo sapiens
ctgtgactagagggg

SEQ ID NO: 1211933 - DNA, 15 bp, Homo sapiens
gctgtgactagaggg

SEQ ID NO: 1211934 - DNA, 15 bp, Homo sapiens
agctgtgactagagg

SEQ ID NO: 1211935 - DNA, 15 bp, Homo sapiens
cagctgtgactagag

SEQ ID NO: 1211936 - DNA, 15 bp, Homo sapiens
acagctgtgactaga

SEQ ID NO: 1211937 - DNA, 15 bp, Homo sapiens
aacagctgtgactag

SEQ ID NO: 1211938 - DNA, 15 bp, Homo sapiens
caacagctgtgacta

SEQ ID NO: 1211939 - DNA, 15 bp, Homo sapiens
tcaacagctgtgact

SEQ ID NO: 1211940 - DNA, 15 bp, Homo sapiens
ctcaacagctgtgac

SEQ ID NO: 1211941 - DNA, 15 bp, Homo sapiens
actcaacagctgtga

SEQ ID NO: 1211942 - DNA, 15 bp, Homo sapiens
aactcaacagctgtg

SEQ ID NO: 1211943 - DNA, 15 bp, Homo sapiens
taactcaacagctgt

SEQ ID NO: 1211944 - DNA, 15 bp, Homo sapiens
ctaactcaacagctg

SEQ ID NO: 1211945 - DNA, 15 bp, Homo sapiens
cctaactcaacagct

SEQ ID NO: 1211946 - DNA, 15 bp, Homo sapiens
gcctaactcaacagc

SEQ ID NO: 1211947 - DNA, 15 bp, Homo sapiens
agcctaactcaacag

SEQ ID NO: 1211948 - DNA, 15 bp, Homo sapiens
aagcctaactcaaca

SEQ ID NO: 1211949 - DNA, 15 bp, Homo sapiens
taagcctaactcaac

SEQ ID NO: 1211950 - DNA, 15 bp, Homo sapiens
ctaagcctaactcaa

SEQ ID NO: 1211951 - DNA, 15 bp, Homo sapiens
cctaagcctaactca

SEQ ID NO: 1211952 - DNA, 15 bp, Homo sapiens
gcctaagcctaactc

SEQ ID NO: 1211953 - DNA, 15 bp, Homo sapiens
tgcctaagcctaact

SEQ ID NO: 1211954 - DNA, 15 bp, Homo sapiens
ctgcctaagcctaac

SEQ ID NO: 1211955 - DNA, 15 bp, Homo sapiens
cctgcctaagcctaa

SEQ ID NO: 1211956 - DNA, 15 bp, Homo sapiens
tcctgcctaagccta

SEQ ID NO: 1211957 - DNA, 15 bp, Homo sapiens
ctcctgcctaagcct

SEQ ID NO: 1211958 - DNA, 15 bp, Homo sapiens
cctcctgcctaagcc

SEQ ID NO: 1211959 - DNA, 15 bp, Homo sapiens
tcctcctgcctaagc

SEQ ID NO: 1211960 - DNA, 15 bp, Homo sapiens
atcctcctgcctaag

SEQ ID NO: 1211961 - DNA, 15 bp, Homo sapiens
gatcctcctgcctaa

SEQ ID NO: 1211962 - DNA, 15 bp, Homo sapiens
cgatcctcctgccta

SEQ ID NO: 1211963 - DNA, 15 bp, Homo sapiens
gcgatcctcctgcct

SEQ ID NO: 1211964 - DNA, 15 bp, Homo sapiens
tgcgatcctcctgcc

SEQ ID NO: 1211965 - DNA, 15 bp, Homo sapiens
atgcgatcctcctgc

SEQ ID NO: 1211966 - DNA, 15 bp, Homo sapiens
catgcgatcctcctg

SEQ ID NO: 1211967 - DNA, 15 bp, Homo sapiens
tcatgcgatcctcct

SEQ ID NO: 1211968 - DNA, 15 bp, Homo sapiens
ttcatgcgatcctcc

SEQ ID NO: 1211969 - DNA, 15 bp, Homo sapiens
gttcatgcgatcctc

SEQ ID NO: 1211970 - DNA, 15 bp, Homo sapiens
ggttcatgcgatcct

SEQ ID NO: 1211971 - DNA, 15 bp, Homo sapiens
aggttcatgcgatcc

SEQ ID NO: 1211972 - DNA, 15 bp, Homo sapiens
caggttcatgcgatc

SEQ ID NO: 1211973 - DNA, 15 bp, Homo sapiens
ccaggttcatgcgat

SEQ ID NO: 1211974 - DNA, 15 bp, Homo sapiens
cccaggttcatgcga

SEQ ID NO: 1211975 - DNA, 15 bp, Homo sapiens
tcccaggttcatgcg

SEQ ID NO: 1211976 - DNA, 15 bp, Homo sapiens
cgcctccacctccca

SEQ ID NO: 1211977 - DNA, 15 bp, Homo sapiens
ccgcctccacctccc

SEQ ID NO: 1211978 - DNA, 15 bp, Homo sapiens
gccgcctccacctcc

SEQ ID NO: 1211979 - DNA, 15 bp, Homo sapiens
ggccgcctccacctc

SEQ ID NO: 1211980 - DNA, 15 bp, Homo sapiens
cggccgcctccacct

SEQ ID NO: 1211981 - DNA, 15 bp, Homo sapiens
acggccgcctccacc

SEQ ID NO: 1211982 - DNA, 15 bp, Homo sapiens
cacggccgcctccac

SEQ ID NO: 1211983 - DNA, 15 bp, Homo sapiens
tcacggccgcctcca

SEQ ID NO: 1211984 - DNA, 15 bp, Homo sapiens
ctcacggccgcctcc

SEQ ID NO: 1211985 - DNA, 15 bp, Homo sapiens
gctcacggccgcctc

SEQ ID NO: 1211986 - DNA, 15 bp, Homo sapiens
ggctcacggccgcct

SEQ ID NO: 1211987 - DNA, 15 bp, Homo sapiens
aggctcacggccgcc

SEQ ID NO: 1211988 - DNA, 15 bp, Homo sapiens
gaggctcacggccgc

SEQ ID NO: 1211989 - DNA, 15 bp, Homo sapiens
tgaggctcacggccg

SEQ ID NO: 1211990 - DNA, 15 bp, Homo sapiens
ctgaggctcacggcc

SEQ ID NO: 1211991 - DNA, 15 bp, Homo sapiens
actgaggctcacggc

SEQ ID NO: 1211992 - DNA, 15 bp, Homo sapiens
gactgaggctcacgg

SEQ ID NO: 1211993 - DNA, 15 bp, Homo sapiens
tgactgaggctcacg

SEQ ID NO: 1211994 - DNA, 15 bp, Homo sapiens
atgactgaggctcac

SEQ ID NO: 1211995 - DNA, 15 bp, Homo sapiens
catgactgaggctca

SEQ ID NO: 1211996 - DNA, 15 bp, Homo sapiens
gcatgactgaggctc

SEQ ID NO: 1211997 - DNA, 15 bp, Homo sapiens
ggcatgactgaggct

SEQ ID NO: 1211998 - DNA, 15 bp, Homo sapiens
tggcatgactgaggc

SEQ ID NO: 1211999 - DNA, 15 bp, Homo sapiens
gtggcatgactgagg

SEQ ID NO: 1212000 - DNA, 15 bp, Homo sapiens
agtggcatgactgag

SEQ ID NO: 1212001 - DNA, 15 bp, Homo sapiens
cagtggcatgactga

SEQ ID NO: 1212002 - DNA, 15 bp, Homo sapiens
gcagtggcatgactg

SEQ ID NO: 1212003 - DNA, 15 bp, Homo sapiens
tgcagtggcatgact

SEQ ID NO: 1212004 - DNA, 15 bp, Homo sapiens
gtgcagtggcatgac

SEQ ID NO: 1212005 - DNA, 15 bp, Homo sapiens
ctgttgcccaggttg

SEQ ID NO: 1212006 - DNA, 15 bp, Homo sapiens
tctgttgcccaggtt

SEQ ID NO: 1212007 - DNA, 15 bp, Homo sapiens
ctctgttgcccaggt

SEQ ID NO: 1212008 - DNA, 15 bp, Homo sapiens
ttcactctgttgccc

SEQ ID NO: 1212009 - DNA, 15 bp, Homo sapiens
ctttcactctgttgc

SEQ ID NO: 1212010 - DNA, 15 bp, Homo sapiens
gctttcactctgttg

SEQ ID NO: 1212011 - DNA, 15 bp, Homo sapiens
ggctttcactctgtt

SEQ ID NO: 1212012 - DNA, 15 bp, Homo sapiens
cggctttcactctgt

SEQ ID NO: 1212013 - DNA, 15 bp, Homo sapiens
ccggctttcactctg

SEQ ID NO: 1212014 - DNA, 15 bp, Homo sapiens
accggctttcactct

SEQ ID NO: 1212015 - DNA, 15 bp, Homo sapiens
caccggctttcactc

SEQ ID NO: 1212016 - DNA, 15 bp, Homo sapiens
acaccggctttcact

SEQ ID NO: 1212017 - DNA, 15 bp, Homo sapiens
gacaccggctttcac

SEQ ID NO: 1212018 - DNA, 15 bp, Homo sapiens
ggacaccggctttca

SEQ ID NO: 1212019 - DNA, 15 bp, Homo sapiens
cggacaccggctttc

SEQ ID NO: 1212020 - DNA, 15 bp, Homo sapiens
tcggacaccggcttt

SEQ ID NO: 1212021 - DNA, 15 bp, Homo sapiens
ttcggacaccggctt

SEQ ID NO: 1212022 - DNA, 15 bp, Homo sapiens
tttcggacaccggct

SEQ ID NO: 1212023 - DNA, 15 bp, Homo sapiens
ctttcggacaccggc

SEQ ID NO: 1212024 - DNA, 15 bp, Homo sapiens
tctttcggacaccgg

SEQ ID NO: 1212025 - DNA, 15 bp, Homo sapiens
ctctttcggacaccg

SEQ ID NO: 1212026 - DNA, 15 bp, Homo sapiens
tctctttcggacacc

SEQ ID NO: 1212027 - DNA, 15 bp, Homo sapiens
ttctctttcggacac

SEQ ID NO: 1212028 - DNA, 15 bp, Homo sapiens
tttctctttcggaca

SEQ ID NO: 1212029 - DNA, 15 bp, Homo sapiens
ctttctctttcggac

SEQ ID NO: 1212030 - DNA, 15 bp, Homo sapiens
tctttctctttcgga

SEQ ID NO: 1212031 - DNA, 15 bp, Homo sapiens
ttctttctctttcgg

SEQ ID NO: 1212032 - DNA, 15 bp, Homo sapiens
tttctttctctttcg

SEQ ID NO: 1212033 - DNA, 15 bp, Homo sapiens
ttttctttctctttc

SEQ ID NO: 1212034 - DNA, 15 bp, Homo sapiens
ctttttttctttctc

SEQ ID NO: 1212035 - DNA, 15 bp, Homo sapiens
gtctttttttctttc

SEQ ID NO: 1212036 - DNA, 15 bp, Homo sapiens
tgtctttttttcttt

SEQ ID NO: 1212037 - DNA, 15 bp, Homo sapiens
atgtctttttttctt

SEQ ID NO: 1212038 - DNA, 15 bp, Homo sapiens
tatgtctttttttct

SEQ ID NO: 1212039 - DNA, 15 bp, Homo sapiens
ctatgtctttttttc

SEQ ID NO: 1212040 - DNA, 15 bp, Homo sapiens
tctatgtcttttttt

SEQ ID NO: 1212041 - DNA, 15 bp, Homo sapiens
atctatgtctttttt

SEQ ID NO: 1212042 - DNA, 15 bp, Homo sapiens
tatctatgtcttttt

SEQ ID NO: 1212043 - DNA, 15 bp, Homo sapiens
gtatctatgtctttt

SEQ ID NO: 1212044 - DNA, 15 bp, Homo sapiens
tgtatctatgtcttt

SEQ ID NO: 1212045 - DNA, 15 bp, Homo sapiens
atgtatctatgtctt

SEQ ID NO: 1212046 - DNA, 15 bp, Homo sapiens
gatgtatctatgtct

SEQ ID NO: 1212047 - DNA, 15 bp, Homo sapiens
agatgtatctatgtc

SEQ ID NO: 1212048 - DNA, 15 bp, Homo sapiens
aagatgtatctatgt

SEQ ID NO: 1212049 - DNA, 15 bp, Homo sapiens
aaagatgtatctatg

SEQ ID NO: 1212050 - DNA, 15 bp, Homo sapiens
aaaagatgtatctat

SEQ ID NO: 1212051 - DNA, 15 bp, Homo sapiens
taaaagatgtatcta

SEQ ID NO: 1212052 - DNA, 15 bp, Homo sapiens
ttaaaagatgtatct

SEQ ID NO: 1212053 - DNA, 15 bp, Homo sapiens
tttaaaagatgtatc

SEQ ID NO: 1212054 - DNA, 15 bp, Homo sapiens
ctttaaaagatgtat

SEQ ID NO: 1212055 - DNA, 15 bp, Homo sapiens
actttaaaagatgta

SEQ ID NO: 1212056 - DNA, 15 bp, Homo sapiens
aactttaaaagatgt

SEQ ID NO: 1212057 - DNA, 15 bp, Homo sapiens
taactttaaaagatg

SEQ ID NO: 1212058 - DNA, 15 bp, Homo sapiens
ctaactttaaaagat

SEQ ID NO: 1212059 - DNA, 15 bp, Homo sapiens
cctaactttaaaaga

SEQ ID NO: 1212060 - DNA, 15 bp, Homo sapiens
acctaactttaaaag

SEQ ID NO: 1212061 - DNA, 15 bp, Homo sapiens
aacctaactttaaaa

SEQ ID NO: 1212062 - DNA, 15 bp, Homo sapiens
caacctaactttaaa

SEQ ID NO: 1212063 - DNA, 15 bp, Homo sapiens
acaacctaactttaa

SEQ ID NO: 1212064 - DNA, 15 bp, Homo sapiens
tacaacctaacttta

SEQ ID NO: 1212065 - DNA, 15 bp, Homo sapiens
atacaacctaacttt

SEQ ID NO: 1212066 - DNA, 15 bp, Homo sapiens
catacaacctaactt

SEQ ID NO: 1212067 - DNA, 15 bp, Homo sapiens
acatacaacctaact

SEQ ID NO: 1212068 - DNA, 15 bp, Homo sapiens
aacatacaacctaac

SEQ ID NO: 1212069 - DNA, 15 bp, Homo sapiens
taacatacaacctaa

SEQ ID NO: 1212070 - DNA, 15 bp, Homo sapiens
ttaacatacaaccta

SEQ ID NO: 1212071 - DNA, 15 bp, Homo sapiens
attaacatacaacct

SEQ ID NO: 1212072 - DNA, 15 bp, Homo sapiens
aattaacatacaacc

SEQ ID NO: 1212073 - DNA, 15 bp, Homo sapiens
taattaacatacaac

SEQ ID NO: 1212074 - DNA, 15 bp, Homo sapiens
gtaattaacatacaa

SEQ ID NO: 1212075 - DNA, 15 bp, Homo sapiens
ggtaattaacataca

SEQ ID NO: 1212076 - DNA, 15 bp, Homo sapiens
aggtaattaacatac

SEQ ID NO: 1212077 - DNA, 15 bp, Homo sapiens
taggtaattaacata

SEQ ID NO: 1212078 - DNA, 15 bp, Homo sapiens
gtaggtaattaacat

SEQ ID NO: 1212079 - DNA, 15 bp, Homo sapiens
tgtaggtaattaaca

SEQ ID NO: 1212080 - DNA, 15 bp, Homo sapiens
ttgtaggtaattaac

SEQ ID NO: 1212081 - DNA, 15 bp, Homo sapiens
gttgtaggtaattaa

SEQ ID NO: 1212082 - DNA, 15 bp, Homo sapiens
agttgtaggtaatta

SEQ ID NO: 1212083 - DNA, 15 bp, Homo sapiens
gagttgtaggtaatt

SEQ ID NO: 1212084 - DNA, 15 bp, Homo sapiens
tgagttgtaggtaat

SEQ ID NO: 1212085 - DNA, 15 bp, Homo sapiens
ctgagttgtaggtaa

SEQ ID NO: 1212086 - DNA, 15 bp, Homo sapiens
actgagttgtaggta

SEQ ID NO: 1212087 - DNA, 15 bp, Homo sapiens
aactgagttgtaggt

SEQ ID NO: 1212088 - DNA, 15 bp, Homo sapiens
aaactgagttgtagg

SEQ ID NO: 1212089 - DNA, 15 bp, Homo sapiens
gaaactgagttgtag

SEQ ID NO: 1212090 - DNA, 15 bp, Homo sapiens
tgaaactgagttgta

SEQ ID NO: 1212091 - DNA, 15 bp, Homo sapiens
ttgaaactgagttgt

SEQ ID NO: 1212092 - DNA, 15 bp, Homo sapiens
gttgaaactgagttg

SEQ ID NO: 1212093 - DNA, 15 bp, Homo sapiens
agttgaaactgagtt

SEQ ID NO: 1212094 - DNA, 15 bp, Homo sapiens
cagttgaaactgagt

SEQ ID NO: 1212095 - DNA, 15 bp, Homo sapiens
acagttgaaactgag

SEQ ID NO: 1212096 - DNA, 15 bp, Homo sapiens
cacagttgaaactga

SEQ ID NO: 1212097 - DNA, 15 bp, Homo sapiens
gcacagttgaaactg

SEQ ID NO: 1212098 - DNA, 15 bp, Homo sapiens
agcacagttgaaact

SEQ ID NO: 1212099 - DNA, 15 bp, Homo sapiens
aagcacagttgaaac

SEQ ID NO: 1212100 - DNA, 15 bp, Homo sapiens
taagcacagttgaaa

SEQ ID NO: 1212101 - DNA, 15 bp, Homo sapiens
ttaagcacagttgaa

SEQ ID NO: 1212102 - DNA, 15 bp, Homo sapiens
tttaagcacagttga

SEQ ID NO: 1212103 - DNA, 15 bp, Homo sapiens
ctttaagcacagttg

SEQ ID NO: 1212104 - DNA, 15 bp, Homo sapiens
cctttaagcacagtt

SEQ ID NO: 1212105 - DNA, 15 bp, Homo sapiens
tcctttaagcacagt

SEQ ID NO: 1212106 - DNA, 15 bp, Homo sapiens
ctcctttaagcacag

SEQ ID NO: 1212107 - DNA, 15 bp, Homo sapiens
cctcctttaagcaca

SEQ ID NO: 1212108 - DNA, 15 bp, Homo sapiens
tcctcctttaagcac

SEQ ID NO: 1212109 - DNA, 15 bp, Homo sapiens
ttcctcctttaagca

SEQ ID NO: 1212110 - DNA, 15 bp, Homo sapiens
tttcctcctttaagc

SEQ ID NO: 1212111 - DNA, 15 bp, Homo sapiens
atttcctcctttaag

SEQ ID NO: 1212112 - DNA, 15 bp, Homo sapiens
catttcctcctttaa

SEQ ID NO: 1212113 - DNA, 15 bp, Homo sapiens
tcatttcctccttta

SEQ ID NO: 1212114 - DNA, 15 bp, Homo sapiens
gtcatttcctccttt

SEQ ID NO: 1212115 - DNA, 15 bp, Homo sapiens
agtcatttcctcctt

SEQ ID NO: 1212116 - DNA, 15 bp, Homo sapiens
gagtcatttcctcct

SEQ ID NO: 1212117 - DNA, 15 bp, Homo sapiens
tgagtcatttcctcc

SEQ ID NO: 1212118 - DNA, 15 bp, Homo sapiens
atgagtcatttcctc

SEQ ID NO: 1212119 - DNA, 15 bp, Homo sapiens
aatgagtcatttcct

SEQ ID NO: 1212120 - DNA, 15 bp, Homo sapiens
aaatgagtcatttcc

SEQ ID NO: 1212121 - DNA, 15 bp, Homo sapiens
gaaatgagtcatttc

SEQ ID NO: 1212122 - DNA, 15 bp, Homo sapiens
agaaatgagtcattt

SEQ ID NO: 1212123 - DNA, 15 bp, Homo sapiens
aagaaatgagtcatt

SEQ ID NO: 1212124 - DNA, 15 bp, Homo sapiens
caagaaatgagtcat

SEQ ID NO: 1212125 - DNA, 15 bp, Homo sapiens
gcaagaaatgagtca

SEQ ID NO: 1212126 - DNA, 15 bp, Homo sapiens
agcaagaaatgagtc

SEQ ID NO: 1212127 - DNA, 15 bp, Homo sapiens
tagcaagaaatgagt

SEQ ID NO: 1212128 - DNA, 15 bp, Homo sapiens
gtagcaagaaatgag

SEQ ID NO: 1212129 - DNA, 15 bp, Homo sapiens
tgtagcaagaaatga

SEQ ID NO: 1212130 - DNA, 15 bp, Homo sapiens
atgtagcaagaaatg

SEQ ID NO: 1212131 - DNA, 15 bp, Homo sapiens
tatgtagcaagaaat

SEQ ID NO: 1212132 - DNA, 15 bp, Homo sapiens
atatgtagcaagaaa

SEQ ID NO: 1212133 - DNA, 15 bp, Homo sapiens
gatatgtagcaagaa

SEQ ID NO: 1212134 - DNA, 15 bp, Homo sapiens
tgatatgtagcaaga

SEQ ID NO: 1212135 - DNA, 15 bp, Homo sapiens
ttgatatgtagcaag

SEQ ID NO: 1212136 - DNA, 15 bp, Homo sapiens
tttgatatgtagcaa

SEQ ID NO: 1212137 - DNA, 15 bp, Homo sapiens
atttgatatgtagca

SEQ ID NO: 1212138 - DNA, 15 bp, Homo sapiens
aatttgatatgtagc

SEQ ID NO: 1212139 - DNA, 15 bp, Homo sapiens
taatttgatatgtag

SEQ ID NO: 1212140 - DNA, 15 bp, Homo sapiens
ctaatttgatatgta

SEQ ID NO: 1212141 - DNA, 15 bp, Homo sapiens
gctaatttgatatgt

SEQ ID NO: 1212142 - DNA, 15 bp, Homo sapiens
ggctaatttgatatg

SEQ ID NO: 1212143 - DNA, 15 bp, Homo sapiens
gggctaatttgatat

SEQ ID NO: 1212144 - DNA, 15 bp, Homo sapiens
tgggctaatttgata

SEQ ID NO: 1212145 - DNA, 15 bp, Homo sapiens
ttgggctaatttgat

SEQ ID NO: 1212146 - DNA, 15 bp, Homo sapiens
tttgggctaatttga

SEQ ID NO: 1212147 - DNA, 15 bp, Homo sapiens
ttttgggctaatttg

SEQ ID NO: 1212148 - DNA, 15 bp, Homo sapiens
attttgggctaattt

SEQ ID NO: 1212149 - DNA, 15 bp, Homo sapiens
cattttgggctaatt

SEQ ID NO: 1212150 - DNA, 15 bp, Homo sapiens
acattttgggctaat

SEQ ID NO: 1212151 - DNA, 15 bp, Homo sapiens
tacattttgggctaa

SEQ ID NO: 1212152 - DNA, 15 bp, Homo sapiens
ctacattttgggcta

SEQ ID NO: 1212153 - DNA, 15 bp, Homo sapiens
actacattttgggct

SEQ ID NO: 1212154 - DNA, 15 bp, Homo sapiens
cactacattttgggc

SEQ ID NO: 1212155 - DNA, 15 bp, Homo sapiens
ccactacattttggg

SEQ ID NO: 1212156 - DNA, 15 bp, Homo sapiens
gccactacattttgg

SEQ ID NO: 1212157 - DNA, 15 bp, Homo sapiens
agccactacattttg

SEQ ID NO: 1212158 - DNA, 15 bp, Homo sapiens
aagccactacatttt

SEQ ID NO: 1212159 - DNA, 15 bp, Homo sapiens
taagccactacattt

SEQ ID NO: 1212160 - DNA, 15 bp, Homo sapiens
ttaagccactacatt

SEQ ID NO: 1212161 - DNA, 15 bp, Homo sapiens
tttaagccactacat

SEQ ID NO: 1212162 - DNA, 15 bp, Homo sapiens
ttttaagccactaca

SEQ ID NO: 1212163 - DNA, 15 bp, Homo sapiens
gttttaagccactac

SEQ ID NO: 1212164 - DNA, 15 bp, Homo sapiens
tgttttaagccacta

SEQ ID NO: 1212165 - DNA, 15 bp, Homo sapiens
ttgttttaagccact

SEQ ID NO: 1212166 - DNA, 15 bp, Homo sapiens
gttgttttaagccac

SEQ ID NO: 1212167 - DNA, 15 bp, Homo sapiens
tgttgttttaagcca

SEQ ID NO: 1212168 - DNA, 15 bp, Homo sapiens
gtgttgttttaagcc

SEQ ID NO: 1212169 - DNA, 15 bp, Homo sapiens
tgtgttgttttaagc

SEQ ID NO: 1212170 - DNA, 15 bp, Homo sapiens
atgtgttgttttaag

SEQ ID NO: 1212171 - DNA, 15 bp, Homo sapiens
aatgtgttgttttaa

SEQ ID NO: 1212172 - DNA, 15 bp, Homo sapiens
aaatgtgttgtttta

SEQ ID NO: 1212173 - DNA, 15 bp, Homo sapiens
taaatgtgttgtttt

SEQ ID NO: 1212174 - DNA, 15 bp, Homo sapiens
ataaatgtgttgttt

SEQ ID NO: 1212175 - DNA, 15 bp, Homo sapiens
cataaatgtgttgtt

SEQ ID NO: 1212176 - DNA, 15 bp, Homo sapiens
tcataaatgtgttgt

SEQ ID NO: 1212177 - DNA, 15 bp, Homo sapiens
atcataaatgtgttg

SEQ ID NO: 1212178 - DNA, 15 bp, Homo sapiens
aatcataaatgtgtt

SEQ ID NO: 1212179 - DNA, 15 bp, Homo sapiens
aaatcataaatgtgt

SEQ ID NO: 1212180 - DNA, 15 bp, Homo sapiens
gaaatcataaatgtg

SEQ ID NO: 1212181 - DNA, 15 bp, Homo sapiens
agaaatcataaatgt

SEQ ID NO: 1212182 - DNA, 15 bp, Homo sapiens
gagaaatcataaatg

SEQ ID NO: 1212183 - DNA, 15 bp, Homo sapiens
tgagaaatcataaat

SEQ ID NO: 1212184 - DNA, 15 bp, Homo sapiens
ctgagaaatcataaa

SEQ ID NO: 1212185 - DNA, 15 bp, Homo sapiens
actgagaaatcataa

SEQ ID NO: 1212186 - DNA, 15 bp, Homo sapiens
aactgagaaatcata

SEQ ID NO: 1212187 - DNA, 15 bp, Homo sapiens
aaactgagaaatcat

SEQ ID NO: 1212188 - DNA, 15 bp, Homo sapiens
aaaactgagaaatca

SEQ ID NO: 1212189 - DNA, 15 bp, Homo sapiens
aaaaactgagaaatc

SEQ ID NO: 1212190 - DNA, 15 bp, Homo sapiens
caaaaactgagaaat

SEQ ID NO: 1212191 - DNA, 15 bp, Homo sapiens
gcaaaaactgagaaa

SEQ ID NO: 1212192 - DNA, 15 bp, Homo sapiens
cgcaaaaactgagaa

SEQ ID NO: 1212193 - DNA, 15 bp, Homo sapiens
acgcaaaaactgaga

SEQ ID NO: 1212194 - DNA, 15 bp, Homo sapiens
cacgcaaaaactgag

SEQ ID NO: 1212195 - DNA, 15 bp, Homo sapiens
acacgcaaaaactga

SEQ ID NO: 1212196 - DNA, 15 bp, Homo sapiens
gacacgcaaaaactg

SEQ ID NO: 1212197 - DNA, 15 bp, Homo sapiens
tgacacgcaaaaact

SEQ ID NO: 1212198 - DNA, 15 bp, Homo sapiens
ctgacacgcaaaaac

SEQ ID NO: 1212199 - DNA, 15 bp, Homo sapiens
cctgacacgcaaaaa

SEQ ID NO: 1212200 - DNA, 15 bp, Homo sapiens
tcctgacacgcaaaa

SEQ ID NO: 1212201 - DNA, 15 bp, Homo sapiens
ttcctgacacgcaaa

SEQ ID NO: 1212202 - DNA, 15 bp, Homo sapiens
attcctgacacgcaa

SEQ ID NO: 1212203 - DNA, 15 bp, Homo sapiens
aattcctgacacgca

SEQ ID NO: 1212204 - DNA, 15 bp, Homo sapiens
aaattcctgacacgc

SEQ ID NO: 1212205 - DNA, 15 bp, Homo sapiens
caaattcctgacacg

SEQ ID NO: 1212206 - DNA, 15 bp, Homo sapiens
ccaaattcctgacac

SEQ ID NO: 1212207 - DNA, 15 bp, Homo sapiens
tccaaattcctgaca

SEQ ID NO: 1212208 - DNA, 15 bp, Homo sapiens
ttccaaattcctgac

SEQ ID NO: 1212209 - DNA, 15 bp, Homo sapiens
cttccaaattcctga

SEQ ID NO: 1212210 - DNA, 15 bp, Homo sapiens
gcttccaaattcctg

SEQ ID NO: 1212211 - DNA, 15 bp, Homo sapiens
tgcttccaaattcct

SEQ ID NO: 1212212 - DNA, 15 bp, Homo sapiens
ctgcttccaaattcc

SEQ ID NO: 1212213 - DNA, 15 bp, Homo sapiens
gctgcttccaaattc

SEQ ID NO: 1212214 - DNA, 15 bp, Homo sapiens
tgctgcttccaaatt

SEQ ID NO: 1212215 - DNA, 15 bp, Homo sapiens
gtgctgcttccaaat

SEQ ID NO: 1212216 - DNA, 15 bp, Homo sapiens
tgtgctgcttccaaa

SEQ ID NO: 1212217 - DNA, 15 bp, Homo sapiens
ctgtgctgcttccaa

SEQ ID NO: 1212218 - DNA, 15 bp, Homo sapiens
gctgtgctgcttcca

SEQ ID NO: 1212219 - DNA, 15 bp, Homo sapiens
agctgtgctgcttcc

SEQ ID NO: 1212220 - DNA, 15 bp, Homo sapiens
tagctgtgctgcttc

SEQ ID NO: 1212221 - DNA, 15 bp, Homo sapiens
ctagctgtgctgctt

SEQ ID NO: 1212222 - DNA, 15 bp, Homo sapiens
tctagctgtgctgct

SEQ ID NO: 1212223 - DNA, 15 bp, Homo sapiens
gtctagctgtgctgc

SEQ ID NO: 1212224 - DNA, 15 bp, Homo sapiens
cgtctagctgtgctg

SEQ ID NO: 1212225 - DNA, 15 bp, Homo sapiens
ccgtctagctgtgct

SEQ ID NO: 1212226 - DNA, 15 bp, Homo sapiens
accgtctagctgtgc

SEQ ID NO: 1212227 - DNA, 15 bp, Homo sapiens
aaccgtctagctgtg

SEQ ID NO: 1212228 - DNA, 15 bp, Homo sapiens
gaaccgtctagctgt

SEQ ID NO: 1212229 - DNA, 15 bp, Homo sapiens
ggaaccgtctagctg

SEQ ID NO: 1212230 - DNA, 15 bp, Homo sapiens
tggaaccgtctagct

SEQ ID NO: 1212231 - DNA, 15 bp, Homo sapiens
ctggaaccgtctagc

SEQ ID NO: 1212232 - DNA, 15 bp, Homo sapiens
gctggaaccgtctag

SEQ ID NO: 1212233 - DNA, 15 bp, Homo sapiens
agctggaaccgtcta

SEQ ID NO: 1212234 - DNA, 15 bp, Homo sapiens
gagctggaaccgtct

SEQ ID NO: 1212235 - DNA, 15 bp, Homo sapiens
tgagctggaaccgtc

SEQ ID NO: 1212236 - DNA, 15 bp, Homo sapiens
ctgagctggaaccgt

SEQ ID NO: 1212237 - DNA, 15 bp, Homo sapiens
cctgagctggaaccg

SEQ ID NO: 1212238 - DNA, 15 bp, Homo sapiens
ccctgagctggaacc

SEQ ID NO: 1212239 - DNA, 15 bp, Homo sapiens
accctgagctggaac

SEQ ID NO: 1212240 - DNA, 15 bp, Homo sapiens
gaccctgagctggaa

SEQ ID NO: 1212241 - DNA, 15 bp, Homo sapiens
agaccctgagctgga

SEQ ID NO: 1212242 - DNA, 15 bp, Homo sapiens
gagaccctgagctgg

SEQ ID NO: 1212243 - DNA, 15 bp, Homo sapiens
agagaccctgagctg

SEQ ID NO: 1212244 - DNA, 15 bp, Homo sapiens
gagagaccctgagct

SEQ ID NO: 1212245 - DNA, 15 bp, Homo sapiens
tgagagaccctgagc

SEQ ID NO: 1212246 - DNA, 15 bp, Homo sapiens
atgagagaccctgag

SEQ ID NO: 1212247 - DNA, 15 bp, Homo sapiens
catgagagaccctga

SEQ ID NO: 1212248 - DNA, 15 bp, Homo sapiens
tcatgagagaccctg

SEQ ID NO: 1212249 - DNA, 15 bp, Homo sapiens
ttcatgagagaccct

SEQ ID NO: 1212250 - DNA, 15 bp, Homo sapiens
cttcatgagagaccc

SEQ ID NO: 1212251 - DNA, 15 bp, Homo sapiens
acttcatgagagacc

SEQ ID NO: 1212252 - DNA, 15 bp, Homo sapiens
aacttcatgagagac

SEQ ID NO: 1212253 - DNA, 15 bp, Homo sapiens
caacttcatgagaga

SEQ ID NO: 1212254 - DNA, 15 bp, Homo sapiens
gcaacttcatgagag

SEQ ID NO: 1212255 - DNA, 15 bp, Homo sapiens
tgcaacttcatgaga

SEQ ID NO: 1212256 - DNA, 15 bp, Homo sapiens
ttgcaacttcatgag

SEQ ID NO: 1212257 - DNA, 15 bp, Homo sapiens
attgcaacttcatga

SEQ ID NO: 1212258 - DNA, 15 bp, Homo sapiens
gattgcaacttcatg

SEQ ID NO: 1212259 - DNA, 15 bp, Homo sapiens
tgattgcaacttcat

SEQ ID NO: 1212260 - DNA, 15 bp, Homo sapiens
ttgattgcaacttca

SEQ ID NO: 1212261 - DNA, 15 bp, Homo sapiens
tttgattgcaacttc

SEQ ID NO: 1212262 - DNA, 15 bp, Homo sapiens
ttttgattgcaactt

SEQ ID NO: 1212263 - DNA, 15 bp, Homo sapiens
attttgattgcaact

SEQ ID NO: 1212264 - DNA, 15 bp, Homo sapiens
tattttgattgcaac

SEQ ID NO: 1212265 - DNA, 15 bp, Homo sapiens
atattttgattgcaa

SEQ ID NO: 1212266 - DNA, 15 bp, Homo sapiens
aatattttgattgca

SEQ ID NO: 1212267 - DNA, 15 bp, Homo sapiens
caatattttgattgc

SEQ ID NO: 1212268 - DNA, 15 bp, Homo sapiens
ccaatattttgattg

SEQ ID NO: 1212269 - DNA, 15 bp, Homo sapiens
gccaatattttgatt

SEQ ID NO: 1212270 - DNA, 15 bp, Homo sapiens
tgccaatattttgat

SEQ ID NO: 1212271 - DNA, 15 bp, Homo sapiens
ctgccaatattttga

SEQ ID NO: 1212272 - DNA, 15 bp, Homo sapiens
cctgccaatattttg

SEQ ID NO: 1212273 - DNA, 15 bp, Homo sapiens
tcctgccaatatttt

SEQ ID NO: 1212274 - DNA, 15 bp, Homo sapiens
ctcctgccaatattt

SEQ ID NO: 1212275 - DNA, 15 bp, Homo sapiens
tctcctgccaatatt

SEQ ID NO: 1212276 - DNA, 15 bp, Homo sapiens
ctctcctgccaatat

SEQ ID NO: 1212277 - DNA, 15 bp, Homo sapiens
tctctcctgccaata

SEQ ID NO: 1212278 - DNA, 15 bp, Homo sapiens
ttctctcctgccaat

SEQ ID NO: 1212279 - DNA, 15 bp, Homo sapiens
tttctctcctgccaa

SEQ ID NO: 1212280 - DNA, 15 bp, Homo sapiens
ttttctctcctgcca

SEQ ID NO: 1212281 - DNA, 15 bp, Homo sapiens
tttttctctcctgcc

SEQ ID NO: 1212282 - DNA, 15 bp, Homo sapiens
gtttttctctcctgc

SEQ ID NO: 1212283 - DNA, 15 bp, Homo sapiens
tgtttttctctcctg

SEQ ID NO: 1212284 - DNA, 15 bp, Homo sapiens
atgtttttctctcct

SEQ ID NO: 1212285 - DNA, 15 bp, Homo sapiens
tatgtttttctctcc

SEQ ID NO: 1212286 - DNA, 15 bp, Homo sapiens
atatgtttttctctc

SEQ ID NO: 1212287 - DNA, 15 bp, Homo sapiens
aatatgtttttctct

SEQ ID NO: 1212288 - DNA, 15 bp, Homo sapiens
aaatatgtttttctc

SEQ ID NO: 1212289 - DNA, 15 bp, Homo sapiens
aaaatatgtttttct

SEQ ID NO: 1212290 - DNA, 15 bp, Homo sapiens
gaaaatatgtttttc

SEQ ID NO: 1212291 - DNA, 15 bp, Homo sapiens
tgaaaatatgttttt

SEQ ID NO: 1212292 - DNA, 15 bp, Homo sapiens
ctgaaaatatgtttt

SEQ ID NO: 1212293 - DNA, 15 bp, Homo sapiens
tctgaaaatatgttt

SEQ ID NO: 1212294 - DNA, 15 bp, Homo sapiens
ttctgaaaatatgtt

SEQ ID NO: 1212295 - DNA, 15 bp, Homo sapiens
cttctgaaaatatgt

SEQ ID NO: 1212296 - DNA, 15 bp, Homo sapiens
gcttctgaaaatatg

SEQ ID NO: 1212297 - DNA, 15 bp, Homo sapiens
agcttctgaaaatat

SEQ ID NO: 1212298 - DNA, 15 bp, Homo sapiens
cagcttctgaaaata

SEQ ID NO: 1212299 - DNA, 15 bp, Homo sapiens
gcagcttctgaaaat

SEQ ID NO: 1212300 - DNA, 15 bp, Homo sapiens
tgcagcttctgaaaa

SEQ ID NO: 1212301 - DNA, 15 bp, Homo sapiens
ctgcagcttctgaaa

SEQ ID NO: 1212302 - DNA, 15 bp, Homo sapiens
cctgcagcttctgaa

SEQ ID NO: 1212303 - DNA, 15 bp, Homo sapiens
gcctgcagcttctga

SEQ ID NO: 1212304 - DNA, 15 bp, Homo sapiens
tgcctgcagcttctg

SEQ ID NO: 1212305 - DNA, 15 bp, Homo sapiens
atgcctgcagcttct

SEQ ID NO: 1212306 - DNA, 15 bp, Homo sapiens
tatgcctgcagcttc

SEQ ID NO: 1212307 - DNA, 15 bp, Homo sapiens
ctatgcctgcagctt

SEQ ID NO: 1212308 - DNA, 15 bp, Homo sapiens
cctatgcctgcagct

SEQ ID NO: 1212309 - DNA, 15 bp, Homo sapiens
tcctatgcctgcagc

SEQ ID NO: 1212310 - DNA, 15 bp, Homo sapiens
ttcctatgcctgcag

SEQ ID NO: 1212311 - DNA, 15 bp, Homo sapiens
cttcctatgcctgca

SEQ ID NO: 1212312 - DNA, 15 bp, Homo sapiens
tcttcctatgcctgc

SEQ ID NO: 1212313 - DNA, 15 bp, Homo sapiens
gtcttcctatgcctg

SEQ ID NO: 1212314 - DNA, 15 bp, Homo sapiens
agtcttcctatgcct

SEQ ID NO: 1212315 - DNA, 15 bp, Homo sapiens
aagtcttcctatgcc

SEQ ID NO: 1212316 - DNA, 15 bp, Homo sapiens
caagtcttcctatgc

SEQ ID NO: 1212317 - DNA, 15 bp, Homo sapiens
ccaagtcttcctatg

SEQ ID NO: 1212318 - DNA, 15 bp, Homo sapiens
gccaagtcttcctat

SEQ ID NO: 1212319 - DNA, 15 bp, Homo sapiens
agccaagtcttccta

SEQ ID NO: 1212320 - DNA, 15 bp, Homo sapiens
cagccaagtcttcct

SEQ ID NO: 1212321 - DNA, 15 bp, Homo sapiens
ccagccaagtcttcc

SEQ ID NO: 1212322 - DNA, 15 bp, Homo sapiens
cccagccaagtcttc

SEQ ID NO: 1212323 - DNA, 15 bp, Homo sapiens
ccccagccaagtctt

SEQ ID NO: 1212324 - DNA, 15 bp, Homo sapiens
accccagccaagtct

SEQ ID NO: 1212325 - DNA, 15 bp, Homo sapiens
aaccccagccaagtc

SEQ ID NO: 1212326 - DNA, 15 bp, Homo sapiens
caaccccagccaagt

SEQ ID NO: 1212327 - DNA, 15 bp, Homo sapiens
tggcagagtgagact

SEQ ID NO: 1212328 - DNA, 15 bp, Homo sapiens
gtggcagagtgagac

SEQ ID NO: 1212329 - DNA, 15 bp, Homo sapiens
ggtggcagagtgaga

SEQ ID NO: 1212330 - DNA, 15 bp, Homo sapiens
gggtggcagagtgag

SEQ ID NO: 1212331 - DNA, 15 bp, Homo sapiens
tgggtggcagagtga

SEQ ID NO: 1212332 - DNA, 15 bp, Homo sapiens
ctgggtggcagagtg

SEQ ID NO: 1212333 - DNA, 15 bp, Homo sapiens
cctgggtggcagagt

SEQ ID NO: 1212334 - DNA, 15 bp, Homo sapiens
gcctgggtggcagag

SEQ ID NO: 1212335 - DNA, 15 bp, Homo sapiens
agcctgggtggcaga

SEQ ID NO: 1212336 - DNA, 15 bp, Homo sapiens
cagcctgggtggcag

SEQ ID NO: 1212337 - DNA, 15 bp, Homo sapiens
ccagcctgggtggca

SEQ ID NO: 1212338 - DNA, 15 bp, Homo sapiens
tccagcctgggtggc

SEQ ID NO: 1212339 - DNA, 15 bp, Homo sapiens
ctccagcctgggtgg

SEQ ID NO: 1212340 - DNA, 15 bp, Homo sapiens
cctgccattgcactc

SEQ ID NO: 1212341 - DNA, 15 bp, Homo sapiens
tcctgccattgcact

SEQ ID NO: 1212342 - DNA, 15 bp, Homo sapiens
atcctgccattgcac

SEQ ID NO: 1212343 - DNA, 15 bp, Homo sapiens
gatcctgccattgca

SEQ ID NO: 1212344 - DNA, 15 bp, Homo sapiens
agatcctgccattgc

SEQ ID NO: 1212345 - DNA, 15 bp, Homo sapiens
gagatcctgccattg

SEQ ID NO: 1212346 - DNA, 15 bp, Homo sapiens
cgagatcctgccatt

SEQ ID NO: 1212347 - DNA, 15 bp, Homo sapiens
ccgagatcctgccat

SEQ ID NO: 1212348 - DNA, 15 bp, Homo sapiens
aggaggttgcggtga

SEQ ID NO: 1212349 - DNA, 15 bp, Homo sapiens
gaggaggttgcggtg

SEQ ID NO: 1212350 - DNA, 15 bp, Homo sapiens
ggaggaggttgcggt

SEQ ID NO: 1212351 - DNA, 15 bp, Homo sapiens
aggaggaggttgcgg

SEQ ID NO: 1212352 - DNA, 15 bp, Homo sapiens
gaggaggaggttgcg

SEQ ID NO: 1212353 - DNA, 15 bp, Homo sapiens
taacctgggaggagg

SEQ ID NO: 1212354 - DNA, 15 bp, Homo sapiens
ttaacctgggaggag

SEQ ID NO: 1212355 - DNA, 15 bp, Homo sapiens
tttaacctgggagga

SEQ ID NO: 1212356 - DNA, 15 bp, Homo sapiens
ctttaacctgggagg

SEQ ID NO: 1212357 - DNA, 15 bp, Homo sapiens
actttaacctgggag

SEQ ID NO: 1212358 - DNA, 15 bp, Homo sapiens
cactttaacctggga

SEQ ID NO: 1212359 - DNA, 15 bp, Homo sapiens
tcactttaacctggg

SEQ ID NO: 1212360 - DNA, 15 bp, Homo sapiens
atcactttaacctgg

SEQ ID NO: 1212361 - DNA, 15 bp, Homo sapiens
aatcactttaacctg

SEQ ID NO: 1212362 - DNA, 15 bp, Homo sapiens
gaatcactttaacct

SEQ ID NO: 1212363 - DNA, 15 bp, Homo sapiens
agaatcactttaacc

SEQ ID NO: 1212364 - DNA, 15 bp, Homo sapiens
gagaatcactttaac

SEQ ID NO: 1212365 - DNA, 15 bp, Homo sapiens
ggagaatcactttaa

SEQ ID NO: 1212366 - DNA, 15 bp, Homo sapiens
aggagaatcacttta

SEQ ID NO: 1212367 - DNA, 15 bp, Homo sapiens
caggagaatcacttt

SEQ ID NO: 1212368 - DNA, 15 bp, Homo sapiens
tgtggtggcgggcac

SEQ ID NO: 1212369 - DNA, 15 bp, Homo sapiens
gtgtggtggcgggca

SEQ ID NO: 1212370 - DNA, 15 bp, Homo sapiens
ttgggtgtggtggcg

SEQ ID NO: 1212371 - DNA, 15 bp, Homo sapiens
gttgggtgtggtggc

SEQ ID NO: 1212372 - DNA, 15 bp, Homo sapiens
agttgggtgtggtgg

SEQ ID NO: 1212373 - DNA, 15 bp, Homo sapiens
tagttgggtgtggtg

SEQ ID NO: 1212374 - DNA, 15 bp, Homo sapiens
ttagttgggtgtggt

SEQ ID NO: 1212375 - DNA, 15 bp, Homo sapiens
attagttgggtgtgg

SEQ ID NO: 1212376 - DNA, 15 bp, Homo sapiens
aattagttgggtgtg

SEQ ID NO: 1212377 - DNA, 15 bp, Homo sapiens
aaattagttgggtgt

SEQ ID NO: 1212378 - DNA, 15 bp, Homo sapiens
aaaattagttgggtg

SEQ ID NO: 1212379 - DNA, 15 bp, Homo sapiens
aaaaattagttgggt

SEQ ID NO: 1212380 - DNA, 15 bp, Homo sapiens
ggccaatatagtgaa

SEQ ID NO: 1212381 - DNA, 15 bp, Homo sapiens
tggccaatatagtga

SEQ ID NO: 1212382 - DNA, 15 bp, Homo sapiens
ctggccaatatagtg

SEQ ID NO: 1212383 - DNA, 15 bp, Homo sapiens
cctggccaatatagt

SEQ ID NO: 1212384 - DNA, 15 bp, Homo sapiens
gcctggccaatatag

SEQ ID NO: 1212385 - DNA, 15 bp, Homo sapiens
agcctggccaatata

SEQ ID NO: 1212386 - DNA, 15 bp, Homo sapiens
tcaggggttcaagac

SEQ ID NO: 1212387 - DNA, 15 bp, Homo sapiens
gtcaggggttcaaga

SEQ ID NO: 1212388 - DNA, 15 bp, Homo sapiens
ggtcaggggttcaag

SEQ ID NO: 1212389 - DNA, 15 bp, Homo sapiens
aggtcaggggttcaa

SEQ ID NO: 1212390 - DNA, 15 bp, Homo sapiens
gaggtcaggggttca

SEQ ID NO: 1212391 - DNA, 15 bp, Homo sapiens
gtgaggtcaggggtt

SEQ ID NO: 1212392 - DNA, 15 bp, Homo sapiens
cgtgaggtcaggggt

SEQ ID NO: 1212393 - DNA, 15 bp, Homo sapiens
acgtgaggtcagggg

SEQ ID NO: 1212394 - DNA, 15 bp, Homo sapiens
cacgtgaggtcaggg

SEQ ID NO: 1212395 - DNA, 15 bp, Homo sapiens
gggtggatcacgtga

SEQ ID NO: 1212396 - DNA, 15 bp, Homo sapiens
cgggtggatcacgtg

SEQ ID NO: 1212397 - DNA, 15 bp, Homo sapiens
gcgggtggatcacgt

SEQ ID NO: 1212398 - DNA, 15 bp, Homo sapiens
agcacagtggctcac

SEQ ID NO: 1212399 - DNA, 15 bp, Homo sapiens
gccgagcacagtggc

SEQ ID NO: 1212400 - DNA, 15 bp, Homo sapiens
ggccgagcacagtgg

SEQ ID NO: 1212401 - DNA, 15 bp, Homo sapiens
aggccgagcacagtg

SEQ ID NO: 1212402 - DNA, 15 bp, Homo sapiens
gaggccgagcacagt

SEQ ID NO: 1212403 - DNA, 15 bp, Homo sapiens
tgaggccgagcacag

SEQ ID NO: 1212404 - DNA, 15 bp, Homo sapiens
ctgaggccgagcaca

SEQ ID NO: 1212405 - DNA, 15 bp, Homo sapiens
actgaggccgagcac

SEQ ID NO: 1212406 - DNA, 15 bp, Homo sapiens
cactgaggccgagca

SEQ ID NO: 1212407 - DNA, 15 bp, Homo sapiens
ccactgaggccgagc

SEQ ID NO: 1212408 - DNA, 15 bp, Homo sapiens
cccactgaggccgag

SEQ ID NO: 1212409 - DNA, 15 bp, Homo sapiens
acccactgaggccga

SEQ ID NO: 1212410 - DNA, 15 bp, Homo sapiens
gacccactgaggccg

SEQ ID NO: 1212411 - DNA, 15 bp, Homo sapiens
agacccactgaggcc

SEQ ID NO: 1212412 - DNA, 15 bp, Homo sapiens
aagacccactgaggc

SEQ ID NO: 1212413 - DNA, 15 bp, Homo sapiens
aaagacccactgagg

SEQ ID NO: 1212414 - DNA, 15 bp, Homo sapiens
gaaagacccactgag

SEQ ID NO: 1212415 - DNA, 15 bp, Homo sapiens
ggaaagacccactga

SEQ ID NO: 1212416 - DNA, 15 bp, Homo sapiens
aggaaagacccactg

SEQ ID NO: 1212417 - DNA, 15 bp, Homo sapiens
aaggaaagacccact

SEQ ID NO: 1212418 - DNA, 15 bp, Homo sapiens
aaaggaaagacccac

SEQ ID NO: 1212419 - DNA, 15 bp, Homo sapiens
caaaggaaagaccca

SEQ ID NO: 1212420 - DNA, 15 bp, Homo sapiens
tcaaaggaaagaccc

SEQ ID NO: 1212421 - DNA, 15 bp, Homo sapiens
ctcaaaggaaagacc

SEQ ID NO: 1212422 - DNA, 15 bp, Homo sapiens
actcaaaggaaagac

SEQ ID NO: 1212423 - DNA, 15 bp, Homo sapiens
cactcaaaggaaaga

SEQ ID NO: 1212424 - DNA, 15 bp, Homo sapiens
tcactcaaaggaaag

SEQ ID NO: 1212425 - DNA, 15 bp, Homo sapiens
gtcactcaaaggaaa

SEQ ID NO: 1212426 - DNA, 15 bp, Homo sapiens
tgtcactcaaaggaa

SEQ ID NO: 1212427 - DNA, 15 bp, Homo sapiens
ctgtcactcaaagga

SEQ ID NO: 1212428 - DNA, 15 bp, Homo sapiens
actgtcactcaaagg

SEQ ID NO: 1212429 - DNA, 15 bp, Homo sapiens
aactgtcactcaaag

SEQ ID NO: 1212430 - DNA, 15 bp, Homo sapiens
gaactgtcactcaaa

SEQ ID NO: 1212431 - DNA, 15 bp, Homo sapiens
tgaactgtcactcaa

SEQ ID NO: 1212432 - DNA, 15 bp, Homo sapiens
ttgaactgtcactca

SEQ ID NO: 1212433 - DNA, 15 bp, Homo sapiens
attgaactgtcactc

SEQ ID NO: 1212434 - DNA, 15 bp, Homo sapiens
gattgaactgtcact

SEQ ID NO: 1212435 - DNA, 15 bp, Homo sapiens
ggattgaactgtcac

SEQ ID NO: 1212436 - DNA, 15 bp, Homo sapiens
aggattgaactgtca

SEQ ID NO: 1212437 - DNA, 15 bp, Homo sapiens
caggattgaactgtc

SEQ ID NO: 1212438 - DNA, 15 bp, Homo sapiens
acaggattgaactgt

SEQ ID NO: 1212439 - DNA, 15 bp, Homo sapiens
gacaggattgaactg

SEQ ID NO: 1212440 - DNA, 15 bp, Homo sapiens
agacaggattgaact

SEQ ID NO: 1212441 - DNA, 15 bp, Homo sapiens
gagacaggattgaac

SEQ ID NO: 1212442 - DNA, 15 bp, Homo sapiens
agagacaggattgaa

SEQ ID NO: 1212443 - DNA, 15 bp, Homo sapiens
aagagacaggattga

SEQ ID NO: 1212444 - DNA, 15 bp, Homo sapiens
gaagagacaggattg

SEQ ID NO: 1212445 - DNA, 15 bp, Homo sapiens
agaagagacaggatt

SEQ ID NO: 1212446 - DNA, 15 bp, Homo sapiens
cagaagagacaggat

SEQ ID NO: 1212447 - DNA, 15 bp, Homo sapiens
acagaagagacagga

SEQ ID NO: 1212448 - DNA, 15 bp, Homo sapiens
tacagaagagacagg

SEQ ID NO: 1212449 - DNA, 15 bp, Homo sapiens
ctacagaagagacag

SEQ ID NO: 1212450 - DNA, 15 bp, Homo sapiens
actacagaagagaca

SEQ ID NO: 1212451 - DNA, 15 bp, Homo sapiens
cactacagaagagac

SEQ ID NO: 1212452 - DNA, 15 bp, Homo sapiens
acactacagaagaga

SEQ ID NO: 1212453 - DNA, 15 bp, Homo sapiens
gacactacagaagag

SEQ ID NO: 1212454 - DNA, 15 bp, Homo sapiens
agacactacagaaga

SEQ ID NO: 1212455 - DNA, 15 bp, Homo sapiens
cagacactacagaag

SEQ ID NO: 1212456 - DNA, 15 bp, Homo sapiens
acagacactacagaa

SEQ ID NO: 1212457 - DNA, 15 bp, Homo sapiens
gacagacactacaga

SEQ ID NO: 1212458 - DNA, 15 bp, Homo sapiens
tgacagacactacag

SEQ ID NO: 1212459 - DNA, 15 bp, Homo sapiens
gtgacagacactaca

SEQ ID NO: 1212460 - DNA, 15 bp, Homo sapiens
ggtgacagacactac

SEQ ID NO: 1212461 - DNA, 15 bp, Homo sapiens
aggtgacagacacta

SEQ ID NO: 1212462 - DNA, 15 bp, Homo sapiens
caggtgacagacact

SEQ ID NO: 1212463 - DNA, 15 bp, Homo sapiens
gcaggtgacagacac

SEQ ID NO: 1212464 - DNA, 15 bp, Homo sapiens
tgcaggtgacagaca

SEQ ID NO: 1212465 - DNA, 15 bp, Homo sapiens
ttgcaggtgacagac

SEQ ID NO: 1212466 - DNA, 15 bp, Homo sapiens
tttgcaggtgacaga

SEQ ID NO: 1212467 - DNA, 15 bp, Homo sapiens
atttgcaggtgacag

SEQ ID NO: 1212468 - DNA, 15 bp, Homo sapiens
gatttgcaggtgaca

SEQ ID NO: 1212469 - DNA, 15 bp, Homo sapiens
ggatttgcaggtgac

SEQ ID NO: 1212470 - DNA, 15 bp, Homo sapiens
cggatttgcaggtga

SEQ ID NO: 1212471 - DNA, 15 bp, Homo sapiens
ccggatttgcaggtg

SEQ ID NO: 1212472 - DNA, 15 bp, Homo sapiens
cccggatttgcaggt

SEQ ID NO: 1212473 - DNA, 15 bp, Homo sapiens
ccccggatttgcagg

SEQ ID NO: 1212474 - DNA, 15 bp, Homo sapiens
tccccggatttgcag

SEQ ID NO: 1212475 - DNA, 15 bp, Homo sapiens
gtccccggatttgca

SEQ ID NO: 1212476 - DNA, 15 bp, Homo sapiens
agtccccggatttgc

SEQ ID NO: 1212477 - DNA, 15 bp, Homo sapiens
aagtccccggatttg

SEQ ID NO: 1212478 - DNA, 15 bp, Homo sapiens
gaagtccccggattt

SEQ ID NO: 1212479 - DNA, 15 bp, Homo sapiens
tgaagtccccggatt

SEQ ID NO: 1212480 - DNA, 15 bp, Homo sapiens
ctgaagtccccggat

SEQ ID NO: 1212481 - DNA, 15 bp, Homo sapiens
gctgaagtccccgga

SEQ ID NO: 1212482 - DNA, 15 bp, Homo sapiens
agctgaagtccccgg

SEQ ID NO: 1212483 - DNA, 15 bp, Homo sapiens
cagctgaagtccccg

SEQ ID NO: 1212484 - DNA, 15 bp, Homo sapiens
acagctgaagtcccc

SEQ ID NO: 1212485 - DNA, 15 bp, Homo sapiens
cacagctgaagtccc

SEQ ID NO: 1212486 - DNA, 15 bp, Homo sapiens
ccacagctgaagtcc

SEQ ID NO: 1212487 - DNA, 15 bp, Homo sapiens
cccacagctgaagtc

SEQ ID NO: 1212488 - DNA, 15 bp, Homo sapiens
ccccacagctgaagt

SEQ ID NO: 1212489 - DNA, 15 bp, Homo sapiens
cccccacagctgaag

SEQ ID NO: 1212490 - DNA, 15 bp, Homo sapiens
gcccccacagctgaa

SEQ ID NO: 1212491 - DNA, 15 bp, Homo sapiens
ggcccccacagctga

SEQ ID NO: 1212492 - DNA, 15 bp, Homo sapiens
cggcccccacagctg

SEQ ID NO: 1212493 - DNA, 15 bp, Homo sapiens
acggcccccacagct

SEQ ID NO: 1212494 - DNA, 15 bp, Homo sapiens
cacggcccccacagc

SEQ ID NO: 1212495 - DNA, 15 bp, Homo sapiens
acacggcccccacag

SEQ ID NO: 1212496 - DNA, 15 bp, Homo sapiens
gacacggcccccaca

SEQ ID NO: 1212497 - DNA, 15 bp, Homo sapiens
tgacacggcccccac

SEQ ID NO: 1212498 - DNA, 15 bp, Homo sapiens
ttgacacggccccca

SEQ ID NO: 1212499 - DNA, 15 bp, Homo sapiens
gttgacacggccccc

SEQ ID NO: 1212500 - DNA, 15 bp, Homo sapiens
ggttgacacggcccc

SEQ ID NO: 1212501 - DNA, 15 bp, Homo sapiens
cggttgacacggccc

SEQ ID NO: 1212502 - DNA, 15 bp, Homo sapiens
gcggttgacacggcc

SEQ ID NO: 1212503 - DNA, 15 bp, Homo sapiens
agcggttgacacggc

SEQ ID NO: 1212504 - DNA, 15 bp, Homo sapiens
cagcggttgacacgg

SEQ ID NO: 1212505 - DNA, 15 bp, Homo sapiens
gcagcggttgacacg

SEQ ID NO: 1212506 - DNA, 15 bp, Homo sapiens
tgcagcggttgacac

SEQ ID NO: 1212507 - DNA, 15 bp, Homo sapiens
atgcagcggttgaca

SEQ ID NO: 1212508 - DNA, 15 bp, Homo sapiens
aatgcagcggttgac

SEQ ID NO: 1212509 - DNA, 15 bp, Homo sapiens
gaatgcagcggttga

SEQ ID NO: 1212510 - DNA, 15 bp, Homo sapiens
ggaatgcagcggttg

SEQ ID NO: 1212511 - DNA, 15 bp, Homo sapiens
aggaatgcagcggtt

SEQ ID NO: 1212512 - DNA, 15 bp, Homo sapiens
gaggaatgcagcggt

SEQ ID NO: 1212513 - DNA, 15 bp, Homo sapiens
tgaggaatgcagcgg

SEQ ID NO: 1212514 - DNA, 15 bp, Homo sapiens
ctgaggaatgcagcg

SEQ ID NO: 1212515 - DNA, 15 bp, Homo sapiens
actgaggaatgcagc

SEQ ID NO: 1212516 - DNA, 15 bp, Homo sapiens
aactgaggaatgcag

SEQ ID NO: 1212517 - DNA, 15 bp, Homo sapiens
gaactgaggaatgca

SEQ ID NO: 1212518 - DNA, 15 bp, Homo sapiens
agaactgaggaatgc

SEQ ID NO: 1212519 - DNA, 15 bp, Homo sapiens
cagaactgaggaatg

SEQ ID NO: 1212520 - DNA, 15 bp, Homo sapiens
ccagaactgaggaat

SEQ ID NO: 1212521 - DNA, 15 bp, Homo sapiens
tccagaactgaggaa

SEQ ID NO: 1212522 - DNA, 15 bp, Homo sapiens
ctccagaactgagga

SEQ ID NO: 1212523 - DNA, 15 bp, Homo sapiens
cctccagaactgagg

SEQ ID NO: 1212524 - DNA, 15 bp, Homo sapiens
acctccagaactgag

SEQ ID NO: 1212525 - DNA, 15 bp, Homo sapiens
cacctccagaactga

SEQ ID NO: 1212526 - DNA, 15 bp, Homo sapiens
gcacctccagaactg

SEQ ID NO: 1212527 - DNA, 15 bp, Homo sapiens
cgcacctccagaact

SEQ ID NO: 1212528 - DNA, 15 bp, Homo sapiens
tcgcacctccagaac

SEQ ID NO: 1212529 - DNA, 15 bp, Homo sapiens
atcgcacctccagaa

SEQ ID NO: 1212530 - DNA, 15 bp, Homo sapiens
catcgcacctccaga

SEQ ID NO: 1212531 - DNA, 15 bp, Homo sapiens
ccatcgcacctccag

SEQ ID NO: 1212532 - DNA, 15 bp, Homo sapiens
gccatcgcacctcca

SEQ ID NO: 1212533 - DNA, 15 bp, Homo sapiens
ggccatcgcacctcc

SEQ ID NO: 1212534 - DNA, 15 bp, Homo sapiens
tggccatcgcacctc

SEQ ID NO: 1212535 - DNA, 15 bp, Homo sapiens
ttggccatcgcacct

SEQ ID NO: 1212536 - DNA, 15 bp, Homo sapiens
cttggccatcgcacc

SEQ ID NO: 1212537 - DNA, 15 bp, Homo sapiens
acttggccatcgcac

SEQ ID NO: 1212538 - DNA, 15 bp, Homo sapiens
cacttggccatcgca

SEQ ID NO: 1212539 - DNA, 15 bp, Homo sapiens
ccacttggccatcgc

SEQ ID NO: 1212540 - DNA, 15 bp, Homo sapiens
tccacttggccatcg

SEQ ID NO: 1212541 - DNA, 15 bp, Homo sapiens
gtccacttggccatc

SEQ ID NO: 1212542 - DNA, 15 bp, Homo sapiens
agtccacttggccat

SEQ ID NO: 1212543 - DNA, 15 bp, Homo sapiens
cagtccacttggcca

SEQ ID NO: 1212544 - DNA, 15 bp, Homo sapiens
gcagtccacttggcc

SEQ ID NO: 1212545 - DNA, 15 bp, Homo sapiens
cgcagtccacttggc

SEQ ID NO: 1212546 - DNA, 15 bp, Homo sapiens
tcgcagtccacttgg

SEQ ID NO: 1212547 - DNA, 15 bp, Homo sapiens
gtcgcagtccacttg

SEQ ID NO: 1212548 - DNA, 15 bp, Homo sapiens
tgtcgcagtccactt

SEQ ID NO: 1212549 - DNA, 15 bp, Homo sapiens
ttgtcgcagtccact

SEQ ID NO: 1212550 - DNA, 15 bp, Homo sapiens
gttgtcgcagtccac

SEQ ID NO: 1212551 - DNA, 15 bp, Homo sapiens
cgttgtcgcagtcca

SEQ ID NO: 1212552 - DNA, 15 bp, Homo sapiens
ccgttgtcgcagtcc

SEQ ID NO: 1212553 - DNA, 15 bp, Homo sapiens
gccgttgtcgcagtc

SEQ ID NO: 1212554 - DNA, 15 bp, Homo sapiens
agccgttgtcgcagt

SEQ ID NO: 1212555 - DNA, 15 bp, Homo sapiens
gagccgttgtcgcag

SEQ ID NO: 1212556 - DNA, 15 bp, Homo sapiens
tgagccgttgtcgca

SEQ ID NO: 1212557 - DNA, 15 bp, Homo sapiens
ctgagccgttgtcgc

SEQ ID NO: 1212558 - DNA, 15 bp, Homo sapiens
tctgagccgttgtcg

SEQ ID NO: 1212559 - DNA, 15 bp, Homo sapiens
gtctgagccgttgtc

SEQ ID NO: 1212560 - DNA, 15 bp, Homo sapiens
cgtctgagccgttgt

SEQ ID NO: 1212561 - DNA, 15 bp, Homo sapiens
tcgtctgagccgttg

SEQ ID NO: 1212562 - DNA, 15 bp, Homo sapiens
ctcgtctgagccgtt

SEQ ID NO: 1212563 - DNA, 15 bp, Homo sapiens
gctcgtctgagccgt

SEQ ID NO: 1212564 - DNA, 15 bp, Homo sapiens
tgctcgtctgagccg

SEQ ID NO: 1212565 - DNA, 15 bp, Homo sapiens
ttgctcgtctgagcc

SEQ ID NO: 1212566 - DNA, 15 bp, Homo sapiens
cttgctcgtctgagc

SEQ ID NO: 1212567 - DNA, 15 bp, Homo sapiens
ccttgctcgtctgag

SEQ ID NO: 1212568 - DNA, 15 bp, Homo sapiens
gccttgctcgtctga

SEQ ID NO: 1212569 - DNA, 15 bp, Homo sapiens
agccttgctcgtctg

SEQ ID NO: 1212570 - DNA, 15 bp, Homo sapiens
cagccttgctcgtct

SEQ ID NO: 1212571 - DNA, 15 bp, Homo sapiens
acagccttgctcgtc

SEQ ID NO: 1212572 - DNA, 15 bp, Homo sapiens
gacagccttgctcgt

SEQ ID NO: 1212573 - DNA, 15 bp, Homo sapiens
cgacagccttgctcg

SEQ ID NO: 1212574 - DNA, 15 bp, Homo sapiens
acgacagccttgctc

SEQ ID NO: 1212575 - DNA, 15 bp, Homo sapiens
tacgacagccttgct

SEQ ID NO: 1212576 - DNA, 15 bp, Homo sapiens
ttacgacagccttgc

SEQ ID NO: 1212577 - DNA, 15 bp, Homo sapiens
cttacgacagccttg

SEQ ID NO: 1212578 - DNA, 15 bp, Homo sapiens
acttacgacagcctt

SEQ ID NO: 1212579 - DNA, 15 bp, Homo sapiens
cacttacgacagcct

SEQ ID NO: 1212580 - DNA, 15 bp, Homo sapiens
acacttacgacagcc

SEQ ID NO: 1212581 - DNA, 15 bp, Homo sapiens
cacacttacgacagc

SEQ ID NO: 1212582 - DNA, 15 bp, Homo sapiens
ccacacttacgacag

SEQ ID NO: 1212583 - DNA, 15 bp, Homo sapiens
gccacacttacgaca

SEQ ID NO: 1212584 - DNA, 15 bp, Homo sapiens
ggccacacttacgac

SEQ ID NO: 1212585 - DNA, 15 bp, Homo sapiens
gggccacacttacga

SEQ ID NO: 1212586 - DNA, 15 bp, Homo sapiens
agggccacacttacg

SEQ ID NO: 1212587 - DNA, 15 bp, Homo sapiens
cagggccacacttac

SEQ ID NO: 1212588 - DNA, 15 bp, Homo sapiens
gcagggccacactta

SEQ ID NO: 1212589 - DNA, 15 bp, Homo sapiens
ggcagggccacactt

SEQ ID NO: 1212590 - DNA, 15 bp, Homo sapiens
aggcagggccacact

SEQ ID NO: 1212591 - DNA, 15 bp, Homo sapiens
aaggcagggccacac

SEQ ID NO: 1212592 - DNA, 15 bp, Homo sapiens
aaaggcagggccaca

SEQ ID NO: 1212593 - DNA, 15 bp, Homo sapiens
caaaggcagggccac

SEQ ID NO: 1212594 - DNA, 15 bp, Homo sapiens
gcaaaggcagggcca

SEQ ID NO: 1212595 - DNA, 15 bp, Homo sapiens
agcaaaggcagggcc

SEQ ID NO: 1212596 - DNA, 15 bp, Homo sapiens
tagcaaaggcagggc

SEQ ID NO: 1212597 - DNA, 15 bp, Homo sapiens
atagcaaaggcaggg

SEQ ID NO: 1212598 - DNA, 15 bp, Homo sapiens
aatagcaaaggcagg

SEQ ID NO: 1212599 - DNA, 15 bp, Homo sapiens
caatagcaaaggcag

SEQ ID NO: 1212600 - DNA, 15 bp, Homo sapiens
tcaatagcaaaggca

SEQ ID NO: 1212601 - DNA, 15 bp, Homo sapiens
ctcaatagcaaaggc

SEQ ID NO: 1212602 - DNA, 15 bp, Homo sapiens
gctcaatagcaaagg

SEQ ID NO: 1212603 - DNA, 15 bp, Homo sapiens
ggctcaatagcaaag

SEQ ID NO: 1212604 - DNA, 15 bp, Homo sapiens
aggctcaatagcaaa

SEQ ID NO: 1212605 - DNA, 15 bp, Homo sapiens
taggctcaatagcaa

SEQ ID NO: 1212606 - DNA, 15 bp, Homo sapiens
ataggctcaatagca

SEQ ID NO: 1212607 - DNA, 15 bp, Homo sapiens
gataggctcaatagc

SEQ ID NO: 1212608 - DNA, 15 bp, Homo sapiens
agataggctcaatag

SEQ ID NO: 1212609 - DNA, 15 bp, Homo sapiens
cagataggctcaata

SEQ ID NO: 1212610 - DNA, 15 bp, Homo sapiens
tcagataggctcaat

SEQ ID NO: 1212611 - DNA, 15 bp, Homo sapiens
ctcagataggctcaa

SEQ ID NO: 1212612 - DNA, 15 bp, Homo sapiens
actcagataggctca

SEQ ID NO: 1212613 - DNA, 15 bp, Homo sapiens
gactcagataggctc

SEQ ID NO: 1212614 - DNA, 15 bp, Homo sapiens
ggactcagataggct

SEQ ID NO: 1212615 - DNA, 15 bp, Homo sapiens
aggactcagataggc

SEQ ID NO: 1212616 - DNA, 15 bp, Homo sapiens
caggactcagatagg

SEQ ID NO: 1212617 - DNA, 15 bp, Homo sapiens
ccaggactcagatag

SEQ ID NO: 1212618 - DNA, 15 bp, Homo sapiens
cccaggactcagata

SEQ ID NO: 1212619 - DNA, 15 bp, Homo sapiens
ccccaggactcagat

SEQ ID NO: 1212620 - DNA, 15 bp, Homo sapiens
tccccaggactcaga

SEQ ID NO: 1212621 - DNA, 15 bp, Homo sapiens
ctccccaggactcag

SEQ ID NO: 1212622 - DNA, 15 bp, Homo sapiens
actccccaggactca

SEQ ID NO: 1212623 - DNA, 15 bp, Homo sapiens
cactccccaggactc

SEQ ID NO: 1212624 - DNA, 15 bp, Homo sapiens
ccactccccaggact

SEQ ID NO: 1212625 - DNA, 15 bp, Homo sapiens
accactccccaggac

SEQ ID NO: 1212626 - DNA, 15 bp, Homo sapiens
gaccactccccagga

SEQ ID NO: 1212627 - DNA, 15 bp, Homo sapiens
agaccactccccagg

SEQ ID NO: 1212628 - DNA, 15 bp, Homo sapiens
cagaccactccccag

SEQ ID NO: 1212629 - DNA, 15 bp, Homo sapiens
tcagaccactcccca

SEQ ID NO: 1212630 - DNA, 15 bp, Homo sapiens
gtcagaccactcccc

SEQ ID NO: 1212631 - DNA, 15 bp, Homo sapiens
agtcagaccactccc

SEQ ID NO: 1212632 - DNA, 15 bp, Homo sapiens
aagtcagaccactcc

SEQ ID NO: 1212633 - DNA, 15 bp, Homo sapiens
aaagtcagaccactc

SEQ ID NO: 1212634 - DNA, 15 bp, Homo sapiens
caaagtcagaccact

SEQ ID NO: 1212635 - DNA, 15 bp, Homo sapiens
acaaagtcagaccac

SEQ ID NO: 1212636 - DNA, 15 bp, Homo sapiens
gacaaagtcagacca

SEQ ID NO: 1212637 - DNA, 15 bp, Homo sapiens
agacaaagtcagacc

SEQ ID NO: 1212638 - DNA, 15 bp, Homo sapiens
gagacaaagtcagac

SEQ ID NO: 1212639 - DNA, 15 bp, Homo sapiens
agagacaaagtcaga

SEQ ID NO: 1212640 - DNA, 15 bp, Homo sapiens
tagagacaaagtcag

SEQ ID NO: 1212641 - DNA, 15 bp, Homo sapiens
gtagagacaaagtca

SEQ ID NO: 1212642 - DNA, 15 bp, Homo sapiens
cgtagagacaaagtc

SEQ ID NO: 1212643 - DNA, 15 bp, Homo sapiens
ccgtagagacaaagt

SEQ ID NO: 1212644 - DNA, 15 bp, Homo sapiens
cccgtagagacaaag

SEQ ID NO: 1212645 - DNA, 15 bp, Homo sapiens
ccccgtagagacaaa

SEQ ID NO: 1212646 - DNA, 15 bp, Homo sapiens
accccgtagagacaa

SEQ ID NO: 1212647 - DNA, 15 bp, Homo sapiens
gaccccgtagagaca

SEQ ID NO: 1212648 - DNA, 15 bp, Homo sapiens
ggaccccgtagagac

SEQ ID NO: 1212649 - DNA, 15 bp, Homo sapiens
aggaccccgtagaga

SEQ ID NO: 1212650 - DNA, 15 bp, Homo sapiens
caggaccccgtagag

SEQ ID NO: 1212651 - DNA, 15 bp, Homo sapiens
gcaggaccccgtaga

SEQ ID NO: 1212652 - DNA, 15 bp, Homo sapiens
agcaggaccccgtag

SEQ ID NO: 1212653 - DNA, 15 bp, Homo sapiens
gagcaggaccccgta

SEQ ID NO: 1212654 - DNA, 15 bp, Homo sapiens
cgagcaggaccccgt

SEQ ID NO: 1212655 - DNA, 15 bp, Homo sapiens
tcgagcaggaccccg

SEQ ID NO: 1212656 - DNA, 15 bp, Homo sapiens
ctcgagcaggacccc

SEQ ID NO: 1212657 - DNA, 15 bp, Homo sapiens
gctcgagcaggaccc

SEQ ID NO: 1212658 - DNA, 15 bp, Homo sapiens
agctcgagcaggacc

SEQ ID NO: 1212659 - DNA, 15 bp, Homo sapiens
cagctcgagcaggac

SEQ ID NO: 1212660 - DNA, 15 bp, Homo sapiens
gcagctcgagcagga

SEQ ID NO: 1212661 - DNA, 15 bp, Homo sapiens
tgcagctcgagcagg

SEQ ID NO: 1212662 - DNA, 15 bp, Homo sapiens
ttgcagctcgagcag

SEQ ID NO: 1212663 - DNA, 15 bp, Homo sapiens
cttgcagctcgagca

SEQ ID NO: 1212664 - DNA, 15 bp, Homo sapiens
ccttgcagctcgagc

SEQ ID NO: 1212665 - DNA, 15 bp, Homo sapiens
gccttgcagctcgag

SEQ ID NO: 1212666 - DNA, 15 bp, Homo sapiens
tgccttgcagctcga

SEQ ID NO: 1212667 - DNA, 15 bp, Homo sapiens
ctgccttgcagctcg

SEQ ID NO: 1212668 - DNA, 15 bp, Homo sapiens
gctgccttgcagctc

SEQ ID NO: 1212669 - DNA, 15 bp, Homo sapiens
agctgccttgcagct

SEQ ID NO: 1212670 - DNA, 15 bp, Homo sapiens
cagctgccttgcagc

SEQ ID NO: 1212671 - DNA, 15 bp, Homo sapiens
gcagctgccttgcag

SEQ ID NO: 1212672 - DNA, 15 bp, Homo sapiens
ggcagctgccttgca

SEQ ID NO: 1212673 - DNA, 15 bp, Homo sapiens
gggcagctgccttgc

SEQ ID NO: 1212674 - DNA, 15 bp, Homo sapiens
ggggcagctgccttg

SEQ ID NO: 1212675 - DNA, 15 bp, Homo sapiens
cggggcagctgcctt

SEQ ID NO: 1212676 - DNA, 15 bp, Homo sapiens
tcggggcagctgcct

SEQ ID NO: 1212677 - DNA, 15 bp, Homo sapiens
ttcggggcagctgcc

SEQ ID NO: 1212678 - DNA, 15 bp, Homo sapiens
gttcggggcagctgc

SEQ ID NO: 1212679 - DNA, 15 bp, Homo sapiens
agttcggggcagctg

SEQ ID NO: 1212680 - DNA, 15 bp, Homo sapiens
cagttcggggcagct

SEQ ID NO: 1212681 - DNA, 15 bp, Homo sapiens
ccagttcggggcagc

SEQ ID NO: 1212682 - DNA, 15 bp, Homo sapiens
cccagttcggggcag

SEQ ID NO: 1212683 - DNA, 15 bp, Homo sapiens
gcccagttcggggca

SEQ ID NO: 1212684 - DNA, 15 bp, Homo sapiens
agcccagttcggggc

SEQ ID NO: 1212685 - DNA, 15 bp, Homo sapiens
gagcccagttcgggg

SEQ ID NO: 1212686 - DNA, 15 bp, Homo sapiens
ggagcccagttcggg

SEQ ID NO: 1212687 - DNA, 15 bp, Homo sapiens
tggagcccagttcgg

SEQ ID NO: 1212688 - DNA, 15 bp, Homo sapiens
atggagcccagttcg

SEQ ID NO: 1212689 - DNA, 15 bp, Homo sapiens
gatggagcccagttc

SEQ ID NO: 1212690 - DNA, 15 bp, Homo sapiens
agatggagcccagtt

SEQ ID NO: 1212691 - DNA, 15 bp, Homo sapiens
gagatggagcccagt

SEQ ID NO: 1212692 - DNA, 15 bp, Homo sapiens
agagatggagcccag

SEQ ID NO: 1212693 - DNA, 15 bp, Homo sapiens
aagagatggagccca

SEQ ID NO: 1212694 - DNA, 15 bp, Homo sapiens
caagagatggagccc

SEQ ID NO: 1212695 - DNA, 15 bp, Homo sapiens
ccaagagatggagcc

SEQ ID NO: 1212696 - DNA, 15 bp, Homo sapiens
cccaagagatggagc

SEQ ID NO: 1212697 - DNA, 15 bp, Homo sapiens
ccccaagagatggag

SEQ ID NO: 1212698 - DNA, 15 bp, Homo sapiens
cccccaagagatgga

SEQ ID NO: 1212699 - DNA, 15 bp, Homo sapiens
gcccccaagagatgg

SEQ ID NO: 1212700 - DNA, 15 bp, Homo sapiens
agcccccaagagatg

SEQ ID NO: 1212701 - DNA, 15 bp, Homo sapiens
gagcccccaagagat

SEQ ID NO: 1212702 - DNA, 15 bp, Homo sapiens
tgagcccccaagaga

SEQ ID NO: 1212703 - DNA, 15 bp, Homo sapiens
atgagcccccaagag

SEQ ID NO: 1212704 - DNA, 15 bp, Homo sapiens
tatgagcccccaaga

SEQ ID NO: 1212705 - DNA, 15 bp, Homo sapiens
gtatgagcccccaag

SEQ ID NO: 1212706 - DNA, 15 bp, Homo sapiens
ggtatgagcccccaa

SEQ ID NO: 1212707 - DNA, 15 bp, Homo sapiens
tggtatgagccccca

SEQ ID NO: 1212708 - DNA, 15 bp, Homo sapiens
ttggtatgagccccc

SEQ ID NO: 1212709 - DNA, 15 bp, Homo sapiens
cttggtatgagcccc

SEQ ID NO: 1212710 - DNA, 15 bp, Homo sapiens
gcttggtatgagccc

SEQ ID NO: 1212711 - DNA, 15 bp, Homo sapiens
ggcttggtatgagcc

SEQ ID NO: 1212712 - DNA, 15 bp, Homo sapiens
aggcttggtatgagc

SEQ ID NO: 1212713 - DNA, 15 bp, Homo sapiens
gaggcttggtatgag

SEQ ID NO: 1212714 - DNA, 15 bp, Homo sapiens
agaggcttggtatga

SEQ ID NO: 1212715 - DNA, 15 bp, Homo sapiens
aagaggcttggtatg

SEQ ID NO: 1212716 - DNA, 15 bp, Homo sapiens
gaagaggcttggtat

SEQ ID NO: 1212717 - DNA, 15 bp, Homo sapiens
ggaagaggcttggta

SEQ ID NO: 1212718 - DNA, 15 bp, Homo sapiens
cggaagaggcttggt

SEQ ID NO: 1212719 - DNA, 15 bp, Homo sapiens
gcggaagaggcttgg

SEQ ID NO: 1212720 - DNA, 15 bp, Homo sapiens
ggcggaagaggcttg

SEQ ID NO: 1212721 - DNA, 15 bp, Homo sapiens
gggcggaagaggctt

SEQ ID NO: 1212722 - DNA, 15 bp, Homo sapiens
agggcggaagaggct

SEQ ID NO: 1212723 - DNA, 15 bp, Homo sapiens
aagggcggaagaggc

SEQ ID NO: 1212724 - DNA, 15 bp, Homo sapiens
gaagggcggaagagg

SEQ ID NO: 1212725 - DNA, 15 bp, Homo sapiens
tgaagggcggaagag

SEQ ID NO: 1212726 - DNA, 15 bp, Homo sapiens
ttgaagggcggaaga

SEQ ID NO: 1212727 - DNA, 15 bp, Homo sapiens
tttgaagggcggaag

SEQ ID NO: 1212728 - DNA, 15 bp, Homo sapiens
atttgaagggcggaa

SEQ ID NO: 1212729 - DNA, 15 bp, Homo sapiens
gatttgaagggcgga

SEQ ID NO: 1212730 - DNA, 15 bp, Homo sapiens
ggatttgaagggcgg

SEQ ID NO: 1212731 - DNA, 15 bp, Homo sapiens
gggatttgaagggcg

SEQ ID NO: 1212732 - DNA, 15 bp, Homo sapiens
ggggatttgaagggc

SEQ ID NO: 1212733 - DNA, 15 bp, Homo sapiens
gggggatttgaaggg

SEQ ID NO: 1212734 - DNA, 15 bp, Homo sapiens
ggggggatttgaagg

SEQ ID NO: 1212735 - DNA, 15 bp, Homo sapiens
aggggggatttgaag

SEQ ID NO: 1212736 - DNA, 15 bp, Homo sapiens
aaggggggatttgaa

SEQ ID NO: 1212737 - DNA, 15 bp, Homo sapiens
caaggggggatttga

SEQ ID NO: 1212738 - DNA, 15 bp, Homo sapiens
tcaaggggggatttg

SEQ ID NO: 1212739 - DNA, 15 bp, Homo sapiens
gtcaaggggggattt

SEQ ID NO: 1212740 - DNA, 15 bp, Homo sapiens
ggtcaaggggggatt

SEQ ID NO: 1212741 - DNA, 15 bp, Homo sapiens
tggtcaaggggggat

SEQ ID NO: 1212742 - DNA, 15 bp, Homo sapiens
ctggtcaagggggga

SEQ ID NO: 1212743 - DNA, 15 bp, Homo sapiens
cctggtcaagggggg

SEQ ID NO: 1212744 - DNA, 15 bp, Homo sapiens
tcctggtcaaggggg

SEQ ID NO: 1212745 - DNA, 15 bp, Homo sapiens
ctcctggtcaagggg

SEQ ID NO: 1212746 - DNA, 15 bp, Homo sapiens
cctcctggtcaaggg

SEQ ID NO: 1212747 - DNA, 15 bp, Homo sapiens
gcctcctggtcaagg

SEQ ID NO: 1212748 - DNA, 15 bp, Homo sapiens
tgcctcctggtcaag

SEQ ID NO: 1212749 - DNA, 15 bp, Homo sapiens
atgcctcctggtcaa

SEQ ID NO: 1212750 - DNA, 15 bp, Homo sapiens
aatgcctcctggtca

SEQ ID NO: 1212751 - DNA, 15 bp, Homo sapiens
taatgcctcctggtc

SEQ ID NO: 1212752 - DNA, 15 bp, Homo sapiens
gtaatgcctcctggt

SEQ ID NO: 1212753 - DNA, 15 bp, Homo sapiens
tgtaatgcctcctgg

SEQ ID NO: 1212754 - DNA, 15 bp, Homo sapiens
ttgtaatgcctcctg

SEQ ID NO: 1212755 - DNA, 15 bp, Homo sapiens
tttgtaatgcctcct

SEQ ID NO: 1212756 - DNA, 15 bp, Homo sapiens
ctttgtaatgcctcc

SEQ ID NO: 1212757 - DNA, 15 bp, Homo sapiens
actttgtaatgcctc

SEQ ID NO: 1212758 - DNA, 15 bp, Homo sapiens
cactttgtaatgcct

SEQ ID NO: 1212759 - DNA, 15 bp, Homo sapiens
ccactttgtaatgcc

SEQ ID NO: 1212760 - DNA, 15 bp, Homo sapiens
cccactttgtaatgc

SEQ ID NO: 1212761 - DNA, 15 bp, Homo sapiens
ccccactttgtaatg

SEQ ID NO: 1212762 - DNA, 15 bp, Homo sapiens
tccccactttgtaat

SEQ ID NO: 1212763 - DNA, 15 bp, Homo sapiens
atccccactttgtaa

SEQ ID NO: 1212764 - DNA, 15 bp, Homo sapiens
catccccactttgta

SEQ ID NO: 1212765 - DNA, 15 bp, Homo sapiens
ccatccccactttgt

SEQ ID NO: 1212766 - DNA, 15 bp, Homo sapiens
accatccccactttg

SEQ ID NO: 1212767 - DNA, 15 bp, Homo sapiens
caccatccccacttt

SEQ ID NO: 1212768 - DNA, 15 bp, Homo sapiens
gcaccatccccactt

SEQ ID NO: 1212769 - DNA, 15 bp, Homo sapiens
agcaccatccccact

SEQ ID NO: 1212770 - DNA, 15 bp, Homo sapiens
tagcaccatccccac

SEQ ID NO: 1212771 - DNA, 15 bp, Homo sapiens
gtagcaccatcccca

SEQ ID NO: 1212772 - DNA, 15 bp, Homo sapiens
ggtagcaccatcccc

SEQ ID NO: 1212773 - DNA, 15 bp, Homo sapiens
aggtagcaccatccc

SEQ ID NO: 1212774 - DNA, 15 bp, Homo sapiens
gaggtagcaccatcc

SEQ ID NO: 1212775 - DNA, 15 bp, Homo sapiens
agaggtagcaccatc

SEQ ID NO: 1212776 - DNA, 15 bp, Homo sapiens
aagaggtagcaccat

SEQ ID NO: 1212777 - DNA, 15 bp, Homo sapiens
gaagaggtagcacca

SEQ ID NO: 1212778 - DNA, 15 bp, Homo sapiens
cgaagaggtagcacc

SEQ ID NO: 1212779 - DNA, 15 bp, Homo sapiens
ccgaagaggtagcac

SEQ ID NO: 1212780 - DNA, 15 bp, Homo sapiens
cccgaagaggtagca

SEQ ID NO: 1212781 - DNA, 15 bp, Homo sapiens
acccgaagaggtagc

SEQ ID NO: 1212782 - DNA, 15 bp, Homo sapiens
aacccgaagaggtag

SEQ ID NO: 1212783 - DNA, 15 bp, Homo sapiens
aaacccgaagaggta

SEQ ID NO: 1212784 - DNA, 15 bp, Homo sapiens
caaacccgaagaggt

SEQ ID NO: 1212785 - DNA, 15 bp, Homo sapiens
acaaacccgaagagg

SEQ ID NO: 1212786 - DNA, 15 bp, Homo sapiens
gacaaacccgaagag

SEQ ID NO: 1212787 - DNA, 15 bp, Homo sapiens
tgacaaacccgaaga

SEQ ID NO: 1212788 - DNA, 15 bp, Homo sapiens
gtgacaaacccgaag

SEQ ID NO: 1212789 - DNA, 15 bp, Homo sapiens
cgtgacaaacccgaa

SEQ ID NO: 1212790 - DNA, 15 bp, Homo sapiens
gcgtgacaaacccga

SEQ ID NO: 1212791 - DNA, 15 bp, Homo sapiens
tgcgtgacaaacccg

SEQ ID NO: 1212792 - DNA, 15 bp, Homo sapiens
gtgcgtgacaaaccc

SEQ ID NO: 1212793 - DNA, 15 bp, Homo sapiens
tgtgcgtgacaaacc

SEQ ID NO: 1212794 - DNA, 15 bp, Homo sapiens
ctgtgcgtgacaaac

SEQ ID NO: 1212795 - DNA, 15 bp, Homo sapiens
actgtgcgtgacaaa

SEQ ID NO: 1212796 - DNA, 15 bp, Homo sapiens
gactgtgcgtgacaa

SEQ ID NO: 1212797 - DNA, 15 bp, Homo sapiens
tgactgtgcgtgaca

SEQ ID NO: 1212798 - DNA, 15 bp, Homo sapiens
ctgactgtgcgtgac

SEQ ID NO: 1212799 - DNA, 15 bp, Homo sapiens
cctgactgtgcgtga

SEQ ID NO: 1212800 - DNA, 15 bp, Homo sapiens
ccctgactgtgcgtg

SEQ ID NO: 1212801 - DNA, 15 bp, Homo sapiens
tccctgactgtgcgt

SEQ ID NO: 1212802 - DNA, 15 bp, Homo sapiens
ctccctgactgtgcg

SEQ ID NO: 1212803 - DNA, 15 bp, Homo sapiens
cctccctgactgtgc

SEQ ID NO: 1212804 - DNA, 15 bp, Homo sapiens
gcctccctgactgtg

SEQ ID NO: 1212805 - DNA, 15 bp, Homo sapiens
agcctccctgactgt

SEQ ID NO: 1212806 - DNA, 15 bp, Homo sapiens
cagcctccctgactg

SEQ ID NO: 1212807 - DNA, 15 bp, Homo sapiens
acagcctccctgact

SEQ ID NO: 1212808 - DNA, 15 bp, Homo sapiens
gacagcctccctgac

SEQ ID NO: 1212809 - DNA, 15 bp, Homo sapiens
ggacagcctccctga

SEQ ID NO: 1212810 - DNA, 15 bp, Homo sapiens
gggacagcctccctg

SEQ ID NO: 1212811 - DNA, 15 bp, Homo sapiens
agggacagcctccct

SEQ ID NO: 1212812 - DNA, 15 bp, Homo sapiens
cagggacagcctccc

SEQ ID NO: 1212813 - DNA, 15 bp, Homo sapiens
gcagggacagcctcc

SEQ ID NO: 1212814 - DNA, 15 bp, Homo sapiens
ggcagggacagcctc

SEQ ID NO: 1212815 - DNA, 15 bp, Homo sapiens
cggcagggacagcct

SEQ ID NO: 1212816 - DNA, 15 bp, Homo sapiens
tcggcagggacagcc

SEQ ID NO: 1212817 - DNA, 15 bp, Homo sapiens
ctcggcagggacagc

SEQ ID NO: 1212818 - DNA, 15 bp, Homo sapiens
cctcggcagggacag

SEQ ID NO: 1212819 - DNA, 15 bp, Homo sapiens
ccctcggcagggaca

SEQ ID NO: 1212820 - DNA, 15 bp, Homo sapiens
gccctcggcagggac

SEQ ID NO: 1212821 - DNA, 15 bp, Homo sapiens
agccctcggcaggga

SEQ ID NO: 1212822 - DNA, 15 bp, Homo sapiens
tagccctcggcaggg

SEQ ID NO: 1212823 - DNA, 15 bp, Homo sapiens
ctagccctcggcagg

SEQ ID NO: 1212824 - DNA, 15 bp, Homo sapiens
gctagccctcggcag

SEQ ID NO: 1212825 - DNA, 15 bp, Homo sapiens
ggctagccctcggca

SEQ ID NO: 1212826 - DNA, 15 bp, Homo sapiens
tggctagccctcggc

SEQ ID NO: 1212827 - DNA, 15 bp, Homo sapiens
gtggctagccctcgg

SEQ ID NO: 1212828 - DNA, 15 bp, Homo sapiens
ggtggctagccctcg

SEQ ID NO: 1212829 - DNA, 15 bp, Homo sapiens
aggtggctagccctc

SEQ ID NO: 1212830 - DNA, 15 bp, Homo sapiens
caggtggctagccct

SEQ ID NO: 1212831 - DNA, 15 bp, Homo sapiens
ccaggtggctagccc

SEQ ID NO: 1212832 - DNA, 15 bp, Homo sapiens
gccaggtggctagcc

SEQ ID NO: 1212833 - DNA, 15 bp, Homo sapiens
tgccaggtggctagc

SEQ ID NO: 1212834 - DNA, 15 bp, Homo sapiens
gtgccaggtggctag

SEQ ID NO: 1212835 - DNA, 15 bp, Homo sapiens
tgtgccaggtggcta

SEQ ID NO: 1212836 - DNA, 15 bp, Homo sapiens
gtgtgccaggtggct

SEQ ID NO: 1212837 - DNA, 15 bp, Homo sapiens
tgtgtgccaggtggc

SEQ ID NO: 1212838 - DNA, 15 bp, Homo sapiens
gtgtgtgccaggtgg

SEQ ID NO: 1212839 - DNA, 15 bp, Homo sapiens
tgtgtgtgccaggtg

SEQ ID NO: 1212840 - DNA, 15 bp, Homo sapiens
gtgtgtgtgccaggt

SEQ ID NO: 1212841 - DNA, 15 bp, Homo sapiens
agtgtgtgtgccagg

SEQ ID NO: 1212842 - DNA, 15 bp, Homo sapiens
cagtgtgtgtgccag

SEQ ID NO: 1212843 - DNA, 15 bp, Homo sapiens
ccagtgtgtgtgcca

SEQ ID NO: 1212844 - DNA, 15 bp, Homo sapiens
gccagtgtgtgtgcc

SEQ ID NO: 1212845 - DNA, 15 bp, Homo sapiens
tgccagtgtgtgtgc

SEQ ID NO: 1212846 - DNA, 15 bp, Homo sapiens
ttgccagtgtgtgtg

SEQ ID NO: 1212847 - DNA, 15 bp, Homo sapiens
cttgccagtgtgtgt

SEQ ID NO: 1212848 - DNA, 15 bp, Homo sapiens
gcttgccagtgtgtg

SEQ ID NO: 1212849 - DNA, 15 bp, Homo sapiens
ggcttgccagtgtgt

SEQ ID NO: 1212850 - DNA, 15 bp, Homo sapiens
cggcttgccagtgtg

SEQ ID NO: 1212851 - DNA, 15 bp, Homo sapiens
gcggcttgccagtgt

SEQ ID NO: 1212852 - DNA, 15 bp, Homo sapiens
agcggcttgccagtg

SEQ ID NO: 1212853 - DNA, 15 bp, Homo sapiens
cagcggcttgccagt

SEQ ID NO: 1212854 - DNA, 15 bp, Homo sapiens
acagcggcttgccag

SEQ ID NO: 1212855 - DNA, 15 bp, Homo sapiens
cacagcggcttgcca

SEQ ID NO: 1212856 - DNA, 15 bp, Homo sapiens
tcacagcggcttgcc

SEQ ID NO: 1212857 - DNA, 15 bp, Homo sapiens
atcacagcggcttgc

SEQ ID NO: 1212858 - DNA, 15 bp, Homo sapiens
aatcacagcggcttg

SEQ ID NO: 1212859 - DNA, 15 bp, Homo sapiens
gaatcacagcggctt

SEQ ID NO: 1212860 - DNA, 15 bp, Homo sapiens
ggaatcacagcggct

SEQ ID NO: 1212861 - DNA, 15 bp, Homo sapiens
gggaatcacagcggc

SEQ ID NO: 1212862 - DNA, 15 bp, Homo sapiens
cgggaatcacagcgg

SEQ ID NO: 1212863 - DNA, 15 bp, Homo sapiens
gcgggaatcacagcg

SEQ ID NO: 1212864 - DNA, 15 bp, Homo sapiens
agcgggaatcacagc

SEQ ID NO: 1212865 - DNA, 15 bp, Homo sapiens
cagcgggaatcacag

SEQ ID NO: 1212866 - DNA, 15 bp, Homo sapiens
ccagcgggaatcaca

SEQ ID NO: 1212867 - DNA, 15 bp, Homo sapiens
accagcgggaatcac

SEQ ID NO: 1212868 - DNA, 15 bp, Homo sapiens
gaccagcgggaatca

SEQ ID NO: 1212869 - DNA, 15 bp, Homo sapiens
cgaccagcgggaatc

SEQ ID NO: 1212870 - DNA, 15 bp, Homo sapiens
acgaccagcgggaat

SEQ ID NO: 1212871 - DNA, 15 bp, Homo sapiens
cacgaccagcgggaa

SEQ ID NO: 1212872 - DNA, 15 bp, Homo sapiens
tcacgaccagcggga

SEQ ID NO: 1212873 - DNA, 15 bp, Homo sapiens
atcacgaccagcggg

SEQ ID NO: 1212874 - DNA, 15 bp, Homo sapiens
gatcacgaccagcgg

SEQ ID NO: 1212875 - DNA, 15 bp, Homo sapiens
ggatcacgaccagcg

SEQ ID NO: 1212876 - DNA, 15 bp, Homo sapiens
gggatcacgaccagc

SEQ ID NO: 1212877 - DNA, 15 bp, Homo sapiens
ggggatcacgaccag

SEQ ID NO: 1212878 - DNA, 15 bp, Homo sapiens
cggggatcacgacca

SEQ ID NO: 1212879 - DNA, 15 bp, Homo sapiens
acggggatcacgacc

SEQ ID NO: 1212880 - DNA, 15 bp, Homo sapiens
cacggggatcacgac

SEQ ID NO: 1212881 - DNA, 15 bp, Homo sapiens
tcacggggatcacga

SEQ ID NO: 1212882 - DNA, 15 bp, Homo sapiens
atcacggggatcacg

SEQ ID NO: 1212883 - DNA, 15 bp, Homo sapiens
gatcacggggatcac

SEQ ID NO: 1212884 - DNA, 15 bp, Homo sapiens
ggatcacggggatca

SEQ ID NO: 1212885 - DNA, 15 bp, Homo sapiens
aggatcacggggatc

SEQ ID NO: 1212886 - DNA, 15 bp, Homo sapiens
caggatcacggggat

SEQ ID NO: 1212887 - DNA, 15 bp, Homo sapiens
acaggatcacgggga

SEQ ID NO: 1212888 - DNA, 15 bp, Homo sapiens
cacaggatcacgggg

SEQ ID NO: 1212889 - DNA, 15 bp, Homo sapiens
tcacaggatcacggg

SEQ ID NO: 1212890 - DNA, 15 bp, Homo sapiens
atcacaggatcacgg

SEQ ID NO: 1212891 - DNA, 15 bp, Homo sapiens
gatcacaggatcacg

SEQ ID NO: 1212892 - DNA, 15 bp, Homo sapiens
ggatcacaggatcac

SEQ ID NO: 1212893 - DNA, 15 bp, Homo sapiens
gggatcacaggatca

SEQ ID NO: 1212894 - DNA, 15 bp, Homo sapiens
ggggatcacaggatc

SEQ ID NO: 1212895 - DNA, 15 bp, Homo sapiens
cggggatcacaggat

SEQ ID NO: 1212896 - DNA, 15 bp, Homo sapiens
gcggggatcacagga

SEQ ID NO: 1212897 - DNA, 15 bp, Homo sapiens
ggcggggatcacagg

SEQ ID NO: 1212898 - DNA, 15 bp, Homo sapiens
gggcggggatcacag

SEQ ID NO: 1212899 - DNA, 15 bp, Homo sapiens
ggggcggggatcaca

SEQ ID NO: 1212900 - DNA, 15 bp, Homo sapiens
cggggcggggatcac

SEQ ID NO: 1212901 - DNA, 15 bp, Homo sapiens
acggggcggggatca

SEQ ID NO: 1212902 - DNA, 15 bp, Homo sapiens
cacggggcggggatc

SEQ ID NO: 1212903 - DNA, 15 bp, Homo sapiens
tcacggggcggggat

SEQ ID NO: 1212904 - DNA, 15 bp, Homo sapiens
ctcacggggcgggga

SEQ ID NO: 1212905 - DNA, 15 bp, Homo sapiens
cctcacggggcgggg

SEQ ID NO: 1212906 - DNA, 15 bp, Homo sapiens
gcctcacggggcggg

SEQ ID NO: 1212907 - DNA, 15 bp, Homo sapiens
agcctcacggggcgg

SEQ ID NO: 1212908 - DNA, 15 bp, Homo sapiens
cagcctcacggggcg

SEQ ID NO: 1212909 - DNA, 15 bp, Homo sapiens
tcagcctcacggggc

SEQ ID NO: 1212910 - DNA, 15 bp, Homo sapiens
ttcagcctcacgggg

SEQ ID NO: 1212911 - DNA, 15 bp, Homo sapiens
gttcagcctcacggg

SEQ ID NO: 1212912 - DNA, 15 bp, Homo sapiens
tgttcagcctcacgg

SEQ ID NO: 1212913 - DNA, 15 bp, Homo sapiens
gtgttcagcctcacg

SEQ ID NO: 1212914 - DNA, 15 bp, Homo sapiens
tgtgttcagcctcac

SEQ ID NO: 1212915 - DNA, 15 bp, Homo sapiens
atgtgttcagcctca

SEQ ID NO: 1212916 - DNA, 15 bp, Homo sapiens
tatgtgttcagcctc

SEQ ID NO: 1212917 - DNA, 15 bp, Homo sapiens
ctatgtgttcagcct

SEQ ID NO: 1212918 - DNA, 15 bp, Homo sapiens
actatgtgttcagcc

SEQ ID NO: 1212919 - DNA, 15 bp, Homo sapiens
cactatgtgttcagc

SEQ ID NO: 1212920 - DNA, 15 bp, Homo sapiens
tcactatgtgttcag

SEQ ID NO: 1212921 - DNA, 15 bp, Homo sapiens
gtcactatgtgttca

SEQ ID NO: 1212922 - DNA, 15 bp, Homo sapiens
cgtcactatgtgttc

SEQ ID NO: 1212923 - DNA, 15 bp, Homo sapiens
gcgtcactatgtgtt

SEQ ID NO: 1212924 - DNA, 15 bp, Homo sapiens
agcgtcactatgtgt

SEQ ID NO: 1212925 - DNA, 15 bp, Homo sapiens
aagcgtcactatgtg

SEQ ID NO: 1212926 - DNA, 15 bp, Homo sapiens
caagcgtcactatgt

SEQ ID NO: 1212927 - DNA, 15 bp, Homo sapiens
gcaagcgtcactatg

SEQ ID NO: 1212928 - DNA, 15 bp, Homo sapiens
agcaagcgtcactat

SEQ ID NO: 1212929 - DNA, 15 bp, Homo sapiens
tagcaagcgtcacta

SEQ ID NO: 1212930 - DNA, 15 bp, Homo sapiens
ctagcaagcgtcact

SEQ ID NO: 1212931 - DNA, 15 bp, Homo sapiens
gctagcaagcgtcac

SEQ ID NO: 1212932 - DNA, 15 bp, Homo sapiens
ggctagcaagcgtca

SEQ ID NO: 1212933 - DNA, 15 bp, Homo sapiens
tggctagcaagcgtc

SEQ ID NO: 1212934 - DNA, 15 bp, Homo sapiens
ttggctagcaagcgt

SEQ ID NO: 1212935 - DNA, 15 bp, Homo sapiens
cttggctagcaagcg

SEQ ID NO: 1212936 - DNA, 15 bp, Homo sapiens
gcttggctagcaagc

SEQ ID NO: 1212937 - DNA, 15 bp, Homo sapiens
ggcttggctagcaag

SEQ ID NO: 1212938 - DNA, 15 bp, Homo sapiens
aggcttggctagcaa

SEQ ID NO: 1212939 - DNA, 15 bp, Homo sapiens
gaggcttggctagca

SEQ ID NO: 1212940 - DNA, 15 bp, Homo sapiens
tgaggcttggctagc

SEQ ID NO: 1212941 - DNA, 15 bp, Homo sapiens
ttgaggcttggctag

SEQ ID NO: 1212942 - DNA, 15 bp, Homo sapiens
attgaggcttggcta

SEQ ID NO: 1212943 - DNA, 15 bp, Homo sapiens
cattgaggcttggct

SEQ ID NO: 1212944 - DNA, 15 bp, Homo sapiens
tcattgaggcttggc

SEQ ID NO: 1212945 - DNA, 15 bp, Homo sapiens
gtcattgaggcttgg

SEQ ID NO: 1212946 - DNA, 15 bp, Homo sapiens
ggtcattgaggcttg

SEQ ID NO: 1212947 - DNA, 15 bp, Homo sapiens
gggtcattgaggctt

SEQ ID NO: 1212948 - DNA, 15 bp, Homo sapiens
tgggtcattgaggct

SEQ ID NO: 1212949 - DNA, 15 bp, Homo sapiens
gtgggtcattgaggc

SEQ ID NO: 1212950 - DNA, 15 bp, Homo sapiens
cgtgggtcattgagg

SEQ ID NO: 1212951 - DNA, 15 bp, Homo sapiens
acgtgggtcattgag

SEQ ID NO: 1212952 - DNA, 15 bp, Homo sapiens
tacgtgggtcattga

SEQ ID NO: 1212953 - DNA, 15 bp, Homo sapiens
ttacgtgggtcattg

SEQ ID NO: 1212954 - DNA, 15 bp, Homo sapiens
gttacgtgggtcatt

SEQ ID NO: 1212955 - DNA, 15 bp, Homo sapiens
tgttacgtgggtcat

SEQ ID NO: 1212956 - DNA, 15 bp, Homo sapiens
atgttacgtgggtca

SEQ ID NO: 1212957 - DNA, 15 bp, Homo sapiens
catgttacgtgggtc

SEQ ID NO: 1212958 - DNA, 15 bp, Homo sapiens
tcatgttacgtgggt

SEQ ID NO: 1212959 - DNA, 15 bp, Homo sapiens
ttcatgttacgtggg

SEQ ID NO: 1212960 - DNA, 15 bp, Homo sapiens
cttcatgttacgtgg

SEQ ID NO: 1212961 - DNA, 15 bp, Homo sapiens
ccttcatgttacgtg

SEQ ID NO: 1212962 - DNA, 15 bp, Homo sapiens
cccttcatgttacgt

SEQ ID NO: 1212963 - DNA, 15 bp, Homo sapiens
ccccttcatgttacg

SEQ ID NO: 1212964 - DNA, 15 bp, Homo sapiens
cccccttcatgttac

SEQ ID NO: 1212965 - DNA, 15 bp, Homo sapiens
tcccccttcatgtta

SEQ ID NO: 1212966 - DNA, 15 bp, Homo sapiens
ttcccccttcatgtt

SEQ ID NO: 1212967 - DNA, 15 bp, Homo sapiens
tttcccccttcatgt

SEQ ID NO: 1212968 - DNA, 15 bp, Homo sapiens
ttttcccccttcatg

SEQ ID NO: 1212969 - DNA, 15 bp, Homo sapiens
cttttcccccttcat

SEQ ID NO: 1212970 - DNA, 15 bp, Homo sapiens
gcttttcccccttca

SEQ ID NO: 1212971 - DNA, 15 bp, Homo sapiens
ggcttttcccccttc

SEQ ID NO: 1212972 - DNA, 15 bp, Homo sapiens
tggcttttccccctt

SEQ ID NO: 1212973 - DNA, 15 bp, Homo sapiens
ctggcttttccccct

SEQ ID NO: 1212974 - DNA, 15 bp, Homo sapiens
tctggcttttccccc

SEQ ID NO: 1212975 - DNA, 15 bp, Homo sapiens
ttctggcttttcccc

SEQ ID NO: 1212976 - DNA, 15 bp, Homo sapiens
tttctggcttttccc

SEQ ID NO: 1212977 - DNA, 15 bp, Homo sapiens
ctttctggcttttcc

SEQ ID NO: 1212978 - DNA, 15 bp, Homo sapiens
actttctggcttttc

SEQ ID NO: 1212979 - DNA, 15 bp, Homo sapiens
aactttctggctttt

SEQ ID NO: 1212980 - DNA, 15 bp, Homo sapiens
gaactttctggcttt

SEQ ID NO: 1212981 - DNA, 15 bp, Homo sapiens
agaactttctggctt

SEQ ID NO: 1212982 - DNA, 15 bp, Homo sapiens
cagaactttctggct

SEQ ID NO: 1212983 - DNA, 15 bp, Homo sapiens
gcagaactttctggc

SEQ ID NO: 1212984 - DNA, 15 bp, Homo sapiens
ggcagaactttctgg

SEQ ID NO: 1212985 - DNA, 15 bp, Homo sapiens
tggcagaactttctg

SEQ ID NO: 1212986 - DNA, 15 bp, Homo sapiens
ttggcagaactttct

SEQ ID NO: 1212987 - DNA, 15 bp, Homo sapiens
cttggcagaactttc

SEQ ID NO: 1212988 - DNA, 15 bp, Homo sapiens
ccttggcagaacttt

SEQ ID NO: 1212989 - DNA, 15 bp, Homo sapiens
tccttggcagaactt

SEQ ID NO: 1212990 - DNA, 15 bp, Homo sapiens
ctccttggcagaact

SEQ ID NO: 1212991 - DNA, 15 bp, Homo sapiens
gctccttggcagaac

SEQ ID NO: 1212992 - DNA, 15 bp, Homo sapiens
tgctccttggcagaa

SEQ ID NO: 1212993 - DNA, 15 bp, Homo sapiens
ttgctccttggcaga

SEQ ID NO: 1212994 - DNA, 15 bp, Homo sapiens
cttgctccttggcag

SEQ ID NO: 1212995 - DNA, 15 bp, Homo sapiens
ccttgctccttggca

SEQ ID NO: 1212996 - DNA, 15 bp, Homo sapiens
gccttgctccttggc

SEQ ID NO: 1212997 - DNA, 15 bp, Homo sapiens
ggccttgctccttgg

SEQ ID NO: 1212998 - DNA, 15 bp, Homo sapiens
tggccttgctccttg

SEQ ID NO: 1212999 - DNA, 15 bp, Homo sapiens
ttggccttgctcctt

SEQ ID NO: 1213000 - DNA, 15 bp, Homo sapiens
cttggccttgctcct

SEQ ID NO: 1213001 - DNA, 15 bp, Homo sapiens
tcttggccttgctcc

SEQ ID NO: 1213002 - DNA, 15 bp, Homo sapiens
ttcttggccttgctc

SEQ ID NO: 1213003 - DNA, 15 bp, Homo sapiens
attcttggccttgct

SEQ ID NO: 1213004 - DNA, 15 bp, Homo sapiens
gattcttggccttgc

SEQ ID NO: 1213005 - DNA, 15 bp, Homo sapiens
ggattcttggccttg

SEQ ID NO: 1213006 - DNA, 15 bp, Homo sapiens
gggattcttggcctt

SEQ ID NO: 1213007 - DNA, 15 bp, Homo sapiens
cgggattcttggcct

SEQ ID NO: 1213008 - DNA, 15 bp, Homo sapiens
tcgggattcttggcc

SEQ ID NO: 1213009 - DNA, 15 bp, Homo sapiens
ttcgggattcttggc

SEQ ID NO: 1213010 - DNA, 15 bp, Homo sapiens
cttcgggattcttgg

SEQ ID NO: 1213011 - DNA, 15 bp, Homo sapiens
ccttcgggattcttg

SEQ ID NO: 1213012 - DNA, 15 bp, Homo sapiens
cccttcgggattctt

SEQ ID NO: 1213013 - DNA, 15 bp, Homo sapiens
tcccttcgggattct

SEQ ID NO: 1213014 - DNA, 15 bp, Homo sapiens
ttcccttcgggattc

SEQ ID NO: 1213015 - DNA, 15 bp, Homo sapiens
tttcccttcgggatt

SEQ ID NO: 1213016 - DNA, 15 bp, Homo sapiens
atttcccttcgggat

SEQ ID NO: 1213017 - DNA, 15 bp, Homo sapiens
catttcccttcggga

SEQ ID NO: 1213018 - DNA, 15 bp, Homo sapiens
ccatttcccttcggg

SEQ ID NO: 1213019 - DNA, 15 bp, Homo sapiens
tccatttcccttcgg

SEQ ID NO: 1213020 - DNA, 15 bp, Homo sapiens
gtccatttcccttcg

SEQ ID NO: 1213021 - DNA, 15 bp, Homo sapiens
agtccatttcccttc

SEQ ID NO: 1213022 - DNA, 15 bp, Homo sapiens
aagtccatttccctt

SEQ ID NO: 1213023 - DNA, 15 bp, Homo sapiens
aaagtccatttccct

SEQ ID NO: 1213024 - DNA, 15 bp, Homo sapiens
caaagtccatttccc

SEQ ID NO: 1213025 - DNA, 15 bp, Homo sapiens
tcaaagtccatttcc

SEQ ID NO: 1213026 - DNA, 15 bp, Homo sapiens
ttcaaagtccatttc

SEQ ID NO: 1213027 - DNA, 15 bp, Homo sapiens
cttcaaagtccattt

SEQ ID NO: 1213028 - DNA, 15 bp, Homo sapiens
gcttcaaagtccatt

SEQ ID NO: 1213029 - DNA, 15 bp, Homo sapiens
agcttcaaagtccat

SEQ ID NO: 1213030 - DNA, 15 bp, Homo sapiens
cagcttcaaagtcca

SEQ ID NO: 1213031 - DNA, 15 bp, Homo sapiens
ccagcttcaaagtcc

SEQ ID NO: 1213032 - DNA, 15 bp, Homo sapiens
cccagcttcaaagtc

SEQ ID NO: 1213033 - DNA, 15 bp, Homo sapiens
gcccagcttcaaagt

SEQ ID NO: 1213034 - DNA, 15 bp, Homo sapiens
cgcccagcttcaaag

SEQ ID NO: 1213035 - DNA, 15 bp, Homo sapiens
acgcccagcttcaaa

SEQ ID NO: 1213036 - DNA, 15 bp, Homo sapiens
gacgcccagcttcaa

SEQ ID NO: 1213037 - DNA, 15 bp, Homo sapiens
agacgcccagcttca

SEQ ID NO: 1213038 - DNA, 15 bp, Homo sapiens
aagacgcccagcttc

SEQ ID NO: 1213039 - DNA, 15 bp, Homo sapiens
gaagacgcccagctt

SEQ ID NO: 1213040 - DNA, 15 bp, Homo sapiens
agaagacgcccagct

SEQ ID NO: 1213041 - DNA, 15 bp, Homo sapiens
aagaagacgcccagc

SEQ ID NO: 1213042 - DNA, 15 bp, Homo sapiens
caagaagacgcccag

SEQ ID NO: 1213043 - DNA, 15 bp, Homo sapiens
ccaagaagacgccca

SEQ ID NO: 1213044 - DNA, 15 bp, Homo sapiens
gccaagaagacgccc

SEQ ID NO: 1213045 - DNA, 15 bp, Homo sapiens
agccaagaagacgcc

SEQ ID NO: 1213046 - DNA, 15 bp, Homo sapiens
cagccaagaagacgc

SEQ ID NO: 1213047 - DNA, 15 bp, Homo sapiens
acagccaagaagacg

SEQ ID NO: 1213048 - DNA, 15 bp, Homo sapiens
gacagccaagaagac

SEQ ID NO: 1213049 - DNA, 15 bp, Homo sapiens
agacagccaagaaga

SEQ ID NO: 1213050 - DNA, 15 bp, Homo sapiens
aagacagccaagaag

SEQ ID NO: 1213051 - DNA, 15 bp, Homo sapiens
taagacagccaagaa

SEQ ID NO: 1213052 - DNA, 15 bp, Homo sapiens
ttaagacagccaaga

SEQ ID NO: 1213053 - DNA, 15 bp, Homo sapiens
attaagacagccaag

SEQ ID NO: 1213054 - DNA, 15 bp, Homo sapiens
tattaagacagccaa

SEQ ID NO: 1213055 - DNA, 15 bp, Homo sapiens
gtattaagacagcca

SEQ ID NO: 1213056 - DNA, 15 bp, Homo sapiens
tgtattaagacagcc

SEQ ID NO: 1213057 - DNA, 15 bp, Homo sapiens
ttgtattaagacagc

SEQ ID NO: 1213058 - DNA, 15 bp, Homo sapiens
cttgtattaagacag

SEQ ID NO: 1213059 - DNA, 15 bp, Homo sapiens
acttgtattaagaca

SEQ ID NO: 1213060 - DNA, 15 bp, Homo sapiens
cacttgtattaagac

SEQ ID NO: 1213061 - DNA, 15 bp, Homo sapiens
ccacttgtattaaga

SEQ ID NO: 1213062 - DNA, 15 bp, Homo sapiens
gccacttgtattaag

SEQ ID NO: 1213063 - DNA, 15 bp, Homo sapiens
tgccacttgtattaa

SEQ ID NO: 1213064 - DNA, 15 bp, Homo sapiens
gtgccacttgtatta

SEQ ID NO: 1213065 - DNA, 15 bp, Homo sapiens
tgtgccacttgtatt

SEQ ID NO: 1213066 - DNA, 15 bp, Homo sapiens
atgtgccacttgtat

SEQ ID NO: 1213067 - DNA, 15 bp, Homo sapiens
gatgtgccacttgta

SEQ ID NO: 1213068 - DNA, 15 bp, Homo sapiens
ggatgtgccacttgt

SEQ ID NO: 1213069 - DNA, 15 bp, Homo sapiens
tggatgtgccacttg

SEQ ID NO: 1213070 - DNA, 15 bp, Homo sapiens
ttggatgtgccactt

SEQ ID NO: 1213071 - DNA, 15 bp, Homo sapiens
tttggatgtgccact

SEQ ID NO: 1213072 - DNA, 15 bp, Homo sapiens
atttggatgtgccac

SEQ ID NO: 1213073 - DNA, 15 bp, Homo sapiens
gatttggatgtgcca

SEQ ID NO: 1213074 - DNA, 15 bp, Homo sapiens
ggatttggatgtgcc

SEQ ID NO: 1213075 - DNA, 15 bp, Homo sapiens
tggatttggatgtgc

SEQ ID NO: 1213076 - DNA, 15 bp, Homo sapiens
ttggatttggatgtg

SEQ ID NO: 1213077 - DNA, 15 bp, Homo sapiens
tttggatttggatgt

SEQ ID NO: 1213078 - DNA, 15 bp, Homo sapiens
ttttggatttggatg

SEQ ID NO: 1213079 - DNA, 15 bp, Homo sapiens
gttttggatttggat

SEQ ID NO: 1213080 - DNA, 15 bp, Homo sapiens
ggttttggatttgga

SEQ ID NO: 1213081 - DNA, 15 bp, Homo sapiens
gggttttggatttgg

SEQ ID NO: 1213082 - DNA, 15 bp, Homo sapiens
ggggttttggatttg

SEQ ID NO: 1213083 - DNA, 15 bp, Homo sapiens
cggggttttggattt

SEQ ID NO: 1213084 - DNA, 15 bp, Homo sapiens
tcggggttttggatt

SEQ ID NO: 1213085 - DNA, 15 bp, Homo sapiens
ttcggggttttggat

SEQ ID NO: 1213086 - DNA, 15 bp, Homo sapiens
tttcggggttttgga

SEQ ID NO: 1213087 - DNA, 15 bp, Homo sapiens
atttcggggttttgg

SEQ ID NO: 1213088 - DNA, 15 bp, Homo sapiens
aatttcggggttttg

SEQ ID NO: 1213089 - DNA, 15 bp, Homo sapiens
gaatttcggggtttt

SEQ ID NO: 1213090 - DNA, 15 bp, Homo sapiens
tgaatttcggggttt

SEQ ID NO: 1213091 - DNA, 15 bp, Homo sapiens
ttgaatttcggggtt

SEQ ID NO: 1213092 - DNA, 15 bp, Homo sapiens
tttgaatttcggggt

SEQ ID NO: 1213093 - DNA, 15 bp, Homo sapiens
ctttgaatttcgggg

SEQ ID NO: 1213094 - DNA, 15 bp, Homo sapiens
actttgaatttcggg

SEQ ID NO: 1213095 - DNA, 15 bp, Homo sapiens
gactttgaatttcgg

SEQ ID NO: 1213096 - DNA, 15 bp, Homo sapiens
agactttgaatttcg

SEQ ID NO: 1213097 - DNA, 15 bp, Homo sapiens
aagactttgaatttc

SEQ ID NO: 1213098 - DNA, 15 bp, Homo sapiens
caagactttgaattt

SEQ ID NO: 1213099 - DNA, 15 bp, Homo sapiens
tcaagactttgaatt

SEQ ID NO: 1213100 - DNA, 15 bp, Homo sapiens
ctcaagactttgaat

SEQ ID NO: 1213101 - DNA, 15 bp, Homo sapiens
gctcaagactttgaa

SEQ ID NO: 1213102 - DNA, 15 bp, Homo sapiens
tgctcaagactttga

SEQ ID NO: 1213103 - DNA, 15 bp, Homo sapiens
gtgctcaagactttg

SEQ ID NO: 1213104 - DNA, 15 bp, Homo sapiens
ggtgctcaagacttt

SEQ ID NO: 1213105 - DNA, 15 bp, Homo sapiens
gggtgctcaagactt

SEQ ID NO: 1213106 - DNA, 15 bp, Homo sapiens
cgggtgctcaagact

SEQ ID NO: 1213107 - DNA, 15 bp, Homo sapiens
tcgggtgctcaagac

SEQ ID NO: 1213108 - DNA, 15 bp, Homo sapiens
ttcgggtgctcaaga

SEQ ID NO: 1213109 - DNA, 15 bp, Homo sapiens
tttcgggtgctcaag

SEQ ID NO: 1213110 - DNA, 15 bp, Homo sapiens
atttcgggtgctcaa

SEQ ID NO: 1213111 - DNA, 15 bp, Homo sapiens
aatttcgggtgctca

SEQ ID NO: 1213112 - DNA, 15 bp, Homo sapiens
gaatttcgggtgctc

SEQ ID NO: 1213113 - DNA, 15 bp, Homo sapiens
agaatttcgggtgct

SEQ ID NO: 1213114 - DNA, 15 bp, Homo sapiens
cagaatttcgggtgc

SEQ ID NO: 1213115 - DNA, 15 bp, Homo sapiens
tcagaatttcgggtg

SEQ ID NO: 1213116 - DNA, 15 bp, Homo sapiens
ttcagaatttcgggt

SEQ ID NO: 1213117 - DNA, 15 bp, Homo sapiens
tttcagaatttcggg

SEQ ID NO: 1213118 - DNA, 15 bp, Homo sapiens
gtttcagaatttcgg

SEQ ID NO: 1213119 - DNA, 15 bp, Homo sapiens
cgtttcagaatttcg

SEQ ID NO: 1213120 - DNA, 15 bp, Homo sapiens
acgtttcagaatttc

SEQ ID NO: 1213121 - DNA, 15 bp, Homo sapiens
gacgtttcagaattt

SEQ ID NO: 1213122 - DNA, 15 bp, Homo sapiens
agacgtttcagaatt

SEQ ID NO: 1213123 - DNA, 15 bp, Homo sapiens
aagacgtttcagaat

SEQ ID NO: 1213124 - DNA, 15 bp, Homo sapiens
caagacgtttcagaa

SEQ ID NO: 1213125 - DNA, 15 bp, Homo sapiens
tcaagacgtttcaga

SEQ ID NO: 1213126 - DNA, 15 bp, Homo sapiens
ctcaagacgtttcag

SEQ ID NO: 1213127 - DNA, 15 bp, Homo sapiens
gctcaagacgtttca

SEQ ID NO: 1213128 - DNA, 15 bp, Homo sapiens
tgctcaagacgtttc

SEQ ID NO: 1213129 - DNA, 15 bp, Homo sapiens
gtgctcaagacgttt

SEQ ID NO: 1213130 - DNA, 15 bp, Homo sapiens
agtgctcaagacgtt

SEQ ID NO: 1213131 - DNA, 15 bp, Homo sapiens
cagtgctcaagacgt

SEQ ID NO: 1213132 - DNA, 15 bp, Homo sapiens
tcagtgctcaagacg

SEQ ID NO: 1213133 - DNA, 15 bp, Homo sapiens
gtcagtgctcaagac

SEQ ID NO: 1213134 - DNA, 15 bp, Homo sapiens
ggtcagtgctcaaga

SEQ ID NO: 1213135 - DNA, 15 bp, Homo sapiens
aggtcagtgctcaag

SEQ ID NO: 1213136 - DNA, 15 bp, Homo sapiens
aaggtcagtgctcaa

SEQ ID NO: 1213137 - DNA, 15 bp, Homo sapiens
aaaggtcagtgctca

SEQ ID NO: 1213138 - DNA, 15 bp, Homo sapiens
taaaggtcagtgctc

SEQ ID NO: 1213139 - DNA, 15 bp, Homo sapiens
ctaaaggtcagtgct

SEQ ID NO: 1213140 - DNA, 15 bp, Homo sapiens
tctaaaggtcagtgc

SEQ ID NO: 1213141 - DNA, 15 bp, Homo sapiens
ttctaaaggtcagtg

SEQ ID NO: 1213142 - DNA, 15 bp, Homo sapiens
cttctaaaggtcagt

SEQ ID NO: 1213143 - DNA, 15 bp, Homo sapiens
ccttctaaaggtcag

SEQ ID NO: 1213144 - DNA, 15 bp, Homo sapiens
tccttctaaaggtca

SEQ ID NO: 1213145 - DNA, 15 bp, Homo sapiens
ttccttctaaaggtc

SEQ ID NO: 1213146 - DNA, 15 bp, Homo sapiens
tttccttctaaaggt

SEQ ID NO: 1213147 - DNA, 15 bp, Homo sapiens
atttccttctaaagg

SEQ ID NO: 1213148 - DNA, 15 bp, Homo sapiens
catttccttctaaag

SEQ ID NO: 1213149 - DNA, 15 bp, Homo sapiens
gcatttccttctaaa

SEQ ID NO: 1213150 - DNA, 15 bp, Homo sapiens
agcatttccttctaa

SEQ ID NO: 1213151 - DNA, 15 bp, Homo sapiens
aagcatttccttcta

SEQ ID NO: 1213152 - DNA, 15 bp, Homo sapiens
taagcatttccttct

SEQ ID NO: 1213153 - DNA, 15 bp, Homo sapiens
ataagcatttccttc

SEQ ID NO: 1213154 - DNA, 15 bp, Homo sapiens
aataagcatttcctt

SEQ ID NO: 1213155 - DNA, 15 bp, Homo sapiens
caataagcatttcct

SEQ ID NO: 1213156 - DNA, 15 bp, Homo sapiens
ccaataagcatttcc

SEQ ID NO: 1213157 - DNA, 15 bp, Homo sapiens
tccaataagcatttc

SEQ ID NO: 1213158 - DNA, 15 bp, Homo sapiens
ctccaataagcattt

SEQ ID NO: 1213159 - DNA, 15 bp, Homo sapiens
gctccaataagcatt

SEQ ID NO: 1213160 - DNA, 15 bp, Homo sapiens
tgctccaataagcat

SEQ ID NO: 1213161 - DNA, 15 bp, Homo sapiens
atgctccaataagca

SEQ ID NO: 1213162 - DNA, 15 bp, Homo sapiens
aatgctccaataagc

SEQ ID NO: 1213163 - DNA, 15 bp, Homo sapiens
aaatgctccaataag

SEQ ID NO: 1213164 - DNA, 15 bp, Homo sapiens
aaaatgctccaataa

SEQ ID NO: 1213165 - DNA, 15 bp, Homo sapiens
caaaatgctccaata

SEQ ID NO: 1213166 - DNA, 15 bp, Homo sapiens
ccaaaatgctccaat

SEQ ID NO: 1213167 - DNA, 15 bp, Homo sapiens
tccaaaatgctccaa

SEQ ID NO: 1213168 - DNA, 15 bp, Homo sapiens
atccaaaatgctcca

SEQ ID NO: 1213169 - DNA, 15 bp, Homo sapiens
aatccaaaatgctcc

SEQ ID NO: 1213170 - DNA, 15 bp, Homo sapiens
aaatccaaaatgctc

SEQ ID NO: 1213171 - DNA, 15 bp, Homo sapiens
gaaatccaaaatgct

SEQ ID NO: 1213172 - DNA, 15 bp, Homo sapiens
cgaaatccaaaatgc

SEQ ID NO: 1213173 - DNA, 15 bp, Homo sapiens
ccgaaatccaaaatg

SEQ ID NO: 1213174 - DNA, 15 bp, Homo sapiens
tccgaaatccaaaat

SEQ ID NO: 1213175 - DNA, 15 bp, Homo sapiens
atccgaaatccaaaa

SEQ ID NO: 1213176 - DNA, 15 bp, Homo sapiens
aatccgaaatccaaa

SEQ ID NO: 1213177 - DNA, 15 bp, Homo sapiens
aaatccgaaatccaa

SEQ ID NO: 1213178 - DNA, 15 bp, Homo sapiens
aaaatccgaaatcca

SEQ ID NO: 1213179 - DNA, 15 bp, Homo sapiens
aaaaatccgaaatcc

SEQ ID NO: 1213180 - DNA, 15 bp, Homo sapiens
taaaaatccgaaatc

SEQ ID NO: 1213181 - DNA, 15 bp, Homo sapiens
gtaaaaatccgaaat

SEQ ID NO: 1213182 - DNA, 15 bp, Homo sapiens
ggtaaaaatccgaaa

SEQ ID NO: 1213183 - DNA, 15 bp, Homo sapiens
tggtaaaaatccgaa

SEQ ID NO: 1213184 - DNA, 15 bp, Homo sapiens
gtggtaaaaatccga

SEQ ID NO: 1213185 - DNA, 15 bp, Homo sapiens
agtggtaaaaatccg

SEQ ID NO: 1213186 - DNA, 15 bp, Homo sapiens
cagtggtaaaaatcc

SEQ ID NO: 1213187 - DNA, 15 bp, Homo sapiens
tcagtggtaaaaatc

SEQ ID NO: 1213188 - DNA, 15 bp, Homo sapiens
ctcagtggtaaaaat

SEQ ID NO: 1213189 - DNA, 15 bp, Homo sapiens
actcagtggtaaaaa

SEQ ID NO: 1213190 - DNA, 15 bp, Homo sapiens
cactcagtggtaaaa

SEQ ID NO: 1213191 - DNA, 15 bp, Homo sapiens
acactcagtggtaaa

SEQ ID NO: 1213192 - DNA, 15 bp, Homo sapiens
cacactcagtggtaa

SEQ ID NO: 1213193 - DNA, 15 bp, Homo sapiens
ccacactcagtggta

SEQ ID NO: 1213194 - DNA, 15 bp, Homo sapiens
tccacactcagtggt

SEQ ID NO: 1213195 - DNA, 15 bp, Homo sapiens
ctccacactcagtgg

SEQ ID NO: 1213196 - DNA, 15 bp, Homo sapiens
actccacactcagtg

SEQ ID NO: 1213197 - DNA, 15 bp, Homo sapiens
gactccacactcagt

SEQ ID NO: 1213198 - DNA, 15 bp, Homo sapiens
ggactccacactcag

SEQ ID NO: 1213199 - DNA, 15 bp, Homo sapiens
aggactccacactca

SEQ ID NO: 1213200 - DNA, 15 bp, Homo sapiens
taggactccacactc

SEQ ID NO: 1213201 - DNA, 15 bp, Homo sapiens
ttaggactccacact

SEQ ID NO: 1213202 - DNA, 15 bp, Homo sapiens
attaggactccacac

SEQ ID NO: 1213203 - DNA, 15 bp, Homo sapiens
aattaggactccaca

SEQ ID NO: 1213204 - DNA, 15 bp, Homo sapiens
taattaggactccac

SEQ ID NO: 1213205 - DNA, 15 bp, Homo sapiens
ctaattaggactcca

SEQ ID NO: 1213206 - DNA, 15 bp, Homo sapiens
cctaattaggactcc

SEQ ID NO: 1213207 - DNA, 15 bp, Homo sapiens
tcctaattaggactc

SEQ ID NO: 1213208 - DNA, 15 bp, Homo sapiens
ttcctaattaggact

SEQ ID NO: 1213209 - DNA, 15 bp, Homo sapiens
tttcctaattaggac

SEQ ID NO: 1213210 - DNA, 15 bp, Homo sapiens
ttttcctaattagga

SEQ ID NO: 1213211 - DNA, 15 bp, Homo sapiens
tttttcctaattagg

SEQ ID NO: 1213212 - DNA, 15 bp, Homo sapiens
ttttttcctaattag

SEQ ID NO: 1213213 - DNA, 15 bp, Homo sapiens
tttttttcctaatta

SEQ ID NO: 1213214 - DNA, 15 bp, Homo sapiens
gtttttttcctaatt

SEQ ID NO: 1213215 - DNA, 15 bp, Homo sapiens
ggtttttttcctaat

SEQ ID NO: 1213216 - DNA, 15 bp, Homo sapiens
tggtttttttcctaa

SEQ ID NO: 1213217 - DNA, 15 bp, Homo sapiens
ctggtttttttccta

SEQ ID NO: 1213218 - DNA, 15 bp, Homo sapiens
cctggtttttttcct

SEQ ID NO: 1213219 - DNA, 15 bp, Homo sapiens
gcctggtttttttcc

SEQ ID NO: 1213220 - DNA, 15 bp, Homo sapiens
agcctggtttttttc

SEQ ID NO: 1213221 - DNA, 15 bp, Homo sapiens
cagcctggttttttt

SEQ ID NO: 1213222 - DNA, 15 bp, Homo sapiens
tcagcctggtttttt

SEQ ID NO: 1213223 - DNA, 15 bp, Homo sapiens
gtcagcctggttttt

SEQ ID NO: 1213224 - DNA, 15 bp, Homo sapiens
ggtcagcctggtttt

SEQ ID NO: 1213225 - DNA, 15 bp, Homo sapiens
cggtcagcctggttt

SEQ ID NO: 1213226 - DNA, 15 bp, Homo sapiens
tcggtcagcctggtt

SEQ ID NO: 1213227 - DNA, 15 bp, Homo sapiens
ttcggtcagcctggt

SEQ ID NO: 1213228 - DNA, 15 bp, Homo sapiens
gttcggtcagcctgg

SEQ ID NO: 1213229 - DNA, 15 bp, Homo sapiens
ggttcggtcagcctg

SEQ ID NO: 1213230 - DNA, 15 bp, Homo sapiens
tggttcggtcagcct

SEQ ID NO: 1213231 - DNA, 15 bp, Homo sapiens
ttggttcggtcagcc

SEQ ID NO: 1213232 - DNA, 15 bp, Homo sapiens
tttggttcggtcagc

SEQ ID NO: 1213233 - DNA, 15 bp, Homo sapiens
ctttggttcggtcag

SEQ ID NO: 1213234 - DNA, 15 bp, Homo sapiens
cctttggttcggtca

SEQ ID NO: 1213235 - DNA, 15 bp, Homo sapiens
tcctttggttcggtc

SEQ ID NO: 1213236 - DNA, 15 bp, Homo sapiens
ttcctttggttcggt

SEQ ID NO: 1213237 - DNA, 15 bp, Homo sapiens
tttcctttggttcgg

SEQ ID NO: 1213238 - DNA, 15 bp, Homo sapiens
ctttcctttggttcg

SEQ ID NO: 1213239 - DNA, 15 bp, Homo sapiens
gctttcctttggttc

SEQ ID NO: 1213240 - DNA, 15 bp, Homo sapiens
tgctttcctttggtt

SEQ ID NO: 1213241 - DNA, 15 bp, Homo sapiens
ttgctttcctttggt

SEQ ID NO: 1213242 - DNA, 15 bp, Homo sapiens
attgctttcctttgg

SEQ ID NO: 1213243 - DNA, 15 bp, Homo sapiens
tattgctttcctttg

SEQ ID NO: 1213244 - DNA, 15 bp, Homo sapiens
ttattgctttccttt

SEQ ID NO: 1213245 - DNA, 15 bp, Homo sapiens
tttattgctttcctt

SEQ ID NO: 1213246 - DNA, 15 bp, Homo sapiens
ttttattgctttcct

SEQ ID NO: 1213247 - DNA, 15 bp, Homo sapiens
cttttattgctttcc

SEQ ID NO: 1213248 - DNA, 15 bp, Homo sapiens
tcttttattgctttc

SEQ ID NO: 1213249 - DNA, 15 bp, Homo sapiens
ttcttttattgcttt

SEQ ID NO: 1213250 - DNA, 15 bp, Homo sapiens
cttcttttattgctt

SEQ ID NO: 1213251 - DNA, 15 bp, Homo sapiens
ccttcttttattgct

SEQ ID NO: 1213252 - DNA, 15 bp, Homo sapiens
gccttcttttattgc

SEQ ID NO: 1213253 - DNA, 15 bp, Homo sapiens
tgccttcttttattg

SEQ ID NO: 1213254 - DNA, 15 bp, Homo sapiens
ctgccttcttttatt

SEQ ID NO: 1213255 - DNA, 15 bp, Homo sapiens
tctgccttcttttat

SEQ ID NO: 1213256 - DNA, 15 bp, Homo sapiens
atctgccttctttta

SEQ ID NO: 1213257 - DNA, 15 bp, Homo sapiens
tatctgccttctttt

SEQ ID NO: 1213258 - DNA, 15 bp, Homo sapiens
ctatctgccttcttt

SEQ ID NO: 1213259 - DNA, 15 bp, Homo sapiens
cctatctgccttctt

SEQ ID NO: 1213260 - DNA, 15 bp, Homo sapiens
ccctatctgccttct

SEQ ID NO: 1213261 - DNA, 15 bp, Homo sapiens
accctatctgccttc

SEQ ID NO: 1213262 - DNA, 15 bp, Homo sapiens
gaccctatctgcctt

SEQ ID NO: 1213263 - DNA, 15 bp, Homo sapiens
tgaccctatctgcct

SEQ ID NO: 1213264 - DNA, 15 bp, Homo sapiens
ctgaccctatctgcc

SEQ ID NO: 1213265 - DNA, 15 bp, Homo sapiens
cctgaccctatctgc

SEQ ID NO: 1213266 - DNA, 15 bp, Homo sapiens
gcctgaccctatctg

SEQ ID NO: 1213267 - DNA, 15 bp, Homo sapiens
tgcctgaccctatct

SEQ ID NO: 1213268 - DNA, 15 bp, Homo sapiens
gtgcctgaccctatc

SEQ ID NO: 1213269 - DNA, 15 bp, Homo sapiens
cgtgcctgaccctat

SEQ ID NO: 1213270 - DNA, 15 bp, Homo sapiens
ccgtgcctgacccta

SEQ ID NO: 1213271 - DNA, 15 bp, Homo sapiens
accgtgcctgaccct

SEQ ID NO: 1213272 - DNA, 15 bp, Homo sapiens
caccgtgcctgaccc

SEQ ID NO: 1213273 - DNA, 15 bp, Homo sapiens
ggtgagccaccgtgc

SEQ ID NO: 1213274 - DNA, 15 bp, Homo sapiens
gggtgagccaccgtg

SEQ ID NO: 1213275 - DNA, 15 bp, Homo sapiens
ggggtgagccaccgt

SEQ ID NO: 1213276 - DNA, 15 bp, Homo sapiens
aggggtgagccaccg

SEQ ID NO: 1213277 - DNA, 15 bp, Homo sapiens
caggggtgagccacc

SEQ ID NO: 1213278 - DNA, 15 bp, Homo sapiens
attacaggggtgagc

SEQ ID NO: 1213279 - DNA, 15 bp, Homo sapiens
gattacaggggtgag

SEQ ID NO: 1213280 - DNA, 15 bp, Homo sapiens
ggattacaggggtga

SEQ ID NO: 1213281 - DNA, 15 bp, Homo sapiens
gggattacaggggtg

SEQ ID NO: 1213282 - DNA, 15 bp, Homo sapiens
tgggattacaggggt

SEQ ID NO: 1213283 - DNA, 15 bp, Homo sapiens
ctgggattacagggg

SEQ ID NO: 1213284 - DNA, 15 bp, Homo sapiens
gctgggattacaggg

SEQ ID NO: 1213285 - DNA, 15 bp, Homo sapiens
ggctgggattacagg

SEQ ID NO: 1213286 - DNA, 15 bp, Homo sapiens
aggctgggattacag

SEQ ID NO: 1213287 - DNA, 15 bp, Homo sapiens
aaggctgggattaca

SEQ ID NO: 1213288 - DNA, 15 bp, Homo sapiens
aaaggctgggattac

SEQ ID NO: 1213289 - DNA, 15 bp, Homo sapiens
aaaaggctgggatta

SEQ ID NO: 1213290 - DNA, 15 bp, Homo sapiens
caaaaggctgggatt

SEQ ID NO: 1213291 - DNA, 15 bp, Homo sapiens
tcaaaaggctgggat

SEQ ID NO: 1213292 - DNA, 15 bp, Homo sapiens
ctcaaaaggctggga

SEQ ID NO: 1213293 - DNA, 15 bp, Homo sapiens
tctcaaaaggctggg

SEQ ID NO: 1213294 - DNA, 15 bp, Homo sapiens
ctctcaaaaggctgg

SEQ ID NO: 1213295 - DNA, 15 bp, Homo sapiens
cctctcaaaaggctg

SEQ ID NO: 1213296 - DNA, 15 bp, Homo sapiens
gcctctcaaaaggct

SEQ ID NO: 1213297 - DNA, 15 bp, Homo sapiens
agcctctcaaaaggc

SEQ ID NO: 1213298 - DNA, 15 bp, Homo sapiens
cagcctctcaaaagg

SEQ ID NO: 1213299 - DNA, 15 bp, Homo sapiens
tcagcctctcaaaag

SEQ ID NO: 1213300 - DNA, 15 bp, Homo sapiens
ctcagcctctcaaaa

SEQ ID NO: 1213301 - DNA, 15 bp, Homo sapiens
cgcctcagcctctca

SEQ ID NO: 1213302 - DNA, 15 bp, Homo sapiens
ccgcctcagcctctc

SEQ ID NO: 1213303 - DNA, 15 bp, Homo sapiens
cccgcctcagcctct

SEQ ID NO: 1213304 - DNA, 15 bp, Homo sapiens
gctctcgaactcctg

SEQ ID NO: 1213305 - DNA, 15 bp, Homo sapiens
tgctctcgaactcct

SEQ ID NO: 1213306 - DNA, 15 bp, Homo sapiens
ctgctctcgaactcc

SEQ ID NO: 1213307 - DNA, 15 bp, Homo sapiens
gctgctctcgaactc

SEQ ID NO: 1213308 - DNA, 15 bp, Homo sapiens
ggctgctctcgaact

SEQ ID NO: 1213309 - DNA, 15 bp, Homo sapiens
aggctgctctcgaac

SEQ ID NO: 1213310 - DNA, 15 bp, Homo sapiens
caggctgctctcgaa

SEQ ID NO: 1213311 - DNA, 15 bp, Homo sapiens
ccaggctgctctcga

SEQ ID NO: 1213312 - DNA, 15 bp, Homo sapiens
gccaggctgctctcg

SEQ ID NO: 1213313 - DNA, 15 bp, Homo sapiens
ttcaccgtgttggcc

SEQ ID NO: 1213314 - DNA, 15 bp, Homo sapiens
tttcaccgtgttggc

SEQ ID NO: 1213315 - DNA, 15 bp, Homo sapiens
gtttcaccgtgttgg

SEQ ID NO: 1213316 - DNA, 15 bp, Homo sapiens
ggtttcaccgtgttg

SEQ ID NO: 1213317 - DNA, 15 bp, Homo sapiens
cagtagagatggggt

SEQ ID NO: 1213318 - DNA, 15 bp, Homo sapiens
tcagtagagatgggg

SEQ ID NO: 1213319 - DNA, 15 bp, Homo sapiens
ttcagtagagatggg

SEQ ID NO: 1213320 - DNA, 15 bp, Homo sapiens
tttcagtagagatgg

SEQ ID NO: 1213321 - DNA, 15 bp, Homo sapiens
ttttcagtagagatg

SEQ ID NO: 1213322 - DNA, 15 bp, Homo sapiens
attttcagtagagat

SEQ ID NO: 1213323 - DNA, 15 bp, Homo sapiens
gtttttgtattttca

SEQ ID NO: 1213324 - DNA, 15 bp, Homo sapiens
agtttttgtattttc

SEQ ID NO: 1213325 - DNA, 15 bp, Homo sapiens
tggctagtttttgta

SEQ ID NO: 1213326 - DNA, 15 bp, Homo sapiens
ctggctagtttttgt

SEQ ID NO: 1213327 - DNA, 15 bp, Homo sapiens
cctggctagtttttg

SEQ ID NO: 1213328 - DNA, 15 bp, Homo sapiens
acctggctagttttt

SEQ ID NO: 1213329 - DNA, 15 bp, Homo sapiens
tacctggctagtttt

SEQ ID NO: 1213330 - DNA, 15 bp, Homo sapiens
atacctggctagttt

SEQ ID NO: 1213331 - DNA, 15 bp, Homo sapiens
catacctggctagtt

SEQ ID NO: 1213332 - DNA, 15 bp, Homo sapiens
ccatacctggctagt

SEQ ID NO: 1213333 - DNA, 15 bp, Homo sapiens
accatacctggctag

SEQ ID NO: 1213334 - DNA, 15 bp, Homo sapiens
caccatacctggcta

SEQ ID NO: 1213335 - DNA, 15 bp, Homo sapiens
ccaccatacctggct

SEQ ID NO: 1213336 - DNA, 15 bp, Homo sapiens
cgccaccatacctgg

SEQ ID NO: 1213337 - DNA, 15 bp, Homo sapiens
acgccaccatacctg

SEQ ID NO: 1213338 - DNA, 15 bp, Homo sapiens
gacgccaccatacct

SEQ ID NO: 1213339 - DNA, 15 bp, Homo sapiens
agacgccaccatacc

SEQ ID NO: 1213340 - DNA, 15 bp, Homo sapiens
cagacgccaccatac

SEQ ID NO: 1213341 - DNA, 15 bp, Homo sapiens
gcagacgccaccata

SEQ ID NO: 1213342 - DNA, 15 bp, Homo sapiens
ggcagacgccaccat

SEQ ID NO: 1213343 - DNA, 15 bp, Homo sapiens
aggcagacgccacca

SEQ ID NO: 1213344 - DNA, 15 bp, Homo sapiens
caggcagacgccacc

SEQ ID NO: 1213345 - DNA, 15 bp, Homo sapiens
acaggcagacgccac

SEQ ID NO: 1213346 - DNA, 15 bp, Homo sapiens
tacaggcagacgcca

SEQ ID NO: 1213347 - DNA, 15 bp, Homo sapiens
ttacaggcagacgcc

SEQ ID NO: 1213348 - DNA, 15 bp, Homo sapiens
attacaggcagacgc

SEQ ID NO: 1213349 - DNA, 15 bp, Homo sapiens
gattacaggcagacg

SEQ ID NO: 1213350 - DNA, 15 bp, Homo sapiens
ggattacaggcagac

SEQ ID NO: 1213351 - DNA, 15 bp, Homo sapiens
gggattacaggcaga

SEQ ID NO: 1213352 - DNA, 15 bp, Homo sapiens
tgggattacaggcag

SEQ ID NO: 1213353 - DNA, 15 bp, Homo sapiens
tctcagcctcccgag

SEQ ID NO: 1213354 - DNA, 15 bp, Homo sapiens
gtctcagcctcccga

SEQ ID NO: 1213355 - DNA, 15 bp, Homo sapiens
tgattctcctgtctc

SEQ ID NO: 1213356 - DNA, 15 bp, Homo sapiens
gtgattctcctgtct

SEQ ID NO: 1213357 - DNA, 15 bp, Homo sapiens
agtgattctcctgtc

SEQ ID NO: 1213358 - DNA, 15 bp, Homo sapiens
aagtgattctcctgt

SEQ ID NO: 1213359 - DNA, 15 bp, Homo sapiens
attggctcactgcaa

SEQ ID NO: 1213360 - DNA, 15 bp, Homo sapiens
tattggctcactgca

SEQ ID NO: 1213361 - DNA, 15 bp, Homo sapiens
atattggctcactgc

SEQ ID NO: 1213362 - DNA, 15 bp, Homo sapiens
gatattggctcactg

SEQ ID NO: 1213363 - DNA, 15 bp, Homo sapiens
cgtgatattggctca

SEQ ID NO: 1213364 - DNA, 15 bp, Homo sapiens
gcgtgatattggctc

SEQ ID NO: 1213365 - DNA, 15 bp, Homo sapiens
ggcgtgatattggct

SEQ ID NO: 1213366 - DNA, 15 bp, Homo sapiens
tggcgtgatattggc

SEQ ID NO: 1213367 - DNA, 15 bp, Homo sapiens
atggcgtgatattgg

SEQ ID NO: 1213368 - DNA, 15 bp, Homo sapiens
aatggcgtgatattg

SEQ ID NO: 1213369 - DNA, 15 bp, Homo sapiens
caatggcgtgatatt

SEQ ID NO: 1213370 - DNA, 15 bp, Homo sapiens
gcaatggcgtgatat

SEQ ID NO: 1213371 - DNA, 15 bp, Homo sapiens
tgcaatggcgtgata

SEQ ID NO: 1213372 - DNA, 15 bp, Homo sapiens
ttcgctcttgtcccc

SEQ ID NO: 1213373 - DNA, 15 bp, Homo sapiens
tttcgctcttgtccc

SEQ ID NO: 1213374 - DNA, 15 bp, Homo sapiens
atttcgctcttgtcc

SEQ ID NO: 1213375 - DNA, 15 bp, Homo sapiens
aatttcgctcttgtc

SEQ ID NO: 1213376 - DNA, 15 bp, Homo sapiens
gaatttcgctcttgt

SEQ ID NO: 1213377 - DNA, 15 bp, Homo sapiens
agaatttcgctcttg

SEQ ID NO: 1213378 - DNA, 15 bp, Homo sapiens
cagaatttcgctctt

SEQ ID NO: 1213379 - DNA, 15 bp, Homo sapiens
acagaatttcgctct

SEQ ID NO: 1213380 - DNA, 15 bp, Homo sapiens
gacagaatttcgctc

SEQ ID NO: 1213381 - DNA, 15 bp, Homo sapiens
agacagaatttcgct

SEQ ID NO: 1213382 - DNA, 15 bp, Homo sapiens
gagacagaatttcgc

SEQ ID NO: 1213383 - DNA, 15 bp, Homo sapiens
tgagacagaatttcg

SEQ ID NO: 1213384 - DNA, 15 bp, Homo sapiens
ttgagacagaatttc

SEQ ID NO: 1213385 - DNA, 15 bp, Homo sapiens
tttgagacagaattt

SEQ ID NO: 1213386 - DNA, 15 bp, Homo sapiens
ttttgagacagaatt

SEQ ID NO: 1213387 - DNA, 15 bp, Homo sapiens
cttctttttttttga

SEQ ID NO: 1213388 - DNA, 15 bp, Homo sapiens
tcttctttttttttg

SEQ ID NO: 1213389 - DNA, 15 bp, Homo sapiens
cttcttctttttttt

SEQ ID NO: 1213390 - DNA, 15 bp, Homo sapiens
ccttcttcttctttt

SEQ ID NO: 1213391 - DNA, 15 bp, Homo sapiens
gccttcttcttcttt

SEQ ID NO: 1213392 - DNA, 15 bp, Homo sapiens
ggccttcttcttctt

SEQ ID NO: 1213393 - DNA, 15 bp, Homo sapiens
cggccttcttcttct

SEQ ID NO: 1213394 - DNA, 15 bp, Homo sapiens
tcggccttcttcttc

SEQ ID NO: 1213395 - DNA, 15 bp, Homo sapiens
gtcggccttcttctt

SEQ ID NO: 1213396 - DNA, 15 bp, Homo sapiens
tgtcggccttcttct

SEQ ID NO: 1213397 - DNA, 15 bp, Homo sapiens
ttgtcggccttcttc

SEQ ID NO: 1213398 - DNA, 15 bp, Homo sapiens
tttgtcggccttctt

SEQ ID NO: 1213399 - DNA, 15 bp, Homo sapiens
gtttgtcggccttct

SEQ ID NO: 1213400 - DNA, 15 bp, Homo sapiens
agtttgtcggccttc

SEQ ID NO: 1213401 - DNA, 15 bp, Homo sapiens
tagtttgtcggcctt

SEQ ID NO: 1213402 - DNA, 15 bp, Homo sapiens
atagtttgtcggcct

SEQ ID NO: 1213403 - DNA, 15 bp, Homo sapiens
catagtttgtcggcc

SEQ ID NO: 1213404 - DNA, 15 bp, Homo sapiens
acatagtttgtcggc

SEQ ID NO: 1213405 - DNA, 15 bp, Homo sapiens
tacatagtttgtcgg

SEQ ID NO: 1213406 - DNA, 15 bp, Homo sapiens
ttacatagtttgtcg

SEQ ID NO: 1213407 - DNA, 15 bp, Homo sapiens
gttacatagtttgtc

SEQ ID NO: 1213408 - DNA, 15 bp, Homo sapiens
agttacatagtttgt

SEQ ID NO: 1213409 - DNA, 15 bp, Homo sapiens
gagttacatagtttg

SEQ ID NO: 1213410 - DNA, 15 bp, Homo sapiens
agagttacatagttt

SEQ ID NO: 1213411 - DNA, 15 bp, Homo sapiens
cagagttacatagtt

SEQ ID NO: 1213412 - DNA, 15 bp, Homo sapiens
gcagagttacatagt

SEQ ID NO: 1213413 - DNA, 15 bp, Homo sapiens
ggcagagttacatag

SEQ ID NO: 1213414 - DNA, 15 bp, Homo sapiens
aggcagagttacata

SEQ ID NO: 1213415 - DNA, 15 bp, Homo sapiens
aaggcagagttacat

SEQ ID NO: 1213416 - DNA, 15 bp, Homo sapiens
aaaggcagagttaca

SEQ ID NO: 1213417 - DNA, 15 bp, Homo sapiens
gaaaggcagagttac

SEQ ID NO: 1213418 - DNA, 15 bp, Homo sapiens
agaaaggcagagtta

SEQ ID NO: 1213419 - DNA, 15 bp, Homo sapiens
gagaaaggcagagtt

SEQ ID NO: 1213420 - DNA, 15 bp, Homo sapiens
ggagaaaggcagagt

SEQ ID NO: 1213421 - DNA, 15 bp, Homo sapiens
tggagaaaggcagag

SEQ ID NO: 1213422 - DNA, 15 bp, Homo sapiens
atggagaaaggcaga

SEQ ID NO: 1213423 - DNA, 15 bp, Homo sapiens
catggagaaaggcag

SEQ ID NO: 1213424 - DNA, 15 bp, Homo sapiens
ccatggagaaaggca

SEQ ID NO: 1213425 - DNA, 15 bp, Homo sapiens
accatggagaaaggc

SEQ ID NO: 1213426 - DNA, 15 bp, Homo sapiens
gaccatggagaaagg

SEQ ID NO: 1213427 - DNA, 15 bp, Homo sapiens
ggaccatggagaaag

SEQ ID NO: 1213428 - DNA, 15 bp, Homo sapiens
tggaccatggagaaa

SEQ ID NO: 1213429 - DNA, 15 bp, Homo sapiens
ctggaccatggagaa

SEQ ID NO: 1213430 - DNA, 15 bp, Homo sapiens
tctggaccatggaga

SEQ ID NO: 1213431 - DNA, 15 bp, Homo sapiens
ttctggaccatggag

SEQ ID NO: 1213432 - DNA, 15 bp, Homo sapiens
gttctggaccatgga

SEQ ID NO: 1213433 - DNA, 15 bp, Homo sapiens
tgttctggaccatgg

SEQ ID NO: 1213434 - DNA, 15 bp, Homo sapiens
gtgttctggaccatg

SEQ ID NO: 1213435 - DNA, 15 bp, Homo sapiens
tgtgttctggaccat

SEQ ID NO: 1213436 - DNA, 15 bp, Homo sapiens
gtgtgttctggacca

SEQ ID NO: 1213437 - DNA, 15 bp, Homo sapiens
tgtgtgttctggacc

SEQ ID NO: 1213438 - DNA, 15 bp, Homo sapiens
ctgtgtgttctggac

SEQ ID NO: 1213439 - DNA, 15 bp, Homo sapiens
gctgtgtgttctgga

SEQ ID NO: 1213440 - DNA, 15 bp, Homo sapiens
ggctgtgtgttctgg

SEQ ID NO: 1213441 - DNA, 15 bp, Homo sapiens
gggctgtgtgttctg

SEQ ID NO: 1213442 - DNA, 15 bp, Homo sapiens
agggctgtgtgttct

SEQ ID NO: 1213443 - DNA, 15 bp, Homo sapiens
gagggctgtgtgttc

SEQ ID NO: 1213444 - DNA, 15 bp, Homo sapiens
ggagggctgtgtgtt

SEQ ID NO: 1213445 - DNA, 15 bp, Homo sapiens
aggagggctgtgtgt

SEQ ID NO: 1213446 - DNA, 15 bp, Homo sapiens
caggagggctgtgtg

SEQ ID NO: 1213447 - DNA, 15 bp, Homo sapiens
gcaggagggctgtgt

SEQ ID NO: 1213448 - DNA, 15 bp, Homo sapiens
cgcaggagggctgtg

SEQ ID NO: 1213449 - DNA, 15 bp, Homo sapiens
acgcaggagggctgt

SEQ ID NO: 1213450 - DNA, 15 bp, Homo sapiens
tacgcaggagggctg

SEQ ID NO: 1213451 - DNA, 15 bp, Homo sapiens
ttacgcaggagggct

SEQ ID NO: 1213452 - DNA, 15 bp, Homo sapiens
tttacgcaggagggc

SEQ ID NO: 1213453 - DNA, 15 bp, Homo sapiens
atttacgcaggaggg

SEQ ID NO: 1213454 - DNA, 15 bp, Homo sapiens
tatttacgcaggagg

SEQ ID NO: 1213455 - DNA, 15 bp, Homo sapiens
ttatttacgcaggag

SEQ ID NO: 1213456 - DNA, 15 bp, Homo sapiens
gttatttacgcagga

SEQ ID NO: 1213457 - DNA, 15 bp, Homo sapiens
agttatttacgcagg

SEQ ID NO: 1213458 - DNA, 15 bp, Homo sapiens
gagttatttacgcag

SEQ ID NO: 1213459 - DNA, 15 bp, Homo sapiens
ggagttatttacgca

SEQ ID NO: 1213460 - DNA, 15 bp, Homo sapiens
aggagttatttacgc

SEQ ID NO: 1213461 - DNA, 15 bp, Homo sapiens
aaggagttatttacg

SEQ ID NO: 1213462 - DNA, 15 bp, Homo sapiens
taaggagttatttac

SEQ ID NO: 1213463 - DNA, 15 bp, Homo sapiens
ataaggagttattta

SEQ ID NO: 1213464 - DNA, 15 bp, Homo sapiens
gataaggagttattt

SEQ ID NO: 1213465 - DNA, 15 bp, Homo sapiens
agataaggagttatt

SEQ ID NO: 1213466 - DNA, 15 bp, Homo sapiens
aagataaggagttat

SEQ ID NO: 1213467 - DNA, 15 bp, Homo sapiens
gaagataaggagtta

SEQ ID NO: 1213468 - DNA, 15 bp, Homo sapiens
ggaagataaggagtt

SEQ ID NO: 1213469 - DNA, 15 bp, Homo sapiens
aggaagataaggagt

SEQ ID NO: 1213470 - DNA, 15 bp, Homo sapiens
caggaagataaggag

SEQ ID NO: 1213471 - DNA, 15 bp, Homo sapiens
gcaggaagataagga

SEQ ID NO: 1213472 - DNA, 15 bp, Homo sapiens
agcaggaagataagg

SEQ ID NO: 1213473 - DNA, 15 bp, Homo sapiens
gagcaggaagataag

SEQ ID NO: 1213474 - DNA, 15 bp, Homo sapiens
ggagcaggaagataa

SEQ ID NO: 1213475 - DNA, 15 bp, Homo sapiens
gggagcaggaagata

SEQ ID NO: 1213476 - DNA, 15 bp, Homo sapiens
tgggagcaggaagat

SEQ ID NO: 1213477 - DNA, 15 bp, Homo sapiens
ctgggagcaggaaga

SEQ ID NO: 1213478 - DNA, 15 bp, Homo sapiens
gctgggagcaggaag

SEQ ID NO: 1213479 - DNA, 15 bp, Homo sapiens
agctgggagcaggaa

SEQ ID NO: 1213480 - DNA, 15 bp, Homo sapiens
tagctgggagcagga

SEQ ID NO: 1213481 - DNA, 15 bp, Homo sapiens
atagctgggagcagg

SEQ ID NO: 1213482 - DNA, 15 bp, Homo sapiens
gatagctgggagcag

SEQ ID NO: 1213483 - DNA, 15 bp, Homo sapiens
tgatagctgggagca

SEQ ID NO: 1213484 - DNA, 15 bp, Homo sapiens
atgatagctgggagc

SEQ ID NO: 1213485 - DNA, 15 bp, Homo sapiens
gatgatagctgggag

SEQ ID NO: 1213486 - DNA, 15 bp, Homo sapiens
tgatgatagctggga

SEQ ID NO: 1213487 - DNA, 15 bp, Homo sapiens
ctgatgatagctggg

SEQ ID NO: 1213488 - DNA, 15 bp, Homo sapiens
tctgatgatagctgg

SEQ ID NO: 1213489 - DNA, 15 bp, Homo sapiens
gtctgatgatagctg

SEQ ID NO: 1213490 - DNA, 15 bp, Homo sapiens
tgtctgatgatagct

SEQ ID NO: 1213491 - DNA, 15 bp, Homo sapiens
gtgtctgatgatagc

SEQ ID NO: 1213492 - DNA, 15 bp, Homo sapiens
ggtgtctgatgatag

SEQ ID NO: 1213493 - DNA, 15 bp, Homo sapiens
aggtgtctgatgata

SEQ ID NO: 1213494 - DNA, 15 bp, Homo sapiens
gaggtgtctgatgat

SEQ ID NO: 1213495 - DNA, 15 bp, Homo sapiens
cgaggtgtctgatga

SEQ ID NO: 1213496 - DNA, 15 bp, Homo sapiens
ccgaggtgtctgatg

SEQ ID NO: 1213497 - DNA, 15 bp, Homo sapiens
gccgaggtgtctgat

SEQ ID NO: 1213498 - DNA, 15 bp, Homo sapiens
agccgaggtgtctga

SEQ ID NO: 1213499 - DNA, 15 bp, Homo sapiens
cagccgaggtgtctg

SEQ ID NO: 1213500 - DNA, 15 bp, Homo sapiens
tcagccgaggtgtct

SEQ ID NO: 1213501 - DNA, 15 bp, Homo sapiens
atcagccgaggtgtc

SEQ ID NO: 1213502 - DNA, 15 bp, Homo sapiens
tatcagccgaggtgt

SEQ ID NO: 1213503 - DNA, 15 bp, Homo sapiens
ctatcagccgaggtg

SEQ ID NO: 1213504 - DNA, 15 bp, Homo sapiens
tctatcagccgaggt

SEQ ID NO: 1213505 - DNA, 15 bp, Homo sapiens
ttctatcagccgagg

SEQ ID NO: 1213506 - DNA, 15 bp, Homo sapiens
tttctatcagccgag

SEQ ID NO: 1213507 - DNA, 15 bp, Homo sapiens
ttttctatcagccga

SEQ ID NO: 1213508 - DNA, 15 bp, Homo sapiens
attttctatcagccg

SEQ ID NO: 1213509 - DNA, 15 bp, Homo sapiens
aattttctatcagcc

SEQ ID NO: 1213510 - DNA, 15 bp, Homo sapiens
caattttctatcagc

SEQ ID NO: 1213511 - DNA, 15 bp, Homo sapiens
gcaattttctatcag

SEQ ID NO: 1213512 - DNA, 15 bp, Homo sapiens
tgcaattttctatca

SEQ ID NO: 1213513 - DNA, 15 bp, Homo sapiens
ttgcaattttctatc

SEQ ID NO: 1213514 - DNA, 15 bp, Homo sapiens
cttgcaattttctat

SEQ ID NO: 1213515 - DNA, 15 bp, Homo sapiens
acttgcaattttcta

SEQ ID NO: 1213516 - DNA, 15 bp, Homo sapiens
aacttgcaattttct

SEQ ID NO: 1213517 - DNA, 15 bp, Homo sapiens
taacttgcaattttc

SEQ ID NO: 1213518 - DNA, 15 bp, Homo sapiens
ctaacttgcaatttt

SEQ ID NO: 1213519 - DNA, 15 bp, Homo sapiens
gctaacttgcaattt

SEQ ID NO: 1213520 - DNA, 15 bp, Homo sapiens
agctaacttgcaatt

SEQ ID NO: 1213521 - DNA, 15 bp, Homo sapiens
gagctaacttgcaat

SEQ ID NO: 1213522 - DNA, 15 bp, Homo sapiens
tgagctaacttgcaa

SEQ ID NO: 1213523 - DNA, 15 bp, Homo sapiens
gtgagctaacttgca

SEQ ID NO: 1213524 - DNA, 15 bp, Homo sapiens
agtgagctaacttgc

SEQ ID NO: 1213525 - DNA, 15 bp, Homo sapiens
cagtgagctaacttg

SEQ ID NO: 1213526 - DNA, 15 bp, Homo sapiens
gcagtgagctaactt

SEQ ID NO: 1213527 - DNA, 15 bp, Homo sapiens
tgcagtgagctaact

SEQ ID NO: 1213528 - DNA, 15 bp, Homo sapiens
ttgcagtgagctaac

SEQ ID NO: 1213529 - DNA, 15 bp, Homo sapiens
gttgcagtgagctaa

SEQ ID NO: 1213530 - DNA, 15 bp, Homo sapiens
cgaggttgcagtgag

SEQ ID NO: 1213531 - DNA, 15 bp, Homo sapiens
ccgaggttgcagtga

SEQ ID NO: 1213532 - DNA, 15 bp, Homo sapiens
gccgaggttgcagtg

SEQ ID NO: 1213533 - DNA, 15 bp, Homo sapiens
tgccgaggttgcagt

SEQ ID NO: 1213534 - DNA, 15 bp, Homo sapiens
atgccgaggttgcag

SEQ ID NO: 1213535 - DNA, 15 bp, Homo sapiens
aatgccgaggttgca

SEQ ID NO: 1213536 - DNA, 15 bp, Homo sapiens
taatgccgaggttgc

SEQ ID NO: 1213537 - DNA, 15 bp, Homo sapiens
ataatgccgaggttg

SEQ ID NO: 1213538 - DNA, 15 bp, Homo sapiens
tataatgccgaggtt

SEQ ID NO: 1213539 - DNA, 15 bp, Homo sapiens
ttataatgccgaggt

SEQ ID NO: 1213540 - DNA, 15 bp, Homo sapiens
cttataatgccgagg

SEQ ID NO: 1213541 - DNA, 15 bp, Homo sapiens
acttataatgccgag

SEQ ID NO: 1213542 - DNA, 15 bp, Homo sapiens
tacttataatgccga

SEQ ID NO: 1213543 - DNA, 15 bp, Homo sapiens
gtacttataatgccg

SEQ ID NO: 1213544 - DNA, 15 bp, Homo sapiens
agtacttataatgcc

SEQ ID NO: 1213545 - DNA, 15 bp, Homo sapiens
cagtacttataatgc

SEQ ID NO: 1213546 - DNA, 15 bp, Homo sapiens
gcagtacttataatg

SEQ ID NO: 1213547 - DNA, 15 bp, Homo sapiens
tgcagtacttataat

SEQ ID NO: 1213548 - DNA, 15 bp, Homo sapiens
gtgcagtacttataa

SEQ ID NO: 1213549 - DNA, 15 bp, Homo sapiens
tgtgcagtacttata

SEQ ID NO: 1213550 - DNA, 15 bp, Homo sapiens
ttgtgcagtacttat

SEQ ID NO: 1213551 - DNA, 15 bp, Homo sapiens
tttgtgcagtactta

SEQ ID NO: 1213552 - DNA, 15 bp, Homo sapiens
ctttgtgcagtactt

SEQ ID NO: 1213553 - DNA, 15 bp, Homo sapiens
gctttgtgcagtact

SEQ ID NO: 1213554 - DNA, 15 bp, Homo sapiens
ggctttgtgcagtac

SEQ ID NO: 1213555 - DNA, 15 bp, Homo sapiens
gggctttgtgcagta

SEQ ID NO: 1213556 - DNA, 15 bp, Homo sapiens
agggctttgtgcagt

SEQ ID NO: 1213557 - DNA, 15 bp, Homo sapiens
gagggctttgtgcag

SEQ ID NO: 1213558 - DNA, 15 bp, Homo sapiens
agagggctttgtgca

SEQ ID NO: 1213559 - DNA, 15 bp, Homo sapiens
aagagggctttgtgc

SEQ ID NO: 1213560 - DNA, 15 bp, Homo sapiens
gaagagggctttgtg

SEQ ID NO: 1213561 - DNA, 15 bp, Homo sapiens
tgaagagggctttgt

SEQ ID NO: 1213562 - DNA, 15 bp, Homo sapiens
ctgaagagggctttg

SEQ ID NO: 1213563 - DNA, 15 bp, Homo sapiens
gctgaagagggcttt

SEQ ID NO: 1213564 - DNA, 15 bp, Homo sapiens
cgctgaagagggctt

SEQ ID NO: 1213565 - DNA, 15 bp, Homo sapiens
gcgctgaagagggct

SEQ ID NO: 1213566 - DNA, 15 bp, Homo sapiens
tgcgctgaagagggc

SEQ ID NO: 1213567 - DNA, 15 bp, Homo sapiens
gtgcgctgaagaggg

SEQ ID NO: 1213568 - DNA, 15 bp, Homo sapiens
tgtgcgctgaagagg

SEQ ID NO: 1213569 - DNA, 15 bp, Homo sapiens
ctgtgcgctgaagag

SEQ ID NO: 1213570 - DNA, 15 bp, Homo sapiens
gctgtgcgctgaaga

SEQ ID NO: 1213571 - DNA, 15 bp, Homo sapiens
tgctgtgcgctgaag

SEQ ID NO: 1213572 - DNA, 15 bp, Homo sapiens
gtgctgtgcgctgaa

SEQ ID NO: 1213573 - DNA, 15 bp, Homo sapiens
tgtgctgtgcgctga

SEQ ID NO: 1213574 - DNA, 15 bp, Homo sapiens
ttgtgctgtgcgctg

SEQ ID NO: 1213575 - DNA, 15 bp, Homo sapiens
cttgtgctgtgcgct

SEQ ID NO: 1213576 - DNA, 15 bp, Homo sapiens
gcttgtgctgtgcgc

SEQ ID NO: 1213577 - DNA, 15 bp, Homo sapiens
tgcttgtgctgtgcg

SEQ ID NO: 1213578 - DNA, 15 bp, Homo sapiens
gtgcttgtgctgtgc

SEQ ID NO: 1213579 - DNA, 15 bp, Homo sapiens
ggtgcttgtgctgtg

SEQ ID NO: 1213580 - DNA, 15 bp, Homo sapiens
tggtgcttgtgctgt

SEQ ID NO: 1213581 - DNA, 15 bp, Homo sapiens
atggtgcttgtgctg

SEQ ID NO: 1213582 - DNA, 15 bp, Homo sapiens
aatggtgcttgtgct

SEQ ID NO: 1213583 - DNA, 15 bp, Homo sapiens
gaatggtgcttgtgc

SEQ ID NO: 1213584 - DNA, 15 bp, Homo sapiens
agaatggtgcttgtg

SEQ ID NO: 1213585 - DNA, 15 bp, Homo sapiens
tagaatggtgcttgt

SEQ ID NO: 1213586 - DNA, 15 bp, Homo sapiens
atagaatggtgcttg

SEQ ID NO: 1213587 - DNA, 15 bp, Homo sapiens
tatagaatggtgctt

SEQ ID NO: 1213588 - DNA, 15 bp, Homo sapiens
ttatagaatggtgct

SEQ ID NO: 1213589 - DNA, 15 bp, Homo sapiens
tttatagaatggtgc

SEQ ID NO: 1213590 - DNA, 15 bp, Homo sapiens
ttttatagaatggtg

SEQ ID NO: 1213591 - DNA, 15 bp, Homo sapiens
attttatagaatggt

SEQ ID NO: 1213592 - DNA, 15 bp, Homo sapiens
gattttatagaatgg

SEQ ID NO: 1213593 - DNA, 15 bp, Homo sapiens
agattttatagaatg

SEQ ID NO: 1213594 - DNA, 15 bp, Homo sapiens
gagattttatagaat

SEQ ID NO: 1213595 - DNA, 15 bp, Homo sapiens
ggagattttatagaa

SEQ ID NO: 1213596 - DNA, 15 bp, Homo sapiens
tggagattttataga

SEQ ID NO: 1213597 - DNA, 15 bp, Homo sapiens
ctggagattttatag

SEQ ID NO: 1213598 - DNA, 15 bp, Homo sapiens
gctggagattttata

SEQ ID NO: 1213599 - DNA, 15 bp, Homo sapiens
tgctggagattttat

SEQ ID NO: 1213600 - DNA, 15 bp, Homo sapiens
ttgctggagatttta

SEQ ID NO: 1213601 - DNA, 15 bp, Homo sapiens
cttgctggagatttt

SEQ ID NO: 1213602 - DNA, 15 bp, Homo sapiens
gcttgctggagattt

SEQ ID NO: 1213603 - DNA, 15 bp, Homo sapiens
cgcttgctggagatt

SEQ ID NO: 1213604 - DNA, 15 bp, Homo sapiens
ccgcttgctggagat

SEQ ID NO: 1213605 - DNA, 15 bp, Homo sapiens
gccgcttgctggaga

SEQ ID NO: 1213606 - DNA, 15 bp, Homo sapiens
ggccgcttgctggag

SEQ ID NO: 1213607 - DNA, 15 bp, Homo sapiens
tggccgcttgctgga

SEQ ID NO: 1213608 - DNA, 15 bp, Homo sapiens
ctggccgcttgctgg

SEQ ID NO: 1213609 - DNA, 15 bp, Homo sapiens
cctggccgcttgctg

SEQ ID NO: 1213610 - DNA, 15 bp, Homo sapiens
acctggccgcttgct

SEQ ID NO: 1213611 - DNA, 15 bp, Homo sapiens
cacctggccgcttgc

SEQ ID NO: 1213612 - DNA, 15 bp, Homo sapiens
gcacctggccgcttg

SEQ ID NO: 1213613 - DNA, 15 bp, Homo sapiens
tgcacctggccgctt

SEQ ID NO: 1213614 - DNA, 15 bp, Homo sapiens
ctgcacctggccgct

SEQ ID NO: 1213615 - DNA, 15 bp, Homo sapiens
actgcacctggccgc

SEQ ID NO: 1213616 - DNA, 15 bp, Homo sapiens
cactgcacctggccg

SEQ ID NO: 1213617 - DNA, 15 bp, Homo sapiens
tatgagccactgcac

SEQ ID NO: 1213618 - DNA, 15 bp, Homo sapiens
gtatgagccactgca

SEQ ID NO: 1213619 - DNA, 15 bp, Homo sapiens
aggtatgagccactg

SEQ ID NO: 1213620 - DNA, 15 bp, Homo sapiens
caggtatgagccact

SEQ ID NO: 1213621 - DNA, 15 bp, Homo sapiens
acaggtatgagccac

SEQ ID NO: 1213622 - DNA, 15 bp, Homo sapiens
tacaggtatgagcca

SEQ ID NO: 1213623 - DNA, 15 bp, Homo sapiens
ttacaggtatgagcc

SEQ ID NO: 1213624 - DNA, 15 bp, Homo sapiens
attacaggtatgagc

SEQ ID NO: 1213625 - DNA, 15 bp, Homo sapiens
gattacaggtatgag

SEQ ID NO: 1213626 - DNA, 15 bp, Homo sapiens
ggattacaggtatga

SEQ ID NO: 1213627 - DNA, 15 bp, Homo sapiens
tctcccaaaatgctg

SEQ ID NO: 1213628 - DNA, 15 bp, Homo sapiens
gtctcccaaaatgct

SEQ ID NO: 1213629 - DNA, 15 bp, Homo sapiens
agtctcccaaaatgc

SEQ ID NO: 1213630 - DNA, 15 bp, Homo sapiens
cagtctcccaaaatg

SEQ ID NO: 1213631 - DNA, 15 bp, Homo sapiens
tcagtctcccaaaat

SEQ ID NO: 1213632 - DNA, 15 bp, Homo sapiens
ctcagtctcccaaaa

SEQ ID NO: 1213633 - DNA, 15 bp, Homo sapiens
cctcagtctcccaaa

SEQ ID NO: 1213634 - DNA, 15 bp, Homo sapiens
cgcctcagtctccca

SEQ ID NO: 1213635 - DNA, 15 bp, Homo sapiens
ccgcctcagtctccc

SEQ ID NO: 1213636 - DNA, 15 bp, Homo sapiens
cccgcctcagtctcc

SEQ ID NO: 1213637 - DNA, 15 bp, Homo sapiens
gcccgcctcagtctc

SEQ ID NO: 1213638 - DNA, 15 bp, Homo sapiens
cgcccgcctcagtct

SEQ ID NO: 1213639 - DNA, 15 bp, Homo sapiens
ccgcccgcctcagtc

SEQ ID NO: 1213640 - DNA, 15 bp, Homo sapiens
tccgcccgcctcagt

SEQ ID NO: 1213641 - DNA, 15 bp, Homo sapiens
atagagacggggttt

SEQ ID NO: 1213642 - DNA, 15 bp, Homo sapiens
aatagagacggggtt

SEQ ID NO: 1213643 - DNA, 15 bp, Homo sapiens
taatagagacggggt

SEQ ID NO: 1213644 - DNA, 15 bp, Homo sapiens
ttaatagagacgggg

SEQ ID NO: 1213645 - DNA, 15 bp, Homo sapiens
tttaatagagacggg

SEQ ID NO: 1213646 - DNA, 15 bp, Homo sapiens
ttttaatagagacgg

SEQ ID NO: 1213647 - DNA, 15 bp, Homo sapiens
gccttccaagtagct

SEQ ID NO: 1213648 - DNA, 15 bp, Homo sapiens
agccttccaagtagc

SEQ ID NO: 1213649 - DNA, 15 bp, Homo sapiens
cagccttccaagtag

SEQ ID NO: 1213650 - DNA, 15 bp, Homo sapiens
tcagccttccaagta

SEQ ID NO: 1213651 - DNA, 15 bp, Homo sapiens
gcctcagccttccaa

SEQ ID NO: 1213652 - DNA, 15 bp, Homo sapiens
tgcctcagccttcca

SEQ ID NO: 1213653 - DNA, 15 bp, Homo sapiens
ctgcaacttccacct

SEQ ID NO: 1213654 - DNA, 15 bp, Homo sapiens
actgcaacttccacc

SEQ ID NO: 1213655 - DNA, 15 bp, Homo sapiens
cactgcaacttccac

SEQ ID NO: 1213656 - DNA, 15 bp, Homo sapiens
cggctcactgcaact

SEQ ID NO: 1213657 - DNA, 15 bp, Homo sapiens
agatctcggctcact

SEQ ID NO: 1213658 - DNA, 15 bp, Homo sapiens
aagatctcggctcac

SEQ ID NO: 1213659 - DNA, 15 bp, Homo sapiens
caagatctcggctca

SEQ ID NO: 1213660 - DNA, 15 bp, Homo sapiens
gcaagatctcggctc

SEQ ID NO: 1213661 - DNA, 15 bp, Homo sapiens
ggcaagatctcggct

SEQ ID NO: 1213662 - DNA, 15 bp, Homo sapiens
tggcaagatctcggc

SEQ ID NO: 1213663 - DNA, 15 bp, Homo sapiens
atggcaagatctcgg

SEQ ID NO: 1213664 - DNA, 15 bp, Homo sapiens
gatggcaagatctcg

SEQ ID NO: 1213665 - DNA, 15 bp, Homo sapiens
cgatggcaagatctc

SEQ ID NO: 1213666 - DNA, 15 bp, Homo sapiens
gcgatggcaagatct

SEQ ID NO: 1213667 - DNA, 15 bp, Homo sapiens
tgcgatggcaagatc

SEQ ID NO: 1213668 - DNA, 15 bp, Homo sapiens
gtgcgatggcaagat

SEQ ID NO: 1213669 - DNA, 15 bp, Homo sapiens
agtgcgatggcaaga

SEQ ID NO: 1213670 - DNA, 15 bp, Homo sapiens
gagtgcgatggcaag

SEQ ID NO: 1213671 - DNA, 15 bp, Homo sapiens
ggagtgcgatggcaa

SEQ ID NO: 1213672 - DNA, 15 bp, Homo sapiens
tggagtgcgatggca

SEQ ID NO: 1213673 - DNA, 15 bp, Homo sapiens
ctggagtgcgatggc

SEQ ID NO: 1213674 - DNA, 15 bp, Homo sapiens
gctggagtgcgatgg

SEQ ID NO: 1213675 - DNA, 15 bp, Homo sapiens
ggctggagtgcgatg

SEQ ID NO: 1213676 - DNA, 15 bp, Homo sapiens
aggctggagtgcgat

SEQ ID NO: 1213677 - DNA, 15 bp, Homo sapiens
caggctggagtgcga

SEQ ID NO: 1213678 - DNA, 15 bp, Homo sapiens
actcttgtcccccag

SEQ ID NO: 1213679 - DNA, 15 bp, Homo sapiens
cactcttgtccccca

SEQ ID NO: 1213680 - DNA, 15 bp, Homo sapiens
tcactcttgtccccc

SEQ ID NO: 1213681 - DNA, 15 bp, Homo sapiens
ctcactcttgtcccc

SEQ ID NO: 1213682 - DNA, 15 bp, Homo sapiens
tctcactcttgtccc

SEQ ID NO: 1213683 - DNA, 15 bp, Homo sapiens
gtctcactcttgtcc

SEQ ID NO: 1213684 - DNA, 15 bp, Homo sapiens
agtctcactcttgtc

SEQ ID NO: 1213685 - DNA, 15 bp, Homo sapiens
aagtctcactcttgt

SEQ ID NO: 1213686 - DNA, 15 bp, Homo sapiens
gaagtctcactcttg

SEQ ID NO: 1213687 - DNA, 15 bp, Homo sapiens
cgaagtctcactctt

SEQ ID NO: 1213688 - DNA, 15 bp, Homo sapiens
acgaagtctcactct

SEQ ID NO: 1213689 - DNA, 15 bp, Homo sapiens
gacgaagtctcactc

SEQ ID NO: 1213690 - DNA, 15 bp, Homo sapiens
agacgaagtctcact

SEQ ID NO: 1213691 - DNA, 15 bp, Homo sapiens
gagacgaagtctcac

SEQ ID NO: 1213692 - DNA, 15 bp, Homo sapiens
tgagacgaagtctca

SEQ ID NO: 1213693 - DNA, 15 bp, Homo sapiens
ttgagacgaagtctc

SEQ ID NO: 1213694 - DNA, 15 bp, Homo sapiens
tttgagacgaagtct

SEQ ID NO: 1213695 - DNA, 15 bp, Homo sapiens
ttttgagacgaagtc

SEQ ID NO: 1213696 - DNA, 15 bp, Homo sapiens
tttttgagacgaagt

SEQ ID NO: 1213697 - DNA, 15 bp, Homo sapiens
ttttttgagacgaag

SEQ ID NO: 1213698 - DNA, 15 bp, Homo sapiens
tttttttgagacgaa

SEQ ID NO: 1213699 - DNA, 15 bp, Homo sapiens
gggaatttttttttt

SEQ ID NO: 1213700 - DNA, 15 bp, Homo sapiens
tgggaattttttttt

SEQ ID NO: 1213701 - DNA, 15 bp, Homo sapiens
ctgggaatttttttt

SEQ ID NO: 1213702 - DNA, 15 bp, Homo sapiens
gctgggaattttttt

SEQ ID NO: 1213703 - DNA, 15 bp, Homo sapiens
tgctgggaatttttt

SEQ ID NO: 1213704 - DNA, 15 bp, Homo sapiens
ttgctgggaattttt

SEQ ID NO: 1213705 - DNA, 15 bp, Homo sapiens
cttgctgggaatttt

SEQ ID NO: 1213706 - DNA, 15 bp, Homo sapiens
gcttgctgggaattt

SEQ ID NO: 1213707 - DNA, 15 bp, Homo sapiens
ggcttgctgggaatt

SEQ ID NO: 1213708 - DNA, 15 bp, Homo sapiens
aggcttgctgggaat

SEQ ID NO: 1213709 - DNA, 15 bp, Homo sapiens
aaggcttgctgggaa

SEQ ID NO: 1213710 - DNA, 15 bp, Homo sapiens
aaaggcttgctggga

SEQ ID NO: 1213711 - DNA, 15 bp, Homo sapiens
caaaggcttgctggg

SEQ ID NO: 1213712 - DNA, 15 bp, Homo sapiens
acaaaggcttgctgg

SEQ ID NO: 1213713 - DNA, 15 bp, Homo sapiens
gacaaaggcttgctg

SEQ ID NO: 1213714 - DNA, 15 bp, Homo sapiens
agacaaaggcttgct

SEQ ID NO: 1213715 - DNA, 15 bp, Homo sapiens
aagacaaaggcttgc

SEQ ID NO: 1213716 - DNA, 15 bp, Homo sapiens
gaagacaaaggcttg

SEQ ID NO: 1213717 - DNA, 15 bp, Homo sapiens
agaagacaaaggctt

SEQ ID NO: 1213718 - DNA, 15 bp, Homo sapiens
cagaagacaaaggct

SEQ ID NO: 1213719 - DNA, 15 bp, Homo sapiens
ccagaagacaaaggc

SEQ ID NO: 1213720 - DNA, 15 bp, Homo sapiens
gccagaagacaaagg

SEQ ID NO: 1213721 - DNA, 15 bp, Homo sapiens
tgccagaagacaaag

SEQ ID NO: 1213722 - DNA, 15 bp, Homo sapiens
ctgccagaagacaaa

SEQ ID NO: 1213723 - DNA, 15 bp, Homo sapiens
actgccagaagacaa

SEQ ID NO: 1213724 - DNA, 15 bp, Homo sapiens
gactgccagaagaca

SEQ ID NO: 1213725 - DNA, 15 bp, Homo sapiens
tgactgccagaagac

SEQ ID NO: 1213726 - DNA, 15 bp, Homo sapiens
ctgactgccagaaga

SEQ ID NO: 1213727 - DNA, 15 bp, Homo sapiens
gctgactgccagaag

SEQ ID NO: 1213728 - DNA, 15 bp, Homo sapiens
agctgactgccagaa

SEQ ID NO: 1213729 - DNA, 15 bp, Homo sapiens
gagctgactgccaga

SEQ ID NO: 1213730 - DNA, 15 bp, Homo sapiens
ggagctgactgccag

SEQ ID NO: 1213731 - DNA, 15 bp, Homo sapiens
aggagctgactgcca

SEQ ID NO: 1213732 - DNA, 15 bp, Homo sapiens
gaggagctgactgcc

SEQ ID NO: 1213733 - DNA, 15 bp, Homo sapiens
agaggagctgactgc

SEQ ID NO: 1213734 - DNA, 15 bp, Homo sapiens
gagaggagctgactg

SEQ ID NO: 1213735 - DNA, 15 bp, Homo sapiens
agagaggagctgact

SEQ ID NO: 1213736 - DNA, 15 bp, Homo sapiens
aagagaggagctgac

SEQ ID NO: 1213737 - DNA, 15 bp, Homo sapiens
caagagaggagctga

SEQ ID NO: 1213738 - DNA, 15 bp, Homo sapiens
gcaagagaggagctg

SEQ ID NO: 1213739 - DNA, 15 bp, Homo sapiens
agcaagagaggagct

SEQ ID NO: 1213740 - DNA, 15 bp, Homo sapiens
cagcaagagaggagc

SEQ ID NO: 1213741 - DNA, 15 bp, Homo sapiens
tcagcaagagaggag

SEQ ID NO: 1213742 - DNA, 15 bp, Homo sapiens
gtcagcaagagagga

SEQ ID NO: 1213743 - DNA, 15 bp, Homo sapiens
ggtcagcaagagagg

SEQ ID NO: 1213744 - DNA, 15 bp, Homo sapiens
aggtcagcaagagag

SEQ ID NO: 1213745 - DNA, 15 bp, Homo sapiens
caggtcagcaagaga

SEQ ID NO: 1213746 - DNA, 15 bp, Homo sapiens
gcaggtcagcaagag

SEQ ID NO: 1213747 - DNA, 15 bp, Homo sapiens
agcaggtcagcaaga

SEQ ID NO: 1213748 - DNA, 15 bp, Homo sapiens
gagcaggtcagcaag

SEQ ID NO: 1213749 - DNA, 15 bp, Homo sapiens
tgagcaggtcagcaa

SEQ ID NO: 1213750 - DNA, 15 bp, Homo sapiens
atgagcaggtcagca

SEQ ID NO: 1213751 - DNA, 15 bp, Homo sapiens
aatgagcaggtcagc

SEQ ID NO: 1213752 - DNA, 15 bp, Homo sapiens
caatgagcaggtcag

SEQ ID NO: 1213753 - DNA, 15 bp, Homo sapiens
gcaatgagcaggtca

SEQ ID NO: 1213754 - DNA, 15 bp, Homo sapiens
agcaatgagcaggtc

SEQ ID NO: 1213755 - DNA, 15 bp, Homo sapiens
aagcaatgagcaggt

SEQ ID NO: 1213756 - DNA, 15 bp, Homo sapiens
aaagcaatgagcagg

SEQ ID NO: 1213757 - DNA, 15 bp, Homo sapiens
gaaagcaatgagcag

SEQ ID NO: 1213758 - DNA, 15 bp, Homo sapiens
agaaagcaatgagca

SEQ ID NO: 1213759 - DNA, 15 bp, Homo sapiens
aagaaagcaatgagc

SEQ ID NO: 1213760 - DNA, 15 bp, Homo sapiens
caagaaagcaatgag

SEQ ID NO: 1213761 - DNA, 15 bp, Homo sapiens
gcaagaaagcaatga

SEQ ID NO: 1213762 - DNA, 15 bp, Homo sapiens
tgcaagaaagcaatg

SEQ ID NO: 1213763 - DNA, 15 bp, Homo sapiens
ttgcaagaaagcaat

SEQ ID NO: 1213764 - DNA, 15 bp, Homo sapiens
cttgcaagaaagcaa

SEQ ID NO: 1213765 - DNA, 15 bp, Homo sapiens
ccttgcaagaaagca

SEQ ID NO: 1213766 - DNA, 15 bp, Homo sapiens
accttgcaagaaagc

SEQ ID NO: 1213767 - DNA, 15 bp, Homo sapiens
taccttgcaagaaag

SEQ ID NO: 1213768 - DNA, 15 bp, Homo sapiens
ataccttgcaagaaa

SEQ ID NO: 1213769 - DNA, 15 bp, Homo sapiens
aataccttgcaagaa

SEQ ID NO: 1213770 - DNA, 15 bp, Homo sapiens
aaataccttgcaaga

SEQ ID NO: 1213771 - DNA, 15 bp, Homo sapiens
aaaataccttgcaag

SEQ ID NO: 1213772 - DNA, 15 bp, Homo sapiens
gaaaataccttgcaa

SEQ ID NO: 1213773 - DNA, 15 bp, Homo sapiens
ggaaaataccttgca

SEQ ID NO: 1213774 - DNA, 15 bp, Homo sapiens
aggaaaataccttgc

SEQ ID NO: 1213775 - DNA, 15 bp, Homo sapiens
taggaaaataccttg

SEQ ID NO: 1213776 - DNA, 15 bp, Homo sapiens
gtaggaaaatacctt

SEQ ID NO: 1213777 - DNA, 15 bp, Homo sapiens
ggtaggaaaatacct

SEQ ID NO: 1213778 - DNA, 15 bp, Homo sapiens
aggtaggaaaatacc

SEQ ID NO: 1213779 - DNA, 15 bp, Homo sapiens
taggtaggaaaatac

SEQ ID NO: 1213780 - DNA, 15 bp, Homo sapiens
gtaggtaggaaaata

SEQ ID NO: 1213781 - DNA, 15 bp, Homo sapiens
agtaggtaggaaaat

SEQ ID NO: 1213782 - DNA, 15 bp, Homo sapiens
aagtaggtaggaaaa

SEQ ID NO: 1213783 - DNA, 15 bp, Homo sapiens
aaagtaggtaggaaa

SEQ ID NO: 1213784 - DNA, 15 bp, Homo sapiens
gaaagtaggtaggaa

SEQ ID NO: 1213785 - DNA, 15 bp, Homo sapiens
agaaagtaggtagga

SEQ ID NO: 1213786 - DNA, 15 bp, Homo sapiens
cagaaagtaggtagg

SEQ ID NO: 1213787 - DNA, 15 bp, Homo sapiens
ccagaaagtaggtag

SEQ ID NO: 1213788 - DNA, 15 bp, Homo sapiens
tccagaaagtaggta

SEQ ID NO: 1213789 - DNA, 15 bp, Homo sapiens
ttccagaaagtaggt

SEQ ID NO: 1213790 - DNA, 15 bp, Homo sapiens
attccagaaagtagg

SEQ ID NO: 1213791 - DNA, 15 bp, Homo sapiens
tattccagaaagtag

SEQ ID NO: 1213792 - DNA, 15 bp, Homo sapiens
ttattccagaaagta

SEQ ID NO: 1213793 - DNA, 15 bp, Homo sapiens
tttattccagaaagt

SEQ ID NO: 1213794 - DNA, 15 bp, Homo sapiens
atttattccagaaag

SEQ ID NO: 1213795 - DNA, 15 bp, Homo sapiens
gatttattccagaaa

SEQ ID NO: 1213796 - DNA, 15 bp, Homo sapiens
agatttattccagaa

SEQ ID NO: 1213797 - DNA, 15 bp, Homo sapiens
cagatttattccaga

SEQ ID NO: 1213798 - DNA, 15 bp, Homo sapiens
acagatttattccag

SEQ ID NO: 1213799 - DNA, 15 bp, Homo sapiens
gacagatttattcca

SEQ ID NO: 1213800 - DNA, 15 bp, Homo sapiens
agacagatttattcc

SEQ ID NO: 1213801 - DNA, 15 bp, Homo sapiens
aagacagatttattc

SEQ ID NO: 1213802 - DNA, 15 bp, Homo sapiens
aaagacagatttatt

SEQ ID NO: 1213803 - DNA, 15 bp, Homo sapiens
gaaagacagatttat

SEQ ID NO: 1213804 - DNA, 15 bp, Homo sapiens
agaaagacagattta

SEQ ID NO: 1213805 - DNA, 15 bp, Homo sapiens
cagaaagacagattt

SEQ ID NO: 1213806 - DNA, 15 bp, Homo sapiens
acagaaagacagatt

SEQ ID NO: 1213807 - DNA, 15 bp, Homo sapiens
tacagaaagacagat

SEQ ID NO: 1213808 - DNA, 15 bp, Homo sapiens
gtacagaaagacaga

SEQ ID NO: 1213809 - DNA, 15 bp, Homo sapiens
agtacagaaagacag

SEQ ID NO: 1213810 - DNA, 15 bp, Homo sapiens
aagtacagaaagaca

SEQ ID NO: 1213811 - DNA, 15 bp, Homo sapiens
taagtacagaaagac

SEQ ID NO: 1213812 - DNA, 15 bp, Homo sapiens
gtaagtacagaaaga

SEQ ID NO: 1213813 - DNA, 15 bp, Homo sapiens
tgtaagtacagaaag

SEQ ID NO: 1213814 - DNA, 15 bp, Homo sapiens
ttgtaagtacagaaa

SEQ ID NO: 1213815 - DNA, 15 bp, Homo sapiens
gttgtaagtacagaa

SEQ ID NO: 1213816 - DNA, 15 bp, Homo sapiens
agttgtaagtacaga

SEQ ID NO: 1213817 - DNA, 15 bp, Homo sapiens
tagttgtaagtacag

SEQ ID NO: 1213818 - DNA, 15 bp, Homo sapiens
gtagttgtaagtaca

SEQ ID NO: 1213819 - DNA, 15 bp, Homo sapiens
ggtagttgtaagtac

SEQ ID NO: 1213820 - DNA, 15 bp, Homo sapiens
aggtagttgtaagta

SEQ ID NO: 1213821 - DNA, 15 bp, Homo sapiens
aaggtagttgtaagt

SEQ ID NO: 1213822 - DNA, 15 bp, Homo sapiens
aaaggtagttgtaag

SEQ ID NO: 1213823 - DNA, 15 bp, Homo sapiens
aaaaggtagttgtaa

SEQ ID NO: 1213824 - DNA, 15 bp, Homo sapiens
aaaaaggtagttgta

SEQ ID NO: 1213825 - DNA, 15 bp, Homo sapiens
aaaaaaggtagttgt

SEQ ID NO: 1213826 - DNA, 15 bp, Homo sapiens
taaaaaaggtagttg

SEQ ID NO: 1213827 - DNA, 15 bp, Homo sapiens
ttaaaaaaggtagtt

SEQ ID NO: 1213828 - DNA, 15 bp, Homo sapiens
tttaaaaaaggtagt

SEQ ID NO: 1213829 - DNA, 15 bp, Homo sapiens
ttttaaaaaaggtag

SEQ ID NO: 1213830 - DNA, 15 bp, Homo sapiens
attttaaaaaaggta

SEQ ID NO: 1213831 - DNA, 15 bp, Homo sapiens
aattttaaaaaaggt

SEQ ID NO: 1213832 - DNA, 15 bp, Homo sapiens
aaattttaaaaaagg

SEQ ID NO: 1213833 - DNA, 15 bp, Homo sapiens
gaaattttaaaaaag

SEQ ID NO: 1213834 - DNA, 15 bp, Homo sapiens
agaaattttaaaaaa

SEQ ID NO: 1213835 - DNA, 15 bp, Homo sapiens
aagaaattttaaaaa

SEQ ID NO: 1213836 - DNA, 15 bp, Homo sapiens
aaagaaattttaaaa

SEQ ID NO: 1213837 - DNA, 15 bp, Homo sapiens
gaaagaaattttaaa

SEQ ID NO: 1213838 - DNA, 15 bp, Homo sapiens
agaaagaaattttaa

SEQ ID NO: 1213839 - DNA, 15 bp, Homo sapiens
aagaaagaaatttta

SEQ ID NO: 1213840 - DNA, 15 bp, Homo sapiens
aaagaaagaaatttt

SEQ ID NO: 1213841 - DNA, 15 bp, Homo sapiens
aaaaaagaaagaaat

SEQ ID NO: 1213842 - DNA, 15 bp, Homo sapiens
caaaaaagaaagaaa

SEQ ID NO: 1213843 - DNA, 15 bp, Homo sapiens
tcaaaaaagaaagaa

SEQ ID NO: 1213844 - DNA, 15 bp, Homo sapiens
ctcaaaaaagaaaga

SEQ ID NO: 1213845 - DNA, 15 bp, Homo sapiens
tctcaaaaaagaaag

SEQ ID NO: 1213846 - DNA, 15 bp, Homo sapiens
atctcaaaaaagaaa

SEQ ID NO: 1213847 - DNA, 15 bp, Homo sapiens
catctcaaaaaagaa

SEQ ID NO: 1213848 - DNA, 15 bp, Homo sapiens
ccatctcaaaaaaga

SEQ ID NO: 1213849 - DNA, 15 bp, Homo sapiens
tccatctcaaaaaag

SEQ ID NO: 1213850 - DNA, 15 bp, Homo sapiens
caaacagagtgagac

SEQ ID NO: 1213851 - DNA, 15 bp, Homo sapiens
gcaaacagagtgaga

SEQ ID NO: 1213852 - DNA, 15 bp, Homo sapiens
ggcaaacagagtgag

SEQ ID NO: 1213853 - DNA, 15 bp, Homo sapiens
gggcaaacagagtga

SEQ ID NO: 1213854 - DNA, 15 bp, Homo sapiens
tgggcaaacagagtg

SEQ ID NO: 1213855 - DNA, 15 bp, Homo sapiens
ctgggcaaacagagt

SEQ ID NO: 1213856 - DNA, 15 bp, Homo sapiens
cctgggcaaacagag

SEQ ID NO: 1213857 - DNA, 15 bp, Homo sapiens
gcctgggcaaacaga

SEQ ID NO: 1213858 - DNA, 15 bp, Homo sapiens
agcctgggcaaacag

SEQ ID NO: 1213859 - DNA, 15 bp, Homo sapiens
cagcctgggcaaaca

SEQ ID NO: 1213860 - DNA, 15 bp, Homo sapiens
ccagcctgggcaaac

SEQ ID NO: 1213861 - DNA, 15 bp, Homo sapiens
aactccagcctgggc

SEQ ID NO: 1213862 - DNA, 15 bp, Homo sapiens
gaactccagcctggg

SEQ ID NO: 1213863 - DNA, 15 bp, Homo sapiens
tgaactccagcctgg

SEQ ID NO: 1213864 - DNA, 15 bp, Homo sapiens
ctgaactccagcctg

SEQ ID NO: 1213865 - DNA, 15 bp, Homo sapiens
actgaactccagcct

SEQ ID NO: 1213866 - DNA, 15 bp, Homo sapiens
cactgaactccagcc

SEQ ID NO: 1213867 - DNA, 15 bp, Homo sapiens
ccactgaactccagc

SEQ ID NO: 1213868 - DNA, 15 bp, Homo sapiens
accactgaactccag

SEQ ID NO: 1213869 - DNA, 15 bp, Homo sapiens
caccactgaactcca

SEQ ID NO: 1213870 - DNA, 15 bp, Homo sapiens
gcaccactgaactcc

SEQ ID NO: 1213871 - DNA, 15 bp, Homo sapiens
tgcaccactgaactc

SEQ ID NO: 1213872 - DNA, 15 bp, Homo sapiens
ttgcaccactgaact

SEQ ID NO: 1213873 - DNA, 15 bp, Homo sapiens
attgcaccactgaac

SEQ ID NO: 1213874 - DNA, 15 bp, Homo sapiens
gattgcaccactgaa

SEQ ID NO: 1213875 - DNA, 15 bp, Homo sapiens
agattgcaccactga

SEQ ID NO: 1213876 - DNA, 15 bp, Homo sapiens
taggtagaggttgca

SEQ ID NO: 1213877 - DNA, 15 bp, Homo sapiens
gtaggtagaggttgc

SEQ ID NO: 1213878 - DNA, 15 bp, Homo sapiens
agtaggtagaggttg

SEQ ID NO: 1213879 - DNA, 15 bp, Homo sapiens
cagtaggtagaggtt

SEQ ID NO: 1213880 - DNA, 15 bp, Homo sapiens
ccagtaggtagaggt

SEQ ID NO: 1213881 - DNA, 15 bp, Homo sapiens
cccagtaggtagagg

SEQ ID NO: 1213882 - DNA, 15 bp, Homo sapiens
acccagtaggtagag

SEQ ID NO: 1213883 - DNA, 15 bp, Homo sapiens
aacccagtaggtaga

SEQ ID NO: 1213884 - DNA, 15 bp, Homo sapiens
gaacccagtaggtag

SEQ ID NO: 1213885 - DNA, 15 bp, Homo sapiens
tgaacccagtaggta

SEQ ID NO: 1213886 - DNA, 15 bp, Homo sapiens
ttgaacccagtaggt

SEQ ID NO: 1213887 - DNA, 15 bp, Homo sapiens
cttgaacccagtagg

SEQ ID NO: 1213888 - DNA, 15 bp, Homo sapiens
gcttgaacccagtag

SEQ ID NO: 1213889 - DNA, 15 bp, Homo sapiens
cgcttgaacccagta

SEQ ID NO: 1213890 - DNA, 15 bp, Homo sapiens
tcgcttgaacccagt

SEQ ID NO: 1213891 - DNA, 15 bp, Homo sapiens
tgcacgcctgtaatc

SEQ ID NO: 1213892 - DNA, 15 bp, Homo sapiens
gtgcacgcctgtaat

SEQ ID NO: 1213893 - DNA, 15 bp, Homo sapiens
ggtgcacgcctgtaa

SEQ ID NO: 1213894 - DNA, 15 bp, Homo sapiens
ctggtgcacgcctgt

SEQ ID NO: 1213895 - DNA, 15 bp, Homo sapiens
gctggtgcacgcctg

SEQ ID NO: 1213896 - DNA, 15 bp, Homo sapiens
tgctggtgcacgcct

SEQ ID NO: 1213897 - DNA, 15 bp, Homo sapiens
gtgctggtgcacgcc

SEQ ID NO: 1213898 - DNA, 15 bp, Homo sapiens
cgtgctggtgcacgc

SEQ ID NO: 1213899 - DNA, 15 bp, Homo sapiens
gcgtgctggtgcacg

SEQ ID NO: 1213900 - DNA, 15 bp, Homo sapiens
tgcgtgctggtgcac

SEQ ID NO: 1213901 - DNA, 15 bp, Homo sapiens
ctgcgtgctggtgca

SEQ ID NO: 1213902 - DNA, 15 bp, Homo sapiens
cctgcgtgctggtgc

SEQ ID NO: 1213903 - DNA, 15 bp, Homo sapiens
gcctgcgtgctggtg

SEQ ID NO: 1213904 - DNA, 15 bp, Homo sapiens
agcctgcgtgctggt

SEQ ID NO: 1213905 - DNA, 15 bp, Homo sapiens
tagcctgcgtgctgg

SEQ ID NO: 1213906 - DNA, 15 bp, Homo sapiens
ttagcctgcgtgctg

SEQ ID NO: 1213907 - DNA, 15 bp, Homo sapiens
attagcctgcgtgct

SEQ ID NO: 1213908 - DNA, 15 bp, Homo sapiens
aattagcctgcgtgc

SEQ ID NO: 1213909 - DNA, 15 bp, Homo sapiens
aaattagcctgcgtg

SEQ ID NO: 1213910 - DNA, 15 bp, Homo sapiens
aaaattagcctgcgt

SEQ ID NO: 1213911 - DNA, 15 bp, Homo sapiens
aaaaattagcctgcg

SEQ ID NO: 1213912 - DNA, 15 bp, Homo sapiens
caaaaattagcctgc

SEQ ID NO: 1213913 - DNA, 15 bp, Homo sapiens
ttggccaacatggtg

SEQ ID NO: 1213914 - DNA, 15 bp, Homo sapiens
cttggccaacatggt

SEQ ID NO: 1213915 - DNA, 15 bp, Homo sapiens
ccttggccaacatgg

SEQ ID NO: 1213916 - DNA, 15 bp, Homo sapiens
accttggccaacatg

SEQ ID NO: 1213917 - DNA, 15 bp, Homo sapiens
caccttggccaacat

SEQ ID NO: 1213918 - DNA, 15 bp, Homo sapiens
ccaccttggccaaca

SEQ ID NO: 1213919 - DNA, 15 bp, Homo sapiens
accaccttggccaac

SEQ ID NO: 1213920 - DNA, 15 bp, Homo sapiens
gaccaccttggccaa

SEQ ID NO: 1213921 - DNA, 15 bp, Homo sapiens
agaccaccttggcca

SEQ ID NO: 1213922 - DNA, 15 bp, Homo sapiens
aagaccaccttggcc

SEQ ID NO: 1213923 - DNA, 15 bp, Homo sapiens
caagaccaccttggc

SEQ ID NO: 1213924 - DNA, 15 bp, Homo sapiens
tcaagaccaccttgg

SEQ ID NO: 1213925 - DNA, 15 bp, Homo sapiens
ttcaagaccaccttg

SEQ ID NO: 1213926 - DNA, 15 bp, Homo sapiens
gttcaagaccacctt

SEQ ID NO: 1213927 - DNA, 15 bp, Homo sapiens
agttcaagaccacct

SEQ ID NO: 1213928 - DNA, 15 bp, Homo sapiens
gagttcaagaccacc

SEQ ID NO: 1213929 - DNA, 15 bp, Homo sapiens
ggagttcaagaccac

SEQ ID NO: 1213930 - DNA, 15 bp, Homo sapiens
ttcagcctcccgagt

SEQ ID NO: 1213931 - DNA, 15 bp, Homo sapiens
cttcagcctcccgag

SEQ ID NO: 1213932 - DNA, 15 bp, Homo sapiens
gcttcagcctcccga

SEQ ID NO: 1213933 - DNA, 15 bp, Homo sapiens
tgcttcagcctcccg

SEQ ID NO: 1213934 - DNA, 15 bp, Homo sapiens
ttgcttcagcctccc

SEQ ID NO: 1213935 - DNA, 15 bp, Homo sapiens
cttgcttcagcctcc

SEQ ID NO: 1213936 - DNA, 15 bp, Homo sapiens
ttctcttgcttcagc

SEQ ID NO: 1213937 - DNA, 15 bp, Homo sapiens
attctcttgcttcag

SEQ ID NO: 1213938 - DNA, 15 bp, Homo sapiens
gattctcttgcttca

SEQ ID NO: 1213939 - DNA, 15 bp, Homo sapiens
cgattctcttgcttc

SEQ ID NO: 1213940 - DNA, 15 bp, Homo sapiens
acgattctcttgctt

SEQ ID NO: 1213941 - DNA, 15 bp, Homo sapiens
aacgattctcttgct

SEQ ID NO: 1213942 - DNA, 15 bp, Homo sapiens
aaacgattctcttgc

SEQ ID NO: 1213943 - DNA, 15 bp, Homo sapiens
caaacgattctcttg

SEQ ID NO: 1213944 - DNA, 15 bp, Homo sapiens
tcaaacgattctctt

SEQ ID NO: 1213945 - DNA, 15 bp, Homo sapiens
ttcaaacgattctct

SEQ ID NO: 1213946 - DNA, 15 bp, Homo sapiens
gttcaaacgattctc

SEQ ID NO: 1213947 - DNA, 15 bp, Homo sapiens
ggttcaaacgattct

SEQ ID NO: 1213948 - DNA, 15 bp, Homo sapiens
gggttcaaacgattc

SEQ ID NO: 1213949 - DNA, 15 bp, Homo sapiens
tgggttcaaacgatt

SEQ ID NO: 1213950 - DNA, 15 bp, Homo sapiens
ctgggttcaaacgat

SEQ ID NO: 1213951 - DNA, 15 bp, Homo sapiens
cctgggttcaaacga

SEQ ID NO: 1213952 - DNA, 15 bp, Homo sapiens
tcctgggttcaaacg

SEQ ID NO: 1213953 - DNA, 15 bp, Homo sapiens
ctcctgggttcaaac

SEQ ID NO: 1213954 - DNA, 15 bp, Homo sapiens
gtccacctcctgggt

SEQ ID NO: 1213955 - DNA, 15 bp, Homo sapiens
cgtccacctcctggg

SEQ ID NO: 1213956 - DNA, 15 bp, Homo sapiens
acgtccacctcctgg

SEQ ID NO: 1213957 - DNA, 15 bp, Homo sapiens
aacgtccacctcctg

SEQ ID NO: 1213958 - DNA, 15 bp, Homo sapiens
caacgtccacctcct

SEQ ID NO: 1213959 - DNA, 15 bp, Homo sapiens
gcaacgtccacctcc

SEQ ID NO: 1213960 - DNA, 15 bp, Homo sapiens
tgcaacgtccacctc

SEQ ID NO: 1213961 - DNA, 15 bp, Homo sapiens
ctgcaacgtccacct

SEQ ID NO: 1213962 - DNA, 15 bp, Homo sapiens
actgcaacgtccacc

SEQ ID NO: 1213963 - DNA, 15 bp, Homo sapiens
cactgcaacgtccac

SEQ ID NO: 1213964 - DNA, 15 bp, Homo sapiens
tcactgcaacgtcca

SEQ ID NO: 1213965 - DNA, 15 bp, Homo sapiens
cggctcactgcaacg

SEQ ID NO: 1213966 - DNA, 15 bp, Homo sapiens
cccaatctcggctca

SEQ ID NO: 1213967 - DNA, 15 bp, Homo sapiens
gcccaatctcggctc

SEQ ID NO: 1213968 - DNA, 15 bp, Homo sapiens
ggcccaatctcggct

SEQ ID NO: 1213969 - DNA, 15 bp, Homo sapiens
tggcccaatctcggc

SEQ ID NO: 1213970 - DNA, 15 bp, Homo sapiens
gtggcccaatctcgg

SEQ ID NO: 1213971 - DNA, 15 bp, Homo sapiens
agtggcccaatctcg

SEQ ID NO: 1213972 - DNA, 15 bp, Homo sapiens
cagtggcccaatctc

SEQ ID NO: 1213973 - DNA, 15 bp, Homo sapiens
acagtggcccaatct

SEQ ID NO: 1213974 - DNA, 15 bp, Homo sapiens
tacagtggcccaatc

SEQ ID NO: 1213975 - DNA, 15 bp, Homo sapiens
gtacagtggcccaat

SEQ ID NO: 1213976 - DNA, 15 bp, Homo sapiens
agtacagtggcccaa

SEQ ID NO: 1213977 - DNA, 15 bp, Homo sapiens
gagtacagtggccca

SEQ ID NO: 1213978 - DNA, 15 bp, Homo sapiens
ggagtacagtggccc

SEQ ID NO: 1213979 - DNA, 15 bp, Homo sapiens
tggagtacagtggcc

SEQ ID NO: 1213980 - DNA, 15 bp, Homo sapiens
cttttgttgcccagg

SEQ ID NO: 1213981 - DNA, 15 bp, Homo sapiens
acttttgttgcccag

SEQ ID NO: 1213982 - DNA, 15 bp, Homo sapiens
cacttttgttgccca

SEQ ID NO: 1213983 - DNA, 15 bp, Homo sapiens
tcacttttgttgccc

SEQ ID NO: 1213984 - DNA, 15 bp, Homo sapiens
ttcacttttgttgcc

SEQ ID NO: 1213985 - DNA, 15 bp, Homo sapiens
tttcacttttgttgc

SEQ ID NO: 1213986 - DNA, 15 bp, Homo sapiens
gtttcacttttgttg

SEQ ID NO: 1213987 - DNA, 15 bp, Homo sapiens
agtttcacttttgtt

SEQ ID NO: 1213988 - DNA, 15 bp, Homo sapiens
gagtttcacttttgt

SEQ ID NO: 1213989 - DNA, 15 bp, Homo sapiens
agagtttcacttttg

SEQ ID NO: 1213990 - DNA, 15 bp, Homo sapiens
cagagtttcactttt

SEQ ID NO: 1213991 - DNA, 15 bp, Homo sapiens
acagagtttcacttt

SEQ ID NO: 1213992 - DNA, 15 bp, Homo sapiens
gacagagtttcactt

SEQ ID NO: 1213993 - DNA, 15 bp, Homo sapiens
cagacagagtttcac

SEQ ID NO: 1213994 - DNA, 15 bp, Homo sapiens
tcagacagagtttca

SEQ ID NO: 1213995 - DNA, 15 bp, Homo sapiens
ttcagacagagtttc

SEQ ID NO: 1213996 - DNA, 15 bp, Homo sapiens
tttcagacagagttt

SEQ ID NO: 1213997 - DNA, 15 bp, Homo sapiens
gtttcagacagagtt

SEQ ID NO: 1213998 - DNA, 15 bp, Homo sapiens
tgtttcagacagagt

SEQ ID NO: 1213999 - DNA, 15 bp, Homo sapiens
ttgtttcagacagag

SEQ ID NO: 1214000 - DNA, 15 bp, Homo sapiens
tttgtttcagacaga

SEQ ID NO: 1214001 - DNA, 15 bp, Homo sapiens
gtttgtttcagacag

SEQ ID NO: 1214002 - DNA, 15 bp, Homo sapiens
tgtttgtttcagaca

SEQ ID NO: 1214003 - DNA, 15 bp, Homo sapiens
ttgtttgtttcagac

SEQ ID NO: 1214004 - DNA, 15 bp, Homo sapiens
gtttgtttgtttcag

SEQ ID NO: 1214005 - DNA, 15 bp, Homo sapiens
ctgtttgtttgtttg

SEQ ID NO: 1214006 - DNA, 15 bp, Homo sapiens
gtctgtttgtttgtt

SEQ ID NO: 1214007 - DNA, 15 bp, Homo sapiens
tgtctgtttgtttgt

SEQ ID NO: 1214008 - DNA, 15 bp, Homo sapiens
ttgtctgtttgtttg

SEQ ID NO: 1214009 - DNA, 15 bp, Homo sapiens
gtttgtctgtttgtt

SEQ ID NO: 1214010 - DNA, 15 bp, Homo sapiens
tgtttgtctgtttgt

SEQ ID NO: 1214011 - DNA, 15 bp, Homo sapiens
ttgtttgtctgtttg

SEQ ID NO: 1214012 - DNA, 15 bp, Homo sapiens
tttgtttgtctgttt

SEQ ID NO: 1214013 - DNA, 15 bp, Homo sapiens
ttttgtttgtctgtt

SEQ ID NO: 1214014 - DNA, 15 bp, Homo sapiens
tttttgtttgtctgt

SEQ ID NO: 1214015 - DNA, 15 bp, Homo sapiens
ttttttgtttgtctg

SEQ ID NO: 1214016 - DNA, 15 bp, Homo sapiens
tttttttgtttgtct

SEQ ID NO: 1214017 - DNA, 15 bp, Homo sapiens
gtttttttgtttgtc

SEQ ID NO: 1214018 - DNA, 15 bp, Homo sapiens
agtttttttgtttgt

SEQ ID NO: 1214019 - DNA, 15 bp, Homo sapiens
tagtttttttgtttg

SEQ ID NO: 1214020 - DNA, 15 bp, Homo sapiens
ctagtttttttgttt

SEQ ID NO: 1214021 - DNA, 15 bp, Homo sapiens
actagtttttttgtt

SEQ ID NO: 1214022 - DNA, 15 bp, Homo sapiens
aactagtttttttgt

SEQ ID NO: 1214023 - DNA, 15 bp, Homo sapiens
caactagtttttttg

SEQ ID NO: 1214024 - DNA, 15 bp, Homo sapiens
acaactagttttttt

SEQ ID NO: 1214025 - DNA, 15 bp, Homo sapiens
cacaactagtttttt

SEQ ID NO: 1214026 - DNA, 15 bp, Homo sapiens
tccacaactagtttt

SEQ ID NO: 1214027 - DNA, 15 bp, Homo sapiens
ctccacaactagttt

SEQ ID NO: 1214028 - DNA, 15 bp, Homo sapiens
tctccacaactagtt

SEQ ID NO: 1214029 - DNA, 15 bp, Homo sapiens
ctctccacaactagt

SEQ ID NO: 1214030 - DNA, 15 bp, Homo sapiens
tctctccacaactag

SEQ ID NO: 1214031 - DNA, 15 bp, Homo sapiens
ctctctccacaacta

SEQ ID NO: 1214032 - DNA, 15 bp, Homo sapiens
cctctctccacaact

SEQ ID NO: 1214033 - DNA, 15 bp, Homo sapiens
ccctctctccacaac

SEQ ID NO: 1214034 - DNA, 15 bp, Homo sapiens
accctctctccacaa

SEQ ID NO: 1214035 - DNA, 15 bp, Homo sapiens
caccctctctccaca

SEQ ID NO: 1214036 - DNA, 15 bp, Homo sapiens
ccaccctctctccac

SEQ ID NO: 1214037 - DNA, 15 bp, Homo sapiens
gccaccctctctcca

SEQ ID NO: 1214038 - DNA, 15 bp, Homo sapiens
ggccaccctctctcc

SEQ ID NO: 1214039 - DNA, 15 bp, Homo sapiens
aggccaccctctctc

SEQ ID NO: 1214040 - DNA, 15 bp, Homo sapiens
caggccaccctctct

SEQ ID NO: 1214041 - DNA, 15 bp, Homo sapiens
acaggccaccctctc

SEQ ID NO: 1214042 - DNA, 15 bp, Homo sapiens
cacaggccaccctct

SEQ ID NO: 1214043 - DNA, 15 bp, Homo sapiens
acacaggccaccctc

SEQ ID NO: 1214044 - DNA, 15 bp, Homo sapiens
gacacaggccaccct

SEQ ID NO: 1214045 - DNA, 15 bp, Homo sapiens
agacacaggccaccc

SEQ ID NO: 1214046 - DNA, 15 bp, Homo sapiens
gagacacaggccacc

SEQ ID NO: 1214047 - DNA, 15 bp, Homo sapiens
tgagacacaggccac

SEQ ID NO: 1214048 - DNA, 15 bp, Homo sapiens
atgagacacaggcca

SEQ ID NO: 1214049 - DNA, 15 bp, Homo sapiens
gatgagacacaggcc

SEQ ID NO: 1214050 - DNA, 15 bp, Homo sapiens
ggatgagacacaggc

SEQ ID NO: 1214051 - DNA, 15 bp, Homo sapiens
gggatgagacacagg

SEQ ID NO: 1214052 - DNA, 15 bp, Homo sapiens
tgggatgagacacag

SEQ ID NO: 1214053 - DNA, 15 bp, Homo sapiens
ctgggatgagacaca

SEQ ID NO: 1214054 - DNA, 15 bp, Homo sapiens
actgggatgagacac

SEQ ID NO: 1214055 - DNA, 15 bp, Homo sapiens
cactgggatgagaca

SEQ ID NO: 1214056 - DNA, 15 bp, Homo sapiens
acactgggatgagac

SEQ ID NO: 1214057 - DNA, 15 bp, Homo sapiens
aacactgggatgaga

SEQ ID NO: 1214058 - DNA, 15 bp, Homo sapiens
aaacactgggatgag

SEQ ID NO: 1214059 - DNA, 15 bp, Homo sapiens
taaacactgggatga

SEQ ID NO: 1214060 - DNA, 15 bp, Homo sapiens
ttaaacactgggatg

SEQ ID NO: 1214061 - DNA, 15 bp, Homo sapiens
gttaaacactgggat

SEQ ID NO: 1214062 - DNA, 15 bp, Homo sapiens
cgttaaacactggga

SEQ ID NO: 1214063 - DNA, 15 bp, Homo sapiens
ccgttaaacactggg

SEQ ID NO: 1214064 - DNA, 15 bp, Homo sapiens
cccgttaaacactgg

SEQ ID NO: 1214065 - DNA, 15 bp, Homo sapiens
tcccgttaaacactg

SEQ ID NO: 1214066 - DNA, 15 bp, Homo sapiens
atcccgttaaacact

SEQ ID NO: 1214067 - DNA, 15 bp, Homo sapiens
aatcccgttaaacac

SEQ ID NO: 1214068 - DNA, 15 bp, Homo sapiens
aaatcccgttaaaca

SEQ ID NO: 1214069 - DNA, 15 bp, Homo sapiens
caaatcccgttaaac

SEQ ID NO: 1214070 - DNA, 15 bp, Homo sapiens
acaaatcccgttaaa

SEQ ID NO: 1214071 - DNA, 15 bp, Homo sapiens
gacaaatcccgttaa

SEQ ID NO: 1214072 - DNA, 15 bp, Homo sapiens
tgacaaatcccgtta

SEQ ID NO: 1214073 - DNA, 15 bp, Homo sapiens
atgacaaatcccgtt

SEQ ID NO: 1214074 - DNA, 15 bp, Homo sapiens
gatgacaaatcccgt

SEQ ID NO: 1214075 - DNA, 15 bp, Homo sapiens
agatgacaaatcccg

SEQ ID NO: 1214076 - DNA, 15 bp, Homo sapiens
aagatgacaaatccc

SEQ ID NO: 1214077 - DNA, 15 bp, Homo sapiens
gaagatgacaaatcc

SEQ ID NO: 1214078 - DNA, 15 bp, Homo sapiens
ggaagatgacaaatc

SEQ ID NO: 1214079 - DNA, 15 bp, Homo sapiens
aggaagatgacaaat

SEQ ID NO: 1214080 - DNA, 15 bp, Homo sapiens
aaggaagatgacaaa

SEQ ID NO: 1214081 - DNA, 15 bp, Homo sapiens
caaggaagatgacaa

SEQ ID NO: 1214082 - DNA, 15 bp, Homo sapiens
gcaaggaagatgaca

SEQ ID NO: 1214083 - DNA, 15 bp, Homo sapiens
agcaaggaagatgac

SEQ ID NO: 1214084 - DNA, 15 bp, Homo sapiens
cagcaaggaagatga

SEQ ID NO: 1214085 - DNA, 15 bp, Homo sapiens
gcagcaaggaagatg

SEQ ID NO: 1214086 - DNA, 15 bp, Homo sapiens
ggcagcaaggaagat

SEQ ID NO: 1214087 - DNA, 15 bp, Homo sapiens
aggcagcaaggaaga

SEQ ID NO: 1214088 - DNA, 15 bp, Homo sapiens
caggcagcaaggaag

SEQ ID NO: 1214089 - DNA, 15 bp, Homo sapiens
acaggcagcaaggaa

SEQ ID NO: 1214090 - DNA, 15 bp, Homo sapiens
aacaggcagcaagga

SEQ ID NO: 1214091 - DNA, 15 bp, Homo sapiens
aaacaggcagcaagg

SEQ ID NO: 1214092 - DNA, 15 bp, Homo sapiens
taaacaggcagcaag

SEQ ID NO: 1214093 - DNA, 15 bp, Homo sapiens
ctaaacaggcagcaa

SEQ ID NO: 1214094 - DNA, 15 bp, Homo sapiens
cctaaacaggcagca

SEQ ID NO: 1214095 - DNA, 15 bp, Homo sapiens
tcctaaacaggcagc

SEQ ID NO: 1214096 - DNA, 15 bp, Homo sapiens
gtcctaaacaggcag

SEQ ID NO: 1214097 - DNA, 15 bp, Homo sapiens
tgtcctaaacaggca

SEQ ID NO: 1214098 - DNA, 15 bp, Homo sapiens
ttgtcctaaacaggc

SEQ ID NO: 1214099 - DNA, 15 bp, Homo sapiens
tttgtcctaaacagg

SEQ ID NO: 1214100 - DNA, 15 bp, Homo sapiens
ctttgtcctaaacag

SEQ ID NO: 1214101 - DNA, 15 bp, Homo sapiens
actttgtcctaaaca

SEQ ID NO: 1214102 - DNA, 15 bp, Homo sapiens
tactttgtcctaaac

SEQ ID NO: 1214103 - DNA, 15 bp, Homo sapiens
atactttgtcctaaa

SEQ ID NO: 1214104 - DNA, 15 bp, Homo sapiens
aatactttgtcctaa

SEQ ID NO: 1214105 - DNA, 15 bp, Homo sapiens
aaatactttgtccta

SEQ ID NO: 1214106 - DNA, 15 bp, Homo sapiens
aaaatactttgtcct

SEQ ID NO: 1214107 - DNA, 15 bp, Homo sapiens
caaaatactttgtcc

SEQ ID NO: 1214108 - DNA, 15 bp, Homo sapiens
ccaaaatactttgtc

SEQ ID NO: 1214109 - DNA, 15 bp, Homo sapiens
tccaaaatactttgt

SEQ ID NO: 1214110 - DNA, 15 bp, Homo sapiens
gtccaaaatactttg

SEQ ID NO: 1214111 - DNA, 15 bp, Homo sapiens
tgtccaaaatacttt

SEQ ID NO: 1214112 - DNA, 15 bp, Homo sapiens
ctgtccaaaatactt

SEQ ID NO: 1214113 - DNA, 15 bp, Homo sapiens
tctgtccaaaatact

SEQ ID NO: 1214114 - DNA, 15 bp, Homo sapiens
atctgtccaaaatac

SEQ ID NO: 1214115 - DNA, 15 bp, Homo sapiens
tatctgtccaaaata

SEQ ID NO: 1214116 - DNA, 15 bp, Homo sapiens
atatctgtccaaaat

SEQ ID NO: 1214117 - DNA, 15 bp, Homo sapiens
gatatctgtccaaaa

SEQ ID NO: 1214118 - DNA, 15 bp, Homo sapiens
tgatatctgtccaaa

SEQ ID NO: 1214119 - DNA, 15 bp, Homo sapiens
atgatatctgtccaa

SEQ ID NO: 1214120 - DNA, 15 bp, Homo sapiens
gatgatatctgtcca

SEQ ID NO: 1214121 - DNA, 15 bp, Homo sapiens
tgatgatatctgtcc

SEQ ID NO: 1214122 - DNA, 15 bp, Homo sapiens
ttgatgatatctgtc

SEQ ID NO: 1214123 - DNA, 15 bp, Homo sapiens
gttgatgatatctgt

SEQ ID NO: 1214124 - DNA, 15 bp, Homo sapiens
cgttgatgatatctg

SEQ ID NO: 1214125 - DNA, 15 bp, Homo sapiens
tcgttgatgatatct

SEQ ID NO: 1214126 - DNA, 15 bp, Homo sapiens
ttcgttgatgatatc

SEQ ID NO: 1214127 - DNA, 15 bp, Homo sapiens
cttcgttgatgatat

SEQ ID NO: 1214128 - DNA, 15 bp, Homo sapiens
gcttcgttgatgata

SEQ ID NO: 1214129 - DNA, 15 bp, Homo sapiens
ggcttcgttgatgat

SEQ ID NO: 1214130 - DNA, 15 bp, Homo sapiens
tggcttcgttgatga

SEQ ID NO: 1214131 - DNA, 15 bp, Homo sapiens
atggcttcgttgatg

SEQ ID NO: 1214132 - DNA, 15 bp, Homo sapiens
aatggcttcgttgat

SEQ ID NO: 1214133 - DNA, 15 bp, Homo sapiens
aaatggcttcgttga

SEQ ID NO: 1214134 - DNA, 15 bp, Homo sapiens
aaaatggcttcgttg

SEQ ID NO: 1214135 - DNA, 15 bp, Homo sapiens
gaaaatggcttcgtt

SEQ ID NO: 1214136 - DNA, 15 bp, Homo sapiens
tgaaaatggcttcgt

SEQ ID NO: 1214137 - DNA, 15 bp, Homo sapiens
ctgaaaatggcttcg

SEQ ID NO: 1214138 - DNA, 15 bp, Homo sapiens
actgaaaatggcttc

SEQ ID NO: 1214139 - DNA, 15 bp, Homo sapiens
cactgaaaatggctt

SEQ ID NO: 1214140 - DNA, 15 bp, Homo sapiens
gcactgaaaatggct

SEQ ID NO: 1214141 - DNA, 15 bp, Homo sapiens
ggcactgaaaatggc

SEQ ID NO: 1214142 - DNA, 15 bp, Homo sapiens
tggcactgaaaatgg

SEQ ID NO: 1214143 - DNA, 15 bp, Homo sapiens
ttggcactgaaaatg

SEQ ID NO: 1214144 - DNA, 15 bp, Homo sapiens
gttggcactgaaaat

SEQ ID NO: 1214145 - DNA, 15 bp, Homo sapiens
ggttggcactgaaaa

SEQ ID NO: 1214146 - DNA, 15 bp, Homo sapiens
cggttggcactgaaa

SEQ ID NO: 1214147 - DNA, 15 bp, Homo sapiens
gcggttggcactgaa

SEQ ID NO: 1214148 - DNA, 15 bp, Homo sapiens
ggcggttggcactga

SEQ ID NO: 1214149 - DNA, 15 bp, Homo sapiens
aggcggttggcactg

SEQ ID NO: 1214150 - DNA, 15 bp, Homo sapiens
gaggcggttggcact

SEQ ID NO: 1214151 - DNA, 15 bp, Homo sapiens
tgaggcggttggcac

SEQ ID NO: 1214152 - DNA, 15 bp, Homo sapiens
gtgaggcggttggca

SEQ ID NO: 1214153 - DNA, 15 bp, Homo sapiens
tgtgaggcggttggc

SEQ ID NO: 1214154 - DNA, 15 bp, Homo sapiens
ctgtgaggcggttgg

SEQ ID NO: 1214155 - DNA, 15 bp, Homo sapiens
cctgtgaggcggttg

SEQ ID NO: 1214156 - DNA, 15 bp, Homo sapiens
acctgtgaggcggtt

SEQ ID NO: 1214157 - DNA, 15 bp, Homo sapiens
aacctgtgaggcggt

SEQ ID NO: 1214158 - DNA, 15 bp, Homo sapiens
ggaacctgtgaggcg

SEQ ID NO: 1214159 - DNA, 15 bp, Homo sapiens
cggaacctgtgaggc

SEQ ID NO: 1214160 - DNA, 15 bp, Homo sapiens
tcggaacctgtgagg

SEQ ID NO: 1214161 - DNA, 15 bp, Homo sapiens
atcggaacctgtgag

SEQ ID NO: 1214162 - DNA, 15 bp, Homo sapiens
catcggaacctgtga

SEQ ID NO: 1214163 - DNA, 15 bp, Homo sapiens
acatcggaacctgtg

SEQ ID NO: 1214164 - DNA, 15 bp, Homo sapiens
gacatcggaacctgt

SEQ ID NO: 1214165 - DNA, 15 bp, Homo sapiens
tgacatcggaacctg

SEQ ID NO: 1214166 - DNA, 15 bp, Homo sapiens
ttgacatcggaacct

SEQ ID NO: 1214167 - DNA, 15 bp, Homo sapiens
gttgacatcggaacc

SEQ ID NO: 1214168 - DNA, 15 bp, Homo sapiens
agttgacatcggaac

SEQ ID NO: 1214169 - DNA, 15 bp, Homo sapiens
aagttgacatcggaa

SEQ ID NO: 1214170 - DNA, 15 bp, Homo sapiens
caagttgacatcgga

SEQ ID NO: 1214171 - DNA, 15 bp, Homo sapiens
acaagttgacatcgg

SEQ ID NO: 1214172 - DNA, 15 bp, Homo sapiens
aacaagttgacatcg

SEQ ID NO: 1214173 - DNA, 15 bp, Homo sapiens
caacaagttgacatc

SEQ ID NO: 1214174 - DNA, 15 bp, Homo sapiens
ccaacaagttgacat

SEQ ID NO: 1214175 - DNA, 15 bp, Homo sapiens
gccaacaagttgaca

SEQ ID NO: 1214176 - DNA, 15 bp, Homo sapiens
agccaacaagttgac

SEQ ID NO: 1214177 - DNA, 15 bp, Homo sapiens
cagccaacaagttga

SEQ ID NO: 1214178 - DNA, 15 bp, Homo sapiens
tcagccaacaagttg

SEQ ID NO: 1214179 - DNA, 15 bp, Homo sapiens
ttcagccaacaagtt

SEQ ID NO: 1214180 - DNA, 15 bp, Homo sapiens
tttcagccaacaagt

SEQ ID NO: 1214181 - DNA, 15 bp, Homo sapiens
ttttcagccaacaag

SEQ ID NO: 1214182 - DNA, 15 bp, Homo sapiens
gttttcagccaacaa

SEQ ID NO: 1214183 - DNA, 15 bp, Homo sapiens
ggttttcagccaaca

SEQ ID NO: 1214184 - DNA, 15 bp, Homo sapiens
aggttttcagccaac

SEQ ID NO: 1214185 - DNA, 15 bp, Homo sapiens
taggttttcagccaa

SEQ ID NO: 1214186 - DNA, 15 bp, Homo sapiens
gtaggttttcagcca

SEQ ID NO: 1214187 - DNA, 15 bp, Homo sapiens
agtaggttttcagcc

SEQ ID NO: 1214188 - DNA, 15 bp, Homo sapiens
cagtaggttttcagc

SEQ ID NO: 1214189 - DNA, 15 bp, Homo sapiens
acagtaggttttcag

SEQ ID NO: 1214190 - DNA, 15 bp, Homo sapiens
gacagtaggttttca

SEQ ID NO: 1214191 - DNA, 15 bp, Homo sapiens
ggacagtaggttttc

SEQ ID NO: 1214192 - DNA, 15 bp, Homo sapiens
gggacagtaggtttt

SEQ ID NO: 1214193 - DNA, 15 bp, Homo sapiens
ggggacagtaggttt

SEQ ID NO: 1214194 - DNA, 15 bp, Homo sapiens
tggggacagtaggtt

SEQ ID NO: 1214195 - DNA, 15 bp, Homo sapiens
ctggggacagtaggt

SEQ ID NO: 1214196 - DNA, 15 bp, Homo sapiens
tctggggacagtagg

SEQ ID NO: 1214197 - DNA, 15 bp, Homo sapiens
ctctggggacagtag

SEQ ID NO: 1214198 - DNA, 15 bp, Homo sapiens
cctctggggacagta

SEQ ID NO: 1214199 - DNA, 15 bp, Homo sapiens
tcctctggggacagt

SEQ ID NO: 1214200 - DNA, 15 bp, Homo sapiens
atcctctggggacag

SEQ ID NO: 1214201 - DNA, 15 bp, Homo sapiens
tatcctctggggaca

SEQ ID NO: 1214202 - DNA, 15 bp, Homo sapiens
atatcctctggggac

SEQ ID NO: 1214203 - DNA, 15 bp, Homo sapiens
catatcctctgggga

SEQ ID NO: 1214204 - DNA, 15 bp, Homo sapiens
ccatatcctctgggg

SEQ ID NO: 1214205 - DNA, 15 bp, Homo sapiens
accatatcctctggg

SEQ ID NO: 1214206 - DNA, 15 bp, Homo sapiens
aaccatatcctctgg

SEQ ID NO: 1214207 - DNA, 15 bp, Homo sapiens
gaaccatatcctctg

SEQ ID NO: 1214208 - DNA, 15 bp, Homo sapiens
agaaccatatcctct

SEQ ID NO: 1214209 - DNA, 15 bp, Homo sapiens
gagaaccatatcctc

SEQ ID NO: 1214210 - DNA, 15 bp, Homo sapiens
agagaaccatatcct

SEQ ID NO: 1214211 - DNA, 15 bp, Homo sapiens
aagagaaccatatcc

SEQ ID NO: 1214212 - DNA, 15 bp, Homo sapiens
gaagagaaccatatc

SEQ ID NO: 1214213 - DNA, 15 bp, Homo sapiens
ggaagagaaccatat

SEQ ID NO: 1214214 - DNA, 15 bp, Homo sapiens
tggaagagaaccata

SEQ ID NO: 1214215 - DNA, 15 bp, Homo sapiens
gtggaagagaaccat

SEQ ID NO: 1214216 - DNA, 15 bp, Homo sapiens
tgtggaagagaacca

SEQ ID NO: 1214217 - DNA, 15 bp, Homo sapiens
ttgtggaagagaacc

SEQ ID NO: 1214218 - DNA, 15 bp, Homo sapiens
gttgtggaagagaac

SEQ ID NO: 1214219 - DNA, 15 bp, Homo sapiens
ggttgtggaagagaa

SEQ ID NO: 1214220 - DNA, 15 bp, Homo sapiens
aggttgtggaagaga

SEQ ID NO: 1214221 - DNA, 15 bp, Homo sapiens
gaggttgtggaagag

SEQ ID NO: 1214222 - DNA, 15 bp, Homo sapiens
tgaggttgtggaaga

SEQ ID NO: 1214223 - DNA, 15 bp, Homo sapiens
gtgaggttgtggaag

SEQ ID NO: 1214224 - DNA, 15 bp, Homo sapiens
ggtgaggttgtggaa

SEQ ID NO: 1214225 - DNA, 15 bp, Homo sapiens
gggtgaggttgtgga

SEQ ID NO: 1214226 - DNA, 15 bp, Homo sapiens
tgggtgaggttgtgg

SEQ ID NO: 1214227 - DNA, 15 bp, Homo sapiens
ctgggtgaggttgtg

SEQ ID NO: 1214228 - DNA, 15 bp, Homo sapiens
gctgggtgaggttgt

SEQ ID NO: 1214229 - DNA, 15 bp, Homo sapiens
ggctgggtgaggttg

SEQ ID NO: 1214230 - DNA, 15 bp, Homo sapiens
tggctgggtgaggtt

SEQ ID NO: 1214231 - DNA, 15 bp, Homo sapiens
cttggctgggtgagg

SEQ ID NO: 1214232 - DNA, 15 bp, Homo sapiens
tcttggctgggtgag

SEQ ID NO: 1214233 - DNA, 15 bp, Homo sapiens
ctcttggctgggtga

SEQ ID NO: 1214234 - DNA, 15 bp, Homo sapiens
cctcttggctgggtg

SEQ ID NO: 1214235 - DNA, 15 bp, Homo sapiens
acctcttggctgggt

SEQ ID NO: 1214236 - DNA, 15 bp, Homo sapiens
tacctcttggctggg

SEQ ID NO: 1214237 - DNA, 15 bp, Homo sapiens
ttacctcttggctgg

SEQ ID NO: 1214238 - DNA, 15 bp, Homo sapiens
cttacctcttggctg

SEQ ID NO: 1214239 - DNA, 15 bp, Homo sapiens
ccttacctcttggct

SEQ ID NO: 1214240 - DNA, 15 bp, Homo sapiens
cccttacctcttggc

SEQ ID NO: 1214241 - DNA, 15 bp, Homo sapiens
acccttacctcttgg

SEQ ID NO: 1214242 - DNA, 15 bp, Homo sapiens
cacccttacctcttg

SEQ ID NO: 1214243 - DNA, 15 bp, Homo sapiens
ccacccttacctctt

SEQ ID NO: 1214244 - DNA, 15 bp, Homo sapiens
cccacccttacctct

SEQ ID NO: 1214245 - DNA, 15 bp, Homo sapiens
acccacccttacctc

SEQ ID NO: 1214246 - DNA, 15 bp, Homo sapiens
gacccacccttacct

SEQ ID NO: 1214247 - DNA, 15 bp, Homo sapiens
tgacccacccttacc

SEQ ID NO: 1214248 - DNA, 15 bp, Homo sapiens
ctgacccacccttac

SEQ ID NO: 1214249 - DNA, 15 bp, Homo sapiens
gctgacccaccctta

SEQ ID NO: 1214250 - DNA, 15 bp, Homo sapiens
ggctgacccaccctt

SEQ ID NO: 1214251 - DNA, 15 bp, Homo sapiens
gggctgacccaccct

SEQ ID NO: 1214252 - DNA, 15 bp, Homo sapiens
ggggctgacccaccc

SEQ ID NO: 1214253 - DNA, 15 bp, Homo sapiens
tggggctgacccacc

SEQ ID NO: 1214254 - DNA, 15 bp, Homo sapiens
gtggggctgacccac

SEQ ID NO: 1214255 - DNA, 15 bp, Homo sapiens
ggtggggctgaccca

SEQ ID NO: 1214256 - DNA, 15 bp, Homo sapiens
gggtggggctgaccc

SEQ ID NO: 1214257 - DNA, 15 bp, Homo sapiens
ggggtggggctgacc

SEQ ID NO: 1214258 - DNA, 15 bp, Homo sapiens
gggggtggggctgac

SEQ ID NO: 1214259 - DNA, 15 bp, Homo sapiens
ggggggtggggctga

SEQ ID NO: 1214260 - DNA, 15 bp, Homo sapiens
gggggggtggggctg

SEQ ID NO: 1214261 - DNA, 15 bp, Homo sapiens
tgggggggtggggct

SEQ ID NO: 1214262 - DNA, 15 bp, Homo sapiens
ttgggggggtggggc

SEQ ID NO: 1214263 - DNA, 15 bp, Homo sapiens
gttgggggggtgggg

SEQ ID NO: 1214264 - DNA, 15 bp, Homo sapiens
ggttgggggggtggg

SEQ ID NO: 1214265 - DNA, 15 bp, Homo sapiens
aggttgggggggtgg

SEQ ID NO: 1214266 - DNA, 15 bp, Homo sapiens
aaggttgggggggtg

SEQ ID NO: 1214267 - DNA, 15 bp, Homo sapiens
caaggttgggggggt

SEQ ID NO: 1214268 - DNA, 15 bp, Homo sapiens
tcaaggttggggggg

SEQ ID NO: 1214269 - DNA, 15 bp, Homo sapiens
ttcaaggttgggggg

SEQ ID NO: 1214270 - DNA, 15 bp, Homo sapiens
tttcaaggttggggg

SEQ ID NO: 1214271 - DNA, 15 bp, Homo sapiens
gtttcaaggttgggg

SEQ ID NO: 1214272 - DNA, 15 bp, Homo sapiens
ggtttcaaggttggg

SEQ ID NO: 1214273 - DNA, 15 bp, Homo sapiens
aggtttcaaggttgg

SEQ ID NO: 1214274 - DNA, 15 bp, Homo sapiens
gaggtttcaaggttg

SEQ ID NO: 1214275 - DNA, 15 bp, Homo sapiens
ggaggtttcaaggtt

SEQ ID NO: 1214276 - DNA, 15 bp, Homo sapiens
aggaggtttcaaggt

SEQ ID NO: 1214277 - DNA, 15 bp, Homo sapiens
aaggaggtttcaagg

SEQ ID NO: 1214278 - DNA, 15 bp, Homo sapiens
caaggaggtttcaag

SEQ ID NO: 1214279 - DNA, 15 bp, Homo sapiens
acaaggaggtttcaa

SEQ ID NO: 1214280 - DNA, 15 bp, Homo sapiens
cacaaggaggtttca

SEQ ID NO: 1214281 - DNA, 15 bp, Homo sapiens
ccacaaggaggtttc

SEQ ID NO: 1214282 - DNA, 15 bp, Homo sapiens
tccacaaggaggttt

SEQ ID NO: 1214283 - DNA, 15 bp, Homo sapiens
ttccacaaggaggtt

SEQ ID NO: 1214284 - DNA, 15 bp, Homo sapiens
tttccacaaggaggt

SEQ ID NO: 1214285 - DNA, 15 bp, Homo sapiens
gtttccacaaggagg

SEQ ID NO: 1214286 - DNA, 15 bp, Homo sapiens
agtttccacaaggag

SEQ ID NO: 1214287 - DNA, 15 bp, Homo sapiens
gagtttccacaagga

SEQ ID NO: 1214288 - DNA, 15 bp, Homo sapiens
agagtttccacaagg

SEQ ID NO: 1214289 - DNA, 15 bp, Homo sapiens
cagagtttccacaag

SEQ ID NO: 1214290 - DNA, 15 bp, Homo sapiens
ccagagtttccacaa

SEQ ID NO: 1214291 - DNA, 15 bp, Homo sapiens
tccagagtttccaca

SEQ ID NO: 1214292 - DNA, 15 bp, Homo sapiens
ttccagagtttccac

SEQ ID NO: 1214293 - DNA, 15 bp, Homo sapiens
attccagagtttcca

SEQ ID NO: 1214294 - DNA, 15 bp, Homo sapiens
cattccagagtttcc

SEQ ID NO: 1214295 - DNA, 15 bp, Homo sapiens
acattccagagtttc

SEQ ID NO: 1214296 - DNA, 15 bp, Homo sapiens
aacattccagagttt

SEQ ID NO: 1214297 - DNA, 15 bp, Homo sapiens
gaacattccagagtt

SEQ ID NO: 1214298 - DNA, 15 bp, Homo sapiens
agaacattccagagt

SEQ ID NO: 1214299 - DNA, 15 bp, Homo sapiens
cagaacattccagag

SEQ ID NO: 1214300 - DNA, 15 bp, Homo sapiens
ccagaacattccaga

SEQ ID NO: 1214301 - DNA, 15 bp, Homo sapiens
tccagaacattccag

SEQ ID NO: 1214302 - DNA, 15 bp, Homo sapiens
ttccagaacattcca

SEQ ID NO: 1214303 - DNA, 15 bp, Homo sapiens
tttccagaacattcc

SEQ ID NO: 1214304 - DNA, 15 bp, Homo sapiens
atttccagaacattc

SEQ ID NO: 1214305 - DNA, 15 bp, Homo sapiens
aatttccagaacatt

SEQ ID NO: 1214306 - DNA, 15 bp, Homo sapiens
aaatttccagaacat

SEQ ID NO: 1214307 - DNA, 15 bp, Homo sapiens
gaaatttccagaaca

SEQ ID NO: 1214308 - DNA, 15 bp, Homo sapiens
agaaatttccagaac

SEQ ID NO: 1214309 - DNA, 15 bp, Homo sapiens
cagaaatttccagaa

SEQ ID NO: 1214310 - DNA, 15 bp, Homo sapiens
ccagaaatttccaga

SEQ ID NO: 1214311 - DNA, 15 bp, Homo sapiens
tccagaaatttccag

SEQ ID NO: 1214312 - DNA, 15 bp, Homo sapiens
ttccagaaatttcca

SEQ ID NO: 1214313 - DNA, 15 bp, Homo sapiens
attccagaaatttcc

SEQ ID NO: 1214314 - DNA, 15 bp, Homo sapiens
gattccagaaatttc

SEQ ID NO: 1214315 - DNA, 15 bp, Homo sapiens
agattccagaaattt

SEQ ID NO: 1214316 - DNA, 15 bp, Homo sapiens
aagattccagaaatt

SEQ ID NO: 1214317 - DNA, 15 bp, Homo sapiens
gaagattccagaaat

SEQ ID NO: 1214318 - DNA, 15 bp, Homo sapiens
agaagattccagaaa

SEQ ID NO: 1214319 - DNA, 15 bp, Homo sapiens
cagaagattccagaa

SEQ ID NO: 1214320 - DNA, 15 bp, Homo sapiens
ccagaagattccaga

SEQ ID NO: 1214321 - DNA, 15 bp, Homo sapiens
accagaagattccag

SEQ ID NO: 1214322 - DNA, 15 bp, Homo sapiens
taccagaagattcca

SEQ ID NO: 1214323 - DNA, 15 bp, Homo sapiens
ataccagaagattcc

SEQ ID NO: 1214324 - DNA, 15 bp, Homo sapiens
tataccagaagattc

SEQ ID NO: 1214325 - DNA, 15 bp, Homo sapiens
ctataccagaagatt

SEQ ID NO: 1214326 - DNA, 15 bp, Homo sapiens
gctataccagaagat

SEQ ID NO: 1214327 - DNA, 15 bp, Homo sapiens
agctataccagaaga

SEQ ID NO: 1214328 - DNA, 15 bp, Homo sapiens
cagctataccagaag

SEQ ID NO: 1214329 - DNA, 15 bp, Homo sapiens
tcagctataccagaa

SEQ ID NO: 1214330 - DNA, 15 bp, Homo sapiens
atcagctataccaga

SEQ ID NO: 1214331 - DNA, 15 bp, Homo sapiens
catcagctataccag

SEQ ID NO: 1214332 - DNA, 15 bp, Homo sapiens
tcatcagctatacca

SEQ ID NO: 1214333 - DNA, 15 bp, Homo sapiens
atcatcagctatacc

SEQ ID NO: 1214334 - DNA, 15 bp, Homo sapiens
gatcatcagctatac

SEQ ID NO: 1214335 - DNA, 15 bp, Homo sapiens
agatcatcagctata

SEQ ID NO: 1214336 - DNA, 15 bp, Homo sapiens
gagatcatcagctat

SEQ ID NO: 1214337 - DNA, 15 bp, Homo sapiens
cgagatcatcagcta

SEQ ID NO: 1214338 - DNA, 15 bp, Homo sapiens
acgagatcatcagct

SEQ ID NO: 1214339 - DNA, 15 bp, Homo sapiens
aacgagatcatcagc

SEQ ID NO: 1214340 - DNA, 15 bp, Homo sapiens
gaacgagatcatcag

SEQ ID NO: 1214341 - DNA, 15 bp, Homo sapiens
ggaacgagatcatca

SEQ ID NO: 1214342 - DNA, 15 bp, Homo sapiens
aggaacgagatcatc

SEQ ID NO: 1214343 - DNA, 15 bp, Homo sapiens
caggaacgagatcat

SEQ ID NO: 1214344 - DNA, 15 bp, Homo sapiens
gcaggaacgagatca

SEQ ID NO: 1214345 - DNA, 15 bp, Homo sapiens
ggcaggaacgagatc

SEQ ID NO: 1214346 - DNA, 15 bp, Homo sapiens
gggcaggaacgagat

SEQ ID NO: 1214347 - DNA, 15 bp, Homo sapiens
agggcaggaacgaga

SEQ ID NO: 1214348 - DNA, 15 bp, Homo sapiens
cagggcaggaacgag

SEQ ID NO: 1214349 - DNA, 15 bp, Homo sapiens
tcagggcaggaacga

SEQ ID NO: 1214350 - DNA, 15 bp, Homo sapiens
gtcagggcaggaacg

SEQ ID NO: 1214351 - DNA, 15 bp, Homo sapiens
agtcagggcaggaac

SEQ ID NO: 1214352 - DNA, 15 bp, Homo sapiens
gagtcagggcaggaa

SEQ ID NO: 1214353 - DNA, 15 bp, Homo sapiens
ggagtcagggcagga

SEQ ID NO: 1214354 - DNA, 15 bp, Homo sapiens
cggagtcagggcagg

SEQ ID NO: 1214355 - DNA, 15 bp, Homo sapiens
gcggagtcagggcag

SEQ ID NO: 1214356 - DNA, 15 bp, Homo sapiens
agcggagtcagggca

SEQ ID NO: 1214357 - DNA, 15 bp, Homo sapiens
aagcggagtcagggc

SEQ ID NO: 1214358 - DNA, 15 bp, Homo sapiens
gaagcggagtcaggg

SEQ ID NO: 1214359 - DNA, 15 bp, Homo sapiens
agaagcggagtcagg

SEQ ID NO: 1214360 - DNA, 15 bp, Homo sapiens
aagaagcggagtcag

SEQ ID NO: 1214361 - DNA, 15 bp, Homo sapiens
gaagaagcggagtca

SEQ ID NO: 1214362 - DNA, 15 bp, Homo sapiens
agaagaagcggagtc

SEQ ID NO: 1214363 - DNA, 15 bp, Homo sapiens
cagaagaagcggagt

SEQ ID NO: 1214364 - DNA, 15 bp, Homo sapiens
gcagaagaagcggag

SEQ ID NO: 1214365 - DNA, 15 bp, Homo sapiens
ggcagaagaagcgga

SEQ ID NO: 1214366 - DNA, 15 bp, Homo sapiens
gggcagaagaagcgg

SEQ ID NO: 1214367 - DNA, 15 bp, Homo sapiens
ggggcagaagaagcg

SEQ ID NO: 1214368 - DNA, 15 bp, Homo sapiens
tggggcagaagaagc

SEQ ID NO: 1214369 - DNA, 15 bp, Homo sapiens
ctggggcagaagaag

SEQ ID NO: 1214370 - DNA, 15 bp, Homo sapiens
cctggggcagaagaa

SEQ ID NO: 1214371 - DNA, 15 bp, Homo sapiens
tcctggggcagaaga

SEQ ID NO: 1214372 - DNA, 15 bp, Homo sapiens
ctcctggggcagaag

SEQ ID NO: 1214373 - DNA, 15 bp, Homo sapiens
actcctggggcagaa

SEQ ID NO: 1214374 - DNA, 15 bp, Homo sapiens
cactcctggggcaga

SEQ ID NO: 1214375 - DNA, 15 bp, Homo sapiens
tcactcctggggcag

SEQ ID NO: 1214376 - DNA, 15 bp, Homo sapiens
ttcactcctggggca

SEQ ID NO: 1214377 - DNA, 15 bp, Homo sapiens
gttcactcctggggc

SEQ ID NO: 1214378 - DNA, 15 bp, Homo sapiens
agttcactcctgggg

SEQ ID NO: 1214379 - DNA, 15 bp, Homo sapiens
cagttcactcctggg

SEQ ID NO: 1214380 - DNA, 15 bp, Homo sapiens
ccagttcactcctgg

SEQ ID NO: 1214381 - DNA, 15 bp, Homo sapiens
accagttcactcctg

SEQ ID NO: 1214382 - DNA, 15 bp, Homo sapiens
caccagttcactcct

SEQ ID NO: 1214383 - DNA, 15 bp, Homo sapiens
acaccagttcactcc

SEQ ID NO: 1214384 - DNA, 15 bp, Homo sapiens
cacaccagttcactc

SEQ ID NO: 1214385 - DNA, 15 bp, Homo sapiens
tcacaccagttcact

SEQ ID NO: 1214386 - DNA, 15 bp, Homo sapiens
ctcacaccagttcac

SEQ ID NO: 1214387 - DNA, 15 bp, Homo sapiens
tctcacaccagttca

SEQ ID NO: 1214388 - DNA, 15 bp, Homo sapiens
ctctcacaccagttc

SEQ ID NO: 1214389 - DNA, 15 bp, Homo sapiens
cctctcacaccagtt

SEQ ID NO: 1214390 - DNA, 15 bp, Homo sapiens
tcctctcacaccagt

SEQ ID NO: 1214391 - DNA, 15 bp, Homo sapiens
gtcctctcacaccag

SEQ ID NO: 1214392 - DNA, 15 bp, Homo sapiens
ggtcctctcacacca

SEQ ID NO: 1214393 - DNA, 15 bp, Homo sapiens
tggtcctctcacacc

SEQ ID NO: 1214394 - DNA, 15 bp, Homo sapiens
gtggtcctctcacac

SEQ ID NO: 1214395 - DNA, 15 bp, Homo sapiens
ggtggtcctctcaca

SEQ ID NO: 1214396 - DNA, 15 bp, Homo sapiens
gggtggtcctctcac

SEQ ID NO: 1214397 - DNA, 15 bp, Homo sapiens
agggtggtcctctca

SEQ ID NO: 1214398 - DNA, 15 bp, Homo sapiens
cagggtggtcctctc

SEQ ID NO: 1214399 - DNA, 15 bp, Homo sapiens
tcagggtggtcctct

SEQ ID NO: 1214400 - DNA, 15 bp, Homo sapiens
ctcagggtggtcctc

SEQ ID NO: 1214401 - DNA, 15 bp, Homo sapiens
gctcagggtggtcct

SEQ ID NO: 1214402 - DNA, 15 bp, Homo sapiens
tgctcagggtggtcc

SEQ ID NO: 1214403 - DNA, 15 bp, Homo sapiens
ttgctcagggtggtc

SEQ ID NO: 1214404 - DNA, 15 bp, Homo sapiens
attgctcagggtggt

SEQ ID NO: 1214405 - DNA, 15 bp, Homo sapiens
cattgctcagggtgg

SEQ ID NO: 1214406 - DNA, 15 bp, Homo sapiens
ccattgctcagggtg

SEQ ID NO: 1214407 - DNA, 15 bp, Homo sapiens
gccattgctcagggt

SEQ ID NO: 1214408 - DNA, 15 bp, Homo sapiens
cgccattgctcaggg

SEQ ID NO: 1214409 - DNA, 15 bp, Homo sapiens
ccgccattgctcagg

SEQ ID NO: 1214410 - DNA, 15 bp, Homo sapiens
gccgccattgctcag

SEQ ID NO: 1214411 - DNA, 15 bp, Homo sapiens
agccgccattgctca

SEQ ID NO: 1214412 - DNA, 15 bp, Homo sapiens
cagccgccattgctc

SEQ ID NO: 1214413 - DNA, 15 bp, Homo sapiens
gcagccgccattgct

SEQ ID NO: 1214414 - DNA, 15 bp, Homo sapiens
ggcagccgccattgc

SEQ ID NO: 1214415 - DNA, 15 bp, Homo sapiens
tggcagccgccattg

SEQ ID NO: 1214416 - DNA, 15 bp, Homo sapiens
ctggcagccgccatt

SEQ ID NO: 1214417 - DNA, 15 bp, Homo sapiens
actggcagccgccat

SEQ ID NO: 1214418 - DNA, 15 bp, Homo sapiens
tactggcagccgcca

SEQ ID NO: 1214419 - DNA, 15 bp, Homo sapiens
atactggcagccgcc

SEQ ID NO: 1214420 - DNA, 15 bp, Homo sapiens
gatactggcagccgc

SEQ ID NO: 1214421 - DNA, 15 bp, Homo sapiens
agatactggcagccg

SEQ ID NO: 1214422 - DNA, 15 bp, Homo sapiens
cagatactggcagcc

SEQ ID NO: 1214423 - DNA, 15 bp, Homo sapiens
acagatactggcagc

SEQ ID NO: 1214424 - DNA, 15 bp, Homo sapiens
cacagatactggcag

SEQ ID NO: 1214425 - DNA, 15 bp, Homo sapiens
gcacagatactggca

SEQ ID NO: 1214426 - DNA, 15 bp, Homo sapiens
ggcacagatactggc

SEQ ID NO: 1214427 - DNA, 15 bp, Homo sapiens
aggcacagatactgg

SEQ ID NO: 1214428 - DNA, 15 bp, Homo sapiens
gaggcacagatactg

SEQ ID NO: 1214429 - DNA, 15 bp, Homo sapiens
ggaggcacagatact

SEQ ID NO: 1214430 - DNA, 15 bp, Homo sapiens
gggaggcacagatac

SEQ ID NO: 1214431 - DNA, 15 bp, Homo sapiens
agggaggcacagata

SEQ ID NO: 1214432 - DNA, 15 bp, Homo sapiens
cagggaggcacagat

SEQ ID NO: 1214433 - DNA, 15 bp, Homo sapiens
gcagggaggcacaga

SEQ ID NO: 1214434 - DNA, 15 bp, Homo sapiens
ggcagggaggcacag

SEQ ID NO: 1214435 - DNA, 15 bp, Homo sapiens
gggcagggaggcaca

SEQ ID NO: 1214436 - DNA, 15 bp, Homo sapiens
ggggcagggaggcac

SEQ ID NO: 1214437 - DNA, 15 bp, Homo sapiens
cggggcagggaggca

SEQ ID NO: 1214438 - DNA, 15 bp, Homo sapiens
gcggggcagggaggc

SEQ ID NO: 1214439 - DNA, 15 bp, Homo sapiens
tgcggggcagggagg

SEQ ID NO: 1214440 - DNA, 15 bp, Homo sapiens
ctgcggggcagggag

SEQ ID NO: 1214441 - DNA, 15 bp, Homo sapiens
tctgcggggcaggga

SEQ ID NO: 1214442 - DNA, 15 bp, Homo sapiens
atctgcggggcaggg

SEQ ID NO: 1214443 - DNA, 15 bp, Homo sapiens
gatctgcggggcagg

SEQ ID NO: 1214444 - DNA, 15 bp, Homo sapiens
tgatctgcggggcag

SEQ ID NO: 1214445 - DNA, 15 bp, Homo sapiens
ttgatctgcggggca

SEQ ID NO: 1214446 - DNA, 15 bp, Homo sapiens
gttgatctgcggggc

SEQ ID NO: 1214447 - DNA, 15 bp, Homo sapiens
ggttgatctgcgggg

SEQ ID NO: 1214448 - DNA, 15 bp, Homo sapiens
gggttgatctgcggg

SEQ ID NO: 1214449 - DNA, 15 bp, Homo sapiens
ggggttgatctgcgg

SEQ ID NO: 1214450 - DNA, 15 bp, Homo sapiens
gggggttgatctgcg

SEQ ID NO: 1214451 - DNA, 15 bp, Homo sapiens
tgggggttgatctgc

SEQ ID NO: 1214452 - DNA, 15 bp, Homo sapiens
gtgggggttgatctg

SEQ ID NO: 1214453 - DNA, 15 bp, Homo sapiens
agtgggggttgatct

SEQ ID NO: 1214454 - DNA, 15 bp, Homo sapiens
gagtgggggttgatc

SEQ ID NO: 1214455 - DNA, 15 bp, Homo sapiens
cgagtgggggttgat

SEQ ID NO: 1214456 - DNA, 15 bp, Homo sapiens
gcgagtgggggttga

SEQ ID NO: 1214457 - DNA, 15 bp, Homo sapiens
ggcgagtgggggttg

SEQ ID NO: 1214458 - DNA, 15 bp, Homo sapiens
gggcgagtgggggtt

SEQ ID NO: 1214459 - DNA, 15 bp, Homo sapiens
tgggcgagtgggggt

SEQ ID NO: 1214460 - DNA, 15 bp, Homo sapiens
ttgggcgagtggggg

SEQ ID NO: 1214461 - DNA, 15 bp, Homo sapiens
cttgggcgagtgggg

SEQ ID NO: 1214462 - DNA, 15 bp, Homo sapiens
acttgggcgagtggg

SEQ ID NO: 1214463 - DNA, 15 bp, Homo sapiens
aacttgggcgagtgg

SEQ ID NO: 1214464 - DNA, 15 bp, Homo sapiens
aaacttgggcgagtg

SEQ ID NO: 1214465 - DNA, 15 bp, Homo sapiens
taaacttgggcgagt

SEQ ID NO: 1214466 - DNA, 15 bp, Homo sapiens
gtaaacttgggcgag

SEQ ID NO: 1214467 - DNA, 15 bp, Homo sapiens
ggtaaacttgggcga

SEQ ID NO: 1214468 - DNA, 15 bp, Homo sapiens
aggtaaacttgggcg

SEQ ID NO: 1214469 - DNA, 15 bp, Homo sapiens
caggtaaacttgggc

SEQ ID NO: 1214470 - DNA, 15 bp, Homo sapiens
gcaggtaaacttggg

SEQ ID NO: 1214471 - DNA, 15 bp, Homo sapiens
cgcaggtaaacttgg

SEQ ID NO: 1214472 - DNA, 15 bp, Homo sapiens
gcgcaggtaaacttg

SEQ ID NO: 1214473 - DNA, 15 bp, Homo sapiens
ggcgcaggtaaactt

SEQ ID NO: 1214474 - DNA, 15 bp, Homo sapiens
aggcgcaggtaaact

SEQ ID NO: 1214475 - DNA, 15 bp, Homo sapiens
caggcgcaggtaaac

SEQ ID NO: 1214476 - DNA, 15 bp, Homo sapiens
gcaggcgcaggtaaa

SEQ ID NO: 1214477 - DNA, 15 bp, Homo sapiens
ggcaggcgcaggtaa

SEQ ID NO: 1214478 - DNA, 15 bp, Homo sapiens
gggcaggcgcaggta

SEQ ID NO: 1214479 - DNA, 15 bp, Homo sapiens
cgggcaggcgcaggt

SEQ ID NO: 1214480 - DNA, 15 bp, Homo sapiens
ccgggcaggcgcagg

SEQ ID NO: 1214481 - DNA, 15 bp, Homo sapiens
tccgggcaggcgcag

SEQ ID NO: 1214482 - DNA, 15 bp, Homo sapiens
gtccgggcaggcgca

SEQ ID NO: 1214483 - DNA, 15 bp, Homo sapiens
cgtccgggcaggcgc

SEQ ID NO: 1214484 - DNA, 15 bp, Homo sapiens
ccgtccgggcaggcg

SEQ ID NO: 1214485 - DNA, 15 bp, Homo sapiens
gccgtccgggcaggc

SEQ ID NO: 1214486 - DNA, 15 bp, Homo sapiens
tgccgtccgggcagg

SEQ ID NO: 1214487 - DNA, 15 bp, Homo sapiens
atgccgtccgggcag

SEQ ID NO: 1214488 - DNA, 15 bp, Homo sapiens
catgccgtccgggca

SEQ ID NO: 1214489 - DNA, 15 bp, Homo sapiens
gcatgccgtccgggc

SEQ ID NO: 1214490 - DNA, 15 bp, Homo sapiens
agcatgccgtccggg

SEQ ID NO: 1214491 - DNA, 15 bp, Homo sapiens
cagcatgccgtccgg

SEQ ID NO: 1214492 - DNA, 15 bp, Homo sapiens
gcagcatgccgtccg

SEQ ID NO: 1214493 - DNA, 15 bp, Homo sapiens
agcagcatgccgtcc

SEQ ID NO: 1214494 - DNA, 15 bp, Homo sapiens
cagcagcatgccgtc

SEQ ID NO: 1214495 - DNA, 15 bp, Homo sapiens
ccagcagcatgccgt

SEQ ID NO: 1214496 - DNA, 15 bp, Homo sapiens
gccagcagcatgccg

SEQ ID NO: 1214497 - DNA, 15 bp, Homo sapiens
ggccagcagcatgcc

SEQ ID NO: 1214498 - DNA, 15 bp, Homo sapiens
tggccagcagcatgc

SEQ ID NO: 1214499 - DNA, 15 bp, Homo sapiens
ctggccagcagcatg

SEQ ID NO: 1214500 - DNA, 15 bp, Homo sapiens
cctggccagcagcat

SEQ ID NO: 1214501 - DNA, 15 bp, Homo sapiens
ccctggccagcagca

SEQ ID NO: 1214502 - DNA, 15 bp, Homo sapiens
tccctggccagcagc

SEQ ID NO: 1214503 - DNA, 15 bp, Homo sapiens
gtccctggccagcag

SEQ ID NO: 1214504 - DNA, 15 bp, Homo sapiens
tgtccctggccagca

SEQ ID NO: 1214505 - DNA, 15 bp, Homo sapiens
atgtccctggccagc

SEQ ID NO: 1214506 - DNA, 15 bp, Homo sapiens
catgtccctggccag

SEQ ID NO: 1214507 - DNA, 15 bp, Homo sapiens
tcatgtccctggcca

SEQ ID NO: 1214508 - DNA, 15 bp, Homo sapiens
ctcatgtccctggcc

SEQ ID NO: 1214509 - DNA, 15 bp, Homo sapiens
cctcatgtccctggc

SEQ ID NO: 1214510 - DNA, 15 bp, Homo sapiens
tcctcatgtccctgg

SEQ ID NO: 1214511 - DNA, 15 bp, Homo sapiens
ctcctcatgtccctg

SEQ ID NO: 1214512 - DNA, 15 bp, Homo sapiens
gctcctcatgtccct

SEQ ID NO: 1214513 - DNA, 15 bp, Homo sapiens
agctcctcatgtccc

SEQ ID NO: 1214514 - DNA, 15 bp, Homo sapiens
cagctcctcatgtcc

SEQ ID NO: 1214515 - DNA, 15 bp, Homo sapiens
gcagctcctcatgtc

SEQ ID NO: 1214516 - DNA, 15 bp, Homo sapiens
ggcagctcctcatgt

SEQ ID NO: 1214517 - DNA, 15 bp, Homo sapiens
aggcagctcctcatg

SEQ ID NO: 1214518 - DNA, 15 bp, Homo sapiens
gaggcagctcctcat

SEQ ID NO: 1214519 - DNA, 15 bp, Homo sapiens
tgaggcagctcctca

SEQ ID NO: 1214520 - DNA, 15 bp, Homo sapiens
gtgaggcagctcctc

SEQ ID NO: 1214521 - DNA, 15 bp, Homo sapiens
tgtgaggcagctcct

SEQ ID NO: 1214522 - DNA, 15 bp, Homo sapiens
ctgtgaggcagctcc

SEQ ID NO: 1214523 - DNA, 15 bp, Homo sapiens
cctgtgaggcagctc

SEQ ID NO: 1214524 - DNA, 15 bp, Homo sapiens
acctgtgaggcagct

SEQ ID NO: 1214525 - DNA, 15 bp, Homo sapiens
cacctgtgaggcagc

SEQ ID NO: 1214526 - DNA, 15 bp, Homo sapiens
acacctgtgaggcag

SEQ ID NO: 1214527 - DNA, 15 bp, Homo sapiens
cacacctgtgaggca

SEQ ID NO: 1214528 - DNA, 15 bp, Homo sapiens
ccacacctgtgaggc

SEQ ID NO: 1214529 - DNA, 15 bp, Homo sapiens
gccacacctgtgagg

SEQ ID NO: 1214530 - DNA, 15 bp, Homo sapiens
tgccacacctgtgag

SEQ ID NO: 1214531 - DNA, 15 bp, Homo sapiens
gtgccacacctgtga

SEQ ID NO: 1214532 - DNA, 15 bp, Homo sapiens
tgtgccacacctgtg

SEQ ID NO: 1214533 - DNA, 15 bp, Homo sapiens
gtgtgccacacctgt

SEQ ID NO: 1214534 - DNA, 15 bp, Homo sapiens
cgtgtgccacacctg

SEQ ID NO: 1214535 - DNA, 15 bp, Homo sapiens
gcgtgtgccacacct

SEQ ID NO: 1214536 - DNA, 15 bp, Homo sapiens
ggcgtgtgccacacc

SEQ ID NO: 1214537 - DNA, 15 bp, Homo sapiens
aggcgtgtgccacac

SEQ ID NO: 1214538 - DNA, 15 bp, Homo sapiens
aaggcgtgtgccaca

SEQ ID NO: 1214539 - DNA, 15 bp, Homo sapiens
caaggcgtgtgccac

SEQ ID NO: 1214540 - DNA, 15 bp, Homo sapiens
acaaggcgtgtgcca

SEQ ID NO: 1214541 - DNA, 15 bp, Homo sapiens
aacaaggcgtgtgcc

SEQ ID NO: 1214542 - DNA, 15 bp, Homo sapiens
aaacaaggcgtgtgc

SEQ ID NO: 1214543 - DNA, 15 bp, Homo sapiens
gaaacaaggcgtgtg

SEQ ID NO: 1214544 - DNA, 15 bp, Homo sapiens
agaaacaaggcgtgt

SEQ ID NO: 1214545 - DNA, 15 bp, Homo sapiens
cagaaacaaggcgtg

SEQ ID NO: 1214546 - DNA, 15 bp, Homo sapiens
gcagaaacaaggcgt

SEQ ID NO: 1214547 - DNA, 15 bp, Homo sapiens
cgcagaaacaaggcg

SEQ ID NO: 1214548 - DNA, 15 bp, Homo sapiens
acgcagaaacaaggc

SEQ ID NO: 1214549 - DNA, 15 bp, Homo sapiens
gacgcagaaacaagg

SEQ ID NO: 1214550 - DNA, 15 bp, Homo sapiens
ggacgcagaaacaag

SEQ ID NO: 1214551 - DNA, 15 bp, Homo sapiens
aggacgcagaaacaa

SEQ ID NO: 1214552 - DNA, 15 bp, Homo sapiens
caggacgcagaaaca

SEQ ID NO: 1214553 - DNA, 15 bp, Homo sapiens
acaggacgcagaaac

SEQ ID NO: 1214554 - DNA, 15 bp, Homo sapiens
cacaggacgcagaaa

SEQ ID NO: 1214555 - DNA, 15 bp, Homo sapiens
acacaggacgcagaa

SEQ ID NO: 1214556 - DNA, 15 bp, Homo sapiens
gacacaggacgcaga

SEQ ID NO: 1214557 - DNA, 15 bp, Homo sapiens
ggacacaggacgcag

SEQ ID NO: 1214558 - DNA, 15 bp, Homo sapiens
aggacacaggacgca

SEQ ID NO: 1214559 - DNA, 15 bp, Homo sapiens
gaggacacaggacgc

SEQ ID NO: 1214560 - DNA, 15 bp, Homo sapiens
ggaggacacaggacg

SEQ ID NO: 1214561 - DNA, 15 bp, Homo sapiens
tggaggacacaggac

SEQ ID NO: 1214562 - DNA, 15 bp, Homo sapiens
ttggaggacacagga

SEQ ID NO: 1214563 - DNA, 15 bp, Homo sapiens
gttggaggacacagg

SEQ ID NO: 1214564 - DNA, 15 bp, Homo sapiens
agttggaggacacag

SEQ ID NO: 1214565 - DNA, 15 bp, Homo sapiens
cagttggaggacaca

SEQ ID NO: 1214566 - DNA, 15 bp, Homo sapiens
gcagttggaggacac

SEQ ID NO: 1214567 - DNA, 15 bp, Homo sapiens
ggcagttggaggaca

SEQ ID NO: 1214568 - DNA, 15 bp, Homo sapiens
gggcagttggaggac

SEQ ID NO: 1214569 - DNA, 15 bp, Homo sapiens
ggggcagttggagga

SEQ ID NO: 1214570 - DNA, 15 bp, Homo sapiens
gggggcagttggagg

SEQ ID NO: 1214571 - DNA, 15 bp, Homo sapiens
agggggcagttggag

SEQ ID NO: 1214572 - DNA, 15 bp, Homo sapiens
gagggggcagttgga

SEQ ID NO: 1214573 - DNA, 15 bp, Homo sapiens
ggagggggcagttgg

SEQ ID NO: 1214574 - DNA, 15 bp, Homo sapiens
aggagggggcagttg

SEQ ID NO: 1214575 - DNA, 15 bp, Homo sapiens
caggagggggcagtt

SEQ ID NO: 1214576 - DNA, 15 bp, Homo sapiens
tcaggagggggcagt

SEQ ID NO: 1214577 - DNA, 15 bp, Homo sapiens
ctcaggagggggcag

SEQ ID NO: 1214578 - DNA, 15 bp, Homo sapiens
gctcaggagggggca

SEQ ID NO: 1214579 - DNA, 15 bp, Homo sapiens
ggctcaggagggggc

SEQ ID NO: 1214580 - DNA, 15 bp, Homo sapiens
aggctcaggaggggg

SEQ ID NO: 1214581 - DNA, 15 bp, Homo sapiens
gaggctcaggagggg

SEQ ID NO: 1214582 - DNA, 15 bp, Homo sapiens
agaggctcaggaggg

SEQ ID NO: 1214583 - DNA, 15 bp, Homo sapiens
gagaggctcaggagg

SEQ ID NO: 1214584 - DNA, 15 bp, Homo sapiens
agagaggctcaggag

SEQ ID NO: 1214585 - DNA, 15 bp, Homo sapiens
gagagaggctcagga

SEQ ID NO: 1214586 - DNA, 15 bp, Homo sapiens
agagagaggctcagg

SEQ ID NO: 1214587 - DNA, 15 bp, Homo sapiens
cagagagaggctcag

SEQ ID NO: 1214588 - DNA, 15 bp, Homo sapiens
gcagagagaggctca

SEQ ID NO: 1214589 - DNA, 15 bp, Homo sapiens
agcagagagaggctc

SEQ ID NO: 1214590 - DNA, 15 bp, Homo sapiens
gagcagagagaggct

SEQ ID NO: 1214591 - DNA, 15 bp, Homo sapiens
tgagcagagagaggc

SEQ ID NO: 1214592 - DNA, 15 bp, Homo sapiens
atgagcagagagagg

SEQ ID NO: 1214593 - DNA, 15 bp, Homo sapiens
gatgagcagagagag

SEQ ID NO: 1214594 - DNA, 15 bp, Homo sapiens
agatgagcagagaga

SEQ ID NO: 1214595 - DNA, 15 bp, Homo sapiens
cagatgagcagagag

SEQ ID NO: 1214596 - DNA, 15 bp, Homo sapiens
acagatgagcagaga

SEQ ID NO: 1214597 - DNA, 15 bp, Homo sapiens
gacagatgagcagag

SEQ ID NO: 1214598 - DNA, 15 bp, Homo sapiens
tgacagatgagcaga

SEQ ID NO: 1214599 - DNA, 15 bp, Homo sapiens
ttgacagatgagcag

SEQ ID NO: 1214600 - DNA, 15 bp, Homo sapiens
tttgacagatgagca

SEQ ID NO: 1214601 - DNA, 15 bp, Homo sapiens
atttgacagatgagc

SEQ ID NO: 1214602 - DNA, 15 bp, Homo sapiens
catttgacagatgag

SEQ ID NO: 1214603 - DNA, 15 bp, Homo sapiens
ccatttgacagatga

SEQ ID NO: 1214604 - DNA, 15 bp, Homo sapiens
cccatttgacagatg

SEQ ID NO: 1214605 - DNA, 15 bp, Homo sapiens
acccatttgacagat

SEQ ID NO: 1214606 - DNA, 15 bp, Homo sapiens
tacccatttgacaga

SEQ ID NO: 1214607 - DNA, 15 bp, Homo sapiens
gtacccatttgacag

SEQ ID NO: 1214608 - DNA, 15 bp, Homo sapiens
ggtacccatttgaca

SEQ ID NO: 1214609 - DNA, 15 bp, Homo sapiens
aggtacccatttgac

SEQ ID NO: 1214610 - DNA, 15 bp, Homo sapiens
gaggtacccatttga

SEQ ID NO: 1214611 - DNA, 15 bp, Homo sapiens
tgaggtacccatttg

SEQ ID NO: 1214612 - DNA, 15 bp, Homo sapiens
ttgaggtacccattt

SEQ ID NO: 1214613 - DNA, 15 bp, Homo sapiens
cttgaggtacccatt

SEQ ID NO: 1214614 - DNA, 15 bp, Homo sapiens
ccttgaggtacccat

SEQ ID NO: 1214615 - DNA, 15 bp, Homo sapiens
accttgaggtaccca

SEQ ID NO: 1214616 - DNA, 15 bp, Homo sapiens
gaccttgaggtaccc

SEQ ID NO: 1214617 - DNA, 15 bp, Homo sapiens
cgaccttgaggtacc

SEQ ID NO: 1214618 - DNA, 15 bp, Homo sapiens
acgaccttgaggtac

SEQ ID NO: 1214619 - DNA, 15 bp, Homo sapiens
aacgaccttgaggta

SEQ ID NO: 1214620 - DNA, 15 bp, Homo sapiens
caacgaccttgaggt

SEQ ID NO: 1214621 - DNA, 15 bp, Homo sapiens
acaacgaccttgagg

SEQ ID NO: 1214622 - DNA, 15 bp, Homo sapiens
tacaacgaccttgag

SEQ ID NO: 1214623 - DNA, 15 bp, Homo sapiens
ttacaacgaccttga

SEQ ID NO: 1214624 - DNA, 15 bp, Homo sapiens
cttacaacgaccttg

SEQ ID NO: 1214625 - DNA, 15 bp, Homo sapiens
ccttacaacgacctt

SEQ ID NO: 1214626 - DNA, 15 bp, Homo sapiens
tccttacaacgacct

SEQ ID NO: 1214627 - DNA, 15 bp, Homo sapiens
gtccttacaacgacc

SEQ ID NO: 1214628 - DNA, 15 bp, Homo sapiens
agtccttacaacgac

SEQ ID NO: 1214629 - DNA, 15 bp, Homo sapiens
gagtccttacaacga

SEQ ID NO: 1214630 - DNA, 15 bp, Homo sapiens
tgagtccttacaacg

SEQ ID NO: 1214631 - DNA, 15 bp, Homo sapiens
atgagtccttacaac

SEQ ID NO: 1214632 - DNA, 15 bp, Homo sapiens
catgagtccttacaa

SEQ ID NO: 1214633 - DNA, 15 bp, Homo sapiens
tcatgagtccttaca

SEQ ID NO: 1214634 - DNA, 15 bp, Homo sapiens
ctcatgagtccttac

SEQ ID NO: 1214635 - DNA, 15 bp, Homo sapiens
actcatgagtcctta

SEQ ID NO: 1214636 - DNA, 15 bp, Homo sapiens
gactcatgagtcctt

SEQ ID NO: 1214637 - DNA, 15 bp, Homo sapiens
cgactcatgagtcct

SEQ ID NO: 1214638 - DNA, 15 bp, Homo sapiens
ccgactcatgagtcc

SEQ ID NO: 1214639 - DNA, 15 bp, Homo sapiens
cccgactcatgagtc

SEQ ID NO: 1214640 - DNA, 15 bp, Homo sapiens
tcccgactcatgagt

SEQ ID NO: 1214641 - DNA, 15 bp, Homo sapiens
atcccgactcatgag

SEQ ID NO: 1214642 - DNA, 15 bp, Homo sapiens
tatcccgactcatga

SEQ ID NO: 1214643 - DNA, 15 bp, Homo sapiens
ttatcccgactcatg

SEQ ID NO: 1214644 - DNA, 15 bp, Homo sapiens
gttatcccgactcat

SEQ ID NO: 1214645 - DNA, 15 bp, Homo sapiens
ggttatcccgactca

SEQ ID NO: 1214646 - DNA, 15 bp, Homo sapiens
tggttatcccgactc

SEQ ID NO: 1214647 - DNA, 15 bp, Homo sapiens
atggttatcccgact

SEQ ID NO: 1214648 - DNA, 15 bp, Homo sapiens
tatggttatcccgac

SEQ ID NO: 1214649 - DNA, 15 bp, Homo sapiens
gtatggttatcccga

SEQ ID NO: 1214650 - DNA, 15 bp, Homo sapiens
agtatggttatcccg

SEQ ID NO: 1214651 - DNA, 15 bp, Homo sapiens
aagtatggttatccc

SEQ ID NO: 1214652 - DNA, 15 bp, Homo sapiens
aaagtatggttatcc

SEQ ID NO: 1214653 - DNA, 15 bp, Homo sapiens
aaaagtatggttatc

SEQ ID NO: 1214654 - DNA, 15 bp, Homo sapiens
gaaaagtatggttat

SEQ ID NO: 1214655 - DNA, 15 bp, Homo sapiens
agaaaagtatggtta

SEQ ID NO: 1214656 - DNA, 15 bp, Homo sapiens
aagaaaagtatggtt

SEQ ID NO: 1214657 - DNA, 15 bp, Homo sapiens
caagaaaagtatggt

SEQ ID NO: 1214658 - DNA, 15 bp, Homo sapiens
ccaagaaaagtatgg

SEQ ID NO: 1214659 - DNA, 15 bp, Homo sapiens
tccaagaaaagtatg

SEQ ID NO: 1214660 - DNA, 15 bp, Homo sapiens
atccaagaaaagtat

SEQ ID NO: 1214661 - DNA, 15 bp, Homo sapiens
catccaagaaaagta

SEQ ID NO: 1214662 - DNA, 15 bp, Homo sapiens
ccatccaagaaaagt

SEQ ID NO: 1214663 - DNA, 15 bp, Homo sapiens
tccatccaagaaaag

SEQ ID NO: 1214664 - DNA, 15 bp, Homo sapiens
gtccatccaagaaaa

SEQ ID NO: 1214665 - DNA, 15 bp, Homo sapiens
tgtccatccaagaaa

SEQ ID NO: 1214666 - DNA, 15 bp, Homo sapiens
gtgtccatccaagaa

SEQ ID NO: 1214667 - DNA, 15 bp, Homo sapiens
tgtgtccatccaaga

SEQ ID NO: 1214668 - DNA, 15 bp, Homo sapiens
atgtgtccatccaag

SEQ ID NO: 1214669 - DNA, 15 bp, Homo sapiens
gatgtgtccatccaa

SEQ ID NO: 1214670 - DNA, 15 bp, Homo sapiens
tgatgtgtccatcca

SEQ ID NO: 1214671 - DNA, 15 bp, Homo sapiens
ctgatgtgtccatcc

SEQ ID NO: 1214672 - DNA, 15 bp, Homo sapiens
gctgatgtgtccatc

SEQ ID NO: 1214673 - DNA, 15 bp, Homo sapiens
tgctgatgtgtccat

SEQ ID NO: 1214674 - DNA, 15 bp, Homo sapiens
gtgctgatgtgtcca

SEQ ID NO: 1214675 - DNA, 15 bp, Homo sapiens
ggtgctgatgtgtcc

SEQ ID NO: 1214676 - DNA, 15 bp, Homo sapiens
cggtgctgatgtgtc

SEQ ID NO: 1214677 - DNA, 15 bp, Homo sapiens
ccggtgctgatgtgt

SEQ ID NO: 1214678 - DNA, 15 bp, Homo sapiens
cccggtgctgatgtg

SEQ ID NO: 1214679 - DNA, 15 bp, Homo sapiens
gcccggtgctgatgt

SEQ ID NO: 1214680 - DNA, 15 bp, Homo sapiens
agcccggtgctgatg

SEQ ID NO: 1214681 - DNA, 15 bp, Homo sapiens
aagcccggtgctgat

SEQ ID NO: 1214682 - DNA, 15 bp, Homo sapiens
caagcccggtgctga

SEQ ID NO: 1214683 - DNA, 15 bp, Homo sapiens
tcaagcccggtgctg

SEQ ID NO: 1214684 - DNA, 15 bp, Homo sapiens
gtcaagcccggtgct

SEQ ID NO: 1214685 - DNA, 15 bp, Homo sapiens
tgtcaagcccggtgc

SEQ ID NO: 1214686 - DNA, 15 bp, Homo sapiens
atgtcaagcccggtg

SEQ ID NO: 1214687 - DNA, 15 bp, Homo sapiens
aatgtcaagcccggt

SEQ ID NO: 1214688 - DNA, 15 bp, Homo sapiens
aaatgtcaagcccgg

SEQ ID NO: 1214689 - DNA, 15 bp, Homo sapiens
taaatgtcaagcccg

SEQ ID NO: 1214690 - DNA, 15 bp, Homo sapiens
gtaaatgtcaagccc

SEQ ID NO: 1214691 - DNA, 15 bp, Homo sapiens
ggtaaatgtcaagcc

SEQ ID NO: 1214692 - DNA, 15 bp, Homo sapiens
gggtaaatgtcaagc

SEQ ID NO: 1214693 - DNA, 15 bp, Homo sapiens
tgggtaaatgtcaag

SEQ ID NO: 1214694 - DNA, 15 bp, Homo sapiens
ctgggtaaatgtcaa

SEQ ID NO: 1214695 - DNA, 15 bp, Homo sapiens
actgggtaaatgtca

SEQ ID NO: 1214696 - DNA, 15 bp, Homo sapiens
aactgggtaaatgtc

SEQ ID NO: 1214697 - DNA, 15 bp, Homo sapiens
gaactgggtaaatgt

SEQ ID NO: 1214698 - DNA, 15 bp, Homo sapiens
ggaactgggtaaatg

SEQ ID NO: 1214699 - DNA, 15 bp, Homo sapiens
gggaactgggtaaat

SEQ ID NO: 1214700 - DNA, 15 bp, Homo sapiens
ggggaactgggtaaa

SEQ ID NO: 1214701 - DNA, 15 bp, Homo sapiens
aggggaactgggtaa

SEQ ID NO: 1214702 - DNA, 15 bp, Homo sapiens
aaggggaactgggta

SEQ ID NO: 1214703 - DNA, 15 bp, Homo sapiens
aaaggggaactgggt

SEQ ID NO: 1214704 - DNA, 15 bp, Homo sapiens
caaaggggaactggg

SEQ ID NO: 1214705 - DNA, 15 bp, Homo sapiens
tcaaaggggaactgg

SEQ ID NO: 1214706 - DNA, 15 bp, Homo sapiens
atcaaaggggaactg

SEQ ID NO: 1214707 - DNA, 15 bp, Homo sapiens
catcaaaggggaact

SEQ ID NO: 1214708 - DNA, 15 bp, Homo sapiens
gcatcaaaggggaac

SEQ ID NO: 1214709 - DNA, 15 bp, Homo sapiens
ggcatcaaaggggaa

SEQ ID NO: 1214710 - DNA, 15 bp, Homo sapiens
aggcatcaaagggga

SEQ ID NO: 1214711 - DNA, 15 bp, Homo sapiens
caggcatcaaagggg

SEQ ID NO: 1214712 - DNA, 15 bp, Homo sapiens
ccaggcatcaaaggg

SEQ ID NO: 1214713 - DNA, 15 bp, Homo sapiens
accaggcatcaaagg

SEQ ID NO: 1214714 - DNA, 15 bp, Homo sapiens
aaccaggcatcaaag

SEQ ID NO: 1214715 - DNA, 15 bp, Homo sapiens
aaaccaggcatcaaa

SEQ ID NO: 1214716 - DNA, 15 bp, Homo sapiens
gaaaccaggcatcaa

SEQ ID NO: 1214717 - DNA, 15 bp, Homo sapiens
ggaaaccaggcatca

SEQ ID NO: 1214718 - DNA, 15 bp, Homo sapiens
aggaaaccaggcatc

SEQ ID NO: 1214719 - DNA, 15 bp, Homo sapiens
gaggaaaccaggcat

SEQ ID NO: 1214720 - DNA, 15 bp, Homo sapiens
agaggaaaccaggca

SEQ ID NO: 1214721 - DNA, 15 bp, Homo sapiens
aagaggaaaccaggc

SEQ ID NO: 1214722 - DNA, 15 bp, Homo sapiens
aaagaggaaaccagg

SEQ ID NO: 1214723 - DNA, 15 bp, Homo sapiens
gaaagaggaaaccag

SEQ ID NO: 1214724 - DNA, 15 bp, Homo sapiens
ggaaagaggaaacca

SEQ ID NO: 1214725 - DNA, 15 bp, Homo sapiens
gggaaagaggaaacc

SEQ ID NO: 1214726 - DNA, 15 bp, Homo sapiens
cgggaaagaggaaac

SEQ ID NO: 1214727 - DNA, 15 bp, Homo sapiens
ccgggaaagaggaaa

SEQ ID NO: 1214728 - DNA, 15 bp, Homo sapiens
gccgggaaagaggaa

SEQ ID NO: 1214729 - DNA, 15 bp, Homo sapiens
ggccgggaaagagga

SEQ ID NO: 1214730 - DNA, 15 bp, Homo sapiens
gggccgggaaagagg

SEQ ID NO: 1214731 - DNA, 15 bp, Homo sapiens
ggggccgggaaagag

SEQ ID NO: 1214732 - DNA, 15 bp, Homo sapiens
gggggccgggaaaga

SEQ ID NO: 1214733 - DNA, 15 bp, Homo sapiens
agggggccgggaaag

SEQ ID NO: 1214734 - DNA, 15 bp, Homo sapiens
cagggggccgggaaa

SEQ ID NO: 1214735 - DNA, 15 bp, Homo sapiens
tcagggggccgggaa

SEQ ID NO: 1214736 - DNA, 15 bp, Homo sapiens
ttcagggggccggga

SEQ ID NO: 1214737 - DNA, 15 bp, Homo sapiens
cttcagggggccggg

SEQ ID NO: 1214738 - DNA, 15 bp, Homo sapiens
tcttcagggggccgg

SEQ ID NO: 1214739 - DNA, 15 bp, Homo sapiens
ctcttcagggggccg

SEQ ID NO: 1214740 - DNA, 15 bp, Homo sapiens
cctcttcagggggcc

SEQ ID NO: 1214741 - DNA, 15 bp, Homo sapiens
acctcttcagggggc

SEQ ID NO: 1214742 - DNA, 15 bp, Homo sapiens
cacctcttcaggggg

SEQ ID NO: 1214743 - DNA, 15 bp, Homo sapiens
tcacctcttcagggg

SEQ ID NO: 1214744 - DNA, 15 bp, Homo sapiens
atcacctcttcaggg

SEQ ID NO: 1214745 - DNA, 15 bp, Homo sapiens
gatcacctcttcagg

SEQ ID NO: 1214746 - DNA, 15 bp, Homo sapiens
agatcacctcttcag

SEQ ID NO: 1214747 - DNA, 15 bp, Homo sapiens
cagatcacctcttca

SEQ ID NO: 1214748 - DNA, 15 bp, Homo sapiens
tcagatcacctcttc

SEQ ID NO: 1214749 - DNA, 15 bp, Homo sapiens
atcagatcacctctt

SEQ ID NO: 1214750 - DNA, 15 bp, Homo sapiens
aatcagatcacctct

SEQ ID NO: 1214751 - DNA, 15 bp, Homo sapiens
aaatcagatcacctc

SEQ ID NO: 1214752 - DNA, 15 bp, Homo sapiens
gaaatcagatcacct

SEQ ID NO: 1214753 - DNA, 15 bp, Homo sapiens
agaaatcagatcacc

SEQ ID NO: 1214754 - DNA, 15 bp, Homo sapiens
cagaaatcagatcac

SEQ ID NO: 1214755 - DNA, 15 bp, Homo sapiens
tcagaaatcagatca

SEQ ID NO: 1214756 - DNA, 15 bp, Homo sapiens
gtcagaaatcagatc

SEQ ID NO: 1214757 - DNA, 15 bp, Homo sapiens
tgtcagaaatcagat

SEQ ID NO: 1214758 - DNA, 15 bp, Homo sapiens
ctgtcagaaatcaga

SEQ ID NO: 1214759 - DNA, 15 bp, Homo sapiens
cctgtcagaaatcag

SEQ ID NO: 1214760 - DNA, 15 bp, Homo sapiens
tcctgtcagaaatca

SEQ ID NO: 1214761 - DNA, 15 bp, Homo sapiens
ctcctgtcagaaatc

SEQ ID NO: 1214762 - DNA, 15 bp, Homo sapiens
gctcctgtcagaaat

SEQ ID NO: 1214763 - DNA, 15 bp, Homo sapiens
ggctcctgtcagaaa

SEQ ID NO: 1214764 - DNA, 15 bp, Homo sapiens
gggctcctgtcagaa

SEQ ID NO: 1214765 - DNA, 15 bp, Homo sapiens
agggctcctgtcaga

SEQ ID NO: 1214766 - DNA, 15 bp, Homo sapiens
cagggctcctgtcag

SEQ ID NO: 1214767 - DNA, 15 bp, Homo sapiens
tcagggctcctgtca

SEQ ID NO: 1214768 - DNA, 15 bp, Homo sapiens
ctcagggctcctgtc

SEQ ID NO: 1214769 - DNA, 15 bp, Homo sapiens
cctcagggctcctgt

SEQ ID NO: 1214770 - DNA, 15 bp, Homo sapiens
ccctcagggctcctg

SEQ ID NO: 1214771 - DNA, 15 bp, Homo sapiens
tccctcagggctcct

SEQ ID NO: 1214772 - DNA, 15 bp, Homo sapiens
ctccctcagggctcc

SEQ ID NO: 1214773 - DNA, 15 bp, Homo sapiens
cctccctcagggctc

SEQ ID NO: 1214774 - DNA, 15 bp, Homo sapiens
tcctccctcagggct

SEQ ID NO: 1214775 - DNA, 15 bp, Homo sapiens
ttcctccctcagggc

SEQ ID NO: 1214776 - DNA, 15 bp, Homo sapiens
tttcctccctcaggg

SEQ ID NO: 1214777 - DNA, 15 bp, Homo sapiens
atttcctccctcagg

SEQ ID NO: 1214778 - DNA, 15 bp, Homo sapiens
catttcctccctcag

SEQ ID NO: 1214779 - DNA, 15 bp, Homo sapiens
ccatttcctccctca

SEQ ID NO: 1214780 - DNA, 15 bp, Homo sapiens
accatttcctccctc

SEQ ID NO: 1214781 - DNA, 15 bp, Homo sapiens
gaccatttcctccct

SEQ ID NO: 1214782 - DNA, 15 bp, Homo sapiens
ggaccatttcctccc

SEQ ID NO: 1214783 - DNA, 15 bp, Homo sapiens
gggaccatttcctcc

SEQ ID NO: 1214784 - DNA, 15 bp, Homo sapiens
ggggaccatttcctc

SEQ ID NO: 1214785 - DNA, 15 bp, Homo sapiens
aggggaccatttcct

SEQ ID NO: 1214786 - DNA, 15 bp, Homo sapiens
aaggggaccatttcc

SEQ ID NO: 1214787 - DNA, 15 bp, Homo sapiens
aaaggggaccatttc

SEQ ID NO: 1214788 - DNA, 15 bp, Homo sapiens
caaaggggaccattt

SEQ ID NO: 1214789 - DNA, 15 bp, Homo sapiens
acaaaggggaccatt

SEQ ID NO: 1214790 - DNA, 15 bp, Homo sapiens
aacaaaggggaccat

SEQ ID NO: 1214791 - DNA, 15 bp, Homo sapiens
caacaaaggggacca

SEQ ID NO: 1214792 - DNA, 15 bp, Homo sapiens
tcaacaaaggggacc

SEQ ID NO: 1214793 - DNA, 15 bp, Homo sapiens
gtcaacaaaggggac

SEQ ID NO: 1214794 - DNA, 15 bp, Homo sapiens
agtcaacaaagggga

SEQ ID NO: 1214795 - DNA, 15 bp, Homo sapiens
aagtcaacaaagggg

SEQ ID NO: 1214796 - DNA, 15 bp, Homo sapiens
aaagtcaacaaaggg

SEQ ID NO: 1214797 - DNA, 15 bp, Homo sapiens
aaaagtcaacaaagg

SEQ ID NO: 1214798 - DNA, 15 bp, Homo sapiens
gaaaagtcaacaaag

SEQ ID NO: 1214799 - DNA, 15 bp, Homo sapiens
agaaaagtcaacaaa

SEQ ID NO: 1214800 - DNA, 15 bp, Homo sapiens
aagaaaagtcaacaa

SEQ ID NO: 1214801 - DNA, 15 bp, Homo sapiens
aaagaaaagtcaaca

SEQ ID NO: 1214802 - DNA, 15 bp, Homo sapiens
aaaagaaaagtcaac

SEQ ID NO: 1214803 - DNA, 15 bp, Homo sapiens
aaaaagaaaagtcaa

SEQ ID NO: 1214804 - DNA, 15 bp, Homo sapiens
gaaaaagaaaagtca

SEQ ID NO: 1214805 - DNA, 15 bp, Homo sapiens
agaaaaagaaaagtc

SEQ ID NO: 1214806 - DNA, 15 bp, Homo sapiens
aagaaaaagaaaagt

SEQ ID NO: 1214807 - DNA, 15 bp, Homo sapiens
aaagaaaaagaaaag

SEQ ID NO: 1214808 - DNA, 15 bp, Homo sapiens
aaaaaaataaagaaa

SEQ ID NO: 1214809 - DNA, 15 bp, Homo sapiens
gaaaaaaataaagaa

SEQ ID NO: 1214810 - DNA, 15 bp, Homo sapiens
agaaaaaaataaaga

SEQ ID NO: 1214811 - DNA, 15 bp, Homo sapiens
aagaaaaaaataaag

SEQ ID NO: 1214812 - DNA, 15 bp, Homo sapiens
aaagaaaaaaataaa

SEQ ID NO: 1214813 - DNA, 15 bp, Homo sapiens
caaaagaaaaaaata

SEQ ID NO: 1214814 - DNA, 15 bp, Homo sapiens
tcaaaagaaaaaaat

SEQ ID NO: 1214815 - DNA, 15 bp, Homo sapiens
ctcaaaagaaaaaaa

SEQ ID NO: 1214816 - DNA, 15 bp, Homo sapiens
tctcaaaagaaaaaa

SEQ ID NO: 1214817 - DNA, 15 bp, Homo sapiens
atctcaaaagaaaaa

SEQ ID NO: 1214818 - DNA, 15 bp, Homo sapiens
aatctcaaaagaaaa

SEQ ID NO: 1214819 - DNA, 15 bp, Homo sapiens
aaatctcaaaagaaa

SEQ ID NO: 1214820 - DNA, 15 bp, Homo sapiens
caaatctcaaaagaa

SEQ ID NO: 1214821 - DNA, 15 bp, Homo sapiens
gcaaatctcaaaaga

SEQ ID NO: 1214822 - DNA, 15 bp, Homo sapiens
agcaaatctcaaaag

SEQ ID NO: 1214823 - DNA, 15 bp, Homo sapiens
cagcaaatctcaaaa

SEQ ID NO: 1214824 - DNA, 15 bp, Homo sapiens
acagcaaatctcaaa

SEQ ID NO: 1214825 - DNA, 15 bp, Homo sapiens
gacagcaaatctcaa

SEQ ID NO: 1214826 - DNA, 15 bp, Homo sapiens
tgacagcaaatctca

SEQ ID NO: 1214827 - DNA, 15 bp, Homo sapiens
gtgacagcaaatctc

SEQ ID NO: 1214828 - DNA, 15 bp, Homo sapiens
ggtgacagcaaatct

SEQ ID NO: 1214829 - DNA, 15 bp, Homo sapiens
gggtgacagcaaatc

SEQ ID NO: 1214830 - DNA, 15 bp, Homo sapiens
tgggtgacagcaaat

SEQ ID NO: 1214831 - DNA, 15 bp, Homo sapiens
ctgggtgacagcaaa

SEQ ID NO: 1214832 - DNA, 15 bp, Homo sapiens
gctgggtgacagcaa

SEQ ID NO: 1214833 - DNA, 15 bp, Homo sapiens
ggctgggtgacagca

SEQ ID NO: 1214834 - DNA, 15 bp, Homo sapiens
aggctgggtgacagc

SEQ ID NO: 1214835 - DNA, 15 bp, Homo sapiens
caggctgggtgacag

SEQ ID NO: 1214836 - DNA, 15 bp, Homo sapiens
ccaggctgggtgaca

SEQ ID NO: 1214837 - DNA, 15 bp, Homo sapiens
tccaggctgggtgac

SEQ ID NO: 1214838 - DNA, 15 bp, Homo sapiens
ttccaggctgggtga

SEQ ID NO: 1214839 - DNA, 15 bp, Homo sapiens
attccaggctgggtg

SEQ ID NO: 1214840 - DNA, 15 bp, Homo sapiens
cattccaggctgggt

SEQ ID NO: 1214841 - DNA, 15 bp, Homo sapiens
gcattccaggctggg

SEQ ID NO: 1214842 - DNA, 15 bp, Homo sapiens
tgcattccaggctgg

SEQ ID NO: 1214843 - DNA, 15 bp, Homo sapiens
ctgcattccaggctg

SEQ ID NO: 1214844 - DNA, 15 bp, Homo sapiens
actgcattccaggct

SEQ ID NO: 1214845 - DNA, 15 bp, Homo sapiens
cactgcattccaggc

SEQ ID NO: 1214846 - DNA, 15 bp, Homo sapiens
ccactgcattccagg

SEQ ID NO: 1214847 - DNA, 15 bp, Homo sapiens
accactgcattccag

SEQ ID NO: 1214848 - DNA, 15 bp, Homo sapiens
caccactgcattcca

SEQ ID NO: 1214849 - DNA, 15 bp, Homo sapiens
gcaccactgcattcc

SEQ ID NO: 1214850 - DNA, 15 bp, Homo sapiens
ggcaccactgcattc

SEQ ID NO: 1214851 - DNA, 15 bp, Homo sapiens
tggcaccactgcatt

SEQ ID NO: 1214852 - DNA, 15 bp, Homo sapiens
atggcaccactgcat

SEQ ID NO: 1214853 - DNA, 15 bp, Homo sapiens
cagtgagccaagatg

SEQ ID NO: 1214854 - DNA, 15 bp, Homo sapiens
agcagtgagccaaga

SEQ ID NO: 1214855 - DNA, 15 bp, Homo sapiens
tagcagtgagccaag

SEQ ID NO: 1214856 - DNA, 15 bp, Homo sapiens
gtagcagtgagccaa

SEQ ID NO: 1214857 - DNA, 15 bp, Homo sapiens
ggtagcagtgagcca

SEQ ID NO: 1214858 - DNA, 15 bp, Homo sapiens
aggtagcagtgagcc

SEQ ID NO: 1214859 - DNA, 15 bp, Homo sapiens
gaggtagcagtgagc

SEQ ID NO: 1214860 - DNA, 15 bp, Homo sapiens
agaggtagcagtgag

SEQ ID NO: 1214861 - DNA, 15 bp, Homo sapiens
gagaggtagcagtga

SEQ ID NO: 1214862 - DNA, 15 bp, Homo sapiens
ggagaggtagcagtg

SEQ ID NO: 1214863 - DNA, 15 bp, Homo sapiens
gggagaggtagcagt

SEQ ID NO: 1214864 - DNA, 15 bp, Homo sapiens
tgggagaggtagcag

SEQ ID NO: 1214865 - DNA, 15 bp, Homo sapiens
gtgggagaggtagca

SEQ ID NO: 1214866 - DNA, 15 bp, Homo sapiens
agtgggagaggtagc

SEQ ID NO: 1214867 - DNA, 15 bp, Homo sapiens
cagtgggagaggtag

SEQ ID NO: 1214868 - DNA, 15 bp, Homo sapiens
ccagtgggagaggta

SEQ ID NO: 1214869 - DNA, 15 bp, Homo sapiens
cccagtgggagaggt

SEQ ID NO: 1214870 - DNA, 15 bp, Homo sapiens
acccagtgggagagg

SEQ ID NO: 1214871 - DNA, 15 bp, Homo sapiens
aacccagtgggagag

SEQ ID NO: 1214872 - DNA, 15 bp, Homo sapiens
gaacccagtgggaga

SEQ ID NO: 1214873 - DNA, 15 bp, Homo sapiens
tgaacccagtgggag

SEQ ID NO: 1214874 - DNA, 15 bp, Homo sapiens
ttgaacccagtggga

SEQ ID NO: 1214875 - DNA, 15 bp, Homo sapiens
cttgaacccagtggg

SEQ ID NO: 1214876 - DNA, 15 bp, Homo sapiens
gcttgaacccagtgg

SEQ ID NO: 1214877 - DNA, 15 bp, Homo sapiens
tgcttgaacccagtg

SEQ ID NO: 1214878 - DNA, 15 bp, Homo sapiens
ttgcttgaacccagt

SEQ ID NO: 1214879 - DNA, 15 bp, Homo sapiens
gcatgcttgtaatcc

SEQ ID NO: 1214880 - DNA, 15 bp, Homo sapiens
cgcatgcttgtaatc

SEQ ID NO: 1214881 - DNA, 15 bp, Homo sapiens
gcgcatgcttgtaat

SEQ ID NO: 1214882 - DNA, 15 bp, Homo sapiens
ggcgcatgcttgtaa

SEQ ID NO: 1214883 - DNA, 15 bp, Homo sapiens
tggtggcgcatgctt

SEQ ID NO: 1214884 - DNA, 15 bp, Homo sapiens
atggtggcgcatgct

SEQ ID NO: 1214885 - DNA, 15 bp, Homo sapiens
cttagccaggcatgg

SEQ ID NO: 1214886 - DNA, 15 bp, Homo sapiens
acttagccaggcatg

SEQ ID NO: 1214887 - DNA, 15 bp, Homo sapiens
aacttagccaggcat

SEQ ID NO: 1214888 - DNA, 15 bp, Homo sapiens
aaacttagccaggca

SEQ ID NO: 1214889 - DNA, 15 bp, Homo sapiens
aaaacttagccaggc

SEQ ID NO: 1214890 - DNA, 15 bp, Homo sapiens
caaaacttagccagg

SEQ ID NO: 1214891 - DNA, 15 bp, Homo sapiens
acaaaacttagccag

SEQ ID NO: 1214892 - DNA, 15 bp, Homo sapiens
tacaaaacttagcca

SEQ ID NO: 1214893 - DNA, 15 bp, Homo sapiens
atacaaaacttagcc

SEQ ID NO: 1214894 - DNA, 15 bp, Homo sapiens
aatacaaaacttagc

SEQ ID NO: 1214895 - DNA, 15 bp, Homo sapiens
aaatacaaaacttag

SEQ ID NO: 1214896 - DNA, 15 bp, Homo sapiens
aaaatacaaaactta

SEQ ID NO: 1214897 - DNA, 15 bp, Homo sapiens
aaaaatacaaaactt

SEQ ID NO: 1214898 - DNA, 15 bp, Homo sapiens
taaaaatacaaaact

SEQ ID NO: 1214899 - DNA, 15 bp, Homo sapiens
ctaaaaatacaaaac

SEQ ID NO: 1214900 - DNA, 15 bp, Homo sapiens
gtctgtactaaaaat

SEQ ID NO: 1214901 - DNA, 15 bp, Homo sapiens
tgtctgtactaaaaa

SEQ ID NO: 1214902 - DNA, 15 bp, Homo sapiens
ctgtctgtactaaaa

SEQ ID NO: 1214903 - DNA, 15 bp, Homo sapiens
cctgtctgtactaaa

SEQ ID NO: 1214904 - DNA, 15 bp, Homo sapiens
ccctgtctgtactaa

SEQ ID NO: 1214905 - DNA, 15 bp, Homo sapiens
accctgtctgtacta

SEQ ID NO: 1214906 - DNA, 15 bp, Homo sapiens
aaccctgtctgtact

SEQ ID NO: 1214907 - DNA, 15 bp, Homo sapiens
aaaccctgtctgtac

SEQ ID NO: 1214908 - DNA, 15 bp, Homo sapiens
gaaaccctgtctgta

SEQ ID NO: 1214909 - DNA, 15 bp, Homo sapiens
agaaaccctgtctgt

SEQ ID NO: 1214910 - DNA, 15 bp, Homo sapiens
gagaaaccctgtctg

SEQ ID NO: 1214911 - DNA, 15 bp, Homo sapiens
ccatggagaaaccct

SEQ ID NO: 1214912 - DNA, 15 bp, Homo sapiens
accatggagaaaccc

SEQ ID NO: 1214913 - DNA, 15 bp, Homo sapiens
caccatggagaaacc

SEQ ID NO: 1214914 - DNA, 15 bp, Homo sapiens
ccaccatggagaaac

SEQ ID NO: 1214915 - DNA, 15 bp, Homo sapiens
gccaccatggagaaa

SEQ ID NO: 1214916 - DNA, 15 bp, Homo sapiens
ggccaccatggagaa

SEQ ID NO: 1214917 - DNA, 15 bp, Homo sapiens
tggccaccatggaga

SEQ ID NO: 1214918 - DNA, 15 bp, Homo sapiens
ctggccaccatggag

SEQ ID NO: 1214919 - DNA, 15 bp, Homo sapiens
cctggccaccatgga

SEQ ID NO: 1214920 - DNA, 15 bp, Homo sapiens
gcctggccaccatgg

SEQ ID NO: 1214921 - DNA, 15 bp, Homo sapiens
agcctggccaccatg

SEQ ID NO: 1214922 - DNA, 15 bp, Homo sapiens
cagcctggccaccat

SEQ ID NO: 1214923 - DNA, 15 bp, Homo sapiens
ccagcctggccacca

SEQ ID NO: 1214924 - DNA, 15 bp, Homo sapiens
accagcctggccacc

SEQ ID NO: 1214925 - DNA, 15 bp, Homo sapiens
gaccagcctggccac

SEQ ID NO: 1214926 - DNA, 15 bp, Homo sapiens
ttcgggaggcagagg

SEQ ID NO: 1214927 - DNA, 15 bp, Homo sapiens
cttcgggaggcagag

SEQ ID NO: 1214928 - DNA, 15 bp, Homo sapiens
acttcgggaggcaga

SEQ ID NO: 1214929 - DNA, 15 bp, Homo sapiens
cacttcgggaggcag

SEQ ID NO: 1214930 - DNA, 15 bp, Homo sapiens
gcacttcgggaggca

SEQ ID NO: 1214931 - DNA, 15 bp, Homo sapiens
tagcacttcgggagg

SEQ ID NO: 1214932 - DNA, 15 bp, Homo sapiens
gtagcacttcgggag

SEQ ID NO: 1214933 - DNA, 15 bp, Homo sapiens
cgtagcacttcggga

SEQ ID NO: 1214934 - DNA, 15 bp, Homo sapiens
tcgtagcacttcggg

SEQ ID NO: 1214935 - DNA, 15 bp, Homo sapiens
atcgtagcacttcgg

SEQ ID NO: 1214936 - DNA, 15 bp, Homo sapiens
aatcgtagcacttcg

SEQ ID NO: 1214937 - DNA, 15 bp, Homo sapiens
taatcgtagcacttc

SEQ ID NO: 1214938 - DNA, 15 bp, Homo sapiens
gtaatcgtagcactt

SEQ ID NO: 1214939 - DNA, 15 bp, Homo sapiens
tgtaatcgtagcact

SEQ ID NO: 1214940 - DNA, 15 bp, Homo sapiens
ctgtaatcgtagcac

SEQ ID NO: 1214941 - DNA, 15 bp, Homo sapiens
cctgtaatcgtagca

SEQ ID NO: 1214942 - DNA, 15 bp, Homo sapiens
gcctgtaatcgtagc

SEQ ID NO: 1214943 - DNA, 15 bp, Homo sapiens
tgcctgtaatcgtag

SEQ ID NO: 1214944 - DNA, 15 bp, Homo sapiens
atgcctgtaatcgta

SEQ ID NO: 1214945 - DNA, 15 bp, Homo sapiens
catgcctgtaatcgt

SEQ ID NO: 1214946 - DNA, 15 bp, Homo sapiens
tcatgcctgtaatcg

SEQ ID NO: 1214947 - DNA, 15 bp, Homo sapiens
atgggcgcggtggct

SEQ ID NO: 1214948 - DNA, 15 bp, Homo sapiens
gatgggcgcggtggc

SEQ ID NO: 1214949 - DNA, 15 bp, Homo sapiens
ggatgggcgcggtgg

SEQ ID NO: 1214950 - DNA, 15 bp, Homo sapiens
gggatgggcgcggtg

SEQ ID NO: 1214951 - DNA, 15 bp, Homo sapiens
ggggatgggcgcggt

SEQ ID NO: 1214952 - DNA, 15 bp, Homo sapiens
gggggatgggcgcgg

SEQ ID NO: 1214953 - DNA, 15 bp, Homo sapiens
agggggatgggcgcg

SEQ ID NO: 1214954 - DNA, 15 bp, Homo sapiens
aagggggatgggcgc

SEQ ID NO: 1214955 - DNA, 15 bp, Homo sapiens
aaagggggatgggcg

SEQ ID NO: 1214956 - DNA, 15 bp, Homo sapiens
caaagggggatgggc

SEQ ID NO: 1214957 - DNA, 15 bp, Homo sapiens
acaaagggggatggg

SEQ ID NO: 1214958 - DNA, 15 bp, Homo sapiens
aacaaagggggatgg

SEQ ID NO: 1214959 - DNA, 15 bp, Homo sapiens
caacaaagggggatg

SEQ ID NO: 1214960 - DNA, 15 bp, Homo sapiens
tcaacaaagggggat

SEQ ID NO: 1214961 - DNA, 15 bp, Homo sapiens
gtcaacaaaggggga

SEQ ID NO: 1214962 - DNA, 15 bp, Homo sapiens
agtcaacaaaggggg

SEQ ID NO: 1214963 - DNA, 15 bp, Homo sapiens
gagaaaagtcaacaa

SEQ ID NO: 1214964 - DNA, 15 bp, Homo sapiens
tgagaaaagtcaaca

SEQ ID NO: 1214965 - DNA, 15 bp, Homo sapiens
atgagaaaagtcaac

SEQ ID NO: 1214966 - DNA, 15 bp, Homo sapiens
gatgagaaaagtcaa

SEQ ID NO: 1214967 - DNA, 15 bp, Homo sapiens
ggatgagaaaagtca

SEQ ID NO: 1214968 - DNA, 15 bp, Homo sapiens
aggatgagaaaagtc

SEQ ID NO: 1214969 - DNA, 15 bp, Homo sapiens
gaggatgagaaaagt

SEQ ID NO: 1214970 - DNA, 15 bp, Homo sapiens
agaggatgagaaaag

SEQ ID NO: 1214971 - DNA, 15 bp, Homo sapiens
cagaggatgagaaaa

SEQ ID NO: 1214972 - DNA, 15 bp, Homo sapiens
tcagaggatgagaaa

SEQ ID NO: 1214973 - DNA, 15 bp, Homo sapiens
ctcagaggatgagaa

SEQ ID NO: 1214974 - DNA, 15 bp, Homo sapiens
tctcagaggatgaga

SEQ ID NO: 1214975 - DNA, 15 bp, Homo sapiens
ttctcagaggatgag

SEQ ID NO: 1214976 - DNA, 15 bp, Homo sapiens
tttctcagaggatga

SEQ ID NO: 1214977 - DNA, 15 bp, Homo sapiens
ctttctcagaggatg

SEQ ID NO: 1214978 - DNA, 15 bp, Homo sapiens
actttctcagaggat

SEQ ID NO: 1214979 - DNA, 15 bp, Homo sapiens
gactttctcagagga

SEQ ID NO: 1214980 - DNA, 15 bp, Homo sapiens
agactttctcagagg

SEQ ID NO: 1214981 - DNA, 15 bp, Homo sapiens
gagactttctcagag

SEQ ID NO: 1214982 - DNA, 15 bp, Homo sapiens
tgagactttctcaga

SEQ ID NO: 1214983 - DNA, 15 bp, Homo sapiens
ctgagactttctcag

SEQ ID NO: 1214984 - DNA, 15 bp, Homo sapiens
actgagactttctca

SEQ ID NO: 1214985 - DNA, 15 bp, Homo sapiens
aactgagactttctc

SEQ ID NO: 1214986 - DNA, 15 bp, Homo sapiens
caactgagactttct

SEQ ID NO: 1214987 - DNA, 15 bp, Homo sapiens
tcaactgagactttc

SEQ ID NO: 1214988 - DNA, 15 bp, Homo sapiens
ctcaactgagacttt

SEQ ID NO: 1214989 - DNA, 15 bp, Homo sapiens
cctcaactgagactt

SEQ ID NO: 1214990 - DNA, 15 bp, Homo sapiens
gcctcaactgagact

SEQ ID NO: 1214991 - DNA, 15 bp, Homo sapiens
ggcctcaactgagac

SEQ ID NO: 1214992 - DNA, 15 bp, Homo sapiens
tggcctcaactgaga

SEQ ID NO: 1214993 - DNA, 15 bp, Homo sapiens
ctggcctcaactgag

SEQ ID NO: 1214994 - DNA, 15 bp, Homo sapiens
gctggcctcaactga

SEQ ID NO: 1214995 - DNA, 15 bp, Homo sapiens
tgctggcctcaactg

SEQ ID NO: 1214996 - DNA, 15 bp, Homo sapiens
gtgctggcctcaact

SEQ ID NO: 1214997 - DNA, 15 bp, Homo sapiens
ggtgctggcctcaac

SEQ ID NO: 1214998 - DNA, 15 bp, Homo sapiens
aggtgctggcctcaa

SEQ ID NO: 1214999 - DNA, 15 bp, Homo sapiens
gaggtgctggcctca

SEQ ID NO: 1215000 - DNA, 15 bp, Homo sapiens
ggaggtgctggcctc

SEQ ID NO: 1215001 - DNA, 15 bp, Homo sapiens
gggaggtgctggcct

SEQ ID NO: 1215002 - DNA, 15 bp, Homo sapiens
agggaggtgctggcc

SEQ ID NO: 1215003 - DNA, 15 bp, Homo sapiens
gagggaggtgctggc

SEQ ID NO: 1215004 - DNA, 15 bp, Homo sapiens
tgagggaggtgctgg

SEQ ID NO: 1215005 - DNA, 15 bp, Homo sapiens
ttgagggaggtgctg

SEQ ID NO: 1215006 - DNA, 15 bp, Homo sapiens
cttgagggaggtgct

SEQ ID NO: 1215007 - DNA, 15 bp, Homo sapiens
acttgagggaggtgc

SEQ ID NO: 1215008 - DNA, 15 bp, Homo sapiens
cacttgagggaggtg

SEQ ID NO: 1215009 - DNA, 15 bp, Homo sapiens
tcacttgagggaggt

SEQ ID NO: 1215010 - DNA, 15 bp, Homo sapiens
ttcacttgagggagg

SEQ ID NO: 1215011 - DNA, 15 bp, Homo sapiens
attcacttgagggag

SEQ ID NO: 1215012 - DNA, 15 bp, Homo sapiens
aattcacttgaggga

SEQ ID NO: 1215013 - DNA, 15 bp, Homo sapiens
caattcacttgaggg

SEQ ID NO: 1215014 - DNA, 15 bp, Homo sapiens
tcaattcacttgagg

SEQ ID NO: 1215015 - DNA, 15 bp, Homo sapiens
ttcaattcacttgag

SEQ ID NO: 1215016 - DNA, 15 bp, Homo sapiens
attcaattcacttga

SEQ ID NO: 1215017 - DNA, 15 bp, Homo sapiens
gattcaattcacttg

SEQ ID NO: 1215018 - DNA, 15 bp, Homo sapiens
agattcaattcactt

SEQ ID NO: 1215019 - DNA, 15 bp, Homo sapiens
gagattcaattcact

SEQ ID NO: 1215020 - DNA, 15 bp, Homo sapiens
ggagattcaattcac

SEQ ID NO: 1215021 - DNA, 15 bp, Homo sapiens
gggagattcaattca

SEQ ID NO: 1215022 - DNA, 15 bp, Homo sapiens
agggagattcaattc

SEQ ID NO: 1215023 - DNA, 15 bp, Homo sapiens
aagggagattcaatt

SEQ ID NO: 1215024 - DNA, 15 bp, Homo sapiens
aaagggagattcaat

SEQ ID NO: 1215025 - DNA, 15 bp, Homo sapiens
aaaagggagattcaa

SEQ ID NO: 1215026 - DNA, 15 bp, Homo sapiens
caaaagggagattca

SEQ ID NO: 1215027 - DNA, 15 bp, Homo sapiens
tcaaaagggagattc

SEQ ID NO: 1215028 - DNA, 15 bp, Homo sapiens
ttcaaaagggagatt

SEQ ID NO: 1215029 - DNA, 15 bp, Homo sapiens
gttcaaaagggagat

SEQ ID NO: 1215030 - DNA, 15 bp, Homo sapiens
tgttcaaaagggaga

SEQ ID NO: 1215031 - DNA, 15 bp, Homo sapiens
ttgttcaaaagggag

SEQ ID NO: 1215032 - DNA, 15 bp, Homo sapiens
gttgttcaaaaggga

SEQ ID NO: 1215033 - DNA, 15 bp, Homo sapiens
tgttgttcaaaaggg

SEQ ID NO: 1215034 - DNA, 15 bp, Homo sapiens
ttgttgttcaaaagg

SEQ ID NO: 1215035 - DNA, 15 bp, Homo sapiens
gttgttgttcaaaag

SEQ ID NO: 1215036 - DNA, 15 bp, Homo sapiens
tgttgttgttcaaaa

SEQ ID NO: 1215037 - DNA, 15 bp, Homo sapiens
ttgttgttgttcaaa

SEQ ID NO: 1215038 - DNA, 15 bp, Homo sapiens
tttgttgttgttcaa

SEQ ID NO: 1215039 - DNA, 15 bp, Homo sapiens
atttgttgttgttca

SEQ ID NO: 1215040 - DNA, 15 bp, Homo sapiens
tatttgttgttgttc

SEQ ID NO: 1215041 - DNA, 15 bp, Homo sapiens
ttatttgttgttgtt

SEQ ID NO: 1215042 - DNA, 15 bp, Homo sapiens
gttatttgttgttgt

SEQ ID NO: 1215043 - DNA, 15 bp, Homo sapiens
tgttatttgttgttg

SEQ ID NO: 1215044 - DNA, 15 bp, Homo sapiens
ttgttatttgttgtt

SEQ ID NO: 1215045 - DNA, 15 bp, Homo sapiens
attgttatttgttgt

SEQ ID NO: 1215046 - DNA, 15 bp, Homo sapiens
tattgttatttgttg

SEQ ID NO: 1215047 - DNA, 15 bp, Homo sapiens
atattgttatttgtt

SEQ ID NO: 1215048 - DNA, 15 bp, Homo sapiens
catattgttatttgt

SEQ ID NO: 1215049 - DNA, 15 bp, Homo sapiens
tcatattgttatttg

SEQ ID NO: 1215050 - DNA, 15 bp, Homo sapiens
gtcatattgttattt

SEQ ID NO: 1215051 - DNA, 15 bp, Homo sapiens
ggtcatattgttatt

SEQ ID NO: 1215052 - DNA, 15 bp, Homo sapiens
gggtcatattgttat

SEQ ID NO: 1215053 - DNA, 15 bp, Homo sapiens
tgggtcatattgtta

SEQ ID NO: 1215054 - DNA, 15 bp, Homo sapiens
ctgggtcatattgtt

SEQ ID NO: 1215055 - DNA, 15 bp, Homo sapiens
tctgggtcatattgt

SEQ ID NO: 1215056 - DNA, 15 bp, Homo sapiens
gtctgggtcatattg

SEQ ID NO: 1215057 - DNA, 15 bp, Homo sapiens
cgtctgggtcatatt

SEQ ID NO: 1215058 - DNA, 15 bp, Homo sapiens
acgtctgggtcatat

SEQ ID NO: 1215059 - DNA, 15 bp, Homo sapiens
cacgtctgggtcata

SEQ ID NO: 1215060 - DNA, 15 bp, Homo sapiens
ccacgtctgggtcat

SEQ ID NO: 1215061 - DNA, 15 bp, Homo sapiens
accacgtctgggtca

SEQ ID NO: 1215062 - DNA, 15 bp, Homo sapiens
caccacgtctgggtc

SEQ ID NO: 1215063 - DNA, 15 bp, Homo sapiens
ccaccacgtctgggt

SEQ ID NO: 1215064 - DNA, 15 bp, Homo sapiens
gccaccacgtctggg

SEQ ID NO: 1215065 - DNA, 15 bp, Homo sapiens
agccaccacgtctgg

SEQ ID NO: 1215066 - DNA, 15 bp, Homo sapiens
gagccaccacgtctg

SEQ ID NO: 1215067 - DNA, 15 bp, Homo sapiens
tgagccaccacgtct

SEQ ID NO: 1215068 - DNA, 15 bp, Homo sapiens
gtgagccaccacgtc

SEQ ID NO: 1215069 - DNA, 15 bp, Homo sapiens
tgtgagccaccacgt

SEQ ID NO: 1215070 - DNA, 15 bp, Homo sapiens
cacaggtgtgagcca

SEQ ID NO: 1215071 - DNA, 15 bp, Homo sapiens
ccacaggtgtgagcc

SEQ ID NO: 1215072 - DNA, 15 bp, Homo sapiens
accacaggtgtgagc

SEQ ID NO: 1215073 - DNA, 15 bp, Homo sapiens
gaccacaggtgtgag

SEQ ID NO: 1215074 - DNA, 15 bp, Homo sapiens
ggaccacaggtgtga

SEQ ID NO: 1215075 - DNA, 15 bp, Homo sapiens
cgagtagctgggacc

SEQ ID NO: 1215076 - DNA, 15 bp, Homo sapiens
acacctcagcctccc

SEQ ID NO: 1215077 - DNA, 15 bp, Homo sapiens
cacacctcagcctcc

SEQ ID NO: 1215078 - DNA, 15 bp, Homo sapiens
tcacacctcagcctc

SEQ ID NO: 1215079 - DNA, 15 bp, Homo sapiens
ctcacacctcagcct

SEQ ID NO: 1215080 - DNA, 15 bp, Homo sapiens
cctcacacctcagcc

SEQ ID NO: 1215081 - DNA, 15 bp, Homo sapiens
tcctcacacctcagc

SEQ ID NO: 1215082 - DNA, 15 bp, Homo sapiens
atcctcacacctcag

SEQ ID NO: 1215083 - DNA, 15 bp, Homo sapiens
aatcctcacacctca

SEQ ID NO: 1215084 - DNA, 15 bp, Homo sapiens
caatcctcacacctc

SEQ ID NO: 1215085 - DNA, 15 bp, Homo sapiens
gcaatcctcacacct

SEQ ID NO: 1215086 - DNA, 15 bp, Homo sapiens
agcaatcctcacacc

SEQ ID NO: 1215087 - DNA, 15 bp, Homo sapiens
aagcaatcctcacac

SEQ ID NO: 1215088 - DNA, 15 bp, Homo sapiens
caagcaatcctcaca

SEQ ID NO: 1215089 - DNA, 15 bp, Homo sapiens
tcaagcaatcctcac

SEQ ID NO: 1215090 - DNA, 15 bp, Homo sapiens
ctcaagcaatcctca

SEQ ID NO: 1215091 - DNA, 15 bp, Homo sapiens
tagccttgacctcct

SEQ ID NO: 1215092 - DNA, 15 bp, Homo sapiens
gtagccttgacctcc

SEQ ID NO: 1215093 - DNA, 15 bp, Homo sapiens
tgtagccttgacctc

SEQ ID NO: 1215094 - DNA, 15 bp, Homo sapiens
ctgtagccttgacct

SEQ ID NO: 1215095 - DNA, 15 bp, Homo sapiens
tctgtagccttgacc

SEQ ID NO: 1215096 - DNA, 15 bp, Homo sapiens
ctctgtagccttgac

SEQ ID NO: 1215097 - DNA, 15 bp, Homo sapiens
tctctgtagccttga

SEQ ID NO: 1215098 - DNA, 15 bp, Homo sapiens
ctctctgtagccttg

SEQ ID NO: 1215099 - DNA, 15 bp, Homo sapiens
gctctctgtagcctt

SEQ ID NO: 1215100 - DNA, 15 bp, Homo sapiens
agctctctgtagcct

SEQ ID NO: 1215101 - DNA, 15 bp, Homo sapiens
tagctctctgtagcc

SEQ ID NO: 1215102 - DNA, 15 bp, Homo sapiens
atagctctctgtagc

SEQ ID NO: 1215103 - DNA, 15 bp, Homo sapiens
tatagctctctgtag

SEQ ID NO: 1215104 - DNA, 15 bp, Homo sapiens
ttatagctctctgta

SEQ ID NO: 1215105 - DNA, 15 bp, Homo sapiens
attatagctctctgt

SEQ ID NO: 1215106 - DNA, 15 bp, Homo sapiens
gattatagctctctg

SEQ ID NO: 1215107 - DNA, 15 bp, Homo sapiens
tgattatagctctct

SEQ ID NO: 1215108 - DNA, 15 bp, Homo sapiens
gtgattatagctctc

SEQ ID NO: 1215109 - DNA, 15 bp, Homo sapiens
tgtgattatagctct

SEQ ID NO: 1215110 - DNA, 15 bp, Homo sapiens
gtgtgattatagctc

SEQ ID NO: 1215111 - DNA, 15 bp, Homo sapiens
ggtgtgattatagct

SEQ ID NO: 1215112 - DNA, 15 bp, Homo sapiens
tggtgtgattatagc

SEQ ID NO: 1215113 - DNA, 15 bp, Homo sapiens
gtggtgtgattatag

SEQ ID NO: 1215114 - DNA, 15 bp, Homo sapiens
agtggtgtgattata

SEQ ID NO: 1215115 - DNA, 15 bp, Homo sapiens
aagtggtgtgattat

SEQ ID NO: 1215116 - DNA, 15 bp, Homo sapiens
gaagtggtgtgatta

SEQ ID NO: 1215117 - DNA, 15 bp, Homo sapiens
tgaagtggtgtgatt

SEQ ID NO: 1215118 - DNA, 15 bp, Homo sapiens
gtgaagtggtgtgat

SEQ ID NO: 1215119 - DNA, 15 bp, Homo sapiens
agtgaagtggtgtga

SEQ ID NO: 1215120 - DNA, 15 bp, Homo sapiens
gagtgaagtggtgtg

SEQ ID NO: 1215121 - DNA, 15 bp, Homo sapiens
ggagtgaagtggtgt

SEQ ID NO: 1215122 - DNA, 15 bp, Homo sapiens
tggagtgaagtggtg

SEQ ID NO: 1215123 - DNA, 15 bp, Homo sapiens
ctggagtgaagtggt

SEQ ID NO: 1215124 - DNA, 15 bp, Homo sapiens
actttgtcccccagg

SEQ ID NO: 1215125 - DNA, 15 bp, Homo sapiens
cactttgtcccccag

SEQ ID NO: 1215126 - DNA, 15 bp, Homo sapiens
tcactttgtccccca

SEQ ID NO: 1215127 - DNA, 15 bp, Homo sapiens
ttcactttgtccccc

SEQ ID NO: 1215128 - DNA, 15 bp, Homo sapiens
tttcactttgtcccc

SEQ ID NO: 1215129 - DNA, 15 bp, Homo sapiens
gtttcactttgtccc

SEQ ID NO: 1215130 - DNA, 15 bp, Homo sapiens
ggtttcactttgtcc

SEQ ID NO: 1215131 - DNA, 15 bp, Homo sapiens
gggtttcactttgtc

SEQ ID NO: 1215132 - DNA, 15 bp, Homo sapiens
agggtttcactttgt

SEQ ID NO: 1215133 - DNA, 15 bp, Homo sapiens
cagggtttcactttg

SEQ ID NO: 1215134 - DNA, 15 bp, Homo sapiens
acagggtttcacttt

SEQ ID NO: 1215135 - DNA, 15 bp, Homo sapiens
gacagggtttcactt

SEQ ID NO: 1215136 - DNA, 15 bp, Homo sapiens
cagacagggtttcac

SEQ ID NO: 1215137 - DNA, 15 bp, Homo sapiens
tcagacagggtttca

SEQ ID NO: 1215138 - DNA, 15 bp, Homo sapiens
ttcagacagggtttc

SEQ ID NO: 1215139 - DNA, 15 bp, Homo sapiens
tttcagacagggttt

SEQ ID NO: 1215140 - DNA, 15 bp, Homo sapiens
ttttcagacagggtt

SEQ ID NO: 1215141 - DNA, 15 bp, Homo sapiens
tttttcagacagggt

SEQ ID NO: 1215142 - DNA, 15 bp, Homo sapiens
ttttttcagacaggg

SEQ ID NO: 1215143 - DNA, 15 bp, Homo sapiens
tttttttcagacagg

SEQ ID NO: 1215144 - DNA, 15 bp, Homo sapiens
gtttttttcagacag

SEQ ID NO: 1215145 - DNA, 15 bp, Homo sapiens
tgtttttttcagaca

SEQ ID NO: 1215146 - DNA, 15 bp, Homo sapiens
ttgtttttttcagac

SEQ ID NO: 1215147 - DNA, 15 bp, Homo sapiens
tttgtttttttcaga

SEQ ID NO: 1215148 - DNA, 15 bp, Homo sapiens
ttttgtttttttcag

SEQ ID NO: 1215149 - DNA, 15 bp, Homo sapiens
tttttgtttttttca

SEQ ID NO: 1215150 - DNA, 15 bp, Homo sapiens
ctttttttgtttttt

SEQ ID NO: 1215151 - DNA, 15 bp, Homo sapiens
tctttttttgttttt

SEQ ID NO: 1215152 - DNA, 15 bp, Homo sapiens
ttctttttttgtttt

SEQ ID NO: 1215153 - DNA, 15 bp, Homo sapiens
ttttctttttttgtt

SEQ ID NO: 1215154 - DNA, 15 bp, Homo sapiens
tttttctttttttgt

SEQ ID NO: 1215155 - DNA, 15 bp, Homo sapiens
ctttttctttttttg

SEQ ID NO: 1215156 - DNA, 15 bp, Homo sapiens
cctttttcttttttt

SEQ ID NO: 1215157 - DNA, 15 bp, Homo sapiens
tcctttttctttttt

SEQ ID NO: 1215158 - DNA, 15 bp, Homo sapiens
tttttcctttttctt

SEQ ID NO: 1215159 - DNA, 15 bp, Homo sapiens
ctttttcctttttct

SEQ ID NO: 1215160 - DNA, 15 bp, Homo sapiens
tctttttcctttttc

SEQ ID NO: 1215161 - DNA, 15 bp, Homo sapiens
ttctttttccttttt

SEQ ID NO: 1215162 - DNA, 15 bp, Homo sapiens
tttctttttcctttt

SEQ ID NO: 1215163 - DNA, 15 bp, Homo sapiens
gtttctttttccttt

SEQ ID NO: 1215164 - DNA, 15 bp, Homo sapiens
tgtttctttttcctt

SEQ ID NO: 1215165 - DNA, 15 bp, Homo sapiens
ttgtttctttttcct

SEQ ID NO: 1215166 - DNA, 15 bp, Homo sapiens
attgtttctttttcc

SEQ ID NO: 1215167 - DNA, 15 bp, Homo sapiens
tattgtttctttttc

SEQ ID NO: 1215168 - DNA, 15 bp, Homo sapiens
gtattgtttcttttt

SEQ ID NO: 1215169 - DNA, 15 bp, Homo sapiens
cgtattgtttctttt

SEQ ID NO: 1215170 - DNA, 15 bp, Homo sapiens
tcgtattgtttcttt

SEQ ID NO: 1215171 - DNA, 15 bp, Homo sapiens
atcgtattgtttctt

SEQ ID NO: 1215172 - DNA, 15 bp, Homo sapiens
gatcgtattgtttct

SEQ ID NO: 1215173 - DNA, 15 bp, Homo sapiens
tgatcgtattgtttc

SEQ ID NO: 1215174 - DNA, 15 bp, Homo sapiens
gtgatcgtattgttt

SEQ ID NO: 1215175 - DNA, 15 bp, Homo sapiens
tgtgatcgtattgtt

SEQ ID NO: 1215176 - DNA, 15 bp, Homo sapiens
ttgtgatcgtattgt

SEQ ID NO: 1215177 - DNA, 15 bp, Homo sapiens
tttgtgatcgtattg

SEQ ID NO: 1215178 - DNA, 15 bp, Homo sapiens
ctttgtgatcgtatt

SEQ ID NO: 1215179 - DNA, 15 bp, Homo sapiens
actttgtgatcgtat

SEQ ID NO: 1215180 - DNA, 15 bp, Homo sapiens
tactttgtgatcgta

SEQ ID NO: 1215181 - DNA, 15 bp, Homo sapiens
ctactttgtgatcgt

SEQ ID NO: 1215182 - DNA, 15 bp, Homo sapiens
tctactttgtgatcg

SEQ ID NO: 1215183 - DNA, 15 bp, Homo sapiens
atctactttgtgatc

SEQ ID NO: 1215184 - DNA, 15 bp, Homo sapiens
tatctactttgtgat

SEQ ID NO: 1215185 - DNA, 15 bp, Homo sapiens
atatctactttgtga

SEQ ID NO: 1215186 - DNA, 15 bp, Homo sapiens
aatatctactttgtg

SEQ ID NO: 1215187 - DNA, 15 bp, Homo sapiens
gaatatctactttgt

SEQ ID NO: 1215188 - DNA, 15 bp, Homo sapiens
tgaatatctactttg

SEQ ID NO: 1215189 - DNA, 15 bp, Homo sapiens
atgaatatctacttt

SEQ ID NO: 1215190 - DNA, 15 bp, Homo sapiens
tatgaatatctactt

SEQ ID NO: 1215191 - DNA, 15 bp, Homo sapiens
ctatgaatatctact

SEQ ID NO: 1215192 - DNA, 15 bp, Homo sapiens
actatgaatatctac

SEQ ID NO: 1215193 - DNA, 15 bp, Homo sapiens
cactatgaatatcta

SEQ ID NO: 1215194 - DNA, 15 bp, Homo sapiens
acactatgaatatct

SEQ ID NO: 1215195 - DNA, 15 bp, Homo sapiens
aacactatgaatatc

SEQ ID NO: 1215196 - DNA, 15 bp, Homo sapiens
aaacactatgaatat

SEQ ID NO: 1215197 - DNA, 15 bp, Homo sapiens
taaacactatgaata

SEQ ID NO: 1215198 - DNA, 15 bp, Homo sapiens
ataaacactatgaat

SEQ ID NO: 1215199 - DNA, 15 bp, Homo sapiens
aataaacactatgaa

SEQ ID NO: 1215200 - DNA, 15 bp, Homo sapiens
aaataaacactatga

SEQ ID NO: 1215201 - DNA, 15 bp, Homo sapiens
aaaataaacactatg

SEQ ID NO: 1215202 - DNA, 15 bp, Homo sapiens
gaaaataaacactat

SEQ ID NO: 1215203 - DNA, 15 bp, Homo sapiens
tgaaaataaacacta

SEQ ID NO: 1215204 - DNA, 15 bp, Homo sapiens
ctgaaaataaacact

SEQ ID NO: 1215205 - DNA, 15 bp, Homo sapiens
actgaaaataaacac

SEQ ID NO: 1215206 - DNA, 15 bp, Homo sapiens
tactgaaaataaaca

SEQ ID NO: 1215207 - DNA, 15 bp, Homo sapiens
gtactgaaaataaac

SEQ ID NO: 1215208 - DNA, 15 bp, Homo sapiens
agtactgaaaataaa

SEQ ID NO: 1215209 - DNA, 15 bp, Homo sapiens
gagtactgaaaataa

SEQ ID NO: 1215210 - DNA, 15 bp, Homo sapiens
agagtactgaaaata

SEQ ID NO: 1215211 - DNA, 15 bp, Homo sapiens
aagagtactgaaaat

SEQ ID NO: 1215212 - DNA, 15 bp, Homo sapiens
aaagagtactgaaaa

SEQ ID NO: 1215213 - DNA, 15 bp, Homo sapiens
aaaagagtactgaaa

SEQ ID NO: 1215214 - DNA, 15 bp, Homo sapiens
aaaaagagtactgaa

SEQ ID NO: 1215215 - DNA, 15 bp, Homo sapiens
aaaaaagagtactga

SEQ ID NO: 1215216 - DNA, 15 bp, Homo sapiens
aaaaaaagagtactg

SEQ ID NO: 1215217 - DNA, 15 bp, Homo sapiens
aaaaaaaagagtact

SEQ ID NO: 1215218 - DNA, 15 bp, Homo sapiens
aaaaaaaaagagtac

SEQ ID NO: 1215219 - DNA, 15 bp, Homo sapiens
aaaaaaaaaagagta

SEQ ID NO: 1215220 - DNA, 15 bp, Homo sapiens
aaaaaaaaaaagagt

SEQ ID NO: 1215221 - DNA, 15 bp, Homo sapiens
gcgcttgaacctggg

SEQ ID NO: 1215222 - DNA, 15 bp, Homo sapiens
agcgcttgaacctgg

SEQ ID NO: 1215223 - DNA, 15 bp, Homo sapiens
aagcgcttgaacctg

SEQ ID NO: 1215224 - DNA, 15 bp, Homo sapiens
caagcgcttgaacct

SEQ ID NO: 1215225 - DNA, 15 bp, Homo sapiens
ccaagcgcttgaacc

SEQ ID NO: 1215226 - DNA, 15 bp, Homo sapiens
gccaagcgcttgaac

SEQ ID NO: 1215227 - DNA, 15 bp, Homo sapiens
agccaagcgcttgaa

SEQ ID NO: 1215228 - DNA, 15 bp, Homo sapiens
gagccaagcgcttga

SEQ ID NO: 1215229 - DNA, 15 bp, Homo sapiens
tgagccaagcgcttg

SEQ ID NO: 1215230 - DNA, 15 bp, Homo sapiens
gtgagccaagcgctt

SEQ ID NO: 1215231 - DNA, 15 bp, Homo sapiens
agtgagccaagcgct

SEQ ID NO: 1215232 - DNA, 15 bp, Homo sapiens
cagtgagccaagcgc

SEQ ID NO: 1215233 - DNA, 15 bp, Homo sapiens
gcagtgagccaagcg

SEQ ID NO: 1215234 - DNA, 15 bp, Homo sapiens
tgcagtgagccaagc

SEQ ID NO: 1215235 - DNA, 15 bp, Homo sapiens
gcgcttgaacccagg

SEQ ID NO: 1215236 - DNA, 15 bp, Homo sapiens
agcgcttgaacccag

SEQ ID NO: 1215237 - DNA, 15 bp, Homo sapiens
aagcgcttgaaccca

SEQ ID NO: 1215238 - DNA, 15 bp, Homo sapiens
gaagcgcttgaaccc

SEQ ID NO: 1215239 - DNA, 15 bp, Homo sapiens
agaagcgcttgaacc

SEQ ID NO: 1215240 - DNA, 15 bp, Homo sapiens
aagaagcgcttgaac

SEQ ID NO: 1215241 - DNA, 15 bp, Homo sapiens
gaagaagcgcttgaa

SEQ ID NO: 1215242 - DNA, 15 bp, Homo sapiens
agaagaagcgcttga

SEQ ID NO: 1215243 - DNA, 15 bp, Homo sapiens
cagaagaagcgcttg

SEQ ID NO: 1215244 - DNA, 15 bp, Homo sapiens
gcagaagaagcgctt

SEQ ID NO: 1215245 - DNA, 15 bp, Homo sapiens
ggcagaagaagcgct

SEQ ID NO: 1215246 - DNA, 15 bp, Homo sapiens
aggcagaagaagcgc

SEQ ID NO: 1215247 - DNA, 15 bp, Homo sapiens
gaggcagaagaagcg

SEQ ID NO: 1215248 - DNA, 15 bp, Homo sapiens
tgaggcagaagaagc

SEQ ID NO: 1215249 - DNA, 15 bp, Homo sapiens
ctgaggcagaagaag

SEQ ID NO: 1215250 - DNA, 15 bp, Homo sapiens
cgtgcctatagtccc

SEQ ID NO: 1215251 - DNA, 15 bp, Homo sapiens
acgtgcctatagtcc

SEQ ID NO: 1215252 - DNA, 15 bp, Homo sapiens
gacgtgcctatagtc

SEQ ID NO: 1215253 - DNA, 15 bp, Homo sapiens
ggacgtgcctatagt

SEQ ID NO: 1215254 - DNA, 15 bp, Homo sapiens
gggacgtgcctatag

SEQ ID NO: 1215255 - DNA, 15 bp, Homo sapiens
tgggacgtgcctata

SEQ ID NO: 1215256 - DNA, 15 bp, Homo sapiens
gtgggacgtgcctat

SEQ ID NO: 1215257 - DNA, 15 bp, Homo sapiens
agtgggacgtgccta

SEQ ID NO: 1215258 - DNA, 15 bp, Homo sapiens
tagtgggacgtgcct

SEQ ID NO: 1215259 - DNA, 15 bp, Homo sapiens
gtagtgggacgtgcc

SEQ ID NO: 1215260 - DNA, 15 bp, Homo sapiens
cgtagtgggacgtgc

SEQ ID NO: 1215261 - DNA, 15 bp, Homo sapiens
gcgtagtgggacgtg

SEQ ID NO: 1215262 - DNA, 15 bp, Homo sapiens
ggcgtagtgggacgt

SEQ ID NO: 1215263 - DNA, 15 bp, Homo sapiens
gggcgtagtgggacg

SEQ ID NO: 1215264 - DNA, 15 bp, Homo sapiens
tgggcgtagtgggac

SEQ ID NO: 1215265 - DNA, 15 bp, Homo sapiens
ctgggcgtagtggga

SEQ ID NO: 1215266 - DNA, 15 bp, Homo sapiens
gctgggcgtagtggg

SEQ ID NO: 1215267 - DNA, 15 bp, Homo sapiens
agctgggcgtagtgg

SEQ ID NO: 1215268 - DNA, 15 bp, Homo sapiens
tagctgggcgtagtg

SEQ ID NO: 1215269 - DNA, 15 bp, Homo sapiens
ttagctgggcgtagt

SEQ ID NO: 1215270 - DNA, 15 bp, Homo sapiens
attagctgggcgtag

SEQ ID NO: 1215271 - DNA, 15 bp, Homo sapiens
aattagctgggcgta

SEQ ID NO: 1215272 - DNA, 15 bp, Homo sapiens
ctggctaacatagtg

SEQ ID NO: 1215273 - DNA, 15 bp, Homo sapiens
cctggctaacatagt

SEQ ID NO: 1215274 - DNA, 15 bp, Homo sapiens
tcctggctaacatag

SEQ ID NO: 1215275 - DNA, 15 bp, Homo sapiens
atcctggctaacata

SEQ ID NO: 1215276 - DNA, 15 bp, Homo sapiens
aggcagatcacgagg

SEQ ID NO: 1215277 - DNA, 15 bp, Homo sapiens
gcaggcagatcacga

SEQ ID NO: 1215278 - DNA, 15 bp, Homo sapiens
ggcaggcagatcacg

SEQ ID NO: 1215279 - DNA, 15 bp, Homo sapiens
aaggcaggcagatca

SEQ ID NO: 1215280 - DNA, 15 bp, Homo sapiens
cccaaggcaggcaga

SEQ ID NO: 1215281 - DNA, 15 bp, Homo sapiens
gcccaaggcaggcag

SEQ ID NO: 1215282 - DNA, 15 bp, Homo sapiens
agcccaaggcaggca

SEQ ID NO: 1215283 - DNA, 15 bp, Homo sapiens
gagcccaaggcaggc

SEQ ID NO: 1215284 - DNA, 15 bp, Homo sapiens
ggagcccaaggcagg

SEQ ID NO: 1215285 - DNA, 15 bp, Homo sapiens
gggagcccaaggcag

SEQ ID NO: 1215286 - DNA, 15 bp, Homo sapiens
tgggagcccaaggca

SEQ ID NO: 1215287 - DNA, 15 bp, Homo sapiens
ttgggagcccaaggc

SEQ ID NO: 1215288 - DNA, 15 bp, Homo sapiens
tttgggagcccaagg

SEQ ID NO: 1215289 - DNA, 15 bp, Homo sapiens
ctttgggagcccaag

SEQ ID NO: 1215290 - DNA, 15 bp, Homo sapiens
actttgggagcccaa

SEQ ID NO: 1215291 - DNA, 15 bp, Homo sapiens
cactttgggagccca

SEQ ID NO: 1215292 - DNA, 15 bp, Homo sapiens
acactttgggagccc

SEQ ID NO: 1215293 - DNA, 15 bp, Homo sapiens
aacactttgggagcc

SEQ ID NO: 1215294 - DNA, 15 bp, Homo sapiens
caacactttgggagc

SEQ ID NO: 1215295 - DNA, 15 bp, Homo sapiens
ataatcccaacactt

SEQ ID NO: 1215296 - DNA, 15 bp, Homo sapiens
cataatcccaacact

SEQ ID NO: 1215297 - DNA, 15 bp, Homo sapiens
ccataatcccaacac

SEQ ID NO: 1215298 - DNA, 15 bp, Homo sapiens
cccataatcccaaca

SEQ ID NO: 1215299 - DNA, 15 bp, Homo sapiens
gcccataatcccaac

SEQ ID NO: 1215300 - DNA, 15 bp, Homo sapiens
tgcccataatcccaa

SEQ ID NO: 1215301 - DNA, 15 bp, Homo sapiens
tcatgcccataatcc

SEQ ID NO: 1215302 - DNA, 15 bp, Homo sapiens
ctcatgcccataatc

SEQ ID NO: 1215303 - DNA, 15 bp, Homo sapiens
gctcatgcccataat

SEQ ID NO: 1215304 - DNA, 15 bp, Homo sapiens
ggctcatgcccataa

SEQ ID NO: 1215305 - DNA, 15 bp, Homo sapiens
tggctcatgcccata

SEQ ID NO: 1215306 - DNA, 15 bp, Homo sapiens
gtggctcatgcccat

SEQ ID NO: 1215307 - DNA, 15 bp, Homo sapiens
agtggctcatgccca

SEQ ID NO: 1215308 - DNA, 15 bp, Homo sapiens
aaaggccaggtgcag

SEQ ID NO: 1215309 - DNA, 15 bp, Homo sapiens
aaaaggccaggtgca

SEQ ID NO: 1215310 - DNA, 15 bp, Homo sapiens
aaaaaggccaggtgc

SEQ ID NO: 1215311 - DNA, 15 bp, Homo sapiens
aaaaaaggccaggtg

SEQ ID NO: 1215312 - DNA, 15 bp, Homo sapiens
aaaaaaaggccaggt

SEQ ID NO: 1215313 - DNA, 15 bp, Homo sapiens
ctgggcaacaagagc

SEQ ID NO: 1215314 - DNA, 15 bp, Homo sapiens
ccgagatcacaccat

SEQ ID NO: 1215315 - DNA, 15 bp, Homo sapiens
gtacaaaaattagcc

SEQ ID NO: 1215316 - DNA, 15 bp, Homo sapiens
ggccgaggtgggtgg

SEQ ID NO: 1215317 - DNA, 15 bp, Homo sapiens
aggccgaggtgggtg

SEQ ID NO: 1215318 - DNA, 15 bp, Homo sapiens
gaggccgaggtgggt

SEQ ID NO: 1215319 - DNA, 15 bp, Homo sapiens
aactttgggaggccg

SEQ ID NO: 1215320 - DNA, 15 bp, Homo sapiens
gaactttgggaggcc

SEQ ID NO: 1215321 - DNA, 15 bp, Homo sapiens
agaactttgggaggc

SEQ ID NO: 1215322 - DNA, 15 bp, Homo sapiens
cagaactttgggagg

SEQ ID NO: 1215323 - DNA, 15 bp, Homo sapiens
tctgtaatcccagaa

SEQ ID NO: 1215324 - DNA, 15 bp, Homo sapiens
gtctgtaatcccaga

SEQ ID NO: 1215325 - DNA, 15 bp, Homo sapiens
tcatgtctgtaatcc

SEQ ID NO: 1215326 - DNA, 15 bp, Homo sapiens
ctcatgtctgtaatc

SEQ ID NO: 1215327 - DNA, 15 bp, Homo sapiens
gctcatgtctgtaat

SEQ ID NO: 1215328 - DNA, 15 bp, Homo sapiens
ggctcatgtctgtaa

SEQ ID NO: 1215329 - DNA, 15 bp, Homo sapiens
tggctcatgtctgta

SEQ ID NO: 1215330 - DNA, 15 bp, Homo sapiens
gtggctcatgtctgt

SEQ ID NO: 1215331 - DNA, 15 bp, Homo sapiens
ggtggctcatgtctg

SEQ ID NO: 1215332 - DNA, 15 bp, Homo sapiens
cggtggctcatgtct

SEQ ID NO: 1215333 - DNA, 15 bp, Homo sapiens
gcggtggctcatgtc

SEQ ID NO: 1215334 - DNA, 15 bp, Homo sapiens
cgcggtggctcatgt

SEQ ID NO: 1215335 - DNA, 15 bp, Homo sapiens
cggccaggcgcggtg

SEQ ID NO: 1215336 - DNA, 15 bp, Homo sapiens
acggccaggcgcggt

SEQ ID NO: 1215337 - DNA, 15 bp, Homo sapiens
cacggccaggcgcgg

SEQ ID NO: 1215338 - DNA, 15 bp, Homo sapiens
acacggccaggcgcg

SEQ ID NO: 1215339 - DNA, 15 bp, Homo sapiens
gacacggccaggcgc

SEQ ID NO: 1215340 - DNA, 15 bp, Homo sapiens
agacacggccaggcg

SEQ ID NO: 1215341 - DNA, 15 bp, Homo sapiens
cagacacggccaggc

SEQ ID NO: 1215342 - DNA, 15 bp, Homo sapiens
ccagacacggccagg

SEQ ID NO: 1215343 - DNA, 15 bp, Homo sapiens
gccagacacggccag

SEQ ID NO: 1215344 - DNA, 15 bp, Homo sapiens
ggccagacacggcca

SEQ ID NO: 1215345 - DNA, 15 bp, Homo sapiens
aggccagacacggcc

SEQ ID NO: 1215346 - DNA, 15 bp, Homo sapiens
aaggccagacacggc

SEQ ID NO: 1215347 - DNA, 15 bp, Homo sapiens
aaaggccagacacgg

SEQ ID NO: 1215348 - DNA, 15 bp, Homo sapiens
aaaaggccagacacg

SEQ ID NO: 1215349 - DNA, 15 bp, Homo sapiens
aaaaaggccagacac

SEQ ID NO: 1215350 - DNA, 15 bp, Homo sapiens
aaaaaaggccagaca

SEQ ID NO: 1215351 - DNA, 15 bp, Homo sapiens
taaaaaaggccagac

SEQ ID NO: 1215352 - DNA, 15 bp, Homo sapiens
ctaaaaaaggccaga

SEQ ID NO: 1215353 - DNA, 15 bp, Homo sapiens
actaaaaaaggccag

SEQ ID NO: 1215354 - DNA, 15 bp, Homo sapiens
aactaaaaaaggcca

SEQ ID NO: 1215355 - DNA, 15 bp, Homo sapiens
taactaaaaaaggcc

SEQ ID NO: 1215356 - DNA, 15 bp, Homo sapiens
ataactaaaaaaggc

SEQ ID NO: 1215357 - DNA, 15 bp, Homo sapiens
aataactaaaaaagg

SEQ ID NO: 1215358 - DNA, 15 bp, Homo sapiens
aaataactaaaaaag

SEQ ID NO: 1215359 - DNA, 15 bp, Homo sapiens
gaaataactaaaaaa

SEQ ID NO: 1215360 - DNA, 15 bp, Homo sapiens
agaaataactaaaaa

SEQ ID NO: 1215361 - DNA, 15 bp, Homo sapiens
aagaaataactaaaa

SEQ ID NO: 1215362 - DNA, 15 bp, Homo sapiens
aaagaaataactaaa

SEQ ID NO: 1215363 - DNA, 15 bp, Homo sapiens
aaaagaaataactaa

SEQ ID NO: 1215364 - DNA, 15 bp, Homo sapiens
aaaaagaaataacta

SEQ ID NO: 1215365 - DNA, 15 bp, Homo sapiens
aaaaaagaaataact

SEQ ID NO: 1215366 - DNA, 15 bp, Homo sapiens
aaaaaaagaaataac

SEQ ID NO: 1215367 - DNA, 15 bp, Homo sapiens
aaaaaaaagaaataa

SEQ ID NO: 1215368 - DNA, 15 bp, Homo sapiens
aaaaaaaaagaaata

SEQ ID NO: 1215369 - DNA, 15 bp, Homo sapiens
aaaaaaaaaagaaat

SEQ ID NO: 1215370 - DNA, 15 bp, Homo sapiens
gagtaagactctgtc

SEQ ID NO: 1215371 - DNA, 15 bp, Homo sapiens
ggagtaagactctgt

SEQ ID NO: 1215372 - DNA, 15 bp, Homo sapiens
cggagtaagactctg

SEQ ID NO: 1215373 - DNA, 15 bp, Homo sapiens
acggagtaagactct

SEQ ID NO: 1215374 - DNA, 15 bp, Homo sapiens
gacggagtaagactc

SEQ ID NO: 1215375 - DNA, 15 bp, Homo sapiens
cgacggagtaagact

SEQ ID NO: 1215376 - DNA, 15 bp, Homo sapiens
gcgacggagtaagac

SEQ ID NO: 1215377 - DNA, 15 bp, Homo sapiens
ggcgacggagtaaga

SEQ ID NO: 1215378 - DNA, 15 bp, Homo sapiens
gggcgacggagtaag

SEQ ID NO: 1215379 - DNA, 15 bp, Homo sapiens
tgggcgacggagtaa

SEQ ID NO: 1215380 - DNA, 15 bp, Homo sapiens
ctgggcgacggagta

SEQ ID NO: 1215381 - DNA, 15 bp, Homo sapiens
cctgggcgacggagt

SEQ ID NO: 1215382 - DNA, 15 bp, Homo sapiens
gcctgggcgacggag

SEQ ID NO: 1215383 - DNA, 15 bp, Homo sapiens
agcctgggcgacgga

SEQ ID NO: 1215384 - DNA, 15 bp, Homo sapiens
cagcctgggcgacgg

SEQ ID NO: 1215385 - DNA, 15 bp, Homo sapiens
ccagcctgggcgacg

SEQ ID NO: 1215386 - DNA, 15 bp, Homo sapiens
gcaccgctgcactcc

SEQ ID NO: 1215387 - DNA, 15 bp, Homo sapiens
cgcaccgctgcactc

SEQ ID NO: 1215388 - DNA, 15 bp, Homo sapiens
tcgcaccgctgcact

SEQ ID NO: 1215389 - DNA, 15 bp, Homo sapiens
atcgcaccgctgcac

SEQ ID NO: 1215390 - DNA, 15 bp, Homo sapiens
catcgcaccgctgca

SEQ ID NO: 1215391 - DNA, 15 bp, Homo sapiens
acatcgcaccgctgc

SEQ ID NO: 1215392 - DNA, 15 bp, Homo sapiens
gacatcgcaccgctg

SEQ ID NO: 1215393 - DNA, 15 bp, Homo sapiens
agacatcgcaccgct

SEQ ID NO: 1215394 - DNA, 15 bp, Homo sapiens
cagacatcgcaccgc

SEQ ID NO: 1215395 - DNA, 15 bp, Homo sapiens
gcagacatcgcaccg

SEQ ID NO: 1215396 - DNA, 15 bp, Homo sapiens
cgcagacatcgcacc

SEQ ID NO: 1215397 - DNA, 15 bp, Homo sapiens
gcgcagacatcgcac

SEQ ID NO: 1215398 - DNA, 15 bp, Homo sapiens
tgcgcagacatcgca

SEQ ID NO: 1215399 - DNA, 15 bp, Homo sapiens
gtgcgcagacatcgc

SEQ ID NO: 1215400 - DNA, 15 bp, Homo sapiens
agtgcgcagacatcg

SEQ ID NO: 1215401 - DNA, 15 bp, Homo sapiens
cagtgcgcagacatc

SEQ ID NO: 1215402 - DNA, 15 bp, Homo sapiens
gcagtgcgcagacat

SEQ ID NO: 1215403 - DNA, 15 bp, Homo sapiens
tgcagtgcgcagaca

SEQ ID NO: 1215404 - DNA, 15 bp, Homo sapiens
ttgcagtgcgcagac

SEQ ID NO: 1215405 - DNA, 15 bp, Homo sapiens
cttgcagtgcgcaga

SEQ ID NO: 1215406 - DNA, 15 bp, Homo sapiens
gcttgcagtgcgcag

SEQ ID NO: 1215407 - DNA, 15 bp, Homo sapiens
agcttgcagtgcgca

SEQ ID NO: 1215408 - DNA, 15 bp, Homo sapiens
gagcttgcagtgcgc

SEQ ID NO: 1215409 - DNA, 15 bp, Homo sapiens
ggagcttgcagtgcg

SEQ ID NO: 1215410 - DNA, 15 bp, Homo sapiens
cggagcttgcagtgc

SEQ ID NO: 1215411 - DNA, 15 bp, Homo sapiens
gggcggagcttgcag

SEQ ID NO: 1215412 - DNA, 15 bp, Homo sapiens
ggggcggagcttgca

SEQ ID NO: 1215413 - DNA, 15 bp, Homo sapiens
agggggcggagcttg

SEQ ID NO: 1215414 - DNA, 15 bp, Homo sapiens
cagggggcggagctt

SEQ ID NO: 1215415 - DNA, 15 bp, Homo sapiens
ccagggggcggagct

SEQ ID NO: 1215416 - DNA, 15 bp, Homo sapiens
cccagggggcggagc

SEQ ID NO: 1215417 - DNA, 15 bp, Homo sapiens
acccagggggcggag

SEQ ID NO: 1215418 - DNA, 15 bp, Homo sapiens
aacccagggggcgga

SEQ ID NO: 1215419 - DNA, 15 bp, Homo sapiens
gaacccagggggcgg

SEQ ID NO: 1215420 - DNA, 15 bp, Homo sapiens
tgaacccagggggcg

SEQ ID NO: 1215421 - DNA, 15 bp, Homo sapiens
atgaacccagggggc

SEQ ID NO: 1215422 - DNA, 15 bp, Homo sapiens
catgaacccaggggg

SEQ ID NO: 1215423 - DNA, 15 bp, Homo sapiens
gcatgaacccagggg

SEQ ID NO: 1215424 - DNA, 15 bp, Homo sapiens
ggcatgaacccaggg

SEQ ID NO: 1215425 - DNA, 15 bp, Homo sapiens
cgcctgcagtcccag

SEQ ID NO: 1215426 - DNA, 15 bp, Homo sapiens
gcgcctgcagtccca

SEQ ID NO: 1215427 - DNA, 15 bp, Homo sapiens
ggcgcctgcagtccc

SEQ ID NO: 1215428 - DNA, 15 bp, Homo sapiens
aggcgcctgcagtcc

SEQ ID NO: 1215429 - DNA, 15 bp, Homo sapiens
caggcgcctgcagtc

SEQ ID NO: 1215430 - DNA, 15 bp, Homo sapiens
gcaggcgcctgcagt

SEQ ID NO: 1215431 - DNA, 15 bp, Homo sapiens
ggcaggcgcctgcag

SEQ ID NO: 1215432 - DNA, 15 bp, Homo sapiens
tggcaggcgcctgca

SEQ ID NO: 1215433 - DNA, 15 bp, Homo sapiens
gtggcaggcgcctgc

SEQ ID NO: 1215434 - DNA, 15 bp, Homo sapiens
agtggcaggcgcctg

SEQ ID NO: 1215435 - DNA, 15 bp, Homo sapiens
tagtggcaggcgcct

SEQ ID NO: 1215436 - DNA, 15 bp, Homo sapiens
gtagtggcaggcgcc

SEQ ID NO: 1215437 - DNA, 15 bp, Homo sapiens
cgtagtggcaggcgc

SEQ ID NO: 1215438 - DNA, 15 bp, Homo sapiens
gcgtagtggcaggcg

SEQ ID NO: 1215439 - DNA, 15 bp, Homo sapiens
ggcgtagtggcaggc

SEQ ID NO: 1215440 - DNA, 15 bp, Homo sapiens
gggcgtagtggcagg

SEQ ID NO: 1215441 - DNA, 15 bp, Homo sapiens
cgggcgtagtggcag

SEQ ID NO: 1215442 - DNA, 15 bp, Homo sapiens
ccgggcgtagtggca

SEQ ID NO: 1215443 - DNA, 15 bp, Homo sapiens
gtagccgggcgtagt

SEQ ID NO: 1215444 - DNA, 15 bp, Homo sapiens
agtagccgggcgtag

SEQ ID NO: 1215445 - DNA, 15 bp, Homo sapiens
aagtagccgggcgta

SEQ ID NO: 1215446 - DNA, 15 bp, Homo sapiens
aaagtagccgggcgt

SEQ ID NO: 1215447 - DNA, 15 bp, Homo sapiens
aaaagtagccgggcg

SEQ ID NO: 1215448 - DNA, 15 bp, Homo sapiens
aaaaagtagccgggc

SEQ ID NO: 1215449 - DNA, 15 bp, Homo sapiens
aaaaaagtagccggg

SEQ ID NO: 1215450 - DNA, 15 bp, Homo sapiens
caaaaaagtagccgg

SEQ ID NO: 1215451 - DNA, 15 bp, Homo sapiens
acaaaaaagtagccg

SEQ ID NO: 1215452 - DNA, 15 bp, Homo sapiens
tacaaaaaagtagcc

SEQ ID NO: 1215453 - DNA, 15 bp, Homo sapiens
atacaaaaaagtagc

SEQ ID NO: 1215454 - DNA, 15 bp, Homo sapiens
tatacaaaaaagtag

SEQ ID NO: 1215455 - DNA, 15 bp, Homo sapiens
atatacaaaaaagta

SEQ ID NO: 1215456 - DNA, 15 bp, Homo sapiens
aatatacaaaaaagt

SEQ ID NO: 1215457 - DNA, 15 bp, Homo sapiens
aaatatacaaaaaag

SEQ ID NO: 1215458 - DNA, 15 bp, Homo sapiens
taaatatacaaaaaa

SEQ ID NO: 1215459 - DNA, 15 bp, Homo sapiens
ctaaatatacaaaaa

SEQ ID NO: 1215460 - DNA, 15 bp, Homo sapiens
actaaatatacaaaa

SEQ ID NO: 1215461 - DNA, 15 bp, Homo sapiens
tactaaatatacaaa

SEQ ID NO: 1215462 - DNA, 15 bp, Homo sapiens
ctactaaatatacaa

SEQ ID NO: 1215463 - DNA, 15 bp, Homo sapiens
tctactaaatataca

SEQ ID NO: 1215464 - DNA, 15 bp, Homo sapiens
ctctactaaatatac

SEQ ID NO: 1215465 - DNA, 15 bp, Homo sapiens
tctctactaaatata

SEQ ID NO: 1215466 - DNA, 15 bp, Homo sapiens
atctctactaaatat

SEQ ID NO: 1215467 - DNA, 15 bp, Homo sapiens
actccatctctacta

SEQ ID NO: 1215468 - DNA, 15 bp, Homo sapiens
aactccatctctact

SEQ ID NO: 1215469 - DNA, 15 bp, Homo sapiens
gaaactccatctcta

SEQ ID NO: 1215470 - DNA, 15 bp, Homo sapiens
tgaaactccatctct

SEQ ID NO: 1215471 - DNA, 15 bp, Homo sapiens
cagtgaaactccatc

SEQ ID NO: 1215472 - DNA, 15 bp, Homo sapiens
acagtgaaactccat

SEQ ID NO: 1215473 - DNA, 15 bp, Homo sapiens
cacagtgaaactcca

SEQ ID NO: 1215474 - DNA, 15 bp, Homo sapiens
acacagtgaaactcc

SEQ ID NO: 1215475 - DNA, 15 bp, Homo sapiens
aacacagtgaaactc

SEQ ID NO: 1215476 - DNA, 15 bp, Homo sapiens
taacacagtgaaact

SEQ ID NO: 1215477 - DNA, 15 bp, Homo sapiens
aaagtcaggagatcg

SEQ ID NO: 1215478 - DNA, 15 bp, Homo sapiens
caaagtcaggagatc

SEQ ID NO: 1215479 - DNA, 15 bp, Homo sapiens
acaaagtcaggagat

SEQ ID NO: 1215480 - DNA, 15 bp, Homo sapiens
cacaaagtcaggaga

SEQ ID NO: 1215481 - DNA, 15 bp, Homo sapiens
tcacaaagtcaggag

SEQ ID NO: 1215482 - DNA, 15 bp, Homo sapiens
atcacaaagtcagga

SEQ ID NO: 1215483 - DNA, 15 bp, Homo sapiens
gatcacaaagtcagg

SEQ ID NO: 1215484 - DNA, 15 bp, Homo sapiens
ggatcacaaagtcag

SEQ ID NO: 1215485 - DNA, 15 bp, Homo sapiens
cggatcacaaagtca

SEQ ID NO: 1215486 - DNA, 15 bp, Homo sapiens
gcggatcacaaagtc

SEQ ID NO: 1215487 - DNA, 15 bp, Homo sapiens
ggcggatcacaaagt

SEQ ID NO: 1215488 - DNA, 15 bp, Homo sapiens
gggcggatcacaaag

SEQ ID NO: 1215489 - DNA, 15 bp, Homo sapiens
cgggcggatcacaaa

SEQ ID NO: 1215490 - DNA, 15 bp, Homo sapiens
gcgggcggatcacaa

SEQ ID NO: 1215491 - DNA, 15 bp, Homo sapiens
ggcgggcggatcaca

SEQ ID NO: 1215492 - DNA, 15 bp, Homo sapiens
tggcatggtggctca

SEQ ID NO: 1215493 - DNA, 15 bp, Homo sapiens
ctggcatggtggctc

SEQ ID NO: 1215494 - DNA, 15 bp, Homo sapiens
cctggcatggtggct

SEQ ID NO: 1215495 - DNA, 15 bp, Homo sapiens
aagcctggcatggtg

SEQ ID NO: 1215496 - DNA, 15 bp, Homo sapiens
aaagcctggcatggt

SEQ ID NO: 1215497 - DNA, 15 bp, Homo sapiens
aaaagcctggcatgg

SEQ ID NO: 1215498 - DNA, 15 bp, Homo sapiens
aaaaagcctggcatg

SEQ ID NO: 1215499 - DNA, 15 bp, Homo sapiens
aaaaaagcctggcat

SEQ ID NO: 1215500 - DNA, 15 bp, Homo sapiens
aaaaaaagcctggca

SEQ ID NO: 1215501 - DNA, 15 bp, Homo sapiens
aaaaaaaagcctggc

SEQ ID NO: 1215502 - DNA, 15 bp, Homo sapiens
aaaaaaaaagcctgg

SEQ ID NO: 1215503 - DNA, 15 bp, Homo sapiens
aaaaaaaaaagcctg

SEQ ID NO: 1215504 - DNA, 15 bp, Homo sapiens
gcactgcactccagc

SEQ ID NO: 1215505 - DNA, 15 bp, Homo sapiens
ggcactgcactccag

SEQ ID NO: 1215506 - DNA, 15 bp, Homo sapiens
tggcactgcactcca

SEQ ID NO: 1215507 - DNA, 15 bp, Homo sapiens
atggcactgcactcc

SEQ ID NO: 1215508 - DNA, 15 bp, Homo sapiens
catggcactgcactc

SEQ ID NO: 1215509 - DNA, 15 bp, Homo sapiens
tcatggcactgcact

SEQ ID NO: 1215510 - DNA, 15 bp, Homo sapiens
atcatggcactgcac

SEQ ID NO: 1215511 - DNA, 15 bp, Homo sapiens
gatcatggcactgca

SEQ ID NO: 1215512 - DNA, 15 bp, Homo sapiens
agatcatggcactgc

SEQ ID NO: 1215513 - DNA, 15 bp, Homo sapiens
gagatcatggcactg

SEQ ID NO: 1215514 - DNA, 15 bp, Homo sapiens
tgagatcatggcact

SEQ ID NO: 1215515 - DNA, 15 bp, Homo sapiens
ctgagatcatggcac

SEQ ID NO: 1215516 - DNA, 15 bp, Homo sapiens
gctgagatcatggca

SEQ ID NO: 1215517 - DNA, 15 bp, Homo sapiens
agctgagatcatggc

SEQ ID NO: 1215518 - DNA, 15 bp, Homo sapiens
gagctgagatcatgg

SEQ ID NO: 1215519 - DNA, 15 bp, Homo sapiens
agtggagcttgcagt

SEQ ID NO: 1215520 - DNA, 15 bp, Homo sapiens
aagtggagcttgcag

SEQ ID NO: 1215521 - DNA, 15 bp, Homo sapiens
gaagtggagcttgca

SEQ ID NO: 1215522 - DNA, 15 bp, Homo sapiens
ggaagtggagcttgc

SEQ ID NO: 1215523 - DNA, 15 bp, Homo sapiens
gggaagtggagcttg

SEQ ID NO: 1215524 - DNA, 15 bp, Homo sapiens
tgggaagtggagctt

SEQ ID NO: 1215525 - DNA, 15 bp, Homo sapiens
ctgggaagtggagct

SEQ ID NO: 1215526 - DNA, 15 bp, Homo sapiens
cctgggaagtggagc

SEQ ID NO: 1215527 - DNA, 15 bp, Homo sapiens
gcctgggaagtggag

SEQ ID NO: 1215528 - DNA, 15 bp, Homo sapiens
agcctgggaagtgga

SEQ ID NO: 1215529 - DNA, 15 bp, Homo sapiens
gagcctgggaagtgg

SEQ ID NO: 1215530 - DNA, 15 bp, Homo sapiens
tgagcctgggaagtg

SEQ ID NO: 1215531 - DNA, 15 bp, Homo sapiens
gtgagcctgggaagt

SEQ ID NO: 1215532 - DNA, 15 bp, Homo sapiens
cgtgagcctgggaag

SEQ ID NO: 1215533 - DNA, 15 bp, Homo sapiens
gcgtgagcctgggaa

SEQ ID NO: 1215534 - DNA, 15 bp, Homo sapiens
ggcgtgagcctggga

SEQ ID NO: 1215535 - DNA, 15 bp, Homo sapiens
tggcgtgagcctggg

SEQ ID NO: 1215536 - DNA, 15 bp, Homo sapiens
atggcgtgagcctgg

SEQ ID NO: 1215537 - DNA, 15 bp, Homo sapiens
aatggcgtgagcctg

SEQ ID NO: 1215538 - DNA, 15 bp, Homo sapiens
gaatggcgtgagcct

SEQ ID NO: 1215539 - DNA, 15 bp, Homo sapiens
agaatggcgtgagcc

SEQ ID NO: 1215540 - DNA, 15 bp, Homo sapiens
gagaatggcgtgagc

SEQ ID NO: 1215541 - DNA, 15 bp, Homo sapiens
ggagaatggcgtgag

SEQ ID NO: 1215542 - DNA, 15 bp, Homo sapiens
tggagaatggcgtga

SEQ ID NO: 1215543 - DNA, 15 bp, Homo sapiens
ctggagaatggcgtg

SEQ ID NO: 1215544 - DNA, 15 bp, Homo sapiens
gctggagaatggcgt

SEQ ID NO: 1215545 - DNA, 15 bp, Homo sapiens
ggctggagaatggcg

SEQ ID NO: 1215546 - DNA, 15 bp, Homo sapiens
aggctggagaatggc

SEQ ID NO: 1215547 - DNA, 15 bp, Homo sapiens
gaggctggagaatgg

SEQ ID NO: 1215548 - DNA, 15 bp, Homo sapiens
tgaggctggagaatg

SEQ ID NO: 1215549 - DNA, 15 bp, Homo sapiens
ctgaggctggagaat

SEQ ID NO: 1215550 - DNA, 15 bp, Homo sapiens
gctgaggctggagaa

SEQ ID NO: 1215551 - DNA, 15 bp, Homo sapiens
ggctgaggctggaga

SEQ ID NO: 1215552 - DNA, 15 bp, Homo sapiens
aggcaaaggaagacg

SEQ ID NO: 1215553 - DNA, 15 bp, Homo sapiens
caggcaaaggaagac

SEQ ID NO: 1215554 - DNA, 15 bp, Homo sapiens
ccaggcaaaggaaga

SEQ ID NO: 1215555 - DNA, 15 bp, Homo sapiens
cccaggcaaaggaag

SEQ ID NO: 1215556 - DNA, 15 bp, Homo sapiens
ccccaggcaaaggaa

SEQ ID NO: 1215557 - DNA, 15 bp, Homo sapiens
cccccaggcaaagga

SEQ ID NO: 1215558 - DNA, 15 bp, Homo sapiens
acccccaggcaaagg

SEQ ID NO: 1215559 - DNA, 15 bp, Homo sapiens
gacccccaggcaaag

SEQ ID NO: 1215560 - DNA, 15 bp, Homo sapiens
agacccccaggcaaa

SEQ ID NO: 1215561 - DNA, 15 bp, Homo sapiens
aagacccccaggcaa

SEQ ID NO: 1215562 - DNA, 15 bp, Homo sapiens
gaagacccccaggca

SEQ ID NO: 1215563 - DNA, 15 bp, Homo sapiens
ggaagacccccaggc

SEQ ID NO: 1215564 - DNA, 15 bp, Homo sapiens
aggaagacccccagg

SEQ ID NO: 1215565 - DNA, 15 bp, Homo sapiens
aaggaagacccccag

SEQ ID NO: 1215566 - DNA, 15 bp, Homo sapiens
gaaggaagaccccca

SEQ ID NO: 1215567 - DNA, 15 bp, Homo sapiens
agaaggaagaccccc

SEQ ID NO: 1215568 - DNA, 15 bp, Homo sapiens
tagaaggaagacccc

SEQ ID NO: 1215569 - DNA, 15 bp, Homo sapiens
atagaaggaagaccc

SEQ ID NO: 1215570 - DNA, 15 bp, Homo sapiens
catagaaggaagacc

SEQ ID NO: 1215571 - DNA, 15 bp, Homo sapiens
ccatagaaggaagac

SEQ ID NO: 1215572 - DNA, 15 bp, Homo sapiens
tccatagaaggaaga

SEQ ID NO: 1215573 - DNA, 15 bp, Homo sapiens
ttccatagaaggaag

SEQ ID NO: 1215574 - DNA, 15 bp, Homo sapiens
cttccatagaaggaa

SEQ ID NO: 1215575 - DNA, 15 bp, Homo sapiens
tcttccatagaagga

SEQ ID NO: 1215576 - DNA, 15 bp, Homo sapiens
ttcttccatagaagg

SEQ ID NO: 1215577 - DNA, 15 bp, Homo sapiens
gttcttccatagaag

SEQ ID NO: 1215578 - DNA, 15 bp, Homo sapiens
agttcttccatagaa

SEQ ID NO: 1215579 - DNA, 15 bp, Homo sapiens
cagttcttccataga

SEQ ID NO: 1215580 - DNA, 15 bp, Homo sapiens
ccagttcttccatag

SEQ ID NO: 1215581 - DNA, 15 bp, Homo sapiens
gccagttcttccata

SEQ ID NO: 1215582 - DNA, 15 bp, Homo sapiens
cgccagttcttccat

SEQ ID NO: 1215583 - DNA, 15 bp, Homo sapiens
ccgccagttcttcca

SEQ ID NO: 1215584 - DNA, 15 bp, Homo sapiens
gccgccagttcttcc

SEQ ID NO: 1215585 - DNA, 15 bp, Homo sapiens
agccgccagttcttc

SEQ ID NO: 1215586 - DNA, 15 bp, Homo sapiens
aagccgccagttctt

SEQ ID NO: 1215587 - DNA, 15 bp, Homo sapiens
taagccgccagttct

SEQ ID NO: 1215588 - DNA, 15 bp, Homo sapiens
ttaagccgccagttc

SEQ ID NO: 1215589 - DNA, 15 bp, Homo sapiens
cttaagccgccagtt

SEQ ID NO: 1215590 - DNA, 15 bp, Homo sapiens
tcttaagccgccagt

SEQ ID NO: 1215591 - DNA, 15 bp, Homo sapiens
ttcttaagccgccag

SEQ ID NO: 1215592 - DNA, 15 bp, Homo sapiens
gttcttaagccgcca

SEQ ID NO: 1215593 - DNA, 15 bp, Homo sapiens
tgttcttaagccgcc

SEQ ID NO: 1215594 - DNA, 15 bp, Homo sapiens
atgttcttaagccgc

SEQ ID NO: 1215595 - DNA, 15 bp, Homo sapiens
gatgttcttaagccg

SEQ ID NO: 1215596 - DNA, 15 bp, Homo sapiens
tgatgttcttaagcc

SEQ ID NO: 1215597 - DNA, 15 bp, Homo sapiens
ttgatgttcttaagc

SEQ ID NO: 1215598 - DNA, 15 bp, Homo sapiens
gttgatgttcttaag

SEQ ID NO: 1215599 - DNA, 15 bp, Homo sapiens
tgttgatgttcttaa

SEQ ID NO: 1215600 - DNA, 15 bp, Homo sapiens
ctgttgatgttctta

SEQ ID NO: 1215601 - DNA, 15 bp, Homo sapiens
gctgttgatgttctt

SEQ ID NO: 1215602 - DNA, 15 bp, Homo sapiens
tgctgttgatgttct

SEQ ID NO: 1215603 - DNA, 15 bp, Homo sapiens
atgctgttgatgttc

SEQ ID NO: 1215604 - DNA, 15 bp, Homo sapiens
gatgctgttgatgtt

SEQ ID NO: 1215605 - DNA, 15 bp, Homo sapiens
tgatgctgttgatgt

SEQ ID NO: 1215606 - DNA, 15 bp, Homo sapiens
ttgatgctgttgatg

SEQ ID NO: 1215607 - DNA, 15 bp, Homo sapiens
gttgatgctgttgat

SEQ ID NO: 1215608 - DNA, 15 bp, Homo sapiens
agttgatgctgttga

SEQ ID NO: 1215609 - DNA, 15 bp, Homo sapiens
aagttgatgctgttg

SEQ ID NO: 1215610 - DNA, 15 bp, Homo sapiens
aaagttgatgctgtt

SEQ ID NO: 1215611 - DNA, 15 bp, Homo sapiens
caaagttgatgctgt

SEQ ID NO: 1215612 - DNA, 15 bp, Homo sapiens
tcaaagttgatgctg

SEQ ID NO: 1215613 - DNA, 15 bp, Homo sapiens
gtcaaagttgatgct

SEQ ID NO: 1215614 - DNA, 15 bp, Homo sapiens
tgtcaaagttgatgc

SEQ ID NO: 1215615 - DNA, 15 bp, Homo sapiens
ttgtcaaagttgatg

SEQ ID NO: 1215616 - DNA, 15 bp, Homo sapiens
gttgtcaaagttgat

SEQ ID NO: 1215617 - DNA, 15 bp, Homo sapiens
ggttgtcaaagttga

SEQ ID NO: 1215618 - DNA, 15 bp, Homo sapiens
gggttgtcaaagttg

SEQ ID NO: 1215619 - DNA, 15 bp, Homo sapiens
ggggttgtcaaagtt

SEQ ID NO: 1215620 - DNA, 15 bp, Homo sapiens
cggggttgtcaaagt

SEQ ID NO: 1215621 - DNA, 15 bp, Homo sapiens
acggggttgtcaaag

SEQ ID NO: 1215622 - DNA, 15 bp, Homo sapiens
gacggggttgtcaaa

SEQ ID NO: 1215623 - DNA, 15 bp, Homo sapiens
agacggggttgtcaa

SEQ ID NO: 1215624 - DNA, 15 bp, Homo sapiens
tagacggggttgtca

SEQ ID NO: 1215625 - DNA, 15 bp, Homo sapiens
atagacggggttgtc

SEQ ID NO: 1215626 - DNA, 15 bp, Homo sapiens
gatagacggggttgt

SEQ ID NO: 1215627 - DNA, 15 bp, Homo sapiens
tgatagacggggttg

SEQ ID NO: 1215628 - DNA, 15 bp, Homo sapiens
ctgatagacggggtt

SEQ ID NO: 1215629 - DNA, 15 bp, Homo sapiens
tctgatagacggggt

SEQ ID NO: 1215630 - DNA, 15 bp, Homo sapiens
ttctgatagacgggg

SEQ ID NO: 1215631 - DNA, 15 bp, Homo sapiens
cttctgatagacggg

SEQ ID NO: 1215632 - DNA, 15 bp, Homo sapiens
tcttctgatagacgg

SEQ ID NO: 1215633 - DNA, 15 bp, Homo sapiens
gtcttctgatagacg

SEQ ID NO: 1215634 - DNA, 15 bp, Homo sapiens
ggtcttctgatagac

SEQ ID NO: 1215635 - DNA, 15 bp, Homo sapiens
tggtcttctgataga

SEQ ID NO: 1215636 - DNA, 15 bp, Homo sapiens
gtggtcttctgatag

SEQ ID NO: 1215637 - DNA, 15 bp, Homo sapiens
tgtggtcttctgata

SEQ ID NO: 1215638 - DNA, 15 bp, Homo sapiens
ctgtggtcttctgat

SEQ ID NO: 1215639 - DNA, 15 bp, Homo sapiens
tctgtggtcttctga

SEQ ID NO: 1215640 - DNA, 15 bp, Homo sapiens
ctctgtggtcttctg

SEQ ID NO: 1215641 - DNA, 15 bp, Homo sapiens
cctctgtggtcttct

SEQ ID NO: 1215642 - DNA, 15 bp, Homo sapiens
tcctctgtggtcttc

SEQ ID NO: 1215643 - DNA, 15 bp, Homo sapiens
atcctctgtggtctt

SEQ ID NO: 1215644 - DNA, 15 bp, Homo sapiens
catcctctgtggtct

SEQ ID NO: 1215645 - DNA, 15 bp, Homo sapiens
tcatcctctgtggtc

SEQ ID NO: 1215646 - DNA, 15 bp, Homo sapiens
ctcatcctctgtggt

SEQ ID NO: 1215647 - DNA, 15 bp, Homo sapiens
cctcatcctctgtgg

SEQ ID NO: 1215648 - DNA, 15 bp, Homo sapiens
acctcatcctctgtg

SEQ ID NO: 1215649 - DNA, 15 bp, Homo sapiens
gacctcatcctctgt

SEQ ID NO: 1215650 - DNA, 15 bp, Homo sapiens
ggacctcatcctctg

SEQ ID NO: 1215651 - DNA, 15 bp, Homo sapiens
tggacctcatcctct

SEQ ID NO: 1215652 - DNA, 15 bp, Homo sapiens
gtggacctcatcctc

SEQ ID NO: 1215653 - DNA, 15 bp, Homo sapiens
tgtggacctcatcct

SEQ ID NO: 1215654 - DNA, 15 bp, Homo sapiens
atgtggacctcatcc

SEQ ID NO: 1215655 - DNA, 15 bp, Homo sapiens
aatgtggacctcatc

SEQ ID NO: 1215656 - DNA, 15 bp, Homo sapiens
aaatgtggacctcat

SEQ ID NO: 1215657 - DNA, 15 bp, Homo sapiens
caaatgtggacctca

SEQ ID NO: 1215658 - DNA, 15 bp, Homo sapiens
gcaaatgtggacctc

SEQ ID NO: 1215659 - DNA, 15 bp, Homo sapiens
ggcaaatgtggacct

SEQ ID NO: 1215660 - DNA, 15 bp, Homo sapiens
tggcaaatgtggacc

SEQ ID NO: 1215661 - DNA, 15 bp, Homo sapiens
gtggcaaatgtggac

SEQ ID NO: 1215662 - DNA, 15 bp, Homo sapiens
tgtggcaaatgtgga

SEQ ID NO: 1215663 - DNA, 15 bp, Homo sapiens
ttgtggcaaatgtgg

SEQ ID NO: 1215664 - DNA, 15 bp, Homo sapiens
gttgtggcaaatgtg

SEQ ID NO: 1215665 - DNA, 15 bp, Homo sapiens
ggttgtggcaaatgt

SEQ ID NO: 1215666 - DNA, 15 bp, Homo sapiens
tggttgtggcaaatg

SEQ ID NO: 1215667 - DNA, 15 bp, Homo sapiens
ctggttgtggcaaat

SEQ ID NO: 1215668 - DNA, 15 bp, Homo sapiens
cctggttgtggcaaa

SEQ ID NO: 1215669 - DNA, 15 bp, Homo sapiens
tcctggttgtggcaa

SEQ ID NO: 1215670 - DNA, 15 bp, Homo sapiens
gtcctggttgtggca

SEQ ID NO: 1215671 - DNA, 15 bp, Homo sapiens
cgtcctggttgtggc

SEQ ID NO: 1215672 - DNA, 15 bp, Homo sapiens
ccgtcctggttgtgg

SEQ ID NO: 1215673 - DNA, 15 bp, Homo sapiens
gccgtcctggttgtg

SEQ ID NO: 1215674 - DNA, 15 bp, Homo sapiens
agccgtcctggttgt

SEQ ID NO: 1215675 - DNA, 15 bp, Homo sapiens
tagccgtcctggttg

SEQ ID NO: 1215676 - DNA, 15 bp, Homo sapiens
gtagccgtcctggtt

SEQ ID NO: 1215677 - DNA, 15 bp, Homo sapiens
tgtagccgtcctggt

SEQ ID NO: 1215678 - DNA, 15 bp, Homo sapiens
ctgtagccgtcctgg

SEQ ID NO: 1215679 - DNA, 15 bp, Homo sapiens
gctgtagccgtcctg

SEQ ID NO: 1215680 - DNA, 15 bp, Homo sapiens
agctgtagccgtcct

SEQ ID NO: 1215681 - DNA, 15 bp, Homo sapiens
tagctgtagccgtcc

SEQ ID NO: 1215682 - DNA, 15 bp, Homo sapiens
gtagctgtagccgtc

SEQ ID NO: 1215683 - DNA, 15 bp, Homo sapiens
ggtagctgtagccgt

SEQ ID NO: 1215684 - DNA, 15 bp, Homo sapiens
gggtagctgtagccg

SEQ ID NO: 1215685 - DNA, 15 bp, Homo sapiens
ggggtagctgtagcc

SEQ ID NO: 1215686 - DNA, 15 bp, Homo sapiens
aggggtagctgtagc

SEQ ID NO: 1215687 - DNA, 15 bp, Homo sapiens
gaggggtagctgtag

SEQ ID NO: 1215688 - DNA, 15 bp, Homo sapiens
cgaggggtagctgta

SEQ ID NO: 1215689 - DNA, 15 bp, Homo sapiens
ccgaggggtagctgt

SEQ ID NO: 1215690 - DNA, 15 bp, Homo sapiens
accgaggggtagctg

SEQ ID NO: 1215691 - DNA, 15 bp, Homo sapiens
caccgaggggtagct

SEQ ID NO: 1215692 - DNA, 15 bp, Homo sapiens
tcaccgaggggtagc

SEQ ID NO: 1215693 - DNA, 15 bp, Homo sapiens
ctcaccgaggggtag

SEQ ID NO: 1215694 - DNA, 15 bp, Homo sapiens
actcaccgaggggta

SEQ ID NO: 1215695 - DNA, 15 bp, Homo sapiens
cactcaccgaggggt

SEQ ID NO: 1215696 - DNA, 15 bp, Homo sapiens
tcactcaccgagggg

SEQ ID NO: 1215697 - DNA, 15 bp, Homo sapiens
gtcactcaccgaggg

SEQ ID NO: 1215698 - DNA, 15 bp, Homo sapiens
ggtcactcaccgagg

SEQ ID NO: 1215699 - DNA, 15 bp, Homo sapiens
gggtcactcaccgag

SEQ ID NO: 1215700 - DNA, 15 bp, Homo sapiens
agggtcactcaccga

SEQ ID NO: 1215701 - DNA, 15 bp, Homo sapiens
gagggtcactcaccg

SEQ ID NO: 1215702 - DNA, 15 bp, Homo sapiens
agagggtcactcacc

SEQ ID NO: 1215703 - DNA, 15 bp, Homo sapiens
gagagggtcactcac

SEQ ID NO: 1215704 - DNA, 15 bp, Homo sapiens
agagagggtcactca

SEQ ID NO: 1215705 - DNA, 15 bp, Homo sapiens
tagagagggtcactc

SEQ ID NO: 1215706 - DNA, 15 bp, Homo sapiens
ctagagagggtcact

SEQ ID NO: 1215707 - DNA, 15 bp, Homo sapiens
tctagagagggtcac

SEQ ID NO: 1215708 - DNA, 15 bp, Homo sapiens
ttctagagagggtca

SEQ ID NO: 1215709 - DNA, 15 bp, Homo sapiens
tttctagagagggtc

SEQ ID NO: 1215710 - DNA, 15 bp, Homo sapiens
ctttctagagagggt

SEQ ID NO: 1215711 - DNA, 15 bp, Homo sapiens
gctttctagagaggg

SEQ ID NO: 1215712 - DNA, 15 bp, Homo sapiens
ggctttctagagagg

SEQ ID NO: 1215713 - DNA, 15 bp, Homo sapiens
tggctttctagagag

SEQ ID NO: 1215714 - DNA, 15 bp, Homo sapiens
ctggctttctagaga

SEQ ID NO: 1215715 - DNA, 15 bp, Homo sapiens
tctggctttctagag

SEQ ID NO: 1215716 - DNA, 15 bp, Homo sapiens
ctctggctttctaga

SEQ ID NO: 1215717 - DNA, 15 bp, Homo sapiens
gctctggctttctag

SEQ ID NO: 1215718 - DNA, 15 bp, Homo sapiens
ggctctggctttcta

SEQ ID NO: 1215719 - DNA, 15 bp, Homo sapiens
gggctctggctttct

SEQ ID NO: 1215720 - DNA, 15 bp, Homo sapiens
tgggctctggctttc

SEQ ID NO: 1215721 - DNA, 15 bp, Homo sapiens
atgggctctggcttt

SEQ ID NO: 1215722 - DNA, 15 bp, Homo sapiens
catgggctctggctt

SEQ ID NO: 1215723 - DNA, 15 bp, Homo sapiens
ccatgggctctggct

SEQ ID NO: 1215724 - DNA, 15 bp, Homo sapiens
gccatgggctctggc

SEQ ID NO: 1215725 - DNA, 15 bp, Homo sapiens
cgccatgggctctgg

SEQ ID NO: 1215726 - DNA, 15 bp, Homo sapiens
ccgccatgggctctg

SEQ ID NO: 1215727 - DNA, 15 bp, Homo sapiens
gccgccatgggctct

SEQ ID NO: 1215728 - DNA, 15 bp, Homo sapiens
ggccgccatgggctc

SEQ ID NO: 1215729 - DNA, 15 bp, Homo sapiens
gggccgccatgggct

SEQ ID NO: 1215730 - DNA, 15 bp, Homo sapiens
ggggccgccatgggc

SEQ ID NO: 1215731 - DNA, 15 bp, Homo sapiens
gggggccgccatggg

SEQ ID NO: 1215732 - DNA, 15 bp, Homo sapiens
agggggccgccatgg

SEQ ID NO: 1215733 - DNA, 15 bp, Homo sapiens
gagggggccgccatg

SEQ ID NO: 1215734 - DNA, 15 bp, Homo sapiens
ggagggggccgccat

SEQ ID NO: 1215735 - DNA, 15 bp, Homo sapiens
gggagggggccgcca

SEQ ID NO: 1215736 - DNA, 15 bp, Homo sapiens
tgggagggggccgcc

SEQ ID NO: 1215737 - DNA, 15 bp, Homo sapiens
ctgggagggggccgc

SEQ ID NO: 1215738 - DNA, 15 bp, Homo sapiens
gctgggagggggccg

SEQ ID NO: 1215739 - DNA, 15 bp, Homo sapiens
agctgggagggggcc

SEQ ID NO: 1215740 - DNA, 15 bp, Homo sapiens
cagctgggagggggc

SEQ ID NO: 1215741 - DNA, 15 bp, Homo sapiens
ccagctgggaggggg

SEQ ID NO: 1215742 - DNA, 15 bp, Homo sapiens
tccagctgggagggg

SEQ ID NO: 1215743 - DNA, 15 bp, Homo sapiens
ctccagctgggaggg

SEQ ID NO: 1215744 - DNA, 15 bp, Homo sapiens
cctccagctgggagg

SEQ ID NO: 1215745 - DNA, 15 bp, Homo sapiens
gcctccagctgggag

SEQ ID NO: 1215746 - DNA, 15 bp, Homo sapiens
tgcctccagctggga

SEQ ID NO: 1215747 - DNA, 15 bp, Homo sapiens
atgcctccagctggg

SEQ ID NO: 1215748 - DNA, 15 bp, Homo sapiens
tatgcctccagctgg

SEQ ID NO: 1215749 - DNA, 15 bp, Homo sapiens
atatgcctccagctg

SEQ ID NO: 1215750 - DNA, 15 bp, Homo sapiens
catatgcctccagct

SEQ ID NO: 1215751 - DNA, 15 bp, Homo sapiens
tcatatgcctccagc

SEQ ID NO: 1215752 - DNA, 15 bp, Homo sapiens
atcatatgcctccag

SEQ ID NO: 1215753 - DNA, 15 bp, Homo sapiens
gatcatatgcctcca

SEQ ID NO: 1215754 - DNA, 15 bp, Homo sapiens
ggatcatatgcctcc

SEQ ID NO: 1215755 - DNA, 15 bp, Homo sapiens
aggatcatatgcctc

SEQ ID NO: 1215756 - DNA, 15 bp, Homo sapiens
gaggatcatatgcct

SEQ ID NO: 1215757 - DNA, 15 bp, Homo sapiens
tgaggatcatatgcc

SEQ ID NO: 1215758 - DNA, 15 bp, Homo sapiens
ttgaggatcatatgc

SEQ ID NO: 1215759 - DNA, 15 bp, Homo sapiens
cttgaggatcatatg

SEQ ID NO: 1215760 - DNA, 15 bp, Homo sapiens
ccttgaggatcatat

SEQ ID NO: 1215761 - DNA, 15 bp, Homo sapiens
cccttgaggatcata

SEQ ID NO: 1215762 - DNA, 15 bp, Homo sapiens
tcccttgaggatcat

SEQ ID NO: 1215763 - DNA, 15 bp, Homo sapiens
gtcccttgaggatca

SEQ ID NO: 1215764 - DNA, 15 bp, Homo sapiens
ggtcccttgaggatc

SEQ ID NO: 1215765 - DNA, 15 bp, Homo sapiens
tggtcccttgaggat

SEQ ID NO: 1215766 - DNA, 15 bp, Homo sapiens
ctggtcccttgagga

SEQ ID NO: 1215767 - DNA, 15 bp, Homo sapiens
cctggtcccttgagg

SEQ ID NO: 1215768 - DNA, 15 bp, Homo sapiens
gcctggtcccttgag

SEQ ID NO: 1215769 - DNA, 15 bp, Homo sapiens
ggcctggtcccttga

SEQ ID NO: 1215770 - DNA, 15 bp, Homo sapiens
cggcctggtcccttg

SEQ ID NO: 1215771 - DNA, 15 bp, Homo sapiens
tcggcctggtccctt

SEQ ID NO: 1215772 - DNA, 15 bp, Homo sapiens
ctcggcctggtccct

SEQ ID NO: 1215773 - DNA, 15 bp, Homo sapiens
cctcggcctggtccc

SEQ ID NO: 1215774 - DNA, 15 bp, Homo sapiens
gcctcggcctggtcc

SEQ ID NO: 1215775 - DNA, 15 bp, Homo sapiens
agcctcggcctggtc

SEQ ID NO: 1215776 - DNA, 15 bp, Homo sapiens
aagcctcggcctggt

SEQ ID NO: 1215777 - DNA, 15 bp, Homo sapiens
gaagcctcggcctgg

SEQ ID NO: 1215778 - DNA, 15 bp, Homo sapiens
ggaagcctcggcctg

SEQ ID NO: 1215779 - DNA, 15 bp, Homo sapiens
gggaagcctcggcct

SEQ ID NO: 1215780 - DNA, 15 bp, Homo sapiens
ggggaagcctcggcc

SEQ ID NO: 1215781 - DNA, 15 bp, Homo sapiens
tggggaagcctcggc

SEQ ID NO: 1215782 - DNA, 15 bp, Homo sapiens
ctggggaagcctcgg

SEQ ID NO: 1215783 - DNA, 15 bp, Homo sapiens
gctggggaagcctcg

SEQ ID NO: 1215784 - DNA, 15 bp, Homo sapiens
ggctggggaagcctc

SEQ ID NO: 1215785 - DNA, 15 bp, Homo sapiens
gggctggggaagcct

SEQ ID NO: 1215786 - DNA, 15 bp, Homo sapiens
agggctggggaagcc

SEQ ID NO: 1215787 - DNA, 15 bp, Homo sapiens
gagggctggggaagc

SEQ ID NO: 1215788 - DNA, 15 bp, Homo sapiens
ggagggctggggaag

SEQ ID NO: 1215789 - DNA, 15 bp, Homo sapiens
tggagggctggggaa

SEQ ID NO: 1215790 - DNA, 15 bp, Homo sapiens
ctggagggctgggga

SEQ ID NO: 1215791 - DNA, 15 bp, Homo sapiens
tctggagggctgggg

SEQ ID NO: 1215792 - DNA, 15 bp, Homo sapiens
atctggagggctggg

SEQ ID NO: 1215793 - DNA, 15 bp, Homo sapiens
gatctggagggctgg

SEQ ID NO: 1215794 - DNA, 15 bp, Homo sapiens
cgatctggagggctg

SEQ ID NO: 1215795 - DNA, 15 bp, Homo sapiens
tcgatctggagggct

SEQ ID NO: 1215796 - DNA, 15 bp, Homo sapiens
ctcgatctggagggc

SEQ ID NO: 1215797 - DNA, 15 bp, Homo sapiens
cctcgatctggaggg

SEQ ID NO: 1215798 - DNA, 15 bp, Homo sapiens
tcctcgatctggagg

SEQ ID NO: 1215799 - DNA, 15 bp, Homo sapiens
gtcctcgatctggag

SEQ ID NO: 1215800 - DNA, 15 bp, Homo sapiens
tgtcctcgatctgga

SEQ ID NO: 1215801 - DNA, 15 bp, Homo sapiens
ctgtcctcgatctgg

SEQ ID NO: 1215802 - DNA, 15 bp, Homo sapiens
gctgtcctcgatctg

SEQ ID NO: 1215803 - DNA, 15 bp, Homo sapiens
tgctgtcctcgatct

SEQ ID NO: 1215804 - DNA, 15 bp, Homo sapiens
atgctgtcctcgatc

SEQ ID NO: 1215805 - DNA, 15 bp, Homo sapiens
aatgctgtcctcgat

SEQ ID NO: 1215806 - DNA, 15 bp, Homo sapiens
taatgctgtcctcga

SEQ ID NO: 1215807 - DNA, 15 bp, Homo sapiens
ctaatgctgtcctcg

SEQ ID NO: 1215808 - DNA, 15 bp, Homo sapiens
cctaatgctgtcctc

SEQ ID NO: 1215809 - DNA, 15 bp, Homo sapiens
acctaatgctgtcct

SEQ ID NO: 1215810 - DNA, 15 bp, Homo sapiens
cacctaatgctgtcc

SEQ ID NO: 1215811 - DNA, 15 bp, Homo sapiens
tcacctaatgctgtc

SEQ ID NO: 1215812 - DNA, 15 bp, Homo sapiens
ttcacctaatgctgt

SEQ ID NO: 1215813 - DNA, 15 bp, Homo sapiens
attcacctaatgctg

SEQ ID NO: 1215814 - DNA, 15 bp, Homo sapiens
cattcacctaatgct

SEQ ID NO: 1215815 - DNA, 15 bp, Homo sapiens
gcattcacctaatgc

SEQ ID NO: 1215816 - DNA, 15 bp, Homo sapiens
agcattcacctaatg

SEQ ID NO: 1215817 - DNA, 15 bp, Homo sapiens
aagcattcacctaat

SEQ ID NO: 1215818 - DNA, 15 bp, Homo sapiens
gaagcattcacctaa

SEQ ID NO: 1215819 - DNA, 15 bp, Homo sapiens
agaagcattcaccta

SEQ ID NO: 1215820 - DNA, 15 bp, Homo sapiens
cagaagcattcacct

SEQ ID NO: 1215821 - DNA, 15 bp, Homo sapiens
acagaagcattcacc

SEQ ID NO: 1215822 - DNA, 15 bp, Homo sapiens
cacagaagcattcac

SEQ ID NO: 1215823 - DNA, 15 bp, Homo sapiens
gcacagaagcattca

SEQ ID NO: 1215824 - DNA, 15 bp, Homo sapiens
cgcacagaagcattc

SEQ ID NO: 1215825 - DNA, 15 bp, Homo sapiens
gcgcacagaagcatt

SEQ ID NO: 1215826 - DNA, 15 bp, Homo sapiens
agcgcacagaagcat

SEQ ID NO: 1215827 - DNA, 15 bp, Homo sapiens
gagcgcacagaagca

SEQ ID NO: 1215828 - DNA, 15 bp, Homo sapiens
tgagcgcacagaagc

SEQ ID NO: 1215829 - DNA, 15 bp, Homo sapiens
atgagcgcacagaag

SEQ ID NO: 1215830 - DNA, 15 bp, Homo sapiens
aatgagcgcacagaa

SEQ ID NO: 1215831 - DNA, 15 bp, Homo sapiens
gaatgagcgcacaga

SEQ ID NO: 1215832 - DNA, 15 bp, Homo sapiens
tgaatgagcgcacag

SEQ ID NO: 1215833 - DNA, 15 bp, Homo sapiens
ctgaatgagcgcaca

SEQ ID NO: 1215834 - DNA, 15 bp, Homo sapiens
tctgaatgagcgcac

SEQ ID NO: 1215835 - DNA, 15 bp, Homo sapiens
ttctgaatgagcgca

SEQ ID NO: 1215836 - DNA, 15 bp, Homo sapiens
attctgaatgagcgc

SEQ ID NO: 1215837 - DNA, 15 bp, Homo sapiens
cattctgaatgagcg

SEQ ID NO: 1215838 - DNA, 15 bp, Homo sapiens
acattctgaatgagc

SEQ ID NO: 1215839 - DNA, 15 bp, Homo sapiens
gacattctgaatgag

SEQ ID NO: 1215840 - DNA, 15 bp, Homo sapiens
tgacattctgaatga

SEQ ID NO: 1215841 - DNA, 15 bp, Homo sapiens
ctgacattctgaatg

SEQ ID NO: 1215842 - DNA, 15 bp, Homo sapiens
gctgacattctgaat

SEQ ID NO: 1215843 - DNA, 15 bp, Homo sapiens
cgctgacattctgaa

SEQ ID NO: 1215844 - DNA, 15 bp, Homo sapiens
ccgctgacattctga

SEQ ID NO: 1215845 - DNA, 15 bp, Homo sapiens
tccgctgacattctg

SEQ ID NO: 1215846 - DNA, 15 bp, Homo sapiens
gtccgctgacattct

SEQ ID NO: 1215847 - DNA, 15 bp, Homo sapiens
tgtccgctgacattc

SEQ ID NO: 1215848 - DNA, 15 bp, Homo sapiens
ttgtccgctgacatt

SEQ ID NO: 1215849 - DNA, 15 bp, Homo sapiens
attgtccgctgacat

SEQ ID NO: 1215850 - DNA, 15 bp, Homo sapiens
cattgtccgctgaca

SEQ ID NO: 1215851 - DNA, 15 bp, Homo sapiens
ccattgtccgctgac

SEQ ID NO: 1215852 - DNA, 15 bp, Homo sapiens
gccattgtccgctga

SEQ ID NO: 1215853 - DNA, 15 bp, Homo sapiens
ggccattgtccgctg

SEQ ID NO: 1215854 - DNA, 15 bp, Homo sapiens
aggccattgtccgct

SEQ ID NO: 1215855 - DNA, 15 bp, Homo sapiens
aaggccattgtccgc

SEQ ID NO: 1215856 - DNA, 15 bp, Homo sapiens
caaggccattgtccg

SEQ ID NO: 1215857 - DNA, 15 bp, Homo sapiens
ccaaggccattgtcc

SEQ ID NO: 1215858 - DNA, 15 bp, Homo sapiens
accaaggccattgtc

SEQ ID NO: 1215859 - DNA, 15 bp, Homo sapiens
ccaccaaggccattg

SEQ ID NO: 1215860 - DNA, 15 bp, Homo sapiens
accaccaaggccatt

SEQ ID NO: 1215861 - DNA, 15 bp, Homo sapiens
caccaccaaggccat

SEQ ID NO: 1215862 - DNA, 15 bp, Homo sapiens
acaccaccaaggcca

SEQ ID NO: 1215863 - DNA, 15 bp, Homo sapiens
tacaccaccaaggcc

SEQ ID NO: 1215864 - DNA, 15 bp, Homo sapiens
ctacaccaccaaggc

SEQ ID NO: 1215865 - DNA, 15 bp, Homo sapiens
tctacaccaccaagg

SEQ ID NO: 1215866 - DNA, 15 bp, Homo sapiens
ctctacaccaccaag

SEQ ID NO: 1215867 - DNA, 15 bp, Homo sapiens
cctctacaccaccaa

SEQ ID NO: 1215868 - DNA, 15 bp, Homo sapiens
tcctctacaccacca

SEQ ID NO: 1215869 - DNA, 15 bp, Homo sapiens
ttcctctacaccacc

SEQ ID NO: 1215870 - DNA, 15 bp, Homo sapiens
attcctctacaccac

SEQ ID NO: 1215871 - DNA, 15 bp, Homo sapiens
cattcctctacacca

SEQ ID NO: 1215872 - DNA, 15 bp, Homo sapiens
acattcctctacacc

SEQ ID NO: 1215873 - DNA, 15 bp, Homo sapiens
aacattcctctacac

SEQ ID NO: 1215874 - DNA, 15 bp, Homo sapiens
caacattcctctaca

SEQ ID NO: 1215875 - DNA, 15 bp, Homo sapiens
ccaacattcctctac

SEQ ID NO: 1215876 - DNA, 15 bp, Homo sapiens
tccaacattcctcta

SEQ ID NO: 1215877 - DNA, 15 bp, Homo sapiens
atccaacattcctct

SEQ ID NO: 1215878 - DNA, 15 bp, Homo sapiens
tatccaacattcctc

SEQ ID NO: 1215879 - DNA, 15 bp, Homo sapiens
ttatccaacattcct

SEQ ID NO: 1215880 - DNA, 15 bp, Homo sapiens
cttatccaacattcc

SEQ ID NO: 1215881 - DNA, 15 bp, Homo sapiens
gcttatccaacattc

SEQ ID NO: 1215882 - DNA, 15 bp, Homo sapiens
tgcttatccaacatt

SEQ ID NO: 1215883 - DNA, 15 bp, Homo sapiens
ttgcttatccaacat

SEQ ID NO: 1215884 - DNA, 15 bp, Homo sapiens
tttgcttatccaaca

SEQ ID NO: 1215885 - DNA, 15 bp, Homo sapiens
atttgcttatccaac

SEQ ID NO: 1215886 - DNA, 15 bp, Homo sapiens
tatttgcttatccaa

SEQ ID NO: 1215887 - DNA, 15 bp, Homo sapiens
ctatttgcttatcca

SEQ ID NO: 1215888 - DNA, 15 bp, Homo sapiens
tctatttgcttatcc

SEQ ID NO: 1215889 - DNA, 15 bp, Homo sapiens
ctctatttgcttatc

SEQ ID NO: 1215890 - DNA, 15 bp, Homo sapiens
tctctatttgcttat

SEQ ID NO: 1215891 - DNA, 15 bp, Homo sapiens
ctctctatttgctta

SEQ ID NO: 1215892 - DNA, 15 bp, Homo sapiens
gctctctatttgctt

SEQ ID NO: 1215893 - DNA, 15 bp, Homo sapiens
agctctctatttgct

SEQ ID NO: 1215894 - DNA, 15 bp, Homo sapiens
gagctctctatttgc

SEQ ID NO: 1215895 - DNA, 15 bp, Homo sapiens
ggagctctctatttg

SEQ ID NO: 1215896 - DNA, 15 bp, Homo sapiens
tggagctctctattt

SEQ ID NO: 1215897 - DNA, 15 bp, Homo sapiens
atggagctctctatt

SEQ ID NO: 1215898 - DNA, 15 bp, Homo sapiens
gatggagctctctat

SEQ ID NO: 1215899 - DNA, 15 bp, Homo sapiens
tgatggagctctcta

SEQ ID NO: 1215900 - DNA, 15 bp, Homo sapiens
ctgatggagctctct

SEQ ID NO: 1215901 - DNA, 15 bp, Homo sapiens
tctgatggagctctc

SEQ ID NO: 1215902 - DNA, 15 bp, Homo sapiens
atctgatggagctct

SEQ ID NO: 1215903 - DNA, 15 bp, Homo sapiens
catctgatggagctc

SEQ ID NO: 1215904 - DNA, 15 bp, Homo sapiens
ccatctgatggagct

SEQ ID NO: 1215905 - DNA, 15 bp, Homo sapiens
accatctgatggagc

SEQ ID NO: 1215906 - DNA, 15 bp, Homo sapiens
caccatctgatggag

SEQ ID NO: 1215907 - DNA, 15 bp, Homo sapiens
tcaccatctgatgga

SEQ ID NO: 1215908 - DNA, 15 bp, Homo sapiens
gtcaccatctgatgg

SEQ ID NO: 1215909 - DNA, 15 bp, Homo sapiens
tgtcaccatctgatg

SEQ ID NO: 1215910 - DNA, 15 bp, Homo sapiens
ctgtcaccatctgat

SEQ ID NO: 1215911 - DNA, 15 bp, Homo sapiens
cctgtcaccatctga

SEQ ID NO: 1215912 - DNA, 15 bp, Homo sapiens
ccctgtcaccatctg

SEQ ID NO: 1215913 - DNA, 15 bp, Homo sapiens
gccctgtcaccatct

SEQ ID NO: 1215914 - DNA, 15 bp, Homo sapiens
tgccctgtcaccatc

SEQ ID NO: 1215915 - DNA, 15 bp, Homo sapiens
ttgccctgtcaccat

SEQ ID NO: 1215916 - DNA, 15 bp, Homo sapiens
tttgccctgtcacca

SEQ ID NO: 1215917 - DNA, 15 bp, Homo sapiens
tctttgccctgtcac

SEQ ID NO: 1215918 - DNA, 15 bp, Homo sapiens
ttctttgccctgtca

SEQ ID NO: 1215919 - DNA, 15 bp, Homo sapiens
tttctttgccctgtc

SEQ ID NO: 1215920 - DNA, 15 bp, Homo sapiens
ctttctttgccctgt

SEQ ID NO: 1215921 - DNA, 15 bp, Homo sapiens
actttctttgccctg

SEQ ID NO: 1215922 - DNA, 15 bp, Homo sapiens
gactttctttgccct

SEQ ID NO: 1215923 - DNA, 15 bp, Homo sapiens
tgactttctttgccc

SEQ ID NO: 1215924 - DNA, 15 bp, Homo sapiens
ttgactttctttgcc

SEQ ID NO: 1215925 - DNA, 15 bp, Homo sapiens
tttgactttctttgc

SEQ ID NO: 1215926 - DNA, 15 bp, Homo sapiens
ttttgactttctttg

SEQ ID NO: 1215927 - DNA, 15 bp, Homo sapiens
cttttgactttcttt

SEQ ID NO: 1215928 - DNA, 15 bp, Homo sapiens
ccttttgactttctt

SEQ ID NO: 1215929 - DNA, 15 bp, Homo sapiens
tccttttgactttct

SEQ ID NO: 1215930 - DNA, 15 bp, Homo sapiens
ctccttttgactttc

SEQ ID NO: 1215931 - DNA, 15 bp, Homo sapiens
actccttttgacttt

SEQ ID NO: 1215932 - DNA, 15 bp, Homo sapiens
aactccttttgactt

SEQ ID NO: 1215933 - DNA, 15 bp, Homo sapiens
gaactccttttgact

SEQ ID NO: 1215934 - DNA, 15 bp, Homo sapiens
tgaactccttttgac

SEQ ID NO: 1215935 - DNA, 15 bp, Homo sapiens
ctgaactccttttga

SEQ ID NO: 1215936 - DNA, 15 bp, Homo sapiens
tctgaactccttttg

SEQ ID NO: 1215937 - DNA, 15 bp, Homo sapiens
ctctgaactcctttt

SEQ ID NO: 1215938 - DNA, 15 bp, Homo sapiens
cctctgaactccttt

SEQ ID NO: 1215939 - DNA, 15 bp, Homo sapiens
gcctctgaactcctt

SEQ ID NO: 1215940 - DNA, 15 bp, Homo sapiens
ggcctctgaactcct

SEQ ID NO: 1215941 - DNA, 15 bp, Homo sapiens
cggcctctgaactcc

SEQ ID NO: 1215942 - DNA, 15 bp, Homo sapiens
ccggcctctgaactc

SEQ ID NO: 1215943 - DNA, 15 bp, Homo sapiens
cccggcctctgaact

SEQ ID NO: 1215944 - DNA, 15 bp, Homo sapiens
gcccggcctctgaac

SEQ ID NO: 1215945 - DNA, 15 bp, Homo sapiens
cgcccggcctctgaa

SEQ ID NO: 1215946 - DNA, 15 bp, Homo sapiens
gcgcccggcctctga

SEQ ID NO: 1215947 - DNA, 15 bp, Homo sapiens
cgcgcccggcctctg

SEQ ID NO: 1215948 - DNA, 15 bp, Homo sapiens
ccgcgcccggcctct

SEQ ID NO: 1215949 - DNA, 15 bp, Homo sapiens
accgcgcccggcctc

SEQ ID NO: 1215950 - DNA, 15 bp, Homo sapiens
cggcctcccaaagtc

SEQ ID NO: 1215951 - DNA, 15 bp, Homo sapiens
agcctcggcctccca

SEQ ID NO: 1215952 - DNA, 15 bp, Homo sapiens
cagcctcggcctccc

SEQ ID NO: 1215953 - DNA, 15 bp, Homo sapiens
ccagcctcggcctcc

SEQ ID NO: 1215954 - DNA, 15 bp, Homo sapiens
gccagcctcggcctc

SEQ ID NO: 1215955 - DNA, 15 bp, Homo sapiens
cgccagcctcggcct

SEQ ID NO: 1215956 - DNA, 15 bp, Homo sapiens
ccgccagcctcggcc

SEQ ID NO: 1215957 - DNA, 15 bp, Homo sapiens
tccgccagcctcggc

SEQ ID NO: 1215958 - DNA, 15 bp, Homo sapiens
atccgccagcctcgg

SEQ ID NO: 1215959 - DNA, 15 bp, Homo sapiens
gatccgccagcctcg

SEQ ID NO: 1215960 - DNA, 15 bp, Homo sapiens
ggtgatccgccagcc

SEQ ID NO: 1215961 - DNA, 15 bp, Homo sapiens
aggtgatccgccagc

SEQ ID NO: 1215962 - DNA, 15 bp, Homo sapiens
caggtgatccgccag

SEQ ID NO: 1215963 - DNA, 15 bp, Homo sapiens
gccaagctggtctca

SEQ ID NO: 1215964 - DNA, 15 bp, Homo sapiens
ggccaagctggtctc

SEQ ID NO: 1215965 - DNA, 15 bp, Homo sapiens
atggccaagctggtc

SEQ ID NO: 1215966 - DNA, 15 bp, Homo sapiens
gatggccaagctggt

SEQ ID NO: 1215967 - DNA, 15 bp, Homo sapiens
tgatggccaagctgg

SEQ ID NO: 1215968 - DNA, 15 bp, Homo sapiens
atgatggccaagctg

SEQ ID NO: 1215969 - DNA, 15 bp, Homo sapiens
catgatggccaagct

SEQ ID NO: 1215970 - DNA, 15 bp, Homo sapiens
tcatgatggccaagc

SEQ ID NO: 1215971 - DNA, 15 bp, Homo sapiens
gtcatgatggccaag

SEQ ID NO: 1215972 - DNA, 15 bp, Homo sapiens
tgtcatgatggccaa

SEQ ID NO: 1215973 - DNA, 15 bp, Homo sapiens
ttgtcatgatggcca

SEQ ID NO: 1215974 - DNA, 15 bp, Homo sapiens
tttgtcatgatggcc

SEQ ID NO: 1215975 - DNA, 15 bp, Homo sapiens
ttttgtcatgatggc

SEQ ID NO: 1215976 - DNA, 15 bp, Homo sapiens
gttttgtcatgatgg

SEQ ID NO: 1215977 - DNA, 15 bp, Homo sapiens
ggttttgtcatgatg

SEQ ID NO: 1215978 - DNA, 15 bp, Homo sapiens
gggttttgtcatgat

SEQ ID NO: 1215979 - DNA, 15 bp, Homo sapiens
ggggttttgtcatga

SEQ ID NO: 1215980 - DNA, 15 bp, Homo sapiens
cggggttttgtcatg

SEQ ID NO: 1215981 - DNA, 15 bp, Homo sapiens
acggggttttgtcat

SEQ ID NO: 1215982 - DNA, 15 bp, Homo sapiens
gacggggttttgtca

SEQ ID NO: 1215983 - DNA, 15 bp, Homo sapiens
agacggggttttgtc

SEQ ID NO: 1215984 - DNA, 15 bp, Homo sapiens
gagacggggttttgt

SEQ ID NO: 1215985 - DNA, 15 bp, Homo sapiens
cccacgcctggctaa

SEQ ID NO: 1215986 - DNA, 15 bp, Homo sapiens
tcccacgcctggcta

SEQ ID NO: 1215987 - DNA, 15 bp, Homo sapiens
ctcccacgcctggct

SEQ ID NO: 1215988 - DNA, 15 bp, Homo sapiens
actcccacgcctggc

SEQ ID NO: 1215989 - DNA, 15 bp, Homo sapiens
cactcccacgcctgg

SEQ ID NO: 1215990 - DNA, 15 bp, Homo sapiens
ccactcccacgcctg

SEQ ID NO: 1215991 - DNA, 15 bp, Homo sapiens
cccactcccacgcct

SEQ ID NO: 1215992 - DNA, 15 bp, Homo sapiens
gcccactcccacgcc

SEQ ID NO: 1215993 - DNA, 15 bp, Homo sapiens
cgcccactcccacgc

SEQ ID NO: 1215994 - DNA, 15 bp, Homo sapiens
gcgcccactcccacg

SEQ ID NO: 1215995 - DNA, 15 bp, Homo sapiens
ggcgcccactcccac

SEQ ID NO: 1215996 - DNA, 15 bp, Homo sapiens
aggcgcccactccca

SEQ ID NO: 1215997 - DNA, 15 bp, Homo sapiens
caggcgcccactccc

SEQ ID NO: 1215998 - DNA, 15 bp, Homo sapiens
acaggcgcccactcc

SEQ ID NO: 1215999 - DNA, 15 bp, Homo sapiens
tacaggcgcccactc

SEQ ID NO: 1216000 - DNA, 15 bp, Homo sapiens
ttacaggcgcccact

SEQ ID NO: 1216001 - DNA, 15 bp, Homo sapiens
ggcctcccgagtagc

SEQ ID NO: 1216002 - DNA, 15 bp, Homo sapiens
cggcctcccgagtag

SEQ ID NO: 1216003 - DNA, 15 bp, Homo sapiens
tcggcctcccgagta

SEQ ID NO: 1216004 - DNA, 15 bp, Homo sapiens
ctcggcctcccgagt

SEQ ID NO: 1216005 - DNA, 15 bp, Homo sapiens
cctcggcctcccgag

SEQ ID NO: 1216006 - DNA, 15 bp, Homo sapiens
acctcggcctcccga

SEQ ID NO: 1216007 - DNA, 15 bp, Homo sapiens
tacctcggcctcccg

SEQ ID NO: 1216008 - DNA, 15 bp, Homo sapiens
tctacctcggcctcc

SEQ ID NO: 1216009 - DNA, 15 bp, Homo sapiens
ttctacctcggcctc

SEQ ID NO: 1216010 - DNA, 15 bp, Homo sapiens
tttctacctcggcct

SEQ ID NO: 1216011 - DNA, 15 bp, Homo sapiens
ttttctacctcggcc

SEQ ID NO: 1216012 - DNA, 15 bp, Homo sapiens
tttttctacctcggc

SEQ ID NO: 1216013 - DNA, 15 bp, Homo sapiens
atttttctacctcgg

SEQ ID NO: 1216014 - DNA, 15 bp, Homo sapiens
gatttttctacctcg

SEQ ID NO: 1216015 - DNA, 15 bp, Homo sapiens
cgatttttctacctc

SEQ ID NO: 1216016 - DNA, 15 bp, Homo sapiens
gcgatttttctacct

SEQ ID NO: 1216017 - DNA, 15 bp, Homo sapiens
agcgatttttctacc

SEQ ID NO: 1216018 - DNA, 15 bp, Homo sapiens
aagcgatttttctac

SEQ ID NO: 1216019 - DNA, 15 bp, Homo sapiens
caagcgatttttcta

SEQ ID NO: 1216020 - DNA, 15 bp, Homo sapiens
tcaagcgatttttct

SEQ ID NO: 1216021 - DNA, 15 bp, Homo sapiens
ttcaagcgatttttc

SEQ ID NO: 1216022 - DNA, 15 bp, Homo sapiens
gttcaagcgattttt

SEQ ID NO: 1216023 - DNA, 15 bp, Homo sapiens
ggttcaagcgatttt

SEQ ID NO: 1216024 - DNA, 15 bp, Homo sapiens
aggttcaagcgattt

SEQ ID NO: 1216025 - DNA, 15 bp, Homo sapiens
atgcagtggcgcgat

SEQ ID NO: 1216026 - DNA, 15 bp, Homo sapiens
aatgcagtggcgcga

SEQ ID NO: 1216027 - DNA, 15 bp, Homo sapiens
gaatgcagtggcgcg

SEQ ID NO: 1216028 - DNA, 15 bp, Homo sapiens
ggaatgcagtggcgc

SEQ ID NO: 1216029 - DNA, 15 bp, Homo sapiens
gggctggaatgcagt

SEQ ID NO: 1216030 - DNA, 15 bp, Homo sapiens
cgggctggaatgcag

SEQ ID NO: 1216031 - DNA, 15 bp, Homo sapiens
ccgggctggaatgca

SEQ ID NO: 1216032 - DNA, 15 bp, Homo sapiens
cccgggctggaatgc

SEQ ID NO: 1216033 - DNA, 15 bp, Homo sapiens
tcccgggctggaatg

SEQ ID NO: 1216034 - DNA, 15 bp, Homo sapiens
ctcccgggctggaat

SEQ ID NO: 1216035 - DNA, 15 bp, Homo sapiens
cctcccgggctggaa

SEQ ID NO: 1216036 - DNA, 15 bp, Homo sapiens
gcctcccgggctgga

SEQ ID NO: 1216037 - DNA, 15 bp, Homo sapiens
tgcctcccgggctgg

SEQ ID NO: 1216038 - DNA, 15 bp, Homo sapiens
ttgcctcccgggctg

SEQ ID NO: 1216039 - DNA, 15 bp, Homo sapiens
cttgcctcccgggct

SEQ ID NO: 1216040 - DNA, 15 bp, Homo sapiens
tcttgcctcccgggc

SEQ ID NO: 1216041 - DNA, 15 bp, Homo sapiens
ctcttgcctcccggg

SEQ ID NO: 1216042 - DNA, 15 bp, Homo sapiens
gctcttgcctcccgg

SEQ ID NO: 1216043 - DNA, 15 bp, Homo sapiens
tgctcttgcctcccg

SEQ ID NO: 1216044 - DNA, 15 bp, Homo sapiens
ttgctcttgcctccc

SEQ ID NO: 1216045 - DNA, 15 bp, Homo sapiens
tttgctcttgcctcc

SEQ ID NO: 1216046 - DNA, 15 bp, Homo sapiens
ttttgctcttgcctc

SEQ ID NO: 1216047 - DNA, 15 bp, Homo sapiens
gttttgctcttgcct

SEQ ID NO: 1216048 - DNA, 15 bp, Homo sapiens
agttttgctcttgcc

SEQ ID NO: 1216049 - DNA, 15 bp, Homo sapiens
gagttttgctcttgc

SEQ ID NO: 1216050 - DNA, 15 bp, Homo sapiens
tgagatggagttttg

SEQ ID NO: 1216051 - DNA, 15 bp, Homo sapiens
ctccttttttttttt

SEQ ID NO: 1216052 - DNA, 15 bp, Homo sapiens
actcctttttttttt

SEQ ID NO: 1216053 - DNA, 15 bp, Homo sapiens
aactccttttttttt

SEQ ID NO: 1216054 - DNA, 15 bp, Homo sapiens
gaactcctttttttt

SEQ ID NO: 1216055 - DNA, 15 bp, Homo sapiens
tgaactccttttttt

SEQ ID NO: 1216056 - DNA, 15 bp, Homo sapiens
ctgaactcctttttt

SEQ ID NO: 1216057 - DNA, 15 bp, Homo sapiens
tctgaactccttttt

SEQ ID NO: 1216058 - DNA, 15 bp, Homo sapiens
gggcctctgaactcc

SEQ ID NO: 1216059 - DNA, 15 bp, Homo sapiens
cgggcctctgaactc

SEQ ID NO: 1216060 - DNA, 15 bp, Homo sapiens
ccgggcctctgaact

SEQ ID NO: 1216061 - DNA, 15 bp, Homo sapiens
gccgggcctctgaac

SEQ ID NO: 1216062 - DNA, 15 bp, Homo sapiens
tgccgggcctctgaa

SEQ ID NO: 1216063 - DNA, 15 bp, Homo sapiens
atgccgggcctctga

SEQ ID NO: 1216064 - DNA, 15 bp, Homo sapiens
catgccgggcctctg

SEQ ID NO: 1216065 - DNA, 15 bp, Homo sapiens
ccatgccgggcctct

SEQ ID NO: 1216066 - DNA, 15 bp, Homo sapiens
accatgccgggcctc

SEQ ID NO: 1216067 - DNA, 15 bp, Homo sapiens
caccatgccgggcct

SEQ ID NO: 1216068 - DNA, 15 bp, Homo sapiens
ccaccatgccgggcc

SEQ ID NO: 1216069 - DNA, 15 bp, Homo sapiens
accaccatgccgggc

SEQ ID NO: 1216070 - DNA, 15 bp, Homo sapiens
aaccaccatgccggg

SEQ ID NO: 1216071 - DNA, 15 bp, Homo sapiens
gaaccaccatgccgg

SEQ ID NO: 1216072 - DNA, 15 bp, Homo sapiens
tgaaccaccatgccg

SEQ ID NO: 1216073 - DNA, 15 bp, Homo sapiens
gtgaaccaccatgcc

SEQ ID NO: 1216074 - DNA, 15 bp, Homo sapiens
tgtgaaccaccatgc

SEQ ID NO: 1216075 - DNA, 15 bp, Homo sapiens
gtgtgaaccaccatg

SEQ ID NO: 1216076 - DNA, 15 bp, Homo sapiens
tgtgtgaaccaccat

SEQ ID NO: 1216077 - DNA, 15 bp, Homo sapiens
atgtgtgaaccacca

SEQ ID NO: 1216078 - DNA, 15 bp, Homo sapiens
catgtgtgaaccacc

SEQ ID NO: 1216079 - DNA, 15 bp, Homo sapiens
acatgtgtgaaccac

SEQ ID NO: 1216080 - DNA, 15 bp, Homo sapiens
cacatgtgtgaacca

SEQ ID NO: 1216081 - DNA, 15 bp, Homo sapiens
tcacatgtgtgaacc

SEQ ID NO: 1216082 - DNA, 15 bp, Homo sapiens
atcacatgtgtgaac

SEQ ID NO: 1216083 - DNA, 15 bp, Homo sapiens
gatcacatgtgtgaa

SEQ ID NO: 1216084 - DNA, 15 bp, Homo sapiens
ggatcacatgtgtga

SEQ ID NO: 1216085 - DNA, 15 bp, Homo sapiens
gggatcacatgtgtg

SEQ ID NO: 1216086 - DNA, 15 bp, Homo sapiens
tgggatcacatgtgt

SEQ ID NO: 1216087 - DNA, 15 bp, Homo sapiens
ctgggatcacatgtg

SEQ ID NO: 1216088 - DNA, 15 bp, Homo sapiens
tctgggatcacatgt

SEQ ID NO: 1216089 - DNA, 15 bp, Homo sapiens
ttctgggatcacatg

SEQ ID NO: 1216090 - DNA, 15 bp, Homo sapiens
gttctgggatcacat

SEQ ID NO: 1216091 - DNA, 15 bp, Homo sapiens
agttctgggatcaca

SEQ ID NO: 1216092 - DNA, 15 bp, Homo sapiens
aagttctgggatcac

SEQ ID NO: 1216093 - DNA, 15 bp, Homo sapiens
caagttctgggatca

SEQ ID NO: 1216094 - DNA, 15 bp, Homo sapiens
ccaagttctgggatc

SEQ ID NO: 1216095 - DNA, 15 bp, Homo sapiens
cccaagttctgggat

SEQ ID NO: 1216096 - DNA, 15 bp, Homo sapiens
ccccaagttctggga

SEQ ID NO: 1216097 - DNA, 15 bp, Homo sapiens
tccccaagttctggg

SEQ ID NO: 1216098 - DNA, 15 bp, Homo sapiens
ctccccaagttctgg

SEQ ID NO: 1216099 - DNA, 15 bp, Homo sapiens
cctccccaagttctg

SEQ ID NO: 1216100 - DNA, 15 bp, Homo sapiens
acctccccaagttct

SEQ ID NO: 1216101 - DNA, 15 bp, Homo sapiens
aacctccccaagttc

SEQ ID NO: 1216102 - DNA, 15 bp, Homo sapiens
caacctccccaagtt

SEQ ID NO: 1216103 - DNA, 15 bp, Homo sapiens
tcaacctccccaagt

SEQ ID NO: 1216104 - DNA, 15 bp, Homo sapiens
ctcaacctccccaag

SEQ ID NO: 1216105 - DNA, 15 bp, Homo sapiens
cctcaacctccccaa

SEQ ID NO: 1216106 - DNA, 15 bp, Homo sapiens
gcctcaacctcccca

SEQ ID NO: 1216107 - DNA, 15 bp, Homo sapiens
tgcctcaacctcccc

SEQ ID NO: 1216108 - DNA, 15 bp, Homo sapiens
ggtgattctcctgcc

SEQ ID NO: 1216109 - DNA, 15 bp, Homo sapiens
aggtgattctcctgc

SEQ ID NO: 1216110 - DNA, 15 bp, Homo sapiens
caggtgattctcctg

SEQ ID NO: 1216111 - DNA, 15 bp, Homo sapiens
tcaggtgattctcct

SEQ ID NO: 1216112 - DNA, 15 bp, Homo sapiens
gctcaggtgattctc

SEQ ID NO: 1216113 - DNA, 15 bp, Homo sapiens
agctcaggtgattct

SEQ ID NO: 1216114 - DNA, 15 bp, Homo sapiens
gagctcaggtgattc

SEQ ID NO: 1216115 - DNA, 15 bp, Homo sapiens
tgagctcaggtgatt

SEQ ID NO: 1216116 - DNA, 15 bp, Homo sapiens
tctgagctcaggtga

SEQ ID NO: 1216117 - DNA, 15 bp, Homo sapiens
ctctgagctcaggtg

SEQ ID NO: 1216118 - DNA, 15 bp, Homo sapiens
actctgagctcaggt

SEQ ID NO: 1216119 - DNA, 15 bp, Homo sapiens
aactctgagctcagg

SEQ ID NO: 1216120 - DNA, 15 bp, Homo sapiens
gaactctgagctcag

SEQ ID NO: 1216121 - DNA, 15 bp, Homo sapiens
tgaactctgagctca

SEQ ID NO: 1216122 - DNA, 15 bp, Homo sapiens
ttgaactctgagctc

SEQ ID NO: 1216123 - DNA, 15 bp, Homo sapiens
cttgaactctgagct

SEQ ID NO: 1216124 - DNA, 15 bp, Homo sapiens
tcttgaactctgagc

SEQ ID NO: 1216125 - DNA, 15 bp, Homo sapiens
gtcttgaactctgag

SEQ ID NO: 1216126 - DNA, 15 bp, Homo sapiens
ggtcttgaactctga

SEQ ID NO: 1216127 - DNA, 15 bp, Homo sapiens
tggtcttgaactctg

SEQ ID NO: 1216128 - DNA, 15 bp, Homo sapiens
ctgcccaggctggtc

SEQ ID NO: 1216129 - DNA, 15 bp, Homo sapiens
gctgcccaggctggt

SEQ ID NO: 1216130 - DNA, 15 bp, Homo sapiens
gtcttgctgtgctgc

SEQ ID NO: 1216131 - DNA, 15 bp, Homo sapiens
ggtcttgctgtgctg

SEQ ID NO: 1216132 - DNA, 15 bp, Homo sapiens
gggtcttgctgtgct

SEQ ID NO: 1216133 - DNA, 15 bp, Homo sapiens
ggggtcttgctgtgc

SEQ ID NO: 1216134 - DNA, 15 bp, Homo sapiens
tggggtcttgctgtg

SEQ ID NO: 1216135 - DNA, 15 bp, Homo sapiens
atggggtcttgctgt

SEQ ID NO: 1216136 - DNA, 15 bp, Homo sapiens
gatggggtcttgctg

SEQ ID NO: 1216137 - DNA, 15 bp, Homo sapiens
cagagatggggtctt

SEQ ID NO: 1216138 - DNA, 15 bp, Homo sapiens
gcagagatggggtct

SEQ ID NO: 1216139 - DNA, 15 bp, Homo sapiens
tgcagagatggggtc

SEQ ID NO: 1216140 - DNA, 15 bp, Homo sapiens
ttgcagagatggggt

SEQ ID NO: 1216141 - DNA, 15 bp, Homo sapiens
tttgcagagatgggg

SEQ ID NO: 1216142 - DNA, 15 bp, Homo sapiens
ttttgcagagatggg

SEQ ID NO: 1216143 - DNA, 15 bp, Homo sapiens
tttttgcagagatgg

SEQ ID NO: 1216144 - DNA, 15 bp, Homo sapiens
ttttttgcagagatg

SEQ ID NO: 1216145 - DNA, 15 bp, Homo sapiens
attttttgcagagat

SEQ ID NO: 1216146 - DNA, 15 bp, Homo sapiens
ttttattttttgcag

SEQ ID NO: 1216147 - DNA, 15 bp, Homo sapiens
tttttattttttgca

SEQ ID NO: 1216148 - DNA, 15 bp, Homo sapiens
atttttattttttgc

SEQ ID NO: 1216149 - DNA, 15 bp, Homo sapiens
aatttttattttttg

SEQ ID NO: 1216150 - DNA, 15 bp, Homo sapiens
aaatttttatttttt

SEQ ID NO: 1216151 - DNA, 15 bp, Homo sapiens
taaatttttattttt

SEQ ID NO: 1216152 - DNA, 15 bp, Homo sapiens
ctaaatttttatttt

SEQ ID NO: 1216153 - DNA, 15 bp, Homo sapiens
gctaaatttttattt

SEQ ID NO: 1216154 - DNA, 15 bp, Homo sapiens
ggctaaatttttatt

SEQ ID NO: 1216155 - DNA, 15 bp, Homo sapiens
gggctaaatttttat

SEQ ID NO: 1216156 - DNA, 15 bp, Homo sapiens
tgggctaaattttta

SEQ ID NO: 1216157 - DNA, 15 bp, Homo sapiens
ctgggctaaattttt

SEQ ID NO: 1216158 - DNA, 15 bp, Homo sapiens
actgggctaaatttt

SEQ ID NO: 1216159 - DNA, 15 bp, Homo sapiens
cactgggctaaattt

SEQ ID NO: 1216160 - DNA, 15 bp, Homo sapiens
acactgggctaaatt

SEQ ID NO: 1216161 - DNA, 15 bp, Homo sapiens
cacactgggctaaat

SEQ ID NO: 1216162 - DNA, 15 bp, Homo sapiens
ccacactgggctaaa

SEQ ID NO: 1216163 - DNA, 15 bp, Homo sapiens
accacactgggctaa

SEQ ID NO: 1216164 - DNA, 15 bp, Homo sapiens
caccacactgggcta

SEQ ID NO: 1216165 - DNA, 15 bp, Homo sapiens
tcaccacactgggct

SEQ ID NO: 1216166 - DNA, 15 bp, Homo sapiens
atcaccacactgggc

SEQ ID NO: 1216167 - DNA, 15 bp, Homo sapiens
catcaccacactggg

SEQ ID NO: 1216168 - DNA, 15 bp, Homo sapiens
tcatcaccacactgg

SEQ ID NO: 1216169 - DNA, 15 bp, Homo sapiens
ctcatcaccacactg

SEQ ID NO: 1216170 - DNA, 15 bp, Homo sapiens
gctcatcaccacact

SEQ ID NO: 1216171 - DNA, 15 bp, Homo sapiens
cgctcatcaccacac

SEQ ID NO: 1216172 - DNA, 15 bp, Homo sapiens
gcgctcatcaccaca

SEQ ID NO: 1216173 - DNA, 15 bp, Homo sapiens
ggcgctcatcaccac

SEQ ID NO: 1216174 - DNA, 15 bp, Homo sapiens
aggcgctcatcacca

SEQ ID NO: 1216175 - DNA, 15 bp, Homo sapiens
taggcgctcatcacc

SEQ ID NO: 1216176 - DNA, 15 bp, Homo sapiens
ctaggcgctcatcac

SEQ ID NO: 1216177 - DNA, 15 bp, Homo sapiens
actaggcgctcatca

SEQ ID NO: 1216178 - DNA, 15 bp, Homo sapiens
aactaggcgctcatc

SEQ ID NO: 1216179 - DNA, 15 bp, Homo sapiens
gaactaggcgctcat

SEQ ID NO: 1216180 - DNA, 15 bp, Homo sapiens
ggaactaggcgctca

SEQ ID NO: 1216181 - DNA, 15 bp, Homo sapiens
tggaactaggcgctc

SEQ ID NO: 1216182 - DNA, 15 bp, Homo sapiens
ctggaactaggcgct

SEQ ID NO: 1216183 - DNA, 15 bp, Homo sapiens
gctggaactaggcgc

SEQ ID NO: 1216184 - DNA, 15 bp, Homo sapiens
agctggaactaggcg

SEQ ID NO: 1216185 - DNA, 15 bp, Homo sapiens
tagctggaactaggc

SEQ ID NO: 1216186 - DNA, 15 bp, Homo sapiens
gtagctggaactagg

SEQ ID NO: 1216187 - DNA, 15 bp, Homo sapiens
agtagctggaactag

SEQ ID NO: 1216188 - DNA, 15 bp, Homo sapiens
tagtagctggaacta

SEQ ID NO: 1216189 - DNA, 15 bp, Homo sapiens
ctagtagctggaact

SEQ ID NO: 1216190 - DNA, 15 bp, Homo sapiens
cctagtagctggaac

SEQ ID NO: 1216191 - DNA, 15 bp, Homo sapiens
ccctagtagctggaa

SEQ ID NO: 1216192 - DNA, 15 bp, Homo sapiens
tccctagtagctgga

SEQ ID NO: 1216193 - DNA, 15 bp, Homo sapiens
ctccctagtagctgg

SEQ ID NO: 1216194 - DNA, 15 bp, Homo sapiens
cctccctagtagctg

SEQ ID NO: 1216195 - DNA, 15 bp, Homo sapiens
gcctccctagtagct

SEQ ID NO: 1216196 - DNA, 15 bp, Homo sapiens
agcctccctagtagc

SEQ ID NO: 1216197 - DNA, 15 bp, Homo sapiens
tagcctccctagtag

SEQ ID NO: 1216198 - DNA, 15 bp, Homo sapiens
ttagcctccctagta

SEQ ID NO: 1216199 - DNA, 15 bp, Homo sapiens
cttagcctccctagt

SEQ ID NO: 1216200 - DNA, 15 bp, Homo sapiens
ccttagcctccctag

SEQ ID NO: 1216201 - DNA, 15 bp, Homo sapiens
gccttagcctcccta

SEQ ID NO: 1216202 - DNA, 15 bp, Homo sapiens
tgccttagcctccct

SEQ ID NO: 1216203 - DNA, 15 bp, Homo sapiens
cctcctgccttagcc

SEQ ID NO: 1216204 - DNA, 15 bp, Homo sapiens
tcctcctgccttagc

SEQ ID NO: 1216205 - DNA, 15 bp, Homo sapiens
atcctcctgccttag

SEQ ID NO: 1216206 - DNA, 15 bp, Homo sapiens
aatcctcctgcctta

SEQ ID NO: 1216207 - DNA, 15 bp, Homo sapiens
agcctcaagcaatcc

SEQ ID NO: 1216208 - DNA, 15 bp, Homo sapiens
tagcctcaagcaatc

SEQ ID NO: 1216209 - DNA, 15 bp, Homo sapiens
ttagcctcaagcaat

SEQ ID NO: 1216210 - DNA, 15 bp, Homo sapiens
cttagcctcaagcaa

SEQ ID NO: 1216211 - DNA, 15 bp, Homo sapiens
ccttagcctcaagca

SEQ ID NO: 1216212 - DNA, 15 bp, Homo sapiens
accttagcctcaagc

SEQ ID NO: 1216213 - DNA, 15 bp, Homo sapiens
taccttagcctcaag

SEQ ID NO: 1216214 - DNA, 15 bp, Homo sapiens
ctaccttagcctcaa

SEQ ID NO: 1216215 - DNA, 15 bp, Homo sapiens
cctaccttagcctca

SEQ ID NO: 1216216 - DNA, 15 bp, Homo sapiens
tcctaccttagcctc

SEQ ID NO: 1216217 - DNA, 15 bp, Homo sapiens
ctcctaccttagcct

SEQ ID NO: 1216218 - DNA, 15 bp, Homo sapiens
tctcctaccttagcc

SEQ ID NO: 1216219 - DNA, 15 bp, Homo sapiens
atctcctaccttagc

SEQ ID NO: 1216220 - DNA, 15 bp, Homo sapiens
aatctcctaccttag

SEQ ID NO: 1216221 - DNA, 15 bp, Homo sapiens
caatctcctacctta

SEQ ID NO: 1216222 - DNA, 15 bp, Homo sapiens
tcaatctcctacctt

SEQ ID NO: 1216223 - DNA, 15 bp, Homo sapiens
ctcaatctcctacct

SEQ ID NO: 1216224 - DNA, 15 bp, Homo sapiens
tctcaatctcctacc

SEQ ID NO: 1216225 - DNA, 15 bp, Homo sapiens
gtctcaatctcctac

SEQ ID NO: 1216226 - DNA, 15 bp, Homo sapiens
agtctcaatctccta

SEQ ID NO: 1216227 - DNA, 15 bp, Homo sapiens
cagtctcaatctcct

SEQ ID NO: 1216228 - DNA, 15 bp, Homo sapiens
gcagtctcaatctcc

SEQ ID NO: 1216229 - DNA, 15 bp, Homo sapiens
tgcagtctcaatctc

SEQ ID NO: 1216230 - DNA, 15 bp, Homo sapiens
ctgcagtctcaatct

SEQ ID NO: 1216231 - DNA, 15 bp, Homo sapiens
actgcagtctcaatc

SEQ ID NO: 1216232 - DNA, 15 bp, Homo sapiens
cactgcagtctcaat

SEQ ID NO: 1216233 - DNA, 15 bp, Homo sapiens
gtcactgcagtctca

SEQ ID NO: 1216234 - DNA, 15 bp, Homo sapiens
agtcactgcagtctc

SEQ ID NO: 1216235 - DNA, 15 bp, Homo sapiens
aagtcactgcagtct

SEQ ID NO: 1216236 - DNA, 15 bp, Homo sapiens
caagtcactgcagtc

SEQ ID NO: 1216237 - DNA, 15 bp, Homo sapiens
acaagtcactgcagt

SEQ ID NO: 1216238 - DNA, 15 bp, Homo sapiens
cacaagtcactgcag

SEQ ID NO: 1216239 - DNA, 15 bp, Homo sapiens
tcacaagtcactgca

SEQ ID NO: 1216240 - DNA, 15 bp, Homo sapiens
atcacaagtcactgc

SEQ ID NO: 1216241 - DNA, 15 bp, Homo sapiens
aatcacaagtcactg

SEQ ID NO: 1216242 - DNA, 15 bp, Homo sapiens
caatcacaagtcact

SEQ ID NO: 1216243 - DNA, 15 bp, Homo sapiens
gcaatcacaagtcac

SEQ ID NO: 1216244 - DNA, 15 bp, Homo sapiens
cgcaatcacaagtca

SEQ ID NO: 1216245 - DNA, 15 bp, Homo sapiens
acgcaatcacaagtc

SEQ ID NO: 1216246 - DNA, 15 bp, Homo sapiens
gacgcaatcacaagt

SEQ ID NO: 1216247 - DNA, 15 bp, Homo sapiens
tgacgcaatcacaag

SEQ ID NO: 1216248 - DNA, 15 bp, Homo sapiens
gtgacgcaatcacaa

SEQ ID NO: 1216249 - DNA, 15 bp, Homo sapiens
agtgacgcaatcaca

SEQ ID NO: 1216250 - DNA, 15 bp, Homo sapiens
cagtgacgcaatcac

SEQ ID NO: 1216251 - DNA, 15 bp, Homo sapiens
gcagtgacgcaatca

SEQ ID NO: 1216252 - DNA, 15 bp, Homo sapiens
cgcagtgacgcaatc

SEQ ID NO: 1216253 - DNA, 15 bp, Homo sapiens
gcgcagtgacgcaat

SEQ ID NO: 1216254 - DNA, 15 bp, Homo sapiens
agcgcagtgacgcaa

SEQ ID NO: 1216255 - DNA, 15 bp, Homo sapiens
gagcgcagtgacgca

SEQ ID NO: 1216256 - DNA, 15 bp, Homo sapiens
ggagcgcagtgacgc

SEQ ID NO: 1216257 - DNA, 15 bp, Homo sapiens
tggagcgcagtgacg

SEQ ID NO: 1216258 - DNA, 15 bp, Homo sapiens
ctggagcgcagtgac

SEQ ID NO: 1216259 - DNA, 15 bp, Homo sapiens
gctggagcgcagtga

SEQ ID NO: 1216260 - DNA, 15 bp, Homo sapiens
ggctggagcgcagtg

SEQ ID NO: 1216261 - DNA, 15 bp, Homo sapiens
aggctggagcgcagt

SEQ ID NO: 1216262 - DNA, 15 bp, Homo sapiens
caggctggagcgcag

SEQ ID NO: 1216263 - DNA, 15 bp, Homo sapiens
acccaggctggagcg

SEQ ID NO: 1216264 - DNA, 15 bp, Homo sapiens
cacccaggctggagc

SEQ ID NO: 1216265 - DNA, 15 bp, Homo sapiens
gcttgctctgtcacc

SEQ ID NO: 1216266 - DNA, 15 bp, Homo sapiens
ggcttgctctgtcac

SEQ ID NO: 1216267 - DNA, 15 bp, Homo sapiens
gggcttgctctgtca

SEQ ID NO: 1216268 - DNA, 15 bp, Homo sapiens
agggcttgctctgtc

SEQ ID NO: 1216269 - DNA, 15 bp, Homo sapiens
aagggcttgctctgt

SEQ ID NO: 1216270 - DNA, 15 bp, Homo sapiens
caagggcttgctctg

SEQ ID NO: 1216271 - DNA, 15 bp, Homo sapiens
acaagggcttgctct

SEQ ID NO: 1216272 - DNA, 15 bp, Homo sapiens
gacaagggcttgctc

SEQ ID NO: 1216273 - DNA, 15 bp, Homo sapiens
agacaagggcttgct

SEQ ID NO: 1216274 - DNA, 15 bp, Homo sapiens
gagacaagggcttgc

SEQ ID NO: 1216275 - DNA, 15 bp, Homo sapiens
agagacaagggcttg

SEQ ID NO: 1216276 - DNA, 15 bp, Homo sapiens
aagagacaagggctt

SEQ ID NO: 1216277 - DNA, 15 bp, Homo sapiens
taagagacaagggct

SEQ ID NO: 1216278 - DNA, 15 bp, Homo sapiens
ttaagagacaagggc

SEQ ID NO: 1216279 - DNA, 15 bp, Homo sapiens
tttaagagacaaggg

SEQ ID NO: 1216280 - DNA, 15 bp, Homo sapiens
ttttaagagacaagg

SEQ ID NO: 1216281 - DNA, 15 bp, Homo sapiens
tttttaagagacaag

SEQ ID NO: 1216282 - DNA, 15 bp, Homo sapiens
ttttttaagagacaa

SEQ ID NO: 1216283 - DNA, 15 bp, Homo sapiens
ttgaatttttttttt

SEQ ID NO: 1216284 - DNA, 15 bp, Homo sapiens
ctttgaatttttttt

SEQ ID NO: 1216285 - DNA, 15 bp, Homo sapiens
tctttgaattttttt

SEQ ID NO: 1216286 - DNA, 15 bp, Homo sapiens
cttctttgaattttt

SEQ ID NO: 1216287 - DNA, 15 bp, Homo sapiens
ccttctttgaatttt

SEQ ID NO: 1216288 - DNA, 15 bp, Homo sapiens
cccttctttgaattt

SEQ ID NO: 1216289 - DNA, 15 bp, Homo sapiens
acccttctttgaatt

SEQ ID NO: 1216290 - DNA, 15 bp, Homo sapiens
aacccttctttgaat

SEQ ID NO: 1216291 - DNA, 15 bp, Homo sapiens
aaacccttctttgaa

SEQ ID NO: 1216292 - DNA, 15 bp, Homo sapiens
gaaacccttctttga

SEQ ID NO: 1216293 - DNA, 15 bp, Homo sapiens
ggaaacccttctttg

SEQ ID NO: 1216294 - DNA, 15 bp, Homo sapiens
tggaaacccttcttt

SEQ ID NO: 1216295 - DNA, 15 bp, Homo sapiens
ctggaaacccttctt

SEQ ID NO: 1216296 - DNA, 15 bp, Homo sapiens
tctggaaacccttct

SEQ ID NO: 1216297 - DNA, 15 bp, Homo sapiens
ctctggaaacccttc

SEQ ID NO: 1216298 - DNA, 15 bp, Homo sapiens
cctctggaaaccctt

SEQ ID NO: 1216299 - DNA, 15 bp, Homo sapiens
ccctctggaaaccct

SEQ ID NO: 1216300 - DNA, 15 bp, Homo sapiens
gccctctggaaaccc

SEQ ID NO: 1216301 - DNA, 15 bp, Homo sapiens
ggccctctggaaacc

SEQ ID NO: 1216302 - DNA, 15 bp, Homo sapiens
tggccctctggaaac

SEQ ID NO: 1216303 - DNA, 15 bp, Homo sapiens
ctggccctctggaaa

SEQ ID NO: 1216304 - DNA, 15 bp, Homo sapiens
cctggccctctggaa

SEQ ID NO: 1216305 - DNA, 15 bp, Homo sapiens
tcctggccctctgga

SEQ ID NO: 1216306 - DNA, 15 bp, Homo sapiens
ctcctggccctctgg

SEQ ID NO: 1216307 - DNA, 15 bp, Homo sapiens
gtttggcttagagat

SEQ ID NO: 1216308 - DNA, 15 bp, Homo sapiens
ggtttggcttagaga

SEQ ID NO: 1216309 - DNA, 15 bp, Homo sapiens
gggtttggcttagag

SEQ ID NO: 1216310 - DNA, 15 bp, Homo sapiens
ggggtttggcttaga

SEQ ID NO: 1216311 - DNA, 15 bp, Homo sapiens
aggggtttggcttag

SEQ ID NO: 1216312 - DNA, 15 bp, Homo sapiens
taggggtttggctta

SEQ ID NO: 1216313 - DNA, 15 bp, Homo sapiens
ttaggggtttggctt

SEQ ID NO: 1216314 - DNA, 15 bp, Homo sapiens
tttaggggtttggct

SEQ ID NO: 1216315 - DNA, 15 bp, Homo sapiens
gtttaggggtttggc

SEQ ID NO: 1216316 - DNA, 15 bp, Homo sapiens
agtttaggggtttgg

SEQ ID NO: 1216317 - DNA, 15 bp, Homo sapiens
gagtttaggggtttg

SEQ ID NO: 1216318 - DNA, 15 bp, Homo sapiens
tgagtttaggggttt

SEQ ID NO: 1216319 - DNA, 15 bp, Homo sapiens
ctgagtttaggggtt

SEQ ID NO: 1216320 - DNA, 15 bp, Homo sapiens
cctgagtttaggggt

SEQ ID NO: 1216321 - DNA, 15 bp, Homo sapiens
tcctgagtttagggg

SEQ ID NO: 1216322 - DNA, 15 bp, Homo sapiens
ctcctgagtttaggg

SEQ ID NO: 1216323 - DNA, 15 bp, Homo sapiens
actcctgagtttagg

SEQ ID NO: 1216324 - DNA, 15 bp, Homo sapiens
gactcctgagtttag

SEQ ID NO: 1216325 - DNA, 15 bp, Homo sapiens
tgactcctgagttta

SEQ ID NO: 1216326 - DNA, 15 bp, Homo sapiens
ttgactcctgagttt

SEQ ID NO: 1216327 - DNA, 15 bp, Homo sapiens
gttgactcctgagtt

SEQ ID NO: 1216328 - DNA, 15 bp, Homo sapiens
cgttgactcctgagt

SEQ ID NO: 1216329 - DNA, 15 bp, Homo sapiens
acgttgactcctgag

SEQ ID NO: 1216330 - DNA, 15 bp, Homo sapiens
cacgttgactcctga

SEQ ID NO: 1216331 - DNA, 15 bp, Homo sapiens
acacgttgactcctg

SEQ ID NO: 1216332 - DNA, 15 bp, Homo sapiens
aacacgttgactcct

SEQ ID NO: 1216333 - DNA, 15 bp, Homo sapiens
aaacacgttgactcc

SEQ ID NO: 1216334 - DNA, 15 bp, Homo sapiens
taaacacgttgactc

SEQ ID NO: 1216335 - DNA, 15 bp, Homo sapiens
gtaaacacgttgact

SEQ ID NO: 1216336 - DNA, 15 bp, Homo sapiens
ggtaaacacgttgac

SEQ ID NO: 1216337 - DNA, 15 bp, Homo sapiens
aggtaaacacgttga

SEQ ID NO: 1216338 - DNA, 15 bp, Homo sapiens
gaggtaaacacgttg

SEQ ID NO: 1216339 - DNA, 15 bp, Homo sapiens
agaggtaaacacgtt

SEQ ID NO: 1216340 - DNA, 15 bp, Homo sapiens
aagaggtaaacacgt

SEQ ID NO: 1216341 - DNA, 15 bp, Homo sapiens
gaagaggtaaacacg

SEQ ID NO: 1216342 - DNA, 15 bp, Homo sapiens
agaagaggtaaacac

SEQ ID NO: 1216343 - DNA, 15 bp, Homo sapiens
tagaagaggtaaaca

SEQ ID NO: 1216344 - DNA, 15 bp, Homo sapiens
atagaagaggtaaac

SEQ ID NO: 1216345 - DNA, 15 bp, Homo sapiens
catagaagaggtaaa

SEQ ID NO: 1216346 - DNA, 15 bp, Homo sapiens
gcatagaagaggtaa

SEQ ID NO: 1216347 - DNA, 15 bp, Homo sapiens
tgcatagaagaggta

SEQ ID NO: 1216348 - DNA, 15 bp, Homo sapiens
ttgcatagaagaggt

SEQ ID NO: 1216349 - DNA, 15 bp, Homo sapiens
cttgcatagaagagg

SEQ ID NO: 1216350 - DNA, 15 bp, Homo sapiens
gcttgcatagaagag

SEQ ID NO: 1216351 - DNA, 15 bp, Homo sapiens
ggcttgcatagaaga

SEQ ID NO: 1216352 - DNA, 15 bp, Homo sapiens
aggcttgcatagaag

SEQ ID NO: 1216353 - DNA, 15 bp, Homo sapiens
aaggcttgcatagaa

SEQ ID NO: 1216354 - DNA, 15 bp, Homo sapiens
caaggcttgcataga

SEQ ID NO: 1216355 - DNA, 15 bp, Homo sapiens
gcaaggcttgcatag

SEQ ID NO: 1216356 - DNA, 15 bp, Homo sapiens
agcaaggcttgcata

SEQ ID NO: 1216357 - DNA, 15 bp, Homo sapiens
tagcaaggcttgcat

SEQ ID NO: 1216358 - DNA, 15 bp, Homo sapiens
ctagcaaggcttgca

SEQ ID NO: 1216359 - DNA, 15 bp, Homo sapiens
tctagcaaggcttgc

SEQ ID NO: 1216360 - DNA, 15 bp, Homo sapiens
gtctagcaaggcttg

SEQ ID NO: 1216361 - DNA, 15 bp, Homo sapiens
tgtctagcaaggctt

SEQ ID NO: 1216362 - DNA, 15 bp, Homo sapiens
ctgtctagcaaggct

SEQ ID NO: 1216363 - DNA, 15 bp, Homo sapiens
gctgtctagcaaggc

SEQ ID NO: 1216364 - DNA, 15 bp, Homo sapiens
ggctgtctagcaagg

SEQ ID NO: 1216365 - DNA, 15 bp, Homo sapiens
tggctgtctagcaag

SEQ ID NO: 1216366 - DNA, 15 bp, Homo sapiens
ctggctgtctagcaa

SEQ ID NO: 1216367 - DNA, 15 bp, Homo sapiens
cctggctgtctagca

SEQ ID NO: 1216368 - DNA, 15 bp, Homo sapiens
acctggctgtctagc

SEQ ID NO: 1216369 - DNA, 15 bp, Homo sapiens
aacctggctgtctag

SEQ ID NO: 1216370 - DNA, 15 bp, Homo sapiens
taacctggctgtcta

SEQ ID NO: 1216371 - DNA, 15 bp, Homo sapiens
ctaacctggctgtct

SEQ ID NO: 1216372 - DNA, 15 bp, Homo sapiens
gctaacctggctgtc

SEQ ID NO: 1216373 - DNA, 15 bp, Homo sapiens
ggctaacctggctgt

SEQ ID NO: 1216374 - DNA, 15 bp, Homo sapiens
aggctaacctggctg

SEQ ID NO: 1216375 - DNA, 15 bp, Homo sapiens
aaggctaacctggct

SEQ ID NO: 1216376 - DNA, 15 bp, Homo sapiens
aaaggctaacctggc

SEQ ID NO: 1216377 - DNA, 15 bp, Homo sapiens
caaaggctaacctgg

SEQ ID NO: 1216378 - DNA, 15 bp, Homo sapiens
gcaaaggctaacctg

SEQ ID NO: 1216379 - DNA, 15 bp, Homo sapiens
ggcaaaggctaacct

SEQ ID NO: 1216380 - DNA, 15 bp, Homo sapiens
gggcaaaggctaacc

SEQ ID NO: 1216381 - DNA, 15 bp, Homo sapiens
agggcaaaggctaac

SEQ ID NO: 1216382 - DNA, 15 bp, Homo sapiens
cagggcaaaggctaa

SEQ ID NO: 1216383 - DNA, 15 bp, Homo sapiens
acagggcaaaggcta

SEQ ID NO: 1216384 - DNA, 15 bp, Homo sapiens
gacagggcaaaggct

SEQ ID NO: 1216385 - DNA, 15 bp, Homo sapiens
tgacagggcaaaggc

SEQ ID NO: 1216386 - DNA, 15 bp, Homo sapiens
gtgacagggcaaagg

SEQ ID NO: 1216387 - DNA, 15 bp, Homo sapiens
gggtgacagggcaaa

SEQ ID NO: 1216388 - DNA, 15 bp, Homo sapiens
ggggtgacagggcaa

SEQ ID NO: 1216389 - DNA, 15 bp, Homo sapiens
gggggtgacagggca

SEQ ID NO: 1216390 - DNA, 15 bp, Homo sapiens
cgggggtgacagggc

SEQ ID NO: 1216391 - DNA, 15 bp, Homo sapiens
tcgggggtgacaggg

SEQ ID NO: 1216392 - DNA, 15 bp, Homo sapiens
ttcgggggtgacagg

SEQ ID NO: 1216393 - DNA, 15 bp, Homo sapiens
attcgggggtgacag

SEQ ID NO: 1216394 - DNA, 15 bp, Homo sapiens
gattcgggggtgaca

SEQ ID NO: 1216395 - DNA, 15 bp, Homo sapiens
tgattcgggggtgac

SEQ ID NO: 1216396 - DNA, 15 bp, Homo sapiens
atgattcgggggtga

SEQ ID NO: 1216397 - DNA, 15 bp, Homo sapiens
catgattcgggggtg

SEQ ID NO: 1216398 - DNA, 15 bp, Homo sapiens
tcatgattcgggggt

SEQ ID NO: 1216399 - DNA, 15 bp, Homo sapiens
gtcatgattcggggg

SEQ ID NO: 1216400 - DNA, 15 bp, Homo sapiens
ggtcatgattcgggg

SEQ ID NO: 1216401 - DNA, 15 bp, Homo sapiens
gggtcatgattcggg

SEQ ID NO: 1216402 - DNA, 15 bp, Homo sapiens
tgggtcatgattcgg

SEQ ID NO: 1216403 - DNA, 15 bp, Homo sapiens
gtgggtcatgattcg

SEQ ID NO: 1216404 - DNA, 15 bp, Homo sapiens
ggtgggtcatgattc

SEQ ID NO: 1216405 - DNA, 15 bp, Homo sapiens
gggtgggtcatgatt

SEQ ID NO: 1216406 - DNA, 15 bp, Homo sapiens
tgggtgggtcatgat

SEQ ID NO: 1216407 - DNA, 15 bp, Homo sapiens
ctgggtgggtcatga

SEQ ID NO: 1216408 - DNA, 15 bp, Homo sapiens
actgggtgggtcatg

SEQ ID NO: 1216409 - DNA, 15 bp, Homo sapiens
cactgggtgggtcat

SEQ ID NO: 1216410 - DNA, 15 bp, Homo sapiens
acactgggtgggtca

SEQ ID NO: 1216411 - DNA, 15 bp, Homo sapiens
gacactgggtgggtc

SEQ ID NO: 1216412 - DNA, 15 bp, Homo sapiens
agacactgggtgggt

SEQ ID NO: 1216413 - DNA, 15 bp, Homo sapiens
aagacactgggtggg

SEQ ID NO: 1216414 - DNA, 15 bp, Homo sapiens
aaagacactgggtgg

SEQ ID NO: 1216415 - DNA, 15 bp, Homo sapiens
gaaagacactgggtg

SEQ ID NO: 1216416 - DNA, 15 bp, Homo sapiens
cgaaagacactgggt

SEQ ID NO: 1216417 - DNA, 15 bp, Homo sapiens
tcgaaagacactggg

SEQ ID NO: 1216418 - DNA, 15 bp, Homo sapiens
ctcgaaagacactgg

SEQ ID NO: 1216419 - DNA, 15 bp, Homo sapiens
cctcgaaagacactg

SEQ ID NO: 1216420 - DNA, 15 bp, Homo sapiens
acctcgaaagacact

SEQ ID NO: 1216421 - DNA, 15 bp, Homo sapiens
cacctcgaaagacac

SEQ ID NO: 1216422 - DNA, 15 bp, Homo sapiens
ccacctcgaaagaca

SEQ ID NO: 1216423 - DNA, 15 bp, Homo sapiens
cccacctcgaaagac

SEQ ID NO: 1216424 - DNA, 15 bp, Homo sapiens
acccacctcgaaaga

SEQ ID NO: 1216425 - DNA, 15 bp, Homo sapiens
aacccacctcgaaag

SEQ ID NO: 1216426 - DNA, 15 bp, Homo sapiens
aaacccacctcgaaa

SEQ ID NO: 1216427 - DNA, 15 bp, Homo sapiens
caaacccacctcgaa

SEQ ID NO: 1216428 - DNA, 15 bp, Homo sapiens
acaaacccacctcga

SEQ ID NO: 1216429 - DNA, 15 bp, Homo sapiens
tacaaacccacctcg

SEQ ID NO: 1216430 - DNA, 15 bp, Homo sapiens
gtacaaacccacctc

SEQ ID NO: 1216431 - DNA, 15 bp, Homo sapiens
ggtacaaacccacct

SEQ ID NO: 1216432 - DNA, 15 bp, Homo sapiens
aggtacaaacccacc

SEQ ID NO: 1216433 - DNA, 15 bp, Homo sapiens
aaggtacaaacccac

SEQ ID NO: 1216434 - DNA, 15 bp, Homo sapiens
gaaggtacaaaccca

SEQ ID NO: 1216435 - DNA, 15 bp, Homo sapiens
ggaaggtacaaaccc

SEQ ID NO: 1216436 - DNA, 15 bp, Homo sapiens
aggaaggtacaaacc

SEQ ID NO: 1216437 - DNA, 15 bp, Homo sapiens
aaggaaggtacaaac

SEQ ID NO: 1216438 - DNA, 15 bp, Homo sapiens
taaggaaggtacaaa

SEQ ID NO: 1216439 - DNA, 15 bp, Homo sapiens
ttaaggaaggtacaa

SEQ ID NO: 1216440 - DNA, 15 bp, Homo sapiens
cttaaggaaggtaca

SEQ ID NO: 1216441 - DNA, 15 bp, Homo sapiens
gcttaaggaaggtac

SEQ ID NO: 1216442 - DNA, 15 bp, Homo sapiens
ggcttaaggaaggta

SEQ ID NO: 1216443 - DNA, 15 bp, Homo sapiens
tggcttaaggaaggt

SEQ ID NO: 1216444 - DNA, 15 bp, Homo sapiens
ctggcttaaggaagg

SEQ ID NO: 1216445 - DNA, 15 bp, Homo sapiens
cctggcttaaggaag

SEQ ID NO: 1216446 - DNA, 15 bp, Homo sapiens
tcctggcttaaggaa

SEQ ID NO: 1216447 - DNA, 15 bp, Homo sapiens
ttcctggcttaagga

SEQ ID NO: 1216448 - DNA, 15 bp, Homo sapiens
tttcctggcttaagg

SEQ ID NO: 1216449 - DNA, 15 bp, Homo sapiens
ctttcctggcttaag

SEQ ID NO: 1216450 - DNA, 15 bp, Homo sapiens
cctttcctggcttaa

SEQ ID NO: 1216451 - DNA, 15 bp, Homo sapiens
ccctttcctggctta

SEQ ID NO: 1216452 - DNA, 15 bp, Homo sapiens
tccctttcctggctt

SEQ ID NO: 1216453 - DNA, 15 bp, Homo sapiens
atccctttcctggct

SEQ ID NO: 1216454 - DNA, 15 bp, Homo sapiens
aatccctttcctggc

SEQ ID NO: 1216455 - DNA, 15 bp, Homo sapiens
gaatccctttcctgg

SEQ ID NO: 1216456 - DNA, 15 bp, Homo sapiens
tgaatccctttcctg

SEQ ID NO: 1216457 - DNA, 15 bp, Homo sapiens
atgaatccctttcct

SEQ ID NO: 1216458 - DNA, 15 bp, Homo sapiens
catgaatccctttcc

SEQ ID NO: 1216459 - DNA, 15 bp, Homo sapiens
ccatgaatccctttc

SEQ ID NO: 1216460 - DNA, 15 bp, Homo sapiens
gccatgaatcccttt

SEQ ID NO: 1216461 - DNA, 15 bp, Homo sapiens
cgccatgaatccctt

SEQ ID NO: 1216462 - DNA, 15 bp, Homo sapiens
acgccatgaatccct

SEQ ID NO: 1216463 - DNA, 15 bp, Homo sapiens
gacgccatgaatccc

SEQ ID NO: 1216464 - DNA, 15 bp, Homo sapiens
cgacgccatgaatcc

SEQ ID NO: 1216465 - DNA, 15 bp, Homo sapiens
ccgacgccatgaatc

SEQ ID NO: 1216466 - DNA, 15 bp, Homo sapiens
tccgacgccatgaat

SEQ ID NO: 1216467 - DNA, 15 bp, Homo sapiens
ttccgacgccatgaa

SEQ ID NO: 1216468 - DNA, 15 bp, Homo sapiens
tttccgacgccatga

SEQ ID NO: 1216469 - DNA, 15 bp, Homo sapiens
atttccgacgccatg

SEQ ID NO: 1216470 - DNA, 15 bp, Homo sapiens
catttccgacgccat

SEQ ID NO: 1216471 - DNA, 15 bp, Homo sapiens
tcatttccgacgcca

SEQ ID NO: 1216472 - DNA, 15 bp, Homo sapiens
atcatttccgacgcc

SEQ ID NO: 1216473 - DNA, 15 bp, Homo sapiens
gatcatttccgacgc

SEQ ID NO: 1216474 - DNA, 15 bp, Homo sapiens
agatcatttccgacg

SEQ ID NO: 1216475 - DNA, 15 bp, Homo sapiens
cagatcatttccgac

SEQ ID NO: 1216476 - DNA, 15 bp, Homo sapiens
ccagatcatttccga

SEQ ID NO: 1216477 - DNA, 15 bp, Homo sapiens
gccagatcatttccg

SEQ ID NO: 1216478 - DNA, 15 bp, Homo sapiens
agccagatcatttcc

SEQ ID NO: 1216479 - DNA, 15 bp, Homo sapiens
cagccagatcatttc

SEQ ID NO: 1216480 - DNA, 15 bp, Homo sapiens
tcagccagatcattt

SEQ ID NO: 1216481 - DNA, 15 bp, Homo sapiens
ttcagccagatcatt

SEQ ID NO: 1216482 - DNA, 15 bp, Homo sapiens
attcagccagatcat

SEQ ID NO: 1216483 - DNA, 15 bp, Homo sapiens
gattcagccagatca

SEQ ID NO: 1216484 - DNA, 15 bp, Homo sapiens
ggattcagccagatc

SEQ ID NO: 1216485 - DNA, 15 bp, Homo sapiens
cggattcagccagat

SEQ ID NO: 1216486 - DNA, 15 bp, Homo sapiens
acggattcagccaga

SEQ ID NO: 1216487 - DNA, 15 bp, Homo sapiens
cacggattcagccag

SEQ ID NO: 1216488 - DNA, 15 bp, Homo sapiens
ccacggattcagcca

SEQ ID NO: 1216489 - DNA, 15 bp, Homo sapiens
accacggattcagcc

SEQ ID NO: 1216490 - DNA, 15 bp, Homo sapiens
caccacggattcagc

SEQ ID NO: 1216491 - DNA, 15 bp, Homo sapiens
ccaccacggattcag

SEQ ID NO: 1216492 - DNA, 15 bp, Homo sapiens
gccaccacggattca

SEQ ID NO: 1216493 - DNA, 15 bp, Homo sapiens
tgccaccacggattc

SEQ ID NO: 1216494 - DNA, 15 bp, Homo sapiens
gtgccaccacggatt

SEQ ID NO: 1216495 - DNA, 15 bp, Homo sapiens
ggtgccaccacggat

SEQ ID NO: 1216496 - DNA, 15 bp, Homo sapiens
cggtgccaccacgga

SEQ ID NO: 1216497 - DNA, 15 bp, Homo sapiens
tcggtgccaccacgg

SEQ ID NO: 1216498 - DNA, 15 bp, Homo sapiens
ctcggtgccaccacg

SEQ ID NO: 1216499 - DNA, 15 bp, Homo sapiens
tctcggtgccaccac

SEQ ID NO: 1216500 - DNA, 15 bp, Homo sapiens
gtctcggtgccacca

SEQ ID NO: 1216501 - DNA, 15 bp, Homo sapiens
ggtctcggtgccacc

SEQ ID NO: 1216502 - DNA, 15 bp, Homo sapiens
tggtctcggtgccac

SEQ ID NO: 1216503 - DNA, 15 bp, Homo sapiens
ttggtctcggtgcca

SEQ ID NO: 1216504 - DNA, 15 bp, Homo sapiens
tttggtctcggtgcc

SEQ ID NO: 1216505 - DNA, 15 bp, Homo sapiens
gtttggtctcggtgc

SEQ ID NO: 1216506 - DNA, 15 bp, Homo sapiens
agtttggtctcggtg

SEQ ID NO: 1216507 - DNA, 15 bp, Homo sapiens
gagtttggtctcggt

SEQ ID NO: 1216508 - DNA, 15 bp, Homo sapiens
tgagtttggtctcgg

SEQ ID NO: 1216509 - DNA, 15 bp, Homo sapiens
atgagtttggtctcg

SEQ ID NO: 1216510 - DNA, 15 bp, Homo sapiens
aatgagtttggtctc

SEQ ID NO: 1216511 - DNA, 15 bp, Homo sapiens
gaatgagtttggtct

SEQ ID NO: 1216512 - DNA, 15 bp, Homo sapiens
tgaatgagtttggtc

SEQ ID NO: 1216513 - DNA, 15 bp, Homo sapiens
gtgaatgagtttggt

SEQ ID NO: 1216514 - DNA, 15 bp, Homo sapiens
ggtgaatgagtttgg

SEQ ID NO: 1216515 - DNA, 15 bp, Homo sapiens
tggtgaatgagtttg

SEQ ID NO: 1216516 - DNA, 15 bp, Homo sapiens
ttggtgaatgagttt

SEQ ID NO: 1216517 - DNA, 15 bp, Homo sapiens
tttggtgaatgagtt

SEQ ID NO: 1216518 - DNA, 15 bp, Homo sapiens
atttggtgaatgagt

SEQ ID NO: 1216519 - DNA, 15 bp, Homo sapiens
catttggtgaatgag

SEQ ID NO: 1216520 - DNA, 15 bp, Homo sapiens
tcatttggtgaatga

SEQ ID NO: 1216521 - DNA, 15 bp, Homo sapiens
atcatttggtgaatg

SEQ ID NO: 1216522 - DNA, 15 bp, Homo sapiens
catcatttggtgaat

SEQ ID NO: 1216523 - DNA, 15 bp, Homo sapiens
gcatcatttggtgaa

SEQ ID NO: 1216524 - DNA, 15 bp, Homo sapiens
ggcatcatttggtga

SEQ ID NO: 1216525 - DNA, 15 bp, Homo sapiens
tggcatcatttggtg

SEQ ID NO: 1216526 - DNA, 15 bp, Homo sapiens
gtggcatcatttggt

SEQ ID NO: 1216527 - DNA, 15 bp, Homo sapiens
agtggcatcatttgg

SEQ ID NO: 1216528 - DNA, 15 bp, Homo sapiens
aagtggcatcatttg

SEQ ID NO: 1216529 - DNA, 15 bp, Homo sapiens
gaagtggcatcattt

SEQ ID NO: 1216530 - DNA, 15 bp, Homo sapiens
ggaagtggcatcatt

SEQ ID NO: 1216531 - DNA, 15 bp, Homo sapiens
gggaagtggcatcat

SEQ ID NO: 1216532 - DNA, 15 bp, Homo sapiens
tgggaagtggcatca

SEQ ID NO: 1216533 - DNA, 15 bp, Homo sapiens
ctgggaagtggcatc

SEQ ID NO: 1216534 - DNA, 15 bp, Homo sapiens
tctgggaagtggcat

SEQ ID NO: 1216535 - DNA, 15 bp, Homo sapiens
ctctgggaagtggca

SEQ ID NO: 1216536 - DNA, 15 bp, Homo sapiens
cctctgggaagtggc

SEQ ID NO: 1216537 - DNA, 15 bp, Homo sapiens
gcctctgggaagtgg

SEQ ID NO: 1216538 - DNA, 15 bp, Homo sapiens
tgcctctgggaagtg

SEQ ID NO: 1216539 - DNA, 15 bp, Homo sapiens
ctgcctctgggaagt

SEQ ID NO: 1216540 - DNA, 15 bp, Homo sapiens
tctgcctctgggaag

SEQ ID NO: 1216541 - DNA, 15 bp, Homo sapiens
ctctgcctctgggaa

SEQ ID NO: 1216542 - DNA, 15 bp, Homo sapiens
gctctgcctctggga

SEQ ID NO: 1216543 - DNA, 15 bp, Homo sapiens
ggctctgcctctggg

SEQ ID NO: 1216544 - DNA, 15 bp, Homo sapiens
aggctctgcctctgg

SEQ ID NO: 1216545 - DNA, 15 bp, Homo sapiens
caggctctgcctctg

SEQ ID NO: 1216546 - DNA, 15 bp, Homo sapiens
tcaggctctgcctct

SEQ ID NO: 1216547 - DNA, 15 bp, Homo sapiens
ctcaggctctgcctc

SEQ ID NO: 1216548 - DNA, 15 bp, Homo sapiens
actcaggctctgcct

SEQ ID NO: 1216549 - DNA, 15 bp, Homo sapiens
gactcaggctctgcc

SEQ ID NO: 1216550 - DNA, 15 bp, Homo sapiens
tgactcaggctctgc

SEQ ID NO: 1216551 - DNA, 15 bp, Homo sapiens
gtgactcaggctctg

SEQ ID NO: 1216552 - DNA, 15 bp, Homo sapiens
agtgactcaggctct

SEQ ID NO: 1216553 - DNA, 15 bp, Homo sapiens
cagtgactcaggctc

SEQ ID NO: 1216554 - DNA, 15 bp, Homo sapiens
ccagtgactcaggct

SEQ ID NO: 1216555 - DNA, 15 bp, Homo sapiens
accagtgactcaggc

SEQ ID NO: 1216556 - DNA, 15 bp, Homo sapiens
gaccagtgactcagg

SEQ ID NO: 1216557 - DNA, 15 bp, Homo sapiens
tgaccagtgactcag

SEQ ID NO: 1216558 - DNA, 15 bp, Homo sapiens
gtgaccagtgactca

SEQ ID NO: 1216559 - DNA, 15 bp, Homo sapiens
ggtgaccagtgactc

SEQ ID NO: 1216560 - DNA, 15 bp, Homo sapiens
gggtgaccagtgact

SEQ ID NO: 1216561 - DNA, 15 bp, Homo sapiens
agggtgaccagtgac

SEQ ID NO: 1216562 - DNA, 15 bp, Homo sapiens
aagggtgaccagtga

SEQ ID NO: 1216563 - DNA, 15 bp, Homo sapiens
taagggtgaccagtg

SEQ ID NO: 1216564 - DNA, 15 bp, Homo sapiens
ttaagggtgaccagt

SEQ ID NO: 1216565 - DNA, 15 bp, Homo sapiens
attaagggtgaccag

SEQ ID NO: 1216566 - DNA, 15 bp, Homo sapiens
tattaagggtgacca

SEQ ID NO: 1216567 - DNA, 15 bp, Homo sapiens
atattaagggtgacc

SEQ ID NO: 1216568 - DNA, 15 bp, Homo sapiens
aatattaagggtgac

SEQ ID NO: 1216569 - DNA, 15 bp, Homo sapiens
aaatattaagggtga

SEQ ID NO: 1216570 - DNA, 15 bp, Homo sapiens
taaatattaagggtg

SEQ ID NO: 1216571 - DNA, 15 bp, Homo sapiens
ataaatattaagggt

SEQ ID NO: 1216572 - DNA, 15 bp, Homo sapiens
aataaatattaaggg

SEQ ID NO: 1216573 - DNA, 15 bp, Homo sapiens
taataaatattaagg

SEQ ID NO: 1216574 - DNA, 15 bp, Homo sapiens
ttaataaatattaag

SEQ ID NO: 1216575 - DNA, 15 bp, Homo sapiens
cttaataaatattaa

SEQ ID NO: 1216576 - DNA, 15 bp, Homo sapiens
acttaataaatatta

SEQ ID NO: 1216577 - DNA, 15 bp, Homo sapiens
cacttaataaatatt

SEQ ID NO: 1216578 - DNA, 15 bp, Homo sapiens
gcacttaataaatat

SEQ ID NO: 1216579 - DNA, 15 bp, Homo sapiens
ggcacttaataaata

SEQ ID NO: 1216580 - DNA, 15 bp, Homo sapiens
aggcacttaataaat

SEQ ID NO: 1216581 - DNA, 15 bp, Homo sapiens
caggcacttaataaa

SEQ ID NO: 1216582 - DNA, 15 bp, Homo sapiens
tcaggcacttaataa

SEQ ID NO: 1216583 - DNA, 15 bp, Homo sapiens
ctcaggcacttaata

SEQ ID NO: 1216584 - DNA, 15 bp, Homo sapiens
tctcaggcacttaat

SEQ ID NO: 1216585 - DNA, 15 bp, Homo sapiens
gtctcaggcacttaa

SEQ ID NO: 1216586 - DNA, 15 bp, Homo sapiens
tgtctcaggcactta

SEQ ID NO: 1216587 - DNA, 15 bp, Homo sapiens
gtgtctcaggcactt

SEQ ID NO: 1216588 - DNA, 15 bp, Homo sapiens
ggtgtctcaggcact

SEQ ID NO: 1216589 - DNA, 15 bp, Homo sapiens
gggtgtctcaggcac

SEQ ID NO: 1216590 - DNA, 15 bp, Homo sapiens
cgggtgtctcaggca

SEQ ID NO: 1216591 - DNA, 15 bp, Homo sapiens
ccgggtgtctcaggc

SEQ ID NO: 1216592 - DNA, 15 bp, Homo sapiens
accgggtgtctcagg

SEQ ID NO: 1216593 - DNA, 15 bp, Homo sapiens
aaccgggtgtctcag

SEQ ID NO: 1216594 - DNA, 15 bp, Homo sapiens
taaccgggtgtctca

SEQ ID NO: 1216595 - DNA, 15 bp, Homo sapiens
gtaaccgggtgtctc

SEQ ID NO: 1216596 - DNA, 15 bp, Homo sapiens
ggtaaccgggtgtct

SEQ ID NO: 1216597 - DNA, 15 bp, Homo sapiens
aggtaaccgggtgtc

SEQ ID NO: 1216598 - DNA, 15 bp, Homo sapiens
aaggtaaccgggtgt

SEQ ID NO: 1216599 - DNA, 15 bp, Homo sapiens
caaggtaaccgggtg

SEQ ID NO: 1216600 - DNA, 15 bp, Homo sapiens
ccaaggtaaccgggt

SEQ ID NO: 1216601 - DNA, 15 bp, Homo sapiens
gccaaggtaaccggg

SEQ ID NO: 1216602 - DNA, 15 bp, Homo sapiens
ggccaaggtaaccgg

SEQ ID NO: 1216603 - DNA, 15 bp, Homo sapiens
cggccaaggtaaccg

SEQ ID NO: 1216604 - DNA, 15 bp, Homo sapiens
acggccaaggtaacc

SEQ ID NO: 1216605 - DNA, 15 bp, Homo sapiens
cacggccaaggtaac

SEQ ID NO: 1216606 - DNA, 15 bp, Homo sapiens
tcacggccaaggtaa

SEQ ID NO: 1216607 - DNA, 15 bp, Homo sapiens
ctcacggccaaggta

SEQ ID NO: 1216608 - DNA, 15 bp, Homo sapiens
cctcacggccaaggt

SEQ ID NO: 1216609 - DNA, 15 bp, Homo sapiens
tcctcacggccaagg

SEQ ID NO: 1216610 - DNA, 15 bp, Homo sapiens
gtcctcacggccaag

SEQ ID NO: 1216611 - DNA, 15 bp, Homo sapiens
tgtcctcacggccaa

SEQ ID NO: 1216612 - DNA, 15 bp, Homo sapiens
gtgtcctcacggcca

SEQ ID NO: 1216613 - DNA, 15 bp, Homo sapiens
cgtgtcctcacggcc

SEQ ID NO: 1216614 - DNA, 15 bp, Homo sapiens
acgtgtcctcacggc

SEQ ID NO: 1216615 - DNA, 15 bp, Homo sapiens
cacgtgtcctcacgg

SEQ ID NO: 1216616 - DNA, 15 bp, Homo sapiens
ccacgtgtcctcacg

SEQ ID NO: 1216617 - DNA, 15 bp, Homo sapiens
gccacgtgtcctcac

SEQ ID NO: 1216618 - DNA, 15 bp, Homo sapiens
ggccacgtgtcctca

SEQ ID NO: 1216619 - DNA, 15 bp, Homo sapiens
aggccacgtgtcctc

SEQ ID NO: 1216620 - DNA, 15 bp, Homo sapiens
caggccacgtgtcct

SEQ ID NO: 1216621 - DNA, 15 bp, Homo sapiens
gcaggccacgtgtcc

SEQ ID NO: 1216622 - DNA, 15 bp, Homo sapiens
tgcaggccacgtgtc

SEQ ID NO: 1216623 - DNA, 15 bp, Homo sapiens
gtgcaggccacgtgt

SEQ ID NO: 1216624 - DNA, 15 bp, Homo sapiens
ggtgcaggccacgtg

SEQ ID NO: 1216625 - DNA, 15 bp, Homo sapiens
gggtgcaggccacgt

SEQ ID NO: 1216626 - DNA, 15 bp, Homo sapiens
tgggtgcaggccacg

SEQ ID NO: 1216627 - DNA, 15 bp, Homo sapiens
ctgggtgcaggccac

SEQ ID NO: 1216628 - DNA, 15 bp, Homo sapiens
cctgggtgcaggcca

SEQ ID NO: 1216629 - DNA, 15 bp, Homo sapiens
acctgggtgcaggcc

SEQ ID NO: 1216630 - DNA, 15 bp, Homo sapiens
cacctgggtgcaggc

SEQ ID NO: 1216631 - DNA, 15 bp, Homo sapiens
acacctgggtgcagg

SEQ ID NO: 1216632 - DNA, 15 bp, Homo sapiens
cacacctgggtgcag

SEQ ID NO: 1216633 - DNA, 15 bp, Homo sapiens
ccacacctgggtgca

SEQ ID NO: 1216634 - DNA, 15 bp, Homo sapiens
gccacacctgggtgc

SEQ ID NO: 1216635 - DNA, 15 bp, Homo sapiens
agccacacctgggtg

SEQ ID NO: 1216636 - DNA, 15 bp, Homo sapiens
cagccacacctgggt

SEQ ID NO: 1216637 - DNA, 15 bp, Homo sapiens
acagccacacctggg

SEQ ID NO: 1216638 - DNA, 15 bp, Homo sapiens
gacagccacacctgg

SEQ ID NO: 1216639 - DNA, 15 bp, Homo sapiens
tgacagccacacctg

SEQ ID NO: 1216640 - DNA, 15 bp, Homo sapiens
ctgacagccacacct

SEQ ID NO: 1216641 - DNA, 15 bp, Homo sapiens
cctgacagccacacc

SEQ ID NO: 1216642 - DNA, 15 bp, Homo sapiens
tcctgacagccacac

SEQ ID NO: 1216643 - DNA, 15 bp, Homo sapiens
gtcctgacagccaca

SEQ ID NO: 1216644 - DNA, 15 bp, Homo sapiens
tgtcctgacagccac

SEQ ID NO: 1216645 - DNA, 15 bp, Homo sapiens
gtgtcctgacagcca

SEQ ID NO: 1216646 - DNA, 15 bp, Homo sapiens
ggtgtcctgacagcc

SEQ ID NO: 1216647 - DNA, 15 bp, Homo sapiens
tggtgtcctgacagc

SEQ ID NO: 1216648 - DNA, 15 bp, Homo sapiens
ctggtgtcctgacag

SEQ ID NO: 1216649 - DNA, 15 bp, Homo sapiens
gctggtgtcctgaca

SEQ ID NO: 1216650 - DNA, 15 bp, Homo sapiens
ggctggtgtcctgac

SEQ ID NO: 1216651 - DNA, 15 bp, Homo sapiens
aggctggtgtcctga

SEQ ID NO: 1216652 - DNA, 15 bp, Homo sapiens
caggctggtgtcctg

SEQ ID NO: 1216653 - DNA, 15 bp, Homo sapiens
ccaggctggtgtcct

SEQ ID NO: 1216654 - DNA, 15 bp, Homo sapiens
accaggctggtgtcc

SEQ ID NO: 1216655 - DNA, 15 bp, Homo sapiens
caccaggctggtgtc

SEQ ID NO: 1216656 - DNA, 15 bp, Homo sapiens
gcaccaggctggtgt

SEQ ID NO: 1216657 - DNA, 15 bp, Homo sapiens
ggcaccaggctggtg

SEQ ID NO: 1216658 - DNA, 15 bp, Homo sapiens
gggcaccaggctggt

SEQ ID NO: 1216659 - DNA, 15 bp, Homo sapiens
tgggcaccaggctgg

SEQ ID NO: 1216660 - DNA, 15 bp, Homo sapiens
atgggcaccaggctg

SEQ ID NO: 1216661 - DNA, 15 bp, Homo sapiens
gatgggcaccaggct

SEQ ID NO: 1216662 - DNA, 15 bp, Homo sapiens
ggatgggcaccaggc

SEQ ID NO: 1216663 - DNA, 15 bp, Homo sapiens
aggatgggcaccagg

SEQ ID NO: 1216664 - DNA, 15 bp, Homo sapiens
gaggatgggcaccag

SEQ ID NO: 1216665 - DNA, 15 bp, Homo sapiens
ggaggatgggcacca

SEQ ID NO: 1216666 - DNA, 15 bp, Homo sapiens
gggaggatgggcacc

SEQ ID NO: 1216667 - DNA, 15 bp, Homo sapiens
cgggaggatgggcac

SEQ ID NO: 1216668 - DNA, 15 bp, Homo sapiens
tcgggaggatgggca

SEQ ID NO: 1216669 - DNA, 15 bp, Homo sapiens
gtcgggaggatgggc

SEQ ID NO: 1216670 - DNA, 15 bp, Homo sapiens
ggtcgggaggatggg

SEQ ID NO: 1216671 - DNA, 15 bp, Homo sapiens
gggtcgggaggatgg

SEQ ID NO: 1216672 - DNA, 15 bp, Homo sapiens
ggggtcgggaggatg

SEQ ID NO: 1216673 - DNA, 15 bp, Homo sapiens
aggggtcgggaggat

SEQ ID NO: 1216674 - DNA, 15 bp, Homo sapiens
taggggtcgggagga

SEQ ID NO: 1216675 - DNA, 15 bp, Homo sapiens
gtaggggtcgggagg

SEQ ID NO: 1216676 - DNA, 15 bp, Homo sapiens
ggtaggggtcgggag

SEQ ID NO: 1216677 - DNA, 15 bp, Homo sapiens
gggtaggggtcggga

SEQ ID NO: 1216678 - DNA, 15 bp, Homo sapiens
tgggtaggggtcggg

SEQ ID NO: 1216679 - DNA, 15 bp, Homo sapiens
gtgggtaggggtcgg

SEQ ID NO: 1216680 - DNA, 15 bp, Homo sapiens
agtgggtaggggtcg

SEQ ID NO: 1216681 - DNA, 15 bp, Homo sapiens
aagtgggtaggggtc

SEQ ID NO: 1216682 - DNA, 15 bp, Homo sapiens
gaagtgggtaggggt

SEQ ID NO: 1216683 - DNA, 15 bp, Homo sapiens
ggaagtgggtagggg

SEQ ID NO: 1216684 - DNA, 15 bp, Homo sapiens
tggaagtgggtaggg

SEQ ID NO: 1216685 - DNA, 15 bp, Homo sapiens
atggaagtgggtagg

SEQ ID NO: 1216686 - DNA, 15 bp, Homo sapiens
aatggaagtgggtag

SEQ ID NO: 1216687 - DNA, 15 bp, Homo sapiens
gaatggaagtgggta

SEQ ID NO: 1216688 - DNA, 15 bp, Homo sapiens
ggaatggaagtgggt

SEQ ID NO: 1216689 - DNA, 15 bp, Homo sapiens
gggaatggaagtggg

SEQ ID NO: 1216690 - DNA, 15 bp, Homo sapiens
cgggaatggaagtgg

SEQ ID NO: 1216691 - DNA, 15 bp, Homo sapiens
acgggaatggaagtg

SEQ ID NO: 1216692 - DNA, 15 bp, Homo sapiens
cacgggaatggaagt

SEQ ID NO: 1216693 - DNA, 15 bp, Homo sapiens
ccacgggaatggaag

SEQ ID NO: 1216694 - DNA, 15 bp, Homo sapiens
accacgggaatggaa

SEQ ID NO: 1216695 - DNA, 15 bp, Homo sapiens
gaccacgggaatgga

SEQ ID NO: 1216696 - DNA, 15 bp, Homo sapiens
agaccacgggaatgg

SEQ ID NO: 1216697 - DNA, 15 bp, Homo sapiens
gagaccacgggaatg

SEQ ID NO: 1216698 - DNA, 15 bp, Homo sapiens
ggagaccacgggaat

SEQ ID NO: 1216699 - DNA, 15 bp, Homo sapiens
aggagaccacgggaa

SEQ ID NO: 1216700 - DNA, 15 bp, Homo sapiens
aaggagaccacggga

SEQ ID NO: 1216701 - DNA, 15 bp, Homo sapiens
caaggagaccacggg

SEQ ID NO: 1216702 - DNA, 15 bp, Homo sapiens
gcaaggagaccacgg

SEQ ID NO: 1216703 - DNA, 15 bp, Homo sapiens
tgcaaggagaccacg

SEQ ID NO: 1216704 - DNA, 15 bp, Homo sapiens
gtgcaaggagaccac

SEQ ID NO: 1216705 - DNA, 15 bp, Homo sapiens
agtgcaaggagacca

SEQ ID NO: 1216706 - DNA, 15 bp, Homo sapiens
aagtgcaaggagacc

SEQ ID NO: 1216707 - DNA, 15 bp, Homo sapiens
aaagtgcaaggagac

SEQ ID NO: 1216708 - DNA, 15 bp, Homo sapiens
gaaagtgcaaggaga

SEQ ID NO: 1216709 - DNA, 15 bp, Homo sapiens
agaaagtgcaaggag

SEQ ID NO: 1216710 - DNA, 15 bp, Homo sapiens
gagaaagtgcaagga

SEQ ID NO: 1216711 - DNA, 15 bp, Homo sapiens
tgagaaagtgcaagg

SEQ ID NO: 1216712 - DNA, 15 bp, Homo sapiens
ctgagaaagtgcaag

SEQ ID NO: 1216713 - DNA, 15 bp, Homo sapiens
actgagaaagtgcaa

SEQ ID NO: 1216714 - DNA, 15 bp, Homo sapiens
aactgagaaagtgca

SEQ ID NO: 1216715 - DNA, 15 bp, Homo sapiens
gaactgagaaagtgc

SEQ ID NO: 1216716 - DNA, 15 bp, Homo sapiens
tgaactgagaaagtg

SEQ ID NO: 1216717 - DNA, 15 bp, Homo sapiens
ctgaactgagaaagt

SEQ ID NO: 1216718 - DNA, 15 bp, Homo sapiens
tctgaactgagaaag

SEQ ID NO: 1216719 - DNA, 15 bp, Homo sapiens
ctctgaactgagaaa

SEQ ID NO: 1216720 - DNA, 15 bp, Homo sapiens
actctgaactgagaa

SEQ ID NO: 1216721 - DNA, 15 bp, Homo sapiens
aactctgaactgaga

SEQ ID NO: 1216722 - DNA, 15 bp, Homo sapiens
caactctgaactgag

SEQ ID NO: 1216723 - DNA, 15 bp, Homo sapiens
acaactctgaactga

SEQ ID NO: 1216724 - DNA, 15 bp, Homo sapiens
tacaactctgaactg

SEQ ID NO: 1216725 - DNA, 15 bp, Homo sapiens
gtacaactctgaact

SEQ ID NO: 1216726 - DNA, 15 bp, Homo sapiens
tgtacaactctgaac

SEQ ID NO: 1216727 - DNA, 15 bp, Homo sapiens
gtgtacaactctgaa

SEQ ID NO: 1216728 - DNA, 15 bp, Homo sapiens
agtgtacaactctga

SEQ ID NO: 1216729 - DNA, 15 bp, Homo sapiens
cagtgtacaactctg

SEQ ID NO: 1216730 - DNA, 15 bp, Homo sapiens
acagtgtacaactct

SEQ ID NO: 1216731 - DNA, 15 bp, Homo sapiens
cacagtgtacaactc

SEQ ID NO: 1216732 - DNA, 15 bp, Homo sapiens
acacagtgtacaact

SEQ ID NO: 1216733 - DNA, 15 bp, Homo sapiens
tacacagtgtacaac

SEQ ID NO: 1216734 - DNA, 15 bp, Homo sapiens
gtacacagtgtacaa

SEQ ID NO: 1216735 - DNA, 15 bp, Homo sapiens
tgtacacagtgtaca

SEQ ID NO: 1216736 - DNA, 15 bp, Homo sapiens
atgtacacagtgtac

SEQ ID NO: 1216737 - DNA, 15 bp, Homo sapiens
aatgtacacagtgta

SEQ ID NO: 1216738 - DNA, 15 bp, Homo sapiens
aaatgtacacagtgt

SEQ ID NO: 1216739 - DNA, 15 bp, Homo sapiens
caaatgtacacagtg

SEQ ID NO: 1216740 - DNA, 15 bp, Homo sapiens
ccaaatgtacacagt

SEQ ID NO: 1216741 - DNA, 15 bp, Homo sapiens
gccaaatgtacacag

SEQ ID NO: 1216742 - DNA, 15 bp, Homo sapiens
tgccaaatgtacaca

SEQ ID NO: 1216743 - DNA, 15 bp, Homo sapiens
atgccaaatgtacac

SEQ ID NO: 1216744 - DNA, 15 bp, Homo sapiens
aatgccaaatgtaca

SEQ ID NO: 1216745 - DNA, 15 bp, Homo sapiens
aaatgccaaatgtac

SEQ ID NO: 1216746 - DNA, 15 bp, Homo sapiens
caaatgccaaatgta

SEQ ID NO: 1216747 - DNA, 15 bp, Homo sapiens
acaaatgccaaatgt

SEQ ID NO: 1216748 - DNA, 15 bp, Homo sapiens
cacaaatgccaaatg

SEQ ID NO: 1216749 - DNA, 15 bp, Homo sapiens
acacaaatgccaaat

SEQ ID NO: 1216750 - DNA, 15 bp, Homo sapiens
aacacaaatgccaaa

SEQ ID NO: 1216751 - DNA, 15 bp, Homo sapiens
taacacaaatgccaa

SEQ ID NO: 1216752 - DNA, 15 bp, Homo sapiens
ataacacaaatgcca

SEQ ID NO: 1216753 - DNA, 15 bp, Homo sapiens
aataacacaaatgcc

SEQ ID NO: 1216754 - DNA, 15 bp, Homo sapiens
taataacacaaatgc

SEQ ID NO: 1216755 - DNA, 15 bp, Homo sapiens
ataataacacaaatg

SEQ ID NO: 1216756 - DNA, 15 bp, Homo sapiens
aataataacacaaat

SEQ ID NO: 1216757 - DNA, 15 bp, Homo sapiens
aaataataacacaaa

SEQ ID NO: 1216758 - DNA, 15 bp, Homo sapiens
aaaataataacacaa

SEQ ID NO: 1216759 - DNA, 15 bp, Homo sapiens
caaaataataacaca

SEQ ID NO: 1216760 - DNA, 15 bp, Homo sapiens
gcaaaataataacac

SEQ ID NO: 1216761 - DNA, 15 bp, Homo sapiens
tgcaaaataataaca

SEQ ID NO: 1216762 - DNA, 15 bp, Homo sapiens
gtgcaaaataataac

SEQ ID NO: 1216763 - DNA, 15 bp, Homo sapiens
agtgcaaaataataa

SEQ ID NO: 1216764 - DNA, 15 bp, Homo sapiens
cagtgcaaaataata

SEQ ID NO: 1216765 - DNA, 15 bp, Homo sapiens
acagtgcaaaataat

SEQ ID NO: 1216766 - DNA, 15 bp, Homo sapiens
aacagtgcaaaataa

SEQ ID NO: 1216767 - DNA, 15 bp, Homo sapiens
aaacagtgcaaaata

SEQ ID NO: 1216768 - DNA, 15 bp, Homo sapiens
aaaacagtgcaaaat

SEQ ID NO: 1216769 - DNA, 15 bp, Homo sapiens
gaaaacagtgcaaaa

SEQ ID NO: 1216770 - DNA, 15 bp, Homo sapiens
agaaaacagtgcaaa

SEQ ID NO: 1216771 - DNA, 15 bp, Homo sapiens
cagaaaacagtgcaa

SEQ ID NO: 1216772 - DNA, 15 bp, Homo sapiens
acagaaaacagtgca

SEQ ID NO: 1216773 - DNA, 15 bp, Homo sapiens
gacagaaaacagtgc

SEQ ID NO: 1216774 - DNA, 15 bp, Homo sapiens
cgacagaaaacagtg

SEQ ID NO: 1216775 - DNA, 15 bp, Homo sapiens
acgacagaaaacagt

SEQ ID NO: 1216776 - DNA, 15 bp, Homo sapiens
cacgacagaaaacag

SEQ ID NO: 1216777 - DNA, 15 bp, Homo sapiens
acacgacagaaaaca

SEQ ID NO: 1216778 - DNA, 15 bp, Homo sapiens
cacacgacagaaaac

SEQ ID NO: 1216779 - DNA, 15 bp, Homo sapiens
acacacgacagaaaa

SEQ ID NO: 1216780 - DNA, 15 bp, Homo sapiens
cacacacgacagaaa

SEQ ID NO: 1216781 - DNA, 15 bp, Homo sapiens
acacacacgacagaa

SEQ ID NO: 1216782 - DNA, 15 bp, Homo sapiens
aacacacacgacaga

SEQ ID NO: 1216783 - DNA, 15 bp, Homo sapiens
caacacacacgacag

SEQ ID NO: 1216784 - DNA, 15 bp, Homo sapiens
ccaacacacacgaca

SEQ ID NO: 1216785 - DNA, 15 bp, Homo sapiens
cccaacacacacgac

SEQ ID NO: 1216786 - DNA, 15 bp, Homo sapiens
tcccaacacacacga

SEQ ID NO: 1216787 - DNA, 15 bp, Homo sapiens
atcccaacacacacg

SEQ ID NO: 1216788 - DNA, 15 bp, Homo sapiens
catcccaacacacac

SEQ ID NO: 1216789 - DNA, 15 bp, Homo sapiens
ccatcccaacacaca

SEQ ID NO: 1216790 - DNA, 15 bp, Homo sapiens
cccatcccaacacac

SEQ ID NO: 1216791 - DNA, 15 bp, Homo sapiens
tcccatcccaacaca

SEQ ID NO: 1216792 - DNA, 15 bp, Homo sapiens
atcccatcccaacac

SEQ ID NO: 1216793 - DNA, 15 bp, Homo sapiens
gatcccatcccaaca

SEQ ID NO: 1216794 - DNA, 15 bp, Homo sapiens
ggatcccatcccaac

SEQ ID NO: 1216795 - DNA, 15 bp, Homo sapiens
gggatcccatcccaa

SEQ ID NO: 1216796 - DNA, 15 bp, Homo sapiens
tgggatcccatccca

SEQ ID NO: 1216797 - DNA, 15 bp, Homo sapiens
ctgggatcccatccc

SEQ ID NO: 1216798 - DNA, 15 bp, Homo sapiens
cctgggatcccatcc

SEQ ID NO: 1216799 - DNA, 15 bp, Homo sapiens
gcctgggatcccatc

SEQ ID NO: 1216800 - DNA, 15 bp, Homo sapiens
ggcctgggatcccat

SEQ ID NO: 1216801 - DNA, 15 bp, Homo sapiens
tggcctgggatccca

SEQ ID NO: 1216802 - DNA, 15 bp, Homo sapiens
ctggcctgggatccc

SEQ ID NO: 1216803 - DNA, 15 bp, Homo sapiens
cctggcctgggatcc

SEQ ID NO: 1216804 - DNA, 15 bp, Homo sapiens
ccctggcctgggatc

SEQ ID NO: 1216805 - DNA, 15 bp, Homo sapiens
tccctggcctgggat

SEQ ID NO: 1216806 - DNA, 15 bp, Homo sapiens
ttccctggcctggga

SEQ ID NO: 1216807 - DNA, 15 bp, Homo sapiens
ctttccctggcctgg

SEQ ID NO: 1216808 - DNA, 15 bp, Homo sapiens
gctttccctggcctg

SEQ ID NO: 1216809 - DNA, 15 bp, Homo sapiens
gggctttccctggcc

SEQ ID NO: 1216810 - DNA, 15 bp, Homo sapiens
cgggctttccctggc

SEQ ID NO: 1216811 - DNA, 15 bp, Homo sapiens
acgggctttccctgg

SEQ ID NO: 1216812 - DNA, 15 bp, Homo sapiens
cacgggctttccctg

SEQ ID NO: 1216813 - DNA, 15 bp, Homo sapiens
acacgggctttccct

SEQ ID NO: 1216814 - DNA, 15 bp, Homo sapiens
gacacgggctttccc

SEQ ID NO: 1216815 - DNA, 15 bp, Homo sapiens
tgacacgggctttcc

SEQ ID NO: 1216816 - DNA, 15 bp, Homo sapiens
ttgacacgggctttc

SEQ ID NO: 1216817 - DNA, 15 bp, Homo sapiens
attgacacgggcttt

SEQ ID NO: 1216818 - DNA, 15 bp, Homo sapiens
cattgacacgggctt

SEQ ID NO: 1216819 - DNA, 15 bp, Homo sapiens
tcattgacacgggct

SEQ ID NO: 1216820 - DNA, 15 bp, Homo sapiens
ttcattgacacgggc

SEQ ID NO: 1216821 - DNA, 15 bp, Homo sapiens
attcattgacacggg

SEQ ID NO: 1216822 - DNA, 15 bp, Homo sapiens
cattcattgacacgg

SEQ ID NO: 1216823 - DNA, 15 bp, Homo sapiens
gcattcattgacacg

SEQ ID NO: 1216824 - DNA, 15 bp, Homo sapiens
ggcattcattgacac

SEQ ID NO: 1216825 - DNA, 15 bp, Homo sapiens
cggcattcattgaca

SEQ ID NO: 1216826 - DNA, 15 bp, Homo sapiens
ccggcattcattgac

SEQ ID NO: 1216827 - DNA, 15 bp, Homo sapiens
cccggcattcattga

SEQ ID NO: 1216828 - DNA, 15 bp, Homo sapiens
ccccggcattcattg

SEQ ID NO: 1216829 - DNA, 15 bp, Homo sapiens
tccccggcattcatt

SEQ ID NO: 1216830 - DNA, 15 bp, Homo sapiens
gtccccggcattcat

SEQ ID NO: 1216831 - DNA, 15 bp, Homo sapiens
tgtccccggcattca

SEQ ID NO: 1216832 - DNA, 15 bp, Homo sapiens
ctgtccccggcattc

SEQ ID NO: 1216833 - DNA, 15 bp, Homo sapiens
tctgtccccggcatt

SEQ ID NO: 1216834 - DNA, 15 bp, Homo sapiens
ctctgtccccggcat

SEQ ID NO: 1216835 - DNA, 15 bp, Homo sapiens
tctctgtccccggca

SEQ ID NO: 1216836 - DNA, 15 bp, Homo sapiens
ctctctgtccccggc

SEQ ID NO: 1216837 - DNA, 15 bp, Homo sapiens
cctctctgtccccgg

SEQ ID NO: 1216838 - DNA, 15 bp, Homo sapiens
ccctctctgtccccg

SEQ ID NO: 1216839 - DNA, 15 bp, Homo sapiens
cccctctctgtcccc

SEQ ID NO: 1216840 - DNA, 15 bp, Homo sapiens
gcccctctctgtccc

SEQ ID NO: 1216841 - DNA, 15 bp, Homo sapiens
tgcccctctctgtcc

SEQ ID NO: 1216842 - DNA, 15 bp, Homo sapiens
ctgcccctctctgtc

SEQ ID NO: 1216843 - DNA, 15 bp, Homo sapiens
cctgcccctctctgt

SEQ ID NO: 1216844 - DNA, 15 bp, Homo sapiens
acctgcccctctctg

SEQ ID NO: 1216845 - DNA, 15 bp, Homo sapiens
aacctgcccctctct

SEQ ID NO: 1216846 - DNA, 15 bp, Homo sapiens
caacctgcccctctc

SEQ ID NO: 1216847 - DNA, 15 bp, Homo sapiens
tcaacctgcccctct

SEQ ID NO: 1216848 - DNA, 15 bp, Homo sapiens
gtcaacctgcccctc

SEQ ID NO: 1216849 - DNA, 15 bp, Homo sapiens
ggtcaacctgcccct

SEQ ID NO: 1216850 - DNA, 15 bp, Homo sapiens
cggtcaacctgcccc

SEQ ID NO: 1216851 - DNA, 15 bp, Homo sapiens
ccggtcaacctgccc

SEQ ID NO: 1216852 - DNA, 15 bp, Homo sapiens
cccggtcaacctgcc

SEQ ID NO: 1216853 - DNA, 15 bp, Homo sapiens
tcccggtcaacctgc

SEQ ID NO: 1216854 - DNA, 15 bp, Homo sapiens
gtcccggtcaacctg

SEQ ID NO: 1216855 - DNA, 15 bp, Homo sapiens
agtcccggtcaacct

SEQ ID NO: 1216856 - DNA, 15 bp, Homo sapiens
aagtcccggtcaacc

SEQ ID NO: 1216857 - DNA, 15 bp, Homo sapiens
gaagtcccggtcaac

SEQ ID NO: 1216858 - DNA, 15 bp, Homo sapiens
tgaagtcccggtcaa

SEQ ID NO: 1216859 - DNA, 15 bp, Homo sapiens
ttgaagtcccggtca

SEQ ID NO: 1216860 - DNA, 15 bp, Homo sapiens
tttgaagtcccggtc

SEQ ID NO: 1216861 - DNA, 15 bp, Homo sapiens
ctttgaagtcccggt

SEQ ID NO: 1216862 - DNA, 15 bp, Homo sapiens
gctttgaagtcccgg

SEQ ID NO: 1216863 - DNA, 15 bp, Homo sapiens
ggctttgaagtcccg

SEQ ID NO: 1216864 - DNA, 15 bp, Homo sapiens
cggctttgaagtccc

SEQ ID NO: 1216865 - DNA, 15 bp, Homo sapiens
acggctttgaagtcc

SEQ ID NO: 1216866 - DNA, 15 bp, Homo sapiens
cacggctttgaagtc

SEQ ID NO: 1216867 - DNA, 15 bp, Homo sapiens
tcacggctttgaagt

SEQ ID NO: 1216868 - DNA, 15 bp, Homo sapiens
atcacggctttgaag

SEQ ID NO: 1216869 - DNA, 15 bp, Homo sapiens
gatcacggctttgaa

SEQ ID NO: 1216870 - DNA, 15 bp, Homo sapiens
cgatcacggctttga

SEQ ID NO: 1216871 - DNA, 15 bp, Homo sapiens
acgatcacggctttg

SEQ ID NO: 1216872 - DNA, 15 bp, Homo sapiens
cacgatcacggcttt

SEQ ID NO: 1216873 - DNA, 15 bp, Homo sapiens
tcacgatcacggctt

SEQ ID NO: 1216874 - DNA, 15 bp, Homo sapiens
ttcacgatcacggct

SEQ ID NO: 1216875 - DNA, 15 bp, Homo sapiens
attcacgatcacggc

SEQ ID NO: 1216876 - DNA, 15 bp, Homo sapiens
tattcacgatcacgg

SEQ ID NO: 1216877 - DNA, 15 bp, Homo sapiens
atattcacgatcacg

SEQ ID NO: 1216878 - DNA, 15 bp, Homo sapiens
gatattcacgatcac

SEQ ID NO: 1216879 - DNA, 15 bp, Homo sapiens
cgatattcacgatca

SEQ ID NO: 1216880 - DNA, 15 bp, Homo sapiens
tcgatattcacgatc

SEQ ID NO: 1216881 - DNA, 15 bp, Homo sapiens
ctcgatattcacgat

SEQ ID NO: 1216882 - DNA, 15 bp, Homo sapiens
tctcgatattcacga

SEQ ID NO: 1216883 - DNA, 15 bp, Homo sapiens
ttctcgatattcacg

SEQ ID NO: 1216884 - DNA, 15 bp, Homo sapiens
gttctcgatattcac

SEQ ID NO: 1216885 - DNA, 15 bp, Homo sapiens
agttctcgatattca

SEQ ID NO: 1216886 - DNA, 15 bp, Homo sapiens
cagttctcgatattc

SEQ ID NO: 1216887 - DNA, 15 bp, Homo sapiens
gcagttctcgatatt

SEQ ID NO: 1216888 - DNA, 15 bp, Homo sapiens
ggcagttctcgatat

SEQ ID NO: 1216889 - DNA, 15 bp, Homo sapiens
tggcagttctcgata

SEQ ID NO: 1216890 - DNA, 15 bp, Homo sapiens
atggcagttctcgat

SEQ ID NO: 1216891 - DNA, 15 bp, Homo sapiens
aatggcagttctcga

SEQ ID NO: 1216892 - DNA, 15 bp, Homo sapiens
caatggcagttctcg

SEQ ID NO: 1216893 - DNA, 15 bp, Homo sapiens
acaatggcagttctc

SEQ ID NO: 1216894 - DNA, 15 bp, Homo sapiens
gacaatggcagttct

SEQ ID NO: 1216895 - DNA, 15 bp, Homo sapiens
cgacaatggcagttc

SEQ ID NO: 1216896 - DNA, 15 bp, Homo sapiens
acgacaatggcagtt

SEQ ID NO: 1216897 - DNA, 15 bp, Homo sapiens
gacgacaatggcagt

SEQ ID NO: 1216898 - DNA, 15 bp, Homo sapiens
agacgacaatggcag

SEQ ID NO: 1216899 - DNA, 15 bp, Homo sapiens
aagacgacaatggca

SEQ ID NO: 1216900 - DNA, 15 bp, Homo sapiens
aaagacgacaatggc

SEQ ID NO: 1216901 - DNA, 15 bp, Homo sapiens
taaagacgacaatgg

SEQ ID NO: 1216902 - DNA, 15 bp, Homo sapiens
ataaagacgacaatg

SEQ ID NO: 1216903 - DNA, 15 bp, Homo sapiens
cataaagacgacaat

SEQ ID NO: 1216904 - DNA, 15 bp, Homo sapiens
acataaagacgacaa

SEQ ID NO: 1216905 - DNA, 15 bp, Homo sapiens
gacataaagacgaca

SEQ ID NO: 1216906 - DNA, 15 bp, Homo sapiens
ggacataaagacgac

SEQ ID NO: 1216907 - DNA, 15 bp, Homo sapiens
cggacataaagacga

SEQ ID NO: 1216908 - DNA, 15 bp, Homo sapiens
gcggacataaagacg

SEQ ID NO: 1216909 - DNA, 15 bp, Homo sapiens
ggcggacataaagac

SEQ ID NO: 1216910 - DNA, 15 bp, Homo sapiens
gggcggacataaaga

SEQ ID NO: 1216911 - DNA, 15 bp, Homo sapiens
tgggcggacataaag

SEQ ID NO: 1216912 - DNA, 15 bp, Homo sapiens
gtgggcggacataaa

SEQ ID NO: 1216913 - DNA, 15 bp, Homo sapiens
ggtgggcggacataa

SEQ ID NO: 1216914 - DNA, 15 bp, Homo sapiens
aggtgggcggacata

SEQ ID NO: 1216915 - DNA, 15 bp, Homo sapiens
taggtgggcggacat

SEQ ID NO: 1216916 - DNA, 15 bp, Homo sapiens
ctaggtgggcggaca

SEQ ID NO: 1216917 - DNA, 15 bp, Homo sapiens
actaggtgggcggac

SEQ ID NO: 1216918 - DNA, 15 bp, Homo sapiens
cactaggtgggcgga

SEQ ID NO: 1216919 - DNA, 15 bp, Homo sapiens
gcactaggtgggcgg

SEQ ID NO: 1216920 - DNA, 15 bp, Homo sapiens
agcactaggtgggcg

SEQ ID NO: 1216921 - DNA, 15 bp, Homo sapiens
aagcactaggtgggc

SEQ ID NO: 1216922 - DNA, 15 bp, Homo sapiens
gaagcactaggtggg

SEQ ID NO: 1216923 - DNA, 15 bp, Homo sapiens
ggaagcactaggtgg

SEQ ID NO: 1216924 - DNA, 15 bp, Homo sapiens
tggaagcactaggtg

SEQ ID NO: 1216925 - DNA, 15 bp, Homo sapiens
gtggaagcactaggt

SEQ ID NO: 1216926 - DNA, 15 bp, Homo sapiens
agtggaagcactagg

SEQ ID NO: 1216927 - DNA, 15 bp, Homo sapiens
aagtggaagcactag

SEQ ID NO: 1216928 - DNA, 15 bp, Homo sapiens
gaagtggaagcacta

SEQ ID NO: 1216929 - DNA, 15 bp, Homo sapiens
agaagtggaagcact

SEQ ID NO: 1216930 - DNA, 15 bp, Homo sapiens
tagaagtggaagcac

SEQ ID NO: 1216931 - DNA, 15 bp, Homo sapiens
atagaagtggaagca

SEQ ID NO: 1216932 - DNA, 15 bp, Homo sapiens
catagaagtggaagc

SEQ ID NO: 1216933 - DNA, 15 bp, Homo sapiens
gcatagaagtggaag

SEQ ID NO: 1216934 - DNA, 15 bp, Homo sapiens
tgcatagaagtggaa

SEQ ID NO: 1216935 - DNA, 15 bp, Homo sapiens
ttgcatagaagtgga

SEQ ID NO: 1216936 - DNA, 15 bp, Homo sapiens
tttgcatagaagtgg

SEQ ID NO: 1216937 - DNA, 15 bp, Homo sapiens
atttgcatagaagtg

SEQ ID NO: 1216938 - DNA, 15 bp, Homo sapiens
catttgcatagaagt

SEQ ID NO: 1216939 - DNA, 15 bp, Homo sapiens
gcatttgcatagaag

SEQ ID NO: 1216940 - DNA, 15 bp, Homo sapiens
ggcatttgcatagaa

SEQ ID NO: 1216941 - DNA, 15 bp, Homo sapiens
aggcatttgcataga

SEQ ID NO: 1216942 - DNA, 15 bp, Homo sapiens
gaggcatttgcatag

SEQ ID NO: 1216943 - DNA, 15 bp, Homo sapiens
ggaggcatttgcata

SEQ ID NO: 1216944 - DNA, 15 bp, Homo sapiens
tggaggcatttgcat

SEQ ID NO: 1216945 - DNA, 15 bp, Homo sapiens
ttggaggcatttgca

SEQ ID NO: 1216946 - DNA, 15 bp, Homo sapiens
cttggaggcatttgc

SEQ ID NO: 1216947 - DNA, 15 bp, Homo sapiens
gcttggaggcatttg

SEQ ID NO: 1216948 - DNA, 15 bp, Homo sapiens
ggcttggaggcattt

SEQ ID NO: 1216949 - DNA, 15 bp, Homo sapiens
tggcttggaggcatt

SEQ ID NO: 1216950 - DNA, 15 bp, Homo sapiens
atggcttggaggcat

SEQ ID NO: 1216951 - DNA, 15 bp, Homo sapiens
aatggcttggaggca

SEQ ID NO: 1216952 - DNA, 15 bp, Homo sapiens
gaatggcttggaggc

SEQ ID NO: 1216953 - DNA, 15 bp, Homo sapiens
tgaatggcttggagg

SEQ ID NO: 1216954 - DNA, 15 bp, Homo sapiens
gtgaatggcttggag

SEQ ID NO: 1216955 - DNA, 15 bp, Homo sapiens
agtgaatggcttgga

SEQ ID NO: 1216956 - DNA, 15 bp, Homo sapiens
aagtgaatggcttgg

SEQ ID NO: 1216957 - DNA, 15 bp, Homo sapiens
gaagtgaatggcttg

SEQ ID NO: 1216958 - DNA, 15 bp, Homo sapiens
ggaagtgaatggctt

SEQ ID NO: 1216959 - DNA, 15 bp, Homo sapiens
gggaagtgaatggct

SEQ ID NO: 1216960 - DNA, 15 bp, Homo sapiens
ggggaagtgaatggc

SEQ ID NO: 1216961 - DNA, 15 bp, Homo sapiens
tggggaagtgaatgg

SEQ ID NO: 1216962 - DNA, 15 bp, Homo sapiens
ttggggaagtgaatg

SEQ ID NO: 1216963 - DNA, 15 bp, Homo sapiens
attggggaagtgaat

SEQ ID NO: 1216964 - DNA, 15 bp, Homo sapiens
gattggggaagtgaa

SEQ ID NO: 1216965 - DNA, 15 bp, Homo sapiens
agattggggaagtga

SEQ ID NO: 1216966 - DNA, 15 bp, Homo sapiens
aagattggggaagtg

SEQ ID NO: 1216967 - DNA, 15 bp, Homo sapiens
caagattggggaagt

SEQ ID NO: 1216968 - DNA, 15 bp, Homo sapiens
acaagattggggaag

SEQ ID NO: 1216969 - DNA, 15 bp, Homo sapiens
gacaagattggggaa

SEQ ID NO: 1216970 - DNA, 15 bp, Homo sapiens
cgacaagattgggga

SEQ ID NO: 1216971 - DNA, 15 bp, Homo sapiens
acgacaagattgggg

SEQ ID NO: 1216972 - DNA, 15 bp, Homo sapiens
aacgacaagattggg

SEQ ID NO: 1216973 - DNA, 15 bp, Homo sapiens
caacgacaagattgg

SEQ ID NO: 1216974 - DNA, 15 bp, Homo sapiens
tcaacgacaagattg

SEQ ID NO: 1216975 - DNA, 15 bp, Homo sapiens
atcaacgacaagatt

SEQ ID NO: 1216976 - DNA, 15 bp, Homo sapiens
catcaacgacaagat

SEQ ID NO: 1216977 - DNA, 15 bp, Homo sapiens
ccatcaacgacaaga

SEQ ID NO: 1216978 - DNA, 15 bp, Homo sapiens
cccatcaacgacaag

SEQ ID NO: 1216979 - DNA, 15 bp, Homo sapiens
acccatcaacgacaa

SEQ ID NO: 1216980 - DNA, 15 bp, Homo sapiens
tacccatcaacgaca

SEQ ID NO: 1216981 - DNA, 15 bp, Homo sapiens
atacccatcaacgac

SEQ ID NO: 1216982 - DNA, 15 bp, Homo sapiens
catacccatcaacga

SEQ ID NO: 1216983 - DNA, 15 bp, Homo sapiens
acatacccatcaacg

SEQ ID NO: 1216984 - DNA, 15 bp, Homo sapiens
cacatacccatcaac

SEQ ID NO: 1216985 - DNA, 15 bp, Homo sapiens
acacatacccatcaa

SEQ ID NO: 1216986 - DNA, 15 bp, Homo sapiens
aacacatacccatca

SEQ ID NO: 1216987 - DNA, 15 bp, Homo sapiens
aaacacatacccatc

SEQ ID NO: 1216988 - DNA, 15 bp, Homo sapiens
taaacacatacccat

SEQ ID NO: 1216989 - DNA, 15 bp, Homo sapiens
ttaaacacataccca

SEQ ID NO: 1216990 - DNA, 15 bp, Homo sapiens
tttaaacacataccc

SEQ ID NO: 1216991 - DNA, 15 bp, Homo sapiens
ttttaaacacatacc

SEQ ID NO: 1216992 - DNA, 15 bp, Homo sapiens
gttttaaacacatac

SEQ ID NO: 1216993 - DNA, 15 bp, Homo sapiens
tgttttaaacacata

SEQ ID NO: 1216994 - DNA, 15 bp, Homo sapiens
atgttttaaacacat

SEQ ID NO: 1216995 - DNA, 15 bp, Homo sapiens
catgttttaaacaca

SEQ ID NO: 1216996 - DNA, 15 bp, Homo sapiens
gcatgttttaaacac

SEQ ID NO: 1216997 - DNA, 15 bp, Homo sapiens
tgcatgttttaaaca

SEQ ID NO: 1216998 - DNA, 15 bp, Homo sapiens
gtgcatgttttaaac

SEQ ID NO: 1216999 - DNA, 15 bp, Homo sapiens
cgtgcatgttttaaa

SEQ ID NO: 1217000 - DNA, 15 bp, Homo sapiens
ccgtgcatgttttaa

SEQ ID NO: 1217001 - DNA, 15 bp, Homo sapiens
accgtgcatgtttta

SEQ ID NO: 1217002 - DNA, 15 bp, Homo sapiens
caccgtgcatgtttt

SEQ ID NO: 1217003 - DNA, 15 bp, Homo sapiens
tcaccgtgcatgttt

SEQ ID NO: 1217004 - DNA, 15 bp, Homo sapiens
ctcaccgtgcatgtt

SEQ ID NO: 1217005 - DNA, 15 bp, Homo sapiens
cctcaccgtgcatgt

SEQ ID NO: 1217006 - DNA, 15 bp, Homo sapiens
gcctcaccgtgcatg

SEQ ID NO: 1217007 - DNA, 15 bp, Homo sapiens
ggcctcaccgtgcat

SEQ ID NO: 1217008 - DNA, 15 bp, Homo sapiens
cggcctcaccgtgca

SEQ ID NO: 1217009 - DNA, 15 bp, Homo sapiens
ccggcctcaccgtgc

SEQ ID NO: 1217010 - DNA, 15 bp, Homo sapiens
cccggcctcaccgtg

SEQ ID NO: 1217011 - DNA, 15 bp, Homo sapiens
gcccggcctcaccgt

SEQ ID NO: 1217012 - DNA, 15 bp, Homo sapiens
cgcccggcctcaccg

SEQ ID NO: 1217013 - DNA, 15 bp, Homo sapiens
gcgcccggcctcacc

SEQ ID NO: 1217014 - DNA, 15 bp, Homo sapiens
tgcgcccggcctcac

SEQ ID NO: 1217015 - DNA, 15 bp, Homo sapiens
ctgcgcccggcctca

SEQ ID NO: 1217016 - DNA, 15 bp, Homo sapiens
actgcgcccggcctc

SEQ ID NO: 1217017 - DNA, 15 bp, Homo sapiens
catgatccacccgcc

SEQ ID NO: 1217018 - DNA, 15 bp, Homo sapiens
ctgggcttcatcagc

SEQ ID NO: 1217019 - DNA, 15 bp, Homo sapiens
cctgggcttcatcag

SEQ ID NO: 1217020 - DNA, 15 bp, Homo sapiens
gcctgggcttcatca

SEQ ID NO: 1217021 - DNA, 15 bp, Homo sapiens
tgcctgggcttcatc

SEQ ID NO: 1217022 - DNA, 15 bp, Homo sapiens
ttgcctgggcttcat

SEQ ID NO: 1217023 - DNA, 15 bp, Homo sapiens
attgcctgggcttca

SEQ ID NO: 1217024 - DNA, 15 bp, Homo sapiens
cattgcctgggcttc

SEQ ID NO: 1217025 - DNA, 15 bp, Homo sapiens
ccattgcctgggctt

SEQ ID NO: 1217026 - DNA, 15 bp, Homo sapiens
accattgcctgggct

SEQ ID NO: 1217027 - DNA, 15 bp, Homo sapiens
caccattgcctgggc

SEQ ID NO: 1217028 - DNA, 15 bp, Homo sapiens
gcaccattgcctggg

SEQ ID NO: 1217029 - DNA, 15 bp, Homo sapiens
ggcaccattgcctgg

SEQ ID NO: 1217030 - DNA, 15 bp, Homo sapiens
aggcaccattgcctg

SEQ ID NO: 1217031 - DNA, 15 bp, Homo sapiens
aaggcaccattgcct

SEQ ID NO: 1217032 - DNA, 15 bp, Homo sapiens
taaggcaccattgcc

SEQ ID NO: 1217033 - DNA, 15 bp, Homo sapiens
gtaaggcaccattgc

SEQ ID NO: 1217034 - DNA, 15 bp, Homo sapiens
agtaaggcaccattg

SEQ ID NO: 1217035 - DNA, 15 bp, Homo sapiens
cagtaaggcaccatt

SEQ ID NO: 1217036 - DNA, 15 bp, Homo sapiens
ccagtaaggcaccat

SEQ ID NO: 1217037 - DNA, 15 bp, Homo sapiens
cccagtaaggcacca

SEQ ID NO: 1217038 - DNA, 15 bp, Homo sapiens
acccagtaaggcacc

SEQ ID NO: 1217039 - DNA, 15 bp, Homo sapiens
cacccagtaaggcac

SEQ ID NO: 1217040 - DNA, 15 bp, Homo sapiens
ccacccagtaaggca

SEQ ID NO: 1217041 - DNA, 15 bp, Homo sapiens
tccacccagtaaggc

SEQ ID NO: 1217042 - DNA, 15 bp, Homo sapiens
atccacccagtaagg

SEQ ID NO: 1217043 - DNA, 15 bp, Homo sapiens
gatccacccagtaag

SEQ ID NO: 1217044 - DNA, 15 bp, Homo sapiens
cgatccacccagtaa

SEQ ID NO: 1217045 - DNA, 15 bp, Homo sapiens
tcgatccacccagta

SEQ ID NO: 1217046 - DNA, 15 bp, Homo sapiens
ttcgatccacccagt

SEQ ID NO: 1217047 - DNA, 15 bp, Homo sapiens
cttcgatccacccag

SEQ ID NO: 1217048 - DNA, 15 bp, Homo sapiens
ccttcgatccaccca

SEQ ID NO: 1217049 - DNA, 15 bp, Homo sapiens
tccttcgatccaccc

SEQ ID NO: 1217050 - DNA, 15 bp, Homo sapiens
ctccttcgatccacc

SEQ ID NO: 1217051 - DNA, 15 bp, Homo sapiens
cctccttcgatccac

SEQ ID NO: 1217052 - DNA, 15 bp, Homo sapiens
ccctccttcgatcca

SEQ ID NO: 1217053 - DNA, 15 bp, Homo sapiens
tccctccttcgatcc

SEQ ID NO: 1217054 - DNA, 15 bp, Homo sapiens
gtccctccttcgatc

SEQ ID NO: 1217055 - DNA, 15 bp, Homo sapiens
tgtccctccttcgat

SEQ ID NO: 1217056 - DNA, 15 bp, Homo sapiens
ctgtccctccttcga

SEQ ID NO: 1217057 - DNA, 15 bp, Homo sapiens
cctgtccctccttcg

SEQ ID NO: 1217058 - DNA, 15 bp, Homo sapiens
ccctgtccctccttc

SEQ ID NO: 1217059 - DNA, 15 bp, Homo sapiens
accctgtccctcctt

SEQ ID NO: 1217060 - DNA, 15 bp, Homo sapiens
aaccctgtccctcct

SEQ ID NO: 1217061 - DNA, 15 bp, Homo sapiens
caaccctgtccctcc

SEQ ID NO: 1217062 - DNA, 15 bp, Homo sapiens
ccaaccctgtccctc

SEQ ID NO: 1217063 - DNA, 15 bp, Homo sapiens
gccaaccctgtccct

SEQ ID NO: 1217064 - DNA, 15 bp, Homo sapiens
ggccaaccctgtccc

SEQ ID NO: 1217065 - DNA, 15 bp, Homo sapiens
gggccaaccctgtcc

SEQ ID NO: 1217066 - DNA, 15 bp, Homo sapiens
tgggccaaccctgtc

SEQ ID NO: 1217067 - DNA, 15 bp, Homo sapiens
ctgggccaaccctgt

SEQ ID NO: 1217068 - DNA, 15 bp, Homo sapiens
cctgggccaaccctg

SEQ ID NO: 1217069 - DNA, 15 bp, Homo sapiens
ccctgggccaaccct

SEQ ID NO: 1217070 - DNA, 15 bp, Homo sapiens
cccctgggccaaccc

SEQ ID NO: 1217071 - DNA, 15 bp, Homo sapiens
acccctgggccaacc

SEQ ID NO: 1217072 - DNA, 15 bp, Homo sapiens
cacccctgggccaac

SEQ ID NO: 1217073 - DNA, 15 bp, Homo sapiens
tcacccctgggccaa

SEQ ID NO: 1217074 - DNA, 15 bp, Homo sapiens
gtcacccctgggcca

SEQ ID NO: 1217075 - DNA, 15 bp, Homo sapiens
tgtcacccctgggcc

SEQ ID NO: 1217076 - DNA, 15 bp, Homo sapiens
gtgtcacccctgggc

SEQ ID NO: 1217077 - DNA, 15 bp, Homo sapiens
cgtgtcacccctggg

SEQ ID NO: 1217078 - DNA, 15 bp, Homo sapiens
tcgtgtcacccctgg

SEQ ID NO: 1217079 - DNA, 15 bp, Homo sapiens
gtcgtgtcacccctg

SEQ ID NO: 1217080 - DNA, 15 bp, Homo sapiens
tgtcgtgtcacccct

SEQ ID NO: 1217081 - DNA, 15 bp, Homo sapiens
gtgtcgtgtcacccc

SEQ ID NO: 1217082 - DNA, 15 bp, Homo sapiens
agtgtcgtgtcaccc

SEQ ID NO: 1217083 - DNA, 15 bp, Homo sapiens
cagtgtcgtgtcacc

SEQ ID NO: 1217084 - DNA, 15 bp, Homo sapiens
ccagtgtcgtgtcac

SEQ ID NO: 1217085 - DNA, 15 bp, Homo sapiens
cccagtgtcgtgtca

SEQ ID NO: 1217086 - DNA, 15 bp, Homo sapiens
ccccagtgtcgtgtc

SEQ ID NO: 1217087 - DNA, 15 bp, Homo sapiens
accccagtgtcgtgt

SEQ ID NO: 1217088 - DNA, 15 bp, Homo sapiens
caccccagtgtcgtg

SEQ ID NO: 1217089 - DNA, 15 bp, Homo sapiens
ccaccccagtgtcgt

SEQ ID NO: 1217090 - DNA, 15 bp, Homo sapiens
accaccccagtgtcg

SEQ ID NO: 1217091 - DNA, 15 bp, Homo sapiens
aaccaccccagtgtc

SEQ ID NO: 1217092 - DNA, 15 bp, Homo sapiens
taaccaccccagtgt

SEQ ID NO: 1217093 - DNA, 15 bp, Homo sapiens
ctaaccaccccagtg

SEQ ID NO: 1217094 - DNA, 15 bp, Homo sapiens
cctaaccaccccagt

SEQ ID NO: 1217095 - DNA, 15 bp, Homo sapiens
acctaaccaccccag

SEQ ID NO: 1217096 - DNA, 15 bp, Homo sapiens
gacctaaccacccca

SEQ ID NO: 1217097 - DNA, 15 bp, Homo sapiens
ggacctaaccacccc

SEQ ID NO: 1217098 - DNA, 15 bp, Homo sapiens
tggacctaaccaccc

SEQ ID NO: 1217099 - DNA, 15 bp, Homo sapiens
gtggacctaaccacc

SEQ ID NO: 1217100 - DNA, 15 bp, Homo sapiens
tgtggacctaaccac

SEQ ID NO: 1217101 - DNA, 15 bp, Homo sapiens
ttgtggacctaacca

SEQ ID NO: 1217102 - DNA, 15 bp, Homo sapiens
tttgtggacctaacc

SEQ ID NO: 1217103 - DNA, 15 bp, Homo sapiens
gtttgtggacctaac

SEQ ID NO: 1217104 - DNA, 15 bp, Homo sapiens
cgtttgtggacctaa

SEQ ID NO: 1217105 - DNA, 15 bp, Homo sapiens
acgtttgtggaccta

SEQ ID NO: 1217106 - DNA, 15 bp, Homo sapiens
cacgtttgtggacct

SEQ ID NO: 1217107 - DNA, 15 bp, Homo sapiens
ccacgtttgtggacc

SEQ ID NO: 1217108 - DNA, 15 bp, Homo sapiens
gccacgtttgtggac

SEQ ID NO: 1217109 - DNA, 15 bp, Homo sapiens
agccacgtttgtgga

SEQ ID NO: 1217110 - DNA, 15 bp, Homo sapiens
gagccacgtttgtgg

SEQ ID NO: 1217111 - DNA, 15 bp, Homo sapiens
tgagccacgtttgtg

SEQ ID NO: 1217112 - DNA, 15 bp, Homo sapiens
atgagccacgtttgt

SEQ ID NO: 1217113 - DNA, 15 bp, Homo sapiens
catgagccacgtttg

SEQ ID NO: 1217114 - DNA, 15 bp, Homo sapiens
gcatgagccacgttt

SEQ ID NO: 1217115 - DNA, 15 bp, Homo sapiens
ggcatgagccacgtt

SEQ ID NO: 1217116 - DNA, 15 bp, Homo sapiens
aggcatgagccacgt

SEQ ID NO: 1217117 - DNA, 15 bp, Homo sapiens
caggcatgagccacg

SEQ ID NO: 1217118 - DNA, 15 bp, Homo sapiens
ggtactgggattaca

SEQ ID NO: 1217119 - DNA, 15 bp, Homo sapiens
aggtactgggattac

SEQ ID NO: 1217120 - DNA, 15 bp, Homo sapiens
aaggtactgggatta

SEQ ID NO: 1217121 - DNA, 15 bp, Homo sapiens
caaggtactgggatt

SEQ ID NO: 1217122 - DNA, 15 bp, Homo sapiens
ccaaggtactgggat

SEQ ID NO: 1217123 - DNA, 15 bp, Homo sapiens
cccaaggtactggga

SEQ ID NO: 1217124 - DNA, 15 bp, Homo sapiens
tcccaaggtactggg

SEQ ID NO: 1217125 - DNA, 15 bp, Homo sapiens
ttcccaaggtactgg

SEQ ID NO: 1217126 - DNA, 15 bp, Homo sapiens
cttcccaaggtactg

SEQ ID NO: 1217127 - DNA, 15 bp, Homo sapiens
gcttcccaaggtact

SEQ ID NO: 1217128 - DNA, 15 bp, Homo sapiens
agcttcccaaggtac

SEQ ID NO: 1217129 - DNA, 15 bp, Homo sapiens
cagcttcccaaggta

SEQ ID NO: 1217130 - DNA, 15 bp, Homo sapiens
tcagcttcccaaggt

SEQ ID NO: 1217131 - DNA, 15 bp, Homo sapiens
ctcagcttcccaagg

SEQ ID NO: 1217132 - DNA, 15 bp, Homo sapiens
cctcctgcctcagct

SEQ ID NO: 1217133 - DNA, 15 bp, Homo sapiens
ctcttgaactcctgg

SEQ ID NO: 1217134 - DNA, 15 bp, Homo sapiens
gctcttgaactcctg

SEQ ID NO: 1217135 - DNA, 15 bp, Homo sapiens
tgctcttgaactcct

SEQ ID NO: 1217136 - DNA, 15 bp, Homo sapiens
ctgctcttgaactcc

SEQ ID NO: 1217137 - DNA, 15 bp, Homo sapiens
actgctcttgaactc

SEQ ID NO: 1217138 - DNA, 15 bp, Homo sapiens
gactgctcttgaact

SEQ ID NO: 1217139 - DNA, 15 bp, Homo sapiens
agactgctcttgaac

SEQ ID NO: 1217140 - DNA, 15 bp, Homo sapiens
cagactgctcttgaa

SEQ ID NO: 1217141 - DNA, 15 bp, Homo sapiens
ccagactgctcttga

SEQ ID NO: 1217142 - DNA, 15 bp, Homo sapiens
cccagactgctcttg

SEQ ID NO: 1217143 - DNA, 15 bp, Homo sapiens
gcccagactgctctt

SEQ ID NO: 1217144 - DNA, 15 bp, Homo sapiens
tgcccagactgctct

SEQ ID NO: 1217145 - DNA, 15 bp, Homo sapiens
ttgcccagactgctc

SEQ ID NO: 1217146 - DNA, 15 bp, Homo sapiens
gttgcccagactgct

SEQ ID NO: 1217147 - DNA, 15 bp, Homo sapiens
tgttgcccagactgc

SEQ ID NO: 1217148 - DNA, 15 bp, Homo sapiens
atgttgcccagactg

SEQ ID NO: 1217149 - DNA, 15 bp, Homo sapiens
tatgttgcccagact

SEQ ID NO: 1217150 - DNA, 15 bp, Homo sapiens
ctatgttgcccagac

SEQ ID NO: 1217151 - DNA, 15 bp, Homo sapiens
gctatgttgcccaga

SEQ ID NO: 1217152 - DNA, 15 bp, Homo sapiens
ttagagatggggtct

SEQ ID NO: 1217153 - DNA, 15 bp, Homo sapiens
tttagagatggggtc

SEQ ID NO: 1217154 - DNA, 15 bp, Homo sapiens
ttttagagatggggt

SEQ ID NO: 1217155 - DNA, 15 bp, Homo sapiens
ttttttagagatggg

SEQ ID NO: 1217156 - DNA, 15 bp, Homo sapiens
gttttttagagatgg

SEQ ID NO: 1217157 - DNA, 15 bp, Homo sapiens
cgttttttagagatg

SEQ ID NO: 1217158 - DNA, 15 bp, Homo sapiens
acgttttttagagat

SEQ ID NO: 1217159 - DNA, 15 bp, Homo sapiens
aacgttttttagaga

SEQ ID NO: 1217160 - DNA, 15 bp, Homo sapiens
aaacgttttttagag

SEQ ID NO: 1217161 - DNA, 15 bp, Homo sapiens
aaaacgttttttaga

SEQ ID NO: 1217162 - DNA, 15 bp, Homo sapiens
aaaaacgttttttag

SEQ ID NO: 1217163 - DNA, 15 bp, Homo sapiens
taaaaacgtttttta

SEQ ID NO: 1217164 - DNA, 15 bp, Homo sapiens
ttaaaaacgtttttt

SEQ ID NO: 1217165 - DNA, 15 bp, Homo sapiens
tttaaaaacgttttt

SEQ ID NO: 1217166 - DNA, 15 bp, Homo sapiens
atttaaaaacgtttt

SEQ ID NO: 1217167 - DNA, 15 bp, Homo sapiens
aatttaaaaacgttt

SEQ ID NO: 1217168 - DNA, 15 bp, Homo sapiens
aaatttaaaaacgtt

SEQ ID NO: 1217169 - DNA, 15 bp, Homo sapiens
gaaatttaaaaacgt

SEQ ID NO: 1217170 - DNA, 15 bp, Homo sapiens
agaaatttaaaaacg

SEQ ID NO: 1217171 - DNA, 15 bp, Homo sapiens
cagaaatttaaaaac

SEQ ID NO: 1217172 - DNA, 15 bp, Homo sapiens
ccagaaatttaaaaa

SEQ ID NO: 1217173 - DNA, 15 bp, Homo sapiens
cccagaaatttaaaa

SEQ ID NO: 1217174 - DNA, 15 bp, Homo sapiens
gcccagaaatttaaa

SEQ ID NO: 1217175 - DNA, 15 bp, Homo sapiens
agcccagaaatttaa

SEQ ID NO: 1217176 - DNA, 15 bp, Homo sapiens
gagcccagaaattta

SEQ ID NO: 1217177 - DNA, 15 bp, Homo sapiens
tgagcccagaaattt

SEQ ID NO: 1217178 - DNA, 15 bp, Homo sapiens
ctgagcccagaaatt

SEQ ID NO: 1217179 - DNA, 15 bp, Homo sapiens
actgagcccagaaat

SEQ ID NO: 1217180 - DNA, 15 bp, Homo sapiens
cactgagcccagaaa

SEQ ID NO: 1217181 - DNA, 15 bp, Homo sapiens
ccactgagcccagaa

SEQ ID NO: 1217182 - DNA, 15 bp, Homo sapiens
gccactgagcccaga

SEQ ID NO: 1217183 - DNA, 15 bp, Homo sapiens
agccactgagcccag

SEQ ID NO: 1217184 - DNA, 15 bp, Homo sapiens
gagccactgagccca

SEQ ID NO: 1217185 - DNA, 15 bp, Homo sapiens
tgagccactgagccc

SEQ ID NO: 1217186 - DNA, 15 bp, Homo sapiens
atgagccactgagcc

SEQ ID NO: 1217187 - DNA, 15 bp, Homo sapiens
catgagccactgagc

SEQ ID NO: 1217188 - DNA, 15 bp, Homo sapiens
gcatgagccactgag

SEQ ID NO: 1217189 - DNA, 15 bp, Homo sapiens
ggcatgagccactga

SEQ ID NO: 1217190 - DNA, 15 bp, Homo sapiens
gagtgctgggattat

SEQ ID NO: 1217191 - DNA, 15 bp, Homo sapiens
tttgaactcctgacc

SEQ ID NO: 1217192 - DNA, 15 bp, Homo sapiens
ttttgaactcctgac

SEQ ID NO: 1217193 - DNA, 15 bp, Homo sapiens
gttttgaactcctga

SEQ ID NO: 1217194 - DNA, 15 bp, Homo sapiens
gctaggctggttttg

SEQ ID NO: 1217195 - DNA, 15 bp, Homo sapiens
ggctaggctggtttt

SEQ ID NO: 1217196 - DNA, 15 bp, Homo sapiens
tggctaggctggttt

SEQ ID NO: 1217197 - DNA, 15 bp, Homo sapiens
ttggctaggctggtt

SEQ ID NO: 1217198 - DNA, 15 bp, Homo sapiens
tttggctaggctggt

SEQ ID NO: 1217199 - DNA, 15 bp, Homo sapiens
ttttggctaggctgg

SEQ ID NO: 1217200 - DNA, 15 bp, Homo sapiens
attttggctaggctg

SEQ ID NO: 1217201 - DNA, 15 bp, Homo sapiens
cattttggctaggct

SEQ ID NO: 1217202 - DNA, 15 bp, Homo sapiens
ccattttggctaggc

SEQ ID NO: 1217203 - DNA, 15 bp, Homo sapiens
gccattttggctagg

SEQ ID NO: 1217204 - DNA, 15 bp, Homo sapiens
tgccattttggctag

SEQ ID NO: 1217205 - DNA, 15 bp, Homo sapiens
ttgccattttggcta

SEQ ID NO: 1217206 - DNA, 15 bp, Homo sapiens
tttgccattttggct

SEQ ID NO: 1217207 - DNA, 15 bp, Homo sapiens
ggggttttgccattt

SEQ ID NO: 1217208 - DNA, 15 bp, Homo sapiens
cggggttttgccatt

SEQ ID NO: 1217209 - DNA, 15 bp, Homo sapiens
gcggggttttgccat

SEQ ID NO: 1217210 - DNA, 15 bp, Homo sapiens
ggcggggttttgcca

SEQ ID NO: 1217211 - DNA, 15 bp, Homo sapiens
aggcggggttttgcc

SEQ ID NO: 1217212 - DNA, 15 bp, Homo sapiens
gaggcggggttttgc

SEQ ID NO: 1217213 - DNA, 15 bp, Homo sapiens
agaggcggggttttg

SEQ ID NO: 1217214 - DNA, 15 bp, Homo sapiens
tagaggcggggtttt

SEQ ID NO: 1217215 - DNA, 15 bp, Homo sapiens
gtagaggcggggttt

SEQ ID NO: 1217216 - DNA, 15 bp, Homo sapiens
agtagaggcggggtt

SEQ ID NO: 1217217 - DNA, 15 bp, Homo sapiens
tagtagaggcggggt

SEQ ID NO: 1217218 - DNA, 15 bp, Homo sapiens
ttagtagaggcgggg

SEQ ID NO: 1217219 - DNA, 15 bp, Homo sapiens
tttagtagaggcggg

SEQ ID NO: 1217220 - DNA, 15 bp, Homo sapiens
aactaatttttgtat

SEQ ID NO: 1217221 - DNA, 15 bp, Homo sapiens
caactaatttttgta

SEQ ID NO: 1217222 - DNA, 15 bp, Homo sapiens
ccaactaatttttgt

SEQ ID NO: 1217223 - DNA, 15 bp, Homo sapiens
cccaactaatttttg

SEQ ID NO: 1217224 - DNA, 15 bp, Homo sapiens
acccaactaattttt

SEQ ID NO: 1217225 - DNA, 15 bp, Homo sapiens
cacccaactaatttt

SEQ ID NO: 1217226 - DNA, 15 bp, Homo sapiens
acacccaactaattt

SEQ ID NO: 1217227 - DNA, 15 bp, Homo sapiens
cacacccaactaatt

SEQ ID NO: 1217228 - DNA, 15 bp, Homo sapiens
ccacacccaactaat

SEQ ID NO: 1217229 - DNA, 15 bp, Homo sapiens
accacacccaactaa

SEQ ID NO: 1217230 - DNA, 15 bp, Homo sapiens
caccacacccaacta

SEQ ID NO: 1217231 - DNA, 15 bp, Homo sapiens
ccaccacacccaact

SEQ ID NO: 1217232 - DNA, 15 bp, Homo sapiens
gccaccacacccaac

SEQ ID NO: 1217233 - DNA, 15 bp, Homo sapiens
cgccaccacacccaa

SEQ ID NO: 1217234 - DNA, 15 bp, Homo sapiens
atgcgccaccacacc

SEQ ID NO: 1217235 - DNA, 15 bp, Homo sapiens
catgcgccaccacac

SEQ ID NO: 1217236 - DNA, 15 bp, Homo sapiens
gcatgcgccaccaca

SEQ ID NO: 1217237 - DNA, 15 bp, Homo sapiens
ggcctcccgagttca

SEQ ID NO: 1217238 - DNA, 15 bp, Homo sapiens
cggcctcccgagttc

SEQ ID NO: 1217239 - DNA, 15 bp, Homo sapiens
tcggcctcccgagtt

SEQ ID NO: 1217240 - DNA, 15 bp, Homo sapiens
gtgcaacctcggcct

SEQ ID NO: 1217241 - DNA, 15 bp, Homo sapiens
agtgcaacctcggcc

SEQ ID NO: 1217242 - DNA, 15 bp, Homo sapiens
cagtgcaacctcggc

SEQ ID NO: 1217243 - DNA, 15 bp, Homo sapiens
tcagtgcaacctcgg

SEQ ID NO: 1217244 - DNA, 15 bp, Homo sapiens
ctcagtgcaacctcg

SEQ ID NO: 1217245 - DNA, 15 bp, Homo sapiens
tggctcagtgcaacc

SEQ ID NO: 1217246 - DNA, 15 bp, Homo sapiens
ttggctcagtgcaac

SEQ ID NO: 1217247 - DNA, 15 bp, Homo sapiens
cttggctcagtgcaa

SEQ ID NO: 1217248 - DNA, 15 bp, Homo sapiens
tcttggctcagtgca

SEQ ID NO: 1217249 - DNA, 15 bp, Homo sapiens
atcttggctcagtgc

SEQ ID NO: 1217250 - DNA, 15 bp, Homo sapiens
gatcttggctcagtg

SEQ ID NO: 1217251 - DNA, 15 bp, Homo sapiens
cgatcttggctcagt

SEQ ID NO: 1217252 - DNA, 15 bp, Homo sapiens
gcgatcttggctcag

SEQ ID NO: 1217253 - DNA, 15 bp, Homo sapiens
tgcgatcttggctca

SEQ ID NO: 1217254 - DNA, 15 bp, Homo sapiens
gtgcgatcttggctc

SEQ ID NO: 1217255 - DNA, 15 bp, Homo sapiens
gtcaggctggagtgc

SEQ ID NO: 1217256 - DNA, 15 bp, Homo sapiens
tgtcaggctggagtg

SEQ ID NO: 1217257 - DNA, 15 bp, Homo sapiens
ctgtcaggctggagt

SEQ ID NO: 1217258 - DNA, 15 bp, Homo sapiens
tctgtcaggctggag

SEQ ID NO: 1217259 - DNA, 15 bp, Homo sapiens
ctctgtcaggctgga

SEQ ID NO: 1217260 - DNA, 15 bp, Homo sapiens
gctctgtcaggctgg

SEQ ID NO: 1217261 - DNA, 15 bp, Homo sapiens
cgctctgtcaggctg

SEQ ID NO: 1217262 - DNA, 15 bp, Homo sapiens
tcgctctgtcaggct

SEQ ID NO: 1217263 - DNA, 15 bp, Homo sapiens
ctcgctctgtcaggc

SEQ ID NO: 1217264 - DNA, 15 bp, Homo sapiens
tctcgctctgtcagg

SEQ ID NO: 1217265 - DNA, 15 bp, Homo sapiens
gtctcgctctgtcag

SEQ ID NO: 1217266 - DNA, 15 bp, Homo sapiens
tgtctcgctctgtca

SEQ ID NO: 1217267 - DNA, 15 bp, Homo sapiens
gtgtctcgctctgtc

SEQ ID NO: 1217268 - DNA, 15 bp, Homo sapiens
agtgtctcgctctgt

SEQ ID NO: 1217269 - DNA, 15 bp, Homo sapiens
cagtgtctcgctctg

SEQ ID NO: 1217270 - DNA, 15 bp, Homo sapiens
gcagtgtctcgctct

SEQ ID NO: 1217271 - DNA, 15 bp, Homo sapiens
cgcagtgtctcgctc

SEQ ID NO: 1217272 - DNA, 15 bp, Homo sapiens
acgcagtgtctcgct

SEQ ID NO: 1217273 - DNA, 15 bp, Homo sapiens
gacgcagtgtctcgc

SEQ ID NO: 1217274 - DNA, 15 bp, Homo sapiens
tgacgcagtgtctcg

SEQ ID NO: 1217275 - DNA, 15 bp, Homo sapiens
ttgacgcagtgtctc

SEQ ID NO: 1217276 - DNA, 15 bp, Homo sapiens
tttgacgcagtgtct

SEQ ID NO: 1217277 - DNA, 15 bp, Homo sapiens
ttttgacgcagtgtc

SEQ ID NO: 1217278 - DNA, 15 bp, Homo sapiens
tttttgacgcagtgt

SEQ ID NO: 1217279 - DNA, 15 bp, Homo sapiens
ttttttgacgcagtg

SEQ ID NO: 1217280 - DNA, 15 bp, Homo sapiens
tttttttgacgcagt

SEQ ID NO: 1217281 - DNA, 15 bp, Homo sapiens
gtttttttgacgcag

SEQ ID NO: 1217282 - DNA, 15 bp, Homo sapiens
tgtttttttgacgca

SEQ ID NO: 1217283 - DNA, 15 bp, Homo sapiens
ctgtttttttgacgc

SEQ ID NO: 1217284 - DNA, 15 bp, Homo sapiens
tctgtttttttgacg

SEQ ID NO: 1217285 - DNA, 15 bp, Homo sapiens
gtctgtttttttgac

SEQ ID NO: 1217286 - DNA, 15 bp, Homo sapiens
tgtctgtttttttga

SEQ ID NO: 1217287 - DNA, 15 bp, Homo sapiens
ttgtctgtttttttg

SEQ ID NO: 1217288 - DNA, 15 bp, Homo sapiens
gttgtctgttttttt

SEQ ID NO: 1217289 - DNA, 15 bp, Homo sapiens
tgttgtctgtttttt

SEQ ID NO: 1217290 - DNA, 15 bp, Homo sapiens
ttgttgtctgttttt

SEQ ID NO: 1217291 - DNA, 15 bp, Homo sapiens
gttgttgtctgtttt

SEQ ID NO: 1217292 - DNA, 15 bp, Homo sapiens
tgttgttgtctgttt

SEQ ID NO: 1217293 - DNA, 15 bp, Homo sapiens
ttgttgttgtctgtt

SEQ ID NO: 1217294 - DNA, 15 bp, Homo sapiens
gttgttgttgtctgt

SEQ ID NO: 1217295 - DNA, 15 bp, Homo sapiens
tgttgttgttgtctg

SEQ ID NO: 1217296 - DNA, 15 bp, Homo sapiens
ctgttgttgttgtct

SEQ ID NO: 1217297 - DNA, 15 bp, Homo sapiens
tctgttgttgttgtc

SEQ ID NO: 1217298 - DNA, 15 bp, Homo sapiens
ttctgttgttgttgt

SEQ ID NO: 1217299 - DNA, 15 bp, Homo sapiens
tttctgttgttgttg

SEQ ID NO: 1217300 - DNA, 15 bp, Homo sapiens
ttttctgttgttgtt

SEQ ID NO: 1217301 - DNA, 15 bp, Homo sapiens
tttttctgttgttgt

SEQ ID NO: 1217302 - DNA, 15 bp, Homo sapiens
ctttttctgttgttg

SEQ ID NO: 1217303 - DNA, 15 bp, Homo sapiens
actttttctgttgtt

SEQ ID NO: 1217304 - DNA, 15 bp, Homo sapiens
aactttttctgttgt

SEQ ID NO: 1217305 - DNA, 15 bp, Homo sapiens
aaactttttctgttg

SEQ ID NO: 1217306 - DNA, 15 bp, Homo sapiens
aaaactttttctgtt

SEQ ID NO: 1217307 - DNA, 15 bp, Homo sapiens
taaaactttttctgt

SEQ ID NO: 1217308 - DNA, 15 bp, Homo sapiens
ttaaaactttttctg

SEQ ID NO: 1217309 - DNA, 15 bp, Homo sapiens
tttaaaactttttct

SEQ ID NO: 1217310 - DNA, 15 bp, Homo sapiens
ttttaaaactttttc

SEQ ID NO: 1217311 - DNA, 15 bp, Homo sapiens
attttaaaacttttt

SEQ ID NO: 1217312 - DNA, 15 bp, Homo sapiens
aattttaaaactttt

SEQ ID NO: 1217313 - DNA, 15 bp, Homo sapiens
taattttaaaacttt

SEQ ID NO: 1217314 - DNA, 15 bp, Homo sapiens
gtaattttaaaactt

SEQ ID NO: 1217315 - DNA, 15 bp, Homo sapiens
ggtaattttaaaact

SEQ ID NO: 1217316 - DNA, 15 bp, Homo sapiens
tggtaattttaaaac

SEQ ID NO: 1217317 - DNA, 15 bp, Homo sapiens
ctggtaattttaaaa

SEQ ID NO: 1217318 - DNA, 15 bp, Homo sapiens
gctggtaattttaaa

SEQ ID NO: 1217319 - DNA, 15 bp, Homo sapiens
ggctggtaattttaa

SEQ ID NO: 1217320 - DNA, 15 bp, Homo sapiens
cggctggtaatttta

SEQ ID NO: 1217321 - DNA, 15 bp, Homo sapiens
ccggctggtaatttt

SEQ ID NO: 1217322 - DNA, 15 bp, Homo sapiens
tccggctggtaattt

SEQ ID NO: 1217323 - DNA, 15 bp, Homo sapiens
atccggctggtaatt

SEQ ID NO: 1217324 - DNA, 15 bp, Homo sapiens
catccggctggtaat

SEQ ID NO: 1217325 - DNA, 15 bp, Homo sapiens
gcatccggctggtaa

SEQ ID NO: 1217326 - DNA, 15 bp, Homo sapiens
cgcatccggctggta

SEQ ID NO: 1217327 - DNA, 15 bp, Homo sapiens
tcgcatccggctggt

SEQ ID NO: 1217328 - DNA, 15 bp, Homo sapiens
atcgcatccggctgg

SEQ ID NO: 1217329 - DNA, 15 bp, Homo sapiens
catcgcatccggctg

SEQ ID NO: 1217330 - DNA, 15 bp, Homo sapiens
ccatcgcatccggct

SEQ ID NO: 1217331 - DNA, 15 bp, Homo sapiens
gccatcgcatccggc

SEQ ID NO: 1217332 - DNA, 15 bp, Homo sapiens
cgccatcgcatccgg

SEQ ID NO: 1217333 - DNA, 15 bp, Homo sapiens
gcgccatcgcatccg

SEQ ID NO: 1217334 - DNA, 15 bp, Homo sapiens
tgcgccatcgcatcc

SEQ ID NO: 1217335 - DNA, 15 bp, Homo sapiens
gtgcgccatcgcatc

SEQ ID NO: 1217336 - DNA, 15 bp, Homo sapiens
tgtgcgccatcgcat

SEQ ID NO: 1217337 - DNA, 15 bp, Homo sapiens
gtgtgcgccatcgca

SEQ ID NO: 1217338 - DNA, 15 bp, Homo sapiens
ggtgtgcgccatcgc

SEQ ID NO: 1217339 - DNA, 15 bp, Homo sapiens
aggtgtgcgccatcg

SEQ ID NO: 1217340 - DNA, 15 bp, Homo sapiens
caggtgtgcgccatc

SEQ ID NO: 1217341 - DNA, 15 bp, Homo sapiens
acaggtgtgcgccat

SEQ ID NO: 1217342 - DNA, 15 bp, Homo sapiens
tacaggtgtgcgcca

SEQ ID NO: 1217343 - DNA, 15 bp, Homo sapiens
ctacaggtgtgcgcc

SEQ ID NO: 1217344 - DNA, 15 bp, Homo sapiens
actacaggtgtgcgc

SEQ ID NO: 1217345 - DNA, 15 bp, Homo sapiens
gactacaggtgtgcg

SEQ ID NO: 1217346 - DNA, 15 bp, Homo sapiens
tctgggactacaggt

SEQ ID NO: 1217347 - DNA, 15 bp, Homo sapiens
atctgggactacagg

SEQ ID NO: 1217348 - DNA, 15 bp, Homo sapiens
tatctgggactacag

SEQ ID NO: 1217349 - DNA, 15 bp, Homo sapiens
gtatctgggactaca

SEQ ID NO: 1217350 - DNA, 15 bp, Homo sapiens
agtatctgggactac

SEQ ID NO: 1217351 - DNA, 15 bp, Homo sapiens
aagtatctgggacta

SEQ ID NO: 1217352 - DNA, 15 bp, Homo sapiens
caagtatctgggact

SEQ ID NO: 1217353 - DNA, 15 bp, Homo sapiens
ccaagtatctgggac

SEQ ID NO: 1217354 - DNA, 15 bp, Homo sapiens
tccaagtatctggga

SEQ ID NO: 1217355 - DNA, 15 bp, Homo sapiens
ctccaagtatctggg

SEQ ID NO: 1217356 - DNA, 15 bp, Homo sapiens
cctccaagtatctgg

SEQ ID NO: 1217357 - DNA, 15 bp, Homo sapiens
gcctccaagtatctg

SEQ ID NO: 1217358 - DNA, 15 bp, Homo sapiens
agcctccaagtatct

SEQ ID NO: 1217359 - DNA, 15 bp, Homo sapiens
cagcctccaagtatc

SEQ ID NO: 1217360 - DNA, 15 bp, Homo sapiens
tcagcctccaagtat

SEQ ID NO: 1217361 - DNA, 15 bp, Homo sapiens
ctcagcctccaagta

SEQ ID NO: 1217362 - DNA, 15 bp, Homo sapiens
cctcagcctccaagt

SEQ ID NO: 1217363 - DNA, 15 bp, Homo sapiens
acctcagcctccaag

SEQ ID NO: 1217364 - DNA, 15 bp, Homo sapiens
cacctcagcctccaa

SEQ ID NO: 1217365 - DNA, 15 bp, Homo sapiens
ttcccacctcagcct

SEQ ID NO: 1217366 - DNA, 15 bp, Homo sapiens
cttcccacctcagcc

SEQ ID NO: 1217367 - DNA, 15 bp, Homo sapiens
tcttcccacctcagc

SEQ ID NO: 1217368 - DNA, 15 bp, Homo sapiens
atcttcccacctcag

SEQ ID NO: 1217369 - DNA, 15 bp, Homo sapiens
gatcttcccacctca

SEQ ID NO: 1217370 - DNA, 15 bp, Homo sapiens
agatcttcccacctc

SEQ ID NO: 1217371 - DNA, 15 bp, Homo sapiens
gagatcttcccacct

SEQ ID NO: 1217372 - DNA, 15 bp, Homo sapiens
agagatcttcccacc

SEQ ID NO: 1217373 - DNA, 15 bp, Homo sapiens
aagagatcttcccac

SEQ ID NO: 1217374 - DNA, 15 bp, Homo sapiens
caagagatcttccca

SEQ ID NO: 1217375 - DNA, 15 bp, Homo sapiens
tcaagagatcttccc

SEQ ID NO: 1217376 - DNA, 15 bp, Homo sapiens
ctcaagagatcttcc

SEQ ID NO: 1217377 - DNA, 15 bp, Homo sapiens
actcaagagatcttc

SEQ ID NO: 1217378 - DNA, 15 bp, Homo sapiens
gactcaagagatctt

SEQ ID NO: 1217379 - DNA, 15 bp, Homo sapiens
ggactcaagagatct

SEQ ID NO: 1217380 - DNA, 15 bp, Homo sapiens
tggactcaagagatc

SEQ ID NO: 1217381 - DNA, 15 bp, Homo sapiens
ctggactcaagagat

SEQ ID NO: 1217382 - DNA, 15 bp, Homo sapiens
gctggactcaagaga

SEQ ID NO: 1217383 - DNA, 15 bp, Homo sapiens
tgctggactcaagag

SEQ ID NO: 1217384 - DNA, 15 bp, Homo sapiens
gtgctggactcaaga

SEQ ID NO: 1217385 - DNA, 15 bp, Homo sapiens
agtgctggactcaag

SEQ ID NO: 1217386 - DNA, 15 bp, Homo sapiens
aagtgctggactcaa

SEQ ID NO: 1217387 - DNA, 15 bp, Homo sapiens
aaagtgctggactca

SEQ ID NO: 1217388 - DNA, 15 bp, Homo sapiens
caaagtgctggactc

SEQ ID NO: 1217389 - DNA, 15 bp, Homo sapiens
ccaaagtgctggact

SEQ ID NO: 1217390 - DNA, 15 bp, Homo sapiens
cccaaagtgctggac

SEQ ID NO: 1217391 - DNA, 15 bp, Homo sapiens
aacctcaggtgatcc

SEQ ID NO: 1217392 - DNA, 15 bp, Homo sapiens
caacctcaggtgatc

SEQ ID NO: 1217393 - DNA, 15 bp, Homo sapiens
ccaacctcaggtgat

SEQ ID NO: 1217394 - DNA, 15 bp, Homo sapiens
cccaacctcaggtga

SEQ ID NO: 1217395 - DNA, 15 bp, Homo sapiens
ccccaacctcaggtg

SEQ ID NO: 1217396 - DNA, 15 bp, Homo sapiens
cccccaacctcaggt

SEQ ID NO: 1217397 - DNA, 15 bp, Homo sapiens
acccccaacctcagg

SEQ ID NO: 1217398 - DNA, 15 bp, Homo sapiens
aacccccaacctcag

SEQ ID NO: 1217399 - DNA, 15 bp, Homo sapiens
aaacccccaacctca

SEQ ID NO: 1217400 - DNA, 15 bp, Homo sapiens
caaacccccaacctc

SEQ ID NO: 1217401 - DNA, 15 bp, Homo sapiens
tcaaacccccaacct

SEQ ID NO: 1217402 - DNA, 15 bp, Homo sapiens
ctcaaacccccaacc

SEQ ID NO: 1217403 - DNA, 15 bp, Homo sapiens
tctcaaacccccaac

SEQ ID NO: 1217404 - DNA, 15 bp, Homo sapiens
gtctcaaacccccaa

SEQ ID NO: 1217405 - DNA, 15 bp, Homo sapiens
ggtctcaaaccccca

SEQ ID NO: 1217406 - DNA, 15 bp, Homo sapiens
tggtctcaaaccccc

SEQ ID NO: 1217407 - DNA, 15 bp, Homo sapiens
ctggtctcaaacccc

SEQ ID NO: 1217408 - DNA, 15 bp, Homo sapiens
gctggtctcaaaccc

SEQ ID NO: 1217409 - DNA, 15 bp, Homo sapiens
agagatggggtttct

SEQ ID NO: 1217410 - DNA, 15 bp, Homo sapiens
gccacacccagctaa

SEQ ID NO: 1217411 - DNA, 15 bp, Homo sapiens
cgccacacccagcta

SEQ ID NO: 1217412 - DNA, 15 bp, Homo sapiens
ccgccacacccagct

SEQ ID NO: 1217413 - DNA, 15 bp, Homo sapiens
gccgccacacccagc

SEQ ID NO: 1217414 - DNA, 15 bp, Homo sapiens
cgccgccacacccag

SEQ ID NO: 1217415 - DNA, 15 bp, Homo sapiens
gcgccgccacaccca

SEQ ID NO: 1217416 - DNA, 15 bp, Homo sapiens
tgcgccgccacaccc

SEQ ID NO: 1217417 - DNA, 15 bp, Homo sapiens
atgcgccgccacacc

SEQ ID NO: 1217418 - DNA, 15 bp, Homo sapiens
catgcgccgccacac

SEQ ID NO: 1217419 - DNA, 15 bp, Homo sapiens
gcatgcgccgccaca

SEQ ID NO: 1217420 - DNA, 15 bp, Homo sapiens
ggcatgcgccgccac

SEQ ID NO: 1217421 - DNA, 15 bp, Homo sapiens
aggcatgcgccgcca

SEQ ID NO: 1217422 - DNA, 15 bp, Homo sapiens
caggcatgcgccgcc

SEQ ID NO: 1217423 - DNA, 15 bp, Homo sapiens
acaggcatgcgccgc

SEQ ID NO: 1217424 - DNA, 15 bp, Homo sapiens
tacaggcatgcgccg

SEQ ID NO: 1217425 - DNA, 15 bp, Homo sapiens
cgtagctgggattac

SEQ ID NO: 1217426 - DNA, 15 bp, Homo sapiens
gcgtagctgggatta

SEQ ID NO: 1217427 - DNA, 15 bp, Homo sapiens
cgcgtagctgggatt

SEQ ID NO: 1217428 - DNA, 15 bp, Homo sapiens
ccgcgtagctgggat

SEQ ID NO: 1217429 - DNA, 15 bp, Homo sapiens
cccgcgtagctggga

SEQ ID NO: 1217430 - DNA, 15 bp, Homo sapiens
tcccgcgtagctggg

SEQ ID NO: 1217431 - DNA, 15 bp, Homo sapiens
ctcccgcgtagctgg

SEQ ID NO: 1217432 - DNA, 15 bp, Homo sapiens
cctcccgcgtagctg

SEQ ID NO: 1217433 - DNA, 15 bp, Homo sapiens
gcctcccgcgtagct

SEQ ID NO: 1217434 - DNA, 15 bp, Homo sapiens
agcctcccgcgtagc

SEQ ID NO: 1217435 - DNA, 15 bp, Homo sapiens
cagcctcccgcgtag

SEQ ID NO: 1217436 - DNA, 15 bp, Homo sapiens
tcagcctcccgcgta

SEQ ID NO: 1217437 - DNA, 15 bp, Homo sapiens
ctcagcctcccgcgt

SEQ ID NO: 1217438 - DNA, 15 bp, Homo sapiens
cctcagcctcccgcg

SEQ ID NO: 1217439 - DNA, 15 bp, Homo sapiens
acctcagcctcccgc

SEQ ID NO: 1217440 - DNA, 15 bp, Homo sapiens
tacctcagcctcccg

SEQ ID NO: 1217441 - DNA, 15 bp, Homo sapiens
cgcaacctcttcctc

SEQ ID NO: 1217442 - DNA, 15 bp, Homo sapiens
ccgcaacctcttcct

SEQ ID NO: 1217443 - DNA, 15 bp, Homo sapiens
accgcaacctcttcc

SEQ ID NO: 1217444 - DNA, 15 bp, Homo sapiens
caccgcaacctcttc

SEQ ID NO: 1217445 - DNA, 15 bp, Homo sapiens
tcaccgcaacctctt

SEQ ID NO: 1217446 - DNA, 15 bp, Homo sapiens
ctcaccgcaacctct

SEQ ID NO: 1217447 - DNA, 15 bp, Homo sapiens
ggctcaccgcaacct

SEQ ID NO: 1217448 - DNA, 15 bp, Homo sapiens
agtttcccaggctgg

SEQ ID NO: 1217449 - DNA, 15 bp, Homo sapiens
gagtttcccaggctg

SEQ ID NO: 1217450 - DNA, 15 bp, Homo sapiens
agagtttcccaggct

SEQ ID NO: 1217451 - DNA, 15 bp, Homo sapiens
cagagtttcccaggc

SEQ ID NO: 1217452 - DNA, 15 bp, Homo sapiens
acagagtttcccagg

SEQ ID NO: 1217453 - DNA, 15 bp, Homo sapiens
gacagagtttcccag

SEQ ID NO: 1217454 - DNA, 15 bp, Homo sapiens
agacagagtttccca

SEQ ID NO: 1217455 - DNA, 15 bp, Homo sapiens
gagacagagtttccc

SEQ ID NO: 1217456 - DNA, 15 bp, Homo sapiens
tgagacagagtttcc

SEQ ID NO: 1217457 - DNA, 15 bp, Homo sapiens
tgtttttttgagaca

SEQ ID NO: 1217458 - DNA, 15 bp, Homo sapiens
ttgtttttttgagac

SEQ ID NO: 1217459 - DNA, 15 bp, Homo sapiens
tttgtttttttgaga

SEQ ID NO: 1217460 - DNA, 15 bp, Homo sapiens
ttttgtttttttgag

SEQ ID NO: 1217461 - DNA, 15 bp, Homo sapiens
gttttgtttttttga

SEQ ID NO: 1217462 - DNA, 15 bp, Homo sapiens
tgttttgtttttttg

SEQ ID NO: 1217463 - DNA, 15 bp, Homo sapiens
gtgttttgttttgtt

SEQ ID NO: 1217464 - DNA, 15 bp, Homo sapiens
tgtgttttgttttgt

SEQ ID NO: 1217465 - DNA, 15 bp, Homo sapiens
ttgtgttttgttttg

SEQ ID NO: 1217466 - DNA, 15 bp, Homo sapiens
gttgtgttttgtttt

SEQ ID NO: 1217467 - DNA, 15 bp, Homo sapiens
tgttgtgttttgttt

SEQ ID NO: 1217468 - DNA, 15 bp, Homo sapiens
ttgttgtgttttgtt

SEQ ID NO: 1217469 - DNA, 15 bp, Homo sapiens
tttgttgtgttttgt

SEQ ID NO: 1217470 - DNA, 15 bp, Homo sapiens
ttttgttgtgttttg

SEQ ID NO: 1217471 - DNA, 15 bp, Homo sapiens
tttttgttgtgtttt

SEQ ID NO: 1217472 - DNA, 15 bp, Homo sapiens
gtttttgttgtgttt

SEQ ID NO: 1217473 - DNA, 15 bp, Homo sapiens
ggtttttgttgtgtt

SEQ ID NO: 1217474 - DNA, 15 bp, Homo sapiens
gggtttttgttgtgt

SEQ ID NO: 1217475 - DNA, 15 bp, Homo sapiens
tgggtttttgttgtg

SEQ ID NO: 1217476 - DNA, 15 bp, Homo sapiens
ttgggtttttgttgt

SEQ ID NO: 1217477 - DNA, 15 bp, Homo sapiens
tttgggtttttgttg

SEQ ID NO: 1217478 - DNA, 15 bp, Homo sapiens
ttttgggtttttgtt

SEQ ID NO: 1217479 - DNA, 15 bp, Homo sapiens
tttttgggtttttgt

SEQ ID NO: 1217480 - DNA, 15 bp, Homo sapiens
ctttttgggtttttg

SEQ ID NO: 1217481 - DNA, 15 bp, Homo sapiens
tctttttgggttttt

SEQ ID NO: 1217482 - DNA, 15 bp, Homo sapiens
ctctttttgggtttt

SEQ ID NO: 1217483 - DNA, 15 bp, Homo sapiens
gctctttttgggttt

SEQ ID NO: 1217484 - DNA, 15 bp, Homo sapiens
tgctctttttgggtt

SEQ ID NO: 1217485 - DNA, 15 bp, Homo sapiens
ctgctctttttgggt

SEQ ID NO: 1217486 - DNA, 15 bp, Homo sapiens
tctgctctttttggg

SEQ ID NO: 1217487 - DNA, 15 bp, Homo sapiens
gtctgctctttttgg

SEQ ID NO: 1217488 - DNA, 15 bp, Homo sapiens
agtctgctctttttg

SEQ ID NO: 1217489 - DNA, 15 bp, Homo sapiens
cagtctgctcttttt

SEQ ID NO: 1217490 - DNA, 15 bp, Homo sapiens
tcagtctgctctttt

SEQ ID NO: 1217491 - DNA, 15 bp, Homo sapiens
gtcagtctgctcttt

SEQ ID NO: 1217492 - DNA, 15 bp, Homo sapiens
ggtcagtctgctctt

SEQ ID NO: 1217493 - DNA, 15 bp, Homo sapiens
tggtcagtctgctct

SEQ ID NO: 1217494 - DNA, 15 bp, Homo sapiens
ctggtcagtctgctc

SEQ ID NO: 1217495 - DNA, 15 bp, Homo sapiens
cctggtcagtctgct

SEQ ID NO: 1217496 - DNA, 15 bp, Homo sapiens
gcctggtcagtctgc

SEQ ID NO: 1217497 - DNA, 15 bp, Homo sapiens
ggcctggtcagtctg

SEQ ID NO: 1217498 - DNA, 15 bp, Homo sapiens
cggcctggtcagtct

SEQ ID NO: 1217499 - DNA, 15 bp, Homo sapiens
acggcctggtcagtc

SEQ ID NO: 1217500 - DNA, 15 bp, Homo sapiens
gacggcctggtcagt

SEQ ID NO: 1217501 - DNA, 15 bp, Homo sapiens
agacggcctggtcag

SEQ ID NO: 1217502 - DNA, 15 bp, Homo sapiens
cagacggcctggtca

SEQ ID NO: 1217503 - DNA, 15 bp, Homo sapiens
ccagacggcctggtc

SEQ ID NO: 1217504 - DNA, 15 bp, Homo sapiens
cccagacggcctggt

SEQ ID NO: 1217505 - DNA, 15 bp, Homo sapiens
acccagacggcctgg

SEQ ID NO: 1217506 - DNA, 15 bp, Homo sapiens
aacccagacggcctg

SEQ ID NO: 1217507 - DNA, 15 bp, Homo sapiens
gaacccagacggcct

SEQ ID NO: 1217508 - DNA, 15 bp, Homo sapiens
tgaacccagacggcc

SEQ ID NO: 1217509 - DNA, 15 bp, Homo sapiens
atgaacccagacggc

SEQ ID NO: 1217510 - DNA, 15 bp, Homo sapiens
tatgaacccagacgg

SEQ ID NO: 1217511 - DNA, 15 bp, Homo sapiens
ttatgaacccagacg

SEQ ID NO: 1217512 - DNA, 15 bp, Homo sapiens
gttatgaacccagac

SEQ ID NO: 1217513 - DNA, 15 bp, Homo sapiens
ggttatgaacccaga

SEQ ID NO: 1217514 - DNA, 15 bp, Homo sapiens
aggttatgaacccag

SEQ ID NO: 1217515 - DNA, 15 bp, Homo sapiens
caggttatgaaccca

SEQ ID NO: 1217516 - DNA, 15 bp, Homo sapiens
ccaggttatgaaccc

SEQ ID NO: 1217517 - DNA, 15 bp, Homo sapiens
gccaggttatgaacc

SEQ ID NO: 1217518 - DNA, 15 bp, Homo sapiens
agccaggttatgaac

SEQ ID NO: 1217519 - DNA, 15 bp, Homo sapiens
gagccaggttatgaa

SEQ ID NO: 1217520 - DNA, 15 bp, Homo sapiens
agagccaggttatga

SEQ ID NO: 1217521 - DNA, 15 bp, Homo sapiens
cagagccaggttatg

SEQ ID NO: 1217522 - DNA, 15 bp, Homo sapiens
gcagagccaggttat

SEQ ID NO: 1217523 - DNA, 15 bp, Homo sapiens
ggcagagccaggtta

SEQ ID NO: 1217524 - DNA, 15 bp, Homo sapiens
tggcagagccaggtt

SEQ ID NO: 1217525 - DNA, 15 bp, Homo sapiens
gtggcagagccaggt

SEQ ID NO: 1217526 - DNA, 15 bp, Homo sapiens
agtggcagagccagg

SEQ ID NO: 1217527 - DNA, 15 bp, Homo sapiens
cagtggcagagccag

SEQ ID NO: 1217528 - DNA, 15 bp, Homo sapiens
tcagtggcagagcca

SEQ ID NO: 1217529 - DNA, 15 bp, Homo sapiens
gtcagtggcagagcc

SEQ ID NO: 1217530 - DNA, 15 bp, Homo sapiens
agtcagtggcagagc

SEQ ID NO: 1217531 - DNA, 15 bp, Homo sapiens
gagtcagtggcagag

SEQ ID NO: 1217532 - DNA, 15 bp, Homo sapiens
cgagtcagtggcaga

SEQ ID NO: 1217533 - DNA, 15 bp, Homo sapiens
gcgagtcagtggcag

SEQ ID NO: 1217534 - DNA, 15 bp, Homo sapiens
agcgagtcagtggca

SEQ ID NO: 1217535 - DNA, 15 bp, Homo sapiens
cagcgagtcagtggc

SEQ ID NO: 1217536 - DNA, 15 bp, Homo sapiens
ccagcgagtcagtgg

SEQ ID NO: 1217537 - DNA, 15 bp, Homo sapiens
cccagcgagtcagtg

SEQ ID NO: 1217538 - DNA, 15 bp, Homo sapiens
acccagcgagtcagt

SEQ ID NO: 1217539 - DNA, 15 bp, Homo sapiens
cacccagcgagtcag

SEQ ID NO: 1217540 - DNA, 15 bp, Homo sapiens
tcacccagcgagtca

SEQ ID NO: 1217541 - DNA, 15 bp, Homo sapiens
gtcacccagcgagtc

SEQ ID NO: 1217542 - DNA, 15 bp, Homo sapiens
tgtcacccagcgagt

SEQ ID NO: 1217543 - DNA, 15 bp, Homo sapiens
ctgtcacccagcgag

SEQ ID NO: 1217544 - DNA, 15 bp, Homo sapiens
cctgtcacccagcga

SEQ ID NO: 1217545 - DNA, 15 bp, Homo sapiens
gcctgtcacccagcg

SEQ ID NO: 1217546 - DNA, 15 bp, Homo sapiens
tgcctgtcacccagc

SEQ ID NO: 1217547 - DNA, 15 bp, Homo sapiens
gtgcctgtcacccag

SEQ ID NO: 1217548 - DNA, 15 bp, Homo sapiens
ggtgcctgtcaccca

SEQ ID NO: 1217549 - DNA, 15 bp, Homo sapiens
aggtgcctgtcaccc

SEQ ID NO: 1217550 - DNA, 15 bp, Homo sapiens
gaggtgcctgtcacc

SEQ ID NO: 1217551 - DNA, 15 bp, Homo sapiens
tgaggtgcctgtcac

SEQ ID NO: 1217552 - DNA, 15 bp, Homo sapiens
ctgaggtgcctgtca

SEQ ID NO: 1217553 - DNA, 15 bp, Homo sapiens
tctgaggtgcctgtc

SEQ ID NO: 1217554 - DNA, 15 bp, Homo sapiens
ctctgaggtgcctgt

SEQ ID NO: 1217555 - DNA, 15 bp, Homo sapiens
gctctgaggtgcctg

SEQ ID NO: 1217556 - DNA, 15 bp, Homo sapiens
ggctctgaggtgcct

SEQ ID NO: 1217557 - DNA, 15 bp, Homo sapiens
aggctctgaggtgcc

SEQ ID NO: 1217558 - DNA, 15 bp, Homo sapiens
gaggctctgaggtgc

SEQ ID NO: 1217559 - DNA, 15 bp, Homo sapiens
tgaggctctgaggtg

SEQ ID NO: 1217560 - DNA, 15 bp, Homo sapiens
ctgaggctctgaggt

SEQ ID NO: 1217561 - DNA, 15 bp, Homo sapiens
actgaggctctgagg

SEQ ID NO: 1217562 - DNA, 15 bp, Homo sapiens
aactgaggctctgag

SEQ ID NO: 1217563 - DNA, 15 bp, Homo sapiens
aaactgaggctctga

SEQ ID NO: 1217564 - DNA, 15 bp, Homo sapiens
gaaactgaggctctg

SEQ ID NO: 1217565 - DNA, 15 bp, Homo sapiens
ggaaactgaggctct

SEQ ID NO: 1217566 - DNA, 15 bp, Homo sapiens
gggaaactgaggctc

SEQ ID NO: 1217567 - DNA, 15 bp, Homo sapiens
ggggaaactgaggct

SEQ ID NO: 1217568 - DNA, 15 bp, Homo sapiens
tcaggtggggaaact

SEQ ID NO: 1217569 - DNA, 15 bp, Homo sapiens
gtcaggtggggaaac

SEQ ID NO: 1217570 - DNA, 15 bp, Homo sapiens
tgtcaggtggggaaa

SEQ ID NO: 1217571 - DNA, 15 bp, Homo sapiens
ttgtcaggtggggaa

SEQ ID NO: 1217572 - DNA, 15 bp, Homo sapiens
attgtcaggtgggga

SEQ ID NO: 1217573 - DNA, 15 bp, Homo sapiens
cattgtcaggtgggg

SEQ ID NO: 1217574 - DNA, 15 bp, Homo sapiens
ccattgtcaggtggg

SEQ ID NO: 1217575 - DNA, 15 bp, Homo sapiens
tccattgtcaggtgg

SEQ ID NO: 1217576 - DNA, 15 bp, Homo sapiens
ctccattgtcaggtg

SEQ ID NO: 1217577 - DNA, 15 bp, Homo sapiens
tctccattgtcaggt

SEQ ID NO: 1217578 - DNA, 15 bp, Homo sapiens
gtctccattgtcagg

SEQ ID NO: 1217579 - DNA, 15 bp, Homo sapiens
tgtctccattgtcag

SEQ ID NO: 1217580 - DNA, 15 bp, Homo sapiens
ttgtctccattgtca

SEQ ID NO: 1217581 - DNA, 15 bp, Homo sapiens
tttgtctccattgtc

SEQ ID NO: 1217582 - DNA, 15 bp, Homo sapiens
ctttgtctccattgt

SEQ ID NO: 1217583 - DNA, 15 bp, Homo sapiens
gctttgtctccattg

SEQ ID NO: 1217584 - DNA, 15 bp, Homo sapiens
agctttgtctccatt

SEQ ID NO: 1217585 - DNA, 15 bp, Homo sapiens
tagctttgtctccat

SEQ ID NO: 1217586 - DNA, 15 bp, Homo sapiens
ttagctttgtctcca

SEQ ID NO: 1217587 - DNA, 15 bp, Homo sapiens
attagctttgtctcc

SEQ ID NO: 1217588 - DNA, 15 bp, Homo sapiens
gattagctttgtctc

SEQ ID NO: 1217589 - DNA, 15 bp, Homo sapiens
agattagctttgtct

SEQ ID NO: 1217590 - DNA, 15 bp, Homo sapiens
gagattagctttgtc

SEQ ID NO: 1217591 - DNA, 15 bp, Homo sapiens
ggagattagctttgt

SEQ ID NO: 1217592 - DNA, 15 bp, Homo sapiens
gggagattagctttg

SEQ ID NO: 1217593 - DNA, 15 bp, Homo sapiens
ggggagattagcttt

SEQ ID NO: 1217594 - DNA, 15 bp, Homo sapiens
gggggagattagctt

SEQ ID NO: 1217595 - DNA, 15 bp, Homo sapiens
agggggagattagct

SEQ ID NO: 1217596 - DNA, 15 bp, Homo sapiens
gagggggagattagc

SEQ ID NO: 1217597 - DNA, 15 bp, Homo sapiens
ggagggggagattag

SEQ ID NO: 1217598 - DNA, 15 bp, Homo sapiens
gggagggggagatta

SEQ ID NO: 1217599 - DNA, 15 bp, Homo sapiens
ggggagggggagatt

SEQ ID NO: 1217600 - DNA, 15 bp, Homo sapiens
tggggagggggagat

SEQ ID NO: 1217601 - DNA, 15 bp, Homo sapiens
ctggggagggggaga

SEQ ID NO: 1217602 - DNA, 15 bp, Homo sapiens
cctggggagggggag

SEQ ID NO: 1217603 - DNA, 15 bp, Homo sapiens
ccctggggaggggga

SEQ ID NO: 1217604 - DNA, 15 bp, Homo sapiens
cccctggggaggggg

SEQ ID NO: 1217605 - DNA, 15 bp, Homo sapiens
gcccctggggagggg

SEQ ID NO: 1217606 - DNA, 15 bp, Homo sapiens
agcccctggggaggg

SEQ ID NO: 1217607 - DNA, 15 bp, Homo sapiens
gagcccctggggagg

SEQ ID NO: 1217608 - DNA, 15 bp, Homo sapiens
agagcccctggggag

SEQ ID NO: 1217609 - DNA, 15 bp, Homo sapiens
cagagcccctgggga

SEQ ID NO: 1217610 - DNA, 15 bp, Homo sapiens
ccagagcccctgggg

SEQ ID NO: 1217611 - DNA, 15 bp, Homo sapiens
tccagagcccctggg

SEQ ID NO: 1217612 - DNA, 15 bp, Homo sapiens
ttccagagcccctgg

SEQ ID NO: 1217613 - DNA, 15 bp, Homo sapiens
cttccagagcccctg

SEQ ID NO: 1217614 - DNA, 15 bp, Homo sapiens
acttccagagcccct

SEQ ID NO: 1217615 - DNA, 15 bp, Homo sapiens
cacttccagagcccc

SEQ ID NO: 1217616 - DNA, 15 bp, Homo sapiens
ccacttccagagccc

SEQ ID NO: 1217617 - DNA, 15 bp, Homo sapiens
cccacttccagagcc

SEQ ID NO: 1217618 - DNA, 15 bp, Homo sapiens
ccccacttccagagc

SEQ ID NO: 1217619 - DNA, 15 bp, Homo sapiens
gccccacttccagag

SEQ ID NO: 1217620 - DNA, 15 bp, Homo sapiens
tgccccacttccaga

SEQ ID NO: 1217621 - DNA, 15 bp, Homo sapiens
ctgccccacttccag

SEQ ID NO: 1217622 - DNA, 15 bp, Homo sapiens
cctgccccacttcca

SEQ ID NO: 1217623 - DNA, 15 bp, Homo sapiens
tcctgccccacttcc

SEQ ID NO: 1217624 - DNA, 15 bp, Homo sapiens
atcctgccccacttc

SEQ ID NO: 1217625 - DNA, 15 bp, Homo sapiens
catcctgccccactt

SEQ ID NO: 1217626 - DNA, 15 bp, Homo sapiens
ccatcctgccccact

SEQ ID NO: 1217627 - DNA, 15 bp, Homo sapiens
cccatcctgccccac

SEQ ID NO: 1217628 - DNA, 15 bp, Homo sapiens
ccccatcctgcccca

SEQ ID NO: 1217629 - DNA, 15 bp, Homo sapiens
gccccatcctgcccc

SEQ ID NO: 1217630 - DNA, 15 bp, Homo sapiens
agccccatcctgccc

SEQ ID NO: 1217631 - DNA, 15 bp, Homo sapiens
cagccccatcctgcc

SEQ ID NO: 1217632 - DNA, 15 bp, Homo sapiens
gcagccccatcctgc

SEQ ID NO: 1217633 - DNA, 15 bp, Homo sapiens
cgcagccccatcctg

SEQ ID NO: 1217634 - DNA, 15 bp, Homo sapiens
gcgcagccccatcct

SEQ ID NO: 1217635 - DNA, 15 bp, Homo sapiens
tgcgcagccccatcc

SEQ ID NO: 1217636 - DNA, 15 bp, Homo sapiens
ctgcgcagccccatc

SEQ ID NO: 1217637 - DNA, 15 bp, Homo sapiens
cctgcgcagccccat

SEQ ID NO: 1217638 - DNA, 15 bp, Homo sapiens
gcctgcgcagcccca

SEQ ID NO: 1217639 - DNA, 15 bp, Homo sapiens
cgcctgcgcagcccc

SEQ ID NO: 1217640 - DNA, 15 bp, Homo sapiens
gcgcctgcgcagccc

SEQ ID NO: 1217641 - DNA, 15 bp, Homo sapiens
agcgcctgcgcagcc

SEQ ID NO: 1217642 - DNA, 15 bp, Homo sapiens
gagcgcctgcgcagc

SEQ ID NO: 1217643 - DNA, 15 bp, Homo sapiens
cgagcgcctgcgcag

SEQ ID NO: 1217644 - DNA, 15 bp, Homo sapiens
ccgagcgcctgcgca

SEQ ID NO: 1217645 - DNA, 15 bp, Homo sapiens
tccgagcgcctgcgc

SEQ ID NO: 1217646 - DNA, 15 bp, Homo sapiens
ctccgagcgcctgcg

SEQ ID NO: 1217647 - DNA, 15 bp, Homo sapiens
tctccgagcgcctgc

SEQ ID NO: 1217648 - DNA, 15 bp, Homo sapiens
gtctccgagcgcctg

SEQ ID NO: 1217649 - DNA, 15 bp, Homo sapiens
tgtctccgagcgcct

SEQ ID NO: 1217650 - DNA, 15 bp, Homo sapiens
ttgtctccgagcgcc

SEQ ID NO: 1217651 - DNA, 15 bp, Homo sapiens
tttgtctccgagcgc

SEQ ID NO: 1217652 - DNA, 15 bp, Homo sapiens
ctttgtctccgagcg

SEQ ID NO: 1217653 - DNA, 15 bp, Homo sapiens
cctttgtctccgagc

SEQ ID NO: 1217654 - DNA, 15 bp, Homo sapiens
gcctttgtctccgag

SEQ ID NO: 1217655 - DNA, 15 bp, Homo sapiens
tgcctttgtctccga

SEQ ID NO: 1217656 - DNA, 15 bp, Homo sapiens
ctgcctttgtctccg

SEQ ID NO: 1217657 - DNA, 15 bp, Homo sapiens
cctgcctttgtctcc

SEQ ID NO: 1217658 - DNA, 15 bp, Homo sapiens
ccctgcctttgtctc

SEQ ID NO: 1217659 - DNA, 15 bp, Homo sapiens
gccctgcctttgtct

SEQ ID NO: 1217660 - DNA, 15 bp, Homo sapiens
ggccctgcctttgtc

SEQ ID NO: 1217661 - DNA, 15 bp, Homo sapiens
aggccctgcctttgt

SEQ ID NO: 1217662 - DNA, 15 bp, Homo sapiens
caggccctgcctttg

SEQ ID NO: 1217663 - DNA, 15 bp, Homo sapiens
acaggccctgccttt

SEQ ID NO: 1217664 - DNA, 15 bp, Homo sapiens
gacaggccctgcctt

SEQ ID NO: 1217665 - DNA, 15 bp, Homo sapiens
tgacaggccctgcct

SEQ ID NO: 1217666 - DNA, 15 bp, Homo sapiens
atgacaggccctgcc

SEQ ID NO: 1217667 - DNA, 15 bp, Homo sapiens
gatgacaggccctgc

SEQ ID NO: 1217668 - DNA, 15 bp, Homo sapiens
agatgacaggccctg

SEQ ID NO: 1217669 - DNA, 15 bp, Homo sapiens
aagatgacaggccct

SEQ ID NO: 1217670 - DNA, 15 bp, Homo sapiens
aaagatgacaggccc

SEQ ID NO: 1217671 - DNA, 15 bp, Homo sapiens
gaaagatgacaggcc

SEQ ID NO: 1217672 - DNA, 15 bp, Homo sapiens
ggaaagatgacaggc

SEQ ID NO: 1217673 - DNA, 15 bp, Homo sapiens
aggaaagatgacagg

SEQ ID NO: 1217674 - DNA, 15 bp, Homo sapiens
caggaaagatgacag

SEQ ID NO: 1217675 - DNA, 15 bp, Homo sapiens
gcaggaaagatgaca

SEQ ID NO: 1217676 - DNA, 15 bp, Homo sapiens
cgcaggaaagatgac

SEQ ID NO: 1217677 - DNA, 15 bp, Homo sapiens
acgcaggaaagatga

SEQ ID NO: 1217678 - DNA, 15 bp, Homo sapiens
gacgcaggaaagatg

SEQ ID NO: 1217679 - DNA, 15 bp, Homo sapiens
ggacgcaggaaagat

SEQ ID NO: 1217680 - DNA, 15 bp, Homo sapiens
tggacgcaggaaaga

SEQ ID NO: 1217681 - DNA, 15 bp, Homo sapiens
gtggacgcaggaaag

SEQ ID NO: 1217682 - DNA, 15 bp, Homo sapiens
cgtggacgcaggaaa

SEQ ID NO: 1217683 - DNA, 15 bp, Homo sapiens
ccgtggacgcaggaa

SEQ ID NO: 1217684 - DNA, 15 bp, Homo sapiens
cccgtggacgcagga

SEQ ID NO: 1217685 - DNA, 15 bp, Homo sapiens
ccccgtggacgcagg

SEQ ID NO: 1217686 - DNA, 15 bp, Homo sapiens
accccgtggacgcag

SEQ ID NO: 1217687 - DNA, 15 bp, Homo sapiens
caccccgtggacgca

SEQ ID NO: 1217688 - DNA, 15 bp, Homo sapiens
ccaccccgtggacgc

SEQ ID NO: 1217689 - DNA, 15 bp, Homo sapiens
gccaccccgtggacg

SEQ ID NO: 1217690 - DNA, 15 bp, Homo sapiens
tgccaccccgtggac

SEQ ID NO: 1217691 - DNA, 15 bp, Homo sapiens
gtgccaccccgtgga

SEQ ID NO: 1217692 - DNA, 15 bp, Homo sapiens
agtgccaccccgtgg

SEQ ID NO: 1217693 - DNA, 15 bp, Homo sapiens
aagtgccaccccgtg

SEQ ID NO: 1217694 - DNA, 15 bp, Homo sapiens
gaagtgccaccccgt

SEQ ID NO: 1217695 - DNA, 15 bp, Homo sapiens
ggaagtgccaccccg

SEQ ID NO: 1217696 - DNA, 15 bp, Homo sapiens
aggaagtgccacccc

SEQ ID NO: 1217697 - DNA, 15 bp, Homo sapiens
aaggaagtgccaccc

SEQ ID NO: 1217698 - DNA, 15 bp, Homo sapiens
gaaggaagtgccacc

SEQ ID NO: 1217699 - DNA, 15 bp, Homo sapiens
ggaaggaagtgccac

SEQ ID NO: 1217700 - DNA, 15 bp, Homo sapiens
aggaaggaagtgcca

SEQ ID NO: 1217701 - DNA, 15 bp, Homo sapiens
caggaaggaagtgcc

SEQ ID NO: 1217702 - DNA, 15 bp, Homo sapiens
gcaggaaggaagtgc

SEQ ID NO: 1217703 - DNA, 15 bp, Homo sapiens
ggcaggaaggaagtg

SEQ ID NO: 1217704 - DNA, 15 bp, Homo sapiens
aggcaggaaggaagt

SEQ ID NO: 1217705 - DNA, 15 bp, Homo sapiens
aaggcaggaaggaag

SEQ ID NO: 1217706 - DNA, 15 bp, Homo sapiens
gaaggcaggaaggaa

SEQ ID NO: 1217707 - DNA, 15 bp, Homo sapiens
ggaaggcaggaagga

SEQ ID NO: 1217708 - DNA, 15 bp, Homo sapiens
cggaaggcaggaagg

SEQ ID NO: 1217709 - DNA, 15 bp, Homo sapiens
gcggaaggcaggaag

SEQ ID NO: 1217710 - DNA, 15 bp, Homo sapiens
ggcggaaggcaggaa

SEQ ID NO: 1217711 - DNA, 15 bp, Homo sapiens
aggcggaaggcagga

SEQ ID NO: 1217712 - DNA, 15 bp, Homo sapiens
aaggcggaaggcagg

SEQ ID NO: 1217713 - DNA, 15 bp, Homo sapiens
aaaggcggaaggcag

SEQ ID NO: 1217714 - DNA, 15 bp, Homo sapiens
aaaaggcggaaggca

SEQ ID NO: 1217715 - DNA, 15 bp, Homo sapiens
caaaaggcggaaggc

SEQ ID NO: 1217716 - DNA, 15 bp, Homo sapiens
acaaaaggcggaagg

SEQ ID NO: 1217717 - DNA, 15 bp, Homo sapiens
aacaaaaggcggaag

SEQ ID NO: 1217718 - DNA, 15 bp, Homo sapiens
aaacaaaaggcggaa

SEQ ID NO: 1217719 - DNA, 15 bp, Homo sapiens
aaaacaaaaggcgga

SEQ ID NO: 1217720 - DNA, 15 bp, Homo sapiens
caaaacaaaaggcgg

SEQ ID NO: 1217721 - DNA, 15 bp, Homo sapiens
ccaaaacaaaaggcg

SEQ ID NO: 1217722 - DNA, 15 bp, Homo sapiens
cccaaaacaaaaggc

SEQ ID NO: 1217723 - DNA, 15 bp, Homo sapiens
tcccaaaacaaaagg

SEQ ID NO: 1217724 - DNA, 15 bp, Homo sapiens
gtcccaaaacaaaag

SEQ ID NO: 1217725 - DNA, 15 bp, Homo sapiens
cgtcccaaaacaaaa

SEQ ID NO: 1217726 - DNA, 15 bp, Homo sapiens
gcgtcccaaaacaaa

SEQ ID NO: 1217727 - DNA, 15 bp, Homo sapiens
agcgtcccaaaacaa

SEQ ID NO: 1217728 - DNA, 15 bp, Homo sapiens
aagcgtcccaaaaca

SEQ ID NO: 1217729 - DNA, 15 bp, Homo sapiens
gaagcgtcccaaaac

SEQ ID NO: 1217730 - DNA, 15 bp, Homo sapiens
ggaagcgtcccaaaa

SEQ ID NO: 1217731 - DNA, 15 bp, Homo sapiens
tggaagcgtcccaaa

SEQ ID NO: 1217732 - DNA, 15 bp, Homo sapiens
ttggaagcgtcccaa

SEQ ID NO: 1217733 - DNA, 15 bp, Homo sapiens
tttggaagcgtccca

SEQ ID NO: 1217734 - DNA, 15 bp, Homo sapiens
ttttggaagcgtccc

SEQ ID NO: 1217735 - DNA, 15 bp, Homo sapiens
gttttggaagcgtcc

SEQ ID NO: 1217736 - DNA, 15 bp, Homo sapiens
cgttttggaagcgtc

SEQ ID NO: 1217737 - DNA, 15 bp, Homo sapiens
gcgttttggaagcgt

SEQ ID NO: 1217738 - DNA, 15 bp, Homo sapiens
ggcgttttggaagcg

SEQ ID NO: 1217739 - DNA, 15 bp, Homo sapiens
gggcgttttggaagc

SEQ ID NO: 1217740 - DNA, 15 bp, Homo sapiens
ggggcgttttggaag

SEQ ID NO: 1217741 - DNA, 15 bp, Homo sapiens
aggggcgttttggaa

SEQ ID NO: 1217742 - DNA, 15 bp, Homo sapiens
caggggcgttttgga

SEQ ID NO: 1217743 - DNA, 15 bp, Homo sapiens
ccaggggcgttttgg

SEQ ID NO: 1217744 - DNA, 15 bp, Homo sapiens
cccaggggcgttttg

SEQ ID NO: 1217745 - DNA, 15 bp, Homo sapiens
tcccaggggcgtttt

SEQ ID NO: 1217746 - DNA, 15 bp, Homo sapiens
ctcccaggggcgttt

SEQ ID NO: 1217747 - DNA, 15 bp, Homo sapiens
cctcccaggggcgtt

SEQ ID NO: 1217748 - DNA, 15 bp, Homo sapiens
ccctcccaggggcgt

SEQ ID NO: 1217749 - DNA, 15 bp, Homo sapiens
tccctcccaggggcg

SEQ ID NO: 1217750 - DNA, 15 bp, Homo sapiens
ttccctcccaggggc

SEQ ID NO: 1217751 - DNA, 15 bp, Homo sapiens
tttccctcccagggg

SEQ ID NO: 1217752 - DNA, 15 bp, Homo sapiens
ttttccctcccaggg

SEQ ID NO: 1217753 - DNA, 15 bp, Homo sapiens
gttttccctcccagg

SEQ ID NO: 1217754 - DNA, 15 bp, Homo sapiens
agttttccctcccag

SEQ ID NO: 1217755 - DNA, 15 bp, Homo sapiens
cagttttccctccca

SEQ ID NO: 1217756 - DNA, 15 bp, Homo sapiens
tcagttttccctccc

SEQ ID NO: 1217757 - DNA, 15 bp, Homo sapiens
ctcagttttccctcc

SEQ ID NO: 1217758 - DNA, 15 bp, Homo sapiens
gctcagttttccctc

SEQ ID NO: 1217759 - DNA, 15 bp, Homo sapiens
tgctcagttttccct

SEQ ID NO: 1217760 - DNA, 15 bp, Homo sapiens
ctgctcagttttccc

SEQ ID NO: 1217761 - DNA, 15 bp, Homo sapiens
gctgctcagttttcc

SEQ ID NO: 1217762 - DNA, 15 bp, Homo sapiens
ggctgctcagttttc

SEQ ID NO: 1217763 - DNA, 15 bp, Homo sapiens
gggctgctcagtttt

SEQ ID NO: 1217764 - DNA, 15 bp, Homo sapiens
tgggctgctcagttt

SEQ ID NO: 1217765 - DNA, 15 bp, Homo sapiens
gtgggctgctcagtt

SEQ ID NO: 1217766 - DNA, 15 bp, Homo sapiens
tgtgggctgctcagt

SEQ ID NO: 1217767 - DNA, 15 bp, Homo sapiens
gtgtgggctgctcag

SEQ ID NO: 1217768 - DNA, 15 bp, Homo sapiens
tgtgtgggctgctca

SEQ ID NO: 1217769 - DNA, 15 bp, Homo sapiens
ctgtgtgggctgctc

SEQ ID NO: 1217770 - DNA, 15 bp, Homo sapiens
cctgtgtgggctgct

SEQ ID NO: 1217771 - DNA, 15 bp, Homo sapiens
tcctgtgtgggctgc

SEQ ID NO: 1217772 - DNA, 15 bp, Homo sapiens
ttcctgtgtgggctg

SEQ ID NO: 1217773 - DNA, 15 bp, Homo sapiens
cttcctgtgtgggct

SEQ ID NO: 1217774 - DNA, 15 bp, Homo sapiens
gcttcctgtgtgggc

SEQ ID NO: 1217775 - DNA, 15 bp, Homo sapiens
cgcttcctgtgtggg

SEQ ID NO: 1217776 - DNA, 15 bp, Homo sapiens
acgcttcctgtgtgg

SEQ ID NO: 1217777 - DNA, 15 bp, Homo sapiens
gacgcttcctgtgtg

SEQ ID NO: 1217778 - DNA, 15 bp, Homo sapiens
ggacgcttcctgtgt

SEQ ID NO: 1217779 - DNA, 15 bp, Homo sapiens
aggacgcttcctgtg

SEQ ID NO: 1217780 - DNA, 15 bp, Homo sapiens
caggacgcttcctgt

SEQ ID NO: 1217781 - DNA, 15 bp, Homo sapiens
ccaggacgcttcctg

SEQ ID NO: 1217782 - DNA, 15 bp, Homo sapiens
tccaggacgcttcct

SEQ ID NO: 1217783 - DNA, 15 bp, Homo sapiens
ctccaggacgcttcc

SEQ ID NO: 1217784 - DNA, 15 bp, Homo sapiens
gctccaggacgcttc

SEQ ID NO: 1217785 - DNA, 15 bp, Homo sapiens
ggctccaggacgctt

SEQ ID NO: 1217786 - DNA, 15 bp, Homo sapiens
aggctccaggacgct

SEQ ID NO: 1217787 - DNA, 15 bp, Homo sapiens
caggctccaggacgc

SEQ ID NO: 1217788 - DNA, 15 bp, Homo sapiens
gcaggctccaggacg

SEQ ID NO: 1217789 - DNA, 15 bp, Homo sapiens
tgcaggctccaggac

SEQ ID NO: 1217790 - DNA, 15 bp, Homo sapiens
gtgcaggctccagga

SEQ ID NO: 1217791 - DNA, 15 bp, Homo sapiens
tgtgcaggctccagg

SEQ ID NO: 1217792 - DNA, 15 bp, Homo sapiens
gtgtgcaggctccag

SEQ ID NO: 1217793 - DNA, 15 bp, Homo sapiens
tgtgtgcaggctcca

SEQ ID NO: 1217794 - DNA, 15 bp, Homo sapiens
ctgtgtgcaggctcc

SEQ ID NO: 1217795 - DNA, 15 bp, Homo sapiens
cctgtgtgcaggctc

SEQ ID NO: 1217796 - DNA, 15 bp, Homo sapiens
gcctgtgtgcaggct

SEQ ID NO: 1217797 - DNA, 15 bp, Homo sapiens
cgcctgtgtgcaggc

SEQ ID NO: 1217798 - DNA, 15 bp, Homo sapiens
gcgcctgtgtgcagg

SEQ ID NO: 1217799 - DNA, 15 bp, Homo sapiens
agcgcctgtgtgcag

SEQ ID NO: 1217800 - DNA, 15 bp, Homo sapiens
gagcgcctgtgtgca

SEQ ID NO: 1217801 - DNA, 15 bp, Homo sapiens
cgagcgcctgtgtgc

SEQ ID NO: 1217802 - DNA, 15 bp, Homo sapiens
tcgagcgcctgtgtg

SEQ ID NO: 1217803 - DNA, 15 bp, Homo sapiens
atcgagcgcctgtgt

SEQ ID NO: 1217804 - DNA, 15 bp, Homo sapiens
tatcgagcgcctgtg

SEQ ID NO: 1217805 - DNA, 15 bp, Homo sapiens
ttatcgagcgcctgt

SEQ ID NO: 1217806 - DNA, 15 bp, Homo sapiens
attatcgagcgcctg

SEQ ID NO: 1217807 - DNA, 15 bp, Homo sapiens
aattatcgagcgcct

SEQ ID NO: 1217808 - DNA, 15 bp, Homo sapiens
caattatcgagcgcc

SEQ ID NO: 1217809 - DNA, 15 bp, Homo sapiens
gcaattatcgagcgc

SEQ ID NO: 1217810 - DNA, 15 bp, Homo sapiens
agcaattatcgagcg

SEQ ID NO: 1217811 - DNA, 15 bp, Homo sapiens
gagcaattatcgagc

SEQ ID NO: 1217812 - DNA, 15 bp, Homo sapiens
cgagcaattatcgag

SEQ ID NO: 1217813 - DNA, 15 bp, Homo sapiens
tcgagcaattatcga

SEQ ID NO: 1217814 - DNA, 15 bp, Homo sapiens
atcgagcaattatcg

SEQ ID NO: 1217815 - DNA, 15 bp, Homo sapiens
aatcgagcaattatc

SEQ ID NO: 1217816 - DNA, 15 bp, Homo sapiens
caatcgagcaattat

SEQ ID NO: 1217817 - DNA, 15 bp, Homo sapiens
tcaatcgagcaatta

SEQ ID NO: 1217818 - DNA, 15 bp, Homo sapiens
gtcaatcgagcaatt

SEQ ID NO: 1217819 - DNA, 15 bp, Homo sapiens
cgtcaatcgagcaat

SEQ ID NO: 1217820 - DNA, 15 bp, Homo sapiens
tcgtcaatcgagcaa

SEQ ID NO: 1217821 - DNA, 15 bp, Homo sapiens
ttcgtcaatcgagca

SEQ ID NO: 1217822 - DNA, 15 bp, Homo sapiens
tttcgtcaatcgagc

SEQ ID NO: 1217823 - DNA, 15 bp, Homo sapiens
atttcgtcaatcgag

SEQ ID NO: 1217824 - DNA, 15 bp, Homo sapiens
aatttcgtcaatcga

SEQ ID NO: 1217825 - DNA, 15 bp, Homo sapiens
caatttcgtcaatcg

SEQ ID NO: 1217826 - DNA, 15 bp, Homo sapiens
ccaatttcgtcaatc

SEQ ID NO: 1217827 - DNA, 15 bp, Homo sapiens
accaatttcgtcaat

SEQ ID NO: 1217828 - DNA, 15 bp, Homo sapiens
caccaatttcgtcaa

SEQ ID NO: 1217829 - DNA, 15 bp, Homo sapiens
gcaccaatttcgtca

SEQ ID NO: 1217830 - DNA, 15 bp, Homo sapiens
agcaccaatttcgtc

SEQ ID NO: 1217831 - DNA, 15 bp, Homo sapiens
gagcaccaatttcgt

SEQ ID NO: 1217832 - DNA, 15 bp, Homo sapiens
tgagcaccaatttcg

SEQ ID NO: 1217833 - DNA, 15 bp, Homo sapiens
ttgagcaccaatttc

SEQ ID NO: 1217834 - DNA, 15 bp, Homo sapiens
gttgagcaccaattt

SEQ ID NO: 1217835 - DNA, 15 bp, Homo sapiens
ggttgagcaccaatt

SEQ ID NO: 1217836 - DNA, 15 bp, Homo sapiens
tggttgagcaccaat

SEQ ID NO: 1217837 - DNA, 15 bp, Homo sapiens
ttggttgagcaccaa

SEQ ID NO: 1217838 - DNA, 15 bp, Homo sapiens
cttggttgagcacca

SEQ ID NO: 1217839 - DNA, 15 bp, Homo sapiens
acttggttgagcacc

SEQ ID NO: 1217840 - DNA, 15 bp, Homo sapiens
cacttggttgagcac

SEQ ID NO: 1217841 - DNA, 15 bp, Homo sapiens
ccacttggttgagca

SEQ ID NO: 1217842 - DNA, 15 bp, Homo sapiens
gccacttggttgagc

SEQ ID NO: 1217843 - DNA, 15 bp, Homo sapiens
tgccacttggttgag

SEQ ID NO: 1217844 - DNA, 15 bp, Homo sapiens
ttgccacttggttga

SEQ ID NO: 1217845 - DNA, 15 bp, Homo sapiens
tttgccacttggttg

SEQ ID NO: 1217846 - DNA, 15 bp, Homo sapiens
gtttgccacttggtt

SEQ ID NO: 1217847 - DNA, 15 bp, Homo sapiens
tgtttgccacttggt

SEQ ID NO: 1217848 - DNA, 15 bp, Homo sapiens
ctgtttgccacttgg

SEQ ID NO: 1217849 - DNA, 15 bp, Homo sapiens
cctgtttgccacttg

SEQ ID NO: 1217850 - DNA, 15 bp, Homo sapiens
tcctgtttgccactt

SEQ ID NO: 1217851 - DNA, 15 bp, Homo sapiens
atcctgtttgccact

SEQ ID NO: 1217852 - DNA, 15 bp, Homo sapiens
tatcctgtttgccac

SEQ ID NO: 1217853 - DNA, 15 bp, Homo sapiens
ttatcctgtttgcca

SEQ ID NO: 1217854 - DNA, 15 bp, Homo sapiens
cttatcctgtttgcc

SEQ ID NO: 1217855 - DNA, 15 bp, Homo sapiens
gcttatcctgtttgc

SEQ ID NO: 1217856 - DNA, 15 bp, Homo sapiens
cgcttatcctgtttg

SEQ ID NO: 1217857 - DNA, 15 bp, Homo sapiens
ccgcttatcctgttt

SEQ ID NO: 1217858 - DNA, 15 bp, Homo sapiens
cccgcttatcctgtt

SEQ ID NO: 1217859 - DNA, 15 bp, Homo sapiens
gcccgcttatcctgt

SEQ ID NO: 1217860 - DNA, 15 bp, Homo sapiens
agcccgcttatcctg

SEQ ID NO: 1217861 - DNA, 15 bp, Homo sapiens
gagcccgcttatcct

SEQ ID NO: 1217862 - DNA, 15 bp, Homo sapiens
tgagcccgcttatcc

SEQ ID NO: 1217863 - DNA, 15 bp, Homo sapiens
ctgagcccgcttatc

SEQ ID NO: 1217864 - DNA, 15 bp, Homo sapiens
tctgagcccgcttat

SEQ ID NO: 1217865 - DNA, 15 bp, Homo sapiens
atctgagcccgctta

SEQ ID NO: 1217866 - DNA, 15 bp, Homo sapiens
catctgagcccgctt

SEQ ID NO: 1217867 - DNA, 15 bp, Homo sapiens
ccatctgagcccgct

SEQ ID NO: 1217868 - DNA, 15 bp, Homo sapiens
gccatctgagcccgc

SEQ ID NO: 1217869 - DNA, 15 bp, Homo sapiens
ggccatctgagcccg

SEQ ID NO: 1217870 - DNA, 15 bp, Homo sapiens
tggccatctgagccc

SEQ ID NO: 1217871 - DNA, 15 bp, Homo sapiens
ctggccatctgagcc

SEQ ID NO: 1217872 - DNA, 15 bp, Homo sapiens
cctggccatctgagc

SEQ ID NO: 1217873 - DNA, 15 bp, Homo sapiens
tcctggccatctgag

SEQ ID NO: 1217874 - DNA, 15 bp, Homo sapiens
ttcctggccatctga

SEQ ID NO: 1217875 - DNA, 15 bp, Homo sapiens
tttcctggccatctg

SEQ ID NO: 1217876 - DNA, 15 bp, Homo sapiens
ttttcctggccatct

SEQ ID NO: 1217877 - DNA, 15 bp, Homo sapiens
gttttcctggccatc

SEQ ID NO: 1217878 - DNA, 15 bp, Homo sapiens
cgttttcctggccat

SEQ ID NO: 1217879 - DNA, 15 bp, Homo sapiens
ccgttttcctggcca

SEQ ID NO: 1217880 - DNA, 15 bp, Homo sapiens
cccgttttcctggcc

SEQ ID NO: 1217881 - DNA, 15 bp, Homo sapiens
tcccgttttcctggc

SEQ ID NO: 1217882 - DNA, 15 bp, Homo sapiens
ctcccgttttcctgg

SEQ ID NO: 1217883 - DNA, 15 bp, Homo sapiens
cctcccgttttcctg

SEQ ID NO: 1217884 - DNA, 15 bp, Homo sapiens
ccctcccgttttcct

SEQ ID NO: 1217885 - DNA, 15 bp, Homo sapiens
gccctcccgttttcc

SEQ ID NO: 1217886 - DNA, 15 bp, Homo sapiens
ggccctcccgttttc

SEQ ID NO: 1217887 - DNA, 15 bp, Homo sapiens
aggccctcccgtttt

SEQ ID NO: 1217888 - DNA, 15 bp, Homo sapiens
caggccctcccgttt

SEQ ID NO: 1217889 - DNA, 15 bp, Homo sapiens
ccaggccctcccgtt

SEQ ID NO: 1217890 - DNA, 15 bp, Homo sapiens
cccaggccctcccgt

SEQ ID NO: 1217891 - DNA, 15 bp, Homo sapiens
tcccaggccctcccg

SEQ ID NO: 1217892 - DNA, 15 bp, Homo sapiens
ctcccaggccctccc

SEQ ID NO: 1217893 - DNA, 15 bp, Homo sapiens
cctcccaggccctcc

SEQ ID NO: 1217894 - DNA, 15 bp, Homo sapiens
acctcccaggccctc

SEQ ID NO: 1217895 - DNA, 15 bp, Homo sapiens
cacctcccaggccct

SEQ ID NO: 1217896 - DNA, 15 bp, Homo sapiens
ccacctcccaggccc

SEQ ID NO: 1217897 - DNA, 15 bp, Homo sapiens
gccacctcccaggcc

SEQ ID NO: 1217898 - DNA, 15 bp, Homo sapiens
cgccacctcccaggc

SEQ ID NO: 1217899 - DNA, 15 bp, Homo sapiens
ccgccacctcccagg

SEQ ID NO: 1217900 - DNA, 15 bp, Homo sapiens
gccgccacctcccag

SEQ ID NO: 1217901 - DNA, 15 bp, Homo sapiens
agccgccacctccca

SEQ ID NO: 1217902 - DNA, 15 bp, Homo sapiens
gagccgccacctccc

SEQ ID NO: 1217903 - DNA, 15 bp, Homo sapiens
cgagccgccacctcc

SEQ ID NO: 1217904 - DNA, 15 bp, Homo sapiens
tcgagccgccacctc

SEQ ID NO: 1217905 - DNA, 15 bp, Homo sapiens
ctcgagccgccacct

SEQ ID NO: 1217906 - DNA, 15 bp, Homo sapiens
cctcgagccgccacc

SEQ ID NO: 1217907 - DNA, 15 bp, Homo sapiens
ccctcgagccgccac

SEQ ID NO: 1217908 - DNA, 15 bp, Homo sapiens
accctcgagccgcca

SEQ ID NO: 1217909 - DNA, 15 bp, Homo sapiens
caccctcgagccgcc

SEQ ID NO: 1217910 - DNA, 15 bp, Homo sapiens
gcaccctcgagccgc

SEQ ID NO: 1217911 - DNA, 15 bp, Homo sapiens
agcaccctcgagccg

SEQ ID NO: 1217912 - DNA, 15 bp, Homo sapiens
cagcaccctcgagcc

SEQ ID NO: 1217913 - DNA, 15 bp, Homo sapiens
tcagcaccctcgagc

SEQ ID NO: 1217914 - DNA, 15 bp, Homo sapiens
ctcagcaccctcgag

SEQ ID NO: 1217915 - DNA, 15 bp, Homo sapiens
tctcagcaccctcga

SEQ ID NO: 1217916 - DNA, 15 bp, Homo sapiens
gtctcagcaccctcg

SEQ ID NO: 1217917 - DNA, 15 bp, Homo sapiens
agtctcagcaccctc

SEQ ID NO: 1217918 - DNA, 15 bp, Homo sapiens
cagtctcagcaccct

SEQ ID NO: 1217919 - DNA, 15 bp, Homo sapiens
tcagtctcagcaccc

SEQ ID NO: 1217920 - DNA, 15 bp, Homo sapiens
ctcagtctcagcacc

SEQ ID NO: 1217921 - DNA, 15 bp, Homo sapiens
tctcagtctcagcac

SEQ ID NO: 1217922 - DNA, 15 bp, Homo sapiens
gtctcagtctcagca

SEQ ID NO: 1217923 - DNA, 15 bp, Homo sapiens
cgtctcagtctcagc

SEQ ID NO: 1217924 - DNA, 15 bp, Homo sapiens
ccgtctcagtctcag

SEQ ID NO: 1217925 - DNA, 15 bp, Homo sapiens
cccgtctcagtctca

SEQ ID NO: 1217926 - DNA, 15 bp, Homo sapiens
tcccgtctcagtctc

SEQ ID NO: 1217927 - DNA, 15 bp, Homo sapiens
ctcccgtctcagtct

SEQ ID NO: 1217928 - DNA, 15 bp, Homo sapiens
cctcccgtctcagtc

SEQ ID NO: 1217929 - DNA, 15 bp, Homo sapiens
ccctcccgtctcagt

SEQ ID NO: 1217930 - DNA, 15 bp, Homo sapiens
accctcccgtctcag

SEQ ID NO: 1217931 - DNA, 15 bp, Homo sapiens
caccctcccgtctca

SEQ ID NO: 1217932 - DNA, 15 bp, Homo sapiens
ccaccctcccgtctc

SEQ ID NO: 1217933 - DNA, 15 bp, Homo sapiens
cccaccctcccgtct

SEQ ID NO: 1217934 - DNA, 15 bp, Homo sapiens
gcccaccctcccgtc

SEQ ID NO: 1217935 - DNA, 15 bp, Homo sapiens
tgcccaccctcccgt

SEQ ID NO: 1217936 - DNA, 15 bp, Homo sapiens
ctgcccaccctcccg

SEQ ID NO: 1217937 - DNA, 15 bp, Homo sapiens
cctgcccaccctccc

SEQ ID NO: 1217938 - DNA, 15 bp, Homo sapiens
tcctgcccaccctcc

SEQ ID NO: 1217939 - DNA, 15 bp, Homo sapiens
gtcctgcccaccctc

SEQ ID NO: 1217940 - DNA, 15 bp, Homo sapiens
ggtcctgcccaccct

SEQ ID NO: 1217941 - DNA, 15 bp, Homo sapiens
cggtcctgcccaccc

SEQ ID NO: 1217942 - DNA, 15 bp, Homo sapiens
ccggtcctgcccacc

SEQ ID NO: 1217943 - DNA, 15 bp, Homo sapiens
cccggtcctgcccac

SEQ ID NO: 1217944 - DNA, 15 bp, Homo sapiens
ccccggtcctgccca

SEQ ID NO: 1217945 - DNA, 15 bp, Homo sapiens
accccggtcctgccc

SEQ ID NO: 1217946 - DNA, 15 bp, Homo sapiens
caccccggtcctgcc

SEQ ID NO: 1217947 - DNA, 15 bp, Homo sapiens
gcaccccggtcctgc

SEQ ID NO: 1217948 - DNA, 15 bp, Homo sapiens
tgcaccccggtcctg

SEQ ID NO: 1217949 - DNA, 15 bp, Homo sapiens
atgcaccccggtcct

SEQ ID NO: 1217950 - DNA, 15 bp, Homo sapiens
gatgcaccccggtcc

SEQ ID NO: 1217951 - DNA, 15 bp, Homo sapiens
ggatgcaccccggtc

SEQ ID NO: 1217952 - DNA, 15 bp, Homo sapiens
gggatgcaccccggt

SEQ ID NO: 1217953 - DNA, 15 bp, Homo sapiens
ggggatgcaccccgg

SEQ ID NO: 1217954 - DNA, 15 bp, Homo sapiens
tggggatgcaccccg

SEQ ID NO: 1217955 - DNA, 15 bp, Homo sapiens
ctggggatgcacccc

SEQ ID NO: 1217956 - DNA, 15 bp, Homo sapiens
cctggggatgcaccc

SEQ ID NO: 1217957 - DNA, 15 bp, Homo sapiens
gcctggggatgcacc

SEQ ID NO: 1217958 - DNA, 15 bp, Homo sapiens
tgcctggggatgcac

SEQ ID NO: 1217959 - DNA, 15 bp, Homo sapiens
ctgcctggggatgca

SEQ ID NO: 1217960 - DNA, 15 bp, Homo sapiens
cctgcctggggatgc

SEQ ID NO: 1217961 - DNA, 15 bp, Homo sapiens
ccctgcctggggatg

SEQ ID NO: 1217962 - DNA, 15 bp, Homo sapiens
cccctgcctggggat

SEQ ID NO: 1217963 - DNA, 15 bp, Homo sapiens
acccctgcctgggga

SEQ ID NO: 1217964 - DNA, 15 bp, Homo sapiens
cacccctgcctgggg

SEQ ID NO: 1217965 - DNA, 15 bp, Homo sapiens
ccacccctgcctggg

SEQ ID NO: 1217966 - DNA, 15 bp, Homo sapiens
cccacccctgcctgg

SEQ ID NO: 1217967 - DNA, 15 bp, Homo sapiens
ccccacccctgcctg

SEQ ID NO: 1217968 - DNA, 15 bp, Homo sapiens
tccccacccctgcct

SEQ ID NO: 1217969 - DNA, 15 bp, Homo sapiens
gtccccacccctgcc

SEQ ID NO: 1217970 - DNA, 15 bp, Homo sapiens
agtccccacccctgc

SEQ ID NO: 1217971 - DNA, 15 bp, Homo sapiens
cagtccccacccctg

SEQ ID NO: 1217972 - DNA, 15 bp, Homo sapiens
ccagtccccacccct

SEQ ID NO: 1217973 - DNA, 15 bp, Homo sapiens
cccagtccccacccc

SEQ ID NO: 1217974 - DNA, 15 bp, Homo sapiens
tcccagtccccaccc

SEQ ID NO: 1217975 - DNA, 15 bp, Homo sapiens
ctcccagtccccacc

SEQ ID NO: 1217976 - DNA, 15 bp, Homo sapiens
gctcccagtccccac

SEQ ID NO: 1217977 - DNA, 15 bp, Homo sapiens
tgctcccagtcccca

SEQ ID NO: 1217978 - DNA, 15 bp, Homo sapiens
gtgctcccagtcccc

SEQ ID NO: 1217979 - DNA, 15 bp, Homo sapiens
tgtgctcccagtccc

SEQ ID NO: 1217980 - DNA, 15 bp, Homo sapiens
ctgtgctcccagtcc

SEQ ID NO: 1217981 - DNA, 15 bp, Homo sapiens
gctgtgctcccagtc

SEQ ID NO: 1217982 - DNA, 15 bp, Homo sapiens
tgctgtgctcccagt

SEQ ID NO: 1217983 - DNA, 15 bp, Homo sapiens
atgctgtgctcccag

SEQ ID NO: 1217984 - DNA, 15 bp, Homo sapiens
catgctgtgctccca

SEQ ID NO: 1217985 - DNA, 15 bp, Homo sapiens
ccatgctgtgctccc

SEQ ID NO: 1217986 - DNA, 15 bp, Homo sapiens
cccatgctgtgctcc

SEQ ID NO: 1217987 - DNA, 15 bp, Homo sapiens
acccatgctgtgctc

SEQ ID NO: 1217988 - DNA, 15 bp, Homo sapiens
cacccatgctgtgct

SEQ ID NO: 1217989 - DNA, 15 bp, Homo sapiens
ccacccatgctgtgc

SEQ ID NO: 1217990 - DNA, 15 bp, Homo sapiens
cccacccatgctgtg

SEQ ID NO: 1217991 - DNA, 15 bp, Homo sapiens
ccccacccatgctgt

SEQ ID NO: 1217992 - DNA, 15 bp, Homo sapiens
gccccacccatgctg

SEQ ID NO: 1217993 - DNA, 15 bp, Homo sapiens
tgccccacccatgct

SEQ ID NO: 1217994 - DNA, 15 bp, Homo sapiens
atgccccacccatgc

SEQ ID NO: 1217995 - DNA, 15 bp, Homo sapiens
catgccccacccatg

SEQ ID NO: 1217996 - DNA, 15 bp, Homo sapiens
ccatgccccacccat

SEQ ID NO: 1217997 - DNA, 15 bp, Homo sapiens
gccatgccccaccca

SEQ ID NO: 1217998 - DNA, 15 bp, Homo sapiens
ggccatgccccaccc

SEQ ID NO: 1217999 - DNA, 15 bp, Homo sapiens
gggccatgccccacc

SEQ ID NO: 1218000 - DNA, 15 bp, Homo sapiens
tgggccatgccccac

SEQ ID NO: 1218001 - DNA, 15 bp, Homo sapiens
ctgggccatgcccca

SEQ ID NO: 1218002 - DNA, 15 bp, Homo sapiens
tctgggccatgcccc

SEQ ID NO: 1218003 - DNA, 15 bp, Homo sapiens
ctctgggccatgccc

SEQ ID NO: 1218004 - DNA, 15 bp, Homo sapiens
cctctgggccatgcc

SEQ ID NO: 1218005 - DNA, 15 bp, Homo sapiens
tcctctgggccatgc

SEQ ID NO: 1218006 - DNA, 15 bp, Homo sapiens
ctcctctgggccatg

SEQ ID NO: 1218007 - DNA, 15 bp, Homo sapiens
tctcctctgggccat

SEQ ID NO: 1218008 - DNA, 15 bp, Homo sapiens
ctctcctctgggcca

SEQ ID NO: 1218009 - DNA, 15 bp, Homo sapiens
cctctcctctgggcc

SEQ ID NO: 1218010 - DNA, 15 bp, Homo sapiens
gcctctcctctgggc

SEQ ID NO: 1218011 - DNA, 15 bp, Homo sapiens
ggcctctcctctggg

SEQ ID NO: 1218012 - DNA, 15 bp, Homo sapiens
tggcctctcctctgg

SEQ ID NO: 1218013 - DNA, 15 bp, Homo sapiens
ctggcctctcctctg

SEQ ID NO: 1218014 - DNA, 15 bp, Homo sapiens
tctggcctctcctct

SEQ ID NO: 1218015 - DNA, 15 bp, Homo sapiens
ctctggcctctcctc

SEQ ID NO: 1218016 - DNA, 15 bp, Homo sapiens
cctctggcctctcct

SEQ ID NO: 1218017 - DNA, 15 bp, Homo sapiens
acctctggcctctcc

SEQ ID NO: 1218018 - DNA, 15 bp, Homo sapiens
cacctctggcctctc

SEQ ID NO: 1218019 - DNA, 15 bp, Homo sapiens
tcacctctggcctct

SEQ ID NO: 1218020 - DNA, 15 bp, Homo sapiens
atcacctctggcctc

SEQ ID NO: 1218021 - DNA, 15 bp, Homo sapiens
catcacctctggcct

SEQ ID NO: 1218022 - DNA, 15 bp, Homo sapiens
ccatcacctctggcc

SEQ ID NO: 1218023 - DNA, 15 bp, Homo sapiens
tccatcacctctggc

SEQ ID NO: 1218024 - DNA, 15 bp, Homo sapiens
ttccatcacctctgg

SEQ ID NO: 1218025 - DNA, 15 bp, Homo sapiens
cttccatcacctctg

SEQ ID NO: 1218026 - DNA, 15 bp, Homo sapiens
accttccatcacctc

SEQ ID NO: 1218027 - DNA, 15 bp, Homo sapiens
aaccttccatcacct

SEQ ID NO: 1218028 - DNA, 15 bp, Homo sapiens
gaaccttccatcacc

SEQ ID NO: 1218029 - DNA, 15 bp, Homo sapiens
agaaccttccatcac

SEQ ID NO: 1218030 - DNA, 15 bp, Homo sapiens
cagaaccttccatca

SEQ ID NO: 1218031 - DNA, 15 bp, Homo sapiens
ccagaaccttccatc

SEQ ID NO: 1218032 - DNA, 15 bp, Homo sapiens
accagaaccttccat

SEQ ID NO: 1218033 - DNA, 15 bp, Homo sapiens
taccagaaccttcca

SEQ ID NO: 1218034 - DNA, 15 bp, Homo sapiens
ataccagaaccttcc

SEQ ID NO: 1218035 - DNA, 15 bp, Homo sapiens
aataccagaaccttc

SEQ ID NO: 1218036 - DNA, 15 bp, Homo sapiens
gaataccagaacctt

SEQ ID NO: 1218037 - DNA, 15 bp, Homo sapiens
cgaataccagaacct

SEQ ID NO: 1218038 - DNA, 15 bp, Homo sapiens
ccgaataccagaacc

SEQ ID NO: 1218039 - DNA, 15 bp, Homo sapiens
gccgaataccagaac

SEQ ID NO: 1218040 - DNA, 15 bp, Homo sapiens
ggccgaataccagaa

SEQ ID NO: 1218041 - DNA, 15 bp, Homo sapiens
aggccgaataccaga

SEQ ID NO: 1218042 - DNA, 15 bp, Homo sapiens
aaggccgaataccag

SEQ ID NO: 1218043 - DNA, 15 bp, Homo sapiens
caaggccgaatacca

SEQ ID NO: 1218044 - DNA, 15 bp, Homo sapiens
ccaaggccgaatacc

SEQ ID NO: 1218045 - DNA, 15 bp, Homo sapiens
gccaaggccgaatac

SEQ ID NO: 1218046 - DNA, 15 bp, Homo sapiens
agccaaggccgaata

SEQ ID NO: 1218047 - DNA, 15 bp, Homo sapiens
cagccaaggccgaat

SEQ ID NO: 1218048 - DNA, 15 bp, Homo sapiens
gcagccaaggccgaa

SEQ ID NO: 1218049 - DNA, 15 bp, Homo sapiens
agcagccaaggccga

SEQ ID NO: 1218050 - DNA, 15 bp, Homo sapiens
cagcagccaaggccg

SEQ ID NO: 1218051 - DNA, 15 bp, Homo sapiens
gcagcagccaaggcc

SEQ ID NO: 1218052 - DNA, 15 bp, Homo sapiens
tgcagcagccaaggc

SEQ ID NO: 1218053 - DNA, 15 bp, Homo sapiens
atgcagcagccaagg

SEQ ID NO: 1218054 - DNA, 15 bp, Homo sapiens
aatgcagcagccaag

SEQ ID NO: 1218055 - DNA, 15 bp, Homo sapiens
caatgcagcagccaa

SEQ ID NO: 1218056 - DNA, 15 bp, Homo sapiens
ccaatgcagcagcca

SEQ ID NO: 1218057 - DNA, 15 bp, Homo sapiens
cccaatgcagcagcc

SEQ ID NO: 1218058 - DNA, 15 bp, Homo sapiens
tcccaatgcagcagc

SEQ ID NO: 1218059 - DNA, 15 bp, Homo sapiens
ctcccaatgcagcag

SEQ ID NO: 1218060 - DNA, 15 bp, Homo sapiens
gctcccaatgcagca

SEQ ID NO: 1218061 - DNA, 15 bp, Homo sapiens
agctcccaatgcagc

SEQ ID NO: 1218062 - DNA, 15 bp, Homo sapiens
aagctcccaatgcag

SEQ ID NO: 1218063 - DNA, 15 bp, Homo sapiens
caagctcccaatgca

SEQ ID NO: 1218064 - DNA, 15 bp, Homo sapiens
acaagctcccaatgc

SEQ ID NO: 1218065 - DNA, 15 bp, Homo sapiens
tacaagctcccaatg

SEQ ID NO: 1218066 - DNA, 15 bp, Homo sapiens
atacaagctcccaat

SEQ ID NO: 1218067 - DNA, 15 bp, Homo sapiens
gatacaagctcccaa

SEQ ID NO: 1218068 - DNA, 15 bp, Homo sapiens
tgatacaagctccca

SEQ ID NO: 1218069 - DNA, 15 bp, Homo sapiens
ctgatacaagctccc

SEQ ID NO: 1218070 - DNA, 15 bp, Homo sapiens
tctgatacaagctcc

SEQ ID NO: 1218071 - DNA, 15 bp, Homo sapiens
ctctgatacaagctc

SEQ ID NO: 1218072 - DNA, 15 bp, Homo sapiens
gctctgatacaagct

SEQ ID NO: 1218073 - DNA, 15 bp, Homo sapiens
agctctgatacaagc

SEQ ID NO: 1218074 - DNA, 15 bp, Homo sapiens
aagctctgatacaag

SEQ ID NO: 1218075 - DNA, 15 bp, Homo sapiens
aaagctctgatacaa

SEQ ID NO: 1218076 - DNA, 15 bp, Homo sapiens
caaagctctgataca

SEQ ID NO: 1218077 - DNA, 15 bp, Homo sapiens
tcaaagctctgatac

SEQ ID NO: 1218078 - DNA, 15 bp, Homo sapiens
ctcaaagctctgata

SEQ ID NO: 1218079 - DNA, 15 bp, Homo sapiens
cctcaaagctctgat

SEQ ID NO: 1218080 - DNA, 15 bp, Homo sapiens
ccctcaaagctctga

SEQ ID NO: 1218081 - DNA, 15 bp, Homo sapiens
accctcaaagctctg

SEQ ID NO: 1218082 - DNA, 15 bp, Homo sapiens
caccctcaaagctct

SEQ ID NO: 1218083 - DNA, 15 bp, Homo sapiens
tcaccctcaaagctc

SEQ ID NO: 1218084 - DNA, 15 bp, Homo sapiens
gtcaccctcaaagct

SEQ ID NO: 1218085 - DNA, 15 bp, Homo sapiens
tgtcaccctcaaagc

SEQ ID NO: 1218086 - DNA, 15 bp, Homo sapiens
gtgtcaccctcaaag

SEQ ID NO: 1218087 - DNA, 15 bp, Homo sapiens
tgtgtcaccctcaaa

SEQ ID NO: 1218088 - DNA, 15 bp, Homo sapiens
ctgtgtcaccctcaa

SEQ ID NO: 1218089 - DNA, 15 bp, Homo sapiens
tctgtgtcaccctca

SEQ ID NO: 1218090 - DNA, 15 bp, Homo sapiens
gtctgtgtcaccctc

SEQ ID NO: 1218091 - DNA, 15 bp, Homo sapiens
tgtctgtgtcaccct

SEQ ID NO: 1218092 - DNA, 15 bp, Homo sapiens
atgtctgtgtcaccc

SEQ ID NO: 1218093 - DNA, 15 bp, Homo sapiens
catgtctgtgtcacc

SEQ ID NO: 1218094 - DNA, 15 bp, Homo sapiens
gcatgtctgtgtcac

SEQ ID NO: 1218095 - DNA, 15 bp, Homo sapiens
tgcatgtctgtgtca

SEQ ID NO: 1218096 - DNA, 15 bp, Homo sapiens
ctgcatgtctgtgtc

SEQ ID NO: 1218097 - DNA, 15 bp, Homo sapiens
tctgcatgtctgtgt

SEQ ID NO: 1218098 - DNA, 15 bp, Homo sapiens
gtctgcatgtctgtg

SEQ ID NO: 1218099 - DNA, 15 bp, Homo sapiens
tgtctgcatgtctgt

SEQ ID NO: 1218100 - DNA, 15 bp, Homo sapiens
atgtctgcatgtctg

SEQ ID NO: 1218101 - DNA, 15 bp, Homo sapiens
aatgtctgcatgtct

SEQ ID NO: 1218102 - DNA, 15 bp, Homo sapiens
gaatgtctgcatgtc

SEQ ID NO: 1218103 - DNA, 15 bp, Homo sapiens
tgaatgtctgcatgt

SEQ ID NO: 1218104 - DNA, 15 bp, Homo sapiens
ctgaatgtctgcatg

SEQ ID NO: 1218105 - DNA, 15 bp, Homo sapiens
actgaatgtctgcat

SEQ ID NO: 1218106 - DNA, 15 bp, Homo sapiens
aactgaatgtctgca

SEQ ID NO: 1218107 - DNA, 15 bp, Homo sapiens
aaactgaatgtctgc

SEQ ID NO: 1218108 - DNA, 15 bp, Homo sapiens
gaaactgaatgtctg

SEQ ID NO: 1218109 - DNA, 15 bp, Homo sapiens
ggaaactgaatgtct

SEQ ID NO: 1218110 - DNA, 15 bp, Homo sapiens
aggaaactgaatgtc

SEQ ID NO: 1218111 - DNA, 15 bp, Homo sapiens
caggaaactgaatgt

SEQ ID NO: 1218112 - DNA, 15 bp, Homo sapiens
tcaggaaactgaatg

SEQ ID NO: 1218113 - DNA, 15 bp, Homo sapiens
gtcaggaaactgaat

SEQ ID NO: 1218114 - DNA, 15 bp, Homo sapiens
tgtcaggaaactgaa

SEQ ID NO: 1218115 - DNA, 15 bp, Homo sapiens
ttgtcaggaaactga

SEQ ID NO: 1218116 - DNA, 15 bp, Homo sapiens
attgtcaggaaactg

SEQ ID NO: 1218117 - DNA, 15 bp, Homo sapiens
gattgtcaggaaact

SEQ ID NO: 1218118 - DNA, 15 bp, Homo sapiens
ggattgtcaggaaac

SEQ ID NO: 1218119 - DNA, 15 bp, Homo sapiens
tggattgtcaggaaa

SEQ ID NO: 1218120 - DNA, 15 bp, Homo sapiens
atggattgtcaggaa

SEQ ID NO: 1218121 - DNA, 15 bp, Homo sapiens
gatggattgtcagga

SEQ ID NO: 1218122 - DNA, 15 bp, Homo sapiens
cgatggattgtcagg

SEQ ID NO: 1218123 - DNA, 15 bp, Homo sapiens
acgatggattgtcag

SEQ ID NO: 1218124 - DNA, 15 bp, Homo sapiens
aacgatggattgtca

SEQ ID NO: 1218125 - DNA, 15 bp, Homo sapiens
gaacgatggattgtc

SEQ ID NO: 1218126 - DNA, 15 bp, Homo sapiens
agaacgatggattgt

SEQ ID NO: 1218127 - DNA, 15 bp, Homo sapiens
cagaacgatggattg

SEQ ID NO: 1218128 - DNA, 15 bp, Homo sapiens
gcagaacgatggatt

SEQ ID NO: 1218129 - DNA, 15 bp, Homo sapiens
ggcagaacgatggat

SEQ ID NO: 1218130 - DNA, 15 bp, Homo sapiens
gggcagaacgatgga

SEQ ID NO: 1218131 - DNA, 15 bp, Homo sapiens
ggggcagaacgatgg

SEQ ID NO: 1218132 - DNA, 15 bp, Homo sapiens
cggggcagaacgatg

SEQ ID NO: 1218133 - DNA, 15 bp, Homo sapiens
tcggggcagaacgat

SEQ ID NO: 1218134 - DNA, 15 bp, Homo sapiens
atcggggcagaacga

SEQ ID NO: 1218135 - DNA, 15 bp, Homo sapiens
catcggggcagaacg

SEQ ID NO: 1218136 - DNA, 15 bp, Homo sapiens
ccatcggggcagaac

SEQ ID NO: 1218137 - DNA, 15 bp, Homo sapiens
accatcggggcagaa

SEQ ID NO: 1218138 - DNA, 15 bp, Homo sapiens
gaccatcggggcaga

SEQ ID NO: 1218139 - DNA, 15 bp, Homo sapiens
cgaccatcggggcag

SEQ ID NO: 1218140 - DNA, 15 bp, Homo sapiens
gcgaccatcggggca

SEQ ID NO: 1218141 - DNA, 15 bp, Homo sapiens
ggcgaccatcggggc

SEQ ID NO: 1218142 - DNA, 15 bp, Homo sapiens
tggcgaccatcgggg

SEQ ID NO: 1218143 - DNA, 15 bp, Homo sapiens
ttggcgaccatcggg

SEQ ID NO: 1218144 - DNA, 15 bp, Homo sapiens
tttggcgaccatcgg

SEQ ID NO: 1218145 - DNA, 15 bp, Homo sapiens
ctttggcgaccatcg

SEQ ID NO: 1218146 - DNA, 15 bp, Homo sapiens
cctttggcgaccatc

SEQ ID NO: 1218147 - DNA, 15 bp, Homo sapiens
ccctttggcgaccat

SEQ ID NO: 1218148 - DNA, 15 bp, Homo sapiens
tccctttggcgacca

SEQ ID NO: 1218149 - DNA, 15 bp, Homo sapiens
ctccctttggcgacc

SEQ ID NO: 1218150 - DNA, 15 bp, Homo sapiens
cctccctttggcgac

SEQ ID NO: 1218151 - DNA, 15 bp, Homo sapiens
ccctccctttggcga

SEQ ID NO: 1218152 - DNA, 15 bp, Homo sapiens
tccctccctttggcg

SEQ ID NO: 1218153 - DNA, 15 bp, Homo sapiens
ctccctccctttggc

SEQ ID NO: 1218154 - DNA, 15 bp, Homo sapiens
cctccctccctttgg

SEQ ID NO: 1218155 - DNA, 15 bp, Homo sapiens
ccctccctccctttg

SEQ ID NO: 1218156 - DNA, 15 bp, Homo sapiens
accctccctcccttt

SEQ ID NO: 1218157 - DNA, 15 bp, Homo sapiens
aaccctccctccctt

SEQ ID NO: 1218158 - DNA, 15 bp, Homo sapiens
caaccctccctccct

SEQ ID NO: 1218159 - DNA, 15 bp, Homo sapiens
tcaaccctccctccc

SEQ ID NO: 1218160 - DNA, 15 bp, Homo sapiens
gtcaaccctccctcc

SEQ ID NO: 1218161 - DNA, 15 bp, Homo sapiens
tgtcaaccctccctc

SEQ ID NO: 1218162 - DNA, 15 bp, Homo sapiens
ctgtcaaccctccct

SEQ ID NO: 1218163 - DNA, 15 bp, Homo sapiens
gctgtcaaccctccc

SEQ ID NO: 1218164 - DNA, 15 bp, Homo sapiens
ggctgtcaaccctcc

SEQ ID NO: 1218165 - DNA, 15 bp, Homo sapiens
tggctgtcaaccctc

SEQ ID NO: 1218166 - DNA, 15 bp, Homo sapiens
gtggctgtcaaccct

SEQ ID NO: 1218167 - DNA, 15 bp, Homo sapiens
ggtggctgtcaaccc

SEQ ID NO: 1218168 - DNA, 15 bp, Homo sapiens
gggtggctgtcaacc

SEQ ID NO: 1218169 - DNA, 15 bp, Homo sapiens
tgggtggctgtcaac

SEQ ID NO: 1218170 - DNA, 15 bp, Homo sapiens
atgggtggctgtcaa

SEQ ID NO: 1218171 - DNA, 15 bp, Homo sapiens
aatgggtggctgtca

SEQ ID NO: 1218172 - DNA, 15 bp, Homo sapiens
aaatgggtggctgtc

SEQ ID NO: 1218173 - DNA, 15 bp, Homo sapiens
aaaatgggtggctgt

SEQ ID NO: 1218174 - DNA, 15 bp, Homo sapiens
taaaatgggtggctg

SEQ ID NO: 1218175 - DNA, 15 bp, Homo sapiens
gtaaaatgggtggct

SEQ ID NO: 1218176 - DNA, 15 bp, Homo sapiens
tgtaaaatgggtggc

SEQ ID NO: 1218177 - DNA, 15 bp, Homo sapiens
ctgtaaaatgggtgg

SEQ ID NO: 1218178 - DNA, 15 bp, Homo sapiens
tctgtaaaatgggtg

SEQ ID NO: 1218179 - DNA, 15 bp, Homo sapiens
ctctgtaaaatgggt

SEQ ID NO: 1218180 - DNA, 15 bp, Homo sapiens
tctctgtaaaatggg

SEQ ID NO: 1218181 - DNA, 15 bp, Homo sapiens
ctctctgtaaaatgg

SEQ ID NO: 1218182 - DNA, 15 bp, Homo sapiens
tctctctgtaaaatg

SEQ ID NO: 1218183 - DNA, 15 bp, Homo sapiens
ttctctctgtaaaat

SEQ ID NO: 1218184 - DNA, 15 bp, Homo sapiens
tttctctctgtaaaa

SEQ ID NO: 1218185 - DNA, 15 bp, Homo sapiens
atttctctctgtaaa

SEQ ID NO: 1218186 - DNA, 15 bp, Homo sapiens
tatttctctctgtaa

SEQ ID NO: 1218187 - DNA, 15 bp, Homo sapiens
ctatttctctctgta

SEQ ID NO: 1218188 - DNA, 15 bp, Homo sapiens
cctatttctctctgt

SEQ ID NO: 1218189 - DNA, 15 bp, Homo sapiens
tcctatttctctctg

SEQ ID NO: 1218190 - DNA, 15 bp, Homo sapiens
ctcctatttctctct

SEQ ID NO: 1218191 - DNA, 15 bp, Homo sapiens
cctcctatttctctc

SEQ ID NO: 1218192 - DNA, 15 bp, Homo sapiens
gcctcctatttctct

SEQ ID NO: 1218193 - DNA, 15 bp, Homo sapiens
agcctcctatttctc

SEQ ID NO: 1218194 - DNA, 15 bp, Homo sapiens
gagcctcctatttct

SEQ ID NO: 1218195 - DNA, 15 bp, Homo sapiens
cgagcctcctatttc

SEQ ID NO: 1218196 - DNA, 15 bp, Homo sapiens
ccgagcctcctattt

SEQ ID NO: 1218197 - DNA, 15 bp, Homo sapiens
cccgagcctcctatt

SEQ ID NO: 1218198 - DNA, 15 bp, Homo sapiens
acccgagcctcctat

SEQ ID NO: 1218199 - DNA, 15 bp, Homo sapiens
gacccgagcctccta

SEQ ID NO: 1218200 - DNA, 15 bp, Homo sapiens
tgacccgagcctcct

SEQ ID NO: 1218201 - DNA, 15 bp, Homo sapiens
gtgacccgagcctcc

SEQ ID NO: 1218202 - DNA, 15 bp, Homo sapiens
agtgacccgagcctc

SEQ ID NO: 1218203 - DNA, 15 bp, Homo sapiens
cagtgacccgagcct

SEQ ID NO: 1218204 - DNA, 15 bp, Homo sapiens
acagtgacccgagcc

SEQ ID NO: 1218205 - DNA, 15 bp, Homo sapiens
cacagtgacccgagc

SEQ ID NO: 1218206 - DNA, 15 bp, Homo sapiens
ccacagtgacccgag

SEQ ID NO: 1218207 - DNA, 15 bp, Homo sapiens
gccacagtgacccga

SEQ ID NO: 1218208 - DNA, 15 bp, Homo sapiens
agccacagtgacccg

SEQ ID NO: 1218209 - DNA, 15 bp, Homo sapiens
cagccacagtgaccc

SEQ ID NO: 1218210 - DNA, 15 bp, Homo sapiens
ccagccacagtgacc

SEQ ID NO: 1218211 - DNA, 15 bp, Homo sapiens
tccagccacagtgac

SEQ ID NO: 1218212 - DNA, 15 bp, Homo sapiens
atccagccacagtga

SEQ ID NO: 1218213 - DNA, 15 bp, Homo sapiens
aatccagccacagtg

SEQ ID NO: 1218214 - DNA, 15 bp, Homo sapiens
gaatccagccacagt

SEQ ID NO: 1218215 - DNA, 15 bp, Homo sapiens
agaatccagccacag

SEQ ID NO: 1218216 - DNA, 15 bp, Homo sapiens
cagaatccagccaca

SEQ ID NO: 1218217 - DNA, 15 bp, Homo sapiens
tcagaatccagccac

SEQ ID NO: 1218218 - DNA, 15 bp, Homo sapiens
atcagaatccagcca

SEQ ID NO: 1218219 - DNA, 15 bp, Homo sapiens
gatcagaatccagcc

SEQ ID NO: 1218220 - DNA, 15 bp, Homo sapiens
ggatcagaatccagc

SEQ ID NO: 1218221 - DNA, 15 bp, Homo sapiens
aggatcagaatccag

SEQ ID NO: 1218222 - DNA, 15 bp, Homo sapiens
gaggatcagaatcca

SEQ ID NO: 1218223 - DNA, 15 bp, Homo sapiens
cgaggatcagaatcc

SEQ ID NO: 1218224 - DNA, 15 bp, Homo sapiens
gcgaggatcagaatc

SEQ ID NO: 1218225 - DNA, 15 bp, Homo sapiens
ggcgaggatcagaat

SEQ ID NO: 1218226 - DNA, 15 bp, Homo sapiens
cggcgaggatcagaa

SEQ ID NO: 1218227 - DNA, 15 bp, Homo sapiens
ccggcgaggatcaga

SEQ ID NO: 1218228 - DNA, 15 bp, Homo sapiens
accggcgaggatcag

SEQ ID NO: 1218229 - DNA, 15 bp, Homo sapiens
aaccggcgaggatca

SEQ ID NO: 1218230 - DNA, 15 bp, Homo sapiens
gaaccggcgaggatc

SEQ ID NO: 1218231 - DNA, 15 bp, Homo sapiens
ggaaccggcgaggat

SEQ ID NO: 1218232 - DNA, 15 bp, Homo sapiens
tggaaccggcgagga

SEQ ID NO: 1218233 - DNA, 15 bp, Homo sapiens
ctggaaccggcgagg

SEQ ID NO: 1218234 - DNA, 15 bp, Homo sapiens
actggaaccggcgag

SEQ ID NO: 1218235 - DNA, 15 bp, Homo sapiens
aactggaaccggcga

SEQ ID NO: 1218236 - DNA, 15 bp, Homo sapiens
gaactggaaccggcg

SEQ ID NO: 1218237 - DNA, 15 bp, Homo sapiens
agaactggaaccggc

SEQ ID NO: 1218238 - DNA, 15 bp, Homo sapiens
gagaactggaaccgg

SEQ ID NO: 1218239 - DNA, 15 bp, Homo sapiens
agagaactggaaccg

SEQ ID NO: 1218240 - DNA, 15 bp, Homo sapiens
cagagaactggaacc

SEQ ID NO: 1218241 - DNA, 15 bp, Homo sapiens
ccagagaactggaac

SEQ ID NO: 1218242 - DNA, 15 bp, Homo sapiens
gccagagaactggaa

SEQ ID NO: 1218243 - DNA, 15 bp, Homo sapiens
agccagagaactgga

SEQ ID NO: 1218244 - DNA, 15 bp, Homo sapiens
gagccagagaactgg

SEQ ID NO: 1218245 - DNA, 15 bp, Homo sapiens
tgagccagagaactg

SEQ ID NO: 1218246 - DNA, 15 bp, Homo sapiens
ctgagccagagaact

SEQ ID NO: 1218247 - DNA, 15 bp, Homo sapiens
tctgagccagagaac

SEQ ID NO: 1218248 - DNA, 15 bp, Homo sapiens
ttctgagccagagaa

SEQ ID NO: 1218249 - DNA, 15 bp, Homo sapiens
gttctgagccagaga

SEQ ID NO: 1218250 - DNA, 15 bp, Homo sapiens
cgttctgagccagag

SEQ ID NO: 1218251 - DNA, 15 bp, Homo sapiens
ccgttctgagccaga

SEQ ID NO: 1218252 - DNA, 15 bp, Homo sapiens
cccgttctgagccag

SEQ ID NO: 1218253 - DNA, 15 bp, Homo sapiens
ccccgttctgagcca

SEQ ID NO: 1218254 - DNA, 15 bp, Homo sapiens
gccccgttctgagcc

SEQ ID NO: 1218255 - DNA, 15 bp, Homo sapiens
ggccccgttctgagc

SEQ ID NO: 1218256 - DNA, 15 bp, Homo sapiens
gggccccgttctgag

SEQ ID NO: 1218257 - DNA, 15 bp, Homo sapiens
agggccccgttctga

SEQ ID NO: 1218258 - DNA, 15 bp, Homo sapiens
cagggccccgttctg

SEQ ID NO: 1218259 - DNA, 15 bp, Homo sapiens
ccagggccccgttct

SEQ ID NO: 1218260 - DNA, 15 bp, Homo sapiens
accagggccccgttc

SEQ ID NO: 1218261 - DNA, 15 bp, Homo sapiens
taccagggccccgtt

SEQ ID NO: 1218262 - DNA, 15 bp, Homo sapiens
ttaccagggccccgt

SEQ ID NO: 1218263 - DNA, 15 bp, Homo sapiens
tttaccagggccccg

SEQ ID NO: 1218264 - DNA, 15 bp, Homo sapiens
ttttaccagggcccc

SEQ ID NO: 1218265 - DNA, 15 bp, Homo sapiens
attttaccagggccc

SEQ ID NO: 1218266 - DNA, 15 bp, Homo sapiens
cattttaccagggcc

SEQ ID NO: 1218267 - DNA, 15 bp, Homo sapiens
gcattttaccagggc

SEQ ID NO: 1218268 - DNA, 15 bp, Homo sapiens
cgcattttaccaggg

SEQ ID NO: 1218269 - DNA, 15 bp, Homo sapiens
gcgcattttaccagg

SEQ ID NO: 1218270 - DNA, 15 bp, Homo sapiens
agcgcattttaccag

SEQ ID NO: 1218271 - DNA, 15 bp, Homo sapiens
cagcgcattttacca

SEQ ID NO: 1218272 - DNA, 15 bp, Homo sapiens
gcagcgcattttacc

SEQ ID NO: 1218273 - DNA, 15 bp, Homo sapiens
agcagcgcattttac

SEQ ID NO: 1218274 - DNA, 15 bp, Homo sapiens
cagcagcgcatttta

SEQ ID NO: 1218275 - DNA, 15 bp, Homo sapiens
ccagcagcgcatttt

SEQ ID NO: 1218276 - DNA, 15 bp, Homo sapiens
gccagcagcgcattt

SEQ ID NO: 1218277 - DNA, 15 bp, Homo sapiens
agccagcagcgcatt

SEQ ID NO: 1218278 - DNA, 15 bp, Homo sapiens
gagccagcagcgcat

SEQ ID NO: 1218279 - DNA, 15 bp, Homo sapiens
ggagccagcagcgca

SEQ ID NO: 1218280 - DNA, 15 bp, Homo sapiens
gggagccagcagcgc

SEQ ID NO: 1218281 - DNA, 15 bp, Homo sapiens
agggagccagcagcg

SEQ ID NO: 1218282 - DNA, 15 bp, Homo sapiens
cagggagccagcagc

SEQ ID NO: 1218283 - DNA, 15 bp, Homo sapiens
ccagggagccagcag

SEQ ID NO: 1218284 - DNA, 15 bp, Homo sapiens
accagggagccagca

SEQ ID NO: 1218285 - DNA, 15 bp, Homo sapiens
gaccagggagccagc

SEQ ID NO: 1218286 - DNA, 15 bp, Homo sapiens
agaccagggagccag

SEQ ID NO: 1218287 - DNA, 15 bp, Homo sapiens
tagaccagggagcca

SEQ ID NO: 1218288 - DNA, 15 bp, Homo sapiens
atagaccagggagcc

SEQ ID NO: 1218289 - DNA, 15 bp, Homo sapiens
tatagaccagggagc

SEQ ID NO: 1218290 - DNA, 15 bp, Homo sapiens
ctatagaccagggag

SEQ ID NO: 1218291 - DNA, 15 bp, Homo sapiens
cctatagaccaggga

SEQ ID NO: 1218292 - DNA, 15 bp, Homo sapiens
gcctatagaccaggg

SEQ ID NO: 1218293 - DNA, 15 bp, Homo sapiens
agcctatagaccagg

SEQ ID NO: 1218294 - DNA, 15 bp, Homo sapiens
gagcctatagaccag

SEQ ID NO: 1218295 - DNA, 15 bp, Homo sapiens
tgagcctatagacca

SEQ ID NO: 1218296 - DNA, 15 bp, Homo sapiens
ctgagcctatagacc

SEQ ID NO: 1218297 - DNA, 15 bp, Homo sapiens
gctgagcctatagac

SEQ ID NO: 1218298 - DNA, 15 bp, Homo sapiens
tgctgagcctataga

SEQ ID NO: 1218299 - DNA, 15 bp, Homo sapiens
gtgctgagcctatag

SEQ ID NO: 1218300 - DNA, 15 bp, Homo sapiens
ggtgctgagcctata

SEQ ID NO: 1218301 - DNA, 15 bp, Homo sapiens
gggtgctgagcctat

SEQ ID NO: 1218302 - DNA, 15 bp, Homo sapiens
tgggtgctgagccta

SEQ ID NO: 1218303 - DNA, 15 bp, Homo sapiens
gtgggtgctgagcct

SEQ ID NO: 1218304 - DNA, 15 bp, Homo sapiens
ggtgggtgctgagcc

SEQ ID NO: 1218305 - DNA, 15 bp, Homo sapiens
gggtgggtgctgagc

SEQ ID NO: 1218306 - DNA, 15 bp, Homo sapiens
tgggtgggtgctgag

SEQ ID NO: 1218307 - DNA, 15 bp, Homo sapiens
gtgggtgggtgctga

SEQ ID NO: 1218308 - DNA, 15 bp, Homo sapiens
ggtgggtgggtgctg

SEQ ID NO: 1218309 - DNA, 15 bp, Homo sapiens
gggtgggtgggtgct

SEQ ID NO: 1218310 - DNA, 15 bp, Homo sapiens
tgggtgggtgggtgc

SEQ ID NO: 1218311 - DNA, 15 bp, Homo sapiens
gtgggtgggtgggtg

SEQ ID NO: 1218312 - DNA, 15 bp, Homo sapiens
ggtgggtgggtgggt

SEQ ID NO: 1218313 - DNA, 15 bp, Homo sapiens
gggtgggtgggtggg

SEQ ID NO: 1218314 - DNA, 15 bp, Homo sapiens
tgggtgggtgggtgg

SEQ ID NO: 1218315 - DNA, 15 bp, Homo sapiens
agtgggtgggtgggt

SEQ ID NO: 1218316 - DNA, 15 bp, Homo sapiens
aagtgggtgggtggg

SEQ ID NO: 1218317 - DNA, 15 bp, Homo sapiens
caagtgggtgggtgg

SEQ ID NO: 1218318 - DNA, 15 bp, Homo sapiens
acaagtgggtgggtg

SEQ ID NO: 1218319 - DNA, 15 bp, Homo sapiens
gacaagtgggtgggt

SEQ ID NO: 1218320 - DNA, 15 bp, Homo sapiens
ggacaagtgggtggg

SEQ ID NO: 1218321 - DNA, 15 bp, Homo sapiens
aggacaagtgggtgg

SEQ ID NO: 1218322 - DNA, 15 bp, Homo sapiens
caggacaagtgggtg

SEQ ID NO: 1218323 - DNA, 15 bp, Homo sapiens
gcaggacaagtgggt

SEQ ID NO: 1218324 - DNA, 15 bp, Homo sapiens
tgcaggacaagtggg

SEQ ID NO: 1218325 - DNA, 15 bp, Homo sapiens
ctgcaggacaagtgg

SEQ ID NO: 1218326 - DNA, 15 bp, Homo sapiens
cctgcaggacaagtg

SEQ ID NO: 1218327 - DNA, 15 bp, Homo sapiens
ccctgcaggacaagt

SEQ ID NO: 1218328 - DNA, 15 bp, Homo sapiens
gccctgcaggacaag

SEQ ID NO: 1218329 - DNA, 15 bp, Homo sapiens
agccctgcaggacaa

SEQ ID NO: 1218330 - DNA, 15 bp, Homo sapiens
cagccctgcaggaca

SEQ ID NO: 1218331 - DNA, 15 bp, Homo sapiens
ccagccctgcaggac

SEQ ID NO: 1218332 - DNA, 15 bp, Homo sapiens
cccagccctgcagga

SEQ ID NO: 1218333 - DNA, 15 bp, Homo sapiens
ccccagccctgcagg

SEQ ID NO: 1218334 - DNA, 15 bp, Homo sapiens
cccccagccctgcag

SEQ ID NO: 1218335 - DNA, 15 bp, Homo sapiens
gcccccagccctgca

SEQ ID NO: 1218336 - DNA, 15 bp, Homo sapiens
tgcccccagccctgc

SEQ ID NO: 1218337 - DNA, 15 bp, Homo sapiens
ctgcccccagccctg

SEQ ID NO: 1218338 - DNA, 15 bp, Homo sapiens
gctgcccccagccct

SEQ ID NO: 1218339 - DNA, 15 bp, Homo sapiens
ggctgcccccagccc

SEQ ID NO: 1218340 - DNA, 15 bp, Homo sapiens
aggctgcccccagcc

SEQ ID NO: 1218341 - DNA, 15 bp, Homo sapiens
caggctgcccccagc

SEQ ID NO: 1218342 - DNA, 15 bp, Homo sapiens
gcaggctgcccccag

SEQ ID NO: 1218343 - DNA, 15 bp, Homo sapiens
tgcaggctgccccca

SEQ ID NO: 1218344 - DNA, 15 bp, Homo sapiens
ctgcaggctgccccc

SEQ ID NO: 1218345 - DNA, 15 bp, Homo sapiens
gctgcaggctgcccc

SEQ ID NO: 1218346 - DNA, 15 bp, Homo sapiens
agctgcaggctgccc

SEQ ID NO: 1218347 - DNA, 15 bp, Homo sapiens
aagctgcaggctgcc

SEQ ID NO: 1218348 - DNA, 15 bp, Homo sapiens
caagctgcaggctgc

SEQ ID NO: 1218349 - DNA, 15 bp, Homo sapiens
ccaagctgcaggctg

SEQ ID NO: 1218350 - DNA, 15 bp, Homo sapiens
cccaagctgcaggct

SEQ ID NO: 1218351 - DNA, 15 bp, Homo sapiens
ccccaagctgcaggc

SEQ ID NO: 1218352 - DNA, 15 bp, Homo sapiens
tccccaagctgcagg

SEQ ID NO: 1218353 - DNA, 15 bp, Homo sapiens
ttccccaagctgcag

SEQ ID NO: 1218354 - DNA, 15 bp, Homo sapiens
gttccccaagctgca

SEQ ID NO: 1218355 - DNA, 15 bp, Homo sapiens
cgttccccaagctgc

SEQ ID NO: 1218356 - DNA, 15 bp, Homo sapiens
gcgttccccaagctg

SEQ ID NO: 1218357 - DNA, 15 bp, Homo sapiens
ggcgttccccaagct

SEQ ID NO: 1218358 - DNA, 15 bp, Homo sapiens
tggcgttccccaagc

SEQ ID NO: 1218359 - DNA, 15 bp, Homo sapiens
gtggcgttccccaag

SEQ ID NO: 1218360 - DNA, 15 bp, Homo sapiens
ggtggcgttccccaa

SEQ ID NO: 1218361 - DNA, 15 bp, Homo sapiens
gggtggcgttcccca

SEQ ID NO: 1218362 - DNA, 15 bp, Homo sapiens
ggggtggcgttcccc

SEQ ID NO: 1218363 - DNA, 15 bp, Homo sapiens
aggggtggcgttccc

SEQ ID NO: 1218364 - DNA, 15 bp, Homo sapiens
caggggtggcgttcc

SEQ ID NO: 1218365 - DNA, 15 bp, Homo sapiens
gcaggggtggcgttc

SEQ ID NO: 1218366 - DNA, 15 bp, Homo sapiens
tgcaggggtggcgtt

SEQ ID NO: 1218367 - DNA, 15 bp, Homo sapiens
ctgcaggggtggcgt

SEQ ID NO: 1218368 - DNA, 15 bp, Homo sapiens
cctgcaggggtggcg

SEQ ID NO: 1218369 - DNA, 15 bp, Homo sapiens
gcctgcaggggtggc

SEQ ID NO: 1218370 - DNA, 15 bp, Homo sapiens
agcctgcaggggtgg

SEQ ID NO: 1218371 - DNA, 15 bp, Homo sapiens
cagcctgcaggggtg

SEQ ID NO: 1218372 - DNA, 15 bp, Homo sapiens
ccagcctgcaggggt

SEQ ID NO: 1218373 - DNA, 15 bp, Homo sapiens
accagcctgcagggg

SEQ ID NO: 1218374 - DNA, 15 bp, Homo sapiens
caccagcctgcaggg

SEQ ID NO: 1218375 - DNA, 15 bp, Homo sapiens
ccaccagcctgcagg

SEQ ID NO: 1218376 - DNA, 15 bp, Homo sapiens
accaccagcctgcag

SEQ ID NO: 1218377 - DNA, 15 bp, Homo sapiens
gaccaccagcctgca

SEQ ID NO: 1218378 - DNA, 15 bp, Homo sapiens
ggaccaccagcctgc

SEQ ID NO: 1218379 - DNA, 15 bp, Homo sapiens
aggaccaccagcctg

SEQ ID NO: 1218380 - DNA, 15 bp, Homo sapiens
caggaccaccagcct

SEQ ID NO: 1218381 - DNA, 15 bp, Homo sapiens
acaggaccaccagcc

SEQ ID NO: 1218382 - DNA, 15 bp, Homo sapiens
gacaggaccaccagc

SEQ ID NO: 1218383 - DNA, 15 bp, Homo sapiens
ggacaggaccaccag

SEQ ID NO: 1218384 - DNA, 15 bp, Homo sapiens
aggacaggaccacca

SEQ ID NO: 1218385 - DNA, 15 bp, Homo sapiens
caggacaggaccacc

SEQ ID NO: 1218386 - DNA, 15 bp, Homo sapiens
acaggacaggaccac

SEQ ID NO: 1218387 - DNA, 15 bp, Homo sapiens
gacaggacaggacca

SEQ ID NO: 1218388 - DNA, 15 bp, Homo sapiens
agacaggacaggacc

SEQ ID NO: 1218389 - DNA, 15 bp, Homo sapiens
gagacaggacaggac

SEQ ID NO: 1218390 - DNA, 15 bp, Homo sapiens
ggagacaggacagga

SEQ ID NO: 1218391 - DNA, 15 bp, Homo sapiens
cggagacaggacagg

SEQ ID NO: 1218392 - DNA, 15 bp, Homo sapiens
gcggagacaggacag

SEQ ID NO: 1218393 - DNA, 15 bp, Homo sapiens
tgcggagacaggaca

SEQ ID NO: 1218394 - DNA, 15 bp, Homo sapiens
ctgcggagacaggac

SEQ ID NO: 1218395 - DNA, 15 bp, Homo sapiens
cctgcggagacagga

SEQ ID NO: 1218396 - DNA, 15 bp, Homo sapiens
gcctgcggagacagg

SEQ ID NO: 1218397 - DNA, 15 bp, Homo sapiens
agcctgcggagacag

SEQ ID NO: 1218398 - DNA, 15 bp, Homo sapiens
gagcctgcggagaca

SEQ ID NO: 1218399 - DNA, 15 bp, Homo sapiens
tgagcctgcggagac

SEQ ID NO: 1218400 - DNA, 15 bp, Homo sapiens
ttgagcctgcggaga

SEQ ID NO: 1218401 - DNA, 15 bp, Homo sapiens
gttgagcctgcggag

SEQ ID NO: 1218402 - DNA, 15 bp, Homo sapiens
tgttgagcctgcgga

SEQ ID NO: 1218403 - DNA, 15 bp, Homo sapiens
ctgttgagcctgcgg

SEQ ID NO: 1218404 - DNA, 15 bp, Homo sapiens
gctgttgagcctgcg

SEQ ID NO: 1218405 - DNA, 15 bp, Homo sapiens
agctgttgagcctgc

SEQ ID NO: 1218406 - DNA, 15 bp, Homo sapiens
gagctgttgagcctg

SEQ ID NO: 1218407 - DNA, 15 bp, Homo sapiens
agagctgttgagcct

SEQ ID NO: 1218408 - DNA, 15 bp, Homo sapiens
cagagctgttgagcc

SEQ ID NO: 1218409 - DNA, 15 bp, Homo sapiens
ccagagctgttgagc

SEQ ID NO: 1218410 - DNA, 15 bp, Homo sapiens
gccagagctgttgag

SEQ ID NO: 1218411 - DNA, 15 bp, Homo sapiens
ggccagagctgttga

SEQ ID NO: 1218412 - DNA, 15 bp, Homo sapiens
tggccagagctgttg

SEQ ID NO: 1218413 - DNA, 15 bp, Homo sapiens
ctggccagagctgtt

SEQ ID NO: 1218414 - DNA, 15 bp, Homo sapiens
cctggccagagctgt

SEQ ID NO: 1218415 - DNA, 15 bp, Homo sapiens
tcctggccagagctg

SEQ ID NO: 1218416 - DNA, 15 bp, Homo sapiens
gtcctggccagagct

SEQ ID NO: 1218417 - DNA, 15 bp, Homo sapiens
tgtcctggccagagc

SEQ ID NO: 1218418 - DNA, 15 bp, Homo sapiens
ctgtcctggccagag

SEQ ID NO: 1218419 - DNA, 15 bp, Homo sapiens
cctgtcctggccaga

SEQ ID NO: 1218420 - DNA, 15 bp, Homo sapiens
ccctgtcctggccag

SEQ ID NO: 1218421 - DNA, 15 bp, Homo sapiens
accctgtcctggcca

SEQ ID NO: 1218422 - DNA, 15 bp, Homo sapiens
caccctgtcctggcc

SEQ ID NO: 1218423 - DNA, 15 bp, Homo sapiens
ccaccctgtcctggc

SEQ ID NO: 1218424 - DNA, 15 bp, Homo sapiens
tccaccctgtcctgg

SEQ ID NO: 1218425 - DNA, 15 bp, Homo sapiens
ttccaccctgtcctg

SEQ ID NO: 1218426 - DNA, 15 bp, Homo sapiens
cttccaccctgtcct

SEQ ID NO: 1218427 - DNA, 15 bp, Homo sapiens
ccttccaccctgtcc

SEQ ID NO: 1218428 - DNA, 15 bp, Homo sapiens
accttccaccctgtc

SEQ ID NO: 1218429 - DNA, 15 bp, Homo sapiens
caccttccaccctgt

SEQ ID NO: 1218430 - DNA, 15 bp, Homo sapiens
ccaccttccaccctg

SEQ ID NO: 1218431 - DNA, 15 bp, Homo sapiens
cccaccttccaccct

SEQ ID NO: 1218432 - DNA, 15 bp, Homo sapiens
tcccaccttccaccc

SEQ ID NO: 1218433 - DNA, 15 bp, Homo sapiens
ctcccaccttccacc

SEQ ID NO: 1218434 - DNA, 15 bp, Homo sapiens
cctcccaccttccac

SEQ ID NO: 1218435 - DNA, 15 bp, Homo sapiens
tcctcccaccttcca

SEQ ID NO: 1218436 - DNA, 15 bp, Homo sapiens
ttcctcccaccttcc

SEQ ID NO: 1218437 - DNA, 15 bp, Homo sapiens
attcctcccaccttc

SEQ ID NO: 1218438 - DNA, 15 bp, Homo sapiens
aattcctcccacctt

SEQ ID NO: 1218439 - DNA, 15 bp, Homo sapiens
aaattcctcccacct

SEQ ID NO: 1218440 - DNA, 15 bp, Homo sapiens
caaattcctcccacc

SEQ ID NO: 1218441 - DNA, 15 bp, Homo sapiens
acaaattcctcccac

SEQ ID NO: 1218442 - DNA, 15 bp, Homo sapiens
gacaaattcctccca

SEQ ID NO: 1218443 - DNA, 15 bp, Homo sapiens
ggacaaattcctccc

SEQ ID NO: 1218444 - DNA, 15 bp, Homo sapiens
gggacaaattcctcc

SEQ ID NO: 1218445 - DNA, 15 bp, Homo sapiens
tgggacaaattcctc

SEQ ID NO: 1218446 - DNA, 15 bp, Homo sapiens
gtgggacaaattcct

SEQ ID NO: 1218447 - DNA, 15 bp, Homo sapiens
agtgggacaaattcc

SEQ ID NO: 1218448 - DNA, 15 bp, Homo sapiens
gagtgggacaaattc

SEQ ID NO: 1218449 - DNA, 15 bp, Homo sapiens
ggagtgggacaaatt

SEQ ID NO: 1218450 - DNA, 15 bp, Homo sapiens
gggagtgggacaaat

SEQ ID NO: 1218451 - DNA, 15 bp, Homo sapiens
tgggagtgggacaaa

SEQ ID NO: 1218452 - DNA, 15 bp, Homo sapiens
ctgggagtgggacaa

SEQ ID NO: 1218453 - DNA, 15 bp, Homo sapiens
gctgggagtgggaca

SEQ ID NO: 1218454 - DNA, 15 bp, Homo sapiens
tgctgggagtgggac

SEQ ID NO: 1218455 - DNA, 15 bp, Homo sapiens
ttgctgggagtggga

SEQ ID NO: 1218456 - DNA, 15 bp, Homo sapiens
cttgctgggagtggg

SEQ ID NO: 1218457 - DNA, 15 bp, Homo sapiens
acttgctgggagtgg

SEQ ID NO: 1218458 - DNA, 15 bp, Homo sapiens
gacttgctgggagtg

SEQ ID NO: 1218459 - DNA, 15 bp, Homo sapiens
agacttgctgggagt

SEQ ID NO: 1218460 - DNA, 15 bp, Homo sapiens
cagacttgctgggag

SEQ ID NO: 1218461 - DNA, 15 bp, Homo sapiens
tcagacttgctggga

SEQ ID NO: 1218462 - DNA, 15 bp, Homo sapiens
gtcagacttgctggg

SEQ ID NO: 1218463 - DNA, 15 bp, Homo sapiens
tgtcagacttgctgg

SEQ ID NO: 1218464 - DNA, 15 bp, Homo sapiens
gtgtcagacttgctg

SEQ ID NO: 1218465 - DNA, 15 bp, Homo sapiens
ggtgtcagacttgct

SEQ ID NO: 1218466 - DNA, 15 bp, Homo sapiens
gggtgtcagacttgc

SEQ ID NO: 1218467 - DNA, 15 bp, Homo sapiens
tgggtgtcagacttg

SEQ ID NO: 1218468 - DNA, 15 bp, Homo sapiens
gtgggtgtcagactt

SEQ ID NO: 1218469 - DNA, 15 bp, Homo sapiens
tgtgggtgtcagact

SEQ ID NO: 1218470 - DNA, 15 bp, Homo sapiens
ttgtgggtgtcagac

SEQ ID NO: 1218471 - DNA, 15 bp, Homo sapiens
gttgtgggtgtcaga

SEQ ID NO: 1218472 - DNA, 15 bp, Homo sapiens
agttgtgggtgtcag

SEQ ID NO: 1218473 - DNA, 15 bp, Homo sapiens
tagttgtgggtgtca

SEQ ID NO: 1218474 - DNA, 15 bp, Homo sapiens
ctagttgtgggtgtc

SEQ ID NO: 1218475 - DNA, 15 bp, Homo sapiens
actagttgtgggtgt

SEQ ID NO: 1218476 - DNA, 15 bp, Homo sapiens
cactagttgtgggtg

SEQ ID NO: 1218477 - DNA, 15 bp, Homo sapiens
acactagttgtgggt

SEQ ID NO: 1218478 - DNA, 15 bp, Homo sapiens
gacactagttgtggg

SEQ ID NO: 1218479 - DNA, 15 bp, Homo sapiens
ggacactagttgtgg

SEQ ID NO: 1218480 - DNA, 15 bp, Homo sapiens
gggacactagttgtg

SEQ ID NO: 1218481 - DNA, 15 bp, Homo sapiens
ggggacactagttgt

SEQ ID NO: 1218482 - DNA, 15 bp, Homo sapiens
aggggacactagttg

SEQ ID NO: 1218483 - DNA, 15 bp, Homo sapiens
caggggacactagtt

SEQ ID NO: 1218484 - DNA, 15 bp, Homo sapiens
gcaggggacactagt

SEQ ID NO: 1218485 - DNA, 15 bp, Homo sapiens
agcaggggacactag

SEQ ID NO: 1218486 - DNA, 15 bp, Homo sapiens
cagcaggggacacta

SEQ ID NO: 1218487 - DNA, 15 bp, Homo sapiens
acagcaggggacact

SEQ ID NO: 1218488 - DNA, 15 bp, Homo sapiens
gacagcaggggacac

SEQ ID NO: 1218489 - DNA, 15 bp, Homo sapiens
ggacagcaggggaca

SEQ ID NO: 1218490 - DNA, 15 bp, Homo sapiens
gggacagcaggggac

SEQ ID NO: 1218491 - DNA, 15 bp, Homo sapiens
agggacagcagggga

SEQ ID NO: 1218492 - DNA, 15 bp, Homo sapiens
gagggacagcagggg

SEQ ID NO: 1218493 - DNA, 15 bp, Homo sapiens
ggagggacagcaggg

SEQ ID NO: 1218494 - DNA, 15 bp, Homo sapiens
gggagggacagcagg

SEQ ID NO: 1218495 - DNA, 15 bp, Homo sapiens
ggggagggacagcag

SEQ ID NO: 1218496 - DNA, 15 bp, Homo sapiens
aggggagggacagca

SEQ ID NO: 1218497 - DNA, 15 bp, Homo sapiens
aaggggagggacagc

SEQ ID NO: 1218498 - DNA, 15 bp, Homo sapiens
gaaggggagggacag

SEQ ID NO: 1218499 - DNA, 15 bp, Homo sapiens
agaaggggagggaca

SEQ ID NO: 1218500 - DNA, 15 bp, Homo sapiens
gagaaggggagggac

SEQ ID NO: 1218501 - DNA, 15 bp, Homo sapiens
ggagaaggggaggga

SEQ ID NO: 1218502 - DNA, 15 bp, Homo sapiens
aggagaaggggaggg

SEQ ID NO: 1218503 - DNA, 15 bp, Homo sapiens
caggagaaggggagg

SEQ ID NO: 1218504 - DNA, 15 bp, Homo sapiens
acaggagaaggggag

SEQ ID NO: 1218505 - DNA, 15 bp, Homo sapiens
gacaggagaagggga

SEQ ID NO: 1218506 - DNA, 15 bp, Homo sapiens
ggacaggagaagggg

SEQ ID NO: 1218507 - DNA, 15 bp, Homo sapiens
gggacaggagaaggg

SEQ ID NO: 1218508 - DNA, 15 bp, Homo sapiens
ggggacaggagaagg

SEQ ID NO: 1218509 - DNA, 15 bp, Homo sapiens
tggggacaggagaag

SEQ ID NO: 1218510 - DNA, 15 bp, Homo sapiens
ctggggacaggagaa

SEQ ID NO: 1218511 - DNA, 15 bp, Homo sapiens
cctggggacaggaga

SEQ ID NO: 1218512 - DNA, 15 bp, Homo sapiens
gcctggggacaggag

SEQ ID NO: 1218513 - DNA, 15 bp, Homo sapiens
ggcctggggacagga

SEQ ID NO: 1218514 - DNA, 15 bp, Homo sapiens
cggcctggggacagg

SEQ ID NO: 1218515 - DNA, 15 bp, Homo sapiens
acggcctggggacag

SEQ ID NO: 1218516 - DNA, 15 bp, Homo sapiens
aacggcctggggaca

SEQ ID NO: 1218517 - DNA, 15 bp, Homo sapiens
gaacggcctggggac

SEQ ID NO: 1218518 - DNA, 15 bp, Homo sapiens
ggaacggcctgggga

SEQ ID NO: 1218519 - DNA, 15 bp, Homo sapiens
gggaacggcctgggg

SEQ ID NO: 1218520 - DNA, 15 bp, Homo sapiens
ggggaacggcctggg

SEQ ID NO: 1218521 - DNA, 15 bp, Homo sapiens
aggggaacggcctgg

SEQ ID NO: 1218522 - DNA, 15 bp, Homo sapiens
aaggggaacggcctg

SEQ ID NO: 1218523 - DNA, 15 bp, Homo sapiens
gaaggggaacggcct

SEQ ID NO: 1218524 - DNA, 15 bp, Homo sapiens
ggaaggggaacggcc

SEQ ID NO: 1218525 - DNA, 15 bp, Homo sapiens
tggaaggggaacggc

SEQ ID NO: 1218526 - DNA, 15 bp, Homo sapiens
ctggaaggggaacgg

SEQ ID NO: 1218527 - DNA, 15 bp, Homo sapiens
gctggaaggggaacg

SEQ ID NO: 1218528 - DNA, 15 bp, Homo sapiens
tgctggaaggggaac

SEQ ID NO: 1218529 - DNA, 15 bp, Homo sapiens
ctgctggaaggggaa

SEQ ID NO: 1218530 - DNA, 15 bp, Homo sapiens
gctgctggaagggga

SEQ ID NO: 1218531 - DNA, 15 bp, Homo sapiens
ggctgctggaagggg

SEQ ID NO: 1218532 - DNA, 15 bp, Homo sapiens
gggctgctggaaggg

SEQ ID NO: 1218533 - DNA, 15 bp, Homo sapiens
cgggctgctggaagg

SEQ ID NO: 1218534 - DNA, 15 bp, Homo sapiens
tcgggctgctggaag

SEQ ID NO: 1218535 - DNA, 15 bp, Homo sapiens
ctcgggctgctggaa

SEQ ID NO: 1218536 - DNA, 15 bp, Homo sapiens
cctcgggctgctgga

SEQ ID NO: 1218537 - DNA, 15 bp, Homo sapiens
gcctcgggctgctgg

SEQ ID NO: 1218538 - DNA, 15 bp, Homo sapiens
tgcctcgggctgctg

SEQ ID NO: 1218539 - DNA, 15 bp, Homo sapiens
atgcctcgggctgct

SEQ ID NO: 1218540 - DNA, 15 bp, Homo sapiens
gatgcctcgggctgc

SEQ ID NO: 1218541 - DNA, 15 bp, Homo sapiens
ggatgcctcgggctg

SEQ ID NO: 1218542 - DNA, 15 bp, Homo sapiens
gggatgcctcgggct

SEQ ID NO: 1218543 - DNA, 15 bp, Homo sapiens
tgggatgcctcgggc

SEQ ID NO: 1218544 - DNA, 15 bp, Homo sapiens
ctgggatgcctcggg

SEQ ID NO: 1218545 - DNA, 15 bp, Homo sapiens
tctgggatgcctcgg

SEQ ID NO: 1218546 - DNA, 15 bp, Homo sapiens
gtctgggatgcctcg

SEQ ID NO: 1218547 - DNA, 15 bp, Homo sapiens
ggtctgggatgcctc

SEQ ID NO: 1218548 - DNA, 15 bp, Homo sapiens
tggtctgggatgcct

SEQ ID NO: 1218549 - DNA, 15 bp, Homo sapiens
gtggtctgggatgcc

SEQ ID NO: 1218550 - DNA, 15 bp, Homo sapiens
tgtggtctgggatgc

SEQ ID NO: 1218551 - DNA, 15 bp, Homo sapiens
ctgtggtctgggatg

SEQ ID NO: 1218552 - DNA, 15 bp, Homo sapiens
gctgtggtctgggat

SEQ ID NO: 1218553 - DNA, 15 bp, Homo sapiens
agctgtggtctggga

SEQ ID NO: 1218554 - DNA, 15 bp, Homo sapiens
cagctgtggtctggg

SEQ ID NO: 1218555 - DNA, 15 bp, Homo sapiens
acagctgtggtctgg

SEQ ID NO: 1218556 - DNA, 15 bp, Homo sapiens
gacagctgtggtctg

SEQ ID NO: 1218557 - DNA, 15 bp, Homo sapiens
agacagctgtggtct

SEQ ID NO: 1218558 - DNA, 15 bp, Homo sapiens
cagacagctgtggtc

SEQ ID NO: 1218559 - DNA, 15 bp, Homo sapiens
gcagacagctgtggt

SEQ ID NO: 1218560 - DNA, 15 bp, Homo sapiens
tgcagacagctgtgg

SEQ ID NO: 1218561 - DNA, 15 bp, Homo sapiens
ctgcagacagctgtg

SEQ ID NO: 1218562 - DNA, 15 bp, Homo sapiens
actgcagacagctgt

SEQ ID NO: 1218563 - DNA, 15 bp, Homo sapiens
cactgcagacagctg

SEQ ID NO: 1218564 - DNA, 15 bp, Homo sapiens
tcactgcagacagct

SEQ ID NO: 1218565 - DNA, 15 bp, Homo sapiens
ctcactgcagacagc

SEQ ID NO: 1218566 - DNA, 15 bp, Homo sapiens
actcactgcagacag

SEQ ID NO: 1218567 - DNA, 15 bp, Homo sapiens
gactcactgcagaca

SEQ ID NO: 1218568 - DNA, 15 bp, Homo sapiens
tgactcactgcagac

SEQ ID NO: 1218569 - DNA, 15 bp, Homo sapiens
ctgactcactgcaga

SEQ ID NO: 1218570 - DNA, 15 bp, Homo sapiens
gctgactcactgcag

SEQ ID NO: 1218571 - DNA, 15 bp, Homo sapiens
ggctgactcactgca

SEQ ID NO: 1218572 - DNA, 15 bp, Homo sapiens
aggctgactcactgc

SEQ ID NO: 1218573 - DNA, 15 bp, Homo sapiens
caggctgactcactg

SEQ ID NO: 1218574 - DNA, 15 bp, Homo sapiens
ccaggctgactcact

SEQ ID NO: 1218575 - DNA, 15 bp, Homo sapiens
tccaggctgactcac

SEQ ID NO: 1218576 - DNA, 15 bp, Homo sapiens
ctccaggctgactca

SEQ ID NO: 1218577 - DNA, 15 bp, Homo sapiens
gctccaggctgactc

SEQ ID NO: 1218578 - DNA, 15 bp, Homo sapiens
ggctccaggctgact

SEQ ID NO: 1218579 - DNA, 15 bp, Homo sapiens
aggctccaggctgac

SEQ ID NO: 1218580 - DNA, 15 bp, Homo sapiens
gaggctccaggctga

SEQ ID NO: 1218581 - DNA, 15 bp, Homo sapiens
agaggctccaggctg

SEQ ID NO: 1218582 - DNA, 15 bp, Homo sapiens
cagaggctccaggct

SEQ ID NO: 1218583 - DNA, 15 bp, Homo sapiens
ccagaggctccaggc

SEQ ID NO: 1218584 - DNA, 15 bp, Homo sapiens
cccagaggctccagg

SEQ ID NO: 1218585 - DNA, 15 bp, Homo sapiens
gcccagaggctccag

SEQ ID NO: 1218586 - DNA, 15 bp, Homo sapiens
agcccagaggctcca

SEQ ID NO: 1218587 - DNA, 15 bp, Homo sapiens
cagcccagaggctcc

SEQ ID NO: 1218588 - DNA, 15 bp, Homo sapiens
tcagcccagaggctc

SEQ ID NO: 1218589 - DNA, 15 bp, Homo sapiens
ctcagcccagaggct

SEQ ID NO: 1218590 - DNA, 15 bp, Homo sapiens
gctcagcccagaggc

SEQ ID NO: 1218591 - DNA, 15 bp, Homo sapiens
ggctcagcccagagg

SEQ ID NO: 1218592 - DNA, 15 bp, Homo sapiens
cggctcagcccagag

SEQ ID NO: 1218593 - DNA, 15 bp, Homo sapiens
gcggctcagcccaga

SEQ ID NO: 1218594 - DNA, 15 bp, Homo sapiens
cgcggctcagcccag

SEQ ID NO: 1218595 - DNA, 15 bp, Homo sapiens
ccgcggctcagccca

SEQ ID NO: 1218596 - DNA, 15 bp, Homo sapiens
gccgcggctcagccc

SEQ ID NO: 1218597 - DNA, 15 bp, Homo sapiens
agccgcggctcagcc

SEQ ID NO: 1218598 - DNA, 15 bp, Homo sapiens
cagccgcggctcagc

SEQ ID NO: 1218599 - DNA, 15 bp, Homo sapiens
gcagccgcggctcag

SEQ ID NO: 1218600 - DNA, 15 bp, Homo sapiens
ggcagccgcggctca

SEQ ID NO: 1218601 - DNA, 15 bp, Homo sapiens
tggcagccgcggctc

SEQ ID NO: 1218602 - DNA, 15 bp, Homo sapiens
ctggcagccgcggct

SEQ ID NO: 1218603 - DNA, 15 bp, Homo sapiens
tctggcagccgcggc

SEQ ID NO: 1218604 - DNA, 15 bp, Homo sapiens
ctctggcagccgcgg

SEQ ID NO: 1218605 - DNA, 15 bp, Homo sapiens
cctctggcagccgcg

SEQ ID NO: 1218606 - DNA, 15 bp, Homo sapiens
ccctctggcagccgc

SEQ ID NO: 1218607 - DNA, 15 bp, Homo sapiens
tccctctggcagccg

SEQ ID NO: 1218608 - DNA, 15 bp, Homo sapiens
ctccctctggcagcc

SEQ ID NO: 1218609 - DNA, 15 bp, Homo sapiens
cctccctctggcagc

SEQ ID NO: 1218610 - DNA, 15 bp, Homo sapiens
acctccctctggcag

SEQ ID NO: 1218611 - DNA, 15 bp, Homo sapiens
cacctccctctggca

SEQ ID NO: 1218612 - DNA, 15 bp, Homo sapiens
ccacctccctctggc

SEQ ID NO: 1218613 - DNA, 15 bp, Homo sapiens
cccacctccctctgg

SEQ ID NO: 1218614 - DNA, 15 bp, Homo sapiens
ccccacctccctctg

SEQ ID NO: 1218615 - DNA, 15 bp, Homo sapiens
tccccacctccctct

SEQ ID NO: 1218616 - DNA, 15 bp, Homo sapiens
ctccccacctccctc

SEQ ID NO: 1218617 - DNA, 15 bp, Homo sapiens
tctccccacctccct

SEQ ID NO: 1218618 - DNA, 15 bp, Homo sapiens
ctctccccacctccc

SEQ ID NO: 1218619 - DNA, 15 bp, Homo sapiens
cctctccccacctcc

SEQ ID NO: 1218620 - DNA, 15 bp, Homo sapiens
ccctctccccacctc

SEQ ID NO: 1218621 - DNA, 15 bp, Homo sapiens
cccctctccccacct

SEQ ID NO: 1218622 - DNA, 15 bp, Homo sapiens
acccctctccccacc

SEQ ID NO: 1218623 - DNA, 15 bp, Homo sapiens
cacccctctccccac

SEQ ID NO: 1218624 - DNA, 15 bp, Homo sapiens
gcacccctctcccca

SEQ ID NO: 1218625 - DNA, 15 bp, Homo sapiens
tgcacccctctcccc

SEQ ID NO: 1218626 - DNA, 15 bp, Homo sapiens
ctgcacccctctccc

SEQ ID NO: 1218627 - DNA, 15 bp, Homo sapiens
cctgcacccctctcc

SEQ ID NO: 1218628 - DNA, 15 bp, Homo sapiens
gcctgcacccctctc

SEQ ID NO: 1218629 - DNA, 15 bp, Homo sapiens
agcctgcacccctct

SEQ ID NO: 1218630 - DNA, 15 bp, Homo sapiens
cagcctgcacccctc

SEQ ID NO: 1218631 - DNA, 15 bp, Homo sapiens
gcagcctgcacccct

SEQ ID NO: 1218632 - DNA, 15 bp, Homo sapiens
ggcagcctgcacccc

SEQ ID NO: 1218633 - DNA, 15 bp, Homo sapiens
gggcagcctgcaccc

SEQ ID NO: 1218634 - DNA, 15 bp, Homo sapiens
agggcagcctgcacc

SEQ ID NO: 1218635 - DNA, 15 bp, Homo sapiens
cagggcagcctgcac

SEQ ID NO: 1218636 - DNA, 15 bp, Homo sapiens
gcagggcagcctgca

SEQ ID NO: 1218637 - DNA, 15 bp, Homo sapiens
ggcagggcagcctgc

SEQ ID NO: 1218638 - DNA, 15 bp, Homo sapiens
gggcagggcagcctg

SEQ ID NO: 1218639 - DNA, 15 bp, Homo sapiens
agggcagggcagcct

SEQ ID NO: 1218640 - DNA, 15 bp, Homo sapiens
cagggcagggcagcc

SEQ ID NO: 1218641 - DNA, 15 bp, Homo sapiens
gcagggcagggcagc

SEQ ID NO: 1218642 - DNA, 15 bp, Homo sapiens
tgcagggcagggcag

SEQ ID NO: 1218643 - DNA, 15 bp, Homo sapiens
ctgcagggcagggca

SEQ ID NO: 1218644 - DNA, 15 bp, Homo sapiens
gctgcagggcagggc

SEQ ID NO: 1218645 - DNA, 15 bp, Homo sapiens
agctgcagggcaggg

SEQ ID NO: 1218646 - DNA, 15 bp, Homo sapiens
cagctgcagggcagg

SEQ ID NO: 1218647 - DNA, 15 bp, Homo sapiens
ccagctgcagggcag

SEQ ID NO: 1218648 - DNA, 15 bp, Homo sapiens
gccagctgcagggca

SEQ ID NO: 1218649 - DNA, 15 bp, Homo sapiens
ggccagctgcagggc

SEQ ID NO: 1218650 - DNA, 15 bp, Homo sapiens
gggccagctgcaggg

SEQ ID NO: 1218651 - DNA, 15 bp, Homo sapiens
agggccagctgcagg

SEQ ID NO: 1218652 - DNA, 15 bp, Homo sapiens
cagggccagctgcag

SEQ ID NO: 1218653 - DNA, 15 bp, Homo sapiens
ccagggccagctgca

SEQ ID NO: 1218654 - DNA, 15 bp, Homo sapiens
gccagggccagctgc

SEQ ID NO: 1218655 - DNA, 15 bp, Homo sapiens
ggccagggccagctg

SEQ ID NO: 1218656 - DNA, 15 bp, Homo sapiens
aggccagggccagct

SEQ ID NO: 1218657 - DNA, 15 bp, Homo sapiens
taggccagggccagc

SEQ ID NO: 1218658 - DNA, 15 bp, Homo sapiens
ttaggccagggccag

SEQ ID NO: 1218659 - DNA, 15 bp, Homo sapiens
attaggccagggcca

SEQ ID NO: 1218660 - DNA, 15 bp, Homo sapiens
gattaggccagggcc

SEQ ID NO: 1218661 - DNA, 15 bp, Homo sapiens
ggattaggccagggc

SEQ ID NO: 1218662 - DNA, 15 bp, Homo sapiens
gggattaggccaggg

SEQ ID NO: 1218663 - DNA, 15 bp, Homo sapiens
ggggattaggccagg

SEQ ID NO: 1218664 - DNA, 15 bp, Homo sapiens
aggggattaggccag

SEQ ID NO: 1218665 - DNA, 15 bp, Homo sapiens
gaggggattaggcca

SEQ ID NO: 1218666 - DNA, 15 bp, Homo sapiens
ggaggggattaggcc

SEQ ID NO: 1218667 - DNA, 15 bp, Homo sapiens
gggaggggattaggc

SEQ ID NO: 1218668 - DNA, 15 bp, Homo sapiens
ggggaggggattagg

SEQ ID NO: 1218669 - DNA, 15 bp, Homo sapiens
cggggaggggattag

SEQ ID NO: 1218670 - DNA, 15 bp, Homo sapiens
gcggggaggggatta

SEQ ID NO: 1218671 - DNA, 15 bp, Homo sapiens
agcggggaggggatt

SEQ ID NO: 1218672 - DNA, 15 bp, Homo sapiens
gagcggggaggggat

SEQ ID NO: 1218673 - DNA, 15 bp, Homo sapiens
ggagcggggagggga

SEQ ID NO: 1218674 - DNA, 15 bp, Homo sapiens
gggagcggggagggg

SEQ ID NO: 1218675 - DNA, 15 bp, Homo sapiens
ggggagcggggaggg

SEQ ID NO: 1218676 - DNA, 15 bp, Homo sapiens
tggggagcggggagg

SEQ ID NO: 1218677 - DNA, 15 bp, Homo sapiens
ctggggagcggggag

SEQ ID NO: 1218678 - DNA, 15 bp, Homo sapiens
actggggagcgggga

SEQ ID NO: 1218679 - DNA, 15 bp, Homo sapiens
gactggggagcgggg

SEQ ID NO: 1218680 - DNA, 15 bp, Homo sapiens
agactggggagcggg

SEQ ID NO: 1218681 - DNA, 15 bp, Homo sapiens
cagactggggagcgg

SEQ ID NO: 1218682 - DNA, 15 bp, Homo sapiens
ccagactggggagcg

SEQ ID NO: 1218683 - DNA, 15 bp, Homo sapiens
cccagactggggagc

SEQ ID NO: 1218684 - DNA, 15 bp, Homo sapiens
ccccagactggggag

SEQ ID NO: 1218685 - DNA, 15 bp, Homo sapiens
accccagactgggga

SEQ ID NO: 1218686 - DNA, 15 bp, Homo sapiens
gaccccagactgggg

SEQ ID NO: 1218687 - DNA, 15 bp, Homo sapiens
tgaccccagactggg

SEQ ID NO: 1218688 - DNA, 15 bp, Homo sapiens
ctgaccccagactgg

SEQ ID NO: 1218689 - DNA, 15 bp, Homo sapiens
gctgaccccagactg

SEQ ID NO: 1218690 - DNA, 15 bp, Homo sapiens
tgctgaccccagact

SEQ ID NO: 1218691 - DNA, 15 bp, Homo sapiens
gtgctgaccccagac

SEQ ID NO: 1218692 - DNA, 15 bp, Homo sapiens
ggtgctgaccccaga

SEQ ID NO: 1218693 - DNA, 15 bp, Homo sapiens
gggtgctgaccccag

SEQ ID NO: 1218694 - DNA, 15 bp, Homo sapiens
agggtgctgacccca

SEQ ID NO: 1218695 - DNA, 15 bp, Homo sapiens
gagggtgctgacccc

SEQ ID NO: 1218696 - DNA, 15 bp, Homo sapiens
ggagggtgctgaccc

SEQ ID NO: 1218697 - DNA, 15 bp, Homo sapiens
aggagggtgctgacc

SEQ ID NO: 1218698 - DNA, 15 bp, Homo sapiens
gaggagggtgctgac

SEQ ID NO: 1218699 - DNA, 15 bp, Homo sapiens
ggaggagggtgctga

SEQ ID NO: 1218700 - DNA, 15 bp, Homo sapiens
gggaggagggtgctg

SEQ ID NO: 1218701 - DNA, 15 bp, Homo sapiens
agggaggagggtgct

SEQ ID NO: 1218702 - DNA, 15 bp, Homo sapiens
aagggaggagggtgc

SEQ ID NO: 1218703 - DNA, 15 bp, Homo sapiens
tgcaagggaggaggg

SEQ ID NO: 1218704 - DNA, 15 bp, Homo sapiens
ctgcaagggaggagg

SEQ ID NO: 1218705 - DNA, 15 bp, Homo sapiens
cctgcaagggaggag

SEQ ID NO: 1218706 - DNA, 15 bp, Homo sapiens
gcctgcaagggagga

SEQ ID NO: 1218707 - DNA, 15 bp, Homo sapiens
tgcctgcaagggagg

SEQ ID NO: 1218708 - DNA, 15 bp, Homo sapiens
ctgcctgcaagggag

SEQ ID NO: 1218709 - DNA, 15 bp, Homo sapiens
actgcctgcaaggga

SEQ ID NO: 1218710 - DNA, 15 bp, Homo sapiens
cactgcctgcaaggg

SEQ ID NO: 1218711 - DNA, 15 bp, Homo sapiens
tcactgcctgcaagg

SEQ ID NO: 1218712 - DNA, 15 bp, Homo sapiens
atcactgcctgcaag

SEQ ID NO: 1218713 - DNA, 15 bp, Homo sapiens
aatcactgcctgcaa

SEQ ID NO: 1218714 - DNA, 15 bp, Homo sapiens
aaatcactgcctgca

SEQ ID NO: 1218715 - DNA, 15 bp, Homo sapiens
aaaatcactgcctgc

SEQ ID NO: 1218716 - DNA, 15 bp, Homo sapiens
gaaaatcactgcctg

SEQ ID NO: 1218717 - DNA, 15 bp, Homo sapiens
ggaaaatcactgcct

SEQ ID NO: 1218718 - DNA, 15 bp, Homo sapiens
cggaaaatcactgcc

SEQ ID NO: 1218719 - DNA, 15 bp, Homo sapiens
acggaaaatcactgc

SEQ ID NO: 1218720 - DNA, 15 bp, Homo sapiens
cacggaaaatcactg

SEQ ID NO: 1218721 - DNA, 15 bp, Homo sapiens
tcacggaaaatcact

SEQ ID NO: 1218722 - DNA, 15 bp, Homo sapiens
atcacggaaaatcac

SEQ ID NO: 1218723 - DNA, 15 bp, Homo sapiens
catcacggaaaatca

SEQ ID NO: 1218724 - DNA, 15 bp, Homo sapiens
tcatcacggaaaatc

SEQ ID NO: 1218725 - DNA, 15 bp, Homo sapiens
atcatcacggaaaat

SEQ ID NO: 1218726 - DNA, 15 bp, Homo sapiens
catcatcacggaaaa

SEQ ID NO: 1218727 - DNA, 15 bp, Homo sapiens
tcatcatcacggaaa

SEQ ID NO: 1218728 - DNA, 15 bp, Homo sapiens
ttcatcatcacggaa

SEQ ID NO: 1218729 - DNA, 15 bp, Homo sapiens
cttcatcatcacgga

SEQ ID NO: 1218730 - DNA, 15 bp, Homo sapiens
ccttcatcatcacgg

SEQ ID NO: 1218731 - DNA, 15 bp, Homo sapiens
tccttcatcatcacg

SEQ ID NO: 1218732 - DNA, 15 bp, Homo sapiens
ttccttcatcatcac

SEQ ID NO: 1218733 - DNA, 15 bp, Homo sapiens
attccttcatcatca

SEQ ID NO: 1218734 - DNA, 15 bp, Homo sapiens
tattccttcatcatc

SEQ ID NO: 1218735 - DNA, 15 bp, Homo sapiens
ttattccttcatcat

SEQ ID NO: 1218736 - DNA, 15 bp, Homo sapiens
tttattccttcatca

SEQ ID NO: 1218737 - DNA, 15 bp, Homo sapiens
ttttattccttcatc

SEQ ID NO: 1218738 - DNA, 15 bp, Homo sapiens
tttttattccttcat

SEQ ID NO: 1218739 - DNA, 15 bp, Homo sapiens
ttttttattccttca

SEQ ID NO: 1218740 - DNA, 15 bp, Homo sapiens
cttttttattccttc

SEQ ID NO: 1218741 - DNA, 15 bp, Homo sapiens
gcttttttattcctt

SEQ ID NO: 1218742 - DNA, 15 bp, Homo sapiens
ggcttttttattcct

SEQ ID NO: 1218743 - DNA, 15 bp, Homo sapiens
tggcttttttattcc

SEQ ID NO: 1218744 - DNA, 15 bp, Homo sapiens
gtggcttttttattc

SEQ ID NO: 1218745 - DNA, 15 bp, Homo sapiens
cgtggcttttttatt

SEQ ID NO: 1218746 - DNA, 15 bp, Homo sapiens
ccgtggcttttttat

SEQ ID NO: 1218747 - DNA, 15 bp, Homo sapiens
tccgtggctttttta

SEQ ID NO: 1218748 - DNA, 15 bp, Homo sapiens
ctccgtggctttttt

SEQ ID NO: 1218749 - DNA, 15 bp, Homo sapiens
cctccgtggcttttt

SEQ ID NO: 1218750 - DNA, 15 bp, Homo sapiens
ccctccgtggctttt

SEQ ID NO: 1218751 - DNA, 15 bp, Homo sapiens
accctccgtggcttt

SEQ ID NO: 1218752 - DNA, 15 bp, Homo sapiens
aaccctccgtggctt

SEQ ID NO: 1218753 - DNA, 15 bp, Homo sapiens
gaaccctccgtggct

SEQ ID NO: 1218754 - DNA, 15 bp, Homo sapiens
agaaccctccgtggc

SEQ ID NO: 1218755 - DNA, 15 bp, Homo sapiens
cagaaccctccgtgg

SEQ ID NO: 1218756 - DNA, 15 bp, Homo sapiens
tcagaaccctccgtg

SEQ ID NO: 1218757 - DNA, 15 bp, Homo sapiens
ctcagaaccctccgt

SEQ ID NO: 1218758 - DNA, 15 bp, Homo sapiens
actcagaaccctccg

SEQ ID NO: 1218759 - DNA, 15 bp, Homo sapiens
cactcagaaccctcc

SEQ ID NO: 1218760 - DNA, 15 bp, Homo sapiens
ccactcagaaccctc

SEQ ID NO: 1218761 - DNA, 15 bp, Homo sapiens
cccactcagaaccct

SEQ ID NO: 1218762 - DNA, 15 bp, Homo sapiens
tcccactcagaaccc

SEQ ID NO: 1218763 - DNA, 15 bp, Homo sapiens
ctcccactcagaacc

SEQ ID NO: 1218764 - DNA, 15 bp, Homo sapiens
actcccactcagaac

SEQ ID NO: 1218765 - DNA, 15 bp, Homo sapiens
gactcccactcagaa

SEQ ID NO: 1218766 - DNA, 15 bp, Homo sapiens
ggactcccactcaga

SEQ ID NO: 1218767 - DNA, 15 bp, Homo sapiens
gggactcccactcag

SEQ ID NO: 1218768 - DNA, 15 bp, Homo sapiens
agggactcccactca

SEQ ID NO: 1218769 - DNA, 15 bp, Homo sapiens
cagggactcccactc

SEQ ID NO: 1218770 - DNA, 15 bp, Homo sapiens
ccagggactcccact

SEQ ID NO: 1218771 - DNA, 15 bp, Homo sapiens
accagggactcccac

SEQ ID NO: 1218772 - DNA, 15 bp, Homo sapiens
gaccagggactccca

SEQ ID NO: 1218773 - DNA, 15 bp, Homo sapiens
ggaccagggactccc

SEQ ID NO: 1218774 - DNA, 15 bp, Homo sapiens
gggaccagggactcc

SEQ ID NO: 1218775 - DNA, 15 bp, Homo sapiens
ggggaccagggactc

SEQ ID NO: 1218776 - DNA, 15 bp, Homo sapiens
tggggaccagggact

SEQ ID NO: 1218777 - DNA, 15 bp, Homo sapiens
atggggaccagggac

SEQ ID NO: 1218778 - DNA, 15 bp, Homo sapiens
gatggggaccaggga

SEQ ID NO: 1218779 - DNA, 15 bp, Homo sapiens
tgatggggaccaggg

SEQ ID NO: 1218780 - DNA, 15 bp, Homo sapiens
gtgatggggaccagg

SEQ ID NO: 1218781 - DNA, 15 bp, Homo sapiens
ggtgatggggaccag

SEQ ID NO: 1218782 - DNA, 15 bp, Homo sapiens
gggtgatggggacca

SEQ ID NO: 1218783 - DNA, 15 bp, Homo sapiens
ggggtgatggggacc

SEQ ID NO: 1218784 - DNA, 15 bp, Homo sapiens
tggggtgatggggac

SEQ ID NO: 1218785 - DNA, 15 bp, Homo sapiens
gtggggtgatgggga

SEQ ID NO: 1218786 - DNA, 15 bp, Homo sapiens
agtggggtgatgggg

SEQ ID NO: 1218787 - DNA, 15 bp, Homo sapiens
cagtggggtgatggg

SEQ ID NO: 1218788 - DNA, 15 bp, Homo sapiens
tcagtggggtgatgg

SEQ ID NO: 1218789 - DNA, 15 bp, Homo sapiens
ctcagtggggtgatg

SEQ ID NO: 1218790 - DNA, 15 bp, Homo sapiens
gctcagtggggtgat

SEQ ID NO: 1218791 - DNA, 15 bp, Homo sapiens
tgctcagtggggtga

SEQ ID NO: 1218792 - DNA, 15 bp, Homo sapiens
atgctcagtggggtg

SEQ ID NO: 1218793 - DNA, 15 bp, Homo sapiens
catgctcagtggggt

SEQ ID NO: 1218794 - DNA, 15 bp, Homo sapiens
ccatgctcagtgggg

SEQ ID NO: 1218795 - DNA, 15 bp, Homo sapiens
gccatgctcagtggg

SEQ ID NO: 1218796 - DNA, 15 bp, Homo sapiens
ggccatgctcagtgg

SEQ ID NO: 1218797 - DNA, 15 bp, Homo sapiens
cggccatgctcagtg

SEQ ID NO: 1218798 - DNA, 15 bp, Homo sapiens
gcggccatgctcagt

SEQ ID NO: 1218799 - DNA, 15 bp, Homo sapiens
agcggccatgctcag

SEQ ID NO: 1218800 - DNA, 15 bp, Homo sapiens
cagcggccatgctca

SEQ ID NO: 1218801 - DNA, 15 bp, Homo sapiens
ccagcggccatgctc

SEQ ID NO: 1218802 - DNA, 15 bp, Homo sapiens
cccagcggccatgct

SEQ ID NO: 1218803 - DNA, 15 bp, Homo sapiens
ccccagcggccatgc

SEQ ID NO: 1218804 - DNA, 15 bp, Homo sapiens
accccagcggccatg

SEQ ID NO: 1218805 - DNA, 15 bp, Homo sapiens
aaccccagcggccat

SEQ ID NO: 1218806 - DNA, 15 bp, Homo sapiens
aaaccccagcggcca

SEQ ID NO: 1218807 - DNA, 15 bp, Homo sapiens
gaaaccccagcggcc

SEQ ID NO: 1218808 - DNA, 15 bp, Homo sapiens
ggaaaccccagcggc

SEQ ID NO: 1218809 - DNA, 15 bp, Homo sapiens
aggaaaccccagcgg

SEQ ID NO: 1218810 - DNA, 15 bp, Homo sapiens
caggaaaccccagcg

SEQ ID NO: 1218811 - DNA, 15 bp, Homo sapiens
ccaggaaaccccagc

SEQ ID NO: 1218812 - DNA, 15 bp, Homo sapiens
gccaggaaaccccag

SEQ ID NO: 1218813 - DNA, 15 bp, Homo sapiens
tgccaggaaacccca

SEQ ID NO: 1218814 - DNA, 15 bp, Homo sapiens
ttgccaggaaacccc

SEQ ID NO: 1218815 - DNA, 15 bp, Homo sapiens
gttgccaggaaaccc

SEQ ID NO: 1218816 - DNA, 15 bp, Homo sapiens
agttgccaggaaacc

SEQ ID NO: 1218817 - DNA, 15 bp, Homo sapiens
aagttgccaggaaac

SEQ ID NO: 1218818 - DNA, 15 bp, Homo sapiens
aaagttgccaggaaa

SEQ ID NO: 1218819 - DNA, 15 bp, Homo sapiens
gaaagttgccaggaa

SEQ ID NO: 1218820 - DNA, 15 bp, Homo sapiens
agaaagttgccagga

SEQ ID NO: 1218821 - DNA, 15 bp, Homo sapiens
cagaaagttgccagg

SEQ ID NO: 1218822 - DNA, 15 bp, Homo sapiens
gcagaaagttgccag

SEQ ID NO: 1218823 - DNA, 15 bp, Homo sapiens
agcagaaagttgcca

SEQ ID NO: 1218824 - DNA, 15 bp, Homo sapiens
gagcagaaagttgcc

SEQ ID NO: 1218825 - DNA, 15 bp, Homo sapiens
ggagcagaaagttgc

SEQ ID NO: 1218826 - DNA, 15 bp, Homo sapiens
tggagcagaaagttg

SEQ ID NO: 1218827 - DNA, 15 bp, Homo sapiens
atggagcagaaagtt

SEQ ID NO: 1218828 - DNA, 15 bp, Homo sapiens
gatggagcagaaagt

SEQ ID NO: 1218829 - DNA, 15 bp, Homo sapiens
ggatggagcagaaag

SEQ ID NO: 1218830 - DNA, 15 bp, Homo sapiens
cggatggagcagaaa

SEQ ID NO: 1218831 - DNA, 15 bp, Homo sapiens
ccggatggagcagaa

SEQ ID NO: 1218832 - DNA, 15 bp, Homo sapiens
tccggatggagcaga

SEQ ID NO: 1218833 - DNA, 15 bp, Homo sapiens
ctccggatggagcag

SEQ ID NO: 1218834 - DNA, 15 bp, Homo sapiens
gctccggatggagca

SEQ ID NO: 1218835 - DNA, 15 bp, Homo sapiens
ggctccggatggagc

SEQ ID NO: 1218836 - DNA, 15 bp, Homo sapiens
cggctccggatggag

SEQ ID NO: 1218837 - DNA, 15 bp, Homo sapiens
acggctccggatgga

SEQ ID NO: 1218838 - DNA, 15 bp, Homo sapiens
gacggctccggatgg

SEQ ID NO: 1218839 - DNA, 15 bp, Homo sapiens
ggacggctccggatg

SEQ ID NO: 1218840 - DNA, 15 bp, Homo sapiens
gggacggctccggat

SEQ ID NO: 1218841 - DNA, 15 bp, Homo sapiens
agggacggctccgga

SEQ ID NO: 1218842 - DNA, 15 bp, Homo sapiens
gagggacggctccgg

SEQ ID NO: 1218843 - DNA, 15 bp, Homo sapiens
ggagggacggctccg

SEQ ID NO: 1218844 - DNA, 15 bp, Homo sapiens
gggagggacggctcc

SEQ ID NO: 1218845 - DNA, 15 bp, Homo sapiens
ggggagggacggctc

SEQ ID NO: 1218846 - DNA, 15 bp, Homo sapiens
aggggagggacggct

SEQ ID NO: 1218847 - DNA, 15 bp, Homo sapiens
caggggagggacggc

SEQ ID NO: 1218848 - DNA, 15 bp, Homo sapiens
ccaggggagggacgg

SEQ ID NO: 1218849 - DNA, 15 bp, Homo sapiens
cccaggggagggacg

SEQ ID NO: 1218850 - DNA, 15 bp, Homo sapiens
gcccaggggagggac

SEQ ID NO: 1218851 - DNA, 15 bp, Homo sapiens
agcccaggggaggga

SEQ ID NO: 1218852 - DNA, 15 bp, Homo sapiens
cagcccaggggaggg

SEQ ID NO: 1218853 - DNA, 15 bp, Homo sapiens
ccagcccaggggagg

SEQ ID NO: 1218854 - DNA, 15 bp, Homo sapiens
gcccagcccagggga

SEQ ID NO: 1218855 - DNA, 15 bp, Homo sapiens
agcccagcccagggg

SEQ ID NO: 1218856 - DNA, 15 bp, Homo sapiens
cagcccagcccaggg

SEQ ID NO: 1218857 - DNA, 15 bp, Homo sapiens
gcagcccagcccagg

SEQ ID NO: 1218858 - DNA, 15 bp, Homo sapiens
agcagcccagcccag

SEQ ID NO: 1218859 - DNA, 15 bp, Homo sapiens
gagcagcccagccca

SEQ ID NO: 1218860 - DNA, 15 bp, Homo sapiens
agagcagcccagccc

SEQ ID NO: 1218861 - DNA, 15 bp, Homo sapiens
cagagcagcccagcc

SEQ ID NO: 1218862 - DNA, 15 bp, Homo sapiens
ccagagcagcccagc

SEQ ID NO: 1218863 - DNA, 15 bp, Homo sapiens
cccagagcagcccag

SEQ ID NO: 1218864 - DNA, 15 bp, Homo sapiens
ccccagagcagccca

SEQ ID NO: 1218865 - DNA, 15 bp, Homo sapiens
gccccagagcagccc

SEQ ID NO: 1218866 - DNA, 15 bp, Homo sapiens
agccccagagcagcc

SEQ ID NO: 1218867 - DNA, 15 bp, Homo sapiens
cagccccagagcagc

SEQ ID NO: 1218868 - DNA, 15 bp, Homo sapiens
acagccccagagcag

SEQ ID NO: 1218869 - DNA, 15 bp, Homo sapiens
aacagccccagagca

SEQ ID NO: 1218870 - DNA, 15 bp, Homo sapiens
gaacagccccagagc

SEQ ID NO: 1218871 - DNA, 15 bp, Homo sapiens
ggaacagccccagag

SEQ ID NO: 1218872 - DNA, 15 bp, Homo sapiens
aggaacagccccaga

SEQ ID NO: 1218873 - DNA, 15 bp, Homo sapiens
caggaacagccccag

SEQ ID NO: 1218874 - DNA, 15 bp, Homo sapiens
ccaggaacagcccca

SEQ ID NO: 1218875 - DNA, 15 bp, Homo sapiens
cccaggaacagcccc

SEQ ID NO: 1218876 - DNA, 15 bp, Homo sapiens
tcccaggaacagccc

SEQ ID NO: 1218877 - DNA, 15 bp, Homo sapiens
atcccaggaacagcc

SEQ ID NO: 1218878 - DNA, 15 bp, Homo sapiens
catcccaggaacagc

SEQ ID NO: 1218879 - DNA, 15 bp, Homo sapiens
ccatcccaggaacag

SEQ ID NO: 1218880 - DNA, 15 bp, Homo sapiens
cccatcccaggaaca

SEQ ID NO: 1218881 - DNA, 15 bp, Homo sapiens
ccccatcccaggaac

SEQ ID NO: 1218882 - DNA, 15 bp, Homo sapiens
tccccatcccaggaa

SEQ ID NO: 1218883 - DNA, 15 bp, Homo sapiens
ctccccatcccagga

SEQ ID NO: 1218884 - DNA, 15 bp, Homo sapiens
gctccccatcccagg

SEQ ID NO: 1218885 - DNA, 15 bp, Homo sapiens
cgctccccatcccag

SEQ ID NO: 1218886 - DNA, 15 bp, Homo sapiens
ccgctccccatccca

SEQ ID NO: 1218887 - DNA, 15 bp, Homo sapiens
cccgctccccatccc

SEQ ID NO: 1218888 - DNA, 15 bp, Homo sapiens
ccccgctccccatcc

SEQ ID NO: 1218889 - DNA, 15 bp, Homo sapiens
tccccgctccccatc

SEQ ID NO: 1218890 - DNA, 15 bp, Homo sapiens
ctccccgctccccat

SEQ ID NO: 1218891 - DNA, 15 bp, Homo sapiens
gctccccgctcccca

SEQ ID NO: 1218892 - DNA, 15 bp, Homo sapiens
agctccccgctcccc

SEQ ID NO: 1218893 - DNA, 15 bp, Homo sapiens
aagctccccgctccc

SEQ ID NO: 1218894 - DNA, 15 bp, Homo sapiens
caagctccccgctcc

SEQ ID NO: 1218895 - DNA, 15 bp, Homo sapiens
ccaagctccccgctc

SEQ ID NO: 1218896 - DNA, 15 bp, Homo sapiens
cccaagctccccgct

SEQ ID NO: 1218897 - DNA, 15 bp, Homo sapiens
tcccaagctccccgc

SEQ ID NO: 1218898 - DNA, 15 bp, Homo sapiens
ctcccaagctccccg

SEQ ID NO: 1218899 - DNA, 15 bp, Homo sapiens
actcccaagctcccc

SEQ ID NO: 1218900 - DNA, 15 bp, Homo sapiens
tactcccaagctccc

SEQ ID NO: 1218901 - DNA, 15 bp, Homo sapiens
ttactcccaagctcc

SEQ ID NO: 1218902 - DNA, 15 bp, Homo sapiens
tttactcccaagctc

SEQ ID NO: 1218903 - DNA, 15 bp, Homo sapiens
atttactcccaagct

SEQ ID NO: 1218904 - DNA, 15 bp, Homo sapiens
tatttactcccaagc

SEQ ID NO: 1218905 - DNA, 15 bp, Homo sapiens
ctatttactcccaag

SEQ ID NO: 1218906 - DNA, 15 bp, Homo sapiens
actatttactcccaa

SEQ ID NO: 1218907 - DNA, 15 bp, Homo sapiens
cactatttactccca

SEQ ID NO: 1218908 - DNA, 15 bp, Homo sapiens
tcactatttactccc

SEQ ID NO: 1218909 - DNA, 15 bp, Homo sapiens
gtcactatttactcc

SEQ ID NO: 1218910 - DNA, 15 bp, Homo sapiens
tgtcactatttactc

SEQ ID NO: 1218911 - DNA, 15 bp, Homo sapiens
atgtcactatttact

SEQ ID NO: 1218912 - DNA, 15 bp, Homo sapiens
gatgtcactatttac

SEQ ID NO: 1218913 - DNA, 15 bp, Homo sapiens
tgatgtcactattta

SEQ ID NO: 1218914 - DNA, 15 bp, Homo sapiens
ctgatgtcactattt

SEQ ID NO: 1218915 - DNA, 15 bp, Homo sapiens
gctgatgtcactatt

SEQ ID NO: 1218916 - DNA, 15 bp, Homo sapiens
ggctgatgtcactat

SEQ ID NO: 1218917 - DNA, 15 bp, Homo sapiens
tggctgatgtcacta

SEQ ID NO: 1218918 - DNA, 15 bp, Homo sapiens
gtggctgatgtcact

SEQ ID NO: 1218919 - DNA, 15 bp, Homo sapiens
ggtggctgatgtcac

SEQ ID NO: 1218920 - DNA, 15 bp, Homo sapiens
aggtggctgatgtca

SEQ ID NO: 1218921 - DNA, 15 bp, Homo sapiens
taggtggctgatgtc

SEQ ID NO: 1218922 - DNA, 15 bp, Homo sapiens
ctaggtggctgatgt

SEQ ID NO: 1218923 - DNA, 15 bp, Homo sapiens
tctaggtggctgatg

SEQ ID NO: 1218924 - DNA, 15 bp, Homo sapiens
gtctaggtggctgat

SEQ ID NO: 1218925 - DNA, 15 bp, Homo sapiens
tgtctaggtggctga

SEQ ID NO: 1218926 - DNA, 15 bp, Homo sapiens
ctgtctaggtggctg

SEQ ID NO: 1218927 - DNA, 15 bp, Homo sapiens
cctgtctaggtggct

SEQ ID NO: 1218928 - DNA, 15 bp, Homo sapiens
gcctgtctaggtggc

SEQ ID NO: 1218929 - DNA, 15 bp, Homo sapiens
cgcctgtctaggtgg

SEQ ID NO: 1218930 - DNA, 15 bp, Homo sapiens
ccgcctgtctaggtg

SEQ ID NO: 1218931 - DNA, 15 bp, Homo sapiens
cccgcctgtctaggt

SEQ ID NO: 1218932 - DNA, 15 bp, Homo sapiens
ccccgcctgtctagg

SEQ ID NO: 1218933 - DNA, 15 bp, Homo sapiens
gccccgcctgtctag

SEQ ID NO: 1218934 - DNA, 15 bp, Homo sapiens
ggccccgcctgtcta

SEQ ID NO: 1218935 - DNA, 15 bp, Homo sapiens
tggccccgcctgtct

SEQ ID NO: 1218936 - DNA, 15 bp, Homo sapiens
gtggccccgcctgtc

SEQ ID NO: 1218937 - DNA, 15 bp, Homo sapiens
agtggccccgcctgt

SEQ ID NO: 1218938 - DNA, 15 bp, Homo sapiens
cagtggccccgcctg

SEQ ID NO: 1218939 - DNA, 15 bp, Homo sapiens
acagtggccccgcct

SEQ ID NO: 1218940 - DNA, 15 bp, Homo sapiens
cacagtggccccgcc

SEQ ID NO: 1218941 - DNA, 15 bp, Homo sapiens
acacagtggccccgc

SEQ ID NO: 1218942 - DNA, 15 bp, Homo sapiens
gacacagtggccccg

SEQ ID NO: 1218943 - DNA, 15 bp, Homo sapiens
tgacacagtggcccc

SEQ ID NO: 1218944 - DNA, 15 bp, Homo sapiens
ttgacacagtggccc

SEQ ID NO: 1218945 - DNA, 15 bp, Homo sapiens
cttgacacagtggcc

SEQ ID NO: 1218946 - DNA, 15 bp, Homo sapiens
ccttgacacagtggc

SEQ ID NO: 1218947 - DNA, 15 bp, Homo sapiens
cccttgacacagtgg

SEQ ID NO: 1218948 - DNA, 15 bp, Homo sapiens
ccccttgacacagtg

SEQ ID NO: 1218949 - DNA, 15 bp, Homo sapiens
gccccttgacacagt

SEQ ID NO: 1218950 - DNA, 15 bp, Homo sapiens
ggccccttgacacag

SEQ ID NO: 1218951 - DNA, 15 bp, Homo sapiens
tggccccttgacaca

SEQ ID NO: 1218952 - DNA, 15 bp, Homo sapiens
atggccccttgacac

SEQ ID NO: 1218953 - DNA, 15 bp, Homo sapiens
catggccccttgaca

SEQ ID NO: 1218954 - DNA, 15 bp, Homo sapiens
acatggccccttgac

SEQ ID NO: 1218955 - DNA, 15 bp, Homo sapiens
gacatggccccttga

SEQ ID NO: 1218956 - DNA, 15 bp, Homo sapiens
tgacatggccccttg

SEQ ID NO: 1218957 - DNA, 15 bp, Homo sapiens
ctgacatggcccctt

SEQ ID NO: 1218958 - DNA, 15 bp, Homo sapiens
cctgacatggcccct

SEQ ID NO: 1218959 - DNA, 15 bp, Homo sapiens
acctgacatggcccc

SEQ ID NO: 1218960 - DNA, 15 bp, Homo sapiens
aacctgacatggccc

SEQ ID NO: 1218961 - DNA, 15 bp, Homo sapiens
gaacctgacatggcc

SEQ ID NO: 1218962 - DNA, 15 bp, Homo sapiens
ggaacctgacatggc

SEQ ID NO: 1218963 - DNA, 15 bp, Homo sapiens
gggaacctgacatgg

SEQ ID NO: 1218964 - DNA, 15 bp, Homo sapiens
agggaacctgacatg

SEQ ID NO: 1218965 - DNA, 15 bp, Homo sapiens
aagggaacctgacat

SEQ ID NO: 1218966 - DNA, 15 bp, Homo sapiens
gaagggaacctgaca

SEQ ID NO: 1218967 - DNA, 15 bp, Homo sapiens
agaagggaacctgac

SEQ ID NO: 1218968 - DNA, 15 bp, Homo sapiens
gagaagggaacctga

SEQ ID NO: 1218969 - DNA, 15 bp, Homo sapiens
ggagaagggaacctg

SEQ ID NO: 1218970 - DNA, 15 bp, Homo sapiens
gggagaagggaacct

SEQ ID NO: 1218971 - DNA, 15 bp, Homo sapiens
tgggagaagggaacc

SEQ ID NO: 1218972 - DNA, 15 bp, Homo sapiens
ctgggagaagggaac

SEQ ID NO: 1218973 - DNA, 15 bp, Homo sapiens
tctgggagaagggaa

SEQ ID NO: 1218974 - DNA, 15 bp, Homo sapiens
ctctgggagaaggga

SEQ ID NO: 1218975 - DNA, 15 bp, Homo sapiens
gctctgggagaaggg

SEQ ID NO: 1218976 - DNA, 15 bp, Homo sapiens
agctctgggagaagg

SEQ ID NO: 1218977 - DNA, 15 bp, Homo sapiens
cagctctgggagaag

SEQ ID NO: 1218978 - DNA, 15 bp, Homo sapiens
ccagctctgggagaa

SEQ ID NO: 1218979 - DNA, 15 bp, Homo sapiens
cccagctctgggaga

SEQ ID NO: 1218980 - DNA, 15 bp, Homo sapiens
ccccagctctgggag

SEQ ID NO: 1218981 - DNA, 15 bp, Homo sapiens
gccccagctctggga

SEQ ID NO: 1218982 - DNA, 15 bp, Homo sapiens
agccccagctctggg

SEQ ID NO: 1218983 - DNA, 15 bp, Homo sapiens
aagccccagctctgg

SEQ ID NO: 1218984 - DNA, 15 bp, Homo sapiens
caagccccagctctg

SEQ ID NO: 1218985 - DNA, 15 bp, Homo sapiens
acaagccccagctct

SEQ ID NO: 1218986 - DNA, 15 bp, Homo sapiens
gacaagccccagctc

SEQ ID NO: 1218987 - DNA, 15 bp, Homo sapiens
agacaagccccagct

SEQ ID NO: 1218988 - DNA, 15 bp, Homo sapiens
aagacaagccccagc

SEQ ID NO: 1218989 - DNA, 15 bp, Homo sapiens
caagacaagccccag

SEQ ID NO: 1218990 - DNA, 15 bp, Homo sapiens
ccaagacaagcccca

SEQ ID NO: 1218991 - DNA, 15 bp, Homo sapiens
tccaagacaagcccc

SEQ ID NO: 1218992 - DNA, 15 bp, Homo sapiens
ttccaagacaagccc

SEQ ID NO: 1218993 - DNA, 15 bp, Homo sapiens
attccaagacaagcc

SEQ ID NO: 1218994 - DNA, 15 bp, Homo sapiens
aattccaagacaagc

SEQ ID NO: 1218995 - DNA, 15 bp, Homo sapiens
caattccaagacaag

SEQ ID NO: 1218996 - DNA, 15 bp, Homo sapiens
ccaattccaagacaa

SEQ ID NO: 1218997 - DNA, 15 bp, Homo sapiens
tccaattccaagaca

SEQ ID NO: 1218998 - DNA, 15 bp, Homo sapiens
ttccaattccaagac

SEQ ID NO: 1218999 - DNA, 15 bp, Homo sapiens
tttccaattccaaga

SEQ ID NO: 1219000 - DNA, 15 bp, Homo sapiens
ttttccaattccaag

SEQ ID NO: 1219001 - DNA, 15 bp, Homo sapiens
attttccaattccaa

SEQ ID NO: 1219002 - DNA, 15 bp, Homo sapiens
gattttccaattcca

SEQ ID NO: 1219003 - DNA, 15 bp, Homo sapiens
ggattttccaattcc

SEQ ID NO: 1219004 - DNA, 15 bp, Homo sapiens
aggattttccaattc

SEQ ID NO: 1219005 - DNA, 15 bp, Homo sapiens
gaggattttccaatt

SEQ ID NO: 1219006 - DNA, 15 bp, Homo sapiens
ggaggattttccaat

SEQ ID NO: 1219007 - DNA, 15 bp, Homo sapiens
gggaggattttccaa

SEQ ID NO: 1219008 - DNA, 15 bp, Homo sapiens
ggggaggattttcca

SEQ ID NO: 1219009 - DNA, 15 bp, Homo sapiens
tggggaggattttcc

SEQ ID NO: 1219010 - DNA, 15 bp, Homo sapiens
gtggggaggattttc

SEQ ID NO: 1219011 - DNA, 15 bp, Homo sapiens
tgtggggaggatttt

SEQ ID NO: 1219012 - DNA, 15 bp, Homo sapiens
atgtggggaggattt

SEQ ID NO: 1219013 - DNA, 15 bp, Homo sapiens
aatgtggggaggatt

SEQ ID NO: 1219014 - DNA, 15 bp, Homo sapiens
caatgtggggaggat

SEQ ID NO: 1219015 - DNA, 15 bp, Homo sapiens
gcaatgtggggagga

SEQ ID NO: 1219016 - DNA, 15 bp, Homo sapiens
ggcaatgtggggagg

SEQ ID NO: 1219017 - DNA, 15 bp, Homo sapiens
gggcaatgtggggag

SEQ ID NO: 1219018 - DNA, 15 bp, Homo sapiens
agggcaatgtgggga

SEQ ID NO: 1219019 - DNA, 15 bp, Homo sapiens
cagggcaatgtgggg

SEQ ID NO: 1219020 - DNA, 15 bp, Homo sapiens
acagggcaatgtggg

SEQ ID NO: 1219021 - DNA, 15 bp, Homo sapiens
cacagggcaatgtgg

SEQ ID NO: 1219022 - DNA, 15 bp, Homo sapiens
ccacagggcaatgtg

SEQ ID NO: 1219023 - DNA, 15 bp, Homo sapiens
tccacagggcaatgt

SEQ ID NO: 1219024 - DNA, 15 bp, Homo sapiens
gtccacagggcaatg

SEQ ID NO: 1219025 - DNA, 15 bp, Homo sapiens
agtccacagggcaat

SEQ ID NO: 1219026 - DNA, 15 bp, Homo sapiens
cagtccacagggcaa

SEQ ID NO: 1219027 - DNA, 15 bp, Homo sapiens
gcagtccacagggca

SEQ ID NO: 1219028 - DNA, 15 bp, Homo sapiens
tgcagtccacagggc

SEQ ID NO: 1219029 - DNA, 15 bp, Homo sapiens
ctgcagtccacaggg

SEQ ID NO: 1219030 - DNA, 15 bp, Homo sapiens
cctgcagtccacagg

SEQ ID NO: 1219031 - DNA, 15 bp, Homo sapiens
gcctgcagtccacag

SEQ ID NO: 1219032 - DNA, 15 bp, Homo sapiens
ggcctgcagtccaca

SEQ ID NO: 1219033 - DNA, 15 bp, Homo sapiens
aggcctgcagtccac

SEQ ID NO: 1219034 - DNA, 15 bp, Homo sapiens
caggcctgcagtcca

SEQ ID NO: 1219035 - DNA, 15 bp, Homo sapiens
ccaggcctgcagtcc

SEQ ID NO: 1219036 - DNA, 15 bp, Homo sapiens
gccaggcctgcagtc

SEQ ID NO: 1219037 - DNA, 15 bp, Homo sapiens
cgccaggcctgcagt

SEQ ID NO: 1219038 - DNA, 15 bp, Homo sapiens
acgccaggcctgcag

SEQ ID NO: 1219039 - DNA, 15 bp, Homo sapiens
cacgccaggcctgca

SEQ ID NO: 1219040 - DNA, 15 bp, Homo sapiens
tcacgccaggcctgc

SEQ ID NO: 1219041 - DNA, 15 bp, Homo sapiens
atcacgccaggcctg

SEQ ID NO: 1219042 - DNA, 15 bp, Homo sapiens
gatcacgccaggcct

SEQ ID NO: 1219043 - DNA, 15 bp, Homo sapiens
tgatcacgccaggcc

SEQ ID NO: 1219044 - DNA, 15 bp, Homo sapiens
ttgatcacgccaggc

SEQ ID NO: 1219045 - DNA, 15 bp, Homo sapiens
cttgatcacgccagg

SEQ ID NO: 1219046 - DNA, 15 bp, Homo sapiens
ccttgatcacgccag

SEQ ID NO: 1219047 - DNA, 15 bp, Homo sapiens
tccttgatcacgcca

SEQ ID NO: 1219048 - DNA, 15 bp, Homo sapiens
gtccttgatcacgcc

SEQ ID NO: 1219049 - DNA, 15 bp, Homo sapiens
ggtccttgatcacgc

SEQ ID NO: 1219050 - DNA, 15 bp, Homo sapiens
gggtccttgatcacg

SEQ ID NO: 1219051 - DNA, 15 bp, Homo sapiens
ggggtccttgatcac

SEQ ID NO: 1219052 - DNA, 15 bp, Homo sapiens
aggggtccttgatca

SEQ ID NO: 1219053 - DNA, 15 bp, Homo sapiens
caggggtccttgatc

SEQ ID NO: 1219054 - DNA, 15 bp, Homo sapiens
gcaggggtccttgat

SEQ ID NO: 1219055 - DNA, 15 bp, Homo sapiens
ggcaggggtccttga

SEQ ID NO: 1219056 - DNA, 15 bp, Homo sapiens
gggcaggggtccttg

SEQ ID NO: 1219057 - DNA, 15 bp, Homo sapiens
agggcaggggtcctt

SEQ ID NO: 1219058 - DNA, 15 bp, Homo sapiens
gagggcaggggtcct

SEQ ID NO: 1219059 - DNA, 15 bp, Homo sapiens
ggagggcaggggtcc

SEQ ID NO: 1219060 - DNA, 15 bp, Homo sapiens
aggagggcaggggtc

SEQ ID NO: 1219061 - DNA, 15 bp, Homo sapiens
caggagggcaggggt

SEQ ID NO: 1219062 - DNA, 15 bp, Homo sapiens
gcaggagggcagggg

SEQ ID NO: 1219063 - DNA, 15 bp, Homo sapiens
ggcaggagggcaggg

SEQ ID NO: 1219064 - DNA, 15 bp, Homo sapiens
tggcaggagggcagg

SEQ ID NO: 1219065 - DNA, 15 bp, Homo sapiens
atggcaggagggcag

SEQ ID NO: 1219066 - DNA, 15 bp, Homo sapiens
gatggcaggagggca

SEQ ID NO: 1219067 - DNA, 15 bp, Homo sapiens
ggatggcaggagggc

SEQ ID NO: 1219068 - DNA, 15 bp, Homo sapiens
gggatggcaggaggg

SEQ ID NO: 1219069 - DNA, 15 bp, Homo sapiens
ggggatggcaggagg

SEQ ID NO: 1219070 - DNA, 15 bp, Homo sapiens
gggggatggcaggag

SEQ ID NO: 1219071 - DNA, 15 bp, Homo sapiens
agggggatggcagga

SEQ ID NO: 1219072 - DNA, 15 bp, Homo sapiens
aagggggatggcagg

SEQ ID NO: 1219073 - DNA, 15 bp, Homo sapiens
caagggggatggcag

SEQ ID NO: 1219074 - DNA, 15 bp, Homo sapiens
ccaagggggatggca

SEQ ID NO: 1219075 - DNA, 15 bp, Homo sapiens
accaagggggatggc

SEQ ID NO: 1219076 - DNA, 15 bp, Homo sapiens
gaccaagggggatgg

SEQ ID NO: 1219077 - DNA, 15 bp, Homo sapiens
agaccaagggggatg

SEQ ID NO: 1219078 - DNA, 15 bp, Homo sapiens
gagaccaagggggat

SEQ ID NO: 1219079 - DNA, 15 bp, Homo sapiens
ggagaccaaggggga

SEQ ID NO: 1219080 - DNA, 15 bp, Homo sapiens
aggagaccaaggggg

SEQ ID NO: 1219081 - DNA, 15 bp, Homo sapiens
gaggagaccaagggg

SEQ ID NO: 1219082 - DNA, 15 bp, Homo sapiens
ggaggagaccaaggg

SEQ ID NO: 1219083 - DNA, 15 bp, Homo sapiens
tggaggagaccaagg

SEQ ID NO: 1219084 - DNA, 15 bp, Homo sapiens
atggaggagaccaag

SEQ ID NO: 1219085 - DNA, 15 bp, Homo sapiens
catggaggagaccaa

SEQ ID NO: 1219086 - DNA, 15 bp, Homo sapiens
gcatggaggagacca

SEQ ID NO: 1219087 - DNA, 15 bp, Homo sapiens
ggcatggaggagacc

SEQ ID NO: 1219088 - DNA, 15 bp, Homo sapiens
tggcatggaggagac

SEQ ID NO: 1219089 - DNA, 15 bp, Homo sapiens
ctggcatggaggaga

SEQ ID NO: 1219090 - DNA, 15 bp, Homo sapiens
gctggcatggaggag

SEQ ID NO: 1219091 - DNA, 15 bp, Homo sapiens
ggctggcatggagga

SEQ ID NO: 1219092 - DNA, 15 bp, Homo sapiens
aggctggcatggagg

SEQ ID NO: 1219093 - DNA, 15 bp, Homo sapiens
aaggctggcatggag

SEQ ID NO: 1219094 - DNA, 15 bp, Homo sapiens
caaggctggcatgga

SEQ ID NO: 1219095 - DNA, 15 bp, Homo sapiens
gcaaggctggcatgg

SEQ ID NO: 1219096 - DNA, 15 bp, Homo sapiens
agcaaggctggcatg

SEQ ID NO: 1219097 - DNA, 15 bp, Homo sapiens
cagcaaggctggcat

SEQ ID NO: 1219098 - DNA, 15 bp, Homo sapiens
acagcaaggctggca

SEQ ID NO: 1219099 - DNA, 15 bp, Homo sapiens
aacagcaaggctggc

SEQ ID NO: 1219100 - DNA, 15 bp, Homo sapiens
aaacagcaaggctgg

SEQ ID NO: 1219101 - DNA, 15 bp, Homo sapiens
gaaacagcaaggctg

SEQ ID NO: 1219102 - DNA, 15 bp, Homo sapiens
ggaaacagcaaggct

SEQ ID NO: 1219103 - DNA, 15 bp, Homo sapiens
gggaaacagcaaggc

SEQ ID NO: 1219104 - DNA, 15 bp, Homo sapiens
ggggaaacagcaagg

SEQ ID NO: 1219105 - DNA, 15 bp, Homo sapiens
aggggaaacagcaag

SEQ ID NO: 1219106 - DNA, 15 bp, Homo sapiens
caggggaaacagcaa

SEQ ID NO: 1219107 - DNA, 15 bp, Homo sapiens
gcaggggaaacagca

SEQ ID NO: 1219108 - DNA, 15 bp, Homo sapiens
ggcaggggaaacagc

SEQ ID NO: 1219109 - DNA, 15 bp, Homo sapiens
aggcaggggaaacag

SEQ ID NO: 1219110 - DNA, 15 bp, Homo sapiens
caggcaggggaaaca

SEQ ID NO: 1219111 - DNA, 15 bp, Homo sapiens
ccaggcaggggaaac

SEQ ID NO: 1219112 - DNA, 15 bp, Homo sapiens
gccaggcaggggaaa

SEQ ID NO: 1219113 - DNA, 15 bp, Homo sapiens
agccaggcaggggaa

SEQ ID NO: 1219114 - DNA, 15 bp, Homo sapiens
gagccaggcagggga

SEQ ID NO: 1219115 - DNA, 15 bp, Homo sapiens
tgagccaggcagggg

SEQ ID NO: 1219116 - DNA, 15 bp, Homo sapiens
gtgagccaggcaggg

SEQ ID NO: 1219117 - DNA, 15 bp, Homo sapiens
tgtgagccaggcagg

SEQ ID NO: 1219118 - DNA, 15 bp, Homo sapiens
ctgtgagccaggcag

SEQ ID NO: 1219119 - DNA, 15 bp, Homo sapiens
actgtgagccaggca

SEQ ID NO: 1219120 - DNA, 15 bp, Homo sapiens
gactgtgagccaggc

SEQ ID NO: 1219121 - DNA, 15 bp, Homo sapiens
agactgtgagccagg

SEQ ID NO: 1219122 - DNA, 15 bp, Homo sapiens
gagactgtgagccag

SEQ ID NO: 1219123 - DNA, 15 bp, Homo sapiens
ggagactgtgagcca

SEQ ID NO: 1219124 - DNA, 15 bp, Homo sapiens
tggagactgtgagcc

SEQ ID NO: 1219125 - DNA, 15 bp, Homo sapiens
gtggagactgtgagc

SEQ ID NO: 1219126 - DNA, 15 bp, Homo sapiens
tgtggagactgtgag

SEQ ID NO: 1219127 - DNA, 15 bp, Homo sapiens
gtgtggagactgtga

SEQ ID NO: 1219128 - DNA, 15 bp, Homo sapiens
ggtgtggagactgtg

SEQ ID NO: 1219129 - DNA, 15 bp, Homo sapiens
aggtgtggagactgt

SEQ ID NO: 1219130 - DNA, 15 bp, Homo sapiens
aaggtgtggagactg

SEQ ID NO: 1219131 - DNA, 15 bp, Homo sapiens
aaaggtgtggagact

SEQ ID NO: 1219132 - DNA, 15 bp, Homo sapiens
taaaggtgtggagac

SEQ ID NO: 1219133 - DNA, 15 bp, Homo sapiens
ataaaggtgtggaga

SEQ ID NO: 1219134 - DNA, 15 bp, Homo sapiens
gataaaggtgtggag

SEQ ID NO: 1219135 - DNA, 15 bp, Homo sapiens
ggataaaggtgtgga

SEQ ID NO: 1219136 - DNA, 15 bp, Homo sapiens
gggataaaggtgtgg

SEQ ID NO: 1219137 - DNA, 15 bp, Homo sapiens
ggggataaaggtgtg

SEQ ID NO: 1219138 - DNA, 15 bp, Homo sapiens
aggggataaaggtgt

SEQ ID NO: 1219139 - DNA, 15 bp, Homo sapiens
caggggataaaggtg

SEQ ID NO: 1219140 - DNA, 15 bp, Homo sapiens
ccaggggataaaggt

SEQ ID NO: 1219141 - DNA, 15 bp, Homo sapiens
cccaggggataaagg

SEQ ID NO: 1219142 - DNA, 15 bp, Homo sapiens
ccccaggggataaag

SEQ ID NO: 1219143 - DNA, 15 bp, Homo sapiens
cccccaggggataaa

SEQ ID NO: 1219144 - DNA, 15 bp, Homo sapiens
gcccccaggggataa

SEQ ID NO: 1219145 - DNA, 15 bp, Homo sapiens
agcccccaggggata

SEQ ID NO: 1219146 - DNA, 15 bp, Homo sapiens
gagcccccaggggat

SEQ ID NO: 1219147 - DNA, 15 bp, Homo sapiens
tgagcccccagggga

SEQ ID NO: 1219148 - DNA, 15 bp, Homo sapiens
ttgagcccccagggg

SEQ ID NO: 1219149 - DNA, 15 bp, Homo sapiens
cttgagcccccaggg

SEQ ID NO: 1219150 - DNA, 15 bp, Homo sapiens
acttgagcccccagg

SEQ ID NO: 1219151 - DNA, 15 bp, Homo sapiens
gacttgagcccccag

SEQ ID NO: 1219152 - DNA, 15 bp, Homo sapiens
agacttgagccccca

SEQ ID NO: 1219153 - DNA, 15 bp, Homo sapiens
cagacttgagccccc

SEQ ID NO: 1219154 - DNA, 15 bp, Homo sapiens
ccagacttgagcccc

SEQ ID NO: 1219155 - DNA, 15 bp, Homo sapiens
cccagacttgagccc

SEQ ID NO: 1219156 - DNA, 15 bp, Homo sapiens
tcccagacttgagcc

SEQ ID NO: 1219157 - DNA, 15 bp, Homo sapiens
gtcccagacttgagc

SEQ ID NO: 1219158 - DNA, 15 bp, Homo sapiens
tgtcccagacttgag

SEQ ID NO: 1219159 - DNA, 15 bp, Homo sapiens
ttgtcccagacttga

SEQ ID NO: 1219160 - DNA, 15 bp, Homo sapiens
tttgtcccagacttg

SEQ ID NO: 1219161 - DNA, 15 bp, Homo sapiens
atttgtcccagactt

SEQ ID NO: 1219162 - DNA, 15 bp, Homo sapiens
catttgtcccagact

SEQ ID NO: 1219163 - DNA, 15 bp, Homo sapiens
tcatttgtcccagac

SEQ ID NO: 1219164 - DNA, 15 bp, Homo sapiens
gtcatttgtcccaga

SEQ ID NO: 1219165 - DNA, 15 bp, Homo sapiens
tgtcatttgtcccag

SEQ ID NO: 1219166 - DNA, 15 bp, Homo sapiens
gtgtcatttgtccca

SEQ ID NO: 1219167 - DNA, 15 bp, Homo sapiens
ggtgtcatttgtccc

SEQ ID NO: 1219168 - DNA, 15 bp, Homo sapiens
aggtgtcatttgtcc

SEQ ID NO: 1219169 - DNA, 15 bp, Homo sapiens
gaggtgtcatttgtc

SEQ ID NO: 1219170 - DNA, 15 bp, Homo sapiens
ggaggtgtcatttgt

SEQ ID NO: 1219171 - DNA, 15 bp, Homo sapiens
aggaggtgtcatttg

SEQ ID NO: 1219172 - DNA, 15 bp, Homo sapiens
gaggaggtgtcattt

SEQ ID NO: 1219173 - DNA, 15 bp, Homo sapiens
ggaggaggtgtcatt

SEQ ID NO: 1219174 - DNA, 15 bp, Homo sapiens
gggaggaggtgtcat

SEQ ID NO: 1219175 - DNA, 15 bp, Homo sapiens
agggaggaggtgtca

SEQ ID NO: 1219176 - DNA, 15 bp, Homo sapiens
cagggaggaggtgtc

SEQ ID NO: 1219177 - DNA, 15 bp, Homo sapiens
ccagggaggaggtgt

SEQ ID NO: 1219178 - DNA, 15 bp, Homo sapiens
cccagggaggaggtg

SEQ ID NO: 1219179 - DNA, 15 bp, Homo sapiens
gcccagggaggaggt

SEQ ID NO: 1219180 - DNA, 15 bp, Homo sapiens
ggcccagggaggagg

SEQ ID NO: 1219181 - DNA, 15 bp, Homo sapiens
aggcccagggaggag

SEQ ID NO: 1219182 - DNA, 15 bp, Homo sapiens
gaggcccagggagga

SEQ ID NO: 1219183 - DNA, 15 bp, Homo sapiens
ggaggcccagggagg

SEQ ID NO: 1219184 - DNA, 15 bp, Homo sapiens
gggaggcccagggag

SEQ ID NO: 1219185 - DNA, 15 bp, Homo sapiens
tgggaggcccaggga

SEQ ID NO: 1219186 - DNA, 15 bp, Homo sapiens
gtgggaggcccaggg

SEQ ID NO: 1219187 - DNA, 15 bp, Homo sapiens
tgtgggaggcccagg

SEQ ID NO: 1219188 - DNA, 15 bp, Homo sapiens
ctgtgggaggcccag

SEQ ID NO: 1219189 - DNA, 15 bp, Homo sapiens
tctgtgggaggccca

SEQ ID NO: 1219190 - DNA, 15 bp, Homo sapiens
ctctgtgggaggccc

SEQ ID NO: 1219191 - DNA, 15 bp, Homo sapiens
gctctgtgggaggcc

SEQ ID NO: 1219192 - DNA, 15 bp, Homo sapiens
ggctctgtgggaggc

SEQ ID NO: 1219193 - DNA, 15 bp, Homo sapiens
tggctctgtgggagg

SEQ ID NO: 1219194 - DNA, 15 bp, Homo sapiens
gtggctctgtgggag

SEQ ID NO: 1219195 - DNA, 15 bp, Homo sapiens
tgtggctctgtggga

SEQ ID NO: 1219196 - DNA, 15 bp, Homo sapiens
ctgtggctctgtggg

SEQ ID NO: 1219197 - DNA, 15 bp, Homo sapiens
tctgtggctctgtgg

SEQ ID NO: 1219198 - DNA, 15 bp, Homo sapiens
ctctgtggctctgtg

SEQ ID NO: 1219199 - DNA, 15 bp, Homo sapiens
gctctgtggctctgt

SEQ ID NO: 1219200 - DNA, 15 bp, Homo sapiens
cgctctgtggctctg

SEQ ID NO: 1219201 - DNA, 15 bp, Homo sapiens
acgctctgtggctct

SEQ ID NO: 1219202 - DNA, 15 bp, Homo sapiens
gacgctctgtggctc

SEQ ID NO: 1219203 - DNA, 15 bp, Homo sapiens
tgacgctctgtggct

SEQ ID NO: 1219204 - DNA, 15 bp, Homo sapiens
gtgacgctctgtggc

SEQ ID NO: 1219205 - DNA, 15 bp, Homo sapiens
ggtgacgctctgtgg

SEQ ID NO: 1219206 - DNA, 15 bp, Homo sapiens
gggtgacgctctgtg

SEQ ID NO: 1219207 - DNA, 15 bp, Homo sapiens
ggggtgacgctctgt

SEQ ID NO: 1219208 - DNA, 15 bp, Homo sapiens
gggggtgacgctctg

SEQ ID NO: 1219209 - DNA, 15 bp, Homo sapiens
ggggggtgacgctct

SEQ ID NO: 1219210 - DNA, 15 bp, Homo sapiens
tggggggtgacgctc

SEQ ID NO: 1219211 - DNA, 15 bp, Homo sapiens
gtggggggtgacgct

SEQ ID NO: 1219212 - DNA, 15 bp, Homo sapiens
ggtggggggtgacgc

SEQ ID NO: 1219213 - DNA, 15 bp, Homo sapiens
tggtggggggtgacg

SEQ ID NO: 1219214 - DNA, 15 bp, Homo sapiens
gtggtggggggtgac

SEQ ID NO: 1219215 - DNA, 15 bp, Homo sapiens
ggtggtggggggtga

SEQ ID NO: 1219216 - DNA, 15 bp, Homo sapiens
gggtggtggggggtg

SEQ ID NO: 1219217 - DNA, 15 bp, Homo sapiens
ggggtggtggggggt

SEQ ID NO: 1219218 - DNA, 15 bp, Homo sapiens
tggggtggtgggggg

SEQ ID NO: 1219219 - DNA, 15 bp, Homo sapiens
gtggggtggtggggg

SEQ ID NO: 1219220 - DNA, 15 bp, Homo sapiens
tgtggggtggtgggg

SEQ ID NO: 1219221 - DNA, 15 bp, Homo sapiens
ctgtggggtggtggg

SEQ ID NO: 1219222 - DNA, 15 bp, Homo sapiens
gctgtggggtggtgg

SEQ ID NO: 1219223 - DNA, 15 bp, Homo sapiens
cgctgtggggtggtg

SEQ ID NO: 1219224 - DNA, 15 bp, Homo sapiens
acgctgtggggtggt

SEQ ID NO: 1219225 - DNA, 15 bp, Homo sapiens
aacgctgtggggtgg

SEQ ID NO: 1219226 - DNA, 15 bp, Homo sapiens
gaacgctgtggggtg

SEQ ID NO: 1219227 - DNA, 15 bp, Homo sapiens
tgaacgctgtggggt

SEQ ID NO: 1219228 - DNA, 15 bp, Homo sapiens
atgaacgctgtgggg

SEQ ID NO: 1219229 - DNA, 15 bp, Homo sapiens
aatgaacgctgtggg

SEQ ID NO: 1219230 - DNA, 15 bp, Homo sapiens
aaatgaacgctgtgg

SEQ ID NO: 1219231 - DNA, 15 bp, Homo sapiens
caaatgaacgctgtg

SEQ ID NO: 1219232 - DNA, 15 bp, Homo sapiens
acaaatgaacgctgt

SEQ ID NO: 1219233 - DNA, 15 bp, Homo sapiens
cacaaatgaacgctg

SEQ ID NO: 1219234 - DNA, 15 bp, Homo sapiens
ccacaaatgaacgct

SEQ ID NO: 1219235 - DNA, 15 bp, Homo sapiens
cccacaaatgaacgc

SEQ ID NO: 1219236 - DNA, 15 bp, Homo sapiens
acccacaaatgaacg

SEQ ID NO: 1219237 - DNA, 15 bp, Homo sapiens
gacccacaaatgaac

SEQ ID NO: 1219238 - DNA, 15 bp, Homo sapiens
tgacccacaaatgaa

SEQ ID NO: 1219239 - DNA, 15 bp, Homo sapiens
ctgacccacaaatga

SEQ ID NO: 1219240 - DNA, 15 bp, Homo sapiens
cctgacccacaaatg

SEQ ID NO: 1219241 - DNA, 15 bp, Homo sapiens
tcctgacccacaaat

SEQ ID NO: 1219242 - DNA, 15 bp, Homo sapiens
atcctgacccacaaa

SEQ ID NO: 1219243 - DNA, 15 bp, Homo sapiens
aatcctgacccacaa

SEQ ID NO: 1219244 - DNA, 15 bp, Homo sapiens
taatcctgacccaca

SEQ ID NO: 1219245 - DNA, 15 bp, Homo sapiens
ttaatcctgacccac

SEQ ID NO: 1219246 - DNA, 15 bp, Homo sapiens
cttaatcctgaccca

SEQ ID NO: 1219247 - DNA, 15 bp, Homo sapiens
tcttaatcctgaccc

SEQ ID NO: 1219248 - DNA, 15 bp, Homo sapiens
ctcttaatcctgacc

SEQ ID NO: 1219249 - DNA, 15 bp, Homo sapiens
gctcttaatcctgac

SEQ ID NO: 1219250 - DNA, 15 bp, Homo sapiens
tgctcttaatcctga

SEQ ID NO: 1219251 - DNA, 15 bp, Homo sapiens
gtgctcttaatcctg

SEQ ID NO: 1219252 - DNA, 15 bp, Homo sapiens
tgtgctcttaatcct

SEQ ID NO: 1219253 - DNA, 15 bp, Homo sapiens
ttgtgctcttaatcc

SEQ ID NO: 1219254 - DNA, 15 bp, Homo sapiens
cttgtgctcttaatc

SEQ ID NO: 1219255 - DNA, 15 bp, Homo sapiens
gcttgtgctcttaat

SEQ ID NO: 1219256 - DNA, 15 bp, Homo sapiens
agcttgtgctcttaa

SEQ ID NO: 1219257 - DNA, 15 bp, Homo sapiens
gagcttgtgctctta

SEQ ID NO: 1219258 - DNA, 15 bp, Homo sapiens
agagcttgtgctctt

SEQ ID NO: 1219259 - DNA, 15 bp, Homo sapiens
cagagcttgtgctct

SEQ ID NO: 1219260 - DNA, 15 bp, Homo sapiens
tcagagcttgtgctc

SEQ ID NO: 1219261 - DNA, 15 bp, Homo sapiens
ttcagagcttgtgct

SEQ ID NO: 1219262 - DNA, 15 bp, Homo sapiens
gttcagagcttgtgc

SEQ ID NO: 1219263 - DNA, 15 bp, Homo sapiens
tgttcagagcttgtg

SEQ ID NO: 1219264 - DNA, 15 bp, Homo sapiens
gtgttcagagcttgt

SEQ ID NO: 1219265 - DNA, 15 bp, Homo sapiens
tgtgttcagagcttg

SEQ ID NO: 1219266 - DNA, 15 bp, Homo sapiens
gtgtgttcagagctt

SEQ ID NO: 1219267 - DNA, 15 bp, Homo sapiens
agtgtgttcagagct

SEQ ID NO: 1219268 - DNA, 15 bp, Homo sapiens
gagtgtgttcagagc

SEQ ID NO: 1219269 - DNA, 15 bp, Homo sapiens
tgagtgtgttcagag

SEQ ID NO: 1219270 - DNA, 15 bp, Homo sapiens
ctgagtgtgttcaga

SEQ ID NO: 1219271 - DNA, 15 bp, Homo sapiens
gctgagtgtgttcag

SEQ ID NO: 1219272 - DNA, 15 bp, Homo sapiens
agctgagtgtgttca

SEQ ID NO: 1219273 - DNA, 15 bp, Homo sapiens
gagctgagtgtgttc

SEQ ID NO: 1219274 - DNA, 15 bp, Homo sapiens
tgagctgagtgtgtt

SEQ ID NO: 1219275 - DNA, 15 bp, Homo sapiens
ctgagctgagtgtgt

SEQ ID NO: 1219276 - DNA, 15 bp, Homo sapiens
tctgagctgagtgtg

SEQ ID NO: 1219277 - DNA, 15 bp, Homo sapiens
atctgagctgagtgt

SEQ ID NO: 1219278 - DNA, 15 bp, Homo sapiens
aatctgagctgagtg

SEQ ID NO: 1219279 - DNA, 15 bp, Homo sapiens
taatctgagctgagt

SEQ ID NO: 1219280 - DNA, 15 bp, Homo sapiens
ttaatctgagctgag

SEQ ID NO: 1219281 - DNA, 15 bp, Homo sapiens
tttaatctgagctga

SEQ ID NO: 1219282 - DNA, 15 bp, Homo sapiens
ctttaatctgagctg

SEQ ID NO: 1219283 - DNA, 15 bp, Homo sapiens
gctttaatctgagct

SEQ ID NO: 1219284 - DNA, 15 bp, Homo sapiens
ggctttaatctgagc

SEQ ID NO: 1219285 - DNA, 15 bp, Homo sapiens
gggctttaatctgag

SEQ ID NO: 1219286 - DNA, 15 bp, Homo sapiens
agggctttaatctga

SEQ ID NO: 1219287 - DNA, 15 bp, Homo sapiens
cagggctttaatctg

SEQ ID NO: 1219288 - DNA, 15 bp, Homo sapiens
ccagggctttaatct

SEQ ID NO: 1219289 - DNA, 15 bp, Homo sapiens
gccagggctttaatc

SEQ ID NO: 1219290 - DNA, 15 bp, Homo sapiens
agccagggctttaat

SEQ ID NO: 1219291 - DNA, 15 bp, Homo sapiens
gagccagggctttaa

SEQ ID NO: 1219292 - DNA, 15 bp, Homo sapiens
agagccagggcttta

SEQ ID NO: 1219293 - DNA, 15 bp, Homo sapiens
cagagccagggcttt

SEQ ID NO: 1219294 - DNA, 15 bp, Homo sapiens
gcagagccagggctt

SEQ ID NO: 1219295 - DNA, 15 bp, Homo sapiens
ggcagagccagggct

SEQ ID NO: 1219296 - DNA, 15 bp, Homo sapiens
tggcagagccagggc

SEQ ID NO: 1219297 - DNA, 15 bp, Homo sapiens
gtggcagagccaggg

SEQ ID NO: 1219298 - DNA, 15 bp, Homo sapiens
ggtggcagagccagg

SEQ ID NO: 1219299 - DNA, 15 bp, Homo sapiens
gggtggcagagccag

SEQ ID NO: 1219300 - DNA, 15 bp, Homo sapiens
cgggtggcagagcca

SEQ ID NO: 1219301 - DNA, 15 bp, Homo sapiens
acgggtggcagagcc

SEQ ID NO: 1219302 - DNA, 15 bp, Homo sapiens
gacgggtggcagagc

SEQ ID NO: 1219303 - DNA, 15 bp, Homo sapiens
agacgggtggcagag

SEQ ID NO: 1219304 - DNA, 15 bp, Homo sapiens
tagacgggtggcaga

SEQ ID NO: 1219305 - DNA, 15 bp, Homo sapiens
gtagacgggtggcag

SEQ ID NO: 1219306 - DNA, 15 bp, Homo sapiens
tgtagacgggtggca

SEQ ID NO: 1219307 - DNA, 15 bp, Homo sapiens
ctgtagacgggtggc

SEQ ID NO: 1219308 - DNA, 15 bp, Homo sapiens
tctgtagacgggtgg

SEQ ID NO: 1219309 - DNA, 15 bp, Homo sapiens
ttctgtagacgggtg

SEQ ID NO: 1219310 - DNA, 15 bp, Homo sapiens
tttctgtagacgggt

SEQ ID NO: 1219311 - DNA, 15 bp, Homo sapiens
ttttctgtagacggg

SEQ ID NO: 1219312 - DNA, 15 bp, Homo sapiens
tttttctgtagacgg

SEQ ID NO: 1219313 - DNA, 15 bp, Homo sapiens
gtttttctgtagacg

SEQ ID NO: 1219314 - DNA, 15 bp, Homo sapiens
agtttttctgtagac

SEQ ID NO: 1219315 - DNA, 15 bp, Homo sapiens
cagtttttctgtaga

SEQ ID NO: 1219316 - DNA, 15 bp, Homo sapiens
tcagtttttctgtag

SEQ ID NO: 1219317 - DNA, 15 bp, Homo sapiens
gtcagtttttctgta

SEQ ID NO: 1219318 - DNA, 15 bp, Homo sapiens
tgtcagtttttctgt

SEQ ID NO: 1219319 - DNA, 15 bp, Homo sapiens
gtgtcagtttttctg

SEQ ID NO: 1219320 - DNA, 15 bp, Homo sapiens
tgtgtcagtttttct

SEQ ID NO: 1219321 - DNA, 15 bp, Homo sapiens
ctgtgtcagtttttc

SEQ ID NO: 1219322 - DNA, 15 bp, Homo sapiens
actgtgtcagttttt

SEQ ID NO: 1219323 - DNA, 15 bp, Homo sapiens
cactgtgtcagtttt

SEQ ID NO: 1219324 - DNA, 15 bp, Homo sapiens
ccactgtgtcagttt

SEQ ID NO: 1219325 - DNA, 15 bp, Homo sapiens
gccactgtgtcagtt

SEQ ID NO: 1219326 - DNA, 15 bp, Homo sapiens
ggccactgtgtcagt

SEQ ID NO: 1219327 - DNA, 15 bp, Homo sapiens
aggccactgtgtcag

SEQ ID NO: 1219328 - DNA, 15 bp, Homo sapiens
gaggccactgtgtca

SEQ ID NO: 1219329 - DNA, 15 bp, Homo sapiens
ggaggccactgtgtc

SEQ ID NO: 1219330 - DNA, 15 bp, Homo sapiens
tggaggccactgtgt

SEQ ID NO: 1219331 - DNA, 15 bp, Homo sapiens
gtggaggccactgtg

SEQ ID NO: 1219332 - DNA, 15 bp, Homo sapiens
agtggaggccactgt

SEQ ID NO: 1219333 - DNA, 15 bp, Homo sapiens
cagtggaggccactg

SEQ ID NO: 1219334 - DNA, 15 bp, Homo sapiens
ccagtggaggccact

SEQ ID NO: 1219335 - DNA, 15 bp, Homo sapiens
cccagtggaggccac

SEQ ID NO: 1219336 - DNA, 15 bp, Homo sapiens
ccccagtggaggcca

SEQ ID NO: 1219337 - DNA, 15 bp, Homo sapiens
accccagtggaggcc

SEQ ID NO: 1219338 - DNA, 15 bp, Homo sapiens
caccccagtggaggc

SEQ ID NO: 1219339 - DNA, 15 bp, Homo sapiens
acaccccagtggagg

SEQ ID NO: 1219340 - DNA, 15 bp, Homo sapiens
cacaccccagtggag

SEQ ID NO: 1219341 - DNA, 15 bp, Homo sapiens
ccacaccccagtgga

SEQ ID NO: 1219342 - DNA, 15 bp, Homo sapiens
gccacaccccagtgg

SEQ ID NO: 1219343 - DNA, 15 bp, Homo sapiens
agccacaccccagtg

SEQ ID NO: 1219344 - DNA, 15 bp, Homo sapiens
gagccacaccccagt

SEQ ID NO: 1219345 - DNA, 15 bp, Homo sapiens
ggagccacaccccag

SEQ ID NO: 1219346 - DNA, 15 bp, Homo sapiens
tggagccacacccca

SEQ ID NO: 1219347 - DNA, 15 bp, Homo sapiens
atggagccacacccc

SEQ ID NO: 1219348 - DNA, 15 bp, Homo sapiens
catggagccacaccc

SEQ ID NO: 1219349 - DNA, 15 bp, Homo sapiens
tcatggagccacacc

SEQ ID NO: 1219350 - DNA, 15 bp, Homo sapiens
ttcatggagccacac

SEQ ID NO: 1219351 - DNA, 15 bp, Homo sapiens
cttcatggagccaca

SEQ ID NO: 1219352 - DNA, 15 bp, Homo sapiens
ccttcatggagccac

SEQ ID NO: 1219353 - DNA, 15 bp, Homo sapiens
tccttcatggagcca

SEQ ID NO: 1219354 - DNA, 15 bp, Homo sapiens
ctccttcatggagcc

SEQ ID NO: 1219355 - DNA, 15 bp, Homo sapiens
cctccttcatggagc

SEQ ID NO: 1219356 - DNA, 15 bp, Homo sapiens
ccctccttcatggag

SEQ ID NO: 1219357 - DNA, 15 bp, Homo sapiens
accctccttcatgga

SEQ ID NO: 1219358 - DNA, 15 bp, Homo sapiens
gaccctccttcatgg

SEQ ID NO: 1219359 - DNA, 15 bp, Homo sapiens
agaccctccttcatg

SEQ ID NO: 1219360 - DNA, 15 bp, Homo sapiens
cagaccctccttcat

SEQ ID NO: 1219361 - DNA, 15 bp, Homo sapiens
ccagaccctccttca

SEQ ID NO: 1219362 - DNA, 15 bp, Homo sapiens
gccagaccctccttc

SEQ ID NO: 1219363 - DNA, 15 bp, Homo sapiens
cgccagaccctcctt

SEQ ID NO: 1219364 - DNA, 15 bp, Homo sapiens
ccgccagaccctcct

SEQ ID NO: 1219365 - DNA, 15 bp, Homo sapiens
cccgccagaccctcc

SEQ ID NO: 1219366 - DNA, 15 bp, Homo sapiens
gcccgccagaccctc

SEQ ID NO: 1219367 - DNA, 15 bp, Homo sapiens
ggcccgccagaccct

SEQ ID NO: 1219368 - DNA, 15 bp, Homo sapiens
tggcccgccagaccc

SEQ ID NO: 1219369 - DNA, 15 bp, Homo sapiens
gtggcccgccagacc

SEQ ID NO: 1219370 - DNA, 15 bp, Homo sapiens
tgtggcccgccagac

SEQ ID NO: 1219371 - DNA, 15 bp, Homo sapiens
ctgtggcccgccaga

SEQ ID NO: 1219372 - DNA, 15 bp, Homo sapiens
cctgtggcccgccag

SEQ ID NO: 1219373 - DNA, 15 bp, Homo sapiens
gcctgtggcccgcca

SEQ ID NO: 1219374 - DNA, 15 bp, Homo sapiens
agcctgtggcccgcc

SEQ ID NO: 1219375 - DNA, 15 bp, Homo sapiens
aagcctgtggcccgc

SEQ ID NO: 1219376 - DNA, 15 bp, Homo sapiens
taagcctgtggcccg

SEQ ID NO: 1219377 - DNA, 15 bp, Homo sapiens
gtaagcctgtggccc

SEQ ID NO: 1219378 - DNA, 15 bp, Homo sapiens
tgtaagcctgtggcc

SEQ ID NO: 1219379 - DNA, 15 bp, Homo sapiens
ctgtaagcctgtggc

SEQ ID NO: 1219380 - DNA, 15 bp, Homo sapiens
actgtaagcctgtgg

SEQ ID NO: 1219381 - DNA, 15 bp, Homo sapiens
tactgtaagcctgtg

SEQ ID NO: 1219382 - DNA, 15 bp, Homo sapiens
gtactgtaagcctgt

SEQ ID NO: 1219383 - DNA, 15 bp, Homo sapiens
agtactgtaagcctg

SEQ ID NO: 1219384 - DNA, 15 bp, Homo sapiens
gagtactgtaagcct

SEQ ID NO: 1219385 - DNA, 15 bp, Homo sapiens
tgagtactgtaagcc

SEQ ID NO: 1219386 - DNA, 15 bp, Homo sapiens
atgagtactgtaagc

SEQ ID NO: 1219387 - DNA, 15 bp, Homo sapiens
aatgagtactgtaag

SEQ ID NO: 1219388 - DNA, 15 bp, Homo sapiens
aaatgagtactgtaa

SEQ ID NO: 1219389 - DNA, 15 bp, Homo sapiens
gaaatgagtactgta

SEQ ID NO: 1219390 - DNA, 15 bp, Homo sapiens
agaaatgagtactgt

SEQ ID NO: 1219391 - DNA, 15 bp, Homo sapiens
gagaaatgagtactg

SEQ ID NO: 1219392 - DNA, 15 bp, Homo sapiens
agagaaatgagtact

SEQ ID NO: 1219393 - DNA, 15 bp, Homo sapiens
aagagaaatgagtac

SEQ ID NO: 1219394 - DNA, 15 bp, Homo sapiens
aaagagaaatgagta

SEQ ID NO: 1219395 - DNA, 15 bp, Homo sapiens
aaaagagaaatgagt

SEQ ID NO: 1219396 - DNA, 15 bp, Homo sapiens
gaaaagagaaatgag

SEQ ID NO: 1219397 - DNA, 15 bp, Homo sapiens
agaaaagagaaatga

SEQ ID NO: 1219398 - DNA, 15 bp, Homo sapiens
aagaaaagagaaatg

SEQ ID NO: 1219399 - DNA, 15 bp, Homo sapiens
aaagaaaagagaaat

SEQ ID NO: 1219400 - DNA, 15 bp, Homo sapiens
aaaagaaaagagaaa

SEQ ID NO: 1219401 - DNA, 15 bp, Homo sapiens
gaaaagaaaagagaa

SEQ ID NO: 1219402 - DNA, 15 bp, Homo sapiens
agaaaagaaaagaga

SEQ ID NO: 1219403 - DNA, 15 bp, Homo sapiens
aagaaaagaaaagag

SEQ ID NO: 1219404 - DNA, 15 bp, Homo sapiens
gaagaaagaaaagaa

SEQ ID NO: 1219405 - DNA, 15 bp, Homo sapiens
ggaagaaagaaaaga

SEQ ID NO: 1219406 - DNA, 15 bp, Homo sapiens
tgaaggaagaaagaa

SEQ ID NO: 1219407 - DNA, 15 bp, Homo sapiens
atgaaggaagaaaga

SEQ ID NO: 1219408 - DNA, 15 bp, Homo sapiens
aatgaaggaagaaag

SEQ ID NO: 1219409 - DNA, 15 bp, Homo sapiens
aaatgaaggaagaaa

SEQ ID NO: 1219410 - DNA, 15 bp, Homo sapiens
gaaatgaaggaagaa

SEQ ID NO: 1219411 - DNA, 15 bp, Homo sapiens
ggaaatgaaggaaga

SEQ ID NO: 1219412 - DNA, 15 bp, Homo sapiens
aggaaatgaaggaag

SEQ ID NO: 1219413 - DNA, 15 bp, Homo sapiens
aaggaaatgaaggaa

SEQ ID NO: 1219414 - DNA, 15 bp, Homo sapiens
aaaggaaatgaagga

SEQ ID NO: 1219415 - DNA, 15 bp, Homo sapiens
gaaaggaaatgaagg

SEQ ID NO: 1219416 - DNA, 15 bp, Homo sapiens
agaaaggaaatgaag

SEQ ID NO: 1219417 - DNA, 15 bp, Homo sapiens
gagaaaggaaatgaa

SEQ ID NO: 1219418 - DNA, 15 bp, Homo sapiens
agagaaaggaaatga

SEQ ID NO: 1219419 - DNA, 15 bp, Homo sapiens
gagagaaaggaaatg

SEQ ID NO: 1219420 - DNA, 15 bp, Homo sapiens
agagagaaaggaaat

SEQ ID NO: 1219421 - DNA, 15 bp, Homo sapiens
gagagagaaaggaaa

SEQ ID NO: 1219422 - DNA, 15 bp, Homo sapiens
agagagagaaaggaa

SEQ ID NO: 1219423 - DNA, 15 bp, Homo sapiens
gagagagagaaagga

SEQ ID NO: 1219424 - DNA, 15 bp, Homo sapiens
ggagagagagaaagg

SEQ ID NO: 1219425 - DNA, 15 bp, Homo sapiens
aggagagagagaaag

SEQ ID NO: 1219426 - DNA, 15 bp, Homo sapiens
aaggagagagagaaa

SEQ ID NO: 1219427 - DNA, 15 bp, Homo sapiens
gaaggagagagagaa

SEQ ID NO: 1219428 - DNA, 15 bp, Homo sapiens
aggaaggagagagag

SEQ ID NO: 1219429 - DNA, 15 bp, Homo sapiens
aaggaaggagagaga

SEQ ID NO: 1219430 - DNA, 15 bp, Homo sapiens
gaaggaaggagagag

SEQ ID NO: 1219431 - DNA, 15 bp, Homo sapiens
ggaaggaaggagaga

SEQ ID NO: 1219432 - DNA, 15 bp, Homo sapiens
aggaaggaaggagag

SEQ ID NO: 1219433 - DNA, 15 bp, Homo sapiens
gaggaaggaaggaga

SEQ ID NO: 1219434 - DNA, 15 bp, Homo sapiens
ggaggaaggaaggag

SEQ ID NO: 1219435 - DNA, 15 bp, Homo sapiens
agggaggaaggaagg

SEQ ID NO: 1219436 - DNA, 15 bp, Homo sapiens
gagggaggaaggaag

SEQ ID NO: 1219437 - DNA, 15 bp, Homo sapiens
ggagggaggaaggaa

SEQ ID NO: 1219438 - DNA, 15 bp, Homo sapiens
gggagggaggaagga

SEQ ID NO: 1219439 - DNA, 15 bp, Homo sapiens
agggagggaggaagg

SEQ ID NO: 1219440 - DNA, 15 bp, Homo sapiens
gagggagggaggaag

SEQ ID NO: 1219441 - DNA, 15 bp, Homo sapiens
ggagggagggaggaa

SEQ ID NO: 1219442 - DNA, 15 bp, Homo sapiens
aggaagggagggagg

SEQ ID NO: 1219443 - DNA, 15 bp, Homo sapiens
aaggaagggagggag

SEQ ID NO: 1219444 - DNA, 15 bp, Homo sapiens
agaaagaaggaagga

SEQ ID NO: 1219445 - DNA, 15 bp, Homo sapiens
aagaaagaaggaagg

SEQ ID NO: 1219446 - DNA, 15 bp, Homo sapiens
gaagaaagaaggaag

SEQ ID NO: 1219447 - DNA, 15 bp, Homo sapiens
ggaagaaagaaggaa

SEQ ID NO: 1219448 - DNA, 15 bp, Homo sapiens
aggaagaaagaagga

SEQ ID NO: 1219449 - DNA, 15 bp, Homo sapiens
aaggaagaaagaagg

SEQ ID NO: 1219450 - DNA, 15 bp, Homo sapiens
aaaggaagaaagaag

SEQ ID NO: 1219451 - DNA, 15 bp, Homo sapiens
caaaggaagaaagaa

SEQ ID NO: 1219452 - DNA, 15 bp, Homo sapiens
acaaaggaagaaaga

SEQ ID NO: 1219453 - DNA, 15 bp, Homo sapiens
aacaaaggaagaaag

SEQ ID NO: 1219454 - DNA, 15 bp, Homo sapiens
aaacaaaggaagaaa

SEQ ID NO: 1219455 - DNA, 15 bp, Homo sapiens
gaaacaaaggaagaa

SEQ ID NO: 1219456 - DNA, 15 bp, Homo sapiens
agaaacaaaggaaga

SEQ ID NO: 1219457 - DNA, 15 bp, Homo sapiens
gagaaacaaaggaag

SEQ ID NO: 1219458 - DNA, 15 bp, Homo sapiens
agagaaacaaaggaa

SEQ ID NO: 1219459 - DNA, 15 bp, Homo sapiens
gagagaaacaaagga

SEQ ID NO: 1219460 - DNA, 15 bp, Homo sapiens
agagagaaacaaagg

SEQ ID NO: 1219461 - DNA, 15 bp, Homo sapiens
gagagagaaacaaag

SEQ ID NO: 1219462 - DNA, 15 bp, Homo sapiens
agagagagaaacaaa

SEQ ID NO: 1219463 - DNA, 15 bp, Homo sapiens
aagagagagaaacaa

SEQ ID NO: 1219464 - DNA, 15 bp, Homo sapiens
aaagagagagaaaca

SEQ ID NO: 1219465 - DNA, 15 bp, Homo sapiens
aaaagagagagaaac

SEQ ID NO: 1219466 - DNA, 15 bp, Homo sapiens
aaaaagagagagaaa

SEQ ID NO: 1219467 - DNA, 15 bp, Homo sapiens
aaaaaagagagagaa

SEQ ID NO: 1219468 - DNA, 15 bp, Homo sapiens
accactacactccag

SEQ ID NO: 1219469 - DNA, 15 bp, Homo sapiens
caccactacactcca

SEQ ID NO: 1219470 - DNA, 15 bp, Homo sapiens
gcaccactacactcc

SEQ ID NO: 1219471 - DNA, 15 bp, Homo sapiens
cgcaccactacactc

SEQ ID NO: 1219472 - DNA, 15 bp, Homo sapiens
tcgcaccactacact

SEQ ID NO: 1219473 - DNA, 15 bp, Homo sapiens
atcgcaccactacac

SEQ ID NO: 1219474 - DNA, 15 bp, Homo sapiens
gatcgcaccactaca

SEQ ID NO: 1219475 - DNA, 15 bp, Homo sapiens
gagatcgcaccacta

SEQ ID NO: 1219476 - DNA, 15 bp, Homo sapiens
cttgagctgagatcg

SEQ ID NO: 1219477 - DNA, 15 bp, Homo sapiens
ccttgagctgagatc

SEQ ID NO: 1219478 - DNA, 15 bp, Homo sapiens
gccttgagctgagat

SEQ ID NO: 1219479 - DNA, 15 bp, Homo sapiens
tgccttgagctgaga

SEQ ID NO: 1219480 - DNA, 15 bp, Homo sapiens
ttgccttgagctgag

SEQ ID NO: 1219481 - DNA, 15 bp, Homo sapiens
gttgccttgagctga

SEQ ID NO: 1219482 - DNA, 15 bp, Homo sapiens
ggttgccttgagctg

SEQ ID NO: 1219483 - DNA, 15 bp, Homo sapiens
tggttgccttgagct

SEQ ID NO: 1219484 - DNA, 15 bp, Homo sapiens
gtggttgccttgagc

SEQ ID NO: 1219485 - DNA, 15 bp, Homo sapiens
ggtggttgccttgag

SEQ ID NO: 1219486 - DNA, 15 bp, Homo sapiens
tggtggttgccttga

SEQ ID NO: 1219487 - DNA, 15 bp, Homo sapiens
gtggtggttgccttg

SEQ ID NO: 1219488 - DNA, 15 bp, Homo sapiens
ggtggtggttgcctt

SEQ ID NO: 1219489 - DNA, 15 bp, Homo sapiens
aggtggtggttgcct

SEQ ID NO: 1219490 - DNA, 15 bp, Homo sapiens
gaggtggtggttgcc

SEQ ID NO: 1219491 - DNA, 15 bp, Homo sapiens
ggaggtggtggttgc

SEQ ID NO: 1219492 - DNA, 15 bp, Homo sapiens
aggaggtggtggttg

SEQ ID NO: 1219493 - DNA, 15 bp, Homo sapiens
caggaggtggtggtt

SEQ ID NO: 1219494 - DNA, 15 bp, Homo sapiens
ccaggaggtggtggt

SEQ ID NO: 1219495 - DNA, 15 bp, Homo sapiens
cccaggaggtggtgg

SEQ ID NO: 1219496 - DNA, 15 bp, Homo sapiens
acccaggaggtggtg

SEQ ID NO: 1219497 - DNA, 15 bp, Homo sapiens
aacccaggaggtggt

SEQ ID NO: 1219498 - DNA, 15 bp, Homo sapiens
taagagaatcgtttg

SEQ ID NO: 1219499 - DNA, 15 bp, Homo sapiens
ctaagagaatcgttt

SEQ ID NO: 1219500 - DNA, 15 bp, Homo sapiens
gctaagagaatcgtt

SEQ ID NO: 1219501 - DNA, 15 bp, Homo sapiens
ggctaagagaatcgt

SEQ ID NO: 1219502 - DNA, 15 bp, Homo sapiens
aggctaagagaatcg

SEQ ID NO: 1219503 - DNA, 15 bp, Homo sapiens
gaggctaagagaatc

SEQ ID NO: 1219504 - DNA, 15 bp, Homo sapiens
ggaggctaagagaat

SEQ ID NO: 1219505 - DNA, 15 bp, Homo sapiens
aggaggctaagagaa

SEQ ID NO: 1219506 - DNA, 15 bp, Homo sapiens
caggaggctaagaga

SEQ ID NO: 1219507 - DNA, 15 bp, Homo sapiens
tcaggaggctaagag

SEQ ID NO: 1219508 - DNA, 15 bp, Homo sapiens
gtgcttgtaatccca

SEQ ID NO: 1219509 - DNA, 15 bp, Homo sapiens
cgtgcttgtaatccc

SEQ ID NO: 1219510 - DNA, 15 bp, Homo sapiens
gcgtgcttgtaatcc

SEQ ID NO: 1219511 - DNA, 15 bp, Homo sapiens
tgcgtgcttgtaatc

SEQ ID NO: 1219512 - DNA, 15 bp, Homo sapiens
gtgcgtgcttgtaat

SEQ ID NO: 1219513 - DNA, 15 bp, Homo sapiens
ggtgcgtgcttgtaa

SEQ ID NO: 1219514 - DNA, 15 bp, Homo sapiens
tggtgcgtgcttgta

SEQ ID NO: 1219515 - DNA, 15 bp, Homo sapiens
gtggtgcgtgcttgt

SEQ ID NO: 1219516 - DNA, 15 bp, Homo sapiens
ggtggtgcgtgcttg

SEQ ID NO: 1219517 - DNA, 15 bp, Homo sapiens
tggtggtgcgtgctt

SEQ ID NO: 1219518 - DNA, 15 bp, Homo sapiens
gtggtggtgcgtgct

SEQ ID NO: 1219519 - DNA, 15 bp, Homo sapiens
cgtggtggtgcgtgc

SEQ ID NO: 1219520 - DNA, 15 bp, Homo sapiens
gcgtggtggtgcgtg

SEQ ID NO: 1219521 - DNA, 15 bp, Homo sapiens
ggcgtggtggtgcgt

SEQ ID NO: 1219522 - DNA, 15 bp, Homo sapiens
aggcgtggtggtgcg

SEQ ID NO: 1219523 - DNA, 15 bp, Homo sapiens
caggcgtggtggtgc

SEQ ID NO: 1219524 - DNA, 15 bp, Homo sapiens
ctagccaggcgtggt

SEQ ID NO: 1219525 - DNA, 15 bp, Homo sapiens
actagccaggcgtgg

SEQ ID NO: 1219526 - DNA, 15 bp, Homo sapiens
aactagccaggcgtg

SEQ ID NO: 1219527 - DNA, 15 bp, Homo sapiens
aaactagccaggcgt

SEQ ID NO: 1219528 - DNA, 15 bp, Homo sapiens
aaaactagccaggcg

SEQ ID NO: 1219529 - DNA, 15 bp, Homo sapiens
aaaaactagccaggc

SEQ ID NO: 1219530 - DNA, 15 bp, Homo sapiens
cacaaaaactagcca

SEQ ID NO: 1219531 - DNA, 15 bp, Homo sapiens
acacaaaaactagcc

SEQ ID NO: 1219532 - DNA, 15 bp, Homo sapiens
cacacaaaaactagc

SEQ ID NO: 1219533 - DNA, 15 bp, Homo sapiens
acacacaaaaactag

SEQ ID NO: 1219534 - DNA, 15 bp, Homo sapiens
aacacacaaaaacta

SEQ ID NO: 1219535 - DNA, 15 bp, Homo sapiens
aaacacacaaaaact

SEQ ID NO: 1219536 - DNA, 15 bp, Homo sapiens
taaacacacaaaaac

SEQ ID NO: 1219537 - DNA, 15 bp, Homo sapiens
ctaaacacacaaaaa

SEQ ID NO: 1219538 - DNA, 15 bp, Homo sapiens
actaaacacacaaaa

SEQ ID NO: 1219539 - DNA, 15 bp, Homo sapiens
tactaaacacacaaa

SEQ ID NO: 1219540 - DNA, 15 bp, Homo sapiens
ttactaaacacacaa

SEQ ID NO: 1219541 - DNA, 15 bp, Homo sapiens
tttactaaacacaca

SEQ ID NO: 1219542 - DNA, 15 bp, Homo sapiens
ctttactaaacacac

SEQ ID NO: 1219543 - DNA, 15 bp, Homo sapiens
tctttactaaacaca

SEQ ID NO: 1219544 - DNA, 15 bp, Homo sapiens
atctttactaaacac

SEQ ID NO: 1219545 - DNA, 15 bp, Homo sapiens
tatctttactaaaca

SEQ ID NO: 1219546 - DNA, 15 bp, Homo sapiens
ctatctttactaaac

SEQ ID NO: 1219547 - DNA, 15 bp, Homo sapiens
cctatctttactaaa

SEQ ID NO: 1219548 - DNA, 15 bp, Homo sapiens
ccctatctttactaa

SEQ ID NO: 1219549 - DNA, 15 bp, Homo sapiens
accctatctttacta

SEQ ID NO: 1219550 - DNA, 15 bp, Homo sapiens
aaccctatctttact

SEQ ID NO: 1219551 - DNA, 15 bp, Homo sapiens
aaaccctatctttac

SEQ ID NO: 1219552 - DNA, 15 bp, Homo sapiens
gaaaccctatcttta

SEQ ID NO: 1219553 - DNA, 15 bp, Homo sapiens
tgaaaccctatcttt

SEQ ID NO: 1219554 - DNA, 15 bp, Homo sapiens
gtgaaaccctatctt

SEQ ID NO: 1219555 - DNA, 15 bp, Homo sapiens
ggtgaaaccctatct

SEQ ID NO: 1219556 - DNA, 15 bp, Homo sapiens
tggtgaaaccctatc

SEQ ID NO: 1219557 - DNA, 15 bp, Homo sapiens
atggtgaaaccctat

SEQ ID NO: 1219558 - DNA, 15 bp, Homo sapiens
catggtgaaacccta

SEQ ID NO: 1219559 - DNA, 15 bp, Homo sapiens
cagccaacatggtga

SEQ ID NO: 1219560 - DNA, 15 bp, Homo sapiens
tcagccaacatggtg

SEQ ID NO: 1219561 - DNA, 15 bp, Homo sapiens
ctcagccaacatggt

SEQ ID NO: 1219562 - DNA, 15 bp, Homo sapiens
gctcagccaacatgg

SEQ ID NO: 1219563 - DNA, 15 bp, Homo sapiens
agctcagccaacatg

SEQ ID NO: 1219564 - DNA, 15 bp, Homo sapiens
cagctcagccaacat

SEQ ID NO: 1219565 - DNA, 15 bp, Homo sapiens
accagctcagccaac

SEQ ID NO: 1219566 - DNA, 15 bp, Homo sapiens
gaccagctcagccaa

SEQ ID NO: 1219567 - DNA, 15 bp, Homo sapiens
agaccagctcagcca

SEQ ID NO: 1219568 - DNA, 15 bp, Homo sapiens
aagaccagctcagcc

SEQ ID NO: 1219569 - DNA, 15 bp, Homo sapiens
caagaccagctcagc

SEQ ID NO: 1219570 - DNA, 15 bp, Homo sapiens
tcaagaccagctcag

SEQ ID NO: 1219571 - DNA, 15 bp, Homo sapiens
ttcaagaccagctca

SEQ ID NO: 1219572 - DNA, 15 bp, Homo sapiens
gttcaagaccagctc

SEQ ID NO: 1219573 - DNA, 15 bp, Homo sapiens
gcttgaggtcaggag

SEQ ID NO: 1219574 - DNA, 15 bp, Homo sapiens
tgcttgaggtcagga

SEQ ID NO: 1219575 - DNA, 15 bp, Homo sapiens
ttgcttgaggtcagg

SEQ ID NO: 1219576 - DNA, 15 bp, Homo sapiens
attgcttgaggtcag

SEQ ID NO: 1219577 - DNA, 15 bp, Homo sapiens
gattgcttgaggtca

SEQ ID NO: 1219578 - DNA, 15 bp, Homo sapiens
agattgcttgaggtc

SEQ ID NO: 1219579 - DNA, 15 bp, Homo sapiens
cagattgcttgaggt

SEQ ID NO: 1219580 - DNA, 15 bp, Homo sapiens
ggggcagattgcttg

SEQ ID NO: 1219581 - DNA, 15 bp, Homo sapiens
tggggcagattgctt

SEQ ID NO: 1219582 - DNA, 15 bp, Homo sapiens
gtggggcagattgct

SEQ ID NO: 1219583 - DNA, 15 bp, Homo sapiens
ggtggggcagattgc

SEQ ID NO: 1219584 - DNA, 15 bp, Homo sapiens
aggtggggcagattg

SEQ ID NO: 1219585 - DNA, 15 bp, Homo sapiens
gaggtggggcagatt

SEQ ID NO: 1219586 - DNA, 15 bp, Homo sapiens
cgaggtggggcagat

SEQ ID NO: 1219587 - DNA, 15 bp, Homo sapiens
ccgaggtggggcaga

SEQ ID NO: 1219588 - DNA, 15 bp, Homo sapiens
gccgaggtggggcag

SEQ ID NO: 1219589 - DNA, 15 bp, Homo sapiens
ggccgaggtggggca

SEQ ID NO: 1219590 - DNA, 15 bp, Homo sapiens
aggccgaggtggggc

SEQ ID NO: 1219591 - DNA, 15 bp, Homo sapiens
gaggccgaggtgggg

SEQ ID NO: 1219592 - DNA, 15 bp, Homo sapiens
tggaggccgaggtgg

SEQ ID NO: 1219593 - DNA, 15 bp, Homo sapiens
ctggaggccgaggtg

SEQ ID NO: 1219594 - DNA, 15 bp, Homo sapiens
tctggaggccgaggt

SEQ ID NO: 1219595 - DNA, 15 bp, Homo sapiens
ttctggaggccgagg

SEQ ID NO: 1219596 - DNA, 15 bp, Homo sapiens
cttctggaggccgag

SEQ ID NO: 1219597 - DNA, 15 bp, Homo sapiens
gcttctggaggccga

SEQ ID NO: 1219598 - DNA, 15 bp, Homo sapiens
cgcttctggaggccg

SEQ ID NO: 1219599 - DNA, 15 bp, Homo sapiens
acgcttctggaggcc

SEQ ID NO: 1219600 - DNA, 15 bp, Homo sapiens
aacgcttctggaggc

SEQ ID NO: 1219601 - DNA, 15 bp, Homo sapiens
caacgcttctggagg

SEQ ID NO: 1219602 - DNA, 15 bp, Homo sapiens
ccaacgcttctggag

SEQ ID NO: 1219603 - DNA, 15 bp, Homo sapiens
cccaacgcttctgga

SEQ ID NO: 1219604 - DNA, 15 bp, Homo sapiens
tcccaacgcttctgg

SEQ ID NO: 1219605 - DNA, 15 bp, Homo sapiens
atcccaacgcttctg

SEQ ID NO: 1219606 - DNA, 15 bp, Homo sapiens
aatcccaacgcttct

SEQ ID NO: 1219607 - DNA, 15 bp, Homo sapiens
taatcccaacgcttc

SEQ ID NO: 1219608 - DNA, 15 bp, Homo sapiens
gtaatcccaacgctt

SEQ ID NO: 1219609 - DNA, 15 bp, Homo sapiens
tgtaatcccaacgct

SEQ ID NO: 1219610 - DNA, 15 bp, Homo sapiens
ctgtaatcccaacgc

SEQ ID NO: 1219611 - DNA, 15 bp, Homo sapiens
cctgtaatcccaacg

SEQ ID NO: 1219612 - DNA, 15 bp, Homo sapiens
cggtgtggtggctca

SEQ ID NO: 1219613 - DNA, 15 bp, Homo sapiens
ccggtgtggtggctc

SEQ ID NO: 1219614 - DNA, 15 bp, Homo sapiens
gccggtgtggtggct

SEQ ID NO: 1219615 - DNA, 15 bp, Homo sapiens
agccggtgtggtggc

SEQ ID NO: 1219616 - DNA, 15 bp, Homo sapiens
aagccggtgtggtgg

SEQ ID NO: 1219617 - DNA, 15 bp, Homo sapiens
gaagccggtgtggtg

SEQ ID NO: 1219618 - DNA, 15 bp, Homo sapiens
agaagccggtgtggt

SEQ ID NO: 1219619 - DNA, 15 bp, Homo sapiens
gagaagccggtgtgg

SEQ ID NO: 1219620 - DNA, 15 bp, Homo sapiens
ggagaagccggtgtg

SEQ ID NO: 1219621 - DNA, 15 bp, Homo sapiens
aggagaagccggtgt

SEQ ID NO: 1219622 - DNA, 15 bp, Homo sapiens
gaggagaagccggtg

SEQ ID NO: 1219623 - DNA, 15 bp, Homo sapiens
agaggagaagccggt

SEQ ID NO: 1219624 - DNA, 15 bp, Homo sapiens
agggagaggagaagc

SEQ ID NO: 1219625 - DNA, 15 bp, Homo sapiens
gagggagaggagaag

SEQ ID NO: 1219626 - DNA, 15 bp, Homo sapiens
agagggagaggagaa

SEQ ID NO: 1219627 - DNA, 15 bp, Homo sapiens
gagagggagaggaga

SEQ ID NO: 1219628 - DNA, 15 bp, Homo sapiens
ggagagggagaggag

SEQ ID NO: 1219629 - DNA, 15 bp, Homo sapiens
aggagagggagagga

SEQ ID NO: 1219630 - DNA, 15 bp, Homo sapiens
gaggagagggagagg

SEQ ID NO: 1219631 - DNA, 15 bp, Homo sapiens
agaggagagggagag

SEQ ID NO: 1219632 - DNA, 15 bp, Homo sapiens
aagaggagagggaga

SEQ ID NO: 1219633 - DNA, 15 bp, Homo sapiens
aaagaggagagggag

SEQ ID NO: 1219634 - DNA, 15 bp, Homo sapiens
gaaagaggagaggga

SEQ ID NO: 1219635 - DNA, 15 bp, Homo sapiens
agaaagaggagaggg

SEQ ID NO: 1219636 - DNA, 15 bp, Homo sapiens
gagaaagaggagagg

SEQ ID NO: 1219637 - DNA, 15 bp, Homo sapiens
ggagaaagaggagag

SEQ ID NO: 1219638 - DNA, 15 bp, Homo sapiens
aggagaaagaggaga

SEQ ID NO: 1219639 - DNA, 15 bp, Homo sapiens
aaggagaaagaggag

SEQ ID NO: 1219640 - DNA, 15 bp, Homo sapiens
aaaggagaaagagga

SEQ ID NO: 1219641 - DNA, 15 bp, Homo sapiens
aaaaggagaaagagg

SEQ ID NO: 1219642 - DNA, 15 bp, Homo sapiens
gaaaaggagaaagag

SEQ ID NO: 1219643 - DNA, 15 bp, Homo sapiens
ggaaaaggagaaaga

SEQ ID NO: 1219644 - DNA, 15 bp, Homo sapiens
aaggaaaaggagaaa

SEQ ID NO: 1219645 - DNA, 15 bp, Homo sapiens
gaaggaaaaggagaa

SEQ ID NO: 1219646 - DNA, 15 bp, Homo sapiens
ggaaggaaaaggaga

SEQ ID NO: 1219647 - DNA, 15 bp, Homo sapiens
aggaaggaaaaggag

SEQ ID NO: 1219648 - DNA, 15 bp, Homo sapiens
aaggaaggaaaagga

SEQ ID NO: 1219649 - DNA, 15 bp, Homo sapiens
aaaggaaggaaaagg

SEQ ID NO: 1219650 - DNA, 15 bp, Homo sapiens
gaaaggaaggaaaag

SEQ ID NO: 1219651 - DNA, 15 bp, Homo sapiens
agaaaggaaggaaaa

SEQ ID NO: 1219652 - DNA, 15 bp, Homo sapiens
aagaaaggaaggaaa

SEQ ID NO: 1219653 - DNA, 15 bp, Homo sapiens
gaagaaaggaaggaa

SEQ ID NO: 1219654 - DNA, 15 bp, Homo sapiens
ggaagaaaggaagga

SEQ ID NO: 1219655 - DNA, 15 bp, Homo sapiens
aggaagaaaggaagg

SEQ ID NO: 1219656 - DNA, 15 bp, Homo sapiens
gaaggaagaaaggaa

SEQ ID NO: 1219657 - DNA, 15 bp, Homo sapiens
ggaaggaagaaagga

SEQ ID NO: 1219658 - DNA, 15 bp, Homo sapiens
aggaaggaagaaagg

SEQ ID NO: 1219659 - DNA, 15 bp, Homo sapiens
gggaaggaaggaaga

SEQ ID NO: 1219660 - DNA, 15 bp, Homo sapiens
agggaaggaaggaag

SEQ ID NO: 1219661 - DNA, 15 bp, Homo sapiens
aagggaaggaaggaa

SEQ ID NO: 1219662 - DNA, 15 bp, Homo sapiens
gaagggaaggaagga

SEQ ID NO: 1219663 - DNA, 15 bp, Homo sapiens
ggaagggaaggaagg

SEQ ID NO: 1219664 - DNA, 15 bp, Homo sapiens
gggaagggaaggaag

SEQ ID NO: 1219665 - DNA, 15 bp, Homo sapiens
ggggaagggaaggaa

SEQ ID NO: 1219666 - DNA, 15 bp, Homo sapiens
aggggaagggaagga

SEQ ID NO: 1219667 - DNA, 15 bp, Homo sapiens
aaggggaagggaagg

SEQ ID NO: 1219668 - DNA, 15 bp, Homo sapiens
gaaggggaagggaag

SEQ ID NO: 1219669 - DNA, 15 bp, Homo sapiens
ggaaggggaagggaa

SEQ ID NO: 1219670 - DNA, 15 bp, Homo sapiens
aggaaggggaaggga

SEQ ID NO: 1219671 - DNA, 15 bp, Homo sapiens
aaggaaggggaaggg

SEQ ID NO: 1219672 - DNA, 15 bp, Homo sapiens
gaaggaaggggaagg

SEQ ID NO: 1219673 - DNA, 15 bp, Homo sapiens
ggaaggaaggggaag

SEQ ID NO: 1219674 - DNA, 15 bp, Homo sapiens
aggaaggaaggggaa

SEQ ID NO: 1219675 - DNA, 15 bp, Homo sapiens
aaggaaggaagggga

SEQ ID NO: 1219676 - DNA, 15 bp, Homo sapiens
gaaggaaggaagggg

SEQ ID NO: 1219677 - DNA, 15 bp, Homo sapiens
ggaaggaaggaaggg

SEQ ID NO: 1219678 - DNA, 15 bp, Homo sapiens
tgaaggaaggaagga

SEQ ID NO: 1219679 - DNA, 15 bp, Homo sapiens
atgaaggaaggaagg

SEQ ID NO: 1219680 - DNA, 15 bp, Homo sapiens
aatgaaggaaggaag

SEQ ID NO: 1219681 - DNA, 15 bp, Homo sapiens
gaatgaaggaaggaa

SEQ ID NO: 1219682 - DNA, 15 bp, Homo sapiens
agaatgaaggaagga

SEQ ID NO: 1219683 - DNA, 15 bp, Homo sapiens
aagaatgaaggaagg

SEQ ID NO: 1219684 - DNA, 15 bp, Homo sapiens
aaagaatgaaggaag

SEQ ID NO: 1219685 - DNA, 15 bp, Homo sapiens
gaaagaatgaaggaa

SEQ ID NO: 1219686 - DNA, 15 bp, Homo sapiens
agaaagaatgaagga

SEQ ID NO: 1219687 - DNA, 15 bp, Homo sapiens
aagaaagaatgaagg

SEQ ID NO: 1219688 - DNA, 15 bp, Homo sapiens
gaagaaagaatgaag

SEQ ID NO: 1219689 - DNA, 15 bp, Homo sapiens
ggaagaaagaatgaa

SEQ ID NO: 1219690 - DNA, 15 bp, Homo sapiens
gggaagaaagaatga

SEQ ID NO: 1219691 - DNA, 15 bp, Homo sapiens
ggggaagaaagaatg

SEQ ID NO: 1219692 - DNA, 15 bp, Homo sapiens
gggggaagaaagaat

SEQ ID NO: 1219693 - DNA, 15 bp, Homo sapiens
ggggggaagaaagaa

SEQ ID NO: 1219694 - DNA, 15 bp, Homo sapiens
cggggggaagaaaga

SEQ ID NO: 1219695 - DNA, 15 bp, Homo sapiens
gcggggggaagaaag

SEQ ID NO: 1219696 - DNA, 15 bp, Homo sapiens
agcggggggaagaaa

SEQ ID NO: 1219697 - DNA, 15 bp, Homo sapiens
gagcggggggaagaa

SEQ ID NO: 1219698 - DNA, 15 bp, Homo sapiens
ggagcggggggaaga

SEQ ID NO: 1219699 - DNA, 15 bp, Homo sapiens
gggagcggggggaag

SEQ ID NO: 1219700 - DNA, 15 bp, Homo sapiens
ggggagcggggggaa

SEQ ID NO: 1219701 - DNA, 15 bp, Homo sapiens
gggggagcgggggga

SEQ ID NO: 1219702 - DNA, 15 bp, Homo sapiens
ggggggagcgggggg

SEQ ID NO: 1219703 - DNA, 15 bp, Homo sapiens
aggggggagcggggg

SEQ ID NO: 1219704 - DNA, 15 bp, Homo sapiens
gaggggggagcgggg

SEQ ID NO: 1219705 - DNA, 15 bp, Homo sapiens
agaggggggagcggg

SEQ ID NO: 1219706 - DNA, 15 bp, Homo sapiens
aagaggggggagcgg

SEQ ID NO: 1219707 - DNA, 15 bp, Homo sapiens
aaagaggggggagcg

SEQ ID NO: 1219708 - DNA, 15 bp, Homo sapiens
aaaagaggggggagc

SEQ ID NO: 1219709 - DNA, 15 bp, Homo sapiens
aaaaagaggggggag

SEQ ID NO: 1219710 - DNA, 15 bp, Homo sapiens
aaaaaagagggggga

SEQ ID NO: 1219711 - DNA, 15 bp, Homo sapiens
aaaaaaagagggggg

SEQ ID NO: 1219712 - DNA, 15 bp, Homo sapiens
aaaaaaaagaggggg

SEQ ID NO: 1219713 - DNA, 15 bp, Homo sapiens
aaaaaaaaagagggg

SEQ ID NO: 1219714 - DNA, 15 bp, Homo sapiens
caaaaaaaaagaggg

SEQ ID NO: 1219715 - DNA, 15 bp, Homo sapiens
tcaaaaaaaaagagg

SEQ ID NO: 1219716 - DNA, 15 bp, Homo sapiens
ctcaaaaaaaaagag

SEQ ID NO: 1219717 - DNA, 15 bp, Homo sapiens
gtctcaaaaaaaaag

SEQ ID NO: 1219718 - DNA, 15 bp, Homo sapiens
aagcaagaccctgtc

SEQ ID NO: 1219719 - DNA, 15 bp, Homo sapiens
aaagcaagaccctgt

SEQ ID NO: 1219720 - DNA, 15 bp, Homo sapiens
caaagcaagaccctg

SEQ ID NO: 1219721 - DNA, 15 bp, Homo sapiens
acaaagcaagaccct

SEQ ID NO: 1219722 - DNA, 15 bp, Homo sapiens
gacaaagcaagaccc

SEQ ID NO: 1219723 - DNA, 15 bp, Homo sapiens
tgacaaagcaagacc

SEQ ID NO: 1219724 - DNA, 15 bp, Homo sapiens
gtgacaaagcaagac

SEQ ID NO: 1219725 - DNA, 15 bp, Homo sapiens
ggtgacaaagcaaga

SEQ ID NO: 1219726 - DNA, 15 bp, Homo sapiens
cctgggtgacaaagc

SEQ ID NO: 1219727 - DNA, 15 bp, Homo sapiens
ggattgcaccactgc

SEQ ID NO: 1219728 - DNA, 15 bp, Homo sapiens
aggattgcaccactg

SEQ ID NO: 1219729 - DNA, 15 bp, Homo sapiens
taggattgcaccact

SEQ ID NO: 1219730 - DNA, 15 bp, Homo sapiens
ctaggattgcaccac

SEQ ID NO: 1219731 - DNA, 15 bp, Homo sapiens
gctaggattgcacca

SEQ ID NO: 1219732 - DNA, 15 bp, Homo sapiens
agctaggattgcacc

SEQ ID NO: 1219733 - DNA, 15 bp, Homo sapiens
gagctaggattgcac

SEQ ID NO: 1219734 - DNA, 15 bp, Homo sapiens
tgagctaggattgca

SEQ ID NO: 1219735 - DNA, 15 bp, Homo sapiens
gtgagctaggattgc

SEQ ID NO: 1219736 - DNA, 15 bp, Homo sapiens
agtgagctaggattg

SEQ ID NO: 1219737 - DNA, 15 bp, Homo sapiens
cagtgagctaggatt

SEQ ID NO: 1219738 - DNA, 15 bp, Homo sapiens
gcagtgagctaggat

SEQ ID NO: 1219739 - DNA, 15 bp, Homo sapiens
tgcagtgagctagga

SEQ ID NO: 1219740 - DNA, 15 bp, Homo sapiens
ctgcagtgagctagg

SEQ ID NO: 1219741 - DNA, 15 bp, Homo sapiens
gctgcagtgagctag

SEQ ID NO: 1219742 - DNA, 15 bp, Homo sapiens
ccctgggaggtcaag

SEQ ID NO: 1219743 - DNA, 15 bp, Homo sapiens
accctgggaggtcaa

SEQ ID NO: 1219744 - DNA, 15 bp, Homo sapiens
aaccctgggaggtca

SEQ ID NO: 1219745 - DNA, 15 bp, Homo sapiens
caaccctgggaggtc

SEQ ID NO: 1219746 - DNA, 15 bp, Homo sapiens
tcaaccctgggaggt

SEQ ID NO: 1219747 - DNA, 15 bp, Homo sapiens
ctcaaccctgggagg

SEQ ID NO: 1219748 - DNA, 15 bp, Homo sapiens
cctcaaccctgggag

SEQ ID NO: 1219749 - DNA, 15 bp, Homo sapiens
gcctcaaccctggga

SEQ ID NO: 1219750 - DNA, 15 bp, Homo sapiens
tgcctcaaccctggg

SEQ ID NO: 1219751 - DNA, 15 bp, Homo sapiens
ttgcctcaaccctgg

SEQ ID NO: 1219752 - DNA, 15 bp, Homo sapiens
attgcctcaaccctg

SEQ ID NO: 1219753 - DNA, 15 bp, Homo sapiens
gattgcctcaaccct

SEQ ID NO: 1219754 - DNA, 15 bp, Homo sapiens
ggattgcctcaaccc

SEQ ID NO: 1219755 - DNA, 15 bp, Homo sapiens
aggattgcctcaacc

SEQ ID NO: 1219756 - DNA, 15 bp, Homo sapiens
gaggattgcctcaac

SEQ ID NO: 1219757 - DNA, 15 bp, Homo sapiens
ggaggattgcctcaa

SEQ ID NO: 1219758 - DNA, 15 bp, Homo sapiens
gggaggattgcctca

SEQ ID NO: 1219759 - DNA, 15 bp, Homo sapiens
tgggaggattgcctc

SEQ ID NO: 1219760 - DNA, 15 bp, Homo sapiens
gtgggaggattgcct

SEQ ID NO: 1219761 - DNA, 15 bp, Homo sapiens
ggtgggaggattgcc

SEQ ID NO: 1219762 - DNA, 15 bp, Homo sapiens
ggctacttgggaggc

SEQ ID NO: 1219763 - DNA, 15 bp, Homo sapiens
tggctacttgggagg

SEQ ID NO: 1219764 - DNA, 15 bp, Homo sapiens
ctggctacttgggag

SEQ ID NO: 1219765 - DNA, 15 bp, Homo sapiens
cctggctacttggga

SEQ ID NO: 1219766 - DNA, 15 bp, Homo sapiens
tcctggctacttggg

SEQ ID NO: 1219767 - DNA, 15 bp, Homo sapiens
gtcctggctacttgg

SEQ ID NO: 1219768 - DNA, 15 bp, Homo sapiens
agtcctggctacttg

SEQ ID NO: 1219769 - DNA, 15 bp, Homo sapiens
tagtcctggctactt

SEQ ID NO: 1219770 - DNA, 15 bp, Homo sapiens
gtagtcctggctact

SEQ ID NO: 1219771 - DNA, 15 bp, Homo sapiens
cgtagtcctggctac

SEQ ID NO: 1219772 - DNA, 15 bp, Homo sapiens
tcgtagtcctggcta

SEQ ID NO: 1219773 - DNA, 15 bp, Homo sapiens
ctcgtagtcctggct

SEQ ID NO: 1219774 - DNA, 15 bp, Homo sapiens
actcgtagtcctggc

SEQ ID NO: 1219775 - DNA, 15 bp, Homo sapiens
cactcgtagtcctgg

SEQ ID NO: 1219776 - DNA, 15 bp, Homo sapiens
gcactcgtagtcctg

SEQ ID NO: 1219777 - DNA, 15 bp, Homo sapiens
tgcactcgtagtcct

SEQ ID NO: 1219778 - DNA, 15 bp, Homo sapiens
gtgcactcgtagtcc

SEQ ID NO: 1219779 - DNA, 15 bp, Homo sapiens
cgtgcactcgtagtc

SEQ ID NO: 1219780 - DNA, 15 bp, Homo sapiens
gcgtgcactcgtagt

SEQ ID NO: 1219781 - DNA, 15 bp, Homo sapiens
ggcgtgcactcgtag

SEQ ID NO: 1219782 - DNA, 15 bp, Homo sapiens
tggcgtgcactcgta

SEQ ID NO: 1219783 - DNA, 15 bp, Homo sapiens
gtggcgtgcactcgt

SEQ ID NO: 1219784 - DNA, 15 bp, Homo sapiens
ggtggcgtgcactcg

SEQ ID NO: 1219785 - DNA, 15 bp, Homo sapiens
tggtggcgtgcactc

SEQ ID NO: 1219786 - DNA, 15 bp, Homo sapiens
atggtggcgtgcact

SEQ ID NO: 1219787 - DNA, 15 bp, Homo sapiens
catggtggcgtgcac

SEQ ID NO: 1219788 - DNA, 15 bp, Homo sapiens
gcatggtggcgtgca

SEQ ID NO: 1219789 - DNA, 15 bp, Homo sapiens
ggcatggtggcgtgc

SEQ ID NO: 1219790 - DNA, 15 bp, Homo sapiens
caggcatggtggcgt

SEQ ID NO: 1219791 - DNA, 15 bp, Homo sapiens
ctaaaaaattagcca

SEQ ID NO: 1219792 - DNA, 15 bp, Homo sapiens
actaaaaaattagcc

SEQ ID NO: 1219793 - DNA, 15 bp, Homo sapiens
aactaaaaaattagc

SEQ ID NO: 1219794 - DNA, 15 bp, Homo sapiens
aaactaaaaaattag

SEQ ID NO: 1219795 - DNA, 15 bp, Homo sapiens
aaaactaaaaaatta

SEQ ID NO: 1219796 - DNA, 15 bp, Homo sapiens
aaaaactaaaaaatt

SEQ ID NO: 1219797 - DNA, 15 bp, Homo sapiens
aaaaaactaaaaaat

SEQ ID NO: 1219798 - DNA, 15 bp, Homo sapiens
aaaaaaactaaaaaa

SEQ ID NO: 1219799 - DNA, 15 bp, Homo sapiens
aaaaaaaactaaaaa

SEQ ID NO: 1219800 - DNA, 15 bp, Homo sapiens
aaaaaaaaactaaaa

SEQ ID NO: 1219801 - DNA, 15 bp, Homo sapiens
caaaaaaaaactaaa

SEQ ID NO: 1219802 - DNA, 15 bp, Homo sapiens
acaaaaaaaaactaa

SEQ ID NO: 1219803 - DNA, 15 bp, Homo sapiens
tacaaaaaaaaacta

SEQ ID NO: 1219804 - DNA, 15 bp, Homo sapiens
ctacaaaaaaaaact

SEQ ID NO: 1219805 - DNA, 15 bp, Homo sapiens
tctacaaaaaaaaac

SEQ ID NO: 1219806 - DNA, 15 bp, Homo sapiens
ctcctgtctctacaa

SEQ ID NO: 1219807 - DNA, 15 bp, Homo sapiens
actcctgtctctaca

SEQ ID NO: 1219808 - DNA, 15 bp, Homo sapiens
gactcctgtctctac

SEQ ID NO: 1219809 - DNA, 15 bp, Homo sapiens
agactcctgtctcta

SEQ ID NO: 1219810 - DNA, 15 bp, Homo sapiens
gagactcctgtctct

SEQ ID NO: 1219811 - DNA, 15 bp, Homo sapiens
tgagactcctgtctc

SEQ ID NO: 1219812 - DNA, 15 bp, Homo sapiens
gtgagactcctgtct

SEQ ID NO: 1219813 - DNA, 15 bp, Homo sapiens
agtgagactcctgtc

SEQ ID NO: 1219814 - DNA, 15 bp, Homo sapiens
cagtgagactcctgt

SEQ ID NO: 1219815 - DNA, 15 bp, Homo sapiens
acagtgagactcctg

SEQ ID NO: 1219816 - DNA, 15 bp, Homo sapiens
cacagtgagactcct

SEQ ID NO: 1219817 - DNA, 15 bp, Homo sapiens
acacagtgagactcc

SEQ ID NO: 1219818 - DNA, 15 bp, Homo sapiens
aacacagtgagactc

SEQ ID NO: 1219819 - DNA, 15 bp, Homo sapiens
caacacagtgagact

SEQ ID NO: 1219820 - DNA, 15 bp, Homo sapiens
acaacacagtgagac

SEQ ID NO: 1219821 - DNA, 15 bp, Homo sapiens
gacaacacagtgaga

SEQ ID NO: 1219822 - DNA, 15 bp, Homo sapiens
ggacaacacagtgag

SEQ ID NO: 1219823 - DNA, 15 bp, Homo sapiens
tggacaacacagtga

SEQ ID NO: 1219824 - DNA, 15 bp, Homo sapiens
ctggacaacacagtg

SEQ ID NO: 1219825 - DNA, 15 bp, Homo sapiens
cctggacaacacagt

SEQ ID NO: 1219826 - DNA, 15 bp, Homo sapiens
gcctggacaacacag

SEQ ID NO: 1219827 - DNA, 15 bp, Homo sapiens
accagcctggacaac

SEQ ID NO: 1219828 - DNA, 15 bp, Homo sapiens
gaccagcctggacaa

SEQ ID NO: 1219829 - DNA, 15 bp, Homo sapiens
agaccagcctggaca

SEQ ID NO: 1219830 - DNA, 15 bp, Homo sapiens
aagaccagcctggac

SEQ ID NO: 1219831 - DNA, 15 bp, Homo sapiens
caagaccagcctgga

SEQ ID NO: 1219832 - DNA, 15 bp, Homo sapiens
gaggagttcaagacc

SEQ ID NO: 1219833 - DNA, 15 bp, Homo sapiens
cgaggagttcaagac

SEQ ID NO: 1219834 - DNA, 15 bp, Homo sapiens
ccgaggagttcaaga

SEQ ID NO: 1219835 - DNA, 15 bp, Homo sapiens
accgaggagttcaag

SEQ ID NO: 1219836 - DNA, 15 bp, Homo sapiens
aaccgaggagttcaa

SEQ ID NO: 1219837 - DNA, 15 bp, Homo sapiens
gaaccgaggagttca

SEQ ID NO: 1219838 - DNA, 15 bp, Homo sapiens
tgaaccgaggagttc

SEQ ID NO: 1219839 - DNA, 15 bp, Homo sapiens
ttgaaccgaggagtt

SEQ ID NO: 1219840 - DNA, 15 bp, Homo sapiens
cttgaaccgaggagt

SEQ ID NO: 1219841 - DNA, 15 bp, Homo sapiens
gcttgaaccgaggag

SEQ ID NO: 1219842 - DNA, 15 bp, Homo sapiens
tgcttgaaccgagga

SEQ ID NO: 1219843 - DNA, 15 bp, Homo sapiens
ttgcttgaaccgagg

SEQ ID NO: 1219844 - DNA, 15 bp, Homo sapiens
attgcttgaaccgag

SEQ ID NO: 1219845 - DNA, 15 bp, Homo sapiens
gattgcttgaaccga

SEQ ID NO: 1219846 - DNA, 15 bp, Homo sapiens
agattgcttgaaccg

SEQ ID NO: 1219847 - DNA, 15 bp, Homo sapiens
aagattgcttgaacc

SEQ ID NO: 1219848 - DNA, 15 bp, Homo sapiens
gaagattgcttgaac

SEQ ID NO: 1219849 - DNA, 15 bp, Homo sapiens
ggaagattgcttgaa

SEQ ID NO: 1219850 - DNA, 15 bp, Homo sapiens
aaggcaggaagattg

SEQ ID NO: 1219851 - DNA, 15 bp, Homo sapiens
caaggcaggaagatt

SEQ ID NO: 1219852 - DNA, 15 bp, Homo sapiens
taggaggccaaggca

SEQ ID NO: 1219853 - DNA, 15 bp, Homo sapiens
cagcactttaggagg

SEQ ID NO: 1219854 - DNA, 15 bp, Homo sapiens
ccagcactttaggag

SEQ ID NO: 1219855 - DNA, 15 bp, Homo sapiens
tgtggctcacgcctg

SEQ ID NO: 1219856 - DNA, 15 bp, Homo sapiens
ctgtggctcacgcct

SEQ ID NO: 1219857 - DNA, 15 bp, Homo sapiens
gctgtggctcacgcc

SEQ ID NO: 1219858 - DNA, 15 bp, Homo sapiens
tgctgtggctcacgc

SEQ ID NO: 1219859 - DNA, 15 bp, Homo sapiens
gtgctgtggctcacg

SEQ ID NO: 1219860 - DNA, 15 bp, Homo sapiens
ggccaggtgctgtgg

SEQ ID NO: 1219861 - DNA, 15 bp, Homo sapiens
gggccaggtgctgtg

SEQ ID NO: 1219862 - DNA, 15 bp, Homo sapiens
tgggccaggtgctgt

SEQ ID NO: 1219863 - DNA, 15 bp, Homo sapiens
ctgggccaggtgctg

SEQ ID NO: 1219864 - DNA, 15 bp, Homo sapiens
actgggccaggtgct

SEQ ID NO: 1219865 - DNA, 15 bp, Homo sapiens
gactgggccaggtgc

SEQ ID NO: 1219866 - DNA, 15 bp, Homo sapiens
ggactgggccaggtg

SEQ ID NO: 1219867 - DNA, 15 bp, Homo sapiens
tggactgggccaggt

SEQ ID NO: 1219868 - DNA, 15 bp, Homo sapiens
gtggactgggccagg

SEQ ID NO: 1219869 - DNA, 15 bp, Homo sapiens
tgtggactgggccag

SEQ ID NO: 1219870 - DNA, 15 bp, Homo sapiens
atgtggactgggcca

SEQ ID NO: 1219871 - DNA, 15 bp, Homo sapiens
aatgtggactgggcc

SEQ ID NO: 1219872 - DNA, 15 bp, Homo sapiens
aaatgtggactgggc

SEQ ID NO: 1219873 - DNA, 15 bp, Homo sapiens
gaaatgtggactggg

SEQ ID NO: 1219874 - DNA, 15 bp, Homo sapiens
agaaatgtggactgg

SEQ ID NO: 1219875 - DNA, 15 bp, Homo sapiens
tagaaatgtggactg

SEQ ID NO: 1219876 - DNA, 15 bp, Homo sapiens
ttagaaatgtggact

SEQ ID NO: 1219877 - DNA, 15 bp, Homo sapiens
cttagaaatgtggac

SEQ ID NO: 1219878 - DNA, 15 bp, Homo sapiens
acttagaaatgtgga

SEQ ID NO: 1219879 - DNA, 15 bp, Homo sapiens
tacttagaaatgtgg

SEQ ID NO: 1219880 - DNA, 15 bp, Homo sapiens
ttacttagaaatgtg

SEQ ID NO: 1219881 - DNA, 15 bp, Homo sapiens
tttacttagaaatgt

SEQ ID NO: 1219882 - DNA, 15 bp, Homo sapiens
atttacttagaaatg

SEQ ID NO: 1219883 - DNA, 15 bp, Homo sapiens
tatttacttagaaat

SEQ ID NO: 1219884 - DNA, 15 bp, Homo sapiens
atatttacttagaaa

SEQ ID NO: 1219885 - DNA, 15 bp, Homo sapiens
catatttacttagaa

SEQ ID NO: 1219886 - DNA, 15 bp, Homo sapiens
ccatatttacttaga

SEQ ID NO: 1219887 - DNA, 15 bp, Homo sapiens
cccatatttacttag

SEQ ID NO: 1219888 - DNA, 15 bp, Homo sapiens
tcccatatttactta

SEQ ID NO: 1219889 - DNA, 15 bp, Homo sapiens
ctcccatatttactt

SEQ ID NO: 1219890 - DNA, 15 bp, Homo sapiens
cctcccatatttact

SEQ ID NO: 1219891 - DNA, 15 bp, Homo sapiens
gcctcccatatttac

SEQ ID NO: 1219892 - DNA, 15 bp, Homo sapiens
ggcctcccatattta

SEQ ID NO: 1219893 - DNA, 15 bp, Homo sapiens
tggcctcccatattt

SEQ ID NO: 1219894 - DNA, 15 bp, Homo sapiens
ctggcctcccatatt

SEQ ID NO: 1219895 - DNA, 15 bp, Homo sapiens
gctggcctcccatat

SEQ ID NO: 1219896 - DNA, 15 bp, Homo sapiens
ggctggcctcccata

SEQ ID NO: 1219897 - DNA, 15 bp, Homo sapiens
tggctggcctcccat

SEQ ID NO: 1219898 - DNA, 15 bp, Homo sapiens
ctggctggcctccca

SEQ ID NO: 1219899 - DNA, 15 bp, Homo sapiens
cctggctggcctccc

SEQ ID NO: 1219900 - DNA, 15 bp, Homo sapiens
acctggctggcctcc

SEQ ID NO: 1219901 - DNA, 15 bp, Homo sapiens
cacctggctggcctc

SEQ ID NO: 1219902 - DNA, 15 bp, Homo sapiens
gcacctggctggcct

SEQ ID NO: 1219903 - DNA, 15 bp, Homo sapiens
tgcacctggctggcc

SEQ ID NO: 1219904 - DNA, 15 bp, Homo sapiens
ctgcacctggctggc

SEQ ID NO: 1219905 - DNA, 15 bp, Homo sapiens
actgcacctggctgg

SEQ ID NO: 1219906 - DNA, 15 bp, Homo sapiens
cactgcacctggctg

SEQ ID NO: 1219907 - DNA, 15 bp, Homo sapiens
cagccactgcacctg

SEQ ID NO: 1219908 - DNA, 15 bp, Homo sapiens
acagccactgcacct

SEQ ID NO: 1219909 - DNA, 15 bp, Homo sapiens
tacagccactgcacc

SEQ ID NO: 1219910 - DNA, 15 bp, Homo sapiens
ttacagccactgcac

SEQ ID NO: 1219911 - DNA, 15 bp, Homo sapiens
attacagccactgca

SEQ ID NO: 1219912 - DNA, 15 bp, Homo sapiens
gattacagccactgc

SEQ ID NO: 1219913 - DNA, 15 bp, Homo sapiens
ggattacagccactg

SEQ ID NO: 1219914 - DNA, 15 bp, Homo sapiens
gggattacagccact

SEQ ID NO: 1219915 - DNA, 15 bp, Homo sapiens
tgggattacagccac

SEQ ID NO: 1219916 - DNA, 15 bp, Homo sapiens
actggtctggaactc

SEQ ID NO: 1219917 - DNA, 15 bp, Homo sapiens
gactggtctggaact

SEQ ID NO: 1219918 - DNA, 15 bp, Homo sapiens
agactggtctggaac

SEQ ID NO: 1219919 - DNA, 15 bp, Homo sapiens
cagactggtctggaa

SEQ ID NO: 1219920 - DNA, 15 bp, Homo sapiens
ccagactggtctgga

SEQ ID NO: 1219921 - DNA, 15 bp, Homo sapiens
gccagactggtctgg

SEQ ID NO: 1219922 - DNA, 15 bp, Homo sapiens
ggccagactggtctg

SEQ ID NO: 1219923 - DNA, 15 bp, Homo sapiens
cgggatttcaccatg

SEQ ID NO: 1219924 - DNA, 15 bp, Homo sapiens
acgggatttcaccat

SEQ ID NO: 1219925 - DNA, 15 bp, Homo sapiens
gacgggatttcacca

SEQ ID NO: 1219926 - DNA, 15 bp, Homo sapiens
aagacgggatttcac

SEQ ID NO: 1219927 - DNA, 15 bp, Homo sapiens
aaagacgggatttca

SEQ ID NO: 1219928 - DNA, 15 bp, Homo sapiens
taaagacgggatttc

SEQ ID NO: 1219929 - DNA, 15 bp, Homo sapiens
gtaaagacgggattt

SEQ ID NO: 1219930 - DNA, 15 bp, Homo sapiens
agtaaagacgggatt

SEQ ID NO: 1219931 - DNA, 15 bp, Homo sapiens
tagtaaagacgggat

SEQ ID NO: 1219932 - DNA, 15 bp, Homo sapiens
ttagtaaagacggga

SEQ ID NO: 1219933 - DNA, 15 bp, Homo sapiens
agccaccacgcccgg

SEQ ID NO: 1219934 - DNA, 15 bp, Homo sapiens
gagccaccacgcccg

SEQ ID NO: 1219935 - DNA, 15 bp, Homo sapiens
gccgcctcagcctcc

SEQ ID NO: 1219936 - DNA, 15 bp, Homo sapiens
tgccgcctcagcctc

SEQ ID NO: 1219937 - DNA, 15 bp, Homo sapiens
ctgccgcctcagcct

SEQ ID NO: 1219938 - DNA, 15 bp, Homo sapiens
tctgccgcctcagcc

SEQ ID NO: 1219939 - DNA, 15 bp, Homo sapiens
atctgccgcctcagc

SEQ ID NO: 1219940 - DNA, 15 bp, Homo sapiens
gatctgccgcctcag

SEQ ID NO: 1219941 - DNA, 15 bp, Homo sapiens
tgatctgccgcctca

SEQ ID NO: 1219942 - DNA, 15 bp, Homo sapiens
gtgatctgccgcctc

SEQ ID NO: 1219943 - DNA, 15 bp, Homo sapiens
tgtgatctgccgcct

SEQ ID NO: 1219944 - DNA, 15 bp, Homo sapiens
ttgtgatctgccgcc

SEQ ID NO: 1219945 - DNA, 15 bp, Homo sapiens
cttgtgatctgccgc

SEQ ID NO: 1219946 - DNA, 15 bp, Homo sapiens
ccttgtgatctgccg

SEQ ID NO: 1219947 - DNA, 15 bp, Homo sapiens
cgggtttcaccgtat

SEQ ID NO: 1219948 - DNA, 15 bp, Homo sapiens
acgggtttcaccgta

SEQ ID NO: 1219949 - DNA, 15 bp, Homo sapiens
atagagacgggtttc

SEQ ID NO: 1219950 - DNA, 15 bp, Homo sapiens
aatagagacgggttt

SEQ ID NO: 1219951 - DNA, 15 bp, Homo sapiens
taatagagacgggtt

SEQ ID NO: 1219952 - DNA, 15 bp, Homo sapiens
ttaatagagacgggt

SEQ ID NO: 1219953 - DNA, 15 bp, Homo sapiens
tcctgccaccatgcc

SEQ ID NO: 1219954 - DNA, 15 bp, Homo sapiens
ctcctgccaccatgc

SEQ ID NO: 1219955 - DNA, 15 bp, Homo sapiens
gctcctgccaccatg

SEQ ID NO: 1219956 - DNA, 15 bp, Homo sapiens
ggctcctgccaccat

SEQ ID NO: 1219957 - DNA, 15 bp, Homo sapiens
ctacaggctcctgcc

SEQ ID NO: 1219958 - DNA, 15 bp, Homo sapiens
actacaggctcctgc

SEQ ID NO: 1219959 - DNA, 15 bp, Homo sapiens
gactacaggctcctg

SEQ ID NO: 1219960 - DNA, 15 bp, Homo sapiens
ggactacaggctcct

SEQ ID NO: 1219961 - DNA, 15 bp, Homo sapiens
gggactacaggctcc

SEQ ID NO: 1219962 - DNA, 15 bp, Homo sapiens
tgggactacaggctc

SEQ ID NO: 1219963 - DNA, 15 bp, Homo sapiens
ctgggactacaggct

SEQ ID NO: 1219964 - DNA, 15 bp, Homo sapiens
tacaccattctcctg

SEQ ID NO: 1219965 - DNA, 15 bp, Homo sapiens
ttacaccattctcct

SEQ ID NO: 1219966 - DNA, 15 bp, Homo sapiens
tttacaccattctcc

SEQ ID NO: 1219967 - DNA, 15 bp, Homo sapiens
gtttacaccattctc

SEQ ID NO: 1219968 - DNA, 15 bp, Homo sapiens
ggtttacaccattct

SEQ ID NO: 1219969 - DNA, 15 bp, Homo sapiens
gggtttacaccattc

SEQ ID NO: 1219970 - DNA, 15 bp, Homo sapiens
cgggtttacaccatt

SEQ ID NO: 1219971 - DNA, 15 bp, Homo sapiens
ccgggtttacaccat

SEQ ID NO: 1219972 - DNA, 15 bp, Homo sapiens
cccgggtttacacca

SEQ ID NO: 1219973 - DNA, 15 bp, Homo sapiens
tcccgggtttacacc

SEQ ID NO: 1219974 - DNA, 15 bp, Homo sapiens
ctcccgggtttacac

SEQ ID NO: 1219975 - DNA, 15 bp, Homo sapiens
cctcccgggtttaca

SEQ ID NO: 1219976 - DNA, 15 bp, Homo sapiens
gcctcccgggtttac

SEQ ID NO: 1219977 - DNA, 15 bp, Homo sapiens
tgcctcccgggttta

SEQ ID NO: 1219978 - DNA, 15 bp, Homo sapiens
ctgcctcccgggttt

SEQ ID NO: 1219979 - DNA, 15 bp, Homo sapiens
gctctgcctcccggg

SEQ ID NO: 1219980 - DNA, 15 bp, Homo sapiens
agctctgcctcccgg

SEQ ID NO: 1219981 - DNA, 15 bp, Homo sapiens
aagctctgcctcccg

SEQ ID NO: 1219982 - DNA, 15 bp, Homo sapiens
caagctctgcctccc

SEQ ID NO: 1219983 - DNA, 15 bp, Homo sapiens
gcaccatctcggctc

SEQ ID NO: 1219984 - DNA, 15 bp, Homo sapiens
ggcaccatctcggct

SEQ ID NO: 1219985 - DNA, 15 bp, Homo sapiens
tggcaccatctcggc

SEQ ID NO: 1219986 - DNA, 15 bp, Homo sapiens
gtggcaccatctcgg

SEQ ID NO: 1219987 - DNA, 15 bp, Homo sapiens
agtggcaccatctcg

SEQ ID NO: 1219988 - DNA, 15 bp, Homo sapiens
ctcacctgggctgga

SEQ ID NO: 1219989 - DNA, 15 bp, Homo sapiens
tctcacctgggctgg

SEQ ID NO: 1219990 - DNA, 15 bp, Homo sapiens
ctctcacctgggctg

SEQ ID NO: 1219991 - DNA, 15 bp, Homo sapiens
actctcacctgggct

SEQ ID NO: 1219992 - DNA, 15 bp, Homo sapiens
cactctcacctgggc

SEQ ID NO: 1219993 - DNA, 15 bp, Homo sapiens
acactctcacctggg

SEQ ID NO: 1219994 - DNA, 15 bp, Homo sapiens
cacactctcacctgg

SEQ ID NO: 1219995 - DNA, 15 bp, Homo sapiens
tcacactctcacctg

SEQ ID NO: 1219996 - DNA, 15 bp, Homo sapiens
ctcacactctcacct

SEQ ID NO: 1219997 - DNA, 15 bp, Homo sapiens
tctcacactctcacc

SEQ ID NO: 1219998 - DNA, 15 bp, Homo sapiens
gtctcacactctcac

SEQ ID NO: 1219999 - DNA, 15 bp, Homo sapiens
agtctcacactctca

SEQ ID NO: 1220000 - DNA, 15 bp, Homo sapiens
gagtctcacactctc

SEQ ID NO: 1220001 - DNA, 15 bp, Homo sapiens
ggagtctcacactct

SEQ ID NO: 1220002 - DNA, 15 bp, Homo sapiens
cggagtctcacactc

SEQ ID NO: 1220003 - DNA, 15 bp, Homo sapiens
acggagtctcacact

SEQ ID NO: 1220004 - DNA, 15 bp, Homo sapiens
gacggagtctcacac

SEQ ID NO: 1220005 - DNA, 15 bp, Homo sapiens
agacggagtctcaca

SEQ ID NO: 1220006 - DNA, 15 bp, Homo sapiens
gtttttttgagacgg

SEQ ID NO: 1220007 - DNA, 15 bp, Homo sapiens
tgtttttttgagacg

SEQ ID NO: 1220008 - DNA, 15 bp, Homo sapiens
attttgtttttttga

SEQ ID NO: 1220009 - DNA, 15 bp, Homo sapiens
tattttgtttttttg

SEQ ID NO: 1220010 - DNA, 15 bp, Homo sapiens
ttattttgttttttt

SEQ ID NO: 1220011 - DNA, 15 bp, Homo sapiens
tgttttattttgttt

SEQ ID NO: 1220012 - DNA, 15 bp, Homo sapiens
ttgttttattttgtt

SEQ ID NO: 1220013 - DNA, 15 bp, Homo sapiens
tttgttttattttgt

SEQ ID NO: 1220014 - DNA, 15 bp, Homo sapiens
ttttgttttattttg

SEQ ID NO: 1220015 - DNA, 15 bp, Homo sapiens
ttttttgttttattt

SEQ ID NO: 1220016 - DNA, 15 bp, Homo sapiens
attttttgttttatt

SEQ ID NO: 1220017 - DNA, 15 bp, Homo sapiens
tattttttgttttat

SEQ ID NO: 1220018 - DNA, 15 bp, Homo sapiens
gtattttttgtttta

SEQ ID NO: 1220019 - DNA, 15 bp, Homo sapiens
tgtattttttgtttt

SEQ ID NO: 1220020 - DNA, 15 bp, Homo sapiens
ttgtattttttgttt

SEQ ID NO: 1220021 - DNA, 15 bp, Homo sapiens
tttgtattttttgtt

SEQ ID NO: 1220022 - DNA, 15 bp, Homo sapiens
cgctaatttttgtat

SEQ ID NO: 1220023 - DNA, 15 bp, Homo sapiens
ccgctaatttttgta

SEQ ID NO: 1220024 - DNA, 15 bp, Homo sapiens
cccgctaatttttgt

SEQ ID NO: 1220025 - DNA, 15 bp, Homo sapiens
cgccccgctaatttt

SEQ ID NO: 1220026 - DNA, 15 bp, Homo sapiens
acgccccgctaattt

SEQ ID NO: 1220027 - DNA, 15 bp, Homo sapiens
cacgccccgctaatt

SEQ ID NO: 1220028 - DNA, 15 bp, Homo sapiens
tcacgccccgctaat

SEQ ID NO: 1220029 - DNA, 15 bp, Homo sapiens
atcacgccccgctaa

SEQ ID NO: 1220030 - DNA, 15 bp, Homo sapiens
catcacgccccgcta

SEQ ID NO: 1220031 - DNA, 15 bp, Homo sapiens
ccatcacgccccgct

SEQ ID NO: 1220032 - DNA, 15 bp, Homo sapiens
gccatcacgccccgc

SEQ ID NO: 1220033 - DNA, 15 bp, Homo sapiens
tgccatcacgccccg

SEQ ID NO: 1220034 - DNA, 15 bp, Homo sapiens
ctgccatcacgcccc

SEQ ID NO: 1220035 - DNA, 15 bp, Homo sapiens
cctgccatcacgccc

SEQ ID NO: 1220036 - DNA, 15 bp, Homo sapiens
acctgccatcacgcc

SEQ ID NO: 1220037 - DNA, 15 bp, Homo sapiens
cacctgccatcacgc

SEQ ID NO: 1220038 - DNA, 15 bp, Homo sapiens
gcacctgccatcacg

SEQ ID NO: 1220039 - DNA, 15 bp, Homo sapiens
ggcacctgccatcac

SEQ ID NO: 1220040 - DNA, 15 bp, Homo sapiens
aggcacctgccatca

SEQ ID NO: 1220041 - DNA, 15 bp, Homo sapiens
caggcacctgccatc

SEQ ID NO: 1220042 - DNA, 15 bp, Homo sapiens
acaggcacctgccat

SEQ ID NO: 1220043 - DNA, 15 bp, Homo sapiens
ctacaggcacctgcc

SEQ ID NO: 1220044 - DNA, 15 bp, Homo sapiens
actacaggcacctgc

SEQ ID NO: 1220045 - DNA, 15 bp, Homo sapiens
gactacaggcacctg

SEQ ID NO: 1220046 - DNA, 15 bp, Homo sapiens
ggactacaggcacct

SEQ ID NO: 1220047 - DNA, 15 bp, Homo sapiens
taagtagctgggact

SEQ ID NO: 1220048 - DNA, 15 bp, Homo sapiens
ctaagtagctgggac

SEQ ID NO: 1220049 - DNA, 15 bp, Homo sapiens
ccctcagcctcctaa

SEQ ID NO: 1220050 - DNA, 15 bp, Homo sapiens
tccctcagcctccta

SEQ ID NO: 1220051 - DNA, 15 bp, Homo sapiens
ttccctcagcctcct

SEQ ID NO: 1220052 - DNA, 15 bp, Homo sapiens
cttccctcagcctcc

SEQ ID NO: 1220053 - DNA, 15 bp, Homo sapiens
tcttccctcagcctc

SEQ ID NO: 1220054 - DNA, 15 bp, Homo sapiens
ctcttccctcagcct

SEQ ID NO: 1220055 - DNA, 15 bp, Homo sapiens
tctcttccctcagcc

SEQ ID NO: 1220056 - DNA, 15 bp, Homo sapiens
ttctcttccctcagc

SEQ ID NO: 1220057 - DNA, 15 bp, Homo sapiens
attctcttccctcag

SEQ ID NO: 1220058 - DNA, 15 bp, Homo sapiens
gattctcttccctca

SEQ ID NO: 1220059 - DNA, 15 bp, Homo sapiens
tgattctcttccctc

SEQ ID NO: 1220060 - DNA, 15 bp, Homo sapiens
gtgattctcttccct

SEQ ID NO: 1220061 - DNA, 15 bp, Homo sapiens
agtgattctcttccc

SEQ ID NO: 1220062 - DNA, 15 bp, Homo sapiens
aagtgattctcttcc

SEQ ID NO: 1220063 - DNA, 15 bp, Homo sapiens
caagtgattctcttc

SEQ ID NO: 1220064 - DNA, 15 bp, Homo sapiens
tcaagtgattctctt

SEQ ID NO: 1220065 - DNA, 15 bp, Homo sapiens
ttcaagtgattctct

SEQ ID NO: 1220066 - DNA, 15 bp, Homo sapiens
tgcttcccgggttca

SEQ ID NO: 1220067 - DNA, 15 bp, Homo sapiens
ctgcttcccgggttc

SEQ ID NO: 1220068 - DNA, 15 bp, Homo sapiens
tctgcttcccgggtt

SEQ ID NO: 1220069 - DNA, 15 bp, Homo sapiens
ttctgcttcccgggt

SEQ ID NO: 1220070 - DNA, 15 bp, Homo sapiens
cttctgcttcccggg

SEQ ID NO: 1220071 - DNA, 15 bp, Homo sapiens
acttctgcttcccgg

SEQ ID NO: 1220072 - DNA, 15 bp, Homo sapiens
aacttctgcttcccg

SEQ ID NO: 1220073 - DNA, 15 bp, Homo sapiens
caacttctgcttccc

SEQ ID NO: 1220074 - DNA, 15 bp, Homo sapiens
gcaacttctgcttcc

SEQ ID NO: 1220075 - DNA, 15 bp, Homo sapiens
tgcaacttctgcttc

SEQ ID NO: 1220076 - DNA, 15 bp, Homo sapiens
ctgcaacttctgctt

SEQ ID NO: 1220077 - DNA, 15 bp, Homo sapiens
actgcaacttctgct

SEQ ID NO: 1220078 - DNA, 15 bp, Homo sapiens
cactgcaacttctgc

SEQ ID NO: 1220079 - DNA, 15 bp, Homo sapiens
tcactgcaacttctg

SEQ ID NO: 1220080 - DNA, 15 bp, Homo sapiens
ctcactgcaacttct

SEQ ID NO: 1220081 - DNA, 15 bp, Homo sapiens
gcggctcactgcaac

SEQ ID NO: 1220082 - DNA, 15 bp, Homo sapiens
cgcggctcactgcaa

SEQ ID NO: 1220083 - DNA, 15 bp, Homo sapiens
tcgcggctcactgca

SEQ ID NO: 1220084 - DNA, 15 bp, Homo sapiens
atcgcggctcactgc

SEQ ID NO: 1220085 - DNA, 15 bp, Homo sapiens
gatcgcggctcactg

SEQ ID NO: 1220086 - DNA, 15 bp, Homo sapiens
cgatcgcggctcact

SEQ ID NO: 1220087 - DNA, 15 bp, Homo sapiens
gcgatcgcggctcac

SEQ ID NO: 1220088 - DNA, 15 bp, Homo sapiens
tgcgatcgcggctca

SEQ ID NO: 1220089 - DNA, 15 bp, Homo sapiens
atgcgatcgcggctc

SEQ ID NO: 1220090 - DNA, 15 bp, Homo sapiens
gatgcgatcgcggct

SEQ ID NO: 1220091 - DNA, 15 bp, Homo sapiens
tgatgcgatcgcggc

SEQ ID NO: 1220092 - DNA, 15 bp, Homo sapiens
gtgatgcgatcgcgg

SEQ ID NO: 1220093 - DNA, 15 bp, Homo sapiens
agtgatgcgatcgcg

SEQ ID NO: 1220094 - DNA, 15 bp, Homo sapiens
cagtgatgcgatcgc

SEQ ID NO: 1220095 - DNA, 15 bp, Homo sapiens
gcagtgatgcgatcg

SEQ ID NO: 1220096 - DNA, 15 bp, Homo sapiens
cagtgcagtgatgcg

SEQ ID NO: 1220097 - DNA, 15 bp, Homo sapiens
gcagtgcagtgatgc

SEQ ID NO: 1220098 - DNA, 15 bp, Homo sapiens
tgcagtgcagtgatg

SEQ ID NO: 1220099 - DNA, 15 bp, Homo sapiens
ctgcagtgcagtgat

SEQ ID NO: 1220100 - DNA, 15 bp, Homo sapiens
gctgcagtgcagtga

SEQ ID NO: 1220101 - DNA, 15 bp, Homo sapiens
gggctgcagtgcagt

SEQ ID NO: 1220102 - DNA, 15 bp, Homo sapiens
cgggctgcagtgcag

SEQ ID NO: 1220103 - DNA, 15 bp, Homo sapiens
ccgggctgcagtgca

SEQ ID NO: 1220104 - DNA, 15 bp, Homo sapiens
cccgggctgcagtgc

SEQ ID NO: 1220105 - DNA, 15 bp, Homo sapiens
acccgggctgcagtg

SEQ ID NO: 1220106 - DNA, 15 bp, Homo sapiens
cacccgggctgcagt

SEQ ID NO: 1220107 - DNA, 15 bp, Homo sapiens
tcacccgggctgcag

SEQ ID NO: 1220108 - DNA, 15 bp, Homo sapiens
gtcacccgggctgca

SEQ ID NO: 1220109 - DNA, 15 bp, Homo sapiens
tgtcacccgggctgc

SEQ ID NO: 1220110 - DNA, 15 bp, Homo sapiens
tctgtcacccgggct

SEQ ID NO: 1220111 - DNA, 15 bp, Homo sapiens
ctctgtcacccgggc

SEQ ID NO: 1220112 - DNA, 15 bp, Homo sapiens
gctctgtcacccggg

SEQ ID NO: 1220113 - DNA, 15 bp, Homo sapiens
tgctctgtcacccgg

SEQ ID NO: 1220114 - DNA, 15 bp, Homo sapiens
ttgctctgtcacccg

SEQ ID NO: 1220115 - DNA, 15 bp, Homo sapiens
tcccttttttttttt

SEQ ID NO: 1220116 - DNA, 15 bp, Homo sapiens
ctccctttttttttt

SEQ ID NO: 1220117 - DNA, 15 bp, Homo sapiens
cctcccttttttttt

SEQ ID NO: 1220118 - DNA, 15 bp, Homo sapiens
gcctccctttttttt

SEQ ID NO: 1220119 - DNA, 15 bp, Homo sapiens
ggcctcccttttttt

SEQ ID NO: 1220120 - DNA, 15 bp, Homo sapiens
tggcctccctttttt

SEQ ID NO: 1220121 - DNA, 15 bp, Homo sapiens
gtggcctcccttttt

SEQ ID NO: 1220122 - DNA, 15 bp, Homo sapiens
agtggcctccctttt

SEQ ID NO: 1220123 - DNA, 15 bp, Homo sapiens
cagtggcctcccttt

SEQ ID NO: 1220124 - DNA, 15 bp, Homo sapiens
ccagtggcctccctt

SEQ ID NO: 1220125 - DNA, 15 bp, Homo sapiens
tccagtggcctccct

SEQ ID NO: 1220126 - DNA, 15 bp, Homo sapiens
ctccagtggcctccc

SEQ ID NO: 1220127 - DNA, 15 bp, Homo sapiens
cctccagtggcctcc

SEQ ID NO: 1220128 - DNA, 15 bp, Homo sapiens
acctccagtggcctc

SEQ ID NO: 1220129 - DNA, 15 bp, Homo sapiens
aacctccagtggcct

SEQ ID NO: 1220130 - DNA, 15 bp, Homo sapiens
caacctccagtggcc

SEQ ID NO: 1220131 - DNA, 15 bp, Homo sapiens
acaacctccagtggc

SEQ ID NO: 1220132 - DNA, 15 bp, Homo sapiens
cacaacctccagtgg

SEQ ID NO: 1220133 - DNA, 15 bp, Homo sapiens
ccacaacctccagtg

SEQ ID NO: 1220134 - DNA, 15 bp, Homo sapiens
cccacaacctccagt

SEQ ID NO: 1220135 - DNA, 15 bp, Homo sapiens
ccccacaacctccag

SEQ ID NO: 1220136 - DNA, 15 bp, Homo sapiens
gccccacaacctcca

SEQ ID NO: 1220137 - DNA, 15 bp, Homo sapiens
ggccccacaacctcc

SEQ ID NO: 1220138 - DNA, 15 bp, Homo sapiens
tggccccacaacctc

SEQ ID NO: 1220139 - DNA, 15 bp, Homo sapiens
gtggccccacaacct

SEQ ID NO: 1220140 - DNA, 15 bp, Homo sapiens
ggtggccccacaacc

SEQ ID NO: 1220141 - DNA, 15 bp, Homo sapiens
tggtggccccacaac

SEQ ID NO: 1220142 - DNA, 15 bp, Homo sapiens
atggtggccccacaa

SEQ ID NO: 1220143 - DNA, 15 bp, Homo sapiens
catggtggccccaca

SEQ ID NO: 1220144 - DNA, 15 bp, Homo sapiens
tcatggtggccccac

SEQ ID NO: 1220145 - DNA, 15 bp, Homo sapiens
ctcatggtggcccca

SEQ ID NO: 1220146 - DNA, 15 bp, Homo sapiens
tctcatggtggcccc

SEQ ID NO: 1220147 - DNA, 15 bp, Homo sapiens
ctctcatggtggccc

SEQ ID NO: 1220148 - DNA, 15 bp, Homo sapiens
actctcatggtggcc

SEQ ID NO: 1220149 - DNA, 15 bp, Homo sapiens
gactctcatggtggc

SEQ ID NO: 1220150 - DNA, 15 bp, Homo sapiens
cgactctcatggtgg

SEQ ID NO: 1220151 - DNA, 15 bp, Homo sapiens
tcgactctcatggtg

SEQ ID NO: 1220152 - DNA, 15 bp, Homo sapiens
gtcgactctcatggt

SEQ ID NO: 1220153 - DNA, 15 bp, Homo sapiens
tgtcgactctcatgg

SEQ ID NO: 1220154 - DNA, 15 bp, Homo sapiens
ttgtcgactctcatg

SEQ ID NO: 1220155 - DNA, 15 bp, Homo sapiens
cttgtcgactctcat

SEQ ID NO: 1220156 - DNA, 15 bp, Homo sapiens
ccttgtcgactctca

SEQ ID NO: 1220157 - DNA, 15 bp, Homo sapiens
cccttgtcgactctc

SEQ ID NO: 1220158 - DNA, 15 bp, Homo sapiens
acccttgtcgactct

SEQ ID NO: 1220159 - DNA, 15 bp, Homo sapiens
cacccttgtcgactc

SEQ ID NO: 1220160 - DNA, 15 bp, Homo sapiens
ccacccttgtcgact

SEQ ID NO: 1220161 - DNA, 15 bp, Homo sapiens
gccacccttgtcgac

SEQ ID NO: 1220162 - DNA, 15 bp, Homo sapiens
ggccacccttgtcga

SEQ ID NO: 1220163 - DNA, 15 bp, Homo sapiens
gggccacccttgtcg

SEQ ID NO: 1220164 - DNA, 15 bp, Homo sapiens
tgggccacccttgtc

SEQ ID NO: 1220165 - DNA, 15 bp, Homo sapiens
gtgggccacccttgt

SEQ ID NO: 1220166 - DNA, 15 bp, Homo sapiens
tgtgggccacccttg

SEQ ID NO: 1220167 - DNA, 15 bp, Homo sapiens
atgtgggccaccctt

SEQ ID NO: 1220168 - DNA, 15 bp, Homo sapiens
aatgtgggccaccct

SEQ ID NO: 1220169 - DNA, 15 bp, Homo sapiens
gaatgtgggccaccc

SEQ ID NO: 1220170 - DNA, 15 bp, Homo sapiens
ggaatgtgggccacc

SEQ ID NO: 1220171 - DNA, 15 bp, Homo sapiens
aggaatgtgggccac

SEQ ID NO: 1220172 - DNA, 15 bp, Homo sapiens
taggaatgtgggcca

SEQ ID NO: 1220173 - DNA, 15 bp, Homo sapiens
ctaggaatgtgggcc

SEQ ID NO: 1220174 - DNA, 15 bp, Homo sapiens
tctaggaatgtgggc

SEQ ID NO: 1220175 - DNA, 15 bp, Homo sapiens
atctaggaatgtggg

SEQ ID NO: 1220176 - DNA, 15 bp, Homo sapiens
catctaggaatgtgg

SEQ ID NO: 1220177 - DNA, 15 bp, Homo sapiens
tcatctaggaatgtg

SEQ ID NO: 1220178 - DNA, 15 bp, Homo sapiens
ctcatctaggaatgt

SEQ ID NO: 1220179 - DNA, 15 bp, Homo sapiens
actcatctaggaatg

SEQ ID NO: 1220180 - DNA, 15 bp, Homo sapiens
aactcatctaggaat

SEQ ID NO: 1220181 - DNA, 15 bp, Homo sapiens
caactcatctaggaa

SEQ ID NO: 1220182 - DNA, 15 bp, Homo sapiens
gcaactcatctagga

SEQ ID NO: 1220183 - DNA, 15 bp, Homo sapiens
ggcaactcatctagg

SEQ ID NO: 1220184 - DNA, 15 bp, Homo sapiens
aggcaactcatctag

SEQ ID NO: 1220185 - DNA, 15 bp, Homo sapiens
caggcaactcatcta

SEQ ID NO: 1220186 - DNA, 15 bp, Homo sapiens
ccaggcaactcatct

SEQ ID NO: 1220187 - DNA, 15 bp, Homo sapiens
tccaggcaactcatc

SEQ ID NO: 1220188 - DNA, 15 bp, Homo sapiens
ctccaggcaactcat

SEQ ID NO: 1220189 - DNA, 15 bp, Homo sapiens
cctccaggcaactca

SEQ ID NO: 1220190 - DNA, 15 bp, Homo sapiens
gcctccaggcaactc

SEQ ID NO: 1220191 - DNA, 15 bp, Homo sapiens
agcctccaggcaact

SEQ ID NO: 1220192 - DNA, 15 bp, Homo sapiens
cagcctccaggcaac

SEQ ID NO: 1220193 - DNA, 15 bp, Homo sapiens
acagcctccaggcaa

SEQ ID NO: 1220194 - DNA, 15 bp, Homo sapiens
tacagcctccaggca

SEQ ID NO: 1220195 - DNA, 15 bp, Homo sapiens
ctacagcctccaggc

SEQ ID NO: 1220196 - DNA, 15 bp, Homo sapiens
actacagcctccagg

SEQ ID NO: 1220197 - DNA, 15 bp, Homo sapiens
gactacagcctccag

SEQ ID NO: 1220198 - DNA, 15 bp, Homo sapiens
ggactacagcctcca

SEQ ID NO: 1220199 - DNA, 15 bp, Homo sapiens
gggactacagcctcc

SEQ ID NO: 1220200 - DNA, 15 bp, Homo sapiens
tgggactacagcctc

SEQ ID NO: 1220201 - DNA, 15 bp, Homo sapiens
ctgggactacagcct

SEQ ID NO: 1220202 - DNA, 15 bp, Homo sapiens
tctgggactacagcc

SEQ ID NO: 1220203 - DNA, 15 bp, Homo sapiens
gtctgggactacagc

SEQ ID NO: 1220204 - DNA, 15 bp, Homo sapiens
ggtctgggactacag

SEQ ID NO: 1220205 - DNA, 15 bp, Homo sapiens
aggtctgggactaca

SEQ ID NO: 1220206 - DNA, 15 bp, Homo sapiens
gaggtctgggactac

SEQ ID NO: 1220207 - DNA, 15 bp, Homo sapiens
tgaggtctgggacta

SEQ ID NO: 1220208 - DNA, 15 bp, Homo sapiens
ctgaggtctgggact

SEQ ID NO: 1220209 - DNA, 15 bp, Homo sapiens
cctgaggtctgggac

SEQ ID NO: 1220210 - DNA, 15 bp, Homo sapiens
ccctgaggtctggga

SEQ ID NO: 1220211 - DNA, 15 bp, Homo sapiens
cccctgaggtctggg

SEQ ID NO: 1220212 - DNA, 15 bp, Homo sapiens
ccccctgaggtctgg

SEQ ID NO: 1220213 - DNA, 15 bp, Homo sapiens
cccccctgaggtctg

SEQ ID NO: 1220214 - DNA, 15 bp, Homo sapiens
acccccctgaggtct

SEQ ID NO: 1220215 - DNA, 15 bp, Homo sapiens
gacccccctgaggtc

SEQ ID NO: 1220216 - DNA, 15 bp, Homo sapiens
ggacccccctgaggt

SEQ ID NO: 1220217 - DNA, 15 bp, Homo sapiens
gggacccccctgagg

SEQ ID NO: 1220218 - DNA, 15 bp, Homo sapiens
ggggacccccctgag

SEQ ID NO: 1220219 - DNA, 15 bp, Homo sapiens
aggggacccccctga

SEQ ID NO: 1220220 - DNA, 15 bp, Homo sapiens
gaggggacccccctg

SEQ ID NO: 1220221 - DNA, 15 bp, Homo sapiens
ggaggggacccccct

SEQ ID NO: 1220222 - DNA, 15 bp, Homo sapiens
cggaggggacccccc

SEQ ID NO: 1220223 - DNA, 15 bp, Homo sapiens
ccggaggggaccccc

SEQ ID NO: 1220224 - DNA, 15 bp, Homo sapiens
tccggaggggacccc

SEQ ID NO: 1220225 - DNA, 15 bp, Homo sapiens
ttccggaggggaccc

SEQ ID NO: 1220226 - DNA, 15 bp, Homo sapiens
gttccggaggggacc

SEQ ID NO: 1220227 - DNA, 15 bp, Homo sapiens
ggttccggaggggac

SEQ ID NO: 1220228 - DNA, 15 bp, Homo sapiens
gggttccggagggga

SEQ ID NO: 1220229 - DNA, 15 bp, Homo sapiens
tgggttccggagggg

SEQ ID NO: 1220230 - DNA, 15 bp, Homo sapiens
ttgggttccggaggg

SEQ ID NO: 1220231 - DNA, 15 bp, Homo sapiens
tttgggttccggagg

SEQ ID NO: 1220232 - DNA, 15 bp, Homo sapiens
gtttgggttccggag

SEQ ID NO: 1220233 - DNA, 15 bp, Homo sapiens
tgtttgggttccgga

SEQ ID NO: 1220234 - DNA, 15 bp, Homo sapiens
gtgtttgggttccgg

SEQ ID NO: 1220235 - DNA, 15 bp, Homo sapiens
agtgtttgggttccg

SEQ ID NO: 1220236 - DNA, 15 bp, Homo sapiens
cagtgtttgggttcc

SEQ ID NO: 1220237 - DNA, 15 bp, Homo sapiens
acagtgtttgggttc

SEQ ID NO: 1220238 - DNA, 15 bp, Homo sapiens
gacagtgtttgggtt

SEQ ID NO: 1220239 - DNA, 15 bp, Homo sapiens
tgacagtgtttgggt

SEQ ID NO: 1220240 - DNA, 15 bp, Homo sapiens
atgacagtgtttggg

SEQ ID NO: 1220241 - DNA, 15 bp, Homo sapiens
catgacagtgtttgg

SEQ ID NO: 1220242 - DNA, 15 bp, Homo sapiens
gcatgacagtgtttg

SEQ ID NO: 1220243 - DNA, 15 bp, Homo sapiens
ggcatgacagtgttt

SEQ ID NO: 1220244 - DNA, 15 bp, Homo sapiens
tggcatgacagtgtt

SEQ ID NO: 1220245 - DNA, 15 bp, Homo sapiens
ttggcatgacagtgt

SEQ ID NO: 1220246 - DNA, 15 bp, Homo sapiens
attggcatgacagtg

SEQ ID NO: 1220247 - DNA, 15 bp, Homo sapiens
cattggcatgacagt

SEQ ID NO: 1220248 - DNA, 15 bp, Homo sapiens
tcattggcatgacag

SEQ ID NO: 1220249 - DNA, 15 bp, Homo sapiens
gtcattggcatgaca

SEQ ID NO: 1220250 - DNA, 15 bp, Homo sapiens
tgtcattggcatgac

SEQ ID NO: 1220251 - DNA, 15 bp, Homo sapiens
gtgtcattggcatga

SEQ ID NO: 1220252 - DNA, 15 bp, Homo sapiens
tgtgtcattggcatg

SEQ ID NO: 1220253 - DNA, 15 bp, Homo sapiens
ttgtgtcattggcat

SEQ ID NO: 1220254 - DNA, 15 bp, Homo sapiens
tttgtgtcattggca

SEQ ID NO: 1220255 - DNA, 15 bp, Homo sapiens
ttttgtgtcattggc

SEQ ID NO: 1220256 - DNA, 15 bp, Homo sapiens
gttttgtgtcattgg

SEQ ID NO: 1220257 - DNA, 15 bp, Homo sapiens
agttttgtgtcattg

SEQ ID NO: 1220258 - DNA, 15 bp, Homo sapiens
cagttttgtgtcatt

SEQ ID NO: 1220259 - DNA, 15 bp, Homo sapiens
ccagttttgtgtcat

SEQ ID NO: 1220260 - DNA, 15 bp, Homo sapiens
accagttttgtgtca

SEQ ID NO: 1220261 - DNA, 15 bp, Homo sapiens
gaccagttttgtgtc

SEQ ID NO: 1220262 - DNA, 15 bp, Homo sapiens
agaccagttttgtgt

SEQ ID NO: 1220263 - DNA, 15 bp, Homo sapiens
aagaccagttttgtg

SEQ ID NO: 1220264 - DNA, 15 bp, Homo sapiens
gaagaccagttttgt

SEQ ID NO: 1220265 - DNA, 15 bp, Homo sapiens
ggaagaccagttttg

SEQ ID NO: 1220266 - DNA, 15 bp, Homo sapiens
aggaagaccagtttt

SEQ ID NO: 1220267 - DNA, 15 bp, Homo sapiens
caggaagaccagttt

SEQ ID NO: 1220268 - DNA, 15 bp, Homo sapiens
ccaggaagaccagtt

SEQ ID NO: 1220269 - DNA, 15 bp, Homo sapiens
gccaggaagaccagt

SEQ ID NO: 1220270 - DNA, 15 bp, Homo sapiens
ggccaggaagaccag

SEQ ID NO: 1220271 - DNA, 15 bp, Homo sapiens
aggccaggaagacca

SEQ ID NO: 1220272 - DNA, 15 bp, Homo sapiens
gaggccaggaagacc

SEQ ID NO: 1220273 - DNA, 15 bp, Homo sapiens
agaggccaggaagac

SEQ ID NO: 1220274 - DNA, 15 bp, Homo sapiens
gagaggccaggaaga

SEQ ID NO: 1220275 - DNA, 15 bp, Homo sapiens
ggagaggccaggaag

SEQ ID NO: 1220276 - DNA, 15 bp, Homo sapiens
gggagaggccaggaa

SEQ ID NO: 1220277 - DNA, 15 bp, Homo sapiens
tgggagaggccagga

SEQ ID NO: 1220278 - DNA, 15 bp, Homo sapiens
atgggagaggccagg

SEQ ID NO: 1220279 - DNA, 15 bp, Homo sapiens
gatgggagaggccag

SEQ ID NO: 1220280 - DNA, 15 bp, Homo sapiens
ggatgggagaggcca

SEQ ID NO: 1220281 - DNA, 15 bp, Homo sapiens
aggatgggagaggcc

SEQ ID NO: 1220282 - DNA, 15 bp, Homo sapiens
caggatgggagaggc

SEQ ID NO: 1220283 - DNA, 15 bp, Homo sapiens
acaggatgggagagg

SEQ ID NO: 1220284 - DNA, 15 bp, Homo sapiens
gacaggatgggagag

SEQ ID NO: 1220285 - DNA, 15 bp, Homo sapiens
ggacaggatgggaga

SEQ ID NO: 1220286 - DNA, 15 bp, Homo sapiens
tggacaggatgggag

SEQ ID NO: 1220287 - DNA, 15 bp, Homo sapiens
ctggacaggatggga

SEQ ID NO: 1220288 - DNA, 15 bp, Homo sapiens
gctggacaggatggg

SEQ ID NO: 1220289 - DNA, 15 bp, Homo sapiens
ggctggacaggatgg

SEQ ID NO: 1220290 - DNA, 15 bp, Homo sapiens
aggctggacaggatg

SEQ ID NO: 1220291 - DNA, 15 bp, Homo sapiens
taggctggacaggat

SEQ ID NO: 1220292 - DNA, 15 bp, Homo sapiens
ctaggctggacagga

SEQ ID NO: 1220293 - DNA, 15 bp, Homo sapiens
tctaggctggacagg

SEQ ID NO: 1220294 - DNA, 15 bp, Homo sapiens
ttctaggctggacag

SEQ ID NO: 1220295 - DNA, 15 bp, Homo sapiens
cttctaggctggaca

SEQ ID NO: 1220296 - DNA, 15 bp, Homo sapiens
ccttctaggctggac

SEQ ID NO: 1220297 - DNA, 15 bp, Homo sapiens
cccttctaggctgga

SEQ ID NO: 1220298 - DNA, 15 bp, Homo sapiens
tcccttctaggctgg

SEQ ID NO: 1220299 - DNA, 15 bp, Homo sapiens
ctcccttctaggctg

SEQ ID NO: 1220300 - DNA, 15 bp, Homo sapiens
tctcccttctaggct

SEQ ID NO: 1220301 - DNA, 15 bp, Homo sapiens
gtctcccttctaggc

SEQ ID NO: 1220302 - DNA, 15 bp, Homo sapiens
agtctcccttctagg

SEQ ID NO: 1220303 - DNA, 15 bp, Homo sapiens
cagtctcccttctag

SEQ ID NO: 1220304 - DNA, 15 bp, Homo sapiens
tcagtctcccttcta

SEQ ID NO: 1220305 - DNA, 15 bp, Homo sapiens
ctcagtctcccttct

SEQ ID NO: 1220306 - DNA, 15 bp, Homo sapiens
tctcagtctcccttc

SEQ ID NO: 1220307 - DNA, 15 bp, Homo sapiens
gtctcagtctccctt

SEQ ID NO: 1220308 - DNA, 15 bp, Homo sapiens
agtctcagtctccct

SEQ ID NO: 1220309 - DNA, 15 bp, Homo sapiens
aagtctcagtctccc

SEQ ID NO: 1220310 - DNA, 15 bp, Homo sapiens
gaagtctcagtctcc

SEQ ID NO: 1220311 - DNA, 15 bp, Homo sapiens
tgaagtctcagtctc

SEQ ID NO: 1220312 - DNA, 15 bp, Homo sapiens
ctgaagtctcagtct

SEQ ID NO: 1220313 - DNA, 15 bp, Homo sapiens
tctgaagtctcagtc

SEQ ID NO: 1220314 - DNA, 15 bp, Homo sapiens
atctgaagtctcagt

SEQ ID NO: 1220315 - DNA, 15 bp, Homo sapiens
gatctgaagtctcag

SEQ ID NO: 1220316 - DNA, 15 bp, Homo sapiens
ggatctgaagtctca

SEQ ID NO: 1220317 - DNA, 15 bp, Homo sapiens
cggatctgaagtctc

SEQ ID NO: 1220318 - DNA, 15 bp, Homo sapiens
tcggatctgaagtct

SEQ ID NO: 1220319 - DNA, 15 bp, Homo sapiens
gtcggatctgaagtc

SEQ ID NO: 1220320 - DNA, 15 bp, Homo sapiens
tgtcggatctgaagt

SEQ ID NO: 1220321 - DNA, 15 bp, Homo sapiens
ttgtcggatctgaag

SEQ ID NO: 1220322 - DNA, 15 bp, Homo sapiens
gttgtcggatctgaa

SEQ ID NO: 1220323 - DNA, 15 bp, Homo sapiens
ggttgtcggatctga

SEQ ID NO: 1220324 - DNA, 15 bp, Homo sapiens
tggttgtcggatctg

SEQ ID NO: 1220325 - DNA, 15 bp, Homo sapiens
atggttgtcggatct

SEQ ID NO: 1220326 - DNA, 15 bp, Homo sapiens
catggttgtcggatc

SEQ ID NO: 1220327 - DNA, 15 bp, Homo sapiens
ccatggttgtcggat

SEQ ID NO: 1220328 - DNA, 15 bp, Homo sapiens
cccatggttgtcgga

SEQ ID NO: 1220329 - DNA, 15 bp, Homo sapiens
acccatggttgtcgg

SEQ ID NO: 1220330 - DNA, 15 bp, Homo sapiens
aacccatggttgtcg

SEQ ID NO: 1220331 - DNA, 15 bp, Homo sapiens
gaacccatggttgtc

SEQ ID NO: 1220332 - DNA, 15 bp, Homo sapiens
tgaacccatggttgt

SEQ ID NO: 1220333 - DNA, 15 bp, Homo sapiens
ttgaacccatggttg

SEQ ID NO: 1220334 - DNA, 15 bp, Homo sapiens
tttgaacccatggtt

SEQ ID NO: 1220335 - DNA, 15 bp, Homo sapiens
atttgaacccatggt

SEQ ID NO: 1220336 - DNA, 15 bp, Homo sapiens
gatttgaacccatgg

SEQ ID NO: 1220337 - DNA, 15 bp, Homo sapiens
ggatttgaacccatg

SEQ ID NO: 1220338 - DNA, 15 bp, Homo sapiens
tggatttgaacccat

SEQ ID NO: 1220339 - DNA, 15 bp, Homo sapiens
ctggatttgaaccca

SEQ ID NO: 1220340 - DNA, 15 bp, Homo sapiens
gctggatttgaaccc

SEQ ID NO: 1220341 - DNA, 15 bp, Homo sapiens
ggctggatttgaacc

SEQ ID NO: 1220342 - DNA, 15 bp, Homo sapiens
aggctggatttgaac

SEQ ID NO: 1220343 - DNA, 15 bp, Homo sapiens
aaggctggatttgaa

SEQ ID NO: 1220344 - DNA, 15 bp, Homo sapiens
caaggctggatttga

SEQ ID NO: 1220345 - DNA, 15 bp, Homo sapiens
tcaaggctggatttg

SEQ ID NO: 1220346 - DNA, 15 bp, Homo sapiens
ttcaaggctggattt

SEQ ID NO: 1220347 - DNA, 15 bp, Homo sapiens
tttcaaggctggatt

SEQ ID NO: 1220348 - DNA, 15 bp, Homo sapiens
ttttcaaggctggat

SEQ ID NO: 1220349 - DNA, 15 bp, Homo sapiens
gttttcaaggctgga

SEQ ID NO: 1220350 - DNA, 15 bp, Homo sapiens
agttttcaaggctgg

SEQ ID NO: 1220351 - DNA, 15 bp, Homo sapiens
aagttttcaaggctg

SEQ ID NO: 1220352 - DNA, 15 bp, Homo sapiens
gaagttttcaaggct

SEQ ID NO: 1220353 - DNA, 15 bp, Homo sapiens
ggaagttttcaaggc

SEQ ID NO: 1220354 - DNA, 15 bp, Homo sapiens
gggaagttttcaagg

SEQ ID NO: 1220355 - DNA, 15 bp, Homo sapiens
tgggaagttttcaag

SEQ ID NO: 1220356 - DNA, 15 bp, Homo sapiens
atgggaagttttcaa

SEQ ID NO: 1220357 - DNA, 15 bp, Homo sapiens
catgggaagttttca

SEQ ID NO: 1220358 - DNA, 15 bp, Homo sapiens
gcatgggaagttttc

SEQ ID NO: 1220359 - DNA, 15 bp, Homo sapiens
tgcatgggaagtttt

SEQ ID NO: 1220360 - DNA, 15 bp, Homo sapiens
gtgcatgggaagttt

SEQ ID NO: 1220361 - DNA, 15 bp, Homo sapiens
tgtgcatgggaagtt

SEQ ID NO: 1220362 - DNA, 15 bp, Homo sapiens
ctgtgcatgggaagt

SEQ ID NO: 1220363 - DNA, 15 bp, Homo sapiens
cctgtgcatgggaag

SEQ ID NO: 1220364 - DNA, 15 bp, Homo sapiens
gcctgtgcatgggaa

SEQ ID NO: 1220365 - DNA, 15 bp, Homo sapiens
tgcctgtgcatggga

SEQ ID NO: 1220366 - DNA, 15 bp, Homo sapiens
ttgcctgtgcatggg

SEQ ID NO: 1220367 - DNA, 15 bp, Homo sapiens
cttgcctgtgcatgg

SEQ ID NO: 1220368 - DNA, 15 bp, Homo sapiens
gcttgcctgtgcatg

SEQ ID NO: 1220369 - DNA, 15 bp, Homo sapiens
ggcttgcctgtgcat

SEQ ID NO: 1220370 - DNA, 15 bp, Homo sapiens
gggcttgcctgtgca

SEQ ID NO: 1220371 - DNA, 15 bp, Homo sapiens
ggggcttgcctgtgc

SEQ ID NO: 1220372 - DNA, 15 bp, Homo sapiens
tggggcttgcctgtg

SEQ ID NO: 1220373 - DNA, 15 bp, Homo sapiens
atggggcttgcctgt

SEQ ID NO: 1220374 - DNA, 15 bp, Homo sapiens
aatggggcttgcctg

SEQ ID NO: 1220375 - DNA, 15 bp, Homo sapiens
caatggggcttgcct

SEQ ID NO: 1220376 - DNA, 15 bp, Homo sapiens
gcaatggggcttgcc

SEQ ID NO: 1220377 - DNA, 15 bp, Homo sapiens
cgcaatggggcttgc

SEQ ID NO: 1220378 - DNA, 15 bp, Homo sapiens
tcgcaatggggcttg

SEQ ID NO: 1220379 - DNA, 15 bp, Homo sapiens
atcgcaatggggctt

SEQ ID NO: 1220380 - DNA, 15 bp, Homo sapiens
gatcgcaatggggct

SEQ ID NO: 1220381 - DNA, 15 bp, Homo sapiens
agatcgcaatggggc

SEQ ID NO: 1220382 - DNA, 15 bp, Homo sapiens
cagatcgcaatgggg

SEQ ID NO: 1220383 - DNA, 15 bp, Homo sapiens
acagatcgcaatggg

SEQ ID NO: 1220384 - DNA, 15 bp, Homo sapiens
aacagatcgcaatgg

SEQ ID NO: 1220385 - DNA, 15 bp, Homo sapiens
aaacagatcgcaatg

SEQ ID NO: 1220386 - DNA, 15 bp, Homo sapiens
gaaacagatcgcaat

SEQ ID NO: 1220387 - DNA, 15 bp, Homo sapiens
agaaacagatcgcaa

SEQ ID NO: 1220388 - DNA, 15 bp, Homo sapiens
aagaaacagatcgca

SEQ ID NO: 1220389 - DNA, 15 bp, Homo sapiens
aaagaaacagatcgc

SEQ ID NO: 1220390 - DNA, 15 bp, Homo sapiens
aaaagaaacagatcg

SEQ ID NO: 1220391 - DNA, 15 bp, Homo sapiens
gaaaagaaacagatc

SEQ ID NO: 1220392 - DNA, 15 bp, Homo sapiens
agaaaagaaacagat

SEQ ID NO: 1220393 - DNA, 15 bp, Homo sapiens
aagaaaagaaacaga

SEQ ID NO: 1220394 - DNA, 15 bp, Homo sapiens
ggaaaagaaaagaaa

SEQ ID NO: 1220395 - DNA, 15 bp, Homo sapiens
aggaaaagaaaagaa

SEQ ID NO: 1220396 - DNA, 15 bp, Homo sapiens
aaggaaaagaaaaga

SEQ ID NO: 1220397 - DNA, 15 bp, Homo sapiens
aaaggaaaagaaaag

SEQ ID NO: 1220398 - DNA, 15 bp, Homo sapiens
aaagaaagaaaggaa

SEQ ID NO: 1220399 - DNA, 15 bp, Homo sapiens
aaaagaaagaaagga

SEQ ID NO: 1220400 - DNA, 15 bp, Homo sapiens
aaaaagaaagaaagg

SEQ ID NO: 1220401 - DNA, 15 bp, Homo sapiens
aagactgtctcaaaa

SEQ ID NO: 1220402 - DNA, 15 bp, Homo sapiens
gacagagcaagactg

SEQ ID NO: 1220403 - DNA, 15 bp, Homo sapiens
acgccactgcactct

SEQ ID NO: 1220404 - DNA, 15 bp, Homo sapiens
tgaggcggaggttgc

SEQ ID NO: 1220405 - DNA, 15 bp, Homo sapiens
gtgaggcggaggttg

SEQ ID NO: 1220406 - DNA, 15 bp, Homo sapiens
tgtgaggcggaggtt

SEQ ID NO: 1220407 - DNA, 15 bp, Homo sapiens
ctgtgaggcggaggt

SEQ ID NO: 1220408 - DNA, 15 bp, Homo sapiens
cctgtgaggcggagg

SEQ ID NO: 1220409 - DNA, 15 bp, Homo sapiens
ttgaacctgtgaggc

SEQ ID NO: 1220410 - DNA, 15 bp, Homo sapiens
cttgaacctgtgagg

SEQ ID NO: 1220411 - DNA, 15 bp, Homo sapiens
gcttgaacctgtgag

SEQ ID NO: 1220412 - DNA, 15 bp, Homo sapiens
cgcttgaacctgtga

SEQ ID NO: 1220413 - DNA, 15 bp, Homo sapiens
tcgcttgaacctgtg

SEQ ID NO: 1220414 - DNA, 15 bp, Homo sapiens
atcgcttgaacctgt

SEQ ID NO: 1220415 - DNA, 15 bp, Homo sapiens
atgggcacctgtaat

SEQ ID NO: 1220416 - DNA, 15 bp, Homo sapiens
gatgggcacctgtaa

SEQ ID NO: 1220417 - DNA, 15 bp, Homo sapiens
tgatgggcacctgta

SEQ ID NO: 1220418 - DNA, 15 bp, Homo sapiens
gtgatgggcacctgt

SEQ ID NO: 1220419 - DNA, 15 bp, Homo sapiens
ggtgatgggcacctg

SEQ ID NO: 1220420 - DNA, 15 bp, Homo sapiens
cggtgatgggcacct

SEQ ID NO: 1220421 - DNA, 15 bp, Homo sapiens
acggtgatgggcacc

SEQ ID NO: 1220422 - DNA, 15 bp, Homo sapiens
cacggtgatgggcac

SEQ ID NO: 1220423 - DNA, 15 bp, Homo sapiens
gcacggtgatgggca

SEQ ID NO: 1220424 - DNA, 15 bp, Homo sapiens
ggcacggtgatgggc

SEQ ID NO: 1220425 - DNA, 15 bp, Homo sapiens
gggcacggtgatggg

SEQ ID NO: 1220426 - DNA, 15 bp, Homo sapiens
tgggcacggtgatgg

SEQ ID NO: 1220427 - DNA, 15 bp, Homo sapiens
ctgggcacggtgatg

SEQ ID NO: 1220428 - DNA, 15 bp, Homo sapiens
gctgggcacggtgat

SEQ ID NO: 1220429 - DNA, 15 bp, Homo sapiens
agctgggcacggtga

SEQ ID NO: 1220430 - DNA, 15 bp, Homo sapiens
tagctgggcacggtg

SEQ ID NO: 1220431 - DNA, 15 bp, Homo sapiens
ttagctgggcacggt

SEQ ID NO: 1220432 - DNA, 15 bp, Homo sapiens
attagctgggcacgg

SEQ ID NO: 1220433 - DNA, 15 bp, Homo sapiens
aattagctgggcacg

SEQ ID NO: 1220434 - DNA, 15 bp, Homo sapiens
ctcccgtctctacta

SEQ ID NO: 1220435 - DNA, 15 bp, Homo sapiens
actcccgtctctact

SEQ ID NO: 1220436 - DNA, 15 bp, Homo sapiens
aactcccgtctctac

SEQ ID NO: 1220437 - DNA, 15 bp, Homo sapiens
aaactcccgtctcta

SEQ ID NO: 1220438 - DNA, 15 bp, Homo sapiens
gaaactcccgtctct

SEQ ID NO: 1220439 - DNA, 15 bp, Homo sapiens
tgaaactcccgtctc

SEQ ID NO: 1220440 - DNA, 15 bp, Homo sapiens
gtgaaactcccgtct

SEQ ID NO: 1220441 - DNA, 15 bp, Homo sapiens
ggtgaaactcccgtc

SEQ ID NO: 1220442 - DNA, 15 bp, Homo sapiens
tggtgaaactcccgt

SEQ ID NO: 1220443 - DNA, 15 bp, Homo sapiens
atggtgaaactcccg

SEQ ID NO: 1220444 - DNA, 15 bp, Homo sapiens
gatggtgaaactccc

SEQ ID NO: 1220445 - DNA, 15 bp, Homo sapiens
agatggtgaaactcc

SEQ ID NO: 1220446 - DNA, 15 bp, Homo sapiens
aagatggtgaaactc

SEQ ID NO: 1220447 - DNA, 15 bp, Homo sapiens
caagatggtgaaact

SEQ ID NO: 1220448 - DNA, 15 bp, Homo sapiens
agcagatcacgaggt

SEQ ID NO: 1220449 - DNA, 15 bp, Homo sapiens
aagcagatcacgagg

SEQ ID NO: 1220450 - DNA, 15 bp, Homo sapiens
caagcagatcacgag

SEQ ID NO: 1220451 - DNA, 15 bp, Homo sapiens
gcaagcagatcacga

SEQ ID NO: 1220452 - DNA, 15 bp, Homo sapiens
ggcaagcagatcacg

SEQ ID NO: 1220453 - DNA, 15 bp, Homo sapiens
aggcaagcagatcac

SEQ ID NO: 1220454 - DNA, 15 bp, Homo sapiens
gaggcaagcagatca

SEQ ID NO: 1220455 - DNA, 15 bp, Homo sapiens
tgaggcaagcagatc

SEQ ID NO: 1220456 - DNA, 15 bp, Homo sapiens
ctgaggcaagcagat

SEQ ID NO: 1220457 - DNA, 15 bp, Homo sapiens
gctgaggcaagcaga

SEQ ID NO: 1220458 - DNA, 15 bp, Homo sapiens
ggctgaggcaagcag

SEQ ID NO: 1220459 - DNA, 15 bp, Homo sapiens
aggctgaggcaagca

SEQ ID NO: 1220460 - DNA, 15 bp, Homo sapiens
caggctgaggcaagc

SEQ ID NO: 1220461 - DNA, 15 bp, Homo sapiens
gcaggctgaggcaag

SEQ ID NO: 1220462 - DNA, 15 bp, Homo sapiens
ggcaggctgaggcaa

SEQ ID NO: 1220463 - DNA, 15 bp, Homo sapiens
tttggcaggctgagg

SEQ ID NO: 1220464 - DNA, 15 bp, Homo sapiens
ctttggcaggctgag

SEQ ID NO: 1220465 - DNA, 15 bp, Homo sapiens
actttggcaggctga

SEQ ID NO: 1220466 - DNA, 15 bp, Homo sapiens
cactttggcaggctg

SEQ ID NO: 1220467 - DNA, 15 bp, Homo sapiens
gcactttggcaggct

SEQ ID NO: 1220468 - DNA, 15 bp, Homo sapiens
agcactttggcaggc

SEQ ID NO: 1220469 - DNA, 15 bp, Homo sapiens
agtggctcacccctg

SEQ ID NO: 1220470 - DNA, 15 bp, Homo sapiens
cagtggctcacccct

SEQ ID NO: 1220471 - DNA, 15 bp, Homo sapiens
acagtggctcacccc

SEQ ID NO: 1220472 - DNA, 15 bp, Homo sapiens
cacagtggctcaccc

SEQ ID NO: 1220473 - DNA, 15 bp, Homo sapiens
gcacagtggctcacc

SEQ ID NO: 1220474 - DNA, 15 bp, Homo sapiens
agccgggcacagtgg

SEQ ID NO: 1220475 - DNA, 15 bp, Homo sapiens
cagccgggcacagtg

SEQ ID NO: 1220476 - DNA, 15 bp, Homo sapiens
gcagccgggcacagt

SEQ ID NO: 1220477 - DNA, 15 bp, Homo sapiens
cgcagccgggcacag

SEQ ID NO: 1220478 - DNA, 15 bp, Homo sapiens
tcgcagccgggcaca

SEQ ID NO: 1220479 - DNA, 15 bp, Homo sapiens
atcgcagccgggcac

SEQ ID NO: 1220480 - DNA, 15 bp, Homo sapiens
gatcgcagccgggca

SEQ ID NO: 1220481 - DNA, 15 bp, Homo sapiens
agatcgcagccgggc

SEQ ID NO: 1220482 - DNA, 15 bp, Homo sapiens
cagatcgcagccggg

SEQ ID NO: 1220483 - DNA, 15 bp, Homo sapiens
acagatcgcagccgg

SEQ ID NO: 1220484 - DNA, 15 bp, Homo sapiens
aacagatcgcagccg

SEQ ID NO: 1220485 - DNA, 15 bp, Homo sapiens
aaacagatcgcagcc

SEQ ID NO: 1220486 - DNA, 15 bp, Homo sapiens
gaaacagatcgcagc

SEQ ID NO: 1220487 - DNA, 15 bp, Homo sapiens
agaaacagatcgcag

SEQ ID NO: 1220488 - DNA, 15 bp, Homo sapiens
taaaagaaacagatc

SEQ ID NO: 1220489 - DNA, 15 bp, Homo sapiens
ttaaaagaaacagat

SEQ ID NO: 1220490 - DNA, 15 bp, Homo sapiens
gttaaaagaaacaga

SEQ ID NO: 1220491 - DNA, 15 bp, Homo sapiens
ggttaaaagaaacag

SEQ ID NO: 1220492 - DNA, 15 bp, Homo sapiens
cggttaaaagaaaca

SEQ ID NO: 1220493 - DNA, 15 bp, Homo sapiens
acggttaaaagaaac

SEQ ID NO: 1220494 - DNA, 15 bp, Homo sapiens
tacggttaaaagaaa

SEQ ID NO: 1220495 - DNA, 15 bp, Homo sapiens
ttacggttaaaagaa

SEQ ID NO: 1220496 - DNA, 15 bp, Homo sapiens
tttacggttaaaaga

SEQ ID NO: 1220497 - DNA, 15 bp, Homo sapiens
gtttacggttaaaag

SEQ ID NO: 1220498 - DNA, 15 bp, Homo sapiens
agtttacggttaaaa

SEQ ID NO: 1220499 - DNA, 15 bp, Homo sapiens
cagtttacggttaaa

SEQ ID NO: 1220500 - DNA, 15 bp, Homo sapiens
ccagtttacggttaa

SEQ ID NO: 1220501 - DNA, 15 bp, Homo sapiens
cccagtttacggtta

SEQ ID NO: 1220502 - DNA, 15 bp, Homo sapiens
tcccagtttacggtt

SEQ ID NO: 1220503 - DNA, 15 bp, Homo sapiens
ttcccagtttacggt

SEQ ID NO: 1220504 - DNA, 15 bp, Homo sapiens
cttcccagtttacgg

SEQ ID NO: 1220505 - DNA, 15 bp, Homo sapiens
tcttcccagtttacg

SEQ ID NO: 1220506 - DNA, 15 bp, Homo sapiens
ttcttcccagtttac

SEQ ID NO: 1220507 - DNA, 15 bp, Homo sapiens
gttcttcccagttta

SEQ ID NO: 1220508 - DNA, 15 bp, Homo sapiens
agttcttcccagttt

SEQ ID NO: 1220509 - DNA, 15 bp, Homo sapiens
aagttcttcccagtt

SEQ ID NO: 1220510 - DNA, 15 bp, Homo sapiens
aaagttcttcccagt

SEQ ID NO: 1220511 - DNA, 15 bp, Homo sapiens
caaagttcttcccag

SEQ ID NO: 1220512 - DNA, 15 bp, Homo sapiens
tcaaagttcttccca

SEQ ID NO: 1220513 - DNA, 15 bp, Homo sapiens
gtcaaagttcttccc

SEQ ID NO: 1220514 - DNA, 15 bp, Homo sapiens
ggtcaaagttcttcc

SEQ ID NO: 1220515 - DNA, 15 bp, Homo sapiens
tggtcaaagttcttc

SEQ ID NO: 1220516 - DNA, 15 bp, Homo sapiens
gtggtcaaagttctt

SEQ ID NO: 1220517 - DNA, 15 bp, Homo sapiens
ggtggtcaaagttct

SEQ ID NO: 1220518 - DNA, 15 bp, Homo sapiens
aggtggtcaaagttc

SEQ ID NO: 1220519 - DNA, 15 bp, Homo sapiens
gaggtggtcaaagtt

SEQ ID NO: 1220520 - DNA, 15 bp, Homo sapiens
agaggtggtcaaagt

SEQ ID NO: 1220521 - DNA, 15 bp, Homo sapiens
aagaggtggtcaaag

SEQ ID NO: 1220522 - DNA, 15 bp, Homo sapiens
taagaggtggtcaaa

SEQ ID NO: 1220523 - DNA, 15 bp, Homo sapiens
ctaagaggtggtcaa

SEQ ID NO: 1220524 - DNA, 15 bp, Homo sapiens
actaagaggtggtca

SEQ ID NO: 1220525 - DNA, 15 bp, Homo sapiens
gactaagaggtggtc

SEQ ID NO: 1220526 - DNA, 15 bp, Homo sapiens
ggactaagaggtggt

SEQ ID NO: 1220527 - DNA, 15 bp, Homo sapiens
tggactaagaggtgg

SEQ ID NO: 1220528 - DNA, 15 bp, Homo sapiens
ctggactaagaggtg

SEQ ID NO: 1220529 - DNA, 15 bp, Homo sapiens
tctggactaagaggt

SEQ ID NO: 1220530 - DNA, 15 bp, Homo sapiens
ttctggactaagagg

SEQ ID NO: 1220531 - DNA, 15 bp, Homo sapiens
gttctggactaagag

SEQ ID NO: 1220532 - DNA, 15 bp, Homo sapiens
agttctggactaaga

SEQ ID NO: 1220533 - DNA, 15 bp, Homo sapiens
tagttctggactaag

SEQ ID NO: 1220534 - DNA, 15 bp, Homo sapiens
atagttctggactaa

SEQ ID NO: 1220535 - DNA, 15 bp, Homo sapiens
gatagttctggacta

SEQ ID NO: 1220536 - DNA, 15 bp, Homo sapiens
tgatagttctggact

SEQ ID NO: 1220537 - DNA, 15 bp, Homo sapiens
ctgatagttctggac

SEQ ID NO: 1220538 - DNA, 15 bp, Homo sapiens
cctgatagttctgga

SEQ ID NO: 1220539 - DNA, 15 bp, Homo sapiens
ccctgatagttctgg

SEQ ID NO: 1220540 - DNA, 15 bp, Homo sapiens
tccctgatagttctg

SEQ ID NO: 1220541 - DNA, 15 bp, Homo sapiens
ttccctgatagttct

SEQ ID NO: 1220542 - DNA, 15 bp, Homo sapiens
cttccctgatagttc

SEQ ID NO: 1220543 - DNA, 15 bp, Homo sapiens
ccttccctgatagtt

SEQ ID NO: 1220544 - DNA, 15 bp, Homo sapiens
cccttccctgatagt

SEQ ID NO: 1220545 - DNA, 15 bp, Homo sapiens
ccccttccctgatag

SEQ ID NO: 1220546 - DNA, 15 bp, Homo sapiens
gccccttccctgata

SEQ ID NO: 1220547 - DNA, 15 bp, Homo sapiens
tgccccttccctgat

SEQ ID NO: 1220548 - DNA, 15 bp, Homo sapiens
gtgccccttccctga

SEQ ID NO: 1220549 - DNA, 15 bp, Homo sapiens
agtgccccttccctg

SEQ ID NO: 1220550 - DNA, 15 bp, Homo sapiens
cagtgccccttccct

SEQ ID NO: 1220551 - DNA, 15 bp, Homo sapiens
tcagtgccccttccc

SEQ ID NO: 1220552 - DNA, 15 bp, Homo sapiens
ttcagtgccccttcc

SEQ ID NO: 1220553 - DNA, 15 bp, Homo sapiens
attcagtgccccttc

SEQ ID NO: 1220554 - DNA, 15 bp, Homo sapiens
cattcagtgcccctt

SEQ ID NO: 1220555 - DNA, 15 bp, Homo sapiens
gcattcagtgcccct

SEQ ID NO: 1220556 - DNA, 15 bp, Homo sapiens
ggcattcagtgcccc

SEQ ID NO: 1220557 - DNA, 15 bp, Homo sapiens
tggcattcagtgccc

SEQ ID NO: 1220558 - DNA, 15 bp, Homo sapiens
ctggcattcagtgcc

SEQ ID NO: 1220559 - DNA, 15 bp, Homo sapiens
cctggcattcagtgc

SEQ ID NO: 1220560 - DNA, 15 bp, Homo sapiens
gcctggcattcagtg

SEQ ID NO: 1220561 - DNA, 15 bp, Homo sapiens
agcctggcattcagt

SEQ ID NO: 1220562 - DNA, 15 bp, Homo sapiens
cagcctggcattcag

SEQ ID NO: 1220563 - DNA, 15 bp, Homo sapiens
ccagcctggcattca

SEQ ID NO: 1220564 - DNA, 15 bp, Homo sapiens
tccagcctggcattc

SEQ ID NO: 1220565 - DNA, 15 bp, Homo sapiens
ctccagcctggcatt

SEQ ID NO: 1220566 - DNA, 15 bp, Homo sapiens
cctccagcctggcat

SEQ ID NO: 1220567 - DNA, 15 bp, Homo sapiens
tcctccagcctggca

SEQ ID NO: 1220568 - DNA, 15 bp, Homo sapiens
ctcctccagcctggc

SEQ ID NO: 1220569 - DNA, 15 bp, Homo sapiens
cctcctccagcctgg

SEQ ID NO: 1220570 - DNA, 15 bp, Homo sapiens
ccctcctccagcctg

SEQ ID NO: 1220571 - DNA, 15 bp, Homo sapiens
accctcctccagcct

SEQ ID NO: 1220572 - DNA, 15 bp, Homo sapiens
aaccctcctccagcc

SEQ ID NO: 1220573 - DNA, 15 bp, Homo sapiens
caaccctcctccagc

SEQ ID NO: 1220574 - DNA, 15 bp, Homo sapiens
gcaaccctcctccag

SEQ ID NO: 1220575 - DNA, 15 bp, Homo sapiens
tgcaaccctcctcca

SEQ ID NO: 1220576 - DNA, 15 bp, Homo sapiens
atgcaaccctcctcc

SEQ ID NO: 1220577 - DNA, 15 bp, Homo sapiens
catgcaaccctcctc

SEQ ID NO: 1220578 - DNA, 15 bp, Homo sapiens
tcatgcaaccctcct

SEQ ID NO: 1220579 - DNA, 15 bp, Homo sapiens
ttcatgcaaccctcc

SEQ ID NO: 1220580 - DNA, 15 bp, Homo sapiens
tttcatgcaaccctc

SEQ ID NO: 1220581 - DNA, 15 bp, Homo sapiens
ctttcatgcaaccct

SEQ ID NO: 1220582 - DNA, 15 bp, Homo sapiens
cctttcatgcaaccc

SEQ ID NO: 1220583 - DNA, 15 bp, Homo sapiens
gcctttcatgcaacc

SEQ ID NO: 1220584 - DNA, 15 bp, Homo sapiens
agcctttcatgcaac

SEQ ID NO: 1220585 - DNA, 15 bp, Homo sapiens
aagcctttcatgcaa

SEQ ID NO: 1220586 - DNA, 15 bp, Homo sapiens
caagcctttcatgca

SEQ ID NO: 1220587 - DNA, 15 bp, Homo sapiens
tcaagcctttcatgc

SEQ ID NO: 1220588 - DNA, 15 bp, Homo sapiens
gtcaagcctttcatg

SEQ ID NO: 1220589 - DNA, 15 bp, Homo sapiens
ggtcaagcctttcat

SEQ ID NO: 1220590 - DNA, 15 bp, Homo sapiens
gggtcaagcctttca

SEQ ID NO: 1220591 - DNA, 15 bp, Homo sapiens
ggggtcaagcctttc

SEQ ID NO: 1220592 - DNA, 15 bp, Homo sapiens
tggggtcaagccttt

SEQ ID NO: 1220593 - DNA, 15 bp, Homo sapiens
ctggggtcaagcctt

SEQ ID NO: 1220594 - DNA, 15 bp, Homo sapiens
gctggggtcaagcct

SEQ ID NO: 1220595 - DNA, 15 bp, Homo sapiens
agctggggtcaagcc

SEQ ID NO: 1220596 - DNA, 15 bp, Homo sapiens
tagctggggtcaagc

SEQ ID NO: 1220597 - DNA, 15 bp, Homo sapiens
gtagctggggtcaag

SEQ ID NO: 1220598 - DNA, 15 bp, Homo sapiens
agtagctggggtcaa

SEQ ID NO: 1220599 - DNA, 15 bp, Homo sapiens
gagtagctggggtca

SEQ ID NO: 1220600 - DNA, 15 bp, Homo sapiens
tgagtagctggggtc

SEQ ID NO: 1220601 - DNA, 15 bp, Homo sapiens
ctgagtagctggggt

SEQ ID NO: 1220602 - DNA, 15 bp, Homo sapiens
cctgagtagctgggg

SEQ ID NO: 1220603 - DNA, 15 bp, Homo sapiens
ccttctgcctcagcc

SEQ ID NO: 1220604 - DNA, 15 bp, Homo sapiens
tccttctgcctcagc

SEQ ID NO: 1220605 - DNA, 15 bp, Homo sapiens
gtccttctgcctcag

SEQ ID NO: 1220606 - DNA, 15 bp, Homo sapiens
agtccttctgcctca

SEQ ID NO: 1220607 - DNA, 15 bp, Homo sapiens
cagtccttctgcctc

SEQ ID NO: 1220608 - DNA, 15 bp, Homo sapiens
acagtccttctgcct

SEQ ID NO: 1220609 - DNA, 15 bp, Homo sapiens
aacagtccttctgcc

SEQ ID NO: 1220610 - DNA, 15 bp, Homo sapiens
aaacagtccttctgc

SEQ ID NO: 1220611 - DNA, 15 bp, Homo sapiens
caaacagtccttctg

SEQ ID NO: 1220612 - DNA, 15 bp, Homo sapiens
tcaaacagtccttct

SEQ ID NO: 1220613 - DNA, 15 bp, Homo sapiens
gtcaaacagtccttc

SEQ ID NO: 1220614 - DNA, 15 bp, Homo sapiens
ggtcaaacagtcctt

SEQ ID NO: 1220615 - DNA, 15 bp, Homo sapiens
aggtcaaacagtcct

SEQ ID NO: 1220616 - DNA, 15 bp, Homo sapiens
caggtcaaacagtcc

SEQ ID NO: 1220617 - DNA, 15 bp, Homo sapiens
tcaggtcaaacagtc

SEQ ID NO: 1220618 - DNA, 15 bp, Homo sapiens
atcaggtcaaacagt

SEQ ID NO: 1220619 - DNA, 15 bp, Homo sapiens
catcaggtcaaacag

SEQ ID NO: 1220620 - DNA, 15 bp, Homo sapiens
tcatcaggtcaaaca

SEQ ID NO: 1220621 - DNA, 15 bp, Homo sapiens
ttcatcaggtcaaac

SEQ ID NO: 1220622 - DNA, 15 bp, Homo sapiens
attcatcaggtcaaa

SEQ ID NO: 1220623 - DNA, 15 bp, Homo sapiens
aattcatcaggtcaa

SEQ ID NO: 1220624 - DNA, 15 bp, Homo sapiens
gaattcatcaggtca

SEQ ID NO: 1220625 - DNA, 15 bp, Homo sapiens
cgaattcatcaggtc

SEQ ID NO: 1220626 - DNA, 15 bp, Homo sapiens
tcgaattcatcaggt

SEQ ID NO: 1220627 - DNA, 15 bp, Homo sapiens
ctcgaattcatcagg

SEQ ID NO: 1220628 - DNA, 15 bp, Homo sapiens
cctcgaattcatcag

SEQ ID NO: 1220629 - DNA, 15 bp, Homo sapiens
gcctcgaattcatca

SEQ ID NO: 1220630 - DNA, 15 bp, Homo sapiens
agcctcgaattcatc

SEQ ID NO: 1220631 - DNA, 15 bp, Homo sapiens
cagcctcgaattcat

SEQ ID NO: 1220632 - DNA, 15 bp, Homo sapiens
gcagcctcgaattca

SEQ ID NO: 1220633 - DNA, 15 bp, Homo sapiens
tgcagcctcgaattc

SEQ ID NO: 1220634 - DNA, 15 bp, Homo sapiens
ctgcagcctcgaatt

SEQ ID NO: 1220635 - DNA, 15 bp, Homo sapiens
actgcagcctcgaat

SEQ ID NO: 1220636 - DNA, 15 bp, Homo sapiens
cactgcagcctcgaa

SEQ ID NO: 1220637 - DNA, 15 bp, Homo sapiens
cctcactgcagcctc

SEQ ID NO: 1220638 - DNA, 15 bp, Homo sapiens
gcctcactgcagcct

SEQ ID NO: 1220639 - DNA, 15 bp, Homo sapiens
agcctcactgcagcc

SEQ ID NO: 1220640 - DNA, 15 bp, Homo sapiens
cagcctcactgcagc

SEQ ID NO: 1220641 - DNA, 15 bp, Homo sapiens
acagcctcactgcag

SEQ ID NO: 1220642 - DNA, 15 bp, Homo sapiens
cacagcctcactgca

SEQ ID NO: 1220643 - DNA, 15 bp, Homo sapiens
tcacagcctcactgc

SEQ ID NO: 1220644 - DNA, 15 bp, Homo sapiens
atcacagcctcactg

SEQ ID NO: 1220645 - DNA, 15 bp, Homo sapiens
gatcacagcctcact

SEQ ID NO: 1220646 - DNA, 15 bp, Homo sapiens
cgatcacagcctcac

SEQ ID NO: 1220647 - DNA, 15 bp, Homo sapiens
gcgatcacagcctca

SEQ ID NO: 1220648 - DNA, 15 bp, Homo sapiens
cgcgatcacagcctc

SEQ ID NO: 1220649 - DNA, 15 bp, Homo sapiens
gcgcgatcacagcct

SEQ ID NO: 1220650 - DNA, 15 bp, Homo sapiens
ggcgcgatcacagcc

SEQ ID NO: 1220651 - DNA, 15 bp, Homo sapiens
tggcgcgatcacagc

SEQ ID NO: 1220652 - DNA, 15 bp, Homo sapiens
gtggcgcgatcacag

SEQ ID NO: 1220653 - DNA, 15 bp, Homo sapiens
agtggcgcgatcaca

SEQ ID NO: 1220654 - DNA, 15 bp, Homo sapiens
cagtggcgcgatcac

SEQ ID NO: 1220655 - DNA, 15 bp, Homo sapiens
gcagtggcgcgatca

SEQ ID NO: 1220656 - DNA, 15 bp, Homo sapiens
attgcctaggctgga

SEQ ID NO: 1220657 - DNA, 15 bp, Homo sapiens
ctattgcctaggctg

SEQ ID NO: 1220658 - DNA, 15 bp, Homo sapiens
tctattgcctaggct

SEQ ID NO: 1220659 - DNA, 15 bp, Homo sapiens
ctctattgcctaggc

SEQ ID NO: 1220660 - DNA, 15 bp, Homo sapiens
actctattgcctagg

SEQ ID NO: 1220661 - DNA, 15 bp, Homo sapiens
cactctattgcctag

SEQ ID NO: 1220662 - DNA, 15 bp, Homo sapiens
tcactctattgccta

SEQ ID NO: 1220663 - DNA, 15 bp, Homo sapiens
ctcactctattgcct

SEQ ID NO: 1220664 - DNA, 15 bp, Homo sapiens
tctcactctattgcc

SEQ ID NO: 1220665 - DNA, 15 bp, Homo sapiens
gtctcactctattgc

SEQ ID NO: 1220666 - DNA, 15 bp, Homo sapiens
ggtctcactctattg

SEQ ID NO: 1220667 - DNA, 15 bp, Homo sapiens
gggtctcactctatt

SEQ ID NO: 1220668 - DNA, 15 bp, Homo sapiens
agggtctcactctat

SEQ ID NO: 1220669 - DNA, 15 bp, Homo sapiens
cagggtctcactcta

SEQ ID NO: 1220670 - DNA, 15 bp, Homo sapiens
tttttagagacaggg

SEQ ID NO: 1220671 - DNA, 15 bp, Homo sapiens
ccatttttttttttt

SEQ ID NO: 1220672 - DNA, 15 bp, Homo sapiens
gccattttttttttt

SEQ ID NO: 1220673 - DNA, 15 bp, Homo sapiens
agccatttttttttt

SEQ ID NO: 1220674 - DNA, 15 bp, Homo sapiens
gagccattttttttt

SEQ ID NO: 1220675 - DNA, 15 bp, Homo sapiens
tgagccatttttttt

SEQ ID NO: 1220676 - DNA, 15 bp, Homo sapiens
ctgagccattttttt

SEQ ID NO: 1220677 - DNA, 15 bp, Homo sapiens
gctgagccatttttt

SEQ ID NO: 1220678 - DNA, 15 bp, Homo sapiens
ggctgagccattttt

SEQ ID NO: 1220679 - DNA, 15 bp, Homo sapiens
tggctgagccatttt

SEQ ID NO: 1220680 - DNA, 15 bp, Homo sapiens
atggctgagccattt

SEQ ID NO: 1220681 - DNA, 15 bp, Homo sapiens
gatggctgagccatt

SEQ ID NO: 1220682 - DNA, 15 bp, Homo sapiens
ggatggctgagccat

SEQ ID NO: 1220683 - DNA, 15 bp, Homo sapiens
gggatggctgagcca

SEQ ID NO: 1220684 - DNA, 15 bp, Homo sapiens
tgggatggctgagcc

SEQ ID NO: 1220685 - DNA, 15 bp, Homo sapiens
ttgggatggctgagc

SEQ ID NO: 1220686 - DNA, 15 bp, Homo sapiens
cttgggatggctgag

SEQ ID NO: 1220687 - DNA, 15 bp, Homo sapiens
gcttgggatggctga

SEQ ID NO: 1220688 - DNA, 15 bp, Homo sapiens
agcttgggatggctg

SEQ ID NO: 1220689 - DNA, 15 bp, Homo sapiens
cagcttgggatggct

SEQ ID NO: 1220690 - DNA, 15 bp, Homo sapiens
gcagcttgggatggc

SEQ ID NO: 1220691 - DNA, 15 bp, Homo sapiens
agcagcttgggatgg

SEQ ID NO: 1220692 - DNA, 15 bp, Homo sapiens
gagcagcttgggatg

SEQ ID NO: 1220693 - DNA, 15 bp, Homo sapiens
ggagcagcttgggat

SEQ ID NO: 1220694 - DNA, 15 bp, Homo sapiens
gggagcagcttggga

SEQ ID NO: 1220695 - DNA, 15 bp, Homo sapiens
tgggagcagcttggg

SEQ ID NO: 1220696 - DNA, 15 bp, Homo sapiens
ctgggagcagcttgg

SEQ ID NO: 1220697 - DNA, 15 bp, Homo sapiens
gctgggagcagcttg

SEQ ID NO: 1220698 - DNA, 15 bp, Homo sapiens
agctgggagcagctt

SEQ ID NO: 1220699 - DNA, 15 bp, Homo sapiens
cagctgggagcagct

SEQ ID NO: 1220700 - DNA, 15 bp, Homo sapiens
gcagctgggagcagc

SEQ ID NO: 1220701 - DNA, 15 bp, Homo sapiens
ggcagctgggagcag

SEQ ID NO: 1220702 - DNA, 15 bp, Homo sapiens
aggcagctgggagca

SEQ ID NO: 1220703 - DNA, 15 bp, Homo sapiens
caggcagctgggagc

SEQ ID NO: 1220704 - DNA, 15 bp, Homo sapiens
gcaggcagctgggag

SEQ ID NO: 1220705 - DNA, 15 bp, Homo sapiens
ggcaggcagctggga

SEQ ID NO: 1220706 - DNA, 15 bp, Homo sapiens
gggcaggcagctggg

SEQ ID NO: 1220707 - DNA, 15 bp, Homo sapiens
ggggcaggcagctgg

SEQ ID NO: 1220708 - DNA, 15 bp, Homo sapiens
aggggcaggcagctg

SEQ ID NO: 1220709 - DNA, 15 bp, Homo sapiens
gaggggcaggcagct

SEQ ID NO: 1220710 - DNA, 15 bp, Homo sapiens
agaggggcaggcagc

SEQ ID NO: 1220711 - DNA, 15 bp, Homo sapiens
tagaggggcaggcag

SEQ ID NO: 1220712 - DNA, 15 bp, Homo sapiens
ctagaggggcaggca

SEQ ID NO: 1220713 - DNA, 15 bp, Homo sapiens
cctagaggggcaggc

SEQ ID NO: 1220714 - DNA, 15 bp, Homo sapiens
acctagaggggcagg

SEQ ID NO: 1220715 - DNA, 15 bp, Homo sapiens
cacctagaggggcag

SEQ ID NO: 1220716 - DNA, 15 bp, Homo sapiens
ccacctagaggggca

SEQ ID NO: 1220717 - DNA, 15 bp, Homo sapiens
gccacctagaggggc

SEQ ID NO: 1220718 - DNA, 15 bp, Homo sapiens
ggccacctagagggg

SEQ ID NO: 1220719 - DNA, 15 bp, Homo sapiens
gggccacctagaggg

SEQ ID NO: 1220720 - DNA, 15 bp, Homo sapiens
ggggccacctagagg

SEQ ID NO: 1220721 - DNA, 15 bp, Homo sapiens
gggggccacctagag

SEQ ID NO: 1220722 - DNA, 15 bp, Homo sapiens
tgggggccacctaga

SEQ ID NO: 1220723 - DNA, 15 bp, Homo sapiens
gtgggggccacctag

SEQ ID NO: 1220724 - DNA, 15 bp, Homo sapiens
agtgggggccaccta

SEQ ID NO: 1220725 - DNA, 15 bp, Homo sapiens
tagtgggggccacct

SEQ ID NO: 1220726 - DNA, 15 bp, Homo sapiens
gtagtgggggccacc

SEQ ID NO: 1220727 - DNA, 15 bp, Homo sapiens
agtagtgggggccac

SEQ ID NO: 1220728 - DNA, 15 bp, Homo sapiens
cagtagtgggggcca

SEQ ID NO: 1220729 - DNA, 15 bp, Homo sapiens
ccagtagtgggggcc

SEQ ID NO: 1220730 - DNA, 15 bp, Homo sapiens
gccagtagtgggggc

SEQ ID NO: 1220731 - DNA, 15 bp, Homo sapiens
ggccagtagtggggg

SEQ ID NO: 1220732 - DNA, 15 bp, Homo sapiens
aggccagtagtgggg

SEQ ID NO: 1220733 - DNA, 15 bp, Homo sapiens
caggccagtagtggg

SEQ ID NO: 1220734 - DNA, 15 bp, Homo sapiens
tcaggccagtagtgg

SEQ ID NO: 1220735 - DNA, 15 bp, Homo sapiens
ctcaggccagtagtg

SEQ ID NO: 1220736 - DNA, 15 bp, Homo sapiens
cctcaggccagtagt

SEQ ID NO: 1220737 - DNA, 15 bp, Homo sapiens
tcctcaggccagtag

SEQ ID NO: 1220738 - DNA, 15 bp, Homo sapiens
atcctcaggccagta

SEQ ID NO: 1220739 - DNA, 15 bp, Homo sapiens
catcctcaggccagt

SEQ ID NO: 1220740 - DNA, 15 bp, Homo sapiens
gcatcctcaggccag

SEQ ID NO: 1220741 - DNA, 15 bp, Homo sapiens
tgcatcctcaggcca

SEQ ID NO: 1220742 - DNA, 15 bp, Homo sapiens
gtgcatcctcaggcc

SEQ ID NO: 1220743 - DNA, 15 bp, Homo sapiens
agtgcatcctcaggc

SEQ ID NO: 1220744 - DNA, 15 bp, Homo sapiens
aagtgcatcctcagg

SEQ ID NO: 1220745 - DNA, 15 bp, Homo sapiens
aaagtgcatcctcag

SEQ ID NO: 1220746 - DNA, 15 bp, Homo sapiens
taaagtgcatcctca

SEQ ID NO: 1220747 - DNA, 15 bp, Homo sapiens
ataaagtgcatcctc

SEQ ID NO: 1220748 - DNA, 15 bp, Homo sapiens
gataaagtgcatcct

SEQ ID NO: 1220749 - DNA, 15 bp, Homo sapiens
ggataaagtgcatcc

SEQ ID NO: 1220750 - DNA, 15 bp, Homo sapiens
gggataaagtgcatc

SEQ ID NO: 1220751 - DNA, 15 bp, Homo sapiens
ggggataaagtgcat

SEQ ID NO: 1220752 - DNA, 15 bp, Homo sapiens
cggggataaagtgca

SEQ ID NO: 1220753 - DNA, 15 bp, Homo sapiens
gcggggataaagtgc

SEQ ID NO: 1220754 - DNA, 15 bp, Homo sapiens
ggcggggataaagtg

SEQ ID NO: 1220755 - DNA, 15 bp, Homo sapiens
tggcggggataaagt

SEQ ID NO: 1220756 - DNA, 15 bp, Homo sapiens
ctggcggggataaag

SEQ ID NO: 1220757 - DNA, 15 bp, Homo sapiens
cctggcggggataaa

SEQ ID NO: 1220758 - DNA, 15 bp, Homo sapiens
ccctggcggggataa

SEQ ID NO: 1220759 - DNA, 15 bp, Homo sapiens
gccctggcggggata

SEQ ID NO: 1220760 - DNA, 15 bp, Homo sapiens
ggccctggcggggat

SEQ ID NO: 1220761 - DNA, 15 bp, Homo sapiens
aggccctggcgggga

SEQ ID NO: 1220762 - DNA, 15 bp, Homo sapiens
caggccctggcgggg

SEQ ID NO: 1220763 - DNA, 15 bp, Homo sapiens
tcaggccctggcggg

SEQ ID NO: 1220764 - DNA, 15 bp, Homo sapiens
ctcaggccctggcgg

SEQ ID NO: 1220765 - DNA, 15 bp, Homo sapiens
cctcaggccctggcg

SEQ ID NO: 1220766 - DNA, 15 bp, Homo sapiens
tcctcaggccctggc

SEQ ID NO: 1220767 - DNA, 15 bp, Homo sapiens
ctcctcaggccctgg

SEQ ID NO: 1220768 - DNA, 15 bp, Homo sapiens
actcctcaggccctg

SEQ ID NO: 1220769 - DNA, 15 bp, Homo sapiens
gactcctcaggccct

SEQ ID NO: 1220770 - DNA, 15 bp, Homo sapiens
ggactcctcaggccc

SEQ ID NO: 1220771 - DNA, 15 bp, Homo sapiens
aggactcctcaggcc

SEQ ID NO: 1220772 - DNA, 15 bp, Homo sapiens
caggactcctcaggc

SEQ ID NO: 1220773 - DNA, 15 bp, Homo sapiens
ccaggactcctcagg

SEQ ID NO: 1220774 - DNA, 15 bp, Homo sapiens
cccaggactcctcag

SEQ ID NO: 1220775 - DNA, 15 bp, Homo sapiens
ccccaggactcctca

SEQ ID NO: 1220776 - DNA, 15 bp, Homo sapiens
tccccaggactcctc

SEQ ID NO: 1220777 - DNA, 15 bp, Homo sapiens
ttccccaggactcct

SEQ ID NO: 1220778 - DNA, 15 bp, Homo sapiens
tttccccaggactcc

SEQ ID NO: 1220779 - DNA, 15 bp, Homo sapiens
ctttccccaggactc

SEQ ID NO: 1220780 - DNA, 15 bp, Homo sapiens
cctttccccaggact

SEQ ID NO: 1220781 - DNA, 15 bp, Homo sapiens
acctttccccaggac

SEQ ID NO: 1220782 - DNA, 15 bp, Homo sapiens
tacctttccccagga

SEQ ID NO: 1220783 - DNA, 15 bp, Homo sapiens
gtacctttccccagg

SEQ ID NO: 1220784 - DNA, 15 bp, Homo sapiens
ggtacctttccccag

SEQ ID NO: 1220785 - DNA, 15 bp, Homo sapiens
gggtacctttcccca

SEQ ID NO: 1220786 - DNA, 15 bp, Homo sapiens
tgggtacctttcccc

SEQ ID NO: 1220787 - DNA, 15 bp, Homo sapiens
ttgggtacctttccc

SEQ ID NO: 1220788 - DNA, 15 bp, Homo sapiens
cttgggtacctttcc

SEQ ID NO: 1220789 - DNA, 15 bp, Homo sapiens
acttgggtacctttc

SEQ ID NO: 1220790 - DNA, 15 bp, Homo sapiens
gacttgggtaccttt

SEQ ID NO: 1220791 - DNA, 15 bp, Homo sapiens
agacttgggtacctt

SEQ ID NO: 1220792 - DNA, 15 bp, Homo sapiens
tagacttgggtacct

SEQ ID NO: 1220793 - DNA, 15 bp, Homo sapiens
ctagacttgggtacc

SEQ ID NO: 1220794 - DNA, 15 bp, Homo sapiens
actagacttgggtac

SEQ ID NO: 1220795 - DNA, 15 bp, Homo sapiens
gactagacttgggta

SEQ ID NO: 1220796 - DNA, 15 bp, Homo sapiens
ggactagacttgggt

SEQ ID NO: 1220797 - DNA, 15 bp, Homo sapiens
aggactagacttggg

SEQ ID NO: 1220798 - DNA, 15 bp, Homo sapiens
gaggactagacttgg

SEQ ID NO: 1220799 - DNA, 15 bp, Homo sapiens
tgaggactagacttg

SEQ ID NO: 1220800 - DNA, 15 bp, Homo sapiens
ctgaggactagactt

SEQ ID NO: 1220801 - DNA, 15 bp, Homo sapiens
cctgaggactagact

SEQ ID NO: 1220802 - DNA, 15 bp, Homo sapiens
tcctgaggactagac

SEQ ID NO: 1220803 - DNA, 15 bp, Homo sapiens
ctcctgaggactaga

SEQ ID NO: 1220804 - DNA, 15 bp, Homo sapiens
tctcctgaggactag

SEQ ID NO: 1220805 - DNA, 15 bp, Homo sapiens
ttctcctgaggacta

SEQ ID NO: 1220806 - DNA, 15 bp, Homo sapiens
cttctcctgaggact

SEQ ID NO: 1220807 - DNA, 15 bp, Homo sapiens
gcttctcctgaggac

SEQ ID NO: 1220808 - DNA, 15 bp, Homo sapiens
ggcttctcctgagga

SEQ ID NO: 1220809 - DNA, 15 bp, Homo sapiens
cggcttctcctgagg

SEQ ID NO: 1220810 - DNA, 15 bp, Homo sapiens
gcggcttctcctgag

SEQ ID NO: 1220811 - DNA, 15 bp, Homo sapiens
ggcggcttctcctga

SEQ ID NO: 1220812 - DNA, 15 bp, Homo sapiens
gggcggcttctcctg

SEQ ID NO: 1220813 - DNA, 15 bp, Homo sapiens
tgggcggcttctcct

SEQ ID NO: 1220814 - DNA, 15 bp, Homo sapiens
ctgggcggcttctcc

SEQ ID NO: 1220815 - DNA, 15 bp, Homo sapiens
cctgggcggcttctc

SEQ ID NO: 1220816 - DNA, 15 bp, Homo sapiens
ccctgggcggcttct

SEQ ID NO: 1220817 - DNA, 15 bp, Homo sapiens
tccctgggcggcttc

SEQ ID NO: 1220818 - DNA, 15 bp, Homo sapiens
ctccctgggcggctt

SEQ ID NO: 1220819 - DNA, 15 bp, Homo sapiens
gctccctgggcggct

SEQ ID NO: 1220820 - DNA, 15 bp, Homo sapiens
tgctccctgggcggc

SEQ ID NO: 1220821 - DNA, 15 bp, Homo sapiens
gtgctccctgggcgg

SEQ ID NO: 1220822 - DNA, 15 bp, Homo sapiens
agtgctccctgggcg

SEQ ID NO: 1220823 - DNA, 15 bp, Homo sapiens
tagtgctccctgggc

SEQ ID NO: 1220824 - DNA, 15 bp, Homo sapiens
ctagtgctccctggg

SEQ ID NO: 1220825 - DNA, 15 bp, Homo sapiens
cctagtgctccctgg

SEQ ID NO: 1220826 - DNA, 15 bp, Homo sapiens
ccctagtgctccctg

SEQ ID NO: 1220827 - DNA, 15 bp, Homo sapiens
gccctagtgctccct

SEQ ID NO: 1220828 - DNA, 15 bp, Homo sapiens
ggccctagtgctccc

SEQ ID NO: 1220829 - DNA, 15 bp, Homo sapiens
gggccctagtgctcc

SEQ ID NO: 1220830 - DNA, 15 bp, Homo sapiens
cgggccctagtgctc

SEQ ID NO: 1220831 - DNA, 15 bp, Homo sapiens
tcgggccctagtgct

SEQ ID NO: 1220832 - DNA, 15 bp, Homo sapiens
ctcgggccctagtgc

SEQ ID NO: 1220833 - DNA, 15 bp, Homo sapiens
cctcgggccctagtg

SEQ ID NO: 1220834 - DNA, 15 bp, Homo sapiens
tcctcgggccctagt

SEQ ID NO: 1220835 - DNA, 15 bp, Homo sapiens
ttcctcgggccctag

SEQ ID NO: 1220836 - DNA, 15 bp, Homo sapiens
cttcctcgggcccta

SEQ ID NO: 1220837 - DNA, 15 bp, Homo sapiens
ccttcctcgggccct

SEQ ID NO: 1220838 - DNA, 15 bp, Homo sapiens
cccttcctcgggccc

SEQ ID NO: 1220839 - DNA, 15 bp, Homo sapiens
acccttcctcgggcc

SEQ ID NO: 1220840 - DNA, 15 bp, Homo sapiens
aacccttcctcgggc

SEQ ID NO: 1220841 - DNA, 15 bp, Homo sapiens
gaacccttcctcggg

SEQ ID NO: 1220842 - DNA, 15 bp, Homo sapiens
tgaacccttcctcgg

SEQ ID NO: 1220843 - DNA, 15 bp, Homo sapiens
ttgaacccttcctcg

SEQ ID NO: 1220844 - DNA, 15 bp, Homo sapiens
gttgaacccttcctc

SEQ ID NO: 1220845 - DNA, 15 bp, Homo sapiens
ggttgaacccttcct

SEQ ID NO: 1220846 - DNA, 15 bp, Homo sapiens
aggttgaacccttcc

SEQ ID NO: 1220847 - DNA, 15 bp, Homo sapiens
gaggttgaacccttc

SEQ ID NO: 1220848 - DNA, 15 bp, Homo sapiens
cgaggttgaaccctt

SEQ ID NO: 1220849 - DNA, 15 bp, Homo sapiens
tcgaggttgaaccct

SEQ ID NO: 1220850 - DNA, 15 bp, Homo sapiens
ctcgaggttgaaccc

SEQ ID NO: 1220851 - DNA, 15 bp, Homo sapiens
tctcgaggttgaacc

SEQ ID NO: 1220852 - DNA, 15 bp, Homo sapiens
gtctcgaggttgaac

SEQ ID NO: 1220853 - DNA, 15 bp, Homo sapiens
agtctcgaggttgaa

SEQ ID NO: 1220854 - DNA, 15 bp, Homo sapiens
gagtctcgaggttga

SEQ ID NO: 1220855 - DNA, 15 bp, Homo sapiens
ggagtctcgaggttg

SEQ ID NO: 1220856 - DNA, 15 bp, Homo sapiens
tggagtctcgaggtt

SEQ ID NO: 1220857 - DNA, 15 bp, Homo sapiens
atggagtctcgaggt

SEQ ID NO: 1220858 - DNA, 15 bp, Homo sapiens
tatggagtctcgagg

SEQ ID NO: 1220859 - DNA, 15 bp, Homo sapiens
ctatggagtctcgag

SEQ ID NO: 1220860 - DNA, 15 bp, Homo sapiens
gctatggagtctcga

SEQ ID NO: 1220861 - DNA, 15 bp, Homo sapiens
ggctatggagtctcg

SEQ ID NO: 1220862 - DNA, 15 bp, Homo sapiens
gggctatggagtctc

SEQ ID NO: 1220863 - DNA, 15 bp, Homo sapiens
ggggctatggagtct

SEQ ID NO: 1220864 - DNA, 15 bp, Homo sapiens
aggggctatggagtc

SEQ ID NO: 1220865 - DNA, 15 bp, Homo sapiens
caggggctatggagt

SEQ ID NO: 1220866 - DNA, 15 bp, Homo sapiens
ccaggggctatggag

SEQ ID NO: 1220867 - DNA, 15 bp, Homo sapiens
cccaggggctatgga

SEQ ID NO: 1220868 - DNA, 15 bp, Homo sapiens
gcccaggggctatgg

SEQ ID NO: 1220869 - DNA, 15 bp, Homo sapiens
agcccaggggctatg

SEQ ID NO: 1220870 - DNA, 15 bp, Homo sapiens
gagcccaggggctat

SEQ ID NO: 1220871 - DNA, 15 bp, Homo sapiens
ggagcccaggggcta

SEQ ID NO: 1220872 - DNA, 15 bp, Homo sapiens
gggagcccaggggct

SEQ ID NO: 1220873 - DNA, 15 bp, Homo sapiens
cgggagcccaggggc

SEQ ID NO: 1220874 - DNA, 15 bp, Homo sapiens
acgggagcccagggg

SEQ ID NO: 1220875 - DNA, 15 bp, Homo sapiens
gacgggagcccaggg

SEQ ID NO: 1220876 - DNA, 15 bp, Homo sapiens
ggacgggagcccagg

SEQ ID NO: 1220877 - DNA, 15 bp, Homo sapiens
gggacgggagcccag

SEQ ID NO: 1220878 - DNA, 15 bp, Homo sapiens
ggggacgggagccca

SEQ ID NO: 1220879 - DNA, 15 bp, Homo sapiens
tggggacgggagccc

SEQ ID NO: 1220880 - DNA, 15 bp, Homo sapiens
ctggggacgggagcc

SEQ ID NO: 1220881 - DNA, 15 bp, Homo sapiens
tctggggacgggagc

SEQ ID NO: 1220882 - DNA, 15 bp, Homo sapiens
ttctggggacgggag

SEQ ID NO: 1220883 - DNA, 15 bp, Homo sapiens
tttctggggacggga

SEQ ID NO: 1220884 - DNA, 15 bp, Homo sapiens
gtttctggggacggg

SEQ ID NO: 1220885 - DNA, 15 bp, Homo sapiens
tgtttctggggacgg

SEQ ID NO: 1220886 - DNA, 15 bp, Homo sapiens
gtgtttctggggacg

SEQ ID NO: 1220887 - DNA, 15 bp, Homo sapiens
ggtgtttctggggac

SEQ ID NO: 1220888 - DNA, 15 bp, Homo sapiens
tggtgtttctgggga

SEQ ID NO: 1220889 - DNA, 15 bp, Homo sapiens
ctggtgtttctgggg

SEQ ID NO: 1220890 - DNA, 15 bp, Homo sapiens
actggtgtttctggg

SEQ ID NO: 1220891 - DNA, 15 bp, Homo sapiens
aactggtgtttctgg

SEQ ID NO: 1220892 - DNA, 15 bp, Homo sapiens
taactggtgtttctg

SEQ ID NO: 1220893 - DNA, 15 bp, Homo sapiens
gtaactggtgtttct

SEQ ID NO: 1220894 - DNA, 15 bp, Homo sapiens
cgtaactggtgtttc

SEQ ID NO: 1220895 - DNA, 15 bp, Homo sapiens
tcgtaactggtgttt

SEQ ID NO: 1220896 - DNA, 15 bp, Homo sapiens
ctcgtaactggtgtt

SEQ ID NO: 1220897 - DNA, 15 bp, Homo sapiens
gctcgtaactggtgt

SEQ ID NO: 1220898 - DNA, 15 bp, Homo sapiens
tgctcgtaactggtg

SEQ ID NO: 1220899 - DNA, 15 bp, Homo sapiens
ctgctcgtaactggt

SEQ ID NO: 1220900 - DNA, 15 bp, Homo sapiens
cctgctcgtaactgg

SEQ ID NO: 1220901 - DNA, 15 bp, Homo sapiens
ccctgctcgtaactg

SEQ ID NO: 1220902 - DNA, 15 bp, Homo sapiens
cccctgctcgtaact

SEQ ID NO: 1220903 - DNA, 15 bp, Homo sapiens
ccccctgctcgtaac

SEQ ID NO: 1220904 - DNA, 15 bp, Homo sapiens
gccccctgctcgtaa

SEQ ID NO: 1220905 - DNA, 15 bp, Homo sapiens
agccccctgctcgta

SEQ ID NO: 1220906 - DNA, 15 bp, Homo sapiens
cagccccctgctcgt

SEQ ID NO: 1220907 - DNA, 15 bp, Homo sapiens
ccagccccctgctcg

SEQ ID NO: 1220908 - DNA, 15 bp, Homo sapiens
gccagccccctgctc

SEQ ID NO: 1220909 - DNA, 15 bp, Homo sapiens
ggccagccccctgct

SEQ ID NO: 1220910 - DNA, 15 bp, Homo sapiens
tggccagccccctgc

SEQ ID NO: 1220911 - DNA, 15 bp, Homo sapiens
atggccagccccctg

SEQ ID NO: 1220912 - DNA, 15 bp, Homo sapiens
catggccagccccct

SEQ ID NO: 1220913 - DNA, 15 bp, Homo sapiens
ccatggccagccccc

SEQ ID NO: 1220914 - DNA, 15 bp, Homo sapiens
accatggccagcccc

SEQ ID NO: 1220915 - DNA, 15 bp, Homo sapiens
caccatggccagccc

SEQ ID NO: 1220916 - DNA, 15 bp, Homo sapiens
acaccatggccagcc

SEQ ID NO: 1220917 - DNA, 15 bp, Homo sapiens
cacaccatggccagc

SEQ ID NO: 1220918 - DNA, 15 bp, Homo sapiens
tcacaccatggccag

SEQ ID NO: 1220919 - DNA, 15 bp, Homo sapiens
ttcacaccatggcca

SEQ ID NO: 1220920 - DNA, 15 bp, Homo sapiens
attcacaccatggcc

SEQ ID NO: 1220921 - DNA, 15 bp, Homo sapiens
aattcacaccatggc

SEQ ID NO: 1220922 - DNA, 15 bp, Homo sapiens
gaattcacaccatgg

SEQ ID NO: 1220923 - DNA, 15 bp, Homo sapiens
tgaattcacaccatg

SEQ ID NO: 1220924 - DNA, 15 bp, Homo sapiens
atgaattcacaccat

SEQ ID NO: 1220925 - DNA, 15 bp, Homo sapiens
catgaattcacacca

SEQ ID NO: 1220926 - DNA, 15 bp, Homo sapiens
tcatgaattcacacc

SEQ ID NO: 1220927 - DNA, 15 bp, Homo sapiens
gtcatgaattcacac

SEQ ID NO: 1220928 - DNA, 15 bp, Homo sapiens
ggtcatgaattcaca

SEQ ID NO: 1220929 - DNA, 15 bp, Homo sapiens
aggtcatgaattcac

SEQ ID NO: 1220930 - DNA, 15 bp, Homo sapiens
caggtcatgaattca

SEQ ID NO: 1220931 - DNA, 15 bp, Homo sapiens
gcaggtcatgaattc

SEQ ID NO: 1220932 - DNA, 15 bp, Homo sapiens
tgcaggtcatgaatt

SEQ ID NO: 1220933 - DNA, 15 bp, Homo sapiens
gtgcaggtcatgaat

SEQ ID NO: 1220934 - DNA, 15 bp, Homo sapiens
tgtgcaggtcatgaa

SEQ ID NO: 1220935 - DNA, 15 bp, Homo sapiens
gtgtgcaggtcatga

SEQ ID NO: 1220936 - DNA, 15 bp, Homo sapiens
ggtgtgcaggtcatg

SEQ ID NO: 1220937 - DNA, 15 bp, Homo sapiens
aggtgtgcaggtcat

SEQ ID NO: 1220938 - DNA, 15 bp, Homo sapiens
gaggtgtgcaggtca

SEQ ID NO: 1220939 - DNA, 15 bp, Homo sapiens
agaggtgtgcaggtc

SEQ ID NO: 1220940 - DNA, 15 bp, Homo sapiens
aagaggtgtgcaggt

SEQ ID NO: 1220941 - DNA, 15 bp, Homo sapiens
caagaggtgtgcagg

SEQ ID NO: 1220942 - DNA, 15 bp, Homo sapiens
gcaagaggtgtgcag

SEQ ID NO: 1220943 - DNA, 15 bp, Homo sapiens
ggcaagaggtgtgca

SEQ ID NO: 1220944 - DNA, 15 bp, Homo sapiens
cggcaagaggtgtgc

SEQ ID NO: 1220945 - DNA, 15 bp, Homo sapiens
acggcaagaggtgtg

SEQ ID NO: 1220946 - DNA, 15 bp, Homo sapiens
tacggcaagaggtgt

SEQ ID NO: 1220947 - DNA, 15 bp, Homo sapiens
ttacggcaagaggtg

SEQ ID NO: 1220948 - DNA, 15 bp, Homo sapiens
attacggcaagaggt

SEQ ID NO: 1220949 - DNA, 15 bp, Homo sapiens
cattacggcaagagg

SEQ ID NO: 1220950 - DNA, 15 bp, Homo sapiens
tcattacggcaagag

SEQ ID NO: 1220951 - DNA, 15 bp, Homo sapiens
gtcattacggcaaga

SEQ ID NO: 1220952 - DNA, 15 bp, Homo sapiens
agtcattacggcaag

SEQ ID NO: 1220953 - DNA, 15 bp, Homo sapiens
tagtcattacggcaa

SEQ ID NO: 1220954 - DNA, 15 bp, Homo sapiens
ttagtcattacggca

SEQ ID NO: 1220955 - DNA, 15 bp, Homo sapiens
cttagtcattacggc

SEQ ID NO: 1220956 - DNA, 15 bp, Homo sapiens
acttagtcattacgg

SEQ ID NO: 1220957 - DNA, 15 bp, Homo sapiens
cacttagtcattacg

SEQ ID NO: 1220958 - DNA, 15 bp, Homo sapiens
ccacttagtcattac

SEQ ID NO: 1220959 - DNA, 15 bp, Homo sapiens
gccacttagtcatta

SEQ ID NO: 1220960 - DNA, 15 bp, Homo sapiens
agccacttagtcatt

SEQ ID NO: 1220961 - DNA, 15 bp, Homo sapiens
tagccacttagtcat

SEQ ID NO: 1220962 - DNA, 15 bp, Homo sapiens
ctagccacttagtca

SEQ ID NO: 1220963 - DNA, 15 bp, Homo sapiens
tctagccacttagtc

SEQ ID NO: 1220964 - DNA, 15 bp, Homo sapiens
gctctagccacttag

SEQ ID NO: 1220965 - DNA, 15 bp, Homo sapiens
agctctagccactta

SEQ ID NO: 1220966 - DNA, 15 bp, Homo sapiens
aagctctagccactt

SEQ ID NO: 1220967 - DNA, 15 bp, Homo sapiens
gaagctctagccact

SEQ ID NO: 1220968 - DNA, 15 bp, Homo sapiens
tgaagctctagccac

SEQ ID NO: 1220969 - DNA, 15 bp, Homo sapiens
ctgaagctctagcca

SEQ ID NO: 1220970 - DNA, 15 bp, Homo sapiens
cctgaagctctagcc

SEQ ID NO: 1220971 - DNA, 15 bp, Homo sapiens
gcctgaagctctagc

SEQ ID NO: 1220972 - DNA, 15 bp, Homo sapiens
agcctgaagctctag

SEQ ID NO: 1220973 - DNA, 15 bp, Homo sapiens
cagcctgaagctcta

SEQ ID NO: 1220974 - DNA, 15 bp, Homo sapiens
gcagcctgaagctct

SEQ ID NO: 1220975 - DNA, 15 bp, Homo sapiens
ggcagcctgaagctc

SEQ ID NO: 1220976 - DNA, 15 bp, Homo sapiens
gggcagcctgaagct

SEQ ID NO: 1220977 - DNA, 15 bp, Homo sapiens
ggggcagcctgaagc

SEQ ID NO: 1220978 - DNA, 15 bp, Homo sapiens
tggggcagcctgaag

SEQ ID NO: 1220979 - DNA, 15 bp, Homo sapiens
gtggggcagcctgaa

SEQ ID NO: 1220980 - DNA, 15 bp, Homo sapiens
agtggggcagcctga

SEQ ID NO: 1220981 - DNA, 15 bp, Homo sapiens
cagtggggcagcctg

SEQ ID NO: 1220982 - DNA, 15 bp, Homo sapiens
gcagtggggcagcct

SEQ ID NO: 1220983 - DNA, 15 bp, Homo sapiens
agcagtggggcagcc

SEQ ID NO: 1220984 - DNA, 15 bp, Homo sapiens
cagcagtggggcagc

SEQ ID NO: 1220985 - DNA, 15 bp, Homo sapiens
gcagcagtggggcag

SEQ ID NO: 1220986 - DNA, 15 bp, Homo sapiens
ggcagcagtggggca

SEQ ID NO: 1220987 - DNA, 15 bp, Homo sapiens
gggcagcagtggggc

SEQ ID NO: 1220988 - DNA, 15 bp, Homo sapiens
agggcagcagtgggg

SEQ ID NO: 1220989 - DNA, 15 bp, Homo sapiens
gagggcagcagtggg

SEQ ID NO: 1220990 - DNA, 15 bp, Homo sapiens
agagggcagcagtgg

SEQ ID NO: 1220991 - DNA, 15 bp, Homo sapiens
cagagggcagcagtg

SEQ ID NO: 1220992 - DNA, 15 bp, Homo sapiens
ccagagggcagcagt

SEQ ID NO: 1220993 - DNA, 15 bp, Homo sapiens
tccagagggcagcag

SEQ ID NO: 1220994 - DNA, 15 bp, Homo sapiens
ctccagagggcagca

SEQ ID NO: 1220995 - DNA, 15 bp, Homo sapiens
gctccagagggcagc

SEQ ID NO: 1220996 - DNA, 15 bp, Homo sapiens
agctccagagggcag

SEQ ID NO: 1220997 - DNA, 15 bp, Homo sapiens
gagctccagagggca

SEQ ID NO: 1220998 - DNA, 15 bp, Homo sapiens
cgagctccagagggc

SEQ ID NO: 1220999 - DNA, 15 bp, Homo sapiens
tcgagctccagaggg

SEQ ID NO: 1221000 - DNA, 15 bp, Homo sapiens
ctcgagctccagagg

SEQ ID NO: 1221001 - DNA, 15 bp, Homo sapiens
gctcgagctccagag

SEQ ID NO: 1221002 - DNA, 15 bp, Homo sapiens
tgctcgagctccaga

SEQ ID NO: 1221003 - DNA, 15 bp, Homo sapiens
ctgctcgagctccag

SEQ ID NO: 1221004 - DNA, 15 bp, Homo sapiens
cctgctcgagctcca

SEQ ID NO: 1221005 - DNA, 15 bp, Homo sapiens
acctgctcgagctcc

SEQ ID NO: 1221006 - DNA, 15 bp, Homo sapiens
cacctgctcgagctc

SEQ ID NO: 1221007 - DNA, 15 bp, Homo sapiens
gcacctgctcgagct

SEQ ID NO: 1221008 - DNA, 15 bp, Homo sapiens
tgcacctgctcgagc

SEQ ID NO: 1221009 - DNA, 15 bp, Homo sapiens
ctgcacctgctcgag

SEQ ID NO: 1221010 - DNA, 15 bp, Homo sapiens
cctgcacctgctcga

SEQ ID NO: 1221011 - DNA, 15 bp, Homo sapiens
acctgcacctgctcg

SEQ ID NO: 1221012 - DNA, 15 bp, Homo sapiens
cacctgcacctgctc

SEQ ID NO: 1221013 - DNA, 15 bp, Homo sapiens
acacctgcacctgct

SEQ ID NO: 1221014 - DNA, 15 bp, Homo sapiens
cacacctgcacctgc

SEQ ID NO: 1221015 - DNA, 15 bp, Homo sapiens
ccacacctgcacctg

SEQ ID NO: 1221016 - DNA, 15 bp, Homo sapiens
cccacacctgcacct

SEQ ID NO: 1221017 - DNA, 15 bp, Homo sapiens
acccacacctgcacc

SEQ ID NO: 1221018 - DNA, 15 bp, Homo sapiens
cacccacacctgcac

SEQ ID NO: 1221019 - DNA, 15 bp, Homo sapiens
gcacccacacctgca

SEQ ID NO: 1221020 - DNA, 15 bp, Homo sapiens
ggcacccacacctgc

SEQ ID NO: 1221021 - DNA, 15 bp, Homo sapiens
gggcacccacacctg

SEQ ID NO: 1221022 - DNA, 15 bp, Homo sapiens
tgggcacccacacct

SEQ ID NO: 1221023 - DNA, 15 bp, Homo sapiens
gtgggcacccacacc

SEQ ID NO: 1221024 - DNA, 15 bp, Homo sapiens
ggtgggcacccacac

SEQ ID NO: 1221025 - DNA, 15 bp, Homo sapiens
gggtgggcacccaca

SEQ ID NO: 1221026 - DNA, 15 bp, Homo sapiens
agggtgggcacccac

SEQ ID NO: 1221027 - DNA, 15 bp, Homo sapiens
cagggtgggcaccca

SEQ ID NO: 1221028 - DNA, 15 bp, Homo sapiens
ccagggtgggcaccc

SEQ ID NO: 1221029 - DNA, 15 bp, Homo sapiens
gccagggtgggcacc

SEQ ID NO: 1221030 - DNA, 15 bp, Homo sapiens
agccagggtgggcac

SEQ ID NO: 1221031 - DNA, 15 bp, Homo sapiens
aagccagggtgggca

SEQ ID NO: 1221032 - DNA, 15 bp, Homo sapiens
caagccagggtgggc

SEQ ID NO: 1221033 - DNA, 15 bp, Homo sapiens
ccaagccagggtggg

SEQ ID NO: 1221034 - DNA, 15 bp, Homo sapiens
gccaagccagggtgg

SEQ ID NO: 1221035 - DNA, 15 bp, Homo sapiens
ggccaagccagggtg

SEQ ID NO: 1221036 - DNA, 15 bp, Homo sapiens
aggccaagccagggt

SEQ ID NO: 1221037 - DNA, 15 bp, Homo sapiens
gaggccaagccaggg

SEQ ID NO: 1221038 - DNA, 15 bp, Homo sapiens
agaggccaagccagg

SEQ ID NO: 1221039 - DNA, 15 bp, Homo sapiens
aagaggccaagccag

SEQ ID NO: 1221040 - DNA, 15 bp, Homo sapiens
gaagaggccaagcca

SEQ ID NO: 1221041 - DNA, 15 bp, Homo sapiens
agaagaggccaagcc

SEQ ID NO: 1221042 - DNA, 15 bp, Homo sapiens
gagaagaggccaagc

SEQ ID NO: 1221043 - DNA, 15 bp, Homo sapiens
tgagaagaggccaag

SEQ ID NO: 1221044 - DNA, 15 bp, Homo sapiens
gtgagaagaggccaa

SEQ ID NO: 1221045 - DNA, 15 bp, Homo sapiens
ggtgagaagaggcca

SEQ ID NO: 1221046 - DNA, 15 bp, Homo sapiens
aggtgagaagaggcc

SEQ ID NO: 1221047 - DNA, 15 bp, Homo sapiens
caggtgagaagaggc

SEQ ID NO: 1221048 - DNA, 15 bp, Homo sapiens
ccaggtgagaagagg

SEQ ID NO: 1221049 - DNA, 15 bp, Homo sapiens
cccaggtgagaagag

SEQ ID NO: 1221050 - DNA, 15 bp, Homo sapiens
acccaggtgagaaga

SEQ ID NO: 1221051 - DNA, 15 bp, Homo sapiens
cacccaggtgagaag

SEQ ID NO: 1221052 - DNA, 15 bp, Homo sapiens
ccacccaggtgagaa

SEQ ID NO: 1221053 - DNA, 15 bp, Homo sapiens
gccacccaggtgaga

SEQ ID NO: 1221054 - DNA, 15 bp, Homo sapiens
agccacccaggtgag

SEQ ID NO: 1221055 - DNA, 15 bp, Homo sapiens
aagccacccaggtga

SEQ ID NO: 1221056 - DNA, 15 bp, Homo sapiens
gaagccacccaggtg

SEQ ID NO: 1221057 - DNA, 15 bp, Homo sapiens
cgaagccacccaggt

SEQ ID NO: 1221058 - DNA, 15 bp, Homo sapiens
ccgaagccacccagg

SEQ ID NO: 1221059 - DNA, 15 bp, Homo sapiens
tccgaagccacccag

SEQ ID NO: 1221060 - DNA, 15 bp, Homo sapiens
gtccgaagccaccca

SEQ ID NO: 1221061 - DNA, 15 bp, Homo sapiens
tgtccgaagccaccc

SEQ ID NO: 1221062 - DNA, 15 bp, Homo sapiens
gtgtccgaagccacc

SEQ ID NO: 1221063 - DNA, 15 bp, Homo sapiens
tgtgtccgaagccac

SEQ ID NO: 1221064 - DNA, 15 bp, Homo sapiens
ctgtgtccgaagcca

SEQ ID NO: 1221065 - DNA, 15 bp, Homo sapiens
cctgtgtccgaagcc

SEQ ID NO: 1221066 - DNA, 15 bp, Homo sapiens
ccctgtgtccgaagc

SEQ ID NO: 1221067 - DNA, 15 bp, Homo sapiens
accctgtgtccgaag

SEQ ID NO: 1221068 - DNA, 15 bp, Homo sapiens
caccctgtgtccgaa

SEQ ID NO: 1221069 - DNA, 15 bp, Homo sapiens
ccaccctgtgtccga

SEQ ID NO: 1221070 - DNA, 15 bp, Homo sapiens
tccaccctgtgtccg

SEQ ID NO: 1221071 - DNA, 15 bp, Homo sapiens
gtccaccctgtgtcc

SEQ ID NO: 1221072 - DNA, 15 bp, Homo sapiens
agtccaccctgtgtc

SEQ ID NO: 1221073 - DNA, 15 bp, Homo sapiens
gagtccaccctgtgt

SEQ ID NO: 1221074 - DNA, 15 bp, Homo sapiens
ggagtccaccctgtg

SEQ ID NO: 1221075 - DNA, 15 bp, Homo sapiens
aggagtccaccctgt

SEQ ID NO: 1221076 - DNA, 15 bp, Homo sapiens
gaggagtccaccctg

SEQ ID NO: 1221077 - DNA, 15 bp, Homo sapiens
tgaggagtccaccct

SEQ ID NO: 1221078 - DNA, 15 bp, Homo sapiens
ttgaggagtccaccc

SEQ ID NO: 1221079 - DNA, 15 bp, Homo sapiens
tttgaggagtccacc

SEQ ID NO: 1221080 - DNA, 15 bp, Homo sapiens
ctttgaggagtccac

SEQ ID NO: 1221081 - DNA, 15 bp, Homo sapiens
cctttgaggagtcca

SEQ ID NO: 1221082 - DNA, 15 bp, Homo sapiens
ccctttgaggagtcc

SEQ ID NO: 1221083 - DNA, 15 bp, Homo sapiens
cccctttgaggagtc

SEQ ID NO: 1221084 - DNA, 15 bp, Homo sapiens
gcccctttgaggagt

SEQ ID NO: 1221085 - DNA, 15 bp, Homo sapiens
agcccctttgaggag

SEQ ID NO: 1221086 - DNA, 15 bp, Homo sapiens
cagcccctttgagga

SEQ ID NO: 1221087 - DNA, 15 bp, Homo sapiens
gcagcccctttgagg

SEQ ID NO: 1221088 - DNA, 15 bp, Homo sapiens
agcagcccctttgag

SEQ ID NO: 1221089 - DNA, 15 bp, Homo sapiens
aagcagcccctttga

SEQ ID NO: 1221090 - DNA, 15 bp, Homo sapiens
gaagcagcccctttg

SEQ ID NO: 1221091 - DNA, 15 bp, Homo sapiens
ggaagcagccccttt

SEQ ID NO: 1221092 - DNA, 15 bp, Homo sapiens
gggaagcagcccctt

SEQ ID NO: 1221093 - DNA, 15 bp, Homo sapiens
tgggaagcagcccct

SEQ ID NO: 1221094 - DNA, 15 bp, Homo sapiens
atgggaagcagcccc

SEQ ID NO: 1221095 - DNA, 15 bp, Homo sapiens
gatgggaagcagccc

SEQ ID NO: 1221096 - DNA, 15 bp, Homo sapiens
agatgggaagcagcc

SEQ ID NO: 1221097 - DNA, 15 bp, Homo sapiens
cagatgggaagcagc

SEQ ID NO: 1221098 - DNA, 15 bp, Homo sapiens
tcagatgggaagcag

SEQ ID NO: 1221099 - DNA, 15 bp, Homo sapiens
ctcagatgggaagca

SEQ ID NO: 1221100 - DNA, 15 bp, Homo sapiens
tctcagatgggaagc

SEQ ID NO: 1221101 - DNA, 15 bp, Homo sapiens
ttctcagatgggaag

SEQ ID NO: 1221102 - DNA, 15 bp, Homo sapiens
cttctcagatgggaa

SEQ ID NO: 1221103 - DNA, 15 bp, Homo sapiens
gcttctcagatggga

SEQ ID NO: 1221104 - DNA, 15 bp, Homo sapiens
ggcttctcagatggg

SEQ ID NO: 1221105 - DNA, 15 bp, Homo sapiens
tggcttctcagatgg

SEQ ID NO: 1221106 - DNA, 15 bp, Homo sapiens
ctggcttctcagatg

SEQ ID NO: 1221107 - DNA, 15 bp, Homo sapiens
gctggcttctcagat

SEQ ID NO: 1221108 - DNA, 15 bp, Homo sapiens
tgctggcttctcaga

SEQ ID NO: 1221109 - DNA, 15 bp, Homo sapiens
atgctggcttctcag

SEQ ID NO: 1221110 - DNA, 15 bp, Homo sapiens
tatgctggcttctca

SEQ ID NO: 1221111 - DNA, 15 bp, Homo sapiens
ttatgctggcttctc

SEQ ID NO: 1221112 - DNA, 15 bp, Homo sapiens
attatgctggcttct

SEQ ID NO: 1221113 - DNA, 15 bp, Homo sapiens
gattatgctggcttc

SEQ ID NO: 1221114 - DNA, 15 bp, Homo sapiens
ggattatgctggctt

SEQ ID NO: 1221115 - DNA, 15 bp, Homo sapiens
aggattatgctggct

SEQ ID NO: 1221116 - DNA, 15 bp, Homo sapiens
gaggattatgctggc

SEQ ID NO: 1221117 - DNA, 15 bp, Homo sapiens
ggaggattatgctgg

SEQ ID NO: 1221118 - DNA, 15 bp, Homo sapiens
tggaggattatgctg

SEQ ID NO: 1221119 - DNA, 15 bp, Homo sapiens
ctggaggattatgct

SEQ ID NO: 1221120 - DNA, 15 bp, Homo sapiens
cctggaggattatgc

SEQ ID NO: 1221121 - DNA, 15 bp, Homo sapiens
ccctggaggattatg

SEQ ID NO: 1221122 - DNA, 15 bp, Homo sapiens
cccctggaggattat

SEQ ID NO: 1221123 - DNA, 15 bp, Homo sapiens
gcccctggaggatta

SEQ ID NO: 1221124 - DNA, 15 bp, Homo sapiens
agcccctggaggatt

SEQ ID NO: 1221125 - DNA, 15 bp, Homo sapiens
tagcccctggaggat

SEQ ID NO: 1221126 - DNA, 15 bp, Homo sapiens
gtagcccctggagga

SEQ ID NO: 1221127 - DNA, 15 bp, Homo sapiens
agtagcccctggagg

SEQ ID NO: 1221128 - DNA, 15 bp, Homo sapiens
cagtagcccctggag

SEQ ID NO: 1221129 - DNA, 15 bp, Homo sapiens
tcagtagcccctgga

SEQ ID NO: 1221130 - DNA, 15 bp, Homo sapiens
atcagtagcccctgg

SEQ ID NO: 1221131 - DNA, 15 bp, Homo sapiens
tatcagtagcccctg

SEQ ID NO: 1221132 - DNA, 15 bp, Homo sapiens
atatcagtagcccct

SEQ ID NO: 1221133 - DNA, 15 bp, Homo sapiens
tatatcagtagcccc

SEQ ID NO: 1221134 - DNA, 15 bp, Homo sapiens
gtatatcagtagccc

SEQ ID NO: 1221135 - DNA, 15 bp, Homo sapiens
tgtatatcagtagcc

SEQ ID NO: 1221136 - DNA, 15 bp, Homo sapiens
gtgtatatcagtagc

SEQ ID NO: 1221137 - DNA, 15 bp, Homo sapiens
tgtgtatatcagtag

SEQ ID NO: 1221138 - DNA, 15 bp, Homo sapiens
gtgtgtatatcagta

SEQ ID NO: 1221139 - DNA, 15 bp, Homo sapiens
cgtgtgtatatcagt

SEQ ID NO: 1221140 - DNA, 15 bp, Homo sapiens
gcgtgtgtatatcag

SEQ ID NO: 1221141 - DNA, 15 bp, Homo sapiens
agcgtgtgtatatca

SEQ ID NO: 1221142 - DNA, 15 bp, Homo sapiens
cagcgtgtgtatatc

SEQ ID NO: 1221143 - DNA, 15 bp, Homo sapiens
gcagcgtgtgtatat

SEQ ID NO: 1221144 - DNA, 15 bp, Homo sapiens
ggcagcgtgtgtata

SEQ ID NO: 1221145 - DNA, 15 bp, Homo sapiens
gggcagcgtgtgtat

SEQ ID NO: 1221146 - DNA, 15 bp, Homo sapiens
ggggcagcgtgtgta

SEQ ID NO: 1221147 - DNA, 15 bp, Homo sapiens
aggggcagcgtgtgt

SEQ ID NO: 1221148 - DNA, 15 bp, Homo sapiens
caggggcagcgtgtg

SEQ ID NO: 1221149 - DNA, 15 bp, Homo sapiens
ccaggggcagcgtgt

SEQ ID NO: 1221150 - DNA, 15 bp, Homo sapiens
accaggggcagcgtg

SEQ ID NO: 1221151 - DNA, 15 bp, Homo sapiens
gaccaggggcagcgt

SEQ ID NO: 1221152 - DNA, 15 bp, Homo sapiens
ggaccaggggcagcg

SEQ ID NO: 1221153 - DNA, 15 bp, Homo sapiens
aggaccaggggcagc

SEQ ID NO: 1221154 - DNA, 15 bp, Homo sapiens
caggaccaggggcag

SEQ ID NO: 1221155 - DNA, 15 bp, Homo sapiens
tcaggaccaggggca

SEQ ID NO: 1221156 - DNA, 15 bp, Homo sapiens
ctcaggaccaggggc

SEQ ID NO: 1221157 - DNA, 15 bp, Homo sapiens
actcaggaccagggg

SEQ ID NO: 1221158 - DNA, 15 bp, Homo sapiens
aactcaggaccaggg

SEQ ID NO: 1221159 - DNA, 15 bp, Homo sapiens
taactcaggaccagg

SEQ ID NO: 1221160 - DNA, 15 bp, Homo sapiens
ctaactcaggaccag

SEQ ID NO: 1221161 - DNA, 15 bp, Homo sapiens
tctaactcaggacca

SEQ ID NO: 1221162 - DNA, 15 bp, Homo sapiens
atctaactcaggacc

SEQ ID NO: 1221163 - DNA, 15 bp, Homo sapiens
gatctaactcaggac

SEQ ID NO: 1221164 - DNA, 15 bp, Homo sapiens
tgatctaactcagga

SEQ ID NO: 1221165 - DNA, 15 bp, Homo sapiens
gtgatctaactcagg

SEQ ID NO: 1221166 - DNA, 15 bp, Homo sapiens
ggtgatctaactcag

SEQ ID NO: 1221167 - DNA, 15 bp, Homo sapiens
gggtgatctaactca

SEQ ID NO: 1221168 - DNA, 15 bp, Homo sapiens
agggtgatctaactc

SEQ ID NO: 1221169 - DNA, 15 bp, Homo sapiens
cagggtgatctaact

SEQ ID NO: 1221170 - DNA, 15 bp, Homo sapiens
gcagggtgatctaac

SEQ ID NO: 1221171 - DNA, 15 bp, Homo sapiens
ggcagggtgatctaa

SEQ ID NO: 1221172 - DNA, 15 bp, Homo sapiens
gggcagggtgatcta

SEQ ID NO: 1221173 - DNA, 15 bp, Homo sapiens
ggggcagggtgatct

SEQ ID NO: 1221174 - DNA, 15 bp, Homo sapiens
aggggcagggtgatc

SEQ ID NO: 1221175 - DNA, 15 bp, Homo sapiens
taggggcagggtgat

SEQ ID NO: 1221176 - DNA, 15 bp, Homo sapiens
ctaggggcagggtga

SEQ ID NO: 1221177 - DNA, 15 bp, Homo sapiens
cctaggggcagggtg

SEQ ID NO: 1221178 - DNA, 15 bp, Homo sapiens
ccctaggggcagggt

SEQ ID NO: 1221179 - DNA, 15 bp, Homo sapiens
tccctaggggcaggg

SEQ ID NO: 1221180 - DNA, 15 bp, Homo sapiens
ctccctaggggcagg

SEQ ID NO: 1221181 - DNA, 15 bp, Homo sapiens
cctccctaggggcag

SEQ ID NO: 1221182 - DNA, 15 bp, Homo sapiens
ccctccctaggggca

SEQ ID NO: 1221183 - DNA, 15 bp, Homo sapiens
gccctccctaggggc

SEQ ID NO: 1221184 - DNA, 15 bp, Homo sapiens
agccctccctagggg

SEQ ID NO: 1221185 - DNA, 15 bp, Homo sapiens
aagccctccctaggg

SEQ ID NO: 1221186 - DNA, 15 bp, Homo sapiens
caagccctccctagg

SEQ ID NO: 1221187 - DNA, 15 bp, Homo sapiens
ccaagccctccctag

SEQ ID NO: 1221188 - DNA, 15 bp, Homo sapiens
cccaagccctcccta

SEQ ID NO: 1221189 - DNA, 15 bp, Homo sapiens
ccccaagccctccct

SEQ ID NO: 1221190 - DNA, 15 bp, Homo sapiens
cccccaagccctccc

SEQ ID NO: 1221191 - DNA, 15 bp, Homo sapiens
gcccccaagccctcc

SEQ ID NO: 1221192 - DNA, 15 bp, Homo sapiens
agcccccaagccctc

SEQ ID NO: 1221193 - DNA, 15 bp, Homo sapiens
aagcccccaagccct

SEQ ID NO: 1221194 - DNA, 15 bp, Homo sapiens
gaagcccccaagccc

SEQ ID NO: 1221195 - DNA, 15 bp, Homo sapiens
tgaagcccccaagcc

SEQ ID NO: 1221196 - DNA, 15 bp, Homo sapiens
gtgaagcccccaagc

SEQ ID NO: 1221197 - DNA, 15 bp, Homo sapiens
agtgaagcccccaag

SEQ ID NO: 1221198 - DNA, 15 bp, Homo sapiens
cagtgaagcccccaa

SEQ ID NO: 1221199 - DNA, 15 bp, Homo sapiens
gcagtgaagccccca

SEQ ID NO: 1221200 - DNA, 15 bp, Homo sapiens
agcagtgaagccccc

SEQ ID NO: 1221201 - DNA, 15 bp, Homo sapiens
cagcagtgaagcccc

SEQ ID NO: 1221202 - DNA, 15 bp, Homo sapiens
tcagcagtgaagccc

SEQ ID NO: 1221203 - DNA, 15 bp, Homo sapiens
ttcagcagtgaagcc

SEQ ID NO: 1221204 - DNA, 15 bp, Homo sapiens
cttcagcagtgaagc

SEQ ID NO: 1221205 - DNA, 15 bp, Homo sapiens
acttcagcagtgaag

SEQ ID NO: 1221206 - DNA, 15 bp, Homo sapiens
aacttcagcagtgaa

SEQ ID NO: 1221207 - DNA, 15 bp, Homo sapiens
gaacttcagcagtga

SEQ ID NO: 1221208 - DNA, 15 bp, Homo sapiens
tgaacttcagcagtg

SEQ ID NO: 1221209 - DNA, 15 bp, Homo sapiens
ctgaacttcagcagt

SEQ ID NO: 1221210 - DNA, 15 bp, Homo sapiens
tctgaacttcagcag

SEQ ID NO: 1221211 - DNA, 15 bp, Homo sapiens
gtctgaacttcagca

SEQ ID NO: 1221212 - DNA, 15 bp, Homo sapiens
agtctgaacttcagc

SEQ ID NO: 1221213 - DNA, 15 bp, Homo sapiens
gagtctgaacttcag

SEQ ID NO: 1221214 - DNA, 15 bp, Homo sapiens
ggagtctgaacttca

SEQ ID NO: 1221215 - DNA, 15 bp, Homo sapiens
tggagtctgaacttc

SEQ ID NO: 1221216 - DNA, 15 bp, Homo sapiens
ctggagtctgaactt

SEQ ID NO: 1221217 - DNA, 15 bp, Homo sapiens
cctggagtctgaact

SEQ ID NO: 1221218 - DNA, 15 bp, Homo sapiens
ccctggagtctgaac

SEQ ID NO: 1221219 - DNA, 15 bp, Homo sapiens
accctggagtctgaa

SEQ ID NO: 1221220 - DNA, 15 bp, Homo sapiens
caccctggagtctga

SEQ ID NO: 1221221 - DNA, 15 bp, Homo sapiens
ccaccctggagtctg

SEQ ID NO: 1221222 - DNA, 15 bp, Homo sapiens
accaccctggagtct

SEQ ID NO: 1221223 - DNA, 15 bp, Homo sapiens
gaccaccctggagtc

SEQ ID NO: 1221224 - DNA, 15 bp, Homo sapiens
ggaccaccctggagt

SEQ ID NO: 1221225 - DNA, 15 bp, Homo sapiens
aggaccaccctggag

SEQ ID NO: 1221226 - DNA, 15 bp, Homo sapiens
aaggaccaccctgga

SEQ ID NO: 1221227 - DNA, 15 bp, Homo sapiens
caaggaccaccctgg

SEQ ID NO: 1221228 - DNA, 15 bp, Homo sapiens
acaaggaccaccctg

SEQ ID NO: 1221229 - DNA, 15 bp, Homo sapiens
gacaaggaccaccct

SEQ ID NO: 1221230 - DNA, 15 bp, Homo sapiens
ggacaaggaccaccc

SEQ ID NO: 1221231 - DNA, 15 bp, Homo sapiens
aggacaaggaccacc

SEQ ID NO: 1221232 - DNA, 15 bp, Homo sapiens
caggacaaggaccac

SEQ ID NO: 1221233 - DNA, 15 bp, Homo sapiens
acaggacaaggacca

SEQ ID NO: 1221234 - DNA, 15 bp, Homo sapiens
cacaggacaaggacc

SEQ ID NO: 1221235 - DNA, 15 bp, Homo sapiens
acacaggacaaggac

SEQ ID NO: 1221236 - DNA, 15 bp, Homo sapiens
cacacaggacaagga

SEQ ID NO: 1221237 - DNA, 15 bp, Homo sapiens
gcacacaggacaagg

SEQ ID NO: 1221238 - DNA, 15 bp, Homo sapiens
ggcacacaggacaag

SEQ ID NO: 1221239 - DNA, 15 bp, Homo sapiens
aggcacacaggacaa

SEQ ID NO: 1221240 - DNA, 15 bp, Homo sapiens
gaggcacacaggaca

SEQ ID NO: 1221241 - DNA, 15 bp, Homo sapiens
tgaggcacacaggac

SEQ ID NO: 1221242 - DNA, 15 bp, Homo sapiens
tacagatggggaaac

SEQ ID NO: 1221243 - DNA, 15 bp, Homo sapiens
tttacagatggggaa

SEQ ID NO: 1221244 - DNA, 15 bp, Homo sapiens
ttttacagatgggga

SEQ ID NO: 1221245 - DNA, 15 bp, Homo sapiens
attttacagatgggg

SEQ ID NO: 1221246 - DNA, 15 bp, Homo sapiens
cattttacagatggg

SEQ ID NO: 1221247 - DNA, 15 bp, Homo sapiens
ccattttacagatgg

SEQ ID NO: 1221248 - DNA, 15 bp, Homo sapiens
tccattttacagatg

SEQ ID NO: 1221249 - DNA, 15 bp, Homo sapiens
atccattttacagat

SEQ ID NO: 1221250 - DNA, 15 bp, Homo sapiens
catccattttacaga

SEQ ID NO: 1221251 - DNA, 15 bp, Homo sapiens
ccatccattttacag

SEQ ID NO: 1221252 - DNA, 15 bp, Homo sapiens
accatccattttaca

SEQ ID NO: 1221253 - DNA, 15 bp, Homo sapiens
gaccatccattttac

SEQ ID NO: 1221254 - DNA, 15 bp, Homo sapiens
ggaccatccatttta

SEQ ID NO: 1221255 - DNA, 15 bp, Homo sapiens
aggaccatccatttt

SEQ ID NO: 1221256 - DNA, 15 bp, Homo sapiens
caggaccatccattt

SEQ ID NO: 1221257 - DNA, 15 bp, Homo sapiens
ccaggaccatccatt

SEQ ID NO: 1221258 - DNA, 15 bp, Homo sapiens
cccaggaccatccat

SEQ ID NO: 1221259 - DNA, 15 bp, Homo sapiens
ccccaggaccatcca

SEQ ID NO: 1221260 - DNA, 15 bp, Homo sapiens
gccccaggaccatcc

SEQ ID NO: 1221261 - DNA, 15 bp, Homo sapiens
agccccaggaccatc

SEQ ID NO: 1221262 - DNA, 15 bp, Homo sapiens
cagccccaggaccat

SEQ ID NO: 1221263 - DNA, 15 bp, Homo sapiens
tcagccccaggacca

SEQ ID NO: 1221264 - DNA, 15 bp, Homo sapiens
ctcagccccaggacc

SEQ ID NO: 1221265 - DNA, 15 bp, Homo sapiens
gctcagccccaggac

SEQ ID NO: 1221266 - DNA, 15 bp, Homo sapiens
ggctcagccccagga

SEQ ID NO: 1221267 - DNA, 15 bp, Homo sapiens
aggctcagccccagg

SEQ ID NO: 1221268 - DNA, 15 bp, Homo sapiens
gaggctcagccccag

SEQ ID NO: 1221269 - DNA, 15 bp, Homo sapiens
tgaggctcagcccca

SEQ ID NO: 1221270 - DNA, 15 bp, Homo sapiens
ctgaggctcagcccc

SEQ ID NO: 1221271 - DNA, 15 bp, Homo sapiens
actgaggctcagccc

SEQ ID NO: 1221272 - DNA, 15 bp, Homo sapiens
cactgaggctcagcc

SEQ ID NO: 1221273 - DNA, 15 bp, Homo sapiens
gcactgaggctcagc

SEQ ID NO: 1221274 - DNA, 15 bp, Homo sapiens
agcactgaggctcag

SEQ ID NO: 1221275 - DNA, 15 bp, Homo sapiens
cagcactgaggctca

SEQ ID NO: 1221276 - DNA, 15 bp, Homo sapiens
gcagcactgaggctc

SEQ ID NO: 1221277 - DNA, 15 bp, Homo sapiens
tgcagcactgaggct

SEQ ID NO: 1221278 - DNA, 15 bp, Homo sapiens
ctgcagcactgaggc

SEQ ID NO: 1221279 - DNA, 15 bp, Homo sapiens
cctgcagcactgagg

SEQ ID NO: 1221280 - DNA, 15 bp, Homo sapiens
ccctgcagcactgag

SEQ ID NO: 1221281 - DNA, 15 bp, Homo sapiens
tccctgcagcactga

SEQ ID NO: 1221282 - DNA, 15 bp, Homo sapiens
gtccctgcagcactg

SEQ ID NO: 1221283 - DNA, 15 bp, Homo sapiens
agtccctgcagcact

SEQ ID NO: 1221284 - DNA, 15 bp, Homo sapiens
tagtccctgcagcac

SEQ ID NO: 1221285 - DNA, 15 bp, Homo sapiens
ctagtccctgcagca

SEQ ID NO: 1221286 - DNA, 15 bp, Homo sapiens
actagtccctgcagc

SEQ ID NO: 1221287 - DNA, 15 bp, Homo sapiens
cactagtccctgcag

SEQ ID NO: 1221288 - DNA, 15 bp, Homo sapiens
acactagtccctgca

SEQ ID NO: 1221289 - DNA, 15 bp, Homo sapiens
cacactagtccctgc

SEQ ID NO: 1221290 - DNA, 15 bp, Homo sapiens
ccacactagtccctg

SEQ ID NO: 1221291 - DNA, 15 bp, Homo sapiens
tccacactagtccct

SEQ ID NO: 1221292 - DNA, 15 bp, Homo sapiens
ttccacactagtccc

SEQ ID NO: 1221293 - DNA, 15 bp, Homo sapiens
gttccacactagtcc

SEQ ID NO: 1221294 - DNA, 15 bp, Homo sapiens
ggttccacactagtc

SEQ ID NO: 1221295 - DNA, 15 bp, Homo sapiens
gggttccacactagt

SEQ ID NO: 1221296 - DNA, 15 bp, Homo sapiens
agggttccacactag

SEQ ID NO: 1221297 - DNA, 15 bp, Homo sapiens
cagggttccacacta

SEQ ID NO: 1221298 - DNA, 15 bp, Homo sapiens
acagggttccacact

SEQ ID NO: 1221299 - DNA, 15 bp, Homo sapiens
cacagggttccacac

SEQ ID NO: 1221300 - DNA, 15 bp, Homo sapiens
acacagggttccaca

SEQ ID NO: 1221301 - DNA, 15 bp, Homo sapiens
gacacagggttccac

SEQ ID NO: 1221302 - DNA, 15 bp, Homo sapiens
ggacacagggttcca

SEQ ID NO: 1221303 - DNA, 15 bp, Homo sapiens
aggacacagggttcc

SEQ ID NO: 1221304 - DNA, 15 bp, Homo sapiens
caggacacagggttc

SEQ ID NO: 1221305 - DNA, 15 bp, Homo sapiens
ccaggacacagggtt

SEQ ID NO: 1221306 - DNA, 15 bp, Homo sapiens
accaggacacagggt

SEQ ID NO: 1221307 - DNA, 15 bp, Homo sapiens
caccaggacacaggg

SEQ ID NO: 1221308 - DNA, 15 bp, Homo sapiens
gcaccaggacacagg

SEQ ID NO: 1221309 - DNA, 15 bp, Homo sapiens
ggcaccaggacacag

SEQ ID NO: 1221310 - DNA, 15 bp, Homo sapiens
aggcaccaggacaca

SEQ ID NO: 1221311 - DNA, 15 bp, Homo sapiens
caggcaccaggacac

SEQ ID NO: 1221312 - DNA, 15 bp, Homo sapiens
tcaggcaccaggaca

SEQ ID NO: 1221313 - DNA, 15 bp, Homo sapiens
ttcaggcaccaggac

SEQ ID NO: 1221314 - DNA, 15 bp, Homo sapiens
tttcaggcaccagga

SEQ ID NO: 1221315 - DNA, 15 bp, Homo sapiens
gtttcaggcaccagg

SEQ ID NO: 1221316 - DNA, 15 bp, Homo sapiens
ggtttcaggcaccag

SEQ ID NO: 1221317 - DNA, 15 bp, Homo sapiens
aggtttcaggcacca

SEQ ID NO: 1221318 - DNA, 15 bp, Homo sapiens
aaggtttcaggcacc

SEQ ID NO: 1221319 - DNA, 15 bp, Homo sapiens
taaggtttcaggcac

SEQ ID NO: 1221320 - DNA, 15 bp, Homo sapiens
gtaaggtttcaggca

SEQ ID NO: 1221321 - DNA, 15 bp, Homo sapiens
agtaaggtttcaggc

SEQ ID NO: 1221322 - DNA, 15 bp, Homo sapiens
gagtaaggtttcagg

SEQ ID NO: 1221323 - DNA, 15 bp, Homo sapiens
ggagtaaggtttcag

SEQ ID NO: 1221324 - DNA, 15 bp, Homo sapiens
gggagtaaggtttca

SEQ ID NO: 1221325 - DNA, 15 bp, Homo sapiens
tgggagtaaggtttc

SEQ ID NO: 1221326 - DNA, 15 bp, Homo sapiens
gtgggagtaaggttt

SEQ ID NO: 1221327 - DNA, 15 bp, Homo sapiens
ggtgggagtaaggtt

SEQ ID NO: 1221328 - DNA, 15 bp, Homo sapiens
aggtgggagtaaggt

SEQ ID NO: 1221329 - DNA, 15 bp, Homo sapiens
gaggtgggagtaagg

SEQ ID NO: 1221330 - DNA, 15 bp, Homo sapiens
tgaggtgggagtaag

SEQ ID NO: 1221331 - DNA, 15 bp, Homo sapiens
ctgaggtgggagtaa

SEQ ID NO: 1221332 - DNA, 15 bp, Homo sapiens
gctgaggtgggagta

SEQ ID NO: 1221333 - DNA, 15 bp, Homo sapiens
tgctgaggtgggagt

SEQ ID NO: 1221334 - DNA, 15 bp, Homo sapiens
ctgctgaggtgggag

SEQ ID NO: 1221335 - DNA, 15 bp, Homo sapiens
cctgctgaggtggga

SEQ ID NO: 1221336 - DNA, 15 bp, Homo sapiens
ccctgctgaggtggg

SEQ ID NO: 1221337 - DNA, 15 bp, Homo sapiens
gccctgctgaggtgg

SEQ ID NO: 1221338 - DNA, 15 bp, Homo sapiens
agccctgctgaggtg

SEQ ID NO: 1221339 - DNA, 15 bp, Homo sapiens
cagccctgctgaggt

SEQ ID NO: 1221340 - DNA, 15 bp, Homo sapiens
ccagccctgctgagg

SEQ ID NO: 1221341 - DNA, 15 bp, Homo sapiens
cccagccctgctgag

SEQ ID NO: 1221342 - DNA, 15 bp, Homo sapiens
gcccagccctgctga

SEQ ID NO: 1221343 - DNA, 15 bp, Homo sapiens
agcccagccctgctg

SEQ ID NO: 1221344 - DNA, 15 bp, Homo sapiens
cagcccagccctgct

SEQ ID NO: 1221345 - DNA, 15 bp, Homo sapiens
tcagcccagccctgc

SEQ ID NO: 1221346 - DNA, 15 bp, Homo sapiens
ctcagcccagccctg

SEQ ID NO: 1221347 - DNA, 15 bp, Homo sapiens
gctcagcccagccct

SEQ ID NO: 1221348 - DNA, 15 bp, Homo sapiens
ggctcagcccagccc

SEQ ID NO: 1221349 - DNA, 15 bp, Homo sapiens
tggctcagcccagcc

SEQ ID NO: 1221350 - DNA, 15 bp, Homo sapiens
atggctcagcccagc

SEQ ID NO: 1221351 - DNA, 15 bp, Homo sapiens
gatggctcagcccag

SEQ ID NO: 1221352 - DNA, 15 bp, Homo sapiens
tgatggctcagccca

SEQ ID NO: 1221353 - DNA, 15 bp, Homo sapiens
ctgatggctcagccc

SEQ ID NO: 1221354 - DNA, 15 bp, Homo sapiens
gctgatggctcagcc

SEQ ID NO: 1221355 - DNA, 15 bp, Homo sapiens
tgctgatggctcagc

SEQ ID NO: 1221356 - DNA, 15 bp, Homo sapiens
ttgctgatggctcag

SEQ ID NO: 1221357 - DNA, 15 bp, Homo sapiens
cttgctgatggctca

SEQ ID NO: 1221358 - DNA, 15 bp, Homo sapiens
gcttgctgatggctc

SEQ ID NO: 1221359 - DNA, 15 bp, Homo sapiens
ggcttgctgatggct

SEQ ID NO: 1221360 - DNA, 15 bp, Homo sapiens
aggcttgctgatggc

SEQ ID NO: 1221361 - DNA, 15 bp, Homo sapiens
gaggcttgctgatgg

SEQ ID NO: 1221362 - DNA, 15 bp, Homo sapiens
agaggcttgctgatg

SEQ ID NO: 1221363 - DNA, 15 bp, Homo sapiens
cagaggcttgctgat

SEQ ID NO: 1221364 - DNA, 15 bp, Homo sapiens
ccagaggcttgctga

SEQ ID NO: 1221365 - DNA, 15 bp, Homo sapiens
gccagaggcttgctg

SEQ ID NO: 1221366 - DNA, 15 bp, Homo sapiens
ggccagaggcttgct

SEQ ID NO: 1221367 - DNA, 15 bp, Homo sapiens
cggccagaggcttgc

SEQ ID NO: 1221368 - DNA, 15 bp, Homo sapiens
ccggccagaggcttg

SEQ ID NO: 1221369 - DNA, 15 bp, Homo sapiens
gccggccagaggctt

SEQ ID NO: 1221370 - DNA, 15 bp, Homo sapiens
ggccggccagaggct

SEQ ID NO: 1221371 - DNA, 15 bp, Homo sapiens
aggccggccagaggc

SEQ ID NO: 1221372 - DNA, 15 bp, Homo sapiens
gaggccggccagagg

SEQ ID NO: 1221373 - DNA, 15 bp, Homo sapiens
ggaggccggccagag

SEQ ID NO: 1221374 - DNA, 15 bp, Homo sapiens
tggaggccggccaga

SEQ ID NO: 1221375 - DNA, 15 bp, Homo sapiens
atggaggccggccag

SEQ ID NO: 1221376 - DNA, 15 bp, Homo sapiens
gatggaggccggcca

SEQ ID NO: 1221377 - DNA, 15 bp, Homo sapiens
tgatggaggccggcc

SEQ ID NO: 1221378 - DNA, 15 bp, Homo sapiens
atgatggaggccggc

SEQ ID NO: 1221379 - DNA, 15 bp, Homo sapiens
aatgatggaggccgg

SEQ ID NO: 1221380 - DNA, 15 bp, Homo sapiens
gaatgatggaggccg

SEQ ID NO: 1221381 - DNA, 15 bp, Homo sapiens
tgaatgatggaggcc

SEQ ID NO: 1221382 - DNA, 15 bp, Homo sapiens
ctgaatgatggaggc

SEQ ID NO: 1221383 - DNA, 15 bp, Homo sapiens
cctgaatgatggagg

SEQ ID NO: 1221384 - DNA, 15 bp, Homo sapiens
tcctgaatgatggag

SEQ ID NO: 1221385 - DNA, 15 bp, Homo sapiens
ttcctgaatgatgga

SEQ ID NO: 1221386 - DNA, 15 bp, Homo sapiens
tttcctgaatgatgg

SEQ ID NO: 1221387 - DNA, 15 bp, Homo sapiens
ctttcctgaatgatg

SEQ ID NO: 1221388 - DNA, 15 bp, Homo sapiens
tctttcctgaatgat

SEQ ID NO: 1221389 - DNA, 15 bp, Homo sapiens
ctctttcctgaatga

SEQ ID NO: 1221390 - DNA, 15 bp, Homo sapiens
gctctttcctgaatg

SEQ ID NO: 1221391 - DNA, 15 bp, Homo sapiens
ggctctttcctgaat

SEQ ID NO: 1221392 - DNA, 15 bp, Homo sapiens
cggctctttcctgaa

SEQ ID NO: 1221393 - DNA, 15 bp, Homo sapiens
ccggctctttcctga

SEQ ID NO: 1221394 - DNA, 15 bp, Homo sapiens
accggctctttcctg

SEQ ID NO: 1221395 - DNA, 15 bp, Homo sapiens
caccggctctttcct

SEQ ID NO: 1221396 - DNA, 15 bp, Homo sapiens
ccaccggctctttcc

SEQ ID NO: 1221397 - DNA, 15 bp, Homo sapiens
gccaccggctctttc

SEQ ID NO: 1221398 - DNA, 15 bp, Homo sapiens
agccaccggctcttt

SEQ ID NO: 1221399 - DNA, 15 bp, Homo sapiens
cagccaccggctctt

SEQ ID NO: 1221400 - DNA, 15 bp, Homo sapiens
tcagccaccggctct

SEQ ID NO: 1221401 - DNA, 15 bp, Homo sapiens
ttcagccaccggctc

SEQ ID NO: 1221402 - DNA, 15 bp, Homo sapiens
cttcagccaccggct

SEQ ID NO: 1221403 - DNA, 15 bp, Homo sapiens
ccttcagccaccggc

SEQ ID NO: 1221404 - DNA, 15 bp, Homo sapiens
gccttcagccaccgg

SEQ ID NO: 1221405 - DNA, 15 bp, Homo sapiens
tgccttcagccaccg

SEQ ID NO: 1221406 - DNA, 15 bp, Homo sapiens
gtgccttcagccacc

SEQ ID NO: 1221407 - DNA, 15 bp, Homo sapiens
tgtgccttcagccac

SEQ ID NO: 1221408 - DNA, 15 bp, Homo sapiens
ctgtgccttcagcca

SEQ ID NO: 1221409 - DNA, 15 bp, Homo sapiens
gctgtgccttcagcc

SEQ ID NO: 1221410 - DNA, 15 bp, Homo sapiens
agctgtgccttcagc

SEQ ID NO: 1221411 - DNA, 15 bp, Homo sapiens
gagctgtgccttcag

SEQ ID NO: 1221412 - DNA, 15 bp, Homo sapiens
agagctgtgccttca

SEQ ID NO: 1221413 - DNA, 15 bp, Homo sapiens
gagagctgtgccttc

SEQ ID NO: 1221414 - DNA, 15 bp, Homo sapiens
tgagagctgtgcctt

SEQ ID NO: 1221415 - DNA, 15 bp, Homo sapiens
ctgagagctgtgcct

SEQ ID NO: 1221416 - DNA, 15 bp, Homo sapiens
tctgagagctgtgcc

SEQ ID NO: 1221417 - DNA, 15 bp, Homo sapiens
ctctgagagctgtgc

SEQ ID NO: 1221418 - DNA, 15 bp, Homo sapiens
cctctgagagctgtg

SEQ ID NO: 1221419 - DNA, 15 bp, Homo sapiens
ccctctgagagctgt

SEQ ID NO: 1221420 - DNA, 15 bp, Homo sapiens
tccctctgagagctg

SEQ ID NO: 1221421 - DNA, 15 bp, Homo sapiens
ctccctctgagagct

SEQ ID NO: 1221422 - DNA, 15 bp, Homo sapiens
tctccctctgagagc

SEQ ID NO: 1221423 - DNA, 15 bp, Homo sapiens
ttctccctctgagag

SEQ ID NO: 1221424 - DNA, 15 bp, Homo sapiens
gttctccctctgaga

SEQ ID NO: 1221425 - DNA, 15 bp, Homo sapiens
tgttctccctctgag

SEQ ID NO: 1221426 - DNA, 15 bp, Homo sapiens
ttgttctccctctga

SEQ ID NO: 1221427 - DNA, 15 bp, Homo sapiens
tttgttctccctctg

SEQ ID NO: 1221428 - DNA, 15 bp, Homo sapiens
gtttgttctccctct

SEQ ID NO: 1221429 - DNA, 15 bp, Homo sapiens
cgtttgttctccctc

SEQ ID NO: 1221430 - DNA, 15 bp, Homo sapiens
ccgtttgttctccct

SEQ ID NO: 1221431 - DNA, 15 bp, Homo sapiens
cccgtttgttctccc

SEQ ID NO: 1221432 - DNA, 15 bp, Homo sapiens
ccccgtttgttctcc

SEQ ID NO: 1221433 - DNA, 15 bp, Homo sapiens
cccccgtttgttctc

SEQ ID NO: 1221434 - DNA, 15 bp, Homo sapiens
gcccccgtttgttct

SEQ ID NO: 1221435 - DNA, 15 bp, Homo sapiens
cgcccccgtttgttc

SEQ ID NO: 1221436 - DNA, 15 bp, Homo sapiens
ccgcccccgtttgtt

SEQ ID NO: 1221437 - DNA, 15 bp, Homo sapiens
cccgcccccgtttgt

SEQ ID NO: 1221438 - DNA, 15 bp, Homo sapiens
ccccgcccccgtttg

SEQ ID NO: 1221439 - DNA, 15 bp, Homo sapiens
cccccgcccccgttt

SEQ ID NO: 1221440 - DNA, 15 bp, Homo sapiens
acccccgcccccgtt

SEQ ID NO: 1221441 - DNA, 15 bp, Homo sapiens
cacccccgcccccgt

SEQ ID NO: 1221442 - DNA, 15 bp, Homo sapiens
ccacccccgcccccg

SEQ ID NO: 1221443 - DNA, 15 bp, Homo sapiens
cccacccccgccccc

SEQ ID NO: 1221444 - DNA, 15 bp, Homo sapiens
tcccacccccgcccc

SEQ ID NO: 1221445 - DNA, 15 bp, Homo sapiens
atcccacccccgccc

SEQ ID NO: 1221446 - DNA, 15 bp, Homo sapiens
catcccacccccgcc

SEQ ID NO: 1221447 - DNA, 15 bp, Homo sapiens
ccatcccacccccgc

SEQ ID NO: 1221448 - DNA, 15 bp, Homo sapiens
cccatcccacccccg

SEQ ID NO: 1221449 - DNA, 15 bp, Homo sapiens
ccccatcccaccccc

SEQ ID NO: 1221450 - DNA, 15 bp, Homo sapiens
cccccatcccacccc

SEQ ID NO: 1221451 - DNA, 15 bp, Homo sapiens
gcccccatcccaccc

SEQ ID NO: 1221452 - DNA, 15 bp, Homo sapiens
cgcccccatcccacc

SEQ ID NO: 1221453 - DNA, 15 bp, Homo sapiens
ccgcccccatcccac

SEQ ID NO: 1221454 - DNA, 15 bp, Homo sapiens
cccgcccccatccca

SEQ ID NO: 1221455 - DNA, 15 bp, Homo sapiens
ccccgcccccatccc

SEQ ID NO: 1221456 - DNA, 15 bp, Homo sapiens
gccccgcccccatcc

SEQ ID NO: 1221457 - DNA, 15 bp, Homo sapiens
ggccccgcccccatc

SEQ ID NO: 1221458 - DNA, 15 bp, Homo sapiens
cggccccgcccccat

SEQ ID NO: 1221459 - DNA, 15 bp, Homo sapiens
ccggccccgccccca

SEQ ID NO: 1221460 - DNA, 15 bp, Homo sapiens
tccggccccgccccc

SEQ ID NO: 1221461 - DNA, 15 bp, Homo sapiens
ctccggccccgcccc

SEQ ID NO: 1221462 - DNA, 15 bp, Homo sapiens
cctccggccccgccc

SEQ ID NO: 1221463 - DNA, 15 bp, Homo sapiens
gcctccggccccgcc

SEQ ID NO: 1221464 - DNA, 15 bp, Homo sapiens
ggcctccggccccgc

SEQ ID NO: 1221465 - DNA, 15 bp, Homo sapiens
tggcctccggccccg

SEQ ID NO: 1221466 - DNA, 15 bp, Homo sapiens
gtggcctccggcccc

SEQ ID NO: 1221467 - DNA, 15 bp, Homo sapiens
ggtggcctccggccc

SEQ ID NO: 1221468 - DNA, 15 bp, Homo sapiens
cggtggcctccggcc

SEQ ID NO: 1221469 - DNA, 15 bp, Homo sapiens
ccggtggcctccggc

SEQ ID NO: 1221470 - DNA, 15 bp, Homo sapiens
gccggtggcctccgg

SEQ ID NO: 1221471 - DNA, 15 bp, Homo sapiens
ggccggtggcctccg

SEQ ID NO: 1221472 - DNA, 15 bp, Homo sapiens
aggccggtggcctcc

SEQ ID NO: 1221473 - DNA, 15 bp, Homo sapiens
gaggccggtggcctc

SEQ ID NO: 1221474 - DNA, 15 bp, Homo sapiens
tgaggccggtggcct

SEQ ID NO: 1221475 - DNA, 15 bp, Homo sapiens
ctgaggccggtggcc

SEQ ID NO: 1221476 - DNA, 15 bp, Homo sapiens
cctgaggccggtggc

SEQ ID NO: 1221477 - DNA, 15 bp, Homo sapiens
gcctgaggccggtgg

SEQ ID NO: 1221478 - DNA, 15 bp, Homo sapiens
agcctgaggccggtg

SEQ ID NO: 1221479 - DNA, 15 bp, Homo sapiens
cagcctgaggccggt

SEQ ID NO: 1221480 - DNA, 15 bp, Homo sapiens
acagcctgaggccgg

SEQ ID NO: 1221481 - DNA, 15 bp, Homo sapiens
gacagcctgaggccg

SEQ ID NO: 1221482 - DNA, 15 bp, Homo sapiens
ggacagcctgaggcc

SEQ ID NO: 1221483 - DNA, 15 bp, Homo sapiens
aggacagcctgaggc

SEQ ID NO: 1221484 - DNA, 15 bp, Homo sapiens
caggacagcctgagg

SEQ ID NO: 1221485 - DNA, 15 bp, Homo sapiens
ccaggacagcctgag

SEQ ID NO: 1221486 - DNA, 15 bp, Homo sapiens
cccaggacagcctga

SEQ ID NO: 1221487 - DNA, 15 bp, Homo sapiens
gcccaggacagcctg

SEQ ID NO: 1221488 - DNA, 15 bp, Homo sapiens
tgcccaggacagcct

SEQ ID NO: 1221489 - DNA, 15 bp, Homo sapiens
atgcccaggacagcc

SEQ ID NO: 1221490 - DNA, 15 bp, Homo sapiens
gatgcccaggacagc

SEQ ID NO: 1221491 - DNA, 15 bp, Homo sapiens
ggatgcccaggacag

SEQ ID NO: 1221492 - DNA, 15 bp, Homo sapiens
tggatgcccaggaca

SEQ ID NO: 1221493 - DNA, 15 bp, Homo sapiens
ctggatgcccaggac

SEQ ID NO: 1221494 - DNA, 15 bp, Homo sapiens
gctggatgcccagga

SEQ ID NO: 1221495 - DNA, 15 bp, Homo sapiens
ggctggatgcccagg

SEQ ID NO: 1221496 - DNA, 15 bp, Homo sapiens
tggctggatgcccag

SEQ ID NO: 1221497 - DNA, 15 bp, Homo sapiens
ctggctggatgccca

SEQ ID NO: 1221498 - DNA, 15 bp, Homo sapiens
actggctggatgccc

SEQ ID NO: 1221499 - DNA, 15 bp, Homo sapiens
cactggctggatgcc

SEQ ID NO: 1221500 - DNA, 15 bp, Homo sapiens
gcactggctggatgc

SEQ ID NO: 1221501 - DNA, 15 bp, Homo sapiens
agcactggctggatg

SEQ ID NO: 1221502 - DNA, 15 bp, Homo sapiens
cagcactggctggat

SEQ ID NO: 1221503 - DNA, 15 bp, Homo sapiens
ccagcactggctgga

SEQ ID NO: 1221504 - DNA, 15 bp, Homo sapiens
cccagcactggctgg

SEQ ID NO: 1221505 - DNA, 15 bp, Homo sapiens
gcccagcactggctg

SEQ ID NO: 1221506 - DNA, 15 bp, Homo sapiens
tgcccagcactggct

SEQ ID NO: 1221507 - DNA, 15 bp, Homo sapiens
ctgcccagcactggc

SEQ ID NO: 1221508 - DNA, 15 bp, Homo sapiens
actgcccagcactgg

SEQ ID NO: 1221509 - DNA, 15 bp, Homo sapiens
cactgcccagcactg

SEQ ID NO: 1221510 - DNA, 15 bp, Homo sapiens
tcactgcccagcact

SEQ ID NO: 1221511 - DNA, 15 bp, Homo sapiens
ctcactgcccagcac

SEQ ID NO: 1221512 - DNA, 15 bp, Homo sapiens
actcactgcccagca

SEQ ID NO: 1221513 - DNA, 15 bp, Homo sapiens
gactcactgcccagc

SEQ ID NO: 1221514 - DNA, 15 bp, Homo sapiens
tgactcactgcccag

SEQ ID NO: 1221515 - DNA, 15 bp, Homo sapiens
ctgactcactgccca

SEQ ID NO: 1221516 - DNA, 15 bp, Homo sapiens
cctgactcactgccc

SEQ ID NO: 1221517 - DNA, 15 bp, Homo sapiens
ccctgactcactgcc

SEQ ID NO: 1221518 - DNA, 15 bp, Homo sapiens
cccctgactcactgc

SEQ ID NO: 1221519 - DNA, 15 bp, Homo sapiens
gcccctgactcactg

SEQ ID NO: 1221520 - DNA, 15 bp, Homo sapiens
ggcccctgactcact

SEQ ID NO: 1221521 - DNA, 15 bp, Homo sapiens
tggcccctgactcac

SEQ ID NO: 1221522 - DNA, 15 bp, Homo sapiens
ctggcccctgactca

SEQ ID NO: 1221523 - DNA, 15 bp, Homo sapiens
cctggcccctgactc

SEQ ID NO: 1221524 - DNA, 15 bp, Homo sapiens
gcctggcccctgact

SEQ ID NO: 1221525 - DNA, 15 bp, Homo sapiens
tgcctggcccctgac

SEQ ID NO: 1221526 - DNA, 15 bp, Homo sapiens
atgcctggcccctga

SEQ ID NO: 1221527 - DNA, 15 bp, Homo sapiens
catgcctggcccctg

SEQ ID NO: 1221528 - DNA, 15 bp, Homo sapiens
acatgcctggcccct

SEQ ID NO: 1221529 - DNA, 15 bp, Homo sapiens
cacatgcctggcccc

SEQ ID NO: 1221530 - DNA, 15 bp, Homo sapiens
ccacatgcctggccc

SEQ ID NO: 1221531 - DNA, 15 bp, Homo sapiens
tccacatgcctggcc

SEQ ID NO: 1221532 - DNA, 15 bp, Homo sapiens
ctccacatgcctggc

SEQ ID NO: 1221533 - DNA, 15 bp, Homo sapiens
actccacatgcctgg

SEQ ID NO: 1221534 - DNA, 15 bp, Homo sapiens
cactccacatgcctg

SEQ ID NO: 1221535 - DNA, 15 bp, Homo sapiens
ccactccacatgcct

SEQ ID NO: 1221536 - DNA, 15 bp, Homo sapiens
cccactccacatgcc

SEQ ID NO: 1221537 - DNA, 15 bp, Homo sapiens
ccccactccacatgc

SEQ ID NO: 1221538 - DNA, 15 bp, Homo sapiens
gccccactccacatg

SEQ ID NO: 1221539 - DNA, 15 bp, Homo sapiens
ggccccactccacat

SEQ ID NO: 1221540 - DNA, 15 bp, Homo sapiens
aggccccactccaca

SEQ ID NO: 1221541 - DNA, 15 bp, Homo sapiens
gaggccccactccac

SEQ ID NO: 1221542 - DNA, 15 bp, Homo sapiens
agaggccccactcca

SEQ ID NO: 1221543 - DNA, 15 bp, Homo sapiens
gagaggccccactcc

SEQ ID NO: 1221544 - DNA, 15 bp, Homo sapiens
ggagaggccccactc

SEQ ID NO: 1221545 - DNA, 15 bp, Homo sapiens
gggagaggccccact

SEQ ID NO: 1221546 - DNA, 15 bp, Homo sapiens
tgggagaggccccac

SEQ ID NO: 1221547 - DNA, 15 bp, Homo sapiens
ctgggagaggcccca

SEQ ID NO: 1221548 - DNA, 15 bp, Homo sapiens
gctgggagaggcccc

SEQ ID NO: 1221549 - DNA, 15 bp, Homo sapiens
ggctgggagaggccc

SEQ ID NO: 1221550 - DNA, 15 bp, Homo sapiens
gggctgggagaggcc

SEQ ID NO: 1221551 - DNA, 15 bp, Homo sapiens
ggggctgggagaggc

SEQ ID NO: 1221552 - DNA, 15 bp, Homo sapiens
cggggctgggagagg

SEQ ID NO: 1221553 - DNA, 15 bp, Homo sapiens
ccggggctgggagag

SEQ ID NO: 1221554 - DNA, 15 bp, Homo sapiens
tccggggctgggaga

SEQ ID NO: 1221555 - DNA, 15 bp, Homo sapiens
ctccggggctgggag

SEQ ID NO: 1221556 - DNA, 15 bp, Homo sapiens
tctccggggctggga

SEQ ID NO: 1221557 - DNA, 15 bp, Homo sapiens
atctccggggctggg

SEQ ID NO: 1221558 - DNA, 15 bp, Homo sapiens
gatctccggggctgg

SEQ ID NO: 1221559 - DNA, 15 bp, Homo sapiens
tgatctccggggctg

SEQ ID NO: 1221560 - DNA, 15 bp, Homo sapiens
ctgatctccggggct

SEQ ID NO: 1221561 - DNA, 15 bp, Homo sapiens
cctgatctccggggc

SEQ ID NO: 1221562 - DNA, 15 bp, Homo sapiens
gcctgatctccgggg

SEQ ID NO: 1221563 - DNA, 15 bp, Homo sapiens
tgcctgatctccggg

SEQ ID NO: 1221564 - DNA, 15 bp, Homo sapiens
gtgcctgatctccgg

SEQ ID NO: 1221565 - DNA, 15 bp, Homo sapiens
ggtgcctgatctccg

SEQ ID NO: 1221566 - DNA, 15 bp, Homo sapiens
aggtgcctgatctcc

SEQ ID NO: 1221567 - DNA, 15 bp, Homo sapiens
gaggtgcctgatctc

SEQ ID NO: 1221568 - DNA, 15 bp, Homo sapiens
ggaggtgcctgatct

SEQ ID NO: 1221569 - DNA, 15 bp, Homo sapiens
gggaggtgcctgatc

SEQ ID NO: 1221570 - DNA, 15 bp, Homo sapiens
cgggaggtgcctgat

SEQ ID NO: 1221571 - DNA, 15 bp, Homo sapiens
ccgggaggtgcctga

SEQ ID NO: 1221572 - DNA, 15 bp, Homo sapiens
tccgggaggtgcctg

SEQ ID NO: 1221573 - DNA, 15 bp, Homo sapiens
ttccgggaggtgcct

SEQ ID NO: 1221574 - DNA, 15 bp, Homo sapiens
gttccgggaggtgcc

SEQ ID NO: 1221575 - DNA, 15 bp, Homo sapiens
ggttccgggaggtgc

SEQ ID NO: 1221576 - DNA, 15 bp, Homo sapiens
gggttccgggaggtg

SEQ ID NO: 1221577 - DNA, 15 bp, Homo sapiens
cgggttccgggaggt

SEQ ID NO: 1221578 - DNA, 15 bp, Homo sapiens
gcgggttccgggagg

SEQ ID NO: 1221579 - DNA, 15 bp, Homo sapiens
ggcgggttccgggag

SEQ ID NO: 1221580 - DNA, 15 bp, Homo sapiens
aggcgggttccggga

SEQ ID NO: 1221581 - DNA, 15 bp, Homo sapiens
caggcgggttccggg

SEQ ID NO: 1221582 - DNA, 15 bp, Homo sapiens
gcaggcgggttccgg

SEQ ID NO: 1221583 - DNA, 15 bp, Homo sapiens
agcaggcgggttccg

SEQ ID NO: 1221584 - DNA, 15 bp, Homo sapiens
cagcaggcgggttcc

SEQ ID NO: 1221585 - DNA, 15 bp, Homo sapiens
ccagcaggcgggttc

SEQ ID NO: 1221586 - DNA, 15 bp, Homo sapiens
cccagcaggcgggtt

SEQ ID NO: 1221587 - DNA, 15 bp, Homo sapiens
gcccagcaggcgggt

SEQ ID NO: 1221588 - DNA, 15 bp, Homo sapiens
ggcccagcaggcggg

SEQ ID NO: 1221589 - DNA, 15 bp, Homo sapiens
gggcccagcaggcgg

SEQ ID NO: 1221590 - DNA, 15 bp, Homo sapiens
ggggcccagcaggcg

SEQ ID NO: 1221591 - DNA, 15 bp, Homo sapiens
gggggcccagcaggc

SEQ ID NO: 1221592 - DNA, 15 bp, Homo sapiens
tgggggcccagcagg

SEQ ID NO: 1221593 - DNA, 15 bp, Homo sapiens
gtgggggcccagcag

SEQ ID NO: 1221594 - DNA, 15 bp, Homo sapiens
ggtgggggcccagca

SEQ ID NO: 1221595 - DNA, 15 bp, Homo sapiens
tggtgggggcccagc

SEQ ID NO: 1221596 - DNA, 15 bp, Homo sapiens
ctggtgggggcccag

SEQ ID NO: 1221597 - DNA, 15 bp, Homo sapiens
cctggtgggggccca

SEQ ID NO: 1221598 - DNA, 15 bp, Homo sapiens
gcctggtgggggccc

SEQ ID NO: 1221599 - DNA, 15 bp, Homo sapiens
ggcctggtgggggcc

SEQ ID NO: 1221600 - DNA, 15 bp, Homo sapiens
cggcctggtgggggc

SEQ ID NO: 1221601 - DNA, 15 bp, Homo sapiens
gcggcctggtggggg

SEQ ID NO: 1221602 - DNA, 15 bp, Homo sapiens
cgcggcctggtgggg

SEQ ID NO: 1221603 - DNA, 15 bp, Homo sapiens
acgcggcctggtggg

SEQ ID NO: 1221604 - DNA, 15 bp, Homo sapiens
aacgcggcctggtgg

SEQ ID NO: 1221605 - DNA, 15 bp, Homo sapiens
gaacgcggcctggtg

SEQ ID NO: 1221606 - DNA, 15 bp, Homo sapiens
ggaacgcggcctggt

SEQ ID NO: 1221607 - DNA, 15 bp, Homo sapiens
aggaacgcggcctgg

SEQ ID NO: 1221608 - DNA, 15 bp, Homo sapiens
gaggaacgcggcctg

SEQ ID NO: 1221609 - DNA, 15 bp, Homo sapiens
agaggaacgcggcct

SEQ ID NO: 1221610 - DNA, 15 bp, Homo sapiens
gagaggaacgcggcc

SEQ ID NO: 1221611 - DNA, 15 bp, Homo sapiens
ggagaggaacgcggc

SEQ ID NO: 1221612 - DNA, 15 bp, Homo sapiens
gggagaggaacgcgg

SEQ ID NO: 1221613 - DNA, 15 bp, Homo sapiens
tgggagaggaacgcg

SEQ ID NO: 1221614 - DNA, 15 bp, Homo sapiens
gtgggagaggaacgc

SEQ ID NO: 1221615 - DNA, 15 bp, Homo sapiens
agtgggagaggaacg

SEQ ID NO: 1221616 - DNA, 15 bp, Homo sapiens
gagtgggagaggaac

SEQ ID NO: 1221617 - DNA, 15 bp, Homo sapiens
cgagtgggagaggaa

SEQ ID NO: 1221618 - DNA, 15 bp, Homo sapiens
gcgagtgggagagga

SEQ ID NO: 1221619 - DNA, 15 bp, Homo sapiens
agcgagtgggagagg

SEQ ID NO: 1221620 - DNA, 15 bp, Homo sapiens
gagcgagtgggagag

SEQ ID NO: 1221621 - DNA, 15 bp, Homo sapiens
agagcgagtgggaga

SEQ ID NO: 1221622 - DNA, 15 bp, Homo sapiens
gagagcgagtgggag

SEQ ID NO: 1221623 - DNA, 15 bp, Homo sapiens
ggagagcgagtggga

SEQ ID NO: 1221624 - DNA, 15 bp, Homo sapiens
gggagagcgagtggg

SEQ ID NO: 1221625 - DNA, 15 bp, Homo sapiens
ggggagagcgagtgg

SEQ ID NO: 1221626 - DNA, 15 bp, Homo sapiens
tggggagagcgagtg

SEQ ID NO: 1221627 - DNA, 15 bp, Homo sapiens
atggggagagcgagt

SEQ ID NO: 1221628 - DNA, 15 bp, Homo sapiens
tatggggagagcgag

SEQ ID NO: 1221629 - DNA, 15 bp, Homo sapiens
ctatggggagagcga

SEQ ID NO: 1221630 - DNA, 15 bp, Homo sapiens
tctatggggagagcg

SEQ ID NO: 1221631 - DNA, 15 bp, Homo sapiens
ctctatggggagagc

SEQ ID NO: 1221632 - DNA, 15 bp, Homo sapiens
cctctatggggagag

SEQ ID NO: 1221633 - DNA, 15 bp, Homo sapiens
ccctctatggggaga

SEQ ID NO: 1221634 - DNA, 15 bp, Homo sapiens
cccctctatggggag

SEQ ID NO: 1221635 - DNA, 15 bp, Homo sapiens
tcccctctatgggga

SEQ ID NO: 1221636 - DNA, 15 bp, Homo sapiens
gtcccctctatgggg

SEQ ID NO: 1221637 - DNA, 15 bp, Homo sapiens
ggtcccctctatggg

SEQ ID NO: 1221638 - DNA, 15 bp, Homo sapiens
gggtcccctctatgg

SEQ ID NO: 1221639 - DNA, 15 bp, Homo sapiens
agggtcccctctatg

SEQ ID NO: 1221640 - DNA, 15 bp, Homo sapiens
cagggtcccctctat

SEQ ID NO: 1221641 - DNA, 15 bp, Homo sapiens
ccagggtcccctcta

SEQ ID NO: 1221642 - DNA, 15 bp, Homo sapiens
tccagggtcccctct

SEQ ID NO: 1221643 - DNA, 15 bp, Homo sapiens
gtccagggtcccctc

SEQ ID NO: 1221644 - DNA, 15 bp, Homo sapiens
ggtccagggtcccct

SEQ ID NO: 1221645 - DNA, 15 bp, Homo sapiens
aggtccagggtcccc

SEQ ID NO: 1221646 - DNA, 15 bp, Homo sapiens
caggtccagggtccc

SEQ ID NO: 1221647 - DNA, 15 bp, Homo sapiens
gcaggtccagggtcc

SEQ ID NO: 1221648 - DNA, 15 bp, Homo sapiens
ggcaggtccagggtc

SEQ ID NO: 1221649 - DNA, 15 bp, Homo sapiens
aggcaggtccagggt

SEQ ID NO: 1221650 - DNA, 15 bp, Homo sapiens
caggcaggtccaggg

SEQ ID NO: 1221651 - DNA, 15 bp, Homo sapiens
ccaggcaggtccagg

SEQ ID NO: 1221652 - DNA, 15 bp, Homo sapiens
cccaggcaggtccag

SEQ ID NO: 1221653 - DNA, 15 bp, Homo sapiens
ccccaggcaggtcca

SEQ ID NO: 1221654 - DNA, 15 bp, Homo sapiens
cccccaggcaggtcc

SEQ ID NO: 1221655 - DNA, 15 bp, Homo sapiens
ccccccaggcaggtc

SEQ ID NO: 1221656 - DNA, 15 bp, Homo sapiens
cccccccaggcaggt

SEQ ID NO: 1221657 - DNA, 15 bp, Homo sapiens
tcccccccaggcagg

SEQ ID NO: 1221658 - DNA, 15 bp, Homo sapiens
gtcccccccaggcag

SEQ ID NO: 1221659 - DNA, 15 bp, Homo sapiens
cgtcccccccaggca

SEQ ID NO: 1221660 - DNA, 15 bp, Homo sapiens
tcgtcccccccaggc

SEQ ID NO: 1221661 - DNA, 15 bp, Homo sapiens
ctcgtcccccccagg

SEQ ID NO: 1221662 - DNA, 15 bp, Homo sapiens
cctcgtcccccccag

SEQ ID NO: 1221663 - DNA, 15 bp, Homo sapiens
tcctcgtccccccca

SEQ ID NO: 1221664 - DNA, 15 bp, Homo sapiens
atcctcgtccccccc

SEQ ID NO: 1221665 - DNA, 15 bp, Homo sapiens
catcctcgtcccccc

SEQ ID NO: 1221666 - DNA, 15 bp, Homo sapiens
ccatcctcgtccccc

SEQ ID NO: 1221667 - DNA, 15 bp, Homo sapiens
cccatcctcgtcccc

SEQ ID NO: 1221668 - DNA, 15 bp, Homo sapiens
ccccatcctcgtccc

SEQ ID NO: 1221669 - DNA, 15 bp, Homo sapiens
tccccatcctcgtcc

SEQ ID NO: 1221670 - DNA, 15 bp, Homo sapiens
atccccatcctcgtc

SEQ ID NO: 1221671 - DNA, 15 bp, Homo sapiens
catccccatcctcgt

SEQ ID NO: 1221672 - DNA, 15 bp, Homo sapiens
acatccccatcctcg

SEQ ID NO: 1221673 - DNA, 15 bp, Homo sapiens
cacatccccatcctc

SEQ ID NO: 1221674 - DNA, 15 bp, Homo sapiens
ccacatccccatcct

SEQ ID NO: 1221675 - DNA, 15 bp, Homo sapiens
gccacatccccatcc

SEQ ID NO: 1221676 - DNA, 15 bp, Homo sapiens
agccacatccccatc

SEQ ID NO: 1221677 - DNA, 15 bp, Homo sapiens
cagccacatccccat

SEQ ID NO: 1221678 - DNA, 15 bp, Homo sapiens
ccagccacatcccca

SEQ ID NO: 1221679 - DNA, 15 bp, Homo sapiens
accagccacatcccc

SEQ ID NO: 1221680 - DNA, 15 bp, Homo sapiens
caccagccacatccc

SEQ ID NO: 1221681 - DNA, 15 bp, Homo sapiens
ccaccagccacatcc

SEQ ID NO: 1221682 - DNA, 15 bp, Homo sapiens
cccaccagccacatc

SEQ ID NO: 1221683 - DNA, 15 bp, Homo sapiens
gcccaccagccacat

SEQ ID NO: 1221684 - DNA, 15 bp, Homo sapiens
tgcccaccagccaca

SEQ ID NO: 1221685 - DNA, 15 bp, Homo sapiens
gtgcccaccagccac

SEQ ID NO: 1221686 - DNA, 15 bp, Homo sapiens
tgtgcccaccagcca

SEQ ID NO: 1221687 - DNA, 15 bp, Homo sapiens
ctgtgcccaccagcc

SEQ ID NO: 1221688 - DNA, 15 bp, Homo sapiens
cctgtgcccaccagc

SEQ ID NO: 1221689 - DNA, 15 bp, Homo sapiens
ccctgtgcccaccag

SEQ ID NO: 1221690 - DNA, 15 bp, Homo sapiens
gccctgtgcccacca

SEQ ID NO: 1221691 - DNA, 15 bp, Homo sapiens
ggccctgtgcccacc

SEQ ID NO: 1221692 - DNA, 15 bp, Homo sapiens
aggccctgtgcccac

SEQ ID NO: 1221693 - DNA, 15 bp, Homo sapiens
gaggccctgtgccca

SEQ ID NO: 1221694 - DNA, 15 bp, Homo sapiens
agaggccctgtgccc

SEQ ID NO: 1221695 - DNA, 15 bp, Homo sapiens
gagaggccctgtgcc

SEQ ID NO: 1221696 - DNA, 15 bp, Homo sapiens
agagaggccctgtgc

SEQ ID NO: 1221697 - DNA, 15 bp, Homo sapiens
cagagaggccctgtg

SEQ ID NO: 1221698 - DNA, 15 bp, Homo sapiens
tcagagaggccctgt

SEQ ID NO: 1221699 - DNA, 15 bp, Homo sapiens
ctcagagaggccctg
